United States Patent Application Publication US 2007/0042381 A1 - sequence listing, part 66

SEQ ID NO: 3005291 - RNA, 20 nt, Human
gacccuugccgucuaccuga

SEQ ID NO: 3005292 - RNA, 23 nt, Human
gacccuugccgucuaccugaggg

SEQ ID NO: 3005293 - RNA, 19 nt, Human
gacccuugccgucuaccug

SEQ ID NO: 3005294 - RNA, 21 nt, Human
gacagagccccacccucagau

SEQ ID NO: 3005295 - RNA, 20 nt, Human
gacagagcuacacaggggaa

SEQ ID NO: 3005296 - RNA, 16 nt, Human
gacagagugagacucu

SEQ ID NO: 3005297 - RNA, 21 nt, Human
gacagagucucacuguugccc

SEQ ID NO: 3005298 - RNA, 19 nt, Human
gacagagugagacucuguc

SEQ ID NO: 3005299 - RNA, 23 nt, Human
gacagaggcagccccauucugcc

SEQ ID NO: 3005300 - RNA, 14 nt, Human
gacagagucucacu

SEQ ID NO: 3005301 - RNA, 22 nt, Human
gaauuucccaaagcagugcaug

SEQ ID NO: 3005302 - RNA, 16 nt, Human
gaauuucccaaagcag

SEQ ID NO: 3005303 - RNA, 18 nt, Human
gaauuucccaaagcagug

SEQ ID NO: 3005304 - RNA, 22 nt, Human
gacacgaauauugcugauggug

SEQ ID NO: 3005305 - RNA, 22 nt, Human
gacagacacaggcccggcucca

SEQ ID NO: 3005306 - RNA, 20 nt, Human
gacagacacaggcccggcuc

SEQ ID NO: 3005307 - RNA, 16 nt, Human
gacacuagaagauuuu

SEQ ID NO: 3005308 - RNA, 17 nt, Human
gacagacacaggcccgg

SEQ ID NO: 3005309 - RNA, 13 nt, Human
gacaguuggguuu

SEQ ID NO: 3005310 - RNA, 17 nt, Human
gacaguuggguuuuuua

SEQ ID NO: 3005311 - RNA, 22 nt, Human
gacaggcauguucucugaggac

SEQ ID NO: 3005312 - RNA, 16 nt, Human
gacaucaacugcauca

SEQ ID NO: 3005313 - RNA, 14 nt, Human
gacaucaacagaua

SEQ ID NO: 3005314 - RNA, 23 nt, Human
gacaucaacugcaucaagaugug

SEQ ID NO: 3005315 - RNA, 23 nt, Human
gacaggaugguucccuugaugaa

SEQ ID NO: 3005316 - RNA, 18 nt, Human
gacaggcaagcaccuccu

SEQ ID NO: 3005317 - RNA, 17 nt, Human
gacaggcaagcaccucc

SEQ ID NO: 3005318 - RNA, 13 nt, Human
gacaggcaagcac

SEQ ID NO: 3005319 - RNA, 19 nt, Human
gacaggcaaugcuggcugu

SEQ ID NO: 3005320 - RNA, 18 nt, Human
gacaggcaaugcuggcug

SEQ ID NO: 3005321 - RNA, 21 nt, Human
gacaggcaagcaccuccugcc

SEQ ID NO: 3005322 - RNA, 20 nt, Human
gacaggcaagcaccuccugc

SEQ ID NO: 3005323 - RNA, 21 nt, Human
gacaggcauguucucugagga

SEQ ID NO: 3005324 - RNA, 20 nt, Human
gacaggcauguucucugagg

SEQ ID NO: 3005325 - RNA, 23 nt, Human
gacaggcaaugcuggcuguuggc

SEQ ID NO: 3005326 - RNA, 18 nt, Human
gaccacugcagaagacag

SEQ ID NO: 3005327 - RNA, 16 nt, Human
gaccacugcagaagac

SEQ ID NO: 3005328 - RNA, 21 nt, Human
gaccagacaccuugacagggc

SEQ ID NO: 3005329 - RNA, 22 nt, Human
gaccagacaccuugacagggca

SEQ ID NO: 3005330 - RNA, 16 nt, Human
gaccacguuucuaaag

SEQ ID NO: 3005331 - RNA, 20 nt, Human
gaccagcaccaucucuccuc

SEQ ID NO: 3005332 - RNA, 21 nt, Human
gaccagcaccaucucuccucc

SEQ ID NO: 3005333 - RNA, 23 nt, Human
gaccagacaccuugacagggcac

SEQ ID NO: 3005334 - RNA, 21 nt, Human
gaccagagcugccaccugccu

SEQ ID NO: 3005335 - RNA, 18 nt, Human
gaccacaaaacuuuucua

SEQ ID NO: 3005336 - RNA, 19 nt, Human
gacccaaaaggcagaagca

SEQ ID NO: 3005337 - RNA, 18 nt, Human
gacccaaaaggcagaagc

SEQ ID NO: 3005338 - RNA, 12 nt, Human
gacccacugcuu

SEQ ID NO: 3005339 - RNA, 19 nt, Human
gacccaugcugcccuguga

SEQ ID NO: 3005340 - RNA, 20 nt, Human
gacccaugcugcccugugag

SEQ ID NO: 3005341 - RNA, 18 nt, Human
gacccaugcugcccugug

SEQ ID NO: 3005342 - RNA, 16 nt, Human
gacccugaggcccaga

SEQ ID NO: 3005343 - RNA, 17 nt, Human
gacccugcccugugggc

SEQ ID NO: 3005344 - RNA, 20 nt, Human
gacccugcccugugggcccc

SEQ ID NO: 3005345 - RNA, 22 nt, Human
gacccugcccugugggccccca

SEQ ID NO: 3005346 - RNA, 11 nt, Human
gacccugaggc

SEQ ID NO: 3005347 - RNA, 12 nt, Human
gacccugaggcc

SEQ ID NO: 3005348 - RNA, 10 nt, Human
gacccugagg

SEQ ID NO: 3005349 - RNA, 17 nt, Human
gacccaugcugcccugu

SEQ ID NO: 3005350 - RNA, 15 nt, Human
gaccccacuccggcc

SEQ ID NO: 3005351 - RNA, 22 nt, Human
gaccccacuccggcccuccaga

SEQ ID NO: 3005352 - RNA, 17 nt, Human
gaccccacuccggcccu

SEQ ID NO: 3005353 - RNA, 14 nt, Human
cuuuuugaaauguc

SEQ ID NO: 3005354 - RNA, 15 nt, Human
cuuuuucaauaacug

SEQ ID NO: 3005355 - RNA, 20 nt, Human
cuuuuguucuugguuuguaa

SEQ ID NO: 3005356 - RNA, 22 nt, Human
cuuuuguucuugguuuguaaau

SEQ ID NO: 3005357 - RNA, 21 nt, Human
cuuuguuuguugucagcugaa

SEQ ID NO: 3005358 - RNA, 15 nt, Human
cuuuucuguuugcua

SEQ ID NO: 3005359 - RNA, 19 nt, Human
gaaaauaacaauaaaagac

SEQ ID NO: 3005360 - RNA, 14 nt, Human
gaaaaguauguuag

SEQ ID NO: 3005361 - RNA, 20 nt, Human
gaaaaguauguuagugcaaa

SEQ ID NO: 3005362 - RNA, 19 nt, Human
gaaaacaugcuacacacug

SEQ ID NO: 3005363 - RNA, 20 nt, Human
gaaaagggacugcugggagg

SEQ ID NO: 3005364 - RNA, 18 nt, Human
gaaaacaugcuacacacu

SEQ ID NO: 3005365 - RNA, 16 nt, Human
gaaaacaugcuacaca

SEQ ID NO: 3005366 - RNA, 20 nt, Human
gaaaacacuguucucugccc

SEQ ID NO: 3005367 - RNA, 21 nt, Human
gaaaacacuguucucugcccu

SEQ ID NO: 3005368 - RNA, 18 nt, Human
gaaaacacuguucucugc

SEQ ID NO: 3005369 - RNA, 19 nt, Human
gaaaacacuguucucugcc

SEQ ID NO: 3005370 - RNA, 16 nt, Human
cuuuuuuagaguugau

SEQ ID NO: 3005371 - RNA, 19 nt, Human
cuuuccucaaaacuucaga

SEQ ID NO: 3005372 - RNA, 13 nt, Human
cuuucugaaauaa

SEQ ID NO: 3005373 - RNA, 14 nt, Human
cuuugcuugaaaga

SEQ ID NO: 3005374 - RNA, 23 nt, Human
cuuuggaaagacuuuuccaaccc

SEQ ID NO: 3005375 - RNA, 12 nt, Human
cuuuggaaagac

SEQ ID NO: 3005376 - RNA, 16 nt, Human
cuuuguucuggcucuu

SEQ ID NO: 3005377 - RNA, 21 nt, Human
cuuuguucuggcucuuccagg

SEQ ID NO: 3005378 - RNA, 12 nt, Human
cuuugugauuuu

SEQ ID NO: 3005379 - RNA, 19 nt, Human
cuuugugaggaagccgcug

SEQ ID NO: 3005380 - RNA, 13 nt, Human
cuuuguggcuucc

SEQ ID NO: 3005381 - RNA, 23 nt, Human
cuuugugaggaagccgcuggggc

SEQ ID NO: 3005382 - RNA, 23 nt, Human
cuuugggaggccaaggugggagg

SEQ ID NO: 3005383 - RNA, 16 nt, Human
cuuguacacucauuca

SEQ ID NO: 3005384 - RNA, 17 nt, Human
cuuguacuuuauuuucu

SEQ ID NO: 3005385 - RNA, 15 nt, Human
cuugguuuguaaauu

SEQ ID NO: 3005386 - RNA, 14 nt, Human
cuugguuuguaaau

SEQ ID NO: 3005387 - RNA, 16 nt, Human
cuuggggcugaugcag

SEQ ID NO: 3005388 - RNA, 18 nt, Human
cuuggggcugaugcaguu

SEQ ID NO: 3005389 - RNA, 16 nt, Human
cuuggacucauuuuaa

SEQ ID NO: 3005390 - RNA, 18 nt, Human
cuugggccacugugaaga

SEQ ID NO: 3005391 - RNA, 20 nt, Human
cuugggccacugugaagaga

SEQ ID NO: 3005392 - RNA, 16 nt, Human
cuuguugaggguaugu

SEQ ID NO: 3005393 - RNA, 22 nt, Human
cuuguugaggguauguuuuaua

SEQ ID NO: 3005394 - RNA, 21 nt, Human
cuuguugaggguauguuuuau

SEQ ID NO: 3005395 - RNA, 20 nt, Human
cuuguugaggguauguuuua

SEQ ID NO: 3005396 - RNA, 20 nt, Human
cuuuaccuuuuuuauacaua

SEQ ID NO: 3005397 - RNA, 19 nt, Human
cuuuaccuuuuuuauacau

SEQ ID NO: 3005398 - RNA, 17 nt, Human
cuuuaccuuuuuuauac

SEQ ID NO: 3005399 - RNA, 22 nt, Human
cuugugguuauaacuuaaugaa

SEQ ID NO: 3005400 - RNA, 16 nt, Human
cuuguuaagauaguua

SEQ ID NO: 3005401 - RNA, 16 nt, Human
cuuguggucccacccc

SEQ ID NO: 3005402 - RNA, 19 nt, Human
cuuguggucccaccccaca

SEQ ID NO: 3005403 - RNA, 22 nt, Human
cuugucggccccaccagugccu

SEQ ID NO: 3005404 - RNA, 21 nt, Human
cuugucggccccaccagugcc

SEQ ID NO: 3005405 - RNA, 23 nt, Human
cuugucggccccaccagugccuc

SEQ ID NO: 3005406 - RNA, 20 nt, Human
cuugucggccccaccagugc

SEQ ID NO: 3005407 - RNA, 15 nt, Human
cuugucggccccacc

SEQ ID NO: 3005408 - RNA, 15 nt, Human
cuuguggucccaccc

SEQ ID NO: 3005409 - RNA, 22 nt, Human
cuugcagcucuccccuucucug

SEQ ID NO: 3005410 - RNA, 23 nt, Human
cuugcaucaauuuuucuuauuuc

SEQ ID NO: 3005411 - RNA, 21 nt, Human
cuugcagacucuacagaggcc

SEQ ID NO: 3005412 - RNA, 20 nt, Human
cuugcagacucuacagaggc

SEQ ID NO: 3005413 - RNA, 20 nt, Human
cuugaguugauucagcucug

SEQ ID NO: 3005414 - RNA, 18 nt, Human
cuugaguugauucagcuc

SEQ ID NO: 3005415 - RNA, 19 nt, Human
cuugaguugauucagcucu

SEQ ID NO: 3005416 - RNA, 18 nt, Human
cuugcaauggcagccuug

SEQ ID NO: 3005417 - RNA, 17 nt, Human
cuugcaauggcagccuu

SEQ ID NO: 3005418 - RNA, 16 nt, Human
cuugcaauggcagccu

SEQ ID NO: 3005419 - RNA, 15 nt, Human
cuugcaauggcagcc

SEQ ID NO: 3005420 - RNA, 12 nt, Human
cuugagccuggg

SEQ ID NO: 3005421 - RNA, 15 nt, Human
cuugagccugggagg

SEQ ID NO: 3005422 - RNA, 17 nt, Human
cuugaggguugggcugg

SEQ ID NO: 3005423 - RNA, 15 nt, Human
cuugaggguugggcu

SEQ ID NO: 3005424 - RNA, 15 nt, Human
cuucuggauauagcu

SEQ ID NO: 3005425 - RNA, 22 nt, Human
cuugcccuguuaaaagaugaaa

SEQ ID NO: 3005426 - RNA, 22 nt, Human
cuugcucugcugacagacacag

SEQ ID NO: 3005427 - RNA, 20 nt, Human
cuugcuugauuguauggugg

SEQ ID NO: 3005428 - RNA, 14 nt, Human
cuuggaagcuccgc

SEQ ID NO: 3005429 - RNA, 20 nt, Human
cuuggaagcuccgcuuucua

SEQ ID NO: 3005430 - RNA, 14 nt, Human
cuugcccuguuaaa

SEQ ID NO: 3005431 - RNA, 18 nt, Human
cuugcccuggugccucac

SEQ ID NO: 3005432 - RNA, 18 nt, Human
cuugcccagccuggaugc

SEQ ID NO: 3005433 - RNA, 16 nt, Human
cuugccaucccucccu

SEQ ID NO: 3005434 - RNA, 15 nt, Human
cuugccaucccuccc

SEQ ID NO: 3005435 - RNA, 17 nt, Human
cuugccaucccucccuc

SEQ ID NO: 3005436 - RNA, 14 nt, Human
cuugccaucccucc

SEQ ID NO: 3005437 - RNA, 13 nt, Human
cuugcaugaggcu

SEQ ID NO: 3005438 - RNA, 14 nt, Human
cuugcaugaggcua

SEQ ID NO: 3005439 - RNA, 14 nt, Human
cuuauuuaaauaga

SEQ ID NO: 3005440 - RNA, 13 nt, Human
cuuauuuaaauag

SEQ ID NO: 3005441 - RNA, 15 nt, Human
cuuauuuaaugaaag

SEQ ID NO: 3005442 - RNA, 19 nt, Human
cuuauuuaaauagaugaca

SEQ ID NO: 3005443 - RNA, 18 nt, Human
cuuauuuaaauagaugac

SEQ ID NO: 3005444 - RNA, 17 nt, Human
cuuaucuuacgaaaaaa

SEQ ID NO: 3005445 - RNA, 13 nt, Human
cuuauaauuuaaa

SEQ ID NO: 3005446 - RNA, 17 nt, Human
cuuagguuggcaaaaag

SEQ ID NO: 3005447 - RNA, 21 nt, Human
cuuaggguuaugauuaaguaa

SEQ ID NO: 3005448 - RNA, 14 nt, Human
cuuauaauuuaaaa

SEQ ID NO: 3005449 - RNA, 19 nt, Human
cuuauaggaauugacccac

SEQ ID NO: 3005450 - RNA, 14 nt, Human
cuuagacccucaug

SEQ ID NO: 3005451 - RNA, 19 nt, Human
cuuagaugcaguucugaag

SEQ ID NO: 3005452 - RNA, 17 nt, Human
cuuagacagucccugcc

SEQ ID NO: 3005453 - RNA, 18 nt, Human
cuuagacagucccugcca

SEQ ID NO: 3005454 - RNA, 19 nt, Human
cuuagacagucccugccaa

SEQ ID NO: 3005455 - RNA, 11 nt, Human
cuuagacaguc

SEQ ID NO: 3005456 - RNA, 15 nt, Human
cuuagacagucccug

SEQ ID NO: 3005457 - RNA, 16 nt, Human
cuuagacagucccugc

SEQ ID NO: 3005458 - RNA, 14 nt, Human
cuuagacagucccu

SEQ ID NO: 3005459 - RNA, 15 nt, Human
cuuagaagucacaca

SEQ ID NO: 3005460 - RNA, 19 nt, Human
cuuacuaguuucccuugca

SEQ ID NO: 3005461 - RNA, 15 nt, Human
cuuacgugaguccug

SEQ ID NO: 3005462 - RNA, 22 nt, Human
cuuacgaaaaaaugguagcauu

SEQ ID NO: 3005463 - RNA, 16 nt, Human
cuuacuguacaugaaa

SEQ ID NO: 3005464 - RNA, 13 nt, Human
cuuacuguacaug

SEQ ID NO: 3005465 - RNA, 19 nt, Human
cuuaauaaacuguggugcu

SEQ ID NO: 3005466 - RNA, 23 nt, Human
cuuaaugagacuuuaaaagcauu

SEQ ID NO: 3005467 - RNA, 14 nt, Human
cuuaaucuaaaugg

SEQ ID NO: 3005468 - RNA, 18 nt, Human
cuuaaugccacuaaauug

SEQ ID NO: 3005469 - RNA, 18 nt, Human
cuuaagaaauuuguggaa

SEQ ID NO: 3005470 - RNA, 22 nt, Human
cuuaacuucacauauugauuuc

SEQ ID NO: 3005471 - RNA, 17 nt, Human
cuuaacuucacauauug

SEQ ID NO: 3005472 - RNA, 16 nt, Human
cuuaacuucacauauu

SEQ ID NO: 3005473 - RNA, 15 nt, Human
cuuaacuucacauau

SEQ ID NO: 3005474 - RNA, 14 nt, Human
cuuaacuucacaua

SEQ ID NO: 3005475 - RNA, 12 nt, Human
cuuaacuucaca

SEQ ID NO: 3005476 - RNA, 13 nt, Human
cuguuuucucuug

SEQ ID NO: 3005477 - RNA, 14 nt, Human
cuguuuucucuuga

SEQ ID NO: 3005478 - RNA, 21 nt, Human
cuguuuuauuuuaauucaguu

SEQ ID NO: 3005479 - RNA, 21 nt, Human
cuguuuguuucugaaagggac

SEQ ID NO: 3005480 - RNA, 23 nt, Human
cuguuuguuucugaaagggacgc

SEQ ID NO: 3005481 - RNA, 19 nt, Human
cuguuuuauaauuuuguga

SEQ ID NO: 3005482 - RNA, 17 nt, Human
cuguuuucucuugagag

SEQ ID NO: 3005483 - RNA, 12 nt, Human
cuguuuagauaa

SEQ ID NO: 3005484 - RNA, 18 nt, Human
cuguuuguuucugaaagg

SEQ ID NO: 3005485 - RNA, 18 nt, Human
cuucggccuccauccuga

SEQ ID NO: 3005486 - RNA, 17 nt, Human
cuucggccuccauccug

SEQ ID NO: 3005487 - RNA, 20 nt, Human
cuucgggaggucgaggcagg

SEQ ID NO: 3005488 - RNA, 21 nt, Human
cuucgggaggucgaggcagga

SEQ ID NO: 3005489 - RNA, 19 nt, Human
cuuccuuggacucauuuua

SEQ ID NO: 3005490 - RNA, 15 nt, Human
cuucgcuccuguguc

SEQ ID NO: 3005491 - RNA, 14 nt, Human
cuucgcuccugugu

SEQ ID NO: 3005492 - RNA, 13 nt, Human
cuucgcuccugug

SEQ ID NO: 3005493 - RNA, 22 nt, Human
cuucuccuucaccuuugucccc

SEQ ID NO: 3005494 - RNA, 21 nt, Human
cuucucccccacccccuaggg

SEQ ID NO: 3005495 - RNA, 19 nt, Human
cuucuccuucaccuuuguc

SEQ ID NO: 3005496 - RNA, 15 nt, Human
cuucuccacccugcu

SEQ ID NO: 3005497 - RNA, 14 nt, Human
cuucuccacccugc

SEQ ID NO: 3005498 - RNA, 14 nt, Human
cuucuccaggcugu

SEQ ID NO: 3005499 - RNA, 17 nt, Human
cuucuccaggcuguauc

SEQ ID NO: 3005500 - RNA, 21 nt, Human
cuucugccauauucuguuggc

SEQ ID NO: 3005501 - RNA, 20 nt, Human
cuucucuacccaucuuaaaa

SEQ ID NO: 3005502 - RNA, 17 nt, Human
cuucugccauauucugu

SEQ ID NO: 3005503 - RNA, 15 nt, Human
cuucugccauauucu

SEQ ID NO: 3005504 - RNA, 17 nt, Human
cuucugcuucagccucc

SEQ ID NO: 3005505 - RNA, 16 nt, Human
cuucugcuucagccuc

SEQ ID NO: 3005506 - RNA, 18 nt, Human
cuucugcuucagccuccc

SEQ ID NO: 3005507 - RNA, 19 nt, Human
cuuccagauccuggaaauc

SEQ ID NO: 3005508 - RNA, 22 nt, Human
cuuccaggggugggacacccug

SEQ ID NO: 3005509 - RNA, 24 nt, Human
cuuccaggggugggacacccugug

SEQ ID NO: 3005510 - RNA, 15 nt, Human
cuuccagugaggcuc

SEQ ID NO: 3005511 - RNA, 14 nt, Human
cuuccagugaggcu

SEQ ID NO: 3005512 - RNA, 18 nt, Human
cuucagcgguuuauauaa

SEQ ID NO: 3005513 - RNA, 16 nt, Human
cuucagcgguuuauau

SEQ ID NO: 3005514 - RNA, 11 nt, Human
cuucagcugac

SEQ ID NO: 3005515 - RNA, 22 nt, Human
cuuccacaagagcccaggccuc

SEQ ID NO: 3005516 - RNA, 23 nt, Human
cuuccacaagagcccaggccucc

SEQ ID NO: 3005517 - RNA, 13 nt, Human
cuucagugccuua

SEQ ID NO: 3005518 - RNA, 14 nt, Human
cuucagugccuuau

SEQ ID NO: 3005519 - RNA, 18 nt, Human
cuucauuuccugugucuu

SEQ ID NO: 3005520 - RNA, 11 nt, Human
cuucagugccu

SEQ ID NO: 3005521 - RNA, 12 nt, Human
cuucagugccuu

SEQ ID NO: 3005522 - RNA, 22 nt, Human
cucccuuccuaugcuguucacu

SEQ ID NO: 3005523 - RNA, 13 nt, Human
cucccuuccucuu

SEQ ID NO: 3005524 - RNA, 14 nt, Human
cucccuuccucuuu

SEQ ID NO: 3005525 - RNA, 16 nt, Human
cucccuucucuucaca

SEQ ID NO: 3005526 - RNA, 17 nt, Human
cucccuuggauuguccc

SEQ ID NO: 3005527 - RNA, 12 nt, Human
cucccuuucaac

SEQ ID NO: 3005528 - RNA, 13 nt, Human
cucccuuucaaca

SEQ ID NO: 3005529 - RNA, 22 nt, Human
cuccuaggacccgucuccagcu

SEQ ID NO: 3005530 - RNA, 21 nt, Human
cuccuaggacccgucuccagc

SEQ ID NO: 3005531 - RNA, 20 nt, Human
cuccuaggacccgucuccag

SEQ ID NO: 3005532 - RNA, 14 nt, Human
cucccaucucacac

SEQ ID NO: 3005533 - RNA, 15 nt, Human
cucccaucucacaca

SEQ ID NO: 3005534 - RNA, 18 nt, Human
cucccaucucacacauga

SEQ ID NO: 3005535 - RNA, 10 nt, Human
cucccuuccu

SEQ ID NO: 3005536 - RNA, 23 nt, Human
cucccuucccaccucucucacuc

SEQ ID NO: 3005537 - RNA, 12 nt, Human
cuccucagaucu

SEQ ID NO: 3005538 - RNA, 14 nt, Human
cuccucagaucuuc

SEQ ID NO: 3005539 - RNA, 13 nt, Human
cuccugcaggcag

SEQ ID NO: 3005540 - RNA, 14 nt, Human
cuccugcaggcagc

SEQ ID NO: 3005541 - RNA, 12 nt, Human
cuccugcaggca

SEQ ID NO: 3005542 - RNA, 13 nt, Human
cucggagaagagc

SEQ ID NO: 3005543 - RNA, 20 nt, Human
cucggagaagagcuguucac

SEQ ID NO: 3005544 - RNA, 12 nt, Human
cucggagaagag

SEQ ID NO: 3005545 - RNA, 19 nt, Human
cucggaccccacuccggcc

SEQ ID NO: 3005546 - RNA, 21 nt, Human
cucggaccccacuccggcccu

SEQ ID NO: 3005547 - RNA, 17 nt, Human
cucuaaauucuuucauu

SEQ ID NO: 3005548 - RNA, 13 nt, Human
cucuaaauucuuu

SEQ ID NO: 3005549 - RNA, 13 nt, Human
cucgcgacaaugc

SEQ ID NO: 3005550 - RNA, 15 nt, Human
cucgcgacaaugcaa

SEQ ID NO: 3005551 - RNA, 16 nt, Human
cucgaguuacagacaa

SEQ ID NO: 3005552 - RNA, 20 nt, Human
cucgaguuacagacaaagcg

SEQ ID NO: 3005553 - RNA, 20 nt, Human
cuccuucuguccuacucugu

SEQ ID NO: 3005554 - RNA, 15 nt, Human
cuccuucuguccuac

SEQ ID NO: 3005555 - RNA, 14 nt, Human
cuccuucuguccua

SEQ ID NO: 3005556 - RNA, 13 nt, Human
cuccuucaccuuu

SEQ ID NO: 3005557 - RNA, 16 nt, Human
cucgaacuggcugcaa

SEQ ID NO: 3005558 - RNA, 11 nt, Human
cuccuucuucc

SEQ ID NO: 3005559 - RNA, 21 nt, Human
cuccuugaaaacacuguucuc

SEQ ID NO: 3005560 - RNA, 14 nt, Human
cuccuucaccuuug

SEQ ID NO: 3005561 - RNA, 16 nt, Human
cuccuucaccuuuguc

SEQ ID NO: 3005562 - RNA, 19 nt, Human
cuccuucaccuuugucccc

SEQ ID NO: 3005563 - RNA, 21 nt, Human
cuccuucaccuuuguccccac

SEQ ID NO: 3005564 - RNA, 15 nt, Human
cuccugcaggcagcc

SEQ ID NO: 3005565 - RNA, 21 nt, Human
cuccugcaggcagccaggcca

SEQ ID NO: 3005566 - RNA, 22 nt, Human
cuccugcaggcagccaggccac

SEQ ID NO: 3005567 - RNA, 11 nt, Human
cuccugugugu

SEQ ID NO: 3005568 - RNA, 23 nt, Human
cuccugugucuugcaauggcagc

SEQ ID NO: 3005569 - RNA, 15 nt, Human
cuccugugucuugca

SEQ ID NO: 3005570 - RNA, 13 nt, Human
cucauucauuacu

SEQ ID NO: 3005571 - RNA, 17 nt, Human
cucauucauuacuaaaa

SEQ ID NO: 3005572 - RNA, 12 nt, Human
cucauucuucug

SEQ ID NO: 3005573 - RNA, 14 nt, Human
cucauucuucugua

SEQ ID NO: 3005574 - RNA, 13 nt, Human
cucauucuucugu

SEQ ID NO: 3005575 - RNA, 13 nt, Human
cucauugaccuga

SEQ ID NO: 3005576 - RNA, 15 nt, Human
cucauugaccugagg

SEQ ID NO: 3005577 - RNA, 23 nt, Human
cucauucuucuguacgucugaca

SEQ ID NO: 3005578 - RNA, 16 nt, Human
cucauugaccugaggc

SEQ ID NO: 3005579 - RNA, 14 nt, Human
cucauauuuucaug

SEQ ID NO: 3005580 - RNA, 21 nt, Human
cucauuagcauuuugcuaaau

SEQ ID NO: 3005581 - RNA, 18 nt, Human
cucauuaggauggcuagu

SEQ ID NO: 3005582 - RNA, 17 nt, Human
cucauuaggauggcuag

SEQ ID NO: 3005583 - RNA, 22 nt, Human
cucagguggggucacucuggca

SEQ ID NO: 3005584 - RNA, 23 nt, Human
cucagguggggucacucuggcag

SEQ ID NO: 3005585 - RNA, 16 nt, Human
cucaggugucccugca

SEQ ID NO: 3005586 - RNA, 15 nt, Human
cucaggugucccugc

SEQ ID NO: 3005587 - RNA, 14 nt, Human
cucagggucccugg

SEQ ID NO: 3005588 - RNA, 12 nt, Human
cucagggucccu

SEQ ID NO: 3005589 - RNA, 23 nt, Human
cuaaaagguaugcaaucaaaucu

SEQ ID NO: 3005590 - RNA, 19 nt, Human
cucauaguaugguggcugg

SEQ ID NO: 3005591 - RNA, 18 nt, Human
cucauaguaugguggcug

SEQ ID NO: 3005592 - RNA, 18 nt, Human
cucaggugucccugcacu

SEQ ID NO: 3005593 - RNA, 17 nt, Human
cucaggugucccugcac

SEQ ID NO: 3005594 - RNA, 19 nt, Human
cucaggugucccugcacuu

SEQ ID NO: 3005595 - RNA, 17 nt, Human
cucccaggcauucccca

SEQ ID NO: 3005596 - RNA, 19 nt, Human
cucccaggcauuccccagg

SEQ ID NO: 3005597 - RNA, 20 nt, Human
cucccaggcauuccccagga

SEQ ID NO: 3005598 - RNA, 21 nt, Human
cucccaggcauuccccaggag

SEQ ID NO: 3005599 - RNA, 17 nt, Human
cucccagucauuuaaua

SEQ ID NO: 3005600 - RNA, 22 nt, Human
cucccaggcauuccccaggagg

SEQ ID NO: 3005601 - RNA, 22 nt, Human
cucccaaggggcccaaauucuu

SEQ ID NO: 3005602 - RNA, 21 nt, Human
cucccaaggggcccaaauucu

SEQ ID NO: 3005603 - RNA, 15 nt, Human
cucccaggcauuccc

SEQ ID NO: 3005604 - RNA, 14 nt, Human
cuccaugugggcua

SEQ ID NO: 3005605 - RNA, 23 nt, Human
cuccauccugaggcuccacuugg

SEQ ID NO: 3005606 - RNA, 20 nt, Human
cuccauccugaggcuccacu

SEQ ID NO: 3005607 - RNA, 21 nt, Human
cuccauccugaggcuccacuu

SEQ ID NO: 3005608 - RNA, 11 nt, Human
cuccaggcucc

SEQ ID NO: 3005609 - RNA, 13 nt, Human
cuccagcuguuca

SEQ ID NO: 3005610 - RNA, 18 nt, Human
cuccagcuguucagcugg

SEQ ID NO: 3005611 - RNA, 19 nt, Human
cuccagcuguucagcuggu

SEQ ID NO: 3005612 - RNA, 20 nt, Human
cuccagcucaccagccccag

SEQ ID NO: 3005613 - RNA, 19 nt, Human
cuccagcucaccagcccca

SEQ ID NO: 3005614 - RNA, 15 nt, Human
cuccaccugccaggg

SEQ ID NO: 3005615 - RNA, 17 nt, Human
cuccaccugccagggac

SEQ ID NO: 3005616 - RNA, 18 nt, Human
cuccaccugccagggaca

SEQ ID NO: 3005617 - RNA, 21 nt, Human
cuccaccugccagggacagag

SEQ ID NO: 3005618 - RNA, 17 nt, Human
cuccaccucccugcaau

SEQ ID NO: 3005619 - RNA, 16 nt, Human
cuccaccucccugcaa

SEQ ID NO: 3005620 - RNA, 15 nt, Human
cuccaccucccugca

SEQ ID NO: 3005621 - RNA, 14 nt, Human
cuccaccucccugc

SEQ ID NO: 3005622 - RNA, 12 nt, Human
cuccacccugcu

SEQ ID NO: 3005623 - RNA, 11 nt, Human
cuccacccugc

SEQ ID NO: 3005624 - RNA, 16 nt, Human
cugaacuucagagcau

SEQ ID NO: 3005625 - RNA, 15 nt, Human
cugaacuuggcgcug

SEQ ID NO: 3005626 - RNA, 16 nt, Human
cugaacuuggcgcugc

SEQ ID NO: 3005627 - RNA, 21 nt, Human
cugaacuuggcgcugccccug

SEQ ID NO: 3005628 - RNA, 21 nt, Human
cugaagacucauucuucugua

SEQ ID NO: 3005629 - RNA, 19 nt, Human
cugaagacucauucuucug

SEQ ID NO: 3005630 - RNA, 19 nt, Human
cucuuuggucuacacugug

SEQ ID NO: 3005631 - RNA, 21 nt, Human
cucuuuggucuacacugugcu

SEQ ID NO: 3005632 - RNA, 18 nt, Human
cucuuugggccuggcucc

SEQ ID NO: 3005633 - RNA, 21 nt, Human
cugaaccuggguaacuaggga

SEQ ID NO: 3005634 - RNA, 16 nt, Human
cugaauacagaggcaa

SEQ ID NO: 3005635 - RNA, 24 nt, Human
cugaagucuuuguacagacaacaa

SEQ ID NO: 3005636 - RNA, 15 nt, Human
cugaagucacacagu

SEQ ID NO: 3005637 - RNA, 14 nt, Human
cugaagucacacag

SEQ ID NO: 3005638 - RNA, 18 nt, Human
cugaauuuaaauagcuuu

SEQ ID NO: 3005639 - RNA, 14 nt, Human
cugaauuuaaauag

SEQ ID NO: 3005640 - RNA, 23 nt, Human
cugaauuuaaauagcuuuuuucu

SEQ ID NO: 3005641 - RNA, 19 nt, Human
cugacagacacaggcccgg

SEQ ID NO: 3005642 - RNA, 21 nt, Human
cugacagacacaggcccggcu

SEQ ID NO: 3005643 - RNA, 11 nt, Human
cugacaggcaa

SEQ ID NO: 3005644 - RNA, 19 nt, Human
cugacaggcaaugcuggcu

SEQ ID NO: 3005645 - RNA, 18 nt, Human
cugacaggcaaugcuggc

SEQ ID NO: 3005646 - RNA, 17 nt, Human
cugacaggcaaugcugg

SEQ ID NO: 3005647 - RNA, 16 nt, Human
cugacaggcaaugcug

SEQ ID NO: 3005648 - RNA, 20 nt, Human
cugacaggcaaugcuggcug

SEQ ID NO: 3005649 - RNA, 17 nt, Human
cugacauuguuggccaa

SEQ ID NO: 3005650 - RNA, 11 nt, Human
cugacccacug

SEQ ID NO: 3005651 - RNA, 17 nt, Human
cucuuuccaucuacccu

SEQ ID NO: 3005652 - RNA, 15 nt, Human
cucuuuggacacuca

SEQ ID NO: 3005653 - RNA, 18 nt, Human
cucuuuggacacucacac

SEQ ID NO: 3005654 - RNA, 17 nt, Human
cucuuucuauuguuucu

SEQ ID NO: 3005655 - RNA, 15 nt, Human
cucuugaccucaggu

SEQ ID NO: 3005656 - RNA, 13 nt, Human
cucuugaccucag

SEQ ID NO: 3005657 - RNA, 16 nt, Human
cucuugaccucaggug

SEQ ID NO: 3005658 - RNA, 18 nt, Human
cucuugguccugcugcag

SEQ ID NO: 3005659 - RNA, 19 nt, Human
cucuugguccugcugcagu

SEQ ID NO: 3005660 - RNA, 22 nt, Human
cucuuccaggcugggagagccu

SEQ ID NO: 3005661 - RNA, 21 nt, Human
cucuuccaggcugggagagcc

SEQ ID NO: 3005662 - RNA, 23 nt, Human
cucuuccaggcugggagagccuu

SEQ ID NO: 3005663 - RNA, 12 nt, Human
cucuucuccagg

SEQ ID NO: 3005664 - RNA, 24 nt, Human
cucuuaaaacccaagugccuuagc

SEQ ID NO: 3005665 - RNA, 13 nt, Human
cucuuaaaaccca

SEQ ID NO: 3005666 - RNA, 17 nt, Human
cucuggcagcucagaga

SEQ ID NO: 3005667 - RNA, 18 nt, Human
cucuggcagcucagagag

SEQ ID NO: 3005668 - RNA, 19 nt, Human
cucuggcagcucagagagg

SEQ ID NO: 3005669 - RNA, 23 nt, Human
cucugcauacucauuaggauggc

SEQ ID NO: 3005670 - RNA, 22 nt, Human
cucugcaagaauugaagcagga

SEQ ID NO: 3005671 - RNA, 14 nt, Human
cucugcccuccaag

SEQ ID NO: 3005672 - RNA, 15 nt, Human
cucugcccuccaaga

SEQ ID NO: 3005673 - RNA, 16 nt, Human
cucugcccuccaagac

SEQ ID NO: 3005674 - RNA, 23 nt, Human
cucugcccuccaagaccuucucc

SEQ ID NO: 3005675 - RNA, 14 nt, Human
cucugccucugaca

SEQ ID NO: 3005676 - RNA, 23 nt, Human
cucugcggagcacacuggcucac

SEQ ID NO: 3005677 - RNA, 21 nt, Human
cucugcggagcacacuggcuc

SEQ ID NO: 3005678 - RNA, 19 nt, Human
cucugcggagcacacuggc

SEQ ID NO: 3005679 - RNA, 18 nt, Human
cucugcggagcacacugg

SEQ ID NO: 3005680 - RNA, 17 nt, Human
cucugcggagcacacug

SEQ ID NO: 3005681 - RNA, 13 nt, Human
cucuccagccccu

SEQ ID NO: 3005682 - RNA, 12 nt, Human
cucuccagcccc

SEQ ID NO: 3005683 - RNA, 18 nt, Human
cucucccaucacuucccu

SEQ ID NO: 3005684 - RNA, 14 nt, Human
cucucccaucacuu

SEQ ID NO: 3005685 - RNA, 20 nt, Human
cucucccaucacuucccuac

SEQ ID NO: 3005686 - RNA, 13 nt, Human
cucucccaucacu

SEQ ID NO: 3005687 - RNA, 23 nt, Human
cucucaggccagcugcuugggcu

SEQ ID NO: 3005688 - RNA, 22 nt, Human
cucucaggccagcugcuugggc

SEQ ID NO: 3005689 - RNA, 15 nt, Human
cucucucacuccuug

SEQ ID NO: 3005690 - RNA, 16 nt, Human
cucucucacuccuuga

SEQ ID NO: 3005691 - RNA, 12 nt, Human
cucucucaggcc

SEQ ID NO: 3005692 - RNA, 14 nt, Human
cucucucacuccuu

SEQ ID NO: 3005693 - RNA, 15 nt, Human
cucuccuguaccucu

SEQ ID NO: 3005694 - RNA, 14 nt, Human
cucuccuguaccuc

SEQ ID NO: 3005695 - RNA, 13 nt, Human
cucuccuguaccu

SEQ ID NO: 3005696 - RNA, 21 nt, Human
cucuccugggcagcugccucc

SEQ ID NO: 3005697 - RNA, 18 nt, Human
cucuccuguaccucuuga

SEQ ID NO: 3005698 - RNA, 17 nt, Human
cucuccuguaccucuug

SEQ ID NO: 3005699 - RNA, 22 nt, Human
cucuccuguaccucuugagccu

SEQ ID NO: 3005700 - RNA, 20 nt, Human
cuggacacuucacgcccuug

SEQ ID NO: 3005701 - RNA, 22 nt, Human
cuggacacuucacgcccuuggc

SEQ ID NO: 3005702 - RNA, 15 nt, Human
cuggaaugcaguggu

SEQ ID NO: 3005703 - RNA, 14 nt, Human
cuggaaugcagugg

SEQ ID NO: 3005704 - RNA, 23 nt, Human
cuggaauaauccuaaacauauga

SEQ ID NO: 3005705 - RNA, 15 nt, Human
cuggaagcacagcuu

SEQ ID NO: 3005706 - RNA, 18 nt, Human
cuggaagcacagcuucau

SEQ ID NO: 3005707 - RNA, 14 nt, Human
cuggaagcacagcu

SEQ ID NO: 3005708 - RNA, 13 nt, Human
cugcugaaacaac

SEQ ID NO: 3005709 - RNA, 16 nt, Human
cuggagcuagaauuug

SEQ ID NO: 3005710 - RNA, 22 nt, Human
cuggagcuagaauuugauaugu

SEQ ID NO: 3005711 - RNA, 17 nt, Human
cuggagcuagaauuuga

SEQ ID NO: 3005712 - RNA, 22 nt, Human
cuggcacuauaauguaagcucu

SEQ ID NO: 3005713 - RNA, 23 nt, Human
cuggcacuauaauguaagcucua

SEQ ID NO: 3005714 - RNA, 13 nt, Human
cuggcacugcuuc

SEQ ID NO: 3005715 - RNA, 14 nt, Human
cuggcacugcuucc

SEQ ID NO: 3005716 - RNA, 18 nt, Human
cuggcacaguuuucugag

SEQ ID NO: 3005717 - RNA, 19 nt, Human
cuggcacaguuuucugaga

SEQ ID NO: 3005718 - RNA, 19 nt, Human
cuggcaaacagggccucug

SEQ ID NO: 3005719 - RNA, 17 nt, Human
cuggcaaacagggccuc

SEQ ID NO: 3005720 - RNA, 16 nt, Human
cuggcaaacagggccu

SEQ ID NO: 3005721 - RNA, 21 nt, Human
cuggcaaacagggccucugcg

SEQ ID NO: 3005722 - RNA, 20 nt, Human
cuggcaaacagggccucugc

SEQ ID NO: 3005723 - RNA, 23 nt, Human
cuggcaaacagggccucugcgga

SEQ ID NO: 3005724 - RNA, 19 nt, Human
cuggcaaagcagaauguga

SEQ ID NO: 3005725 - RNA, 16 nt, Human
cuggcaaagcagaaug

SEQ ID NO: 3005726 - RNA, 12 nt, Human
cuggcaaagcag

SEQ ID NO: 3005727 - RNA, 16 nt, Human
cuggauggggcugcac

SEQ ID NO: 3005728 - RNA, 23 nt, Human
cuggauuaaacuuaaucuaaaug

SEQ ID NO: 3005729 - RNA, 13 nt, Human
cuggauuaaacuu

SEQ ID NO: 3005730 - RNA, 15 nt, Human
cuggauggggcugca

SEQ ID NO: 3005731 - RNA, 16 nt, Human
cuggccaacgggguga

SEQ ID NO: 3005732 - RNA, 16 nt, Human
cuggccagaugcacca

SEQ ID NO: 3005733 - RNA, 15 nt, Human
cuggcacugcuucca

SEQ ID NO: 3005734 - RNA, 16 nt, Human
cuggcacugcuuccag

SEQ ID NO: 3005735 - RNA, 17 nt, Human
cuggcacugcuuccagu

SEQ ID NO: 3005736 - RNA, 20 nt, Human
cuggccagaugcaccagccc

SEQ ID NO: 3005737 - RNA, 19 nt, Human
cuggccagaugcaccagcc

SEQ ID NO: 3005738 - RNA, 18 nt, Human
cuggccagaugcaccagc

SEQ ID NO: 3005739 - RNA, 17 nt, Human
cuggccagaugcaccag

SEQ ID NO: 3005740 - RNA, 21 nt, Human
cuggccagaugcaccagcccu

SEQ ID NO: 3005741 - RNA, 13 nt, Human
cuggcccagggca

SEQ ID NO: 3005742 - RNA, 14 nt, Human
cuggcccagggcau

SEQ ID NO: 3005743 - RNA, 18 nt, Human
cuggcccagggcaucugg

SEQ ID NO: 3005744 - RNA, 17 nt, Human
cuggcccagggcaucug

SEQ ID NO: 3005745 - RNA, 17 nt, Human
cuggccuagcauacgua

SEQ ID NO: 3005746 - RNA, 12 nt, Human
cuggcccacugc

SEQ ID NO: 3005747 - RNA, 13 nt, Human
cuggcccacugca

SEQ ID NO: 3005748 - RNA, 20 nt, Human
cuggcccagggcaucuggga

SEQ ID NO: 3005749 - RNA, 23 nt, Human
cuggccuagcauacguacacauu

SEQ ID NO: 3005750 - RNA, 21 nt, Human
cuggucccagccagcaguuca

SEQ ID NO: 3005751 - RNA, 18 nt, Human
cugguccauagagagcaa

SEQ ID NO: 3005752 - RNA, 14 nt, Human
cuggucccacucag

SEQ ID NO: 3005753 - RNA, 18 nt, Human
cuggucccacucagucca

SEQ ID NO: 3005754 - RNA, 15 nt, Human
cuggucccacucagu

SEQ ID NO: 3005755 - RNA, 15 nt, Human
cugguccauagagag

SEQ ID NO: 3005756 - RNA, 17 nt, Human
cugguccauagagagca

SEQ ID NO: 3005757 - RNA, 13 nt, Human
cuggguuggaggg

SEQ ID NO: 3005758 - RNA, 19 nt, Human
cuggguucuacccaggugc

SEQ ID NO: 3005759 - RNA, 23 nt, Human
cugguggcagugggagcugccug

SEQ ID NO: 3005760 - RNA, 19 nt, Human
cugguggcagugggagcug

SEQ ID NO: 3005761 - RNA, 18 nt, Human
cugggguggggaccucag

SEQ ID NO: 3005762 - RNA, 19 nt, Human
cugggguggggaccucagg

SEQ ID NO: 3005763 - RNA, 17 nt, Human
cugggguggggaccuca

SEQ ID NO: 3005764 - RNA, 18 nt, Human
cugggggccucagugcca

SEQ ID NO: 3005765 - RNA, 17 nt, Human
cugggggccucagugcc

SEQ ID NO: 3005766 - RNA, 13 nt, Human
cugggggccucag

SEQ ID NO: 3005767 - RNA, 21 nt, Human
cugggguggggaccucaggcc

SEQ ID NO: 3005768 - RNA, 22 nt, Human
cugggguggggaccucaggccu

SEQ ID NO: 3005769 - RNA, 23 nt, Human
cugggguggggaccucaggccug

SEQ ID NO: 3005770 - RNA, 20 nt, Human
cuggguacuuguggacacag

SEQ ID NO: 3005771 - RNA, 23 nt, Human
cuggguacuuguggacacagcuc

SEQ ID NO: 3005772 - RNA, 21 nt, Human
cuggguacuuguggacacagc

SEQ ID NO: 3005773 - RNA, 19 nt, Human
cuggguacuuguggacaca

SEQ ID NO: 3005774 - RNA, 20 nt, Human
cugggcuucaguggcagcug

SEQ ID NO: 3005775 - RNA, 19 nt, Human
cugggcuucaguggcagcu

SEQ ID NO: 3005776 - RNA, 17 nt, Human
cugggcuucaguggcag

SEQ ID NO: 3005777 - RNA, 18 nt, Human
cugggcuucaguggcagc

SEQ ID NO: 3005778 - RNA, 21 nt, Human
cugggcuuggggaccagagcu

SEQ ID NO: 3005779 - RNA, 17 nt, Human
cugggcuuggggaccag

SEQ ID NO: 3005780 - RNA, 20 nt, Human
cugggcuuggggaccagagc

SEQ ID NO: 3005781 - RNA, 13 nt, Human
cugggcuugggga

SEQ ID NO: 3005782 - RNA, 23 nt, Human
cugggcuucaguggcagcugcuu

SEQ ID NO: 3005783 - RNA, 22 nt, Human
cugggcuucaguggcagcugcu

SEQ ID NO: 3005784 - RNA, 21 nt, Human
cugggcuucaguggcagcugc

SEQ ID NO: 3005785 - RNA, 22 nt, Human
cugggaacccaaguccaagcau

SEQ ID NO: 3005786 - RNA, 12 nt, Human
cugggaggaacc

SEQ ID NO: 3005787 - RNA, 16 nt, Human
cugggagcuuuuguag

SEQ ID NO: 3005788 - RNA, 18 nt, Human
cugggaggucaaggcugc

SEQ ID NO: 3005789 - RNA, 18 nt, Human
cugggaggaaccgagggg

SEQ ID NO: 3005790 - RNA, 12 nt, Human
cugggagugagc

SEQ ID NO: 3005791 - RNA, 13 nt, Human
cugggagugagcu

SEQ ID NO: 3005792 - RNA, 16 nt, Human
cugggagugagcuggu

SEQ ID NO: 3005793 - RNA, 20 nt, Human
cugggcaaugugauaaaacc

SEQ ID NO: 3005794 - RNA, 20 nt, Human
cuggcuguuggcugggggcc

SEQ ID NO: 3005795 - RNA, 18 nt, Human
cuggcuguuggcuggggg

SEQ ID NO: 3005796 - RNA, 21 nt, Human
cuggcuggguggcaccagcag

SEQ ID NO: 3005797 - RNA, 22 nt, Human
cuggcuggguggcaccagcagc

SEQ ID NO: 3005798 - RNA, 19 nt, Human
cuggcuguuggcugggggc

SEQ ID NO: 3005799 - RNA, 18 nt, Human
cuggcucuuccaggcugg

SEQ ID NO: 3005800 - RNA, 19 nt, Human
cuggcucuuccaggcuggg

SEQ ID NO: 3005801 - RNA, 20 nt, Human
cuggcucuuccaggcuggga

SEQ ID NO: 3005802 - RNA, 17 nt, Human
cuggcucuuccaggcug

SEQ ID NO: 3005803 - RNA, 13 nt, Human
cuggccugagcug

SEQ ID NO: 3005804 - RNA, 17 nt, Human
cugcagggacagagcau

SEQ ID NO: 3005805 - RNA, 22 nt, Human
cugcagggaguccgaaagggac

SEQ ID NO: 3005806 - RNA, 20 nt, Human
cugcagccucaaccuccugg

SEQ ID NO: 3005807 - RNA, 19 nt, Human
cugcagccucaaccuccug

SEQ ID NO: 3005808 - RNA, 22 nt, Human
cugcagccucaaccuccugggc

SEQ ID NO: 3005809 - RNA, 11 nt, Human
cugcagccuca

SEQ ID NO: 3005810 - RNA, 13 nt, Human
cugcagaagacag

SEQ ID NO: 3005811 - RNA, 23 nt, Human
cugcagaagacaguauggcagcu

SEQ ID NO: 3005812 - RNA, 17 nt, Human
cugcaccggcuggccug

SEQ ID NO: 3005813 - RNA, 18 nt, Human
cugcaccggcuggccugg

SEQ ID NO: 3005814 - RNA, 19 nt, Human
cugcaccggcuggccuggc

SEQ ID NO: 3005815 - RNA, 17 nt, Human
cugcacuugcagacucu

SEQ ID NO: 3005816 - RNA, 16 nt, Human
cugcacuugcagacuc

SEQ ID NO: 3005817 - RNA, 14 nt, Human
cugcacuugcagac

SEQ ID NO: 3005818 - RNA, 17 nt, Human
cugcacccucaggcagg

SEQ ID NO: 3005819 - RNA, 16 nt, Human
cugcacccucaggcag

SEQ ID NO: 3005820 - RNA, 18 nt, Human
cugcacccucaggcaggu

SEQ ID NO: 3005821 - RNA, 13 nt, Human
cugcacaagcugc

SEQ ID NO: 3005822 - RNA, 14 nt, Human
cugcacaagcugca

SEQ ID NO: 3005823 - RNA, 15 nt, Human
cugcacaagcugcac

SEQ ID NO: 3005824 - RNA, 16 nt, Human
cugcacaagcugcacc

SEQ ID NO: 3005825 - RNA, 20 nt, Human
cugcacagcaggcugccagu

SEQ ID NO: 3005826 - RNA, 21 nt, Human
cugcacagcaggcugccagug

SEQ ID NO: 3005827 - RNA, 22 nt, Human
cugcacagcaggcugccagugc

SEQ ID NO: 3005828 - RNA, 13 nt, Human
cugagucugaagg

SEQ ID NO: 3005829 - RNA, 14 nt, Human
cugagucugaaggc

SEQ ID NO: 3005830 - RNA, 15 nt, Human
cugagucugaaggcu

SEQ ID NO: 3005831 - RNA, 16 nt, Human
cugagucugaaggcug

SEQ ID NO: 3005832 - RNA, 13 nt, Human
cugauaaagauga

SEQ ID NO: 3005833 - RNA, 22 nt, Human
cugagugggggaucacagccuc

SEQ ID NO: 3005834 - RNA, 13 nt, Human
cugauguuccuag

SEQ ID NO: 3005835 - RNA, 18 nt, Human
cugauguuccuagugaaa

SEQ ID NO: 3005836 - RNA, 20 nt, Human
cugauguuccuagugaaaga

SEQ ID NO: 3005837 - RNA, 21 nt, Human
cugauguuccuagugaaagag

SEQ ID NO: 3005838 - RNA, 15 nt, Human
cugauucccaagcuc

SEQ ID NO: 3005839 - RNA, 18 nt, Human
cugauucccaagcucugc

SEQ ID NO: 3005840 - RNA, 17 nt, Human
cugauucccaagcucug

SEQ ID NO: 3005841 - RNA, 20 nt, Human
cugauucccaagcucugcuc

SEQ ID NO: 3005842 - RNA, 19 nt, Human
cugauucccaagcucugcu

SEQ ID NO: 3005843 - RNA, 22 nt, Human
cugauucccaagcucugcuccu

SEQ ID NO: 3005844 - RNA, 16 nt, Human
cugauucccugauuua

SEQ ID NO: 3005845 - RNA, 14 nt, Human
cugaucgcuucucc

SEQ ID NO: 3005846 - RNA, 23 nt, Human
cugaucauguuuaugagaaacug

SEQ ID NO: 3005847 - RNA, 15 nt, Human
cugccuaagugcagc

SEQ ID NO: 3005848 - RNA, 13 nt, Human
cugccucagccuc

SEQ ID NO: 3005849 - RNA, 14 nt, Human
cugccucagccucc

SEQ ID NO: 3005850 - RNA, 14 nt, Human
cugccugcccaggc

SEQ ID NO: 3005851 - RNA, 13 nt, Human
cugccugcccagg

SEQ ID NO: 3005852 - RNA, 13 nt, Human
cugccucuucucu

SEQ ID NO: 3005853 - RNA, 23 nt, Human
cugccugaagucacacagugagu

SEQ ID NO: 3005854 - RNA, 18 nt, Human
cugcuccucuccccagca

SEQ ID NO: 3005855 - RNA, 15 nt, Human
cugcuccagcuguuc

SEQ ID NO: 3005856 - RNA, 17 nt, Human
cugcuccucuccccagc

SEQ ID NO: 3005857 - RNA, 16 nt, Human
cugcuccucuccccag

SEQ ID NO: 3005858 - RNA, 20 nt, Human
cugcggaaugaaccacaucu

SEQ ID NO: 3005859 - RNA, 15 nt, Human
cugcgguccacccag

SEQ ID NO: 3005860 - RNA, 21 nt, Human
cugcggaaugaaccacaucuu

SEQ ID NO: 3005861 - RNA, 16 nt, Human
cugcgguccacccagg

SEQ ID NO: 3005862 - RNA, 14 nt, Human
cugcuccagcuguu

SEQ ID NO: 3005863 - RNA, 15 nt, Human
cugccaggaagccag

SEQ ID NO: 3005864 - RNA, 16 nt, Human
cugccaggaagccagc

SEQ ID NO: 3005865 - RNA, 18 nt, Human
cugccaggaagccagcag

SEQ ID NO: 3005866 - RNA, 19 nt, Human
cugccaggaagccagcagg

SEQ ID NO: 3005867 - RNA, 19 nt, Human
cugccagccgagauagcca

SEQ ID NO: 3005868 - RNA, 15 nt, Human
cugccaugccagcuu

SEQ ID NO: 3005869 - RNA, 17 nt, Human
cugccaugccagcuuau

SEQ ID NO: 3005870 - RNA, 19 nt, Human
cugccaugccagcuuaucu

SEQ ID NO: 3005871 - RNA, 14 nt, Human
cugccacccugggg

SEQ ID NO: 3005872 - RNA, 20 nt, Human
cugccacccuggggagaaag

SEQ ID NO: 3005873 - RNA, 16 nt, Human
cugccacccuggggag

SEQ ID NO: 3005874 - RNA, 15 nt, Human
cugccacccugggga

SEQ ID NO: 3005875 - RNA, 19 nt, Human
cugcccuccaagaccuucu

SEQ ID NO: 3005876 - RNA, 15 nt, Human
cugcccggcugcgga

SEQ ID NO: 3005877 - RNA, 11 nt, Human
cugcccggcug

SEQ ID NO: 3005878 - RNA, 13 nt, Human
cugcccugcccac

SEQ ID NO: 3005879 - RNA, 14 nt, Human
cugcccugcccacc

SEQ ID NO: 3005880 - RNA, 15 nt, Human
cugcccugcccaccu

SEQ ID NO: 3005881 - RNA, 16 nt, Human
cugcccugcccaccug

SEQ ID NO: 3005882 - RNA, 14 nt, Human
cugccccuggcagc

SEQ ID NO: 3005883 - RNA, 15 nt, Human
cugccccuggcagcc

SEQ ID NO: 3005884 - RNA, 16 nt, Human
cugccccuggcagccc

SEQ ID NO: 3005885 - RNA, 20 nt, Human
cugcccggcaggguccuaga

SEQ ID NO: 3005886 - RNA, 13 nt, Human
cugcccaggcccc

SEQ ID NO: 3005887 - RNA, 16 nt, Human
cugccauuucugagau

SEQ ID NO: 3005888 - RNA, 14 nt, Human
ccucaauugugaaa

SEQ ID NO: 3005889 - RNA, 17 nt, Human
ccucacaguccuuacca

SEQ ID NO: 3005890 - RNA, 18 nt, Human
ccucaauaaacauuucau

SEQ ID NO: 3005891 - RNA, 20 nt, Human
ccucacaguccuuaccagca

SEQ ID NO: 3005892 - RNA, 22 nt, Human
ccucacaguccuuaccagcaga

SEQ ID NO: 3005893 - RNA, 12 nt, Human
ccucaccccacu

SEQ ID NO: 3005894 - RNA, 15 nt, Human
ccucaccccacugug

SEQ ID NO: 3005895 - RNA, 17 nt, Human
ccucaccuuucccaucu

SEQ ID NO: 3005896 - RNA, 13 nt, Human
ccggcuggccugg

SEQ ID NO: 3005897 - RNA, 22 nt, Human
ccgggaggcagagguugcagug

SEQ ID NO: 3005898 - RNA, 15 nt, Human
ccgggcacucagaag

SEQ ID NO: 3005899 - RNA, 12 nt, Human
ccggcuggccug

SEQ ID NO: 3005900 - RNA, 23 nt, Human
ccgcuuucuacccagcgagcccu

SEQ ID NO: 3005901 - RNA, 22 nt, Human
cccuuuuucaauaacuggaaca

SEQ ID NO: 3005902 - RNA, 17 nt, Human
cccuuuuucaauaacug

SEQ ID NO: 3005903 - RNA, 17 nt, Human
cccuuuuuuggcugcug

SEQ ID NO: 3005904 - RNA, 18 nt, Human
cccuuuuuuggcugcuga

SEQ ID NO: 3005905 - RNA, 11 nt, Human
cccuuuuccuu

SEQ ID NO: 3005906 - RNA, 13 nt, Human
cccuuuucuguuu

SEQ ID NO: 3005907 - RNA, 17 nt, Human
ccgagaaggaagccucc

SEQ ID NO: 3005908 - RNA, 18 nt, Human
ccgagauagccaaggcca

SEQ ID NO: 3005909 - RNA, 19 nt, Human
ccgagauagccaaggccaa

SEQ ID NO: 3005910 - RNA, 22 nt, Human
ccgagauagccaaggccaaagg

SEQ ID NO: 3005911 - RNA, 19 nt, Human
cccuuuuuuggcugcugaa

SEQ ID NO: 3005912 - RNA, 17 nt, Human
ccgaggccuucucugaa

SEQ ID NO: 3005913 - RNA, 18 nt, Human
ccgagaucacgccacugc

SEQ ID NO: 3005914 - RNA, 19 nt, Human
ccgagggggcugcucccac

SEQ ID NO: 3005915 - RNA, 18 nt, Human
ccgagggggcugcuccca

SEQ ID NO: 3005916 - RNA, 16 nt, Human
ccgagggggcugcucc

SEQ ID NO: 3005917 - RNA, 15 nt, Human
cccuugaugaagaag

SEQ ID NO: 3005918 - RNA, 16 nt, Human
cccuugaugaagaagu

SEQ ID NO: 3005919 - RNA, 17 nt, Human
cccuugccgucuaccug

SEQ ID NO: 3005920 - RNA, 18 nt, Human
cccuugccgucuaccuga

SEQ ID NO: 3005921 - RNA, 22 nt, Human
cccuugccgucuaccugagggg

SEQ ID NO: 3005922 - RNA, 18 nt, Human
cccuuggggagcaggcuc

SEQ ID NO: 3005923 - RNA, 14 nt, Human
cccuugugguccca

SEQ ID NO: 3005924 - RNA, 16 nt, Human
cccuuguggucccacc

SEQ ID NO: 3005925 - RNA, 18 nt, Human
cccuuguggucccacccc

SEQ ID NO: 3005926 - RNA, 20 nt, Human
cccuuugacgccaucccagc

SEQ ID NO: 3005927 - RNA, 16 nt, Human
cccugugucauuucaa

SEQ ID NO: 3005928 - RNA, 18 nt, Human
cccugugggcccccaaau

SEQ ID NO: 3005929 - RNA, 15 nt, Human
cccuguuuguuucug

SEQ ID NO: 3005930 - RNA, 16 nt, Human
cccugugggcccccaa

SEQ ID NO: 3005931 - RNA, 15 nt, Human
cccugugggccccca

SEQ ID NO: 3005932 - RNA, 19 nt, Human
cccugguggcagugggagc

SEQ ID NO: 3005933 - RNA, 16 nt, Human
cccugguggcaguggg

SEQ ID NO: 3005934 - RNA, 15 nt, Human
cccugguggcagugg

SEQ ID NO: 3005935 - RNA, 21 nt, Human
cccugguggcagugggagcug

SEQ ID NO: 3005936 - RNA, 18 nt, Human
ccccucagggucccuggu

SEQ ID NO: 3005937 - RNA, 20 nt, Human
ccccucagggucccuggugg

SEQ ID NO: 3005938 - RNA, 17 nt, Human
ccccucagggucccugg

SEQ ID NO: 3005939 - RNA, 12 nt, Human
ccccacugguga

SEQ ID NO: 3005940 - RNA, 13 nt, Human
ccccacuggugac

SEQ ID NO: 3005941 - RNA, 13 nt, Human
ccccaggaggcca

SEQ ID NO: 3005942 - RNA, 14 nt, Human
ccccaggaggccag

SEQ ID NO: 3005943 - RNA, 15 nt, Human
ccccaggaggccagc

SEQ ID NO: 3005944 - RNA, 21 nt, Human
ccccaggaggccagccuugac

SEQ ID NO: 3005945 - RNA, 22 nt, Human
ccccaggaggccagccuugacc

SEQ ID NO: 3005946 - RNA, 12 nt, Human
cccccagcccca

SEQ ID NO: 3005947 - RNA, 21 nt, Human
cccccgcugucagccauuccu

SEQ ID NO: 3005948 - RNA, 18 nt, Human
ccuccccuccucugcuug

SEQ ID NO: 3005949 - RNA, 17 nt, Human
ccuccccuccucugcuu

SEQ ID NO: 3005950 - RNA, 15 nt, Human
ccucccucccucuuu

SEQ ID NO: 3005951 - RNA, 13 nt, Human
ccucccucccucu

SEQ ID NO: 3005952 - RNA, 16 nt, Human
ccucccucccucuuuc

SEQ ID NO: 3005953 - RNA, 16 nt, Human
ccucccugcaauaaaa

SEQ ID NO: 3005954 - RNA, 12 nt, Human
ccucccugcaau

SEQ ID NO: 3005955 - RNA, 11 nt, Human
ccuccucugcu

SEQ ID NO: 3005956 - RNA, 22 nt, Human
ccuccugugugugcgccuacag

SEQ ID NO: 3005957 - RNA, 15 nt, Human
ccuccugugugugcg

SEQ ID NO: 3005958 - RNA, 13 nt, Human
ccuccugugugug

SEQ ID NO: 3005959 - RNA, 20 nt, Human
ccuccugggauuggcuguga

SEQ ID NO: 3005960 - RNA, 13 nt, Human
ccuccugggcuaa

SEQ ID NO: 3005961 - RNA, 14 nt, Human
ccuccccuccucug

SEQ ID NO: 3005962 - RNA, 15 nt, Human
ccuccccuccucugc

SEQ ID NO: 3005963 - RNA, 15 nt, Human
ccucagucuggcccu

SEQ ID NO: 3005964 - RNA, 19 nt, Human
ccucaggugauccacccac

SEQ ID NO: 3005965 - RNA, 17 nt, Human
ccucaggugauccaccc

SEQ ID NO: 3005966 - RNA, 22 nt, Human
ccucaggugagaagcagaggaa

SEQ ID NO: 3005967 - RNA, 22 nt, Human
ccucaggugauccacccaccuc

SEQ ID NO: 3005968 - RNA, 15 nt, Human
ccucagggucccugg

SEQ ID NO: 3005969 - RNA, 22 nt, Human
ccucagggucccugguggcagc

SEQ ID NO: 3005970 - RNA, 16 nt, Human
ccucaggugagaagca

SEQ ID NO: 3005971 - RNA, 20 nt, Human
ccucagaaaacaaggaugaa

SEQ ID NO: 3005972 - RNA, 14 nt, Human
ccucagcauccugg

SEQ ID NO: 3005973 - RNA, 17 nt, Human
ccucagcauccuggcac

SEQ ID NO: 3005974 - RNA, 16 nt, Human
ccucagcauccuggca

SEQ ID NO: 3005975 - RNA, 14 nt, Human
ccucaggccugggg

SEQ ID NO: 3005976 - RNA, 21 nt, Human
ccucaggccugggggcugggc

SEQ ID NO: 3005977 - RNA, 11 nt, Human
ccucaggccug

SEQ ID NO: 3005978 - RNA, 14 nt, Human
ccucagggucccug

SEQ ID NO: 3005979 - RNA, 20 nt, Human
ccucugcuugccaucccucc

SEQ ID NO: 3005980 - RNA, 17 nt, Human
ccucugcuugccauccc

SEQ ID NO: 3005981 - RNA, 21 nt, Human
ccucugcuugccaucccuccc

SEQ ID NO: 3005982 - RNA, 12 nt, Human
ccucugggacug

SEQ ID NO: 3005983 - RNA, 14 nt, Human
ccucugcacucccc

SEQ ID NO: 3005984 - RNA, 19 nt, Human
ccucugcacuccccugcug

SEQ ID NO: 3005985 - RNA, 20 nt, Human
ccucugcacuccccugcugg

SEQ ID NO: 3005986 - RNA, 21 nt, Human
ccucugcacuccccugcuggg

SEQ ID NO: 3005987 - RNA, 22 nt, Human
ccucugcacuccccugcugggu

SEQ ID NO: 3005988 - RNA, 20 nt, Human
ccucugcacaagcugcaccc

SEQ ID NO: 3005989 - RNA, 17 nt, Human
ccucugcacaagcugca

SEQ ID NO: 3005990 - RNA, 19 nt, Human
ccucugcacaagcugcacc

SEQ ID NO: 3005991 - RNA, 11 nt, Human
ccucugcacaa

SEQ ID NO: 3005992 - RNA, 15 nt, Human
ccucugcacaagcug

SEQ ID NO: 3005993 - RNA, 18 nt, Human
ccucugacacacagcucu

SEQ ID NO: 3005994 - RNA, 17 nt, Human
ccucugacacacagcuc

SEQ ID NO: 3005995 - RNA, 13 nt, Human
ccucuccugggca

SEQ ID NO: 3005996 - RNA, 12 nt, Human
ccucuccugggc

SEQ ID NO: 3005997 - RNA, 11 nt, Human
ccucuccuggg

SEQ ID NO: 3005998 - RNA, 23 nt, Human
ccucugaaaaccaauguucucuc

SEQ ID NO: 3005999 - RNA, 15 nt, Human
ccucugacacacagc

SEQ ID NO: 3006000 - RNA, 16 nt, Human
ccucugacacacagcu

SEQ ID NO: 3006001 - RNA, 12 nt, Human
ccucucccauca

SEQ ID NO: 3006002 - RNA, 23 nt, Human
ccuccugugugugcgccuacagg

SEQ ID NO: 3006003 - RNA, 16 nt, Human
ccugaggcccuucucu

SEQ ID NO: 3006004 - RNA, 17 nt, Human
ccugaggcccuucucuc

SEQ ID NO: 3006005 - RNA, 19 nt, Human
ccugaggcccuucucucca

SEQ ID NO: 3006006 - RNA, 20 nt, Human
ccugaggcccuucucuccag

SEQ ID NO: 3006007 - RNA, 21 nt, Human
ccugaggcccuucucuccagc

SEQ ID NO: 3006008 - RNA, 22 nt, Human
ccugaggcccuucucuccagcc

SEQ ID NO: 3006009 - RNA, 23 nt, Human
ccugaggcccuucucuccagccc

SEQ ID NO: 3006010 - RNA, 17 nt, Human
ccugaggcuccacuugg

SEQ ID NO: 3006011 - RNA, 12 nt, Human
ccugacaacacu

SEQ ID NO: 3006012 - RNA, 14 nt, Human
ccugacaacacuca

SEQ ID NO: 3006013 - RNA, 15 nt, Human
ccugacaacacucau

SEQ ID NO: 3006014 - RNA, 16 nt, Human
ccugacaacacucauu

SEQ ID NO: 3006015 - RNA, 13 nt, Human
ccugaggcccaga

SEQ ID NO: 3006016 - RNA, 14 nt, Human
ccugaggcccagag

SEQ ID NO: 3006017 - RNA, 12 nt, Human
ccugaggcccag

SEQ ID NO: 3006018 - RNA, 20 nt, Human
ccugaggcuccacuuggucu

SEQ ID NO: 3006019 - RNA, 18 nt, Human
ccugaggcuccacuuggu

SEQ ID NO: 3006020 - RNA, 14 nt, Human
ccugaggcccuucu

SEQ ID NO: 3006021 - RNA, 14 nt, Human
ccugaugcuucuuc

SEQ ID NO: 3006022 - RNA, 23 nt, Human
ccugauugugucucuugguccug

SEQ ID NO: 3006023 - RNA, 22 nt, Human
ccugauuuaauaugcaaagucu

SEQ ID NO: 3006024 - RNA, 17 nt, Human
ccugaugcuucuucaga

SEQ ID NO: 3006025 - RNA, 18 nt, Human
ccugaugcuucuucagag

SEQ ID NO: 3006026 - RNA, 23 nt, Human
ccugaaagaggaaugaaguacuc

SEQ ID NO: 3006027 - RNA, 13 nt, Human
ccugaaagaggaa

SEQ ID NO: 3006028 - RNA, 18 nt, Human
ccugaaagaggaaugaag

SEQ ID NO: 3006029 - RNA, 22 nt, Human
ccucuuuggucuacacugugcu

SEQ ID NO: 3006030 - RNA, 17 nt, Human
ccucuuaugggcugggu

SEQ ID NO: 3006031 - RNA, 17 nt, Human
ccugaagucacacagug

SEQ ID NO: 3006032 - RNA, 16 nt, Human
ccugaagucacacagu

SEQ ID NO: 3006033 - RNA, 13 nt, Human
ccugaaggccccg

SEQ ID NO: 3006034 - RNA, 15 nt, Human
ccugaagucacacag

SEQ ID NO: 3006035 - RNA, 20 nt, Human
ccugaacaggauauucucac

SEQ ID NO: 3006036 - RNA, 15 nt, Human
ccucuuaugggcugg

SEQ ID NO: 3006037 - RNA, 16 nt, Human
ccucuuaugggcuggg

SEQ ID NO: 3006038 - RNA, 14 nt, Human
ccucuuaugggcug

SEQ ID NO: 3006039 - RNA, 23 nt, Human
ccucuuagaugcaguucugaaga

SEQ ID NO: 3006040 - RNA, 14 nt, Human
ccucuuagaaaaac

SEQ ID NO: 3006041 - RNA, 14 nt, Human
ccucuguacagagc

SEQ ID NO: 3006042 - RNA, 15 nt, Human
ccucuguacagagcc

SEQ ID NO: 3006043 - RNA, 16 nt, Human
ccucuguacagagccc

SEQ ID NO: 3006044 - RNA, 17 nt, Human
ccucuguacagagccca

SEQ ID NO: 3006045 - RNA, 18 nt, Human
ccucuguacagagcccac

SEQ ID NO: 3006046 - RNA, 23 nt, Human
ccucuguacagagcccacgcccc

SEQ ID NO: 3006047 - RNA, 11 nt, Human
ccuuuggcuuc

SEQ ID NO: 3006048 - RNA, 17 nt, Human
ccuugaaugaugccaug

SEQ ID NO: 3006049 - RNA, 17 nt, Human
ccuugaacuuugaccuc

SEQ ID NO: 3006050 - RNA, 16 nt, Human
ccuugaacuggguacu

SEQ ID NO: 3006051 - RNA, 19 nt, Human
ccuugaaaacacuguucuc

SEQ ID NO: 3006052 - RNA, 21 nt, Human
ccuugaaaacacuguucucug

SEQ ID NO: 3006053 - RNA, 22 nt, Human
ccuugaaaacacuguucucugc

SEQ ID NO: 3006054 - RNA, 14 nt, Human
ccuugaacugggua

SEQ ID NO: 3006055 - RNA, 18 nt, Human
ccuucgcuccugugucuu

SEQ ID NO: 3006056 - RNA, 15 nt, Human
ccuucgcuccugugu

SEQ ID NO: 3006057 - RNA, 14 nt, Human
ccuucgcuccugug

SEQ ID NO: 3006058 - RNA, 13 nt, Human
ccuucgcuccugu

SEQ ID NO: 3006059 - RNA, 15 nt, Human
ccuugaaaacacugu

SEQ ID NO: 3006060 - RNA, 19 nt, Human
ccuugaccauucuccaccu

SEQ ID NO: 3006061 - RNA, 20 nt, Human
ccuugaccauucuccaccug

SEQ ID NO: 3006062 - RNA, 17 nt, Human
ccuugacagggcacacc

SEQ ID NO: 3006063 - RNA, 15 nt, Human
ccuugacagggcaca

SEQ ID NO: 3006064 - RNA, 13 nt, Human
ccuugacagggca

SEQ ID NO: 3006065 - RNA, 14 nt, Human
ccuugacagggcac

SEQ ID NO: 3006066 - RNA, 19 nt, Human
ccuuggauuguccccgacc

SEQ ID NO: 3006067 - RNA, 22 nt, Human
ccuugaguugauucagcucugc

SEQ ID NO: 3006068 - RNA, 23 nt, Human
ccuugaguugauucagcucugca

SEQ ID NO: 3006069 - RNA, 21 nt, Human
ccuugaccauucuccaccugc

SEQ ID NO: 3006070 - RNA, 20 nt, Human
ccuugaguugauucagcucu

SEQ ID NO: 3006071 - RNA, 14 nt, Human
ccuuaccagcagag

SEQ ID NO: 3006072 - RNA, 15 nt, Human
ccuuaccagcagagc

SEQ ID NO: 3006073 - RNA, 16 nt, Human
ccuuaccagcagagca

SEQ ID NO: 3006074 - RNA, 17 nt, Human
ccuuaccagcagagcac

SEQ ID NO: 3006075 - RNA, 19 nt, Human
ccuuacccucauguucuua

SEQ ID NO: 3006076 - RNA, 20 nt, Human
ccuuaccucggugccuuccu

SEQ ID NO: 3006077 - RNA, 14 nt, Human
ccuuaccugccagg

SEQ ID NO: 3006078 - RNA, 21 nt, Human
ccuuagacagucccugccaau

SEQ ID NO: 3006079 - RNA, 18 nt, Human
ccuuagacagucccugcc

SEQ ID NO: 3006080 - RNA, 19 nt, Human
ccuuagacagucccugcca

SEQ ID NO: 3006081 - RNA, 16 nt, Human
ccuuagacagucccug

SEQ ID NO: 3006082 - RNA, 17 nt, Human
ccuuagacagucccugc

SEQ ID NO: 3006083 - RNA, 15 nt, Human
ccuuccagggguggg

SEQ ID NO: 3006084 - RNA, 16 nt, Human
ccuuccagggguggga

SEQ ID NO: 3006085 - RNA, 18 nt, Human
ccuuccaggggugggaca

SEQ ID NO: 3006086 - RNA, 22 nt, Human
ccuuccaggggugggacacccu

SEQ ID NO: 3006087 - RNA, 14 nt, Human
ccuuccucuuucca

SEQ ID NO: 3006088 - RNA, 11 nt, Human
ccuuccugcug

SEQ ID NO: 3006089 - RNA, 20 nt, Human
ccuucagugccuuauggaac

SEQ ID NO: 3006090 - RNA, 15 nt, Human
ccuucagugccuuau

SEQ ID NO: 3006091 - RNA, 19 nt, Human
ccuucagugccuuauggaa

SEQ ID NO: 3006092 - RNA, 13 nt, Human
ccuucagugccuu

SEQ ID NO: 3006093 - RNA, 14 nt, Human
ccuucagugccuua

SEQ ID NO: 3006094 - RNA, 12 nt, Human
ccuucagugccu

SEQ ID NO: 3006095 - RNA, 12 nt, Human
ccuucagccuga

SEQ ID NO: 3006096 - RNA, 20 nt, Human
ccugggcagcugccuccccu

SEQ ID NO: 3006097 - RNA, 13 nt, Human
ccugguggcagcu

SEQ ID NO: 3006098 - RNA, 12 nt, Human
ccugguggcagc

SEQ ID NO: 3006099 - RNA, 14 nt, Human
ccugguggcagcuc

SEQ ID NO: 3006100 - RNA, 16 nt, Human
ccugguggcagcucac

SEQ ID NO: 3006101 - RNA, 17 nt, Human
ccugguggcagcucacc

SEQ ID NO: 3006102 - RNA, 18 nt, Human
ccugguggcagcucaccu

SEQ ID NO: 3006103 - RNA, 12 nt, Human
ccuguaccucuu

SEQ ID NO: 3006104 - RNA, 20 nt, Human
ccuguaauccuagcacuuug

SEQ ID NO: 3006105 - RNA, 20 nt, Human
ccuguaaucccagcacuuug

SEQ ID NO: 3006106 - RNA, 21 nt, Human
ccuguagagugggagcugagu

SEQ ID NO: 3006107 - RNA, 19 nt, Human
ccuguagagugggagcuga

SEQ ID NO: 3006108 - RNA, 23 nt, Human
ccuguagagugggagcugagugg

SEQ ID NO: 3006109 - RNA, 17 nt, Human
ccugugccucugggacu

SEQ ID NO: 3006110 - RNA, 15 nt, Human
ccugugccucuggga

SEQ ID NO: 3006111 - RNA, 19 nt, Human
ccugugccucugggacugg

SEQ ID NO: 3006112 - RNA, 20 nt, Human
ccugugauggggcccugccu

SEQ ID NO: 3006113 - RNA, 21 nt, Human
ccugugauggggcccugccuc

SEQ ID NO: 3006114 - RNA, 22 nt, Human
ccugugauggggcccugccucc

SEQ ID NO: 3006115 - RNA, 18 nt, Human
ccugugauggggcccugc

SEQ ID NO: 3006116 - RNA, 19 nt, Human
ccugugauggggcccugcc

SEQ ID NO: 3006117 - RNA, 17 nt, Human
ccugugauggggcccug

SEQ ID NO: 3006118 - RNA, 20 nt, Human
ccugugaguacuacaguccu

SEQ ID NO: 3006119 - RNA, 17 nt, Human
ccugucccccugacaac

SEQ ID NO: 3006120 - RNA, 16 nt, Human
ccugucccccugacaa

SEQ ID NO: 3006121 - RNA, 18 nt, Human
ccuguccccgcacugggc

SEQ ID NO: 3006122 - RNA, 17 nt, Human
ccugggcaacagagcaa

SEQ ID NO: 3006123 - RNA, 12 nt, Human
ccugggcagaag

SEQ ID NO: 3006124 - RNA, 14 nt, Human
ccugggcagaagga

SEQ ID NO: 3006125 - RNA, 18 nt, Human
ccugggcagcugccuccc

SEQ ID NO: 3006126 - RNA, 17 nt, Human
ccugggcagcugccucc

SEQ ID NO: 3006127 - RNA, 16 nt, Human
ccugggcagcugccuc

SEQ ID NO: 3006128 - RNA, 15 nt, Human
ccugggcagcugccu

SEQ ID NO: 3006129 - RNA, 16 nt, Human
ccugggaucccucauc

SEQ ID NO: 3006130 - RNA, 20 nt, Human
ccugggaucccucauccuca

SEQ ID NO: 3006131 - RNA, 20 nt, Human
ccugggaggucaaggcugca

SEQ ID NO: 3006132 - RNA, 14 nt, Human
ccuggccccucagg

SEQ ID NO: 3006133 - RNA, 17 nt, Human
ccuggcuaacacgguga

SEQ ID NO: 3006134 - RNA, 18 nt, Human
ccuggcucuguggcgagc

SEQ ID NO: 3006135 - RNA, 12 nt, Human
ccuggcucugug

SEQ ID NO: 3006136 - RNA, 18 nt, Human
ccuggcaugggaaugaau

SEQ ID NO: 3006137 - RNA, 20 nt, Human
ccuggcacugcuuccaguga

SEQ ID NO: 3006138 - RNA, 17 nt, Human
ccuggcacugcuuccag

SEQ ID NO: 3006139 - RNA, 23 nt, Human
ccuggacugagggggccuggaug

SEQ ID NO: 3006140 - RNA, 13 nt, Human
ccuggcacuggca

SEQ ID NO: 3006141 - RNA, 21 nt, Human
ccuggcacugcuuccagugag

SEQ ID NO: 3006142 - RNA, 23 nt, Human
ccuggcacuggcaaacagggccu

SEQ ID NO: 3006143 - RNA, 22 nt, Human
ccuggcacuggcaaacagggcc

SEQ ID NO: 3006144 - RNA, 14 nt, Human
ccuggcagccccug

SEQ ID NO: 3006145 - RNA, 16 nt, Human
ccuggcagccccuguu

SEQ ID NO: 3006146 - RNA, 16 nt, Human
ccuggcaugggaauga

SEQ ID NO: 3006147 - RNA, 17 nt, Human
ccuggcaugggaaugaa

SEQ ID NO: 3006148 - RNA, 14 nt, Human
ccuggcaugggaau

SEQ ID NO: 3006149 - RNA, 13 nt, Human
ccuggacccugug

SEQ ID NO: 3006150 - RNA, 14 nt, Human
ccuggacccugugg

SEQ ID NO: 3006151 - RNA, 22 nt, Human
ccuggacugagggggccuggau

SEQ ID NO: 3006152 - RNA, 21 nt, Human
ccuggacugagggggccugga

SEQ ID NO: 3006153 - RNA, 14 nt, Human
ccuggacugagggg

SEQ ID NO: 3006154 - RNA, 13 nt, Human
ccuggacugaggg

SEQ ID NO: 3006155 - RNA, 23 nt, Human
ccugcgucucauacucaccucac

SEQ ID NO: 3006156 - RNA, 19 nt, Human
ccugcaacaccuuguuucc

SEQ ID NO: 3006157 - RNA, 16 nt, Human
ccugcaaccugauugu

SEQ ID NO: 3006158 - RNA, 23 nt, Human
ccugauuuaauaugcaaagucua

SEQ ID NO: 3006159 - RNA, 18 nt, Human
ccugcaacaccuuguuuc

SEQ ID NO: 3006160 - RNA, 13 nt, Human
ccugcuccagcug

SEQ ID NO: 3006161 - RNA, 14 nt, Human
ccugcuccagcugu

SEQ ID NO: 3006162 - RNA, 22 nt, Human
ccugcuccagcuguucagcugg

SEQ ID NO: 3006163 - RNA, 12 nt, Human
ccugcuccagcu

SEQ ID NO: 3006164 - RNA, 21 nt, Human
ccugcuggguguggcgcagca

SEQ ID NO: 3006165 - RNA, 13 nt, Human
ccugcugguucag

SEQ ID NO: 3006166 - RNA, 19 nt, Human
ccugcugguucaggguugg

SEQ ID NO: 3006167 - RNA, 21 nt, Human
cguuucuaaaggcuaccuuug

SEQ ID NO: 3006168 - RNA, 19 nt, Human
cguuucuaaaggcuaccuu

SEQ ID NO: 3006169 - RNA, 20 nt, Human
cguuucuaugacacaugcaa

SEQ ID NO: 3006170 - RNA, 12 nt, Human
cguggcugcuuc

SEQ ID NO: 3006171 - RNA, 14 nt, Human
cguggcugcuucaa

SEQ ID NO: 3006172 - RNA, 15 nt, Human
cguggcugcuucaag

SEQ ID NO: 3006173 - RNA, 17 nt, Human
cguggcugcuucaagga

SEQ ID NO: 3006174 - RNA, 20 nt, Human
cgucaacucauauuuucaug

SEQ ID NO: 3006175 - RNA, 16 nt, Human
cgucaacucauauuuu

SEQ ID NO: 3006176 - RNA, 23 nt, Human
cggugcuaucucccccagcccca

SEQ ID NO: 3006177 - RNA, 16 nt, Human
cgucucuacuaaaaau

SEQ ID NO: 3006178 - RNA, 14 nt, Human
cgucuaccugaggg

SEQ ID NO: 3006179 - RNA, 14 nt, Human
cgucugacaggcaa

SEQ ID NO: 3006180 - RNA, 13 nt, Human
cgucugacaggca

SEQ ID NO: 3006181 - RNA, 11 nt, Human
cguccccuguc

SEQ ID NO: 3006182 - RNA, 14 nt, Human
cguccccugucccc

SEQ ID NO: 3006183 - RNA, 21 nt, Human
cgugcacacaccagagcccac

SEQ ID NO: 3006184 - RNA, 20 nt, Human
cgugcacacaccagagccca

SEQ ID NO: 3006185 - RNA, 19 nt, Human
cgugaacccaggaggcgga

SEQ ID NO: 3006186 - RNA, 17 nt, Human
cgugaacccaggaggcg

SEQ ID NO: 3006187 - RNA, 19 nt, Human
cgugcauaccacuuuuguu

SEQ ID NO: 3006188 - RNA, 18 nt, Human
cgugcauaccacuuuugu

SEQ ID NO: 3006189 - RNA, 14 nt, Human
cgugcauaccacuu

SEQ ID NO: 3006190 - RNA, 22 nt, Human
cgugcacacaccagagcccacc

SEQ ID NO: 3006191 - RNA, 22 nt, Human
cgugcaguggugcgaucugggu

SEQ ID NO: 3006192 - RNA, 20 nt, Human
cgcgugcacacaccagagcc

SEQ ID NO: 3006193 - RNA, 19 nt, Human
cgcgugcacacaccagagc

SEQ ID NO: 3006194 - RNA, 16 nt, Human
cgcgugcacacaccag

SEQ ID NO: 3006195 - RNA, 15 nt, Human
cgcuaagagggaggg

SEQ ID NO: 3006196 - RNA, 16 nt, Human
cgcuaagagggaggga

SEQ ID NO: 3006197 - RNA, 14 nt, Human
cgcuaagagggagg

SEQ ID NO: 3006198 - RNA, 21 nt, Human
cgcuaagagggagggagggcu

SEQ ID NO: 3006199 - RNA, 16 nt, Human
cgcgacaaugcaaacc

SEQ ID NO: 3006200 - RNA, 17 nt, Human
cgcgacaaugcaaacca

SEQ ID NO: 3006201 - RNA, 15 nt, Human
cgcgacaaugcaaac

SEQ ID NO: 3006202 - RNA, 15 nt, Human
cgcccccacugguga

SEQ ID NO: 3006203 - RNA, 13 nt, Human
cgcagacaggacc

SEQ ID NO: 3006204 - RNA, 14 nt, Human
cgcagacaggacca

SEQ ID NO: 3006205 - RNA, 13 nt, Human
ccuuuaagagaaa

SEQ ID NO: 3006206 - RNA, 16 nt, Human
ccuuguggucccaccc

SEQ ID NO: 3006207 - RNA, 19 nt, Human
ccuuguggucccaccccac

SEQ ID NO: 3006208 - RNA, 20 nt, Human
ccuuguggucccaccccaca

SEQ ID NO: 3006209 - RNA, 13 nt, Human
ccuuggcugcagg

SEQ ID NO: 3006210 - RNA, 12 nt, Human
ccuuggcugcag

SEQ ID NO: 3006211 - RNA, 23 nt, Human
ccuuugacgccaucccagcccca

SEQ ID NO: 3006212 - RNA, 16 nt, Human
ccuuugcuugaaagaa

SEQ ID NO: 3006213 - RNA, 12 nt, Human
cgaggacaggga

SEQ ID NO: 3006214 - RNA, 13 nt, Human
cgaggacagggag

SEQ ID NO: 3006215 - RNA, 19 nt, Human
cgaggccuucucugaagga

SEQ ID NO: 3006216 - RNA, 18 nt, Human
cgaggccuucucugaagg

SEQ ID NO: 3006217 - RNA, 20 nt, Human
ccuuuguauucucuccugua

SEQ ID NO: 3006218 - RNA, 18 nt, Human
ccuuuguauucucuccug

SEQ ID NO: 3006219 - RNA, 15 nt, Human
ccuuuguauucucuc

SEQ ID NO: 3006220 - RNA, 19 nt, Human
cgauucuucugcuucagcc

SEQ ID NO: 3006221 - RNA, 13 nt, Human
cgauucuucugcu

SEQ ID NO: 3006222 - RNA, 21 nt, Human
cgauucuucugcuucagccuc

SEQ ID NO: 3006223 - RNA, 19 nt, Human
cgaucuggguucacugcaa

SEQ ID NO: 3006224 - RNA, 11 nt, Human
cgcaaugugac

SEQ ID NO: 3006225 - RNA, 23 nt, Human
cgcacuucgggaggucgaggcag

SEQ ID NO: 3006226 - RNA, 12 nt, Human
cgauuucuguuu

SEQ ID NO: 3006227 - RNA, 17 nt, Human
cggccuccauccugagg

SEQ ID NO: 3006228 - RNA, 16 nt, Human
cggccuccauccugag

SEQ ID NO: 3006229 - RNA, 14 nt, Human
cggccuccauccug

SEQ ID NO: 3006230 - RNA, 13 nt, Human
cggccccaccagu

SEQ ID NO: 3006231 - RNA, 17 nt, Human
cggccccaccagugccu

SEQ ID NO: 3006232 - RNA, 16 nt, Human
cggccccaccagugcc

SEQ ID NO: 3006233 - RNA, 15 nt, Human
cggccccaccagugc

SEQ ID NO: 3006234 - RNA, 20 nt, Human
cggccccaccagugccucuc

SEQ ID NO: 3006235 - RNA, 18 nt, Human
cggccccaccagugccuc

SEQ ID NO: 3006236 - RNA, 21 nt, Human
cggccccaccagugccucucc

SEQ ID NO: 3006237 - RNA, 15 nt, Human
cggcuggccuggccc

SEQ ID NO: 3006238 - RNA, 16 nt, Human
cggcuggccuggcccc

SEQ ID NO: 3006239 - RNA, 14 nt, Human
cggcuggccuggcc

SEQ ID NO: 3006240 - RNA, 18 nt, Human
cggcuggccuggccccuc

SEQ ID NO: 3006241 - RNA, 12 nt, Human
cgggcaugacac

SEQ ID NO: 3006242 - RNA, 15 nt, Human
cgggcaugacacgaa

SEQ ID NO: 3006243 - RNA, 17 nt, Human
cgggaggucgaggcagg

SEQ ID NO: 3006244 - RNA, 16 nt, Human
cgggaggucgaggcag

SEQ ID NO: 3006245 - RNA, 17 nt, Human
cgggaggcugaggcagg

SEQ ID NO: 3006246 - RNA, 16 nt, Human
cgggaggcugaggcag

SEQ ID NO: 3006247 - RNA, 18 nt, Human
cgggaggcugaggcagga

SEQ ID NO: 3006248 - RNA, 20 nt, Human
cgggaggauguucugggaca

SEQ ID NO: 3006249 - RNA, 21 nt, Human
cggaccccacuccggcccucc

SEQ ID NO: 3006250 - RNA, 17 nt, Human
cggaccccacuccggcc

SEQ ID NO: 3006251 - RNA, 21 nt, Human
cggaccuuguagugagccgag

SEQ ID NO: 3006252 - RNA, 18 nt, Human
cggacagccacggccagg

SEQ ID NO: 3006253 - RNA, 16 nt, Human
cggacagccacggcca

SEQ ID NO: 3006254 - RNA, 15 nt, Human
cggacagccacggcc

SEQ ID NO: 3006255 - RNA, 20 nt, Human
cggaaugaaccacaucuugc

SEQ ID NO: 3006256 - RNA, 13 nt, Human
cgcuccugugucu

SEQ ID NO: 3006257 - RNA, 18 nt, Human
ccagaagucaaggcuuag

SEQ ID NO: 3006258 - RNA, 22 nt, Human
ccagaaguuugagaucagccug

SEQ ID NO: 3006259 - RNA, 23 nt, Human
ccagaaguuugagaucagccugg

SEQ ID NO: 3006260 - RNA, 18 nt, Human
ccacugcagaagacagua

SEQ ID NO: 3006261 - RNA, 13 nt, Human
ccacugcagaaga

SEQ ID NO: 3006262 - RNA, 23 nt, Human
ccacugcacuccagccuggguga

SEQ ID NO: 3006263 - RNA, 13 nt, Human
ccacuucagcuga

SEQ ID NO: 3006264 - RNA, 14 nt, Human
ccacuucagcugac

SEQ ID NO: 3006265 - RNA, 20 nt, Human
ccagacaccuugacagggca

SEQ ID NO: 3006266 - RNA, 21 nt, Human
ccagacaccuugacagggcac

SEQ ID NO: 3006267 - RNA, 21 nt, Human
ccagaauuucccaaagcagug

SEQ ID NO: 3006268 - RNA, 18 nt, Human
ccagaauuucccaaagca

SEQ ID NO: 3006269 - RNA, 12 nt, Human
ccagaauuuccc

SEQ ID NO: 3006270 - RNA, 19 nt, Human
ccagaauuucccaaagcag

SEQ ID NO: 3006271 - RNA, 14 nt, Human
ccacuacauucugu

SEQ ID NO: 3006272 - RNA, 15 nt, Human
ccacuacauucuguu

SEQ ID NO: 3006273 - RNA, 11 nt, Human
ccacuacauuc

SEQ ID NO: 3006274 - RNA, 17 nt, Human
ccacuacauucuguuaa

SEQ ID NO: 3006275 - RNA, 16 nt, Human
ccacuacauucuguua

SEQ ID NO: 3006276 - RNA, 13 nt, Human
ccacgcuggagug

SEQ ID NO: 3006277 - RNA, 16 nt, Human
ccacgcuggagugcag

SEQ ID NO: 3006278 - RNA, 15 nt, Human
ccacccccacccaag

SEQ ID NO: 3006279 - RNA, 18 nt, Human
ccacggccaggccagagg

SEQ ID NO: 3006280 - RNA, 16 nt, Human
ccacggccaggccaga

SEQ ID NO: 3006281 - RNA, 19 nt, Human
ccacgcuggagugcaguga

SEQ ID NO: 3006282 - RNA, 18 nt, Human
ccacgcuggagugcagug

SEQ ID NO: 3006283 - RNA, 23 nt, Human
ccacggccaggccagagggagug

SEQ ID NO: 3006284 - RNA, 15 nt, Human
ccaccccacacacgc

SEQ ID NO: 3006285 - RNA, 12 nt, Human
ccaauauccuaa

SEQ ID NO: 3006286 - RNA, 13 nt, Human
ccaauauccuaau

SEQ ID NO: 3006287 - RNA, 14 nt, Human
ccaauauccuaaua

SEQ ID NO: 3006288 - RNA, 15 nt, Human
ccaauauccuaauaa

SEQ ID NO: 3006289 - RNA, 16 nt, Human
ccaauauccuaauaaa

SEQ ID NO: 3006290 - RNA, 17 nt, Human
ccaauauccuaauaaaa

SEQ ID NO: 3006291 - RNA, 18 nt, Human
ccaauauccuaauaaaaa

SEQ ID NO: 3006292 - RNA, 19 nt, Human
ccaauauccuaauaaaaag

SEQ ID NO: 3006293 - RNA, 16 nt, Human
ccaauauucauagcag

SEQ ID NO: 3006294 - RNA, 20 nt, Human
ccacaggaaccacaagacug

SEQ ID NO: 3006295 - RNA, 16 nt, Human
ccacaggaucagucug

SEQ ID NO: 3006296 - RNA, 22 nt, Human
ccacaccauaagcuacugccau

SEQ ID NO: 3006297 - RNA, 21 nt, Human
ccacaccauaagcuacugcca

SEQ ID NO: 3006298 - RNA, 20 nt, Human
ccacaccauaagcuacugcc

SEQ ID NO: 3006299 - RNA, 15 nt, Human
ccacacccagcccac

SEQ ID NO: 3006300 - RNA, 20 nt, Human
ccacacccagcccacuucug

SEQ ID NO: 3006301 - RNA, 22 nt, Human
ccacacccagcccacuucugcc

SEQ ID NO: 3006302 - RNA, 21 nt, Human
ccacacccagcccacuucugc

SEQ ID NO: 3006303 - RNA, 21 nt, Human
ccaccaacauacucccaucug

SEQ ID NO: 3006304 - RNA, 17 nt, Human
ccacaucuugcucugcu

SEQ ID NO: 3006305 - RNA, 18 nt, Human
ccacaucuugcucugcug

SEQ ID NO: 3006306 - RNA, 19 nt, Human
ccacaucuugcucugcuga

SEQ ID NO: 3006307 - RNA, 16 nt, Human
ccacauuccugaugcu

SEQ ID NO: 3006308 - RNA, 16 nt, Human
ccacaugugcacaugc

SEQ ID NO: 3006309 - RNA, 17 nt, Human
ccacccccacccaaggg

SEQ ID NO: 3006310 - RNA, 23 nt, Human
ccacccaggagccccgaggccuu

SEQ ID NO: 3006311 - RNA, 21 nt, Human
ccacccaggagccccgaggcc

SEQ ID NO: 3006312 - RNA, 19 nt, Human
cauuuuagggguagcauuu

SEQ ID NO: 3006313 - RNA, 17 nt, Human
ccaaacucaccugcccc

SEQ ID NO: 3006314 - RNA, 20 nt, Human
cauuugaaaauuuugauguu

SEQ ID NO: 3006315 - RNA, 22 nt, Human
cauuugaaaauuuugauguuuu

SEQ ID NO: 3006316 - RNA, 13 nt, Human
cauuugcuccuuu

SEQ ID NO: 3006317 - RNA, 14 nt, Human
cauuugcuccuuuc

SEQ ID NO: 3006318 - RNA, 18 nt, Human
cauuugcucauggaauug

SEQ ID NO: 3006319 - RNA, 13 nt, Human
cauuugcucaugg

SEQ ID NO: 3006320 - RNA, 22 nt, Human
cauuuguuugaacugauaaaga

SEQ ID NO: 3006321 - RNA, 20 nt, Human
cauuuguuugaacugauaaa

SEQ ID NO: 3006322 - RNA, 17 nt, Human
cauuuguuugaacugau

SEQ ID NO: 3006323 - RNA, 18 nt, Human
cauuugagcagggcucag

SEQ ID NO: 3006324 - RNA, 17 nt, Human
cauuugagcagggcuca

SEQ ID NO: 3006325 - RNA, 20 nt, Human
cauuugagcagggcucagcg

SEQ ID NO: 3006326 - RNA, 16 nt, Human
cauuugagcagggcuc

SEQ ID NO: 3006327 - RNA, 14 nt, Human
cacccaagggccug

SEQ ID NO: 3006328 - RNA, 15 nt, Human
cacccaagggccugg

SEQ ID NO: 3006329 - RNA, 18 nt, Human
cauuguuggccaaagcca

SEQ ID NO: 3006330 - RNA, 17 nt, Human
cauuguuggccaaagcc

SEQ ID NO: 3006331 - RNA, 13 nt, Human
cauuuccuguguc

SEQ ID NO: 3006332 - RNA, 12 nt, Human
cauuuccugugu

SEQ ID NO: 3006333 - RNA, 16 nt, Human
cauuuaaaagauacag

SEQ ID NO: 3006334 - RNA, 15 nt, Human
cauuuaaaagauaca

SEQ ID NO: 3006335 - RNA, 12 nt, Human
cauuuaaaagau

SEQ ID NO: 3006336 - RNA, 17 nt, Human
cauuuaggccaugggac

SEQ ID NO: 3006337 - RNA, 17 nt, Human
ccaagcauuuagaugua

SEQ ID NO: 3006338 - RNA, 22 nt, Human
ccaagcauaccaacacgagcag

SEQ ID NO: 3006339 - RNA, 15 nt, Human
ccaagcucccaggca

SEQ ID NO: 3006340 - RNA, 16 nt, Human
ccaagcucccaggcau

SEQ ID NO: 3006341 - RNA, 22 nt, Human
ccaagcucccaggcauucccca

SEQ ID NO: 3006342 - RNA, 17 nt, Human
ccaaggccaaaggaagc

SEQ ID NO: 3006343 - RNA, 14 nt, Human
ccaagcucccaggc

SEQ ID NO: 3006344 - RNA, 23 nt, Human
ccaagguuuggggaagaacgaag

SEQ ID NO: 3006345 - RNA, 13 nt, Human
ccaaggugggagg

SEQ ID NO: 3006346 - RNA, 20 nt, Human
ccaagucaagugaaaaagga

SEQ ID NO: 3006347 - RNA, 19 nt, Human
ccaagggccuggccugagc

SEQ ID NO: 3006348 - RNA, 16 nt, Human
ccaagggccuggccug

SEQ ID NO: 3006349 - RNA, 18 nt, Human
ccaagggccuggccugag

SEQ ID NO: 3006350 - RNA, 22 nt, Human
ccaaggggaauguuugccucug

SEQ ID NO: 3006351 - RNA, 18 nt, Human
ccaaggccaaaggaagca

SEQ ID NO: 3006352 - RNA, 21 nt, Human
ccaaggccaaaggaagcacau

SEQ ID NO: 3006353 - RNA, 15 nt, Human
ccaagggccuggccu

SEQ ID NO: 3006354 - RNA, 16 nt, Human
ccaagggaauauugcc

SEQ ID NO: 3006355 - RNA, 14 nt, Human
ccaagcaaguauua

SEQ ID NO: 3006356 - RNA, 15 nt, Human
ccaagaagcccagga

SEQ ID NO: 3006357 - RNA, 12 nt, Human
ccaacccucauc

SEQ ID NO: 3006358 - RNA, 19 nt, Human
ccaagaagcccaggaaagg

SEQ ID NO: 3006359 - RNA, 20 nt, Human
ccaagaagcccaggaaaggc

SEQ ID NO: 3006360 - RNA, 17 nt, Human
ccaacauacucccaucu

SEQ ID NO: 3006361 - RNA, 18 nt, Human
ccaacauacucccaucug

SEQ ID NO: 3006362 - RNA, 19 nt, Human
ccaacauacucccaucugu

SEQ ID NO: 3006363 - RNA, 20 nt, Human
ccaacauacucccaucugug

SEQ ID NO: 3006364 - RNA, 16 nt, Human
ccaacauacucccauc

SEQ ID NO: 3006365 - RNA, 21 nt, Human
ccaacauacucccaucuguga

SEQ ID NO: 3006366 - RNA, 22 nt, Human
ccaacauacucccaucugugaa

SEQ ID NO: 3006367 - RNA, 20 nt, Human
ccaaaguacacuguuucaaa

SEQ ID NO: 3006368 - RNA, 23 nt, Human
ccaaauuucauaccuaucaucuu

SEQ ID NO: 3006369 - RNA, 18 nt, Human
ccaaaguacacuguuuca

SEQ ID NO: 3006370 - RNA, 15 nt, Human
ccaaaguacacuguu

SEQ ID NO: 3006371 - RNA, 15 nt, Human
ccaaaggaagcacau

SEQ ID NO: 3006372 - RNA, 23 nt, Human
ccaaaggaagcacaugccucucu

SEQ ID NO: 3006373 - RNA, 15 nt, Human
ccaaagcuaggccug

SEQ ID NO: 3006374 - RNA, 17 nt, Human
ccaaagcuaggccuggc

SEQ ID NO: 3006375 - RNA, 16 nt, Human
ccaaagcuaggccugg

SEQ ID NO: 3006376 - RNA, 21 nt, Human
ccaaagcuaggccuggccaga

SEQ ID NO: 3006377 - RNA, 20 nt, Human
ccaaacucaccugccccuca

SEQ ID NO: 3006378 - RNA, 19 nt, Human
ccaaagcagugcaugcugu

SEQ ID NO: 3006379 - RNA, 22 nt, Human
ccaaacugacucuuaagaagac

SEQ ID NO: 3006380 - RNA, 23 nt, Human
ccaaagcagugcaugcugucccu

SEQ ID NO: 3006381 - RNA, 19 nt, Human
ccaaagccaaagcuaggcc

SEQ ID NO: 3006382 - RNA, 17 nt, Human
ccaaagccuccuccagc

SEQ ID NO: 3006383 - RNA, 22 nt, Human
ccaaagccuccuccagccgcca

SEQ ID NO: 3006384 - RNA, 17 nt, Human
cccaggaguuuggccag

SEQ ID NO: 3006385 - RNA, 18 nt, Human
cccaggaguuuggccaga

SEQ ID NO: 3006386 - RNA, 19 nt, Human
cccaggaguuuggccagaa

SEQ ID NO: 3006387 - RNA, 20 nt, Human
cccaggaguuuggccagaag

SEQ ID NO: 3006388 - RNA, 15 nt, Human
cccaggaguuuggcc

SEQ ID NO: 3006389 - RNA, 16 nt, Human
cccaggaguuuggcca

SEQ ID NO: 3006390 - RNA, 13 nt, Human
cccaggcaggucu

SEQ ID NO: 3006391 - RNA, 11 nt, Human
cccaggcaggu

SEQ ID NO: 3006392 - RNA, 13 nt, Human
cccaggaggccag

SEQ ID NO: 3006393 - RNA, 22 nt, Human
cccaggaggccagccuugacca

SEQ ID NO: 3006394 - RNA, 18 nt, Human
cccaggagccccgaggcc

SEQ ID NO: 3006395 - RNA, 21 nt, Human
cccaggagccccgaggccuuc

SEQ ID NO: 3006396 - RNA, 22 nt, Human
cccaggccccugccacccuggg

SEQ ID NO: 3006397 - RNA, 21 nt, Human
cccaggccccugccacccugg

SEQ ID NO: 3006398 - RNA, 18 nt, Human
cccaggccccugccaccc

SEQ ID NO: 3006399 - RNA, 16 nt, Human
cccaggccccugccac

SEQ ID NO: 3006400 - RNA, 11 nt, Human
cccaggccccu

SEQ ID NO: 3006401 - RNA, 22 nt, Human
cccaggcauuccccaggaggcc

SEQ ID NO: 3006402 - RNA, 23 nt, Human
cccaggcauuccccaggaggcca

SEQ ID NO: 3006403 - RNA, 20 nt, Human
cccaggcauuccccaggagg

SEQ ID NO: 3006404 - RNA, 21 nt, Human
cccaggcauuccccaggaggc

SEQ ID NO: 3006405 - RNA, 18 nt, Human
cccaggcauuccccagga

SEQ ID NO: 3006406 - RNA, 17 nt, Human
cccaggcaggucuugaa

SEQ ID NO: 3006407 - RNA, 22 nt, Human
cccaggugcuaggaacacuccu

SEQ ID NO: 3006408 - RNA, 13 nt, Human
cccaggugccagu

SEQ ID NO: 3006409 - RNA, 23 nt, Human
cccaggugcuaggaacacuccuu

SEQ ID NO: 3006410 - RNA, 13 nt, Human
cccagugcccaca

SEQ ID NO: 3006411 - RNA, 20 nt, Human
cccagucuggaaugcagugg

SEQ ID NO: 3006412 - RNA, 17 nt, Human
cccaggccuccuacagc

SEQ ID NO: 3006413 - RNA, 18 nt, Human
cccaggccuccuacagcu

SEQ ID NO: 3006414 - RNA, 23 nt, Human
cccaaugcacuuuguucuggcuc

SEQ ID NO: 3006415 - RNA, 21 nt, Human
cccacaccauaagcuacugcc

SEQ ID NO: 3006416 - RNA, 17 nt, Human
cccacaccauaagcuac

SEQ ID NO: 3006417 - RNA, 23 nt, Human
cccaaauggaaaugggcagagca

SEQ ID NO: 3006418 - RNA, 17 nt, Human
cccaagggccuggccug

SEQ ID NO: 3006419 - RNA, 18 nt, Human
cccaagggccuggccuga

SEQ ID NO: 3006420 - RNA, 19 nt, Human
cccaagggccuggccugag

SEQ ID NO: 3006421 - RNA, 23 nt, Human
cccaagggccuggccugagcugg

SEQ ID NO: 3006422 - RNA, 18 nt, Human
cccagcaagugagagcug

SEQ ID NO: 3006423 - RNA, 16 nt, Human
cccagcaagugagagc

SEQ ID NO: 3006424 - RNA, 22 nt, Human
cccagauugcaacaggcugggc

SEQ ID NO: 3006425 - RNA, 21 nt, Human
cccagauugcaacaggcuggg

SEQ ID NO: 3006426 - RNA, 20 nt, Human
cccagauugcaacaggcugg

SEQ ID NO: 3006427 - RNA, 20 nt, Human
cccagagggccugcaaggga

SEQ ID NO: 3006428 - RNA, 18 nt, Human
cccagagggccugcaagg

SEQ ID NO: 3006429 - RNA, 19 nt, Human
cccagccuggaugccaucc

SEQ ID NO: 3006430 - RNA, 15 nt, Human
cccagcgagcccugg

SEQ ID NO: 3006431 - RNA, 18 nt, Human
cccagcgagcccuggugg

SEQ ID NO: 3006432 - RNA, 17 nt, Human
cccagcgagcccuggug

SEQ ID NO: 3006433 - RNA, 23 nt, Human
cccagcgagcccugguggcagug

SEQ ID NO: 3006434 - RNA, 19 nt, Human
cccagcgagcccugguggc

SEQ ID NO: 3006435 - RNA, 14 nt, Human
cccagccuggaugc

SEQ ID NO: 3006436 - RNA, 18 nt, Human
cccagccuggaugccauc

SEQ ID NO: 3006437 - RNA, 12 nt, Human
cccagccugcua

SEQ ID NO: 3006438 - RNA, 22 nt, Human
cccagcaagugagagcugggug

SEQ ID NO: 3006439 - RNA, 21 nt, Human
cccagcaagugagagcugggu

SEQ ID NO: 3006440 - RNA, 20 nt, Human
cccagcaagugagagcuggg

SEQ ID NO: 3006441 - RNA, 19 nt, Human
cccagcaagugagagcugg

SEQ ID NO: 3006442 - RNA, 11 nt, Human
cccagccccuu

SEQ ID NO: 3006443 - RNA, 17 nt, Human
ccccaggaggccagccu

SEQ ID NO: 3006444 - RNA, 17 nt, Human
cccaugcugcccuguga

SEQ ID NO: 3006445 - RNA, 18 nt, Human
cccaugcugcccugugag

SEQ ID NO: 3006446 - RNA, 15 nt, Human
cccaugcugcccugu

SEQ ID NO: 3006447 - RNA, 16 nt, Human
cccaugcugcccugug

SEQ ID NO: 3006448 - RNA, 18 nt, Human
cccagugccgagaaggaa

SEQ ID NO: 3006449 - RNA, 17 nt, Human
cccagugccgagaagga

SEQ ID NO: 3006450 - RNA, 20 nt, Human
cccagugcccacaggaucag

SEQ ID NO: 3006451 - RNA, 15 nt, Human
cccagugcccacagg

SEQ ID NO: 3006452 - RNA, 14 nt, Human
ccccacccaagggc

SEQ ID NO: 3006453 - RNA, 20 nt, Human
ccccacccaagggccuggcc

SEQ ID NO: 3006454 - RNA, 18 nt, Human
ccccaccagugccucucc

SEQ ID NO: 3006455 - RNA, 17 nt, Human
ccccaccagugccucuc

SEQ ID NO: 3006456 - RNA, 22 nt, Human
ccccaccagugccucucccugc

SEQ ID NO: 3006457 - RNA, 15 nt, Human
ccccaccagugccuc

SEQ ID NO: 3006458 - RNA, 16 nt, Human
ccccaccagugccucu

SEQ ID NO: 3006459 - RNA, 22 nt, Human
ccccaaauggaaaugggcagag

SEQ ID NO: 3006460 - RNA, 13 nt, Human
cccauucugccug

SEQ ID NO: 3006461 - RNA, 17 nt, Human
ccccaagacucccauga

SEQ ID NO: 3006462 - RNA, 13 nt, Human
ccaggugccaguu

SEQ ID NO: 3006463 - RNA, 17 nt, Human
ccaggugccaguuaugg

SEQ ID NO: 3006464 - RNA, 19 nt, Human
ccaggugcuaggaacacuc

SEQ ID NO: 3006465 - RNA, 14 nt, Human
ccagguucagcuug

SEQ ID NO: 3006466 - RNA, 23 nt, Human
ccaguaaaugggggugcauuuga

SEQ ID NO: 3006467 - RNA, 13 nt, Human
ccaggccccugcc

SEQ ID NO: 3006468 - RNA, 19 nt, Human
ccaggcuggucucaaacuc

SEQ ID NO: 3006469 - RNA, 14 nt, Human
ccaggcuggucuca

SEQ ID NO: 3006470 - RNA, 20 nt, Human
ccaggcuguaucccaugagc

SEQ ID NO: 3006471 - RNA, 16 nt, Human
ccagggcaucugggag

SEQ ID NO: 3006472 - RNA, 15 nt, Human
ccagggcaucuggga

SEQ ID NO: 3006473 - RNA, 15 nt, Human
ccaggagcagccaca

SEQ ID NO: 3006474 - RNA, 16 nt, Human
ccaggagcagccacau

SEQ ID NO: 3006475 - RNA, 15 nt, Human
ccaggagccccgagg

SEQ ID NO: 3006476 - RNA, 13 nt, Human
ccaggcauggugg

SEQ ID NO: 3006477 - RNA, 14 nt, Human
ccaggcauucccca

SEQ ID NO: 3006478 - RNA, 24 nt, Human
ccaggcauuccccaggaggccagc

SEQ ID NO: 3006479 - RNA, 23 nt, Human
ccaggcauuccccaggaggccag

SEQ ID NO: 3006480 - RNA, 22 nt, Human
ccaggcauuccccaggaggcca

SEQ ID NO: 3006481 - RNA, 13 nt, Human
ccaggagccuccu

SEQ ID NO: 3006482 - RNA, 14 nt, Human
ccaggagccuccug

SEQ ID NO: 3006483 - RNA, 18 nt, Human
ccaggagccuccugcccu

SEQ ID NO: 3006484 - RNA, 12 nt, Human
ccaggagccucc

SEQ ID NO: 3006485 - RNA, 12 nt, Human
ccaggaggccag

SEQ ID NO: 3006486 - RNA, 13 nt, Human
ccaggaggccagc

SEQ ID NO: 3006487 - RNA, 20 nt, Human
ccaggaagccagcaggcucu

SEQ ID NO: 3006488 - RNA, 22 nt, Human
ccaggaagccagcaggcucuca

SEQ ID NO: 3006489 - RNA, 14 nt, Human
ccagcucuggucca

SEQ ID NO: 3006490 - RNA, 17 nt, Human
ccagcucugguccauag

SEQ ID NO: 3006491 - RNA, 21 nt, Human
ccagcucugguccauagagag

SEQ ID NO: 3006492 - RNA, 22 nt, Human
ccagcucugguccauagagagc

SEQ ID NO: 3006493 - RNA, 20 nt, Human
ccagcugcugagauccugga

SEQ ID NO: 3006494 - RNA, 21 nt, Human
ccagcugcugagauccuggac

SEQ ID NO: 3006495 - RNA, 23 nt, Human
ccagcugcugagauccuggacug

SEQ ID NO: 3006496 - RNA, 22 nt, Human
ccagcugcugagauccuggacu

SEQ ID NO: 3006497 - RNA, 20 nt, Human
ccagcugcuugggcuucauc

SEQ ID NO: 3006498 - RNA, 23 nt, Human
ccagcugcuugggcuucauccuc

SEQ ID NO: 3006499 - RNA, 19 nt, Human
ccagccuugaccauucucc

SEQ ID NO: 3006500 - RNA, 20 nt, Human
ccagccuugaccauucucca

SEQ ID NO: 3006501 - RNA, 16 nt, Human
ccagagcccaccuugg

SEQ ID NO: 3006502 - RNA, 22 nt, Human
ccagagcccaccuuggcucaag

SEQ ID NO: 3006503 - RNA, 16 nt, Human
ccagcgagcccuggug

SEQ ID NO: 3006504 - RNA, 15 nt, Human
ccagcgagcccuggu

SEQ ID NO: 3006505 - RNA, 22 nt, Human
ccagccuugaccauucuccacc

SEQ ID NO: 3006506 - RNA, 14 nt, Human
ccagcgagcccugg

SEQ ID NO: 3006507 - RNA, 12 nt, Human
ccagcucugguc

SEQ ID NO: 3006508 - RNA, 13 nt, Human
ccagcucuggucc

SEQ ID NO: 3006509 - RNA, 11 nt, Human
ccagcucuggu

SEQ ID NO: 3006510 - RNA, 20 nt, Human
ccauccucuguacagagccc

SEQ ID NO: 3006511 - RNA, 18 nt, Human
ccaucaaggguacacugc

SEQ ID NO: 3006512 - RNA, 13 nt, Human
ccaucaccagaca

SEQ ID NO: 3006513 - RNA, 17 nt, Human
ccagugaggcucugccc

SEQ ID NO: 3006514 - RNA, 20 nt, Human
ccagugaggcucugcccuug

SEQ ID NO: 3006515 - RNA, 18 nt, Human
ccagugaggcucugcccu

SEQ ID NO: 3006516 - RNA, 19 nt, Human
ccagugaggcucugcccuu

SEQ ID NO: 3006517 - RNA, 12 nt, Human
ccauccucugua

SEQ ID NO: 3006518 - RNA, 19 nt, Human
ccauccucuguacagagcc

SEQ ID NO: 3006519 - RNA, 14 nt, Human
ccauccuccuggga

SEQ ID NO: 3006520 - RNA, 22 nt, Human
ccaucauugaaaucuuuuugcu

SEQ ID NO: 3006521 - RNA, 23 nt, Human
ccauccacuggguguaaacacau

SEQ ID NO: 3006522 - RNA, 14 nt, Human
ccaugaagauguag

SEQ ID NO: 3006523 - RNA, 19 nt, Human
ccaugauuaaccacuucag

SEQ ID NO: 3006524 - RNA, 21 nt, Human
ccaugauuaaccacuucagcu

SEQ ID NO: 3006525 - RNA, 18 nt, Human
ccaugauguuuuccauga

SEQ ID NO: 3006526 - RNA, 16 nt, Human
ccaugauguuuagaaa

SEQ ID NO: 3006527 - RNA, 14 nt, Human
ccaugcugcccugu

SEQ ID NO: 3006528 - RNA, 11 nt, Human
ccaugcugccc

SEQ ID NO: 3006529 - RNA, 13 nt, Human
ccaugcugcccug

SEQ ID NO: 3006530 - RNA, 20 nt, Human
cccaaaacucuccucugcug

SEQ ID NO: 3006531 - RNA, 13 nt, Human
cccaaaaggcaga

SEQ ID NO: 3006532 - RNA, 18 nt, Human
cccaaaaggcagaagcaa

SEQ ID NO: 3006533 - RNA, 23 nt, Human
ccauuuuggauucuuauggacaa

SEQ ID NO: 3006534 - RNA, 20 nt, Human
ccauuuugggguacccacug

SEQ ID NO: 3006535 - RNA, 22 nt, Human
ccauuuugggguacccacugcu

SEQ ID NO: 3006536 - RNA, 12 nt, Human
cccaaagaugca

SEQ ID NO: 3006537 - RNA, 15 nt, Human
cccaaagaugcagcc

SEQ ID NO: 3006538 - RNA, 16 nt, Human
cccaaagcagugcaug

SEQ ID NO: 3006539 - RNA, 18 nt, Human
ccauucugccugcccagg

SEQ ID NO: 3006540 - RNA, 17 nt, Human
ccauucugccugcccag

SEQ ID NO: 3006541 - RNA, 17 nt, Human
ccauucuccaccugcca

SEQ ID NO: 3006542 - RNA, 16 nt, Human
ccauucugccugccca

SEQ ID NO: 3006543 - RNA, 20 nt, Human
ccauucugccugcccaggcc

SEQ ID NO: 3006544 - RNA, 19 nt, Human
ccauucugccugcccaggc

SEQ ID NO: 3006545 - RNA, 14 nt, Human
ccauucuccaccug

SEQ ID NO: 3006546 - RNA, 21 nt, Human
ccauucugccugcccaggccc

SEQ ID NO: 3006547 - RNA, 13 nt, Human
ccauggacuuugu

SEQ ID NO: 3006548 - RNA, 14 nt, Human
ccauggacuuuguu

SEQ ID NO: 3006549 - RNA, 15 nt, Human
ccauucuccaccugc

SEQ ID NO: 3006550 - RNA, 16 nt, Human
ccauucuccaccugcc

SEQ ID NO: 3006551 - RNA, 17 nt, Human
ucacgugguccuaaucu

SEQ ID NO: 3006552 - RNA, 22 nt, Human
augacccagugguuccuaaucc

SEQ ID NO: 3006553 - RNA, 13 nt, Human
aaaaauuuacuuu

SEQ ID NO: 3006554 - RNA, 18 nt, Human
aaaaauuuacuuuaaacu

SEQ ID NO: 3006555 - RNA, 19 nt, Human
aaaaauuuacuuuaaacua

SEQ ID NO: 3006556 - RNA, 13 nt, Human
aagaaauuugugg

SEQ ID NO: 3006557 - RNA, 21 nt, Human
aaguccccucuccuccacauu

SEQ ID NO: 3006558 - RNA, 20 nt, Human
aaguccccucuccuccacau

SEQ ID NO: 3006559 - RNA, 14 nt, Human
aaugguaguuuuac

SEQ ID NO: 3006560 - RNA, 20 nt, Human
aaugucaguuguuauuuauu

SEQ ID NO: 3006561 - RNA, 19 nt, Human
aaugucaguuguuauuuau

SEQ ID NO: 3006562 - RNA, 19 nt, Human
aaucacacugucuucugau

SEQ ID NO: 3006563 - RNA, 15 nt, Human
aacugaacuucagag

SEQ ID NO: 3006564 - RNA, 20 nt, Human
aacucaccuggcaucuuaca

SEQ ID NO: 3006565 - RNA, 19 nt, Human
aacuuauggggccaaaaua

SEQ ID NO: 3006566 - RNA, 23 nt, Human
aacugacacaugcugaacaucac

SEQ ID NO: 3006567 - RNA, 16 nt, Human
aacuuuuuauauucuc

SEQ ID NO: 3006568 - RNA, 19 nt, Human
aacaaaggauacuuauuua

SEQ ID NO: 3006569 - RNA, 15 nt, Human
aacaaaggauacuua

SEQ ID NO: 3006570 - RNA, 18 nt, Human
aaagaugaaggucuguuu

SEQ ID NO: 3006571 - RNA, 13 nt, Human
acacaaagcuuuu

SEQ ID NO: 3006572 - RNA, 18 nt, Human
acacuguccuauuauauu

SEQ ID NO: 3006573 - RNA, 13 nt, Human
acauuaaagguac

SEQ ID NO: 3006574 - RNA, 12 nt, Human
acauuaaaugac

SEQ ID NO: 3006575 - RNA, 11 nt, Human
acauuaaauga

SEQ ID NO: 3006576 - RNA, 14 nt, Human
acuguuuagaugaa

SEQ ID NO: 3006577 - RNA, 18 nt, Human
acuuauuuaaauagauga

SEQ ID NO: 3006578 - RNA, 13 nt, Human
acuuauuuaaaua

SEQ ID NO: 3006579 - RNA, 22 nt, Human
acucuauaacaaaggauacuua

SEQ ID NO: 3006580 - RNA, 16 nt, Human
acucuaccugcacacu

SEQ ID NO: 3006581 - RNA, 16 nt, Human
acgugcacgcacacug

SEQ ID NO: 3006582 - RNA, 13 nt, Human
auacuuauuuaaa

SEQ ID NO: 3006583 - RNA, 23 nt, Human
auauccuaauaaaaaggugacca

SEQ ID NO: 3006584 - RNA, 19 nt, Human
auaucccuuggacauuuua

SEQ ID NO: 3006585 - RNA, 20 nt, Human
auauccuaauaaaaagguga

SEQ ID NO: 3006586 - RNA, 11 nt, Human
auaucacuucc

SEQ ID NO: 3006587 - RNA, 17 nt, Human
auauagcaagacauuau

SEQ ID NO: 3006588 - RNA, 22 nt, Human
auacuuauuuaaauagaugaca

SEQ ID NO: 3006589 - RNA, 15 nt, Human
auacuuauuuaaaua

SEQ ID NO: 3006590 - RNA, 21 nt, Human
auacuuauuuaaauagaugac

SEQ ID NO: 3006591 - RNA, 22 nt, Human
auauaauuccuguuuuuauuau

SEQ ID NO: 3006592 - RNA, 16 nt, Human
auauaauuccuguuuu

SEQ ID NO: 3006593 - RNA, 12 nt, Human
agucauuauguu

SEQ ID NO: 3006594 - RNA, 18 nt, Human
agucauuauguuaauauu

SEQ ID NO: 3006595 - RNA, 13 nt, Human
agucauucuuuaa

SEQ ID NO: 3006596 - RNA, 14 nt, Human
agucauucuucccu

SEQ ID NO: 3006597 - RNA, 16 nt, Human
agucaaggcuuagacc

SEQ ID NO: 3006598 - RNA, 14 nt, Human
agucaaggcuuaga

SEQ ID NO: 3006599 - RNA, 23 nt, Human
aucuucuauauaauuccuguuuu

SEQ ID NO: 3006600 - RNA, 18 nt, Human
augacuauucaguggcua

SEQ ID NO: 3006601 - RNA, 18 nt, Human
augacucuucccucaaau

SEQ ID NO: 3006602 - RNA, 17 nt, Human
auuaaaugacucuuccc

SEQ ID NO: 3006603 - RNA, 14 nt, Human
auuaaaugacucuu

SEQ ID NO: 3006604 - RNA, 21 nt, Human
auuaaaugacucuucccucaa

SEQ ID NO: 3006605 - RNA, 16 nt, Human
augcuugcugcugauu

SEQ ID NO: 3006606 - RNA, 22 nt, Human
augcuugcugcugauuuaaaca

SEQ ID NO: 3006607 - RNA, 17 nt, Human
agguacacuugugaaua

SEQ ID NO: 3006608 - RNA, 16 nt, Human
agguacacuugugaau

SEQ ID NO: 3006609 - RNA, 14 nt, Human
agguacacuuguga

SEQ ID NO: 3006610 - RNA, 17 nt, Human
agagguacacuugugaa

SEQ ID NO: 3006611 - RNA, 16 nt, Human
agagguacacuuguga

SEQ ID NO: 3006612 - RNA, 12 nt, Human
agcaugaagaca

SEQ ID NO: 3006613 - RNA, 20 nt, Human
agcagcccucaauugugaaa

SEQ ID NO: 3006614 - RNA, 20 nt, Human
agauguagacaguuggguuu

SEQ ID NO: 3006615 - RNA, 19 nt, Human
agccccacccucagaugca

SEQ ID NO: 3006616 - RNA, 16 nt, Human
cucuccccuucucugu

SEQ ID NO: 3006617 - RNA, 15 nt, Human
cguggugauuuagca

SEQ ID NO: 3006618 - RNA, 22 nt, Human
cguggugauuuagcaggaagcu

SEQ ID NO: 3006619 - RNA, 12 nt, Human
ccuuuuuauaac

SEQ ID NO: 3006620 - RNA, 15 nt, Human
ccuuuuuauaacuuu

SEQ ID NO: 3006621 - RNA, 21 nt, Human
ccuuuuuauaacuuuuuauau

SEQ ID NO: 3006622 - RNA, 16 nt, Human
ccuuuuucaauaacug

SEQ ID NO: 3006623 - RNA, 11 nt, Human
cuaauaaaaag

SEQ ID NO: 3006624 - RNA, 13 nt, Human
cuaauaaaaaggu

SEQ ID NO: 3006625 - RNA, 14 nt, Human
cuaauaaaaaggug

SEQ ID NO: 3006626 - RNA, 15 nt, Human
cuaauaaaaagguga

SEQ ID NO: 3006627 - RNA, 20 nt, Human
cgugugugugcguccugucg

SEQ ID NO: 3006628 - RNA, 12 nt, Human
cucaauugugaa

SEQ ID NO: 3006629 - RNA, 13 nt, Human
cucaauugugaaa

SEQ ID NO: 3006630 - RNA, 17 nt, Human
cucaauaaacauuucau

SEQ ID NO: 3006631 - RNA, 21 nt, Human
cucaauaaacauuucauuucc

SEQ ID NO: 3006632 - RNA, 21 nt, Human
cucaaacuaacaggcuuagug

SEQ ID NO: 3006633 - RNA, 15 nt, Human
cuauuuuuguuuuua

SEQ ID NO: 3006634 - RNA, 21 nt, Human
cuauuuuuguuuuuauuaaaa

SEQ ID NO: 3006635 - RNA, 21 nt, Human
cuauuaaacaugcuguacaua

SEQ ID NO: 3006636 - RNA, 22 nt, Human
ccugucggagcccugucuccuc

SEQ ID NO: 3006637 - RNA, 16 nt, Human
ccugucggagcccugu

SEQ ID NO: 3006638 - RNA, 21 nt, Human
ccugucggagcccugucuccu

SEQ ID NO: 3006639 - RNA, 17 nt, Human
ccugucggagcccuguc

SEQ ID NO: 3006640 - RNA, 19 nt, Human
cccugucuccucucucugu

SEQ ID NO: 3006641 - RNA, 21 nt, Human
ccucauuuuuauaaugucccu

SEQ ID NO: 3006642 - RNA, 21 nt, Human
ccucaugcugccaauauccua

SEQ ID NO: 3006643 - RNA, 20 nt, Human
ccucaugcugccaauauccu

SEQ ID NO: 3006644 - RNA, 20 nt, Human
ccaggauuauugucaaagaa

SEQ ID NO: 3006645 - RNA, 21 nt, Human
ccaauauuuaaucuuuuauga

SEQ ID NO: 3006646 - RNA, 14 nt, Human
cauauggauaaaua

SEQ ID NO: 3006647 - RNA, 18 nt, Human
caucuguuacacaaagaa

SEQ ID NO: 3006648 - RNA, 15 nt, Human
cauuaguuuugaaga

SEQ ID NO: 3006649 - RNA, 14 nt, Human
cauuaguuuugaag

SEQ ID NO: 3006650 - RNA, 13 nt, Human
cauuaguuuugaa

SEQ ID NO: 3006651 - RNA, 17 nt, Human
cauuauauagcaguaaa

SEQ ID NO: 3006652 - RNA, 16 nt, Human
cauuaguuuugaagau

SEQ ID NO: 3006653 - RNA, 20 nt, Human
cauuauauagcaguaaaaaa

SEQ ID NO: 3006654 - RNA, 17 nt, Human
auuuaaucuuuuaugau

SEQ ID NO: 3006655 - RNA, 14 nt, Human
auuuaaucuuuuau

SEQ ID NO: 3006656 - RNA, 23 nt, Human
auuucaagaaguccccucuccuc

SEQ ID NO: 3006657 - RNA, 12 nt, Human
auuucaagaagu

SEQ ID NO: 3006658 - RNA, 15 nt, Human
auuucucauguugaa

SEQ ID NO: 3006659 - RNA, 19 nt, Human
auucugagaugacuauuca

SEQ ID NO: 3006660 - RNA, 20 nt, Human
caagaaguccccucuccucc

SEQ ID NO: 3006661 - RNA, 11 nt, Human
cacuugugaau

SEQ ID NO: 3006662 - RNA, 12 nt, Human
cacuugugaaua

SEQ ID NO: 3006663 - RNA, 22 nt, Human
caccuugcagcucuccccuucu

SEQ ID NO: 3006664 - RNA, 15 nt, Human
caccuugcagcucuc

SEQ ID NO: 3006665 - RNA, 13 nt, Human
caccuugcagcuc

SEQ ID NO: 3006666 - RNA, 19 nt, Human
caauaaacauuucauuucc

SEQ ID NO: 3006667 - RNA, 15 nt, Human
ggcuaacuuggguua

SEQ ID NO: 3006668 - RNA, 19 nt, Human
ggaguuauugaagcagagu

SEQ ID NO: 3006669 - RNA, 23 nt, Human
ggauugugccuaauguguuugag

SEQ ID NO: 3006670 - RNA, 14 nt, Human
ggcacaucauuuca

SEQ ID NO: 3006671 - RNA, 15 nt, Human
ggcacaucauuucaa

SEQ ID NO: 3006672 - RNA, 21 nt, Human
aaagggguaggguuuaaagau

SEQ ID NO: 3006673 - RNA, 13 nt, Human
guaauaaacucau

SEQ ID NO: 3006674 - RNA, 17 nt, Human
aaauaauuagguauuuu

SEQ ID NO: 3006675 - RNA, 17 nt, Human
guaacauagcugugauu

SEQ ID NO: 3006676 - RNA, 21 nt, Human
aaauauugguugggaugacuu

SEQ ID NO: 3006677 - RNA, 23 nt, Human
aaauaucccuuggacauuuuaug

SEQ ID NO: 3006678 - RNA, 22 nt, Human
aaauaucccuuggacauuuuau

SEQ ID NO: 3006679 - RNA, 16 nt, Human
gguauagauguugcua

SEQ ID NO: 3006680 - RNA, 15 nt, Human
aaacauuucauuucc

SEQ ID NO: 3006681 - RNA, 16 nt, Human
gggguaaggugcaucu

SEQ ID NO: 3006682 - RNA, 20 nt, Human
aaaaugguguuuuaucuucu

SEQ ID NO: 3006683 - RNA, 21 nt, Human
aaaaggaagcuuacaugccua

SEQ ID NO: 3006684 - RNA, 19 nt, Human
aaaauaauuagguauuuuc

SEQ ID NO: 3006685 - RNA, 18 nt, Human
gcccaggaguuuggccag

SEQ ID NO: 3006686 - RNA, 20 nt, Human
gcccaggaguuuggccagaa

SEQ ID NO: 3006687 - RNA, 19 nt, Human
gcccaggaguuuggccaga

SEQ ID NO: 3006688 - RNA, 13 nt, Human
gcuuuugcauauu

SEQ ID NO: 3006689 - RNA, 17 nt, Human
ggaaaggaaugcaaaga

SEQ ID NO: 3006690 - RNA, 13 nt, Human
ggaaaggaaugca

SEQ ID NO: 3006691 - RNA, 20 nt, Human
ggaaugauauaagguuuuuu

SEQ ID NO: 3006692 - RNA, 14 nt, Human
gcagucuucaguuu

SEQ ID NO: 3006693 - RNA, 15 nt, Human
gcagcucuccccuuc

SEQ ID NO: 3006694 - RNA, 17 nt, Human
gagccccacccucagau

SEQ ID NO: 3006695 - RNA, 16 nt, Human
gagccccacccucaga

SEQ ID NO: 3006696 - RNA, 17 nt, Human
gaauguuuucaaauguu

SEQ ID NO: 3006697 - RNA, 17 nt, Human
gacccucaugcugccaa

SEQ ID NO: 3006698 - RNA, 16 nt, Human
gacccucaugcugcca

SEQ ID NO: 3006699 - RNA, 14 nt, Human
gacccucaugcugc

SEQ ID NO: 3006700 - RNA, 12 nt, Human
gacccucaugcu

SEQ ID NO: 3006701 - RNA, 23 nt, Human
gacccucaugcugccaauauccu

SEQ ID NO: 3006702 - RNA, 22 nt, Human
gacccucaugcugccaauaucc

SEQ ID NO: 3006703 - RNA, 21 nt, Human
gacccucaugcugccaauauc

SEQ ID NO: 3006704 - RNA, 18 nt, Human
gacccucaugcugccaau

SEQ ID NO: 3006705 - RNA, 20 nt, Human
gacauuuuaugucuuucuug

SEQ ID NO: 3006706 - RNA, 16 nt, Human
gacauuuuaugucuuu

SEQ ID NO: 3006707 - RNA, 19 nt, Human
gacacuucacgcccuuggc

SEQ ID NO: 3006708 - RNA, 23 nt, Human
cugucggagcccugucuccucuc

SEQ ID NO: 3006709 - RNA, 22 nt, Human
cuggaguuauugaagcagagug

SEQ ID NO: 3006710 - RNA, 21 nt, Human
cuggaguuauugaagcagagu

SEQ ID NO: 3006711 - RNA, 23 nt, Human
cuggaguuauugaagcagagugg

SEQ ID NO: 3006712 - RNA, 24 nt, Human
cuggaguuauugaagcagaguggc

SEQ ID NO: 3006713 - RNA, 15 nt, Human
cuuggcccaggaguu

SEQ ID NO: 3006714 - RNA, 14 nt, Human
cuuggcccaggagu

SEQ ID NO: 3006715 - RNA, 23 nt, Human
cuuggcccaggaguuuggccaga

SEQ ID NO: 3006716 - RNA, 22 nt, Human
cuuggcccaggaguuuggccag

SEQ ID NO: 3006717 - RNA, 20 nt, Human
cuuggcccaggaguuuggcc

SEQ ID NO: 3006718 - RNA, 16 nt, Human
cuuggcccaggaguuu

SEQ ID NO: 3006719 - RNA, 15 nt, Human
cuuuaagaacuaaaa

SEQ ID NO: 3006720 - RNA, 14 nt, Human
cuucuauauaauuc

SEQ ID NO: 3006721 - RNA, 16 nt, Human
cuucuauuuauuuauu

SEQ ID NO: 3006722 - RNA, 22 nt, Human
cuucucuguauuccuagaaacu

SEQ ID NO: 3006723 - RNA, 13 nt, Human
aagguagaauguu

SEQ ID NO: 3006724 - RNA, 14 nt, Human
aagguagaauguuu

SEQ ID NO: 3006725 - RNA, 15 nt, Human
uaaaaaggugaccau

SEQ ID NO: 3006726 - RNA, 13 nt, Human
uaaaaaggugacc

SEQ ID NO: 3006727 - RNA, 17 nt, Human
aagagggugggugggua

SEQ ID NO: 3006728 - RNA, 16 nt, Human
guuauuuuacuuuuug

SEQ ID NO: 3006729 - RNA, 15 nt, Human
guuauuuuacuuuuu

SEQ ID NO: 3006730 - RNA, 13 nt, Human
aagcuuuugcaua

SEQ ID NO: 3006731 - RNA, 22 nt, Human
aagcuuuugcauauugcauacu

SEQ ID NO: 3006732 - RNA, 15 nt, Human
aagcuuuugcauauu

SEQ ID NO: 3006733 - RNA, 19 nt, Human
aagcuuuugcauauugcau

SEQ ID NO: 3006734 - RNA, 15 nt, Human
aacauagcugugauu

SEQ ID NO: 3006735 - RNA, 16 nt, Human
aacacugguuuuaaau

SEQ ID NO: 3006736 - RNA, 12 nt, Human
aacacaaagcuu

SEQ ID NO: 3006737 - RNA, 18 nt, Human
aacacaaagcuuuugcau

SEQ ID NO: 3006738 - RNA, 19 nt, Human
aacacaaagcuuuugcaua

SEQ ID NO: 3006739 - RNA, 20 nt, Human
aacacaaagcuuuugcauau

SEQ ID NO: 3006740 - RNA, 15 nt, Human
aacuaaaauguucua

SEQ ID NO: 3006741 - RNA, 17 nt, Human
gugcacaucuguuuugu

SEQ ID NO: 3006742 - RNA, 14 nt, Human
aacuucagaguucu

SEQ ID NO: 3006743 - RNA, 17 nt, Human
acaaaggggcuuaauua

SEQ ID NO: 3006744 - RNA, 24 nt, Human
acaaaggauacuuauuuaaauaga

SEQ ID NO: 3006745 - RNA, 18 nt, Human
uagaugacauugacuauu

SEQ ID NO: 3006746 - RNA, 19 nt, Human
uagaugacauugacuauuu

SEQ ID NO: 3006747 - RNA, 18 nt, Human
uagcauguccuaaugcuu

SEQ ID NO: 3006748 - RNA, 20 nt, Human
uaggagaagucuucuauuua

SEQ ID NO: 3006749 - RNA, 12 nt, Human
uaggagcaugag

SEQ ID NO: 3006750 - RNA, 20 nt, Human
uauaacuuuuuauauucuca

SEQ ID NO: 3006751 - RNA, 12 nt, Human
uauaacuuuuua

SEQ ID NO: 3006752 - RNA, 17 nt, Human
uauaacuuuuuauauuc

SEQ ID NO: 3006753 - RNA, 17 nt, Human
uaucccuuggacauuuu

SEQ ID NO: 3006754 - RNA, 19 nt, Human
uaucccuuggacauuuuau

SEQ ID NO: 3006755 - RNA, 18 nt, Human
uaucccuuggacauuuua

SEQ ID NO: 3006756 - RNA, 12 nt, Human
uauccuaauaaa

SEQ ID NO: 3006757 - RNA, 18 nt, Human
uauccuaauaaaaaggug

SEQ ID NO: 3006758 - RNA, 15 nt, Human
uauccuaauaaaaag

SEQ ID NO: 3006759 - RNA, 19 nt, Human
uauccuaauaaaaagguga

SEQ ID NO: 3006760 - RNA, 22 nt, Human
uauccuaauaaaaaggugacca

SEQ ID NO: 3006761 - RNA, 18 nt, Human
acagauugaauuugccua

SEQ ID NO: 3006762 - RNA, 12 nt, Human
acagauugaauu

SEQ ID NO: 3006763 - RNA, 19 nt, Human
acaggcuuagugauguaau

SEQ ID NO: 3006764 - RNA, 20 nt, Human
acaggcuuagugauguaauu

SEQ ID NO: 3006765 - RNA, 14 nt, Human
acaggcuuagugau

SEQ ID NO: 3006766 - RNA, 18 nt, Human
uauucaguggcuaacuug

SEQ ID NO: 3006767 - RNA, 23 nt, Human
uauguuuuuguucaguuuaucug

SEQ ID NO: 3006768 - RNA, 20 nt, Human
uacucugccacuuuauuucu

SEQ ID NO: 3006769 - RNA, 17 nt, Human
aauuauugauguuuuca

SEQ ID NO: 3006770 - RNA, 21 nt, Human
aauuaaugucaguauuucaac

SEQ ID NO: 3006771 - RNA, 13 nt, Human
aauauuuaaucuu

SEQ ID NO: 3006772 - RNA, 17 nt, Human
uaaugucaguauuucaa

SEQ ID NO: 3006773 - RNA, 11 nt, Human
uaaucuuuuau

SEQ ID NO: 3006774 - RNA, 12 nt, Human
uaauaaacucau

SEQ ID NO: 3006775 - RNA, 23 nt, Human
aaucgcuccaccuugcagcucuc

SEQ ID NO: 3006776 - RNA, 19 nt, Human
aaucuggauucauauuuaa

SEQ ID NO: 3006777 - RNA, 18 nt, Human
aaucuggauucauauuua

SEQ ID NO: 3006778 - RNA, 17 nt, Human
aaucuggauucauauuu

SEQ ID NO: 3006779 - RNA, 16 nt, Human
aaucuggauucauauu

SEQ ID NO: 3006780 - RNA, 12 nt, Human
ucaauugugaaa

SEQ ID NO: 3006781 - RNA, 16 nt, Human
ucacacugucuucuga

SEQ ID NO: 3006782 - RNA, 20 nt, Human
acaugcuguacauacuuuuu

SEQ ID NO: 3006783 - RNA, 21 nt, Human
acaugcuguacauacuuuuug

SEQ ID NO: 3006784 - RNA, 19 nt, Human
acaugcuguacauacuuuu

SEQ ID NO: 3006785 - RNA, 17 nt, Human
ucaacauuucucauguu

SEQ ID NO: 3006786 - RNA, 11 nt, Human
acauucccugc

SEQ ID NO: 3006787 - RNA, 17 nt, Human
acauugacuauuuuugu

SEQ ID NO: 3006788 - RNA, 14 nt, Human
acauugacuauuuu

SEQ ID NO: 3006789 - RNA, 19 nt, Human
ucaaucuggauucauauuu

SEQ ID NO: 3006790 - RNA, 15 nt, Human
ucauauggauaaaua

SEQ ID NO: 3006791 - RNA, 14 nt, Human
acccucucaaacua

SEQ ID NO: 3006792 - RNA, 15 nt, Human
accccaucaucccuu

SEQ ID NO: 3006793 - RNA, 14 nt, Human
ucagcccucagaau

SEQ ID NO: 3006794 - RNA, 16 nt, Human
acucugccacuuuauu

SEQ ID NO: 3006795 - RNA, 17 nt, Human
acucugccacuuuauuu

SEQ ID NO: 3006796 - RNA, 22 nt, Human
acucugagugcaaacuucagag

SEQ ID NO: 3006797 - RNA, 21 nt, Human
acugaacaguaacauagcugu

SEQ ID NO: 3006798 - RNA, 15 nt, Human
acugaacaguaacau

SEQ ID NO: 3006799 - RNA, 23 nt, Human
uccagucauuauguuaauauuuc

SEQ ID NO: 3006800 - RNA, 21 nt, Human
uccagucauuauguuaauauu

SEQ ID NO: 3006801 - RNA, 15 nt, Human
uccagucauuauguu

SEQ ID NO: 3006802 - RNA, 14 nt, Human
uccagucauuaugu

SEQ ID NO: 3006803 - RNA, 22 nt, Human
acuuuuuauauucucagcagag

SEQ ID NO: 3006804 - RNA, 12 nt, Human
acuuuuuauauu

SEQ ID NO: 3006805 - RNA, 15 nt, Human
acuuuuuauauucuc

SEQ ID NO: 3006806 - RNA, 16 nt, Human
acuuuuuauauucuca

SEQ ID NO: 3006807 - RNA, 22 nt, Human
acuuugguuauuuuacuuuuug

SEQ ID NO: 3006808 - RNA, 23 nt, Human
acuuugguuauuuuacuuuuugg

SEQ ID NO: 3006809 - RNA, 10 nt, Human
acuuugguua

SEQ ID NO: 3006810 - RNA, 13 nt, Human
acuuugguuauuu

SEQ ID NO: 3006811 - RNA, 21 nt, Human
acuuugguuauuuuacuuuuu

SEQ ID NO: 3006812 - RNA, 15 nt, Human
acuugugaauaaaga

SEQ ID NO: 3006813 - RNA, 12 nt, Human
ucucagcagagu

SEQ ID NO: 3006814 - RNA, 13 nt, Human
ucucagcagagug

SEQ ID NO: 3006815 - RNA, 14 nt, Human
ucucagcagagugc

SEQ ID NO: 3006816 - RNA, 14 nt, Human
ucuauuuauuuauu

SEQ ID NO: 3006817 - RNA, 13 nt, Human
ucuauuuauuuau

SEQ ID NO: 3006818 - RNA, 16 nt, Human
ucuauguuaauauuuu

SEQ ID NO: 3006819 - RNA, 14 nt, Human
ucuauguuaauauu

SEQ ID NO: 3006820 - RNA, 22 nt, Human
ucuauaacaaaggauacuuauu

SEQ ID NO: 3006821 - RNA, 23 nt, Human
ucuauaacaaaggauacuuauuu

SEQ ID NO: 3006822 - RNA, 21 nt, Human
agaauguuuucaaauguucuc

SEQ ID NO: 3006823 - RNA, 15 nt, Human
agaauguuuucaaau

SEQ ID NO: 3006824 - RNA, 24 nt, Human
agacagagccccacccucagaugc

SEQ ID NO: 3006825 - RNA, 22 nt, Human
agacagagccccacccucagau

SEQ ID NO: 3006826 - RNA, 16 nt, Human
agaauugauugggcac

SEQ ID NO: 3006827 - RNA, 22 nt, Human
agaauugauugggcacaucauu

SEQ ID NO: 3006828 - RNA, 23 nt, Human
agaauugauugggcacaucauuu

SEQ ID NO: 3006829 - RNA, 24 nt, Human
agaauugauugggcacaucauuuc

SEQ ID NO: 3006830 - RNA, 22 nt, Human
ucugagugcaaacuucagaguu

SEQ ID NO: 3006831 - RNA, 23 nt, Human
ucugagugcaaacuucagaguuc

SEQ ID NO: 3006832 - RNA, 14 nt, Human
ucugagugcaaacu

SEQ ID NO: 3006833 - RNA, 18 nt, Human
ugacuauuuuuguuuuua

SEQ ID NO: 3006834 - RNA, 22 nt, Human
ugacuauuuuuguuuuuauuaa

SEQ ID NO: 3006835 - RNA, 11 nt, Human
ugacuguuuuu

SEQ ID NO: 3006836 - RNA, 16 nt, Human
ugacuauaaccuuguu

SEQ ID NO: 3006837 - RNA, 19 nt, Human
ugacuauucugagaugacu

SEQ ID NO: 3006838 - RNA, 21 nt, Human
ugacuauucugagaugacuau

SEQ ID NO: 3006839 - RNA, 22 nt, Human
ugacuauucugagaugacuauu

SEQ ID NO: 3006840 - RNA, 13 nt, Human
ugacauucccugc

SEQ ID NO: 3006841 - RNA, 20 nt, Human
ugaaugcccagugagacugu

SEQ ID NO: 3006842 - RNA, 14 nt, Human
ugacagauugaauu

SEQ ID NO: 3006843 - RNA, 13 nt, Human
agaugcacaugag

SEQ ID NO: 3006844 - RNA, 16 nt, Human
agaugcacaugagcug

SEQ ID NO: 3006845 - RNA, 23 nt, Human
ugagagcaguuugguuucuagca

SEQ ID NO: 3006846 - RNA, 21 nt, Human
ugagagcaguuugguuucuag

SEQ ID NO: 3006847 - RNA, 17 nt, Human
agacuuugguuauuuua

SEQ ID NO: 3006848 - RNA, 23 nt, Human
agacuuugguuauuuuacuuuuu

SEQ ID NO: 3006849 - RNA, 19 nt, Human
ugaaguaaaauguggcagg

SEQ ID NO: 3006850 - RNA, 18 nt, Human
ugaaguaaaauguggcag

SEQ ID NO: 3006851 - RNA, 17 nt, Human
uguagacaguuggguuu

SEQ ID NO: 3006852 - RNA, 12 nt, Human
agguugugaaug

SEQ ID NO: 3006853 - RNA, 15 nt, Human
ugguuuguucccugu

SEQ ID NO: 3006854 - RNA, 15 nt, Human
ugguuucuagcauga

SEQ ID NO: 3006855 - RNA, 16 nt, Human
ugguuauuuuacuuuu

SEQ ID NO: 3006856 - RNA, 15 nt, Human
ugguuauuuuacuuu

SEQ ID NO: 3006857 - RNA, 18 nt, Human
ugguuauuuuacuuuuug

SEQ ID NO: 3006858 - RNA, 21 nt, Human
aggggcuuaauuauugauguu

SEQ ID NO: 3006859 - RNA, 14 nt, Human
aggguuuaaagaug

SEQ ID NO: 3006860 - RNA, 14 nt, Human
agucuucuauuuau

SEQ ID NO: 3006861 - RNA, 19 nt, Human
ugugauuuuugguauuuga

SEQ ID NO: 3006862 - RNA, 21 nt, Human
ugugauuuuugguauuugaaa

SEQ ID NO: 3006863 - RNA, 20 nt, Human
ugugauuuuugguauuugaa

SEQ ID NO: 3006864 - RNA, 15 nt, Human
ugucuccucucucug

SEQ ID NO: 3006865 - RNA, 22 nt, Human
aguccccucuccuccacauuug

SEQ ID NO: 3006866 - RNA, 20 nt, Human
ugucaaccccaaguuaguuc

SEQ ID NO: 3006867 - RNA, 21 nt, Human
aguccccucuccuccacauuu

SEQ ID NO: 3006868 - RNA, 16 nt, Human
aguccccucuccucca

SEQ ID NO: 3006869 - RNA, 18 nt, Human
uuagcaggaagcugugag

SEQ ID NO: 3006870 - RNA, 16 nt, Human
auaacuggaacacucu

SEQ ID NO: 3006871 - RNA, 18 nt, Human
auaacuggaacacucuau

SEQ ID NO: 3006872 - RNA, 21 nt, Human
auaacuggaacacucuauaac

SEQ ID NO: 3006873 - RNA, 23 nt, Human
auaacuggaacacucuauaacaa

SEQ ID NO: 3006874 - RNA, 15 nt, Human
auaaacucauuucua

SEQ ID NO: 3006875 - RNA, 21 nt, Human
uuagccguggugauuuagcag

SEQ ID NO: 3006876 - RNA, 14 nt, Human
uuauaacuuuuuau

SEQ ID NO: 3006877 - RNA, 16 nt, Human
uuauaacuuuuuauau

SEQ ID NO: 3006878 - RNA, 19 nt, Human
uuauauagcaagacauuau

SEQ ID NO: 3006879 - RNA, 13 nt, Human
uuauauagcaaga

SEQ ID NO: 3006880 - RNA, 15 nt, Human
uuaucagaacuaugu

SEQ ID NO: 3006881 - RNA, 20 nt, Human
auacuauuaaacaugcugua

SEQ ID NO: 3006882 - RNA, 19 nt, Human
aguuauugaagcagagugg

SEQ ID NO: 3006883 - RNA, 23 nt, Human
aguuauugaagcagaguggcagu

SEQ ID NO: 3006884 - RNA, 16 nt, Human
aguuauugaagcagag

SEQ ID NO: 3006885 - RNA, 17 nt, Human
aguuauugaagcagagu

SEQ ID NO: 3006886 - RNA, 18 nt, Human
aguuauugaagcagagug

SEQ ID NO: 3006887 - RNA, 14 nt, Human
aguuauugaagcag

SEQ ID NO: 3006888 - RNA, 23 nt, Human
aguggcagucuucaguuugcaga

SEQ ID NO: 3006889 - RNA, 22 nt, Human
aguucuugccuuggcugcaguu

SEQ ID NO: 3006890 - RNA, 14 nt, Human
uguuuuaggagcau

SEQ ID NO: 3006891 - RNA, 17 nt, Human
uguuuuauauagcaaga

SEQ ID NO: 3006892 - RNA, 14 nt, Human
uguuuucaaauguu

SEQ ID NO: 3006893 - RNA, 13 nt, Human
uguuuucaaaugu

SEQ ID NO: 3006894 - RNA, 12 nt, Human
aguuuggccaga

SEQ ID NO: 3006895 - RNA, 16 nt, Human
aguuugguuucuagca

SEQ ID NO: 3006896 - RNA, 14 nt, Human
aguuuggccagaag

SEQ ID NO: 3006897 - RNA, 13 nt, Human
aguuuggccagaa

SEQ ID NO: 3006898 - RNA, 17 nt, Human
ugccagccacugugaua

SEQ ID NO: 3006899 - RNA, 20 nt, Human
ugcagcucuccccuucucug

SEQ ID NO: 3006900 - RNA, 22 nt, Human
ugcagcucuccccuucucugua

SEQ ID NO: 3006901 - RNA, 18 nt, Human
agcccugucuccucucuc

SEQ ID NO: 3006902 - RNA, 11 nt, Human
agcccugucuc

SEQ ID NO: 3006903 - RNA, 17 nt, Human
ugauuuagcaggaagcu

SEQ ID NO: 3006904 - RNA, 20 nt, Human
ugauuuagcaggaagcugug

SEQ ID NO: 3006905 - RNA, 18 nt, Human
ugaugacauucccugcua

SEQ ID NO: 3006906 - RNA, 15 nt, Human
ugaugacauucccug

SEQ ID NO: 3006907 - RNA, 13 nt, Human
ugaugacuguuuu

SEQ ID NO: 3006908 - RNA, 14 nt, Human
aggaguuuggccag

SEQ ID NO: 3006909 - RNA, 13 nt, Human
aggaguuuggcca

SEQ ID NO: 3006910 - RNA, 18 nt, Human
aggaguuuggccagaagu

SEQ ID NO: 3006911 - RNA, 17 nt, Human
aggaguuuggccagaag

SEQ ID NO: 3006912 - RNA, 16 nt, Human
aggaguuuggccagaa

SEQ ID NO: 3006913 - RNA, 15 nt, Human
aggaguuuggccaga

SEQ ID NO: 3006914 - RNA, 12 nt, Human
uggaaaggaaug

SEQ ID NO: 3006915 - RNA, 15 nt, Human
uggaaaggaaugcaa

SEQ ID NO: 3006916 - RNA, 21 nt, Human
uggaaaggaaugcaaagauga

SEQ ID NO: 3006917 - RNA, 22 nt, Human
uggaaaggaaugcaaagaugaa

SEQ ID NO: 3006918 - RNA, 12 nt, Human
ugcuuggcccag

SEQ ID NO: 3006919 - RNA, 16 nt, Human
ugcuuggcccaggagu

SEQ ID NO: 3006920 - RNA, 15 nt, Human
ugcuuggcccaggag

SEQ ID NO: 3006921 - RNA, 23 nt, Human
ugcuuggcccaggaguuuggcca

SEQ ID NO: 3006922 - RNA, 18 nt, Human
ugcuuggcccaggaguuu

SEQ ID NO: 3006923 - RNA, 15 nt, Human
ugcuguacauacuuu

SEQ ID NO: 3006924 - RNA, 17 nt, Human
ugcuguacauacuuuuu

SEQ ID NO: 3006925 - RNA, 22 nt, Human
ugcuguacauacuuuuuggguu

SEQ ID NO: 3006926 - RNA, 11 nt, Human
ugcuguacaua

SEQ ID NO: 3006927 - RNA, 18 nt, Human
aggaagcugugagagcag

SEQ ID NO: 3006928 - RNA, 17 nt, Human
aggaagcuuacaugccu

SEQ ID NO: 3006929 - RNA, 20 nt, Human
ugggaaagggauuuucagcc

SEQ ID NO: 3006930 - RNA, 22 nt, Human
uggaguuauugaagcagagugg

SEQ ID NO: 3006931 - RNA, 15 nt, Human
uugaagguagaaugu

SEQ ID NO: 3006932 - RNA, 19 nt, Human
uugaagguagaauguuuuc

SEQ ID NO: 3006933 - RNA, 16 nt, Human
uugaagguagaauguu

SEQ ID NO: 3006934 - RNA, 14 nt, Human
uugaaguaaaaugu

SEQ ID NO: 3006935 - RNA, 16 nt, Human
uugaaggaugcugucu

SEQ ID NO: 3006936 - RNA, 14 nt, Human
uugaaggaugcugu

SEQ ID NO: 3006937 - RNA, 16 nt, Human
auccaauugcugcuug

SEQ ID NO: 3006938 - RNA, 14 nt, Human
aucacuuccaugac

SEQ ID NO: 3006939 - RNA, 13 nt, Human
auauuuaaucuuu

SEQ ID NO: 3006940 - RNA, 20 nt, Human
auauugguugggaugacuug

SEQ ID NO: 3006941 - RNA, 19 nt, Human
auauugguugggaugacuu

SEQ ID NO: 3006942 - RNA, 22 nt, Human
uuccuguuuuuauuauuaacaa

SEQ ID NO: 3006943 - RNA, 16 nt, Human
uuccaguaaugagcuu

SEQ ID NO: 3006944 - RNA, 19 nt, Human
uucauucuuuuugaaaugu

SEQ ID NO: 3006945 - RNA, 14 nt, Human
uucauuaguuuuga

SEQ ID NO: 3006946 - RNA, 19 nt, Human
uucauuaguuuugaagauu

SEQ ID NO: 3006947 - RNA, 20 nt, Human
uuuccuucaagaaugcagua

SEQ ID NO: 3006948 - RNA, 18 nt, Human
uuucucacagaagaugaa

SEQ ID NO: 3006949 - RNA, 22 nt, Human
uuucucacagaagaugaagcac

SEQ ID NO: 3006950 - RNA, 15 nt, Human
uuucucauguugaaa

SEQ ID NO: 3006951 - RNA, 13 nt, Human
uuucucauguuga

SEQ ID NO: 3006952 - RNA, 23 nt, Human
uuugaaacacugguuuuaaauau

SEQ ID NO: 3006953 - RNA, 23 nt, Human
augccuaccaauauuuaaucuuu

SEQ ID NO: 3006954 - RNA, 17 nt, Human
augccuaccaauauuua

SEQ ID NO: 3006955 - RNA, 16 nt, Human
augccuaccaauauuu

SEQ ID NO: 3006956 - RNA, 18 nt, Human
uuuauauagcaagacauu

SEQ ID NO: 3006957 - RNA, 22 nt, Human
uuuauauagcaagacauuauau

SEQ ID NO: 3006958 - RNA, 22 nt, Human
uugugaaggcaggggaauguau

SEQ ID NO: 3006959 - RNA, 14 nt, Human
uugugaauaaagag

SEQ ID NO: 3006960 - RNA, 19 nt, Human
uuguugaggguauguuuua

SEQ ID NO: 3006961 - RNA, 22 nt, Human
uuguucccugugucauuucaaa

SEQ ID NO: 3006962 - RNA, 16 nt, Human
uuguuuuuauuaaaag

SEQ ID NO: 3006963 - RNA, 21 nt, Human
uuguaacuguuuagaugaaug

SEQ ID NO: 3006964 - RNA, 22 nt, Human
uuguaacuguuuagaugaaugu

SEQ ID NO: 3006965 - RNA, 23 nt, Human
uuggccugucuuuggauuguuaa

SEQ ID NO: 3006966 - RNA, 13 nt, Human
aucuuuuaugauu

SEQ ID NO: 3006967 - RNA, 23 nt, Human
auuucaaacagucucccuuccua

SEQ ID NO: 3006968 - RNA, 14 nt, Human
auuuauucauuagu

SEQ ID NO: 3006969 - RNA, 14 nt, Human
auuuauuuauucau

SEQ ID NO: 3006970 - RNA, 17 nt, Human
auugggcacaucauuuc

SEQ ID NO: 3006971 - RNA, 18 nt, Human
auugggcacaucauuuca

SEQ ID NO: 3006972 - RNA, 19 nt, Human
auugggcacaucauuucaa

SEQ ID NO: 3006973 - RNA, 21 nt, Human
auugggcacaucauuucaaga

SEQ ID NO: 3006974 - RNA, 23 nt, Human
auugggcacaucauuucaagaag

SEQ ID NO: 3006975 - RNA, 12 nt, Human
auuugugagacu

SEQ ID NO: 3006976 - RNA, 14 nt, Human
auuugugagacugu

SEQ ID NO: 3006977 - RNA, 21 nt, Human
auuuguuuugccaauuugcac

SEQ ID NO: 3006978 - RNA, 23 nt, Human
auuuguuuugccaauuugcacau

SEQ ID NO: 3006979 - RNA, 23 nt, Human
auuugaagguagaauguuuucaa

SEQ ID NO: 3006980 - RNA, 18 nt, Human
auuugaagguagaauguu

SEQ ID NO: 3006981 - RNA, 17 nt, Human
auuuuacuuuuuggaaa

SEQ ID NO: 3006982 - RNA, 14 nt, Human
auuuuacuuuuugg

SEQ ID NO: 3006983 - RNA, 16 nt, Human
auuaaacaugcuguac

SEQ ID NO: 3006984 - RNA, 22 nt, Human
auguuaauauuuuagguguaaa

SEQ ID NO: 3006985 - RNA, 13 nt, Human
auguuaauauuuu

SEQ ID NO: 3006986 - RNA, 13 nt, Human
auguuaauauuuc

SEQ ID NO: 3006987 - RNA, 14 nt, Human
auguguucuauuca

SEQ ID NO: 3006988 - RNA, 18 nt, Human
uuuugcauauugcauacu

SEQ ID NO: 3006989 - RNA, 15 nt, Human
uuuugcauauugcau

SEQ ID NO: 3006990 - RNA, 18 nt, Human
uuuugccaauuugcacau

SEQ ID NO: 3006991 - RNA, 19 nt, Human
uuuugccaauuugcacauu

SEQ ID NO: 3006992 - RNA, 16 nt, Human
uuuugccaauuugcac

SEQ ID NO: 3006993 - RNA, 17 nt, Human
auuauauagcaguaaaa

SEQ ID NO: 3006994 - RNA, 18 nt, Human
auucuauguuaauauuuu

SEQ ID NO: 3006995 - RNA, 15 nt, Human
auucuauguuaauau

SEQ ID NO: 3006996 - RNA, 17 nt, Human
auucucagcagagugcu

SEQ ID NO: 3006997 - RNA, 16 nt, Human
caaucuggauucauau

SEQ ID NO: 3006998 - RNA, 20 nt, Human
caaucuggauucauauuuaa

SEQ ID NO: 3006999 - RNA, 23 nt, Human
caaucugugaugacauucccugc

SEQ ID NO: 3007000 - RNA, 16 nt, Human
caaguuaguucaaucu

SEQ ID NO: 3007001 - RNA, 14 nt, Human
caauuugcacauua

SEQ ID NO: 3007002 - RNA, 15 nt, Human
caauuugcacauuaa

SEQ ID NO: 3007003 - RNA, 22 nt, Human
caauuugcacauuaaaugacuc

SEQ ID NO: 3007004 - RNA, 19 nt, Human
caaugagaucauugugaag

SEQ ID NO: 3007005 - RNA, 14 nt, Human
caaggcuuagaccc

SEQ ID NO: 3007006 - RNA, 15 nt, Human
caaggcuuagacccu

SEQ ID NO: 3007007 - RNA, 15 nt, Human
caaggcugugcaucu

SEQ ID NO: 3007008 - RNA, 18 nt, Human
caaggcuuagacccucau

SEQ ID NO: 3007009 - RNA, 14 nt, Human
caaacuaacaggcu

SEQ ID NO: 3007010 - RNA, 16 nt, Human
caaacuaacaggcuua

SEQ ID NO: 3007011 - RNA, 20 nt, Human
caaacuaacaggcuuaguga

SEQ ID NO: 3007012 - RNA, 21 nt, Human
cacaguguguggucaacauuu

SEQ ID NO: 3007013 - RNA, 16 nt, Human
cacuguccuauuauau

SEQ ID NO: 3007014 - RNA, 12 nt, Human
cacugguuuuaa

SEQ ID NO: 3007015 - RNA, 13 nt, Human
cacugguuuuaaa

SEQ ID NO: 3007016 - RNA, 15 nt, Human
cacugguuuuaaaua

SEQ ID NO: 3007017 - RNA, 16 nt, Human
cacugguuuuaaauau

SEQ ID NO: 3007018 - RNA, 18 nt, Human
cacugguuuguucccugu

SEQ ID NO: 3007019 - RNA, 20 nt, Human
cacuucacgcccuuggccau

SEQ ID NO: 3007020 - RNA, 21 nt, Human
cacuucacgcccuuggccaug

SEQ ID NO: 3007021 - RNA, 17 nt, Human
cacuucacgcccuuggc

SEQ ID NO: 3007022 - RNA, 19 nt, Human
cacuucacgcccuuggcca

SEQ ID NO: 3007023 - RNA, 13 nt, Human
cacucuauaacaa

SEQ ID NO: 3007024 - RNA, 15 nt, Human
cacgcacacugucug

SEQ ID NO: 3007025 - RNA, 20 nt, Human
cacccucagaugcacaugag

SEQ ID NO: 3007026 - RNA, 21 nt, Human
cagaaucgcuccaccuugcag

SEQ ID NO: 3007027 - RNA, 23 nt, Human
cagaaucgcuccaccuugcagcu

SEQ ID NO: 3007028 - RNA, 17 nt, Human
cagaagucaaggcuuag

SEQ ID NO: 3007029 - RNA, 16 nt, Human
cagaagucaaggcuua

SEQ ID NO: 3007030 - RNA, 18 nt, Human
cagaagucaaggcuuaga

SEQ ID NO: 3007031 - RNA, 17 nt, Human
cagaacuauguuuuugu

SEQ ID NO: 3007032 - RNA, 17 nt, Human
cagaugcacaugagcug

SEQ ID NO: 3007033 - RNA, 12 nt, Human
cagaguggcagu

SEQ ID NO: 3007034 - RNA, 21 nt, Human
cagagugcuuuaccaauugaa

SEQ ID NO: 3007035 - RNA, 21 nt, Human
cagagaagauucuuguauuua

SEQ ID NO: 3007036 - RNA, 20 nt, Human
cagagccccacccucagaug

SEQ ID NO: 3007037 - RNA, 14 nt, Human
caggaagcugugag

SEQ ID NO: 3007038 - RNA, 13 nt, Human
caggaagcuguga

SEQ ID NO: 3007039 - RNA, 22 nt, Human
caggaagcugugagagcaguuu

SEQ ID NO: 3007040 - RNA, 16 nt, Human
cagcucuccccuucuc

SEQ ID NO: 3007041 - RNA, 18 nt, Human
cagcccucaauugugaaa

SEQ ID NO: 3007042 - RNA, 13 nt, Human
cagcccucagaau

SEQ ID NO: 3007043 - RNA, 23 nt, Human
cagcaacacaaagcuuuugcaua

SEQ ID NO: 3007044 - RNA, 15 nt, Human
cagcaacacaaagcu

SEQ ID NO: 3007045 - RNA, 11 nt, Human
cagcagagugc

SEQ ID NO: 3007046 - RNA, 15 nt, Human
cagcagagugcuuua

SEQ ID NO: 3007047 - RNA, 9 nt, Human
cagcagagu

SEQ ID NO: 3007048 - RNA, 10 nt, Human
cagcagagug

SEQ ID NO: 3007049 - RNA, 19 nt, Human
cagcacaaggaaauaaaau

SEQ ID NO: 3007050 - RNA, 16 nt, Human
caggcuggaguuauug

SEQ ID NO: 3007051 - RNA, 13 nt, Human
caggcuggaguua

SEQ ID NO: 3007052 - RNA, 14 nt, Human
caggaguuuggcca

SEQ ID NO: 3007053 - RNA, 13 nt, Human
caggaguuuggcc

SEQ ID NO: 3007054 - RNA, 17 nt, Human
caggaguuuggccagaa

SEQ ID NO: 3007055 - RNA, 16 nt, Human
caggaguuuggccaga

SEQ ID NO: 3007056 - RNA, 15 nt, Human
caggaguuuggccag

SEQ ID NO: 3007057 - RNA, 19 nt, Human
cagucauuauguuaauauu

SEQ ID NO: 3007058 - RNA, 23 nt, Human
cagucagggaaggugccucugga

SEQ ID NO: 3007059 - RNA, 13 nt, Human
caguaacauagcu

SEQ ID NO: 3007060 - RNA, 21 nt, Human
caguaaugagcuuaagaaauu

SEQ ID NO: 3007061 - RNA, 18 nt, Human
caguacuaacauuuauuu

SEQ ID NO: 3007062 - RNA, 16 nt, Human
cauucuuggcccagga

SEQ ID NO: 3007063 - RNA, 13 nt, Human
cauucuuggccca

SEQ ID NO: 3007064 - RNA, 13 nt, Human
cauucuuuuugaa

SEQ ID NO: 3007065 - RNA, 16 nt, Human
cauucuuuuugaaaug

SEQ ID NO: 3007066 - RNA, 14 nt, Human
cauucuuuuugaaa

SEQ ID NO: 3007067 - RNA, 16 nt, Human
caugcuguacauacuu

SEQ ID NO: 3007068 - RNA, 19 nt, Human
caugcuguacauacuuuuu

SEQ ID NO: 3007069 - RNA, 21 nt, Human
caugcuguacauacuuuuugg

SEQ ID NO: 3007070 - RNA, 13 nt, Human
caugcuguacaua

SEQ ID NO: 3007071 - RNA, 11 nt, Human
caucaucccuu

SEQ ID NO: 3007072 - RNA, 17 nt, Human
caucccuuucccuuggu

SEQ ID NO: 3007073 - RNA, 14 nt, Human
caucccuuucccuu

SEQ ID NO: 3007074 - RNA, 17 nt, Human
cauauuuaauuugaagg

SEQ ID NO: 3007075 - RNA, 22 nt, Human
cauauugcauacuauuaaacau

SEQ ID NO: 3007076 - RNA, 19 nt, Human
cauauugcauacuauuaaa

SEQ ID NO: 3007077 - RNA, 21 nt, Human
cauauugcauacuauuaaaca

SEQ ID NO: 3007078 - RNA, 19 nt, Human
ccaguguuuuaggagcaug

SEQ ID NO: 3007079 - RNA, 23 nt, Human
ccuucuucccaauagcaaggcug

SEQ ID NO: 3007080 - RNA, 13 nt, Human
ccuuguuuaaugg

SEQ ID NO: 3007081 - RNA, 14 nt, Human
ccuguuuuuauuau

SEQ ID NO: 3007082 - RNA, 15 nt, Human
ccuguuuuuauuauu

SEQ ID NO: 3007083 - RNA, 15 nt, Human
ccuccacauuuguuu

SEQ ID NO: 3007084 - RNA, 12 nt, Human
cccuaaucuucc

SEQ ID NO: 3007085 - RNA, 16 nt, Human
cuuccacuugaguguc

SEQ ID NO: 3007086 - RNA, 14 nt, Human
cuucaagaaugcag

SEQ ID NO: 3007087 - RNA, 18 nt, Human
cuguuuuuauuauuaaca

SEQ ID NO: 3007088 - RNA, 20 nt, Human
cuguuuuuauuauuaacaaa

SEQ ID NO: 3007089 - RNA, 16 nt, Human
cuuaauuauugauguu

SEQ ID NO: 3007090 - RNA, 10 nt, Human
cuuaauuauu

SEQ ID NO: 3007091 - RNA, 18 nt, Human
cuuagacccucaugcugc

SEQ ID NO: 3007092 - RNA, 22 nt, Human
cuuagacccucaugcugccaau

SEQ ID NO: 3007093 - RNA, 21 nt, Human
cuuagacccucaugcugccaa

SEQ ID NO: 3007094 - RNA, 20 nt, Human
cuuagacccucaugcugcca

SEQ ID NO: 3007095 - RNA, 19 nt, Human
cuuagacccucaugcugcc

SEQ ID NO: 3007096 - RNA, 23 nt, Human
cuuagacccucaugcugccaaua

SEQ ID NO: 3007097 - RNA, 15 nt, Human
cuguguuguacagcu

SEQ ID NO: 3007098 - RNA, 19 nt, Human
cugugaugacauucccugc

SEQ ID NO: 3007099 - RNA, 22 nt, Human
cugugauuuuugguauuugaaa

SEQ ID NO: 3007100 - RNA, 14 nt, Human
cugucuuuuaaacu

SEQ ID NO: 3007101 - RNA, 15 nt, Human
cugucuuuuaaacuc

SEQ ID NO: 3007102 - RNA, 23 nt, Human
cugggguggguggggcagugcuu

SEQ ID NO: 3007103 - RNA, 14 nt, Human
gaagaaaauaauua

SEQ ID NO: 3007104 - RNA, 15 nt, Human
gaagguagaauguuu

SEQ ID NO: 3007105 - RNA, 17 nt, Human
gaagguagaauguuuuc

SEQ ID NO: 3007106 - RNA, 16 nt, Human
gaagguagaauguuuu

SEQ ID NO: 3007107 - RNA, 17 nt, Human
gaaguaaaauguggcag

SEQ ID NO: 3007108 - RNA, 18 nt, Human
gaaguaaaauguggcagg

SEQ ID NO: 3007109 - RNA, 22 nt, Human
gaaacacugguuuuaaauauuu

SEQ ID NO: 3007110 - RNA, 13 nt, Human
gaaacacugguuu

SEQ ID NO: 3007111 - RNA, 19 nt, Human
cuuuaaacuacauuagguu

SEQ ID NO: 3007112 - RNA, 16 nt, Human
cuuguuuaaugguagu

SEQ ID NO: 3007113 - RNA, 17 nt, Human
cucauguugaaacuuua

SEQ ID NO: 3007114 - RNA, 14 nt, Human
cucauuucuagcag

SEQ ID NO: 3007115 - RNA, 15 nt, Human
cuccacauuuguuuu

SEQ ID NO: 3007116 - RNA, 13 nt, Human
cuccacauuuguu

SEQ ID NO: 3007117 - RNA, 17 nt, Human
cuccaccuugcagcucu

SEQ ID NO: 3007118 - RNA, 22 nt, Human
cuaugggguaaaagggguaggg

SEQ ID NO: 3007119 - RNA, 22 nt, Human
cuaugcuguucacuggacacuu

SEQ ID NO: 3007120 - RNA, 15 nt, Human
cucaagucuggcaga

SEQ ID NO: 3007121 - RNA, 16 nt, Human
cucagcagagugcuuu

SEQ ID NO: 3007122 - RNA, 11 nt, Human
cucagcagagu

SEQ ID NO: 3007123 - RNA, 12 nt, Human
cucagcagagug

SEQ ID NO: 3007124 - RNA, 13 nt, Human
cucagcagagugc

SEQ ID NO: 3007125 - RNA, 22 nt, Human
cugauuuaaacacauuaaaggu

SEQ ID NO: 3007126 - RNA, 17 nt, Human
cugaacaucacagcuua

SEQ ID NO: 3007127 - RNA, 23 nt, Human
cugacgacuugagugcucaguag

SEQ ID NO: 3007128 - RNA, 15 nt, Human
gaugacuguuuuuaa

SEQ ID NO: 3007129 - RNA, 17 nt, Human
gauucuauguuaauauu

SEQ ID NO: 3007130 - RNA, 20 nt, Human
gauucuauguuaauauuuua

SEQ ID NO: 3007131 - RNA, 18 nt, Human
gauugugccuaauguguu

SEQ ID NO: 3007132 - RNA, 17 nt, Human
gaguuauugaagcagag

SEQ ID NO: 3007133 - RNA, 23 nt, Human
gccaauauccuaauaaaaaggug

SEQ ID NO: 3007134 - RNA, 22 nt, Human
gccaauauccuaauaaaaaggu

SEQ ID NO: 3007135 - RNA, 20 nt, Human
gccaauauccuaauaaaaag

SEQ ID NO: 3007136 - RNA, 19 nt, Human
gccaauauccuaauaaaaa

SEQ ID NO: 3007137 - RNA, 18 nt, Human
gccaauauccuaauaaaa

SEQ ID NO: 3007138 - RNA, 13 nt, Human
gccaauauccuaa

SEQ ID NO: 3007139 - RNA, 17 nt, Human
gccaauauccuaauaaa

SEQ ID NO: 3007140 - RNA, 16 nt, Human
gccaauauccuaauaa

SEQ ID NO: 3007141 - RNA, 15 nt, Human
gccaauauccuaaua

SEQ ID NO: 3007142 - RNA, 14 nt, Human
gccaauauccuaau

SEQ ID NO: 3007143 - RNA, 12 nt, Human
gccaauuugcac

SEQ ID NO: 3007144 - RNA, 22 nt, Human
gcauacugccuuguuuaauggu

SEQ ID NO: 3007145 - RNA, 13 nt, Human
gcauacuauuaaa

SEQ ID NO: 3007146 - RNA, 14 nt, Human
gcauacuauuaaac

SEQ ID NO: 3007147 - RNA, 17 nt, Human
gcauacuauuaaacaug

SEQ ID NO: 3007148 - RNA, 21 nt, Human
gcauacuauuaaacaugcugu

SEQ ID NO: 3007149 - RNA, 16 nt, Human
gcacgcacacugucug

SEQ ID NO: 3007150 - RNA, 15 nt, Human
gcacgcacacugucu

SEQ ID NO: 3007151 - RNA, 16 nt, Human
gcaggaagcugugaga

SEQ ID NO: 3007152 - RNA, 22 nt, Human
gcagaguaggggucugucuuuu

SEQ ID NO: 3007153 - RNA, 21 nt, Human
gcuuagacccucaugcugcca

SEQ ID NO: 3007154 - RNA, 16 nt, Human
gcuuagacccucaugc

SEQ ID NO: 3007155 - RNA, 22 nt, Human
gcuuacaugccuaccaauauuu

SEQ ID NO: 3007156 - RNA, 19 nt, Human
gcugauuuaaacacauuaa

SEQ ID NO: 3007157 - RNA, 14 nt, Human
gcugaccuugcuga

SEQ ID NO: 3007158 - RNA, 15 nt, Human
gccuuguuuaauggu

SEQ ID NO: 3007159 - RNA, 23 nt, Human
gccuuguuuaaugguaguuuuac

SEQ ID NO: 3007160 - RNA, 18 nt, Human
ggagcccugucuccucuc

SEQ ID NO: 3007161 - RNA, 20 nt, Human
ggagaagucuucuauuuauu

SEQ ID NO: 3007162 - RNA, 19 nt, Human
ggagaagucuucuauuuau

SEQ ID NO: 3007163 - RNA, 15 nt, Human
ggacauuuuaugucu

SEQ ID NO: 3007164 - RNA, 16 nt, Human
ggcagugcuuggccca

SEQ ID NO: 3007165 - RNA, 23 nt, Human
ggcagugcuuggcccaggaguuu

SEQ ID NO: 3007166 - RNA, 22 nt, Human
ggcagugcuuggcccaggaguu

SEQ ID NO: 3007167 - RNA, 21 nt, Human
ggcagugcuuggcccaggagu

SEQ ID NO: 3007168 - RNA, 20 nt, Human
ggcagugcuuggcccaggag

SEQ ID NO: 3007169 - RNA, 19 nt, Human
ggcagugcuuggcccagga

SEQ ID NO: 3007170 - RNA, 18 nt, Human
ggcagugcuuggcccagg

SEQ ID NO: 3007171 - RNA, 17 nt, Human
ggcagugcuuggcccag

SEQ ID NO: 3007172 - RNA, 19 nt, Human
ggauugaaggaugcugucu

SEQ ID NO: 3007173 - RNA, 23 nt, Human
ggcuggaguuauugaagcagagu

SEQ ID NO: 3007174 - RNA, 15 nt, Human
ggcuggaguuauuga

SEQ ID NO: 3007175 - RNA, 18 nt, Human
ggcuuagacccucaugcu

SEQ ID NO: 3007176 - RNA, 20 nt, Human
ggcuuagacccucaugcugc

SEQ ID NO: 3007177 - RNA, 23 nt, Human
ggcuuagacccucaugcugccaa

SEQ ID NO: 3007178 - RNA, 22 nt, Human
ggcuuagacccucaugcugcca

SEQ ID NO: 3007179 - RNA, 17 nt, Human
ucacugguacucugcca

SEQ ID NO: 3007180 - RNA, 20 nt, Human
ucaugcugccaauauccuaa

SEQ ID NO: 3007181 - RNA, 19 nt, Human
ucaugcugccaauauccua

SEQ ID NO: 3007182 - RNA, 17 nt, Human
ucaugcugccaauaucc

SEQ ID NO: 3007183 - RNA, 13 nt, Human
ucaugcugccaau

SEQ ID NO: 3007184 - RNA, 17 nt, Human
ucauuauguuaauauuu

SEQ ID NO: 3007185 - RNA, 16 nt, Human
ucauuauguuaauauu

SEQ ID NO: 3007186 - RNA, 23 nt, Human
ucaugcugccaauauccuaauaa

SEQ ID NO: 3007187 - RNA, 21 nt, Human
ucaugcugccaauauccuaau

SEQ ID NO: 3007188 - RNA, 23 nt, Human
ucauuaguuuugaagauucuaug

SEQ ID NO: 3007189 - RNA, 14 nt, Human
ucauuaguuuugaa

SEQ ID NO: 3007190 - RNA, 13 nt, Human
uauuaacaaaaca

SEQ ID NO: 3007191 - RNA, 14 nt, Human
uauugauguuuuca

SEQ ID NO: 3007192 - RNA, 13 nt, Human
uauugauguuuuc

SEQ ID NO: 3007193 - RNA, 17 nt, Human
uauucucagcagagugc

SEQ ID NO: 3007194 - RNA, 21 nt, Human
uauucucagcagagugcuuua

SEQ ID NO: 3007195 - RNA, 15 nt, Human
uauucucagcagagu

SEQ ID NO: 3007196 - RNA, 17 nt, Human
uauuuucuccaaauguu

SEQ ID NO: 3007197 - RNA, 19 nt, Human
uccugucggagcccugucu

SEQ ID NO: 3007198 - RNA, 22 nt, Human
ucuaaauaucccuuggacauuu

SEQ ID NO: 3007199 - RNA, 12 nt, Human
uccuauuauauu

SEQ ID NO: 3007200 - RNA, 15 nt, Human
uccuaauaaaaaggu

SEQ ID NO: 3007201 - RNA, 14 nt, Human
uccuaauaaaaagg

SEQ ID NO: 3007202 - RNA, 13 nt, Human
uccuaauaaaaag

SEQ ID NO: 3007203 - RNA, 12 nt, Human
uccuaauaaaaa

SEQ ID NO: 3007204 - RNA, 17 nt, Human
uccuaauaaaaagguga

SEQ ID NO: 3007205 - RNA, 16 nt, Human
uccuaauaaaaaggug

SEQ ID NO: 3007206 - RNA, 18 nt, Human
uccuaauaaaaaggugac

SEQ ID NO: 3007207 - RNA, 18 nt, Human
ucucuguaauaaacucau

SEQ ID NO: 3007208 - RNA, 22 nt, Human
ucucuguaauaaacucauuucu

SEQ ID NO: 3007209 - RNA, 13 nt, Human
ucuguuuugugua

SEQ ID NO: 3007210 - RNA, 19 nt, Human
ucuguuuuguguacuuuua

SEQ ID NO: 3007211 - RNA, 15 nt, Human
uguccuauuauauuc

SEQ ID NO: 3007212 - RNA, 14 nt, Human
ugucuuuuaaacuc

SEQ ID NO: 3007213 - RNA, 14 nt, Human
uggaaaagaauaaa

SEQ ID NO: 3007214 - RNA, 19 nt, Human
uggauugugccuaaugugu

SEQ ID NO: 3007215 - RNA, 23 nt, Human
uggauugugccuaauguguuuga

SEQ ID NO: 3007216 - RNA, 20 nt, Human
uggauugugccuaauguguu

SEQ ID NO: 3007217 - RNA, 13 nt, Human
uggacauuuuaug

SEQ ID NO: 3007218 - RNA, 11 nt, Human
uggacauuuua

SEQ ID NO: 3007219 - RNA, 17 nt, Human
uggacauuuuaugucuu

SEQ ID NO: 3007220 - RNA, 16 nt, Human
uggacauuuuaugucu

SEQ ID NO: 3007221 - RNA, 16 nt, Human
ugauguaauuaugguu

SEQ ID NO: 3007222 - RNA, 22 nt, Human
ugcagaguaggggucugucuuu

SEQ ID NO: 3007223 - RNA, 16 nt, Human
ugcacgcacacugucu

SEQ ID NO: 3007224 - RNA, 13 nt, Human
uuuuaucuucuau

SEQ ID NO: 3007225 - RNA, 15 nt, Human
uuuucaaauguucuc

SEQ ID NO: 3007226 - RNA, 13 nt, Human
uuuugaaauguca

SEQ ID NO: 3007227 - RNA, 22 nt, Human
uuugaguggaguuacugaacag

SEQ ID NO: 3007228 - RNA, 15 nt, Human
uuugcaggaaauccu

SEQ ID NO: 3007229 - RNA, 19 nt, Human
uuuggaaaggaaugcaaag

SEQ ID NO: 3007230 - RNA, 16 nt, Human
uuuggaaaggaaugca

SEQ ID NO: 3007231 - RNA, 17 nt, Human
uuuggaaaggaaugcaa

SEQ ID NO: 3007232 - RNA, 18 nt, Human
uuuggaaaggaaugcaaa

SEQ ID NO: 3007233 - RNA, 13 nt, Human
uuugguauuugaa

SEQ ID NO: 3007234 - RNA, 21 nt, Human
uuuugaagauucuauguuaau

SEQ ID NO: 3007235 - RNA, 16 nt, Human
uuuaagacccucucaa

SEQ ID NO: 3007236 - RNA, 17 nt, Human
uuuaagaacuaaaaugu

SEQ ID NO: 3007237 - RNA, 14 nt, Human
uuuacuuuaaacua

SEQ ID NO: 3007238 - RNA, 16 nt, Human
uuuauaacuuuuuaua

SEQ ID NO: 3007239 - RNA, 13 nt, Human
uuuauaacuuuuu

SEQ ID NO: 3007240 - RNA, 18 nt, Human
uugugccuaauguguuug

SEQ ID NO: 3007241 - RNA, 15 nt, Human
uugugccuaaugugu

SEQ ID NO: 3007242 - RNA, 15 nt, Human
uugguauuugaaaca

SEQ ID NO: 3007243 - RNA, 20 nt, Human
uugugaaaaaauuuacuuua

SEQ ID NO: 3007244 - RNA, 16 nt, Human
uuauuaacaaaacagu

SEQ ID NO: 3007245 - RNA, 21 nt, Human
uuaugauugccuuuuuauaac

SEQ ID NO: 3007246 - RNA, 15 nt, Human
uuaugauugccuuuu

SEQ ID NO: 3007247 - RNA, 16 nt, Human
uuauauucucagcaga

SEQ ID NO: 3007248 - RNA, 18 nt, Human
uuauauucucagcagagu

SEQ ID NO: 3007249 - RNA, 19 nt, Human
uuauauucucagcagagug

SEQ ID NO: 3007250 - RNA, 20 nt, Human
uuauauucucagcagagugc

SEQ ID NO: 3007251 - RNA, 21 nt, Human
uuauauucucagcagagugcu

SEQ ID NO: 3007252 - RNA, 17 nt, Human
uuauaacuuuuuauauu

SEQ ID NO: 3007253 - RNA, 14 nt, Human
uuagugauguaauu

SEQ ID NO: 3007254 - RNA, 12 nt, Human
uucaauaacugg

SEQ ID NO: 3007255 - RNA, 16 nt, Human
uucaauaacuggaaca

SEQ ID NO: 3007256 - RNA, 22 nt, Human
uucaauaacuggaacacucuau

SEQ ID NO: 3007257 - RNA, 20 nt, Human
uuauuuggaaaggaaugcaa

SEQ ID NO: 3007258 - RNA, 22 nt, Human
uuauuugaguggaguuacugaa

SEQ ID NO: 3007259 - RNA, 16 nt, Human
uuauuuggaaaggaau

SEQ ID NO: 3007260 - RNA, 14 nt, Human
uucacgcccuuggc

SEQ ID NO: 3007261 - RNA, 21 nt, Human
uucuauauaauuccuguuuuu

SEQ ID NO: 3007262 - RNA, 14 nt, Human
uucucucaucuguu

SEQ ID NO: 3007263 - RNA, 22 nt, Human
uucucauguugaaacuuuaaga

SEQ ID NO: 3007264 - RNA, 21 nt, Human
uugacuauuuuuguuuuuauu

SEQ ID NO: 3007265 - RNA, 19 nt, Human
uugacuauuuuuguuuuua

SEQ ID NO: 3007266 - RNA, 18 nt, Human
uugaggguauguuuuaua

SEQ ID NO: 3007267 - RNA, 16 nt, Human
uugauugggcacauca

SEQ ID NO: 3007268 - RNA, 17 nt, Human
uugauugggcacaucau

SEQ ID NO: 3007269 - RNA, 15 nt, Human
uucuggacuaaaacu

SEQ ID NO: 3007270 - RNA, 20 nt, Human
uucuucccaauagcaaggcu

SEQ ID NO: 3007271 - RNA, 21 nt, Human
caaaggauacuuauuuaaaua

SEQ ID NO: 3007272 - RNA, 16 nt, Human
caaaggauacuuauuu

SEQ ID NO: 3007273 - RNA, 17 nt, Human
caaagcuuuugcauauu

SEQ ID NO: 3007274 - RNA, 23 nt, Human
caacaugccagccacugugauag

SEQ ID NO: 3007275 - RNA, 22 nt, Human
caacauuucucauguugaaacu

SEQ ID NO: 3007276 - RNA, 17 nt, Human
cacauuaaagguacuuu

SEQ ID NO: 3007277 - RNA, 13 nt, Human
cacauuaaaugac

SEQ ID NO: 3007278 - RNA, 15 nt, Human
cacauuaaaugacuc

SEQ ID NO: 3007279 - RNA, 23 nt, Human
cacaaagaaccaccaggaaagca

SEQ ID NO: 3007280 - RNA, 15 nt, Human
cacaaagcagauccu

SEQ ID NO: 3007281 - RNA, 20 nt, Human
acuauuuuuguuuuuauuaa

SEQ ID NO: 3007282 - RNA, 19 nt, Human
acuauucugagaugacuau

SEQ ID NO: 3007283 - RNA, 18 nt, Human
acuauucugagaugacua

SEQ ID NO: 3007284 - RNA, 21 nt, Human
acuauuuuuguuuuuauuaaa

SEQ ID NO: 3007285 - RNA, 22 nt, Human
acuauuuuuguuuuuauuaaaa

SEQ ID NO: 3007286 - RNA, 17 nt, Human
acugguuuguucccugu

SEQ ID NO: 3007287 - RNA, 14 nt, Human
acugguuuuaaaua

SEQ ID NO: 3007288 - RNA, 16 nt, Human
acuucacgcccuuggc

SEQ ID NO: 3007289 - RNA, 12 nt, Human
acuuuuaagacu

SEQ ID NO: 3007290 - RNA, 13 nt, Human
acuuuuaagacuu

SEQ ID NO: 3007291 - RNA, 16 nt, Human
acuuuauuucucucau

SEQ ID NO: 3007292 - RNA, 19 nt, Human
acccaguguuuuaggagca

SEQ ID NO: 3007293 - RNA, 22 nt, Human
acccaguguuuuaggagcauga

SEQ ID NO: 3007294 - RNA, 15 nt, Human
aaacucugagugcaa

SEQ ID NO: 3007295 - RNA, 13 nt, Human
aaacucugagugc

SEQ ID NO: 3007296 - RNA, 19 nt, Human
aaacacugguuuuaaauau

SEQ ID NO: 3007297 - RNA, 20 nt, Human
aacacauuaaagguacuuug

SEQ ID NO: 3007298 - RNA, 15 nt, Human
aacacauuaaaggua

SEQ ID NO: 3007299 - RNA, 22 nt, Human
aacagcaacacaaagcuuuugc

SEQ ID NO: 3007300 - RNA, 22 nt, Human
aaugucaguuguuauuuauuga

SEQ ID NO: 3007301 - RNA, 12 nt, Human
aaggugcaucug

SEQ ID NO: 3007302 - RNA, 11 nt, Human
aagauucuaug

SEQ ID NO: 3007303 - RNA, 15 nt, Human
agcaugaagacagag

SEQ ID NO: 3007304 - RNA, 17 nt, Human
agcccucaauugugaaa

SEQ ID NO: 3007305 - RNA, 16 nt, Human
agcccucaauugugaa

SEQ ID NO: 3007306 - RNA, 22 nt, Human
agacgugcacgcacacugucug

SEQ ID NO: 3007307 - RNA, 21 nt, Human
agacgugcacgcacacugucu

SEQ ID NO: 3007308 - RNA, 12 nt, Human
agcuuuugcaua

SEQ ID NO: 3007309 - RNA, 22 nt, Human
aggagaagucuucuauuuauuu

SEQ ID NO: 3007310 - RNA, 23 nt, Human
aggagaagucuucuauuuauuua

SEQ ID NO: 3007311 - RNA, 22 nt, Human
aggucuguuuuguguacuuuua

SEQ ID NO: 3007312 - RNA, 20 nt, Human
auaucccuuggacauuuuau

SEQ ID NO: 3007313 - RNA, 14 nt, Human
auauccuaauaaaa

SEQ ID NO: 3007314 - RNA, 13 nt, Human
auauccuaauaaa

SEQ ID NO: 3007315 - RNA, 12 nt, Human
auauccuaauaa

SEQ ID NO: 3007316 - RNA, 23 nt, Human
auaucccuuggacauuuuauguc

SEQ ID NO: 3007317 - RNA, 22 nt, Human
auaucccuuggacauuuuaugu

SEQ ID NO: 3007318 - RNA, 18 nt, Human
auauccuaauaaaaaggu

SEQ ID NO: 3007319 - RNA, 16 nt, Human
auauccuaauaaaaag

SEQ ID NO: 3007320 - RNA, 21 nt, Human
auagcaguaaaaaaugguguu

SEQ ID NO: 3007321 - RNA, 15 nt, Human
auagcaguaaaaaau

SEQ ID NO: 3007322 - RNA, 15 nt, Human
auaaugucccuucac

SEQ ID NO: 3007323 - RNA, 21 nt, Human
auaacaaaggauacuuauuua

SEQ ID NO: 3007324 - RNA, 20 nt, Human
auaacaaaggauacuuauuu

SEQ ID NO: 3007325 - RNA, 18 nt, Human
auguuuucaaauguucuc

SEQ ID NO: 3007326 - RNA, 17 nt, Human
auguuuuauauagcaag

SEQ ID NO: 3007327 - RNA, 15 nt, Human
auguuuucaaauguu

SEQ ID NO: 3007328 - RNA, 12 nt, Human
auguuuucaaau

SEQ ID NO: 3007329 - RNA, 20 nt, Human
auguucuccagucauuaugu

SEQ ID NO: 3007330 - RNA, 23 nt, Human
augcuugcugcugauuuaaacac

SEQ ID NO: 3007331 - RNA, 23 nt, Human
augcugccaauauccuaauaaaa

SEQ ID NO: 3007332 - RNA, 22 nt, Human
augcugccaauauccuaauaaa

SEQ ID NO: 3007333 - RNA, 21 nt, Human
augcugccaauauccuaauaa

SEQ ID NO: 3007334 - RNA, 20 nt, Human
augcugccaauauccuaaua

SEQ ID NO: 3007335 - RNA, 13 nt, Human
augcugccaauau

SEQ ID NO: 3007336 - RNA, 19 nt, Human
augcugccaauauccuaau

SEQ ID NO: 3007337 - RNA, 18 nt, Human
augcugccaauauccuaa

SEQ ID NO: 3007338 - RNA, 17 nt, Human
augcugccaauauccua

SEQ ID NO: 3007339 - RNA, 14 nt, Human
augcugccaauauc

SEQ ID NO: 3007340 - RNA, 16 nt, Human
uaaaugacucuucccu

SEQ ID NO: 3007341 - RNA, 13 nt, Human
aaguuuugagaaa

SEQ ID NO: 3007342 - RNA, 22 nt, Human
uaaacuacauuagguugugaau

SEQ ID NO: 3007343 - RNA, 17 nt, Human
uaaacucauuucuagca

SEQ ID NO: 3007344 - RNA, 12 nt, Human
uaaacucauuuc

SEQ ID NO: 3007345 - RNA, 20 nt, Human
uaaacucugagugcaaacuu

SEQ ID NO: 3007346 - RNA, 20 nt, Human
guucuccagucauuauguua

SEQ ID NO: 3007347 - RNA, 18 nt, Human
guucuccagucauuaugu

SEQ ID NO: 3007348 - RNA, 23 nt, Human
guugcuaacagcaacacaaagcu

SEQ ID NO: 3007349 - RNA, 23 nt, Human
guuuuuuaagggcccuuuuucaa

SEQ ID NO: 3007350 - RNA, 22 nt, Human
aagucaaggcuuagacccucau

SEQ ID NO: 3007351 - RNA, 13 nt, Human
aagucaaggcuua

SEQ ID NO: 3007352 - RNA, 21 nt, Human
guuucuagcaugaagacagag

SEQ ID NO: 3007353 - RNA, 22 nt, Human
aagggcccuuuuucaauaacug

SEQ ID NO: 3007354 - RNA, 16 nt, Human
aagggcccuuuuucaa

SEQ ID NO: 3007355 - RNA, 11 nt, Human
guuuggccaga

SEQ ID NO: 3007356 - RNA, 23 nt, Human
guuuggccagaagucaaggcuua

SEQ ID NO: 3007357 - RNA, 18 nt, Human
guuuggccagaagucaag

SEQ ID NO: 3007358 - RNA, 12 nt, Human
guuuggccagaa

SEQ ID NO: 3007359 - RNA, 18 nt, Human
gugcacgcacacugucug

SEQ ID NO: 3007360 - RNA, 23 nt, Human
guguguggucaacauuucucaug

SEQ ID NO: 3007361 - RNA, 22 nt, Human
aacuaacaggcuuagugaugua

SEQ ID NO: 3007362 - RNA, 18 nt, Human
aacuaacaggcuuaguga

SEQ ID NO: 3007363 - RNA, 13 nt, Human
aacucuguaauuc

SEQ ID NO: 3007364 - RNA, 19 nt, Human
aaucuuuuaugauugccuu

SEQ ID NO: 3007365 - RNA, 20 nt, Human
uaauuugaagguagaauguu

SEQ ID NO: 3007366 - RNA, 21 nt, Human
aaugcaaagaugaaggucugu

SEQ ID NO: 3007367 - RNA, 14 nt, Human
aaugcaaagaugaa

SEQ ID NO: 3007368 - RNA, 18 nt, Human
aaugcaaagaugaagguc

SEQ ID NO: 3007369 - RNA, 12 nt, Human
aaugcaaagaug

SEQ ID NO: 3007370 - RNA, 21 nt, Human
uaauuaugguuaguagaggua

SEQ ID NO: 3007371 - RNA, 14 nt, Human
uacauacuuuuugg

SEQ ID NO: 3007372 - RNA, 15 nt, Human
uacauacuuuuuggg

SEQ ID NO: 3007373 - RNA, 12 nt, Human
uacauacuuuuu

SEQ ID NO: 3007374 - RNA, 18 nt, Human
uacuauuaaacaugcugu

SEQ ID NO: 3007375 - RNA, 14 nt, Human
uacuauuaaacaug

SEQ ID NO: 3007376 - RNA, 15 nt, Human
uacuauuaaacaugc

SEQ ID NO: 3007377 - RNA, 16 nt, Human
uacuauuaaacaugcu

SEQ ID NO: 3007378 - RNA, 13 nt, Human
uacuauuaaacau

SEQ ID NO: 3007379 - RNA, 14 nt, Human
uauuuauuuauuua

SEQ ID NO: 3007380 - RNA, 13 nt, Human
uauuuauuuguga

SEQ ID NO: 3007381 - RNA, 13 nt, Human
uauuuaauuugaa

SEQ ID NO: 3007382 - RNA, 23 nt, Human
uauuuaauuugaagguagaaugu

SEQ ID NO: 3007383 - RNA, 16 nt, Human
uauuuaauuugaaggu

SEQ ID NO: 3007384 - RNA, 13 nt, Human
uauuuaaucuuuu

SEQ ID NO: 3007385 - RNA, 15 nt, Human
uauuuaaucuuuuau

SEQ ID NO: 3007386 - RNA, 16 nt, Human
uauugaaaugauuuca

SEQ ID NO: 3007387 - RNA, 14 nt, Human
uauugaagcagagu

SEQ ID NO: 3007388 - RNA, 16 nt, Human
uauugaagcagagugg

SEQ ID NO: 3007389 - RNA, 20 nt, Human
uauugaagcagaguggcagu

SEQ ID NO: 3007390 - RNA, 15 nt, Human
uauucugagaugacu

SEQ ID NO: 3007391 - RNA, 17 nt, Human
uauuaaacaugcuguac

SEQ ID NO: 3007392 - RNA, 15 nt, Human
uauuaaacaugcugu

SEQ ID NO: 3007393 - RNA, 19 nt, Human
uauuaaacaugcuguacau

SEQ ID NO: 3007394 - RNA, 15 nt, Human
uauguuuuauauagc

SEQ ID NO: 3007395 - RNA, 22 nt, Human
acaguguguggucaacauuucu

SEQ ID NO: 3007396 - RNA, 21 nt, Human
acaguaacauagcugugauuu

SEQ ID NO: 3007397 - RNA, 20 nt, Human
uaucacuuccaugacauaag

SEQ ID NO: 3007398 - RNA, 19 nt, Human
uauauucucagcagagugc

SEQ ID NO: 3007399 - RNA, 17 nt, Human
uauauucucagcagagu

SEQ ID NO: 3007400 - RNA, 14 nt, Human
uaucagaacuaugu

SEQ ID NO: 3007401 - RNA, 20 nt, Human
uaucagaacuauguuuuugu

SEQ ID NO: 3007402 - RNA, 14 nt, Human
uaugaugacuguuu

SEQ ID NO: 3007403 - RNA, 15 nt, Human
uaugaugacuguuuu

SEQ ID NO: 3007404 - RNA, 13 nt, Human
uauagcaagacau

SEQ ID NO: 3007405 - RNA, 15 nt, Human
uagucauucuucccu

SEQ ID NO: 3007406 - RNA, 14 nt, Human
uagucauucuuccc

SEQ ID NO: 3007407 - RNA, 17 nt, Human
acuaucacugguuuggu

SEQ ID NO: 3007408 - RNA, 21 nt, Human
acuauuaaacaugcuguacau

SEQ ID NO: 3007409 - RNA, 20 nt, Human
acuauguuuuuguucaguuu

SEQ ID NO: 3007410 - RNA, 18 nt, Human
acuacauuagguugugaa

SEQ ID NO: 3007411 - RNA, 19 nt, Human
acuacauuagguugugaau

SEQ ID NO: 3007412 - RNA, 20 nt, Human
acuacauuagguugugaaug

SEQ ID NO: 3007413 - RNA, 14 nt, Human
acuaaaauguucua

SEQ ID NO: 3007414 - RNA, 15 nt, Human
uccuguuuuuauuau

SEQ ID NO: 3007415 - RNA, 21 nt, Human
uccuguuuuuauuauuaacaa

SEQ ID NO: 3007416 - RNA, 16 nt, Human
uccuguuuuuauuauu

SEQ ID NO: 3007417 - RNA, 20 nt, Human
uccuguuuuuauuauuaaca

SEQ ID NO: 3007418 - RNA, 21 nt, Human
uccacauuuguuuugccaauu

SEQ ID NO: 3007419 - RNA, 19 nt, Human
ucagaacuauguuuuuguu

SEQ ID NO: 3007420 - RNA, 16 nt, Human
ucagaacuauguuuuu

SEQ ID NO: 3007421 - RNA, 18 nt, Human
ucagaugcacaugagcug

SEQ ID NO: 3007422 - RNA, 23 nt, Human
ugagcaucgcuuaggagaagucu

SEQ ID NO: 3007423 - RNA, 10 nt, Human
agcagagugc

SEQ ID NO: 3007424 - RNA, 13 nt, Human
agcagagugcuuu

SEQ ID NO: 3007425 - RNA, 17 nt, Human
ugaagcagaguggcagu

SEQ ID NO: 3007426 - RNA, 21 nt, Human
ugaagauucuauguuaauauu

SEQ ID NO: 3007427 - RNA, 14 nt, Human
ugacauugcaccug

SEQ ID NO: 3007428 - RNA, 17 nt, Human
ugacauugcaccuggau

SEQ ID NO: 3007429 - RNA, 14 nt, Human
ugacauugacuauu

SEQ ID NO: 3007430 - RNA, 16 nt, Human
ugacauugacuauuuu

SEQ ID NO: 3007431 - RNA, 15 nt, Human
agcaacacaaagcuu

SEQ ID NO: 3007432 - RNA, 21 nt, Human
agcaacacaaagcuuuugcau

SEQ ID NO: 3007433 - RNA, 16 nt, Human
agcaacacaaagcuuu

SEQ ID NO: 3007434 - RNA, 18 nt, Human
agcaacacaaagcuuuug

SEQ ID NO: 3007435 - RNA, 20 nt, Human
acuuguugaggguauguuuu

SEQ ID NO: 3007436 - RNA, 15 nt, Human
ucuccucucucugua

SEQ ID NO: 3007437 - RNA, 20 nt, Human
agaacaaaggggcuuaauua

SEQ ID NO: 3007438 - RNA, 17 nt, Human
agaacuaaaauguucua

SEQ ID NO: 3007439 - RNA, 15 nt, Human
ucuggauucauauuu

SEQ ID NO: 3007440 - RNA, 17 nt, Human
agacccucaugcugcca

SEQ ID NO: 3007441 - RNA, 19 nt, Human
agacccucaugcugccaau

SEQ ID NO: 3007442 - RNA, 18 nt, Human
agacccucaugcugccaa

SEQ ID NO: 3007443 - RNA, 21 nt, Human
agacccucaugcugccaauau

SEQ ID NO: 3007444 - RNA, 20 nt, Human
agacccucaugcugccaaua

SEQ ID NO: 3007445 - RNA, 24 nt, Human
agacccucaugcugccaauauccu

SEQ ID NO: 3007446 - RNA, 16 nt, Human
agacccucucaaacua

SEQ ID NO: 3007447 - RNA, 21 nt, Human
agacuggauaguccgucucug

SEQ ID NO: 3007448 - RNA, 20 nt, Human
agacuggauaguccgucucu

SEQ ID NO: 3007449 - RNA, 16 nt, Human
ucuucccucaaaugug

SEQ ID NO: 3007450 - RNA, 18 nt, Human
ucugucuuuuaaacucug

SEQ ID NO: 3007451 - RNA, 12 nt, Human
ucugucuuuuaa

SEQ ID NO: 3007452 - RNA, 16 nt, Human
ucugucuuuuaaacuc

SEQ ID NO: 3007453 - RNA, 17 nt, Human
ugcauacuauuaaacau

SEQ ID NO: 3007454 - RNA, 18 nt, Human
ugcauacuauuaaacaug

SEQ ID NO: 3007455 - RNA, 20 nt, Human
ugcauacuauuaaacaugcu

SEQ ID NO: 3007456 - RNA, 12 nt, Human
ugcauacuauua

SEQ ID NO: 3007457 - RNA, 15 nt, Human
ugcauacuauuaaac

SEQ ID NO: 3007458 - RNA, 16 nt, Human
ugcauacuauuaaaca

SEQ ID NO: 3007459 - RNA, 17 nt, Human
ugcacaucuguuuugua

SEQ ID NO: 3007460 - RNA, 23 nt, Human
ugccaauauccuaauaaaaaggu

SEQ ID NO: 3007461 - RNA, 21 nt, Human
ugccaauauccuaauaaaaag

SEQ ID NO: 3007462 - RNA, 19 nt, Human
ugccaauauccuaauaaaa

SEQ ID NO: 3007463 - RNA, 18 nt, Human
ugccaauauccuaauaaa

SEQ ID NO: 3007464 - RNA, 17 nt, Human
ugccaauauccuaauaa

SEQ ID NO: 3007465 - RNA, 16 nt, Human
ugccaauauccuaaua

SEQ ID NO: 3007466 - RNA, 15 nt, Human
ugccaauauccuaau

SEQ ID NO: 3007467 - RNA, 23 nt, Human
aggaaagcaaaucaguuugguug

SEQ ID NO: 3007468 - RNA, 23 nt, Human
ugcugccaauauccuaauaaaaa

SEQ ID NO: 3007469 - RNA, 22 nt, Human
ugcugccaauauccuaauaaaa

SEQ ID NO: 3007470 - RNA, 20 nt, Human
ugccuuuuuauaacuuuuua

SEQ ID NO: 3007471 - RNA, 19 nt, Human
uggaacacucuauaacaaa

SEQ ID NO: 3007472 - RNA, 12 nt, Human
aggaguuuggcc

SEQ ID NO: 3007473 - RNA, 11 nt, Human
uggcccaggag

SEQ ID NO: 3007474 - RNA, 19 nt, Human
aggcuuagugauguaauua

SEQ ID NO: 3007475 - RNA, 17 nt, Human
aggcuuagugauguaau

SEQ ID NO: 3007476 - RNA, 18 nt, Human
aggcuuagugauguaauu

SEQ ID NO: 3007477 - RNA, 16 nt, Human
uggcuaacuuggguua

SEQ ID NO: 3007478 - RNA, 20 nt, Human
uguccagccccguagacgug

SEQ ID NO: 3007479 - RNA, 22 nt, Human
aggugggauaucacuuccauga

SEQ ID NO: 3007480 - RNA, 20 nt, Human
uguacauacuuuuuggguuu

SEQ ID NO: 3007481 - RNA, 15 nt, Human
uguacauacuuuuug

SEQ ID NO: 3007482 - RNA, 17 nt, Human
aguaaugagcuuaagaa

SEQ ID NO: 3007483 - RNA, 16 nt, Human
agguuuuuuuuucuca

SEQ ID NO: 3007484 - RNA, 20 nt, Human
aguaaaaaaugguguuuuau

SEQ ID NO: 3007485 - RNA, 19 nt, Human
aguguguggucaacauuuc

SEQ ID NO: 3007486 - RNA, 22 nt, Human
uguucuaaauaucccuuggaca

SEQ ID NO: 3007487 - RNA, 13 nt, Human
ugugucauuucaa

SEQ ID NO: 3007488 - RNA, 14 nt, Human
ugugucauuucaaa

SEQ ID NO: 3007489 - RNA, 22 nt, Human
uguggucaacauuucucauguu

SEQ ID NO: 3007490 - RNA, 15 nt, Human
ugugccuaauguguu

SEQ ID NO: 3007491 - RNA, 14 nt, Human
ugugccuaaugugu

SEQ ID NO: 3007492 - RNA, 18 nt, Human
ugugccuaauguguuuga

SEQ ID NO: 3007493 - RNA, 17 nt, Human
ugugccuaauguguuug

SEQ ID NO: 3007494 - RNA, 18 nt, Human
agugcaaacuucagaguu

SEQ ID NO: 3007495 - RNA, 15 nt, Human
agucucccuuccuau

SEQ ID NO: 3007496 - RNA, 18 nt, Human
auacuauuaaacaugcug

SEQ ID NO: 3007497 - RNA, 19 nt, Human
auacuauuaaacaugcugu

SEQ ID NO: 3007498 - RNA, 17 nt, Human
auacuauuaaacaugcu

SEQ ID NO: 3007499 - RNA, 20 nt, Human
auagauguugcuaacagcaa

SEQ ID NO: 3007500 - RNA, 14 nt, Human
auagauguugcuaa

SEQ ID NO: 3007501 - RNA, 20 nt, Human
auacugccuuguuuaauggu

SEQ ID NO: 3007502 - RNA, 18 nt, Human
auacugccuuguuuaaug

SEQ ID NO: 3007503 - RNA, 13 nt, Human
uuauuauuaacaa

SEQ ID NO: 3007504 - RNA, 14 nt, Human
uuauuauuaacaaa

SEQ ID NO: 3007505 - RNA, 21 nt, Human
uuauucauuaguuuugaagau

SEQ ID NO: 3007506 - RNA, 18 nt, Human
uuauucauuaguuuugaa

SEQ ID NO: 3007507 - RNA, 13 nt, Human
uuauguuaauauu

SEQ ID NO: 3007508 - RNA, 19 nt, Human
aguuuuuuuccuucaagaa

SEQ ID NO: 3007509 - RNA, 19 nt, Human
uuaagacuuugguuauuuu

SEQ ID NO: 3007510 - RNA, 15 nt, Human
aguuuaucuguucau

SEQ ID NO: 3007511 - RNA, 15 nt, Human
aguuuuacaguguuu

SEQ ID NO: 3007512 - RNA, 22 nt, Human
auaacuuuuuauauucucagca

SEQ ID NO: 3007513 - RNA, 18 nt, Human
auaacuuuuuauauucuc

SEQ ID NO: 3007514 - RNA, 21 nt, Human
uugaaggaugcugucuucgua

SEQ ID NO: 3007515 - RNA, 17 nt, Human
uugcauauugcauacua

SEQ ID NO: 3007516 - RNA, 17 nt, Human
aucugaaauaaggaaug

SEQ ID NO: 3007517 - RNA, 19 nt, Human
uucuagcaugaagacagag

SEQ ID NO: 3007518 - RNA, 15 nt, Human
uucccucaaaugugu

SEQ ID NO: 3007519 - RNA, 19 nt, Human
augugcacaucuguuuugu

SEQ ID NO: 3007520 - RNA, 13 nt, Human
augucaguauuuc

SEQ ID NO: 3007521 - RNA, 16 nt, Human
augucaguauuucaac

SEQ ID NO: 3007522 - RNA, 20 nt, Human
auguagacaguuggguuuuu

SEQ ID NO: 3007523 - RNA, 18 nt, Human
auguagacaguuggguuu

SEQ ID NO: 3007524 - RNA, 15 nt, Human
uuuaaauagaugaca

SEQ ID NO: 3007525 - RNA, 16 nt, Human
augauauaagguuuuu

SEQ ID NO: 3007526 - RNA, 18 nt, Human
uuguuuugccaauuugca

SEQ ID NO: 3007527 - RNA, 17 nt, Human
uuuaaagauguagacag

SEQ ID NO: 3007528 - RNA, 19 nt, Human
augauugccuuuuuauaac

SEQ ID NO: 3007529 - RNA, 14 nt, Human
uuucaaauguucuc

SEQ ID NO: 3007530 - RNA, 19 nt, Human
auugauugggcacaucauu

SEQ ID NO: 3007531 - RNA, 23 nt, Human
auugauugggcacaucauuucaa

SEQ ID NO: 3007532 - RNA, 16 nt, Human
auuuauuuauuuauuc

SEQ ID NO: 3007533 - RNA, 14 nt, Human
auuugaaacacugg

SEQ ID NO: 3007534 - RNA, 17 nt, Human
auuugaaacacugguuu

SEQ ID NO: 3007535 - RNA, 21 nt, Human
auuuuuguuuuuauuaaaagg

SEQ ID NO: 3007536 - RNA, 19 nt, Human
auuuuuguuuuuauuaaaa

SEQ ID NO: 3007537 - RNA, 19 nt, Human
auuuuugguauuugaaaca

SEQ ID NO: 3007538 - RNA, 16 nt, Human
auucuuuuugaaaugu

SEQ ID NO: 3007539 - RNA, 18 nt, Human
auugaagcagaguggcag

SEQ ID NO: 3007540 - RNA, 14 nt, Human
auugaagcagagug

SEQ ID NO: 3007541 - RNA, 15 nt, Human
auugaagcagagugg

SEQ ID NO: 3007542 - RNA, 13 nt, Human
auugaagcagagu

SEQ ID NO: 3007543 - RNA, 17 nt, Human
uuuguggaaaauaacuc

SEQ ID NO: 3007544 - RNA, 16 nt, Human
auuauauucauucuuu

SEQ ID NO: 3007545 - RNA, 17 nt, Human
auuauguuaauauuucu

SEQ ID NO: 3007546 - RNA, 13 nt, Human
auuauguuaauau

SEQ ID NO: 3007547 - RNA, 16 nt, Human
auuauguuaauauuuc

SEQ ID NO: 3007548 - RNA, 14 nt, Human
auuauguuaauauu

SEQ ID NO: 3007549 - RNA, 19 nt, Human
cuggauaguccgucucugc

SEQ ID NO: 3007550 - RNA, 18 nt, Human
cuggauaguccgucucug

SEQ ID NO: 3007551 - RNA, 17 nt, Human
cugucggagcccugucu

SEQ ID NO: 3007552 - RNA, 23 nt, Human
cuuugguuauuuuacuuuuugga

SEQ ID NO: 3007553 - RNA, 17 nt, Human
cuuugguuauuuuacuu

SEQ ID NO: 3007554 - RNA, 19 nt, Human
cuuugguuauuuuacuuuu

SEQ ID NO: 3007555 - RNA, 13 nt, Human
cuuugguuauuuu

SEQ ID NO: 3007556 - RNA, 18 nt, Human
cuuuaccaauugaaguaa

SEQ ID NO: 3007557 - RNA, 16 nt, Human
cuuuaccaauugaagu

SEQ ID NO: 3007558 - RNA, 19 nt, Human
cuuuaccaauugaaguaaa

SEQ ID NO: 3007559 - RNA, 20 nt, Human
cuuuaccaauugaaguaaaa

SEQ ID NO: 3007560 - RNA, 22 nt, Human
cuugugaauaaagagggugggu

SEQ ID NO: 3007561 - RNA, 20 nt, Human
gaaagggauuuucagcccuc

SEQ ID NO: 3007562 - RNA, 12 nt, Human
gaaagggauuuu

SEQ ID NO: 3007563 - RNA, 15 nt, Human
gauucuuguauuuau

SEQ ID NO: 3007564 - RNA, 21 nt, Human
gauucuuguauuuauuacaac

SEQ ID NO: 3007565 - RNA, 21 nt, Human
gaugcugucuucguacuggga

SEQ ID NO: 3007566 - RNA, 14 nt, Human
gcaggcuggaguua

SEQ ID NO: 3007567 - RNA, 22 nt, Human
gacuuugguuauuuuacuuuuu

SEQ ID NO: 3007568 - RNA, 21 nt, Human
gacccucucaaacuaacaggc

SEQ ID NO: 3007569 - RNA, 20 nt, Human
ggcacugguuuguucccugu

SEQ ID NO: 3007570 - RNA, 19 nt, Human
ggcccuuuuucaauaacug

SEQ ID NO: 3007571 - RNA, 18 nt, Human
ggcugaacuuuguggucg

SEQ ID NO: 3007572 - RNA, 20 nt, Human
aaaaggaagcuuacaugccu

SEQ ID NO: 3007573 - RNA, 14 nt, Human
guagaauguuuuca

SEQ ID NO: 3007574 - RNA, 16 nt, Human
guagacaguuggguuu

SEQ ID NO: 3007575 - RNA, 23 nt, Human
guagacgugcacgcacacugucu

SEQ ID NO: 3007576 - RNA, 20 nt, Human
guagacgugcacgcacacug

SEQ ID NO: 3007577 - RNA, 21 nt, Human
guacucugccacuuuauuucu

SEQ ID NO: 3007578 - RNA, 14 nt, Human
guaacucuguaauu

SEQ ID NO: 3007579 - RNA, 16 nt, Human
aaagguacuuugcagg

SEQ ID NO: 3007580 - RNA, 14 nt, Human
ggguggggcagugc

SEQ ID NO: 3007581 - RNA, 13 nt, Human
aaagcuuuugcau

SEQ ID NO: 3007582 - RNA, 14 nt, Human
aaagcuuuugcaua

SEQ ID NO: 3007583 - RNA, 21 nt, Human
aaacacauuaaagguacuuug

SEQ ID NO: 3007584 - RNA, 11 nt, Human
aaacacauuaa

SEQ ID NO: 3007585 - RNA, 15 nt, Human
aaacacauuaaaggu

SEQ ID NO: 3007586 - RNA, 23 nt, Human
aaacaugcuguacauacuuuuug

SEQ ID NO: 3007587 - RNA, 16 nt, Human
gcuuguacacucauuc

SEQ ID NO: 3007588 - RNA, 23 nt, Human
ggaacagaagaggaaagagagac

SEQ ID NO: 3007589 - RNA, 19 nt, Human
gcuccaccuugcagcucuc

SEQ ID NO: 3007590 - RNA, 16 nt, Human
gcccucaauugugaaa

SEQ ID NO: 3007591 - RNA, 22 nt, Human
cagaguaggggucugucuuuua

SEQ ID NO: 3007592 - RNA, 23 nt, Human
cagaguaggggucugucuuuuaa

SEQ ID NO: 3007593 - RNA, 20 nt, Human
cagaguaggggucugucuuu

SEQ ID NO: 3007594 - RNA, 13 nt, Human
cauagcugugauu

SEQ ID NO: 3007595 - RNA, 15 nt, Human
cauagcugugauuuu

SEQ ID NO: 3007596 - RNA, 18 nt, Human
cauagcugugauuuuugg

SEQ ID NO: 3007597 - RNA, 14 nt, Human
cauuagguugugaa

SEQ ID NO: 3007598 - RNA, 15 nt, Human
cauuagguugugaau

SEQ ID NO: 3007599 - RNA, 16 nt, Human
cauuagguugugaaug

SEQ ID NO: 3007600 - RNA, 12 nt, Human
auuaaaugacuc

SEQ ID NO: 3007601 - RNA, 13 nt, Human
auuaaaugacucu

SEQ ID NO: 3007602 - RNA, 24 nt, Human
caaacccaguguuuuaggagcaug

SEQ ID NO: 3007603 - RNA, 17 nt, Human
caaacagucucccuucc

SEQ ID NO: 3007604 - RNA, 13 nt, Human
auuuuaugucuuu

SEQ ID NO: 3007605 - RNA, 15 nt, Human
cacaucuguuuugua

SEQ ID NO: 3007606 - RNA, 18 nt, Human
cacccaggaacuccugac

SEQ ID NO: 3007607 - RNA, 13 nt, Human
cacagaagaugaa

SEQ ID NO: 3007608 - RNA, 23 nt, Human
caauugaaguaaaauguggcagg

SEQ ID NO: 3007609 - RNA, 12 nt, Human
ccuaauguguuu

SEQ ID NO: 3007610 - RNA, 14 nt, Human
ccuaauaaaaaggu

SEQ ID NO: 3007611 - RNA, 20 nt, Human
ccuaauaaaaaggugaccau

SEQ ID NO: 3007612 - RNA, 16 nt, Human
ccuaauaaaaagguga

SEQ ID NO: 3007613 - RNA, 15 nt, Human
ccuaauaaaaaggug

SEQ ID NO: 3007614 - RNA, 16 nt, Human
ccauucuuggcccagg

SEQ ID NO: 3007615 - RNA, 22 nt, Human
ccagucauuauguuaauauuuc

SEQ ID NO: 3007616 - RNA, 21 nt, Human
ccagucauuauguuaauauuu

SEQ ID NO: 3007617 - RNA, 20 nt, Human
cccagcacaaagcagauccu

SEQ ID NO: 3007618 - RNA, 17 nt, Human
cucacaauccuugccac

SEQ ID NO: 3007619 - RNA, 21 nt, Human
cugacacaugcugaacaucac

SEQ ID NO: 3007620 - RNA, 14 nt, Human
ccagcacaaagcag

SEQ ID NO: 3007621 - RNA, 13 nt, Human
ccagugagacugu

SEQ ID NO: 3007622 - RNA, 18 nt, Human
ccagugacagucagggaa

SEQ ID NO: 3007623 - RNA, 21 nt, Human
cucagaugcacaugagcuggc

SEQ ID NO: 3007624 - RNA, 23 nt, Human
cucauuuuuauaaugucccuuca

SEQ ID NO: 3007625 - RNA, 20 nt, Human
cuauauaauuccuguuuuua

SEQ ID NO: 3007626 - RNA, 18 nt, Human
cuauauaauuccuguuuu

SEQ ID NO: 3007627 - RNA, 23 nt, Human
cuauucagcacaaggaaauaaaa

SEQ ID NO: 3007628 - RNA, 18 nt, Human
cuauucugagaugacuau

SEQ ID NO: 3007629 - RNA, 15 nt, Human
cuauucugagaugac

SEQ ID NO: 3007630 - RNA, 16 nt, Human
cuauucugagaugacu

SEQ ID NO: 3007631 - RNA, 15 nt, Human
cucacagaagaugaa

SEQ ID NO: 3007632 - RNA, 19 nt, Human
cuauuuauuuauuuauuca

SEQ ID NO: 3007633 - RNA, 12 nt, Human
cuauuuauuuau

SEQ ID NO: 3007634 - RNA, 20 nt, Human
cuaacagcaacacaaagcuu

SEQ ID NO: 3007635 - RNA, 19 nt, Human
cuaauaugaugacuguuuu

SEQ ID NO: 3007636 - RNA, 21 nt, Human
cuaauaugaugacuguuuuua

SEQ ID NO: 3007637 - RNA, 17 nt, Human
cuacauugacagauuga

SEQ ID NO: 3007638 - RNA, 18 nt, Human
cuacauuagguugugaau

SEQ ID NO: 3007639 - RNA, 17 nt, Human
cuacauuagguugugaa

SEQ ID NO: 3007640 - RNA, 21 nt, Human
cuaccaauauuuaaucuuuua

SEQ ID NO: 3007641 - RNA, 15 nt, Human
cuaccaauauuuaau

SEQ ID NO: 3007642 - RNA, 13 nt, Human
cuaccaauauuua

SEQ ID NO: 3007643 - RNA, 21 nt, Human
cuuuuuggguuuauuuggaaa

SEQ ID NO: 3007644 - RNA, 17 nt, Human
gaaaaggccuucuuccc

SEQ ID NO: 3007645 - RNA, 14 nt, Human
cuuugcaggaaauc

SEQ ID NO: 3007646 - RNA, 15 nt, Human
cuuauuuccucauuu

SEQ ID NO: 3007647 - RNA, 15 nt, Human
cuuagugauguaauu

SEQ ID NO: 3007648 - RNA, 16 nt, Human
cuuagugauguaauua

SEQ ID NO: 3007649 - RNA, 22 nt, Human
cuggcacugguuuguucccugu

SEQ ID NO: 3007650 - RNA, 22 nt, Human
cuguaauaaacucauuucuagc

SEQ ID NO: 3007651 - RNA, 21 nt, Human
cugugcaucuagccucaagcu

SEQ ID NO: 3007652 - RNA, 22 nt, Human
gaaugucaguuguuauuuauug

SEQ ID NO: 3007653 - RNA, 21 nt, Human
gaaugucaguuguuauuuauu

SEQ ID NO: 3007654 - RNA, 19 nt, Human
gacagagccccacccucag

SEQ ID NO: 3007655 - RNA, 18 nt, Human
gagguacacuugugaaua

SEQ ID NO: 3007656 - RNA, 12 nt, Human
gagcccugucuc

SEQ ID NO: 3007657 - RNA, 16 nt, Human
gcacauuaaaugacuc

SEQ ID NO: 3007658 - RNA, 21 nt, Human
gcacauuaaaugacucuuccc

SEQ ID NO: 3007659 - RNA, 12 nt, Human
gcacauuaaaug

SEQ ID NO: 3007660 - RNA, 14 nt, Human
gcacauuaaaugac

SEQ ID NO: 3007661 - RNA, 13 nt, Human
gcacacugucugc

SEQ ID NO: 3007662 - RNA, 16 nt, Human
gauguugcuaacagca

SEQ ID NO: 3007663 - RNA, 18 nt, Human
gcaaagaugaaggucugu

SEQ ID NO: 3007664 - RNA, 14 nt, Human
gcaaagaugaaggu

SEQ ID NO: 3007665 - RNA, 15 nt, Human
gauugccuuuuuaua

SEQ ID NO: 3007666 - RNA, 21 nt, Human
gauugccuuuuuauaacuuuu

SEQ ID NO: 3007667 - RNA, 22 nt, Human
gauugccuuuuuauaacuuuuu

SEQ ID NO: 3007668 - RNA, 13 nt, Human
ggauacuuauuua

SEQ ID NO: 3007669 - RNA, 13 nt, Human
ggaaugcaaagau

SEQ ID NO: 3007670 - RNA, 23 nt, Human
ggaaagggauuuucagcccucag

SEQ ID NO: 3007671 - RNA, 21 nt, Human
gcuuaggagaagucuucuauu

SEQ ID NO: 3007672 - RNA, 23 nt, Human
gcugccaauauccuaauaaaaag

SEQ ID NO: 3007673 - RNA, 21 nt, Human
gcugccaauauccuaauaaaa

SEQ ID NO: 3007674 - RNA, 20 nt, Human
gcugccaauauccuaauaaa

SEQ ID NO: 3007675 - RNA, 14 nt, Human
gcccuuuuucaaua

SEQ ID NO: 3007676 - RNA, 18 nt, Human
gccuaauaugaugacugu

SEQ ID NO: 3007677 - RNA, 17 nt, Human
gcucaccccaucauccc

SEQ ID NO: 3007678 - RNA, 19 nt, Human
gcucaccccaucaucccuu

SEQ ID NO: 3007679 - RNA, 13 nt, Human
gcugcaguuuuuu

SEQ ID NO: 3007680 - RNA, 15 nt, Human
gcugccaauauccua

SEQ ID NO: 3007681 - RNA, 14 nt, Human
gcugccaauauccu

SEQ ID NO: 3007682 - RNA, 19 nt, Human
gcugccaauauccuaauaa

SEQ ID NO: 3007683 - RNA, 18 nt, Human
gcugccaauauccuaaua

SEQ ID NO: 3007684 - RNA, 17 nt, Human
gcugccaauauccuaau

SEQ ID NO: 3007685 - RNA, 16 nt, Human
gcugccaauauccuaa

SEQ ID NO: 3007686 - RNA, 22 nt, Human
guaacuguuuagaugaauguca

SEQ ID NO: 3007687 - RNA, 10 nt, Human
gguugugaau

SEQ ID NO: 3007688 - RNA, 18 nt, Human
guaaaaaaugguguuuua

SEQ ID NO: 3007689 - RNA, 16 nt, Human
guaaaaaaugguguuu

SEQ ID NO: 3007690 - RNA, 14 nt, Human
guacuuuuaagacu

SEQ ID NO: 3007691 - RNA, 15 nt, Human
guagagguacacuug

SEQ ID NO: 3007692 - RNA, 17 nt, Human
guagagguacacuugug

SEQ ID NO: 3007693 - RNA, 19 nt, Human
guagagguacacuugugaa

SEQ ID NO: 3007694 - RNA, 18 nt, Human
guacuaacauuuauuuga

SEQ ID NO: 3007695 - RNA, 19 nt, Human
guacauacuuuuuggguuu

SEQ ID NO: 3007696 - RNA, 13 nt, Human
guacauacuuuuu

SEQ ID NO: 3007697 - RNA, 14 nt, Human
guacauacuuuuug

SEQ ID NO: 3007698 - RNA, 15 nt, Human
guacacuugugaaua

SEQ ID NO: 3007699 - RNA, 14 nt, Human
guacacuugugaau

SEQ ID NO: 3007700 - RNA, 21 nt, Human
ggguagccacuggacugacga

SEQ ID NO: 3007701 - RNA, 23 nt, Human
gguagaauguuuucaaauguucu

SEQ ID NO: 3007702 - RNA, 13 nt, Human
gucaaggcuuaga

SEQ ID NO: 3007703 - RNA, 20 nt, Human
guagagguacacuugugaau

SEQ ID NO: 3007704 - RNA, 19 nt, Human
guccuauuauauucauucu

SEQ ID NO: 3007705 - RNA, 21 nt, Human
guccuauuauauucauucuuu

SEQ ID NO: 3007706 - RNA, 21 nt, Human
guccugucggagcccugucuc

SEQ ID NO: 3007707 - RNA, 20 nt, Human
guccugucggagcccugucu

SEQ ID NO: 3007708 - RNA, 18 nt, Human
guccugucggagcccugu

SEQ ID NO: 3007709 - RNA, 24 nt, Human
gugcuuggcccaggaguuuggcca

SEQ ID NO: 3007710 - RNA, 19 nt, Human
gugcuuggcccaggaguuu

SEQ ID NO: 3007711 - RNA, 17 nt, Human
gugcuuggcccaggagu

SEQ ID NO: 3007712 - RNA, 16 nt, Human
gugcuuggcccaggag

SEQ ID NO: 3007713 - RNA, 15 nt, Human
gugcuuggcccagga

SEQ ID NO: 3007714 - RNA, 14 nt, Human
gugcuuggcccagg

SEQ ID NO: 3007715 - RNA, 13 nt, Human
gugcuuggcccag

SEQ ID NO: 3007716 - RNA, 14 nt, Human
guggaaaauaacuc

SEQ ID NO: 3007717 - RNA, 12 nt, Human
ucaaauguguac

SEQ ID NO: 3007718 - RNA, 15 nt, Human
uauuuaaauagauga

SEQ ID NO: 3007719 - RNA, 17 nt, Human
uauuuaaauagaugaca

SEQ ID NO: 3007720 - RNA, 18 nt, Human
uauuugaaacacugguuu

SEQ ID NO: 3007721 - RNA, 23 nt, Human
uauugcauacuauuaaacaugcu

SEQ ID NO: 3007722 - RNA, 19 nt, Human
uauugcauacuauuaaaca

SEQ ID NO: 3007723 - RNA, 23 nt, Human
uauucauucuuuuugaaauguca

SEQ ID NO: 3007724 - RNA, 18 nt, Human
uauucauucuuuuugaaa

SEQ ID NO: 3007725 - RNA, 23 nt, Human
uauuauauucauucuuuuugaaa

SEQ ID NO: 3007726 - RNA, 17 nt, Human
uauuauauucauucuuu

SEQ ID NO: 3007727 - RNA, 13 nt, Human
uauuauauucauu

SEQ ID NO: 3007728 - RNA, 13 nt, Human
uauguguucuauu

SEQ ID NO: 3007729 - RNA, 14 nt, Human
uauguuaauauuuu

SEQ ID NO: 3007730 - RNA, 16 nt, Human
uauguuaauauuucug

SEQ ID NO: 3007731 - RNA, 13 nt, Human
uauguuaauauuu

SEQ ID NO: 3007732 - RNA, 18 nt, Human
uaucuguucauauggaua

SEQ ID NO: 3007733 - RNA, 23 nt, Human
uaugauugccuuuuuauaacuuu

SEQ ID NO: 3007734 - RNA, 20 nt, Human
uaugauugccuuuuuauaac

SEQ ID NO: 3007735 - RNA, 16 nt, Human
uccuccacauuuguuu

SEQ ID NO: 3007736 - RNA, 13 nt, Human
uccuccacauuug

SEQ ID NO: 3007737 - RNA, 22 nt, Human
uccucauuuuuauaaugucccu

SEQ ID NO: 3007738 - RNA, 17 nt, Human
uccuagucauucuuccc

SEQ ID NO: 3007739 - RNA, 15 nt, Human
ucccuuggacauuuu

SEQ ID NO: 3007740 - RNA, 21 nt, Human
ucccuuggacauuuuaugucu

SEQ ID NO: 3007741 - RNA, 19 nt, Human
ucccuuggacauuuuaugu

SEQ ID NO: 3007742 - RNA, 18 nt, Human
ucccuuggacauuuuaug

SEQ ID NO: 3007743 - RNA, 16 nt, Human
ucccuuggacauuuua

SEQ ID NO: 3007744 - RNA, 20 nt, Human
ucccuucacaaacccagugu

SEQ ID NO: 3007745 - RNA, 22 nt, Human
uccugucggagcccugucuccu

SEQ ID NO: 3007746 - RNA, 13 nt, Human
ugaaaugucaacc

SEQ ID NO: 3007747 - RNA, 17 nt, Human
ugaacaguaacauagcu

SEQ ID NO: 3007748 - RNA, 22 nt, Human
ugauugccuuuuuauaacuuuu

SEQ ID NO: 3007749 - RNA, 17 nt, Human
ugauugccuuuuuauaa

SEQ ID NO: 3007750 - RNA, 15 nt, Human
ugauuuaaacacauu

SEQ ID NO: 3007751 - RNA, 18 nt, Human
ugauuuaaacacauuaaa

SEQ ID NO: 3007752 - RNA, 16 nt, Human
ugauuuaaacacauua

SEQ ID NO: 3007753 - RNA, 17 nt, Human
ugauuuaaacacauuaa

SEQ ID NO: 3007754 - RNA, 23 nt, Human
ugauugggcacaucauuucaaga

SEQ ID NO: 3007755 - RNA, 18 nt, Human
ugauugggcacaucauuu

SEQ ID NO: 3007756 - RNA, 20 nt, Human
ugauugggcacaucauuuca

SEQ ID NO: 3007757 - RNA, 21 nt, Human
ugauugggcacaucauuucaa

SEQ ID NO: 3007758 - RNA, 17 nt, Human
ugauugggcacaucauu

SEQ ID NO: 3007759 - RNA, 21 nt, Human
ugcuguucacuggacacuuca

SEQ ID NO: 3007760 - RNA, 19 nt, Human
ugcugccaauauccuaaua

SEQ ID NO: 3007761 - RNA, 18 nt, Human
ugcugccaauauccuaau

SEQ ID NO: 3007762 - RNA, 17 nt, Human
ugcugccaauauccuaa

SEQ ID NO: 3007763 - RNA, 16 nt, Human
ugcugccaauauccua

SEQ ID NO: 3007764 - RNA, 15 nt, Human
ugcugccaauauccu

SEQ ID NO: 3007765 - RNA, 21 nt, Human
ugcugccaauauccuaauaaa

SEQ ID NO: 3007766 - RNA, 15 nt, Human
ugcauauugcauacu

SEQ ID NO: 3007767 - RNA, 23 nt, Human
ugcauauugcauacuauuaaaca

SEQ ID NO: 3007768 - RNA, 16 nt, Human
ugcagggacagagcau

SEQ ID NO: 3007769 - RNA, 19 nt, Human
uggaucuguauguguucua

SEQ ID NO: 3007770 - RNA, 18 nt, Human
uggguauagauguugcua

SEQ ID NO: 3007771 - RNA, 14 nt, Human
uggguauagauguu

SEQ ID NO: 3007772 - RNA, 22 nt, Human
uggugauuuagcaggaagcugu

SEQ ID NO: 3007773 - RNA, 16 nt, Human
uggugauuuagcagga

SEQ ID NO: 3007774 - RNA, 14 nt, Human
uggucaacauuucu

SEQ ID NO: 3007775 - RNA, 15 nt, Human
ugguauuugaaacac

SEQ ID NO: 3007776 - RNA, 21 nt, Human
uuaaacucugagugcaaacuu

SEQ ID NO: 3007777 - RNA, 19 nt, Human
uuaaugguaguuuuacagu

SEQ ID NO: 3007778 - RNA, 22 nt, Human
uuaguagagguacacuugugaa

SEQ ID NO: 3007779 - RNA, 23 nt, Human
uuaguagagguacacuugugaau

SEQ ID NO: 3007780 - RNA, 20 nt, Human
uuaggagaagucuucuauuu

SEQ ID NO: 3007781 - RNA, 20 nt, Human
uuagacccucaugcugccaa

SEQ ID NO: 3007782 - RNA, 19 nt, Human
uuagacccucaugcugcca

SEQ ID NO: 3007783 - RNA, 13 nt, Human
uuacuuuaaacua

SEQ ID NO: 3007784 - RNA, 15 nt, Human
uuauuuuacuuuuug

SEQ ID NO: 3007785 - RNA, 13 nt, Human
uuauuuuacuuuu

SEQ ID NO: 3007786 - RNA, 15 nt, Human
uuauugauguuuuca

SEQ ID NO: 3007787 - RNA, 13 nt, Human
uuauugaagcaga

SEQ ID NO: 3007788 - RNA, 15 nt, Human
uuauugaagcagagu

SEQ ID NO: 3007789 - RNA, 16 nt, Human
uuauugaagcagagug

SEQ ID NO: 3007790 - RNA, 17 nt, Human
uuauugaagcagagugg

SEQ ID NO: 3007791 - RNA, 12 nt, Human
uuauugaagcag

SEQ ID NO: 3007792 - RNA, 19 nt, Human
uuuacaguguuucuggcuu

SEQ ID NO: 3007793 - RNA, 17 nt, Human
uuuacaguguuucuggc

SEQ ID NO: 3007794 - RNA, 23 nt, Human
uuuauccuagucauucuucccua

SEQ ID NO: 3007795 - RNA, 15 nt, Human
uuuaucuguucauau

SEQ ID NO: 3007796 - RNA, 16 nt, Human
uuuaucuguucauaug

SEQ ID NO: 3007797 - RNA, 22 nt, Human
uuuauccuagucauucuucccu

SEQ ID NO: 3007798 - RNA, 23 nt, Human
uuguuuaaugguaguuuuacagu

SEQ ID NO: 3007799 - RNA, 12 nt, Human
uuguuuaauggu

SEQ ID NO: 3007800 - RNA, 15 nt, Human
uuguuauuuauugaa

SEQ ID NO: 3007801 - RNA, 20 nt, Human
uuguuauuuauugaaaugau

SEQ ID NO: 3007802 - RNA, 14 nt, Human
uuuaaacacauuaa

SEQ ID NO: 3007803 - RNA, 15 nt, Human
uuuaaacacauuaaa

SEQ ID NO: 3007804 - RNA, 15 nt, Human
uuuaaacuacauuag

SEQ ID NO: 3007805 - RNA, 21 nt, Human
uuugaagguagaauguuuuca

SEQ ID NO: 3007806 - RNA, 20 nt, Human
uuugccaauuugcacauuaa

SEQ ID NO: 3007807 - RNA, 15 nt, Human
uuugccaauuugcac

SEQ ID NO: 3007808 - RNA, 22 nt, Human
uuugguugguaacucuguaauu

SEQ ID NO: 3007809 - RNA, 13 nt, Human
uuugguuauuuua

SEQ ID NO: 3007810 - RNA, 14 nt, Human
uuugguuauuuuac

SEQ ID NO: 3007811 - RNA, 17 nt, Human
uuuggguuuauuuggaa

SEQ ID NO: 3007812 - RNA, 22 nt, Human
uuucacaguguguggucaacau

SEQ ID NO: 3007813 - RNA, 13 nt, Human
uucuuguauuuau

SEQ ID NO: 3007814 - RNA, 14 nt, Human
uugaagcagagugg

SEQ ID NO: 3007815 - RNA, 12 nt, Human
uugaagcagagu

SEQ ID NO: 3007816 - RNA, 13 nt, Human
uugaagauucuau

SEQ ID NO: 3007817 - RNA, 23 nt, Human
uugaagauucuauguuaauauuu

SEQ ID NO: 3007818 - RNA, 22 nt, Human
uugaagauucuauguuaauauu

SEQ ID NO: 3007819 - RNA, 15 nt, Human
uugaaacacugguuu

SEQ ID NO: 3007820 - RNA, 23 nt, Human
uugcagcucuccccuucucugua

SEQ ID NO: 3007821 - RNA, 18 nt, Human
uugguaacucuguaauuc

SEQ ID NO: 3007822 - RNA, 20 nt, Human
uugggcacaucauuucaaga

SEQ ID NO: 3007823 - RNA, 17 nt, Human
uugccuuuuuauaacuu

SEQ ID NO: 3007824 - RNA, 18 nt, Human
uugccuuggcugcaguuu

SEQ ID NO: 3007825 - RNA, 16 nt, Human
uugcugcuuguacacu

SEQ ID NO: 3007826 - RNA, 21 nt, Human
uugcugcugauuuaaacacau

SEQ ID NO: 3007827 - RNA, 17 nt, Human
uugcugcugauuuaaac

SEQ ID NO: 3007828 - RNA, 19 nt, Human
uugcugcugauuuaaacac

SEQ ID NO: 3007829 - RNA, 23 nt, Human
uugcuaacagcaacacaaagcuu

SEQ ID NO: 3007830 - RNA, 17 nt, Human
uuuguguacuuuuaaga

SEQ ID NO: 3007831 - RNA, 13 nt, Human
uuuguguacuuuu

SEQ ID NO: 3007832 - RNA, 14 nt, Human
uuuguguacuuuua

SEQ ID NO: 3007833 - RNA, 17 nt, Human
cugccaauauccuaaua

SEQ ID NO: 3007834 - RNA, 16 nt, Human
cugccaauauccuaau

SEQ ID NO: 3007835 - RNA, 14 nt, Human
cugccaauauccua

SEQ ID NO: 3007836 - RNA, 13 nt, Human
cugccaauauccu

SEQ ID NO: 3007837 - RNA, 22 nt, Human
cugccaauauccuaauaaaaag

SEQ ID NO: 3007838 - RNA, 20 nt, Human
cugccaauauccuaauaaaa

SEQ ID NO: 3007839 - RNA, 19 nt, Human
cugccaauauccuaauaaa

SEQ ID NO: 3007840 - RNA, 18 nt, Human
cugccaauauccuaauaa

SEQ ID NO: 3007841 - RNA, 16 nt, Human
cugguuuguucccugu

SEQ ID NO: 3007842 - RNA, 22 nt, Human
cugguuuuaaauauuuugacuu

SEQ ID NO: 3007843 - RNA, 22 nt, Human
cuuuuaugauugccuuuuuaua

SEQ ID NO: 3007844 - RNA, 23 nt, Human
cuuuugcauauugcauacuauua

SEQ ID NO: 3007845 - RNA, 20 nt, Human
gaaaaaauuuacuuuaaacu

SEQ ID NO: 3007846 - RNA, 22 nt, Human
cuucuauuuauuuauuuauuca

SEQ ID NO: 3007847 - RNA, 17 nt, Human
cuucaguuugcagagua

SEQ ID NO: 3007848 - RNA, 16 nt, Human
cuucaguuugcagagu

SEQ ID NO: 3007849 - RNA, 17 nt, Human
cuucacgcccuuggcca

SEQ ID NO: 3007850 - RNA, 15 nt, Human
cuucacgcccuuggc

SEQ ID NO: 3007851 - RNA, 13 nt, Human
gauacuuauuuaa

SEQ ID NO: 3007852 - RNA, 19 nt, Human
gauacuuauuuaaauagau

SEQ ID NO: 3007853 - RNA, 16 nt, Human
gauacuuauuuaaaua

SEQ ID NO: 3007854 - RNA, 14 nt, Human
gaguuuggccagaa

SEQ ID NO: 3007855 - RNA, 13 nt, Human
gaguuuggccaga

SEQ ID NO: 3007856 - RNA, 12 nt, Human
gaguuuggccag

SEQ ID NO: 3007857 - RNA, 21 nt, Human
gagugcucaguagucagacug

SEQ ID NO: 3007858 - RNA, 15 nt, Human
gcaguacuaacauuu

SEQ ID NO: 3007859 - RNA, 21 nt, Human
gcaguacuaacauuuauuuga

SEQ ID NO: 3007860 - RNA, 22 nt, Human
gcaguaaaaaaugguguuuuau

SEQ ID NO: 3007861 - RNA, 19 nt, Human
gcaguaaaaaaugguguuu

SEQ ID NO: 3007862 - RNA, 21 nt, Human
gcacaugagcuggcgggauug

SEQ ID NO: 3007863 - RNA, 15 nt, Human
gcacaucuguuuugu

SEQ ID NO: 3007864 - RNA, 13 nt, Human
gacuauuuuuguu

SEQ ID NO: 3007865 - RNA, 17 nt, Human
gacuauuuuuguuuuua

SEQ ID NO: 3007866 - RNA, 18 nt, Human
gacuauuuuuguuuuuau

SEQ ID NO: 3007867 - RNA, 21 nt, Human
gacuauuuuuguuuuuauuaa

SEQ ID NO: 3007868 - RNA, 22 nt, Human
gacuauuuuuguuuuuauuaaa

SEQ ID NO: 3007869 - RNA, 21 nt, Human
gagaagucuucuauuuauuua

SEQ ID NO: 3007870 - RNA, 20 nt, Human
gagaagucuucuauuuauuu

SEQ ID NO: 3007871 - RNA, 20 nt, Human
ggcccaggaguuuggccaga

SEQ ID NO: 3007872 - RNA, 19 nt, Human
ggcccaggaguuuggccag

SEQ ID NO: 3007873 - RNA, 18 nt, Human
ggcccaggaguuuggcca

SEQ ID NO: 3007874 - RNA, 13 nt, Human
ggcccaggaguuu

SEQ ID NO: 3007875 - RNA, 11 nt, Human
ggcccaggagu

SEQ ID NO: 3007876 - RNA, 18 nt, Human
ggaucuguauguguucua

SEQ ID NO: 3007877 - RNA, 19 nt, Human
ggaucuguauguguucuau

SEQ ID NO: 3007878 - RNA, 13 nt, Human
ggaguuuggccag

SEQ ID NO: 3007879 - RNA, 15 nt, Human
ggaguuuggccagaa

SEQ ID NO: 3007880 - RNA, 14 nt, Human
ggaguuuggccaga

SEQ ID NO: 3007881 - RNA, 22 nt, Human
aaaagggguaggguuuaaagau

SEQ ID NO: 3007882 - RNA, 19 nt, Human
gggcccuuuuucaauaacu

SEQ ID NO: 3007883 - RNA, 16 nt, Human
aaacagucucccuucc

SEQ ID NO: 3007884 - RNA, 22 nt, Human
aaauaaggaaugauauaagguu

SEQ ID NO: 3007885 - RNA, 18 nt, Human
gguggggcagugcuuggc

SEQ ID NO: 3007886 - RNA, 12 nt, Human
gguuucuagcau

SEQ ID NO: 3007887 - RNA, 11 nt, Human
gguuuauuugg

SEQ ID NO: 3007888 - RNA, 21 nt, Human
ggucuguuuuguguacuuuua

SEQ ID NO: 3007889 - RNA, 15 nt, Human
gguacacuugugaau

SEQ ID NO: 3007890 - RNA, 18 nt, Human
gccccacccucagaugca

SEQ ID NO: 3007891 - RNA, 15 nt, Human
gccccacccucagau

SEQ ID NO: 3007892 - RNA, 17 nt, Human
gcccaggaguuuggcca

SEQ ID NO: 3007893 - RNA, 13 nt, Human
gcccaggaguuug

SEQ ID NO: 3007894 - RNA, 16 nt, Human
gcccaggaguuuggcc

SEQ ID NO: 3007895 - RNA, 15 nt, Human
gcccaggaguuuggc

SEQ ID NO: 3007896 - RNA, 22 nt, Human
gcuggaguuauugaagcagagu

SEQ ID NO: 3007897 - RNA, 22 nt, Human
gcuguacauacuuuuuggguuu

SEQ ID NO: 3007898 - RNA, 17 nt, Human
gcuguacauacuuuuug

SEQ ID NO: 3007899 - RNA, 22 nt, Human
gcuuaauuauugauguuuucau

SEQ ID NO: 3007900 - RNA, 17 nt, Human
gcuuauuuccucauuuu

SEQ ID NO: 3007901 - RNA, 12 nt, Human
gcugaacaucac

SEQ ID NO: 3007902 - RNA, 22 nt, Human
cuccagucauuauguuaauauu

SEQ ID NO: 3007903 - RNA, 12 nt, Human
cucaugcugcca

SEQ ID NO: 3007904 - RNA, 22 nt, Human
cucaugcugccaauauccuaau

SEQ ID NO: 3007905 - RNA, 14 nt, Human
cucaugcugccaau

SEQ ID NO: 3007906 - RNA, 13 nt, Human
cucuauuucugga

SEQ ID NO: 3007907 - RNA, 21 nt, Human
ccuuggacauuuuaugucuuu

SEQ ID NO: 3007908 - RNA, 18 nt, Human
ccuuggacauuuuauguc

SEQ ID NO: 3007909 - RNA, 16 nt, Human
ccuuggacauuuuaug

SEQ ID NO: 3007910 - RNA, 22 nt, Human
cuauaacaaaggauacuuauuu

SEQ ID NO: 3007911 - RNA, 18 nt, Human
cuauaacaaaggauacuu

SEQ ID NO: 3007912 - RNA, 16 nt, Human
cuagcaugaagacaga

SEQ ID NO: 3007913 - RNA, 13 nt, Human
cccuucucuguau

SEQ ID NO: 3007914 - RNA, 24 nt, Human
ccguagacgugcacgcacacuguc

SEQ ID NO: 3007915 - RNA, 13 nt, Human
caaacccaguguu

SEQ ID NO: 3007916 - RNA, 21 nt, Human
auuugccuaauaugaugacug

SEQ ID NO: 3007917 - RNA, 18 nt, Human
auuuguggaaaauaacuc

SEQ ID NO: 3007918 - RNA, 18 nt, Human
auuuggaaaggaaugcaa

SEQ ID NO: 3007919 - RNA, 15 nt, Human
auuuggaaaggaaug

SEQ ID NO: 3007920 - RNA, 14 nt, Human
auuagguugugaau

SEQ ID NO: 3007921 - RNA, 15 nt, Human
auuagguugugaaug

SEQ ID NO: 3007922 - RNA, 13 nt, Human
auuagguugugaa

SEQ ID NO: 3007923 - RNA, 17 nt, Human
auuacaacucuauuuaa

SEQ ID NO: 3007924 - RNA, 20 nt, Human
auuaaugucaguauuucaac

SEQ ID NO: 3007925 - RNA, 17 nt, Human
auugcugcuuguacacu

SEQ ID NO: 3007926 - RNA, 14 nt, Human
cacugguuugguuc

SEQ ID NO: 3007927 - RNA, 22 nt, Human
caugcugccaauauccuaauaa

SEQ ID NO: 3007928 - RNA, 21 nt, Human
caugcugccaauauccuaaua

SEQ ID NO: 3007929 - RNA, 19 nt, Human
caugcugccaauauccuaa

SEQ ID NO: 3007930 - RNA, 17 nt, Human
caugcugccaauauccu

SEQ ID NO: 3007931 - RNA, 15 nt, Human
caugcugccaauauc

SEQ ID NO: 3007932 - RNA, 11 nt, Human
caguuugguug

SEQ ID NO: 3007933 - RNA, 21 nt, Human
caguuugguugguaacucugu

SEQ ID NO: 3007934 - RNA, 14 nt, Human
caguuugcagagua

SEQ ID NO: 3007935 - RNA, 14 nt, Human
cauuucaagaaguc

SEQ ID NO: 3007936 - RNA, 20 nt, Human
caguaaaaaaugguguuuua

SEQ ID NO: 3007937 - RNA, 21 nt, Human
caguaaaaaaugguguuuuau

SEQ ID NO: 3007938 - RNA, 20 nt, Human
aacuacauuagguugugaau

SEQ ID NO: 3007939 - RNA, 12 nt, Human
aacucauuucua

SEQ ID NO: 3007940 - RNA, 14 nt, Human
gucuucuauuuauu

SEQ ID NO: 3007941 - RNA, 12 nt, Human
gucuucuauuua

SEQ ID NO: 3007942 - RNA, 17 nt, Human
gucuucuauuuauuuau

SEQ ID NO: 3007943 - RNA, 20 nt, Human
aacugggaugaggugacuau

SEQ ID NO: 3007944 - RNA, 19 nt, Human
aacucugagugcaaacuuc

SEQ ID NO: 3007945 - RNA, 18 nt, Human
aacucugagugcaaacuu

SEQ ID NO: 3007946 - RNA, 20 nt, Human
aacucugagugcaaacuuca

SEQ ID NO: 3007947 - RNA, 22 nt, Human
aacucugagugcaaacuucaga

SEQ ID NO: 3007948 - RNA, 21 nt, Human
aacacaaagcuuuugcauauu

SEQ ID NO: 3007949 - RNA, 21 nt, Human
gucaguuguuauuuauugaaa

SEQ ID NO: 3007950 - RNA, 18 nt, Human
gucaguuguuauuuauug

SEQ ID NO: 3007951 - RNA, 17 nt, Human
gucaguuguuauuuauu

SEQ ID NO: 3007952 - RNA, 16 nt, Human
gucaguuguuauuuau

SEQ ID NO: 3007953 - RNA, 12 nt, Human
aaauuuguggaa

SEQ ID NO: 3007954 - RNA, 17 nt, Human
aaaugguguuuuaucuu

SEQ ID NO: 3007955 - RNA, 18 nt, Human
aaaugguguuuuaucuuc

SEQ ID NO: 3007956 - RNA, 22 nt, Human
guuuauuuggaaaggaaugcaa

SEQ ID NO: 3007957 - RNA, 17 nt, Human
guuuaaugguaguuuua

SEQ ID NO: 3007958 - RNA, 12 nt, Human
guuuaaugguag

SEQ ID NO: 3007959 - RNA, 16 nt, Human
aaggauacuuauuuaa

SEQ ID NO: 3007960 - RNA, 13 nt, Human
aaggauacuuauu

SEQ ID NO: 3007961 - RNA, 14 nt, Human
guugcuaacagcaa

SEQ ID NO: 3007962 - RNA, 17 nt, Human
aagucuucuauuuauuu

SEQ ID NO: 3007963 - RNA, 13 nt, Human
aagucuucuauuu

SEQ ID NO: 3007964 - RNA, 16 nt, Human
guuauugaagcagagu

SEQ ID NO: 3007965 - RNA, 17 nt, Human
guuauugaagcagagug

SEQ ID NO: 3007966 - RNA, 18 nt, Human
guuauugaagcagagugg

SEQ ID NO: 3007967 - RNA, 18 nt, Human
aagaugaaggucuguuuu

SEQ ID NO: 3007968 - RNA, 13 nt, Human
gugucauuucaaa

SEQ ID NO: 3007969 - RNA, 23 nt, Human
aauagcagcccucaauugugaaa

SEQ ID NO: 3007970 - RNA, 22 nt, Human
aauagcagcccucaauugugaa

SEQ ID NO: 3007971 - RNA, 21 nt, Human
aauagcaaggcugugcaucua

SEQ ID NO: 3007972 - RNA, 21 nt, Human
uaacaaaggauacuuauuuaa

SEQ ID NO: 3007973 - RNA, 19 nt, Human
uaacaaaggauacuuauuu

SEQ ID NO: 3007974 - RNA, 20 nt, Human
uaacaaaggauacuuauuua

SEQ ID NO: 3007975 - RNA, 15 nt, Human
uaacaaaggauacuu

SEQ ID NO: 3007976 - RNA, 16 nt, Human
uaacaaaggauacuua

SEQ ID NO: 3007977 - RNA, 17 nt, Human
uaacaaaggauacuuau

SEQ ID NO: 3007978 - RNA, 18 nt, Human
uaacaaaggauacuuauu

SEQ ID NO: 3007979 - RNA, 21 nt, Human
uaacuaucacugguuugguuc

SEQ ID NO: 3007980 - RNA, 16 nt, Human
uaacuaucacugguuu

SEQ ID NO: 3007981 - RNA, 12 nt, Human
uaauaaaaaggu

SEQ ID NO: 3007982 - RNA, 15 nt, Human
uaauaaaaaggugac

SEQ ID NO: 3007983 - RNA, 14 nt, Human
uaauaaaaagguga

SEQ ID NO: 3007984 - RNA, 23 nt, Human
aauauuuugacuuguugagggua

SEQ ID NO: 3007985 - RNA, 22 nt, Human
aaugcuugcugcugauuuaaac

SEQ ID NO: 3007986 - RNA, 23 nt, Human
aaugcuugcugcugauuuaaaca

SEQ ID NO: 3007987 - RNA, 18 nt, Human
aaugcuugcugcugauuu

SEQ ID NO: 3007988 - RNA, 20 nt, Human
aaugcuugcugcugauuuaa

SEQ ID NO: 3007989 - RNA, 22 nt, Human
aauguucacugguacucugcca

SEQ ID NO: 3007990 - RNA, 16 nt, Human
uacauuagguugugaa

SEQ ID NO: 3007991 - RNA, 17 nt, Human
uacauuagguugugaau

SEQ ID NO: 3007992 - RNA, 23 nt, Human
uauauagcaguaaaaaauggugu

SEQ ID NO: 3007993 - RNA, 10 nt, Human
uauagauguu

SEQ ID NO: 3007994 - RNA, 21 nt, Human
uauagauguugcuaacagcaa

SEQ ID NO: 3007995 - RNA, 15 nt, Human
uauagauguugcuaa

SEQ ID NO: 3007996 - RNA, 20 nt, Human
uauagauguugcuaacagca

SEQ ID NO: 3007997 - RNA, 18 nt, Human
uauagcaguaaaaaaugg

SEQ ID NO: 3007998 - RNA, 15 nt, Human
uauauagcaguaaaa

SEQ ID NO: 3007999 - RNA, 20 nt, Human
uauauagcaagacauuauau

SEQ ID NO: 3008000 - RNA, 16 nt, Human
uauauagcaguaaaaa

SEQ ID NO: 3008001 - RNA, 18 nt, Human
uauauagcaagacauuau

SEQ ID NO: 3008002 - RNA, 15 nt, Human
uauccaauugcugcu

SEQ ID NO: 3008003 - RNA, 23 nt, Human
uauccaauugcugcuuguacacu

SEQ ID NO: 3008004 - RNA, 14 nt, Human
uauccaaucuguga

SEQ ID NO: 3008005 - RNA, 16 nt, Human
acacucauucauuacu

SEQ ID NO: 3008006 - RNA, 20 nt, Human
uaugugcacaucuguuuugu

SEQ ID NO: 3008007 - RNA, 18 nt, Human
uagagguacacuugugaa

SEQ ID NO: 3008008 - RNA, 13 nt, Human
uagagguacacuu

SEQ ID NO: 3008009 - RNA, 22 nt, Human
uaggggucugucuuuuaaacuc

SEQ ID NO: 3008010 - RNA, 20 nt, Human
acacaaagcuuuugcauauu

SEQ ID NO: 3008011 - RNA, 18 nt, Human
acacaaagcuuuugcaua

SEQ ID NO: 3008012 - RNA, 19 nt, Human
acacaaagcuuuugcauau

SEQ ID NO: 3008013 - RNA, 15 nt, Human
acucuucccucaaau

SEQ ID NO: 3008014 - RNA, 20 nt, Human
accugcacacuguccuauua

SEQ ID NO: 3008015 - RNA, 17 nt, Human
acgcccuuggccauggg

SEQ ID NO: 3008016 - RNA, 14 nt, Human
uauuuugacuuguu

SEQ ID NO: 3008017 - RNA, 20 nt, Human
uauuuugacuuguugagggu

SEQ ID NO: 3008018 - RNA, 22 nt, Human
ucacagcuuauuuccucauuuu

SEQ ID NO: 3008019 - RNA, 16 nt, Human
ucaauugugaaaaaau

SEQ ID NO: 3008020 - RNA, 20 nt, Human
ucaauugugaaaaaauuuac

SEQ ID NO: 3008021 - RNA, 14 nt, Human
ucacagaagaugaa

SEQ ID NO: 3008022 - RNA, 15 nt, Human
acauuuuaugucuuu

SEQ ID NO: 3008023 - RNA, 13 nt, Human
acauuuuaugucu

SEQ ID NO: 3008024 - RNA, 13 nt, Human
ucagcccucagaa

SEQ ID NO: 3008025 - RNA, 12 nt, Human
ucagcccucaga

SEQ ID NO: 3008026 - RNA, 15 nt, Human
ucaguuugcagagua

SEQ ID NO: 3008027 - RNA, 16 nt, Human
ucaguuugcagaguag

SEQ ID NO: 3008028 - RNA, 12 nt, Human
ucaguuugguug

SEQ ID NO: 3008029 - RNA, 16 nt, Human
ucaguuuaucuguuca

SEQ ID NO: 3008030 - RNA, 14 nt, Human
ucaguuuaucuguu

SEQ ID NO: 3008031 - RNA, 20 nt, Human
ucaguuguuauuuauugaaa

SEQ ID NO: 3008032 - RNA, 15 nt, Human
ucaguuguuauuuau

SEQ ID NO: 3008033 - RNA, 13 nt, Human
ucaguagucagac

SEQ ID NO: 3008034 - RNA, 18 nt, Human
acuguccuauuauauuca

SEQ ID NO: 3008035 - RNA, 16 nt, Human
acuguccuauuauauu

SEQ ID NO: 3008036 - RNA, 15 nt, Human
acuguccuauuauau

SEQ ID NO: 3008037 - RNA, 12 nt, Human
ucuagcaugaag

SEQ ID NO: 3008038 - RNA, 17 nt, Human
agaacuauguuuuuguu

SEQ ID NO: 3008039 - RNA, 16 nt, Human
agaauaaaccaagaau

SEQ ID NO: 3008040 - RNA, 16 nt, Human
ucuggauucauauuua

SEQ ID NO: 3008041 - RNA, 19 nt, Human
ucuggauucauauuuaauu

SEQ ID NO: 3008042 - RNA, 19 nt, Human
ugaagguagaauguuuuca

SEQ ID NO: 3008043 - RNA, 18 nt, Human
ugaagguagaauguuuuc

SEQ ID NO: 3008044 - RNA, 14 nt, Human
ugaauuugccuaau

SEQ ID NO: 3008045 - RNA, 14 nt, Human
agcaagacauuaua

SEQ ID NO: 3008046 - RNA, 12 nt, Human
agauguugcuaa

SEQ ID NO: 3008047 - RNA, 23 nt, Human
ugacuauuuuuguuuuuauuaaa

SEQ ID NO: 3008048 - RNA, 23 nt, Human
agagcaguuugguuucuagcaug

SEQ ID NO: 3008049 - RNA, 21 nt, Human
agagcaguuugguuucuagca

SEQ ID NO: 3008050 - RNA, 11 nt, Human
ucuuuuaaacu

SEQ ID NO: 3008051 - RNA, 12 nt, Human
ucuuuuaaacuc

SEQ ID NO: 3008052 - RNA, 21 nt, Human
ugaaaaaauuuacuuuaaacu

SEQ ID NO: 3008053 - RNA, 23 nt, Human
agcauguccuaaugcuugcugcu

SEQ ID NO: 3008054 - RNA, 14 nt, Human
ugcacacuguccua

SEQ ID NO: 3008055 - RNA, 14 nt, Human
ugcaguacuaacau

SEQ ID NO: 3008056 - RNA, 17 nt, Human
ugccaauuugcacauua

SEQ ID NO: 3008057 - RNA, 21 nt, Human
ugccaauuugcacauuaaaug

SEQ ID NO: 3008058 - RNA, 15 nt, Human
ugccaauuugcacau

SEQ ID NO: 3008059 - RNA, 13 nt, Human
ugccaauuugcac

SEQ ID NO: 3008060 - RNA, 14 nt, Human
ugccaauauccuaa

SEQ ID NO: 3008061 - RNA, 19 nt, Human
ugcuuguacacucauucau

SEQ ID NO: 3008062 - RNA, 22 nt, Human
ugcuuguacacucauucauuac

SEQ ID NO: 3008063 - RNA, 16 nt, Human
ugcuuguacacucauu

SEQ ID NO: 3008064 - RNA, 18 nt, Human
ugcuugcugcugauuuaa

SEQ ID NO: 3008065 - RNA, 15 nt, Human
aggauacuuauuuaa

SEQ ID NO: 3008066 - RNA, 16 nt, Human
aggauacuuauuuaaa

SEQ ID NO: 3008067 - RNA, 13 nt, Human
aggauacuuauuu

SEQ ID NO: 3008068 - RNA, 16 nt, Human
uggcaucuuacaucug

SEQ ID NO: 3008069 - RNA, 15 nt, Human
aggaaugcaaagaug

SEQ ID NO: 3008070 - RNA, 17 nt, Human
aggaaugcaaagaugaa

SEQ ID NO: 3008071 - RNA, 18 nt, Human
uguacuuuuaagacuuug

SEQ ID NO: 3008072 - RNA, 15 nt, Human
uguacuuuuaagacu

SEQ ID NO: 3008073 - RNA, 14 nt, Human
aguagagguacacu

SEQ ID NO: 3008074 - RNA, 22 nt, Human
aguagagguacacuugugaaua

SEQ ID NO: 3008075 - RNA, 20 nt, Human
aguagagguacacuugugaa

SEQ ID NO: 3008076 - RNA, 21 nt, Human
aguagagguacacuugugaau

SEQ ID NO: 3008077 - RNA, 23 nt, Human
uguaauuaugguuaguagaggua

SEQ ID NO: 3008078 - RNA, 22 nt, Human
uguccuaaugcuugcugcugau

SEQ ID NO: 3008079 - RNA, 23 nt, Human
agucagacuggauaguccgucuc

SEQ ID NO: 3008080 - RNA, 13 nt, Human
aguagucagacug

SEQ ID NO: 3008081 - RNA, 15 nt, Human
ugucaguauuucaac

SEQ ID NO: 3008082 - RNA, 20 nt, Human
ugggcacaucauuucaagaa

SEQ ID NO: 3008083 - RNA, 15 nt, Human
ugggcacaucauuuc

SEQ ID NO: 3008084 - RNA, 17 nt, Human
agguagaauguuuucaa

SEQ ID NO: 3008085 - RNA, 22 nt, Human
agugcuuuaccaauugaaguaa

SEQ ID NO: 3008086 - RNA, 20 nt, Human
agugcuuggcccaggaguuu

SEQ ID NO: 3008087 - RNA, 13 nt, Human
uguuaauauuuua

SEQ ID NO: 3008088 - RNA, 19 nt, Human
agugcuuggcccaggaguu

SEQ ID NO: 3008089 - RNA, 18 nt, Human
agugcuuggcccaggagu

SEQ ID NO: 3008090 - RNA, 16 nt, Human
agugcuuggcccagga

SEQ ID NO: 3008091 - RNA, 15 nt, Human
agugcuuggcccagg

SEQ ID NO: 3008092 - RNA, 14 nt, Human
agugcuuggcccag

SEQ ID NO: 3008093 - RNA, 12 nt, Human
agugcuuggccc

SEQ ID NO: 3008094 - RNA, 16 nt, Human
aguuacugaacaguaa

SEQ ID NO: 3008095 - RNA, 15 nt, Human
aguggaguuacugaa

SEQ ID NO: 3008096 - RNA, 19 nt, Human
uguuauuuauugaaaugau

SEQ ID NO: 3008097 - RNA, 18 nt, Human
uguuauuuauugaaauga

SEQ ID NO: 3008098 - RNA, 17 nt, Human
uguuauuuauugaaaug

SEQ ID NO: 3008099 - RNA, 15 nt, Human
uguuauuuauugaaa

SEQ ID NO: 3008100 - RNA, 13 nt, Human
uguuauuuauuga

SEQ ID NO: 3008101 - RNA, 24 nt, Human
aguucaaucuggauucauauuuaa

SEQ ID NO: 3008102 - RNA, 23 nt, Human
aguucuauuuauuugugagacug

SEQ ID NO: 3008103 - RNA, 20 nt, Human
uguuuagaugaaugucaguu

SEQ ID NO: 3008104 - RNA, 15 nt, Human
uguuuagaugaaugu

SEQ ID NO: 3008105 - RNA, 12 nt, Human
uuagguugugaa

SEQ ID NO: 3008106 - RNA, 13 nt, Human
uuagguugugaau

SEQ ID NO: 3008107 - RNA, 17 nt, Human
uuagguugugaaugcag

SEQ ID NO: 3008108 - RNA, 23 nt, Human
uuacugaacaguaacauagcugu

SEQ ID NO: 3008109 - RNA, 15 nt, Human
uuacugaacaguaac

SEQ ID NO: 3008110 - RNA, 23 nt, Human
auaaauauugguugggaugacuu

SEQ ID NO: 3008111 - RNA, 16 nt, Human
uuaaauagaugacauu

SEQ ID NO: 3008112 - RNA, 14 nt, Human
uuaaauagaugaca

SEQ ID NO: 3008113 - RNA, 13 nt, Human
uuaaauagaugac

SEQ ID NO: 3008114 - RNA, 21 nt, Human
uuaaacaugcuguacauacuu

SEQ ID NO: 3008115 - RNA, 22 nt, Human
uuaaacaugcuguacauacuuu

SEQ ID NO: 3008116 - RNA, 23 nt, Human
uuaaacaugcuguacauacuuuu

SEQ ID NO: 3008117 - RNA, 19 nt, Human
uuaaacaugcuguacauac

SEQ ID NO: 3008118 - RNA, 14 nt, Human
uuaaacacauuaaa

SEQ ID NO: 3008119 - RNA, 13 nt, Human
uuaaggguaugau

SEQ ID NO: 3008120 - RNA, 19 nt, Human
uuaagaacuaaaauguucu

SEQ ID NO: 3008121 - RNA, 16 nt, Human
uuaagaacuaaaaugu

SEQ ID NO: 3008122 - RNA, 20 nt, Human
uuaagaacuaaaauguucua

SEQ ID NO: 3008123 - RNA, 18 nt, Human
aguuuugaagauucuaug

SEQ ID NO: 3008124 - RNA, 17 nt, Human
aguuuugaagauucuau

SEQ ID NO: 3008125 - RNA, 19 nt, Human
uuuucucacagaagaugaa

SEQ ID NO: 3008126 - RNA, 13 nt, Human
auuaaagugccca

SEQ ID NO: 3008127 - RNA, 23 nt, Human
uuuuccaguaaugagcuuaagaa

SEQ ID NO: 3008128 - RNA, 15 nt, Human
uuuuauuauuaacaa

SEQ ID NO: 3008129 - RNA, 22 nt, Human
uuuguaacuguuuagaugaaug

SEQ ID NO: 3008130 - RNA, 22 nt, Human
uuuuaagggcccuuuuucaaua

SEQ ID NO: 3008131 - RNA, 17 nt, Human
uuuuaagacuuugguua

SEQ ID NO: 3008132 - RNA, 17 nt, Human
augucaguuguuauuua

SEQ ID NO: 3008133 - RNA, 15 nt, Human
augucaguuguuauu

SEQ ID NO: 3008134 - RNA, 23 nt, Human
augucuagaccaggaccucccuc

SEQ ID NO: 3008135 - RNA, 14 nt, Human
uuuggccagaaguc

SEQ ID NO: 3008136 - RNA, 12 nt, Human
uuuggccagaag

SEQ ID NO: 3008137 - RNA, 10 nt, Human
uuuggccaga

SEQ ID NO: 3008138 - RNA, 13 nt, Human
uuugcacauuaaa

SEQ ID NO: 3008139 - RNA, 16 nt, Human
uuugcacauuaaauga

SEQ ID NO: 3008140 - RNA, 12 nt, Human
uuugcacauuaa

SEQ ID NO: 3008141 - RNA, 11 nt, Human
auuauuaacaa

SEQ ID NO: 3008142 - RNA, 17 nt, Human
auuuaaacacauuaaag

SEQ ID NO: 3008143 - RNA, 18 nt, Human
auuuaaacacauuaaagg

SEQ ID NO: 3008144 - RNA, 16 nt, Human
auucucagcagagugc

SEQ ID NO: 3008145 - RNA, 16 nt, Human
auugacagauugaauu

SEQ ID NO: 3008146 - RNA, 15 nt, Human
auucucagcagagug

SEQ ID NO: 3008147 - RNA, 14 nt, Human
auucucagcagagu

SEQ ID NO: 3008148 - RNA, 23 nt, Human
uucaagaaugcaguacuaacauu

SEQ ID NO: 3008149 - RNA, 23 nt, Human
uucaagaaguccccucuccucca

SEQ ID NO: 3008150 - RNA, 13 nt, Human
uucauauuuaauu

SEQ ID NO: 3008151 - RNA, 16 nt, Human
auaugaugacuguuuu

SEQ ID NO: 3008152 - RNA, 14 nt, Human
uuccuucaagaaug

SEQ ID NO: 3008153 - RNA, 21 nt, Human
uuccuucaagaaugcaguacu

SEQ ID NO: 3008154 - RNA, 22 nt, Human
uucuaaauaucccuuggacauu

SEQ ID NO: 3008155 - RNA, 13 nt, Human
uucucagcagagu

SEQ ID NO: 3008156 - RNA, 15 nt, Human
uucuuggcccaggau

SEQ ID NO: 3008157 - RNA, 12 nt, Human
auccuaauaaaa

SEQ ID NO: 3008158 - RNA, 17 nt, Human
auccuaauaaaaaggug

SEQ ID NO: 3008159 - RNA, 16 nt, Human
auccuaauaaaaaggu

SEQ ID NO: 3008160 - RNA, 15 nt, Human
auccuaauaaaaagg

SEQ ID NO: 3008161 - RNA, 14 nt, Human
auccuaauaaaaag

SEQ ID NO: 3008162 - RNA, 22 nt, Human
auccuaauaaaaaggugaccau

SEQ ID NO: 3008163 - RNA, 18 nt, Human
auccuaauaaaaagguga

SEQ ID NO: 3008164 - RNA, 20 nt, Human
auccuagucauucuucccua

SEQ ID NO: 3008165 - RNA, 15 nt, Human
uucuuuuugaaaugu

SEQ ID NO: 3008166 - RNA, 14 nt, Human
uucuuuuugaaaug

SEQ ID NO: 3008167 - RNA, 14 nt, Human
uugaaaugauuuca

SEQ ID NO: 3008168 - RNA, 13 nt, Human
aucauuucaagaa

SEQ ID NO: 3008169 - RNA, 13 nt, Human
augauuucacagu

SEQ ID NO: 3008170 - RNA, 22 nt, Human
uuuaauuugaagguagaauguu

SEQ ID NO: 3008171 - RNA, 13 nt, Human
augcagguuuuau

SEQ ID NO: 3008172 - RNA, 18 nt, Human
augcaguacuaacauuua

SEQ ID NO: 3008173 - RNA, 12 nt, Human
augcuguacaua

SEQ ID NO: 3008174 - RNA, 15 nt, Human
augcuguacauacuu

SEQ ID NO: 3008175 - RNA, 16 nt, Human
augcuguacauacuuu

SEQ ID NO: 3008176 - RNA, 18 nt, Human
augcuguacauacuuuuu

SEQ ID NO: 3008177 - RNA, 18 nt, Human
uuuagaugaaugucaguu

SEQ ID NO: 3008178 - RNA, 17 nt, Human
uuuagaugaaugucagu

SEQ ID NO: 3008179 - RNA, 22 nt, Human
uuuagaugaaugucaguuguua

SEQ ID NO: 3008180 - RNA, 12 nt, Human
aucuguuacaca

SEQ ID NO: 3008181 - RNA, 20 nt, Human
uugccuaauaugaugacugu

SEQ ID NO: 3008182 - RNA, 23 nt, Human
uugcacauuaaaugacucuuccc

SEQ ID NO: 3008183 - RNA, 11 nt, Human
uugcacauuaa

SEQ ID NO: 3008184 - RNA, 14 nt, Human
augacauucccugc

SEQ ID NO: 3008185 - RNA, 16 nt, Human
augacauugacuauuu

SEQ ID NO: 3008186 - RNA, 19 nt, Human
augacauugacuauuuuug

SEQ ID NO: 3008187 - RNA, 18 nt, Human
augacuuggugucuaaug

SEQ ID NO: 3008188 - RNA, 23 nt, Human
augacuuggugucuaauguguag

SEQ ID NO: 3008189 - RNA, 18 nt, Human
uugguucuggacuaaaac

SEQ ID NO: 3008190 - RNA, 20 nt, Human
uugguucuggacuaaaacua

SEQ ID NO: 3008191 - RNA, 17 nt, Human
uugguugggaugacuug

SEQ ID NO: 3008192 - RNA, 21 nt, Human
uugguugguaacucuguaauu

SEQ ID NO: 3008193 - RNA, 21 nt, Human
augaaugcccagugagacugu

SEQ ID NO: 3008194 - RNA, 13 nt, Human
augaaugcccagu

SEQ ID NO: 3008195 - RNA, 11 nt, Human
aguuuggccag

SEQ ID NO: 3008196 - RNA, 19 nt, Human
auagcauguccuaaugcuu

SEQ ID NO: 3008197 - RNA, 16 nt, Human
auagcauguccuaaug

SEQ ID NO: 3008198 - RNA, 22 nt, Human
auagcagcccucaauugugaaa

SEQ ID NO: 3008199 - RNA, 21 nt, Human
auagcagcccucaauugugaa

SEQ ID NO: 3008200 - RNA, 17 nt, Human
auauucauucuuuuuga

SEQ ID NO: 3008201 - RNA, 16 nt, Human
aguacuaacauuuauu

SEQ ID NO: 3008202 - RNA, 15 nt, Human
augguaguuuuacag

SEQ ID NO: 3008203 - RNA, 22 nt, Human
augguaguuuuacaguguuucu

SEQ ID NO: 3008204 - RNA, 21 nt, Human
augguaguuuuacaguguuuc

SEQ ID NO: 3008205 - RNA, 18 nt, Human
auggauaaauauugguug

SEQ ID NO: 3008206 - RNA, 21 nt, Human
aucgcuccaccuugcagcucu

SEQ ID NO: 3008207 - RNA, 17 nt, Human
aucgcuccaccuugcag

SEQ ID NO: 3008208 - RNA, 14 nt, Human
augacuguuuuuaa

SEQ ID NO: 3008209 - RNA, 20 nt, Human
agcuuauuuccucauuuuua

SEQ ID NO: 3008210 - RNA, 22 nt, Human
agggauuuucagcccucagaau

SEQ ID NO: 3008211 - RNA, 17 nt, Human
agggauuuucagcccuc

SEQ ID NO: 3008212 - RNA, 23 nt, Human
aggcuuagacccucaugcugcca

SEQ ID NO: 3008213 - RNA, 24 nt, Human
aggcuuagacccucaugcugccaa

SEQ ID NO: 3008214 - RNA, 21 nt, Human
agaagucuucuauuuauuuau

SEQ ID NO: 3008215 - RNA, 16 nt, Human
agacuggauaguccgu

SEQ ID NO: 3008216 - RNA, 21 nt, Human
agauucuauguuaauauuuua

SEQ ID NO: 3008217 - RNA, 22 nt, Human
agauucuuguauuuauuacaac

SEQ ID NO: 3008218 - RNA, 14 nt, Human
agaugaaggucugu

SEQ ID NO: 3008219 - RNA, 17 nt, Human
agaugaaggucuguuuu

SEQ ID NO: 3008220 - RNA, 15 nt, Human
aagggauuuucagcc

SEQ ID NO: 3008221 - RNA, 23 nt, Human
aagggauuuucagcccucagaau

SEQ ID NO: 3008222 - RNA, 21 nt, Human
aagggauuuucagcccucaga

SEQ ID NO: 3008223 - RNA, 19 nt, Human
aaggucuguuuuguguacu

SEQ ID NO: 3008224 - RNA, 20 nt, Human
aaggucuguuuuguguacuu

SEQ ID NO: 3008225 - RNA, 23 nt, Human
aaggucuguuuuguguacuuuua

SEQ ID NO: 3008226 - RNA, 15 nt, Human
aaggaaugcaaagau

SEQ ID NO: 3008227 - RNA, 16 nt, Human
aaggaaugcaaagaug

SEQ ID NO: 3008228 - RNA, 13 nt, Human
aacuguuuagaug

SEQ ID NO: 3008229 - RNA, 17 nt, Human
aagacuuugguuauuuu

SEQ ID NO: 3008230 - RNA, 23 nt, Human
aagacuuugguuauuuuacuuuu

SEQ ID NO: 3008231 - RNA, 13 nt, Human
aagacuuugguua

SEQ ID NO: 3008232 - RNA, 15 nt, Human
aagacuuugguuauu

SEQ ID NO: 3008233 - RNA, 22 nt, Human
aagauucuauguuaauauuuua

SEQ ID NO: 3008234 - RNA, 21 nt, Human
aagauucuauguuaauauuuu

SEQ ID NO: 3008235 - RNA, 19 nt, Human
aagauucuauguuaauauu

SEQ ID NO: 3008236 - RNA, 20 nt, Human
aagcagaguggcagucuuca

SEQ ID NO: 3008237 - RNA, 11 nt, Human
aagcagagugg

SEQ ID NO: 3008238 - RNA, 14 nt, Human
aagcagaguggcag

SEQ ID NO: 3008239 - RNA, 10 nt, Human
aagcagagug

SEQ ID NO: 3008240 - RNA, 17 nt, Human
aauaaaauuuuaguuga

SEQ ID NO: 3008241 - RNA, 13 nt, Human
aauauaaaaauaa

SEQ ID NO: 3008242 - RNA, 18 nt, Human
aacugaaguucuauuuau

SEQ ID NO: 3008243 - RNA, 21 nt, Human
aacaugcuguacauacuuuuu

SEQ ID NO: 3008244 - RNA, 18 nt, Human
aacaugcuguacauacuu

SEQ ID NO: 3008245 - RNA, 19 nt, Human
aacaugcuguacauacuuu

SEQ ID NO: 3008246 - RNA, 20 nt, Human
aacaugcuguacauacuuuu

SEQ ID NO: 3008247 - RNA, 17 nt, Human
aacagcaacacaaagcu

SEQ ID NO: 3008248 - RNA, 18 nt, Human
aacagcaacacaaagcuu

SEQ ID NO: 3008249 - RNA, 12 nt, Human
aaagugcccagc

SEQ ID NO: 3008250 - RNA, 14 nt, Human
acaugccuaccaau

SEQ ID NO: 3008251 - RNA, 18 nt, Human
acaugccuaccaauauuu

SEQ ID NO: 3008252 - RNA, 19 nt, Human
acaugccuaccaauauuua

SEQ ID NO: 3008253 - RNA, 17 nt, Human
acauuucucauguugaa

SEQ ID NO: 3008254 - RNA, 17 nt, Human
accaagaauugauuggg

SEQ ID NO: 3008255 - RNA, 22 nt, Human
caauauccuaauaaaaagguga

SEQ ID NO: 3008256 - RNA, 16 nt, Human
cacaaagcuuuugcau

SEQ ID NO: 3008257 - RNA, 13 nt, Human
cacaaagcuuuug

SEQ ID NO: 3008258 - RNA, 18 nt, Human
caauaacuggaacacucu

SEQ ID NO: 3008259 - RNA, 21 nt, Human
caauauccuaauaaaaaggug

SEQ ID NO: 3008260 - RNA, 22 nt, Human
caaggcuuagacccucaugcug

SEQ ID NO: 3008261 - RNA, 19 nt, Human
caaggcuuagacccucaug

SEQ ID NO: 3008262 - RNA, 23 nt, Human
cacaguguguggucaacauuucu

SEQ ID NO: 3008263 - RNA, 21 nt, Human
caguguguggucaacauuucu

SEQ ID NO: 3008264 - RNA, 17 nt, Human
caguguguggucaacau

SEQ ID NO: 3008265 - RNA, 20 nt, Human
cagugcuuggcccaggaguu

SEQ ID NO: 3008266 - RNA, 19 nt, Human
cagugcuuggcccaggagu

SEQ ID NO: 3008267 - RNA, 18 nt, Human
cagugcuuggcccaggag

SEQ ID NO: 3008268 - RNA, 17 nt, Human
cagugcuuggcccagga

SEQ ID NO: 3008269 - RNA, 12 nt, Human
cagugcuuggcc

SEQ ID NO: 3008270 - RNA, 16 nt, Human
cagugcuuggcccagg

SEQ ID NO: 3008271 - RNA, 15 nt, Human
cagugcuuggcccag

SEQ ID NO: 3008272 - RNA, 14 nt, Human
cagugcuuggccca

SEQ ID NO: 3008273 - RNA, 13 nt, Human
cagugcuuggccc

SEQ ID NO: 3008274 - RNA, 16 nt, Human
caguguuuuaggagca

SEQ ID NO: 3008275 - RNA, 20 nt, Human
caguguuuuaggagcaugag

SEQ ID NO: 3008276 - RNA, 18 nt, Human
cauaagugcuauugcaga

SEQ ID NO: 3008277 - RNA, 22 nt, Human
cauaagugcuauugcagagccg

SEQ ID NO: 3008278 - RNA, 19 nt, Human
caguuuuuuuccuucaaga

SEQ ID NO: 3008279 - RNA, 11 nt, Human
caguuggguuu

SEQ ID NO: 3008280 - RNA, 16 nt, Human
caguuggguuuuuuaa

SEQ ID NO: 3008281 - RNA, 18 nt, Human
caguuggguuuuuuaagg

SEQ ID NO: 3008282 - RNA, 14 nt, Human
cauacuauuaaaca

SEQ ID NO: 3008283 - RNA, 12 nt, Human
caucauuucaag

SEQ ID NO: 3008284 - RNA, 14 nt, Human
caucauuucaagaa

SEQ ID NO: 3008285 - RNA, 18 nt, Human
cauacuauuaaacaugcu

SEQ ID NO: 3008286 - RNA, 12 nt, Human
cauacuuuuugg

SEQ ID NO: 3008287 - RNA, 16 nt, Human
cauacuuuuuggguuu

SEQ ID NO: 3008288 - RNA, 18 nt, Human
cauacuuuuuggguuuau

SEQ ID NO: 3008289 - RNA, 17 nt, Human
caugccuaccaauauuu

SEQ ID NO: 3008290 - RNA, 13 nt, Human
cauuaaaugacuc

SEQ ID NO: 3008291 - RNA, 14 nt, Human
cauuaaaugacucu

SEQ ID NO: 3008292 - RNA, 18 nt, Human
cauuaaaugacucuuccc

SEQ ID NO: 3008293 - RNA, 17 nt, Human
cauuaaagguacuuugc

SEQ ID NO: 3008294 - RNA, 19 nt, Human
ccaauuugcacauuaaaug

SEQ ID NO: 3008295 - RNA, 20 nt, Human
ccaauuugcacauuaaauga

SEQ ID NO: 3008296 - RNA, 17 nt, Human
cauuucucauguugaaa

SEQ ID NO: 3008297 - RNA, 16 nt, Human
cauuucucauguugaa

SEQ ID NO: 3008298 - RNA, 14 nt, Human
cauugacagauuga

SEQ ID NO: 3008299 - RNA, 22 nt, Human
cauugacuauuuuuguuuuuau

SEQ ID NO: 3008300 - RNA, 17 nt, Human
cccaguguuuuaggagc

SEQ ID NO: 3008301 - RNA, 16 nt, Human
cccaguguuuuaggag

SEQ ID NO: 3008302 - RNA, 14 nt, Human
cccuuggacauuuu

SEQ ID NO: 3008303 - RNA, 15 nt, Human
cccuuggacauuuua

SEQ ID NO: 3008304 - RNA, 20 nt, Human
ccucagaugcacaugagcug

SEQ ID NO: 3008305 - RNA, 14 nt, Human
ccucuccuccacau

SEQ ID NO: 3008306 - RNA, 16 nt, Human
ccucccccuggcacug

SEQ ID NO: 3008307 - RNA, 17 nt, Human
cccucaugcugccaaua

SEQ ID NO: 3008308 - RNA, 14 nt, Human
cccucaugcugcca

SEQ ID NO: 3008309 - RNA, 18 nt, Human
cuacacaccuaacuuaug

SEQ ID NO: 3008310 - RNA, 13 nt, Human
cuaaaauguucua

SEQ ID NO: 3008311 - RNA, 18 nt, Human
cgugcacgcacacugucu

SEQ ID NO: 3008312 - RNA, 22 nt, Human
cgccagcucaccccaucauccc

SEQ ID NO: 3008313 - RNA, 13 nt, Human
cuccuccacauuu

SEQ ID NO: 3008314 - RNA, 16 nt, Human
cugaaauaaggaauga

SEQ ID NO: 3008315 - RNA, 23 nt, Human
cugcaguuuuuuuccuucaagaa

SEQ ID NO: 3008316 - RNA, 22 nt, Human
cugcaguuuuuuuccuucaaga

SEQ ID NO: 3008317 - RNA, 20 nt, Human
cugcaguuuuuuuccuucaa

SEQ ID NO: 3008318 - RNA, 20 nt, Human
cugggaaagggauuuucagc

SEQ ID NO: 3008319 - RNA, 21 nt, Human
cuguccuauuauauucauucu

SEQ ID NO: 3008320 - RNA, 15 nt, Human
cuguccuauuauauu

SEQ ID NO: 3008321 - RNA, 20 nt, Human
cugucuccucucucuguaau

SEQ ID NO: 3008322 - RNA, 17 nt, Human
cugucuccucucucugu

SEQ ID NO: 3008323 - RNA, 15 nt, Human
cuguacauacuuuuu

SEQ ID NO: 3008324 - RNA, 16 nt, Human
cuguacauacuuuuug

SEQ ID NO: 3008325 - RNA, 21 nt, Human
cuguaaguuacaugaaggcag

SEQ ID NO: 3008326 - RNA, 21 nt, Human
cugguacucugccacuuuauu

SEQ ID NO: 3008327 - RNA, 20 nt, Human
gaagauucuuguauuuauua

SEQ ID NO: 3008328 - RNA, 14 nt, Human
gaaggaugcugucu

SEQ ID NO: 3008329 - RNA, 20 nt, Human
gaagguagaauguuuucaaa

SEQ ID NO: 3008330 - RNA, 19 nt, Human
gaaggucuguuuuguguac

SEQ ID NO: 3008331 - RNA, 18 nt, Human
gaagucaaggcuuagacc

SEQ ID NO: 3008332 - RNA, 23 nt, Human
gaaguccccucuccuccacauuu

SEQ ID NO: 3008333 - RNA, 18 nt, Human
gaaguccccucuccucca

SEQ ID NO: 3008334 - RNA, 15 nt, Human
gaacacucuauaaca

SEQ ID NO: 3008335 - RNA, 21 nt, Human
gaacacucuauaacaaaggau

SEQ ID NO: 3008336 - RNA, 22 nt, Human
gaacaguaacauagcugugauu

SEQ ID NO: 3008337 - RNA, 16 nt, Human
gaaacugacacaugcu

SEQ ID NO: 3008338 - RNA, 20 nt, Human
gaaaggaaugcaaagaugaa

SEQ ID NO: 3008339 - RNA, 12 nt, Human
cuuuuuauaacu

SEQ ID NO: 3008340 - RNA, 18 nt, Human
cuuuuuauauucucagca

SEQ ID NO: 3008341 - RNA, 16 nt, Human
cuuuuuauaacuuuuu

SEQ ID NO: 3008342 - RNA, 22 nt, Human
cuuuuuauauucucagcagagu

SEQ ID NO: 3008343 - RNA, 15 nt, Human
cuuuugcauauugca

SEQ ID NO: 3008344 - RNA, 17 nt, Human
cuuuuaagacuuugguu

SEQ ID NO: 3008345 - RNA, 11 nt, Human
cuuuuaaacuc

SEQ ID NO: 3008346 - RNA, 12 nt, Human
cuuucccuuggu

SEQ ID NO: 3008347 - RNA, 17 nt, Human
cuuucccuuggugcccu

SEQ ID NO: 3008348 - RNA, 22 nt, Human
cuugagugucaagcugaccuug

SEQ ID NO: 3008349 - RNA, 16 nt, Human
cuugagugcucaguag

SEQ ID NO: 3008350 - RNA, 19 nt, Human
cuuggacauuuuaugucuu

SEQ ID NO: 3008351 - RNA, 16 nt, Human
cuuggacauuuuaugu

SEQ ID NO: 3008352 - RNA, 18 nt, Human
cuuggacauuuuaugucu

SEQ ID NO: 3008353 - RNA, 17 nt, Human
cuuggacauuuuauguc

SEQ ID NO: 3008354 - RNA, 19 nt, Human
cuugcugcugauuuaaaca

SEQ ID NO: 3008355 - RNA, 17 nt, Human
cuugcugcugauuuaaa

SEQ ID NO: 3008356 - RNA, 17 nt, Human
gaagucuucuauuuauu

SEQ ID NO: 3008357 - RNA, 13 nt, Human
gaagucuucuauu

SEQ ID NO: 3008358 - RNA, 18 nt, Human
gaugaaggucuguuuugu

SEQ ID NO: 3008359 - RNA, 15 nt, Human
gaugaaggucuguuu

SEQ ID NO: 3008360 - RNA, 17 nt, Human
gaugacauucccugcua

SEQ ID NO: 3008361 - RNA, 17 nt, Human
gaugacauugacuauuu

SEQ ID NO: 3008362 - RNA, 21 nt, Human
gaugacauugacuauuuuugu

SEQ ID NO: 3008363 - RNA, 23 nt, Human
gaugacauugacuauuuuuguuu

SEQ ID NO: 3008364 - RNA, 15 nt, Human
gaugacauucccugc

SEQ ID NO: 3008365 - RNA, 19 nt, Human
gauuuucagcccucagaau

SEQ ID NO: 3008366 - RNA, 15 nt, Human
gauuuucagcccuca

SEQ ID NO: 3008367 - RNA, 11 nt, Human
gauuuucagcc

SEQ ID NO: 3008368 - RNA, 12 nt, Human
gauucauauuua

SEQ ID NO: 3008369 - RNA, 20 nt, Human
gcagugcuuggcccaggagu

SEQ ID NO: 3008370 - RNA, 19 nt, Human
gcagugcuuggcccaggag

SEQ ID NO: 3008371 - RNA, 18 nt, Human
gcagugcuuggcccagga

SEQ ID NO: 3008372 - RNA, 17 nt, Human
gcagugcuuggcccagg

SEQ ID NO: 3008373 - RNA, 19 nt, Human
gcacugguuuguucccugu

SEQ ID NO: 3008374 - RNA, 17 nt, Human
gcacugguuuguucccu

SEQ ID NO: 3008375 - RNA, 19 nt, Human
gcagcccucaauugugaaa

SEQ ID NO: 3008376 - RNA, 13 nt, Human
gcuacacaccuaa

SEQ ID NO: 3008377 - RNA, 16 nt, Human
gcccuuggccaugggu

SEQ ID NO: 3008378 - RNA, 18 nt, Human
gcccuuuuucaauaacug

SEQ ID NO: 3008379 - RNA, 23 nt, Human
gccguggugauuuagcaggaagc

SEQ ID NO: 3008380 - RNA, 22 nt, Human
gccgugugugugcguccugucg

SEQ ID NO: 3008381 - RNA, 19 nt, Human
uuuuaauauggaucuguau

SEQ ID NO: 3008382 - RNA, 12 nt, Human
uuuguucccugu

SEQ ID NO: 3008383 - RNA, 13 nt, Human
uuugguuucuagc

SEQ ID NO: 3008384 - RNA, 15 nt, Human
uuugcauauugcaua

SEQ ID NO: 3008385 - RNA, 20 nt, Human
uuugcauauugcauacuauu

SEQ ID NO: 3008386 - RNA, 14 nt, Human
uuuggaaaagaaua

SEQ ID NO: 3008387 - RNA, 16 nt, Human
uuugaagauucuaugu

SEQ ID NO: 3008388 - RNA, 22 nt, Human
uuaccaauugaaguaaaaugug

SEQ ID NO: 3008389 - RNA, 18 nt, Human
uuuccucauuuuuauaau

SEQ ID NO: 3008390 - RNA, 23 nt, Human
uuaccaauugaaguaaaaugugg

SEQ ID NO: 3008391 - RNA, 21 nt, Human
uuuuuccuucaagaaugcagu

SEQ ID NO: 3008392 - RNA, 20 nt, Human
uuuuuaagggcccuuuuuca

SEQ ID NO: 3008393 - RNA, 17 nt, Human
uuuuggguuuauuugga

SEQ ID NO: 3008394 - RNA, 18 nt, Human
uuuuggguuuauuuggaa

SEQ ID NO: 3008395 - RNA, 14 nt, Human
uuuugguauuugaa

SEQ ID NO: 3008396 - RNA, 16 nt, Human
uuuugguauuugaaac

SEQ ID NO: 3008397 - RNA, 14 nt, Human
uuuuccuucaagaa

SEQ ID NO: 3008398 - RNA, 21 nt, Human
uuuuccuucaagaaugcagua

SEQ ID NO: 3008399 - RNA, 13 nt, Human
uuuuccuucaaga

SEQ ID NO: 3008400 - RNA, 19 nt, Human
gucauuauguuaauauuuc

SEQ ID NO: 3008401 - RNA, 17 nt, Human
gucauuauguuaauauu

SEQ ID NO: 3008402 - RNA, 14 nt, Human
gucauucuucccua

SEQ ID NO: 3008403 - RNA, 22 nt, Human
guauuuucuccaaauguucacu

SEQ ID NO: 3008404 - RNA, 14 nt, Human
gucaaggcuuagac

SEQ ID NO: 3008405 - RNA, 20 nt, Human
gucaaggcuuagacccucau

SEQ ID NO: 3008406 - RNA, 18 nt, Human
gucaaggcuuagacccuc

SEQ ID NO: 3008407 - RNA, 16 nt, Human
gucaaggcuuagaccc

SEQ ID NO: 3008408 - RNA, 20 nt, Human
guauguuuuauauagcaaga

SEQ ID NO: 3008409 - RNA, 16 nt, Human
guauagauguugcuaa

SEQ ID NO: 3008410 - RNA, 15 nt, Human
guauagauguugcua

SEQ ID NO: 3008411 - RNA, 13 nt, Human
gugcguccugucg

SEQ ID NO: 3008412 - RNA, 16 nt, Human
gucggagcccugucuc

SEQ ID NO: 3008413 - RNA, 12 nt, Human
gucggagcccug

SEQ ID NO: 3008414 - RNA, 20 nt, Human
gucuguuuuguguacuuuua

SEQ ID NO: 3008415 - RNA, 15 nt, Human
gucuguuuuguguac

SEQ ID NO: 3008416 - RNA, 14 nt, Human
gucuguuuugugua

SEQ ID NO: 3008417 - RNA, 17 nt, Human
gucugucuuuuaaacuc

SEQ ID NO: 3008418 - RNA, 24 nt, Human
guuaguucaaucuggauucauauu

SEQ ID NO: 3008419 - RNA, 23 nt, Human
guucaaucuggauucauauuuaa

SEQ ID NO: 3008420 - RNA, 24 nt, Human
guucacuggacacuucacgcccuu

SEQ ID NO: 3008421 - RNA, 16 nt, Human
gugugcguccugucgg

SEQ ID NO: 3008422 - RNA, 14 nt, Human
gugugcguccuguc

SEQ ID NO: 3008423 - RNA, 17 nt, Human
guggcuaacuuggguua

SEQ ID NO: 3008424 - RNA, 23 nt, Human
guggggcagugcuuggcccagga

SEQ ID NO: 3008425 - RNA, 14 nt, Human
guggggcagugcuu

SEQ ID NO: 3008426 - RNA, 15 nt, Human
guggguggggcagug

SEQ ID NO: 3008427 - RNA, 21 nt, Human
uaaaaggaagcuuacaugccu

SEQ ID NO: 3008428 - RNA, 18 nt, Human
uaaaaggaagcuuacaug

SEQ ID NO: 3008429 - RNA, 20 nt, Human
uaaacaugcuguacauacuu

SEQ ID NO: 3008430 - RNA, 19 nt, Human
uaaacaugcuguacauacu

SEQ ID NO: 3008431 - RNA, 22 nt, Human
uaaacacauuaaagguacuuug

SEQ ID NO: 3008432 - RNA, 23 nt, Human
uaaacaugcuguacauacuuuuu

SEQ ID NO: 3008433 - RNA, 21 nt, Human
uaaacaugcuguacauacuuu

SEQ ID NO: 3008434 - RNA, 22 nt, Human
uaaacaugcuguacauacuuuu

SEQ ID NO: 3008435 - RNA, 19 nt, Human
uaaugcuugcugcugauuu

SEQ ID NO: 3008436 - RNA, 15 nt, Human
uaauaugaugacugu

SEQ ID NO: 3008437 - RNA, 15 nt, Human
uaauauggaucugua

SEQ ID NO: 3008438 - RNA, 18 nt, Human
uaacucaccuggcaucuu

SEQ ID NO: 3008439 - RNA, 15 nt, Human
uaacuuuuuauauuc

SEQ ID NO: 3008440 - RNA, 16 nt, Human
uaacuuuuuauauucu

SEQ ID NO: 3008441 - RNA, 13 nt, Human
uaacuuuuuauau

SEQ ID NO: 3008442 - RNA, 14 nt, Human
uaacuuuuuauauu

SEQ ID NO: 3008443 - RNA, 10 nt, Human
uaacuggaac

SEQ ID NO: 3008444 - RNA, 22 nt, Human
uaguagagguacacuugugaau

SEQ ID NO: 3008445 - RNA, 20 nt, Human
uaguagagguacacuuguga

SEQ ID NO: 3008446 - RNA, 21 nt, Human
uaguagagguacacuugugaa

SEQ ID NO: 3008447 - RNA, 17 nt, Human
uaguagagguacacuug

SEQ ID NO: 3008448 - RNA, 21 nt, Human
uagcagcccucaauugugaaa

SEQ ID NO: 3008449 - RNA, 16 nt, Human
uagcaugaagacagag

SEQ ID NO: 3008450 - RNA, 19 nt, Human
uagagguacacuugugaau

SEQ ID NO: 3008451 - RNA, 18 nt, Human
uagacccucaugcugcca

SEQ ID NO: 3008452 - RNA, 17 nt, Human
uagacccucaugcugcc

SEQ ID NO: 3008453 - RNA, 19 nt, Human
uagacccucaugcugccaa

SEQ ID NO: 3008454 - RNA, 12 nt, Human
uacuuuaaacua

SEQ ID NO: 3008455 - RNA, 18 nt, Human
uagaauguuuucaaaugu

SEQ ID NO: 3008456 - RNA, 19 nt, Human
uagaauguuuucaaauguu

SEQ ID NO: 3008457 - RNA, 18 nt, Human
uaauuccuguuuuuauua

SEQ ID NO: 3008458 - RNA, 16 nt, Human
uacaugccuaccaaua

SEQ ID NO: 3008459 - RNA, 19 nt, Human
uacaugccuaccaauauuu

SEQ ID NO: 3008460 - RNA, 17 nt, Human
uacuaacauuuauuuga

SEQ ID NO: 3008461 - RNA, 18 nt, Human
uacuaacauuuauuugag

SEQ ID NO: 3008462 - RNA, 21 nt, Human
ugaaacacugguuuuaaauau

SEQ ID NO: 3008463 - RNA, 18 nt, Human
ugaaugcagguuuuauca

SEQ ID NO: 3008464 - RNA, 20 nt, Human
ugaaugcagguuuuaucaga

SEQ ID NO: 3008465 - RNA, 15 nt, Human
ugacucuucccucaa

SEQ ID NO: 3008466 - RNA, 17 nt, Human
ucuucaguuugcagagu

SEQ ID NO: 3008467 - RNA, 18 nt, Human
ucuucaguuugcagagua

SEQ ID NO: 3008468 - RNA, 15 nt, Human
ugaaacacugguuuu

SEQ ID NO: 3008469 - RNA, 20 nt, Human
ugaaacacugguuuuaaaua

SEQ ID NO: 3008470 - RNA, 14 nt, Human
ucuggacuaaaacu

SEQ ID NO: 3008471 - RNA, 15 nt, Human
ucggagcccugucuc

SEQ ID NO: 3008472 - RNA, 14 nt, Human
ucggagcccugucu

SEQ ID NO: 3008473 - RNA, 21 nt, Human
ugcuaacagcaacacaaagcu

SEQ ID NO: 3008474 - RNA, 22 nt, Human
ugcuaacagcaacacaaagcuu

SEQ ID NO: 3008475 - RNA, 23 nt, Human
ugcuaacagcaacacaaagcuuu

SEQ ID NO: 3008476 - RNA, 15 nt, Human
ugcugauuuaaacac

SEQ ID NO: 3008477 - RNA, 17 nt, Human
ugcugauuuaaacacau

SEQ ID NO: 3008478 - RNA, 14 nt, Human
ugcugauuuaaaca

SEQ ID NO: 3008479 - RNA, 16 nt, Human
ugcucaguagucagac

SEQ ID NO: 3008480 - RNA, 17 nt, Human
ugcacgcacacugucug

SEQ ID NO: 3008481 - RNA, 19 nt, Human
ugcacgcacacugucugcc

SEQ ID NO: 3008482 - RNA, 15 nt, Human
ugguaguuuuacagu

SEQ ID NO: 3008483 - RNA, 13 nt, Human
uggcccaggaguu

SEQ ID NO: 3008484 - RNA, 19 nt, Human
uggcccaggaguuuggcca

SEQ ID NO: 3008485 - RNA, 14 nt, Human
uggcccaggaguuu

SEQ ID NO: 3008486 - RNA, 21 nt, Human
uggcccaggaguuuggccaga

SEQ ID NO: 3008487 - RNA, 20 nt, Human
uggcccaggaguuuggccag

SEQ ID NO: 3008488 - RNA, 22 nt, Human
uggcccaggaguuuggccagaa

SEQ ID NO: 3008489 - RNA, 12 nt, Human
uggcccaggagu

SEQ ID NO: 3008490 - RNA, 21 nt, Human
ugcuuuaccaauugaaguaaa

SEQ ID NO: 3008491 - RNA, 15 nt, Human
ugugcacaucuguuu

SEQ ID NO: 3008492 - RNA, 17 nt, Human
ugugcacaucuguuuug

SEQ ID NO: 3008493 - RNA, 23 nt, Human
ugugaaggcaggggaauguaugu

SEQ ID NO: 3008494 - RNA, 20 nt, Human
uguaauaaacucauuucuag

SEQ ID NO: 3008495 - RNA, 18 nt, Human
uguuucuggcuuagaaca

SEQ ID NO: 3008496 - RNA, 18 nt, Human
uuaaaugacucuucccuc

SEQ ID NO: 3008497 - RNA, 11 nt, Human
uuaaaugacuc

SEQ ID NO: 3008498 - RNA, 20 nt, Human
uuaaauauuuugacuuguug

SEQ ID NO: 3008499 - RNA, 23 nt, Human
uuaaacuacauuagguugugaau

SEQ ID NO: 3008500 - RNA, 22 nt, Human
uuaaacuacauuagguugugaa

SEQ ID NO: 3008501 - RNA, 23 nt, Human
uguguggucaacauuucucaugu

SEQ ID NO: 3008502 - RNA, 14 nt, Human
uguguggucaacau

SEQ ID NO: 3008503 - RNA, 18 nt, Human
uguucacuggacacuuca

SEQ ID NO: 3008504 - RNA, 21 nt, Human
cucucuguaauaaacucauuu

SEQ ID NO: 3008505 - RNA, 16 nt, Human
cucucuguaauaaacu

SEQ ID NO: 3008506 - RNA, 18 nt, Human
cucaguagucagacugga

SEQ ID NO: 3008507 - RNA, 12 nt, Human
cuauguuuuugu

SEQ ID NO: 3008508 - RNA, 17 nt, Human
cuaucacugguuugguu

SEQ ID NO: 3008509 - RNA, 21 nt, Human
cuauguuaauauuuuaggugu

SEQ ID NO: 3008510 - RNA, 14 nt, Human
cuauguuaauauuu

SEQ ID NO: 3008511 - RNA, 17 nt, Human
cuauguuaauauuuuag

SEQ ID NO: 3008512 - RNA, 15 nt, Human
cuauguuaauauuuu

SEQ ID NO: 3008513 - RNA, 13 nt, Human
cuauguuaauauu

SEQ ID NO: 3008514 - RNA, 19 nt, Human
cuaauaaaaaggugaccau

SEQ ID NO: 3008515 - RNA, 13 nt, Human
cuaacuuggguua

SEQ ID NO: 3008516 - RNA, 13 nt, Human
ccuuucccuuggu

SEQ ID NO: 3008517 - RNA, 16 nt, Human
ccucaugcugccaaua

SEQ ID NO: 3008518 - RNA, 15 nt, Human
ccucaugcugccaau

SEQ ID NO: 3008519 - RNA, 13 nt, Human
ccucaugcugcca

SEQ ID NO: 3008520 - RNA, 14 nt, Human
cccauucuuggccc

SEQ ID NO: 3008521 - RNA, 18 nt, Human
ccacuugagugucaagcu

SEQ ID NO: 3008522 - RNA, 18 nt, Human
ccaggaguuuggccagaa

SEQ ID NO: 3008523 - RNA, 17 nt, Human
ccaggaguuuggccaga

SEQ ID NO: 3008524 - RNA, 16 nt, Human
ccaggaguuuggccag

SEQ ID NO: 3008525 - RNA, 15 nt, Human
ccaggaguuuggcca

SEQ ID NO: 3008526 - RNA, 14 nt, Human
ccaggaguuuggcc

SEQ ID NO: 3008527 - RNA, 16 nt, Human
cauuauguuaauauuu

SEQ ID NO: 3008528 - RNA, 15 nt, Human
cauuauguuaauauu

SEQ ID NO: 3008529 - RNA, 14 nt, Human
cauuauguuaauau

SEQ ID NO: 3008530 - RNA, 17 nt, Human
cauuauguuaauauuuc

SEQ ID NO: 3008531 - RNA, 21 nt, Human
caguuguuauuuauugaaaug

SEQ ID NO: 3008532 - RNA, 19 nt, Human
caguuguuauuuauugaaa

SEQ ID NO: 3008533 - RNA, 14 nt, Human
caguuguuauuuau

SEQ ID NO: 3008534 - RNA, 19 nt, Human
cagacuggauaguccgucu

SEQ ID NO: 3008535 - RNA, 18 nt, Human
caauauuuaaucuuuuau

SEQ ID NO: 3008536 - RNA, 22 nt, Human
caauugugaaaaaauuuacuuu

SEQ ID NO: 3008537 - RNA, 17 nt, Human
cacaaggaaauaaaauu

SEQ ID NO: 3008538 - RNA, 23 nt, Human
caauugugaaaaaauuuacuuua

SEQ ID NO: 3008539 - RNA, 17 nt, Human
auuuucuccaaauguuc

SEQ ID NO: 3008540 - RNA, 20 nt, Human
auuugcacauuaaaugacuc

SEQ ID NO: 3008541 - RNA, 21 nt, Human
auuugcacauuaaaugacucu

SEQ ID NO: 3008542 - RNA, 17 nt, Human
auuucacaguguguggu

SEQ ID NO: 3008543 - RNA, 22 nt, Human
auuuaauuugaagguagaaugu

SEQ ID NO: 3008544 - RNA, 15 nt, Human
auuuaauuugaaggu

SEQ ID NO: 3008545 - RNA, 13 nt, Human
auuuaauuugaag

SEQ ID NO: 3008546 - RNA, 14 nt, Human
auuugcacauuaaa

SEQ ID NO: 3008547 - RNA, 15 nt, Human
auuugcacauuaaau

SEQ ID NO: 3008548 - RNA, 17 nt, Human
auuugcacauuaaauga

SEQ ID NO: 3008549 - RNA, 19 nt, Human
auuugcacauuaaaugacu

SEQ ID NO: 3008550 - RNA, 17 nt, Human
auuucucucaucuguua

SEQ ID NO: 3008551 - RNA, 15 nt, Human
auucauuaguuuuga

SEQ ID NO: 3008552 - RNA, 14 nt, Human
auucauuaguuuug

SEQ ID NO: 3008553 - RNA, 15 nt, Human
auucauucuuuuuga

SEQ ID NO: 3008554 - RNA, 21 nt, Human
auucauucuuuuugaaauguc

SEQ ID NO: 3008555 - RNA, 16 nt, Human
auucauucuuuuugaa

SEQ ID NO: 3008556 - RNA, 21 nt, Human
gggauuuucagcccucagaau

SEQ ID NO: 3008557 - RNA, 17 nt, Human
gggauugaaggaugcug

SEQ ID NO: 3008558 - RNA, 18 nt, Human
aaacuacauugacagauu

SEQ ID NO: 3008559 - RNA, 16 nt, Human
aaacucauuucuagca

SEQ ID NO: 3008560 - RNA, 21 nt, Human
aaacuacauuagguugugaau

SEQ ID NO: 3008561 - RNA, 22 nt, Human
aaacuacauuagguugugaaug

SEQ ID NO: 3008562 - RNA, 20 nt, Human
aaacuacauuagguugugaa

SEQ ID NO: 3008563 - RNA, 22 nt, Human
aaacaugcuguacauacuuuuu

SEQ ID NO: 3008564 - RNA, 20 nt, Human
aaacaugcuguacauacuuu

SEQ ID NO: 3008565 - RNA, 21 nt, Human
aaacaugcuguacauacuuuu

SEQ ID NO: 3008566 - RNA, 15 nt, Human
aaacaugcuguacau

SEQ ID NO: 3008567 - RNA, 16 nt, Human
aaacaugcuguacaua

SEQ ID NO: 3008568 - RNA, 18 nt, Human
aaacaugcuguacauacu

SEQ ID NO: 3008569 - RNA, 20 nt, Human
ggugauuuagcaggaagcug

SEQ ID NO: 3008570 - RNA, 14 nt, Human
ggucugucuuuuaa

SEQ ID NO: 3008571 - RNA, 13 nt, Human
ggucugucuuuua

SEQ ID NO: 3008572 - RNA, 17 nt, Human
aaagcuuuugcauauug

SEQ ID NO: 3008573 - RNA, 19 nt, Human
aaaggaaugcaaagaugaa

SEQ ID NO: 3008574 - RNA, 22 nt, Human
aaaggaaugcaaagaugaaggu

SEQ ID NO: 3008575 - RNA, 19 nt, Human
aaagaugaaggucuguuuu

SEQ ID NO: 3008576 - RNA, 12 nt, Human
ggauuuucagcc

SEQ ID NO: 3008577 - RNA, 21 nt, Human
ggcccaggaguuuggccagaa

SEQ ID NO: 3008578 - RNA, 23 nt, Human
ggcccaggaguuuggccagaagu

SEQ ID NO: 3008579 - RNA, 22 nt, Human
ggcccaggaguuuggccagaag

SEQ ID NO: 3008580 - RNA, 15 nt, Human
gccuaccaauauuua

SEQ ID NO: 3008581 - RNA, 14 nt, Human
gccacuuuauuucu

SEQ ID NO: 3008582 - RNA, 22 nt, Human
gccagaagucaaggcuuagacc

SEQ ID NO: 3008583 - RNA, 20 nt, Human
gccagaagucaaggcuuaga

SEQ ID NO: 3008584 - RNA, 16 nt, Human
gccagaagucaaggcu

SEQ ID NO: 3008585 - RNA, 23 nt, Human
gccagaagucaaggcuuagaccc

SEQ ID NO: 3008586 - RNA, 16 nt, Human
gcugcugauuuaaaca

SEQ ID NO: 3008587 - RNA, 13 nt, Human
gcuguacauacuu

SEQ ID NO: 3008588 - RNA, 14 nt, Human
gcuguacauacuuu

SEQ ID NO: 3008589 - RNA, 15 nt, Human
gcuguacauacuuuu

SEQ ID NO: 3008590 - RNA, 16 nt, Human
gcuguacauacuuuuu

SEQ ID NO: 3008591 - RNA, 17 nt, Human
gaguggaguuacugaac

SEQ ID NO: 3008592 - RNA, 11 nt, Human
gaguggaguua

SEQ ID NO: 3008593 - RNA, 13 nt, Human
gcacaucauuuca

SEQ ID NO: 3008594 - RNA, 11 nt, Human
gaagcagagug

SEQ ID NO: 3008595 - RNA, 12 nt, Human
gaagcagagugg

SEQ ID NO: 3008596 - RNA, 16 nt, Human
gaaguucuauuuauuu

SEQ ID NO: 3008597 - RNA, 22 nt, Human
gacauugacuauuuuuguuuuu

SEQ ID NO: 3008598 - RNA, 14 nt, Human
gacauugacuauuu

SEQ ID NO: 3008599 - RNA, 12 nt, Human
gacauucccugc

SEQ ID NO: 3008600 - RNA, 13 nt, Human
gacucuucccuca

SEQ ID NO: 3008601 - RNA, 13 nt, Human
cuuggcccaggag

SEQ ID NO: 3008602 - RNA, 20 nt, Human
cugcuuauccguuagccgug

SEQ ID NO: 3008603 - RNA, 16 nt, Human
cugcugauuuaaacac

SEQ ID NO: 3008604 - RNA, 22 nt, Human
cugcugauuuaaacacauuaaa

SEQ ID NO: 3008605 - RNA, 17 nt, Human
aaauuuacuuuaaacua

SEQ ID NO: 3008606 - RNA, 20 nt, Human
aaauuuacuuuaaacuacau

SEQ ID NO: 3008607 - RNA, 17 nt, Human
gucaacauuucucaugu

SEQ ID NO: 3008608 - RNA, 13 nt, Human
gucaacauuucuc

SEQ ID NO: 3008609 - RNA, 17 nt, Human
aaaggauacuuauuuaa

SEQ ID NO: 3008610 - RNA, 15 nt, Human
aaaggauacuuauuu

SEQ ID NO: 3008611 - RNA, 15 nt, Human
aaaugauuucacagu

SEQ ID NO: 3008612 - RNA, 22 nt, Human
aacaguaacauagcugugauuu

SEQ ID NO: 3008613 - RNA, 18 nt, Human
aacaggcuuagugaugua

SEQ ID NO: 3008614 - RNA, 15 nt, Human
aacaguaacauagcu

SEQ ID NO: 3008615 - RNA, 22 nt, Human
aacauuuauuugaguggaguua

SEQ ID NO: 3008616 - RNA, 21 nt, Human
aacacucuauaacaaaggaua

SEQ ID NO: 3008617 - RNA, 22 nt, Human
aacacugguuuuaaauauuuug

SEQ ID NO: 3008618 - RNA, 18 nt, Human
aacacugguuuuaaauau

SEQ ID NO: 3008619 - RNA, 16 nt, Human
aaccccaaguuaguuc

SEQ ID NO: 3008620 - RNA, 14 nt, Human
guuuuacaguguuu

SEQ ID NO: 3008621 - RNA, 20 nt, Human
guuuaaugguaguuuuacag

SEQ ID NO: 3008622 - RNA, 14 nt, Human
guuacacaaagaac

SEQ ID NO: 3008623 - RNA, 17 nt, Human
aagacccucucaaacua

SEQ ID NO: 3008624 - RNA, 23 nt, Human
aagaauugauugggcacaucauu

SEQ ID NO: 3008625 - RNA, 24 nt, Human
aagaaugcaguacuaacauuuauu

SEQ ID NO: 3008626 - RNA, 15 nt, Human
gugccuaauguguuu

SEQ ID NO: 3008627 - RNA, 21 nt, Human
aacuuuaagaacuaaaauguu

SEQ ID NO: 3008628 - RNA, 18 nt, Human
uaaugagcuuaagaaauu

SEQ ID NO: 3008629 - RNA, 16 nt, Human
uaaugguaguuuuaca

SEQ ID NO: 3008630 - RNA, 18 nt, Human
uaaugguaguuuuacagu

SEQ ID NO: 3008631 - RNA, 13 nt, Human
aaugacucuuccc

SEQ ID NO: 3008632 - RNA, 18 nt, Human
uaauuauugauguuuuca

SEQ ID NO: 3008633 - RNA, 16 nt, Human
uaauuauugauguuuu

SEQ ID NO: 3008634 - RNA, 14 nt, Human
aaugagcuuaagaa

SEQ ID NO: 3008635 - RNA, 18 nt, Human
aaugcaguacuaacauuu

SEQ ID NO: 3008636 - RNA, 17 nt, Human
aauaacuggaacacucu

SEQ ID NO: 3008637 - RNA, 20 nt, Human
guuuugaagauucuauguua

SEQ ID NO: 3008638 - RNA, 17 nt, Human
guuuugaagauucuaug

SEQ ID NO: 3008639 - RNA, 16 nt, Human
guuuugaagauucuau

SEQ ID NO: 3008640 - RNA, 13 nt, Human
aauaaaaagguga

SEQ ID NO: 3008641 - RNA, 12 nt, Human
aauaaaaaggug

SEQ ID NO: 3008642 - RNA, 16 nt, Human
aauaaaaaggugacca

SEQ ID NO: 3008643 - RNA, 14 nt, Human
uaaauagaugacau

SEQ ID NO: 3008644 - RNA, 19 nt, Human
uaaauagaugacauugacu

SEQ ID NO: 3008645 - RNA, 21 nt, Human
uaaauagaugacauugacuau

SEQ ID NO: 3008646 - RNA, 15 nt, Human
aauauugguugggau

SEQ ID NO: 3008647 - RNA, 21 nt, Human
aauauugguugggaugacuug

SEQ ID NO: 3008648 - RNA, 21 nt, Human
aauauuuuagguguaaaauaa

SEQ ID NO: 3008649 - RNA, 16 nt, Human
aauaugaugacuguuu

SEQ ID NO: 3008650 - RNA, 17 nt, Human
aauaugaugacuguuuu

SEQ ID NO: 3008651 - RNA, 21 nt, Human
aauauccuaauaaaaagguga

SEQ ID NO: 3008652 - RNA, 20 nt, Human
aauagcauguccuaaugcuu

SEQ ID NO: 3008653 - RNA, 19 nt, Human
aauagaugacauugacuau

SEQ ID NO: 3008654 - RNA, 21 nt, Human
aauagaugacauugacuauuu

SEQ ID NO: 3008655 - RNA, 22 nt, Human
aauagaugacauugacuauuuu

SEQ ID NO: 3008656 - RNA, 19 nt, Human
aauauccuaauaaaaaggu

SEQ ID NO: 3008657 - RNA, 15 nt, Human
aauauccuaauaaaa

SEQ ID NO: 3008658 - RNA, 20 nt, Human
aauauccaauugcugcuugu

SEQ ID NO: 3008659 - RNA, 14 nt, Human
aauauccuaauaaa

SEQ ID NO: 3008660 - RNA, 13 nt, Human
aauauccuaauaa

SEQ ID NO: 3008661 - RNA, 12 nt, Human
aauauccuaaua

SEQ ID NO: 3008662 - RNA, 22 nt, Human
aauaucccuuggacauuuuaug

SEQ ID NO: 3008663 - RNA, 20 nt, Human
aauaucccuuggacauuuua

SEQ ID NO: 3008664 - RNA, 21 nt, Human
aauaucccuuggacauuuuau

SEQ ID NO: 3008665 - RNA, 15 nt, Human
acaaagcuuuugcau

SEQ ID NO: 3008666 - RNA, 22 nt, Human
acaaagcuuuugcauauugcau

SEQ ID NO: 3008667 - RNA, 23 nt, Human
acaaagcuuuugcauauugcaua

SEQ ID NO: 3008668 - RNA, 21 nt, Human
acaaaggauacuuauuuaaau

SEQ ID NO: 3008669 - RNA, 23 nt, Human
acaaaggauacuuauuuaaauag

SEQ ID NO: 3008670 - RNA, 20 nt, Human
uagaugaaugucaguuguua

SEQ ID NO: 3008671 - RNA, 23 nt, Human
aauuugccuaauaugaugacugu

SEQ ID NO: 3008672 - RNA, 16 nt, Human
aauuugcacauuaaau

SEQ ID NO: 3008673 - RNA, 10 nt, Human
uacuuuuugg

SEQ ID NO: 3008674 - RNA, 12 nt, Human
aauuugcacauu

SEQ ID NO: 3008675 - RNA, 12 nt, Human
uacuuauuuaaa

SEQ ID NO: 3008676 - RNA, 14 nt, Human
uacuuauuuaaaua

SEQ ID NO: 3008677 - RNA, 21 nt, Human
uacuuauuuaaauagaugaca

SEQ ID NO: 3008678 - RNA, 14 nt, Human
aauuugcacauuaa

SEQ ID NO: 3008679 - RNA, 16 nt, Human
aauuuacuuuaaacua

SEQ ID NO: 3008680 - RNA, 15 nt, Human
aauuuacuuuaaacu

SEQ ID NO: 3008681 - RNA, 18 nt, Human
aauuuacuuuaaacuaca

SEQ ID NO: 3008682 - RNA, 21 nt, Human
uacuaaaaguuuugagaaauu

SEQ ID NO: 3008683 - RNA, 23 nt, Human
uacugggaaagggauuuucagcc

SEQ ID NO: 3008684 - RNA, 14 nt, Human
uacugaacaguaac

SEQ ID NO: 3008685 - RNA, 20 nt, Human
aauugauugggcacaucauu

SEQ ID NO: 3008686 - RNA, 23 nt, Human
aauugauugggcacaucauuuca

SEQ ID NO: 3008687 - RNA, 19 nt, Human
aauugauugggcacaucau

SEQ ID NO: 3008688 - RNA, 12 nt, Human
uagguugugaau

SEQ ID NO: 3008689 - RNA, 14 nt, Human
acacaccuaacuua

SEQ ID NO: 3008690 - RNA, 23 nt, Human
uaguucaaucuggauucauauuu

SEQ ID NO: 3008691 - RNA, 18 nt, Human
acacaugcugaacaucac

SEQ ID NO: 3008692 - RNA, 19 nt, Human
uauauucauucuuuuugaa

SEQ ID NO: 3008693 - RNA, 20 nt, Human
uauauucauucuuuuugaaa

SEQ ID NO: 3008694 - RNA, 18 nt, Human
acacuugugaauaaagag

SEQ ID NO: 3008695 - RNA, 12 nt, Human
acacuugugaau

SEQ ID NO: 3008696 - RNA, 13 nt, Human
acacuugugaaua

SEQ ID NO: 3008697 - RNA, 15 nt, Human
acacucuauaacaaa

SEQ ID NO: 3008698 - RNA, 20 nt, Human
acagcaacacaaagcuuuug

SEQ ID NO: 3008699 - RNA, 17 nt, Human
acagcaacacaaagcuu

SEQ ID NO: 3008700 - RNA, 20 nt, Human
uauccuagucauucuucccu

SEQ ID NO: 3008701 - RNA, 15 nt, Human
uauuugugagacugu

SEQ ID NO: 3008702 - RNA, 15 nt, Human
acauuagguugugaa

SEQ ID NO: 3008703 - RNA, 16 nt, Human
acauuagguugugaau

SEQ ID NO: 3008704 - RNA, 17 nt, Human
acauuagguugugaaug

SEQ ID NO: 3008705 - RNA, 21 nt, Human
acaugcugaacaucacagcuu

SEQ ID NO: 3008706 - RNA, 14 nt, Human
acaugcugaacauc

SEQ ID NO: 3008707 - RNA, 17 nt, Human
acaugcuguacauacuu

SEQ ID NO: 3008708 - RNA, 15 nt, Human
acauuaaaugacucu

SEQ ID NO: 3008709 - RNA, 19 nt, Human
acauuaaaugacucuuccc

SEQ ID NO: 3008710 - RNA, 21 nt, Human
acauuaaaugacucuucccuc

SEQ ID NO: 3008711 - RNA, 16 nt, Human
ucaagaaugcaguacu

SEQ ID NO: 3008712 - RNA, 14 nt, Human
ucaaggcuuagacc

SEQ ID NO: 3008713 - RNA, 11 nt, Human
acauacuuuuu

SEQ ID NO: 3008714 - RNA, 13 nt, Human
acauacuuuuugg

SEQ ID NO: 3008715 - RNA, 17 nt, Human
acauacuuuuuggguuu

SEQ ID NO: 3008716 - RNA, 20 nt, Human
acauacuuuuuggguuuauu

SEQ ID NO: 3008717 - RNA, 18 nt, Human
acaguuggguuuuuuaag

SEQ ID NO: 3008718 - RNA, 16 nt, Human
acaguuggguuuuuua

SEQ ID NO: 3008719 - RNA, 13 nt, Human
acaucuguuuugu

SEQ ID NO: 3008720 - RNA, 14 nt, Human
acauagcugugauu

SEQ ID NO: 3008721 - RNA, 17 nt, Human
accaauauuuaaucuuu

SEQ ID NO: 3008722 - RNA, 16 nt, Human
accaauauuuaaucuu

SEQ ID NO: 3008723 - RNA, 20 nt, Human
accaauauuuaaucuuuuau

SEQ ID NO: 3008724 - RNA, 23 nt, Human
accaauauuuaaucuuuuaugau

SEQ ID NO: 3008725 - RNA, 14 nt, Human
uccccucuccucca

SEQ ID NO: 3008726 - RNA, 11 nt, Human
uccuaaauagc

SEQ ID NO: 3008727 - RNA, 15 nt, Human
ucccuuucccuuggu

SEQ ID NO: 3008728 - RNA, 17 nt, Human
ucccugugucauuucaa

SEQ ID NO: 3008729 - RNA, 16 nt, Human
ucccugugucauuuca

SEQ ID NO: 3008730 - RNA, 18 nt, Human
acuaacauuuauuugagu

SEQ ID NO: 3008731 - RNA, 12 nt, Human
acuaacaggcuu

SEQ ID NO: 3008732 - RNA, 17 nt, Human
acuaacaggcuuaguga

SEQ ID NO: 3008733 - RNA, 18 nt, Human
acuaacaggcuuagugau

SEQ ID NO: 3008734 - RNA, 12 nt, Human
ucauuacuaaaa

SEQ ID NO: 3008735 - RNA, 21 nt, Human
ucauucuuuuugaaaugucaa

SEQ ID NO: 3008736 - RNA, 22 nt, Human
accuggauugugccuaaugugu

SEQ ID NO: 3008737 - RNA, 22 nt, Human
uccaaucugugaugacauuccc

SEQ ID NO: 3008738 - RNA, 18 nt, Human
ucgcuccaccuugcagcu

SEQ ID NO: 3008739 - RNA, 12 nt, Human
ucugacuauaac

SEQ ID NO: 3008740 - RNA, 18 nt, Human
ucucucaucuguuacaca

SEQ ID NO: 3008741 - RNA, 11 nt, Human
acuuuaaacua

SEQ ID NO: 3008742 - RNA, 15 nt, Human
ucuauuuauuuguga

SEQ ID NO: 3008743 - RNA, 21 nt, Human
ucuauuucuggaugaaugccc

SEQ ID NO: 3008744 - RNA, 15 nt, Human
ucuuacaucugaaau

SEQ ID NO: 3008745 - RNA, 14 nt, Human
agacaguuggguuu

SEQ ID NO: 3008746 - RNA, 20 nt, Human
ucugugaugacauucccugc

SEQ ID NO: 3008747 - RNA, 17 nt, Human
ucugugaugacauuccc

SEQ ID NO: 3008748 - RNA, 12 nt, Human
ucuguauguguu

SEQ ID NO: 3008749 - RNA, 15 nt, Human
ucuguauguguucua

SEQ ID NO: 3008750 - RNA, 12 nt, Human
agaauguuuuca

SEQ ID NO: 3008751 - RNA, 12 nt, Human
ugaagcagagug

SEQ ID NO: 3008752 - RNA, 13 nt, Human
ugaagcagagugg

SEQ ID NO: 3008753 - RNA, 16 nt, Human
ugaagcagaguggcag

SEQ ID NO: 3008754 - RNA, 15 nt, Human
ugaaugucaguuguu

SEQ ID NO: 3008755 - RNA, 18 nt, Human
agagguacacuugugaau

SEQ ID NO: 3008756 - RNA, 14 nt, Human
ugaaauaaggaaug

SEQ ID NO: 3008757 - RNA, 18 nt, Human
ugaaauaaggaaugauau

SEQ ID NO: 3008758 - RNA, 20 nt, Human
agcaggaagcugugagagca

SEQ ID NO: 3008759 - RNA, 20 nt, Human
agcaguuugguuucuagcau

SEQ ID NO: 3008760 - RNA, 23 nt, Human
agcaguuugguuucuagcaugaa

SEQ ID NO: 3008761 - RNA, 22 nt, Human
agcaguuugguuucuagcauga

SEQ ID NO: 3008762 - RNA, 14 nt, Human
ugaguggaguuacu

SEQ ID NO: 3008763 - RNA, 18 nt, Human
ugagugcaaacuucagag

SEQ ID NO: 3008764 - RNA, 20 nt, Human
ugagugcaaacuucagaguu

SEQ ID NO: 3008765 - RNA, 22 nt, Human
ugagugcaaacuucagaguucu

SEQ ID NO: 3008766 - RNA, 18 nt, Human
ugcaucuagccucaagcu

SEQ ID NO: 3008767 - RNA, 16 nt, Human
ugauuucacagugugu

SEQ ID NO: 3008768 - RNA, 14 nt, Human
ugauuucacagugu

SEQ ID NO: 3008769 - RNA, 16 nt, Human
ugcaaacuucagaguu

SEQ ID NO: 3008770 - RNA, 23 nt, Human
ugcaaagaugaaggucuguuuug

SEQ ID NO: 3008771 - RNA, 12 nt, Human
ugcaaagaugaa

SEQ ID NO: 3008772 - RNA, 15 nt, Human
ugcacauuaaaugac

SEQ ID NO: 3008773 - RNA, 18 nt, Human
ugcacauuaaaugacucu

SEQ ID NO: 3008774 - RNA, 13 nt, Human
ugcacauuaaaug

SEQ ID NO: 3008775 - RNA, 17 nt, Human
uggauucauauuuaauu

SEQ ID NO: 3008776 - RNA, 14 nt, Human
uggauucauauuua

SEQ ID NO: 3008777 - RNA, 20 nt, Human
uggaguuauugaagcagagu

SEQ ID NO: 3008778 - RNA, 14 nt, Human
aggcaggggaaugu

SEQ ID NO: 3008779 - RNA, 19 nt, Human
aggcaggggaauguaugug

SEQ ID NO: 3008780 - RNA, 16 nt, Human
aggcaggggaauguau

SEQ ID NO: 3008781 - RNA, 20 nt, Human
agcuuaagaaauuuguggaa

SEQ ID NO: 3008782 - RNA, 21 nt, Human
ugguuaguagagguacacuug

SEQ ID NO: 3008783 - RNA, 16 nt, Human
aguaaaauguggcagg

SEQ ID NO: 3008784 - RNA, 18 nt, Human
aguaggggucugucuuuu

SEQ ID NO: 3008785 - RNA, 20 nt, Human
aguaggggucugucuuuuaa

SEQ ID NO: 3008786 - RNA, 19 nt, Human
ugucaagcugaccuugcug

SEQ ID NO: 3008787 - RNA, 17 nt, Human
agggcccuuuuucaaua

SEQ ID NO: 3008788 - RNA, 16 nt, Human
uguuuuaucuucuaua

SEQ ID NO: 3008789 - RNA, 21 nt, Human
uguuuuauauagcaagacauu

SEQ ID NO: 3008790 - RNA, 19 nt, Human
uguuuugccaauuugcaca

SEQ ID NO: 3008791 - RNA, 17 nt, Human
uguuuugccaauuugca

SEQ ID NO: 3008792 - RNA, 21 nt, Human
uguuuugccaauuugcacauu

SEQ ID NO: 3008793 - RNA, 22 nt, Human
uguuuugccaauuugcacauua

SEQ ID NO: 3008794 - RNA, 22 nt, Human
uguuugagcaucgcuuaggaga

SEQ ID NO: 3008795 - RNA, 14 nt, Human
uguugcuaacagca

SEQ ID NO: 3008796 - RNA, 15 nt, Human
aguuggguuuuuuaa

SEQ ID NO: 3008797 - RNA, 18 nt, Human
agucuucaguuugcagag

SEQ ID NO: 3008798 - RNA, 20 nt, Human
agucuucaguuugcagagua

SEQ ID NO: 3008799 - RNA, 21 nt, Human
agucuucaguuugcagaguag

SEQ ID NO: 3008800 - RNA, 18 nt, Human
ugugaugacauucccugc

SEQ ID NO: 3008801 - RNA, 16 nt, Human
auauucucagcagagu

SEQ ID NO: 3008802 - RNA, 15 nt, Human
auauucucagcagag

SEQ ID NO: 3008803 - RNA, 17 nt, Human
auauucucagcagagug

SEQ ID NO: 3008804 - RNA, 18 nt, Human
auauucucagcagagugc

SEQ ID NO: 3008805 - RNA, 22 nt, Human
auauugcauacuauuaaacaug

SEQ ID NO: 3008806 - RNA, 20 nt, Human
auauugcauacuauuaaaca

SEQ ID NO: 3008807 - RNA, 23 nt, Human
auauuucugaggagccugcaaca

SEQ ID NO: 3008808 - RNA, 13 nt, Human
uucucacagaaga

SEQ ID NO: 3008809 - RNA, 11 nt, Human
uuauuuauuga

SEQ ID NO: 3008810 - RNA, 13 nt, Human
uuauuuaaauaga

SEQ ID NO: 3008811 - RNA, 19 nt, Human
auagcugugauuuuuggua

SEQ ID NO: 3008812 - RNA, 12 nt, Human
auaacuuuuuau

SEQ ID NO: 3008813 - RNA, 22 nt, Human
auagcugugauuuuugguauuu

SEQ ID NO: 3008814 - RNA, 21 nt, Human
uuauuucucucaucuguuaca

SEQ ID NO: 3008815 - RNA, 20 nt, Human
uucauauuuaauuugaaggu

SEQ ID NO: 3008816 - RNA, 18 nt, Human
uucauagagaauauaaaa

SEQ ID NO: 3008817 - RNA, 11 nt, Human
uucauagagaa

SEQ ID NO: 3008818 - RNA, 18 nt, Human
uucacugguacucugcca

SEQ ID NO: 3008819 - RNA, 15 nt, Human
uucagcccucagaau

SEQ ID NO: 3008820 - RNA, 13 nt, Human
auauaagguuuuu

SEQ ID NO: 3008821 - RNA, 20 nt, Human
uuggcccaggauuauuguca

SEQ ID NO: 3008822 - RNA, 22 nt, Human
uuggcccaggaguuuggccaga

SEQ ID NO: 3008823 - RNA, 21 nt, Human
uuggcccaggaguuuggccag

SEQ ID NO: 3008824 - RNA, 20 nt, Human
uuggcccaggaguuuggcca

SEQ ID NO: 3008825 - RNA, 15 nt, Human
uuggcccaggaguuu

SEQ ID NO: 3008826 - RNA, 14 nt, Human
uuggcccaggaguu

SEQ ID NO: 3008827 - RNA, 13 nt, Human
uuggcccaggagu

SEQ ID NO: 3008828 - RNA, 21 nt, Human
aucugugaugacauucccugc

SEQ ID NO: 3008829 - RNA, 19 nt, Human
aucugugaugacauucccu

SEQ ID NO: 3008830 - RNA, 14 nt, Human
uugagugucaagcu

SEQ ID NO: 3008831 - RNA, 19 nt, Human
aucccuuggacauuuuaug

SEQ ID NO: 3008832 - RNA, 17 nt, Human
aucccuuggacauuuua

SEQ ID NO: 3008833 - RNA, 21 nt, Human
aucccuuggacauuuuauguc

SEQ ID NO: 3008834 - RNA, 20 nt, Human
aucccuuggacauuuuaugu

SEQ ID NO: 3008835 - RNA, 16 nt, Human
aucccuuucccuuggu

SEQ ID NO: 3008836 - RNA, 19 nt, Human
uugccaauuugcacauuaa

SEQ ID NO: 3008837 - RNA, 22 nt, Human
uugccaauuugcacauuaaaug

SEQ ID NO: 3008838 - RNA, 23 nt, Human
uugccaauuugcacauuaaauga

SEQ ID NO: 3008839 - RNA, 16 nt, Human
uuuaucagaacuaugu

SEQ ID NO: 3008840 - RNA, 17 nt, Human
uuuaucagaacuauguu

SEQ ID NO: 3008841 - RNA, 18 nt, Human
uuuaaucuuuuaugauug

SEQ ID NO: 3008842 - RNA, 16 nt, Human
augcccagugagacug

SEQ ID NO: 3008843 - RNA, 15 nt, Human
augcccagugagacu

SEQ ID NO: 3008844 - RNA, 18 nt, Human
uuuaucagaacuauguuu

SEQ ID NO: 3008845 - RNA, 22 nt, Human
uugugaaugcagguuuuaucag

SEQ ID NO: 3008846 - RNA, 16 nt, Human
uuguguacuuuuaaga

SEQ ID NO: 3008847 - RNA, 20 nt, Human
augcaaagaugaaggucugu

SEQ ID NO: 3008848 - RNA, 18 nt, Human
uuuaagggcccuuuuuca

SEQ ID NO: 3008849 - RNA, 20 nt, Human
uuuaagggcccuuuuucaau

SEQ ID NO: 3008850 - RNA, 21 nt, Human
uuuaagggcccuuuuucaaua

SEQ ID NO: 3008851 - RNA, 13 nt, Human
uuuaaucuuuuau

SEQ ID NO: 3008852 - RNA, 15 nt, Human
uuuaaucuuuuauga

SEQ ID NO: 3008853 - RNA, 16 nt, Human
uuuaagacuuugguua

SEQ ID NO: 3008854 - RNA, 20 nt, Human
uuuuguuuuuauuaaaagga

SEQ ID NO: 3008855 - RNA, 21 nt, Human
uuuuuauauucucagcagagu

SEQ ID NO: 3008856 - RNA, 22 nt, Human
uuuuuauauucucagcagagug

SEQ ID NO: 3008857 - RNA, 14 nt, Human
uuuuggaaaagaau

SEQ ID NO: 3008858 - RNA, 12 nt, Human
uuuuguguacuu

SEQ ID NO: 3008859 - RNA, 18 nt, Human
uuuuuggaaaagaauaaa

SEQ ID NO: 3008860 - RNA, 15 nt, Human
uuuuugguauuugaa

SEQ ID NO: 3008861 - RNA, 17 nt, Human
auuauugauguuuucau

SEQ ID NO: 3008862 - RNA, 21 nt, Human
auuaguuuugaagauucuaug

SEQ ID NO: 3008863 - RNA, 21 nt, Human
auuccuaacuaucacugguuu

SEQ ID NO: 3008864 - RNA, 23 nt, Human
uuuguaacuguuuagaugaaugu

SEQ ID NO: 3008865 - RNA, 23 nt, Human
uuugagaaauuuuuuuuuccagu

SEQ ID NO: 3008866 - RNA, 17 nt, Human
uuuguuuuuauuaaaag

SEQ ID NO: 3008867 - RNA, 14 nt, Human
auguugcuaacagc

SEQ ID NO: 3008868 - RNA, 22 nt, Human
auugcauacuauuaaacaugcu

SEQ ID NO: 3008869 - RNA, 19 nt, Human
auugcauacuauuaaacau

SEQ ID NO: 3008870 - RNA, 20 nt, Human
auugcauacuauuaaacaug

SEQ ID NO: 3008871 - RNA, 19 nt, Human
auugccuuuuuauaacuuu

SEQ ID NO: 3008872 - RNA, 20 nt, Human
auugccuuuuuauaacuuuu

SEQ ID NO: 3008873 - RNA, 21 nt, Human
auugccuuuuuauaacuuuuu

SEQ ID NO: 3008874 - RNA, 15 nt, Human
auugaaguaaaaugu

SEQ ID NO: 3008875 - RNA, 24 nt, Human
auuccuagaaacugacacaugcug

SEQ ID NO: 3008876 - RNA, 17 nt, Human
auugaaggaugcugucu

SEQ ID NO: 3008877 - RNA, 14 nt, Human
auugaaguaaaaug

SEQ ID NO: 3008878 - RNA, 17 nt, Human
auugauguuuucauaga

SEQ ID NO: 3008879 - RNA, 16 nt, Human
auugauguuuucauag

SEQ ID NO: 3008880 - RNA, 13 nt, Human
auugauguuuuca

SEQ ID NO: 3008881 - RNA, 18 nt, Human
auugcauacuauuaaaca

SEQ ID NO: 3008882 - RNA, 17 nt, Human
auugcauacuauuaaac

SEQ ID NO: 3008883 - RNA, 17 nt, Human
auugcaccuggauguac

SEQ ID NO: 3008884 - RNA, 22 nt, Human
auuuauugaaaugauuucacag

SEQ ID NO: 3008885 - RNA, 15 nt, Human
auuuauugaaaugau

SEQ ID NO: 3008886 - RNA, 13 nt, Human
auuuauugaaaug

SEQ ID NO: 3008887 - RNA, 12 nt, Human
auuuauuacaac

SEQ ID NO: 3008888 - RNA, 15 nt, Human
auuuacuuuaaacua

SEQ ID NO: 3008889 - RNA, 14 nt, Human
auuuaaauagauga

SEQ ID NO: 3008890 - RNA, 15 nt, Human
auuuaaauagaugac

SEQ ID NO: 3008891 - RNA, 22 nt, Human
aaauagcagcccucaauuguga

SEQ ID NO: 3008892 - RNA, 21 nt, Human
aaauagaugacauugacuauu

SEQ ID NO: 3008893 - RNA, 14 nt, Human
aaauagaugacauu

SEQ ID NO: 3008894 - RNA, 22 nt, Human
aagacagagccccacccucaga

SEQ ID NO: 3008895 - RNA, 20 nt, Human
aaggcaggggaauguaugug

SEQ ID NO: 3008896 - RNA, 18 nt, Human
aaggcaggggaauguaug

SEQ ID NO: 3008897 - RNA, 19 nt, Human
aauuccuguuuuuauuauu

SEQ ID NO: 3008898 - RNA, 21 nt, Human
aauuccuguuuuuauuauuaa

SEQ ID NO: 3008899 - RNA, 22 nt, Human
aauuccuguuuuuauuauuaac

SEQ ID NO: 3008900 - RNA, 13 nt, Human
aauuccuguuuuu

SEQ ID NO: 3008901 - RNA, 20 nt, Human
aauuaugguuaguagaggua

SEQ ID NO: 3008902 - RNA, 14 nt, Human
acaucauuucaaga

SEQ ID NO: 3008903 - RNA, 19 nt, Human
acuggaacacucuauaaca

SEQ ID NO: 3008904 - RNA, 13 nt, Human
acugacacaugcu

SEQ ID NO: 3008905 - RNA, 22 nt, Human
acccucaugcugccaauauccu

SEQ ID NO: 3008906 - RNA, 16 nt, Human
acccucaugcugccaa

SEQ ID NO: 3008907 - RNA, 14 nt, Human
acccucaugcugcc

SEQ ID NO: 3008908 - RNA, 20 nt, Human
acccucagaugcacaugagc

SEQ ID NO: 3008909 - RNA, 14 nt, Human
acgcacacugucug

SEQ ID NO: 3008910 - RNA, 13 nt, Human
aguuugcagagua

SEQ ID NO: 3008911 - RNA, 17 nt, Human
aguuguuauuuauugaa

SEQ ID NO: 3008912 - RNA, 14 nt, Human
agugcuauugcaga

SEQ ID NO: 3008913 - RNA, 21 nt, Human
auaagugcuauugcagagccg

SEQ ID NO: 3008914 - RNA, 22 nt, Human
agucuggcagacuuucuucucu

SEQ ID NO: 3008915 - RNA, 22 nt, Human
agugcuacacaccuaacuuaug

SEQ ID NO: 3008916 - RNA, 18 nt, Human
agugauguaauuaugguu

SEQ ID NO: 3008917 - RNA, 15 nt, Human
aucaucccuuucccu

SEQ ID NO: 3008918 - RNA, 19 nt, Human
aucaucccuuucccuuggu

SEQ ID NO: 3008919 - RNA, 16 nt, Human
auagcaagacauuaua

SEQ ID NO: 3008920 - RNA, 23 nt, Human
augagcuuaagaaauuuguggaa

SEQ ID NO: 3008921 - RNA, 14 nt, Human
augagcuuaagaaa

SEQ ID NO: 3008922 - RNA, 12 nt, Human
aggcuuagaccc

SEQ ID NO: 3008923 - RNA, 21 nt, Human
aggcuuagacccucaugcugc

SEQ ID NO: 3008924 - RNA, 14 nt, Human
aggcuuagacccuc

SEQ ID NO: 3008925 - RNA, 22 nt, Human
aggcuuagacccucaugcugcc

SEQ ID NO: 3008926 - RNA, 18 nt, Human
agaagucuucuauuuauu

SEQ ID NO: 3008927 - RNA, 19 nt, Human
agaagucaaggcuuagacc

SEQ ID NO: 3008928 - RNA, 18 nt, Human
agaagucaaggcuuagac

SEQ ID NO: 3008929 - RNA, 17 nt, Human
agaagucaaggcuuaga

SEQ ID NO: 3008930 - RNA, 16 nt, Human
agaagucaaggcuuag

SEQ ID NO: 3008931 - RNA, 23 nt, Human
agaaugcaguacuaacauuuauu

SEQ ID NO: 3008932 - RNA, 13 nt, Human
agcaaaucaguuu

SEQ ID NO: 3008933 - RNA, 23 nt, Human
agaugacauugacuauuuuuguu

SEQ ID NO: 3008934 - RNA, 18 nt, Human
agaugacauugacuauuu

SEQ ID NO: 3008935 - RNA, 15 nt, Human
agaugaaugucaguu

SEQ ID NO: 3008936 - RNA, 11 nt, Human
agaugaauguc

SEQ ID NO: 3008937 - RNA, 18 nt, Human
agauucuauguuaauauu

SEQ ID NO: 3008938 - RNA, 19 nt, Human
agcaucgcuuaggagaagu

SEQ ID NO: 3008939 - RNA, 17 nt, Human
caacauaacucaagucu

SEQ ID NO: 3008940 - RNA, 23 nt, Human
caacugggguggguggggcagug

SEQ ID NO: 3008941 - RNA, 20 nt, Human
caauauccuaauaaaaaggu

SEQ ID NO: 3008942 - RNA, 19 nt, Human
caauauccuaauaaaaagg

SEQ ID NO: 3008943 - RNA, 18 nt, Human
caauauccuaauaaaaag

SEQ ID NO: 3008944 - RNA, 16 nt, Human
caauauccuaauaaaa

SEQ ID NO: 3008945 - RNA, 15 nt, Human
caauauccuaauaaa

SEQ ID NO: 3008946 - RNA, 14 nt, Human
caauauccuaauaa

SEQ ID NO: 3008947 - RNA, 13 nt, Human
caauauccuaaua

SEQ ID NO: 3008948 - RNA, 12 nt, Human
caauauccuaau

SEQ ID NO: 3008949 - RNA, 16 nt, Human
caccaugggauuaaua

SEQ ID NO: 3008950 - RNA, 16 nt, Human
cccaggaguuuggcca

SEQ ID NO: 3008951 - RNA, 15 nt, Human
cccaggaguuuggcc

SEQ ID NO: 3008952 - RNA, 20 nt, Human
cccaggaguuuggccagaag

SEQ ID NO: 3008953 - RNA, 19 nt, Human
cccaggaguuuggccagaa

SEQ ID NO: 3008954 - RNA, 18 nt, Human
cccaggaguuuggccaga

SEQ ID NO: 3008955 - RNA, 17 nt, Human
cccaggaguuuggccag

SEQ ID NO: 3008956 - RNA, 19 nt, Human
ccaauauccuaauaaaaag

SEQ ID NO: 3008957 - RNA, 18 nt, Human
ccaauauccuaauaaaaa

SEQ ID NO: 3008958 - RNA, 17 nt, Human
ccaauauccuaauaaaa

SEQ ID NO: 3008959 - RNA, 16 nt, Human
ccaauauccuaauaaa

SEQ ID NO: 3008960 - RNA, 15 nt, Human
ccaauauccuaauaa

SEQ ID NO: 3008961 - RNA, 14 nt, Human
ccaauauccuaaua

SEQ ID NO: 3008962 - RNA, 13 nt, Human
ccaauauccuaau

SEQ ID NO: 3008963 - RNA, 12 nt, Human
ccaauauccuaa

SEQ ID NO: 3008964 - RNA, 18 nt, Human
ccagaagucaaggcuuag

SEQ ID NO: 3008965 - RNA, 16 nt, Human
cccugugucauuucaa

SEQ ID NO: 3008966 - RNA, 17 nt, Human
cccuuuuucaauaacug

SEQ ID NO: 3008967 - RNA, 22 nt, Human
cccuuuuucaauaacuggaaca

SEQ ID NO: 3008968 - RNA, 18 nt, Human
ccucaauaaacauuucau

SEQ ID NO: 3008969 - RNA, 14 nt, Human
ccucaauugugaaa

SEQ ID NO: 3008970 - RNA, 17 nt, Human
cugcagggacagagcau

SEQ ID NO: 3008971 - RNA, 22 nt, Human
cuggacacuucacgcccuuggc

SEQ ID NO: 3008972 - RNA, 20 nt, Human
cuggacacuucacgcccuug

SEQ ID NO: 3008973 - RNA, 16 nt, Human
cugaacuucagagcau

SEQ ID NO: 3008974 - RNA, 17 nt, Human
cucauucauuacuaaaa

SEQ ID NO: 3008975 - RNA, 13 nt, Human
cucauucauuacu

SEQ ID NO: 3008976 - RNA, 22 nt, Human
cucccuuccuaugcuguucacu

SEQ ID NO: 3008977 - RNA, 18 nt, Human
cuuaagaaauuuguggaa

SEQ ID NO: 3008978 - RNA, 19 nt, Human
cuuaauaaacuguggugcu

SEQ ID NO: 3008979 - RNA, 14 nt, Human
cuuagacccucaug

SEQ ID NO: 3008980 - RNA, 18 nt, Human
cuuauuuaaauagaugac

SEQ ID NO: 3008981 - RNA, 19 nt, Human
cuuauuuaaauagaugaca

SEQ ID NO: 3008982 - RNA, 13 nt, Human
cuuauuuaaauag

SEQ ID NO: 3008983 - RNA, 14 nt, Human
cuuauuuaaauaga

SEQ ID NO: 3008984 - RNA, 22 nt, Human
cuugcagcucuccccuucucug

SEQ ID NO: 3008985 - RNA, 20 nt, Human
cuuguugaggguauguuuua

SEQ ID NO: 3008986 - RNA, 21 nt, Human
cuuguugaggguauguuuuau

SEQ ID NO: 3008987 - RNA, 22 nt, Human
cuuguugaggguauguuuuaua

SEQ ID NO: 3008988 - RNA, 16 nt, Human
cuuguugaggguaugu

SEQ ID NO: 3008989 - RNA, 16 nt, Human
cuuguacacucauuca

SEQ ID NO: 3008990 - RNA, 15 nt, Human
cuuuuucaauaacug

SEQ ID NO: 3008991 - RNA, 14 nt, Human
cuuuuugaaauguc

SEQ ID NO: 3008992 - RNA, 17 nt, Human
gacaguuggguuuuuua

SEQ ID NO: 3008993 - RNA, 13 nt, Human
gacaguuggguuu

SEQ ID NO: 3008994 - RNA, 21 nt, Human
gacagagccccacccucagau

SEQ ID NO: 3008995 - RNA, 22 nt, Human
gacuggauaguccgucucugcu

SEQ ID NO: 3008996 - RNA, 16 nt, Human
gacuggauaguccguc

SEQ ID NO: 3008997 - RNA, 17 nt, Human
gacuggauaguccgucu

SEQ ID NO: 3008998 - RNA, 22 nt, Human
gaauugauugggcacaucauuu

SEQ ID NO: 3008999 - RNA, 17 nt, Human
gaaugucaguuguuauu

SEQ ID NO: 3009000 - RNA, 23 nt, Human
gaaggugccucuggaugcuguga

SEQ ID NO: 3009001 - RNA, 17 nt, Human
gaagauucuauguuaau

SEQ ID NO: 3009002 - RNA, 23 nt, Human
gaagauucuauguuaauauuuua

SEQ ID NO: 3009003 - RNA, 20 nt, Human
gaagauucuauguuaauauu

SEQ ID NO: 3009004 - RNA, 14 nt, Human
gaacaucacagcuu

SEQ ID NO: 3009005 - RNA, 18 nt, Human
gaguuauugaagcagagu

SEQ ID NO: 3009006 - RNA, 19 nt, Human
gaguuauugaagcagagug

SEQ ID NO: 3009007 - RNA, 20 nt, Human
gaguuauugaagcagagugg

SEQ ID NO: 3009008 - RNA, 22 nt, Human
gaugaaugucaguuguuauuua

SEQ ID NO: 3009009 - RNA, 20 nt, Human
gauuuaaacacauuaaaggu

SEQ ID NO: 3009010 - RNA, 20 nt, Human
gauugggcacaucauuucaa

SEQ ID NO: 3009011 - RNA, 15 nt, Human
gcaaacuucagaguu

SEQ ID NO: 3009012 - RNA, 13 nt, Human
gcagaguggcagu

SEQ ID NO: 3009013 - RNA, 22 nt, Human
gcagaguggcagucuucaguuu

SEQ ID NO: 3009014 - RNA, 22 nt, Human
gcauauugcauacuauuaaaca

SEQ ID NO: 3009015 - RNA, 16 nt, Human
gcagugcuuggcccag

SEQ ID NO: 3009016 - RNA, 19 nt, Human
gcguccugucggagcccug

SEQ ID NO: 3009017 - RNA, 14 nt, Human
gcuaacuuggguua

SEQ ID NO: 3009018 - RNA, 22 nt, Human
gcguccugucggagcccugucu

SEQ ID NO: 3009019 - RNA, 19 nt, Human
gccuuuuuauaacuuuuua

SEQ ID NO: 3009020 - RNA, 10 nt, Human
ggaaaagaau

SEQ ID NO: 3009021 - RNA, 22 nt, Human
gcuuuaccaauugaaguaaaau

SEQ ID NO: 3009022 - RNA, 23 nt, Human
gcuuggcccaggaguuuggccag

SEQ ID NO: 3009023 - RNA, 13 nt, Human
gcuuggcccagga

SEQ ID NO: 3009024 - RNA, 22 nt, Human
gcuuggcccaggaguuuggcca

SEQ ID NO: 3009025 - RNA, 16 nt, Human
gcuuggcccaggaguu

SEQ ID NO: 3009026 - RNA, 15 nt, Human
gcuuggcccaggagu

SEQ ID NO: 3009027 - RNA, 14 nt, Human
gcuuggcccaggag

SEQ ID NO: 3009028 - RNA, 23 nt, Human
ggagcccugucuccucucucugu

SEQ ID NO: 3009029 - RNA, 21 nt, Human
ggcuuaauuauugauguuuuc

SEQ ID NO: 3009030 - RNA, 16 nt, Human
ggcuuagacccucaug

SEQ ID NO: 3009031 - RNA, 17 nt, Human
ggcuuagugauguaauu

SEQ ID NO: 3009032 - RNA, 23 nt, Human
gggcagugcuuggcccaggaguu

SEQ ID NO: 3009033 - RNA, 22 nt, Human
gggcagugcuuggcccaggagu

SEQ ID NO: 3009034 - RNA, 20 nt, Human
gggcagugcuuggcccagga

SEQ ID NO: 3009035 - RNA, 19 nt, Human
gggcagugcuuggcccagg

SEQ ID NO: 3009036 - RNA, 18 nt, Human
gggcagugcuuggcccag

SEQ ID NO: 3009037 - RNA, 18 nt, Human
gggauaucacuuccauga

SEQ ID NO: 3009038 - RNA, 16 nt, Human
gggcacaucauuucaa

SEQ ID NO: 3009039 - RNA, 16 nt, Human
gguuauuuuacuuuuu

SEQ ID NO: 3009040 - RNA, 23 nt, Human
ggggcagugcuuggcccaggagu

SEQ ID NO: 3009041 - RNA, 21 nt, Human
ggggcagugcuuggcccagga

SEQ ID NO: 3009042 - RNA, 20 nt, Human
uauaacaaaggauacuuauu

SEQ ID NO: 3009043 - RNA, 22 nt, Human
uauaacaaaggauacuuauuua

SEQ ID NO: 3009044 - RNA, 23 nt, Human
uauaauuccuguuuuuauuauua

SEQ ID NO: 3009045 - RNA, 23 nt, Human
uagacccucaugcugccaauauc

SEQ ID NO: 3009046 - RNA, 13 nt, Human
uagauguugcuaa

SEQ ID NO: 3009047 - RNA, 11 nt, Human
uagauguugcu

SEQ ID NO: 3009048 - RNA, 20 nt, Human
uagcagcccucaauugugaa

SEQ ID NO: 3009049 - RNA, 23 nt, Human
uagcaguaaaaaaugguguuuua

SEQ ID NO: 3009050 - RNA, 13 nt, Human
uaccaauauuuaa

SEQ ID NO: 3009051 - RNA, 16 nt, Human
uaccaauauuuaaucu

SEQ ID NO: 3009052 - RNA, 21 nt, Human
uaccaauauuuaaucuuuuau

SEQ ID NO: 3009053 - RNA, 23 nt, Human
uaccaauauuuaaucuuuuauga

SEQ ID NO: 3009054 - RNA, 13 nt, Human
uacacuugugaau

SEQ ID NO: 3009055 - RNA, 14 nt, Human
uaacaggcuuagug

SEQ ID NO: 3009056 - RNA, 21 nt, Human
uaacaggcuuagugauguaau

SEQ ID NO: 3009057 - RNA, 18 nt, Human
uaacagcaacacaaagcu

SEQ ID NO: 3009058 - RNA, 20 nt, Human
uaacagcaacacaaagcuuu

SEQ ID NO: 3009059 - RNA, 16 nt, Human
uaagaacuaaaauguu

SEQ ID NO: 3009060 - RNA, 18 nt, Human
guuuagaugaaugucagu

SEQ ID NO: 3009061 - RNA, 17 nt, Human
guuuagaugaaugucag

SEQ ID NO: 3009062 - RNA, 18 nt, Human
guuuuuauuauuaacaaa

SEQ ID NO: 3009063 - RNA, 15 nt, Human
guuuuuauuauuaac

SEQ ID NO: 3009064 - RNA, 14 nt, Human
guuuuuauuaaaag

SEQ ID NO: 3009065 - RNA, 17 nt, Human
guuuuuauuaaaaggaa

SEQ ID NO: 3009066 - RNA, 13 nt, Human
guuuuuauuaaaa

SEQ ID NO: 3009067 - RNA, 13 nt, Human
guuuguucccugu

SEQ ID NO: 3009068 - RNA, 17 nt, Human
guuuuguguacuuuuaa

SEQ ID NO: 3009069 - RNA, 15 nt, Human
guuuuguguacuuuu

SEQ ID NO: 3009070 - RNA, 16 nt, Human
guuuuguguacuuuua

SEQ ID NO: 3009071 - RNA, 19 nt, Human
uaaauauuuugacuuguug

SEQ ID NO: 3009072 - RNA, 15 nt, Human
uaaauauuuugacuu

SEQ ID NO: 3009073 - RNA, 18 nt, Human
uaaauauuuugacuuguu

SEQ ID NO: 3009074 - RNA, 23 nt, Human
uaaauauugguugggaugacuug

SEQ ID NO: 3009075 - RNA, 22 nt, Human
uaaauauugguugggaugacuu

SEQ ID NO: 3009076 - RNA, 22 nt, Human
uaaauaucccuuggacauuuua

SEQ ID NO: 3009077 - RNA, 12 nt, Human
uaaacacauuaa

SEQ ID NO: 3009078 - RNA, 22 nt, Human
uauuuuagguguaaaauaauua

SEQ ID NO: 3009079 - RNA, 15 nt, Human
uauuuuacuuuuugg

SEQ ID NO: 3009080 - RNA, 14 nt, Human
uauuuuacuuuuug

SEQ ID NO: 3009081 - RNA, 13 nt, Human
uauuuuacuuuuu

SEQ ID NO: 3009082 - RNA, 12 nt, Human
uauuuuacuuuu

SEQ ID NO: 3009083 - RNA, 23 nt, Human
uauuucugaggagccugcaacau

SEQ ID NO: 3009084 - RNA, 23 nt, Human
uauuugaguggaguuacugaaca

SEQ ID NO: 3009085 - RNA, 12 nt, Human
uauuuauugaaa

SEQ ID NO: 3009086 - RNA, 20 nt, Human
uauuuauugaaaugauuuca

SEQ ID NO: 3009087 - RNA, 16 nt, Human
uauuuauugaaaugau

SEQ ID NO: 3009088 - RNA, 12 nt, Human
ucaaacuaacag

SEQ ID NO: 3009089 - RNA, 13 nt, Human
ucaaacuaacagg

SEQ ID NO: 3009090 - RNA, 18 nt, Human
uauuuuuguuuuuauuaa

SEQ ID NO: 3009091 - RNA, 20 nt, Human
uauuuuuguuuuuauuaaaa

SEQ ID NO: 3009092 - RNA, 18 nt, Human
ucaagcugaccuugcuga

SEQ ID NO: 3009093 - RNA, 16 nt, Human
ucagcagagugcuuua

SEQ ID NO: 3009094 - RNA, 22 nt, Human
ucagcagagugcuuuaccaauu

SEQ ID NO: 3009095 - RNA, 11 nt, Human
ucagcagagug

SEQ ID NO: 3009096 - RNA, 12 nt, Human
ucagcagagugc

SEQ ID NO: 3009097 - RNA, 15 nt, Human
ucaucuguuacacaa

SEQ ID NO: 3009098 - RNA, 17 nt, Human
ucccccuggcacugguu

SEQ ID NO: 3009099 - RNA, 15 nt, Human
ucccauucuuggccc

SEQ ID NO: 3009100 - RNA, 16 nt, Human
ucccauucuuggccca

SEQ ID NO: 3009101 - RNA, 15 nt, Human
ucucaaacuaacagg

SEQ ID NO: 3009102 - RNA, 17 nt, Human
ucucaaacuaacaggcu

SEQ ID NO: 3009103 - RNA, 14 nt, Human
ucuuuuugaaaugu

SEQ ID NO: 3009104 - RNA, 24 nt, Human
ucuguaauaaacucauuucuagca

SEQ ID NO: 3009105 - RNA, 23 nt, Human
ucuguaauaaacucauuucuagc

SEQ ID NO: 3009106 - RNA, 19 nt, Human
ucuguaauaaacucauuuc

SEQ ID NO: 3009107 - RNA, 20 nt, Human
ucuguuacacaaagaaccac

SEQ ID NO: 3009108 - RNA, 22 nt, Human
ucuucuauuuauuuauuuauuc

SEQ ID NO: 3009109 - RNA, 22 nt, Human
ucuucuauauaauuccuguuuu

SEQ ID NO: 3009110 - RNA, 12 nt, Human
ucuucuauuuau

SEQ ID NO: 3009111 - RNA, 13 nt, Human
ucuucuauauaau

SEQ ID NO: 3009112 - RNA, 15 nt, Human
ugcuuuuuuuggccu

SEQ ID NO: 3009113 - RNA, 17 nt, Human
uggccagaagucaaggc

SEQ ID NO: 3009114 - RNA, 13 nt, Human
uggguuuauuugg

SEQ ID NO: 3009115 - RNA, 18 nt, Human
uggggcagugcuuggccc

SEQ ID NO: 3009116 - RNA, 22 nt, Human
uggggcagugcuuggcccagga

SEQ ID NO: 3009117 - RNA, 20 nt, Human
uggggcagugcuuggcccag

SEQ ID NO: 3009118 - RNA, 23 nt, Human
uggggcagugcuuggcccaggag

SEQ ID NO: 3009119 - RNA, 13 nt, Human
ugcacaucuguuu

SEQ ID NO: 3009120 - RNA, 21 nt, Human
ugcacacuguccuauuauauu

SEQ ID NO: 3009121 - RNA, 23 nt, Human
ugccuaccaauauuuaaucuuuu

SEQ ID NO: 3009122 - RNA, 17 nt, Human
ugccuaccaauauuuaa

SEQ ID NO: 3009123 - RNA, 17 nt, Human
ugccuaauaugaugacu

SEQ ID NO: 3009124 - RNA, 22 nt, Human
ugccuaauaugaugacuguuuu

SEQ ID NO: 3009125 - RNA, 23 nt, Human
uguuuugccaauuugcacauuaa

SEQ ID NO: 3009126 - RNA, 18 nt, Human
uguuuuuauuauuaacaa

SEQ ID NO: 3009127 - RNA, 15 nt, Human
uguuuuuauuauuaa

SEQ ID NO: 3009128 - RNA, 19 nt, Human
ugugugcguccugucggag

SEQ ID NO: 3009129 - RNA, 15 nt, Human
uguuuaaugguaguu

SEQ ID NO: 3009130 - RNA, 21 nt, Human
uguucuccagucauuauguua

SEQ ID NO: 3009131 - RNA, 16 nt, Human
uguugaaacuuuaaga

SEQ ID NO: 3009132 - RNA, 18 nt, Human
ugucaguuguuauuuauu

SEQ ID NO: 3009133 - RNA, 17 nt, Human
ugucaguuguuauuuau

SEQ ID NO: 3009134 - RNA, 22 nt, Human
ugucaguuguuauuuauugaaa

SEQ ID NO: 3009135 - RNA, 21 nt, Human
uguaacuguuuagaugaaugu

SEQ ID NO: 3009136 - RNA, 12 nt, Human
uguguacuuuua

SEQ ID NO: 3009137 - RNA, 15 nt, Human
uguguacuuuuaaga

SEQ ID NO: 3009138 - RNA, 14 nt, Human
ugugcguccugucg

SEQ ID NO: 3009139 - RNA, 12 nt, Human
ugugaaaaaauu

SEQ ID NO: 3009140 - RNA, 17 nt, Human
ugugaaaaaauuuacuu

SEQ ID NO: 3009141 - RNA, 23 nt, Human
ugugaaaaaauuuacuuuaaacu

SEQ ID NO: 3009142 - RNA, 21 nt, Human
ugugaauaaagagggugggug

SEQ ID NO: 3009143 - RNA, 14 nt, Human
ugugaaugcagguu

SEQ ID NO: 3009144 - RNA, 20 nt, Human
ugugaaugcagguuuuauca

SEQ ID NO: 3009145 - RNA, 17 nt, Human
uuggguuuauuuggaaa

SEQ ID NO: 3009146 - RNA, 12 nt, Human
uuggguuuauuu

SEQ ID NO: 3009147 - RNA, 20 nt, Human
uuggccagaagucaaggcuu

SEQ ID NO: 3009148 - RNA, 20 nt, Human
uuguacacucauucauuacu

SEQ ID NO: 3009149 - RNA, 20 nt, Human
uugcuaacagcaacacaaag

SEQ ID NO: 3009150 - RNA, 13 nt, Human
uugcuaacagcaa

SEQ ID NO: 3009151 - RNA, 20 nt, Human
uuggacauuuuaugucuuuc

SEQ ID NO: 3009152 - RNA, 18 nt, Human
uuggacauuuuaugucuu

SEQ ID NO: 3009153 - RNA, 17 nt, Human
uuggacauuuuaugucu

SEQ ID NO: 3009154 - RNA, 16 nt, Human
uuggacauuuuauguc

SEQ ID NO: 3009155 - RNA, 15 nt, Human
uuggacauuuuaugu

SEQ ID NO: 3009156 - RNA, 21 nt, Human
uuggaaaggaaugcaaagaug

SEQ ID NO: 3009157 - RNA, 14 nt, Human
uugaaacuuuaaga

SEQ ID NO: 3009158 - RNA, 22 nt, Human
uugauugggcacaucauuucaa

SEQ ID NO: 3009159 - RNA, 19 nt, Human
uugcauacuauuaaacaug

SEQ ID NO: 3009160 - RNA, 18 nt, Human
uugcauacuauuaaacau

SEQ ID NO: 3009161 - RNA, 16 nt, Human
uugcauacuauuaaac

SEQ ID NO: 3009162 - RNA, 12 nt, Human
uugacuauuuuu

SEQ ID NO: 3009163 - RNA, 19 nt, Human
uuacuaaaaguuuugagaa

SEQ ID NO: 3009164 - RNA, 20 nt, Human
uuacuaaaaguuuugagaaa

SEQ ID NO: 3009165 - RNA, 19 nt, Human
uucaaucuggauucauauu

SEQ ID NO: 3009166 - RNA, 23 nt, Human
uucaaucuggauucauauuuaau

SEQ ID NO: 3009167 - RNA, 20 nt, Human
uucaaucuggauucauauuu

SEQ ID NO: 3009168 - RNA, 17 nt, Human
uuccacuugagugucaa

SEQ ID NO: 3009169 - RNA, 21 nt, Human
uuccacuugagugucaagcug

SEQ ID NO: 3009170 - RNA, 15 nt, Human
uucaguuuaucuguu

SEQ ID NO: 3009171 - RNA, 18 nt, Human
uucaguuuaucuguucau

SEQ ID NO: 3009172 - RNA, 21 nt, Human
uucuauuuauuuauuuauuca

SEQ ID NO: 3009173 - RNA, 14 nt, Human
uucuauuuauuugu

SEQ ID NO: 3009174 - RNA, 17 nt, Human
uucuccagucauuaugu

SEQ ID NO: 3009175 - RNA, 19 nt, Human
uucuccagucauuauguua

SEQ ID NO: 3009176 - RNA, 15 nt, Human
uuuacuuuuuggaaa

SEQ ID NO: 3009177 - RNA, 23 nt, Human
uuuacuuuuuggaaaagaauaaa

SEQ ID NO: 3009178 - RNA, 16 nt, Human
uuuauuuauuuauuca

SEQ ID NO: 3009179 - RNA, 22 nt, Human
uuuauuuggaaaggaaugcaaa

SEQ ID NO: 3009180 - RNA, 22 nt, Human
uuuuaucagaacuauguuuuug

SEQ ID NO: 3009181 - RNA, 15 nt, Human
uuuuauauucucagc

SEQ ID NO: 3009182 - RNA, 13 nt, Human
uuuuauauagcaa

SEQ ID NO: 3009183 - RNA, 23 nt, Human
uuuucaauaacuggaacacucua

SEQ ID NO: 3009184 - RNA, 13 nt, Human
uuuucaauaacug

SEQ ID NO: 3009185 - RNA, 16 nt, Human
uuuucaauaacuggaa

SEQ ID NO: 3009186 - RNA, 19 nt, Human
uuuucaauaacuggaacac

SEQ ID NO: 3009187 - RNA, 11 nt, Human
uuugcagagua

SEQ ID NO: 3009188 - RNA, 16 nt, Human
caccaugggauuaaua

SEQ ID NO: 3009189 - RNA, 18 nt, Human
caccaucaugucuggcua

SEQ ID NO: 3009190 - RNA, 15 nt, Human
caccaucaugucugg

SEQ ID NO: 3009191 - RNA, 17 nt, Human
caccaucaugucuggcu

SEQ ID NO: 3009192 - RNA, 24 nt, Human
caccaucaagccaccaacauacuc

SEQ ID NO: 3009193 - RNA, 19 nt, Human
caccaucaagccaccaaca

SEQ ID NO: 3009194 - RNA, 17 nt, Human
caccaucaagccaccaa

SEQ ID NO: 3009195 - RNA, 16 nt, Human
caccaucaagccacca

SEQ ID NO: 3009196 - RNA, 13 nt, Human
caccaucaagcca

SEQ ID NO: 3009197 - RNA, 15 nt, Human
caccaucaagccacc

SEQ ID NO: 3009198 - RNA, 14 nt, Human
caccaucaagccac

SEQ ID NO: 3009199 - RNA, 21 nt, Human
caccauauuaccacagacaua

SEQ ID NO: 3009200 - RNA, 19 nt, Human
caccacacccagcccacuu

SEQ ID NO: 3009201 - RNA, 17 nt, Human
caccagagcccaccuug

SEQ ID NO: 3009202 - RNA, 18 nt, Human
caccagagcccaccuugg

SEQ ID NO: 3009203 - RNA, 20 nt, Human
caccagagcccaccuuggcu

SEQ ID NO: 3009204 - RNA, 22 nt, Human
caccagagcccaccuuggcuca

SEQ ID NO: 3009205 - RNA, 15 nt, Human
caccagagcccaccu

SEQ ID NO: 3009206 - RNA, 12 nt, Human
caccaagcccag

SEQ ID NO: 3009207 - RNA, 13 nt, Human
caccaagcccagu

SEQ ID NO: 3009208 - RNA, 17 nt, Human
caccaacgucugugcca

SEQ ID NO: 3009209 - RNA, 16 nt, Human
caccaacgucugugcc

SEQ ID NO: 3009210 - RNA, 22 nt, Human
cacauguccaagaagcccagga

SEQ ID NO: 3009211 - RNA, 21 nt, Human
cacauguccaagaagcccagg

SEQ ID NO: 3009212 - RNA, 19 nt, Human
cacauguccaagaagccca

SEQ ID NO: 3009213 - RNA, 18 nt, Human
cacauguccaagaagccc

SEQ ID NO: 3009214 - RNA, 22 nt, Human
cacacggacacucaaaagcugg

SEQ ID NO: 3009215 - RNA, 18 nt, Human
cacagcucuucuccaggc

SEQ ID NO: 3009216 - RNA, 17 nt, Human
cacaggaucagucugau

SEQ ID NO: 3009217 - RNA, 19 nt, Human
cacagcucuucuccaggcu

SEQ ID NO: 3009218 - RNA, 20 nt, Human
cacagcucuucuccaggcug

SEQ ID NO: 3009219 - RNA, 14 nt, Human
cacaggcccggcuc

SEQ ID NO: 3009220 - RNA, 23 nt, Human
cacaguccuuaccagcagagcac

SEQ ID NO: 3009221 - RNA, 19 nt, Human
cacaggcagguccaggguu

SEQ ID NO: 3009222 - RNA, 21 nt, Human
cacaugccucucucaggccaa

SEQ ID NO: 3009223 - RNA, 20 nt, Human
cacaugccucucucaggcca

SEQ ID NO: 3009224 - RNA, 17 nt, Human
cacauguccaagaagcc

SEQ ID NO: 3009225 - RNA, 16 nt, Human
cacauguccaagaagc

SEQ ID NO: 3009226 - RNA, 18 nt, Human
cacaugcacgugugugca

SEQ ID NO: 3009227 - RNA, 20 nt, Human
cacaugcaaggucauuuuuu

SEQ ID NO: 3009228 - RNA, 17 nt, Human
cacaugcaaggucauuu

SEQ ID NO: 3009229 - RNA, 19 nt, Human
cacaugcaaggucauuuuu

SEQ ID NO: 3009230 - RNA, 17 nt, Human
cacaugagcaucaggcc

SEQ ID NO: 3009231 - RNA, 13 nt, Human
cacaugagcauca

SEQ ID NO: 3009232 - RNA, 21 nt, Human
cacaugagcaucaggccaggc

SEQ ID NO: 3009233 - RNA, 20 nt, Human
cacaugagcaucaggccagg

SEQ ID NO: 3009234 - RNA, 19 nt, Human
cacaugagcaucaggccag

SEQ ID NO: 3009235 - RNA, 18 nt, Human
cacaugagcaucaggcca

SEQ ID NO: 3009236 - RNA, 13 nt, Human
cacccaagggccu

SEQ ID NO: 3009237 - RNA, 12 nt, Human
caauauccuaau

SEQ ID NO: 3009238 - RNA, 13 nt, Human
caauauccuaaua

SEQ ID NO: 3009239 - RNA, 14 nt, Human
caauauccuaauaa

SEQ ID NO: 3009240 - RNA, 15 nt, Human
caauauccuaauaaa

SEQ ID NO: 3009241 - RNA, 16 nt, Human
caauauccuaauaaaa

SEQ ID NO: 3009242 - RNA, 18 nt, Human
caauauccuaauaaaaag

SEQ ID NO: 3009243 - RNA, 19 nt, Human
caauauccuaauaaaaagg

SEQ ID NO: 3009244 - RNA, 20 nt, Human
caauauccuaauaaaaaggu

SEQ ID NO: 3009245 - RNA, 20 nt, Human
caaugcaaaccaucauugaa

SEQ ID NO: 3009246 - RNA, 23 nt, Human
caaugcaaaccaucauugaaauc

SEQ ID NO: 3009247 - RNA, 14 nt, Human
caaugcacugacau

SEQ ID NO: 3009248 - RNA, 13 nt, Human
caaugcacuuugu

SEQ ID NO: 3009249 - RNA, 14 nt, Human
caaugauggucacc

SEQ ID NO: 3009250 - RNA, 22 nt, Human
caaugcaaaccaucauugaaau

SEQ ID NO: 3009251 - RNA, 21 nt, Human
caaugcaaaccaucauugaaa

SEQ ID NO: 3009252 - RNA, 13 nt, Human
caaugaccuuuca

SEQ ID NO: 3009253 - RNA, 14 nt, Human
caaugaccuuucaa

SEQ ID NO: 3009254 - RNA, 13 nt, Human
caaugauggucac

SEQ ID NO: 3009255 - RNA, 16 nt, Human
caaugaccuuucaaua

SEQ ID NO: 3009256 - RNA, 15 nt, Human
caaugaccuuucaau

SEQ ID NO: 3009257 - RNA, 17 nt, Human
cacaaagguagcuuuuc

SEQ ID NO: 3009258 - RNA, 17 nt, Human
cacaaacgggcucagca

SEQ ID NO: 3009259 - RNA, 15 nt, Human
cacaaacagaggccg

SEQ ID NO: 3009260 - RNA, 14 nt, Human
caaugcacuuuguu

SEQ ID NO: 3009261 - RNA, 18 nt, Human
caaugguuuucuugugug

SEQ ID NO: 3009262 - RNA, 15 nt, Human
cacacaccagagccc

SEQ ID NO: 3009263 - RNA, 16 nt, Human
cacacaccagagccca

SEQ ID NO: 3009264 - RNA, 20 nt, Human
cacacaccagagcccaccuu

SEQ ID NO: 3009265 - RNA, 14 nt, Human
cacacacuuuggcu

SEQ ID NO: 3009266 - RNA, 21 nt, Human
cacacagaggcugccucuccc

SEQ ID NO: 3009267 - RNA, 17 nt, Human
cacaccgggcacucaga

SEQ ID NO: 3009268 - RNA, 14 nt, Human
cacacccagcccac

SEQ ID NO: 3009269 - RNA, 20 nt, Human
cacacccagcccacuucugc

SEQ ID NO: 3009270 - RNA, 13 nt, Human
cacacagcucugu

SEQ ID NO: 3009271 - RNA, 14 nt, Human
cacacagcucuguc

SEQ ID NO: 3009272 - RNA, 15 nt, Human
cacacagcucugucc

SEQ ID NO: 3009273 - RNA, 21 nt, Human
cacaccagagcccaccuuggc

SEQ ID NO: 3009274 - RNA, 22 nt, Human
cacaccagagcccaccuuggcu

SEQ ID NO: 3009275 - RNA, 13 nt, Human
cacacccagccca

SEQ ID NO: 3009276 - RNA, 23 nt, Human
caacugggguggguggggcagug

SEQ ID NO: 3009277 - RNA, 17 nt, Human
caacugcaucaagaugu

SEQ ID NO: 3009278 - RNA, 23 nt, Human
caacugcaucaagaugugacaug

SEQ ID NO: 3009279 - RNA, 20 nt, Human
caacugcaucaagaugugac

SEQ ID NO: 3009280 - RNA, 17 nt, Human
caaccugauugugucuc

SEQ ID NO: 3009281 - RNA, 21 nt, Human
caaccugauugugucucuugg

SEQ ID NO: 3009282 - RNA, 19 nt, Human
caaccugauugugucucuu

SEQ ID NO: 3009283 - RNA, 17 nt, Human
caacauaacucaagucu

SEQ ID NO: 3009284 - RNA, 15 nt, Human
caacauacucccauc

SEQ ID NO: 3009285 - RNA, 14 nt, Human
caacauacucccau

SEQ ID NO: 3009286 - RNA, 16 nt, Human
caacauacucccaucu

SEQ ID NO: 3009287 - RNA, 13 nt, Human
caacaggcugggc

SEQ ID NO: 3009288 - RNA, 17 nt, Human
caacaggcugggcuuca

SEQ ID NO: 3009289 - RNA, 14 nt, Human
caacaggcugggcu

SEQ ID NO: 3009290 - RNA, 14 nt, Human
caagugagacccug

SEQ ID NO: 3009291 - RNA, 23 nt, Human
caagugaaaaaggaggaagagaa

SEQ ID NO: 3009292 - RNA, 22 nt, Human
caagugaaaaaggaggaagaga

SEQ ID NO: 3009293 - RNA, 19 nt, Human
caagugauucuccugccuc

SEQ ID NO: 3009294 - RNA, 18 nt, Human
caagugauucuccugccu

SEQ ID NO: 3009295 - RNA, 19 nt, Human
caagugagacccugucuca

SEQ ID NO: 3009296 - RNA, 15 nt, Human
caagugagacccugu

SEQ ID NO: 3009297 - RNA, 20 nt, Human
caagugauucuccugccuca

SEQ ID NO: 3009298 - RNA, 21 nt, Human
caaggggaauguuugccucug

SEQ ID NO: 3009299 - RNA, 15 nt, Human
caagggccuggccug

SEQ ID NO: 3009300 - RNA, 14 nt, Human
caagggccuggccu

SEQ ID NO: 3009301 - RNA, 13 nt, Human
caagggccuggcc

SEQ ID NO: 3009302 - RNA, 23 nt, Human
caaggggaauguuugccucugcc

SEQ ID NO: 3009303 - RNA, 14 nt, Human
caaggcugucaauu

SEQ ID NO: 3009304 - RNA, 13 nt, Human
caaggcugucaau

SEQ ID NO: 3009305 - RNA, 21 nt, Human
caaggcugggggaagaagcuc

SEQ ID NO: 3009306 - RNA, 18 nt, Human
caaggcugggggaagaag

SEQ ID NO: 3009307 - RNA, 17 nt, Human
caaggauccugagccag

SEQ ID NO: 3009308 - RNA, 16 nt, Human
caaggauccugagcca

SEQ ID NO: 3009309 - RNA, 15 nt, Human
caaggauccugagcc

SEQ ID NO: 3009310 - RNA, 14 nt, Human
caaggauccugagc

SEQ ID NO: 3009311 - RNA, 17 nt, Human
caagagcccaggccucc

SEQ ID NO: 3009312 - RNA, 12 nt, Human
caagagggucug

SEQ ID NO: 3009313 - RNA, 16 nt, Human
caagagggucugagga

SEQ ID NO: 3009314 - RNA, 17 nt, Human
caagagggucugaggaa

SEQ ID NO: 3009315 - RNA, 23 nt, Human
caagacccuuguggucccacccc

SEQ ID NO: 3009316 - RNA, 22 nt, Human
caagacgcugugcugcccugcc

SEQ ID NO: 3009317 - RNA, 21 nt, Human
caagacgcugugcugcccugc

SEQ ID NO: 3009318 - RNA, 20 nt, Human
caagacgcugugcugcccug

SEQ ID NO: 3009319 - RNA, 19 nt, Human
caagacgcugugcugcccu

SEQ ID NO: 3009320 - RNA, 13 nt, Human
caagaccuucucc

SEQ ID NO: 3009321 - RNA, 21 nt, Human
caaagagguuuuaaaaaaauc

SEQ ID NO: 3009322 - RNA, 14 nt, Human
caaagagguuuuaa

SEQ ID NO: 3009323 - RNA, 20 nt, Human
caaaggguaucaggugcugc

SEQ ID NO: 3009324 - RNA, 21 nt, Human
caaaggguaucaggugcugcc

SEQ ID NO: 3009325 - RNA, 23 nt, Human
caaaggguaucaggugcugccau

SEQ ID NO: 3009326 - RNA, 17 nt, Human
caaaguggugagaggca

SEQ ID NO: 3009327 - RNA, 16 nt, Human
caaaguggugagaggc

SEQ ID NO: 3009328 - RNA, 20 nt, Human
caaaggagauuggaaggaac

SEQ ID NO: 3009329 - RNA, 14 nt, Human
caaaggagauugga

SEQ ID NO: 3009330 - RNA, 20 nt, Human
caacaggcugggcuucagug

SEQ ID NO: 3009331 - RNA, 19 nt, Human
agcaucgcuuaggagaagu

SEQ ID NO: 3009332 - RNA, 16 nt, Human
agcaucuaugugagac

SEQ ID NO: 3009333 - RNA, 22 nt, Human
agccagauuucacucuccuugg

SEQ ID NO: 3009334 - RNA, 20 nt, Human
agccagauuucacucuccuu

SEQ ID NO: 3009335 - RNA, 17 nt, Human
agccagauuucacucuc

SEQ ID NO: 3009336 - RNA, 14 nt, Human
agccagauuucacu

SEQ ID NO: 3009337 - RNA, 13 nt, Human
agcccaccuuggc

SEQ ID NO: 3009338 - RNA, 23 nt, Human
agcccaccccucaacaccucugc

SEQ ID NO: 3009339 - RNA, 19 nt, Human
agcccacgcccccacuggu

SEQ ID NO: 3009340 - RNA, 15 nt, Human
agcccacgcccccac

SEQ ID NO: 3009341 - RNA, 18 nt, Human
agcccacgcccccacugg

SEQ ID NO: 3009342 - RNA, 17 nt, Human
agcccacgcccccacug

SEQ ID NO: 3009343 - RNA, 23 nt, Human
agccagcaggcucucaggccagc

SEQ ID NO: 3009344 - RNA, 21 nt, Human
agccagcaggcucucaggcca

SEQ ID NO: 3009345 - RNA, 22 nt, Human
agccagcaggcucucaggccag

SEQ ID NO: 3009346 - RNA, 20 nt, Human
agcacuaaggugugcucuga

SEQ ID NO: 3009347 - RNA, 21 nt, Human
agcacagacccugcccugugg

SEQ ID NO: 3009348 - RNA, 17 nt, Human
agcagugcaugcugucc

SEQ ID NO: 3009349 - RNA, 20 nt, Human
agcagccuggacccugugga

SEQ ID NO: 3009350 - RNA, 18 nt, Human
agcagcguuucuaugaca

SEQ ID NO: 3009351 - RNA, 19 nt, Human
agcagcguuucuaugacac

SEQ ID NO: 3009352 - RNA, 16 nt, Human
agcagugcaugcuguc

SEQ ID NO: 3009353 - RNA, 13 nt, Human
agcagugcaugcu

SEQ ID NO: 3009354 - RNA, 16 nt, Human
agcagccuggacccug

SEQ ID NO: 3009355 - RNA, 18 nt, Human
agauucuauguuaauauu

SEQ ID NO: 3009356 - RNA, 14 nt, Human
agauucuuuccuga

SEQ ID NO: 3009357 - RNA, 22 nt, Human
agaugggugcuuggaggaagga

SEQ ID NO: 3009358 - RNA, 20 nt, Human
agaugggugcuuggaggaag

SEQ ID NO: 3009359 - RNA, 11 nt, Human
agaugaauguc

SEQ ID NO: 3009360 - RNA, 18 nt, Human
agaugacaucugucuagg

SEQ ID NO: 3009361 - RNA, 15 nt, Human
agaugaaugucaguu

SEQ ID NO: 3009362 - RNA, 18 nt, Human
agaugacauugacuauuu

SEQ ID NO: 3009363 - RNA, 23 nt, Human
agaugacauugacuauuuuuguu

SEQ ID NO: 3009364 - RNA, 18 nt, Human
agaucucuaacuucacca

SEQ ID NO: 3009365 - RNA, 13 nt, Human
agcaaaucaguuu

SEQ ID NO: 3009366 - RNA, 19 nt, Human
agcaaauucuguuuuucua

SEQ ID NO: 3009367 - RNA, 17 nt, Human
agauugcaacaggcugg

SEQ ID NO: 3009368 - RNA, 16 nt, Human
agauugcaccacugca

SEQ ID NO: 3009369 - RNA, 16 nt, Human
agauucuuuccugagg

SEQ ID NO: 3009370 - RNA, 15 nt, Human
agauucuuuccugag

SEQ ID NO: 3009371 - RNA, 16 nt, Human
agauugcaacaggcug

SEQ ID NO: 3009372 - RNA, 20 nt, Human
agagggucugaggaauccag

SEQ ID NO: 3009373 - RNA, 23 nt, Human
agaggggguggccucccaacuca

SEQ ID NO: 3009374 - RNA, 15 nt, Human
agaguugaagacaga

SEQ ID NO: 3009375 - RNA, 14 nt, Human
agaguugaagacag

SEQ ID NO: 3009376 - RNA, 13 nt, Human
agaguugaagaca

SEQ ID NO: 3009377 - RNA, 20 nt, Human
agauagccaaggccaaagga

SEQ ID NO: 3009378 - RNA, 23 nt, Human
agaaugcaguacuaacauuuauu

SEQ ID NO: 3009379 - RNA, 18 nt, Human
agaaugcucuuuacuuca

SEQ ID NO: 3009380 - RNA, 23 nt, Human
agaaugcacaaacagaggccgcc

SEQ ID NO: 3009381 - RNA, 17 nt, Human
agaaucucaaauaacua

SEQ ID NO: 3009382 - RNA, 16 nt, Human
agaagucaaggcuuag

SEQ ID NO: 3009383 - RNA, 17 nt, Human
agaagucaaggcuuaga

SEQ ID NO: 3009384 - RNA, 18 nt, Human
agaagucaaggcuuagac

SEQ ID NO: 3009385 - RNA, 19 nt, Human
agaagucaaggcuuagacc

SEQ ID NO: 3009386 - RNA, 14 nt, Human
agaagucacacagu

SEQ ID NO: 3009387 - RNA, 17 nt, Human
agaagucuuagauguau

SEQ ID NO: 3009388 - RNA, 19 nt, Human
agaagucuuagauguauau

SEQ ID NO: 3009389 - RNA, 23 nt, Human
agaagagaaugcacaaacagagg

SEQ ID NO: 3009390 - RNA, 15 nt, Human
agaagagaaugcaca

SEQ ID NO: 3009391 - RNA, 21 nt, Human
agaaccaaaaagaggcuaugu

SEQ ID NO: 3009392 - RNA, 18 nt, Human
agaaccaaaaagaggcua

SEQ ID NO: 3009393 - RNA, 17 nt, Human
agaaccaaaaagaggcu

SEQ ID NO: 3009394 - RNA, 18 nt, Human
agagaaaguacuucucca

SEQ ID NO: 3009395 - RNA, 17 nt, Human
agagcccacgcccccac

SEQ ID NO: 3009396 - RNA, 18 nt, Human
agagcccacgcccccacu

SEQ ID NO: 3009397 - RNA, 23 nt, Human
agagagcaagacgcugugcugcc

SEQ ID NO: 3009398 - RNA, 19 nt, Human
agagagcaagacgcugugc

SEQ ID NO: 3009399 - RNA, 11 nt, Human
agagagcaaga

SEQ ID NO: 3009400 - RNA, 16 nt, Human
agacucuuuggacacu

SEQ ID NO: 3009401 - RNA, 23 nt, Human
agacagcccgggcucugccuccc

SEQ ID NO: 3009402 - RNA, 22 nt, Human
agacagcccgggcucugccucc

SEQ ID NO: 3009403 - RNA, 14 nt, Human
agacaauuuauuau

SEQ ID NO: 3009404 - RNA, 21 nt, Human
agacagcccgggcucugccuc

SEQ ID NO: 3009405 - RNA, 23 nt, Human
agaccaucccugaaggccccgcc

SEQ ID NO: 3009406 - RNA, 14 nt, Human
agaccacguuucua

SEQ ID NO: 3009407 - RNA, 17 nt, Human
agacgcugugcugcccu

SEQ ID NO: 3009408 - RNA, 19 nt, Human
agacgcugugcugcccugc

SEQ ID NO: 3009409 - RNA, 18 nt, Human
agacgcugugcugcccug

SEQ ID NO: 3009410 - RNA, 20 nt, Human
agacaaugugaaaagaaaaa

SEQ ID NO: 3009411 - RNA, 23 nt, Human
agacaaugacuuacuguacauga

SEQ ID NO: 3009412 - RNA, 22 nt, Human
aggcuuagacccucaugcugcc

SEQ ID NO: 3009413 - RNA, 14 nt, Human
aggcuuagacccuc

SEQ ID NO: 3009414 - RNA, 21 nt, Human
aggcuuagacccucaugcugc

SEQ ID NO: 3009415 - RNA, 12 nt, Human
aggcuuagaccc

SEQ ID NO: 3009416 - RNA, 23 nt, Human
aggcuguaucccaugagccucag

SEQ ID NO: 3009417 - RNA, 19 nt, Human
aggcugcagugagccgaga

SEQ ID NO: 3009418 - RNA, 17 nt, Human
aggcugcagugagccga

SEQ ID NO: 3009419 - RNA, 12 nt, Human
aggcugucaauu

SEQ ID NO: 3009420 - RNA, 24 nt, Human
aggcuguaucccaugagccucagc

SEQ ID NO: 3009421 - RNA, 20 nt, Human
aggcccucugcccacucccu

SEQ ID NO: 3009422 - RNA, 19 nt, Human
aggcccucugcccacuccc

SEQ ID NO: 3009423 - RNA, 18 nt, Human
agggccuggccugagcug

SEQ ID NO: 3009424 - RNA, 14 nt, Human
agggccuggcucag

SEQ ID NO: 3009425 - RNA, 13 nt, Human
agggccuggcuca

SEQ ID NO: 3009426 - RNA, 18 nt, Human
agggccuggcucaggugg

SEQ ID NO: 3009427 - RNA, 12 nt, Human
aggccagcugcu

SEQ ID NO: 3009428 - RNA, 23 nt, Human
aggcauuccccaggaggccagcc

SEQ ID NO: 3009429 - RNA, 22 nt, Human
aggcauuccccaggaggccagc

SEQ ID NO: 3009430 - RNA, 21 nt, Human
aggcauuccccaggaggccag

SEQ ID NO: 3009431 - RNA, 20 nt, Human
aggcauguucucugaggaca

SEQ ID NO: 3009432 - RNA, 22 nt, Human
aggcauguucucugaggacacu

SEQ ID NO: 3009433 - RNA, 24 nt, Human
aggcaugugaugagaggaaaucac

SEQ ID NO: 3009434 - RNA, 23 nt, Human
aggcaugugaugagaggaaauca

SEQ ID NO: 3009435 - RNA, 14 nt, Human
aggccaugggccuc

SEQ ID NO: 3009436 - RNA, 16 nt, Human
aggccaugggccuccu

SEQ ID NO: 3009437 - RNA, 15 nt, Human
aggcccucugcccac

SEQ ID NO: 3009438 - RNA, 17 nt, Human
aggcccucugcccacuc

SEQ ID NO: 3009439 - RNA, 23 nt, Human
aggccaggcccucugcccacucc

SEQ ID NO: 3009440 - RNA, 19 nt, Human
aggccaggcccucugccca

SEQ ID NO: 3009441 - RNA, 18 nt, Human
aggccaggcccucugccc

SEQ ID NO: 3009442 - RNA, 17 nt, Human
aggccaggcccucugcc

SEQ ID NO: 3009443 - RNA, 16 nt, Human
aggccaggcccucugc

SEQ ID NO: 3009444 - RNA, 16 nt, Human
aggccagcugcuuggg

SEQ ID NO: 3009445 - RNA, 14 nt, Human
aggccagcugcuug

SEQ ID NO: 3009446 - RNA, 13 nt, Human
aggccagcugcuu

SEQ ID NO: 3009447 - RNA, 14 nt, Human
aggcagccaggcca

SEQ ID NO: 3009448 - RNA, 16 nt, Human
aggcagccaggccaca

SEQ ID NO: 3009449 - RNA, 15 nt, Human
aggcagccaggccac

SEQ ID NO: 3009450 - RNA, 13 nt, Human
aggcagauacagg

SEQ ID NO: 3009451 - RNA, 19 nt, Human
aggaaguacuggagaaaau

SEQ ID NO: 3009452 - RNA, 14 nt, Human
aggaggucucuaag

SEQ ID NO: 3009453 - RNA, 15 nt, Human
aggaggucucuaaga

SEQ ID NO: 3009454 - RNA, 12 nt, Human
aggagugagcac

SEQ ID NO: 3009455 - RNA, 14 nt, Human
aggagugagcacua

SEQ ID NO: 3009456 - RNA, 15 nt, Human
aggaaguacuggaga

SEQ ID NO: 3009457 - RNA, 11 nt, Human
aggaaguacug

SEQ ID NO: 3009458 - RNA, 14 nt, Human
aggaagguagaaau

SEQ ID NO: 3009459 - RNA, 23 nt, Human
aggaacaaggcaaggcugucaau

SEQ ID NO: 3009460 - RNA, 12 nt, Human
aggaacacuccu

SEQ ID NO: 3009461 - RNA, 23 nt, Human
aggaacuuaaauaaugugaaacu

SEQ ID NO: 3009462 - RNA, 15 nt, Human
aggaacacuccuuca

SEQ ID NO: 3009463 - RNA, 21 nt, Human
agcuuuguuuguugucagcug

SEQ ID NO: 3009464 - RNA, 22 nt, Human
agcucaccagccccagugccca

SEQ ID NO: 3009465 - RNA, 23 nt, Human
agcucaccagccccagugcccac

SEQ ID NO: 3009466 - RNA, 21 nt, Human
agcugacuuuucuguccgagc

SEQ ID NO: 3009467 - RNA, 15 nt, Human
agcugacuuuucugu

SEQ ID NO: 3009468 - RNA, 15 nt, Human
agcuggucccacuca

SEQ ID NO: 3009469 - RNA, 22 nt, Human
agcugccuguucagcuccagcu

SEQ ID NO: 3009470 - RNA, 14 nt, Human
agccuggacccugu

SEQ ID NO: 3009471 - RNA, 20 nt, Human
agccugggaggucaaggcug

SEQ ID NO: 3009472 - RNA, 18 nt, Human
agccugggcaaugugaua

SEQ ID NO: 3009473 - RNA, 20 nt, Human
agcuaacauggaaguacuau

SEQ ID NO: 3009474 - RNA, 19 nt, Human
agcuaacauggaaguacua

SEQ ID NO: 3009475 - RNA, 17 nt, Human
agcgauucuucugcuuc

SEQ ID NO: 3009476 - RNA, 19 nt, Human
agcgauucuucugcuucag

SEQ ID NO: 3009477 - RNA, 15 nt, Human
agcgauucuucugcu

SEQ ID NO: 3009478 - RNA, 13 nt, Human
agcuaaugggaca

SEQ ID NO: 3009479 - RNA, 14 nt, Human
agcuaaugggacac

SEQ ID NO: 3009480 - RNA, 15 nt, Human
agcuaaugggacacu

SEQ ID NO: 3009481 - RNA, 13 nt, Human
agcucaccagccc

SEQ ID NO: 3009482 - RNA, 14 nt, Human
agcucaccagcccc

SEQ ID NO: 3009483 - RNA, 21 nt, Human
agcucaccagccccagugccc

SEQ ID NO: 3009484 - RNA, 14 nt, Human
augagcuuaagaaa

SEQ ID NO: 3009485 - RNA, 23 nt, Human
augagcuuaagaaauuuguggaa

SEQ ID NO: 3009486 - RNA, 21 nt, Human
augagccucagcauccuggca

SEQ ID NO: 3009487 - RNA, 19 nt, Human
augagccucagcauccugg

SEQ ID NO: 3009488 - RNA, 11 nt, Human
augagccuggc

SEQ ID NO: 3009489 - RNA, 13 nt, Human
augaccuuucaau

SEQ ID NO: 3009490 - RNA, 15 nt, Human
augaccuuucaauag

SEQ ID NO: 3009491 - RNA, 23 nt, Human
augaagcauuuacuuuguguuca

SEQ ID NO: 3009492 - RNA, 12 nt, Human
augaaagacugu

SEQ ID NO: 3009493 - RNA, 23 nt, Human
augaaguaauaugcacacauuuu

SEQ ID NO: 3009494 - RNA, 14 nt, Human
augaaguaauaugc

SEQ ID NO: 3009495 - RNA, 21 nt, Human
augaaguaauaugcacacauu

SEQ ID NO: 3009496 - RNA, 23 nt, Human
aucuaggaagacuuuggaaagag

SEQ ID NO: 3009497 - RNA, 21 nt, Human
augccugguggcagcugcggu

SEQ ID NO: 3009498 - RNA, 11 nt, Human
augccuggugg

SEQ ID NO: 3009499 - RNA, 12 nt, Human
augccugguggc

SEQ ID NO: 3009500 - RNA, 13 nt, Human
augccugguggca

SEQ ID NO: 3009501 - RNA, 19 nt, Human
augccugguggcagcugcg

SEQ ID NO: 3009502 - RNA, 18 nt, Human
augccugguggcagcugc

SEQ ID NO: 3009503 - RNA, 16 nt, Human
augcuuugaucccuuc

SEQ ID NO: 3009504 - RNA, 15 nt, Human
augcucugcauguua

SEQ ID NO: 3009505 - RNA, 18 nt, Human
augcucugcauguuacau

SEQ ID NO: 3009506 - RNA, 19 nt, Human
augcucugcauguuacaua

SEQ ID NO: 3009507 - RNA, 20 nt, Human
augcuucuucagagacuccu

SEQ ID NO: 3009508 - RNA, 17 nt, Human
augcuucuucagagacu

SEQ ID NO: 3009509 - RNA, 14 nt, Human
augcuucuucagag

SEQ ID NO: 3009510 - RNA, 21 nt, Human
augggaaugaaugucagugug

SEQ ID NO: 3009511 - RNA, 16 nt, Human
auagcaagacauuaua

SEQ ID NO: 3009512 - RNA, 14 nt, Human
auagcacagacccu

SEQ ID NO: 3009513 - RNA, 20 nt, Human
aucaaaagguuaauaaagua

SEQ ID NO: 3009514 - RNA, 19 nt, Human
aucaaagagguuuuaaaaa

SEQ ID NO: 3009515 - RNA, 18 nt, Human
auauuuuuuucuuuucuu

SEQ ID NO: 3009516 - RNA, 19 nt, Human
aucaucccuuucccuuggu

SEQ ID NO: 3009517 - RNA, 15 nt, Human
aucaucccuuucccu

SEQ ID NO: 3009518 - RNA, 20 nt, Human
aucaugacaaagacugagua

SEQ ID NO: 3009519 - RNA, 15 nt, Human
aucauccuaagcuau

SEQ ID NO: 3009520 - RNA, 21 nt, Human
auccacugugccaugugccag

SEQ ID NO: 3009521 - RNA, 22 nt, Human
aucuaggaagacuuuggaaaga

SEQ ID NO: 3009522 - RNA, 18 nt, Human
agugauguaauuaugguu

SEQ ID NO: 3009523 - RNA, 19 nt, Human
agugauccucccaccucag

SEQ ID NO: 3009524 - RNA, 20 nt, Human
agugauccucccaccucagc

SEQ ID NO: 3009525 - RNA, 22 nt, Human
agugauccucccaccucagccu

SEQ ID NO: 3009526 - RNA, 22 nt, Human
agugcuacacaccuaacuuaug

SEQ ID NO: 3009527 - RNA, 19 nt, Human
agugauucuccugccucag

SEQ ID NO: 3009528 - RNA, 18 nt, Human
agugauucuccugccuca

SEQ ID NO: 3009529 - RNA, 20 nt, Human
agugauucuccugccucagc

SEQ ID NO: 3009530 - RNA, 18 nt, Human
agugccuuauggaacacu

SEQ ID NO: 3009531 - RNA, 22 nt, Human
agugccuuauggaacacucuga

SEQ ID NO: 3009532 - RNA, 21 nt, Human
agugccuuauggaacacucug

SEQ ID NO: 3009533 - RNA, 20 nt, Human
agugccuuauggaacacucu

SEQ ID NO: 3009534 - RNA, 19 nt, Human
agugccuuauggaacacuc

SEQ ID NO: 3009535 - RNA, 16 nt, Human
agugacagaggcagcc

SEQ ID NO: 3009536 - RNA, 19 nt, Human
agugacagaggcagcccca

SEQ ID NO: 3009537 - RNA, 14 nt, Human
agugacagaggcag

SEQ ID NO: 3009538 - RNA, 22 nt, Human
agucuggcagacuuucuucucu

SEQ ID NO: 3009539 - RNA, 18 nt, Human
agucuggcccuuccuuuu

SEQ ID NO: 3009540 - RNA, 21 nt, Human
agucugauucccaagcucugc

SEQ ID NO: 3009541 - RNA, 22 nt, Human
agucugauucccaagcucugcu

SEQ ID NO: 3009542 - RNA, 20 nt, Human
agucugauucccaagcucug

SEQ ID NO: 3009543 - RNA, 18 nt, Human
agucuggaaugcaguggu

SEQ ID NO: 3009544 - RNA, 16 nt, Human
agucgaggacagggag

SEQ ID NO: 3009545 - RNA, 14 nt, Human
aguccucuuuucug

SEQ ID NO: 3009546 - RNA, 18 nt, Human
aguccuuaccagcagagc

SEQ ID NO: 3009547 - RNA, 16 nt, Human
aguccuuaccagcaga

SEQ ID NO: 3009548 - RNA, 17 nt, Human
aguaacuuacuuaggug

SEQ ID NO: 3009549 - RNA, 21 nt, Human
aguaaaugggggugcauuuga

SEQ ID NO: 3009550 - RNA, 19 nt, Human
aguaaaugggggugcauuu

SEQ ID NO: 3009551 - RNA, 20 nt, Human
aguaaaugggggugcauuug

SEQ ID NO: 3009552 - RNA, 18 nt, Human
aguaaaugggggugcauu

SEQ ID NO: 3009553 - RNA, 20 nt, Human
aguacuucuccacccugcuc

SEQ ID NO: 3009554 - RNA, 19 nt, Human
aguacuucuccacccugcu

SEQ ID NO: 3009555 - RNA, 21 nt, Human
aguacuucuccacccugcucu

SEQ ID NO: 3009556 - RNA, 15 nt, Human
aguacuggagaaaau

SEQ ID NO: 3009557 - RNA, 21 nt, Human
auaagugcuauugcagagccg

SEQ ID NO: 3009558 - RNA, 12 nt, Human
auaauguuaaca

SEQ ID NO: 3009559 - RNA, 23 nt, Human
auacaaugcugugcccuaaagug

SEQ ID NO: 3009560 - RNA, 15 nt, Human
auacaccacuacauu

SEQ ID NO: 3009561 - RNA, 21 nt, Human
auaaagaugagugagcaugcc

SEQ ID NO: 3009562 - RNA, 17 nt, Human
auacaccacuacauucu

SEQ ID NO: 3009563 - RNA, 14 nt, Human
agugcuauugcaga

SEQ ID NO: 3009564 - RNA, 17 nt, Human
aguugaaaaacagcuga

SEQ ID NO: 3009565 - RNA, 17 nt, Human
aguugaagacagagcua

SEQ ID NO: 3009566 - RNA, 16 nt, Human
aguugaagacagagcu

SEQ ID NO: 3009567 - RNA, 18 nt, Human
aguugaaaaacagcugag

SEQ ID NO: 3009568 - RNA, 21 nt, Human
aguuccaccaucaagccacca

SEQ ID NO: 3009569 - RNA, 18 nt, Human
aguuccaccaucaagcca

SEQ ID NO: 3009570 - RNA, 14 nt, Human
aguucauacccugu

SEQ ID NO: 3009571 - RNA, 17 nt, Human
aguuguuauuuauugaa

SEQ ID NO: 3009572 - RNA, 22 nt, Human
aguuguuagugugucuuagugu

SEQ ID NO: 3009573 - RNA, 17 nt, Human
aguuguuagugugucuu

SEQ ID NO: 3009574 - RNA, 13 nt, Human
aguuugcagagua

SEQ ID NO: 3009575 - RNA, 11 nt, Human
aguuugcaguu

SEQ ID NO: 3009576 - RNA, 14 nt, Human
aguuugauuaaauu

SEQ ID NO: 3009577 - RNA, 14 nt, Human
acgcacacugucug

SEQ ID NO: 3009578 - RNA, 20 nt, Human
acgauuucuguuuagauaau

SEQ ID NO: 3009579 - RNA, 23 nt, Human
acgauuucuguuuagauaauaca

SEQ ID NO: 3009580 - RNA, 19 nt, Human
acgauuucuguuuagauaa

SEQ ID NO: 3009581 - RNA, 17 nt, Human
acggacacucaaaagcu

SEQ ID NO: 3009582 - RNA, 19 nt, Human
acggaauaguuggcuagga

SEQ ID NO: 3009583 - RNA, 15 nt, Human
acggaauaguuggcu

SEQ ID NO: 3009584 - RNA, 13 nt, Human
acgucugugccau

SEQ ID NO: 3009585 - RNA, 12 nt, Human
acgucugugcca

SEQ ID NO: 3009586 - RNA, 19 nt, Human
acgcugugcugcccugccc

SEQ ID NO: 3009587 - RNA, 22 nt, Human
acgcugugcugcccugcccacc

SEQ ID NO: 3009588 - RNA, 18 nt, Human
acuaauggggcggugaga

SEQ ID NO: 3009589 - RNA, 15 nt, Human
accugccccucaacu

SEQ ID NO: 3009590 - RNA, 12 nt, Human
accugccccuca

SEQ ID NO: 3009591 - RNA, 22 nt, Human
accugccaggaagccagcaggc

SEQ ID NO: 3009592 - RNA, 21 nt, Human
accugccaggaagccagcagg

SEQ ID NO: 3009593 - RNA, 23 nt, Human
accugccaggaagccagcaggcu

SEQ ID NO: 3009594 - RNA, 19 nt, Human
accugccaggaagccagca

SEQ ID NO: 3009595 - RNA, 20 nt, Human
accucugccugaagucacac

SEQ ID NO: 3009596 - RNA, 12 nt, Human
accucugccuga

SEQ ID NO: 3009597 - RNA, 20 nt, Human
acccucagaugcacaugagc

SEQ ID NO: 3009598 - RNA, 14 nt, Human
acccucaggcaggu

SEQ ID NO: 3009599 - RNA, 13 nt, Human
acccucaggcagg

SEQ ID NO: 3009600 - RNA, 13 nt, Human
acccucaucacca

SEQ ID NO: 3009601 - RNA, 16 nt, Human
acccucaggcaggugg

SEQ ID NO: 3009602 - RNA, 15 nt, Human
acccucaggcaggug

SEQ ID NO: 3009603 - RNA, 14 nt, Human
acccucaugcugcc

SEQ ID NO: 3009604 - RNA, 16 nt, Human
acccucaugcugccaa

SEQ ID NO: 3009605 - RNA, 23 nt, Human
acccucaucaccaacgucugugc

SEQ ID NO: 3009606 - RNA, 22 nt, Human
acccucaugcugccaauauccu

SEQ ID NO: 3009607 - RNA, 23 nt, Human
acccuggcacuauaauguaagcu

SEQ ID NO: 3009608 - RNA, 16 nt, Human
acccuggggagaaagu

SEQ ID NO: 3009609 - RNA, 16 nt, Human
acccugugauggggcc

SEQ ID NO: 3009610 - RNA, 13 nt, Human
acccuauugcugc

SEQ ID NO: 3009611 - RNA, 19 nt, Human
acccuauugcugcuugagg

SEQ ID NO: 3009612 - RNA, 14 nt, Human
acccuauugcugcu

SEQ ID NO: 3009613 - RNA, 18 nt, Human
accgugaggccagagaca

SEQ ID NO: 3009614 - RNA, 23 nt, Human
accgugaggccagagacacaagc

SEQ ID NO: 3009615 - RNA, 12 nt, Human
accucagccucc

SEQ ID NO: 3009616 - RNA, 11 nt, Human
accucagccuc

SEQ ID NO: 3009617 - RNA, 12 nt, Human
accgggcacuca

SEQ ID NO: 3009618 - RNA, 14 nt, Human
accgggcacucaga

SEQ ID NO: 3009619 - RNA, 20 nt, Human
accgggccacagagaaagua

SEQ ID NO: 3009620 - RNA, 16 nt, Human
accgggcacucagaag

SEQ ID NO: 3009621 - RNA, 21 nt, Human
acccugugauggggcccugcc

SEQ ID NO: 3009622 - RNA, 20 nt, Human
acccugugauggggcccugc

SEQ ID NO: 3009623 - RNA, 19 nt, Human
acccugugauggggcccug

SEQ ID NO: 3009624 - RNA, 17 nt, Human
acccugugauggggccc

SEQ ID NO: 3009625 - RNA, 11 nt, Human
accucaggccu

SEQ ID NO: 3009626 - RNA, 20 nt, Human
accucaggugauccacccac

SEQ ID NO: 3009627 - RNA, 21 nt, Human
accucaggugauccacccacc

SEQ ID NO: 3009628 - RNA, 13 nt, Human
acugacacaugcu

SEQ ID NO: 3009629 - RNA, 23 nt, Human
acugaauuucuuuugccguuauu

SEQ ID NO: 3009630 - RNA, 17 nt, Human
acugacauuguuggcca

SEQ ID NO: 3009631 - RNA, 18 nt, Human
acugacauuguuggccaa

SEQ ID NO: 3009632 - RNA, 12 nt, Human
acugaauuucuu

SEQ ID NO: 3009633 - RNA, 16 nt, Human
acugauuuuuuuuucc

SEQ ID NO: 3009634 - RNA, 20 nt, Human
acugauuuuuuuuuccuuca

SEQ ID NO: 3009635 - RNA, 19 nt, Human
acugauuuuuuuuuccuuc

SEQ ID NO: 3009636 - RNA, 18 nt, Human
acugauuuuuuuuuccuu

SEQ ID NO: 3009637 - RNA, 17 nt, Human
acugauuuuuuuuuccu

SEQ ID NO: 3009638 - RNA, 23 nt, Human
acugaugggcaacccccagccug

SEQ ID NO: 3009639 - RNA, 15 nt, Human
acucuacagaggcca

SEQ ID NO: 3009640 - RNA, 22 nt, Human
acucccaucugugaaaggaaag

SEQ ID NO: 3009641 - RNA, 19 nt, Human
acuggaacacucuauaaca

SEQ ID NO: 3009642 - RNA, 14 nt, Human
acugccaugccagc

SEQ ID NO: 3009643 - RNA, 17 nt, Human
acugugccaugugccag

SEQ ID NO: 3009644 - RNA, 18 nt, Human
acugugccaugugccagg

SEQ ID NO: 3009645 - RNA, 16 nt, Human
acugugccaugugcca

SEQ ID NO: 3009646 - RNA, 19 nt, Human
acuguuucaaacuuuacua

SEQ ID NO: 3009647 - RNA, 13 nt, Human
acuguuucaaacu

SEQ ID NO: 3009648 - RNA, 15 nt, Human
acuguuucaaacuuu

SEQ ID NO: 3009649 - RNA, 18 nt, Human
acuguuucaaacuuuacu

SEQ ID NO: 3009650 - RNA, 23 nt, Human
acuuggggggcugaggugggagg

SEQ ID NO: 3009651 - RNA, 14 nt, Human
acaucauuucaaga

SEQ ID NO: 3009652 - RNA, 20 nt, Human
acauacaggaagguagaaau

SEQ ID NO: 3009653 - RNA, 16 nt, Human
acauacaauuccaaac

SEQ ID NO: 3009654 - RNA, 23 nt, Human
acaugcacagcuaacauggaagu

SEQ ID NO: 3009655 - RNA, 13 nt, Human
acaugcacgugug

SEQ ID NO: 3009656 - RNA, 20 nt, Human
acaugccucucucaggccaa

SEQ ID NO: 3009657 - RNA, 19 nt, Human
acauguuuuucuucucccu

SEQ ID NO: 3009658 - RNA, 12 nt, Human
accagagcugcc

SEQ ID NO: 3009659 - RNA, 13 nt, Human
accagagcugcca

SEQ ID NO: 3009660 - RNA, 16 nt, Human
accagagcugccaccu

SEQ ID NO: 3009661 - RNA, 14 nt, Human
accagagcugccac

SEQ ID NO: 3009662 - RNA, 13 nt, Human
accacguuucuaa

SEQ ID NO: 3009663 - RNA, 14 nt, Human
accacguuucuaaa

SEQ ID NO: 3009664 - RNA, 18 nt, Human
accacgcuggaccuugaa

SEQ ID NO: 3009665 - RNA, 14 nt, Human
accacgcuggaccu

SEQ ID NO: 3009666 - RNA, 16 nt, Human
accacgcuggaccuug

SEQ ID NO: 3009667 - RNA, 12 nt, Human
accaagcccagu

SEQ ID NO: 3009668 - RNA, 17 nt, Human
accaacgucugugccau

SEQ ID NO: 3009669 - RNA, 14 nt, Human
accaacgucugugc

SEQ ID NO: 3009670 - RNA, 23 nt, Human
acaggcacccaccaucaugucug

SEQ ID NO: 3009671 - RNA, 19 nt, Human
acagcucuucuccaggcug

SEQ ID NO: 3009672 - RNA, 20 nt, Human
acagcucuucuccaggcugu

SEQ ID NO: 3009673 - RNA, 18 nt, Human
acagcucuucuccaggcu

SEQ ID NO: 3009674 - RNA, 15 nt, Human
acaggcaaugcuggc

SEQ ID NO: 3009675 - RNA, 16 nt, Human
acaggcaaugcuggcu

SEQ ID NO: 3009676 - RNA, 14 nt, Human
acaggcacccacca

SEQ ID NO: 3009677 - RNA, 17 nt, Human
acaggcaaugcuggcug

SEQ ID NO: 3009678 - RNA, 20 nt, Human
aauuaugguuaguagaggua

SEQ ID NO: 3009679 - RNA, 13 nt, Human
aauuccuguuuuu

SEQ ID NO: 3009680 - RNA, 22 nt, Human
aauuccuguuuuuauuauuaac

SEQ ID NO: 3009681 - RNA, 21 nt, Human
aauuccuguuuuuauuauuaa

SEQ ID NO: 3009682 - RNA, 19 nt, Human
aauuccuguuuuuauuauu

SEQ ID NO: 3009683 - RNA, 19 nt, Human
aauuaugaguuauuuuuau

SEQ ID NO: 3009684 - RNA, 22 nt, Human
aauuguaaggaaugauuaauua

SEQ ID NO: 3009685 - RNA, 18 nt, Human
aauucuguuuuucuaggc

SEQ ID NO: 3009686 - RNA, 14 nt, Human
aauucuguuuuucu

SEQ ID NO: 3009687 - RNA, 21 nt, Human
aauucucauuugucacacacu

SEQ ID NO: 3009688 - RNA, 15 nt, Human
aauucucuuauccaa

SEQ ID NO: 3009689 - RNA, 15 nt, Human
aauucucuaguuuga

SEQ ID NO: 3009690 - RNA, 17 nt, Human
aauucucuaguuugauu

SEQ ID NO: 3009691 - RNA, 14 nt, Human
aauucuacuuugag

SEQ ID NO: 3009692 - RNA, 19 nt, Human
aauucucagaaucucaaau

SEQ ID NO: 3009693 - RNA, 17 nt, Human
aauuucccaaagcagug

SEQ ID NO: 3009694 - RNA, 15 nt, Human
aauuucccaaagcag

SEQ ID NO: 3009695 - RNA, 15 nt, Human
acaaguuaaauaaau

SEQ ID NO: 3009696 - RNA, 15 nt, Human
acaaggcaaggcugu

SEQ ID NO: 3009697 - RNA, 19 nt, Human
acaaggcaaggcugucaau

SEQ ID NO: 3009698 - RNA, 17 nt, Human
acaaggcaaggcuguca

SEQ ID NO: 3009699 - RNA, 16 nt, Human
acaaggcaaggcuguc

SEQ ID NO: 3009700 - RNA, 14 nt, Human
acacagcucuucuc

SEQ ID NO: 3009701 - RNA, 16 nt, Human
acacagcucuucucca

SEQ ID NO: 3009702 - RNA, 18 nt, Human
acacagcucuucuccagg

SEQ ID NO: 3009703 - RNA, 18 nt, Human
acaccagagcccaccuug

SEQ ID NO: 3009704 - RNA, 23 nt, Human
acaccagagcccaccuuggcuca

SEQ ID NO: 3009705 - RNA, 13 nt, Human
acaccagagccca

SEQ ID NO: 3009706 - RNA, 18 nt, Human
aaggcaggggaauguaug

SEQ ID NO: 3009707 - RNA, 20 nt, Human
aaggcaggggaauguaugug

SEQ ID NO: 3009708 - RNA, 15 nt, Human
aaggcaaggcuguca

SEQ ID NO: 3009709 - RNA, 13 nt, Human
aaggcaaggcugu

SEQ ID NO: 3009710 - RNA, 19 nt, Human
aagcugcacccucaggcag

SEQ ID NO: 3009711 - RNA, 13 nt, Human
aagcugcacccuc

SEQ ID NO: 3009712 - RNA, 14 nt, Human
aagauaaaugugcu

SEQ ID NO: 3009713 - RNA, 21 nt, Human
aagauaauauuaaggaagaca

SEQ ID NO: 3009714 - RNA, 19 nt, Human
aagauaauauuaaggaaga

SEQ ID NO: 3009715 - RNA, 17 nt, Human
aagauacaguuacucag

SEQ ID NO: 3009716 - RNA, 14 nt, Human
aagcggcuggcagc

SEQ ID NO: 3009717 - RNA, 15 nt, Human
aagcgugagccacug

SEQ ID NO: 3009718 - RNA, 22 nt, Human
aagacagagccccacccucaga

SEQ ID NO: 3009719 - RNA, 23 nt, Human
aagacagauacuccuccaagguu

SEQ ID NO: 3009720 - RNA, 15 nt, Human
aagaccacguuucua

SEQ ID NO: 3009721 - RNA, 17 nt, Human
aagaccacguuucuaaa

SEQ ID NO: 3009722 - RNA, 12 nt, Human
aagacuuuucuu

SEQ ID NO: 3009723 - RNA, 21 nt, Human
aagacuuuuccaacccucauc

SEQ ID NO: 3009724 - RNA, 19 nt, Human
aagacuuuucuuucagcca

SEQ ID NO: 3009725 - RNA, 13 nt, Human
aagagaaaaaaua

SEQ ID NO: 3009726 - RNA, 17 nt, Human
aagacuuuuccaacccu

SEQ ID NO: 3009727 - RNA, 22 nt, Human
aagacaaugacuuacuguacau

SEQ ID NO: 3009728 - RNA, 19 nt, Human
aagacaaugugaaaagaaa

SEQ ID NO: 3009729 - RNA, 20 nt, Human
aagacaaugugaaaagaaaa

SEQ ID NO: 3009730 - RNA, 20 nt, Human
aagaguaggaagacuuugga

SEQ ID NO: 3009731 - RNA, 21 nt, Human
aaugaaagacuguacaaagua

SEQ ID NO: 3009732 - RNA, 18 nt, Human
aaugaaagacuguacaaa

SEQ ID NO: 3009733 - RNA, 20 nt, Human
aaugaaagacuguacaaagu

SEQ ID NO: 3009734 - RNA, 20 nt, Human
aaugaugccaugaggaacaa

SEQ ID NO: 3009735 - RNA, 21 nt, Human
aaucaccgaaaacguggcugc

SEQ ID NO: 3009736 - RNA, 23 nt, Human
aaucaccgaaaacguggcugcuu

SEQ ID NO: 3009737 - RNA, 23 nt, Human
aauauguggaguucaucuugaau

SEQ ID NO: 3009738 - RNA, 13 nt, Human
aauauuaagaaag

SEQ ID NO: 3009739 - RNA, 12 nt, Human
aagugcugggau

SEQ ID NO: 3009740 - RNA, 14 nt, Human
aagugcugcauuua

SEQ ID NO: 3009741 - RNA, 22 nt, Human
aagugcugcauuuaaaagauac

SEQ ID NO: 3009742 - RNA, 17 nt, Human
aauaaugugaaacugga

SEQ ID NO: 3009743 - RNA, 22 nt, Human
aauaaugugaaacuggauuaaa

SEQ ID NO: 3009744 - RNA, 14 nt, Human
aauaaagcagcguu

SEQ ID NO: 3009745 - RNA, 19 nt, Human
aauaauguuaacauggaca

SEQ ID NO: 3009746 - RNA, 14 nt, Human
aaauagaugacauu

SEQ ID NO: 3009747 - RNA, 21 nt, Human
aaauagaugacauugacuauu

SEQ ID NO: 3009748 - RNA, 22 nt, Human
aaauagcagcccucaauuguga

SEQ ID NO: 3009749 - RNA, 19 nt, Human
aaaugcuguaacuuucuga

SEQ ID NO: 3009750 - RNA, 14 nt, Human
aaaucuuuuugcuu

SEQ ID NO: 3009751 - RNA, 13 nt, Human
aaaucuuuuugcu

SEQ ID NO: 3009752 - RNA, 19 nt, Human
aaaucucaaauuucuaaau

SEQ ID NO: 3009753 - RNA, 20 nt, Human
aaaggaugcccaaagaugca

SEQ ID NO: 3009754 - RNA, 14 nt, Human
aaaggaugcacaga

SEQ ID NO: 3009755 - RNA, 23 nt, Human
aacauggccuuugcuugaaagaa

SEQ ID NO: 3009756 - RNA, 23 nt, Human
aaccuuuugagugccuuacacaa

SEQ ID NO: 3009757 - RNA, 16 nt, Human
aaccuuuugagugccu

SEQ ID NO: 3009758 - RNA, 22 nt, Human
aacauggccuuugcuugaaaga

SEQ ID NO: 3009759 - RNA, 11 nt, Human
aacaggcagau

SEQ ID NO: 3009760 - RNA, 23 nt, Human
aaauucuucuccacuuucuagcc

SEQ ID NO: 3009761 - RNA, 15 nt, Human
aaauucuugcaaagu

SEQ ID NO: 3009762 - RNA, 17 nt, Human
aaaacacauuuuucuua

SEQ ID NO: 3009763 - RNA, 19 nt, Human
aaaacacuguucucugccc

SEQ ID NO: 3009764 - RNA, 11 nt, Human
aaaagaaaaag

SEQ ID NO: 3009765 - RNA, 14 nt, Human
aaaauaaaacuuuu

SEQ ID NO: 3009766 - RNA, 21 nt, Human
aaaaucagccugcuccagcug

SEQ ID NO: 3009767 - RNA, 17 nt, Human
aaaaucagccugcucca

SEQ ID NO: 3009768 - RNA, 16 nt, Human
aaaauaaaacuuuuua

SEQ ID NO: 3009769 - RNA, 13 nt, Human
aaaaucagccugc

SEQ ID NO: 3009770 - RNA, 16 nt, Human
aaagccuccuccagcc

SEQ ID NO: 3009771 - RNA, 20 nt, Human
aaagauauuuugcuuuguga

SEQ ID NO: 3009772 - RNA, 23 nt, Human
aaacugauuuuuuuuuccuucag

SEQ ID NO: 3009773 - RNA, 22 nt, Human
aaacugauuuuuuuuuccuuca

SEQ ID NO: 3009774 - RNA, 23 nt, Human
aaacucuuaaaacccaagugccu

SEQ ID NO: 3009775 - RNA, 12 nt, Human
aaacucuuaaaa

SEQ ID NO: 3009776 - RNA, 16 nt, Human
aaacccagcucugguc

SEQ ID NO: 3009777 - RNA, 12 nt, Human
aaacccagcucu

SEQ ID NO: 3009778 - RNA, 16 nt, Human
aaaccgccaaggcugg

SEQ ID NO: 3009779 - RNA, 15 nt, Human
aaaccgccaaggcug

SEQ ID NO: 3009780 - RNA, 15 nt, Human
aaaaucucaaauuuc

SEQ ID NO: 3009781 - RNA, 16 nt, Human
aaaaucucaaauuucu

SEQ ID NO: 3009782 - RNA, 18 nt, Human
aaaaucucaaauuucuaa

SEQ ID NO: 3009783 - RNA, 15 nt, Human
auuuaaauagaugac

SEQ ID NO: 3009784 - RNA, 14 nt, Human
auuuaaauagauga

SEQ ID NO: 3009785 - RNA, 22 nt, Human
auuuacaacugggggaggguga

SEQ ID NO: 3009786 - RNA, 17 nt, Human
auuguuuucaguguaca

SEQ ID NO: 3009787 - RNA, 14 nt, Human
auuuaaaaaaaauc

SEQ ID NO: 3009788 - RNA, 18 nt, Human
auuguuuucaguguacau

SEQ ID NO: 3009789 - RNA, 19 nt, Human
auuguuuucaguguacaug

SEQ ID NO: 3009790 - RNA, 15 nt, Human
auuuacuuuaaacua

SEQ ID NO: 3009791 - RNA, 19 nt, Human
auuuacuucuuauacauuu

SEQ ID NO: 3009792 - RNA, 20 nt, Human
auuuacuucuuauacauuug

SEQ ID NO: 3009793 - RNA, 12 nt, Human
auuuauuacaac

SEQ ID NO: 3009794 - RNA, 13 nt, Human
auuuauugaaaug

SEQ ID NO: 3009795 - RNA, 15 nt, Human
auuuauugaaaugau

SEQ ID NO: 3009796 - RNA, 22 nt, Human
auuuauugaaaugauuucacag

SEQ ID NO: 3009797 - RNA, 16 nt, Human
auuucccaaagcagug

SEQ ID NO: 3009798 - RNA, 14 nt, Human
auuucccaaagcag

SEQ ID NO: 3009799 - RNA, 17 nt, Human
auuuccguuaaaauacc

SEQ ID NO: 3009800 - RNA, 15 nt, Human
auuugagcagggcuc

SEQ ID NO: 3009801 - RNA, 15 nt, Human
auuugaggucuguuc

SEQ ID NO: 3009802 - RNA, 17 nt, Human
auuugaggucuguucuu

SEQ ID NO: 3009803 - RNA, 18 nt, Human
auuugaggucuguucuuu

SEQ ID NO: 3009804 - RNA, 21 nt, Human
auuuggugguuucagaaaugu

SEQ ID NO: 3009805 - RNA, 21 nt, Human
auuugaggucuguucuuucca

SEQ ID NO: 3009806 - RNA, 17 nt, Human
auugcaccuggauguac

SEQ ID NO: 3009807 - RNA, 16 nt, Human
auugcaacaggcuggg

SEQ ID NO: 3009808 - RNA, 17 nt, Human
auugcauacuauuaaac

SEQ ID NO: 3009809 - RNA, 18 nt, Human
auugcauacuauuaaaca

SEQ ID NO: 3009810 - RNA, 19 nt, Human
auugcaacaggcugggcuu

SEQ ID NO: 3009811 - RNA, 12 nt, Human
auugcaccacug

SEQ ID NO: 3009812 - RNA, 17 nt, Human
auugcaacaggcugggc

SEQ ID NO: 3009813 - RNA, 18 nt, Human
auugcaacaggcugggcu

SEQ ID NO: 3009814 - RNA, 13 nt, Human
auugauguuuuca

SEQ ID NO: 3009815 - RNA, 16 nt, Human
auugauguuuucauag

SEQ ID NO: 3009816 - RNA, 17 nt, Human
auugauguuuucauaga

SEQ ID NO: 3009817 - RNA, 14 nt, Human
auugaaguaaaaug

SEQ ID NO: 3009818 - RNA, 17 nt, Human
auugaaggaugcugucu

SEQ ID NO: 3009819 - RNA, 24 nt, Human
auuccuagaaacugacacaugcug

SEQ ID NO: 3009820 - RNA, 15 nt, Human
auugaaguaaaaugu

SEQ ID NO: 3009821 - RNA, 21 nt, Human
auugccuuuuuauaacuuuuu

SEQ ID NO: 3009822 - RNA, 20 nt, Human
auugccuuuuuauaacuuuu

SEQ ID NO: 3009823 - RNA, 19 nt, Human
auugccuuuuuauaacuuu

SEQ ID NO: 3009824 - RNA, 20 nt, Human
auugcauacuauuaaacaug

SEQ ID NO: 3009825 - RNA, 19 nt, Human
auugcauacuauuaaacau

SEQ ID NO: 3009826 - RNA, 22 nt, Human
auugcauacuauuaaacaugcu

SEQ ID NO: 3009827 - RNA, 23 nt, Human
auuggcuagagguucaaagauau

SEQ ID NO: 3009828 - RNA, 19 nt, Human
auuggcuagagguucaaag

SEQ ID NO: 3009829 - RNA, 20 nt, Human
auuggcuagagguucaaaga

SEQ ID NO: 3009830 - RNA, 22 nt, Human
auuggcuagagguucaaagaua

SEQ ID NO: 3009831 - RNA, 14 nt, Human
auguugcuaacagc

SEQ ID NO: 3009832 - RNA, 17 nt, Human
uuuuagaguugauacua

SEQ ID NO: 3009833 - RNA, 21 nt, Human
uuuuagacccuauugcugcuu

SEQ ID NO: 3009834 - RNA, 12 nt, Human
auguugaaagau

SEQ ID NO: 3009835 - RNA, 20 nt, Human
auguucuuucacccuuuucu

SEQ ID NO: 3009836 - RNA, 13 nt, Human
auguugcccaggc

SEQ ID NO: 3009837 - RNA, 18 nt, Human
auguugaaagaucaaaag

SEQ ID NO: 3009838 - RNA, 14 nt, Human
auguugcccaggca

SEQ ID NO: 3009839 - RNA, 15 nt, Human
auguugcccaggcag

SEQ ID NO: 3009840 - RNA, 20 nt, Human
auguuacauaagauaaaugu

SEQ ID NO: 3009841 - RNA, 19 nt, Human
auguuacauaagauaaaug

SEQ ID NO: 3009842 - RNA, 17 nt, Human
uuuguuuuuauuaaaag

SEQ ID NO: 3009843 - RNA, 18 nt, Human
uuuuaaaaaacugcugac

SEQ ID NO: 3009844 - RNA, 15 nt, Human
uuuuaguagagacag

SEQ ID NO: 3009845 - RNA, 18 nt, Human
uuuuauggcuuuugugca

SEQ ID NO: 3009846 - RNA, 19 nt, Human
uuuuauggcuuuugugcau

SEQ ID NO: 3009847 - RNA, 12 nt, Human
uuuuauuaaauu

SEQ ID NO: 3009848 - RNA, 21 nt, Human
uuuuauggcuuuugugcauua

SEQ ID NO: 3009849 - RNA, 23 nt, Human
uuuucuacucgaguuacagacaa

SEQ ID NO: 3009850 - RNA, 19 nt, Human
auuaaaacacaacaucuuu

SEQ ID NO: 3009851 - RNA, 23 nt, Human
auuaaaaaucucaaauuucuaaa

SEQ ID NO: 3009852 - RNA, 17 nt, Human
auguuggccaggcuggu

SEQ ID NO: 3009853 - RNA, 13 nt, Human
uuuucuguucuuu

SEQ ID NO: 3009854 - RNA, 23 nt, Human
uuugagaaauuuuuuuuuccagu

SEQ ID NO: 3009855 - RNA, 13 nt, Human
uuugagacagagu

SEQ ID NO: 3009856 - RNA, 18 nt, Human
uuugaccucugcagcaau

SEQ ID NO: 3009857 - RNA, 15 nt, Human
uuugauucagacagc

SEQ ID NO: 3009858 - RNA, 23 nt, Human
uuugauuaaauucuugcaaagua

SEQ ID NO: 3009859 - RNA, 14 nt, Human
uuugauccaagcug

SEQ ID NO: 3009860 - RNA, 15 nt, Human
uuugauccaagcugg

SEQ ID NO: 3009861 - RNA, 14 nt, Human
uuugacaaggggca

SEQ ID NO: 3009862 - RNA, 19 nt, Human
uuugaccucugcagcaaua

SEQ ID NO: 3009863 - RNA, 21 nt, Human
uuugaccucugcagcaauaaa

SEQ ID NO: 3009864 - RNA, 23 nt, Human
uuucccucccuuccucuuuccau

SEQ ID NO: 3009865 - RNA, 18 nt, Human
uuugauucagacagcugc

SEQ ID NO: 3009866 - RNA, 22 nt, Human
uuuggauuggaugaauuccaaa

SEQ ID NO: 3009867 - RNA, 22 nt, Human
uuugcuggggccgaaagaacag

SEQ ID NO: 3009868 - RNA, 19 nt, Human
uuugcuggggccgaaagaa

SEQ ID NO: 3009869 - RNA, 22 nt, Human
uuugggguacccacugcucugg

SEQ ID NO: 3009870 - RNA, 21 nt, Human
uuugggguacccacugcucug

SEQ ID NO: 3009871 - RNA, 13 nt, Human
uuuggcugcugaa

SEQ ID NO: 3009872 - RNA, 12 nt, Human
uuuggcugcuga

SEQ ID NO: 3009873 - RNA, 23 nt, Human
uuuguaacuguuuagaugaaugu

SEQ ID NO: 3009874 - RNA, 16 nt, Human
uuuguaauuuuuuuau

SEQ ID NO: 3009875 - RNA, 14 nt, Human
uuuguacagacaac

SEQ ID NO: 3009876 - RNA, 16 nt, Human
uuuguuucugaaaggg

SEQ ID NO: 3009877 - RNA, 14 nt, Human
uuuguuucugaaag

SEQ ID NO: 3009878 - RNA, 22 nt, Human
uuugugcauuaucuagauacug

SEQ ID NO: 3009879 - RNA, 15 nt, Human
uuugugauacaaugc

SEQ ID NO: 3009880 - RNA, 22 nt, Human
uuugugauacaaugcugugccc

SEQ ID NO: 3009881 - RNA, 19 nt, Human
uuugugcauuaucuagaua

SEQ ID NO: 3009882 - RNA, 14 nt, Human
uuugucuuaaaaag

SEQ ID NO: 3009883 - RNA, 13 nt, Human
uuugucuuaaaaa

SEQ ID NO: 3009884 - RNA, 16 nt, Human
uuugugauacaaugcu

SEQ ID NO: 3009885 - RNA, 23 nt, Human
uuugucuuaaaaaguggaaaaau

SEQ ID NO: 3009886 - RNA, 17 nt, Human
auguccaagaagcccag

SEQ ID NO: 3009887 - RNA, 16 nt, Human
auguccaagaagccca

SEQ ID NO: 3009888 - RNA, 12 nt, Human
auguaucaauga

SEQ ID NO: 3009889 - RNA, 14 nt, Human
augugagacugguu

SEQ ID NO: 3009890 - RNA, 13 nt, Human
augugagaccauu

SEQ ID NO: 3009891 - RNA, 21 nt, Human
auuccuaacuaucacugguuu

SEQ ID NO: 3009892 - RNA, 22 nt, Human
auuccccaggaggccagccuug

SEQ ID NO: 3009893 - RNA, 20 nt, Human
auuccccaggaggccagccu

SEQ ID NO: 3009894 - RNA, 19 nt, Human
auuccccaggaggccagcc

SEQ ID NO: 3009895 - RNA, 18 nt, Human
auucccaagcucugcucc

SEQ ID NO: 3009896 - RNA, 19 nt, Human
auucccaagcucugcuccu

SEQ ID NO: 3009897 - RNA, 17 nt, Human
auucccaagcucugcuc

SEQ ID NO: 3009898 - RNA, 21 nt, Human
auuaguuuugaagauucuaug

SEQ ID NO: 3009899 - RNA, 17 nt, Human
auuauugauguuuucau

SEQ ID NO: 3009900 - RNA, 15 nt, Human
uuuuugguauuugaa

SEQ ID NO: 3009901 - RNA, 18 nt, Human
auuaaguacuauguauca

SEQ ID NO: 3009902 - RNA, 16 nt, Human
auuaaguacuauguau

SEQ ID NO: 3009903 - RNA, 19 nt, Human
auuaaguacuauguaucaa

SEQ ID NO: 3009904 - RNA, 13 nt, Human
auuaaggaagaca

SEQ ID NO: 3009905 - RNA, 18 nt, Human
uuuuuggaaaagaauaaa

SEQ ID NO: 3009906 - RNA, 12 nt, Human
uuuuguguacuu

SEQ ID NO: 3009907 - RNA, 23 nt, Human
uuuugugcauuaucuagauacug

SEQ ID NO: 3009908 - RNA, 14 nt, Human
uuuuggaaaagaau

SEQ ID NO: 3009909 - RNA, 22 nt, Human
uuuuuauauucucagcagagug

SEQ ID NO: 3009910 - RNA, 21 nt, Human
uuuuuauauucucagcagagu

SEQ ID NO: 3009911 - RNA, 23 nt, Human
uuuuuauacauaaacaagaccac

SEQ ID NO: 3009912 - RNA, 20 nt, Human
uuuuguuuuuauuaaaagga

SEQ ID NO: 3009913 - RNA, 16 nt, Human
uuuuguuuuugucuua

SEQ ID NO: 3009914 - RNA, 14 nt, Human
auuacuucugcuac

SEQ ID NO: 3009915 - RNA, 12 nt, Human
auuacuucugcu

SEQ ID NO: 3009916 - RNA, 13 nt, Human
auuacuucugcua

SEQ ID NO: 3009917 - RNA, 13 nt, Human
auuagagaagaga

SEQ ID NO: 3009918 - RNA, 16 nt, Human
uuuaagacuuugguua

SEQ ID NO: 3009919 - RNA, 12 nt, Human
uuuaagagaaau

SEQ ID NO: 3009920 - RNA, 19 nt, Human
uuuaaggaugcuuguacau

SEQ ID NO: 3009921 - RNA, 21 nt, Human
uuuaagcuguuacugucuuca

SEQ ID NO: 3009922 - RNA, 15 nt, Human
uuuaaucuuuuauga

SEQ ID NO: 3009923 - RNA, 13 nt, Human
uuuaaucuuuuau

SEQ ID NO: 3009924 - RNA, 16 nt, Human
uuuaaugaaagacugu

SEQ ID NO: 3009925 - RNA, 21 nt, Human
uuuaagggcccuuuuucaaua

SEQ ID NO: 3009926 - RNA, 20 nt, Human
uuuaagggcccuuuuucaau

SEQ ID NO: 3009927 - RNA, 18 nt, Human
uuuaagggcccuuuuuca

SEQ ID NO: 3009928 - RNA, 22 nt, Human
uuuaaggaugcuuguacauaau

SEQ ID NO: 3009929 - RNA, 20 nt, Human
uuuaaggaugcuuguacaua

SEQ ID NO: 3009930 - RNA, 21 nt, Human
uuuaaggaugcuuguacauaa

SEQ ID NO: 3009931 - RNA, 11 nt, Human
uuuaaaugcac

SEQ ID NO: 3009932 - RNA, 20 nt, Human
augcaaagaugaaggucugu

SEQ ID NO: 3009933 - RNA, 21 nt, Human
augcacuuuguucuggcucuu

SEQ ID NO: 3009934 - RNA, 23 nt, Human
augcacuuuguucuggcucuucc

SEQ ID NO: 3009935 - RNA, 17 nt, Human
uuguucuugguuuguaa

SEQ ID NO: 3009936 - RNA, 19 nt, Human
uuguucuugguuuguaaau

SEQ ID NO: 3009937 - RNA, 16 nt, Human
uuguguacuuuuaaga

SEQ ID NO: 3009938 - RNA, 22 nt, Human
uugugaaugcagguuuuaucag

SEQ ID NO: 3009939 - RNA, 16 nt, Human
uuguccccgacccuug

SEQ ID NO: 3009940 - RNA, 15 nt, Human
uuguccccgacccuu

SEQ ID NO: 3009941 - RNA, 20 nt, Human
uuguccccaccgcagacagg

SEQ ID NO: 3009942 - RNA, 18 nt, Human
uuguccccaccgcagaca

SEQ ID NO: 3009943 - RNA, 13 nt, Human
uugugaggaagcc

SEQ ID NO: 3009944 - RNA, 19 nt, Human
uugugauacaaugcugugc

SEQ ID NO: 3009945 - RNA, 20 nt, Human
uugugauacaaugcugugcc

SEQ ID NO: 3009946 - RNA, 18 nt, Human
uugugaggaagccgcugg

SEQ ID NO: 3009947 - RNA, 17 nt, Human
uugugaggaagccgcug

SEQ ID NO: 3009948 - RNA, 21 nt, Human
uugucauauaagauucauauu

SEQ ID NO: 3009949 - RNA, 17 nt, Human
uugucacacacuuuggc

SEQ ID NO: 3009950 - RNA, 13 nt, Human
augaguccccugu

SEQ ID NO: 3009951 - RNA, 23 nt, Human
augaguccccuguuuguuucuga

SEQ ID NO: 3009952 - RNA, 19 nt, Human
augaggucagagccugcag

SEQ ID NO: 3009953 - RNA, 20 nt, Human
augaggucagagccugcagu

SEQ ID NO: 3009954 - RNA, 15 nt, Human
augaggucagagccu

SEQ ID NO: 3009955 - RNA, 16 nt, Human
augaggucagagccug

SEQ ID NO: 3009956 - RNA, 18 nt, Human
augaggucagagccugca

SEQ ID NO: 3009957 - RNA, 18 nt, Human
uuuaucagaacuauguuu

SEQ ID NO: 3009958 - RNA, 14 nt, Human
uuuaucagaauucu

SEQ ID NO: 3009959 - RNA, 14 nt, Human
augcuccuggccca

SEQ ID NO: 3009960 - RNA, 18 nt, Human
augcuggcuguuggcugg

SEQ ID NO: 3009961 - RNA, 19 nt, Human
augcuggcuguuggcuggg

SEQ ID NO: 3009962 - RNA, 20 nt, Human
augcuggcuguuggcugggg

SEQ ID NO: 3009963 - RNA, 18 nt, Human
auggaagacagcucuuau

SEQ ID NO: 3009964 - RNA, 17 nt, Human
auggaagacagcucuua

SEQ ID NO: 3009965 - RNA, 20 nt, Human
augcuucucacugccaugcc

SEQ ID NO: 3009966 - RNA, 16 nt, Human
augcuucucacugcca

SEQ ID NO: 3009967 - RNA, 12 nt, Human
uuucaaacuuua

SEQ ID NO: 3009968 - RNA, 16 nt, Human
uuucccuauuagagaa

SEQ ID NO: 3009969 - RNA, 11 nt, Human
uuucagaaaug

SEQ ID NO: 3009970 - RNA, 12 nt, Human
uuucagaaaugu

SEQ ID NO: 3009971 - RNA, 15 nt, Human
augcccagugagacu

SEQ ID NO: 3009972 - RNA, 16 nt, Human
augcccagugagacug

SEQ ID NO: 3009973 - RNA, 17 nt, Human
augcccagccccuucug

SEQ ID NO: 3009974 - RNA, 15 nt, Human
augcccagccccuuc

SEQ ID NO: 3009975 - RNA, 16 nt, Human
augcccagccccuucu

SEQ ID NO: 3009976 - RNA, 21 nt, Human
augccaugaggaacaaggcaa

SEQ ID NO: 3009977 - RNA, 18 nt, Human
uuuaaucuuuuaugauug

SEQ ID NO: 3009978 - RNA, 21 nt, Human
uuuaaugaaagacuguacaaa

SEQ ID NO: 3009979 - RNA, 23 nt, Human
uuuaaugaaagacuguacaaagu

SEQ ID NO: 3009980 - RNA, 20 nt, Human
augcgugcauaccacuuuug

SEQ ID NO: 3009981 - RNA, 22 nt, Human
augcgugcauaccacuuuuguu

SEQ ID NO: 3009982 - RNA, 14 nt, Human
augccucucucagg

SEQ ID NO: 3009983 - RNA, 13 nt, Human
augccucucucag

SEQ ID NO: 3009984 - RNA, 15 nt, Human
augccucucucaggc

SEQ ID NO: 3009985 - RNA, 17 nt, Human
uuuaucagaacuauguu

SEQ ID NO: 3009986 - RNA, 16 nt, Human
uuuaucagaacuaugu

SEQ ID NO: 3009987 - RNA, 14 nt, Human
uuuacuucuuauac

SEQ ID NO: 3009988 - RNA, 13 nt, Human
uuuacuucuuaua

SEQ ID NO: 3009989 - RNA, 11 nt, Human
uuuacuuaaac

SEQ ID NO: 3009990 - RNA, 16 nt, Human
uuuacugcagcuuugu

SEQ ID NO: 3009991 - RNA, 18 nt, Human
uuuaccugaagucuuugu

SEQ ID NO: 3009992 - RNA, 23 nt, Human
uugccaauuugcacauuaaauga

SEQ ID NO: 3009993 - RNA, 22 nt, Human
uugccaauuugcacauuaaaug

SEQ ID NO: 3009994 - RNA, 19 nt, Human
uugccaauuugcacauuaa

SEQ ID NO: 3009995 - RNA, 13 nt, Human
uugcccaggcagg

SEQ ID NO: 3009996 - RNA, 14 nt, Human
uugcccaggcaggu

SEQ ID NO: 3009997 - RNA, 16 nt, Human
uugcccaggcaggucu

SEQ ID NO: 3009998 - RNA, 18 nt, Human
uugcccaggcaggucuug

SEQ ID NO: 3009999 - RNA, 11 nt, Human
uugcccaggcu

SEQ ID NO: 3010000 - RNA, 12 nt, Human
uugcccaggcug

SEQ ID NO: 3010001 - RNA, 14 nt, Human
uugcccaggcuggc

SEQ ID NO: 3010002 - RNA, 23 nt, Human
uugcccaggcuggcgugcagugg

SEQ ID NO: 3010003 - RNA, 11 nt, Human
uugcccaggca

SEQ ID NO: 3010004 - RNA, 21 nt, Human
uugcaccacugcacuccagcc

SEQ ID NO: 3010005 - RNA, 14 nt, Human
uugcaauggcagcc

SEQ ID NO: 3010006 - RNA, 12 nt, Human
uugcaugaggcu

SEQ ID NO: 3010007 - RNA, 14 nt, Human
uugcaugaggcuag

SEQ ID NO: 3010008 - RNA, 15 nt, Human
uugauuaaauucuug

SEQ ID NO: 3010009 - RNA, 16 nt, Human
uugauuaaauucuugc

SEQ ID NO: 3010010 - RNA, 20 nt, Human
uugauuaaauucuugcaaag

SEQ ID NO: 3010011 - RNA, 21 nt, Human
uugauuaaauucuugcaaagu

SEQ ID NO: 3010012 - RNA, 23 nt, Human
uugauguucuuucacccuuuucu

SEQ ID NO: 3010013 - RNA, 18 nt, Human
aucucuugagccugggag

SEQ ID NO: 3010014 - RNA, 23 nt, Human
aucucacacaugagcaucaggcc

SEQ ID NO: 3010015 - RNA, 16 nt, Human
aucucaaauuucuaaa

SEQ ID NO: 3010016 - RNA, 17 nt, Human
aucucaaauuucuaaau

SEQ ID NO: 3010017 - RNA, 16 nt, Human
aucccuuucccuuggu

SEQ ID NO: 3010018 - RNA, 20 nt, Human
aucccuuggacauuuuaugu

SEQ ID NO: 3010019 - RNA, 21 nt, Human
aucccuuggacauuuuauguc

SEQ ID NO: 3010020 - RNA, 17 nt, Human
aucccuuggacauuuua

SEQ ID NO: 3010021 - RNA, 19 nt, Human
aucccuuggacauuuuaug

SEQ ID NO: 3010022 - RNA, 19 nt, Human
uugacaggauuauuggaaa

SEQ ID NO: 3010023 - RNA, 10 nt, Human
uugacagggc

SEQ ID NO: 3010024 - RNA, 12 nt, Human
uugacagggcac

SEQ ID NO: 3010025 - RNA, 16 nt, Human
uugacaucaacugcau

SEQ ID NO: 3010026 - RNA, 13 nt, Human
uugacaucaacug

SEQ ID NO: 3010027 - RNA, 11 nt, Human
uugagacagag

SEQ ID NO: 3010028 - RNA, 12 nt, Human
uugagcagggcu

SEQ ID NO: 3010029 - RNA, 16 nt, Human
uugagcagggcucagc

SEQ ID NO: 3010030 - RNA, 14 nt, Human
uugagugucaagcu

SEQ ID NO: 3010031 - RNA, 11 nt, Human
uugagugccuu

SEQ ID NO: 3010032 - RNA, 21 nt, Human
uugagugcugucuccauguuu

SEQ ID NO: 3010033 - RNA, 15 nt, Human
uugauacuacaguuu

SEQ ID NO: 3010034 - RNA, 17 nt, Human
uugauacuacaguuugu

SEQ ID NO: 3010035 - RNA, 20 nt, Human
aucuaauauguaacaagcca

SEQ ID NO: 3010036 - RNA, 23 nt, Human
aucuaauauguaacaagccaccc

SEQ ID NO: 3010037 - RNA, 18 nt, Human
aucuagauacuguaucau

SEQ ID NO: 3010038 - RNA, 19 nt, Human
aucuagauacuguaucaug

SEQ ID NO: 3010039 - RNA, 19 nt, Human
aucuaggaagacuuuggaa

SEQ ID NO: 3010040 - RNA, 18 nt, Human
aucuaggaagacuuugga

SEQ ID NO: 3010041 - RNA, 17 nt, Human
aucuaggaagacuuugg

SEQ ID NO: 3010042 - RNA, 14 nt, Human
aucucaaauuucua

SEQ ID NO: 3010043 - RNA, 23 nt, Human
aucucaaauaacuaaaagguaug

SEQ ID NO: 3010044 - RNA, 14 nt, Human
aucucaaauaacua

SEQ ID NO: 3010045 - RNA, 21 nt, Human
aucucaaauaacuaaaaggua

SEQ ID NO: 3010046 - RNA, 19 nt, Human
aucugugaugacauucccu

SEQ ID NO: 3010047 - RNA, 21 nt, Human
aucugugaugacauucccugc

SEQ ID NO: 3010048 - RNA, 12 nt, Human
aucugucauuug

SEQ ID NO: 3010049 - RNA, 17 nt, Human
aucugucauuugagcag

SEQ ID NO: 3010050 - RNA, 22 nt, Human
aucugucauuugagcagggcuc

SEQ ID NO: 3010051 - RNA, 15 nt, Human
aucuugcucugcuga

SEQ ID NO: 3010052 - RNA, 16 nt, Human
aucuugcucugcugac

SEQ ID NO: 3010053 - RNA, 14 nt, Human
aucuugcucugcug

SEQ ID NO: 3010054 - RNA, 15 nt, Human
uugcuuugugauuuu

SEQ ID NO: 3010055 - RNA, 20 nt, Human
uugcuuugugauuuuuguaa

SEQ ID NO: 3010056 - RNA, 17 nt, Human
uuggaaaauaaauuauu

SEQ ID NO: 3010057 - RNA, 13 nt, Human
uuggcccaggagu

SEQ ID NO: 3010058 - RNA, 14 nt, Human
uuggcccaggaguu

SEQ ID NO: 3010059 - RNA, 15 nt, Human
uuggcccaggaguuu

SEQ ID NO: 3010060 - RNA, 20 nt, Human
uuggcccaggaguuuggcca

SEQ ID NO: 3010061 - RNA, 21 nt, Human
uuggcccaggaguuuggccag

SEQ ID NO: 3010062 - RNA, 22 nt, Human
uuggcccaggaguuuggccaga

SEQ ID NO: 3010063 - RNA, 20 nt, Human
uuggcccaggauuauuguca

SEQ ID NO: 3010064 - RNA, 23 nt, Human
augaaccacaucuugcucugcug

SEQ ID NO: 3010065 - RNA, 22 nt, Human
augaaccacaucuugcucugcu

SEQ ID NO: 3010066 - RNA, 17 nt, Human
augaaugaaacauuuug

SEQ ID NO: 3010067 - RNA, 18 nt, Human
uuggugguuucagaaaug

SEQ ID NO: 3010068 - RNA, 19 nt, Human
uuggugguuucagaaaugu

SEQ ID NO: 3010069 - RNA, 18 nt, Human
augaaugucagugugacu

SEQ ID NO: 3010070 - RNA, 16 nt, Human
augaaugucaguguga

SEQ ID NO: 3010071 - RNA, 17 nt, Human
uuggugucgggcaugac

SEQ ID NO: 3010072 - RNA, 19 nt, Human
uuggugucgggcaugacac

SEQ ID NO: 3010073 - RNA, 18 nt, Human
uuggugucgggcaugaca

SEQ ID NO: 3010074 - RNA, 14 nt, Human
uugguuuguaaauu

SEQ ID NO: 3010075 - RNA, 13 nt, Human
auauaagguuuuu

SEQ ID NO: 3010076 - RNA, 15 nt, Human
uucagcccucagaau

SEQ ID NO: 3010077 - RNA, 19 nt, Human
uucagccaagaauucuuaa

SEQ ID NO: 3010078 - RNA, 14 nt, Human
uucagccaagaauu

SEQ ID NO: 3010079 - RNA, 17 nt, Human
uucagaucucuaacuuc

SEQ ID NO: 3010080 - RNA, 18 nt, Human
uucacugguacucugcca

SEQ ID NO: 3010081 - RNA, 11 nt, Human
uucauagagaa

SEQ ID NO: 3010082 - RNA, 18 nt, Human
uucauagagaauauaaaa

SEQ ID NO: 3010083 - RNA, 13 nt, Human
uucauauuuaauu

SEQ ID NO: 3010084 - RNA, 16 nt, Human
uucauauuuacuucuu

SEQ ID NO: 3010085 - RNA, 21 nt, Human
uucauauuuacuucuuauaca

SEQ ID NO: 3010086 - RNA, 14 nt, Human
uucaguaauaacuc

SEQ ID NO: 3010087 - RNA, 20 nt, Human
uucauauuuaauuugaaggu

SEQ ID NO: 3010088 - RNA, 18 nt, Human
uucaucauccuaagcuau

SEQ ID NO: 3010089 - RNA, 21 nt, Human
uucaucauccuaagcuauuca

SEQ ID NO: 3010090 - RNA, 14 nt, Human
auaugucaagccau

SEQ ID NO: 3010091 - RNA, 20 nt, Human
auaugauuuaaaucagccgu

SEQ ID NO: 3010092 - RNA, 22 nt, Human
auaucugaaaauguauguguaa

SEQ ID NO: 3010093 - RNA, 21 nt, Human
uuauuucucucaucuguuaca

SEQ ID NO: 3010094 - RNA, 17 nt, Human
uucaaaauaaaaaugag

SEQ ID NO: 3010095 - RNA, 15 nt, Human
uucaaggauccugag

SEQ ID NO: 3010096 - RNA, 21 nt, Human
uucaaggauccugagccagau

SEQ ID NO: 3010097 - RNA, 19 nt, Human
uucaaggauccugagccag

SEQ ID NO: 3010098 - RNA, 18 nt, Human
uucaaggauccugagcca

SEQ ID NO: 3010099 - RNA, 16 nt, Human
uucaaggauccugagc

SEQ ID NO: 3010100 - RNA, 22 nt, Human
auagcugugauuuuugguauuu

SEQ ID NO: 3010101 - RNA, 19 nt, Human
auaggaacuuaaauaaugu

SEQ ID NO: 3010102 - RNA, 17 nt, Human
uucacauauugauuucc

SEQ ID NO: 3010103 - RNA, 22 nt, Human
uucaccacaugugcacaugcac

SEQ ID NO: 3010104 - RNA, 12 nt, Human
auaacuuuuuau

SEQ ID NO: 3010105 - RNA, 13 nt, Human
auaagauaaaugu

SEQ ID NO: 3010106 - RNA, 17 nt, Human
auaagauaaaugugcug

SEQ ID NO: 3010107 - RNA, 18 nt, Human
auagccugccucuucucu

SEQ ID NO: 3010108 - RNA, 22 nt, Human
auagcucaggugucccugcacu

SEQ ID NO: 3010109 - RNA, 20 nt, Human
auagcucaggugucccugca

SEQ ID NO: 3010110 - RNA, 21 nt, Human
auagcucaggugucccugcac

SEQ ID NO: 3010111 - RNA, 12 nt, Human
auagcugggacu

SEQ ID NO: 3010112 - RNA, 19 nt, Human
auagcucaggugucccugc

SEQ ID NO: 3010113 - RNA, 19 nt, Human
auagcugugauuuuuggua

SEQ ID NO: 3010114 - RNA, 23 nt, Human
auagcuggucuuauuuguaaagc

SEQ ID NO: 3010115 - RNA, 17 nt, Human
auagcugggacuacagg

SEQ ID NO: 3010116 - RNA, 22 nt, Human
auagcuggucuuauuuguaaag

SEQ ID NO: 3010117 - RNA, 13 nt, Human
uuauuuaaauaga

SEQ ID NO: 3010118 - RNA, 14 nt, Human
uuauuuaaauuuua

SEQ ID NO: 3010119 - RNA, 18 nt, Human
uuauuuaaugaaagacug

SEQ ID NO: 3010120 - RNA, 22 nt, Human
uuauuuaaugaaagacuguaca

SEQ ID NO: 3010121 - RNA, 11 nt, Human
uuauuuauuga

SEQ ID NO: 3010122 - RNA, 16 nt, Human
uuauuuaguuccuuga

SEQ ID NO: 3010123 - RNA, 13 nt, Human
uucucacagaaga

SEQ ID NO: 3010124 - RNA, 23 nt, Human
uucucagaaucucaaauaacuaa

SEQ ID NO: 3010125 - RNA, 13 nt, Human
uucucagaaucuc

SEQ ID NO: 3010126 - RNA, 19 nt, Human
uucucagaaucucaaauaa

SEQ ID NO: 3010127 - RNA, 22 nt, Human
uucucagaaucucaaauaacua

SEQ ID NO: 3010128 - RNA, 13 nt, Human
uucuaggccuggg

SEQ ID NO: 3010129 - RNA, 15 nt, Human
aucagcacgauuucu

SEQ ID NO: 3010130 - RNA, 16 nt, Human
aucagcacgauuucug

SEQ ID NO: 3010131 - RNA, 17 nt, Human
aucagcacgauuucugu

SEQ ID NO: 3010132 - RNA, 18 nt, Human
aucagcacgauuucuguu

SEQ ID NO: 3010133 - RNA, 22 nt, Human
aucauuaaagccugaguuugcu

SEQ ID NO: 3010134 - RNA, 13 nt, Human
aucauugaaaucu

SEQ ID NO: 3010135 - RNA, 15 nt, Human
aucauugaaaucuuu

SEQ ID NO: 3010136 - RNA, 14 nt, Human
aucauugaaaucuu

SEQ ID NO: 3010137 - RNA, 15 nt, Human
uucugaaagggacgc

SEQ ID NO: 3010138 - RNA, 19 nt, Human
aucauugaaaucuuuuugc

SEQ ID NO: 3010139 - RNA, 23 nt, Human
uucugaacuuggcgcugccccug

SEQ ID NO: 3010140 - RNA, 16 nt, Human
uucugccgcagcccug

SEQ ID NO: 3010141 - RNA, 23 nt, Human
uucugccgcagcccugcagaggg

SEQ ID NO: 3010142 - RNA, 10 nt, Human
uucugggaca

SEQ ID NO: 3010143 - RNA, 11 nt, Human
uucugggacac

SEQ ID NO: 3010144 - RNA, 22 nt, Human
uucugggacacaguucaauucu

SEQ ID NO: 3010145 - RNA, 15 nt, Human
auccagguucagcuu

SEQ ID NO: 3010146 - RNA, 16 nt, Human
auccagguucagcuug

SEQ ID NO: 3010147 - RNA, 16 nt, Human
aucccauaugccuggg

SEQ ID NO: 3010148 - RNA, 17 nt, Human
aucccauaugccugggc

SEQ ID NO: 3010149 - RNA, 23 nt, Human
auauuucugaggagccugcaaca

SEQ ID NO: 3010150 - RNA, 17 nt, Human
auauuguuuucagugua

SEQ ID NO: 3010151 - RNA, 20 nt, Human
auauuguuuucaguguacau

SEQ ID NO: 3010152 - RNA, 20 nt, Human
auauugcauacuauuaaaca

SEQ ID NO: 3010153 - RNA, 22 nt, Human
auauugcauacuauuaaacaug

SEQ ID NO: 3010154 - RNA, 21 nt, Human
auauugcugauggugcaauga

SEQ ID NO: 3010155 - RNA, 17 nt, Human
auauugcugauggugca

SEQ ID NO: 3010156 - RNA, 18 nt, Human
auauucucagcagagugc

SEQ ID NO: 3010157 - RNA, 17 nt, Human
auauucucagcagagug

SEQ ID NO: 3010158 - RNA, 15 nt, Human
auauucucagcagag

SEQ ID NO: 3010159 - RNA, 16 nt, Human
auauucucagcagagu

SEQ ID NO: 3010160 - RNA, 16 nt, Human
auauucuguuggccag

SEQ ID NO: 3010161 - RNA, 19 nt, Human
auauugauuuccguuaaaa

SEQ ID NO: 3010162 - RNA, 21 nt, Human
auauugauuuccguuaaaaua

SEQ ID NO: 3010163 - RNA, 22 nt, Human
auauugauuuccguuaaaauac

SEQ ID NO: 3010164 - RNA, 20 nt, Human
auauguuuuaagaggcaggg

SEQ ID NO: 3010165 - RNA, 18 nt, Human
auauguuuuaagaggcag

SEQ ID NO: 3010166 - RNA, 24 nt, Human
auauuaagaaagacuaucuaaaug

SEQ ID NO: 3010167 - RNA, 22 nt, Human
auauuaaggaagacaaugugaa

SEQ ID NO: 3010168 - RNA, 14 nt, Human
uuccuucagugccu

SEQ ID NO: 3010169 - RNA, 11 nt, Human
uuccuucagug

SEQ ID NO: 3010170 - RNA, 17 nt, Human
uuccuguucccaugaga

SEQ ID NO: 3010171 - RNA, 11 nt, Human
uuccucuuucc

SEQ ID NO: 3010172 - RNA, 15 nt, Human
uuccuaauccucuag

SEQ ID NO: 3010173 - RNA, 13 nt, Human
uuccuaauccucu

SEQ ID NO: 3010174 - RNA, 13 nt, Human
aucaaguauuaua

SEQ ID NO: 3010175 - RNA, 14 nt, Human
aucaaguauuauac

SEQ ID NO: 3010176 - RNA, 18 nt, Human
aucaaguauuauaccuuu

SEQ ID NO: 3010177 - RNA, 22 nt, Human
aucacggcucacugcagccuca

SEQ ID NO: 3010178 - RNA, 18 nt, Human
ugugaugacauucccugc

SEQ ID NO: 3010179 - RNA, 18 nt, Human
ugugauggggcccugccu

SEQ ID NO: 3010180 - RNA, 20 nt, Human
ugugauggggcccugccucc

SEQ ID NO: 3010181 - RNA, 19 nt, Human
ugugauggggcccugccuc

SEQ ID NO: 3010182 - RNA, 23 nt, Human
ugugcauuuggugguuucagaaa

SEQ ID NO: 3010183 - RNA, 20 nt, Human
ugugccagguuuuuggucug

SEQ ID NO: 3010184 - RNA, 12 nt, Human
ugugccaugugc

SEQ ID NO: 3010185 - RNA, 16 nt, Human
ugugccaugugccagg

SEQ ID NO: 3010186 - RNA, 17 nt, Human
agugaggcucugcccuu

SEQ ID NO: 3010187 - RNA, 16 nt, Human
agugaggcucugcccu

SEQ ID NO: 3010188 - RNA, 14 nt, Human
agugaggcucugcc

SEQ ID NO: 3010189 - RNA, 15 nt, Human
agugaggcucugccc

SEQ ID NO: 3010190 - RNA, 15 nt, Human
agugagucgaggaca

SEQ ID NO: 3010191 - RNA, 21 nt, Human
agugaguugauagcacagacc

SEQ ID NO: 3010192 - RNA, 21 nt, Human
agugaggcucugcccuugguu

SEQ ID NO: 3010193 - RNA, 20 nt, Human
agugaggcucugcccuuggu

SEQ ID NO: 3010194 - RNA, 19 nt, Human
agugaggcucugcccuugg

SEQ ID NO: 3010195 - RNA, 21 nt, Human
ugugcccccauguaagcaccc

SEQ ID NO: 3010196 - RNA, 21 nt, Human
uguggaguucaucuugaauug

SEQ ID NO: 3010197 - RNA, 17 nt, Human
uguggaguucaucuuga

SEQ ID NO: 3010198 - RNA, 21 nt, Human
agucuucaguuugcagaguag

SEQ ID NO: 3010199 - RNA, 20 nt, Human
agucuucaguuugcagagua

SEQ ID NO: 3010200 - RNA, 18 nt, Human
agucuucaguuugcagag

SEQ ID NO: 3010201 - RNA, 23 nt, Human
agucuuagauguauauauuuccu

SEQ ID NO: 3010202 - RNA, 14 nt, Human
agucuuuguacaga

SEQ ID NO: 3010203 - RNA, 16 nt, Human
ugugacugaauuucuu

SEQ ID NO: 3010204 - RNA, 15 nt, Human
ugugacugaauuucu

SEQ ID NO: 3010205 - RNA, 19 nt, Human
ugugaaccaccacacccag

SEQ ID NO: 3010206 - RNA, 20 nt, Human
ugugaaccaccacacccagc

SEQ ID NO: 3010207 - RNA, 21 nt, Human
ugugaaccaccacacccagcc

SEQ ID NO: 3010208 - RNA, 17 nt, Human
ugugaaccaccacaccc

SEQ ID NO: 3010209 - RNA, 15 nt, Human
ugugaaaggaaagag

SEQ ID NO: 3010210 - RNA, 21 nt, Human
ugugaaaggaaagagggaggu

SEQ ID NO: 3010211 - RNA, 18 nt, Human
ugugaaaggaaagaggcu

SEQ ID NO: 3010212 - RNA, 20 nt, Human
uguuccacaaguuaaauaaa

SEQ ID NO: 3010213 - RNA, 20 nt, Human
agugugucuuagugugugca

SEQ ID NO: 3010214 - RNA, 16 nt, Human
uguucugggacacagu

SEQ ID NO: 3010215 - RNA, 13 nt, Human
uguugcccaggca

SEQ ID NO: 3010216 - RNA, 12 nt, Human
uguugcccaggc

SEQ ID NO: 3010217 - RNA, 15 nt, Human
uguugcccaggcagg

SEQ ID NO: 3010218 - RNA, 16 nt, Human
uguugcccaggcaggu

SEQ ID NO: 3010219 - RNA, 17 nt, Human
uguugcccaggcagguc

SEQ ID NO: 3010220 - RNA, 18 nt, Human
uguugcccaggcaggucu

SEQ ID NO: 3010221 - RNA, 16 nt, Human
aguggugcgaucuggg

SEQ ID NO: 3010222 - RNA, 17 nt, Human
aguggugcgaucugggu

SEQ ID NO: 3010223 - RNA, 21 nt, Human
agugguggugaacagaacaaa

SEQ ID NO: 3010224 - RNA, 17 nt, Human
aguggugguuuucuguu

SEQ ID NO: 3010225 - RNA, 18 nt, Human
aguggugguuuucuguuc

SEQ ID NO: 3010226 - RNA, 19 nt, Human
aguggugguuuucuguucu

SEQ ID NO: 3010227 - RNA, 20 nt, Human
aguggugguuuucuguucuu

SEQ ID NO: 3010228 - RNA, 21 nt, Human
aguggugguuuucuguucuuu

SEQ ID NO: 3010229 - RNA, 23 nt, Human
aguggugguuuucuguucuuucu

SEQ ID NO: 3010230 - RNA, 17 nt, Human
agugugguguuuccugg

SEQ ID NO: 3010231 - RNA, 19 nt, Human
agugugguguuuccuggca

SEQ ID NO: 3010232 - RNA, 16 nt, Human
agugugguguuuccug

SEQ ID NO: 3010233 - RNA, 23 nt, Human
uguguguuuauugucaaaguggu

SEQ ID NO: 3010234 - RNA, 19 nt, Human
uguguguuuauugucaaag

SEQ ID NO: 3010235 - RNA, 16 nt, Human
ugugucucuugguccu

SEQ ID NO: 3010236 - RNA, 21 nt, Human
ugugucuugcaauggcagccu

SEQ ID NO: 3010237 - RNA, 20 nt, Human
ugugucuugcaauggcagcc

SEQ ID NO: 3010238 - RNA, 21 nt, Human
ugugucucuugguccugcugc

SEQ ID NO: 3010239 - RNA, 20 nt, Human
ugugucucuugguccugcug

SEQ ID NO: 3010240 - RNA, 17 nt, Human
ugugucucuugguccug

SEQ ID NO: 3010241 - RNA, 20 nt, Human
agugcugggauuacaggugu

SEQ ID NO: 3010242 - RNA, 19 nt, Human
agugcugcauuuaaaagau

SEQ ID NO: 3010243 - RNA, 16 nt, Human
agugcugcauuuaaaa

SEQ ID NO: 3010244 - RNA, 17 nt, Human
agugcugcauuuaaaag

SEQ ID NO: 3010245 - RNA, 21 nt, Human
agugcugggauuacaggugug

SEQ ID NO: 3010246 - RNA, 12 nt, Human
agugcugcauuu

SEQ ID NO: 3010247 - RNA, 13 nt, Human
agugcugcauuua

SEQ ID NO: 3010248 - RNA, 23 nt, Human
agugaguugauagcacagacccu

SEQ ID NO: 3010249 - RNA, 22 nt, Human
agugaguugauagcacagaccc

SEQ ID NO: 3010250 - RNA, 15 nt, Human
uguggucccacccca

SEQ ID NO: 3010251 - RNA, 13 nt, Human
uguggucccaccc

SEQ ID NO: 3010252 - RNA, 16 nt, Human
ugugguguuuccuggc

SEQ ID NO: 3010253 - RNA, 14 nt, Human
ugugguguuuccug

SEQ ID NO: 3010254 - RNA, 21 nt, Human
uguggguuucuaaagcugcca

SEQ ID NO: 3010255 - RNA, 23 nt, Human
uguggguuucuaaagcugccagc

SEQ ID NO: 3010256 - RNA, 15 nt, Human
aguuggguuuuuuaa

SEQ ID NO: 3010257 - RNA, 18 nt, Human
aguuggucccccuuccau

SEQ ID NO: 3010258 - RNA, 23 nt, Human
aguuguuugauucagacagcugc

SEQ ID NO: 3010259 - RNA, 21 nt, Human
aguuguuugauucagacagcu

SEQ ID NO: 3010260 - RNA, 16 nt, Human
aguuggcuaggacccc

SEQ ID NO: 3010261 - RNA, 17 nt, Human
aguuggguggaugccug

SEQ ID NO: 3010262 - RNA, 21 nt, Human
aguuggguggaugccuggugg

SEQ ID NO: 3010263 - RNA, 20 nt, Human
uuaaauucuugcaaaguauc

SEQ ID NO: 3010264 - RNA, 14 nt, Human
uguugcuaacagca

SEQ ID NO: 3010265 - RNA, 19 nt, Human
uguugcccaggcaggucuu

SEQ ID NO: 3010266 - RNA, 19 nt, Human
uguuuauugucaaaguggu

SEQ ID NO: 3010267 - RNA, 17 nt, Human
uguuuauugucaaagug

SEQ ID NO: 3010268 - RNA, 22 nt, Human
uguuugagcaucgcuuaggaga

SEQ ID NO: 3010269 - RNA, 22 nt, Human
uguuugauucagacagcugccu

SEQ ID NO: 3010270 - RNA, 17 nt, Human
uguuugauucagacagc

SEQ ID NO: 3010271 - RNA, 22 nt, Human
uguuuugccaauuugcacauua

SEQ ID NO: 3010272 - RNA, 21 nt, Human
uguuuugccaauuugcacauu

SEQ ID NO: 3010273 - RNA, 17 nt, Human
uguuuugccaauuugca

SEQ ID NO: 3010274 - RNA, 19 nt, Human
uguuuugccaauuugcaca

SEQ ID NO: 3010275 - RNA, 14 nt, Human
aguucugguuccua

SEQ ID NO: 3010276 - RNA, 21 nt, Human
uguuuuauauagcaagacauu

SEQ ID NO: 3010277 - RNA, 16 nt, Human
uguuuuaucuucuaua

SEQ ID NO: 3010278 - RNA, 21 nt, Human
uguuuuauuuuaauucaguug

SEQ ID NO: 3010279 - RNA, 20 nt, Human
uguuuuccaugaguccccug

SEQ ID NO: 3010280 - RNA, 22 nt, Human
uuaagugcugcauuuaaaagau

SEQ ID NO: 3010281 - RNA, 17 nt, Human
uuaaguacuauguauca

SEQ ID NO: 3010282 - RNA, 15 nt, Human
uuaagaggcaggguc

SEQ ID NO: 3010283 - RNA, 16 nt, Human
uuaagaggcagggucu

SEQ ID NO: 3010284 - RNA, 13 nt, Human
uuaagaggcaggg

SEQ ID NO: 3010285 - RNA, 19 nt, Human
uuaauuuuuuugagacaga

SEQ ID NO: 3010286 - RNA, 23 nt, Human
auaaacaagaccacguuucuaaa

SEQ ID NO: 3010287 - RNA, 15 nt, Human
auaaacaagaccacg

SEQ ID NO: 3010288 - RNA, 22 nt, Human
auaaacaagaccacguuucuaa

SEQ ID NO: 3010289 - RNA, 15 nt, Human
uuaauucuuagcuca

SEQ ID NO: 3010290 - RNA, 23 nt, Human
uuaaugaaagacuguacaaagua

SEQ ID NO: 3010291 - RNA, 20 nt, Human
uuaaugaaagacuguacaaa

SEQ ID NO: 3010292 - RNA, 20 nt, Human
uuacauaagauaaaugugcu

SEQ ID NO: 3010293 - RNA, 19 nt, Human
uuacuauggcccuggccua

SEQ ID NO: 3010294 - RNA, 18 nt, Human
uuacucagaauucucuag

SEQ ID NO: 3010295 - RNA, 23 nt, Human
uuacucagaauucucuaguuuga

SEQ ID NO: 3010296 - RNA, 11 nt, Human
uuagacagagu

SEQ ID NO: 3010297 - RNA, 11 nt, Human
uuagaaauaua

SEQ ID NO: 3010298 - RNA, 12 nt, Human
uuagaaauauaa

SEQ ID NO: 3010299 - RNA, 14 nt, Human
uuagaaauauaauu

SEQ ID NO: 3010300 - RNA, 16 nt, Human
auaacuaaaagguaug

SEQ ID NO: 3010301 - RNA, 14 nt, Human
uuacaggaaguacu

SEQ ID NO: 3010302 - RNA, 17 nt, Human
agggcccuuuuucaaua

SEQ ID NO: 3010303 - RNA, 19 nt, Human
agggcucagcggggacagc

SEQ ID NO: 3010304 - RNA, 20 nt, Human
agggcucagcggggacagcu

SEQ ID NO: 3010305 - RNA, 22 nt, Human
agggcucagcggggacagcucc

SEQ ID NO: 3010306 - RNA, 23 nt, Human
agggcucagcggggacagcuccu

SEQ ID NO: 3010307 - RNA, 16 nt, Human
agggagggcuccagac

SEQ ID NO: 3010308 - RNA, 15 nt, Human
agggagggcuccaga

SEQ ID NO: 3010309 - RNA, 14 nt, Human
agggagggcuccag

SEQ ID NO: 3010310 - RNA, 13 nt, Human
agggagggcucca

SEQ ID NO: 3010311 - RNA, 15 nt, Human
agggagggagggcuc

SEQ ID NO: 3010312 - RNA, 16 nt, Human
ugggcccccaaaugga

SEQ ID NO: 3010313 - RNA, 21 nt, Human
ugggcccccaaauggaaaugg

SEQ ID NO: 3010314 - RNA, 20 nt, Human
ugggaggccaaggugggagg

SEQ ID NO: 3010315 - RNA, 19 nt, Human
ugggaggccaaggugggag

SEQ ID NO: 3010316 - RNA, 21 nt, Human
ugggaggaucucuugagccug

SEQ ID NO: 3010317 - RNA, 20 nt, Human
ugggaggaucucuugagccu

SEQ ID NO: 3010318 - RNA, 12 nt, Human
ugggcagaagga

SEQ ID NO: 3010319 - RNA, 18 nt, Human
ugggccaggagccuccug

SEQ ID NO: 3010320 - RNA, 12 nt, Human
ugggcagagcag

SEQ ID NO: 3010321 - RNA, 11 nt, Human
ugggcagagca

SEQ ID NO: 3010322 - RNA, 21 nt, Human
aggcccggcuccaggcuccuu

SEQ ID NO: 3010323 - RNA, 18 nt, Human
aggcccggcuccaggcuc

SEQ ID NO: 3010324 - RNA, 20 nt, Human
aggcccggcuccaggcuccu

SEQ ID NO: 3010325 - RNA, 22 nt, Human
agggaaggauacaaaagcaugu

SEQ ID NO: 3010326 - RNA, 22 nt, Human
ugggagaaccaaaaagaggcua

SEQ ID NO: 3010327 - RNA, 20 nt, Human
ugggacucaaugcacugaca

SEQ ID NO: 3010328 - RNA, 18 nt, Human
ugggacucaaugcacuga

SEQ ID NO: 3010329 - RNA, 16 nt, Human
ugggagagccuuccag

SEQ ID NO: 3010330 - RNA, 18 nt, Human
ugggaggaucucuugagc

SEQ ID NO: 3010331 - RNA, 21 nt, Human
ugggagagaagagaaugcaca

SEQ ID NO: 3010332 - RNA, 19 nt, Human
ugggagagaagagaaugca

SEQ ID NO: 3010333 - RNA, 14 nt, Human
ugggacuacaggca

SEQ ID NO: 3010334 - RNA, 15 nt, Human
ugggacuacaggcac

SEQ ID NO: 3010335 - RNA, 16 nt, Human
ugggacuacaggcacc

SEQ ID NO: 3010336 - RNA, 21 nt, Human
uggguggcaccagcagccugg

SEQ ID NO: 3010337 - RNA, 20 nt, Human
uggguggcaccagcagccug

SEQ ID NO: 3010338 - RNA, 17 nt, Human
uggguggcaccagcagc

SEQ ID NO: 3010339 - RNA, 20 nt, Human
ugguagagugugccugaagu

SEQ ID NO: 3010340 - RNA, 16 nt, Human
aggguggugaccucug

SEQ ID NO: 3010341 - RNA, 15 nt, Human
agggugggagugggc

SEQ ID NO: 3010342 - RNA, 20 nt, Human
aggggguggccucccaacuc

SEQ ID NO: 3010343 - RNA, 15 nt, Human
aggguaaggcugugg

SEQ ID NO: 3010344 - RNA, 14 nt, Human
agggucucacucug

SEQ ID NO: 3010345 - RNA, 15 nt, Human
agggucucacucugu

SEQ ID NO: 3010346 - RNA, 16 nt, Human
agggucucacucuguc

SEQ ID NO: 3010347 - RNA, 21 nt, Human
aggggaauguuugccucugcc

SEQ ID NO: 3010348 - RNA, 19 nt, Human
aggggaauguuugccucug

SEQ ID NO: 3010349 - RNA, 20 nt, Human
aggggaauguuugccucugc

SEQ ID NO: 3010350 - RNA, 13 nt, Human
aggggaaaagagg

SEQ ID NO: 3010351 - RNA, 14 nt, Human
aggggaacagacug

SEQ ID NO: 3010352 - RNA, 22 nt, Human
aggggaaaaucagccugcucca

SEQ ID NO: 3010353 - RNA, 18 nt, Human
aggggaaaaucagccugc

SEQ ID NO: 3010354 - RNA, 13 nt, Human
aggggaauguuug

SEQ ID NO: 3010355 - RNA, 17 nt, Human
ugggguacccacugcuc

SEQ ID NO: 3010356 - RNA, 18 nt, Human
ugggguacccacugcucu

SEQ ID NO: 3010357 - RNA, 19 nt, Human
ugggguacccacugcucug

SEQ ID NO: 3010358 - RNA, 15 nt, Human
ugggguaugggagag

SEQ ID NO: 3010359 - RNA, 14 nt, Human
uggggucacucugg

SEQ ID NO: 3010360 - RNA, 13 nt, Human
uggggucacucug

SEQ ID NO: 3010361 - RNA, 20 nt, Human
uggggucacucuggcagcuc

SEQ ID NO: 3010362 - RNA, 16 nt, Human
uggggucacucuggca

SEQ ID NO: 3010363 - RNA, 22 nt, Human
uggggucacucuggcagcucag

SEQ ID NO: 3010364 - RNA, 23 nt, Human
uggggcugcaccggcuggccugg

SEQ ID NO: 3010365 - RNA, 22 nt, Human
uggggcugcaccggcuggccug

SEQ ID NO: 3010366 - RNA, 12 nt, Human
uggggcccugcc

SEQ ID NO: 3010367 - RNA, 21 nt, Human
uggggccaguuggucccccuu

SEQ ID NO: 3010368 - RNA, 17 nt, Human
uggggaccucaggccug

SEQ ID NO: 3010369 - RNA, 16 nt, Human
uggggaccucaggccu

SEQ ID NO: 3010370 - RNA, 15 nt, Human
uggggaccucaggcc

SEQ ID NO: 3010371 - RNA, 14 nt, Human
uggggaccucaggc

SEQ ID NO: 3010372 - RNA, 12 nt, Human
agggcuccagac

SEQ ID NO: 3010373 - RNA, 19 nt, Human
ugucaagcugaccuugcug

SEQ ID NO: 3010374 - RNA, 16 nt, Human
uguauuuuuuuacuaa

SEQ ID NO: 3010375 - RNA, 19 nt, Human
uguauucucuccuguaccu

SEQ ID NO: 3010376 - RNA, 20 nt, Human
uguauucucuccuguaccuc

SEQ ID NO: 3010377 - RNA, 17 nt, Human
uguaucaaugaguaaca

SEQ ID NO: 3010378 - RNA, 20 nt, Human
aguaggggucugucuuuuaa

SEQ ID NO: 3010379 - RNA, 18 nt, Human
aguaggggucugucuuuu

SEQ ID NO: 3010380 - RNA, 17 nt, Human
ugucaauuacaggaagu

SEQ ID NO: 3010381 - RNA, 15 nt, Human
ugucaauuacaggaa

SEQ ID NO: 3010382 - RNA, 14 nt, Human
ugucaauuacagga

SEQ ID NO: 3010383 - RNA, 15 nt, Human
aguauuacuucugcu

SEQ ID NO: 3010384 - RNA, 17 nt, Human
aguaugguggcuggguu

SEQ ID NO: 3010385 - RNA, 18 nt, Human
aguauuacuucugcuaca

SEQ ID NO: 3010386 - RNA, 15 nt, Human
aguaugguggcuggg

SEQ ID NO: 3010387 - RNA, 16 nt, Human
aguaugguggcugggu

SEQ ID NO: 3010388 - RNA, 14 nt, Human
aguaugguggcugg

SEQ ID NO: 3010389 - RNA, 23 nt, Human
agucacacaguauuacuucugcu

SEQ ID NO: 3010390 - RNA, 19 nt, Human
agucaccccggccaccugc

SEQ ID NO: 3010391 - RNA, 15 nt, Human
agucacacagugagu

SEQ ID NO: 3010392 - RNA, 23 nt, Human
agucacacagugagucgaggaca

SEQ ID NO: 3010393 - RNA, 16 nt, Human
aguaaaauguggcagg

SEQ ID NO: 3010394 - RNA, 14 nt, Human
aguaauaugcacac

SEQ ID NO: 3010395 - RNA, 15 nt, Human
aguaauaugcacaca

SEQ ID NO: 3010396 - RNA, 16 nt, Human
uguagagccagggucu

SEQ ID NO: 3010397 - RNA, 18 nt, Human
uguagagccagggucuca

SEQ ID NO: 3010398 - RNA, 17 nt, Human
aguagaagucuuagaug

SEQ ID NO: 3010399 - RNA, 21 nt, Human
aguagaagucuuagauguaua

SEQ ID NO: 3010400 - RNA, 19 nt, Human
aguagaagucuuagaugua

SEQ ID NO: 3010401 - RNA, 20 nt, Human
aguagaagucuuagauguau

SEQ ID NO: 3010402 - RNA, 11 nt, Human
aguagagacag

SEQ ID NO: 3010403 - RNA, 20 nt, Human
uguaggcauaaagucagggg

SEQ ID NO: 3010404 - RNA, 17 nt, Human
uguaggcauaaagucag

SEQ ID NO: 3010405 - RNA, 21 nt, Human
ugguuaguagagguacacuug

SEQ ID NO: 3010406 - RNA, 14 nt, Human
ugguuauggagagg

SEQ ID NO: 3010407 - RNA, 15 nt, Human
ugguuuguaaauuaa

SEQ ID NO: 3010408 - RNA, 14 nt, Human
ugguuuucaaaaua

SEQ ID NO: 3010409 - RNA, 15 nt, Human
ugguuuucaaaauaa

SEQ ID NO: 3010410 - RNA, 17 nt, Human
ugguuuucaaaauaaaa

SEQ ID NO: 3010411 - RNA, 15 nt, Human
uguaaauagcucagg

SEQ ID NO: 3010412 - RNA, 16 nt, Human
uguaaauagcucaggu

SEQ ID NO: 3010413 - RNA, 12 nt, Human
aggugugcucug

SEQ ID NO: 3010414 - RNA, 14 nt, Human
agguuuaagcuguu

SEQ ID NO: 3010415 - RNA, 20 nt, Human
aggugucccugcacuugcag

SEQ ID NO: 3010416 - RNA, 19 nt, Human
agguggggucacucuggca

SEQ ID NO: 3010417 - RNA, 17 nt, Human
aggugugaaccaccaca

SEQ ID NO: 3010418 - RNA, 15 nt, Human
aggugugcucugauc

SEQ ID NO: 3010419 - RNA, 20 nt, Human
aggugugcucugaucaucca

SEQ ID NO: 3010420 - RNA, 14 nt, Human
aggugauccaccca

SEQ ID NO: 3010421 - RNA, 20 nt, Human
aggugauccacccaccucag

SEQ ID NO: 3010422 - RNA, 15 nt, Human
aggugggauccucca

SEQ ID NO: 3010423 - RNA, 18 nt, Human
aggugccucaagagaagg

SEQ ID NO: 3010424 - RNA, 16 nt, Human
agguggggcagcuuga

SEQ ID NO: 3010425 - RNA, 23 nt, Human
agguggggcagcuugaggguugg

SEQ ID NO: 3010426 - RNA, 17 nt, Human
aggugggauccuccagg

SEQ ID NO: 3010427 - RNA, 16 nt, Human
aggugggauccuccag

SEQ ID NO: 3010428 - RNA, 16 nt, Human
aggucuugaacuccug

SEQ ID NO: 3010429 - RNA, 13 nt, Human
aggucagagccug

SEQ ID NO: 3010430 - RNA, 16 nt, Human
uggucagauuugaacu

SEQ ID NO: 3010431 - RNA, 15 nt, Human
uggucagauuugaac

SEQ ID NO: 3010432 - RNA, 14 nt, Human
aggucagagccugc

SEQ ID NO: 3010433 - RNA, 15 nt, Human
aggucagagccugca

SEQ ID NO: 3010434 - RNA, 17 nt, Human
aggucagagccugcagu

SEQ ID NO: 3010435 - RNA, 18 nt, Human
aggucagagccugcaguu

SEQ ID NO: 3010436 - RNA, 22 nt, Human
aggugacagagugagacucugu

SEQ ID NO: 3010437 - RNA, 13 nt, Human
aggugaccccagg

SEQ ID NO: 3010438 - RNA, 17 nt, Human
aggucuugaacuccugg

SEQ ID NO: 3010439 - RNA, 13 nt, Human
aggugacagagug

SEQ ID NO: 3010440 - RNA, 15 nt, Human
aggugacagagugag

SEQ ID NO: 3010441 - RNA, 23 nt, Human
aggugagaagcagaggaaggaga

SEQ ID NO: 3010442 - RNA, 21 nt, Human
aggugagaagcagaggaagga

SEQ ID NO: 3010443 - RNA, 16 nt, Human
aggugagaagcagagg

SEQ ID NO: 3010444 - RNA, 20 nt, Human
ugguuaggcauugugggaag

SEQ ID NO: 3010445 - RNA, 18 nt, Human
ugguuaggcauuguggga

SEQ ID NO: 3010446 - RNA, 14 nt, Human
ugguggcagcugcg

SEQ ID NO: 3010447 - RNA, 13 nt, Human
ugguggcagcugc

SEQ ID NO: 3010448 - RNA, 15 nt, Human
ugguggcagcugcgg

SEQ ID NO: 3010449 - RNA, 19 nt, Human
uggugucgggcaugacacg

SEQ ID NO: 3010450 - RNA, 16 nt, Human
uggugcgaucuggguu

SEQ ID NO: 3010451 - RNA, 17 nt, Human
uggugcgaucuggguuc

SEQ ID NO: 3010452 - RNA, 20 nt, Human
agcuuaagaaauuuguggaa

SEQ ID NO: 3010453 - RNA, 20 nt, Human
agcuuaaaggggcuagagug

SEQ ID NO: 3010454 - RNA, 11 nt, Human
ugcuacacacu

SEQ ID NO: 3010455 - RNA, 14 nt, Human
ugcgguccacccag

SEQ ID NO: 3010456 - RNA, 15 nt, Human
ugcgguccacccagg

SEQ ID NO: 3010457 - RNA, 22 nt, Human
agcuugaccgugaggccagaga

SEQ ID NO: 3010458 - RNA, 20 nt, Human
agcuugaccgugaggccaga

SEQ ID NO: 3010459 - RNA, 22 nt, Human
agcuugaggguugggcuggugu

SEQ ID NO: 3010460 - RNA, 23 nt, Human
agcuugaccgugaggccagagac

SEQ ID NO: 3010461 - RNA, 14 nt, Human
aggaaaagcugcug

SEQ ID NO: 3010462 - RNA, 16 nt, Human
aggaaaagcugcugac

SEQ ID NO: 3010463 - RNA, 13 nt, Human
ugcuaucuccccc

SEQ ID NO: 3010464 - RNA, 17 nt, Human
ugcuaucucccccagcc

SEQ ID NO: 3010465 - RNA, 14 nt, Human
ugcuaucuccccca

SEQ ID NO: 3010466 - RNA, 14 nt, Human
ugcucugcugacag

SEQ ID NO: 3010467 - RNA, 15 nt, Human
ugcucugcugacaga

SEQ ID NO: 3010468 - RNA, 20 nt, Human
ugcuccagcuguucagcugg

SEQ ID NO: 3010469 - RNA, 21 nt, Human
ugcuccagcuguucagcuggu

SEQ ID NO: 3010470 - RNA, 15 nt, Human
aggaagcucagggcc

SEQ ID NO: 3010471 - RNA, 14 nt, Human
aggaagcucagggc

SEQ ID NO: 3010472 - RNA, 13 nt, Human
aggaagcucaggg

SEQ ID NO: 3010473 - RNA, 23 nt, Human
aggaaaggcuccaggagcagcca

SEQ ID NO: 3010474 - RNA, 16 nt, Human
agcugcuugggcuuca

SEQ ID NO: 3010475 - RNA, 18 nt, Human
agcugccuguucagcucc

SEQ ID NO: 3010476 - RNA, 14 nt, Human
agcugccuguucag

SEQ ID NO: 3010477 - RNA, 16 nt, Human
agcugccuguucagcu

SEQ ID NO: 3010478 - RNA, 21 nt, Human
ugccuggauggggcugcaccg

SEQ ID NO: 3010479 - RNA, 20 nt, Human
ugccuggauggggcugcacc

SEQ ID NO: 3010480 - RNA, 17 nt, Human
ugccuggauggggcugc

SEQ ID NO: 3010481 - RNA, 16 nt, Human
ugccuggauggggcug

SEQ ID NO: 3010482 - RNA, 20 nt, Human
ugccugcccaggccccugcc

SEQ ID NO: 3010483 - RNA, 22 nt, Human
ugccugcccaggccccugccac

SEQ ID NO: 3010484 - RNA, 23 nt, Human
ugccugcccaggccccugccacc

SEQ ID NO: 3010485 - RNA, 14 nt, Human
ugccucagccuccc

SEQ ID NO: 3010486 - RNA, 18 nt, Human
ugccucugccucugacac

SEQ ID NO: 3010487 - RNA, 20 nt, Human
ugccucugccucugacacac

SEQ ID NO: 3010488 - RNA, 17 nt, Human
ugccucugccucugaca

SEQ ID NO: 3010489 - RNA, 20 nt, Human
agcugggacuacaggcaccc

SEQ ID NO: 3010490 - RNA, 23 nt, Human
agcugggacuacaggcacccacc

SEQ ID NO: 3010491 - RNA, 16 nt, Human
agcugggacuacaggu

SEQ ID NO: 3010492 - RNA, 20 nt, Human
agcugggguggggaccucag

SEQ ID NO: 3010493 - RNA, 23 nt, Human
agcugggguggggaccucaggcc

SEQ ID NO: 3010494 - RNA, 22 nt, Human
agcugggguggggaccucaggc

SEQ ID NO: 3010495 - RNA, 17 nt, Human
agcugugcucuggacag

SEQ ID NO: 3010496 - RNA, 18 nt, Human
agcugugcucuggacagg

SEQ ID NO: 3010497 - RNA, 23 nt, Human
agcugugcucuggacaggcaugu

SEQ ID NO: 3010498 - RNA, 14 nt, Human
agcuguuacugucu

SEQ ID NO: 3010499 - RNA, 18 nt, Human
agcuguuacugucuucag

SEQ ID NO: 3010500 - RNA, 21 nt, Human
ugccuuacccucauguucuua

SEQ ID NO: 3010501 - RNA, 16 nt, Human
ugccuuggggacaaga

SEQ ID NO: 3010502 - RNA, 20 nt, Human
ugccuuacccucauguucuu

SEQ ID NO: 3010503 - RNA, 17 nt, Human
ugccuguugggccagga

SEQ ID NO: 3010504 - RNA, 16 nt, Human
ugccuguugggccagg

SEQ ID NO: 3010505 - RNA, 19 nt, Human
agcuguuacugucuucagu

SEQ ID NO: 3010506 - RNA, 16 nt, Human
agcuccuucuguccua

SEQ ID NO: 3010507 - RNA, 21 nt, Human
agcuccuucuguccuacucug

SEQ ID NO: 3010508 - RNA, 16 nt, Human
agcucucuccucccuu

SEQ ID NO: 3010509 - RNA, 14 nt, Human
agcucuguccuggg

SEQ ID NO: 3010510 - RNA, 17 nt, Human
agcucugguccauagag

SEQ ID NO: 3010511 - RNA, 12 nt, Human
agcucuggucca

SEQ ID NO: 3010512 - RNA, 13 nt, Human
agcucccaggcau

SEQ ID NO: 3010513 - RNA, 15 nt, Human
agcuccuucuguccu

SEQ ID NO: 3010514 - RNA, 23 nt, Human
agcucccaggcauuccccaggag

SEQ ID NO: 3010515 - RNA, 14 nt, Human
agcugccagccgag

SEQ ID NO: 3010516 - RNA, 20 nt, Human
agcugccagccgagauagcc

SEQ ID NO: 3010517 - RNA, 16 nt, Human
agcucuguccugggag

SEQ ID NO: 3010518 - RNA, 21 nt, Human
agcucuguccugggagugagc

SEQ ID NO: 3010519 - RNA, 12 nt, Human
ugccucagccuc

SEQ ID NO: 3010520 - RNA, 13 nt, Human
ugccucagccucc

SEQ ID NO: 3010521 - RNA, 12 nt, Human
ugccgcagcccu

SEQ ID NO: 3010522 - RNA, 18 nt, Human
ugcccuuaccugccagga

SEQ ID NO: 3010523 - RNA, 16 nt, Human
aggcaggggaauguau

SEQ ID NO: 3010524 - RNA, 19 nt, Human
aggcaggggaauguaugug

SEQ ID NO: 3010525 - RNA, 14 nt, Human
aggcaggggaaugu

SEQ ID NO: 3010526 - RNA, 22 nt, Human
aggcaggucuugaacuccuggc

SEQ ID NO: 3010527 - RNA, 12 nt, Human
aggcagggucuc

SEQ ID NO: 3010528 - RNA, 15 nt, Human
aggcauaaagucagg

SEQ ID NO: 3010529 - RNA, 17 nt, Human
aggcaggugggauggau

SEQ ID NO: 3010530 - RNA, 18 nt, Human
aggcauugugggaagggg

SEQ ID NO: 3010531 - RNA, 22 nt, Human
aggcauaaagucagggguuccc

SEQ ID NO: 3010532 - RNA, 18 nt, Human
aggauugcuacuguccua

SEQ ID NO: 3010533 - RNA, 15 nt, Human
aggauugcuacuguc

SEQ ID NO: 3010534 - RNA, 17 nt, Human
aggauugcuacuguccu

SEQ ID NO: 3010535 - RNA, 14 nt, Human
uggagaaaauggac

SEQ ID NO: 3010536 - RNA, 16 nt, Human
aggcaaggcugucaau

SEQ ID NO: 3010537 - RNA, 17 nt, Human
aggcaaggcugucaauu

SEQ ID NO: 3010538 - RNA, 18 nt, Human
aggcaagcaccuccugcc

SEQ ID NO: 3010539 - RNA, 19 nt, Human
aggcaagcaccuccugccu

SEQ ID NO: 3010540 - RNA, 20 nt, Human
aggcaagcaccuccugccuc

SEQ ID NO: 3010541 - RNA, 17 nt, Human
aggcaagcaccuccugc

SEQ ID NO: 3010542 - RNA, 20 nt, Human
uggagguacgaaaagagggg

SEQ ID NO: 3010543 - RNA, 20 nt, Human
aggcauuugcugaauacaga

SEQ ID NO: 3010544 - RNA, 16 nt, Human
aggcauuugcugaaua

SEQ ID NO: 3010545 - RNA, 14 nt, Human
uggagugcagugag

SEQ ID NO: 3010546 - RNA, 14 nt, Human
uggauucauauuua

SEQ ID NO: 3010547 - RNA, 17 nt, Human
uggauucauauuuaauu

SEQ ID NO: 3010548 - RNA, 20 nt, Human
uggaugccugguggcagcug

SEQ ID NO: 3010549 - RNA, 21 nt, Human
uggaugccugguggcagcugc

SEQ ID NO: 3010550 - RNA, 23 nt, Human
uggaugccugguggcagcugcgg

SEQ ID NO: 3010551 - RNA, 23 nt, Human
uggcacaucagcacgauuucugu

SEQ ID NO: 3010552 - RNA, 21 nt, Human
uggcacaucagcacgauuucu

SEQ ID NO: 3010553 - RNA, 16 nt, Human
uggcacccggccccug

SEQ ID NO: 3010554 - RNA, 18 nt, Human
uggcacccggccccugcu

SEQ ID NO: 3010555 - RNA, 19 nt, Human
uggcacccggccccugcug

SEQ ID NO: 3010556 - RNA, 20 nt, Human
uggcacccggccccugcugg

SEQ ID NO: 3010557 - RNA, 22 nt, Human
uggcagcucaccucucccuugg

SEQ ID NO: 3010558 - RNA, 21 nt, Human
uggcagcucaccucucccuug

SEQ ID NO: 3010559 - RNA, 23 nt, Human
uggcagcucaccucucccuugga

SEQ ID NO: 3010560 - RNA, 15 nt, Human
aggccagccuugacc

SEQ ID NO: 3010561 - RNA, 13 nt, Human
aggccagccuuga

SEQ ID NO: 3010562 - RNA, 13 nt, Human
aggcccagagggc

SEQ ID NO: 3010563 - RNA, 13 nt, Human
aggcccggcucca

SEQ ID NO: 3010564 - RNA, 17 nt, Human
aggcccggcuccaggcu

SEQ ID NO: 3010565 - RNA, 14 nt, Human
aggccccgcccagg

SEQ ID NO: 3010566 - RNA, 17 nt, Human
aggacuuuucuuugugg

SEQ ID NO: 3010567 - RNA, 19 nt, Human
aggacuuuucuuuguggcu

SEQ ID NO: 3010568 - RNA, 22 nt, Human
aggacuuuucuuuguggcuucc

SEQ ID NO: 3010569 - RNA, 13 nt, Human
aggagcagccaca

SEQ ID NO: 3010570 - RNA, 12 nt, Human
aggagcagccac

SEQ ID NO: 3010571 - RNA, 17 nt, Human
aggagccccgaggccuu

SEQ ID NO: 3010572 - RNA, 16 nt, Human
aggagccuccugcccu

SEQ ID NO: 3010573 - RNA, 15 nt, Human
uggaagacagcucuu

SEQ ID NO: 3010574 - RNA, 16 nt, Human
uggaagacagcucuua

SEQ ID NO: 3010575 - RNA, 21 nt, Human
uggaaauuuguuauaaugaau

SEQ ID NO: 3010576 - RNA, 23 nt, Human
uggaaauuuguuauaaugaauga

SEQ ID NO: 3010577 - RNA, 15 nt, Human
ugcuugagcucagga

SEQ ID NO: 3010578 - RNA, 17 nt, Human
aggagccuccugcccuu

SEQ ID NO: 3010579 - RNA, 17 nt, Human
ugcuuugugauuuuugu

SEQ ID NO: 3010580 - RNA, 22 nt, Human
ugcuuugugauuuuuguaauuu

SEQ ID NO: 3010581 - RNA, 20 nt, Human
ugcuuuugucuaugggacuc

SEQ ID NO: 3010582 - RNA, 23 nt, Human
ugcuuuuuaauauugauaugcuu

SEQ ID NO: 3010583 - RNA, 18 nt, Human
ugcuuuuggucuguguga

SEQ ID NO: 3010584 - RNA, 16 nt, Human
aggauucuuccucccu

SEQ ID NO: 3010585 - RNA, 22 nt, Human
aggaugcacagaguuguuacau

SEQ ID NO: 3010586 - RNA, 23 nt, Human
aggaugaucuaggaagacuuugg

SEQ ID NO: 3010587 - RNA, 22 nt, Human
aggaugaucuaggaagacuuug

SEQ ID NO: 3010588 - RNA, 17 nt, Human
aggauucuuccucccuc

SEQ ID NO: 3010589 - RNA, 19 nt, Human
aggauucuuccucccuccc

SEQ ID NO: 3010590 - RNA, 13 nt, Human
aggaucagucuga

SEQ ID NO: 3010591 - RNA, 13 nt, Human
ugcacauuaaaug

SEQ ID NO: 3010592 - RNA, 18 nt, Human
ugcacauuaaaugacucu

SEQ ID NO: 3010593 - RNA, 15 nt, Human
ugcacauuaaaugac

SEQ ID NO: 3010594 - RNA, 15 nt, Human
ugcaccacugcacuc

SEQ ID NO: 3010595 - RNA, 13 nt, Human
ugcaccagcccuu

SEQ ID NO: 3010596 - RNA, 21 nt, Human
ugcaccacugcacuccagccu

SEQ ID NO: 3010597 - RNA, 15 nt, Human
ugcaccggcuggccu

SEQ ID NO: 3010598 - RNA, 14 nt, Human
ugcaccggcuggcc

SEQ ID NO: 3010599 - RNA, 16 nt, Human
ugcaccggcuggccug

SEQ ID NO: 3010600 - RNA, 14 nt, Human
ugcacuccagccug

SEQ ID NO: 3010601 - RNA, 16 nt, Human
ugcacuccagccuggg

SEQ ID NO: 3010602 - RNA, 15 nt, Human
ugcacuccagccugg

SEQ ID NO: 3010603 - RNA, 22 nt, Human
agccccuggaugcagccucaca

SEQ ID NO: 3010604 - RNA, 14 nt, Human
agccccgaggccuu

SEQ ID NO: 3010605 - RNA, 19 nt, Human
agcccaggccuccuacagc

SEQ ID NO: 3010606 - RNA, 14 nt, Human
agcccaggccuccu

SEQ ID NO: 3010607 - RNA, 16 nt, Human
agcccgggcucugccu

SEQ ID NO: 3010608 - RNA, 19 nt, Human
agcccugcagagggcacag

SEQ ID NO: 3010609 - RNA, 16 nt, Human
agcccugcagagggca

SEQ ID NO: 3010610 - RNA, 15 nt, Human
agcccugcagagggc

SEQ ID NO: 3010611 - RNA, 14 nt, Human
agcccugcagaggg

SEQ ID NO: 3010612 - RNA, 14 nt, Human
agccccuucugacc

SEQ ID NO: 3010613 - RNA, 16 nt, Human
agccccuucugaccca

SEQ ID NO: 3010614 - RNA, 15 nt, Human
agccccuucugaccc

SEQ ID NO: 3010615 - RNA, 15 nt, Human
agcccgggcucugcc

SEQ ID NO: 3010616 - RNA, 14 nt, Human
agcccgggcucugc

SEQ ID NO: 3010617 - RNA, 13 nt, Human
agcccgggcucug

SEQ ID NO: 3010618 - RNA, 19 nt, Human
agccccuucugacccaugc

SEQ ID NO: 3010619 - RNA, 12 nt, Human
ugcaaagaugaa

SEQ ID NO: 3010620 - RNA, 23 nt, Human
ugcaaagaugaaggucuguuuug

SEQ ID NO: 3010621 - RNA, 16 nt, Human
ugcaaacuucagaguu

SEQ ID NO: 3010622 - RNA, 20 nt, Human
ugcaaaccaucauugaaauc

SEQ ID NO: 3010623 - RNA, 18 nt, Human
ugcaaaccaucauugaaa

SEQ ID NO: 3010624 - RNA, 21 nt, Human
ugcaaaggguaucaggugcug

SEQ ID NO: 3010625 - RNA, 20 nt, Human
ugcaaaguaucccuacugua

SEQ ID NO: 3010626 - RNA, 14 nt, Human
ugauuucacagugu

SEQ ID NO: 3010627 - RNA, 16 nt, Human
ugauuucacagugugu

SEQ ID NO: 3010628 - RNA, 17 nt, Human
agccacggccaggccag

SEQ ID NO: 3010629 - RNA, 18 nt, Human
agccacggccaggccaga

SEQ ID NO: 3010630 - RNA, 13 nt, Human
ugcaaaccaucau

SEQ ID NO: 3010631 - RNA, 12 nt, Human
ugcaaaccauca

SEQ ID NO: 3010632 - RNA, 12 nt, Human
agcccaggccuc

SEQ ID NO: 3010633 - RNA, 15 nt, Human
ugcaaggucauuuuu

SEQ ID NO: 3010634 - RNA, 13 nt, Human
ugcaacaggcugg

SEQ ID NO: 3010635 - RNA, 18 nt, Human
ugcaucuagccucaagcu

SEQ ID NO: 3010636 - RNA, 17 nt, Human
ugcaucguuucaucuuc

SEQ ID NO: 3010637 - RNA, 18 nt, Human
ugcaugcugucccuuacg

SEQ ID NO: 3010638 - RNA, 21 nt, Human
ugcaugcugucccuuacguga

SEQ ID NO: 3010639 - RNA, 19 nt, Human
ugcaugcugucccuuacgu

SEQ ID NO: 3010640 - RNA, 16 nt, Human
ugcauaccacuuuugu

SEQ ID NO: 3010641 - RNA, 18 nt, Human
ugcauaccacuuuuguuc

SEQ ID NO: 3010642 - RNA, 20 nt, Human
ugcauaccacuuuuguucuu

SEQ ID NO: 3010643 - RNA, 14 nt, Human
ugcauaccacuuuu

SEQ ID NO: 3010644 - RNA, 13 nt, Human
agccuccugcccu

SEQ ID NO: 3010645 - RNA, 18 nt, Human
agccuccugcccuuaccu

SEQ ID NO: 3010646 - RNA, 14 nt, Human
agccuccugcccuu

SEQ ID NO: 3010647 - RNA, 12 nt, Human
ugcagacaggca

SEQ ID NO: 3010648 - RNA, 13 nt, Human
ugcagacaggcaa

SEQ ID NO: 3010649 - RNA, 21 nt, Human
ugcagacaggcaagcaccucc

SEQ ID NO: 3010650 - RNA, 18 nt, Human
ugcagccucacaguccuu

SEQ ID NO: 3010651 - RNA, 21 nt, Human
ugcagccucacaguccuuacc

SEQ ID NO: 3010652 - RNA, 17 nt, Human
ugcagccucacaguccu

SEQ ID NO: 3010653 - RNA, 19 nt, Human
agccuugaccauucuccac

SEQ ID NO: 3010654 - RNA, 18 nt, Human
agccuugaccauucucca

SEQ ID NO: 3010655 - RNA, 21 nt, Human
agccuugaccauucuccaccu

SEQ ID NO: 3010656 - RNA, 19 nt, Human
agccuugcggaagguucua

SEQ ID NO: 3010657 - RNA, 20 nt, Human
agccuuagaagucacacagu

SEQ ID NO: 3010658 - RNA, 23 nt, Human
agccuugaacuuugaccucugca

SEQ ID NO: 3010659 - RNA, 17 nt, Human
agccugugccucuggga

SEQ ID NO: 3010660 - RNA, 18 nt, Human
agccugugccucugggac

SEQ ID NO: 3010661 - RNA, 14 nt, Human
ugccaaugggagcu

SEQ ID NO: 3010662 - RNA, 13 nt, Human
ugccaauggacua

SEQ ID NO: 3010663 - RNA, 16 nt, Human
ugcauuuaaaagauac

SEQ ID NO: 3010664 - RNA, 22 nt, Human
ugccagccgagauagccaaggc

SEQ ID NO: 3010665 - RNA, 17 nt, Human
ugccagccgagauagcc

SEQ ID NO: 3010666 - RNA, 22 nt, Human
ugagugcaaacuucagaguucu

SEQ ID NO: 3010667 - RNA, 20 nt, Human
ugagugcaaacuucagaguu

SEQ ID NO: 3010668 - RNA, 18 nt, Human
ugagugcaaacuucagag

SEQ ID NO: 3010669 - RNA, 18 nt, Human
ugagucaccaagcccagu

SEQ ID NO: 3010670 - RNA, 20 nt, Human
ugaguacguugugcauuugg

SEQ ID NO: 3010671 - RNA, 14 nt, Human
ugaguggaguuacu

SEQ ID NO: 3010672 - RNA, 14 nt, Human
ugagugccuuacac

SEQ ID NO: 3010673 - RNA, 13 nt, Human
ugagugccuuaca

SEQ ID NO: 3010674 - RNA, 17 nt, Human
ugagugcagcucuggag

SEQ ID NO: 3010675 - RNA, 14 nt, Human
ugauacaaugcugu

SEQ ID NO: 3010676 - RNA, 15 nt, Human
ugauacaaugcugug

SEQ ID NO: 3010677 - RNA, 18 nt, Human
ugaguucauacccuguua

SEQ ID NO: 3010678 - RNA, 21 nt, Human
ugagugggggaucacagccuc

SEQ ID NO: 3010679 - RNA, 22 nt, Human
agcaguuugguuucuagcauga

SEQ ID NO: 3010680 - RNA, 23 nt, Human
agcaguuugguuucuagcaugaa

SEQ ID NO: 3010681 - RNA, 19 nt, Human
agcauaaaaauuagccaag

SEQ ID NO: 3010682 - RNA, 20 nt, Human
agcaguuugguuucuagcau

SEQ ID NO: 3010683 - RNA, 16 nt, Human
ugaguacguugugcau

SEQ ID NO: 3010684 - RNA, 17 nt, Human
ugaguacguugugcauu

SEQ ID NO: 3010685 - RNA, 18 nt, Human
ugaguacguugugcauuu

SEQ ID NO: 3010686 - RNA, 19 nt, Human
ugaguacguugugcauuug

SEQ ID NO: 3010687 - RNA, 23 nt, Human
agcauaaaaauuagccaagugug

SEQ ID NO: 3010688 - RNA, 20 nt, Human
agcaggaagcugugagagca

SEQ ID NO: 3010689 - RNA, 13 nt, Human
agcaggacaugga

SEQ ID NO: 3010690 - RNA, 11 nt, Human
agcagccacau

SEQ ID NO: 3010691 - RNA, 16 nt, Human
agcagcagggagggcu

SEQ ID NO: 3010692 - RNA, 17 nt, Human
ugacccaugcugcccug

SEQ ID NO: 3010693 - RNA, 19 nt, Human
ugacccaugcugcccugug

SEQ ID NO: 3010694 - RNA, 18 nt, Human
ugacccaugcugcccugu

SEQ ID NO: 3010695 - RNA, 20 nt, Human
ugacccaugcugcccuguga

SEQ ID NO: 3010696 - RNA, 13 nt, Human
agcagggaaacag

SEQ ID NO: 3010697 - RNA, 14 nt, Human
agcagggaaacagc

SEQ ID NO: 3010698 - RNA, 15 nt, Human
agcagggaaacagcu

SEQ ID NO: 3010699 - RNA, 23 nt, Human
agcaggcucucaggccagcugcu

SEQ ID NO: 3010700 - RNA, 22 nt, Human
agcaggcucucaggccagcugc

SEQ ID NO: 3010701 - RNA, 21 nt, Human
agcaggcucucaggccagcug

SEQ ID NO: 3010702 - RNA, 19 nt, Human
agcaggcucucaggccagc

SEQ ID NO: 3010703 - RNA, 18 nt, Human
agcaggcucucaggccag

SEQ ID NO: 3010704 - RNA, 17 nt, Human
agcaggcucucaggcca

SEQ ID NO: 3010705 - RNA, 16 nt, Human
agcaggcucucaggcc

SEQ ID NO: 3010706 - RNA, 15 nt, Human
agcaggcucucaggc

SEQ ID NO: 3010707 - RNA, 14 nt, Human
agcaggcucucagg

SEQ ID NO: 3010708 - RNA, 13 nt, Human
agcaggcucucag

SEQ ID NO: 3010709 - RNA, 17 nt, Human
agcaggcucgggcuccc

SEQ ID NO: 3010710 - RNA, 22 nt, Human
agcagggcucagcggggacagc

SEQ ID NO: 3010711 - RNA, 13 nt, Human
agcagggcucagc

SEQ ID NO: 3010712 - RNA, 14 nt, Human
agcagggcucagcg

SEQ ID NO: 3010713 - RNA, 15 nt, Human
agcagggcucagcgg

SEQ ID NO: 3010714 - RNA, 20 nt, Human
agcagggagggcuucugcca

SEQ ID NO: 3010715 - RNA, 19 nt, Human
agcauggcugccaauggga

SEQ ID NO: 3010716 - RNA, 22 nt, Human
agcauuuugcuaaaugugaaug

SEQ ID NO: 3010717 - RNA, 15 nt, Human
agcauuuugcuaaau

SEQ ID NO: 3010718 - RNA, 23 nt, Human
agcaucaggccaggcccucugcc

SEQ ID NO: 3010719 - RNA, 21 nt, Human
agcaucaggccaggcccucug

SEQ ID NO: 3010720 - RNA, 22 nt, Human
agcaucaggccaggcccucugc

SEQ ID NO: 3010721 - RNA, 16 nt, Human
agcauauucaggaagc

SEQ ID NO: 3010722 - RNA, 13 nt, Human
agcauggcugcca

SEQ ID NO: 3010723 - RNA, 15 nt, Human
ugaucacggcucacu

SEQ ID NO: 3010724 - RNA, 13 nt, Human
ugaucacggcuca

SEQ ID NO: 3010725 - RNA, 14 nt, Human
ugaucacggcucac

SEQ ID NO: 3010726 - RNA, 21 nt, Human
agcauauucaggaagcucagg

SEQ ID NO: 3010727 - RNA, 19 nt, Human
agcauauucaggaagcuca

SEQ ID NO: 3010728 - RNA, 17 nt, Human
agcauauucaggaagcu

SEQ ID NO: 3010729 - RNA, 16 nt, Human
ugauccucccaccuca

SEQ ID NO: 3010730 - RNA, 13 nt, Human
ugaucuaggaaga

SEQ ID NO: 3010731 - RNA, 19 nt, Human
ugauccucccaccucagcc

SEQ ID NO: 3010732 - RNA, 20 nt, Human
ugauccucccaccucagccu

SEQ ID NO: 3010733 - RNA, 18 nt, Human
ugauccucccaccucagc

SEQ ID NO: 3010734 - RNA, 21 nt, Human
ugaugggcaacccccagccug

SEQ ID NO: 3010735 - RNA, 22 nt, Human
ugaugggcaacccccagccugc

SEQ ID NO: 3010736 - RNA, 13 nt, Human
ugauggggcccug

SEQ ID NO: 3010737 - RNA, 21 nt, Human
ugaugaucuuugcagacaggc

SEQ ID NO: 3010738 - RNA, 22 nt, Human
ugaugaaaugaggucagagccu

SEQ ID NO: 3010739 - RNA, 15 nt, Human
ugaucuaggaagacu

SEQ ID NO: 3010740 - RNA, 14 nt, Human
ugaucuaggaagac

SEQ ID NO: 3010741 - RNA, 23 nt, Human
ugaugaaaugaggucagagccug

SEQ ID NO: 3010742 - RNA, 19 nt, Human
ugaugaucuuugcagacag

SEQ ID NO: 3010743 - RNA, 20 nt, Human
ugaugaucuuugcagacagg

SEQ ID NO: 3010744 - RNA, 22 nt, Human
ugauggggcccugccuccuuug

SEQ ID NO: 3010745 - RNA, 19 nt, Human
ugauguuuuccaugagucc

SEQ ID NO: 3010746 - RNA, 17 nt, Human
ugauguuuuccaugagu

SEQ ID NO: 3010747 - RNA, 21 nt, Human
ugauguuuuaaggaugcuugu

SEQ ID NO: 3010748 - RNA, 20 nt, Human
ugauuaaccacuucagcuga

SEQ ID NO: 3010749 - RNA, 17 nt, Human
ugauuaaauucuugcaa

SEQ ID NO: 3010750 - RNA, 13 nt, Human
ugauuaaauucuu

SEQ ID NO: 3010751 - RNA, 16 nt, Human
ugauuaaauucuugca

SEQ ID NO: 3010752 - RNA, 16 nt, Human
agccacggccaggcca

SEQ ID NO: 3010753 - RNA, 18 nt, Human
ugaaauaaggaaugauau

SEQ ID NO: 3010754 - RNA, 14 nt, Human
ugaaauaaggaaug

SEQ ID NO: 3010755 - RNA, 18 nt, Human
agagcugccaccugccug

SEQ ID NO: 3010756 - RNA, 11 nt, Human
agagccuugcg

SEQ ID NO: 3010757 - RNA, 21 nt, Human
agagccuugcggaagguucua

SEQ ID NO: 3010758 - RNA, 20 nt, Human
agagcagagaccaucccuga

SEQ ID NO: 3010759 - RNA, 18 nt, Human
agagcagagaccaucccu

SEQ ID NO: 3010760 - RNA, 17 nt, Human
agagcagagaccauccc

SEQ ID NO: 3010761 - RNA, 12 nt, Human
agagcagagacc

SEQ ID NO: 3010762 - RNA, 16 nt, Human
agagauugugguuuca

SEQ ID NO: 3010763 - RNA, 21 nt, Human
ucuuuggacccugaggcccag

SEQ ID NO: 3010764 - RNA, 17 nt, Human
ucuuuggacccugaggc

SEQ ID NO: 3010765 - RNA, 18 nt, Human
agagguacacuugugaau

SEQ ID NO: 3010766 - RNA, 24 nt, Human
agaggcagccccauucugccugcc

SEQ ID NO: 3010767 - RNA, 13 nt, Human
agaggcagcccca

SEQ ID NO: 3010768 - RNA, 19 nt, Human
agaggcagccccauucugc

SEQ ID NO: 3010769 - RNA, 19 nt, Human
agaggccaugggccuccug

SEQ ID NO: 3010770 - RNA, 17 nt, Human
agaggcuaugugagcac

SEQ ID NO: 3010771 - RNA, 10 nt, Human
agaggcaggg

SEQ ID NO: 3010772 - RNA, 13 nt, Human
agaggcagggucu

SEQ ID NO: 3010773 - RNA, 22 nt, Human
ugaaccgaugagaaauaaaguu

SEQ ID NO: 3010774 - RNA, 15 nt, Human
ugaaauuuuuauuaa

SEQ ID NO: 3010775 - RNA, 14 nt, Human
ugaacuccuggccu

SEQ ID NO: 3010776 - RNA, 15 nt, Human
ugaacuccuggccuc

SEQ ID NO: 3010777 - RNA, 11 nt, Human
ugaacuccugg

SEQ ID NO: 3010778 - RNA, 12 nt, Human
ugaacuccuggc

SEQ ID NO: 3010779 - RNA, 19 nt, Human
ugaacuuugaccucugcag

SEQ ID NO: 3010780 - RNA, 20 nt, Human
ugaacuuugaccucugcagc

SEQ ID NO: 3010781 - RNA, 17 nt, Human
ugaacuuugaccucugc

SEQ ID NO: 3010782 - RNA, 22 nt, Human
ugaacuuugaccucugcagcaa

SEQ ID NO: 3010783 - RNA, 15 nt, Human
ugaaugucaguuguu

SEQ ID NO: 3010784 - RNA, 19 nt, Human
ugaaugucagugugacuga

SEQ ID NO: 3010785 - RNA, 16 nt, Human
ugaagcagaguggcag

SEQ ID NO: 3010786 - RNA, 13 nt, Human
ugaagcagagugg

SEQ ID NO: 3010787 - RNA, 12 nt, Human
ugaagcagagug

SEQ ID NO: 3010788 - RNA, 20 nt, Human
ugaaugguuuucaaaauaaa

SEQ ID NO: 3010789 - RNA, 22 nt, Human
agagucagaaguuucugccgca

SEQ ID NO: 3010790 - RNA, 17 nt, Human
agaguugauacuacagu

SEQ ID NO: 3010791 - RNA, 20 nt, Human
agaguugauacuacaguuug

SEQ ID NO: 3010792 - RNA, 22 nt, Human
agaguugauacuacaguuuguu

SEQ ID NO: 3010793 - RNA, 12 nt, Human
agaguuguuaca

SEQ ID NO: 3010794 - RNA, 21 nt, Human
agaguuguuacauuuuuaagu

SEQ ID NO: 3010795 - RNA, 20 nt, Human
ugacacacagcucuguccug

SEQ ID NO: 3010796 - RNA, 15 nt, Human
ugaauuucuuuugcc

SEQ ID NO: 3010797 - RNA, 17 nt, Human
agaucacgccacugcac

SEQ ID NO: 3010798 - RNA, 18 nt, Human
agaucacgccacugcacu

SEQ ID NO: 3010799 - RNA, 12 nt, Human
agauaaaugugc

SEQ ID NO: 3010800 - RNA, 14 nt, Human
agaucacgccacug

SEQ ID NO: 3010801 - RNA, 15 nt, Human
agaucacgccacugc

SEQ ID NO: 3010802 - RNA, 16 nt, Human
agaucacgccacugca

SEQ ID NO: 3010803 - RNA, 11 nt, Human
ugacagggcac

SEQ ID NO: 3010804 - RNA, 16 nt, Human
ugacagggcacaccgg

SEQ ID NO: 3010805 - RNA, 20 nt, Human
ugacagggcacaccgggcac

SEQ ID NO: 3010806 - RNA, 20 nt, Human
ugacaggcaaugcuggcugu

SEQ ID NO: 3010807 - RNA, 21 nt, Human
ugacacacagcucuguccugg

SEQ ID NO: 3010808 - RNA, 15 nt, Human
agaucagccugggca

SEQ ID NO: 3010809 - RNA, 13 nt, Human
agaucagccuggg

SEQ ID NO: 3010810 - RNA, 20 nt, Human
ugacauuguuggccaaagcc

SEQ ID NO: 3010811 - RNA, 21 nt, Human
ugacauuguuggccaaagcca

SEQ ID NO: 3010812 - RNA, 18 nt, Human
ugaccaaugauggucacc

SEQ ID NO: 3010813 - RNA, 15 nt, Human
agaugcuucucacug

SEQ ID NO: 3010814 - RNA, 12 nt, Human
ugacccacugcu

SEQ ID NO: 3010815 - RNA, 13 nt, Human
ugacccacugcuu

SEQ ID NO: 3010816 - RNA, 23 nt, Human
ugaccauucuccaccugccaggg

SEQ ID NO: 3010817 - RNA, 14 nt, Human
agaugcaccagccc

SEQ ID NO: 3010818 - RNA, 15 nt, Human
agaugcaccagcccu

SEQ ID NO: 3010819 - RNA, 19 nt, Human
agaauuaguggcacuugcu

SEQ ID NO: 3010820 - RNA, 21 nt, Human
agaauguguuuaaacuugguu

SEQ ID NO: 3010821 - RNA, 23 nt, Human
agaaccccaggguccuguagccc

SEQ ID NO: 3010822 - RNA, 20 nt, Human
agaauucucagaaucucaaa

SEQ ID NO: 3010823 - RNA, 20 nt, Human
agaauuauaauuaguuccuc

SEQ ID NO: 3010824 - RNA, 14 nt, Human
agaauucucuaguu

SEQ ID NO: 3010825 - RNA, 15 nt, Human
ucuguauguguucua

SEQ ID NO: 3010826 - RNA, 12 nt, Human
ucuguauguguu

SEQ ID NO: 3010827 - RNA, 18 nt, Human
ucuguacgucugacaggc

SEQ ID NO: 3010828 - RNA, 17 nt, Human
ucugugaugacauuccc

SEQ ID NO: 3010829 - RNA, 20 nt, Human
ucugugaugacauucccugc

SEQ ID NO: 3010830 - RNA, 13 nt, Human
ucuguuuagauaa

SEQ ID NO: 3010831 - RNA, 23 nt, Human
ucuguuuagauaauacaccacua

SEQ ID NO: 3010832 - RNA, 16 nt, Human
ucuguuuagauaauac

SEQ ID NO: 3010833 - RNA, 19 nt, Human
ucuguuuagauaauacacc

SEQ ID NO: 3010834 - RNA, 14 nt, Human
agacaguuggguuu

SEQ ID NO: 3010835 - RNA, 19 nt, Human
agacagucccugccaaugg

SEQ ID NO: 3010836 - RNA, 13 nt, Human
agacagucccugc

SEQ ID NO: 3010837 - RNA, 16 nt, Human
agacagcugccuggga

SEQ ID NO: 3010838 - RNA, 15 nt, Human
agacagcugccuggg

SEQ ID NO: 3010839 - RNA, 12 nt, Human
agacagucccug

SEQ ID NO: 3010840 - RNA, 15 nt, Human
ucuuacaucugaaau

SEQ ID NO: 3010841 - RNA, 18 nt, Human
ucuuaugggcuggguucu

SEQ ID NO: 3010842 - RNA, 12 nt, Human
ucuuagauguau

SEQ ID NO: 3010843 - RNA, 22 nt, Human
agacaccuugacagggcacacc

SEQ ID NO: 3010844 - RNA, 19 nt, Human
agacaccuugacagggcac

SEQ ID NO: 3010845 - RNA, 24 nt, Human
agacacauguccaagaagcccagg

SEQ ID NO: 3010846 - RNA, 23 nt, Human
agacacaggcccggcuccaggcu

SEQ ID NO: 3010847 - RNA, 16 nt, Human
agacacaggcccggcu

SEQ ID NO: 3010848 - RNA, 22 nt, Human
agacacauguccaagaagccca

SEQ ID NO: 3010849 - RNA, 21 nt, Human
agacacauguccaagaagccc

SEQ ID NO: 3010850 - RNA, 14 nt, Human
agacagcugccugg

SEQ ID NO: 3010851 - RNA, 13 nt, Human
agacagcugccug

SEQ ID NO: 3010852 - RNA, 17 nt, Human
agaauucucuuauccaa

SEQ ID NO: 3010853 - RNA, 18 nt, Human
agaauucucuaguuugau

SEQ ID NO: 3010854 - RNA, 19 nt, Human
agaauucucuaguuugauu

SEQ ID NO: 3010855 - RNA, 13 nt, Human
agacacaagccuu

SEQ ID NO: 3010856 - RNA, 14 nt, Human
agacacaagccuuc

SEQ ID NO: 3010857 - RNA, 19 nt, Human
agacacaggcccggcucca

SEQ ID NO: 3010858 - RNA, 20 nt, Human
agacacaggcccggcuccag

SEQ ID NO: 3010859 - RNA, 21 nt, Human
agacacaggcccggcuccagg

SEQ ID NO: 3010860 - RNA, 22 nt, Human
agacacaggcccggcuccaggc

SEQ ID NO: 3010861 - RNA, 17 nt, Human
agacacaggcccggcuc

SEQ ID NO: 3010862 - RNA, 14 nt, Human
ucuugguuuguaaa

SEQ ID NO: 3010863 - RNA, 22 nt, Human
ucuuuaaugucacaggcagguc

SEQ ID NO: 3010864 - RNA, 19 nt, Human
ucuuuaaugucacaggcag

SEQ ID NO: 3010865 - RNA, 16 nt, Human
ucuugguuuguaaauu

SEQ ID NO: 3010866 - RNA, 20 nt, Human
ucuuuaaugucacaggcagg

SEQ ID NO: 3010867 - RNA, 19 nt, Human
agacucgcgacaaugcaaa

SEQ ID NO: 3010868 - RNA, 18 nt, Human
agacucgcgacaaugcaa

SEQ ID NO: 3010869 - RNA, 17 nt, Human
agacucgcgacaaugca

SEQ ID NO: 3010870 - RNA, 15 nt, Human
agacucgcgacaaug

SEQ ID NO: 3010871 - RNA, 18 nt, Human
ucuuucuggcuaugcauu

SEQ ID NO: 3010872 - RNA, 13 nt, Human
ucuuucugcuuug

SEQ ID NO: 3010873 - RNA, 20 nt, Human
ucuuuauaauucuacuuuga

SEQ ID NO: 3010874 - RNA, 20 nt, Human
agacucgcgacaaugcaaac

SEQ ID NO: 3010875 - RNA, 14 nt, Human
agacuguacaaagu

SEQ ID NO: 3010876 - RNA, 15 nt, Human
agacuguacaaagua

SEQ ID NO: 3010877 - RNA, 16 nt, Human
agacuguacaaaguag

SEQ ID NO: 3010878 - RNA, 22 nt, Human
agagaaaaaauauuuuccugcc

SEQ ID NO: 3010879 - RNA, 19 nt, Human
agacuuuucuuucagccaa

SEQ ID NO: 3010880 - RNA, 20 nt, Human
ucuucuguacgucugacagg

SEQ ID NO: 3010881 - RNA, 23 nt, Human
agacauacuaaccagcagaaaug

SEQ ID NO: 3010882 - RNA, 22 nt, Human
ucuucugcuucagccucccgag

SEQ ID NO: 3010883 - RNA, 19 nt, Human
ucuucugcuucagccuccc

SEQ ID NO: 3010884 - RNA, 21 nt, Human
ucuucuguacgucugacaggc

SEQ ID NO: 3010885 - RNA, 22 nt, Human
ucuucuguacgucugacaggca

SEQ ID NO: 3010886 - RNA, 17 nt, Human
ucuuauuuaaugaaaga

SEQ ID NO: 3010887 - RNA, 18 nt, Human
ucuugagccuugaacuuu

SEQ ID NO: 3010888 - RNA, 19 nt, Human
ucuugagccuugaacuuug

SEQ ID NO: 3010889 - RNA, 17 nt, Human
ucuugagccuugaacuu

SEQ ID NO: 3010890 - RNA, 16 nt, Human
ucuugagccuugaacu

SEQ ID NO: 3010891 - RNA, 14 nt, Human
agacccggcugcgu

SEQ ID NO: 3010892 - RNA, 23 nt, Human
ucucacacaugagcaucaggcca

SEQ ID NO: 3010893 - RNA, 15 nt, Human
ucuauuuauuuguga

SEQ ID NO: 3010894 - RNA, 16 nt, Human
acuucagcugacuuuu

SEQ ID NO: 3010895 - RNA, 11 nt, Human
acuucagcuga

SEQ ID NO: 3010896 - RNA, 11 nt, Human
ucucacuccuu

SEQ ID NO: 3010897 - RNA, 22 nt, Human
acuucgggaggucgaggcagga

SEQ ID NO: 3010898 - RNA, 13 nt, Human
ucucacuccuuga

SEQ ID NO: 3010899 - RNA, 12 nt, Human
ucucacucuguc

SEQ ID NO: 3010900 - RNA, 14 nt, Human
acuucuccacccug

SEQ ID NO: 3010901 - RNA, 16 nt, Human
acuuguggacacagcu

SEQ ID NO: 3010902 - RNA, 17 nt, Human
acuuguggacacagcuc

SEQ ID NO: 3010903 - RNA, 18 nt, Human
acuuguggacacagcucu

SEQ ID NO: 3010904 - RNA, 19 nt, Human
acuugagcccagagugaac

SEQ ID NO: 3010905 - RNA, 15 nt, Human
acuucuccacccugc

SEQ ID NO: 3010906 - RNA, 16 nt, Human
acuucuccacccugcu

SEQ ID NO: 3010907 - RNA, 11 nt, Human
acuuuaaacua

SEQ ID NO: 3010908 - RNA, 21 nt, Human
ucuccuccuuuucacaguucu

SEQ ID NO: 3010909 - RNA, 14 nt, Human
acuuugaccucugc

SEQ ID NO: 3010910 - RNA, 17 nt, Human
acuuucuagccagagga

SEQ ID NO: 3010911 - RNA, 16 nt, Human
acuuucuagccagagg

SEQ ID NO: 3010912 - RNA, 16 nt, Human
ucuccauguuugaugu

SEQ ID NO: 3010913 - RNA, 13 nt, Human
ucucagggccugg

SEQ ID NO: 3010914 - RNA, 12 nt, Human
ucucagggccug

SEQ ID NO: 3010915 - RNA, 15 nt, Human
acuuguggacacagc

SEQ ID NO: 3010916 - RNA, 19 nt, Human
ucucagggccuggucguuu

SEQ ID NO: 3010917 - RNA, 15 nt, Human
ucucagggccugguc

SEQ ID NO: 3010918 - RNA, 14 nt, Human
ucucagggccuggu

SEQ ID NO: 3010919 - RNA, 11 nt, Human
ucuccaggcug

SEQ ID NO: 3010920 - RNA, 17 nt, Human
ucuccaaaauaaaacuu

SEQ ID NO: 3010921 - RNA, 19 nt, Human
ucuccaaaauaaaacuuuu

SEQ ID NO: 3010922 - RNA, 22 nt, Human
ucuccaaaauaaaacuuuuuaa

SEQ ID NO: 3010923 - RNA, 13 nt, Human
ucuccaaaauaaa

SEQ ID NO: 3010924 - RNA, 16 nt, Human
ucuccaggcuguaucc

SEQ ID NO: 3010925 - RNA, 18 nt, Human
ucucucaucuguuacaca

SEQ ID NO: 3010926 - RNA, 19 nt, Human
ucucuccagccccuggaug

SEQ ID NO: 3010927 - RNA, 18 nt, Human
ucucuccagccccuggau

SEQ ID NO: 3010928 - RNA, 16 nt, Human
ucucuccagccccugg

SEQ ID NO: 3010929 - RNA, 17 nt, Human
ucucuccagccccugga

SEQ ID NO: 3010930 - RNA, 21 nt, Human
ucucucaggccaaacucaccu

SEQ ID NO: 3010931 - RNA, 15 nt, Human
ucucucacuccuuga

SEQ ID NO: 3010932 - RNA, 13 nt, Human
ucucucacuccuu

SEQ ID NO: 3010933 - RNA, 18 nt, Human
acuuugaccucugcagca

SEQ ID NO: 3010934 - RNA, 15 nt, Human
acuuugaccucugca

SEQ ID NO: 3010935 - RNA, 16 nt, Human
acuuugaccucugcag

SEQ ID NO: 3010936 - RNA, 16 nt, Human
ucucuccuguaccucu

SEQ ID NO: 3010937 - RNA, 14 nt, Human
ucucuccuguaccu

SEQ ID NO: 3010938 - RNA, 17 nt, Human
ucucugcccuccaagac

SEQ ID NO: 3010939 - RNA, 16 nt, Human
ucucugcccuccaaga

SEQ ID NO: 3010940 - RNA, 15 nt, Human
ucucugcccuccaag

SEQ ID NO: 3010941 - RNA, 11 nt, Human
ucucugcccuc

SEQ ID NO: 3010942 - RNA, 13 nt, Human
agaaaaagaaaaa

SEQ ID NO: 3010943 - RNA, 20 nt, Human
ucucuuuaaugucacaggca

SEQ ID NO: 3010944 - RNA, 21 nt, Human
ucucuuuaaugucacaggcag

SEQ ID NO: 3010945 - RNA, 18 nt, Human
ucucuugagccugggagg

SEQ ID NO: 3010946 - RNA, 16 nt, Human
ucucuugauucauaau

SEQ ID NO: 3010947 - RNA, 14 nt, Human
ucucuugauucaua

SEQ ID NO: 3010948 - RNA, 17 nt, Human
ucucuugagccugggag

SEQ ID NO: 3010949 - RNA, 17 nt, Human
agaaaaaggaugcacag

SEQ ID NO: 3010950 - RNA, 12 nt, Human
ucugacuauaac

SEQ ID NO: 3010951 - RNA, 23 nt, Human
ucugagacucgcgacaaugcaaa

SEQ ID NO: 3010952 - RNA, 22 nt, Human
ucugagacucgcgacaaugcaa

SEQ ID NO: 3010953 - RNA, 17 nt, Human
ucugcacuccccugcug

SEQ ID NO: 3010954 - RNA, 19 nt, Human
ucugcacuccccugcuggg

SEQ ID NO: 3010955 - RNA, 18 nt, Human
ucugcacuccccugcugg

SEQ ID NO: 3010956 - RNA, 18 nt, Human
ucugcagcaauaaagcag

SEQ ID NO: 3010957 - RNA, 20 nt, Human
ucugcacuccccugcugggu

SEQ ID NO: 3010958 - RNA, 21 nt, Human
ucugaacuuggcgcugccccu

SEQ ID NO: 3010959 - RNA, 20 nt, Human
agaaauaucugaaaauguau

SEQ ID NO: 3010960 - RNA, 14 nt, Human
agaaauauaauuga

SEQ ID NO: 3010961 - RNA, 19 nt, Human
agaaauaucugaaaaugua

SEQ ID NO: 3010962 - RNA, 18 nt, Human
ucgcuccaccuugcagcu

SEQ ID NO: 3010963 - RNA, 15 nt, Human
ucgagcaugccugga

SEQ ID NO: 3010964 - RNA, 18 nt, Human
ucgagcaugccuggaugg

SEQ ID NO: 3010965 - RNA, 16 nt, Human
ucgagcaugccuggau

SEQ ID NO: 3010966 - RNA, 19 nt, Human
ucgcgacaaugcaaaccau

SEQ ID NO: 3010967 - RNA, 14 nt, Human
ucgcgacaaugcaa

SEQ ID NO: 3010968 - RNA, 16 nt, Human
ucgcgacaaugcaaac

SEQ ID NO: 3010969 - RNA, 22 nt, Human
uccuuuagcgcccaguugggug

SEQ ID NO: 3010970 - RNA, 15 nt, Human
uccuucagugccuua

SEQ ID NO: 3010971 - RNA, 14 nt, Human
uccuucagugccuu

SEQ ID NO: 3010972 - RNA, 17 nt, Human
uccuucagugccuuaug

SEQ ID NO: 3010973 - RNA, 16 nt, Human
uccuucagugccuuau

SEQ ID NO: 3010974 - RNA, 15 nt, Human
uccuuuagcgcccag

SEQ ID NO: 3010975 - RNA, 19 nt, Human
uccuuuagcgcccaguugg

SEQ ID NO: 3010976 - RNA, 14 nt, Human
uccuuguguuacua

SEQ ID NO: 3010977 - RNA, 23 nt, Human
uccuuguguuacuaaguuuuuau

SEQ ID NO: 3010978 - RNA, 20 nt, Human
acugcuuaacuucacauauu

SEQ ID NO: 3010979 - RNA, 17 nt, Human
acugcuuccagugaggc

SEQ ID NO: 3010980 - RNA, 21 nt, Human
acugcuugugaaaggaaagag

SEQ ID NO: 3010981 - RNA, 15 nt, Human
acuggauuaaacuua

SEQ ID NO: 3010982 - RNA, 18 nt, Human
acugcuuaacuucacaua

SEQ ID NO: 3010983 - RNA, 22 nt, Human
acugcaucaagaugugacaugu

SEQ ID NO: 3010984 - RNA, 20 nt, Human
acugcaucaagaugugacau

SEQ ID NO: 3010985 - RNA, 15 nt, Human
acugcauguuuguga

SEQ ID NO: 3010986 - RNA, 16 nt, Human
acugcauguuugugau

SEQ ID NO: 3010987 - RNA, 22 nt, Human
uccuagaaauuccccacccuga

SEQ ID NO: 3010988 - RNA, 21 nt, Human
uccuagaaauuccccacccug

SEQ ID NO: 3010989 - RNA, 16 nt, Human
acugcauaugaaagga

SEQ ID NO: 3010990 - RNA, 18 nt, Human
acuguccuacccacccuc

SEQ ID NO: 3010991 - RNA, 17 nt, Human
acuguccuacccacccu

SEQ ID NO: 3010992 - RNA, 17 nt, Human
ucgggaggucgaggcag

SEQ ID NO: 3010993 - RNA, 21 nt, Human
ucgggaggucgaggcaggagg

SEQ ID NO: 3010994 - RNA, 19 nt, Human
ucgggaggucgaggcagga

SEQ ID NO: 3010995 - RNA, 12 nt, Human
ucgggcaugaca

SEQ ID NO: 3010996 - RNA, 11 nt, Human
ucgggcaugac

SEQ ID NO: 3010997 - RNA, 13 nt, Human
acuuaaucuaaau

SEQ ID NO: 3010998 - RNA, 15 nt, Human
acuuaaucuaaaugg

SEQ ID NO: 3010999 - RNA, 16 nt, Human
acuuaaucuaaaugga

SEQ ID NO: 3011000 - RNA, 17 nt, Human
acuguugcccaggcugg

SEQ ID NO: 3011001 - RNA, 18 nt, Human
acuguugcccaggcuggc

SEQ ID NO: 3011002 - RNA, 12 nt, Human
acuguugcccag

SEQ ID NO: 3011003 - RNA, 13 nt, Human
acuguugcccagg

SEQ ID NO: 3011004 - RNA, 14 nt, Human
acuguugcccaggc

SEQ ID NO: 3011005 - RNA, 17 nt, Human
acuuaaauaaugugaaa

SEQ ID NO: 3011006 - RNA, 18 nt, Human
acuuaaauaaugugaaac

SEQ ID NO: 3011007 - RNA, 16 nt, Human
acuuaaauaaugugaa

SEQ ID NO: 3011008 - RNA, 15 nt, Human
acuuaaauaauguga

SEQ ID NO: 3011009 - RNA, 19 nt, Human
acuguucucugcccuccaa

SEQ ID NO: 3011010 - RNA, 21 nt, Human
acuguucucugcccuccaaga

SEQ ID NO: 3011011 - RNA, 20 nt, Human
acuguucucugcccuccaag

SEQ ID NO: 3011012 - RNA, 15 nt, Human
acuguucucugcccu

SEQ ID NO: 3011013 - RNA, 14 nt, Human
acuguucucugccc

SEQ ID NO: 3011014 - RNA, 15 nt, Human
ucuaaagcugccagc

SEQ ID NO: 3011015 - RNA, 14 nt, Human
ucuaaagcugccag

SEQ ID NO: 3011016 - RNA, 13 nt, Human
ucuaaagcugcca

SEQ ID NO: 3011017 - RNA, 22 nt, Human
uccaaucugugaugacauuccc

SEQ ID NO: 3011018 - RNA, 17 nt, Human
uccacccaccucagccu

SEQ ID NO: 3011019 - RNA, 18 nt, Human
uccacccaccucagccuc

SEQ ID NO: 3011020 - RNA, 19 nt, Human
uccacccaccucagccucc

SEQ ID NO: 3011021 - RNA, 12 nt, Human
uccacccaggag

SEQ ID NO: 3011022 - RNA, 14 nt, Human
uccacccaggagcc

SEQ ID NO: 3011023 - RNA, 15 nt, Human
uccacccaggagccc

SEQ ID NO: 3011024 - RNA, 22 nt, Human
accuggauugugccuaaugugu

SEQ ID NO: 3011025 - RNA, 14 nt, Human
accuggccucugca

SEQ ID NO: 3011026 - RNA, 17 nt, Human
accuggccucugcacuc

SEQ ID NO: 3011027 - RNA, 16 nt, Human
accuggccucugcacu

SEQ ID NO: 3011028 - RNA, 20 nt, Human
accuggccucugcacucccc

SEQ ID NO: 3011029 - RNA, 18 nt, Human
accuggccucugcacucc

SEQ ID NO: 3011030 - RNA, 23 nt, Human
accuggccucugcacuccccugc

SEQ ID NO: 3011031 - RNA, 19 nt, Human
accuguuucugcagccacu

SEQ ID NO: 3011032 - RNA, 18 nt, Human
accuuagacagucccugc

SEQ ID NO: 3011033 - RNA, 20 nt, Human
accuuagacagucccugcca

SEQ ID NO: 3011034 - RNA, 19 nt, Human
accuuagacagucccugcc

SEQ ID NO: 3011035 - RNA, 14 nt, Human
accugccaggaagc

SEQ ID NO: 3011036 - RNA, 12 nt, Human
accugccaggaa

SEQ ID NO: 3011037 - RNA, 14 nt, Human
uccaacccucauca

SEQ ID NO: 3011038 - RNA, 17 nt, Human
uccaacccucaucacca

SEQ ID NO: 3011039 - RNA, 16 nt, Human
uccaacccucaucacc

SEQ ID NO: 3011040 - RNA, 23 nt, Human
uccaacccucaucaccaacgucu

SEQ ID NO: 3011041 - RNA, 21 nt, Human
uccaagcuggucccacucagu

SEQ ID NO: 3011042 - RNA, 18 nt, Human
uccaaggguacuaaggaa

SEQ ID NO: 3011043 - RNA, 12 nt, Human
uccaagaagccc

SEQ ID NO: 3011044 - RNA, 16 nt, Human
uccaagcuggucccac

SEQ ID NO: 3011045 - RNA, 20 nt, Human
uccaagcuggucccacucag

SEQ ID NO: 3011046 - RNA, 19 nt, Human
uccagacccggcugcgugg

SEQ ID NO: 3011047 - RNA, 15 nt, Human
uccagacccggcugc

SEQ ID NO: 3011048 - RNA, 18 nt, Human
uccagacccggcugcgug

SEQ ID NO: 3011049 - RNA, 14 nt, Human
uccagacccggcug

SEQ ID NO: 3011050 - RNA, 22 nt, Human
uccagaauuucccaaagcagug

SEQ ID NO: 3011051 - RNA, 20 nt, Human
uccagaauuucccaaagcag

SEQ ID NO: 3011052 - RNA, 16 nt, Human
uccagaauuucccaaa

SEQ ID NO: 3011053 - RNA, 14 nt, Human
accuuuugagugcc

SEQ ID NO: 3011054 - RNA, 20 nt, Human
accuuuugagugccuuacac

SEQ ID NO: 3011055 - RNA, 17 nt, Human
accuuuugagugccuua

SEQ ID NO: 3011056 - RNA, 13 nt, Human
uccagccccugga

SEQ ID NO: 3011057 - RNA, 12 nt, Human
uccagccccugg

SEQ ID NO: 3011058 - RNA, 14 nt, Human
uccaggcuguaucc

SEQ ID NO: 3011059 - RNA, 16 nt, Human
acgagcaggcuucuuc

SEQ ID NO: 3011060 - RNA, 17 nt, Human
acgccagauucuuuccu

SEQ ID NO: 3011061 - RNA, 19 nt, Human
acgccagauucuuuccuga

SEQ ID NO: 3011062 - RNA, 21 nt, Human
uccaggcuguaucccaugagc

SEQ ID NO: 3011063 - RNA, 19 nt, Human
accuuuuuuauacauaaac

SEQ ID NO: 3011064 - RNA, 20 nt, Human
accuuuuuuauacauaaaca

SEQ ID NO: 3011065 - RNA, 21 nt, Human
accuuuuuuauacauaaacaa

SEQ ID NO: 3011066 - RNA, 21 nt, Human
ucauucuuuuugaaaugucaa

SEQ ID NO: 3011067 - RNA, 12 nt, Human
ucauucuucugu

SEQ ID NO: 3011068 - RNA, 13 nt, Human
ucauugaaaucuu

SEQ ID NO: 3011069 - RNA, 12 nt, Human
ucauugaaaucu

SEQ ID NO: 3011070 - RNA, 12 nt, Human
ucauuacuaaaa

SEQ ID NO: 3011071 - RNA, 15 nt, Human
ucauugaccugaggc

SEQ ID NO: 3011072 - RNA, 14 nt, Human
ucauugaccugagg

SEQ ID NO: 3011073 - RNA, 12 nt, Human
ucauugaccuga

SEQ ID NO: 3011074 - RNA, 22 nt, Human
ucauugaaaucuuuuugcuuug

SEQ ID NO: 3011075 - RNA, 13 nt, Human
accuccugggcua

SEQ ID NO: 3011076 - RNA, 19 nt, Human
accucggugccuuccucuu

SEQ ID NO: 3011077 - RNA, 14 nt, Human
accugauugugucu

SEQ ID NO: 3011078 - RNA, 18 nt, Human
accugauugugucucuug

SEQ ID NO: 3011079 - RNA, 17 nt, Human
accugauugugucucuu

SEQ ID NO: 3011080 - RNA, 15 nt, Human
accugauugugucuc

SEQ ID NO: 3011081 - RNA, 16 nt, Human
accugaggggccucuu

SEQ ID NO: 3011082 - RNA, 22 nt, Human
accugaggcccuucucuccagc

SEQ ID NO: 3011083 - RNA, 21 nt, Human
accugaggcccuucucuccag

SEQ ID NO: 3011084 - RNA, 20 nt, Human
accugaggcccuucucucca

SEQ ID NO: 3011085 - RNA, 16 nt, Human
accugaggcccuucuc

SEQ ID NO: 3011086 - RNA, 15 nt, Human
accugaggcccuucu

SEQ ID NO: 3011087 - RNA, 14 nt, Human
accugaggcccuuc

SEQ ID NO: 3011088 - RNA, 15 nt, Human
ucaggaagcucaggg

SEQ ID NO: 3011089 - RNA, 14 nt, Human
ucaggaagcucagg

SEQ ID NO: 3011090 - RNA, 13 nt, Human
ucaggaagcucag

SEQ ID NO: 3011091 - RNA, 12 nt, Human
ucaggaagcuca

SEQ ID NO: 3011092 - RNA, 23 nt, Human
accuccugccucgaacuggcugc

SEQ ID NO: 3011093 - RNA, 15 nt, Human
ucauccuaagcuauu

SEQ ID NO: 3011094 - RNA, 13 nt, Human
accuccugccucg

SEQ ID NO: 3011095 - RNA, 12 nt, Human
accuccugccuc

SEQ ID NO: 3011096 - RNA, 14 nt, Human
ucauccuucuggaa

SEQ ID NO: 3011097 - RNA, 18 nt, Human
ucauccucauacccaccc

SEQ ID NO: 3011098 - RNA, 19 nt, Human
ucauccuccucagaucuuc

SEQ ID NO: 3011099 - RNA, 13 nt, Human
ucauccuccucag

SEQ ID NO: 3011100 - RNA, 22 nt, Human
ucauccuucuggaauaaggaga

SEQ ID NO: 3011101 - RNA, 18 nt, Human
acuaacaggcuuagugau

SEQ ID NO: 3011102 - RNA, 17 nt, Human
acuaacaggcuuaguga

SEQ ID NO: 3011103 - RNA, 12 nt, Human
acuaacaggcuu

SEQ ID NO: 3011104 - RNA, 18 nt, Human
acuaacauuuauuugagu

SEQ ID NO: 3011105 - RNA, 11 nt, Human
acuacaggcac

SEQ ID NO: 3011106 - RNA, 15 nt, Human
acuacaggcacccac

SEQ ID NO: 3011107 - RNA, 17 nt, Human
acuacaguccucccauc

SEQ ID NO: 3011108 - RNA, 13 nt, Human
acuacaguuuguu

SEQ ID NO: 3011109 - RNA, 14 nt, Human
acuacaguuuguua

SEQ ID NO: 3011110 - RNA, 14 nt, Human
acuacauucuguua

SEQ ID NO: 3011111 - RNA, 15 nt, Human
acuacaguuuguuag

SEQ ID NO: 3011112 - RNA, 11 nt, Human
acuacauucug

SEQ ID NO: 3011113 - RNA, 12 nt, Human
acuacauucugu

SEQ ID NO: 3011114 - RNA, 13 nt, Human
acuacauucuguu

SEQ ID NO: 3011115 - RNA, 17 nt, Human
ucccagcugugcucugg

SEQ ID NO: 3011116 - RNA, 15 nt, Human
acuacauucuguuaa

SEQ ID NO: 3011117 - RNA, 17 nt, Human
uccccaccgcagacagg

SEQ ID NO: 3011118 - RNA, 21 nt, Human
uccccaccgcagacaggacca

SEQ ID NO: 3011119 - RNA, 18 nt, Human
uccccaccgcagacagga

SEQ ID NO: 3011120 - RNA, 22 nt, Human
ucccauaugccugggcagaagg

SEQ ID NO: 3011121 - RNA, 16 nt, Human
ucccauaugccugggc

SEQ ID NO: 3011122 - RNA, 15 nt, Human
ucccaucacccgcua

SEQ ID NO: 3011123 - RNA, 20 nt, Human
acgggaggguaaggcugugg

SEQ ID NO: 3011124 - RNA, 16 nt, Human
ucccacaaaggagagc

SEQ ID NO: 3011125 - RNA, 20 nt, Human
ucccaccccacacacgccag

SEQ ID NO: 3011126 - RNA, 15 nt, Human
ucccaccccacacac

SEQ ID NO: 3011127 - RNA, 23 nt, Human
acguggcugcuucaaggauccug

SEQ ID NO: 3011128 - RNA, 17 nt, Human
acgguuuuacugcagcu

SEQ ID NO: 3011129 - RNA, 15 nt, Human
acgguuuuacugcag

SEQ ID NO: 3011130 - RNA, 16 nt, Human
ucccaaagcagugcau

SEQ ID NO: 3011131 - RNA, 18 nt, Human
ucccaaacccuucagugc

SEQ ID NO: 3011132 - RNA, 13 nt, Human
ucccaaagugcug

SEQ ID NO: 3011133 - RNA, 14 nt, Human
ucccaaagugcugg

SEQ ID NO: 3011134 - RNA, 18 nt, Human
ucccaaagcagugcaugc

SEQ ID NO: 3011135 - RNA, 17 nt, Human
ucccaaagcagugcaug

SEQ ID NO: 3011136 - RNA, 21 nt, Human
ucccaaagcagugcaugcugu

SEQ ID NO: 3011137 - RNA, 23 nt, Human
acgccagauucuuuccugaggcu

SEQ ID NO: 3011138 - RNA, 22 nt, Human
acgccagauucuuuccugaggc

SEQ ID NO: 3011139 - RNA, 16 nt, Human
ucccugugucauuuca

SEQ ID NO: 3011140 - RNA, 17 nt, Human
ucccugugucauuucaa

SEQ ID NO: 3011141 - RNA, 15 nt, Human
ucccuuucccuuggu

SEQ ID NO: 3011142 - RNA, 17 nt, Human
ucccuuacgugaguccu

SEQ ID NO: 3011143 - RNA, 15 nt, Human
ucccugguggcagcu

SEQ ID NO: 3011144 - RNA, 12 nt, Human
ucccugucccag

SEQ ID NO: 3011145 - RNA, 21 nt, Human
acuccugcaggcagccaggcc

SEQ ID NO: 3011146 - RNA, 11 nt, Human
uccuaaauagc

SEQ ID NO: 3011147 - RNA, 17 nt, Human
uccggucccugucccag

SEQ ID NO: 3011148 - RNA, 16 nt, Human
uccuagaaauucccca

SEQ ID NO: 3011149 - RNA, 12 nt, Human
ucccuuuuccuu

SEQ ID NO: 3011150 - RNA, 15 nt, Human
acucauucuucugua

SEQ ID NO: 3011151 - RNA, 14 nt, Human
acucauugaccuga

SEQ ID NO: 3011152 - RNA, 17 nt, Human
acuccagaauuucccaa

SEQ ID NO: 3011153 - RNA, 15 nt, Human
acuccagaauuuccc

SEQ ID NO: 3011154 - RNA, 15 nt, Human
acucauugaccugag

SEQ ID NO: 3011155 - RNA, 17 nt, Human
acuccugcaggcagcca

SEQ ID NO: 3011156 - RNA, 19 nt, Human
acuccugcaggcagccagg

SEQ ID NO: 3011157 - RNA, 18 nt, Human
acuccugcaggcagccag

SEQ ID NO: 3011158 - RNA, 23 nt, Human
acuccagaauuucccaaagcagu

SEQ ID NO: 3011159 - RNA, 12 nt, Human
acuccagccugg

SEQ ID NO: 3011160 - RNA, 13 nt, Human
acuccagccuggg

SEQ ID NO: 3011161 - RNA, 14 nt, Human
uccccucuccucca

SEQ ID NO: 3011162 - RNA, 20 nt, Human
ucccgaauagcugggacuac

SEQ ID NO: 3011163 - RNA, 15 nt, Human
ucccgaguagcuggg

SEQ ID NO: 3011164 - RNA, 18 nt, Human
ucccgaguagcugggacu

SEQ ID NO: 3011165 - RNA, 16 nt, Human
ucccgaguagcuggga

SEQ ID NO: 3011166 - RNA, 17 nt, Human
ucccgaguagcugggac

SEQ ID NO: 3011167 - RNA, 17 nt, Human
acuacucccccaggugg

SEQ ID NO: 3011168 - RNA, 12 nt, Human
acucaccccagc

SEQ ID NO: 3011169 - RNA, 21 nt, Human
acucacauuuauucugcucac

SEQ ID NO: 3011170 - RNA, 16 nt, Human
ucccugaaggccccgc

SEQ ID NO: 3011171 - RNA, 14 nt, Human
ucccucuuucccuc

SEQ ID NO: 3011172 - RNA, 18 nt, Human
ucccucuuucccucccuu

SEQ ID NO: 3011173 - RNA, 20 nt, Human
ucccucuuucccucccuucc

SEQ ID NO: 3011174 - RNA, 15 nt, Human
ucccugaaggccccg

SEQ ID NO: 3011175 - RNA, 11 nt, Human
ucccugaaggc

SEQ ID NO: 3011176 - RNA, 21 nt, Human
ucccucuuucccucccuuccu

SEQ ID NO: 3011177 - RNA, 23 nt, Human
accaauauuuaaucuuuuaugau

SEQ ID NO: 3011178 - RNA, 20 nt, Human
accaauauuuaaucuuuuau

SEQ ID NO: 3011179 - RNA, 15 nt, Human
accaauguucucucu

SEQ ID NO: 3011180 - RNA, 16 nt, Human
accaauauuuaaucuu

SEQ ID NO: 3011181 - RNA, 17 nt, Human
accaauauuuaaucuuu

SEQ ID NO: 3011182 - RNA, 15 nt, Human
ucaagugaaaaagga

SEQ ID NO: 3011183 - RNA, 23 nt, Human
ucaagugaaaaaggaggaagaga

SEQ ID NO: 3011184 - RNA, 22 nt, Human
accaacauacucccaucuguga

SEQ ID NO: 3011185 - RNA, 21 nt, Human
accaacauacucccaucugug

SEQ ID NO: 3011186 - RNA, 19 nt, Human
accaacauacucccaucug

SEQ ID NO: 3011187 - RNA, 17 nt, Human
accaacauacucccauc

SEQ ID NO: 3011188 - RNA, 12 nt, Human
ucacauaucugu

SEQ ID NO: 3011189 - RNA, 15 nt, Human
ucacauaucugucau

SEQ ID NO: 3011190 - RNA, 15 nt, Human
ucacaguucucuccu

SEQ ID NO: 3011191 - RNA, 13 nt, Human
ucaccccagcccc

SEQ ID NO: 3011192 - RNA, 20 nt, Human
ucaccccagccccaaaacuc

SEQ ID NO: 3011193 - RNA, 14 nt, Human
ucaccccagcccca

SEQ ID NO: 3011194 - RNA, 15 nt, Human
ucaccccggccaccu

SEQ ID NO: 3011195 - RNA, 14 nt, Human
accagacaccuuga

SEQ ID NO: 3011196 - RNA, 11 nt, Human
accagacaggu

SEQ ID NO: 3011197 - RNA, 12 nt, Human
accagagcccac

SEQ ID NO: 3011198 - RNA, 14 nt, Human
accagagcccaccu

SEQ ID NO: 3011199 - RNA, 16 nt, Human
accagagcccaccuug

SEQ ID NO: 3011200 - RNA, 22 nt, Human
accacuuuuguucuugguuugu

SEQ ID NO: 3011201 - RNA, 21 nt, Human
accacugcacuccagccuggg

SEQ ID NO: 3011202 - RNA, 18 nt, Human
ucaccccggccaccugcg

SEQ ID NO: 3011203 - RNA, 17 nt, Human
ucaccccggccaccugc

SEQ ID NO: 3011204 - RNA, 20 nt, Human
accacugcacuccagccugg

SEQ ID NO: 3011205 - RNA, 17 nt, Human
accacugcacuccagcc

SEQ ID NO: 3011206 - RNA, 15 nt, Human
accacuuuuguucuu

SEQ ID NO: 3011207 - RNA, 16 nt, Human
accacuuuuguucuug

SEQ ID NO: 3011208 - RNA, 21 nt, Human
accacuuuuguucuugguuug

SEQ ID NO: 3011209 - RNA, 18 nt, Human
ucacuauguugcccaggc

SEQ ID NO: 3011210 - RNA, 17 nt, Human
ucacuauguugcccagg

SEQ ID NO: 3011211 - RNA, 19 nt, Human
ucacuauguugcccaggca

SEQ ID NO: 3011212 - RNA, 15 nt, Human
ucaccugccccucaa

SEQ ID NO: 3011213 - RNA, 13 nt, Human
ucaccugccccuc

SEQ ID NO: 3011214 - RNA, 15 nt, Human
ucaccucucccuugg

SEQ ID NO: 3011215 - RNA, 22 nt, Human
ucagccaagaauucuuaaauau

SEQ ID NO: 3011216 - RNA, 23 nt, Human
ucagccguguaaccauggaccca

SEQ ID NO: 3011217 - RNA, 19 nt, Human
acccagcgagcccuggugg

SEQ ID NO: 3011218 - RNA, 23 nt, Human
acccagcgagcccugguggcagu

SEQ ID NO: 3011219 - RNA, 24 nt, Human
acccagcgagcccugguggcagug

SEQ ID NO: 3011220 - RNA, 16 nt, Human
accccuucgcuccugu

SEQ ID NO: 3011221 - RNA, 14 nt, Human
accccuucgcuccu

SEQ ID NO: 3011222 - RNA, 15 nt, Human
accccuucgcuccug

SEQ ID NO: 3011223 - RNA, 12 nt, Human
acccccacccaa

SEQ ID NO: 3011224 - RNA, 14 nt, Human
ucagcggggacagc

SEQ ID NO: 3011225 - RNA, 20 nt, Human
ucagcuuguaaauagcucag

SEQ ID NO: 3011226 - RNA, 18 nt, Human
ucagaaucucaaauaacu

SEQ ID NO: 3011227 - RNA, 19 nt, Human
ucagaaucucaaauaacua

SEQ ID NO: 3011228 - RNA, 16 nt, Human
ucagagacuccugcag

SEQ ID NO: 3011229 - RNA, 21 nt, Human
ucagagacuccugcaggcagc

SEQ ID NO: 3011230 - RNA, 20 nt, Human
ucagagacuccugcaggcag

SEQ ID NO: 3011231 - RNA, 17 nt, Human
ucagagacuccugcagg

SEQ ID NO: 3011232 - RNA, 12 nt, Human
ucagagccugca

SEQ ID NO: 3011233 - RNA, 23 nt, Human
ucagagagggugggagugggccc

SEQ ID NO: 3011234 - RNA, 21 nt, Human
ucagagagggugggagugggc

SEQ ID NO: 3011235 - RNA, 16 nt, Human
ucagagagggugggag

SEQ ID NO: 3011236 - RNA, 13 nt, Human
ucagagccugcag

SEQ ID NO: 3011237 - RNA, 14 nt, Human
ucagagccugcagu

SEQ ID NO: 3011238 - RNA, 15 nt, Human
ucagagccugcaguu

SEQ ID NO: 3011239 - RNA, 18 nt, Human
ucagagccugcaguuauu

SEQ ID NO: 3011240 - RNA, 14 nt, Human
ucagaagacacuga

SEQ ID NO: 3011241 - RNA, 22 nt, Human
ucagaaguuucugccgcagccc

SEQ ID NO: 3011242 - RNA, 19 nt, Human
ucagaaguuucugccgcag

SEQ ID NO: 3011243 - RNA, 21 nt, Human
ucacucuuauugcccacgcug

SEQ ID NO: 3011244 - RNA, 23 nt, Human
ucacucuuauugcccacgcugga

SEQ ID NO: 3011245 - RNA, 22 nt, Human
accauggucggaaaacaugcua

SEQ ID NO: 3011246 - RNA, 13 nt, Human
acccacugcucug

SEQ ID NO: 3011247 - RNA, 14 nt, Human
acccacugcucugg

SEQ ID NO: 3011248 - RNA, 15 nt, Human
acccacugcucuggu

SEQ ID NO: 3011249 - RNA, 11 nt, Human
acccacugcuu

SEQ ID NO: 3011250 - RNA, 10 nt, Human
acccacugcu

SEQ ID NO: 3011251 - RNA, 11 nt, Human
acccacugcuc

SEQ ID NO: 3011252 - RNA, 14 nt, Human
acauagcugugauu

SEQ ID NO: 3011253 - RNA, 14 nt, Human
acauauugauuucc

SEQ ID NO: 3011254 - RNA, 16 nt, Human
acauauugauuuccgu

SEQ ID NO: 3011255 - RNA, 23 nt, Human
acauauugauuuccguuaaaaua

SEQ ID NO: 3011256 - RNA, 18 nt, Human
acauauugauuuccguua

SEQ ID NO: 3011257 - RNA, 22 nt, Human
acauauugauuuccguuaaaau

SEQ ID NO: 3011258 - RNA, 13 nt, Human
acaucuguuuugu

SEQ ID NO: 3011259 - RNA, 13 nt, Human
acaucuugcucug

SEQ ID NO: 3011260 - RNA, 16 nt, Human
acaugaaaacacauuu

SEQ ID NO: 3011261 - RNA, 18 nt, Human
acaugaaaacacauuuuu

SEQ ID NO: 3011262 - RNA, 19 nt, Human
acaugaaaacacauuuuuc

SEQ ID NO: 3011263 - RNA, 21 nt, Human
acaucuugcucugcugacaga

SEQ ID NO: 3011264 - RNA, 17 nt, Human
acaugaaaacacauuuu

SEQ ID NO: 3011265 - RNA, 18 nt, Human
acaucuugcucugcugac

SEQ ID NO: 3011266 - RNA, 19 nt, Human
acaucuugcucugcugaca

SEQ ID NO: 3011267 - RNA, 16 nt, Human
acaucaacaucuuggu

SEQ ID NO: 3011268 - RNA, 18 nt, Human
acaucaacaucuugguca

SEQ ID NO: 3011269 - RNA, 16 nt, Human
acaguuggguuuuuua

SEQ ID NO: 3011270 - RNA, 18 nt, Human
acaguuggguuuuuuaag

SEQ ID NO: 3011271 - RNA, 20 nt, Human
acaguugaaaaacagcugag

SEQ ID NO: 3011272 - RNA, 16 nt, Human
acaguugaaaaacagc

SEQ ID NO: 3011273 - RNA, 15 nt, Human
acaguugaaaaacag

SEQ ID NO: 3011274 - RNA, 23 nt, Human
uauuuccuauauuguuuucagug

SEQ ID NO: 3011275 - RNA, 22 nt, Human
uauuucccucaccuuucccauc

SEQ ID NO: 3011276 - RNA, 20 nt, Human
acauacuuuuuggguuuauu

SEQ ID NO: 3011277 - RNA, 17 nt, Human
acauacuuuuuggguuu

SEQ ID NO: 3011278 - RNA, 13 nt, Human
acauacuuuuugg

SEQ ID NO: 3011279 - RNA, 11 nt, Human
acauacuuuuu

SEQ ID NO: 3011280 - RNA, 17 nt, Human
acauacucccaucugug

SEQ ID NO: 3011281 - RNA, 14 nt, Human
acauacucugcuua

SEQ ID NO: 3011282 - RNA, 13 nt, Human
acauacuaaccag

SEQ ID NO: 3011283 - RNA, 21 nt, Human
acauacuaaccagcagaaaug

SEQ ID NO: 3011284 - RNA, 22 nt, Human
acauacuaaccagcagaaaugc

SEQ ID NO: 3011285 - RNA, 13 nt, Human
acauacucccauc

SEQ ID NO: 3011286 - RNA, 16 nt, Human
acaguuuguuaguaug

SEQ ID NO: 3011287 - RNA, 20 nt, Human
acaguuuguuaguaugaggc

SEQ ID NO: 3011288 - RNA, 14 nt, Human
ucaaggcuuagacc

SEQ ID NO: 3011289 - RNA, 11 nt, Human
ucaaguauuau

SEQ ID NO: 3011290 - RNA, 15 nt, Human
ucaaguauuauaccu

SEQ ID NO: 3011291 - RNA, 23 nt, Human
ucaaguauuauaccuuuuuuaga

SEQ ID NO: 3011292 - RNA, 16 nt, Human
ucaaguauuauaccuu

SEQ ID NO: 3011293 - RNA, 21 nt, Human
ucaaguauuauaccuuuuuua

SEQ ID NO: 3011294 - RNA, 16 nt, Human
ucaagaaugcaguacu

SEQ ID NO: 3011295 - RNA, 21 nt, Human
acauuaaaugacucuucccuc

SEQ ID NO: 3011296 - RNA, 19 nt, Human
acauuaaaugacucuuccc

SEQ ID NO: 3011297 - RNA, 15 nt, Human
acauuaaaugacucu

SEQ ID NO: 3011298 - RNA, 17 nt, Human
acaugcuguacauacuu

SEQ ID NO: 3011299 - RNA, 19 nt, Human
acauguccaagaagcccag

SEQ ID NO: 3011300 - RNA, 21 nt, Human
acauguccaagaagcccagga

SEQ ID NO: 3011301 - RNA, 14 nt, Human
acaugcugaacauc

SEQ ID NO: 3011302 - RNA, 21 nt, Human
acaugcugaacaucacagcuu

SEQ ID NO: 3011303 - RNA, 17 nt, Human
acauuagguugugaaug

SEQ ID NO: 3011304 - RNA, 16 nt, Human
acauuagguugugaau

SEQ ID NO: 3011305 - RNA, 15 nt, Human
acauuagguugugaa

SEQ ID NO: 3011306 - RNA, 12 nt, Human
acauucuguuaa

SEQ ID NO: 3011307 - RNA, 15 nt, Human
ucaaauuucuaaauc

SEQ ID NO: 3011308 - RNA, 16 nt, Human
ucaaauuucuaaaucu

SEQ ID NO: 3011309 - RNA, 15 nt, Human
acauucuguuaauca

SEQ ID NO: 3011310 - RNA, 14 nt, Human
ucaaauuucuaaau

SEQ ID NO: 3011311 - RNA, 17 nt, Human
ucaaauuucuaaaucuc

SEQ ID NO: 3011312 - RNA, 16 nt, Human
ucaacagguuuuccug

SEQ ID NO: 3011313 - RNA, 15 nt, Human
uauuugugagacugu

SEQ ID NO: 3011314 - RNA, 18 nt, Human
ucaaauaacuaaaaggua

SEQ ID NO: 3011315 - RNA, 22 nt, Human
acaugcuacacacugcauguuu

SEQ ID NO: 3011316 - RNA, 15 nt, Human
acaugaucuucuuua

SEQ ID NO: 3011317 - RNA, 17 nt, Human
acaugaucuucuuuaua

SEQ ID NO: 3011318 - RNA, 19 nt, Human
acaugagcaucaggccagg

SEQ ID NO: 3011319 - RNA, 18 nt, Human
acaugagcaucaggccag

SEQ ID NO: 3011320 - RNA, 17 nt, Human
acaugagcaucaggcca

SEQ ID NO: 3011321 - RNA, 20 nt, Human
uauccuagucauucuucccu

SEQ ID NO: 3011322 - RNA, 15 nt, Human
uaucucagggccugg

SEQ ID NO: 3011323 - RNA, 13 nt, Human
uaucucagggccu

SEQ ID NO: 3011324 - RNA, 19 nt, Human
uaucccuacuguaauuugu

SEQ ID NO: 3011325 - RNA, 20 nt, Human
uaucccuacuguaauuugug

SEQ ID NO: 3011326 - RNA, 22 nt, Human
uauccuaauaaaaaggugacca

SEQ ID NO: 3011327 - RNA, 18 nt, Human
acagagcuacacagggga

SEQ ID NO: 3011328 - RNA, 21 nt, Human
acagagcaagugagacccugu

SEQ ID NO: 3011329 - RNA, 16 nt, Human
acagaguuguuacauu

SEQ ID NO: 3011330 - RNA, 17 nt, Human
acagaguuguuacauuu

SEQ ID NO: 3011331 - RNA, 18 nt, Human
acagaguuguuacauuuu

SEQ ID NO: 3011332 - RNA, 19 nt, Human
acagaguuguuacauuuuu

SEQ ID NO: 3011333 - RNA, 20 nt, Human
acagaguuguuacauuuuua

SEQ ID NO: 3011334 - RNA, 17 nt, Human
acagcaacacaaagcuu

SEQ ID NO: 3011335 - RNA, 20 nt, Human
acagcccgggcucugccucc

SEQ ID NO: 3011336 - RNA, 22 nt, Human
acagcccgggcucugccuccca

SEQ ID NO: 3011337 - RNA, 21 nt, Human
acagcccgggcucugccuccc

SEQ ID NO: 3011338 - RNA, 20 nt, Human
acagcaacacaaagcuuuug

SEQ ID NO: 3011339 - RNA, 23 nt, Human
acagcccgggcucugccucccau

SEQ ID NO: 3011340 - RNA, 15 nt, Human
acagaguuguuacau

SEQ ID NO: 3011341 - RNA, 21 nt, Human
acagaguuguuacauuuuuaa

SEQ ID NO: 3011342 - RNA, 22 nt, Human
acagaguuguuacauuuuuaag

SEQ ID NO: 3011343 - RNA, 20 nt, Human
acagauagauauaugcucug

SEQ ID NO: 3011344 - RNA, 20 nt, Human
acagauacuccuccaagguu

SEQ ID NO: 3011345 - RNA, 23 nt, Human
acagaugggugcuuggaggaagg

SEQ ID NO: 3011346 - RNA, 15 nt, Human
acacucuauaacaaa

SEQ ID NO: 3011347 - RNA, 13 nt, Human
acacucugagacu

SEQ ID NO: 3011348 - RNA, 11 nt, Human
acacucugaga

SEQ ID NO: 3011349 - RNA, 13 nt, Human
acacuccuucaca

SEQ ID NO: 3011350 - RNA, 22 nt, Human
acacucacauuuauucugcuca

SEQ ID NO: 3011351 - RNA, 15 nt, Human
acacuguucucugcc

SEQ ID NO: 3011352 - RNA, 14 nt, Human
acacuguucucugc

SEQ ID NO: 3011353 - RNA, 20 nt, Human
acacuguucucugcccucca

SEQ ID NO: 3011354 - RNA, 18 nt, Human
acacuguucucugcccuc

SEQ ID NO: 3011355 - RNA, 17 nt, Human
acacuguucucugcccu

SEQ ID NO: 3011356 - RNA, 16 nt, Human
acacuguucucugccc

SEQ ID NO: 3011357 - RNA, 23 nt, Human
acacuguucucugcccuccaaga

SEQ ID NO: 3011358 - RNA, 22 nt, Human
acacuguucucugcccuccaag

SEQ ID NO: 3011359 - RNA, 13 nt, Human
acacuugugaaua

SEQ ID NO: 3011360 - RNA, 12 nt, Human
acacuugugaau

SEQ ID NO: 3011361 - RNA, 23 nt, Human
acacuguuucaaacuuuacuaug

SEQ ID NO: 3011362 - RNA, 18 nt, Human
acacuugugaauaaagag

SEQ ID NO: 3011363 - RNA, 15 nt, Human
acacuguuucaaacu

SEQ ID NO: 3011364 - RNA, 18 nt, Human
acagaaaauucuucucca

SEQ ID NO: 3011365 - RNA, 20 nt, Human
uauauucauucuuuuugaaa

SEQ ID NO: 3011366 - RNA, 19 nt, Human
uauauucauucuuuuugaa

SEQ ID NO: 3011367 - RNA, 21 nt, Human
acagacuggaagcacagcuuc

SEQ ID NO: 3011368 - RNA, 17 nt, Human
acagacuggaagcacag

SEQ ID NO: 3011369 - RNA, 19 nt, Human
acagacuggaagcacagcu

SEQ ID NO: 3011370 - RNA, 18 nt, Human
acagacacaggcccggcu

SEQ ID NO: 3011371 - RNA, 22 nt, Human
acagacacaggcccggcuccag

SEQ ID NO: 3011372 - RNA, 17 nt, Human
acagacacaggcccggc

SEQ ID NO: 3011373 - RNA, 15 nt, Human
acagacacaggcccg

SEQ ID NO: 3011374 - RNA, 18 nt, Human
acacaugcugaacaucac

SEQ ID NO: 3011375 - RNA, 13 nt, Human
acacauguccaag

SEQ ID NO: 3011376 - RNA, 19 nt, Human
acacauguccaagaagccc

SEQ ID NO: 3011377 - RNA, 18 nt, Human
acacauguccaagaagcc

SEQ ID NO: 3011378 - RNA, 12 nt, Human
acacccagccca

SEQ ID NO: 3011379 - RNA, 13 nt, Human
acacccagcccac

SEQ ID NO: 3011380 - RNA, 22 nt, Human
acacauguccaagaagcccagg

SEQ ID NO: 3011381 - RNA, 21 nt, Human
acacauguccaagaagcccag

SEQ ID NO: 3011382 - RNA, 23 nt, Human
uaguucaaucuggauucauauuu

SEQ ID NO: 3011383 - RNA, 22 nt, Human
uauaaccaguguuguggauuua

SEQ ID NO: 3011384 - RNA, 16 nt, Human
acacuaaccacgcugg

SEQ ID NO: 3011385 - RNA, 17 nt, Human
acacuaaccacgcugga

SEQ ID NO: 3011386 - RNA, 19 nt, Human
acacuaaccacgcuggacc

SEQ ID NO: 3011387 - RNA, 14 nt, Human
acaccuugacaggg

SEQ ID NO: 3011388 - RNA, 15 nt, Human
acaccuugacagggc

SEQ ID NO: 3011389 - RNA, 16 nt, Human
acaccuugacagggca

SEQ ID NO: 3011390 - RNA, 18 nt, Human
acaccucugcacaagcug

SEQ ID NO: 3011391 - RNA, 14 nt, Human
acacaccuaacuua

SEQ ID NO: 3011392 - RNA, 11 nt, Human
acacacagcuc

SEQ ID NO: 3011393 - RNA, 12 nt, Human
acacacagcucu

SEQ ID NO: 3011394 - RNA, 19 nt, Human
acacacagcucuguccugg

SEQ ID NO: 3011395 - RNA, 15 nt, Human
acaaugguuuucuug

SEQ ID NO: 3011396 - RNA, 21 nt, Human
acaaugguuuucuuguguguu

SEQ ID NO: 3011397 - RNA, 12 nt, Human
uagguugugaau

SEQ ID NO: 3011398 - RNA, 21 nt, Human
uagguuggcaaaaaggcagga

SEQ ID NO: 3011399 - RNA, 22 nt, Human
acacaguauuacuucugcuaca

SEQ ID NO: 3011400 - RNA, 11 nt, Human
acacagugagu

SEQ ID NO: 3011401 - RNA, 22 nt, Human
acacagcucuucuccaggcugu

SEQ ID NO: 3011402 - RNA, 13 nt, Human
uaguagagacagg

SEQ ID NO: 3011403 - RNA, 19 nt, Human
aauugauugggcacaucau

SEQ ID NO: 3011404 - RNA, 23 nt, Human
aauugauugggcacaucauuuca

SEQ ID NO: 3011405 - RNA, 20 nt, Human
aauugauugggcacaucauu

SEQ ID NO: 3011406 - RNA, 23 nt, Human
uacuguaauuugugauacaaugc

SEQ ID NO: 3011407 - RNA, 14 nt, Human
uacugaacaguaac

SEQ ID NO: 3011408 - RNA, 23 nt, Human
uacugggaaagggauuuucagcc

SEQ ID NO: 3011409 - RNA, 15 nt, Human
uacuguaauuuguga

SEQ ID NO: 3011410 - RNA, 16 nt, Human
uacuguaauuugugau

SEQ ID NO: 3011411 - RNA, 17 nt, Human
uacuguaauuugugaua

SEQ ID NO: 3011412 - RNA, 21 nt, Human
uacuaaaaguuuugagaaauu

SEQ ID NO: 3011413 - RNA, 16 nt, Human
uacgucugacaggcaa

SEQ ID NO: 3011414 - RNA, 13 nt, Human
uacgugaguccug

SEQ ID NO: 3011415 - RNA, 22 nt, Human
uacucuacccucuuagaaaaac

SEQ ID NO: 3011416 - RNA, 16 nt, Human
uacucuacccucuuag

SEQ ID NO: 3011417 - RNA, 15 nt, Human
uacgucugacaggca

SEQ ID NO: 3011418 - RNA, 18 nt, Human
aauuuacuuuaaacuaca

SEQ ID NO: 3011419 - RNA, 15 nt, Human
aauuuacuuuaaacu

SEQ ID NO: 3011420 - RNA, 16 nt, Human
aauuuacuuuaaacua

SEQ ID NO: 3011421 - RNA, 17 nt, Human
aauuuaccugaagucuu

SEQ ID NO: 3011422 - RNA, 15 nt, Human
aauuuaccugaaguc

SEQ ID NO: 3011423 - RNA, 13 nt, Human
aauuuauuauggc

SEQ ID NO: 3011424 - RNA, 14 nt, Human
aauuuauuauggca

SEQ ID NO: 3011425 - RNA, 14 nt, Human
aauuugcacauuaa

SEQ ID NO: 3011426 - RNA, 21 nt, Human
uacuuauuuaaauagaugaca

SEQ ID NO: 3011427 - RNA, 14 nt, Human
uacuuauuuaaaua

SEQ ID NO: 3011428 - RNA, 12 nt, Human
uacuuauuuaaa

SEQ ID NO: 3011429 - RNA, 12 nt, Human
aauuugcacauu

SEQ ID NO: 3011430 - RNA, 13 nt, Human
uacuucuccaccc

SEQ ID NO: 3011431 - RNA, 18 nt, Human
uacuucuccacccugcuc

SEQ ID NO: 3011432 - RNA, 20 nt, Human
uacuucuccacccugcucuc

SEQ ID NO: 3011433 - RNA, 15 nt, Human
uacuucugcuacaua

SEQ ID NO: 3011434 - RNA, 14 nt, Human
uacuucuuauacau

SEQ ID NO: 3011435 - RNA, 15 nt, Human
uacuucuuauacauu

SEQ ID NO: 3011436 - RNA, 16 nt, Human
uacuucuuauacauuu

SEQ ID NO: 3011437 - RNA, 10 nt, Human
uacuuuuugg

SEQ ID NO: 3011438 - RNA, 16 nt, Human
aauuugcacauuaaau

SEQ ID NO: 3011439 - RNA, 23 nt, Human
aauuugccuaauaugaugacugu

SEQ ID NO: 3011440 - RNA, 16 nt, Human
aauuuguuauaaugaa

SEQ ID NO: 3011441 - RNA, 20 nt, Human
aauuugugauacaaugcugu

SEQ ID NO: 3011442 - RNA, 23 nt, Human
acaaaggauacuuauuuaaauag

SEQ ID NO: 3011443 - RNA, 21 nt, Human
acaaaggauacuuauuuaaau

SEQ ID NO: 3011444 - RNA, 23 nt, Human
acaaagcuuuugcauauugcaua

SEQ ID NO: 3011445 - RNA, 22 nt, Human
acaaagcuuuugcauauugcau

SEQ ID NO: 3011446 - RNA, 15 nt, Human
acaaagcuuuugcau

SEQ ID NO: 3011447 - RNA, 21 nt, Human
acaaagcgugguggacaugca

SEQ ID NO: 3011448 - RNA, 14 nt, Human
acaaaacuuuucua

SEQ ID NO: 3011449 - RNA, 22 nt, Human
acaagcuccaagcucccaggca

SEQ ID NO: 3011450 - RNA, 19 nt, Human
acaagcuccaagcucccag

SEQ ID NO: 3011451 - RNA, 17 nt, Human
acaagcuccaagcuccc

SEQ ID NO: 3011452 - RNA, 16 nt, Human
acaagcuccaagcucc

SEQ ID NO: 3011453 - RNA, 15 nt, Human
acaagcuccaagcuc

SEQ ID NO: 3011454 - RNA, 16 nt, Human
uagcucaggugucccu

SEQ ID NO: 3011455 - RNA, 17 nt, Human
acaacaucuuuuucuac

SEQ ID NO: 3011456 - RNA, 16 nt, Human
acaagaccacguuucu

SEQ ID NO: 3011457 - RNA, 17 nt, Human
acaagaccacguuucua

SEQ ID NO: 3011458 - RNA, 18 nt, Human
acaagagcccaggccucc

SEQ ID NO: 3011459 - RNA, 22 nt, Human
acaagagcccaggccuccuaca

SEQ ID NO: 3011460 - RNA, 17 nt, Human
acaagcgugagccacug

SEQ ID NO: 3011461 - RNA, 13 nt, Human
acaagcuccaagc

SEQ ID NO: 3011462 - RNA, 21 nt, Human
aauaucccuuggacauuuuau

SEQ ID NO: 3011463 - RNA, 20 nt, Human
aauaucccuuggacauuuua

SEQ ID NO: 3011464 - RNA, 22 nt, Human
aauaucccuuggacauuuuaug

SEQ ID NO: 3011465 - RNA, 12 nt, Human
aauauccuaaua

SEQ ID NO: 3011466 - RNA, 13 nt, Human
aauauccuaauaa

SEQ ID NO: 3011467 - RNA, 14 nt, Human
aauauccuaauaaa

SEQ ID NO: 3011468 - RNA, 20 nt, Human
aauauccaauugcugcuugu

SEQ ID NO: 3011469 - RNA, 15 nt, Human
aauauccuaauaaaa

SEQ ID NO: 3011470 - RNA, 19 nt, Human
aauauccuaauaaaaaggu

SEQ ID NO: 3011471 - RNA, 14 nt, Human
uaacauggaaguac

SEQ ID NO: 3011472 - RNA, 15 nt, Human
uaacauggaaguacu

SEQ ID NO: 3011473 - RNA, 15 nt, Human
uaacuaaaagguaug

SEQ ID NO: 3011474 - RNA, 14 nt, Human
uaacuaaaagguau

SEQ ID NO: 3011475 - RNA, 22 nt, Human
aauagaugacauugacuauuuu

SEQ ID NO: 3011476 - RNA, 21 nt, Human
aauagaugacauugacuauuu

SEQ ID NO: 3011477 - RNA, 19 nt, Human
aauagaugacauugacuau

SEQ ID NO: 3011478 - RNA, 20 nt, Human
aauagcauguccuaaugcuu

SEQ ID NO: 3011479 - RNA, 13 nt, Human
aauagcugggacu

SEQ ID NO: 3011480 - RNA, 14 nt, Human
aauagcugggacua

SEQ ID NO: 3011481 - RNA, 18 nt, Human
aauagacaauuuauuaug

SEQ ID NO: 3011482 - RNA, 23 nt, Human
aauagacaauuuauuauggcaca

SEQ ID NO: 3011483 - RNA, 19 nt, Human
aauaggaaaaacugauuuu

SEQ ID NO: 3011484 - RNA, 18 nt, Human
aauaggaaaaacugauuu

SEQ ID NO: 3011485 - RNA, 17 nt, Human
aauaggaaaaacugauu

SEQ ID NO: 3011486 - RNA, 16 nt, Human
aauaggaaaaacugau

SEQ ID NO: 3011487 - RNA, 15 nt, Human
aauaggaaaaacuga

SEQ ID NO: 3011488 - RNA, 21 nt, Human
aauauccuaauaaaaagguga

SEQ ID NO: 3011489 - RNA, 16 nt, Human
aauaucugaaaaugua

SEQ ID NO: 3011490 - RNA, 17 nt, Human
aauaucugaaaauguau

SEQ ID NO: 3011491 - RNA, 18 nt, Human
aauaucugaaaauguaug

SEQ ID NO: 3011492 - RNA, 19 nt, Human
aauaucugaaaauguaugu

SEQ ID NO: 3011493 - RNA, 20 nt, Human
aauaucugaaaauguaugug

SEQ ID NO: 3011494 - RNA, 15 nt, Human
uaacuuuuauaaacu

SEQ ID NO: 3011495 - RNA, 17 nt, Human
uaacuuuuauaaacuuu

SEQ ID NO: 3011496 - RNA, 18 nt, Human
uaacuuuuauaaacuuua

SEQ ID NO: 3011497 - RNA, 17 nt, Human
aauaugaugacuguuuu

SEQ ID NO: 3011498 - RNA, 16 nt, Human
aauaugaugacuguuu

SEQ ID NO: 3011499 - RNA, 17 nt, Human
aauauugauaugcuuau

SEQ ID NO: 3011500 - RNA, 18 nt, Human
aauauugauaugcuuaua

SEQ ID NO: 3011501 - RNA, 15 nt, Human
aauaugcacacauuu

SEQ ID NO: 3011502 - RNA, 22 nt, Human
aauauugcugauggugcaauga

SEQ ID NO: 3011503 - RNA, 21 nt, Human
aauauugcugauggugcaaug

SEQ ID NO: 3011504 - RNA, 18 nt, Human
aauauugcugauggugca

SEQ ID NO: 3011505 - RNA, 15 nt, Human
aauauugcugauggu

SEQ ID NO: 3011506 - RNA, 13 nt, Human
aauauugcugaug

SEQ ID NO: 3011507 - RNA, 12 nt, Human
aauauugcugau

SEQ ID NO: 3011508 - RNA, 11 nt, Human
aauauugcuga

SEQ ID NO: 3011509 - RNA, 21 nt, Human
aauauuuuagguguaaaauaa

SEQ ID NO: 3011510 - RNA, 21 nt, Human
aauauugguugggaugacuug

SEQ ID NO: 3011511 - RNA, 15 nt, Human
aauauugguugggau

SEQ ID NO: 3011512 - RNA, 21 nt, Human
uaaauagaugacauugacuau

SEQ ID NO: 3011513 - RNA, 19 nt, Human
uaaauagaugacauugacu

SEQ ID NO: 3011514 - RNA, 14 nt, Human
uaaauagaugacau

SEQ ID NO: 3011515 - RNA, 14 nt, Human
uaaaucuccaaaau

SEQ ID NO: 3011516 - RNA, 15 nt, Human
uaaaucuccaaaaua

SEQ ID NO: 3011517 - RNA, 18 nt, Human
uaaaucuccaaaauaaaa

SEQ ID NO: 3011518 - RNA, 22 nt, Human
uaaaucuccaaaauaaaacuuu

SEQ ID NO: 3011519 - RNA, 12 nt, Human
uaaauuaacuuu

SEQ ID NO: 3011520 - RNA, 14 nt, Human
uaaauuaacuuuua

SEQ ID NO: 3011521 - RNA, 17 nt, Human
uaaauuaacuuuuauaa

SEQ ID NO: 3011522 - RNA, 15 nt, Human
uaaauuaacuuuuau

SEQ ID NO: 3011523 - RNA, 16 nt, Human
uaaauuaacuuuuaua

SEQ ID NO: 3011524 - RNA, 15 nt, Human
uaaauguugaaagau

SEQ ID NO: 3011525 - RNA, 20 nt, Human
uaaauguugaaagaucaaaa

SEQ ID NO: 3011526 - RNA, 23 nt, Human
uaaaugcaccuggaauauauaac

SEQ ID NO: 3011527 - RNA, 19 nt, Human
uaaauaaugugaaacugga

SEQ ID NO: 3011528 - RNA, 16 nt, Human
aauaaaaaggugacca

SEQ ID NO: 3011529 - RNA, 12 nt, Human
aauaaaaaggug

SEQ ID NO: 3011530 - RNA, 13 nt, Human
aauaaaaagguga

SEQ ID NO: 3011531 - RNA, 20 nt, Human
aaguuuuuauggcuuuugug

SEQ ID NO: 3011532 - RNA, 16 nt, Human
guuuugaagauucuau

SEQ ID NO: 3011533 - RNA, 17 nt, Human
guuuugaagauucuaug

SEQ ID NO: 3011534 - RNA, 20 nt, Human
guuuugaagauucuauguua

SEQ ID NO: 3011535 - RNA, 17 nt, Human
aauaacuggaacacucu

SEQ ID NO: 3011536 - RNA, 22 nt, Human
aauaacauguaauuaaguacua

SEQ ID NO: 3011537 - RNA, 18 nt, Human
aauaaaacuuuuuaaaau

SEQ ID NO: 3011538 - RNA, 12 nt, Human
aauaaaacuuuu

SEQ ID NO: 3011539 - RNA, 14 nt, Human
aauaaaacuuuuua

SEQ ID NO: 3011540 - RNA, 15 nt, Human
aauaaaacuuuuuaa

SEQ ID NO: 3011541 - RNA, 16 nt, Human
aauaaaucauaaaacu

SEQ ID NO: 3011542 - RNA, 18 nt, Human
aaugcaguacuaacauuu

SEQ ID NO: 3011543 - RNA, 13 nt, Human
aaugcccagcccc

SEQ ID NO: 3011544 - RNA, 15 nt, Human
aaugcccagccccuu

SEQ ID NO: 3011545 - RNA, 14 nt, Human
aaugcccagccccu

SEQ ID NO: 3011546 - RNA, 18 nt, Human
aauggaagacagcucuua

SEQ ID NO: 3011547 - RNA, 16 nt, Human
aauggacguguuauga

SEQ ID NO: 3011548 - RNA, 13 nt, Human
aaugcugugcccu

SEQ ID NO: 3011549 - RNA, 20 nt, Human
aaugcugugcccuaaagugu

SEQ ID NO: 3011550 - RNA, 21 nt, Human
aaugcugugcccuaaagugua

SEQ ID NO: 3011551 - RNA, 24 nt, Human
aaugcccagccccuucugacccau

SEQ ID NO: 3011552 - RNA, 23 nt, Human
aaugcccagccccuucugaccca

SEQ ID NO: 3011553 - RNA, 22 nt, Human
aaugcccagccccuucugaccc

SEQ ID NO: 3011554 - RNA, 20 nt, Human
aaugcccagccccuucugac

SEQ ID NO: 3011555 - RNA, 14 nt, Human
aaugagcuuaagaa

SEQ ID NO: 3011556 - RNA, 14 nt, Human
aaugagccuggcaa

SEQ ID NO: 3011557 - RNA, 16 nt, Human
uaauuauugauguuuu

SEQ ID NO: 3011558 - RNA, 18 nt, Human
uaauuauugauguuuuca

SEQ ID NO: 3011559 - RNA, 15 nt, Human
uacaaaagcauguga

SEQ ID NO: 3011560 - RNA, 20 nt, Human
uacaaaaagcauaaaaauua

SEQ ID NO: 3011561 - RNA, 15 nt, Human
uacaaaaagcauaaa

SEQ ID NO: 3011562 - RNA, 19 nt, Human
uacaccacuacauucuguu

SEQ ID NO: 3011563 - RNA, 20 nt, Human
uacaccacuacauucuguua

SEQ ID NO: 3011564 - RNA, 15 nt, Human
uacaccacuacauuc

SEQ ID NO: 3011565 - RNA, 16 nt, Human
uacaccacuacauucu

SEQ ID NO: 3011566 - RNA, 17 nt, Human
uacaccacuacauucug

SEQ ID NO: 3011567 - RNA, 18 nt, Human
uacaccacuacauucugu

SEQ ID NO: 3011568 - RNA, 23 nt, Human
uacagagcccacgcccccacugg

SEQ ID NO: 3011569 - RNA, 12 nt, Human
aauguacugcau

SEQ ID NO: 3011570 - RNA, 15 nt, Human
uacauaaugcgugca

SEQ ID NO: 3011571 - RNA, 19 nt, Human
uacauaaugcgugcauacc

SEQ ID NO: 3011572 - RNA, 20 nt, Human
uacauaaugcgugcauacca

SEQ ID NO: 3011573 - RNA, 17 nt, Human
uacauaaugcgugcaua

SEQ ID NO: 3011574 - RNA, 15 nt, Human
uacaguaucucaggg

SEQ ID NO: 3011575 - RNA, 12 nt, Human
aauguaugugua

SEQ ID NO: 3011576 - RNA, 14 nt, Human
aauguauguguaag

SEQ ID NO: 3011577 - RNA, 14 nt, Human
aauguacugcauau

SEQ ID NO: 3011578 - RNA, 18 nt, Human
aauguacugcauaugaaa

SEQ ID NO: 3011579 - RNA, 13 nt, Human
aaugacucuuccc

SEQ ID NO: 3011580 - RNA, 18 nt, Human
aaugacuuacuguacaug

SEQ ID NO: 3011581 - RNA, 14 nt, Human
aaugacuuacugua

SEQ ID NO: 3011582 - RNA, 17 nt, Human
aaugacuuacuguacau

SEQ ID NO: 3011583 - RNA, 15 nt, Human
aaugagccuggcaag

SEQ ID NO: 3011584 - RNA, 18 nt, Human
uaaugguaguuuuacagu

SEQ ID NO: 3011585 - RNA, 16 nt, Human
uaaugguaguuuuaca

SEQ ID NO: 3011586 - RNA, 13 nt, Human
uaaugaggaaacu

SEQ ID NO: 3011587 - RNA, 18 nt, Human
uaaugagcuuaagaaauu

SEQ ID NO: 3011588 - RNA, 21 nt, Human
uaaugacuuaagcacacuuga

SEQ ID NO: 3011589 - RNA, 15 nt, Human
uaaugacuuaagcac

SEQ ID NO: 3011590 - RNA, 22 nt, Human
uaaugaaagacuguacaaagua

SEQ ID NO: 3011591 - RNA, 23 nt, Human
uaaugaaagacuguacaaaguag

SEQ ID NO: 3011592 - RNA, 14 nt, Human
uaaugaaagacugu

SEQ ID NO: 3011593 - RNA, 17 nt, Human
uaaugaaagacuguaca

SEQ ID NO: 3011594 - RNA, 18 nt, Human
uaaugaaagacuguacaa

SEQ ID NO: 3011595 - RNA, 19 nt, Human
uaaugaaagacuguacaaa

SEQ ID NO: 3011596 - RNA, 20 nt, Human
aaucuucugaacuuggcgcu

SEQ ID NO: 3011597 - RNA, 13 nt, Human
aaucuucugaacu

SEQ ID NO: 3011598 - RNA, 19 nt, Human
uaaguacuauguaucaaug

SEQ ID NO: 3011599 - RNA, 20 nt, Human
uaaguuuuuauggcuuuugu

SEQ ID NO: 3011600 - RNA, 13 nt, Human
aaucucaaauaac

SEQ ID NO: 3011601 - RNA, 14 nt, Human
aaucucaaauuucu

SEQ ID NO: 3011602 - RNA, 12 nt, Human
aaucucaaauuu

SEQ ID NO: 3011603 - RNA, 15 nt, Human
aaucucaaauaacua

SEQ ID NO: 3011604 - RNA, 18 nt, Human
aaucuaaauggaaccacu

SEQ ID NO: 3011605 - RNA, 13 nt, Human
aaucuaaauggaa

SEQ ID NO: 3011606 - RNA, 15 nt, Human
aaucuaaauggaacc

SEQ ID NO: 3011607 - RNA, 12 nt, Human
aaucuaaaugga

SEQ ID NO: 3011608 - RNA, 21 nt, Human
aacuuuaagaacuaaaauguu

SEQ ID NO: 3011609 - RNA, 13 nt, Human
aacuuuaccuuuu

SEQ ID NO: 3011610 - RNA, 17 nt, Human
aacuuggcgcugccccu

SEQ ID NO: 3011611 - RNA, 11 nt, Human
gugccuuaugg

SEQ ID NO: 3011612 - RNA, 18 nt, Human
aacuugucuuuggacccu

SEQ ID NO: 3011613 - RNA, 15 nt, Human
gugccuaauguguuu

SEQ ID NO: 3011614 - RNA, 15 nt, Human
gugccucaagagaag

SEQ ID NO: 3011615 - RNA, 21 nt, Human
gugaaccaccacacccagccc

SEQ ID NO: 3011616 - RNA, 22 nt, Human
gugccgagaaggaagccuccca

SEQ ID NO: 3011617 - RNA, 12 nt, Human
gugccucuggga

SEQ ID NO: 3011618 - RNA, 13 nt, Human
gugccucugggac

SEQ ID NO: 3011619 - RNA, 14 nt, Human
gugccuuauggaac

SEQ ID NO: 3011620 - RNA, 23 nt, Human
gugccuuauggaacacucugaga

SEQ ID NO: 3011621 - RNA, 21 nt, Human
gugccuuauggaacacucuga

SEQ ID NO: 3011622 - RNA, 20 nt, Human
aagaaagacuaucuaaaugu

SEQ ID NO: 3011623 - RNA, 22 nt, Human
aagaaagacuaucuaaauguug

SEQ ID NO: 3011624 - RNA, 15 nt, Human
aagaaaaaggaugca

SEQ ID NO: 3011625 - RNA, 17 nt, Human
aagaaaaaggaugcaca

SEQ ID NO: 3011626 - RNA, 18 nt, Human
aagaaaaaggaugcacag

SEQ ID NO: 3011627 - RNA, 18 nt, Human
gugcuaggaacacuccuu

SEQ ID NO: 3011628 - RNA, 17 nt, Human
gugcuaggaacacuccu

SEQ ID NO: 3011629 - RNA, 22 nt, Human
gugcuaggaacacuccuucaca

SEQ ID NO: 3011630 - RNA, 21 nt, Human
gugcuaucucccccagcccca

SEQ ID NO: 3011631 - RNA, 24 nt, Human
aagaaugcaguacuaacauuuauu

SEQ ID NO: 3011632 - RNA, 16 nt, Human
aagaauugaagcagga

SEQ ID NO: 3011633 - RNA, 23 nt, Human
aagaauugauugggcacaucauu

SEQ ID NO: 3011634 - RNA, 17 nt, Human
aagacccucucaaacua

SEQ ID NO: 3011635 - RNA, 19 nt, Human
guggcaccagcagccugga

SEQ ID NO: 3011636 - RNA, 18 nt, Human
guggauuuaacagaaaug

SEQ ID NO: 3011637 - RNA, 19 nt, Human
guggauuuaacagaaaugu

SEQ ID NO: 3011638 - RNA, 18 nt, Human
guggcaccagcagccugg

SEQ ID NO: 3011639 - RNA, 20 nt, Human
guggcagcucaccucucccu

SEQ ID NO: 3011640 - RNA, 16 nt, Human
guggcagcucaccucu

SEQ ID NO: 3011641 - RNA, 14 nt, Human
guggcagcucaccu

SEQ ID NO: 3011642 - RNA, 22 nt, Human
gugcuaucucccccagccccau

SEQ ID NO: 3011643 - RNA, 19 nt, Human
gugcuaucucccccagccc

SEQ ID NO: 3011644 - RNA, 12 nt, Human
gugcuauguucu

SEQ ID NO: 3011645 - RNA, 21 nt, Human
gugcugggauuacaagcguga

SEQ ID NO: 3011646 - RNA, 22 nt, Human
gugcugggauuacaagcgugag

SEQ ID NO: 3011647 - RNA, 20 nt, Human
gugcugggauuacaggugug

SEQ ID NO: 3011648 - RNA, 17 nt, Human
guggacacagcucuucu

SEQ ID NO: 3011649 - RNA, 23 nt, Human
guggacacagcucuucuccaggc

SEQ ID NO: 3011650 - RNA, 18 nt, Human
guggacacagcucuucuc

SEQ ID NO: 3011651 - RNA, 22 nt, Human
guggacacagcucuucuccagg

SEQ ID NO: 3011652 - RNA, 21 nt, Human
guggaugccugguggcagcug

SEQ ID NO: 3011653 - RNA, 18 nt, Human
aagaugugacauguuuua

SEQ ID NO: 3011654 - RNA, 14 nt, Human
aagaugugacaugu

SEQ ID NO: 3011655 - RNA, 13 nt, Human
aagcaaaggagau

SEQ ID NO: 3011656 - RNA, 12 nt, Human
aagcaaaggaga

SEQ ID NO: 3011657 - RNA, 12 nt, Human
aagaugcagccg

SEQ ID NO: 3011658 - RNA, 18 nt, Human
aagagguuuuaaaaaaau

SEQ ID NO: 3011659 - RNA, 17 nt, Human
gugguuuucuguucuuu

SEQ ID NO: 3011660 - RNA, 23 nt, Human
guguuuccuggcacugcuuccag

SEQ ID NO: 3011661 - RNA, 17 nt, Human
gugucuugcaauggcag

SEQ ID NO: 3011662 - RNA, 18 nt, Human
gugucuugcaauggcagc

SEQ ID NO: 3011663 - RNA, 18 nt, Human
gugucuuuuuucacuaca

SEQ ID NO: 3011664 - RNA, 17 nt, Human
gugugacuacuccccca

SEQ ID NO: 3011665 - RNA, 22 nt, Human
aagacccuuguggucccacccc

SEQ ID NO: 3011666 - RNA, 21 nt, Human
aagacccuuguggucccaccc

SEQ ID NO: 3011667 - RNA, 18 nt, Human
aagacccuugugguccca

SEQ ID NO: 3011668 - RNA, 16 nt, Human
aagacuaucuaaaugu

SEQ ID NO: 3011669 - RNA, 17 nt, Human
aagacuaucuaaauguu

SEQ ID NO: 3011670 - RNA, 18 nt, Human
aagacuaucuaaauguug

SEQ ID NO: 3011671 - RNA, 17 nt, Human
aagacugaguacguugu

SEQ ID NO: 3011672 - RNA, 17 nt, Human
aagacuguacaaaguag

SEQ ID NO: 3011673 - RNA, 21 nt, Human
aagacugaguacguugugcau

SEQ ID NO: 3011674 - RNA, 16 nt, Human
aagacuguacaaagua

SEQ ID NO: 3011675 - RNA, 14 nt, Human
guggguacgggagg

SEQ ID NO: 3011676 - RNA, 20 nt, Human
gugggggaucacagccucug

SEQ ID NO: 3011677 - RNA, 16 nt, Human
gugguuucagaaaugu

SEQ ID NO: 3011678 - RNA, 14 nt, Human
guggugguuuucug

SEQ ID NO: 3011679 - RNA, 23 nt, Human
gugggaggaucucuugagccugg

SEQ ID NO: 3011680 - RNA, 13 nt, Human
gugggauccucca

SEQ ID NO: 3011681 - RNA, 14 nt, Human
gugggagugggccc

SEQ ID NO: 3011682 - RNA, 13 nt, Human
gugggagugggcc

SEQ ID NO: 3011683 - RNA, 23 nt, Human
guggcgcagcauauucaggaagc

SEQ ID NO: 3011684 - RNA, 22 nt, Human
guggcgcagcauauucaggaag

SEQ ID NO: 3011685 - RNA, 22 nt, Human
gugggacacccugugauggggc

SEQ ID NO: 3011686 - RNA, 14 nt, Human
guuacacaaagaac

SEQ ID NO: 3011687 - RNA, 20 nt, Human
guuaguaugaggcauuuguu

SEQ ID NO: 3011688 - RNA, 17 nt, Human
guuaguaugaggcauuu

SEQ ID NO: 3011689 - RNA, 18 nt, Human
guuaaugauagcuacugu

SEQ ID NO: 3011690 - RNA, 18 nt, Human
guuaaucauuagguguga

SEQ ID NO: 3011691 - RNA, 15 nt, Human
guucagcuccagcuc

SEQ ID NO: 3011692 - RNA, 18 nt, Human
guucagcuccagcucacc

SEQ ID NO: 3011693 - RNA, 16 nt, Human
guucagcuccagcuca

SEQ ID NO: 3011694 - RNA, 17 nt, Human
guucagcuccagcucac

SEQ ID NO: 3011695 - RNA, 17 nt, Human
guucaggguuggccccu

SEQ ID NO: 3011696 - RNA, 18 nt, Human
guucaggguuggccccug

SEQ ID NO: 3011697 - RNA, 19 nt, Human
guucaggguuggccccugc

SEQ ID NO: 3011698 - RNA, 19 nt, Human
aagccuccuccagccgcca

SEQ ID NO: 3011699 - RNA, 17 nt, Human
aagcuaggccuggccag

SEQ ID NO: 3011700 - RNA, 18 nt, Human
aagcuaggccuggccaga

SEQ ID NO: 3011701 - RNA, 16 nt, Human
aagcuaggccuggcca

SEQ ID NO: 3011702 - RNA, 22 nt, Human
aagcuauucaguaauaacucua

SEQ ID NO: 3011703 - RNA, 20 nt, Human
guuccauggccucuucagau

SEQ ID NO: 3011704 - RNA, 16 nt, Human
guucccauuugcuccu

SEQ ID NO: 3011705 - RNA, 20 nt, Human
guucccauuugcuccuuucu

SEQ ID NO: 3011706 - RNA, 16 nt, Human
guucuacccaggugcu

SEQ ID NO: 3011707 - RNA, 22 nt, Human
guucccuuugacgccaucccag

SEQ ID NO: 3011708 - RNA, 21 nt, Human
guucccuuugacgccauccca

SEQ ID NO: 3011709 - RNA, 20 nt, Human
guucccuuugacgccauccc

SEQ ID NO: 3011710 - RNA, 23 nt, Human
guucugggacacaguucaauucu

SEQ ID NO: 3011711 - RNA, 21 nt, Human
guucuugguuuguaaauuaac

SEQ ID NO: 3011712 - RNA, 17 nt, Human
guucuuaguuugcaguu

SEQ ID NO: 3011713 - RNA, 22 nt, Human
guugaugaucuuugcagacagg

SEQ ID NO: 3011714 - RNA, 20 nt, Human
guuuaaugguaguuuuacag

SEQ ID NO: 3011715 - RNA, 13 nt, Human
guuggguggaugc

SEQ ID NO: 3011716 - RNA, 18 nt, Human
guuggucccccuuccaug

SEQ ID NO: 3011717 - RNA, 17 nt, Human
aaggaugcuuguacaua

SEQ ID NO: 3011718 - RNA, 19 nt, Human
aaggaugcuuguacauaau

SEQ ID NO: 3011719 - RNA, 18 nt, Human
aaggaugcacagaguugu

SEQ ID NO: 3011720 - RNA, 19 nt, Human
aaggaugcccaaagaugca

SEQ ID NO: 3011721 - RNA, 15 nt, Human
aaggaugcuuguaca

SEQ ID NO: 3011722 - RNA, 16 nt, Human
aaggaugcuuguacau

SEQ ID NO: 3011723 - RNA, 23 nt, Human
guugaugaucuuugcagacaggc

SEQ ID NO: 3011724 - RNA, 13 nt, Human
aaggauccugagc

SEQ ID NO: 3011725 - RNA, 14 nt, Human
aaggauccugagcc

SEQ ID NO: 3011726 - RNA, 23 nt, Human
aaggaugaucuaggaagacuuug

SEQ ID NO: 3011727 - RNA, 18 nt, Human
aaggaugaucuaggaaga

SEQ ID NO: 3011728 - RNA, 17 nt, Human
aaggauccugagccaga

SEQ ID NO: 3011729 - RNA, 15 nt, Human
aaggauccugagcca

SEQ ID NO: 3011730 - RNA, 19 nt, Human
aaggcuaccuuuguauucu

SEQ ID NO: 3011731 - RNA, 18 nt, Human
aaggccaaaggaagcaca

SEQ ID NO: 3011732 - RNA, 16 nt, Human
aaggccaaaggaagca

SEQ ID NO: 3011733 - RNA, 17 nt, Human
guugcccaggcaggucu

SEQ ID NO: 3011734 - RNA, 14 nt, Human
aaggcuccaggagc

SEQ ID NO: 3011735 - RNA, 18 nt, Human
guugcccaggcaggucuu

SEQ ID NO: 3011736 - RNA, 21 nt, Human
guugcccaggcuggcgugcag

SEQ ID NO: 3011737 - RNA, 15 nt, Human
guugcccaggcaggu

SEQ ID NO: 3011738 - RNA, 17 nt, Human
guugcccaggcuggcgu

SEQ ID NO: 3011739 - RNA, 14 nt, Human
guuuuacaguguuu

SEQ ID NO: 3011740 - RNA, 19 nt, Human
guuuucuguucuuucuggc

SEQ ID NO: 3011741 - RNA, 11 nt, Human
guuuucuguuc

SEQ ID NO: 3011742 - RNA, 22 nt, Human
guuugauucagacagcugccug

SEQ ID NO: 3011743 - RNA, 22 nt, Human
guuucuaaaggcuaccuuugua

SEQ ID NO: 3011744 - RNA, 23 nt, Human
guuucuaaaggcuaccuuuguau

SEQ ID NO: 3011745 - RNA, 13 nt, Human
guuugccucugcc

SEQ ID NO: 3011746 - RNA, 16 nt, Human
guuugccucugccucu

SEQ ID NO: 3011747 - RNA, 16 nt, Human
aaggguaucaggugcu

SEQ ID NO: 3011748 - RNA, 15 nt, Human
aaguaauaugcacac

SEQ ID NO: 3011749 - RNA, 16 nt, Human
aaguaauaugcacaca

SEQ ID NO: 3011750 - RNA, 20 nt, Human
guuucuaaagcugccagccg

SEQ ID NO: 3011751 - RNA, 19 nt, Human
guuucuaaaggcuaccuuu

SEQ ID NO: 3011752 - RNA, 12 nt, Human
aaguaauaugca

SEQ ID NO: 3011753 - RNA, 22 nt, Human
aaggggaauguuugccucugcc

SEQ ID NO: 3011754 - RNA, 23 nt, Human
aaggggaauguuugccucugccu

SEQ ID NO: 3011755 - RNA, 17 nt, Human
aagggccuggccugagc

SEQ ID NO: 3011756 - RNA, 14 nt, Human
aagggccuggccug

SEQ ID NO: 3011757 - RNA, 19 nt, Human
aagggccuggccugagcug

SEQ ID NO: 3011758 - RNA, 13 nt, Human
aagggccuggccu

SEQ ID NO: 3011759 - RNA, 16 nt, Human
aaccccaaguuaguuc

SEQ ID NO: 3011760 - RNA, 17 nt, Human
aacccagcucuggucca

SEQ ID NO: 3011761 - RNA, 11 nt, Human
aacccagcucu

SEQ ID NO: 3011762 - RNA, 14 nt, Human
aacccagcucuggu

SEQ ID NO: 3011763 - RNA, 13 nt, Human
aacccagcucugg

SEQ ID NO: 3011764 - RNA, 23 nt, Human
aaccauuuugcugucccuuuucc

SEQ ID NO: 3011765 - RNA, 17 nt, Human
aaccuccgccucuuggg

SEQ ID NO: 3011766 - RNA, 14 nt, Human
aaccuccugggcua

SEQ ID NO: 3011767 - RNA, 13 nt, Human
aacccccagccug

SEQ ID NO: 3011768 - RNA, 14 nt, Human
aacccccagccugc

SEQ ID NO: 3011769 - RNA, 15 nt, Human
aacccccagccugcu

SEQ ID NO: 3011770 - RNA, 16 nt, Human
aacauuuugucauaua

SEQ ID NO: 3011771 - RNA, 13 nt, Human
gucuccauguuug

SEQ ID NO: 3011772 - RNA, 20 nt, Human
aaccacaucuugcucugcug

SEQ ID NO: 3011773 - RNA, 22 nt, Human
aaccacaucuugcucugcugac

SEQ ID NO: 3011774 - RNA, 20 nt, Human
aaccaucauugaaaucuuuu

SEQ ID NO: 3011775 - RNA, 19 nt, Human
aaccaucauugaaaucuuu

SEQ ID NO: 3011776 - RNA, 21 nt, Human
aaccaucauugaaaucuuuuu

SEQ ID NO: 3011777 - RNA, 18 nt, Human
aaccacaucuugcucugc

SEQ ID NO: 3011778 - RNA, 15 nt, Human
aacguggcugcuuca

SEQ ID NO: 3011779 - RNA, 19 nt, Human
aacguggcugcuucaagga

SEQ ID NO: 3011780 - RNA, 16 nt, Human
aacguggcugcuucaa

SEQ ID NO: 3011781 - RNA, 22 nt, Human
aacguggcugcuucaaggaucc

SEQ ID NO: 3011782 - RNA, 19 nt, Human
gugaaccaccacacccagc

SEQ ID NO: 3011783 - RNA, 15 nt, Human
gucuuagauguauau

SEQ ID NO: 3011784 - RNA, 24 nt, Human
gucuuuucuugcaugaggcuagug

SEQ ID NO: 3011785 - RNA, 19 nt, Human
gucuuuucuugcaugaggc

SEQ ID NO: 3011786 - RNA, 14 nt, Human
gucuuuucuugcau

SEQ ID NO: 3011787 - RNA, 17 nt, Human
gucuuuggacccugagg

SEQ ID NO: 3011788 - RNA, 15 nt, Human
gucuuuggacccuga

SEQ ID NO: 3011789 - RNA, 14 nt, Human
gucuuuggacccug

SEQ ID NO: 3011790 - RNA, 18 nt, Human
aacacugguuuuaaauau

SEQ ID NO: 3011791 - RNA, 22 nt, Human
aacacugguuuuaaauauuuug

SEQ ID NO: 3011792 - RNA, 20 nt, Human
aacacuguucucugcccucc

SEQ ID NO: 3011793 - RNA, 15 nt, Human
aacacuguucucugc

SEQ ID NO: 3011794 - RNA, 21 nt, Human
aacacucuauaacaaaggaua

SEQ ID NO: 3011795 - RNA, 14 nt, Human
aacacucugagacu

SEQ ID NO: 3011796 - RNA, 13 nt, Human
aacacucugagac

SEQ ID NO: 3011797 - RNA, 12 nt, Human
aacacucugaga

SEQ ID NO: 3011798 - RNA, 11 nt, Human
aacacucugag

SEQ ID NO: 3011799 - RNA, 12 nt, Human
aacacuccuuca

SEQ ID NO: 3011800 - RNA, 21 nt, Human
aacacucauugaccugaggcc

SEQ ID NO: 3011801 - RNA, 17 nt, Human
aacacucauugaccuga

SEQ ID NO: 3011802 - RNA, 21 nt, Human
aacacuguucucugcccucca

SEQ ID NO: 3011803 - RNA, 21 nt, Human
gucauuugagcagggcucagc

SEQ ID NO: 3011804 - RNA, 22 nt, Human
gucauuugagcagggcucagcg

SEQ ID NO: 3011805 - RNA, 23 nt, Human
aacaaggcaaggcugucaauuac

SEQ ID NO: 3011806 - RNA, 16 nt, Human
gucacaggcaggucca

SEQ ID NO: 3011807 - RNA, 13 nt, Human
gucacaggcaggu

SEQ ID NO: 3011808 - RNA, 15 nt, Human
gucacaggcaggucc

SEQ ID NO: 3011809 - RNA, 19 nt, Human
aacaagaccacguuucuaa

SEQ ID NO: 3011810 - RNA, 16 nt, Human
aacaagaccacguuuc

SEQ ID NO: 3011811 - RNA, 17 nt, Human
aacaagaccacguuucu

SEQ ID NO: 3011812 - RNA, 22 nt, Human
aacauuuauuugaguggaguua

SEQ ID NO: 3011813 - RNA, 15 nt, Human
aacauacucccaucu

SEQ ID NO: 3011814 - RNA, 14 nt, Human
aacauacucccauc

SEQ ID NO: 3011815 - RNA, 15 nt, Human
aacaguaacauagcu

SEQ ID NO: 3011816 - RNA, 19 nt, Human
aacagguuuuccugaagaa

SEQ ID NO: 3011817 - RNA, 23 nt, Human
aacaggcugggcuucaguggcag

SEQ ID NO: 3011818 - RNA, 19 nt, Human
aacagacuggaagcacagc

SEQ ID NO: 3011819 - RNA, 22 nt, Human
aacaggcugggcuucaguggca

SEQ ID NO: 3011820 - RNA, 13 nt, Human
aacaggcugggcu

SEQ ID NO: 3011821 - RNA, 22 nt, Human
aacaguaacauagcugugauuu

SEQ ID NO: 3011822 - RNA, 13 nt, Human
guccgagcuuuga

SEQ ID NO: 3011823 - RNA, 21 nt, Human
guccggucccugucccagugc

SEQ ID NO: 3011824 - RNA, 21 nt, Human
aacagaaauguacagcaagga

SEQ ID NO: 3011825 - RNA, 10 nt, Human
aacagaaaug

SEQ ID NO: 3011826 - RNA, 15 nt, Human
aacagaaauguacag

SEQ ID NO: 3011827 - RNA, 15 nt, Human
aaaugauuucacagu

SEQ ID NO: 3011828 - RNA, 14 nt, Human
aaaugcaccuggaa

SEQ ID NO: 3011829 - RNA, 18 nt, Human
aaaugcaccuggaauaua

SEQ ID NO: 3011830 - RNA, 22 nt, Human
aaaugcaccuggaauauauaac

SEQ ID NO: 3011831 - RNA, 15 nt, Human
aaaugggcagagcag

SEQ ID NO: 3011832 - RNA, 20 nt, Human
aaaugggcagagcagagacc

SEQ ID NO: 3011833 - RNA, 18 nt, Human
aaaugggcagagcagaga

SEQ ID NO: 3011834 - RNA, 13 nt, Human
aaaugcccagccc

SEQ ID NO: 3011835 - RNA, 15 nt, Human
aaaugcccagccccu

SEQ ID NO: 3011836 - RNA, 14 nt, Human
aaaugcccagcccc

SEQ ID NO: 3011837 - RNA, 18 nt, Human
aaaugcccagccccuucu

SEQ ID NO: 3011838 - RNA, 13 nt, Human
aaaugcccagcuu

SEQ ID NO: 3011839 - RNA, 19 nt, Human
aaaugagccuggcaagaau

SEQ ID NO: 3011840 - RNA, 13 nt, Human
aaaugagccuggc

SEQ ID NO: 3011841 - RNA, 17 nt, Human
aaaugaggucagagccu

SEQ ID NO: 3011842 - RNA, 19 nt, Human
aaaugaggucagagccugc

SEQ ID NO: 3011843 - RNA, 16 nt, Human
aaaugagguacucucc

SEQ ID NO: 3011844 - RNA, 23 nt, Human
aaaugagguacucuccuggaaau

SEQ ID NO: 3011845 - RNA, 15 nt, Human
aaaggauacuuauuu

SEQ ID NO: 3011846 - RNA, 17 nt, Human
aaaggauacuuauuuaa

SEQ ID NO: 3011847 - RNA, 12 nt, Human
guagcugggacu

SEQ ID NO: 3011848 - RNA, 18 nt, Human
guagcugggacuacaggc

SEQ ID NO: 3011849 - RNA, 19 nt, Human
guagcugggacuacaggca

SEQ ID NO: 3011850 - RNA, 21 nt, Human
guagcugggacuacaggcacc

SEQ ID NO: 3011851 - RNA, 15 nt, Human
guaggaagacuuugg

SEQ ID NO: 3011852 - RNA, 18 nt, Human
guaggaagguuaauguuc

SEQ ID NO: 3011853 - RNA, 17 nt, Human
aaaugaaaaucgugaca

SEQ ID NO: 3011854 - RNA, 15 nt, Human
aaaucucaaauuucu

SEQ ID NO: 3011855 - RNA, 16 nt, Human
aaaucucaaauuucua

SEQ ID NO: 3011856 - RNA, 17 nt, Human
aaaucucaaauuucuaa

SEQ ID NO: 3011857 - RNA, 13 nt, Human
aaaucgaugcagu

SEQ ID NO: 3011858 - RNA, 18 nt, Human
aaaucccuuaccucggug

SEQ ID NO: 3011859 - RNA, 15 nt, Human
aaaucccauuuaaaa

SEQ ID NO: 3011860 - RNA, 13 nt, Human
gucaacauuucuc

SEQ ID NO: 3011861 - RNA, 17 nt, Human
gucaacauuucucaugu

SEQ ID NO: 3011862 - RNA, 16 nt, Human
gucacacacuuuggcu

SEQ ID NO: 3011863 - RNA, 20 nt, Human
gucacacaguauuacuucug

SEQ ID NO: 3011864 - RNA, 17 nt, Human
guauuuuuuuacuaaua

SEQ ID NO: 3011865 - RNA, 21 nt, Human
guauuuuuuuacuaauagaca

SEQ ID NO: 3011866 - RNA, 18 nt, Human
gucaaaguggugagaggc

SEQ ID NO: 3011867 - RNA, 19 nt, Human
gucaaaguggugagaggca

SEQ ID NO: 3011868 - RNA, 20 nt, Human
aaauuuacuuuaaacuacau

SEQ ID NO: 3011869 - RNA, 17 nt, Human
aaauuuacuuuaaacua

SEQ ID NO: 3011870 - RNA, 14 nt, Human
guauuuuuuuacua

SEQ ID NO: 3011871 - RNA, 15 nt, Human
guauuuuuuuacuaa

SEQ ID NO: 3011872 - RNA, 14 nt, Human
aaauucaugcugcu

SEQ ID NO: 3011873 - RNA, 16 nt, Human
aaauuccccacccuga

SEQ ID NO: 3011874 - RNA, 22 nt, Human
guauuggcuagagguucaaaga

SEQ ID NO: 3011875 - RNA, 19 nt, Human
aaauuaacuuuuauaaacu

SEQ ID NO: 3011876 - RNA, 21 nt, Human
aaauuaacuuuuauaaacuuu

SEQ ID NO: 3011877 - RNA, 22 nt, Human
aaauuaacuuuuauaaacuuua

SEQ ID NO: 3011878 - RNA, 23 nt, Human
aaauuaacuuuuauaaacuuuac

SEQ ID NO: 3011879 - RNA, 17 nt, Human
aaaugggggugcauuug

SEQ ID NO: 3011880 - RNA, 18 nt, Human
aaaugggggugcauuuga

SEQ ID NO: 3011881 - RNA, 15 nt, Human
aaaugggggugcauu

SEQ ID NO: 3011882 - RNA, 16 nt, Human
aaaugggggugcauuu

SEQ ID NO: 3011883 - RNA, 15 nt, Human
guaugggagagaaga

SEQ ID NO: 3011884 - RNA, 15 nt, Human
guauucuuauuuaau

SEQ ID NO: 3011885 - RNA, 21 nt, Human
guauucucuccuguaccucuu

SEQ ID NO: 3011886 - RNA, 15 nt, Human
guaucccuacuguaa

SEQ ID NO: 3011887 - RNA, 22 nt, Human
guaugaucacggcucacugcag

SEQ ID NO: 3011888 - RNA, 21 nt, Human
guaucccaugagccucagcau

SEQ ID NO: 3011889 - RNA, 14 nt, Human
guaugggagagaag

SEQ ID NO: 3011890 - RNA, 22 nt, Human
cugcugauuuaaacacauuaaa

SEQ ID NO: 3011891 - RNA, 16 nt, Human
cugcugauuuaaacac

SEQ ID NO: 3011892 - RNA, 14 nt, Human
cugcucacauaucu

SEQ ID NO: 3011893 - RNA, 12 nt, Human
cugcugaaggcu

SEQ ID NO: 3011894 - RNA, 16 nt, Human
cugcucacauaucugu

SEQ ID NO: 3011895 - RNA, 19 nt, Human
cugcucacauaucugucau

SEQ ID NO: 3011896 - RNA, 13 nt, Human
cugcugacagugu

SEQ ID NO: 3011897 - RNA, 15 nt, Human
cugcugacaguguug

SEQ ID NO: 3011898 - RNA, 11 nt, Human
cugcugacagu

SEQ ID NO: 3011899 - RNA, 12 nt, Human
cugcugacagug

SEQ ID NO: 3011900 - RNA, 15 nt, Human
cugcugaaggcucga

SEQ ID NO: 3011901 - RNA, 14 nt, Human
cugcugaaggcucg

SEQ ID NO: 3011902 - RNA, 13 nt, Human
cugcugaaggcuc

SEQ ID NO: 3011903 - RNA, 20 nt, Human
cugcuuaacuucacauauug

SEQ ID NO: 3011904 - RNA, 20 nt, Human
cugcuuauccguuagccgug

SEQ ID NO: 3011905 - RNA, 15 nt, Human
cuggaguucugguuc

SEQ ID NO: 3011906 - RNA, 17 nt, Human
cuggaguucugguuccu

SEQ ID NO: 3011907 - RNA, 16 nt, Human
cuggaguucugguucc

SEQ ID NO: 3011908 - RNA, 22 nt, Human
cuggaugcagccucacaguccu

SEQ ID NO: 3011909 - RNA, 12 nt, Human
cuggcccuuccu

SEQ ID NO: 3011910 - RNA, 22 nt, Human
cuggcuaugcauuugaaaauuu

SEQ ID NO: 3011911 - RNA, 15 nt, Human
cuggcuaugcauuug

SEQ ID NO: 3011912 - RNA, 16 nt, Human
cuggcuaugcauuuga

SEQ ID NO: 3011913 - RNA, 13 nt, Human
cuggcuaugcauu

SEQ ID NO: 3011914 - RNA, 14 nt, Human
cuggcuaugcauuu

SEQ ID NO: 3011915 - RNA, 13 nt, Human
cugggacuacagg

SEQ ID NO: 3011916 - RNA, 15 nt, Human
cugggacuacaggca

SEQ ID NO: 3011917 - RNA, 22 nt, Human
cugggagaaccaaaaagaggcu

SEQ ID NO: 3011918 - RNA, 14 nt, Human
cugggacaugggaa

SEQ ID NO: 3011919 - RNA, 22 nt, Human
cugggacaugggaaaggggaag

SEQ ID NO: 3011920 - RNA, 18 nt, Human
cugggacaugggaaaggg

SEQ ID NO: 3011921 - RNA, 15 nt, Human
cuggguguggcgcag

SEQ ID NO: 3011922 - RNA, 21 nt, Human
cuggguggcaccagcagccug

SEQ ID NO: 3011923 - RNA, 14 nt, Human
cuggguguggcgca

SEQ ID NO: 3011924 - RNA, 12 nt, Human
cugggcagagga

SEQ ID NO: 3011925 - RNA, 16 nt, Human
cugggcagaggaaagc

SEQ ID NO: 3011926 - RNA, 13 nt, Human
cugggcagaggaa

SEQ ID NO: 3011927 - RNA, 20 nt, Human
cugggcagaggaaagcaaag

SEQ ID NO: 3011928 - RNA, 20 nt, Human
cugggcagguuggugggggc

SEQ ID NO: 3011929 - RNA, 20 nt, Human
cuggguggcaccagcagccu

SEQ ID NO: 3011930 - RNA, 18 nt, Human
cuggguggcaccagcagc

SEQ ID NO: 3011931 - RNA, 13 nt, Human
cuggggagaaagu

SEQ ID NO: 3011932 - RNA, 14 nt, Human
cugcauuuaaaaga

SEQ ID NO: 3011933 - RNA, 13 nt, Human
cugcauuggcuuu

SEQ ID NO: 3011934 - RNA, 19 nt, Human
cugcccugugggcccccaa

SEQ ID NO: 3011935 - RNA, 12 nt, Human
cugcccuuaccu

SEQ ID NO: 3011936 - RNA, 17 nt, Human
cugcccuuaccugccag

SEQ ID NO: 3011937 - RNA, 16 nt, Human
cugcccuuaccugcca

SEQ ID NO: 3011938 - RNA, 12 nt, Human
cugccauccagg

SEQ ID NO: 3011939 - RNA, 16 nt, Human
cugccauauucuguug

SEQ ID NO: 3011940 - RNA, 16 nt, Human
cugccauccagguuca

SEQ ID NO: 3011941 - RNA, 18 nt, Human
cugccauccagguucagc

SEQ ID NO: 3011942 - RNA, 19 nt, Human
cugccauccagguucagcu

SEQ ID NO: 3011943 - RNA, 23 nt, Human
cugccagggacagaggggguggc

SEQ ID NO: 3011944 - RNA, 22 nt, Human
cugccagggacagagggggugg

SEQ ID NO: 3011945 - RNA, 20 nt, Human
cugccagggacagagggggu

SEQ ID NO: 3011946 - RNA, 17 nt, Human
cugcauuuaaaagauac

SEQ ID NO: 3011947 - RNA, 22 nt, Human
cugcaaccugauugugucucuu

SEQ ID NO: 3011948 - RNA, 18 nt, Human
cugcaagaauugaagcag

SEQ ID NO: 3011949 - RNA, 20 nt, Human
cugcaaccuccgccucuugg

SEQ ID NO: 3011950 - RNA, 22 nt, Human
cugcaaccuccgccucuugggu

SEQ ID NO: 3011951 - RNA, 14 nt, Human
cugcaaccugauug

SEQ ID NO: 3011952 - RNA, 21 nt, Human
cugcaaccugauugugucucu

SEQ ID NO: 3011953 - RNA, 19 nt, Human
cugcaaccugauugugucu

SEQ ID NO: 3011954 - RNA, 20 nt, Human
cugcaccgggccacagagaa

SEQ ID NO: 3011955 - RNA, 23 nt, Human
cugcaccgggccacagagaaagu

SEQ ID NO: 3011956 - RNA, 12 nt, Human
cugcaagggagu

SEQ ID NO: 3011957 - RNA, 20 nt, Human
cugcaagaauugaagcagga

SEQ ID NO: 3011958 - RNA, 24 nt, Human
cugaugggcaacccccagccugcu

SEQ ID NO: 3011959 - RNA, 22 nt, Human
cugaugggcaacccccagccug

SEQ ID NO: 3011960 - RNA, 23 nt, Human
cugaugggcaacccccagccugc

SEQ ID NO: 3011961 - RNA, 21 nt, Human
cugcaaaggguaucaggugcu

SEQ ID NO: 3011962 - RNA, 22 nt, Human
cugcaaaggguaucaggugcug

SEQ ID NO: 3011963 - RNA, 20 nt, Human
cugaugcuucuucagagacu

SEQ ID NO: 3011964 - RNA, 19 nt, Human
cugaugcuucuucagagac

SEQ ID NO: 3011965 - RNA, 18 nt, Human
cugaugcuucuucagaga

SEQ ID NO: 3011966 - RNA, 18 nt, Human
cugaugggcaacccccag

SEQ ID NO: 3011967 - RNA, 21 nt, Human
cugaugggcaacccccagccu

SEQ ID NO: 3011968 - RNA, 15 nt, Human
cucuuaugggcuggg

SEQ ID NO: 3011969 - RNA, 14 nt, Human
cucuuaugggcugg

SEQ ID NO: 3011970 - RNA, 17 nt, Human
cugaugcuucuucagag

SEQ ID NO: 3011971 - RNA, 16 nt, Human
cugaugcuucuucaga

SEQ ID NO: 3011972 - RNA, 12 nt, Human
cugcagcuuugu

SEQ ID NO: 3011973 - RNA, 20 nt, Human
cugcaggcagccaggccaca

SEQ ID NO: 3011974 - RNA, 19 nt, Human
cugcaggcagccaggccac

SEQ ID NO: 3011975 - RNA, 18 nt, Human
cugcaggcagccaggcca

SEQ ID NO: 3011976 - RNA, 17 nt, Human
cugcaggcagccaggcc

SEQ ID NO: 3011977 - RNA, 16 nt, Human
cugcaggcagccaggc

SEQ ID NO: 3011978 - RNA, 15 nt, Human
cugcaggcagccagg

SEQ ID NO: 3011979 - RNA, 14 nt, Human
cugcaggcagccag

SEQ ID NO: 3011980 - RNA, 13 nt, Human
cugcaggcagcca

SEQ ID NO: 3011981 - RNA, 23 nt, Human
cugcagccucaaccuccugggcu

SEQ ID NO: 3011982 - RNA, 19 nt, Human
cugcacuccagccugggug

SEQ ID NO: 3011983 - RNA, 24 nt, Human
cugcagccucaaccuccugggcua

SEQ ID NO: 3011984 - RNA, 18 nt, Human
cugcacuccagccugggu

SEQ ID NO: 3011985 - RNA, 16 nt, Human
cugcacuccagccugg

SEQ ID NO: 3011986 - RNA, 17 nt, Human
cugcacuccagccuggg

SEQ ID NO: 3011987 - RNA, 16 nt, Human
cugcacuauagccuag

SEQ ID NO: 3011988 - RNA, 17 nt, Human
cugcacuauagccuagg

SEQ ID NO: 3011989 - RNA, 18 nt, Human
cugcacuauagccuaggu

SEQ ID NO: 3011990 - RNA, 20 nt, Human
cugcacuauagccuagguga

SEQ ID NO: 3011991 - RNA, 22 nt, Human
cugcacuauagccuaggugaca

SEQ ID NO: 3011992 - RNA, 23 nt, Human
cugcacuauagccuaggugacag

SEQ ID NO: 3011993 - RNA, 13 nt, Human
cugcacuccagcc

SEQ ID NO: 3011994 - RNA, 15 nt, Human
cugcacuccagccug

SEQ ID NO: 3011995 - RNA, 13 nt, Human
cuuggcccaggag

SEQ ID NO: 3011996 - RNA, 12 nt, Human
cuugcucugcug

SEQ ID NO: 3011997 - RNA, 23 nt, Human
cuugccgucuaccugaggggccu

SEQ ID NO: 3011998 - RNA, 12 nt, Human
cuugacagggca

SEQ ID NO: 3011999 - RNA, 20 nt, Human
cuugccgucuaccugagggg

SEQ ID NO: 3012000 - RNA, 23 nt, Human
cuugaaugaugccaugaggaaca

SEQ ID NO: 3012001 - RNA, 20 nt, Human
cuugaaugaugccaugagga

SEQ ID NO: 3012002 - RNA, 22 nt, Human
cuucuucagagacuccugcagg

SEQ ID NO: 3012003 - RNA, 18 nt, Human
cuucuucagagacuccug

SEQ ID NO: 3012004 - RNA, 21 nt, Human
cuucuucagagacuccugcag

SEQ ID NO: 3012005 - RNA, 20 nt, Human
cuucuucagagacuccugca

SEQ ID NO: 3012006 - RNA, 22 nt, Human
cuuucaauaggaaaaacugauu

SEQ ID NO: 3012007 - RNA, 21 nt, Human
cuuucaauaggaaaaacugau

SEQ ID NO: 3012008 - RNA, 20 nt, Human
cuuucaauaggaaaaacuga

SEQ ID NO: 3012009 - RNA, 18 nt, Human
cuuucaauaggaaaaacu

SEQ ID NO: 3012010 - RNA, 13 nt, Human
cuuguggacacag

SEQ ID NO: 3012011 - RNA, 14 nt, Human
cuuguggacacagc

SEQ ID NO: 3012012 - RNA, 15 nt, Human
cuuguggacacagcu

SEQ ID NO: 3012013 - RNA, 22 nt, Human
cuuugacgccaucccagcccca

SEQ ID NO: 3012014 - RNA, 21 nt, Human
cuuugacgccaucccagcccc

SEQ ID NO: 3012015 - RNA, 19 nt, Human
cuuugacgccaucccagcc

SEQ ID NO: 3012016 - RNA, 18 nt, Human
cuuugacgccaucccagc

SEQ ID NO: 3012017 - RNA, 15 nt, Human
cuuuucaaaacauuu

SEQ ID NO: 3012018 - RNA, 20 nt, Human
cuuuggucuacacugugcug

SEQ ID NO: 3012019 - RNA, 16 nt, Human
cuuuggucuacacugu

SEQ ID NO: 3012020 - RNA, 14 nt, Human
cuuuuauaaacuuu

SEQ ID NO: 3012021 - RNA, 16 nt, Human
cuuuuauaaacuuuac

SEQ ID NO: 3012022 - RNA, 18 nt, Human
cuuuuauaaacuuuaccu

SEQ ID NO: 3012023 - RNA, 15 nt, Human
cuuuuauaaacuuua

SEQ ID NO: 3012024 - RNA, 19 nt, Human
cugugucagguggggcagc

SEQ ID NO: 3012025 - RNA, 20 nt, Human
cugugucagcauagaaguaa

SEQ ID NO: 3012026 - RNA, 21 nt, Human
cugugucagguggggcagcuu

SEQ ID NO: 3012027 - RNA, 14 nt, Human
cugugucuugcaau

SEQ ID NO: 3012028 - RNA, 19 nt, Human
cugugucucccuucauccu

SEQ ID NO: 3012029 - RNA, 14 nt, Human
cugugucucccuuc

SEQ ID NO: 3012030 - RNA, 19 nt, Human
cugugcugagucugaaggc

SEQ ID NO: 3012031 - RNA, 11 nt, Human
cugugcugccc

SEQ ID NO: 3012032 - RNA, 22 nt, Human
cugugcugagucugaaggcugg

SEQ ID NO: 3012033 - RNA, 20 nt, Human
cugugcugagucugaaggcu

SEQ ID NO: 3012034 - RNA, 13 nt, Human
cuguucagcucca

SEQ ID NO: 3012035 - RNA, 16 nt, Human
cugugucuugcaaugg

SEQ ID NO: 3012036 - RNA, 19 nt, Human
cugugucuugcaauggcag

SEQ ID NO: 3012037 - RNA, 19 nt, Human
cuuagauguauauauuucc

SEQ ID NO: 3012038 - RNA, 21 nt, Human
cuuaccucggugccuuccucu

SEQ ID NO: 3012039 - RNA, 19 nt, Human
cuuaccucggugccuuccu

SEQ ID NO: 3012040 - RNA, 13 nt, Human
cuuaccucggugc

SEQ ID NO: 3012041 - RNA, 17 nt, Human
cuuacccucauguucuu

SEQ ID NO: 3012042 - RNA, 18 nt, Human
cuuacccucauguucuua

SEQ ID NO: 3012043 - RNA, 19 nt, Human
cuuacccucauguucuuaa

SEQ ID NO: 3012044 - RNA, 16 nt, Human
cuguugggccaggagc

SEQ ID NO: 3012045 - RNA, 20 nt, Human
cuguugggccaggagccucc

SEQ ID NO: 3012046 - RNA, 17 nt, Human
cuguugggccaggagcc

SEQ ID NO: 3012047 - RNA, 13 nt, Human
cuuacacaauggu

SEQ ID NO: 3012048 - RNA, 17 nt, Human
cuuccauggacuuuguu

SEQ ID NO: 3012049 - RNA, 16 nt, Human
cuuccauggacuuugu

SEQ ID NO: 3012050 - RNA, 20 nt, Human
cuuccagugaggcucugccc

SEQ ID NO: 3012051 - RNA, 19 nt, Human
cuuccagugaggcucugcc

SEQ ID NO: 3012052 - RNA, 17 nt, Human
cuuccagugaggcucug

SEQ ID NO: 3012053 - RNA, 18 nt, Human
cuuccagugaggcucugc

SEQ ID NO: 3012054 - RNA, 14 nt, Human
cuucaccuuugucc

SEQ ID NO: 3012055 - RNA, 18 nt, Human
cuuauugcccacgcugga

SEQ ID NO: 3012056 - RNA, 20 nt, Human
cuucaccuuuguccccaccg

SEQ ID NO: 3012057 - RNA, 17 nt, Human
cuucaccuuugucccca

SEQ ID NO: 3012058 - RNA, 22 nt, Human
cuucagagacuccugcaggcag

SEQ ID NO: 3012059 - RNA, 21 nt, Human
cuucagagacuccugcaggca

SEQ ID NO: 3012060 - RNA, 16 nt, Human
cuucagagacuccugc

SEQ ID NO: 3012061 - RNA, 15 nt, Human
cuucauccuccucag

SEQ ID NO: 3012062 - RNA, 13 nt, Human
cuucaucccucug

SEQ ID NO: 3012063 - RNA, 18 nt, Human
cuucaguggcagcugcuu

SEQ ID NO: 3012064 - RNA, 23 nt, Human
cuucagagacuccugcaggcagc

SEQ ID NO: 3012065 - RNA, 16 nt, Human
cuucauccuccucaga

SEQ ID NO: 3012066 - RNA, 21 nt, Human
cuuauggaacacucugagacu

SEQ ID NO: 3012067 - RNA, 21 nt, Human
cuuaugggcuggguucuaccc

SEQ ID NO: 3012068 - RNA, 14 nt, Human
cuuaugggcugggu

SEQ ID NO: 3012069 - RNA, 23 nt, Human
cuuaugggcuggguucuacccag

SEQ ID NO: 3012070 - RNA, 22 nt, Human
cuuaugggcuggguucuaccca

SEQ ID NO: 3012071 - RNA, 12 nt, Human
cuuauugcccac

SEQ ID NO: 3012072 - RNA, 13 nt, Human
cuuauugcccacg

SEQ ID NO: 3012073 - RNA, 18 nt, Human
cuuagcagggaaacagcu

SEQ ID NO: 3012074 - RNA, 13 nt, Human
gacucuucccuca

SEQ ID NO: 3012075 - RNA, 19 nt, Human
gacucugucucaaaaaaac

SEQ ID NO: 3012076 - RNA, 14 nt, Human
gacugaauuucuuu

SEQ ID NO: 3012077 - RNA, 15 nt, Human
gacgccaucccagcc

SEQ ID NO: 3012078 - RNA, 18 nt, Human
gacgccaucccagcccca

SEQ ID NO: 3012079 - RNA, 17 nt, Human
gacgccaucccagcccc

SEQ ID NO: 3012080 - RNA, 19 nt, Human
gacgcuacccgggaagggg

SEQ ID NO: 3012081 - RNA, 18 nt, Human
gacgcuacccgggaaggg

SEQ ID NO: 3012082 - RNA, 16 nt, Human
gacgcuacccgggaag

SEQ ID NO: 3012083 - RNA, 16 nt, Human
gacgccaucccagccc

SEQ ID NO: 3012084 - RNA, 14 nt, Human
gaccugaggcccuu

SEQ ID NO: 3012085 - RNA, 13 nt, Human
gaccugaggcccu

SEQ ID NO: 3012086 - RNA, 11 nt, Human
gaccugaggcc

SEQ ID NO: 3012087 - RNA, 20 nt, Human
gaccaucccugaaggccccg

SEQ ID NO: 3012088 - RNA, 13 nt, Human
gaccucugccuga

SEQ ID NO: 3012089 - RNA, 14 nt, Human
gaccucugcagcaa

SEQ ID NO: 3012090 - RNA, 12 nt, Human
gacauucccugc

SEQ ID NO: 3012091 - RNA, 19 nt, Human
gacagcccgggcucugccu

SEQ ID NO: 3012092 - RNA, 18 nt, Human
gacagcccgggcucugcc

SEQ ID NO: 3012093 - RNA, 14 nt, Human
gacauugacuauuu

SEQ ID NO: 3012094 - RNA, 22 nt, Human
gacauugacuauuuuuguuuuu

SEQ ID NO: 3012095 - RNA, 14 nt, Human
gacauugcggacag

SEQ ID NO: 3012096 - RNA, 15 nt, Human
gacauugcggacagc

SEQ ID NO: 3012097 - RNA, 19 nt, Human
gacauuguuggccaaagcc

SEQ ID NO: 3012098 - RNA, 18 nt, Human
gaccagggauuuccauga

SEQ ID NO: 3012099 - RNA, 20 nt, Human
gaccagggauuuccaugaug

SEQ ID NO: 3012100 - RNA, 19 nt, Human
gaccaucccugaaggcccc

SEQ ID NO: 3012101 - RNA, 18 nt, Human
gaccaucccugaaggccc

SEQ ID NO: 3012102 - RNA, 13 nt, Human
gaccaucccugaa

SEQ ID NO: 3012103 - RNA, 12 nt, Human
gaccaucccuga

SEQ ID NO: 3012104 - RNA, 17 nt, Human
gacagcccgggcucugc

SEQ ID NO: 3012105 - RNA, 22 nt, Human
gacacagcucuucuccaggcug

SEQ ID NO: 3012106 - RNA, 23 nt, Human
gacacagcucuucuccaggcugu

SEQ ID NO: 3012107 - RNA, 13 nt, Human
gacacagcucuuc

SEQ ID NO: 3012108 - RNA, 14 nt, Human
gacacagcucuucu

SEQ ID NO: 3012109 - RNA, 16 nt, Human
gacacagcucuucucc

SEQ ID NO: 3012110 - RNA, 16 nt, Human
gaaguucuauuuauuu

SEQ ID NO: 3012111 - RNA, 22 nt, Human
gaaggggagauaaggguaucug

SEQ ID NO: 3012112 - RNA, 15 nt, Human
gaauauugcugaugg

SEQ ID NO: 3012113 - RNA, 14 nt, Human
gaauauugcugaug

SEQ ID NO: 3012114 - RNA, 20 nt, Human
gaauauugcugauggugcaa

SEQ ID NO: 3012115 - RNA, 19 nt, Human
gaauauugcugauggugca

SEQ ID NO: 3012116 - RNA, 19 nt, Human
gaagcuccgcuuucuaccc

SEQ ID NO: 3012117 - RNA, 22 nt, Human
gaagcuccgcuuucuacccagc

SEQ ID NO: 3012118 - RNA, 17 nt, Human
gaaggccccgcccaggc

SEQ ID NO: 3012119 - RNA, 21 nt, Human
gaaggcucgagcaugccugga

SEQ ID NO: 3012120 - RNA, 19 nt, Human
gaaggccccgcccaggcuu

SEQ ID NO: 3012121 - RNA, 18 nt, Human
gaaggccccgcccaggcu

SEQ ID NO: 3012122 - RNA, 19 nt, Human
gaaggcucgagcaugccug

SEQ ID NO: 3012123 - RNA, 19 nt, Human
gaaggcuggguucugaucc

SEQ ID NO: 3012124 - RNA, 15 nt, Human
gaaggcuggguucug

SEQ ID NO: 3012125 - RNA, 22 nt, Human
gaaggcuggguucugauccuag

SEQ ID NO: 3012126 - RNA, 20 nt, Human
gaaggcuggguucugauccu

SEQ ID NO: 3012127 - RNA, 12 nt, Human
gaagcagagugg

SEQ ID NO: 3012128 - RNA, 11 nt, Human
gaagcagagug

SEQ ID NO: 3012129 - RNA, 15 nt, Human
gaagcagaggaagga

SEQ ID NO: 3012130 - RNA, 14 nt, Human
gaagcacaugccuc

SEQ ID NO: 3012131 - RNA, 15 nt, Human
gaagcacaugccucu

SEQ ID NO: 3012132 - RNA, 20 nt, Human
gaagcacaugccucucucag

SEQ ID NO: 3012133 - RNA, 17 nt, Human
gaagcacaugccucucu

SEQ ID NO: 3012134 - RNA, 16 nt, Human
gaagacaaugacuuac

SEQ ID NO: 3012135 - RNA, 22 nt, Human
gaagacaaugacuuacuguaca

SEQ ID NO: 3012136 - RNA, 23 nt, Human
gaagacaaugugaaaagaaaaau

SEQ ID NO: 3012137 - RNA, 23 nt, Human
gaagauuuugaaauuuuuauuaa

SEQ ID NO: 3012138 - RNA, 15 nt, Human
gaacuccuggccuca

SEQ ID NO: 3012139 - RNA, 11 nt, Human
gaacuggcugc

SEQ ID NO: 3012140 - RNA, 12 nt, Human
gaacuggcugca

SEQ ID NO: 3012141 - RNA, 13 nt, Human
gcacaucauuuca

SEQ ID NO: 3012142 - RNA, 14 nt, Human
gcaccgggccacag

SEQ ID NO: 3012143 - RNA, 22 nt, Human
gcacaucagcacgauuucuguu

SEQ ID NO: 3012144 - RNA, 23 nt, Human
gcacaucagcacgauuucuguuu

SEQ ID NO: 3012145 - RNA, 23 nt, Human
gcaccgggccacagagaaaguac

SEQ ID NO: 3012146 - RNA, 16 nt, Human
gcacuccccugcuggg

SEQ ID NO: 3012147 - RNA, 22 nt, Human
gcacuccccugcuggguguggc

SEQ ID NO: 3012148 - RNA, 13 nt, Human
gcacucagaagac

SEQ ID NO: 3012149 - RNA, 16 nt, Human
gcacucagaagacacu

SEQ ID NO: 3012150 - RNA, 17 nt, Human
gcacuccccugcugggu

SEQ ID NO: 3012151 - RNA, 19 nt, Human
gcaagugagagcugggugu

SEQ ID NO: 3012152 - RNA, 14 nt, Human
gcacacauuuuuua

SEQ ID NO: 3012153 - RNA, 14 nt, Human
gcacaccgggcacu

SEQ ID NO: 3012154 - RNA, 22 nt, Human
gcacaagcugcacccucaggca

SEQ ID NO: 3012155 - RNA, 15 nt, Human
gaugaucuaggaaga

SEQ ID NO: 3012156 - RNA, 21 nt, Human
gaugaucuaggaagacuuugg

SEQ ID NO: 3012157 - RNA, 16 nt, Human
gaugagugagcaugcc

SEQ ID NO: 3012158 - RNA, 14 nt, Human
gaugauccuaggca

SEQ ID NO: 3012159 - RNA, 18 nt, Human
gauucuccugccucagcc

SEQ ID NO: 3012160 - RNA, 14 nt, Human
gauucuccugccuc

SEQ ID NO: 3012161 - RNA, 15 nt, Human
gauucuccugccuca

SEQ ID NO: 3012162 - RNA, 17 nt, Human
gauucuccugccucagc

SEQ ID NO: 3012163 - RNA, 17 nt, Human
gauucuuccucccuccc

SEQ ID NO: 3012164 - RNA, 18 nt, Human
gauucuuccucccucccu

SEQ ID NO: 3012165 - RNA, 12 nt, Human
gauuauuggaaa

SEQ ID NO: 3012166 - RNA, 11 nt, Human
gaguggaguua

SEQ ID NO: 3012167 - RNA, 20 nt, Human
gagugacagaggcagcccca

SEQ ID NO: 3012168 - RNA, 17 nt, Human
gaguggaguuacugaac

SEQ ID NO: 3012169 - RNA, 22 nt, Human
gaguugauagcacagacccugc

SEQ ID NO: 3012170 - RNA, 17 nt, Human
gaguugauucagcucug

SEQ ID NO: 3012171 - RNA, 16 nt, Human
gaguugauucagcucu

SEQ ID NO: 3012172 - RNA, 15 nt, Human
gaguugauucagcuc

SEQ ID NO: 3012173 - RNA, 12 nt, Human
gagucccaccuu

SEQ ID NO: 3012174 - RNA, 18 nt, Human
gagugacagaggcagccc

SEQ ID NO: 3012175 - RNA, 22 nt, Human
gagucagaaguuucugccgcag

SEQ ID NO: 3012176 - RNA, 15 nt, Human
gagucaccaagccca

SEQ ID NO: 3012177 - RNA, 16 nt, Human
gagucaccaagcccag

SEQ ID NO: 3012178 - RNA, 17 nt, Human
gagucaccaagcccagu

SEQ ID NO: 3012179 - RNA, 23 nt, Human
gaggugaccccagguuucuaugu

SEQ ID NO: 3012180 - RNA, 15 nt, Human
gaggucgaggcagga

SEQ ID NO: 3012181 - RNA, 18 nt, Human
gaguugauucagcucugc

SEQ ID NO: 3012182 - RNA, 22 nt, Human
gaguuguuacauuuuuaagugc

SEQ ID NO: 3012183 - RNA, 20 nt, Human
gagccuuccaggggugggac

SEQ ID NO: 3012184 - RNA, 23 nt, Human
gagccuuccaggggugggacacc

SEQ ID NO: 3012185 - RNA, 13 nt, Human
gagccuugaacuu

SEQ ID NO: 3012186 - RNA, 15 nt, Human
gaggcagggucucac

SEQ ID NO: 3012187 - RNA, 22 nt, Human
gaggcagggucucacucugucg

SEQ ID NO: 3012188 - RNA, 22 nt, Human
gaggccaaggugggaggauugc

SEQ ID NO: 3012189 - RNA, 17 nt, Human
gaggccaaggugggagg

SEQ ID NO: 3012190 - RNA, 14 nt, Human
gaggcagggucuca

SEQ ID NO: 3012191 - RNA, 22 nt, Human
gaggcuagugugguguuuccug

SEQ ID NO: 3012192 - RNA, 19 nt, Human
gaggccagagacacaagcc

SEQ ID NO: 3012193 - RNA, 14 nt, Human
gaggccagagacac

SEQ ID NO: 3012194 - RNA, 13 nt, Human
gaggccagagaca

SEQ ID NO: 3012195 - RNA, 16 nt, Human
gcuguacauacuuuuu

SEQ ID NO: 3012196 - RNA, 15 nt, Human
gcuguacauacuuuu

SEQ ID NO: 3012197 - RNA, 14 nt, Human
gcuguacauacuuu

SEQ ID NO: 3012198 - RNA, 13 nt, Human
gcuguacauacuu

SEQ ID NO: 3012199 - RNA, 20 nt, Human
gcuguaucccaugagccuca

SEQ ID NO: 3012200 - RNA, 23 nt, Human
gcuguaucccaugagccucagca

SEQ ID NO: 3012201 - RNA, 19 nt, Human
gcuguaucccaugagccuc

SEQ ID NO: 3012202 - RNA, 14 nt, Human
gcuggguuggaggg

SEQ ID NO: 3012203 - RNA, 21 nt, Human
gcuggguuggaggguguccca

SEQ ID NO: 3012204 - RNA, 15 nt, Human
gcuggguucugaucc

SEQ ID NO: 3012205 - RNA, 15 nt, Human
gcuggguucuaccca

SEQ ID NO: 3012206 - RNA, 20 nt, Human
gcuucacggaagagccuugc

SEQ ID NO: 3012207 - RNA, 19 nt, Human
gcuucacggaagagccuug

SEQ ID NO: 3012208 - RNA, 22 nt, Human
gcuucaaggauccugagccaga

SEQ ID NO: 3012209 - RNA, 18 nt, Human
gcugugcucuggacaggc

SEQ ID NO: 3012210 - RNA, 13 nt, Human
gcugugcugcccu

SEQ ID NO: 3012211 - RNA, 21 nt, Human
gcugugcucuggacaggcaug

SEQ ID NO: 3012212 - RNA, 12 nt, Human
gcugugcugccc

SEQ ID NO: 3012213 - RNA, 21 nt, Human
gcuguuggcugggggccucag

SEQ ID NO: 3012214 - RNA, 22 nt, Human
gcuguuggcugggggccucagu

SEQ ID NO: 3012215 - RNA, 22 nt, Human
gcugugcugcccugcccaccug

SEQ ID NO: 3012216 - RNA, 19 nt, Human
gcugugcugcccugcccac

SEQ ID NO: 3012217 - RNA, 14 nt, Human
gcuuguacauaaug

SEQ ID NO: 3012218 - RNA, 16 nt, Human
gcuuguacauaaugcg

SEQ ID NO: 3012219 - RNA, 16 nt, Human
gcugcugauuuaaaca

SEQ ID NO: 3012220 - RNA, 18 nt, Human
gcugccugggaucccuca

SEQ ID NO: 3012221 - RNA, 16 nt, Human
gcugccugggaucccu

SEQ ID NO: 3012222 - RNA, 19 nt, Human
gcugccugggaucccucau

SEQ ID NO: 3012223 - RNA, 13 nt, Human
gcugccugggauc

SEQ ID NO: 3012224 - RNA, 22 nt, Human
gcugcaccggcuggccuggccc

SEQ ID NO: 3012225 - RNA, 19 nt, Human
gcugcaccggcuggccugg

SEQ ID NO: 3012226 - RNA, 18 nt, Human
gcugcaccggcuggccug

SEQ ID NO: 3012227 - RNA, 17 nt, Human
gcugcaccggcuggccu

SEQ ID NO: 3012228 - RNA, 16 nt, Human
gcugcaccggcuggcc

SEQ ID NO: 3012229 - RNA, 14 nt, Human
gcugcaccggcugg

SEQ ID NO: 3012230 - RNA, 21 nt, Human
gcugccauccagguucagcuu

SEQ ID NO: 3012231 - RNA, 23 nt, Human
gcugccauccagguucagcuugu

SEQ ID NO: 3012232 - RNA, 21 nt, Human
gcugccagccgagauagccaa

SEQ ID NO: 3012233 - RNA, 19 nt, Human
gcugccagccgagauagcc

SEQ ID NO: 3012234 - RNA, 13 nt, Human
gcugccaccugcc

SEQ ID NO: 3012235 - RNA, 12 nt, Human
gcuggagugcag

SEQ ID NO: 3012236 - RNA, 22 nt, Human
gcuggaccuugaacuggguacu

SEQ ID NO: 3012237 - RNA, 15 nt, Human
gcuggguguggcgca

SEQ ID NO: 3012238 - RNA, 20 nt, Human
gcugggcucccuucccaccu

SEQ ID NO: 3012239 - RNA, 17 nt, Human
gcugggcucccuuccca

SEQ ID NO: 3012240 - RNA, 16 nt, Human
gcugggcucccuuccc

SEQ ID NO: 3012241 - RNA, 12 nt, Human
gcugggcucccu

SEQ ID NO: 3012242 - RNA, 17 nt, Human
gcugggcagaggaaagc

SEQ ID NO: 3012243 - RNA, 16 nt, Human
gcugggcagaggaaag

SEQ ID NO: 3012244 - RNA, 19 nt, Human
gcugggcagaggaaagcaa

SEQ ID NO: 3012245 - RNA, 19 nt, Human
gcugggauuacagguguga

SEQ ID NO: 3012246 - RNA, 18 nt, Human
gcugggauuacaggugug

SEQ ID NO: 3012247 - RNA, 13 nt, Human
gcugggcagagga

SEQ ID NO: 3012248 - RNA, 15 nt, Human
gcugggcagaggaaa

SEQ ID NO: 3012249 - RNA, 14 nt, Human
gcugggcagaggaa

SEQ ID NO: 3012250 - RNA, 14 nt, Human
gcuggagugcagug

SEQ ID NO: 3012251 - RNA, 15 nt, Human
gcuggagugcaguga

SEQ ID NO: 3012252 - RNA, 17 nt, Human
gcuggccuggccccuca

SEQ ID NO: 3012253 - RNA, 16 nt, Human
gcuggccuggccccuc

SEQ ID NO: 3012254 - RNA, 16 nt, Human
gcugggauuacaggug

SEQ ID NO: 3012255 - RNA, 19 nt, Human
gcuggccuggccccucagg

SEQ ID NO: 3012256 - RNA, 18 nt, Human
gcuggccuggccccucag

SEQ ID NO: 3012257 - RNA, 14 nt, Human
gcugacagacacag

SEQ ID NO: 3012258 - RNA, 15 nt, Human
gcugacagacacagg

SEQ ID NO: 3012259 - RNA, 16 nt, Human
gcugacagacacaggc

SEQ ID NO: 3012260 - RNA, 20 nt, Human
gcugaaggcucgagcaugcc

SEQ ID NO: 3012261 - RNA, 12 nt, Human
gcugaaggcucg

SEQ ID NO: 3012262 - RNA, 17 nt, Human
gcugaaugguuuucaaa

SEQ ID NO: 3012263 - RNA, 22 nt, Human
gcugaauacagaggcaacugca

SEQ ID NO: 3012264 - RNA, 12 nt, Human
gcucuuccaggc

SEQ ID NO: 3012265 - RNA, 16 nt, Human
gcucuuccaggcuggg

SEQ ID NO: 3012266 - RNA, 15 nt, Human
gcucuuccaggcugg

SEQ ID NO: 3012267 - RNA, 15 nt, Human
gcucuguccugggag

SEQ ID NO: 3012268 - RNA, 14 nt, Human
gcucuguccuggga

SEQ ID NO: 3012269 - RNA, 16 nt, Human
gcucuguccugggagu

SEQ ID NO: 3012270 - RNA, 16 nt, Human
gcucucaggccagcug

SEQ ID NO: 3012271 - RNA, 15 nt, Human
gcucucaggccagcu

SEQ ID NO: 3012272 - RNA, 14 nt, Human
gcucucaggccagc

SEQ ID NO: 3012273 - RNA, 13 nt, Human
gcucucaggccag

SEQ ID NO: 3012274 - RNA, 17 nt, Human
gcucccaggcauucccc

SEQ ID NO: 3012275 - RNA, 22 nt, Human
gcucccaggcauuccccaggag

SEQ ID NO: 3012276 - RNA, 14 nt, Human
gcuccccagcccca

SEQ ID NO: 3012277 - RNA, 21 nt, Human
gcucccaggcauuccccagga

SEQ ID NO: 3012278 - RNA, 20 nt, Human
gcucccaggcauuccccagg

SEQ ID NO: 3012279 - RNA, 22 nt, Human
gcucagguggggucacucuggc

SEQ ID NO: 3012280 - RNA, 21 nt, Human
gcucagguggggucacucugg

SEQ ID NO: 3012281 - RNA, 12 nt, Human
gcucagggccug

SEQ ID NO: 3012282 - RNA, 16 nt, Human
gcucagggccuggcuc

SEQ ID NO: 3012283 - RNA, 13 nt, Human
gcucagggccugg

SEQ ID NO: 3012284 - RNA, 15 nt, Human
gcucagagagggugg

SEQ ID NO: 3012285 - RNA, 20 nt, Human
gcucagagagggugggagug

SEQ ID NO: 3012286 - RNA, 18 nt, Human
gcucagagagggugggag

SEQ ID NO: 3012287 - RNA, 22 nt, Human
gcucagagagggugggaguggg

SEQ ID NO: 3012288 - RNA, 20 nt, Human
gccuguucagcuccagcuca

SEQ ID NO: 3012289 - RNA, 19 nt, Human
gccuguucagcuccagcuc

SEQ ID NO: 3012290 - RNA, 16 nt, Human
gcuaggaacacuccuu

SEQ ID NO: 3012291 - RNA, 18 nt, Human
gcuaggaacacuccuuca

SEQ ID NO: 3012292 - RNA, 21 nt, Human
gcuaggaacacuccuucacag

SEQ ID NO: 3012293 - RNA, 19 nt, Human
gcuaggaacacuccuucac

SEQ ID NO: 3012294 - RNA, 22 nt, Human
gcuaggaccccuccaugugggc

SEQ ID NO: 3012295 - RNA, 14 nt, Human
gcuaggccuggcca

SEQ ID NO: 3012296 - RNA, 15 nt, Human
gcuaggccuggccag

SEQ ID NO: 3012297 - RNA, 23 nt, Human
gccagaagucaaggcuuagaccc

SEQ ID NO: 3012298 - RNA, 16 nt, Human
gccagaagucaaggcu

SEQ ID NO: 3012299 - RNA, 20 nt, Human
gccagaagucaaggcuuaga

SEQ ID NO: 3012300 - RNA, 22 nt, Human
gccagaagucaaggcuuagacc

SEQ ID NO: 3012301 - RNA, 16 nt, Human
gccagcaggcucucag

SEQ ID NO: 3012302 - RNA, 13 nt, Human
gccagcaggcucu

SEQ ID NO: 3012303 - RNA, 21 nt, Human
gccagcaggcucucaggccag

SEQ ID NO: 3012304 - RNA, 20 nt, Human
gccagcaggcucucaggcca

SEQ ID NO: 3012305 - RNA, 19 nt, Human
gccagcaggcucucaggcc

SEQ ID NO: 3012306 - RNA, 18 nt, Human
gccagcaggcucucaggc

SEQ ID NO: 3012307 - RNA, 17 nt, Human
gccagcaggcucucagg

SEQ ID NO: 3012308 - RNA, 13 nt, Human
gccaggccagagg

SEQ ID NO: 3012309 - RNA, 15 nt, Human
gccaggcccucugcc

SEQ ID NO: 3012310 - RNA, 17 nt, Human
gccaggcccucugccca

SEQ ID NO: 3012311 - RNA, 16 nt, Human
gccaggcccucugccc

SEQ ID NO: 3012312 - RNA, 21 nt, Human
gccaggcccucugcccacucc

SEQ ID NO: 3012313 - RNA, 20 nt, Human
gccaggcccucugcccacuc

SEQ ID NO: 3012314 - RNA, 19 nt, Human
gccaggcccucugcccacu

SEQ ID NO: 3012315 - RNA, 23 nt, Human
gccaggccacaagacccuugugg

SEQ ID NO: 3012316 - RNA, 12 nt, Human
gccaggccagag

SEQ ID NO: 3012317 - RNA, 19 nt, Human
gccauauucuguuggccag

SEQ ID NO: 3012318 - RNA, 20 nt, Human
gccauauucuguuggccagu

SEQ ID NO: 3012319 - RNA, 14 nt, Human
gccauguuggccag

SEQ ID NO: 3012320 - RNA, 15 nt, Human
gccauguuggccagg

SEQ ID NO: 3012321 - RNA, 16 nt, Human
gccauguuggccaggc

SEQ ID NO: 3012322 - RNA, 17 nt, Human
gccauguuggccaggcu

SEQ ID NO: 3012323 - RNA, 18 nt, Human
gccauguuggccaggcug

SEQ ID NO: 3012324 - RNA, 15 nt, Human
gcccacgcuggagug

SEQ ID NO: 3012325 - RNA, 16 nt, Human
gcccacgcuggagugc

SEQ ID NO: 3012326 - RNA, 17 nt, Human
gcccacgcuggagugca

SEQ ID NO: 3012327 - RNA, 17 nt, Human
gcccaccuuggcucaag

SEQ ID NO: 3012328 - RNA, 18 nt, Human
gcccaccuuggcucaagu

SEQ ID NO: 3012329 - RNA, 14 nt, Human
gcccacgcccccac

SEQ ID NO: 3012330 - RNA, 13 nt, Human
gcccacgccccca

SEQ ID NO: 3012331 - RNA, 19 nt, Human
gccauguuggccaggcugg

SEQ ID NO: 3012332 - RNA, 20 nt, Human
gccauguuggccaggcuggu

SEQ ID NO: 3012333 - RNA, 22 nt, Human
gccauguuggccaggcuggucu

SEQ ID NO: 3012334 - RNA, 24 nt, Human
gccauguuggccaggcuggucuca

SEQ ID NO: 3012335 - RNA, 14 nt, Human
gccacuuuauuucu

SEQ ID NO: 3012336 - RNA, 19 nt, Human
gccacugugaagagaacca

SEQ ID NO: 3012337 - RNA, 18 nt, Human
gccacugugaagagaacc

SEQ ID NO: 3012338 - RNA, 22 nt, Human
gccacugcaccgggccacagag

SEQ ID NO: 3012339 - RNA, 21 nt, Human
gccacugcacuauagccuagg

SEQ ID NO: 3012340 - RNA, 13 nt, Human
gccacccugggga

SEQ ID NO: 3012341 - RNA, 19 nt, Human
gccacccuggggagaaagu

SEQ ID NO: 3012342 - RNA, 23 nt, Human
gccacugcaccgggccacagaga

SEQ ID NO: 3012343 - RNA, 20 nt, Human
gccacauuccugaugcuucu

SEQ ID NO: 3012344 - RNA, 16 nt, Human
gccacauuccugaugc

SEQ ID NO: 3012345 - RNA, 19 nt, Human
gccaccaacauacucccau

SEQ ID NO: 3012346 - RNA, 21 nt, Human
gccaccaacauacucccaucu

SEQ ID NO: 3012347 - RNA, 20 nt, Human
gccaccaacauacucccauc

SEQ ID NO: 3012348 - RNA, 22 nt, Human
gccaccaacauacucccaucug

SEQ ID NO: 3012349 - RNA, 15 nt, Human
gccuaccaauauuua

SEQ ID NO: 3012350 - RNA, 13 nt, Human
gccuccuccagcc

SEQ ID NO: 3012351 - RNA, 18 nt, Human
gccuccugcccuuaccug

SEQ ID NO: 3012352 - RNA, 12 nt, Human
gccucugggacu

SEQ ID NO: 3012353 - RNA, 17 nt, Human
gccugcccaggccccug

SEQ ID NO: 3012354 - RNA, 18 nt, Human
gccugcccaggccccugc

SEQ ID NO: 3012355 - RNA, 19 nt, Human
gccugcccaggccccugcc

SEQ ID NO: 3012356 - RNA, 23 nt, Human
gccucuucucuacucuagggaaa

SEQ ID NO: 3012357 - RNA, 12 nt, Human
gccucuucucua

SEQ ID NO: 3012358 - RNA, 17 nt, Human
gccuggccccucagggu

SEQ ID NO: 3012359 - RNA, 16 nt, Human
gccuggccccucaggg

SEQ ID NO: 3012360 - RNA, 15 nt, Human
gccuggccccucagg

SEQ ID NO: 3012361 - RNA, 10 nt, Human
gccuggccug

SEQ ID NO: 3012362 - RNA, 22 nt, Human
gccuggccccucagggucccug

SEQ ID NO: 3012363 - RNA, 20 nt, Human
gccuggccccucaggguccc

SEQ ID NO: 3012364 - RNA, 21 nt, Human
gccugggaggucaaggcugca

SEQ ID NO: 3012365 - RNA, 14 nt, Human
gccugggaucccuc

SEQ ID NO: 3012366 - RNA, 22 nt, Human
gccugggaggucaaggcugcag

SEQ ID NO: 3012367 - RNA, 18 nt, Human
gccugggaucccucaucc

SEQ ID NO: 3012368 - RNA, 16 nt, Human
gccugccucuucucua

SEQ ID NO: 3012369 - RNA, 16 nt, Human
gccgccaugcuccugg

SEQ ID NO: 3012370 - RNA, 20 nt, Human
gcccuuaccugccaggaagc

SEQ ID NO: 3012371 - RNA, 16 nt, Human
gcccuuaccugccagg

SEQ ID NO: 3012372 - RNA, 15 nt, Human
gccgccaugcuccug

SEQ ID NO: 3012373 - RNA, 22 nt, Human
gcccugccuccuuugugaggaa

SEQ ID NO: 3012374 - RNA, 16 nt, Human
gcccugccuccuuugu

SEQ ID NO: 3012375 - RNA, 14 nt, Human
gcccugccuccuuu

SEQ ID NO: 3012376 - RNA, 21 nt, Human
gcccugugggcccccaaaugg

SEQ ID NO: 3012377 - RNA, 13 nt, Human
gcccacucccugc

SEQ ID NO: 3012378 - RNA, 19 nt, Human
gcccacucccugcaaccug

SEQ ID NO: 3012379 - RNA, 15 nt, Human
gcccacucccugcaa

SEQ ID NO: 3012380 - RNA, 14 nt, Human
gcccacucccugca

SEQ ID NO: 3012381 - RNA, 22 nt, Human
gcccuaaaguguauuuuuuuac

SEQ ID NO: 3012382 - RNA, 22 nt, Human
gccccuggaugcagccucacag

SEQ ID NO: 3012383 - RNA, 18 nt, Human
gccccuggaugcagccuc

SEQ ID NO: 3012384 - RNA, 16 nt, Human
gccccuggaugcagcc

SEQ ID NO: 3012385 - RNA, 13 nt, Human
gccccugcccggc

SEQ ID NO: 3012386 - RNA, 14 nt, Human
gccccugcccggcu

SEQ ID NO: 3012387 - RNA, 18 nt, Human
gccccaaaacucuccucu

SEQ ID NO: 3012388 - RNA, 19 nt, Human
gccccaaaacucuccucug

SEQ ID NO: 3012389 - RNA, 22 nt, Human
ggcccaggaguuuggccagaag

SEQ ID NO: 3012390 - RNA, 23 nt, Human
ggcccaggaguuuggccagaagu

SEQ ID NO: 3012391 - RNA, 21 nt, Human
ggcccaggaguuuggccagaa

SEQ ID NO: 3012392 - RNA, 14 nt, Human
ggccucccaacuca

SEQ ID NO: 3012393 - RNA, 13 nt, Human
ggccucccaacuc

SEQ ID NO: 3012394 - RNA, 21 nt, Human
ggccaaaggaagcacaugccu

SEQ ID NO: 3012395 - RNA, 15 nt, Human
ggccaaagccaaagc

SEQ ID NO: 3012396 - RNA, 12 nt, Human
ggccaaaggaag

SEQ ID NO: 3012397 - RNA, 21 nt, Human
ggccaaacucaccugccccuc

SEQ ID NO: 3012398 - RNA, 12 nt, Human
ggcauuguggga

SEQ ID NO: 3012399 - RNA, 13 nt, Human
ggccaagguggga

SEQ ID NO: 3012400 - RNA, 22 nt, Human
ggccagagggagugacagaggc

SEQ ID NO: 3012401 - RNA, 23 nt, Human
ggccagagggagugacagaggca

SEQ ID NO: 3012402 - RNA, 17 nt, Human
ggccagaugcaccagcc

SEQ ID NO: 3012403 - RNA, 19 nt, Human
ggccagaugcaccagcccu

SEQ ID NO: 3012404 - RNA, 20 nt, Human
ggccagaugcaccagcccuu

SEQ ID NO: 3012405 - RNA, 12 nt, Human
ggauuuucagcc

SEQ ID NO: 3012406 - RNA, 21 nt, Human
ggauuuugauccaagcugguc

SEQ ID NO: 3012407 - RNA, 23 nt, Human
ggauuaaacuuaaucuaaaugga

SEQ ID NO: 3012408 - RNA, 21 nt, Human
ggaugaauuccaaauucugcu

SEQ ID NO: 3012409 - RNA, 12 nt, Human
ggaugagaaagg

SEQ ID NO: 3012410 - RNA, 22 nt, Human
ggaugagaaagguugaagcacc

SEQ ID NO: 3012411 - RNA, 12 nt, Human
ggcagaaggaag

SEQ ID NO: 3012412 - RNA, 17 nt, Human
ggcagccaggccacaag

SEQ ID NO: 3012413 - RNA, 15 nt, Human
ggcagccaggccaca

SEQ ID NO: 3012414 - RNA, 10 nt, Human
ggcagagcag

SEQ ID NO: 3012415 - RNA, 14 nt, Human
ggcagccaggccac

SEQ ID NO: 3012416 - RNA, 21 nt, Human
ggagcagccacauuccugaug

SEQ ID NO: 3012417 - RNA, 13 nt, Human
ggagcagccacau

SEQ ID NO: 3012418 - RNA, 18 nt, Human
ggaggucgaggcaggagg

SEQ ID NO: 3012419 - RNA, 14 nt, Human
ggaggucgaggcag

SEQ ID NO: 3012420 - RNA, 16 nt, Human
ggaggucgaggcagga

SEQ ID NO: 3012421 - RNA, 15 nt, Human
ggaggucgaggcagg

SEQ ID NO: 3012422 - RNA, 12 nt, Human
ggaggaagagaa

SEQ ID NO: 3012423 - RNA, 21 nt, Human
ggaggcaugugaugagaggaa

SEQ ID NO: 3012424 - RNA, 13 nt, Human
ggaggccagccuu

SEQ ID NO: 3012425 - RNA, 18 nt, Human
ggaggccaaggugggagg

SEQ ID NO: 3012426 - RNA, 12 nt, Human
ggaggccagccu

SEQ ID NO: 3012427 - RNA, 22 nt, Human
ggagcugccuguucagcuccag

SEQ ID NO: 3012428 - RNA, 19 nt, Human
gcuuguacauaaugcgugc

SEQ ID NO: 3012429 - RNA, 19 nt, Human
ggacccugaggcccagagg

SEQ ID NO: 3012430 - RNA, 14 nt, Human
ggacccugaggccc

SEQ ID NO: 3012431 - RNA, 18 nt, Human
ggacccugaggcccagag

SEQ ID NO: 3012432 - RNA, 15 nt, Human
ggacccugaggccca

SEQ ID NO: 3012433 - RNA, 15 nt, Human
ggagagcuagcagca

SEQ ID NO: 3012434 - RNA, 16 nt, Human
ggagagccuuccaggg

SEQ ID NO: 3012435 - RNA, 13 nt, Human
ggagagccuucca

SEQ ID NO: 3012436 - RNA, 18 nt, Human
ggagagccuuccaggggu

SEQ ID NO: 3012437 - RNA, 17 nt, Human
ggagagccuuccagggg

SEQ ID NO: 3012438 - RNA, 22 nt, Human
ggagagccuuccagggguggga

SEQ ID NO: 3012439 - RNA, 9 nt, Human
ggacuuugu

SEQ ID NO: 3012440 - RNA, 19 nt, Human
ggagaaaauggacguguua

SEQ ID NO: 3012441 - RNA, 15 nt, Human
ggacuuggaagcucc

SEQ ID NO: 3012442 - RNA, 17 nt, Human
ggacuuggaagcuccgc

SEQ ID NO: 3012443 - RNA, 22 nt, Human
ggagaaccaaaaagaggcuaug

SEQ ID NO: 3012444 - RNA, 18 nt, Human
ggacucaaugcacugaca

SEQ ID NO: 3012445 - RNA, 22 nt, Human
ggacucaaugcacugacauugu

SEQ ID NO: 3012446 - RNA, 20 nt, Human
ggacuacaggugugagucac

SEQ ID NO: 3012447 - RNA, 19 nt, Human
aaagaugaaggucuguuuu

SEQ ID NO: 3012448 - RNA, 15 nt, Human
aaagaugagugagca

SEQ ID NO: 3012449 - RNA, 18 nt, Human
aaagaggcuaugugagca

SEQ ID NO: 3012450 - RNA, 13 nt, Human
aaagaggcuaugu

SEQ ID NO: 3012451 - RNA, 19 nt, Human
aaagacuuuuccaacccuc

SEQ ID NO: 3012452 - RNA, 15 nt, Human
aaagacuguacaaag

SEQ ID NO: 3012453 - RNA, 19 nt, Human
gguccacccaggagccccg

SEQ ID NO: 3012454 - RNA, 23 nt, Human
gguauuggcuagagguucaaaga

SEQ ID NO: 3012455 - RNA, 20 nt, Human
gguccacccaggagccccga

SEQ ID NO: 3012456 - RNA, 22 nt, Human
gguccacccaggagccccgagg

SEQ ID NO: 3012457 - RNA, 12 nt, Human
ggucccacccca

SEQ ID NO: 3012458 - RNA, 14 nt, Human
aaacuuuaccuuuu

SEQ ID NO: 3012459 - RNA, 22 nt, Human
aaaggaaugcaaagaugaaggu

SEQ ID NO: 3012460 - RNA, 19 nt, Human
aaaggaaugcaaagaugaa

SEQ ID NO: 3012461 - RNA, 11 nt, Human
aaaggaaagag

SEQ ID NO: 3012462 - RNA, 17 nt, Human
aaagcuuuugcauauug

SEQ ID NO: 3012463 - RNA, 17 nt, Human
aaagcuaggccuggcca

SEQ ID NO: 3012464 - RNA, 18 nt, Human
aaagcuaggccuggccag

SEQ ID NO: 3012465 - RNA, 16 nt, Human
aaagcagugcaugcug

SEQ ID NO: 3012466 - RNA, 22 nt, Human
aaagcagugcaugcugucccuu

SEQ ID NO: 3012467 - RNA, 21 nt, Human
aaagcagugcaugcugucccu

SEQ ID NO: 3012468 - RNA, 17 nt, Human
aaagcagugcaugcugu

SEQ ID NO: 3012469 - RNA, 13 nt, Human
ggucugucuuuua

SEQ ID NO: 3012470 - RNA, 14 nt, Human
ggucugucuuuuaa

SEQ ID NO: 3012471 - RNA, 12 nt, Human
ggucuguucuuu

SEQ ID NO: 3012472 - RNA, 21 nt, Human
ggucuugaacuccuggccuca

SEQ ID NO: 3012473 - RNA, 22 nt, Human
ggucuugaacuccuggccucaa

SEQ ID NO: 3012474 - RNA, 17 nt, Human
ggucuguucuuuccaaa

SEQ ID NO: 3012475 - RNA, 19 nt, Human
ggucuguucuuuccaaagu

SEQ ID NO: 3012476 - RNA, 20 nt, Human
ggugauuuagcaggaagcug

SEQ ID NO: 3012477 - RNA, 22 nt, Human
ggugcacaagcuccaagcuccc

SEQ ID NO: 3012478 - RNA, 16 nt, Human
ggugcacaagcuccaa

SEQ ID NO: 3012479 - RNA, 18 nt, Human
aaacaugcuguacauacu

SEQ ID NO: 3012480 - RNA, 16 nt, Human
aaacaugcuguacaua

SEQ ID NO: 3012481 - RNA, 15 nt, Human
aaacaugcuguacau

SEQ ID NO: 3012482 - RNA, 22 nt, Human
aaacaugcuacacacugcaugu

SEQ ID NO: 3012483 - RNA, 16 nt, Human
aaacaugcuacacacu

SEQ ID NO: 3012484 - RNA, 21 nt, Human
aaacaugcuguacauacuuuu

SEQ ID NO: 3012485 - RNA, 20 nt, Human
aaacaugcuguacauacuuu

SEQ ID NO: 3012486 - RNA, 24 nt, Human
ggggaaaaucagccugcuccagcu

SEQ ID NO: 3012487 - RNA, 22 nt, Human
aaacaugcuguacauacuuuuu

SEQ ID NO: 3012488 - RNA, 17 nt, Human
ggggaccucaggccugg

SEQ ID NO: 3012489 - RNA, 16 nt, Human
ggggaccucaggccug

SEQ ID NO: 3012490 - RNA, 15 nt, Human
ggggaccucaggccu

SEQ ID NO: 3012491 - RNA, 13 nt, Human
ggggaccucaggc

SEQ ID NO: 3012492 - RNA, 23 nt, Human
ggggcccugccuccuuugugagg

SEQ ID NO: 3012493 - RNA, 19 nt, Human
ggggcccugccuccuuugu

SEQ ID NO: 3012494 - RNA, 15 nt, Human
ggggcccugccuccu

SEQ ID NO: 3012495 - RNA, 16 nt, Human
ggggcccugccuccuu

SEQ ID NO: 3012496 - RNA, 17 nt, Human
ggggccaguuggucccc

SEQ ID NO: 3012497 - RNA, 20 nt, Human
aaaauggaagacagcucuua

SEQ ID NO: 3012498 - RNA, 21 nt, Human
aaaauguaggguuauaauaau

SEQ ID NO: 3012499 - RNA, 21 nt, Human
aaaauggacguguuaugacuc

SEQ ID NO: 3012500 - RNA, 20 nt, Human
aaacuacauuagguugugaa

SEQ ID NO: 3012501 - RNA, 22 nt, Human
aaacuacauuagguugugaaug

SEQ ID NO: 3012502 - RNA, 21 nt, Human
aaacuacauuagguugugaau

SEQ ID NO: 3012503 - RNA, 17 nt, Human
aaacguggcugcuucaa

SEQ ID NO: 3012504 - RNA, 16 nt, Human
aaacguggcugcuuca

SEQ ID NO: 3012505 - RNA, 16 nt, Human
aaacucauuucuagca

SEQ ID NO: 3012506 - RNA, 18 nt, Human
aaacuacauugacagauu

SEQ ID NO: 3012507 - RNA, 16 nt, Human
aaacuggauuaaacuu

SEQ ID NO: 3012508 - RNA, 22 nt, Human
gggucucacuauguugcccagg

SEQ ID NO: 3012509 - RNA, 23 nt, Human
gggucucacuauguugcccaggc

SEQ ID NO: 3012510 - RNA, 22 nt, Human
gggucacucuggcagcucagag

SEQ ID NO: 3012511 - RNA, 20 nt, Human
ggguaucaggugcugccauc

SEQ ID NO: 3012512 - RNA, 21 nt, Human
gggauuuucagcccucagaau

SEQ ID NO: 3012513 - RNA, 23 nt, Human
gggcagagcagagaccaucccug

SEQ ID NO: 3012514 - RNA, 15 nt, Human
gggauuuccaugaug

SEQ ID NO: 3012515 - RNA, 18 nt, Human
aaaauaguggugugauuu

SEQ ID NO: 3012516 - RNA, 12 nt, Human
aaaauagccugc

SEQ ID NO: 3012517 - RNA, 14 nt, Human
aaaauaccaaggaa

SEQ ID NO: 3012518 - RNA, 15 nt, Human
aaaauaccagccagu

SEQ ID NO: 3012519 - RNA, 14 nt, Human
aaaauaccagccag

SEQ ID NO: 3012520 - RNA, 12 nt, Human
aaaauaaauuau

SEQ ID NO: 3012521 - RNA, 21 nt, Human
aaaacguggcugcuucaagga

SEQ ID NO: 3012522 - RNA, 22 nt, Human
aaaacugauuuuuuuuuccuuc

SEQ ID NO: 3012523 - RNA, 18 nt, Human
aaaacugauuuuuuuuuc

SEQ ID NO: 3012524 - RNA, 15 nt, Human
aaaaccaauguucuc

SEQ ID NO: 3012525 - RNA, 18 nt, Human
aaaacguggcugcuucaa

SEQ ID NO: 3012526 - RNA, 17 nt, Human
aaaacguggcugcuuca

SEQ ID NO: 3012527 - RNA, 16 nt, Human
aaaacguggcugcuuc

SEQ ID NO: 3012528 - RNA, 14 nt, Human
aaaacguggcugcu

SEQ ID NO: 3012529 - RNA, 14 nt, Human
gggaacagacugga

SEQ ID NO: 3012530 - RNA, 22 nt, Human
gggaacagacuggaagcacagc

SEQ ID NO: 3012531 - RNA, 17 nt, Human
aaaaaucucaaauuucu

SEQ ID NO: 3012532 - RNA, 19 nt, Human
aaaaaucucaaauuucuaa

SEQ ID NO: 3012533 - RNA, 20 nt, Human
aaaaaucucaaauuucuaaa

SEQ ID NO: 3012534 - RNA, 13 nt, Human
gggagggcuccag

SEQ ID NO: 3012535 - RNA, 11 nt, Human
gggagggcucc

SEQ ID NO: 3012536 - RNA, 14 nt, Human
aaaagcugggcagg

SEQ ID NO: 3012537 - RNA, 22 nt, Human
aaaacuugauguguuaucucuu

SEQ ID NO: 3012538 - RNA, 16 nt, Human
ggcucccuucccaccu

SEQ ID NO: 3012539 - RNA, 18 nt, Human
ggcucccuucccaccucu

SEQ ID NO: 3012540 - RNA, 17 nt, Human
ggcucccuucccaccuc

SEQ ID NO: 3012541 - RNA, 22 nt, Human
ggcucccuucccaccucucuca

SEQ ID NO: 3012542 - RNA, 20 nt, Human
ggcucccuucccaccucucu

SEQ ID NO: 3012543 - RNA, 21 nt, Human
ggcugccaaugggagcucaug

SEQ ID NO: 3012544 - RNA, 20 nt, Human
ggcugcaugcgggcuuccuc

SEQ ID NO: 3012545 - RNA, 17 nt, Human
ggcugcagggaguccga

SEQ ID NO: 3012546 - RNA, 18 nt, Human
ggcucgagcaugccugga

SEQ ID NO: 3012547 - RNA, 24 nt, Human
ggcucuuccaggcugggagagccu

SEQ ID NO: 3012548 - RNA, 23 nt, Human
ggcucuuccaggcugggagagcc

SEQ ID NO: 3012549 - RNA, 20 nt, Human
ggcucuuccaggcugggaga

SEQ ID NO: 3012550 - RNA, 14 nt, Human
ggcuggcgugcagu

SEQ ID NO: 3012551 - RNA, 16 nt, Human
ggcuggcgugcagugg

SEQ ID NO: 3012552 - RNA, 20 nt, Human
ggcuggcgugcaguggugcg

SEQ ID NO: 3012553 - RNA, 22 nt, Human
ggcuggccuggccccucagggu

SEQ ID NO: 3012554 - RNA, 17 nt, Human
ggcuggccuggccccuc

SEQ ID NO: 3012555 - RNA, 13 nt, Human
aaaaaaacacaaa

SEQ ID NO: 3012556 - RNA, 15 nt, Human
ggcuucaguggcagc

SEQ ID NO: 3012557 - RNA, 20 nt, Human
ggcuguaucccaugagccuc

SEQ ID NO: 3012558 - RNA, 22 nt, Human
ggcuguaucccaugagccucag

SEQ ID NO: 3012559 - RNA, 23 nt, Human
ggcuguaucccaugagccucagc

SEQ ID NO: 3012560 - RNA, 15 nt, Human
ggcugucaauuacag

SEQ ID NO: 3012561 - RNA, 19 nt, Human
ggcuguaucccaugagccu

SEQ ID NO: 3012562 - RNA, 16 nt, Human
ggcuggugucaccuga

SEQ ID NO: 3012563 - RNA, 16 nt, Human
ggcuucaguggcagcu

SEQ ID NO: 3012564 - RNA, 13 nt, Human
gggaaaaucagcc

SEQ ID NO: 3012565 - RNA, 23 nt, Human
gggaaaaucagccugcuccagcu

SEQ ID NO: 3012566 - RNA, 16 nt, Human
auucauucuuuuugaa

SEQ ID NO: 3012567 - RNA, 21 nt, Human
auucauucuuuuugaaauguc

SEQ ID NO: 3012568 - RNA, 15 nt, Human
auucauucuuuuuga

SEQ ID NO: 3012569 - RNA, 20 nt, Human
auucucuaguuugauuaaau

SEQ ID NO: 3012570 - RNA, 19 nt, Human
auucucuaguuugauuaaa

SEQ ID NO: 3012571 - RNA, 23 nt, Human
auucucuaguuugauuaaauucu

SEQ ID NO: 3012572 - RNA, 12 nt, Human
auucucuuaucc

SEQ ID NO: 3012573 - RNA, 14 nt, Human
auucucuuauccaa

SEQ ID NO: 3012574 - RNA, 15 nt, Human
auucucuuauccaac

SEQ ID NO: 3012575 - RNA, 14 nt, Human
auucauuaguuuug

SEQ ID NO: 3012576 - RNA, 15 nt, Human
auucauuaguuuuga

SEQ ID NO: 3012577 - RNA, 14 nt, Human
auucauauuuacuu

SEQ ID NO: 3012578 - RNA, 22 nt, Human
auuacaagcgugagccacugca

SEQ ID NO: 3012579 - RNA, 17 nt, Human
auuucucucaucuguua

SEQ ID NO: 3012580 - RNA, 20 nt, Human
auuucuguuuagauaauaca

SEQ ID NO: 3012581 - RNA, 19 nt, Human
auuucuguuuagauaauac

SEQ ID NO: 3012582 - RNA, 21 nt, Human
auuucuguuuagauaauacac

SEQ ID NO: 3012583 - RNA, 19 nt, Human
auuugcacauuaaaugacu

SEQ ID NO: 3012584 - RNA, 17 nt, Human
auuugcacauuaaauga

SEQ ID NO: 3012585 - RNA, 15 nt, Human
auuugcacauuaaau

SEQ ID NO: 3012586 - RNA, 14 nt, Human
auuugcacauuaaa

SEQ ID NO: 3012587 - RNA, 13 nt, Human
auuuaauuugaag

SEQ ID NO: 3012588 - RNA, 15 nt, Human
auuuaauuugaaggu

SEQ ID NO: 3012589 - RNA, 17 nt, Human
auuucacaguguguggu

SEQ ID NO: 3012590 - RNA, 12 nt, Human
auuucacucucc

SEQ ID NO: 3012591 - RNA, 14 nt, Human
auuucacucuccuu

SEQ ID NO: 3012592 - RNA, 21 nt, Human
auuugcacauuaaaugacucu

SEQ ID NO: 3012593 - RNA, 20 nt, Human
auuugcacauuaaaugacuc

SEQ ID NO: 3012594 - RNA, 14 nt, Human
auuuguuauaauga

SEQ ID NO: 3012595 - RNA, 17 nt, Human
auuuucuccaaauguuc

SEQ ID NO: 3012596 - RNA, 16 nt, Human
caaaccaucauugaaa

SEQ ID NO: 3012597 - RNA, 14 nt, Human
caaaccaucauuga

SEQ ID NO: 3012598 - RNA, 17 nt, Human
caaaccaucauugaaau

SEQ ID NO: 3012599 - RNA, 16 nt, Human
auuuuuauuaaauuau

SEQ ID NO: 3012600 - RNA, 21 nt, Human
auuuuguuuuugucuuaaaaa

SEQ ID NO: 3012601 - RNA, 22 nt, Human
auuuuguuuuugucuuaaaaag

SEQ ID NO: 3012602 - RNA, 20 nt, Human
caaaagguuaauaaaguaau

SEQ ID NO: 3012603 - RNA, 19 nt, Human
caaaagcaucuaugugaga

SEQ ID NO: 3012604 - RNA, 13 nt, Human
caaaagcauguga

SEQ ID NO: 3012605 - RNA, 23 nt, Human
caauugugaaaaaauuuacuuua

SEQ ID NO: 3012606 - RNA, 20 nt, Human
caauuuauuauggcacauca

SEQ ID NO: 3012607 - RNA, 13 nt, Human
caauuuauuaugg

SEQ ID NO: 3012608 - RNA, 17 nt, Human
cacaaggaaauaaaauu

SEQ ID NO: 3012609 - RNA, 22 nt, Human
caauugugaaaaaauuuacuuu

SEQ ID NO: 3012610 - RNA, 13 nt, Human
caauggcagccuu

SEQ ID NO: 3012611 - RNA, 14 nt, Human
caauggcagccuug

SEQ ID NO: 3012612 - RNA, 15 nt, Human
caauggcagccuugg

SEQ ID NO: 3012613 - RNA, 14 nt, Human
caaucaaaucugcu

SEQ ID NO: 3012614 - RNA, 18 nt, Human
caauauuuaaucuuuuau

SEQ ID NO: 3012615 - RNA, 15 nt, Human
caagcucugcuccuc

SEQ ID NO: 3012616 - RNA, 16 nt, Human
caagcucugcuccucu

SEQ ID NO: 3012617 - RNA, 17 nt, Human
caagcucccaggcauuc

SEQ ID NO: 3012618 - RNA, 15 nt, Human
caagcucccaggcau

SEQ ID NO: 3012619 - RNA, 14 nt, Human
caagcucccaggca

SEQ ID NO: 3012620 - RNA, 12 nt, Human
caagcucccagg

SEQ ID NO: 3012621 - RNA, 21 nt, Human
caagcuccaagcucccaggca

SEQ ID NO: 3012622 - RNA, 19 nt, Human
caagcuccaagcucccagg

SEQ ID NO: 3012623 - RNA, 18 nt, Human
caagcuccaagcucccag

SEQ ID NO: 3012624 - RNA, 17 nt, Human
caagcuccaagcuccca

SEQ ID NO: 3012625 - RNA, 13 nt, Human
caaguauuauacc

SEQ ID NO: 3012626 - RNA, 17 nt, Human
caaguauuauaccuuuu

SEQ ID NO: 3012627 - RNA, 22 nt, Human
caaguauuauaccuuuuuuaga

SEQ ID NO: 3012628 - RNA, 14 nt, Human
caaggcaaggcugu

SEQ ID NO: 3012629 - RNA, 19 nt, Human
caaggauugcuacuguccu

SEQ ID NO: 3012630 - RNA, 20 nt, Human
caaggauugcuacuguccua

SEQ ID NO: 3012631 - RNA, 17 nt, Human
caaccccuucgcuccug

SEQ ID NO: 3012632 - RNA, 14 nt, Human
caaccccuucgcuc

SEQ ID NO: 3012633 - RNA, 16 nt, Human
caaccccuucgcuccu

SEQ ID NO: 3012634 - RNA, 14 nt, Human
caacccccagccug

SEQ ID NO: 3012635 - RNA, 17 nt, Human
caagaaggaugauucaa

SEQ ID NO: 3012636 - RNA, 18 nt, Human
caagaagcccaggaaagg

SEQ ID NO: 3012637 - RNA, 15 nt, Human
caagaagcccaggaa

SEQ ID NO: 3012638 - RNA, 14 nt, Human
caagaagcccagga

SEQ ID NO: 3012639 - RNA, 14 nt, Human
caagaccacguuuc

SEQ ID NO: 3012640 - RNA, 16 nt, Human
caagaccacguuucua

SEQ ID NO: 3012641 - RNA, 13 nt, Human
caagcaccuccug

SEQ ID NO: 3012642 - RNA, 15 nt, Human
cacuacauucuguua

SEQ ID NO: 3012643 - RNA, 22 nt, Human
cacggaagagccuugcggaagg

SEQ ID NO: 3012644 - RNA, 16 nt, Human
cacggaagagccuugc

SEQ ID NO: 3012645 - RNA, 21 nt, Human
cacuacauuauaaaugucucu

SEQ ID NO: 3012646 - RNA, 13 nt, Human
cacuacauucugu

SEQ ID NO: 3012647 - RNA, 14 nt, Human
cacuacauucuguu

SEQ ID NO: 3012648 - RNA, 21 nt, Human
cacgcuggagugcagugagcc

SEQ ID NO: 3012649 - RNA, 16 nt, Human
cacgcuggagugcagu

SEQ ID NO: 3012650 - RNA, 17 nt, Human
cacgcuggagugcagug

SEQ ID NO: 3012651 - RNA, 18 nt, Human
cacgcuggagugcaguga

SEQ ID NO: 3012652 - RNA, 20 nt, Human
cacgcuggagugcagugagc

SEQ ID NO: 3012653 - RNA, 15 nt, Human
cacgcuggagugcag

SEQ ID NO: 3012654 - RNA, 17 nt, Human
cacccuggggagaaagu

SEQ ID NO: 3012655 - RNA, 12 nt, Human
caccugccaggg

SEQ ID NO: 3012656 - RNA, 11 nt, Human
caccugccagg

SEQ ID NO: 3012657 - RNA, 21 nt, Human
caccugccccucaacucuccu

SEQ ID NO: 3012658 - RNA, 18 nt, Human
caccugccccucaacucu

SEQ ID NO: 3012659 - RNA, 12 nt, Human
cacccugcucuc

SEQ ID NO: 3012660 - RNA, 12 nt, Human
cacccuccuuuc

SEQ ID NO: 3012661 - RNA, 16 nt, Human
caccugcggugcuauc

SEQ ID NO: 3012662 - RNA, 19 nt, Human
caccugcggugcuaucucc

SEQ ID NO: 3012663 - RNA, 17 nt, Human
caccugcggugcuaucu

SEQ ID NO: 3012664 - RNA, 12 nt, Human
cacccagcccac

SEQ ID NO: 3012665 - RNA, 23 nt, Human
cacaucuugcucugcugacagac

SEQ ID NO: 3012666 - RNA, 19 nt, Human
cacaucuugcucugcugac

SEQ ID NO: 3012667 - RNA, 17 nt, Human
cacauuuauucugcuca

SEQ ID NO: 3012668 - RNA, 18 nt, Human
cacauuuauucugcucac

SEQ ID NO: 3012669 - RNA, 17 nt, Human
caccagccccagugccc

SEQ ID NO: 3012670 - RNA, 18 nt, Human
caccagccccagugccca

SEQ ID NO: 3012671 - RNA, 21 nt, Human
caccagccccagugcccacag

SEQ ID NO: 3012672 - RNA, 22 nt, Human
caccagccccagugcccacagg

SEQ ID NO: 3012673 - RNA, 16 nt, Human
caccagccccagugcc

SEQ ID NO: 3012674 - RNA, 19 nt, Human
caccagcccuuagcaggga

SEQ ID NO: 3012675 - RNA, 13 nt, Human
cacaucuugcucu

SEQ ID NO: 3012676 - RNA, 14 nt, Human
cacaucuugcucug

SEQ ID NO: 3012677 - RNA, 15 nt, Human
cacaucuugcucugc

SEQ ID NO: 3012678 - RNA, 20 nt, Human
cacaucuugcucugcugaca

SEQ ID NO: 3012679 - RNA, 21 nt, Human
cacaucuugcucugcugacag

SEQ ID NO: 3012680 - RNA, 22 nt, Human
cacaucuugcucugcugacaga

SEQ ID NO: 3012681 - RNA, 19 nt, Human
cagacuggauaguccgucu

SEQ ID NO: 3012682 - RNA, 20 nt, Human
cagacuggaagcacagcuuc

SEQ ID NO: 3012683 - RNA, 21 nt, Human
cagacuggaagcacagcuuca

SEQ ID NO: 3012684 - RNA, 13 nt, Human
cagacuggaagca

SEQ ID NO: 3012685 - RNA, 14 nt, Human
cagacuggaagcac

SEQ ID NO: 3012686 - RNA, 16 nt, Human
cagacuggaagcacag

SEQ ID NO: 3012687 - RNA, 17 nt, Human
cagacuggaagcacagc

SEQ ID NO: 3012688 - RNA, 18 nt, Human
cagacuggaagcacagcu

SEQ ID NO: 3012689 - RNA, 23 nt, Human
cagacucuacagaggccaugggc

SEQ ID NO: 3012690 - RNA, 18 nt, Human
cagacucuacagaggcca

SEQ ID NO: 3012691 - RNA, 19 nt, Human
cagacucuacagaggccau

SEQ ID NO: 3012692 - RNA, 20 nt, Human
cagacucuacagaggccaug

SEQ ID NO: 3012693 - RNA, 21 nt, Human
cagacucuacagaggccaugg

SEQ ID NO: 3012694 - RNA, 17 nt, Human
cagacucuacagaggcc

SEQ ID NO: 3012695 - RNA, 22 nt, Human
cagacaggcaagcaccuccugc

SEQ ID NO: 3012696 - RNA, 23 nt, Human
cagacaggcaagcaccuccugcc

SEQ ID NO: 3012697 - RNA, 11 nt, Human
cagacaggcaa

SEQ ID NO: 3012698 - RNA, 24 nt, Human
cagacaggaccagggauuuccaug

SEQ ID NO: 3012699 - RNA, 17 nt, Human
cagacaggaccagggau

SEQ ID NO: 3012700 - RNA, 13 nt, Human
cagacaggcaagc

SEQ ID NO: 3012701 - RNA, 18 nt, Human
cagacaggcaagcaccuc

SEQ ID NO: 3012702 - RNA, 20 nt, Human
cagacaggcaagcaccuccu

SEQ ID NO: 3012703 - RNA, 21 nt, Human
cagacaggcaagcaccuccug

SEQ ID NO: 3012704 - RNA, 18 nt, Human
cagacagcugccugggau

SEQ ID NO: 3012705 - RNA, 17 nt, Human
cagacagcugccuggga

SEQ ID NO: 3012706 - RNA, 16 nt, Human
cagacagcugccuggg

SEQ ID NO: 3012707 - RNA, 15 nt, Human
cagacagcugccugg

SEQ ID NO: 3012708 - RNA, 16 nt, Human
cagacaggaccaggga

SEQ ID NO: 3012709 - RNA, 15 nt, Human
cagacaggaccaggg

SEQ ID NO: 3012710 - RNA, 13 nt, Human
cagacaggaccag

SEQ ID NO: 3012711 - RNA, 14 nt, Human
cagacagcugccug

SEQ ID NO: 3012712 - RNA, 13 nt, Human
cagacagcugccu

SEQ ID NO: 3012713 - RNA, 19 nt, Human
cagauagauauaugcucug

SEQ ID NO: 3012714 - RNA, 19 nt, Human
cagauacuuggggggcuga

SEQ ID NO: 3012715 - RNA, 16 nt, Human
cagaggggguggccuc

SEQ ID NO: 3012716 - RNA, 14 nt, Human
cagaggggguggcc

SEQ ID NO: 3012717 - RNA, 23 nt, Human
cagagacuccugcaggcagccag

SEQ ID NO: 3012718 - RNA, 12 nt, Human
cagagagggugg

SEQ ID NO: 3012719 - RNA, 17 nt, Human
cagagaggguggugacc

SEQ ID NO: 3012720 - RNA, 20 nt, Human
cagagaggguggugaccucu

SEQ ID NO: 3012721 - RNA, 22 nt, Human
cagagaggguggugaccucugc

SEQ ID NO: 3012722 - RNA, 23 nt, Human
cagagagggugggagugggccca

SEQ ID NO: 3012723 - RNA, 23 nt, Human
cagagaggguggugaccucugcc

SEQ ID NO: 3012724 - RNA, 20 nt, Human
cagagagguuaaggugggua

SEQ ID NO: 3012725 - RNA, 13 nt, Human
cagagcugccacc

SEQ ID NO: 3012726 - RNA, 13 nt, Human
cagaggggguggc

SEQ ID NO: 3012727 - RNA, 19 nt, Human
cagaggaaagcaaaggaga

SEQ ID NO: 3012728 - RNA, 17 nt, Human
cagaggaaagcaaagga

SEQ ID NO: 3012729 - RNA, 19 nt, Human
cagauuucacucuccuugg

SEQ ID NO: 3012730 - RNA, 17 nt, Human
cagcaccaucucuccuc

SEQ ID NO: 3012731 - RNA, 19 nt, Human
cagcaccaucucuccuccu

SEQ ID NO: 3012732 - RNA, 20 nt, Human
cagauuucacucuccuuggu

SEQ ID NO: 3012733 - RNA, 19 nt, Human
cagauugcaacaggcuggg

SEQ ID NO: 3012734 - RNA, 20 nt, Human
cagauugcaacaggcugggc

SEQ ID NO: 3012735 - RNA, 18 nt, Human
cagauugcaacaggcugg

SEQ ID NO: 3012736 - RNA, 20 nt, Human
cagcacgauuucuguuuaga

SEQ ID NO: 3012737 - RNA, 14 nt, Human
cagcacgauuucug

SEQ ID NO: 3012738 - RNA, 15 nt, Human
cagcacgauuucugu

SEQ ID NO: 3012739 - RNA, 22 nt, Human
cagccaggccacaagacccuug

SEQ ID NO: 3012740 - RNA, 15 nt, Human
cagccugcuccagcu

SEQ ID NO: 3012741 - RNA, 19 nt, Human
cagccugcuccagcuguuc

SEQ ID NO: 3012742 - RNA, 17 nt, Human
cagccugcuccagcugu

SEQ ID NO: 3012743 - RNA, 16 nt, Human
cagccugcuccagcug

SEQ ID NO: 3012744 - RNA, 19 nt, Human
cagcguuucuaugacacau

SEQ ID NO: 3012745 - RNA, 15 nt, Human
cagcuaacauggaag

SEQ ID NO: 3012746 - RNA, 21 nt, Human
cagcugacuuuucuguccgag

SEQ ID NO: 3012747 - RNA, 20 nt, Human
caggaaaggcuccaggagca

SEQ ID NO: 3012748 - RNA, 19 nt, Human
caggaaaggcuccaggagc

SEQ ID NO: 3012749 - RNA, 17 nt, Human
caggaaaggcuccagga

SEQ ID NO: 3012750 - RNA, 16 nt, Human
caggaaaggcuccagg

SEQ ID NO: 3012751 - RNA, 12 nt, Human
caggccaggccc

SEQ ID NO: 3012752 - RNA, 11 nt, Human
caggccaggcc

SEQ ID NO: 3012753 - RNA, 19 nt, Human
caggaggaucacuugaguc

SEQ ID NO: 3012754 - RNA, 22 nt, Human
caggaggccagccuugaccauu

SEQ ID NO: 3012755 - RNA, 19 nt, Human
caggaggccagccuugacc

SEQ ID NO: 3012756 - RNA, 18 nt, Human
caggaggccagccuugac

SEQ ID NO: 3012757 - RNA, 14 nt, Human
caggcaaugcuggc

SEQ ID NO: 3012758 - RNA, 15 nt, Human
caggcaaugcuggcu

SEQ ID NO: 3012759 - RNA, 16 nt, Human
caggcaaugcuggcug

SEQ ID NO: 3012760 - RNA, 23 nt, Human
caggaccucaggugagaagcaga

SEQ ID NO: 3012761 - RNA, 16 nt, Human
caggaccucaggugag

SEQ ID NO: 3012762 - RNA, 21 nt, Human
caggaccagggauuuccauga

SEQ ID NO: 3012763 - RNA, 23 nt, Human
caggcugggagagccuuccaggg

SEQ ID NO: 3012764 - RNA, 22 nt, Human
caggcugggagagccuuccagg

SEQ ID NO: 3012765 - RNA, 16 nt, Human
caggggaaaagaggag

SEQ ID NO: 3012766 - RNA, 14 nt, Human
caggggaaaagagg

SEQ ID NO: 3012767 - RNA, 14 nt, Human
caggccuccuacag

SEQ ID NO: 3012768 - RNA, 12 nt, Human
caggccuccuac

SEQ ID NO: 3012769 - RNA, 20 nt, Human
caggcugggagagccuucca

SEQ ID NO: 3012770 - RNA, 21 nt, Human
caggcugggagagccuuccag

SEQ ID NO: 3012771 - RNA, 14 nt, Human
caguuguuauuuau

SEQ ID NO: 3012772 - RNA, 19 nt, Human
caguuguuauuuauugaaa

SEQ ID NO: 3012773 - RNA, 22 nt, Human
caguuguuagugugucuuagug

SEQ ID NO: 3012774 - RNA, 18 nt, Human
caguuguuagugugucuu

SEQ ID NO: 3012775 - RNA, 21 nt, Human
caguuguuauuuauugaaaug

SEQ ID NO: 3012776 - RNA, 21 nt, Human
caguuuguuaguaugaggcau

SEQ ID NO: 3012777 - RNA, 23 nt, Human
caguuuguuaguaugaggcauuu

SEQ ID NO: 3012778 - RNA, 23 nt, Human
cauaaugcgugcauaccacuuuu

SEQ ID NO: 3012779 - RNA, 16 nt, Human
cauacaguuugcacuu

SEQ ID NO: 3012780 - RNA, 23 nt, Human
cauacaggaagguagaaauaucu

SEQ ID NO: 3012781 - RNA, 22 nt, Human
cauauuaccacagacauacuaa

SEQ ID NO: 3012782 - RNA, 23 nt, Human
cauagcagagaaugaaagggccc

SEQ ID NO: 3012783 - RNA, 21 nt, Human
caucagcacgauuucuguuua

SEQ ID NO: 3012784 - RNA, 19 nt, Human
caucagcacgauuucuguu

SEQ ID NO: 3012785 - RNA, 19 nt, Human
caucccaaacccuucagug

SEQ ID NO: 3012786 - RNA, 22 nt, Human
cauccucuguacagagcccacg

SEQ ID NO: 3012787 - RNA, 21 nt, Human
cauccucuguacagagcccac

SEQ ID NO: 3012788 - RNA, 20 nt, Human
caucccaaacccuucagugc

SEQ ID NO: 3012789 - RNA, 11 nt, Human
caucccagccc

SEQ ID NO: 3012790 - RNA, 20 nt, Human
caguuacucagaauucucua

SEQ ID NO: 3012791 - RNA, 21 nt, Human
cagugguaugaucacggcuca

SEQ ID NO: 3012792 - RNA, 19 nt, Human
caguggugcgaucuggguu

SEQ ID NO: 3012793 - RNA, 16 nt, Human
cagugggagcugccug

SEQ ID NO: 3012794 - RNA, 15 nt, Human
cagugggagcugccu

SEQ ID NO: 3012795 - RNA, 17 nt, Human
cagugggagcugccugu

SEQ ID NO: 3012796 - RNA, 18 nt, Human
cagugggagcugccuguu

SEQ ID NO: 3012797 - RNA, 20 nt, Human
cagugguaugaucacggcuc

SEQ ID NO: 3012798 - RNA, 21 nt, Human
cagugcccacaggaucagucu

SEQ ID NO: 3012799 - RNA, 18 nt, Human
cagugcccacaggaucag

SEQ ID NO: 3012800 - RNA, 22 nt, Human
cagugcccacaggaucagucug

SEQ ID NO: 3012801 - RNA, 23 nt, Human
cagucugauucccaagcucugcu

SEQ ID NO: 3012802 - RNA, 21 nt, Human
cagucugauucccaagcucug

SEQ ID NO: 3012803 - RNA, 22 nt, Human
cagucugauucccaagcucugc

SEQ ID NO: 3012804 - RNA, 17 nt, Human
cauuauguuaauauuuc

SEQ ID NO: 3012805 - RNA, 14 nt, Human
cauuauguuaauau

SEQ ID NO: 3012806 - RNA, 15 nt, Human
cauuauguuaauauu

SEQ ID NO: 3012807 - RNA, 16 nt, Human
cauuauguuaauauuu

SEQ ID NO: 3012808 - RNA, 21 nt, Human
cauucuccaccugccagggac

SEQ ID NO: 3012809 - RNA, 19 nt, Human
cauucuccaccugccaggg

SEQ ID NO: 3012810 - RNA, 18 nt, Human
cauucuccaccugccagg

SEQ ID NO: 3012811 - RNA, 17 nt, Human
cauucuccaccugccag

SEQ ID NO: 3012812 - RNA, 20 nt, Human
cauucuccuuguguuacuaa

SEQ ID NO: 3012813 - RNA, 18 nt, Human
cauguucuuaauucuuag

SEQ ID NO: 3012814 - RNA, 18 nt, Human
cauguuggccaggcuggu

SEQ ID NO: 3012815 - RNA, 17 nt, Human
cauguuggccaggcugg

SEQ ID NO: 3012816 - RNA, 21 nt, Human
cauguuacauaagauaaaugu

SEQ ID NO: 3012817 - RNA, 13 nt, Human
cauguucuuaauu

SEQ ID NO: 3012818 - RNA, 16 nt, Human
cauguucuuaauucuu

SEQ ID NO: 3012819 - RNA, 16 nt, Human
cauguccaagaagccc

SEQ ID NO: 3012820 - RNA, 15 nt, Human
cauguccaagaagcc

SEQ ID NO: 3012821 - RNA, 16 nt, Human
cauguuacauaagaua

SEQ ID NO: 3012822 - RNA, 17 nt, Human
cauguuacauaagauaa

SEQ ID NO: 3012823 - RNA, 12 nt, Human
caugcaagguca

SEQ ID NO: 3012824 - RNA, 13 nt, Human
caugacaaagacu

SEQ ID NO: 3012825 - RNA, 17 nt, Human
caugcuccuggcccacu

SEQ ID NO: 3012826 - RNA, 16 nt, Human
caugcuccuggcccac

SEQ ID NO: 3012827 - RNA, 14 nt, Human
caugcuccuggccc

SEQ ID NO: 3012828 - RNA, 18 nt, Human
caugggaaaggggaaguu

SEQ ID NO: 3012829 - RNA, 21 nt, Human
cauggccucuucagaucucua

SEQ ID NO: 3012830 - RNA, 22 nt, Human
ccaaaguacacuguuucaaacu

SEQ ID NO: 3012831 - RNA, 23 nt, Human
ccaauggacuaacuugucuuugg

SEQ ID NO: 3012832 - RNA, 15 nt, Human
ccaaaucagcugcua

SEQ ID NO: 3012833 - RNA, 23 nt, Human
ccaaaucagcugcuacuacuccu

SEQ ID NO: 3012834 - RNA, 13 nt, Human
ccaacucacccca

SEQ ID NO: 3012835 - RNA, 16 nt, Human
ccaagcucugcuccuc

SEQ ID NO: 3012836 - RNA, 14 nt, Human
ccaagcucugcucc

SEQ ID NO: 3012837 - RNA, 15 nt, Human
ccaagcucugcuccu

SEQ ID NO: 3012838 - RNA, 21 nt, Human
ccaacucaccccagccccaaa

SEQ ID NO: 3012839 - RNA, 18 nt, Human
cauuuaggugaggaagca

SEQ ID NO: 3012840 - RNA, 16 nt, Human
cauuuaggugaggaag

SEQ ID NO: 3012841 - RNA, 23 nt, Human
cauuuuuuuuaagaaaaaggaug

SEQ ID NO: 3012842 - RNA, 22 nt, Human
cauuuuuuuuaagaaaaaggau

SEQ ID NO: 3012843 - RNA, 14 nt, Human
ccaggaguuuggcc

SEQ ID NO: 3012844 - RNA, 15 nt, Human
ccaggaguuuggcca

SEQ ID NO: 3012845 - RNA, 16 nt, Human
ccaggaguuuggccag

SEQ ID NO: 3012846 - RNA, 17 nt, Human
ccaggaguuuggccaga

SEQ ID NO: 3012847 - RNA, 18 nt, Human
ccaggaguuuggccagaa

SEQ ID NO: 3012848 - RNA, 18 nt, Human
ccagucaccccggccacc

SEQ ID NO: 3012849 - RNA, 17 nt, Human
ccagucaccccggccac

SEQ ID NO: 3012850 - RNA, 16 nt, Human
ccagucaccccggcca

SEQ ID NO: 3012851 - RNA, 22 nt, Human
ccaguaucuugaagacuuuucu

SEQ ID NO: 3012852 - RNA, 19 nt, Human
ccaguaucuugaagacuuu

SEQ ID NO: 3012853 - RNA, 13 nt, Human
ccaguaucuugaa

SEQ ID NO: 3012854 - RNA, 22 nt, Human
ccaggggugggacacccuguga

SEQ ID NO: 3012855 - RNA, 21 nt, Human
ccaggggugggacacccugug

SEQ ID NO: 3012856 - RNA, 20 nt, Human
ccaggggugggacacccugu

SEQ ID NO: 3012857 - RNA, 19 nt, Human
ccaggggugggacacccug

SEQ ID NO: 3012858 - RNA, 17 nt, Human
ccaggaaaggcuccagg

SEQ ID NO: 3012859 - RNA, 19 nt, Human
ccaggaaaggcuccaggag

SEQ ID NO: 3012860 - RNA, 18 nt, Human
ccaggaaaggcuccagga

SEQ ID NO: 3012861 - RNA, 20 nt, Human
ccaggaaaggcuccaggagc

SEQ ID NO: 3012862 - RNA, 21 nt, Human
ccagcgagcccugguggcagu

SEQ ID NO: 3012863 - RNA, 18 nt, Human
ccagccccuucugaccca

SEQ ID NO: 3012864 - RNA, 17 nt, Human
ccagccccuucugaccc

SEQ ID NO: 3012865 - RNA, 16 nt, Human
ccagccccuucugacc

SEQ ID NO: 3012866 - RNA, 15 nt, Human
ccagccccuucugac

SEQ ID NO: 3012867 - RNA, 18 nt, Human
ccagccccuggaugcagc

SEQ ID NO: 3012868 - RNA, 18 nt, Human
ccagccccauccucugua

SEQ ID NO: 3012869 - RNA, 23 nt, Human
ccagccccauccucuguacagag

SEQ ID NO: 3012870 - RNA, 13 nt, Human
ccagcagccugga

SEQ ID NO: 3012871 - RNA, 15 nt, Human
ccagccccuggaugc

SEQ ID NO: 3012872 - RNA, 14 nt, Human
ccagccccuggaug

SEQ ID NO: 3012873 - RNA, 13 nt, Human
ccagccccuggau

SEQ ID NO: 3012874 - RNA, 12 nt, Human
ccagcagaaaug

SEQ ID NO: 3012875 - RNA, 12 nt, Human
ccagcagccugg

SEQ ID NO: 3012876 - RNA, 11 nt, Human
ccagcagccug

SEQ ID NO: 3012877 - RNA, 16 nt, Human
ccagcagaaaugccuu

SEQ ID NO: 3012878 - RNA, 17 nt, Human
ccagcagaaaugccuua

SEQ ID NO: 3012879 - RNA, 22 nt, Human
ccagcagaaaugccuuacccuc

SEQ ID NO: 3012880 - RNA, 18 nt, Human
ccacuugagugucaagcu

SEQ ID NO: 3012881 - RNA, 19 nt, Human
ccacugcacuauagccuag

SEQ ID NO: 3012882 - RNA, 20 nt, Human
ccacugcacuauagccuagg

SEQ ID NO: 3012883 - RNA, 13 nt, Human
ccacugcaccggg

SEQ ID NO: 3012884 - RNA, 14 nt, Human
ccacugcaccgggc

SEQ ID NO: 3012885 - RNA, 17 nt, Human
ccacugcaccgggccac

SEQ ID NO: 3012886 - RNA, 19 nt, Human
ccacugcaccgggccacag

SEQ ID NO: 3012887 - RNA, 17 nt, Human
ccagacccggcugcgug

SEQ ID NO: 3012888 - RNA, 16 nt, Human
ccagacccggcugcgu

SEQ ID NO: 3012889 - RNA, 14 nt, Human
ccacuuuuguucuu

SEQ ID NO: 3012890 - RNA, 15 nt, Human
ccacuuuuguucuug

SEQ ID NO: 3012891 - RNA, 21 nt, Human
ccacuuuuguucuugguuugu

SEQ ID NO: 3012892 - RNA, 13 nt, Human
ccacuuucuagcc

SEQ ID NO: 3012893 - RNA, 19 nt, Human
ccacuuucuagccagagga

SEQ ID NO: 3012894 - RNA, 18 nt, Human
ccacuuucuagccagagg

SEQ ID NO: 3012895 - RNA, 20 nt, Human
ccacuuucuagccagaggag

SEQ ID NO: 3012896 - RNA, 13 nt, Human
ccagaugcaccag

SEQ ID NO: 3012897 - RNA, 14 nt, Human
ccagaugcaccagc

SEQ ID NO: 3012898 - RNA, 18 nt, Human
ccagagacacaagccuuc

SEQ ID NO: 3012899 - RNA, 16 nt, Human
ccagagacacaagccu

SEQ ID NO: 3012900 - RNA, 14 nt, Human
cccauucuuggccc

SEQ ID NO: 3012901 - RNA, 23 nt, Human
cccauucugccugcccaggcccc

SEQ ID NO: 3012902 - RNA, 12 nt, Human
ccccagccccaa

SEQ ID NO: 3012903 - RNA, 10 nt, Human
ccccagcccc

SEQ ID NO: 3012904 - RNA, 21 nt, Human
ccccauucugccugcccaggc

SEQ ID NO: 3012905 - RNA, 14 nt, Human
ccccagccccaaaa

SEQ ID NO: 3012906 - RNA, 14 nt, Human
ccccagccccaucc

SEQ ID NO: 3012907 - RNA, 20 nt, Human
ccccaaaacucuccucugcu

SEQ ID NO: 3012908 - RNA, 18 nt, Human
ccccaaaacucuccucug

SEQ ID NO: 3012909 - RNA, 13 nt, Human
ccccggccaccug

SEQ ID NO: 3012910 - RNA, 18 nt, Human
ccccggccaccugcggug

SEQ ID NO: 3012911 - RNA, 14 nt, Human
ccccggccaccugc

SEQ ID NO: 3012912 - RNA, 14 nt, Human
ccccgcccaggcuu

SEQ ID NO: 3012913 - RNA, 12 nt, Human
ccccgcccaggc

SEQ ID NO: 3012914 - RNA, 14 nt, Human
cccccuuccaugga

SEQ ID NO: 3012915 - RNA, 17 nt, Human
cccagcccacuucugcc

SEQ ID NO: 3012916 - RNA, 19 nt, Human
cccagcccacuucugccau

SEQ ID NO: 3012917 - RNA, 23 nt, Human
cccagccccaaaacucuccucug

SEQ ID NO: 3012918 - RNA, 21 nt, Human
cccagccccaaaacucuccuc

SEQ ID NO: 3012919 - RNA, 19 nt, Human
cccaggcuggcgugcagug

SEQ ID NO: 3012920 - RNA, 20 nt, Human
cccaggcuggcgugcagugg

SEQ ID NO: 3012921 - RNA, 18 nt, Human
cccaggcuggcgugcagu

SEQ ID NO: 3012922 - RNA, 14 nt, Human
cccauccucuguac

SEQ ID NO: 3012923 - RNA, 19 nt, Human
cccauccucuguacagagc

SEQ ID NO: 3012924 - RNA, 15 nt, Human
cccauccucuguaca

SEQ ID NO: 3012925 - RNA, 20 nt, Human
cccauccucuguacagagcc

SEQ ID NO: 3012926 - RNA, 18 nt, Human
cccaccaucaugucuggc

SEQ ID NO: 3012927 - RNA, 15 nt, Human
cccacccaagggccu

SEQ ID NO: 3012928 - RNA, 15 nt, Human
cccaagcucugcucc

SEQ ID NO: 3012929 - RNA, 17 nt, Human
cccaagcucugcuccuc

SEQ ID NO: 3012930 - RNA, 18 nt, Human
cccaccgcagacaggacc

SEQ ID NO: 3012931 - RNA, 15 nt, Human
cccaccgcagacagg

SEQ ID NO: 3012932 - RNA, 17 nt, Human
ccaugggccuccugugu

SEQ ID NO: 3012933 - RNA, 18 nt, Human
ccaugaggaacaaggcaa

SEQ ID NO: 3012934 - RNA, 17 nt, Human
ccaugaggaacaaggca

SEQ ID NO: 3012935 - RNA, 16 nt, Human
ccaugaggaacaaggc

SEQ ID NO: 3012936 - RNA, 13 nt, Human
ccucaugcugcca

SEQ ID NO: 3012937 - RNA, 15 nt, Human
ccucaugcugccaau

SEQ ID NO: 3012938 - RNA, 11 nt, Human
ccucaggcagg

SEQ ID NO: 3012939 - RNA, 21 nt, Human
ccucccaacucaccccagccc

SEQ ID NO: 3012940 - RNA, 20 nt, Human
ccucccaacucaccccagcc

SEQ ID NO: 3012941 - RNA, 17 nt, Human
ccucccaacucacccca

SEQ ID NO: 3012942 - RNA, 16 nt, Human
ccucaugcugccaaua

SEQ ID NO: 3012943 - RNA, 16 nt, Human
ccucgaacuggcugca

SEQ ID NO: 3012944 - RNA, 15 nt, Human
ccucgaacuggcugc

SEQ ID NO: 3012945 - RNA, 18 nt, Human
ccuccuuugugaggaagc

SEQ ID NO: 3012946 - RNA, 20 nt, Human
ccuccuuugugaggaagccg

SEQ ID NO: 3012947 - RNA, 19 nt, Human
ccuccuuugugaggaagcc

SEQ ID NO: 3012948 - RNA, 20 nt, Human
ccucugccucugacacacag

SEQ ID NO: 3012949 - RNA, 21 nt, Human
ccucugccucugacacacagc

SEQ ID NO: 3012950 - RNA, 23 nt, Human
ccucugccucugacacacagcuc

SEQ ID NO: 3012951 - RNA, 11 nt, Human
ccucugccuga

SEQ ID NO: 3012952 - RNA, 20 nt, Human
ccucugccugaagucacaca

SEQ ID NO: 3012953 - RNA, 12 nt, Human
ccugaggggccu

SEQ ID NO: 3012954 - RNA, 16 nt, Human
ccugaggggccucuua

SEQ ID NO: 3012955 - RNA, 21 nt, Human
ccugaggcugggcucccuucc

SEQ ID NO: 3012956 - RNA, 19 nt, Human
ccugaggcugggcucccuu

SEQ ID NO: 3012957 - RNA, 17 nt, Human
ccugaggcugggcuccc

SEQ ID NO: 3012958 - RNA, 16 nt, Human
ccugaggcugggcucc

SEQ ID NO: 3012959 - RNA, 17 nt, Human
ccugcaggcagccaggc

SEQ ID NO: 3012960 - RNA, 16 nt, Human
ccugcaggcagccagg

SEQ ID NO: 3012961 - RNA, 12 nt, Human
ccugcagagggc

SEQ ID NO: 3012962 - RNA, 15 nt, Human
ccugcaggcagccag

SEQ ID NO: 3012963 - RNA, 21 nt, Human
ccugcaggcagccaggccaca

SEQ ID NO: 3012964 - RNA, 20 nt, Human
ccugcaggcagccaggccac

SEQ ID NO: 3012965 - RNA, 19 nt, Human
ccugcaggcagccaggcca

SEQ ID NO: 3012966 - RNA, 18 nt, Human
ccugcaggcagccaggcc

SEQ ID NO: 3012967 - RNA, 23 nt, Human
ccugcaggcagccaggccacaag

SEQ ID NO: 3012968 - RNA, 19 nt, Human
ccucuuuggucuacacugu

SEQ ID NO: 3012969 - RNA, 16 nt, Human
ccucuuugagugaagc

SEQ ID NO: 3012970 - RNA, 21 nt, Human
ccugcugcaguugccagucac

SEQ ID NO: 3012971 - RNA, 22 nt, Human
ccugcugcaguugccagucacc

SEQ ID NO: 3012972 - RNA, 11 nt, Human
ccugcugcagu

SEQ ID NO: 3012973 - RNA, 16 nt, Human
ccugcugcaguugcca

SEQ ID NO: 3012974 - RNA, 12 nt, Human
ccugcugcaguu

SEQ ID NO: 3012975 - RNA, 15 nt, Human
ccugccucuucucua

SEQ ID NO: 3012976 - RNA, 20 nt, Human
ccugccuccuuugugaggaa

SEQ ID NO: 3012977 - RNA, 19 nt, Human
ccugccuccuuugugagga

SEQ ID NO: 3012978 - RNA, 15 nt, Human
ccugccuccuuugug

SEQ ID NO: 3012979 - RNA, 13 nt, Human
ccugccuccuuug

SEQ ID NO: 3012980 - RNA, 22 nt, Human
ccugccuccuuugugaggaagc

SEQ ID NO: 3012981 - RNA, 21 nt, Human
ccugccuccuuugugaggaag

SEQ ID NO: 3012982 - RNA, 23 nt, Human
ccugccuccuuugugaggaagcc

SEQ ID NO: 3012983 - RNA, 16 nt, Human
cccugaaagcccugag

SEQ ID NO: 3012984 - RNA, 12 nt, Human
cccugaaggccc

SEQ ID NO: 3012985 - RNA, 19 nt, Human
cccugaaggccccgcccag

SEQ ID NO: 3012986 - RNA, 16 nt, Human
cccugaaggccccgcc

SEQ ID NO: 3012987 - RNA, 14 nt, Human
cccugaaggccccg

SEQ ID NO: 3012988 - RNA, 13 nt, Human
cccugaaggcccc

SEQ ID NO: 3012989 - RNA, 14 nt, Human
cccugacaacacuc

SEQ ID NO: 3012990 - RNA, 22 nt, Human
cccugaaggccccgcccaggcu

SEQ ID NO: 3012991 - RNA, 20 nt, Human
cccugaaggccccgcccagg

SEQ ID NO: 3012992 - RNA, 22 nt, Human
cccugacaacacucauugaccu

SEQ ID NO: 3012993 - RNA, 16 nt, Human
cccugacaacacucau

SEQ ID NO: 3012994 - RNA, 18 nt, Human
cccugaaagcccugagcu

SEQ ID NO: 3012995 - RNA, 13 nt, Human
cccuggaugcagc

SEQ ID NO: 3012996 - RNA, 21 nt, Human
cccuggaugcagccucacagu

SEQ ID NO: 3012997 - RNA, 17 nt, Human
cccuggaugcagccuca

SEQ ID NO: 3012998 - RNA, 22 nt, Human
cccugcccaccuggccucugca

SEQ ID NO: 3012999 - RNA, 14 nt, Human
cccugcccggcugc

SEQ ID NO: 3013000 - RNA, 17 nt, Human
cccugcccggcugcgga

SEQ ID NO: 3013001 - RNA, 20 nt, Human
cccugcccaccuggccucug

SEQ ID NO: 3013002 - RNA, 16 nt, Human
cccugagcuuucugcu

SEQ ID NO: 3013003 - RNA, 15 nt, Human
cccuuccucuuucca

SEQ ID NO: 3013004 - RNA, 19 nt, Human
ccgaaagggacuuggaagc

SEQ ID NO: 3013005 - RNA, 17 nt, Human
ccgaaaacguggcugcu

SEQ ID NO: 3013006 - RNA, 16 nt, Human
ccgaaaacguggcugc

SEQ ID NO: 3013007 - RNA, 16 nt, Human
ccgaauagcugggacu

SEQ ID NO: 3013008 - RNA, 15 nt, Human
ccgcagacaggacca

SEQ ID NO: 3013009 - RNA, 13 nt, Human
ccgaccagacacc

SEQ ID NO: 3013010 - RNA, 17 nt, Human
ccgaccagacaccuuga

SEQ ID NO: 3013011 - RNA, 12 nt, Human
ccgcccaggcuu

SEQ ID NO: 3013012 - RNA, 17 nt, Human
ccgcagacaggaccagg

SEQ ID NO: 3013013 - RNA, 16 nt, Human
ccgcagacaggaccag

SEQ ID NO: 3013014 - RNA, 23 nt, Human
cccugugauggggcccugccucc

SEQ ID NO: 3013015 - RNA, 22 nt, Human
cccugugauggggcccugccuc

SEQ ID NO: 3013016 - RNA, 21 nt, Human
cccugugauggggcccugccu

SEQ ID NO: 3013017 - RNA, 18 nt, Human
ccggcaggguccuagaaa

SEQ ID NO: 3013018 - RNA, 15 nt, Human
ccggccccugcuggu

SEQ ID NO: 3013019 - RNA, 16 nt, Human
ccggccaccugcggug

SEQ ID NO: 3013020 - RNA, 19 nt, Human
ccuagcauacguacacauu

SEQ ID NO: 3013021 - RNA, 17 nt, Human
ccuagcacuuugggagg

SEQ ID NO: 3013022 - RNA, 20 nt, Human
ccuagccugugccucuggga

SEQ ID NO: 3013023 - RNA, 14 nt, Human
ccuaaucuucugaa

SEQ ID NO: 3013024 - RNA, 12 nt, Human
ccggcuccaggc

SEQ ID NO: 3013025 - RNA, 13 nt, Human
ccggcuccaggcu

SEQ ID NO: 3013026 - RNA, 14 nt, Human
ccggcuccaggcuc

SEQ ID NO: 3013027 - RNA, 15 nt, Human
ccggcuccaggcucc

SEQ ID NO: 3013028 - RNA, 15 nt, Human
ccgucuaccugaggg

SEQ ID NO: 3013029 - RNA, 14 nt, Human
ccgucuaccugagg

SEQ ID NO: 3013030 - RNA, 16 nt, Human
ccgugaggccagagac

SEQ ID NO: 3013031 - RNA, 14 nt, Human
ccgugaggccagag

SEQ ID NO: 3013032 - RNA, 13 nt, Human
ccgugaggccaga

SEQ ID NO: 3013033 - RNA, 12 nt, Human
ccgugaggccag

SEQ ID NO: 3013034 - RNA, 17 nt, Human
ccgucuaccugaggggc

SEQ ID NO: 3013035 - RNA, 13 nt, Human
ccuuucccuuggu

SEQ ID NO: 3013036 - RNA, 17 nt, Human
ccuuucaauaggaaaaa

SEQ ID NO: 3013037 - RNA, 15 nt, Human
ccuuucaauaggaaa

SEQ ID NO: 3013038 - RNA, 22 nt, Human
ccuucuguccuacucuguguca

SEQ ID NO: 3013039 - RNA, 20 nt, Human
ccuucuguccuacucugugu

SEQ ID NO: 3013040 - RNA, 21 nt, Human
ccuucuguccuacucuguguc

SEQ ID NO: 3013041 - RNA, 23 nt, Human
ccuucucuccagccccuggaugc

SEQ ID NO: 3013042 - RNA, 21 nt, Human
ccuucucuccagccccuggau

SEQ ID NO: 3013043 - RNA, 14 nt, Human
ccuucucugaagga

SEQ ID NO: 3013044 - RNA, 16 nt, Human
ccuucucugaaggaca

SEQ ID NO: 3013045 - RNA, 20 nt, Human
ccuucucuccagccccugga

SEQ ID NO: 3013046 - RNA, 13 nt, Human
ccuguucagcucc

SEQ ID NO: 3013047 - RNA, 18 nt, Human
ccuguucccaugagauga

SEQ ID NO: 3013048 - RNA, 17 nt, Human
ccuguucuggcagaguu

SEQ ID NO: 3013049 - RNA, 12 nt, Human
ccuguucuggca

SEQ ID NO: 3013050 - RNA, 23 nt, Human
ccuguucagcuccagcucaccag

SEQ ID NO: 3013051 - RNA, 20 nt, Human
ccuguucagcuccagcucac

SEQ ID NO: 3013052 - RNA, 21 nt, Human
ccuguucagcuccagcucacc

SEQ ID NO: 3013053 - RNA, 14 nt, Human
ccuguucagcucca

SEQ ID NO: 3013054 - RNA, 15 nt, Human
ccuguucagcuccag

SEQ ID NO: 3013055 - RNA, 16 nt, Human
ccuguucagcuccagc

SEQ ID NO: 3013056 - RNA, 19 nt, Human
ccuguucagcuccagcuca

SEQ ID NO: 3013057 - RNA, 16 nt, Human
ccuguugggccaggag

SEQ ID NO: 3013058 - RNA, 20 nt, Human
ccuguugggccaggagccuc

SEQ ID NO: 3013059 - RNA, 19 nt, Human
ccuguugggccaggagccu

SEQ ID NO: 3013060 - RNA, 18 nt, Human
ccuguugggccaggagcc

SEQ ID NO: 3013061 - RNA, 17 nt, Human
ccuguugggccaggagc

SEQ ID NO: 3013062 - RNA, 16 nt, Human
ccuuagcaaauucugu

SEQ ID NO: 3013063 - RNA, 19 nt, Human
ccuuagcagggaaacagcu

SEQ ID NO: 3013064 - RNA, 20 nt, Human
ccuuagcagggaaacagcua

SEQ ID NO: 3013065 - RNA, 12 nt, Human
ccuucccaccuc

SEQ ID NO: 3013066 - RNA, 19 nt, Human
ccuucccaccucucucacu

SEQ ID NO: 3013067 - RNA, 14 nt, Human
ccuucccaccucuc

SEQ ID NO: 3013068 - RNA, 18 nt, Human
ccuuauggaacacucuga

SEQ ID NO: 3013069 - RNA, 17 nt, Human
ccuuauggaacacucug

SEQ ID NO: 3013070 - RNA, 16 nt, Human
ccuuauggaacacucu

SEQ ID NO: 3013071 - RNA, 14 nt, Human
ccuuauggaacacu

SEQ ID NO: 3013072 - RNA, 20 nt, Human
ccuuauggaacacucugaga

SEQ ID NO: 3013073 - RNA, 19 nt, Human
ccuuauggaacacucugag

SEQ ID NO: 3013074 - RNA, 22 nt, Human
ccuuauggaacacucugagacu

SEQ ID NO: 3013075 - RNA, 12 nt, Human
ccuuauggaaca

SEQ ID NO: 3013076 - RNA, 13 nt, Human
cuaacuuggguua

SEQ ID NO: 3013077 - RNA, 22 nt, Human
cuaacuugucuuuggacccuga

SEQ ID NO: 3013078 - RNA, 14 nt, Human
cuaacuugucuuug

SEQ ID NO: 3013079 - RNA, 15 nt, Human
cguguuaugacucca

SEQ ID NO: 3013080 - RNA, 19 nt, Human
cguguuaugacuccagaau

SEQ ID NO: 3013081 - RNA, 18 nt, Human
cgugaguccuggcauggg

SEQ ID NO: 3013082 - RNA, 19 nt, Human
cgugaguccuggcauggga

SEQ ID NO: 3013083 - RNA, 11 nt, Human
cuaaagcugcc

SEQ ID NO: 3013084 - RNA, 22 nt, Human
cgugagccacugcaccgggcca

SEQ ID NO: 3013085 - RNA, 14 nt, Human
cgugaggccagaga

SEQ ID NO: 3013086 - RNA, 14 nt, Human
cgugagccacugca

SEQ ID NO: 3013087 - RNA, 15 nt, Human
cgugagccacugcac

SEQ ID NO: 3013088 - RNA, 20 nt, Human
cgugagccacugcaccgggc

SEQ ID NO: 3013089 - RNA, 14 nt, Human
cgugacaacacuug

SEQ ID NO: 3013090 - RNA, 15 nt, Human
cgugacaacacuugu

SEQ ID NO: 3013091 - RNA, 12 nt, Human
cgugacaacacu

SEQ ID NO: 3013092 - RNA, 19 nt, Human
cuaauaaaaaggugaccau

SEQ ID NO: 3013093 - RNA, 14 nt, Human
cuaaguuuuuaugg

SEQ ID NO: 3013094 - RNA, 19 nt, Human
cuacaaaaagcauaaaaau

SEQ ID NO: 3013095 - RNA, 20 nt, Human
cgcugccccuggcagccccu

SEQ ID NO: 3013096 - RNA, 19 nt, Human
cgcugccccuggcagcccc

SEQ ID NO: 3013097 - RNA, 17 nt, Human
cgcuggagugcagugag

SEQ ID NO: 3013098 - RNA, 18 nt, Human
cgcuggagugcagugagc

SEQ ID NO: 3013099 - RNA, 23 nt, Human
cgccaaggcugggggaagaagcu

SEQ ID NO: 3013100 - RNA, 23 nt, Human
cggagucccaccuuggcugcagg

SEQ ID NO: 3013101 - RNA, 21 nt, Human
cggagucccaccuuggcugca

SEQ ID NO: 3013102 - RNA, 22 nt, Human
cggagucccaccuuggcugcag

SEQ ID NO: 3013103 - RNA, 20 nt, Human
cggagacggagucccaccuu

SEQ ID NO: 3013104 - RNA, 17 nt, Human
cggagacggagucccac

SEQ ID NO: 3013105 - RNA, 17 nt, Human
cgggccacagagaaagu

SEQ ID NO: 3013106 - RNA, 19 nt, Human
cgggcucagcaaaagaugc

SEQ ID NO: 3013107 - RNA, 12 nt, Human
cgggcucugccu

SEQ ID NO: 3013108 - RNA, 22 nt, Human
cguacacauuuuauuuuauuau

SEQ ID NO: 3013109 - RNA, 16 nt, Human
cguacacauuuuauuu

SEQ ID NO: 3013110 - RNA, 20 nt, Human
cgguggcucacgccuguaau

SEQ ID NO: 3013111 - RNA, 13 nt, Human
cuauguuaauauu

SEQ ID NO: 3013112 - RNA, 15 nt, Human
cuauguuaauauuuu

SEQ ID NO: 3013113 - RNA, 17 nt, Human
cuauguuaauauuuuag

SEQ ID NO: 3013114 - RNA, 14 nt, Human
cuauguuaauauuu

SEQ ID NO: 3013115 - RNA, 21 nt, Human
cuauguuaauauuuuaggugu

SEQ ID NO: 3013116 - RNA, 18 nt, Human
cuauguugcccaggcagg

SEQ ID NO: 3013117 - RNA, 19 nt, Human
cuauguugcccaggcaggu

SEQ ID NO: 3013118 - RNA, 21 nt, Human
cuauguugcccaggcaggucu

SEQ ID NO: 3013119 - RNA, 22 nt, Human
cuauguugcccaggcaggucuu

SEQ ID NO: 3013120 - RNA, 14 nt, Human
cuaugugagaccau

SEQ ID NO: 3013121 - RNA, 14 nt, Human
cuaucucccccagc

SEQ ID NO: 3013122 - RNA, 13 nt, Human
cuaucucccccag

SEQ ID NO: 3013123 - RNA, 17 nt, Human
cuaucacugguuugguu

SEQ ID NO: 3013124 - RNA, 12 nt, Human
cuauguuuuugu

SEQ ID NO: 3013125 - RNA, 21 nt, Human
cucaagugauucuccugccuc

SEQ ID NO: 3013126 - RNA, 23 nt, Human
cucaauuauuuugcauuuuuucu

SEQ ID NO: 3013127 - RNA, 18 nt, Human
cucaguagucagacugga

SEQ ID NO: 3013128 - RNA, 23 nt, Human
cucaggugucccugcacuugcag

SEQ ID NO: 3013129 - RNA, 22 nt, Human
cucagucuggcccuuccuuuuc

SEQ ID NO: 3013130 - RNA, 15 nt, Human
cucaguccauagcag

SEQ ID NO: 3013131 - RNA, 17 nt, Human
cucaguccauagcagag

SEQ ID NO: 3013132 - RNA, 20 nt, Human
cucagucuggcccuuccuuu

SEQ ID NO: 3013133 - RNA, 15 nt, Human
cucaggccagcugcu

SEQ ID NO: 3013134 - RNA, 21 nt, Human
cucaggccaaacucaccugcc

SEQ ID NO: 3013135 - RNA, 20 nt, Human
cucaggccaaacucaccugc

SEQ ID NO: 3013136 - RNA, 19 nt, Human
cucaggccaaacucaccug

SEQ ID NO: 3013137 - RNA, 11 nt, Human
cucaggccugg

SEQ ID NO: 3013138 - RNA, 22 nt, Human
cucaggccugggggcugggcag

SEQ ID NO: 3013139 - RNA, 18 nt, Human
cucaggccagcugcuugg

SEQ ID NO: 3013140 - RNA, 17 nt, Human
cucaggccagcugcuug

SEQ ID NO: 3013141 - RNA, 16 nt, Human
cucaggccagcugcuu

SEQ ID NO: 3013142 - RNA, 13 nt, Human
cucagaagacacu

SEQ ID NO: 3013143 - RNA, 15 nt, Human
cucagaagacacuga

SEQ ID NO: 3013144 - RNA, 17 nt, Human
cucagaagacacugaug

SEQ ID NO: 3013145 - RNA, 20 nt, Human
cucagaagacacugaugggc

SEQ ID NO: 3013146 - RNA, 22 nt, Human
cucagaagacacugaugggcaa

SEQ ID NO: 3013147 - RNA, 17 nt, Human
cucaccuuucccaucuu

SEQ ID NO: 3013148 - RNA, 23 nt, Human
cucagaagacacugaugggcaac

SEQ ID NO: 3013149 - RNA, 19 nt, Human
cucagccucccgaauagcu

SEQ ID NO: 3013150 - RNA, 21 nt, Human
cucagccucccgaauagcugg

SEQ ID NO: 3013151 - RNA, 22 nt, Human
cucagccucccgaauagcuggg

SEQ ID NO: 3013152 - RNA, 16 nt, Human
cucucuguaauaaacu

SEQ ID NO: 3013153 - RNA, 21 nt, Human
cucucuguaauaaacucauuu

SEQ ID NO: 3013154 - RNA, 12 nt, Human
cucuccuccaga

SEQ ID NO: 3013155 - RNA, 15 nt, Human
cucuccuccagaguc

SEQ ID NO: 3013156 - RNA, 13 nt, Human
cucuccuccagag

SEQ ID NO: 3013157 - RNA, 16 nt, Human
cucuccuccagaguca

SEQ ID NO: 3013158 - RNA, 18 nt, Human
cuccuuugugaggaagcc

SEQ ID NO: 3013159 - RNA, 17 nt, Human
cuccuuugugaggaagc

SEQ ID NO: 3013160 - RNA, 17 nt, Human
cucgguguggagaagcg

SEQ ID NO: 3013161 - RNA, 16 nt, Human
cucgguguggagaagc

SEQ ID NO: 3013162 - RNA, 14 nt, Human
cucugcacuccccu

SEQ ID NO: 3013163 - RNA, 16 nt, Human
cucugcacuccccugc

SEQ ID NO: 3013164 - RNA, 15 nt, Human
cucugcacuccccug

SEQ ID NO: 3013165 - RNA, 19 nt, Human
cucugcacaagcugcaccc

SEQ ID NO: 3013166 - RNA, 21 nt, Human
cucugcacaagcugcacccuc

SEQ ID NO: 3013167 - RNA, 20 nt, Human
cucugcacaagcugcacccu

SEQ ID NO: 3013168 - RNA, 20 nt, Human
cucugcuccucuccccagca

SEQ ID NO: 3013169 - RNA, 21 nt, Human
cucugcuccucuccccagcaa

SEQ ID NO: 3013170 - RNA, 17 nt, Human
cucugcacuccccugcu

SEQ ID NO: 3013171 - RNA, 21 nt, Human
cucugcugacagacacaggcc

SEQ ID NO: 3013172 - RNA, 22 nt, Human
cucugcugacagacacaggccc

SEQ ID NO: 3013173 - RNA, 20 nt, Human
cucugcugacagacacaggc

SEQ ID NO: 3013174 - RNA, 13 nt, Human
cucugcugcuggc

SEQ ID NO: 3013175 - RNA, 23 nt, Human
cucugcugacagacacaggcccg

SEQ ID NO: 3013176 - RNA, 13 nt, Human
cucuguacagagc

SEQ ID NO: 3013177 - RNA, 15 nt, Human
cucuguacagagccc

SEQ ID NO: 3013178 - RNA, 14 nt, Human
cucuguacagagcc

SEQ ID NO: 3013179 - RNA, 16 nt, Human
cucugcugcuggcugg

SEQ ID NO: 3013180 - RNA, 15 nt, Human
cucugcugcuggcug

SEQ ID NO: 3013181 - RNA, 14 nt, Human
cucugcugcuggcu

SEQ ID NO: 3013182 - RNA, 16 nt, Human
cucuguacagagccca

SEQ ID NO: 3013183 - RNA, 23 nt, Human
cuccgcuuucuacccagcgagcc

SEQ ID NO: 3013184 - RNA, 16 nt, Human
cuccuguaccucuuga

SEQ ID NO: 3013185 - RNA, 15 nt, Human
cuccuuucaccacau

SEQ ID NO: 3013186 - RNA, 14 nt, Human
cuccuuguguuacu

SEQ ID NO: 3013187 - RNA, 19 nt, Human
cuccuggccucaagugauu

SEQ ID NO: 3013188 - RNA, 18 nt, Human
cuccugggcuaagugauc

SEQ ID NO: 3013189 - RNA, 19 nt, Human
cuccuggcccacugcaucg

SEQ ID NO: 3013190 - RNA, 14 nt, Human
cuccucugcugcug

SEQ ID NO: 3013191 - RNA, 13 nt, Human
cuccucugcugcu

SEQ ID NO: 3013192 - RNA, 23 nt, Human
cuccaggugcacaagcuccaagc

SEQ ID NO: 3013193 - RNA, 15 nt, Human
cuccaggcuccuuua

SEQ ID NO: 3013194 - RNA, 23 nt, Human
cuccaggcuccuuuagcgcccag

SEQ ID NO: 3013195 - RNA, 20 nt, Human
cuccaggcuguaucccauga

SEQ ID NO: 3013196 - RNA, 22 nt, Human
cuccaggugcacaagcuccaag

SEQ ID NO: 3013197 - RNA, 20 nt, Human
cucccucuuucccucccuuc

SEQ ID NO: 3013198 - RNA, 11 nt, Human
uuugcagagua

SEQ ID NO: 3013199 - RNA, 14 nt, Human
uuugcagacaggca

SEQ ID NO: 3013200 - RNA, 18 nt, Human
uuugccauguuggccagg

SEQ ID NO: 3013201 - RNA, 17 nt, Human
uuugaggucuguucuuu

SEQ ID NO: 3013202 - RNA, 22 nt, Human
uuugaggucuguucuuuccaaa

SEQ ID NO: 3013203 - RNA, 15 nt, Human
uuugagcagggcuca

SEQ ID NO: 3013204 - RNA, 21 nt, Human
uuuguccccaccgcagacagg

SEQ ID NO: 3013205 - RNA, 13 nt, Human
uuuguccccaccg

SEQ ID NO: 3013206 - RNA, 16 nt, Human
uuuguugucagcugaa

SEQ ID NO: 3013207 - RNA, 19 nt, Human
uuuggugguuucagaaaug

SEQ ID NO: 3013208 - RNA, 16 nt, Human
uuuguaaauuaacuuu

SEQ ID NO: 3013209 - RNA, 17 nt, Human
uuuguaaauuaacuuuu

SEQ ID NO: 3013210 - RNA, 15 nt, Human
uuuguaaauuaacuu

SEQ ID NO: 3013211 - RNA, 22 nt, Human
uuuguaaauuaacuuuuauaaa

SEQ ID NO: 3013212 - RNA, 19 nt, Human
uuuucaauaacuggaacac

SEQ ID NO: 3013213 - RNA, 16 nt, Human
uuuucaauaacuggaa

SEQ ID NO: 3013214 - RNA, 13 nt, Human
uuuucaauaacug

SEQ ID NO: 3013215 - RNA, 23 nt, Human
uuuucaauaacuggaacacucua

SEQ ID NO: 3013216 - RNA, 15 nt, Human
uuuucacaguucucu

SEQ ID NO: 3013217 - RNA, 19 nt, Human
uuuuccaugaguccccugu

SEQ ID NO: 3013218 - RNA, 18 nt, Human
uuuuccaugaguccccug

SEQ ID NO: 3013219 - RNA, 15 nt, Human
uuuuccuucagugcc

SEQ ID NO: 3013220 - RNA, 17 nt, Human
uuuucuugcaugaggcu

SEQ ID NO: 3013221 - RNA, 14 nt, Human
uuuucuucucccuc

SEQ ID NO: 3013222 - RNA, 13 nt, Human
uuuuauauagcaa

SEQ ID NO: 3013223 - RNA, 15 nt, Human
uuuuauauucucagc

SEQ ID NO: 3013224 - RNA, 22 nt, Human
uuuuaucagaacuauguuuuug

SEQ ID NO: 3013225 - RNA, 18 nt, Human
uuuuaucgucacugcuua

SEQ ID NO: 3013226 - RNA, 22 nt, Human
uuuauuuggaaaggaaugcaaa

SEQ ID NO: 3013227 - RNA, 19 nt, Human
uuucaauaggaaaaacuga

SEQ ID NO: 3013228 - RNA, 22 nt, Human
uuucaauaggaaaaacugauuu

SEQ ID NO: 3013229 - RNA, 20 nt, Human
uuucaauaggaaaaacugau

SEQ ID NO: 3013230 - RNA, 16 nt, Human
uuuauuuauuuauuca

SEQ ID NO: 3013231 - RNA, 13 nt, Human
uuuccaggaaggc

SEQ ID NO: 3013232 - RNA, 12 nt, Human
uuuccaaaguac

SEQ ID NO: 3013233 - RNA, 15 nt, Human
uuuccaaaguacacu

SEQ ID NO: 3013234 - RNA, 15 nt, Human
uuucagccaagaauu

SEQ ID NO: 3013235 - RNA, 22 nt, Human
uuucauugcugggcuugucugu

SEQ ID NO: 3013236 - RNA, 21 nt, Human
uuuccucuuuggucuacacug

SEQ ID NO: 3013237 - RNA, 14 nt, Human
uuucuaaaggcuac

SEQ ID NO: 3013238 - RNA, 17 nt, Human
uuucuaaagcugccagc

SEQ ID NO: 3013239 - RNA, 14 nt, Human
uuucuaaagcugcc

SEQ ID NO: 3013240 - RNA, 15 nt, Human
uuucuagccagagga

SEQ ID NO: 3013241 - RNA, 23 nt, Human
uuuacuuuuuggaaaagaauaaa

SEQ ID NO: 3013242 - RNA, 15 nt, Human
uuuacuuuuuggaaa

SEQ ID NO: 3013243 - RNA, 15 nt, Human
uuuacuuuguguuca

SEQ ID NO: 3013244 - RNA, 19 nt, Human
uuuauuuaguuccuugagu

SEQ ID NO: 3013245 - RNA, 16 nt, Human
uuuauugucaaagugg

SEQ ID NO: 3013246 - RNA, 14 nt, Human
uuuauugucaaagu

SEQ ID NO: 3013247 - RNA, 21 nt, Human
uuuaucgucacugcuuaacuu

SEQ ID NO: 3013248 - RNA, 16 nt, Human
uuuaucgucacugcuu

SEQ ID NO: 3013249 - RNA, 16 nt, Human
uuuauaaacuuuaccu

SEQ ID NO: 3013250 - RNA, 14 nt, Human
uuuauaaacuuuac

SEQ ID NO: 3013251 - RNA, 17 nt, Human
uuuuuuccuucagugcc

SEQ ID NO: 3013252 - RNA, 12 nt, Human
uuuuuuacuaau

SEQ ID NO: 3013253 - RNA, 19 nt, Human
uucuccagucauuauguua

SEQ ID NO: 3013254 - RNA, 17 nt, Human
uucuccagucauuaugu

SEQ ID NO: 3013255 - RNA, 11 nt, Human
uucuccaggcu

SEQ ID NO: 3013256 - RNA, 13 nt, Human
uucuccacccugc

SEQ ID NO: 3013257 - RNA, 16 nt, Human
uucuccaagcaggaca

SEQ ID NO: 3013258 - RNA, 18 nt, Human
uucucuccagccccugga

SEQ ID NO: 3013259 - RNA, 22 nt, Human
uucucuccuguaccucuugagc

SEQ ID NO: 3013260 - RNA, 21 nt, Human
uucugacccugcuucaaauau

SEQ ID NO: 3013261 - RNA, 21 nt, Human
uucugacccaugcugcccugu

SEQ ID NO: 3013262 - RNA, 20 nt, Human
uucugacccaugcugcccug

SEQ ID NO: 3013263 - RNA, 18 nt, Human
uucugacccaugcugccc

SEQ ID NO: 3013264 - RNA, 16 nt, Human
uucugacccaugcugc

SEQ ID NO: 3013265 - RNA, 14 nt, Human
uucuauuuauuugu

SEQ ID NO: 3013266 - RNA, 21 nt, Human
uucuauuuauuuauuuauuca

SEQ ID NO: 3013267 - RNA, 14 nt, Human
uucuauuguuucuu

SEQ ID NO: 3013268 - RNA, 16 nt, Human
uucuaugacacaugca

SEQ ID NO: 3013269 - RNA, 17 nt, Human
uucuaugacacaugcaa

SEQ ID NO: 3013270 - RNA, 15 nt, Human
uuccuucagugccuu

SEQ ID NO: 3013271 - RNA, 19 nt, Human
uuccuucagugccuuaugg

SEQ ID NO: 3013272 - RNA, 16 nt, Human
uuccuucagugccuua

SEQ ID NO: 3013273 - RNA, 23 nt, Human
uuccuucagugccuuauggaaca

SEQ ID NO: 3013274 - RNA, 19 nt, Human
uuccuucauucaacccacc

SEQ ID NO: 3013275 - RNA, 17 nt, Human
uucuaaaggcuaccuuu

SEQ ID NO: 3013276 - RNA, 18 nt, Human
uucuaaaggcuaccuuug

SEQ ID NO: 3013277 - RNA, 16 nt, Human
uucuaaaggcuaccuu

SEQ ID NO: 3013278 - RNA, 22 nt, Human
uuccccacuugagaauuacccu

SEQ ID NO: 3013279 - RNA, 19 nt, Human
uucccuuugacgccauccc

SEQ ID NO: 3013280 - RNA, 12 nt, Human
uuccucccuccc

SEQ ID NO: 3013281 - RNA, 19 nt, Human
uuccucccucccucuuucc

SEQ ID NO: 3013282 - RNA, 21 nt, Human
uuccucccucccucuuucccu

SEQ ID NO: 3013283 - RNA, 22 nt, Human
uuccucccucccucuuucccuc

SEQ ID NO: 3013284 - RNA, 23 nt, Human
uuccucauaguaugguggcuggg

SEQ ID NO: 3013285 - RNA, 18 nt, Human
uucaguuuaucuguucau

SEQ ID NO: 3013286 - RNA, 23 nt, Human
uucauaaugacuuaagcacacuu

SEQ ID NO: 3013287 - RNA, 13 nt, Human
uucauaaugacuu

SEQ ID NO: 3013288 - RNA, 15 nt, Human
uucaguuuaucuguu

SEQ ID NO: 3013289 - RNA, 21 nt, Human
uucagugccuuauggaacacu

SEQ ID NO: 3013290 - RNA, 19 nt, Human
uucagugccuuauggaaca

SEQ ID NO: 3013291 - RNA, 18 nt, Human
uucauuuaggugaggaag

SEQ ID NO: 3013292 - RNA, 19 nt, Human
uucauuuaggugaggaagc

SEQ ID NO: 3013293 - RNA, 12 nt, Human
uucaucuugaau

SEQ ID NO: 3013294 - RNA, 11 nt, Human
uucaucuugaa

SEQ ID NO: 3013295 - RNA, 20 nt, Human
uucaucuuccaacucaaacu

SEQ ID NO: 3013296 - RNA, 21 nt, Human
uuccacuugagugucaagcug

SEQ ID NO: 3013297 - RNA, 17 nt, Human
uuccacuugagugucaa

SEQ ID NO: 3013298 - RNA, 17 nt, Human
uuccaugaguccccugu

SEQ ID NO: 3013299 - RNA, 20 nt, Human
uucaaucuggauucauauuu

SEQ ID NO: 3013300 - RNA, 23 nt, Human
uucaaucuggauucauauuuaau

SEQ ID NO: 3013301 - RNA, 19 nt, Human
uucaaucuggauucauauu

SEQ ID NO: 3013302 - RNA, 18 nt, Human
uucaauucucauuuguca

SEQ ID NO: 3013303 - RNA, 20 nt, Human
uuacuaaaaguuuugagaaa

SEQ ID NO: 3013304 - RNA, 19 nt, Human
uuacuaaaaguuuugagaa

SEQ ID NO: 3013305 - RNA, 14 nt, Human
uuacgugaguccug

SEQ ID NO: 3013306 - RNA, 13 nt, Human
uuacgugaguccu

SEQ ID NO: 3013307 - RNA, 13 nt, Human
uucaaagauauuu

SEQ ID NO: 3013308 - RNA, 23 nt, Human
uucagcuccagcucaccagcccc

SEQ ID NO: 3013309 - RNA, 24 nt, Human
uucagcucugcaagaauugaagca

SEQ ID NO: 3013310 - RNA, 17 nt, Human
uucagcucugcaagaau

SEQ ID NO: 3013311 - RNA, 16 nt, Human
uucaggaagcucaggg

SEQ ID NO: 3013312 - RNA, 17 nt, Human
uucagcugacuuuucug

SEQ ID NO: 3013313 - RNA, 18 nt, Human
uucagcugcauacaguuu

SEQ ID NO: 3013314 - RNA, 19 nt, Human
uucaggaagcucagggccu

SEQ ID NO: 3013315 - RNA, 17 nt, Human
uucaggaagcucagggc

SEQ ID NO: 3013316 - RNA, 20 nt, Human
uucaggaagcucagggccug

SEQ ID NO: 3013317 - RNA, 15 nt, Human
uucaggaagcucagg

SEQ ID NO: 3013318 - RNA, 14 nt, Human
uucacucuccuugg

SEQ ID NO: 3013319 - RNA, 15 nt, Human
uucagagacuccugc

SEQ ID NO: 3013320 - RNA, 22 nt, Human
uucagcuccagcucaccagccc

SEQ ID NO: 3013321 - RNA, 12 nt, Human
uugacuauuuuu

SEQ ID NO: 3013322 - RNA, 20 nt, Human
uugacgccaucccagcccca

SEQ ID NO: 3013323 - RNA, 20 nt, Human
uugauagcacagacccugcc

SEQ ID NO: 3013324 - RNA, 19 nt, Human
uugauagcacagacccugc

SEQ ID NO: 3013325 - RNA, 22 nt, Human
uugaccugaggcccuucucucc

SEQ ID NO: 3013326 - RNA, 19 nt, Human
uugaccugaggcccuucuc

SEQ ID NO: 3013327 - RNA, 12 nt, Human
uugaccugaggc

SEQ ID NO: 3013328 - RNA, 22 nt, Human
uugacgccaucccagccccaau

SEQ ID NO: 3013329 - RNA, 14 nt, Human
uugacgccauccca

SEQ ID NO: 3013330 - RNA, 15 nt, Human
uugaccucaggugau

SEQ ID NO: 3013331 - RNA, 21 nt, Human
uugaccgugaggccagagaca

SEQ ID NO: 3013332 - RNA, 20 nt, Human
uugaccgugaggccagagac

SEQ ID NO: 3013333 - RNA, 16 nt, Human
uugcauacuauuaaac

SEQ ID NO: 3013334 - RNA, 18 nt, Human
uugcauacuauuaaacau

SEQ ID NO: 3013335 - RNA, 19 nt, Human
uugcauacuauuaaacaug

SEQ ID NO: 3013336 - RNA, 16 nt, Human
uugcagacaggcaagc

SEQ ID NO: 3013337 - RNA, 22 nt, Human
uugauugggcacaucauuucaa

SEQ ID NO: 3013338 - RNA, 21 nt, Human
uugauagcacagacccugccc

SEQ ID NO: 3013339 - RNA, 18 nt, Human
uugauagcacagacccug

SEQ ID NO: 3013340 - RNA, 14 nt, Human
uugcaacaggcugg

SEQ ID NO: 3013341 - RNA, 17 nt, Human
uugcaacaggcugggcu

SEQ ID NO: 3013342 - RNA, 18 nt, Human
uugauuuccguuaaaaua

SEQ ID NO: 3013343 - RNA, 14 nt, Human
uugaaacuuuaaga

SEQ ID NO: 3013344 - RNA, 18 nt, Human
uucuuuauaauucuacuu

SEQ ID NO: 3013345 - RNA, 21 nt, Human
uugaaaacacuguucucugcc

SEQ ID NO: 3013346 - RNA, 19 nt, Human
uugaaaacacuguucucug

SEQ ID NO: 3013347 - RNA, 22 nt, Human
uugaacuuugaccucugcagca

SEQ ID NO: 3013348 - RNA, 20 nt, Human
uugaacuuugaccucugcag

SEQ ID NO: 3013349 - RNA, 16 nt, Human
uugaacugauaaagau

SEQ ID NO: 3013350 - RNA, 19 nt, Human
uugaacucuucaaucucuu

SEQ ID NO: 3013351 - RNA, 19 nt, Human
uugaagacuuuucuuucag

SEQ ID NO: 3013352 - RNA, 17 nt, Human
uugaagacagagcuaca

SEQ ID NO: 3013353 - RNA, 17 nt, Human
uucuguccuacucugug

SEQ ID NO: 3013354 - RNA, 23 nt, Human
uucuguggguuucuaaagcugcc

SEQ ID NO: 3013355 - RNA, 21 nt, Human
uucuguccgagcuuugaaaau

SEQ ID NO: 3013356 - RNA, 17 nt, Human
uucuguccgagcuuuga

SEQ ID NO: 3013357 - RNA, 19 nt, Human
uucuuauuuaaugaaagac

SEQ ID NO: 3013358 - RNA, 23 nt, Human
uucuuauuuaaugaaagacugua

SEQ ID NO: 3013359 - RNA, 13 nt, Human
uucuugguuugua

SEQ ID NO: 3013360 - RNA, 16 nt, Human
uucuugguuuguaaau

SEQ ID NO: 3013361 - RNA, 23 nt, Human
uucuugguuuguaaauuaacuuu

SEQ ID NO: 3013362 - RNA, 17 nt, Human
uucuugguuuguaaauu

SEQ ID NO: 3013363 - RNA, 18 nt, Human
uucuugguuuguaaauua

SEQ ID NO: 3013364 - RNA, 21 nt, Human
uuggaaaggaaugcaaagaug

SEQ ID NO: 3013365 - RNA, 23 nt, Human
uuggaaagaguaggaagacuuug

SEQ ID NO: 3013366 - RNA, 20 nt, Human
uugcuggggccgaaagaaca

SEQ ID NO: 3013367 - RNA, 15 nt, Human
uuggacauuuuaugu

SEQ ID NO: 3013368 - RNA, 16 nt, Human
uuggacauuuuauguc

SEQ ID NO: 3013369 - RNA, 17 nt, Human
uuggacauuuuaugucu

SEQ ID NO: 3013370 - RNA, 18 nt, Human
uuggacauuuuaugucuu

SEQ ID NO: 3013371 - RNA, 20 nt, Human
uuggacauuuuaugucuuuc

SEQ ID NO: 3013372 - RNA, 19 nt, Human
uuggaaggaacguccccug

SEQ ID NO: 3013373 - RNA, 11 nt, Human
uuggaaggaac

SEQ ID NO: 3013374 - RNA, 14 nt, Human
uuggauuguccccg

SEQ ID NO: 3013375 - RNA, 17 nt, Human
uuggcaaaaaggcagga

SEQ ID NO: 3013376 - RNA, 13 nt, Human
uugcuaacagcaa

SEQ ID NO: 3013377 - RNA, 19 nt, Human
uugcugauggugcaaugac

SEQ ID NO: 3013378 - RNA, 20 nt, Human
uugcugauggugcaaugacc

SEQ ID NO: 3013379 - RNA, 22 nt, Human
uugcugauggugcaaugaccuu

SEQ ID NO: 3013380 - RNA, 23 nt, Human
uugcccacgcuggagugcaguga

SEQ ID NO: 3013381 - RNA, 13 nt, Human
uugccagucaccc

SEQ ID NO: 3013382 - RNA, 18 nt, Human
uugccagucaccccggcc

SEQ ID NO: 3013383 - RNA, 11 nt, Human
uugccucugcc

SEQ ID NO: 3013384 - RNA, 14 nt, Human
uugccucugccucu

SEQ ID NO: 3013385 - RNA, 16 nt, Human
uugccucugccucuga

SEQ ID NO: 3013386 - RNA, 18 nt, Human
uugccucugccucugaca

SEQ ID NO: 3013387 - RNA, 20 nt, Human
uuguacacucauucauuacu

SEQ ID NO: 3013388 - RNA, 13 nt, Human
uuguacagacaac

SEQ ID NO: 3013389 - RNA, 12 nt, Human
uuguacagacaa

SEQ ID NO: 3013390 - RNA, 16 nt, Human
uuggucccccuuccau

SEQ ID NO: 3013391 - RNA, 22 nt, Human
uuggucccccuuccauggacuu

SEQ ID NO: 3013392 - RNA, 12 nt, Human
uugguccugcug

SEQ ID NO: 3013393 - RNA, 14 nt, Human
uuguagagccaggg

SEQ ID NO: 3013394 - RNA, 15 nt, Human
uuguagagccagggu

SEQ ID NO: 3013395 - RNA, 21 nt, Human
uuguauucucuccuguaccuc

SEQ ID NO: 3013396 - RNA, 20 nt, Human
uuggccagaagucaaggcuu

SEQ ID NO: 3013397 - RNA, 16 nt, Human
uuggcugcugaaggcu

SEQ ID NO: 3013398 - RNA, 18 nt, Human
uuggcugggggccucagu

SEQ ID NO: 3013399 - RNA, 21 nt, Human
uuggcugggggccucagugcc

SEQ ID NO: 3013400 - RNA, 22 nt, Human
uuggcugggggccucagugcca

SEQ ID NO: 3013401 - RNA, 13 nt, Human
uuggcauucccca

SEQ ID NO: 3013402 - RNA, 14 nt, Human
uuggccaggcuggu

SEQ ID NO: 3013403 - RNA, 24 nt, Human
uuggccaaagccaaagcuaggccu

SEQ ID NO: 3013404 - RNA, 12 nt, Human
uuggguuuauuu

SEQ ID NO: 3013405 - RNA, 17 nt, Human
uuggguuuauuuggaaa

SEQ ID NO: 3013406 - RNA, 16 nt, Human
uuggguggaugccugg

SEQ ID NO: 3013407 - RNA, 22 nt, Human
uuggcuuuggguugcaggaccu

SEQ ID NO: 3013408 - RNA, 16 nt, Human
uugggaggccauuugu

SEQ ID NO: 3013409 - RNA, 20 nt, Human
ugugaaugcagguuuuauca

SEQ ID NO: 3013410 - RNA, 14 nt, Human
ugugaaugcagguu

SEQ ID NO: 3013411 - RNA, 21 nt, Human
ugugacaaggauugcuacugu

SEQ ID NO: 3013412 - RNA, 21 nt, Human
ugugaauaaagagggugggug

SEQ ID NO: 3013413 - RNA, 18 nt, Human
ugugaguacuacaguccu

SEQ ID NO: 3013414 - RNA, 23 nt, Human
ugugaguacuacaguccucccau

SEQ ID NO: 3013415 - RNA, 20 nt, Human
ugugaguacuacaguccucc

SEQ ID NO: 3013416 - RNA, 19 nt, Human
ugugaguacuacaguccuc

SEQ ID NO: 3013417 - RNA, 21 nt, Human
ugugauacaaugcugugcccu

SEQ ID NO: 3013418 - RNA, 23 nt, Human
ugugaaaaaauuuacuuuaaacu

SEQ ID NO: 3013419 - RNA, 17 nt, Human
ugugaaaaaauuuacuu

SEQ ID NO: 3013420 - RNA, 12 nt, Human
ugugaaaaaauu

SEQ ID NO: 3013421 - RNA, 13 nt, Human
ugugaaaggaaag

SEQ ID NO: 3013422 - RNA, 14 nt, Human
ugugaaaggaaaga

SEQ ID NO: 3013423 - RNA, 16 nt, Human
ugucuuuuuucacuac

SEQ ID NO: 3013424 - RNA, 22 nt, Human
ugucuuuggacccugaggccca

SEQ ID NO: 3013425 - RNA, 19 nt, Human
ugucuuuggacccugaggc

SEQ ID NO: 3013426 - RNA, 18 nt, Human
ugucuuuggacccugagg

SEQ ID NO: 3013427 - RNA, 17 nt, Human
ugucuuuggacccugag

SEQ ID NO: 3013428 - RNA, 14 nt, Human
ugugcguccugucg

SEQ ID NO: 3013429 - RNA, 20 nt, Human
ugugcgugcauguguguuca

SEQ ID NO: 3013430 - RNA, 17 nt, Human
ugugccucugggacugg

SEQ ID NO: 3013431 - RNA, 16 nt, Human
ugugcacaugcacgug

SEQ ID NO: 3013432 - RNA, 22 nt, Human
ugugcacaugcacgugugugca

SEQ ID NO: 3013433 - RNA, 13 nt, Human
ugugccucuggga

SEQ ID NO: 3013434 - RNA, 15 nt, Human
ugugccucugggacu

SEQ ID NO: 3013435 - RNA, 16 nt, Human
ugugccucugggacug

SEQ ID NO: 3013436 - RNA, 15 nt, Human
uguguacuuuuaaga

SEQ ID NO: 3013437 - RNA, 12 nt, Human
uguguacuuuua

SEQ ID NO: 3013438 - RNA, 12 nt, Human
ugugggaagggg

SEQ ID NO: 3013439 - RNA, 14 nt, Human
uguggacacagcuc

SEQ ID NO: 3013440 - RNA, 13 nt, Human
uguggacacagcu

SEQ ID NO: 3013441 - RNA, 15 nt, Human
uguggacacagcucu

SEQ ID NO: 3013442 - RNA, 21 nt, Human
uguggagaagcggcuggcagc

SEQ ID NO: 3013443 - RNA, 12 nt, Human
uguggagaagcg

SEQ ID NO: 3013444 - RNA, 21 nt, Human
uguaacuguuuagaugaaugu

SEQ ID NO: 3013445 - RNA, 13 nt, Human
uguaaauuaacuu

SEQ ID NO: 3013446 - RNA, 14 nt, Human
uguaaauuaacuuu

SEQ ID NO: 3013447 - RNA, 15 nt, Human
uguaaauuaacuuuu

SEQ ID NO: 3013448 - RNA, 16 nt, Human
uguaaauuaacuuuua

SEQ ID NO: 3013449 - RNA, 17 nt, Human
uguaaauuaacuuuuau

SEQ ID NO: 3013450 - RNA, 23 nt, Human
uguaccucuugagccuugaacuu

SEQ ID NO: 3013451 - RNA, 22 nt, Human
uguaccucuugagccuugaacu

SEQ ID NO: 3013452 - RNA, 14 nt, Human
uguaccucuugagc

SEQ ID NO: 3013453 - RNA, 17 nt, Human
uguacgucugacaggca

SEQ ID NO: 3013454 - RNA, 16 nt, Human
uguacgucugacaggc

SEQ ID NO: 3013455 - RNA, 22 nt, Human
ugucaguuguuauuuauugaaa

SEQ ID NO: 3013456 - RNA, 17 nt, Human
ugucaguuguuauuuau

SEQ ID NO: 3013457 - RNA, 18 nt, Human
ugucaguuguuauuuauu

SEQ ID NO: 3013458 - RNA, 20 nt, Human
ugucagugugacugaucucu

SEQ ID NO: 3013459 - RNA, 12 nt, Human
ugucagugugac

SEQ ID NO: 3013460 - RNA, 16 nt, Human
uguaucccaugagccu

SEQ ID NO: 3013461 - RNA, 19 nt, Human
uguaucccaugagccucag

SEQ ID NO: 3013462 - RNA, 23 nt, Human
uguaucccaugagccucagcauc

SEQ ID NO: 3013463 - RNA, 16 nt, Human
uguugaaacuuuaaga

SEQ ID NO: 3013464 - RNA, 11 nt, Human
uguugaaagau

SEQ ID NO: 3013465 - RNA, 20 nt, Human
uguucuuuccaaaguacacu

SEQ ID NO: 3013466 - RNA, 20 nt, Human
uguucuuucuggcuaugcau

SEQ ID NO: 3013467 - RNA, 22 nt, Human
uguucuuucuggcuaugcauuu

SEQ ID NO: 3013468 - RNA, 14 nt, Human
uguucuuucuggcu

SEQ ID NO: 3013469 - RNA, 18 nt, Human
uguucugacccugcuuca

SEQ ID NO: 3013470 - RNA, 19 nt, Human
uguucucugcccuccaaga

SEQ ID NO: 3013471 - RNA, 15 nt, Human
uguucugacccugcu

SEQ ID NO: 3013472 - RNA, 21 nt, Human
uguucuccagucauuauguua

SEQ ID NO: 3013473 - RNA, 13 nt, Human
uguucucugagga

SEQ ID NO: 3013474 - RNA, 16 nt, Human
uguucucugaggacac

SEQ ID NO: 3013475 - RNA, 18 nt, Human
uguucucugaggacacua

SEQ ID NO: 3013476 - RNA, 12 nt, Human
uguucucugccc

SEQ ID NO: 3013477 - RNA, 15 nt, Human
uguuuaaugguaguu

SEQ ID NO: 3013478 - RNA, 14 nt, Human
uguuggccaggcug

SEQ ID NO: 3013479 - RNA, 15 nt, Human
uguuggccaaagcca

SEQ ID NO: 3013480 - RNA, 11 nt, Human
uguuggccagg

SEQ ID NO: 3013481 - RNA, 19 nt, Human
ugugugcguccugucggag

SEQ ID NO: 3013482 - RNA, 16 nt, Human
uguguagggcgggagg

SEQ ID NO: 3013483 - RNA, 16 nt, Human
uguuacugucuucagu

SEQ ID NO: 3013484 - RNA, 15 nt, Human
uguuacugucuucag

SEQ ID NO: 3013485 - RNA, 22 nt, Human
uguuacauuuuuaagugcugca

SEQ ID NO: 3013486 - RNA, 13 nt, Human
uguuacauuuuua

SEQ ID NO: 3013487 - RNA, 15 nt, Human
uguucagcuccagcu

SEQ ID NO: 3013488 - RNA, 16 nt, Human
uguucagcuccagcuc

SEQ ID NO: 3013489 - RNA, 11 nt, Human
uguucagcugg

SEQ ID NO: 3013490 - RNA, 14 nt, Human
uguucagcuccagc

SEQ ID NO: 3013491 - RNA, 15 nt, Human
uguuuuuauuauuaa

SEQ ID NO: 3013492 - RNA, 18 nt, Human
uguuuuuauuauuaacaa

SEQ ID NO: 3013493 - RNA, 23 nt, Human
uguuuugccaauuugcacauuaa

SEQ ID NO: 3013494 - RNA, 13 nt, Human
uguuuuugucuua

SEQ ID NO: 3013495 - RNA, 16 nt, Human
uguuuguugucagcug

SEQ ID NO: 3013496 - RNA, 17 nt, Human
uguuuguugucagcuga

SEQ ID NO: 3013497 - RNA, 15 nt, Human
uguuuccuggcacug

SEQ ID NO: 3013498 - RNA, 22 nt, Human
uguuuccuggcacugcuuccag

SEQ ID NO: 3013499 - RNA, 21 nt, Human
uguuuccuggcacugcuucca

SEQ ID NO: 3013500 - RNA, 20 nt, Human
uguuuccuggcacugcuucc

SEQ ID NO: 3013501 - RNA, 20 nt, Human
uuaaacuuaaucuaaaugga

SEQ ID NO: 3013502 - RNA, 16 nt, Human
uuaaacuuaaucuaaa

SEQ ID NO: 3013503 - RNA, 18 nt, Human
uuaaacuuaaucuaaaug

SEQ ID NO: 3013504 - RNA, 18 nt, Human
uuaaaugcccagccccuu

SEQ ID NO: 3013505 - RNA, 17 nt, Human
uuaaaugcccagccccu

SEQ ID NO: 3013506 - RNA, 17 nt, Human
uuaaaugcaccuggaau

SEQ ID NO: 3013507 - RNA, 18 nt, Human
uuaaaugcaccuggaaua

SEQ ID NO: 3013508 - RNA, 16 nt, Human
uuaaaugcaccuggaa

SEQ ID NO: 3013509 - RNA, 11 nt, Human
uuaaaugcacc

SEQ ID NO: 3013510 - RNA, 20 nt, Human
uuacgguuuuccagguuuaa

SEQ ID NO: 3013511 - RNA, 22 nt, Human
uuaccuuuuuuauacauaaaca

SEQ ID NO: 3013512 - RNA, 19 nt, Human
uuaccuuuuuuauacauaa

SEQ ID NO: 3013513 - RNA, 20 nt, Human
uuaccuuuuuuauacauaaa

SEQ ID NO: 3013514 - RNA, 20 nt, Human
uuacauuuuuaagugcugca

SEQ ID NO: 3013515 - RNA, 21 nt, Human
uuacauuuuuaagugcugcau

SEQ ID NO: 3013516 - RNA, 22 nt, Human
uuacauuuuuaagugcugcauu

SEQ ID NO: 3013517 - RNA, 18 nt, Human
uuaaugucacaggcaggu

SEQ ID NO: 3013518 - RNA, 17 nt, Human
uuaaugucacaggcagg

SEQ ID NO: 3013519 - RNA, 21 nt, Human
uuaaggaagacaaugugaaaa

SEQ ID NO: 3013520 - RNA, 17 nt, Human
uuaaggaugcuuguaca

SEQ ID NO: 3013521 - RNA, 18 nt, Human
uuaaggaugcuuguacau

SEQ ID NO: 3013522 - RNA, 19 nt, Human
uuaaggaugcuuguacaua

SEQ ID NO: 3013523 - RNA, 20 nt, Human
uuaaggaugcuuguacauaa

SEQ ID NO: 3013524 - RNA, 22 nt, Human
uuaaggaugcuuguacauaaug

SEQ ID NO: 3013525 - RNA, 22 nt, Human
ugccuaauaugaugacuguuuu

SEQ ID NO: 3013526 - RNA, 17 nt, Human
ugccuaauaugaugacu

SEQ ID NO: 3013527 - RNA, 17 nt, Human
ugccuaccaauauuuaa

SEQ ID NO: 3013528 - RNA, 23 nt, Human
ugccuaccaauauuuaaucuuuu

SEQ ID NO: 3013529 - RNA, 23 nt, Human
ugcccaggcuggcgugcaguggu

SEQ ID NO: 3013530 - RNA, 11 nt, Human
ugcccagcccc

SEQ ID NO: 3013531 - RNA, 14 nt, Human
ugccucugggacug

SEQ ID NO: 3013532 - RNA, 16 nt, Human
ugccuccuuugugagg

SEQ ID NO: 3013533 - RNA, 18 nt, Human
ugccuccuuugugaggaa

SEQ ID NO: 3013534 - RNA, 17 nt, Human
ugccuccuuugugagga

SEQ ID NO: 3013535 - RNA, 22 nt, Human
ugccugaagucacacagugagu

SEQ ID NO: 3013536 - RNA, 18 nt, Human
ugccugaagucacacagu

SEQ ID NO: 3013537 - RNA, 17 nt, Human
ugccugaagucacacag

SEQ ID NO: 3013538 - RNA, 22 nt, Human
ugccuuauggaacacucugaga

SEQ ID NO: 3013539 - RNA, 21 nt, Human
ugccuuauggaacacucugag

SEQ ID NO: 3013540 - RNA, 20 nt, Human
ugccuuauggaacacucuga

SEQ ID NO: 3013541 - RNA, 18 nt, Human
ugccuuauggaacacucu

SEQ ID NO: 3013542 - RNA, 23 nt, Human
ugcggugcuaucucccccagccc

SEQ ID NO: 3013543 - RNA, 21 nt, Human
ugcggugcuaucucccccagc

SEQ ID NO: 3013544 - RNA, 21 nt, Human
ugcugaaggcucgagcaugcc

SEQ ID NO: 3013545 - RNA, 23 nt, Human
ugcugaauacagaggcaacugca

SEQ ID NO: 3013546 - RNA, 18 nt, Human
ugcugaauacagaggcaa

SEQ ID NO: 3013547 - RNA, 17 nt, Human
ugcugaaugguuuucaa

SEQ ID NO: 3013548 - RNA, 18 nt, Human
ugcugaaugguuuucaaa

SEQ ID NO: 3013549 - RNA, 22 nt, Human
ugcugaaugguuuucaaaauaa

SEQ ID NO: 3013550 - RNA, 19 nt, Human
ugcuccuggcccacugcau

SEQ ID NO: 3013551 - RNA, 15 nt, Human
ugcugcaguugccag

SEQ ID NO: 3013552 - RNA, 23 nt, Human
ugcugauggugcaaugaccuuuc

SEQ ID NO: 3013553 - RNA, 20 nt, Human
ugcugauggugcaaugaccu

SEQ ID NO: 3013554 - RNA, 18 nt, Human
ugcugauggugcaaugac

SEQ ID NO: 3013555 - RNA, 15 nt, Human
ugcugacagacacag

SEQ ID NO: 3013556 - RNA, 16 nt, Human
ugcugacagacacagg

SEQ ID NO: 3013557 - RNA, 18 nt, Human
ugcuccucuccccagcaa

SEQ ID NO: 3013558 - RNA, 19 nt, Human
ugcuccucuccccagcaag

SEQ ID NO: 3013559 - RNA, 16 nt, Human
ugcuaggaacacuccu

SEQ ID NO: 3013560 - RNA, 19 nt, Human
ugcuaggaacacuccuuca

SEQ ID NO: 3013561 - RNA, 17 nt, Human
ugcuaggaacacuccuu

SEQ ID NO: 3013562 - RNA, 15 nt, Human
ugcgugcauaccacu

SEQ ID NO: 3013563 - RNA, 21 nt, Human
ugcacacuguccuauuauauu

SEQ ID NO: 3013564 - RNA, 22 nt, Human
ugaagucuuuguacagacaaca

SEQ ID NO: 3013565 - RNA, 20 nt, Human
ugaagucuuuguacagacaa

SEQ ID NO: 3013566 - RNA, 17 nt, Human
ugaagucuuuguacaga

SEQ ID NO: 3013567 - RNA, 17 nt, Human
ugcacagcuaacaugga

SEQ ID NO: 3013568 - RNA, 23 nt, Human
ugcacagaguuguuacauuuuua

SEQ ID NO: 3013569 - RNA, 20 nt, Human
ugcacagaguuguuacauuu

SEQ ID NO: 3013570 - RNA, 21 nt, Human
ugcacagaguuguuacauuuu

SEQ ID NO: 3013571 - RNA, 22 nt, Human
ugcacagaguuguuacauuuuu

SEQ ID NO: 3013572 - RNA, 13 nt, Human
ugcacaucuguuu

SEQ ID NO: 3013573 - RNA, 23 nt, Human
ugcacagcuaacauggaaguacu

SEQ ID NO: 3013574 - RNA, 20 nt, Human
ugcacagcuaacauggaagu

SEQ ID NO: 3013575 - RNA, 18 nt, Human
ugcacagcuaacauggaa

SEQ ID NO: 3013576 - RNA, 18 nt, Human
ugcaggaccucaggugag

SEQ ID NO: 3013577 - RNA, 16 nt, Human
ugcaggaccucaggug

SEQ ID NO: 3013578 - RNA, 15 nt, Human
ugcaggaccucaggu

SEQ ID NO: 3013579 - RNA, 14 nt, Human
ugcaggaccucagg

SEQ ID NO: 3013580 - RNA, 14 nt, Human
ugcagcaauaaagc

SEQ ID NO: 3013581 - RNA, 15 nt, Human
ugcagcaauaaagca

SEQ ID NO: 3013582 - RNA, 16 nt, Human
ugcagcaauaaagcag

SEQ ID NO: 3013583 - RNA, 21 nt, Human
ugcacuugcagacucuacaga

SEQ ID NO: 3013584 - RNA, 16 nt, Human
ugcacuugcagacucu

SEQ ID NO: 3013585 - RNA, 16 nt, Human
ugcacguacacacaca

SEQ ID NO: 3013586 - RNA, 20 nt, Human
ugcacuuuguucuggcucuu

SEQ ID NO: 3013587 - RNA, 19 nt, Human
ugcacuuuguucuggcucu

SEQ ID NO: 3013588 - RNA, 18 nt, Human
ugcacuuuguucuggcuc

SEQ ID NO: 3013589 - RNA, 15 nt, Human
ugcacuuuguucugg

SEQ ID NO: 3013590 - RNA, 19 nt, Human
ugcauguuacauaagauaa

SEQ ID NO: 3013591 - RNA, 15 nt, Human
ugcaucguuucaucu

SEQ ID NO: 3013592 - RNA, 16 nt, Human
ugcaggcagccaggcc

SEQ ID NO: 3013593 - RNA, 18 nt, Human
ugcaggcagccaggccac

SEQ ID NO: 3013594 - RNA, 17 nt, Human
ugcaggcagccaggcca

SEQ ID NO: 3013595 - RNA, 10 nt, Human
ugcccagccc

SEQ ID NO: 3013596 - RNA, 14 nt, Human
ugcccaccuggccu

SEQ ID NO: 3013597 - RNA, 18 nt, Human
ugcccaccuggccucugc

SEQ ID NO: 3013598 - RNA, 17 nt, Human
ugcccaccuggccucug

SEQ ID NO: 3013599 - RNA, 15 nt, Human
ugcccaccuggccuc

SEQ ID NO: 3013600 - RNA, 22 nt, Human
ugccagggacagaggggguggc

SEQ ID NO: 3013601 - RNA, 11 nt, Human
ugccagggaca

SEQ ID NO: 3013602 - RNA, 24 nt, Human
ugccagguuuuuggucugacccac

SEQ ID NO: 3013603 - RNA, 14 nt, Human
ugccagucaccccg

SEQ ID NO: 3013604 - RNA, 23 nt, Human
uggggcagugcuuggcccaggag

SEQ ID NO: 3013605 - RNA, 20 nt, Human
uggggcagugcuuggcccag

SEQ ID NO: 3013606 - RNA, 22 nt, Human
uggggcagugcuuggcccagga

SEQ ID NO: 3013607 - RNA, 17 nt, Human
ugggguggggaccucag

SEQ ID NO: 3013608 - RNA, 18 nt, Human
uggggcagugcuuggccc

SEQ ID NO: 3013609 - RNA, 13 nt, Human
uggguuuauuugg

SEQ ID NO: 3013610 - RNA, 23 nt, Human
uggguucaagcgauucuucugcu

SEQ ID NO: 3013611 - RNA, 16 nt, Human
uggguucacugcaacc

SEQ ID NO: 3013612 - RNA, 21 nt, Human
ugggugucaagagggucugag

SEQ ID NO: 3013613 - RNA, 23 nt, Human
ugggugucaagagggucugagga

SEQ ID NO: 3013614 - RNA, 20 nt, Human
ugggcuucaguggcagcugc

SEQ ID NO: 3013615 - RNA, 19 nt, Human
ugggcuuggggaccagagc

SEQ ID NO: 3013616 - RNA, 16 nt, Human
uggggcagcuugaggg

SEQ ID NO: 3013617 - RNA, 21 nt, Human
ugggcuuggggaccagagcug

SEQ ID NO: 3013618 - RNA, 13 nt, Human
uggggcagcuuga

SEQ ID NO: 3013619 - RNA, 18 nt, Human
ugggcuucaguggcagcu

SEQ ID NO: 3013620 - RNA, 19 nt, Human
ugggcuucaguggcagcug

SEQ ID NO: 3013621 - RNA, 14 nt, Human
ugggccuccugugu

SEQ ID NO: 3013622 - RNA, 16 nt, Human
ugggccuccugugugu

SEQ ID NO: 3013623 - RNA, 22 nt, Human
ugggccuccugugugugcgccu

SEQ ID NO: 3013624 - RNA, 24 nt, Human
ugggagcugccuguucagcuccag

SEQ ID NO: 3013625 - RNA, 14 nt, Human
uggcugggggccuc

SEQ ID NO: 3013626 - RNA, 22 nt, Human
uggcugguuagagguucccuuu

SEQ ID NO: 3013627 - RNA, 22 nt, Human
ugggaaugaaugucagugugac

SEQ ID NO: 3013628 - RNA, 21 nt, Human
ugggaaugaaugucaguguga

SEQ ID NO: 3013629 - RNA, 23 nt, Human
ugggagcugccuguucagcucca

SEQ ID NO: 3013630 - RNA, 16 nt, Human
ugggacaugggaaagg

SEQ ID NO: 3013631 - RNA, 22 nt, Human
uggcucagguggggucacucug

SEQ ID NO: 3013632 - RNA, 20 nt, Human
uggcucagguggggucacuc

SEQ ID NO: 3013633 - RNA, 16 nt, Human
uggcucuuccaggcug

SEQ ID NO: 3013634 - RNA, 12 nt, Human
uggcugggggcc

SEQ ID NO: 3013635 - RNA, 15 nt, Human
uggcucuuccaggcu

SEQ ID NO: 3013636 - RNA, 13 nt, Human
uggcucuuccagg

SEQ ID NO: 3013637 - RNA, 22 nt, Human
uggcgugcaguggugcgaucug

SEQ ID NO: 3013638 - RNA, 14 nt, Human
uggcgcugccccug

SEQ ID NO: 3013639 - RNA, 15 nt, Human
uggccagaugcacca

SEQ ID NO: 3013640 - RNA, 17 nt, Human
uggccagaagucaaggc

SEQ ID NO: 3013641 - RNA, 20 nt, Human
uggcagugggagcugccugu

SEQ ID NO: 3013642 - RNA, 13 nt, Human
uggcagugggagc

SEQ ID NO: 3013643 - RNA, 14 nt, Human
uggcagugggagcu

SEQ ID NO: 3013644 - RNA, 15 nt, Human
uggcagugggagcug

SEQ ID NO: 3013645 - RNA, 16 nt, Human
uggcagugggagcugc

SEQ ID NO: 3013646 - RNA, 19 nt, Human
uggcagugggagcugccug

SEQ ID NO: 3013647 - RNA, 18 nt, Human
uggcacugcuuccaguga

SEQ ID NO: 3013648 - RNA, 16 nt, Human
uggcacugcuuccagu

SEQ ID NO: 3013649 - RNA, 14 nt, Human
uggcacugcuucca

SEQ ID NO: 3013650 - RNA, 14 nt, Human
uggaugccuggugg

SEQ ID NO: 3013651 - RNA, 19 nt, Human
uggcagcugcgguccaccc

SEQ ID NO: 3013652 - RNA, 23 nt, Human
uggcagcugcgguccacccagga

SEQ ID NO: 3013653 - RNA, 21 nt, Human
uggcagcugcgguccacccag

SEQ ID NO: 3013654 - RNA, 22 nt, Human
uggcagcugcgguccacccagg

SEQ ID NO: 3013655 - RNA, 22 nt, Human
uggaggcaugugaugagaggaa

SEQ ID NO: 3013656 - RNA, 12 nt, Human
uggacaggcaug

SEQ ID NO: 3013657 - RNA, 16 nt, Human
uggacaggcauguucu

SEQ ID NO: 3013658 - RNA, 15 nt, Human
ugcuuuuuuuggccu

SEQ ID NO: 3013659 - RNA, 18 nt, Human
ugcuuccagugaggcucu

SEQ ID NO: 3013660 - RNA, 20 nt, Human
ugcuuccagugaggcucugc

SEQ ID NO: 3013661 - RNA, 19 nt, Human
ugcuuccagugaggcucug

SEQ ID NO: 3013662 - RNA, 16 nt, Human
ugcuucuucagagacu

SEQ ID NO: 3013663 - RNA, 14 nt, Human
uggaagacagcucu

SEQ ID NO: 3013664 - RNA, 15 nt, Human
uggaaaauaaauuau

SEQ ID NO: 3013665 - RNA, 16 nt, Human
uggaaaauaaauuauu

SEQ ID NO: 3013666 - RNA, 12 nt, Human
uggaagacagcu

SEQ ID NO: 3013667 - RNA, 11 nt, Human
uggaagacagc

SEQ ID NO: 3013668 - RNA, 13 nt, Human
ucuucuauauaau

SEQ ID NO: 3013669 - RNA, 12 nt, Human
ucuucuauuuau

SEQ ID NO: 3013670 - RNA, 22 nt, Human
ucuucuauauaauuccuguuuu

SEQ ID NO: 3013671 - RNA, 22 nt, Human
ucuucuauuuauuuauuuauuc

SEQ ID NO: 3013672 - RNA, 21 nt, Human
ucuucuccacuuucuagccag

SEQ ID NO: 3013673 - RNA, 19 nt, Human
ucuucuccacuuucuagcc

SEQ ID NO: 3013674 - RNA, 14 nt, Human
ucuuccaggcuggg

SEQ ID NO: 3013675 - RNA, 16 nt, Human
ucuucaguaagccgug

SEQ ID NO: 3013676 - RNA, 21 nt, Human
ucuuccacaagagcccaggcc

SEQ ID NO: 3013677 - RNA, 15 nt, Human
ucuucaguaagccgu

SEQ ID NO: 3013678 - RNA, 13 nt, Human
ucuuaaaaagugg

SEQ ID NO: 3013679 - RNA, 14 nt, Human
ucuuagugugugca

SEQ ID NO: 3013680 - RNA, 16 nt, Human
ucuuaguggauguucu

SEQ ID NO: 3013681 - RNA, 15 nt, Human
ucuuauacauuugau

SEQ ID NO: 3013682 - RNA, 14 nt, Human
ucuuauacauuuga

SEQ ID NO: 3013683 - RNA, 12 nt, Human
ucuugcucugcu

SEQ ID NO: 3013684 - RNA, 13 nt, Human
ucuugcucugcug

SEQ ID NO: 3013685 - RNA, 11 nt, Human
ucuugcucugc

SEQ ID NO: 3013686 - RNA, 21 nt, Human
ucuugaauuguaaggaaugau

SEQ ID NO: 3013687 - RNA, 16 nt, Human
ucuugaacuccuggcc

SEQ ID NO: 3013688 - RNA, 17 nt, Human
ucuugaacuccuggccu

SEQ ID NO: 3013689 - RNA, 18 nt, Human
ucuugaacuccuggccuc

SEQ ID NO: 3013690 - RNA, 13 nt, Human
ucuucuccaggcu

SEQ ID NO: 3013691 - RNA, 14 nt, Human
ucuucuccaggcug

SEQ ID NO: 3013692 - RNA, 12 nt, Human
ucuucuccaggc

SEQ ID NO: 3013693 - RNA, 20 nt, Human
ucuguuacacaaagaaccac

SEQ ID NO: 3013694 - RNA, 18 nt, Human
ucuuaaaaaguggaaaaa

SEQ ID NO: 3013695 - RNA, 22 nt, Human
ucugugucagguggggcagcuu

SEQ ID NO: 3013696 - RNA, 23 nt, Human
ucuguggguuucuaaagcugcca

SEQ ID NO: 3013697 - RNA, 19 nt, Human
ucuguccgagcuuugaaaa

SEQ ID NO: 3013698 - RNA, 22 nt, Human
ucuguggguuucuaaagcugcc

SEQ ID NO: 3013699 - RNA, 17 nt, Human
ucuguacgucugacagg

SEQ ID NO: 3013700 - RNA, 19 nt, Human
ucuguaauaaacucauuuc

SEQ ID NO: 3013701 - RNA, 23 nt, Human
ucuguaauaaacucauuucuagc

SEQ ID NO: 3013702 - RNA, 24 nt, Human
ucuguaauaaacucauuucuagca

SEQ ID NO: 3013703 - RNA, 23 nt, Human
ucuguacagagcccacgccccca

SEQ ID NO: 3013704 - RNA, 17 nt, Human
ucuggcucuuccaggcu

SEQ ID NO: 3013705 - RNA, 16 nt, Human
ucuggcucuuccaggc

SEQ ID NO: 3013706 - RNA, 15 nt, Human
ucuggcucuuccagg

SEQ ID NO: 3013707 - RNA, 12 nt, Human
ucugggacacag

SEQ ID NO: 3013708 - RNA, 14 nt, Human
ucuggcuaugcauu

SEQ ID NO: 3013709 - RNA, 14 nt, Human
ucuuuuugaaaugu

SEQ ID NO: 3013710 - RNA, 16 nt, Human
ucuuuuugcuuugcuu

SEQ ID NO: 3013711 - RNA, 17 nt, Human
ucuuuugccguuauuaa

SEQ ID NO: 3013712 - RNA, 19 nt, Human
ucuuuugccguuauuaaaa

SEQ ID NO: 3013713 - RNA, 17 nt, Human
ugaaaucuuuuugcuuu

SEQ ID NO: 3013714 - RNA, 15 nt, Human
ugaaagggcccagag

SEQ ID NO: 3013715 - RNA, 16 nt, Human
ugaaagggcccagaga

SEQ ID NO: 3013716 - RNA, 17 nt, Human
ugaaagggcccagagag

SEQ ID NO: 3013717 - RNA, 19 nt, Human
ugaaaugaggucagagccu

SEQ ID NO: 3013718 - RNA, 20 nt, Human
ugaaaugaggucagagccug

SEQ ID NO: 3013719 - RNA, 23 nt, Human
ugaaaugaggucagagccugcag

SEQ ID NO: 3013720 - RNA, 21 nt, Human
ugaaaugaggucagagccugc

SEQ ID NO: 3013721 - RNA, 22 nt, Human
ugaaaugaggucagagccugca

SEQ ID NO: 3013722 - RNA, 12 nt, Human
ugaaaggaaaga

SEQ ID NO: 3013723 - RNA, 17 nt, Human
ugaaaggaaagaggcuc

SEQ ID NO: 3013724 - RNA, 15 nt, Human
ugaacugauaaagau

SEQ ID NO: 3013725 - RNA, 13 nt, Human
ugaacugauaaag

SEQ ID NO: 3013726 - RNA, 18 nt, Human
ugaacucuucaaucucuu

SEQ ID NO: 3013727 - RNA, 20 nt, Human
ugaaccacaucuugcucugc

SEQ ID NO: 3013728 - RNA, 21 nt, Human
ugaaccacaucuugcucugcu

SEQ ID NO: 3013729 - RNA, 22 nt, Human
ugaaccacaucuugcucugcug

SEQ ID NO: 3013730 - RNA, 15 nt, Human
ugaacucuucaaucu

SEQ ID NO: 3013731 - RNA, 19 nt, Human
ugaaccacaucuugcucug

SEQ ID NO: 3013732 - RNA, 20 nt, Human
ugaaggcucgagcaugccug

SEQ ID NO: 3013733 - RNA, 21 nt, Human
ugaaggcucgagcaugccugg

SEQ ID NO: 3013734 - RNA, 14 nt, Human
ugaagacuuuucuu

SEQ ID NO: 3013735 - RNA, 22 nt, Human
ugaagacuuuucuuucagccaa

SEQ ID NO: 3013736 - RNA, 17 nt, Human
ugaagacuuuucuuuca

SEQ ID NO: 3013737 - RNA, 19 nt, Human
ugaacuggguacuugugga

SEQ ID NO: 3013738 - RNA, 12 nt, Human
ugaacuugguuc

SEQ ID NO: 3013739 - RNA, 14 nt, Human
ugaacuuggcgcug

SEQ ID NO: 3013740 - RNA, 16 nt, Human
ugaagacagagcuaca

SEQ ID NO: 3013741 - RNA, 14 nt, Human
ugaagacagagcua

SEQ ID NO: 3013742 - RNA, 17 nt, Human
ucucaaacuaacaggcu

SEQ ID NO: 3013743 - RNA, 15 nt, Human
ucucaaacuaacagg

SEQ ID NO: 3013744 - RNA, 22 nt, Human
ucucaaacucuugaccucaggu

SEQ ID NO: 3013745 - RNA, 13 nt, Human
ucucaaacucuug

SEQ ID NO: 3013746 - RNA, 21 nt, Human
ucucaaacucuugaccucagg

SEQ ID NO: 3013747 - RNA, 17 nt, Human
ucucacuguugcccagg

SEQ ID NO: 3013748 - RNA, 17 nt, Human
ucucagaaucucaaaua

SEQ ID NO: 3013749 - RNA, 21 nt, Human
ucucagaaucucaaauaacua

SEQ ID NO: 3013750 - RNA, 18 nt, Human
ucucacuguugcccaggc

SEQ ID NO: 3013751 - RNA, 19 nt, Human
ucucacuguugcccaggcu

SEQ ID NO: 3013752 - RNA, 20 nt, Human
ucucacuguugcccaggcug

SEQ ID NO: 3013753 - RNA, 21 nt, Human
ucucacuguugcccaggcugg

SEQ ID NO: 3013754 - RNA, 18 nt, Human
ucucacucugucgcccag

SEQ ID NO: 3013755 - RNA, 22 nt, Human
ucucacucugucgcccagucug

SEQ ID NO: 3013756 - RNA, 16 nt, Human
ucucacucugucgccc

SEQ ID NO: 3013757 - RNA, 17 nt, Human
ucucacucugucgccca

SEQ ID NO: 3013758 - RNA, 15 nt, Human
ucuaacuucaccaua

SEQ ID NO: 3013759 - RNA, 16 nt, Human
ucuaacuucaccauau

SEQ ID NO: 3013760 - RNA, 22 nt, Human
ucuaaaucuccaaaauaaaacu

SEQ ID NO: 3013761 - RNA, 19 nt, Human
ucuagggaaaaaccagcgu

SEQ ID NO: 3013762 - RNA, 22 nt, Human
ucuagggaaaaaccagcgugug

SEQ ID NO: 3013763 - RNA, 22 nt, Human
ucuacugaggugcuauguucuu

SEQ ID NO: 3013764 - RNA, 15 nt, Human
ucuacacugugcuga

SEQ ID NO: 3013765 - RNA, 18 nt, Human
ucuacugaggugcuaugu

SEQ ID NO: 3013766 - RNA, 19 nt, Human
ucuacugaggugcuauguu

SEQ ID NO: 3013767 - RNA, 14 nt, Human
ucuacacugugcug

SEQ ID NO: 3013768 - RNA, 12 nt, Human
ucuacacugugc

SEQ ID NO: 3013769 - RNA, 17 nt, Human
ucgaguuacagacaaag

SEQ ID NO: 3013770 - RNA, 15 nt, Human
ucgaguuacagacaa

SEQ ID NO: 3013771 - RNA, 15 nt, Human
uccugguguggaaga

SEQ ID NO: 3013772 - RNA, 17 nt, Human
uccuggcccacugcauc

SEQ ID NO: 3013773 - RNA, 22 nt, Human
uccuggcaugggaaugaauguc

SEQ ID NO: 3013774 - RNA, 10 nt, Human
ucccucccuu

SEQ ID NO: 3013775 - RNA, 12 nt, Human
uccuucuguccu

SEQ ID NO: 3013776 - RNA, 19 nt, Human
uccuucuguccuacucugu

SEQ ID NO: 3013777 - RNA, 22 nt, Human
ucuccugccucagccucccaaa

SEQ ID NO: 3013778 - RNA, 19 nt, Human
ucuccugccucagccuccc

SEQ ID NO: 3013779 - RNA, 20 nt, Human
ucucccccagccccauccuc

SEQ ID NO: 3013780 - RNA, 18 nt, Human
ucucccccagccccaucc

SEQ ID NO: 3013781 - RNA, 13 nt, Human
ucucccccagccc

SEQ ID NO: 3013782 - RNA, 22 nt, Human
ucucccccagccccauccucug

SEQ ID NO: 3013783 - RNA, 14 nt, Human
ucucccccagcccc

SEQ ID NO: 3013784 - RNA, 17 nt, Human
ucucccccagccccauc

SEQ ID NO: 3013785 - RNA, 15 nt, Human
ucucccccagcccca

SEQ ID NO: 3013786 - RNA, 13 nt, Human
ucucugaggacac

SEQ ID NO: 3013787 - RNA, 15 nt, Human
ucucuacaaaaagca

SEQ ID NO: 3013788 - RNA, 16 nt, Human
ucucuaguuugauuaa

SEQ ID NO: 3013789 - RNA, 18 nt, Human
ucucuaguuugauuaaau

SEQ ID NO: 3013790 - RNA, 19 nt, Human
ucucuaguuugauuaaauu

SEQ ID NO: 3013791 - RNA, 14 nt, Human
ucugacccaugcug

SEQ ID NO: 3013792 - RNA, 15 nt, Human
ucugacccacugcuu

SEQ ID NO: 3013793 - RNA, 20 nt, Human
ucugaacuuggcgcugcccc

SEQ ID NO: 3013794 - RNA, 24 nt, Human
ucugagaucaaaacgguuuuacug

SEQ ID NO: 3013795 - RNA, 18 nt, Human
ucugacccaugcugcccu

SEQ ID NO: 3013796 - RNA, 17 nt, Human
ucugacccaugcugccc

SEQ ID NO: 3013797 - RNA, 16 nt, Human
ucugacccaugcugcc

SEQ ID NO: 3013798 - RNA, 15 nt, Human
ucugacccaugcugc

SEQ ID NO: 3013799 - RNA, 19 nt, Human
ucugcacaagcugcacccu

SEQ ID NO: 3013800 - RNA, 14 nt, Human
ucugcacaagcugc

SEQ ID NO: 3013801 - RNA, 23 nt, Human
ucugauucccaagcucugcuccu

SEQ ID NO: 3013802 - RNA, 16 nt, Human
ucugaggaauccagac

SEQ ID NO: 3013803 - RNA, 17 nt, Human
ucugaggaauccagacc

SEQ ID NO: 3013804 - RNA, 20 nt, Human
ucugaggacacuaaccacgc

SEQ ID NO: 3013805 - RNA, 23 nt, Human
ucugaggacacuaaccacgcugg

SEQ ID NO: 3013806 - RNA, 16 nt, Human
ucugaaaauguaugug

SEQ ID NO: 3013807 - RNA, 15 nt, Human
ucucuuuucaaaaca

SEQ ID NO: 3013808 - RNA, 16 nt, Human
ucucuuuucaaaacau

SEQ ID NO: 3013809 - RNA, 14 nt, Human
ucugaaaauguaug

SEQ ID NO: 3013810 - RNA, 23 nt, Human
ucugaaaauguauguguaaguau

SEQ ID NO: 3013811 - RNA, 13 nt, Human
ucugaaagggacg

SEQ ID NO: 3013812 - RNA, 16 nt, Human
ucccauucuuggccca

SEQ ID NO: 3013813 - RNA, 22 nt, Human
uccccacuugagaauuacccuu

SEQ ID NO: 3013814 - RNA, 15 nt, Human
ucccauucuuggccc

SEQ ID NO: 3013815 - RNA, 23 nt, Human
ucccaucucacacaugagcauca

SEQ ID NO: 3013816 - RNA, 20 nt, Human
ucccaucucacacaugagca

SEQ ID NO: 3013817 - RNA, 13 nt, Human
ucccaccucagcc

SEQ ID NO: 3013818 - RNA, 14 nt, Human
ucccaccucagccu

SEQ ID NO: 3013819 - RNA, 15 nt, Human
ucccaccucagccuc

SEQ ID NO: 3013820 - RNA, 21 nt, Human
ucccaggcauuccccaggagg

SEQ ID NO: 3013821 - RNA, 20 nt, Human
ucccaggcauuccccaggag

SEQ ID NO: 3013822 - RNA, 19 nt, Human
ucccaggcauuccccagga

SEQ ID NO: 3013823 - RNA, 22 nt, Human
ucccaggcauuccccaggaggc

SEQ ID NO: 3013824 - RNA, 23 nt, Human
uccagcucaccagccccagugcc

SEQ ID NO: 3013825 - RNA, 21 nt, Human
ucccaaagugcugggauuaca

SEQ ID NO: 3013826 - RNA, 15 nt, Human
uccauggacuuuguu

SEQ ID NO: 3013827 - RNA, 14 nt, Human
uccauggacuuugu

SEQ ID NO: 3013828 - RNA, 13 nt, Human
uccauggacuuug

SEQ ID NO: 3013829 - RNA, 17 nt, Human
ucccaagcucugcuccu

SEQ ID NO: 3013830 - RNA, 12 nt, Human
ucccaagcucug

SEQ ID NO: 3013831 - RNA, 13 nt, Human
ucccaagcucugc

SEQ ID NO: 3013832 - RNA, 14 nt, Human
ucccaagcucugcu

SEQ ID NO: 3013833 - RNA, 15 nt, Human
ucccaagcucugcuc

SEQ ID NO: 3013834 - RNA, 16 nt, Human
ucccaacucaccccag

SEQ ID NO: 3013835 - RNA, 15 nt, Human
ucccaacucacccca

SEQ ID NO: 3013836 - RNA, 14 nt, Human
ucccaacucacccc

SEQ ID NO: 3013837 - RNA, 13 nt, Human
ucccaacucaccc

SEQ ID NO: 3013838 - RNA, 17 nt, Human
ucccccuggcacugguu

SEQ ID NO: 3013839 - RNA, 21 nt, Human
ucccccuuccauggacuuugu

SEQ ID NO: 3013840 - RNA, 20 nt, Human
uccccgcacugggcuugggg

SEQ ID NO: 3013841 - RNA, 19 nt, Human
uccccuguagagugggagc

SEQ ID NO: 3013842 - RNA, 24 nt, Human
uccccugcuggguguggcgcagca

SEQ ID NO: 3013843 - RNA, 23 nt, Human
uccccuguccccgcacugggcuu

SEQ ID NO: 3013844 - RNA, 22 nt, Human
uccccuguagagugggagcuga

SEQ ID NO: 3013845 - RNA, 21 nt, Human
uccccugcuggguguggcgca

SEQ ID NO: 3013846 - RNA, 20 nt, Human
uccccugcuggguguggcgc

SEQ ID NO: 3013847 - RNA, 15 nt, Human
uccccugcugggugu

SEQ ID NO: 3013848 - RNA, 14 nt, Human
uccccugcugggug

SEQ ID NO: 3013849 - RNA, 15 nt, Human
ucccuacuguaauuu

SEQ ID NO: 3013850 - RNA, 15 nt, Human
ucccucccucuuucc

SEQ ID NO: 3013851 - RNA, 17 nt, Human
ucccucccucuuucccu

SEQ ID NO: 3013852 - RNA, 15 nt, Human
ucaucuguuacacaa

SEQ ID NO: 3013853 - RNA, 15 nt, Human
ucauacccaccccca

SEQ ID NO: 3013854 - RNA, 14 nt, Human
ucauacccaccccc

SEQ ID NO: 3013855 - RNA, 20 nt, Human
ucauacccacccccacccaa

SEQ ID NO: 3013856 - RNA, 16 nt, Human
ucauuaggugugacug

SEQ ID NO: 3013857 - RNA, 18 nt, Human
ucauuaggugugacugaa

SEQ ID NO: 3013858 - RNA, 21 nt, Human
ucauuaggugugacugaauuu

SEQ ID NO: 3013859 - RNA, 12 nt, Human
ucagcagagugc

SEQ ID NO: 3013860 - RNA, 11 nt, Human
ucagcagagug

SEQ ID NO: 3013861 - RNA, 22 nt, Human
ucagcagagugcuuuaccaauu

SEQ ID NO: 3013862 - RNA, 16 nt, Human
ucagcagagugcuuua

SEQ ID NO: 3013863 - RNA, 24 nt, Human
ucagucugauucccaagcucugcu

SEQ ID NO: 3013864 - RNA, 15 nt, Human
ucagucuggcccuuc

SEQ ID NO: 3013865 - RNA, 23 nt, Human
ucagugguuggcaauuguuucaa

SEQ ID NO: 3013866 - RNA, 11 nt, Human
ucaguguacau

SEQ ID NO: 3013867 - RNA, 13 nt, Human
ucagugugacuga

SEQ ID NO: 3013868 - RNA, 17 nt, Human
ucagugugacugaucuc

SEQ ID NO: 3013869 - RNA, 13 nt, Human
ucauaaugacuua

SEQ ID NO: 3013870 - RNA, 13 nt, Human
ucauacccacccc

SEQ ID NO: 3013871 - RNA, 13 nt, Human
uccaccugccagg

SEQ ID NO: 3013872 - RNA, 14 nt, Human
uccacaagagccca

SEQ ID NO: 3013873 - RNA, 22 nt, Human
uccaagcaggacauggacaagg

SEQ ID NO: 3013874 - RNA, 12 nt, Human
uccaccugccag

SEQ ID NO: 3013875 - RNA, 17 nt, Human
uccaaaauaaaacuuuu

SEQ ID NO: 3013876 - RNA, 16 nt, Human
uccaaaauaaaacuuu

SEQ ID NO: 3013877 - RNA, 20 nt, Human
uccaagaagcccaggaaagg

SEQ ID NO: 3013878 - RNA, 19 nt, Human
uccaagaagcccaggaaag

SEQ ID NO: 3013879 - RNA, 22 nt, Human
uccaagaagcccaggaaaggcu

SEQ ID NO: 3013880 - RNA, 18 nt, Human
ucaagcugaccuugcuga

SEQ ID NO: 3013881 - RNA, 19 nt, Human
ucaaggauccugagccaga

SEQ ID NO: 3013882 - RNA, 18 nt, Human
ucaaggauccugagccag

SEQ ID NO: 3013883 - RNA, 22 nt, Human
ucaagugauucuccugccucag

SEQ ID NO: 3013884 - RNA, 17 nt, Human
ucaaggauccugagcca

SEQ ID NO: 3013885 - RNA, 20 nt, Human
ucaaggauccugagccagau

SEQ ID NO: 3013886 - RNA, 16 nt, Human
ucaagcgauucuucug

SEQ ID NO: 3013887 - RNA, 22 nt, Human
ucaaacucuugaccucagguga

SEQ ID NO: 3013888 - RNA, 15 nt, Human
ucaaacuuuacuaug

SEQ ID NO: 3013889 - RNA, 13 nt, Human
ucaaacuuuacua

SEQ ID NO: 3013890 - RNA, 16 nt, Human
ucaaacuuuacuaugg

SEQ ID NO: 3013891 - RNA, 13 nt, Human
ucaaccuccuggg

SEQ ID NO: 3013892 - RNA, 14 nt, Human
ucaaccuccugggc

SEQ ID NO: 3013893 - RNA, 19 nt, Human
ucaauuacaggaaguacug

SEQ ID NO: 3013894 - RNA, 21 nt, Human
ucacacaguauuacuucugcu

SEQ ID NO: 3013895 - RNA, 22 nt, Human
ucacacaguauuacuucugcua

SEQ ID NO: 3013896 - RNA, 13 nt, Human
ucacacagugagu

SEQ ID NO: 3013897 - RNA, 21 nt, Human
ucacacaugagcaucaggcca

SEQ ID NO: 3013898 - RNA, 22 nt, Human
ucacacagugagucgaggacag

SEQ ID NO: 3013899 - RNA, 23 nt, Human
ucacacagugagucgaggacagg

SEQ ID NO: 3013900 - RNA, 11 nt, Human
ucacaggcagg

SEQ ID NO: 3013901 - RNA, 13 nt, Human
ucaauaggaaaaa

SEQ ID NO: 3013902 - RNA, 14 nt, Human
ucaaugcacugaca

SEQ ID NO: 3013903 - RNA, 14 nt, Human
ucaauaggaaaaac

SEQ ID NO: 3013904 - RNA, 18 nt, Human
ucaaugcacugacauugu

SEQ ID NO: 3013905 - RNA, 18 nt, Human
ucaauuacaggaaguacu

SEQ ID NO: 3013906 - RNA, 13 nt, Human
ucaauuacaggaa

SEQ ID NO: 3013907 - RNA, 20 nt, Human
uauuuuuguuuuuauuaaaa

SEQ ID NO: 3013908 - RNA, 18 nt, Human
uauuuuuguuuuuauuaa

SEQ ID NO: 3013909 - RNA, 13 nt, Human
ucaaacuaacagg

SEQ ID NO: 3013910 - RNA, 12 nt, Human
ucaaacuaacag

SEQ ID NO: 3013911 - RNA, 14 nt, Human
ucaaacucuuaaaa

SEQ ID NO: 3013912 - RNA, 22 nt, Human
ucaaaacgguuuuacugcagcu

SEQ ID NO: 3013913 - RNA, 15 nt, Human
uauuuuuuuacuaau

SEQ ID NO: 3013914 - RNA, 16 nt, Human
uauuuauugaaaugau

SEQ ID NO: 3013915 - RNA, 20 nt, Human
uauuuauugaaaugauuuca

SEQ ID NO: 3013916 - RNA, 12 nt, Human
uauuuauugaaa

SEQ ID NO: 3013917 - RNA, 20 nt, Human
uaucugaaaauguaugugua

SEQ ID NO: 3013918 - RNA, 14 nt, Human
uaucugaaaaugua

SEQ ID NO: 3013919 - RNA, 15 nt, Human
uaucugaaaauguau

SEQ ID NO: 3013920 - RNA, 23 nt, Human
uauuuauuaaaugcccagccccu

SEQ ID NO: 3013921 - RNA, 23 nt, Human
uauuugaguggaguuacugaaca

SEQ ID NO: 3013922 - RNA, 23 nt, Human
uauuucugaggagccugcaacau

SEQ ID NO: 3013923 - RNA, 12 nt, Human
uauuuuacuuuu

SEQ ID NO: 3013924 - RNA, 13 nt, Human
uauuuuacuuuuu

SEQ ID NO: 3013925 - RNA, 14 nt, Human
uauuuuacuuuuug

SEQ ID NO: 3013926 - RNA, 15 nt, Human
uauuuuacuuuuugg

SEQ ID NO: 3013927 - RNA, 22 nt, Human
uauuuuagguguaaaauaauua

SEQ ID NO: 3013928 - RNA, 19 nt, Human
ucacgccuguaauccuagc

SEQ ID NO: 3013929 - RNA, 20 nt, Human
ucacgccuguaauccuagca

SEQ ID NO: 3013930 - RNA, 16 nt, Human
ucacgccacugcacua

SEQ ID NO: 3013931 - RNA, 13 nt, Human
ucacgccacugca

SEQ ID NO: 3013932 - RNA, 14 nt, Human
ucacgccacugcac

SEQ ID NO: 3013933 - RNA, 22 nt, Human
ucaccuuuguccccaccgcaga

SEQ ID NO: 3013934 - RNA, 18 nt, Human
ucaccuuuguccccaccg

SEQ ID NO: 3013935 - RNA, 17 nt, Human
ucaccuuuguccccacc

SEQ ID NO: 3013936 - RNA, 15 nt, Human
ucaccuuugucccca

SEQ ID NO: 3013937 - RNA, 14 nt, Human
ucaccuuugucccc

SEQ ID NO: 3013938 - RNA, 12 nt, Human
ucaccuuugucc

SEQ ID NO: 3013939 - RNA, 14 nt, Human
ucaccuuucccauc

SEQ ID NO: 3013940 - RNA, 19 nt, Human
ucacaggcagguccagggu

SEQ ID NO: 3013941 - RNA, 12 nt, Human
ucacaggcaggu

SEQ ID NO: 3013942 - RNA, 15 nt, Human
ucacaggcaggucca

SEQ ID NO: 3013943 - RNA, 14 nt, Human
ucacggaagagccu

SEQ ID NO: 3013944 - RNA, 17 nt, Human
ucacggaagagccuugc

SEQ ID NO: 3013945 - RNA, 16 nt, Human
ucacggaagagccuug

SEQ ID NO: 3013946 - RNA, 13 nt, Human
ucacggcucacug

SEQ ID NO: 3013947 - RNA, 15 nt, Human
ucacggcucacugca

SEQ ID NO: 3013948 - RNA, 20 nt, Human
ucacggcucacugcagccuc

SEQ ID NO: 3013949 - RNA, 13 nt, Human
ucacuccuugaaa

SEQ ID NO: 3013950 - RNA, 23 nt, Human
ucacucuccuuggugucgggcau

SEQ ID NO: 3013951 - RNA, 13 nt, Human
ucacucuggcagc

SEQ ID NO: 3013952 - RNA, 12 nt, Human
ucacucuggcag

SEQ ID NO: 3013953 - RNA, 14 nt, Human
ucacucuccuuggu

SEQ ID NO: 3013954 - RNA, 12 nt, Human
ucacucuccuug

SEQ ID NO: 3013955 - RNA, 22 nt, Human
ucacucuggcagcucagagagg

SEQ ID NO: 3013956 - RNA, 20 nt, Human
ucacucuggcagcucagaga

SEQ ID NO: 3013957 - RNA, 19 nt, Human
ucacucuggcagcucagag

SEQ ID NO: 3013958 - RNA, 18 nt, Human
ucacucuggcagcucaga

SEQ ID NO: 3013959 - RNA, 17 nt, Human
ucacucuggcagcucag

SEQ ID NO: 3013960 - RNA, 16 nt, Human
ucacucuggcagcuca

SEQ ID NO: 3013961 - RNA, 15 nt, Human
ucacucuggcagcuc

SEQ ID NO: 3013962 - RNA, 14 nt, Human
ucacucuggcagcu

SEQ ID NO: 3013963 - RNA, 19 nt, Human
ucacucugucgcccagucu

SEQ ID NO: 3013964 - RNA, 12 nt, Human
ucacucugucgc

SEQ ID NO: 3013965 - RNA, 16 nt, Human
ucacucugucgcccag

SEQ ID NO: 3013966 - RNA, 15 nt, Human
ucacugcuuaacuuc

SEQ ID NO: 3013967 - RNA, 17 nt, Human
ucacugcuuaacuucac

SEQ ID NO: 3013968 - RNA, 18 nt, Human
ucacugcuuaacuucaca

SEQ ID NO: 3013969 - RNA, 20 nt, Human
ucacugcuuaacuucacaua

SEQ ID NO: 3013970 - RNA, 18 nt, Human
ucagcacgauuucuguuu

SEQ ID NO: 3013971 - RNA, 19 nt, Human
ucagcacgauuucuguuua

SEQ ID NO: 3013972 - RNA, 14 nt, Human
ucagacagcugccu

SEQ ID NO: 3013973 - RNA, 20 nt, Human
ucagacagcugccugggauc

SEQ ID NO: 3013974 - RNA, 19 nt, Human
ucagacagcugccugggau

SEQ ID NO: 3013975 - RNA, 18 nt, Human
ucagacagcugccuggga

SEQ ID NO: 3013976 - RNA, 17 nt, Human
ucagacagcugccuggg

SEQ ID NO: 3013977 - RNA, 16 nt, Human
ucagacagcugccugg

SEQ ID NO: 3013978 - RNA, 15 nt, Human
ucagacagcugccug

SEQ ID NO: 3013979 - RNA, 12 nt, Human
uaaacacauuaa

SEQ ID NO: 3013980 - RNA, 23 nt, Human
uaaacaagaccacguuucuaaag

SEQ ID NO: 3013981 - RNA, 18 nt, Human
uaaacaagaccacguuuc

SEQ ID NO: 3013982 - RNA, 16 nt, Human
uaaacuuuaccuuuuu

SEQ ID NO: 3013983 - RNA, 22 nt, Human
uaaacuuuaccuuuuuuauaca

SEQ ID NO: 3013984 - RNA, 14 nt, Human
uaaacuuaaucuaa

SEQ ID NO: 3013985 - RNA, 13 nt, Human
uaaacuuaaucua

SEQ ID NO: 3013986 - RNA, 18 nt, Human
uaaacuuaaucuaaaugg

SEQ ID NO: 3013987 - RNA, 19 nt, Human
uaaacuuaaucuaaaugga

SEQ ID NO: 3013988 - RNA, 22 nt, Human
uaaauaucccuuggacauuuua

SEQ ID NO: 3013989 - RNA, 22 nt, Human
uaaauauugguugggaugacuu

SEQ ID NO: 3013990 - RNA, 23 nt, Human
uaaauauugguugggaugacuug

SEQ ID NO: 3013991 - RNA, 18 nt, Human
uaaauauuuugacuuguu

SEQ ID NO: 3013992 - RNA, 15 nt, Human
uaaauauuuugacuu

SEQ ID NO: 3013993 - RNA, 19 nt, Human
uaaauauuuugacuuguug

SEQ ID NO: 3013994 - RNA, 19 nt, Human
uaaaucagccguguaacca

SEQ ID NO: 3013995 - RNA, 21 nt, Human
uaaaguguauuuuuuuacuaa

SEQ ID NO: 3013996 - RNA, 22 nt, Human
uaaaguguauuuuuuuacuaau

SEQ ID NO: 3013997 - RNA, 23 nt, Human
uaaaguguauuuuuuuacuaaua

SEQ ID NO: 3013998 - RNA, 20 nt, Human
uaaaguguauuuuuuuacua

SEQ ID NO: 3013999 - RNA, 13 nt, Human
uaaaguuucuguu

SEQ ID NO: 3014000 - RNA, 16 nt, Human
guuuuguguacuuuua

SEQ ID NO: 3014001 - RNA, 15 nt, Human
guuuuguguacuuuu

SEQ ID NO: 3014002 - RNA, 17 nt, Human
guuuuguguacuuuuaa

SEQ ID NO: 3014003 - RNA, 19 nt, Human
guuuucucuugagagggug

SEQ ID NO: 3014004 - RNA, 12 nt, Human
guuuucucuuga

SEQ ID NO: 3014005 - RNA, 19 nt, Human
guuuuuauggcuuuugugc

SEQ ID NO: 3014006 - RNA, 22 nt, Human
guuuuuauggcuuuugugcauu

SEQ ID NO: 3014007 - RNA, 23 nt, Human
guuuuuauggcuuuugugcauua

SEQ ID NO: 3014008 - RNA, 13 nt, Human
guuuguucccugu

SEQ ID NO: 3014009 - RNA, 17 nt, Human
guuuucaguguacaugg

SEQ ID NO: 3014010 - RNA, 16 nt, Human
guuuucaguguacaug

SEQ ID NO: 3014011 - RNA, 13 nt, Human
guuuuuauuaaaa

SEQ ID NO: 3014012 - RNA, 17 nt, Human
guuuuuauuaaaaggaa

SEQ ID NO: 3014013 - RNA, 14 nt, Human
guuuuuauuaaaag

SEQ ID NO: 3014014 - RNA, 15 nt, Human
guuuuuauuauuaac

SEQ ID NO: 3014015 - RNA, 18 nt, Human
guuuuuauuauuaacaaa

SEQ ID NO: 3014016 - RNA, 23 nt, Human
uaaaaaacugcugacuguuuucu

SEQ ID NO: 3014017 - RNA, 20 nt, Human
uaaaaaacugcugacuguuu

SEQ ID NO: 3014018 - RNA, 17 nt, Human
guuuagaugaaugucag

SEQ ID NO: 3014019 - RNA, 18 nt, Human
guuuagaugaaugucagu

SEQ ID NO: 3014020 - RNA, 18 nt, Human
gguuggcaaaaaggcagg

SEQ ID NO: 3014021 - RNA, 21 nt, Human
gguuggccccugcccggcugc

SEQ ID NO: 3014022 - RNA, 15 nt, Human
guuuagauaauacac

SEQ ID NO: 3014023 - RNA, 20 nt, Human
guuuccuggcacugcuucca

SEQ ID NO: 3014024 - RNA, 16 nt, Human
guuuccuggcacugcu

SEQ ID NO: 3014025 - RNA, 22 nt, Human
guuuccuggcacugcuuccagu

SEQ ID NO: 3014026 - RNA, 21 nt, Human
guuuccuggcacugcuuccag

SEQ ID NO: 3014027 - RNA, 14 nt, Human
guuucagaaaugug

SEQ ID NO: 3014028 - RNA, 18 nt, Human
guuucagaaauguguuau

SEQ ID NO: 3014029 - RNA, 16 nt, Human
guuucuaaagcugcca

SEQ ID NO: 3014030 - RNA, 15 nt, Human
guuucuaaagcugcc

SEQ ID NO: 3014031 - RNA, 14 nt, Human
guuucuaaagcugc

SEQ ID NO: 3014032 - RNA, 18 nt, Human
guuugagaucagccuggg

SEQ ID NO: 3014033 - RNA, 16 nt, Human
guuugaaccaagaacu

SEQ ID NO: 3014034 - RNA, 22 nt, Human
guuugauuaaauucuugcaaag

SEQ ID NO: 3014035 - RNA, 17 nt, Human
guuugauuaaauucuug

SEQ ID NO: 3014036 - RNA, 19 nt, Human
guuugauuaaauucuugca

SEQ ID NO: 3014037 - RNA, 17 nt, Human
guuuguaaauuaacuuu

SEQ ID NO: 3014038 - RNA, 19 nt, Human
guuuguaaauuaacuuuua

SEQ ID NO: 3014039 - RNA, 16 nt, Human
uaagaacuaaaauguu

SEQ ID NO: 3014040 - RNA, 22 nt, Human
uaagaggcagggucucacucug

SEQ ID NO: 3014041 - RNA, 22 nt, Human
uaagaaccuuuugagugccuua

SEQ ID NO: 3014042 - RNA, 21 nt, Human
uaacuuuuauaaacuuuaccu

SEQ ID NO: 3014043 - RNA, 22 nt, Human
uaacuuuuauaaacuuuaccuu

SEQ ID NO: 3014044 - RNA, 19 nt, Human
uaacuuuuauaaacuuuac

SEQ ID NO: 3014045 - RNA, 24 nt, Human
uaagaaagacuaucuaaauguuga

SEQ ID NO: 3014046 - RNA, 16 nt, Human
uaagauaaaugugcug

SEQ ID NO: 3014047 - RNA, 17 nt, Human
uaagauaaaugugcuga

SEQ ID NO: 3014048 - RNA, 14 nt, Human
uaagauaaaugugc

SEQ ID NO: 3014049 - RNA, 23 nt, Human
uaagagggagggagggcuccaga

SEQ ID NO: 3014050 - RNA, 22 nt, Human
uaagagggagggagggcuccag

SEQ ID NO: 3014051 - RNA, 12 nt, Human
uaagagggaggg

SEQ ID NO: 3014052 - RNA, 19 nt, Human
uaaggaugcuuguacauaa

SEQ ID NO: 3014053 - RNA, 18 nt, Human
uaaggaugcuuguacaua

SEQ ID NO: 3014054 - RNA, 20 nt, Human
uaaggaugcuuguacauaau

SEQ ID NO: 3014055 - RNA, 21 nt, Human
uaaggaugcuuguacauaaug

SEQ ID NO: 3014056 - RNA, 22 nt, Human
uaaggaugcuuguacauaaugc

SEQ ID NO: 3014057 - RNA, 23 nt, Human
uaaggaugcuuguacauaaugcg

SEQ ID NO: 3014058 - RNA, 20 nt, Human
uaacagcaacacaaagcuuu

SEQ ID NO: 3014059 - RNA, 18 nt, Human
uaacagcaacacaaagcu

SEQ ID NO: 3014060 - RNA, 12 nt, Human
uaacagaaaugu

SEQ ID NO: 3014061 - RNA, 14 nt, Human
uaacagaaauguac

SEQ ID NO: 3014062 - RNA, 15 nt, Human
uaacagaaauguaca

SEQ ID NO: 3014063 - RNA, 13 nt, Human
uaacagaaaugua

SEQ ID NO: 3014064 - RNA, 21 nt, Human
uaacaggcuuagugauguaau

SEQ ID NO: 3014065 - RNA, 14 nt, Human
uaacaggcuuagug

SEQ ID NO: 3014066 - RNA, 19 nt, Human
uaacaggcagauacaggaa

SEQ ID NO: 3014067 - RNA, 16 nt, Human
uaaccagcagaaaugc

SEQ ID NO: 3014068 - RNA, 19 nt, Human
uaaccagcagaaaugccuu

SEQ ID NO: 3014069 - RNA, 14 nt, Human
uaaccagcagaaau

SEQ ID NO: 3014070 - RNA, 20 nt, Human
uaacuuuuauaaacuuuacc

SEQ ID NO: 3014071 - RNA, 20 nt, Human
uaagugguacuaacuuuccu

SEQ ID NO: 3014072 - RNA, 21 nt, Human
uaauaguucagguaacaggca

SEQ ID NO: 3014073 - RNA, 11 nt, Human
uaaucuaaaug

SEQ ID NO: 3014074 - RNA, 20 nt, Human
uaauccucuaggaggucucu

SEQ ID NO: 3014075 - RNA, 19 nt, Human
uaauuugugauacaaugcu

SEQ ID NO: 3014076 - RNA, 22 nt, Human
uaauuugugauacaaugcugug

SEQ ID NO: 3014077 - RNA, 14 nt, Human
uaauuugugauaca

SEQ ID NO: 3014078 - RNA, 15 nt, Human
uaauuugugauacaa

SEQ ID NO: 3014079 - RNA, 18 nt, Human
uaauuugugauacaaugc

SEQ ID NO: 3014080 - RNA, 18 nt, Human
uaauucuuagcucauucu

SEQ ID NO: 3014081 - RNA, 22 nt, Human
uaauugacaggauuauuggaaa

SEQ ID NO: 3014082 - RNA, 20 nt, Human
uaauugacaggauuauugga

SEQ ID NO: 3014083 - RNA, 14 nt, Human
uaaugcgugcauac

SEQ ID NO: 3014084 - RNA, 17 nt, Human
uaauuaaaacacaacau

SEQ ID NO: 3014085 - RNA, 20 nt, Human
uaauuaaguacuauguauca

SEQ ID NO: 3014086 - RNA, 13 nt, Human
uacacuugugaau

SEQ ID NO: 3014087 - RNA, 19 nt, Human
uacacuguuucaaacuuua

SEQ ID NO: 3014088 - RNA, 17 nt, Human
uacacuguuucaaacuu

SEQ ID NO: 3014089 - RNA, 18 nt, Human
uacacuguuucaaacuuu

SEQ ID NO: 3014090 - RNA, 13 nt, Human
uacacuuuaugca

SEQ ID NO: 3014091 - RNA, 24 nt, Human
uacagcaaggagauuuacaacugg

SEQ ID NO: 3014092 - RNA, 23 nt, Human
uacagcuugaccgugaggccaga

SEQ ID NO: 3014093 - RNA, 17 nt, Human
uacaggaaaagcugcug

SEQ ID NO: 3014094 - RNA, 18 nt, Human
uacaggaaaagcugcuga

SEQ ID NO: 3014095 - RNA, 21 nt, Human
uacagcuugaccgugaggcca

SEQ ID NO: 3014096 - RNA, 22 nt, Human
uacagcuugaccgugaggccag

SEQ ID NO: 3014097 - RNA, 19 nt, Human
uacaggaaaagcugcugac

SEQ ID NO: 3014098 - RNA, 16 nt, Human
uacaggcacccaccau

SEQ ID NO: 3014099 - RNA, 22 nt, Human
uacacacugcauguuugugauu

SEQ ID NO: 3014100 - RNA, 16 nt, Human
uacacugugcugaguc

SEQ ID NO: 3014101 - RNA, 14 nt, Human
uacacuguuucaaa

SEQ ID NO: 3014102 - RNA, 17 nt, Human
uacacacugcauguuug

SEQ ID NO: 3014103 - RNA, 21 nt, Human
uacacacacacgcgugcacac

SEQ ID NO: 3014104 - RNA, 15 nt, Human
uacacacacauacac

SEQ ID NO: 3014105 - RNA, 17 nt, Human
uacacaaugguuuucuu

SEQ ID NO: 3014106 - RNA, 21 nt, Human
uacacaaugguuuucuugugu

SEQ ID NO: 3014107 - RNA, 23 nt, Human
uaccaauauuuaaucuuuuauga

SEQ ID NO: 3014108 - RNA, 21 nt, Human
uaccaauauuuaaucuuuuau

SEQ ID NO: 3014109 - RNA, 16 nt, Human
uaccaauauuuaaucu

SEQ ID NO: 3014110 - RNA, 13 nt, Human
uaccaauauuuaa

SEQ ID NO: 3014111 - RNA, 13 nt, Human
uaccacagacaua

SEQ ID NO: 3014112 - RNA, 23 nt, Human
uaccauuuugggguacccacugc

SEQ ID NO: 3014113 - RNA, 15 nt, Human
uacccacccccaccc

SEQ ID NO: 3014114 - RNA, 12 nt, Human
uacccaccccca

SEQ ID NO: 3014115 - RNA, 23 nt, Human
uacccacccccacccaagggccu

SEQ ID NO: 3014116 - RNA, 19 nt, Human
uacccacccccacccaagg

SEQ ID NO: 3014117 - RNA, 17 nt, Human
uacccacccccacccaa

SEQ ID NO: 3014118 - RNA, 11 nt, Human
uacccacugcu

SEQ ID NO: 3014119 - RNA, 12 nt, Human
uacccacugcuc

SEQ ID NO: 3014120 - RNA, 13 nt, Human
uacccacugcucu

SEQ ID NO: 3014121 - RNA, 14 nt, Human
uacccacugcucug

SEQ ID NO: 3014122 - RNA, 16 nt, Human
uacccagcgagcccug

SEQ ID NO: 3014123 - RNA, 18 nt, Human
uacccagcgagcccuggu

SEQ ID NO: 3014124 - RNA, 22 nt, Human
uacccaggugcuaggaacacuc

SEQ ID NO: 3014125 - RNA, 22 nt, Human
uacauaagauaaaugugcugaa

SEQ ID NO: 3014126 - RNA, 18 nt, Human
uacauaagauaaaugugc

SEQ ID NO: 3014127 - RNA, 19 nt, Human
uacauaagauaaaugugcu

SEQ ID NO: 3014128 - RNA, 23 nt, Human
uacaguuacucagaauucucuag

SEQ ID NO: 3014129 - RNA, 19 nt, Human
uacaguuacucagaauucu

SEQ ID NO: 3014130 - RNA, 21 nt, Human
uacuguaucaugacaaagacu

SEQ ID NO: 3014131 - RNA, 14 nt, Human
uacuuguggacaca

SEQ ID NO: 3014132 - RNA, 19 nt, Human
uacuuguggacacagcucu

SEQ ID NO: 3014133 - RNA, 15 nt, Human
uacuuguggacacag

SEQ ID NO: 3014134 - RNA, 18 nt, Human
uacuuguggacacagcuc

SEQ ID NO: 3014135 - RNA, 15 nt, Human
uagaaauauaauuga

SEQ ID NO: 3014136 - RNA, 20 nt, Human
uagaaauaucugaaaaugua

SEQ ID NO: 3014137 - RNA, 21 nt, Human
uagaaauaucugaaaauguau

SEQ ID NO: 3014138 - RNA, 23 nt, Human
uagaaauaucugaaaauguaugu

SEQ ID NO: 3014139 - RNA, 18 nt, Human
uaccuuuuuuauacauaa

SEQ ID NO: 3014140 - RNA, 19 nt, Human
uaccuuuuuuauacauaaa

SEQ ID NO: 3014141 - RNA, 20 nt, Human
uaccuuuuuuauacauaaac

SEQ ID NO: 3014142 - RNA, 20 nt, Human
uaccuuuguauucucuccug

SEQ ID NO: 3014143 - RNA, 22 nt, Human
uacccaucccauaugccugggc

SEQ ID NO: 3014144 - RNA, 19 nt, Human
uacuaaccagcagaaaugc

SEQ ID NO: 3014145 - RNA, 18 nt, Human
uacuaaccagcagaaaug

SEQ ID NO: 3014146 - RNA, 17 nt, Human
uacuaaccagcagaaau

SEQ ID NO: 3014147 - RNA, 17 nt, Human
uacuacaguccucccau

SEQ ID NO: 3014148 - RNA, 12 nt, Human
uacuacaguccu

SEQ ID NO: 3014149 - RNA, 15 nt, Human
uacuaauagacaauu

SEQ ID NO: 3014150 - RNA, 17 nt, Human
uacuaauagacaauuua

SEQ ID NO: 3014151 - RNA, 22 nt, Human
uacuaauaaaauuuaaaagucu

SEQ ID NO: 3014152 - RNA, 16 nt, Human
uacucagaauucucua

SEQ ID NO: 3014153 - RNA, 22 nt, Human
uacucagaauucucuaguuuga

SEQ ID NO: 3014154 - RNA, 20 nt, Human
uacuacaguuuguuaguaug

SEQ ID NO: 3014155 - RNA, 20 nt, Human
uacuacaguccucccaucuc

SEQ ID NO: 3014156 - RNA, 12 nt, Human
uacucaccucac

SEQ ID NO: 3014157 - RNA, 14 nt, Human
uacucaccucaccc

SEQ ID NO: 3014158 - RNA, 17 nt, Human
uacucccaucugugaaa

SEQ ID NO: 3014159 - RNA, 16 nt, Human
uacucccaucugugaa

SEQ ID NO: 3014160 - RNA, 14 nt, Human
uacucccaucugug

SEQ ID NO: 3014161 - RNA, 12 nt, Human
uacucccaucug

SEQ ID NO: 3014162 - RNA, 15 nt, Human
uacugaggugcuaug

SEQ ID NO: 3014163 - RNA, 23 nt, Human
uagcaguaaaaaaugguguuuua

SEQ ID NO: 3014164 - RNA, 20 nt, Human
uagcagcccucaauugugaa

SEQ ID NO: 3014165 - RNA, 19 nt, Human
uagcagagaaugaaagggc

SEQ ID NO: 3014166 - RNA, 23 nt, Human
uagcagagaaugaaagggcccag

SEQ ID NO: 3014167 - RNA, 11 nt, Human
uagauguugcu

SEQ ID NO: 3014168 - RNA, 13 nt, Human
uagauguugcuaa

SEQ ID NO: 3014169 - RNA, 16 nt, Human
uagcacuuugggaggc

SEQ ID NO: 3014170 - RNA, 12 nt, Human
uagauguauaua

SEQ ID NO: 3014171 - RNA, 18 nt, Human
uagauaauacaccacuac

SEQ ID NO: 3014172 - RNA, 23 nt, Human
uagacccucaugcugccaauauc

SEQ ID NO: 3014173 - RNA, 11 nt, Human
uagagacaggg

SEQ ID NO: 3014174 - RNA, 21 nt, Human
uagagguucaaagauauuuug

SEQ ID NO: 3014175 - RNA, 19 nt, Human
uagagguucaaagauauuu

SEQ ID NO: 3014176 - RNA, 16 nt, Human
uagagguucaaagaua

SEQ ID NO: 3014177 - RNA, 16 nt, Human
uagagagagaccacuu

SEQ ID NO: 3014178 - RNA, 17 nt, Human
uaggaacacuccuucac

SEQ ID NO: 3014179 - RNA, 21 nt, Human
uaggaacuuaaauaaugugaa

SEQ ID NO: 3014180 - RNA, 14 nt, Human
uaggaacacuccuu

SEQ ID NO: 3014181 - RNA, 13 nt, Human
uaggaacacuccu

SEQ ID NO: 3014182 - RNA, 13 nt, Human
uaggaagacuuug

SEQ ID NO: 3014183 - RNA, 15 nt, Human
uaggaagacuuugga

SEQ ID NO: 3014184 - RNA, 14 nt, Human
uaggaagacuuugg

SEQ ID NO: 3014185 - RNA, 17 nt, Human
uaggaagacuuuggaaa

SEQ ID NO: 3014186 - RNA, 16 nt, Human
uaggaagacuuuggaa

SEQ ID NO: 3014187 - RNA, 13 nt, Human
uaggccuggccag

SEQ ID NO: 3014188 - RNA, 14 nt, Human
uaggccuggccaga

SEQ ID NO: 3014189 - RNA, 15 nt, Human
uaggaagguuaaugu

SEQ ID NO: 3014190 - RNA, 11 nt, Human
uagcugggacu

SEQ ID NO: 3014191 - RNA, 18 nt, Human
uagcugggacuacaggug

SEQ ID NO: 3014192 - RNA, 20 nt, Human
uagcugggacuacaggcacc

SEQ ID NO: 3014193 - RNA, 19 nt, Human
uagcugggacuacaggcac

SEQ ID NO: 3014194 - RNA, 22 nt, Human
uagcucauucuccuuguguuac

SEQ ID NO: 3014195 - RNA, 17 nt, Human
uagccugccucuucucu

SEQ ID NO: 3014196 - RNA, 21 nt, Human
uagcucuaggagggcuggcaa

SEQ ID NO: 3014197 - RNA, 14 nt, Human
uagcccaaaaccaa

SEQ ID NO: 3014198 - RNA, 16 nt, Human
uagccuaggugacaga

SEQ ID NO: 3014199 - RNA, 23 nt, Human
uauaauuccuguuuuuauuauua

SEQ ID NO: 3014200 - RNA, 17 nt, Human
uauaauucuacuuugag

SEQ ID NO: 3014201 - RNA, 14 nt, Human
uauaauguaagcuc

SEQ ID NO: 3014202 - RNA, 19 nt, Human
uauaauguaagcucuacug

SEQ ID NO: 3014203 - RNA, 20 nt, Human
uauaauguaagcucuacuga

SEQ ID NO: 3014204 - RNA, 22 nt, Human
uauaacaaaggauacuuauuua

SEQ ID NO: 3014205 - RNA, 18 nt, Human
uauaaugaaugaaacauu

SEQ ID NO: 3014206 - RNA, 20 nt, Human
uauaaugaaugaaacauuuu

SEQ ID NO: 3014207 - RNA, 20 nt, Human
uauaacaaaggauacuuauu

SEQ ID NO: 3014208 - RNA, 21 nt, Human
uaguuugauuaaauucuugca

SEQ ID NO: 3014209 - RNA, 13 nt, Human
uaguuucuccaag

SEQ ID NO: 3014210 - RNA, 23 nt, Human
uaguuugauuaaauucuugcaaa

SEQ ID NO: 3014211 - RNA, 12 nt, Human
uaguuugcaguu

SEQ ID NO: 3014212 - RNA, 15 nt, Human
uaguggauguucuga

SEQ ID NO: 3014213 - RNA, 19 nt, Human
uaucgucacugcuuaacuu

SEQ ID NO: 3014214 - RNA, 16 nt, Human
uaucgucacugcuuaa

SEQ ID NO: 3014215 - RNA, 15 nt, Human
uaucuaaauguugaa

SEQ ID NO: 3014216 - RNA, 16 nt, Human
uaucaugacaaagacu

SEQ ID NO: 3014217 - RNA, 17 nt, Human
uaucaggugcugccauc

SEQ ID NO: 3014218 - RNA, 21 nt, Human
ggggcagugcuuggcccagga

SEQ ID NO: 3014219 - RNA, 23 nt, Human
ggggcagugcuuggcccaggagu

SEQ ID NO: 3014220 - RNA, 16 nt, Human
ggggcaacccugguga

SEQ ID NO: 3014221 - RNA, 17 nt, Human
ggggcugaggugggagg

SEQ ID NO: 3014222 - RNA, 22 nt, Human
gggcuuggggaccagagcugcc

SEQ ID NO: 3014223 - RNA, 16 nt, Human
ggggaaaaucagccug

SEQ ID NO: 3014224 - RNA, 19 nt, Human
ggggaaaaucagccugcuc

SEQ ID NO: 3014225 - RNA, 17 nt, Human
ggggaaaaucagccugc

SEQ ID NO: 3014226 - RNA, 21 nt, Human
ggggaaaaucagccugcucca

SEQ ID NO: 3014227 - RNA, 12 nt, Human
gggguggccucc

SEQ ID NO: 3014228 - RNA, 17 nt, Human
gggguggggaccucagg

SEQ ID NO: 3014229 - RNA, 23 nt, Human
ggggcugcaccggcuggccuggc

SEQ ID NO: 3014230 - RNA, 22 nt, Human
gggggaggugggauccuccagg

SEQ ID NO: 3014231 - RNA, 22 nt, Human
ggggcugcaccggcuggccugg

SEQ ID NO: 3014232 - RNA, 21 nt, Human
ggggcugcaccggcuggccug

SEQ ID NO: 3014233 - RNA, 12 nt, Human
ggggcugcaccg

SEQ ID NO: 3014234 - RNA, 19 nt, Human
ggggcugaggugggaggau

SEQ ID NO: 3014235 - RNA, 12 nt, Human
gggucugaggaa

SEQ ID NO: 3014236 - RNA, 21 nt, Human
gggucugaggaauccagaccc

SEQ ID NO: 3014237 - RNA, 12 nt, Human
gggucucacucu

SEQ ID NO: 3014238 - RNA, 14 nt, Human
gggucucacucugu

SEQ ID NO: 3014239 - RNA, 17 nt, Human
ggguaagugagagaggg

SEQ ID NO: 3014240 - RNA, 22 nt, Human
gguagaagcccuucuaccuucc

SEQ ID NO: 3014241 - RNA, 23 nt, Human
gguagaaauaucugaaaauguau

SEQ ID NO: 3014242 - RNA, 16 nt, Human
gguacuuguggacaca

SEQ ID NO: 3014243 - RNA, 17 nt, Human
gguacuuguggacacag

SEQ ID NO: 3014244 - RNA, 22 nt, Human
gguagaaauaucugaaaaugua

SEQ ID NO: 3014245 - RNA, 11 nt, Human
gguacccacug

SEQ ID NO: 3014246 - RNA, 13 nt, Human
gguacccacugcu

SEQ ID NO: 3014247 - RNA, 16 nt, Human
ggucccaccccacaca

SEQ ID NO: 3014248 - RNA, 15 nt, Human
ggucccaccccacac

SEQ ID NO: 3014249 - RNA, 11 nt, Human
ggucagagccu

SEQ ID NO: 3014250 - RNA, 19 nt, Human
gggugacagagcaagugag

SEQ ID NO: 3014251 - RNA, 17 nt, Human
gggugaagugaagacaa

SEQ ID NO: 3014252 - RNA, 12 nt, Human
ggguucuaccca

SEQ ID NO: 3014253 - RNA, 22 nt, Human
ggguucaagcgauucuucugcu

SEQ ID NO: 3014254 - RNA, 23 nt, Human
ggguucaagcgauucuucugcuu

SEQ ID NO: 3014255 - RNA, 16 nt, Human
gguuauuuuacuuuuu

SEQ ID NO: 3014256 - RNA, 13 nt, Human
gguucaaagauau

SEQ ID NO: 3014257 - RNA, 21 nt, Human
gguucaaagauauuuugcuuu

SEQ ID NO: 3014258 - RNA, 13 nt, Human
gguugagguuuca

SEQ ID NO: 3014259 - RNA, 13 nt, Human
gguuauggagagg

SEQ ID NO: 3014260 - RNA, 17 nt, Human
gguuaggcauuguggga

SEQ ID NO: 3014261 - RNA, 21 nt, Human
gguuacccaguuagcucucaa

SEQ ID NO: 3014262 - RNA, 16 nt, Human
gguggugaccucugcc

SEQ ID NO: 3014263 - RNA, 14 nt, Human
gguggugaccucug

SEQ ID NO: 3014264 - RNA, 15 nt, Human
gguggugaccucugc

SEQ ID NO: 3014265 - RNA, 15 nt, Human
ggugguuuucuguuc

SEQ ID NO: 3014266 - RNA, 18 nt, Human
ggugguuuucuguucuuu

SEQ ID NO: 3014267 - RNA, 17 nt, Human
ggugguuucagaaaugu

SEQ ID NO: 3014268 - RNA, 18 nt, Human
ggugguuucagaaaugug

SEQ ID NO: 3014269 - RNA, 21 nt, Human
ggugguuauggagaggguguc

SEQ ID NO: 3014270 - RNA, 19 nt, Human
ggugucaccugaagacuca

SEQ ID NO: 3014271 - RNA, 19 nt, Human
ggugucaagagggucugag

SEQ ID NO: 3014272 - RNA, 17 nt, Human
ggugucaagagggucug

SEQ ID NO: 3014273 - RNA, 16 nt, Human
ggucucacucugucgc

SEQ ID NO: 3014274 - RNA, 22 nt, Human
ggucucacucugucgcccaguc

SEQ ID NO: 3014275 - RNA, 23 nt, Human
ggucucacucugucgcccagucu

SEQ ID NO: 3014276 - RNA, 14 nt, Human
ggucccaccccaca

SEQ ID NO: 3014277 - RNA, 17 nt, Human
ggucccaccccacacac

SEQ ID NO: 3014278 - RNA, 21 nt, Human
ggugacagagugagacucugu

SEQ ID NO: 3014279 - RNA, 14 nt, Human
ggucugacccacug

SEQ ID NO: 3014280 - RNA, 21 nt, Human
ggugaccucugccugaaguca

SEQ ID NO: 3014281 - RNA, 22 nt, Human
ggugaccagcaccaucucuccu

SEQ ID NO: 3014282 - RNA, 15 nt, Human
ggugcugccauccag

SEQ ID NO: 3014283 - RNA, 19 nt, Human
gguggcagugggagcugcc

SEQ ID NO: 3014284 - RNA, 22 nt, Human
gguggcagugggagcugccugu

SEQ ID NO: 3014285 - RNA, 16 nt, Human
gguggcagugggagcu

SEQ ID NO: 3014286 - RNA, 22 nt, Human
gguggccucccaacucacccca

SEQ ID NO: 3014287 - RNA, 23 nt, Human
gguggccucccaacucaccccag

SEQ ID NO: 3014288 - RNA, 15 nt, Human
ggugagaagcagagg

SEQ ID NO: 3014289 - RNA, 16 nt, Human
ggugagaggggaacag

SEQ ID NO: 3014290 - RNA, 20 nt, Human
ggugcuaucucccccagccc

SEQ ID NO: 3014291 - RNA, 19 nt, Human
ggugcuaucucccccagcc

SEQ ID NO: 3014292 - RNA, 17 nt, Human
ggugcuaucucccccag

SEQ ID NO: 3014293 - RNA, 16 nt, Human
ggugcuaucuccccca

SEQ ID NO: 3014294 - RNA, 16 nt, Human
gggcacaucauuucaa

SEQ ID NO: 3014295 - RNA, 16 nt, Human
gggcacagggucucua

SEQ ID NO: 3014296 - RNA, 13 nt, Human
gggcacagggucu

SEQ ID NO: 3014297 - RNA, 16 nt, Human
gggcacucagaagaca

SEQ ID NO: 3014298 - RNA, 19 nt, Human
gggcacucagaagacacug

SEQ ID NO: 3014299 - RNA, 21 nt, Human
gggcacagaaaauggaagaca

SEQ ID NO: 3014300 - RNA, 20 nt, Human
gggcacagaaaauggaagac

SEQ ID NO: 3014301 - RNA, 18 nt, Human
gggcacagaaaauggaag

SEQ ID NO: 3014302 - RNA, 23 nt, Human
gggcacaccgggcacucagaaga

SEQ ID NO: 3014303 - RNA, 17 nt, Human
gggcagguugguggggg

SEQ ID NO: 3014304 - RNA, 11 nt, Human
gggcagagcag

SEQ ID NO: 3014305 - RNA, 20 nt, Human
gggcacucagaagacacuga

SEQ ID NO: 3014306 - RNA, 14 nt, Human
gggcagaaggaaga

SEQ ID NO: 3014307 - RNA, 18 nt, Human
gggcagaaggaagacuuc

SEQ ID NO: 3014308 - RNA, 18 nt, Human
gggauaucacuuccauga

SEQ ID NO: 3014309 - RNA, 16 nt, Human
gggauccuccaggugc

SEQ ID NO: 3014310 - RNA, 15 nt, Human
gggauccuccaggug

SEQ ID NO: 3014311 - RNA, 13 nt, Human
gggauagagagag

SEQ ID NO: 3014312 - RNA, 21 nt, Human
gggauaugauuuaaaucagcc

SEQ ID NO: 3014313 - RNA, 23 nt, Human
gggauccuggaguucugguuccu

SEQ ID NO: 3014314 - RNA, 20 nt, Human
gggcaacccccagccugcua

SEQ ID NO: 3014315 - RNA, 18 nt, Human
gggcaacccuggugacca

SEQ ID NO: 3014316 - RNA, 16 nt, Human
gggaggugaccccagg

SEQ ID NO: 3014317 - RNA, 17 nt, Human
gggaggugggauccucc

SEQ ID NO: 3014318 - RNA, 17 nt, Human
gggagugacagaggcag

SEQ ID NO: 3014319 - RNA, 18 nt, Human
gggagugacagaggcagc

SEQ ID NO: 3014320 - RNA, 11 nt, Human
gggagugagcu

SEQ ID NO: 3014321 - RNA, 14 nt, Human
gggagugagcuggu

SEQ ID NO: 3014322 - RNA, 18 nt, Human
gggcagugcuuggcccag

SEQ ID NO: 3014323 - RNA, 19 nt, Human
gggcagugcuuggcccagg

SEQ ID NO: 3014324 - RNA, 20 nt, Human
gggcagugcuuggcccagga

SEQ ID NO: 3014325 - RNA, 22 nt, Human
gggcagugcuuggcccaggagu

SEQ ID NO: 3014326 - RNA, 23 nt, Human
gggcagugcuuggcccaggaguu

SEQ ID NO: 3014327 - RNA, 12 nt, Human
gggcaugacacg

SEQ ID NO: 3014328 - RNA, 17 nt, Human
gggcccagagagggugg

SEQ ID NO: 3014329 - RNA, 23 nt, Human
gggccacagagaaaguacuucuc

SEQ ID NO: 3014330 - RNA, 16 nt, Human
gggccacagagaaagu

SEQ ID NO: 3014331 - RNA, 12 nt, Human
gggccuggccug

SEQ ID NO: 3014332 - RNA, 13 nt, Human
gggccuggccuga

SEQ ID NO: 3014333 - RNA, 13 nt, Human
gggcccugccucc

SEQ ID NO: 3014334 - RNA, 13 nt, Human
gggccuggcuccc

SEQ ID NO: 3014335 - RNA, 17 nt, Human
gggccuggcucaggugg

SEQ ID NO: 3014336 - RNA, 18 nt, Human
gggccuggccugagcugg

SEQ ID NO: 3014337 - RNA, 14 nt, Human
gggccuggccugag

SEQ ID NO: 3014338 - RNA, 17 nt, Human
ggcuuagugauguaauu

SEQ ID NO: 3014339 - RNA, 15 nt, Human
ggcuuagucacugag

SEQ ID NO: 3014340 - RNA, 21 nt, Human
ggcuuagucacugagacagcc

SEQ ID NO: 3014341 - RNA, 16 nt, Human
ggcuuagacccucaug

SEQ ID NO: 3014342 - RNA, 21 nt, Human
ggcuuaauuauugauguuuuc

SEQ ID NO: 3014343 - RNA, 17 nt, Human
ggcugggcucccuuccc

SEQ ID NO: 3014344 - RNA, 12 nt, Human
ggcugggcuuca

SEQ ID NO: 3014345 - RNA, 15 nt, Human
ggcuuaaaacaacac

SEQ ID NO: 3014346 - RNA, 13 nt, Human
ggcugggcuucag

SEQ ID NO: 3014347 - RNA, 17 nt, Human
ggcugggcuucaguggc

SEQ ID NO: 3014348 - RNA, 10 nt, Human
ggcuuuugug

SEQ ID NO: 3014349 - RNA, 21 nt, Human
ggcuuggggaccagagcugcc

SEQ ID NO: 3014350 - RNA, 19 nt, Human
ggcuuggggaccagagcug

SEQ ID NO: 3014351 - RNA, 17 nt, Human
gggaagggggcugggac

SEQ ID NO: 3014352 - RNA, 16 nt, Human
gggaagggggcuggga

SEQ ID NO: 3014353 - RNA, 14 nt, Human
gggaagggggcugg

SEQ ID NO: 3014354 - RNA, 16 nt, Human
gggaaggauacaaaag

SEQ ID NO: 3014355 - RNA, 14 nt, Human
ggcuuuugugcauu

SEQ ID NO: 3014356 - RNA, 21 nt, Human
gggaaggauacaaaagcaugu

SEQ ID NO: 3014357 - RNA, 23 nt, Human
gggaaggauacaaaagcauguga

SEQ ID NO: 3014358 - RNA, 17 nt, Human
gggacuacaggcaccca

SEQ ID NO: 3014359 - RNA, 16 nt, Human
gggacucaaugcacug

SEQ ID NO: 3014360 - RNA, 15 nt, Human
gggaccucaggccug

SEQ ID NO: 3014361 - RNA, 13 nt, Human
gggaccucaggcc

SEQ ID NO: 3014362 - RNA, 12 nt, Human
gggaccucaggc

SEQ ID NO: 3014363 - RNA, 22 nt, Human
ggcugcuucaaggauccugagc

SEQ ID NO: 3014364 - RNA, 14 nt, Human
ggcugcuucaagga

SEQ ID NO: 3014365 - RNA, 12 nt, Human
ggcugcuucaag

SEQ ID NO: 3014366 - RNA, 11 nt, Human
ggcugcuucaa

SEQ ID NO: 3014367 - RNA, 12 nt, Human
ggcugcagggag

SEQ ID NO: 3014368 - RNA, 13 nt, Human
ggcugcagggagu

SEQ ID NO: 3014369 - RNA, 14 nt, Human
ggcugcugaaggcu

SEQ ID NO: 3014370 - RNA, 17 nt, Human
ggcugcugaaggcucga

SEQ ID NO: 3014371 - RNA, 15 nt, Human
ggcugcugaaggcuc

SEQ ID NO: 3014372 - RNA, 18 nt, Human
ggcugcugaaggcucgag

SEQ ID NO: 3014373 - RNA, 13 nt, Human
ggcugcugaaggc

SEQ ID NO: 3014374 - RNA, 21 nt, Human
ggcugcuucaaggauccugag

SEQ ID NO: 3014375 - RNA, 23 nt, Human
ggcugcuucaaggauccugagcc

SEQ ID NO: 3014376 - RNA, 19 nt, Human
ggcugggagagccuuccag

SEQ ID NO: 3014377 - RNA, 18 nt, Human
ggcugggagagccuucca

SEQ ID NO: 3014378 - RNA, 19 nt, Human
ggcugggcagaggaaagca

SEQ ID NO: 3014379 - RNA, 15 nt, Human
ggcugggcagaggaa

SEQ ID NO: 3014380 - RNA, 23 nt, Human
ggcugggagagccuuccaggggu

SEQ ID NO: 3014381 - RNA, 20 nt, Human
ggcugggagagccuuccagg

SEQ ID NO: 3014382 - RNA, 14 nt, Human
ggcugggcagagga

SEQ ID NO: 3014383 - RNA, 13 nt, Human
ggcugggcagagg

SEQ ID NO: 3014384 - RNA, 15 nt, Human
ggcugaggugggagg

SEQ ID NO: 3014385 - RNA, 13 nt, Human
ggcugagguggga

SEQ ID NO: 3014386 - RNA, 20 nt, Human
ggccccugcccggcugcgga

SEQ ID NO: 3014387 - RNA, 17 nt, Human
ggcucugccucccauca

SEQ ID NO: 3014388 - RNA, 16 nt, Human
ggccccugcccggcug

SEQ ID NO: 3014389 - RNA, 17 nt, Human
ggccccugcccggcugc

SEQ ID NO: 3014390 - RNA, 24 nt, Human
ggcugcaaaggguaucaggugcug

SEQ ID NO: 3014391 - RNA, 17 nt, Human
ggcugcaccggcuggcc

SEQ ID NO: 3014392 - RNA, 19 nt, Human
ggcugcaccggcuggccug

SEQ ID NO: 3014393 - RNA, 18 nt, Human
ggcugcaccggcuggccu

SEQ ID NO: 3014394 - RNA, 18 nt, Human
ggcugcaaaggguaucag

SEQ ID NO: 3014395 - RNA, 22 nt, Human
ggcugcaaaggguaucaggugc

SEQ ID NO: 3014396 - RNA, 23 nt, Human
ggcugcaaaggguaucaggugcu

SEQ ID NO: 3014397 - RNA, 23 nt, Human
ggagcccugucuccucucucugu

SEQ ID NO: 3014398 - RNA, 20 nt, Human
ggagcaaaaucgaugcagug

SEQ ID NO: 3014399 - RNA, 20 nt, Human
ggagauuuacaacuggggga

SEQ ID NO: 3014400 - RNA, 15 nt, Human
ggagaggggcacagg

SEQ ID NO: 3014401 - RNA, 21 nt, Human
ggagaccccuuggggagcagg

SEQ ID NO: 3014402 - RNA, 21 nt, Human
ggagagcuagcagcagggagg

SEQ ID NO: 3014403 - RNA, 17 nt, Human
ggagagcuagcagcagg

SEQ ID NO: 3014404 - RNA, 20 nt, Human
ggaagccagcaggcucucag

SEQ ID NO: 3014405 - RNA, 15 nt, Human
ggagggcuccagaca

SEQ ID NO: 3014406 - RNA, 14 nt, Human
ggagggcuccagac

SEQ ID NO: 3014407 - RNA, 17 nt, Human
ggagggcuccagacaca

SEQ ID NO: 3014408 - RNA, 20 nt, Human
ggagucccaccuuggcugca

SEQ ID NO: 3014409 - RNA, 11 nt, Human
ggagugacaga

SEQ ID NO: 3014410 - RNA, 16 nt, Human
ggagugacagaggcag

SEQ ID NO: 3014411 - RNA, 16 nt, Human
ggaucacagccucuga

SEQ ID NO: 3014412 - RNA, 12 nt, Human
ggagugagcugg

SEQ ID NO: 3014413 - RNA, 14 nt, Human
ggagugagcugguu

SEQ ID NO: 3014414 - RNA, 21 nt, Human
ggagugaguugauagcacaga

SEQ ID NO: 3014415 - RNA, 17 nt, Human
ggagugacagaggcagc

SEQ ID NO: 3014416 - RNA, 18 nt, Human
ggagugacagaggcagcc

SEQ ID NO: 3014417 - RNA, 19 nt, Human
ggagugacagaggcagccc

SEQ ID NO: 3014418 - RNA, 21 nt, Human
ggagugacagaggcagcccca

SEQ ID NO: 3014419 - RNA, 12 nt, Human
ggagggagggcu

SEQ ID NO: 3014420 - RNA, 13 nt, Human
ggagggcuccaga

SEQ ID NO: 3014421 - RNA, 12 nt, Human
ggagggcuccag

SEQ ID NO: 3014422 - RNA, 21 nt, Human
ggaggaucucuugagccuggg

SEQ ID NO: 3014423 - RNA, 17 nt, Human
ggaggaucucuugagcc

SEQ ID NO: 3014424 - RNA, 23 nt, Human
ggaggaucacuugaguccagaag

SEQ ID NO: 3014425 - RNA, 15 nt, Human
ggaggauguucuggg

SEQ ID NO: 3014426 - RNA, 11 nt, Human
ggccacuguga

SEQ ID NO: 3014427 - RNA, 16 nt, Human
ggccaggagccuccug

SEQ ID NO: 3014428 - RNA, 14 nt, Human
ggccaggagccucc

SEQ ID NO: 3014429 - RNA, 16 nt, Human
ggccacugugaagaga

SEQ ID NO: 3014430 - RNA, 11 nt, Human
ggccaggcugg

SEQ ID NO: 3014431 - RNA, 14 nt, Human
ggccaggccagagg

SEQ ID NO: 3014432 - RNA, 16 nt, Human
ggccaggccagaggga

SEQ ID NO: 3014433 - RNA, 15 nt, Human
ggcagguuggugggg

SEQ ID NO: 3014434 - RNA, 23 nt, Human
ggcauguucucugaggacacuaa

SEQ ID NO: 3014435 - RNA, 22 nt, Human
ggccaccugcggugcuaucucc

SEQ ID NO: 3014436 - RNA, 16 nt, Human
ggccaccugcggugcu

SEQ ID NO: 3014437 - RNA, 17 nt, Human
ggccacaagacccuugu

SEQ ID NO: 3014438 - RNA, 16 nt, Human
ggccacaagacccuug

SEQ ID NO: 3014439 - RNA, 15 nt, Human
ggcauuccccaggag

SEQ ID NO: 3014440 - RNA, 21 nt, Human
ggccccucagggucccuggug

SEQ ID NO: 3014441 - RNA, 20 nt, Human
ggccccucagggucccuggu

SEQ ID NO: 3014442 - RNA, 19 nt, Human
ggccccucagggucccugg

SEQ ID NO: 3014443 - RNA, 16 nt, Human
ggccccucaggguccc

SEQ ID NO: 3014444 - RNA, 17 nt, Human
ggccccugccacccugg

SEQ ID NO: 3014445 - RNA, 18 nt, Human
ggccccugccacccuggg

SEQ ID NO: 3014446 - RNA, 13 nt, Human
ggccccugcccgg

SEQ ID NO: 3014447 - RNA, 13 nt, Human
ggccccugccacc

SEQ ID NO: 3014448 - RNA, 16 nt, Human
ggccccugccacccug

SEQ ID NO: 3014449 - RNA, 12 nt, Human
ggccccugccac

SEQ ID NO: 3014450 - RNA, 13 nt, Human
ggccaugggccuc

SEQ ID NO: 3014451 - RNA, 16 nt, Human
ggcaaggcugucaauu

SEQ ID NO: 3014452 - RNA, 15 nt, Human
ggcacccggccccug

SEQ ID NO: 3014453 - RNA, 16 nt, Human
ggcacccggccccugc

SEQ ID NO: 3014454 - RNA, 12 nt, Human
ggcagagcagag

SEQ ID NO: 3014455 - RNA, 16 nt, Human
ggcagagcagagacca

SEQ ID NO: 3014456 - RNA, 15 nt, Human
ggcagagcagagacc

SEQ ID NO: 3014457 - RNA, 20 nt, Human
ggcagagcagagaccauccc

SEQ ID NO: 3014458 - RNA, 21 nt, Human
ggaucagucugauucccaagc

SEQ ID NO: 3014459 - RNA, 19 nt, Human
ggcaacccccagccugcua

SEQ ID NO: 3014460 - RNA, 15 nt, Human
ggcaaggcugucaau

SEQ ID NO: 3014461 - RNA, 19 nt, Human
ggcaacugcauuggcuuug

SEQ ID NO: 3014462 - RNA, 18 nt, Human
ggcaacugcauuggcuuu

SEQ ID NO: 3014463 - RNA, 17 nt, Human
ggcagaggaaagcaaag

SEQ ID NO: 3014464 - RNA, 23 nt, Human
ggcagauacaggaaaagcugcug

SEQ ID NO: 3014465 - RNA, 23 nt, Human
ggcagaguugaagacagagcuac

SEQ ID NO: 3014466 - RNA, 23 nt, Human
ggcaggucuugaacuccuggccu

SEQ ID NO: 3014467 - RNA, 13 nt, Human
ggcagguccaggg

SEQ ID NO: 3014468 - RNA, 19 nt, Human
ggcagcugcgguccaccca

SEQ ID NO: 3014469 - RNA, 21 nt, Human
ggcagcuugaggguugggcug

SEQ ID NO: 3014470 - RNA, 16 nt, Human
ggcagcucaccucucc

SEQ ID NO: 3014471 - RNA, 22 nt, Human
ggcagcucaccucucccuugga

SEQ ID NO: 3014472 - RNA, 21 nt, Human
ggcagcucaccucucccuugg

SEQ ID NO: 3014473 - RNA, 18 nt, Human
ggcagcucaccucucccu

SEQ ID NO: 3014474 - RNA, 14 nt, Human
gcuuggcccaggag

SEQ ID NO: 3014475 - RNA, 15 nt, Human
gcuuggcccaggagu

SEQ ID NO: 3014476 - RNA, 16 nt, Human
gcuuggcccaggaguu

SEQ ID NO: 3014477 - RNA, 22 nt, Human
gcuuggcccaggaguuuggcca

SEQ ID NO: 3014478 - RNA, 13 nt, Human
gcuuggcccagga

SEQ ID NO: 3014479 - RNA, 23 nt, Human
gcuuggcccaggaguuuggccag

SEQ ID NO: 3014480 - RNA, 22 nt, Human
gcuuuaccaauugaaguaaaau

SEQ ID NO: 3014481 - RNA, 13 nt, Human
ggaaaaauagccu

SEQ ID NO: 3014482 - RNA, 14 nt, Human
ggaaaaacugauuu

SEQ ID NO: 3014483 - RNA, 15 nt, Human
ggaaaaauagccugc

SEQ ID NO: 3014484 - RNA, 14 nt, Human
gcuuuuacuuaaac

SEQ ID NO: 3014485 - RNA, 22 nt, Human
gcuugaggguugggcugguguc

SEQ ID NO: 3014486 - RNA, 15 nt, Human
gcuuggaggaaggaa

SEQ ID NO: 3014487 - RNA, 14 nt, Human
gcuuggaggaagga

SEQ ID NO: 3014488 - RNA, 13 nt, Human
gcuuggaggaagg

SEQ ID NO: 3014489 - RNA, 21 nt, Human
gcuuccagugaggcucugccc

SEQ ID NO: 3014490 - RNA, 20 nt, Human
gcuuccagugaggcucugcc

SEQ ID NO: 3014491 - RNA, 19 nt, Human
gcuuccagugaggcucugc

SEQ ID NO: 3014492 - RNA, 18 nt, Human
gcuuccagugaggcucug

SEQ ID NO: 3014493 - RNA, 10 nt, Human
ggaaaagaau

SEQ ID NO: 3014494 - RNA, 14 nt, Human
ggaaaauaaauuau

SEQ ID NO: 3014495 - RNA, 15 nt, Human
ggaaaaucagccugc

SEQ ID NO: 3014496 - RNA, 17 nt, Human
ggaacagacuggaagca

SEQ ID NO: 3014497 - RNA, 19 nt, Human
ggaacagacuggaagcaca

SEQ ID NO: 3014498 - RNA, 20 nt, Human
ggaacagacuggaagcacag

SEQ ID NO: 3014499 - RNA, 14 nt, Human
ggaagccagcaggc

SEQ ID NO: 3014500 - RNA, 13 nt, Human
ggaagccagcagg

SEQ ID NO: 3014501 - RNA, 18 nt, Human
ggaagccagcaggcucuc

SEQ ID NO: 3014502 - RNA, 17 nt, Human
ggaagccagcaggcucu

SEQ ID NO: 3014503 - RNA, 16 nt, Human
ggaagccagcaggcuc

SEQ ID NO: 3014504 - RNA, 15 nt, Human
ggaagccagcaggcu

SEQ ID NO: 3014505 - RNA, 23 nt, Human
ggaagcacaugccucucucaggc

SEQ ID NO: 3014506 - RNA, 22 nt, Human
ggaagcacaugccucucucagg

SEQ ID NO: 3014507 - RNA, 21 nt, Human
ggaagcacaugccucucucag

SEQ ID NO: 3014508 - RNA, 13 nt, Human
ggaagagccuugc

SEQ ID NO: 3014509 - RNA, 17 nt, Human
ggaagcacagcuucauu

SEQ ID NO: 3014510 - RNA, 17 nt, Human
ggaagcacaugccucuc

SEQ ID NO: 3014511 - RNA, 15 nt, Human
ggaagcacaugccuc

SEQ ID NO: 3014512 - RNA, 14 nt, Human
ggaagcacaugccu

SEQ ID NO: 3014513 - RNA, 13 nt, Human
ggaagcacaugcc

SEQ ID NO: 3014514 - RNA, 17 nt, Human
gcugucuccauguuuga

SEQ ID NO: 3014515 - RNA, 19 nt, Human
gcugucccuuacgugaguc

SEQ ID NO: 3014516 - RNA, 21 nt, Human
gcugucccuuacgugaguccu

SEQ ID NO: 3014517 - RNA, 23 nt, Human
gcugucaauuacaggaaguacug

SEQ ID NO: 3014518 - RNA, 22 nt, Human
gcugucaauuacaggaaguacu

SEQ ID NO: 3014519 - RNA, 19 nt, Human
gcugucaauuacaggaagu

SEQ ID NO: 3014520 - RNA, 17 nt, Human
gcugucaauuacaggaa

SEQ ID NO: 3014521 - RNA, 16 nt, Human
gcuggugucaccugaa

SEQ ID NO: 3014522 - RNA, 18 nt, Human
gcuggugucaccugaaga

SEQ ID NO: 3014523 - RNA, 20 nt, Human
gcuggucccacucaguccau

SEQ ID NO: 3014524 - RNA, 14 nt, Human
gcuggucccacuca

SEQ ID NO: 3014525 - RNA, 15 nt, Human
gcugguucaggguug

SEQ ID NO: 3014526 - RNA, 21 nt, Human
gcugguuagagguucccuuug

SEQ ID NO: 3014527 - RNA, 16 nt, Human
gcugucaauuacagga

SEQ ID NO: 3014528 - RNA, 22 nt, Human
gcugguucaggguuggccccug

SEQ ID NO: 3014529 - RNA, 17 nt, Human
gcugggcuucaguggca

SEQ ID NO: 3014530 - RNA, 21 nt, Human
gcugggaugauuggagggggg

SEQ ID NO: 3014531 - RNA, 22 nt, Human
gcugggagagccuuccaggggu

SEQ ID NO: 3014532 - RNA, 19 nt, Human
gcugggagagccuuccagg

SEQ ID NO: 3014533 - RNA, 18 nt, Human
gcugggagagccuuccag

SEQ ID NO: 3014534 - RNA, 17 nt, Human
gcugggagagccuucca

SEQ ID NO: 3014535 - RNA, 13 nt, Human
gcugggagagccu

SEQ ID NO: 3014536 - RNA, 12 nt, Human
gcugggagagcc

SEQ ID NO: 3014537 - RNA, 19 nt, Human
gcugggggccucagugcca

SEQ ID NO: 3014538 - RNA, 20 nt, Human
gcugggggccucagugccac

SEQ ID NO: 3014539 - RNA, 15 nt, Human
gcuggucccacucag

SEQ ID NO: 3014540 - RNA, 19 nt, Human
gcuggucccacucagucca

SEQ ID NO: 3014541 - RNA, 12 nt, Human
gcuggggccagu

SEQ ID NO: 3014542 - RNA, 23 nt, Human
gcugggggaagaagcucucuccu

SEQ ID NO: 3014543 - RNA, 18 nt, Human
gcugggcuucaguggcag

SEQ ID NO: 3014544 - RNA, 19 nt, Human
gcugggcuucaguggcagc

SEQ ID NO: 3014545 - RNA, 19 nt, Human
gcugggacuacagguguga

SEQ ID NO: 3014546 - RNA, 13 nt, Human
gcugggacuacag

SEQ ID NO: 3014547 - RNA, 18 nt, Human
gcugggacuacaggcacc

SEQ ID NO: 3014548 - RNA, 19 nt, Human
gcugggacuacaggcaccc

SEQ ID NO: 3014549 - RNA, 20 nt, Human
gcugggacuacaggcaccca

SEQ ID NO: 3014550 - RNA, 20 nt, Human
gcugggacaugggaaagggg

SEQ ID NO: 3014551 - RNA, 16 nt, Human
gcuggaccuugaacug

SEQ ID NO: 3014552 - RNA, 18 nt, Human
gcuggaccuugaacuggg

SEQ ID NO: 3014553 - RNA, 22 nt, Human
gcugcuugggcuucauccuccu

SEQ ID NO: 3014554 - RNA, 17 nt, Human
gcugcuugggcuucauc

SEQ ID NO: 3014555 - RNA, 21 nt, Human
gcuggaccuugaacuggguac

SEQ ID NO: 3014556 - RNA, 23 nt, Human
gcugcuucaaggauccugagcca

SEQ ID NO: 3014557 - RNA, 22 nt, Human
gcugcuucaaggauccugagcc

SEQ ID NO: 3014558 - RNA, 21 nt, Human
gcugcuucaaggauccugagc

SEQ ID NO: 3014559 - RNA, 16 nt, Human
gcugcuugggcuucau

SEQ ID NO: 3014560 - RNA, 17 nt, Human
gcugcgguccacccagg

SEQ ID NO: 3014561 - RNA, 18 nt, Human
gcugcgguccacccagga

SEQ ID NO: 3014562 - RNA, 13 nt, Human
gcugcuucaagga

SEQ ID NO: 3014563 - RNA, 16 nt, Human
gcugcgguccacccag

SEQ ID NO: 3014564 - RNA, 14 nt, Human
gcugcccugugagu

SEQ ID NO: 3014565 - RNA, 12 nt, Human
gcugcccuguga

SEQ ID NO: 3014566 - RNA, 11 nt, Human
gcugcccugug

SEQ ID NO: 3014567 - RNA, 19 nt, Human
gccuuuuuauaacuuuuua

SEQ ID NO: 3014568 - RNA, 21 nt, Human
gccuuccaggggugggacacc

SEQ ID NO: 3014569 - RNA, 23 nt, Human
gccuuauggaacacucugagacu

SEQ ID NO: 3014570 - RNA, 22 nt, Human
gccuuauggaacacucugagac

SEQ ID NO: 3014571 - RNA, 21 nt, Human
gccuuauggaacacucugaga

SEQ ID NO: 3014572 - RNA, 19 nt, Human
gccuuacccucauguucuu

SEQ ID NO: 3014573 - RNA, 20 nt, Human
gccuuagaagucacacagua

SEQ ID NO: 3014574 - RNA, 14 nt, Human
gccugguggcagcu

SEQ ID NO: 3014575 - RNA, 15 nt, Human
gccugguggcagcug

SEQ ID NO: 3014576 - RNA, 16 nt, Human
gccugguggcagcugc

SEQ ID NO: 3014577 - RNA, 17 nt, Human
gccugguggcagcugcg

SEQ ID NO: 3014578 - RNA, 22 nt, Human
gcguccugucggagcccugucu

SEQ ID NO: 3014579 - RNA, 14 nt, Human
gcgugagccacugc

SEQ ID NO: 3014580 - RNA, 15 nt, Human
gcgugagccacugca

SEQ ID NO: 3014581 - RNA, 14 nt, Human
gcuaacauggaagu

SEQ ID NO: 3014582 - RNA, 18 nt, Human
gcuaacauggaaguacua

SEQ ID NO: 3014583 - RNA, 17 nt, Human
gcuaacauggaaguacu

SEQ ID NO: 3014584 - RNA, 14 nt, Human
gcuaacuuggguua

SEQ ID NO: 3014585 - RNA, 22 nt, Human
gcuacacaggggaaaagaggag

SEQ ID NO: 3014586 - RNA, 22 nt, Human
gcuagacgagcaggcuucuucc

SEQ ID NO: 3014587 - RNA, 21 nt, Human
gcuagacgagcaggcuucuuc

SEQ ID NO: 3014588 - RNA, 19 nt, Human
gcguccugucggagcccug

SEQ ID NO: 3014589 - RNA, 23 nt, Human
gcggggacagcuccuucuguccu

SEQ ID NO: 3014590 - RNA, 20 nt, Human
gcgguccacccaggagcccc

SEQ ID NO: 3014591 - RNA, 23 nt, Human
gcgguccacccaggagccccgag

SEQ ID NO: 3014592 - RNA, 19 nt, Human
gcggaaugaaccacaucuu

SEQ ID NO: 3014593 - RNA, 16 nt, Human
gcggacagccacggcc

SEQ ID NO: 3014594 - RNA, 19 nt, Human
gcggacagccacggccagg

SEQ ID NO: 3014595 - RNA, 18 nt, Human
gcggggacagcuccuucu

SEQ ID NO: 3014596 - RNA, 19 nt, Human
gcggggacagcuccuucug

SEQ ID NO: 3014597 - RNA, 23 nt, Human
gcggacagccacggccaggccag

SEQ ID NO: 3014598 - RNA, 14 nt, Human
gcgcugccccuggc

SEQ ID NO: 3014599 - RNA, 20 nt, Human
gcgccuacaggagugagcac

SEQ ID NO: 3014600 - RNA, 21 nt, Human
gcgccuacaggagugagcacu

SEQ ID NO: 3014601 - RNA, 18 nt, Human
gcgccuacaggagugagc

SEQ ID NO: 3014602 - RNA, 22 nt, Human
gccucaagugauucuccugccu

SEQ ID NO: 3014603 - RNA, 24 nt, Human
gccucaagugauucuccugccuca

SEQ ID NO: 3014604 - RNA, 18 nt, Human
gccucagcauccuggcac

SEQ ID NO: 3014605 - RNA, 17 nt, Human
gccucagcauccuggca

SEQ ID NO: 3014606 - RNA, 21 nt, Human
gccucagcauccuggcacccg

SEQ ID NO: 3014607 - RNA, 23 nt, Human
gccgucuaccugaggggccucuu

SEQ ID NO: 3014608 - RNA, 22 nt, Human
gccgucuaccugaggggccucu

SEQ ID NO: 3014609 - RNA, 20 nt, Human
gccgucuaccugaggggccu

SEQ ID NO: 3014610 - RNA, 18 nt, Human
gccgucuaccugaggggc

SEQ ID NO: 3014611 - RNA, 13 nt, Human
gccgcagcccugc

SEQ ID NO: 3014612 - RNA, 17 nt, Human
gccgagauagccaaggc

SEQ ID NO: 3014613 - RNA, 15 nt, Human
gccgcagcccugcag

SEQ ID NO: 3014614 - RNA, 17 nt, Human
gccgcagcccugcagag

SEQ ID NO: 3014615 - RNA, 16 nt, Human
gccgcagcccugcaga

SEQ ID NO: 3014616 - RNA, 16 nt, Human
gccgagauagccaagg

SEQ ID NO: 3014617 - RNA, 23 nt, Human
gcccuucucuccagccccuggau

SEQ ID NO: 3014618 - RNA, 13 nt, Human
gcccuucucucca

SEQ ID NO: 3014619 - RNA, 11 nt, Human
gccugcccagg

SEQ ID NO: 3014620 - RNA, 12 nt, Human
gccugcccaggc

SEQ ID NO: 3014621 - RNA, 14 nt, Human
gccuggacccugug

SEQ ID NO: 3014622 - RNA, 15 nt, Human
gccucugacacacag

SEQ ID NO: 3014623 - RNA, 16 nt, Human
gccucugcacuccccu

SEQ ID NO: 3014624 - RNA, 20 nt, Human
gccucugcacuccccugcug

SEQ ID NO: 3014625 - RNA, 19 nt, Human
gccucugcacuccccugcu

SEQ ID NO: 3014626 - RNA, 18 nt, Human
gccucugcacuccccugc

SEQ ID NO: 3014627 - RNA, 17 nt, Human
gccucugcacuccccug

SEQ ID NO: 3014628 - RNA, 15 nt, Human
gccucugcacucccc

SEQ ID NO: 3014629 - RNA, 21 nt, Human
gccucugcacuccccugcugg

SEQ ID NO: 3014630 - RNA, 15 nt, Human
gccucucccaucacu

SEQ ID NO: 3014631 - RNA, 22 nt, Human
gccucagccucccaaagugcug

SEQ ID NO: 3014632 - RNA, 17 nt, Human
gccucccaucacccgcu

SEQ ID NO: 3014633 - RNA, 12 nt, Human
gccucagccucc

SEQ ID NO: 3014634 - RNA, 14 nt, Human
gccucagccuccca

SEQ ID NO: 3014635 - RNA, 20 nt, Human
gccucccgaauagcugggac

SEQ ID NO: 3014636 - RNA, 21 nt, Human
gccucccgaguagcugggacu

SEQ ID NO: 3014637 - RNA, 23 nt, Human
gccucccgaguagcugggacuac

SEQ ID NO: 3014638 - RNA, 18 nt, Human
gccucccgaauagcuggg

SEQ ID NO: 3014639 - RNA, 19 nt, Human
gccucccgaauagcuggga

SEQ ID NO: 3014640 - RNA, 17 nt, Human
gccauuucuuccacaag

SEQ ID NO: 3014641 - RNA, 22 nt, Human
gccauuucuuccacaagagccc

SEQ ID NO: 3014642 - RNA, 20 nt, Human
gccauuucuuccacaagagc

SEQ ID NO: 3014643 - RNA, 15 nt, Human
gcccaccccucaaca

SEQ ID NO: 3014644 - RNA, 19 nt, Human
gcccacaggaucagucuga

SEQ ID NO: 3014645 - RNA, 13 nt, Human
gcccacaggauca

SEQ ID NO: 3014646 - RNA, 18 nt, Human
gcccacaggaucagucug

SEQ ID NO: 3014647 - RNA, 16 nt, Human
gcccaaagaugcagcc

SEQ ID NO: 3014648 - RNA, 15 nt, Human
gcccaaagaugcagc

SEQ ID NO: 3014649 - RNA, 23 nt, Human
gccaggggaaaaucagccugcuc

SEQ ID NO: 3014650 - RNA, 17 nt, Human
gccaggggaaaaucagc

SEQ ID NO: 3014651 - RNA, 22 nt, Human
gccaggggaaaaucagccugcu

SEQ ID NO: 3014652 - RNA, 21 nt, Human
gccaggggaaaaucagccugc

SEQ ID NO: 3014653 - RNA, 19 nt, Human
gccaggaagccagcaggcu

SEQ ID NO: 3014654 - RNA, 11 nt, Human
gccaggaagcc

SEQ ID NO: 3014655 - RNA, 18 nt, Human
gccaggaagccagcaggc

SEQ ID NO: 3014656 - RNA, 17 nt, Human
gccaggaagccagcagg

SEQ ID NO: 3014657 - RNA, 19 nt, Human
gccauccagguucagcuug

SEQ ID NO: 3014658 - RNA, 20 nt, Human
gccauccagguucagcuugu

SEQ ID NO: 3014659 - RNA, 14 nt, Human
gccauccagguuca

SEQ ID NO: 3014660 - RNA, 17 nt, Human
gccaucccagccccaau

SEQ ID NO: 3014661 - RNA, 16 nt, Human
gccaucccagccccaa

SEQ ID NO: 3014662 - RNA, 15 nt, Human
gccaucccagcccca

SEQ ID NO: 3014663 - RNA, 14 nt, Human
gccaucccagcccc

SEQ ID NO: 3014664 - RNA, 13 nt, Human
gccaucccagccc

SEQ ID NO: 3014665 - RNA, 15 nt, Human
gccagagacacaagc

SEQ ID NO: 3014666 - RNA, 12 nt, Human
gccagagacaca

SEQ ID NO: 3014667 - RNA, 17 nt, Human
gccagagggagugacag

SEQ ID NO: 3014668 - RNA, 18 nt, Human
gccagagggagugacaga

SEQ ID NO: 3014669 - RNA, 17 nt, Human
gccacugcaccgggcca

SEQ ID NO: 3014670 - RNA, 18 nt, Human
gccacugcaccgggccac

SEQ ID NO: 3014671 - RNA, 12 nt, Human
gccaaaggaagc

SEQ ID NO: 3014672 - RNA, 14 nt, Human
gccacggccaggcc

SEQ ID NO: 3014673 - RNA, 15 nt, Human
gccacggccaggcca

SEQ ID NO: 3014674 - RNA, 20 nt, Human
gccacuauuguuagucucuu

SEQ ID NO: 3014675 - RNA, 21 nt, Human
gccacuauuguuagucucuug

SEQ ID NO: 3014676 - RNA, 16 nt, Human
gccacggccaggccag

SEQ ID NO: 3014677 - RNA, 17 nt, Human
gccagauucuuuccuga

SEQ ID NO: 3014678 - RNA, 19 nt, Human
gccagagggagugacagag

SEQ ID NO: 3014679 - RNA, 20 nt, Human
gccagagggagugacagagg

SEQ ID NO: 3014680 - RNA, 16 nt, Human
gccagauucuuuccug

SEQ ID NO: 3014681 - RNA, 12 nt, Human
gccagccuugac

SEQ ID NO: 3014682 - RNA, 20 nt, Human
gccagccgagauagccaagg

SEQ ID NO: 3014683 - RNA, 22 nt, Human
gccagccuugaccauucuccac

SEQ ID NO: 3014684 - RNA, 21 nt, Human
gccagccuugaccauucucca

SEQ ID NO: 3014685 - RNA, 20 nt, Human
gccagccuugaccauucucc

SEQ ID NO: 3014686 - RNA, 14 nt, Human
gccagccuugacca

SEQ ID NO: 3014687 - RNA, 15 nt, Human
gccagcugcuugggc

SEQ ID NO: 3014688 - RNA, 14 nt, Human
gccagcugcuuggg

SEQ ID NO: 3014689 - RNA, 23 nt, Human
gccccauccucuguacagagccc

SEQ ID NO: 3014690 - RNA, 17 nt, Human
gccccauucugccugcc

SEQ ID NO: 3014691 - RNA, 18 nt, Human
gccccauucugccugccc

SEQ ID NO: 3014692 - RNA, 20 nt, Human
gccccauucugccugcccag

SEQ ID NO: 3014693 - RNA, 21 nt, Human
gccccauucugccugcccagg

SEQ ID NO: 3014694 - RNA, 15 nt, Human
gccccagugcccaca

SEQ ID NO: 3014695 - RNA, 16 nt, Human
gccccagugcccacag

SEQ ID NO: 3014696 - RNA, 17 nt, Human
gccccagugcccacagg

SEQ ID NO: 3014697 - RNA, 11 nt, Human
gcccaggcugg

SEQ ID NO: 3014698 - RNA, 18 nt, Human
gcccaggccuccuacagc

SEQ ID NO: 3014699 - RNA, 16 nt, Human
gcccaggaaaggcucc

SEQ ID NO: 3014700 - RNA, 15 nt, Human
gcccaggaaaggcuc

SEQ ID NO: 3014701 - RNA, 12 nt, Human
gcccaggaaagg

SEQ ID NO: 3014702 - RNA, 22 nt, Human
gcccagucuggaaugcaguggu

SEQ ID NO: 3014703 - RNA, 20 nt, Human
gcccagucuggaaugcagug

SEQ ID NO: 3014704 - RNA, 16 nt, Human
gcccaggcuggcgugc

SEQ ID NO: 3014705 - RNA, 14 nt, Human
gcccaggcuggcgu

SEQ ID NO: 3014706 - RNA, 15 nt, Human
gcccaggcuggcgug

SEQ ID NO: 3014707 - RNA, 22 nt, Human
gccccgaggccuucucugaagg

SEQ ID NO: 3014708 - RNA, 14 nt, Human
gccccgcccaggcu

SEQ ID NO: 3014709 - RNA, 15 nt, Human
gccccauucugccug

SEQ ID NO: 3014710 - RNA, 23 nt, Human
gccccgaggccuucucugaagga

SEQ ID NO: 3014711 - RNA, 22 nt, Human
gccccauucugccugcccaggc

SEQ ID NO: 3014712 - RNA, 23 nt, Human
gccccauucugccugcccaggcc

SEQ ID NO: 3014713 - RNA, 21 nt, Human
gccccucagggucccuggugg

SEQ ID NO: 3014714 - RNA, 19 nt, Human
gccccucagggucccuggu

SEQ ID NO: 3014715 - RNA, 23 nt, Human
gccccuggcagccccuguucugg

SEQ ID NO: 3014716 - RNA, 19 nt, Human
gccccuucugacccaugcu

SEQ ID NO: 3014717 - RNA, 12 nt, Human
gcccggcuccag

SEQ ID NO: 3014718 - RNA, 13 nt, Human
gcccggcuccagg

SEQ ID NO: 3014719 - RNA, 14 nt, Human
gcccggcuccaggc

SEQ ID NO: 3014720 - RNA, 15 nt, Human
gcccggcuccaggcu

SEQ ID NO: 3014721 - RNA, 12 nt, Human
gcccgggcucug

SEQ ID NO: 3014722 - RNA, 18 nt, Human
gcccgggcucugccuccc

SEQ ID NO: 3014723 - RNA, 15 nt, Human
gcccgggcucugccu

SEQ ID NO: 3014724 - RNA, 14 nt, Human
gcccgggcucugcc

SEQ ID NO: 3014725 - RNA, 13 nt, Human
gcccgggcucugc

SEQ ID NO: 3014726 - RNA, 21 nt, Human
gcccgggcucugccucccauc

SEQ ID NO: 3014727 - RNA, 20 nt, Human
gcccgggcucugccucccau

SEQ ID NO: 3014728 - RNA, 19 nt, Human
gcccgggcucugccuccca

SEQ ID NO: 3014729 - RNA, 22 nt, Human
gcccucugcccacucccugcaa

SEQ ID NO: 3014730 - RNA, 16 nt, Human
gcagugcuuggcccag

SEQ ID NO: 3014731 - RNA, 16 nt, Human
gcagugggagcugccu

SEQ ID NO: 3014732 - RNA, 23 nt, Human
gcagugcuuccaaggauggacca

SEQ ID NO: 3014733 - RNA, 16 nt, Human
gcagggagggcuucug

SEQ ID NO: 3014734 - RNA, 12 nt, Human
gcagggcucagc

SEQ ID NO: 3014735 - RNA, 20 nt, Human
gcaggauucuuccucccucc

SEQ ID NO: 3014736 - RNA, 22 nt, Human
gcauauugcauacuauuaaaca

SEQ ID NO: 3014737 - RNA, 21 nt, Human
gcaucaagaugugacauguuu

SEQ ID NO: 3014738 - RNA, 20 nt, Human
gcauauucaggaagcucagg

SEQ ID NO: 3014739 - RNA, 18 nt, Human
gcauauucaggaagcuca

SEQ ID NO: 3014740 - RNA, 17 nt, Human
gcauauucaggaagcuc

SEQ ID NO: 3014741 - RNA, 15 nt, Human
gcauauucaggaagc

SEQ ID NO: 3014742 - RNA, 17 nt, Human
gcagugggagcugccug

SEQ ID NO: 3014743 - RNA, 18 nt, Human
gcagugggagcugccugu

SEQ ID NO: 3014744 - RNA, 19 nt, Human
gccaaacucaccugccccu

SEQ ID NO: 3014745 - RNA, 21 nt, Human
gccaaacucaccugccccuca

SEQ ID NO: 3014746 - RNA, 14 nt, Human
gccaaaggaagcac

SEQ ID NO: 3014747 - RNA, 20 nt, Human
gccaaaggaagcacaugccu

SEQ ID NO: 3014748 - RNA, 16 nt, Human
gccaaaggaagcacau

SEQ ID NO: 3014749 - RNA, 22 nt, Human
gcauuuugcuaaaugugaauga

SEQ ID NO: 3014750 - RNA, 12 nt, Human
gcauuccccacu

SEQ ID NO: 3014751 - RNA, 23 nt, Human
gcauuugcugaauacagaggcaa

SEQ ID NO: 3014752 - RNA, 21 nt, Human
gcauuuggugguuucagaaau

SEQ ID NO: 3014753 - RNA, 17 nt, Human
gcauuugcugaauacag

SEQ ID NO: 3014754 - RNA, 17 nt, Human
gcauguuugugauugac

SEQ ID NO: 3014755 - RNA, 15 nt, Human
gcaugccuggauggg

SEQ ID NO: 3014756 - RNA, 15 nt, Human
gcaugcugucccuua

SEQ ID NO: 3014757 - RNA, 22 nt, Human
gcaugccuggauggggcugcac

SEQ ID NO: 3014758 - RNA, 17 nt, Human
gcaugccuggauggggc

SEQ ID NO: 3014759 - RNA, 23 nt, Human
gcaugaaguaauaugcacacauu

SEQ ID NO: 3014760 - RNA, 17 nt, Human
gcaucaggccaggcccu

SEQ ID NO: 3014761 - RNA, 16 nt, Human
gcaucaggccaggccc

SEQ ID NO: 3014762 - RNA, 15 nt, Human
gcaucaggccaggcc

SEQ ID NO: 3014763 - RNA, 13 nt, Human
gcaucaggccagg

SEQ ID NO: 3014764 - RNA, 22 nt, Human
gcagaguggcagucuucaguuu

SEQ ID NO: 3014765 - RNA, 13 nt, Human
gcagaguggcagu

SEQ ID NO: 3014766 - RNA, 15 nt, Human
gcagaguugaagaca

SEQ ID NO: 3014767 - RNA, 17 nt, Human
gcagagaccaucccuga

SEQ ID NO: 3014768 - RNA, 15 nt, Human
gcagagaccaucccu

SEQ ID NO: 3014769 - RNA, 14 nt, Human
gcagagaccauccc

SEQ ID NO: 3014770 - RNA, 19 nt, Human
gcagagaaugaaagggccc

SEQ ID NO: 3014771 - RNA, 20 nt, Human
gcagagaaugaaagggccca

SEQ ID NO: 3014772 - RNA, 21 nt, Human
gcagagaaugaaagggcccag

SEQ ID NO: 3014773 - RNA, 21 nt, Human
gcagagaauucucuuauccaa

SEQ ID NO: 3014774 - RNA, 22 nt, Human
gcagagaaugaaagggcccaga

SEQ ID NO: 3014775 - RNA, 23 nt, Human
gcagagaaugaaagggcccagag

SEQ ID NO: 3014776 - RNA, 19 nt, Human
gcagaguugaagacagagc

SEQ ID NO: 3014777 - RNA, 17 nt, Human
gcagaguugaagacaga

SEQ ID NO: 3014778 - RNA, 16 nt, Human
gcagaguugaagacag

SEQ ID NO: 3014779 - RNA, 20 nt, Human
gcagcagggagggcuucugc

SEQ ID NO: 3014780 - RNA, 19 nt, Human
gcagccucaaccuccuggg

SEQ ID NO: 3014781 - RNA, 20 nt, Human
gcagccucaaccuccugggc

SEQ ID NO: 3014782 - RNA, 21 nt, Human
gcagccucaaccuccugggcu

SEQ ID NO: 3014783 - RNA, 22 nt, Human
gcagccucaaccuccugggcua

SEQ ID NO: 3014784 - RNA, 14 nt, Human
gcagccuggacccu

SEQ ID NO: 3014785 - RNA, 14 nt, Human
gcacccggccccug

SEQ ID NO: 3014786 - RNA, 15 nt, Human
gcacccggccccugc

SEQ ID NO: 3014787 - RNA, 17 nt, Human
gcacccggccccugcug

SEQ ID NO: 3014788 - RNA, 14 nt, Human
gcaccuccugccuc

SEQ ID NO: 3014789 - RNA, 15 nt, Human
gcaccuccugccucg

SEQ ID NO: 3014790 - RNA, 19 nt, Human
gcaccacugcacuccagcc

SEQ ID NO: 3014791 - RNA, 16 nt, Human
gcacagcuucauuucc

SEQ ID NO: 3014792 - RNA, 22 nt, Human
gcacaugccucucucaggccaa

SEQ ID NO: 3014793 - RNA, 19 nt, Human
gcacagcuaacauggaagu

SEQ ID NO: 3014794 - RNA, 14 nt, Human
gcaaugaccuuuca

SEQ ID NO: 3014795 - RNA, 13 nt, Human
gcaaugaccuuuc

SEQ ID NO: 3014796 - RNA, 17 nt, Human
gcacuaaggugugcucu

SEQ ID NO: 3014797 - RNA, 18 nt, Human
gcacuaaggugugcucug

SEQ ID NO: 3014798 - RNA, 14 nt, Human
gcacugggcuuggg

SEQ ID NO: 3014799 - RNA, 23 nt, Human
gcacugggcuuggggaccagagc

SEQ ID NO: 3014800 - RNA, 22 nt, Human
gcacugggcuuggggaccagag

SEQ ID NO: 3014801 - RNA, 12 nt, Human
gcagaaggaaga

SEQ ID NO: 3014802 - RNA, 14 nt, Human
gcagaaggaagacu

SEQ ID NO: 3014803 - RNA, 13 nt, Human
gcagaaggaagac

SEQ ID NO: 3014804 - RNA, 15 nt, Human
gcaaacuucagaguu

SEQ ID NO: 3014805 - RNA, 16 nt, Human
gcaaaccaucauugaa

SEQ ID NO: 3014806 - RNA, 21 nt, Human
gcaaaccaucauugaaaucuu

SEQ ID NO: 3014807 - RNA, 20 nt, Human
gcaaaccaucauugaaaucu

SEQ ID NO: 3014808 - RNA, 19 nt, Human
gcaaaccaucauugaaauc

SEQ ID NO: 3014809 - RNA, 17 nt, Human
gcaaaccaucauugaaa

SEQ ID NO: 3014810 - RNA, 18 nt, Human
gcaacugcauuggcuuug

SEQ ID NO: 3014811 - RNA, 17 nt, Human
gcaauccugcaagaaca

SEQ ID NO: 3014812 - RNA, 13 nt, Human
gcaaggcugucaa

SEQ ID NO: 3014813 - RNA, 14 nt, Human
gcaaggucauuuuu

SEQ ID NO: 3014814 - RNA, 18 nt, Human
gcaaggcugucaauuaca

SEQ ID NO: 3014815 - RNA, 14 nt, Human
gcaaggcugucaau

SEQ ID NO: 3014816 - RNA, 18 nt, Human
gcaagcaccuccugccuc

SEQ ID NO: 3014817 - RNA, 20 nt, Human
gcaagcaccuccugccucga

SEQ ID NO: 3014818 - RNA, 15 nt, Human
gcaagcaccuccugc

SEQ ID NO: 3014819 - RNA, 16 nt, Human
gcaagcaccuccugcc

SEQ ID NO: 3014820 - RNA, 20 nt, Human
gauugggcacaucauuucaa

SEQ ID NO: 3014821 - RNA, 20 nt, Human
gauuuaaacacauuaaaggu

SEQ ID NO: 3014822 - RNA, 19 nt, Human
gauuuguuaaugauagcua

SEQ ID NO: 3014823 - RNA, 22 nt, Human
gauuucuguuuagauaauacac

SEQ ID NO: 3014824 - RNA, 21 nt, Human
gauuucuguuuagauaauaca

SEQ ID NO: 3014825 - RNA, 15 nt, Human
gauugcaacaggcug

SEQ ID NO: 3014826 - RNA, 17 nt, Human
gauugcaacaggcuggg

SEQ ID NO: 3014827 - RNA, 18 nt, Human
gauugcaacaggcugggc

SEQ ID NO: 3014828 - RNA, 16 nt, Human
gauugcaacaggcugg

SEQ ID NO: 3014829 - RNA, 22 nt, Human
gauucuuuccugaggcugggcu

SEQ ID NO: 3014830 - RNA, 20 nt, Human
gauucuuuccugaggcuggg

SEQ ID NO: 3014831 - RNA, 16 nt, Human
gauucccaagcucugc

SEQ ID NO: 3014832 - RNA, 17 nt, Human
gauucccaagcucugcu

SEQ ID NO: 3014833 - RNA, 19 nt, Human
gauucuuuccugaggcugg

SEQ ID NO: 3014834 - RNA, 15 nt, Human
gauucccaagcucug

SEQ ID NO: 3014835 - RNA, 13 nt, Human
gauuacaagcgug

SEQ ID NO: 3014836 - RNA, 21 nt, Human
gauuacaagcgugagccacug

SEQ ID NO: 3014837 - RNA, 18 nt, Human
gauucagacagcugccug

SEQ ID NO: 3014838 - RNA, 17 nt, Human
gauucagacagcugccu

SEQ ID NO: 3014839 - RNA, 14 nt, Human
gauucagacagcug

SEQ ID NO: 3014840 - RNA, 13 nt, Human
gauucagacagcu

SEQ ID NO: 3014841 - RNA, 18 nt, Human
gauguucuagcauggcug

SEQ ID NO: 3014842 - RNA, 22 nt, Human
gaugaaugucaguuguuauuua

SEQ ID NO: 3014843 - RNA, 22 nt, Human
gaucuucuguggguuucuaaag

SEQ ID NO: 3014844 - RNA, 19 nt, Human
gaucuucuuuauaauucua

SEQ ID NO: 3014845 - RNA, 15 nt, Human
gaugaaaugagguca

SEQ ID NO: 3014846 - RNA, 21 nt, Human
gaugaaaugaggucagagccu

SEQ ID NO: 3014847 - RNA, 19 nt, Human
gaugcagccucacaguccu

SEQ ID NO: 3014848 - RNA, 14 nt, Human
gaugccugguggca

SEQ ID NO: 3014849 - RNA, 14 nt, Human
gaugcagugcuucc

SEQ ID NO: 3014850 - RNA, 15 nt, Human
gaugccugguggcag

SEQ ID NO: 3014851 - RNA, 16 nt, Human
gaugccugguggcagc

SEQ ID NO: 3014852 - RNA, 18 nt, Human
gaugaccuugaaugaugc

SEQ ID NO: 3014853 - RNA, 23 nt, Human
gaugagaaauaaaguuucuguug

SEQ ID NO: 3014854 - RNA, 14 nt, Human
gaugcaccagcccu

SEQ ID NO: 3014855 - RNA, 14 nt, Human
gaugagaggaaauc

SEQ ID NO: 3014856 - RNA, 15 nt, Human
gaugcaccagcccuu

SEQ ID NO: 3014857 - RNA, 23 nt, Human
gaugcaccagcccuuagcaggga

SEQ ID NO: 3014858 - RNA, 13 nt, Human
gaucauccacugu

SEQ ID NO: 3014859 - RNA, 16 nt, Human
gauccucccaccucag

SEQ ID NO: 3014860 - RNA, 14 nt, Human
gauccuccaggugc

SEQ ID NO: 3014861 - RNA, 21 nt, Human
gauccucccaccucagccucc

SEQ ID NO: 3014862 - RNA, 17 nt, Human
gauccucccaccucagc

SEQ ID NO: 3014863 - RNA, 13 nt, Human
gaucuaggaagac

SEQ ID NO: 3014864 - RNA, 18 nt, Human
gaucuaggaagacuuugg

SEQ ID NO: 3014865 - RNA, 14 nt, Human
gaucuaggaagacu

SEQ ID NO: 3014866 - RNA, 20 nt, Human
gaucuaggaagacuuuggaa

SEQ ID NO: 3014867 - RNA, 12 nt, Human
gauccugagcca

SEQ ID NO: 3014868 - RNA, 20 nt, Human
gaguuauugaagcagagugg

SEQ ID NO: 3014869 - RNA, 19 nt, Human
gaguuauugaagcagagug

SEQ ID NO: 3014870 - RNA, 18 nt, Human
gaguuauugaagcagagu

SEQ ID NO: 3014871 - RNA, 12 nt, Human
gauaauacacca

SEQ ID NO: 3014872 - RNA, 23 nt, Human
gauaauacaccacuacauucugu

SEQ ID NO: 3014873 - RNA, 24 nt, Human
gauaauacaccacuacauucuguu

SEQ ID NO: 3014874 - RNA, 16 nt, Human
gauacaaaagcaugug

SEQ ID NO: 3014875 - RNA, 20 nt, Human
gauagugucccacggugccu

SEQ ID NO: 3014876 - RNA, 18 nt, Human
gauauaugcucugcaugu

SEQ ID NO: 3014877 - RNA, 14 nt, Human
gaucacagccucug

SEQ ID NO: 3014878 - RNA, 23 nt, Human
gaucacggcucacugcagccuca

SEQ ID NO: 3014879 - RNA, 20 nt, Human
gaucacggcucacugcagcc

SEQ ID NO: 3014880 - RNA, 14 nt, Human
gaacaucacagcuu

SEQ ID NO: 3014881 - RNA, 15 nt, Human
gaacacucugagacu

SEQ ID NO: 3014882 - RNA, 14 nt, Human
gaacacucugagac

SEQ ID NO: 3014883 - RNA, 13 nt, Human
gaacacucugaga

SEQ ID NO: 3014884 - RNA, 22 nt, Human
gaaccuuuugagugccuuacac

SEQ ID NO: 3014885 - RNA, 18 nt, Human
gaaccuuuugagugccuu

SEQ ID NO: 3014886 - RNA, 21 nt, Human
gaaccuuuugagugccuuaca

SEQ ID NO: 3014887 - RNA, 19 nt, Human
gaaccuuuugagugccuua

SEQ ID NO: 3014888 - RNA, 20 nt, Human
gaagauucuauguuaauauu

SEQ ID NO: 3014889 - RNA, 23 nt, Human
gaagauucuauguuaauauuuua

SEQ ID NO: 3014890 - RNA, 17 nt, Human
gaagauucuauguuaau

SEQ ID NO: 3014891 - RNA, 17 nt, Human
gaagcauuuacuuugug

SEQ ID NO: 3014892 - RNA, 20 nt, Human
gaagauaauauuaaggaaga

SEQ ID NO: 3014893 - RNA, 23 nt, Human
gaagcccaggaaaggcuccagga

SEQ ID NO: 3014894 - RNA, 23 nt, Human
gaagcccuucuaccuuccugcaa

SEQ ID NO: 3014895 - RNA, 19 nt, Human
gaagcccaggaaaggcucc

SEQ ID NO: 3014896 - RNA, 16 nt, Human
gaagcccaggaaaggc

SEQ ID NO: 3014897 - RNA, 15 nt, Human
gaagcccaggaaagg

SEQ ID NO: 3014898 - RNA, 13 nt, Human
gaagcccaggaaa

SEQ ID NO: 3014899 - RNA, 22 nt, Human
gaagccagcaggcucucaggcc

SEQ ID NO: 3014900 - RNA, 21 nt, Human
gaagccagcaggcucucaggc

SEQ ID NO: 3014901 - RNA, 19 nt, Human
gaagccagcaggcucucag

SEQ ID NO: 3014902 - RNA, 20 nt, Human
gaagccagcaggcucucagg

SEQ ID NO: 3014903 - RNA, 23 nt, Human
gaacuuugaccucugcagcaaua

SEQ ID NO: 3014904 - RNA, 13 nt, Human
gaagacuuuggaa

SEQ ID NO: 3014905 - RNA, 11 nt, Human
gaagacuuugg

SEQ ID NO: 3014906 - RNA, 19 nt, Human
gaagagaaugcacaaacag

SEQ ID NO: 3014907 - RNA, 20 nt, Human
gaagacuuuucuuucagcca

SEQ ID NO: 3014908 - RNA, 17 nt, Human
gaagacuuuggaaagag

SEQ ID NO: 3014909 - RNA, 14 nt, Human
gaagacuuuggaaa

SEQ ID NO: 3014910 - RNA, 23 nt, Human
gaaggugccucuggaugcuguga

SEQ ID NO: 3014911 - RNA, 19 nt, Human
gaagggggcugggacaugg

SEQ ID NO: 3014912 - RNA, 16 nt, Human
gaagggggcugggaca

SEQ ID NO: 3014913 - RNA, 15 nt, Human
gaagggggcugggac

SEQ ID NO: 3014914 - RNA, 14 nt, Human
gaagcggcuggcag

SEQ ID NO: 3014915 - RNA, 18 nt, Human
gaaguacuauaauuuacc

SEQ ID NO: 3014916 - RNA, 15 nt, Human
gaaguacuggagaaa

SEQ ID NO: 3014917 - RNA, 21 nt, Human
gaaguaauaugcacacauuuu

SEQ ID NO: 3014918 - RNA, 22 nt, Human
gaaguaauaugcacacauuuuu

SEQ ID NO: 3014919 - RNA, 20 nt, Human
gaaguuucugccgcagcccu

SEQ ID NO: 3014920 - RNA, 15 nt, Human
gaagucuuagaugua

SEQ ID NO: 3014921 - RNA, 21 nt, Human
gaaguuucugccgcagcccug

SEQ ID NO: 3014922 - RNA, 20 nt, Human
gaaguuugagaucagccugg

SEQ ID NO: 3014923 - RNA, 18 nt, Human
gaauaacauguaauuaag

SEQ ID NO: 3014924 - RNA, 19 nt, Human
gaauaacauguaauuaagu

SEQ ID NO: 3014925 - RNA, 21 nt, Human
gaauacagaggcaacugcauu

SEQ ID NO: 3014926 - RNA, 17 nt, Human
gaauaauacaguaucuc

SEQ ID NO: 3014927 - RNA, 13 nt, Human
gaauaccuguccc

SEQ ID NO: 3014928 - RNA, 15 nt, Human
gaauaccuguccccc

SEQ ID NO: 3014929 - RNA, 23 nt, Human
gaauagcugggacuacaggugug

SEQ ID NO: 3014930 - RNA, 22 nt, Human
gaauagcugggacuacaggugu

SEQ ID NO: 3014931 - RNA, 17 nt, Human
gaaugucaguuguuauu

SEQ ID NO: 3014932 - RNA, 21 nt, Human
gaaugucagugugacugaucu

SEQ ID NO: 3014933 - RNA, 20 nt, Human
gaaugucagugugacugauc

SEQ ID NO: 3014934 - RNA, 17 nt, Human
gaauucucuaguuugau

SEQ ID NO: 3014935 - RNA, 17 nt, Human
gaauucucagaaucuca

SEQ ID NO: 3014936 - RNA, 19 nt, Human
gaauucucuaguuugauua

SEQ ID NO: 3014937 - RNA, 14 nt, Human
gaauugaaaaacca

SEQ ID NO: 3014938 - RNA, 22 nt, Human
gaauugauugggcacaucauuu

SEQ ID NO: 3014939 - RNA, 22 nt, Human
gaauuguaaggaaugauuaauu

SEQ ID NO: 3014940 - RNA, 15 nt, Human
gaauuucccaaagca

SEQ ID NO: 3014941 - RNA, 14 nt, Human
gaaugucaguguga

SEQ ID NO: 3014942 - RNA, 22 nt, Human
gaaugguuuucaaaauaaaaau

SEQ ID NO: 3014943 - RNA, 11 nt, Human
gaaugcagugg

SEQ ID NO: 3014944 - RNA, 23 nt, Human
gaaugaaccacaucuugcucugc

SEQ ID NO: 3014945 - RNA, 22 nt, Human
gaaugaaccacaucuugcucug

SEQ ID NO: 3014946 - RNA, 18 nt, Human
gaaugaaccacaucuugc

SEQ ID NO: 3014947 - RNA, 17 nt, Human
gacuggauaguccgucu

SEQ ID NO: 3014948 - RNA, 16 nt, Human
gacuggauaguccguc

SEQ ID NO: 3014949 - RNA, 22 nt, Human
gacuggauaguccgucucugcu

SEQ ID NO: 3014950 - RNA, 23 nt, Human
gacuggccaagguuuggggaaga

SEQ ID NO: 3014951 - RNA, 18 nt, Human
gacuuacuguacaugaaa

SEQ ID NO: 3014952 - RNA, 23 nt, Human
gacuuacuguacaugaaaacaca

SEQ ID NO: 3014953 - RNA, 15 nt, Human
gacuuacuguacaug

SEQ ID NO: 3014954 - RNA, 16 nt, Human
gacuuacuguacauga

SEQ ID NO: 3014955 - RNA, 12 nt, Human
gacuuacuguac

SEQ ID NO: 3014956 - RNA, 20 nt, Human
gacuucaucccucuggggcu

SEQ ID NO: 3014957 - RNA, 12 nt, Human
gacuucaucccu

SEQ ID NO: 3014958 - RNA, 15 nt, Human
gacucuacagaggcc

SEQ ID NO: 3014959 - RNA, 21 nt, Human
gacucuacagaggccaugggc

SEQ ID NO: 3014960 - RNA, 16 nt, Human
gacugaauuucuuuug

SEQ ID NO: 3014961 - RNA, 18 nt, Human
gacuacaggcacccacca

SEQ ID NO: 3014962 - RNA, 13 nt, Human
gacuacaggcacc

SEQ ID NO: 3014963 - RNA, 15 nt, Human
gacuacaggcaccca

SEQ ID NO: 3014964 - RNA, 21 nt, Human
gacuccugcaggcagccaggc

SEQ ID NO: 3014965 - RNA, 20 nt, Human
gacuccugcaggcagccagg

SEQ ID NO: 3014966 - RNA, 19 nt, Human
gacuccugcaggcagccag

SEQ ID NO: 3014967 - RNA, 18 nt, Human
gacuccugcaggcagcca

SEQ ID NO: 3014968 - RNA, 19 nt, Human
gacccuugccgucuaccug

SEQ ID NO: 3014969 - RNA, 23 nt, Human
gacccuugccgucuaccugaggg

SEQ ID NO: 3014970 - RNA, 20 nt, Human
gacccuugccgucuaccuga

SEQ ID NO: 3014971 - RNA, 14 nt, Human
gaccuucuccuuca

SEQ ID NO: 3014972 - RNA, 16 nt, Human
gaccuucuccuucacc

SEQ ID NO: 3014973 - RNA, 15 nt, Human
gaccuucuccuucac

SEQ ID NO: 3014974 - RNA, 14 nt, Human
gaccuugaacuggg

SEQ ID NO: 3014975 - RNA, 21 nt, Human
gaccuucuccuucaccuuugu

SEQ ID NO: 3014976 - RNA, 20 nt, Human
gaccuucuccuucaccuuug

SEQ ID NO: 3014977 - RNA, 23 nt, Human
gacggagucccaccuuggcugca

SEQ ID NO: 3014978 - RNA, 13 nt, Human
gacggagucccac

SEQ ID NO: 3014979 - RNA, 21 nt, Human
gacgcugugcugcccugccca

SEQ ID NO: 3014980 - RNA, 22 nt, Human
gacgcugugcugcccugcccac

SEQ ID NO: 3014981 - RNA, 20 nt, Human
gaccuuucaauaggaaaaac

SEQ ID NO: 3014982 - RNA, 19 nt, Human
gaccuuucaauaggaaaaa

SEQ ID NO: 3014983 - RNA, 11 nt, Human
gaccuuucaau

SEQ ID NO: 3014984 - RNA, 22 nt, Human
gaccuuuaagagaaaugagcug

SEQ ID NO: 3014985 - RNA, 15 nt, Human
gacguguuaugacuc

SEQ ID NO: 3014986 - RNA, 14 nt, Human
gacguguuaugacu

SEQ ID NO: 3014987 - RNA, 11 nt, Human
gacguguuaug

SEQ ID NO: 3014988 - RNA, 23 nt, Human
gacuaacuugucuuuggacccug

SEQ ID NO: 3014989 - RNA, 16 nt, Human
gacuaacuugucuuug

SEQ ID NO: 3014990 - RNA, 21 nt, Human
gacagagccccacccucagau

SEQ ID NO: 3014991 - RNA, 20 nt, Human
gacagagcuacacaggggaa

SEQ ID NO: 3014992 - RNA, 14 nt, Human
gacagagucucacu

SEQ ID NO: 3014993 - RNA, 23 nt, Human
gacagaggcagccccauucugcc

SEQ ID NO: 3014994 - RNA, 21 nt, Human
gacagagucucacuguugccc

SEQ ID NO: 3014995 - RNA, 16 nt, Human
gacagagugagacucu

SEQ ID NO: 3014996 - RNA, 17 nt, Human
gacagacacaggcccgg

SEQ ID NO: 3014997 - RNA, 16 nt, Human
gacacuagaagauuuu

SEQ ID NO: 3014998 - RNA, 20 nt, Human
gacagacacaggcccggcuc

SEQ ID NO: 3014999 - RNA, 22 nt, Human
gacagacacaggcccggcucca

SEQ ID NO: 3015000 - RNA, 22 nt, Human
gacacgaauauugcugauggug

SEQ ID NO: 3015001 - RNA, 18 nt, Human
gaauuucccaaagcagug

SEQ ID NO: 3015002 - RNA, 16 nt, Human
gaauuucccaaagcag

SEQ ID NO: 3015003 - RNA, 22 nt, Human
gaauuucccaaagcagugcaug

SEQ ID NO: 3015004 - RNA, 13 nt, Human
gacaguuggguuu

SEQ ID NO: 3015005 - RNA, 17 nt, Human
gacaguuggguuuuuua

SEQ ID NO: 3015006 - RNA, 22 nt, Human
gacaguuaagagaaaugagcuu

SEQ ID NO: 3015007 - RNA, 22 nt, Human
gacaggcauguucucugaggac

SEQ ID NO: 3015008 - RNA, 23 nt, Human
gacaucaacugcaucaagaugug

SEQ ID NO: 3015009 - RNA, 16 nt, Human
gacaucaacugcauca

SEQ ID NO: 3015010 - RNA, 23 nt, Human
gacaggcaaugcuggcuguuggc

SEQ ID NO: 3015011 - RNA, 20 nt, Human
gacaggcauguucucugagg

SEQ ID NO: 3015012 - RNA, 21 nt, Human
gacaggcauguucucugagga

SEQ ID NO: 3015013 - RNA, 20 nt, Human
gacaggcaagcaccuccugc

SEQ ID NO: 3015014 - RNA, 21 nt, Human
gacaggcaagcaccuccugcc

SEQ ID NO: 3015015 - RNA, 18 nt, Human
gacaggcaaugcuggcug

SEQ ID NO: 3015016 - RNA, 19 nt, Human
gacaggcaaugcuggcugu

SEQ ID NO: 3015017 - RNA, 13 nt, Human
gacaggcaagcac

SEQ ID NO: 3015018 - RNA, 17 nt, Human
gacaggcaagcaccucc

SEQ ID NO: 3015019 - RNA, 18 nt, Human
gacaggcaagcaccuccu

SEQ ID NO: 3015020 - RNA, 17 nt, Human
gacccaugcugcccugu

SEQ ID NO: 3015021 - RNA, 10 nt, Human
gacccugagg

SEQ ID NO: 3015022 - RNA, 12 nt, Human
gacccugaggcc

SEQ ID NO: 3015023 - RNA, 11 nt, Human
gacccugaggc

SEQ ID NO: 3015024 - RNA, 22 nt, Human
gacccugcccugugggccccca

SEQ ID NO: 3015025 - RNA, 20 nt, Human
gacccugcccugugggcccc

SEQ ID NO: 3015026 - RNA, 17 nt, Human
gacccugcccugugggc

SEQ ID NO: 3015027 - RNA, 16 nt, Human
gacccugaggcccaga

SEQ ID NO: 3015028 - RNA, 18 nt, Human
gacccaugcugcccugug

SEQ ID NO: 3015029 - RNA, 20 nt, Human
gacccaugcugcccugugag

SEQ ID NO: 3015030 - RNA, 19 nt, Human
gacccaugcugcccuguga

SEQ ID NO: 3015031 - RNA, 12 nt, Human
gacccacugcuu

SEQ ID NO: 3015032 - RNA, 18 nt, Human
gaccacaaaacuuuucua

SEQ ID NO: 3015033 - RNA, 21 nt, Human
gaccagagcugccaccugccu

SEQ ID NO: 3015034 - RNA, 23 nt, Human
gaccagacaccuugacagggcac

SEQ ID NO: 3015035 - RNA, 21 nt, Human
gaccagcaccaucucuccucc

SEQ ID NO: 3015036 - RNA, 20 nt, Human
gaccagcaccaucucuccuc

SEQ ID NO: 3015037 - RNA, 16 nt, Human
gaccacguuucuaaag

SEQ ID NO: 3015038 - RNA, 22 nt, Human
gaccagacaccuugacagggca

SEQ ID NO: 3015039 - RNA, 21 nt, Human
gaccagacaccuugacagggc

SEQ ID NO: 3015040 - RNA, 14 nt, Human
cuuuuugaaauguc

SEQ ID NO: 3015041 - RNA, 15 nt, Human
cuuuuucaauaacug

SEQ ID NO: 3015042 - RNA, 22 nt, Human
cuuuuguucuugguuuguaaau

SEQ ID NO: 3015043 - RNA, 20 nt, Human
cuuuuguucuugguuuguaa

SEQ ID NO: 3015044 - RNA, 15 nt, Human
cuuuucuguuugcua

SEQ ID NO: 3015045 - RNA, 21 nt, Human
cuuuguuuguugucagcugaa

SEQ ID NO: 3015046 - RNA, 16 nt, Human
cuuuuuuagaguugau

SEQ ID NO: 3015047 - RNA, 19 nt, Human
gaaaacacuguucucugcc

SEQ ID NO: 3015048 - RNA, 18 nt, Human
gaaaacacuguucucugc

SEQ ID NO: 3015049 - RNA, 21 nt, Human
gaaaacacuguucucugcccu

SEQ ID NO: 3015050 - RNA, 20 nt, Human
gaaaacacuguucucugccc

SEQ ID NO: 3015051 - RNA, 16 nt, Human
gaaaacaugcuacaca

SEQ ID NO: 3015052 - RNA, 18 nt, Human
gaaaacaugcuacacacu

SEQ ID NO: 3015053 - RNA, 19 nt, Human
gaaaacaugcuacacacug

SEQ ID NO: 3015054 - RNA, 23 nt, Human
cuuugggaggccaaggugggagg

SEQ ID NO: 3015055 - RNA, 23 nt, Human
cuuugugaggaagccgcuggggc

SEQ ID NO: 3015056 - RNA, 13 nt, Human
cuuuguggcuucc

SEQ ID NO: 3015057 - RNA, 19 nt, Human
cuuugugaggaagccgcug

SEQ ID NO: 3015058 - RNA, 12 nt, Human
cuuugugauuuu

SEQ ID NO: 3015059 - RNA, 21 nt, Human
cuuuguucuggcucuuccagg

SEQ ID NO: 3015060 - RNA, 16 nt, Human
cuuuguucuggcucuu

SEQ ID NO: 3015061 - RNA, 12 nt, Human
cuuuggaaagac

SEQ ID NO: 3015062 - RNA, 23 nt, Human
cuuuggaaagacuuuuccaaccc

SEQ ID NO: 3015063 - RNA, 14 nt, Human
cuuugcuugaaaga

SEQ ID NO: 3015064 - RNA, 13 nt, Human
cuuucugaaauaa

SEQ ID NO: 3015065 - RNA, 15 nt, Human
cuuuagcgcccaguu

SEQ ID NO: 3015066 - RNA, 16 nt, Human
cuuguacacucauuca

SEQ ID NO: 3015067 - RNA, 14 nt, Human
cuugguuuguaaau

SEQ ID NO: 3015068 - RNA, 15 nt, Human
cuugguuuguaaauu

SEQ ID NO: 3015069 - RNA, 20 nt, Human
cuugggccacugugaagaga

SEQ ID NO: 3015070 - RNA, 18 nt, Human
cuugggccacugugaaga

SEQ ID NO: 3015071 - RNA, 16 nt, Human
cuuguugaggguaugu

SEQ ID NO: 3015072 - RNA, 22 nt, Human
cuuguugaggguauguuuuaua

SEQ ID NO: 3015073 - RNA, 21 nt, Human
cuuguugaggguauguuuuau

SEQ ID NO: 3015074 - RNA, 20 nt, Human
cuuguugaggguauguuuua

SEQ ID NO: 3015075 - RNA, 17 nt, Human
cuuuaccuuuuuuauac

SEQ ID NO: 3015076 - RNA, 19 nt, Human
cuuuaccuuuuuuauacau

SEQ ID NO: 3015077 - RNA, 20 nt, Human
cuuuaccuuuuuuauacaua

SEQ ID NO: 3015078 - RNA, 15 nt, Human
cuuguggucccaccc

SEQ ID NO: 3015079 - RNA, 19 nt, Human
cuuguggucccaccccaca

SEQ ID NO: 3015080 - RNA, 16 nt, Human
cuuguggucccacccc

SEQ ID NO: 3015081 - RNA, 16 nt, Human
cuuguuaagauaguua

SEQ ID NO: 3015082 - RNA, 22 nt, Human
cuugcagcucuccccuucucug

SEQ ID NO: 3015083 - RNA, 21 nt, Human
cuugcagacucuacagaggcc

SEQ ID NO: 3015084 - RNA, 20 nt, Human
cuugcagacucuacagaggc

SEQ ID NO: 3015085 - RNA, 15 nt, Human
cuugcaauggcagcc

SEQ ID NO: 3015086 - RNA, 16 nt, Human
cuugcaauggcagccu

SEQ ID NO: 3015087 - RNA, 17 nt, Human
cuugcaauggcagccuu

SEQ ID NO: 3015088 - RNA, 18 nt, Human
cuugcaauggcagccuug

SEQ ID NO: 3015089 - RNA, 19 nt, Human
cuugaguugauucagcucu

SEQ ID NO: 3015090 - RNA, 18 nt, Human
cuugaguugauucagcuc

SEQ ID NO: 3015091 - RNA, 20 nt, Human
cuugaguugauucagcucug

SEQ ID NO: 3015092 - RNA, 15 nt, Human
cuugaggguugggcu

SEQ ID NO: 3015093 - RNA, 17 nt, Human
cuugaggguugggcugg

SEQ ID NO: 3015094 - RNA, 15 nt, Human
cuugagccugggagg

SEQ ID NO: 3015095 - RNA, 12 nt, Human
cuugagccuggg

SEQ ID NO: 3015096 - RNA, 14 nt, Human
cuugcaugaggcua

SEQ ID NO: 3015097 - RNA, 13 nt, Human
cuugcaugaggcu

SEQ ID NO: 3015098 - RNA, 20 nt, Human
cuuggaagcuccgcuuucua

SEQ ID NO: 3015099 - RNA, 14 nt, Human
cuuggaagcuccgc

SEQ ID NO: 3015100 - RNA, 20 nt, Human
cuugcuucaaccccaugaga

SEQ ID NO: 3015101 - RNA, 22 nt, Human
cuugcucugcugacagacacag

SEQ ID NO: 3015102 - RNA, 14 nt, Human
cuuauuuaaauaga

SEQ ID NO: 3015103 - RNA, 13 nt, Human
cuuauuuaaauag

SEQ ID NO: 3015104 - RNA, 15 nt, Human
cuuauuuaaugaaag

SEQ ID NO: 3015105 - RNA, 19 nt, Human
cuuauuuaaauagaugaca

SEQ ID NO: 3015106 - RNA, 18 nt, Human
cuuauuuaaauagaugac

SEQ ID NO: 3015107 - RNA, 17 nt, Human
cuuagguuggcaaaaag

SEQ ID NO: 3015108 - RNA, 14 nt, Human
cuuagacccucaug

SEQ ID NO: 3015109 - RNA, 11 nt, Human
cuuagacaguc

SEQ ID NO: 3015110 - RNA, 19 nt, Human
cuuagacagucccugccaa

SEQ ID NO: 3015111 - RNA, 18 nt, Human
cuuagacagucccugcca

SEQ ID NO: 3015112 - RNA, 17 nt, Human
cuuagacagucccugcc

SEQ ID NO: 3015113 - RNA, 15 nt, Human
cuuagaagucacaca

SEQ ID NO: 3015114 - RNA, 14 nt, Human
cuuagacagucccu

SEQ ID NO: 3015115 - RNA, 16 nt, Human
cuuagacagucccugc

SEQ ID NO: 3015116 - RNA, 15 nt, Human
cuuagacagucccug

SEQ ID NO: 3015117 - RNA, 13 nt, Human
cuuacuguacaug

SEQ ID NO: 3015118 - RNA, 16 nt, Human
cuuacuguacaugaaa

SEQ ID NO: 3015119 - RNA, 15 nt, Human
cuuacgugaguccug

SEQ ID NO: 3015120 - RNA, 19 nt, Human
cuuaauaaacuguggugcu

SEQ ID NO: 3015121 - RNA, 14 nt, Human
cuuaaucuaaaugg

SEQ ID NO: 3015122 - RNA, 18 nt, Human
cuuaagaaauuuguggaa

SEQ ID NO: 3015123 - RNA, 12 nt, Human
cuuaacuucaca

SEQ ID NO: 3015124 - RNA, 14 nt, Human
cuuaacuucacaua

SEQ ID NO: 3015125 - RNA, 15 nt, Human
cuuaacuucacauau

SEQ ID NO: 3015126 - RNA, 16 nt, Human
cuuaacuucacauauu

SEQ ID NO: 3015127 - RNA, 17 nt, Human
cuuaacuucacauauug

SEQ ID NO: 3015128 - RNA, 22 nt, Human
cuuaacuucacauauugauuuc

SEQ ID NO: 3015129 - RNA, 18 nt, Human
cuguuuguuucugaaagg

SEQ ID NO: 3015130 - RNA, 12 nt, Human
cuguuuagauaa

SEQ ID NO: 3015131 - RNA, 17 nt, Human
cuguuuucucuugagag

SEQ ID NO: 3015132 - RNA, 23 nt, Human
cuguuuguuucugaaagggacgc

SEQ ID NO: 3015133 - RNA, 21 nt, Human
cuguuuguuucugaaagggac

SEQ ID NO: 3015134 - RNA, 21 nt, Human
cuguuuuauuuuaauucaguu

SEQ ID NO: 3015135 - RNA, 14 nt, Human
cuguuuucucuuga

SEQ ID NO: 3015136 - RNA, 13 nt, Human
cuguuuucucuug

SEQ ID NO: 3015137 - RNA, 12 nt, Human
cuucagugccuu

SEQ ID NO: 3015138 - RNA, 11 nt, Human
cuucagugccu

SEQ ID NO: 3015139 - RNA, 18 nt, Human
cuucauuuccugugucuu

SEQ ID NO: 3015140 - RNA, 14 nt, Human
cuucagugccuuau

SEQ ID NO: 3015141 - RNA, 13 nt, Human
cuucagugccuua

SEQ ID NO: 3015142 - RNA, 23 nt, Human
cuuccacaagagcccaggccucc

SEQ ID NO: 3015143 - RNA, 22 nt, Human
cuuccacaagagcccaggccuc

SEQ ID NO: 3015144 - RNA, 11 nt, Human
cuucagcugac

SEQ ID NO: 3015145 - RNA, 14 nt, Human
cuuccagugaggcu

SEQ ID NO: 3015146 - RNA, 15 nt, Human
cuuccagugaggcuc

SEQ ID NO: 3015147 - RNA, 24 nt, Human
cuuccaggggugggacacccugug

SEQ ID NO: 3015148 - RNA, 22 nt, Human
cuuccaggggugggacacccug

SEQ ID NO: 3015149 - RNA, 21 nt, Human
cuuccaggggugggacacccu

SEQ ID NO: 3015150 - RNA, 18 nt, Human
cuucugcuucagccuccc

SEQ ID NO: 3015151 - RNA, 16 nt, Human
cuucugcuucagccuc

SEQ ID NO: 3015152 - RNA, 17 nt, Human
cuucugcuucagccucc

SEQ ID NO: 3015153 - RNA, 15 nt, Human
cuucugccauauucu

SEQ ID NO: 3015154 - RNA, 17 nt, Human
cuucugccauauucugu

SEQ ID NO: 3015155 - RNA, 21 nt, Human
cuucugccauauucuguuggc

SEQ ID NO: 3015156 - RNA, 17 nt, Human
cuucuccaggcuguauc

SEQ ID NO: 3015157 - RNA, 14 nt, Human
cuucuccaggcugu

SEQ ID NO: 3015158 - RNA, 14 nt, Human
cuucuccacccugc

SEQ ID NO: 3015159 - RNA, 15 nt, Human
cuucuccacccugcu

SEQ ID NO: 3015160 - RNA, 19 nt, Human
cuucuccuucaccuuuguc

SEQ ID NO: 3015161 - RNA, 22 nt, Human
cuucuccuucaccuuugucccc

SEQ ID NO: 3015162 - RNA, 13 nt, Human
cuucgcuccugug

SEQ ID NO: 3015163 - RNA, 14 nt, Human
cuucgcuccugugu

SEQ ID NO: 3015164 - RNA, 15 nt, Human
cuucgcuccuguguc

SEQ ID NO: 3015165 - RNA, 21 nt, Human
cuucgggaggucgaggcagga

SEQ ID NO: 3015166 - RNA, 20 nt, Human
cuucgggaggucgaggcagg

SEQ ID NO: 3015167 - RNA, 22 nt, Human
cucccuuccuaugcuguucacu

SEQ ID NO: 3015168 - RNA, 13 nt, Human
cucccuuccucuu

SEQ ID NO: 3015169 - RNA, 14 nt, Human
cucccuuccucuuu

SEQ ID NO: 3015170 - RNA, 17 nt, Human
cucccuuggauuguccc

SEQ ID NO: 3015171 - RNA, 23 nt, Human
cucccuucccaccucucucacuc

SEQ ID NO: 3015172 - RNA, 10 nt, Human
cucccuuccu

SEQ ID NO: 3015173 - RNA, 18 nt, Human
cucccaucucacacauga

SEQ ID NO: 3015174 - RNA, 15 nt, Human
cucccaucucacaca

SEQ ID NO: 3015175 - RNA, 14 nt, Human
cucccaucucacac

SEQ ID NO: 3015176 - RNA, 12 nt, Human
cuccugcaggca

SEQ ID NO: 3015177 - RNA, 14 nt, Human
cuccugcaggcagc

SEQ ID NO: 3015178 - RNA, 13 nt, Human
cuccugcaggcag

SEQ ID NO: 3015179 - RNA, 14 nt, Human
cuccucagaucuuc

SEQ ID NO: 3015180 - RNA, 12 nt, Human
cuccucagaucu

SEQ ID NO: 3015181 - RNA, 15 nt, Human
cuccugugucuugca

SEQ ID NO: 3015182 - RNA, 23 nt, Human
cuccugugucuugcaauggcagc

SEQ ID NO: 3015183 - RNA, 11 nt, Human
cuccugugugu

SEQ ID NO: 3015184 - RNA, 22 nt, Human
cuccugcaggcagccaggccac

SEQ ID NO: 3015185 - RNA, 21 nt, Human
cuccugcaggcagccaggcca

SEQ ID NO: 3015186 - RNA, 15 nt, Human
cuccugcaggcagcc

SEQ ID NO: 3015187 - RNA, 21 nt, Human
cuccuucaccuuuguccccac

SEQ ID NO: 3015188 - RNA, 19 nt, Human
cuccuucaccuuugucccc

SEQ ID NO: 3015189 - RNA, 16 nt, Human
cuccuucaccuuuguc

SEQ ID NO: 3015190 - RNA, 14 nt, Human
cuccuucaccuuug

SEQ ID NO: 3015191 - RNA, 21 nt, Human
cuccuugaaaacacuguucuc

SEQ ID NO: 3015192 - RNA, 11 nt, Human
cuccuucuucc

SEQ ID NO: 3015193 - RNA, 16 nt, Human
cucgaacuggcugcaa

SEQ ID NO: 3015194 - RNA, 13 nt, Human
cuccuucaccuuu

SEQ ID NO: 3015195 - RNA, 14 nt, Human
cuccuucuguccua

SEQ ID NO: 3015196 - RNA, 15 nt, Human
cuccuucuguccuac

SEQ ID NO: 3015197 - RNA, 20 nt, Human
cuccuucuguccuacucugu

SEQ ID NO: 3015198 - RNA, 20 nt, Human
cucgaguuacagacaaagcg

SEQ ID NO: 3015199 - RNA, 16 nt, Human
cucgaguuacagacaa

SEQ ID NO: 3015200 - RNA, 15 nt, Human
cucgcgacaaugcaa

SEQ ID NO: 3015201 - RNA, 13 nt, Human
cucgcgacaaugc

SEQ ID NO: 3015202 - RNA, 13 nt, Human
cucauucauuacu

SEQ ID NO: 3015203 - RNA, 17 nt, Human
cucauucauuacuaaaa

SEQ ID NO: 3015204 - RNA, 13 nt, Human
cucauucuucugu

SEQ ID NO: 3015205 - RNA, 14 nt, Human
cucauucuucugua

SEQ ID NO: 3015206 - RNA, 12 nt, Human
cucauucuucug

SEQ ID NO: 3015207 - RNA, 16 nt, Human
cucauugaccugaggc

SEQ ID NO: 3015208 - RNA, 23 nt, Human
cucauucuucuguacgucugaca

SEQ ID NO: 3015209 - RNA, 15 nt, Human
cucauugaccugagg

SEQ ID NO: 3015210 - RNA, 13 nt, Human
cucauugaccuga

SEQ ID NO: 3015211 - RNA, 21 nt, Human
cucauuagcauuuugcuaaau

SEQ ID NO: 3015212 - RNA, 19 nt, Human
cucaggugucccugcacuu

SEQ ID NO: 3015213 - RNA, 17 nt, Human
cucaggugucccugcac

SEQ ID NO: 3015214 - RNA, 18 nt, Human
cucaggugucccugcacu

SEQ ID NO: 3015215 - RNA, 18 nt, Human
cucauaguaugguggcug

SEQ ID NO: 3015216 - RNA, 19 nt, Human
cucauaguaugguggcugg

SEQ ID NO: 3015217 - RNA, 23 nt, Human
cuaaaagguaugcaaucaaaucu

SEQ ID NO: 3015218 - RNA, 12 nt, Human
cucagggucccu

SEQ ID NO: 3015219 - RNA, 15 nt, Human
cucaggugucccugc

SEQ ID NO: 3015220 - RNA, 16 nt, Human
cucaggugucccugca

SEQ ID NO: 3015221 - RNA, 23 nt, Human
cucagguggggucacucuggcag

SEQ ID NO: 3015222 - RNA, 22 nt, Human
cucagguggggucacucuggca

SEQ ID NO: 3015223 - RNA, 11 nt, Human
cuccacccugc

SEQ ID NO: 3015224 - RNA, 12 nt, Human
cuccacccugcu

SEQ ID NO: 3015225 - RNA, 21 nt, Human
cuccaccugccagggacagag

SEQ ID NO: 3015226 - RNA, 18 nt, Human
cuccaccugccagggaca

SEQ ID NO: 3015227 - RNA, 17 nt, Human
cuccaccugccagggac

SEQ ID NO: 3015228 - RNA, 15 nt, Human
cuccaccugccaggg

SEQ ID NO: 3015229 - RNA, 19 nt, Human
cuccagcucaccagcccca

SEQ ID NO: 3015230 - RNA, 20 nt, Human
cuccagcucaccagccccag

SEQ ID NO: 3015231 - RNA, 19 nt, Human
cuccagcuguucagcuggu

SEQ ID NO: 3015232 - RNA, 18 nt, Human
cuccagcuguucagcugg

SEQ ID NO: 3015233 - RNA, 13 nt, Human
cuccagcuguuca

SEQ ID NO: 3015234 - RNA, 11 nt, Human
cuccaggcucc

SEQ ID NO: 3015235 - RNA, 14 nt, Human
cuccaugugggcua

SEQ ID NO: 3015236 - RNA, 15 nt, Human
cucccaggcauuccc

SEQ ID NO: 3015237 - RNA, 21 nt, Human
cucccaaggggcccaaauucu

SEQ ID NO: 3015238 - RNA, 22 nt, Human
cucccaaggggcccaaauucuu

SEQ ID NO: 3015239 - RNA, 22 nt, Human
cucccaggcauuccccaggagg

SEQ ID NO: 3015240 - RNA, 21 nt, Human
cucccaggcauuccccaggag

SEQ ID NO: 3015241 - RNA, 20 nt, Human
cucccaggcauuccccagga

SEQ ID NO: 3015242 - RNA, 19 nt, Human
cucccaggcauuccccagg

SEQ ID NO: 3015243 - RNA, 17 nt, Human
cucccaggcauucccca

SEQ ID NO: 3015244 - RNA, 16 nt, Human
cugaacuucagagcau

SEQ ID NO: 3015245 - RNA, 15 nt, Human
cugaacuuggcgcug

SEQ ID NO: 3015246 - RNA, 21 nt, Human
cugaacuuggcgcugccccug

SEQ ID NO: 3015247 - RNA, 16 nt, Human
cugaacuuggcgcugc

SEQ ID NO: 3015248 - RNA, 19 nt, Human
cugaagacucauucuucug

SEQ ID NO: 3015249 - RNA, 21 nt, Human
cugaagacucauucuucugua

SEQ ID NO: 3015250 - RNA, 21 nt, Human
cugaaccuggguaacuaggga

SEQ ID NO: 3015251 - RNA, 18 nt, Human
cucuuugggccuggcucc

SEQ ID NO: 3015252 - RNA, 21 nt, Human
cucuuuggucuacacugugcu

SEQ ID NO: 3015253 - RNA, 19 nt, Human
cucuuuggucuacacugug

SEQ ID NO: 3015254 - RNA, 14 nt, Human
cugaagucacacag

SEQ ID NO: 3015255 - RNA, 15 nt, Human
cugaagucacacagu

SEQ ID NO: 3015256 - RNA, 24 nt, Human
cugaagucuuuguacagacaacaa

SEQ ID NO: 3015257 - RNA, 16 nt, Human
cugaauacagaggcaa

SEQ ID NO: 3015258 - RNA, 11 nt, Human
cugacccacug

SEQ ID NO: 3015259 - RNA, 17 nt, Human
cugacauuguuggccaa

SEQ ID NO: 3015260 - RNA, 20 nt, Human
cugacaggcaaugcuggcug

SEQ ID NO: 3015261 - RNA, 16 nt, Human
cugacaggcaaugcug

SEQ ID NO: 3015262 - RNA, 17 nt, Human
cugacaggcaaugcugg

SEQ ID NO: 3015263 - RNA, 18 nt, Human
cugacaggcaaugcuggc

SEQ ID NO: 3015264 - RNA, 19 nt, Human
cugacaggcaaugcuggcu

SEQ ID NO: 3015265 - RNA, 11 nt, Human
cugacaggcaa

SEQ ID NO: 3015266 - RNA, 21 nt, Human
cugacagacacaggcccggcu

SEQ ID NO: 3015267 - RNA, 19 nt, Human
cugacagacacaggcccgg

SEQ ID NO: 3015268 - RNA, 19 nt, Human
cucuggcagcucagagagg

SEQ ID NO: 3015269 - RNA, 18 nt, Human
cucuggcagcucagagag

SEQ ID NO: 3015270 - RNA, 17 nt, Human
cucuggcagcucagaga

SEQ ID NO: 3015271 - RNA, 13 nt, Human
cucuuaaaaccca

SEQ ID NO: 3015272 - RNA, 24 nt, Human
cucuuaaaacccaagugccuuagc

SEQ ID NO: 3015273 - RNA, 12 nt, Human
cucuucuccagg

SEQ ID NO: 3015274 - RNA, 23 nt, Human
cucuuccaggcugggagagccuu

SEQ ID NO: 3015275 - RNA, 21 nt, Human
cucuuccaggcugggagagcc

SEQ ID NO: 3015276 - RNA, 22 nt, Human
cucuuccaggcugggagagccu

SEQ ID NO: 3015277 - RNA, 19 nt, Human
cucuugguccugcugcagu

SEQ ID NO: 3015278 - RNA, 18 nt, Human
cucuugguccugcugcag

SEQ ID NO: 3015279 - RNA, 16 nt, Human
cucuugaccucaggug

SEQ ID NO: 3015280 - RNA, 13 nt, Human
cucuugaccucag

SEQ ID NO: 3015281 - RNA, 15 nt, Human
cucuugaccucaggu

SEQ ID NO: 3015282 - RNA, 17 nt, Human
cucuuucuauuguuucu

SEQ ID NO: 3015283 - RNA, 18 nt, Human
cucuuuggacacucacac

SEQ ID NO: 3015284 - RNA, 15 nt, Human
cucuuuggacacuca

SEQ ID NO: 3015285 - RNA, 17 nt, Human
cucuuuccaucuacccu

SEQ ID NO: 3015286 - RNA, 22 nt, Human
cucuccuguaccucuugagccu

SEQ ID NO: 3015287 - RNA, 17 nt, Human
cucuccuguaccucuug

SEQ ID NO: 3015288 - RNA, 18 nt, Human
cucuccuguaccucuuga

SEQ ID NO: 3015289 - RNA, 13 nt, Human
cucuccuguaccu

SEQ ID NO: 3015290 - RNA, 14 nt, Human
cucuccuguaccuc

SEQ ID NO: 3015291 - RNA, 15 nt, Human
cucuccuguaccucu

SEQ ID NO: 3015292 - RNA, 14 nt, Human
cucucucacuccuu

SEQ ID NO: 3015293 - RNA, 12 nt, Human
cucucucaggcc

SEQ ID NO: 3015294 - RNA, 16 nt, Human
cucucucacuccuuga

SEQ ID NO: 3015295 - RNA, 15 nt, Human
cucucucacuccuug

SEQ ID NO: 3015296 - RNA, 22 nt, Human
cucucaggccagcugcuugggc

SEQ ID NO: 3015297 - RNA, 23 nt, Human
cucucaggccagcugcuugggcu

SEQ ID NO: 3015298 - RNA, 13 nt, Human
cucucccaucacu

SEQ ID NO: 3015299 - RNA, 20 nt, Human
cucucccaucacuucccuac

SEQ ID NO: 3015300 - RNA, 14 nt, Human
cucucccaucacuu

SEQ ID NO: 3015301 - RNA, 18 nt, Human
cucucccaucacuucccu

SEQ ID NO: 3015302 - RNA, 12 nt, Human
cucuccagcccc

SEQ ID NO: 3015303 - RNA, 13 nt, Human
cucuccagccccu

SEQ ID NO: 3015304 - RNA, 14 nt, Human
cucugccucugaca

SEQ ID NO: 3015305 - RNA, 23 nt, Human
cucugcccuccaagaccuucucc

SEQ ID NO: 3015306 - RNA, 16 nt, Human
cucugcccuccaagac

SEQ ID NO: 3015307 - RNA, 15 nt, Human
cucugcccuccaaga

SEQ ID NO: 3015308 - RNA, 14 nt, Human
cucugcccuccaag

SEQ ID NO: 3015309 - RNA, 22 nt, Human
cucugcaagaauugaagcagga

SEQ ID NO: 3015310 - RNA, 16 nt, Human
cucugaggacacuaac

SEQ ID NO: 3015311 - RNA, 20 nt, Human
cuggacacuucacgcccuug

SEQ ID NO: 3015312 - RNA, 22 nt, Human
cuggacacuucacgcccuuggc

SEQ ID NO: 3015313 - RNA, 14 nt, Human
cuggaaugcagugg

SEQ ID NO: 3015314 - RNA, 15 nt, Human
cuggaaugcaguggu

SEQ ID NO: 3015315 - RNA, 14 nt, Human
cuggaagcacagcu

SEQ ID NO: 3015316 - RNA, 18 nt, Human
cuggaagcacagcuucau

SEQ ID NO: 3015317 - RNA, 15 nt, Human
cuggaagcacagcuu

SEQ ID NO: 3015318 - RNA, 23 nt, Human
cuggccuagcauacguacacauu

SEQ ID NO: 3015319 - RNA, 13 nt, Human
cuggcccacugca

SEQ ID NO: 3015320 - RNA, 12 nt, Human
cuggcccacugc

SEQ ID NO: 3015321 - RNA, 17 nt, Human
cuggccuagcauacgua

SEQ ID NO: 3015322 - RNA, 21 nt, Human
cuggccagaugcaccagcccu

SEQ ID NO: 3015323 - RNA, 17 nt, Human
cuggccagaugcaccag

SEQ ID NO: 3015324 - RNA, 18 nt, Human
cuggccagaugcaccagc

SEQ ID NO: 3015325 - RNA, 19 nt, Human
cuggccagaugcaccagcc

SEQ ID NO: 3015326 - RNA, 20 nt, Human
cuggccagaugcaccagccc

SEQ ID NO: 3015327 - RNA, 17 nt, Human
cuggcacugcuuccagu

SEQ ID NO: 3015328 - RNA, 16 nt, Human
cuggcacugcuuccag

SEQ ID NO: 3015329 - RNA, 15 nt, Human
cuggcacugcuucca

SEQ ID NO: 3015330 - RNA, 16 nt, Human
cuggccagaugcacca

SEQ ID NO: 3015331 - RNA, 15 nt, Human
cuggauggggcugca

SEQ ID NO: 3015332 - RNA, 13 nt, Human
cuggauuaaacuu

SEQ ID NO: 3015333 - RNA, 23 nt, Human
cuggauuaaacuuaaucuaaaug

SEQ ID NO: 3015334 - RNA, 16 nt, Human
cuggauggggcugcac

SEQ ID NO: 3015335 - RNA, 14 nt, Human
cuggcacugcuucc

SEQ ID NO: 3015336 - RNA, 13 nt, Human
cuggcacugcuuc

SEQ ID NO: 3015337 - RNA, 23 nt, Human
cuggcacuauaauguaagcucua

SEQ ID NO: 3015338 - RNA, 22 nt, Human
cuggcacuauaauguaagcucu

SEQ ID NO: 3015339 - RNA, 13 nt, Human
cuggccugagcug

SEQ ID NO: 3015340 - RNA, 17 nt, Human
cuggcucuuccaggcug

SEQ ID NO: 3015341 - RNA, 20 nt, Human
cuggcucuuccaggcuggga

SEQ ID NO: 3015342 - RNA, 19 nt, Human
cuggcucuuccaggcuggg

SEQ ID NO: 3015343 - RNA, 18 nt, Human
cuggcucuuccaggcugg

SEQ ID NO: 3015344 - RNA, 19 nt, Human
cuggcuguuggcugggggc

SEQ ID NO: 3015345 - RNA, 21 nt, Human
cuggcuggguggcaccagcag

SEQ ID NO: 3015346 - RNA, 18 nt, Human
cuggcuguuggcuggggg

SEQ ID NO: 3015347 - RNA, 20 nt, Human
cuggcuguuggcugggggcc

SEQ ID NO: 3015348 - RNA, 20 nt, Human
cugggcaaugugauaaaacc

SEQ ID NO: 3015349 - RNA, 16 nt, Human
cugggagugagcuggu

SEQ ID NO: 3015350 - RNA, 13 nt, Human
cugggagugagcu

SEQ ID NO: 3015351 - RNA, 12 nt, Human
cugggagugagc

SEQ ID NO: 3015352 - RNA, 18 nt, Human
cugggaggucaaggcugc

SEQ ID NO: 3015353 - RNA, 21 nt, Human
cugggcuucaguggcagcugc

SEQ ID NO: 3015354 - RNA, 22 nt, Human
cugggcuucaguggcagcugcu

SEQ ID NO: 3015355 - RNA, 23 nt, Human
cugggcuucaguggcagcugcuu

SEQ ID NO: 3015356 - RNA, 13 nt, Human
cugggcuugggga

SEQ ID NO: 3015357 - RNA, 20 nt, Human
cugggcuuggggaccagagc

SEQ ID NO: 3015358 - RNA, 17 nt, Human
cugggcuuggggaccag

SEQ ID NO: 3015359 - RNA, 21 nt, Human
cugggcuuggggaccagagcu

SEQ ID NO: 3015360 - RNA, 18 nt, Human
cugggcuucaguggcagc

SEQ ID NO: 3015361 - RNA, 17 nt, Human
cugggcuucaguggcag

SEQ ID NO: 3015362 - RNA, 19 nt, Human
cugggcuucaguggcagcu

SEQ ID NO: 3015363 - RNA, 20 nt, Human
cugggcuucaguggcagcug

SEQ ID NO: 3015364 - RNA, 19 nt, Human
cuggguacuuguggacaca

SEQ ID NO: 3015365 - RNA, 21 nt, Human
cuggguacuuguggacacagc

SEQ ID NO: 3015366 - RNA, 23 nt, Human
cuggguacuuguggacacagcuc

SEQ ID NO: 3015367 - RNA, 20 nt, Human
cuggguacuuguggacacag

SEQ ID NO: 3015368 - RNA, 23 nt, Human
cugggguggggaccucaggccug

SEQ ID NO: 3015369 - RNA, 22 nt, Human
cugggguggggaccucaggccu

SEQ ID NO: 3015370 - RNA, 21 nt, Human
cugggguggggaccucaggcc

SEQ ID NO: 3015371 - RNA, 13 nt, Human
cugggggccucag

SEQ ID NO: 3015372 - RNA, 17 nt, Human
cugggggccucagugcc

SEQ ID NO: 3015373 - RNA, 18 nt, Human
cugggggccucagugcca

SEQ ID NO: 3015374 - RNA, 17 nt, Human
cugggguggggaccuca

SEQ ID NO: 3015375 - RNA, 19 nt, Human
cugggguggggaccucagg

SEQ ID NO: 3015376 - RNA, 18 nt, Human
cugggguggggaccucag

SEQ ID NO: 3015377 - RNA, 19 nt, Human
cugguggcagugggagcug

SEQ ID NO: 3015378 - RNA, 23 nt, Human
cugguggcagugggagcugccug

SEQ ID NO: 3015379 - RNA, 19 nt, Human
cuggguucuacccaggugc

SEQ ID NO: 3015380 - RNA, 13 nt, Human
cuggguuggaggg

SEQ ID NO: 3015381 - RNA, 17 nt, Human
cugguccauagagagca

SEQ ID NO: 3015382 - RNA, 15 nt, Human
cugguccauagagag

SEQ ID NO: 3015383 - RNA, 15 nt, Human
cuggucccacucagu

SEQ ID NO: 3015384 - RNA, 18 nt, Human
cuggucccacucagucca

SEQ ID NO: 3015385 - RNA, 14 nt, Human
cuggucccacucag

SEQ ID NO: 3015386 - RNA, 18 nt, Human
cugguccauagagagcaa

SEQ ID NO: 3015387 - RNA, 17 nt, Human
cugcagggacagagcau

SEQ ID NO: 3015388 - RNA, 22 nt, Human
cugcagggaguccgaaagggac

SEQ ID NO: 3015389 - RNA, 22 nt, Human
cugcagccucaaccuccugggc

SEQ ID NO: 3015390 - RNA, 19 nt, Human
cugcagccucaaccuccug

SEQ ID NO: 3015391 - RNA, 20 nt, Human
cugcagccucaaccuccugg

SEQ ID NO: 3015392 - RNA, 11 nt, Human
cugcagccuca

SEQ ID NO: 3015393 - RNA, 14 nt, Human
cugcacuugcagac

SEQ ID NO: 3015394 - RNA, 16 nt, Human
cugcacuugcagacuc

SEQ ID NO: 3015395 - RNA, 17 nt, Human
cugcacuugcagacucu

SEQ ID NO: 3015396 - RNA, 19 nt, Human
cugcaccggcuggccuggc

SEQ ID NO: 3015397 - RNA, 18 nt, Human
cugcaccggcuggccugg

SEQ ID NO: 3015398 - RNA, 17 nt, Human
cugcaccggcuggccug

SEQ ID NO: 3015399 - RNA, 16 nt, Human
cugcacaagcugcacc

SEQ ID NO: 3015400 - RNA, 15 nt, Human
cugcacaagcugcac

SEQ ID NO: 3015401 - RNA, 14 nt, Human
cugcacaagcugca

SEQ ID NO: 3015402 - RNA, 13 nt, Human
cugcacaagcugc

SEQ ID NO: 3015403 - RNA, 18 nt, Human
cugcacccucaggcaggu

SEQ ID NO: 3015404 - RNA, 16 nt, Human
cugcacccucaggcag

SEQ ID NO: 3015405 - RNA, 17 nt, Human
cugcacccucaggcagg

SEQ ID NO: 3015406 - RNA, 22 nt, Human
cugauucccaagcucugcuccu

SEQ ID NO: 3015407 - RNA, 19 nt, Human
cugauucccaagcucugcu

SEQ ID NO: 3015408 - RNA, 20 nt, Human
cugauucccaagcucugcuc

SEQ ID NO: 3015409 - RNA, 17 nt, Human
cugauucccaagcucug

SEQ ID NO: 3015410 - RNA, 18 nt, Human
cugauucccaagcucugc

SEQ ID NO: 3015411 - RNA, 15 nt, Human
cugauucccaagcuc

SEQ ID NO: 3015412 - RNA, 22 nt, Human
cugagugggggaucacagccuc

SEQ ID NO: 3015413 - RNA, 13 nt, Human
cugauaaagauga

SEQ ID NO: 3015414 - RNA, 16 nt, Human
cugagucugaaggcug

SEQ ID NO: 3015415 - RNA, 15 nt, Human
cugagucugaaggcu

SEQ ID NO: 3015416 - RNA, 14 nt, Human
cugagucugaaggc

SEQ ID NO: 3015417 - RNA, 13 nt, Human
cugagucugaagg

SEQ ID NO: 3015418 - RNA, 16 nt, Human
cugccauuucugagau

SEQ ID NO: 3015419 - RNA, 13 nt, Human
cugcccaggcccc

SEQ ID NO: 3015420 - RNA, 20 nt, Human
cugcccggcaggguccuaga

SEQ ID NO: 3015421 - RNA, 16 nt, Human
cugccccuggcagccc

SEQ ID NO: 3015422 - RNA, 15 nt, Human
cugccccuggcagcc

SEQ ID NO: 3015423 - RNA, 14 nt, Human
cugccccuggcagc

SEQ ID NO: 3015424 - RNA, 16 nt, Human
cugcccugcccaccug

SEQ ID NO: 3015425 - RNA, 15 nt, Human
cugcccugcccaccu

SEQ ID NO: 3015426 - RNA, 14 nt, Human
cugcccugcccacc

SEQ ID NO: 3015427 - RNA, 13 nt, Human
cugcccugcccac

SEQ ID NO: 3015428 - RNA, 11 nt, Human
cugcccggcug

SEQ ID NO: 3015429 - RNA, 15 nt, Human
cugcccggcugcgga

SEQ ID NO: 3015430 - RNA, 19 nt, Human
cugcccuccaagaccuucu

SEQ ID NO: 3015431 - RNA, 15 nt, Human
cugccacccugggga

SEQ ID NO: 3015432 - RNA, 16 nt, Human
cugccacccuggggag

SEQ ID NO: 3015433 - RNA, 20 nt, Human
cugccacccuggggagaaag

SEQ ID NO: 3015434 - RNA, 14 nt, Human
cugccacccugggg

SEQ ID NO: 3015435 - RNA, 19 nt, Human
cugccaugccagcuuaucu

SEQ ID NO: 3015436 - RNA, 17 nt, Human
cugccaugccagcuuau

SEQ ID NO: 3015437 - RNA, 15 nt, Human
cugccaugccagcuu

SEQ ID NO: 3015438 - RNA, 19 nt, Human
cugccagccgagauagcca

SEQ ID NO: 3015439 - RNA, 19 nt, Human
cugccaggaagccagcagg

SEQ ID NO: 3015440 - RNA, 18 nt, Human
cugccaggaagccagcag

SEQ ID NO: 3015441 - RNA, 16 nt, Human
cugccaggaagccagc

SEQ ID NO: 3015442 - RNA, 15 nt, Human
cugccaggaagccag

SEQ ID NO: 3015443 - RNA, 14 nt, Human
cugcuccagcuguu

SEQ ID NO: 3015444 - RNA, 16 nt, Human
cugcgguccacccagg

SEQ ID NO: 3015445 - RNA, 21 nt, Human
cugcggaaugaaccacaucuu

SEQ ID NO: 3015446 - RNA, 15 nt, Human
cugcgguccacccag

SEQ ID NO: 3015447 - RNA, 20 nt, Human
cugcggaaugaaccacaucu

SEQ ID NO: 3015448 - RNA, 16 nt, Human
cugcuccucuccccag

SEQ ID NO: 3015449 - RNA, 17 nt, Human
cugcuccucuccccagc

SEQ ID NO: 3015450 - RNA, 15 nt, Human
cugcuccagcuguuc

SEQ ID NO: 3015451 - RNA, 18 nt, Human
cugcuccucuccccagca

SEQ ID NO: 3015452 - RNA, 23 nt, Human
cugccugaagucacacagugagu

SEQ ID NO: 3015453 - RNA, 13 nt, Human
cugccucuucucu

SEQ ID NO: 3015454 - RNA, 13 nt, Human
cugccugcccagg

SEQ ID NO: 3015455 - RNA, 14 nt, Human
cugccugcccaggc

SEQ ID NO: 3015456 - RNA, 23 nt, Human
cugccuguugggccaggagccuc

SEQ ID NO: 3015457 - RNA, 13 nt, Human
cugccucagccuc

SEQ ID NO: 3015458 - RNA, 14 nt, Human
ccucaauugugaaa

SEQ ID NO: 3015459 - RNA, 17 nt, Human
ccucacaguccuuacca

SEQ ID NO: 3015460 - RNA, 18 nt, Human
ccucaauaaacauuucau

SEQ ID NO: 3015461 - RNA, 17 nt, Human
ccucaccuuucccaucu

SEQ ID NO: 3015462 - RNA, 15 nt, Human
ccucaccccacugug

SEQ ID NO: 3015463 - RNA, 12 nt, Human
ccucaccccacu

SEQ ID NO: 3015464 - RNA, 22 nt, Human
ccucacaguccuuaccagcaga

SEQ ID NO: 3015465 - RNA, 20 nt, Human
ccucacaguccuuaccagca

SEQ ID NO: 3015466 - RNA, 23 nt, Human
ccgcuuucuacccagcgagcccu

SEQ ID NO: 3015467 - RNA, 12 nt, Human
ccggcuggccug

SEQ ID NO: 3015468 - RNA, 15 nt, Human
ccgggcacucagaag

SEQ ID NO: 3015469 - RNA, 13 nt, Human
ccggcuggccugg

SEQ ID NO: 3015470 - RNA, 22 nt, Human
cccuuuuucaauaacuggaaca

SEQ ID NO: 3015471 - RNA, 17 nt, Human
cccuuuuucaauaacug

SEQ ID NO: 3015472 - RNA, 18 nt, Human
cccuuuuuuggcugcuga

SEQ ID NO: 3015473 - RNA, 17 nt, Human
cccuuuuuuggcugcug

SEQ ID NO: 3015474 - RNA, 13 nt, Human
cccuuuucuguuu

SEQ ID NO: 3015475 - RNA, 11 nt, Human
cccuuuuccuu

SEQ ID NO: 3015476 - RNA, 19 nt, Human
cccuuuuuuggcugcugaa

SEQ ID NO: 3015477 - RNA, 22 nt, Human
ccgagauagccaaggccaaagg

SEQ ID NO: 3015478 - RNA, 19 nt, Human
ccgagauagccaaggccaa

SEQ ID NO: 3015479 - RNA, 18 nt, Human
ccgagauagccaaggcca

SEQ ID NO: 3015480 - RNA, 17 nt, Human
ccgagaaggaagccucc

SEQ ID NO: 3015481 - RNA, 18 nt, Human
ccgagaucacgccacugc

SEQ ID NO: 3015482 - RNA, 17 nt, Human
ccgaggccuucucugaa

SEQ ID NO: 3015483 - RNA, 20 nt, Human
cccuuugacgccaucccagc

SEQ ID NO: 3015484 - RNA, 18 nt, Human
cccuuguggucccacccc

SEQ ID NO: 3015485 - RNA, 16 nt, Human
cccuuguggucccacc

SEQ ID NO: 3015486 - RNA, 14 nt, Human
cccuugugguccca

SEQ ID NO: 3015487 - RNA, 18 nt, Human
cccuuggggagcaggcuc

SEQ ID NO: 3015488 - RNA, 22 nt, Human
cccuugccgucuaccugagggg

SEQ ID NO: 3015489 - RNA, 18 nt, Human
cccuugccgucuaccuga

SEQ ID NO: 3015490 - RNA, 17 nt, Human
cccuugccgucuaccug

SEQ ID NO: 3015491 - RNA, 16 nt, Human
cccugugucauuucaa

SEQ ID NO: 3015492 - RNA, 18 nt, Human
cccugugggcccccaaau

SEQ ID NO: 3015493 - RNA, 15 nt, Human
cccuguuuguuucug

SEQ ID NO: 3015494 - RNA, 15 nt, Human
cccugugggccccca

SEQ ID NO: 3015495 - RNA, 16 nt, Human
cccugugggcccccaa

SEQ ID NO: 3015496 - RNA, 17 nt, Human
ccccucagggucccugg

SEQ ID NO: 3015497 - RNA, 20 nt, Human
ccccucagggucccuggugg

SEQ ID NO: 3015498 - RNA, 18 nt, Human
ccccucagggucccuggu

SEQ ID NO: 3015499 - RNA, 15 nt, Human
cccugguggcagugg

SEQ ID NO: 3015500 - RNA, 16 nt, Human
cccugguggcaguggg

SEQ ID NO: 3015501 - RNA, 19 nt, Human
cccugguggcagugggagc

SEQ ID NO: 3015502 - RNA, 21 nt, Human
cccccgcugucagccauuccu

SEQ ID NO: 3015503 - RNA, 12 nt, Human
cccccagcccca

SEQ ID NO: 3015504 - RNA, 22 nt, Human
ccccaggaggccagccuugacc

SEQ ID NO: 3015505 - RNA, 21 nt, Human
ccccaggaggccagccuugac

SEQ ID NO: 3015506 - RNA, 15 nt, Human
ccccaggaggccagc

SEQ ID NO: 3015507 - RNA, 14 nt, Human
ccccaggaggccag

SEQ ID NO: 3015508 - RNA, 13 nt, Human
ccccaggaggcca

SEQ ID NO: 3015509 - RNA, 13 nt, Human
ccccacuggugac

SEQ ID NO: 3015510 - RNA, 12 nt, Human
ccccacugguga

SEQ ID NO: 3015511 - RNA, 23 nt, Human
ccucuguacagagcccacgcccc

SEQ ID NO: 3015512 - RNA, 18 nt, Human
ccucuguacagagcccac

SEQ ID NO: 3015513 - RNA, 17 nt, Human
ccucuguacagagccca

SEQ ID NO: 3015514 - RNA, 16 nt, Human
ccucuguacagagccc

SEQ ID NO: 3015515 - RNA, 15 nt, Human
ccucuguacagagcc

SEQ ID NO: 3015516 - RNA, 14 nt, Human
ccucuguacagagc

SEQ ID NO: 3015517 - RNA, 14 nt, Human
ccucuuagaaaaac

SEQ ID NO: 3015518 - RNA, 14 nt, Human
ccucuuaugggcug

SEQ ID NO: 3015519 - RNA, 16 nt, Human
ccucuuaugggcuggg

SEQ ID NO: 3015520 - RNA, 15 nt, Human
ccucuuaugggcugg

SEQ ID NO: 3015521 - RNA, 15 nt, Human
ccugaagucacacag

SEQ ID NO: 3015522 - RNA, 13 nt, Human
ccugaaggccccg

SEQ ID NO: 3015523 - RNA, 16 nt, Human
ccugaagucacacagu

SEQ ID NO: 3015524 - RNA, 17 nt, Human
ccugaagucacacagug

SEQ ID NO: 3015525 - RNA, 17 nt, Human
ccucuuaugggcugggu

SEQ ID NO: 3015526 - RNA, 22 nt, Human
ccucuuuggucuacacugugcu

SEQ ID NO: 3015527 - RNA, 18 nt, Human
ccugaugcuucuucagag

SEQ ID NO: 3015528 - RNA, 17 nt, Human
ccugaugcuucuucaga

SEQ ID NO: 3015529 - RNA, 23 nt, Human
ccugauugugucucuugguccug

SEQ ID NO: 3015530 - RNA, 14 nt, Human
ccugaugcuucuuc

SEQ ID NO: 3015531 - RNA, 14 nt, Human
ccugaggcccuucu

SEQ ID NO: 3015532 - RNA, 12 nt, Human
ccugaggcccag

SEQ ID NO: 3015533 - RNA, 14 nt, Human
ccugaggcccagag

SEQ ID NO: 3015534 - RNA, 13 nt, Human
ccugaggcccaga

SEQ ID NO: 3015535 - RNA, 16 nt, Human
ccugacaacacucauu

SEQ ID NO: 3015536 - RNA, 15 nt, Human
ccugacaacacucau

SEQ ID NO: 3015537 - RNA, 14 nt, Human
ccugacaacacuca

SEQ ID NO: 3015538 - RNA, 12 nt, Human
ccugacaacacu

SEQ ID NO: 3015539 - RNA, 23 nt, Human
ccugaggcccuucucuccagccc

SEQ ID NO: 3015540 - RNA, 22 nt, Human
ccugaggcccuucucuccagcc

SEQ ID NO: 3015541 - RNA, 21 nt, Human
ccugaggcccuucucuccagc

SEQ ID NO: 3015542 - RNA, 20 nt, Human
ccugaggcccuucucuccag

SEQ ID NO: 3015543 - RNA, 19 nt, Human
ccugaggcccuucucucca

SEQ ID NO: 3015544 - RNA, 17 nt, Human
ccugaggcccuucucuc

SEQ ID NO: 3015545 - RNA, 16 nt, Human
ccugaggcccuucucu

SEQ ID NO: 3015546 - RNA, 23 nt, Human
ccuccugugugugcgccuacagg

SEQ ID NO: 3015547 - RNA, 12 nt, Human
ccucucccauca

SEQ ID NO: 3015548 - RNA, 16 nt, Human
ccucugacacacagcu

SEQ ID NO: 3015549 - RNA, 15 nt, Human
ccucugacacacagc

SEQ ID NO: 3015550 - RNA, 23 nt, Human
ccucugaaaaccaauguucucuc

SEQ ID NO: 3015551 - RNA, 17 nt, Human
ccucugacacacagcuc

SEQ ID NO: 3015552 - RNA, 18 nt, Human
ccucugacacacagcucu

SEQ ID NO: 3015553 - RNA, 15 nt, Human
ccucugcacaagcug

SEQ ID NO: 3015554 - RNA, 11 nt, Human
ccucugcacaa

SEQ ID NO: 3015555 - RNA, 19 nt, Human
ccucugcacaagcugcacc

SEQ ID NO: 3015556 - RNA, 17 nt, Human
ccucugcacaagcugca

SEQ ID NO: 3015557 - RNA, 20 nt, Human
ccucugcacaagcugcaccc

SEQ ID NO: 3015558 - RNA, 22 nt, Human
ccucugcacuccccugcugggu

SEQ ID NO: 3015559 - RNA, 21 nt, Human
ccucugcacuccccugcuggg

SEQ ID NO: 3015560 - RNA, 20 nt, Human
ccucugcacuccccugcugg

SEQ ID NO: 3015561 - RNA, 19 nt, Human
ccucugcacuccccugcug

SEQ ID NO: 3015562 - RNA, 14 nt, Human
ccucugcacucccc

SEQ ID NO: 3015563 - RNA, 12 nt, Human
ccucugggacug

SEQ ID NO: 3015564 - RNA, 14 nt, Human
ccucagggucccug

SEQ ID NO: 3015565 - RNA, 11 nt, Human
ccucaggccug

SEQ ID NO: 3015566 - RNA, 10 nt, Human
ccucaggccu

SEQ ID NO: 3015567 - RNA, 21 nt, Human
ccucaggccugggggcugggc

SEQ ID NO: 3015568 - RNA, 14 nt, Human
ccucaggccugggg

SEQ ID NO: 3015569 - RNA, 16 nt, Human
ccucagcauccuggca

SEQ ID NO: 3015570 - RNA, 17 nt, Human
ccucagcauccuggcac

SEQ ID NO: 3015571 - RNA, 14 nt, Human
ccucagcauccugg

SEQ ID NO: 3015572 - RNA, 16 nt, Human
ccucaggugagaagca

SEQ ID NO: 3015573 - RNA, 22 nt, Human
ccucagggucccugguggcagc

SEQ ID NO: 3015574 - RNA, 15 nt, Human
ccucagggucccugg

SEQ ID NO: 3015575 - RNA, 22 nt, Human
ccucaggugauccacccaccuc

SEQ ID NO: 3015576 - RNA, 22 nt, Human
ccucaggugagaagcagaggaa

SEQ ID NO: 3015577 - RNA, 17 nt, Human
ccucaggugauccaccc

SEQ ID NO: 3015578 - RNA, 19 nt, Human
ccucaggugauccacccac

SEQ ID NO: 3015579 - RNA, 15 nt, Human
ccucagucuggcccu

SEQ ID NO: 3015580 - RNA, 13 nt, Human
ccuccugggcuaa

SEQ ID NO: 3015581 - RNA, 13 nt, Human
ccuccugugugug

SEQ ID NO: 3015582 - RNA, 15 nt, Human
ccuccugugugugcg

SEQ ID NO: 3015583 - RNA, 22 nt, Human
ccuccugugugugcgccuacag

SEQ ID NO: 3015584 - RNA, 16 nt, Human
ccucccucccucuuuc

SEQ ID NO: 3015585 - RNA, 13 nt, Human
ccucccucccucu

SEQ ID NO: 3015586 - RNA, 15 nt, Human
ccucccucccucuuu

SEQ ID NO: 3015587 - RNA, 13 nt, Human
cgcuccugugucu

SEQ ID NO: 3015588 - RNA, 20 nt, Human
cggaaugaaccacaucuugc

SEQ ID NO: 3015589 - RNA, 15 nt, Human
cggacagccacggcc

SEQ ID NO: 3015590 - RNA, 16 nt, Human
cggacagccacggcca

SEQ ID NO: 3015591 - RNA, 18 nt, Human
cggacagccacggccagg

SEQ ID NO: 3015592 - RNA, 20 nt, Human
cgggaggauguucugggaca

SEQ ID NO: 3015593 - RNA, 16 nt, Human
cgggaggucgaggcag

SEQ ID NO: 3015594 - RNA, 17 nt, Human
cgggaggucgaggcagg

SEQ ID NO: 3015595 - RNA, 15 nt, Human
cgggcaugacacgaa

SEQ ID NO: 3015596 - RNA, 12 nt, Human
cgggcaugacac

SEQ ID NO: 3015597 - RNA, 18 nt, Human
cggcuggccuggccccuc

SEQ ID NO: 3015598 - RNA, 14 nt, Human
cggcuggccuggcc

SEQ ID NO: 3015599 - RNA, 16 nt, Human
cggcuggccuggcccc

SEQ ID NO: 3015600 - RNA, 15 nt, Human
cggcuggccuggccc

SEQ ID NO: 3015601 - RNA, 12 nt, Human
cgauuucuguuu

SEQ ID NO: 3015602 - RNA, 23 nt, Human
cgcacuucgggaggucgaggcag

SEQ ID NO: 3015603 - RNA, 19 nt, Human
cgaucuggguucacugcaa

SEQ ID NO: 3015604 - RNA, 21 nt, Human
cgauucuucugcuucagccuc

SEQ ID NO: 3015605 - RNA, 13 nt, Human
cgauucuucugcu

SEQ ID NO: 3015606 - RNA, 19 nt, Human
cgauucuucugcuucagcc

SEQ ID NO: 3015607 - RNA, 15 nt, Human
ccuuuguauucucuc

SEQ ID NO: 3015608 - RNA, 18 nt, Human
ccuuuguauucucuccug

SEQ ID NO: 3015609 - RNA, 20 nt, Human
ccuuuguauucucuccugua

SEQ ID NO: 3015610 - RNA, 18 nt, Human
cgaggccuucucugaagg

SEQ ID NO: 3015611 - RNA, 19 nt, Human
cgaggccuucucugaagga

SEQ ID NO: 3015612 - RNA, 13 nt, Human
cgaggacagggag

SEQ ID NO: 3015613 - RNA, 12 nt, Human
cgaggacaggga

SEQ ID NO: 3015614 - RNA, 16 nt, Human
ccuuugcuugaaagaa

SEQ ID NO: 3015615 - RNA, 23 nt, Human
ccuuugacgccaucccagcccca

SEQ ID NO: 3015616 - RNA, 12 nt, Human
ccuuggcugcag

SEQ ID NO: 3015617 - RNA, 13 nt, Human
ccuuggcugcagg

SEQ ID NO: 3015618 - RNA, 20 nt, Human
ccuuguggucccaccccaca

SEQ ID NO: 3015619 - RNA, 19 nt, Human
ccuuguggucccaccccac

SEQ ID NO: 3015620 - RNA, 16 nt, Human
ccuuguggucccaccc

SEQ ID NO: 3015621 - RNA, 13 nt, Human
ccuuuaagagaaa

SEQ ID NO: 3015622 - RNA, 14 nt, Human
cgcagacaggacca

SEQ ID NO: 3015623 - RNA, 13 nt, Human
cgcagacaggacc

SEQ ID NO: 3015624 - RNA, 15 nt, Human
cgcccccacugguga

SEQ ID NO: 3015625 - RNA, 15 nt, Human
cgcgacaaugcaaac

SEQ ID NO: 3015626 - RNA, 17 nt, Human
cgcgacaaugcaaacca

SEQ ID NO: 3015627 - RNA, 16 nt, Human
cgcgacaaugcaaacc

SEQ ID NO: 3015628 - RNA, 21 nt, Human
cgcuaagagggagggagggcu

SEQ ID NO: 3015629 - RNA, 14 nt, Human
cgcuaagagggagg

SEQ ID NO: 3015630 - RNA, 16 nt, Human
cgcuaagagggaggga

SEQ ID NO: 3015631 - RNA, 15 nt, Human
cgcuaagagggaggg

SEQ ID NO: 3015632 - RNA, 16 nt, Human
cgcgugcacacaccag

SEQ ID NO: 3015633 - RNA, 19 nt, Human
cgcgugcacacaccagagc

SEQ ID NO: 3015634 - RNA, 20 nt, Human
cgcgugcacacaccagagcc

SEQ ID NO: 3015635 - RNA, 22 nt, Human
cgugcaguggugcgaucugggu

SEQ ID NO: 3015636 - RNA, 22 nt, Human
cgugcacacaccagagcccacc

SEQ ID NO: 3015637 - RNA, 14 nt, Human
cgugcauaccacuu

SEQ ID NO: 3015638 - RNA, 18 nt, Human
cgugcauaccacuuuugu

SEQ ID NO: 3015639 - RNA, 19 nt, Human
cgugcauaccacuuuuguu

SEQ ID NO: 3015640 - RNA, 20 nt, Human
cgugcacacaccagagccca

SEQ ID NO: 3015641 - RNA, 21 nt, Human
cgugcacacaccagagcccac

SEQ ID NO: 3015642 - RNA, 14 nt, Human
cguccccugucccc

SEQ ID NO: 3015643 - RNA, 11 nt, Human
cguccccuguc

SEQ ID NO: 3015644 - RNA, 13 nt, Human
cgucugacaggca

SEQ ID NO: 3015645 - RNA, 14 nt, Human
cgucugacaggcaa

SEQ ID NO: 3015646 - RNA, 14 nt, Human
cgucuaccugaggg

SEQ ID NO: 3015647 - RNA, 23 nt, Human
cggugcuaucucccccagcccca

SEQ ID NO: 3015648 - RNA, 17 nt, Human
cguggcugcuucaagga

SEQ ID NO: 3015649 - RNA, 15 nt, Human
cguggcugcuucaag

SEQ ID NO: 3015650 - RNA, 14 nt, Human
cguggcugcuucaa

SEQ ID NO: 3015651 - RNA, 12 nt, Human
cguggcugcuuc

SEQ ID NO: 3015652 - RNA, 20 nt, Human
cguuucuaugacacaugcaa

SEQ ID NO: 3015653 - RNA, 19 nt, Human
cguuucuaaaggcuaccuu

SEQ ID NO: 3015654 - RNA, 21 nt, Human
cguuucuaaaggcuaccuuug

SEQ ID NO: 3015655 - RNA, 19 nt, Human
ccugcugguucaggguugg

SEQ ID NO: 3015656 - RNA, 13 nt, Human
ccugcugguucag

SEQ ID NO: 3015657 - RNA, 21 nt, Human
ccugcuggguguggcgcagca

SEQ ID NO: 3015658 - RNA, 12 nt, Human
ccugcuccagcu

SEQ ID NO: 3015659 - RNA, 22 nt, Human
ccugcuccagcuguucagcugg

SEQ ID NO: 3015660 - RNA, 14 nt, Human
ccugcuccagcugu

SEQ ID NO: 3015661 - RNA, 13 nt, Human
ccugcuccagcug

SEQ ID NO: 3015662 - RNA, 18 nt, Human
ccugcaacaccuuguuuc

SEQ ID NO: 3015663 - RNA, 16 nt, Human
ccugcaaccugauugu

SEQ ID NO: 3015664 - RNA, 19 nt, Human
ccugcaacaccuuguuucc

SEQ ID NO: 3015665 - RNA, 23 nt, Human
ccugcgucucauacucaccucac

SEQ ID NO: 3015666 - RNA, 14 nt, Human
ccuggacccugugg

SEQ ID NO: 3015667 - RNA, 13 nt, Human
ccuggacccugug

SEQ ID NO: 3015668 - RNA, 14 nt, Human
ccuggcaugggaau

SEQ ID NO: 3015669 - RNA, 17 nt, Human
ccuggcaugggaaugaa

SEQ ID NO: 3015670 - RNA, 16 nt, Human
ccuggcaugggaauga

SEQ ID NO: 3015671 - RNA, 16 nt, Human
ccuggcagccccuguu

SEQ ID NO: 3015672 - RNA, 14 nt, Human
ccuggcagccccug

SEQ ID NO: 3015673 - RNA, 21 nt, Human
ccuggcacugcuuccagugag

SEQ ID NO: 3015674 - RNA, 17 nt, Human
ccuggcacugcuuccag

SEQ ID NO: 3015675 - RNA, 20 nt, Human
ccuggcacugcuuccaguga

SEQ ID NO: 3015676 - RNA, 18 nt, Human
ccuggcaugggaaugaau

SEQ ID NO: 3015677 - RNA, 14 nt, Human
ccuggccccucagg

SEQ ID NO: 3015678 - RNA, 20 nt, Human
ccugggaggucaaggcugca

SEQ ID NO: 3015679 - RNA, 20 nt, Human
ccugggaucccucauccuca

SEQ ID NO: 3015680 - RNA, 16 nt, Human
ccugggaucccucauc

SEQ ID NO: 3015681 - RNA, 14 nt, Human
ccugggcagaagga

SEQ ID NO: 3015682 - RNA, 12 nt, Human
ccugggcagaag

SEQ ID NO: 3015683 - RNA, 18 nt, Human
ccuguccccgcacugggc

SEQ ID NO: 3015684 - RNA, 16 nt, Human
ccugucccccugacaa

SEQ ID NO: 3015685 - RNA, 17 nt, Human
ccugucccccugacaac

SEQ ID NO: 3015686 - RNA, 20 nt, Human
ccugugaguacuacaguccu

SEQ ID NO: 3015687 - RNA, 17 nt, Human
ccugugauggggcccug

SEQ ID NO: 3015688 - RNA, 19 nt, Human
ccugugauggggcccugcc

SEQ ID NO: 3015689 - RNA, 18 nt, Human
ccugugauggggcccugc

SEQ ID NO: 3015690 - RNA, 22 nt, Human
ccugugauggggcccugccucc

SEQ ID NO: 3015691 - RNA, 21 nt, Human
ccugugauggggcccugccuc

SEQ ID NO: 3015692 - RNA, 20 nt, Human
ccugugauggggcccugccu

SEQ ID NO: 3015693 - RNA, 19 nt, Human
ccugugccucugggacugg

SEQ ID NO: 3015694 - RNA, 15 nt, Human
ccugugccucuggga

SEQ ID NO: 3015695 - RNA, 17 nt, Human
ccugugccucugggacu

SEQ ID NO: 3015696 - RNA, 23 nt, Human
ccuguagagugggagcugagugg

SEQ ID NO: 3015697 - RNA, 19 nt, Human
ccuguagagugggagcuga

SEQ ID NO: 3015698 - RNA, 21 nt, Human
ccuguagagugggagcugagu

SEQ ID NO: 3015699 - RNA, 20 nt, Human
ccuguaauccuagcacuuug

SEQ ID NO: 3015700 - RNA, 12 nt, Human
ccuguaccucuu

SEQ ID NO: 3015701 - RNA, 18 nt, Human
ccugguggcagcucaccu

SEQ ID NO: 3015702 - RNA, 17 nt, Human
ccugguggcagcucacc

SEQ ID NO: 3015703 - RNA, 16 nt, Human
ccugguggcagcucac

SEQ ID NO: 3015704 - RNA, 14 nt, Human
ccugguggcagcuc

SEQ ID NO: 3015705 - RNA, 12 nt, Human
ccugguggcagc

SEQ ID NO: 3015706 - RNA, 13 nt, Human
ccugguggcagcu

SEQ ID NO: 3015707 - RNA, 12 nt, Human
ccuucagugccu

SEQ ID NO: 3015708 - RNA, 14 nt, Human
ccuucagugccuua

SEQ ID NO: 3015709 - RNA, 13 nt, Human
ccuucagugccuu

SEQ ID NO: 3015710 - RNA, 19 nt, Human
ccuucagugccuuauggaa

SEQ ID NO: 3015711 - RNA, 15 nt, Human
ccuucagugccuuau

SEQ ID NO: 3015712 - RNA, 20 nt, Human
ccuucagugccuuauggaac

SEQ ID NO: 3015713 - RNA, 14 nt, Human
ccuuccucuuucca

SEQ ID NO: 3015714 - RNA, 22 nt, Human
ccuuccaggggugggacacccu

SEQ ID NO: 3015715 - RNA, 18 nt, Human
ccuuccaggggugggaca

SEQ ID NO: 3015716 - RNA, 16 nt, Human
ccuuccagggguggga

SEQ ID NO: 3015717 - RNA, 15 nt, Human
ccuuccagggguggg

SEQ ID NO: 3015718 - RNA, 17 nt, Human
ccuuagacagucccugc

SEQ ID NO: 3015719 - RNA, 16 nt, Human
ccuuagacagucccug

SEQ ID NO: 3015720 - RNA, 19 nt, Human
ccuuagacagucccugcca

SEQ ID NO: 3015721 - RNA, 18 nt, Human
ccuuagacagucccugcc

SEQ ID NO: 3015722 - RNA, 21 nt, Human
ccuuagacagucccugccaau

SEQ ID NO: 3015723 - RNA, 14 nt, Human
ccuuagacaguccc

SEQ ID NO: 3015724 - RNA, 14 nt, Human
ccuuaccugccagg

SEQ ID NO: 3015725 - RNA, 20 nt, Human
ccuuaccucggugccuuccu

SEQ ID NO: 3015726 - RNA, 19 nt, Human
ccuuacccucauguucuua

SEQ ID NO: 3015727 - RNA, 17 nt, Human
ccuuaccagcagagcac

SEQ ID NO: 3015728 - RNA, 16 nt, Human
ccuuaccagcagagca

SEQ ID NO: 3015729 - RNA, 15 nt, Human
ccuuaccagcagagc

SEQ ID NO: 3015730 - RNA, 14 nt, Human
ccuuaccagcagag

SEQ ID NO: 3015731 - RNA, 20 nt, Human
ccuugaguugauucagcucu

SEQ ID NO: 3015732 - RNA, 21 nt, Human
ccuugaccauucuccaccugc

SEQ ID NO: 3015733 - RNA, 23 nt, Human
ccuugaguugauucagcucugca

SEQ ID NO: 3015734 - RNA, 22 nt, Human
ccuugaguugauucagcucugc

SEQ ID NO: 3015735 - RNA, 19 nt, Human
ccuuggauuguccccgacc

SEQ ID NO: 3015736 - RNA, 14 nt, Human
ccuugacagggcac

SEQ ID NO: 3015737 - RNA, 13 nt, Human
ccuugacagggca

SEQ ID NO: 3015738 - RNA, 15 nt, Human
ccuugacagggcaca

SEQ ID NO: 3015739 - RNA, 17 nt, Human
ccuugacagggcacacc

SEQ ID NO: 3015740 - RNA, 20 nt, Human
ccuugaccauucuccaccug

SEQ ID NO: 3015741 - RNA, 19 nt, Human
ccuugaccauucuccaccu

SEQ ID NO: 3015742 - RNA, 15 nt, Human
ccuugaaaacacugu

SEQ ID NO: 3015743 - RNA, 13 nt, Human
ccuucgcuccugu

SEQ ID NO: 3015744 - RNA, 14 nt, Human
ccuucgcuccugug

SEQ ID NO: 3015745 - RNA, 15 nt, Human
ccuucgcuccugugu

SEQ ID NO: 3015746 - RNA, 18 nt, Human
ccuucgcuccugugucuu

SEQ ID NO: 3015747 - RNA, 14 nt, Human
ccuugaacugggua

SEQ ID NO: 3015748 - RNA, 22 nt, Human
ccuugaaaacacuguucucugc

SEQ ID NO: 3015749 - RNA, 21 nt, Human
ccuugaaaacacuguucucug

SEQ ID NO: 3015750 - RNA, 19 nt, Human
ccuugaaaacacuguucuc

SEQ ID NO: 3015751 - RNA, 16 nt, Human
ccuugaacuggguacu

SEQ ID NO: 3015752 - RNA, 17 nt, Human
ccuugaacuuugaccuc

SEQ ID NO: 3015753 - RNA, 17 nt, Human
ccuugaaugaugccaug

SEQ ID NO: 3015754 - RNA, 11 nt, Human
ccuuuggcuuc

SEQ ID NO: 3015755 - RNA, 18 nt, Human
ccagaagucaaggcuuag

SEQ ID NO: 3015756 - RNA, 22 nt, Human
ccagaaguuugagaucagccug

SEQ ID NO: 3015757 - RNA, 23 nt, Human
ccagaaguuugagaucagccugg

SEQ ID NO: 3015758 - RNA, 14 nt, Human
ccacuucagcugac

SEQ ID NO: 3015759 - RNA, 13 nt, Human
ccacuucagcuga

SEQ ID NO: 3015760 - RNA, 23 nt, Human
ccacugcacuccagccuggguga

SEQ ID NO: 3015761 - RNA, 19 nt, Human
ccagaauuucccaaagcag

SEQ ID NO: 3015762 - RNA, 12 nt, Human
ccagaauuuccc

SEQ ID NO: 3015763 - RNA, 18 nt, Human
ccagaauuucccaaagca

SEQ ID NO: 3015764 - RNA, 21 nt, Human
ccagaauuucccaaagcagug

SEQ ID NO: 3015765 - RNA, 21 nt, Human
ccagacaccuugacagggcac

SEQ ID NO: 3015766 - RNA, 20 nt, Human
ccagacaccuugacagggca

SEQ ID NO: 3015767 - RNA, 15 nt, Human
ccaccccacacacgc

SEQ ID NO: 3015768 - RNA, 23 nt, Human
ccacggccaggccagagggagug

SEQ ID NO: 3015769 - RNA, 18 nt, Human
ccacgcuggagugcagug

SEQ ID NO: 3015770 - RNA, 19 nt, Human
ccacgcuggagugcaguga

SEQ ID NO: 3015771 - RNA, 16 nt, Human
ccacggccaggccaga

SEQ ID NO: 3015772 - RNA, 18 nt, Human
ccacggccaggccagagg

SEQ ID NO: 3015773 - RNA, 15 nt, Human
ccacccccacccaag

SEQ ID NO: 3015774 - RNA, 16 nt, Human
ccacgcuggagugcag

SEQ ID NO: 3015775 - RNA, 13 nt, Human
ccacgcuggagug

SEQ ID NO: 3015776 - RNA, 16 nt, Human
ccacuacauucuguua

SEQ ID NO: 3015777 - RNA, 17 nt, Human
ccacuacauucuguuaa

SEQ ID NO: 3015778 - RNA, 11 nt, Human
ccacuacauuc

SEQ ID NO: 3015779 - RNA, 15 nt, Human
ccacuacauucuguu

SEQ ID NO: 3015780 - RNA, 14 nt, Human
ccacuacauucugu

SEQ ID NO: 3015781 - RNA, 12 nt, Human
ccaauauccuaa

SEQ ID NO: 3015782 - RNA, 13 nt, Human
ccaauauccuaau

SEQ ID NO: 3015783 - RNA, 14 nt, Human
ccaauauccuaaua

SEQ ID NO: 3015784 - RNA, 15 nt, Human
ccaauauccuaauaa

SEQ ID NO: 3015785 - RNA, 16 nt, Human
ccaauauccuaauaaa

SEQ ID NO: 3015786 - RNA, 17 nt, Human
ccaauauccuaauaaaa

SEQ ID NO: 3015787 - RNA, 18 nt, Human
ccaauauccuaauaaaaa

SEQ ID NO: 3015788 - RNA, 19 nt, Human
ccaauauccuaauaaaaag

SEQ ID NO: 3015789 - RNA, 16 nt, Human
ccacaugugcacaugc

SEQ ID NO: 3015790 - RNA, 16 nt, Human
ccacauuccugaugcu

SEQ ID NO: 3015791 - RNA, 19 nt, Human
ccacaucuugcucugcuga

SEQ ID NO: 3015792 - RNA, 18 nt, Human
ccacaucuugcucugcug

SEQ ID NO: 3015793 - RNA, 17 nt, Human
ccacaucuugcucugcu

SEQ ID NO: 3015794 - RNA, 21 nt, Human
ccaccaacauacucccaucug

SEQ ID NO: 3015795 - RNA, 21 nt, Human
ccacacccagcccacuucugc

SEQ ID NO: 3015796 - RNA, 22 nt, Human
ccacacccagcccacuucugcc

SEQ ID NO: 3015797 - RNA, 20 nt, Human
ccacacccagcccacuucug

SEQ ID NO: 3015798 - RNA, 15 nt, Human
ccacacccagcccac

SEQ ID NO: 3015799 - RNA, 16 nt, Human
ccacaggaucagucug

SEQ ID NO: 3015800 - RNA, 21 nt, Human
ccacccaggagccccgaggcc

SEQ ID NO: 3015801 - RNA, 23 nt, Human
ccacccaggagccccgaggccuu

SEQ ID NO: 3015802 - RNA, 17 nt, Human
ccacccccacccaaggg

SEQ ID NO: 3015803 - RNA, 22 nt, Human
ccaaagccuccuccagccgcca

SEQ ID NO: 3015804 - RNA, 17 nt, Human
ccaaagccuccuccagc

SEQ ID NO: 3015805 - RNA, 19 nt, Human
ccaaagccaaagcuaggcc

SEQ ID NO: 3015806 - RNA, 23 nt, Human
ccaaagcagugcaugcugucccu

SEQ ID NO: 3015807 - RNA, 19 nt, Human
ccaaagcagugcaugcugu

SEQ ID NO: 3015808 - RNA, 20 nt, Human
ccaaacucaccugccccuca

SEQ ID NO: 3015809 - RNA, 21 nt, Human
ccaaagcuaggccuggccaga

SEQ ID NO: 3015810 - RNA, 16 nt, Human
ccaaagcuaggccugg

SEQ ID NO: 3015811 - RNA, 17 nt, Human
ccaaagcuaggccuggc

SEQ ID NO: 3015812 - RNA, 15 nt, Human
ccaaagcuaggccug

SEQ ID NO: 3015813 - RNA, 23 nt, Human
ccaaaggaagcacaugccucucu

SEQ ID NO: 3015814 - RNA, 15 nt, Human
ccaaaggaagcacau

SEQ ID NO: 3015815 - RNA, 15 nt, Human
ccaaaguacacuguu

SEQ ID NO: 3015816 - RNA, 18 nt, Human
ccaaaguacacuguuuca

SEQ ID NO: 3015817 - RNA, 20 nt, Human
ccaaaguacacuguuucaaa

SEQ ID NO: 3015818 - RNA, 22 nt, Human
ccaacauacucccaucugugaa

SEQ ID NO: 3015819 - RNA, 21 nt, Human
ccaacauacucccaucuguga

SEQ ID NO: 3015820 - RNA, 16 nt, Human
ccaacauacucccauc

SEQ ID NO: 3015821 - RNA, 20 nt, Human
ccaacauacucccaucugug

SEQ ID NO: 3015822 - RNA, 19 nt, Human
ccaacauacucccaucugu

SEQ ID NO: 3015823 - RNA, 18 nt, Human
ccaacauacucccaucug

SEQ ID NO: 3015824 - RNA, 17 nt, Human
ccaacauacucccaucu

SEQ ID NO: 3015825 - RNA, 20 nt, Human
ccaagaagcccaggaaaggc

SEQ ID NO: 3015826 - RNA, 19 nt, Human
ccaagaagcccaggaaagg

SEQ ID NO: 3015827 - RNA, 12 nt, Human
ccaacccucauc

SEQ ID NO: 3015828 - RNA, 15 nt, Human
ccaagaagcccagga

SEQ ID NO: 3015829 - RNA, 15 nt, Human
ccaagggccuggccu

SEQ ID NO: 3015830 - RNA, 21 nt, Human
ccaaggccaaaggaagcacau

SEQ ID NO: 3015831 - RNA, 18 nt, Human
ccaaggccaaaggaagca

SEQ ID NO: 3015832 - RNA, 22 nt, Human
ccaaggggaauguuugccucug

SEQ ID NO: 3015833 - RNA, 18 nt, Human
ccaagggccuggccugag

SEQ ID NO: 3015834 - RNA, 16 nt, Human
ccaagggccuggccug

SEQ ID NO: 3015835 - RNA, 19 nt, Human
ccaagggccuggccugagc

SEQ ID NO: 3015836 - RNA, 20 nt, Human
ccaagucaagugaaaaagga

SEQ ID NO: 3015837 - RNA, 13 nt, Human
ccaaggugggagg

SEQ ID NO: 3015838 - RNA, 23 nt, Human
ccaagguuuggggaagaacgaag

SEQ ID NO: 3015839 - RNA, 14 nt, Human
ccaagcucccaggc

SEQ ID NO: 3015840 - RNA, 17 nt, Human
ccaaggccaaaggaagc

SEQ ID NO: 3015841 - RNA, 22 nt, Human
ccaagcucccaggcauucccca

SEQ ID NO: 3015842 - RNA, 16 nt, Human
ccaagcucccaggcau

SEQ ID NO: 3015843 - RNA, 15 nt, Human
ccaagcucccaggca

SEQ ID NO: 3015844 - RNA, 12 nt, Human
cauuuaaaagau

SEQ ID NO: 3015845 - RNA, 15 nt, Human
cauuuaaaagauaca

SEQ ID NO: 3015846 - RNA, 16 nt, Human
cauuuaaaagauacag

SEQ ID NO: 3015847 - RNA, 12 nt, Human
cauuuccugugu

SEQ ID NO: 3015848 - RNA, 13 nt, Human
cauuuccuguguc

SEQ ID NO: 3015849 - RNA, 17 nt, Human
cauuguuggccaaagcc

SEQ ID NO: 3015850 - RNA, 18 nt, Human
cauuguuggccaaagcca

SEQ ID NO: 3015851 - RNA, 15 nt, Human
cacccaagggccugg

SEQ ID NO: 3015852 - RNA, 14 nt, Human
cacccaagggccug

SEQ ID NO: 3015853 - RNA, 16 nt, Human
cauuugagcagggcuc

SEQ ID NO: 3015854 - RNA, 20 nt, Human
cauuugagcagggcucagcg

SEQ ID NO: 3015855 - RNA, 17 nt, Human
cauuugagcagggcuca

SEQ ID NO: 3015856 - RNA, 18 nt, Human
cauuugagcagggcucag

SEQ ID NO: 3015857 - RNA, 17 nt, Human
cauuuguuugaacugau

SEQ ID NO: 3015858 - RNA, 20 nt, Human
cauuuguuugaacugauaaa

SEQ ID NO: 3015859 - RNA, 22 nt, Human
cauuuguuugaacugauaaaga

SEQ ID NO: 3015860 - RNA, 14 nt, Human
cauuugcuccuuuc

SEQ ID NO: 3015861 - RNA, 13 nt, Human
cauuugcuccuuu

SEQ ID NO: 3015862 - RNA, 22 nt, Human
cauuugaaaauuuugauguuuu

SEQ ID NO: 3015863 - RNA, 20 nt, Human
cauuugaaaauuuugauguu

SEQ ID NO: 3015864 - RNA, 17 nt, Human
ccaaacucaccugcccc

SEQ ID NO: 3015865 - RNA, 17 nt, Human
cccaggaguuuggccag

SEQ ID NO: 3015866 - RNA, 18 nt, Human
cccaggaguuuggccaga

SEQ ID NO: 3015867 - RNA, 19 nt, Human
cccaggaguuuggccagaa

SEQ ID NO: 3015868 - RNA, 20 nt, Human
cccaggaguuuggccagaag

SEQ ID NO: 3015869 - RNA, 15 nt, Human
cccaggaguuuggcc

SEQ ID NO: 3015870 - RNA, 16 nt, Human
cccaggaguuuggcca

SEQ ID NO: 3015871 - RNA, 11 nt, Human
cccaggcaggu

SEQ ID NO: 3015872 - RNA, 13 nt, Human
cccaggcaggucu

SEQ ID NO: 3015873 - RNA, 21 nt, Human
cccaggagccccgaggccuuc

SEQ ID NO: 3015874 - RNA, 18 nt, Human
cccaggagccccgaggcc

SEQ ID NO: 3015875 - RNA, 22 nt, Human
cccaggaggccagccuugacca

SEQ ID NO: 3015876 - RNA, 13 nt, Human
cccaggaggccag

SEQ ID NO: 3015877 - RNA, 17 nt, Human
cccaggcaggucuugaa

SEQ ID NO: 3015878 - RNA, 18 nt, Human
cccaggcauuccccagga

SEQ ID NO: 3015879 - RNA, 21 nt, Human
cccaggcauuccccaggaggc

SEQ ID NO: 3015880 - RNA, 20 nt, Human
cccaggcauuccccaggagg

SEQ ID NO: 3015881 - RNA, 23 nt, Human
cccaggcauuccccaggaggcca

SEQ ID NO: 3015882 - RNA, 22 nt, Human
cccaggcauuccccaggaggcc

SEQ ID NO: 3015883 - RNA, 11 nt, Human
cccaggccccu

SEQ ID NO: 3015884 - RNA, 16 nt, Human
cccaggccccugccac

SEQ ID NO: 3015885 - RNA, 18 nt, Human
cccaggccccugccaccc

SEQ ID NO: 3015886 - RNA, 21 nt, Human
cccaggccccugccacccugg

SEQ ID NO: 3015887 - RNA, 22 nt, Human
cccaggccccugccacccuggg

SEQ ID NO: 3015888 - RNA, 18 nt, Human
cccaggccuccuacagcu

SEQ ID NO: 3015889 - RNA, 17 nt, Human
cccaggccuccuacagc

SEQ ID NO: 3015890 - RNA, 20 nt, Human
cccagucuggaaugcagugg

SEQ ID NO: 3015891 - RNA, 13 nt, Human
cccagugcccaca

SEQ ID NO: 3015892 - RNA, 23 nt, Human
cccaggugcuaggaacacuccuu

SEQ ID NO: 3015893 - RNA, 22 nt, Human
cccaggugcuaggaacacuccu

SEQ ID NO: 3015894 - RNA, 11 nt, Human
cccagccccuu

SEQ ID NO: 3015895 - RNA, 19 nt, Human
cccagcaagugagagcugg

SEQ ID NO: 3015896 - RNA, 20 nt, Human
cccagcaagugagagcuggg

SEQ ID NO: 3015897 - RNA, 21 nt, Human
cccagcaagugagagcugggu

SEQ ID NO: 3015898 - RNA, 22 nt, Human
cccagcaagugagagcugggug

SEQ ID NO: 3015899 - RNA, 12 nt, Human
cccagccugcua

SEQ ID NO: 3015900 - RNA, 19 nt, Human
cccagcgagcccugguggc

SEQ ID NO: 3015901 - RNA, 23 nt, Human
cccagcgagcccugguggcagug

SEQ ID NO: 3015902 - RNA, 17 nt, Human
cccagcgagcccuggug

SEQ ID NO: 3015903 - RNA, 18 nt, Human
cccagcgagcccuggugg

SEQ ID NO: 3015904 - RNA, 15 nt, Human
cccagcgagcccugg

SEQ ID NO: 3015905 - RNA, 18 nt, Human
cccagagggccugcaagg

SEQ ID NO: 3015906 - RNA, 20 nt, Human
cccagagggccugcaaggga

SEQ ID NO: 3015907 - RNA, 20 nt, Human
cccagauugcaacaggcugg

SEQ ID NO: 3015908 - RNA, 21 nt, Human
cccagauugcaacaggcuggg

SEQ ID NO: 3015909 - RNA, 22 nt, Human
cccagauugcaacaggcugggc

SEQ ID NO: 3015910 - RNA, 16 nt, Human
cccagcaagugagagc

SEQ ID NO: 3015911 - RNA, 18 nt, Human
cccagcaagugagagcug

SEQ ID NO: 3015912 - RNA, 23 nt, Human
cccaagggccuggccugagcugg

SEQ ID NO: 3015913 - RNA, 19 nt, Human
cccaagggccuggccugag

SEQ ID NO: 3015914 - RNA, 18 nt, Human
cccaagggccuggccuga

SEQ ID NO: 3015915 - RNA, 17 nt, Human
cccaagggccuggccug

SEQ ID NO: 3015916 - RNA, 23 nt, Human
cccaaauggaaaugggcagagca

SEQ ID NO: 3015917 - RNA, 23 nt, Human
cccaaugcacuuuguucuggcuc

SEQ ID NO: 3015918 - RNA, 13 nt, Human
cccauucugccug

SEQ ID NO: 3015919 - RNA, 22 nt, Human
ccccaaauggaaaugggcagag

SEQ ID NO: 3015920 - RNA, 20 nt, Human
ccccacccaagggccuggcc

SEQ ID NO: 3015921 - RNA, 14 nt, Human
ccccacccaagggc

SEQ ID NO: 3015922 - RNA, 15 nt, Human
cccagugcccacagg

SEQ ID NO: 3015923 - RNA, 20 nt, Human
cccagugcccacaggaucag

SEQ ID NO: 3015924 - RNA, 17 nt, Human
cccagugccgagaagga

SEQ ID NO: 3015925 - RNA, 18 nt, Human
cccagugccgagaaggaa

SEQ ID NO: 3015926 - RNA, 16 nt, Human
cccaugcugcccugug

SEQ ID NO: 3015927 - RNA, 15 nt, Human
cccaugcugcccugu

SEQ ID NO: 3015928 - RNA, 18 nt, Human
cccaugcugcccugugag

SEQ ID NO: 3015929 - RNA, 17 nt, Human
cccaugcugcccuguga

SEQ ID NO: 3015930 - RNA, 17 nt, Human
ccccaggaggccagccu

SEQ ID NO: 3015931 - RNA, 16 nt, Human
ccauucuccaccugcc

SEQ ID NO: 3015932 - RNA, 15 nt, Human
ccauucuccaccugc

SEQ ID NO: 3015933 - RNA, 14 nt, Human
ccauggacuuuguu

SEQ ID NO: 3015934 - RNA, 13 nt, Human
ccauggacuuugu

SEQ ID NO: 3015935 - RNA, 21 nt, Human
ccauucugccugcccaggccc

SEQ ID NO: 3015936 - RNA, 14 nt, Human
ccauucuccaccug

SEQ ID NO: 3015937 - RNA, 19 nt, Human
ccauucugccugcccaggc

SEQ ID NO: 3015938 - RNA, 20 nt, Human
ccauucugccugcccaggcc

SEQ ID NO: 3015939 - RNA, 16 nt, Human
ccauucugccugccca

SEQ ID NO: 3015940 - RNA, 17 nt, Human
ccauucuccaccugcca

SEQ ID NO: 3015941 - RNA, 17 nt, Human
ccauucugccugcccag

SEQ ID NO: 3015942 - RNA, 18 nt, Human
ccauucugccugcccagg

SEQ ID NO: 3015943 - RNA, 16 nt, Human
cccaaagcagugcaug

SEQ ID NO: 3015944 - RNA, 15 nt, Human
cccaaagaugcagcc

SEQ ID NO: 3015945 - RNA, 12 nt, Human
cccaaagaugca

SEQ ID NO: 3015946 - RNA, 22 nt, Human
ccauuuugggguacccacugcu

SEQ ID NO: 3015947 - RNA, 20 nt, Human
ccauuuugggguacccacug

SEQ ID NO: 3015948 - RNA, 23 nt, Human
ccauuuuggauucuuauggacaa

SEQ ID NO: 3015949 - RNA, 20 nt, Human
cccaaaacucuccucugcug

SEQ ID NO: 3015950 - RNA, 13 nt, Human
ccaugcugcccug

SEQ ID NO: 3015951 - RNA, 11 nt, Human
ccaugcugccc

SEQ ID NO: 3015952 - RNA, 14 nt, Human
ccaugcugcccugu

SEQ ID NO: 3015953 - RNA, 18 nt, Human
ccaugauguuuuccauga

SEQ ID NO: 3015954 - RNA, 21 nt, Human
ccaugauuaaccacuucagcu

SEQ ID NO: 3015955 - RNA, 19 nt, Human
ccaugauuaaccacuucag

SEQ ID NO: 3015956 - RNA, 22 nt, Human
ccaucauugaaaucuuuuugcu

SEQ ID NO: 3015957 - RNA, 19 nt, Human
ccauccucuguacagagcc

SEQ ID NO: 3015958 - RNA, 12 nt, Human
ccauccucugua

SEQ ID NO: 3015959 - RNA, 19 nt, Human
ccagugaggcucugcccuu

SEQ ID NO: 3015960 - RNA, 18 nt, Human
ccagugaggcucugcccu

SEQ ID NO: 3015961 - RNA, 20 nt, Human
ccagugaggcucugcccuug

SEQ ID NO: 3015962 - RNA, 17 nt, Human
ccagugaggcucugccc

SEQ ID NO: 3015963 - RNA, 13 nt, Human
ccaucaccagaca

SEQ ID NO: 3015964 - RNA, 20 nt, Human
ccauccucuguacagagccc

SEQ ID NO: 3015965 - RNA, 11 nt, Human
ccagcucuggu

SEQ ID NO: 3015966 - RNA, 13 nt, Human
ccagcucuggucc

SEQ ID NO: 3015967 - RNA, 12 nt, Human
ccagcucugguc

SEQ ID NO: 3015968 - RNA, 14 nt, Human
ccagcgagcccugg

SEQ ID NO: 3015969 - RNA, 22 nt, Human
ccagccuugaccauucuccacc

SEQ ID NO: 3015970 - RNA, 13 nt, Human
ccagcgagcccug

SEQ ID NO: 3015971 - RNA, 15 nt, Human
ccagcgagcccuggu

SEQ ID NO: 3015972 - RNA, 16 nt, Human
ccagcgagcccuggug

SEQ ID NO: 3015973 - RNA, 22 nt, Human
ccagagcccaccuuggcucaag

SEQ ID NO: 3015974 - RNA, 16 nt, Human
ccagagcccaccuugg

SEQ ID NO: 3015975 - RNA, 20 nt, Human
ccagccuugaccauucucca

SEQ ID NO: 3015976 - RNA, 19 nt, Human
ccagccuugaccauucucc

SEQ ID NO: 3015977 - RNA, 23 nt, Human
ccagcugcuugggcuucauccuc

SEQ ID NO: 3015978 - RNA, 20 nt, Human
ccagcugcuugggcuucauc

SEQ ID NO: 3015979 - RNA, 22 nt, Human
ccagcucugguccauagagagc

SEQ ID NO: 3015980 - RNA, 21 nt, Human
ccagcucugguccauagagag

SEQ ID NO: 3015981 - RNA, 17 nt, Human
ccagcucugguccauag

SEQ ID NO: 3015982 - RNA, 14 nt, Human
ccagcucuggucca

SEQ ID NO: 3015983 - RNA, 22 nt, Human
ccaggaagccagcaggcucuca

SEQ ID NO: 3015984 - RNA, 20 nt, Human
ccaggaagccagcaggcucu

SEQ ID NO: 3015985 - RNA, 13 nt, Human
ccaggaggccagc

SEQ ID NO: 3015986 - RNA, 12 nt, Human
ccaggaggccag

SEQ ID NO: 3015987 - RNA, 12 nt, Human
ccaggagccucc

SEQ ID NO: 3015988 - RNA, 18 nt, Human
ccaggagccuccugcccu

SEQ ID NO: 3015989 - RNA, 14 nt, Human
ccaggagccuccug

SEQ ID NO: 3015990 - RNA, 13 nt, Human
ccaggagccuccu

SEQ ID NO: 3015991 - RNA, 22 nt, Human
ccaggcauuccccaggaggcca

SEQ ID NO: 3015992 - RNA, 23 nt, Human
ccaggcauuccccaggaggccag

SEQ ID NO: 3015993 - RNA, 24 nt, Human
ccaggcauuccccaggaggccagc

SEQ ID NO: 3015994 - RNA, 14 nt, Human
ccaggcauucccca

SEQ ID NO: 3015995 - RNA, 13 nt, Human
ccaggcauggugg

SEQ ID NO: 3015996 - RNA, 15 nt, Human
ccaggagccccgagg

SEQ ID NO: 3015997 - RNA, 16 nt, Human
ccaggagcagccacau

SEQ ID NO: 3015998 - RNA, 15 nt, Human
ccaggagcagccaca

SEQ ID NO: 3015999 - RNA, 20 nt, Human
ccaggcuguaucccaugagc

SEQ ID NO: 3016000 - RNA, 14 nt, Human
ccaggcuggucuca

SEQ ID NO: 3016001 - RNA, 19 nt, Human
ccaggcuggucucaaacuc

SEQ ID NO: 3016002 - RNA, 13 nt, Human
ccaggccccugcc

SEQ ID NO: 3016003 - RNA, 23 nt, Human
ccaguaaaugggggugcauuuga

SEQ ID NO: 3016004 - RNA, 14 nt, Human
ccagguucagcuug

SEQ ID NO: 3016005 - RNA, 19 nt, Human
ccaggugcuaggaacacuc

SEQ ID NO: 3016006 - RNA, 23 nt, Human
cacaguguguggucaacauuucu

SEQ ID NO: 3016007 - RNA, 17 nt, Human
cacaguucaauucucau

SEQ ID NO: 3016008 - RNA, 19 nt, Human
caaggcuuagacccucaug

SEQ ID NO: 3016009 - RNA, 22 nt, Human
caaggcuuagacccucaugcug

SEQ ID NO: 3016010 - RNA, 21 nt, Human
caauauccuaauaaaaaggug

SEQ ID NO: 3016011 - RNA, 15 nt, Human
caauaggaaaaacug

SEQ ID NO: 3016012 - RNA, 17 nt, Human
caauaggaaaaacugau

SEQ ID NO: 3016013 - RNA, 16 nt, Human
caauaggaaaaacuga

SEQ ID NO: 3016014 - RNA, 18 nt, Human
caauaacuggaacacucu

SEQ ID NO: 3016015 - RNA, 18 nt, Human
caagcgauucuucugcuu

SEQ ID NO: 3016016 - RNA, 21 nt, Human
caagcugcacccucaggcagg

SEQ ID NO: 3016017 - RNA, 15 nt, Human
caagcgauucuucug

SEQ ID NO: 3016018 - RNA, 17 nt, Human
caagcgauucuucugcu

SEQ ID NO: 3016019 - RNA, 21 nt, Human
caagcuggucccacucagucc

SEQ ID NO: 3016020 - RNA, 22 nt, Human
caagcugcacccucaggcaggu

SEQ ID NO: 3016021 - RNA, 20 nt, Human
caagcugcacccucaggcag

SEQ ID NO: 3016022 - RNA, 16 nt, Human
caaggagauuuacaac

SEQ ID NO: 3016023 - RNA, 19 nt, Human
caaggauccugagccagau

SEQ ID NO: 3016024 - RNA, 18 nt, Human
caaggauccugagccaga

SEQ ID NO: 3016025 - RNA, 20 nt, Human
caaggauccugagccagauu

SEQ ID NO: 3016026 - RNA, 22 nt, Human
caaggcugcagugagccgagau

SEQ ID NO: 3016027 - RNA, 17 nt, Human
caaggcugcagugagcc

SEQ ID NO: 3016028 - RNA, 22 nt, Human
caagcuggucccacucagucca

SEQ ID NO: 3016029 - RNA, 23 nt, Human
caagcuggucccacucaguccau

SEQ ID NO: 3016030 - RNA, 13 nt, Human
cacaaagcuuuug

SEQ ID NO: 3016031 - RNA, 16 nt, Human
cacaaagcuuuugcau

SEQ ID NO: 3016032 - RNA, 13 nt, Human
cacaaaggagagc

SEQ ID NO: 3016033 - RNA, 17 nt, Human
cacacacgcgugcacac

SEQ ID NO: 3016034 - RNA, 22 nt, Human
caauauccuaauaaaaagguga

SEQ ID NO: 3016035 - RNA, 19 nt, Human
caaugugaaaagaaaaaug

SEQ ID NO: 3016036 - RNA, 22 nt, Human
caaugugaaaagaaaaaugagc

SEQ ID NO: 3016037 - RNA, 17 nt, Human
caauuacaggaaguacu

SEQ ID NO: 3016038 - RNA, 14 nt, Human
caauguucucucuu

SEQ ID NO: 3016039 - RNA, 13 nt, Human
cacaaacagaggc

SEQ ID NO: 3016040 - RNA, 14 nt, Human
cacaaacagaggcc

SEQ ID NO: 3016041 - RNA, 18 nt, Human
caauuacaggaaguacug

SEQ ID NO: 3016042 - RNA, 23 nt, Human
cacagaugggugcuuggaggaag

SEQ ID NO: 3016043 - RNA, 21 nt, Human
cacagaguuguuacauuuuua

SEQ ID NO: 3016044 - RNA, 22 nt, Human
cacagaguuguuacauuuuuaa

SEQ ID NO: 3016045 - RNA, 13 nt, Human
cacagaggcugcc

SEQ ID NO: 3016046 - RNA, 19 nt, Human
cacagagaaaguacuucuc

SEQ ID NO: 3016047 - RNA, 20 nt, Human
cacagagaaaguacuucucc

SEQ ID NO: 3016048 - RNA, 12 nt, Human
cacagagaaagu

SEQ ID NO: 3016049 - RNA, 21 nt, Human
cacagcucuucuccaggcugu

SEQ ID NO: 3016050 - RNA, 22 nt, Human
caaauggaaaugggcagagcag

SEQ ID NO: 3016051 - RNA, 23 nt, Human
caaauggaaaugggcagagcaga

SEQ ID NO: 3016052 - RNA, 13 nt, Human
caaagugcuggga

SEQ ID NO: 3016053 - RNA, 19 nt, Human
caaagugcugggauuacaa

SEQ ID NO: 3016054 - RNA, 19 nt, Human
caaaguggugagaggcauc

SEQ ID NO: 3016055 - RNA, 23 nt, Human
caaagugcugggauuacaagcgu

SEQ ID NO: 3016056 - RNA, 15 nt, Human
caaauuucuaaaucu

SEQ ID NO: 3016057 - RNA, 22 nt, Human
caaauuucuaaaucuccaaaau

SEQ ID NO: 3016058 - RNA, 20 nt, Human
caacauacucccaucuguga

SEQ ID NO: 3016059 - RNA, 12 nt, Human
caacaggcuggg

SEQ ID NO: 3016060 - RNA, 19 nt, Human
caacauacucccaucugug

SEQ ID NO: 3016061 - RNA, 17 nt, Human
caacauacucccaucug

SEQ ID NO: 3016062 - RNA, 15 nt, Human
caagacgcugugcug

SEQ ID NO: 3016063 - RNA, 13 nt, Human
caagacgcugugc

SEQ ID NO: 3016064 - RNA, 23 nt, Human
caagaccuucuccuucaccuuug

SEQ ID NO: 3016065 - RNA, 21 nt, Human
caagaccuucuccuucaccuu

SEQ ID NO: 3016066 - RNA, 13 nt, Human
caagaagcccagg

SEQ ID NO: 3016067 - RNA, 16 nt, Human
caaaacucuccucugc

SEQ ID NO: 3016068 - RNA, 15 nt, Human
caaaacucuccucug

SEQ ID NO: 3016069 - RNA, 18 nt, Human
auuuuauuuuauuaugca

SEQ ID NO: 3016070 - RNA, 21 nt, Human
caaaacgguuuuacugcagcu

SEQ ID NO: 3016071 - RNA, 15 nt, Human
caaaacgguuuuacu

SEQ ID NO: 3016072 - RNA, 14 nt, Human
caaaaguuucucuu

SEQ ID NO: 3016073 - RNA, 23 nt, Human
caaaacucuccucugcugcuggc

SEQ ID NO: 3016074 - RNA, 21 nt, Human
caaaaucgaugcagugcuucc

SEQ ID NO: 3016075 - RNA, 14 nt, Human
caaaauaaaacuuu

SEQ ID NO: 3016076 - RNA, 16 nt, Human
caaaauaaaacuuuuu

SEQ ID NO: 3016077 - RNA, 20 nt, Human
caaaauaaaacuuuuuaaaa

SEQ ID NO: 3016078 - RNA, 22 nt, Human
caaaaugaaacgcaaccaccac

SEQ ID NO: 3016079 - RNA, 11 nt, Human
caaaaugaaac

SEQ ID NO: 3016080 - RNA, 13 nt, Human
caaacagaggccg

SEQ ID NO: 3016081 - RNA, 17 nt, Human
caaacucuugaccucag

SEQ ID NO: 3016082 - RNA, 19 nt, Human
caaacucuugaccucaggu

SEQ ID NO: 3016083 - RNA, 20 nt, Human
caaacucuugaccucaggug

SEQ ID NO: 3016084 - RNA, 21 nt, Human
caaacucuugaccucagguga

SEQ ID NO: 3016085 - RNA, 17 nt, Human
accaagaauugauuggg

SEQ ID NO: 3016086 - RNA, 17 nt, Human
acauuucucauguugaa

SEQ ID NO: 3016087 - RNA, 20 nt, Human
accagccccagugcccacag

SEQ ID NO: 3016088 - RNA, 18 nt, Human
accagccccagugcccac

SEQ ID NO: 3016089 - RNA, 19 nt, Human
accagccccagugcccaca

SEQ ID NO: 3016090 - RNA, 16 nt, Human
accagccccagugccc

SEQ ID NO: 3016091 - RNA, 17 nt, Human
accagccccagugccca

SEQ ID NO: 3016092 - RNA, 14 nt, Human
accagcagaaaugc

SEQ ID NO: 3016093 - RNA, 13 nt, Human
accagcagagcac

SEQ ID NO: 3016094 - RNA, 12 nt, Human
accagcagagca

SEQ ID NO: 3016095 - RNA, 19 nt, Human
acaugccuaccaauauuua

SEQ ID NO: 3016096 - RNA, 18 nt, Human
acaugccuaccaauauuu

SEQ ID NO: 3016097 - RNA, 19 nt, Human
acaugccucucucaggcca

SEQ ID NO: 3016098 - RNA, 23 nt, Human
acaugucuuuucuugcaugaggc

SEQ ID NO: 3016099 - RNA, 15 nt, Human
accaucaagccacca

SEQ ID NO: 3016100 - RNA, 12 nt, Human
accaucauugaa

SEQ ID NO: 3016101 - RNA, 15 nt, Human
accaucauugaaauc

SEQ ID NO: 3016102 - RNA, 23 nt, Human
accaucauugaaaucuuuuugcu

SEQ ID NO: 3016103 - RNA, 14 nt, Human
accaucaagccacc

SEQ ID NO: 3016104 - RNA, 13 nt, Human
acccaugcugccc

SEQ ID NO: 3016105 - RNA, 15 nt, Human
acccacccuccuuuc

SEQ ID NO: 3016106 - RNA, 17 nt, Human
acccacccccacccaag

SEQ ID NO: 3016107 - RNA, 15 nt, Human
acccacccccaccca

SEQ ID NO: 3016108 - RNA, 14 nt, Human
acaugccuaccaau

SEQ ID NO: 3016109 - RNA, 17 nt, Human
acaugcaaggucauuuu

SEQ ID NO: 3016110 - RNA, 18 nt, Human
acaugccucucucaggcc

SEQ ID NO: 3016111 - RNA, 17 nt, Human
acaugccucucucaggc

SEQ ID NO: 3016112 - RNA, 16 nt, Human
acaugccucucucagg

SEQ ID NO: 3016113 - RNA, 15 nt, Human
acaugccucucucag

SEQ ID NO: 3016114 - RNA, 16 nt, Human
acaugcaaggucauuu

SEQ ID NO: 3016115 - RNA, 15 nt, Human
acauaagauaaaugu

SEQ ID NO: 3016116 - RNA, 16 nt, Human
acauaagauaaaugug

SEQ ID NO: 3016117 - RNA, 23 nt, Human
acagugagucgaggacagggagg

SEQ ID NO: 3016118 - RNA, 22 nt, Human
acagugagucgaggacagggag

SEQ ID NO: 3016119 - RNA, 19 nt, Human
acaggugugaaccaccaca

SEQ ID NO: 3016120 - RNA, 22 nt, Human
acaggugugagucaccaagccc

SEQ ID NO: 3016121 - RNA, 23 nt, Human
acaggugugagucaccaagccca

SEQ ID NO: 3016122 - RNA, 14 nt, Human
acaggcaaugcugg

SEQ ID NO: 3016123 - RNA, 19 nt, Human
acaggcaagcaccuccugc

SEQ ID NO: 3016124 - RNA, 20 nt, Human
acaggcaagcaccuccugcc

SEQ ID NO: 3016125 - RNA, 23 nt, Human
acaggcaagcaccuccugccucg

SEQ ID NO: 3016126 - RNA, 13 nt, Human
acagcucuguccu

SEQ ID NO: 3016127 - RNA, 16 nt, Human
acagcucuguccuggg

SEQ ID NO: 3016128 - RNA, 17 nt, Human
acagcucuguccuggga

SEQ ID NO: 3016129 - RNA, 15 nt, Human
acagcuccuucuguc

SEQ ID NO: 3016130 - RNA, 19 nt, Human
acagaggggguggccuccc

SEQ ID NO: 3016131 - RNA, 18 nt, Human
acagaggggguggccucc

SEQ ID NO: 3016132 - RNA, 17 nt, Human
acagaggggguggccuc

SEQ ID NO: 3016133 - RNA, 16 nt, Human
acagcuccuucugucc

SEQ ID NO: 3016134 - RNA, 18 nt, Human
acagcuccuucuguccua

SEQ ID NO: 3016135 - RNA, 23 nt, Human
acagcuccuucuguccuacucug

SEQ ID NO: 3016136 - RNA, 14 nt, Human
acagcucuguccug

SEQ ID NO: 3016137 - RNA, 13 nt, Human
acaauuuauuaug

SEQ ID NO: 3016138 - RNA, 16 nt, Human
acaaggauugcuacug

SEQ ID NO: 3016139 - RNA, 20 nt, Human
acaaggaugaucuaggaaga

SEQ ID NO: 3016140 - RNA, 19 nt, Human
acacagcucuucuccaggc

SEQ ID NO: 3016141 - RNA, 19 nt, Human
acacaaaaguuucucuuuu

SEQ ID NO: 3016142 - RNA, 20 nt, Human
acacagcucuucuccaggcu

SEQ ID NO: 3016143 - RNA, 21 nt, Human
acacagcucuucuccaggcug

SEQ ID NO: 3016144 - RNA, 14 nt, Human
acacauuuuuuaaa

SEQ ID NO: 3016145 - RNA, 16 nt, Human
acacauuuuuuaaaug

SEQ ID NO: 3016146 - RNA, 18 nt, Human
acacauuuuuuaaaugca

SEQ ID NO: 3016147 - RNA, 14 nt, Human
acaccacuacauuc

SEQ ID NO: 3016148 - RNA, 15 nt, Human
acaccacuacauucu

SEQ ID NO: 3016149 - RNA, 14 nt, Human
acacgaauauugcu

SEQ ID NO: 3016150 - RNA, 12 nt, Human
acacgaauauug

SEQ ID NO: 3016151 - RNA, 17 nt, Human
acaccacuacauucugu

SEQ ID NO: 3016152 - RNA, 20 nt, Human
acaccacuacauucuguuaa

SEQ ID NO: 3016153 - RNA, 21 nt, Human
acacgaauauugcugauggug

SEQ ID NO: 3016154 - RNA, 15 nt, Human
acacgaauauugcug

SEQ ID NO: 3016155 - RNA, 22 nt, Human
acacugugcugagucugaaggc

SEQ ID NO: 3016156 - RNA, 17 nt, Human
acacugugcugagucug

SEQ ID NO: 3016157 - RNA, 13 nt, Human
acagaggcagccc

SEQ ID NO: 3016158 - RNA, 23 nt, Human
acagaggcagccccauucugccu

SEQ ID NO: 3016159 - RNA, 17 nt, Human
acagaggccaugggccu

SEQ ID NO: 3016160 - RNA, 14 nt, Human
acagaggggguggc

SEQ ID NO: 3016161 - RNA, 21 nt, Human
acagaggccaugggccuccug

SEQ ID NO: 3016162 - RNA, 13 nt, Human
acagacaaagcgu

SEQ ID NO: 3016163 - RNA, 14 nt, Human
acagacaaagcgug

SEQ ID NO: 3016164 - RNA, 22 nt, Human
acaaaaugaaacgcaaccacca

SEQ ID NO: 3016165 - RNA, 13 nt, Human
acaaaaugaaacg

SEQ ID NO: 3016166 - RNA, 14 nt, Human
aauuuugauguuuu

SEQ ID NO: 3016167 - RNA, 16 nt, Human
aauuuugugcccccau

SEQ ID NO: 3016168 - RNA, 20 nt, Human
aauuuauuuaugggauccug

SEQ ID NO: 3016169 - RNA, 17 nt, Human
aauuuauuauggcacau

SEQ ID NO: 3016170 - RNA, 16 nt, Human
aauuguaaggaaugau

SEQ ID NO: 3016171 - RNA, 12 nt, Human
aauuguaaggaa

SEQ ID NO: 3016172 - RNA, 16 nt, Human
aaugucacaggcaggu

SEQ ID NO: 3016173 - RNA, 19 nt, Human
aaugucacaggcaggucca

SEQ ID NO: 3016174 - RNA, 17 nt, Human
acuucuuauacauuuga

SEQ ID NO: 3016175 - RNA, 18 nt, Human
acuucuuauacauuugau

SEQ ID NO: 3016176 - RNA, 19 nt, Human
acuucugccauauucuguu

SEQ ID NO: 3016177 - RNA, 20 nt, Human
acuucugccauauucuguug

SEQ ID NO: 3016178 - RNA, 14 nt, Human
acuuaaauaaugug

SEQ ID NO: 3016179 - RNA, 22 nt, Human
acugcccggcaggguccuagaa

SEQ ID NO: 3016180 - RNA, 14 nt, Human
acugcuuuuggucu

SEQ ID NO: 3016181 - RNA, 15 nt, Human
acugcuuuuggucug

SEQ ID NO: 3016182 - RNA, 16 nt, Human
acugcuuuuggucugu

SEQ ID NO: 3016183 - RNA, 20 nt, Human
acugcuuuuggucuguguga

SEQ ID NO: 3016184 - RNA, 15 nt, Human
acugcccggcagggu

SEQ ID NO: 3016185 - RNA, 12 nt, Human
acugaugggcaa

SEQ ID NO: 3016186 - RNA, 22 nt, Human
acugaugggcaacccccagccu

SEQ ID NO: 3016187 - RNA, 22 nt, Human
acugauggcuaauguacugcau

SEQ ID NO: 3016188 - RNA, 13 nt, Human
acugaucucucgu

SEQ ID NO: 3016189 - RNA, 22 nt, Human
acugacauuguuggccaaagcc

SEQ ID NO: 3016190 - RNA, 23 nt, Human
acugacauuguuggccaaagcca

SEQ ID NO: 3016191 - RNA, 22 nt, Human
acugauuuuuuuuuccuucagu

SEQ ID NO: 3016192 - RNA, 21 nt, Human
acugauuuuuuuuuccuucag

SEQ ID NO: 3016193 - RNA, 23 nt, Human
acugauuuuuuuuuccuucagug

SEQ ID NO: 3016194 - RNA, 16 nt, Human
acucuaccugcacacu

SEQ ID NO: 3016195 - RNA, 19 nt, Human
acucugucucaaaaaaaca

SEQ ID NO: 3016196 - RNA, 21 nt, Human
acucugugucagguggggcag

SEQ ID NO: 3016197 - RNA, 19 nt, Human
acucugugucagguggggc

SEQ ID NO: 3016198 - RNA, 15 nt, Human
accgggccacagaga

SEQ ID NO: 3016199 - RNA, 19 nt, Human
accgggccacagagaaagu

SEQ ID NO: 3016200 - RNA, 14 nt, Human
accgugaggccaga

SEQ ID NO: 3016201 - RNA, 15 nt, Human
accggcuggccuggc

SEQ ID NO: 3016202 - RNA, 14 nt, Human
accggcuggccugg

SEQ ID NO: 3016203 - RNA, 20 nt, Human
accgggcacucagaagacac

SEQ ID NO: 3016204 - RNA, 19 nt, Human
accggcuggccuggccccu

SEQ ID NO: 3016205 - RNA, 18 nt, Human
accggcuggccuggcccc

SEQ ID NO: 3016206 - RNA, 17 nt, Human
accggcuggccuggccc

SEQ ID NO: 3016207 - RNA, 17 nt, Human
acccuguuaccauuuug

SEQ ID NO: 3016208 - RNA, 15 nt, Human
acccaugcugcccug

SEQ ID NO: 3016209 - RNA, 14 nt, Human
acccaugcugcccu

SEQ ID NO: 3016210 - RNA, 16 nt, Human
accccacacacgccag

SEQ ID NO: 3016211 - RNA, 22 nt, Human
acccugugauggggcccugccu

SEQ ID NO: 3016212 - RNA, 18 nt, Human
accucaggugagaagcag

SEQ ID NO: 3016213 - RNA, 22 nt, Human
accucaggccugggggcugggc

SEQ ID NO: 3016214 - RNA, 14 nt, Human
accucaggccuggg

SEQ ID NO: 3016215 - RNA, 13 nt, Human
accucaggccugg

SEQ ID NO: 3016216 - RNA, 12 nt, Human
accucaggccug

SEQ ID NO: 3016217 - RNA, 17 nt, Human
accgugaggccagagac

SEQ ID NO: 3016218 - RNA, 16 nt, Human
accgugaggccagaga

SEQ ID NO: 3016219 - RNA, 18 nt, Human
accugccagggacagagg

SEQ ID NO: 3016220 - RNA, 16 nt, Human
accugccagggacaga

SEQ ID NO: 3016221 - RNA, 15 nt, Human
accugccagggacag

SEQ ID NO: 3016222 - RNA, 13 nt, Human
accugccagggac

SEQ ID NO: 3016223 - RNA, 12 nt, Human
accugccaggga

SEQ ID NO: 3016224 - RNA, 11 nt, Human
accugccaggg

SEQ ID NO: 3016225 - RNA, 17 nt, Human
accucuugagccuugaa

SEQ ID NO: 3016226 - RNA, 19 nt, Human
accucuugagccuugaacu

SEQ ID NO: 3016227 - RNA, 20 nt, Human
accucuugagccuugaacuu

SEQ ID NO: 3016228 - RNA, 21 nt, Human
accucuugagccuugaacuuu

SEQ ID NO: 3016229 - RNA, 17 nt, Human
acuagggaagauaauau

SEQ ID NO: 3016230 - RNA, 16 nt, Human
acuauuguuagucucu

SEQ ID NO: 3016231 - RNA, 11 nt, Human
accugugucuc

SEQ ID NO: 3016232 - RNA, 15 nt, Human
acuaauagacaauuu

SEQ ID NO: 3016233 - RNA, 15 nt, Human
acgucugacaggcaa

SEQ ID NO: 3016234 - RNA, 23 nt, Human
acgucugacaggcaaugcuggcu

SEQ ID NO: 3016235 - RNA, 19 nt, Human
acgcuggagugcagugagc

SEQ ID NO: 3016236 - RNA, 18 nt, Human
acgcuggagugcagugag

SEQ ID NO: 3016237 - RNA, 16 nt, Human
acggaagagccuugcg

SEQ ID NO: 3016238 - RNA, 15 nt, Human
acggaagagccuugc

SEQ ID NO: 3016239 - RNA, 19 nt, Human
acggacacucaaaagcugg

SEQ ID NO: 3016240 - RNA, 12 nt, Human
aaagugcccagc

SEQ ID NO: 3016241 - RNA, 11 nt, Human
aaauaaauuau

SEQ ID NO: 3016242 - RNA, 14 nt, Human
aaaggcuccaggag

SEQ ID NO: 3016243 - RNA, 17 nt, Human
aaaggcuaccuuuguau

SEQ ID NO: 3016244 - RNA, 14 nt, Human
aaaggcuaccuuug

SEQ ID NO: 3016245 - RNA, 21 nt, Human
aaaggcuccaggagcagccac

SEQ ID NO: 3016246 - RNA, 22 nt, Human
aaaggcuccaggagcagccaca

SEQ ID NO: 3016247 - RNA, 15 nt, Human
aaagccaaagcuagg

SEQ ID NO: 3016248 - RNA, 19 nt, Human
aaacugauuuuuuuuuccu

SEQ ID NO: 3016249 - RNA, 13 nt, Human
aaacugauuuuuu

SEQ ID NO: 3016250 - RNA, 20 nt, Human
aaacugauuuuuuuuuccuu

SEQ ID NO: 3016251 - RNA, 14 nt, Human
aaacccuucagugc

SEQ ID NO: 3016252 - RNA, 17 nt, Human
aaacucuugaccucagg

SEQ ID NO: 3016253 - RNA, 18 nt, Human
aaacccagcucuggucca

SEQ ID NO: 3016254 - RNA, 17 nt, Human
aaaccccaucucuacaa

SEQ ID NO: 3016255 - RNA, 15 nt, Human
aaagauacaguuacu

SEQ ID NO: 3016256 - RNA, 15 nt, Human
aaaauuagccaagug

SEQ ID NO: 3016257 - RNA, 17 nt, Human
aaacagcuaaugggaca

SEQ ID NO: 3016258 - RNA, 17 nt, Human
aacagcaacacaaagcu

SEQ ID NO: 3016259 - RNA, 16 nt, Human
aacagcuaaugggaca

SEQ ID NO: 3016260 - RNA, 20 nt, Human
aacaugcuguacauacuuuu

SEQ ID NO: 3016261 - RNA, 19 nt, Human
aacaugcuguacauacuuu

SEQ ID NO: 3016262 - RNA, 18 nt, Human
aacaugcuguacauacuu

SEQ ID NO: 3016263 - RNA, 21 nt, Human
aacaugcuguacauacuuuuu

SEQ ID NO: 3016264 - RNA, 22 nt, Human
aacaugcuacacacugcauguu

SEQ ID NO: 3016265 - RNA, 15 nt, Human
aacauggaaguacua

SEQ ID NO: 3016266 - RNA, 13 nt, Human
aacccuucagugc

SEQ ID NO: 3016267 - RNA, 19 nt, Human
aaccaguguuguggauuua

SEQ ID NO: 3016268 - RNA, 17 nt, Human
aaccaguguuguggauu

SEQ ID NO: 3016269 - RNA, 18 nt, Human
aacugaaguucuauuuau

SEQ ID NO: 3016270 - RNA, 17 nt, Human
aacucaaacucuuaaaa

SEQ ID NO: 3016271 - RNA, 17 nt, Human
aacucaccccagcccca

SEQ ID NO: 3016272 - RNA, 16 nt, Human
aacucaccccagcccc

SEQ ID NO: 3016273 - RNA, 18 nt, Human
aacucaccccagccccaa

SEQ ID NO: 3016274 - RNA, 15 nt, Human
aacucaccccagccc

SEQ ID NO: 3016275 - RNA, 12 nt, Human
aaauuaacuuuu

SEQ ID NO: 3016276 - RNA, 13 nt, Human
aaauuaacuuuua

SEQ ID NO: 3016277 - RNA, 14 nt, Human
aaauuaacuuuuau

SEQ ID NO: 3016278 - RNA, 22 nt, Human
aacaaaccuguuucugcagcca

SEQ ID NO: 3016279 - RNA, 21 nt, Human
aacacauacaggaagguagaa

SEQ ID NO: 3016280 - RNA, 14 nt, Human
aaauggacguguua

SEQ ID NO: 3016281 - RNA, 17 nt, Human
aaauggacguguuauga

SEQ ID NO: 3016282 - RNA, 15 nt, Human
aaauggacguguuau

SEQ ID NO: 3016283 - RNA, 22 nt, Human
aaaucuccaaaauaaaacuuuu

SEQ ID NO: 3016284 - RNA, 19 nt, Human
aaaucuccaaaauaaaacu

SEQ ID NO: 3016285 - RNA, 13 nt, Human
aauauaaaaauaa

SEQ ID NO: 3016286 - RNA, 21 nt, Human
aauaccugucccccugacaac

SEQ ID NO: 3016287 - RNA, 17 nt, Human
aauaaaauuuuaguuga

SEQ ID NO: 3016288 - RNA, 13 nt, Human
aagugcugcauuu

SEQ ID NO: 3016289 - RNA, 21 nt, Human
aaugcgugcauaccacuuuug

SEQ ID NO: 3016290 - RNA, 23 nt, Human
aaugcgugcauaccacuuuuguu

SEQ ID NO: 3016291 - RNA, 13 nt, Human
aaugggacacuaa

SEQ ID NO: 3016292 - RNA, 14 nt, Human
aaugggagcucaug

SEQ ID NO: 3016293 - RNA, 23 nt, Human
aaugcucuuuacuucauggacuu

SEQ ID NO: 3016294 - RNA, 15 nt, Human
aaugucacaggcagg

SEQ ID NO: 3016295 - RNA, 15 nt, Human
aaugggggugcauuu

SEQ ID NO: 3016296 - RNA, 17 nt, Human
aaugggggugcauuuga

SEQ ID NO: 3016297 - RNA, 18 nt, Human
aaucuccaaaauaaaacu

SEQ ID NO: 3016298 - RNA, 15 nt, Human
aaugauagcuacugu

SEQ ID NO: 3016299 - RNA, 13 nt, Human
aaugauuaauuaa

SEQ ID NO: 3016300 - RNA, 12 nt, Human
aaugauuaauua

SEQ ID NO: 3016301 - RNA, 10 nt, Human
aagcagagug

SEQ ID NO: 3016302 - RNA, 21 nt, Human
aagcagaggaaggagaggaga

SEQ ID NO: 3016303 - RNA, 14 nt, Human
aagcagaguggcag

SEQ ID NO: 3016304 - RNA, 11 nt, Human
aagcagagugg

SEQ ID NO: 3016305 - RNA, 20 nt, Human
aagcagaguggcagucuuca

SEQ ID NO: 3016306 - RNA, 19 nt, Human
aagccaccaacauacuccc

SEQ ID NO: 3016307 - RNA, 19 nt, Human
aagauuuugaaauuuuuau

SEQ ID NO: 3016308 - RNA, 19 nt, Human
aagauucuauguuaauauu

SEQ ID NO: 3016309 - RNA, 21 nt, Human
aagauucuauguuaauauuuu

SEQ ID NO: 3016310 - RNA, 22 nt, Human
aagauucuauguuaauauuuua

SEQ ID NO: 3016311 - RNA, 20 nt, Human
aagauucauauuuacuucuu

SEQ ID NO: 3016312 - RNA, 15 nt, Human
aagacuuugguuauu

SEQ ID NO: 3016313 - RNA, 13 nt, Human
aagacuuugguua

SEQ ID NO: 3016314 - RNA, 23 nt, Human
aagacuuugguuauuuuacuuuu

SEQ ID NO: 3016315 - RNA, 17 nt, Human
aagacuuugguuauuuu

SEQ ID NO: 3016316 - RNA, 13 nt, Human
aacuguuuagaug

SEQ ID NO: 3016317 - RNA, 16 nt, Human
aagacuuuggaaagag

SEQ ID NO: 3016318 - RNA, 16 nt, Human
aaggaaugcaaagaug

SEQ ID NO: 3016319 - RNA, 15 nt, Human
aaggaaugcaaagau

SEQ ID NO: 3016320 - RNA, 23 nt, Human
aaggaaugauuaauuaaaacaca

SEQ ID NO: 3016321 - RNA, 16 nt, Human
aagcugcugacagugu

SEQ ID NO: 3016322 - RNA, 21 nt, Human
aagcgugagccacugcaccgg

SEQ ID NO: 3016323 - RNA, 17 nt, Human
aagcgugagccacugca

SEQ ID NO: 3016324 - RNA, 20 nt, Human
aagcgugagccacugcaccg

SEQ ID NO: 3016325 - RNA, 14 nt, Human
aagcugcugacagu

SEQ ID NO: 3016326 - RNA, 22 nt, Human
aagcugccagccgagauagcca

SEQ ID NO: 3016327 - RNA, 12 nt, Human
aagcugccagcc

SEQ ID NO: 3016328 - RNA, 11 nt, Human
aagcugccagc

SEQ ID NO: 3016329 - RNA, 15 nt, Human
aagcgauucuucugc

SEQ ID NO: 3016330 - RNA, 14 nt, Human
aagcgauucuucug

SEQ ID NO: 3016331 - RNA, 16 nt, Human
aagcgugagccacugc

SEQ ID NO: 3016332 - RNA, 16 nt, Human
aagcgauucuucugcu

SEQ ID NO: 3016333 - RNA, 15 nt, Human
aagccagcaggcucu

SEQ ID NO: 3016334 - RNA, 18 nt, Human
aagccagcaggcucucag

SEQ ID NO: 3016335 - RNA, 21 nt, Human
aagccaccaacauacucccau

SEQ ID NO: 3016336 - RNA, 23 nt, Human
aaggucuguuuuguguacuuuua

SEQ ID NO: 3016337 - RNA, 20 nt, Human
aaggucuguuuuguguacuu

SEQ ID NO: 3016338 - RNA, 19 nt, Human
aaggucuguuuuguguacu

SEQ ID NO: 3016339 - RNA, 21 nt, Human
aagggauuuucagcccucaga

SEQ ID NO: 3016340 - RNA, 23 nt, Human
aagggauuuucagcccucagaau

SEQ ID NO: 3016341 - RNA, 15 nt, Human
aagggauuuucagcc

SEQ ID NO: 3016342 - RNA, 20 nt, Human
aagggacuuggaagcuccgc

SEQ ID NO: 3016343 - RNA, 18 nt, Human
aagggacgcuacccggga

SEQ ID NO: 3016344 - RNA, 17 nt, Human
agaugaaggucuguuuu

SEQ ID NO: 3016345 - RNA, 14 nt, Human
agaugaaggucugu

SEQ ID NO: 3016346 - RNA, 22 nt, Human
agauucuuguauuuauuacaac

SEQ ID NO: 3016347 - RNA, 21 nt, Human
agauucuauguuaauauuuua

SEQ ID NO: 3016348 - RNA, 14 nt, Human
agaugagugagcau

SEQ ID NO: 3016349 - RNA, 18 nt, Human
agcaaaagaugcuucuca

SEQ ID NO: 3016350 - RNA, 18 nt, Human
agauucuuuccugaggcu

SEQ ID NO: 3016351 - RNA, 21 nt, Human
agauucuuuccugaggcuggg

SEQ ID NO: 3016352 - RNA, 19 nt, Human
agauucuuuccugaggcug

SEQ ID NO: 3016353 - RNA, 19 nt, Human
agauugcaacaggcugggc

SEQ ID NO: 3016354 - RNA, 23 nt, Human
agauugcaacaggcugggcuuca

SEQ ID NO: 3016355 - RNA, 20 nt, Human
agauugcaacaggcugggcu

SEQ ID NO: 3016356 - RNA, 21 nt, Human
agauugcaacaggcugggcuu

SEQ ID NO: 3016357 - RNA, 20 nt, Human
agcaaaggagauuggaagga

SEQ ID NO: 3016358 - RNA, 12 nt, Human
agcacagacccu

SEQ ID NO: 3016359 - RNA, 15 nt, Human
agcacagacccugcc

SEQ ID NO: 3016360 - RNA, 14 nt, Human
agcacagacccugc

SEQ ID NO: 3016361 - RNA, 16 nt, Human
agcacagacccugccc

SEQ ID NO: 3016362 - RNA, 17 nt, Human
agcacgauuucuguuua

SEQ ID NO: 3016363 - RNA, 19 nt, Human
agcacgauuucuguuuaga

SEQ ID NO: 3016364 - RNA, 21 nt, Human
agcacgauuucuguuuagaua

SEQ ID NO: 3016365 - RNA, 16 nt, Human
agccaaagcuaggccu

SEQ ID NO: 3016366 - RNA, 14 nt, Human
agcauccuggcacc

SEQ ID NO: 3016367 - RNA, 17 nt, Human
agcauccuggcacccgg

SEQ ID NO: 3016368 - RNA, 15 nt, Human
agccagaggagagag

SEQ ID NO: 3016369 - RNA, 13 nt, Human
agccagaggagag

SEQ ID NO: 3016370 - RNA, 14 nt, Human
agccagcaggcucu

SEQ ID NO: 3016371 - RNA, 18 nt, Human
agccagaggagagaggac

SEQ ID NO: 3016372 - RNA, 17 nt, Human
agccagaggagagagga

SEQ ID NO: 3016373 - RNA, 23 nt, Human
agcccacgcccccacuggugaca

SEQ ID NO: 3016374 - RNA, 20 nt, Human
agcccacgcccccacuggug

SEQ ID NO: 3016375 - RNA, 14 nt, Human
agcccacgccccca

SEQ ID NO: 3016376 - RNA, 16 nt, Human
agcccaccuuggcuca

SEQ ID NO: 3016377 - RNA, 14 nt, Human
agcccaccuuggcu

SEQ ID NO: 3016378 - RNA, 15 nt, Human
agcccaccccucaac

SEQ ID NO: 3016379 - RNA, 16 nt, Human
agccagcaggcucuca

SEQ ID NO: 3016380 - RNA, 13 nt, Human
agcauccuggcac

SEQ ID NO: 3016381 - RNA, 24 nt, Human
agccccaaaacucuccucugcugc

SEQ ID NO: 3016382 - RNA, 21 nt, Human
agcccgggcucugccucccau

SEQ ID NO: 3016383 - RNA, 20 nt, Human
agcccgggcucugccuccca

SEQ ID NO: 3016384 - RNA, 18 nt, Human
agcccgggcucugccucc

SEQ ID NO: 3016385 - RNA, 17 nt, Human
agcccgggcucugccuc

SEQ ID NO: 3016386 - RNA, 15 nt, Human
agccccauccucugu

SEQ ID NO: 3016387 - RNA, 23 nt, Human
agccccauccucuguacagagcc

SEQ ID NO: 3016388 - RNA, 17 nt, Human
agccccauccucuguac

SEQ ID NO: 3016389 - RNA, 17 nt, Human
agccccauucugccugc

SEQ ID NO: 3016390 - RNA, 18 nt, Human
agccccauucugccugcc

SEQ ID NO: 3016391 - RNA, 19 nt, Human
agccccauucugccugccc

SEQ ID NO: 3016392 - RNA, 16 nt, Human
agacuggauaguccgu

SEQ ID NO: 3016393 - RNA, 16 nt, Human
agagagaccacuuuuc

SEQ ID NO: 3016394 - RNA, 13 nt, Human
agagcccaccuug

SEQ ID NO: 3016395 - RNA, 13 nt, Human
agagccagggucu

SEQ ID NO: 3016396 - RNA, 18 nt, Human
agacucugucucaaaaaa

SEQ ID NO: 3016397 - RNA, 13 nt, Human
agacucugucuca

SEQ ID NO: 3016398 - RNA, 22 nt, Human
agacugaguacguugugcauuu

SEQ ID NO: 3016399 - RNA, 20 nt, Human
agacugaguacguugugcau

SEQ ID NO: 3016400 - RNA, 16 nt, Human
agacgcugugcugccc

SEQ ID NO: 3016401 - RNA, 14 nt, Human
agaggacuuuucuu

SEQ ID NO: 3016402 - RNA, 21 nt, Human
agaggacuuuucuuuguggcu

SEQ ID NO: 3016403 - RNA, 22 nt, Human
agaggacuuuucuuuguggcuu

SEQ ID NO: 3016404 - RNA, 19 nt, Human
agaggggguggccucccaa

SEQ ID NO: 3016405 - RNA, 17 nt, Human
agaggggguggccuccc

SEQ ID NO: 3016406 - RNA, 16 nt, Human
agagggccugcaaggg

SEQ ID NO: 3016407 - RNA, 13 nt, Human
agagggccugcaa

SEQ ID NO: 3016408 - RNA, 21 nt, Human
agaagucuucuauuuauuuau

SEQ ID NO: 3016409 - RNA, 18 nt, Human
agaagucuucuauuuauu

SEQ ID NO: 3016410 - RNA, 16 nt, Human
agaaugaaagggccca

SEQ ID NO: 3016411 - RNA, 18 nt, Human
agaaugaaagggcccaga

SEQ ID NO: 3016412 - RNA, 22 nt, Human
agaaugcacaaacagaggccgc

SEQ ID NO: 3016413 - RNA, 19 nt, Human
agaaugcacaaacagaggc

SEQ ID NO: 3016414 - RNA, 21 nt, Human
agaagagauugugguuucauu

SEQ ID NO: 3016415 - RNA, 21 nt, Human
acuuuccucuuuggucuacac

SEQ ID NO: 3016416 - RNA, 13 nt, Human
agaagacacugau

SEQ ID NO: 3016417 - RNA, 21 nt, Human
agaagacacugaugggcaacc

SEQ ID NO: 3016418 - RNA, 14 nt, Human
agaaguaacuuacu

SEQ ID NO: 3016419 - RNA, 20 nt, Human
agacaaugacuuacuguaca

SEQ ID NO: 3016420 - RNA, 11 nt, Human
agacagagucu

SEQ ID NO: 3016421 - RNA, 13 nt, Human
agacagagcuaca

SEQ ID NO: 3016422 - RNA, 19 nt, Human
agacagagucucacuguug

SEQ ID NO: 3016423 - RNA, 20 nt, Human
agacagagucucacuguugc

SEQ ID NO: 3016424 - RNA, 15 nt, Human
agacagagcuacaca

SEQ ID NO: 3016425 - RNA, 21 nt, Human
agacaaugacuuacuguacau

SEQ ID NO: 3016426 - RNA, 22 nt, Human
agacaaugacuuacuguacaug

SEQ ID NO: 3016427 - RNA, 21 nt, Human
agacagagucucacuguugcc

SEQ ID NO: 3016428 - RNA, 22 nt, Human
agacagauacuccuccaagguu

SEQ ID NO: 3016429 - RNA, 15 nt, Human
agaccacguuucuaa

SEQ ID NO: 3016430 - RNA, 24 nt, Human
aggcuuagacccucaugcugccaa

SEQ ID NO: 3016431 - RNA, 17 nt, Human
aggcuuagucacugaga

SEQ ID NO: 3016432 - RNA, 23 nt, Human
aggcuuagacccucaugcugcca

SEQ ID NO: 3016433 - RNA, 22 nt, Human
aggcuguaucccaugagccuca

SEQ ID NO: 3016434 - RNA, 20 nt, Human
aggcuguaucccaugagccu

SEQ ID NO: 3016435 - RNA, 21 nt, Human
aggcuguaucccaugagccuc

SEQ ID NO: 3016436 - RNA, 18 nt, Human
aggcuuagucacugagac

SEQ ID NO: 3016437 - RNA, 15 nt, Human
agggacccuccacca

SEQ ID NO: 3016438 - RNA, 18 nt, Human
aggcuggguucugauccu

SEQ ID NO: 3016439 - RNA, 13 nt, Human
aggcuaccuuugu

SEQ ID NO: 3016440 - RNA, 14 nt, Human
aggcuaccuuugua

SEQ ID NO: 3016441 - RNA, 15 nt, Human
aggcuaccuuuguau

SEQ ID NO: 3016442 - RNA, 15 nt, Human
aggcaugguggccca

SEQ ID NO: 3016443 - RNA, 17 nt, Human
aggcaugugaugagagg

SEQ ID NO: 3016444 - RNA, 17 nt, Human
aggcauguucucugagg

SEQ ID NO: 3016445 - RNA, 21 nt, Human
aggcaugugaugagaggaaau

SEQ ID NO: 3016446 - RNA, 20 nt, Human
aggcaugugaugagaggaaa

SEQ ID NO: 3016447 - RNA, 19 nt, Human
aggcaugugaugagaggaa

SEQ ID NO: 3016448 - RNA, 18 nt, Human
aggcauguucucugagga

SEQ ID NO: 3016449 - RNA, 19 nt, Human
aggcauguucucugaggac

SEQ ID NO: 3016450 - RNA, 12 nt, Human
aggcauguucuc

SEQ ID NO: 3016451 - RNA, 17 nt, Human
aggcauuccccaggagg

SEQ ID NO: 3016452 - RNA, 18 nt, Human
aggcauuccccaggaggc

SEQ ID NO: 3016453 - RNA, 15 nt, Human
aggccaggcccucug

SEQ ID NO: 3016454 - RNA, 14 nt, Human
aggccaggcccucu

SEQ ID NO: 3016455 - RNA, 13 nt, Human
aggccaggcccuc

SEQ ID NO: 3016456 - RNA, 23 nt, Human
aggccagcugcuugggcuucauc

SEQ ID NO: 3016457 - RNA, 20 nt, Human
aggcauuccccaggaggcca

SEQ ID NO: 3016458 - RNA, 19 nt, Human
aggcauuccccaggaggcc

SEQ ID NO: 3016459 - RNA, 12 nt, Human
aggcccuucucu

SEQ ID NO: 3016460 - RNA, 19 nt, Human
aggcccuucucuccagccc

SEQ ID NO: 3016461 - RNA, 15 nt, Human
aggcccuucucucca

SEQ ID NO: 3016462 - RNA, 21 nt, Human
aggcccucugcccacucccug

SEQ ID NO: 3016463 - RNA, 23 nt, Human
aggcccucugcccacucccugca

SEQ ID NO: 3016464 - RNA, 22 nt, Human
aggcccucugcccacucccugc

SEQ ID NO: 3016465 - RNA, 17 nt, Human
agggauuuucagcccuc

SEQ ID NO: 3016466 - RNA, 22 nt, Human
agggauuuucagcccucagaau

SEQ ID NO: 3016467 - RNA, 14 nt, Human
agggccugcaaggg

SEQ ID NO: 3016468 - RNA, 15 nt, Human
agggccugcaaggga

SEQ ID NO: 3016469 - RNA, 13 nt, Human
agggccuggccug

SEQ ID NO: 3016470 - RNA, 12 nt, Human
agggccuggccu

SEQ ID NO: 3016471 - RNA, 16 nt, Human
agggauacccauccca

SEQ ID NO: 3016472 - RNA, 22 nt, Human
aggggcccaaauucuuucagug

SEQ ID NO: 3016473 - RNA, 14 nt, Human
agggccuggccuga

SEQ ID NO: 3016474 - RNA, 21 nt, Human
aggguaucuggugacuuuccu

SEQ ID NO: 3016475 - RNA, 13 nt, Human
aggguauuccaga

SEQ ID NO: 3016476 - RNA, 14 nt, Human
agggucccuggugg

SEQ ID NO: 3016477 - RNA, 12 nt, Human
agggucccuggu

SEQ ID NO: 3016478 - RNA, 22 nt, Human
agggucccugguggcagcucac

SEQ ID NO: 3016479 - RNA, 20 nt, Human
agggucccugguggcagcuc

SEQ ID NO: 3016480 - RNA, 17 nt, Human
agggucccugguggcag

SEQ ID NO: 3016481 - RNA, 16 nt, Human
agggucccugguggca

SEQ ID NO: 3016482 - RNA, 22 nt, Human
aggguuuugccauguuggccag

SEQ ID NO: 3016483 - RNA, 23 nt, Human
aggguuuugccauguuggccagg

SEQ ID NO: 3016484 - RNA, 13 nt, Human
agguacucuccug

SEQ ID NO: 3016485 - RNA, 14 nt, Human
agguacucuccugg

SEQ ID NO: 3016486 - RNA, 22 nt, Human
agguacgaaaagaggggaagag

SEQ ID NO: 3016487 - RNA, 16 nt, Human
agguaacaggcagaua

SEQ ID NO: 3016488 - RNA, 13 nt, Human
agguaacaggcag

SEQ ID NO: 3016489 - RNA, 14 nt, Human
agguaacaggcaga

SEQ ID NO: 3016490 - RNA, 20 nt, Human
agcuuauuuccucauuuuua

SEQ ID NO: 3016491 - RNA, 18 nt, Human
agcuucauuuccuguguc

SEQ ID NO: 3016492 - RNA, 23 nt, Human
agcuuuguuuguugucagcugaa

SEQ ID NO: 3016493 - RNA, 22 nt, Human
agcuuuguuuguugucagcuga

SEQ ID NO: 3016494 - RNA, 19 nt, Human
agcuucauuuccugugucu

SEQ ID NO: 3016495 - RNA, 20 nt, Human
aggaacaaggcaaggcuguc

SEQ ID NO: 3016496 - RNA, 21 nt, Human
aggaacuuaaauaaugugaaa

SEQ ID NO: 3016497 - RNA, 12 nt, Human
aggaacaaggca

SEQ ID NO: 3016498 - RNA, 19 nt, Human
aggaacaaggcaaggcugu

SEQ ID NO: 3016499 - RNA, 17 nt, Human
aggaacaaggcaaggcu

SEQ ID NO: 3016500 - RNA, 16 nt, Human
aggaacaaggcaaggc

SEQ ID NO: 3016501 - RNA, 13 nt, Human
aggaacaaggcaa

SEQ ID NO: 3016502 - RNA, 22 nt, Human
aggaauaccugucccccugaca

SEQ ID NO: 3016503 - RNA, 18 nt, Human
aggaauaccugucccccu

SEQ ID NO: 3016504 - RNA, 15 nt, Human
aggaauaccuguccc

SEQ ID NO: 3016505 - RNA, 15 nt, Human
aggagaggagagggg

SEQ ID NO: 3016506 - RNA, 15 nt, Human
agcugaaccugggua

SEQ ID NO: 3016507 - RNA, 22 nt, Human
agcugguuuuuagcggagacgg

SEQ ID NO: 3016508 - RNA, 16 nt, Human
agcugguugagguuuc

SEQ ID NO: 3016509 - RNA, 18 nt, Human
agcuggucccacucaguc

SEQ ID NO: 3016510 - RNA, 13 nt, Human
agcugcugacagu

SEQ ID NO: 3016511 - RNA, 14 nt, Human
agcugcugacagug

SEQ ID NO: 3016512 - RNA, 16 nt, Human
agcuggucccacucag

SEQ ID NO: 3016513 - RNA, 17 nt, Human
agcuggucccacucagu

SEQ ID NO: 3016514 - RNA, 12 nt, Human
agcugcugacag

SEQ ID NO: 3016515 - RNA, 19 nt, Human
agcugcgguccacccagga

SEQ ID NO: 3016516 - RNA, 20 nt, Human
agcugcgguccacccaggag

SEQ ID NO: 3016517 - RNA, 13 nt, Human
agcugcgguccac

SEQ ID NO: 3016518 - RNA, 16 nt, Human
agcugcgguccaccca

SEQ ID NO: 3016519 - RNA, 17 nt, Human
agcugcgguccacccag

SEQ ID NO: 3016520 - RNA, 18 nt, Human
agcugcgguccacccagg

SEQ ID NO: 3016521 - RNA, 12 nt, Human
agcucagagagg

SEQ ID NO: 3016522 - RNA, 14 nt, Human
agcucagagagggu

SEQ ID NO: 3016523 - RNA, 18 nt, Human
agcucagagaggguggga

SEQ ID NO: 3016524 - RNA, 19 nt, Human
agcucaccagccccagugc

SEQ ID NO: 3016525 - RNA, 20 nt, Human
agcucaccagccccagugcc

SEQ ID NO: 3016526 - RNA, 15 nt, Human
agcucaccagcccca

SEQ ID NO: 3016527 - RNA, 12 nt, Human
agcucaccucuc

SEQ ID NO: 3016528 - RNA, 19 nt, Human
agcucaccucucccuugga

SEQ ID NO: 3016529 - RNA, 18 nt, Human
agcucaccucucccuugg

SEQ ID NO: 3016530 - RNA, 15 nt, Human
agcucaccucucccu

SEQ ID NO: 3016531 - RNA, 16 nt, Human
agcucaccagccccag

SEQ ID NO: 3016532 - RNA, 12 nt, Human
agccugggaggu

SEQ ID NO: 3016533 - RNA, 19 nt, Human
agcgagcccugguggcagu

SEQ ID NO: 3016534 - RNA, 13 nt, Human
agcgagcccuggu

SEQ ID NO: 3016535 - RNA, 14 nt, Human
augacuguuuuuaa

SEQ ID NO: 3016536 - RNA, 13 nt, Human
augaggcauuugu

SEQ ID NO: 3016537 - RNA, 14 nt, Human
augaggcauuuguu

SEQ ID NO: 3016538 - RNA, 21 nt, Human
augaggcauuuguuugaacug

SEQ ID NO: 3016539 - RNA, 22 nt, Human
augaggcauuuguuugaacuga

SEQ ID NO: 3016540 - RNA, 14 nt, Human
augaaaacacauuu

SEQ ID NO: 3016541 - RNA, 15 nt, Human
augaaaacacauuuu

SEQ ID NO: 3016542 - RNA, 16 nt, Human
augaaaacacauuuuu

SEQ ID NO: 3016543 - RNA, 17 nt, Human
aucgcuccaccuugcag

SEQ ID NO: 3016544 - RNA, 21 nt, Human
aucgcuccaccuugcagcucu

SEQ ID NO: 3016545 - RNA, 17 nt, Human
auccucauacccacccc

SEQ ID NO: 3016546 - RNA, 19 nt, Human
auccagacccggcugcgug

SEQ ID NO: 3016547 - RNA, 19 nt, Human
aucccaugagccucagcau

SEQ ID NO: 3016548 - RNA, 14 nt, Human
aucaugucuggcua

SEQ ID NO: 3016549 - RNA, 24 nt, Human
aucaaaagguuaauaaaguaauua

SEQ ID NO: 3016550 - RNA, 23 nt, Human
aucaaagagguuuuaaaaaaauc

SEQ ID NO: 3016551 - RNA, 20 nt, Human
aucaaagagguuuuaaaaaa

SEQ ID NO: 3016552 - RNA, 20 nt, Human
aucaccaacgucugugccau

SEQ ID NO: 3016553 - RNA, 13 nt, Human
aucaccagacagg

SEQ ID NO: 3016554 - RNA, 13 nt, Human
aucacagccucug

SEQ ID NO: 3016555 - RNA, 18 nt, Human
auggauaaauauugguug

SEQ ID NO: 3016556 - RNA, 16 nt, Human
augcuuguacauaaug

SEQ ID NO: 3016557 - RNA, 15 nt, Human
augcuuguacauaau

SEQ ID NO: 3016558 - RNA, 18 nt, Human
auggcuuuugugcauuau

SEQ ID NO: 3016559 - RNA, 16 nt, Human
auggcuuuugugcauu

SEQ ID NO: 3016560 - RNA, 17 nt, Human
auggcuuuugugcauua

SEQ ID NO: 3016561 - RNA, 16 nt, Human
augcugcccugugagu

SEQ ID NO: 3016562 - RNA, 15 nt, Human
augcugcccugugag

SEQ ID NO: 3016563 - RNA, 14 nt, Human
augcugcccuguga

SEQ ID NO: 3016564 - RNA, 12 nt, Human
augcugcccugu

SEQ ID NO: 3016565 - RNA, 13 nt, Human
augcugcccugug

SEQ ID NO: 3016566 - RNA, 15 nt, Human
augcacacauuuuuu

SEQ ID NO: 3016567 - RNA, 13 nt, Human
augcacacauuuu

SEQ ID NO: 3016568 - RNA, 14 nt, Human
augcacacauuuuu

SEQ ID NO: 3016569 - RNA, 19 nt, Human
augcacagaguuguuacau

SEQ ID NO: 3016570 - RNA, 21 nt, Human
augcacagaguuguuacauuu

SEQ ID NO: 3016571 - RNA, 22 nt, Human
augcacagaguuguuacauuuu

SEQ ID NO: 3016572 - RNA, 20 nt, Human
augccuggauggggcugcac

SEQ ID NO: 3016573 - RNA, 19 nt, Human
augccuggauggggcugca

SEQ ID NO: 3016574 - RNA, 18 nt, Human
augcacaaacagaggccg

SEQ ID NO: 3016575 - RNA, 18 nt, Human
augaugaaaugaggucag

SEQ ID NO: 3016576 - RNA, 23 nt, Human
augaugaaaugaggucagagccu

SEQ ID NO: 3016577 - RNA, 15 nt, Human
augaugauccuaggc

SEQ ID NO: 3016578 - RNA, 18 nt, Human
augaucuuugcagacagg

SEQ ID NO: 3016579 - RNA, 19 nt, Human
augaucuuugcagacaggc

SEQ ID NO: 3016580 - RNA, 21 nt, Human
augaucuuugcagacaggcaa

SEQ ID NO: 3016581 - RNA, 17 nt, Human
augaucuuugcagacag

SEQ ID NO: 3016582 - RNA, 18 nt, Human
augaucuucuuuauaauu

SEQ ID NO: 3016583 - RNA, 21 nt, Human
augguaguuuuacaguguuuc

SEQ ID NO: 3016584 - RNA, 15 nt, Human
augguaguuuuacag

SEQ ID NO: 3016585 - RNA, 23 nt, Human
augggugcuuggaggaaggaaac

SEQ ID NO: 3016586 - RNA, 21 nt, Human
augggugcuuggaggaaggaa

SEQ ID NO: 3016587 - RNA, 20 nt, Human
augggugcuuggaggaagga

SEQ ID NO: 3016588 - RNA, 17 nt, Human
augucacaggcaggucc

SEQ ID NO: 3016589 - RNA, 19 nt, Human
augucacaggcagguccag

SEQ ID NO: 3016590 - RNA, 23 nt, Human
auguaauuaaguacuauguauca

SEQ ID NO: 3016591 - RNA, 13 nt, Human
augucacaggcag

SEQ ID NO: 3016592 - RNA, 14 nt, Human
auguuugccucugc

SEQ ID NO: 3016593 - RNA, 15 nt, Human
auguuugccucugcc

SEQ ID NO: 3016594 - RNA, 17 nt, Human
auguuugccucugccuc

SEQ ID NO: 3016595 - RNA, 15 nt, Human
auguucugggacaca

SEQ ID NO: 3016596 - RNA, 14 nt, Human
auguucugggacac

SEQ ID NO: 3016597 - RNA, 13 nt, Human
auguucucugagg

SEQ ID NO: 3016598 - RNA, 17 nt, Human
auguucucucuucucca

SEQ ID NO: 3016599 - RNA, 16 nt, Human
auguucucucuucucc

SEQ ID NO: 3016600 - RNA, 13 nt, Human
auguguaaguauu

SEQ ID NO: 3016601 - RNA, 16 nt, Human
aguacuaacauuuauu

SEQ ID NO: 3016602 - RNA, 18 nt, Human
aguacguugugcauuugg

SEQ ID NO: 3016603 - RNA, 16 nt, Human
aguacguugugcauuu

SEQ ID NO: 3016604 - RNA, 17 nt, Human
aguacguugugcauuug

SEQ ID NO: 3016605 - RNA, 14 nt, Human
aguacuauaauuua

SEQ ID NO: 3016606 - RNA, 22 nt, Human
aguacuacaguccucccaucuc

SEQ ID NO: 3016607 - RNA, 19 nt, Human
aguacuacaguccucccau

SEQ ID NO: 3016608 - RNA, 17 nt, Human
aguacuucuccacccug

SEQ ID NO: 3016609 - RNA, 12 nt, Human
aguacuucuuuu

SEQ ID NO: 3016610 - RNA, 22 nt, Human
aguacuucuccacccugcucuc

SEQ ID NO: 3016611 - RNA, 12 nt, Human
aguacuauguau

SEQ ID NO: 3016612 - RNA, 14 nt, Human
aguacuauguauca

SEQ ID NO: 3016613 - RNA, 15 nt, Human
aguacguugugcauu

SEQ ID NO: 3016614 - RNA, 14 nt, Human
aguacguugugcau

SEQ ID NO: 3016615 - RNA, 16 nt, Human
aggucuguucuuucca

SEQ ID NO: 3016616 - RNA, 13 nt, Human
aggucuguucuuu

SEQ ID NO: 3016617 - RNA, 15 nt, Human
aggucuguucuuucc

SEQ ID NO: 3016618 - RNA, 22 nt, Human
agucacacaguauuacuucugc

SEQ ID NO: 3016619 - RNA, 20 nt, Human
aguaugaggcauuuguuuga

SEQ ID NO: 3016620 - RNA, 21 nt, Human
aguaugaggcauuuguuugaa

SEQ ID NO: 3016621 - RNA, 23 nt, Human
aguaugaggcauuuguuugaacu

SEQ ID NO: 3016622 - RNA, 17 nt, Human
aguaugaggcauuuguu

SEQ ID NO: 3016623 - RNA, 17 nt, Human
agucugaaggcuggguu

SEQ ID NO: 3016624 - RNA, 19 nt, Human
aguccuuaccagcagagca

SEQ ID NO: 3016625 - RNA, 22 nt, Human
aguccucuuuucugagaggacu

SEQ ID NO: 3016626 - RNA, 20 nt, Human
aguccuuaccagcagagcac

SEQ ID NO: 3016627 - RNA, 19 nt, Human
aguccucuuuucugagagg

SEQ ID NO: 3016628 - RNA, 16 nt, Human
aguugauacuacaguu

SEQ ID NO: 3016629 - RNA, 13 nt, Human
aguucaucuugaa

SEQ ID NO: 3016630 - RNA, 19 nt, Human
aguucaucuugaauuguaa

SEQ ID NO: 3016631 - RNA, 15 nt, Human
aguucaucuugaauu

SEQ ID NO: 3016632 - RNA, 14 nt, Human
agugauucuccugc

SEQ ID NO: 3016633 - RNA, 18 nt, Human
agugccuuacacaauggu

SEQ ID NO: 3016634 - RNA, 15 nt, Human
agugauucuccugcc

SEQ ID NO: 3016635 - RNA, 17 nt, Human
agugauucuccugccuc

SEQ ID NO: 3016636 - RNA, 14 nt, Human
agugauccucccac

SEQ ID NO: 3016637 - RNA, 15 nt, Human
agugauccucccacc

SEQ ID NO: 3016638 - RNA, 18 nt, Human
agugauccucccaccuca

SEQ ID NO: 3016639 - RNA, 23 nt, Human
agugauccucccaccucagccuc

SEQ ID NO: 3016640 - RNA, 24 nt, Human
agugauccucccaccucagccucc

SEQ ID NO: 3016641 - RNA, 15 nt, Human
agugccuuauggaac

SEQ ID NO: 3016642 - RNA, 14 nt, Human
agugccuuauggaa

SEQ ID NO: 3016643 - RNA, 13 nt, Human
agugccuuaugga

SEQ ID NO: 3016644 - RNA, 10 nt, Human
agugccuuau

SEQ ID NO: 3016645 - RNA, 16 nt, Human
agugccuuauggaaca

SEQ ID NO: 3016646 - RNA, 16 nt, Human
agugggagcugccugu

SEQ ID NO: 3016647 - RNA, 17 nt, Human
auauucauucuuuuuga

SEQ ID NO: 3016648 - RNA, 17 nt, Human
auauucaggaagcucag

SEQ ID NO: 3016649 - RNA, 19 nt, Human
auauucaggaagcucaggg

SEQ ID NO: 3016650 - RNA, 22 nt, Human
auaugcacacauuuuuuaaaug

SEQ ID NO: 3016651 - RNA, 16 nt, Human
auaugcucugcauguu

SEQ ID NO: 3016652 - RNA, 17 nt, Human
auaugcucugcauguua

SEQ ID NO: 3016653 - RNA, 20 nt, Human
auaugcucugcauguuacau

SEQ ID NO: 3016654 - RNA, 21 nt, Human
auagcagcccucaauugugaa

SEQ ID NO: 3016655 - RNA, 22 nt, Human
auagcagcccucaauugugaaa

SEQ ID NO: 3016656 - RNA, 16 nt, Human
auagcauguccuaaug

SEQ ID NO: 3016657 - RNA, 19 nt, Human
auagcauguccuaaugcuu

SEQ ID NO: 3016658 - RNA, 15 nt, Human
auagcacagacccug

SEQ ID NO: 3016659 - RNA, 18 nt, Human
auagcacagacccugccc

SEQ ID NO: 3016660 - RNA, 17 nt, Human
auagcacagacccugcc

SEQ ID NO: 3016661 - RNA, 15 nt, Human
auagccuaggugaca

SEQ ID NO: 3016662 - RNA, 17 nt, Human
auagccuaggugacaga

SEQ ID NO: 3016663 - RNA, 23 nt, Human
aguuugauuaaauucuugcaaag

SEQ ID NO: 3016664 - RNA, 22 nt, Human
aguuguuacauuuuuaagugcu

SEQ ID NO: 3016665 - RNA, 19 nt, Human
aguuguuacauuuuuaagu

SEQ ID NO: 3016666 - RNA, 20 nt, Human
aguuguuacauuuuuaagug

SEQ ID NO: 3016667 - RNA, 17 nt, Human
aguuugauuaaauucuu

SEQ ID NO: 3016668 - RNA, 18 nt, Human
aguuugauuaaauucuug

SEQ ID NO: 3016669 - RNA, 20 nt, Human
aguuugauuaaauucuugca

SEQ ID NO: 3016670 - RNA, 22 nt, Human
aguuugauuaaauucuugcaaa

SEQ ID NO: 3016671 - RNA, 19 nt, Human
aguuugagaucagccuggg

SEQ ID NO: 3016672 - RNA, 18 nt, Human
aguuugagaucagccugg

SEQ ID NO: 3016673 - RNA, 16 nt, Human
aguuugauuaaauucu

SEQ ID NO: 3016674 - RNA, 20 nt, Human
aguuugagaucagccugggc

SEQ ID NO: 3016675 - RNA, 12 nt, Human
auaacauguaau

SEQ ID NO: 3016676 - RNA, 13 nt, Human
auaacauguaauu

SEQ ID NO: 3016677 - RNA, 18 nt, Human
auaacauguaauuaagua

SEQ ID NO: 3016678 - RNA, 20 nt, Human
auaacauguaauuaaguacu

SEQ ID NO: 3016679 - RNA, 18 nt, Human
auaaggguaucuggugac

SEQ ID NO: 3016680 - RNA, 16 nt, Human
auaccugucccccuga

SEQ ID NO: 3016681 - RNA, 15 nt, Human
auaccugucccccug

SEQ ID NO: 3016682 - RNA, 14 nt, Human
auaccugucccccu

SEQ ID NO: 3016683 - RNA, 13 nt, Human
auaccuguccccc

SEQ ID NO: 3016684 - RNA, 13 nt, Human
auacccaccccca

SEQ ID NO: 3016685 - RNA, 16 nt, Human
auacccacccccaccc

SEQ ID NO: 3016686 - RNA, 14 nt, Human
auacccacccccac

SEQ ID NO: 3016687 - RNA, 17 nt, Human
auacccacccccaccca

SEQ ID NO: 3016688 - RNA, 14 nt, Human
auacaaugcugugc

SEQ ID NO: 3016689 - RNA, 17 nt, Human
auacaaugcugugcccu

SEQ ID NO: 3016690 - RNA, 13 nt, Human
auacacuuacacu

SEQ ID NO: 3016691 - RNA, 22 nt, Human
auacacuuacacuuuaugcaca

SEQ ID NO: 3016692 - RNA, 13 nt, Human
augaaugcccagu

SEQ ID NO: 3016693 - RNA, 21 nt, Human
augaaugcccagugagacugu

SEQ ID NO: 3016694 - RNA, 20 nt, Human
augaaugucagugugacuga

SEQ ID NO: 3016695 - RNA, 22 nt, Human
uuggggggcugaggugggagga

SEQ ID NO: 3016696 - RNA, 14 nt, Human
uuggggauauuuuu

SEQ ID NO: 3016697 - RNA, 18 nt, Human
uuggcuagagguucaaag

SEQ ID NO: 3016698 - RNA, 23 nt, Human
uuggcgcugccccuggcagcccc

SEQ ID NO: 3016699 - RNA, 22 nt, Human
uuggcgcugccccuggcagccc

SEQ ID NO: 3016700 - RNA, 18 nt, Human
aucuuugcagacaggcaa

SEQ ID NO: 3016701 - RNA, 21 nt, Human
uugguugguaacucuguaauu

SEQ ID NO: 3016702 - RNA, 17 nt, Human
uugguugggaugacuug

SEQ ID NO: 3016703 - RNA, 20 nt, Human
uugguucuggacuaaaacua

SEQ ID NO: 3016704 - RNA, 18 nt, Human
uugguucuggacuaaaac

SEQ ID NO: 3016705 - RNA, 14 nt, Human
augacacaugcaag

SEQ ID NO: 3016706 - RNA, 22 nt, Human
augacacaugcaaggucauuuu

SEQ ID NO: 3016707 - RNA, 23 nt, Human
augacuuggugucuaauguguag

SEQ ID NO: 3016708 - RNA, 18 nt, Human
augacuuggugucuaaug

SEQ ID NO: 3016709 - RNA, 16 nt, Human
augacuuacuguacau

SEQ ID NO: 3016710 - RNA, 17 nt, Human
augacuuacuguacaug

SEQ ID NO: 3016711 - RNA, 19 nt, Human
augacauugacuauuuuug

SEQ ID NO: 3016712 - RNA, 16 nt, Human
augacauugacuauuu

SEQ ID NO: 3016713 - RNA, 14 nt, Human
augacauucccugc

SEQ ID NO: 3016714 - RNA, 18 nt, Human
augacacgaauauugcug

SEQ ID NO: 3016715 - RNA, 22 nt, Human
augacuuaagcacacuugacau

SEQ ID NO: 3016716 - RNA, 14 nt, Human
augacuuacuguac

SEQ ID NO: 3016717 - RNA, 21 nt, Human
augagaaagguugaagcacca

SEQ ID NO: 3016718 - RNA, 22 nt, Human
augagaaagguugaagcaccaa

SEQ ID NO: 3016719 - RNA, 11 nt, Human
uugcacauuaa

SEQ ID NO: 3016720 - RNA, 23 nt, Human
uugcacauuaaaugacucuuccc

SEQ ID NO: 3016721 - RNA, 16 nt, Human
uugauucagacagcug

SEQ ID NO: 3016722 - RNA, 15 nt, Human
uugauucagacagcu

SEQ ID NO: 3016723 - RNA, 14 nt, Human
uugauucagacagc

SEQ ID NO: 3016724 - RNA, 19 nt, Human
auccuaguuccaccaucaa

SEQ ID NO: 3016725 - RNA, 15 nt, Human
auccuaguuccacca

SEQ ID NO: 3016726 - RNA, 16 nt, Human
aucucacacaugagca

SEQ ID NO: 3016727 - RNA, 15 nt, Human
aucucacacaugagc

SEQ ID NO: 3016728 - RNA, 13 nt, Human
aucucccccagcc

SEQ ID NO: 3016729 - RNA, 12 nt, Human
aucucccccagc

SEQ ID NO: 3016730 - RNA, 20 nt, Human
uugccuaauaugaugacugu

SEQ ID NO: 3016731 - RNA, 18 nt, Human
uugccgucuaccugaggg

SEQ ID NO: 3016732 - RNA, 15 nt, Human
uugccgucuaccuga

SEQ ID NO: 3016733 - RNA, 19 nt, Human
uugccgucuaccugagggg

SEQ ID NO: 3016734 - RNA, 14 nt, Human
uugccguuauuaaa

SEQ ID NO: 3016735 - RNA, 13 nt, Human
uugccgucuaccu

SEQ ID NO: 3016736 - RNA, 12 nt, Human
aucuguuacaca

SEQ ID NO: 3016737 - RNA, 18 nt, Human
aucuugaauuguaaggaa

SEQ ID NO: 3016738 - RNA, 17 nt, Human
aucuugaauuguaagga

SEQ ID NO: 3016739 - RNA, 17 nt, Human
aucuugcucugcugaca

SEQ ID NO: 3016740 - RNA, 19 nt, Human
aucuugcucugcugacaga

SEQ ID NO: 3016741 - RNA, 23 nt, Human
aucugugaaaggaaagagggagg

SEQ ID NO: 3016742 - RNA, 19 nt, Human
aucuggguucacugcaacc

SEQ ID NO: 3016743 - RNA, 17 nt, Human
aucuggguucacugcaa

SEQ ID NO: 3016744 - RNA, 22 nt, Human
uuuagaugaaugucaguuguua

SEQ ID NO: 3016745 - RNA, 17 nt, Human
uuuagaugaaugucagu

SEQ ID NO: 3016746 - RNA, 18 nt, Human
uuuagaugaaugucaguu

SEQ ID NO: 3016747 - RNA, 15 nt, Human
uuuaguagagacagg

SEQ ID NO: 3016748 - RNA, 24 nt, Human
uuuauggcuuuugugcauuaucua

SEQ ID NO: 3016749 - RNA, 20 nt, Human
uuuauggcuuuugugcauua

SEQ ID NO: 3016750 - RNA, 18 nt, Human
augcuguacauacuuuuu

SEQ ID NO: 3016751 - RNA, 16 nt, Human
augcuguacauacuuu

SEQ ID NO: 3016752 - RNA, 19 nt, Human
augcugucccuuacgugag

SEQ ID NO: 3016753 - RNA, 23 nt, Human
augcugucccuuacgugaguccu

SEQ ID NO: 3016754 - RNA, 11 nt, Human
auggaacacuc

SEQ ID NO: 3016755 - RNA, 15 nt, Human
auggaacacucugag

SEQ ID NO: 3016756 - RNA, 14 nt, Human
auggaacacucuga

SEQ ID NO: 3016757 - RNA, 15 nt, Human
auggaagacagcucu

SEQ ID NO: 3016758 - RNA, 16 nt, Human
auggaacacucugaga

SEQ ID NO: 3016759 - RNA, 15 nt, Human
augcuguacauacuu

SEQ ID NO: 3016760 - RNA, 12 nt, Human
augcuguacaua

SEQ ID NO: 3016761 - RNA, 22 nt, Human
augcuguaacuuucugaaauaa

SEQ ID NO: 3016762 - RNA, 19 nt, Human
augcuccuggcccacugca

SEQ ID NO: 3016763 - RNA, 14 nt, Human
auggacaugaucuu

SEQ ID NO: 3016764 - RNA, 16 nt, Human
auggaagacagcucuu

SEQ ID NO: 3016765 - RNA, 13 nt, Human
uuucagaaaugug

SEQ ID NO: 3016766 - RNA, 17 nt, Human
auggcacaucagcacga

SEQ ID NO: 3016767 - RNA, 23 nt, Human
auggcacaucagcacgauuucug

SEQ ID NO: 3016768 - RNA, 20 nt, Human
auggacguguuaugacucca

SEQ ID NO: 3016769 - RNA, 19 nt, Human
auggacguguuaugacucc

SEQ ID NO: 3016770 - RNA, 23 nt, Human
auggacguguuaugacuccagaa

SEQ ID NO: 3016771 - RNA, 18 nt, Human
auggauuuccagccaaag

SEQ ID NO: 3016772 - RNA, 21 nt, Human
auggccgggcgcgguggcuca

SEQ ID NO: 3016773 - RNA, 20 nt, Human
auggccuuugcuugaaagaa

SEQ ID NO: 3016774 - RNA, 18 nt, Human
augcaguacuaacauuua

SEQ ID NO: 3016775 - RNA, 13 nt, Human
augcagguuuuau

SEQ ID NO: 3016776 - RNA, 15 nt, Human
augcagccucacagu

SEQ ID NO: 3016777 - RNA, 14 nt, Human
augcagccucacag

SEQ ID NO: 3016778 - RNA, 13 nt, Human
augcagccucaca

SEQ ID NO: 3016779 - RNA, 22 nt, Human
uuuaauuugaagguagaauguu

SEQ ID NO: 3016780 - RNA, 12 nt, Human
uuuaauucaguu

SEQ ID NO: 3016781 - RNA, 17 nt, Human
uuuaagugcugcauuua

SEQ ID NO: 3016782 - RNA, 19 nt, Human
uuuaagugcugcauuuaaa

SEQ ID NO: 3016783 - RNA, 15 nt, Human
uuuaagugcugcauu

SEQ ID NO: 3016784 - RNA, 16 nt, Human
uuuaagugcugcauuu

SEQ ID NO: 3016785 - RNA, 14 nt, Human
uuuaagaggcaggg

SEQ ID NO: 3016786 - RNA, 15 nt, Human
augcacuuuguucug

SEQ ID NO: 3016787 - RNA, 13 nt, Human
uuguuuucagugu

SEQ ID NO: 3016788 - RNA, 16 nt, Human
uuguuuucaguguaca

SEQ ID NO: 3016789 - RNA, 13 nt, Human
augauuucacagu

SEQ ID NO: 3016790 - RNA, 21 nt, Human
augauucaacagguuuuccug

SEQ ID NO: 3016791 - RNA, 19 nt, Human
augauuaaccacuucagcu

SEQ ID NO: 3016792 - RNA, 21 nt, Human
augauuaaccacuucagcuga

SEQ ID NO: 3016793 - RNA, 20 nt, Human
augauuaaccacuucagcug

SEQ ID NO: 3016794 - RNA, 12 nt, Human
augcacuuuguu

SEQ ID NO: 3016795 - RNA, 13 nt, Human
augcaccagcccu

SEQ ID NO: 3016796 - RNA, 21 nt, Human
uugugaggaagccgcuggggc

SEQ ID NO: 3016797 - RNA, 18 nt, Human
uugugauacaaugcugug

SEQ ID NO: 3016798 - RNA, 22 nt, Human
uuguucuggcucuuccaggcug

SEQ ID NO: 3016799 - RNA, 20 nt, Human
uuguucuggcucuuccaggc

SEQ ID NO: 3016800 - RNA, 19 nt, Human
uuguucuggcucuuccagg

SEQ ID NO: 3016801 - RNA, 17 nt, Human
uuguguguuuauuguca

SEQ ID NO: 3016802 - RNA, 13 nt, Human
uugugguuaaucu

SEQ ID NO: 3016803 - RNA, 13 nt, Human
aucauuucaagaa

SEQ ID NO: 3016804 - RNA, 21 nt, Human
aucauugaaaucuuuuugcuu

SEQ ID NO: 3016805 - RNA, 20 nt, Human
aucaggccaggcccucugcc

SEQ ID NO: 3016806 - RNA, 20 nt, Human
aucauugaaaucuuuuugcu

SEQ ID NO: 3016807 - RNA, 23 nt, Human
aucaggccaggcccucugcccac

SEQ ID NO: 3016808 - RNA, 22 nt, Human
aucaggccaggcccucugccca

SEQ ID NO: 3016809 - RNA, 21 nt, Human
aucaggccaggcccucugccc

SEQ ID NO: 3016810 - RNA, 13 nt, Human
uucugccgcagcc

SEQ ID NO: 3016811 - RNA, 14 nt, Human
uucugacccaugcu

SEQ ID NO: 3016812 - RNA, 16 nt, Human
uucucuuuucaaaaca

SEQ ID NO: 3016813 - RNA, 17 nt, Human
uucucuacucuagggaa

SEQ ID NO: 3016814 - RNA, 16 nt, Human
uucuggcuaugcauuu

SEQ ID NO: 3016815 - RNA, 15 nt, Human
uucugccgcagcccu

SEQ ID NO: 3016816 - RNA, 14 nt, Human
uucugccgcagccc

SEQ ID NO: 3016817 - RNA, 18 nt, Human
uucuggcuaugcauuuga

SEQ ID NO: 3016818 - RNA, 20 nt, Human
uucuggcuaugcauuugaaa

SEQ ID NO: 3016819 - RNA, 21 nt, Human
auccaagcuggucccacucag

SEQ ID NO: 3016820 - RNA, 21 nt, Human
uugaaauuuuuauuaaauuau

SEQ ID NO: 3016821 - RNA, 20 nt, Human
uugaaauauaggaacuuaaa

SEQ ID NO: 3016822 - RNA, 11 nt, Human
uugaaaucuuu

SEQ ID NO: 3016823 - RNA, 14 nt, Human
uucuuuuugaaaug

SEQ ID NO: 3016824 - RNA, 15 nt, Human
uucuuuuugaaaugu

SEQ ID NO: 3016825 - RNA, 20 nt, Human
auccuagucauucuucccua

SEQ ID NO: 3016826 - RNA, 13 nt, Human
auccuaguuccac

SEQ ID NO: 3016827 - RNA, 21 nt, Human
auccuaggcauuugcugaaua

SEQ ID NO: 3016828 - RNA, 18 nt, Human
auccuaauaaaaagguga

SEQ ID NO: 3016829 - RNA, 22 nt, Human
auccuaauaaaaaggugaccau

SEQ ID NO: 3016830 - RNA, 14 nt, Human
auccuaauaaaaag

SEQ ID NO: 3016831 - RNA, 15 nt, Human
auccuaauaaaaagg

SEQ ID NO: 3016832 - RNA, 16 nt, Human
auccuaauaaaaaggu

SEQ ID NO: 3016833 - RNA, 17 nt, Human
auccuaauaaaaaggug

SEQ ID NO: 3016834 - RNA, 12 nt, Human
auccuaauaaaa

SEQ ID NO: 3016835 - RNA, 21 nt, Human
auccuaagcuauucaguaaua

SEQ ID NO: 3016836 - RNA, 15 nt, Human
uucuuggcccaggau

SEQ ID NO: 3016837 - RNA, 12 nt, Human
uucuugcaaagu

SEQ ID NO: 3016838 - RNA, 22 nt, Human
uucuuucuggcuaugcauuuga

SEQ ID NO: 3016839 - RNA, 20 nt, Human
uucuguuuuucuaggccugg

SEQ ID NO: 3016840 - RNA, 11 nt, Human
uucuguucuuu

SEQ ID NO: 3016841 - RNA, 18 nt, Human
uucuguucuuucuggcua

SEQ ID NO: 3016842 - RNA, 13 nt, Human
uucuuaauucuua

SEQ ID NO: 3016843 - RNA, 23 nt, Human
uucuuccucccucccucuuuccc

SEQ ID NO: 3016844 - RNA, 13 nt, Human
uucucagcagagu

SEQ ID NO: 3016845 - RNA, 13 nt, Human
aucaggccaggcc

SEQ ID NO: 3016846 - RNA, 21 nt, Human
uucucacugccaugccagcuu

SEQ ID NO: 3016847 - RNA, 22 nt, Human
uucuaaauaucccuuggacauu

SEQ ID NO: 3016848 - RNA, 13 nt, Human
uucgcuccugugu

SEQ ID NO: 3016849 - RNA, 21 nt, Human
uucgcaggauucuuccucccu

SEQ ID NO: 3016850 - RNA, 21 nt, Human
uuccuucaagaaugcaguacu

SEQ ID NO: 3016851 - RNA, 14 nt, Human
uuccuucaagaaug

SEQ ID NO: 3016852 - RNA, 19 nt, Human
aucaaccccuucgcuccug

SEQ ID NO: 3016853 - RNA, 20 nt, Human
aucaaccccuucgcuccugu

SEQ ID NO: 3016854 - RNA, 22 nt, Human
aucaaccccuucgcuccugugu

SEQ ID NO: 3016855 - RNA, 18 nt, Human
uucccuuuuuuggcugcu

SEQ ID NO: 3016856 - RNA, 20 nt, Human
uucccuuuuuuggcugcuga

SEQ ID NO: 3016857 - RNA, 19 nt, Human
uucccuuuuuuggcugcug

SEQ ID NO: 3016858 - RNA, 16 nt, Human
auaugaugacuguuuu

SEQ ID NO: 3016859 - RNA, 13 nt, Human
auaugcacacauu

SEQ ID NO: 3016860 - RNA, 16 nt, Human
auaugcacacauuuuu

SEQ ID NO: 3016861 - RNA, 14 nt, Human
auaugcacacauuu

SEQ ID NO: 3016862 - RNA, 15 nt, Human
auaugcacacauuuu

SEQ ID NO: 3016863 - RNA, 17 nt, Human
auauguaacaagccacc

SEQ ID NO: 3016864 - RNA, 16 nt, Human
auauguaacaagccac

SEQ ID NO: 3016865 - RNA, 16 nt, Human
auaucugaaaauguau

SEQ ID NO: 3016866 - RNA, 17 nt, Human
auaucugaaaauguaug

SEQ ID NO: 3016867 - RNA, 20 nt, Human
auaucugaaaauguaugugu

SEQ ID NO: 3016868 - RNA, 17 nt, Human
uucaucccucuggggcu

SEQ ID NO: 3016869 - RNA, 21 nt, Human
uucaucccucuggggcuguuc

SEQ ID NO: 3016870 - RNA, 18 nt, Human
uucagugccuuauggaac

SEQ ID NO: 3016871 - RNA, 13 nt, Human
uucagugccuuau

SEQ ID NO: 3016872 - RNA, 12 nt, Human
uucagugccuua

SEQ ID NO: 3016873 - RNA, 16 nt, Human
uucagugccaaaaaca

SEQ ID NO: 3016874 - RNA, 11 nt, Human
uucagaaaugu

SEQ ID NO: 3016875 - RNA, 13 nt, Human
uucagaaaugugu

SEQ ID NO: 3016876 - RNA, 17 nt, Human
uuccaggggugggacac

SEQ ID NO: 3016877 - RNA, 18 nt, Human
uuccaccaucaagccacc

SEQ ID NO: 3016878 - RNA, 22 nt, Human
uuccacaagagcccaggccucc

SEQ ID NO: 3016879 - RNA, 19 nt, Human
uuccaccaucaagccacca

SEQ ID NO: 3016880 - RNA, 15 nt, Human
uuccaaggguacuaa

SEQ ID NO: 3016881 - RNA, 17 nt, Human
uuccaaggguacuaagg

SEQ ID NO: 3016882 - RNA, 16 nt, Human
auauguggaguucauc

SEQ ID NO: 3016883 - RNA, 15 nt, Human
auauguggaguucau

SEQ ID NO: 3016884 - RNA, 23 nt, Human
uucccaaagcagugcaugcuguc

SEQ ID NO: 3016885 - RNA, 22 nt, Human
uuccagugaggcucugcccuug

SEQ ID NO: 3016886 - RNA, 21 nt, Human
uuccagugaggcucugcccuu

SEQ ID NO: 3016887 - RNA, 20 nt, Human
uuccagugaggcucugcccu

SEQ ID NO: 3016888 - RNA, 19 nt, Human
uuccagugaggcucugccc

SEQ ID NO: 3016889 - RNA, 17 nt, Human
uuccagugaggcucugc

SEQ ID NO: 3016890 - RNA, 21 nt, Human
uuccaggggugggacacccug

SEQ ID NO: 3016891 - RNA, 18 nt, Human
uucccaagcucugcuccu

SEQ ID NO: 3016892 - RNA, 22 nt, Human
uucccaccucucucacuccuug

SEQ ID NO: 3016893 - RNA, 12 nt, Human
uucccaccucuc

SEQ ID NO: 3016894 - RNA, 13 nt, Human
uucccaagcucug

SEQ ID NO: 3016895 - RNA, 14 nt, Human
uucccaagcucugc

SEQ ID NO: 3016896 - RNA, 15 nt, Human
uucccaagcucugcu

SEQ ID NO: 3016897 - RNA, 16 nt, Human
uucccaagcucugcuc

SEQ ID NO: 3016898 - RNA, 23 nt, Human
uucaagaaguccccucuccucca

SEQ ID NO: 3016899 - RNA, 23 nt, Human
uucaagaaugcaguacuaacauu

SEQ ID NO: 3016900 - RNA, 21 nt, Human
uucaagcgauucuucugcuuc

SEQ ID NO: 3016901 - RNA, 18 nt, Human
uuauuuuuagacagaguc

SEQ ID NO: 3016902 - RNA, 17 nt, Human
uuauuuuuagacagagu

SEQ ID NO: 3016903 - RNA, 13 nt, Human
uucacaguucucu

SEQ ID NO: 3016904 - RNA, 20 nt, Human
uucacaguucucuccuucuu

SEQ ID NO: 3016905 - RNA, 15 nt, Human
uucacaguucucucc

SEQ ID NO: 3016906 - RNA, 20 nt, Human
uucacagaugggugcuugga

SEQ ID NO: 3016907 - RNA, 17 nt, Human
auaggaaaaacugauuu

SEQ ID NO: 3016908 - RNA, 16 nt, Human
auaggaaaaacugauu

SEQ ID NO: 3016909 - RNA, 14 nt, Human
auaggaaaaacuga

SEQ ID NO: 3016910 - RNA, 12 nt, Human
auaggaaaaacu

SEQ ID NO: 3016911 - RNA, 12 nt, Human
auauauaaccag

SEQ ID NO: 3016912 - RNA, 13 nt, Human
auauauaaccagu

SEQ ID NO: 3016913 - RNA, 22 nt, Human
auaguuaagcgugcauaaguua

SEQ ID NO: 3016914 - RNA, 22 nt, Human
auaguuggcuaggaccccucca

SEQ ID NO: 3016915 - RNA, 15 nt, Human
auaguggugugauuu

SEQ ID NO: 3016916 - RNA, 17 nt, Human
auaguggcuuaaaacaa

SEQ ID NO: 3016917 - RNA, 14 nt, Human
auucucagcagagu

SEQ ID NO: 3016918 - RNA, 15 nt, Human
auucucagcagagug

SEQ ID NO: 3016919 - RNA, 13 nt, Human
auucuccaccugc

SEQ ID NO: 3016920 - RNA, 18 nt, Human
auucucagaaucucaaau

SEQ ID NO: 3016921 - RNA, 20 nt, Human
auucucagaaucucaaauaa

SEQ ID NO: 3016922 - RNA, 16 nt, Human
auugacagauugaauu

SEQ ID NO: 3016923 - RNA, 16 nt, Human
auucucagcagagugc

SEQ ID NO: 3016924 - RNA, 17 nt, Human
auucuccaccugccagg

SEQ ID NO: 3016925 - RNA, 16 nt, Human
auucuccaccugccag

SEQ ID NO: 3016926 - RNA, 14 nt, Human
auucucagaaucuc

SEQ ID NO: 3016927 - RNA, 13 nt, Human
auucuacuuugag

SEQ ID NO: 3016928 - RNA, 16 nt, Human
auucuacuuugagugc

SEQ ID NO: 3016929 - RNA, 23 nt, Human
auugccauuucuuccacaagagc

SEQ ID NO: 3016930 - RNA, 17 nt, Human
auugcccacgcuggagu

SEQ ID NO: 3016931 - RNA, 21 nt, Human
auugcccacgcuggagugcag

SEQ ID NO: 3016932 - RNA, 16 nt, Human
auugcggacagccacg

SEQ ID NO: 3016933 - RNA, 18 nt, Human
auugcggacagccacggc

SEQ ID NO: 3016934 - RNA, 19 nt, Human
auugcggacagccacggcc

SEQ ID NO: 3016935 - RNA, 21 nt, Human
auugcaacaggcugggcuuca

SEQ ID NO: 3016936 - RNA, 13 nt, Human
auugaccugaggc

SEQ ID NO: 3016937 - RNA, 15 nt, Human
auugcaacaggcugg

SEQ ID NO: 3016938 - RNA, 18 nt, Human
auuuaaacacauuaaagg

SEQ ID NO: 3016939 - RNA, 17 nt, Human
auuuaaacacauuaaag

SEQ ID NO: 3016940 - RNA, 15 nt, Human
auuuaacagaaaugu

SEQ ID NO: 3016941 - RNA, 16 nt, Human
auuuaacagaaaugua

SEQ ID NO: 3016942 - RNA, 17 nt, Human
auuuaacagaaauguac

SEQ ID NO: 3016943 - RNA, 19 nt, Human
auuuaacagaaauguacag

SEQ ID NO: 3016944 - RNA, 20 nt, Human
auuuaacagaaauguacagc

SEQ ID NO: 3016945 - RNA, 19 nt, Human
auuuaauuuuuuugagaca

SEQ ID NO: 3016946 - RNA, 23 nt, Human
auuuaauuuuuuugagacagagu

SEQ ID NO: 3016947 - RNA, 22 nt, Human
auuuaauuugaagguagaaugu

SEQ ID NO: 3016948 - RNA, 23 nt, Human
auuggcuuuggguugcaggaccu

SEQ ID NO: 3016949 - RNA, 13 nt, Human
auuuuauuaugca

SEQ ID NO: 3016950 - RNA, 17 nt, Human
auuuuauuaugcaugaa

SEQ ID NO: 3016951 - RNA, 14 nt, Human
auuuuauuaugcau

SEQ ID NO: 3016952 - RNA, 15 nt, Human
auuuuauuaugcaug

SEQ ID NO: 3016953 - RNA, 13 nt, Human
auuuauuauggca

SEQ ID NO: 3016954 - RNA, 20 nt, Human
auuuauuaaaugcccagccc

SEQ ID NO: 3016955 - RNA, 21 nt, Human
auuucuaaaucuccaaaauaa

SEQ ID NO: 3016956 - RNA, 12 nt, Human
auuucuaaaucu

SEQ ID NO: 3016957 - RNA, 13 nt, Human
auuucuaaaucuc

SEQ ID NO: 3016958 - RNA, 14 nt, Human
auuuccugugucuu

SEQ ID NO: 3016959 - RNA, 16 nt, Human
auuuauuauggcacau

SEQ ID NO: 3016960 - RNA, 17 nt, Human
auuuggugguuucagaa

SEQ ID NO: 3016961 - RNA, 18 nt, Human
auuuggugguuucagaaa

SEQ ID NO: 3016962 - RNA, 20 nt, Human
auuuggugguuucagaaaug

SEQ ID NO: 3016963 - RNA, 20 nt, Human
auuucuuuugccguuauuaa

SEQ ID NO: 3016964 - RNA, 16 nt, Human
auuugagcagggcuca

SEQ ID NO: 3016965 - RNA, 23 nt, Human
auuugaggucuguucuuuccaaa

SEQ ID NO: 3016966 - RNA, 17 nt, Human
auuugagcagggcucag

SEQ ID NO: 3016967 - RNA, 22 nt, Human
auuugaggucuguucuuuccaa

SEQ ID NO: 3016968 - RNA, 23 nt, Human
auuucuuuugccguuauuaaaaa

SEQ ID NO: 3016969 - RNA, 11 nt, Human
auuauuaacaa

SEQ ID NO: 3016970 - RNA, 23 nt, Human
auuauuuauuaaaugcccagccc

SEQ ID NO: 3016971 - RNA, 22 nt, Human
auuaccugaauuuuggcugugu

SEQ ID NO: 3016972 - RNA, 19 nt, Human
auuaccacagacauacuaa

SEQ ID NO: 3016973 - RNA, 22 nt, Human
uuuuuguuccacaaguuaaaua

SEQ ID NO: 3016974 - RNA, 21 nt, Human
auucaguuguuagugugucuu

SEQ ID NO: 3016975 - RNA, 16 nt, Human
auucaguuguuagugu

SEQ ID NO: 3016976 - RNA, 23 nt, Human
auucaggaagcucagggccuggc

SEQ ID NO: 3016977 - RNA, 22 nt, Human
auucaggaagcucagggccugg

SEQ ID NO: 3016978 - RNA, 21 nt, Human
auucaggaagcucagggccug

SEQ ID NO: 3016979 - RNA, 18 nt, Human
auucagcucugcaagaau

SEQ ID NO: 3016980 - RNA, 14 nt, Human
auucagcucugcaa

SEQ ID NO: 3016981 - RNA, 20 nt, Human
auuccccagauugcaacagg

SEQ ID NO: 3016982 - RNA, 22 nt, Human
auuccccacccugaaagcccug

SEQ ID NO: 3016983 - RNA, 16 nt, Human
auuccccaggaggcca

SEQ ID NO: 3016984 - RNA, 12 nt, Human
uuugcacauuaa

SEQ ID NO: 3016985 - RNA, 22 nt, Human
uuugccauguuggccaggcugg

SEQ ID NO: 3016986 - RNA, 16 nt, Human
uuugcacauuaaauga

SEQ ID NO: 3016987 - RNA, 13 nt, Human
uuugcacauuaaa

SEQ ID NO: 3016988 - RNA, 10 nt, Human
uuuggccaga

SEQ ID NO: 3016989 - RNA, 12 nt, Human
uuuggccagaag

SEQ ID NO: 3016990 - RNA, 14 nt, Human
uuuggccagaaguc

SEQ ID NO: 3016991 - RNA, 13 nt, Human
uuuggggaagaac

SEQ ID NO: 3016992 - RNA, 22 nt, Human
uuugggaggccaaggugggagg

SEQ ID NO: 3016993 - RNA, 14 nt, Human
uuuggggauauuuu

SEQ ID NO: 3016994 - RNA, 23 nt, Human
augucuagaccaggaccucccuc

SEQ ID NO: 3016995 - RNA, 23 nt, Human
augucucuuuaaugucacaggca

SEQ ID NO: 3016996 - RNA, 15 nt, Human
augucaguuguuauu

SEQ ID NO: 3016997 - RNA, 17 nt, Human
augucaguuguuauuua

SEQ ID NO: 3016998 - RNA, 23 nt, Human
auguccaagaagcccaggaaagg

SEQ ID NO: 3016999 - RNA, 18 nt, Human
auguccaagaagcccagg

SEQ ID NO: 3017000 - RNA, 19 nt, Human
auguccaagaagcccagga

SEQ ID NO: 3017001 - RNA, 21 nt, Human
augucagugugacugaucucu

SEQ ID NO: 3017002 - RNA, 16 nt, Human
augucagugugacuga

SEQ ID NO: 3017003 - RNA, 15 nt, Human
augucagugugacug

SEQ ID NO: 3017004 - RNA, 12 nt, Human
auguauguguaa

SEQ ID NO: 3017005 - RNA, 15 nt, Human
auguaucugagcagg

SEQ ID NO: 3017006 - RNA, 15 nt, Human
auguaucaaugagua

SEQ ID NO: 3017007 - RNA, 22 nt, Human
uuugggggaaaauuuagaaaua

SEQ ID NO: 3017008 - RNA, 17 nt, Human
uuuuaagacuuugguua

SEQ ID NO: 3017009 - RNA, 16 nt, Human
uuuuaagaggcagggu

SEQ ID NO: 3017010 - RNA, 15 nt, Human
uuuuaagaggcaggg

SEQ ID NO: 3017011 - RNA, 22 nt, Human
uuuuaagggcccuuuuucaaua

SEQ ID NO: 3017012 - RNA, 15 nt, Human
uuuuaagugcugcau

SEQ ID NO: 3017013 - RNA, 21 nt, Human
uuuuaaaaaacugcugacugu

SEQ ID NO: 3017014 - RNA, 18 nt, Human
uuuguuugaacugauaaa

SEQ ID NO: 3017015 - RNA, 22 nt, Human
uuuguaacuguuuagaugaaug

SEQ ID NO: 3017016 - RNA, 13 nt, Human
uuuguagagccag

SEQ ID NO: 3017017 - RNA, 19 nt, Human
uuugugaggaagccgcugg

SEQ ID NO: 3017018 - RNA, 18 nt, Human
uuugugaggaagccgcug

SEQ ID NO: 3017019 - RNA, 12 nt, Human
uuuguuugaacu

SEQ ID NO: 3017020 - RNA, 13 nt, Human
uuuguuugaacug

SEQ ID NO: 3017021 - RNA, 14 nt, Human
uuuguuugaacuga

SEQ ID NO: 3017022 - RNA, 15 nt, Human
uuuuauuauuaacaa

SEQ ID NO: 3017023 - RNA, 23 nt, Human
uuuuccaguaaugagcuuaagaa

SEQ ID NO: 3017024 - RNA, 19 nt, Human
uuuuccagguuuaagcugu

SEQ ID NO: 3017025 - RNA, 19 nt, Human
uuuuauaaacuuuaccuuu

SEQ ID NO: 3017026 - RNA, 14 nt, Human
uuuuauaaacuuua

SEQ ID NO: 3017027 - RNA, 17 nt, Human
uuuuauaaacuuuaccu

SEQ ID NO: 3017028 - RNA, 12 nt, Human
uuuuauaaacuu

SEQ ID NO: 3017029 - RNA, 13 nt, Human
uuuuauaaacuuu

SEQ ID NO: 3017030 - RNA, 23 nt, Human
uuuuagaguugauacuacaguuu

SEQ ID NO: 3017031 - RNA, 16 nt, Human
auguuggccaggcugg

SEQ ID NO: 3017032 - RNA, 13 nt, Human
auguuggccaggc

SEQ ID NO: 3017033 - RNA, 14 nt, Human
auguuggccaggcu

SEQ ID NO: 3017034 - RNA, 21 nt, Human
uuuuaagugcugcauuuaaaa

SEQ ID NO: 3017035 - RNA, 16 nt, Human
uuuuaagugcugcauu

SEQ ID NO: 3017036 - RNA, 17 nt, Human
uuuuaagugcugcauuu

SEQ ID NO: 3017037 - RNA, 21 nt, Human
auguucaucauccuaagcuau

SEQ ID NO: 3017038 - RNA, 13 nt, Human
auuaaagugccca

SEQ ID NO: 3017039 - RNA, 17 nt, Human
auuaaacuuaaucuaaa

SEQ ID NO: 3017040 - RNA, 16 nt, Human
auuaaacuuaaucuaa

SEQ ID NO: 3017041 - RNA, 19 nt, Human
auuaaacuuaaucuaaaug

SEQ ID NO: 3017042 - RNA, 21 nt, Human
auuaaacuuaaucuaaaugga

SEQ ID NO: 3017043 - RNA, 20 nt, Human
auuaaccacuucagcugacu

SEQ ID NO: 3017044 - RNA, 18 nt, Human
auuaaccacuucagcuga

SEQ ID NO: 3017045 - RNA, 17 nt, Human
auuaaccacuucagcug

SEQ ID NO: 3017046 - RNA, 13 nt, Human
auuaagaaagacu

SEQ ID NO: 3017047 - RNA, 14 nt, Human
auuaagaaagacua

SEQ ID NO: 3017048 - RNA, 23 nt, Human
auuaacuuuuauaaacuuuaccu

SEQ ID NO: 3017049 - RNA, 12 nt, Human
auuaacuuuuau

SEQ ID NO: 3017050 - RNA, 16 nt, Human
auuaacuuuuauaaac

SEQ ID NO: 3017051 - RNA, 17 nt, Human
auuaacuuuuauaaacu

SEQ ID NO: 3017052 - RNA, 19 nt, Human
auuaacuuuuauaaacuuu

SEQ ID NO: 3017053 - RNA, 20 nt, Human
auuaacuuuuauaaacuuua

SEQ ID NO: 3017054 - RNA, 19 nt, Human
uuuucucacagaagaugaa

SEQ ID NO: 3017055 - RNA, 14 nt, Human
auguuuuccaugag

SEQ ID NO: 3017056 - RNA, 17 nt, Human
auguuuuucuucucccu

SEQ ID NO: 3017057 - RNA, 18 nt, Human
auguuuuucuucucccuc

SEQ ID NO: 3017058 - RNA, 17 nt, Human
aguuuugaagauucuau

SEQ ID NO: 3017059 - RNA, 18 nt, Human
aguuuugaagauucuaug

SEQ ID NO: 3017060 - RNA, 23 nt, Human
aguuuuuauggcuuuugugcauu

SEQ ID NO: 3017061 - RNA, 21 nt, Human
uuaagaaaaaggaugcacaga

SEQ ID NO: 3017062 - RNA, 19 nt, Human
uuaagaaaaaggaugcaca

SEQ ID NO: 3017063 - RNA, 20 nt, Human
uuaagaaaaaggaugcacag

SEQ ID NO: 3017064 - RNA, 20 nt, Human
uuaagaacuaaaauguucua

SEQ ID NO: 3017065 - RNA, 16 nt, Human
uuaagaacuaaaaugu

SEQ ID NO: 3017066 - RNA, 19 nt, Human
uuaagaacuaaaauguucu

SEQ ID NO: 3017067 - RNA, 22 nt, Human
uuaagaaagacuaucuaaaugu

SEQ ID NO: 3017068 - RNA, 13 nt, Human
uuaaggguaugau

SEQ ID NO: 3017069 - RNA, 9 nt, Human
uuaaggugg

SEQ ID NO: 3017070 - RNA, 14 nt, Human
uuaagugcugcauu

SEQ ID NO: 3017071 - RNA, 19 nt, Human
uuaagugcugcauuuaaaa

SEQ ID NO: 3017072 - RNA, 15 nt, Human
uuaagugcugcauuu

SEQ ID NO: 3017073 - RNA, 16 nt, Human
uuaagugcugcauuua

SEQ ID NO: 3017074 - RNA, 22 nt, Human
uuaaucauuaggugugacugaa

SEQ ID NO: 3017075 - RNA, 23 nt, Human
uuaaucauuaggugugacugaau

SEQ ID NO: 3017076 - RNA, 13 nt, Human
uuaaucauuaggu

SEQ ID NO: 3017077 - RNA, 19 nt, Human
uuaaugaaagacuguacaa

SEQ ID NO: 3017078 - RNA, 22 nt, Human
uuaaucugguuuauuuuuguuc

SEQ ID NO: 3017079 - RNA, 18 nt, Human
uuaaugaaagacuguaca

SEQ ID NO: 3017080 - RNA, 14 nt, Human
uuaaacacauuaaa

SEQ ID NO: 3017081 - RNA, 16 nt, Human
uuaaaaaucucaaauu

SEQ ID NO: 3017082 - RNA, 14 nt, Human
uuaaaaaucucaaa

SEQ ID NO: 3017083 - RNA, 15 nt, Human
uuaaaaaucucaaau

SEQ ID NO: 3017084 - RNA, 19 nt, Human
uuaaacaugcuguacauac

SEQ ID NO: 3017085 - RNA, 23 nt, Human
uuaaacaugcuguacauacuuuu

SEQ ID NO: 3017086 - RNA, 22 nt, Human
uuaaacaugcuguacauacuuu

SEQ ID NO: 3017087 - RNA, 21 nt, Human
uuaaacaugcuguacauacuu

SEQ ID NO: 3017088 - RNA, 15 nt, Human
uuaaauaaugugaaa

SEQ ID NO: 3017089 - RNA, 13 nt, Human
uuaaauagaugac

SEQ ID NO: 3017090 - RNA, 14 nt, Human
uuaaauagaugaca

SEQ ID NO: 3017091 - RNA, 16 nt, Human
uuaaauagaugacauu

SEQ ID NO: 3017092 - RNA, 13 nt, Human
uuaaauaauguga

SEQ ID NO: 3017093 - RNA, 16 nt, Human
uuaaauaaugugaaac

SEQ ID NO: 3017094 - RNA, 18 nt, Human
uuaaauaaugugaaacug

SEQ ID NO: 3017095 - RNA, 20 nt, Human
uuaacagaaauguacagcaa

SEQ ID NO: 3017096 - RNA, 19 nt, Human
uuaacagaaauguacagca

SEQ ID NO: 3017097 - RNA, 16 nt, Human
uuaacagaaauguaca

SEQ ID NO: 3017098 - RNA, 13 nt, Human
uuaaaaaaaaucc

SEQ ID NO: 3017099 - RNA, 17 nt, Human
aguuggucccccuucca

SEQ ID NO: 3017100 - RNA, 13 nt, Human
aguuggucccccu

SEQ ID NO: 3017101 - RNA, 11 nt, Human
aguuggucccc

SEQ ID NO: 3017102 - RNA, 13 nt, Human
aguugggcuuccu

SEQ ID NO: 3017103 - RNA, 19 nt, Human
aguugggcuuccucauagu

SEQ ID NO: 3017104 - RNA, 23 nt, Human
aguugccagucaccccggccacc

SEQ ID NO: 3017105 - RNA, 23 nt, Human
auaaauauugguugggaugacuu

SEQ ID NO: 3017106 - RNA, 20 nt, Human
auaaccaguguuguggauuu

SEQ ID NO: 3017107 - RNA, 11 nt, Human
auaaauuauuu

SEQ ID NO: 3017108 - RNA, 15 nt, Human
uuacugaacaguaac

SEQ ID NO: 3017109 - RNA, 23 nt, Human
uuacugaacaguaacauagcugu

SEQ ID NO: 3017110 - RNA, 13 nt, Human
uuagacagagucu

SEQ ID NO: 3017111 - RNA, 20 nt, Human
uuagacagagucucacuguu

SEQ ID NO: 3017112 - RNA, 13 nt, Human
uuagacagucccu

SEQ ID NO: 3017113 - RNA, 19 nt, Human
uuacccucauguucuuaau

SEQ ID NO: 3017114 - RNA, 17 nt, Human
uuagguugugaaugcag

SEQ ID NO: 3017115 - RNA, 13 nt, Human
uuagguugugaau

SEQ ID NO: 3017116 - RNA, 12 nt, Human
uuagguugugaa

SEQ ID NO: 3017117 - RNA, 15 nt, Human
uuaguuucuccaagc

SEQ ID NO: 3017118 - RNA, 22 nt, Human
uuaguuugcaguuacacuaaaa

SEQ ID NO: 3017119 - RNA, 18 nt, Human
uuagguuggcaaaaaggc

SEQ ID NO: 3017120 - RNA, 21 nt, Human
uuaggugugacugaauuucuu

SEQ ID NO: 3017121 - RNA, 16 nt, Human
uuaggugaggaagcaa

SEQ ID NO: 3017122 - RNA, 16 nt, Human
uuaggugugacugaau

SEQ ID NO: 3017123 - RNA, 20 nt, Human
uuagggaaggauacaaaagc

SEQ ID NO: 3017124 - RNA, 15 nt, Human
uuaggugaggaagca

SEQ ID NO: 3017125 - RNA, 18 nt, Human
uuagccaagugugguaga

SEQ ID NO: 3017126 - RNA, 18 nt, Human
uuagcaaauucuguuuuu

SEQ ID NO: 3017127 - RNA, 12 nt, Human
auaauacaccac

SEQ ID NO: 3017128 - RNA, 18 nt, Human
auaauacaccacuacauu

SEQ ID NO: 3017129 - RNA, 20 nt, Human
auaauacaccacuacauucu

SEQ ID NO: 3017130 - RNA, 15 nt, Human
auaaugcgugcauac

SEQ ID NO: 3017131 - RNA, 15 nt, Human
auaaugaaugaaaca

SEQ ID NO: 3017132 - RNA, 22 nt, Human
auaauugacaggauuauuggaa

SEQ ID NO: 3017133 - RNA, 15 nt, Human
uguuuagaugaaugu

SEQ ID NO: 3017134 - RNA, 20 nt, Human
uguuuagaugaaugucaguu

SEQ ID NO: 3017135 - RNA, 20 nt, Human
uguuuagauaauacaccacu

SEQ ID NO: 3017136 - RNA, 14 nt, Human
uguuuauugucaaa

SEQ ID NO: 3017137 - RNA, 23 nt, Human
aguucuauuuauuugugagacug

SEQ ID NO: 3017138 - RNA, 24 nt, Human
aguucaaucuggauucauauuuaa

SEQ ID NO: 3017139 - RNA, 16 nt, Human
aguucaauucucauuu

SEQ ID NO: 3017140 - RNA, 23 nt, Human
aguuccucauuagcauuuugcua

SEQ ID NO: 3017141 - RNA, 13 nt, Human
uguuauuuauuga

SEQ ID NO: 3017142 - RNA, 15 nt, Human
uguuauuuauugaaa

SEQ ID NO: 3017143 - RNA, 17 nt, Human
uguuauuuauugaaaug

SEQ ID NO: 3017144 - RNA, 18 nt, Human
uguuauuuauugaaauga

SEQ ID NO: 3017145 - RNA, 19 nt, Human
uguuauuuauugaaaugau

SEQ ID NO: 3017146 - RNA, 18 nt, Human
uguucuuaguuugcaguu

SEQ ID NO: 3017147 - RNA, 18 nt, Human
uguucuagcauggcugcc

SEQ ID NO: 3017148 - RNA, 15 nt, Human
aguggaguuacugaa

SEQ ID NO: 3017149 - RNA, 16 nt, Human
aguuacugaacaguaa

SEQ ID NO: 3017150 - RNA, 15 nt, Human
uguugcccaggcugg

SEQ ID NO: 3017151 - RNA, 13 nt, Human
uguugcccaggcu

SEQ ID NO: 3017152 - RNA, 19 nt, Human
uguucuuucacccuuuucu

SEQ ID NO: 3017153 - RNA, 20 nt, Human
uguucuugguuuguaaauua

SEQ ID NO: 3017154 - RNA, 22 nt, Human
uguucuugguuuguaaauuaac

SEQ ID NO: 3017155 - RNA, 12 nt, Human
agugcuuggccc

SEQ ID NO: 3017156 - RNA, 14 nt, Human
agugcuuggcccag

SEQ ID NO: 3017157 - RNA, 15 nt, Human
agugcuuggcccagg

SEQ ID NO: 3017158 - RNA, 16 nt, Human
agugcuuggcccagga

SEQ ID NO: 3017159 - RNA, 18 nt, Human
agugcuuggcccaggagu

SEQ ID NO: 3017160 - RNA, 19 nt, Human
agugcuuggcccaggaguu

SEQ ID NO: 3017161 - RNA, 16 nt, Human
uguggucccaccccac

SEQ ID NO: 3017162 - RNA, 16 nt, Human
agugcuuccaaggaug

SEQ ID NO: 3017163 - RNA, 12 nt, Human
ugugguuucauu

SEQ ID NO: 3017164 - RNA, 19 nt, Human
ugugucagcauagaaguaa

SEQ ID NO: 3017165 - RNA, 20 nt, Human
ugugguguuuccuggcacug

SEQ ID NO: 3017166 - RNA, 20 nt, Human
agugcugggauuacaagcgu

SEQ ID NO: 3017167 - RNA, 22 nt, Human
agugcugcauuuaaaagauaca

SEQ ID NO: 3017168 - RNA, 19 nt, Human
agugcugggauuacaggug

SEQ ID NO: 3017169 - RNA, 15 nt, Human
agugccuuacacaau

SEQ ID NO: 3017170 - RNA, 17 nt, Human
agugccuuacacaaugg

SEQ ID NO: 3017171 - RNA, 20 nt, Human
agugcugcauuuaaaagaua

SEQ ID NO: 3017172 - RNA, 13 nt, Human
uguuaauauuuua

SEQ ID NO: 3017173 - RNA, 21 nt, Human
uguuaacauggacaugaucuu

SEQ ID NO: 3017174 - RNA, 20 nt, Human
agugcuuggcccaggaguuu

SEQ ID NO: 3017175 - RNA, 22 nt, Human
agugcuuuaccaauugaaguaa

SEQ ID NO: 3017176 - RNA, 19 nt, Human
uguuaaugauagcuacugu

SEQ ID NO: 3017177 - RNA, 11 nt, Human
aguggaaaaau

SEQ ID NO: 3017178 - RNA, 19 nt, Human
aguggaaaaauagccugcc

SEQ ID NO: 3017179 - RNA, 18 nt, Human
aguggaaaaauagccugc

SEQ ID NO: 3017180 - RNA, 13 nt, Human
ugugucucuuggu

SEQ ID NO: 3017181 - RNA, 17 nt, Human
ugugucagguggggcag

SEQ ID NO: 3017182 - RNA, 19 nt, Human
ugugucagguggggcagcu

SEQ ID NO: 3017183 - RNA, 23 nt, Human
uguguuaucacccagaagaaaau

SEQ ID NO: 3017184 - RNA, 14 nt, Human
uguguuaugaagca

SEQ ID NO: 3017185 - RNA, 16 nt, Human
agugagucgaggacag

SEQ ID NO: 3017186 - RNA, 22 nt, Human
agugauucuccugccucagccu

SEQ ID NO: 3017187 - RNA, 24 nt, Human
agugauucuccugccucagccucc

SEQ ID NO: 3017188 - RNA, 14 nt, Human
agugccaaaaacaa

SEQ ID NO: 3017189 - RNA, 16 nt, Human
agugccaaaaacaaca

SEQ ID NO: 3017190 - RNA, 14 nt, Human
agugcccacaggau

SEQ ID NO: 3017191 - RNA, 22 nt, Human
ugugcucugaucauccacugug

SEQ ID NO: 3017192 - RNA, 12 nt, Human
ugugcucugauc

SEQ ID NO: 3017193 - RNA, 23 nt, Human
ugugcucugaucauccacugugc

SEQ ID NO: 3017194 - RNA, 15 nt, Human
ugugcucuggacagg

SEQ ID NO: 3017195 - RNA, 20 nt, Human
agucucacuguugcccaggc

SEQ ID NO: 3017196 - RNA, 18 nt, Human
agucucacuguugcccag

SEQ ID NO: 3017197 - RNA, 19 nt, Human
agucucacuguugcccagg

SEQ ID NO: 3017198 - RNA, 20 nt, Human
ugugcccuaaaguguauuuu

SEQ ID NO: 3017199 - RNA, 21 nt, Human
ugugcccuaaaguguauuuuu

SEQ ID NO: 3017200 - RNA, 15 nt, Human
ugugcugcccugccc

SEQ ID NO: 3017201 - RNA, 14 nt, Human
ugugcugcccugcc

SEQ ID NO: 3017202 - RNA, 13 nt, Human
ugugcugcccugc

SEQ ID NO: 3017203 - RNA, 12 nt, Human
ugugcugcccug

SEQ ID NO: 3017204 - RNA, 19 nt, Human
ugugcucuggacaggcaug

SEQ ID NO: 3017205 - RNA, 16 nt, Human
ugugcucuggacaggc

SEQ ID NO: 3017206 - RNA, 18 nt, Human
ugugcucuggacaggcau

SEQ ID NO: 3017207 - RNA, 17 nt, Human
agguagaauguuuucaa

SEQ ID NO: 3017208 - RNA, 23 nt, Human
agguagaaauaucugaaaaugua

SEQ ID NO: 3017209 - RNA, 21 nt, Human
agguaugcaaucaaaucugcu

SEQ ID NO: 3017210 - RNA, 17 nt, Human
agguaugcaaucaaauc

SEQ ID NO: 3017211 - RNA, 18 nt, Human
aggguuggccccugcccg

SEQ ID NO: 3017212 - RNA, 23 nt, Human
aggguuggccccugcccggcugc

SEQ ID NO: 3017213 - RNA, 17 nt, Human
aggguuggccccugccc

SEQ ID NO: 3017214 - RNA, 17 nt, Human
agguagaaauaucugaa

SEQ ID NO: 3017215 - RNA, 19 nt, Human
agguagaaauaucugaaaa

SEQ ID NO: 3017216 - RNA, 12 nt, Human
aggucagagccu

SEQ ID NO: 3017217 - RNA, 17 nt, Human
aggucauuuuuuuuaag

SEQ ID NO: 3017218 - RNA, 20 nt, Human
aggucauuuuuuuuaagaaa

SEQ ID NO: 3017219 - RNA, 15 nt, Human
uggucccaccccaca

SEQ ID NO: 3017220 - RNA, 14 nt, Human
uggucccaccccac

SEQ ID NO: 3017221 - RNA, 18 nt, Human
uggucaccaaaucagcug

SEQ ID NO: 3017222 - RNA, 22 nt, Human
uggucagauuugaacucuucaa

SEQ ID NO: 3017223 - RNA, 17 nt, Human
uggucucaaacucuuga

SEQ ID NO: 3017224 - RNA, 23 nt, Human
uggucucaaacucuugaccucag

SEQ ID NO: 3017225 - RNA, 13 nt, Human
uggucccacccca

SEQ ID NO: 3017226 - RNA, 16 nt, Human
uggucucaaacucuug

SEQ ID NO: 3017227 - RNA, 16 nt, Human
uggucccaccccacac

SEQ ID NO: 3017228 - RNA, 16 nt, Human
uggucugacccacugc

SEQ ID NO: 3017229 - RNA, 17 nt, Human
uggucugacccacugcu

SEQ ID NO: 3017230 - RNA, 21 nt, Human
aggguggugaccucugccuga

SEQ ID NO: 3017231 - RNA, 22 nt, Human
aggguguccggucccuguccca

SEQ ID NO: 3017232 - RNA, 13 nt, Human
aggguuauaauaa

SEQ ID NO: 3017233 - RNA, 24 nt, Human
agggguucccuuuuuuggcugcug

SEQ ID NO: 3017234 - RNA, 20 nt, Human
agggucucacuauguugccc

SEQ ID NO: 3017235 - RNA, 21 nt, Human
agggucucacuauguugccca

SEQ ID NO: 3017236 - RNA, 22 nt, Human
agggucucacuauguugcccag

SEQ ID NO: 3017237 - RNA, 23 nt, Human
agggucucacuauguugcccagg

SEQ ID NO: 3017238 - RNA, 15 nt, Human
aggggguggccuccc

SEQ ID NO: 3017239 - RNA, 18 nt, Human
aggggguggccucccaac

SEQ ID NO: 3017240 - RNA, 17 nt, Human
aggggguggccucccaa

SEQ ID NO: 3017241 - RNA, 22 nt, Human
aggggugggacacccugugaug

SEQ ID NO: 3017242 - RNA, 20 nt, Human
aggggugggacacccuguga

SEQ ID NO: 3017243 - RNA, 18 nt, Human
aggggugggacacccugu

SEQ ID NO: 3017244 - RNA, 19 nt, Human
uggggucacucuggcagcu

SEQ ID NO: 3017245 - RNA, 23 nt, Human
aggggagcaaaaucgaugcagug

SEQ ID NO: 3017246 - RNA, 22 nt, Human
agggucucacucugucgcccag

SEQ ID NO: 3017247 - RNA, 21 nt, Human
agggucucacucugucgccca

SEQ ID NO: 3017248 - RNA, 22 nt, Human
uggguggcaccagcagccugga

SEQ ID NO: 3017249 - RNA, 22 nt, Human
ugggugcuuggaggaaggaaac

SEQ ID NO: 3017250 - RNA, 19 nt, Human
ugggugcuuggaggaagga

SEQ ID NO: 3017251 - RNA, 15 nt, Human
ugggugcuuggagga

SEQ ID NO: 3017252 - RNA, 16 nt, Human
ugguacuaacuuuccu

SEQ ID NO: 3017253 - RNA, 15 nt, Human
ugggcacaucauuuc

SEQ ID NO: 3017254 - RNA, 17 nt, Human
ugggcaacccccagccu

SEQ ID NO: 3017255 - RNA, 20 nt, Human
ugggcaacccccagccugcu

SEQ ID NO: 3017256 - RNA, 20 nt, Human
ugggcacaucauuucaagaa

SEQ ID NO: 3017257 - RNA, 20 nt, Human
ugggcccaaugcacuuuguu

SEQ ID NO: 3017258 - RNA, 16 nt, Human
ugggccaggagccucc

SEQ ID NO: 3017259 - RNA, 14 nt, Human
ugggccaggagccu

SEQ ID NO: 3017260 - RNA, 13 nt, Human
ugggccaggagcc

SEQ ID NO: 3017261 - RNA, 17 nt, Human
ugggaggucaaggcugc

SEQ ID NO: 3017262 - RNA, 23 nt, Human
ugggaggucaaggcugcagugag

SEQ ID NO: 3017263 - RNA, 20 nt, Human
ugggaggucaaggcugcagu

SEQ ID NO: 3017264 - RNA, 19 nt, Human
ugggaggucaaggcugcag

SEQ ID NO: 3017265 - RNA, 18 nt, Human
ugggaggucaaggcugca

SEQ ID NO: 3017266 - RNA, 16 nt, Human
ugggcaacccccagcc

SEQ ID NO: 3017267 - RNA, 17 nt, Human
agggaggugaccccagg

SEQ ID NO: 3017268 - RNA, 17 nt, Human
agggagugacagaggca

SEQ ID NO: 3017269 - RNA, 18 nt, Human
agggagugacagaggcag

SEQ ID NO: 3017270 - RNA, 19 nt, Human
agggagugacagaggcagc

SEQ ID NO: 3017271 - RNA, 15 nt, Human
agggagggcuucugc

SEQ ID NO: 3017272 - RNA, 23 nt, Human
agggcccagagaggguggugacc

SEQ ID NO: 3017273 - RNA, 18 nt, Human
agggcccagagagggugg

SEQ ID NO: 3017274 - RNA, 23 nt, Human
agggcuucugccauuucugagau

SEQ ID NO: 3017275 - RNA, 15 nt, Human
ugggcucccuuccca

SEQ ID NO: 3017276 - RNA, 19 nt, Human
ugggcucccuucccaccuc

SEQ ID NO: 3017277 - RNA, 18 nt, Human
ugggcucccuucccaccu

SEQ ID NO: 3017278 - RNA, 20 nt, Human
ugggcucccuucccaccucu

SEQ ID NO: 3017279 - RNA, 15 nt, Human
uggggaccagagcug

SEQ ID NO: 3017280 - RNA, 14 nt, Human
uggggaccagagcu

SEQ ID NO: 3017281 - RNA, 13 nt, Human
uggggaccucagg

SEQ ID NO: 3017282 - RNA, 18 nt, Human
uggggaccagagcugcca

SEQ ID NO: 3017283 - RNA, 17 nt, Human
uggggaccagagcugcc

SEQ ID NO: 3017284 - RNA, 19 nt, Human
ugggcuggguucuacccag

SEQ ID NO: 3017285 - RNA, 18 nt, Human
ugggcuggguucuaccca

SEQ ID NO: 3017286 - RNA, 20 nt, Human
uggggcugcaccggcuggcc

SEQ ID NO: 3017287 - RNA, 14 nt, Human
ugggguacccacug

SEQ ID NO: 3017288 - RNA, 18 nt, Human
uggggucacucuggcagc

SEQ ID NO: 3017289 - RNA, 17 nt, Human
uggggucacucuggcag

SEQ ID NO: 3017290 - RNA, 15 nt, Human
ugggguacccacugc

SEQ ID NO: 3017291 - RNA, 16 nt, Human
ugggguacccacugcu

SEQ ID NO: 3017292 - RNA, 20 nt, Human
ugggguacccacugcucugg

SEQ ID NO: 3017293 - RNA, 16 nt, Human
uggggcccugccuccu

SEQ ID NO: 3017294 - RNA, 15 nt, Human
uggggcccugccucc

SEQ ID NO: 3017295 - RNA, 18 nt, Human
uggggcggugagagggga

SEQ ID NO: 3017296 - RNA, 23 nt, Human
uggggaccucaggccugggggcu

SEQ ID NO: 3017297 - RNA, 12 nt, Human
uggggagaaagu

SEQ ID NO: 3017298 - RNA, 14 nt, Human
uggggcccugccuc

SEQ ID NO: 3017299 - RNA, 15 nt, Human
ugucaguauuucaac

SEQ ID NO: 3017300 - RNA, 16 nt, Human
ugucagcugaaccugg

SEQ ID NO: 3017301 - RNA, 18 nt, Human
agucacugagacagcccg

SEQ ID NO: 3017302 - RNA, 19 nt, Human
agucacugagacagcccgg

SEQ ID NO: 3017303 - RNA, 19 nt, Human
ugucagcugaaccugggua

SEQ ID NO: 3017304 - RNA, 13 nt, Human
agucaccaagccc

SEQ ID NO: 3017305 - RNA, 13 nt, Human
aguagucagacug

SEQ ID NO: 3017306 - RNA, 16 nt, Human
aguaggaagacuuugg

SEQ ID NO: 3017307 - RNA, 22 nt, Human
aguaggaagacuuuggaaagac

SEQ ID NO: 3017308 - RNA, 19 nt, Human
aguaggaagacuuuggaaa

SEQ ID NO: 3017309 - RNA, 18 nt, Human
aguaggaagacuuuggaa

SEQ ID NO: 3017310 - RNA, 17 nt, Human
aguaggaagacuuugga

SEQ ID NO: 3017311 - RNA, 14 nt, Human
uguauuuuuuuacu

SEQ ID NO: 3017312 - RNA, 19 nt, Human
ugucaagagggucugagga

SEQ ID NO: 3017313 - RNA, 15 nt, Human
ugucaagccauaauu

SEQ ID NO: 3017314 - RNA, 23 nt, Human
agucagacuggauaguccgucuc

SEQ ID NO: 3017315 - RNA, 22 nt, Human
agucagaaguuucugccgcagc

SEQ ID NO: 3017316 - RNA, 15 nt, Human
ugucgggcaugacac

SEQ ID NO: 3017317 - RNA, 14 nt, Human
ugucgggcaugaca

SEQ ID NO: 3017318 - RNA, 14 nt, Human
ugucgcccagucug

SEQ ID NO: 3017319 - RNA, 15 nt, Human
ugucgcccagucugg

SEQ ID NO: 3017320 - RNA, 12 nt, Human
ugucgggcauga

SEQ ID NO: 3017321 - RNA, 22 nt, Human
uguccuaaugcuugcugcugau

SEQ ID NO: 3017322 - RNA, 16 nt, Human
uguccuacccacccuc

SEQ ID NO: 3017323 - RNA, 14 nt, Human
uguccgagcuuuga

SEQ ID NO: 3017324 - RNA, 13 nt, Human
uguccgagcuuug

SEQ ID NO: 3017325 - RNA, 17 nt, Human
ugucccuuuuccuuuuu

SEQ ID NO: 3017326 - RNA, 16 nt, Human
agucucacuguugccc

SEQ ID NO: 3017327 - RNA, 17 nt, Human
agucucacuguugccca

SEQ ID NO: 3017328 - RNA, 23 nt, Human
aguccgaaagggacuuggaagcu

SEQ ID NO: 3017329 - RNA, 12 nt, Human
agucccugccaa

SEQ ID NO: 3017330 - RNA, 23 nt, Human
uguaauuaugguuaguagaggua

SEQ ID NO: 3017331 - RNA, 23 nt, Human
uguaauuaaguacuauguaucaa

SEQ ID NO: 3017332 - RNA, 17 nt, Human
aggugguuauggagagg

SEQ ID NO: 3017333 - RNA, 17 nt, Human
uguaacuuucugaaaua

SEQ ID NO: 3017334 - RNA, 14 nt, Human
agguuggugggggc

SEQ ID NO: 3017335 - RNA, 21 nt, Human
aggugcacaagcuccaagcuc

SEQ ID NO: 3017336 - RNA, 20 nt, Human
aggugggauccuccaggugc

SEQ ID NO: 3017337 - RNA, 18 nt, Human
aggugggauccuccaggu

SEQ ID NO: 3017338 - RNA, 15 nt, Human
aggugcacaagcucc

SEQ ID NO: 3017339 - RNA, 20 nt, Human
aggugcacaagcuccaagcu

SEQ ID NO: 3017340 - RNA, 18 nt, Human
aggugcacaagcuccaag

SEQ ID NO: 3017341 - RNA, 17 nt, Human
aggugcacaagcuccaa

SEQ ID NO: 3017342 - RNA, 16 nt, Human
aggugcacaagcucca

SEQ ID NO: 3017343 - RNA, 23 nt, Human
aggucuugaacuccuggccucaa

SEQ ID NO: 3017344 - RNA, 21 nt, Human
aguagagguacacuugugaau

SEQ ID NO: 3017345 - RNA, 20 nt, Human
aguagagguacacuugugaa

SEQ ID NO: 3017346 - RNA, 22 nt, Human
aguagagguacacuugugaaua

SEQ ID NO: 3017347 - RNA, 14 nt, Human
aguagagguacacu

SEQ ID NO: 3017348 - RNA, 12 nt, Human
aguagagacagg

SEQ ID NO: 3017349 - RNA, 20 nt, Human
uguaggaagguuaauguuca

SEQ ID NO: 3017350 - RNA, 18 nt, Human
uguaggaagguuaauguu

SEQ ID NO: 3017351 - RNA, 16 nt, Human
aguacacuguuucaaa

SEQ ID NO: 3017352 - RNA, 20 nt, Human
aguacacuguuucaaacuuu

SEQ ID NO: 3017353 - RNA, 14 nt, Human
aguacacuguuuca

SEQ ID NO: 3017354 - RNA, 15 nt, Human
uguacuuuuaagacu

SEQ ID NO: 3017355 - RNA, 18 nt, Human
uguacuuuuaagacuuug

SEQ ID NO: 3017356 - RNA, 14 nt, Human
uguagagugggagc

SEQ ID NO: 3017357 - RNA, 13 nt, Human
uguagagugggag

SEQ ID NO: 3017358 - RNA, 14 nt, Human
uguaauuugugaua

SEQ ID NO: 3017359 - RNA, 17 nt, Human
aguaauaugcacacauu

SEQ ID NO: 3017360 - RNA, 20 nt, Human
aguaauaugcacacauuuuu

SEQ ID NO: 3017361 - RNA, 18 nt, Human
aguaauaugcacacauuu

SEQ ID NO: 3017362 - RNA, 19 nt, Human
aguaauaugcacacauuuu

SEQ ID NO: 3017363 - RNA, 11 nt, Human
agguuuuccug

SEQ ID NO: 3017364 - RNA, 20 nt, Human
aguaagccgugauuuucauu

SEQ ID NO: 3017365 - RNA, 17 nt, Human
aggaaugcaaagaugaa

SEQ ID NO: 3017366 - RNA, 15 nt, Human
aggaaugcaaagaug

SEQ ID NO: 3017367 - RNA, 18 nt, Human
ugcugcccugcccaccug

SEQ ID NO: 3017368 - RNA, 17 nt, Human
ugcugcccugcccaccu

SEQ ID NO: 3017369 - RNA, 16 nt, Human
ugcugcccugcccacc

SEQ ID NO: 3017370 - RNA, 13 nt, Human
ugcugcccugccc

SEQ ID NO: 3017371 - RNA, 21 nt, Human
ugcugcccugcccaccuggcc

SEQ ID NO: 3017372 - RNA, 19 nt, Human
ugcugcccugcccaccugg

SEQ ID NO: 3017373 - RNA, 12 nt, Human
ugcugcccugcc

SEQ ID NO: 3017374 - RNA, 11 nt, Human
ugcugcccugu

SEQ ID NO: 3017375 - RNA, 18 nt, Human
ugcuggcuguuggcuggg

SEQ ID NO: 3017376 - RNA, 19 nt, Human
ugcugggauuacaagcgug

SEQ ID NO: 3017377 - RNA, 19 nt, Human
ugcuggcuguuggcugggg

SEQ ID NO: 3017378 - RNA, 21 nt, Human
ugcuggcuguuggcugggggc

SEQ ID NO: 3017379 - RNA, 21 nt, Human
ugcugggauuacaagcgugag

SEQ ID NO: 3017380 - RNA, 17 nt, Human
ugcugggauuacaggug

SEQ ID NO: 3017381 - RNA, 17 nt, Human
ugcugucccuuacguga

SEQ ID NO: 3017382 - RNA, 15 nt, Human
ugcugucccuuuucc

SEQ ID NO: 3017383 - RNA, 19 nt, Human
ugcugucccuuacgugagu

SEQ ID NO: 3017384 - RNA, 17 nt, Human
ugcugucccuuuuccuu

SEQ ID NO: 3017385 - RNA, 23 nt, Human
ugcuucaaggauccugagccaga

SEQ ID NO: 3017386 - RNA, 21 nt, Human
ugcuucaaggauccugagcca

SEQ ID NO: 3017387 - RNA, 20 nt, Human
ugcuucaaggauccugagcc

SEQ ID NO: 3017388 - RNA, 18 nt, Human
aggacacuaaccacgcug

SEQ ID NO: 3017389 - RNA, 16 nt, Human
ugcuuccagugaggcu

SEQ ID NO: 3017390 - RNA, 19 nt, Human
ugcuaucucccccagcccc

SEQ ID NO: 3017391 - RNA, 18 nt, Human
ugcuaucucccccagccc

SEQ ID NO: 3017392 - RNA, 20 nt, Human
ugcuaucucccccagcccca

SEQ ID NO: 3017393 - RNA, 14 nt, Human
ugcucuggacaggc

SEQ ID NO: 3017394 - RNA, 15 nt, Human
ugcucuggacaggca

SEQ ID NO: 3017395 - RNA, 16 nt, Human
ugcucuggacaggcau

SEQ ID NO: 3017396 - RNA, 21 nt, Human
aggaagccagcaggcucucag

SEQ ID NO: 3017397 - RNA, 23 nt, Human
aggaagccagcaggcucucaggc

SEQ ID NO: 3017398 - RNA, 22 nt, Human
aggaagccagcaggcucucagg

SEQ ID NO: 3017399 - RNA, 20 nt, Human
aggaagccgcuggggccagu

SEQ ID NO: 3017400 - RNA, 19 nt, Human
aggaagccgcuggggccag

SEQ ID NO: 3017401 - RNA, 18 nt, Human
aggaagccgcuggggcca

SEQ ID NO: 3017402 - RNA, 18 nt, Human
aggaagccagcaggcucu

SEQ ID NO: 3017403 - RNA, 23 nt, Human
aggaaggaaacccagcucugguc

SEQ ID NO: 3017404 - RNA, 22 nt, Human
aggaaggaaacccagcucuggu

SEQ ID NO: 3017405 - RNA, 20 nt, Human
aggaaggaaacccagcucug

SEQ ID NO: 3017406 - RNA, 12 nt, Human
aggaagcucagg

SEQ ID NO: 3017407 - RNA, 14 nt, Human
aggaaaggcuccag

SEQ ID NO: 3017408 - RNA, 13 nt, Human
aggaaaggcucca

SEQ ID NO: 3017409 - RNA, 15 nt, Human
aggaaaggcuccagg

SEQ ID NO: 3017410 - RNA, 11 nt, Human
aggaagcacau

SEQ ID NO: 3017411 - RNA, 17 nt, Human
aggaagcacaugccucu

SEQ ID NO: 3017412 - RNA, 16 nt, Human
aggaagcacaugccuc

SEQ ID NO: 3017413 - RNA, 19 nt, Human
aggaaaucaccgaaaacgu

SEQ ID NO: 3017414 - RNA, 15 nt, Human
aggaaaucaccgaaa

SEQ ID NO: 3017415 - RNA, 14 nt, Human
agcuguucagcugg

SEQ ID NO: 3017416 - RNA, 18 nt, Human
agcuugaggguugggcug

SEQ ID NO: 3017417 - RNA, 14 nt, Human
agcuugaggguugg

SEQ ID NO: 3017418 - RNA, 19 nt, Human
agcuugaccgugaggccag

SEQ ID NO: 3017419 - RNA, 23 nt, Human
ugcggacagccacggccaggcca

SEQ ID NO: 3017420 - RNA, 22 nt, Human
ugcggacagccacggccaggcc

SEQ ID NO: 3017421 - RNA, 20 nt, Human
ugcgggcuuccuccuggugu

SEQ ID NO: 3017422 - RNA, 19 nt, Human
ugcggccuuuggcuucacg

SEQ ID NO: 3017423 - RNA, 17 nt, Human
ugcggccuuuggcuuca

SEQ ID NO: 3017424 - RNA, 17 nt, Human
ugcgguccacccaggag

SEQ ID NO: 3017425 - RNA, 18 nt, Human
ugcgguccacccaggagc

SEQ ID NO: 3017426 - RNA, 17 nt, Human
ugcggugcuaucucccc

SEQ ID NO: 3017427 - RNA, 14 nt, Human
ugccugcccaggcc

SEQ ID NO: 3017428 - RNA, 15 nt, Human
ugccugcccaggccc

SEQ ID NO: 3017429 - RNA, 12 nt, Human
ugccucugccuc

SEQ ID NO: 3017430 - RNA, 24 nt, Human
ugccugcccaggccccugccaccc

SEQ ID NO: 3017431 - RNA, 16 nt, Human
ugccugcccaggcccc

SEQ ID NO: 3017432 - RNA, 12 nt, Human
ugcccaggcagg

SEQ ID NO: 3017433 - RNA, 13 nt, Human
ugcccaggcaggu

SEQ ID NO: 3017434 - RNA, 14 nt, Human
ugcccaggcagguc

SEQ ID NO: 3017435 - RNA, 13 nt, Human
ugccucugccucu

SEQ ID NO: 3017436 - RNA, 14 nt, Human
ugccucugccucug

SEQ ID NO: 3017437 - RNA, 13 nt, Human
ugccugcccaggc

SEQ ID NO: 3017438 - RNA, 15 nt, Human
ugccucugccucuga

SEQ ID NO: 3017439 - RNA, 21 nt, Human
agcugcuuuugucuaugggac

SEQ ID NO: 3017440 - RNA, 19 nt, Human
agcugccuguucagcucca

SEQ ID NO: 3017441 - RNA, 21 nt, Human
agcugcuugggcuucauccuc

SEQ ID NO: 3017442 - RNA, 21 nt, Human
agcugccuguucagcuccagc

SEQ ID NO: 3017443 - RNA, 20 nt, Human
agcugcuugggcuucauccu

SEQ ID NO: 3017444 - RNA, 15 nt, Human
ugccuggauggggcu

SEQ ID NO: 3017445 - RNA, 14 nt, Human
ugccuggauggggc

SEQ ID NO: 3017446 - RNA, 20 nt, Human
agcugccuguucagcuccag

SEQ ID NO: 3017447 - RNA, 19 nt, Human
agcugugcucuggacaggc

SEQ ID NO: 3017448 - RNA, 20 nt, Human
agcugugcucuggacaggca

SEQ ID NO: 3017449 - RNA, 21 nt, Human
agcugugcucuggacaggcau

SEQ ID NO: 3017450 - RNA, 21 nt, Human
ugccuguucagcuccagcuca

SEQ ID NO: 3017451 - RNA, 19 nt, Human
ugccuguugggccaggagc

SEQ ID NO: 3017452 - RNA, 20 nt, Human
ugccuguugggccaggagcc

SEQ ID NO: 3017453 - RNA, 16 nt, Human
ugccuuauggaacacu

SEQ ID NO: 3017454 - RNA, 15 nt, Human
ugccuuauggaacac

SEQ ID NO: 3017455 - RNA, 17 nt, Human
ugccuguucagcuccag

SEQ ID NO: 3017456 - RNA, 13 nt, Human
agcuguucagcug

SEQ ID NO: 3017457 - RNA, 18 nt, Human
ugccuguucagcuccagc

SEQ ID NO: 3017458 - RNA, 20 nt, Human
ugccuguucagcuccagcuc

SEQ ID NO: 3017459 - RNA, 16 nt, Human
uggcaucuuacaucug

SEQ ID NO: 3017460 - RNA, 17 nt, Human
aggccccgcccaggcuu

SEQ ID NO: 3017461 - RNA, 21 nt, Human
uggccaaagccaaagcuaggc

SEQ ID NO: 3017462 - RNA, 23 nt, Human
uggccaaagccaaagcuaggccu

SEQ ID NO: 3017463 - RNA, 23 nt, Human
uggccagugugacaaggauugcu

SEQ ID NO: 3017464 - RNA, 20 nt, Human
aggccugggggcugggcaga

SEQ ID NO: 3017465 - RNA, 18 nt, Human
aggccugggggcugggca

SEQ ID NO: 3017466 - RNA, 12 nt, Human
aggccuggggac

SEQ ID NO: 3017467 - RNA, 12 nt, Human
uggccuggcccc

SEQ ID NO: 3017468 - RNA, 21 nt, Human
uggccuggccccucagggucc

SEQ ID NO: 3017469 - RNA, 18 nt, Human
uggccuggccccucaggg

SEQ ID NO: 3017470 - RNA, 23 nt, Human
uggccgggcgcgguggcucacgc

SEQ ID NO: 3017471 - RNA, 13 nt, Human
uggccucuucaga

SEQ ID NO: 3017472 - RNA, 14 nt, Human
uggaguauauguca

SEQ ID NO: 3017473 - RNA, 13 nt, Human
uggauuguccccg

SEQ ID NO: 3017474 - RNA, 16 nt, Human
aggccaaggugggagg

SEQ ID NO: 3017475 - RNA, 18 nt, Human
aggcagccaggccacaag

SEQ ID NO: 3017476 - RNA, 16 nt, Human
aggcagccccauucug

SEQ ID NO: 3017477 - RNA, 17 nt, Human
aggcagccccauucugc

SEQ ID NO: 3017478 - RNA, 15 nt, Human
aggccaaaggaagca

SEQ ID NO: 3017479 - RNA, 19 nt, Human
aggccaaaggaagcacaug

SEQ ID NO: 3017480 - RNA, 18 nt, Human
aggccaaaggaagcacau

SEQ ID NO: 3017481 - RNA, 16 nt, Human
aggccaaaggaagcac

SEQ ID NO: 3017482 - RNA, 16 nt, Human
aggccccgcccaggcu

SEQ ID NO: 3017483 - RNA, 21 nt, Human
aggcccagagggccugcaagg

SEQ ID NO: 3017484 - RNA, 20 nt, Human
aggccagagggagugacaga

SEQ ID NO: 3017485 - RNA, 17 nt, Human
uggcagccuuggcaaac

SEQ ID NO: 3017486 - RNA, 15 nt, Human
uggcagcucaccucu

SEQ ID NO: 3017487 - RNA, 19 nt, Human
uggcagcucaccucucccu

SEQ ID NO: 3017488 - RNA, 16 nt, Human
aggccacaagacccuu

SEQ ID NO: 3017489 - RNA, 14 nt, Human
aggccagagggagu

SEQ ID NO: 3017490 - RNA, 19 nt, Human
aggccacaagacccuugug

SEQ ID NO: 3017491 - RNA, 18 nt, Human
aggccacaagacccuugu

SEQ ID NO: 3017492 - RNA, 17 nt, Human
aggccacaagacccuug

SEQ ID NO: 3017493 - RNA, 13 nt, Human
uggcagccuuggc

SEQ ID NO: 3017494 - RNA, 13 nt, Human
aggauacuuauuu

SEQ ID NO: 3017495 - RNA, 16 nt, Human
aggauacuuauuuaaa

SEQ ID NO: 3017496 - RNA, 15 nt, Human
aggauacuuauuuaa

SEQ ID NO: 3017497 - RNA, 14 nt, Human
aggauccugagcca

SEQ ID NO: 3017498 - RNA, 13 nt, Human
aggauccugagcc

SEQ ID NO: 3017499 - RNA, 16 nt, Human
uggaagcacagcuuca

SEQ ID NO: 3017500 - RNA, 17 nt, Human
uggaaaugggcagagca

SEQ ID NO: 3017501 - RNA, 18 nt, Human
ugcuugcugcugauuuaa

SEQ ID NO: 3017502 - RNA, 14 nt, Human
ugcuuggaggaagg

SEQ ID NO: 3017503 - RNA, 16 nt, Human
ugcuuggaggaaggaa

SEQ ID NO: 3017504 - RNA, 15 nt, Human
ugcuuggaggaagga

SEQ ID NO: 3017505 - RNA, 16 nt, Human
ugcuuguacacucauu

SEQ ID NO: 3017506 - RNA, 12 nt, Human
ugcuuguacaua

SEQ ID NO: 3017507 - RNA, 13 nt, Human
ugcuuguacauaa

SEQ ID NO: 3017508 - RNA, 21 nt, Human
ugcuugaggcaacucaucuua

SEQ ID NO: 3017509 - RNA, 22 nt, Human
ugcuuguacacucauucauuac

SEQ ID NO: 3017510 - RNA, 19 nt, Human
ugcuuguacacucauucau

SEQ ID NO: 3017511 - RNA, 22 nt, Human
ugcuuguacauaaugcgugcau

SEQ ID NO: 3017512 - RNA, 14 nt, Human
ugcuuguacauaau

SEQ ID NO: 3017513 - RNA, 16 nt, Human
ugcuuguacauaaugc

SEQ ID NO: 3017514 - RNA, 12 nt, Human
ugcuuugugauu

SEQ ID NO: 3017515 - RNA, 14 nt, Human
ugcuuugugauuuu

SEQ ID NO: 3017516 - RNA, 16 nt, Human
ugcuuugugauuuuug

SEQ ID NO: 3017517 - RNA, 14 nt, Human
ugcuuuuggucugu

SEQ ID NO: 3017518 - RNA, 17 nt, Human
ugcuuuuggucugugug

SEQ ID NO: 3017519 - RNA, 22 nt, Human
uggagaagcggcuggcagccca

SEQ ID NO: 3017520 - RNA, 13 nt, Human
uggagaagcggcu

SEQ ID NO: 3017521 - RNA, 15 nt, Human
aggcacccaccauca

SEQ ID NO: 3017522 - RNA, 14 nt, Human
aggcaaugcuggcu

SEQ ID NO: 3017523 - RNA, 20 nt, Human
aggcacccaccaucaugucu

SEQ ID NO: 3017524 - RNA, 21 nt, Human
aggcacccaccaucaugucug

SEQ ID NO: 3017525 - RNA, 22 nt, Human
aggcacccaccaucaugucugg

SEQ ID NO: 3017526 - RNA, 12 nt, Human
aggaucucuuga

SEQ ID NO: 3017527 - RNA, 19 nt, Human
aggaucucuugagccuggg

SEQ ID NO: 3017528 - RNA, 18 nt, Human
aggaucucuugagccugg

SEQ ID NO: 3017529 - RNA, 17 nt, Human
aggaucucuugagccug

SEQ ID NO: 3017530 - RNA, 21 nt, Human
uggacacagcucuucuccagg

SEQ ID NO: 3017531 - RNA, 22 nt, Human
uggacacagcucuucuccaggc

SEQ ID NO: 3017532 - RNA, 13 nt, Human
uggacacagcucu

SEQ ID NO: 3017533 - RNA, 14 nt, Human
uggacacagcucuu

SEQ ID NO: 3017534 - RNA, 23 nt, Human
uggacacagcucuucuccaggcu

SEQ ID NO: 3017535 - RNA, 18 nt, Human
uggacccugaggcccaga

SEQ ID NO: 3017536 - RNA, 16 nt, Human
uggacccugaggccca

SEQ ID NO: 3017537 - RNA, 20 nt, Human
uggacccugaggcccagagg

SEQ ID NO: 3017538 - RNA, 19 nt, Human
uggacccugaggcccagag

SEQ ID NO: 3017539 - RNA, 21 nt, Human
uggacccugaggcccagaggg

SEQ ID NO: 3017540 - RNA, 23 nt, Human
uggacccuguggaugauaaaaca

SEQ ID NO: 3017541 - RNA, 15 nt, Human
uggacccugaggccc

SEQ ID NO: 3017542 - RNA, 20 nt, Human
uggaccuugaacuggguacu

SEQ ID NO: 3017543 - RNA, 14 nt, Human
ugccaauauccuaa

SEQ ID NO: 3017544 - RNA, 18 nt, Human
ugccaaugggagcucaug

SEQ ID NO: 3017545 - RNA, 13 nt, Human
ugccaauuugcac

SEQ ID NO: 3017546 - RNA, 15 nt, Human
ugccaauuugcacau

SEQ ID NO: 3017547 - RNA, 21 nt, Human
ugccaauuugcacauuaaaug

SEQ ID NO: 3017548 - RNA, 17 nt, Human
ugccaauuugcacauua

SEQ ID NO: 3017549 - RNA, 18 nt, Human
ugcauuaucuagauacug

SEQ ID NO: 3017550 - RNA, 21 nt, Human
ugcauuaucuagauacuguau

SEQ ID NO: 3017551 - RNA, 22 nt, Human
ugcauuaucuagauacuguauc

SEQ ID NO: 3017552 - RNA, 20 nt, Human
ugcauuaucuagauacugua

SEQ ID NO: 3017553 - RNA, 18 nt, Human
agcggagacggaguccca

SEQ ID NO: 3017554 - RNA, 20 nt, Human
agcggagaaaggaagggcug

SEQ ID NO: 3017555 - RNA, 16 nt, Human
agcggagaaaggaagg

SEQ ID NO: 3017556 - RNA, 17 nt, Human
agccuuccagggguggg

SEQ ID NO: 3017557 - RNA, 16 nt, Human
agccuuccaggggugg

SEQ ID NO: 3017558 - RNA, 14 nt, Human
agccuuccaggggu

SEQ ID NO: 3017559 - RNA, 11 nt, Human
agccuuccagg

SEQ ID NO: 3017560 - RNA, 22 nt, Human
agccugggugacagagcaagug

SEQ ID NO: 3017561 - RNA, 22 nt, Human
agccugcuccagcuguucagcu

SEQ ID NO: 3017562 - RNA, 19 nt, Human
agccugcuccagcuguuca

SEQ ID NO: 3017563 - RNA, 12 nt, Human
ugcauaccacuu

SEQ ID NO: 3017564 - RNA, 17 nt, Human
agccugcuccagcuguu

SEQ ID NO: 3017565 - RNA, 16 nt, Human
agccugcuccagcugu

SEQ ID NO: 3017566 - RNA, 15 nt, Human
agccugcuccagcug

SEQ ID NO: 3017567 - RNA, 14 nt, Human
agccugcuccagcu

SEQ ID NO: 3017568 - RNA, 22 nt, Human
agccuuagaagucacacaguau

SEQ ID NO: 3017569 - RNA, 21 nt, Human
agccugugccucugggacugg

SEQ ID NO: 3017570 - RNA, 19 nt, Human
agccugugccucugggacu

SEQ ID NO: 3017571 - RNA, 20 nt, Human
agcucauucuccuuguguua

SEQ ID NO: 3017572 - RNA, 21 nt, Human
agcucauucuccuuguguuac

SEQ ID NO: 3017573 - RNA, 20 nt, Human
ugcccacaggaucagucuga

SEQ ID NO: 3017574 - RNA, 19 nt, Human
ugcccacaggaucagucug

SEQ ID NO: 3017575 - RNA, 16 nt, Human
ugcccacaggaucagu

SEQ ID NO: 3017576 - RNA, 20 nt, Human
ugcccagccccuucugaccc

SEQ ID NO: 3017577 - RNA, 21 nt, Human
ugcccagccccuucugaccca

SEQ ID NO: 3017578 - RNA, 12 nt, Human
agcuaggccugg

SEQ ID NO: 3017579 - RNA, 14 nt, Human
agcuaggccuggcc

SEQ ID NO: 3017580 - RNA, 15 nt, Human
agcuaggccuggcca

SEQ ID NO: 3017581 - RNA, 18 nt, Human
agcucaggugucccugca

SEQ ID NO: 3017582 - RNA, 17 nt, Human
agcucaggugucccugc

SEQ ID NO: 3017583 - RNA, 22 nt, Human
agcucaggugucccugcacuug

SEQ ID NO: 3017584 - RNA, 20 nt, Human
agcucaggugucccugcacu

SEQ ID NO: 3017585 - RNA, 21 nt, Human
agcucaggugucccugcacuu

SEQ ID NO: 3017586 - RNA, 19 nt, Human
agcgugagccacugcaccg

SEQ ID NO: 3017587 - RNA, 22 nt, Human
agcgugagccacugcaccgggc

SEQ ID NO: 3017588 - RNA, 15 nt, Human
agcgugcauaaguua

SEQ ID NO: 3017589 - RNA, 18 nt, Human
agcuagacgagcaggcuu

SEQ ID NO: 3017590 - RNA, 14 nt, Human
ugcaguacuaacau

SEQ ID NO: 3017591 - RNA, 14 nt, Human
ugcauaaguuaacu

SEQ ID NO: 3017592 - RNA, 17 nt, Human
ugcauaaguuaacuucc

SEQ ID NO: 3017593 - RNA, 15 nt, Human
ugcagccucacaguc

SEQ ID NO: 3017594 - RNA, 13 nt, Human
ugcagccucacag

SEQ ID NO: 3017595 - RNA, 16 nt, Human
ugcagccucacagucc

SEQ ID NO: 3017596 - RNA, 23 nt, Human
ugcagccucaaccuccugggcua

SEQ ID NO: 3017597 - RNA, 22 nt, Human
ugcacuauagccuaggugacag

SEQ ID NO: 3017598 - RNA, 23 nt, Human
ugcacuauagccuaggugacaga

SEQ ID NO: 3017599 - RNA, 23 nt, Human
agcccuucuaccuuccugcaaca

SEQ ID NO: 3017600 - RNA, 17 nt, Human
agccucagcauccuggc

SEQ ID NO: 3017601 - RNA, 19 nt, Human
agccucagcauccuggcac

SEQ ID NO: 3017602 - RNA, 20 nt, Human
agccucagcauccuggcacc

SEQ ID NO: 3017603 - RNA, 21 nt, Human
agccucagcauccuggcaccc

SEQ ID NO: 3017604 - RNA, 16 nt, Human
agccucagcauccugg

SEQ ID NO: 3017605 - RNA, 16 nt, Human
agccucccaaagugcu

SEQ ID NO: 3017606 - RNA, 22 nt, Human
agccucagcauccuggcacccg

SEQ ID NO: 3017607 - RNA, 23 nt, Human
agccucagcauccuggcacccgg

SEQ ID NO: 3017608 - RNA, 14 nt, Human
ugcacacuguccua

SEQ ID NO: 3017609 - RNA, 10 nt, Human
ugcacacauu

SEQ ID NO: 3017610 - RNA, 20 nt, Human
ugcacacauuuuuuaaaugc

SEQ ID NO: 3017611 - RNA, 17 nt, Human
ugcacccucaggcaggu

SEQ ID NO: 3017612 - RNA, 16 nt, Human
ugcacccucaggcagg

SEQ ID NO: 3017613 - RNA, 14 nt, Human
ugcacgugugugca

SEQ ID NO: 3017614 - RNA, 15 nt, Human
ugcacgugugugcac

SEQ ID NO: 3017615 - RNA, 22 nt, Human
agcccugguggcagugggagcu

SEQ ID NO: 3017616 - RNA, 23 nt, Human
agcccugguggcagugggagcug

SEQ ID NO: 3017617 - RNA, 15 nt, Human
ugcacaagcugcacc

SEQ ID NO: 3017618 - RNA, 14 nt, Human
ugcacaagcugcac

SEQ ID NO: 3017619 - RNA, 22 nt, Human
ugcacacaccagagcccaccuu

SEQ ID NO: 3017620 - RNA, 21 nt, Human
ugcacaagcugcacccucagg

SEQ ID NO: 3017621 - RNA, 18 nt, Human
ugcacaagcugcacccuc

SEQ ID NO: 3017622 - RNA, 24 nt, Human
agccccuucugacccaugcugccc

SEQ ID NO: 3017623 - RNA, 20 nt, Human
agccccuucugacccaugcu

SEQ ID NO: 3017624 - RNA, 21 nt, Human
agcccugguggcagugggagc

SEQ ID NO: 3017625 - RNA, 17 nt, Human
agccccgaggccuucuc

SEQ ID NO: 3017626 - RNA, 22 nt, Human
agccccgaggccuucucugaag

SEQ ID NO: 3017627 - RNA, 16 nt, Human
agccccgaggccuucu

SEQ ID NO: 3017628 - RNA, 23 nt, Human
agccccauucugccugcccaggc

SEQ ID NO: 3017629 - RNA, 18 nt, Human
agccccuggaugcagccu

SEQ ID NO: 3017630 - RNA, 17 nt, Human
agccccuggaugcagcc

SEQ ID NO: 3017631 - RNA, 19 nt, Human
agccccuggaugcagccuc

SEQ ID NO: 3017632 - RNA, 13 nt, Human
ugauucuccugcc

SEQ ID NO: 3017633 - RNA, 20 nt, Human
ugauucuccugccucagccu

SEQ ID NO: 3017634 - RNA, 19 nt, Human
ugauucuccugccucagcc

SEQ ID NO: 3017635 - RNA, 15 nt, Human
ugauucuccugccuc

SEQ ID NO: 3017636 - RNA, 20 nt, Human
agccccaaaacucuccucug

SEQ ID NO: 3017637 - RNA, 22 nt, Human
agccccaaaacucuccucugcu

SEQ ID NO: 3017638 - RNA, 21 nt, Human
agccccaaaacucuccucugc

SEQ ID NO: 3017639 - RNA, 23 nt, Human
agcauguccuaaugcuugcugcu

SEQ ID NO: 3017640 - RNA, 12 nt, Human
agcauggcugcc

SEQ ID NO: 3017641 - RNA, 20 nt, Human
agcaucaggccaggcccucu

SEQ ID NO: 3017642 - RNA, 19 nt, Human
agcaucaggccaggcccuc

SEQ ID NO: 3017643 - RNA, 18 nt, Human
agcaucaggccaggcccu

SEQ ID NO: 3017644 - RNA, 17 nt, Human
agcaucaggccaggccc

SEQ ID NO: 3017645 - RNA, 16 nt, Human
agcaucaggccaggcc

SEQ ID NO: 3017646 - RNA, 14 nt, Human
agcaucaggccagg

SEQ ID NO: 3017647 - RNA, 22 nt, Human
agcauauucaggaagcucaggg

SEQ ID NO: 3017648 - RNA, 20 nt, Human
ugaucacggcucacugcagc

SEQ ID NO: 3017649 - RNA, 21 nt, Human
ugaucacggcucacugcagcc

SEQ ID NO: 3017650 - RNA, 12 nt, Human
agcaucaggcca

SEQ ID NO: 3017651 - RNA, 13 nt, Human
agcaucaggccag

SEQ ID NO: 3017652 - RNA, 18 nt, Human
ugaucacggcucacugca

SEQ ID NO: 3017653 - RNA, 19 nt, Human
ugaucacggcucacugcag

SEQ ID NO: 3017654 - RNA, 16 nt, Human
ugagugccuuacacaa

SEQ ID NO: 3017655 - RNA, 21 nt, Human
ugagugggugaauaauacagu

SEQ ID NO: 3017656 - RNA, 23 nt, Human
ugagugggggaucacagccucug

SEQ ID NO: 3017657 - RNA, 14 nt, Human
ugagucaccaagcc

SEQ ID NO: 3017658 - RNA, 16 nt, Human
ugagucaccaagccca

SEQ ID NO: 3017659 - RNA, 17 nt, Human
ugagucaccaagcccag

SEQ ID NO: 3017660 - RNA, 20 nt, Human
ugagugccuuacacaauggu

SEQ ID NO: 3017661 - RNA, 17 nt, Human
ugagugccuuacacaau

SEQ ID NO: 3017662 - RNA, 14 nt, Human
ugauacuacaguuu

SEQ ID NO: 3017663 - RNA, 17 nt, Human
ugauacuacaguuuguu

SEQ ID NO: 3017664 - RNA, 18 nt, Human
ugauacaaugcugugccc

SEQ ID NO: 3017665 - RNA, 20 nt, Human
ugauacaaugcugugcccua

SEQ ID NO: 3017666 - RNA, 21 nt, Human
ugauacaaugcugugcccuaa

SEQ ID NO: 3017667 - RNA, 17 nt, Human
ugaguucauacccuguu

SEQ ID NO: 3017668 - RNA, 20 nt, Human
ugauaagaaccuuuugagug

SEQ ID NO: 3017669 - RNA, 20 nt, Human
agcauacguacacauuuuau

SEQ ID NO: 3017670 - RNA, 21 nt, Human
agcauacguacacauuuuauu

SEQ ID NO: 3017671 - RNA, 16 nt, Human
agcauacguacacauu

SEQ ID NO: 3017672 - RNA, 17 nt, Human
agcauacguacacauuu

SEQ ID NO: 3017673 - RNA, 18 nt, Human
agcauacguacacauuuu

SEQ ID NO: 3017674 - RNA, 19 nt, Human
agcauacguacacauuuua

SEQ ID NO: 3017675 - RNA, 12 nt, Human
ugagaauuaccc

SEQ ID NO: 3017676 - RNA, 15 nt, Human
agcauacguacacau

SEQ ID NO: 3017677 - RNA, 14 nt, Human
ugaguacuacaguc

SEQ ID NO: 3017678 - RNA, 23 nt, Human
ugaguacuacaguccucccaucu

SEQ ID NO: 3017679 - RNA, 22 nt, Human
ugaguacuacaguccucccauc

SEQ ID NO: 3017680 - RNA, 21 nt, Human
ugaguacuacaguccucccau

SEQ ID NO: 3017681 - RNA, 17 nt, Human
ugaguacuacaguccuc

SEQ ID NO: 3017682 - RNA, 14 nt, Human
agcauauucaggaa

SEQ ID NO: 3017683 - RNA, 15 nt, Human
ugaguacuacagucc

SEQ ID NO: 3017684 - RNA, 15 nt, Human
agccacggccaggcc

SEQ ID NO: 3017685 - RNA, 14 nt, Human
agccacggccaggc

SEQ ID NO: 3017686 - RNA, 19 nt, Human
agccaccaacauacuccca

SEQ ID NO: 3017687 - RNA, 23 nt, Human
agccaccaacauacucccaucug

SEQ ID NO: 3017688 - RNA, 20 nt, Human
agccaccaacauacucccau

SEQ ID NO: 3017689 - RNA, 18 nt, Human
agccacauuccugaugcu

SEQ ID NO: 3017690 - RNA, 14 nt, Human
agccacauuccuga

SEQ ID NO: 3017691 - RNA, 23 nt, Human
ugauguuuuccaugaguccccug

SEQ ID NO: 3017692 - RNA, 17 nt, Human
ugauguuuuaaggaugc

SEQ ID NO: 3017693 - RNA, 18 nt, Human
ugauguuuuaaggaugcu

SEQ ID NO: 3017694 - RNA, 16 nt, Human
ugauggugcaaugacc

SEQ ID NO: 3017695 - RNA, 23 nt, Human
ugauggugcaaugaccuuucaau

SEQ ID NO: 3017696 - RNA, 17 nt, Human
ugauggugcaaugaccu

SEQ ID NO: 3017697 - RNA, 20 nt, Human
ugaugauccuaggcauuugc

SEQ ID NO: 3017698 - RNA, 14 nt, Human
ugaugauccuaggc

SEQ ID NO: 3017699 - RNA, 20 nt, Human
agccacugcaccgggccaca

SEQ ID NO: 3017700 - RNA, 13 nt, Human
agccacugcaccg

SEQ ID NO: 3017701 - RNA, 21 nt, Human
agccacugcaccgggccacag

SEQ ID NO: 3017702 - RNA, 22 nt, Human
agccacugcaccgggccacaga

SEQ ID NO: 3017703 - RNA, 15 nt, Human
ugauuaauuaaaaca

SEQ ID NO: 3017704 - RNA, 14 nt, Human
ugauucagcucugc

SEQ ID NO: 3017705 - RNA, 13 nt, Human
ugauucagcucug

SEQ ID NO: 3017706 - RNA, 18 nt, Human
agcccaggaaaggcucca

SEQ ID NO: 3017707 - RNA, 24 nt, Human
agcccaggaaaggcuccaggagca

SEQ ID NO: 3017708 - RNA, 23 nt, Human
agcccaggaaaggcuccaggagc

SEQ ID NO: 3017709 - RNA, 22 nt, Human
agcccaggaaaggcuccaggag

SEQ ID NO: 3017710 - RNA, 15 nt, Human
ugauucccaagcucu

SEQ ID NO: 3017711 - RNA, 16 nt, Human
ugauucccaagcucug

SEQ ID NO: 3017712 - RNA, 18 nt, Human
ugauucccaagcucugcu

SEQ ID NO: 3017713 - RNA, 19 nt, Human
ugauucccaagcucugcuc

SEQ ID NO: 3017714 - RNA, 21 nt, Human
ugauucccaagcucugcuccu

SEQ ID NO: 3017715 - RNA, 21 nt, Human
agcccaggaaaggcuccagga

SEQ ID NO: 3017716 - RNA, 20 nt, Human
agcccaggaaaggcuccagg

SEQ ID NO: 3017717 - RNA, 19 nt, Human
agcccaggaaaggcuccag

SEQ ID NO: 3017718 - RNA, 22 nt, Human
agcccacuucugccauauucug

SEQ ID NO: 3017719 - RNA, 23 nt, Human
agccaguaaaugggggugcauuu

SEQ ID NO: 3017720 - RNA, 22 nt, Human
agccaguaaaugggggugcauu

SEQ ID NO: 3017721 - RNA, 12 nt, Human
agccagggucuc

SEQ ID NO: 3017722 - RNA, 22 nt, Human
agccaggccacaagacccuugu

SEQ ID NO: 3017723 - RNA, 21 nt, Human
agccaggccacaagacccuug

SEQ ID NO: 3017724 - RNA, 14 nt, Human
agccaggccacaag

SEQ ID NO: 3017725 - RNA, 12 nt, Human
agccaggccaca

SEQ ID NO: 3017726 - RNA, 21 nt, Human
ugaaaaaauuuacuuuaaacu

SEQ ID NO: 3017727 - RNA, 16 nt, Human
ugaaaaaggaggaaga

SEQ ID NO: 3017728 - RNA, 12 nt, Human
ucuuuuaaacuc

SEQ ID NO: 3017729 - RNA, 11 nt, Human
ucuuuuaaacu

SEQ ID NO: 3017730 - RNA, 22 nt, Human
ucuuuggucuacacugugcuga

SEQ ID NO: 3017731 - RNA, 20 nt, Human
ucuuucuggcuaugcauuug

SEQ ID NO: 3017732 - RNA, 19 nt, Human
ucuuucuggcuaugcauuu

SEQ ID NO: 3017733 - RNA, 21 nt, Human
ucuuucuggcuaugcauuuga

SEQ ID NO: 3017734 - RNA, 17 nt, Human
ugaaaauguauguguaa

SEQ ID NO: 3017735 - RNA, 19 nt, Human
ugaaaaucgugacaacacu

SEQ ID NO: 3017736 - RNA, 16 nt, Human
ugaaacgcaaccacca

SEQ ID NO: 3017737 - RNA, 16 nt, Human
ugaaaaucgugacaac

SEQ ID NO: 3017738 - RNA, 22 nt, Human
ugaaaaaggaggaagagaaaaa

SEQ ID NO: 3017739 - RNA, 20 nt, Human
ugaaaaaggaggaagagaaa

SEQ ID NO: 3017740 - RNA, 21 nt, Human
agagcaguuugguuucuagca

SEQ ID NO: 3017741 - RNA, 23 nt, Human
agagcaguuugguuucuagcaug

SEQ ID NO: 3017742 - RNA, 23 nt, Human
agagcaccuuagacagucccugc

SEQ ID NO: 3017743 - RNA, 21 nt, Human
agagcaccuuagacagucccu

SEQ ID NO: 3017744 - RNA, 22 nt, Human
agagcaccuuagacagucccug

SEQ ID NO: 3017745 - RNA, 20 nt, Human
agagcuagcagcagggaggg

SEQ ID NO: 3017746 - RNA, 22 nt, Human
agagccuuccaggggugggaca

SEQ ID NO: 3017747 - RNA, 17 nt, Human
agagccuuccaggggug

SEQ ID NO: 3017748 - RNA, 15 nt, Human
agagccuuccagggg

SEQ ID NO: 3017749 - RNA, 13 nt, Human
agagccuuccagg

SEQ ID NO: 3017750 - RNA, 14 nt, Human
agagcugccaccug

SEQ ID NO: 3017751 - RNA, 23 nt, Human
agagcaagacgcugugcugcccu

SEQ ID NO: 3017752 - RNA, 19 nt, Human
agagcaagacgcugugcug

SEQ ID NO: 3017753 - RNA, 22 nt, Human
agagaucaaccccuucgcuccu

SEQ ID NO: 3017754 - RNA, 23 nt, Human
agagacuccugcaggcagccagg

SEQ ID NO: 3017755 - RNA, 13 nt, Human
ugaaagacuguac

SEQ ID NO: 3017756 - RNA, 15 nt, Human
ugaaagacuguacaa

SEQ ID NO: 3017757 - RNA, 15 nt, Human
agagacuccugcagg

SEQ ID NO: 3017758 - RNA, 18 nt, Human
agagacuccugcaggcag

SEQ ID NO: 3017759 - RNA, 17 nt, Human
agagacuccugcaggca

SEQ ID NO: 3017760 - RNA, 22 nt, Human
agagacuccugcaggcagccag

SEQ ID NO: 3017761 - RNA, 21 nt, Human
agagacuccugcaggcagcca

SEQ ID NO: 3017762 - RNA, 20 nt, Human
agagacuccugcaggcagcc

SEQ ID NO: 3017763 - RNA, 19 nt, Human
agagacuccugcaggcagc

SEQ ID NO: 3017764 - RNA, 19 nt, Human
ucuugguccugcugcaguu

SEQ ID NO: 3017765 - RNA, 17 nt, Human
ucuugguccugcugcag

SEQ ID NO: 3017766 - RNA, 15 nt, Human
ucuugguccugcugc

SEQ ID NO: 3017767 - RNA, 16 nt, Human
ucuuuccugaggcugg

SEQ ID NO: 3017768 - RNA, 17 nt, Human
ucuuuccugaggcuggg

SEQ ID NO: 3017769 - RNA, 19 nt, Human
ucuugcaauggcagccuug

SEQ ID NO: 3017770 - RNA, 18 nt, Human
ucuugcaauggcagccuu

SEQ ID NO: 3017771 - RNA, 22 nt, Human
ucuugcaauggcagccuuggca

SEQ ID NO: 3017772 - RNA, 14 nt, Human
ucuugguccugcug

SEQ ID NO: 3017773 - RNA, 17 nt, Human
ucuuggucagauuugaa

SEQ ID NO: 3017774 - RNA, 13 nt, Human
ucuugauucauaa

SEQ ID NO: 3017775 - RNA, 20 nt, Human
ucuugagccuugaacuuuga

SEQ ID NO: 3017776 - RNA, 16 nt, Human
ucuugagccugggagg

SEQ ID NO: 3017777 - RNA, 13 nt, Human
ucuugagccuggg

SEQ ID NO: 3017778 - RNA, 11 nt, Human
agaccuucucc

SEQ ID NO: 3017779 - RNA, 18 nt, Human
agaccuucuccuucaccu

SEQ ID NO: 3017780 - RNA, 15 nt, Human
agaccuucuccuuca

SEQ ID NO: 3017781 - RNA, 23 nt, Human
agaccuucuccuucaccuuuguc

SEQ ID NO: 3017782 - RNA, 21 nt, Human
agaccuucuccuucaccuuug

SEQ ID NO: 3017783 - RNA, 15 nt, Human
ucuuccucccucccu

SEQ ID NO: 3017784 - RNA, 14 nt, Human
ucuuccucccuccc

SEQ ID NO: 3017785 - RNA, 22 nt, Human
ucuucccuacaguugaaaaaca

SEQ ID NO: 3017786 - RNA, 19 nt, Human
ucuucccuacaguugaaaa

SEQ ID NO: 3017787 - RNA, 21 nt, Human
ucuuccaggcugggagagccu

SEQ ID NO: 3017788 - RNA, 20 nt, Human
ucuuccaggcugggagagcc

SEQ ID NO: 3017789 - RNA, 17 nt, Human
ucuuccaggcugggaga

SEQ ID NO: 3017790 - RNA, 15 nt, Human
ucuuccaggcuggga

SEQ ID NO: 3017791 - RNA, 20 nt, Human
ucuucagagacuccugcagg

SEQ ID NO: 3017792 - RNA, 12 nt, Human
ucuucagagacu

SEQ ID NO: 3017793 - RNA, 18 nt, Human
ucuucagagacuccugca

SEQ ID NO: 3017794 - RNA, 17 nt, Human
ucuucagagacuccugc

SEQ ID NO: 3017795 - RNA, 20 nt, Human
ucuucuguggguuucuaaag

SEQ ID NO: 3017796 - RNA, 15 nt, Human
ucuucuguacgucug

SEQ ID NO: 3017797 - RNA, 23 nt, Human
ucuucuguacgucugacaggcaa

SEQ ID NO: 3017798 - RNA, 12 nt, Human
ucuucugcuuca

SEQ ID NO: 3017799 - RNA, 21 nt, Human
ucuucugaacuuggcgcugcc

SEQ ID NO: 3017800 - RNA, 19 nt, Human
agacauacuaaccagcaga

SEQ ID NO: 3017801 - RNA, 23 nt, Human
ugacuauuuuuguuuuuauuaaa

SEQ ID NO: 3017802 - RNA, 15 nt, Human
ugacuuacuguacau

SEQ ID NO: 3017803 - RNA, 16 nt, Human
ugacuuacuguacaug

SEQ ID NO: 3017804 - RNA, 13 nt, Human
ugacuuacuguac

SEQ ID NO: 3017805 - RNA, 17 nt, Human
ugaccugaggcccuucu

SEQ ID NO: 3017806 - RNA, 19 nt, Human
ugaccugaggcccuucucu

SEQ ID NO: 3017807 - RNA, 18 nt, Human
ugaccugaggcccuucuc

SEQ ID NO: 3017808 - RNA, 12 nt, Human
agauguugcuaa

SEQ ID NO: 3017809 - RNA, 21 nt, Human
ugacccaugcugcccugugag

SEQ ID NO: 3017810 - RNA, 16 nt, Human
ugacccaugcugcccu

SEQ ID NO: 3017811 - RNA, 12 nt, Human
ugacccaugcug

SEQ ID NO: 3017812 - RNA, 15 nt, Human
ugacccaugcugccc

SEQ ID NO: 3017813 - RNA, 14 nt, Human
ugacccaugcugcc

SEQ ID NO: 3017814 - RNA, 16 nt, Human
agaugccgcauuugga

SEQ ID NO: 3017815 - RNA, 14 nt, Human
agcaagacauuaua

SEQ ID NO: 3017816 - RNA, 16 nt, Human
agcaagacgcugugcu

SEQ ID NO: 3017817 - RNA, 13 nt, Human
agcaagacgcugu

SEQ ID NO: 3017818 - RNA, 23 nt, Human
agcaagacgcugugcugcccugc

SEQ ID NO: 3017819 - RNA, 22 nt, Human
agcaagacgcugugcugcccug

SEQ ID NO: 3017820 - RNA, 21 nt, Human
agcaagacgcugugcugcccu

SEQ ID NO: 3017821 - RNA, 20 nt, Human
agcaagacgcugugcugccc

SEQ ID NO: 3017822 - RNA, 17 nt, Human
agcaagacgcugugcug

SEQ ID NO: 3017823 - RNA, 17 nt, Human
agauuugaacucuucaa

SEQ ID NO: 3017824 - RNA, 21 nt, Human
agauuuugaaauuuuuauuaa

SEQ ID NO: 3017825 - RNA, 19 nt, Human
agauucauauuuacuucuu

SEQ ID NO: 3017826 - RNA, 22 nt, Human
agauucauauuuacuucuuaua

SEQ ID NO: 3017827 - RNA, 19 nt, Human
ugacuuacuguacaugaaa

SEQ ID NO: 3017828 - RNA, 13 nt, Human
agauuggaaggaa

SEQ ID NO: 3017829 - RNA, 14 nt, Human
ugaauuugccuaau

SEQ ID NO: 3017830 - RNA, 23 nt, Human
ugaauuucuuuugccguuauuaa

SEQ ID NO: 3017831 - RNA, 19 nt, Human
ugacacacagcucuguccu

SEQ ID NO: 3017832 - RNA, 19 nt, Human
ugacaaagacugaguacgu

SEQ ID NO: 3017833 - RNA, 16 nt, Human
ugacacacagcucugu

SEQ ID NO: 3017834 - RNA, 18 nt, Human
ugacacacagcucugucc

SEQ ID NO: 3017835 - RNA, 12 nt, Human
ugacacaugcaa

SEQ ID NO: 3017836 - RNA, 20 nt, Human
ugacacaugcaaggucauuu

SEQ ID NO: 3017837 - RNA, 22 nt, Human
agauacaguuacucagaauucu

SEQ ID NO: 3017838 - RNA, 11 nt, Human
agauacuguau

SEQ ID NO: 3017839 - RNA, 20 nt, Human
agauacaggaaaagcugcug

SEQ ID NO: 3017840 - RNA, 13 nt, Human
agauacaguuacu

SEQ ID NO: 3017841 - RNA, 22 nt, Human
agauaauauuaaggaagacaau

SEQ ID NO: 3017842 - RNA, 18 nt, Human
agauaauauuaaggaaga

SEQ ID NO: 3017843 - RNA, 18 nt, Human
agaucaaaagguuaauaa

SEQ ID NO: 3017844 - RNA, 20 nt, Human
agauauuuugcuuugugauu

SEQ ID NO: 3017845 - RNA, 21 nt, Human
agauauuuugcuuugugauuu

SEQ ID NO: 3017846 - RNA, 15 nt, Human
agauacuguaucaug

SEQ ID NO: 3017847 - RNA, 16 nt, Human
agauacuguaucauga

SEQ ID NO: 3017848 - RNA, 18 nt, Human
agauaauacaccacuaca

SEQ ID NO: 3017849 - RNA, 19 nt, Human
agaguuguuacauuuuuaa

SEQ ID NO: 3017850 - RNA, 20 nt, Human
agaguuguuacauuuuuaag

SEQ ID NO: 3017851 - RNA, 15 nt, Human
agagucacuggaaca

SEQ ID NO: 3017852 - RNA, 16 nt, Human
agaguuguuacauuuu

SEQ ID NO: 3017853 - RNA, 17 nt, Human
agaguuguuacauuuuu

SEQ ID NO: 3017854 - RNA, 18 nt, Human
ugaagguagaauguuuuc

SEQ ID NO: 3017855 - RNA, 19 nt, Human
ugaagguagaauguuuuca

SEQ ID NO: 3017856 - RNA, 14 nt, Human
ugaagucacacagu

SEQ ID NO: 3017857 - RNA, 16 nt, Human
agagggagggagggcu

SEQ ID NO: 3017858 - RNA, 15 nt, Human
agagguuaagguggg

SEQ ID NO: 3017859 - RNA, 16 nt, Human
agagguggggagcaga

SEQ ID NO: 3017860 - RNA, 19 nt, Human
ucuggauucauauuuaauu

SEQ ID NO: 3017861 - RNA, 16 nt, Human
ucuggauucauauuua

SEQ ID NO: 3017862 - RNA, 15 nt, Human
ucuggauucauauuu

SEQ ID NO: 3017863 - RNA, 22 nt, Human
ucugcuuugggguuuaucagaa

SEQ ID NO: 3017864 - RNA, 21 nt, Human
ucuggcagcucagagagggug

SEQ ID NO: 3017865 - RNA, 18 nt, Human
ucuggcagcucagagagg

SEQ ID NO: 3017866 - RNA, 23 nt, Human
ucuggcagaguugaagacagagc

SEQ ID NO: 3017867 - RNA, 20 nt, Human
ucuggcagaguugaagacag

SEQ ID NO: 3017868 - RNA, 17 nt, Human
ucuggcagcucagagag

SEQ ID NO: 3017869 - RNA, 16 nt, Human
ucuggcagcucagaga

SEQ ID NO: 3017870 - RNA, 16 nt, Human
agaauaaaccaagaau

SEQ ID NO: 3017871 - RNA, 22 nt, Human
agaaguuugagaucagccuggg

SEQ ID NO: 3017872 - RNA, 17 nt, Human
agaacuauguuuuuguu

SEQ ID NO: 3017873 - RNA, 23 nt, Human
agaaccuuuugagugccuuacac

SEQ ID NO: 3017874 - RNA, 19 nt, Human
agaaccuuuugagugccuu

SEQ ID NO: 3017875 - RNA, 16 nt, Human
agaagcagaggaagga

SEQ ID NO: 3017876 - RNA, 23 nt, Human
agaagcccaggaaaggcuccagg

SEQ ID NO: 3017877 - RNA, 23 nt, Human
ucugcccacucccugcaaccuga

SEQ ID NO: 3017878 - RNA, 23 nt, Human
ucugcccuugguuaggcauugug

SEQ ID NO: 3017879 - RNA, 12 nt, Human
ucugcccuuggu

SEQ ID NO: 3017880 - RNA, 19 nt, Human
agaaaaaauauuuucccua

SEQ ID NO: 3017881 - RNA, 23 nt, Human
agaaaaaauauuuuccugccagg

SEQ ID NO: 3017882 - RNA, 17 nt, Human
agaaaaaauauuuuccu

SEQ ID NO: 3017883 - RNA, 18 nt, Human
agaaaaaugagccuggca

SEQ ID NO: 3017884 - RNA, 17 nt, Human
agaaaaaugagccuggc

SEQ ID NO: 3017885 - RNA, 18 nt, Human
ucucuugguccugcugca

SEQ ID NO: 3017886 - RNA, 17 nt, Human
ucucuugguccugcugc

SEQ ID NO: 3017887 - RNA, 16 nt, Human
ucucuugguccugcug

SEQ ID NO: 3017888 - RNA, 22 nt, Human
ucugaaggacauugcggacagc

SEQ ID NO: 3017889 - RNA, 18 nt, Human
ucugaaggcuggguucug

SEQ ID NO: 3017890 - RNA, 15 nt, Human
agaaaugccuuaccc

SEQ ID NO: 3017891 - RNA, 20 nt, Human
agaaagacuaucuaaauguu

SEQ ID NO: 3017892 - RNA, 22 nt, Human
agaaagacuaucuaaauguuga

SEQ ID NO: 3017893 - RNA, 23 nt, Human
acuuuggaaagaguaggaagacu

SEQ ID NO: 3017894 - RNA, 23 nt, Human
acuuuggaaagacuuuuccaacc

SEQ ID NO: 3017895 - RNA, 14 nt, Human
acuuuggaaagagu

SEQ ID NO: 3017896 - RNA, 13 nt, Human
acuuuggaaagag

SEQ ID NO: 3017897 - RNA, 14 nt, Human
acuuguggacacag

SEQ ID NO: 3017898 - RNA, 16 nt, Human
acuuuaaaaggagcca

SEQ ID NO: 3017899 - RNA, 23 nt, Human
acuuuaccuuuuuuauacauaaa

SEQ ID NO: 3017900 - RNA, 12 nt, Human
ucucucaggcca

SEQ ID NO: 3017901 - RNA, 19 nt, Human
ucuccuguaccucuugagc

SEQ ID NO: 3017902 - RNA, 23 nt, Human
ucuccuuggugucgggcaugaca

SEQ ID NO: 3017903 - RNA, 21 nt, Human
ucuccuuggugucgggcauga

SEQ ID NO: 3017904 - RNA, 16 nt, Human
acuuuguguucaccuu

SEQ ID NO: 3017905 - RNA, 12 nt, Human
ucuagcaugaag

SEQ ID NO: 3017906 - RNA, 24 nt, Human
ucuagauacuguaucaugacaaag

SEQ ID NO: 3017907 - RNA, 13 nt, Human
ucuagauacugua

SEQ ID NO: 3017908 - RNA, 22 nt, Human
ucuaguuugauuaaauucuugc

SEQ ID NO: 3017909 - RNA, 23 nt, Human
ucuaguuugauuaaauucuugca

SEQ ID NO: 3017910 - RNA, 19 nt, Human
ucuaccugaggggccucuu

SEQ ID NO: 3017911 - RNA, 12 nt, Human
ucuaccugaggg

SEQ ID NO: 3017912 - RNA, 13 nt, Human
acuuacuguacau

SEQ ID NO: 3017913 - RNA, 14 nt, Human
acuuacuguacaug

SEQ ID NO: 3017914 - RNA, 15 nt, Human
acuuacuguacauga

SEQ ID NO: 3017915 - RNA, 20 nt, Human
acuuagagguggggagcaga

SEQ ID NO: 3017916 - RNA, 18 nt, Human
acuuccaauuuacauacu

SEQ ID NO: 3017917 - RNA, 17 nt, Human
acuuccacugccauccu

SEQ ID NO: 3017918 - RNA, 16 nt, Human
acuucaucccucuggg

SEQ ID NO: 3017919 - RNA, 20 nt, Human
acuucgggaggucgaggcag

SEQ ID NO: 3017920 - RNA, 17 nt, Human
acuucgggaggucgagg

SEQ ID NO: 3017921 - RNA, 18 nt, Human
acuucuccacccugcucu

SEQ ID NO: 3017922 - RNA, 16 nt, Human
ucuauuguuucuuuca

SEQ ID NO: 3017923 - RNA, 16 nt, Human
ucucaaaaaaagaaaa

SEQ ID NO: 3017924 - RNA, 14 nt, Human
acuuggaagcuccg

SEQ ID NO: 3017925 - RNA, 14 nt, Human
acuugucuuuggac

SEQ ID NO: 3017926 - RNA, 19 nt, Human
acuugagaauuacccuuuu

SEQ ID NO: 3017927 - RNA, 15 nt, Human
acuguccuauuauau

SEQ ID NO: 3017928 - RNA, 16 nt, Human
acuguccuauuauauu

SEQ ID NO: 3017929 - RNA, 23 nt, Human
acuguccuacccacccuccuuuc

SEQ ID NO: 3017930 - RNA, 18 nt, Human
acuguccuauuauauuca

SEQ ID NO: 3017931 - RNA, 16 nt, Human
acuguaucaugacaaa

SEQ ID NO: 3017932 - RNA, 20 nt, Human
acuguaucaugacaaagacu

SEQ ID NO: 3017933 - RNA, 19 nt, Human
acuguacaugaaaacacau

SEQ ID NO: 3017934 - RNA, 16 nt, Human
acuguacaugaaaaca

SEQ ID NO: 3017935 - RNA, 17 nt, Human
acuggguacuuguggac

SEQ ID NO: 3017936 - RNA, 16 nt, Human
acuguacaaaguagaa

SEQ ID NO: 3017937 - RNA, 22 nt, Human
acuguacaaaguagaagucuua

SEQ ID NO: 3017938 - RNA, 14 nt, Human
acuguaucaugaca

SEQ ID NO: 3017939 - RNA, 20 nt, Human
acuguacaugaaaacacauu

SEQ ID NO: 3017940 - RNA, 21 nt, Human
acuguacaugaaaacacauuu

SEQ ID NO: 3017941 - RNA, 23 nt, Human
ucgcugugucagcauagaaguaa

SEQ ID NO: 3017942 - RNA, 21 nt, Human
acugggcuuggggaccagagc

SEQ ID NO: 3017943 - RNA, 15 nt, Human
acuggguacuugugg

SEQ ID NO: 3017944 - RNA, 14 nt, Human
ucgcuccugugucu

SEQ ID NO: 3017945 - RNA, 21 nt, Human
acuguuaauaguucagguaac

SEQ ID NO: 3017946 - RNA, 17 nt, Human
acuguuaauaguucagg

SEQ ID NO: 3017947 - RNA, 17 nt, Human
ucuaaagcugccagccg

SEQ ID NO: 3017948 - RNA, 16 nt, Human
ucuaaagcugccagcc

SEQ ID NO: 3017949 - RNA, 13 nt, Human
ucuaaaggcuacc

SEQ ID NO: 3017950 - RNA, 16 nt, Human
ucuaaaggcuaccuuu

SEQ ID NO: 3017951 - RNA, 22 nt, Human
ucuaacuucaccauauuaccac

SEQ ID NO: 3017952 - RNA, 21 nt, Human
ucuacccucuuagaaaaacca

SEQ ID NO: 3017953 - RNA, 13 nt, Human
ucaguagucagac

SEQ ID NO: 3017954 - RNA, 23 nt, Human
ucagugccuuauggaacacucug

SEQ ID NO: 3017955 - RNA, 22 nt, Human
ucagugccuuauggaacacucu

SEQ ID NO: 3017956 - RNA, 20 nt, Human
ucagugccuuauggaacacu

SEQ ID NO: 3017957 - RNA, 19 nt, Human
ucagugccuuauggaacac

SEQ ID NO: 3017958 - RNA, 14 nt, Human
ucaguggcagcugc

SEQ ID NO: 3017959 - RNA, 15 nt, Human
ucaguggcagcugcu

SEQ ID NO: 3017960 - RNA, 17 nt, Human
ucaguuguuaguguguc

SEQ ID NO: 3017961 - RNA, 16 nt, Human
ucaguggcagcugcuu

SEQ ID NO: 3017962 - RNA, 18 nt, Human
ucagugccuuauggaaca

SEQ ID NO: 3017963 - RNA, 13 nt, Human
ucaguggcagcug

SEQ ID NO: 3017964 - RNA, 15 nt, Human
ucaguuguuauuuau

SEQ ID NO: 3017965 - RNA, 20 nt, Human
ucaguuguuauuuauugaaa

SEQ ID NO: 3017966 - RNA, 19 nt, Human
ucaguuguuagugugucuu

SEQ ID NO: 3017967 - RNA, 14 nt, Human
ucaguuuaucuguu

SEQ ID NO: 3017968 - RNA, 16 nt, Human
ucaguuuaucuguuca

SEQ ID NO: 3017969 - RNA, 12 nt, Human
ucaguuugguug

SEQ ID NO: 3017970 - RNA, 16 nt, Human
ucaguuugcagaguag

SEQ ID NO: 3017971 - RNA, 15 nt, Human
ucaguuugcagagua

SEQ ID NO: 3017972 - RNA, 22 nt, Human
ucaggugucccugcacuugcag

SEQ ID NO: 3017973 - RNA, 13 nt, Human
ucaguaagccgug

SEQ ID NO: 3017974 - RNA, 13 nt, Human
ucaguaauaacuc

SEQ ID NO: 3017975 - RNA, 20 nt, Human
acccuugccgucuaccugag

SEQ ID NO: 3017976 - RNA, 20 nt, Human
accgaaaacguggcugcuuc

SEQ ID NO: 3017977 - RNA, 15 nt, Human
ucaggugucccugca

SEQ ID NO: 3017978 - RNA, 23 nt, Human
ucagguggggucacucuggcagc

SEQ ID NO: 3017979 - RNA, 17 nt, Human
ucaggugucccugcacu

SEQ ID NO: 3017980 - RNA, 18 nt, Human
ucaggugucccugcacuu

SEQ ID NO: 3017981 - RNA, 22 nt, Human
accgaaaacguggcugcuucaa

SEQ ID NO: 3017982 - RNA, 21 nt, Human
accgaaaacguggcugcuuca

SEQ ID NO: 3017983 - RNA, 22 nt, Human
ucagguggggucacucuggcag

SEQ ID NO: 3017984 - RNA, 21 nt, Human
ucagguggggucacucuggca

SEQ ID NO: 3017985 - RNA, 19 nt, Human
acccgcuaagagggaggga

SEQ ID NO: 3017986 - RNA, 18 nt, Human
ucaggguuggccccugcc

SEQ ID NO: 3017987 - RNA, 19 nt, Human
ucaggguuggccccugccc

SEQ ID NO: 3017988 - RNA, 17 nt, Human
ucaggguuggccccugc

SEQ ID NO: 3017989 - RNA, 19 nt, Human
ucaggggugugcggccuuu

SEQ ID NO: 3017990 - RNA, 12 nt, Human
ucaggggugugc

SEQ ID NO: 3017991 - RNA, 19 nt, Human
ucaggccaggcccucugcc

SEQ ID NO: 3017992 - RNA, 18 nt, Human
ucaggccaggcccucugc

SEQ ID NO: 3017993 - RNA, 17 nt, Human
ucaggccaggcccucug

SEQ ID NO: 3017994 - RNA, 17 nt, Human
ucaggcaggugggaugg

SEQ ID NO: 3017995 - RNA, 18 nt, Human
ucaggcaggugggaugga

SEQ ID NO: 3017996 - RNA, 13 nt, Human
acccccagccugc

SEQ ID NO: 3017997 - RNA, 12 nt, Human
acccccagccug

SEQ ID NO: 3017998 - RNA, 12 nt, Human
ucaggccaggcc

SEQ ID NO: 3017999 - RNA, 13 nt, Human
ucaggccagcugc

SEQ ID NO: 3018000 - RNA, 16 nt, Human
ucaggccaggcccucu

SEQ ID NO: 3018001 - RNA, 15 nt, Human
ucaggccaggcccuc

SEQ ID NO: 3018002 - RNA, 14 nt, Human
ucaggccaggcccu

SEQ ID NO: 3018003 - RNA, 13 nt, Human
ucaggccaggccc

SEQ ID NO: 3018004 - RNA, 21 nt, Human
acccuccuuucaccacaugug

SEQ ID NO: 3018005 - RNA, 22 nt, Human
acccgggaagggggcugggaca

SEQ ID NO: 3018006 - RNA, 14 nt, Human
acccucauguucuu

SEQ ID NO: 3018007 - RNA, 15 nt, Human
acccucauguucuua

SEQ ID NO: 3018008 - RNA, 17 nt, Human
acccucauguucuuaau

SEQ ID NO: 3018009 - RNA, 20 nt, Human
acccgggaagggggcuggga

SEQ ID NO: 3018010 - RNA, 19 nt, Human
acccgggaagggggcuggg

SEQ ID NO: 3018011 - RNA, 21 nt, Human
acccugaggcccagagggccu

SEQ ID NO: 3018012 - RNA, 19 nt, Human
acccugaggcccagagggc

SEQ ID NO: 3018013 - RNA, 17 nt, Human
acccugaggcccagagg

SEQ ID NO: 3018014 - RNA, 11 nt, Human
acccugaggcc

SEQ ID NO: 3018015 - RNA, 23 nt, Human
acccugaggcccagagggccugc

SEQ ID NO: 3018016 - RNA, 12 nt, Human
ucagcccucaga

SEQ ID NO: 3018017 - RNA, 13 nt, Human
acccagcgagccc

SEQ ID NO: 3018018 - RNA, 16 nt, Human
acccagcgagcccugg

SEQ ID NO: 3018019 - RNA, 17 nt, Human
acccagcgagcccuggu

SEQ ID NO: 3018020 - RNA, 13 nt, Human
acccaggagcccc

SEQ ID NO: 3018021 - RNA, 15 nt, Human
acccaggagccccga

SEQ ID NO: 3018022 - RNA, 23 nt, Human
acccaggugcuaggaacacuccu

SEQ ID NO: 3018023 - RNA, 11 nt, Human
acccaggugcu

SEQ ID NO: 3018024 - RNA, 13 nt, Human
accccagguuucu

SEQ ID NO: 3018025 - RNA, 22 nt, Human
ucagagacuccugcaggcagcc

SEQ ID NO: 3018026 - RNA, 20 nt, Human
ucagaauucucagaaucuca

SEQ ID NO: 3018027 - RNA, 10 nt, Human
ucagaauucu

SEQ ID NO: 3018028 - RNA, 12 nt, Human
ucagaauucuca

SEQ ID NO: 3018029 - RNA, 15 nt, Human
acccagcccacuucu

SEQ ID NO: 3018030 - RNA, 23 nt, Human
ucagaaguuucugccgcagcccu

SEQ ID NO: 3018031 - RNA, 23 nt, Human
ucagagacuccugcaggcagcca

SEQ ID NO: 3018032 - RNA, 15 nt, Human
ucagaucucuaacuu

SEQ ID NO: 3018033 - RNA, 16 nt, Human
ucagaucucuaacuuc

SEQ ID NO: 3018034 - RNA, 15 nt, Human
ucacuguugcccagg

SEQ ID NO: 3018035 - RNA, 18 nt, Human
ucacugcaaccuccgccu

SEQ ID NO: 3018036 - RNA, 14 nt, Human
ucacuguugcccag

SEQ ID NO: 3018037 - RNA, 22 nt, Human
ucaccagccccagugcccacag

SEQ ID NO: 3018038 - RNA, 20 nt, Human
ucacuauguugcccaggcag

SEQ ID NO: 3018039 - RNA, 21 nt, Human
ucacuauguugcccaggcagg

SEQ ID NO: 3018040 - RNA, 23 nt, Human
ucacugagacagcccgggcucug

SEQ ID NO: 3018041 - RNA, 21 nt, Human
accauuuugggguacccacug

SEQ ID NO: 3018042 - RNA, 23 nt, Human
accauuuugcugucccuuuuccu

SEQ ID NO: 3018043 - RNA, 22 nt, Human
accauuuugcugucccuuuucc

SEQ ID NO: 3018044 - RNA, 19 nt, Human
accauucuccaccugccag

SEQ ID NO: 3018045 - RNA, 21 nt, Human
accauucuccaccugccaggg

SEQ ID NO: 3018046 - RNA, 20 nt, Human
accauucuccaccugccagg

SEQ ID NO: 3018047 - RNA, 20 nt, Human
acccacugcuuuuggucugu

SEQ ID NO: 3018048 - RNA, 13 nt, Human
acauuuuaugucu

SEQ ID NO: 3018049 - RNA, 15 nt, Human
acauuuuaugucuuu

SEQ ID NO: 3018050 - RNA, 21 nt, Human
acauuuuuuaaaugcaccugg

SEQ ID NO: 3018051 - RNA, 13 nt, Human
acauuuuucuuag

SEQ ID NO: 3018052 - RNA, 23 nt, Human
acauuuuucuuagggaaggauac

SEQ ID NO: 3018053 - RNA, 15 nt, Human
acauuuuuaagugcu

SEQ ID NO: 3018054 - RNA, 18 nt, Human
acauuuuuaagugcugca

SEQ ID NO: 3018055 - RNA, 21 nt, Human
acauugcggacagccacggcc

SEQ ID NO: 3018056 - RNA, 22 nt, Human
acauugcggacagccacggcca

SEQ ID NO: 3018057 - RNA, 23 nt, Human
ucaaggauccugagccagauuuc

SEQ ID NO: 3018058 - RNA, 17 nt, Human
ucaagagggucugagga

SEQ ID NO: 3018059 - RNA, 16 nt, Human
ucaagugauucuccug

SEQ ID NO: 3018060 - RNA, 17 nt, Human
ucaagugauucuccugc

SEQ ID NO: 3018061 - RNA, 17 nt, Human
ucaauaggaaaaacuga

SEQ ID NO: 3018062 - RNA, 19 nt, Human
ucaauaggaaaaacugauu

SEQ ID NO: 3018063 - RNA, 18 nt, Human
ucaauaggaaaaacugau

SEQ ID NO: 3018064 - RNA, 22 nt, Human
ucaauaggaaaaacugauuuuu

SEQ ID NO: 3018065 - RNA, 14 nt, Human
ucacagaagaugaa

SEQ ID NO: 3018066 - RNA, 20 nt, Human
ucaauugugaaaaaauuuac

SEQ ID NO: 3018067 - RNA, 16 nt, Human
ucaauugugaaaaaau

SEQ ID NO: 3018068 - RNA, 15 nt, Human
ucacagaugggugcu

SEQ ID NO: 3018069 - RNA, 14 nt, Human
ucacagaugggugc

SEQ ID NO: 3018070 - RNA, 22 nt, Human
ucacagcuuauuuccucauuuu

SEQ ID NO: 3018071 - RNA, 16 nt, Human
ucacauauugauuucc

SEQ ID NO: 3018072 - RNA, 18 nt, Human
ucacauauugauuuccgu

SEQ ID NO: 3018073 - RNA, 20 nt, Human
ucacauauugauuuccguua

SEQ ID NO: 3018074 - RNA, 17 nt, Human
ucaccagccccagugcc

SEQ ID NO: 3018075 - RNA, 16 nt, Human
ucaccagccccagugc

SEQ ID NO: 3018076 - RNA, 16 nt, Human
accaaaucagcugcua

SEQ ID NO: 3018077 - RNA, 19 nt, Human
accaaaucagcugcuacua

SEQ ID NO: 3018078 - RNA, 16 nt, Human
accaacauacucccau

SEQ ID NO: 3018079 - RNA, 20 nt, Human
accaaccacugcgaccacaa

SEQ ID NO: 3018080 - RNA, 17 nt, Human
accacacagaggcugcc

SEQ ID NO: 3018081 - RNA, 15 nt, Human
accacacccagccca

SEQ ID NO: 3018082 - RNA, 16 nt, Human
accacacccagcccac

SEQ ID NO: 3018083 - RNA, 20 nt, Human
accacacccagcccacuucu

SEQ ID NO: 3018084 - RNA, 21 nt, Human
accacacccagcccacuucug

SEQ ID NO: 3018085 - RNA, 23 nt, Human
accacacccagcccacuucugcc

SEQ ID NO: 3018086 - RNA, 20 nt, Human
uauuuugacuuguugagggu

SEQ ID NO: 3018087 - RNA, 14 nt, Human
uauuuugacuuguu

SEQ ID NO: 3018088 - RNA, 20 nt, Human
uauuuugcuuugugauuuuu

SEQ ID NO: 3018089 - RNA, 13 nt, Human
uauuuugcuuugu

SEQ ID NO: 3018090 - RNA, 15 nt, Human
uauuuugcuuuguga

SEQ ID NO: 3018091 - RNA, 17 nt, Human
uauuuuuguagagccag

SEQ ID NO: 3018092 - RNA, 14 nt, Human
acaucuugcucugc

SEQ ID NO: 3018093 - RNA, 19 nt, Human
acaucuuggucagauuuga

SEQ ID NO: 3018094 - RNA, 22 nt, Human
acaucuugcucugcugacagac

SEQ ID NO: 3018095 - RNA, 17 nt, Human
acaucuugcucugcuga

SEQ ID NO: 3018096 - RNA, 15 nt, Human
acaucuugcucugcu

SEQ ID NO: 3018097 - RNA, 16 nt, Human
acaucuugcucugcug

SEQ ID NO: 3018098 - RNA, 15 nt, Human
acaugaaaacacauu

SEQ ID NO: 3018099 - RNA, 13 nt, Human
acaugagcaucag

SEQ ID NO: 3018100 - RNA, 23 nt, Human
acaugaaaacacauuuuucuuag

SEQ ID NO: 3018101 - RNA, 22 nt, Human
acaugaaaacacauuuuucuua

SEQ ID NO: 3018102 - RNA, 22 nt, Human
ucaaagauauuuugcuuuguga

SEQ ID NO: 3018103 - RNA, 13 nt, Human
ucaaagauauuuu

SEQ ID NO: 3018104 - RNA, 20 nt, Human
ucaaagauauuuugcuuugu

SEQ ID NO: 3018105 - RNA, 16 nt, Human
ucaaaagcugggcagg

SEQ ID NO: 3018106 - RNA, 14 nt, Human
acauggccuuugcu

SEQ ID NO: 3018107 - RNA, 15 nt, Human
acauggaguauaugu

SEQ ID NO: 3018108 - RNA, 19 nt, Human
acauggaguauaugucaag

SEQ ID NO: 3018109 - RNA, 23 nt, Human
acaugagcaucaggccaggcccu

SEQ ID NO: 3018110 - RNA, 20 nt, Human
acaugagcaucaggccaggc

SEQ ID NO: 3018111 - RNA, 20 nt, Human
acauggaauaacauguaauu

SEQ ID NO: 3018112 - RNA, 14 nt, Human
acauggaaguacua

SEQ ID NO: 3018113 - RNA, 18 nt, Human
acauggaauaacauguaa

SEQ ID NO: 3018114 - RNA, 21 nt, Human
acaugucuuuucuugcaugag

SEQ ID NO: 3018115 - RNA, 17 nt, Human
acgcccuuggccauggg

SEQ ID NO: 3018116 - RNA, 20 nt, Human
acgcgugcacacaccagagc

SEQ ID NO: 3018117 - RNA, 23 nt, Human
acgcgugcacacaccagagccca

SEQ ID NO: 3018118 - RNA, 14 nt, Human
acgcccccacuggu

SEQ ID NO: 3018119 - RNA, 18 nt, Human
acgcuacccgggaagggg

SEQ ID NO: 3018120 - RNA, 17 nt, Human
acgcuacccgggaaggg

SEQ ID NO: 3018121 - RNA, 13 nt, Human
acgcuacccggga

SEQ ID NO: 3018122 - RNA, 19 nt, Human
acggagucccaccuuggcu

SEQ ID NO: 3018123 - RNA, 13 nt, Human
acggccaggccag

SEQ ID NO: 3018124 - RNA, 16 nt, Human
acggccaggccagagg

SEQ ID NO: 3018125 - RNA, 22 nt, Human
uccaggcuccuuuagcgcccag

SEQ ID NO: 3018126 - RNA, 18 nt, Human
uccaggcugggagagccu

SEQ ID NO: 3018127 - RNA, 17 nt, Human
uccaggcugggagagcc

SEQ ID NO: 3018128 - RNA, 14 nt, Human
uccaggcugggaga

SEQ ID NO: 3018129 - RNA, 18 nt, Human
acgccaucccagccccaa

SEQ ID NO: 3018130 - RNA, 17 nt, Human
acgccaucccagcccca

SEQ ID NO: 3018131 - RNA, 16 nt, Human
acgccaucccagcccc

SEQ ID NO: 3018132 - RNA, 15 nt, Human
acgccaucccagccc

SEQ ID NO: 3018133 - RNA, 14 nt, Human
acgccaucccagcc

SEQ ID NO: 3018134 - RNA, 11 nt, Human
acgccauccca

SEQ ID NO: 3018135 - RNA, 23 nt, Human
acgccaggggaaaaucagccugc

SEQ ID NO: 3018136 - RNA, 15 nt, Human
acgacugcccggcag

SEQ ID NO: 3018137 - RNA, 18 nt, Human
acgccaggggaaaaucag

SEQ ID NO: 3018138 - RNA, 17 nt, Human
uccaugaguccccuguu

SEQ ID NO: 3018139 - RNA, 16 nt, Human
uccaugaguccccugu

SEQ ID NO: 3018140 - RNA, 15 nt, Human
uccaugaguccccug

SEQ ID NO: 3018141 - RNA, 14 nt, Human
acggcucacugcag

SEQ ID NO: 3018142 - RNA, 20 nt, Human
uccagugaggcucugcccuu

SEQ ID NO: 3018143 - RNA, 17 nt, Human
uccagugaggcucugcc

SEQ ID NO: 3018144 - RNA, 19 nt, Human
uccagugaggcucugcccu

SEQ ID NO: 3018145 - RNA, 18 nt, Human
uccagugaggcucugccc

SEQ ID NO: 3018146 - RNA, 14 nt, Human
ucccaccccacaca

SEQ ID NO: 3018147 - RNA, 11 nt, Human
ucccaccccac

SEQ ID NO: 3018148 - RNA, 14 nt, Human
ucccacaaaggaga

SEQ ID NO: 3018149 - RNA, 15 nt, Human
ucccaaagugcuggg

SEQ ID NO: 3018150 - RNA, 16 nt, Human
ucccaaagugcuggga

SEQ ID NO: 3018151 - RNA, 20 nt, Human
accugcacacuguccuauua

SEQ ID NO: 3018152 - RNA, 17 nt, Human
accugccaggaagccag

SEQ ID NO: 3018153 - RNA, 16 nt, Human
accugccaggaagcca

SEQ ID NO: 3018154 - RNA, 18 nt, Human
accugccaggaagccagc

SEQ ID NO: 3018155 - RNA, 15 nt, Human
accugccaggaagcc

SEQ ID NO: 3018156 - RNA, 14 nt, Human
accugaggggccuc

SEQ ID NO: 3018157 - RNA, 23 nt, Human
accugaggcccuucucuccagcc

SEQ ID NO: 3018158 - RNA, 18 nt, Human
accugaagacucauucuu

SEQ ID NO: 3018159 - RNA, 19 nt, Human
accugaauuuuggcugugu

SEQ ID NO: 3018160 - RNA, 12 nt, Human
ucauaaugacuu

SEQ ID NO: 3018161 - RNA, 20 nt, Human
accuggaauauauaaccagu

SEQ ID NO: 3018162 - RNA, 16 nt, Human
accugcggugcuaucu

SEQ ID NO: 3018163 - RNA, 21 nt, Human
accugcgucucauacucaccu

SEQ ID NO: 3018164 - RNA, 23 nt, Human
accugccuguugggccaggagcc

SEQ ID NO: 3018165 - RNA, 16 nt, Human
ucauuugucacacacu

SEQ ID NO: 3018166 - RNA, 14 nt, Human
ucauuugucacaca

SEQ ID NO: 3018167 - RNA, 19 nt, Human
ucauuuuuaguagagacag

SEQ ID NO: 3018168 - RNA, 18 nt, Human
ucauuuuuuuuaagaaaa

SEQ ID NO: 3018169 - RNA, 17 nt, Human
ucauuuuuuuuaagaaa

SEQ ID NO: 3018170 - RNA, 20 nt, Human
uccacccaggagccccgagg

SEQ ID NO: 3018171 - RNA, 12 nt, Human
uccacccaccuc

SEQ ID NO: 3018172 - RNA, 18 nt, Human
uccaccaucaagccacca

SEQ ID NO: 3018173 - RNA, 13 nt, Human
uccacccaccuca

SEQ ID NO: 3018174 - RNA, 17 nt, Human
uccacccaggagccccg

SEQ ID NO: 3018175 - RNA, 13 nt, Human
accuggccucugc

SEQ ID NO: 3018176 - RNA, 12 nt, Human
accuggccucug

SEQ ID NO: 3018177 - RNA, 21 nt, Human
accuggguaacuagggaagau

SEQ ID NO: 3018178 - RNA, 14 nt, Human
accuucuccuucac

SEQ ID NO: 3018179 - RNA, 22 nt, Human
accuucuccuucaccuuugucc

SEQ ID NO: 3018180 - RNA, 16 nt, Human
accuugacagggcaca

SEQ ID NO: 3018181 - RNA, 13 nt, Human
accuuugucccca

SEQ ID NO: 3018182 - RNA, 14 nt, Human
accuuuuuuauaca

SEQ ID NO: 3018183 - RNA, 16 nt, Human
accuuuguccccaccg

SEQ ID NO: 3018184 - RNA, 15 nt, Human
accuuuguccccacc

SEQ ID NO: 3018185 - RNA, 14 nt, Human
accuuuguccccac

SEQ ID NO: 3018186 - RNA, 16 nt, Human
accuuuuuuauacaua

SEQ ID NO: 3018187 - RNA, 17 nt, Human
accuuuuuuauacauaa

SEQ ID NO: 3018188 - RNA, 18 nt, Human
accuuuuuuauacauaaa

SEQ ID NO: 3018189 - RNA, 15 nt, Human
acucuucccucaaau

SEQ ID NO: 3018190 - RNA, 17 nt, Human
acucuggcagcucagag

SEQ ID NO: 3018191 - RNA, 16 nt, Human
acucuggcagcucaga

SEQ ID NO: 3018192 - RNA, 21 nt, Human
acucuuauugcccacgcugga

SEQ ID NO: 3018193 - RNA, 20 nt, Human
acucuggcagcucagagagg

SEQ ID NO: 3018194 - RNA, 19 nt, Human
acucuggcagcucagagag

SEQ ID NO: 3018195 - RNA, 16 nt, Human
acucgcgacaaugcaa

SEQ ID NO: 3018196 - RNA, 15 nt, Human
acucgcgacaaugca

SEQ ID NO: 3018197 - RNA, 16 nt, Human
acucgaguuacagaca

SEQ ID NO: 3018198 - RNA, 20 nt, Human
uccuagcacuuugggaggcc

SEQ ID NO: 3018199 - RNA, 21 nt, Human
uccuagccugugccucuggga

SEQ ID NO: 3018200 - RNA, 15 nt, Human
uccguuaaaauacca

SEQ ID NO: 3018201 - RNA, 13 nt, Human
uccguuaaaauac

SEQ ID NO: 3018202 - RNA, 21 nt, Human
uccucccaccucagccucccg

SEQ ID NO: 3018203 - RNA, 13 nt, Human
uccucccaccuca

SEQ ID NO: 3018204 - RNA, 14 nt, Human
uccucccaccucag

SEQ ID NO: 3018205 - RNA, 15 nt, Human
uccucccaccucagc

SEQ ID NO: 3018206 - RNA, 16 nt, Human
uccucccaccucagcc

SEQ ID NO: 3018207 - RNA, 18 nt, Human
uccucccaccucagccuc

SEQ ID NO: 3018208 - RNA, 20 nt, Human
uccucccaccucagccuccc

SEQ ID NO: 3018209 - RNA, 15 nt, Human
uccugaagaauugaa

SEQ ID NO: 3018210 - RNA, 19 nt, Human
acucuuucuauuguuucuu

SEQ ID NO: 3018211 - RNA, 23 nt, Human
uccucuuuggucuacacugugcu

SEQ ID NO: 3018212 - RNA, 21 nt, Human
acucaccugccccucaacucu

SEQ ID NO: 3018213 - RNA, 19 nt, Human
acucaccugccccucaacu

SEQ ID NO: 3018214 - RNA, 14 nt, Human
acucaccugccccu

SEQ ID NO: 3018215 - RNA, 14 nt, Human
acucagaagacacu

SEQ ID NO: 3018216 - RNA, 15 nt, Human
acucagaagacacug

SEQ ID NO: 3018217 - RNA, 16 nt, Human
acucagaagacacuga

SEQ ID NO: 3018218 - RNA, 17 nt, Human
acucagaagacacugau

SEQ ID NO: 3018219 - RNA, 14 nt, Human
acucagaauucucu

SEQ ID NO: 3018220 - RNA, 21 nt, Human
acucagaauucucuaguuuga

SEQ ID NO: 3018221 - RNA, 22 nt, Human
acucagaauucucuaguuugau

SEQ ID NO: 3018222 - RNA, 18 nt, Human
acucagaagacacugaug

SEQ ID NO: 3018223 - RNA, 17 nt, Human
acucauugaccugaggc

SEQ ID NO: 3018224 - RNA, 16 nt, Human
acucauugaccugagg

SEQ ID NO: 3018225 - RNA, 12 nt, Human
acucaucuuagg

SEQ ID NO: 3018226 - RNA, 22 nt, Human
acucauugaccugaggcccuuc

SEQ ID NO: 3018227 - RNA, 18 nt, Human
acucauugaccugaggcc

SEQ ID NO: 3018228 - RNA, 23 nt, Human
ucccugaaggccccgcccaggcu

SEQ ID NO: 3018229 - RNA, 17 nt, Human
acucaccccagccccaa

SEQ ID NO: 3018230 - RNA, 17 nt, Human
ucccugaaggccccgcc

SEQ ID NO: 3018231 - RNA, 18 nt, Human
ucccugaaggccccgccc

SEQ ID NO: 3018232 - RNA, 22 nt, Human
ucccugaaggccccgcccaggc

SEQ ID NO: 3018233 - RNA, 21 nt, Human
ucccugaaggccccgcccagg

SEQ ID NO: 3018234 - RNA, 18 nt, Human
ucccucagucuggcccuu

SEQ ID NO: 3018235 - RNA, 20 nt, Human
ucccucagucuggcccuucc

SEQ ID NO: 3018236 - RNA, 11 nt, Human
ucccucuuucc

SEQ ID NO: 3018237 - RNA, 13 nt, Human
ucccucuuucccu

SEQ ID NO: 3018238 - RNA, 13 nt, Human
acguacacacaca

SEQ ID NO: 3018239 - RNA, 12 nt, Human
acguacacauuu

SEQ ID NO: 3018240 - RNA, 13 nt, Human
acguacacauuuu

SEQ ID NO: 3018241 - RNA, 14 nt, Human
acguacacauuuua

SEQ ID NO: 3018242 - RNA, 18 nt, Human
acuacggaauaguuggcu

SEQ ID NO: 3018243 - RNA, 19 nt, Human
acucacauuuauucugcuc

SEQ ID NO: 3018244 - RNA, 20 nt, Human
acucacauuuauucugcuca

SEQ ID NO: 3018245 - RNA, 14 nt, Human
acucaaugcacuga

SEQ ID NO: 3018246 - RNA, 12 nt, Human
acuauaauguaa

SEQ ID NO: 3018247 - RNA, 13 nt, Human
acuauaauguaag

SEQ ID NO: 3018248 - RNA, 14 nt, Human
acuauaauguaagc

SEQ ID NO: 3018249 - RNA, 12 nt, Human
acuauguaucaa

SEQ ID NO: 3018250 - RNA, 19 nt, Human
acacaaagcuuuugcauau

SEQ ID NO: 3018251 - RNA, 18 nt, Human
acacaaagcuuuugcaua

SEQ ID NO: 3018252 - RNA, 20 nt, Human
acacaaagcuuuugcauauu

SEQ ID NO: 3018253 - RNA, 23 nt, Human
acaaugcaaaccaucauugaaau

SEQ ID NO: 3018254 - RNA, 21 nt, Human
acaaugcaaaccaucauugaa

SEQ ID NO: 3018255 - RNA, 19 nt, Human
acaaugcaaaccaucauug

SEQ ID NO: 3018256 - RNA, 19 nt, Human
acaaugacuuacuguacau

SEQ ID NO: 3018257 - RNA, 20 nt, Human
acaaugacuuacuguacaug

SEQ ID NO: 3018258 - RNA, 22 nt, Human
acaaugacuuacuguacaugaa

SEQ ID NO: 3018259 - RNA, 18 nt, Human
acaaugcaaaccaucauu

SEQ ID NO: 3018260 - RNA, 17 nt, Human
acaaugcaaaccaucau

SEQ ID NO: 3018261 - RNA, 16 nt, Human
acaaugcaaaccauca

SEQ ID NO: 3018262 - RNA, 11 nt, Human
acaaugcaaac

SEQ ID NO: 3018263 - RNA, 19 nt, Human
uaggguaagugagagaggg

SEQ ID NO: 3018264 - RNA, 17 nt, Human
uaggguuauaauaaugu

SEQ ID NO: 3018265 - RNA, 15 nt, Human
uaggguuauaauaau

SEQ ID NO: 3018266 - RNA, 23 nt, Human
acacaggcccggcuccaggcucc

SEQ ID NO: 3018267 - RNA, 24 nt, Human
acacaggcccggcuccaggcuccu

SEQ ID NO: 3018268 - RNA, 19 nt, Human
acacaggcccggcuccagg

SEQ ID NO: 3018269 - RNA, 20 nt, Human
acacaggcccggcuccaggc

SEQ ID NO: 3018270 - RNA, 21 nt, Human
acacaggcccggcuccaggcu

SEQ ID NO: 3018271 - RNA, 22 nt, Human
acacaggcccggcuccaggcuc

SEQ ID NO: 3018272 - RNA, 17 nt, Human
acacaggcccggcucca

SEQ ID NO: 3018273 - RNA, 18 nt, Human
acacaggcccggcuccag

SEQ ID NO: 3018274 - RNA, 16 nt, Human
acacaggcccggcucc

SEQ ID NO: 3018275 - RNA, 14 nt, Human
uaguagagacaggg

SEQ ID NO: 3018276 - RNA, 15 nt, Human
uaguagagacagggu

SEQ ID NO: 3018277 - RNA, 22 nt, Human
uaguagagacaggguuuugcca

SEQ ID NO: 3018278 - RNA, 14 nt, Human
uagucacugagaca

SEQ ID NO: 3018279 - RNA, 22 nt, Human
uaggggucugucuuuuaaacuc

SEQ ID NO: 3018280 - RNA, 13 nt, Human
uagggaagauaau

SEQ ID NO: 3018281 - RNA, 17 nt, Human
uaggaaaaacugauuuu

SEQ ID NO: 3018282 - RNA, 16 nt, Human
uaggaaaaacugauuu

SEQ ID NO: 3018283 - RNA, 20 nt, Human
uagccuuagaagucacacag

SEQ ID NO: 3018284 - RNA, 17 nt, Human
uagcgcccaguugggug

SEQ ID NO: 3018285 - RNA, 14 nt, Human
uagcgcccaguugg

SEQ ID NO: 3018286 - RNA, 20 nt, Human
uagccugugccucugggacu

SEQ ID NO: 3018287 - RNA, 21 nt, Human
uagccuuagaagucacacagu

SEQ ID NO: 3018288 - RNA, 14 nt, Human
uaggaaaaacugau

SEQ ID NO: 3018289 - RNA, 13 nt, Human
uaggaaaaacuga

SEQ ID NO: 3018290 - RNA, 13 nt, Human
uagagguacacuu

SEQ ID NO: 3018291 - RNA, 18 nt, Human
uagagguacacuugugaa

SEQ ID NO: 3018292 - RNA, 14 nt, Human
uagcacagacccug

SEQ ID NO: 3018293 - RNA, 21 nt, Human
uagcacagacccugcccugug

SEQ ID NO: 3018294 - RNA, 20 nt, Human
uagcacagacccugcccugu

SEQ ID NO: 3018295 - RNA, 15 nt, Human
uagcacagacccugc

SEQ ID NO: 3018296 - RNA, 12 nt, Human
uagccaaggcca

SEQ ID NO: 3018297 - RNA, 22 nt, Human
uagcacagacccugcccugugg

SEQ ID NO: 3018298 - RNA, 13 nt, Human
uagccaaggccaa

SEQ ID NO: 3018299 - RNA, 14 nt, Human
uagagccagggucu

SEQ ID NO: 3018300 - RNA, 22 nt, Human
uagagcggagaaaggaagggcu

SEQ ID NO: 3018301 - RNA, 16 nt, Human
acaaaaagcauaaaaa

SEQ ID NO: 3018302 - RNA, 10 nt, Human
uagacagagu

SEQ ID NO: 3018303 - RNA, 16 nt, Human
uagacagucccugcca

SEQ ID NO: 3018304 - RNA, 18 nt, Human
uagacaauuuauuauggc

SEQ ID NO: 3018305 - RNA, 17 nt, Human
aauuugugauacaaugc

SEQ ID NO: 3018306 - RNA, 18 nt, Human
aauuugugauacaaugcu

SEQ ID NO: 3018307 - RNA, 14 nt, Human
aauuugugauacaa

SEQ ID NO: 3018308 - RNA, 18 nt, Human
aauuugggggaaaauuua

SEQ ID NO: 3018309 - RNA, 21 nt, Human
uagacagucccugccaaugga

SEQ ID NO: 3018310 - RNA, 17 nt, Human
uagacagucccugccaa

SEQ ID NO: 3018311 - RNA, 20 nt, Human
uaugugcacaucuguuuugu

SEQ ID NO: 3018312 - RNA, 18 nt, Human
acaggcccggcuccaggc

SEQ ID NO: 3018313 - RNA, 20 nt, Human
acaggcccggcuccaggcuc

SEQ ID NO: 3018314 - RNA, 21 nt, Human
acaggcccggcuccaggcucc

SEQ ID NO: 3018315 - RNA, 22 nt, Human
acaggcccggcuccaggcuccu

SEQ ID NO: 3018316 - RNA, 20 nt, Human
acaggaaaauuuuaaaaaua

SEQ ID NO: 3018317 - RNA, 15 nt, Human
acaggcagauacagg

SEQ ID NO: 3018318 - RNA, 16 nt, Human
acaggcccggcuccag

SEQ ID NO: 3018319 - RNA, 17 nt, Human
acaggcccggcuccagg

SEQ ID NO: 3018320 - RNA, 23 nt, Human
acagcuugaccgugaggccagag

SEQ ID NO: 3018321 - RNA, 22 nt, Human
acagcuugaccgugaggccaga

SEQ ID NO: 3018322 - RNA, 18 nt, Human
acaggaaaagcugcugac

SEQ ID NO: 3018323 - RNA, 19 nt, Human
acaggaaaagcugcugaca

SEQ ID NO: 3018324 - RNA, 20 nt, Human
acaggaaaagcugcugacag

SEQ ID NO: 3018325 - RNA, 21 nt, Human
acaggaaaagcugcugacagu

SEQ ID NO: 3018326 - RNA, 17 nt, Human
acagcuugaccgugagg

SEQ ID NO: 3018327 - RNA, 21 nt, Human
acagcuugaccgugaggccag

SEQ ID NO: 3018328 - RNA, 20 nt, Human
acagcuugaccgugaggcca

SEQ ID NO: 3018329 - RNA, 17 nt, Human
acagcuucauuuccugu

SEQ ID NO: 3018330 - RNA, 19 nt, Human
acagcuucauuuccugugu

SEQ ID NO: 3018331 - RNA, 21 nt, Human
acagcuucauuuccugugucu

SEQ ID NO: 3018332 - RNA, 15 nt, Human
acagcuaaugggaca

SEQ ID NO: 3018333 - RNA, 16 nt, Human
acagcuaaugggacac

SEQ ID NO: 3018334 - RNA, 17 nt, Human
acagcuaaugggacacu

SEQ ID NO: 3018335 - RNA, 19 nt, Human
acagcuaaugggacacuaa

SEQ ID NO: 3018336 - RNA, 15 nt, Human
acagcccgggcucug

SEQ ID NO: 3018337 - RNA, 16 nt, Human
acagcccgggcucugc

SEQ ID NO: 3018338 - RNA, 21 nt, Human
uaugaggcauuuguuugaacu

SEQ ID NO: 3018339 - RNA, 14 nt, Human
uaugaggcauuugu

SEQ ID NO: 3018340 - RNA, 15 nt, Human
uaugaggcauuuguu

SEQ ID NO: 3018341 - RNA, 16 nt, Human
uaugggacucaaugca

SEQ ID NO: 3018342 - RNA, 23 nt, Human
uaugggacucaaugcacugacau

SEQ ID NO: 3018343 - RNA, 20 nt, Human
uauggcccuggccuagcaua

SEQ ID NO: 3018344 - RNA, 23 nt, Human
uauggcuuuugugcauuaucuag

SEQ ID NO: 3018345 - RNA, 21 nt, Human
uauggcccuggccuagcauac

SEQ ID NO: 3018346 - RNA, 22 nt, Human
uaugcaugaaguaauaugcaca

SEQ ID NO: 3018347 - RNA, 16 nt, Human
acacucauucauuacu

SEQ ID NO: 3018348 - RNA, 20 nt, Human
acacuguuucaaacuuuacu

SEQ ID NO: 3018349 - RNA, 16 nt, Human
acacuuacacuuuaug

SEQ ID NO: 3018350 - RNA, 17 nt, Human
acacucauugaccugag

SEQ ID NO: 3018351 - RNA, 16 nt, Human
acacuguuucaaacuu

SEQ ID NO: 3018352 - RNA, 17 nt, Human
acacuguuucaaacuuu

SEQ ID NO: 3018353 - RNA, 18 nt, Human
acacuguuucaaacuuua

SEQ ID NO: 3018354 - RNA, 18 nt, Human
acacuuacacuuuaugca

SEQ ID NO: 3018355 - RNA, 21 nt, Human
acacuuacacuuuaugcacaa

SEQ ID NO: 3018356 - RNA, 18 nt, Human
acagacauacuaaccagc

SEQ ID NO: 3018357 - RNA, 19 nt, Human
acagacauacuaaccagca

SEQ ID NO: 3018358 - RNA, 14 nt, Human
uauccaaucuguga

SEQ ID NO: 3018359 - RNA, 19 nt, Human
uauccaacaucaacaucuu

SEQ ID NO: 3018360 - RNA, 23 nt, Human
uauccaauugcugcuuguacacu

SEQ ID NO: 3018361 - RNA, 15 nt, Human
uauccaauugcugcu

SEQ ID NO: 3018362 - RNA, 10 nt, Human
uaucagaauu

SEQ ID NO: 3018363 - RNA, 17 nt, Human
uaucagaauucucagaa

SEQ ID NO: 3018364 - RNA, 19 nt, Human
uaucacccagaagaaaaua

SEQ ID NO: 3018365 - RNA, 22 nt, Human
uaucacccagaagaaaauagug

SEQ ID NO: 3018366 - RNA, 18 nt, Human
uauauagcaagacauuau

SEQ ID NO: 3018367 - RNA, 16 nt, Human
uauauagcaguaaaaa

SEQ ID NO: 3018368 - RNA, 20 nt, Human
uauauagcaagacauuauau

SEQ ID NO: 3018369 - RNA, 15 nt, Human
uauauagcaguaaaa

SEQ ID NO: 3018370 - RNA, 23 nt, Human
uauaggaacuuaaauaaugugaa

SEQ ID NO: 3018371 - RNA, 18 nt, Human
uauagcaguaaaaaaugg

SEQ ID NO: 3018372 - RNA, 20 nt, Human
uauagauguugcuaacagca

SEQ ID NO: 3018373 - RNA, 15 nt, Human
uauagauguugcuaa

SEQ ID NO: 3018374 - RNA, 21 nt, Human
uauagauguugcuaacagcaa

SEQ ID NO: 3018375 - RNA, 10 nt, Human
uauagauguu

SEQ ID NO: 3018376 - RNA, 18 nt, Human
uauagccuaggugacaga

SEQ ID NO: 3018377 - RNA, 23 nt, Human
uauauagcaguaaaaaauggugu

SEQ ID NO: 3018378 - RNA, 16 nt, Human
acacucauugaccuga

SEQ ID NO: 3018379 - RNA, 18 nt, Human
uauaauuuaccugaaguc

SEQ ID NO: 3018380 - RNA, 21 nt, Human
uauacacuuacacuuuaugca

SEQ ID NO: 3018381 - RNA, 22 nt, Human
uauacacuuacacuuuaugcac

SEQ ID NO: 3018382 - RNA, 20 nt, Human
uagucacugagacagcccgg

SEQ ID NO: 3018383 - RNA, 17 nt, Human
uagucacugagacagcc

SEQ ID NO: 3018384 - RNA, 21 nt, Human
acacucaaaagcugggcaggu

SEQ ID NO: 3018385 - RNA, 22 nt, Human
acacuaaugaggaaacugcacu

SEQ ID NO: 3018386 - RNA, 15 nt, Human
acacuaaugaggaaa

SEQ ID NO: 3018387 - RNA, 17 nt, Human
uacauuagguugugaau

SEQ ID NO: 3018388 - RNA, 16 nt, Human
uacauuagguugugaa

SEQ ID NO: 3018389 - RNA, 12 nt, Human
uaccagcagagc

SEQ ID NO: 3018390 - RNA, 14 nt, Human
uaccagcagagcac

SEQ ID NO: 3018391 - RNA, 13 nt, Human
uaccagcagagca

SEQ ID NO: 3018392 - RNA, 22 nt, Human
uaccagcagagcaccuuagaca

SEQ ID NO: 3018393 - RNA, 18 nt, Human
uaccagccaguaaauggg

SEQ ID NO: 3018394 - RNA, 22 nt, Human
aauguucacugguacucugcca

SEQ ID NO: 3018395 - RNA, 21 nt, Human
aaugugcugaaugguuuucaa

SEQ ID NO: 3018396 - RNA, 12 nt, Human
aauuaacuuuua

SEQ ID NO: 3018397 - RNA, 13 nt, Human
aauuaacuuuuau

SEQ ID NO: 3018398 - RNA, 15 nt, Human
aauuaacuuuuauaa

SEQ ID NO: 3018399 - RNA, 16 nt, Human
aauuaaguacuaugua

SEQ ID NO: 3018400 - RNA, 17 nt, Human
aauuaaguacuauguau

SEQ ID NO: 3018401 - RNA, 16 nt, Human
uaccugccaggaagcc

SEQ ID NO: 3018402 - RNA, 16 nt, Human
uaccugaggggccucu

SEQ ID NO: 3018403 - RNA, 20 nt, Human
aauuacaggaaguacuggag

SEQ ID NO: 3018404 - RNA, 19 nt, Human
aauuacaggaaguacugga

SEQ ID NO: 3018405 - RNA, 17 nt, Human
aauuacaggaaguacug

SEQ ID NO: 3018406 - RNA, 23 nt, Human
uacccgggaagggggcugggaca

SEQ ID NO: 3018407 - RNA, 21 nt, Human
uaccucuugagccuugaacuu

SEQ ID NO: 3018408 - RNA, 22 nt, Human
uaccucuugagccuugaacuuu

SEQ ID NO: 3018409 - RNA, 23 nt, Human
uaccucuugagccuugaacuuug

SEQ ID NO: 3018410 - RNA, 16 nt, Human
uaccugaagucuuugu

SEQ ID NO: 3018411 - RNA, 15 nt, Human
uaccugaggggccuc

SEQ ID NO: 3018412 - RNA, 13 nt, Human
uaccugaggggcc

SEQ ID NO: 3018413 - RNA, 14 nt, Human
uaccugaagucuuu

SEQ ID NO: 3018414 - RNA, 13 nt, Human
uaccugaagucuu

SEQ ID NO: 3018415 - RNA, 22 nt, Human
aauucaguuguuagugugucuu

SEQ ID NO: 3018416 - RNA, 17 nt, Human
aauucaguuguuagugu

SEQ ID NO: 3018417 - RNA, 11 nt, Human
aauucaguugu

SEQ ID NO: 3018418 - RNA, 22 nt, Human
aauuauuuauuaaaugcccagc

SEQ ID NO: 3018419 - RNA, 21 nt, Human
aauuauuuauuaaaugcccag

SEQ ID NO: 3018420 - RNA, 20 nt, Human
aaugcuugcugcugauuuaa

SEQ ID NO: 3018421 - RNA, 18 nt, Human
aaugcuugcugcugauuu

SEQ ID NO: 3018422 - RNA, 23 nt, Human
aaugcuugcugcugauuuaaaca

SEQ ID NO: 3018423 - RNA, 22 nt, Human
aaugcuugcugcugauuuaaac

SEQ ID NO: 3018424 - RNA, 13 nt, Human
aauggaagacagc

SEQ ID NO: 3018425 - RNA, 21 nt, Human
aaugcuggcuguuggcugggg

SEQ ID NO: 3018426 - RNA, 22 nt, Human
aaugcuggcuguuggcuggggg

SEQ ID NO: 3018427 - RNA, 13 nt, Human
uacaaugcugugc

SEQ ID NO: 3018428 - RNA, 14 nt, Human
uacaaugcugugcc

SEQ ID NO: 3018429 - RNA, 16 nt, Human
uacaaugcugugcccu

SEQ ID NO: 3018430 - RNA, 18 nt, Human
uaauuuuuuugagacaga

SEQ ID NO: 3018431 - RNA, 13 nt, Human
uacagacaaagcg

SEQ ID NO: 3018432 - RNA, 15 nt, Human
uacagacaaagcgug

SEQ ID NO: 3018433 - RNA, 14 nt, Human
uacagacaaagcgu

SEQ ID NO: 3018434 - RNA, 22 nt, Human
uacagagcccacgcccccacug

SEQ ID NO: 3018435 - RNA, 19 nt, Human
uacagagcccacgccccca

SEQ ID NO: 3018436 - RNA, 23 nt, Human
uacagagcagacaguuaagagaa

SEQ ID NO: 3018437 - RNA, 14 nt, Human
aaugguuuucaaaa

SEQ ID NO: 3018438 - RNA, 16 nt, Human
aauggaagacagcucu

SEQ ID NO: 3018439 - RNA, 16 nt, Human
aaugguuuucuugugu

SEQ ID NO: 3018440 - RNA, 16 nt, Human
aaugguuuucaaaaua

SEQ ID NO: 3018441 - RNA, 20 nt, Human
aaugaccuuucaauaggaaa

SEQ ID NO: 3018442 - RNA, 21 nt, Human
aaugaccuuucaauaggaaaa

SEQ ID NO: 3018443 - RNA, 11 nt, Human
aaugagccugg

SEQ ID NO: 3018444 - RNA, 13 nt, Human
aaugagccuggca

SEQ ID NO: 3018445 - RNA, 12 nt, Human
aaugagccuggc

SEQ ID NO: 3018446 - RNA, 16 nt, Human
aaugaggucagagccu

SEQ ID NO: 3018447 - RNA, 18 nt, Human
aaugaggucagagccugc

SEQ ID NO: 3018448 - RNA, 13 nt, Human
aaugcaccuggaa

SEQ ID NO: 3018449 - RNA, 21 nt, Human
uaauuaugguuaguagaggua

SEQ ID NO: 3018450 - RNA, 12 nt, Human
aaugcaaaccau

SEQ ID NO: 3018451 - RNA, 11 nt, Human
aaugcaaacca

SEQ ID NO: 3018452 - RNA, 23 nt, Human
aauauuuugacuuguugagggua

SEQ ID NO: 3018453 - RNA, 19 nt, Human
aaucagccugcuccagcug

SEQ ID NO: 3018454 - RNA, 18 nt, Human
aaucagccugcuccagcu

SEQ ID NO: 3018455 - RNA, 13 nt, Human
aaucagccugcuc

SEQ ID NO: 3018456 - RNA, 11 nt, Human
aaucagccugc

SEQ ID NO: 3018457 - RNA, 18 nt, Human
uaaggaauaccugucccc

SEQ ID NO: 3018458 - RNA, 17 nt, Human
uaaggaauaccuguccc

SEQ ID NO: 3018459 - RNA, 9 nt, Human
uaaggaaua

SEQ ID NO: 3018460 - RNA, 13 nt, Human
uaaggaagacaau

SEQ ID NO: 3018461 - RNA, 14 nt, Human
uaagcuauucagua

SEQ ID NO: 3018462 - RNA, 21 nt, Human
uaagcuauucaguaauaacuc

SEQ ID NO: 3018463 - RNA, 14 nt, Human
uaagauucauauuu

SEQ ID NO: 3018464 - RNA, 14 nt, Human
uaauaaaaagguga

SEQ ID NO: 3018465 - RNA, 15 nt, Human
uaauaaaaaggugac

SEQ ID NO: 3018466 - RNA, 12 nt, Human
uaauaaaaaggu

SEQ ID NO: 3018467 - RNA, 21 nt, Human
uaaguauucuuauuuaaugaa

SEQ ID NO: 3018468 - RNA, 17 nt, Human
aaucccauuuaaaaaaa

SEQ ID NO: 3018469 - RNA, 16 nt, Human
uaacuaucacugguuu

SEQ ID NO: 3018470 - RNA, 21 nt, Human
uaacuaucacugguuugguuc

SEQ ID NO: 3018471 - RNA, 20 nt, Human
uaacuugucuuuggacccug

SEQ ID NO: 3018472 - RNA, 16 nt, Human
uaacuugucuuuggac

SEQ ID NO: 3018473 - RNA, 19 nt, Human
uaacauguaauuaaguacu

SEQ ID NO: 3018474 - RNA, 17 nt, Human
uaacauguaauuaagua

SEQ ID NO: 3018475 - RNA, 18 nt, Human
uaacaaaggauacuuauu

SEQ ID NO: 3018476 - RNA, 17 nt, Human
uaacaaaggauacuuau

SEQ ID NO: 3018477 - RNA, 16 nt, Human
uaacaaaggauacuua

SEQ ID NO: 3018478 - RNA, 15 nt, Human
uaacaaaggauacuu

SEQ ID NO: 3018479 - RNA, 21 nt, Human
uaaauuaacuuuuauaaacuu

SEQ ID NO: 3018480 - RNA, 20 nt, Human
uaacaaaggauacuuauuua

SEQ ID NO: 3018481 - RNA, 19 nt, Human
uaacaaaggauacuuauuu

SEQ ID NO: 3018482 - RNA, 21 nt, Human
uaacaaaggauacuuauuuaa

SEQ ID NO: 3018483 - RNA, 21 nt, Human
aauacaccacuacauucuguu

SEQ ID NO: 3018484 - RNA, 13 nt, Human
aauacagaggcaa

SEQ ID NO: 3018485 - RNA, 18 nt, Human
uaaaugaaaaucgugaca

SEQ ID NO: 3018486 - RNA, 18 nt, Human
aaguguauuuuuuuacua

SEQ ID NO: 3018487 - RNA, 21 nt, Human
aaguguauuuuuuuacuaaua

SEQ ID NO: 3018488 - RNA, 18 nt, Human
uaaauuaacuuuuauaaa

SEQ ID NO: 3018489 - RNA, 19 nt, Human
uaaauuaacuuuuauaaac

SEQ ID NO: 3018490 - RNA, 20 nt, Human
uaaauuaacuuuuauaaacu

SEQ ID NO: 3018491 - RNA, 21 nt, Human
aauagcaaggcugugcaucua

SEQ ID NO: 3018492 - RNA, 22 nt, Human
aauagcagcccucaauugugaa

SEQ ID NO: 3018493 - RNA, 23 nt, Human
aauagcagcccucaauugugaaa

SEQ ID NO: 3018494 - RNA, 20 nt, Human
aauagccugccucuucucua

SEQ ID NO: 3018495 - RNA, 19 nt, Human
aauaccugucccccugaca

SEQ ID NO: 3018496 - RNA, 18 nt, Human
aauaccugucccccugac

SEQ ID NO: 3018497 - RNA, 15 nt, Human
aauaccugucccccu

SEQ ID NO: 3018498 - RNA, 17 nt, Human
aauaccagccaguaaau

SEQ ID NO: 3018499 - RNA, 19 nt, Human
aauaccagccaguaaaugg

SEQ ID NO: 3018500 - RNA, 12 nt, Human
aauaccaaggaa

SEQ ID NO: 3018501 - RNA, 13 nt, Human
gugucauuucaaa

SEQ ID NO: 3018502 - RNA, 20 nt, Human
gugucagguggggcagcuug

SEQ ID NO: 3018503 - RNA, 22 nt, Human
gugugacaaggauugcuacugu

SEQ ID NO: 3018504 - RNA, 16 nt, Human
gugugguagagugugc

SEQ ID NO: 3018505 - RNA, 16 nt, Human
gugucagcauagaagu

SEQ ID NO: 3018506 - RNA, 20 nt, Human
gugucaagagggucugagga

SEQ ID NO: 3018507 - RNA, 17 nt, Human
guguauuuuuuuacuaa

SEQ ID NO: 3018508 - RNA, 23 nt, Human
guguauuuuuuuacuaauagaca

SEQ ID NO: 3018509 - RNA, 18 nt, Human
aagaugaaggucuguuuu

SEQ ID NO: 3018510 - RNA, 16 nt, Human
aagaugcuucucacug

SEQ ID NO: 3018511 - RNA, 17 nt, Human
aagaugcuucucacugc

SEQ ID NO: 3018512 - RNA, 19 nt, Human
aagaugcuucucacugcca

SEQ ID NO: 3018513 - RNA, 13 nt, Human
aagaguaggaaga

SEQ ID NO: 3018514 - RNA, 22 nt, Human
guggggucacucuggcagcuca

SEQ ID NO: 3018515 - RNA, 21 nt, Human
guggggucacucuggcagcuc

SEQ ID NO: 3018516 - RNA, 20 nt, Human
guggggucacucuggcagcu

SEQ ID NO: 3018517 - RNA, 17 nt, Human
guggggucacucuggca

SEQ ID NO: 3018518 - RNA, 12 nt, Human
aagaguaggaag

SEQ ID NO: 3018519 - RNA, 23 nt, Human
aagagggagggagggcuccagac

SEQ ID NO: 3018520 - RNA, 15 nt, Human
gugggagcugccugu

SEQ ID NO: 3018521 - RNA, 18 nt, Human
gugggagcugccuguuca

SEQ ID NO: 3018522 - RNA, 15 nt, Human
guggggucacucugg

SEQ ID NO: 3018523 - RNA, 14 nt, Human
gugggagcugccug

SEQ ID NO: 3018524 - RNA, 15 nt, Human
gugggacacccugug

SEQ ID NO: 3018525 - RNA, 13 nt, Human
gugggacacccug

SEQ ID NO: 3018526 - RNA, 22 nt, Human
guggccucccaacucaccccag

SEQ ID NO: 3018527 - RNA, 21 nt, Human
guggccucccaacucacccca

SEQ ID NO: 3018528 - RNA, 13 nt, Human
aagacgcugugcu

SEQ ID NO: 3018529 - RNA, 19 nt, Human
aagacgcugugcugcccug

SEQ ID NO: 3018530 - RNA, 18 nt, Human
aagacgcugugcugcccu

SEQ ID NO: 3018531 - RNA, 17 nt, Human
aagacgcugugcugccc

SEQ ID NO: 3018532 - RNA, 15 nt, Human
aagacgcugugcugc

SEQ ID NO: 3018533 - RNA, 19 nt, Human
aagaccuucuccuucaccu

SEQ ID NO: 3018534 - RNA, 18 nt, Human
aagaccuucuccuucacc

SEQ ID NO: 3018535 - RNA, 15 nt, Human
aagaccuucuccuuc

SEQ ID NO: 3018536 - RNA, 16 nt, Human
aagacuuuggaaagac

SEQ ID NO: 3018537 - RNA, 23 nt, Human
aagacugaguacguugugcauuu

SEQ ID NO: 3018538 - RNA, 22 nt, Human
aagacugaguacguugugcauu

SEQ ID NO: 3018539 - RNA, 18 nt, Human
guuauugaagcagagugg

SEQ ID NO: 3018540 - RNA, 17 nt, Human
guuauugaagcagagug

SEQ ID NO: 3018541 - RNA, 16 nt, Human
guuauugaagcagagu

SEQ ID NO: 3018542 - RNA, 23 nt, Human
guuauuuuuauuuauuuaaauuu

SEQ ID NO: 3018543 - RNA, 18 nt, Human
guucaagcgauucuucug

SEQ ID NO: 3018544 - RNA, 20 nt, Human
guucaaagauauuuugcuuu

SEQ ID NO: 3018545 - RNA, 21 nt, Human
guucaaagauauuuugcuuug

SEQ ID NO: 3018546 - RNA, 22 nt, Human
guucaaagauauuuugcuuugu

SEQ ID NO: 3018547 - RNA, 18 nt, Human
guuaagagaaaugagcuu

SEQ ID NO: 3018548 - RNA, 12 nt, Human
guuaagagaaau

SEQ ID NO: 3018549 - RNA, 11 nt, Human
guuaagagaaa

SEQ ID NO: 3018550 - RNA, 20 nt, Human
guuaggcauugugggaaggg

SEQ ID NO: 3018551 - RNA, 19 nt, Human
guuaggcauugugggaagg

SEQ ID NO: 3018552 - RNA, 13 nt, Human
guucagcuccagc

SEQ ID NO: 3018553 - RNA, 20 nt, Human
aagccugaguuugcuuucaa

SEQ ID NO: 3018554 - RNA, 22 nt, Human
aagcuagacgagcaggcuucuu

SEQ ID NO: 3018555 - RNA, 12 nt, Human
aagcuaggccug

SEQ ID NO: 3018556 - RNA, 17 nt, Human
aagcucagggccuggcu

SEQ ID NO: 3018557 - RNA, 16 nt, Human
aagcucagggccuggc

SEQ ID NO: 3018558 - RNA, 13 nt, Human
aagcucagggccu

SEQ ID NO: 3018559 - RNA, 12 nt, Human
aagcucagggcc

SEQ ID NO: 3018560 - RNA, 20 nt, Human
aagcucagggccuggcucag

SEQ ID NO: 3018561 - RNA, 19 nt, Human
aagcucagggccuggcuca

SEQ ID NO: 3018562 - RNA, 18 nt, Human
aagcucagggccuggcuc

SEQ ID NO: 3018563 - RNA, 18 nt, Human
aagcuccaagcucccagg

SEQ ID NO: 3018564 - RNA, 17 nt, Human
aagcuccaagcucccag

SEQ ID NO: 3018565 - RNA, 16 nt, Human
aagcauuuacuuugug

SEQ ID NO: 3018566 - RNA, 12 nt, Human
aagcagugcaug

SEQ ID NO: 3018567 - RNA, 21 nt, Human
gugugugcgccuacaggagug

SEQ ID NO: 3018568 - RNA, 15 nt, Human
aagcagugcaugcug

SEQ ID NO: 3018569 - RNA, 14 nt, Human
aagcagugcaugcu

SEQ ID NO: 3018570 - RNA, 20 nt, Human
aagcagugcaugcugucccu

SEQ ID NO: 3018571 - RNA, 20 nt, Human
aagccaaagcuaggccuggc

SEQ ID NO: 3018572 - RNA, 22 nt, Human
aagccaaagcuaggccuggcca

SEQ ID NO: 3018573 - RNA, 17 nt, Human
aagcccaggaaaggcuc

SEQ ID NO: 3018574 - RNA, 14 nt, Human
aagcccaggaaagg

SEQ ID NO: 3018575 - RNA, 22 nt, Human
aagcccaggaaaggcuccagga

SEQ ID NO: 3018576 - RNA, 19 nt, Human
aagcccaggaaaggcucca

SEQ ID NO: 3018577 - RNA, 19 nt, Human
aagcccugagcuuucugcu

SEQ ID NO: 3018578 - RNA, 20 nt, Human
aagccgcuggggccaguugg

SEQ ID NO: 3018579 - RNA, 13 nt, Human
aagucuucuauuu

SEQ ID NO: 3018580 - RNA, 17 nt, Human
aagucuucuauuuauuu

SEQ ID NO: 3018581 - RNA, 14 nt, Human
aagugagagcuggg

SEQ ID NO: 3018582 - RNA, 12 nt, Human
aagugagagagg

SEQ ID NO: 3018583 - RNA, 21 nt, Human
aagugaaaaaggaggaagaga

SEQ ID NO: 3018584 - RNA, 17 nt, Human
aagugaagacaaugacu

SEQ ID NO: 3018585 - RNA, 19 nt, Human
aagugaagacaaugacuua

SEQ ID NO: 3018586 - RNA, 14 nt, Human
guuucugccgcagc

SEQ ID NO: 3018587 - RNA, 15 nt, Human
guuucugccgcagcc

SEQ ID NO: 3018588 - RNA, 16 nt, Human
guuuugccauguuggc

SEQ ID NO: 3018589 - RNA, 20 nt, Human
guuuugccauguuggccagg

SEQ ID NO: 3018590 - RNA, 21 nt, Human
guuuugccauguuggccaggc

SEQ ID NO: 3018591 - RNA, 22 nt, Human
guuuugccauguuggccaggcu

SEQ ID NO: 3018592 - RNA, 13 nt, Human
aaguacacuguuu

SEQ ID NO: 3018593 - RNA, 18 nt, Human
aaguacacuguuucaaac

SEQ ID NO: 3018594 - RNA, 23 nt, Human
aaguacacuguuucaaacuuuac

SEQ ID NO: 3018595 - RNA, 19 nt, Human
aaguacacuguuucaaacu

SEQ ID NO: 3018596 - RNA, 20 nt, Human
aaguacacuguuucaaacuu

SEQ ID NO: 3018597 - RNA, 15 nt, Human
aagugagagcugggu

SEQ ID NO: 3018598 - RNA, 16 nt, Human
aagugaggaugaaaaa

SEQ ID NO: 3018599 - RNA, 19 nt, Human
aagugauucuccugccuca

SEQ ID NO: 3018600 - RNA, 15 nt, Human
aagugauucuccugc

SEQ ID NO: 3018601 - RNA, 16 nt, Human
aagugauucuccugcc

SEQ ID NO: 3018602 - RNA, 17 nt, Human
aagugauucuccugccu

SEQ ID NO: 3018603 - RNA, 18 nt, Human
aagugauucuccugccuc

SEQ ID NO: 3018604 - RNA, 21 nt, Human
uaaaauaccagccaguaaaug

SEQ ID NO: 3018605 - RNA, 22 nt, Human
uaaaauaccagccaguaaaugg

SEQ ID NO: 3018606 - RNA, 15 nt, Human
uaaaaaucucaaauu

SEQ ID NO: 3018607 - RNA, 16 nt, Human
uaaaaaucucaaauuu

SEQ ID NO: 3018608 - RNA, 17 nt, Human
uaaaaaucucaaauuuc

SEQ ID NO: 3018609 - RNA, 15 nt, Human
guuuuucuucucccu

SEQ ID NO: 3018610 - RNA, 15 nt, Human
uaaaaaguggaaaaa

SEQ ID NO: 3018611 - RNA, 19 nt, Human
uaaaaaucucaaauuucua

SEQ ID NO: 3018612 - RNA, 20 nt, Human
uaaaaaucucaaauuucuaa

SEQ ID NO: 3018613 - RNA, 21 nt, Human
uaaaaaucucaaauuucuaaa

SEQ ID NO: 3018614 - RNA, 20 nt, Human
uaaaacuugauguguuaucu

SEQ ID NO: 3018615 - RNA, 22 nt, Human
uaaaacuugauguguuaucucu

SEQ ID NO: 3018616 - RNA, 23 nt, Human
guugcccaggcaggucuugaacu

SEQ ID NO: 3018617 - RNA, 12 nt, Human
guugcccaggcu

SEQ ID NO: 3018618 - RNA, 13 nt, Human
guugcccaggcug

SEQ ID NO: 3018619 - RNA, 19 nt, Human
guugcccaggcaggucuug

SEQ ID NO: 3018620 - RNA, 13 nt, Human
aaggauacuuauu

SEQ ID NO: 3018621 - RNA, 16 nt, Human
aaggauacuuauuuaa

SEQ ID NO: 3018622 - RNA, 13 nt, Human
aaggauacaaaag

SEQ ID NO: 3018623 - RNA, 21 nt, Human
aaggauacaaaagcaugugag

SEQ ID NO: 3018624 - RNA, 20 nt, Human
aaggaggggauagagagaga

SEQ ID NO: 3018625 - RNA, 18 nt, Human
aaggaggaagagaaaaaa

SEQ ID NO: 3018626 - RNA, 18 nt, Human
aaggaauaccuguccccc

SEQ ID NO: 3018627 - RNA, 11 nt, Human
aaggagagcua

SEQ ID NO: 3018628 - RNA, 14 nt, Human
aaggagauuuacaa

SEQ ID NO: 3018629 - RNA, 15 nt, Human
aaggaaagagggagg

SEQ ID NO: 3018630 - RNA, 16 nt, Human
aaggaagcacaugccu

SEQ ID NO: 3018631 - RNA, 17 nt, Human
aaggaauaccugucccc

SEQ ID NO: 3018632 - RNA, 14 nt, Human
aaggaagacuucau

SEQ ID NO: 3018633 - RNA, 13 nt, Human
aaggaagcacaug

SEQ ID NO: 3018634 - RNA, 15 nt, Human
aaggaagacuucauc

SEQ ID NO: 3018635 - RNA, 12 nt, Human
guuuaaugguag

SEQ ID NO: 3018636 - RNA, 17 nt, Human
guuuaaugguaguuuua

SEQ ID NO: 3018637 - RNA, 13 nt, Human
guuuauugucaaa

SEQ ID NO: 3018638 - RNA, 13 nt, Human
guugggcuggugu

SEQ ID NO: 3018639 - RNA, 17 nt, Human
guugggccaggagccuc

SEQ ID NO: 3018640 - RNA, 15 nt, Human
guugggccaggagcc

SEQ ID NO: 3018641 - RNA, 22 nt, Human
guuuauuuggaaaggaaugcaa

SEQ ID NO: 3018642 - RNA, 13 nt, Human
guuucaaacuuua

SEQ ID NO: 3018643 - RNA, 14 nt, Human
guuucaaacuuuac

SEQ ID NO: 3018644 - RNA, 16 nt, Human
guuucaaacuuuacua

SEQ ID NO: 3018645 - RNA, 15 nt, Human
aaggcuccaggagca

SEQ ID NO: 3018646 - RNA, 18 nt, Human
aaggcuccaggagcagcc

SEQ ID NO: 3018647 - RNA, 16 nt, Human
aaggcuccaggagcag

SEQ ID NO: 3018648 - RNA, 22 nt, Human
aaggcucgagcaugccuggaug

SEQ ID NO: 3018649 - RNA, 20 nt, Human
aaggcucgagcaugccugga

SEQ ID NO: 3018650 - RNA, 19 nt, Human
aaggcucgagcaugccugg

SEQ ID NO: 3018651 - RNA, 18 nt, Human
aaggcucgagcaugccug

SEQ ID NO: 3018652 - RNA, 16 nt, Human
aaggcucgagcaugcc

SEQ ID NO: 3018653 - RNA, 22 nt, Human
aaggcuccaggagcagccacau

SEQ ID NO: 3018654 - RNA, 19 nt, Human
aaggcuccaggagcagcca

SEQ ID NO: 3018655 - RNA, 19 nt, Human
guuucuauguguagggcgg

SEQ ID NO: 3018656 - RNA, 18 nt, Human
guuucugaaagggacgcu

SEQ ID NO: 3018657 - RNA, 12 nt, Human
aaggucauuuuu

SEQ ID NO: 3018658 - RNA, 22 nt, Human
guuucuaugacacaugcaaggu

SEQ ID NO: 3018659 - RNA, 22 nt, Human
aaggggcccaaauucuuucagu

SEQ ID NO: 3018660 - RNA, 17 nt, Human
aaggggcaguggugguu

SEQ ID NO: 3018661 - RNA, 20 nt, Human
aagguagaaauaucugaaaa

SEQ ID NO: 3018662 - RNA, 18 nt, Human
aaaugguguuuuaucuuc

SEQ ID NO: 3018663 - RNA, 17 nt, Human
aaaugguguuuuaucuu

SEQ ID NO: 3018664 - RNA, 20 nt, Human
guaacaggaaaauuuuaaaa

SEQ ID NO: 3018665 - RNA, 19 nt, Human
aaaugggggugcauuugag

SEQ ID NO: 3018666 - RNA, 12 nt, Human
guaacaggcaga

SEQ ID NO: 3018667 - RNA, 22 nt, Human
guaacaggaaaauuuuaaaaau

SEQ ID NO: 3018668 - RNA, 19 nt, Human
guaucccaugagccucagc

SEQ ID NO: 3018669 - RNA, 22 nt, Human
guaucaggugcugccauccagg

SEQ ID NO: 3018670 - RNA, 15 nt, Human
guaugguggcugggu

SEQ ID NO: 3018671 - RNA, 16 nt, Human
guaugguggcuggguu

SEQ ID NO: 3018672 - RNA, 14 nt, Human
guaugguggcuggg

SEQ ID NO: 3018673 - RNA, 13 nt, Human
guaugguggcugg

SEQ ID NO: 3018674 - RNA, 16 nt, Human
guaucaggugcugcca

SEQ ID NO: 3018675 - RNA, 18 nt, Human
guaucaggugcugccauc

SEQ ID NO: 3018676 - RNA, 19 nt, Human
aaaugucuaguuguaacac

SEQ ID NO: 3018677 - RNA, 22 nt, Human
guauuuuguuuuugucuuaaaa

SEQ ID NO: 3018678 - RNA, 12 nt, Human
aaauuuguggaa

SEQ ID NO: 3018679 - RNA, 18 nt, Human
aaauuuguuauaaugaau

SEQ ID NO: 3018680 - RNA, 16 nt, Human
gucaguuguuauuuau

SEQ ID NO: 3018681 - RNA, 15 nt, Human
gucagugugacugau

SEQ ID NO: 3018682 - RNA, 17 nt, Human
gucaguuguuauuuauu

SEQ ID NO: 3018683 - RNA, 18 nt, Human
gucaguuguuauuuauug

SEQ ID NO: 3018684 - RNA, 21 nt, Human
gucaguuguuauuuauugaaa

SEQ ID NO: 3018685 - RNA, 22 nt, Human
gucacacaguauuacuucugcu

SEQ ID NO: 3018686 - RNA, 21 nt, Human
gucacacaguauuacuucugc

SEQ ID NO: 3018687 - RNA, 23 nt, Human
gucagaaguuucugccgcagccc

SEQ ID NO: 3018688 - RNA, 21 nt, Human
aacacaaagcuuuugcauauu

SEQ ID NO: 3018689 - RNA, 21 nt, Human
aacaaggcaaggcugucaauu

SEQ ID NO: 3018690 - RNA, 18 nt, Human
aacaaggcaaggcuguca

SEQ ID NO: 3018691 - RNA, 18 nt, Human
aaauuuugauguuuuaag

SEQ ID NO: 3018692 - RNA, 23 nt, Human
aaauuuugauguuuuaaggaugc

SEQ ID NO: 3018693 - RNA, 20 nt, Human
aacaagaccacguuucuaaa

SEQ ID NO: 3018694 - RNA, 16 nt, Human
aacaaggcaaggcugu

SEQ ID NO: 3018695 - RNA, 15 nt, Human
aacaaggcaaggcug

SEQ ID NO: 3018696 - RNA, 18 nt, Human
gucccccugacaacacuc

SEQ ID NO: 3018697 - RNA, 14 nt, Human
gucccccuuccaug

SEQ ID NO: 3018698 - RNA, 18 nt, Human
gucccccuuccauggacu

SEQ ID NO: 3018699 - RNA, 16 nt, Human
gucccccuuccaugga

SEQ ID NO: 3018700 - RNA, 16 nt, Human
guccuacccacccucc

SEQ ID NO: 3018701 - RNA, 15 nt, Human
guccuacccacccuc

SEQ ID NO: 3018702 - RNA, 12 nt, Human
guccuacucugu

SEQ ID NO: 3018703 - RNA, 14 nt, Human
aacagaaauguaca

SEQ ID NO: 3018704 - RNA, 12 nt, Human
aacagaaaugua

SEQ ID NO: 3018705 - RNA, 13 nt, Human
aacagaaauguac

SEQ ID NO: 3018706 - RNA, 11 nt, Human
aacagaaaugu

SEQ ID NO: 3018707 - RNA, 18 nt, Human
aacaggcuuagugaugua

SEQ ID NO: 3018708 - RNA, 14 nt, Human
guccauagagagca

SEQ ID NO: 3018709 - RNA, 13 nt, Human
guccauagagagc

SEQ ID NO: 3018710 - RNA, 21 nt, Human
gucccaccccacacacgccag

SEQ ID NO: 3018711 - RNA, 20 nt, Human
gucccaccccacacacgcca

SEQ ID NO: 3018712 - RNA, 14 nt, Human
gucccaccuuggcu

SEQ ID NO: 3018713 - RNA, 15 nt, Human
gucccaccuuggcug

SEQ ID NO: 3018714 - RNA, 16 nt, Human
gucccaccuuggcugc

SEQ ID NO: 3018715 - RNA, 13 nt, Human
guccaagaagccc

SEQ ID NO: 3018716 - RNA, 16 nt, Human
guccaagaagcccagg

SEQ ID NO: 3018717 - RNA, 15 nt, Human
guccaagaagcccag

SEQ ID NO: 3018718 - RNA, 20 nt, Human
guccaagaagcccaggaaag

SEQ ID NO: 3018719 - RNA, 18 nt, Human
guccaagaagcccaggaa

SEQ ID NO: 3018720 - RNA, 17 nt, Human
guccaagaagcccagga

SEQ ID NO: 3018721 - RNA, 19 nt, Human
gucauuuuuuuuaagaaaa

SEQ ID NO: 3018722 - RNA, 21 nt, Human
gucauuuuuuuuaagaaaaag

SEQ ID NO: 3018723 - RNA, 22 nt, Human
aacucugagugcaaacuucaga

SEQ ID NO: 3018724 - RNA, 20 nt, Human
aacucugagugcaaacuuca

SEQ ID NO: 3018725 - RNA, 21 nt, Human
aacucuucaaucucuugcacu

SEQ ID NO: 3018726 - RNA, 18 nt, Human
aacucugagugcaaacuu

SEQ ID NO: 3018727 - RNA, 19 nt, Human
aacucugagugcaaacuuc

SEQ ID NO: 3018728 - RNA, 15 nt, Human
gugagucgaggacag

SEQ ID NO: 3018729 - RNA, 22 nt, Human
gugagucgaggacagggaggug

SEQ ID NO: 3018730 - RNA, 19 nt, Human
gugaacuugggccacugug

SEQ ID NO: 3018731 - RNA, 17 nt, Human
gugaacuugggccacug

SEQ ID NO: 3018732 - RNA, 22 nt, Human
gugaggccagagacacaagccu

SEQ ID NO: 3018733 - RNA, 17 nt, Human
gugaggccagagacaca

SEQ ID NO: 3018734 - RNA, 20 nt, Human
aacugggaugaggugacuau

SEQ ID NO: 3018735 - RNA, 16 nt, Human
aacuggguacuugugg

SEQ ID NO: 3018736 - RNA, 21 nt, Human
aacuggguacuuguggacaca

SEQ ID NO: 3018737 - RNA, 21 nt, Human
aacugggggagggugaaguga

SEQ ID NO: 3018738 - RNA, 22 nt, Human
aacugggggagggugaagugaa

SEQ ID NO: 3018739 - RNA, 16 nt, Human
aacuggauuaaacuua

SEQ ID NO: 3018740 - RNA, 11 nt, Human
aacuggcugca

SEQ ID NO: 3018741 - RNA, 15 nt, Human
aacuggauuaaacuu

SEQ ID NO: 3018742 - RNA, 23 nt, Human
aacugcugacuguuuucucuuga

SEQ ID NO: 3018743 - RNA, 21 nt, Human
aacugcugacuguuuucucuu

SEQ ID NO: 3018744 - RNA, 20 nt, Human
aacugcugacuguuuucucu

SEQ ID NO: 3018745 - RNA, 15 nt, Human
aacugcugacuguuu

SEQ ID NO: 3018746 - RNA, 16 nt, Human
gugaugagaggaaauc

SEQ ID NO: 3018747 - RNA, 14 nt, Human
gugaugagaggaaa

SEQ ID NO: 3018748 - RNA, 22 nt, Human
gugaugcgcaugucacggaggg

SEQ ID NO: 3018749 - RNA, 18 nt, Human
gugauggggcccugccuc

SEQ ID NO: 3018750 - RNA, 17 nt, Human
gugauggggcccugccu

SEQ ID NO: 3018751 - RNA, 16 nt, Human
gugauggggcccugcc

SEQ ID NO: 3018752 - RNA, 14 nt, Human
gugauggggcccug

SEQ ID NO: 3018753 - RNA, 13 nt, Human
aacuuccaauuua

SEQ ID NO: 3018754 - RNA, 23 nt, Human
gugcauuaucuagauacuguauc

SEQ ID NO: 3018755 - RNA, 19 nt, Human
gugcauguguguucaugca

SEQ ID NO: 3018756 - RNA, 15 nt, Human
gugcauuaucuagau

SEQ ID NO: 3018757 - RNA, 19 nt, Human
gugcauuaucuagauacug

SEQ ID NO: 3018758 - RNA, 19 nt, Human
gugauggggcccugccucc

SEQ ID NO: 3018759 - RNA, 22 nt, Human
gugcaaugaccuuucaauagga

SEQ ID NO: 3018760 - RNA, 21 nt, Human
gugcacacaccagagcccacc

SEQ ID NO: 3018761 - RNA, 22 nt, Human
gugcaugcugucccuuacguga

SEQ ID NO: 3018762 - RNA, 17 nt, Human
gucuucuauuuauuuau

SEQ ID NO: 3018763 - RNA, 12 nt, Human
gucuucuauuua

SEQ ID NO: 3018764 - RNA, 14 nt, Human
gucuucuauuuauu

SEQ ID NO: 3018765 - RNA, 18 nt, Human
gucuuuggacccugaggc

SEQ ID NO: 3018766 - RNA, 14 nt, Human
gucuggcccuuccu

SEQ ID NO: 3018767 - RNA, 12 nt, Human
aacucauuucua

SEQ ID NO: 3018768 - RNA, 12 nt, Human
aacuccuggccu

SEQ ID NO: 3018769 - RNA, 22 nt, Human
gugaaccaccacacccagccca

SEQ ID NO: 3018770 - RNA, 23 nt, Human
gugaaccaccacacccagcccac

SEQ ID NO: 3018771 - RNA, 16 nt, Human
aacucuccucugcugc

SEQ ID NO: 3018772 - RNA, 18 nt, Human
aacucuccuccagaguca

SEQ ID NO: 3018773 - RNA, 15 nt, Human
aacucuccuccagag

SEQ ID NO: 3018774 - RNA, 20 nt, Human
aacuacauuagguugugaau

SEQ ID NO: 3018775 - RNA, 15 nt, Human
aaccaagucaaguga

SEQ ID NO: 3018776 - RNA, 19 nt, Human
aaccaccacacccagccca

SEQ ID NO: 3018777 - RNA, 12 nt, Human
aaccaucauuga

SEQ ID NO: 3018778 - RNA, 21 nt, Human
aaccaccacacccagcccacu

SEQ ID NO: 3018779 - RNA, 18 nt, Human
aaccaucauugaaaucuu

SEQ ID NO: 3018780 - RNA, 17 nt, Human
aaccaucauugaaaucu

SEQ ID NO: 3018781 - RNA, 10 nt, Human
aacccagcuc

SEQ ID NO: 3018782 - RNA, 21 nt, Human
caguaaaaaaugguguuuuau

SEQ ID NO: 3018783 - RNA, 18 nt, Human
caguaaaugggggugcau

SEQ ID NO: 3018784 - RNA, 19 nt, Human
caguauuacuucugcuaca

SEQ ID NO: 3018785 - RNA, 19 nt, Human
caguaaaugggggugcauu

SEQ ID NO: 3018786 - RNA, 14 nt, Human
cagucaccccggcc

SEQ ID NO: 3018787 - RNA, 17 nt, Human
cagucaccccggccacc

SEQ ID NO: 3018788 - RNA, 16 nt, Human
cagucaccccggccac

SEQ ID NO: 3018789 - RNA, 20 nt, Human
caguaaaaaaugguguuuua

SEQ ID NO: 3018790 - RNA, 23 nt, Human
cagguuuuuggucugacccacug

SEQ ID NO: 3018791 - RNA, 13 nt, Human
caggugcugccau

SEQ ID NO: 3018792 - RNA, 14 nt, Human
caggugcugccauc

SEQ ID NO: 3018793 - RNA, 14 nt, Human
caggguuggccccu

SEQ ID NO: 3018794 - RNA, 17 nt, Human
caggguuggccccugcc

SEQ ID NO: 3018795 - RNA, 21 nt, Human
caggguuggccccugcccggc

SEQ ID NO: 3018796 - RNA, 15 nt, Human
caggguuggccccug

SEQ ID NO: 3018797 - RNA, 16 nt, Human
caggguuggccccugc

SEQ ID NO: 3018798 - RNA, 21 nt, Human
cagggucucuaccauccccug

SEQ ID NO: 3018799 - RNA, 22 nt, Human
cagggucucacucugucgccca

SEQ ID NO: 3018800 - RNA, 23 nt, Human
cagggucucacucugucgcccag

SEQ ID NO: 3018801 - RNA, 15 nt, Human
caggcuggcgugcag

SEQ ID NO: 3018802 - RNA, 19 nt, Human
caggcugggagagccuucc

SEQ ID NO: 3018803 - RNA, 18 nt, Human
caggcugggagagccuuc

SEQ ID NO: 3018804 - RNA, 16 nt, Human
caggcugggagagccu

SEQ ID NO: 3018805 - RNA, 17 nt, Human
caggcuggcgugcagug

SEQ ID NO: 3018806 - RNA, 23 nt, Human
caggccugggggcugggcagagg

SEQ ID NO: 3018807 - RNA, 18 nt, Human
caggcuggcgugcagugg

SEQ ID NO: 3018808 - RNA, 19 nt, Human
caggcuggcgugcaguggu

SEQ ID NO: 3018809 - RNA, 22 nt, Human
caggccugggggcugggcagag

SEQ ID NO: 3018810 - RNA, 20 nt, Human
caggccugggggcugggcag

SEQ ID NO: 3018811 - RNA, 12 nt, Human
cagggcucagcg

SEQ ID NO: 3018812 - RNA, 15 nt, Human
cagggcucagcgggg

SEQ ID NO: 3018813 - RNA, 16 nt, Human
cagggagggcuucugc

SEQ ID NO: 3018814 - RNA, 14 nt, Human
caggcugggcuuca

SEQ ID NO: 3018815 - RNA, 23 nt, Human
caggaaaggcuccaggagcagcc

SEQ ID NO: 3018816 - RNA, 22 nt, Human
caggaaaggcuccaggagcagc

SEQ ID NO: 3018817 - RNA, 21 nt, Human
caggaaaggcuccaggagcag

SEQ ID NO: 3018818 - RNA, 19 nt, Human
caggaaaagcugcugacag

SEQ ID NO: 3018819 - RNA, 20 nt, Human
caggaaaagcugcugacagu

SEQ ID NO: 3018820 - RNA, 15 nt, Human
cagcuguucagcugg

SEQ ID NO: 3018821 - RNA, 16 nt, Human
cagcuguucagcuggu

SEQ ID NO: 3018822 - RNA, 15 nt, Human
caggccagcugcuug

SEQ ID NO: 3018823 - RNA, 13 nt, Human
caggccagcugcu

SEQ ID NO: 3018824 - RNA, 17 nt, Human
caggcaaugcuggcugu

SEQ ID NO: 3018825 - RNA, 21 nt, Human
caggcaaugcuggcuguuggc

SEQ ID NO: 3018826 - RNA, 19 nt, Human
caggcaaugcuggcuguug

SEQ ID NO: 3018827 - RNA, 20 nt, Human
caggcaaugcuggcuguugg

SEQ ID NO: 3018828 - RNA, 13 nt, Human
caggaggccagcc

SEQ ID NO: 3018829 - RNA, 12 nt, Human
caggaggccagc

SEQ ID NO: 3018830 - RNA, 16 nt, Human
caggccaggcccucug

SEQ ID NO: 3018831 - RNA, 15 nt, Human
caggccaggcccucu

SEQ ID NO: 3018832 - RNA, 14 nt, Human
caggccaggcccuc

SEQ ID NO: 3018833 - RNA, 13 nt, Human
caggccaggcccu

SEQ ID NO: 3018834 - RNA, 13 nt, Human
caggaccucaggu

SEQ ID NO: 3018835 - RNA, 13 nt, Human
caggaccagggau

SEQ ID NO: 3018836 - RNA, 23 nt, Human
cagauacaggaaaagcugcugac

SEQ ID NO: 3018837 - RNA, 22 nt, Human
cagagacuccugcaggcagcca

SEQ ID NO: 3018838 - RNA, 21 nt, Human
cagagacuccugcaggcagcc

SEQ ID NO: 3018839 - RNA, 20 nt, Human
cagagacuccugcaggcagc

SEQ ID NO: 3018840 - RNA, 13 nt, Human
cagagaggguggg

SEQ ID NO: 3018841 - RNA, 16 nt, Human
cagagagggugggagu

SEQ ID NO: 3018842 - RNA, 14 nt, Human
cagagccugcaguu

SEQ ID NO: 3018843 - RNA, 22 nt, Human
cagagagggugggagugggccc

SEQ ID NO: 3018844 - RNA, 20 nt, Human
cagagagggugggagugggc

SEQ ID NO: 3018845 - RNA, 22 nt, Human
cagagcuacacaggggaaaaga

SEQ ID NO: 3018846 - RNA, 17 nt, Human
cagagcuacacagggga

SEQ ID NO: 3018847 - RNA, 21 nt, Human
cagauugcaacaggcugggcu

SEQ ID NO: 3018848 - RNA, 13 nt, Human
cagauuucacucu

SEQ ID NO: 3018849 - RNA, 18 nt, Human
cagauuucacucuccuug

SEQ ID NO: 3018850 - RNA, 19 nt, Human
cagauuugaacucuucaau

SEQ ID NO: 3018851 - RNA, 16 nt, Human
cagauuucacucuccu

SEQ ID NO: 3018852 - RNA, 15 nt, Human
cagauuucacucucc

SEQ ID NO: 3018853 - RNA, 18 nt, Human
cagcauauucaggaagcu

SEQ ID NO: 3018854 - RNA, 17 nt, Human
cagcauauucaggaagc

SEQ ID NO: 3018855 - RNA, 16 nt, Human
cagcauauucaggaag

SEQ ID NO: 3018856 - RNA, 17 nt, Human
cagcauagaaguaacuu

SEQ ID NO: 3018857 - RNA, 23 nt, Human
cagccccauucugccugcccagg

SEQ ID NO: 3018858 - RNA, 24 nt, Human
cagccccauucugccugcccaggc

SEQ ID NO: 3018859 - RNA, 19 nt, Human
cagccccauucugccugcc

SEQ ID NO: 3018860 - RNA, 20 nt, Human
cagccccauucugccugccc

SEQ ID NO: 3018861 - RNA, 22 nt, Human
cagccccauucugccugcccag

SEQ ID NO: 3018862 - RNA, 16 nt, Human
cagcguuucuaugaca

SEQ ID NO: 3018863 - RNA, 14 nt, Human
cagcguuucuauga

SEQ ID NO: 3018864 - RNA, 23 nt, Human
cagccgccaugcuccuggcccac

SEQ ID NO: 3018865 - RNA, 13 nt, Human
cagcccuuagcag

SEQ ID NO: 3018866 - RNA, 14 nt, Human
cauuucaagaaguc

SEQ ID NO: 3018867 - RNA, 16 nt, Human
cauuuauucugcucac

SEQ ID NO: 3018868 - RNA, 15 nt, Human
cauuuauucugcuca

SEQ ID NO: 3018869 - RNA, 21 nt, Human
cauuuggugguuucagaaaug

SEQ ID NO: 3018870 - RNA, 22 nt, Human
cauuuggugguuucagaaaugu

SEQ ID NO: 3018871 - RNA, 23 nt, Human
cauuuggugguuucagaaaugug

SEQ ID NO: 3018872 - RNA, 23 nt, Human
cauuuuucuuagggaaggauaca

SEQ ID NO: 3018873 - RNA, 17 nt, Human
ccaaaacucuccucugc

SEQ ID NO: 3018874 - RNA, 17 nt, Human
ccaaaaaaugcuugcuu

SEQ ID NO: 3018875 - RNA, 18 nt, Human
cauugcugggcuugucug

SEQ ID NO: 3018876 - RNA, 14 nt, Human
cauugcggacagcc

SEQ ID NO: 3018877 - RNA, 15 nt, Human
cauugcggacagcca

SEQ ID NO: 3018878 - RNA, 17 nt, Human
cauugcggacagccacg

SEQ ID NO: 3018879 - RNA, 21 nt, Human
cauugcggacagccacggcca

SEQ ID NO: 3018880 - RNA, 18 nt, Human
cauuaucuagauacugua

SEQ ID NO: 3018881 - RNA, 16 nt, Human
cauucuccuuguguua

SEQ ID NO: 3018882 - RNA, 22 nt, Human
cauggccucuucagaucucuaa

SEQ ID NO: 3018883 - RNA, 22 nt, Human
cauggcugccaaugggagcuca

SEQ ID NO: 3018884 - RNA, 17 nt, Human
cauggcugccaauggga

SEQ ID NO: 3018885 - RNA, 15 nt, Human
cauguucucugagga

SEQ ID NO: 3018886 - RNA, 12 nt, Human
cauuaucuagau

SEQ ID NO: 3018887 - RNA, 16 nt, Human
cauuaucuagauacug

SEQ ID NO: 3018888 - RNA, 17 nt, Human
cauuaucuagauacugu

SEQ ID NO: 3018889 - RNA, 17 nt, Human
ccaccaucaagccacca

SEQ ID NO: 3018890 - RNA, 16 nt, Human
ccaccaucaagccacc

SEQ ID NO: 3018891 - RNA, 13 nt, Human
ccaccuuggcuca

SEQ ID NO: 3018892 - RNA, 14 nt, Human
ccaccuuggcucaa

SEQ ID NO: 3018893 - RNA, 15 nt, Human
ccaccuuggcucaag

SEQ ID NO: 3018894 - RNA, 13 nt, Human
ccaccgcagacag

SEQ ID NO: 3018895 - RNA, 18 nt, Human
ccaccgcagacaggacca

SEQ ID NO: 3018896 - RNA, 13 nt, Human
ccacccugcucuc

SEQ ID NO: 3018897 - RNA, 20 nt, Human
ccaccaucaagccaccaaca

SEQ ID NO: 3018898 - RNA, 17 nt, Human
ccaccgcagacaggacc

SEQ ID NO: 3018899 - RNA, 14 nt, Human
ccaccgcagacagg

SEQ ID NO: 3018900 - RNA, 20 nt, Human
ccaauguucucucuucucca

SEQ ID NO: 3018901 - RNA, 20 nt, Human
ccaagcuggucccacucagu

SEQ ID NO: 3018902 - RNA, 23 nt, Human
ccaaugcacuuuguucuggcucu

SEQ ID NO: 3018903 - RNA, 22 nt, Human
ccaaugcacuuuguucuggcuc

SEQ ID NO: 3018904 - RNA, 20 nt, Human
ccaaugcacuuuguucuggc

SEQ ID NO: 3018905 - RNA, 14 nt, Human
ccaaagugcuggga

SEQ ID NO: 3018906 - RNA, 16 nt, Human
ccaacgucugugccau

SEQ ID NO: 3018907 - RNA, 16 nt, Human
ccaaaucauaguggcu

SEQ ID NO: 3018908 - RNA, 14 nt, Human
caguuugcagagua

SEQ ID NO: 3018909 - RNA, 21 nt, Human
caguuugguugguaacucugu

SEQ ID NO: 3018910 - RNA, 11 nt, Human
caguuugguug

SEQ ID NO: 3018911 - RNA, 14 nt, Human
cauaaugcgugcau

SEQ ID NO: 3018912 - RNA, 17 nt, Human
cauaaugcgugcauacc

SEQ ID NO: 3018913 - RNA, 20 nt, Human
cauauuaccacagacauacu

SEQ ID NO: 3018914 - RNA, 21 nt, Human
cauauuaccacagacauacua

SEQ ID NO: 3018915 - RNA, 17 nt, Human
cauauuaccacagacau

SEQ ID NO: 3018916 - RNA, 16 nt, Human
cauauuaccacagaca

SEQ ID NO: 3018917 - RNA, 21 nt, Human
cauaaugcgugcauaccacuu

SEQ ID NO: 3018918 - RNA, 15 nt, Human
cauacaauuccaaac

SEQ ID NO: 3018919 - RNA, 18 nt, Human
cagucaccccggccaccu

SEQ ID NO: 3018920 - RNA, 15 nt, Human
caugcugccaauauc

SEQ ID NO: 3018921 - RNA, 17 nt, Human
caugcugccaauauccu

SEQ ID NO: 3018922 - RNA, 19 nt, Human
caugcugccaauauccuaa

SEQ ID NO: 3018923 - RNA, 21 nt, Human
caugcugccaauauccuaaua

SEQ ID NO: 3018924 - RNA, 18 nt, Human
caugcugcccugugagua

SEQ ID NO: 3018925 - RNA, 16 nt, Human
caugcugcccugugag

SEQ ID NO: 3018926 - RNA, 22 nt, Human
caugcugccaauauccuaauaa

SEQ ID NO: 3018927 - RNA, 22 nt, Human
cauggccuuugcuugaaagaaa

SEQ ID NO: 3018928 - RNA, 19 nt, Human
cauggccuuugcuugaaag

SEQ ID NO: 3018929 - RNA, 22 nt, Human
caugcaaggucauuuuuuuuaa

SEQ ID NO: 3018930 - RNA, 15 nt, Human
caugcaaggucauuu

SEQ ID NO: 3018931 - RNA, 17 nt, Human
caugcaaggucauuuuu

SEQ ID NO: 3018932 - RNA, 18 nt, Human
caugcaaggucauuuuuu

SEQ ID NO: 3018933 - RNA, 18 nt, Human
caugacacgaauauugcu

SEQ ID NO: 3018934 - RNA, 17 nt, Human
caugacacgaauauugc

SEQ ID NO: 3018935 - RNA, 14 nt, Human
caugacacgaauau

SEQ ID NO: 3018936 - RNA, 22 nt, Human
caucuuagguuggcaaaaaggc

SEQ ID NO: 3018937 - RNA, 21 nt, Human
caucuuagguuggcaaaaagg

SEQ ID NO: 3018938 - RNA, 19 nt, Human
caucugugaaaggaaagag

SEQ ID NO: 3018939 - RNA, 18 nt, Human
caucugugaaaggaaaga

SEQ ID NO: 3018940 - RNA, 23 nt, Human
cauccuggcacccggccccugcu

SEQ ID NO: 3018941 - RNA, 13 nt, Human
caucccagcccca

SEQ ID NO: 3018942 - RNA, 14 nt, Human
caucccagccccaa

SEQ ID NO: 3018943 - RNA, 16 nt, Human
caucccagccccaaug

SEQ ID NO: 3018944 - RNA, 12 nt, Human
caucccagcccc

SEQ ID NO: 3018945 - RNA, 23 nt, Human
caucaggccaggcccucugccca

SEQ ID NO: 3018946 - RNA, 22 nt, Human
caucaggccaggcccucugccc

SEQ ID NO: 3018947 - RNA, 21 nt, Human
caucaggccaggcccucugcc

SEQ ID NO: 3018948 - RNA, 20 nt, Human
caucaggccaggcccucugc

SEQ ID NO: 3018949 - RNA, 17 nt, Human
caucagcacgauuucug

SEQ ID NO: 3018950 - RNA, 18 nt, Human
caucagcacgauuucugu

SEQ ID NO: 3018951 - RNA, 13 nt, Human
caucaggccaggc

SEQ ID NO: 3018952 - RNA, 16 nt, Human
cacuuacacuuuaugc

SEQ ID NO: 3018953 - RNA, 18 nt, Human
cacuuacacuuuaugcac

SEQ ID NO: 3018954 - RNA, 13 nt, Human
cacugcagccuca

SEQ ID NO: 3018955 - RNA, 16 nt, Human
cacugcauguuuguga

SEQ ID NO: 3018956 - RNA, 19 nt, Human
cacugcacuauagccuagg

SEQ ID NO: 3018957 - RNA, 16 nt, Human
cacugcacuccagccu

SEQ ID NO: 3018958 - RNA, 15 nt, Human
cacugcacuccagcc

SEQ ID NO: 3018959 - RNA, 18 nt, Human
cacugcacuccagccugg

SEQ ID NO: 3018960 - RNA, 19 nt, Human
cacugcacuccagccuggg

SEQ ID NO: 3018961 - RNA, 20 nt, Human
cacugcacuccagccugggu

SEQ ID NO: 3018962 - RNA, 12 nt, Human
cacugcagccuc

SEQ ID NO: 3018963 - RNA, 13 nt, Human
cacuccccugcug

SEQ ID NO: 3018964 - RNA, 12 nt, Human
cacuccccugcu

SEQ ID NO: 3018965 - RNA, 14 nt, Human
cacuccccugcugg

SEQ ID NO: 3018966 - RNA, 16 nt, Human
cacuccagccugggug

SEQ ID NO: 3018967 - RNA, 17 nt, Human
caccugccuguugggcc

SEQ ID NO: 3018968 - RNA, 24 nt, Human
caccugccuguugggccaggagcc

SEQ ID NO: 3018969 - RNA, 19 nt, Human
caccugccuguugggccag

SEQ ID NO: 3018970 - RNA, 14 nt, Human
caccuuggcugcag

SEQ ID NO: 3018971 - RNA, 14 nt, Human
caccuuggcucaag

SEQ ID NO: 3018972 - RNA, 15 nt, Human
caccuuggcucaagu

SEQ ID NO: 3018973 - RNA, 13 nt, Human
caccuuggcugca

SEQ ID NO: 3018974 - RNA, 14 nt, Human
caccucagccuccc

SEQ ID NO: 3018975 - RNA, 12 nt, Human
caccucagccuc

SEQ ID NO: 3018976 - RNA, 13 nt, Human
caccucagccucc

SEQ ID NO: 3018977 - RNA, 14 nt, Human
caccugccccucaa

SEQ ID NO: 3018978 - RNA, 16 nt, Human
caccugccccucaacu

SEQ ID NO: 3018979 - RNA, 15 nt, Human
caccugccccucaac

SEQ ID NO: 3018980 - RNA, 17 nt, Human
cacccugaaagcccuga

SEQ ID NO: 3018981 - RNA, 15 nt, Human
cacccuggggagaaa

SEQ ID NO: 3018982 - RNA, 16 nt, Human
cacccuggggagaaag

SEQ ID NO: 3018983 - RNA, 14 nt, Human
cacccucaggcagg

SEQ ID NO: 3018984 - RNA, 11 nt, Human
caccccagccc

SEQ ID NO: 3018985 - RNA, 19 nt, Human
caauaaagcagcguuucua

SEQ ID NO: 3018986 - RNA, 13 nt, Human
caagcucugcucc

SEQ ID NO: 3018987 - RNA, 12 nt, Human
caagcuccaagc

SEQ ID NO: 3018988 - RNA, 14 nt, Human
caagcucugcuccu

SEQ ID NO: 3018989 - RNA, 13 nt, Human
caagcugcacccu

SEQ ID NO: 3018990 - RNA, 18 nt, Human
caagcugcacccucaggc

SEQ ID NO: 3018991 - RNA, 14 nt, Human
caagcugcacccuc

SEQ ID NO: 3018992 - RNA, 18 nt, Human
caaggccaaaggaagcac

SEQ ID NO: 3018993 - RNA, 17 nt, Human
caaggccaaaggaagca

SEQ ID NO: 3018994 - RNA, 16 nt, Human
caaggccaaaggaagc

SEQ ID NO: 3018995 - RNA, 15 nt, Human
caaggccaaaggaag

SEQ ID NO: 3018996 - RNA, 17 nt, Human
caagucaagugaaaaag

SEQ ID NO: 3018997 - RNA, 13 nt, Human
caagucaagugaa

SEQ ID NO: 3018998 - RNA, 18 nt, Human
caagcgugagccacugca

SEQ ID NO: 3018999 - RNA, 17 nt, Human
cacacagcucuguccug

SEQ ID NO: 3019000 - RNA, 20 nt, Human
cacacagcucuguccuggga

SEQ ID NO: 3019001 - RNA, 11 nt, Human
caauggcagcc

SEQ ID NO: 3019002 - RNA, 12 nt, Human
caauggcagccu

SEQ ID NO: 3019003 - RNA, 14 nt, Human
cacaagagcccagg

SEQ ID NO: 3019004 - RNA, 15 nt, Human
cacaagcuccaagcu

SEQ ID NO: 3019005 - RNA, 14 nt, Human
cacaagcuccaagc

SEQ ID NO: 3019006 - RNA, 13 nt, Human
cacaagcuccaag

SEQ ID NO: 3019007 - RNA, 16 nt, Human
cacaagagcccaggcc

SEQ ID NO: 3019008 - RNA, 23 nt, Human
cacaagcuccaagcucccaggca

SEQ ID NO: 3019009 - RNA, 17 nt, Human
cacaagcuccaagcucc

SEQ ID NO: 3019010 - RNA, 23 nt, Human
cacaagcugcacccucaggcagg

SEQ ID NO: 3019011 - RNA, 17 nt, Human
cacaagcugcacccuca

SEQ ID NO: 3019012 - RNA, 11 nt, Human
cacagccucug

SEQ ID NO: 3019013 - RNA, 13 nt, Human
cacagacccugcc

SEQ ID NO: 3019014 - RNA, 19 nt, Human
cacagacauacuaaccagc

SEQ ID NO: 3019015 - RNA, 21 nt, Human
cacagacauacuaaccagcag

SEQ ID NO: 3019016 - RNA, 18 nt, Human
cacagacauacuaaccag

SEQ ID NO: 3019017 - RNA, 19 nt, Human
cacagaaaauucuucucca

SEQ ID NO: 3019018 - RNA, 23 nt, Human
cacagaaaauggaagacagcucu

SEQ ID NO: 3019019 - RNA, 22 nt, Human
cacacaugagcaucaggccagg

SEQ ID NO: 3019020 - RNA, 21 nt, Human
cacacaugagcaucaggccag

SEQ ID NO: 3019021 - RNA, 22 nt, Human
cacagaaaauggaagacagcuc

SEQ ID NO: 3019022 - RNA, 20 nt, Human
cacagaaaauggaagacagc

SEQ ID NO: 3019023 - RNA, 19 nt, Human
cacagaaaauggaagacag

SEQ ID NO: 3019024 - RNA, 18 nt, Human
cacagaaaauggaagaca

SEQ ID NO: 3019025 - RNA, 18 nt, Human
cacacagugagucgagga

SEQ ID NO: 3019026 - RNA, 20 nt, Human
cacacaguauuacuucugcu

SEQ ID NO: 3019027 - RNA, 23 nt, Human
cacacaguauuacuucugcuaca

SEQ ID NO: 3019028 - RNA, 16 nt, Human
cacacagcucuguccu

SEQ ID NO: 3019029 - RNA, 15 nt, Human
cacacauacacacac

SEQ ID NO: 3019030 - RNA, 21 nt, Human
cacacagugagucgaggacag

SEQ ID NO: 3019031 - RNA, 23 nt, Human
cacacagugagucgaggacaggg

SEQ ID NO: 3019032 - RNA, 20 nt, Human
cacacaugagcaucaggcca

SEQ ID NO: 3019033 - RNA, 20 nt, Human
cacaguauuacuucugcuac

SEQ ID NO: 3019034 - RNA, 21 nt, Human
cacaguauuacuucugcuaca

SEQ ID NO: 3019035 - RNA, 19 nt, Human
cacaguauuacuucugcua

SEQ ID NO: 3019036 - RNA, 19 nt, Human
cacaggggaaaagaggagu

SEQ ID NO: 3019037 - RNA, 18 nt, Human
cacaggggaaaagaggag

SEQ ID NO: 3019038 - RNA, 17 nt, Human
cacaggggaaaagagga

SEQ ID NO: 3019039 - RNA, 17 nt, Human
auugcugcuuguacacu

SEQ ID NO: 3019040 - RNA, 12 nt, Human
auugcugcuuga

SEQ ID NO: 3019041 - RNA, 23 nt, Human
auugcugauggugcaaugaccuu

SEQ ID NO: 3019042 - RNA, 14 nt, Human
auugcuugagcuca

SEQ ID NO: 3019043 - RNA, 19 nt, Human
auugcugauggugcaauga

SEQ ID NO: 3019044 - RNA, 18 nt, Human
auugcugauggugcaaug

SEQ ID NO: 3019045 - RNA, 16 nt, Human
auugcugauggugcaa

SEQ ID NO: 3019046 - RNA, 15 nt, Human
auugcugauggugca

SEQ ID NO: 3019047 - RNA, 16 nt, Human
auuguuagucucuuga

SEQ ID NO: 3019048 - RNA, 23 nt, Human
auugugucucuugguccugcugc

SEQ ID NO: 3019049 - RNA, 21 nt, Human
auugugucucuugguccugcu

SEQ ID NO: 3019050 - RNA, 11 nt, Human
auucuucugcu

SEQ ID NO: 3019051 - RNA, 12 nt, Human
auucuucugcuu

SEQ ID NO: 3019052 - RNA, 11 nt, Human
auucuuuccug

SEQ ID NO: 3019053 - RNA, 14 nt, Human
auugcuacuguccu

SEQ ID NO: 3019054 - RNA, 15 nt, Human
auugcuacuguccua

SEQ ID NO: 3019055 - RNA, 17 nt, Human
auugauaugcuuauaca

SEQ ID NO: 3019056 - RNA, 20 nt, Human
auugcuacuguccuacccac

SEQ ID NO: 3019057 - RNA, 22 nt, Human
auugcuacuguccuacccaccc

SEQ ID NO: 3019058 - RNA, 21 nt, Human
auugauaagaaccuuuugagu

SEQ ID NO: 3019059 - RNA, 20 nt, Human
auuaaugucaguauuucaac

SEQ ID NO: 3019060 - RNA, 17 nt, Human
auuacaacucuauuuaa

SEQ ID NO: 3019061 - RNA, 17 nt, Human
auuacaggaaguacugg

SEQ ID NO: 3019062 - RNA, 16 nt, Human
auuacaggugugaacc

SEQ ID NO: 3019063 - RNA, 13 nt, Human
auuagguugugaa

SEQ ID NO: 3019064 - RNA, 21 nt, Human
auuaggugugacugaauuucu

SEQ ID NO: 3019065 - RNA, 15 nt, Human
auuagguugugaaug

SEQ ID NO: 3019066 - RNA, 14 nt, Human
auuagguugugaau

SEQ ID NO: 3019067 - RNA, 16 nt, Human
auuaggugugacugaa

SEQ ID NO: 3019068 - RNA, 18 nt, Human
auuaggugugacugaauu

SEQ ID NO: 3019069 - RNA, 23 nt, Human
auuaugcaugaaguaauaugcac

SEQ ID NO: 3019070 - RNA, 19 nt, Human
auucauaaugacuuaagca

SEQ ID NO: 3019071 - RNA, 15 nt, Human
auucauaaugacuua

SEQ ID NO: 3019072 - RNA, 14 nt, Human
auucauaaugacuu

SEQ ID NO: 3019073 - RNA, 15 nt, Human
auuuggaaaggaaug

SEQ ID NO: 3019074 - RNA, 13 nt, Human
auuugcuccuuuc

SEQ ID NO: 3019075 - RNA, 18 nt, Human
auuuggaaaggaaugcaa

SEQ ID NO: 3019076 - RNA, 15 nt, Human
auuugugauacaaug

SEQ ID NO: 3019077 - RNA, 17 nt, Human
auuugugauacaaugcu

SEQ ID NO: 3019078 - RNA, 18 nt, Human
auuuguggaaaauaacuc

SEQ ID NO: 3019079 - RNA, 20 nt, Human
auuugugauacaaugcugug

SEQ ID NO: 3019080 - RNA, 22 nt, Human
auuuguuugaacugauaaagau

SEQ ID NO: 3019081 - RNA, 23 nt, Human
auuuguuugaacugauaaagaug

SEQ ID NO: 3019082 - RNA, 20 nt, Human
auuuguuugaacugauaaag

SEQ ID NO: 3019083 - RNA, 21 nt, Human
auuugccuaauaugaugacug

SEQ ID NO: 3019084 - RNA, 13 nt, Human
caaacccaguguu

SEQ ID NO: 3019085 - RNA, 19 nt, Human
caaaccaucauugaaaucu

SEQ ID NO: 3019086 - RNA, 21 nt, Human
caaaccaucauugaaaucuuu

SEQ ID NO: 3019087 - RNA, 15 nt, Human
caaacagaggccgcc

SEQ ID NO: 3019088 - RNA, 23 nt, Human
auuuuuuuuuccuucagugccuu

SEQ ID NO: 3019089 - RNA, 18 nt, Human
caaaagaugcuucucacu

SEQ ID NO: 3019090 - RNA, 16 nt, Human
caaaagaugcuucuca

SEQ ID NO: 3019091 - RNA, 18 nt, Human
caaagauauuuugcuuug

SEQ ID NO: 3019092 - RNA, 20 nt, Human
caaagauauuuugcuuugug

SEQ ID NO: 3019093 - RNA, 20 nt, Human
caaauggaaaugggcagagc

SEQ ID NO: 3019094 - RNA, 21 nt, Human
caaauggaaaugggcagagca

SEQ ID NO: 3019095 - RNA, 20 nt, Human
caacaccucugcacaagcug

SEQ ID NO: 3019096 - RNA, 14 nt, Human
caaaguagaagucu

SEQ ID NO: 3019097 - RNA, 21 nt, Human
caaaguagaagucuuagaugu

SEQ ID NO: 3019098 - RNA, 17 nt, Human
caaagcagugcaugcug

SEQ ID NO: 3019099 - RNA, 15 nt, Human
caaagcagugcaugc

SEQ ID NO: 3019100 - RNA, 22 nt, Human
caaaguacacuguuucaaacuu

SEQ ID NO: 3019101 - RNA, 22 nt, Human
caaagauauuuugcuuugugau

SEQ ID NO: 3019102 - RNA, 23 nt, Human
caaagauauuuugcuuugugauu

SEQ ID NO: 3019103 - RNA, 24 nt, Human
ccguagacgugcacgcacacuguc

SEQ ID NO: 3019104 - RNA, 16 nt, Human
ccucaaccuccugggc

SEQ ID NO: 3019105 - RNA, 11 nt, Human
ccucagccucc

SEQ ID NO: 3019106 - RNA, 22 nt, Human
ccucagccucccaaagugcugg

SEQ ID NO: 3019107 - RNA, 15 nt, Human
ccucaagagaaggca

SEQ ID NO: 3019108 - RNA, 15 nt, Human
ccucaacucuccucc

SEQ ID NO: 3019109 - RNA, 20 nt, Human
ccuccaagaccuucuccuuc

SEQ ID NO: 3019110 - RNA, 19 nt, Human
ccucauguucuuaauucuu

SEQ ID NO: 3019111 - RNA, 23 nt, Human
ccucccaacucaccccagcccca

SEQ ID NO: 3019112 - RNA, 22 nt, Human
ccucccaaggggcccaaauucu

SEQ ID NO: 3019113 - RNA, 13 nt, Human
ccucauguucuua

SEQ ID NO: 3019114 - RNA, 23 nt, Human
ccucagccucccaaagugcuggg

SEQ ID NO: 3019115 - RNA, 22 nt, Human
ccucagccucccgaauagcugg

SEQ ID NO: 3019116 - RNA, 13 nt, Human
cccuucucuguau

SEQ ID NO: 3019117 - RNA, 21 nt, Human
cccuucugacccaugcugccc

SEQ ID NO: 3019118 - RNA, 23 nt, Human
cccuucugacccaugcugcccug

SEQ ID NO: 3019119 - RNA, 22 nt, Human
cccuucugacccaugcugcccu

SEQ ID NO: 3019120 - RNA, 16 nt, Human
cccuucgcuccugugu

SEQ ID NO: 3019121 - RNA, 18 nt, Human
cccuucgcuccugugucu

SEQ ID NO: 3019122 - RNA, 16 nt, Human
cccuucuaccuuccug

SEQ ID NO: 3019123 - RNA, 16 nt, Human
ccgccaugcuccuggc

SEQ ID NO: 3019124 - RNA, 20 nt, Human
ccgcccaggcuuagucacug

SEQ ID NO: 3019125 - RNA, 18 nt, Human
ccgaccagacaccuugac

SEQ ID NO: 3019126 - RNA, 20 nt, Human
ccgaauagcugggacuacag

SEQ ID NO: 3019127 - RNA, 17 nt, Human
ccgaauagcugggacua

SEQ ID NO: 3019128 - RNA, 16 nt, Human
ccgacccuugccgucu

SEQ ID NO: 3019129 - RNA, 17 nt, Human
ccgccaaggcuggggga

SEQ ID NO: 3019130 - RNA, 13 nt, Human
cccugcccugugg

SEQ ID NO: 3019131 - RNA, 12 nt, Human
cccugcccugug

SEQ ID NO: 3019132 - RNA, 11 nt, Human
cccugcccugu

SEQ ID NO: 3019133 - RNA, 14 nt, Human
cccugcccuguggg

SEQ ID NO: 3019134 - RNA, 15 nt, Human
cccugcccugugggc

SEQ ID NO: 3019135 - RNA, 20 nt, Human
cccugcccugugggccccca

SEQ ID NO: 3019136 - RNA, 16 nt, Human
cccugcccugugggcc

SEQ ID NO: 3019137 - RNA, 13 nt, Human
cccuggcagcccc

SEQ ID NO: 3019138 - RNA, 12 nt, Human
cccuggcagccc

SEQ ID NO: 3019139 - RNA, 21 nt, Human
cccugcccugugggcccccaa

SEQ ID NO: 3019140 - RNA, 16 nt, Human
cccuggcagccccugu

SEQ ID NO: 3019141 - RNA, 14 nt, Human
cccuggcagccccu

SEQ ID NO: 3019142 - RNA, 15 nt, Human
ccuggaguucugguu

SEQ ID NO: 3019143 - RNA, 17 nt, Human
ccuggaguucugguucc

SEQ ID NO: 3019144 - RNA, 16 nt, Human
ccuggaguucugguuc

SEQ ID NO: 3019145 - RNA, 13 nt, Human
ccuggaugcagcc

SEQ ID NO: 3019146 - RNA, 19 nt, Human
ccuggaugcagccucacag

SEQ ID NO: 3019147 - RNA, 17 nt, Human
ccuggaugcagccucac

SEQ ID NO: 3019148 - RNA, 14 nt, Human
ccuggaugcagccu

SEQ ID NO: 3019149 - RNA, 20 nt, Human
ccugcuggguguggcgcagc

SEQ ID NO: 3019150 - RNA, 14 nt, Human
ccugcugggugugg

SEQ ID NO: 3019151 - RNA, 12 nt, Human
ccugcugggugu

SEQ ID NO: 3019152 - RNA, 14 nt, Human
ccugcccaggcccc

SEQ ID NO: 3019153 - RNA, 15 nt, Human
ccugcccaggccccu

SEQ ID NO: 3019154 - RNA, 22 nt, Human
ccugcccaggccccugccaccc

SEQ ID NO: 3019155 - RNA, 16 nt, Human
ccugcccaggccccug

SEQ ID NO: 3019156 - RNA, 12 nt, Human
ccuggccucugc

SEQ ID NO: 3019157 - RNA, 13 nt, Human
ccuggccugagcu

SEQ ID NO: 3019158 - RNA, 15 nt, Human
ccuggccucugcacu

SEQ ID NO: 3019159 - RNA, 14 nt, Human
ccuggccucugcac

SEQ ID NO: 3019160 - RNA, 19 nt, Human
ccugcacuugcagacucua

SEQ ID NO: 3019161 - RNA, 22 nt, Human
ccugcacuugcagacucuacag

SEQ ID NO: 3019162 - RNA, 13 nt, Human
ccucuuggguuca

SEQ ID NO: 3019163 - RNA, 13 nt, Human
ccucuugagccuu

SEQ ID NO: 3019164 - RNA, 19 nt, Human
ccucuugagccuugaacuu

SEQ ID NO: 3019165 - RNA, 21 nt, Human
ccucugccugaagucacacag

SEQ ID NO: 3019166 - RNA, 22 nt, Human
ccucugccugaagucacacagu

SEQ ID NO: 3019167 - RNA, 14 nt, Human
ccucugcugcuggc

SEQ ID NO: 3019168 - RNA, 13 nt, Human
ccucugcugcugg

SEQ ID NO: 3019169 - RNA, 18 nt, Human
ccucugcugcuggcuggu

SEQ ID NO: 3019170 - RNA, 17 nt, Human
ccucugcugcuggcugg

SEQ ID NO: 3019171 - RNA, 16 nt, Human
ccucugcugcuggcug

SEQ ID NO: 3019172 - RNA, 15 nt, Human
ccucugcugcuggcu

SEQ ID NO: 3019173 - RNA, 14 nt, Human
ccucucucaggcca

SEQ ID NO: 3019174 - RNA, 12 nt, Human
ccucucucaggc

SEQ ID NO: 3019175 - RNA, 17 nt, Human
ccucucucacuccuuga

SEQ ID NO: 3019176 - RNA, 15 nt, Human
ccucucucacuccuu

SEQ ID NO: 3019177 - RNA, 14 nt, Human
ccucucucacuccu

SEQ ID NO: 3019178 - RNA, 13 nt, Human
ccucucucacucc

SEQ ID NO: 3019179 - RNA, 12 nt, Human
ccucucucacuc

SEQ ID NO: 3019180 - RNA, 17 nt, Human
ccaggcuggcgugcagu

SEQ ID NO: 3019181 - RNA, 18 nt, Human
ccaggcuggcgugcagug

SEQ ID NO: 3019182 - RNA, 16 nt, Human
ccaggcuggcgugcag

SEQ ID NO: 3019183 - RNA, 20 nt, Human
ccaggcuccuuuagcgccca

SEQ ID NO: 3019184 - RNA, 21 nt, Human
ccaggcuccuuuagcgcccag

SEQ ID NO: 3019185 - RNA, 19 nt, Human
ccaggggaaaaucagccug

SEQ ID NO: 3019186 - RNA, 13 nt, Human
ccaggggugggac

SEQ ID NO: 3019187 - RNA, 20 nt, Human
ccaggggaaaaucagccugc

SEQ ID NO: 3019188 - RNA, 17 nt, Human
ccaggggugggacaccc

SEQ ID NO: 3019189 - RNA, 14 nt, Human
ccaggggugggaca

SEQ ID NO: 3019190 - RNA, 23 nt, Human
ccaggggugggacacccugugau

SEQ ID NO: 3019191 - RNA, 17 nt, Human
ccaguuggguggaugcc

SEQ ID NO: 3019192 - RNA, 19 nt, Human
ccaguuggguggaugccug

SEQ ID NO: 3019193 - RNA, 20 nt, Human
ccaguuggguggaugccugg

SEQ ID NO: 3019194 - RNA, 20 nt, Human
ccauggucggaaaacaugcu

SEQ ID NO: 3019195 - RNA, 21 nt, Human
ccaugagccucagcauccugg

SEQ ID NO: 3019196 - RNA, 23 nt, Human
ccaugagccucagcauccuggca

SEQ ID NO: 3019197 - RNA, 20 nt, Human
ccaucccugaaggccccgcc

SEQ ID NO: 3019198 - RNA, 17 nt, Human
ccaucccugaaggcccc

SEQ ID NO: 3019199 - RNA, 15 nt, Human
ccaucccugaaggcc

SEQ ID NO: 3019200 - RNA, 14 nt, Human
ccaucccugaaggc

SEQ ID NO: 3019201 - RNA, 23 nt, Human
ccaguuggucccccuuccaugga

SEQ ID NO: 3019202 - RNA, 15 nt, Human
ccaucccagccccaa

SEQ ID NO: 3019203 - RNA, 13 nt, Human
ccaucccagcccc

SEQ ID NO: 3019204 - RNA, 14 nt, Human
ccaucccagcccca

SEQ ID NO: 3019205 - RNA, 16 nt, Human
ccaggaaaggcuccag

SEQ ID NO: 3019206 - RNA, 15 nt, Human
ccaggaaaggcucca

SEQ ID NO: 3019207 - RNA, 14 nt, Human
ccaggaaaggcucc

SEQ ID NO: 3019208 - RNA, 12 nt, Human
ccaggaagccag

SEQ ID NO: 3019209 - RNA, 13 nt, Human
ccaggaagccagc

SEQ ID NO: 3019210 - RNA, 19 nt, Human
ccagcuuaaaggggcuaga

SEQ ID NO: 3019211 - RNA, 17 nt, Human
ccagcuguucagcuggu

SEQ ID NO: 3019212 - RNA, 22 nt, Human
ccagcucaccagccccagugcc

SEQ ID NO: 3019213 - RNA, 16 nt, Human
ccagcuguucagcugg

SEQ ID NO: 3019214 - RNA, 15 nt, Human
ccagcucaccagccc

SEQ ID NO: 3019215 - RNA, 16 nt, Human
ccagcucaccagcccc

SEQ ID NO: 3019216 - RNA, 12 nt, Human
ccagccccugga

SEQ ID NO: 3019217 - RNA, 11 nt, Human
ccagccccugg

SEQ ID NO: 3019218 - RNA, 15 nt, Human
ccagcaggcucucag

SEQ ID NO: 3019219 - RNA, 13 nt, Human
ccagcaggcucuc

SEQ ID NO: 3019220 - RNA, 18 nt, Human
ccagaugcaccagcccuu

SEQ ID NO: 3019221 - RNA, 17 nt, Human
ccagaugcaccagcccu

SEQ ID NO: 3019222 - RNA, 15 nt, Human
ccagaugcaccagcc

SEQ ID NO: 3019223 - RNA, 20 nt, Human
ccagagggccugcaagggag

SEQ ID NO: 3019224 - RNA, 16 nt, Human
ccaccuuggcucaagu

SEQ ID NO: 3019225 - RNA, 17 nt, Human
ccagagggccugcaagg

SEQ ID NO: 3019226 - RNA, 19 nt, Human
ccagagggccugcaaggga

SEQ ID NO: 3019227 - RNA, 18 nt, Human
ccagagggccugcaaggg

SEQ ID NO: 3019228 - RNA, 14 nt, Human
cccgaauagcuggg

SEQ ID NO: 3019229 - RNA, 11 nt, Human
cccggcuccag

SEQ ID NO: 3019230 - RNA, 12 nt, Human
cccggcuccagg

SEQ ID NO: 3019231 - RNA, 14 nt, Human
cccggccaccugcg

SEQ ID NO: 3019232 - RNA, 13 nt, Human
cccggccaccugc

SEQ ID NO: 3019233 - RNA, 13 nt, Human
cccggcuccaggc

SEQ ID NO: 3019234 - RNA, 14 nt, Human
cccggcuccaggcu

SEQ ID NO: 3019235 - RNA, 15 nt, Human
cccggcuccaggcuc

SEQ ID NO: 3019236 - RNA, 16 nt, Human
cccggcuccaggcucc

SEQ ID NO: 3019237 - RNA, 22 nt, Human
cccgggaagggggcugggacau

SEQ ID NO: 3019238 - RNA, 18 nt, Human
cccuauuagagaagagau

SEQ ID NO: 3019239 - RNA, 23 nt, Human
ccccgacccuugccgucuaccug

SEQ ID NO: 3019240 - RNA, 22 nt, Human
cccccaaauggaaaugggcaga

SEQ ID NO: 3019241 - RNA, 21 nt, Human
ccccagcaagugagagcuggg

SEQ ID NO: 3019242 - RNA, 22 nt, Human
ccccagcaagugagagcugggu

SEQ ID NO: 3019243 - RNA, 23 nt, Human
ccccaaaacucuccucugcugcu

SEQ ID NO: 3019244 - RNA, 21 nt, Human
ccccaaaacucuccucugcug

SEQ ID NO: 3019245 - RNA, 22 nt, Human
ccccaaaacucuccucugcugc

SEQ ID NO: 3019246 - RNA, 17 nt, Human
cccacccccacccaagg

SEQ ID NO: 3019247 - RNA, 15 nt, Human
cccacccccacccaa

SEQ ID NO: 3019248 - RNA, 12 nt, Human
cccacccccacc

SEQ ID NO: 3019249 - RNA, 18 nt, Human
cccacccaagggccuggc

SEQ ID NO: 3019250 - RNA, 18 nt, Human
cccacccugaaagcccug

SEQ ID NO: 3019251 - RNA, 22 nt, Human
cccacccaagggccuggccuga

SEQ ID NO: 3019252 - RNA, 21 nt, Human
cccacccaagggccuggccug

SEQ ID NO: 3019253 - RNA, 20 nt, Human
cccacccaagggccuggccu

SEQ ID NO: 3019254 - RNA, 19 nt, Human
cccacugcuuuuggucugu

SEQ ID NO: 3019255 - RNA, 12 nt, Human
cccacugcucug

SEQ ID NO: 3019256 - RNA, 13 nt, Human
cccacugcucugg

SEQ ID NO: 3019257 - RNA, 13 nt, Human
cccaggcuggcgu

SEQ ID NO: 3019258 - RNA, 17 nt, Human
cccaggcuggcgugcag

SEQ ID NO: 3019259 - RNA, 13 nt, Human
cccauccucugua

SEQ ID NO: 3019260 - RNA, 22 nt, Human
cccagcuuaaaggggcuagagu

SEQ ID NO: 3019261 - RNA, 23 nt, Human
cccagcucugguccauagagagc

SEQ ID NO: 3019262 - RNA, 16 nt, Human
cuagcaugaagacaga

SEQ ID NO: 3019263 - RNA, 17 nt, Human
cuagcauggcugccaau

SEQ ID NO: 3019264 - RNA, 23 nt, Human
cuagcagcagggagggcuucugc

SEQ ID NO: 3019265 - RNA, 12 nt, Human
cuagcagcaggg

SEQ ID NO: 3019266 - RNA, 22 nt, Human
cuagcagcagggagggcuucug

SEQ ID NO: 3019267 - RNA, 19 nt, Human
cuagaaauuccccacccug

SEQ ID NO: 3019268 - RNA, 14 nt, Human
cuaccugaggggcc

SEQ ID NO: 3019269 - RNA, 11 nt, Human
cuaccugaggg

SEQ ID NO: 3019270 - RNA, 18 nt, Human
cuauaacaaaggauacuu

SEQ ID NO: 3019271 - RNA, 22 nt, Human
cuauaacaaaggauacuuauuu

SEQ ID NO: 3019272 - RNA, 22 nt, Human
cuaguuccaccaucaagccacc

SEQ ID NO: 3019273 - RNA, 14 nt, Human
cuaguuccaccauc

SEQ ID NO: 3019274 - RNA, 20 nt, Human
cuaguuccaccaucaagcca

SEQ ID NO: 3019275 - RNA, 18 nt, Human
cuaguuccaccaucaagc

SEQ ID NO: 3019276 - RNA, 21 nt, Human
cuagggaaaaaccagcgugug

SEQ ID NO: 3019277 - RNA, 19 nt, Human
cuagggaaaaaccagcgug

SEQ ID NO: 3019278 - RNA, 18 nt, Human
cuaagugaggaugaaaaa

SEQ ID NO: 3019279 - RNA, 20 nt, Human
cuaagugauccucccaccuc

SEQ ID NO: 3019280 - RNA, 22 nt, Human
cuaagugauccucccaccucag

SEQ ID NO: 3019281 - RNA, 13 nt, Human
cuacaguugaaaa

SEQ ID NO: 3019282 - RNA, 18 nt, Human
cuacaguccucccaucuc

SEQ ID NO: 3019283 - RNA, 17 nt, Human
cuacaguccucccaucu

SEQ ID NO: 3019284 - RNA, 16 nt, Human
cuacaguccucccauc

SEQ ID NO: 3019285 - RNA, 15 nt, Human
cuacaguccucccau

SEQ ID NO: 3019286 - RNA, 16 nt, Human
cuaacuucaccauauu

SEQ ID NO: 3019287 - RNA, 16 nt, Human
cuaacuuuccuucauu

SEQ ID NO: 3019288 - RNA, 15 nt, Human
cuaacuucaccauau

SEQ ID NO: 3019289 - RNA, 16 nt, Human
ccuuggacauuuuaug

SEQ ID NO: 3019290 - RNA, 18 nt, Human
ccuuggacauuuuauguc

SEQ ID NO: 3019291 - RNA, 14 nt, Human
ccuuuagcgcccag

SEQ ID NO: 3019292 - RNA, 20 nt, Human
ccuuuagcgcccaguugggu

SEQ ID NO: 3019293 - RNA, 20 nt, Human
ccuuuucgcaggauucuucc

SEQ ID NO: 3019294 - RNA, 12 nt, Human
ccuuuuuuauac

SEQ ID NO: 3019295 - RNA, 23 nt, Human
cgaccagacaccuugacagggca

SEQ ID NO: 3019296 - RNA, 17 nt, Human
ccuuuuuuauacauaaa

SEQ ID NO: 3019297 - RNA, 18 nt, Human
ccuuuuuuauacauaaac

SEQ ID NO: 3019298 - RNA, 20 nt, Human
ccuugccgucuaccugaggg

SEQ ID NO: 3019299 - RNA, 17 nt, Human
ccuugccgucuaccuga

SEQ ID NO: 3019300 - RNA, 15 nt, Human
ccuggccugagcugg

SEQ ID NO: 3019301 - RNA, 14 nt, Human
ccuggccugagcug

SEQ ID NO: 3019302 - RNA, 20 nt, Human
ccuucugacccaugcugccc

SEQ ID NO: 3019303 - RNA, 17 nt, Human
ccuucugacccaugcug

SEQ ID NO: 3019304 - RNA, 16 nt, Human
ccuucugacccaugcu

SEQ ID NO: 3019305 - RNA, 12 nt, Human
ccuucugaccca

SEQ ID NO: 3019306 - RNA, 22 nt, Human
ccuucuggaauaaggagaauga

SEQ ID NO: 3019307 - RNA, 23 nt, Human
ccuucugacccaugcugcccugu

SEQ ID NO: 3019308 - RNA, 22 nt, Human
ccuucugacccaugcugcccug

SEQ ID NO: 3019309 - RNA, 21 nt, Human
ccuucugacccaugcugcccu

SEQ ID NO: 3019310 - RNA, 12 nt, Human
cgccaaggcugg

SEQ ID NO: 3019311 - RNA, 16 nt, Human
cgccaaggcuggggga

SEQ ID NO: 3019312 - RNA, 13 nt, Human
cgccaaggcuggg

SEQ ID NO: 3019313 - RNA, 18 nt, Human
cgaguuacagacaaagcg

SEQ ID NO: 3019314 - RNA, 17 nt, Human
cgaguuacagacaaagc

SEQ ID NO: 3019315 - RNA, 13 nt, Human
cgaguagcuggga

SEQ ID NO: 3019316 - RNA, 14 nt, Human
cgaguagcugggac

SEQ ID NO: 3019317 - RNA, 15 nt, Human
cgaguagcugggacu

SEQ ID NO: 3019318 - RNA, 17 nt, Human
cggcucacugcagccuc

SEQ ID NO: 3019319 - RNA, 19 nt, Human
cggcucacugcagccucaa

SEQ ID NO: 3019320 - RNA, 18 nt, Human
cggcucacugcagccuca

SEQ ID NO: 3019321 - RNA, 15 nt, Human
cggccuuuggcuuca

SEQ ID NO: 3019322 - RNA, 13 nt, Human
cucuauuucugga

SEQ ID NO: 3019323 - RNA, 14 nt, Human
cucucacuccuuga

SEQ ID NO: 3019324 - RNA, 12 nt, Human
cucucacuccuu

SEQ ID NO: 3019325 - RNA, 15 nt, Human
cucucacuccuugaa

SEQ ID NO: 3019326 - RNA, 19 nt, Human
cucucagauuguaccauug

SEQ ID NO: 3019327 - RNA, 15 nt, Human
cucugaaggacauug

SEQ ID NO: 3019328 - RNA, 21 nt, Human
cucuccgaccagacaccuuga

SEQ ID NO: 3019329 - RNA, 13 nt, Human
cucugcagcaaua

SEQ ID NO: 3019330 - RNA, 23 nt, Human
cucugcagcaauaaagcagcguu

SEQ ID NO: 3019331 - RNA, 18 nt, Human
cucugcagcaauaaagca

SEQ ID NO: 3019332 - RNA, 19 nt, Human
cucugcagcaauaaagcag

SEQ ID NO: 3019333 - RNA, 15 nt, Human
cucugguuaucuaau

SEQ ID NO: 3019334 - RNA, 19 nt, Human
cucugguccauagagagca

SEQ ID NO: 3019335 - RNA, 18 nt, Human
cucugguccauagagagc

SEQ ID NO: 3019336 - RNA, 16 nt, Human
cucugguccauagaga

SEQ ID NO: 3019337 - RNA, 17 nt, Human
cucugcugacagacaca

SEQ ID NO: 3019338 - RNA, 18 nt, Human
cucugcugacagacacag

SEQ ID NO: 3019339 - RNA, 19 nt, Human
cucugcugacagacacagg

SEQ ID NO: 3019340 - RNA, 15 nt, Human
cucugguccauagag

SEQ ID NO: 3019341 - RNA, 21 nt, Human
cucuguacagagcccacgccc

SEQ ID NO: 3019342 - RNA, 17 nt, Human
cucuguacagagcccac

SEQ ID NO: 3019343 - RNA, 12 nt, Human
cugacagacaca

SEQ ID NO: 3019344 - RNA, 14 nt, Human
cugacagacacagg

SEQ ID NO: 3019345 - RNA, 23 nt, Human
cugacccugcuucaaauauuucc

SEQ ID NO: 3019346 - RNA, 20 nt, Human
cugacccaugcugcccugug

SEQ ID NO: 3019347 - RNA, 19 nt, Human
cugacccaugcugcccugu

SEQ ID NO: 3019348 - RNA, 17 nt, Human
cugacccaugcugcccu

SEQ ID NO: 3019349 - RNA, 18 nt, Human
cugacccaugcugcccug

SEQ ID NO: 3019350 - RNA, 14 nt, Human
cugaaaauguaugu

SEQ ID NO: 3019351 - RNA, 16 nt, Human
cugaaaauguaugugu

SEQ ID NO: 3019352 - RNA, 19 nt, Human
cugaaggacauugcggaca

SEQ ID NO: 3019353 - RNA, 20 nt, Human
cugaaggacauugcggacag

SEQ ID NO: 3019354 - RNA, 17 nt, Human
cugaaggccccgcccag

SEQ ID NO: 3019355 - RNA, 17 nt, Human
cugaaggcuggguucug

SEQ ID NO: 3019356 - RNA, 14 nt, Human
cugaaggccccgcc

SEQ ID NO: 3019357 - RNA, 13 nt, Human
cugaaggccccgc

SEQ ID NO: 3019358 - RNA, 14 nt, Human
cucaugcugccaau

SEQ ID NO: 3019359 - RNA, 22 nt, Human
cucaugcugccaauauccuaau

SEQ ID NO: 3019360 - RNA, 12 nt, Human
cucaugcugcca

SEQ ID NO: 3019361 - RNA, 12 nt, Human
cucauguucuua

SEQ ID NO: 3019362 - RNA, 14 nt, Human
cucauguucuuaau

SEQ ID NO: 3019363 - RNA, 18 nt, Human
cucauguucuuaauucuu

SEQ ID NO: 3019364 - RNA, 19 nt, Human
cucauguucuuaauucuua

SEQ ID NO: 3019365 - RNA, 13 nt, Human
cucagugccacua

SEQ ID NO: 3019366 - RNA, 17 nt, Human
cucagucuggcccuucc

SEQ ID NO: 3019367 - RNA, 18 nt, Human
cucagucuggcccuuccu

SEQ ID NO: 3019368 - RNA, 13 nt, Human
cucaggccugggg

SEQ ID NO: 3019369 - RNA, 20 nt, Human
cucaggccugggggcugggc

SEQ ID NO: 3019370 - RNA, 14 nt, Human
cucaggccuggggg

SEQ ID NO: 3019371 - RNA, 21 nt, Human
cucaggccugggggcugggca

SEQ ID NO: 3019372 - RNA, 23 nt, Human
cucagccucccgaauagcuggga

SEQ ID NO: 3019373 - RNA, 22 nt, Human
cucagccucccaaagugcuggg

SEQ ID NO: 3019374 - RNA, 13 nt, Human
cucagccucccga

SEQ ID NO: 3019375 - RNA, 21 nt, Human
cucagccucccaaagugcugg

SEQ ID NO: 3019376 - RNA, 14 nt, Human
cucagccucccaaa

SEQ ID NO: 3019377 - RNA, 16 nt, Human
cucagccucccaaagu

SEQ ID NO: 3019378 - RNA, 13 nt, Human
cucagccucccaa

SEQ ID NO: 3019379 - RNA, 13 nt, Human
cucaggccagcug

SEQ ID NO: 3019380 - RNA, 22 nt, Human
cucaggccagcugcuugggcuu

SEQ ID NO: 3019381 - RNA, 21 nt, Human
cucaggccagcugcuugggcu

SEQ ID NO: 3019382 - RNA, 20 nt, Human
cucaggccagcugcuugggc

SEQ ID NO: 3019383 - RNA, 14 nt, Human
cucaggccagcugc

SEQ ID NO: 3019384 - RNA, 22 nt, Human
cuccagucauuauguuaauauu

SEQ ID NO: 3019385 - RNA, 11 nt, Human
cuccaggugca

SEQ ID NO: 3019386 - RNA, 20 nt, Human
cuccacuuucuagccagagg

SEQ ID NO: 3019387 - RNA, 22 nt, Human
cuccacuuucuagccagaggag

SEQ ID NO: 3019388 - RNA, 15 nt, Human
cuccaagaccuucuc

SEQ ID NO: 3019389 - RNA, 16 nt, Human
cuccaagaccuucucc

SEQ ID NO: 3019390 - RNA, 18 nt, Human
cuccaagaccuucuccuu

SEQ ID NO: 3019391 - RNA, 17 nt, Human
cuccaagaccuucuccu

SEQ ID NO: 3019392 - RNA, 18 nt, Human
cuccagaauuucccaaag

SEQ ID NO: 3019393 - RNA, 15 nt, Human
cuccagaauuuccca

SEQ ID NO: 3019394 - RNA, 19 nt, Human
cuccagacacauguccaag

SEQ ID NO: 3019395 - RNA, 17 nt, Human
cuccagacacaugucca

SEQ ID NO: 3019396 - RNA, 16 nt, Human
cuccagacacaugucc

SEQ ID NO: 3019397 - RNA, 19 nt, Human
cuccgcuuucuacccagcg

SEQ ID NO: 3019398 - RNA, 12 nt, Human
cucccaccucag

SEQ ID NO: 3019399 - RNA, 12 nt, Human
gcugaacaucac

SEQ ID NO: 3019400 - RNA, 23 nt, Human
gcucugguccauagagagcaaga

SEQ ID NO: 3019401 - RNA, 17 nt, Human
gcugaauacagaggcaa

SEQ ID NO: 3019402 - RNA, 23 nt, Human
gcugaaggcucgagcaugccugg

SEQ ID NO: 3019403 - RNA, 13 nt, Human
gcugacagacaca

SEQ ID NO: 3019404 - RNA, 20 nt, Human
gcucugaucauccacugugc

SEQ ID NO: 3019405 - RNA, 21 nt, Human
gcucugaucauccacugugcc

SEQ ID NO: 3019406 - RNA, 22 nt, Human
gcucugaucauccacugugcca

SEQ ID NO: 3019407 - RNA, 19 nt, Human
gcucucaggccagcugcuu

SEQ ID NO: 3019408 - RNA, 18 nt, Human
gcucucaggccagcugcu

SEQ ID NO: 3019409 - RNA, 17 nt, Human
gcucucaggccagcugc

SEQ ID NO: 3019410 - RNA, 19 nt, Human
gcucuacugaggugcuaug

SEQ ID NO: 3019411 - RNA, 16 nt, Human
gcuccucuccccagca

SEQ ID NO: 3019412 - RNA, 19 nt, Human
gcuccucuccccagcaagu

SEQ ID NO: 3019413 - RNA, 18 nt, Human
gcucucaaguuaucaggg

SEQ ID NO: 3019414 - RNA, 9 nt, Human
gcuccagac

SEQ ID NO: 3019415 - RNA, 23 nt, Human
gcuccagacacauguccaagaag

SEQ ID NO: 3019416 - RNA, 21 nt, Human
gcuccagacacauguccaaga

SEQ ID NO: 3019417 - RNA, 18 nt, Human
gcuccagacacaugucca

SEQ ID NO: 3019418 - RNA, 13 nt, Human
gcuccagcucacc

SEQ ID NO: 3019419 - RNA, 14 nt, Human
gcuccagcucacca

SEQ ID NO: 3019420 - RNA, 23 nt, Human
gcucccaggcauuccccaggagg

SEQ ID NO: 3019421 - RNA, 15 nt, Human
gcuccucuccccagc

SEQ ID NO: 3019422 - RNA, 18 nt, Human
gcugcugaaggcucgagc

SEQ ID NO: 3019423 - RNA, 12 nt, Human
gcugcugacagu

SEQ ID NO: 3019424 - RNA, 17 nt, Human
gcugccauccagguuca

SEQ ID NO: 3019425 - RNA, 13 nt, Human
gcugccccuggca

SEQ ID NO: 3019426 - RNA, 16 nt, Human
gcugccccuggcagcc

SEQ ID NO: 3019427 - RNA, 15 nt, Human
gcugccccuggcagc

SEQ ID NO: 3019428 - RNA, 15 nt, Human
gcugcacccucaggc

SEQ ID NO: 3019429 - RNA, 13 nt, Human
gcugcacccucag

SEQ ID NO: 3019430 - RNA, 12 nt, Human
gcugccauccag

SEQ ID NO: 3019431 - RNA, 13 nt, Human
gcugccauccagg

SEQ ID NO: 3019432 - RNA, 15 nt, Human
gcugaggugggagga

SEQ ID NO: 3019433 - RNA, 17 nt, Human
gcuuauuuccucauuuu

SEQ ID NO: 3019434 - RNA, 22 nt, Human
gcuuaauuauugauguuuucau

SEQ ID NO: 3019435 - RNA, 13 nt, Human
gcuguuggcuggg

SEQ ID NO: 3019436 - RNA, 14 nt, Human
gcuucaguggcagc

SEQ ID NO: 3019437 - RNA, 14 nt, Human
gcuucaaggauccu

SEQ ID NO: 3019438 - RNA, 17 nt, Human
gcuguacauacuuuuug

SEQ ID NO: 3019439 - RNA, 22 nt, Human
gcuguacauacuuuuuggguuu

SEQ ID NO: 3019440 - RNA, 23 nt, Human
gcugguucaggguuggccccugc

SEQ ID NO: 3019441 - RNA, 22 nt, Human
gcuggaguuauugaagcagagu

SEQ ID NO: 3019442 - RNA, 22 nt, Human
gcuuccagugaggcucugcccu

SEQ ID NO: 3019443 - RNA, 23 nt, Human
gcuuccagugaggcucugcccuu

SEQ ID NO: 3019444 - RNA, 20 nt, Human
gcuugaccgugaggccagag

SEQ ID NO: 3019445 - RNA, 15 nt, Human
gcuucuucagagacu

SEQ ID NO: 3019446 - RNA, 12 nt, Human
gcuucuucagag

SEQ ID NO: 3019447 - RNA, 23 nt, Human
gcuuucuacccagcgagcccugg

SEQ ID NO: 3019448 - RNA, 18 nt, Human
gcuuguaaauagcucagg

SEQ ID NO: 3019449 - RNA, 19 nt, Human
gcuuguaaauagcucaggu

SEQ ID NO: 3019450 - RNA, 17 nt, Human
gcuuguaaauagcucag

SEQ ID NO: 3019451 - RNA, 18 nt, Human
gcuugaccuuuaagagaa

SEQ ID NO: 3019452 - RNA, 23 nt, Human
gcuugaccgugaggccagagaca

SEQ ID NO: 3019453 - RNA, 20 nt, Human
ggaagacuucaucccucugg

SEQ ID NO: 3019454 - RNA, 17 nt, Human
ggaagacuucaucccuc

SEQ ID NO: 3019455 - RNA, 14 nt, Human
ggaaaugggcagag

SEQ ID NO: 3019456 - RNA, 22 nt, Human
ggaaaugggcagagcagagacc

SEQ ID NO: 3019457 - RNA, 18 nt, Human
ggaaaugggcagagcaga

SEQ ID NO: 3019458 - RNA, 17 nt, Human
ggaaaugggcagagcag

SEQ ID NO: 3019459 - RNA, 16 nt, Human
ggaaaugggcagagca

SEQ ID NO: 3019460 - RNA, 15 nt, Human
ggaacaaggcaaggc

SEQ ID NO: 3019461 - RNA, 21 nt, Human
ggaacaaggcaaggcugucaa

SEQ ID NO: 3019462 - RNA, 17 nt, Human
ggaacaaggcaaggcug

SEQ ID NO: 3019463 - RNA, 13 nt, Human
ggaacaccuccuc

SEQ ID NO: 3019464 - RNA, 23 nt, Human
ggaacaaggcaaggcugucaauu

SEQ ID NO: 3019465 - RNA, 15 nt, Human
ggaacacuccuucac

SEQ ID NO: 3019466 - RNA, 16 nt, Human
ggaagacaaugugaaa

SEQ ID NO: 3019467 - RNA, 14 nt, Human
ggaagacaauguga

SEQ ID NO: 3019468 - RNA, 17 nt, Human
gcuuugaucccuucuua

SEQ ID NO: 3019469 - RNA, 14 nt, Human
gcuuugaucccuuc

SEQ ID NO: 3019470 - RNA, 15 nt, Human
gcuuuuggucugugu

SEQ ID NO: 3019471 - RNA, 18 nt, Human
gcuuuugucuaugggacu

SEQ ID NO: 3019472 - RNA, 18 nt, Human
ggaaaauuuuaaaaauac

SEQ ID NO: 3019473 - RNA, 16 nt, Human
ggaaacccagcucugg

SEQ ID NO: 3019474 - RNA, 12 nt, Human
gcuuuugugcau

SEQ ID NO: 3019475 - RNA, 15 nt, Human
gcccaggaguuuggc

SEQ ID NO: 3019476 - RNA, 16 nt, Human
gcccaggaguuuggcc

SEQ ID NO: 3019477 - RNA, 13 nt, Human
gcccaggaguuug

SEQ ID NO: 3019478 - RNA, 13 nt, Human
gcccaggcagguc

SEQ ID NO: 3019479 - RNA, 12 nt, Human
gcccaggcaggu

SEQ ID NO: 3019480 - RNA, 14 nt, Human
gcccaggcaggucu

SEQ ID NO: 3019481 - RNA, 16 nt, Human
gcccaggcaggucuug

SEQ ID NO: 3019482 - RNA, 15 nt, Human
gcccaggccccugcc

SEQ ID NO: 3019483 - RNA, 13 nt, Human
gcccaggccccug

SEQ ID NO: 3019484 - RNA, 14 nt, Human
gccaugugccaggu

SEQ ID NO: 3019485 - RNA, 17 nt, Human
gcccaggaguuuggcca

SEQ ID NO: 3019486 - RNA, 17 nt, Human
gcccaggccccugccac

SEQ ID NO: 3019487 - RNA, 15 nt, Human
gccccacccucagau

SEQ ID NO: 3019488 - RNA, 18 nt, Human
gccccacccucagaugca

SEQ ID NO: 3019489 - RNA, 15 nt, Human
gccccugcccggcug

SEQ ID NO: 3019490 - RNA, 21 nt, Human
gccccugcugguucaggguug

SEQ ID NO: 3019491 - RNA, 22 nt, Human
gccccugcugguucaggguugg

SEQ ID NO: 3019492 - RNA, 15 nt, Human
gccccuggaugcagc

SEQ ID NO: 3019493 - RNA, 13 nt, Human
gccagugugacaa

SEQ ID NO: 3019494 - RNA, 13 nt, Human
gccaguugguccc

SEQ ID NO: 3019495 - RNA, 23 nt, Human
gccaguuggucccccuuccaugg

SEQ ID NO: 3019496 - RNA, 22 nt, Human
gccaguuggucccccuuccaug

SEQ ID NO: 3019497 - RNA, 21 nt, Human
gccaguuggucccccuuccau

SEQ ID NO: 3019498 - RNA, 20 nt, Human
gccaguuggucccccuucca

SEQ ID NO: 3019499 - RNA, 18 nt, Human
gccaguuggucccccuuc

SEQ ID NO: 3019500 - RNA, 16 nt, Human
gccaguuggucccccu

SEQ ID NO: 3019501 - RNA, 14 nt, Human
gccaggcccucugc

SEQ ID NO: 3019502 - RNA, 13 nt, Human
gccaggcccucug

SEQ ID NO: 3019503 - RNA, 18 nt, Human
gccaggccacaagacccu

SEQ ID NO: 3019504 - RNA, 13 nt, Human
gccaggccacaag

SEQ ID NO: 3019505 - RNA, 22 nt, Human
gccaggccagagggagugacag

SEQ ID NO: 3019506 - RNA, 15 nt, Human
gccaggccagaggga

SEQ ID NO: 3019507 - RNA, 21 nt, Human
gccaggccacaagacccuugu

SEQ ID NO: 3019508 - RNA, 23 nt, Human
gccagcaggcucucaggccagcu

SEQ ID NO: 3019509 - RNA, 13 nt, Human
gccugcuccagcu

SEQ ID NO: 3019510 - RNA, 17 nt, Human
gccugcuaauuccccag

SEQ ID NO: 3019511 - RNA, 23 nt, Human
gccugcuaauuccccagauugca

SEQ ID NO: 3019512 - RNA, 19 nt, Human
gccuccuuugugaggaagc

SEQ ID NO: 3019513 - RNA, 21 nt, Human
gccuccuuugugaggaagccg

SEQ ID NO: 3019514 - RNA, 20 nt, Human
gccuccuuugugaggaagcc

SEQ ID NO: 3019515 - RNA, 14 nt, Human
gcgugcacacacca

SEQ ID NO: 3019516 - RNA, 18 nt, Human
gcgugcacacaccagagc

SEQ ID NO: 3019517 - RNA, 20 nt, Human
gcgugguggacaugcacagc

SEQ ID NO: 3019518 - RNA, 19 nt, Human
gcuacuguccuacccaccc

SEQ ID NO: 3019519 - RNA, 20 nt, Human
gcuacuguccuacccacccu

SEQ ID NO: 3019520 - RNA, 16 nt, Human
gcuaauuuuucauuuu

SEQ ID NO: 3019521 - RNA, 17 nt, Human
gcguuucuaugacacau

SEQ ID NO: 3019522 - RNA, 13 nt, Human
gcgauucuucugc

SEQ ID NO: 3019523 - RNA, 14 nt, Human
gcgauucuucugcu

SEQ ID NO: 3019524 - RNA, 15 nt, Human
gguacacuugugaau

SEQ ID NO: 3019525 - RNA, 17 nt, Human
ggguuucuaaagcugcc

SEQ ID NO: 3019526 - RNA, 14 nt, Human
gguaacaggcagau

SEQ ID NO: 3019527 - RNA, 20 nt, Human
gguaacaggcagauacagga

SEQ ID NO: 3019528 - RNA, 13 nt, Human
gguaacaggcaga

SEQ ID NO: 3019529 - RNA, 17 nt, Human
ggguguggcgcagcaua

SEQ ID NO: 3019530 - RNA, 17 nt, Human
ggguggaugccuggugg

SEQ ID NO: 3019531 - RNA, 15 nt, Human
ggguggcaccagcag

SEQ ID NO: 3019532 - RNA, 13 nt, Human
ggguggaugccug

SEQ ID NO: 3019533 - RNA, 19 nt, Human
gggugggacacccugugau

SEQ ID NO: 3019534 - RNA, 20 nt, Human
ggguggggaccucaggccug

SEQ ID NO: 3019535 - RNA, 17 nt, Human
aaagacuaucuaaaugu

SEQ ID NO: 3019536 - RNA, 12 nt, Human
aaacuuuacuau

SEQ ID NO: 3019537 - RNA, 15 nt, Human
gguccauagagagca

SEQ ID NO: 3019538 - RNA, 17 nt, Human
aaacuuuaccuuuuuua

SEQ ID NO: 3019539 - RNA, 22 nt, Human
aaacuuuaccuuuuuuauacau

SEQ ID NO: 3019540 - RNA, 22 nt, Human
gguaugaucacggcucacugca

SEQ ID NO: 3019541 - RNA, 14 nt, Human
gguaugcaaucaaa

SEQ ID NO: 3019542 - RNA, 17 nt, Human
gguccacccaggagccc

SEQ ID NO: 3019543 - RNA, 12 nt, Human
gguccacccagg

SEQ ID NO: 3019544 - RNA, 13 nt, Human
gguccacccagga

SEQ ID NO: 3019545 - RNA, 15 nt, Human
gguccacccaggagc

SEQ ID NO: 3019546 - RNA, 16 nt, Human
gguccacccaggagcc

SEQ ID NO: 3019547 - RNA, 21 nt, Human
ggucuguuuuguguacuuuua

SEQ ID NO: 3019548 - RNA, 18 nt, Human
ggugcaaugaccuuucaa

SEQ ID NO: 3019549 - RNA, 20 nt, Human
ggugcaaugaccuuucaaua

SEQ ID NO: 3019550 - RNA, 19 nt, Human
ggugcaaugaccuuucaau

SEQ ID NO: 3019551 - RNA, 16 nt, Human
ggugcaaugaccuuuc

SEQ ID NO: 3019552 - RNA, 21 nt, Human
ggugcauuugaggucuguucu

SEQ ID NO: 3019553 - RNA, 21 nt, Human
gguggaugccugguggcagcu

SEQ ID NO: 3019554 - RNA, 14 nt, Human
gguggaugccuggu

SEQ ID NO: 3019555 - RNA, 16 nt, Human
aaagcagcguuucuau

SEQ ID NO: 3019556 - RNA, 18 nt, Human
aaagcagcguuucuauga

SEQ ID NO: 3019557 - RNA, 22 nt, Human
aaagcagcguuucuaugacaca

SEQ ID NO: 3019558 - RNA, 15 nt, Human
aaagcagcguuucua

SEQ ID NO: 3019559 - RNA, 13 nt, Human
aaagcaaaggaga

SEQ ID NO: 3019560 - RNA, 23 nt, Human
gguccuagaaauuccccacccug

SEQ ID NO: 3019561 - RNA, 23 nt, Human
gguccugcugcaguugccaguca

SEQ ID NO: 3019562 - RNA, 21 nt, Human
gguccugcugcaguugccagu

SEQ ID NO: 3019563 - RNA, 14 nt, Human
ggucggaaaacaug

SEQ ID NO: 3019564 - RNA, 17 nt, Human
ggucuacacugugcuga

SEQ ID NO: 3019565 - RNA, 13 nt, Human
ggucggaaaacau

SEQ ID NO: 3019566 - RNA, 14 nt, Human
gguccugcugcagu

SEQ ID NO: 3019567 - RNA, 11 nt, Human
gguuuauuugg

SEQ ID NO: 3019568 - RNA, 12 nt, Human
gguuucuagcau

SEQ ID NO: 3019569 - RNA, 14 nt, Human
gguuucagaaaugu

SEQ ID NO: 3019570 - RNA, 12 nt, Human
gguuucagaaau

SEQ ID NO: 3019571 - RNA, 13 nt, Human
gguuucagaaaug

SEQ ID NO: 3019572 - RNA, 21 nt, Human
gguucccuuugacgccauccc

SEQ ID NO: 3019573 - RNA, 22 nt, Human
gguucaggguuggccccugccc

SEQ ID NO: 3019574 - RNA, 18 nt, Human
gguucaggguuggccccu

SEQ ID NO: 3019575 - RNA, 21 nt, Human
gguucaggguuggccccugcc

SEQ ID NO: 3019576 - RNA, 12 nt, Human
gguucagcuugu

SEQ ID NO: 3019577 - RNA, 12 nt, Human
gguguggaagag

SEQ ID NO: 3019578 - RNA, 13 nt, Human
ggugugcucugau

SEQ ID NO: 3019579 - RNA, 21 nt, Human
ggugugcggccuuuggcuuca

SEQ ID NO: 3019580 - RNA, 18 nt, Human
gguggggcagugcuuggc

SEQ ID NO: 3019581 - RNA, 17 nt, Human
gguggggcagcuugagg

SEQ ID NO: 3019582 - RNA, 13 nt, Human
gguggggcagcuu

SEQ ID NO: 3019583 - RNA, 19 nt, Human
ggugggauccuccaggugc

SEQ ID NO: 3019584 - RNA, 20 nt, Human
ggugggaggaucucuugagc

SEQ ID NO: 3019585 - RNA, 20 nt, Human
ggugggaggauugcuugagc

SEQ ID NO: 3019586 - RNA, 15 nt, Human
ggugggauccuccag

SEQ ID NO: 3019587 - RNA, 14 nt, Human
ggugggauccucca

SEQ ID NO: 3019588 - RNA, 23 nt, Human
gguggggucacucuggcagcuca

SEQ ID NO: 3019589 - RNA, 15 nt, Human
gguggggucacucug

SEQ ID NO: 3019590 - RNA, 16 nt, Human
ggugucgggcaugaca

SEQ ID NO: 3019591 - RNA, 13 nt, Human
ggugucgggcaug

SEQ ID NO: 3019592 - RNA, 18 nt, Human
ggugugagucaccaagcc

SEQ ID NO: 3019593 - RNA, 16 nt, Human
ggugugacugaauuuc

SEQ ID NO: 3019594 - RNA, 22 nt, Human
aaauaaggaaugauauaagguu

SEQ ID NO: 3019595 - RNA, 12 nt, Human
aaauaaugugaa

SEQ ID NO: 3019596 - RNA, 13 nt, Human
aaauaaugugaaa

SEQ ID NO: 3019597 - RNA, 12 nt, Human
aaaguggugaga

SEQ ID NO: 3019598 - RNA, 21 nt, Human
aaaguuucucuuuucaaaaca

SEQ ID NO: 3019599 - RNA, 23 nt, Human
aaaguuucucuuuucaaaacauu

SEQ ID NO: 3019600 - RNA, 16 nt, Human
aaacagucucccuucc

SEQ ID NO: 3019601 - RNA, 18 nt, Human
aaacaagaccacguuucu

SEQ ID NO: 3019602 - RNA, 20 nt, Human
aaacaagaccacguuucuaa

SEQ ID NO: 3019603 - RNA, 12 nt, Human
aaacacauuuuu

SEQ ID NO: 3019604 - RNA, 16 nt, Human
aaacacauuuuucuua

SEQ ID NO: 3019605 - RNA, 12 nt, Human
ggggacagcucc

SEQ ID NO: 3019606 - RNA, 14 nt, Human
ggggacagcuccuu

SEQ ID NO: 3019607 - RNA, 20 nt, Human
ggggacagcuccuucugucc

SEQ ID NO: 3019608 - RNA, 15 nt, Human
ggggccucagugcca

SEQ ID NO: 3019609 - RNA, 21 nt, Human
gggcugcaugcgggcuuccuc

SEQ ID NO: 3019610 - RNA, 18 nt, Human
gggcugcaugcgggcuuc

SEQ ID NO: 3019611 - RNA, 10 nt, Human
gggcucagca

SEQ ID NO: 3019612 - RNA, 22 nt, Human
gggcugcaccggcuggccuggc

SEQ ID NO: 3019613 - RNA, 20 nt, Human
gggcuggguucuacccaggu

SEQ ID NO: 3019614 - RNA, 22 nt, Human
gggcuggguucuacccaggugc

SEQ ID NO: 3019615 - RNA, 19 nt, Human
gggcccuuuuucaauaacu

SEQ ID NO: 3019616 - RNA, 23 nt, Human
gggccaguuggucccccuuccau

SEQ ID NO: 3019617 - RNA, 22 nt, Human
gggccaguuggucccccuucca

SEQ ID NO: 3019618 - RNA, 18 nt, Human
gggccaguuggucccccu

SEQ ID NO: 3019619 - RNA, 14 nt, Human
gggccaguuggucc

SEQ ID NO: 3019620 - RNA, 19 nt, Human
gggccucuuaugggcuggg

SEQ ID NO: 3019621 - RNA, 20 nt, Human
gggccucuuaugggcugggu

SEQ ID NO: 3019622 - RNA, 15 nt, Human
gggccuccugugugu

SEQ ID NO: 3019623 - RNA, 13 nt, Human
gggccuccugugu

SEQ ID NO: 3019624 - RNA, 15 nt, Human
gggcgggaggauguu

SEQ ID NO: 3019625 - RNA, 18 nt, Human
gggcuaguugggcuuccu

SEQ ID NO: 3019626 - RNA, 11 nt, Human
gggccaggagc

SEQ ID NO: 3019627 - RNA, 21 nt, Human
aaaaugagccuggcaagaaug

SEQ ID NO: 3019628 - RNA, 14 nt, Human
aaaaugagccuggc

SEQ ID NO: 3019629 - RNA, 22 nt, Human
aaaagggguaggguuuaaagau

SEQ ID NO: 3019630 - RNA, 15 nt, Human
gggauuacaggugug

SEQ ID NO: 3019631 - RNA, 17 nt, Human
gggauugaaggaugcug

SEQ ID NO: 3019632 - RNA, 16 nt, Human
gggcaacccccagccu

SEQ ID NO: 3019633 - RNA, 18 nt, Human
gggcaacccccagccugc

SEQ ID NO: 3019634 - RNA, 12 nt, Human
gggcagagcaga

SEQ ID NO: 3019635 - RNA, 16 nt, Human
gggcagagcagagacc

SEQ ID NO: 3019636 - RNA, 14 nt, Human
gggcagaggaaagc

SEQ ID NO: 3019637 - RNA, 22 nt, Human
gggcagagcagagaccaucccu

SEQ ID NO: 3019638 - RNA, 17 nt, Human
gggcagagcagagacca

SEQ ID NO: 3019639 - RNA, 15 nt, Human
gggaggucgaggcag

SEQ ID NO: 3019640 - RNA, 17 nt, Human
gggagggcuccagacac

SEQ ID NO: 3019641 - RNA, 15 nt, Human
gggagggcuccagac

SEQ ID NO: 3019642 - RNA, 14 nt, Human
gggagggcuccaga

SEQ ID NO: 3019643 - RNA, 19 nt, Human
gggaggucgaggcaggagg

SEQ ID NO: 3019644 - RNA, 18 nt, Human
gggaggucgaggcaggag

SEQ ID NO: 3019645 - RNA, 18 nt, Human
gggagggcuccagacaca

SEQ ID NO: 3019646 - RNA, 17 nt, Human
gggaggucgaggcagga

SEQ ID NO: 3019647 - RNA, 19 nt, Human
gggaggccaaggugggagg

SEQ ID NO: 3019648 - RNA, 13 nt, Human
gggaaggauacaa

SEQ ID NO: 3019649 - RNA, 16 nt, Human
gggacagcuccuucug

SEQ ID NO: 3019650 - RNA, 23 nt, Human
gggacagaggggguggccuccca

SEQ ID NO: 3019651 - RNA, 22 nt, Human
gggacagaggggguggccuccc

SEQ ID NO: 3019652 - RNA, 13 nt, Human
gggacagaggggg

SEQ ID NO: 3019653 - RNA, 21 nt, Human
gggacagcuccuucuguccua

SEQ ID NO: 3019654 - RNA, 22 nt, Human
aaaacugcugacuguuuucucu

SEQ ID NO: 3019655 - RNA, 20 nt, Human
aaaacugcugacuguuuucu

SEQ ID NO: 3019656 - RNA, 23 nt, Human
aaaacugcugacuguuuucucuu

SEQ ID NO: 3019657 - RNA, 13 nt, Human
aaaagaugcuucu

SEQ ID NO: 3019658 - RNA, 14 nt, Human
aaaaaucucaaauu

SEQ ID NO: 3019659 - RNA, 15 nt, Human
aaaacaugcuacaca

SEQ ID NO: 3019660 - RNA, 21 nt, Human
aaaaccaauguucucucuucu

SEQ ID NO: 3019661 - RNA, 14 nt, Human
ggaguuuggccaga

SEQ ID NO: 3019662 - RNA, 15 nt, Human
ggaguuuggccagaa

SEQ ID NO: 3019663 - RNA, 13 nt, Human
ggaguuuggccag

SEQ ID NO: 3019664 - RNA, 15 nt, Human
ggaguucugguuccu

SEQ ID NO: 3019665 - RNA, 14 nt, Human
ggaguggccacaga

SEQ ID NO: 3019666 - RNA, 19 nt, Human
ggaucuguauguguucuau

SEQ ID NO: 3019667 - RNA, 18 nt, Human
ggaucuguauguguucua

SEQ ID NO: 3019668 - RNA, 14 nt, Human
ggauccugagccag

SEQ ID NO: 3019669 - RNA, 13 nt, Human
ggauccugagcca

SEQ ID NO: 3019670 - RNA, 14 nt, Human
ggauccuccaggug

SEQ ID NO: 3019671 - RNA, 15 nt, Human
ggauccuccaggugc

SEQ ID NO: 3019672 - RNA, 16 nt, Human
ggauggggcugcaccg

SEQ ID NO: 3019673 - RNA, 18 nt, Human
ggauggauuuccagccaa

SEQ ID NO: 3019674 - RNA, 15 nt, Human
ggagugcagugagcc

SEQ ID NO: 3019675 - RNA, 24 nt, Human
ggcacagaaaauggaagacagcuc

SEQ ID NO: 3019676 - RNA, 15 nt, Human
ggauguucugggaca

SEQ ID NO: 3019677 - RNA, 16 nt, Human
ggauguucugggacac

SEQ ID NO: 3019678 - RNA, 13 nt, Human
ggauguucuggga

SEQ ID NO: 3019679 - RNA, 14 nt, Human
ggaggugaccccag

SEQ ID NO: 3019680 - RNA, 20 nt, Human
ggaggucaaggcugcaguga

SEQ ID NO: 3019681 - RNA, 16 nt, Human
ggaggggggagguggg

SEQ ID NO: 3019682 - RNA, 19 nt, Human
ggaggaaggaaacccagcu

SEQ ID NO: 3019683 - RNA, 23 nt, Human
ggaggaaggaaacccagcucugg

SEQ ID NO: 3019684 - RNA, 20 nt, Human
ggaggaaggaaacccagcuc

SEQ ID NO: 3019685 - RNA, 11 nt, Human
ggaggccagcc

SEQ ID NO: 3019686 - RNA, 20 nt, Human
ggaggccaaggugggaggau

SEQ ID NO: 3019687 - RNA, 21 nt, Human
ggagcugccuguucagcucca

SEQ ID NO: 3019688 - RNA, 16 nt, Human
ggagcugaguggggga

SEQ ID NO: 3019689 - RNA, 12 nt, Human
ggagcugccugu

SEQ ID NO: 3019690 - RNA, 16 nt, Human
ggagccccgaggccuu

SEQ ID NO: 3019691 - RNA, 22 nt, Human
ggagccccgaggccuucucuga

SEQ ID NO: 3019692 - RNA, 11 nt, Human
ggcccaggagu

SEQ ID NO: 3019693 - RNA, 13 nt, Human
ggcccaggaguuu

SEQ ID NO: 3019694 - RNA, 18 nt, Human
ggcccaggaguuuggcca

SEQ ID NO: 3019695 - RNA, 19 nt, Human
ggcccaggaguuuggccag

SEQ ID NO: 3019696 - RNA, 20 nt, Human
ggcccaggaguuuggccaga

SEQ ID NO: 3019697 - RNA, 18 nt, Human
ggcccuucucuccagccc

SEQ ID NO: 3019698 - RNA, 14 nt, Human
ggcccuuccuuuuc

SEQ ID NO: 3019699 - RNA, 17 nt, Human
ggcccuucucuccagcc

SEQ ID NO: 3019700 - RNA, 16 nt, Human
ggcccuucucuccagc

SEQ ID NO: 3019701 - RNA, 18 nt, Human
ggcagugggagcugccug

SEQ ID NO: 3019702 - RNA, 19 nt, Human
ggcagugggagcugccugu

SEQ ID NO: 3019703 - RNA, 18 nt, Human
ggcauccaguaucuugaa

SEQ ID NO: 3019704 - RNA, 17 nt, Human
ggcagugggagcugccu

SEQ ID NO: 3019705 - RNA, 24 nt, Human
ggcacugcuuccagugaggcucug

SEQ ID NO: 3019706 - RNA, 22 nt, Human
ggcacugcuuccagugaggcuc

SEQ ID NO: 3019707 - RNA, 16 nt, Human
ggcaccagcagccugg

SEQ ID NO: 3019708 - RNA, 15 nt, Human
ggcaccagcagccug

SEQ ID NO: 3019709 - RNA, 16 nt, Human
ggccagugugacaagg

SEQ ID NO: 3019710 - RNA, 17 nt, Human
ggccaaacucaccugcc

SEQ ID NO: 3019711 - RNA, 16 nt, Human
ggccaggcuggucuca

SEQ ID NO: 3019712 - RNA, 18 nt, Human
ggccaggcuggucucaaa

SEQ ID NO: 3019713 - RNA, 12 nt, Human
ggccaggcuggu

SEQ ID NO: 3019714 - RNA, 14 nt, Human
ggccaggcuggucu

SEQ ID NO: 3019715 - RNA, 19 nt, Human
ggcgugcaguggugcgauc

SEQ ID NO: 3019716 - RNA, 14 nt, Human
ggcgugcaguggug

SEQ ID NO: 3019717 - RNA, 16 nt, Human
ggcucacugcagccuc

SEQ ID NO: 3019718 - RNA, 17 nt, Human
ggcucacugcagccuca

SEQ ID NO: 3019719 - RNA, 21 nt, Human
ggcucagcggggacagcuccu

SEQ ID NO: 3019720 - RNA, 22 nt, Human
ggcucagcggggacagcuccuu

SEQ ID NO: 3019721 - RNA, 23 nt, Human
ggcucagcggggacagcuccuuc

SEQ ID NO: 3019722 - RNA, 19 nt, Human
ggcucagcaaaagaugcuu

SEQ ID NO: 3019723 - RNA, 23 nt, Human
ggcucagcaaaagaugcuucuca

SEQ ID NO: 3019724 - RNA, 12 nt, Human
ggccugagcugg

SEQ ID NO: 3019725 - RNA, 15 nt, Human
ggccugagcugggau

SEQ ID NO: 3019726 - RNA, 14 nt, Human
ggccuuuggcuuca

SEQ ID NO: 3019727 - RNA, 15 nt, Human
ggccuucucugaagg

SEQ ID NO: 3019728 - RNA, 16 nt, Human
ggccuucucugaagga

SEQ ID NO: 3019729 - RNA, 13 nt, Human
ggccuuuggcuuc

SEQ ID NO: 3019730 - RNA, 21 nt, Human
ggccuggccagaugcaccagc

SEQ ID NO: 3019731 - RNA, 21 nt, Human
ggccugugucuaguuguuuga

SEQ ID NO: 3019732 - RNA, 12 nt, Human
ggccuucucuga

SEQ ID NO: 3019733 - RNA, 20 nt, Human
gagaagucuucuauuuauuu

SEQ ID NO: 3019734 - RNA, 21 nt, Human
gagaagucuucuauuuauuua

SEQ ID NO: 3019735 - RNA, 15 nt, Human
gagaagcggcuggca

SEQ ID NO: 3019736 - RNA, 13 nt, Human
gagaagcggcugg

SEQ ID NO: 3019737 - RNA, 12 nt, Human
gagaaggaagcc

SEQ ID NO: 3019738 - RNA, 23 nt, Human
gacuuuucuguccgagcuuugaa

SEQ ID NO: 3019739 - RNA, 21 nt, Human
gacuuuucuuuguggcuuccu

SEQ ID NO: 3019740 - RNA, 23 nt, Human
gacuuuucuuucagccaagaauu

SEQ ID NO: 3019741 - RNA, 22 nt, Human
gacuauuuuuguuuuuauuaaa

SEQ ID NO: 3019742 - RNA, 21 nt, Human
gacuauuuuuguuuuuauuaa

SEQ ID NO: 3019743 - RNA, 12 nt, Human
gacucugucuca

SEQ ID NO: 3019744 - RNA, 18 nt, Human
gacuauuuuuguuuuuau

SEQ ID NO: 3019745 - RNA, 17 nt, Human
gacuauuuuuguuuuua

SEQ ID NO: 3019746 - RNA, 13 nt, Human
gacuauuuuuguu

SEQ ID NO: 3019747 - RNA, 22 nt, Human
gacuaucuaaauguugaaagau

SEQ ID NO: 3019748 - RNA, 13 nt, Human
gagauuuacaacu

SEQ ID NO: 3019749 - RNA, 18 nt, Human
gagauugcaccacugcac

SEQ ID NO: 3019750 - RNA, 21 nt, Human
gagaugaugccaugggcccuc

SEQ ID NO: 3019751 - RNA, 22 nt, Human
gagaggcauccaguaucuugaa

SEQ ID NO: 3019752 - RNA, 14 nt, Human
gagaggcauccagu

SEQ ID NO: 3019753 - RNA, 17 nt, Human
gagacuccugcaggcag

SEQ ID NO: 3019754 - RNA, 16 nt, Human
gagacuccugcaggca

SEQ ID NO: 3019755 - RNA, 15 nt, Human
gagacuccugcaggc

SEQ ID NO: 3019756 - RNA, 14 nt, Human
gagacuccugcagg

SEQ ID NO: 3019757 - RNA, 18 nt, Human
gagcugggugucaagagg

SEQ ID NO: 3019758 - RNA, 17 nt, Human
gagcggagaaaggaagg

SEQ ID NO: 3019759 - RNA, 21 nt, Human
gagcggagaaaggaagggcug

SEQ ID NO: 3019760 - RNA, 18 nt, Human
gagcggagaaaggaaggg

SEQ ID NO: 3019761 - RNA, 20 nt, Human
gagcugccuguucagcucca

SEQ ID NO: 3019762 - RNA, 21 nt, Human
gagcugccuguucagcuccag

SEQ ID NO: 3019763 - RNA, 22 nt, Human
gagcugccuguucagcuccagc

SEQ ID NO: 3019764 - RNA, 22 nt, Human
gagccuugaacuuugaccucug

SEQ ID NO: 3019765 - RNA, 19 nt, Human
gagccuugaacuuugaccu

SEQ ID NO: 3019766 - RNA, 17 nt, Human
gagccuuccaggggugg

SEQ ID NO: 3019767 - RNA, 16 nt, Human
gagccuuccaggggug

SEQ ID NO: 3019768 - RNA, 15 nt, Human
gagccuuccaggggu

SEQ ID NO: 3019769 - RNA, 14 nt, Human
gagccuuccagggg

SEQ ID NO: 3019770 - RNA, 14 nt, Human
gagcagggcucagc

SEQ ID NO: 3019771 - RNA, 12 nt, Human
gagcaucaggcc

SEQ ID NO: 3019772 - RNA, 21 nt, Human
gagcaugccuggauggggcug

SEQ ID NO: 3019773 - RNA, 22 nt, Human
gagcaugccuggauggggcugc

SEQ ID NO: 3019774 - RNA, 20 nt, Human
gacaggguuuugccauguug

SEQ ID NO: 3019775 - RNA, 22 nt, Human
gacaggguuuugccauguuggc

SEQ ID NO: 3019776 - RNA, 11 nt, Human
gacagcuccuu

SEQ ID NO: 3019777 - RNA, 23 nt, Human
gacagcccgggcucugccuccca

SEQ ID NO: 3019778 - RNA, 22 nt, Human
gacagcccgggcucugccuccc

SEQ ID NO: 3019779 - RNA, 21 nt, Human
gacagcccgggcucugccucc

SEQ ID NO: 3019780 - RNA, 20 nt, Human
gacagcccgggcucugccuc

SEQ ID NO: 3019781 - RNA, 13 nt, Human
gacacugaugggc

SEQ ID NO: 3019782 - RNA, 15 nt, Human
gacacugaugggcaa

SEQ ID NO: 3019783 - RNA, 21 nt, Human
gacacacagcucuguccuggg

SEQ ID NO: 3019784 - RNA, 21 nt, Human
gaauuuugugcccccauguaa

SEQ ID NO: 3019785 - RNA, 23 nt, Human
gaauuuuggcugugucucccuuc

SEQ ID NO: 3019786 - RNA, 20 nt, Human
gaauuuugugcccccaugua

SEQ ID NO: 3019787 - RNA, 14 nt, Human
gacacacagcucug

SEQ ID NO: 3019788 - RNA, 13 nt, Human
gacacacagcucu

SEQ ID NO: 3019789 - RNA, 15 nt, Human
gacacacagcucugu

SEQ ID NO: 3019790 - RNA, 17 nt, Human
gacacacagcucugucc

SEQ ID NO: 3019791 - RNA, 18 nt, Human
gacacacagcucuguccu

SEQ ID NO: 3019792 - RNA, 19 nt, Human
gacacacagcucuguccug

SEQ ID NO: 3019793 - RNA, 19 nt, Human
gaauuuuggcugugucucc

SEQ ID NO: 3019794 - RNA, 22 nt, Human
gaaugaaugucagugugacuga

SEQ ID NO: 3019795 - RNA, 18 nt, Human
gaaugaaugucaguguga

SEQ ID NO: 3019796 - RNA, 14 nt, Human
gaaugaaugucagu

SEQ ID NO: 3019797 - RNA, 11 nt, Human
gaaugaauguc

SEQ ID NO: 3019798 - RNA, 15 nt, Human
gaagcucagggccug

SEQ ID NO: 3019799 - RNA, 14 nt, Human
gaagcucagggccu

SEQ ID NO: 3019800 - RNA, 23 nt, Human
gaagcucagggccuggcucaggu

SEQ ID NO: 3019801 - RNA, 21 nt, Human
gaagcucagggccuggcucag

SEQ ID NO: 3019802 - RNA, 20 nt, Human
gaagcucagggccuggcuca

SEQ ID NO: 3019803 - RNA, 19 nt, Human
gaagcucagggccuggcuc

SEQ ID NO: 3019804 - RNA, 18 nt, Human
gaagcucagggccuggcu

SEQ ID NO: 3019805 - RNA, 17 nt, Human
gaagcucagggccuggc

SEQ ID NO: 3019806 - RNA, 16 nt, Human
gaagcucagggccugg

SEQ ID NO: 3019807 - RNA, 18 nt, Human
gaagucuuuguacagaca

SEQ ID NO: 3019808 - RNA, 20 nt, Human
gaagucuuuguacagacaac

SEQ ID NO: 3019809 - RNA, 19 nt, Human
gaagucuuuguacagacaa

SEQ ID NO: 3019810 - RNA, 17 nt, Human
gaaggcucgagcaugcc

SEQ ID NO: 3019811 - RNA, 16 nt, Human
gaaggcucgagcaugc

SEQ ID NO: 3019812 - RNA, 15 nt, Human
gcacaucuguuuugu

SEQ ID NO: 3019813 - RNA, 21 nt, Human
gcacaugagcuggcgggauug

SEQ ID NO: 3019814 - RNA, 13 nt, Human
gcacaugccucuc

SEQ ID NO: 3019815 - RNA, 21 nt, Human
gcacaucagcacgauuucugu

SEQ ID NO: 3019816 - RNA, 19 nt, Human
gcacaucagcacgauuucu

SEQ ID NO: 3019817 - RNA, 20 nt, Human
gcacaucagcacgauuucug

SEQ ID NO: 3019818 - RNA, 18 nt, Human
gcaccggcuggccuggcc

SEQ ID NO: 3019819 - RNA, 23 nt, Human
gcaccggcuggccuggccccuca

SEQ ID NO: 3019820 - RNA, 21 nt, Human
gcaccggcuggccuggccccu

SEQ ID NO: 3019821 - RNA, 19 nt, Human
gcaccggcuggccuggccc

SEQ ID NO: 3019822 - RNA, 21 nt, Human
gcacaugccucucucaggcca

SEQ ID NO: 3019823 - RNA, 20 nt, Human
gcacaugccucucucaggcc

SEQ ID NO: 3019824 - RNA, 19 nt, Human
gcacaugccucucucaggc

SEQ ID NO: 3019825 - RNA, 18 nt, Human
gcacaugccucucucagg

SEQ ID NO: 3019826 - RNA, 17 nt, Human
gcacaugccucucucag

SEQ ID NO: 3019827 - RNA, 14 nt, Human
gcacaugccucucu

SEQ ID NO: 3019828 - RNA, 21 nt, Human
gcaauaaagcagcguuucuau

SEQ ID NO: 3019829 - RNA, 22 nt, Human
gcacaagcuccaagcucccagg

SEQ ID NO: 3019830 - RNA, 21 nt, Human
gcacaagcuccaagcucccag

SEQ ID NO: 3019831 - RNA, 23 nt, Human
gcacaagcuccaagcucccaggc

SEQ ID NO: 3019832 - RNA, 14 nt, Human
gcacaagcugcacc

SEQ ID NO: 3019833 - RNA, 13 nt, Human
gcaagugagagcu

SEQ ID NO: 3019834 - RNA, 12 nt, Human
gcacugacauug

SEQ ID NO: 3019835 - RNA, 20 nt, Human
gcagagcagagaccaucccu

SEQ ID NO: 3019836 - RNA, 19 nt, Human
gcagagcagagaccauccc

SEQ ID NO: 3019837 - RNA, 15 nt, Human
gcagagcagagacca

SEQ ID NO: 3019838 - RNA, 14 nt, Human
gcagagcagagacc

SEQ ID NO: 3019839 - RNA, 12 nt, Human
gcagagcagaga

SEQ ID NO: 3019840 - RNA, 24 nt, Human
gcagagcaccuuagacagucccug

SEQ ID NO: 3019841 - RNA, 19 nt, Human
gcagagcaccuuagacagu

SEQ ID NO: 3019842 - RNA, 23 nt, Human
gcagagcaccuuagacagucccu

SEQ ID NO: 3019843 - RNA, 22 nt, Human
gcagagcaccuuagacaguccc

SEQ ID NO: 3019844 - RNA, 19 nt, Human
gcaguaaaaaaugguguuu

SEQ ID NO: 3019845 - RNA, 22 nt, Human
gcaguaaaaaaugguguuuuau

SEQ ID NO: 3019846 - RNA, 21 nt, Human
gcaguacuaacauuuauuuga

SEQ ID NO: 3019847 - RNA, 15 nt, Human
gcaguacuaacauuu

SEQ ID NO: 3019848 - RNA, 18 nt, Human
gcaggcucucaggccagc

SEQ ID NO: 3019849 - RNA, 23 nt, Human
gcaggcucucaggccagcugcuu

SEQ ID NO: 3019850 - RNA, 17 nt, Human
gcagcugcgguccaccc

SEQ ID NO: 3019851 - RNA, 19 nt, Human
gcagcugcgguccacccag

SEQ ID NO: 3019852 - RNA, 22 nt, Human
gcaggcucucaggccagcugcu

SEQ ID NO: 3019853 - RNA, 20 nt, Human
gcaggcucucaggccagcug

SEQ ID NO: 3019854 - RNA, 16 nt, Human
gcauaccacuuuuguu

SEQ ID NO: 3019855 - RNA, 14 nt, Human
gcauacguacacau

SEQ ID NO: 3019856 - RNA, 17 nt, Human
gcauaccacuuuuguuc

SEQ ID NO: 3019857 - RNA, 20 nt, Human
gcauaccacuuuuguucuug

SEQ ID NO: 3019858 - RNA, 14 nt, Human
gcagccaggccaca

SEQ ID NO: 3019859 - RNA, 13 nt, Human
gcagccaggccac

SEQ ID NO: 3019860 - RNA, 16 nt, Human
gcagccacauuccuga

SEQ ID NO: 3019861 - RNA, 14 nt, Human
gcagccacuauugu

SEQ ID NO: 3019862 - RNA, 12 nt, Human
gcagccaggcca

SEQ ID NO: 3019863 - RNA, 21 nt, Human
gagugcucaguagucagacug

SEQ ID NO: 3019864 - RNA, 18 nt, Human
gagugccuuacacaaugg

SEQ ID NO: 3019865 - RNA, 16 nt, Human
gaguuguuacauuuuu

SEQ ID NO: 3019866 - RNA, 20 nt, Human
gaguuguuacauuuuuaagu

SEQ ID NO: 3019867 - RNA, 12 nt, Human
gaguuuggccag

SEQ ID NO: 3019868 - RNA, 13 nt, Human
gaguuuggccaga

SEQ ID NO: 3019869 - RNA, 20 nt, Human
gaguuugggguaugggagag

SEQ ID NO: 3019870 - RNA, 14 nt, Human
gaguuuggccagaa

SEQ ID NO: 3019871 - RNA, 13 nt, Human
gaggucuguucuu

SEQ ID NO: 3019872 - RNA, 14 nt, Human
gaggucuguucuuu

SEQ ID NO: 3019873 - RNA, 11 nt, Human
gaggugggagg

SEQ ID NO: 3019874 - RNA, 12 nt, Human
gaggugggaucc

SEQ ID NO: 3019875 - RNA, 13 nt, Human
gagucaccaagcc

SEQ ID NO: 3019876 - RNA, 14 nt, Human
gagucaccaagccc

SEQ ID NO: 3019877 - RNA, 16 nt, Human
gagucccaccuuggcu

SEQ ID NO: 3019878 - RNA, 20 nt, Human
gagucccaccuuggcugcag

SEQ ID NO: 3019879 - RNA, 11 nt, Human
gagugcaguga

SEQ ID NO: 3019880 - RNA, 12 nt, Human
gagugcagugag

SEQ ID NO: 3019881 - RNA, 24 nt, Human
gagugagcacuaaggugugcucug

SEQ ID NO: 3019882 - RNA, 13 nt, Human
gagucccaccuug

SEQ ID NO: 3019883 - RNA, 12 nt, Human
gagugagcuggu

SEQ ID NO: 3019884 - RNA, 16 nt, Human
gauacuuauuuaaaua

SEQ ID NO: 3019885 - RNA, 19 nt, Human
gauacuuauuuaaauagau

SEQ ID NO: 3019886 - RNA, 13 nt, Human
gauacuuauuuaa

SEQ ID NO: 3019887 - RNA, 14 nt, Human
gauacccaucccau

SEQ ID NO: 3019888 - RNA, 13 nt, Human
gauacccauccca

SEQ ID NO: 3019889 - RNA, 16 nt, Human
gauacuacaguuuguu

SEQ ID NO: 3019890 - RNA, 11 nt, Human
gauacuacagu

SEQ ID NO: 3019891 - RNA, 16 nt, Human
gaugagaggaaaucac

SEQ ID NO: 3019892 - RNA, 20 nt, Human
gaugaucuuugcagacaggc

SEQ ID NO: 3019893 - RNA, 21 nt, Human
gaugaucuuugcagacaggca

SEQ ID NO: 3019894 - RNA, 14 nt, Human
gaugaucuuugcag

SEQ ID NO: 3019895 - RNA, 17 nt, Human
gaucucuugagccuggg

SEQ ID NO: 3019896 - RNA, 16 nt, Human
gaucucuugagccugg

SEQ ID NO: 3019897 - RNA, 12 nt, Human
gaucucuugagc

SEQ ID NO: 3019898 - RNA, 15 nt, Human
gauauuuugcuuugu

SEQ ID NO: 3019899 - RNA, 16 nt, Human
gauauuuugcuuugug

SEQ ID NO: 3019900 - RNA, 15 nt, Human
gauauuuuuuucuuu

SEQ ID NO: 3019901 - RNA, 20 nt, Human
gauuacaggugugaaccacc

SEQ ID NO: 3019902 - RNA, 15 nt, Human
cuucacgcccuuggc

SEQ ID NO: 3019903 - RNA, 17 nt, Human
cuucacgcccuuggcca

SEQ ID NO: 3019904 - RNA, 17 nt, Human
cuucagagacuccugca

SEQ ID NO: 3019905 - RNA, 16 nt, Human
cuucaguuugcagagu

SEQ ID NO: 3019906 - RNA, 17 nt, Human
cuucaguuugcagagua

SEQ ID NO: 3019907 - RNA, 20 nt, Human
cuucagagacuccugcaggc

SEQ ID NO: 3019908 - RNA, 19 nt, Human
cuucagagacuccugcagg

SEQ ID NO: 3019909 - RNA, 18 nt, Human
cuucagagacuccugcag

SEQ ID NO: 3019910 - RNA, 21 nt, Human
cuuccagugaggcucugcccu

SEQ ID NO: 3019911 - RNA, 23 nt, Human
cuuccagugaggcucugcccuug

SEQ ID NO: 3019912 - RNA, 22 nt, Human
cuuccagugaggcucugcccuu

SEQ ID NO: 3019913 - RNA, 23 nt, Human
cuucccaccucucucacuccuug

SEQ ID NO: 3019914 - RNA, 21 nt, Human
cuucccaccucucucacuccu

SEQ ID NO: 3019915 - RNA, 11 nt, Human
cuucccaccuc

SEQ ID NO: 3019916 - RNA, 16 nt, Human
cuuauggaacacucug

SEQ ID NO: 3019917 - RNA, 13 nt, Human
cuuauggaacacu

SEQ ID NO: 3019918 - RNA, 20 nt, Human
cuuauggaacacucugagac

SEQ ID NO: 3019919 - RNA, 19 nt, Human
cuuauggaacacucugaga

SEQ ID NO: 3019920 - RNA, 17 nt, Human
cuuauggaacacucuga

SEQ ID NO: 3019921 - RNA, 21 nt, Human
cuucaccuuuguccccaccgc

SEQ ID NO: 3019922 - RNA, 22 nt, Human
cuucaccuuuguccccaccgca

SEQ ID NO: 3019923 - RNA, 19 nt, Human
cuucacggaagagccuugc

SEQ ID NO: 3019924 - RNA, 15 nt, Human
cuucacggaagagcc

SEQ ID NO: 3019925 - RNA, 12 nt, Human
cugugcugaguc

SEQ ID NO: 3019926 - RNA, 14 nt, Human
cugugcugagucug

SEQ ID NO: 3019927 - RNA, 22 nt, Human
cuucuauuuauuuauuuauuca

SEQ ID NO: 3019928 - RNA, 17 nt, Human
cuuccugcaacaccuug

SEQ ID NO: 3019929 - RNA, 18 nt, Human
cuuccucccucccucuuu

SEQ ID NO: 3019930 - RNA, 23 nt, Human
cuucugacccaugcugcccugug

SEQ ID NO: 3019931 - RNA, 20 nt, Human
cuucugacccaugcugcccu

SEQ ID NO: 3019932 - RNA, 22 nt, Human
cuucugacccaugcugcccugu

SEQ ID NO: 3019933 - RNA, 21 nt, Human
cuucugacccaugcugcccug

SEQ ID NO: 3019934 - RNA, 23 nt, Human
cuucuucagagacuccugcaggc

SEQ ID NO: 3019935 - RNA, 16 nt, Human
cuugaagacuuuucuu

SEQ ID NO: 3019936 - RNA, 18 nt, Human
cuugaauuguaaggaaug

SEQ ID NO: 3019937 - RNA, 19 nt, Human
cuugaauuguaaggaauga

SEQ ID NO: 3019938 - RNA, 14 nt, Human
cuugacagggcaca

SEQ ID NO: 3019939 - RNA, 15 nt, Human
cuugacagggcacac

SEQ ID NO: 3019940 - RNA, 13 nt, Human
cuugacagggcac

SEQ ID NO: 3019941 - RNA, 20 nt, Human
cuuggcgcugccccuggcag

SEQ ID NO: 3019942 - RNA, 12 nt, Human
cuuggcgcugcc

SEQ ID NO: 3019943 - RNA, 17 nt, Human
cuuggcgcugccccugg

SEQ ID NO: 3019944 - RNA, 14 nt, Human
cuuggcgcugcccc

SEQ ID NO: 3019945 - RNA, 20 nt, Human
gaaaaaauuuacuuuaaacu

SEQ ID NO: 3019946 - RNA, 23 nt, Human
cuuuuuuggcugcugaaggcucg

SEQ ID NO: 3019947 - RNA, 12 nt, Human
cuuuugugcauu

SEQ ID NO: 3019948 - RNA, 13 nt, Human
cuuuugugcauua

SEQ ID NO: 3019949 - RNA, 23 nt, Human
cuuuugcauauugcauacuauua

SEQ ID NO: 3019950 - RNA, 23 nt, Human
cuuuugcccacacuugggagcaa

SEQ ID NO: 3019951 - RNA, 18 nt, Human
cuuuugucuaugggacuc

SEQ ID NO: 3019952 - RNA, 18 nt, Human
gaaaagaaaaaugagccu

SEQ ID NO: 3019953 - RNA, 21 nt, Human
gaaaauggaagacagcucuua

SEQ ID NO: 3019954 - RNA, 14 nt, Human
gaaaaacugauuuu

SEQ ID NO: 3019955 - RNA, 23 nt, Human
gaaaauggacguguuaugacucc

SEQ ID NO: 3019956 - RNA, 19 nt, Human
gaaaauggacguguuauga

SEQ ID NO: 3019957 - RNA, 15 nt, Human
gaaaauguaugugua

SEQ ID NO: 3019958 - RNA, 20 nt, Human
gaaagacuaucuaaauguug

SEQ ID NO: 3019959 - RNA, 21 nt, Human
gaaaggcuccaggagcagcca

SEQ ID NO: 3019960 - RNA, 22 nt, Human
gaaaggcuccaggagcagccac

SEQ ID NO: 3019961 - RNA, 20 nt, Human
gaaaggcuccaggagcagcc

SEQ ID NO: 3019962 - RNA, 19 nt, Human
gaaaucaccgaaaacgugg

SEQ ID NO: 3019963 - RNA, 19 nt, Human
gaaagggacuuggaagcuc

SEQ ID NO: 3019964 - RNA, 20 nt, Human
gaaagggacgcuacccggga

SEQ ID NO: 3019965 - RNA, 22 nt, Human
gaaagggacuuggaagcuccgc

SEQ ID NO: 3019966 - RNA, 22 nt, Human
cuuuuaugauugccuuuuuaua

SEQ ID NO: 3019967 - RNA, 13 nt, Human
cuuuuauaaacuu

SEQ ID NO: 3019968 - RNA, 17 nt, Human
cuuugggccuggcuccc

SEQ ID NO: 3019969 - RNA, 17 nt, Human
cuuucuacccagcgagc

SEQ ID NO: 3019970 - RNA, 15 nt, Human
cuuucuagccagagg

SEQ ID NO: 3019971 - RNA, 16 nt, Human
cuuucuagccagagga

SEQ ID NO: 3019972 - RNA, 22 nt, Human
cuuuccugaggcugggcucccu

SEQ ID NO: 3019973 - RNA, 20 nt, Human
cuuucagccaagaauucuua

SEQ ID NO: 3019974 - RNA, 23 nt, Human
cuuucagccaagaauucuuaaau

SEQ ID NO: 3019975 - RNA, 23 nt, Human
cuuucaauaggaaaaacugauuu

SEQ ID NO: 3019976 - RNA, 22 nt, Human
cugguuuuaaauauuuugacuu

SEQ ID NO: 3019977 - RNA, 18 nt, Human
cuguaggaagguuaaugu

SEQ ID NO: 3019978 - RNA, 21 nt, Human
cuguaggaagguuaauguuca

SEQ ID NO: 3019979 - RNA, 18 nt, Human
cugucagccauuccuguu

SEQ ID NO: 3019980 - RNA, 17 nt, Human
cugucauuugagcaggg

SEQ ID NO: 3019981 - RNA, 18 nt, Human
cugucauuugagcagggc

SEQ ID NO: 3019982 - RNA, 16 nt, Human
cugucauuugagcagg

SEQ ID NO: 3019983 - RNA, 16 nt, Human
cugguuuguucccugu

SEQ ID NO: 3019984 - RNA, 13 nt, Human
cugucgcccaguc

SEQ ID NO: 3019985 - RNA, 15 nt, Human
cugugaagagaacca

SEQ ID NO: 3019986 - RNA, 14 nt, Human
cugugcucuggaca

SEQ ID NO: 3019987 - RNA, 19 nt, Human
cugugcucuggacaggcau

SEQ ID NO: 3019988 - RNA, 13 nt, Human
cuggccccucagg

SEQ ID NO: 3019989 - RNA, 12 nt, Human
cuggcagcucag

SEQ ID NO: 3019990 - RNA, 14 nt, Human
cuggcagcucagag

SEQ ID NO: 3019991 - RNA, 13 nt, Human
cuggcagcucaga

SEQ ID NO: 3019992 - RNA, 21 nt, Human
cuggccccucagggucccugg

SEQ ID NO: 3019993 - RNA, 20 nt, Human
cuggccccucagggucccug

SEQ ID NO: 3019994 - RNA, 18 nt, Human
cuggccccucaggguccc

SEQ ID NO: 3019995 - RNA, 17 nt, Human
cuggccccucagggucc

SEQ ID NO: 3019996 - RNA, 12 nt, Human
cugggacacagu

SEQ ID NO: 3019997 - RNA, 13 nt, Human
cugggacacaguu

SEQ ID NO: 3019998 - RNA, 23 nt, Human
cuggugacuuuccucuuuggucu

SEQ ID NO: 3019999 - RNA, 16 nt, Human
cuggguguggcgcagc

SEQ ID NO: 3020000 - RNA, 17 nt, Human
cuggguguggcgcagca

SEQ ID NO: 3020001 - RNA, 22 nt, Human
cuggguggcaccagcagccugg

SEQ ID NO: 3020002 - RNA, 23 nt, Human
cuggguggcaccagcagccugga

SEQ ID NO: 3020003 - RNA, 14 nt, Human
cuggguucacugca

SEQ ID NO: 3020004 - RNA, 15 nt, Human
cuggugacuuuccuc

SEQ ID NO: 3020005 - RNA, 21 nt, Human
cuggugacuuuccucuuuggu

SEQ ID NO: 3020006 - RNA, 20 nt, Human
cuggugacuuuccucuuugg

SEQ ID NO: 3020007 - RNA, 17 nt, Human
cugggcagaaggaagac

SEQ ID NO: 3020008 - RNA, 16 nt, Human
cuggggccgaaagaac

SEQ ID NO: 3020009 - RNA, 18 nt, Human
cugggcagaaggaagacu

SEQ ID NO: 3020010 - RNA, 16 nt, Human
cugggcagaaggaaga

SEQ ID NO: 3020011 - RNA, 18 nt, Human
cugccaauauccuaauaa

SEQ ID NO: 3020012 - RNA, 19 nt, Human
cugccaauauccuaauaaa

SEQ ID NO: 3020013 - RNA, 20 nt, Human
cugccaauauccuaauaaaa

SEQ ID NO: 3020014 - RNA, 22 nt, Human
cugccaauauccuaauaaaaag

SEQ ID NO: 3020015 - RNA, 17 nt, Human
cugccaaugggagcuca

SEQ ID NO: 3020016 - RNA, 15 nt, Human
cugccaaugggagcu

SEQ ID NO: 3020017 - RNA, 13 nt, Human
cugccaauauccu

SEQ ID NO: 3020018 - RNA, 14 nt, Human
cugccaauauccua

SEQ ID NO: 3020019 - RNA, 16 nt, Human
cugccaauauccuaau

SEQ ID NO: 3020020 - RNA, 17 nt, Human
cugccaauauccuaaua

SEQ ID NO: 3020021 - RNA, 15 nt, Human
cugcauguuugugau

SEQ ID NO: 3020022 - RNA, 13 nt, Human
cugcauguuacau

SEQ ID NO: 3020023 - RNA, 20 nt, Human
cugcauuuaaaagauacagu

SEQ ID NO: 3020024 - RNA, 22 nt, Human
cugcauuuaaaagauacaguua

SEQ ID NO: 3020025 - RNA, 18 nt, Human
cugcauuuaaaagauaca

SEQ ID NO: 3020026 - RNA, 11 nt, Human
cugccagggac

SEQ ID NO: 3020027 - RNA, 15 nt, Human
cugccagggacagag

SEQ ID NO: 3020028 - RNA, 12 nt, Human
cugccagggaca

SEQ ID NO: 3020029 - RNA, 20 nt, Human
cugccauauucuguuggcca

SEQ ID NO: 3020030 - RNA, 21 nt, Human
cugccauauucuguuggccag

SEQ ID NO: 3020031 - RNA, 22 nt, Human
cugccauauucuguuggccagu

SEQ ID NO: 3020032 - RNA, 23 nt, Human
cugccauauucuguuggccagug

SEQ ID NO: 3020033 - RNA, 12 nt, Human
cugcccugugag

SEQ ID NO: 3020034 - RNA, 18 nt, Human
cugcccugugggccccca

SEQ ID NO: 3020035 - RNA, 16 nt, Human
cugcccugugggcccc

SEQ ID NO: 3020036 - RNA, 15 nt, Human
cugcccugugggccc

SEQ ID NO: 3020037 - RNA, 13 nt, Human
cugcccugugagu

SEQ ID NO: 3020038 - RNA, 22 nt, Human
cugccccucaacucuccuccag

SEQ ID NO: 3020039 - RNA, 14 nt, Human
cugccccucaacuc

SEQ ID NO: 3020040 - RNA, 19 nt, Human
cugagacucgcgacaaugc

SEQ ID NO: 3020041 - RNA, 17 nt, Human
cugagacucgcgacaau

SEQ ID NO: 3020042 - RNA, 21 nt, Human
cugcugacagacacaggcccg

SEQ ID NO: 3020043 - RNA, 23 nt, Human
cugcugacagacacaggcccggc

SEQ ID NO: 3020044 - RNA, 15 nt, Human
cugcugacagacaca

SEQ ID NO: 3020045 - RNA, 18 nt, Human
cugcugacagacacaggc

SEQ ID NO: 3020046 - RNA, 19 nt, Human
cugcugacagacacaggcc

SEQ ID NO: 3020047 - RNA, 20 nt, Human
cugcugacagacacaggccc

SEQ ID NO: 3020048 - RNA, 13 nt, Human
cugcuuaacuuca

SEQ ID NO: 3020049 - RNA, 13 nt, Human
cugcuucagccuc

SEQ ID NO: 3020050 - RNA, 15 nt, Human
cugcuuaacuucaca

SEQ ID NO: 3020051 - RNA, 17 nt, Human
cugcuuaacuucacaua

SEQ ID NO: 3020052 - RNA, 14 nt, Human
cugcuucagccucc

SEQ ID NO: 3020053 - RNA, 16 nt, Human
cugcuucagccucccg

SEQ ID NO: 3020054 - RNA, 22 nt, Human
cugcuuuuuaaagaaugcucuu

SEQ ID NO: 3020055 - RNA, 17 nt, Human
cuggaacacuaaugagg

SEQ ID NO: 3020056 - RNA, 16 nt, Human
cuggaaauauuaagaa

SEQ ID NO: 3020057 - RNA, 14 nt, Human
cugcccugugggcc

SEQ ID NO: 3020058 - RNA, 16 nt, Human
cugcuaauuccccaga

SEQ ID NO: 3020059 - RNA, 19 nt, Human
cugccuguugggccaggag

SEQ ID NO: 3020060 - RNA, 18 nt, Human
cugccuguugggccagga

SEQ ID NO: 3020061 - RNA, 14 nt, Human
cugccuguugggcc

SEQ ID NO: 3020062 - RNA, 16 nt, Human
cugccuguugggccag

SEQ ID NO: 3020063 - RNA, 15 nt, Human
cugcuacagagcaga

SEQ ID NO: 3020064 - RNA, 23 nt, Human
cugccugggaucccucauccuca

SEQ ID NO: 3020065 - RNA, 14 nt, Human
cugccuguucagcu

SEQ ID NO: 3020066 - RNA, 15 nt, Human
cugccuguucagcuc

SEQ ID NO: 3020067 - RNA, 15 nt, Human
cugccucgaacuggc

SEQ ID NO: 3020068 - RNA, 17 nt, Human
cugccucgaacuggcug

SEQ ID NO: 3020069 - RNA, 18 nt, Human
cugccucgaacuggcugc

SEQ ID NO: 3020070 - RNA, 22 nt, Human
cugccugggaucccucauccuc

SEQ ID NO: 3020071 - RNA, 18 nt, Human
uguucacuggacacuuca

SEQ ID NO: 3020072 - RNA, 19 nt, Human
uguuaguaugaggcauuug

SEQ ID NO: 3020073 - RNA, 20 nt, Human
uguuaguaugaggcauuugu

SEQ ID NO: 3020074 - RNA, 17 nt, Human
uguuaguaugaggcauu

SEQ ID NO: 3020075 - RNA, 18 nt, Human
uguucagcuccagcucac

SEQ ID NO: 3020076 - RNA, 20 nt, Human
uguucagcuccagcucacca

SEQ ID NO: 3020077 - RNA, 21 nt, Human
uguucagcuccagcucaccag

SEQ ID NO: 3020078 - RNA, 22 nt, Human
uguucagcuccagcucaccagc

SEQ ID NO: 3020079 - RNA, 14 nt, Human
uguuacuaaguuuu

SEQ ID NO: 3020080 - RNA, 14 nt, Human
uguguggucaacau

SEQ ID NO: 3020081 - RNA, 23 nt, Human
uguguggucaacauuucucaugu

SEQ ID NO: 3020082 - RNA, 13 nt, Human
uguguuuauuguc

SEQ ID NO: 3020083 - RNA, 16 nt, Human
uguguuuauugucaaa

SEQ ID NO: 3020084 - RNA, 19 nt, Human
ugugugcacguacacacac

SEQ ID NO: 3020085 - RNA, 15 nt, Human
uguuggccaggcugg

SEQ ID NO: 3020086 - RNA, 16 nt, Human
uguuggccaggcuggu

SEQ ID NO: 3020087 - RNA, 17 nt, Human
uguuggcugggggccuc

SEQ ID NO: 3020088 - RNA, 19 nt, Human
uguuggcugggggccucag

SEQ ID NO: 3020089 - RNA, 16 nt, Human
uguucucucuucucca

SEQ ID NO: 3020090 - RNA, 15 nt, Human
uguucucucuucucc

SEQ ID NO: 3020091 - RNA, 19 nt, Human
uguucaucauccuaagcua

SEQ ID NO: 3020092 - RNA, 12 nt, Human
uguucuggcucu

SEQ ID NO: 3020093 - RNA, 16 nt, Human
uguucuggcucuucca

SEQ ID NO: 3020094 - RNA, 13 nt, Human
uguucuggcucuu

SEQ ID NO: 3020095 - RNA, 16 nt, Human
uguucucugcccucca

SEQ ID NO: 3020096 - RNA, 15 nt, Human
uguucucugcccucc

SEQ ID NO: 3020097 - RNA, 14 nt, Human
uguucucugcccuc

SEQ ID NO: 3020098 - RNA, 13 nt, Human
uguucucugcccu

SEQ ID NO: 3020099 - RNA, 23 nt, Human
uguucuuucuggcuaugcauuug

SEQ ID NO: 3020100 - RNA, 21 nt, Human
uguucuggcucuuccaggcug

SEQ ID NO: 3020101 - RNA, 20 nt, Human
uguucuggcucuuccaggcu

SEQ ID NO: 3020102 - RNA, 17 nt, Human
uguucuggcucuuccag

SEQ ID NO: 3020103 - RNA, 22 nt, Human
uuaaacuacauuagguugugaa

SEQ ID NO: 3020104 - RNA, 23 nt, Human
uuaaacuacauuagguugugaau

SEQ ID NO: 3020105 - RNA, 22 nt, Human
uuaaacuuaaucuaaauggaac

SEQ ID NO: 3020106 - RNA, 14 nt, Human
uuaaaacccaagug

SEQ ID NO: 3020107 - RNA, 20 nt, Human
uuaaauauuuugacuuguug

SEQ ID NO: 3020108 - RNA, 11 nt, Human
uuaaaugacuc

SEQ ID NO: 3020109 - RNA, 18 nt, Human
uuaaaugacucuucccuc

SEQ ID NO: 3020110 - RNA, 14 nt, Human
uuaaaugcccagcc

SEQ ID NO: 3020111 - RNA, 16 nt, Human
uuaaaugcccagcccc

SEQ ID NO: 3020112 - RNA, 15 nt, Human
uuaaaugcccagccc

SEQ ID NO: 3020113 - RNA, 18 nt, Human
uguuucuggcuuagaaca

SEQ ID NO: 3020114 - RNA, 16 nt, Human
uguuuuaagaggcagg

SEQ ID NO: 3020115 - RNA, 17 nt, Human
uguuuuaagaggcaggg

SEQ ID NO: 3020116 - RNA, 19 nt, Human
uguuuuaaggaugcuugua

SEQ ID NO: 3020117 - RNA, 22 nt, Human
uguuuuaaggaugcuuguacau

SEQ ID NO: 3020118 - RNA, 23 nt, Human
uguuuuaaggaugcuuguacaua

SEQ ID NO: 3020119 - RNA, 22 nt, Human
uuaauuaaaacacaacaucuuu

SEQ ID NO: 3020120 - RNA, 13 nt, Human
uuacacuuuaugc

SEQ ID NO: 3020121 - RNA, 20 nt, Human
uuacacuuuaugcacaaaau

SEQ ID NO: 3020122 - RNA, 12 nt, Human
uuacauuuuuaa

SEQ ID NO: 3020123 - RNA, 17 nt, Human
uuacauuuuuaagugcu

SEQ ID NO: 3020124 - RNA, 12 nt, Human
uuaacuuuuaua

SEQ ID NO: 3020125 - RNA, 13 nt, Human
uuaacuuuuauaa

SEQ ID NO: 3020126 - RNA, 13 nt, Human
uuaaaugcccagc

SEQ ID NO: 3020127 - RNA, 14 nt, Human
uuaacuuuuauaaa

SEQ ID NO: 3020128 - RNA, 20 nt, Human
uguaauaaacucauuucuag

SEQ ID NO: 3020129 - RNA, 13 nt, Human
uguacagagccca

SEQ ID NO: 3020130 - RNA, 17 nt, Human
uguacagagcccacgcc

SEQ ID NO: 3020131 - RNA, 16 nt, Human
uguacagagcccacgc

SEQ ID NO: 3020132 - RNA, 18 nt, Human
uguacagagcccacgccc

SEQ ID NO: 3020133 - RNA, 15 nt, Human
uguacgucugacagg

SEQ ID NO: 3020134 - RNA, 19 nt, Human
uguacugcauaugaaagga

SEQ ID NO: 3020135 - RNA, 22 nt, Human
uguauucucuccuguaccucuu

SEQ ID NO: 3020136 - RNA, 13 nt, Human
ugucacacacuuu

SEQ ID NO: 3020137 - RNA, 17 nt, Human
ugucacacacuuuggcu

SEQ ID NO: 3020138 - RNA, 12 nt, Human
ugucacaggcag

SEQ ID NO: 3020139 - RNA, 19 nt, Human
uguauuuuacuaauaaaau

SEQ ID NO: 3020140 - RNA, 13 nt, Human
uguccccaccgca

SEQ ID NO: 3020141 - RNA, 22 nt, Human
uguccccaccgcagacaggacc

SEQ ID NO: 3020142 - RNA, 19 nt, Human
uguccccaccgcagacagg

SEQ ID NO: 3020143 - RNA, 18 nt, Human
uguccccaccgcagacag

SEQ ID NO: 3020144 - RNA, 12 nt, Human
uguccuacucug

SEQ ID NO: 3020145 - RNA, 17 nt, Human
uguccuacucuguguca

SEQ ID NO: 3020146 - RNA, 20 nt, Human
uguccuacccacccuccuuu

SEQ ID NO: 3020147 - RNA, 17 nt, Human
uguccccgacccuugcc

SEQ ID NO: 3020148 - RNA, 16 nt, Human
uguccccgacccuugc

SEQ ID NO: 3020149 - RNA, 13 nt, Human
ugucaccugaaga

SEQ ID NO: 3020150 - RNA, 16 nt, Human
ugucauuugagcaggg

SEQ ID NO: 3020151 - RNA, 19 nt, Human
ugucauuugagcagggcuc

SEQ ID NO: 3020152 - RNA, 23 nt, Human
ugucccaaaaagaaaggagggga

SEQ ID NO: 3020153 - RNA, 23 nt, Human
ugugaaggcaggggaauguaugu

SEQ ID NO: 3020154 - RNA, 15 nt, Human
ugugacauguuuuau

SEQ ID NO: 3020155 - RNA, 12 nt, Human
ugugaggaagcc

SEQ ID NO: 3020156 - RNA, 20 nt, Human
ugugaggaagccgcuggggc

SEQ ID NO: 3020157 - RNA, 18 nt, Human
ugugaggaagccgcuggg

SEQ ID NO: 3020158 - RNA, 13 nt, Human
ugugaggaagccg

SEQ ID NO: 3020159 - RNA, 19 nt, Human
ugugagucaccaagcccag

SEQ ID NO: 3020160 - RNA, 21 nt, Human
ugugagucaccaagcccaguu

SEQ ID NO: 3020161 - RNA, 15 nt, Human
ugugagucaccaagc

SEQ ID NO: 3020162 - RNA, 17 nt, Human
ugugagucaccaagccc

SEQ ID NO: 3020163 - RNA, 14 nt, Human
ugucuuuggacccu

SEQ ID NO: 3020164 - RNA, 21 nt, Human
ugucuuuucuugcaugaggcu

SEQ ID NO: 3020165 - RNA, 16 nt, Human
ugucuuuggacccuga

SEQ ID NO: 3020166 - RNA, 21 nt, Human
ugugaaaagaaaaaugagccu

SEQ ID NO: 3020167 - RNA, 23 nt, Human
ugugaaaagaaaaaugagccugg

SEQ ID NO: 3020168 - RNA, 23 nt, Human
ugucuuuucuugcaugaggcuag

SEQ ID NO: 3020169 - RNA, 17 nt, Human
ugugcacaucuguuuug

SEQ ID NO: 3020170 - RNA, 15 nt, Human
ugugcacaucuguuu

SEQ ID NO: 3020171 - RNA, 14 nt, Human
ugugcacguacaca

SEQ ID NO: 3020172 - RNA, 16 nt, Human
ugugcauuaucuagau

SEQ ID NO: 3020173 - RNA, 19 nt, Human
ugugcauuaucuagauacu

SEQ ID NO: 3020174 - RNA, 14 nt, Human
ugugcauuaucuag

SEQ ID NO: 3020175 - RNA, 23 nt, Human
ugugcauuaucuagauacuguau

SEQ ID NO: 3020176 - RNA, 20 nt, Human
ugugcauuaucuagauacug

SEQ ID NO: 3020177 - RNA, 21 nt, Human
ugugcauuaucuagauacugu

SEQ ID NO: 3020178 - RNA, 14 nt, Human
ugugcgccuacagg

SEQ ID NO: 3020179 - RNA, 19 nt, Human
ugugcgccuacaggaguga

SEQ ID NO: 3020180 - RNA, 12 nt, Human
uguguagggcgg

SEQ ID NO: 3020181 - RNA, 22 nt, Human
ugugggcuaguugggcuuccuc

SEQ ID NO: 3020182 - RNA, 18 nt, Human
uguggacacagcucuucu

SEQ ID NO: 3020183 - RNA, 16 nt, Human
uguggacacagcucuu

SEQ ID NO: 3020184 - RNA, 19 nt, Human
uguggacacagcucuucuc

SEQ ID NO: 3020185 - RNA, 23 nt, Human
uguggcgcagcauauucaggaag

SEQ ID NO: 3020186 - RNA, 21 nt, Human
ugcuuuaccaauugaaguaaa

SEQ ID NO: 3020187 - RNA, 20 nt, Human
uggaaaaauagccugccucu

SEQ ID NO: 3020188 - RNA, 17 nt, Human
uggaaaaauagccugcc

SEQ ID NO: 3020189 - RNA, 21 nt, Human
uggaaagacuuuuccaacccu

SEQ ID NO: 3020190 - RNA, 20 nt, Human
uggaaagaguaggaagacuu

SEQ ID NO: 3020191 - RNA, 19 nt, Human
uggacaugcacagcuaaca

SEQ ID NO: 3020192 - RNA, 13 nt, Human
uggacaugcacag

SEQ ID NO: 3020193 - RNA, 14 nt, Human
uggaauaacaugua

SEQ ID NO: 3020194 - RNA, 15 nt, Human
uggaauaacauguaa

SEQ ID NO: 3020195 - RNA, 19 nt, Human
uggaauaacauguaauuaa

SEQ ID NO: 3020196 - RNA, 15 nt, Human
uggaauauauaacca

SEQ ID NO: 3020197 - RNA, 16 nt, Human
uggaauauauaaccag

SEQ ID NO: 3020198 - RNA, 17 nt, Human
uggaauaaggagaauga

SEQ ID NO: 3020199 - RNA, 12 nt, Human
uggcccaggagu

SEQ ID NO: 3020200 - RNA, 22 nt, Human
uggcccaggaguuuggccagaa

SEQ ID NO: 3020201 - RNA, 20 nt, Human
uggcccaggaguuuggccag

SEQ ID NO: 3020202 - RNA, 21 nt, Human
uggcccaggaguuuggccaga

SEQ ID NO: 3020203 - RNA, 14 nt, Human
uggcccaggaguuu

SEQ ID NO: 3020204 - RNA, 19 nt, Human
uggcccaggaguuuggcca

SEQ ID NO: 3020205 - RNA, 13 nt, Human
uggcccaggaguu

SEQ ID NO: 3020206 - RNA, 20 nt, Human
uggccagaugcaccagcccu

SEQ ID NO: 3020207 - RNA, 21 nt, Human
uggccagaugcaccagcccuu

SEQ ID NO: 3020208 - RNA, 21 nt, Human
uggcacccggccccugcuggu

SEQ ID NO: 3020209 - RNA, 13 nt, Human
uggcagcugcuuu

SEQ ID NO: 3020210 - RNA, 20 nt, Human
uggauuuaacagaaauguac

SEQ ID NO: 3020211 - RNA, 24 nt, Human
uggauuuaacagaaauguacagca

SEQ ID NO: 3020212 - RNA, 20 nt, Human
uggaggaaggaaacccagcu

SEQ ID NO: 3020213 - RNA, 18 nt, Human
uggaggaaggaaacccag

SEQ ID NO: 3020214 - RNA, 12 nt, Human
uggaggaaggaa

SEQ ID NO: 3020215 - RNA, 15 nt, Human
ugguaguuuuacagu

SEQ ID NO: 3020216 - RNA, 18 nt, Human
uggguuucuaaagcugcc

SEQ ID NO: 3020217 - RNA, 17 nt, Human
uggguuucuaaagcugc

SEQ ID NO: 3020218 - RNA, 21 nt, Human
uggguuucuaaagcugccagc

SEQ ID NO: 3020219 - RNA, 23 nt, Human
ugguauuggcuagagguucaaag

SEQ ID NO: 3020220 - RNA, 16 nt, Human
uggguaacuagggaag

SEQ ID NO: 3020221 - RNA, 19 nt, Human
ugggguuuaucagaauucu

SEQ ID NO: 3020222 - RNA, 14 nt, Human
uggguguggcgcag

SEQ ID NO: 3020223 - RNA, 22 nt, Human
uggguucuacccaggugcuagg

SEQ ID NO: 3020224 - RNA, 16 nt, Human
uggguucuacccaggu

SEQ ID NO: 3020225 - RNA, 15 nt, Human
uggguucuacccagg

SEQ ID NO: 3020226 - RNA, 16 nt, Human
ugggcuaguugggcuu

SEQ ID NO: 3020227 - RNA, 17 nt, Human
ugggcuggugucaccug

SEQ ID NO: 3020228 - RNA, 23 nt, Human
ugggcuggguucuacccaggugc

SEQ ID NO: 3020229 - RNA, 22 nt, Human
ugggcuaagugauccucccacc

SEQ ID NO: 3020230 - RNA, 16 nt, Human
ugggcagaggaaagca

SEQ ID NO: 3020231 - RNA, 17 nt, Human
ugggcuucaguggcagc

SEQ ID NO: 3020232 - RNA, 15 nt, Human
ugggcuucaguggca

SEQ ID NO: 3020233 - RNA, 12 nt, Human
ugggggugcauu

SEQ ID NO: 3020234 - RNA, 15 nt, Human
ugggggugcauuuga

SEQ ID NO: 3020235 - RNA, 18 nt, Human
ugggggcugggcagagga

SEQ ID NO: 3020236 - RNA, 17 nt, Human
ugggggcugggcagagg

SEQ ID NO: 3020237 - RNA, 20 nt, Human
ugggggaucacagccucuga

SEQ ID NO: 3020238 - RNA, 21 nt, Human
ugggggaucacagccucugaa

SEQ ID NO: 3020239 - RNA, 21 nt, Human
uggcugcuucaaggauccuga

SEQ ID NO: 3020240 - RNA, 16 nt, Human
uggcugcuucaaggau

SEQ ID NO: 3020241 - RNA, 21 nt, Human
uggcugggggccucagugcca

SEQ ID NO: 3020242 - RNA, 22 nt, Human
uggcuuccuaaaauucagugga

SEQ ID NO: 3020243 - RNA, 14 nt, Human
uggcuuuugugcau

SEQ ID NO: 3020244 - RNA, 12 nt, Human
ugggacacccug

SEQ ID NO: 3020245 - RNA, 12 nt, Human
ugggagcugccu

SEQ ID NO: 3020246 - RNA, 13 nt, Human
ugggagcugccug

SEQ ID NO: 3020247 - RNA, 14 nt, Human
ugggagcugccugu

SEQ ID NO: 3020248 - RNA, 13 nt, Human
ugggagcaaaaga

SEQ ID NO: 3020249 - RNA, 15 nt, Human
ugggcagaggaaagc

SEQ ID NO: 3020250 - RNA, 16 nt, Human
ugggauuacaggugug

SEQ ID NO: 3020251 - RNA, 13 nt, Human
ugggauccuggag

SEQ ID NO: 3020252 - RNA, 18 nt, Human
ugggauccuccaggugca

SEQ ID NO: 3020253 - RNA, 15 nt, Human
ugggagugagcuggu

SEQ ID NO: 3020254 - RNA, 14 nt, Human
ugggauccuccagg

SEQ ID NO: 3020255 - RNA, 15 nt, Human
ugggauccuccaggu

SEQ ID NO: 3020256 - RNA, 17 nt, Human
ugggagcugccuguuca

SEQ ID NO: 3020257 - RNA, 21 nt, Human
ugggagcugccuguucagcuc

SEQ ID NO: 3020258 - RNA, 22 nt, Human
ugggagcugccuguucagcucc

SEQ ID NO: 3020259 - RNA, 19 nt, Human
ugcacgcacacugucugcc

SEQ ID NO: 3020260 - RNA, 17 nt, Human
ugcacgcacacugucug

SEQ ID NO: 3020261 - RNA, 17 nt, Human
ugcaccgggccacagag

SEQ ID NO: 3020262 - RNA, 22 nt, Human
ugcaccgggccacagagaaagu

SEQ ID NO: 3020263 - RNA, 14 nt, Human
ugcaccgggccaca

SEQ ID NO: 3020264 - RNA, 15 nt, Human
ugcaccgggccacag

SEQ ID NO: 3020265 - RNA, 23 nt, Human
ugcaccggcuggccuggccccuc

SEQ ID NO: 3020266 - RNA, 19 nt, Human
ugaguccccuguuuguuuc

SEQ ID NO: 3020267 - RNA, 14 nt, Human
ugcacuuuguucug

SEQ ID NO: 3020268 - RNA, 12 nt, Human
ugcacuuuguuc

SEQ ID NO: 3020269 - RNA, 20 nt, Human
ugcagcaauaaagcagcguu

SEQ ID NO: 3020270 - RNA, 23 nt, Human
ugcagcaauaaagcagcguuucu

SEQ ID NO: 3020271 - RNA, 15 nt, Human
ugcaguugccaguca

SEQ ID NO: 3020272 - RNA, 14 nt, Human
ugcaguugccaguc

SEQ ID NO: 3020273 - RNA, 13 nt, Human
ugcaguugccagu

SEQ ID NO: 3020274 - RNA, 22 nt, Human
ugcagugguaugaucacggcuc

SEQ ID NO: 3020275 - RNA, 15 nt, Human
ugcaggcagccaggc

SEQ ID NO: 3020276 - RNA, 19 nt, Human
ugcaggcagccaggccaca

SEQ ID NO: 3020277 - RNA, 14 nt, Human
ugcaggcagccagg

SEQ ID NO: 3020278 - RNA, 13 nt, Human
ugcaggcagccag

SEQ ID NO: 3020279 - RNA, 16 nt, Human
ugcagugcuuccaagg

SEQ ID NO: 3020280 - RNA, 14 nt, Human
ugcaucaagaugug

SEQ ID NO: 3020281 - RNA, 18 nt, Human
ugccagguuuuuggucug

SEQ ID NO: 3020282 - RNA, 19 nt, Human
ugccagguuuuuggucuga

SEQ ID NO: 3020283 - RNA, 22 nt, Human
ugccagguuuuuggucugaccc

SEQ ID NO: 3020284 - RNA, 22 nt, Human
ugccacuacggaauaguuggcu

SEQ ID NO: 3020285 - RNA, 19 nt, Human
ugccacccuggggagaaag

SEQ ID NO: 3020286 - RNA, 19 nt, Human
ugccccucaacucuccucc

SEQ ID NO: 3020287 - RNA, 17 nt, Human
ugccccuggcagccccu

SEQ ID NO: 3020288 - RNA, 23 nt, Human
ugccccucaacucuccuccagag

SEQ ID NO: 3020289 - RNA, 11 nt, Human
ugcccaggcug

SEQ ID NO: 3020290 - RNA, 16 nt, Human
ugcccacucccugcaa

SEQ ID NO: 3020291 - RNA, 15 nt, Human
ugcccacucccugca

SEQ ID NO: 3020292 - RNA, 14 nt, Human
ugcccacucccugc

SEQ ID NO: 3020293 - RNA, 13 nt, Human
ugcccaccuggcc

SEQ ID NO: 3020294 - RNA, 13 nt, Human
ugcccacucccug

SEQ ID NO: 3020295 - RNA, 21 nt, Human
ugccauccagguucagcuugu

SEQ ID NO: 3020296 - RNA, 20 nt, Human
ugccauccagguucagcuug

SEQ ID NO: 3020297 - RNA, 16 nt, Human
ugcucaguagucagac

SEQ ID NO: 3020298 - RNA, 14 nt, Human
ugcuccucucccca

SEQ ID NO: 3020299 - RNA, 15 nt, Human
ugcucacauaucugu

SEQ ID NO: 3020300 - RNA, 16 nt, Human
ugcucacauaucuguc

SEQ ID NO: 3020301 - RNA, 18 nt, Human
ugcuccuuucuuguuuua

SEQ ID NO: 3020302 - RNA, 17 nt, Human
ugcuccucuccccagca

SEQ ID NO: 3020303 - RNA, 14 nt, Human
ugcugauuuaaaca

SEQ ID NO: 3020304 - RNA, 17 nt, Human
ugcugauuuaaacacau

SEQ ID NO: 3020305 - RNA, 15 nt, Human
ugcugauuuaaacac

SEQ ID NO: 3020306 - RNA, 13 nt, Human
ugcugauggugca

SEQ ID NO: 3020307 - RNA, 17 nt, Human
ugcugauggugcaauga

SEQ ID NO: 3020308 - RNA, 15 nt, Human
ugcugauggugcaau

SEQ ID NO: 3020309 - RNA, 22 nt, Human
ugcugacagacacaggcccggc

SEQ ID NO: 3020310 - RNA, 23 nt, Human
ugcugacagacacaggcccggcu

SEQ ID NO: 3020311 - RNA, 19 nt, Human
ugcugacagacacaggccc

SEQ ID NO: 3020312 - RNA, 13 nt, Human
ugcugaaggcucg

SEQ ID NO: 3020313 - RNA, 12 nt, Human
ugcugaaggcuc

SEQ ID NO: 3020314 - RNA, 13 nt, Human
ugcugcuggcugg

SEQ ID NO: 3020315 - RNA, 23 nt, Human
ugcugcaguugccagucaccccg

SEQ ID NO: 3020316 - RNA, 18 nt, Human
ugcugcaguugccaguca

SEQ ID NO: 3020317 - RNA, 16 nt, Human
ugcugcaguugccagu

SEQ ID NO: 3020318 - RNA, 23 nt, Human
ugcuaacagcaacacaaagcuuu

SEQ ID NO: 3020319 - RNA, 22 nt, Human
ugcuaacagcaacacaaagcuu

SEQ ID NO: 3020320 - RNA, 21 nt, Human
ugcuaacagcaacacaaagcu

SEQ ID NO: 3020321 - RNA, 15 nt, Human
ugcuaaaugugaaug

SEQ ID NO: 3020322 - RNA, 13 nt, Human
ugcgccuacagga

SEQ ID NO: 3020323 - RNA, 22 nt, Human
ugcgccuacaggagugagcacu

SEQ ID NO: 3020324 - RNA, 14 nt, Human
ugcgccuacaggag

SEQ ID NO: 3020325 - RNA, 16 nt, Human
ugcgccuacaggagug

SEQ ID NO: 3020326 - RNA, 14 nt, Human
ugcgaucuggguuc

SEQ ID NO: 3020327 - RNA, 15 nt, Human
ugcgaucuggguuca

SEQ ID NO: 3020328 - RNA, 19 nt, Human
ugcgaucuggguucacugc

SEQ ID NO: 3020329 - RNA, 20 nt, Human
ugcgaucuggguucacugca

SEQ ID NO: 3020330 - RNA, 21 nt, Human
ugcgaucuggguucacugcaa

SEQ ID NO: 3020331 - RNA, 18 nt, Human
ugccccuggcagccccug

SEQ ID NO: 3020332 - RNA, 20 nt, Human
ugccucgaacuggcugcaaa

SEQ ID NO: 3020333 - RNA, 18 nt, Human
ugccucgaacuggcugca

SEQ ID NO: 3020334 - RNA, 19 nt, Human
ugccucgaacuggcugcaa

SEQ ID NO: 3020335 - RNA, 18 nt, Human
ugccugggcagaaggaag

SEQ ID NO: 3020336 - RNA, 21 nt, Human
ugccugggaucccucauccuc

SEQ ID NO: 3020337 - RNA, 14 nt, Human
ugccugguggcagc

SEQ ID NO: 3020338 - RNA, 15 nt, Human
ugccugguggcagcu

SEQ ID NO: 3020339 - RNA, 16 nt, Human
ugccugguggcagcug

SEQ ID NO: 3020340 - RNA, 14 nt, Human
ucggagcccugucu

SEQ ID NO: 3020341 - RNA, 15 nt, Human
ucggagcccugucuc

SEQ ID NO: 3020342 - RNA, 23 nt, Human
ucgucacugcuuaacuucacaua

SEQ ID NO: 3020343 - RNA, 14 nt, Human
ucgcccagucugga

SEQ ID NO: 3020344 - RNA, 19 nt, Human
ucgcccagucuggaaugca

SEQ ID NO: 3020345 - RNA, 23 nt, Human
ucgcccagucuggaaugcagugg

SEQ ID NO: 3020346 - RNA, 15 nt, Human
ucggaaaacaugcua

SEQ ID NO: 3020347 - RNA, 18 nt, Human
ucggaaaacaugcuacac

SEQ ID NO: 3020348 - RNA, 17 nt, Human
ucgcaggauucuuccuc

SEQ ID NO: 3020349 - RNA, 21 nt, Human
ucgcaggauucuuccucccuc

SEQ ID NO: 3020350 - RNA, 23 nt, Human
ucgcaggauucuuccucccuccc

SEQ ID NO: 3020351 - RNA, 22 nt, Human
uccuuuucgcaggauucuuccu

SEQ ID NO: 3020352 - RNA, 18 nt, Human
uccuuuucgcaggauucu

SEQ ID NO: 3020353 - RNA, 22 nt, Human
uccuuggugucgggcaugacac

SEQ ID NO: 3020354 - RNA, 17 nt, Human
uccuuugugaggaagcc

SEQ ID NO: 3020355 - RNA, 22 nt, Human
uccuuugugaggaagccgcugg

SEQ ID NO: 3020356 - RNA, 18 nt, Human
uccuuugugaggaagccg

SEQ ID NO: 3020357 - RNA, 21 nt, Human
uccuuggugucgggcaugaca

SEQ ID NO: 3020358 - RNA, 18 nt, Human
uccuuggugucgggcaug

SEQ ID NO: 3020359 - RNA, 23 nt, Human
uccuugaaaacacuguucucugc

SEQ ID NO: 3020360 - RNA, 22 nt, Human
uccuugaaaacacuguucucug

SEQ ID NO: 3020361 - RNA, 21 nt, Human
uccuuaccagcagagcaccuu

SEQ ID NO: 3020362 - RNA, 20 nt, Human
uccuuaccagcagagcaccu

SEQ ID NO: 3020363 - RNA, 18 nt, Human
ucuaggaggucucuaaga

SEQ ID NO: 3020364 - RNA, 18 nt, Human
ucuacucuagggaaaaac

SEQ ID NO: 3020365 - RNA, 21 nt, Human
ucuacucgaguuacagacaaa

SEQ ID NO: 3020366 - RNA, 20 nt, Human
ucuacucgaguuacagacaa

SEQ ID NO: 3020367 - RNA, 12 nt, Human
ucuagggaaaaa

SEQ ID NO: 3020368 - RNA, 14 nt, Human
ucuaauauguaaca

SEQ ID NO: 3020369 - RNA, 14 nt, Human
ucucacuguugccc

SEQ ID NO: 3020370 - RNA, 15 nt, Human
ucucacuguugccca

SEQ ID NO: 3020371 - RNA, 23 nt, Human
ucucacucugucgcccagucugg

SEQ ID NO: 3020372 - RNA, 21 nt, Human
ucucacacaugagcaucaggc

SEQ ID NO: 3020373 - RNA, 20 nt, Human
ucucacugccaugccagcuu

SEQ ID NO: 3020374 - RNA, 16 nt, Human
ucucacacaugagcau

SEQ ID NO: 3020375 - RNA, 18 nt, Human
ucucaaauuucuaaaucu

SEQ ID NO: 3020376 - RNA, 13 nt, Human
ucucaaauuucua

SEQ ID NO: 3020377 - RNA, 14 nt, Human
ucucaaauuucuaa

SEQ ID NO: 3020378 - RNA, 16 nt, Human
ucucaaauuucuaaau

SEQ ID NO: 3020379 - RNA, 22 nt, Human
ucccaugagccucagcauccug

SEQ ID NO: 3020380 - RNA, 18 nt, Human
ucccucccuuccucuuuc

SEQ ID NO: 3020381 - RNA, 16 nt, Human
ucccugccaauggacu

SEQ ID NO: 3020382 - RNA, 14 nt, Human
ucccugccaaugga

SEQ ID NO: 3020383 - RNA, 20 nt, Human
ucccugcacuugcagacucu

SEQ ID NO: 3020384 - RNA, 17 nt, Human
ucccucuggggcuguuc

SEQ ID NO: 3020385 - RNA, 13 nt, Human
ucccucuggggcu

SEQ ID NO: 3020386 - RNA, 16 nt, Human
ucccuucccaccucuc

SEQ ID NO: 3020387 - RNA, 14 nt, Human
ucccuucccaccuc

SEQ ID NO: 3020388 - RNA, 21 nt, Human
ucccuucccacuggaggcaug

SEQ ID NO: 3020389 - RNA, 17 nt, Human
ucccuucccaccucucu

SEQ ID NO: 3020390 - RNA, 21 nt, Human
uccgaaagggacuuggaagcu

SEQ ID NO: 3020391 - RNA, 17 nt, Human
uccgaccagacaccuug

SEQ ID NO: 3020392 - RNA, 22 nt, Human
uccgaaagggacuuggaagcuc

SEQ ID NO: 3020393 - RNA, 21 nt, Human
uccgcuuucuacccagcgagc

SEQ ID NO: 3020394 - RNA, 12 nt, Human
uccuccucagau

SEQ ID NO: 3020395 - RNA, 13 nt, Human
uccuccaggugca

SEQ ID NO: 3020396 - RNA, 12 nt, Human
uccuccaggugc

SEQ ID NO: 3020397 - RNA, 22 nt, Human
uccuccaggugcacaagcucca

SEQ ID NO: 3020398 - RNA, 20 nt, Human
uccuccaggugcacaagcuc

SEQ ID NO: 3020399 - RNA, 18 nt, Human
uccuccaggugcacaagc

SEQ ID NO: 3020400 - RNA, 14 nt, Human
uccuccaggugcac

SEQ ID NO: 3020401 - RNA, 21 nt, Human
uccuaguuccaccaucaagcc

SEQ ID NO: 3020402 - RNA, 16 nt, Human
uccuaagcuauucagu

SEQ ID NO: 3020403 - RNA, 12 nt, Human
uccuaguuccac

SEQ ID NO: 3020404 - RNA, 18 nt, Human
uccuaagcuauucaguaa

SEQ ID NO: 3020405 - RNA, 17 nt, Human
uccuaguuccaccauca

SEQ ID NO: 3020406 - RNA, 14 nt, Human
uccuaguuccacca

SEQ ID NO: 3020407 - RNA, 21 nt, Human
uccuccuuuucacaguucucu

SEQ ID NO: 3020408 - RNA, 17 nt, Human
uccucuaggaggucucu

SEQ ID NO: 3020409 - RNA, 21 nt, Human
uccucuaggaggucucuaaga

SEQ ID NO: 3020410 - RNA, 15 nt, Human
uccucuggccugugu

SEQ ID NO: 3020411 - RNA, 13 nt, Human
uccucuguacaga

SEQ ID NO: 3020412 - RNA, 17 nt, Human
uccucugcugcuggcug

SEQ ID NO: 3020413 - RNA, 19 nt, Human
uccucuguacagagcccac

SEQ ID NO: 3020414 - RNA, 23 nt, Human
uccucuguacagagcccacgccc

SEQ ID NO: 3020415 - RNA, 17 nt, Human
uccugagccagauuuca

SEQ ID NO: 3020416 - RNA, 19 nt, Human
uccugagccagauuucacu

SEQ ID NO: 3020417 - RNA, 18 nt, Human
uccugagccagauuucac

SEQ ID NO: 3020418 - RNA, 12 nt, Human
uccugaggcugg

SEQ ID NO: 3020419 - RNA, 19 nt, Human
uccugaggcugggcucccu

SEQ ID NO: 3020420 - RNA, 17 nt, Human
uccugaggcugggcucc

SEQ ID NO: 3020421 - RNA, 16 nt, Human
uccugaggcugggcuc

SEQ ID NO: 3020422 - RNA, 15 nt, Human
uccugaggcugggcu

SEQ ID NO: 3020423 - RNA, 15 nt, Human
ucagcugcuacuacu

SEQ ID NO: 3020424 - RNA, 16 nt, Human
ucagccugcuccagcu

SEQ ID NO: 3020425 - RNA, 22 nt, Human
ucagccucccaaagugcuggga

SEQ ID NO: 3020426 - RNA, 12 nt, Human
ucagccucccga

SEQ ID NO: 3020427 - RNA, 20 nt, Human
ucagccucccgaauagcugg

SEQ ID NO: 3020428 - RNA, 15 nt, Human
ucagcuccagcucac

SEQ ID NO: 3020429 - RNA, 18 nt, Human
ucagcuccagcucaccag

SEQ ID NO: 3020430 - RNA, 21 nt, Human
ucagcuccagcucaccagccc

SEQ ID NO: 3020431 - RNA, 22 nt, Human
ucagcuccagcucaccagcccc

SEQ ID NO: 3020432 - RNA, 15 nt, Human
ucagcauccuggcac

SEQ ID NO: 3020433 - RNA, 16 nt, Human
ucagcauccuggcacc

SEQ ID NO: 3020434 - RNA, 17 nt, Human
ucagcauccuggcaccc

SEQ ID NO: 3020435 - RNA, 18 nt, Human
ucagcauccuggcacccg

SEQ ID NO: 3020436 - RNA, 12 nt, Human
ucagccucccaa

SEQ ID NO: 3020437 - RNA, 15 nt, Human
ucagcacgauuucug

SEQ ID NO: 3020438 - RNA, 16 nt, Human
ucagcacgauuucugu

SEQ ID NO: 3020439 - RNA, 17 nt, Human
ucagcacgauuucuguu

SEQ ID NO: 3020440 - RNA, 15 nt, Human
ucauacucaccucac

SEQ ID NO: 3020441 - RNA, 18 nt, Human
ucagugugacugaucucu

SEQ ID NO: 3020442 - RNA, 17 nt, Human
ucagucugauucccaag

SEQ ID NO: 3020443 - RNA, 14 nt, Human
ucagguggggcagc

SEQ ID NO: 3020444 - RNA, 18 nt, Human
ucaggugcugccauccag

SEQ ID NO: 3020445 - RNA, 20 nt, Human
ucaggugcugccauccaggu

SEQ ID NO: 3020446 - RNA, 15 nt, Human
ucagguggggcagcu

SEQ ID NO: 3020447 - RNA, 16 nt, Human
ucagguggggcagcuu

SEQ ID NO: 3020448 - RNA, 21 nt, Human
ucagguggggcagcuugaggg

SEQ ID NO: 3020449 - RNA, 17 nt, Human
ucagguggggcagcuug

SEQ ID NO: 3020450 - RNA, 15 nt, Human
ucaggugcugccauc

SEQ ID NO: 3020451 - RNA, 20 nt, Human
ucagguggggucacucuggc

SEQ ID NO: 3020452 - RNA, 17 nt, Human
ucagguggggucacucu

SEQ ID NO: 3020453 - RNA, 15 nt, Human
ucaguccauagcaga

SEQ ID NO: 3020454 - RNA, 21 nt, Human
uccacaagagcccaggccucc

SEQ ID NO: 3020455 - RNA, 19 nt, Human
uccacaagagcccaggccu

SEQ ID NO: 3020456 - RNA, 20 nt, Human
uccacaagagcccaggccuc

SEQ ID NO: 3020457 - RNA, 14 nt, Human
uccaagaagcccag

SEQ ID NO: 3020458 - RNA, 16 nt, Human
uccaagaagcccagga

SEQ ID NO: 3020459 - RNA, 15 nt, Human
uccaagaagcccagg

SEQ ID NO: 3020460 - RNA, 20 nt, Human
uccaagaccuucuccuucac

SEQ ID NO: 3020461 - RNA, 19 nt, Human
uccaagaccuucuccuuca

SEQ ID NO: 3020462 - RNA, 14 nt, Human
uccaagcaggacau

SEQ ID NO: 3020463 - RNA, 21 nt, Human
uccacccugcucuccgaccag

SEQ ID NO: 3020464 - RNA, 13 nt, Human
uccacccugcucu

SEQ ID NO: 3020465 - RNA, 14 nt, Human
uccacccugcucuc

SEQ ID NO: 3020466 - RNA, 22 nt, Human
uccacugugccaugugccaggu

SEQ ID NO: 3020467 - RNA, 14 nt, Human
uccacuuucuagcc

SEQ ID NO: 3020468 - RNA, 18 nt, Human
ucccaccucagccucccg

SEQ ID NO: 3020469 - RNA, 16 nt, Human
ucccaccucagccucc

SEQ ID NO: 3020470 - RNA, 14 nt, Human
ucccaccucucuca

SEQ ID NO: 3020471 - RNA, 18 nt, Human
ucccaccucucucacucc

SEQ ID NO: 3020472 - RNA, 17 nt, Human
ucccaccucucucacuc

SEQ ID NO: 3020473 - RNA, 19 nt, Human
ucccaccuuggcugcaggg

SEQ ID NO: 3020474 - RNA, 21 nt, Human
ucccaccuuggcugcagggag

SEQ ID NO: 3020475 - RNA, 18 nt, Human
ucccaccuuggcugcagg

SEQ ID NO: 3020476 - RNA, 20 nt, Human
ucccaccucucucacuccuu

SEQ ID NO: 3020477 - RNA, 14 nt, Human
ucccacucagucca

SEQ ID NO: 3020478 - RNA, 18 nt, Human
ucccaggcauuccccagg

SEQ ID NO: 3020479 - RNA, 17 nt, Human
ucccaggcauuccccag

SEQ ID NO: 3020480 - RNA, 15 nt, Human
ucccaugagccucag

SEQ ID NO: 3020481 - RNA, 16 nt, Human
ucccaugagccucagc

SEQ ID NO: 3020482 - RNA, 18 nt, Human
ucccaacucaccccagcc

SEQ ID NO: 3020483 - RNA, 17 nt, Human
ucccaacucaccccagc

SEQ ID NO: 3020484 - RNA, 21 nt, Human
ucccaacucaccccagcccca

SEQ ID NO: 3020485 - RNA, 19 nt, Human
ucccaacucaccccagccc

SEQ ID NO: 3020486 - RNA, 20 nt, Human
uccauagagagcaagacgcu

SEQ ID NO: 3020487 - RNA, 17 nt, Human
uccauagagagcaagac

SEQ ID NO: 3020488 - RNA, 14 nt, Human
ucuggacuaaaacu

SEQ ID NO: 3020489 - RNA, 16 nt, Human
ucuggaaugcaguggu

SEQ ID NO: 3020490 - RNA, 17 nt, Human
ucugcugcuggcugguu

SEQ ID NO: 3020491 - RNA, 15 nt, Human
ucugcugcuggcugg

SEQ ID NO: 3020492 - RNA, 14 nt, Human
ucugcugcuggcug

SEQ ID NO: 3020493 - RNA, 13 nt, Human
ucugcugcuggcu

SEQ ID NO: 3020494 - RNA, 11 nt, Human
ucugcugcugg

SEQ ID NO: 3020495 - RNA, 21 nt, Human
ucugcuccucuccccagcaag

SEQ ID NO: 3020496 - RNA, 16 nt, Human
ucugccugcccaggcc

SEQ ID NO: 3020497 - RNA, 17 nt, Human
ucugccugcccaggccc

SEQ ID NO: 3020498 - RNA, 18 nt, Human
ucugccugcccaggcccc

SEQ ID NO: 3020499 - RNA, 20 nt, Human
ucugccugcccaggccccug

SEQ ID NO: 3020500 - RNA, 16 nt, Human
ucuggugacuuuccuc

SEQ ID NO: 3020501 - RNA, 20 nt, Human
ucuguccuacucugugucag

SEQ ID NO: 3020502 - RNA, 15 nt, Human
ucuguacagagccca

SEQ ID NO: 3020503 - RNA, 14 nt, Human
ucuguacagagccc

SEQ ID NO: 3020504 - RNA, 12 nt, Human
ucuguccuggga

SEQ ID NO: 3020505 - RNA, 17 nt, Human
ucugucgcccagucugg

SEQ ID NO: 3020506 - RNA, 16 nt, Human
ucugucgcccagucug

SEQ ID NO: 3020507 - RNA, 13 nt, Human
ucugucuaggaau

SEQ ID NO: 3020508 - RNA, 18 nt, Human
ucugagaggacuuuucuu

SEQ ID NO: 3020509 - RNA, 23 nt, Human
ucugacccaugcugcccugugag

SEQ ID NO: 3020510 - RNA, 22 nt, Human
ucugacccaugcugcccuguga

SEQ ID NO: 3020511 - RNA, 20 nt, Human
ucugacccaugcugcccugu

SEQ ID NO: 3020512 - RNA, 19 nt, Human
ucugacccaugcugcccug

SEQ ID NO: 3020513 - RNA, 22 nt, Human
ucugaggaauccagacccggcu

SEQ ID NO: 3020514 - RNA, 18 nt, Human
ucugaggaauccagaccc

SEQ ID NO: 3020515 - RNA, 21 nt, Human
ucugaggaauccagacccggc

SEQ ID NO: 3020516 - RNA, 21 nt, Human
ucugcaagaauugaagcagga

SEQ ID NO: 3020517 - RNA, 13 nt, Human
ucugcacuccccu

SEQ ID NO: 3020518 - RNA, 15 nt, Human
ucugccucugacaca

SEQ ID NO: 3020519 - RNA, 18 nt, Human
ucugccucugacacacag

SEQ ID NO: 3020520 - RNA, 21 nt, Human
ucugccucccaucacccgcua

SEQ ID NO: 3020521 - RNA, 20 nt, Human
ucugccucccaucacccgcu

SEQ ID NO: 3020522 - RNA, 17 nt, Human
ucugccucccaucaccc

SEQ ID NO: 3020523 - RNA, 16 nt, Human
ucugccucccaucacc

SEQ ID NO: 3020524 - RNA, 23 nt, Human
ucugccucugacacacagcucug

SEQ ID NO: 3020525 - RNA, 21 nt, Human
ucugccucugacacacagcuc

SEQ ID NO: 3020526 - RNA, 22 nt, Human
ucugccucugacacacagcucu

SEQ ID NO: 3020527 - RNA, 19 nt, Human
ucugccugaagucacacag

SEQ ID NO: 3020528 - RNA, 20 nt, Human
ucugccugaagucacacagu

SEQ ID NO: 3020529 - RNA, 18 nt, Human
ucugccauauucuguugg

SEQ ID NO: 3020530 - RNA, 12 nt, Human
ucugcccacucc

SEQ ID NO: 3020531 - RNA, 22 nt, Human
ucugccauauucuguuggccag

SEQ ID NO: 3020532 - RNA, 23 nt, Human
ucugccauauucuguuggccagu

SEQ ID NO: 3020533 - RNA, 14 nt, Human
ucugcccacucccu

SEQ ID NO: 3020534 - RNA, 13 nt, Human
ucugcccacuccc

SEQ ID NO: 3020535 - RNA, 12 nt, Human
ucugccucccau

SEQ ID NO: 3020536 - RNA, 15 nt, Human
ucugccucccaucac

SEQ ID NO: 3020537 - RNA, 13 nt, Human
ucugccucccauc

SEQ ID NO: 3020538 - RNA, 20 nt, Human
ugaaacacugguuuuaaaua

SEQ ID NO: 3020539 - RNA, 15 nt, Human
ugaaacacugguuuu

SEQ ID NO: 3020540 - RNA, 12 nt, Human
ugaaaauuuuga

SEQ ID NO: 3020541 - RNA, 14 nt, Human
ugaaaauucagugg

SEQ ID NO: 3020542 - RNA, 15 nt, Human
ugaaaagaaaaauga

SEQ ID NO: 3020543 - RNA, 19 nt, Human
ugaaaagaaaaaugagccu

SEQ ID NO: 3020544 - RNA, 22 nt, Human
ugaaaagaaaaaugagccuggc

SEQ ID NO: 3020545 - RNA, 20 nt, Human
ugaaaagaaaaaugagccug

SEQ ID NO: 3020546 - RNA, 23 nt, Human
ugaaaacacuguucucugcccuc

SEQ ID NO: 3020547 - RNA, 22 nt, Human
ugaaaacacuguucucugcccu

SEQ ID NO: 3020548 - RNA, 21 nt, Human
ugaaaacacuguucucugccc

SEQ ID NO: 3020549 - RNA, 20 nt, Human
ugaaaacacuguucucugcc

SEQ ID NO: 3020550 - RNA, 17 nt, Human
ugaaaacacuguucucu

SEQ ID NO: 3020551 - RNA, 20 nt, Human
ugaaaacacauuuuucuuag

SEQ ID NO: 3020552 - RNA, 21 nt, Human
ugaaaacacauuuuucuuagg

SEQ ID NO: 3020553 - RNA, 13 nt, Human
ucuuugcagacag

SEQ ID NO: 3020554 - RNA, 23 nt, Human
ucuuugagugaagcugggagaac

SEQ ID NO: 3020555 - RNA, 14 nt, Human
ucuuugcagacagg

SEQ ID NO: 3020556 - RNA, 17 nt, Human
ucuuugcagacaggcaa

SEQ ID NO: 3020557 - RNA, 13 nt, Human
ucuuuggacccug

SEQ ID NO: 3020558 - RNA, 15 nt, Human
ucuuuggacccugag

SEQ ID NO: 3020559 - RNA, 14 nt, Human
ucuuuggacccuga

SEQ ID NO: 3020560 - RNA, 16 nt, Human
ucuuuggacccugagg

SEQ ID NO: 3020561 - RNA, 13 nt, Human
ucuuguguguuua

SEQ ID NO: 3020562 - RNA, 23 nt, Human
ucuuuccaaaguacacuguuuca

SEQ ID NO: 3020563 - RNA, 13 nt, Human
ucuuucccucccu

SEQ ID NO: 3020564 - RNA, 23 nt, Human
ucuuucccucccuuccucuuucc

SEQ ID NO: 3020565 - RNA, 17 nt, Human
ucuuuccaaaguacacu

SEQ ID NO: 3020566 - RNA, 12 nt, Human
ucuuucccuccc

SEQ ID NO: 3020567 - RNA, 18 nt, Human
ucuucaguuugcagagua

SEQ ID NO: 3020568 - RNA, 17 nt, Human
ucuucaguuugcagagu

SEQ ID NO: 3020569 - RNA, 14 nt, Human
ucuucagaucucua

SEQ ID NO: 3020570 - RNA, 21 nt, Human
ucuucagagacuccugcaggc

SEQ ID NO: 3020571 - RNA, 22 nt, Human
ucuuauccaacaucaacaucuu

SEQ ID NO: 3020572 - RNA, 15 nt, Human
ucuuagauguauaua

SEQ ID NO: 3020573 - RNA, 14 nt, Human
ucuuagauguauau

SEQ ID NO: 3020574 - RNA, 17 nt, Human
ucugugucagguggggc

SEQ ID NO: 3020575 - RNA, 20 nt, Human
ucugugucagguggggcagc

SEQ ID NO: 3020576 - RNA, 23 nt, Human
ucuuagguuggcaaaaaggcagg

SEQ ID NO: 3020577 - RNA, 20 nt, Human
ucuuagguuggcaaaaaggc

SEQ ID NO: 3020578 - RNA, 20 nt, Human
ucuugaaauauaggaacuua

SEQ ID NO: 3020579 - RNA, 21 nt, Human
ucuugaaauauaggaacuuaa

SEQ ID NO: 3020580 - RNA, 15 nt, Human
ucuugcaugaggcua

SEQ ID NO: 3020581 - RNA, 22 nt, Human
ucuugaagacuuuucuuucagc

SEQ ID NO: 3020582 - RNA, 13 nt, Human
ucuugaagacuuu

SEQ ID NO: 3020583 - RNA, 15 nt, Human
ucuugcucugcugac

SEQ ID NO: 3020584 - RNA, 23 nt, Human
ucuugcucugcugacagacacag

SEQ ID NO: 3020585 - RNA, 14 nt, Human
ucuugcucugcuga

SEQ ID NO: 3020586 - RNA, 15 nt, Human
ugacucuucccucaa

SEQ ID NO: 3020587 - RNA, 14 nt, Human
ugaccauucuccac

SEQ ID NO: 3020588 - RNA, 13 nt, Human
ugaccauucucca

SEQ ID NO: 3020589 - RNA, 21 nt, Human
ugacucuuucuauuguuucuu

SEQ ID NO: 3020590 - RNA, 16 nt, Human
ugacuuuccucuuugg

SEQ ID NO: 3020591 - RNA, 14 nt, Human
ugagaccaaccugg

SEQ ID NO: 3020592 - RNA, 18 nt, Human
ugagaggggaacagacug

SEQ ID NO: 3020593 - RNA, 14 nt, Human
ugagaggggaacag

SEQ ID NO: 3020594 - RNA, 22 nt, Human
ugacuuuucuguccgagcuuug

SEQ ID NO: 3020595 - RNA, 15 nt, Human
ugagaaauaaaguuu

SEQ ID NO: 3020596 - RNA, 19 nt, Human
ugagcucaggaguuugaga

SEQ ID NO: 3020597 - RNA, 11 nt, Human
ugagcucagga

SEQ ID NO: 3020598 - RNA, 23 nt, Human
ugagccgagaucacgccacugca

SEQ ID NO: 3020599 - RNA, 20 nt, Human
ugagcagggcucagcgggga

SEQ ID NO: 3020600 - RNA, 22 nt, Human
ugagcagggcucagcggggaca

SEQ ID NO: 3020601 - RNA, 23 nt, Human
ugagcagggcucagcggggacag

SEQ ID NO: 3020602 - RNA, 22 nt, Human
ugagccgagaucacgccacugc

SEQ ID NO: 3020603 - RNA, 22 nt, Human
ugaggaugaaaaaauaacacug

SEQ ID NO: 3020604 - RNA, 21 nt, Human
ugaggugggaggaucucuuga

SEQ ID NO: 3020605 - RNA, 21 nt, Human
ugaggcugggcucccuuccca

SEQ ID NO: 3020606 - RNA, 18 nt, Human
ugaggucagagccugcag

SEQ ID NO: 3020607 - RNA, 19 nt, Human
ugaggucagagccugcagu

SEQ ID NO: 3020608 - RNA, 15 nt, Human
ugaggcucugcccuu

SEQ ID NO: 3020609 - RNA, 16 nt, Human
ugaggcucugcccuug

SEQ ID NO: 3020610 - RNA, 18 nt, Human
ugaggcucugcccuuggu

SEQ ID NO: 3020611 - RNA, 16 nt, Human
ugaggcugggcucccu

SEQ ID NO: 3020612 - RNA, 15 nt, Human
ugaggcugggcuccc

SEQ ID NO: 3020613 - RNA, 20 nt, Human
ugaaugcagguuuuaucaga

SEQ ID NO: 3020614 - RNA, 18 nt, Human
ugaaugcagguuuuauca

SEQ ID NO: 3020615 - RNA, 23 nt, Human
ugaaugaugauccuaggcauuug

SEQ ID NO: 3020616 - RNA, 21 nt, Human
ugaaggcuggguucugauccu

SEQ ID NO: 3020617 - RNA, 20 nt, Human
ugaaggcuggguucugaucc

SEQ ID NO: 3020618 - RNA, 21 nt, Human
ugaaacacugguuuuaaauau

SEQ ID NO: 3020619 - RNA, 23 nt, Human
ugaacuggguacuuguggacaca

SEQ ID NO: 3020620 - RNA, 19 nt, Human
ugaagacucauucuucugu

SEQ ID NO: 3020621 - RNA, 20 nt, Human
ugaagacucauucuucugua

SEQ ID NO: 3020622 - RNA, 18 nt, Human
ugaaggccccgcccaggc

SEQ ID NO: 3020623 - RNA, 16 nt, Human
ugaaggcuggguucug

SEQ ID NO: 3020624 - RNA, 20 nt, Human
ugaaggccccgcccaggcuu

SEQ ID NO: 3020625 - RNA, 19 nt, Human
ugaaggccccgcccaggcu

SEQ ID NO: 3020626 - RNA, 13 nt, Human
ugacaacacucau

SEQ ID NO: 3020627 - RNA, 23 nt, Human
ugacaacacucauugaccugagg

SEQ ID NO: 3020628 - RNA, 21 nt, Human
ugaauuguaaggaaugauuaa

SEQ ID NO: 3020629 - RNA, 13 nt, Human
ugaauuguaagga

SEQ ID NO: 3020630 - RNA, 15 nt, Human
ugacacacagcucug

SEQ ID NO: 3020631 - RNA, 14 nt, Human
ugacacacagcucu

SEQ ID NO: 3020632 - RNA, 14 nt, Human
ugacagacacaggc

SEQ ID NO: 3020633 - RNA, 16 nt, Human
ugacagacacaggccc

SEQ ID NO: 3020634 - RNA, 13 nt, Human
ugacagacacagg

SEQ ID NO: 3020635 - RNA, 23 nt, Human
ugacaaggauugcuacuguccua

SEQ ID NO: 3020636 - RNA, 23 nt, Human
ugacaucaacugcaucaagaugu

SEQ ID NO: 3020637 - RNA, 22 nt, Human
ugacagagcaagugagacccug

SEQ ID NO: 3020638 - RNA, 17 nt, Human
ugacagacacaggcccg

SEQ ID NO: 3020639 - RNA, 18 nt, Human
ugacagacacaggcccgg

SEQ ID NO: 3020640 - RNA, 20 nt, Human
ugaccagcaccaucucuccu

SEQ ID NO: 3020641 - RNA, 18 nt, Human
uacuaacauuuauuugag

SEQ ID NO: 3020642 - RNA, 13 nt, Human
uacuaacuuuccu

SEQ ID NO: 3020643 - RNA, 17 nt, Human
uacuaacauuuauuuga

SEQ ID NO: 3020644 - RNA, 14 nt, Human
uacuaaggaaucuu

SEQ ID NO: 3020645 - RNA, 20 nt, Human
uacuaauagacaauuuauua

SEQ ID NO: 3020646 - RNA, 21 nt, Human
uacuaauagacaauuuauuau

SEQ ID NO: 3020647 - RNA, 22 nt, Human
uaccuuuuuuauacauaaacaa

SEQ ID NO: 3020648 - RNA, 17 nt, Human
uaccuuuuuuauacaua

SEQ ID NO: 3020649 - RNA, 13 nt, Human
uaccuuuuuuaua

SEQ ID NO: 3020650 - RNA, 16 nt, Human
uaccuuuuuuauacau

SEQ ID NO: 3020651 - RNA, 21 nt, Human
uacgaaaagaggggaagagac

SEQ ID NO: 3020652 - RNA, 18 nt, Human
uacgaaaagaggggaaga

SEQ ID NO: 3020653 - RNA, 18 nt, Human
uaccucggugccuuccuc

SEQ ID NO: 3020654 - RNA, 13 nt, Human
uaccuuuuuuaga

SEQ ID NO: 3020655 - RNA, 19 nt, Human
uaccuuuuuuagaguugau

SEQ ID NO: 3020656 - RNA, 22 nt, Human
uaccuuuuuuagaguugauacu

SEQ ID NO: 3020657 - RNA, 15 nt, Human
uaccuacauacaauu

SEQ ID NO: 3020658 - RNA, 23 nt, Human
uacauuuuuaagugcugcauuua

SEQ ID NO: 3020659 - RNA, 15 nt, Human
uacccacugcucugg

SEQ ID NO: 3020660 - RNA, 13 nt, Human
uacuacaguuugu

SEQ ID NO: 3020661 - RNA, 14 nt, Human
uacuacaguuuguu

SEQ ID NO: 3020662 - RNA, 22 nt, Human
uacuacaguccucccaucucac

SEQ ID NO: 3020663 - RNA, 18 nt, Human
uacucgaguuacagacaa

SEQ ID NO: 3020664 - RNA, 22 nt, Human
uacucgaguuacagacaaagcg

SEQ ID NO: 3020665 - RNA, 17 nt, Human
uacugcauaugaaagga

SEQ ID NO: 3020666 - RNA, 13 nt, Human
uacuuguggacac

SEQ ID NO: 3020667 - RNA, 21 nt, Human
uacugucuucaguaagccgug

SEQ ID NO: 3020668 - RNA, 16 nt, Human
uacuguccuacccacc

SEQ ID NO: 3020669 - RNA, 19 nt, Human
uacaugccuaccaauauuu

SEQ ID NO: 3020670 - RNA, 16 nt, Human
uacaugccuaccaaua

SEQ ID NO: 3020671 - RNA, 14 nt, Human
uacauuuuuaagug

SEQ ID NO: 3020672 - RNA, 19 nt, Human
uacauuuuuaagugcugca

SEQ ID NO: 3020673 - RNA, 22 nt, Human
uacauuuuuaagugcugcauuu

SEQ ID NO: 3020674 - RNA, 14 nt, Human
uacauggaauaaca

SEQ ID NO: 3020675 - RNA, 18 nt, Human
uacauggaauaacaugua

SEQ ID NO: 3020676 - RNA, 19 nt, Human
uacauggaauaacauguaa

SEQ ID NO: 3020677 - RNA, 22 nt, Human
uacauggaauaacauguaauua

SEQ ID NO: 3020678 - RNA, 16 nt, Human
uacaugaaaacacauu

SEQ ID NO: 3020679 - RNA, 16 nt, Human
uacauaagauaaaugu

SEQ ID NO: 3020680 - RNA, 17 nt, Human
uacauaagauaaaugug

SEQ ID NO: 3020681 - RNA, 17 nt, Human
uacaugaaaacacauuu

SEQ ID NO: 3020682 - RNA, 18 nt, Human
uacaugaaaacacauuuu

SEQ ID NO: 3020683 - RNA, 19 nt, Human
uacaugaaaacacauuuuu

SEQ ID NO: 3020684 - RNA, 23 nt, Human
uacaugaaaacacauuuuucuua

SEQ ID NO: 3020685 - RNA, 16 nt, Human
uacauaaacaaguccu

SEQ ID NO: 3020686 - RNA, 19 nt, Human
uacaguuuguuaguaugag

SEQ ID NO: 3020687 - RNA, 21 nt, Human
uacaguuuguuaguaugaggc

SEQ ID NO: 3020688 - RNA, 20 nt, Human
uacacuguuucaaacuuuac

SEQ ID NO: 3020689 - RNA, 23 nt, Human
uacacugugcugagucugaaggc

SEQ ID NO: 3020690 - RNA, 22 nt, Human
uacacugugcugagucugaagg

SEQ ID NO: 3020691 - RNA, 22 nt, Human
uacacuguuucaaacuuuacua

SEQ ID NO: 3020692 - RNA, 16 nt, Human
uacacuuacacuuuau

SEQ ID NO: 3020693 - RNA, 20 nt, Human
uacagcuugaccgugaggcc

SEQ ID NO: 3020694 - RNA, 13 nt, Human
uacaggaaguacu

SEQ ID NO: 3020695 - RNA, 18 nt, Human
uacaggaagguagaaaua

SEQ ID NO: 3020696 - RNA, 18 nt, Human
uacaguuuguuaguauga

SEQ ID NO: 3020697 - RNA, 20 nt, Human
uacaguugaaaaacagcuga

SEQ ID NO: 3020698 - RNA, 19 nt, Human
uacaguugaaaaacagcug

SEQ ID NO: 3020699 - RNA, 17 nt, Human
uacaguugaaaaacagc

SEQ ID NO: 3020700 - RNA, 15 nt, Human
uacaggagugagcac

SEQ ID NO: 3020701 - RNA, 22 nt, Human
uacaggaaguacuggagaaaau

SEQ ID NO: 3020702 - RNA, 15 nt, Human
uacaggaaguacugg

SEQ ID NO: 3020703 - RNA, 14 nt, Human
uacaggaaguacug

SEQ ID NO: 3020704 - RNA, 18 nt, Human
uaauuccuguuuuuauua

SEQ ID NO: 3020705 - RNA, 14 nt, Human
uacaaaguagaagu

SEQ ID NO: 3020706 - RNA, 18 nt, Human
uacaaaguagaagucuua

SEQ ID NO: 3020707 - RNA, 11 nt, Human
uacacacacac

SEQ ID NO: 3020708 - RNA, 23 nt, Human
uacacaaugguuuucuugugugu

SEQ ID NO: 3020709 - RNA, 21 nt, Human
uacacugugcugagucugaag

SEQ ID NO: 3020710 - RNA, 15 nt, Human
uacacacugcauguu

SEQ ID NO: 3020711 - RNA, 19 nt, Human
uagaauguuuucaaauguu

SEQ ID NO: 3020712 - RNA, 23 nt, Human
uagaauuaguggcacuugcuuuu

SEQ ID NO: 3020713 - RNA, 18 nt, Human
uagaauguuuucaaaugu

SEQ ID NO: 3020714 - RNA, 12 nt, Human
uacuuuaaacua

SEQ ID NO: 3020715 - RNA, 20 nt, Human
uagaagucuuagauguauau

SEQ ID NO: 3020716 - RNA, 19 nt, Human
uagacccucaugcugccaa

SEQ ID NO: 3020717 - RNA, 17 nt, Human
uagacccucaugcugcc

SEQ ID NO: 3020718 - RNA, 18 nt, Human
uagacccucaugcugcca

SEQ ID NO: 3020719 - RNA, 19 nt, Human
uagagguacacuugugaau

SEQ ID NO: 3020720 - RNA, 14 nt, Human
uagagguucaaaga

SEQ ID NO: 3020721 - RNA, 15 nt, Human
uagagguucaaagau

SEQ ID NO: 3020722 - RNA, 12 nt, Human
uagagugggagc

SEQ ID NO: 3020723 - RNA, 14 nt, Human
uagaguugauacua

SEQ ID NO: 3020724 - RNA, 17 nt, Human
uagaguugauacuacag

SEQ ID NO: 3020725 - RNA, 16 nt, Human
uagcaugaagacagag

SEQ ID NO: 3020726 - RNA, 12 nt, Human
uagcugggacua

SEQ ID NO: 3020727 - RNA, 15 nt, Human
uagcugggacuacag

SEQ ID NO: 3020728 - RNA, 17 nt, Human
uagcugggacuacaggc

SEQ ID NO: 3020729 - RNA, 18 nt, Human
uagccugugccucuggga

SEQ ID NO: 3020730 - RNA, 20 nt, Human
uagcucaggugucccugcac

SEQ ID NO: 3020731 - RNA, 21 nt, Human
uagcucaggugucccugcacu

SEQ ID NO: 3020732 - RNA, 12 nt, Human
uagcucauucuc

SEQ ID NO: 3020733 - RNA, 21 nt, Human
uagcagcccucaauugugaaa

SEQ ID NO: 3020734 - RNA, 11 nt, Human
uagcagggaaa

SEQ ID NO: 3020735 - RNA, 16 nt, Human
uagcauacguacacau

SEQ ID NO: 3020736 - RNA, 17 nt, Human
uagcauacguacacauu

SEQ ID NO: 3020737 - RNA, 18 nt, Human
uagcauacguacacauuu

SEQ ID NO: 3020738 - RNA, 19 nt, Human
uagcauacguacacauuuu

SEQ ID NO: 3020739 - RNA, 16 nt, Human
uagauacuguaucaug

SEQ ID NO: 3020740 - RNA, 17 nt, Human
uaguagagguacacuug

SEQ ID NO: 3020741 - RNA, 21 nt, Human
uaguagagguacacuugugaa

SEQ ID NO: 3020742 - RNA, 20 nt, Human
uaguagagguacacuuguga

SEQ ID NO: 3020743 - RNA, 22 nt, Human
uaguagagguacacuugugaau

SEQ ID NO: 3020744 - RNA, 17 nt, Human
uaguaugaggcauuugu

SEQ ID NO: 3020745 - RNA, 18 nt, Human
uaguaugaggcauuuguu

SEQ ID NO: 3020746 - RNA, 17 nt, Human
uaggugugggggaagca

SEQ ID NO: 3020747 - RNA, 13 nt, Human
uagguguggggga

SEQ ID NO: 3020748 - RNA, 19 nt, Human
uaggugugacugaauuucu

SEQ ID NO: 3020749 - RNA, 21 nt, Human
uaggugugacugaauuucuuu

SEQ ID NO: 3020750 - RNA, 23 nt, Human
uaggugugacugaauuucuuuug

SEQ ID NO: 3020751 - RNA, 22 nt, Human
uagcuggucuuauuuguaaagc

SEQ ID NO: 3020752 - RNA, 11 nt, Human
uaggugacaga

SEQ ID NO: 3020753 - RNA, 16 nt, Human
uaggugacagagugag

SEQ ID NO: 3020754 - RNA, 22 nt, Human
uaguuguuugauucagacagcu

SEQ ID NO: 3020755 - RNA, 21 nt, Human
uaguuguuugauucagacagc

SEQ ID NO: 3020756 - RNA, 20 nt, Human
uaguuguuugauucagacag

SEQ ID NO: 3020757 - RNA, 20 nt, Human
uaguggcuuaaaacaacacu

SEQ ID NO: 3020758 - RNA, 16 nt, Human
uaguaugguggcuggg

SEQ ID NO: 3020759 - RNA, 15 nt, Human
uaguaugaggcauuu

SEQ ID NO: 3020760 - RNA, 15 nt, Human
uaguuugauuaaauu

SEQ ID NO: 3020761 - RNA, 16 nt, Human
uaguuugauuaaauuc

SEQ ID NO: 3020762 - RNA, 17 nt, Human
uauaaacuuuaccuuuu

SEQ ID NO: 3020763 - RNA, 15 nt, Human
uauaaacuuuaccuu

SEQ ID NO: 3020764 - RNA, 16 nt, Human
uauaaacuuuaccuuu

SEQ ID NO: 3020765 - RNA, 11 nt, Human
uauaaacuuua

SEQ ID NO: 3020766 - RNA, 13 nt, Human
uauaaacuuuacc

SEQ ID NO: 3020767 - RNA, 14 nt, Human
uauaaacuuuaccu

SEQ ID NO: 3020768 - RNA, 17 nt, Human
uaucaugacaaagacug

SEQ ID NO: 3020769 - RNA, 20 nt, Human
uaucaggugcugccauccag

SEQ ID NO: 3020770 - RNA, 19 nt, Human
uaucaggugcugccaucca

SEQ ID NO: 3020771 - RNA, 10 nt, Human
uaacuggaac

SEQ ID NO: 3020772 - RNA, 14 nt, Human
uaacuuuuuauauu

SEQ ID NO: 3020773 - RNA, 13 nt, Human
uaacuuuuuauau

SEQ ID NO: 3020774 - RNA, 16 nt, Human
uaacuuuuuauauucu

SEQ ID NO: 3020775 - RNA, 15 nt, Human
uaacuuuuuauauuc

SEQ ID NO: 3020776 - RNA, 16 nt, Human
uaagaaaaaggaugca

SEQ ID NO: 3020777 - RNA, 18 nt, Human
uaagaaaaaggaugcaca

SEQ ID NO: 3020778 - RNA, 19 nt, Human
uaagaaaaaggaugcacag

SEQ ID NO: 3020779 - RNA, 23 nt, Human
uaagaaaaaggaugcacagaguu

SEQ ID NO: 3020780 - RNA, 19 nt, Human
uaagaaccuuuugagugcc

SEQ ID NO: 3020781 - RNA, 18 nt, Human
uaacucaccuggcaucuu

SEQ ID NO: 3020782 - RNA, 11 nt, Human
uaacagaaaug

SEQ ID NO: 3020783 - RNA, 23 nt, Human
uaaccaguguuguggauuuaaca

SEQ ID NO: 3020784 - RNA, 16 nt, Human
uaaccacuucagcuga

SEQ ID NO: 3020785 - RNA, 11 nt, Human
uaaauuauuuu

SEQ ID NO: 3020786 - RNA, 22 nt, Human
uaaauucuugcaaaguaucccu

SEQ ID NO: 3020787 - RNA, 17 nt, Human
uaaauucuugcaaagua

SEQ ID NO: 3020788 - RNA, 18 nt, Human
uaaauucuugcaaaguau

SEQ ID NO: 3020789 - RNA, 16 nt, Human
uaaauucuugcaaagu

SEQ ID NO: 3020790 - RNA, 18 nt, Human
uaacaccaugauuaacca

SEQ ID NO: 3020791 - RNA, 22 nt, Human
uaaaugucucuuuaaugucaca

SEQ ID NO: 3020792 - RNA, 20 nt, Human
uaaaugucuaguuguaacac

SEQ ID NO: 3020793 - RNA, 18 nt, Human
uaaaugggggugcauuug

SEQ ID NO: 3020794 - RNA, 19 nt, Human
uaaaugggggugcauuuga

SEQ ID NO: 3020795 - RNA, 14 nt, Human
uaaaugggggugca

SEQ ID NO: 3020796 - RNA, 17 nt, Human
uaaaugggggugcauuu

SEQ ID NO: 3020797 - RNA, 16 nt, Human
uaaauggaaccacucu

SEQ ID NO: 3020798 - RNA, 17 nt, Human
uaaaugcccagccccuu

SEQ ID NO: 3020799 - RNA, 16 nt, Human
uaaaugcccagccccu

SEQ ID NO: 3020800 - RNA, 15 nt, Human
uaaaugcccagcccc

SEQ ID NO: 3020801 - RNA, 14 nt, Human
uaaaugcccagccc

SEQ ID NO: 3020802 - RNA, 13 nt, Human
uaaaugcccagcc

SEQ ID NO: 3020803 - RNA, 15 nt, Human
uaauauggaucugua

SEQ ID NO: 3020804 - RNA, 19 nt, Human
uaauaugcacacauuuuuu

SEQ ID NO: 3020805 - RNA, 15 nt, Human
uaauaugcacacauu

SEQ ID NO: 3020806 - RNA, 16 nt, Human
uaauaugcacacauuu

SEQ ID NO: 3020807 - RNA, 17 nt, Human
uaauaugcacacauuuu

SEQ ID NO: 3020808 - RNA, 18 nt, Human
uaauaugcacacauuuuu

SEQ ID NO: 3020809 - RNA, 15 nt, Human
uaauaugaugacugu

SEQ ID NO: 3020810 - RNA, 20 nt, Human
uaauauuaaggaagacaaug

SEQ ID NO: 3020811 - RNA, 12 nt, Human
uaaucuaaaugg

SEQ ID NO: 3020812 - RNA, 13 nt, Human
uaaucuaaaugga

SEQ ID NO: 3020813 - RNA, 19 nt, Human
uaaugcuugcugcugauuu

SEQ ID NO: 3020814 - RNA, 15 nt, Human
uaauggggcggugag

SEQ ID NO: 3020815 - RNA, 23 nt, Human
uaaugcgugcauaccacuuuugu

SEQ ID NO: 3020816 - RNA, 19 nt, Human
uaaugcgugcauaccacuu

SEQ ID NO: 3020817 - RNA, 22 nt, Human
uaaugcgugcauaccacuuuug

SEQ ID NO: 3020818 - RNA, 15 nt, Human
uaaugcgugcauacc

SEQ ID NO: 3020819 - RNA, 14 nt, Human
uaauuaaguacuau

SEQ ID NO: 3020820 - RNA, 17 nt, Human
uaauuaaguacuaugua

SEQ ID NO: 3020821 - RNA, 16 nt, Human
uaaggauguucuagca

SEQ ID NO: 3020822 - RNA, 12 nt, Human
uaagaggcaggg

SEQ ID NO: 3020823 - RNA, 15 nt, Human
uaagaggcagggucu

SEQ ID NO: 3020824 - RNA, 20 nt, Human
uaagguggguacgggagggu

SEQ ID NO: 3020825 - RNA, 15 nt, Human
uaaggugugcucuga

SEQ ID NO: 3020826 - RNA, 17 nt, Human
uaaggguaucuggugac

SEQ ID NO: 3020827 - RNA, 15 nt, Human
uaagugcugcauuua

SEQ ID NO: 3020828 - RNA, 16 nt, Human
uaagugcugcauuuaa

SEQ ID NO: 3020829 - RNA, 18 nt, Human
uaagugcugcauuuaaaa

SEQ ID NO: 3020830 - RNA, 22 nt, Human
uaagugcugcauuuaaaagaua

SEQ ID NO: 3020831 - RNA, 23 nt, Human
uaagugaggaugaaaaaauaaca

SEQ ID NO: 3020832 - RNA, 12 nt, Human
uaagugagagag

SEQ ID NO: 3020833 - RNA, 14 nt, Human
uaagugcugcauuu

SEQ ID NO: 3020834 - RNA, 22 nt, Human
uaaacaugcuguacauacuuuu

SEQ ID NO: 3020835 - RNA, 21 nt, Human
uaaacaugcuguacauacuuu

SEQ ID NO: 3020836 - RNA, 23 nt, Human
uaaacaugcuguacauacuuuuu

SEQ ID NO: 3020837 - RNA, 22 nt, Human
uaaacuugguuuuuaaaaaacu

SEQ ID NO: 3020838 - RNA, 22 nt, Human
uaaacacauuaaagguacuuug

SEQ ID NO: 3020839 - RNA, 19 nt, Human
uaaacaugcuguacauacu

SEQ ID NO: 3020840 - RNA, 20 nt, Human
uaaacaugcuguacauacuu

SEQ ID NO: 3020841 - RNA, 21 nt, Human
uaaacaagaccacguuucuaa

SEQ ID NO: 3020842 - RNA, 22 nt, Human
uaaacaagaccacguuucuaaa

SEQ ID NO: 3020843 - RNA, 20 nt, Human
uaaacaagaccacguuucua

SEQ ID NO: 3020844 - RNA, 19 nt, Human
uaaacaagaccacguuucu

SEQ ID NO: 3020845 - RNA, 17 nt, Human
uaaaggcuaccuuugua

SEQ ID NO: 3020846 - RNA, 20 nt, Human
uaaagccugaguuugcuuuc

SEQ ID NO: 3020847 - RNA, 15 nt, Human
uaaaggcuaccuuug

SEQ ID NO: 3020848 - RNA, 12 nt, Human
uaaagaaaacug

SEQ ID NO: 3020849 - RNA, 16 nt, Human
uaaagcagcguuucua

SEQ ID NO: 3020850 - RNA, 17 nt, Human
uaaagcagcguuucuau

SEQ ID NO: 3020851 - RNA, 19 nt, Human
uaaagcagcguuucuauga

SEQ ID NO: 3020852 - RNA, 18 nt, Human
uaaaaggaagcuuacaug

SEQ ID NO: 3020853 - RNA, 21 nt, Human
uaaaaggaagcuuacaugccu

SEQ ID NO: 3020854 - RNA, 12 nt, Human
uaaaaggagcca

SEQ ID NO: 3020855 - RNA, 21 nt, Human
uaaaagguaugcaaucaaauc

SEQ ID NO: 3020856 - RNA, 12 nt, Human
uaaaaggugacc

SEQ ID NO: 3020857 - RNA, 21 nt, Human
uaaaagauacaguuacucaga

SEQ ID NO: 3020858 - RNA, 14 nt, Human
uaaaagauacaguu

SEQ ID NO: 3020859 - RNA, 17 nt, Human
uaaaagauacaguuacu

SEQ ID NO: 3020860 - RNA, 20 nt, Human
uaaaagauacaguuacucag

SEQ ID NO: 3020861 - RNA, 17 nt, Human
uaaaacacaacaucuuu

SEQ ID NO: 3020862 - RNA, 23 nt, Human
uaaaacacaacaucuuuuucuac

SEQ ID NO: 3020863 - RNA, 22 nt, Human
uaaaacacaacaucuuuuucua

SEQ ID NO: 3020864 - RNA, 15 nt, Human
uaaaacaacacucac

SEQ ID NO: 3020865 - RNA, 14 nt, Human
guuuagauaauaca

SEQ ID NO: 3020866 - RNA, 14 nt, Human
guuguuacauuuuu

SEQ ID NO: 3020867 - RNA, 15 nt, Human
guuguuacauuuuua

SEQ ID NO: 3020868 - RNA, 14 nt, Human
guugugguuaaucu

SEQ ID NO: 3020869 - RNA, 22 nt, Human
guuguggauuuaacagaaaugu

SEQ ID NO: 3020870 - RNA, 12 nt, Human
guugucagcuga

SEQ ID NO: 3020871 - RNA, 19 nt, Human
guuggcugggggccucagu

SEQ ID NO: 3020872 - RNA, 20 nt, Human
guuggccccugcccggcugc

SEQ ID NO: 3020873 - RNA, 13 nt, Human
guuggccccugcc

SEQ ID NO: 3020874 - RNA, 14 nt, Human
guuggccccugccc

SEQ ID NO: 3020875 - RNA, 12 nt, Human
guuggcuggggg

SEQ ID NO: 3020876 - RNA, 17 nt, Human
guuugagaucagccugg

SEQ ID NO: 3020877 - RNA, 23 nt, Human
guuugauuaaauucuugcaaagu

SEQ ID NO: 3020878 - RNA, 20 nt, Human
guuuguaaauuaacuuuuau

SEQ ID NO: 3020879 - RNA, 18 nt, Human
guuuggggaugagaaagg

SEQ ID NO: 3020880 - RNA, 21 nt, Human
guuugauucagacagcugccu

SEQ ID NO: 3020881 - RNA, 20 nt, Human
guuugauucagacagcugcc

SEQ ID NO: 3020882 - RNA, 16 nt, Human
guuugauucagacagc

SEQ ID NO: 3020883 - RNA, 18 nt, Human
guuuguuucugaaaggga

SEQ ID NO: 3020884 - RNA, 11 nt, Human
guuuucacucu

SEQ ID NO: 3020885 - RNA, 12 nt, Human
guuuucacucuu

SEQ ID NO: 3020886 - RNA, 17 nt, Human
guuuucaaaauaaaaau

SEQ ID NO: 3020887 - RNA, 20 nt, Human
guuuguuucugaaagggacg

SEQ ID NO: 3020888 - RNA, 13 nt, Human
guuuuccugaaga

SEQ ID NO: 3020889 - RNA, 20 nt, Human
guuuuccaugaguccccugu

SEQ ID NO: 3020890 - RNA, 19 nt, Human
guuuuccaugaguccccug

SEQ ID NO: 3020891 - RNA, 20 nt, Human
guuuuccagguuuaagcugu

SEQ ID NO: 3020892 - RNA, 15 nt, Human
guggguggggcagug

SEQ ID NO: 3020893 - RNA, 23 nt, Human
guggguuucuaaagcugccagcc

SEQ ID NO: 3020894 - RNA, 14 nt, Human
guggggcagugcuu

SEQ ID NO: 3020895 - RNA, 23 nt, Human
guggggcagugcuuggcccagga

SEQ ID NO: 3020896 - RNA, 17 nt, Human
guggggcagcuugaggg

SEQ ID NO: 3020897 - RNA, 13 nt, Human
guggggcagcuug

SEQ ID NO: 3020898 - RNA, 18 nt, Human
guggggaccucaggccug

SEQ ID NO: 3020899 - RNA, 15 nt, Human
guggggaccucaggc

SEQ ID NO: 3020900 - RNA, 15 nt, Human
gugggcuaguugggc

SEQ ID NO: 3020901 - RNA, 17 nt, Human
gugggcccaaugcacuu

SEQ ID NO: 3020902 - RNA, 17 nt, Human
guggcuaacuuggguua

SEQ ID NO: 3020903 - RNA, 14 nt, Human
guggcucacgccug

SEQ ID NO: 3020904 - RNA, 14 nt, Human
guggcugcuucaag

SEQ ID NO: 3020905 - RNA, 12 nt, Human
guggcugcuuca

SEQ ID NO: 3020906 - RNA, 19 nt, Human
guggcuggguuggagggug

SEQ ID NO: 3020907 - RNA, 23 nt, Human
guggcugcuucaaggauccugag

SEQ ID NO: 3020908 - RNA, 22 nt, Human
guggcugcuucaaggauccuga

SEQ ID NO: 3020909 - RNA, 19 nt, Human
guggcugcuucaaggaucc

SEQ ID NO: 3020910 - RNA, 16 nt, Human
guggcugcuucaagga

SEQ ID NO: 3020911 - RNA, 15 nt, Human
guggcugcuucaagg

SEQ ID NO: 3020912 - RNA, 22 nt, Human
guggcuuaaaacaacacucaca

SEQ ID NO: 3020913 - RNA, 21 nt, Human
guguaaguauucuuauuuaau

SEQ ID NO: 3020914 - RNA, 19 nt, Human
guggugcgaucuggguuca

SEQ ID NO: 3020915 - RNA, 14 nt, Human
guggugaccucugc

SEQ ID NO: 3020916 - RNA, 17 nt, Human
guggugaccucugccug

SEQ ID NO: 3020917 - RNA, 21 nt, Human
guggugagaggcauccaguau

SEQ ID NO: 3020918 - RNA, 18 nt, Human
gugguccuaaucuucuga

SEQ ID NO: 3020919 - RNA, 17 nt, Human
guggucccaccccacac

SEQ ID NO: 3020920 - RNA, 16 nt, Human
guggucccaccccaca

SEQ ID NO: 3020921 - RNA, 15 nt, Human
guggucccaccccac

SEQ ID NO: 3020922 - RNA, 14 nt, Human
guggucccacccca

SEQ ID NO: 3020923 - RNA, 17 nt, Human
gugguagagugugccug

SEQ ID NO: 3020924 - RNA, 19 nt, Human
gugguaugaucacggcuca

SEQ ID NO: 3020925 - RNA, 13 nt, Human
gugucccugcacu

SEQ ID NO: 3020926 - RNA, 16 nt, Human
gugucccugcacuugc

SEQ ID NO: 3020927 - RNA, 18 nt, Human
gugucccugcacuugcag

SEQ ID NO: 3020928 - RNA, 22 nt, Human
guguacauggaauaacauguaa

SEQ ID NO: 3020929 - RNA, 17 nt, Human
guguacauggaauaaca

SEQ ID NO: 3020930 - RNA, 14 nt, Human
gugugcguccuguc

SEQ ID NO: 3020931 - RNA, 16 nt, Human
gugugcguccugucgg

SEQ ID NO: 3020932 - RNA, 12 nt, Human
gugugcucugau

SEQ ID NO: 3020933 - RNA, 15 nt, Human
gugugcucugaucau

SEQ ID NO: 3020934 - RNA, 22 nt, Human
gugugcucugaucauccacugu

SEQ ID NO: 3020935 - RNA, 21 nt, Human
guguggagaagcggcuggcag

SEQ ID NO: 3020936 - RNA, 13 nt, Human
guguggagaagcg

SEQ ID NO: 3020937 - RNA, 20 nt, Human
gugugagucaccaagcccag

SEQ ID NO: 3020938 - RNA, 22 nt, Human
gugucucuugguccugcugcag

SEQ ID NO: 3020939 - RNA, 21 nt, Human
gugucucuugguccugcugca

SEQ ID NO: 3020940 - RNA, 20 nt, Human
gugucucuugguccugcugc

SEQ ID NO: 3020941 - RNA, 19 nt, Human
gugucucuugguccugcug

SEQ ID NO: 3020942 - RNA, 18 nt, Human
gugucucuugguccugcu

SEQ ID NO: 3020943 - RNA, 17 nt, Human
gugucucccuucauccu

SEQ ID NO: 3020944 - RNA, 14 nt, Human
gugucucuuggucc

SEQ ID NO: 3020945 - RNA, 23 nt, Human
gugucccugcacuugcagacucu

SEQ ID NO: 3020946 - RNA, 14 nt, Human
guguccggucccug

SEQ ID NO: 3020947 - RNA, 15 nt, Human
gugucgggcaugaca

SEQ ID NO: 3020948 - RNA, 18 nt, Human
guguuaugacuccagaau

SEQ ID NO: 3020949 - RNA, 14 nt, Human
guguuacuaaguuu

SEQ ID NO: 3020950 - RNA, 12 nt, Human
guguuacuaagu

SEQ ID NO: 3020951 - RNA, 15 nt, Human
guuacacuaaaaggu

SEQ ID NO: 3020952 - RNA, 16 nt, Human
guuacacuaaaaggug

SEQ ID NO: 3020953 - RNA, 13 nt, Human
guuacagacaaag

SEQ ID NO: 3020954 - RNA, 22 nt, Human
guuaaaauaccagccaguaaau

SEQ ID NO: 3020955 - RNA, 24 nt, Human
guucacuggacacuucacgcccuu

SEQ ID NO: 3020956 - RNA, 19 nt, Human
guucacugcaaccuccgcc

SEQ ID NO: 3020957 - RNA, 18 nt, Human
guucaucuugaauuguaa

SEQ ID NO: 3020958 - RNA, 13 nt, Human
guucaucuugaau

SEQ ID NO: 3020959 - RNA, 12 nt, Human
guucaucuugaa

SEQ ID NO: 3020960 - RNA, 17 nt, Human
guucaucauccuaagcu

SEQ ID NO: 3020961 - RNA, 20 nt, Human
guuccaccaucaagccacca

SEQ ID NO: 3020962 - RNA, 17 nt, Human
guuccaccaucaagcca

SEQ ID NO: 3020963 - RNA, 14 nt, Human
guuccuaauccucu

SEQ ID NO: 3020964 - RNA, 22 nt, Human
guuccucauuagcauuuugcua

SEQ ID NO: 3020965 - RNA, 23 nt, Human
guucaaucuggauucauauuuaa

SEQ ID NO: 3020966 - RNA, 16 nt, Human
guucaauucucauuug

SEQ ID NO: 3020967 - RNA, 23 nt, Human
guucaauucucauuugucacaca

SEQ ID NO: 3020968 - RNA, 20 nt, Human
guucaagcgauucuucugcu

SEQ ID NO: 3020969 - RNA, 19 nt, Human
guucaagcgauucuucugc

SEQ ID NO: 3020970 - RNA, 19 nt, Human
guuauuaaaaaucucaaau

SEQ ID NO: 3020971 - RNA, 21 nt, Human
guuaugacuccagaauuuccc

SEQ ID NO: 3020972 - RNA, 24 nt, Human
guuaguucaaucuggauucauauu

SEQ ID NO: 3020973 - RNA, 22 nt, Human
guuaguuucuccaagcaggaca

SEQ ID NO: 3020974 - RNA, 19 nt, Human
guuaguuucuccaagcagg

SEQ ID NO: 3020975 - RNA, 16 nt, Human
guuaguuucuccaagc

SEQ ID NO: 3020976 - RNA, 15 nt, Human
guuacucagaauucu

SEQ ID NO: 3020977 - RNA, 22 nt, Human
guuacuaaguuuuuauggcuuu

SEQ ID NO: 3020978 - RNA, 17 nt, Human
guuacagacaaagcgug

SEQ ID NO: 3020979 - RNA, 15 nt, Human
guuacagacaaagcg

SEQ ID NO: 3020980 - RNA, 18 nt, Human
guuacauaagauaaaugu

SEQ ID NO: 3020981 - RNA, 19 nt, Human
guuacauaagauaaaugug

SEQ ID NO: 3020982 - RNA, 21 nt, Human
guuacauuuuuaagugcugca

SEQ ID NO: 3020983 - RNA, 23 nt, Human
guuaccauuuugggguacccacu

SEQ ID NO: 3020984 - RNA, 16 nt, Human
guugaagacagagcua

SEQ ID NO: 3020985 - RNA, 15 nt, Human
guugcaggaccucag

SEQ ID NO: 3020986 - RNA, 14 nt, Human
guugccagucaccc

SEQ ID NO: 3020987 - RNA, 13 nt, Human
guugccagucacc

SEQ ID NO: 3020988 - RNA, 23 nt, Human
guugccagucaccccggccaccu

SEQ ID NO: 3020989 - RNA, 18 nt, Human
guugccagucaccccggc

SEQ ID NO: 3020990 - RNA, 17 nt, Human
guugccagucaccccgg

SEQ ID NO: 3020991 - RNA, 16 nt, Human
guugccagucaccccg

SEQ ID NO: 3020992 - RNA, 12 nt, Human
guugcccaggca

SEQ ID NO: 3020993 - RNA, 14 nt, Human
guugcccaggcagg

SEQ ID NO: 3020994 - RNA, 17 nt, Human
guuggccaggcuggucu

SEQ ID NO: 3020995 - RNA, 19 nt, Human
guuggccaggcuggucuca

SEQ ID NO: 3020996 - RNA, 14 nt, Human
guuggccaguguga

SEQ ID NO: 3020997 - RNA, 15 nt, Human
guuggccaggcuggu

SEQ ID NO: 3020998 - RNA, 14 nt, Human
guuggccaggcugg

SEQ ID NO: 3020999 - RNA, 13 nt, Human
guuggccaggcug

SEQ ID NO: 3021000 - RNA, 18 nt, Human
guuggcaaaaaggcagga

SEQ ID NO: 3021001 - RNA, 14 nt, Human
guuggcaaaaaggc

SEQ ID NO: 3021002 - RNA, 23 nt, Human
guuggccaaagccaaagcuaggc

SEQ ID NO: 3021003 - RNA, 12 nt, Human
guucuggcucuu

SEQ ID NO: 3021004 - RNA, 20 nt, Human
guucuggcucuuccaggcug

SEQ ID NO: 3021005 - RNA, 16 nt, Human
guucuggcucuuccag

SEQ ID NO: 3021006 - RNA, 23 nt, Human
guucuggcagaguugaagacaga

SEQ ID NO: 3021007 - RNA, 11 nt, Human
guucugggaca

SEQ ID NO: 3021008 - RNA, 12 nt, Human
guucugggacac

SEQ ID NO: 3021009 - RNA, 14 nt, Human
guucugggacacag

SEQ ID NO: 3021010 - RNA, 15 nt, Human
guucugggacacagu

SEQ ID NO: 3021011 - RNA, 16 nt, Human
guucugggacacaguu

SEQ ID NO: 3021012 - RNA, 18 nt, Human
guucuuucacccuuuucu

SEQ ID NO: 3021013 - RNA, 13 nt, Human
guucuuuccaaag

SEQ ID NO: 3021014 - RNA, 14 nt, Human
guucuuuccaaagu

SEQ ID NO: 3021015 - RNA, 18 nt, Human
guucuuuccaaaguacac

SEQ ID NO: 3021016 - RNA, 20 nt, Human
guucuuuccaaaguacacug

SEQ ID NO: 3021017 - RNA, 17 nt, Human
guugaaaaacagcugag

SEQ ID NO: 3021018 - RNA, 19 nt, Human
guucugauccuaguuccac

SEQ ID NO: 3021019 - RNA, 17 nt, Human
gucugucuuuuaaacuc

SEQ ID NO: 3021020 - RNA, 18 nt, Human
gucugugccauuuuguau

SEQ ID NO: 3021021 - RNA, 14 nt, Human
gucuguuuugugua

SEQ ID NO: 3021022 - RNA, 14 nt, Human
gucuguucuuucca

SEQ ID NO: 3021023 - RNA, 17 nt, Human
gucuguucuuuccaaag

SEQ ID NO: 3021024 - RNA, 15 nt, Human
gucuguuuuguguac

SEQ ID NO: 3021025 - RNA, 20 nt, Human
gucuguuuuguguacuuuua

SEQ ID NO: 3021026 - RNA, 21 nt, Human
gucuuaaaaaguggaaaaaua

SEQ ID NO: 3021027 - RNA, 16 nt, Human
gucuugaacuccuggc

SEQ ID NO: 3021028 - RNA, 17 nt, Human
gucuugaacuccuggcc

SEQ ID NO: 3021029 - RNA, 21 nt, Human
gucuugaacuccuggccucaa

SEQ ID NO: 3021030 - RNA, 18 nt, Human
gucuugaacuccuggccu

SEQ ID NO: 3021031 - RNA, 20 nt, Human
gucuugaacuccuggccuca

SEQ ID NO: 3021032 - RNA, 16 nt, Human
gucuugcaauggcagc

SEQ ID NO: 3021033 - RNA, 17 nt, Human
gucuugcaauggcagcc

SEQ ID NO: 3021034 - RNA, 18 nt, Human
gucuugcaauggcagccu

SEQ ID NO: 3021035 - RNA, 19 nt, Human
gucuugcaauggcagccuu

SEQ ID NO: 3021036 - RNA, 16 nt, Human
gucuuuuuucacuaca

SEQ ID NO: 3021037 - RNA, 23 nt, Human
gucuugcaauggcagccuuggca

SEQ ID NO: 3021038 - RNA, 20 nt, Human
gucuugcaauggcagccuug

SEQ ID NO: 3021039 - RNA, 21 nt, Human
gucuugcaauggcagccuugg

SEQ ID NO: 3021040 - RNA, 12 nt, Human
gucggagcccug

SEQ ID NO: 3021041 - RNA, 21 nt, Human
gucggaaaacaugcuacacac

SEQ ID NO: 3021042 - RNA, 16 nt, Human
gucggagcccugucuc

SEQ ID NO: 3021043 - RNA, 16 nt, Human
gucgggcaugacacga

SEQ ID NO: 3021044 - RNA, 15 nt, Human
gucccugccaaugga

SEQ ID NO: 3021045 - RNA, 14 nt, Human
gucccugccaaugg

SEQ ID NO: 3021046 - RNA, 11 nt, Human
gucccugccaa

SEQ ID NO: 3021047 - RNA, 19 nt, Human
guccuuaccagcagagcac

SEQ ID NO: 3021048 - RNA, 18 nt, Human
guccuuaccagcagagca

SEQ ID NO: 3021049 - RNA, 21 nt, Human
guccuuaccagcagagcaccu

SEQ ID NO: 3021050 - RNA, 18 nt, Human
gucucacuauguugccca

SEQ ID NO: 3021051 - RNA, 11 nt, Human
gucucacucug

SEQ ID NO: 3021052 - RNA, 19 nt, Human
gucucacuauguugcccag

SEQ ID NO: 3021053 - RNA, 15 nt, Human
gucucacucugucgc

SEQ ID NO: 3021054 - RNA, 16 nt, Human
gucucacucugucgcc

SEQ ID NO: 3021055 - RNA, 18 nt, Human
gucucacucugucgccca

SEQ ID NO: 3021056 - RNA, 19 nt, Human
gucucacucugucgcccag

SEQ ID NO: 3021057 - RNA, 22 nt, Human
gucucacucugucgcccagucu

SEQ ID NO: 3021058 - RNA, 13 nt, Human
gugcguccugucg

SEQ ID NO: 3021059 - RNA, 14 nt, Human
gugcggccuuuggc

SEQ ID NO: 3021060 - RNA, 14 nt, Human
gugcgccuacagga

SEQ ID NO: 3021061 - RNA, 21 nt, Human
gugcgaucuggguucacugca

SEQ ID NO: 3021062 - RNA, 14 nt, Human
gugccaugugccag

SEQ ID NO: 3021063 - RNA, 16 nt, Human
gugccaugugccaggu

SEQ ID NO: 3021064 - RNA, 23 nt, Human
gugauccacccaccucagccucc

SEQ ID NO: 3021065 - RNA, 24 nt, Human
gugauccacccaccucagccuccc

SEQ ID NO: 3021066 - RNA, 13 nt, Human
gugauuuuuguaa

SEQ ID NO: 3021067 - RNA, 18 nt, Human
gugauuuuuguaauuuuu

SEQ ID NO: 3021068 - RNA, 22 nt, Human
gugcauaccacuuuuguucuug

SEQ ID NO: 3021069 - RNA, 20 nt, Human
gugcaguggugcgaucuggg

SEQ ID NO: 3021070 - RNA, 23 nt, Human
gugcaguggugcgaucuggguuc

SEQ ID NO: 3021071 - RNA, 21 nt, Human
gugaaugaugauccuaggcau

SEQ ID NO: 3021072 - RNA, 20 nt, Human
gugacaaggauugcuacugu

SEQ ID NO: 3021073 - RNA, 12 nt, Human
gugaccucugcc

SEQ ID NO: 3021074 - RNA, 15 nt, Human
gugacagaggcagcc

SEQ ID NO: 3021075 - RNA, 13 nt, Human
gugaccucugccu

SEQ ID NO: 3021076 - RNA, 14 nt, Human
gugaccucugccug

SEQ ID NO: 3021077 - RNA, 12 nt, Human
gugacagaggca

SEQ ID NO: 3021078 - RNA, 13 nt, Human
gugacagaggcag

SEQ ID NO: 3021079 - RNA, 14 nt, Human
gugacagaggcagc

SEQ ID NO: 3021080 - RNA, 14 nt, Human
gugagccacugcac

SEQ ID NO: 3021081 - RNA, 15 nt, Human
gugagccacugcacc

SEQ ID NO: 3021082 - RNA, 20 nt, Human
gugagccacugcaccgggcc

SEQ ID NO: 3021083 - RNA, 17 nt, Human
gugaggaugaaaaaaua

SEQ ID NO: 3021084 - RNA, 19 nt, Human
gugagccgagaucacgcca

SEQ ID NO: 3021085 - RNA, 17 nt, Human
gugauacaaugcugugc

SEQ ID NO: 3021086 - RNA, 15 nt, Human
gugauacaaugcugu

SEQ ID NO: 3021087 - RNA, 17 nt, Human
gugaguugauagcacag

SEQ ID NO: 3021088 - RNA, 22 nt, Human
gugauccacccaccucagccuc

SEQ ID NO: 3021089 - RNA, 15 nt, Human
guauagauguugcua

SEQ ID NO: 3021090 - RNA, 16 nt, Human
guauagauguugcuaa

SEQ ID NO: 3021091 - RNA, 22 nt, Human
guauaugucaagccauaauugu

SEQ ID NO: 3021092 - RNA, 20 nt, Human
guauguuuuauauagcaaga

SEQ ID NO: 3021093 - RNA, 20 nt, Human
guaugaucacggcucacugc

SEQ ID NO: 3021094 - RNA, 17 nt, Human
guaugaggcauuuguuu

SEQ ID NO: 3021095 - RNA, 20 nt, Human
guaugaggcauuuguuugaa

SEQ ID NO: 3021096 - RNA, 21 nt, Human
guaugaucacggcucacugca

SEQ ID NO: 3021097 - RNA, 19 nt, Human
guaucuggugacuuuccuc

SEQ ID NO: 3021098 - RNA, 12 nt, Human
guaucuggugac

SEQ ID NO: 3021099 - RNA, 12 nt, Human
guaucugagcag

SEQ ID NO: 3021100 - RNA, 13 nt, Human
guaugaggcauuu

SEQ ID NO: 3021101 - RNA, 15 nt, Human
guaugaggcauuugu

SEQ ID NO: 3021102 - RNA, 16 nt, Human
guagggcgggaggaug

SEQ ID NO: 3021103 - RNA, 23 nt, Human
guagggcgggaggauguucuggg

SEQ ID NO: 3021104 - RNA, 21 nt, Human
guagggcgggaggauguucug

SEQ ID NO: 3021105 - RNA, 22 nt, Human
guagggcgggaggauguucugg

SEQ ID NO: 3021106 - RNA, 15 nt, Human
guagagugugccuga

SEQ ID NO: 3021107 - RNA, 16 nt, Human
guaggguuauaauaau

SEQ ID NO: 3021108 - RNA, 14 nt, Human
guagucaggugccu

SEQ ID NO: 3021109 - RNA, 16 nt, Human
gucaaggcuuagaccc

SEQ ID NO: 3021110 - RNA, 18 nt, Human
gucaaggcuuagacccuc

SEQ ID NO: 3021111 - RNA, 19 nt, Human
guauuuuguuuuugucuua

SEQ ID NO: 3021112 - RNA, 20 nt, Human
gucaaggcuuagacccucau

SEQ ID NO: 3021113 - RNA, 14 nt, Human
gucaaggcuuagac

SEQ ID NO: 3021114 - RNA, 15 nt, Human
gucaagugaaaaagg

SEQ ID NO: 3021115 - RNA, 15 nt, Human
gucaccccggccacc

SEQ ID NO: 3021116 - RNA, 22 nt, Human
guauuuucuccaaauguucacu

SEQ ID NO: 3021117 - RNA, 14 nt, Human
guauuuuacuaaua

SEQ ID NO: 3021118 - RNA, 22 nt, Human
gucaccccggccaccugcggug

SEQ ID NO: 3021119 - RNA, 18 nt, Human
gucaccccggccaccugc

SEQ ID NO: 3021120 - RNA, 17 nt, Human
gucaccccggccaccug

SEQ ID NO: 3021121 - RNA, 19 nt, Human
gucacucuggcagcucaga

SEQ ID NO: 3021122 - RNA, 17 nt, Human
gucacucuggcagcuca

SEQ ID NO: 3021123 - RNA, 16 nt, Human
gucacucuggcagcuc

SEQ ID NO: 3021124 - RNA, 14 nt, Human
gucacucuggcagc

SEQ ID NO: 3021125 - RNA, 13 nt, Human
gucacucuggcag

SEQ ID NO: 3021126 - RNA, 12 nt, Human
gucacucuggca

SEQ ID NO: 3021127 - RNA, 14 nt, Human
gucagagccugcag

SEQ ID NO: 3021128 - RNA, 15 nt, Human
gucagagccugcagu

SEQ ID NO: 3021129 - RNA, 16 nt, Human
gucagagccugcaguu

SEQ ID NO: 3021130 - RNA, 14 nt, Human
gucauucuucccua

SEQ ID NO: 3021131 - RNA, 17 nt, Human
gucauuauguuaauauu

SEQ ID NO: 3021132 - RNA, 19 nt, Human
gucauuauguuaauauuuc

SEQ ID NO: 3021133 - RNA, 23 nt, Human
guccacccaggagccccgaggcc

SEQ ID NO: 3021134 - RNA, 12 nt, Human
guccacccagga

SEQ ID NO: 3021135 - RNA, 21 nt, Human
gucccaccuuggcugcaggga

SEQ ID NO: 3021136 - RNA, 17 nt, Human
guccccaccgcagacag

SEQ ID NO: 3021137 - RNA, 20 nt, Human
gucccaccuuggcugcaggg

SEQ ID NO: 3021138 - RNA, 23 nt, Human
gucccaccuuggcugcagggagu

SEQ ID NO: 3021139 - RNA, 16 nt, Human
gucccugcacuugcag

SEQ ID NO: 3021140 - RNA, 19 nt, Human
gucccugcacuugcagacu

SEQ ID NO: 3021141 - RNA, 21 nt, Human
gucccugcacuugcagacucu

SEQ ID NO: 3021142 - RNA, 13 nt, Human
uuuuccuucaaga

SEQ ID NO: 3021143 - RNA, 21 nt, Human
uuuuccuucaagaaugcagua

SEQ ID NO: 3021144 - RNA, 14 nt, Human
uuuuccuucaagaa

SEQ ID NO: 3021145 - RNA, 16 nt, Human
uuuugguauuugaaac

SEQ ID NO: 3021146 - RNA, 14 nt, Human
uuuugguauuugaa

SEQ ID NO: 3021147 - RNA, 15 nt, Human
uuuuggucuguguga

SEQ ID NO: 3021148 - RNA, 18 nt, Human
uuuuggguuuauuuggaa

SEQ ID NO: 3021149 - RNA, 17 nt, Human
uuuuggguuuauuugga

SEQ ID NO: 3021150 - RNA, 14 nt, Human
uuuuggcugcugaa

SEQ ID NO: 3021151 - RNA, 20 nt, Human
uuuugacaaggggcaguggu

SEQ ID NO: 3021152 - RNA, 19 nt, Human
uuuuguagagccagggucu

SEQ ID NO: 3021153 - RNA, 16 nt, Human
uuuugucauauaagau

SEQ ID NO: 3021154 - RNA, 20 nt, Human
uuuuuaagggcccuuuuuca

SEQ ID NO: 3021155 - RNA, 23 nt, Human
uuuuuaagaaaaaggaugcacag

SEQ ID NO: 3021156 - RNA, 11 nt, Human
uuuuuccuuca

SEQ ID NO: 3021157 - RNA, 21 nt, Human
uuuuuccuucaagaaugcagu

SEQ ID NO: 3021158 - RNA, 19 nt, Human
uuuuuccuucagugccuua

SEQ ID NO: 3021159 - RNA, 23 nt, Human
uuaccaauugaaguaaaaugugg

SEQ ID NO: 3021160 - RNA, 18 nt, Human
uuuccucauuuuuauaau

SEQ ID NO: 3021161 - RNA, 16 nt, Human
uuuccugaggcugggc

SEQ ID NO: 3021162 - RNA, 22 nt, Human
uuaccaauugaaguaaaaugug

SEQ ID NO: 3021163 - RNA, 14 nt, Human
uuaccacagacaua

SEQ ID NO: 3021164 - RNA, 17 nt, Human
uuaccacagacauacua

SEQ ID NO: 3021165 - RNA, 23 nt, Human
uuacauuuuuaagugcugcauuu

SEQ ID NO: 3021166 - RNA, 23 nt, Human
uuucuacucgaguuacagacaaa

SEQ ID NO: 3021167 - RNA, 20 nt, Human
uuucuaaaggcuaccuuugu

SEQ ID NO: 3021168 - RNA, 21 nt, Human
uuucuaaaggcuaccuuugua

SEQ ID NO: 3021169 - RNA, 18 nt, Human
uuucuaaaggcuaccuuu

SEQ ID NO: 3021170 - RNA, 20 nt, Human
uuucuguucuuucuggcuau

SEQ ID NO: 3021171 - RNA, 16 nt, Human
uuugaagauucuaugu

SEQ ID NO: 3021172 - RNA, 22 nt, Human
uuugaagaugccgcauuuggau

SEQ ID NO: 3021173 - RNA, 17 nt, Human
uuugaacugauaaagau

SEQ ID NO: 3021174 - RNA, 19 nt, Human
uuugaacugauaaagauga

SEQ ID NO: 3021175 - RNA, 15 nt, Human
uuugaacugauaaag

SEQ ID NO: 3021176 - RNA, 14 nt, Human
uuugaacucuucaa

SEQ ID NO: 3021177 - RNA, 18 nt, Human
uuucuuagggaaggauac

SEQ ID NO: 3021178 - RNA, 23 nt, Human
uuucuuagggaaggauacaaaag

SEQ ID NO: 3021179 - RNA, 13 nt, Human
uuucuucucccuc

SEQ ID NO: 3021180 - RNA, 12 nt, Human
uuucuucucccu

SEQ ID NO: 3021181 - RNA, 14 nt, Human
uuuggaaaagaaua

SEQ ID NO: 3021182 - RNA, 14 nt, Human
uuuggaauuuugug

SEQ ID NO: 3021183 - RNA, 15 nt, Human
uuugcuuugugauuu

SEQ ID NO: 3021184 - RNA, 16 nt, Human
uuugcuuugugauuuu

SEQ ID NO: 3021185 - RNA, 20 nt, Human
uuugcauauugcauacuauu

SEQ ID NO: 3021186 - RNA, 15 nt, Human
uuugcauauugcaua

SEQ ID NO: 3021187 - RNA, 13 nt, Human
uuugguuucuagc

SEQ ID NO: 3021188 - RNA, 21 nt, Human
uuuggaauuuugugcccccau

SEQ ID NO: 3021189 - RNA, 17 nt, Human
uuuggucuacacugugc

SEQ ID NO: 3021190 - RNA, 12 nt, Human
uuuguucccugu

SEQ ID NO: 3021191 - RNA, 21 nt, Human
uuuguucuggcucuuccaggc

SEQ ID NO: 3021192 - RNA, 17 nt, Human
uuuuaaagaaugcucuu

SEQ ID NO: 3021193 - RNA, 19 nt, Human
uuuuaauauggaucuguau

SEQ ID NO: 3021194 - RNA, 11 nt, Human
uuuuaaaugca

SEQ ID NO: 3021195 - RNA, 12 nt, Human
uuuuaaaugcac

SEQ ID NO: 3021196 - RNA, 21 nt, Human
uuuuaaaugcaccuggaauau

SEQ ID NO: 3021197 - RNA, 22 nt, Human
gccgugugugugcguccugucg

SEQ ID NO: 3021198 - RNA, 18 nt, Human
gccucaaccuccugggcu

SEQ ID NO: 3021199 - RNA, 19 nt, Human
gccucaaccuccugggcua

SEQ ID NO: 3021200 - RNA, 17 nt, Human
gccucaaccuccugggc

SEQ ID NO: 3021201 - RNA, 17 nt, Human
gccucacaguccuuacc

SEQ ID NO: 3021202 - RNA, 13 nt, Human
gccucacaguccu

SEQ ID NO: 3021203 - RNA, 23 nt, Human
gccguggugauuuagcaggaagc

SEQ ID NO: 3021204 - RNA, 20 nt, Human
gccguguaaccauggaccca

SEQ ID NO: 3021205 - RNA, 17 nt, Human
gccgucuaccugagggg

SEQ ID NO: 3021206 - RNA, 16 nt, Human
gccgucuaccugaggg

SEQ ID NO: 3021207 - RNA, 15 nt, Human
gccgucuaccugagg

SEQ ID NO: 3021208 - RNA, 18 nt, Human
gcccuuuuucaauaacug

SEQ ID NO: 3021209 - RNA, 16 nt, Human
gcccuuggccaugggu

SEQ ID NO: 3021210 - RNA, 18 nt, Human
gcccuucucuccagcccc

SEQ ID NO: 3021211 - RNA, 17 nt, Human
gcccuucucuccagccc

SEQ ID NO: 3021212 - RNA, 16 nt, Human
gcccuucucuccagcc

SEQ ID NO: 3021213 - RNA, 14 nt, Human
gcccuucucuccag

SEQ ID NO: 3021214 - RNA, 20 nt, Human
gccgagaucacgccacugca

SEQ ID NO: 3021215 - RNA, 21 nt, Human
gccgagaucacgccacugcac

SEQ ID NO: 3021216 - RNA, 22 nt, Human
gccgagaucacgccacugcacu

SEQ ID NO: 3021217 - RNA, 12 nt, Human
gccgcagcccug

SEQ ID NO: 3021218 - RNA, 11 nt, Human
gccgcagcccu

SEQ ID NO: 3021219 - RNA, 21 nt, Human
gccgggcgcgguggcucacgc

SEQ ID NO: 3021220 - RNA, 12 nt, Human
gccucugccucu

SEQ ID NO: 3021221 - RNA, 13 nt, Human
gccucugccucug

SEQ ID NO: 3021222 - RNA, 15 nt, Human
gccugcaagggagug

SEQ ID NO: 3021223 - RNA, 13 nt, Human
gccugcaagggag

SEQ ID NO: 3021224 - RNA, 14 nt, Human
gccucucucaggcc

SEQ ID NO: 3021225 - RNA, 13 nt, Human
gccucucucaggc

SEQ ID NO: 3021226 - RNA, 17 nt, Human
gccucugacacacagcu

SEQ ID NO: 3021227 - RNA, 18 nt, Human
gccucugacacacagcuc

SEQ ID NO: 3021228 - RNA, 16 nt, Human
gccucugacacacagc

SEQ ID NO: 3021229 - RNA, 16 nt, Human
gccucucucaggccaa

SEQ ID NO: 3021230 - RNA, 19 nt, Human
gccucugacacacagcucu

SEQ ID NO: 3021231 - RNA, 20 nt, Human
gccucugacacacagcucug

SEQ ID NO: 3021232 - RNA, 21 nt, Human
gccucugacacacagcucugu

SEQ ID NO: 3021233 - RNA, 14 nt, Human
gccucugcacuccc

SEQ ID NO: 3021234 - RNA, 18 nt, Human
gccucacaguccuuacca

SEQ ID NO: 3021235 - RNA, 15 nt, Human
gccucagcauccugg

SEQ ID NO: 3021236 - RNA, 16 nt, Human
gccucagcauccuggc

SEQ ID NO: 3021237 - RNA, 18 nt, Human
gccucccaaagugcuggg

SEQ ID NO: 3021238 - RNA, 19 nt, Human
gccucccaaagugcuggga

SEQ ID NO: 3021239 - RNA, 13 nt, Human
gccucccaacuca

SEQ ID NO: 3021240 - RNA, 16 nt, Human
gccucccaucacccgc

SEQ ID NO: 3021241 - RNA, 14 nt, Human
gccucccaucaccc

SEQ ID NO: 3021242 - RNA, 19 nt, Human
gccucccaacucaccccag

SEQ ID NO: 3021243 - RNA, 18 nt, Human
gccucccaacucacccca

SEQ ID NO: 3021244 - RNA, 17 nt, Human
gccucccaacucacccc

SEQ ID NO: 3021245 - RNA, 16 nt, Human
gccucccaacucaccc

SEQ ID NO: 3021246 - RNA, 20 nt, Human
gccucccgaguagcugggac

SEQ ID NO: 3021247 - RNA, 18 nt, Human
gccucccgaguagcuggg

SEQ ID NO: 3021248 - RNA, 19 nt, Human
gccucccgaguagcuggga

SEQ ID NO: 3021249 - RNA, 17 nt, Human
gccucccgaguagcugg

SEQ ID NO: 3021250 - RNA, 13 nt, Human
gcuacacaccuaa

SEQ ID NO: 3021251 - RNA, 20 nt, Human
gcuaagagggagggagggcu

SEQ ID NO: 3021252 - RNA, 13 nt, Human
gcuacacacugca

SEQ ID NO: 3021253 - RNA, 20 nt, Human
gcuacacacugcauguuugu

SEQ ID NO: 3021254 - RNA, 14 nt, Human
gcuacacaggggaa

SEQ ID NO: 3021255 - RNA, 13 nt, Human
gcuaagagggagg

SEQ ID NO: 3021256 - RNA, 16 nt, Human
gcuaccuuuguauucu

SEQ ID NO: 3021257 - RNA, 15 nt, Human
gcuaggaacacuccu

SEQ ID NO: 3021258 - RNA, 15 nt, Human
gcggacagccacggc

SEQ ID NO: 3021259 - RNA, 19 nt, Human
gcgucucauacucaccuca

SEQ ID NO: 3021260 - RNA, 11 nt, Human
gcggacagcca

SEQ ID NO: 3021261 - RNA, 13 nt, Human
gcggacagccacg

SEQ ID NO: 3021262 - RNA, 15 nt, Human
gcgccuacaggagug

SEQ ID NO: 3021263 - RNA, 18 nt, Human
gccugguggcagcugcgg

SEQ ID NO: 3021264 - RNA, 19 nt, Human
gccugguggcagcugcggu

SEQ ID NO: 3021265 - RNA, 21 nt, Human
gccugguggcagcugcggucc

SEQ ID NO: 3021266 - RNA, 13 nt, Human
gccugguggcagc

SEQ ID NO: 3021267 - RNA, 22 nt, Human
gccugggggcugggcagaggaa

SEQ ID NO: 3021268 - RNA, 21 nt, Human
gccugggggcugggcagagga

SEQ ID NO: 3021269 - RNA, 14 nt, Human
gccuuauggaacac

SEQ ID NO: 3021270 - RNA, 10 nt, Human
gccuuaugga

SEQ ID NO: 3021271 - RNA, 19 nt, Human
gccuuagaagucacacagu

SEQ ID NO: 3021272 - RNA, 17 nt, Human
gccuuagaagucacaca

SEQ ID NO: 3021273 - RNA, 18 nt, Human
gccuuagaagucacacag

SEQ ID NO: 3021274 - RNA, 21 nt, Human
gccuguugggccaggagccuc

SEQ ID NO: 3021275 - RNA, 21 nt, Human
gccuuacacaaugguuuucuu

SEQ ID NO: 3021276 - RNA, 18 nt, Human
gccuuacccucauguucu

SEQ ID NO: 3021277 - RNA, 16 nt, Human
gccuuacacaaugguu

SEQ ID NO: 3021278 - RNA, 20 nt, Human
gccuuacacaaugguuuucu

SEQ ID NO: 3021279 - RNA, 16 nt, Human
gccuuccagggguggg

SEQ ID NO: 3021280 - RNA, 15 nt, Human
gccuuccaggggugg

SEQ ID NO: 3021281 - RNA, 12 nt, Human
gccuuccagggg

SEQ ID NO: 3021282 - RNA, 20 nt, Human
gccuuauggaacacucugag

SEQ ID NO: 3021283 - RNA, 19 nt, Human
gccuuauggaacacucuga

SEQ ID NO: 3021284 - RNA, 18 nt, Human
gccuuauggaacacucug

SEQ ID NO: 3021285 - RNA, 16 nt, Human
gccuuauggaacacuc

SEQ ID NO: 3021286 - RNA, 23 nt, Human
gcgacaaugcaaaccaucauuga

SEQ ID NO: 3021287 - RNA, 13 nt, Human
gccuuuggcuuca

SEQ ID NO: 3021288 - RNA, 20 nt, Human
gccaugaggaacaaggcaag

SEQ ID NO: 3021289 - RNA, 14 nt, Human
gccaugcuccuggc

SEQ ID NO: 3021290 - RNA, 13 nt, Human
gccaggcuggucu

SEQ ID NO: 3021291 - RNA, 15 nt, Human
gccaggcuggucuca

SEQ ID NO: 3021292 - RNA, 23 nt, Human
gccaguaaaugggggugcauuug

SEQ ID NO: 3021293 - RNA, 12 nt, Human
gccaguaaaugg

SEQ ID NO: 3021294 - RNA, 21 nt, Human
gccagucaccccggccaccug

SEQ ID NO: 3021295 - RNA, 14 nt, Human
gcccacuucugcca

SEQ ID NO: 3021296 - RNA, 13 nt, Human
gcccaccuuggcu

SEQ ID NO: 3021297 - RNA, 15 nt, Human
gcccaccuuggcuca

SEQ ID NO: 3021298 - RNA, 16 nt, Human
gcccaccuuggcucaa

SEQ ID NO: 3021299 - RNA, 16 nt, Human
gcccaccuggccucug

SEQ ID NO: 3021300 - RNA, 15 nt, Human
gcccaccuggccucu

SEQ ID NO: 3021301 - RNA, 24 nt, Human
gcccaccuggccucugcacucccc

SEQ ID NO: 3021302 - RNA, 21 nt, Human
gcccaccuggccucugcacuc

SEQ ID NO: 3021303 - RNA, 20 nt, Human
gcccaccuggccucugcacu

SEQ ID NO: 3021304 - RNA, 17 nt, Human
gcccaccuggccucugc

SEQ ID NO: 3021305 - RNA, 15 nt, Human
gccaugggccuccug

SEQ ID NO: 3021306 - RNA, 16 nt, Human
gccaugggccuccugu

SEQ ID NO: 3021307 - RNA, 20 nt, Human
gccaggaagccagcaggcuc

SEQ ID NO: 3021308 - RNA, 15 nt, Human
gccaggaagccagca

SEQ ID NO: 3021309 - RNA, 16 nt, Human
gccaggagccuccugc

SEQ ID NO: 3021310 - RNA, 14 nt, Human
gccaggagccuccu

SEQ ID NO: 3021311 - RNA, 20 nt, Human
gccaggagccuccugcccuu

SEQ ID NO: 3021312 - RNA, 19 nt, Human
gccaggagccuccugcccu

SEQ ID NO: 3021313 - RNA, 16 nt, Human
gccagcugcuugggcu

SEQ ID NO: 3021314 - RNA, 18 nt, Human
gccagcugcuugggcuuc

SEQ ID NO: 3021315 - RNA, 17 nt, Human
gccagcugcuugggcuu

SEQ ID NO: 3021316 - RNA, 14 nt, Human
gccaggaagccagc

SEQ ID NO: 3021317 - RNA, 13 nt, Human
gccaggaagccag

SEQ ID NO: 3021318 - RNA, 12 nt, Human
gccaggaagcca

SEQ ID NO: 3021319 - RNA, 20 nt, Human
gccagcugcuugggcuucau

SEQ ID NO: 3021320 - RNA, 19 nt, Human
gccagauucuuuccugagg

SEQ ID NO: 3021321 - RNA, 21 nt, Human
gccagccgagauagccaaggc

SEQ ID NO: 3021322 - RNA, 22 nt, Human
gccagccgagauagccaaggcc

SEQ ID NO: 3021323 - RNA, 15 nt, Human
gccagaugcaccagc

SEQ ID NO: 3021324 - RNA, 20 nt, Human
gccagauucuuuccugaggc

SEQ ID NO: 3021325 - RNA, 13 nt, Human
gccagauuucacu

SEQ ID NO: 3021326 - RNA, 24 nt, Human
gccagauucuuuccugaggcuggg

SEQ ID NO: 3021327 - RNA, 14 nt, Human
gccagaugcaccag

SEQ ID NO: 3021328 - RNA, 20 nt, Human
gccacugcaccgggccacag

SEQ ID NO: 3021329 - RNA, 21 nt, Human
gccacugcaccgggccacaga

SEQ ID NO: 3021330 - RNA, 19 nt, Human
gccacugcaccgggccaca

SEQ ID NO: 3021331 - RNA, 22 nt, Human
gccagagacacaagccuucggc

SEQ ID NO: 3021332 - RNA, 21 nt, Human
gccagagacacaagccuucgg

SEQ ID NO: 3021333 - RNA, 20 nt, Human
gccaaggccaaaggaagcac

SEQ ID NO: 3021334 - RNA, 19 nt, Human
gccaaggccaaaggaagca

SEQ ID NO: 3021335 - RNA, 24 nt, Human
gccaaggccaaaggaagcacaugc

SEQ ID NO: 3021336 - RNA, 22 nt, Human
gcccaguuggguggaugccugg

SEQ ID NO: 3021337 - RNA, 15 nt, Human
gcccagagagggugg

SEQ ID NO: 3021338 - RNA, 21 nt, Human
gcccagagaggguggugaccu

SEQ ID NO: 3021339 - RNA, 23 nt, Human
gcccaggccccugccacccuggg

SEQ ID NO: 3021340 - RNA, 13 nt, Human
gcccaggccuccu

SEQ ID NO: 3021341 - RNA, 22 nt, Human
gcccaggccccugccacccugg

SEQ ID NO: 3021342 - RNA, 12 nt, Human
gcccaggcuggc

SEQ ID NO: 3021343 - RNA, 14 nt, Human
gccccauucugccu

SEQ ID NO: 3021344 - RNA, 22 nt, Human
gccccauccucuguacagagcc

SEQ ID NO: 3021345 - RNA, 14 nt, Human
gccccauccucugu

SEQ ID NO: 3021346 - RNA, 13 nt, Human
gccccauccucug

SEQ ID NO: 3021347 - RNA, 21 nt, Human
gccccagugcccacaggauca

SEQ ID NO: 3021348 - RNA, 13 nt, Human
gccccagugccca

SEQ ID NO: 3021349 - RNA, 14 nt, Human
gccccagugcccac

SEQ ID NO: 3021350 - RNA, 18 nt, Human
gccccaucccaaacccuu

SEQ ID NO: 3021351 - RNA, 12 nt, Human
gccccagugccc

SEQ ID NO: 3021352 - RNA, 20 nt, Human
gccccuucugacccaugcug

SEQ ID NO: 3021353 - RNA, 15 nt, Human
gccccgaggccuucu

SEQ ID NO: 3021354 - RNA, 23 nt, Human
gccccucaacucuccuccagagu

SEQ ID NO: 3021355 - RNA, 18 nt, Human
gccccgaggccuucucug

SEQ ID NO: 3021356 - RNA, 14 nt, Human
gccccucagggucc

SEQ ID NO: 3021357 - RNA, 18 nt, Human
gccccucagggucccugg

SEQ ID NO: 3021358 - RNA, 16 nt, Human
gccccucagggucccu

SEQ ID NO: 3021359 - RNA, 21 nt, Human
gcccuccaagaccuucuccuu

SEQ ID NO: 3021360 - RNA, 19 nt, Human
gcccuccaagaccuucucc

SEQ ID NO: 3021361 - RNA, 23 nt, Human
gcccuccaagaccuucuccuuca

SEQ ID NO: 3021362 - RNA, 22 nt, Human
gcccuccaagaccuucuccuuc

SEQ ID NO: 3021363 - RNA, 19 nt, Human
gcccucugcccacucccug

SEQ ID NO: 3021364 - RNA, 18 nt, Human
gcccucugcccacucccu

SEQ ID NO: 3021365 - RNA, 16 nt, Human
gcccucugcccacucc

SEQ ID NO: 3021366 - RNA, 13 nt, Human
gcccucugcccac

SEQ ID NO: 3021367 - RNA, 13 nt, Human
gcccugcagaggg

SEQ ID NO: 3021368 - RNA, 14 nt, Human
gcccugcagagggc

SEQ ID NO: 3021369 - RNA, 15 nt, Human
gcccugcagagggca

SEQ ID NO: 3021370 - RNA, 19 nt, Human
gcagcccucaauugugaaa

SEQ ID NO: 3021371 - RNA, 13 nt, Human
gcagcccugcaga

SEQ ID NO: 3021372 - RNA, 21 nt, Human
gcagccccuguucuggcagag

SEQ ID NO: 3021373 - RNA, 20 nt, Human
gcagccccuguucuggcaga

SEQ ID NO: 3021374 - RNA, 17 nt, Human
gcagccccauucugccu

SEQ ID NO: 3021375 - RNA, 16 nt, Human
gcagcaauaaagcagc

SEQ ID NO: 3021376 - RNA, 23 nt, Human
gcagcaauaaagcagcguuucua

SEQ ID NO: 3021377 - RNA, 18 nt, Human
gcagccccauucugccug

SEQ ID NO: 3021378 - RNA, 19 nt, Human
gcagccccauucugccugc

SEQ ID NO: 3021379 - RNA, 21 nt, Human
gcagccccauucugccugccc

SEQ ID NO: 3021380 - RNA, 24 nt, Human
gcagccccauucugccugcccagg

SEQ ID NO: 3021381 - RNA, 22 nt, Human
gcagauacaggaaaagcugcug

SEQ ID NO: 3021382 - RNA, 12 nt, Human
gcagcaauaaag

SEQ ID NO: 3021383 - RNA, 17 nt, Human
gcagacaguuaagagaa

SEQ ID NO: 3021384 - RNA, 21 nt, Human
gcagaguugaagacagagcua

SEQ ID NO: 3021385 - RNA, 20 nt, Human
gcagaguugaagacagagcu

SEQ ID NO: 3021386 - RNA, 12 nt, Human
gcaggcagccag

SEQ ID NO: 3021387 - RNA, 14 nt, Human
gcaggcagccaggc

SEQ ID NO: 3021388 - RNA, 13 nt, Human
gcaggcagccagg

SEQ ID NO: 3021389 - RNA, 20 nt, Human
gcaggaggaucacuugaguc

SEQ ID NO: 3021390 - RNA, 23 nt, Human
gcaggaggaucacuugaguccag

SEQ ID NO: 3021391 - RNA, 14 nt, Human
gcagcucaccucuc

SEQ ID NO: 3021392 - RNA, 15 nt, Human
gcagccuuggcaaac

SEQ ID NO: 3021393 - RNA, 15 nt, Human
gcagcucaccucucc

SEQ ID NO: 3021394 - RNA, 17 nt, Human
gcagcccugcagagggc

SEQ ID NO: 3021395 - RNA, 16 nt, Human
gcagcccugcagaggg

SEQ ID NO: 3021396 - RNA, 15 nt, Human
gcagcccugcagagg

SEQ ID NO: 3021397 - RNA, 14 nt, Human
gcagcccugcagag

SEQ ID NO: 3021398 - RNA, 17 nt, Human
gcacugguuuguucccu

SEQ ID NO: 3021399 - RNA, 20 nt, Human
gcacugcuuccagugaggcu

SEQ ID NO: 3021400 - RNA, 18 nt, Human
gcacugcuuccagugagg

SEQ ID NO: 3021401 - RNA, 16 nt, Human
gcacugcuuccaguga

SEQ ID NO: 3021402 - RNA, 19 nt, Human
gcacugguuuguucccugu

SEQ ID NO: 3021403 - RNA, 23 nt, Human
gcagacaggcaagcaccuccugc

SEQ ID NO: 3021404 - RNA, 19 nt, Human
gcagacaggcaagcaccuc

SEQ ID NO: 3021405 - RNA, 15 nt, Human
gcagacaggaccagg

SEQ ID NO: 3021406 - RNA, 13 nt, Human
gcagacaggacca

SEQ ID NO: 3021407 - RNA, 12 nt, Human
gcagacaggacc

SEQ ID NO: 3021408 - RNA, 14 nt, Human
gcaauggcagccuu

SEQ ID NO: 3021409 - RNA, 20 nt, Human
gcaccacugcacuccagccu

SEQ ID NO: 3021410 - RNA, 12 nt, Human
gcaauggcagcc

SEQ ID NO: 3021411 - RNA, 13 nt, Human
gcaauggcagccu

SEQ ID NO: 3021412 - RNA, 14 nt, Human
gcaccagcagccug

SEQ ID NO: 3021413 - RNA, 15 nt, Human
gcaccagcagccugg

SEQ ID NO: 3021414 - RNA, 22 nt, Human
gcaccacugcacuccagccugg

SEQ ID NO: 3021415 - RNA, 21 nt, Human
gcaccacugcacuccagccug

SEQ ID NO: 3021416 - RNA, 16 nt, Human
gcaccagcagccugga

SEQ ID NO: 3021417 - RNA, 22 nt, Human
gcacccaccaucaugucuggcu

SEQ ID NO: 3021418 - RNA, 18 nt, Human
gcacccggccccugcugg

SEQ ID NO: 3021419 - RNA, 19 nt, Human
gcacccggccccugcuggu

SEQ ID NO: 3021420 - RNA, 22 nt, Human
gcaccuggaauauauaaccagu

SEQ ID NO: 3021421 - RNA, 17 nt, Human
gcaccuuagacaguccc

SEQ ID NO: 3021422 - RNA, 14 nt, Human
gcaccuuagacagu

SEQ ID NO: 3021423 - RNA, 15 nt, Human
gcacccucaggcagg

SEQ ID NO: 3021424 - RNA, 18 nt, Human
gcaccuggaauauauaac

SEQ ID NO: 3021425 - RNA, 21 nt, Human
gcaccuggaauauauaaccag

SEQ ID NO: 3021426 - RNA, 18 nt, Human
gcaccuuagacagucccu

SEQ ID NO: 3021427 - RNA, 12 nt, Human
gcacgauuucug

SEQ ID NO: 3021428 - RNA, 17 nt, Human
gcagugcuuggcccagg

SEQ ID NO: 3021429 - RNA, 18 nt, Human
gcagugcuuggcccagga

SEQ ID NO: 3021430 - RNA, 19 nt, Human
gcagugcuuggcccaggag

SEQ ID NO: 3021431 - RNA, 20 nt, Human
gcagugcuuggcccaggagu

SEQ ID NO: 3021432 - RNA, 16 nt, Human
gcagugcaugcugucc

SEQ ID NO: 3021433 - RNA, 15 nt, Human
gcagugcaugcuguc

SEQ ID NO: 3021434 - RNA, 19 nt, Human
gcaggucuugaacuccugg

SEQ ID NO: 3021435 - RNA, 20 nt, Human
gcaggucuugaacuccuggc

SEQ ID NO: 3021436 - RNA, 22 nt, Human
gcagguccaggguuugaguuca

SEQ ID NO: 3021437 - RNA, 19 nt, Human
gcagggcucagcggggaca

SEQ ID NO: 3021438 - RNA, 21 nt, Human
gcagggcucagcggggacagc

SEQ ID NO: 3021439 - RNA, 16 nt, Human
gcaggcagccaggcca

SEQ ID NO: 3021440 - RNA, 15 nt, Human
gcaggcagccaggcc

SEQ ID NO: 3021441 - RNA, 14 nt, Human
gcagggcucagcgg

SEQ ID NO: 3021442 - RNA, 17 nt, Human
gcagggucucacucugu

SEQ ID NO: 3021443 - RNA, 18 nt, Human
gcagggucucacucuguc

SEQ ID NO: 3021444 - RNA, 22 nt, Human
gcaguggugguuuucuguucuu

SEQ ID NO: 3021445 - RNA, 23 nt, Human
gcaguggugguuuucuguucuuu

SEQ ID NO: 3021446 - RNA, 13 nt, Human
gcagugggagcug

SEQ ID NO: 3021447 - RNA, 12 nt, Human
gcagugggagcu

SEQ ID NO: 3021448 - RNA, 14 nt, Human
gcagugggagcugc

SEQ ID NO: 3021449 - RNA, 15 nt, Human
gcagugggagcugcc

SEQ ID NO: 3021450 - RNA, 17 nt, Human
gcaguuauuaacacuaa

SEQ ID NO: 3021451 - RNA, 18 nt, Human
gcaugcgggcuuccuccu

SEQ ID NO: 3021452 - RNA, 14 nt, Human
gcauguucucugag

SEQ ID NO: 3021453 - RNA, 15 nt, Human
gcauguucucugagg

SEQ ID NO: 3021454 - RNA, 21 nt, Human
gcauguucucugaggacacua

SEQ ID NO: 3021455 - RNA, 22 nt, Human
gcauguucucugaggacacuaa

SEQ ID NO: 3021456 - RNA, 17 nt, Human
gcauuaucuagauacug

SEQ ID NO: 3021457 - RNA, 21 nt, Human
gcauuugaggucuguucuuuc

SEQ ID NO: 3021458 - RNA, 13 nt, Human
gcauuugcugaau

SEQ ID NO: 3021459 - RNA, 14 nt, Human
gcauuugcugaaua

SEQ ID NO: 3021460 - RNA, 16 nt, Human
gcauuuguuugaacug

SEQ ID NO: 3021461 - RNA, 13 nt, Human
gccaaagccaaag

SEQ ID NO: 3021462 - RNA, 20 nt, Human
gccaaagccaaagcuaggcc

SEQ ID NO: 3021463 - RNA, 19 nt, Human
gccaaagccuccuccagcc

SEQ ID NO: 3021464 - RNA, 16 nt, Human
gccaaagccuccucca

SEQ ID NO: 3021465 - RNA, 16 nt, Human
gccaaagcuaggccug

SEQ ID NO: 3021466 - RNA, 22 nt, Human
gccaaagcuaggccuggccaga

SEQ ID NO: 3021467 - RNA, 18 nt, Human
gcauuuguuugaacugau

SEQ ID NO: 3021468 - RNA, 16 nt, Human
gccaaacucaccugcc

SEQ ID NO: 3021469 - RNA, 14 nt, Human
gccaaacucaccug

SEQ ID NO: 3021470 - RNA, 12 nt, Human
gauucauauuua

SEQ ID NO: 3021471 - RNA, 17 nt, Human
gauucauauuuacuucu

SEQ ID NO: 3021472 - RNA, 18 nt, Human
gauucauauuuacuucuu

SEQ ID NO: 3021473 - RNA, 19 nt, Human
gauucauauuuacuucuua

SEQ ID NO: 3021474 - RNA, 18 nt, Human
gauucccaagcucugcuc

SEQ ID NO: 3021475 - RNA, 19 nt, Human
gauucagacagcugccugg

SEQ ID NO: 3021476 - RNA, 15 nt, Human
gauucagcucugcaa

SEQ ID NO: 3021477 - RNA, 13 nt, Human
gauucagcucugc

SEQ ID NO: 3021478 - RNA, 19 nt, Human
gauggggcugcaccggcug

SEQ ID NO: 3021479 - RNA, 23 nt, Human
gauggggcugcaccggcuggccu

SEQ ID NO: 3021480 - RNA, 21 nt, Human
gauugcaacaggcugggcuuc

SEQ ID NO: 3021481 - RNA, 23 nt, Human
gauugcaccacugcacuccagcc

SEQ ID NO: 3021482 - RNA, 16 nt, Human
gauugcaccacugcac

SEQ ID NO: 3021483 - RNA, 20 nt, Human
gauugcaacaggcugggcuu

SEQ ID NO: 3021484 - RNA, 18 nt, Human
gauucuuuccugaggcug

SEQ ID NO: 3021485 - RNA, 17 nt, Human
gauucuuuccugaggcu

SEQ ID NO: 3021486 - RNA, 16 nt, Human
gauucuuuccugaggc

SEQ ID NO: 3021487 - RNA, 12 nt, Human
gauucuuuccug

SEQ ID NO: 3021488 - RNA, 19 nt, Human
gauucccaagcucugcucc

SEQ ID NO: 3021489 - RNA, 20 nt, Human
gauucccaagcucugcuccu

SEQ ID NO: 3021490 - RNA, 11 nt, Human
gauuuucagcc

SEQ ID NO: 3021491 - RNA, 15 nt, Human
gauuuucagcccuca

SEQ ID NO: 3021492 - RNA, 19 nt, Human
gauuuucagcccucagaau

SEQ ID NO: 3021493 - RNA, 11 nt, Human
gauuucuguuu

SEQ ID NO: 3021494 - RNA, 19 nt, Human
gauuucuguuuagauaaua

SEQ ID NO: 3021495 - RNA, 15 nt, Human
gauuuccguuaaaau

SEQ ID NO: 3021496 - RNA, 18 nt, Human
gauuuccguuaaaauacc

SEQ ID NO: 3021497 - RNA, 23 nt, Human
gcaagacgcugugcugcccugcc

SEQ ID NO: 3021498 - RNA, 22 nt, Human
gcaagacgcugugcugcccugc

SEQ ID NO: 3021499 - RNA, 21 nt, Human
gcaagacgcugugcugcccug

SEQ ID NO: 3021500 - RNA, 20 nt, Human
gcaagacgcugugcugcccu

SEQ ID NO: 3021501 - RNA, 14 nt, Human
gcaagacgcugugc

SEQ ID NO: 3021502 - RNA, 17 nt, Human
gcaagaauugaagcagg

SEQ ID NO: 3021503 - RNA, 16 nt, Human
gcaaaguaucccuacu

SEQ ID NO: 3021504 - RNA, 23 nt, Human
gcaaugaccuuucaauaggaaaa

SEQ ID NO: 3021505 - RNA, 13 nt, Human
gcaaugcuggcug

SEQ ID NO: 3021506 - RNA, 14 nt, Human
gcaaugcuggcugu

SEQ ID NO: 3021507 - RNA, 22 nt, Human
gcaaugcuggcuguuggcuggg

SEQ ID NO: 3021508 - RNA, 23 nt, Human
gcaaugcuggcuguuggcugggg

SEQ ID NO: 3021509 - RNA, 17 nt, Human
gcaaucaaaucugcuuu

SEQ ID NO: 3021510 - RNA, 15 nt, Human
gcaaucaaaucugcu

SEQ ID NO: 3021511 - RNA, 22 nt, Human
gcaaugaccuuucaauaggaaa

SEQ ID NO: 3021512 - RNA, 20 nt, Human
gcaaugaccuuucaauagga

SEQ ID NO: 3021513 - RNA, 17 nt, Human
gcaaugaccuuucaaua

SEQ ID NO: 3021514 - RNA, 15 nt, Human
gcaaugaccuuucaa

SEQ ID NO: 3021515 - RNA, 18 nt, Human
gcaaggagauuuacaacu

SEQ ID NO: 3021516 - RNA, 11 nt, Human
gcaaggcuguc

SEQ ID NO: 3021517 - RNA, 15 nt, Human
gaugacauucccugc

SEQ ID NO: 3021518 - RNA, 23 nt, Human
gaugacauugacuauuuuuguuu

SEQ ID NO: 3021519 - RNA, 21 nt, Human
gaugacauugacuauuuuugu

SEQ ID NO: 3021520 - RNA, 17 nt, Human
gaugacauugacuauuu

SEQ ID NO: 3021521 - RNA, 17 nt, Human
gaugacauucccugcua

SEQ ID NO: 3021522 - RNA, 13 nt, Human
gaugcaccagccc

SEQ ID NO: 3021523 - RNA, 21 nt, Human
gaugcacagaguuguuacauu

SEQ ID NO: 3021524 - RNA, 22 nt, Human
gaugcacagaguuguuacauuu

SEQ ID NO: 3021525 - RNA, 17 nt, Human
gaugccugguggcagcu

SEQ ID NO: 3021526 - RNA, 12 nt, Human
gaugcagccuca

SEQ ID NO: 3021527 - RNA, 14 nt, Human
gaugcagccucaca

SEQ ID NO: 3021528 - RNA, 20 nt, Human
gaugccugguggcagcugcg

SEQ ID NO: 3021529 - RNA, 18 nt, Human
gaugccugguggcagcug

SEQ ID NO: 3021530 - RNA, 19 nt, Human
gaugccugguggcagcugc

SEQ ID NO: 3021531 - RNA, 22 nt, Human
gauggauuuccagccaaagccu

SEQ ID NO: 3021532 - RNA, 13 nt, Human
gauggggcccugc

SEQ ID NO: 3021533 - RNA, 22 nt, Human
gauggggcccugccuccuuugu

SEQ ID NO: 3021534 - RNA, 14 nt, Human
gauggggcccugcc

SEQ ID NO: 3021535 - RNA, 15 nt, Human
gaugaaggucuguuu

SEQ ID NO: 3021536 - RNA, 18 nt, Human
gaugaaggucuguuuugu

SEQ ID NO: 3021537 - RNA, 18 nt, Human
gaucuuugcagacaggca

SEQ ID NO: 3021538 - RNA, 17 nt, Human
gaucuuugcagacaggc

SEQ ID NO: 3021539 - RNA, 16 nt, Human
gaucccucauccucau

SEQ ID NO: 3021540 - RNA, 15 nt, Human
gaucccucauccuca

SEQ ID NO: 3021541 - RNA, 22 nt, Human
gauccugagccagauuucacuc

SEQ ID NO: 3021542 - RNA, 21 nt, Human
gauccugagccagauuucacu

SEQ ID NO: 3021543 - RNA, 14 nt, Human
gauaauacaccacu

SEQ ID NO: 3021544 - RNA, 18 nt, Human
gauaauacaccacuacau

SEQ ID NO: 3021545 - RNA, 21 nt, Human
gauaauacaccacuacauucu

SEQ ID NO: 3021546 - RNA, 22 nt, Human
gauaauacaccacuacauucug

SEQ ID NO: 3021547 - RNA, 18 nt, Human
gauacaggaaaagcugcu

SEQ ID NO: 3021548 - RNA, 20 nt, Human
gauagcacagacccugcccu

SEQ ID NO: 3021549 - RNA, 22 nt, Human
gauagcacagacccugcccugu

SEQ ID NO: 3021550 - RNA, 21 nt, Human
gauagcacagacccugcccug

SEQ ID NO: 3021551 - RNA, 21 nt, Human
gaggaaggaaacccagcucug

SEQ ID NO: 3021552 - RNA, 20 nt, Human
gaggaaggaaacccagcucu

SEQ ID NO: 3021553 - RNA, 19 nt, Human
gaggaaggaaacccagcuc

SEQ ID NO: 3021554 - RNA, 13 nt, Human
gaggaaggaaacc

SEQ ID NO: 3021555 - RNA, 17 nt, Human
gaucauccacugugcca

SEQ ID NO: 3021556 - RNA, 19 nt, Human
gaucauccacugugccaug

SEQ ID NO: 3021557 - RNA, 16 nt, Human
gaucauccacugugcc

SEQ ID NO: 3021558 - RNA, 21 nt, Human
gaucauccacugugccaugug

SEQ ID NO: 3021559 - RNA, 22 nt, Human
gaucagucugauucccaagcuc

SEQ ID NO: 3021560 - RNA, 15 nt, Human
gaucagccugggcaa

SEQ ID NO: 3021561 - RNA, 12 nt, Human
gaucagccuggg

SEQ ID NO: 3021562 - RNA, 12 nt, Human
gaucacggcuca

SEQ ID NO: 3021563 - RNA, 16 nt, Human
gaucacgccacugcac

SEQ ID NO: 3021564 - RNA, 18 nt, Human
gaucacgccacugcacua

SEQ ID NO: 3021565 - RNA, 13 nt, Human
gaagucuucuauu

SEQ ID NO: 3021566 - RNA, 17 nt, Human
gaagucuucuauuuauu

SEQ ID NO: 3021567 - RNA, 14 nt, Human
gaagucuuuguaca

SEQ ID NO: 3021568 - RNA, 16 nt, Human
gaagucuuuguacaga

SEQ ID NO: 3021569 - RNA, 21 nt, Human
gacaaggauugcuacuguccu

SEQ ID NO: 3021570 - RNA, 22 nt, Human
gacaaggauugcuacuguccua

SEQ ID NO: 3021571 - RNA, 16 nt, Human
gacaaugacccagugg

SEQ ID NO: 3021572 - RNA, 12 nt, Human
gacacaggcccg

SEQ ID NO: 3021573 - RNA, 15 nt, Human
gacacaggcccggcu

SEQ ID NO: 3021574 - RNA, 17 nt, Human
gacacaggcccggcucc

SEQ ID NO: 3021575 - RNA, 22 nt, Human
gacacaagccuucggcgccuua

SEQ ID NO: 3021576 - RNA, 13 nt, Human
gacaauuuauuau

SEQ ID NO: 3021577 - RNA, 19 nt, Human
gacaauuuauuauggcaca

SEQ ID NO: 3021578 - RNA, 12 nt, Human
gacaauuuauua

SEQ ID NO: 3021579 - RNA, 18 nt, Human
gacaaugcaaaccaucau

SEQ ID NO: 3021580 - RNA, 16 nt, Human
gacaaugcaaaccauc

SEQ ID NO: 3021581 - RNA, 17 nt, Human
gacaaugacuuacugua

SEQ ID NO: 3021582 - RNA, 20 nt, Human
gacaaugacuuacuguacau

SEQ ID NO: 3021583 - RNA, 12 nt, Human
gacaaugcaaac

SEQ ID NO: 3021584 - RNA, 21 nt, Human
gacaaugacuuacuguacaug

SEQ ID NO: 3021585 - RNA, 15 nt, Human
gacacgaauauugcu

SEQ ID NO: 3021586 - RNA, 18 nt, Human
gacaccuugacagggcac

SEQ ID NO: 3021587 - RNA, 20 nt, Human
gacaccuugacagggcacac

SEQ ID NO: 3021588 - RNA, 15 nt, Human
gacaccuugacaggg

SEQ ID NO: 3021589 - RNA, 17 nt, Human
gacaccuugacagggca

SEQ ID NO: 3021590 - RNA, 19 nt, Human
gacacgaauauugcugaug

SEQ ID NO: 3021591 - RNA, 18 nt, Human
gacacgaauauugcugau

SEQ ID NO: 3021592 - RNA, 17 nt, Human
gacacgaauauugcuga

SEQ ID NO: 3021593 - RNA, 15 nt, Human
gacacuaaccacgcu

SEQ ID NO: 3021594 - RNA, 16 nt, Human
gacacuaaccacgcug

SEQ ID NO: 3021595 - RNA, 17 nt, Human
gacacuaaccacgcugg

SEQ ID NO: 3021596 - RNA, 18 nt, Human
gacacuaaccacgcugga

SEQ ID NO: 3021597 - RNA, 23 nt, Human
gacacccugugauggggcccugc

SEQ ID NO: 3021598 - RNA, 22 nt, Human
gacacccugugauggggcccug

SEQ ID NO: 3021599 - RNA, 13 nt, Human
gacacccugugau

SEQ ID NO: 3021600 - RNA, 12 nt, Human
gacacccuguga

SEQ ID NO: 3021601 - RNA, 18 nt, Human
gacacaggcccggcucca

SEQ ID NO: 3021602 - RNA, 13 nt, Human
gacagcugccugg

SEQ ID NO: 3021603 - RNA, 12 nt, Human
gacagcugccug

SEQ ID NO: 3021604 - RNA, 12 nt, Human
gacagacacagg

SEQ ID NO: 3021605 - RNA, 14 nt, Human
gacagacacaggcc

SEQ ID NO: 3021606 - RNA, 20 nt, Human
gacacuaaccacgcuggacc

SEQ ID NO: 3021607 - RNA, 21 nt, Human
gacacuaaccacgcuggaccu

SEQ ID NO: 3021608 - RNA, 15 nt, Human
gacagacacaggccc

SEQ ID NO: 3021609 - RNA, 16 nt, Human
gacagacacaggcccg

SEQ ID NO: 3021610 - RNA, 14 nt, Human
gacaggcaaugcug

SEQ ID NO: 3021611 - RNA, 16 nt, Human
gacaggcaaugcuggc

SEQ ID NO: 3021612 - RNA, 24 nt, Human
gacaggcaaugcuggcuguuggcu

SEQ ID NO: 3021613 - RNA, 17 nt, Human
gacaggcaaugcuggcu

SEQ ID NO: 3021614 - RNA, 18 nt, Human
gacaggcauguucucuga

SEQ ID NO: 3021615 - RNA, 19 nt, Human
gacaggcauguucucugag

SEQ ID NO: 3021616 - RNA, 15 nt, Human
gacagcugccuggga

SEQ ID NO: 3021617 - RNA, 14 nt, Human
gacagcugccuggg

SEQ ID NO: 3021618 - RNA, 15 nt, Human
gacauacuaaccagc

SEQ ID NO: 3021619 - RNA, 16 nt, Human
gacauacuaaccagca

SEQ ID NO: 3021620 - RNA, 23 nt, Human
gacauacuaaccagcagaaaugc

SEQ ID NO: 3021621 - RNA, 21 nt, Human
gacaugucuuuucuugcauga

SEQ ID NO: 3021622 - RNA, 17 nt, Human
gacaugucuuuucuugc

SEQ ID NO: 3021623 - RNA, 22 nt, Human
gacguguuaugacuccagaauu

SEQ ID NO: 3021624 - RNA, 12 nt, Human
gacuacaggcac

SEQ ID NO: 3021625 - RNA, 17 nt, Human
gacuacucccccaggug

SEQ ID NO: 3021626 - RNA, 14 nt, Human
gacuccugcaggca

SEQ ID NO: 3021627 - RNA, 16 nt, Human
gacuccugcaggcagc

SEQ ID NO: 3021628 - RNA, 15 nt, Human
gacuccugcaggcag

SEQ ID NO: 3021629 - RNA, 20 nt, Human
gacguguuaugacuccagaa

SEQ ID NO: 3021630 - RNA, 17 nt, Human
gacguguuaugacucca

SEQ ID NO: 3021631 - RNA, 14 nt, Human
gacggagucccacc

SEQ ID NO: 3021632 - RNA, 18 nt, Human
gacggagucccaccuugg

SEQ ID NO: 3021633 - RNA, 21 nt, Human
gacggagucccaccuuggcug

SEQ ID NO: 3021634 - RNA, 21 nt, Human
gaccuuucaauaggaaaaacu

SEQ ID NO: 3021635 - RNA, 23 nt, Human
gaccuugaacuggguacuugugg

SEQ ID NO: 3021636 - RNA, 13 nt, Human
gaccccuccaugu

SEQ ID NO: 3021637 - RNA, 18 nt, Human
gacccugaggcccagagg

SEQ ID NO: 3021638 - RNA, 21 nt, Human
gacccugaggcccagagggcc

SEQ ID NO: 3021639 - RNA, 12 nt, Human
gacccugcccug

SEQ ID NO: 3021640 - RNA, 20 nt, Human
gacccugaggcccagagggc

SEQ ID NO: 3021641 - RNA, 19 nt, Human
gacccugaggcccagaggg

SEQ ID NO: 3021642 - RNA, 15 nt, Human
gacccugcccugugg

SEQ ID NO: 3021643 - RNA, 13 nt, Human
gacccugcccugu

SEQ ID NO: 3021644 - RNA, 16 nt, Human
gacccugcccuguggg

SEQ ID NO: 3021645 - RNA, 23 nt, Human
gacccugucucaaaaaaagaaaa

SEQ ID NO: 3021646 - RNA, 13 nt, Human
gacccaugcugcc

SEQ ID NO: 3021647 - RNA, 15 nt, Human
gacccaugcugcccu

SEQ ID NO: 3021648 - RNA, 14 nt, Human
gacccaugcugccc

SEQ ID NO: 3021649 - RNA, 16 nt, Human
gacccaugcugcccug

SEQ ID NO: 3021650 - RNA, 11 nt, Human
gacccacugcu

SEQ ID NO: 3021651 - RNA, 19 nt, Human
gaccgugaggccagagaca

SEQ ID NO: 3021652 - RNA, 14 nt, Human
gaccgugaggccag

SEQ ID NO: 3021653 - RNA, 21 nt, Human
gaccugaggcccuucucucca

SEQ ID NO: 3021654 - RNA, 18 nt, Human
gaccugaggcccuucucu

SEQ ID NO: 3021655 - RNA, 15 nt, Human
gaccugaggcccuuc

SEQ ID NO: 3021656 - RNA, 13 nt, Human
gaccucaggccug

SEQ ID NO: 3021657 - RNA, 12 nt, Human
gaccucaggccu

SEQ ID NO: 3021658 - RNA, 11 nt, Human
gaccucaggcc

SEQ ID NO: 3021659 - RNA, 21 nt, Human
gagauagccaaggccaaagga

SEQ ID NO: 3021660 - RNA, 20 nt, Human
gagauagccaaggccaaagg

SEQ ID NO: 3021661 - RNA, 19 nt, Human
gagauagccaaggccaaag

SEQ ID NO: 3021662 - RNA, 16 nt, Human
gagcagagaccauccc

SEQ ID NO: 3021663 - RNA, 18 nt, Human
gagcagagaccaucccug

SEQ ID NO: 3021664 - RNA, 17 nt, Human
gagcagagaccaucccu

SEQ ID NO: 3021665 - RNA, 23 nt, Human
gagcagagaccaucccugaaggc

SEQ ID NO: 3021666 - RNA, 21 nt, Human
gagcagagaccaucccugaag

SEQ ID NO: 3021667 - RNA, 19 nt, Human
gagcagagaccaucccuga

SEQ ID NO: 3021668 - RNA, 21 nt, Human
gagcagccacauuccugaugc

SEQ ID NO: 3021669 - RNA, 22 nt, Human
gagcagccacauuccugaugcu

SEQ ID NO: 3021670 - RNA, 13 nt, Human
gagccagauuuca

SEQ ID NO: 3021671 - RNA, 13 nt, Human
gagcccaccuugg

SEQ ID NO: 3021672 - RNA, 15 nt, Human
gagcccaccuuggcu

SEQ ID NO: 3021673 - RNA, 17 nt, Human
gagcccaccuuggcuca

SEQ ID NO: 3021674 - RNA, 18 nt, Human
gagccacugcaccgggcc

SEQ ID NO: 3021675 - RNA, 19 nt, Human
gagccacugcaccgggcca

SEQ ID NO: 3021676 - RNA, 13 nt, Human
gagccacugcacc

SEQ ID NO: 3021677 - RNA, 15 nt, Human
gagccagauuucacu

SEQ ID NO: 3021678 - RNA, 19 nt, Human
gagccagauuucacucucc

SEQ ID NO: 3021679 - RNA, 18 nt, Human
gagccagauuucacucuc

SEQ ID NO: 3021680 - RNA, 21 nt, Human
gagccgagaucacgccacugc

SEQ ID NO: 3021681 - RNA, 22 nt, Human
gagccgagaucacgccacugca

SEQ ID NO: 3021682 - RNA, 19 nt, Human
gagccgagaucacgccacu

SEQ ID NO: 3021683 - RNA, 20 nt, Human
gagccgagaucacgccacug

SEQ ID NO: 3021684 - RNA, 18 nt, Human
gagcccacgcccccacug

SEQ ID NO: 3021685 - RNA, 13 nt, Human
gagccucagcauc

SEQ ID NO: 3021686 - RNA, 17 nt, Human
gagccucagcauccugg

SEQ ID NO: 3021687 - RNA, 14 nt, Human
gagccucagcaucc

SEQ ID NO: 3021688 - RNA, 15 nt, Human
gagccucagcauccu

SEQ ID NO: 3021689 - RNA, 12 nt, Human
gagccugcaguu

SEQ ID NO: 3021690 - RNA, 13 nt, Human
gagccuccugccc

SEQ ID NO: 3021691 - RNA, 15 nt, Human
gagccugcaguuauu

SEQ ID NO: 3021692 - RNA, 17 nt, Human
gagcuagcagcagggag

SEQ ID NO: 3021693 - RNA, 15 nt, Human
gagcuagcagcaggg

SEQ ID NO: 3021694 - RNA, 15 nt, Human
gagcugaguggggga

SEQ ID NO: 3021695 - RNA, 14 nt, Human
gaggaacaaggcaa

SEQ ID NO: 3021696 - RNA, 16 nt, Human
gaggaacaaggcaagg

SEQ ID NO: 3021697 - RNA, 17 nt, Human
gaggaagagaaaaaaua

SEQ ID NO: 3021698 - RNA, 13 nt, Human
gaggaagccgcug

SEQ ID NO: 3021699 - RNA, 18 nt, Human
gaggaagccgcuggggcc

SEQ ID NO: 3021700 - RNA, 17 nt, Human
gaggaagccgcuggggc

SEQ ID NO: 3021701 - RNA, 14 nt, Human
gaggaagccgcugg

SEQ ID NO: 3021702 - RNA, 17 nt, Human
gaggaaagcaaaggaga

SEQ ID NO: 3021703 - RNA, 16 nt, Human
gaggaaagcaaaggag

SEQ ID NO: 3021704 - RNA, 22 nt, Human
gagcuuucugcuaucaaagagg

SEQ ID NO: 3021705 - RNA, 20 nt, Human
gagcuuugaaaauucagugg

SEQ ID NO: 3021706 - RNA, 17 nt, Human
gagagaagagaaugcac

SEQ ID NO: 3021707 - RNA, 14 nt, Human
gagagccuuccagg

SEQ ID NO: 3021708 - RNA, 13 nt, Human
gagagccuuccag

SEQ ID NO: 3021709 - RNA, 13 nt, Human
gagaggggaacag

SEQ ID NO: 3021710 - RNA, 18 nt, Human
gagaggggaacagacugg

SEQ ID NO: 3021711 - RNA, 21 nt, Human
gagagggugggagugggccca

SEQ ID NO: 3021712 - RNA, 20 nt, Human
gagagggugggagugggccc

SEQ ID NO: 3021713 - RNA, 14 nt, Human
gagacucugucuca

SEQ ID NO: 3021714 - RNA, 18 nt, Human
gagacucgcgacaaugca

SEQ ID NO: 3021715 - RNA, 13 nt, Human
gagacucugucuc

SEQ ID NO: 3021716 - RNA, 16 nt, Human
gagacucgcgacaaug

SEQ ID NO: 3021717 - RNA, 22 nt, Human
gagacuccugcaggcagccagg

SEQ ID NO: 3021718 - RNA, 24 nt, Human
gagacagcccgggcucugccuccc

SEQ ID NO: 3021719 - RNA, 23 nt, Human
gagacagcccgggcucugccucc

SEQ ID NO: 3021720 - RNA, 22 nt, Human
gagacagcccgggcucugccuc

SEQ ID NO: 3021721 - RNA, 21 nt, Human
gagacagcccgggcucugccu

SEQ ID NO: 3021722 - RNA, 20 nt, Human
gagacagcccgggcucugcc

SEQ ID NO: 3021723 - RNA, 19 nt, Human
gagacagcccgggcucugc

SEQ ID NO: 3021724 - RNA, 18 nt, Human
gagacagcccgggcucug

SEQ ID NO: 3021725 - RNA, 17 nt, Human
gagacagcccgggcucu

SEQ ID NO: 3021726 - RNA, 14 nt, Human
gagacagcccgggc

SEQ ID NO: 3021727 - RNA, 17 nt, Human
gagacacaagccuucgg

SEQ ID NO: 3021728 - RNA, 15 nt, Human
gagacacaagccuuc

SEQ ID NO: 3021729 - RNA, 19 nt, Human
gagacagaguuuucacucu

SEQ ID NO: 3021730 - RNA, 12 nt, Human
gagacagcccgg

SEQ ID NO: 3021731 - RNA, 22 nt, Human
gagaaugcacaaacagaggccg

SEQ ID NO: 3021732 - RNA, 21 nt, Human
gagaaugcacaaacagaggcc

SEQ ID NO: 3021733 - RNA, 20 nt, Human
gagaaugcacaaacagaggc

SEQ ID NO: 3021734 - RNA, 14 nt, Human
gacuuggaagcucc

SEQ ID NO: 3021735 - RNA, 15 nt, Human
gacuuggaagcuccg

SEQ ID NO: 3021736 - RNA, 16 nt, Human
gacuuggaagcuccgc

SEQ ID NO: 3021737 - RNA, 19 nt, Human
gacucgcgacaaugcaaac

SEQ ID NO: 3021738 - RNA, 18 nt, Human
gacucgcgacaaugcaaa

SEQ ID NO: 3021739 - RNA, 17 nt, Human
gacuccugcaggcagcc

SEQ ID NO: 3021740 - RNA, 21 nt, Human
gagaaaauggacguguuauga

SEQ ID NO: 3021741 - RNA, 13 nt, Human
gacuuggaagcuc

SEQ ID NO: 3021742 - RNA, 23 nt, Human
gagaaaguacuucuccacccugc

SEQ ID NO: 3021743 - RNA, 22 nt, Human
gagaaaguacuucuccacccug

SEQ ID NO: 3021744 - RNA, 17 nt, Human
cuugcugcugauuuaaa

SEQ ID NO: 3021745 - RNA, 19 nt, Human
cuugcugcugauuuaaaca

SEQ ID NO: 3021746 - RNA, 17 nt, Human
cuuggacauuuuauguc

SEQ ID NO: 3021747 - RNA, 18 nt, Human
cuuggacauuuuaugucu

SEQ ID NO: 3021748 - RNA, 16 nt, Human
cuuggacauuuuaugu

SEQ ID NO: 3021749 - RNA, 13 nt, Human
cuugcuugcuuuu

SEQ ID NO: 3021750 - RNA, 19 nt, Human
cuuggacauuuuaugucuu

SEQ ID NO: 3021751 - RNA, 12 nt, Human
cuuggcugcagg

SEQ ID NO: 3021752 - RNA, 13 nt, Human
cuuggcugcaggg

SEQ ID NO: 3021753 - RNA, 23 nt, Human
cuuggcucaaguccucuuuucug

SEQ ID NO: 3021754 - RNA, 13 nt, Human
cuuggauuguccc

SEQ ID NO: 3021755 - RNA, 16 nt, Human
cuuguggacacagcuc

SEQ ID NO: 3021756 - RNA, 17 nt, Human
cuuguggacacagcucu

SEQ ID NO: 3021757 - RNA, 18 nt, Human
cuuguggacacagcucuu

SEQ ID NO: 3021758 - RNA, 16 nt, Human
cuuggggaccagagcu

SEQ ID NO: 3021759 - RNA, 17 nt, Human
cuuggggaccagagcug

SEQ ID NO: 3021760 - RNA, 19 nt, Human
cuuggggaccagagcugcc

SEQ ID NO: 3021761 - RNA, 18 nt, Human
cuuggggaccagagcugc

SEQ ID NO: 3021762 - RNA, 20 nt, Human
cuugguuuguaaauuaacuu

SEQ ID NO: 3021763 - RNA, 21 nt, Human
cuuguaaauagcucagguguc

SEQ ID NO: 3021764 - RNA, 16 nt, Human
cuugagugcucaguag

SEQ ID NO: 3021765 - RNA, 22 nt, Human
cuugagugucaagcugaccuug

SEQ ID NO: 3021766 - RNA, 22 nt, Human
cuugcaaaguaucccuacugua

SEQ ID NO: 3021767 - RNA, 14 nt, Human
cuugcaauggcagc

SEQ ID NO: 3021768 - RNA, 18 nt, Human
cuugcagacucuacagag

SEQ ID NO: 3021769 - RNA, 17 nt, Human
cuugcaugaggcuagug

SEQ ID NO: 3021770 - RNA, 21 nt, Human
cuugcaugaggcuaguguggu

SEQ ID NO: 3021771 - RNA, 19 nt, Human
cuugagccuugaacuuuga

SEQ ID NO: 3021772 - RNA, 20 nt, Human
cuugaccauucuccaccugc

SEQ ID NO: 3021773 - RNA, 17 nt, Human
cuugaccauucuccacc

SEQ ID NO: 3021774 - RNA, 21 nt, Human
cuugaccauucuccaccugcc

SEQ ID NO: 3021775 - RNA, 14 nt, Human
cuugagagggugga

SEQ ID NO: 3021776 - RNA, 20 nt, Human
cuugagccuugaacuuugac

SEQ ID NO: 3021777 - RNA, 22 nt, Human
cuugagccuugaacuuugaccu

SEQ ID NO: 3021778 - RNA, 19 nt, Human
cuugaaauauaggaacuua

SEQ ID NO: 3021779 - RNA, 22 nt, Human
cuucuuuauaauucuacuuuga

SEQ ID NO: 3021780 - RNA, 15 nt, Human
cuugaacuuugaccu

SEQ ID NO: 3021781 - RNA, 18 nt, Human
cuugaacuggguacuugu

SEQ ID NO: 3021782 - RNA, 20 nt, Human
cuugaacuggguacuugugg

SEQ ID NO: 3021783 - RNA, 19 nt, Human
cuugaacuccuggccucaa

SEQ ID NO: 3021784 - RNA, 16 nt, Human
cuugaacuggguacuu

SEQ ID NO: 3021785 - RNA, 14 nt, Human
cuugaacuccuggc

SEQ ID NO: 3021786 - RNA, 15 nt, Human
cuugaacuccuggcc

SEQ ID NO: 3021787 - RNA, 17 nt, Human
cuugaacuccuggccuc

SEQ ID NO: 3021788 - RNA, 18 nt, Human
cuugaacuccuggccuca

SEQ ID NO: 3021789 - RNA, 17 nt, Human
cuuucccuuggugcccu

SEQ ID NO: 3021790 - RNA, 12 nt, Human
cuuucccuuggu

SEQ ID NO: 3021791 - RNA, 14 nt, Human
cuuuccaggaaggc

SEQ ID NO: 3021792 - RNA, 16 nt, Human
cuuuccaaaguacacu

SEQ ID NO: 3021793 - RNA, 22 nt, Human
cuuuccaaaguacacuguuuca

SEQ ID NO: 3021794 - RNA, 16 nt, Human
cuuuccaaaugcccag

SEQ ID NO: 3021795 - RNA, 21 nt, Human
cuuguggacacagcucuucuc

SEQ ID NO: 3021796 - RNA, 14 nt, Human
cuuugcagacaggc

SEQ ID NO: 3021797 - RNA, 15 nt, Human
cuuugcagacaggca

SEQ ID NO: 3021798 - RNA, 23 nt, Human
cuuuggaaagaguaggaagacuu

SEQ ID NO: 3021799 - RNA, 19 nt, Human
cuuuggaaagaguaggaag

SEQ ID NO: 3021800 - RNA, 21 nt, Human
cuuuccugaggcugggcuccc

SEQ ID NO: 3021801 - RNA, 20 nt, Human
cuuuccugaggcugggcucc

SEQ ID NO: 3021802 - RNA, 16 nt, Human
cuuuccugaggcuggg

SEQ ID NO: 3021803 - RNA, 17 nt, Human
cuuuccugaggcugggc

SEQ ID NO: 3021804 - RNA, 11 nt, Human
cuuuuaaacuc

SEQ ID NO: 3021805 - RNA, 17 nt, Human
cuuuuaagacuuugguu

SEQ ID NO: 3021806 - RNA, 22 nt, Human
cuuuucauuuaggugaggaagc

SEQ ID NO: 3021807 - RNA, 23 nt, Human
cuuuuccaacccucaucaccaac

SEQ ID NO: 3021808 - RNA, 13 nt, Human
cuuuuccaacccu

SEQ ID NO: 3021809 - RNA, 20 nt, Human
cuuuucgcaggauucuuccu

SEQ ID NO: 3021810 - RNA, 21 nt, Human
cuuuucgcaggauucuuccuc

SEQ ID NO: 3021811 - RNA, 15 nt, Human
cuuuugcauauugca

SEQ ID NO: 3021812 - RNA, 22 nt, Human
cuuuuuaauauugauaugcuua

SEQ ID NO: 3021813 - RNA, 13 nt, Human
cuuuucuuuucuu

SEQ ID NO: 3021814 - RNA, 17 nt, Human
cuuuucuuucagccaag

SEQ ID NO: 3021815 - RNA, 16 nt, Human
cuuuuuauaacuuuuu

SEQ ID NO: 3021816 - RNA, 18 nt, Human
cuuuuuauauucucagca

SEQ ID NO: 3021817 - RNA, 12 nt, Human
cuuuuuauaacu

SEQ ID NO: 3021818 - RNA, 15 nt, Human
cuuuuuuauacauaa

SEQ ID NO: 3021819 - RNA, 16 nt, Human
cuuuuuuauacauaaa

SEQ ID NO: 3021820 - RNA, 17 nt, Human
cuuuuuuauacauaaac

SEQ ID NO: 3021821 - RNA, 18 nt, Human
cuuuuuuauacauaaaca

SEQ ID NO: 3021822 - RNA, 16 nt, Human
gaaaaagaaaaaauau

SEQ ID NO: 3021823 - RNA, 11 nt, Human
gaaaaagaaaa

SEQ ID NO: 3021824 - RNA, 20 nt, Human
gaaaggaaugcaaagaugaa

SEQ ID NO: 3021825 - RNA, 22 nt, Human
gaaaguacuucuccacccugcu

SEQ ID NO: 3021826 - RNA, 16 nt, Human
gaaaggaaagaggcuc

SEQ ID NO: 3021827 - RNA, 11 nt, Human
gaaaggaaaga

SEQ ID NO: 3021828 - RNA, 16 nt, Human
gaaacugacacaugcu

SEQ ID NO: 3021829 - RNA, 16 nt, Human
gaaaaaugagccuggc

SEQ ID NO: 3021830 - RNA, 16 nt, Human
gaaagaucaaaagguu

SEQ ID NO: 3021831 - RNA, 22 nt, Human
gaacaguaacauagcugugauu

SEQ ID NO: 3021832 - RNA, 22 nt, Human
gaacagacuggaagcacagcuu

SEQ ID NO: 3021833 - RNA, 21 nt, Human
gaacacucuauaacaaaggau

SEQ ID NO: 3021834 - RNA, 15 nt, Human
gaacacucuauaaca

SEQ ID NO: 3021835 - RNA, 17 nt, Human
gaacacuccuucacaga

SEQ ID NO: 3021836 - RNA, 20 nt, Human
gaacagacuggaagcacagc

SEQ ID NO: 3021837 - RNA, 19 nt, Human
gaacagacuggaagcacag

SEQ ID NO: 3021838 - RNA, 16 nt, Human
gaacacuccuucacag

SEQ ID NO: 3021839 - RNA, 15 nt, Human
gaacacuccuucaca

SEQ ID NO: 3021840 - RNA, 18 nt, Human
gaaauaucugaaaaugua

SEQ ID NO: 3021841 - RNA, 19 nt, Human
gaaauaucugaaaauguau

SEQ ID NO: 3021842 - RNA, 17 nt, Human
gaaauauaggaacuuaa

SEQ ID NO: 3021843 - RNA, 18 nt, Human
gaaaugaggucagagccu

SEQ ID NO: 3021844 - RNA, 11 nt, Human
gaaaugagcug

SEQ ID NO: 3021845 - RNA, 15 nt, Human
gaaaugggcagagca

SEQ ID NO: 3021846 - RNA, 16 nt, Human
gaaaugggcagagcag

SEQ ID NO: 3021847 - RNA, 17 nt, Human
gaaauguacagcaagga

SEQ ID NO: 3021848 - RNA, 19 nt, Human
gaaaugggcagagcagaga

SEQ ID NO: 3021849 - RNA, 17 nt, Human
gaaaugggcagagcaga

SEQ ID NO: 3021850 - RNA, 18 nt, Human
gaaguccccucuccucca

SEQ ID NO: 3021851 - RNA, 23 nt, Human
gaaguccccucuccuccacauuu

SEQ ID NO: 3021852 - RNA, 18 nt, Human
gaagucuuagauguauau

SEQ ID NO: 3021853 - RNA, 18 nt, Human
gaagucaaggcuuagacc

SEQ ID NO: 3021854 - RNA, 13 nt, Human
gaagucacacagu

SEQ ID NO: 3021855 - RNA, 19 nt, Human
gaaguaauaugcacacauu

SEQ ID NO: 3021856 - RNA, 20 nt, Human
gaaguaauaugcacacauuu

SEQ ID NO: 3021857 - RNA, 19 nt, Human
gaaggucuguuuuguguac

SEQ ID NO: 3021858 - RNA, 20 nt, Human
gaagguagaauguuuucaaa

SEQ ID NO: 3021859 - RNA, 13 nt, Human
gaagggggcuggg

SEQ ID NO: 3021860 - RNA, 14 nt, Human
gaaggaugcugucu

SEQ ID NO: 3021861 - RNA, 19 nt, Human
gaaggaagacuucaucccu

SEQ ID NO: 3021862 - RNA, 15 nt, Human
gaaggaacguccccu

SEQ ID NO: 3021863 - RNA, 22 nt, Human
gaaggaaacccagcucuggucc

SEQ ID NO: 3021864 - RNA, 21 nt, Human
gaaggaaacccagcucugguc

SEQ ID NO: 3021865 - RNA, 19 nt, Human
gaaggacauugcggacagc

SEQ ID NO: 3021866 - RNA, 20 nt, Human
gaaggacauugcggacagcc

SEQ ID NO: 3021867 - RNA, 21 nt, Human
gaaggacauugcggacagcca

SEQ ID NO: 3021868 - RNA, 20 nt, Human
gaaggaaacccagcucuggu

SEQ ID NO: 3021869 - RNA, 19 nt, Human
gaaggaaacccagcucugg

SEQ ID NO: 3021870 - RNA, 14 nt, Human
gaagccgcuggggc

SEQ ID NO: 3021871 - RNA, 20 nt, Human
gaagccgcuggggccaguug

SEQ ID NO: 3021872 - RNA, 18 nt, Human
gaagccgcuggggccagu

SEQ ID NO: 3021873 - RNA, 20 nt, Human
gaagauucuuguauuuauua

SEQ ID NO: 3021874 - RNA, 18 nt, Human
gaagcauuuacuuugugu

SEQ ID NO: 3021875 - RNA, 16 nt, Human
gaagacuucaucccuc

SEQ ID NO: 3021876 - RNA, 15 nt, Human
gaagacuucaucccu

SEQ ID NO: 3021877 - RNA, 19 nt, Human
gaagacuucaucccucugg

SEQ ID NO: 3021878 - RNA, 17 nt, Human
gaagacuucaucccucu

SEQ ID NO: 3021879 - RNA, 12 nt, Human
gaagagccuugc

SEQ ID NO: 3021880 - RNA, 14 nt, Human
gaagaagcucucuc

SEQ ID NO: 3021881 - RNA, 16 nt, Human
gaacuuugaccucugc

SEQ ID NO: 3021882 - RNA, 22 nt, Human
gaacuuugaccucugcagcaau

SEQ ID NO: 3021883 - RNA, 17 nt, Human
gaacuuuccaggaaggc

SEQ ID NO: 3021884 - RNA, 18 nt, Human
gaacuuggcgcugccccu

SEQ ID NO: 3021885 - RNA, 17 nt, Human
gaacuugggccacugug

SEQ ID NO: 3021886 - RNA, 17 nt, Human
gaacuuaaauaauguga

SEQ ID NO: 3021887 - RNA, 14 nt, Human
gaacuuaaauaaug

SEQ ID NO: 3021888 - RNA, 17 nt, Human
gaacuuggcgcugcccc

SEQ ID NO: 3021889 - RNA, 18 nt, Human
gaaccacaucuugcucug

SEQ ID NO: 3021890 - RNA, 21 nt, Human
cugguacucugccacuuuauu

SEQ ID NO: 3021891 - RNA, 21 nt, Human
cugguccauagagagcaagac

SEQ ID NO: 3021892 - RNA, 13 nt, Human
cuggucccacuca

SEQ ID NO: 3021893 - RNA, 23 nt, Human
cuggucucaaacucuugaccuca

SEQ ID NO: 3021894 - RNA, 15 nt, Human
cuggguuggagggug

SEQ ID NO: 3021895 - RNA, 18 nt, Human
cuggguacuuguggacac

SEQ ID NO: 3021896 - RNA, 16 nt, Human
cuggguacuuguggac

SEQ ID NO: 3021897 - RNA, 14 nt, Human
cuggguacuugugg

SEQ ID NO: 3021898 - RNA, 22 nt, Human
cugggcucccuucccaccucuc

SEQ ID NO: 3021899 - RNA, 21 nt, Human
cugggcucccuucccaccucu

SEQ ID NO: 3021900 - RNA, 20 nt, Human
cugggcucccuucccaccuc

SEQ ID NO: 3021901 - RNA, 19 nt, Human
cugggcucccuucccaccu

SEQ ID NO: 3021902 - RNA, 21 nt, Human
cuguaaguuacaugaaggcag

SEQ ID NO: 3021903 - RNA, 18 nt, Human
cuguaauuugugauacaa

SEQ ID NO: 3021904 - RNA, 17 nt, Human
cuguaauuugugauaca

SEQ ID NO: 3021905 - RNA, 23 nt, Human
cuguacagagcccacgcccccac

SEQ ID NO: 3021906 - RNA, 21 nt, Human
cuguaauuugugauacaaugc

SEQ ID NO: 3021907 - RNA, 22 nt, Human
cuguaauuugugauacaaugcu

SEQ ID NO: 3021908 - RNA, 16 nt, Human
cuguacauacuuuuug

SEQ ID NO: 3021909 - RNA, 21 nt, Human
cuguaccucuugagccuugaa

SEQ ID NO: 3021910 - RNA, 15 nt, Human
cuguacauacuuuuu

SEQ ID NO: 3021911 - RNA, 22 nt, Human
cuguacaugaaaacacauuuuu

SEQ ID NO: 3021912 - RNA, 23 nt, Human
cuguacaugaaaacacauuuuuc

SEQ ID NO: 3021913 - RNA, 12 nt, Human
cugguggcagcu

SEQ ID NO: 3021914 - RNA, 14 nt, Human
cugguggcagcuca

SEQ ID NO: 3021915 - RNA, 13 nt, Human
cugguggcagcuc

SEQ ID NO: 3021916 - RNA, 20 nt, Human
cugguucaggguuggccccu

SEQ ID NO: 3021917 - RNA, 17 nt, Human
cugucuccucucucugu

SEQ ID NO: 3021918 - RNA, 20 nt, Human
cugucuccucucucuguaau

SEQ ID NO: 3021919 - RNA, 15 nt, Human
cuguccuauuauauu

SEQ ID NO: 3021920 - RNA, 21 nt, Human
cuguccuauuauauucauucu

SEQ ID NO: 3021921 - RNA, 22 nt, Human
cugucucaaaaaaagaaaaaga

SEQ ID NO: 3021922 - RNA, 21 nt, Human
cuguccuacucugugucaggu

SEQ ID NO: 3021923 - RNA, 22 nt, Human
cugucccuuacgugaguccugg

SEQ ID NO: 3021924 - RNA, 16 nt, Human
cuguccuacucugugu

SEQ ID NO: 3021925 - RNA, 17 nt, Human
cuguccuacucuguguc

SEQ ID NO: 3021926 - RNA, 18 nt, Human
cuguccuacucuguguca

SEQ ID NO: 3021927 - RNA, 20 nt, Human
cuguccuacucugugucagg

SEQ ID NO: 3021928 - RNA, 14 nt, Human
cugucccccugaca

SEQ ID NO: 3021929 - RNA, 13 nt, Human
cugucccccugac

SEQ ID NO: 3021930 - RNA, 23 nt, Human
cugucauuugagcagggcucagc

SEQ ID NO: 3021931 - RNA, 22 nt, Human
cugucccagugccgagaaggaa

SEQ ID NO: 3021932 - RNA, 14 nt, Human
cuguaucccaugag

SEQ ID NO: 3021933 - RNA, 15 nt, Human
cuguaucccaugagc

SEQ ID NO: 3021934 - RNA, 22 nt, Human
cuguaccucuugagccuugaac

SEQ ID NO: 3021935 - RNA, 18 nt, Human
cuguaucccaugagccuc

SEQ ID NO: 3021936 - RNA, 20 nt, Human
cugggaaagggauuuucagc

SEQ ID NO: 3021937 - RNA, 18 nt, Human
cugggagagccuuccagg

SEQ ID NO: 3021938 - RNA, 17 nt, Human
cugggagagccuuccag

SEQ ID NO: 3021939 - RNA, 21 nt, Human
cugggagagccuuccaggggu

SEQ ID NO: 3021940 - RNA, 20 nt, Human
cugggagagccuuccagggg

SEQ ID NO: 3021941 - RNA, 19 nt, Human
cugggagagccuuccaggg

SEQ ID NO: 3021942 - RNA, 16 nt, Human
cuggcuguuggcuggg

SEQ ID NO: 3021943 - RNA, 17 nt, Human
cuggcuguuggcugggg

SEQ ID NO: 3021944 - RNA, 20 nt, Human
cuggcugguuagagguuccc

SEQ ID NO: 3021945 - RNA, 22 nt, Human
cuggcuggguggcaccagcagc

SEQ ID NO: 3021946 - RNA, 21 nt, Human
cugggaggucaaggcugcagu

SEQ ID NO: 3021947 - RNA, 19 nt, Human
cugggaggucaaggcugca

SEQ ID NO: 3021948 - RNA, 17 nt, Human
cugggauuacaggugug

SEQ ID NO: 3021949 - RNA, 20 nt, Human
cugggauuacaggugugaac

SEQ ID NO: 3021950 - RNA, 18 nt, Human
cugggaugauuggagggg

SEQ ID NO: 3021951 - RNA, 20 nt, Human
cugggaucccucauccucau

SEQ ID NO: 3021952 - RNA, 16 nt, Human
cuggcacccggccccu

SEQ ID NO: 3021953 - RNA, 17 nt, Human
cuggcacccggccccug

SEQ ID NO: 3021954 - RNA, 18 nt, Human
cuggcacccggccccugc

SEQ ID NO: 3021955 - RNA, 22 nt, Human
cuggcacccggccccugcuggu

SEQ ID NO: 3021956 - RNA, 18 nt, Human
cuggaauauauaaccagu

SEQ ID NO: 3021957 - RNA, 14 nt, Human
cuggcaagaaugug

SEQ ID NO: 3021958 - RNA, 15 nt, Human
cuggcacuauaaugu

SEQ ID NO: 3021959 - RNA, 16 nt, Human
cuggcacuauaaugua

SEQ ID NO: 3021960 - RNA, 22 nt, Human
cuggcaugggaaugaaugucag

SEQ ID NO: 3021961 - RNA, 19 nt, Human
cuggcaugggaaugaaugu

SEQ ID NO: 3021962 - RNA, 18 nt, Human
cuggcaugggaaugaaug

SEQ ID NO: 3021963 - RNA, 16 nt, Human
cuggcaugggaaugaa

SEQ ID NO: 3021964 - RNA, 24 nt, Human
cuggcaugggaaugaaugucagug

SEQ ID NO: 3021965 - RNA, 22 nt, Human
cuggccagaugcaccagcccuu

SEQ ID NO: 3021966 - RNA, 23 nt, Human
cuggccucaagugauucuccugc

SEQ ID NO: 3021967 - RNA, 12 nt, Human
cuggccucugca

SEQ ID NO: 3021968 - RNA, 22 nt, Human
cuggccucaagugauucuccug

SEQ ID NO: 3021969 - RNA, 16 nt, Human
cuggccugagcuggga

SEQ ID NO: 3021970 - RNA, 14 nt, Human
cuggccucugcacu

SEQ ID NO: 3021971 - RNA, 13 nt, Human
cuggccucugcac

SEQ ID NO: 3021972 - RNA, 13 nt, Human
cuggccuggcccc

SEQ ID NO: 3021973 - RNA, 14 nt, Human
cuggccuggccccu

SEQ ID NO: 3021974 - RNA, 18 nt, Human
cuggccugagcugggaug

SEQ ID NO: 3021975 - RNA, 15 nt, Human
cuggccugagcuggg

SEQ ID NO: 3021976 - RNA, 14 nt, Human
cuggccugugucua

SEQ ID NO: 3021977 - RNA, 17 nt, Human
cuggccuggccccucag

SEQ ID NO: 3021978 - RNA, 16 nt, Human
cuggccuggccccuca

SEQ ID NO: 3021979 - RNA, 20 nt, Human
cugcaguuuuuuuccuucaa

SEQ ID NO: 3021980 - RNA, 16 nt, Human
cugcaguugccaguca

SEQ ID NO: 3021981 - RNA, 13 nt, Human
cugcaguugccag

SEQ ID NO: 3021982 - RNA, 17 nt, Human
cugcagcaauaaagcag

SEQ ID NO: 3021983 - RNA, 14 nt, Human
cugcaccgggccac

SEQ ID NO: 3021984 - RNA, 15 nt, Human
cugcaccgggccaca

SEQ ID NO: 3021985 - RNA, 16 nt, Human
cugcaccggcuggccu

SEQ ID NO: 3021986 - RNA, 15 nt, Human
cugcaccggcuggcc

SEQ ID NO: 3021987 - RNA, 14 nt, Human
cugcaccggcuggc

SEQ ID NO: 3021988 - RNA, 23 nt, Human
cugaggcccuucucuccagcccc

SEQ ID NO: 3021989 - RNA, 22 nt, Human
cugaggcccuucucuccagccc

SEQ ID NO: 3021990 - RNA, 18 nt, Human
cugcaccgggccacagag

SEQ ID NO: 3021991 - RNA, 20 nt, Human
cugcacuccagccuggguga

SEQ ID NO: 3021992 - RNA, 13 nt, Human
cugcacuccccug

SEQ ID NO: 3021993 - RNA, 20 nt, Human
cugcacuccccugcugggug

SEQ ID NO: 3021994 - RNA, 19 nt, Human
cugcacuccccugcugggu

SEQ ID NO: 3021995 - RNA, 13 nt, Human
cugcagagggcac

SEQ ID NO: 3021996 - RNA, 15 nt, Human
cugcagcaauaaagc

SEQ ID NO: 3021997 - RNA, 16 nt, Human
cugcagcaauaaagca

SEQ ID NO: 3021998 - RNA, 10 nt, Human
cugcagaggg

SEQ ID NO: 3021999 - RNA, 18 nt, Human
cugcacuccccugcuggg

SEQ ID NO: 3022000 - RNA, 21 nt, Human
cugcacuccccugcugggugu

SEQ ID NO: 3022001 - RNA, 22 nt, Human
cugcaguuuuuuuccuucaaga

SEQ ID NO: 3022002 - RNA, 23 nt, Human
cugcaguuuuuuuccuucaagaa

SEQ ID NO: 3022003 - RNA, 15 nt, Human
cugcauaugaaagga

SEQ ID NO: 3022004 - RNA, 20 nt, Human
cugcaucaagaugugacaug

SEQ ID NO: 3022005 - RNA, 21 nt, Human
cugccacccuggggagaaagu

SEQ ID NO: 3022006 - RNA, 12 nt, Human
cugccacccugg

SEQ ID NO: 3022007 - RNA, 21 nt, Human
cugccauccagguucagcuug

SEQ ID NO: 3022008 - RNA, 15 nt, Human
cugccauccucccaa

SEQ ID NO: 3022009 - RNA, 22 nt, Human
cugccaggaagccagcaggcuc

SEQ ID NO: 3022010 - RNA, 21 nt, Human
cugccaggaagccagcaggcu

SEQ ID NO: 3022011 - RNA, 20 nt, Human
cugccaggaagccagcaggc

SEQ ID NO: 3022012 - RNA, 14 nt, Human
cugccaggaagcca

SEQ ID NO: 3022013 - RNA, 13 nt, Human
cugccaggaagcc

SEQ ID NO: 3022014 - RNA, 16 nt, Human
cugcccaggccccugc

SEQ ID NO: 3022015 - RNA, 18 nt, Human
cugcccaggccccugcca

SEQ ID NO: 3022016 - RNA, 19 nt, Human
cugcccaggccccugccac

SEQ ID NO: 3022017 - RNA, 20 nt, Human
cugcccaggccccugccacc

SEQ ID NO: 3022018 - RNA, 12 nt, Human
cugcccaccugg

SEQ ID NO: 3022019 - RNA, 14 nt, Human
cugcccaggccccu

SEQ ID NO: 3022020 - RNA, 15 nt, Human
cugcccaggccccug

SEQ ID NO: 3022021 - RNA, 15 nt, Human
cugccauuucugaga

SEQ ID NO: 3022022 - RNA, 13 nt, Human
cugcccggcaggg

SEQ ID NO: 3022023 - RNA, 19 nt, Human
cugccccuggcagccccug

SEQ ID NO: 3022024 - RNA, 17 nt, Human
cugccccuggcagcccc

SEQ ID NO: 3022025 - RNA, 18 nt, Human
cugccccuggcagccccu

SEQ ID NO: 3022026 - RNA, 19 nt, Human
cugcuugugaaaggaaaga

SEQ ID NO: 3022027 - RNA, 19 nt, Human
cugcuugggcuucauccuc

SEQ ID NO: 3022028 - RNA, 18 nt, Human
cugcuugggcuucauccu

SEQ ID NO: 3022029 - RNA, 17 nt, Human
cugcuugggcuucaucc

SEQ ID NO: 3022030 - RNA, 15 nt, Human
cugcuugggcuucau

SEQ ID NO: 3022031 - RNA, 13 nt, Human
cugcuugggcuuc

SEQ ID NO: 3022032 - RNA, 22 nt, Human
cugcuugaggcaacucaucuua

SEQ ID NO: 3022033 - RNA, 20 nt, Human
cugcuugcuugcuuuuuaau

SEQ ID NO: 3022034 - RNA, 15 nt, Human
cugcuuuuggucugu

SEQ ID NO: 3022035 - RNA, 17 nt, Human
cugcuuuuggucugugu

SEQ ID NO: 3022036 - RNA, 13 nt, Human
cugcugcuggcug

SEQ ID NO: 3022037 - RNA, 12 nt, Human
cugcugcuggcu

SEQ ID NO: 3022038 - RNA, 15 nt, Human
cugcuggguguggcg

SEQ ID NO: 3022039 - RNA, 14 nt, Human
cugcuggguguggc

SEQ ID NO: 3022040 - RNA, 17 nt, Human
cugcuggguguggcgca

SEQ ID NO: 3022041 - RNA, 21 nt, Human
cugcuugaggcaacucaucuu

SEQ ID NO: 3022042 - RNA, 20 nt, Human
cugcuugaggcaacucaucu

SEQ ID NO: 3022043 - RNA, 13 nt, Human
cugcuugaggcaa

SEQ ID NO: 3022044 - RNA, 12 nt, Human
cugcucugguua

SEQ ID NO: 3022045 - RNA, 13 nt, Human
cugcugcaguugc

SEQ ID NO: 3022046 - RNA, 10 nt, Human
cugcugcagu

SEQ ID NO: 3022047 - RNA, 14 nt, Human
cugcugcaguugcc

SEQ ID NO: 3022048 - RNA, 23 nt, Human
cugcggugcuaucucccccagcc

SEQ ID NO: 3022049 - RNA, 22 nt, Human
cugcggugcuaucucccccagc

SEQ ID NO: 3022050 - RNA, 21 nt, Human
cugcggugcuaucucccccag

SEQ ID NO: 3022051 - RNA, 20 nt, Human
cugcggugcuaucuccccca

SEQ ID NO: 3022052 - RNA, 23 nt, Human
cugcuccucuccccagcaaguga

SEQ ID NO: 3022053 - RNA, 19 nt, Human
cugcuccucuccccagcaa

SEQ ID NO: 3022054 - RNA, 20 nt, Human
cugcuccucuccccagcaag

SEQ ID NO: 3022055 - RNA, 15 nt, Human
cugcucuccgaccag

SEQ ID NO: 3022056 - RNA, 23 nt, Human
cugcgguccacccaggagccccg

SEQ ID NO: 3022057 - RNA, 19 nt, Human
cugcggugcuaucuccccc

SEQ ID NO: 3022058 - RNA, 18 nt, Human
cugcggugcuaucucccc

SEQ ID NO: 3022059 - RNA, 19 nt, Human
cugccugaagucacacagu

SEQ ID NO: 3022060 - RNA, 18 nt, Human
cugccugaagucacacag

SEQ ID NO: 3022061 - RNA, 16 nt, Human
cugccugaagucacac

SEQ ID NO: 3022062 - RNA, 21 nt, Human
cugcccugcccaccuggccuc

SEQ ID NO: 3022063 - RNA, 17 nt, Human
cugcccugcccaccugg

SEQ ID NO: 3022064 - RNA, 20 nt, Human
cugcccugcccaccuggccu

SEQ ID NO: 3022065 - RNA, 16 nt, Human
cugaaauaaggaauga

SEQ ID NO: 3022066 - RNA, 23 nt, Human
cugaaagcccugagcuuucugcu

SEQ ID NO: 3022067 - RNA, 19 nt, Human
cugaaagcccugagcuuuc

SEQ ID NO: 3022068 - RNA, 18 nt, Human
cugaaagcccugagcuuu

SEQ ID NO: 3022069 - RNA, 17 nt, Human
cugaaagcccugagcuu

SEQ ID NO: 3022070 - RNA, 16 nt, Human
cugaaagcccugagcu

SEQ ID NO: 3022071 - RNA, 15 nt, Human
cugaaagcccugagc

SEQ ID NO: 3022072 - RNA, 19 nt, Human
cugaagaauugaaaaacca

SEQ ID NO: 3022073 - RNA, 21 nt, Human
cucuuggguucaagcgauucu

SEQ ID NO: 3022074 - RNA, 19 nt, Human
cucuuggguucaagcgauu

SEQ ID NO: 3022075 - RNA, 22 nt, Human
cucuugaaauauaggaacuuaa

SEQ ID NO: 3022076 - RNA, 18 nt, Human
cucuuuaaugucacaggc

SEQ ID NO: 3022077 - RNA, 17 nt, Human
cucuugguccugcugca

SEQ ID NO: 3022078 - RNA, 16 nt, Human
cucuugguccugcugc

SEQ ID NO: 3022079 - RNA, 15 nt, Human
cucuugguccugcug

SEQ ID NO: 3022080 - RNA, 13 nt, Human
cucuugguccugc

SEQ ID NO: 3022081 - RNA, 20 nt, Human
cucuuuaaugucacaggcag

SEQ ID NO: 3022082 - RNA, 21 nt, Human
cucuuuaaugucacaggcagg

SEQ ID NO: 3022083 - RNA, 22 nt, Human
cucuuuaaugucacaggcaggu

SEQ ID NO: 3022084 - RNA, 23 nt, Human
cucuuuaaugucacaggcagguc

SEQ ID NO: 3022085 - RNA, 13 nt, Human
cucuuucccuccc

SEQ ID NO: 3022086 - RNA, 17 nt, Human
cucuuucccucccuucc

SEQ ID NO: 3022087 - RNA, 13 nt, Human
cucucuccucccu

SEQ ID NO: 3022088 - RNA, 22 nt, Human
cucugccugaagucacacagug

SEQ ID NO: 3022089 - RNA, 10 nt, Human
cucugccuga

SEQ ID NO: 3022090 - RNA, 21 nt, Human
cucugccugaagucacacagu

SEQ ID NO: 3022091 - RNA, 15 nt, Human
cucuggacaggcaug

SEQ ID NO: 3022092 - RNA, 14 nt, Human
cucuggcagcucag

SEQ ID NO: 3022093 - RNA, 12 nt, Human
cucuggcagcuc

SEQ ID NO: 3022094 - RNA, 14 nt, Human
cucuggacaggcau

SEQ ID NO: 3022095 - RNA, 16 nt, Human
cucuggacaggcaugu

SEQ ID NO: 3022096 - RNA, 22 nt, Human
cucuggacaggcauguucucug

SEQ ID NO: 3022097 - RNA, 16 nt, Human
cucuggcagcucagag

SEQ ID NO: 3022098 - RNA, 15 nt, Human
cucuggcagcucaga

SEQ ID NO: 3022099 - RNA, 13 nt, Human
cucuuccaggcug

SEQ ID NO: 3022100 - RNA, 15 nt, Human
cucuuccaggcuggg

SEQ ID NO: 3022101 - RNA, 14 nt, Human
cucuuccaggcugg

SEQ ID NO: 3022102 - RNA, 15 nt, Human
cucuuagaaaaacca

SEQ ID NO: 3022103 - RNA, 13 nt, Human
cucuuagaaaaac

SEQ ID NO: 3022104 - RNA, 15 nt, Human
cucugugucaggugg

SEQ ID NO: 3022105 - RNA, 21 nt, Human
cugacauuguuggccaaagcc

SEQ ID NO: 3022106 - RNA, 21 nt, Human
cugacaggcaaugcuggcugu

SEQ ID NO: 3022107 - RNA, 22 nt, Human
cugacauuguuggccaaagcca

SEQ ID NO: 3022108 - RNA, 12 nt, Human
cugacccacugc

SEQ ID NO: 3022109 - RNA, 16 nt, Human
cugacccaugcugccc

SEQ ID NO: 3022110 - RNA, 15 nt, Human
cugacccaugcugcc

SEQ ID NO: 3022111 - RNA, 14 nt, Human
cugacccaugcugc

SEQ ID NO: 3022112 - RNA, 13 nt, Human
cugacccacugcu

SEQ ID NO: 3022113 - RNA, 14 nt, Human
cugacccacugcuu

SEQ ID NO: 3022114 - RNA, 13 nt, Human
cugacccaugcug

SEQ ID NO: 3022115 - RNA, 16 nt, Human
cugacuguuuucucuu

SEQ ID NO: 3022116 - RNA, 18 nt, Human
cugacuguuuucucuuga

SEQ ID NO: 3022117 - RNA, 15 nt, Human
cugagacagcccggg

SEQ ID NO: 3022118 - RNA, 14 nt, Human
cugagacagcccgg

SEQ ID NO: 3022119 - RNA, 20 nt, Human
cugaggcccuucucuccagc

SEQ ID NO: 3022120 - RNA, 19 nt, Human
cugaggcccuucucuccag

SEQ ID NO: 3022121 - RNA, 18 nt, Human
cugaggcccuucucucca

SEQ ID NO: 3022122 - RNA, 15 nt, Human
cugaggcccuucucu

SEQ ID NO: 3022123 - RNA, 14 nt, Human
cugaggcccuucuc

SEQ ID NO: 3022124 - RNA, 23 nt, Human
cugaggcccagagggccugcaag

SEQ ID NO: 3022125 - RNA, 21 nt, Human
cugaggcccagagggccugca

SEQ ID NO: 3022126 - RNA, 19 nt, Human
cugaggcccagagggccug

SEQ ID NO: 3022127 - RNA, 18 nt, Human
cugaggcccagagggccu

SEQ ID NO: 3022128 - RNA, 17 nt, Human
cugaggcccagagggcc

SEQ ID NO: 3022129 - RNA, 16 nt, Human
cugaggcccagagggc

SEQ ID NO: 3022130 - RNA, 15 nt, Human
cugaggcccagaggg

SEQ ID NO: 3022131 - RNA, 14 nt, Human
cugaggcccagagg

SEQ ID NO: 3022132 - RNA, 13 nt, Human
cugaggcccagag

SEQ ID NO: 3022133 - RNA, 12 nt, Human
cugaggcccaga

SEQ ID NO: 3022134 - RNA, 15 nt, Human
cugagccagauuuca

SEQ ID NO: 3022135 - RNA, 21 nt, Human
cugagccagauuucacucucc

SEQ ID NO: 3022136 - RNA, 20 nt, Human
cugagccagauuucacucuc

SEQ ID NO: 3022137 - RNA, 19 nt, Human
cugagccagauuucacucu

SEQ ID NO: 3022138 - RNA, 18 nt, Human
cugagccagauuucacuc

SEQ ID NO: 3022139 - RNA, 17 nt, Human
cugagccagauuucacu

SEQ ID NO: 3022140 - RNA, 18 nt, Human
cugagacagcccgggcuc

SEQ ID NO: 3022141 - RNA, 17 nt, Human
cugagacagcccgggcu

SEQ ID NO: 3022142 - RNA, 16 nt, Human
cugagacagcccgggc

SEQ ID NO: 3022143 - RNA, 13 nt, Human
cuccuccacauuu

SEQ ID NO: 3022144 - RNA, 22 nt, Human
cuccuccagccgccaugcuccu

SEQ ID NO: 3022145 - RNA, 22 nt, Human
cuccucuccccagcaagugaga

SEQ ID NO: 3022146 - RNA, 15 nt, Human
cuccgaccagacacc

SEQ ID NO: 3022147 - RNA, 18 nt, Human
cucccucagucuggcccu

SEQ ID NO: 3022148 - RNA, 17 nt, Human
cucccuuucuucccuac

SEQ ID NO: 3022149 - RNA, 20 nt, Human
cuccugcaggcagccaggcc

SEQ ID NO: 3022150 - RNA, 18 nt, Human
cuccugcaggcagccagg

SEQ ID NO: 3022151 - RNA, 11 nt, Human
cuccugcccuu

SEQ ID NO: 3022152 - RNA, 13 nt, Human
cuccugccucagc

SEQ ID NO: 3022153 - RNA, 14 nt, Human
cuccugccucagcc

SEQ ID NO: 3022154 - RNA, 17 nt, Human
cuccugcaggcagccag

SEQ ID NO: 3022155 - RNA, 16 nt, Human
cuccugcaggcagcca

SEQ ID NO: 3022156 - RNA, 11 nt, Human
cuccugcaggc

SEQ ID NO: 3022157 - RNA, 16 nt, Human
cuccugugugugcgcc

SEQ ID NO: 3022158 - RNA, 19 nt, Human
cuccugugugugcgccuac

SEQ ID NO: 3022159 - RNA, 22 nt, Human
cuccugccucgaacuggcugca

SEQ ID NO: 3022160 - RNA, 15 nt, Human
cuccugccucagccu

SEQ ID NO: 3022161 - RNA, 17 nt, Human
cucccaaagugcuggga

SEQ ID NO: 3022162 - RNA, 13 nt, Human
cuccaugugggcu

SEQ ID NO: 3022163 - RNA, 18 nt, Human
cucacuauguugcccagg

SEQ ID NO: 3022164 - RNA, 22 nt, Human
cucccaacucaccccagcccca

SEQ ID NO: 3022165 - RNA, 18 nt, Human
cucccaaagugcugggau

SEQ ID NO: 3022166 - RNA, 17 nt, Human
cucccaacucaccccag

SEQ ID NO: 3022167 - RNA, 16 nt, Human
cucccaacucacccca

SEQ ID NO: 3022168 - RNA, 23 nt, Human
cucccaucugugaaaggaaagag

SEQ ID NO: 3022169 - RNA, 18 nt, Human
cucccaucugugaaagga

SEQ ID NO: 3022170 - RNA, 15 nt, Human
cucccaucugugaaa

SEQ ID NO: 3022171 - RNA, 14 nt, Human
cucccaucugugaa

SEQ ID NO: 3022172 - RNA, 11 nt, Human
cucccaucugu

SEQ ID NO: 3022173 - RNA, 21 nt, Human
cucccaucucacacaugagca

SEQ ID NO: 3022174 - RNA, 17 nt, Human
cucccgaauagcuggga

SEQ ID NO: 3022175 - RNA, 16 nt, Human
cucccgaauagcuggg

SEQ ID NO: 3022176 - RNA, 13 nt, Human
cuccccugcuggg

SEQ ID NO: 3022177 - RNA, 15 nt, Human
cucccgaguagcugg

SEQ ID NO: 3022178 - RNA, 18 nt, Human
cucccgaauagcugggac

SEQ ID NO: 3022179 - RNA, 16 nt, Human
cucccgaguagcuggg

SEQ ID NO: 3022180 - RNA, 17 nt, Human
cucccgaguagcuggga

SEQ ID NO: 3022181 - RNA, 12 nt, Human
cuccccagcaag

SEQ ID NO: 3022182 - RNA, 20 nt, Human
cuccccagcaagugagagcu

SEQ ID NO: 3022183 - RNA, 20 nt, Human
cuccccagccccaucccaaa

SEQ ID NO: 3022184 - RNA, 12 nt, Human
cuccccugcugg

SEQ ID NO: 3022185 - RNA, 13 nt, Human
cucuacagaggcc

SEQ ID NO: 3022186 - RNA, 19 nt, Human
cucuacagaggccaugggc

SEQ ID NO: 3022187 - RNA, 14 nt, Human
cucuacagaggcca

SEQ ID NO: 3022188 - RNA, 16 nt, Human
cucuacagaggccaug

SEQ ID NO: 3022189 - RNA, 13 nt, Human
cucuacaaaaagc

SEQ ID NO: 3022190 - RNA, 19 nt, Human
cuccuucacagaugggugc

SEQ ID NO: 3022191 - RNA, 20 nt, Human
cuccugugugugcgccuaca

SEQ ID NO: 3022192 - RNA, 14 nt, Human
cuccugugugugcg

SEQ ID NO: 3022193 - RNA, 17 nt, Human
cuccuucacagaugggu

SEQ ID NO: 3022194 - RNA, 16 nt, Human
cuccuucacagauggg

SEQ ID NO: 3022195 - RNA, 20 nt, Human
cucuaccauccccuguagag

SEQ ID NO: 3022196 - RNA, 13 nt, Human
cucuacccuggca

SEQ ID NO: 3022197 - RNA, 23 nt, Human
cucuagggaaaaaccagcgugug

SEQ ID NO: 3022198 - RNA, 15 nt, Human
cucuaguuugauuaa

SEQ ID NO: 3022199 - RNA, 19 nt, Human
cucuaguuugauuaaauuc

SEQ ID NO: 3022200 - RNA, 20 nt, Human
cucuaguuugauuaaauucu

SEQ ID NO: 3022201 - RNA, 21 nt, Human
cucuaguuugauuaaauucuu

SEQ ID NO: 3022202 - RNA, 12 nt, Human
cucucaggccaa

SEQ ID NO: 3022203 - RNA, 21 nt, Human
cucucaggccaaacucaccug

SEQ ID NO: 3022204 - RNA, 20 nt, Human
cucucaggccaaacucaccu

SEQ ID NO: 3022205 - RNA, 15 nt, Human
cucucaggccagcug

SEQ ID NO: 3022206 - RNA, 13 nt, Human
cucucaggccagc

SEQ ID NO: 3022207 - RNA, 23 nt, Human
cucucaggccaaacucaccugcc

SEQ ID NO: 3022208 - RNA, 22 nt, Human
cucucaggccaaacucaccugc

SEQ ID NO: 3022209 - RNA, 14 nt, Human
cucuccagccccug

SEQ ID NO: 3022210 - RNA, 18 nt, Human
cucuccagccccuggaug

SEQ ID NO: 3022211 - RNA, 17 nt, Human
cucuccagccccuggau

SEQ ID NO: 3022212 - RNA, 16 nt, Human
cucuccagccccugga

SEQ ID NO: 3022213 - RNA, 15 nt, Human
cucuccagccccugg

SEQ ID NO: 3022214 - RNA, 21 nt, Human
cucucaggccagcugcuuggg

SEQ ID NO: 3022215 - RNA, 19 nt, Human
cucucaggccagcugcuug

SEQ ID NO: 3022216 - RNA, 18 nt, Human
cucucaggccagcugcuu

SEQ ID NO: 3022217 - RNA, 17 nt, Human
cucucaggccagcugcu

SEQ ID NO: 3022218 - RNA, 18 nt, Human
cucuccucugcugcuggc

SEQ ID NO: 3022219 - RNA, 15 nt, Human
cucuccucugcugcu

SEQ ID NO: 3022220 - RNA, 14 nt, Human
cucuccucugcugc

SEQ ID NO: 3022221 - RNA, 13 nt, Human
cucuccucugcug

SEQ ID NO: 3022222 - RNA, 14 nt, Human
cucuccccagcaag

SEQ ID NO: 3022223 - RNA, 22 nt, Human
cucuccccagcaagugagagcu

SEQ ID NO: 3022224 - RNA, 24 nt, Human
cucuccccagcaagugagagcugg

SEQ ID NO: 3022225 - RNA, 12 nt, Human
cucuccucugcu

SEQ ID NO: 3022226 - RNA, 19 nt, Human
cucuccagccccuggaugc

SEQ ID NO: 3022227 - RNA, 13 nt, Human
cucuccccagcaa

SEQ ID NO: 3022228 - RNA, 13 nt, Human
cucucucaggcca

SEQ ID NO: 3022229 - RNA, 12 nt, Human
cucucucacucc

SEQ ID NO: 3022230 - RNA, 22 nt, Human
cgccagcucaccccaucauccc

SEQ ID NO: 3022231 - RNA, 22 nt, Human
cgccagauucuuuccugaggcu

SEQ ID NO: 3022232 - RNA, 20 nt, Human
ccucugcccacucccugcaa

SEQ ID NO: 3022233 - RNA, 19 nt, Human
ccucugcccacucccugca

SEQ ID NO: 3022234 - RNA, 17 nt, Human
ccucugcccacucccug

SEQ ID NO: 3022235 - RNA, 16 nt, Human
cgccaucccagcccca

SEQ ID NO: 3022236 - RNA, 14 nt, Human
cgccaucccagccc

SEQ ID NO: 3022237 - RNA, 23 nt, Human
cgccaggggaaaaucagccugcu

SEQ ID NO: 3022238 - RNA, 22 nt, Human
cgcccaggcuuagucacugaga

SEQ ID NO: 3022239 - RNA, 22 nt, Human
cgcuaagagggagggagggcuc

SEQ ID NO: 3022240 - RNA, 16 nt, Human
cgcuacccgggaaggg

SEQ ID NO: 3022241 - RNA, 15 nt, Human
cggaaaacaugcuac

SEQ ID NO: 3022242 - RNA, 20 nt, Human
cggaaaacaugcuacacacu

SEQ ID NO: 3022243 - RNA, 18 nt, Human
cgcugugcugcccugccc

SEQ ID NO: 3022244 - RNA, 15 nt, Human
cgcugugcugcccug

SEQ ID NO: 3022245 - RNA, 17 nt, Human
cgcugugcugcccugcc

SEQ ID NO: 3022246 - RNA, 16 nt, Human
cgcugugcugcccugc

SEQ ID NO: 3022247 - RNA, 22 nt, Human
cgcugucagccauuccuguucc

SEQ ID NO: 3022248 - RNA, 23 nt, Human
cggggacagcuccuucuguccua

SEQ ID NO: 3022249 - RNA, 15 nt, Human
cgggggcagagaggg

SEQ ID NO: 3022250 - RNA, 20 nt, Human
cgggaggucgaggcaggagg

SEQ ID NO: 3022251 - RNA, 18 nt, Human
cgggaggucgaggcagga

SEQ ID NO: 3022252 - RNA, 22 nt, Human
cggggacagcuccuucuguccu

SEQ ID NO: 3022253 - RNA, 14 nt, Human
cgggcacucagaag

SEQ ID NO: 3022254 - RNA, 22 nt, Human
cgggcacucagaagacacugau

SEQ ID NO: 3022255 - RNA, 19 nt, Human
cggcuggccuggccccuca

SEQ ID NO: 3022256 - RNA, 22 nt, Human
cggcuggccuggccccucaggg

SEQ ID NO: 3022257 - RNA, 23 nt, Human
cggcuggccuggccccucagggu

SEQ ID NO: 3022258 - RNA, 20 nt, Human
cggugagaggggaacagacu

SEQ ID NO: 3022259 - RNA, 21 nt, Human
cggugagaggggaacagacug

SEQ ID NO: 3022260 - RNA, 14 nt, Human
cgguccacccagga

SEQ ID NO: 3022261 - RNA, 15 nt, Human
cgguccacccaggag

SEQ ID NO: 3022262 - RNA, 16 nt, Human
cgguccacccaggagc

SEQ ID NO: 3022263 - RNA, 20 nt, Human
cgguccacccaggagccccg

SEQ ID NO: 3022264 - RNA, 17 nt, Human
cggccaccugcggugcu

SEQ ID NO: 3022265 - RNA, 16 nt, Human
cggccaccugcggugc

SEQ ID NO: 3022266 - RNA, 15 nt, Human
cggccaccugcggug

SEQ ID NO: 3022267 - RNA, 11 nt, Human
cggccaccugc

SEQ ID NO: 3022268 - RNA, 13 nt, Human
cggaagagccuug

SEQ ID NO: 3022269 - RNA, 13 nt, Human
cggccccugcugg

SEQ ID NO: 3022270 - RNA, 18 nt, Human
cggccccugcugguucag

SEQ ID NO: 3022271 - RNA, 19 nt, Human
cggccccugcugguucagg

SEQ ID NO: 3022272 - RNA, 24 nt, Human
cggccaggccagagggagugacag

SEQ ID NO: 3022273 - RNA, 18 nt, Human
cgugcacgcacacugucu

SEQ ID NO: 3022274 - RNA, 14 nt, Human
cgugcacacaccag

SEQ ID NO: 3022275 - RNA, 18 nt, Human
cgugcacacaccagagcc

SEQ ID NO: 3022276 - RNA, 19 nt, Human
cgugcacacaccagagccc

SEQ ID NO: 3022277 - RNA, 21 nt, Human
cgugcaguggugcgaucuggg

SEQ ID NO: 3022278 - RNA, 23 nt, Human
cgugcauaccacuuuuguucuug

SEQ ID NO: 3022279 - RNA, 20 nt, Human
cgucugacaggcaaugcugg

SEQ ID NO: 3022280 - RNA, 21 nt, Human
cgucugacaggcaaugcuggc

SEQ ID NO: 3022281 - RNA, 22 nt, Human
cgucugacaggcaaugcuggcu

SEQ ID NO: 3022282 - RNA, 16 nt, Human
cgugcacacaccagag

SEQ ID NO: 3022283 - RNA, 16 nt, Human
cgucuaccugaggggc

SEQ ID NO: 3022284 - RNA, 16 nt, Human
cgucucauacucaccu

SEQ ID NO: 3022285 - RNA, 18 nt, Human
cggugcuaucucccccag

SEQ ID NO: 3022286 - RNA, 21 nt, Human
cggugcuaucucccccagccc

SEQ ID NO: 3022287 - RNA, 20 nt, Human
cggugcuaucucccccagcc

SEQ ID NO: 3022288 - RNA, 22 nt, Human
cggugcuaucucccccagcccc

SEQ ID NO: 3022289 - RNA, 13 nt, Human
cuaaaauguucua

SEQ ID NO: 3022290 - RNA, 16 nt, Human
cuaaauguugaaagau

SEQ ID NO: 3022291 - RNA, 17 nt, Human
cuaacauggaaguacua

SEQ ID NO: 3022292 - RNA, 15 nt, Human
cuaacauggaaguac

SEQ ID NO: 3022293 - RNA, 15 nt, Human
cuaaauggaaccacu

SEQ ID NO: 3022294 - RNA, 16 nt, Human
cuaaauggaaccacuc

SEQ ID NO: 3022295 - RNA, 17 nt, Human
cuaaauggaaccacucu

SEQ ID NO: 3022296 - RNA, 18 nt, Human
cuaaauggaaccacucua

SEQ ID NO: 3022297 - RNA, 18 nt, Human
cuacacaccuaacuuaug

SEQ ID NO: 3022298 - RNA, 13 nt, Human
cuacacacugcau

SEQ ID NO: 3022299 - RNA, 15 nt, Human
cuacacacugcaugu

SEQ ID NO: 3022300 - RNA, 18 nt, Human
cuacacugugcugagucu

SEQ ID NO: 3022301 - RNA, 15 nt, Human
cuacagaggccaugg

SEQ ID NO: 3022302 - RNA, 20 nt, Human
cuacccagcgagcccuggug

SEQ ID NO: 3022303 - RNA, 19 nt, Human
cuacccagcgagcccuggu

SEQ ID NO: 3022304 - RNA, 17 nt, Human
cuacccacccuccuuuc

SEQ ID NO: 3022305 - RNA, 13 nt, Human
cuacccacccucc

SEQ ID NO: 3022306 - RNA, 22 nt, Human
cuacccacccuccuuucaccac

SEQ ID NO: 3022307 - RNA, 18 nt, Human
cuaauauguaacaagcca

SEQ ID NO: 3022308 - RNA, 20 nt, Human
cuaauaaaauuuaaaagucu

SEQ ID NO: 3022309 - RNA, 16 nt, Human
cuaaggugugcucuga

SEQ ID NO: 3022310 - RNA, 21 nt, Human
cuaauaaaauuuaaaagucuu

SEQ ID NO: 3022311 - RNA, 14 nt, Human
cuaauguacugcau

SEQ ID NO: 3022312 - RNA, 16 nt, Human
cuaauguacugcauau

SEQ ID NO: 3022313 - RNA, 15 nt, Human
cuaaggugugcucug

SEQ ID NO: 3022314 - RNA, 19 nt, Human
cuaagcuauucaguaauaa

SEQ ID NO: 3022315 - RNA, 21 nt, Human
cuaagcuauucaguaauaacu

SEQ ID NO: 3022316 - RNA, 16 nt, Human
cuaaccagcagaaaug

SEQ ID NO: 3022317 - RNA, 17 nt, Human
cuaaccacgcuggaccu

SEQ ID NO: 3022318 - RNA, 17 nt, Human
cuaaccagcagaaaugc

SEQ ID NO: 3022319 - RNA, 14 nt, Human
cuacugaggugcua

SEQ ID NO: 3022320 - RNA, 17 nt, Human
cuacuguaauuugugau

SEQ ID NO: 3022321 - RNA, 16 nt, Human
cuacuguaauuuguga

SEQ ID NO: 3022322 - RNA, 13 nt, Human
cuacucuguguca

SEQ ID NO: 3022323 - RNA, 16 nt, Human
cuacucugugucaggu

SEQ ID NO: 3022324 - RNA, 21 nt, Human
cuacucugugucagguggggc

SEQ ID NO: 3022325 - RNA, 21 nt, Human
cuacccgggaagggggcuggg

SEQ ID NO: 3022326 - RNA, 20 nt, Human
cuacccgggaagggggcugg

SEQ ID NO: 3022327 - RNA, 15 nt, Human
cuacccgggaagggg

SEQ ID NO: 3022328 - RNA, 14 nt, Human
cuacccgggaaggg

SEQ ID NO: 3022329 - RNA, 21 nt, Human
cuagacgagcaggcuucuucc

SEQ ID NO: 3022330 - RNA, 20 nt, Human
cuagacgagcaggcuucuuc

SEQ ID NO: 3022331 - RNA, 21 nt, Human
cuagagugaacuugggccacu

SEQ ID NO: 3022332 - RNA, 17 nt, Human
cuagagugaacuugggc

SEQ ID NO: 3022333 - RNA, 17 nt, Human
cuagcacuuugggaggc

SEQ ID NO: 3022334 - RNA, 14 nt, Human
cuaugcauuugaaa

SEQ ID NO: 3022335 - RNA, 21 nt, Human
cucaacucuccuccagaguca

SEQ ID NO: 3022336 - RNA, 20 nt, Human
cucaacucuccuccagaguc

SEQ ID NO: 3022337 - RNA, 19 nt, Human
cucaacucuccuccagagu

SEQ ID NO: 3022338 - RNA, 23 nt, Human
cucacaguccuuaccagcagagc

SEQ ID NO: 3022339 - RNA, 18 nt, Human
cucaagugauucuccugc

SEQ ID NO: 3022340 - RNA, 19 nt, Human
cucaagugauucuccugcc

SEQ ID NO: 3022341 - RNA, 20 nt, Human
cucaagugauucuccugccu

SEQ ID NO: 3022342 - RNA, 20 nt, Human
cucaccagccccagugccca

SEQ ID NO: 3022343 - RNA, 21 nt, Human
cucaccagccccagugcccac

SEQ ID NO: 3022344 - RNA, 19 nt, Human
cucaccagccccagugccc

SEQ ID NO: 3022345 - RNA, 14 nt, Human
cucaccccagcccc

SEQ ID NO: 3022346 - RNA, 13 nt, Human
cucaccccagccc

SEQ ID NO: 3022347 - RNA, 12 nt, Human
cucaccccagcc

SEQ ID NO: 3022348 - RNA, 16 nt, Human
cucacuauguugccca

SEQ ID NO: 3022349 - RNA, 17 nt, Human
cucacuauguugcccag

SEQ ID NO: 3022350 - RNA, 11 nt, Human
cuaugcauuug

SEQ ID NO: 3022351 - RNA, 12 nt, Human
cuaugcauuuga

SEQ ID NO: 3022352 - RNA, 20 nt, Human
cuaucaaguauuauaccuuu

SEQ ID NO: 3022353 - RNA, 14 nt, Human
cuaugacacaugca

SEQ ID NO: 3022354 - RNA, 22 nt, Human
cuauauuguuuucaguguacau

SEQ ID NO: 3022355 - RNA, 23 nt, Human
cuauauuguuuucaguguacaug

SEQ ID NO: 3022356 - RNA, 22 nt, Human
cuaggaccccuccaugugggcu

SEQ ID NO: 3022357 - RNA, 17 nt, Human
cuaggaggucucuaaga

SEQ ID NO: 3022358 - RNA, 15 nt, Human
cuaggaacacuccuu

SEQ ID NO: 3022359 - RNA, 13 nt, Human
cuaggaacacucc

SEQ ID NO: 3022360 - RNA, 21 nt, Human
cuaggaagacuuuggaaagag

SEQ ID NO: 3022361 - RNA, 19 nt, Human
cuagugugguguuuccugg

SEQ ID NO: 3022362 - RNA, 23 nt, Human
cuagugugguguuuccuggcacu

SEQ ID NO: 3022363 - RNA, 22 nt, Human
cuagugugguguuuccuggcac

SEQ ID NO: 3022364 - RNA, 21 nt, Human
cuagugugguguuuccuggca

SEQ ID NO: 3022365 - RNA, 21 nt, Human
cuaggcauuugcugaauacag

SEQ ID NO: 3022366 - RNA, 14 nt, Human
cccucaugcugcca

SEQ ID NO: 3022367 - RNA, 17 nt, Human
cccucaugcugccaaua

SEQ ID NO: 3022368 - RNA, 22 nt, Human
cccucauccucauacccacccc

SEQ ID NO: 3022369 - RNA, 21 nt, Human
cccuccaagaccuucuccuuc

SEQ ID NO: 3022370 - RNA, 21 nt, Human
cccucagggucccugguggca

SEQ ID NO: 3022371 - RNA, 20 nt, Human
cccucagucuggcccuuccu

SEQ ID NO: 3022372 - RNA, 22 nt, Human
cccucaucaccaacgucugugc

SEQ ID NO: 3022373 - RNA, 20 nt, Human
cccucauccucauacccacc

SEQ ID NO: 3022374 - RNA, 17 nt, Human
cccucauccucauaccc

SEQ ID NO: 3022375 - RNA, 17 nt, Human
cccuccaugugggcuag

SEQ ID NO: 3022376 - RNA, 13 nt, Human
cccucccucuuuc

SEQ ID NO: 3022377 - RNA, 15 nt, Human
cccucagggucccug

SEQ ID NO: 3022378 - RNA, 19 nt, Human
cccucagggucccuggugg

SEQ ID NO: 3022379 - RNA, 18 nt, Human
cccucagggucccuggug

SEQ ID NO: 3022380 - RNA, 17 nt, Human
cccucagggucccuggu

SEQ ID NO: 3022381 - RNA, 16 nt, Human
cccucagggucccugg

SEQ ID NO: 3022382 - RNA, 22 nt, Human
cccuaaaguguauuuuuuuacu

SEQ ID NO: 3022383 - RNA, 17 nt, Human
cccuaaaguguauuuuu

SEQ ID NO: 3022384 - RNA, 16 nt, Human
cccggcaggguccuag

SEQ ID NO: 3022385 - RNA, 22 nt, Human
ccccuguccccgcacugggcuu

SEQ ID NO: 3022386 - RNA, 20 nt, Human
ccccuguucuggcagaguug

SEQ ID NO: 3022387 - RNA, 20 nt, Human
cccgaggccuucucugaagg

SEQ ID NO: 3022388 - RNA, 15 nt, Human
cccgaggccuucucu

SEQ ID NO: 3022389 - RNA, 13 nt, Human
ccccagccugcua

SEQ ID NO: 3022390 - RNA, 15 nt, Human
ccccagccccauccu

SEQ ID NO: 3022391 - RNA, 16 nt, Human
ccccagccccauccca

SEQ ID NO: 3022392 - RNA, 12 nt, Human
ccccaggaggcc

SEQ ID NO: 3022393 - RNA, 15 nt, Human
ccccuggcagccccu

SEQ ID NO: 3022394 - RNA, 14 nt, Human
ccccuggcagcccc

SEQ ID NO: 3022395 - RNA, 12 nt, Human
ccccuggcagcc

SEQ ID NO: 3022396 - RNA, 22 nt, Human
ccccaggugguuauggagaggg

SEQ ID NO: 3022397 - RNA, 19 nt, Human
cccugcugguucaggguug

SEQ ID NO: 3022398 - RNA, 20 nt, Human
cccugcugguucaggguugg

SEQ ID NO: 3022399 - RNA, 13 nt, Human
cccugcugguuca

SEQ ID NO: 3022400 - RNA, 22 nt, Human
cccugguggcagugggagcugc

SEQ ID NO: 3022401 - RNA, 21 nt, Human
cccugguggcagugggagcug

SEQ ID NO: 3022402 - RNA, 12 nt, Human
cccugccacccu

SEQ ID NO: 3022403 - RNA, 14 nt, Human
cccugccacccugg

SEQ ID NO: 3022404 - RNA, 15 nt, Human
cccugccacccuggg

SEQ ID NO: 3022405 - RNA, 17 nt, Human
cccugccacccugggga

SEQ ID NO: 3022406 - RNA, 18 nt, Human
cccugccacccuggggag

SEQ ID NO: 3022407 - RNA, 23 nt, Human
cccugccuccuuugugaggaagc

SEQ ID NO: 3022408 - RNA, 16 nt, Human
cccugccuccuuugug

SEQ ID NO: 3022409 - RNA, 14 nt, Human
cccugccuccuuug

SEQ ID NO: 3022410 - RNA, 22 nt, Human
cccugcacuugcagacucuaca

SEQ ID NO: 3022411 - RNA, 12 nt, Human
cccugcagaggg

SEQ ID NO: 3022412 - RNA, 18 nt, Human
cccugcagagggcacaga

SEQ ID NO: 3022413 - RNA, 16 nt, Human
cccugcaaccugauug

SEQ ID NO: 3022414 - RNA, 22 nt, Human
cccugcaaccugauugugucuc

SEQ ID NO: 3022415 - RNA, 14 nt, Human
cccugguggcagcu

SEQ ID NO: 3022416 - RNA, 16 nt, Human
ccucccccuggcacug

SEQ ID NO: 3022417 - RNA, 15 nt, Human
ccucccaacucaccc

SEQ ID NO: 3022418 - RNA, 18 nt, Human
ccucccgaauagcuggga

SEQ ID NO: 3022419 - RNA, 13 nt, Human
ccucccucuuucc

SEQ ID NO: 3022420 - RNA, 11 nt, Human
ccuccucagau

SEQ ID NO: 3022421 - RNA, 12 nt, Human
ccuccuccagcc

SEQ ID NO: 3022422 - RNA, 17 nt, Human
ccucccgaguagcuggg

SEQ ID NO: 3022423 - RNA, 18 nt, Human
ccucccgaguagcuggga

SEQ ID NO: 3022424 - RNA, 21 nt, Human
ccucccgaauagcugggacua

SEQ ID NO: 3022425 - RNA, 19 nt, Human
ccucccgaauagcugggac

SEQ ID NO: 3022426 - RNA, 20 nt, Human
ccucccgaauagcugggacu

SEQ ID NO: 3022427 - RNA, 20 nt, Human
ccucaggugagaagcagagg

SEQ ID NO: 3022428 - RNA, 18 nt, Human
ccucaggugagaagcaga

SEQ ID NO: 3022429 - RNA, 17 nt, Human
ccucaggugagaagcag

SEQ ID NO: 3022430 - RNA, 12 nt, Human
ccuccaggugca

SEQ ID NO: 3022431 - RNA, 11 nt, Human
ccuccaggugc

SEQ ID NO: 3022432 - RNA, 17 nt, Human
ccuccaggugcacaagc

SEQ ID NO: 3022433 - RNA, 12 nt, Human
ccuccauguggg

SEQ ID NO: 3022434 - RNA, 15 nt, Human
ccuccaugugggcua

SEQ ID NO: 3022435 - RNA, 17 nt, Human
ccucccaaagugcuggg

SEQ ID NO: 3022436 - RNA, 14 nt, Human
ccucccaacucacc

SEQ ID NO: 3022437 - RNA, 14 nt, Human
ccucuccuccacau

SEQ ID NO: 3022438 - RNA, 13 nt, Human
ccucugacacaca

SEQ ID NO: 3022439 - RNA, 14 nt, Human
ccucugacacacag

SEQ ID NO: 3022440 - RNA, 19 nt, Human
ccucugacacacagcucug

SEQ ID NO: 3022441 - RNA, 20 nt, Human
ccucugacacacagcucugu

SEQ ID NO: 3022442 - RNA, 21 nt, Human
ccucugacacacagcucuguc

SEQ ID NO: 3022443 - RNA, 15 nt, Human
ccucugcacuccccu

SEQ ID NO: 3022444 - RNA, 17 nt, Human
ccucugcacuccccugc

SEQ ID NO: 3022445 - RNA, 16 nt, Human
ccucugcacuccccug

SEQ ID NO: 3022446 - RNA, 18 nt, Human
ccucugcacuccccugcu

SEQ ID NO: 3022447 - RNA, 23 nt, Human
ccucugcacuccccugcugggug

SEQ ID NO: 3022448 - RNA, 14 nt, Human
ccucugcagcaaua

SEQ ID NO: 3022449 - RNA, 18 nt, Human
ccucugcagcaauaaagc

SEQ ID NO: 3022450 - RNA, 16 nt, Human
ccucugcccacucccu

SEQ ID NO: 3022451 - RNA, 13 nt, Human
ccucugcccacuc

SEQ ID NO: 3022452 - RNA, 19 nt, Human
ccucugcagcaauaaagca

SEQ ID NO: 3022453 - RNA, 18 nt, Human
ccucgguguggagaagcg

SEQ ID NO: 3022454 - RNA, 21 nt, Human
ccuccuccagccgccaugcuc

SEQ ID NO: 3022455 - RNA, 15 nt, Human
ccucuccccagcaag

SEQ ID NO: 3022456 - RNA, 22 nt, Human
ccucucccuuggauuguccccg

SEQ ID NO: 3022457 - RNA, 13 nt, Human
ccucucccuugga

SEQ ID NO: 3022458 - RNA, 20 nt, Human
ccucuccccagcaagugaga

SEQ ID NO: 3022459 - RNA, 20 nt, Human
ccucagaugcacaugagcug

SEQ ID NO: 3022460 - RNA, 16 nt, Human
ccucagaucuucugug

SEQ ID NO: 3022461 - RNA, 23 nt, Human
ccucaggccugggggcugggcag

SEQ ID NO: 3022462 - RNA, 20 nt, Human
ccucagggucccugguggca

SEQ ID NO: 3022463 - RNA, 17 nt, Human
ccucagggucccuggug

SEQ ID NO: 3022464 - RNA, 16 nt, Human
ccucagggucccuggu

SEQ ID NO: 3022465 - RNA, 15 nt, Human
ccuaggugacagagu

SEQ ID NO: 3022466 - RNA, 23 nt, Human
ccucacaguccuuaccagcagag

SEQ ID NO: 3022467 - RNA, 24 nt, Human
ccucacaguccuuaccagcagagc

SEQ ID NO: 3022468 - RNA, 16 nt, Human
ccuauuagagaagaga

SEQ ID NO: 3022469 - RNA, 17 nt, Human
ccuauuagagaagagau

SEQ ID NO: 3022470 - RNA, 15 nt, Human
cccuuggacauuuua

SEQ ID NO: 3022471 - RNA, 14 nt, Human
cccuuggacauuuu

SEQ ID NO: 3022472 - RNA, 17 nt, Human
cccuuggauuguccccg

SEQ ID NO: 3022473 - RNA, 20 nt, Human
cccuuguggucccaccccac

SEQ ID NO: 3022474 - RNA, 22 nt, Human
cccuuguggucccaccccacac

SEQ ID NO: 3022475 - RNA, 23 nt, Human
cccuugguuaggcauugugggaa

SEQ ID NO: 3022476 - RNA, 22 nt, Human
cccuugguuaggcauuguggga

SEQ ID NO: 3022477 - RNA, 12 nt, Human
cccuucccaccu

SEQ ID NO: 3022478 - RNA, 13 nt, Human
cccuucccaccuc

SEQ ID NO: 3022479 - RNA, 17 nt, Human
ccgggaagggggcuggg

SEQ ID NO: 3022480 - RNA, 21 nt, Human
ccuagaaauuccccacccuga

SEQ ID NO: 3022481 - RNA, 13 nt, Human
ccuaggugacaga

SEQ ID NO: 3022482 - RNA, 13 nt, Human
ccuacccacccuc

SEQ ID NO: 3022483 - RNA, 18 nt, Human
ccuacccacccuccuuuc

SEQ ID NO: 3022484 - RNA, 19 nt, Human
ccuacuguaauuugugaua

SEQ ID NO: 3022485 - RNA, 22 nt, Human
ccuacaguugaaaaacagcuga

SEQ ID NO: 3022486 - RNA, 19 nt, Human
ccuacagcuugaccgugag

SEQ ID NO: 3022487 - RNA, 16 nt, Human
ccuaaaauucagugga

SEQ ID NO: 3022488 - RNA, 15 nt, Human
ccuaaaauucagugg

SEQ ID NO: 3022489 - RNA, 12 nt, Human
ccguuauuaaaa

SEQ ID NO: 3022490 - RNA, 16 nt, Human
cccaguguuuuaggag

SEQ ID NO: 3022491 - RNA, 17 nt, Human
cccaguguuuuaggagc

SEQ ID NO: 3022492 - RNA, 14 nt, Human
cccaguuagcucuc

SEQ ID NO: 3022493 - RNA, 20 nt, Human
cccagugguuccuaauccuc

SEQ ID NO: 3022494 - RNA, 15 nt, Human
cccagugccgagaag

SEQ ID NO: 3022495 - RNA, 21 nt, Human
cccagugcccacaggaucagu

SEQ ID NO: 3022496 - RNA, 10 nt, Human
cccagucugg

SEQ ID NO: 3022497 - RNA, 18 nt, Human
cccagucuggaaugcagu

SEQ ID NO: 3022498 - RNA, 19 nt, Human
cccagucuggaaugcagug

SEQ ID NO: 3022499 - RNA, 17 nt, Human
cccaggcauuccccagg

SEQ ID NO: 3022500 - RNA, 23 nt, Human
cccaggcaggucuugaacuccug

SEQ ID NO: 3022501 - RNA, 15 nt, Human
cccaggcauucccca

SEQ ID NO: 3022502 - RNA, 16 nt, Human
cccaggaggccagccu

SEQ ID NO: 3022503 - RNA, 15 nt, Human
cccaggaggccagcc

SEQ ID NO: 3022504 - RNA, 13 nt, Human
cccagguuucuau

SEQ ID NO: 3022505 - RNA, 21 nt, Human
ccccaaauggaaaugggcaga

SEQ ID NO: 3022506 - RNA, 20 nt, Human
cccaucugugaaaggaaaga

SEQ ID NO: 3022507 - RNA, 13 nt, Human
cccaucucacaca

SEQ ID NO: 3022508 - RNA, 18 nt, Human
cccaucucacacaugagc

SEQ ID NO: 3022509 - RNA, 12 nt, Human
cccaucugugaa

SEQ ID NO: 3022510 - RNA, 14 nt, Human
cccaugcugcccug

SEQ ID NO: 3022511 - RNA, 13 nt, Human
cccaugcugcccu

SEQ ID NO: 3022512 - RNA, 12 nt, Human
cccaugcugccc

SEQ ID NO: 3022513 - RNA, 20 nt, Human
cccaugagccucagcauccu

SEQ ID NO: 3022514 - RNA, 15 nt, Human
cccaugagccucagc

SEQ ID NO: 3022515 - RNA, 16 nt, Human
cccaugagccucagca

SEQ ID NO: 3022516 - RNA, 13 nt, Human
cccaggagccccg

SEQ ID NO: 3022517 - RNA, 14 nt, Human
cccaggagccccga

SEQ ID NO: 3022518 - RNA, 14 nt, Human
cccaggaggccagc

SEQ ID NO: 3022519 - RNA, 14 nt, Human
cccagcgagcccug

SEQ ID NO: 3022520 - RNA, 18 nt, Human
cccagcucugguccauag

SEQ ID NO: 3022521 - RNA, 16 nt, Human
cccagcucugguccau

SEQ ID NO: 3022522 - RNA, 15 nt, Human
cccagcucuggucca

SEQ ID NO: 3022523 - RNA, 12 nt, Human
cccagcucuggu

SEQ ID NO: 3022524 - RNA, 14 nt, Human
cccagcucuggucc

SEQ ID NO: 3022525 - RNA, 13 nt, Human
cccagcucugguc

SEQ ID NO: 3022526 - RNA, 15 nt, Human
cccagccccauccuc

SEQ ID NO: 3022527 - RNA, 14 nt, Human
cccagccccauccu

SEQ ID NO: 3022528 - RNA, 14 nt, Human
cccagccccauccc

SEQ ID NO: 3022529 - RNA, 13 nt, Human
cccagccccaucc

SEQ ID NO: 3022530 - RNA, 18 nt, Human
cccagccccuucugaccc

SEQ ID NO: 3022531 - RNA, 19 nt, Human
cccagccccauccucugua

SEQ ID NO: 3022532 - RNA, 18 nt, Human
cccagccccauccucugu

SEQ ID NO: 3022533 - RNA, 13 nt, Human
cccagccccaaug

SEQ ID NO: 3022534 - RNA, 12 nt, Human
cccagccccauc

SEQ ID NO: 3022535 - RNA, 11 nt, Human
cccagccccau

SEQ ID NO: 3022536 - RNA, 17 nt, Human
cccagccccaaugaaca

SEQ ID NO: 3022537 - RNA, 23 nt, Human
cccagauugcaacaggcugggcu

SEQ ID NO: 3022538 - RNA, 18 nt, Human
cccaggaggccagccuug

SEQ ID NO: 3022539 - RNA, 19 nt, Human
ccauguuggccaggcuggu

SEQ ID NO: 3022540 - RNA, 21 nt, Human
ccauguuggccaggcuggucu

SEQ ID NO: 3022541 - RNA, 18 nt, Human
ccauguuggccaggcugg

SEQ ID NO: 3022542 - RNA, 15 nt, Human
ccauguuggccaggc

SEQ ID NO: 3022543 - RNA, 15 nt, Human
cccaccuggccucug

SEQ ID NO: 3022544 - RNA, 12 nt, Human
cccaccuggccu

SEQ ID NO: 3022545 - RNA, 16 nt, Human
cccaccuuggcugcag

SEQ ID NO: 3022546 - RNA, 17 nt, Human
cccaccuuggcugcagg

SEQ ID NO: 3022547 - RNA, 19 nt, Human
cccaccuuggcugcaggga

SEQ ID NO: 3022548 - RNA, 14 nt, Human
cccacgcccccacu

SEQ ID NO: 3022549 - RNA, 13 nt, Human
cccacgcccccac

SEQ ID NO: 3022550 - RNA, 15 nt, Human
ccaugcugcccugug

SEQ ID NO: 3022551 - RNA, 18 nt, Human
ccaugcuccuggcccacu

SEQ ID NO: 3022552 - RNA, 15 nt, Human
ccaugcuccuggccc

SEQ ID NO: 3022553 - RNA, 17 nt, Human
ccaugcugcccugugag

SEQ ID NO: 3022554 - RNA, 16 nt, Human
ccaugcugcccuguga

SEQ ID NO: 3022555 - RNA, 13 nt, Human
ccaugcuccuggc

SEQ ID NO: 3022556 - RNA, 13 nt, Human
ccauguuggccag

SEQ ID NO: 3022557 - RNA, 14 nt, Human
ccauguuggccagg

SEQ ID NO: 3022558 - RNA, 13 nt, Human
ccaugugccaggu

SEQ ID NO: 3022559 - RNA, 14 nt, Human
ccaucaugucuggc

SEQ ID NO: 3022560 - RNA, 16 nt, Human
ccaucaugucuggcua

SEQ ID NO: 3022561 - RNA, 21 nt, Human
ccauccucuguacagagccca

SEQ ID NO: 3022562 - RNA, 23 nt, Human
ccauagagagcaagacgcugugc

SEQ ID NO: 3022563 - RNA, 19 nt, Human
ccauauuaccacagacaua

SEQ ID NO: 3022564 - RNA, 15 nt, Human
ccauauucuguuggc

SEQ ID NO: 3022565 - RNA, 18 nt, Human
ccauauucuguuggccag

SEQ ID NO: 3022566 - RNA, 12 nt, Human
ccaucacccgcu

SEQ ID NO: 3022567 - RNA, 23 nt, Human
ccagggacagaggggguggccuc

SEQ ID NO: 3022568 - RNA, 19 nt, Human
ccaggccccugccacccug

SEQ ID NO: 3022569 - RNA, 21 nt, Human
ccaggccccugccacccuggg

SEQ ID NO: 3022570 - RNA, 23 nt, Human
ccaggccccugccacccugggga

SEQ ID NO: 3022571 - RNA, 14 nt, Human
ccaggccagaggga

SEQ ID NO: 3022572 - RNA, 21 nt, Human
ccaggccagagggagugacag

SEQ ID NO: 3022573 - RNA, 14 nt, Human
ccaggagcagccac

SEQ ID NO: 3022574 - RNA, 12 nt, Human
ccaggccagagg

SEQ ID NO: 3022575 - RNA, 19 nt, Human
ccaggccuccuacagcuug

SEQ ID NO: 3022576 - RNA, 18 nt, Human
ccaggccuccuacagcuu

SEQ ID NO: 3022577 - RNA, 13 nt, Human
ccaggccuccuac

SEQ ID NO: 3022578 - RNA, 19 nt, Human
ccaggcccucugcccacuc

SEQ ID NO: 3022579 - RNA, 18 nt, Human
ccaggcccucugcccacu

SEQ ID NO: 3022580 - RNA, 17 nt, Human
ccaggcccucugcccac

SEQ ID NO: 3022581 - RNA, 16 nt, Human
ccaggcccucugccca

SEQ ID NO: 3022582 - RNA, 22 nt, Human
ccagcugugcucuggacaggca

SEQ ID NO: 3022583 - RNA, 23 nt, Human
ccagcugugcucuggacaggcau

SEQ ID NO: 3022584 - RNA, 19 nt, Human
ccaggaagccagcaggcuc

SEQ ID NO: 3022585 - RNA, 17 nt, Human
ccaggaagccagcaggc

SEQ ID NO: 3022586 - RNA, 15 nt, Human
ccaggaagccagcag

SEQ ID NO: 3022587 - RNA, 14 nt, Human
ccaggaagccagca

SEQ ID NO: 3022588 - RNA, 13 nt, Human
ccaggagcagcca

SEQ ID NO: 3022589 - RNA, 12 nt, Human
ccaggagcagcc

SEQ ID NO: 3022590 - RNA, 18 nt, Human
ccagcugugcucuggaca

SEQ ID NO: 3022591 - RNA, 20 nt, Human
ccagcugugcucuggacagg

SEQ ID NO: 3022592 - RNA, 21 nt, Human
ccagcugugcucuggacaggc

SEQ ID NO: 3022593 - RNA, 15 nt, Human
ccagcugcuugggcu

SEQ ID NO: 3022594 - RNA, 13 nt, Human
ccagcugcuuggg

SEQ ID NO: 3022595 - RNA, 18 nt, Human
ccagcugcuugggcuuca

SEQ ID NO: 3022596 - RNA, 16 nt, Human
ccagcugcuugggcuu

SEQ ID NO: 3022597 - RNA, 22 nt, Human
cauugacuauuuuuguuuuuau

SEQ ID NO: 3022598 - RNA, 22 nt, Human
cauugaccugaggcccuucucu

SEQ ID NO: 3022599 - RNA, 13 nt, Human
cauugaccugagg

SEQ ID NO: 3022600 - RNA, 14 nt, Human
cauugacagauuga

SEQ ID NO: 3022601 - RNA, 19 nt, Human
cauugaaaucuuuuugcuu

SEQ ID NO: 3022602 - RNA, 16 nt, Human
cauuucucauguugaa

SEQ ID NO: 3022603 - RNA, 17 nt, Human
cauuucucauguugaaa

SEQ ID NO: 3022604 - RNA, 21 nt, Human
cauuucuuccacaagagccca

SEQ ID NO: 3022605 - RNA, 21 nt, Human
cauuuaaaagauacaguuacu

SEQ ID NO: 3022606 - RNA, 17 nt, Human
cauuuacuuuguguuca

SEQ ID NO: 3022607 - RNA, 21 nt, Human
cauuuacuuuguguucaccuu

SEQ ID NO: 3022608 - RNA, 17 nt, Human
cauuugaggucuguucu

SEQ ID NO: 3022609 - RNA, 18 nt, Human
cauuugaggucuguucuu

SEQ ID NO: 3022610 - RNA, 19 nt, Human
cauuugaggucuguucuuu

SEQ ID NO: 3022611 - RNA, 14 nt, Human
cauuugagcagggc

SEQ ID NO: 3022612 - RNA, 23 nt, Human
cauuucuuccacaagagcccagg

SEQ ID NO: 3022613 - RNA, 20 nt, Human
cauuuugggguacccacugc

SEQ ID NO: 3022614 - RNA, 21 nt, Human
cauuuugggguacccacugcu

SEQ ID NO: 3022615 - RNA, 22 nt, Human
cauuuugggguacccacugcuc

SEQ ID NO: 3022616 - RNA, 24 nt, Human
cauuuugcuaaaugugaaugauga

SEQ ID NO: 3022617 - RNA, 21 nt, Human
cauuuugcuaaaugugaauga

SEQ ID NO: 3022618 - RNA, 18 nt, Human
cauuuugcuaaaugugaa

SEQ ID NO: 3022619 - RNA, 23 nt, Human
cauuuugggguacccacugcucu

SEQ ID NO: 3022620 - RNA, 19 nt, Human
cauuuuuaguagagacagg

SEQ ID NO: 3022621 - RNA, 18 nt, Human
cauuuuuaguagagacag

SEQ ID NO: 3022622 - RNA, 15 nt, Human
cauuuuuaagugcug

SEQ ID NO: 3022623 - RNA, 20 nt, Human
cauuuuuaagugcugcauuu

SEQ ID NO: 3022624 - RNA, 19 nt, Human
cauuuuauuuuauuaugca

SEQ ID NO: 3022625 - RNA, 21 nt, Human
cauuuuauuuuauuaugcaug

SEQ ID NO: 3022626 - RNA, 20 nt, Human
cauuuuuaguagagacaggg

SEQ ID NO: 3022627 - RNA, 18 nt, Human
ccaaaauaaaacuuuuua

SEQ ID NO: 3022628 - RNA, 21 nt, Human
ccaaaauaaaacuuuuuaaaa

SEQ ID NO: 3022629 - RNA, 16 nt, Human
ccaaacccuucagugc

SEQ ID NO: 3022630 - RNA, 20 nt, Human
ccaauuugcacauuaaauga

SEQ ID NO: 3022631 - RNA, 19 nt, Human
ccaauuugcacauuaaaug

SEQ ID NO: 3022632 - RNA, 18 nt, Human
ccacaaaggagagcuagc

SEQ ID NO: 3022633 - RNA, 13 nt, Human
ccacaagagccca

SEQ ID NO: 3022634 - RNA, 16 nt, Human
ccacaagacccuugug

SEQ ID NO: 3022635 - RNA, 18 nt, Human
ccaaggugggaggauugc

SEQ ID NO: 3022636 - RNA, 14 nt, Human
ccaaggcuggggga

SEQ ID NO: 3022637 - RNA, 14 nt, Human
ccaagcaggacaug

SEQ ID NO: 3022638 - RNA, 23 nt, Human
ccaagcagagguugggaggccau

SEQ ID NO: 3022639 - RNA, 13 nt, Human
ccaagcucccagg

SEQ ID NO: 3022640 - RNA, 12 nt, Human
ccaagcucccag

SEQ ID NO: 3022641 - RNA, 15 nt, Human
ccacaaguuaaauaa

SEQ ID NO: 3022642 - RNA, 20 nt, Human
ccacaaguuaaauaaaucau

SEQ ID NO: 3022643 - RNA, 21 nt, Human
ccacaagagcccaggccuccu

SEQ ID NO: 3022644 - RNA, 20 nt, Human
ccacaagagcccaggccucc

SEQ ID NO: 3022645 - RNA, 19 nt, Human
ccacaagagcccaggccuc

SEQ ID NO: 3022646 - RNA, 18 nt, Human
ccacaagagcccaggccu

SEQ ID NO: 3022647 - RNA, 17 nt, Human
ccacaagagcccaggcc

SEQ ID NO: 3022648 - RNA, 16 nt, Human
ccacaagagcccaggc

SEQ ID NO: 3022649 - RNA, 13 nt, Human
ccaacaucaacau

SEQ ID NO: 3022650 - RNA, 14 nt, Human
ccaacauacuccca

SEQ ID NO: 3022651 - RNA, 16 nt, Human
ccaacaucaacaucuu

SEQ ID NO: 3022652 - RNA, 15 nt, Human
ccaaauucuuucagu

SEQ ID NO: 3022653 - RNA, 22 nt, Human
ccaaauucuuucaguggcuacc

SEQ ID NO: 3022654 - RNA, 15 nt, Human
ccaagaccuucuccu

SEQ ID NO: 3022655 - RNA, 15 nt, Human
ccaacccucaucacc

SEQ ID NO: 3022656 - RNA, 13 nt, Human
ccaacccucauca

SEQ ID NO: 3022657 - RNA, 13 nt, Human
ccaaagaugcagc

SEQ ID NO: 3022658 - RNA, 14 nt, Human
ccaaagaugcagcc

SEQ ID NO: 3022659 - RNA, 17 nt, Human
cauuaaagguacuuugc

SEQ ID NO: 3022660 - RNA, 18 nt, Human
cauuaaaugacucuuccc

SEQ ID NO: 3022661 - RNA, 14 nt, Human
cauuaaaugacucu

SEQ ID NO: 3022662 - RNA, 13 nt, Human
cauuaaaugacuc

SEQ ID NO: 3022663 - RNA, 21 nt, Human
cauuaaagccugaguuugcuu

SEQ ID NO: 3022664 - RNA, 15 nt, Human
cauguuuuguuuacg

SEQ ID NO: 3022665 - RNA, 18 nt, Human
cauguuuuucuucucccu

SEQ ID NO: 3022666 - RNA, 15 nt, Human
cauguuugugauuga

SEQ ID NO: 3022667 - RNA, 23 nt, Human
cauguuugauguaucugagcagg

SEQ ID NO: 3022668 - RNA, 21 nt, Human
caugugccagguuuuuggucu

SEQ ID NO: 3022669 - RNA, 15 nt, Human
caugugcacaugcac

SEQ ID NO: 3022670 - RNA, 16 nt, Human
cauggucggaaaacau

SEQ ID NO: 3022671 - RNA, 18 nt, Human
cauguaauuaaguacuau

SEQ ID NO: 3022672 - RNA, 21 nt, Human
cauguaauuaaguacuaugua

SEQ ID NO: 3022673 - RNA, 23 nt, Human
caugucuuuucuugcaugaggcu

SEQ ID NO: 3022674 - RNA, 21 nt, Human
caugucuuuucuugcaugagg

SEQ ID NO: 3022675 - RNA, 19 nt, Human
caugucuuuucuugcauga

SEQ ID NO: 3022676 - RNA, 14 nt, Human
caugucuuuucuug

SEQ ID NO: 3022677 - RNA, 17 nt, Human
caugccuaccaauauuu

SEQ ID NO: 3022678 - RNA, 15 nt, Human
caugccucucucagg

SEQ ID NO: 3022679 - RNA, 14 nt, Human
caugccucucucag

SEQ ID NO: 3022680 - RNA, 13 nt, Human
caugccuggaugg

SEQ ID NO: 3022681 - RNA, 19 nt, Human
caugccucucucaggccaa

SEQ ID NO: 3022682 - RNA, 18 nt, Human
caugccucucucaggcca

SEQ ID NO: 3022683 - RNA, 17 nt, Human
caugccucucucaggcc

SEQ ID NO: 3022684 - RNA, 16 nt, Human
caugccucucucaggc

SEQ ID NO: 3022685 - RNA, 22 nt, Human
cauggaaguacuauaauuuacc

SEQ ID NO: 3022686 - RNA, 20 nt, Human
cauggaaguacuauaauuua

SEQ ID NO: 3022687 - RNA, 16 nt, Human
cauggaauaacaugua

SEQ ID NO: 3022688 - RNA, 18 nt, Human
cauggacaugaucuucuu

SEQ ID NO: 3022689 - RNA, 23 nt, Human
caugccuggauggggcugcaccg

SEQ ID NO: 3022690 - RNA, 21 nt, Human
caugccuggauggggcugcac

SEQ ID NO: 3022691 - RNA, 18 nt, Human
caugccuggauggggcug

SEQ ID NO: 3022692 - RNA, 17 nt, Human
caugcgggcuuccuccu

SEQ ID NO: 3022693 - RNA, 22 nt, Human
caugcugucccuuacgugaguc

SEQ ID NO: 3022694 - RNA, 17 nt, Human
caugcugucccuuacgu

SEQ ID NO: 3022695 - RNA, 18 nt, Human
caugggaaugaaugucag

SEQ ID NO: 3022696 - RNA, 16 nt, Human
cauggaguauauguca

SEQ ID NO: 3022697 - RNA, 17 nt, Human
cauggagguuugaagau

SEQ ID NO: 3022698 - RNA, 13 nt, Human
cauggacuuuguu

SEQ ID NO: 3022699 - RNA, 11 nt, Human
cauggacuuug

SEQ ID NO: 3022700 - RNA, 16 nt, Human
caugggccuccugugu

SEQ ID NO: 3022701 - RNA, 17 nt, Human
caugggccuccugugug

SEQ ID NO: 3022702 - RNA, 15 nt, Human
caugggccuccugug

SEQ ID NO: 3022703 - RNA, 22 nt, Human
caugggaaugaaugucagugug

SEQ ID NO: 3022704 - RNA, 20 nt, Human
caugccagcuuaucucaggg

SEQ ID NO: 3022705 - RNA, 19 nt, Human
caugccagcuuaucucagg

SEQ ID NO: 3022706 - RNA, 13 nt, Human
caugccccugaac

SEQ ID NO: 3022707 - RNA, 18 nt, Human
cauacuuuuuggguuuau

SEQ ID NO: 3022708 - RNA, 16 nt, Human
cauacuuuuuggguuu

SEQ ID NO: 3022709 - RNA, 12 nt, Human
cauacuuuuugg

SEQ ID NO: 3022710 - RNA, 21 nt, Human
cauagagagcaagacgcugug

SEQ ID NO: 3022711 - RNA, 19 nt, Human
cauagagagcaagacgcug

SEQ ID NO: 3022712 - RNA, 23 nt, Human
cauagagagcaagacgcugugcu

SEQ ID NO: 3022713 - RNA, 18 nt, Human
cauacuauuaaacaugcu

SEQ ID NO: 3022714 - RNA, 11 nt, Human
cauacucugcu

SEQ ID NO: 3022715 - RNA, 20 nt, Human
cauacucccaucugugaaag

SEQ ID NO: 3022716 - RNA, 18 nt, Human
cauacucccaucugugaa

SEQ ID NO: 3022717 - RNA, 15 nt, Human
cauacucccaucugu

SEQ ID NO: 3022718 - RNA, 16 nt, Human
cauacucccaucugug

SEQ ID NO: 3022719 - RNA, 17 nt, Human
cauaguaugguggcugg

SEQ ID NO: 3022720 - RNA, 20 nt, Human
cauaguaugguggcuggguu

SEQ ID NO: 3022721 - RNA, 18 nt, Human
cauaguaugguggcuggg

SEQ ID NO: 3022722 - RNA, 19 nt, Human
cauaguaugguggcugggu

SEQ ID NO: 3022723 - RNA, 22 nt, Human
cauaguggcuuaaaacaacacu

SEQ ID NO: 3022724 - RNA, 22 nt, Human
cauauauauguuuuaagaggca

SEQ ID NO: 3022725 - RNA, 14 nt, Human
cauauuuacuucuu

SEQ ID NO: 3022726 - RNA, 20 nt, Human
cauauuuacuucuuauacau

SEQ ID NO: 3022727 - RNA, 16 nt, Human
cauauuuacuucuuau

SEQ ID NO: 3022728 - RNA, 17 nt, Human
cauauuuacuucuuaua

SEQ ID NO: 3022729 - RNA, 14 nt, Human
caucaagaugugac

SEQ ID NO: 3022730 - RNA, 14 nt, Human
caucauuucaagaa

SEQ ID NO: 3022731 - RNA, 12 nt, Human
caucauuucaag

SEQ ID NO: 3022732 - RNA, 15 nt, Human
caucaccaacgucug

SEQ ID NO: 3022733 - RNA, 13 nt, Human
caucauugaaauc

SEQ ID NO: 3022734 - RNA, 21 nt, Human
caucauugaaaucuuuuugcu

SEQ ID NO: 3022735 - RNA, 20 nt, Human
caucauugaaaucuuuuugc

SEQ ID NO: 3022736 - RNA, 15 nt, Human
caucauugaaaucuu

SEQ ID NO: 3022737 - RNA, 14 nt, Human
caucauugaaaucu

SEQ ID NO: 3022738 - RNA, 15 nt, Human
cauccagguucagcu

SEQ ID NO: 3022739 - RNA, 19 nt, Human
caucccucuggggcuguuc

SEQ ID NO: 3022740 - RNA, 13 nt, Human
caucccugaaggc

SEQ ID NO: 3022741 - RNA, 11 nt, Human
caucccugaag

SEQ ID NO: 3022742 - RNA, 21 nt, Human
caucccugaaggccccgccca

SEQ ID NO: 3022743 - RNA, 19 nt, Human
caucccugaaggccccgcc

SEQ ID NO: 3022744 - RNA, 18 nt, Human
caucccugaaggccccgc

SEQ ID NO: 3022745 - RNA, 17 nt, Human
caucccugaaggccccg

SEQ ID NO: 3022746 - RNA, 15 nt, Human
caucuacccuccgau

SEQ ID NO: 3022747 - RNA, 19 nt, Human
cauccucuguacagagccc

SEQ ID NO: 3022748 - RNA, 18 nt, Human
cauccucuguacagagcc

SEQ ID NO: 3022749 - RNA, 15 nt, Human
cauccucuguacaga

SEQ ID NO: 3022750 - RNA, 20 nt, Human
caucucacacaugagcauca

SEQ ID NO: 3022751 - RNA, 17 nt, Human
caucucacacaugagca

SEQ ID NO: 3022752 - RNA, 16 nt, Human
caucucacacaugagc

SEQ ID NO: 3022753 - RNA, 16 nt, Human
cauccucauacccacc

SEQ ID NO: 3022754 - RNA, 15 nt, Human
cauccucauacccac

SEQ ID NO: 3022755 - RNA, 12 nt, Human
cauccuccucag

SEQ ID NO: 3022756 - RNA, 11 nt, Human
cauccuccuca

SEQ ID NO: 3022757 - RNA, 19 nt, Human
cauccuccucagaucuucu

SEQ ID NO: 3022758 - RNA, 18 nt, Human
cauccuccucagaucuuc

SEQ ID NO: 3022759 - RNA, 16 nt, Human
cauccuccucagaucu

SEQ ID NO: 3022760 - RNA, 15 nt, Human
cauccuccucagauc

SEQ ID NO: 3022761 - RNA, 13 nt, Human
cauccucccaagg

SEQ ID NO: 3022762 - RNA, 22 nt, Human
cauccucauacccacccccacc

SEQ ID NO: 3022763 - RNA, 21 nt, Human
cauccucauacccacccccac

SEQ ID NO: 3022764 - RNA, 18 nt, Human
cauccucauacccacccc

SEQ ID NO: 3022765 - RNA, 17 nt, Human
cauccucauacccaccc

SEQ ID NO: 3022766 - RNA, 20 nt, Human
caucuugcucugcugacaga

SEQ ID NO: 3022767 - RNA, 14 nt, Human
caucuugcucugcu

SEQ ID NO: 3022768 - RNA, 13 nt, Human
caucuugcucugc

SEQ ID NO: 3022769 - RNA, 22 nt, Human
caucuuccaaggguacuaagga

SEQ ID NO: 3022770 - RNA, 14 nt, Human
cauacuauuaaaca

SEQ ID NO: 3022771 - RNA, 21 nt, Human
cauacccacccccacccaagg

SEQ ID NO: 3022772 - RNA, 18 nt, Human
cauacccacccccaccca

SEQ ID NO: 3022773 - RNA, 17 nt, Human
cauacccacccccaccc

SEQ ID NO: 3022774 - RNA, 14 nt, Human
cauacccaccccca

SEQ ID NO: 3022775 - RNA, 13 nt, Human
cauacguacacau

SEQ ID NO: 3022776 - RNA, 15 nt, Human
cauacguacacauuu

SEQ ID NO: 3022777 - RNA, 16 nt, Human
cauacguacacauuuu

SEQ ID NO: 3022778 - RNA, 17 nt, Human
cauacguacacauuuua

SEQ ID NO: 3022779 - RNA, 18 nt, Human
cauacguacacauuuuau

SEQ ID NO: 3022780 - RNA, 14 nt, Human
cauacuaaccagca

SEQ ID NO: 3022781 - RNA, 21 nt, Human
cauacuaaccagcagaaaugc

SEQ ID NO: 3022782 - RNA, 18 nt, Human
caguuggguuuuuuaagg

SEQ ID NO: 3022783 - RNA, 16 nt, Human
caguuggguuuuuuaa

SEQ ID NO: 3022784 - RNA, 11 nt, Human
caguuggguuu

SEQ ID NO: 3022785 - RNA, 18 nt, Human
caguuggucccccuucca

SEQ ID NO: 3022786 - RNA, 18 nt, Human
caguuggguggaugccug

SEQ ID NO: 3022787 - RNA, 19 nt, Human
caguuggguggaugccugg

SEQ ID NO: 3022788 - RNA, 22 nt, Human
caguuggucccccuuccaugga

SEQ ID NO: 3022789 - RNA, 21 nt, Human
caguuggucccccuuccaugg

SEQ ID NO: 3022790 - RNA, 20 nt, Human
caguuggucccccuuccaug

SEQ ID NO: 3022791 - RNA, 19 nt, Human
caguuggucccccuuccau

SEQ ID NO: 3022792 - RNA, 16 nt, Human
caguuggguggaugcc

SEQ ID NO: 3022793 - RNA, 23 nt, Human
caguugccagucaccccggccac

SEQ ID NO: 3022794 - RNA, 19 nt, Human
caguuuuuuuccuucaaga

SEQ ID NO: 3022795 - RNA, 17 nt, Human
caguuguuagugugucu

SEQ ID NO: 3022796 - RNA, 22 nt, Human
cauaagugcuauugcagagccg

SEQ ID NO: 3022797 - RNA, 18 nt, Human
cauaagugcuauugcaga

SEQ ID NO: 3022798 - RNA, 14 nt, Human
cauaagauaaaugu

SEQ ID NO: 3022799 - RNA, 19 nt, Human
cauaccacuuuuguucuug

SEQ ID NO: 3022800 - RNA, 12 nt, Human
cauacccacccc

SEQ ID NO: 3022801 - RNA, 11 nt, Human
cauacccaccc

SEQ ID NO: 3022802 - RNA, 13 nt, Human
cauaccacuuuug

SEQ ID NO: 3022803 - RNA, 14 nt, Human
cauaccacuuuugu

SEQ ID NO: 3022804 - RNA, 15 nt, Human
cauaccacuuuuguu

SEQ ID NO: 3022805 - RNA, 18 nt, Human
cauaccacuuuuguucuu

SEQ ID NO: 3022806 - RNA, 16 nt, Human
cauaaccuagccuuag

SEQ ID NO: 3022807 - RNA, 21 nt, Human
cauaaaaauuagccaagugug

SEQ ID NO: 3022808 - RNA, 22 nt, Human
cauaaacaagaccacguuucua

SEQ ID NO: 3022809 - RNA, 20 nt, Human
cauaaacaagaccacguuuc

SEQ ID NO: 3022810 - RNA, 21 nt, Human
cauaaacaagaccacguuucu

SEQ ID NO: 3022811 - RNA, 20 nt, Human
caguguuuuaggagcaugag

SEQ ID NO: 3022812 - RNA, 16 nt, Human
caguguuuuaggagca

SEQ ID NO: 3022813 - RNA, 19 nt, Human
caguguuguggauuuaaca

SEQ ID NO: 3022814 - RNA, 20 nt, Human
caguguuguggauuuaacag

SEQ ID NO: 3022815 - RNA, 22 nt, Human
caguguuguggauuuaacagaa

SEQ ID NO: 3022816 - RNA, 14 nt, Human
caguuaagagaaau

SEQ ID NO: 3022817 - RNA, 13 nt, Human
caguuaagagaaa

SEQ ID NO: 3022818 - RNA, 14 nt, Human
caguuacucagaau

SEQ ID NO: 3022819 - RNA, 19 nt, Human
caguugaaaaacagcugag

SEQ ID NO: 3022820 - RNA, 18 nt, Human
caguugaaaaacagcuga

SEQ ID NO: 3022821 - RNA, 12 nt, Human
caguugaaaaac

SEQ ID NO: 3022822 - RNA, 13 nt, Human
caguucucuccuu

SEQ ID NO: 3022823 - RNA, 15 nt, Human
caguucucuccuucu

SEQ ID NO: 3022824 - RNA, 14 nt, Human
caguucucuccuuc

SEQ ID NO: 3022825 - RNA, 22 nt, Human
caguucucuccuucuucccccc

SEQ ID NO: 3022826 - RNA, 13 nt, Human
cagugcuuggccc

SEQ ID NO: 3022827 - RNA, 14 nt, Human
cagugcuuggccca

SEQ ID NO: 3022828 - RNA, 15 nt, Human
cagugcuuggcccag

SEQ ID NO: 3022829 - RNA, 16 nt, Human
cagugcuuggcccagg

SEQ ID NO: 3022830 - RNA, 12 nt, Human
cagugcuuggcc

SEQ ID NO: 3022831 - RNA, 17 nt, Human
cagugcuuggcccagga

SEQ ID NO: 3022832 - RNA, 18 nt, Human
cagugcuuggcccaggag

SEQ ID NO: 3022833 - RNA, 19 nt, Human
cagugcuuggcccaggagu

SEQ ID NO: 3022834 - RNA, 20 nt, Human
cagugcuuggcccaggaguu

SEQ ID NO: 3022835 - RNA, 12 nt, Human
caguggcagcug

SEQ ID NO: 3022836 - RNA, 13 nt, Human
caguggcagcugc

SEQ ID NO: 3022837 - RNA, 14 nt, Human
caguggcagcugcu

SEQ ID NO: 3022838 - RNA, 15 nt, Human
caguggcagcugcuu

SEQ ID NO: 3022839 - RNA, 16 nt, Human
caguggcagcugcuuu

SEQ ID NO: 3022840 - RNA, 22 nt, Human
cagugguuccuaauccucuagg

SEQ ID NO: 3022841 - RNA, 17 nt, Human
caguguguggucaacau

SEQ ID NO: 3022842 - RNA, 21 nt, Human
caguguguggucaacauuucu

SEQ ID NO: 3022843 - RNA, 14 nt, Human
cagugugacaagga

SEQ ID NO: 3022844 - RNA, 12 nt, Human
cagugugacuga

SEQ ID NO: 3022845 - RNA, 16 nt, Human
caguguacauggaaua

SEQ ID NO: 3022846 - RNA, 20 nt, Human
caguguacauggaauaacau

SEQ ID NO: 3022847 - RNA, 23 nt, Human
caguguacauggaauaacaugua

SEQ ID NO: 3022848 - RNA, 21 nt, Human
cugacacaugcugaacaucac

SEQ ID NO: 3022849 - RNA, 13 nt, Human
cugacacacagcu

SEQ ID NO: 3022850 - RNA, 15 nt, Human
cugacacacagcucu

SEQ ID NO: 3022851 - RNA, 16 nt, Human
cugacacacagcucug

SEQ ID NO: 3022852 - RNA, 17 nt, Human
cugacacacagcucugu

SEQ ID NO: 3022853 - RNA, 18 nt, Human
cugacacacagcucuguc

SEQ ID NO: 3022854 - RNA, 19 nt, Human
cugacacacagcucugucc

SEQ ID NO: 3022855 - RNA, 20 nt, Human
cugacacacagcucuguccu

SEQ ID NO: 3022856 - RNA, 21 nt, Human
cugacacacagcucuguccug

SEQ ID NO: 3022857 - RNA, 22 nt, Human
cugacacacagcucuguccugg

SEQ ID NO: 3022858 - RNA, 23 nt, Human
cugacacacagcucuguccuggg

SEQ ID NO: 3022859 - RNA, 18 nt, Human
cucugcacaagcugcacc

SEQ ID NO: 3022860 - RNA, 17 nt, Human
cucugcacaagcugcac

SEQ ID NO: 3022861 - RNA, 23 nt, Human
cucuugagccuugaacuuugacc

SEQ ID NO: 3022862 - RNA, 16 nt, Human
cucuugagccugggag

SEQ ID NO: 3022863 - RNA, 15 nt, Human
cucuugagccuggga

SEQ ID NO: 3022864 - RNA, 22 nt, Human
cucuugauucauaaugacuuaa

SEQ ID NO: 3022865 - RNA, 14 nt, Human
cucuugagccuggg

SEQ ID NO: 3022866 - RNA, 13 nt, Human
cucuugagccugg

SEQ ID NO: 3022867 - RNA, 24 nt, Human
cucuugauucauaaugacuuaagc

SEQ ID NO: 3022868 - RNA, 19 nt, Human
cugacccugcuucaaauau

SEQ ID NO: 3022869 - RNA, 22 nt, Human
cugagcugggaugauuggaggg

SEQ ID NO: 3022870 - RNA, 12 nt, Human
cugagcugggau

SEQ ID NO: 3022871 - RNA, 21 nt, Human
cugaggaauccagacccggcu

SEQ ID NO: 3022872 - RNA, 22 nt, Human
cugaggugggaggaucucuuga

SEQ ID NO: 3022873 - RNA, 12 nt, Human
cugaggugggag

SEQ ID NO: 3022874 - RNA, 13 nt, Human
cugaggugggagg

SEQ ID NO: 3022875 - RNA, 14 nt, Human
cugaggggccucuu

SEQ ID NO: 3022876 - RNA, 23 nt, Human
cugaggaauccagacccggcugc

SEQ ID NO: 3022877 - RNA, 14 nt, Human
cugaucucucguga

SEQ ID NO: 3022878 - RNA, 18 nt, Human
cugaucucucgugauuga

SEQ ID NO: 3022879 - RNA, 17 nt, Human
cugaucucucgugauug

SEQ ID NO: 3022880 - RNA, 16 nt, Human
cucuccgaccagacac

SEQ ID NO: 3022881 - RNA, 20 nt, Human
cucuccuccuuuucacaguu

SEQ ID NO: 3022882 - RNA, 13 nt, Human
cucuccuccuuuu

SEQ ID NO: 3022883 - RNA, 13 nt, Human
cucucccuuggau

SEQ ID NO: 3022884 - RNA, 10 nt, Human
cucuccucug

SEQ ID NO: 3022885 - RNA, 16 nt, Human
cucugcacaagcugca

SEQ ID NO: 3022886 - RNA, 23 nt, Human
cucgguguggagaagcggcuggc

SEQ ID NO: 3022887 - RNA, 11 nt, Human
cucggugccuu

SEQ ID NO: 3022888 - RNA, 24 nt, Human
cuccuuuucacaguucucuccuuc

SEQ ID NO: 3022889 - RNA, 23 nt, Human
cuccuuugugaggaagccgcugg

SEQ ID NO: 3022890 - RNA, 16 nt, Human
cuccuuuagcgcccag

SEQ ID NO: 3022891 - RNA, 17 nt, Human
cuccuuuagcgcccagu

SEQ ID NO: 3022892 - RNA, 22 nt, Human
cuccuagccugugccucuggga

SEQ ID NO: 3022893 - RNA, 22 nt, Human
cuccuuuagcgcccaguugggu

SEQ ID NO: 3022894 - RNA, 14 nt, Human
cucccaccucagcc

SEQ ID NO: 3022895 - RNA, 16 nt, Human
cucccaccucagccuc

SEQ ID NO: 3022896 - RNA, 17 nt, Human
cucccaccucagccucc

SEQ ID NO: 3022897 - RNA, 13 nt, Human
cucccaccucagc

SEQ ID NO: 3022898 - RNA, 18 nt, Human
cuccaggugcacaagcuc

SEQ ID NO: 3022899 - RNA, 20 nt, Human
cuccaggugcacaagcucca

SEQ ID NO: 3022900 - RNA, 19 nt, Human
cuccaggugcacaagcucc

SEQ ID NO: 3022901 - RNA, 23 nt, Human
cuccaggcuguaucccaugagcc

SEQ ID NO: 3022902 - RNA, 22 nt, Human
cuccaggcuguaucccaugagc

SEQ ID NO: 3022903 - RNA, 21 nt, Human
cuccagaauuucccaaagcag

SEQ ID NO: 3022904 - RNA, 16 nt, Human
cucagaaucucaaaua

SEQ ID NO: 3022905 - RNA, 17 nt, Human
cucagaaucucaaauaa

SEQ ID NO: 3022906 - RNA, 11 nt, Human
cuccagacaca

SEQ ID NO: 3022907 - RNA, 22 nt, Human
cuccagaauuucccaaagcagu

SEQ ID NO: 3022908 - RNA, 15 nt, Human
cucccucuuucccuc

SEQ ID NO: 3022909 - RNA, 16 nt, Human
cucccucccucuuucc

SEQ ID NO: 3022910 - RNA, 19 nt, Human
cucccucuuucccucccuu

SEQ ID NO: 3022911 - RNA, 21 nt, Human
cuccgcuuucuacccagcgag

SEQ ID NO: 3022912 - RNA, 20 nt, Human
cuccgcuuucuacccagcga

SEQ ID NO: 3022913 - RNA, 22 nt, Human
cuccgcuuucuacccagcgagc

SEQ ID NO: 3022914 - RNA, 17 nt, Human
cucacaauccuugccac

SEQ ID NO: 3022915 - RNA, 12 nt, Human
cucaaauaacua

SEQ ID NO: 3022916 - RNA, 14 nt, Human
cucacaaaggaugc

SEQ ID NO: 3022917 - RNA, 21 nt, Human
cucacacaugagcaucaggcc

SEQ ID NO: 3022918 - RNA, 14 nt, Human
cucacacaugagca

SEQ ID NO: 3022919 - RNA, 14 nt, Human
cuauguugcccagg

SEQ ID NO: 3022920 - RNA, 15 nt, Human
cuauguugcccaggc

SEQ ID NO: 3022921 - RNA, 22 nt, Human
cuauguguagggcgggaggaug

SEQ ID NO: 3022922 - RNA, 16 nt, Human
cuauguaucaaugagu

SEQ ID NO: 3022923 - RNA, 17 nt, Human
cuaugugagcacaaagg

SEQ ID NO: 3022924 - RNA, 18 nt, Human
cuaucucccccagcccca

SEQ ID NO: 3022925 - RNA, 19 nt, Human
cuauguaucaaugaguaac

SEQ ID NO: 3022926 - RNA, 20 nt, Human
cuaucucccccagccccauc

SEQ ID NO: 3022927 - RNA, 16 nt, Human
cuauguugcccaggca

SEQ ID NO: 3022928 - RNA, 17 nt, Human
cuauguugcccaggcag

SEQ ID NO: 3022929 - RNA, 17 nt, Human
cucaaaaaaagaaaaag

SEQ ID NO: 3022930 - RNA, 18 nt, Human
cucaaaaaaagaaaaaga

SEQ ID NO: 3022931 - RNA, 13 nt, Human
cucaccucucccu

SEQ ID NO: 3022932 - RNA, 17 nt, Human
cucaccucucccuugga

SEQ ID NO: 3022933 - RNA, 16 nt, Human
cucaccucucccuugg

SEQ ID NO: 3022934 - RNA, 15 nt, Human
cucaccucucccuug

SEQ ID NO: 3022935 - RNA, 14 nt, Human
cucaccucucccuu

SEQ ID NO: 3022936 - RNA, 13 nt, Human
cucaccugccccu

SEQ ID NO: 3022937 - RNA, 18 nt, Human
cucaccugccccucaacu

SEQ ID NO: 3022938 - RNA, 16 nt, Human
cucaccugccccucaa

SEQ ID NO: 3022939 - RNA, 14 nt, Human
cucaccugccccuc

SEQ ID NO: 3022940 - RNA, 15 nt, Human
cuaguuugauuaaau

SEQ ID NO: 3022941 - RNA, 20 nt, Human
cuaguuugauuaaauucuug

SEQ ID NO: 3022942 - RNA, 17 nt, Human
cuaguuugauuaaauuc

SEQ ID NO: 3022943 - RNA, 19 nt, Human
cuaguuugauuaaauucuu

SEQ ID NO: 3022944 - RNA, 14 nt, Human
cuagggaagauaau

SEQ ID NO: 3022945 - RNA, 17 nt, Human
cuagccagaggagagag

SEQ ID NO: 3022946 - RNA, 19 nt, Human
cuagccagaggagagagga

SEQ ID NO: 3022947 - RNA, 13 nt, Human
cuaggccuggcca

SEQ ID NO: 3022948 - RNA, 13 nt, Human
cuaggccugggga

SEQ ID NO: 3022949 - RNA, 12 nt, Human
cuaggccugggg

SEQ ID NO: 3022950 - RNA, 14 nt, Human
cuaggccuggccag

SEQ ID NO: 3022951 - RNA, 15 nt, Human
cuaggccuggccaga

SEQ ID NO: 3022952 - RNA, 18 nt, Human
cuaggccuggccagaugc

SEQ ID NO: 3022953 - RNA, 19 nt, Human
cuaggccuggccagaugca

SEQ ID NO: 3022954 - RNA, 16 nt, Human
cuagcauacguacaca

SEQ ID NO: 3022955 - RNA, 18 nt, Human
cuagcauacguacacauu

SEQ ID NO: 3022956 - RNA, 19 nt, Human
cuagcauacguacacauuu

SEQ ID NO: 3022957 - RNA, 20 nt, Human
cuagcauacguacacauuuu

SEQ ID NO: 3022958 - RNA, 23 nt, Human
cuaccugaggggccucuuauggg

SEQ ID NO: 3022959 - RNA, 19 nt, Human
cuaccugaggggccucuua

SEQ ID NO: 3022960 - RNA, 16 nt, Human
cuaccugaggggccuc

SEQ ID NO: 3022961 - RNA, 15 nt, Human
cuaccugaggggccu

SEQ ID NO: 3022962 - RNA, 22 nt, Human
cuaaaguguauuuuuuuacuaa

SEQ ID NO: 3022963 - RNA, 17 nt, Human
cuaaaggcuaccuuugu

SEQ ID NO: 3022964 - RNA, 19 nt, Human
cuaaaggcuaccuuuguau

SEQ ID NO: 3022965 - RNA, 19 nt, Human
cuaaaguguauuuuuuuac

SEQ ID NO: 3022966 - RNA, 14 nt, Human
cuaaagcugccagc

SEQ ID NO: 3022967 - RNA, 15 nt, Human
cuaaaggcuaccuuu

SEQ ID NO: 3022968 - RNA, 16 nt, Human
cuaaaggcuaccuuug

SEQ ID NO: 3022969 - RNA, 15 nt, Human
cuaaagcugccagcc

SEQ ID NO: 3022970 - RNA, 13 nt, Human
cguuaaaauacca

SEQ ID NO: 3022971 - RNA, 13 nt, Human
cguacacauuuua

SEQ ID NO: 3022972 - RNA, 15 nt, Human
cggagacggaguccc

SEQ ID NO: 3022973 - RNA, 16 nt, Human
cgccuuaaggauguuc

SEQ ID NO: 3022974 - RNA, 18 nt, Human
cgcugccccuggcagccc

SEQ ID NO: 3022975 - RNA, 19 nt, Human
cgcuggaccuugaacuggg

SEQ ID NO: 3022976 - RNA, 23 nt, Human
cgcuggaccuugaacuggguacu

SEQ ID NO: 3022977 - RNA, 13 nt, Human
cgcugccccuggc

SEQ ID NO: 3022978 - RNA, 17 nt, Human
cgcugccccuggcagcc

SEQ ID NO: 3022979 - RNA, 16 nt, Human
cgcugccccuggcagc

SEQ ID NO: 3022980 - RNA, 17 nt, Human
cgcuggggccaguuggu

SEQ ID NO: 3022981 - RNA, 20 nt, Human
cgcuggggccaguugguccc

SEQ ID NO: 3022982 - RNA, 20 nt, Human
cccagcacaaagcagauccu

SEQ ID NO: 3022983 - RNA, 23 nt, Human
cccagcaagugagagcugggugu

SEQ ID NO: 3022984 - RNA, 16 nt, Human
cccaggaaaggcucca

SEQ ID NO: 3022985 - RNA, 15 nt, Human
cccaggaaaggcucc

SEQ ID NO: 3022986 - RNA, 22 nt, Human
cccaggcuuagucacugagaca

SEQ ID NO: 3022987 - RNA, 20 nt, Human
cccaggcuuagucacugaga

SEQ ID NO: 3022988 - RNA, 18 nt, Human
cccaggaaaggcuccagg

SEQ ID NO: 3022989 - RNA, 17 nt, Human
cccaggaaaggcuccag

SEQ ID NO: 3022990 - RNA, 22 nt, Human
cccauccucuguacagagccca

SEQ ID NO: 3022991 - RNA, 21 nt, Human
cccauccucuguacagagccc

SEQ ID NO: 3022992 - RNA, 15 nt, Human
ccccagauugcaaca

SEQ ID NO: 3022993 - RNA, 20 nt, Human
ccccagauugcaacaggcug

SEQ ID NO: 3022994 - RNA, 15 nt, Human
cccauuugcuccuuu

SEQ ID NO: 3022995 - RNA, 19 nt, Human
cccauucugccugcccagg

SEQ ID NO: 3022996 - RNA, 14 nt, Human
cccauucugccugc

SEQ ID NO: 3022997 - RNA, 15 nt, Human
cccauucugccugcc

SEQ ID NO: 3022998 - RNA, 23 nt, Human
ccccgaggccuucucugaaggac

SEQ ID NO: 3022999 - RNA, 14 nt, Human
ccccgcacugggcu

SEQ ID NO: 3023000 - RNA, 16 nt, Human
cccggccccugcuggu

SEQ ID NO: 3023001 - RNA, 15 nt, Human
cccggccccugcugg

SEQ ID NO: 3023002 - RNA, 12 nt, Human
cccgggaagggg

SEQ ID NO: 3023003 - RNA, 15 nt, Human
cccgggaagggggcu

SEQ ID NO: 3023004 - RNA, 13 nt, Human
ccccuucugaccc

SEQ ID NO: 3023005 - RNA, 14 nt, Human
ccccuucugaccca

SEQ ID NO: 3023006 - RNA, 16 nt, Human
cccgaauagcugggac

SEQ ID NO: 3023007 - RNA, 17 nt, Human
cccgaauagcugggacu

SEQ ID NO: 3023008 - RNA, 18 nt, Human
cccgaauagcugggacua

SEQ ID NO: 3023009 - RNA, 17 nt, Human
cccggccaccugcggug

SEQ ID NO: 3023010 - RNA, 16 nt, Human
cccucaacucuccucc

SEQ ID NO: 3023011 - RNA, 16 nt, Human
cccucaacaccucugc

SEQ ID NO: 3023012 - RNA, 21 nt, Human
cccgggaagggggcugggaca

SEQ ID NO: 3023013 - RNA, 18 nt, Human
cccgggaagggggcuggg

SEQ ID NO: 3023014 - RNA, 14 nt, Human
ccccugccacccug

SEQ ID NO: 3023015 - RNA, 16 nt, Human
ccccugccacccuggg

SEQ ID NO: 3023016 - RNA, 15 nt, Human
ccccugacaacacuc

SEQ ID NO: 3023017 - RNA, 21 nt, Human
ccagucauuauguuaauauuu

SEQ ID NO: 3023018 - RNA, 22 nt, Human
ccagucauuauguuaauauuuc

SEQ ID NO: 3023019 - RNA, 21 nt, Human
ccaggggaaaaucagccugcu

SEQ ID NO: 3023020 - RNA, 12 nt, Human
ccaggcuggcgu

SEQ ID NO: 3023021 - RNA, 23 nt, Human
ccaggcaggucuugaacuccugg

SEQ ID NO: 3023022 - RNA, 12 nt, Human
ccaggcaggucu

SEQ ID NO: 3023023 - RNA, 14 nt, Human
ccaggcaggucuug

SEQ ID NO: 3023024 - RNA, 17 nt, Human
ccagccccauccucugu

SEQ ID NO: 3023025 - RNA, 15 nt, Human
ccagccccauccucu

SEQ ID NO: 3023026 - RNA, 17 nt, Human
ccagccccagugcccac

SEQ ID NO: 3023027 - RNA, 14 nt, Human
ccagcagagcaccu

SEQ ID NO: 3023028 - RNA, 13 nt, Human
ccagcagagcacc

SEQ ID NO: 3023029 - RNA, 12 nt, Human
ccagcagagcac

SEQ ID NO: 3023030 - RNA, 24 nt, Human
ccagccccuucugacccaugcugc

SEQ ID NO: 3023031 - RNA, 23 nt, Human
ccagccccuucugacccaugcug

SEQ ID NO: 3023032 - RNA, 16 nt, Human
ccauucuuggcccagg

SEQ ID NO: 3023033 - RNA, 16 nt, Human
cccaacucaccccagc

SEQ ID NO: 3023034 - RNA, 15 nt, Human
cccaacucaccccag

SEQ ID NO: 3023035 - RNA, 13 nt, Human
cccaagcucugcu

SEQ ID NO: 3023036 - RNA, 14 nt, Human
cccaagcucugcuc

SEQ ID NO: 3023037 - RNA, 12 nt, Human
cccaagcucugc

SEQ ID NO: 3023038 - RNA, 20 nt, Human
cccaacucaccccagcccca

SEQ ID NO: 3023039 - RNA, 17 nt, Human
cccaacucaccccagcc

SEQ ID NO: 3023040 - RNA, 12 nt, Human
cccacucccugc

SEQ ID NO: 3023041 - RNA, 13 nt, Human
cccacucccugca

SEQ ID NO: 3023042 - RNA, 23 nt, Human
cccacugcuuuuggucuguguga

SEQ ID NO: 3023043 - RNA, 22 nt, Human
cccacugcuuuuggucugugug

SEQ ID NO: 3023044 - RNA, 18 nt, Human
ccaugaguccccuguuug

SEQ ID NO: 3023045 - RNA, 23 nt, Human
ccaugaggaacaaggcaaggcug

SEQ ID NO: 3023046 - RNA, 20 nt, Human
ccaugaggaacaaggcaagg

SEQ ID NO: 3023047 - RNA, 23 nt, Human
ccaguuggguggaugccuggugg

SEQ ID NO: 3023048 - RNA, 13 nt, Human
ccaguuggucccc

SEQ ID NO: 3023049 - RNA, 20 nt, Human
ccaguuggucccccuuccau

SEQ ID NO: 3023050 - RNA, 18 nt, Human
ccaguuggucccccuucc

SEQ ID NO: 3023051 - RNA, 18 nt, Human
ccauccagguucagcuug

SEQ ID NO: 3023052 - RNA, 19 nt, Human
ccauccagguucagcuugu

SEQ ID NO: 3023053 - RNA, 20 nt, Human
ccaucccaaacccuucagug

SEQ ID NO: 3023054 - RNA, 20 nt, Human
ccaucccauaugccugggca

SEQ ID NO: 3023055 - RNA, 19 nt, Human
ccaucccauaugccugggc

SEQ ID NO: 3023056 - RNA, 21 nt, Human
ccaucccauaugccugggcag

SEQ ID NO: 3023057 - RNA, 22 nt, Human
ccauccccuguagagugggagc

SEQ ID NO: 3023058 - RNA, 15 nt, Human
ccuaauaaaaaggug

SEQ ID NO: 3023059 - RNA, 16 nt, Human
ccuaauaaaaagguga

SEQ ID NO: 3023060 - RNA, 20 nt, Human
ccuaauaaaaaggugaccau

SEQ ID NO: 3023061 - RNA, 14 nt, Human
ccuaauaaaaaggu

SEQ ID NO: 3023062 - RNA, 12 nt, Human
ccuaauguguuu

SEQ ID NO: 3023063 - RNA, 21 nt, Human
ccuagcauacguacacauuuu

SEQ ID NO: 3023064 - RNA, 22 nt, Human
ccuagccuuagaagucacacag

SEQ ID NO: 3023065 - RNA, 19 nt, Human
ccuagccuuagaagucaca

SEQ ID NO: 3023066 - RNA, 23 nt, Human
ccuagccugugccucugggacug

SEQ ID NO: 3023067 - RNA, 17 nt, Human
ccggccaccugcggugc

SEQ ID NO: 3023068 - RNA, 18 nt, Human
ccggccaccugcggugcu

SEQ ID NO: 3023069 - RNA, 23 nt, Human
ccgcagcccugcagagggcacag

SEQ ID NO: 3023070 - RNA, 18 nt, Human
ccgcagcccugcagaggg

SEQ ID NO: 3023071 - RNA, 14 nt, Human
ccgcagcccugcag

SEQ ID NO: 3023072 - RNA, 14 nt, Human
cccuccuuucacca

SEQ ID NO: 3023073 - RNA, 21 nt, Human
cccugugaguacuacaguccu

SEQ ID NO: 3023074 - RNA, 15 nt, Human
cccugugauggggcc

SEQ ID NO: 3023075 - RNA, 23 nt, Human
cccugugaguacuacaguccucc

SEQ ID NO: 3023076 - RNA, 23 nt, Human
cccuuuuuuggcugcugaaggcu

SEQ ID NO: 3023077 - RNA, 22 nt, Human
cccuuuuuuggcugcugaaggc

SEQ ID NO: 3023078 - RNA, 21 nt, Human
cccuuuuuuggcugcugaagg

SEQ ID NO: 3023079 - RNA, 19 nt, Human
cccuucucuccagccccug

SEQ ID NO: 3023080 - RNA, 14 nt, Human
cccuucucuccagc

SEQ ID NO: 3023081 - RNA, 12 nt, Human
ccucccaucacc

SEQ ID NO: 3023082 - RNA, 16 nt, Human
ccuccaagaccuucuc

SEQ ID NO: 3023083 - RNA, 19 nt, Human
ccuccaagaccuucuccuu

SEQ ID NO: 3023084 - RNA, 17 nt, Human
ccuccaagaccuucucc

SEQ ID NO: 3023085 - RNA, 17 nt, Human
ccucccaucacccgcua

SEQ ID NO: 3023086 - RNA, 23 nt, Human
ccucaagugauucuccugccuca

SEQ ID NO: 3023087 - RNA, 20 nt, Human
ccucaagugauucuccugcc

SEQ ID NO: 3023088 - RNA, 18 nt, Human
ccucaggcaggugggaug

SEQ ID NO: 3023089 - RNA, 12 nt, Human
ccucaggcaggu

SEQ ID NO: 3023090 - RNA, 18 nt, Human
ccucauuagcauuuugcu

SEQ ID NO: 3023091 - RNA, 15 nt, Human
ccucaaccuccuggg

SEQ ID NO: 3023092 - RNA, 19 nt, Human
ccucaacucuccuccagag

SEQ ID NO: 3023093 - RNA, 23 nt, Human
ccucaacucuccuccagagucag

SEQ ID NO: 3023094 - RNA, 21 nt, Human
ccucaacucuccuccagaguc

SEQ ID NO: 3023095 - RNA, 16 nt, Human
ccucaacaccucugca

SEQ ID NO: 3023096 - RNA, 13 nt, Human
ccuccgccucuug

SEQ ID NO: 3023097 - RNA, 14 nt, Human
ccuccgccucuugg

SEQ ID NO: 3023098 - RNA, 23 nt, Human
ccuccuuugugaggaagccgcug

SEQ ID NO: 3023099 - RNA, 18 nt, Human
ccuccuuuucacaguucu

SEQ ID NO: 3023100 - RNA, 16 nt, Human
ccugccucagccuccc

SEQ ID NO: 3023101 - RNA, 15 nt, Human
ccugccucagccucc

SEQ ID NO: 3023102 - RNA, 21 nt, Human
ccugcccaggccccugccacc

SEQ ID NO: 3023103 - RNA, 18 nt, Human
ccugcccaggccccugcc

SEQ ID NO: 3023104 - RNA, 19 nt, Human
ccugcccaggccccugcca

SEQ ID NO: 3023105 - RNA, 19 nt, Human
ccugcccaccuggccucug

SEQ ID NO: 3023106 - RNA, 18 nt, Human
ccugcccaccuggccucu

SEQ ID NO: 3023107 - RNA, 17 nt, Human
ccugcccaccuggccuc

SEQ ID NO: 3023108 - RNA, 15 nt, Human
ccugcccaccuggcc

SEQ ID NO: 3023109 - RNA, 14 nt, Human
ccugcaggcagcca

SEQ ID NO: 3023110 - RNA, 13 nt, Human
ccugcaggcagcc

SEQ ID NO: 3023111 - RNA, 12 nt, Human
ccugcaggcagc

SEQ ID NO: 3023112 - RNA, 16 nt, Human
ccucuuucccucccuu

SEQ ID NO: 3023113 - RNA, 19 nt, Human
ccucuuucccucccuuccu

SEQ ID NO: 3023114 - RNA, 15 nt, Human
ccucuuugagugaag

SEQ ID NO: 3023115 - RNA, 15 nt, Human
ccuggggagaaagua

SEQ ID NO: 3023116 - RNA, 13 nt, Human
ccugguguggaag

SEQ ID NO: 3023117 - RNA, 20 nt, Human
ccugguggcagugggagcug

SEQ ID NO: 3023118 - RNA, 15 nt, Human
ccugguggcaguggg

SEQ ID NO: 3023119 - RNA, 18 nt, Human
ccugguggcagugggagc

SEQ ID NO: 3023120 - RNA, 19 nt, Human
ccugguggcagugggagcu

SEQ ID NO: 3023121 - RNA, 20 nt, Human
ccuggccugagcugggauga

SEQ ID NO: 3023122 - RNA, 22 nt, Human
ccuggccucaagugauucuccu

SEQ ID NO: 3023123 - RNA, 21 nt, Human
ccuggccccucagggucccug

SEQ ID NO: 3023124 - RNA, 20 nt, Human
ccuggccccucagggucccu

SEQ ID NO: 3023125 - RNA, 18 nt, Human
ccuggccccucagggucc

SEQ ID NO: 3023126 - RNA, 16 nt, Human
ccuggccccucagggu

SEQ ID NO: 3023127 - RNA, 18 nt, Human
ccuggauggggcugcacc

SEQ ID NO: 3023128 - RNA, 17 nt, Human
ccuggauggggcugcac

SEQ ID NO: 3023129 - RNA, 15 nt, Human
ccuggauggggcugc

SEQ ID NO: 3023130 - RNA, 23 nt, Human
caauugaaguaaaauguggcagg

SEQ ID NO: 3023131 - RNA, 15 nt, Human
caaugggagcucaug

SEQ ID NO: 3023132 - RNA, 19 nt, Human
cacaagagcccaggccucc

SEQ ID NO: 3023133 - RNA, 18 nt, Human
cacaagagcccaggccuc

SEQ ID NO: 3023134 - RNA, 19 nt, Human
cacaagcuccaagcuccca

SEQ ID NO: 3023135 - RNA, 18 nt, Human
cacaagcuccaagcuccc

SEQ ID NO: 3023136 - RNA, 20 nt, Human
cacaagagcccaggccuccu

SEQ ID NO: 3023137 - RNA, 17 nt, Human
cacaagagcccaggccu

SEQ ID NO: 3023138 - RNA, 16 nt, Human
caauggcagccuuggc

SEQ ID NO: 3023139 - RNA, 12 nt, Human
caaugcuggcug

SEQ ID NO: 3023140 - RNA, 20 nt, Human
caaugcuggcuguuggcugg

SEQ ID NO: 3023141 - RNA, 21 nt, Human
caaugcuggcuguuggcuggg

SEQ ID NO: 3023142 - RNA, 13 nt, Human
caaugcuggcugu

SEQ ID NO: 3023143 - RNA, 21 nt, Human
cacaagcuccaagcucccagg

SEQ ID NO: 3023144 - RNA, 20 nt, Human
cacaagcuccaagcucccag

SEQ ID NO: 3023145 - RNA, 21 nt, Human
caaggccaaaggaagcacaug

SEQ ID NO: 3023146 - RNA, 20 nt, Human
caaggccaaaggaagcacau

SEQ ID NO: 3023147 - RNA, 19 nt, Human
caaggccaaaggaagcaca

SEQ ID NO: 3023148 - RNA, 16 nt, Human
caaggcaaggcuguca

SEQ ID NO: 3023149 - RNA, 17 nt, Human
caaggcaaggcugucaa

SEQ ID NO: 3023150 - RNA, 18 nt, Human
caaggcaaggcugucaau

SEQ ID NO: 3023151 - RNA, 13 nt, Human
cacagaagaugaa

SEQ ID NO: 3023152 - RNA, 14 nt, Human
cacagacccugccc

SEQ ID NO: 3023153 - RNA, 17 nt, Human
cacagacccugcccugu

SEQ ID NO: 3023154 - RNA, 16 nt, Human
cacagacccugcccug

SEQ ID NO: 3023155 - RNA, 11 nt, Human
cacagcucugu

SEQ ID NO: 3023156 - RNA, 14 nt, Human
cacagcucuguccu

SEQ ID NO: 3023157 - RNA, 18 nt, Human
cacagacccugcccugug

SEQ ID NO: 3023158 - RNA, 17 nt, Human
cacagcucuucuccagg

SEQ ID NO: 3023159 - RNA, 14 nt, Human
cacagcucuucucc

SEQ ID NO: 3023160 - RNA, 15 nt, Human
cacagcucuucucca

SEQ ID NO: 3023161 - RNA, 15 nt, Human
cacagcucuguccug

SEQ ID NO: 3023162 - RNA, 16 nt, Human
cacagcucuguccugg

SEQ ID NO: 3023163 - RNA, 18 nt, Human
cacagcucuguccuggga

SEQ ID NO: 3023164 - RNA, 10 nt, Human
cacagcucuu

SEQ ID NO: 3023165 - RNA, 10 nt, Human
cacacauuuu

SEQ ID NO: 3023166 - RNA, 11 nt, Human
cacacauuuuu

SEQ ID NO: 3023167 - RNA, 12 nt, Human
cacacauuuuuu

SEQ ID NO: 3023168 - RNA, 16 nt, Human
cacacauuuuuuaaau

SEQ ID NO: 3023169 - RNA, 19 nt, Human
cacacauuuuuuaaaugca

SEQ ID NO: 3023170 - RNA, 20 nt, Human
cacacauuuuuuaaaugcac

SEQ ID NO: 3023171 - RNA, 18 nt, Human
cacccaggaacuccugac

SEQ ID NO: 3023172 - RNA, 16 nt, Human
cacccaggagccccga

SEQ ID NO: 3023173 - RNA, 18 nt, Human
cacccaccucagccuccc

SEQ ID NO: 3023174 - RNA, 13 nt, Human
caccagccccagu

SEQ ID NO: 3023175 - RNA, 17 nt, Human
cacccaccucagccucc

SEQ ID NO: 3023176 - RNA, 15 nt, Human
cacaucuguuuugua

SEQ ID NO: 3023177 - RNA, 21 nt, Human
cacauuuuauuuuauuaugca

SEQ ID NO: 3023178 - RNA, 19 nt, Human
cacauuuuauuuuauuaug

SEQ ID NO: 3023179 - RNA, 20 nt, Human
cacauuuuauuuuauuaugc

SEQ ID NO: 3023180 - RNA, 17 nt, Human
cacauuuuauuuuauua

SEQ ID NO: 3023181 - RNA, 14 nt, Human
caccaacgucugug

SEQ ID NO: 3023182 - RNA, 14 nt, Human
caccuuucccaucu

SEQ ID NO: 3023183 - RNA, 18 nt, Human
caccuuggcugcagggag

SEQ ID NO: 3023184 - RNA, 15 nt, Human
caccuuggcugcagg

SEQ ID NO: 3023185 - RNA, 16 nt, Human
caccuuggcugcaggg

SEQ ID NO: 3023186 - RNA, 20 nt, Human
cacucuuauugcccacgcug

SEQ ID NO: 3023187 - RNA, 21 nt, Human
cacucuuauugcccacgcugg

SEQ ID NO: 3023188 - RNA, 22 nt, Human
cacucuuauugcccacgcugga

SEQ ID NO: 3023189 - RNA, 14 nt, Human
cacggcucacugca

SEQ ID NO: 3023190 - RNA, 17 nt, Human
cacggccaggccagagg

SEQ ID NO: 3023191 - RNA, 12 nt, Human
cacggccaggcc

SEQ ID NO: 3023192 - RNA, 13 nt, Human
cacggccaggcca

SEQ ID NO: 3023193 - RNA, 20 nt, Human
cacucugucgcccagucugg

SEQ ID NO: 3023194 - RNA, 13 nt, Human
cacuccagccugg

SEQ ID NO: 3023195 - RNA, 14 nt, Human
cacuccagccuggg

SEQ ID NO: 3023196 - RNA, 16 nt, Human
cacuacauucuguuaa

SEQ ID NO: 3023197 - RNA, 17 nt, Human
cacuacauucuguuaau

SEQ ID NO: 3023198 - RNA, 21 nt, Human
cacuacauucuguuaaucauu

SEQ ID NO: 3023199 - RNA, 16 nt, Human
cagaaauguacagcaa

SEQ ID NO: 3023200 - RNA, 16 nt, Human
cagaaguuucugccgc

SEQ ID NO: 3023201 - RNA, 14 nt, Human
cagaaguuucugcc

SEQ ID NO: 3023202 - RNA, 13 nt, Human
cacuuucuagcca

SEQ ID NO: 3023203 - RNA, 17 nt, Human
cacuuucuagccagagg

SEQ ID NO: 3023204 - RNA, 16 nt, Human
cacuuucuagccagag

SEQ ID NO: 3023205 - RNA, 18 nt, Human
cacuuguguuaugaagca

SEQ ID NO: 3023206 - RNA, 17 nt, Human
cacugccaugccagcuu

SEQ ID NO: 3023207 - RNA, 20 nt, Human
cacugcagccucaaccuccu

SEQ ID NO: 3023208 - RNA, 21 nt, Human
cacugcagccucaaccuccug

SEQ ID NO: 3023209 - RNA, 22 nt, Human
cacugcagccucaaccuccugg

SEQ ID NO: 3023210 - RNA, 23 nt, Human
cacugcagccucaaccuccuggg

SEQ ID NO: 3023211 - RNA, 19 nt, Human
cacugcagccucaaccucc

SEQ ID NO: 3023212 - RNA, 14 nt, Human
cacugcagccucaa

SEQ ID NO: 3023213 - RNA, 23 nt, Human
cacuguugcccaggcuggcgugc

SEQ ID NO: 3023214 - RNA, 18 nt, Human
cacuguugcccaggcugg

SEQ ID NO: 3023215 - RNA, 19 nt, Human
cacuguugcccaggcuggc

SEQ ID NO: 3023216 - RNA, 13 nt, Human
auuuuaugucuuu

SEQ ID NO: 3023217 - RNA, 14 nt, Human
auuuuuagacagag

SEQ ID NO: 3023218 - RNA, 16 nt, Human
auuuuuaagugcugca

SEQ ID NO: 3023219 - RNA, 18 nt, Human
auuuuuaagugcugcauu

SEQ ID NO: 3023220 - RNA, 19 nt, Human
auuuuuaagugcugcauuu

SEQ ID NO: 3023221 - RNA, 17 nt, Human
caaacagucucccuucc

SEQ ID NO: 3023222 - RNA, 24 nt, Human
caaacccaguguuuuaggagcaug

SEQ ID NO: 3023223 - RNA, 19 nt, Human
caaaagcugggcagguugg

SEQ ID NO: 3023224 - RNA, 22 nt, Human
auuuuuuuuuccuucagugccu

SEQ ID NO: 3023225 - RNA, 20 nt, Human
auuuuuuuuuccuucagugc

SEQ ID NO: 3023226 - RNA, 16 nt, Human
auuuuuuugagacaga

SEQ ID NO: 3023227 - RNA, 18 nt, Human
auuuuuuuuuccuucagu

SEQ ID NO: 3023228 - RNA, 23 nt, Human
caaaugcuguaacuuucugaaau

SEQ ID NO: 3023229 - RNA, 21 nt, Human
caaaucugcuuuuuaaagaau

SEQ ID NO: 3023230 - RNA, 22 nt, Human
caaaguagaagucuuagaugua

SEQ ID NO: 3023231 - RNA, 19 nt, Human
caaaguaucccuacuguaa

SEQ ID NO: 3023232 - RNA, 21 nt, Human
caaaguaucccuacuguaauu

SEQ ID NO: 3023233 - RNA, 22 nt, Human
caaagcagugcaugcugucccu

SEQ ID NO: 3023234 - RNA, 21 nt, Human
caaagcagugcaugcuguccc

SEQ ID NO: 3023235 - RNA, 18 nt, Human
caaagcagugcaugcugu

SEQ ID NO: 3023236 - RNA, 14 nt, Human
caaagauauuuugc

SEQ ID NO: 3023237 - RNA, 16 nt, Human
caaagauauuuugcuu

SEQ ID NO: 3023238 - RNA, 18 nt, Human
caacucaccccagcccca

SEQ ID NO: 3023239 - RNA, 17 nt, Human
caacucaccccagcccc

SEQ ID NO: 3023240 - RNA, 22 nt, Human
caagaauugaagcaggacuaaa

SEQ ID NO: 3023241 - RNA, 14 nt, Human
caacucuccuccag

SEQ ID NO: 3023242 - RNA, 17 nt, Human
caagaccacguuucuaa

SEQ ID NO: 3023243 - RNA, 18 nt, Human
caagaccacguuucuaaa

SEQ ID NO: 3023244 - RNA, 13 nt, Human
auuaaaugacucu

SEQ ID NO: 3023245 - RNA, 12 nt, Human
auuaaaugacuc

SEQ ID NO: 3023246 - RNA, 19 nt, Human
auuaaaugcccagccccuu

SEQ ID NO: 3023247 - RNA, 17 nt, Human
auuaaaugcccagcccc

SEQ ID NO: 3023248 - RNA, 18 nt, Human
auucaacagguuuuccug

SEQ ID NO: 3023249 - RNA, 17 nt, Human
auucuccuuguguuacu

SEQ ID NO: 3023250 - RNA, 18 nt, Human
auucuccuuguguuacua

SEQ ID NO: 3023251 - RNA, 19 nt, Human
auucuccuuguguuacuaa

SEQ ID NO: 3023252 - RNA, 21 nt, Human
auucuccuuguguuacuaagu

SEQ ID NO: 3023253 - RNA, 22 nt, Human
auucuccuuguguuacuaaguu

SEQ ID NO: 3023254 - RNA, 17 nt, Human
auucucuaguuugauua

SEQ ID NO: 3023255 - RNA, 18 nt, Human
auucucuaguuugauuaa

SEQ ID NO: 3023256 - RNA, 19 nt, Human
auucuucugcuucagccuc

SEQ ID NO: 3023257 - RNA, 20 nt, Human
auucuucugcuucagccucc

SEQ ID NO: 3023258 - RNA, 22 nt, Human
auucuucuguacgucugacagg

SEQ ID NO: 3023259 - RNA, 14 nt, Human
auucuucugcuuca

SEQ ID NO: 3023260 - RNA, 14 nt, Human
auucuugcaaagua

SEQ ID NO: 3023261 - RNA, 15 nt, Human
auucuugcaaaguau

SEQ ID NO: 3023262 - RNA, 16 nt, Human
auucuugcaaaguauc

SEQ ID NO: 3023263 - RNA, 16 nt, Human
auuuaaugaaagacug

SEQ ID NO: 3023264 - RNA, 15 nt, Human
auuuaaugaaagacu

SEQ ID NO: 3023265 - RNA, 20 nt, Human
auuuaaugaaagacuguaca

SEQ ID NO: 3023266 - RNA, 21 nt, Human
auuuaaugaaagacuguacaa

SEQ ID NO: 3023267 - RNA, 18 nt, Human
auugcuugagcucaggag

SEQ ID NO: 3023268 - RNA, 16 nt, Human
cauuagguugugaaug

SEQ ID NO: 3023269 - RNA, 15 nt, Human
cauuagguugugaau

SEQ ID NO: 3023270 - RNA, 14 nt, Human
cauuagguugugaa

SEQ ID NO: 3023271 - RNA, 22 nt, Human
cauuaggugugacugaauuucu

SEQ ID NO: 3023272 - RNA, 23 nt, Human
cauuaucuagauacuguaucaug

SEQ ID NO: 3023273 - RNA, 12 nt, Human
cauguuggccag

SEQ ID NO: 3023274 - RNA, 13 nt, Human
cauguuggccagg

SEQ ID NO: 3023275 - RNA, 18 nt, Human
cauguccaagaagcccag

SEQ ID NO: 3023276 - RNA, 20 nt, Human
cauguccaagaagcccagga

SEQ ID NO: 3023277 - RNA, 19 nt, Human
cauguccaagaagcccagg

SEQ ID NO: 3023278 - RNA, 12 nt, Human
cauuccuguucc

SEQ ID NO: 3023279 - RNA, 15 nt, Human
caugcugcccuguga

SEQ ID NO: 3023280 - RNA, 14 nt, Human
caugcugcccugug

SEQ ID NO: 3023281 - RNA, 23 nt, Human
caugacacgaauauugcugaugg

SEQ ID NO: 3023282 - RNA, 21 nt, Human
caugacacgaauauugcugau

SEQ ID NO: 3023283 - RNA, 15 nt, Human
caugaaguaauaugc

SEQ ID NO: 3023284 - RNA, 19 nt, Human
caugaaguaauaugcacac

SEQ ID NO: 3023285 - RNA, 22 nt, Human
caugaaguaauaugcacacauu

SEQ ID NO: 3023286 - RNA, 23 nt, Human
caugaaguaauaugcacacauuu

SEQ ID NO: 3023287 - RNA, 16 nt, Human
caugcacgugugugca

SEQ ID NO: 3023288 - RNA, 13 nt, Human
caugcuccuggcc

SEQ ID NO: 3023289 - RNA, 13 nt, Human
caugcugcccugu

SEQ ID NO: 3023290 - RNA, 12 nt, Human
caugcugcccug

SEQ ID NO: 3023291 - RNA, 24 nt, Human
caugauuaaccacuucagcugacu

SEQ ID NO: 3023292 - RNA, 23 nt, Human
caugauuaaccacuucagcugac

SEQ ID NO: 3023293 - RNA, 22 nt, Human
caugauuaaccacuucagcuga

SEQ ID NO: 3023294 - RNA, 18 nt, Human
cauagcugugauuuuugg

SEQ ID NO: 3023295 - RNA, 15 nt, Human
cauagcugugauuuu

SEQ ID NO: 3023296 - RNA, 13 nt, Human
cauagcugugauu

SEQ ID NO: 3023297 - RNA, 19 nt, Human
cauagcagagaaugaaagg

SEQ ID NO: 3023298 - RNA, 22 nt, Human
cauagcagagaaugaaagggcc

SEQ ID NO: 3023299 - RNA, 15 nt, Human
cauauucaggaagcu

SEQ ID NO: 3023300 - RNA, 14 nt, Human
cauauucaggaagc

SEQ ID NO: 3023301 - RNA, 20 nt, Human
cauauucaggaagcucaggg

SEQ ID NO: 3023302 - RNA, 20 nt, Human
cauaugccugggcagaagga

SEQ ID NO: 3023303 - RNA, 15 nt, Human
cauaugccugggcag

SEQ ID NO: 3023304 - RNA, 13 nt, Human
cauaugccugggc

SEQ ID NO: 3023305 - RNA, 22 nt, Human
cauaugccugggcagaaggaag

SEQ ID NO: 3023306 - RNA, 14 nt, Human
cauccccuguagag

SEQ ID NO: 3023307 - RNA, 19 nt, Human
caucccauaugccugggca

SEQ ID NO: 3023308 - RNA, 17 nt, Human
caucccagccccaauga

SEQ ID NO: 3023309 - RNA, 19 nt, Human
caucaggccaggcccucug

SEQ ID NO: 3023310 - RNA, 16 nt, Human
caucaggccaggcccu

SEQ ID NO: 3023311 - RNA, 14 nt, Human
caucaggccaggcc

SEQ ID NO: 3023312 - RNA, 15 nt, Human
caucaggccaggccc

SEQ ID NO: 3023313 - RNA, 12 nt, Human
ccaagcuggucc

SEQ ID NO: 3023314 - RNA, 19 nt, Human
ccaagcuggucccacucag

SEQ ID NO: 3023315 - RNA, 14 nt, Human
ccaagaagcccagg

SEQ ID NO: 3023316 - RNA, 15 nt, Human
ccaaggccaaaggaa

SEQ ID NO: 3023317 - RNA, 22 nt, Human
ccaaauggaaaugggcagagca

SEQ ID NO: 3023318 - RNA, 15 nt, Human
ccaacgucugugcca

SEQ ID NO: 3023319 - RNA, 13 nt, Human
ccaacgucugugc

SEQ ID NO: 3023320 - RNA, 13 nt, Human
ccaagaagcccag

SEQ ID NO: 3023321 - RNA, 16 nt, Human
ccaaggccaaaggaag

SEQ ID NO: 3023322 - RNA, 19 nt, Human
cauuuuuuaaaugcaccug

SEQ ID NO: 3023323 - RNA, 15 nt, Human
cauuuuuuaaaugca

SEQ ID NO: 3023324 - RNA, 16 nt, Human
cauuuuuuaaaugcac

SEQ ID NO: 3023325 - RNA, 14 nt, Human
cauuuauucugcuc

SEQ ID NO: 3023326 - RNA, 17 nt, Human
cauuugucacacacuuu

SEQ ID NO: 3023327 - RNA, 15 nt, Human
cauuuggauuggaug

SEQ ID NO: 3023328 - RNA, 18 nt, Human
ccacgcuggaccuugaac

SEQ ID NO: 3023329 - RNA, 18 nt, Human
ccaccuuggcugcaggga

SEQ ID NO: 3023330 - RNA, 19 nt, Human
ccaccuuggcugcagggag

SEQ ID NO: 3023331 - RNA, 12 nt, Human
ccaccuuggcug

SEQ ID NO: 3023332 - RNA, 14 nt, Human
ccaccuuggcugca

SEQ ID NO: 3023333 - RNA, 15 nt, Human
ccaccuuggcugcag

SEQ ID NO: 3023334 - RNA, 16 nt, Human
ccaccuuggcugcagg

SEQ ID NO: 3023335 - RNA, 19 nt, Human
ccaccaucaugucuggcua

SEQ ID NO: 3023336 - RNA, 18 nt, Human
ccaccaucaccagacagg

SEQ ID NO: 3023337 - RNA, 18 nt, Human
ccaccaucaugucuggcu

SEQ ID NO: 3023338 - RNA, 22 nt, Human
ccacagagaaaguacuucucca

SEQ ID NO: 3023339 - RNA, 20 nt, Human
cagaguaggggucugucuuu

SEQ ID NO: 3023340 - RNA, 23 nt, Human
cagaguaggggucugucuuuuaa

SEQ ID NO: 3023341 - RNA, 22 nt, Human
cagaguaggggucugucuuuua

SEQ ID NO: 3023342 - RNA, 20 nt, Human
cagagucagaaguuucugcc

SEQ ID NO: 3023343 - RNA, 20 nt, Human
cagaggggguggccucccaa

SEQ ID NO: 3023344 - RNA, 19 nt, Human
cagaggggguggccuccca

SEQ ID NO: 3023345 - RNA, 17 nt, Human
cagaggggguggccucc

SEQ ID NO: 3023346 - RNA, 18 nt, Human
cagaggggguggccuccc

SEQ ID NO: 3023347 - RNA, 22 nt, Human
cagagggccugcaagggaguga

SEQ ID NO: 3023348 - RNA, 18 nt, Human
cagagcugccaccugccu

SEQ ID NO: 3023349 - RNA, 16 nt, Human
cagagcugccaccugc

SEQ ID NO: 3023350 - RNA, 22 nt, Human
cagaaguuugagaucagccugg

SEQ ID NO: 3023351 - RNA, 23 nt, Human
cagaaguuucugccgcagcccug

SEQ ID NO: 3023352 - RNA, 20 nt, Human
cagaaguuugagaucagccu

SEQ ID NO: 3023353 - RNA, 13 nt, Human
cagccaggccaca

SEQ ID NO: 3023354 - RNA, 12 nt, Human
cagccaggccac

SEQ ID NO: 3023355 - RNA, 23 nt, Human
cagcauauucaggaagcucaggg

SEQ ID NO: 3023356 - RNA, 22 nt, Human
cagcauauucaggaagcucagg

SEQ ID NO: 3023357 - RNA, 19 nt, Human
cagcauauucaggaagcuc

SEQ ID NO: 3023358 - RNA, 15 nt, Human
cagcggggacagcuc

SEQ ID NO: 3023359 - RNA, 14 nt, Human
cagcggggacagcu

SEQ ID NO: 3023360 - RNA, 16 nt, Human
cagcggggacagcucc

SEQ ID NO: 3023361 - RNA, 17 nt, Human
cagcggggacagcuccu

SEQ ID NO: 3023362 - RNA, 15 nt, Human
cagcccuuagcaggg

SEQ ID NO: 3023363 - RNA, 16 nt, Human
cagcccuuagcaggga

SEQ ID NO: 3023364 - RNA, 21 nt, Human
cagcccuuagcagggaaacag

SEQ ID NO: 3023365 - RNA, 21 nt, Human
cagccccuggaugcagccuca

SEQ ID NO: 3023366 - RNA, 19 nt, Human
cagccccuggaugcagccu

SEQ ID NO: 3023367 - RNA, 18 nt, Human
cagccccuggaugcagcc

SEQ ID NO: 3023368 - RNA, 17 nt, Human
cagccccuggaugcagc

SEQ ID NO: 3023369 - RNA, 14 nt, Human
cagccccuggaugc

SEQ ID NO: 3023370 - RNA, 13 nt, Human
cagccccuggaug

SEQ ID NO: 3023371 - RNA, 12 nt, Human
cagccccuggau

SEQ ID NO: 3023372 - RNA, 21 nt, Human
cagccgagauagccaaggcca

SEQ ID NO: 3023373 - RNA, 20 nt, Human
cagccgagauagccaaggcc

SEQ ID NO: 3023374 - RNA, 22 nt, Human
cagcuccagcucaccagcccca

SEQ ID NO: 3023375 - RNA, 16 nt, Human
cagcuccagcucacca

SEQ ID NO: 3023376 - RNA, 17 nt, Human
cagcuccagcucaccag

SEQ ID NO: 3023377 - RNA, 18 nt, Human
cagcuccagcucaccagc

SEQ ID NO: 3023378 - RNA, 20 nt, Human
cagcuccagcucaccagccc

SEQ ID NO: 3023379 - RNA, 13 nt, Human
cagcuccagcuca

SEQ ID NO: 3023380 - RNA, 14 nt, Human
cagcuccagcucac

SEQ ID NO: 3023381 - RNA, 15 nt, Human
cagcuccagcucacc

SEQ ID NO: 3023382 - RNA, 18 nt, Human
cagcugugcucuggacag

SEQ ID NO: 3023383 - RNA, 15 nt, Human
cagcuucauuuccug

SEQ ID NO: 3023384 - RNA, 18 nt, Human
cagcuucauuuccugugu

SEQ ID NO: 3023385 - RNA, 15 nt, Human
caggaaaggcuccag

SEQ ID NO: 3023386 - RNA, 14 nt, Human
caggaaaggcucca

SEQ ID NO: 3023387 - RNA, 15 nt, Human
cagugccaaaaacaa

SEQ ID NO: 3023388 - RNA, 11 nt, Human
cagugggagcu

SEQ ID NO: 3023389 - RNA, 12 nt, Human
cagugcccacag

SEQ ID NO: 3023390 - RNA, 19 nt, Human
cagucugauucccaagcuc

SEQ ID NO: 3023391 - RNA, 20 nt, Human
cagucugauucccaagcucu

SEQ ID NO: 3023392 - RNA, 19 nt, Human
cagugcaugcugucccuua

SEQ ID NO: 3023393 - RNA, 23 nt, Human
cagugcaugcugucccuuacgug

SEQ ID NO: 3023394 - RNA, 22 nt, Human
cagugcaugcugucccuuacgu

SEQ ID NO: 3023395 - RNA, 21 nt, Human
cagggucucacucugucgccc

SEQ ID NO: 3023396 - RNA, 17 nt, Human
cagggucucacucuguc

SEQ ID NO: 3023397 - RNA, 18 nt, Human
cagggucucacucugucg

SEQ ID NO: 3023398 - RNA, 22 nt, Human
caggugcacaagcuccaagcuc

SEQ ID NO: 3023399 - RNA, 12 nt, Human
caggguuggccc

SEQ ID NO: 3023400 - RNA, 16 nt, Human
caggugauccacccac

SEQ ID NO: 3023401 - RNA, 17 nt, Human
caggugauccacccacc

SEQ ID NO: 3023402 - RNA, 14 nt, Human
caggugcgaaagga

SEQ ID NO: 3023403 - RNA, 20 nt, Human
caggugcuaggaacacuccu

SEQ ID NO: 3023404 - RNA, 18 nt, Human
caggugcuaggaacacuc

SEQ ID NO: 3023405 - RNA, 14 nt, Human
cagguugguggggg

SEQ ID NO: 3023406 - RNA, 19 nt, Human
cagucaccccggccaccug

SEQ ID NO: 3023407 - RNA, 20 nt, Human
cagucaccccggccaccugc

SEQ ID NO: 3023408 - RNA, 22 nt, Human
cagucaccccggccaccugcgg

SEQ ID NO: 3023409 - RNA, 18 nt, Human
cagguuuaagcuguuacu

SEQ ID NO: 3023410 - RNA, 16 nt, Human
cagguuuaagcuguua

SEQ ID NO: 3023411 - RNA, 17 nt, Human
caggaggccagccuuga

SEQ ID NO: 3023412 - RNA, 18 nt, Human
caggcacccaccaucaug

SEQ ID NO: 3023413 - RNA, 22 nt, Human
caggcacccaccaucaugucug

SEQ ID NO: 3023414 - RNA, 23 nt, Human
caggcacccaccaucaugucugg

SEQ ID NO: 3023415 - RNA, 16 nt, Human
caggaggccagccuug

SEQ ID NO: 3023416 - RNA, 15 nt, Human
caggaggccagccuu

SEQ ID NO: 3023417 - RNA, 14 nt, Human
caggaggccagccu

SEQ ID NO: 3023418 - RNA, 23 nt, Human
caggccagagggagugacagagg

SEQ ID NO: 3023419 - RNA, 16 nt, Human
caggccagagggagug

SEQ ID NO: 3023420 - RNA, 19 nt, Human
caggccagagggagugaca

SEQ ID NO: 3023421 - RNA, 21 nt, Human
caggccagagggagugacaga

SEQ ID NO: 3023422 - RNA, 22 nt, Human
cagggaguccgaaagggacuug

SEQ ID NO: 3023423 - RNA, 18 nt, Human
cagggaggugaccccagg

SEQ ID NO: 3023424 - RNA, 16 nt, Human
caggcugggcuucagu

SEQ ID NO: 3023425 - RNA, 15 nt, Human
caggcugggcuucag

SEQ ID NO: 3023426 - RNA, 17 nt, Human
caggcugggcuucagug

SEQ ID NO: 3023427 - RNA, 19 nt, Human
caggcugggcuucaguggc

SEQ ID NO: 3023428 - RNA, 16 nt, Human
gcccucaauugugaaa

SEQ ID NO: 3023429 - RNA, 23 nt, Human
gcccgggcucugccucccaucac

SEQ ID NO: 3023430 - RNA, 12 nt, Human
gcccccacuggu

SEQ ID NO: 3023431 - RNA, 17 nt, Human
gccccugccacccuggg

SEQ ID NO: 3023432 - RNA, 16 nt, Human
gccccugccacccugg

SEQ ID NO: 3023433 - RNA, 16 nt, Human
gcccugcagagggcac

SEQ ID NO: 3023434 - RNA, 18 nt, Human
gcccugcagagggcacag

SEQ ID NO: 3023435 - RNA, 11 nt, Human
gcccugccucc

SEQ ID NO: 3023436 - RNA, 22 nt, Human
gcccugcccaccuggccucugc

SEQ ID NO: 3023437 - RNA, 21 nt, Human
gcccugcccaccuggccucug

SEQ ID NO: 3023438 - RNA, 20 nt, Human
gcccugcccaccuggccucu

SEQ ID NO: 3023439 - RNA, 17 nt, Human
gcccugcccaccuggcc

SEQ ID NO: 3023440 - RNA, 19 nt, Human
gccgcagcccugcagaggg

SEQ ID NO: 3023441 - RNA, 20 nt, Human
gccgcagcccugcagagggc

SEQ ID NO: 3023442 - RNA, 22 nt, Human
gcccuuagcagggaaacagcua

SEQ ID NO: 3023443 - RNA, 13 nt, Human
gcccugccuccuu

SEQ ID NO: 3023444 - RNA, 12 nt, Human
gcccugccuccu

SEQ ID NO: 3023445 - RNA, 19 nt, Human
gcccuuagcagggaaacag

SEQ ID NO: 3023446 - RNA, 20 nt, Human
gcccuuagcagggaaacagc

SEQ ID NO: 3023447 - RNA, 20 nt, Human
gccuaggugacagagugaga

SEQ ID NO: 3023448 - RNA, 23 nt, Human
gccuagcauacguacacauuuua

SEQ ID NO: 3023449 - RNA, 21 nt, Human
gccuagcauacguacacauuu

SEQ ID NO: 3023450 - RNA, 22 nt, Human
gccuagcauacguacacauuuu

SEQ ID NO: 3023451 - RNA, 20 nt, Human
gccuagcauacguacacauu

SEQ ID NO: 3023452 - RNA, 13 nt, Human
gccuaggugacag

SEQ ID NO: 3023453 - RNA, 14 nt, Human
gccuaggugacaga

SEQ ID NO: 3023454 - RNA, 15 nt, Human
gccuaggugacagag

SEQ ID NO: 3023455 - RNA, 22 nt, Human
gccugcccaggccccugccacc

SEQ ID NO: 3023456 - RNA, 15 nt, Human
gccugcccaggcccc

SEQ ID NO: 3023457 - RNA, 20 nt, Human
gccugcccaggccccugcca

SEQ ID NO: 3023458 - RNA, 17 nt, Human
gccucgaacuggcugca

SEQ ID NO: 3023459 - RNA, 19 nt, Human
gccuccugugugugcgccu

SEQ ID NO: 3023460 - RNA, 23 nt, Human
gccuccugugugugcgccuacag

SEQ ID NO: 3023461 - RNA, 16 nt, Human
gccucccaaagugcug

SEQ ID NO: 3023462 - RNA, 13 nt, Human
gccuccugugugu

SEQ ID NO: 3023463 - RNA, 17 nt, Human
gccucccaaagugcugg

SEQ ID NO: 3023464 - RNA, 13 nt, Human
gccugcccaggcc

SEQ ID NO: 3023465 - RNA, 14 nt, Human
gccugcccaggccc

SEQ ID NO: 3023466 - RNA, 14 nt, Human
gccucuuggguuca

SEQ ID NO: 3023467 - RNA, 21 nt, Human
gccucuuaugggcuggguucu

SEQ ID NO: 3023468 - RNA, 20 nt, Human
gccucgaacuggcugcaaag

SEQ ID NO: 3023469 - RNA, 22 nt, Human
gccucgaacuggcugcaaaggg

SEQ ID NO: 3023470 - RNA, 16 nt, Human
gccucuuaugggcugg

SEQ ID NO: 3023471 - RNA, 18 nt, Human
gccucuuaugggcugggu

SEQ ID NO: 3023472 - RNA, 17 nt, Human
gccucuuaugggcuggg

SEQ ID NO: 3023473 - RNA, 20 nt, Human
gccuggccugagcugggaug

SEQ ID NO: 3023474 - RNA, 18 nt, Human
gccuggccugagcuggga

SEQ ID NO: 3023475 - RNA, 14 nt, Human
gccuggccugagcu

SEQ ID NO: 3023476 - RNA, 13 nt, Human
gccuggccugagc

SEQ ID NO: 3023477 - RNA, 18 nt, Human
gccugugccucugggacu

SEQ ID NO: 3023478 - RNA, 13 nt, Human
gccuggcucaggu

SEQ ID NO: 3023479 - RNA, 16 nt, Human
gccugugccucuggga

SEQ ID NO: 3023480 - RNA, 17 nt, Human
gccugugccucugggac

SEQ ID NO: 3023481 - RNA, 14 nt, Human
gccuguugggccag

SEQ ID NO: 3023482 - RNA, 20 nt, Human
gccuguugggccaggagccu

SEQ ID NO: 3023483 - RNA, 18 nt, Human
gccuguugggccaggagc

SEQ ID NO: 3023484 - RNA, 16 nt, Human
gccuguugggccagga

SEQ ID NO: 3023485 - RNA, 15 nt, Human
gccuguugggccagg

SEQ ID NO: 3023486 - RNA, 22 nt, Human
gcgaucuggguucacugcaacc

SEQ ID NO: 3023487 - RNA, 17 nt, Human
gcgagcccugguggcag

SEQ ID NO: 3023488 - RNA, 15 nt, Human
gcgagcccugguggc

SEQ ID NO: 3023489 - RNA, 20 nt, Human
gccuugaccauucuccaccu

SEQ ID NO: 3023490 - RNA, 19 nt, Human
gccuugaccauucuccacc

SEQ ID NO: 3023491 - RNA, 17 nt, Human
gccuugaccauucucca

SEQ ID NO: 3023492 - RNA, 16 nt, Human
gccuugaccauucucc

SEQ ID NO: 3023493 - RNA, 19 nt, Human
gcuccaccuugcagcucuc

SEQ ID NO: 3023494 - RNA, 20 nt, Human
gcuccagcucaccagcccca

SEQ ID NO: 3023495 - RNA, 21 nt, Human
gcuccagcucaccagccccag

SEQ ID NO: 3023496 - RNA, 17 nt, Human
gcuccagcucaccagcc

SEQ ID NO: 3023497 - RNA, 18 nt, Human
gcuccagcucaccagccc

SEQ ID NO: 3023498 - RNA, 15 nt, Human
gcuccuggcccacug

SEQ ID NO: 3023499 - RNA, 14 nt, Human
gcuccuggcccacu

SEQ ID NO: 3023500 - RNA, 20 nt, Human
gcuccuggcccacugcaucg

SEQ ID NO: 3023501 - RNA, 19 nt, Human
gcuccuggcccacugcauc

SEQ ID NO: 3023502 - RNA, 18 nt, Human
gcuccuggcccacugcau

SEQ ID NO: 3023503 - RNA, 23 nt, Human
gcucugaucauccacugugccau

SEQ ID NO: 3023504 - RNA, 17 nt, Human
gcucugaucauccacug

SEQ ID NO: 3023505 - RNA, 23 nt, Human
gcucugcaagaauugaagcagga

SEQ ID NO: 3023506 - RNA, 11 nt, Human
gcucugcccuu

SEQ ID NO: 3023507 - RNA, 17 nt, Human
gcuaggccuggccagau

SEQ ID NO: 3023508 - RNA, 23 nt, Human
gcuaggccuggccagaugcacca

SEQ ID NO: 3023509 - RNA, 16 nt, Human
gcuaggccuggccaga

SEQ ID NO: 3023510 - RNA, 19 nt, Human
gcuauucaguaauaacucu

SEQ ID NO: 3023511 - RNA, 13 nt, Human
gcuaugcauuuga

SEQ ID NO: 3023512 - RNA, 12 nt, Human
gcuaugcauuug

SEQ ID NO: 3023513 - RNA, 22 nt, Human
gcuagugugguguuuccuggca

SEQ ID NO: 3023514 - RNA, 21 nt, Human
gcuagugugguguuuccuggc

SEQ ID NO: 3023515 - RNA, 13 nt, Human
gcucagagagggu

SEQ ID NO: 3023516 - RNA, 14 nt, Human
gcucagagagggug

SEQ ID NO: 3023517 - RNA, 16 nt, Human
gcucaggugucccugc

SEQ ID NO: 3023518 - RNA, 14 nt, Human
gcucaggugucccu

SEQ ID NO: 3023519 - RNA, 23 nt, Human
gcucagguggggucacucuggca

SEQ ID NO: 3023520 - RNA, 17 nt, Human
gcucacugcagccucaa

SEQ ID NO: 3023521 - RNA, 15 nt, Human
gcucacugcagccuc

SEQ ID NO: 3023522 - RNA, 16 nt, Human
gcucacugcagccuca

SEQ ID NO: 3023523 - RNA, 11 nt, Human
gcucacugcag

SEQ ID NO: 3023524 - RNA, 12 nt, Human
gcucacugcagc

SEQ ID NO: 3023525 - RNA, 13 nt, Human
gcucacugcagcc

SEQ ID NO: 3023526 - RNA, 14 nt, Human
gcucacugcagccu

SEQ ID NO: 3023527 - RNA, 18 nt, Human
gcuauucaguaauaacuc

SEQ ID NO: 3023528 - RNA, 20 nt, Human
gcuauucaguaauaacucua

SEQ ID NO: 3023529 - RNA, 20 nt, Human
gcgugcacacaccagagccc

SEQ ID NO: 3023530 - RNA, 21 nt, Human
gcgggaggauguucugggaca

SEQ ID NO: 3023531 - RNA, 22 nt, Human
gcgggaggauguucugggacac

SEQ ID NO: 3023532 - RNA, 20 nt, Human
gcgggaggauguucugggac

SEQ ID NO: 3023533 - RNA, 19 nt, Human
gcgugcacacaccagagcc

SEQ ID NO: 3023534 - RNA, 23 nt, Human
gcgugcacacaccagagcccacc

SEQ ID NO: 3023535 - RNA, 18 nt, Human
gcguuucuaugacacaug

SEQ ID NO: 3023536 - RNA, 23 nt, Human
gcuaagugauccucccaccucag

SEQ ID NO: 3023537 - RNA, 13 nt, Human
gcuaaugggacac

SEQ ID NO: 3023538 - RNA, 15 nt, Human
gcuaaugggacacua

SEQ ID NO: 3023539 - RNA, 23 nt, Human
ggaacagaagaggaaagagagac

SEQ ID NO: 3023540 - RNA, 16 nt, Human
ggaacacucugagacu

SEQ ID NO: 3023541 - RNA, 15 nt, Human
ggaacacucugagac

SEQ ID NO: 3023542 - RNA, 19 nt, Human
ggaacacuccuucacagau

SEQ ID NO: 3023543 - RNA, 14 nt, Human
ggaacacucugaga

SEQ ID NO: 3023544 - RNA, 12 nt, Human
ggaacacucuga

SEQ ID NO: 3023545 - RNA, 15 nt, Human
ggaagagaaaaaaua

SEQ ID NO: 3023546 - RNA, 18 nt, Human
ggaagacuuuggaaagag

SEQ ID NO: 3023547 - RNA, 13 nt, Human
ggaagagaaaaaa

SEQ ID NO: 3023548 - RNA, 22 nt, Human
ggaagacaaugugaaaagaaaa

SEQ ID NO: 3023549 - RNA, 14 nt, Human
ggaagacagcucuu

SEQ ID NO: 3023550 - RNA, 13 nt, Human
ggaagacagcucu

SEQ ID NO: 3023551 - RNA, 12 nt, Human
ggaagacuuugg

SEQ ID NO: 3023552 - RNA, 17 nt, Human
ggaagacuuuggaaaga

SEQ ID NO: 3023553 - RNA, 13 nt, Human
ggaagacuuugga

SEQ ID NO: 3023554 - RNA, 15 nt, Human
ggaagccgcuggggc

SEQ ID NO: 3023555 - RNA, 20 nt, Human
ggaaggaaacccagcucugg

SEQ ID NO: 3023556 - RNA, 19 nt, Human
ggaaggaaacccagcucug

SEQ ID NO: 3023557 - RNA, 22 nt, Human
ggaagcucagggccuggcucag

SEQ ID NO: 3023558 - RNA, 11 nt, Human
ggaagcuccgc

SEQ ID NO: 3023559 - RNA, 23 nt, Human
ggaagcucagggccuggcucagg

SEQ ID NO: 3023560 - RNA, 15 nt, Human
ggaagcucagggccu

SEQ ID NO: 3023561 - RNA, 16 nt, Human
ggaaggaaacccagcu

SEQ ID NO: 3023562 - RNA, 17 nt, Human
ggacacuaaccacgcug

SEQ ID NO: 3023563 - RNA, 22 nt, Human
ggacacuaaccacgcuggaccu

SEQ ID NO: 3023564 - RNA, 19 nt, Human
ggacagcuccuucuguccu

SEQ ID NO: 3023565 - RNA, 20 nt, Human
ggacagcuccuucuguccua

SEQ ID NO: 3023566 - RNA, 17 nt, Human
ggacagcuccuucuguc

SEQ ID NO: 3023567 - RNA, 14 nt, Human
ggacacagcucuuc

SEQ ID NO: 3023568 - RNA, 15 nt, Human
ggacacagcucuucu

SEQ ID NO: 3023569 - RNA, 18 nt, Human
ggacacagcucuucucca

SEQ ID NO: 3023570 - RNA, 13 nt, Human
ggacaagagcagg

SEQ ID NO: 3023571 - RNA, 23 nt, Human
ggacaaggaugaucuaggaagac

SEQ ID NO: 3023572 - RNA, 22 nt, Human
ggacaaggaugaucuaggaaga

SEQ ID NO: 3023573 - RNA, 16 nt, Human
ggaauccagacccggc

SEQ ID NO: 3023574 - RNA, 18 nt, Human
ggaauaacauguaauuaa

SEQ ID NO: 3023575 - RNA, 12 nt, Human
ggacccccugaa

SEQ ID NO: 3023576 - RNA, 11 nt, Human
ggacccugagg

SEQ ID NO: 3023577 - RNA, 13 nt, Human
ggacccugaggcc

SEQ ID NO: 3023578 - RNA, 12 nt, Human
ggacccugaggc

SEQ ID NO: 3023579 - RNA, 12 nt, Human
ggaccucaggcc

SEQ ID NO: 3023580 - RNA, 13 nt, Human
ggaccucaggccu

SEQ ID NO: 3023581 - RNA, 20 nt, Human
ggacguguuaugacuccaga

SEQ ID NO: 3023582 - RNA, 15 nt, Human
ggaccucaggccugg

SEQ ID NO: 3023583 - RNA, 14 nt, Human
ggaccucaggccug

SEQ ID NO: 3023584 - RNA, 14 nt, Human
ggacuuggaagcuc

SEQ ID NO: 3023585 - RNA, 16 nt, Human
ggagaaaggaagggcu

SEQ ID NO: 3023586 - RNA, 20 nt, Human
ggacuaacuugucuuuggac

SEQ ID NO: 3023587 - RNA, 15 nt, Human
ggacucaaugcacug

SEQ ID NO: 3023588 - RNA, 14 nt, Human
ggacuacaggugug

SEQ ID NO: 3023589 - RNA, 24 nt, Human
ggacuaacuugucuuuggacccug

SEQ ID NO: 3023590 - RNA, 16 nt, Human
ggacucaaugcacuga

SEQ ID NO: 3023591 - RNA, 16 nt, Human
gcuuguacacucauuc

SEQ ID NO: 3023592 - RNA, 20 nt, Human
gcuuguaaauagcucaggug

SEQ ID NO: 3023593 - RNA, 14 nt, Human
gcuugagcucagga

SEQ ID NO: 3023594 - RNA, 22 nt, Human
gcuugaccuuuaagagaaauga

SEQ ID NO: 3023595 - RNA, 12 nt, Human
gcuuguacauaa

SEQ ID NO: 3023596 - RNA, 23 nt, Human
gcuucuucagagacuccugcagg

SEQ ID NO: 3023597 - RNA, 22 nt, Human
gcuuccucauaguaugguggcu

SEQ ID NO: 3023598 - RNA, 18 nt, Human
gcuucaaggauccugagc

SEQ ID NO: 3023599 - RNA, 19 nt, Human
gcuucaaggauccugagcc

SEQ ID NO: 3023600 - RNA, 21 nt, Human
gcuucaaggauccugagccag

SEQ ID NO: 3023601 - RNA, 20 nt, Human
gcuucaaggauccugagcca

SEQ ID NO: 3023602 - RNA, 15 nt, Human
gcuucacggaagagc

SEQ ID NO: 3023603 - RNA, 17 nt, Human
gcuucacggaagagccu

SEQ ID NO: 3023604 - RNA, 12 nt, Human
gcuucagccucc

SEQ ID NO: 3023605 - RNA, 18 nt, Human
gcuucacggaagagccuu

SEQ ID NO: 3023606 - RNA, 13 nt, Human
gcugcuggcuggu

SEQ ID NO: 3023607 - RNA, 16 nt, Human
gcucugguccauagag

SEQ ID NO: 3023608 - RNA, 15 nt, Human
gcucugguccauaga

SEQ ID NO: 3023609 - RNA, 15 nt, Human
gcugcugaaggcucg

SEQ ID NO: 3023610 - RNA, 14 nt, Human
gcugcugaaggcuc

SEQ ID NO: 3023611 - RNA, 13 nt, Human
gcugcugaaggcu

SEQ ID NO: 3023612 - RNA, 20 nt, Human
gcuggcgugcaguggugcga

SEQ ID NO: 3023613 - RNA, 18 nt, Human
gcuggagugcagugagcc

SEQ ID NO: 3023614 - RNA, 17 nt, Human
gcuggagugcagugagc

SEQ ID NO: 3023615 - RNA, 22 nt, Human
gcuggagugcagugagccgaga

SEQ ID NO: 3023616 - RNA, 20 nt, Human
gcuggccuggccccucaggg

SEQ ID NO: 3023617 - RNA, 23 nt, Human
gcuggguggcaccagcagccugg

SEQ ID NO: 3023618 - RNA, 22 nt, Human
gcuggguggcaccagcagccug

SEQ ID NO: 3023619 - RNA, 21 nt, Human
gcuggguggcaccagcagccu

SEQ ID NO: 3023620 - RNA, 15 nt, Human
gcuggcuguuggcug

SEQ ID NO: 3023621 - RNA, 16 nt, Human
gcuggcuguuggcugg

SEQ ID NO: 3023622 - RNA, 23 nt, Human
aaacaugcuguacauacuuuuug

SEQ ID NO: 3023623 - RNA, 17 nt, Human
aaacauggccuuugcuu

SEQ ID NO: 3023624 - RNA, 16 nt, Human
aaacauggccuuugcu

SEQ ID NO: 3023625 - RNA, 18 nt, Human
ggggaauguuugccucug

SEQ ID NO: 3023626 - RNA, 22 nt, Human
ggggaauguuugccucugccuc

SEQ ID NO: 3023627 - RNA, 15 nt, Human
ggggaccagagcugc

SEQ ID NO: 3023628 - RNA, 16 nt, Human
ggggaccagagcugcc

SEQ ID NO: 3023629 - RNA, 12 nt, Human
gggggccucagu

SEQ ID NO: 3023630 - RNA, 15 nt, Human
gggggccucagugcc

SEQ ID NO: 3023631 - RNA, 17 nt, Human
gggggccucagugccac

SEQ ID NO: 3023632 - RNA, 18 nt, Human
gggggccucagugccacu

SEQ ID NO: 3023633 - RNA, 15 nt, Human
aaacacauuaaaggu

SEQ ID NO: 3023634 - RNA, 11 nt, Human
aaacacauuaa

SEQ ID NO: 3023635 - RNA, 11 nt, Human
aaacacauuuu

SEQ ID NO: 3023636 - RNA, 21 nt, Human
aaacacauuaaagguacuuug

SEQ ID NO: 3023637 - RNA, 19 nt, Human
aaacacaaacgggcucagc

SEQ ID NO: 3023638 - RNA, 20 nt, Human
aaaauuuugauguuuuaagg

SEQ ID NO: 3023639 - RNA, 19 nt, Human
aaaauuuagaaauauaauu

SEQ ID NO: 3023640 - RNA, 13 nt, Human
gggaugagaaagg

SEQ ID NO: 3023641 - RNA, 19 nt, Human
ggguggcaccagcagccug

SEQ ID NO: 3023642 - RNA, 17 nt, Human
aaacuuaaucuaaaugg

SEQ ID NO: 3023643 - RNA, 18 nt, Human
aaacuuaaucuaaaugga

SEQ ID NO: 3023644 - RNA, 16 nt, Human
aaacuuaaucuaaaug

SEQ ID NO: 3023645 - RNA, 14 nt, Human
aaacuuaaucuaaa

SEQ ID NO: 3023646 - RNA, 15 nt, Human
aaacgggcucagcaa

SEQ ID NO: 3023647 - RNA, 23 nt, Human
aaaccaagucaagugaaaaagga

SEQ ID NO: 3023648 - RNA, 14 nt, Human
aaagcuuuugcaua

SEQ ID NO: 3023649 - RNA, 22 nt, Human
aaaggaaagagggagguaagga

SEQ ID NO: 3023650 - RNA, 17 nt, Human
aaaggagauuggaagga

SEQ ID NO: 3023651 - RNA, 17 nt, Human
aaaggagagcuagcagc

SEQ ID NO: 3023652 - RNA, 21 nt, Human
aaaggagagcuagcagcaggg

SEQ ID NO: 3023653 - RNA, 22 nt, Human
aaagggacuuggaagcuccgcu

SEQ ID NO: 3023654 - RNA, 13 nt, Human
aaagcuuuugcau

SEQ ID NO: 3023655 - RNA, 15 nt, Human
aaagcuuguuaagau

SEQ ID NO: 3023656 - RNA, 13 nt, Human
aaagcugcugaca

SEQ ID NO: 3023657 - RNA, 15 nt, Human
aaagcucacuuuacu

SEQ ID NO: 3023658 - RNA, 13 nt, Human
gguggaugccugg

SEQ ID NO: 3023659 - RNA, 12 nt, Human
ggugcaaugacc

SEQ ID NO: 3023660 - RNA, 13 nt, Human
ggugcaaugaccu

SEQ ID NO: 3023661 - RNA, 18 nt, Human
ggugauccacccaccuca

SEQ ID NO: 3023662 - RNA, 23 nt, Human
ggugauccacccaccucagccuc

SEQ ID NO: 3023663 - RNA, 24 nt, Human
ggugauccacccaccucagccucc

SEQ ID NO: 3023664 - RNA, 13 nt, Human
ggugaacagaaca

SEQ ID NO: 3023665 - RNA, 13 nt, Human
ggucgaggcagga

SEQ ID NO: 3023666 - RNA, 14 nt, Human
ggguggggcagugc

SEQ ID NO: 3023667 - RNA, 14 nt, Human
ggguggccucccaa

SEQ ID NO: 3023668 - RNA, 11 nt, Human
gguccugcugc

SEQ ID NO: 3023669 - RNA, 12 nt, Human
gguccugcugca

SEQ ID NO: 3023670 - RNA, 23 nt, Human
aaagacugaguacguugugcauu

SEQ ID NO: 3023671 - RNA, 13 nt, Human
aaagacuguacaa

SEQ ID NO: 3023672 - RNA, 14 nt, Human
aaagacuguacaaa

SEQ ID NO: 3023673 - RNA, 19 nt, Human
aaagaugcuucucacugcc

SEQ ID NO: 3023674 - RNA, 14 nt, Human
aaagaugcuucuca

SEQ ID NO: 3023675 - RNA, 17 nt, Human
aaagaugcuucucacug

SEQ ID NO: 3023676 - RNA, 16 nt, Human
aaagguacuuugcagg

SEQ ID NO: 3023677 - RNA, 20 nt, Human
aaaguacacuguuucaaacu

SEQ ID NO: 3023678 - RNA, 19 nt, Human
aaaguacuucuccacccug

SEQ ID NO: 3023679 - RNA, 23 nt, Human
aaaguacuucuccacccugcucu

SEQ ID NO: 3023680 - RNA, 20 nt, Human
aaaguacuucuccacccugc

SEQ ID NO: 3023681 - RNA, 21 nt, Human
aaaguacuucuccacccugcu

SEQ ID NO: 3023682 - RNA, 18 nt, Human
aaaguaucccuacuguaa

SEQ ID NO: 3023683 - RNA, 14 nt, Human
guaacucuguaauu

SEQ ID NO: 3023684 - RNA, 22 nt, Human
guaauuugugauacaaugcugu

SEQ ID NO: 3023685 - RNA, 14 nt, Human
guaauaugcacaca

SEQ ID NO: 3023686 - RNA, 16 nt, Human
guaauaugcacacauu

SEQ ID NO: 3023687 - RNA, 17 nt, Human
guaauaugcacacauuu

SEQ ID NO: 3023688 - RNA, 18 nt, Human
guaauaugcacacauuuu

SEQ ID NO: 3023689 - RNA, 14 nt, Human
aaauauaauugaca

SEQ ID NO: 3023690 - RNA, 18 nt, Human
aaauaccagccaguaaau

SEQ ID NO: 3023691 - RNA, 17 nt, Human
aaauacagauagauaua

SEQ ID NO: 3023692 - RNA, 21 nt, Human
guacucugccacuuuauuucu

SEQ ID NO: 3023693 - RNA, 15 nt, Human
guacuauguaucaau

SEQ ID NO: 3023694 - RNA, 17 nt, Human
guacuauguaucaauga

SEQ ID NO: 3023695 - RNA, 17 nt, Human
guacuacaguccuccca

SEQ ID NO: 3023696 - RNA, 13 nt, Human
guacuauguauca

SEQ ID NO: 3023697 - RNA, 13 nt, Human
guacccacugcuc

SEQ ID NO: 3023698 - RNA, 14 nt, Human
guacccacugcucu

SEQ ID NO: 3023699 - RNA, 19 nt, Human
guacuacaguccucccauc

SEQ ID NO: 3023700 - RNA, 18 nt, Human
guacuacaguccucccau

SEQ ID NO: 3023701 - RNA, 16 nt, Human
guacuggagaaaaugg

SEQ ID NO: 3023702 - RNA, 20 nt, Human
guagacgugcacgcacacug

SEQ ID NO: 3023703 - RNA, 23 nt, Human
guagacgugcacgcacacugucu

SEQ ID NO: 3023704 - RNA, 11 nt, Human
guagagacagg

SEQ ID NO: 3023705 - RNA, 12 nt, Human
guagagacaggg

SEQ ID NO: 3023706 - RNA, 16 nt, Human
guagacaguuggguuu

SEQ ID NO: 3023707 - RNA, 15 nt, Human
guagagccagggucu

SEQ ID NO: 3023708 - RNA, 13 nt, Human
guagagacagggu

SEQ ID NO: 3023709 - RNA, 10 nt, Human
guagagccag

SEQ ID NO: 3023710 - RNA, 11 nt, Human
guagagccagg

SEQ ID NO: 3023711 - RNA, 14 nt, Human
guagaauguuuuca

SEQ ID NO: 3023712 - RNA, 18 nt, Human
guagaagcccuucuaccu

SEQ ID NO: 3023713 - RNA, 21 nt, Human
guagaagucuuagauguauau

SEQ ID NO: 3023714 - RNA, 20 nt, Human
guagaaauaucugaaaaugu

SEQ ID NO: 3023715 - RNA, 21 nt, Human
guagaaauaucugaaaaugua

SEQ ID NO: 3023716 - RNA, 23 nt, Human
guagaaauaucugaaaauguaug

SEQ ID NO: 3023717 - RNA, 12 nt, Human
guacccacugcu

SEQ ID NO: 3023718 - RNA, 19 nt, Human
guacauggaauaacaugua

SEQ ID NO: 3023719 - RNA, 17 nt, Human
guacaugaaaacacauu

SEQ ID NO: 3023720 - RNA, 18 nt, Human
guacaugaaaacacauuu

SEQ ID NO: 3023721 - RNA, 19 nt, Human
guacaugaaaacacauuuu

SEQ ID NO: 3023722 - RNA, 20 nt, Human
guacaugaaaacacauuuuu

SEQ ID NO: 3023723 - RNA, 14 nt, Human
guacaugaaaacac

SEQ ID NO: 3023724 - RNA, 15 nt, Human
guacaugaaaacaca

SEQ ID NO: 3023725 - RNA, 16 nt, Human
guacaugaaaacacau

SEQ ID NO: 3023726 - RNA, 19 nt, Human
aaauauuaagaaagacuau

SEQ ID NO: 3023727 - RNA, 16 nt, Human
aaaucagcugcuacua

SEQ ID NO: 3023728 - RNA, 18 nt, Human
aaaucagccugcuccagc

SEQ ID NO: 3023729 - RNA, 12 nt, Human
aaaucagccugc

SEQ ID NO: 3023730 - RNA, 19 nt, Human
aaaucagccguguaaccau

SEQ ID NO: 3023731 - RNA, 20 nt, Human
aaaaggaagcuuacaugccu

SEQ ID NO: 3023732 - RNA, 21 nt, Human
gggagaaccaaaaagaggcua

SEQ ID NO: 3023733 - RNA, 15 nt, Human
gggacuuggaagcuc

SEQ ID NO: 3023734 - RNA, 17 nt, Human
gggacuuggaagcuccg

SEQ ID NO: 3023735 - RNA, 18 nt, Human
gggacuuggaagcuccgc

SEQ ID NO: 3023736 - RNA, 23 nt, Human
gggacuuggaagcuccgcuuucu

SEQ ID NO: 3023737 - RNA, 23 nt, Human
gggagcaggcucgggcuccccag

SEQ ID NO: 3023738 - RNA, 19 nt, Human
gggagagccuuccaggggu

SEQ ID NO: 3023739 - RNA, 15 nt, Human
gggagagccuuccag

SEQ ID NO: 3023740 - RNA, 16 nt, Human
gggagggagggcucca

SEQ ID NO: 3023741 - RNA, 15 nt, Human
gggagggagggcucc

SEQ ID NO: 3023742 - RNA, 18 nt, Human
gggaggucaaggcugcag

SEQ ID NO: 3023743 - RNA, 13 nt, Human
aaaacaugcuaca

SEQ ID NO: 3023744 - RNA, 14 nt, Human
aaaacaugcuacac

SEQ ID NO: 3023745 - RNA, 12 nt, Human
aaaacccaagug

SEQ ID NO: 3023746 - RNA, 20 nt, Human
gggaccagagcugccaccug

SEQ ID NO: 3023747 - RNA, 14 nt, Human
gggaccagagcugc

SEQ ID NO: 3023748 - RNA, 18 nt, Human
aaaacucuccucugcugc

SEQ ID NO: 3023749 - RNA, 22 nt, Human
ggcuucauccuccucagaucuu

SEQ ID NO: 3023750 - RNA, 18 nt, Human
ggcuucauccuccucaga

SEQ ID NO: 3023751 - RNA, 16 nt, Human
ggcuuccucauaguau

SEQ ID NO: 3023752 - RNA, 18 nt, Human
ggcuucaguggcagcugc

SEQ ID NO: 3023753 - RNA, 17 nt, Human
ggcuucaguggcagcug

SEQ ID NO: 3023754 - RNA, 19 nt, Human
ggcuucaguggcagcugcu

SEQ ID NO: 3023755 - RNA, 20 nt, Human
ggcuucaguggcagcugcuu

SEQ ID NO: 3023756 - RNA, 18 nt, Human
ggcuguaucccaugagcc

SEQ ID NO: 3023757 - RNA, 19 nt, Human
ggcuggguggcaccagcag

SEQ ID NO: 3023758 - RNA, 21 nt, Human
ggcuggguucuacccaggugc

SEQ ID NO: 3023759 - RNA, 19 nt, Human
ggcuggguucuacccaggu

SEQ ID NO: 3023760 - RNA, 15 nt, Human
ggcugggggccucag

SEQ ID NO: 3023761 - RNA, 16 nt, Human
ggcugggggccucagu

SEQ ID NO: 3023762 - RNA, 17 nt, Human
ggcugggggccucagug

SEQ ID NO: 3023763 - RNA, 19 nt, Human
ggcugggggccucagugcc

SEQ ID NO: 3023764 - RNA, 21 nt, Human
ggcuuccuccugguguggaag

SEQ ID NO: 3023765 - RNA, 18 nt, Human
gggaagaagcucucuccu

SEQ ID NO: 3023766 - RNA, 12 nt, Human
gggacagcuccu

SEQ ID NO: 3023767 - RNA, 13 nt, Human
gggacagcuccuu

SEQ ID NO: 3023768 - RNA, 13 nt, Human
gggaagagacuug

SEQ ID NO: 3023769 - RNA, 15 nt, Human
gggacagcuccuucu

SEQ ID NO: 3023770 - RNA, 18 nt, Human
ggcugaacuuuguggucg

SEQ ID NO: 3023771 - RNA, 22 nt, Human
ggcugcaugcgggcuuccuccu

SEQ ID NO: 3023772 - RNA, 20 nt, Human
ggcugccaaugggagcucau

SEQ ID NO: 3023773 - RNA, 19 nt, Human
ggcugccaaugggagcuca

SEQ ID NO: 3023774 - RNA, 22 nt, Human
ggcugcggaaugaaccacaucu

SEQ ID NO: 3023775 - RNA, 11 nt, Human
ggcucucaggc

SEQ ID NO: 3023776 - RNA, 13 nt, Human
ggcucucaggcca

SEQ ID NO: 3023777 - RNA, 12 nt, Human
ggcucuuccagg

SEQ ID NO: 3023778 - RNA, 16 nt, Human
ggcugggagagccuuc

SEQ ID NO: 3023779 - RNA, 15 nt, Human
ggcugggagagccuu

SEQ ID NO: 3023780 - RNA, 14 nt, Human
ggcugggagagccu

SEQ ID NO: 3023781 - RNA, 13 nt, Human
ggcugggagagcc

SEQ ID NO: 3023782 - RNA, 20 nt, Human
ggcucagguggggucacucu

SEQ ID NO: 3023783 - RNA, 19 nt, Human
ggcucagguggggucacuc

SEQ ID NO: 3023784 - RNA, 19 nt, Human
ggcucagcggggacagcuc

SEQ ID NO: 3023785 - RNA, 20 nt, Human
ggcucagcggggacagcucc

SEQ ID NO: 3023786 - RNA, 18 nt, Human
ggcucagcggggacagcu

SEQ ID NO: 3023787 - RNA, 19 nt, Human
ggcccuuuuucaauaacug

SEQ ID NO: 3023788 - RNA, 23 nt, Human
ggcccuucucuccagccccugga

SEQ ID NO: 3023789 - RNA, 22 nt, Human
ggcccuucucuccagccccugg

SEQ ID NO: 3023790 - RNA, 23 nt, Human
ggccucaagugauucuccugccu

SEQ ID NO: 3023791 - RNA, 23 nt, Human
ggccccugcugguucaggguugg

SEQ ID NO: 3023792 - RNA, 13 nt, Human
ggcccggcuccag

SEQ ID NO: 3023793 - RNA, 13 nt, Human
ggccccugcuggu

SEQ ID NO: 3023794 - RNA, 14 nt, Human
ggccccugcugguu

SEQ ID NO: 3023795 - RNA, 15 nt, Human
ggcccggcuccaggc

SEQ ID NO: 3023796 - RNA, 21 nt, Human
ggcccuucucuccagccccug

SEQ ID NO: 3023797 - RNA, 20 nt, Human
ggcccuucucuccagccccu

SEQ ID NO: 3023798 - RNA, 19 nt, Human
ggcccuucucuccagcccc

SEQ ID NO: 3023799 - RNA, 17 nt, Human
ggccaguuggucccccu

SEQ ID NO: 3023800 - RNA, 14 nt, Human
ggccaguugguccc

SEQ ID NO: 3023801 - RNA, 20 nt, Human
ggccagugugacaaggauug

SEQ ID NO: 3023802 - RNA, 20 nt, Human
ggcacugguuuguucccugu

SEQ ID NO: 3023803 - RNA, 23 nt, Human
ggcagccccauucugccugccca

SEQ ID NO: 3023804 - RNA, 11 nt, Human
ggcagccccug

SEQ ID NO: 3023805 - RNA, 19 nt, Human
ggcacagaaaauggaagac

SEQ ID NO: 3023806 - RNA, 21 nt, Human
ggcacagaaaauggaagacag

SEQ ID NO: 3023807 - RNA, 20 nt, Human
ggcacagaaaauggaagaca

SEQ ID NO: 3023808 - RNA, 23 nt, Human
ggcacucagaagacacugauggg

SEQ ID NO: 3023809 - RNA, 20 nt, Human
ggcacucagaagacacugau

SEQ ID NO: 3023810 - RNA, 13 nt, Human
ggcacaucagcac

SEQ ID NO: 3023811 - RNA, 23 nt, Human
ggcacagaaaauggaagacagcu

SEQ ID NO: 3023812 - RNA, 16 nt, Human
ggagagaagagaaugc

SEQ ID NO: 3023813 - RNA, 20 nt, Human
ggcaguggugguuuucuguu

SEQ ID NO: 3023814 - RNA, 21 nt, Human
ggcaguggugguuuucuguuc

SEQ ID NO: 3023815 - RNA, 22 nt, Human
ggcagccccuguucuggcagag

SEQ ID NO: 3023816 - RNA, 21 nt, Human
gacccucucaaacuaacaggc

SEQ ID NO: 3023817 - RNA, 12 nt, Human
gacgcugugcug

SEQ ID NO: 3023818 - RNA, 13 nt, Human
gacgcugugcugc

SEQ ID NO: 3023819 - RNA, 22 nt, Human
gacuuugguuauuuuacuuuuu

SEQ ID NO: 3023820 - RNA, 20 nt, Human
gacuuuuccaacccucauca

SEQ ID NO: 3023821 - RNA, 22 nt, Human
gacuuuguuaguuucuccaagc

SEQ ID NO: 3023822 - RNA, 21 nt, Human
gacuuuucuguccgagcuuug

SEQ ID NO: 3023823 - RNA, 14 nt, Human
gacuuuggaaagag

SEQ ID NO: 3023824 - RNA, 14 nt, Human
gacuuuggaaagac

SEQ ID NO: 3023825 - RNA, 18 nt, Human
gacuguuuucucuugaga

SEQ ID NO: 3023826 - RNA, 16 nt, Human
gacuguuuucucuuga

SEQ ID NO: 3023827 - RNA, 22 nt, Human
gacuguacaaaguagaagucuu

SEQ ID NO: 3023828 - RNA, 17 nt, Human
gacucaaugcacugaca

SEQ ID NO: 3023829 - RNA, 14 nt, Human
gacucaaugcacug

SEQ ID NO: 3023830 - RNA, 16 nt, Human
gagaagcggcuggcag

SEQ ID NO: 3023831 - RNA, 17 nt, Human
gagaagcggcuggcagc

SEQ ID NO: 3023832 - RNA, 15 nt, Human
gaccaucccugaagg

SEQ ID NO: 3023833 - RNA, 14 nt, Human
gaccaucccugaag

SEQ ID NO: 3023834 - RNA, 16 nt, Human
gaccauucuccaccug

SEQ ID NO: 3023835 - RNA, 17 nt, Human
gaccaucccugaaggcc

SEQ ID NO: 3023836 - RNA, 16 nt, Human
gaccaucccugaaggc

SEQ ID NO: 3023837 - RNA, 12 nt, Human
gacccggcugcg

SEQ ID NO: 3023838 - RNA, 13 nt, Human
gacccggcugcgu

SEQ ID NO: 3023839 - RNA, 16 nt, Human
gacccuauugcugcuu

SEQ ID NO: 3023840 - RNA, 13 nt, Human
gacagcuccuucu

SEQ ID NO: 3023841 - RNA, 14 nt, Human
gacagcuccuucug

SEQ ID NO: 3023842 - RNA, 15 nt, Human
gacagcuccuucugu

SEQ ID NO: 3023843 - RNA, 20 nt, Human
gaggccagagacacaagccu

SEQ ID NO: 3023844 - RNA, 17 nt, Human
gaggcucugcccuuggu

SEQ ID NO: 3023845 - RNA, 15 nt, Human
gaggcucugcccuug

SEQ ID NO: 3023846 - RNA, 14 nt, Human
gaggcucugcccuu

SEQ ID NO: 3023847 - RNA, 13 nt, Human
gaggcucugcccu

SEQ ID NO: 3023848 - RNA, 12 nt, Human
gaggcucugccc

SEQ ID NO: 3023849 - RNA, 12 nt, Human
gaggggaacaga

SEQ ID NO: 3023850 - RNA, 15 nt, Human
gagggcuccagacac

SEQ ID NO: 3023851 - RNA, 14 nt, Human
gagggcuccagaca

SEQ ID NO: 3023852 - RNA, 13 nt, Human
gagggcuccagac

SEQ ID NO: 3023853 - RNA, 12 nt, Human
gagggcuccaga

SEQ ID NO: 3023854 - RNA, 13 nt, Human
gaggugggauccu

SEQ ID NO: 3023855 - RNA, 16 nt, Human
gaggugggauccucca

SEQ ID NO: 3023856 - RNA, 15 nt, Human
gaggugggauccucc

SEQ ID NO: 3023857 - RNA, 17 nt, Human
gaggugggauccuccag

SEQ ID NO: 3023858 - RNA, 21 nt, Human
gagucacuggaacacuaauga

SEQ ID NO: 3023859 - RNA, 14 nt, Human
gagucacuggaaca

SEQ ID NO: 3023860 - RNA, 19 nt, Human
gaguugauacuacaguuug

SEQ ID NO: 3023861 - RNA, 21 nt, Human
gaguugauagcacagacccug

SEQ ID NO: 3023862 - RNA, 22 nt, Human
gaguugauacuacaguuuguua

SEQ ID NO: 3023863 - RNA, 13 nt, Human
gagugcagugagc

SEQ ID NO: 3023864 - RNA, 18 nt, Human
gagugcagugagccgaga

SEQ ID NO: 3023865 - RNA, 14 nt, Human
gagugagacucugu

SEQ ID NO: 3023866 - RNA, 18 nt, Human
gagugagacucugucuca

SEQ ID NO: 3023867 - RNA, 18 nt, Human
gagucagaaguuucugcc

SEQ ID NO: 3023868 - RNA, 22 nt, Human
gagcaucaggccaggcccucug

SEQ ID NO: 3023869 - RNA, 20 nt, Human
gagcaucaggccaggcccuc

SEQ ID NO: 3023870 - RNA, 15 nt, Human
gagcugccuguucag

SEQ ID NO: 3023871 - RNA, 16 nt, Human
gagcugccuguucagc

SEQ ID NO: 3023872 - RNA, 19 nt, Human
gagcugccuguucagcucc

SEQ ID NO: 3023873 - RNA, 17 nt, Human
gagcaucaggccaggcc

SEQ ID NO: 3023874 - RNA, 13 nt, Human
gagccuuccaggg

SEQ ID NO: 3023875 - RNA, 12 nt, Human
gagccuuccagg

SEQ ID NO: 3023876 - RNA, 14 nt, Human
gcaggcuggaguua

SEQ ID NO: 3023877 - RNA, 17 nt, Human
gcaggcucucaggccag

SEQ ID NO: 3023878 - RNA, 13 nt, Human
gcagggaaacagc

SEQ ID NO: 3023879 - RNA, 22 nt, Human
gcagggaaacagcuaaugggac

SEQ ID NO: 3023880 - RNA, 19 nt, Human
gcagcuugaggguugggcu

SEQ ID NO: 3023881 - RNA, 21 nt, Human
gcagcuugaggguugggcugg

SEQ ID NO: 3023882 - RNA, 12 nt, Human
gcaggcucucag

SEQ ID NO: 3023883 - RNA, 22 nt, Human
gcaggcucgggcuccccagccc

SEQ ID NO: 3023884 - RNA, 16 nt, Human
gcaggcucucaggcca

SEQ ID NO: 3023885 - RNA, 15 nt, Human
gcaggcucucaggcc

SEQ ID NO: 3023886 - RNA, 14 nt, Human
gcaggcucucaggc

SEQ ID NO: 3023887 - RNA, 13 nt, Human
gcaggcucucagg

SEQ ID NO: 3023888 - RNA, 22 nt, Human
gcagcugcgguccacccaggag

SEQ ID NO: 3023889 - RNA, 23 nt, Human
gcagcugcgguccacccaggagc

SEQ ID NO: 3023890 - RNA, 13 nt, Human
gcagcugcuuuug

SEQ ID NO: 3023891 - RNA, 20 nt, Human
gcagcugcuuuugucuaugg

SEQ ID NO: 3023892 - RNA, 16 nt, Human
gcagcuugaggguugg

SEQ ID NO: 3023893 - RNA, 16 nt, Human
gcacuuuguucuggcu

SEQ ID NO: 3023894 - RNA, 15 nt, Human
gcauaccacuuuugu

SEQ ID NO: 3023895 - RNA, 15 nt, Human
gcauaaaaauuagcc

SEQ ID NO: 3023896 - RNA, 23 nt, Human
gcaguugccagucaccccggcca

SEQ ID NO: 3023897 - RNA, 14 nt, Human
gcaguugccaguca

SEQ ID NO: 3023898 - RNA, 17 nt, Human
gcauccuggcacccggc

SEQ ID NO: 3023899 - RNA, 21 nt, Human
gcauccuggcacccggccccu

SEQ ID NO: 3023900 - RNA, 14 nt, Human
gcauccuggcaccc

SEQ ID NO: 3023901 - RNA, 22 nt, Human
gcauccuggcacccggccccug

SEQ ID NO: 3023902 - RNA, 23 nt, Human
gcauccuggcacccggccccugc

SEQ ID NO: 3023903 - RNA, 19 nt, Human
gcaugggaaugaaugucag

SEQ ID NO: 3023904 - RNA, 16 nt, Human
gcaugggaaugaaugu

SEQ ID NO: 3023905 - RNA, 13 nt, Human
gcaugggaaugaa

SEQ ID NO: 3023906 - RNA, 17 nt, Human
gcaugugaugagaggaa

SEQ ID NO: 3023907 - RNA, 12 nt, Human
gcauuuaaaaga

SEQ ID NO: 3023908 - RNA, 15 nt, Human
gcauuuaaaagauac

SEQ ID NO: 3023909 - RNA, 14 nt, Human
gcauuugaaaauuu

SEQ ID NO: 3023910 - RNA, 16 nt, Human
gcauuugaaaauuuug

SEQ ID NO: 3023911 - RNA, 18 nt, Human
gccaagaauucuuaaaua

SEQ ID NO: 3023912 - RNA, 14 nt, Human
gccaagaauucuua

SEQ ID NO: 3023913 - RNA, 11 nt, Human
gccaaggccaa

SEQ ID NO: 3023914 - RNA, 17 nt, Human
gccaaggccaaaggaag

SEQ ID NO: 3023915 - RNA, 21 nt, Human
gaugcugucuucguacuggga

SEQ ID NO: 3023916 - RNA, 21 nt, Human
gaugaugaaaugaggucagag

SEQ ID NO: 3023917 - RNA, 14 nt, Human
gaugcuuguacaua

SEQ ID NO: 3023918 - RNA, 16 nt, Human
gaugcuuguacauaau

SEQ ID NO: 3023919 - RNA, 20 nt, Human
gaucuggguucacugcaacc

SEQ ID NO: 3023920 - RNA, 18 nt, Human
gaucuggguucacugcaa

SEQ ID NO: 3023921 - RNA, 21 nt, Human
gauucuuguauuuauuacaac

SEQ ID NO: 3023922 - RNA, 15 nt, Human
gauucuuguauuuau

SEQ ID NO: 3023923 - RNA, 20 nt, Human
gauuuaacagaaauguacag

SEQ ID NO: 3023924 - RNA, 23 nt, Human
gauuuaacagaaauguacagcaa

SEQ ID NO: 3023925 - RNA, 21 nt, Human
gauucuucugcuucagccucc

SEQ ID NO: 3023926 - RNA, 20 nt, Human
gauucuucugcuucagccuc

SEQ ID NO: 3023927 - RNA, 23 nt, Human
gauucuuauggacaaugacccag

SEQ ID NO: 3023928 - RNA, 19 nt, Human
gauucuccugccucagccu

SEQ ID NO: 3023929 - RNA, 20 nt, Human
gauucuccugccucagccuc

SEQ ID NO: 3023930 - RNA, 21 nt, Human
gauucuccugccucagccucc

SEQ ID NO: 3023931 - RNA, 22 nt, Human
gauuuuuuuuuccuucagugcc

SEQ ID NO: 3023932 - RNA, 23 nt, Human
gauuuuuuuuuccuucagugccu

SEQ ID NO: 3023933 - RNA, 16 nt, Human
gauuucacucuccuug

SEQ ID NO: 3023934 - RNA, 13 nt, Human
gauuucacucucc

SEQ ID NO: 3023935 - RNA, 18 nt, Human
gauuucacucuccuuggu

SEQ ID NO: 3023936 - RNA, 17 nt, Human
gauuucacucuccuugg

SEQ ID NO: 3023937 - RNA, 22 nt, Human
gcacuauaauguaagcucuacu

SEQ ID NO: 3023938 - RNA, 22 nt, Human
gcacuauagccuaggugacaga

SEQ ID NO: 3023939 - RNA, 15 nt, Human
gcacuccagccuggg

SEQ ID NO: 3023940 - RNA, 17 nt, Human
gcacuccagccugggug

SEQ ID NO: 3023941 - RNA, 12 nt, Human
gcaccuccugcc

SEQ ID NO: 3023942 - RNA, 16 nt, Human
gcaccggcuggccugg

SEQ ID NO: 3023943 - RNA, 15 nt, Human
gcaccggcuggccug

SEQ ID NO: 3023944 - RNA, 17 nt, Human
gcaccggcuggccuggc

SEQ ID NO: 3023945 - RNA, 20 nt, Human
gcacacaccagagcccaccu

SEQ ID NO: 3023946 - RNA, 11 nt, Human
gcacacauuuu

SEQ ID NO: 3023947 - RNA, 12 nt, Human
gcacacauuuuu

SEQ ID NO: 3023948 - RNA, 18 nt, Human
gcaaccuccgccucuugg

SEQ ID NO: 3023949 - RNA, 22 nt, Human
gcaacccuggugaccagcacca

SEQ ID NO: 3023950 - RNA, 17 nt, Human
gcaacccccagccugcu

SEQ ID NO: 3023951 - RNA, 16 nt, Human
gcaaaagaugcuucuc

SEQ ID NO: 3023952 - RNA, 18 nt, Human
gcaacccccagccugcua

SEQ ID NO: 3023953 - RNA, 15 nt, Human
gcaaaagaugcuucu

SEQ ID NO: 3023954 - RNA, 12 nt, Human
gcacacaccaga

SEQ ID NO: 3023955 - RNA, 14 nt, Human
gcacacaccagagc

SEQ ID NO: 3023956 - RNA, 15 nt, Human
gcacacaccagagcc

SEQ ID NO: 3023957 - RNA, 16 nt, Human
gcacacaccagagccc

SEQ ID NO: 3023958 - RNA, 17 nt, Human
gcacacaccagagccca

SEQ ID NO: 3023959 - RNA, 18 nt, Human
gcacacaccagagcccac

SEQ ID NO: 3023960 - RNA, 19 nt, Human
gcacacaccagagcccacc

SEQ ID NO: 3023961 - RNA, 23 nt, Human
gcaauaaggggagaguaacccug

SEQ ID NO: 3023962 - RNA, 11 nt, Human
gcaauaaagca

SEQ ID NO: 3023963 - RNA, 12 nt, Human
gaaagggauuuu

SEQ ID NO: 3023964 - RNA, 20 nt, Human
gaaagggauuuucagcccuc

SEQ ID NO: 3023965 - RNA, 13 nt, Human
gaaagggcccaga

SEQ ID NO: 3023966 - RNA, 12 nt, Human
gaaaggcuccag

SEQ ID NO: 3023967 - RNA, 13 nt, Human
gaaaggcuccagg

SEQ ID NO: 3023968 - RNA, 15 nt, Human
gaaaggcuccaggag

SEQ ID NO: 3023969 - RNA, 14 nt, Human
gaaaggcuccagga

SEQ ID NO: 3023970 - RNA, 13 nt, Human
gaaacuggauuaa

SEQ ID NO: 3023971 - RNA, 17 nt, Human
gaaacuggauuaaacuu

SEQ ID NO: 3023972 - RNA, 21 nt, Human
gaaagaaaauaccaaggaaca

SEQ ID NO: 3023973 - RNA, 15 nt, Human
gaaagggcccagaga

SEQ ID NO: 3023974 - RNA, 16 nt, Human
gaaagggcccagagag

SEQ ID NO: 3023975 - RNA, 23 nt, Human
gaaaagaaaaaugagccuggcaa

SEQ ID NO: 3023976 - RNA, 18 nt, Human
gaaccaccacacccagcc

SEQ ID NO: 3023977 - RNA, 20 nt, Human
gaaccaccacacccagccca

SEQ ID NO: 3023978 - RNA, 21 nt, Human
gaaccaccacacccagcccac

SEQ ID NO: 3023979 - RNA, 22 nt, Human
gaaccaccacacccagcccacu

SEQ ID NO: 3023980 - RNA, 14 nt, Human
gaacuccuggccuc

SEQ ID NO: 3023981 - RNA, 13 nt, Human
gaacuccuggccu

SEQ ID NO: 3023982 - RNA, 23 nt, Human
gaaccaccacacccagcccacuu

SEQ ID NO: 3023983 - RNA, 22 nt, Human
gaaccauggucggaaaacaugc

SEQ ID NO: 3023984 - RNA, 16 nt, Human
gaagacacugaugggc

SEQ ID NO: 3023985 - RNA, 21 nt, Human
gaagacacugaugggcaaccc

SEQ ID NO: 3023986 - RNA, 13 nt, Human
gaagacagcucuu

SEQ ID NO: 3023987 - RNA, 12 nt, Human
gaagacagcucu

SEQ ID NO: 3023988 - RNA, 15 nt, Human
gaagacagagcuaca

SEQ ID NO: 3023989 - RNA, 13 nt, Human
gaagacagagcua

SEQ ID NO: 3023990 - RNA, 15 nt, Human
gaagacagcucuuau

SEQ ID NO: 3023991 - RNA, 14 nt, Human
gaagacagcucuua

SEQ ID NO: 3023992 - RNA, 21 nt, Human
gaagcacaugccucucucagg

SEQ ID NO: 3023993 - RNA, 16 nt, Human
gaagcaccauaacuuu

SEQ ID NO: 3023994 - RNA, 13 nt, Human
gaagcacagcuuc

SEQ ID NO: 3023995 - RNA, 14 nt, Human
gaagcacagcuuca

SEQ ID NO: 3023996 - RNA, 22 nt, Human
gaagcacaugccucucucaggc

SEQ ID NO: 3023997 - RNA, 17 nt, Human
gaagacucauucuucug

SEQ ID NO: 3023998 - RNA, 18 nt, Human
gaagacucauucuucugu

SEQ ID NO: 3023999 - RNA, 16 nt, Human
gaagacucauucuucu

SEQ ID NO: 3024000 - RNA, 22 nt, Human
cuugugaauaaagagggugggu

SEQ ID NO: 3024001 - RNA, 18 nt, Human
cuugucuuuggacccuga

SEQ ID NO: 3024002 - RNA, 15 nt, Human
cuugucuuuggaccc

SEQ ID NO: 3024003 - RNA, 13 nt, Human
cuugucuuuggac

SEQ ID NO: 3024004 - RNA, 19 nt, Human
cuuggugucgggcaugaca

SEQ ID NO: 3024005 - RNA, 22 nt, Human
cuugguagaagcccuucuaccu

SEQ ID NO: 3024006 - RNA, 14 nt, Human
cuugguccugcugc

SEQ ID NO: 3024007 - RNA, 20 nt, Human
cuuuaccaauugaaguaaaa

SEQ ID NO: 3024008 - RNA, 19 nt, Human
cuuuaccaauugaaguaaa

SEQ ID NO: 3024009 - RNA, 16 nt, Human
cuuuaccaauugaagu

SEQ ID NO: 3024010 - RNA, 18 nt, Human
cuuuaccaauugaaguaa

SEQ ID NO: 3024011 - RNA, 20 nt, Human
cuuucacccuuuucuguuug

SEQ ID NO: 3024012 - RNA, 15 nt, Human
cuuucacccuuuucu

SEQ ID NO: 3024013 - RNA, 14 nt, Human
cuuucacccuuuuc

SEQ ID NO: 3024014 - RNA, 23 nt, Human
cuuuaaugucacaggcaggucca

SEQ ID NO: 3024015 - RNA, 13 nt, Human
cuuugguuauuuu

SEQ ID NO: 3024016 - RNA, 19 nt, Human
cuuugguuauuuuacuuuu

SEQ ID NO: 3024017 - RNA, 17 nt, Human
cuuugguuauuuuacuu

SEQ ID NO: 3024018 - RNA, 23 nt, Human
cuuugguuauuuuacuuuuugga

SEQ ID NO: 3024019 - RNA, 17 nt, Human
cuuuguauucucuccug

SEQ ID NO: 3024020 - RNA, 19 nt, Human
cuuuuauaaacuuuaccuu

SEQ ID NO: 3024021 - RNA, 22 nt, Human
cuuuguauucucuccuguaccu

SEQ ID NO: 3024022 - RNA, 20 nt, Human
cuuuuauaaacuuuaccuuu

SEQ ID NO: 3024023 - RNA, 21 nt, Human
cuuuuauaaacuuuaccuuuu

SEQ ID NO: 3024024 - RNA, 15 nt, Human
cuuucuacccagcga

SEQ ID NO: 3024025 - RNA, 16 nt, Human
cuuucuacccagcgag

SEQ ID NO: 3024026 - RNA, 17 nt, Human
cuuugacgccaucccag

SEQ ID NO: 3024027 - RNA, 16 nt, Human
cuuugacgccauccca

SEQ ID NO: 3024028 - RNA, 22 nt, Human
cuuggauuguccccgacccuug

SEQ ID NO: 3024029 - RNA, 24 nt, Human
cuuggauuguccccgacccuugcc

SEQ ID NO: 3024030 - RNA, 23 nt, Human
cuuggauuguccccgacccuugc

SEQ ID NO: 3024031 - RNA, 12 nt, Human
cuugauucauaa

SEQ ID NO: 3024032 - RNA, 12 nt, Human
cuugcaaaguau

SEQ ID NO: 3024033 - RNA, 18 nt, Human
cuugauguguuaucucuu

SEQ ID NO: 3024034 - RNA, 15 nt, Human
cuugauguguuaucu

SEQ ID NO: 3024035 - RNA, 17 nt, Human
cuugauauccucuuuga

SEQ ID NO: 3024036 - RNA, 22 nt, Human
cuugauauccucuuugagugaa

SEQ ID NO: 3024037 - RNA, 20 nt, Human
cuugacagggcacaccgggc

SEQ ID NO: 3024038 - RNA, 16 nt, Human
cuugacaucaacugca

SEQ ID NO: 3024039 - RNA, 14 nt, Human
cuucuucagagacu

SEQ ID NO: 3024040 - RNA, 13 nt, Human
cuucuucagagac

SEQ ID NO: 3024041 - RNA, 23 nt, Human
cuucugaacuuggcgcugccccu

SEQ ID NO: 3024042 - RNA, 13 nt, Human
cuuccuccuggug

SEQ ID NO: 3024043 - RNA, 22 nt, Human
cuuccucuuuccaucuacccuc

SEQ ID NO: 3024044 - RNA, 21 nt, Human
cuuccucuuuccaucuacccu

SEQ ID NO: 3024045 - RNA, 17 nt, Human
cugucggagcccugucu

SEQ ID NO: 3024046 - RNA, 15 nt, Human
cugucgcccagucug

SEQ ID NO: 3024047 - RNA, 16 nt, Human
cugucgcccagucugg

SEQ ID NO: 3024048 - RNA, 21 nt, Human
cuguccugggagugagcuggu

SEQ ID NO: 3024049 - RNA, 20 nt, Human
cugucaauuacaggaaguac

SEQ ID NO: 3024050 - RNA, 19 nt, Human
cugucaauuacaggaagua

SEQ ID NO: 3024051 - RNA, 23 nt, Human
cugucaauuacaggaaguacugg

SEQ ID NO: 3024052 - RNA, 13 nt, Human
cuguagaguggga

SEQ ID NO: 3024053 - RNA, 12 nt, Human
cugugcugcccu

SEQ ID NO: 3024054 - RNA, 14 nt, Human
cugugcugcccugc

SEQ ID NO: 3024055 - RNA, 13 nt, Human
cugugcugcccug

SEQ ID NO: 3024056 - RNA, 18 nt, Human
cugugccucugggacugg

SEQ ID NO: 3024057 - RNA, 19 nt, Human
cugugucagcauagaagua

SEQ ID NO: 3024058 - RNA, 17 nt, Human
cugugucagcauagaag

SEQ ID NO: 3024059 - RNA, 19 nt, Human
cugugcugcccugcccacc

SEQ ID NO: 3024060 - RNA, 18 nt, Human
cugugcugcccugcccac

SEQ ID NO: 3024061 - RNA, 17 nt, Human
cugugcugcccugccca

SEQ ID NO: 3024062 - RNA, 15 nt, Human
cugugcugcccugcc

SEQ ID NO: 3024063 - RNA, 21 nt, Human
cuuagggaaggauacaaaagc

SEQ ID NO: 3024064 - RNA, 19 nt, Human
cuuagggaaggauacaaaa

SEQ ID NO: 3024065 - RNA, 21 nt, Human
cuuagcagggaaacagcuaau

SEQ ID NO: 3024066 - RNA, 16 nt, Human
cuuaccagcagagcac

SEQ ID NO: 3024067 - RNA, 22 nt, Human
cuuagcucauucuccuuguguu

SEQ ID NO: 3024068 - RNA, 23 nt, Human
cuuagcucauucuccuuguguua

SEQ ID NO: 3024069 - RNA, 14 nt, Human
cuguuggcuggggg

SEQ ID NO: 3024070 - RNA, 19 nt, Human
cuguuggcugggggccuca

SEQ ID NO: 3024071 - RNA, 22 nt, Human
cuguuggcugggggccucagug

SEQ ID NO: 3024072 - RNA, 15 nt, Human
cuuaccagcagagca

SEQ ID NO: 3024073 - RNA, 14 nt, Human
cuuaaaacaacacu

SEQ ID NO: 3024074 - RNA, 18 nt, Human
cuggauaguccgucucug

SEQ ID NO: 3024075 - RNA, 19 nt, Human
cuggauaguccgucucugc

SEQ ID NO: 3024076 - RNA, 19 nt, Human
cugcuuuugucuaugggac

SEQ ID NO: 3024077 - RNA, 21 nt, Human
cugcuuuugucuaugggacuc

SEQ ID NO: 3024078 - RNA, 19 nt, Human
cugcuuuuuaaagaaugcu

SEQ ID NO: 3024079 - RNA, 14 nt, Human
cuggagaaaaugga

SEQ ID NO: 3024080 - RNA, 14 nt, Human
cugcuucaaauauu

SEQ ID NO: 3024081 - RNA, 20 nt, Human
cugcuucaaggauccugagc

SEQ ID NO: 3024082 - RNA, 20 nt, Human
cugcuuuugucuaugggacu

SEQ ID NO: 3024083 - RNA, 23 nt, Human
cugcuucaaggauccugagccag

SEQ ID NO: 3024084 - RNA, 22 nt, Human
cugcuucaaggauccugagcca

SEQ ID NO: 3024085 - RNA, 21 nt, Human
cugcuucaaggauccugagcc

SEQ ID NO: 3024086 - RNA, 13 nt, Human
cugcuucaaggau

SEQ ID NO: 3024087 - RNA, 12 nt, Human
cugcuucaagga

SEQ ID NO: 3024088 - RNA, 19 nt, Human
cugcuucaaauauuucccu

SEQ ID NO: 3024089 - RNA, 21 nt, Human
cugcugacuguuuucucuuga

SEQ ID NO: 3024090 - RNA, 18 nt, Human
cugcugacuguuuucucu

SEQ ID NO: 3024091 - RNA, 22 nt, Human
cugccuguugggccaggagccu

SEQ ID NO: 3024092 - RNA, 21 nt, Human
cugccuguugggccaggagcc

SEQ ID NO: 3024093 - RNA, 17 nt, Human
cugccuguucagcucca

SEQ ID NO: 3024094 - RNA, 18 nt, Human
cugccuguucagcuccag

SEQ ID NO: 3024095 - RNA, 19 nt, Human
cugccuguucagcuccagc

SEQ ID NO: 3024096 - RNA, 20 nt, Human
cugccuguugggccaggagc

SEQ ID NO: 3024097 - RNA, 15 nt, Human
cugccucucccauca

SEQ ID NO: 3024098 - RNA, 22 nt, Human
cugccucucccaucacuucccu

SEQ ID NO: 3024099 - RNA, 23 nt, Human
cugccucucccaucacuucccua

SEQ ID NO: 3024100 - RNA, 18 nt, Human
cuggcagaguugaagaca

SEQ ID NO: 3024101 - RNA, 17 nt, Human
cuggcagaguugaagac

SEQ ID NO: 3024102 - RNA, 12 nt, Human
cuggcagccccu

SEQ ID NO: 3024103 - RNA, 11 nt, Human
cuggcagccca

SEQ ID NO: 3024104 - RNA, 11 nt, Human
cugggacacag

SEQ ID NO: 3024105 - RNA, 14 nt, Human
cuggccuagcauac

SEQ ID NO: 3024106 - RNA, 22 nt, Human
cuggccccucagggucccuggu

SEQ ID NO: 3024107 - RNA, 15 nt, Human
cugggcagaaggaag

SEQ ID NO: 3024108 - RNA, 12 nt, Human
cugggcagaagg

SEQ ID NO: 3024109 - RNA, 14 nt, Human
cuggggagaaagua

SEQ ID NO: 3024110 - RNA, 18 nt, Human
cuggguucacugcaaccu

SEQ ID NO: 3024111 - RNA, 20 nt, Human
cuggguucacugcaaccucc

SEQ ID NO: 3024112 - RNA, 15 nt, Human
cuggguucacugcaa

SEQ ID NO: 3024113 - RNA, 14 nt, Human
auuauguuaauauu

SEQ ID NO: 3024114 - RNA, 16 nt, Human
auuauguuaauauuuc

SEQ ID NO: 3024115 - RNA, 13 nt, Human
auuauguuaauau

SEQ ID NO: 3024116 - RNA, 17 nt, Human
auuauguuaauauuucu

SEQ ID NO: 3024117 - RNA, 14 nt, Human
auuaucuagauacu

SEQ ID NO: 3024118 - RNA, 18 nt, Human
auuaucuagauacuguau

SEQ ID NO: 3024119 - RNA, 11 nt, Human
auucagacagc

SEQ ID NO: 3024120 - RNA, 13 nt, Human
auucagacagcug

SEQ ID NO: 3024121 - RNA, 12 nt, Human
auucagacagcu

SEQ ID NO: 3024122 - RNA, 12 nt, Human
auucaggaagcu

SEQ ID NO: 3024123 - RNA, 18 nt, Human
auucagacagcugccugg

SEQ ID NO: 3024124 - RNA, 17 nt, Human
auucagacagcugccug

SEQ ID NO: 3024125 - RNA, 16 nt, Human
auucagacagcugccu

SEQ ID NO: 3024126 - RNA, 15 nt, Human
auucagacagcugcc

SEQ ID NO: 3024127 - RNA, 14 nt, Human
auucagacagcugc

SEQ ID NO: 3024128 - RNA, 13 nt, Human
auucaggaagcuc

SEQ ID NO: 3024129 - RNA, 16 nt, Human
auuauauucauucuuu

SEQ ID NO: 3024130 - RNA, 17 nt, Human
uuuguggaaaauaacuc

SEQ ID NO: 3024131 - RNA, 19 nt, Human
auucagacagcugccuggg

SEQ ID NO: 3024132 - RNA, 13 nt, Human
auugaagcagagu

SEQ ID NO: 3024133 - RNA, 15 nt, Human
auugaagcagagugg

SEQ ID NO: 3024134 - RNA, 14 nt, Human
auugaagcagagug

SEQ ID NO: 3024135 - RNA, 18 nt, Human
auugaagcagaguggcag

SEQ ID NO: 3024136 - RNA, 17 nt, Human
auugaccugaggcccuu

SEQ ID NO: 3024137 - RNA, 16 nt, Human
auucuuuuugaaaugu

SEQ ID NO: 3024138 - RNA, 14 nt, Human
auucuuaaauaugu

SEQ ID NO: 3024139 - RNA, 12 nt, Human
auugaaaucuuu

SEQ ID NO: 3024140 - RNA, 20 nt, Human
auugaaaucuuuuugcuuug

SEQ ID NO: 3024141 - RNA, 18 nt, Human
auugaaaucuuuuugcuu

SEQ ID NO: 3024142 - RNA, 17 nt, Human
auugaaaucuuuuugcu

SEQ ID NO: 3024143 - RNA, 17 nt, Human
auucucauuugucacac

SEQ ID NO: 3024144 - RNA, 11 nt, Human
auucugccugc

SEQ ID NO: 3024145 - RNA, 13 nt, Human
auucugccugccc

SEQ ID NO: 3024146 - RNA, 14 nt, Human
auucugccugccca

SEQ ID NO: 3024147 - RNA, 15 nt, Human
auucugccugcccag

SEQ ID NO: 3024148 - RNA, 16 nt, Human
auucugccugcccagg

SEQ ID NO: 3024149 - RNA, 17 nt, Human
auucugccugcccaggc

SEQ ID NO: 3024150 - RNA, 18 nt, Human
auucugccugcccaggcc

SEQ ID NO: 3024151 - RNA, 19 nt, Human
auucugccugcccaggccc

SEQ ID NO: 3024152 - RNA, 18 nt, Human
auucugcucacauaucug

SEQ ID NO: 3024153 - RNA, 20 nt, Human
auucugccugcccaggcccc

SEQ ID NO: 3024154 - RNA, 21 nt, Human
auucugccugcccaggccccu

SEQ ID NO: 3024155 - RNA, 19 nt, Human
auucugcucacauaucugu

SEQ ID NO: 3024156 - RNA, 20 nt, Human
auucugcucacauaucuguc

SEQ ID NO: 3024157 - RNA, 21 nt, Human
auucugcucacauaucuguca

SEQ ID NO: 3024158 - RNA, 22 nt, Human
auucugcucacauaucugucau

SEQ ID NO: 3024159 - RNA, 19 nt, Human
auucuguuggccaguguga

SEQ ID NO: 3024160 - RNA, 21 nt, Human
auucuguuggccagugugaca

SEQ ID NO: 3024161 - RNA, 14 nt, Human
auucuguuggccag

SEQ ID NO: 3024162 - RNA, 19 nt, Human
auuuuugguauuugaaaca

SEQ ID NO: 3024163 - RNA, 22 nt, Human
auuuuucuuagggaaggauaca

SEQ ID NO: 3024164 - RNA, 21 nt, Human
auuuuucuuagggaaggauac

SEQ ID NO: 3024165 - RNA, 19 nt, Human
auuuuuguuuuuauuaaaa

SEQ ID NO: 3024166 - RNA, 21 nt, Human
auuuuuguuuuuauuaaaagg

SEQ ID NO: 3024167 - RNA, 13 nt, Human
auuuuuuaaaugc

SEQ ID NO: 3024168 - RNA, 14 nt, Human
auuuuuuaaaugca

SEQ ID NO: 3024169 - RNA, 19 nt, Human
auuuuuguagagccagggu

SEQ ID NO: 3024170 - RNA, 12 nt, Human
auuuuuguaauu

SEQ ID NO: 3024171 - RNA, 20 nt, Human
auuuuggaaaauaaauuauu

SEQ ID NO: 3024172 - RNA, 14 nt, Human
auuuuggaaaauaa

SEQ ID NO: 3024173 - RNA, 19 nt, Human
auuuuggaaaauaaauuau

SEQ ID NO: 3024174 - RNA, 18 nt, Human
auuuugcuuugugauuuu

SEQ ID NO: 3024175 - RNA, 20 nt, Human
auuuugcuuugugauuuuug

SEQ ID NO: 3024176 - RNA, 12 nt, Human
auuuugcuuugu

SEQ ID NO: 3024177 - RNA, 19 nt, Human
auuuugugcccccauguaa

SEQ ID NO: 3024178 - RNA, 23 nt, Human
auuuugucauauaagauucauau

SEQ ID NO: 3024179 - RNA, 20 nt, Human
auuuugcuaaaugugaauga

SEQ ID NO: 3024180 - RNA, 21 nt, Human
auuuugcugucccuuuuccuu

SEQ ID NO: 3024181 - RNA, 18 nt, Human
auuuugauccaagcuggu

SEQ ID NO: 3024182 - RNA, 19 nt, Human
auuuugauccaagcugguc

SEQ ID NO: 3024183 - RNA, 15 nt, Human
auuuugauguuuuaa

SEQ ID NO: 3024184 - RNA, 17 nt, Human
auuuugauguuuuaagg

SEQ ID NO: 3024185 - RNA, 16 nt, Human
auuuuccugccaggca

SEQ ID NO: 3024186 - RNA, 19 nt, Human
auuuucccuauuagagaag

SEQ ID NO: 3024187 - RNA, 17 nt, Human
auuugaaacacugguuu

SEQ ID NO: 3024188 - RNA, 14 nt, Human
auuugaaacacugg

SEQ ID NO: 3024189 - RNA, 16 nt, Human
auuugaaaauuuugau

SEQ ID NO: 3024190 - RNA, 15 nt, Human
auuugaaaauuuuga

SEQ ID NO: 3024191 - RNA, 16 nt, Human
auuucuuccacaagag

SEQ ID NO: 3024192 - RNA, 23 nt, Human
auuucuuccacaagagcccaggc

SEQ ID NO: 3024193 - RNA, 20 nt, Human
auuucuuccacaagagccca

SEQ ID NO: 3024194 - RNA, 16 nt, Human
auuuauuuauuuauuc

SEQ ID NO: 3024195 - RNA, 12 nt, Human
auuuauuuaaau

SEQ ID NO: 3024196 - RNA, 14 nt, Human
auuuauuuaaauuu

SEQ ID NO: 3024197 - RNA, 19 nt, Human
auuucccaaagcagugcau

SEQ ID NO: 3024198 - RNA, 22 nt, Human
auuuuaaaaauacagauagaua

SEQ ID NO: 3024199 - RNA, 23 nt, Human
auugauugggcacaucauuucaa

SEQ ID NO: 3024200 - RNA, 19 nt, Human
auugauugggcacaucauu

SEQ ID NO: 3024201 - RNA, 21 nt, Human
auugauuuccguuaaaauacc

SEQ ID NO: 3024202 - RNA, 17 nt, Human
auuuaaaagauacaguu

SEQ ID NO: 3024203 - RNA, 14 nt, Human
auuuaaaagauaca

SEQ ID NO: 3024204 - RNA, 16 nt, Human
auuuaaaagauacagu

SEQ ID NO: 3024205 - RNA, 13 nt, Human
auuuaaaagauac

SEQ ID NO: 3024206 - RNA, 21 nt, Human
auuguuuggggaugagaaagg

SEQ ID NO: 3024207 - RNA, 16 nt, Human
auugucaaagugguga

SEQ ID NO: 3024208 - RNA, 23 nt, Human
auugucaaaguggugagaggcau

SEQ ID NO: 3024209 - RNA, 13 nt, Human
auugugggaaggg

SEQ ID NO: 3024210 - RNA, 14 nt, Human
auugugggaagggg

SEQ ID NO: 3024211 - RNA, 14 nt, Human
uuucaaauguucuc

SEQ ID NO: 3024212 - RNA, 18 nt, Human
uuuccaugaguccccugu

SEQ ID NO: 3024213 - RNA, 17 nt, Human
uuuccaugaguccccug

SEQ ID NO: 3024214 - RNA, 19 nt, Human
auggacuaacuugucuuug

SEQ ID NO: 3024215 - RNA, 12 nt, Human
auggacuuuguu

SEQ ID NO: 3024216 - RNA, 11 nt, Human
auggacuuugu

SEQ ID NO: 3024217 - RNA, 15 nt, Human
augggagagaagaga

SEQ ID NO: 3024218 - RNA, 19 nt, Human
augggagagaagagaaugc

SEQ ID NO: 3024219 - RNA, 18 nt, Human
auggcuaauguacugcau

SEQ ID NO: 3024220 - RNA, 15 nt, Human
uuucaaacuuuacua

SEQ ID NO: 3024221 - RNA, 22 nt, Human
uuucaaacuuuacuauggcccu

SEQ ID NO: 3024222 - RNA, 16 nt, Human
uuucaaacuuuacuau

SEQ ID NO: 3024223 - RNA, 22 nt, Human
augcugugcccuaaaguguauu

SEQ ID NO: 3024224 - RNA, 13 nt, Human
augcuucucacug

SEQ ID NO: 3024225 - RNA, 19 nt, Human
augauugccuuuuuauaac

SEQ ID NO: 3024226 - RNA, 22 nt, Human
augcaccagcccuuagcaggga

SEQ ID NO: 3024227 - RNA, 13 nt, Human
augcaccuggaau

SEQ ID NO: 3024228 - RNA, 14 nt, Human
augcaccagcccuu

SEQ ID NO: 3024229 - RNA, 16 nt, Human
augcacuuuguucugg

SEQ ID NO: 3024230 - RNA, 17 nt, Human
augcacuuuguucuggc

SEQ ID NO: 3024231 - RNA, 20 nt, Human
augcacuuuguucuggcucu

SEQ ID NO: 3024232 - RNA, 19 nt, Human
augcacuuuguucuggcuc

SEQ ID NO: 3024233 - RNA, 17 nt, Human
uuuaaagauguagacag

SEQ ID NO: 3024234 - RNA, 13 nt, Human
uuuaaagaaugcu

SEQ ID NO: 3024235 - RNA, 18 nt, Human
uuguuuugccaauuugca

SEQ ID NO: 3024236 - RNA, 23 nt, Human
uuuaaaaauacagauagauauau

SEQ ID NO: 3024237 - RNA, 16 nt, Human
augauauaagguuuuu

SEQ ID NO: 3024238 - RNA, 15 nt, Human
augaucuaggaagac

SEQ ID NO: 3024239 - RNA, 20 nt, Human
augaucuaggaagacuuugg

SEQ ID NO: 3024240 - RNA, 17 nt, Human
augaucuaggaagacuu

SEQ ID NO: 3024241 - RNA, 21 nt, Human
uuguuccacaaguuaaauaaa

SEQ ID NO: 3024242 - RNA, 13 nt, Human
uuguguuacuaag

SEQ ID NO: 3024243 - RNA, 15 nt, Human
uuguguuacuaaguu

SEQ ID NO: 3024244 - RNA, 20 nt, Human
uuguguuacuaaguuuuuau

SEQ ID NO: 3024245 - RNA, 20 nt, Human
uuguucuugguuuguaaauu

SEQ ID NO: 3024246 - RNA, 15 nt, Human
uuuaaauagaugaca

SEQ ID NO: 3024247 - RNA, 18 nt, Human
augcagccucacaguccu

SEQ ID NO: 3024248 - RNA, 17 nt, Human
augcagccucacagucc

SEQ ID NO: 3024249 - RNA, 19 nt, Human
uuuaauuuuuuugagacag

SEQ ID NO: 3024250 - RNA, 14 nt, Human
augcccagccccuu

SEQ ID NO: 3024251 - RNA, 13 nt, Human
augcccagccccu

SEQ ID NO: 3024252 - RNA, 12 nt, Human
augcccagcccc

SEQ ID NO: 3024253 - RNA, 11 nt, Human
augcccagccc

SEQ ID NO: 3024254 - RNA, 23 nt, Human
augcagugguaugaucacggcuc

SEQ ID NO: 3024255 - RNA, 13 nt, Human
augcagugcuucc

SEQ ID NO: 3024256 - RNA, 18 nt, Human
auguagacaguuggguuu

SEQ ID NO: 3024257 - RNA, 20 nt, Human
auguagacaguuggguuuuu

SEQ ID NO: 3024258 - RNA, 12 nt, Human
uuugaccucugc

SEQ ID NO: 3024259 - RNA, 22 nt, Human
uuugauguucuuucacccuuuu

SEQ ID NO: 3024260 - RNA, 13 nt, Human
uuugauuaaauuc

SEQ ID NO: 3024261 - RNA, 18 nt, Human
uuugauuaaauucuugca

SEQ ID NO: 3024262 - RNA, 21 nt, Human
uuugauuaaauucuugcaaag

SEQ ID NO: 3024263 - RNA, 21 nt, Human
uuugauucagacagcugccug

SEQ ID NO: 3024264 - RNA, 20 nt, Human
uuugacgccaucccagcccc

SEQ ID NO: 3024265 - RNA, 19 nt, Human
uuugacgccaucccagccc

SEQ ID NO: 3024266 - RNA, 16 nt, Human
uuugacgccaucccag

SEQ ID NO: 3024267 - RNA, 14 nt, Human
uuugacgccauccc

SEQ ID NO: 3024268 - RNA, 13 nt, Human
uuugacgccaucc

SEQ ID NO: 3024269 - RNA, 22 nt, Human
uuugauucagacagcugccugg

SEQ ID NO: 3024270 - RNA, 15 nt, Human
uuugccguuauuaaa

SEQ ID NO: 3024271 - RNA, 13 nt, Human
uuugccucugccu

SEQ ID NO: 3024272 - RNA, 16 nt, Human
augucaguauuucaac

SEQ ID NO: 3024273 - RNA, 13 nt, Human
augucaguauuuc

SEQ ID NO: 3024274 - RNA, 16 nt, Human
auguauguguaaguau

SEQ ID NO: 3024275 - RNA, 15 nt, Human
auguauguguaagua

SEQ ID NO: 3024276 - RNA, 13 nt, Human
augucagugugac

SEQ ID NO: 3024277 - RNA, 12 nt, Human
augucaguguga

SEQ ID NO: 3024278 - RNA, 19 nt, Human
augugcacaucuguuuugu

SEQ ID NO: 3024279 - RNA, 23 nt, Human
augugcacaugcacgugugugca

SEQ ID NO: 3024280 - RNA, 19 nt, Human
augugaugagaggaaauca

SEQ ID NO: 3024281 - RNA, 17 nt, Human
augugaugagaggaaau

SEQ ID NO: 3024282 - RNA, 15 nt, Human
augugaugagaggaa

SEQ ID NO: 3024283 - RNA, 16 nt, Human
augugaugagaggaaa

SEQ ID NO: 3024284 - RNA, 14 nt, Human
augguuuucuugug

SEQ ID NO: 3024285 - RNA, 16 nt, Human
augguuuucaaaauaa

SEQ ID NO: 3024286 - RNA, 14 nt, Human
augguuuucaaaau

SEQ ID NO: 3024287 - RNA, 15 nt, Human
augguuuucaaaaua

SEQ ID NO: 3024288 - RNA, 12 nt, Human
augguggcuggg

SEQ ID NO: 3024289 - RNA, 13 nt, Human
augguggcugggu

SEQ ID NO: 3024290 - RNA, 15 nt, Human
augguggcuggguug

SEQ ID NO: 3024291 - RNA, 17 nt, Human
augguggcuggguugga

SEQ ID NO: 3024292 - RNA, 20 nt, Human
auggugagggauacccaucc

SEQ ID NO: 3024293 - RNA, 15 nt, Human
augggugcuuggagg

SEQ ID NO: 3024294 - RNA, 15 nt, Human
auggugcaaugaccu

SEQ ID NO: 3024295 - RNA, 13 nt, Human
auggugcaaugac

SEQ ID NO: 3024296 - RNA, 12 nt, Human
auggugcaauga

SEQ ID NO: 3024297 - RNA, 17 nt, Human
auggugcaaugaccuuu

SEQ ID NO: 3024298 - RNA, 16 nt, Human
auggugcaaugaccuu

SEQ ID NO: 3024299 - RNA, 19 nt, Human
auggugcaaugaccuuuca

SEQ ID NO: 3024300 - RNA, 19 nt, Human
uuucugcagccacuauugu

SEQ ID NO: 3024301 - RNA, 15 nt, Human
uuucuggcuaugcau

SEQ ID NO: 3024302 - RNA, 16 nt, Human
uuucuggcuaugcauu

SEQ ID NO: 3024303 - RNA, 18 nt, Human
uuucuggcuaugcauuug

SEQ ID NO: 3024304 - RNA, 19 nt, Human
uuucuggcuaugcauuuga

SEQ ID NO: 3024305 - RNA, 15 nt, Human
augggauccuggagu

SEQ ID NO: 3024306 - RNA, 15 nt, Human
augggggugcauuug

SEQ ID NO: 3024307 - RNA, 14 nt, Human
augggggugcauuu

SEQ ID NO: 3024308 - RNA, 24 nt, Human
auggggcugcaccggcuggccugg

SEQ ID NO: 3024309 - RNA, 12 nt, Human
auggggcugcac

SEQ ID NO: 3024310 - RNA, 20 nt, Human
augggcuggguucuacccag

SEQ ID NO: 3024311 - RNA, 18 nt, Human
augggccuccugugugug

SEQ ID NO: 3024312 - RNA, 17 nt, Human
augggccuccugugugu

SEQ ID NO: 3024313 - RNA, 15 nt, Human
uucccucaaaugugu

SEQ ID NO: 3024314 - RNA, 20 nt, Human
uucccucaccuuucccaucu

SEQ ID NO: 3024315 - RNA, 15 nt, Human
uucccuauuagagaa

SEQ ID NO: 3024316 - RNA, 14 nt, Human
uuccguuaaaauac

SEQ ID NO: 3024317 - RNA, 16 nt, Human
uuccguuaaaauacca

SEQ ID NO: 3024318 - RNA, 17 nt, Human
uuccuaauccucuagga

SEQ ID NO: 3024319 - RNA, 14 nt, Human
uuccugaaccgaug

SEQ ID NO: 3024320 - RNA, 17 nt, Human
uuccucuuuccaucuac

SEQ ID NO: 3024321 - RNA, 22 nt, Human
uuccucuuuccaucuacccucc

SEQ ID NO: 3024322 - RNA, 13 nt, Human
uuccucuuuccau

SEQ ID NO: 3024323 - RNA, 18 nt, Human
aucacggcucacugcagc

SEQ ID NO: 3024324 - RNA, 19 nt, Human
aucacggcucacugcagcc

SEQ ID NO: 3024325 - RNA, 13 nt, Human
aucacgccacugc

SEQ ID NO: 3024326 - RNA, 15 nt, Human
aucacggcucacugc

SEQ ID NO: 3024327 - RNA, 14 nt, Human
aucaaugaguaaca

SEQ ID NO: 3024328 - RNA, 11 nt, Human
uuccugugucu

SEQ ID NO: 3024329 - RNA, 21 nt, Human
aucaagaugugacauguuuua

SEQ ID NO: 3024330 - RNA, 19 nt, Human
uucuagcaugaagacagag

SEQ ID NO: 3024331 - RNA, 16 nt, Human
uucuagcauggcugcc

SEQ ID NO: 3024332 - RNA, 15 nt, Human
uucgcuccugugucu

SEQ ID NO: 3024333 - RNA, 19 nt, Human
uucgcuccugugucuugca

SEQ ID NO: 3024334 - RNA, 21 nt, Human
uucuaaaucuccaaaauaaaa

SEQ ID NO: 3024335 - RNA, 19 nt, Human
uucuaaaucuccaaaauaa

SEQ ID NO: 3024336 - RNA, 19 nt, Human
uucuaaaggcuaccuuugu

SEQ ID NO: 3024337 - RNA, 20 nt, Human
uucuaaaggcuaccuuugua

SEQ ID NO: 3024338 - RNA, 21 nt, Human
uucuaaaggcuaccuuuguau

SEQ ID NO: 3024339 - RNA, 12 nt, Human
aucagaauucuc

SEQ ID NO: 3024340 - RNA, 18 nt, Human
aucaggccaggcccucug

SEQ ID NO: 3024341 - RNA, 16 nt, Human
aucaggccaggcccuc

SEQ ID NO: 3024342 - RNA, 15 nt, Human
aucaggccaggcccu

SEQ ID NO: 3024343 - RNA, 13 nt, Human
aucagcacgauuu

SEQ ID NO: 3024344 - RNA, 14 nt, Human
aucaggccaggccc

SEQ ID NO: 3024345 - RNA, 11 nt, Human
aucagaauucu

SEQ ID NO: 3024346 - RNA, 14 nt, Human
uugaaaugauuuca

SEQ ID NO: 3024347 - RNA, 16 nt, Human
auccuccucagaucuu

SEQ ID NO: 3024348 - RNA, 16 nt, Human
auccuaggcauuugcu

SEQ ID NO: 3024349 - RNA, 12 nt, Human
auccuaagcuau

SEQ ID NO: 3024350 - RNA, 20 nt, Human
uucuucugcuucagccuccc

SEQ ID NO: 3024351 - RNA, 13 nt, Human
uucuucugcuuca

SEQ ID NO: 3024352 - RNA, 15 nt, Human
uucuucugcuucagc

SEQ ID NO: 3024353 - RNA, 14 nt, Human
uucuucucccucag

SEQ ID NO: 3024354 - RNA, 11 nt, Human
uucuucucccu

SEQ ID NO: 3024355 - RNA, 13 nt, Human
uucuucucccuca

SEQ ID NO: 3024356 - RNA, 24 nt, Human
aucccauaugccugggcagaagga

SEQ ID NO: 3024357 - RNA, 14 nt, Human
aucccucauccuca

SEQ ID NO: 3024358 - RNA, 13 nt, Human
aucccucauccuc

SEQ ID NO: 3024359 - RNA, 23 nt, Human
aucccucauccucauacccaccc

SEQ ID NO: 3024360 - RNA, 21 nt, Human
aucccucauccucauacccac

SEQ ID NO: 3024361 - RNA, 18 nt, Human
auccaagcuggucccacu

SEQ ID NO: 3024362 - RNA, 13 nt, Human
auccacccaccuc

SEQ ID NO: 3024363 - RNA, 15 nt, Human
auccacccaccucag

SEQ ID NO: 3024364 - RNA, 16 nt, Human
auccaguaucuugaag

SEQ ID NO: 3024365 - RNA, 15 nt, Human
auccaguaucuugaa

SEQ ID NO: 3024366 - RNA, 18 nt, Human
aucccauaugccugggca

SEQ ID NO: 3024367 - RNA, 12 nt, Human
aucccagcccca

SEQ ID NO: 3024368 - RNA, 20 nt, Human
aucccaaacccuucagugcc

SEQ ID NO: 3024369 - RNA, 19 nt, Human
aucccaaacccuucagugc

SEQ ID NO: 3024370 - RNA, 21 nt, Human
auccaguaucuugaagacuuu

SEQ ID NO: 3024371 - RNA, 17 nt, Human
uucuggcucuuccaggc

SEQ ID NO: 3024372 - RNA, 16 nt, Human
uucuggcucuuccagg

SEQ ID NO: 3024373 - RNA, 21 nt, Human
uucugccugcccaggccccug

SEQ ID NO: 3024374 - RNA, 15 nt, Human
uucuggcucuuccag

SEQ ID NO: 3024375 - RNA, 17 nt, Human
uucugccugcccaggcc

SEQ ID NO: 3024376 - RNA, 18 nt, Human
uucugccugcccaggccc

SEQ ID NO: 3024377 - RNA, 15 nt, Human
uucugccauauucug

SEQ ID NO: 3024378 - RNA, 22 nt, Human
uucugaacuuggcgcugccccu

SEQ ID NO: 3024379 - RNA, 19 nt, Human
uucugaacuuggcgcugcc

SEQ ID NO: 3024380 - RNA, 21 nt, Human
uucuccuuguguuacuaaguu

SEQ ID NO: 3024381 - RNA, 15 nt, Human
uucucuaguuugauu

SEQ ID NO: 3024382 - RNA, 17 nt, Human
uucucuaguuugauuaa

SEQ ID NO: 3024383 - RNA, 17 nt, Human
aucugaaauaaggaaug

SEQ ID NO: 3024384 - RNA, 12 nt, Human
aucugaaaaugu

SEQ ID NO: 3024385 - RNA, 23 nt, Human
aucugaaaauguauguguaagua

SEQ ID NO: 3024386 - RNA, 13 nt, Human
uugauuaaauucu

SEQ ID NO: 3024387 - RNA, 23 nt, Human
uugauguuuuaaggaugcuugua

SEQ ID NO: 3024388 - RNA, 14 nt, Human
uugauuaaauucuu

SEQ ID NO: 3024389 - RNA, 17 nt, Human
uugcauauugcauacua

SEQ ID NO: 3024390 - RNA, 16 nt, Human
uugcaauggcagccuu

SEQ ID NO: 3024391 - RNA, 17 nt, Human
uugcaauggcagccuug

SEQ ID NO: 3024392 - RNA, 19 nt, Human
uugcaauggcagccuuggc

SEQ ID NO: 3024393 - RNA, 18 nt, Human
uugcaccacugcacucca

SEQ ID NO: 3024394 - RNA, 16 nt, Human
uugcaccacugcacuc

SEQ ID NO: 3024395 - RNA, 15 nt, Human
uugcaccacugcacu

SEQ ID NO: 3024396 - RNA, 14 nt, Human
uugcaccacugcac

SEQ ID NO: 3024397 - RNA, 15 nt, Human
aucucuugagccugg

SEQ ID NO: 3024398 - RNA, 14 nt, Human
aucugaaaauguau

SEQ ID NO: 3024399 - RNA, 16 nt, Human
aucugaaaauguaugu

SEQ ID NO: 3024400 - RNA, 19 nt, Human
aucugaaaauguaugugua

SEQ ID NO: 3024401 - RNA, 20 nt, Human
aucugaaaauguauguguaa

SEQ ID NO: 3024402 - RNA, 22 nt, Human
aucugaaaauguauguguaagu

SEQ ID NO: 3024403 - RNA, 15 nt, Human
aucucccccagcccc

SEQ ID NO: 3024404 - RNA, 14 nt, Human
aucucccccagccc

SEQ ID NO: 3024405 - RNA, 17 nt, Human
aucucccccagccccau

SEQ ID NO: 3024406 - RNA, 16 nt, Human
aucucccccagcccca

SEQ ID NO: 3024407 - RNA, 16 nt, Human
aucucagggccugguc

SEQ ID NO: 3024408 - RNA, 14 nt, Human
aucucagggccugg

SEQ ID NO: 3024409 - RNA, 14 nt, Human
aucuccaaaauaaa

SEQ ID NO: 3024410 - RNA, 17 nt, Human
aucuccaaaauaaaacu

SEQ ID NO: 3024411 - RNA, 20 nt, Human
aucuccaaaauaaaacuuuu

SEQ ID NO: 3024412 - RNA, 21 nt, Human
aucuccaaaauaaaacuuuuu

SEQ ID NO: 3024413 - RNA, 13 nt, Human
aucuccaaaauaa

SEQ ID NO: 3024414 - RNA, 21 nt, Human
uugaaggaugcugucuucgua

SEQ ID NO: 3024415 - RNA, 17 nt, Human
auccucuguacagagcc

SEQ ID NO: 3024416 - RNA, 16 nt, Human
auccucuguacagagc

SEQ ID NO: 3024417 - RNA, 17 nt, Human
aucuaaauggaaccacu

SEQ ID NO: 3024418 - RNA, 18 nt, Human
aucuaaauggaaccacuc

SEQ ID NO: 3024419 - RNA, 13 nt, Human
aucuaaauggaac

SEQ ID NO: 3024420 - RNA, 15 nt, Human
uugagaucagccugg

SEQ ID NO: 3024421 - RNA, 16 nt, Human
uugagaucagccuggg

SEQ ID NO: 3024422 - RNA, 12 nt, Human
uugagacagagu

SEQ ID NO: 3024423 - RNA, 20 nt, Human
uugaguugauucagcucugc

SEQ ID NO: 3024424 - RNA, 20 nt, Human
uugagugaagcugggagaac

SEQ ID NO: 3024425 - RNA, 18 nt, Human
aucuaauauguaacaagc

SEQ ID NO: 3024426 - RNA, 13 nt, Human
aucuugcucugcu

SEQ ID NO: 3024427 - RNA, 20 nt, Human
aucuuggucagauuugaacu

SEQ ID NO: 3024428 - RNA, 18 nt, Human
aucugugaaaggaaagag

SEQ ID NO: 3024429 - RNA, 17 nt, Human
aucugugaaaggaaaga

SEQ ID NO: 3024430 - RNA, 10 nt, Human
aucuggugac

SEQ ID NO: 3024431 - RNA, 17 nt, Human
aucuggugacuuuccuc

SEQ ID NO: 3024432 - RNA, 16 nt, Human
aucuggugacuuuccu

SEQ ID NO: 3024433 - RNA, 15 nt, Human
augaaagggcccaga

SEQ ID NO: 3024434 - RNA, 18 nt, Human
augaaagggcccagagag

SEQ ID NO: 3024435 - RNA, 17 nt, Human
aucuuugcagacaggca

SEQ ID NO: 3024436 - RNA, 22 nt, Human
aucuuuucauuuaggugaggaa

SEQ ID NO: 3024437 - RNA, 23 nt, Human
uuggcuauuagagaucaaccccu

SEQ ID NO: 3024438 - RNA, 18 nt, Human
uuggccccugcccggcug

SEQ ID NO: 3024439 - RNA, 16 nt, Human
uuggagggugucccaa

SEQ ID NO: 3024440 - RNA, 14 nt, Human
uugcuugaaagaaa

SEQ ID NO: 3024441 - RNA, 14 nt, Human
augaaaugagguca

SEQ ID NO: 3024442 - RNA, 19 nt, Human
augaaagggcccagagagg

SEQ ID NO: 3024443 - RNA, 18 nt, Human
uuggggaccagagcugcc

SEQ ID NO: 3024444 - RNA, 18 nt, Human
auaacuuuuuauauucuc

SEQ ID NO: 3024445 - RNA, 22 nt, Human
auaacuuuuuauauucucagca

SEQ ID NO: 3024446 - RNA, 14 nt, Human
auaagauucauauu

SEQ ID NO: 3024447 - RNA, 16 nt, Human
uuagaagucacacagu

SEQ ID NO: 3024448 - RNA, 15 nt, Human
uuacugcagcuuugu

SEQ ID NO: 3024449 - RNA, 12 nt, Human
uuacuguacaug

SEQ ID NO: 3024450 - RNA, 13 nt, Human
uuacuguacauga

SEQ ID NO: 3024451 - RNA, 14 nt, Human
uuacuguacaugaa

SEQ ID NO: 3024452 - RNA, 22 nt, Human
uuacuguacaugaaaacacauu

SEQ ID NO: 3024453 - RNA, 23 nt, Human
uuacuguacaugaaaacacauuu

SEQ ID NO: 3024454 - RNA, 14 nt, Human
uuacaggugugaac

SEQ ID NO: 3024455 - RNA, 19 nt, Human
uuaccagcagagcaccuua

SEQ ID NO: 3024456 - RNA, 14 nt, Human
uuaccagcagagca

SEQ ID NO: 3024457 - RNA, 13 nt, Human
uuauaaacuuuac

SEQ ID NO: 3024458 - RNA, 14 nt, Human
uuaguagagacagg

SEQ ID NO: 3024459 - RNA, 13 nt, Human
uuaguagagacag

SEQ ID NO: 3024460 - RNA, 19 nt, Human
uuaggugugggggaagcac

SEQ ID NO: 3024461 - RNA, 22 nt, Human
auaagccaaaaaaugcuugcuu

SEQ ID NO: 3024462 - RNA, 21 nt, Human
auaagauucauauuuacuucu

SEQ ID NO: 3024463 - RNA, 18 nt, Human
auaauuuaccugaagucu

SEQ ID NO: 3024464 - RNA, 15 nt, Human
aguuuuacaguguuu

SEQ ID NO: 3024465 - RNA, 22 nt, Human
aguuuguuaguaugaggcauuu

SEQ ID NO: 3024466 - RNA, 19 nt, Human
aguuucugccgcagcccug

SEQ ID NO: 3024467 - RNA, 14 nt, Human
aguuucucuuuuca

SEQ ID NO: 3024468 - RNA, 15 nt, Human
aguuucugccgcagc

SEQ ID NO: 3024469 - RNA, 15 nt, Human
aguuuaucuguucau

SEQ ID NO: 3024470 - RNA, 12 nt, Human
uuaacagaaaug

SEQ ID NO: 3024471 - RNA, 13 nt, Human
uuaacagaaaugu

SEQ ID NO: 3024472 - RNA, 14 nt, Human
uuaacagaaaugua

SEQ ID NO: 3024473 - RNA, 17 nt, Human
uuaaaaaucucaaauuu

SEQ ID NO: 3024474 - RNA, 20 nt, Human
uuaaaaaucucaaauuucua

SEQ ID NO: 3024475 - RNA, 19 nt, Human
uuaaaaaucucaaauuucu

SEQ ID NO: 3024476 - RNA, 19 nt, Human
uuaagacuuugguuauuuu

SEQ ID NO: 3024477 - RNA, 15 nt, Human
uuaaucuaaauggaa

SEQ ID NO: 3024478 - RNA, 19 nt, Human
aguuuuuuuccuucaagaa

SEQ ID NO: 3024479 - RNA, 23 nt, Human
uuaacuuuuauaaacuuuaccuu

SEQ ID NO: 3024480 - RNA, 22 nt, Human
uuaacuuuuauaaacuuuaccu

SEQ ID NO: 3024481 - RNA, 18 nt, Human
uuaacuuuuauaaacuuu

SEQ ID NO: 3024482 - RNA, 13 nt, Human
uuauguuaauauu

SEQ ID NO: 3024483 - RNA, 12 nt, Human
uuauuaugcaug

SEQ ID NO: 3024484 - RNA, 18 nt, Human
uuauucauuaguuuugaa

SEQ ID NO: 3024485 - RNA, 21 nt, Human
uuauucauuaguuuugaagau

SEQ ID NO: 3024486 - RNA, 14 nt, Human
uuauuauuaacaaa

SEQ ID NO: 3024487 - RNA, 13 nt, Human
uuauuauuaacaa

SEQ ID NO: 3024488 - RNA, 13 nt, Human
uuauuaugcauga

SEQ ID NO: 3024489 - RNA, 18 nt, Human
auacugccuuguuuaaug

SEQ ID NO: 3024490 - RNA, 20 nt, Human
auacugccuuguuuaauggu

SEQ ID NO: 3024491 - RNA, 11 nt, Human
auacucccauc

SEQ ID NO: 3024492 - RNA, 14 nt, Human
auacucccaucugu

SEQ ID NO: 3024493 - RNA, 17 nt, Human
auacuccuccaagguua

SEQ ID NO: 3024494 - RNA, 16 nt, Human
auacucugcuuagaau

SEQ ID NO: 3024495 - RNA, 14 nt, Human
auagauguugcuaa

SEQ ID NO: 3024496 - RNA, 20 nt, Human
auagauguugcuaacagcaa

SEQ ID NO: 3024497 - RNA, 14 nt, Human
auagagagagacca

SEQ ID NO: 3024498 - RNA, 23 nt, Human
auagacaauuuauuauggcacau

SEQ ID NO: 3024499 - RNA, 16 nt, Human
auagacaauuuauuau

SEQ ID NO: 3024500 - RNA, 22 nt, Human
auagacaauuuauuauggcaca

SEQ ID NO: 3024501 - RNA, 17 nt, Human
auacuauuaaacaugcu

SEQ ID NO: 3024502 - RNA, 13 nt, Human
auacuaaccagca

SEQ ID NO: 3024503 - RNA, 19 nt, Human
auacuaaccagcagaaaug

SEQ ID NO: 3024504 - RNA, 20 nt, Human
auacuaaccagcagaaaugc

SEQ ID NO: 3024505 - RNA, 19 nt, Human
auacuauuaaacaugcugu

SEQ ID NO: 3024506 - RNA, 18 nt, Human
auacuauuaaacaugcug

SEQ ID NO: 3024507 - RNA, 13 nt, Human
auacguacacauu

SEQ ID NO: 3024508 - RNA, 14 nt, Human
auacguacacauuu

SEQ ID NO: 3024509 - RNA, 15 nt, Human
auacguacacauuuu

SEQ ID NO: 3024510 - RNA, 16 nt, Human
auacguacacauuuua

SEQ ID NO: 3024511 - RNA, 14 nt, Human
auaccuuuuuuaga

SEQ ID NO: 3024512 - RNA, 17 nt, Human
auaccacuuuuguucuu

SEQ ID NO: 3024513 - RNA, 18 nt, Human
auaccacuuuuguucuug

SEQ ID NO: 3024514 - RNA, 20 nt, Human
auacauaaacaagaccacgu

SEQ ID NO: 3024515 - RNA, 20 nt, Human
auacaguuacucagaauucu

SEQ ID NO: 3024516 - RNA, 18 nt, Human
auacaguuacucagaauu

SEQ ID NO: 3024517 - RNA, 23 nt, Human
auacagauagauauaugcucugc

SEQ ID NO: 3024518 - RNA, 22 nt, Human
auacaggaaaagcugcugacag

SEQ ID NO: 3024519 - RNA, 23 nt, Human
auacaggaaaagcugcugacagu

SEQ ID NO: 3024520 - RNA, 17 nt, Human
auacagaggcaacugca

SEQ ID NO: 3024521 - RNA, 16 nt, Human
auacagaggcaacugc

SEQ ID NO: 3024522 - RNA, 17 nt, Human
uuauaaacuuuaccuuu

SEQ ID NO: 3024523 - RNA, 18 nt, Human
uuauaaacuuuaccuuuu

SEQ ID NO: 3024524 - RNA, 22 nt, Human
uuaugggcuggguucuacccag

SEQ ID NO: 3024525 - RNA, 13 nt, Human
uuaugggcugggu

SEQ ID NO: 3024526 - RNA, 19 nt, Human
uuauggcuuuugugcauua

SEQ ID NO: 3024527 - RNA, 18 nt, Human
uuauggcuuuugugcauu

SEQ ID NO: 3024528 - RNA, 17 nt, Human
uuaucacccagaagaaa

SEQ ID NO: 3024529 - RNA, 18 nt, Human
uuaucacccagaagaaaa

SEQ ID NO: 3024530 - RNA, 19 nt, Human
uuaucacccagaagaaaau

SEQ ID NO: 3024531 - RNA, 21 nt, Human
uuaucacccagaagaaaauag

SEQ ID NO: 3024532 - RNA, 11 nt, Human
uuaugacucca

SEQ ID NO: 3024533 - RNA, 15 nt, Human
agucucccuuccuau

SEQ ID NO: 3024534 - RNA, 11 nt, Human
ugugaggaagc

SEQ ID NO: 3024535 - RNA, 16 nt, Human
ugugacugaucucucg

SEQ ID NO: 3024536 - RNA, 17 nt, Human
agucucuugauucauaa

SEQ ID NO: 3024537 - RNA, 16 nt, Human
agucucuugauucaua

SEQ ID NO: 3024538 - RNA, 14 nt, Human
agucuuagauguau

SEQ ID NO: 3024539 - RNA, 16 nt, Human
agucuuagauguauau

SEQ ID NO: 3024540 - RNA, 13 nt, Human
agucuuagaugua

SEQ ID NO: 3024541 - RNA, 18 nt, Human
ugugaugagaggaaauca

SEQ ID NO: 3024542 - RNA, 19 nt, Human
ugugaugagaggaaaucac

SEQ ID NO: 3024543 - RNA, 22 nt, Human
ugugaugaugaaaugaggucag

SEQ ID NO: 3024544 - RNA, 12 nt, Human
agugagcugguu

SEQ ID NO: 3024545 - RNA, 14 nt, Human
agugagcacuaagg

SEQ ID NO: 3024546 - RNA, 22 nt, Human
agugagcacuaaggugugcucu

SEQ ID NO: 3024547 - RNA, 21 nt, Human
agugacugauggcuaauguac

SEQ ID NO: 3024548 - RNA, 16 nt, Human
agugaacuugggccac

SEQ ID NO: 3024549 - RNA, 18 nt, Human
agugcaaacuucagaguu

SEQ ID NO: 3024550 - RNA, 16 nt, Human
agugaggaugaaaaaa

SEQ ID NO: 3024551 - RNA, 12 nt, Human
agugaggcucug

SEQ ID NO: 3024552 - RNA, 13 nt, Human
agugaggcucugc

SEQ ID NO: 3024553 - RNA, 17 nt, Human
agugcagugagccgaga

SEQ ID NO: 3024554 - RNA, 16 nt, Human
agugcaugcugucccu

SEQ ID NO: 3024555 - RNA, 14 nt, Human
agugcaugcugucc

SEQ ID NO: 3024556 - RNA, 17 nt, Human
ugugccuaauguguuug

SEQ ID NO: 3024557 - RNA, 18 nt, Human
ugugccuaauguguuuga

SEQ ID NO: 3024558 - RNA, 14 nt, Human
ugugccuaaugugu

SEQ ID NO: 3024559 - RNA, 15 nt, Human
ugugccuaauguguu

SEQ ID NO: 3024560 - RNA, 19 nt, Human
ugugcugagucugaaggcu

SEQ ID NO: 3024561 - RNA, 18 nt, Human
ugugcugagucugaaggc

SEQ ID NO: 3024562 - RNA, 21 nt, Human
ugugcugcccugcccaccugg

SEQ ID NO: 3024563 - RNA, 20 nt, Human
ugugcugcccugcccaccug

SEQ ID NO: 3024564 - RNA, 19 nt, Human
ugugcugcccugcccaccu

SEQ ID NO: 3024565 - RNA, 18 nt, Human
ugugcugcccugcccacc

SEQ ID NO: 3024566 - RNA, 14 nt, Human
uguggaugauaaaa

SEQ ID NO: 3024567 - RNA, 23 nt, Human
agugagcugguuuuuagcggaga

SEQ ID NO: 3024568 - RNA, 22 nt, Human
uguggauuuaacagaaauguac

SEQ ID NO: 3024569 - RNA, 19 nt, Human
uguggauuuaacagaaaug

SEQ ID NO: 3024570 - RNA, 20 nt, Human
uguggauuuaacagaaaugu

SEQ ID NO: 3024571 - RNA, 22 nt, Human
uguggucaacauuucucauguu

SEQ ID NO: 3024572 - RNA, 14 nt, Human
ugugucauuucaaa

SEQ ID NO: 3024573 - RNA, 13 nt, Human
ugugucauuucaa

SEQ ID NO: 3024574 - RNA, 20 nt, Human
ugugucagguggggcagcuu

SEQ ID NO: 3024575 - RNA, 11 nt, Human
uguguguuuau

SEQ ID NO: 3024576 - RNA, 22 nt, Human
ugugucucuugguccugcugca

SEQ ID NO: 3024577 - RNA, 18 nt, Human
agugggggaucacagccu

SEQ ID NO: 3024578 - RNA, 22 nt, Human
agugggcccaaugcacuuuguu

SEQ ID NO: 3024579 - RNA, 22 nt, Human
uguguuaucacccagaagaaaa

SEQ ID NO: 3024580 - RNA, 19 nt, Human
uguuacauaagauaaaugu

SEQ ID NO: 3024581 - RNA, 22 nt, Human
uguucuaaauaucccuuggaca

SEQ ID NO: 3024582 - RNA, 19 nt, Human
aguguguggucaacauuuc

SEQ ID NO: 3024583 - RNA, 23 nt, Human
uguugcccaggcuggcgugcagu

SEQ ID NO: 3024584 - RNA, 20 nt, Human
uguugcccaggcuggcgugc

SEQ ID NO: 3024585 - RNA, 13 nt, Human
aguuacucagaau

SEQ ID NO: 3024586 - RNA, 19 nt, Human
aguguuguggauuuaacag

SEQ ID NO: 3024587 - RNA, 20 nt, Human
aguguuguggauuuaacaga

SEQ ID NO: 3024588 - RNA, 16 nt, Human
aguguuguggauuuaa

SEQ ID NO: 3024589 - RNA, 19 nt, Human
uguuccacaaguuaaauaa

SEQ ID NO: 3024590 - RNA, 22 nt, Human
agugugguguuuccuggcacug

SEQ ID NO: 3024591 - RNA, 13 nt, Human
uguuaugacucca

SEQ ID NO: 3024592 - RNA, 17 nt, Human
uguuaugacuccagaau

SEQ ID NO: 3024593 - RNA, 20 nt, Human
agugugacugaucucucgug

SEQ ID NO: 3024594 - RNA, 20 nt, Human
agugugccugaagucccaga

SEQ ID NO: 3024595 - RNA, 21 nt, Human
agugugccugaagucccagau

SEQ ID NO: 3024596 - RNA, 20 nt, Human
agugugguguuuccuggcac

SEQ ID NO: 3024597 - RNA, 20 nt, Human
aguaaaaaaugguguuuuau

SEQ ID NO: 3024598 - RNA, 16 nt, Human
agguuuuuuuuucuca

SEQ ID NO: 3024599 - RNA, 21 nt, Human
uguacauggaauaacauguaa

SEQ ID NO: 3024600 - RNA, 17 nt, Human
aguaaugagcuuaagaa

SEQ ID NO: 3024601 - RNA, 23 nt, Human
aguacacuguuucaaacuuuacu

SEQ ID NO: 3024602 - RNA, 21 nt, Human
aguacacuguuucaaacuuua

SEQ ID NO: 3024603 - RNA, 16 nt, Human
uguaggguuauaauaa

SEQ ID NO: 3024604 - RNA, 17 nt, Human
uguaggguuauaauaau

SEQ ID NO: 3024605 - RNA, 22 nt, Human
uguauauauuuccuauauuguu

SEQ ID NO: 3024606 - RNA, 18 nt, Human
uguauauauuuccuauau

SEQ ID NO: 3024607 - RNA, 15 nt, Human
uguacauacuuuuug

SEQ ID NO: 3024608 - RNA, 20 nt, Human
uguacauacuuuuuggguuu

SEQ ID NO: 3024609 - RNA, 20 nt, Human
uguacaugaaaacacauuuu

SEQ ID NO: 3024610 - RNA, 16 nt, Human
uguacaugaaaacaca

SEQ ID NO: 3024611 - RNA, 14 nt, Human
uguacaugaaaaca

SEQ ID NO: 3024612 - RNA, 20 nt, Human
uguaauuuuuuuaucgucac

SEQ ID NO: 3024613 - RNA, 19 nt, Human
uguacauaaugcgugcaua

SEQ ID NO: 3024614 - RNA, 20 nt, Human
uguacauaaugcgugcauac

SEQ ID NO: 3024615 - RNA, 20 nt, Human
agguuggcaaaaaggcagga

SEQ ID NO: 3024616 - RNA, 17 nt, Human
uguaauuaaguacuaug

SEQ ID NO: 3024617 - RNA, 18 nt, Human
uguaauuaaguacuaugu

SEQ ID NO: 3024618 - RNA, 19 nt, Human
uguaauuaaguacuaugua

SEQ ID NO: 3024619 - RNA, 21 nt, Human
uguaauuaaguacuauguauc

SEQ ID NO: 3024620 - RNA, 22 nt, Human
aggugggauaucacuuccauga

SEQ ID NO: 3024621 - RNA, 12 nt, Human
aggugggaggau

SEQ ID NO: 3024622 - RNA, 14 nt, Human
agguugaagcacca

SEQ ID NO: 3024623 - RNA, 16 nt, Human
aggugucccugcacuu

SEQ ID NO: 3024624 - RNA, 21 nt, Human
aggugugagucaccaagccca

SEQ ID NO: 3024625 - RNA, 22 nt, Human
aggugugagucaccaagcccag

SEQ ID NO: 3024626 - RNA, 20 nt, Human
uguccagccccguagacgug

SEQ ID NO: 3024627 - RNA, 22 nt, Human
uguccaagaagcccaggaaagg

SEQ ID NO: 3024628 - RNA, 18 nt, Human
uguccaagaagcccagga

SEQ ID NO: 3024629 - RNA, 17 nt, Human
uguccaagaagcccagg

SEQ ID NO: 3024630 - RNA, 16 nt, Human
uguccaagaagcccag

SEQ ID NO: 3024631 - RNA, 20 nt, Human
ugucccugcacuugcagacu

SEQ ID NO: 3024632 - RNA, 22 nt, Human
ugucccugcacuugcagacucu

SEQ ID NO: 3024633 - RNA, 23 nt, Human
ugucccugcacuugcagacucua

SEQ ID NO: 3024634 - RNA, 16 nt, Human
ugucagguggggcagc

SEQ ID NO: 3024635 - RNA, 15 nt, Human
uguccaagaagccca

SEQ ID NO: 3024636 - RNA, 14 nt, Human
uguccaagaagccc

SEQ ID NO: 3024637 - RNA, 17 nt, Human
ugucagguggggcagcu

SEQ ID NO: 3024638 - RNA, 18 nt, Human
ugucagguggggcagcuu

SEQ ID NO: 3024639 - RNA, 20 nt, Human
ugucagguggggcagcuuga

SEQ ID NO: 3024640 - RNA, 20 nt, Human
ugucauuugagcagggcuca

SEQ ID NO: 3024641 - RNA, 21 nt, Human
ugucauuugagcagggcucag

SEQ ID NO: 3024642 - RNA, 22 nt, Human
ugucauuugagcagggcucagc

SEQ ID NO: 3024643 - RNA, 14 nt, Human
agucaccaagccca

SEQ ID NO: 3024644 - RNA, 15 nt, Human
agucaccaagcccag

SEQ ID NO: 3024645 - RNA, 17 nt, Human
agucaccccggccaccu

SEQ ID NO: 3024646 - RNA, 19 nt, Human
aguauucuuauuuaaugaa

SEQ ID NO: 3024647 - RNA, 14 nt, Human
ugucccugcacuug

SEQ ID NO: 3024648 - RNA, 23 nt, Human
ugucccuuacgugaguccuggca

SEQ ID NO: 3024649 - RNA, 19 nt, Human
ugucccuuacgugaguccu

SEQ ID NO: 3024650 - RNA, 18 nt, Human
agucccaccuuggcugca

SEQ ID NO: 3024651 - RNA, 19 nt, Human
agucccaccuuggcugcag

SEQ ID NO: 3024652 - RNA, 15 nt, Human
agucccaccuuggcu

SEQ ID NO: 3024653 - RNA, 16 nt, Human
agucccaccuuggcug

SEQ ID NO: 3024654 - RNA, 23 nt, Human
agucucacuguugcccaggcugg

SEQ ID NO: 3024655 - RNA, 21 nt, Human
agucucacuguugcccaggcu

SEQ ID NO: 3024656 - RNA, 16 nt, Human
aguccucccaucucac

SEQ ID NO: 3024657 - RNA, 14 nt, Human
aguccucccaucuc

SEQ ID NO: 3024658 - RNA, 16 nt, Human
uggcuaacuuggguua

SEQ ID NO: 3024659 - RNA, 17 nt, Human
uggcuaauguacugcau

SEQ ID NO: 3024660 - RNA, 19 nt, Human
uggcuaauguacugcauau

SEQ ID NO: 3024661 - RNA, 14 nt, Human
uggcuaaauucaug

SEQ ID NO: 3024662 - RNA, 23 nt, Human
aggcuccaggagcagccacauuc

SEQ ID NO: 3024663 - RNA, 19 nt, Human
aggcuccaggagcagccac

SEQ ID NO: 3024664 - RNA, 18 nt, Human
aggcuccaggagcagcca

SEQ ID NO: 3024665 - RNA, 17 nt, Human
aggcuccaggagcagcc

SEQ ID NO: 3024666 - RNA, 13 nt, Human
uggcucacgccug

SEQ ID NO: 3024667 - RNA, 23 nt, Human
uggcuguuggcugggggccucag

SEQ ID NO: 3024668 - RNA, 14 nt, Human
uggcuucacggaag

SEQ ID NO: 3024669 - RNA, 16 nt, Human
uggcuguuggcugggg

SEQ ID NO: 3024670 - RNA, 18 nt, Human
uggcuguuggcugggggc

SEQ ID NO: 3024671 - RNA, 23 nt, Human
uggcugcaaaggguaucaggugc

SEQ ID NO: 3024672 - RNA, 21 nt, Human
uggcuuuugugcauuaucuag

SEQ ID NO: 3024673 - RNA, 15 nt, Human
uggcuuuugugcauu

SEQ ID NO: 3024674 - RNA, 16 nt, Human
uggcuuuugugcauua

SEQ ID NO: 3024675 - RNA, 20 nt, Human
uggcuucacggaagagccuu

SEQ ID NO: 3024676 - RNA, 17 nt, Human
uggcuucacggaagagc

SEQ ID NO: 3024677 - RNA, 18 nt, Human
aggcuuagugauguaauu

SEQ ID NO: 3024678 - RNA, 17 nt, Human
aggcuuagugauguaau

SEQ ID NO: 3024679 - RNA, 19 nt, Human
aggcuuagugauguaauua

SEQ ID NO: 3024680 - RNA, 23 nt, Human
aggcuuagucacugagacagccc

SEQ ID NO: 3024681 - RNA, 22 nt, Human
aggcuuagucacugagacagcc

SEQ ID NO: 3024682 - RNA, 21 nt, Human
aggcuuagucacugagacagc

SEQ ID NO: 3024683 - RNA, 17 nt, Human
aggcugggggaagaagc

SEQ ID NO: 3024684 - RNA, 22 nt, Human
aggcugggcuucaguggcagcu

SEQ ID NO: 3024685 - RNA, 23 nt, Human
aggcugggcuucaguggcagcug

SEQ ID NO: 3024686 - RNA, 18 nt, Human
aggcugggcuucaguggc

SEQ ID NO: 3024687 - RNA, 19 nt, Human
aggcugggcuucaguggca

SEQ ID NO: 3024688 - RNA, 20 nt, Human
aggcugggcuucaguggcag

SEQ ID NO: 3024689 - RNA, 21 nt, Human
aggcugggcuucaguggcagc

SEQ ID NO: 3024690 - RNA, 17 nt, Human
aggcuggguucugaucc

SEQ ID NO: 3024691 - RNA, 14 nt, Human
aggcuggguucuga

SEQ ID NO: 3024692 - RNA, 22 nt, Human
aggcugggggaagaagcucucu

SEQ ID NO: 3024693 - RNA, 13 nt, Human
aggcugggcuccc

SEQ ID NO: 3024694 - RNA, 18 nt, Human
aggcugggcucccuuccc

SEQ ID NO: 3024695 - RNA, 14 nt, Human
aggcugggcucccu

SEQ ID NO: 3024696 - RNA, 14 nt, Human
aggcugggcuucag

SEQ ID NO: 3024697 - RNA, 23 nt, Human
aggcugggcucccuucccaccuc

SEQ ID NO: 3024698 - RNA, 21 nt, Human
aggcugggcucccuucccacc

SEQ ID NO: 3024699 - RNA, 22 nt, Human
aggcugggagagccuuccaggg

SEQ ID NO: 3024700 - RNA, 21 nt, Human
aggcugggagagccuuccagg

SEQ ID NO: 3024701 - RNA, 20 nt, Human
aggcugggagagccuuccag

SEQ ID NO: 3024702 - RNA, 16 nt, Human
aggcugggagagccuu

SEQ ID NO: 3024703 - RNA, 19 nt, Human
aggcugggagagccuucca

SEQ ID NO: 3024704 - RNA, 12 nt, Human
agggcccagaga

SEQ ID NO: 3024705 - RNA, 13 nt, Human
agggcccagagag

SEQ ID NO: 3024706 - RNA, 23 nt, Human
agggaguccgaaagggacuugga

SEQ ID NO: 3024707 - RNA, 20 nt, Human
agggagugacagaggcagcc

SEQ ID NO: 3024708 - RNA, 20 nt, Human
agggagugaguugauagcac

SEQ ID NO: 3024709 - RNA, 20 nt, Human
agggaguccgaaagggacuu

SEQ ID NO: 3024710 - RNA, 22 nt, Human
agggagggcuccagacacaugu

SEQ ID NO: 3024711 - RNA, 17 nt, Human
agggagggagggcucca

SEQ ID NO: 3024712 - RNA, 12 nt, Human
agggagggcucc

SEQ ID NO: 3024713 - RNA, 19 nt, Human
agggagggcuccagacaca

SEQ ID NO: 3024714 - RNA, 17 nt, Human
agggagggcuccagaca

SEQ ID NO: 3024715 - RNA, 14 nt, Human
agggcccagagagg

SEQ ID NO: 3024716 - RNA, 15 nt, Human
agggcuccagacaca

SEQ ID NO: 3024717 - RNA, 20 nt, Human
agggcuccagacacaugucc

SEQ ID NO: 3024718 - RNA, 21 nt, Human
ugggcucccuucccaccucuc

SEQ ID NO: 3024719 - RNA, 14 nt, Human
ugggcucccuuccc

SEQ ID NO: 3024720 - RNA, 18 nt, Human
agggacuuggaagcuccg

SEQ ID NO: 3024721 - RNA, 19 nt, Human
agggacuuggaagcuccgc

SEQ ID NO: 3024722 - RNA, 15 nt, Human
agggacuuggaagcu

SEQ ID NO: 3024723 - RNA, 20 nt, Human
agggacuuggaagcuccgcu

SEQ ID NO: 3024724 - RNA, 18 nt, Human
ugggacuacaggcaccca

SEQ ID NO: 3024725 - RNA, 16 nt, Human
ugggacuacaggugug

SEQ ID NO: 3024726 - RNA, 21 nt, Human
ugggcaacccccagccugcua

SEQ ID NO: 3024727 - RNA, 13 nt, Human
ugggcagaaggaa

SEQ ID NO: 3024728 - RNA, 20 nt, Human
ugggcagaaggaagacuuca

SEQ ID NO: 3024729 - RNA, 16 nt, Human
ugggcagaaggaagac

SEQ ID NO: 3024730 - RNA, 23 nt, Human
ugggcagaaggaagacuucaucc

SEQ ID NO: 3024731 - RNA, 22 nt, Human
ugggaggaucucuugagccugg

SEQ ID NO: 3024732 - RNA, 21 nt, Human
ugggagaaccaaaaagaggcu

SEQ ID NO: 3024733 - RNA, 21 nt, Human
ugggaggauugcuugagcuca

SEQ ID NO: 3024734 - RNA, 18 nt, Human
ugggaggauugcuugagc

SEQ ID NO: 3024735 - RNA, 22 nt, Human
ugggaggauugcuugagcucag

SEQ ID NO: 3024736 - RNA, 11 nt, Human
uggcccaggag

SEQ ID NO: 3024737 - RNA, 22 nt, Human
uggcaugggaaugaaugucagu

SEQ ID NO: 3024738 - RNA, 19 nt, Human
uggcccacgcacuucggga

SEQ ID NO: 3024739 - RNA, 13 nt, Human
uggcccacgcacu

SEQ ID NO: 3024740 - RNA, 14 nt, Human
uggcccacugcauc

SEQ ID NO: 3024741 - RNA, 13 nt, Human
uggcccacugcau

SEQ ID NO: 3024742 - RNA, 18 nt, Human
uggccugagcugggauga

SEQ ID NO: 3024743 - RNA, 20 nt, Human
uggccucugcacuccccugc

SEQ ID NO: 3024744 - RNA, 18 nt, Human
uggccucugcacuccccu

SEQ ID NO: 3024745 - RNA, 19 nt, Human
uggccucugcacuccccug

SEQ ID NO: 3024746 - RNA, 17 nt, Human
aggccuucucugaagga

SEQ ID NO: 3024747 - RNA, 18 nt, Human
aggccuucucugaaggac

SEQ ID NO: 3024748 - RNA, 13 nt, Human
aggcuccaggagc

SEQ ID NO: 3024749 - RNA, 16 nt, Human
aggcuccaggagcagc

SEQ ID NO: 3024750 - RNA, 14 nt, Human
aggcuccaggagca

SEQ ID NO: 3024751 - RNA, 16 nt, Human
aggcccagagggccug

SEQ ID NO: 3024752 - RNA, 15 nt, Human
aggcccagagggccu

SEQ ID NO: 3024753 - RNA, 17 nt, Human
aggccaugggccuccug

SEQ ID NO: 3024754 - RNA, 18 nt, Human
aggccaugggccuccugu

SEQ ID NO: 3024755 - RNA, 23 nt, Human
aggccagagacacaagccuucgg

SEQ ID NO: 3024756 - RNA, 13 nt, Human
uggcagcucagag

SEQ ID NO: 3024757 - RNA, 15 nt, Human
uggcagcucagagag

SEQ ID NO: 3024758 - RNA, 14 nt, Human
uggcagcucagaga

SEQ ID NO: 3024759 - RNA, 18 nt, Human
aggccagagacacaagcc

SEQ ID NO: 3024760 - RNA, 13 nt, Human
aggccagagacac

SEQ ID NO: 3024761 - RNA, 16 nt, Human
uggcagcucagagagg

SEQ ID NO: 3024762 - RNA, 12 nt, Human
aggccagagaca

SEQ ID NO: 3024763 - RNA, 17 nt, Human
uggcaccagcagccugg

SEQ ID NO: 3024764 - RNA, 16 nt, Human
uggcaccagcagccug

SEQ ID NO: 3024765 - RNA, 13 nt, Human
aggccuggccaga

SEQ ID NO: 3024766 - RNA, 12 nt, Human
aggccuggccag

SEQ ID NO: 3024767 - RNA, 14 nt, Human
aggcccggcuccag

SEQ ID NO: 3024768 - RNA, 15 nt, Human
aggcccggcuccagg

SEQ ID NO: 3024769 - RNA, 16 nt, Human
aggcccggcuccaggc

SEQ ID NO: 3024770 - RNA, 13 nt, Human
aggccccugccac

SEQ ID NO: 3024771 - RNA, 15 nt, Human
aggccccugccaccc

SEQ ID NO: 3024772 - RNA, 20 nt, Human
aggcccagagggccugcaag

SEQ ID NO: 3024773 - RNA, 19 nt, Human
aggcccagagggccugcaa

SEQ ID NO: 3024774 - RNA, 17 nt, Human
aggccccugccacccug

SEQ ID NO: 3024775 - RNA, 18 nt, Human
aggccccugccacccugg

SEQ ID NO: 3024776 - RNA, 12 nt, Human
aggccccugcca

SEQ ID NO: 3024777 - RNA, 21 nt, Human
aggccccugccacccugggga

SEQ ID NO: 3024778 - RNA, 12 nt, Human
aggaguuuggcc

SEQ ID NO: 3024779 - RNA, 21 nt, Human
aggaguuugagaccaaccugg

SEQ ID NO: 3024780 - RNA, 15 nt, Human
aggaggccagccuug

SEQ ID NO: 3024781 - RNA, 19 nt, Human
uggaacacucuauaacaaa

SEQ ID NO: 3024782 - RNA, 10 nt, Human
ugcugcccug

SEQ ID NO: 3024783 - RNA, 18 nt, Human
uggaaguacuauaauuua

SEQ ID NO: 3024784 - RNA, 20 nt, Human
uggaaguacuauaauuuacc

SEQ ID NO: 3024785 - RNA, 13 nt, Human
uggaagcuccgcu

SEQ ID NO: 3024786 - RNA, 12 nt, Human
uggaacacucug

SEQ ID NO: 3024787 - RNA, 22 nt, Human
aggauugcuacuguccuaccca

SEQ ID NO: 3024788 - RNA, 18 nt, Human
aggaugcuuguacauaau

SEQ ID NO: 3024789 - RNA, 12 nt, Human
aggaucagucug

SEQ ID NO: 3024790 - RNA, 21 nt, Human
aggauccugagccagauuuca

SEQ ID NO: 3024791 - RNA, 15 nt, Human
aggaugcuuguacau

SEQ ID NO: 3024792 - RNA, 16 nt, Human
aggaugcuuguacaua

SEQ ID NO: 3024793 - RNA, 15 nt, Human
uggacaccggaaaca

SEQ ID NO: 3024794 - RNA, 14 nt, Human
aggcaagcaccucc

SEQ ID NO: 3024795 - RNA, 19 nt, Human
aggcaacugcauuggcuuu

SEQ ID NO: 3024796 - RNA, 15 nt, Human
aggcaaugcuggcug

SEQ ID NO: 3024797 - RNA, 16 nt, Human
aggcaaugcuggcugu

SEQ ID NO: 3024798 - RNA, 22 nt, Human
uggacuuuguuaguuucuccaa

SEQ ID NO: 3024799 - RNA, 11 nt, Human
uggacuuuguu

SEQ ID NO: 3024800 - RNA, 24 nt, Human
uggacuuuguuaguuucuccaagc

SEQ ID NO: 3024801 - RNA, 22 nt, Human
aggcagccccauucugccugcc

SEQ ID NO: 3024802 - RNA, 19 nt, Human
aggcagccccauucugccu

SEQ ID NO: 3024803 - RNA, 20 nt, Human
aggcagccccauucugccug

SEQ ID NO: 3024804 - RNA, 21 nt, Human
aggcagccccauucugccugc

SEQ ID NO: 3024805 - RNA, 12 nt, Human
aggcaggauggc

SEQ ID NO: 3024806 - RNA, 21 nt, Human
aggcaggucuugaacuccugg

SEQ ID NO: 3024807 - RNA, 22 nt, Human
aggcagggucucacucugucgc

SEQ ID NO: 3024808 - RNA, 14 nt, Human
aggcagguccaggg

SEQ ID NO: 3024809 - RNA, 19 nt, Human
aggcagggucucacucugu

SEQ ID NO: 3024810 - RNA, 18 nt, Human
aggcagggucucacucug

SEQ ID NO: 3024811 - RNA, 20 nt, Human
aggcagggucucacucuguc

SEQ ID NO: 3024812 - RNA, 21 nt, Human
aggcagggucucacucugucg

SEQ ID NO: 3024813 - RNA, 20 nt, Human
ugccuuuuuauaacuuuuua

SEQ ID NO: 3024814 - RNA, 13 nt, Human
ugcgaaaggauga

SEQ ID NO: 3024815 - RNA, 19 nt, Human
ugcgaaaggaugaaaguga

SEQ ID NO: 3024816 - RNA, 18 nt, Human
ugcggacagccacggcca

SEQ ID NO: 3024817 - RNA, 17 nt, Human
ugcggacagccacggcc

SEQ ID NO: 3024818 - RNA, 15 nt, Human
ugccuguucagcucc

SEQ ID NO: 3024819 - RNA, 16 nt, Human
ugccuguucagcucca

SEQ ID NO: 3024820 - RNA, 23 nt, Human
agcugggaugauuggagggggga

SEQ ID NO: 3024821 - RNA, 17 nt, Human
agcugggacuacaggug

SEQ ID NO: 3024822 - RNA, 19 nt, Human
agcugggacuacaggugug

SEQ ID NO: 3024823 - RNA, 14 nt, Human
agcugggcagguug

SEQ ID NO: 3024824 - RNA, 22 nt, Human
ugccucugacacacagcucugu

SEQ ID NO: 3024825 - RNA, 19 nt, Human
agcugccugggaucccuca

SEQ ID NO: 3024826 - RNA, 13 nt, Human
agcugccugggau

SEQ ID NO: 3024827 - RNA, 21 nt, Human
agcugccugggaucccucauc

SEQ ID NO: 3024828 - RNA, 20 nt, Human
ugccucugacacacagcucu

SEQ ID NO: 3024829 - RNA, 21 nt, Human
ugccucugacacacagcucug

SEQ ID NO: 3024830 - RNA, 15 nt, Human
ugccucucucaggcc

SEQ ID NO: 3024831 - RNA, 14 nt, Human
ugccucucucaggc

SEQ ID NO: 3024832 - RNA, 13 nt, Human
ugccucucucagg

SEQ ID NO: 3024833 - RNA, 19 nt, Human
ugccucccaucacccgcua

SEQ ID NO: 3024834 - RNA, 14 nt, Human
ugccucccaucacc

SEQ ID NO: 3024835 - RNA, 13 nt, Human
ugccucccaucac

SEQ ID NO: 3024836 - RNA, 18 nt, Human
agcugcauacaguuugca

SEQ ID NO: 3024837 - RNA, 13 nt, Human
agcugccaccugc

SEQ ID NO: 3024838 - RNA, 17 nt, Human
agcugcacccucaggca

SEQ ID NO: 3024839 - RNA, 13 nt, Human
agcugcacccuca

SEQ ID NO: 3024840 - RNA, 22 nt, Human
agcugcacccucaggcaggugg

SEQ ID NO: 3024841 - RNA, 20 nt, Human
agcugcacccucaggcaggu

SEQ ID NO: 3024842 - RNA, 19 nt, Human
agcugcacccucaggcagg

SEQ ID NO: 3024843 - RNA, 18 nt, Human
agcugcacccucaggcag

SEQ ID NO: 3024844 - RNA, 18 nt, Human
agcucuucuccaggcugu

SEQ ID NO: 3024845 - RNA, 17 nt, Human
agcucuucuccaggcug

SEQ ID NO: 3024846 - RNA, 12 nt, Human
agcucuguccug

SEQ ID NO: 3024847 - RNA, 12 nt, Human
agcucugcuccu

SEQ ID NO: 3024848 - RNA, 22 nt, Human
agcucugcuccucuccccagca

SEQ ID NO: 3024849 - RNA, 20 nt, Human
agcucugguccauagagagc

SEQ ID NO: 3024850 - RNA, 22 nt, Human
ugcccuccaagaccuucuccuu

SEQ ID NO: 3024851 - RNA, 20 nt, Human
ugcccuccaagaccuucucc

SEQ ID NO: 3024852 - RNA, 19 nt, Human
ugcccuccaagaccuucuc

SEQ ID NO: 3024853 - RNA, 22 nt, Human
ugcugccaauauccuaauaaaa

SEQ ID NO: 3024854 - RNA, 23 nt, Human
ugcugccaauauccuaauaaaaa

SEQ ID NO: 3024855 - RNA, 11 nt, Human
ugcugccaucc

SEQ ID NO: 3024856 - RNA, 21 nt, Human
ugcugccauccagguucagcu

SEQ ID NO: 3024857 - RNA, 22 nt, Human
ugcugccauccagguucagcuu

SEQ ID NO: 3024858 - RNA, 12 nt, Human
ugcugccaucca

SEQ ID NO: 3024859 - RNA, 13 nt, Human
ugcugccauccag

SEQ ID NO: 3024860 - RNA, 14 nt, Human
ugcugccauccagg

SEQ ID NO: 3024861 - RNA, 15 nt, Human
ugcugccauccaggu

SEQ ID NO: 3024862 - RNA, 17 nt, Human
aggaagcucagggccug

SEQ ID NO: 3024863 - RNA, 22 nt, Human
aggaagcucagggccuggcuca

SEQ ID NO: 3024864 - RNA, 18 nt, Human
aggaagcucagggccugg

SEQ ID NO: 3024865 - RNA, 14 nt, Human
aggaagagaaaaaa

SEQ ID NO: 3024866 - RNA, 15 nt, Human
aggaagacuuuggaa

SEQ ID NO: 3024867 - RNA, 23 nt, Human
aggaauccagacccggcugcgug

SEQ ID NO: 3024868 - RNA, 16 nt, Human
aggaagcucagggccu

SEQ ID NO: 3024869 - RNA, 23 nt, Human
aggaaagcaaaucaguuugguug

SEQ ID NO: 3024870 - RNA, 19 nt, Human
aggaaagcaaaggagauug

SEQ ID NO: 3024871 - RNA, 16 nt, Human
ugcugacuguuuucuc

SEQ ID NO: 3024872 - RNA, 24 nt, Human
ugcugacuguuuucucuugagagg

SEQ ID NO: 3024873 - RNA, 21 nt, Human
ugcugacuguuuucucuugag

SEQ ID NO: 3024874 - RNA, 20 nt, Human
aggaaaggcuccaggagcag

SEQ ID NO: 3024875 - RNA, 18 nt, Human
aggaaaggcuccaggagc

SEQ ID NO: 3024876 - RNA, 16 nt, Human
aggaaaggcuccagga

SEQ ID NO: 3024877 - RNA, 22 nt, Human
aggaaaggcuccaggagcagcc

SEQ ID NO: 3024878 - RNA, 19 nt, Human
ugcucugaucauccacugu

SEQ ID NO: 3024879 - RNA, 22 nt, Human
ugcucugaucauccacugugcc

SEQ ID NO: 3024880 - RNA, 17 nt, Human
ugcugacuguuuucucu

SEQ ID NO: 3024881 - RNA, 17 nt, Human
ugcucuggacaggcaug

SEQ ID NO: 3024882 - RNA, 15 nt, Human
ugcucugcauguuac

SEQ ID NO: 3024883 - RNA, 18 nt, Human
ugcucugcauguuacaua

SEQ ID NO: 3024884 - RNA, 15 nt, Human
agcuuaucucagggg

SEQ ID NO: 3024885 - RNA, 14 nt, Human
agcuuaucucaggg

SEQ ID NO: 3024886 - RNA, 12 nt, Human
agcuuaucucag

SEQ ID NO: 3024887 - RNA, 20 nt, Human
ugcggacagccacggccagg

SEQ ID NO: 3024888 - RNA, 21 nt, Human
ugcggacagccacggccaggc

SEQ ID NO: 3024889 - RNA, 18 nt, Human
agcuuguaaauagcucag

SEQ ID NO: 3024890 - RNA, 19 nt, Human
agcuuguaaauagcucagg

SEQ ID NO: 3024891 - RNA, 20 nt, Human
agcuuguaaauagcucaggu

SEQ ID NO: 3024892 - RNA, 21 nt, Human
agcuuguaaauagcucaggug

SEQ ID NO: 3024893 - RNA, 21 nt, Human
aggaaacccagcucuggucca

SEQ ID NO: 3024894 - RNA, 20 nt, Human
aggaaacccagcucuggucc

SEQ ID NO: 3024895 - RNA, 18 nt, Human
aggaaacccagcucuggu

SEQ ID NO: 3024896 - RNA, 15 nt, Human
aggaaacccagcucu

SEQ ID NO: 3024897 - RNA, 17 nt, Human
aggaaacccagcucugg

SEQ ID NO: 3024898 - RNA, 16 nt, Human
aggaaacccagcucug

SEQ ID NO: 3024899 - RNA, 19 nt, Human
agcuuugaaaauucagugg

SEQ ID NO: 3024900 - RNA, 18 nt, Human
agcuuugaaaauucagug

SEQ ID NO: 3024901 - RNA, 16 nt, Human
agcuuugaaaauucag

SEQ ID NO: 3024902 - RNA, 12 nt, Human
agcuuugaaaau

SEQ ID NO: 3024903 - RNA, 13 nt, Human
aggaaagaggcuc

SEQ ID NO: 3024904 - RNA, 12 nt, Human
aggaaagaggcu

SEQ ID NO: 3024905 - RNA, 17 nt, Human
aggaaagcaaaggagau

SEQ ID NO: 3024906 - RNA, 16 nt, Human
aggaaagaggcucugg

SEQ ID NO: 3024907 - RNA, 15 nt, Human
ugccaauauccuaau

SEQ ID NO: 3024908 - RNA, 16 nt, Human
ugccaauauccuaaua

SEQ ID NO: 3024909 - RNA, 17 nt, Human
ugccaauauccuaauaa

SEQ ID NO: 3024910 - RNA, 18 nt, Human
ugccaauauccuaauaaa

SEQ ID NO: 3024911 - RNA, 19 nt, Human
ugccaauauccuaauaaaa

SEQ ID NO: 3024912 - RNA, 21 nt, Human
ugccaauauccuaauaaaaag

SEQ ID NO: 3024913 - RNA, 23 nt, Human
ugccaauauccuaauaaaaaggu

SEQ ID NO: 3024914 - RNA, 19 nt, Human
ugcauuugaaaauuuugau

SEQ ID NO: 3024915 - RNA, 23 nt, Human
ugcauuugaaaauuuugauguuu

SEQ ID NO: 3024916 - RNA, 14 nt, Human
agcgcccaguuggg

SEQ ID NO: 3024917 - RNA, 22 nt, Human
agcgcccaguuggguggaugcc

SEQ ID NO: 3024918 - RNA, 23 nt, Human
ugccagucaccccggccaccugc

SEQ ID NO: 3024919 - RNA, 22 nt, Human
ugccagucaccccggccaccug

SEQ ID NO: 3024920 - RNA, 16 nt, Human
ugccauauucuguugg

SEQ ID NO: 3024921 - RNA, 17 nt, Human
ugccauauucuguuggc

SEQ ID NO: 3024922 - RNA, 15 nt, Human
ugccauauucuguug

SEQ ID NO: 3024923 - RNA, 20 nt, Human
ugccagucaccccggccacc

SEQ ID NO: 3024924 - RNA, 18 nt, Human
ugccagucaccccggcca

SEQ ID NO: 3024925 - RNA, 16 nt, Human
ugccagucaccccggc

SEQ ID NO: 3024926 - RNA, 15 nt, Human
ugccagucaccccgg

SEQ ID NO: 3024927 - RNA, 13 nt, Human
agcgugagccacu

SEQ ID NO: 3024928 - RNA, 15 nt, Human
agcgugagccacugc

SEQ ID NO: 3024929 - RNA, 16 nt, Human
agcggggacagcuccu

SEQ ID NO: 3024930 - RNA, 17 nt, Human
agcggggacagcuccuu

SEQ ID NO: 3024931 - RNA, 15 nt, Human
agcggggacagcucc

SEQ ID NO: 3024932 - RNA, 20 nt, Human
ugccauauucuguuggccag

SEQ ID NO: 3024933 - RNA, 21 nt, Human
ugccauauucuguuggccagu

SEQ ID NO: 3024934 - RNA, 16 nt, Human
agcgugagccacugca

SEQ ID NO: 3024935 - RNA, 17 nt, Human
agcgugagccacugcac

SEQ ID NO: 3024936 - RNA, 20 nt, Human
agcgugguggacaugcacag

SEQ ID NO: 3024937 - RNA, 23 nt, Human
agcgugguggacaugcacagcua

SEQ ID NO: 3024938 - RNA, 21 nt, Human
ugccauguuggccaggcuggu

SEQ ID NO: 3024939 - RNA, 20 nt, Human
ugccauguuggccaggcugg

SEQ ID NO: 3024940 - RNA, 17 nt, Human
ugccauguuggccaggc

SEQ ID NO: 3024941 - RNA, 17 nt, Human
agcucagggccuggcuc

SEQ ID NO: 3024942 - RNA, 18 nt, Human
ugccauguuggccaggcu

SEQ ID NO: 3024943 - RNA, 19 nt, Human
ugccauguuggccaggcug

SEQ ID NO: 3024944 - RNA, 16 nt, Human
agcucagggccuggcu

SEQ ID NO: 3024945 - RNA, 15 nt, Human
agcucagggccuggc

SEQ ID NO: 3024946 - RNA, 14 nt, Human
agcucagggccugg

SEQ ID NO: 3024947 - RNA, 12 nt, Human
ugcccaggcccc

SEQ ID NO: 3024948 - RNA, 20 nt, Human
ugcccaggccccugccaccc

SEQ ID NO: 3024949 - RNA, 22 nt, Human
ugcccaggccccugccacccug

SEQ ID NO: 3024950 - RNA, 14 nt, Human
ugcccacaggauca

SEQ ID NO: 3024951 - RNA, 15 nt, Human
ugcccaggcaggucu

SEQ ID NO: 3024952 - RNA, 16 nt, Human
ugcccaggcaggucuu

SEQ ID NO: 3024953 - RNA, 17 nt, Human
ugcccaggcaggucuug

SEQ ID NO: 3024954 - RNA, 20 nt, Human
ugcccaggcaggucuugaac

SEQ ID NO: 3024955 - RNA, 11 nt, Human
ugcccaggccc

SEQ ID NO: 3024956 - RNA, 17 nt, Human
ugcacaucuguuuugua

SEQ ID NO: 3024957 - RNA, 15 nt, Human
ugcacacaccagagc

SEQ ID NO: 3024958 - RNA, 16 nt, Human
ugcacaagcuccaagc

SEQ ID NO: 3024959 - RNA, 15 nt, Human
ugcacaagcuccaag

SEQ ID NO: 3024960 - RNA, 23 nt, Human
ugcacaagcuccaagcucccagg

SEQ ID NO: 3024961 - RNA, 22 nt, Human
ugcacaagcuccaagcucccag

SEQ ID NO: 3024962 - RNA, 20 nt, Human
ugcacaagcuccaagcuccc

SEQ ID NO: 3024963 - RNA, 18 nt, Human
ugcacaagcuccaagcuc

SEQ ID NO: 3024964 - RNA, 14 nt, Human
ugcaccacugcacu

SEQ ID NO: 3024965 - RNA, 19 nt, Human
ugcacguacacacacauac

SEQ ID NO: 3024966 - RNA, 13 nt, Human
ugcacuccccugc

SEQ ID NO: 3024967 - RNA, 12 nt, Human
ugcacuccccug

SEQ ID NO: 3024968 - RNA, 19 nt, Human
ugcagacucuacagaggcc

SEQ ID NO: 3024969 - RNA, 20 nt, Human
ugcagacucuacagaggcca

SEQ ID NO: 3024970 - RNA, 18 nt, Human
ugcagacucuacagaggc

SEQ ID NO: 3024971 - RNA, 15 nt, Human
ugcacuccccugcug

SEQ ID NO: 3024972 - RNA, 22 nt, Human
ugcagacucuacagaggccaug

SEQ ID NO: 3024973 - RNA, 15 nt, Human
agccucaaccuccug

SEQ ID NO: 3024974 - RNA, 15 nt, Human
agccuaggugacaga

SEQ ID NO: 3024975 - RNA, 17 nt, Human
agccuaggugacagagu

SEQ ID NO: 3024976 - RNA, 16 nt, Human
ugcauacuauuaaaca

SEQ ID NO: 3024977 - RNA, 15 nt, Human
ugcauacuauuaaac

SEQ ID NO: 3024978 - RNA, 12 nt, Human
ugcauacuauua

SEQ ID NO: 3024979 - RNA, 22 nt, Human
ugcauaccacuuuuguucuugg

SEQ ID NO: 3024980 - RNA, 21 nt, Human
ugcauaccacuuuuguucuug

SEQ ID NO: 3024981 - RNA, 20 nt, Human
ugcauacuauuaaacaugcu

SEQ ID NO: 3024982 - RNA, 18 nt, Human
ugcauacuauuaaacaug

SEQ ID NO: 3024983 - RNA, 17 nt, Human
ugcauacuauuaaacau

SEQ ID NO: 3024984 - RNA, 13 nt, Human
ugcaugcuguccc

SEQ ID NO: 3024985 - RNA, 15 nt, Human
ugcaugcugucccuu

SEQ ID NO: 3024986 - RNA, 14 nt, Human
ugcaugcugucccu

SEQ ID NO: 3024987 - RNA, 21 nt, Human
ugcaugaggcuaguguggugu

SEQ ID NO: 3024988 - RNA, 22 nt, Human
ugcaugaaguaauaugcacaca

SEQ ID NO: 3024989 - RNA, 20 nt, Human
ugcaugaaguaauaugcaca

SEQ ID NO: 3024990 - RNA, 23 nt, Human
agccugcaguuauuaacacuaac

SEQ ID NO: 3024991 - RNA, 19 nt, Human
agccugccucuucucuacu

SEQ ID NO: 3024992 - RNA, 16 nt, Human
agccugccucuucucu

SEQ ID NO: 3024993 - RNA, 16 nt, Human
ugcaugcugucccuua

SEQ ID NO: 3024994 - RNA, 14 nt, Human
ugcagugagccgag

SEQ ID NO: 3024995 - RNA, 18 nt, Human
ugcagccucaaccuccug

SEQ ID NO: 3024996 - RNA, 19 nt, Human
ugcagccucaaccuccugg

SEQ ID NO: 3024997 - RNA, 17 nt, Human
agccucaaccuccuggg

SEQ ID NO: 3024998 - RNA, 18 nt, Human
agccucaaccuccugggc

SEQ ID NO: 3024999 - RNA, 13 nt, Human
agccucagcaucc

SEQ ID NO: 3025000 - RNA, 14 nt, Human
agccucagcauccu

SEQ ID NO: 3025001 - RNA, 15 nt, Human
agccucagcauccug

SEQ ID NO: 3025002 - RNA, 16 nt, Human
ucugucuuuuaaacuc

SEQ ID NO: 3025003 - RNA, 12 nt, Human
ucugucuuuuaa

SEQ ID NO: 3025004 - RNA, 21 nt, Human
ucugugaaaggaaagagggag

SEQ ID NO: 3025005 - RNA, 15 nt, Human
ucugugaaaggaaag

SEQ ID NO: 3025006 - RNA, 18 nt, Human
ucugucuuuuaaacucug

SEQ ID NO: 3025007 - RNA, 18 nt, Human
ucuguuggccagugugac

SEQ ID NO: 3025008 - RNA, 19 nt, Human
ucuguuggccagugugaca

SEQ ID NO: 3025009 - RNA, 20 nt, Human
ucuguuggccagugugacaa

SEQ ID NO: 3025010 - RNA, 18 nt, Human
agaauuucccaaagcagu

SEQ ID NO: 3025011 - RNA, 17 nt, Human
agaauuucccaaagcag

SEQ ID NO: 3025012 - RNA, 23 nt, Human
agaauuucccaaagcagugcaug

SEQ ID NO: 3025013 - RNA, 11 nt, Human
ucuggggcugu

SEQ ID NO: 3025014 - RNA, 14 nt, Human
ucuggguucacugc

SEQ ID NO: 3025015 - RNA, 16 nt, Human
ucuggguucacugcaa

SEQ ID NO: 3025016 - RNA, 18 nt, Human
ucugguccauagagagca

SEQ ID NO: 3025017 - RNA, 20 nt, Human
ucugucauuugagcagggcu

SEQ ID NO: 3025018 - RNA, 23 nt, Human
ucugucauuugagcagggcucag

SEQ ID NO: 3025019 - RNA, 15 nt, Human
ucugucauuugagca

SEQ ID NO: 3025020 - RNA, 16 nt, Human
ucuucccucaaaugug

SEQ ID NO: 3025021 - RNA, 22 nt, Human
ucuuccaggcugggagagccuu

SEQ ID NO: 3025022 - RNA, 14 nt, Human
ucuuauugcccacg

SEQ ID NO: 3025023 - RNA, 18 nt, Human
ucuuauugcccacgcugg

SEQ ID NO: 3025024 - RNA, 22 nt, Human
ucuuauugcccacgcuggagug

SEQ ID NO: 3025025 - RNA, 14 nt, Human
ucuuaugggcuggg

SEQ ID NO: 3025026 - RNA, 13 nt, Human
ucuuaugggcugg

SEQ ID NO: 3025027 - RNA, 16 nt, Human
ucuuaugggcuggguu

SEQ ID NO: 3025028 - RNA, 15 nt, Human
ucuuaugggcugggu

SEQ ID NO: 3025029 - RNA, 14 nt, Human
agacagucccugcc

SEQ ID NO: 3025030 - RNA, 15 nt, Human
agacagucccugcca

SEQ ID NO: 3025031 - RNA, 17 nt, Human
agacagucccugccaau

SEQ ID NO: 3025032 - RNA, 16 nt, Human
agacagucccugccaa

SEQ ID NO: 3025033 - RNA, 23 nt, Human
agacaggcaagcaccuccugccu

SEQ ID NO: 3025034 - RNA, 22 nt, Human
agacaggcaagcaccuccugcc

SEQ ID NO: 3025035 - RNA, 15 nt, Human
agacaggaccaggga

SEQ ID NO: 3025036 - RNA, 21 nt, Human
agacaggguuuugccauguug

SEQ ID NO: 3025037 - RNA, 20 nt, Human
agacuggauaguccgucucu

SEQ ID NO: 3025038 - RNA, 19 nt, Human
agacucuacagaggccaug

SEQ ID NO: 3025039 - RNA, 17 nt, Human
agacucuacagaggcca

SEQ ID NO: 3025040 - RNA, 21 nt, Human
agacucgcgacaaugcaaacc

SEQ ID NO: 3025041 - RNA, 23 nt, Human
agacuccugcaggcagccaggcc

SEQ ID NO: 3025042 - RNA, 20 nt, Human
agacuccugcaggcagccag

SEQ ID NO: 3025043 - RNA, 19 nt, Human
agacuccugcaggcagcca

SEQ ID NO: 3025044 - RNA, 18 nt, Human
agacuccugcaggcagcc

SEQ ID NO: 3025045 - RNA, 17 nt, Human
agacuccugcaggcagc

SEQ ID NO: 3025046 - RNA, 16 nt, Human
agacuccugcaggcag

SEQ ID NO: 3025047 - RNA, 15 nt, Human
agacuccugcaggca

SEQ ID NO: 3025048 - RNA, 14 nt, Human
agacuccugcaggc

SEQ ID NO: 3025049 - RNA, 12 nt, Human
ucuuuccugagg

SEQ ID NO: 3025050 - RNA, 15 nt, Human
ucuuuccugaggcug

SEQ ID NO: 3025051 - RNA, 14 nt, Human
ucuuuccugaggcu

SEQ ID NO: 3025052 - RNA, 13 nt, Human
ucuuuccugaggc

SEQ ID NO: 3025053 - RNA, 15 nt, Human
ucuuuacuucaugga

SEQ ID NO: 3025054 - RNA, 21 nt, Human
agacuggauaguccgucucug

SEQ ID NO: 3025055 - RNA, 17 nt, Human
agacuucaucccucugg

SEQ ID NO: 3025056 - RNA, 14 nt, Human
agacuucaucccuc

SEQ ID NO: 3025057 - RNA, 18 nt, Human
agagaaugaaagggccca

SEQ ID NO: 3025058 - RNA, 14 nt, Human
agacuuuggaaaga

SEQ ID NO: 3025059 - RNA, 12 nt, Human
agacuuuggaaa

SEQ ID NO: 3025060 - RNA, 15 nt, Human
agagaccaucccuga

SEQ ID NO: 3025061 - RNA, 14 nt, Human
agagaccaucccug

SEQ ID NO: 3025062 - RNA, 13 nt, Human
agagaccaucccu

SEQ ID NO: 3025063 - RNA, 16 nt, Human
agacccucucaaacua

SEQ ID NO: 3025064 - RNA, 24 nt, Human
agacccucaugcugccaauauccu

SEQ ID NO: 3025065 - RNA, 20 nt, Human
agacccucaugcugccaaua

SEQ ID NO: 3025066 - RNA, 21 nt, Human
agacccucaugcugccaauau

SEQ ID NO: 3025067 - RNA, 18 nt, Human
agacccucaugcugccaa

SEQ ID NO: 3025068 - RNA, 19 nt, Human
agacccucaugcugccaau

SEQ ID NO: 3025069 - RNA, 17 nt, Human
agacccucaugcugcca

SEQ ID NO: 3025070 - RNA, 12 nt, Human
agacccugcccu

SEQ ID NO: 3025071 - RNA, 14 nt, Human
agacccugcccugu

SEQ ID NO: 3025072 - RNA, 13 nt, Human
agacccugcccug

SEQ ID NO: 3025073 - RNA, 15 nt, Human
agacccuuguggucc

SEQ ID NO: 3025074 - RNA, 13 nt, Human
agacccuuguggu

SEQ ID NO: 3025075 - RNA, 23 nt, Human
agacccugcccugugggccccca

SEQ ID NO: 3025076 - RNA, 21 nt, Human
agacccugcccugugggcccc

SEQ ID NO: 3025077 - RNA, 19 nt, Human
agacccugcccugugggcc

SEQ ID NO: 3025078 - RNA, 16 nt, Human
agacccugcccugugg

SEQ ID NO: 3025079 - RNA, 23 nt, Human
agacccuuguggucccaccccac

SEQ ID NO: 3025080 - RNA, 22 nt, Human
agacccuuguggucccacccca

SEQ ID NO: 3025081 - RNA, 20 nt, Human
agacccuuguggucccaccc

SEQ ID NO: 3025082 - RNA, 19 nt, Human
agacccuuguggucccacc

SEQ ID NO: 3025083 - RNA, 17 nt, Human
ucuugcaauggcagccu

SEQ ID NO: 3025084 - RNA, 13 nt, Human
ucuugcaauggca

SEQ ID NO: 3025085 - RNA, 16 nt, Human
ucuugcaauggcagcc

SEQ ID NO: 3025086 - RNA, 15 nt, Human
agacucauucuucug

SEQ ID NO: 3025087 - RNA, 15 nt, Human
agacuaucuaaaugu

SEQ ID NO: 3025088 - RNA, 19 nt, Human
agacuaucuaaauguugaa

SEQ ID NO: 3025089 - RNA, 17 nt, Human
agacuaucuaaauguug

SEQ ID NO: 3025090 - RNA, 18 nt, Human
agacuaucuaaauguuga

SEQ ID NO: 3025091 - RNA, 18 nt, Human
agacucauucuucuguac

SEQ ID NO: 3025092 - RNA, 17 nt, Human
agacucauucuucugua

SEQ ID NO: 3025093 - RNA, 15 nt, Human
ucuggcagcucagag

SEQ ID NO: 3025094 - RNA, 14 nt, Human
ucuggcagcucaga

SEQ ID NO: 3025095 - RNA, 18 nt, Human
ucuggagguacgaaaaga

SEQ ID NO: 3025096 - RNA, 23 nt, Human
ucugcuuuuuaaagaaugcucuu

SEQ ID NO: 3025097 - RNA, 16 nt, Human
agaagcggcuggcagc

SEQ ID NO: 3025098 - RNA, 15 nt, Human
agaagcggcuggcag

SEQ ID NO: 3025099 - RNA, 23 nt, Human
ucugccgcagcccugcagagggc

SEQ ID NO: 3025100 - RNA, 14 nt, Human
ucugcccuccaaga

SEQ ID NO: 3025101 - RNA, 16 nt, Human
ucugcucacauaucug

SEQ ID NO: 3025102 - RNA, 17 nt, Human
agaacuaaaauguucua

SEQ ID NO: 3025103 - RNA, 20 nt, Human
agaacaaaggggcuuaauua

SEQ ID NO: 3025104 - RNA, 11 nt, Human
agaaauguguu

SEQ ID NO: 3025105 - RNA, 17 nt, Human
agaaauguacagcaagg

SEQ ID NO: 3025106 - RNA, 16 nt, Human
agaaauguacagcaag

SEQ ID NO: 3025107 - RNA, 19 nt, Human
ucugacccugcuucaaaua

SEQ ID NO: 3025108 - RNA, 18 nt, Human
ucugauucccaagcucug

SEQ ID NO: 3025109 - RNA, 19 nt, Human
ucugauucccaagcucugc

SEQ ID NO: 3025110 - RNA, 20 nt, Human
ucugauucccaagcucugcu

SEQ ID NO: 3025111 - RNA, 21 nt, Human
ucugauucccaagcucugcuc

SEQ ID NO: 3025112 - RNA, 22 nt, Human
ucugcacuccccugcugggugu

SEQ ID NO: 3025113 - RNA, 15 nt, Human
ucuccucucucugua

SEQ ID NO: 3025114 - RNA, 12 nt, Human
ucuccucugcug

SEQ ID NO: 3025115 - RNA, 19 nt, Human
ucucccuuggauugucccc

SEQ ID NO: 3025116 - RNA, 20 nt, Human
acuuguugaggguauguuuu

SEQ ID NO: 3025117 - RNA, 14 nt, Human
ucuccucugcugcu

SEQ ID NO: 3025118 - RNA, 13 nt, Human
ucuccucugcugc

SEQ ID NO: 3025119 - RNA, 18 nt, Human
ucucccuuggauuguccc

SEQ ID NO: 3025120 - RNA, 11 nt, Human
ucucccuugga

SEQ ID NO: 3025121 - RNA, 23 nt, Human
acuuugaccucugcagcaauaaa

SEQ ID NO: 3025122 - RNA, 19 nt, Human
acuuugaccucugcagcaa

SEQ ID NO: 3025123 - RNA, 19 nt, Human
acuuuaccuuuuuuauaca

SEQ ID NO: 3025124 - RNA, 22 nt, Human
acuuuaccuuuuuuauacauaa

SEQ ID NO: 3025125 - RNA, 18 nt, Human
acuuuaccuuuuuuauac

SEQ ID NO: 3025126 - RNA, 12 nt, Human
acuuuggaaaga

SEQ ID NO: 3025127 - RNA, 14 nt, Human
acuuuggaaagacu

SEQ ID NO: 3025128 - RNA, 13 nt, Human
acuuuggaaagac

SEQ ID NO: 3025129 - RNA, 17 nt, Human
acuuuggaaagacuuuu

SEQ ID NO: 3025130 - RNA, 17 nt, Human
ucucuccuguaccucuu

SEQ ID NO: 3025131 - RNA, 15 nt, Human
ucucuccagccccug

SEQ ID NO: 3025132 - RNA, 20 nt, Human
ucucuccuguaccucuugag

SEQ ID NO: 3025133 - RNA, 22 nt, Human
ucucuccuguaccucuugagcc

SEQ ID NO: 3025134 - RNA, 18 nt, Human
ucuccuucaccuuugucc

SEQ ID NO: 3025135 - RNA, 20 nt, Human
ucuccuucaccuuugucccc

SEQ ID NO: 3025136 - RNA, 14 nt, Human
ucucuccagccccu

SEQ ID NO: 3025137 - RNA, 13 nt, Human
ucucuccagcccc

SEQ ID NO: 3025138 - RNA, 14 nt, Human
ucucuugagagggu

SEQ ID NO: 3025139 - RNA, 15 nt, Human
ucucuugagccuggg

SEQ ID NO: 3025140 - RNA, 14 nt, Human
ucucuugagccugg

SEQ ID NO: 3025141 - RNA, 13 nt, Human
ucucuugagccug

SEQ ID NO: 3025142 - RNA, 22 nt, Human
ucucuuuaaugucacaggcagg

SEQ ID NO: 3025143 - RNA, 18 nt, Human
agaaaaaggaugcacaga

SEQ ID NO: 3025144 - RNA, 18 nt, Human
agcaacacaaagcuuuug

SEQ ID NO: 3025145 - RNA, 16 nt, Human
agcaacacaaagcuuu

SEQ ID NO: 3025146 - RNA, 21 nt, Human
agcaacacaaagcuuuugcau

SEQ ID NO: 3025147 - RNA, 15 nt, Human
agcaacacaaagcuu

SEQ ID NO: 3025148 - RNA, 14 nt, Human
agauuucacucucc

SEQ ID NO: 3025149 - RNA, 13 nt, Human
agauuucacucuc

SEQ ID NO: 3025150 - RNA, 15 nt, Human
ugaccugaggcccuu

SEQ ID NO: 3025151 - RNA, 14 nt, Human
ugaccugaggcccu

SEQ ID NO: 3025152 - RNA, 19 nt, Human
ugacuccagaauuucccaa

SEQ ID NO: 3025153 - RNA, 17 nt, Human
ugacuccagaauuuccc

SEQ ID NO: 3025154 - RNA, 23 nt, Human
ugacuccagaauuucccaaagca

SEQ ID NO: 3025155 - RNA, 20 nt, Human
ugacuccagaauuucccaaa

SEQ ID NO: 3025156 - RNA, 16 nt, Human
ugacauugacuauuuu

SEQ ID NO: 3025157 - RNA, 14 nt, Human
ugacauugacuauu

SEQ ID NO: 3025158 - RNA, 17 nt, Human
ugacauugcaccuggau

SEQ ID NO: 3025159 - RNA, 14 nt, Human
ugacauugcaccug

SEQ ID NO: 3025160 - RNA, 12 nt, Human
ugaccugaggcc

SEQ ID NO: 3025161 - RNA, 14 nt, Human
ugaccucugccuga

SEQ ID NO: 3025162 - RNA, 13 nt, Human
ugaccucugccug

SEQ ID NO: 3025163 - RNA, 16 nt, Human
agaugcuucucacugc

SEQ ID NO: 3025164 - RNA, 18 nt, Human
agaugcuucucacugcca

SEQ ID NO: 3025165 - RNA, 21 nt, Human
ugaagauucuauguuaauauu

SEQ ID NO: 3025166 - RNA, 17 nt, Human
ugaagcagaguggcagu

SEQ ID NO: 3025167 - RNA, 20 nt, Human
agagggagggagggcuccag

SEQ ID NO: 3025168 - RNA, 21 nt, Human
agagggagggagggcuccaga

SEQ ID NO: 3025169 - RNA, 22 nt, Human
agagggagggagggcuccagac

SEQ ID NO: 3025170 - RNA, 19 nt, Human
agagcugggugucaagagg

SEQ ID NO: 3025171 - RNA, 19 nt, Human
agaggaaagcaaaggagau

SEQ ID NO: 3025172 - RNA, 18 nt, Human
agaggaaagcaaaggaga

SEQ ID NO: 3025173 - RNA, 16 nt, Human
agaggaaagcaaagga

SEQ ID NO: 3025174 - RNA, 12 nt, Human
agaggaaagcaa

SEQ ID NO: 3025175 - RNA, 12 nt, Human
agaggaaaucac

SEQ ID NO: 3025176 - RNA, 11 nt, Human
agaggaaauca

SEQ ID NO: 3025177 - RNA, 18 nt, Human
agaggcaacugcauuggc

SEQ ID NO: 3025178 - RNA, 21 nt, Human
ucuuuggucuacacugugcug

SEQ ID NO: 3025179 - RNA, 14 nt, Human
ucuuuggucuacac

SEQ ID NO: 3025180 - RNA, 11 nt, Human
ugaacuuugac

SEQ ID NO: 3025181 - RNA, 16 nt, Human
ugaacuuugaccucug

SEQ ID NO: 3025182 - RNA, 13 nt, Human
ugaagacaaugac

SEQ ID NO: 3025183 - RNA, 17 nt, Human
ugaagacaaugacuuac

SEQ ID NO: 3025184 - RNA, 11 nt, Human
ugaagacaaug

SEQ ID NO: 3025185 - RNA, 17 nt, Human
agauaaggguaucuggu

SEQ ID NO: 3025186 - RNA, 19 nt, Human
agauaaggguaucugguga

SEQ ID NO: 3025187 - RNA, 19 nt, Human
agagugagacucugucuca

SEQ ID NO: 3025188 - RNA, 22 nt, Human
agauauuuugcuuugugauuuu

SEQ ID NO: 3025189 - RNA, 19 nt, Human
agauacaggaaaagcugcu

SEQ ID NO: 3025190 - RNA, 14 nt, Human
agaucaaccccuuc

SEQ ID NO: 3025191 - RNA, 19 nt, Human
agaucaaccccuucgcucc

SEQ ID NO: 3025192 - RNA, 21 nt, Human
agaucaaccccuucgcuccug

SEQ ID NO: 3025193 - RNA, 14 nt, Human
ugaaugucagugug

SEQ ID NO: 3025194 - RNA, 18 nt, Human
ugaaugucagugugacug

SEQ ID NO: 3025195 - RNA, 15 nt, Human
ugaaugucaguguga

SEQ ID NO: 3025196 - RNA, 20 nt, Human
agagucucacuguugcccag

SEQ ID NO: 3025197 - RNA, 22 nt, Human
agagucucacuguugcccaggc

SEQ ID NO: 3025198 - RNA, 15 nt, Human
agagugagacucugu

SEQ ID NO: 3025199 - RNA, 16 nt, Human
agagugagacucuguc

SEQ ID NO: 3025200 - RNA, 13 nt, Human
agcagagugcuuu

SEQ ID NO: 3025201 - RNA, 10 nt, Human
agcagagugc

SEQ ID NO: 3025202 - RNA, 17 nt, Human
agcagaggaaggagagg

SEQ ID NO: 3025203 - RNA, 19 nt, Human
agcagauggagaccccuug

SEQ ID NO: 3025204 - RNA, 20 nt, Human
agcagagaccaucccugaag

SEQ ID NO: 3025205 - RNA, 20 nt, Human
agcagagcaccuuagacagu

SEQ ID NO: 3025206 - RNA, 17 nt, Human
ugaggucagagccugca

SEQ ID NO: 3025207 - RNA, 17 nt, Human
agcagagaccaucccug

SEQ ID NO: 3025208 - RNA, 19 nt, Human
agcagagaccaucccugaa

SEQ ID NO: 3025209 - RNA, 18 nt, Human
agcagagaccaucccuga

SEQ ID NO: 3025210 - RNA, 20 nt, Human
ugaggguugggcugguguca

SEQ ID NO: 3025211 - RNA, 14 nt, Human
ugaggucagagccu

SEQ ID NO: 3025212 - RNA, 16 nt, Human
ugaggucagagccugc

SEQ ID NO: 3025213 - RNA, 13 nt, Human
ugaggucagagcc

SEQ ID NO: 3025214 - RNA, 19 nt, Human
ugagggauacccaucccau

SEQ ID NO: 3025215 - RNA, 16 nt, Human
ugaggcccuucucucc

SEQ ID NO: 3025216 - RNA, 19 nt, Human
ugaggcccuucucuccagc

SEQ ID NO: 3025217 - RNA, 18 nt, Human
ugaggcccuucucuccag

SEQ ID NO: 3025218 - RNA, 24 nt, Human
ugaggcccuucucuccagccccug

SEQ ID NO: 3025219 - RNA, 23 nt, Human
ugaggcccuucucuccagccccu

SEQ ID NO: 3025220 - RNA, 22 nt, Human
ugaggcccuucucuccagcccc

SEQ ID NO: 3025221 - RNA, 20 nt, Human
ugaggcccuucucuccagcc

SEQ ID NO: 3025222 - RNA, 12 nt, Human
ugaggggccucu

SEQ ID NO: 3025223 - RNA, 13 nt, Human
ugaggggccucuu

SEQ ID NO: 3025224 - RNA, 21 nt, Human
ugaggaagccgcuggggccag

SEQ ID NO: 3025225 - RNA, 19 nt, Human
ugaggaagccgcuggggcc

SEQ ID NO: 3025226 - RNA, 18 nt, Human
ugaggaagccgcuggggc

SEQ ID NO: 3025227 - RNA, 17 nt, Human
ugaggaagccgcugggg

SEQ ID NO: 3025228 - RNA, 14 nt, Human
ugaggaagccgcug

SEQ ID NO: 3025229 - RNA, 22 nt, Human
ugaggaagcaaaagcaucuaug

SEQ ID NO: 3025230 - RNA, 15 nt, Human
ugaggaagcaaaagc

SEQ ID NO: 3025231 - RNA, 13 nt, Human
ugaggcccagagg

SEQ ID NO: 3025232 - RNA, 12 nt, Human
ugaggcccagag

SEQ ID NO: 3025233 - RNA, 16 nt, Human
ugaggccagagacaca

SEQ ID NO: 3025234 - RNA, 14 nt, Human
ugaggccagagaca

SEQ ID NO: 3025235 - RNA, 20 nt, Human
ugaggccagagacacaagcc

SEQ ID NO: 3025236 - RNA, 20 nt, Human
ugaggcccagagggccugca

SEQ ID NO: 3025237 - RNA, 18 nt, Human
ugaggcccagagggccug

SEQ ID NO: 3025238 - RNA, 17 nt, Human
ugaggcccagagggccu

SEQ ID NO: 3025239 - RNA, 15 nt, Human
ugaggcccagagggc

SEQ ID NO: 3025240 - RNA, 22 nt, Human
ugaggcccagagggccugcaag

SEQ ID NO: 3025241 - RNA, 21 nt, Human
ugaggcccagagggccugcaa

SEQ ID NO: 3025242 - RNA, 23 nt, Human
ugaggcccagagggccugcaagg

SEQ ID NO: 3025243 - RNA, 21 nt, Human
ugaggaauccagacccggcug

SEQ ID NO: 3025244 - RNA, 22 nt, Human
ugaggaauccagacccggcugc

SEQ ID NO: 3025245 - RNA, 12 nt, Human
ugaggccagaga

SEQ ID NO: 3025246 - RNA, 23 nt, Human
ugaggcauuuguuugaacugaua

SEQ ID NO: 3025247 - RNA, 21 nt, Human
ugaggacacuaaccacgcugg

SEQ ID NO: 3025248 - RNA, 23 nt, Human
ugagcaucgcuuaggagaagucu

SEQ ID NO: 3025249 - RNA, 24 nt, Human
ugagcaucaggccaggcccucugc

SEQ ID NO: 3025250 - RNA, 22 nt, Human
ugagcaucaggccaggcccucu

SEQ ID NO: 3025251 - RNA, 21 nt, Human
ugagcaucaggccaggcccuc

SEQ ID NO: 3025252 - RNA, 21 nt, Human
ugagccacugcaccgggccac

SEQ ID NO: 3025253 - RNA, 18 nt, Human
ugagccacugcaccgggc

SEQ ID NO: 3025254 - RNA, 23 nt, Human
ugagccacugcaccgggccacag

SEQ ID NO: 3025255 - RNA, 13 nt, Human
ugagccagauuuc

SEQ ID NO: 3025256 - RNA, 16 nt, Human
ugagccagauuucacu

SEQ ID NO: 3025257 - RNA, 14 nt, Human
ugagccagauuuca

SEQ ID NO: 3025258 - RNA, 20 nt, Human
ugagcacuaaggugugcucu

SEQ ID NO: 3025259 - RNA, 21 nt, Human
ugagcacuaaggugugcucug

SEQ ID NO: 3025260 - RNA, 22 nt, Human
ugagcacuaaggugugcucuga

SEQ ID NO: 3025261 - RNA, 23 nt, Human
ugagcacuaaggugugcucugau

SEQ ID NO: 3025262 - RNA, 15 nt, Human
ugagcaauccugcaa

SEQ ID NO: 3025263 - RNA, 16 nt, Human
agcacagcuucauuuc

SEQ ID NO: 3025264 - RNA, 22 nt, Human
agcaccaaaagcuuaccaaggg

SEQ ID NO: 3025265 - RNA, 14 nt, Human
agcacaugccucuc

SEQ ID NO: 3025266 - RNA, 13 nt, Human
agcacaugccucu

SEQ ID NO: 3025267 - RNA, 22 nt, Human
agcaagugagagcuggguguca

SEQ ID NO: 3025268 - RNA, 18 nt, Human
agcaagugagagcugggu

SEQ ID NO: 3025269 - RNA, 14 nt, Human
agcaagugagagcu

SEQ ID NO: 3025270 - RNA, 20 nt, Human
agcaagugagacccugucuc

SEQ ID NO: 3025271 - RNA, 13 nt, Human
agcaagugagagc

SEQ ID NO: 3025272 - RNA, 22 nt, Human
ugagccagauuucacucuccuu

SEQ ID NO: 3025273 - RNA, 17 nt, Human
ugagccagauuucacuc

SEQ ID NO: 3025274 - RNA, 10 nt, Human
ugagccuggc

SEQ ID NO: 3025275 - RNA, 16 nt, Human
agcagagaccaucccu

SEQ ID NO: 3025276 - RNA, 15 nt, Human
agcagagaccauccc

SEQ ID NO: 3025277 - RNA, 22 nt, Human
agcagagaaugaaagggcccag

SEQ ID NO: 3025278 - RNA, 23 nt, Human
agcagagaaugaaagggcccaga

SEQ ID NO: 3025279 - RNA, 14 nt, Human
agcagagaauucuc

SEQ ID NO: 3025280 - RNA, 21 nt, Human
agcagagaauucucuuaucca

SEQ ID NO: 3025281 - RNA, 21 nt, Human
agcagagaaugaaagggccca

SEQ ID NO: 3025282 - RNA, 14 nt, Human
ugagccugggaggu

SEQ ID NO: 3025283 - RNA, 16 nt, Human
ugagccuggcaagaau

SEQ ID NO: 3025284 - RNA, 11 nt, Human
ugagccuggca

SEQ ID NO: 3025285 - RNA, 14 nt, Human
ugagccuugaacuu

SEQ ID NO: 3025286 - RNA, 22 nt, Human
ugagccugggaggucaaggcug

SEQ ID NO: 3025287 - RNA, 19 nt, Human
ugagccugggaggucaagg

SEQ ID NO: 3025288 - RNA, 15 nt, Human
ugagccuugaacuuu

SEQ ID NO: 3025289 - RNA, 17 nt, Human
ugagccuugaacuuuga

SEQ ID NO: 3025290 - RNA, 18 nt, Human
ugagccuugaacuuugac

SEQ ID NO: 3025291 - RNA, 19 nt, Human
ugagccuugaacuuugacc

SEQ ID NO: 3025292 - RNA, 22 nt, Human
agcaccuuagacagucccugcc

SEQ ID NO: 3025293 - RNA, 21 nt, Human
agcaccuuagacagucccugc

SEQ ID NO: 3025294 - RNA, 20 nt, Human
agcaccuuagacagucccug

SEQ ID NO: 3025295 - RNA, 19 nt, Human
agcaccuuagacagucccu

SEQ ID NO: 3025296 - RNA, 13 nt, Human
agcacgauuucug

SEQ ID NO: 3025297 - RNA, 23 nt, Human
agcaccuuagacagucccugcca

SEQ ID NO: 3025298 - RNA, 16 nt, Human
agcacgauuucuguuu

SEQ ID NO: 3025299 - RNA, 14 nt, Human
agcacgauuucugu

SEQ ID NO: 3025300 - RNA, 15 nt, Human
agcacgauuucuguu

SEQ ID NO: 3025301 - RNA, 22 nt, Human
agcacuuugggaggccaaggug

SEQ ID NO: 3025302 - RNA, 23 nt, Human
agcacuuugggaggccaaggugg

SEQ ID NO: 3025303 - RNA, 12 nt, Human
agcagaaaugcc

SEQ ID NO: 3025304 - RNA, 13 nt, Human
agcagaaaugccu

SEQ ID NO: 3025305 - RNA, 19 nt, Human
agcagaaaugccuuacccu

SEQ ID NO: 3025306 - RNA, 18 nt, Human
ucagaugcacaugagcug

SEQ ID NO: 3025307 - RNA, 16 nt, Human
ucagaacuauguuuuu

SEQ ID NO: 3025308 - RNA, 19 nt, Human
ucagaacuauguuuuuguu

SEQ ID NO: 3025309 - RNA, 13 nt, Human
ucagaucuucugu

SEQ ID NO: 3025310 - RNA, 13 nt, Human
ucagaagacacug

SEQ ID NO: 3025311 - RNA, 15 nt, Human
acccagcucuggucc

SEQ ID NO: 3025312 - RNA, 13 nt, Human
acccagcucuggu

SEQ ID NO: 3025313 - RNA, 15 nt, Human
acccccagccugcua

SEQ ID NO: 3025314 - RNA, 14 nt, Human
acccccagccugcu

SEQ ID NO: 3025315 - RNA, 12 nt, Human
ucagccugggca

SEQ ID NO: 3025316 - RNA, 10 nt, Human
ucagccuggg

SEQ ID NO: 3025317 - RNA, 14 nt, Human
acccucuuagaaaa

SEQ ID NO: 3025318 - RNA, 13 nt, Human
acccugcccugug

SEQ ID NO: 3025319 - RNA, 12 nt, Human
acccugcccugu

SEQ ID NO: 3025320 - RNA, 11 nt, Human
acccugcccug

SEQ ID NO: 3025321 - RNA, 15 nt, Human
acccuugugguccca

SEQ ID NO: 3025322 - RNA, 19 nt, Human
acccuuguggucccacccc

SEQ ID NO: 3025323 - RNA, 17 nt, Human
acccuuguggucccacc

SEQ ID NO: 3025324 - RNA, 16 nt, Human
acccuuguggucccac

SEQ ID NO: 3025325 - RNA, 23 nt, Human
ucaggguuggccccugcccggcu

SEQ ID NO: 3025326 - RNA, 20 nt, Human
accccuucgcuccugugucu

SEQ ID NO: 3025327 - RNA, 13 nt, Human
ucagggucccugg

SEQ ID NO: 3025328 - RNA, 23 nt, Human
ucaggggugugcggccuuuggcu

SEQ ID NO: 3025329 - RNA, 18 nt, Human
ucagggucccugguggca

SEQ ID NO: 3025330 - RNA, 14 nt, Human
ucagggucccuggu

SEQ ID NO: 3025331 - RNA, 13 nt, Human
ucagguaacaggc

SEQ ID NO: 3025332 - RNA, 15 nt, Human
ucagguaacaggcag

SEQ ID NO: 3025333 - RNA, 16 nt, Human
ucagguaacaggcaga

SEQ ID NO: 3025334 - RNA, 19 nt, Human
accccuucgcuccuguguc

SEQ ID NO: 3025335 - RNA, 14 nt, Human
ucaggccagcugcu

SEQ ID NO: 3025336 - RNA, 11 nt, Human
ucaggccaggc

SEQ ID NO: 3025337 - RNA, 20 nt, Human
ucaggccagcugcuugggcu

SEQ ID NO: 3025338 - RNA, 15 nt, Human
ucaggccagcugcuu

SEQ ID NO: 3025339 - RNA, 15 nt, Human
ucagcggggacagcu

SEQ ID NO: 3025340 - RNA, 16 nt, Human
ucagcggggacagcuc

SEQ ID NO: 3025341 - RNA, 17 nt, Human
ucagcggggacagcucc

SEQ ID NO: 3025342 - RNA, 20 nt, Human
ucaggaagcucagggccugg

SEQ ID NO: 3025343 - RNA, 19 nt, Human
ucaggaagcucagggccug

SEQ ID NO: 3025344 - RNA, 17 nt, Human
ucaggaagcucagggcc

SEQ ID NO: 3025345 - RNA, 16 nt, Human
ucaggaagcucagggc

SEQ ID NO: 3025346 - RNA, 23 nt, Human
ucaggccaaacucaccugccccu

SEQ ID NO: 3025347 - RNA, 20 nt, Human
ucaggccaaacucaccugcc

SEQ ID NO: 3025348 - RNA, 12 nt, Human
ucacugcagccu

SEQ ID NO: 3025349 - RNA, 16 nt, Human
ucacuguugcccaggc

SEQ ID NO: 3025350 - RNA, 13 nt, Human
ucacugagacagc

SEQ ID NO: 3025351 - RNA, 15 nt, Human
ucacugagacagccc

SEQ ID NO: 3025352 - RNA, 14 nt, Human
ucacugagacagcc

SEQ ID NO: 3025353 - RNA, 16 nt, Human
ucaccugccccucaac

SEQ ID NO: 3025354 - RNA, 17 nt, Human
ucacuguugcccaggcu

SEQ ID NO: 3025355 - RNA, 18 nt, Human
ucacuguugcccaggcug

SEQ ID NO: 3025356 - RNA, 21 nt, Human
accaguguuguggauuuaaca

SEQ ID NO: 3025357 - RNA, 18 nt, Human
accaguguuguggauuua

SEQ ID NO: 3025358 - RNA, 16 nt, Human
acccagcccacuucug

SEQ ID NO: 3025359 - RNA, 17 nt, Human
acccagcccacuucugc

SEQ ID NO: 3025360 - RNA, 18 nt, Human
acccagcccacuucugcc

SEQ ID NO: 3025361 - RNA, 16 nt, Human
acccagaagaaaauag

SEQ ID NO: 3025362 - RNA, 23 nt, Human
accaugauuaaccacuucagcug

SEQ ID NO: 3025363 - RNA, 22 nt, Human
accaugauuaaccacuucagcu

SEQ ID NO: 3025364 - RNA, 18 nt, Human
accauucuccaccugcca

SEQ ID NO: 3025365 - RNA, 16 nt, Human
accauucuccaccugc

SEQ ID NO: 3025366 - RNA, 13 nt, Human
accauucuccacc

SEQ ID NO: 3025367 - RNA, 22 nt, Human
accauuuugggguacccacugc

SEQ ID NO: 3025368 - RNA, 23 nt, Human
accauuuugggguacccacugcu

SEQ ID NO: 3025369 - RNA, 19 nt, Human
accagagcccaccuuggcu

SEQ ID NO: 3025370 - RNA, 22 nt, Human
accagagcccaccuuggcucaa

SEQ ID NO: 3025371 - RNA, 17 nt, Human
accagagcccaccuugg

SEQ ID NO: 3025372 - RNA, 22 nt, Human
accagacaccuugacagggcac

SEQ ID NO: 3025373 - RNA, 23 nt, Human
accagacaccuugacagggcaca

SEQ ID NO: 3025374 - RNA, 17 nt, Human
accagacaccuugacag

SEQ ID NO: 3025375 - RNA, 12 nt, Human
accacuuuuguu

SEQ ID NO: 3025376 - RNA, 23 nt, Human
ucaccugaagacucauucuucug

SEQ ID NO: 3025377 - RNA, 16 nt, Human
ucaccugaagacucau

SEQ ID NO: 3025378 - RNA, 19 nt, Human
ucaccugaagacucauucu

SEQ ID NO: 3025379 - RNA, 20 nt, Human
accacucuaucaaguauuau

SEQ ID NO: 3025380 - RNA, 20 nt, Human
accacaucuugcucugcuga

SEQ ID NO: 3025381 - RNA, 21 nt, Human
accacaucuugcucugcugac

SEQ ID NO: 3025382 - RNA, 24 nt, Human
accacaucuugcucugcugacaga

SEQ ID NO: 3025383 - RNA, 15 nt, Human
accacuucagcugac

SEQ ID NO: 3025384 - RNA, 14 nt, Human
accacuucagcuga

SEQ ID NO: 3025385 - RNA, 13 nt, Human
accacuucagcug

SEQ ID NO: 3025386 - RNA, 21 nt, Human
accacagacauacuaaccagc

SEQ ID NO: 3025387 - RNA, 22 nt, Human
accacagacauacuaaccagca

SEQ ID NO: 3025388 - RNA, 14 nt, Human
accacaucuugcuc

SEQ ID NO: 3025389 - RNA, 21 nt, Human
uccacauuuguuuugccaauu

SEQ ID NO: 3025390 - RNA, 11 nt, Human
uccaagcuggu

SEQ ID NO: 3025391 - RNA, 16 nt, Human
uccaagcucccaggca

SEQ ID NO: 3025392 - RNA, 15 nt, Human
uccaagcucccaggc

SEQ ID NO: 3025393 - RNA, 14 nt, Human
uccaagcucccagg

SEQ ID NO: 3025394 - RNA, 13 nt, Human
uccaagcucccag

SEQ ID NO: 3025395 - RNA, 12 nt, Human
uccaagcuccca

SEQ ID NO: 3025396 - RNA, 18 nt, Human
accugcggugcuaucucc

SEQ ID NO: 3025397 - RNA, 22 nt, Human
accugaagucuuuguacagaca

SEQ ID NO: 3025398 - RNA, 15 nt, Human
accugaagucuuugu

SEQ ID NO: 3025399 - RNA, 23 nt, Human
accugcggugcuaucucccccag

SEQ ID NO: 3025400 - RNA, 22 nt, Human
accugcggugcuaucuccccca

SEQ ID NO: 3025401 - RNA, 19 nt, Human
accugcggugcuaucuccc

SEQ ID NO: 3025402 - RNA, 19 nt, Human
ucauuugagcagggcucag

SEQ ID NO: 3025403 - RNA, 14 nt, Human
accuggaauauaua

SEQ ID NO: 3025404 - RNA, 17 nt, Human
accuggaauauauaacc

SEQ ID NO: 3025405 - RNA, 21 nt, Human
ucauuugagcagggcucagcg

SEQ ID NO: 3025406 - RNA, 13 nt, Human
ucauuuuuuuuaa

SEQ ID NO: 3025407 - RNA, 23 nt, Human
accuuuguauucucuccuguacc

SEQ ID NO: 3025408 - RNA, 15 nt, Human
accuuuguauucucu

SEQ ID NO: 3025409 - RNA, 19 nt, Human
accuuuguauucucuccug

SEQ ID NO: 3025410 - RNA, 22 nt, Human
uccagaaguuugagaucagccu

SEQ ID NO: 3025411 - RNA, 14 nt, Human
uccagccccuggau

SEQ ID NO: 3025412 - RNA, 15 nt, Human
uccagccccuggaug

SEQ ID NO: 3025413 - RNA, 21 nt, Human
uccagccccuggaugcagccu

SEQ ID NO: 3025414 - RNA, 19 nt, Human
uccagccccuggaugcagc

SEQ ID NO: 3025415 - RNA, 17 nt, Human
uccagccccuggaugca

SEQ ID NO: 3025416 - RNA, 16 nt, Human
uccagccccuggaugc

SEQ ID NO: 3025417 - RNA, 11 nt, Human
uccagccuggg

SEQ ID NO: 3025418 - RNA, 22 nt, Human
uccagccccuggaugcagccuc

SEQ ID NO: 3025419 - RNA, 15 nt, Human
accuugacagggcac

SEQ ID NO: 3025420 - RNA, 14 nt, Human
accuugacagggca

SEQ ID NO: 3025421 - RNA, 15 nt, Human
accuugaaugaugcc

SEQ ID NO: 3025422 - RNA, 13 nt, Human
accuucuccuuca

SEQ ID NO: 3025423 - RNA, 12 nt, Human
accuucuccuuc

SEQ ID NO: 3025424 - RNA, 15 nt, Human
uccaccaucaagcca

SEQ ID NO: 3025425 - RNA, 17 nt, Human
accuuagacagucccug

SEQ ID NO: 3025426 - RNA, 13 nt, Human
accuagccuuaga

SEQ ID NO: 3025427 - RNA, 18 nt, Human
ucauccacugugccaugu

SEQ ID NO: 3025428 - RNA, 20 nt, Human
accuccgccucuuggguuca

SEQ ID NO: 3025429 - RNA, 10 nt, Human
acccuuuucu

SEQ ID NO: 3025430 - RNA, 20 nt, Human
ucauauuuacuucuuauaca

SEQ ID NO: 3025431 - RNA, 21 nt, Human
ucauauuuacuucuuauacau

SEQ ID NO: 3025432 - RNA, 22 nt, Human
ucauauuuacuucuuauacauu

SEQ ID NO: 3025433 - RNA, 16 nt, Human
ucauauuuacuucuua

SEQ ID NO: 3025434 - RNA, 17 nt, Human
accgcagacaggaccag

SEQ ID NO: 3025435 - RNA, 17 nt, Human
accgccaaggcuggggg

SEQ ID NO: 3025436 - RNA, 20 nt, Human
accgcagacaggaccaggga

SEQ ID NO: 3025437 - RNA, 12 nt, Human
accucugcacaa

SEQ ID NO: 3025438 - RNA, 19 nt, Human
accucucucacuccuugaa

SEQ ID NO: 3025439 - RNA, 14 nt, Human
accucucucacucc

SEQ ID NO: 3025440 - RNA, 23 nt, Human
accucucccuuggauuguccccg

SEQ ID NO: 3025441 - RNA, 15 nt, Human
accucucccuuggau

SEQ ID NO: 3025442 - RNA, 14 nt, Human
accucucccuugga

SEQ ID NO: 3025443 - RNA, 13 nt, Human
accucucccuugg

SEQ ID NO: 3025444 - RNA, 17 nt, Human
accucggugccuuccuc

SEQ ID NO: 3025445 - RNA, 19 nt, Human
ucauugaccugaggcccuu

SEQ ID NO: 3025446 - RNA, 21 nt, Human
ucauucuccuuguguuacuaa

SEQ ID NO: 3025447 - RNA, 22 nt, Human
ucauugaccugaggcccuucuc

SEQ ID NO: 3025448 - RNA, 11 nt, Human
ucauguucuua

SEQ ID NO: 3025449 - RNA, 17 nt, Human
ucauguucuuaauucuu

SEQ ID NO: 3025450 - RNA, 13 nt, Human
ucaugucuggcua

SEQ ID NO: 3025451 - RNA, 19 nt, Human
ucaugacaaagacugagua

SEQ ID NO: 3025452 - RNA, 19 nt, Human
ucauccacugugccaugug

SEQ ID NO: 3025453 - RNA, 21 nt, Human
ucauccacugugccaugugcc

SEQ ID NO: 3025454 - RNA, 23 nt, Human
ucauccacugugccaugugccag

SEQ ID NO: 3025455 - RNA, 20 nt, Human
uccuguuuuuauuauuaaca

SEQ ID NO: 3025456 - RNA, 16 nt, Human
uccuguuuuuauuauu

SEQ ID NO: 3025457 - RNA, 21 nt, Human
uccuguuuuuauuauuaacaa

SEQ ID NO: 3025458 - RNA, 15 nt, Human
uccuguuuuuauuau

SEQ ID NO: 3025459 - RNA, 19 nt, Human
uccuguucccaugagauga

SEQ ID NO: 3025460 - RNA, 18 nt, Human
uccugugugugcgccuac

SEQ ID NO: 3025461 - RNA, 13 nt, Human
uccugugugugcg

SEQ ID NO: 3025462 - RNA, 14 nt, Human
uccugugugugcgc

SEQ ID NO: 3025463 - RNA, 23 nt, Human
uccugugucuugcaauggcagcc

SEQ ID NO: 3025464 - RNA, 24 nt, Human
uccugugucuugcaauggcagccu

SEQ ID NO: 3025465 - RNA, 19 nt, Human
acugcagccucaaccuccu

SEQ ID NO: 3025466 - RNA, 21 nt, Human
acugcagccucaaccuccugg

SEQ ID NO: 3025467 - RNA, 22 nt, Human
acugcagccucaaccuccuggg

SEQ ID NO: 3025468 - RNA, 13 nt, Human
acugcacuguuuu

SEQ ID NO: 3025469 - RNA, 23 nt, Human
acugcagccucaaccuccugggc

SEQ ID NO: 3025470 - RNA, 13 nt, Human
uccugcugcaguu

SEQ ID NO: 3025471 - RNA, 17 nt, Human
uccugccucagccuccc

SEQ ID NO: 3025472 - RNA, 20 nt, Human
uccugccucgaacuggcugc

SEQ ID NO: 3025473 - RNA, 22 nt, Human
uccugcaggcagccaggccaca

SEQ ID NO: 3025474 - RNA, 19 nt, Human
uccugccucagccucccaa

SEQ ID NO: 3025475 - RNA, 20 nt, Human
uccugcaggcagccaggcca

SEQ ID NO: 3025476 - RNA, 19 nt, Human
uccugcaggcagccaggcc

SEQ ID NO: 3025477 - RNA, 17 nt, Human
uccugcaggcagccagg

SEQ ID NO: 3025478 - RNA, 16 nt, Human
uccugcaggcagccag

SEQ ID NO: 3025479 - RNA, 15 nt, Human
uccugcaggcagcca

SEQ ID NO: 3025480 - RNA, 22 nt, Human
acugaguacguugugcauuugg

SEQ ID NO: 3025481 - RNA, 23 nt, Human
acugaguacguugugcauuuggu

SEQ ID NO: 3025482 - RNA, 18 nt, Human
acugaguacguugugcau

SEQ ID NO: 3025483 - RNA, 19 nt, Human
acugaguacguugugcauu

SEQ ID NO: 3025484 - RNA, 21 nt, Human
acugaguacguugugcauuug

SEQ ID NO: 3025485 - RNA, 13 nt, Human
acugcaaccuccg

SEQ ID NO: 3025486 - RNA, 14 nt, Human
acugcaaccuccgc

SEQ ID NO: 3025487 - RNA, 16 nt, Human
acugcaaccuccgccu

SEQ ID NO: 3025488 - RNA, 22 nt, Human
acugcaaccuccgccucuuggg

SEQ ID NO: 3025489 - RNA, 15 nt, Human
uccucuccccagcaa

SEQ ID NO: 3025490 - RNA, 12 nt, Human
uccuucagugcc

SEQ ID NO: 3025491 - RNA, 11 nt, Human
uccuucagugc

SEQ ID NO: 3025492 - RNA, 22 nt, Human
uccuucagugccuuauggaaca

SEQ ID NO: 3025493 - RNA, 20 nt, Human
uccuucagugccuuauggaa

SEQ ID NO: 3025494 - RNA, 13 nt, Human
uccuucagugccu

SEQ ID NO: 3025495 - RNA, 22 nt, Human
acuggcugcaaaggguaucagg

SEQ ID NO: 3025496 - RNA, 23 nt, Human
acugcuuccagugaggcucugcc

SEQ ID NO: 3025497 - RNA, 22 nt, Human
acugcuuccagugaggcucugc

SEQ ID NO: 3025498 - RNA, 21 nt, Human
acugcuuccagugaggcucug

SEQ ID NO: 3025499 - RNA, 18 nt, Human
acugcuuccagugaggcu

SEQ ID NO: 3025500 - RNA, 22 nt, Human
acuggauuaaacuuaaucuaaa

SEQ ID NO: 3025501 - RNA, 14 nt, Human
ucgaggacagggag

SEQ ID NO: 3025502 - RNA, 17 nt, Human
ucgaggacagggaggug

SEQ ID NO: 3025503 - RNA, 13 nt, Human
ucgcgacaaugca

SEQ ID NO: 3025504 - RNA, 13 nt, Human
ucgaggacaggga

SEQ ID NO: 3025505 - RNA, 14 nt, Human
ucgagcaugccugg

SEQ ID NO: 3025506 - RNA, 15 nt, Human
uccuuucaccacaug

SEQ ID NO: 3025507 - RNA, 23 nt, Human
uccuuuagcgcccaguugggugg

SEQ ID NO: 3025508 - RNA, 15 nt, Human
ucgaacuggcugcaa

SEQ ID NO: 3025509 - RNA, 14 nt, Human
ucgaacuggcugca

SEQ ID NO: 3025510 - RNA, 13 nt, Human
ucgaacuggcugc

SEQ ID NO: 3025511 - RNA, 18 nt, Human
acuggguacuuguggaca

SEQ ID NO: 3025512 - RNA, 20 nt, Human
acuggguacuuguggacaca

SEQ ID NO: 3025513 - RNA, 23 nt, Human
acuggguacuuguggacacagcu

SEQ ID NO: 3025514 - RNA, 19 nt, Human
acuggguacuuguggacac

SEQ ID NO: 3025515 - RNA, 12 nt, Human
ucgcuccugugu

SEQ ID NO: 3025516 - RNA, 13 nt, Human
ucgcuccuguguc

SEQ ID NO: 3025517 - RNA, 22 nt, Human
acugggcuuggggaccagagcu

SEQ ID NO: 3025518 - RNA, 23 nt, Human
acuguacaugaaaacacauuuuu

SEQ ID NO: 3025519 - RNA, 13 nt, Human
acuguacaugaaa

SEQ ID NO: 3025520 - RNA, 14 nt, Human
acuguacaugaaaa

SEQ ID NO: 3025521 - RNA, 19 nt, Human
acuguaauuugugauacaa

SEQ ID NO: 3025522 - RNA, 13 nt, Human
acuguacaaagua

SEQ ID NO: 3025523 - RNA, 14 nt, Human
acuguacaaaguag

SEQ ID NO: 3025524 - RNA, 15 nt, Human
acuguacaaaguaga

SEQ ID NO: 3025525 - RNA, 14 nt, Human
acuaaaauguucua

SEQ ID NO: 3025526 - RNA, 15 nt, Human
acuacaguccuccca

SEQ ID NO: 3025527 - RNA, 23 nt, Human
acuacaggugugagucaccaagc

SEQ ID NO: 3025528 - RNA, 17 nt, Human
acuaaccagcagaaaug

SEQ ID NO: 3025529 - RNA, 13 nt, Human
acuaaccacgcug

SEQ ID NO: 3025530 - RNA, 16 nt, Human
acuaaccagcagaaau

SEQ ID NO: 3025531 - RNA, 12 nt, Human
acuaaccacgcu

SEQ ID NO: 3025532 - RNA, 13 nt, Human
uccagccugggug

SEQ ID NO: 3025533 - RNA, 24 nt, Human
uccagccugggugacagagcaagu

SEQ ID NO: 3025534 - RNA, 14 nt, Human
uccagcucaccagc

SEQ ID NO: 3025535 - RNA, 12 nt, Human
acguuucuaaag

SEQ ID NO: 3025536 - RNA, 14 nt, Human
acguuucuaaaggc

SEQ ID NO: 3025537 - RNA, 20 nt, Human
acuacauuagguugugaaug

SEQ ID NO: 3025538 - RNA, 19 nt, Human
acuacauuagguugugaau

SEQ ID NO: 3025539 - RNA, 18 nt, Human
acuacauuagguugugaa

SEQ ID NO: 3025540 - RNA, 16 nt, Human
acuacaguccucccau

SEQ ID NO: 3025541 - RNA, 22 nt, Human
ucccagugccgagaaggaagcc

SEQ ID NO: 3025542 - RNA, 19 nt, Human
ucccagugccgagaaggaa

SEQ ID NO: 3025543 - RNA, 22 nt, Human
uccccaccgcagacaggaccag

SEQ ID NO: 3025544 - RNA, 15 nt, Human
ucccauaugccuggg

SEQ ID NO: 3025545 - RNA, 13 nt, Human
ucccaucucacac

SEQ ID NO: 3025546 - RNA, 19 nt, Human
ucccaucucacacaugagc

SEQ ID NO: 3025547 - RNA, 14 nt, Human
ucccaucucacaca

SEQ ID NO: 3025548 - RNA, 20 nt, Human
acuauguuuuuguucaguuu

SEQ ID NO: 3025549 - RNA, 23 nt, Human
acuauguugcccaggcaggucuu

SEQ ID NO: 3025550 - RNA, 19 nt, Human
acuauguugcccaggcagg

SEQ ID NO: 3025551 - RNA, 20 nt, Human
acuauguugcccaggcaggu

SEQ ID NO: 3025552 - RNA, 21 nt, Human
acuauuaaacaugcuguacau

SEQ ID NO: 3025553 - RNA, 17 nt, Human
acuauguugcccaggca

SEQ ID NO: 3025554 - RNA, 18 nt, Human
acuauguugcccaggcag

SEQ ID NO: 3025555 - RNA, 17 nt, Human
acuaucacugguuuggu

SEQ ID NO: 3025556 - RNA, 17 nt, Human
acuauagccuaggugac

SEQ ID NO: 3025557 - RNA, 21 nt, Human
acuauaauguaagcucuacug

SEQ ID NO: 3025558 - RNA, 23 nt, Human
acuauaauuuaccugaagucuuu

SEQ ID NO: 3025559 - RNA, 24 nt, Human
uccccaccgcagacaggaccaggg

SEQ ID NO: 3025560 - RNA, 23 nt, Human
uccccaggaggccagccuugacc

SEQ ID NO: 3025561 - RNA, 18 nt, Human
ucccuauuagagaagaga

SEQ ID NO: 3025562 - RNA, 20 nt, Human
ucccgaguagcugggacuac

SEQ ID NO: 3025563 - RNA, 18 nt, Human
ucccgaauagcugggacu

SEQ ID NO: 3025564 - RNA, 15 nt, Human
ucccgaauagcuggg

SEQ ID NO: 3025565 - RNA, 16 nt, Human
ucccgaauagcuggga

SEQ ID NO: 3025566 - RNA, 19 nt, Human
acucuccucugcugcuggc

SEQ ID NO: 3025567 - RNA, 18 nt, Human
acucuccucugcugcugg

SEQ ID NO: 3025568 - RNA, 17 nt, Human
acucgcgacaaugcaaa

SEQ ID NO: 3025569 - RNA, 23 nt, Human
acucgcgacaaugcaaaccauca

SEQ ID NO: 3025570 - RNA, 20 nt, Human
acucgcgacaaugcaaacca

SEQ ID NO: 3025571 - RNA, 19 nt, Human
uccuaggcauuugcugaau

SEQ ID NO: 3025572 - RNA, 18 nt, Human
acucgcgacaaugcaaac

SEQ ID NO: 3025573 - RNA, 17 nt, Human
acucuccucugcugcug

SEQ ID NO: 3025574 - RNA, 18 nt, Human
uccucauacccaccccca

SEQ ID NO: 3025575 - RNA, 14 nt, Human
uccucauacccacc

SEQ ID NO: 3025576 - RNA, 12 nt, Human
uccucuccccag

SEQ ID NO: 3025577 - RNA, 19 nt, Human
uccucccucccucuuuccc

SEQ ID NO: 3025578 - RNA, 17 nt, Human
uccucccucccucuuuc

SEQ ID NO: 3025579 - RNA, 15 nt, Human
uccucccucccucuu

SEQ ID NO: 3025580 - RNA, 20 nt, Human
uccucagaucuucugugggu

SEQ ID NO: 3025581 - RNA, 16 nt, Human
acucuuauugcccacg

SEQ ID NO: 3025582 - RNA, 19 nt, Human
acucuuauugcccacgcug

SEQ ID NO: 3025583 - RNA, 21 nt, Human
ucccucagucuggcccuuccu

SEQ ID NO: 3025584 - RNA, 22 nt, Human
ucccucauccucauacccaccc

SEQ ID NO: 3025585 - RNA, 14 nt, Human
uccuaggcauuugc

SEQ ID NO: 3025586 - RNA, 21 nt, Human
ucccuuugacgccaucccagc

SEQ ID NO: 3025587 - RNA, 23 nt, Human
ucccuuugacgccaucccagccc

SEQ ID NO: 3025588 - RNA, 22 nt, Human
ucccuuugacgccaucccagcc

SEQ ID NO: 3025589 - RNA, 23 nt, Human
ucccugguggcagcucaccucuc

SEQ ID NO: 3025590 - RNA, 22 nt, Human
ucccuuacgugaguccuggcau

SEQ ID NO: 3025591 - RNA, 18 nt, Human
ucccuuacgugaguccug

SEQ ID NO: 3025592 - RNA, 22 nt, Human
ucccuuuccaaaugcccagcuu

SEQ ID NO: 3025593 - RNA, 14 nt, Human
uagucauucuuccc

SEQ ID NO: 3025594 - RNA, 15 nt, Human
uagucauucuucccu

SEQ ID NO: 3025595 - RNA, 21 nt, Human
uagucaggugccucaagagaa

SEQ ID NO: 3025596 - RNA, 23 nt, Human
acaagcugcacccucaggcaggu

SEQ ID NO: 3025597 - RNA, 22 nt, Human
acaagcugcacccucaggcagg

SEQ ID NO: 3025598 - RNA, 21 nt, Human
acaagcugcacccucaggcag

SEQ ID NO: 3025599 - RNA, 19 nt, Human
acaagcugcacccucaggc

SEQ ID NO: 3025600 - RNA, 20 nt, Human
uaguuccucauuagcauuuu

SEQ ID NO: 3025601 - RNA, 18 nt, Human
acacaugcaaggucauuu

SEQ ID NO: 3025602 - RNA, 19 nt, Human
acacaugcaaggucauuuu

SEQ ID NO: 3025603 - RNA, 20 nt, Human
acacaugcaaggucauuuuu

SEQ ID NO: 3025604 - RNA, 11 nt, Human
acacccuguga

SEQ ID NO: 3025605 - RNA, 18 nt, Human
acacccugugauggggcc

SEQ ID NO: 3025606 - RNA, 12 nt, Human
acacccugugau

SEQ ID NO: 3025607 - RNA, 19 nt, Human
acacccagcccacuucugc

SEQ ID NO: 3025608 - RNA, 20 nt, Human
acacccagcccacuucugcc

SEQ ID NO: 3025609 - RNA, 21 nt, Human
acacccagcccacuucugcca

SEQ ID NO: 3025610 - RNA, 21 nt, Human
acacaugcaaggucauuuuuu

SEQ ID NO: 3025611 - RNA, 13 nt, Human
uauagcaagacau

SEQ ID NO: 3025612 - RNA, 20 nt, Human
uauagccuaggugacagagu

SEQ ID NO: 3025613 - RNA, 19 nt, Human
acacucauugaccugaggc

SEQ ID NO: 3025614 - RNA, 23 nt, Human
acacucauugaccugaggcccuu

SEQ ID NO: 3025615 - RNA, 21 nt, Human
acacucauugaccugaggccc

SEQ ID NO: 3025616 - RNA, 20 nt, Human
uauaaccaguguuguggauu

SEQ ID NO: 3025617 - RNA, 21 nt, Human
uauaauuuaccugaagucuuu

SEQ ID NO: 3025618 - RNA, 13 nt, Human
uauacauaaacaa

SEQ ID NO: 3025619 - RNA, 14 nt, Human
uauacauaaacaag

SEQ ID NO: 3025620 - RNA, 14 nt, Human
uauacauuugauaa

SEQ ID NO: 3025621 - RNA, 15 nt, Human
uaugaugacuguuuu

SEQ ID NO: 3025622 - RNA, 14 nt, Human
uaugaugacuguuu

SEQ ID NO: 3025623 - RNA, 18 nt, Human
uaugcucugcauguuaca

SEQ ID NO: 3025624 - RNA, 14 nt, Human
uaugcucugcaugu

SEQ ID NO: 3025625 - RNA, 19 nt, Human
uaugcucugcauguuacau

SEQ ID NO: 3025626 - RNA, 22 nt, Human
uauggcccuggccuagcauacg

SEQ ID NO: 3025627 - RNA, 10 nt, Human
uaugggagag

SEQ ID NO: 3025628 - RNA, 16 nt, Human
uauggcuuuugugcau

SEQ ID NO: 3025629 - RNA, 17 nt, Human
acagcuaacauggaagu

SEQ ID NO: 3025630 - RNA, 15 nt, Human
acagcuaacauggaa

SEQ ID NO: 3025631 - RNA, 14 nt, Human
acagcuaacaugga

SEQ ID NO: 3025632 - RNA, 14 nt, Human
uaucuugaagacuu

SEQ ID NO: 3025633 - RNA, 20 nt, Human
acagaguuuucacucuuauu

SEQ ID NO: 3025634 - RNA, 18 nt, Human
acagaguuuucacucuua

SEQ ID NO: 3025635 - RNA, 23 nt, Human
uaugaggcauuuguuugaacuga

SEQ ID NO: 3025636 - RNA, 13 nt, Human
uaugaggcauuug

SEQ ID NO: 3025637 - RNA, 15 nt, Human
uaucuugaagacuuu

SEQ ID NO: 3025638 - RNA, 14 nt, Human
uaugaucacggcuc

SEQ ID NO: 3025639 - RNA, 21 nt, Human
uaugaucacggcucacugcag

SEQ ID NO: 3025640 - RNA, 23 nt, Human
uaugaucacggcucacugcagcc

SEQ ID NO: 3025641 - RNA, 20 nt, Human
uaucagaacuauguuuuugu

SEQ ID NO: 3025642 - RNA, 14 nt, Human
uaucagaacuaugu

SEQ ID NO: 3025643 - RNA, 15 nt, Human
uaucuagauacugua

SEQ ID NO: 3025644 - RNA, 16 nt, Human
uaucuagauacuguau

SEQ ID NO: 3025645 - RNA, 17 nt, Human
uaucucccccagcccca

SEQ ID NO: 3025646 - RNA, 18 nt, Human
uaucucccccagccccau

SEQ ID NO: 3025647 - RNA, 16 nt, Human
uaucucccccagcccc

SEQ ID NO: 3025648 - RNA, 19 nt, Human
uaucuagauacuguaucau

SEQ ID NO: 3025649 - RNA, 22 nt, Human
acagacuggaagcacagcuuca

SEQ ID NO: 3025650 - RNA, 21 nt, Human
acagagugagacucugucuca

SEQ ID NO: 3025651 - RNA, 20 nt, Human
acagagcccacgcccccacu

SEQ ID NO: 3025652 - RNA, 16 nt, Human
acagagcuacacaggg

SEQ ID NO: 3025653 - RNA, 17 nt, Human
uauauucucagcagagu

SEQ ID NO: 3025654 - RNA, 14 nt, Human
acagacuggaagca

SEQ ID NO: 3025655 - RNA, 19 nt, Human
uauauucucagcagagugc

SEQ ID NO: 3025656 - RNA, 20 nt, Human
acagacccugcccugugggc

SEQ ID NO: 3025657 - RNA, 18 nt, Human
acagacccugcccugugg

SEQ ID NO: 3025658 - RNA, 16 nt, Human
acagacccugcccugu

SEQ ID NO: 3025659 - RNA, 17 nt, Human
acagacccugcccugug

SEQ ID NO: 3025660 - RNA, 23 nt, Human
acagacacaggcccggcuccagg

SEQ ID NO: 3025661 - RNA, 11 nt, Human
acacuccuuca

SEQ ID NO: 3025662 - RNA, 20 nt, Human
uaucacuuccaugacauaag

SEQ ID NO: 3025663 - RNA, 18 nt, Human
uaucacccagaagaaaau

SEQ ID NO: 3025664 - RNA, 21 nt, Human
uaucaaguauuauaccuuuuu

SEQ ID NO: 3025665 - RNA, 18 nt, Human
uaucaaguauuauaccuu

SEQ ID NO: 3025666 - RNA, 21 nt, Human
acaguaacauagcugugauuu

SEQ ID NO: 3025667 - RNA, 22 nt, Human
acagggcacaccgggcacucag

SEQ ID NO: 3025668 - RNA, 22 nt, Human
acagguuuuccugaagaauuga

SEQ ID NO: 3025669 - RNA, 12 nt, Human
acaggcugggcu

SEQ ID NO: 3025670 - RNA, 20 nt, Human
acagggcacaccgggcacuc

SEQ ID NO: 3025671 - RNA, 21 nt, Human
acaggcugggcuucaguggca

SEQ ID NO: 3025672 - RNA, 14 nt, Human
acaggcugggcuuc

SEQ ID NO: 3025673 - RNA, 17 nt, Human
acaggcugggcuucagu

SEQ ID NO: 3025674 - RNA, 13 nt, Human
acagucccugcca

SEQ ID NO: 3025675 - RNA, 12 nt, Human
acagucccugcc

SEQ ID NO: 3025676 - RNA, 15 nt, Human
acaguauuacuucug

SEQ ID NO: 3025677 - RNA, 16 nt, Human
acaguauuacuucugc

SEQ ID NO: 3025678 - RNA, 17 nt, Human
acaguauuacuucugcu

SEQ ID NO: 3025679 - RNA, 19 nt, Human
acaguauuacuucugcuac

SEQ ID NO: 3025680 - RNA, 17 nt, Human
acaguccucccaucuca

SEQ ID NO: 3025681 - RNA, 20 nt, Human
acaguccuuaccagcagagc

SEQ ID NO: 3025682 - RNA, 18 nt, Human
acaguccuuaccagcaga

SEQ ID NO: 3025683 - RNA, 15 nt, Human
acaguccucccaucu

SEQ ID NO: 3025684 - RNA, 14 nt, Human
acaguccucccauc

SEQ ID NO: 3025685 - RNA, 13 nt, Human
acaguccucccau

SEQ ID NO: 3025686 - RNA, 15 nt, Human
acagucccugccaau

SEQ ID NO: 3025687 - RNA, 22 nt, Human
acaguguguggucaacauuucu

SEQ ID NO: 3025688 - RNA, 15 nt, Human
acaguuaagagaaau

SEQ ID NO: 3025689 - RNA, 22 nt, Human
acaguccuuaccagcagagcac

SEQ ID NO: 3025690 - RNA, 21 nt, Human
acaguccuuaccagcagagca

SEQ ID NO: 3025691 - RNA, 15 nt, Human
uauguuuuauauagc

SEQ ID NO: 3025692 - RNA, 17 nt, Human
uauguuuuaagaggcag

SEQ ID NO: 3025693 - RNA, 19 nt, Human
uauguuuuaagaggcaggg

SEQ ID NO: 3025694 - RNA, 16 nt, Human
uauuaaaaaucucaaa

SEQ ID NO: 3025695 - RNA, 18 nt, Human
uauuaaaaaucucaaauu

SEQ ID NO: 3025696 - RNA, 20 nt, Human
uauuaaaaaucucaaauuuc

SEQ ID NO: 3025697 - RNA, 22 nt, Human
uauuaaaaaucucaaauuucua

SEQ ID NO: 3025698 - RNA, 19 nt, Human
uauuaaacaugcuguacau

SEQ ID NO: 3025699 - RNA, 15 nt, Human
uauuaaacaugcugu

SEQ ID NO: 3025700 - RNA, 17 nt, Human
uauuaaacaugcuguac

SEQ ID NO: 3025701 - RNA, 23 nt, Human
uauuaaaaaucucaaauuucuaa

SEQ ID NO: 3025702 - RNA, 12 nt, Human
uauuagagaaga

SEQ ID NO: 3025703 - RNA, 16 nt, Human
uauuaccacagacaua

SEQ ID NO: 3025704 - RNA, 16 nt, Human
uauucaggaagcucag

SEQ ID NO: 3025705 - RNA, 22 nt, Human
uauucaggaagcucagggccug

SEQ ID NO: 3025706 - RNA, 18 nt, Human
uauucaggaagcucaggg

SEQ ID NO: 3025707 - RNA, 15 nt, Human
uauucugagaugacu

SEQ ID NO: 3025708 - RNA, 15 nt, Human
uauucuuauuuaaug

SEQ ID NO: 3025709 - RNA, 16 nt, Human
uauucuguuggccagu

SEQ ID NO: 3025710 - RNA, 17 nt, Human
acaguucucuccuucuu

SEQ ID NO: 3025711 - RNA, 18 nt, Human
uauucucuccuguaccuc

SEQ ID NO: 3025712 - RNA, 20 nt, Human
uauucucuccuguaccucuu

SEQ ID NO: 3025713 - RNA, 24 nt, Human
uauucucuccuguaccucuugagc

SEQ ID NO: 3025714 - RNA, 13 nt, Human
acaguuacucaga

SEQ ID NO: 3025715 - RNA, 20 nt, Human
acaguuacucagaauucucu

SEQ ID NO: 3025716 - RNA, 20 nt, Human
acaguucaauucucauuugu

SEQ ID NO: 3025717 - RNA, 16 nt, Human
acaguucucuccuucu

SEQ ID NO: 3025718 - RNA, 20 nt, Human
uauugaagcagaguggcagu

SEQ ID NO: 3025719 - RNA, 16 nt, Human
uauugaagcagagugg

SEQ ID NO: 3025720 - RNA, 14 nt, Human
uauugaagcagagu

SEQ ID NO: 3025721 - RNA, 16 nt, Human
uauugaaaugauuuca

SEQ ID NO: 3025722 - RNA, 15 nt, Human
uauuuaaucuuuuau

SEQ ID NO: 3025723 - RNA, 13 nt, Human
uauuuaaucuuuu

SEQ ID NO: 3025724 - RNA, 15 nt, Human
uauuuaaugaaagac

SEQ ID NO: 3025725 - RNA, 21 nt, Human
uauuuaaugaaagacuguaca

SEQ ID NO: 3025726 - RNA, 17 nt, Human
uauugucaaagugguga

SEQ ID NO: 3025727 - RNA, 13 nt, Human
uauugucaaagug

SEQ ID NO: 3025728 - RNA, 16 nt, Human
uauuuaauuugaaggu

SEQ ID NO: 3025729 - RNA, 23 nt, Human
uauuuaauuugaagguagaaugu

SEQ ID NO: 3025730 - RNA, 13 nt, Human
uauuuaauuugaa

SEQ ID NO: 3025731 - RNA, 23 nt, Human
uauuuaauuuuuuugagacagag

SEQ ID NO: 3025732 - RNA, 18 nt, Human
uauuuacuucuuauacau

SEQ ID NO: 3025733 - RNA, 13 nt, Human
uauuuauuuguga

SEQ ID NO: 3025734 - RNA, 14 nt, Human
uauuuauuuauuua

SEQ ID NO: 3025735 - RNA, 13 nt, Human
uauuuauuuaaau

SEQ ID NO: 3025736 - RNA, 14 nt, Human
uauuuauuuaaauu

SEQ ID NO: 3025737 - RNA, 13 nt, Human
uacuauuaaacau

SEQ ID NO: 3025738 - RNA, 16 nt, Human
uacuauguaucaauga

SEQ ID NO: 3025739 - RNA, 16 nt, Human
uacuauaauuuaccug

SEQ ID NO: 3025740 - RNA, 16 nt, Human
uacuauuaaacaugcu

SEQ ID NO: 3025741 - RNA, 15 nt, Human
uacuauuaaacaugc

SEQ ID NO: 3025742 - RNA, 14 nt, Human
uacuauuaaacaug

SEQ ID NO: 3025743 - RNA, 18 nt, Human
uacuauuaaacaugcugu

SEQ ID NO: 3025744 - RNA, 13 nt, Human
uacguugugcauu

SEQ ID NO: 3025745 - RNA, 14 nt, Human
uacguugugcauuu

SEQ ID NO: 3025746 - RNA, 14 nt, Human
uacgucugacaggc

SEQ ID NO: 3025747 - RNA, 21 nt, Human
uacucugugucagguggggca

SEQ ID NO: 3025748 - RNA, 15 nt, Human
uacguacacauuuua

SEQ ID NO: 3025749 - RNA, 14 nt, Human
uacguacacauuuu

SEQ ID NO: 3025750 - RNA, 13 nt, Human
aauucuuaaauau

SEQ ID NO: 3025751 - RNA, 22 nt, Human
aauucuucuccacuuucuagcc

SEQ ID NO: 3025752 - RNA, 14 nt, Human
aauucuugcaaagu

SEQ ID NO: 3025753 - RNA, 20 nt, Human
aauucuugcaaaguaucccu

SEQ ID NO: 3025754 - RNA, 15 nt, Human
aauuuacauacucug

SEQ ID NO: 3025755 - RNA, 19 nt, Human
aauuuacauacucugcuua

SEQ ID NO: 3025756 - RNA, 13 nt, Human
aauuuaaaagucu

SEQ ID NO: 3025757 - RNA, 22 nt, Human
aauuguuuggggaugagaaagg

SEQ ID NO: 3025758 - RNA, 17 nt, Human
aauuuagaaauauaauu

SEQ ID NO: 3025759 - RNA, 13 nt, Human
aauuucuaaaucu

SEQ ID NO: 3025760 - RNA, 21 nt, Human
aauuucuaaaucuccaaaaua

SEQ ID NO: 3025761 - RNA, 22 nt, Human
aauuuuuuuaucgucacugcuu

SEQ ID NO: 3025762 - RNA, 17 nt, Human
aauuuuuuugagacaga

SEQ ID NO: 3025763 - RNA, 13 nt, Human
acaaaaacauggc

SEQ ID NO: 3025764 - RNA, 14 nt, Human
uagacagucccugc

SEQ ID NO: 3025765 - RNA, 12 nt, Human
uagacagucccu

SEQ ID NO: 3025766 - RNA, 17 nt, Human
aauuuuuauuaaauuau

SEQ ID NO: 3025767 - RNA, 18 nt, Human
aauuuuuauuaaauuaug

SEQ ID NO: 3025768 - RNA, 21 nt, Human
uagacagagucucacuguugc

SEQ ID NO: 3025769 - RNA, 16 nt, Human
uagacaauuuauuaug

SEQ ID NO: 3025770 - RNA, 16 nt, Human
uagaagucacacagua

SEQ ID NO: 3025771 - RNA, 16 nt, Human
uagaagucuuagaugu

SEQ ID NO: 3025772 - RNA, 17 nt, Human
uagaagucuuagaugua

SEQ ID NO: 3025773 - RNA, 18 nt, Human
uagaagucuuagauguau

SEQ ID NO: 3025774 - RNA, 19 nt, Human
uagaagucuuagauguaua

SEQ ID NO: 3025775 - RNA, 15 nt, Human
uagaagucacacagu

SEQ ID NO: 3025776 - RNA, 12 nt, Human
acaacacucaca

SEQ ID NO: 3025777 - RNA, 15 nt, Human
acaacaacaaaauga

SEQ ID NO: 3025778 - RNA, 18 nt, Human
acaagcgugagccacugc

SEQ ID NO: 3025779 - RNA, 13 nt, Human
acaagcugcaccc

SEQ ID NO: 3025780 - RNA, 20 nt, Human
acaagcgugagccacugcac

SEQ ID NO: 3025781 - RNA, 21 nt, Human
acaagcgugagccacugcacc

SEQ ID NO: 3025782 - RNA, 12 nt, Human
acaagccacccc

SEQ ID NO: 3025783 - RNA, 17 nt, Human
acaagagcccaggccuc

SEQ ID NO: 3025784 - RNA, 22 nt, Human
uagauuuuagacccuauugcug

SEQ ID NO: 3025785 - RNA, 19 nt, Human
uagcacagacccugcccug

SEQ ID NO: 3025786 - RNA, 18 nt, Human
uagcacagacccugcccu

SEQ ID NO: 3025787 - RNA, 17 nt, Human
uagcacagacccugccc

SEQ ID NO: 3025788 - RNA, 16 nt, Human
uagcacagacccugcc

SEQ ID NO: 3025789 - RNA, 24 nt, Human
uagcacagacccugcccugugggc

SEQ ID NO: 3025790 - RNA, 12 nt, Human
uacauacuuuuu

SEQ ID NO: 3025791 - RNA, 15 nt, Human
uacauacuuuuuggg

SEQ ID NO: 3025792 - RNA, 14 nt, Human
uacauacuuuuugg

SEQ ID NO: 3025793 - RNA, 13 nt, Human
aaugucacaggca

SEQ ID NO: 3025794 - RNA, 14 nt, Human
aaugucacaggcag

SEQ ID NO: 3025795 - RNA, 22 nt, Human
aaugugaaacuggauuaaacuu

SEQ ID NO: 3025796 - RNA, 18 nt, Human
uacaguccucccaucuca

SEQ ID NO: 3025797 - RNA, 17 nt, Human
uacaguccucccaucuc

SEQ ID NO: 3025798 - RNA, 15 nt, Human
uacaguccucccauc

SEQ ID NO: 3025799 - RNA, 12 nt, Human
uacaguccuccc

SEQ ID NO: 3025800 - RNA, 18 nt, Human
uacaguaucucagggccu

SEQ ID NO: 3025801 - RNA, 21 nt, Human
aauguacagcaaggagauuua

SEQ ID NO: 3025802 - RNA, 23 nt, Human
aauguacagcaaggagauuuaca

SEQ ID NO: 3025803 - RNA, 22 nt, Human
uacagcaaggagauuuacaacu

SEQ ID NO: 3025804 - RNA, 22 nt, Human
aaugguuuucuuguguguuuau

SEQ ID NO: 3025805 - RNA, 18 nt, Human
aaugguuuucuugugugu

SEQ ID NO: 3025806 - RNA, 17 nt, Human
aaugguuuucuugugug

SEQ ID NO: 3025807 - RNA, 13 nt, Human
aauguaagcucua

SEQ ID NO: 3025808 - RNA, 15 nt, Human
aauguaagcucuacu

SEQ ID NO: 3025809 - RNA, 20 nt, Human
uacccgggaagggggcuggg

SEQ ID NO: 3025810 - RNA, 15 nt, Human
uacccucauguucuu

SEQ ID NO: 3025811 - RNA, 16 nt, Human
uacccucauguucuua

SEQ ID NO: 3025812 - RNA, 20 nt, Human
uacccuggcacuauaaugua

SEQ ID NO: 3025813 - RNA, 22 nt, Human
uacccuggcacuauaauguaag

SEQ ID NO: 3025814 - RNA, 17 nt, Human
uaccacuuuuguucuug

SEQ ID NO: 3025815 - RNA, 17 nt, Human
uaccauccccuguagag

SEQ ID NO: 3025816 - RNA, 18 nt, Human
aauuaacuuuuauaaacu

SEQ ID NO: 3025817 - RNA, 20 nt, Human
aauuaacuuuuauaaacuuu

SEQ ID NO: 3025818 - RNA, 22 nt, Human
aauuaacuuuuauaaacuuuac

SEQ ID NO: 3025819 - RNA, 13 nt, Human
aauuaaguacuau

SEQ ID NO: 3025820 - RNA, 16 nt, Human
aauuaacuuuuauaaa

SEQ ID NO: 3025821 - RNA, 23 nt, Human
uaauuaguuccucauuagcauuu

SEQ ID NO: 3025822 - RNA, 20 nt, Human
aaugcacuuuguucuggcuc

SEQ ID NO: 3025823 - RNA, 19 nt, Human
aaugcacuuuguucuggcu

SEQ ID NO: 3025824 - RNA, 16 nt, Human
aaugcacuuuguucug

SEQ ID NO: 3025825 - RNA, 13 nt, Human
aaugcacuuuguu

SEQ ID NO: 3025826 - RNA, 20 nt, Human
aaugcacaaacagaggccgc

SEQ ID NO: 3025827 - RNA, 19 nt, Human
aaugcacaaacagaggccg

SEQ ID NO: 3025828 - RNA, 12 nt, Human
aaugcaaagaug

SEQ ID NO: 3025829 - RNA, 18 nt, Human
aaugcaaagaugaagguc

SEQ ID NO: 3025830 - RNA, 14 nt, Human
aaugcaaagaugaa

SEQ ID NO: 3025831 - RNA, 21 nt, Human
aaugcaaagaugaaggucugu

SEQ ID NO: 3025832 - RNA, 23 nt, Human
aaugcaaaccaucauugaaaucu

SEQ ID NO: 3025833 - RNA, 22 nt, Human
aaugcaaaccaucauugaaauc

SEQ ID NO: 3025834 - RNA, 18 nt, Human
aaugcacaaacagaggcc

SEQ ID NO: 3025835 - RNA, 21 nt, Human
aaugaaugucagugugacuga

SEQ ID NO: 3025836 - RNA, 20 nt, Human
aaugaaugucagugugacug

SEQ ID NO: 3025837 - RNA, 16 nt, Human
aaugcaaaccaucauu

SEQ ID NO: 3025838 - RNA, 14 nt, Human
aaugcaaaccauca

SEQ ID NO: 3025839 - RNA, 14 nt, Human
aaugaccuuucaau

SEQ ID NO: 3025840 - RNA, 13 nt, Human
aaugaccuuucaa

SEQ ID NO: 3025841 - RNA, 20 nt, Human
uaauuugaagguagaauguu

SEQ ID NO: 3025842 - RNA, 18 nt, Human
uaauuuaccugaagucuu

SEQ ID NO: 3025843 - RNA, 17 nt, Human
uaauuuaccugaagucu

SEQ ID NO: 3025844 - RNA, 21 nt, Human
uacaagcgugagccacugcac

SEQ ID NO: 3025845 - RNA, 16 nt, Human
uacaagcgugagccac

SEQ ID NO: 3025846 - RNA, 18 nt, Human
uacaagcgugagccacug

SEQ ID NO: 3025847 - RNA, 19 nt, Human
uacaagcgugagccacugc

SEQ ID NO: 3025848 - RNA, 20 nt, Human
uacaagcgugagccacugca

SEQ ID NO: 3025849 - RNA, 16 nt, Human
uacaaaaacauggccu

SEQ ID NO: 3025850 - RNA, 19 nt, Human
aaucuuuuaugauugccuu

SEQ ID NO: 3025851 - RNA, 23 nt, Human
aaucuucugaacuuggcgcugcc

SEQ ID NO: 3025852 - RNA, 14 nt, Human
aaugaaugaaacau

SEQ ID NO: 3025853 - RNA, 14 nt, Human
aaugaaugucagug

SEQ ID NO: 3025854 - RNA, 15 nt, Human
aaugaaugucagugu

SEQ ID NO: 3025855 - RNA, 16 nt, Human
uaauguaagcucuacu

SEQ ID NO: 3025856 - RNA, 17 nt, Human
uaauguaagcucuacug

SEQ ID NO: 3025857 - RNA, 16 nt, Human
uaaugucacaggcagg

SEQ ID NO: 3025858 - RNA, 17 nt, Human
uaaugucacaggcaggu

SEQ ID NO: 3025859 - RNA, 15 nt, Human
uaaugucacaggcag

SEQ ID NO: 3025860 - RNA, 12 nt, Human
uaaugugaaacu

SEQ ID NO: 3025861 - RNA, 20 nt, Human
uaaugugaaacuggauuaaa

SEQ ID NO: 3025862 - RNA, 22 nt, Human
uaaugugaaacuggauuaaacu

SEQ ID NO: 3025863 - RNA, 23 nt, Human
uaaugugaaacuggauuaaacuu

SEQ ID NO: 3025864 - RNA, 21 nt, Human
uaauauugauaugcuuauaca

SEQ ID NO: 3025865 - RNA, 20 nt, Human
aauacaguaucucagggccu

SEQ ID NO: 3025866 - RNA, 23 nt, Human
uaauacaccacuacauucuguua

SEQ ID NO: 3025867 - RNA, 22 nt, Human
uaauacaccacuacauucuguu

SEQ ID NO: 3025868 - RNA, 21 nt, Human
uaauacaccacuacauucugu

SEQ ID NO: 3025869 - RNA, 13 nt, Human
aacucuguaauuc

SEQ ID NO: 3025870 - RNA, 20 nt, Human
gugaguccuggcaugggaau

SEQ ID NO: 3025871 - RNA, 17 nt, Human
gugaguccuggcauggg

SEQ ID NO: 3025872 - RNA, 19 nt, Human
gugaguacuacaguccucc

SEQ ID NO: 3025873 - RNA, 12 nt, Human
gugagagcuggg

SEQ ID NO: 3025874 - RNA, 12 nt, Human
gugaccccaggu

SEQ ID NO: 3025875 - RNA, 17 nt, Human
gugaguacuacaguccu

SEQ ID NO: 3025876 - RNA, 21 nt, Human
gugagcacuaaggugugcucu

SEQ ID NO: 3025877 - RNA, 15 nt, Human
gugagcaauccugca

SEQ ID NO: 3025878 - RNA, 13 nt, Human
gugagagcugggu

SEQ ID NO: 3025879 - RNA, 16 nt, Human
gugagaggggaacaga

SEQ ID NO: 3025880 - RNA, 14 nt, Human
gugaagugaagaca

SEQ ID NO: 3025881 - RNA, 23 nt, Human
gugaagacaaugacuuacuguac

SEQ ID NO: 3025882 - RNA, 16 nt, Human
gugacagaggcagccc

SEQ ID NO: 3025883 - RNA, 18 nt, Human
gugacagaggcagcccca

SEQ ID NO: 3025884 - RNA, 19 nt, Human
gugacagaggcagccccau

SEQ ID NO: 3025885 - RNA, 14 nt, Human
gugacaugucuuuu

SEQ ID NO: 3025886 - RNA, 18 nt, Human
gugaccauguuuuguuua

SEQ ID NO: 3025887 - RNA, 21 nt, Human
gugaccagcaccaucucuccu

SEQ ID NO: 3025888 - RNA, 18 nt, Human
gugaccagcaccaucucu

SEQ ID NO: 3025889 - RNA, 17 nt, Human
gugaccaaugaugguca

SEQ ID NO: 3025890 - RNA, 18 nt, Human
aacuaacaggcuuaguga

SEQ ID NO: 3025891 - RNA, 22 nt, Human
aacuaacaggcuuagugaugua

SEQ ID NO: 3025892 - RNA, 23 nt, Human
aacguggcugcuucaaggauccu

SEQ ID NO: 3025893 - RNA, 18 nt, Human
aaccugauugugucucuu

SEQ ID NO: 3025894 - RNA, 19 nt, Human
aaccugauugugucucuug

SEQ ID NO: 3025895 - RNA, 12 nt, Human
aaccugugucuc

SEQ ID NO: 3025896 - RNA, 16 nt, Human
gucuucaguaagccgu

SEQ ID NO: 3025897 - RNA, 16 nt, Human
gucuuuguacagacaa

SEQ ID NO: 3025898 - RNA, 15 nt, Human
gucuuuguacagaca

SEQ ID NO: 3025899 - RNA, 18 nt, Human
gucucuuuaaugucacag

SEQ ID NO: 3025900 - RNA, 19 nt, Human
gucucuuuaaugucacagg

SEQ ID NO: 3025901 - RNA, 20 nt, Human
gucucuuuaaugucacaggc

SEQ ID NO: 3025902 - RNA, 14 nt, Human
gucugaaggcuggg

SEQ ID NO: 3025903 - RNA, 19 nt, Human
gucugaaggcuggguucug

SEQ ID NO: 3025904 - RNA, 22 nt, Human
gucucuuuaaugucacaggcag

SEQ ID NO: 3025905 - RNA, 17 nt, Human
gucucuugguccugcug

SEQ ID NO: 3025906 - RNA, 19 nt, Human
gucucuugguccugcugca

SEQ ID NO: 3025907 - RNA, 18 nt, Human
gucucuugguccugcugc

SEQ ID NO: 3025908 - RNA, 20 nt, Human
gucucuugguccugcugcag

SEQ ID NO: 3025909 - RNA, 13 nt, Human
gucucuugguccu

SEQ ID NO: 3025910 - RNA, 18 nt, Human
gucuggaaugcaguggua

SEQ ID NO: 3025911 - RNA, 21 nt, Human
gucugacaggcaaugcuggcu

SEQ ID NO: 3025912 - RNA, 22 nt, Human
gucugacaggcaaugcuggcug

SEQ ID NO: 3025913 - RNA, 23 nt, Human
gucugacaggcaaugcuggcugu

SEQ ID NO: 3025914 - RNA, 13 nt, Human
guccuacccaccc

SEQ ID NO: 3025915 - RNA, 20 nt, Human
aacagacuggaagcacagcu

SEQ ID NO: 3025916 - RNA, 20 nt, Human
aacauacucccaucugugaa

SEQ ID NO: 3025917 - RNA, 16 nt, Human
aacauacucccaucug

SEQ ID NO: 3025918 - RNA, 18 nt, Human
aacauacucccaucugug

SEQ ID NO: 3025919 - RNA, 14 nt, Human
aacaucaacaucuu

SEQ ID NO: 3025920 - RNA, 22 nt, Human
aacauguuuuucuucucccuca

SEQ ID NO: 3025921 - RNA, 23 nt, Human
guccccuguuuguuucugaaagg

SEQ ID NO: 3025922 - RNA, 16 nt, Human
guccccgcacugggcu

SEQ ID NO: 3025923 - RNA, 15 nt, Human
guccccgcacugggc

SEQ ID NO: 3025924 - RNA, 13 nt, Human
gucccccugacaa

SEQ ID NO: 3025925 - RNA, 22 nt, Human
guccgaaagggacuuggaagcu

SEQ ID NO: 3025926 - RNA, 21 nt, Human
guccgaaagggacuuggaagc

SEQ ID NO: 3025927 - RNA, 13 nt, Human
gucccuuuuccuu

SEQ ID NO: 3025928 - RNA, 19 nt, Human
gucccaccuuggcugcagg

SEQ ID NO: 3025929 - RNA, 17 nt, Human
gucccaccuuggcugca

SEQ ID NO: 3025930 - RNA, 18 nt, Human
gucccaccuuggcugcag

SEQ ID NO: 3025931 - RNA, 22 nt, Human
guagcucuaggagggcuggcaa

SEQ ID NO: 3025932 - RNA, 16 nt, Human
guccugcugcaguugc

SEQ ID NO: 3025933 - RNA, 13 nt, Human
guccugcugcagu

SEQ ID NO: 3025934 - RNA, 20 nt, Human
gucuaccugaggggccucuu

SEQ ID NO: 3025935 - RNA, 23 nt, Human
gucgcccagucuggaaugcagug

SEQ ID NO: 3025936 - RNA, 14 nt, Human
gucgaggacaggga

SEQ ID NO: 3025937 - RNA, 13 nt, Human
gucgcccagucug

SEQ ID NO: 3025938 - RNA, 14 nt, Human
gucgcccagucugg

SEQ ID NO: 3025939 - RNA, 23 nt, Human
aaccaucauugaaaucuuuuugc

SEQ ID NO: 3025940 - RNA, 13 nt, Human
aaccacaucuugc

SEQ ID NO: 3025941 - RNA, 19 nt, Human
gucucaaaaaaagaaaaag

SEQ ID NO: 3025942 - RNA, 22 nt, Human
gucucaaacucuugaccucagg

SEQ ID NO: 3025943 - RNA, 14 nt, Human
gucuaugggacuca

SEQ ID NO: 3025944 - RNA, 23 nt, Human
guguguggucaacauuucucaug

SEQ ID NO: 3025945 - RNA, 19 nt, Human
gugugguguuuccuggcac

SEQ ID NO: 3025946 - RNA, 21 nt, Human
gugucuugcaauggcagccuu

SEQ ID NO: 3025947 - RNA, 13 nt, Human
gugugagucacca

SEQ ID NO: 3025948 - RNA, 18 nt, Human
gugugagucaccaagccc

SEQ ID NO: 3025949 - RNA, 15 nt, Human
gugugguguuuccug

SEQ ID NO: 3025950 - RNA, 19 nt, Human
gugucuugcaauggcagcc

SEQ ID NO: 3025951 - RNA, 20 nt, Human
gugucccaaaaagaaaggag

SEQ ID NO: 3025952 - RNA, 22 nt, Human
aagauauuuugcuuugugauuu

SEQ ID NO: 3025953 - RNA, 17 nt, Human
aagauauuuugcuuugu

SEQ ID NO: 3025954 - RNA, 20 nt, Human
aagauauuuugcuuugugau

SEQ ID NO: 3025955 - RNA, 14 nt, Human
aagaguaggaagac

SEQ ID NO: 3025956 - RNA, 19 nt, Human
gugguguuuccuggcacug

SEQ ID NO: 3025957 - RNA, 18 nt, Human
gugguuauggagagggug

SEQ ID NO: 3025958 - RNA, 15 nt, Human
aagauauuuugcuuu

SEQ ID NO: 3025959 - RNA, 19 nt, Human
aagaguaggaagacuuugg

SEQ ID NO: 3025960 - RNA, 18 nt, Human
aagaguaggaagacuuug

SEQ ID NO: 3025961 - RNA, 16 nt, Human
aagaguaggaagacuu

SEQ ID NO: 3025962 - RNA, 20 nt, Human
guggugguuuucuguucuuu

SEQ ID NO: 3025963 - RNA, 16 nt, Human
gugguguuuccuggca

SEQ ID NO: 3025964 - RNA, 15 nt, Human
gugguguuuccuggc

SEQ ID NO: 3025965 - RNA, 12 nt, Human
gugggagcugag

SEQ ID NO: 3025966 - RNA, 18 nt, Human
gugggauccuccaggugc

SEQ ID NO: 3025967 - RNA, 15 nt, Human
gugggauccuccagg

SEQ ID NO: 3025968 - RNA, 14 nt, Human
guggccucccaacu

SEQ ID NO: 3025969 - RNA, 13 nt, Human
guggccucccaac

SEQ ID NO: 3025970 - RNA, 15 nt, Human
guggccucccaacuc

SEQ ID NO: 3025971 - RNA, 16 nt, Human
aagagcccaggccucc

SEQ ID NO: 3025972 - RNA, 14 nt, Human
aagagcccaggccu

SEQ ID NO: 3025973 - RNA, 12 nt, Human
aagagcccaggc

SEQ ID NO: 3025974 - RNA, 19 nt, Human
aagagauugugguuucauu

SEQ ID NO: 3025975 - RNA, 16 nt, Human
aagagauugugguuuc

SEQ ID NO: 3025976 - RNA, 17 nt, Human
aagacucauucuucugu

SEQ ID NO: 3025977 - RNA, 22 nt, Human
aagacgcugugcugcccugccc

SEQ ID NO: 3025978 - RNA, 21 nt, Human
aagacgcugugcugcccugcc

SEQ ID NO: 3025979 - RNA, 20 nt, Human
aagacgcugugcugcccugc

SEQ ID NO: 3025980 - RNA, 23 nt, Human
aagacgcugugcugcccugccca

SEQ ID NO: 3025981 - RNA, 18 nt, Human
gugcacgcacacugucug

SEQ ID NO: 3025982 - RNA, 23 nt, Human
gugcacaagcuccaagcucccag

SEQ ID NO: 3025983 - RNA, 17 nt, Human
gugcacacaccagagcc

SEQ ID NO: 3025984 - RNA, 18 nt, Human
gugcacguacacacacau

SEQ ID NO: 3025985 - RNA, 12 nt, Human
gugcacacacca

SEQ ID NO: 3025986 - RNA, 14 nt, Human
gugcacacaccaga

SEQ ID NO: 3025987 - RNA, 14 nt, Human
gugccaagcagagg

SEQ ID NO: 3025988 - RNA, 15 nt, Human
gugcauuuggugguu

SEQ ID NO: 3025989 - RNA, 20 nt, Human
gugcauuugaggucuguucu

SEQ ID NO: 3025990 - RNA, 21 nt, Human
gugcauuugaggucuguucuu

SEQ ID NO: 3025991 - RNA, 22 nt, Human
gugcauuugaggucuguucuuu

SEQ ID NO: 3025992 - RNA, 14 nt, Human
gugccucugggacu

SEQ ID NO: 3025993 - RNA, 15 nt, Human
gugccucugggacug

SEQ ID NO: 3025994 - RNA, 14 nt, Human
aacuuggcgcugcc

SEQ ID NO: 3025995 - RNA, 22 nt, Human
aacuugucuuuggacccugagg

SEQ ID NO: 3025996 - RNA, 23 nt, Human
aacuugguucccauuugcuccuu

SEQ ID NO: 3025997 - RNA, 22 nt, Human
aagaaaaaggaugcacagaguu

SEQ ID NO: 3025998 - RNA, 19 nt, Human
aagaaaaaggaugcacaga

SEQ ID NO: 3025999 - RNA, 20 nt, Human
aagaaaaaggaugcacagag

SEQ ID NO: 3026000 - RNA, 15 nt, Human
aagaagcucucuccu

SEQ ID NO: 3026001 - RNA, 14 nt, Human
aagaagcucucucc

SEQ ID NO: 3026002 - RNA, 17 nt, Human
aagaagcccaggaaagg

SEQ ID NO: 3026003 - RNA, 16 nt, Human
aagaagcccaggaaag

SEQ ID NO: 3026004 - RNA, 14 nt, Human
guggacacagcucu

SEQ ID NO: 3026005 - RNA, 15 nt, Human
guggacacagcucuu

SEQ ID NO: 3026006 - RNA, 24 nt, Human
guggacacagcucuucuccaggcu

SEQ ID NO: 3026007 - RNA, 18 nt, Human
gugcugcccugcccaccu

SEQ ID NO: 3026008 - RNA, 20 nt, Human
gugcugcccugcccaccugg

SEQ ID NO: 3026009 - RNA, 19 nt, Human
gugcugcccugcccaccug

SEQ ID NO: 3026010 - RNA, 21 nt, Human
gugcugcccugcccaccuggc

SEQ ID NO: 3026011 - RNA, 21 nt, Human
guggauuuaacagaaauguac

SEQ ID NO: 3026012 - RNA, 20 nt, Human
guggauuuaacagaaaugua

SEQ ID NO: 3026013 - RNA, 23 nt, Human
guggauuuaacagaaauguacag

SEQ ID NO: 3026014 - RNA, 14 nt, Human
guggcaccagcagc

SEQ ID NO: 3026015 - RNA, 13 nt, Human
guggcaccagcag

SEQ ID NO: 3026016 - RNA, 14 nt, Human
guggcagcugcggu

SEQ ID NO: 3026017 - RNA, 22 nt, Human
guggcagcucaccucucccuug

SEQ ID NO: 3026018 - RNA, 17 nt, Human
guggcagcugcggucca

SEQ ID NO: 3026019 - RNA, 12 nt, Human
guuuggccagaa

SEQ ID NO: 3026020 - RNA, 18 nt, Human
guuuggccagaagucaag

SEQ ID NO: 3026021 - RNA, 23 nt, Human
guuuggccagaagucaaggcuua

SEQ ID NO: 3026022 - RNA, 11 nt, Human
guuuggccaga

SEQ ID NO: 3026023 - RNA, 14 nt, Human
guuuuaagaggcag

SEQ ID NO: 3026024 - RNA, 16 nt, Human
guuuuaagaggcaggg

SEQ ID NO: 3026025 - RNA, 15 nt, Human
guuuuacugcagcuu

SEQ ID NO: 3026026 - RNA, 18 nt, Human
guuuuacugcagcuuugu

SEQ ID NO: 3026027 - RNA, 16 nt, Human
guuuuacugcagcuuu

SEQ ID NO: 3026028 - RNA, 22 nt, Human
guuucugccgcagcccugcaga

SEQ ID NO: 3026029 - RNA, 18 nt, Human
guuucugccgcagcccug

SEQ ID NO: 3026030 - RNA, 17 nt, Human
guuugccucugccucug

SEQ ID NO: 3026031 - RNA, 13 nt, Human
guuugcuaaguga

SEQ ID NO: 3026032 - RNA, 16 nt, Human
aagggcccuuuuucaa

SEQ ID NO: 3026033 - RNA, 22 nt, Human
aagggcccuuuuucaauaacug

SEQ ID NO: 3026034 - RNA, 17 nt, Human
aaggguaucaggugcug

SEQ ID NO: 3026035 - RNA, 14 nt, Human
aaggggcaguggug

SEQ ID NO: 3026036 - RNA, 19 nt, Human
aaggguaucaggugcugcc

SEQ ID NO: 3026037 - RNA, 16 nt, Human
aaggguaucuggugac

SEQ ID NO: 3026038 - RNA, 15 nt, Human
aagggcccagagagg

SEQ ID NO: 3026039 - RNA, 13 nt, Human
aagggcccagaga

SEQ ID NO: 3026040 - RNA, 21 nt, Human
guuucuagcaugaagacagag

SEQ ID NO: 3026041 - RNA, 13 nt, Human
aagucaaggcuua

SEQ ID NO: 3026042 - RNA, 22 nt, Human
aagucaaggcuuagacccucau

SEQ ID NO: 3026043 - RNA, 21 nt, Human
aagucaagugaaaaaggagga

SEQ ID NO: 3026044 - RNA, 24 nt, Human
aagucacacaguauuacuucugcu

SEQ ID NO: 3026045 - RNA, 18 nt, Human
aaguauucuuauuuaaug

SEQ ID NO: 3026046 - RNA, 13 nt, Human
aagucacacagug

SEQ ID NO: 3026047 - RNA, 21 nt, Human
aaguacuucuccacccugcuc

SEQ ID NO: 3026048 - RNA, 15 nt, Human
aaguacuggagaaaa

SEQ ID NO: 3026049 - RNA, 16 nt, Human
aaguacuauguaucaa

SEQ ID NO: 3026050 - RNA, 15 nt, Human
aaguacuauguauca

SEQ ID NO: 3026051 - RNA, 20 nt, Human
aaguacuucuccacccugcu

SEQ ID NO: 3026052 - RNA, 22 nt, Human
aaguacuucuccacccugcucu

SEQ ID NO: 3026053 - RNA, 23 nt, Human
aaguacuucuccacccugcucuc

SEQ ID NO: 3026054 - RNA, 23 nt, Human
guuuuuuaagggcccuuuuucaa

SEQ ID NO: 3026055 - RNA, 16 nt, Human
guuuuugucuuaaaaa

SEQ ID NO: 3026056 - RNA, 18 nt, Human
guuuuucuaggccugggg

SEQ ID NO: 3026057 - RNA, 18 nt, Human
aagucuuagauguauaua

SEQ ID NO: 3026058 - RNA, 19 nt, Human
aagucuuagauguauauau

SEQ ID NO: 3026059 - RNA, 17 nt, Human
aagucuuagauguauau

SEQ ID NO: 3026060 - RNA, 23 nt, Human
guugcuaacagcaacacaaagcu

SEQ ID NO: 3026061 - RNA, 14 nt, Human
guugcuaacagcaa

SEQ ID NO: 3026062 - RNA, 16 nt, Human
guugcccaggcuggcg

SEQ ID NO: 3026063 - RNA, 15 nt, Human
guugcccaggcuggc

SEQ ID NO: 3026064 - RNA, 23 nt, Human
guuggcugggggccucagugcca

SEQ ID NO: 3026065 - RNA, 15 nt, Human
guugggcugguguca

SEQ ID NO: 3026066 - RNA, 17 nt, Human
guugggcuggugucacc

SEQ ID NO: 3026067 - RNA, 13 nt, Human
aaggcuaccuuug

SEQ ID NO: 3026068 - RNA, 14 nt, Human
guugcccaggcugg

SEQ ID NO: 3026069 - RNA, 15 nt, Human
aaggcuaccuuugua

SEQ ID NO: 3026070 - RNA, 19 nt, Human
aaggccccgcccaggcuua

SEQ ID NO: 3026071 - RNA, 16 nt, Human
aaggccccgcccaggc

SEQ ID NO: 3026072 - RNA, 14 nt, Human
aaggccccgcccag

SEQ ID NO: 3026073 - RNA, 24 nt, Human
aaggaugcacagaguuguuacauu

SEQ ID NO: 3026074 - RNA, 22 nt, Human
aaggaugcacagaguuguuaca

SEQ ID NO: 3026075 - RNA, 14 nt, Human
aaggaugcccaaag

SEQ ID NO: 3026076 - RNA, 15 nt, Human
aaggaaacccagcuc

SEQ ID NO: 3026077 - RNA, 18 nt, Human
aaggagauuuacaacugg

SEQ ID NO: 3026078 - RNA, 17 nt, Human
aaggagauuuacaacug

SEQ ID NO: 3026079 - RNA, 12 nt, Human
aaggauccugag

SEQ ID NO: 3026080 - RNA, 11 nt, Human
aaggauccuga

SEQ ID NO: 3026081 - RNA, 22 nt, Human
aaggauccugagccagauuuca

SEQ ID NO: 3026082 - RNA, 20 nt, Human
aaggauccugagccagauuu

SEQ ID NO: 3026083 - RNA, 20 nt, Human
aaggaggaagagaaaaaaua

SEQ ID NO: 3026084 - RNA, 18 nt, Human
guucuccagucauuaugu

SEQ ID NO: 3026085 - RNA, 20 nt, Human
guucuccagucauuauguua

SEQ ID NO: 3026086 - RNA, 14 nt, Human
guucucugaggaca

SEQ ID NO: 3026087 - RNA, 16 nt, Human
guucucugaggacacu

SEQ ID NO: 3026088 - RNA, 11 nt, Human
guucucugccc

SEQ ID NO: 3026089 - RNA, 12 nt, Human
guucucugcccu

SEQ ID NO: 3026090 - RNA, 22 nt, Human
guugauagcacagacccugccc

SEQ ID NO: 3026091 - RNA, 23 nt, Human
guugauagcacagacccugcccu

SEQ ID NO: 3026092 - RNA, 13 nt, Human
guguuuauuguca

SEQ ID NO: 3026093 - RNA, 11 nt, Human
aagcucccagg

SEQ ID NO: 3026094 - RNA, 21 nt, Human
aagcucuacugaggugcuaug

SEQ ID NO: 3026095 - RNA, 23 nt, Human
aagcucccaggcauuccccagga

SEQ ID NO: 3026096 - RNA, 22 nt, Human
aagcucccaggcauuccccagg

SEQ ID NO: 3026097 - RNA, 12 nt, Human
aagcucccaggc

SEQ ID NO: 3026098 - RNA, 13 nt, Human
aagcucugcuccu

SEQ ID NO: 3026099 - RNA, 18 nt, Human
aagcuguuacugucuuca

SEQ ID NO: 3026100 - RNA, 20 nt, Human
uaaacucugagugcaaacuu

SEQ ID NO: 3026101 - RNA, 12 nt, Human
uaaacucauuuc

SEQ ID NO: 3026102 - RNA, 17 nt, Human
uaaacucauuucuagca

SEQ ID NO: 3026103 - RNA, 22 nt, Human
uaaacuacauuagguugugaau

SEQ ID NO: 3026104 - RNA, 18 nt, Human
uaaaccgccaaggcuggg

SEQ ID NO: 3026105 - RNA, 16 nt, Human
uaaaccgccaaggcug

SEQ ID NO: 3026106 - RNA, 19 nt, Human
uaaaggcuaccuuuguauu

SEQ ID NO: 3026107 - RNA, 21 nt, Human
uaaaggcuaccuuuguauucu

SEQ ID NO: 3026108 - RNA, 13 nt, Human
aaguuuugagaaa

SEQ ID NO: 3026109 - RNA, 12 nt, Human
aaguuaaauaaa

SEQ ID NO: 3026110 - RNA, 14 nt, Human
aaguuaaauaaauc

SEQ ID NO: 3026111 - RNA, 16 nt, Human
uaaaugacucuucccu

SEQ ID NO: 3026112 - RNA, 20 nt, Human
uaaaucuccaaaauaaaacu

SEQ ID NO: 3026113 - RNA, 21 nt, Human
uaaaucuccaaaauaaaacuu

SEQ ID NO: 3026114 - RNA, 22 nt, Human
uaaauuaacuuuuauaaacuuu

SEQ ID NO: 3026115 - RNA, 13 nt, Human
uaacaagccaccc

SEQ ID NO: 3026116 - RNA, 19 nt, Human
uaaaucuccaaaauaaaac

SEQ ID NO: 3026117 - RNA, 16 nt, Human
aauacaccacuacauu

SEQ ID NO: 3026118 - RNA, 18 nt, Human
aauacaccacuacauucu

SEQ ID NO: 3026119 - RNA, 20 nt, Human
aauacaccacuacauucugu

SEQ ID NO: 3026120 - RNA, 15 nt, Human
aauacaccacuacau

SEQ ID NO: 3026121 - RNA, 15 nt, Human
aauaacuaaaaggua

SEQ ID NO: 3026122 - RNA, 12 nt, Human
aauaaauuauuu

SEQ ID NO: 3026123 - RNA, 12 nt, Human
aauaacauguaa

SEQ ID NO: 3026124 - RNA, 19 nt, Human
aauaacauguaauuaagua

SEQ ID NO: 3026125 - RNA, 13 nt, Human
uaaagucaggggu

SEQ ID NO: 3026126 - RNA, 14 nt, Human
uaaaguguauuuuu

SEQ ID NO: 3026127 - RNA, 15 nt, Human
uaaaguguauuuuuu

SEQ ID NO: 3026128 - RNA, 19 nt, Human
uaaaguguauuuuuuuacu

SEQ ID NO: 3026129 - RNA, 14 nt, Human
aauaaaguaauuau

SEQ ID NO: 3026130 - RNA, 14 nt, Human
augcugccaauauc

SEQ ID NO: 3026131 - RNA, 17 nt, Human
augcugccaauauccua

SEQ ID NO: 3026132 - RNA, 18 nt, Human
augcugccaauauccuaa

SEQ ID NO: 3026133 - RNA, 19 nt, Human
augcugccaauauccuaau

SEQ ID NO: 3026134 - RNA, 13 nt, Human
augcugccaauau

SEQ ID NO: 3026135 - RNA, 20 nt, Human
augcugccaauauccuaaua

SEQ ID NO: 3026136 - RNA, 21 nt, Human
augcugccaauauccuaauaa

SEQ ID NO: 3026137 - RNA, 22 nt, Human
augcugccaauauccuaauaaa

SEQ ID NO: 3026138 - RNA, 23 nt, Human
augcugccaauauccuaauaaaa

SEQ ID NO: 3026139 - RNA, 11 nt, Human
augcugcccug

SEQ ID NO: 3026140 - RNA, 16 nt, Human
augcucuuuacuucau

SEQ ID NO: 3026141 - RNA, 23 nt, Human
augcuugcugcugauuuaaacac

SEQ ID NO: 3026142 - RNA, 12 nt, Human
augcuuguacau

SEQ ID NO: 3026143 - RNA, 13 nt, Human
augcuuguacaua

SEQ ID NO: 3026144 - RNA, 14 nt, Human
augcuuguacauaa

SEQ ID NO: 3026145 - RNA, 15 nt, Human
auggauuuccagcca

SEQ ID NO: 3026146 - RNA, 15 nt, Human
augcacaaacagagg

SEQ ID NO: 3026147 - RNA, 24 nt, Human
augauguuuuccaugaguccccug

SEQ ID NO: 3026148 - RNA, 17 nt, Human
augaugccaugaggaac

SEQ ID NO: 3026149 - RNA, 16 nt, Human
augaugccaugaggaa

SEQ ID NO: 3026150 - RNA, 19 nt, Human
augccucucucaggccaaa

SEQ ID NO: 3026151 - RNA, 16 nt, Human
augcaugaaguaauau

SEQ ID NO: 3026152 - RNA, 17 nt, Human
augccucucucaggcca

SEQ ID NO: 3026153 - RNA, 23 nt, Human
augcacacauuuuuuaaaugcac

SEQ ID NO: 3026154 - RNA, 16 nt, Human
augcacagaguuguua

SEQ ID NO: 3026155 - RNA, 17 nt, Human
augcacaaacagaggcc

SEQ ID NO: 3026156 - RNA, 16 nt, Human
augcacaaacagaggc

SEQ ID NO: 3026157 - RNA, 17 nt, Human
augcacagaguuguuac

SEQ ID NO: 3026158 - RNA, 18 nt, Human
augcacagaguuguuaca

SEQ ID NO: 3026159 - RNA, 20 nt, Human
auguucuccagucauuaugu

SEQ ID NO: 3026160 - RNA, 11 nt, Human
auguucuggga

SEQ ID NO: 3026161 - RNA, 12 nt, Human
auguucugggac

SEQ ID NO: 3026162 - RNA, 12 nt, Human
auguuuucaaau

SEQ ID NO: 3026163 - RNA, 15 nt, Human
auguuuucaaauguu

SEQ ID NO: 3026164 - RNA, 17 nt, Human
auguuuuauauagcaag

SEQ ID NO: 3026165 - RNA, 18 nt, Human
auguuuucaaauguucuc

SEQ ID NO: 3026166 - RNA, 19 nt, Human
auguuugccucugccucug

SEQ ID NO: 3026167 - RNA, 22 nt, Human
auguuugccucugccucugaca

SEQ ID NO: 3026168 - RNA, 18 nt, Human
auguuugccucugccucu

SEQ ID NO: 3026169 - RNA, 13 nt, Human
auguucugggaca

SEQ ID NO: 3026170 - RNA, 14 nt, Human
augucuuuucuugc

SEQ ID NO: 3026171 - RNA, 22 nt, Human
augugaaacuggauuaaacuua

SEQ ID NO: 3026172 - RNA, 19 nt, Human
auggucaccaaaucagcug

SEQ ID NO: 3026173 - RNA, 22 nt, Human
augguaguuuuacaguguuucu

SEQ ID NO: 3026174 - RNA, 15 nt, Human
auguaauuaaguacu

SEQ ID NO: 3026175 - RNA, 17 nt, Human
auguaauuaaguacuau

SEQ ID NO: 3026176 - RNA, 23 nt, Human
aucagcacgauuucuguuuagau

SEQ ID NO: 3026177 - RNA, 19 nt, Human
aucagcacgauuucuguuu

SEQ ID NO: 3026178 - RNA, 20 nt, Human
aucagcacgauuucuguuua

SEQ ID NO: 3026179 - RNA, 14 nt, Human
aucaccgaaaacgu

SEQ ID NO: 3026180 - RNA, 21 nt, Human
aucaccgaaaacguggcugcu

SEQ ID NO: 3026181 - RNA, 19 nt, Human
aucaccgaaaacguggcug

SEQ ID NO: 3026182 - RNA, 18 nt, Human
aucagccugcuccagcug

SEQ ID NO: 3026183 - RNA, 17 nt, Human
aucagccugcuccagcu

SEQ ID NO: 3026184 - RNA, 19 nt, Human
aucagccugcuccagcugu

SEQ ID NO: 3026185 - RNA, 21 nt, Human
aucacagccucugaaaaccaa

SEQ ID NO: 3026186 - RNA, 18 nt, Human
aucaccaacgucugugcc

SEQ ID NO: 3026187 - RNA, 23 nt, Human
aucacccgcuaagagggagggag

SEQ ID NO: 3026188 - RNA, 19 nt, Human
aucaccaacgucugugcca

SEQ ID NO: 3026189 - RNA, 20 nt, Human
auccucccaccucagccucc

SEQ ID NO: 3026190 - RNA, 18 nt, Human
auccucccaccucagccu

SEQ ID NO: 3026191 - RNA, 19 nt, Human
auccucccaccucagccuc

SEQ ID NO: 3026192 - RNA, 15 nt, Human
aucccauuuaaaaaa

SEQ ID NO: 3026193 - RNA, 14 nt, Human
aucccauuuaaaaa

SEQ ID NO: 3026194 - RNA, 15 nt, Human
auccagacccggcug

SEQ ID NO: 3026195 - RNA, 15 nt, Human
auccccuguagagug

SEQ ID NO: 3026196 - RNA, 15 nt, Human
auccucccaccucag

SEQ ID NO: 3026197 - RNA, 23 nt, Human
auccuccaggugcacaagcucca

SEQ ID NO: 3026198 - RNA, 23 nt, Human
auccucauacccacccccaccca

SEQ ID NO: 3026199 - RNA, 11 nt, Human
auccuccaggu

SEQ ID NO: 3026200 - RNA, 23 nt, Human
augaccuuucaauaggaaaaacu

SEQ ID NO: 3026201 - RNA, 22 nt, Human
augaccuuucaauaggaaaaac

SEQ ID NO: 3026202 - RNA, 18 nt, Human
augaccuuucaauaggaa

SEQ ID NO: 3026203 - RNA, 21 nt, Human
augaccuuucaauaggaaaaa

SEQ ID NO: 3026204 - RNA, 13 nt, Human
augaaagacugua

SEQ ID NO: 3026205 - RNA, 16 nt, Human
augaaagacuguacaa

SEQ ID NO: 3026206 - RNA, 17 nt, Human
augaaagacuguacaaa

SEQ ID NO: 3026207 - RNA, 14 nt, Human
aucuucuuuauaau

SEQ ID NO: 3026208 - RNA, 18 nt, Human
aucuugaagacuuuucuu

SEQ ID NO: 3026209 - RNA, 22 nt, Human
aucuucugaacuuggcgcugcc

SEQ ID NO: 3026210 - RNA, 22 nt, Human
aucugcuuuuuaaagaaugcuc

SEQ ID NO: 3026211 - RNA, 21 nt, Human
aucucccccagccccauccuc

SEQ ID NO: 3026212 - RNA, 20 nt, Human
auaacaaaggauacuuauuu

SEQ ID NO: 3026213 - RNA, 21 nt, Human
auaacaaaggauacuuauuua

SEQ ID NO: 3026214 - RNA, 17 nt, Human
auaaaacuuuuuaaaau

SEQ ID NO: 3026215 - RNA, 21 nt, Human
auaaacuuuaccuuuuuuaua

SEQ ID NO: 3026216 - RNA, 16 nt, Human
auaaacuuuaccuuuu

SEQ ID NO: 3026217 - RNA, 24 nt, Human
auaaacuuuaccuuuuuuauacau

SEQ ID NO: 3026218 - RNA, 15 nt, Human
auaaaacuuuuuaaa

SEQ ID NO: 3026219 - RNA, 11 nt, Human
auaaaacuuuu

SEQ ID NO: 3026220 - RNA, 13 nt, Human
auaaagcagcguu

SEQ ID NO: 3026221 - RNA, 14 nt, Human
auaaagcagcguuu

SEQ ID NO: 3026222 - RNA, 18 nt, Human
auaaagcagcguuucuau

SEQ ID NO: 3026223 - RNA, 19 nt, Human
auaaagcagcguuucuaug

SEQ ID NO: 3026224 - RNA, 20 nt, Human
auaaagcagcguuucuauga

SEQ ID NO: 3026225 - RNA, 15 nt, Human
auaaugucccuucac

SEQ ID NO: 3026226 - RNA, 15 nt, Human
auaauguaagcucua

SEQ ID NO: 3026227 - RNA, 21 nt, Human
auacaccacuacauucuguua

SEQ ID NO: 3026228 - RNA, 19 nt, Human
auacaccacuacauucugu

SEQ ID NO: 3026229 - RNA, 20 nt, Human
auacaccacuacauucuguu

SEQ ID NO: 3026230 - RNA, 18 nt, Human
auacaccacuacauucug

SEQ ID NO: 3026231 - RNA, 14 nt, Human
auaauguaagcucu

SEQ ID NO: 3026232 - RNA, 21 nt, Human
auaaugcgugcauaccacuuu

SEQ ID NO: 3026233 - RNA, 20 nt, Human
auaaugcgugcauaccacuu

SEQ ID NO: 3026234 - RNA, 17 nt, Human
auaccugucccccugac

SEQ ID NO: 3026235 - RNA, 18 nt, Human
auaccugucccccugaca

SEQ ID NO: 3026236 - RNA, 11 nt, Human
auacccacccc

SEQ ID NO: 3026237 - RNA, 12 nt, Human
auacccaccccc

SEQ ID NO: 3026238 - RNA, 15 nt, Human
auagcaguaaaaaau

SEQ ID NO: 3026239 - RNA, 21 nt, Human
auagcaguaaaaaaugguguu

SEQ ID NO: 3026240 - RNA, 21 nt, Human
auagccaaggccaaaggaagc

SEQ ID NO: 3026241 - RNA, 15 nt, Human
auagccaaggccaaa

SEQ ID NO: 3026242 - RNA, 17 nt, Human
auaguaugguggcuggg

SEQ ID NO: 3026243 - RNA, 18 nt, Human
auaguaugguggcugggu

SEQ ID NO: 3026244 - RNA, 16 nt, Human
auauccuaauaaaaag

SEQ ID NO: 3026245 - RNA, 18 nt, Human
auauccuaauaaaaaggu

SEQ ID NO: 3026246 - RNA, 22 nt, Human
auaucccuuggacauuuuaugu

SEQ ID NO: 3026247 - RNA, 23 nt, Human
auaucccuuggacauuuuauguc

SEQ ID NO: 3026248 - RNA, 12 nt, Human
auauccuaauaa

SEQ ID NO: 3026249 - RNA, 13 nt, Human
auauccuaauaaa

SEQ ID NO: 3026250 - RNA, 14 nt, Human
auauccuaauaaaa

SEQ ID NO: 3026251 - RNA, 20 nt, Human
auaucccuuggacauuuuau

SEQ ID NO: 3026252 - RNA, 19 nt, Human
auaucccuuggacauuuua

SEQ ID NO: 3026253 - RNA, 19 nt, Human
auauuaccacagacauacu

SEQ ID NO: 3026254 - RNA, 22 nt, Human
auauuaccacagacauacuaac

SEQ ID NO: 3026255 - RNA, 21 nt, Human
auaugcuuauacacuuacacu

SEQ ID NO: 3026256 - RNA, 19 nt, Human
auauuuacuucuuauacau

SEQ ID NO: 3026257 - RNA, 23 nt, Human
aguggcuuaaaacaacacucaca

SEQ ID NO: 3026258 - RNA, 15 nt, Human
agugggagcugccug

SEQ ID NO: 3026259 - RNA, 14 nt, Human
agugggagcugccu

SEQ ID NO: 3026260 - RNA, 17 nt, Human
aguguauuuuuuuacua

SEQ ID NO: 3026261 - RNA, 18 nt, Human
aguguauuuuuuuacuaa

SEQ ID NO: 3026262 - RNA, 14 nt, Human
aguugaagacagag

SEQ ID NO: 3026263 - RNA, 20 nt, Human
aguuguuugauucagacagc

SEQ ID NO: 3026264 - RNA, 12 nt, Human
aguuaaauaaau

SEQ ID NO: 3026265 - RNA, 18 nt, Human
aguuacacuaaaagguga

SEQ ID NO: 3026266 - RNA, 16 nt, Human
aguuacagacaaagcg

SEQ ID NO: 3026267 - RNA, 14 nt, Human
aguuacagacaaag

SEQ ID NO: 3026268 - RNA, 20 nt, Human
aguucagguaacaggcagau

SEQ ID NO: 3026269 - RNA, 18 nt, Human
aguucagguaacaggcag

SEQ ID NO: 3026270 - RNA, 19 nt, Human
aguucagguaacaggcaga

SEQ ID NO: 3026271 - RNA, 22 nt, Human
aguucaucuugaauuguaagga

SEQ ID NO: 3026272 - RNA, 14 nt, Human
agugaagacaauga

SEQ ID NO: 3026273 - RNA, 16 nt, Human
agugaagacaaugacu

SEQ ID NO: 3026274 - RNA, 16 nt, Human
agucugauucccaagc

SEQ ID NO: 3026275 - RNA, 18 nt, Human
agucugauucccaagcuc

SEQ ID NO: 3026276 - RNA, 17 nt, Human
agucuggaaugcagugg

SEQ ID NO: 3026277 - RNA, 20 nt, Human
agugaacuugggccacugug

SEQ ID NO: 3026278 - RNA, 22 nt, Human
aguccuggcaugggaaugaaug

SEQ ID NO: 3026279 - RNA, 21 nt, Human
aguccuggcaugggaaugaau

SEQ ID NO: 3026280 - RNA, 20 nt, Human
aguccuggcaugggaaugaa

SEQ ID NO: 3026281 - RNA, 15 nt, Human
agucugaaggcuggg

SEQ ID NO: 3026282 - RNA, 13 nt, Human
agucugaaggcug

SEQ ID NO: 3026283 - RNA, 16 nt, Human
agucugaaggcugggu

SEQ ID NO: 3026284 - RNA, 12 nt, Human
agucugaaggcu

SEQ ID NO: 3026285 - RNA, 15 nt, Human
aguaugaggcauuug

SEQ ID NO: 3026286 - RNA, 16 nt, Human
aguaugaggcauuugu

SEQ ID NO: 3026287 - RNA, 15 nt, Human
aguaucucagggccu

SEQ ID NO: 3026288 - RNA, 15 nt, Human
aguaucuugaagacu

SEQ ID NO: 3026289 - RNA, 12 nt, Human
aguaucuugaag

SEQ ID NO: 3026290 - RNA, 11 nt, Human
aguaucuugaa

SEQ ID NO: 3026291 - RNA, 22 nt, Human
aggucuguuuuguguacuuuua

SEQ ID NO: 3026292 - RNA, 22 nt, Human
aggucuguucuuuccaaaguac

SEQ ID NO: 3026293 - RNA, 23 nt, Human
aggucuguucuuuccaaaguaca

SEQ ID NO: 3026294 - RNA, 18 nt, Human
aggucuguucuuuccaaa

SEQ ID NO: 3026295 - RNA, 23 nt, Human
aggugcuaggaacacuccuucac

SEQ ID NO: 3026296 - RNA, 22 nt, Human
aggugcuaggaacacuccuuca

SEQ ID NO: 3026297 - RNA, 19 nt, Human
aggugcuaggaacacuccu

SEQ ID NO: 3026298 - RNA, 23 nt, Human
agguucccuuugacgccauccca

SEQ ID NO: 3026299 - RNA, 14 nt, Human
agguucaaagauau

SEQ ID NO: 3026300 - RNA, 13 nt, Human
agguucccuuuga

SEQ ID NO: 3026301 - RNA, 22 nt, Human
agguucccuuugacgccauccc

SEQ ID NO: 3026302 - RNA, 11 nt, Human
agggucccugg

SEQ ID NO: 3026303 - RNA, 19 nt, Human
aggguaucaggugcugcca

SEQ ID NO: 3026304 - RNA, 18 nt, Human
aggguaucaggugcugcc

SEQ ID NO: 3026305 - RNA, 21 nt, Human
aggguaucaggugcugccauc

SEQ ID NO: 3026306 - RNA, 15 nt, Human
aggguaucuggugac

SEQ ID NO: 3026307 - RNA, 21 nt, Human
aggggccucuuaugggcuggg

SEQ ID NO: 3026308 - RNA, 20 nt, Human
aggggccucuuaugggcugg

SEQ ID NO: 3026309 - RNA, 19 nt, Human
aggggccucuuaugggcug

SEQ ID NO: 3026310 - RNA, 23 nt, Human
agggacagaggggguggccuccc

SEQ ID NO: 3026311 - RNA, 21 nt, Human
aggcugucaauuacaggaagu

SEQ ID NO: 3026312 - RNA, 22 nt, Human
agggacagaggggguggccucc

SEQ ID NO: 3026313 - RNA, 13 nt, Human
aggcuguauccca

SEQ ID NO: 3026314 - RNA, 18 nt, Human
aggcuguaucccaugagc

SEQ ID NO: 3026315 - RNA, 19 nt, Human
aggcugucaauuacaggaa

SEQ ID NO: 3026316 - RNA, 20 nt, Human
aggcugucaauuacaggaag

SEQ ID NO: 3026317 - RNA, 23 nt, Human
aggcccuucucuccagccccugg

SEQ ID NO: 3026318 - RNA, 22 nt, Human
aggcccuucucuccagccccug

SEQ ID NO: 3026319 - RNA, 21 nt, Human
aggcccuucucuccagccccu

SEQ ID NO: 3026320 - RNA, 20 nt, Human
aggcccuucucuccagcccc

SEQ ID NO: 3026321 - RNA, 23 nt, Human
aggagaagucuucuauuuauuua

SEQ ID NO: 3026322 - RNA, 22 nt, Human
aggagaagucuucuauuuauuu

SEQ ID NO: 3026323 - RNA, 13 nt, Human
aggaccucaggug

SEQ ID NO: 3026324 - RNA, 21 nt, Human
aggaugcuuguacauaaugcg

SEQ ID NO: 3026325 - RNA, 23 nt, Human
aggaugcuuguacauaaugcgug

SEQ ID NO: 3026326 - RNA, 14 nt, Human
aggauuauuggaaa

SEQ ID NO: 3026327 - RNA, 15 nt, Human
aggauguucugggac

SEQ ID NO: 3026328 - RNA, 16 nt, Human
aggauguucugggaca

SEQ ID NO: 3026329 - RNA, 22 nt, Human
aggauguucuagcauggcugcc

SEQ ID NO: 3026330 - RNA, 12 nt, Human
agcuuuugcaua

SEQ ID NO: 3026331 - RNA, 20 nt, Human
aggaauccagacccggcugc

SEQ ID NO: 3026332 - RNA, 17 nt, Human
aggaauccagacccggc

SEQ ID NO: 3026333 - RNA, 21 nt, Human
aggaaucaugugccaagcaga

SEQ ID NO: 3026334 - RNA, 23 nt, Human
agcugcgguccacccaggagccc

SEQ ID NO: 3026335 - RNA, 23 nt, Human
agcuccgcuuucuacccagcgag

SEQ ID NO: 3026336 - RNA, 20 nt, Human
agcuccgcuuucuacccagc

SEQ ID NO: 3026337 - RNA, 21 nt, Human
agcuccgcuuucuacccagcg

SEQ ID NO: 3026338 - RNA, 12 nt, Human
agcuccuucugu

SEQ ID NO: 3026339 - RNA, 13 nt, Human
agcuccuucuguc

SEQ ID NO: 3026340 - RNA, 21 nt, Human
agcugcgguccacccaggagc

SEQ ID NO: 3026341 - RNA, 21 nt, Human
agacgugcacgcacacugucu

SEQ ID NO: 3026342 - RNA, 22 nt, Human
agacgugcacgcacacugucug

SEQ ID NO: 3026343 - RNA, 18 nt, Human
agacggagucccaccuug

SEQ ID NO: 3026344 - RNA, 22 nt, Human
agacgcugugcugcccugccca

SEQ ID NO: 3026345 - RNA, 20 nt, Human
agacgcugugcugcccugcc

SEQ ID NO: 3026346 - RNA, 12 nt, Human
agacagcugccu

SEQ ID NO: 3026347 - RNA, 12 nt, Human
agacagcucuua

SEQ ID NO: 3026348 - RNA, 11 nt, Human
agacagcucuu

SEQ ID NO: 3026349 - RNA, 21 nt, Human
agacgcugugcugcccugccc

SEQ ID NO: 3026350 - RNA, 23 nt, Human
agacagagucucacuguugccca

SEQ ID NO: 3026351 - RNA, 21 nt, Human
agacagauacuccuccaaggu

SEQ ID NO: 3026352 - RNA, 15 nt, Human
agacagauacuccuc

SEQ ID NO: 3026353 - RNA, 15 nt, Human
agacagcccgggcuc

SEQ ID NO: 3026354 - RNA, 14 nt, Human
agacagcccgggcu

SEQ ID NO: 3026355 - RNA, 19 nt, Human
agagcccaccuuggcucaa

SEQ ID NO: 3026356 - RNA, 13 nt, Human
agagcccacgccc

SEQ ID NO: 3026357 - RNA, 16 nt, Human
agagcccacgccccca

SEQ ID NO: 3026358 - RNA, 22 nt, Human
agagaggguggugaccucugcc

SEQ ID NO: 3026359 - RNA, 20 nt, Human
agagaggguggugaccucug

SEQ ID NO: 3026360 - RNA, 21 nt, Human
agagaggguggugaccucugc

SEQ ID NO: 3026361 - RNA, 19 nt, Human
agacuggaagcacagcuuc

SEQ ID NO: 3026362 - RNA, 17 nt, Human
agacuggaagcacagcu

SEQ ID NO: 3026363 - RNA, 16 nt, Human
agacuggaagcacagc

SEQ ID NO: 3026364 - RNA, 19 nt, Human
agauauaugcucugcaugu

SEQ ID NO: 3026365 - RNA, 14 nt, Human
agaucuucuguggg

SEQ ID NO: 3026366 - RNA, 16 nt, Human
agaggaaggagaggag

SEQ ID NO: 3026367 - RNA, 21 nt, Human
agaggaaaucaccgaaaacgu

SEQ ID NO: 3026368 - RNA, 23 nt, Human
agaggacuuuucuuuguggcuuc

SEQ ID NO: 3026369 - RNA, 16 nt, Human
agaggagagaggaccc

SEQ ID NO: 3026370 - RNA, 15 nt, Human
agaggagagaggacc

SEQ ID NO: 3026371 - RNA, 19 nt, Human
agaggguggugaccucugc

SEQ ID NO: 3026372 - RNA, 20 nt, Human
agaggguggugaccucugcc

SEQ ID NO: 3026373 - RNA, 22 nt, Human
agaggguggugaccucugccug

SEQ ID NO: 3026374 - RNA, 12 nt, Human
agagggcacaga

SEQ ID NO: 3026375 - RNA, 11 nt, Human
agagugggagc

SEQ ID NO: 3026376 - RNA, 19 nt, Human
agaguggggauaugauuua

SEQ ID NO: 3026377 - RNA, 14 nt, Human
agagugugccugaa

SEQ ID NO: 3026378 - RNA, 14 nt, Human
agagcccaggccuc

SEQ ID NO: 3026379 - RNA, 13 nt, Human
agagcccaggccu

SEQ ID NO: 3026380 - RNA, 15 nt, Human
agagcccaggccucc

SEQ ID NO: 3026381 - RNA, 16 nt, Human
agcccucaauugugaa

SEQ ID NO: 3026382 - RNA, 17 nt, Human
agcccucaauugugaaa

SEQ ID NO: 3026383 - RNA, 13 nt, Human
agccccauucugc

SEQ ID NO: 3026384 - RNA, 16 nt, Human
agccccauucugccug

SEQ ID NO: 3026385 - RNA, 13 nt, Human
agccccagugccc

SEQ ID NO: 3026386 - RNA, 14 nt, Human
agccccagugccca

SEQ ID NO: 3026387 - RNA, 15 nt, Human
agccccagugcccac

SEQ ID NO: 3026388 - RNA, 20 nt, Human
agccagcaggcucucaggcc

SEQ ID NO: 3026389 - RNA, 17 nt, Human
agccagcaggcucucag

SEQ ID NO: 3026390 - RNA, 19 nt, Human
agccagcaggcucucaggc

SEQ ID NO: 3026391 - RNA, 18 nt, Human
agccagcaggcucucagg

SEQ ID NO: 3026392 - RNA, 22 nt, Human
agccucccacgacugcccggca

SEQ ID NO: 3026393 - RNA, 21 nt, Human
agccucccaaagugcugggau

SEQ ID NO: 3026394 - RNA, 20 nt, Human
agccucccaaagugcuggga

SEQ ID NO: 3026395 - RNA, 14 nt, Human
agccuccuccagcc

SEQ ID NO: 3026396 - RNA, 20 nt, Human
agccucccgaguagcuggga

SEQ ID NO: 3026397 - RNA, 18 nt, Human
agccucccgaguagcugg

SEQ ID NO: 3026398 - RNA, 19 nt, Human
agccucccgaguagcuggg

SEQ ID NO: 3026399 - RNA, 21 nt, Human
agccgccaugcuccuggccca

SEQ ID NO: 3026400 - RNA, 13 nt, Human
agccgcuggggcc

SEQ ID NO: 3026401 - RNA, 15 nt, Human
agcaugaagacagag

SEQ ID NO: 3026402 - RNA, 18 nt, Human
agcauccuggcacccggc

SEQ ID NO: 3026403 - RNA, 22 nt, Human
agcauccuggcacccggccccu

SEQ ID NO: 3026404 - RNA, 23 nt, Human
agcauccuggcacccggccccug

SEQ ID NO: 3026405 - RNA, 23 nt, Human
agcaugccuggauggggcugcac

SEQ ID NO: 3026406 - RNA, 20 nt, Human
agcaugccuggauggggcug

SEQ ID NO: 3026407 - RNA, 23 nt, Human
agccaagugugguagagugugcc

SEQ ID NO: 3026408 - RNA, 13 nt, Human
agcagcguuucua

SEQ ID NO: 3026409 - RNA, 20 nt, Human
agcagugcaugcugucccuu

SEQ ID NO: 3026410 - RNA, 19 nt, Human
agcagugcaugcugucccu

SEQ ID NO: 3026411 - RNA, 18 nt, Human
agcagugcaugcuguccc

SEQ ID NO: 3026412 - RNA, 23 nt, Human
agcacacuugacaucaacugcau

SEQ ID NO: 3026413 - RNA, 17 nt, Human
agcacagacccugcccu

SEQ ID NO: 3026414 - RNA, 20 nt, Human
agcacagacccugcccugug

SEQ ID NO: 3026415 - RNA, 19 nt, Human
agcacagacccugcccugu

SEQ ID NO: 3026416 - RNA, 18 nt, Human
agcacagacccugcccug

SEQ ID NO: 3026417 - RNA, 11 nt, Human
aagauucuaug

SEQ ID NO: 3026418 - RNA, 17 nt, Human
aagcagcguuucuauga

SEQ ID NO: 3026419 - RNA, 20 nt, Human
aagcagcguuucuaugacac

SEQ ID NO: 3026420 - RNA, 14 nt, Human
aagcagcguuucua

SEQ ID NO: 3026421 - RNA, 21 nt, Human
aagcagcguuucuaugacaca

SEQ ID NO: 3026422 - RNA, 22 nt, Human
aagcagcguuucuaugacacau

SEQ ID NO: 3026423 - RNA, 19 nt, Human
aagccagcaggcucucagg

SEQ ID NO: 3026424 - RNA, 23 nt, Human
aagccagcaggcucucaggccag

SEQ ID NO: 3026425 - RNA, 20 nt, Human
aagccagcaggcucucaggc

SEQ ID NO: 3026426 - RNA, 12 nt, Human
aagauaaaugug

SEQ ID NO: 3026427 - RNA, 23 nt, Human
aagauacaguuacucagaauucu

SEQ ID NO: 3026428 - RNA, 13 nt, Human
aagauaaaugugc

SEQ ID NO: 3026429 - RNA, 15 nt, Human
aagcugggcagguug

SEQ ID NO: 3026430 - RNA, 18 nt, Human
aagcuggucccacucagu

SEQ ID NO: 3026431 - RNA, 21 nt, Human
aagcuggucccacucagucca

SEQ ID NO: 3026432 - RNA, 13 nt, Human
aaggacacuagaa

SEQ ID NO: 3026433 - RNA, 15 nt, Human
aaggauguucuagca

SEQ ID NO: 3026434 - RNA, 15 nt, Human
aaggauugcuacugu

SEQ ID NO: 3026435 - RNA, 21 nt, Human
aagcgauucuucugcuucagc

SEQ ID NO: 3026436 - RNA, 17 nt, Human
aagcgauucuucugcuu

SEQ ID NO: 3026437 - RNA, 12 nt, Human
aaggugcaucug

SEQ ID NO: 3026438 - RNA, 19 nt, Human
aaguagaagucuuagaugu

SEQ ID NO: 3026439 - RNA, 20 nt, Human
aaguagaagucuuagaugua

SEQ ID NO: 3026440 - RNA, 17 nt, Human
aaguaucccuacuguaa

SEQ ID NO: 3026441 - RNA, 18 nt, Human
aaguaucccuacuguaau

SEQ ID NO: 3026442 - RNA, 23 nt, Human
aaguaucccuacuguaauuugug

SEQ ID NO: 3026443 - RNA, 21 nt, Human
aaguagaagucuuagauguau

SEQ ID NO: 3026444 - RNA, 22 nt, Human
aaguccucuuuucugagaggac

SEQ ID NO: 3026445 - RNA, 18 nt, Human
aaguccucuuuucugaga

SEQ ID NO: 3026446 - RNA, 18 nt, Human
aaggucauuuuuuuuaag

SEQ ID NO: 3026447 - RNA, 19 nt, Human
aaggucauuuuuuuuaaga

SEQ ID NO: 3026448 - RNA, 21 nt, Human
aaguggaaaaauagccugccu

SEQ ID NO: 3026449 - RNA, 19 nt, Human
aaguggaaaaauagccugc

SEQ ID NO: 3026450 - RNA, 22 nt, Human
aaugucaguuguuauuuauuga

SEQ ID NO: 3026451 - RNA, 15 nt, Human
aaugugaaaagaaaa

SEQ ID NO: 3026452 - RNA, 15 nt, Human
aauguuugccucugc

SEQ ID NO: 3026453 - RNA, 16 nt, Human
aauguuugccucugcc

SEQ ID NO: 3026454 - RNA, 19 nt, Human
aaugcgugcauaccacuuu

SEQ ID NO: 3026455 - RNA, 18 nt, Human
aaugcgugcauaccacuu

SEQ ID NO: 3026456 - RNA, 23 nt, Human
aaugccuuacccucauguucuua

SEQ ID NO: 3026457 - RNA, 22 nt, Human
aauacucuacccucuuagaaaa

SEQ ID NO: 3026458 - RNA, 20 nt, Human
aauacucuacccucuuagaa

SEQ ID NO: 3026459 - RNA, 13 nt, Human
aauagacaauuua

SEQ ID NO: 3026460 - RNA, 14 nt, Human
aaucaccgaaaacg

SEQ ID NO: 3026461 - RNA, 15 nt, Human
aaucaccgaaaacgu

SEQ ID NO: 3026462 - RNA, 19 nt, Human
aauccagacccggcugcgu

SEQ ID NO: 3026463 - RNA, 17 nt, Human
aauccagacccggcugc

SEQ ID NO: 3026464 - RNA, 16 nt, Human
aaucucaaauuucuaa

SEQ ID NO: 3026465 - RNA, 15 nt, Human
aaucucaaauuucua

SEQ ID NO: 3026466 - RNA, 17 nt, Human
aaucucaaauuucuaaa

SEQ ID NO: 3026467 - RNA, 18 nt, Human
aaucucaaauuucuaaau

SEQ ID NO: 3026468 - RNA, 16 nt, Human
aaugauuaauuaaaac

SEQ ID NO: 3026469 - RNA, 22 nt, Human
aacagcaacacaaagcuuuugc

SEQ ID NO: 3026470 - RNA, 18 nt, Human
aacagcaacacaaagcuu

SEQ ID NO: 3026471 - RNA, 13 nt, Human
aaccacgcuggac

SEQ ID NO: 3026472 - RNA, 15 nt, Human
aaccacuucagcuga

SEQ ID NO: 3026473 - RNA, 15 nt, Human
aacacauuaaaggua

SEQ ID NO: 3026474 - RNA, 20 nt, Human
aacacauuaaagguacuuug

SEQ ID NO: 3026475 - RNA, 21 nt, Human
aaauucuugcaaaguaucccu

SEQ ID NO: 3026476 - RNA, 18 nt, Human
aaauucuugcaaaguauc

SEQ ID NO: 3026477 - RNA, 23 nt, Human
aaaugccuuacccucauguucuu

SEQ ID NO: 3026478 - RNA, 14 nt, Human
aacugauaaagaug

SEQ ID NO: 3026479 - RNA, 19 nt, Human
aacuuaaauaaugugaaac

SEQ ID NO: 3026480 - RNA, 18 nt, Human
aacuuaaucuaaauggaa

SEQ ID NO: 3026481 - RNA, 15 nt, Human
aacuuaaucuaaaug

SEQ ID NO: 3026482 - RNA, 16 nt, Human
aacuuaaucuaaaugg

SEQ ID NO: 3026483 - RNA, 19 nt, Human
aaacacugguuuuaaauau

SEQ ID NO: 3026484 - RNA, 16 nt, Human
aaacacuguucucugc

SEQ ID NO: 3026485 - RNA, 19 nt, Human
aaaaucucaaauuucuaaa

SEQ ID NO: 3026486 - RNA, 22 nt, Human
aaaaucucaaauuucuaaaucu

SEQ ID NO: 3026487 - RNA, 22 nt, Human
aaaaucccuuaccucggugccu

SEQ ID NO: 3026488 - RNA, 17 nt, Human
aaaauaaaacuuuuuaa

SEQ ID NO: 3026489 - RNA, 15 nt, Human
aaaaagaaaggaggg

SEQ ID NO: 3026490 - RNA, 13 nt, Human
aaacucugagugc

SEQ ID NO: 3026491 - RNA, 15 nt, Human
aaacucugagugcaa

SEQ ID NO: 3026492 - RNA, 14 nt, Human
aaagaguaggaaga

SEQ ID NO: 3026493 - RNA, 12 nt, Human
aaagauauuuug

SEQ ID NO: 3026494 - RNA, 16 nt, Human
aaagauauuuugcuuu

SEQ ID NO: 3026495 - RNA, 17 nt, Human
aaagauauuuugcuuug

SEQ ID NO: 3026496 - RNA, 13 nt, Human
aaacucuccucug

SEQ ID NO: 3026497 - RNA, 18 nt, Human
aaacucuccucugcugcu

SEQ ID NO: 3026498 - RNA, 18 nt, Human
aaaccaucauugaaaucu

SEQ ID NO: 3026499 - RNA, 16 nt, Human
aaaggcuccaggagca

SEQ ID NO: 3026500 - RNA, 15 nt, Human
aaaggcuccaggagc

SEQ ID NO: 3026501 - RNA, 20 nt, Human
aaaggcuccaggagcagcca

SEQ ID NO: 3026502 - RNA, 19 nt, Human
aaaggcuccaggagcagcc

SEQ ID NO: 3026503 - RNA, 13 nt, Human
aaaguggaaaaau

SEQ ID NO: 3026504 - RNA, 13 nt, Human
aaauaaaacuuuu

SEQ ID NO: 3026505 - RNA, 16 nt, Human
aaauaaaacuuuuuaa

SEQ ID NO: 3026506 - RNA, 19 nt, Human
aaauaaaacuuuuuaaaau

SEQ ID NO: 3026507 - RNA, 19 nt, Human
aaauaguggugugauuugg

SEQ ID NO: 3026508 - RNA, 24 nt, Human
aaauagcucaggugucccugcacu

SEQ ID NO: 3026509 - RNA, 18 nt, Human
aaaucugcuuuuuaaaga

SEQ ID NO: 3026510 - RNA, 22 nt, Human
acccaguguuuuaggagcauga

SEQ ID NO: 3026511 - RNA, 19 nt, Human
acccaguguuuuaggagca

SEQ ID NO: 3026512 - RNA, 16 nt, Human
acccaccucagccucc

SEQ ID NO: 3026513 - RNA, 11 nt, Human
acccccugaau

SEQ ID NO: 3026514 - RNA, 20 nt, Human
accauauuaccacagacaua

SEQ ID NO: 3026515 - RNA, 18 nt, Human
acccaagggccuggccug

SEQ ID NO: 3026516 - RNA, 22 nt, Human
acccaagggccuggccugagcu

SEQ ID NO: 3026517 - RNA, 19 nt, Human
acccaagggccuggccuga

SEQ ID NO: 3026518 - RNA, 13 nt, Human
acccaccucagcc

SEQ ID NO: 3026519 - RNA, 14 nt, Human
acccaccucagccu

SEQ ID NO: 3026520 - RNA, 15 nt, Human
acccaccucagccuc

SEQ ID NO: 3026521 - RNA, 23 nt, Human
acccaagggccuggccugagcug

SEQ ID NO: 3026522 - RNA, 14 nt, Human
accauauuaccaca

SEQ ID NO: 3026523 - RNA, 16 nt, Human
accauauuaccacaga

SEQ ID NO: 3026524 - RNA, 16 nt, Human
accccuccaugugggc

SEQ ID NO: 3026525 - RNA, 19 nt, Human
accccuccaugugggcuag

SEQ ID NO: 3026526 - RNA, 20 nt, Human
accccucaacaccucugcac

SEQ ID NO: 3026527 - RNA, 19 nt, Human
accagagcugccaccugcc

SEQ ID NO: 3026528 - RNA, 13 nt, Human
accagcagaaaug

SEQ ID NO: 3026529 - RNA, 17 nt, Human
accagccaguaaauggg

SEQ ID NO: 3026530 - RNA, 15 nt, Human
acauuuauucugcuc

SEQ ID NO: 3026531 - RNA, 14 nt, Human
acauuuauucugcu

SEQ ID NO: 3026532 - RNA, 16 nt, Human
acaugugcacaugcac

SEQ ID NO: 3026533 - RNA, 18 nt, Human
acaugugcacaugcacgu

SEQ ID NO: 3026534 - RNA, 19 nt, Human
acaugaucuucuuuauaau

SEQ ID NO: 3026535 - RNA, 18 nt, Human
acaucagcacgauuucug

SEQ ID NO: 3026536 - RNA, 15 nt, Human
acaucagcacgauuu

SEQ ID NO: 3026537 - RNA, 17 nt, Human
acaucagcacgauuucu

SEQ ID NO: 3026538 - RNA, 23 nt, Human
acauaaugcgugcauaccacuuu

SEQ ID NO: 3026539 - RNA, 22 nt, Human
acauaaugcgugcauaccacuu

SEQ ID NO: 3026540 - RNA, 21 nt, Human
acauaaugcgugcauaccacu

SEQ ID NO: 3026541 - RNA, 19 nt, Human
acaggguuuugccauguug

SEQ ID NO: 3026542 - RNA, 19 nt, Human
acaggcaaugcuggcuguu

SEQ ID NO: 3026543 - RNA, 23 nt, Human
acaggcaaugcuggcuguuggcu

SEQ ID NO: 3026544 - RNA, 20 nt, Human
acacagcucuguccugggag

SEQ ID NO: 3026545 - RNA, 14 nt, Human
acacagcucugucc

SEQ ID NO: 3026546 - RNA, 19 nt, Human
acacagaggcugccucucc

SEQ ID NO: 3026547 - RNA, 21 nt, Human
acacauuuuauuuuauuaugc

SEQ ID NO: 3026548 - RNA, 22 nt, Human
acacauuuuauuuuauuaugca

SEQ ID NO: 3026549 - RNA, 11 nt, Human
acacagcucuu

SEQ ID NO: 3026550 - RNA, 13 nt, Human
acacagcucuucu

SEQ ID NO: 3026551 - RNA, 20 nt, Human
acacauuuuuuaaaugcacc

SEQ ID NO: 3026552 - RNA, 22 nt, Human
acacauuuuuuaaaugcaccug

SEQ ID NO: 3026553 - RNA, 12 nt, Human
acacauuuuucu

SEQ ID NO: 3026554 - RNA, 19 nt, Human
acacauuuuuuaaaugcac

SEQ ID NO: 3026555 - RNA, 15 nt, Human
acacgcgugcacaca

SEQ ID NO: 3026556 - RNA, 17 nt, Human
acacgcgugcacacacc

SEQ ID NO: 3026557 - RNA, 20 nt, Human
acaaggcaaggcugucaauu

SEQ ID NO: 3026558 - RNA, 17 nt, Human
acaaggauugcuacugu

SEQ ID NO: 3026559 - RNA, 14 nt, Human
acaaggcaaggcug

SEQ ID NO: 3026560 - RNA, 12 nt, Human
acaaggcaaggc

SEQ ID NO: 3026561 - RNA, 22 nt, Human
acaaaauguaggguuauaauaa

SEQ ID NO: 3026562 - RNA, 18 nt, Human
acagccacggccaggcca

SEQ ID NO: 3026563 - RNA, 15 nt, Human
acagccacggccagg

SEQ ID NO: 3026564 - RNA, 16 nt, Human
acagccacggccaggc

SEQ ID NO: 3026565 - RNA, 17 nt, Human
acagccacggccaggcc

SEQ ID NO: 3026566 - RNA, 16 nt, Human
acagcucuucuccagg

SEQ ID NO: 3026567 - RNA, 17 nt, Human
acagcucuucuccaggc

SEQ ID NO: 3026568 - RNA, 15 nt, Human
acaggaucagucuga

SEQ ID NO: 3026569 - RNA, 14 nt, Human
acaggauuauugga

SEQ ID NO: 3026570 - RNA, 18 nt, Human
acaggcaaugcuggcugu

SEQ ID NO: 3026571 - RNA, 12 nt, Human
acaggcaagcac

SEQ ID NO: 3026572 - RNA, 14 nt, Human
acacugcauguuug

SEQ ID NO: 3026573 - RNA, 15 nt, Human
acacugcauguuugu

SEQ ID NO: 3026574 - RNA, 19 nt, Human
acagaggcagccccauucu

SEQ ID NO: 3026575 - RNA, 23 nt, Human
acagaggccaugggccuccugug

SEQ ID NO: 3026576 - RNA, 13 nt, Human
acagacacaggcc

SEQ ID NO: 3026577 - RNA, 14 nt, Human
acagacacaggccc

SEQ ID NO: 3026578 - RNA, 14 nt, Human
acagaggcagcccc

SEQ ID NO: 3026579 - RNA, 15 nt, Human
acagaggcagcccca

SEQ ID NO: 3026580 - RNA, 15 nt, Human
acacuguacugcaau

SEQ ID NO: 3026581 - RNA, 11 nt, Human
acagacacagg

SEQ ID NO: 3026582 - RNA, 23 nt, Human
acagagucucacuguugcccagg

SEQ ID NO: 3026583 - RNA, 15 nt, Human
acagagugagacucu

SEQ ID NO: 3026584 - RNA, 19 nt, Human
acagagugagacucugucu

SEQ ID NO: 3026585 - RNA, 16 nt, Human
acuuuauuucucucau

SEQ ID NO: 3026586 - RNA, 17 nt, Human
acuuuguucuggcucuu

SEQ ID NO: 3026587 - RNA, 16 nt, Human
acuuuguucuggcucu

SEQ ID NO: 3026588 - RNA, 13 nt, Human
acuuuuaagacuu

SEQ ID NO: 3026589 - RNA, 12 nt, Human
acuuuuaagacu

SEQ ID NO: 3026590 - RNA, 19 nt, Human
acuuuguucuggcucuucc

SEQ ID NO: 3026591 - RNA, 13 nt, Human
acuuuuauaaacu

SEQ ID NO: 3026592 - RNA, 20 nt, Human
acuuuucauaaccuagccuu

SEQ ID NO: 3026593 - RNA, 16 nt, Human
acuuuucuuucagcca

SEQ ID NO: 3026594 - RNA, 14 nt, Human
acuuuucuuugugg

SEQ ID NO: 3026595 - RNA, 19 nt, Human
agaaaauaguggugugauu

SEQ ID NO: 3026596 - RNA, 15 nt, Human
agaaaauaccaagga

SEQ ID NO: 3026597 - RNA, 22 nt, Human
agaaaguacuucuccacccugc

SEQ ID NO: 3026598 - RNA, 23 nt, Human
agaaaguacuucuccacccugcu

SEQ ID NO: 3026599 - RNA, 16 nt, Human
acuucacgcccuuggc

SEQ ID NO: 3026600 - RNA, 23 nt, Human
acuucacauauugauuuccguua

SEQ ID NO: 3026601 - RNA, 16 nt, Human
acuugguuuuuaaaaa

SEQ ID NO: 3026602 - RNA, 15 nt, Human
acuugggccacugug

SEQ ID NO: 3026603 - RNA, 14 nt, Human
acuugggccacugu

SEQ ID NO: 3026604 - RNA, 22 nt, Human
acugugcugagucugaaggcug

SEQ ID NO: 3026605 - RNA, 20 nt, Human
acugugcugagucugaaggc

SEQ ID NO: 3026606 - RNA, 14 nt, Human
acugguuuuaaaua

SEQ ID NO: 3026607 - RNA, 17 nt, Human
acugguuuguucccugu

SEQ ID NO: 3026608 - RNA, 18 nt, Human
acugguuccauggccucu

SEQ ID NO: 3026609 - RNA, 16 nt, Human
acugugaagagaacca

SEQ ID NO: 3026610 - RNA, 16 nt, Human
acuggaagcacagcuu

SEQ ID NO: 3026611 - RNA, 19 nt, Human
acuggaagcacagcuucau

SEQ ID NO: 3026612 - RNA, 17 nt, Human
acuggaagcacagcuuc

SEQ ID NO: 3026613 - RNA, 15 nt, Human
acuggagaaaaugga

SEQ ID NO: 3026614 - RNA, 22 nt, Human
acuauuuuuguuuuuauuaaaa

SEQ ID NO: 3026615 - RNA, 21 nt, Human
acuauuuuuguuuuuauuaaa

SEQ ID NO: 3026616 - RNA, 19 nt, Human
acucaguccauagcagaga

SEQ ID NO: 3026617 - RNA, 18 nt, Human
acuauucugagaugacua

SEQ ID NO: 3026618 - RNA, 19 nt, Human
acuauucugagaugacuau

SEQ ID NO: 3026619 - RNA, 20 nt, Human
acuauuuuuguuuuuauuaa

SEQ ID NO: 3026620 - RNA, 13 nt, Human
acucaaaagcugg

SEQ ID NO: 3026621 - RNA, 19 nt, Human
acucugucgcccagucugg

SEQ ID NO: 3026622 - RNA, 21 nt, Human
acucuaucaaguauuauaccu

SEQ ID NO: 3026623 - RNA, 23 nt, Human
acucuaucaaguauuauaccuuu

SEQ ID NO: 3026624 - RNA, 17 nt, Human
acucuagggaaaaacca

SEQ ID NO: 3026625 - RNA, 15 nt, Human
acucuagggaaaaac

SEQ ID NO: 3026626 - RNA, 11 nt, Human
acgugaguccu

SEQ ID NO: 3026627 - RNA, 13 nt, Human
acgucugacaggc

SEQ ID NO: 3026628 - RNA, 14 nt, Human
acgucugacaggca

SEQ ID NO: 3026629 - RNA, 11 nt, Human
acgcugugcug

SEQ ID NO: 3026630 - RNA, 14 nt, Human
acgcugugcugccc

SEQ ID NO: 3026631 - RNA, 12 nt, Human
acgcugugcugc

SEQ ID NO: 3026632 - RNA, 18 nt, Human
accuuggcugcagggagu

SEQ ID NO: 3026633 - RNA, 17 nt, Human
accuuggcugcagggag

SEQ ID NO: 3026634 - RNA, 13 nt, Human
accuuucccaucu

SEQ ID NO: 3026635 - RNA, 18 nt, Human
accuuucccaucuuccaa

SEQ ID NO: 3026636 - RNA, 15 nt, Human
accuuuaagagaaau

SEQ ID NO: 3026637 - RNA, 16 nt, Human
accugucccccugaca

SEQ ID NO: 3026638 - RNA, 15 nt, Human
accugucccccugac

SEQ ID NO: 3026639 - RNA, 12 nt, Human
accugucccccu

SEQ ID NO: 3026640 - RNA, 21 nt, Human
accucugcagcaauaaagcag

SEQ ID NO: 3026641 - RNA, 23 nt, Human
accucugccugaagucacacagu

SEQ ID NO: 3026642 - RNA, 18 nt, Human
accucugcagcaauaaag

SEQ ID NO: 3026643 - RNA, 20 nt, Human
accucugcagcaauaaagca

SEQ ID NO: 3026644 - RNA, 15 nt, Human
accucugcagcaaua

SEQ ID NO: 3026645 - RNA, 15 nt, Human
aaaaaauauuuuccu

SEQ ID NO: 3026646 - RNA, 15 nt, Human
cacaaagcagauccu

SEQ ID NO: 3026647 - RNA, 23 nt, Human
cacaaagaaccaccaggaaagca

SEQ ID NO: 3026648 - RNA, 16 nt, Human
cacaaaaguuucucuu

SEQ ID NO: 3026649 - RNA, 18 nt, Human
cacaaaaguuucucuuuu

SEQ ID NO: 3026650 - RNA, 18 nt, Human
caauaggaaaaacugauu

SEQ ID NO: 3026651 - RNA, 20 nt, Human
caauaggaaaaacugauuuu

SEQ ID NO: 3026652 - RNA, 21 nt, Human
caauaggaaaaacugauuuuu

SEQ ID NO: 3026653 - RNA, 18 nt, Human
caaugcaaaccaucauug

SEQ ID NO: 3026654 - RNA, 17 nt, Human
caaugcaaaccaucauu

SEQ ID NO: 3026655 - RNA, 14 nt, Human
caaugcaaaccauc

SEQ ID NO: 3026656 - RNA, 23 nt, Human
caaugcacuuuguucuggcucuu

SEQ ID NO: 3026657 - RNA, 22 nt, Human
caaugcacuuuguucuggcucu

SEQ ID NO: 3026658 - RNA, 19 nt, Human
caaugcaaaccaucauuga

SEQ ID NO: 3026659 - RNA, 15 nt, Human
cacaccagagcccac

SEQ ID NO: 3026660 - RNA, 12 nt, Human
cacaccagagcc

SEQ ID NO: 3026661 - RNA, 13 nt, Human
cacaccagagccc

SEQ ID NO: 3026662 - RNA, 12 nt, Human
cacacagcucug

SEQ ID NO: 3026663 - RNA, 19 nt, Human
cacacagaggcugccucuc

SEQ ID NO: 3026664 - RNA, 14 nt, Human
cacacaccagagcc

SEQ ID NO: 3026665 - RNA, 21 nt, Human
cacacuugacaucaacugcau

SEQ ID NO: 3026666 - RNA, 22 nt, Human
cacagacccugcccugugggcc

SEQ ID NO: 3026667 - RNA, 21 nt, Human
cacagagaaaguacuucucca

SEQ ID NO: 3026668 - RNA, 16 nt, Human
cacagaguuguuacau

SEQ ID NO: 3026669 - RNA, 17 nt, Human
cacagaguuguuacauu

SEQ ID NO: 3026670 - RNA, 15 nt, Human
cacauuaaaugacuc

SEQ ID NO: 3026671 - RNA, 13 nt, Human
cacauuaaaugac

SEQ ID NO: 3026672 - RNA, 17 nt, Human
cacauuaaagguacuuu

SEQ ID NO: 3026673 - RNA, 16 nt, Human
cacauuccugaugcuu

SEQ ID NO: 3026674 - RNA, 17 nt, Human
cacaugugcacaugcac

SEQ ID NO: 3026675 - RNA, 14 nt, Human
cacaugugcacaug

SEQ ID NO: 3026676 - RNA, 15 nt, Human
cacaugugcacaugc

SEQ ID NO: 3026677 - RNA, 20 nt, Human
cacauauugauuuccguuaa

SEQ ID NO: 3026678 - RNA, 12 nt, Human
cacauaucuguc

SEQ ID NO: 3026679 - RNA, 18 nt, Human
cacaucagcacgauuucu

SEQ ID NO: 3026680 - RNA, 18 nt, Human
cacaugccucucucaggc

SEQ ID NO: 3026681 - RNA, 17 nt, Human
cacaugccucucucagg

SEQ ID NO: 3026682 - RNA, 13 nt, Human
cacaugccucucu

SEQ ID NO: 3026683 - RNA, 19 nt, Human
cacaucagcacgauuucug

SEQ ID NO: 3026684 - RNA, 23 nt, Human
cacauguccaagaagcccaggaa

SEQ ID NO: 3026685 - RNA, 19 nt, Human
cacaugccucucucaggcc

SEQ ID NO: 3026686 - RNA, 19 nt, Human
caccacaugugcacaugca

SEQ ID NO: 3026687 - RNA, 15 nt, Human
caccacaugugcaca

SEQ ID NO: 3026688 - RNA, 18 nt, Human
caccacaugugcacaugc

SEQ ID NO: 3026689 - RNA, 19 nt, Human
caccacuacauucuguuaa

SEQ ID NO: 3026690 - RNA, 20 nt, Human
caccacuacauucuguuaau

SEQ ID NO: 3026691 - RNA, 14 nt, Human
caccaccucuuugg

SEQ ID NO: 3026692 - RNA, 16 nt, Human
caccacuacauucugu

SEQ ID NO: 3026693 - RNA, 17 nt, Human
caccacuacauucuguu

SEQ ID NO: 3026694 - RNA, 18 nt, Human
caccacuacauucuguua

SEQ ID NO: 3026695 - RNA, 17 nt, Human
caccacacccagcccac

SEQ ID NO: 3026696 - RNA, 13 nt, Human
caccacacccagc

SEQ ID NO: 3026697 - RNA, 15 nt, Human
caccacacccagccc

SEQ ID NO: 3026698 - RNA, 15 nt, Human
caccaagcccaguua

SEQ ID NO: 3026699 - RNA, 19 nt, Human
cacagugagucgaggacag

SEQ ID NO: 3026700 - RNA, 20 nt, Human
cacagugagucgaggacagg

SEQ ID NO: 3026701 - RNA, 18 nt, Human
cacagugagucgaggaca

SEQ ID NO: 3026702 - RNA, 20 nt, Human
cacaggcccggcuccaggcu

SEQ ID NO: 3026703 - RNA, 23 nt, Human
cacaggcccggcuccaggcuccu

SEQ ID NO: 3026704 - RNA, 17 nt, Human
cacauacacacacacgc

SEQ ID NO: 3026705 - RNA, 16 nt, Human
cacaggcccggcucca

SEQ ID NO: 3026706 - RNA, 17 nt, Human
cacaggcccggcuccag

SEQ ID NO: 3026707 - RNA, 18 nt, Human
cacaggcccggcuccagg

SEQ ID NO: 3026708 - RNA, 19 nt, Human
cacaggcccggcuccaggc

SEQ ID NO: 3026709 - RNA, 10 nt, Human
cacaggcagg

SEQ ID NO: 3026710 - RNA, 12 nt, Human
cacaggaucagu

SEQ ID NO: 3026711 - RNA, 15 nt, Human
cacaggaucagucug

SEQ ID NO: 3026712 - RNA, 16 nt, Human
cacaggaucagucuga

SEQ ID NO: 3026713 - RNA, 20 nt, Human
cacagaguuguuacauuuuu

SEQ ID NO: 3026714 - RNA, 18 nt, Human
cacagaugggugcuugga

SEQ ID NO: 3026715 - RNA, 14 nt, Human
cacagaugggugcu

SEQ ID NO: 3026716 - RNA, 20 nt, Human
cacagaugggugcuuggagg

SEQ ID NO: 3026717 - RNA, 22 nt, Human
caacauuucucauguugaaacu

SEQ ID NO: 3026718 - RNA, 21 nt, Human
caaccccuucgcuccuguguc

SEQ ID NO: 3026719 - RNA, 18 nt, Human
caaccccuucgcuccugu

SEQ ID NO: 3026720 - RNA, 19 nt, Human
caaccccuucgcuccugug

SEQ ID NO: 3026721 - RNA, 23 nt, Human
caacaugccagccacugugauag

SEQ ID NO: 3026722 - RNA, 22 nt, Human
caacaucuuggucagauuugaa

SEQ ID NO: 3026723 - RNA, 15 nt, Human
caacagguuuuccug

SEQ ID NO: 3026724 - RNA, 18 nt, Human
caacaggguuuuuuucca

SEQ ID NO: 3026725 - RNA, 19 nt, Human
caacagguuuuccugaaga

SEQ ID NO: 3026726 - RNA, 24 nt, Human
caacaggcugggcuucaguggcag

SEQ ID NO: 3026727 - RNA, 23 nt, Human
caacaggcugggcuucaguggca

SEQ ID NO: 3026728 - RNA, 19 nt, Human
caacucuccuccagaguca

SEQ ID NO: 3026729 - RNA, 16 nt, Human
caaccugauugugucu

SEQ ID NO: 3026730 - RNA, 15 nt, Human
caacccucaucacca

SEQ ID NO: 3026731 - RNA, 12 nt, Human
caacccucauca

SEQ ID NO: 3026732 - RNA, 16 nt, Human
caacugcauuggcuuu

SEQ ID NO: 3026733 - RNA, 20 nt, Human
caacucuccuccagagucag

SEQ ID NO: 3026734 - RNA, 15 nt, Human
caaggauugcuacug

SEQ ID NO: 3026735 - RNA, 16 nt, Human
caagggccuggccuga

SEQ ID NO: 3026736 - RNA, 19 nt, Human
caagggccuggccugagcu

SEQ ID NO: 3026737 - RNA, 12 nt, Human
caaggugggagg

SEQ ID NO: 3026738 - RNA, 23 nt, Human
caaggugggaggauugcuugagc

SEQ ID NO: 3026739 - RNA, 22 nt, Human
caagugugguagagugugccug

SEQ ID NO: 3026740 - RNA, 22 nt, Human
caagugauucuccugccucagc

SEQ ID NO: 3026741 - RNA, 21 nt, Human
caagugauucuccugccucag

SEQ ID NO: 3026742 - RNA, 19 nt, Human
caagugaaaaaggaggaag

SEQ ID NO: 3026743 - RNA, 16 nt, Human
caagugauucuccugc

SEQ ID NO: 3026744 - RNA, 17 nt, Human
caagugauucuccugcc

SEQ ID NO: 3026745 - RNA, 17 nt, Human
caagcgugagccacugc

SEQ ID NO: 3026746 - RNA, 22 nt, Human
caaggauccugagccagauuuc

SEQ ID NO: 3026747 - RNA, 21 nt, Human
caaggaugaucuaggaagacu

SEQ ID NO: 3026748 - RNA, 13 nt, Human
caaggauccugag

SEQ ID NO: 3026749 - RNA, 16 nt, Human
caagcgugagccacug

SEQ ID NO: 3026750 - RNA, 21 nt, Human
caagccaccaacauacuccca

SEQ ID NO: 3026751 - RNA, 18 nt, Human
caagcaccuccugccucg

SEQ ID NO: 3026752 - RNA, 17 nt, Human
caaagcuuuugcauauu

SEQ ID NO: 3026753 - RNA, 16 nt, Human
caaagcuuguuaagau

SEQ ID NO: 3026754 - RNA, 18 nt, Human
caaagcuaggccuggcca

SEQ ID NO: 3026755 - RNA, 16 nt, Human
caaagcuaggccuggc

SEQ ID NO: 3026756 - RNA, 17 nt, Human
caaagcuaggccuggcc

SEQ ID NO: 3026757 - RNA, 20 nt, Human
caaagccaaagcuaggccug

SEQ ID NO: 3026758 - RNA, 21 nt, Human
caaagccaaagcuaggccugg

SEQ ID NO: 3026759 - RNA, 15 nt, Human
caaagcuaggccugg

SEQ ID NO: 3026760 - RNA, 18 nt, Human
auuuuuuuacuaauagac

SEQ ID NO: 3026761 - RNA, 16 nt, Human
caaaggauacuuauuu

SEQ ID NO: 3026762 - RNA, 21 nt, Human
caaaggauacuuauuuaaaua

SEQ ID NO: 3026763 - RNA, 21 nt, Human
caaaggaugcccaaagaugca

SEQ ID NO: 3026764 - RNA, 22 nt, Human
caaauucugcuugcuugcuuuu

SEQ ID NO: 3026765 - RNA, 16 nt, Human
caaaucagcugcuacu

SEQ ID NO: 3026766 - RNA, 13 nt, Human
caaaucagcugcu

SEQ ID NO: 3026767 - RNA, 13 nt, Human
caccccagcccca

SEQ ID NO: 3026768 - RNA, 12 nt, Human
caccccagcccc

SEQ ID NO: 3026769 - RNA, 12 nt, Human
cacccaccucag

SEQ ID NO: 3026770 - RNA, 13 nt, Human
cacccaccucagc

SEQ ID NO: 3026771 - RNA, 14 nt, Human
cacccaccucagcc

SEQ ID NO: 3026772 - RNA, 16 nt, Human
cacccaccucagccuc

SEQ ID NO: 3026773 - RNA, 20 nt, Human
cacccaccaucaugucuggc

SEQ ID NO: 3026774 - RNA, 22 nt, Human
cacccaccaucaugucuggcua

SEQ ID NO: 3026775 - RNA, 23 nt, Human
cacccaagggccuggccugagcu

SEQ ID NO: 3026776 - RNA, 21 nt, Human
cacccaagggccuggccugag

SEQ ID NO: 3026777 - RNA, 20 nt, Human
cacccaagggccuggccuga

SEQ ID NO: 3026778 - RNA, 19 nt, Human
cacccaagggccuggccug

SEQ ID NO: 3026779 - RNA, 18 nt, Human
cacccaagggccuggccu

SEQ ID NO: 3026780 - RNA, 17 nt, Human
cacccaagggccuggcc

SEQ ID NO: 3026781 - RNA, 16 nt, Human
cacccaagggccuggc

SEQ ID NO: 3026782 - RNA, 17 nt, Human
caccccggccaccugcg

SEQ ID NO: 3026783 - RNA, 16 nt, Human
caccccggccaccugc

SEQ ID NO: 3026784 - RNA, 15 nt, Human
caccccggccaccug

SEQ ID NO: 3026785 - RNA, 14 nt, Human
caccccggccaccu

SEQ ID NO: 3026786 - RNA, 22 nt, Human
cacccccacccaagggccuggc

SEQ ID NO: 3026787 - RNA, 14 nt, Human
uuuguguacuuuua

SEQ ID NO: 3026788 - RNA, 13 nt, Human
uuuguguacuuuu

SEQ ID NO: 3026789 - RNA, 17 nt, Human
uuuguguacuuuuaaga

SEQ ID NO: 3026790 - RNA, 23 nt, Human
uugcuaacagcaacacaaagcuu

SEQ ID NO: 3026791 - RNA, 20 nt, Human
uugcuaacagcaacacaaag

SEQ ID NO: 3026792 - RNA, 19 nt, Human
uugcugcugauuuaaacac

SEQ ID NO: 3026793 - RNA, 17 nt, Human
uugcugcugauuuaaac

SEQ ID NO: 3026794 - RNA, 21 nt, Human
uugcugcugauuuaaacacau

SEQ ID NO: 3026795 - RNA, 16 nt, Human
uugcugcuugaggcaa

SEQ ID NO: 3026796 - RNA, 14 nt, Human
uugcugcuugaggc

SEQ ID NO: 3026797 - RNA, 16 nt, Human
uugcugcuuguacacu

SEQ ID NO: 3026798 - RNA, 16 nt, Human
uugcugucccuuuucc

SEQ ID NO: 3026799 - RNA, 18 nt, Human
uugcugucccuuuuccuu

SEQ ID NO: 3026800 - RNA, 18 nt, Human
uugccuuggcugcaguuu

SEQ ID NO: 3026801 - RNA, 20 nt, Human
uugccauguuggccaggcug

SEQ ID NO: 3026802 - RNA, 21 nt, Human
uugccauguuggccaggcugg

SEQ ID NO: 3026803 - RNA, 17 nt, Human
uugccuuuuuauaacuu

SEQ ID NO: 3026804 - RNA, 19 nt, Human
uuggaagcuccgcuuucua

SEQ ID NO: 3026805 - RNA, 21 nt, Human
uuggacccugaggcccagagg

SEQ ID NO: 3026806 - RNA, 19 nt, Human
uuggacccugaggcccaga

SEQ ID NO: 3026807 - RNA, 18 nt, Human
uuggacccugaggcccag

SEQ ID NO: 3026808 - RNA, 15 nt, Human
uuggacccugaggcc

SEQ ID NO: 3026809 - RNA, 15 nt, Human
uuggauuguccccga

SEQ ID NO: 3026810 - RNA, 20 nt, Human
uugggcacaucauuucaaga

SEQ ID NO: 3026811 - RNA, 18 nt, Human
uugguaacucuguaauuc

SEQ ID NO: 3026812 - RNA, 13 nt, Human
uugguccugcugc

SEQ ID NO: 3026813 - RNA, 20 nt, Human
uuggucugacccacugcuuu

SEQ ID NO: 3026814 - RNA, 23 nt, Human
uuggcuucacggaagagccuugc

SEQ ID NO: 3026815 - RNA, 20 nt, Human
uuguauuuuacuaauaaaau

SEQ ID NO: 3026816 - RNA, 14 nt, Human
uugucuaugggacu

SEQ ID NO: 3026817 - RNA, 22 nt, Human
uugucaaaguggugagaggcau

SEQ ID NO: 3026818 - RNA, 22 nt, Human
uugucuuaaaaaguggaaaaau

SEQ ID NO: 3026819 - RNA, 20 nt, Human
uugucuaugggacucaaugc

SEQ ID NO: 3026820 - RNA, 23 nt, Human
uugcagcucuccccuucucugua

SEQ ID NO: 3026821 - RNA, 23 nt, Human
uugcagacaggcaagcaccuccu

SEQ ID NO: 3026822 - RNA, 22 nt, Human
uugcagacaggcaagcaccucc

SEQ ID NO: 3026823 - RNA, 17 nt, Human
uugauucauaaugacuu

SEQ ID NO: 3026824 - RNA, 13 nt, Human
uugauucauaaug

SEQ ID NO: 3026825 - RNA, 16 nt, Human
uugccauguuggccag

SEQ ID NO: 3026826 - RNA, 17 nt, Human
uugccauguuggccagg

SEQ ID NO: 3026827 - RNA, 18 nt, Human
uugccauguuggccaggc

SEQ ID NO: 3026828 - RNA, 19 nt, Human
uugccauguuggccaggcu

SEQ ID NO: 3026829 - RNA, 19 nt, Human
uugagccuugaacuuugac

SEQ ID NO: 3026830 - RNA, 15 nt, Human
uugagccuugaacuu

SEQ ID NO: 3026831 - RNA, 16 nt, Human
uugagccuugaacuuu

SEQ ID NO: 3026832 - RNA, 14 nt, Human
uugagccuugaacu

SEQ ID NO: 3026833 - RNA, 14 nt, Human
uugagccugggagg

SEQ ID NO: 3026834 - RNA, 21 nt, Human
uugauucagacagcugccugg

SEQ ID NO: 3026835 - RNA, 17 nt, Human
uugauucagacagcugc

SEQ ID NO: 3026836 - RNA, 23 nt, Human
uugauucagacagcugccuggga

SEQ ID NO: 3026837 - RNA, 16 nt, Human
uugauucagcucugca

SEQ ID NO: 3026838 - RNA, 16 nt, Human
uugauaugcuuauaca

SEQ ID NO: 3026839 - RNA, 15 nt, Human
uugaaacacugguuu

SEQ ID NO: 3026840 - RNA, 15 nt, Human
uugaacuuugaccuc

SEQ ID NO: 3026841 - RNA, 21 nt, Human
uucuuuccugaggcugggcuc

SEQ ID NO: 3026842 - RNA, 22 nt, Human
uugaagauucuauguuaauauu

SEQ ID NO: 3026843 - RNA, 23 nt, Human
uugaagauucuauguuaauauuu

SEQ ID NO: 3026844 - RNA, 13 nt, Human
uugaagauucuau

SEQ ID NO: 3026845 - RNA, 12 nt, Human
uugaagcagagu

SEQ ID NO: 3026846 - RNA, 14 nt, Human
uugaagcagagugg

SEQ ID NO: 3026847 - RNA, 17 nt, Human
uugaacuuugaccucug

SEQ ID NO: 3026848 - RNA, 18 nt, Human
uugaacuuugaccucugc

SEQ ID NO: 3026849 - RNA, 16 nt, Human
uugaaugaugccauga

SEQ ID NO: 3026850 - RNA, 12 nt, Human
uugaaugaugcc

SEQ ID NO: 3026851 - RNA, 13 nt, Human
uucuuguauuuau

SEQ ID NO: 3026852 - RNA, 13 nt, Human
uucuucagagacu

SEQ ID NO: 3026853 - RNA, 17 nt, Human
uucuuagggaaggauac

SEQ ID NO: 3026854 - RNA, 20 nt, Human
uucuggcagaguugaagaca

SEQ ID NO: 3026855 - RNA, 22 nt, Human
uuucacaguguguggucaacau

SEQ ID NO: 3026856 - RNA, 17 nt, Human
uuucagccaagaauucu

SEQ ID NO: 3026857 - RNA, 16 nt, Human
uuucagccaagaauuc

SEQ ID NO: 3026858 - RNA, 19 nt, Human
uuucuaaaucuccaaaaua

SEQ ID NO: 3026859 - RNA, 23 nt, Human
uuuccuggcacugcuuccaguga

SEQ ID NO: 3026860 - RNA, 19 nt, Human
uuuccuggcacugcuucca

SEQ ID NO: 3026861 - RNA, 14 nt, Human
uuucugaaauaaca

SEQ ID NO: 3026862 - RNA, 22 nt, Human
uuucuacccagcgagcccuggu

SEQ ID NO: 3026863 - RNA, 15 nt, Human
uuucuacccagcgag

SEQ ID NO: 3026864 - RNA, 18 nt, Human
uuucuacccagcgagccc

SEQ ID NO: 3026865 - RNA, 17 nt, Human
uuuggguuuauuuggaa

SEQ ID NO: 3026866 - RNA, 14 nt, Human
uuugguuauuuuac

SEQ ID NO: 3026867 - RNA, 13 nt, Human
uuugguuauuuua

SEQ ID NO: 3026868 - RNA, 22 nt, Human
uuugguugguaacucuguaauu

SEQ ID NO: 3026869 - RNA, 15 nt, Human
uuugccaauuugcac

SEQ ID NO: 3026870 - RNA, 20 nt, Human
uuugccaauuugcacauuaa

SEQ ID NO: 3026871 - RNA, 16 nt, Human
uuugcuugaaagaaaa

SEQ ID NO: 3026872 - RNA, 14 nt, Human
uuugcuugaaagaa

SEQ ID NO: 3026873 - RNA, 19 nt, Human
uuuggacccugaggcccag

SEQ ID NO: 3026874 - RNA, 15 nt, Human
uuuggacccugaggc

SEQ ID NO: 3026875 - RNA, 21 nt, Human
uuugaagguagaauguuuuca

SEQ ID NO: 3026876 - RNA, 17 nt, Human
uuugagaucagccuggg

SEQ ID NO: 3026877 - RNA, 16 nt, Human
uuugagaucagccugg

SEQ ID NO: 3026878 - RNA, 19 nt, Human
uuucuuguguguuuauugu

SEQ ID NO: 3026879 - RNA, 15 nt, Human
uuuaaacuacauuag

SEQ ID NO: 3026880 - RNA, 13 nt, Human
uuuaacagaaaug

SEQ ID NO: 3026881 - RNA, 15 nt, Human
uuuaaacacauuaaa

SEQ ID NO: 3026882 - RNA, 14 nt, Human
uuuaaacacauuaa

SEQ ID NO: 3026883 - RNA, 13 nt, Human
uuuaaaagauaca

SEQ ID NO: 3026884 - RNA, 20 nt, Human
uuguuauuuauugaaaugau

SEQ ID NO: 3026885 - RNA, 15 nt, Human
uuguuauuuauugaa

SEQ ID NO: 3026886 - RNA, 12 nt, Human
uuguuuaauggu

SEQ ID NO: 3026887 - RNA, 23 nt, Human
uuguuuaaugguaguuuuacagu

SEQ ID NO: 3026888 - RNA, 24 nt, Human
uugucuuuggacccugaggcccag

SEQ ID NO: 3026889 - RNA, 20 nt, Human
uugucuuuggacccugaggc

SEQ ID NO: 3026890 - RNA, 15 nt, Human
uugucuuuggacccu

SEQ ID NO: 3026891 - RNA, 20 nt, Human
uuguuuggggaugagaaagg

SEQ ID NO: 3026892 - RNA, 22 nt, Human
uuuauccuagucauucuucccu

SEQ ID NO: 3026893 - RNA, 12 nt, Human
uuuauacauaaa

SEQ ID NO: 3026894 - RNA, 20 nt, Human
uuuauacauaaacaagacca

SEQ ID NO: 3026895 - RNA, 16 nt, Human
uuuaucuguucauaug

SEQ ID NO: 3026896 - RNA, 15 nt, Human
uuuaucuguucauau

SEQ ID NO: 3026897 - RNA, 23 nt, Human
uuuauccuagucauucuucccua

SEQ ID NO: 3026898 - RNA, 19 nt, Human
uuuagacccuauugcugcu

SEQ ID NO: 3026899 - RNA, 22 nt, Human
uuuagacccuauugcugcuuga

SEQ ID NO: 3026900 - RNA, 18 nt, Human
uuuauaaacuuuaccuuu

SEQ ID NO: 3026901 - RNA, 17 nt, Human
uuuacaguguuucuggc

SEQ ID NO: 3026902 - RNA, 19 nt, Human
uuuacaguguuucuggcuu

SEQ ID NO: 3026903 - RNA, 14 nt, Human
uuuaacagaaaugu

SEQ ID NO: 3026904 - RNA, 15 nt, Human
uuuaacagaaaugua

SEQ ID NO: 3026905 - RNA, 12 nt, Human
uuauugaagcag

SEQ ID NO: 3026906 - RNA, 11 nt, Human
uuauucugcuc

SEQ ID NO: 3026907 - RNA, 17 nt, Human
uuauugaagcagagugg

SEQ ID NO: 3026908 - RNA, 16 nt, Human
uuauugaagcagagug

SEQ ID NO: 3026909 - RNA, 15 nt, Human
uuauugaagcagagu

SEQ ID NO: 3026910 - RNA, 13 nt, Human
uuauugaagcaga

SEQ ID NO: 3026911 - RNA, 15 nt, Human
uuauugauguuuuca

SEQ ID NO: 3026912 - RNA, 15 nt, Human
uuauugcccacgcug

SEQ ID NO: 3026913 - RNA, 23 nt, Human
uuauuaaaaaucucaaauuucua

SEQ ID NO: 3026914 - RNA, 14 nt, Human
uuaguuccuugagu

SEQ ID NO: 3026915 - RNA, 16 nt, Human
uuaguuccucauuagc

SEQ ID NO: 3026916 - RNA, 14 nt, Human
uuaucuagauacug

SEQ ID NO: 3026917 - RNA, 16 nt, Human
uuaucuagauacugua

SEQ ID NO: 3026918 - RNA, 17 nt, Human
uuaucuagauacuguau

SEQ ID NO: 3026919 - RNA, 16 nt, Human
uuaugcaugaaguaau

SEQ ID NO: 3026920 - RNA, 22 nt, Human
uuaugcaugaaguaauaugcac

SEQ ID NO: 3026921 - RNA, 16 nt, Human
uuauggaacacucuga

SEQ ID NO: 3026922 - RNA, 13 nt, Human
uuauuuuacuuuu

SEQ ID NO: 3026923 - RNA, 15 nt, Human
uuauuuuacuuuuug

SEQ ID NO: 3026924 - RNA, 17 nt, Human
uuauuuuaauucaguug

SEQ ID NO: 3026925 - RNA, 17 nt, Human
uuauugucaaaguggug

SEQ ID NO: 3026926 - RNA, 18 nt, Human
uuauugucaaagugguga

SEQ ID NO: 3026927 - RNA, 20 nt, Human
uucaauaggaaaaacugauu

SEQ ID NO: 3026928 - RNA, 18 nt, Human
uucaauaggaaaaacuga

SEQ ID NO: 3026929 - RNA, 15 nt, Human
uucaauaggaaaaac

SEQ ID NO: 3026930 - RNA, 13 nt, Human
uucaauaggaaaa

SEQ ID NO: 3026931 - RNA, 18 nt, Human
uucacggaagagccuugc

SEQ ID NO: 3026932 - RNA, 15 nt, Human
uucacgugguccuaa

SEQ ID NO: 3026933 - RNA, 13 nt, Human
uucacucuccuug

SEQ ID NO: 3026934 - RNA, 19 nt, Human
uucagagacuccugcaggc

SEQ ID NO: 3026935 - RNA, 21 nt, Human
uucagacagcugccugggauc

SEQ ID NO: 3026936 - RNA, 13 nt, Human
uuccucauuagca

SEQ ID NO: 3026937 - RNA, 22 nt, Human
uucccuuugacgccaucccagc

SEQ ID NO: 3026938 - RNA, 21 nt, Human
uucccuuugacgccaucccag

SEQ ID NO: 3026939 - RNA, 20 nt, Human
uucccuuugacgccauccca

SEQ ID NO: 3026940 - RNA, 14 nt, Human
uuccuggcacugcu

SEQ ID NO: 3026941 - RNA, 17 nt, Human
uuccugccaggcauggu

SEQ ID NO: 3026942 - RNA, 15 nt, Human
uuccugaugcuucuu

SEQ ID NO: 3026943 - RNA, 19 nt, Human
uuccugaugcuucuucaga

SEQ ID NO: 3026944 - RNA, 18 nt, Human
uuccugaugcuucuucag

SEQ ID NO: 3026945 - RNA, 17 nt, Human
uucuaaagcugccagcc

SEQ ID NO: 3026946 - RNA, 13 nt, Human
uucuaaagcugcc

SEQ ID NO: 3026947 - RNA, 20 nt, Human
uucgggaggucgaggcagga

SEQ ID NO: 3026948 - RNA, 15 nt, Human
uuccaaauucugcuu

SEQ ID NO: 3026949 - RNA, 21 nt, Human
uucaucuugaauuguaaggaa

SEQ ID NO: 3026950 - RNA, 17 nt, Human
uucaucuugaauuguaa

SEQ ID NO: 3026951 - RNA, 13 nt, Human
uucaggaagcuca

SEQ ID NO: 3026952 - RNA, 11 nt, Human
uucaggaagcu

SEQ ID NO: 3026953 - RNA, 15 nt, Human
uucauuuccuguguc

SEQ ID NO: 3026954 - RNA, 16 nt, Human
uucauuuccugugucu

SEQ ID NO: 3026955 - RNA, 16 nt, Human
uuccccaggaggccag

SEQ ID NO: 3026956 - RNA, 15 nt, Human
uuccccaggaggcca

SEQ ID NO: 3026957 - RNA, 16 nt, Human
uucccauuugcuccuu

SEQ ID NO: 3026958 - RNA, 11 nt, Human
uucccucccuu

SEQ ID NO: 3026959 - RNA, 17 nt, Human
uucccucccuuccucuu

SEQ ID NO: 3026960 - RNA, 20 nt, Human
uucccucccuuccucuuucc

SEQ ID NO: 3026961 - RNA, 21 nt, Human
uuccccaggaggccagccuug

SEQ ID NO: 3026962 - RNA, 20 nt, Human
uuccccaggaggccagccuu

SEQ ID NO: 3026963 - RNA, 19 nt, Human
uuccccaggaggccagccu

SEQ ID NO: 3026964 - RNA, 18 nt, Human
uuccccaggaggccagcc

SEQ ID NO: 3026965 - RNA, 17 nt, Human
uuccccaggaggccagc

SEQ ID NO: 3026966 - RNA, 13 nt, Human
uuacuuuaaacua

SEQ ID NO: 3026967 - RNA, 17 nt, Human
uuacuuuaaaaggagcc

SEQ ID NO: 3026968 - RNA, 18 nt, Human
uuacuuuaaaaggagcca

SEQ ID NO: 3026969 - RNA, 14 nt, Human
uuacuuuguguuca

SEQ ID NO: 3026970 - RNA, 15 nt, Human
uuagacagucccugc

SEQ ID NO: 3026971 - RNA, 19 nt, Human
uuagacccucaugcugcca

SEQ ID NO: 3026972 - RNA, 20 nt, Human
uuagacccucaugcugccaa

SEQ ID NO: 3026973 - RNA, 14 nt, Human
uuagacagucccug

SEQ ID NO: 3026974 - RNA, 18 nt, Human
uuagacagucccugccaa

SEQ ID NO: 3026975 - RNA, 17 nt, Human
uuagacagucccugcca

SEQ ID NO: 3026976 - RNA, 16 nt, Human
uuagacagucccugcc

SEQ ID NO: 3026977 - RNA, 21 nt, Human
uuacuuaaaccgccaaggcug

SEQ ID NO: 3026978 - RNA, 18 nt, Human
uuacuuagguguggggga

SEQ ID NO: 3026979 - RNA, 11 nt, Human
uuacuucugcu

SEQ ID NO: 3026980 - RNA, 12 nt, Human
uuacuucugcua

SEQ ID NO: 3026981 - RNA, 23 nt, Human
uuacuucuuauacauuugauaaa

SEQ ID NO: 3026982 - RNA, 13 nt, Human
uuacuaaguuuuu

SEQ ID NO: 3026983 - RNA, 14 nt, Human
uuacuaaguuuuua

SEQ ID NO: 3026984 - RNA, 16 nt, Human
uuacuaauagacaauu

SEQ ID NO: 3026985 - RNA, 20 nt, Human
uuaggagaagucuucuauuu

SEQ ID NO: 3026986 - RNA, 23 nt, Human
uuaguagagguacacuugugaau

SEQ ID NO: 3026987 - RNA, 22 nt, Human
uuaguagagguacacuugugaa

SEQ ID NO: 3026988 - RNA, 17 nt, Human
uuaguagagacaggguu

SEQ ID NO: 3026989 - RNA, 18 nt, Human
uuaguaugaggcauuugu

SEQ ID NO: 3026990 - RNA, 16 nt, Human
uuaguaugaggcauuu

SEQ ID NO: 3026991 - RNA, 14 nt, Human
uuagaguugauacu

SEQ ID NO: 3026992 - RNA, 22 nt, Human
uuagauaauacaccacuacauu

SEQ ID NO: 3026993 - RNA, 14 nt, Human
uuagcggagacgga

SEQ ID NO: 3026994 - RNA, 19 nt, Human
uuaaugguaguuuuacagu

SEQ ID NO: 3026995 - RNA, 21 nt, Human
uuacaagcgugagccacugca

SEQ ID NO: 3026996 - RNA, 20 nt, Human
uuacaagcgugagccacugc

SEQ ID NO: 3026997 - RNA, 17 nt, Human
uuaagcuguuacugucu

SEQ ID NO: 3026998 - RNA, 18 nt, Human
uuaauauugauaugcuua

SEQ ID NO: 3026999 - RNA, 22 nt, Human
uuaauauugauaugcuuauaca

SEQ ID NO: 3027000 - RNA, 17 nt, Human
uuaaccacuucagcuga

SEQ ID NO: 3027001 - RNA, 16 nt, Human
uuaacuuuuauaaacu

SEQ ID NO: 3027002 - RNA, 17 nt, Human
uuaacuuuuauaaacuu

SEQ ID NO: 3027003 - RNA, 15 nt, Human
uuaacuuuuauaaac

SEQ ID NO: 3027004 - RNA, 16 nt, Human
uuaacuucacauauug

SEQ ID NO: 3027005 - RNA, 21 nt, Human
uuaaacucugagugcaaacuu

SEQ ID NO: 3027006 - RNA, 21 nt, Human
uuaaaauaccagccaguaaau

SEQ ID NO: 3027007 - RNA, 22 nt, Human
uguuuuaagaggcagggucuca

SEQ ID NO: 3027008 - RNA, 18 nt, Human
uguuuuaaggaugcuugu

SEQ ID NO: 3027009 - RNA, 14 nt, Human
uuaaaagauacagu

SEQ ID NO: 3027010 - RNA, 17 nt, Human
uuaaaagauacaguuac

SEQ ID NO: 3027011 - RNA, 19 nt, Human
uguuuggggaugagaaagg

SEQ ID NO: 3027012 - RNA, 23 nt, Human
uguuuccuggcacugcuuccagu

SEQ ID NO: 3027013 - RNA, 13 nt, Human
uguuugugauuga

SEQ ID NO: 3027014 - RNA, 20 nt, Human
uguuuuaagaggcagggucu

SEQ ID NO: 3027015 - RNA, 15 nt, Human
uguuucaaacuuuac

SEQ ID NO: 3027016 - RNA, 16 nt, Human
uguuuagauaauacac

SEQ ID NO: 3027017 - RNA, 15 nt, Human
ugguauuugaaacac

SEQ ID NO: 3027018 - RNA, 18 nt, Human
ugguaugaucacggcuca

SEQ ID NO: 3027019 - RNA, 14 nt, Human
uggucaacauuucu

SEQ ID NO: 3027020 - RNA, 13 nt, Human
uggucccacucag

SEQ ID NO: 3027021 - RNA, 14 nt, Human
uggucccccuucca

SEQ ID NO: 3027022 - RNA, 19 nt, Human
ugguccuaaucuucugaac

SEQ ID NO: 3027023 - RNA, 17 nt, Human
ugguccuaaucuucuga

SEQ ID NO: 3027024 - RNA, 23 nt, Human
ugguccugcugcaguugccaguc

SEQ ID NO: 3027025 - RNA, 15 nt, Human
ugguccugcugcagu

SEQ ID NO: 3027026 - RNA, 13 nt, Human
ugguccugcugca

SEQ ID NO: 3027027 - RNA, 23 nt, Human
uggucccccuuccauggacuuug

SEQ ID NO: 3027028 - RNA, 18 nt, Human
uggucccccuuccaugga

SEQ ID NO: 3027029 - RNA, 16 nt, Human
uggucccccuuccaug

SEQ ID NO: 3027030 - RNA, 15 nt, Human
uggucccccuuccau

SEQ ID NO: 3027031 - RNA, 16 nt, Human
uggugauuuagcagga

SEQ ID NO: 3027032 - RNA, 22 nt, Human
uggugauuuagcaggaagcugu

SEQ ID NO: 3027033 - RNA, 20 nt, Human
uggugcaaugaccuuucaau

SEQ ID NO: 3027034 - RNA, 21 nt, Human
uggugcaaugaccuuucaaua

SEQ ID NO: 3027035 - RNA, 15 nt, Human
uggugaccucugccu

SEQ ID NO: 3027036 - RNA, 16 nt, Human
uggugaccucugccug

SEQ ID NO: 3027037 - RNA, 17 nt, Human
uggugaccucugccuga

SEQ ID NO: 3027038 - RNA, 22 nt, Human
uggugaccucugccugaaguca

SEQ ID NO: 3027039 - RNA, 19 nt, Human
uggugacuuuccucuuugg

SEQ ID NO: 3027040 - RNA, 14 nt, Human
uggucggaaaacau

SEQ ID NO: 3027041 - RNA, 17 nt, Human
uggucggaaaacaugcu

SEQ ID NO: 3027042 - RNA, 13 nt, Human
uggugaccucugc

SEQ ID NO: 3027043 - RNA, 14 nt, Human
uggugaccucugcc

SEQ ID NO: 3027044 - RNA, 19 nt, Human
uggucuacacugugcugag

SEQ ID NO: 3027045 - RNA, 18 nt, Human
uggucuacacugugcuga

SEQ ID NO: 3027046 - RNA, 17 nt, Human
uggucuacacugugcug

SEQ ID NO: 3027047 - RNA, 16 nt, Human
uggucuacacugugcu

SEQ ID NO: 3027048 - RNA, 15 nt, Human
uggucuacacugugc

SEQ ID NO: 3027049 - RNA, 14 nt, Human
uggguauagauguu

SEQ ID NO: 3027050 - RNA, 18 nt, Human
uggguauagauguugcua

SEQ ID NO: 3027051 - RNA, 17 nt, Human
uggguacuuguggacac

SEQ ID NO: 3027052 - RNA, 18 nt, Human
uggguacuuguggacaca

SEQ ID NO: 3027053 - RNA, 16 nt, Human
ugggggaguggccaca

SEQ ID NO: 3027054 - RNA, 22 nt, Human
ugggcuucauccuccucagauc

SEQ ID NO: 3027055 - RNA, 15 nt, Human
uggggaugagaaagg

SEQ ID NO: 3027056 - RNA, 23 nt, Human
uggggaugagaaagguugaagca

SEQ ID NO: 3027057 - RNA, 20 nt, Human
uggggccaguuggucccccu

SEQ ID NO: 3027058 - RNA, 16 nt, Human
ugggagugggcccaau

SEQ ID NO: 3027059 - RNA, 14 nt, Human
ugggagugggccca

SEQ ID NO: 3027060 - RNA, 20 nt, Human
uggcugggggccucagugcc

SEQ ID NO: 3027061 - RNA, 16 nt, Human
uggcugggggccucag

SEQ ID NO: 3027062 - RNA, 17 nt, Human
uggcugggggccucagu

SEQ ID NO: 3027063 - RNA, 13 nt, Human
ugggauccuccag

SEQ ID NO: 3027064 - RNA, 12 nt, Human
ugggauccucca

SEQ ID NO: 3027065 - RNA, 22 nt, Human
ugggauuacaagcgugagccac

SEQ ID NO: 3027066 - RNA, 18 nt, Human
ugggcagagcagagacca

SEQ ID NO: 3027067 - RNA, 22 nt, Human
ugggcagagcagagaccauccc

SEQ ID NO: 3027068 - RNA, 14 nt, Human
ugggccuggcuccc

SEQ ID NO: 3027069 - RNA, 23 nt, Human
ugggcagagcagagaccaucccu

SEQ ID NO: 3027070 - RNA, 19 nt, Human
uggaucuguauguguucua

SEQ ID NO: 3027071 - RNA, 23 nt, Human
uggaggaaggaaacccagcucug

SEQ ID NO: 3027072 - RNA, 21 nt, Human
uggaggaaggaaacccagcuc

SEQ ID NO: 3027073 - RNA, 16 nt, Human
uggcaaaaaggcagga

SEQ ID NO: 3027074 - RNA, 12 nt, Human
uggcaaaaaggc

SEQ ID NO: 3027075 - RNA, 15 nt, Human
uggcacuauaaugua

SEQ ID NO: 3027076 - RNA, 16 nt, Human
uggcacuauaauguaa

SEQ ID NO: 3027077 - RNA, 23 nt, Human
uggacaggcauguucucugagga

SEQ ID NO: 3027078 - RNA, 11 nt, Human
uggcugcuuca

SEQ ID NO: 3027079 - RNA, 15 nt, Human
uggcugggggccuca

SEQ ID NO: 3027080 - RNA, 15 nt, Human
uggcugcuucaagga

SEQ ID NO: 3027081 - RNA, 23 nt, Human
uggccucccaacucaccccagcc

SEQ ID NO: 3027082 - RNA, 23 nt, Human
uggcgcagcauauucaggaagcu

SEQ ID NO: 3027083 - RNA, 22 nt, Human
uggcgcagcauauucaggaagc

SEQ ID NO: 3027084 - RNA, 16 nt, Human
uggcgcugccccuggc

SEQ ID NO: 3027085 - RNA, 23 nt, Human
uggcgcugccccuggcagccccu

SEQ ID NO: 3027086 - RNA, 15 nt, Human
uggcgcugccccugg

SEQ ID NO: 3027087 - RNA, 14 nt, Human
uggccccugcccgg

SEQ ID NO: 3027088 - RNA, 15 nt, Human
uggccccugcccggc

SEQ ID NO: 3027089 - RNA, 16 nt, Human
uggccccugcccggcu

SEQ ID NO: 3027090 - RNA, 13 nt, Human
uggccaggcuggu

SEQ ID NO: 3027091 - RNA, 17 nt, Human
uggccagaugcaccagc

SEQ ID NO: 3027092 - RNA, 18 nt, Human
uggccagaugcaccagcc

SEQ ID NO: 3027093 - RNA, 19 nt, Human
uggcagaguugaagacaga

SEQ ID NO: 3027094 - RNA, 17 nt, Human
uggcagaguugaagaca

SEQ ID NO: 3027095 - RNA, 21 nt, Human
uggcagaguggauucuugaac

SEQ ID NO: 3027096 - RNA, 15 nt, Human
uggcagaguugaaga

SEQ ID NO: 3027097 - RNA, 19 nt, Human
uggccagaugcaccagccc

SEQ ID NO: 3027098 - RNA, 16 nt, Human
ugcagggacagagcau

SEQ ID NO: 3027099 - RNA, 13 nt, Human
ugcagggaguccg

SEQ ID NO: 3027100 - RNA, 20 nt, Human
ugcaguggugcgaucugggu

SEQ ID NO: 3027101 - RNA, 21 nt, Human
ugcaguggugcgaucuggguu

SEQ ID NO: 3027102 - RNA, 21 nt, Human
ugcaguuacacuaaaagguga

SEQ ID NO: 3027103 - RNA, 23 nt, Human
ugcauauugcauacuauuaaaca

SEQ ID NO: 3027104 - RNA, 15 nt, Human
ugcauauugcauacu

SEQ ID NO: 3027105 - RNA, 19 nt, Human
ugcaucaagaugugacaug

SEQ ID NO: 3027106 - RNA, 16 nt, Human
ugcaguugccagucac

SEQ ID NO: 3027107 - RNA, 20 nt, Human
ugccacccuggggagaaagu

SEQ ID NO: 3027108 - RNA, 14 nt, Human
ugccaggcauggug

SEQ ID NO: 3027109 - RNA, 10 nt, Human
ugccaggcau

SEQ ID NO: 3027110 - RNA, 22 nt, Human
ugccaggaagccagcaggcucu

SEQ ID NO: 3027111 - RNA, 20 nt, Human
ugccaggaagccagcaggcu

SEQ ID NO: 3027112 - RNA, 23 nt, Human
ugcauuuggugguuucagaaaug

SEQ ID NO: 3027113 - RNA, 21 nt, Human
ugcauuuggugguuucagaaa

SEQ ID NO: 3027114 - RNA, 16 nt, Human
ugccccuggcagcccc

SEQ ID NO: 3027115 - RNA, 12 nt, Human
ugcccggcugcg

SEQ ID NO: 3027116 - RNA, 14 nt, Human
ugcccggcugcgga

SEQ ID NO: 3027117 - RNA, 18 nt, Human
ugcccaggcuggcgugca

SEQ ID NO: 3027118 - RNA, 19 nt, Human
ugcccaggcuggcgugcag

SEQ ID NO: 3027119 - RNA, 13 nt, Human
ugcccaggcuggc

SEQ ID NO: 3027120 - RNA, 20 nt, Human
ugcccaggcuggcgugcagu

SEQ ID NO: 3027121 - RNA, 14 nt, Human
ugcccugcccaccu

SEQ ID NO: 3027122 - RNA, 15 nt, Human
ugcccugcccaccug

SEQ ID NO: 3027123 - RNA, 20 nt, Human
ugcccugcccaccuggccuc

SEQ ID NO: 3027124 - RNA, 16 nt, Human
ugcccugcccaccugg

SEQ ID NO: 3027125 - RNA, 14 nt, Human
ugccucaagagaag

SEQ ID NO: 3027126 - RNA, 15 nt, Human
ugccucaagagaagg

SEQ ID NO: 3027127 - RNA, 21 nt, Human
ugcugccaauauccuaauaaa

SEQ ID NO: 3027128 - RNA, 15 nt, Human
ugcugccaauauccu

SEQ ID NO: 3027129 - RNA, 14 nt, Human
ugcugcauuuaaaa

SEQ ID NO: 3027130 - RNA, 23 nt, Human
ugcugcauuuaaaagauacaguu

SEQ ID NO: 3027131 - RNA, 16 nt, Human
ugcugccaauauccua

SEQ ID NO: 3027132 - RNA, 17 nt, Human
ugcugccaauauccuaa

SEQ ID NO: 3027133 - RNA, 18 nt, Human
ugcugccaauauccuaau

SEQ ID NO: 3027134 - RNA, 19 nt, Human
ugcugccaauauccuaaua

SEQ ID NO: 3027135 - RNA, 17 nt, Human
ugcugcauuuaaaagau

SEQ ID NO: 3027136 - RNA, 18 nt, Human
ugcugcauuuaaaagaua

SEQ ID NO: 3027137 - RNA, 19 nt, Human
ugcugcauuuaaaagauac

SEQ ID NO: 3027138 - RNA, 12 nt, Human
ugcugcuugagg

SEQ ID NO: 3027139 - RNA, 20 nt, Human
ugcugggauuacagguguga

SEQ ID NO: 3027140 - RNA, 19 nt, Human
ugcugcuugaggcaacuca

SEQ ID NO: 3027141 - RNA, 21 nt, Human
ugcuguucacuggacacuuca

SEQ ID NO: 3027142 - RNA, 13 nt, Human
ugcuggguguggc

SEQ ID NO: 3027143 - RNA, 17 nt, Human
ugcugggcuugucugua

SEQ ID NO: 3027144 - RNA, 21 nt, Human
ugcuacuguccuacccacccu

SEQ ID NO: 3027145 - RNA, 22 nt, Human
ugcuacuguccuacccacccuc

SEQ ID NO: 3027146 - RNA, 23 nt, Human
ugcucuccgaccagacaccuuga

SEQ ID NO: 3027147 - RNA, 17 nt, Human
ugcucacauaucuguca

SEQ ID NO: 3027148 - RNA, 22 nt, Human
ugcuaggaacacuccuucacag

SEQ ID NO: 3027149 - RNA, 20 nt, Human
ugcuaggaacacuccuucac

SEQ ID NO: 3027150 - RNA, 21 nt, Human
ugcuaggaacacuccuucaca

SEQ ID NO: 3027151 - RNA, 17 nt, Human
ugauugggcacaucauu

SEQ ID NO: 3027152 - RNA, 21 nt, Human
ugauugggcacaucauuucaa

SEQ ID NO: 3027153 - RNA, 20 nt, Human
ugauugggcacaucauuuca

SEQ ID NO: 3027154 - RNA, 18 nt, Human
ugauugggcacaucauuu

SEQ ID NO: 3027155 - RNA, 21 nt, Human
ugauuggaggggggagguggg

SEQ ID NO: 3027156 - RNA, 13 nt, Human
ugauuggaggggg

SEQ ID NO: 3027157 - RNA, 23 nt, Human
ugauugggcacaucauuucaaga

SEQ ID NO: 3027158 - RNA, 17 nt, Human
ugauuuaaacacauuaa

SEQ ID NO: 3027159 - RNA, 16 nt, Human
ugauuuaaacacauua

SEQ ID NO: 3027160 - RNA, 18 nt, Human
ugauuuaaacacauuaaa

SEQ ID NO: 3027161 - RNA, 15 nt, Human
ugauuuaaacacauu

SEQ ID NO: 3027162 - RNA, 16 nt, Human
ugauugugucucuugg

SEQ ID NO: 3027163 - RNA, 17 nt, Human
ugauugccuuuuuauaa

SEQ ID NO: 3027164 - RNA, 22 nt, Human
ugauugccuuuuuauaacuuuu

SEQ ID NO: 3027165 - RNA, 21 nt, Human
ugauucuccugccucagccuc

SEQ ID NO: 3027166 - RNA, 23 nt, Human
ugauucagacagcugccugggau

SEQ ID NO: 3027167 - RNA, 21 nt, Human
ugauucagacagcugccuggg

SEQ ID NO: 3027168 - RNA, 20 nt, Human
ugauucagacagcugccugg

SEQ ID NO: 3027169 - RNA, 19 nt, Human
ugauucagacagcugccug

SEQ ID NO: 3027170 - RNA, 18 nt, Human
ugauucagacagcugccu

SEQ ID NO: 3027171 - RNA, 16 nt, Human
ugauucagacagcugc

SEQ ID NO: 3027172 - RNA, 15 nt, Human
ugauucagacagcug

SEQ ID NO: 3027173 - RNA, 14 nt, Human
ugauucagacagcu

SEQ ID NO: 3027174 - RNA, 13 nt, Human
ugauucagacagc

SEQ ID NO: 3027175 - RNA, 20 nt, Human
ugauucaacagguuuuccug

SEQ ID NO: 3027176 - RNA, 20 nt, Human
ugauguucuuucacccuuuu

SEQ ID NO: 3027177 - RNA, 14 nt, Human
ugauagcacagacc

SEQ ID NO: 3027178 - RNA, 13 nt, Human
ugauagcacagac

SEQ ID NO: 3027179 - RNA, 13 nt, Human
ugauccaagcugg

SEQ ID NO: 3027180 - RNA, 14 nt, Human
ugauccaagcuggu

SEQ ID NO: 3027181 - RNA, 15 nt, Human
ugauccaagcugguc

SEQ ID NO: 3027182 - RNA, 16 nt, Human
ugauccacccaccuca

SEQ ID NO: 3027183 - RNA, 17 nt, Human
ugauccacccaccucag

SEQ ID NO: 3027184 - RNA, 18 nt, Human
ugauccacccaccucagc

SEQ ID NO: 3027185 - RNA, 19 nt, Human
ugauccacccaccucagcc

SEQ ID NO: 3027186 - RNA, 20 nt, Human
ugaucuucuuuauaauucua

SEQ ID NO: 3027187 - RNA, 16 nt, Human
ugaucuuugcagacag

SEQ ID NO: 3027188 - RNA, 16 nt, Human
ugauguguuaucucuu

SEQ ID NO: 3027189 - RNA, 17 nt, Human
ugaugcuucuucagaga

SEQ ID NO: 3027190 - RNA, 16 nt, Human
ugaugcuucuucagag

SEQ ID NO: 3027191 - RNA, 14 nt, Human
ugagugagcaugcc

SEQ ID NO: 3027192 - RNA, 20 nt, Human
ugaguugauagcacagaccc

SEQ ID NO: 3027193 - RNA, 16 nt, Human
ugaguugauagcacag

SEQ ID NO: 3027194 - RNA, 19 nt, Human
ugaguccagaaguuugaga

SEQ ID NO: 3027195 - RNA, 13 nt, Human
ugaguccagaagu

SEQ ID NO: 3027196 - RNA, 18 nt, Human
ugagucgaggacagggag

SEQ ID NO: 3027197 - RNA, 19 nt, Human
ugagucgaggacagggagg

SEQ ID NO: 3027198 - RNA, 18 nt, Human
ugagucugaaggcugggu

SEQ ID NO: 3027199 - RNA, 17 nt, Human
ugagucugaaggcuggg

SEQ ID NO: 3027200 - RNA, 15 nt, Human
ugagucugaaggcug

SEQ ID NO: 3027201 - RNA, 13 nt, Human
ugagucugaaggc

SEQ ID NO: 3027202 - RNA, 13 nt, Human
ugagcugggauga

SEQ ID NO: 3027203 - RNA, 12 nt, Human
ugaggcauuugu

SEQ ID NO: 3027204 - RNA, 19 nt, Human
ugaggcauuuguuugaacu

SEQ ID NO: 3027205 - RNA, 20 nt, Human
ugaggcauuuguuugaacug

SEQ ID NO: 3027206 - RNA, 23 nt, Human
ugaggcuagugugguguuuccug

SEQ ID NO: 3027207 - RNA, 17 nt, Human
ugaggcuaguguggugu

SEQ ID NO: 3027208 - RNA, 21 nt, Human
ugaggcauuuguuugaacuga

SEQ ID NO: 3027209 - RNA, 13 nt, Human
ugaggugggagga

SEQ ID NO: 3027210 - RNA, 12 nt, Human
ugaggugggagg

SEQ ID NO: 3027211 - RNA, 17 nt, Human
ugagggaacagagaggu

SEQ ID NO: 3027212 - RNA, 14 nt, Human
ugaggcucugcccu

SEQ ID NO: 3027213 - RNA, 13 nt, Human
ugaggcucugccc

SEQ ID NO: 3027214 - RNA, 22 nt, Human
ugagccucagcauccuggcacc

SEQ ID NO: 3027215 - RNA, 18 nt, Human
ugagccucagcauccugg

SEQ ID NO: 3027216 - RNA, 21 nt, Human
ugagccucagcauccuggcac

SEQ ID NO: 3027217 - RNA, 19 nt, Human
ugagccgagaucacgccac

SEQ ID NO: 3027218 - RNA, 21 nt, Human
ugagccgagaucacgccacug

SEQ ID NO: 3027219 - RNA, 17 nt, Human
ugagccucagcauccug

SEQ ID NO: 3027220 - RNA, 19 nt, Human
ugagcagggcucagcgggg

SEQ ID NO: 3027221 - RNA, 16 nt, Human
ugagcagggcucagcg

SEQ ID NO: 3027222 - RNA, 17 nt, Human
ugagcagggcucagcgg

SEQ ID NO: 3027223 - RNA, 16 nt, Human
ugagcaucaggccagg

SEQ ID NO: 3027224 - RNA, 20 nt, Human
ugagcaucaggccaggcccu

SEQ ID NO: 3027225 - RNA, 19 nt, Human
ugagcaucaggccaggccc

SEQ ID NO: 3027226 - RNA, 18 nt, Human
ugagcaucaggccaggcc

SEQ ID NO: 3027227 - RNA, 19 nt, Human
ugagacucgcgacaaugca

SEQ ID NO: 3027228 - RNA, 20 nt, Human
ugaccucaggugauccaccc

SEQ ID NO: 3027229 - RNA, 21 nt, Human
ugaccucaggugauccaccca

SEQ ID NO: 3027230 - RNA, 12 nt, Human
ugagcagggcuc

SEQ ID NO: 3027231 - RNA, 13 nt, Human
ugagcagggcuca

SEQ ID NO: 3027232 - RNA, 14 nt, Human
ugagcagggcucag

SEQ ID NO: 3027233 - RNA, 15 nt, Human
ugagcagggcucagc

SEQ ID NO: 3027234 - RNA, 14 nt, Human
ugagaucagccugg

SEQ ID NO: 3027235 - RNA, 15 nt, Human
ugagaucaaaacggu

SEQ ID NO: 3027236 - RNA, 23 nt, Human
ugagacucgcgacaaugcaaacc

SEQ ID NO: 3027237 - RNA, 22 nt, Human
ugagacucgcgacaaugcaaac

SEQ ID NO: 3027238 - RNA, 21 nt, Human
ugagacucgcgacaaugcaaa

SEQ ID NO: 3027239 - RNA, 20 nt, Human
ugagacucgcgacaaugcaa

SEQ ID NO: 3027240 - RNA, 17 nt, Human
ugaacaguaacauagcu

SEQ ID NO: 3027241 - RNA, 22 nt, Human
ugaaccaagaacuuuccaggaa

SEQ ID NO: 3027242 - RNA, 23 nt, Human
ugaaccacaucuugcucugcuga

SEQ ID NO: 3027243 - RNA, 17 nt, Human
ugaaccaccacacccag

SEQ ID NO: 3027244 - RNA, 20 nt, Human
ugaaccaccacacccagccc

SEQ ID NO: 3027245 - RNA, 16 nt, Human
ugaacuccuggccuca

SEQ ID NO: 3027246 - RNA, 13 nt, Human
ugaaaugucaacc

SEQ ID NO: 3027247 - RNA, 13 nt, Human
ugaaagggcccag

SEQ ID NO: 3027248 - RNA, 23 nt, Human
ugaaagggaguauuacaaaaaca

SEQ ID NO: 3027249 - RNA, 18 nt, Human
ugaaagggcccagagagg

SEQ ID NO: 3027250 - RNA, 18 nt, Human
ugaaagcccugagcuuuc

SEQ ID NO: 3027251 - RNA, 19 nt, Human
ugaaaauuuugauguuuua

SEQ ID NO: 3027252 - RNA, 21 nt, Human
ugaaaauuuugauguuuuaag

SEQ ID NO: 3027253 - RNA, 13 nt, Human
ugaaaauuuugau

SEQ ID NO: 3027254 - RNA, 14 nt, Human
ugaaacauuuuguc

SEQ ID NO: 3027255 - RNA, 23 nt, Human
ucuuucacccuuuucuguuugcu

SEQ ID NO: 3027256 - RNA, 21 nt, Human
ucuuguguguuuauugucaaa

SEQ ID NO: 3027257 - RNA, 16 nt, Human
ucuuguguguuuauug

SEQ ID NO: 3027258 - RNA, 23 nt, Human
ucuugcaauggcagccuuggcaa

SEQ ID NO: 3027259 - RNA, 20 nt, Human
ucuccucugcugcuggcugg

SEQ ID NO: 3027260 - RNA, 16 nt, Human
ucucccuucauccuuc

SEQ ID NO: 3027261 - RNA, 17 nt, Human
ucuuuggacacucacac

SEQ ID NO: 3027262 - RNA, 13 nt, Human
ucuuuccaaagua

SEQ ID NO: 3027263 - RNA, 14 nt, Human
ucuuuccaaaguac

SEQ ID NO: 3027264 - RNA, 21 nt, Human
ucuuucagccaagaauucuua

SEQ ID NO: 3027265 - RNA, 20 nt, Human
ucuuucagccaagaauucuu

SEQ ID NO: 3027266 - RNA, 19 nt, Human
ucuuucagccaagaauucu

SEQ ID NO: 3027267 - RNA, 16 nt, Human
ucuuucagccaagaau

SEQ ID NO: 3027268 - RNA, 17 nt, Human
ugaaggccccgcccagg

SEQ ID NO: 3027269 - RNA, 17 nt, Human
ugaacuccuggccucaa

SEQ ID NO: 3027270 - RNA, 16 nt, Human
ugaaggccccgcccag

SEQ ID NO: 3027271 - RNA, 15 nt, Human
ugaaggccccgccca

SEQ ID NO: 3027272 - RNA, 22 nt, Human
ugaaggacauugcggacagcca

SEQ ID NO: 3027273 - RNA, 19 nt, Human
ugaaggacauugcggacag

SEQ ID NO: 3027274 - RNA, 20 nt, Human
ugaaggacauugcggacagc

SEQ ID NO: 3027275 - RNA, 16 nt, Human
ugaccauucuccaccu

SEQ ID NO: 3027276 - RNA, 18 nt, Human
ugaccauucuccaccugc

SEQ ID NO: 3027277 - RNA, 17 nt, Human
ugaccauucuccaccug

SEQ ID NO: 3027278 - RNA, 20 nt, Human
ugaccgugaggccagagaca

SEQ ID NO: 3027279 - RNA, 16 nt, Human
ugaccgugaggccaga

SEQ ID NO: 3027280 - RNA, 14 nt, Human
ugaccgugaggcca

SEQ ID NO: 3027281 - RNA, 13 nt, Human
ugaccgugaggcc

SEQ ID NO: 3027282 - RNA, 13 nt, Human
ugacaugucuuuu

SEQ ID NO: 3027283 - RNA, 15 nt, Human
ugacaugucuuuucu

SEQ ID NO: 3027284 - RNA, 19 nt, Human
ugaccagcaccaucucucc

SEQ ID NO: 3027285 - RNA, 19 nt, Human
ugacagagugagacucugu

SEQ ID NO: 3027286 - RNA, 18 nt, Human
ugacagaggcagccccau

SEQ ID NO: 3027287 - RNA, 23 nt, Human
ugacagaggcagccccauucugc

SEQ ID NO: 3027288 - RNA, 14 nt, Human
ugacagagugagac

SEQ ID NO: 3027289 - RNA, 17 nt, Human
ugacagagugagacucu

SEQ ID NO: 3027290 - RNA, 13 nt, Human
ugacagaggcagc

SEQ ID NO: 3027291 - RNA, 20 nt, Human
ugacagacacaggcccggcu

SEQ ID NO: 3027292 - RNA, 23 nt, Human
ugacagacacaggcccggcucca

SEQ ID NO: 3027293 - RNA, 14 nt, Human
ugacagaggcagcc

SEQ ID NO: 3027294 - RNA, 15 nt, Human
ugacagaggcagccc

SEQ ID NO: 3027295 - RNA, 16 nt, Human
ugacagaggcagcccc

SEQ ID NO: 3027296 - RNA, 17 nt, Human
ugacagaggcagcccca

SEQ ID NO: 3027297 - RNA, 18 nt, Human
ugacaaggauugcuacug

SEQ ID NO: 3027298 - RNA, 22 nt, Human
uccugucggagcccugucuccu

SEQ ID NO: 3027299 - RNA, 22 nt, Human
uccuguaccucuugagccuuga

SEQ ID NO: 3027300 - RNA, 11 nt, Human
uccuguagccc

SEQ ID NO: 3027301 - RNA, 13 nt, Human
uccuguagcccua

SEQ ID NO: 3027302 - RNA, 23 nt, Human
uccuggcacccggccccugcugg

SEQ ID NO: 3027303 - RNA, 22 nt, Human
uccuggcacccggccccugcug

SEQ ID NO: 3027304 - RNA, 16 nt, Human
uccuggcacugcuucc

SEQ ID NO: 3027305 - RNA, 13 nt, Human
uccuggcacugcu

SEQ ID NO: 3027306 - RNA, 12 nt, Human
uccuggccucaa

SEQ ID NO: 3027307 - RNA, 20 nt, Human
uccugcccuuaccugccagg

SEQ ID NO: 3027308 - RNA, 17 nt, Human
uccugcccuuaccugcc

SEQ ID NO: 3027309 - RNA, 14 nt, Human
uccuggaguucugg

SEQ ID NO: 3027310 - RNA, 21 nt, Human
uccugagccagauuucacucu

SEQ ID NO: 3027311 - RNA, 14 nt, Human
uccugccaggcaug

SEQ ID NO: 3027312 - RNA, 13 nt, Human
uccugccaggcau

SEQ ID NO: 3027313 - RNA, 20 nt, Human
ucccuucacaaacccagugu

SEQ ID NO: 3027314 - RNA, 15 nt, Human
ucccccuuccaugga

SEQ ID NO: 3027315 - RNA, 15 nt, Human
ucccuuccucuuucc

SEQ ID NO: 3027316 - RNA, 16 nt, Human
ucccuuccucuuucca

SEQ ID NO: 3027317 - RNA, 16 nt, Human
ucccuuggacauuuua

SEQ ID NO: 3027318 - RNA, 18 nt, Human
ucccuuggacauuuuaug

SEQ ID NO: 3027319 - RNA, 19 nt, Human
ucccuuggacauuuuaugu

SEQ ID NO: 3027320 - RNA, 21 nt, Human
ucccuuggacauuuuaugucu

SEQ ID NO: 3027321 - RNA, 15 nt, Human
ucccuuggacauuuu

SEQ ID NO: 3027322 - RNA, 14 nt, Human
uccgccucuugggu

SEQ ID NO: 3027323 - RNA, 16 nt, Human
uccgcuuucuacccag

SEQ ID NO: 3027324 - RNA, 18 nt, Human
uccgcuuucuacccagcg

SEQ ID NO: 3027325 - RNA, 20 nt, Human
uccgcuuucuacccagcgag

SEQ ID NO: 3027326 - RNA, 20 nt, Human
uccuaagcuauucaguaaua

SEQ ID NO: 3027327 - RNA, 21 nt, Human
uccuaagcuauucaguaauaa

SEQ ID NO: 3027328 - RNA, 17 nt, Human
uccuagucauucuuccc

SEQ ID NO: 3027329 - RNA, 23 nt, Human
uccuauauuguuuucaguguaca

SEQ ID NO: 3027330 - RNA, 21 nt, Human
uccuauauuguuuucagugua

SEQ ID NO: 3027331 - RNA, 22 nt, Human
uccucauuuuuauaaugucccu

SEQ ID NO: 3027332 - RNA, 18 nt, Human
uccucauuagcauuuugc

SEQ ID NO: 3027333 - RNA, 13 nt, Human
uccuccacauuug

SEQ ID NO: 3027334 - RNA, 16 nt, Human
uccuccacauuuguuu

SEQ ID NO: 3027335 - RNA, 12 nt, Human
uccucccaccuc

SEQ ID NO: 3027336 - RNA, 10 nt, Human
uccuccaggu

SEQ ID NO: 3027337 - RNA, 13 nt, Human
ucgugacaacacu

SEQ ID NO: 3027338 - RNA, 18 nt, Human
ucuaaaggcuaccuuugu

SEQ ID NO: 3027339 - RNA, 17 nt, Human
ucuaaaggcuaccuuug

SEQ ID NO: 3027340 - RNA, 19 nt, Human
ucuaaaggcuaccuuugua

SEQ ID NO: 3027341 - RNA, 20 nt, Human
ucuaaaggcuaccuuuguau

SEQ ID NO: 3027342 - RNA, 21 nt, Human
ucuacacugugcugagucuga

SEQ ID NO: 3027343 - RNA, 15 nt, Human
ucuacagaggccaug

SEQ ID NO: 3027344 - RNA, 14 nt, Human
ucuaccuuccugca

SEQ ID NO: 3027345 - RNA, 16 nt, Human
ucuaggaagacuuugg

SEQ ID NO: 3027346 - RNA, 15 nt, Human
ucuaggaagacuuug

SEQ ID NO: 3027347 - RNA, 19 nt, Human
ucuaggaagacuuuggaaa

SEQ ID NO: 3027348 - RNA, 14 nt, Human
ucuaugacacaugc

SEQ ID NO: 3027349 - RNA, 17 nt, Human
ucuaugacacaugcaag

SEQ ID NO: 3027350 - RNA, 16 nt, Human
ucucauacucaccuca

SEQ ID NO: 3027351 - RNA, 18 nt, Human
ucucauacucaccucacc

SEQ ID NO: 3027352 - RNA, 19 nt, Human
ucuaugggacucaaugcac

SEQ ID NO: 3027353 - RNA, 12 nt, Human
ucuaugggacuc

SEQ ID NO: 3027354 - RNA, 13 nt, Human
ucuaugggacuca

SEQ ID NO: 3027355 - RNA, 13 nt, Human
ucuccacccugcu

SEQ ID NO: 3027356 - RNA, 12 nt, Human
ucuccacccugc

SEQ ID NO: 3027357 - RNA, 17 nt, Human
ucuccacccugcucucc

SEQ ID NO: 3027358 - RNA, 14 nt, Human
ucuccacccugcuc

SEQ ID NO: 3027359 - RNA, 16 nt, Human
ucuccacccugcucuc

SEQ ID NO: 3027360 - RNA, 22 nt, Human
ucuccaccugccagggacagag

SEQ ID NO: 3027361 - RNA, 19 nt, Human
ucuccaccugccagggaca

SEQ ID NO: 3027362 - RNA, 17 nt, Human
ucuccaccugccaggga

SEQ ID NO: 3027363 - RNA, 16 nt, Human
ucuccaccugccaggg

SEQ ID NO: 3027364 - RNA, 15 nt, Human
ucuccaccugccagg

SEQ ID NO: 3027365 - RNA, 14 nt, Human
ucuccaccugccag

SEQ ID NO: 3027366 - RNA, 18 nt, Human
ucucccucagucuggccc

SEQ ID NO: 3027367 - RNA, 23 nt, Human
ucucccucagucuggcccuuccu

SEQ ID NO: 3027368 - RNA, 12 nt, Human
ucucccccagcc

SEQ ID NO: 3027369 - RNA, 15 nt, Human
ucuccagccccugga

SEQ ID NO: 3027370 - RNA, 14 nt, Human
ucuccagccccugg

SEQ ID NO: 3027371 - RNA, 13 nt, Human
ucuccagccccug

SEQ ID NO: 3027372 - RNA, 12 nt, Human
ucuccagccccu

SEQ ID NO: 3027373 - RNA, 18 nt, Human
ucuccagccccuggaugc

SEQ ID NO: 3027374 - RNA, 16 nt, Human
ucuccagccccuggau

SEQ ID NO: 3027375 - RNA, 22 nt, Human
ucuccagccccuggaugcagcc

SEQ ID NO: 3027376 - RNA, 14 nt, Human
ucauccacugugcc

SEQ ID NO: 3027377 - RNA, 17 nt, Human
ucauccacugugccaug

SEQ ID NO: 3027378 - RNA, 19 nt, Human
ucaucuugaauuguaagga

SEQ ID NO: 3027379 - RNA, 14 nt, Human
ucaucauccuaagc

SEQ ID NO: 3027380 - RNA, 20 nt, Human
ucaguguacauggaauaaca

SEQ ID NO: 3027381 - RNA, 13 nt, Human
uccaaaguacacu

SEQ ID NO: 3027382 - RNA, 20 nt, Human
ucagguggggcagcuugagg

SEQ ID NO: 3027383 - RNA, 19 nt, Human
ucagucugauucccaagcu

SEQ ID NO: 3027384 - RNA, 21 nt, Human
ucagucugauucccaagcucu

SEQ ID NO: 3027385 - RNA, 22 nt, Human
ucagucugauucccaagcucug

SEQ ID NO: 3027386 - RNA, 23 nt, Human
ucagucugauucccaagcucugc

SEQ ID NO: 3027387 - RNA, 16 nt, Human
ucaggugauccaccca

SEQ ID NO: 3027388 - RNA, 23 nt, Human
ucaggugagaagcagaggaagga

SEQ ID NO: 3027389 - RNA, 23 nt, Human
ucaggugauccacccaccucagc

SEQ ID NO: 3027390 - RNA, 18 nt, Human
ucagguggggcagcuuga

SEQ ID NO: 3027391 - RNA, 19 nt, Human
ucagguggggcagcuugag

SEQ ID NO: 3027392 - RNA, 21 nt, Human
ucaggccugggggcugggcag

SEQ ID NO: 3027393 - RNA, 23 nt, Human
ucagcuccagcucaccagcccca

SEQ ID NO: 3027394 - RNA, 24 nt, Human
ucagcuccagcucaccagccccag

SEQ ID NO: 3027395 - RNA, 23 nt, Human
ucagcucugcaagaauugaagca

SEQ ID NO: 3027396 - RNA, 23 nt, Human
ucaggaagcucagggccuggcuc

SEQ ID NO: 3027397 - RNA, 15 nt, Human
uccauagagagcaag

SEQ ID NO: 3027398 - RNA, 14 nt, Human
uccauagagagcaa

SEQ ID NO: 3027399 - RNA, 18 nt, Human
uccagguuuaagcuguua

SEQ ID NO: 3027400 - RNA, 20 nt, Human
uccagguuuaagcuguuacu

SEQ ID NO: 3027401 - RNA, 20 nt, Human
uccaggggugggacacccug

SEQ ID NO: 3027402 - RNA, 19 nt, Human
uccaggggugggacacccu

SEQ ID NO: 3027403 - RNA, 15 nt, Human
uccaggagcagccac

SEQ ID NO: 3027404 - RNA, 14 nt, Human
uccaggagcagcca

SEQ ID NO: 3027405 - RNA, 13 nt, Human
uccaggagcagcc

SEQ ID NO: 3027406 - RNA, 12 nt, Human
uccaggagcagc

SEQ ID NO: 3027407 - RNA, 19 nt, Human
uccacuuucuagccagagg

SEQ ID NO: 3027408 - RNA, 21 nt, Human
uccacuuucuagccagaggag

SEQ ID NO: 3027409 - RNA, 20 nt, Human
uccacuuucuagccagagga

SEQ ID NO: 3027410 - RNA, 14 nt, Human
uccaaaguacacug

SEQ ID NO: 3027411 - RNA, 16 nt, Human
uccaaaguacacuguu

SEQ ID NO: 3027412 - RNA, 13 nt, Human
ucccaccuuggcu

SEQ ID NO: 3027413 - RNA, 16 nt, Human
ucccaccuuggcugca

SEQ ID NO: 3027414 - RNA, 17 nt, Human
ucccaccuuggcugcag

SEQ ID NO: 3027415 - RNA, 20 nt, Human
ucccagcugugcucuggaca

SEQ ID NO: 3027416 - RNA, 22 nt, Human
ucccaccucucucacuccuuga

SEQ ID NO: 3027417 - RNA, 20 nt, Human
uccaugugggcuaguugggc

SEQ ID NO: 3027418 - RNA, 24 nt, Human
ucccaggcauuccccaggaggcca

SEQ ID NO: 3027419 - RNA, 23 nt, Human
ucccaggcauuccccaggaggcc

SEQ ID NO: 3027420 - RNA, 23 nt, Human
ucccagcugugcucuggacaggc

SEQ ID NO: 3027421 - RNA, 21 nt, Human
ucccagcugugcucuggacag

SEQ ID NO: 3027422 - RNA, 22 nt, Human
ucccagcugugcucuggacagg

SEQ ID NO: 3027423 - RNA, 15 nt, Human
ucccaucuuccaagg

SEQ ID NO: 3027424 - RNA, 21 nt, Human
ucccaucugugaaaggaaaga

SEQ ID NO: 3027425 - RNA, 18 nt, Human
ucccaugagccucagcau

SEQ ID NO: 3027426 - RNA, 19 nt, Human
ucccaugagccucagcauc

SEQ ID NO: 3027427 - RNA, 14 nt, Human
uccccaggaggcca

SEQ ID NO: 3027428 - RNA, 22 nt, Human
ucccccagccccauccucugua

SEQ ID NO: 3027429 - RNA, 21 nt, Human
ucccccagccccauccucugu

SEQ ID NO: 3027430 - RNA, 20 nt, Human
ucccccagccccauccucug

SEQ ID NO: 3027431 - RNA, 16 nt, Human
uccccaggaggccagc

SEQ ID NO: 3027432 - RNA, 15 nt, Human
uccccaggaggccag

SEQ ID NO: 3027433 - RNA, 17 nt, Human
ucccccagccccauccu

SEQ ID NO: 3027434 - RNA, 13 nt, Human
uccccaggaggcc

SEQ ID NO: 3027435 - RNA, 19 nt, Human
uccccagauugcaacaggc

SEQ ID NO: 3027436 - RNA, 20 nt, Human
uccccagauugcaacaggcu

SEQ ID NO: 3027437 - RNA, 22 nt, Human
uccccagauugcaacaggcugg

SEQ ID NO: 3027438 - RNA, 23 nt, Human
uccccagauugcaacaggcuggg

SEQ ID NO: 3027439 - RNA, 20 nt, Human
uccccagcaagugagagcug

SEQ ID NO: 3027440 - RNA, 21 nt, Human
uccccagcaagugagagcugg

SEQ ID NO: 3027441 - RNA, 22 nt, Human
uccccagcaagugagagcuggg

SEQ ID NO: 3027442 - RNA, 17 nt, Human
ucccaugagccucagca

SEQ ID NO: 3027443 - RNA, 20 nt, Human
ucccaugagccucagcaucc

SEQ ID NO: 3027444 - RNA, 13 nt, Human
uccccagauugca

SEQ ID NO: 3027445 - RNA, 18 nt, Human
uccccagauugcaacagg

SEQ ID NO: 3027446 - RNA, 20 nt, Human
uaugauugccuuuuuauaac

SEQ ID NO: 3027447 - RNA, 23 nt, Human
uaugauugccuuuuuauaacuuu

SEQ ID NO: 3027448 - RNA, 23 nt, Human
uaugacuccagaauuucccaaag

SEQ ID NO: 3027449 - RNA, 17 nt, Human
uaugacuccagaauuuc

SEQ ID NO: 3027450 - RNA, 16 nt, Human
uaugacuccagaauuu

SEQ ID NO: 3027451 - RNA, 13 nt, Human
uaugcacacauuu

SEQ ID NO: 3027452 - RNA, 14 nt, Human
uaugcacacauuuu

SEQ ID NO: 3027453 - RNA, 18 nt, Human
uaugcaaucaaaucugcu

SEQ ID NO: 3027454 - RNA, 13 nt, Human
uaugcaugaagua

SEQ ID NO: 3027455 - RNA, 18 nt, Human
uaugcaugaaguaauaug

SEQ ID NO: 3027456 - RNA, 22 nt, Human
uaugcuuauacacuuacacuuu

SEQ ID NO: 3027457 - RNA, 17 nt, Human
uauggacaaugacccag

SEQ ID NO: 3027458 - RNA, 19 nt, Human
uauggaacacucugagacu

SEQ ID NO: 3027459 - RNA, 18 nt, Human
uauggaacacucugagac

SEQ ID NO: 3027460 - RNA, 17 nt, Human
uauggaacacucugaga

SEQ ID NO: 3027461 - RNA, 16 nt, Human
uauggaacacucugag

SEQ ID NO: 3027462 - RNA, 13 nt, Human
uauggaacacucu

SEQ ID NO: 3027463 - RNA, 18 nt, Human
uaucuguucauauggaua

SEQ ID NO: 3027464 - RNA, 20 nt, Human
uaucugucauuugagcaggg

SEQ ID NO: 3027465 - RNA, 21 nt, Human
uaucugucauuugagcagggc

SEQ ID NO: 3027466 - RNA, 23 nt, Human
uaucugucauuugagcagggcuc

SEQ ID NO: 3027467 - RNA, 12 nt, Human
uaugacacaugc

SEQ ID NO: 3027468 - RNA, 22 nt, Human
uaugacacaugcaaggucauuu

SEQ ID NO: 3027469 - RNA, 19 nt, Human
uauauguuuuaagaggcag

SEQ ID NO: 3027470 - RNA, 16 nt, Human
uaucuaaauguugaaa

SEQ ID NO: 3027471 - RNA, 21 nt, Human
uaucuaauauguaacaagcca

SEQ ID NO: 3027472 - RNA, 11 nt, Human
uagggaaaaac

SEQ ID NO: 3027473 - RNA, 19 nt, Human
uagggaaaaaccagcgugu

SEQ ID NO: 3027474 - RNA, 21 nt, Human
uagggaaaaaccagcguguga

SEQ ID NO: 3027475 - RNA, 20 nt, Human
uagggaaaaaccagcgugug

SEQ ID NO: 3027476 - RNA, 18 nt, Human
uaggccuggccagaugca

SEQ ID NO: 3027477 - RNA, 15 nt, Human
uaggccuggccagau

SEQ ID NO: 3027478 - RNA, 23 nt, Human
uaggugacagagugagacucugu

SEQ ID NO: 3027479 - RNA, 18 nt, Human
uauaaacuuuaccuuuuu

SEQ ID NO: 3027480 - RNA, 20 nt, Human
uauaugcucugcauguuaca

SEQ ID NO: 3027481 - RNA, 21 nt, Human
uauaugcucugcauguuacau

SEQ ID NO: 3027482 - RNA, 13 nt, Human
uauguuaauauuu

SEQ ID NO: 3027483 - RNA, 16 nt, Human
uauguuaauauuucug

SEQ ID NO: 3027484 - RNA, 14 nt, Human
uauguuaauauuuu

SEQ ID NO: 3027485 - RNA, 13 nt, Human
uauguguucuauu

SEQ ID NO: 3027486 - RNA, 15 nt, Human
uauuaaaugcccagc

SEQ ID NO: 3027487 - RNA, 19 nt, Human
uauuaaaugcccagccccu

SEQ ID NO: 3027488 - RNA, 17 nt, Human
uauuaaaugcccagccc

SEQ ID NO: 3027489 - RNA, 16 nt, Human
uauuaagaaagacuau

SEQ ID NO: 3027490 - RNA, 21 nt, Human
uauguugcccaggcaggucuu

SEQ ID NO: 3027491 - RNA, 22 nt, Human
uauguucuuaguggauguucug

SEQ ID NO: 3027492 - RNA, 13 nt, Human
uauuauauucauu

SEQ ID NO: 3027493 - RNA, 17 nt, Human
uauuauauucauucuuu

SEQ ID NO: 3027494 - RNA, 23 nt, Human
uauuauauucauucuuuuugaaa

SEQ ID NO: 3027495 - RNA, 14 nt, Human
uauuauaccuuuuu

SEQ ID NO: 3027496 - RNA, 12 nt, Human
uauuauaccuuu

SEQ ID NO: 3027497 - RNA, 13 nt, Human
uauuauaccuuuu

SEQ ID NO: 3027498 - RNA, 14 nt, Human
uauuaaggaagaca

SEQ ID NO: 3027499 - RNA, 18 nt, Human
uauucauucuuuuugaaa

SEQ ID NO: 3027500 - RNA, 23 nt, Human
uauucauucuuuuugaaauguca

SEQ ID NO: 3027501 - RNA, 20 nt, Human
uauugauaugcuuauacacu

SEQ ID NO: 3027502 - RNA, 19 nt, Human
uauugcauacuauuaaaca

SEQ ID NO: 3027503 - RNA, 23 nt, Human
uauugcauacuauuaaacaugcu

SEQ ID NO: 3027504 - RNA, 22 nt, Human
uauugcugauggugcaaugacc

SEQ ID NO: 3027505 - RNA, 23 nt, Human
uauugcugauggugcaaugaccu

SEQ ID NO: 3027506 - RNA, 13 nt, Human
uauugcccacgcu

SEQ ID NO: 3027507 - RNA, 14 nt, Human
uauugcccacgcug

SEQ ID NO: 3027508 - RNA, 15 nt, Human
uauugcccacgcugg

SEQ ID NO: 3027509 - RNA, 18 nt, Human
uauuugaaacacugguuu

SEQ ID NO: 3027510 - RNA, 22 nt, Human
uauuuauuaaaugcccagcccc

SEQ ID NO: 3027511 - RNA, 17 nt, Human
uauuuaaauagaugaca

SEQ ID NO: 3027512 - RNA, 15 nt, Human
uauuuaaauagauga

SEQ ID NO: 3027513 - RNA, 17 nt, Human
uauuuaugggauccugg

SEQ ID NO: 3027514 - RNA, 12 nt, Human
ucaaauguguac

SEQ ID NO: 3027515 - RNA, 23 nt, Human
ucaaagagguuuuaaaaaaaucc

SEQ ID NO: 3027516 - RNA, 12 nt, Human
ucaaagagguuu

SEQ ID NO: 3027517 - RNA, 17 nt, Human
ucaagcgauucuucugc

SEQ ID NO: 3027518 - RNA, 20 nt, Human
ucaagccaccaacauacucc

SEQ ID NO: 3027519 - RNA, 12 nt, Human
ucaagccaccaa

SEQ ID NO: 3027520 - RNA, 21 nt, Human
ucaagcgauucuucugcuuca

SEQ ID NO: 3027521 - RNA, 18 nt, Human
ucaagcgauucuucugcu

SEQ ID NO: 3027522 - RNA, 19 nt, Human
ucaagcgauucuucugcuu

SEQ ID NO: 3027523 - RNA, 14 nt, Human
ucaaggauccugag

SEQ ID NO: 3027524 - RNA, 13 nt, Human
ucaaggauccuga

SEQ ID NO: 3027525 - RNA, 16 nt, Human
ucaaggauccugagcc

SEQ ID NO: 3027526 - RNA, 15 nt, Human
ucaaggauccugagc

SEQ ID NO: 3027527 - RNA, 16 nt, Human
ucaaccuccugggcua

SEQ ID NO: 3027528 - RNA, 20 nt, Human
ucaaccccuucgcuccugug

SEQ ID NO: 3027529 - RNA, 15 nt, Human
ucaaccuccugggcu

SEQ ID NO: 3027530 - RNA, 18 nt, Human
ucaaccccuucgcuccug

SEQ ID NO: 3027531 - RNA, 19 nt, Human
ucaaccccuucgcuccugu

SEQ ID NO: 3027532 - RNA, 20 nt, Human
ucaacucuccuccagaguca

SEQ ID NO: 3027533 - RNA, 15 nt, Human
ucacacacuuuggcu

SEQ ID NO: 3027534 - RNA, 23 nt, Human
ucacacaugagcaucaggccagg

SEQ ID NO: 3027535 - RNA, 22 nt, Human
ucacacaugagcaucaggccag

SEQ ID NO: 3027536 - RNA, 23 nt, Human
ucaccgaaaacguggcugcuuca

SEQ ID NO: 3027537 - RNA, 22 nt, Human
ucaccgaaaacguggcugcuuc

SEQ ID NO: 3027538 - RNA, 21 nt, Human
ucaccgaaaacguggcugcuu

SEQ ID NO: 3027539 - RNA, 20 nt, Human
ucaccgaaaacguggcugcu

SEQ ID NO: 3027540 - RNA, 19 nt, Human
ucaccgaaaacguggcugc

SEQ ID NO: 3027541 - RNA, 15 nt, Human
ucaccgaaaacgugg

SEQ ID NO: 3027542 - RNA, 19 nt, Human
ucacccgcuaagagggagg

SEQ ID NO: 3027543 - RNA, 14 nt, Human
ucaccgaaaacgug

SEQ ID NO: 3027544 - RNA, 12 nt, Human
ucacccuuuucu

SEQ ID NO: 3027545 - RNA, 18 nt, Human
ucacccgcuaagagggag

SEQ ID NO: 3027546 - RNA, 16 nt, Human
ucaccacaugugcaca

SEQ ID NO: 3027547 - RNA, 13 nt, Human
ucaccaagcccag

SEQ ID NO: 3027548 - RNA, 14 nt, Human
ucacauuuauucug

SEQ ID NO: 3027549 - RNA, 21 nt, Human
ucaccaaaucagcugcuacua

SEQ ID NO: 3027550 - RNA, 18 nt, Human
ucaccaacgucugugcca

SEQ ID NO: 3027551 - RNA, 17 nt, Human
ucaccaacgucugugcc

SEQ ID NO: 3027552 - RNA, 14 nt, Human
guggaaaauaacuc

SEQ ID NO: 3027553 - RNA, 18 nt, Human
guggaaaaauagccugcc

SEQ ID NO: 3027554 - RNA, 13 nt, Human
gugcuuggcccag

SEQ ID NO: 3027555 - RNA, 14 nt, Human
gugcuuggcccagg

SEQ ID NO: 3027556 - RNA, 15 nt, Human
gugcuuggcccagga

SEQ ID NO: 3027557 - RNA, 16 nt, Human
gugcuuggcccaggag

SEQ ID NO: 3027558 - RNA, 17 nt, Human
gugcuuggcccaggagu

SEQ ID NO: 3027559 - RNA, 19 nt, Human
gugcuuggcccaggaguuu

SEQ ID NO: 3027560 - RNA, 24 nt, Human
gugcuuggcccaggaguuuggcca

SEQ ID NO: 3027561 - RNA, 22 nt, Human
gugcugccauccagguucagcu

SEQ ID NO: 3027562 - RNA, 11 nt, Human
gugcugcccug

SEQ ID NO: 3027563 - RNA, 12 nt, Human
gugcuuggagga

SEQ ID NO: 3027564 - RNA, 15 nt, Human
gugcuuggaggaagg

SEQ ID NO: 3027565 - RNA, 13 nt, Human
gugcuuggaggaa

SEQ ID NO: 3027566 - RNA, 12 nt, Human
gugcugcauuua

SEQ ID NO: 3027567 - RNA, 19 nt, Human
gugcugcauuuaaaagaua

SEQ ID NO: 3027568 - RNA, 20 nt, Human
gugcugcauuuaaaagauac

SEQ ID NO: 3027569 - RNA, 15 nt, Human
gugcugccauccagg

SEQ ID NO: 3027570 - RNA, 18 nt, Human
gugcugccauccagguuc

SEQ ID NO: 3027571 - RNA, 19 nt, Human
gugcugccauccagguuca

SEQ ID NO: 3027572 - RNA, 12 nt, Human
gugcugagucug

SEQ ID NO: 3027573 - RNA, 19 nt, Human
gugcugagucugaaggcug

SEQ ID NO: 3027574 - RNA, 18 nt, Human
gugcugagucugaaggcu

SEQ ID NO: 3027575 - RNA, 17 nt, Human
gugcugagucugaaggc

SEQ ID NO: 3027576 - RNA, 16 nt, Human
gugcugagucugaagg

SEQ ID NO: 3027577 - RNA, 15 nt, Human
gugcucuggacaggc

SEQ ID NO: 3027578 - RNA, 16 nt, Human
gugcucuggacaggca

SEQ ID NO: 3027579 - RNA, 21 nt, Human
gugccuuggggacaagagcag

SEQ ID NO: 3027580 - RNA, 17 nt, Human
gugcucuggacaggcau

SEQ ID NO: 3027581 - RNA, 18 nt, Human
gugcucuggacaggcaug

SEQ ID NO: 3027582 - RNA, 19 nt, Human
gugcugaaugguuuucaaa

SEQ ID NO: 3027583 - RNA, 20 nt, Human
gugcugaaugguuuucaaaa

SEQ ID NO: 3027584 - RNA, 23 nt, Human
gugcugaaugguuuucaaaauaa

SEQ ID NO: 3027585 - RNA, 20 nt, Human
guggagaagcggcuggcagc

SEQ ID NO: 3027586 - RNA, 16 nt, Human
guggaugccugguggc

SEQ ID NO: 3027587 - RNA, 18 nt, Human
guggaugccugguggcag

SEQ ID NO: 3027588 - RNA, 17 nt, Human
guggaguucaucuugaa

SEQ ID NO: 3027589 - RNA, 15 nt, Human
guggcagugggagcu

SEQ ID NO: 3027590 - RNA, 16 nt, Human
guggcagugggagcug

SEQ ID NO: 3027591 - RNA, 17 nt, Human
guggcagugggagcugc

SEQ ID NO: 3027592 - RNA, 19 nt, Human
guggcagcugcgguccacc

SEQ ID NO: 3027593 - RNA, 20 nt, Human
guggaugccugguggcagcu

SEQ ID NO: 3027594 - RNA, 21 nt, Human
guggcagcugcgguccaccca

SEQ ID NO: 3027595 - RNA, 22 nt, Human
guggcagcugcgguccacccag

SEQ ID NO: 3027596 - RNA, 23 nt, Human
guggcagcugcgguccacccagg

SEQ ID NO: 3027597 - RNA, 12 nt, Human
guggcagcugcu

SEQ ID NO: 3027598 - RNA, 13 nt, Human
guggcagcugcuu

SEQ ID NO: 3027599 - RNA, 19 nt, Human
guggcagcugcuuuugucu

SEQ ID NO: 3027600 - RNA, 19 nt, Human
guggcagugggagcugccu

SEQ ID NO: 3027601 - RNA, 21 nt, Human
guggcagugggagcugccugu

SEQ ID NO: 3027602 - RNA, 19 nt, Human
gugaaaggaaagagggagg

SEQ ID NO: 3027603 - RNA, 23 nt, Human
gugaaaagaaaaaugagccuggc

SEQ ID NO: 3027604 - RNA, 14 nt, Human
gugaaaagaaaaau

SEQ ID NO: 3027605 - RNA, 12 nt, Human
gugaaacuggau

SEQ ID NO: 3027606 - RNA, 15 nt, Human
gugaccucugccuga

SEQ ID NO: 3027607 - RNA, 16 nt, Human
gugacaacacuugugu

SEQ ID NO: 3027608 - RNA, 16 nt, Human
gugacugaauuucuuu

SEQ ID NO: 3027609 - RNA, 18 nt, Human
gugacugaauuucuuuug

SEQ ID NO: 3027610 - RNA, 15 nt, Human
gugacugaauuucuu

SEQ ID NO: 3027611 - RNA, 11 nt, Human
gugaggaagcc

SEQ ID NO: 3027612 - RNA, 19 nt, Human
gugaggaagccgcuggggc

SEQ ID NO: 3027613 - RNA, 16 nt, Human
gugaggaagccgcugg

SEQ ID NO: 3027614 - RNA, 13 nt, Human
gugagccacugca

SEQ ID NO: 3027615 - RNA, 17 nt, Human
gugacugaucucucgug

SEQ ID NO: 3027616 - RNA, 23 nt, Human
gugauucuccugccucagccucc

SEQ ID NO: 3027617 - RNA, 12 nt, Human
gugauuuucauu

SEQ ID NO: 3027618 - RNA, 14 nt, Human
gugauucuccugcc

SEQ ID NO: 3027619 - RNA, 16 nt, Human
gugauucuccugccuc

SEQ ID NO: 3027620 - RNA, 17 nt, Human
gugauucuccugccuca

SEQ ID NO: 3027621 - RNA, 18 nt, Human
gugauucuccugccucag

SEQ ID NO: 3027622 - RNA, 19 nt, Human
gugauucuccugccucagc

SEQ ID NO: 3027623 - RNA, 20 nt, Human
gugauucuccugccucagcc

SEQ ID NO: 3027624 - RNA, 22 nt, Human
gugauucuccugccucagccuc

SEQ ID NO: 3027625 - RNA, 20 nt, Human
gugauccucccaccucagcc

SEQ ID NO: 3027626 - RNA, 22 nt, Human
gugauccucccaccucagccuc

SEQ ID NO: 3027627 - RNA, 14 nt, Human
gugauccucccacc

SEQ ID NO: 3027628 - RNA, 15 nt, Human
gugauccucccaccu

SEQ ID NO: 3027629 - RNA, 18 nt, Human
gugauccucccaccucag

SEQ ID NO: 3027630 - RNA, 11 nt, Human
gugaggccaga

SEQ ID NO: 3027631 - RNA, 15 nt, Human
gugauccacccaccu

SEQ ID NO: 3027632 - RNA, 13 nt, Human
gugaggccagaga

SEQ ID NO: 3027633 - RNA, 18 nt, Human
gugauccacccaccucag

SEQ ID NO: 3027634 - RNA, 20 nt, Human
gugauccacccaccucagcc

SEQ ID NO: 3027635 - RNA, 20 nt, Human
gugcccacaggaucagucug

SEQ ID NO: 3027636 - RNA, 20 nt, Human
gugccagguuuuuggucuga

SEQ ID NO: 3027637 - RNA, 22 nt, Human
gugccagguuuuuggucugacc

SEQ ID NO: 3027638 - RNA, 21 nt, Human
gugcauaccacuuuuguucuu

SEQ ID NO: 3027639 - RNA, 13 nt, Human
gugcauaccacuu

SEQ ID NO: 3027640 - RNA, 14 nt, Human
gugcauaccacuuu

SEQ ID NO: 3027641 - RNA, 19 nt, Human
gugcauaaguuaacuucca

SEQ ID NO: 3027642 - RNA, 18 nt, Human
guccugucggagcccugu

SEQ ID NO: 3027643 - RNA, 20 nt, Human
guccugucggagcccugucu

SEQ ID NO: 3027644 - RNA, 21 nt, Human
guccugucggagcccugucuc

SEQ ID NO: 3027645 - RNA, 19 nt, Human
guccugggagugagcuggu

SEQ ID NO: 3027646 - RNA, 17 nt, Human
guccugggagugagcug

SEQ ID NO: 3027647 - RNA, 18 nt, Human
guccugggagugagcugg

SEQ ID NO: 3027648 - RNA, 15 nt, Human
guccugggagugagc

SEQ ID NO: 3027649 - RNA, 16 nt, Human
guccugggagugagcu

SEQ ID NO: 3027650 - RNA, 17 nt, Human
guccuggcaugggaaug

SEQ ID NO: 3027651 - RNA, 12 nt, Human
guccucccaucu

SEQ ID NO: 3027652 - RNA, 14 nt, Human
guccucccaucuca

SEQ ID NO: 3027653 - RNA, 13 nt, Human
guccucccaucuc

SEQ ID NO: 3027654 - RNA, 23 nt, Human
guccucccaucucacacaugagc

SEQ ID NO: 3027655 - RNA, 21 nt, Human
guccuauuauauucauucuuu

SEQ ID NO: 3027656 - RNA, 19 nt, Human
guccuauuauauucauucu

SEQ ID NO: 3027657 - RNA, 12 nt, Human
gucccagugccg

SEQ ID NO: 3027658 - RNA, 13 nt, Human
guccuacucugug

SEQ ID NO: 3027659 - RNA, 17 nt, Human
gucccugguggcagcuc

SEQ ID NO: 3027660 - RNA, 16 nt, Human
gucccugguggcagcu

SEQ ID NO: 3027661 - RNA, 15 nt, Human
guccuacucuguguc

SEQ ID NO: 3027662 - RNA, 23 nt, Human
guccuacucugugucaggugggg

SEQ ID NO: 3027663 - RNA, 23 nt, Human
guccuagaaauuccccacccuga

SEQ ID NO: 3027664 - RNA, 17 nt, Human
gucugauucccaagcuc

SEQ ID NO: 3027665 - RNA, 18 nt, Human
gucugauucccaagcucu

SEQ ID NO: 3027666 - RNA, 19 nt, Human
gucugauucccaagcucug

SEQ ID NO: 3027667 - RNA, 21 nt, Human
gucugaggaauccagacccgg

SEQ ID NO: 3027668 - RNA, 20 nt, Human
gucugauucccaagcucugc

SEQ ID NO: 3027669 - RNA, 21 nt, Human
gucugauucccaagcucugcu

SEQ ID NO: 3027670 - RNA, 13 nt, Human
gucugacccacug

SEQ ID NO: 3027671 - RNA, 14 nt, Human
gucugacccacugc

SEQ ID NO: 3027672 - RNA, 15 nt, Human
gucugacccacugcu

SEQ ID NO: 3027673 - RNA, 18 nt, Human
gucugaggaauccagacc

SEQ ID NO: 3027674 - RNA, 19 nt, Human
gucugaggaauccagaccc

SEQ ID NO: 3027675 - RNA, 20 nt, Human
gucucacuauguugcccagg

SEQ ID NO: 3027676 - RNA, 21 nt, Human
gucucacuauguugcccaggc

SEQ ID NO: 3027677 - RNA, 13 nt, Human
gucucacuguugc

SEQ ID NO: 3027678 - RNA, 23 nt, Human
gucucacuauguugcccaggcag

SEQ ID NO: 3027679 - RNA, 16 nt, Human
gucucacuguugccca

SEQ ID NO: 3027680 - RNA, 17 nt, Human
gucucacuguugcccag

SEQ ID NO: 3027681 - RNA, 18 nt, Human
gucucacuguugcccagg

SEQ ID NO: 3027682 - RNA, 19 nt, Human
gucucacuguugcccaggc

SEQ ID NO: 3027683 - RNA, 20 nt, Human
gucucacuguugcccaggcu

SEQ ID NO: 3027684 - RNA, 21 nt, Human
gucucacuguugcccaggcug

SEQ ID NO: 3027685 - RNA, 22 nt, Human
gucucacuguugcccaggcugg

SEQ ID NO: 3027686 - RNA, 23 nt, Human
gucucacuguugcccaggcuggc

SEQ ID NO: 3027687 - RNA, 15 nt, Human
guccuuaccagcaga

SEQ ID NO: 3027688 - RNA, 17 nt, Human
guccuuaccagcagagc

SEQ ID NO: 3027689 - RNA, 16 nt, Human
guccuuaccagcagag

SEQ ID NO: 3027690 - RNA, 15 nt, Human
gucuacacugugcug

SEQ ID NO: 3027691 - RNA, 20 nt, Human
guagagguacacuugugaau

SEQ ID NO: 3027692 - RNA, 13 nt, Human
guagagugggagc

SEQ ID NO: 3027693 - RNA, 15 nt, Human
guagagugggagcug

SEQ ID NO: 3027694 - RNA, 13 nt, Human
guauuacuucugc

SEQ ID NO: 3027695 - RNA, 14 nt, Human
guauuacuucugcu

SEQ ID NO: 3027696 - RNA, 15 nt, Human
guauuacuucugcua

SEQ ID NO: 3027697 - RNA, 14 nt, Human
guauuauaccuuuu

SEQ ID NO: 3027698 - RNA, 13 nt, Human
gucaaggcuuaga

SEQ ID NO: 3027699 - RNA, 19 nt, Human
gucaagugaaaaaggagga

SEQ ID NO: 3027700 - RNA, 18 nt, Human
gucaagugaaaaaggagg

SEQ ID NO: 3027701 - RNA, 16 nt, Human
gucaagugaaaaagga

SEQ ID NO: 3027702 - RNA, 18 nt, Human
gucaagagggucugagga

SEQ ID NO: 3027703 - RNA, 19 nt, Human
gucaagagggucugaggaa

SEQ ID NO: 3027704 - RNA, 16 nt, Human
gucaauuacaggaagu

SEQ ID NO: 3027705 - RNA, 15 nt, Human
gucaauuacaggaag

SEQ ID NO: 3027706 - RNA, 13 nt, Human
gucaauuacagga

SEQ ID NO: 3027707 - RNA, 13 nt, Human
gucaccccggcca

SEQ ID NO: 3027708 - RNA, 20 nt, Human
gucaccugaagacucauucu

SEQ ID NO: 3027709 - RNA, 14 nt, Human
guccacccaggagc

SEQ ID NO: 3027710 - RNA, 13 nt, Human
guccacccaggag

SEQ ID NO: 3027711 - RNA, 15 nt, Human
guccacccaggagcc

SEQ ID NO: 3027712 - RNA, 16 nt, Human
guccacccaggagccc

SEQ ID NO: 3027713 - RNA, 15 nt, Human
gucccacucagucca

SEQ ID NO: 3027714 - RNA, 14 nt, Human
gucccacucagucc

SEQ ID NO: 3027715 - RNA, 17 nt, Human
gucccagauacuugggg

SEQ ID NO: 3027716 - RNA, 21 nt, Human
gucauauaagauucauauuua

SEQ ID NO: 3027717 - RNA, 23 nt, Human
gguagaauguuuucaaauguucu

SEQ ID NO: 3027718 - RNA, 12 nt, Human
ggucacucuggc

SEQ ID NO: 3027719 - RNA, 12 nt, Human
ggucagagccug

SEQ ID NO: 3027720 - RNA, 22 nt, Human
ggucacucuggcagcucagaga

SEQ ID NO: 3027721 - RNA, 20 nt, Human
ggucacucuggcagcucaga

SEQ ID NO: 3027722 - RNA, 16 nt, Human
ggucacucuggcagcu

SEQ ID NO: 3027723 - RNA, 13 nt, Human
ggucagagccugc

SEQ ID NO: 3027724 - RNA, 14 nt, Human
ggucagagccugca

SEQ ID NO: 3027725 - RNA, 15 nt, Human
ggucagagccugcag

SEQ ID NO: 3027726 - RNA, 16 nt, Human
ggucagagccugcagu

SEQ ID NO: 3027727 - RNA, 22 nt, Human
ggucccaccccacacacgccag

SEQ ID NO: 3027728 - RNA, 22 nt, Human
ggucccacucaguccauagcag

SEQ ID NO: 3027729 - RNA, 12 nt, Human
ggucccacucag

SEQ ID NO: 3027730 - RNA, 14 nt, Human
ggucccacucaguc

SEQ ID NO: 3027731 - RNA, 13 nt, Human
ggucccccuucca

SEQ ID NO: 3027732 - RNA, 23 nt, Human
ggucccccuuccauggacuuugu

SEQ ID NO: 3027733 - RNA, 18 nt, Human
ggucccccuuccauggac

SEQ ID NO: 3027734 - RNA, 21 nt, Human
ggguagccacuggacugacga

SEQ ID NO: 3027735 - RNA, 23 nt, Human
ggguucccuuuuuuggcugcuga

SEQ ID NO: 3027736 - RNA, 22 nt, Human
ggguucuacccaggugcuagga

SEQ ID NO: 3027737 - RNA, 17 nt, Human
ggguucuacccaggugc

SEQ ID NO: 3027738 - RNA, 16 nt, Human
ggguuggccccugccc

SEQ ID NO: 3027739 - RNA, 19 nt, Human
ggguuggccccugcccggc

SEQ ID NO: 3027740 - RNA, 17 nt, Human
gguacccacugcucugg

SEQ ID NO: 3027741 - RNA, 16 nt, Human
gguacccacugcucug

SEQ ID NO: 3027742 - RNA, 15 nt, Human
ggguugggcuggugu

SEQ ID NO: 3027743 - RNA, 20 nt, Human
gguacuuguggacacagcuc

SEQ ID NO: 3027744 - RNA, 22 nt, Human
gguacuuguggacacagcucuu

SEQ ID NO: 3027745 - RNA, 21 nt, Human
gguacuuguggacacagcucu

SEQ ID NO: 3027746 - RNA, 14 nt, Human
ggucccugguggca

SEQ ID NO: 3027747 - RNA, 22 nt, Human
ggucucacuauguugcccaggc

SEQ ID NO: 3027748 - RNA, 22 nt, Human
ggucccugguggcagcucaccu

SEQ ID NO: 3027749 - RNA, 15 nt, Human
ggucugacccacugc

SEQ ID NO: 3027750 - RNA, 16 nt, Human
ggucugacccacugcu

SEQ ID NO: 3027751 - RNA, 21 nt, Human
ggucucacuauguugcccagg

SEQ ID NO: 3027752 - RNA, 12 nt, Human
ggucucacucug

SEQ ID NO: 3027753 - RNA, 19 nt, Human
ggucugaggaauccagacc

SEQ ID NO: 3027754 - RNA, 16 nt, Human
ggugaacuugguuccc

SEQ ID NO: 3027755 - RNA, 18 nt, Human
ggugaagugaagacaaug

SEQ ID NO: 3027756 - RNA, 16 nt, Human
ggugaccucugccuga

SEQ ID NO: 3027757 - RNA, 14 nt, Human
ggugaccucugccu

SEQ ID NO: 3027758 - RNA, 15 nt, Human
gguggcagcugcggu

SEQ ID NO: 3027759 - RNA, 23 nt, Human
gguggcagcugcgguccacccag

SEQ ID NO: 3027760 - RNA, 11 nt, Human
gguggcagcug

SEQ ID NO: 3027761 - RNA, 13 nt, Human
gguggcagcucac

SEQ ID NO: 3027762 - RNA, 12 nt, Human
gguggcagcugc

SEQ ID NO: 3027763 - RNA, 13 nt, Human
gguggcagcugcg

SEQ ID NO: 3027764 - RNA, 22 nt, Human
ggugcuaucucccccagcccca

SEQ ID NO: 3027765 - RNA, 21 nt, Human
ggugcuaucucccccagcccc

SEQ ID NO: 3027766 - RNA, 23 nt, Human
ggugcuaucucccccagccccau

SEQ ID NO: 3027767 - RNA, 15 nt, Human
ggugcgaucuggguu

SEQ ID NO: 3027768 - RNA, 14 nt, Human
gggcuucaguggca

SEQ ID NO: 3027769 - RNA, 14 nt, Human
gggcugcaccggcu

SEQ ID NO: 3027770 - RNA, 16 nt, Human
gggcugaggugggagg

SEQ ID NO: 3027771 - RNA, 13 nt, Human
gggcucugccucc

SEQ ID NO: 3027772 - RNA, 20 nt, Human
gggcucugccucccaucacc

SEQ ID NO: 3027773 - RNA, 17 nt, Human
gggcucugccucccauc

SEQ ID NO: 3027774 - RNA, 16 nt, Human
gggcucugccucccau

SEQ ID NO: 3027775 - RNA, 15 nt, Human
gggcucugccuccca

SEQ ID NO: 3027776 - RNA, 19 nt, Human
gggccuggccugagcuggg

SEQ ID NO: 3027777 - RNA, 12 nt, Human
gggccuggcuca

SEQ ID NO: 3027778 - RNA, 16 nt, Human
gggccuggcucaggug

SEQ ID NO: 3027779 - RNA, 14 nt, Human
gggccuggcucagg

SEQ ID NO: 3027780 - RNA, 18 nt, Human
gggccuggucguuuucaa

SEQ ID NO: 3027781 - RNA, 16 nt, Human
gggcgcgguggcucac

SEQ ID NO: 3027782 - RNA, 13 nt, Human
gggcucccuuccc

SEQ ID NO: 3027783 - RNA, 23 nt, Human
gggcucccuucccaccucucuca

SEQ ID NO: 3027784 - RNA, 18 nt, Human
gggcucccuucccaccuc

SEQ ID NO: 3027785 - RNA, 17 nt, Human
gggcucccuucccaccu

SEQ ID NO: 3027786 - RNA, 14 nt, Human
gggcucccuuccca

SEQ ID NO: 3027787 - RNA, 20 nt, Human
gggcuucauccuccucagau

SEQ ID NO: 3027788 - RNA, 20 nt, Human
gggcuuggggaccagagcug

SEQ ID NO: 3027789 - RNA, 19 nt, Human
gggcuucaguggcagcugc

SEQ ID NO: 3027790 - RNA, 20 nt, Human
gggcuucaguggcagcugcu

SEQ ID NO: 3027791 - RNA, 19 nt, Human
gggcuucauccuccucaga

SEQ ID NO: 3027792 - RNA, 15 nt, Human
gggcuucaguggcag

SEQ ID NO: 3027793 - RNA, 16 nt, Human
gggcuucaguggcagc

SEQ ID NO: 3027794 - RNA, 17 nt, Human
gggcuucaguggcagcu

SEQ ID NO: 3027795 - RNA, 18 nt, Human
gggcuucaguggcagcug

SEQ ID NO: 3027796 - RNA, 11 nt, Human
ggggagaaagu

SEQ ID NO: 3027797 - RNA, 21 nt, Human
gggcuuggggaccagagcugc

SEQ ID NO: 3027798 - RNA, 13 nt, Human
ggggaguggccac

SEQ ID NO: 3027799 - RNA, 17 nt, Human
ggggaucacagccucug

SEQ ID NO: 3027800 - RNA, 17 nt, Human
ggggcugggcagaggaa

SEQ ID NO: 3027801 - RNA, 16 nt, Human
ggggcugggcagagga

SEQ ID NO: 3027802 - RNA, 13 nt, Human
ggggcugggacau

SEQ ID NO: 3027803 - RNA, 23 nt, Human
gggguucccuuuuuuggcugcug

SEQ ID NO: 3027804 - RNA, 19 nt, Human
ggguacuuguggacacagc

SEQ ID NO: 3027805 - RNA, 22 nt, Human
ggguacuuguggacacagcucu

SEQ ID NO: 3027806 - RNA, 23 nt, Human
ggguacuuguggacacagcucuu

SEQ ID NO: 3027807 - RNA, 23 nt, Human
ggguagagcggagaaaggaaggg

SEQ ID NO: 3027808 - RNA, 13 nt, Human
ggguacccacugc

SEQ ID NO: 3027809 - RNA, 15 nt, Human
ggguacccacugcuc

SEQ ID NO: 3027810 - RNA, 18 nt, Human
ggguacccacugcucugg

SEQ ID NO: 3027811 - RNA, 14 nt, Human
guacacuugugaau

SEQ ID NO: 3027812 - RNA, 21 nt, Human
guacacuguuucaaacuuuac

SEQ ID NO: 3027813 - RNA, 19 nt, Human
guacacuguuucaaacuuu

SEQ ID NO: 3027814 - RNA, 20 nt, Human
guacacuguuucaaacuuua

SEQ ID NO: 3027815 - RNA, 15 nt, Human
guacacuugugaaua

SEQ ID NO: 3027816 - RNA, 16 nt, Human
guacagacaacaaacc

SEQ ID NO: 3027817 - RNA, 20 nt, Human
guacagcaaggagauuuaca

SEQ ID NO: 3027818 - RNA, 22 nt, Human
guacagagcccacgcccccacu

SEQ ID NO: 3027819 - RNA, 18 nt, Human
guacagagcccacgcccc

SEQ ID NO: 3027820 - RNA, 12 nt, Human
guacagagccca

SEQ ID NO: 3027821 - RNA, 14 nt, Human
guacauacuuuuug

SEQ ID NO: 3027822 - RNA, 13 nt, Human
guacauacuuuuu

SEQ ID NO: 3027823 - RNA, 19 nt, Human
guacauacuuuuuggguuu

SEQ ID NO: 3027824 - RNA, 15 nt, Human
guacccacugcucug

SEQ ID NO: 3027825 - RNA, 20 nt, Human
guacauaaugcgugcauacc

SEQ ID NO: 3027826 - RNA, 14 nt, Human
guaauuaaguacua

SEQ ID NO: 3027827 - RNA, 17 nt, Human
guaauuaaguacuaugu

SEQ ID NO: 3027828 - RNA, 20 nt, Human
guaauuaaguacuauguauc

SEQ ID NO: 3027829 - RNA, 21 nt, Human
guaauuaaguacuauguauca

SEQ ID NO: 3027830 - RNA, 18 nt, Human
guacacuguuucaaacuu

SEQ ID NO: 3027831 - RNA, 18 nt, Human
guacuaacauuuauuuga

SEQ ID NO: 3027832 - RNA, 14 nt, Human
guacuucuccaccc

SEQ ID NO: 3027833 - RNA, 15 nt, Human
guacuucuccacccu

SEQ ID NO: 3027834 - RNA, 17 nt, Human
guacguugugcauuugg

SEQ ID NO: 3027835 - RNA, 15 nt, Human
guacuaaggaaucuu

SEQ ID NO: 3027836 - RNA, 23 nt, Human
guacuaaggaaucuuucugcuuu

SEQ ID NO: 3027837 - RNA, 14 nt, Human
guacgucugacagg

SEQ ID NO: 3027838 - RNA, 15 nt, Human
guacgucugacaggc

SEQ ID NO: 3027839 - RNA, 17 nt, Human
guacgucugacaggcaa

SEQ ID NO: 3027840 - RNA, 14 nt, Human
guacguugugcauu

SEQ ID NO: 3027841 - RNA, 15 nt, Human
guacguugugcauuu

SEQ ID NO: 3027842 - RNA, 16 nt, Human
guacguugugcauuug

SEQ ID NO: 3027843 - RNA, 13 nt, Human
guaccucuugagc

SEQ ID NO: 3027844 - RNA, 21 nt, Human
guaccucuugagccuugaacu

SEQ ID NO: 3027845 - RNA, 22 nt, Human
guaccucuugagccuugaacuu

SEQ ID NO: 3027846 - RNA, 16 nt, Human
guacccacugcucugg

SEQ ID NO: 3027847 - RNA, 19 nt, Human
guagagguacacuugugaa

SEQ ID NO: 3027848 - RNA, 17 nt, Human
guagagguacacuugug

SEQ ID NO: 3027849 - RNA, 15 nt, Human
guagagguacacuug

SEQ ID NO: 3027850 - RNA, 16 nt, Human
guagagcggagaaagg

SEQ ID NO: 3027851 - RNA, 18 nt, Human
guagagccagggucucac

SEQ ID NO: 3027852 - RNA, 14 nt, Human
guacuuuuaagacu

SEQ ID NO: 3027853 - RNA, 21 nt, Human
guacuuguggacacagcucuu

SEQ ID NO: 3027854 - RNA, 16 nt, Human
guacuuguggacacag

SEQ ID NO: 3027855 - RNA, 20 nt, Human
guacuuguggacacagcucu

SEQ ID NO: 3027856 - RNA, 20 nt, Human
guacuucuccacccugcucu

SEQ ID NO: 3027857 - RNA, 21 nt, Human
guacuucuccacccugcucuc

SEQ ID NO: 3027858 - RNA, 16 nt, Human
guacuucuccacccug

SEQ ID NO: 3027859 - RNA, 17 nt, Human
guacuucuccacccugc

SEQ ID NO: 3027860 - RNA, 18 nt, Human
guacuucuccacccugcu

SEQ ID NO: 3027861 - RNA, 19 nt, Human
guacuucuccacccugcuc

SEQ ID NO: 3027862 - RNA, 16 nt, Human
guaaaaaaugguguuu

SEQ ID NO: 3027863 - RNA, 18 nt, Human
guaaaaaaugguguuuua

SEQ ID NO: 3027864 - RNA, 23 nt, Human
gguuuugccauguuggccaggcu

SEQ ID NO: 3027865 - RNA, 15 nt, Human
gguuuucuguucuuu

SEQ ID NO: 3027866 - RNA, 12 nt, Human
gguuuucuguuc

SEQ ID NO: 3027867 - RNA, 13 nt, Human
gguuuucuguucu

SEQ ID NO: 3027868 - RNA, 10 nt, Human
gguugugaau

SEQ ID NO: 3027869 - RNA, 13 nt, Human
gguuggugggggc

SEQ ID NO: 3027870 - RNA, 13 nt, Human
gguuuaagcuguu

SEQ ID NO: 3027871 - RNA, 14 nt, Human
gguugggcuggugu

SEQ ID NO: 3027872 - RNA, 13 nt, Human
gguggccucccaa

SEQ ID NO: 3027873 - RNA, 21 nt, Human
gguucaagcgauucuucugcu

SEQ ID NO: 3027874 - RNA, 17 nt, Human
gguggccucccaacuca

SEQ ID NO: 3027875 - RNA, 20 nt, Human
gguucacugcaaccuccgcc

SEQ ID NO: 3027876 - RNA, 22 nt, Human
gguucaagcgauucuucugcuu

SEQ ID NO: 3027877 - RNA, 23 nt, Human
gguucaagcgauucuucugcuuc

SEQ ID NO: 3027878 - RNA, 14 nt, Human
gguugaagcaccaa

SEQ ID NO: 3027879 - RNA, 22 nt, Human
guaacuguuuagaugaauguca

SEQ ID NO: 3027880 - RNA, 23 nt, Human
guaaauuaacuuuuauaaacuuu

SEQ ID NO: 3027881 - RNA, 18 nt, Human
guaaggaauaccuguccc

SEQ ID NO: 3027882 - RNA, 13 nt, Human
guaaggaaugauu

SEQ ID NO: 3027883 - RNA, 23 nt, Human
guaaggaauaccugucccccuga

SEQ ID NO: 3027884 - RNA, 21 nt, Human
guaaggaauaccugucccccu

SEQ ID NO: 3027885 - RNA, 20 nt, Human
guaaggaauaccuguccccc

SEQ ID NO: 3027886 - RNA, 22 nt, Human
guaaguauucuuauuuaaugaa

SEQ ID NO: 3027887 - RNA, 15 nt, Human
guaaauuaacuuuua

SEQ ID NO: 3027888 - RNA, 16 nt, Human
guaaauuaacuuuuau

SEQ ID NO: 3027889 - RNA, 17 nt, Human
guaaauuaacuuuuaua

SEQ ID NO: 3027890 - RNA, 21 nt, Human
guaaauuaacuuuuauaaacu

SEQ ID NO: 3027891 - RNA, 22 nt, Human
guaaauuaacuuuuauaaacuu

SEQ ID NO: 3027892 - RNA, 18 nt, Human
guaaaugggggugcauuu

SEQ ID NO: 3027893 - RNA, 19 nt, Human
guaaaugggggugcauuug

SEQ ID NO: 3027894 - RNA, 20 nt, Human
guaaaugggggugcauuuga

SEQ ID NO: 3027895 - RNA, 16 nt, Human
gcugccaauauccuaa

SEQ ID NO: 3027896 - RNA, 17 nt, Human
gcugccaauauccuaau

SEQ ID NO: 3027897 - RNA, 18 nt, Human
gcugccaauauccuaaua

SEQ ID NO: 3027898 - RNA, 19 nt, Human
gcugccaauauccuaauaa

SEQ ID NO: 3027899 - RNA, 14 nt, Human
gcugccaauauccu

SEQ ID NO: 3027900 - RNA, 15 nt, Human
gcugccaauauccua

SEQ ID NO: 3027901 - RNA, 13 nt, Human
gcugcaguuuuuu

SEQ ID NO: 3027902 - RNA, 17 nt, Human
gcugcaguugccaguca

SEQ ID NO: 3027903 - RNA, 21 nt, Human
gcugcaguugccagucacccc

SEQ ID NO: 3027904 - RNA, 20 nt, Human
gcugcaguugccagucaccc

SEQ ID NO: 3027905 - RNA, 18 nt, Human
gcugcaguugccagucac

SEQ ID NO: 3027906 - RNA, 21 nt, Human
gcugauggugcaaugaccuuu

SEQ ID NO: 3027907 - RNA, 18 nt, Human
gcugauggugcaaugacc

SEQ ID NO: 3027908 - RNA, 23 nt, Human
gcugagugggggaucacagccuc

SEQ ID NO: 3027909 - RNA, 22 nt, Human
gcugagugggggaucacagccu

SEQ ID NO: 3027910 - RNA, 16 nt, Human
gcugauggugcaauga

SEQ ID NO: 3027911 - RNA, 15 nt, Human
gcugauggugcaaug

SEQ ID NO: 3027912 - RNA, 15 nt, Human
gcugagucugaaggc

SEQ ID NO: 3027913 - RNA, 18 nt, Human
gcugagucugaaggcugg

SEQ ID NO: 3027914 - RNA, 16 nt, Human
gcugagucugaaggcu

SEQ ID NO: 3027915 - RNA, 19 nt, Human
gcugagucugaaggcuggg

SEQ ID NO: 3027916 - RNA, 21 nt, Human
gcugacagacacaggcccggc

SEQ ID NO: 3027917 - RNA, 20 nt, Human
gcugacagacacaggcccgg

SEQ ID NO: 3027918 - RNA, 22 nt, Human
gcucuuccaggcugggagagcc

SEQ ID NO: 3027919 - RNA, 12 nt, Human
gcucuucuccag

SEQ ID NO: 3027920 - RNA, 18 nt, Human
gcucuuccaggcugggag

SEQ ID NO: 3027921 - RNA, 19 nt, Human
gcucuuccaggcugggaga

SEQ ID NO: 3027922 - RNA, 14 nt, Human
gcucuucuccaggc

SEQ ID NO: 3027923 - RNA, 16 nt, Human
gcucuucuccaggcug

SEQ ID NO: 3027924 - RNA, 14 nt, Human
gcucuggacaggca

SEQ ID NO: 3027925 - RNA, 15 nt, Human
gcucuggacaggcau

SEQ ID NO: 3027926 - RNA, 16 nt, Human
gcucuggacaggcaug

SEQ ID NO: 3027927 - RNA, 21 nt, Human
gcucuggacaggcauguucuc

SEQ ID NO: 3027928 - RNA, 22 nt, Human
gcucuggacaggcauguucucu

SEQ ID NO: 3027929 - RNA, 19 nt, Human
gcucugcuccucuccccag

SEQ ID NO: 3027930 - RNA, 21 nt, Human
gcucugcuccucuccccagca

SEQ ID NO: 3027931 - RNA, 13 nt, Human
gcucugcugacag

SEQ ID NO: 3027932 - RNA, 14 nt, Human
gcucugcugacaga

SEQ ID NO: 3027933 - RNA, 18 nt, Human
gcucugcugacagacaca

SEQ ID NO: 3027934 - RNA, 19 nt, Human
gcucugcugacagacacag

SEQ ID NO: 3027935 - RNA, 20 nt, Human
gcucugcugacagacacagg

SEQ ID NO: 3027936 - RNA, 23 nt, Human
gcucugcugacagacacaggccc

SEQ ID NO: 3027937 - RNA, 13 nt, Human
gcucugcuccucu

SEQ ID NO: 3027938 - RNA, 14 nt, Human
gcucugcuccucuc

SEQ ID NO: 3027939 - RNA, 22 nt, Human
gcucugccucccaucacccgcu

SEQ ID NO: 3027940 - RNA, 15 nt, Human
gcucugccucccauc

SEQ ID NO: 3027941 - RNA, 14 nt, Human
gcucugccucccau

SEQ ID NO: 3027942 - RNA, 13 nt, Human
gcucugccuccca

SEQ ID NO: 3027943 - RNA, 14 nt, Human
gcucugcccuuggu

SEQ ID NO: 3027944 - RNA, 13 nt, Human
gcucugcccuugg

SEQ ID NO: 3027945 - RNA, 11 nt, Human
gcucugccucc

SEQ ID NO: 3027946 - RNA, 23 nt, Human
gcucugcccuugguuaggcauug

SEQ ID NO: 3027947 - RNA, 16 nt, Human
gcucgagcaugccugg

SEQ ID NO: 3027948 - RNA, 15 nt, Human
gcucccuucccaccu

SEQ ID NO: 3027949 - RNA, 18 nt, Human
gcucccuucccaccucuc

SEQ ID NO: 3027950 - RNA, 16 nt, Human
gcucccuucccaccuc

SEQ ID NO: 3027951 - RNA, 15 nt, Human
gcuccuucuguccua

SEQ ID NO: 3027952 - RNA, 21 nt, Human
gcuccuucuguccuacucugu

SEQ ID NO: 3027953 - RNA, 19 nt, Human
gcucuccgaccagacaccu

SEQ ID NO: 3027954 - RNA, 13 nt, Human
gcucuccgaccag

SEQ ID NO: 3027955 - RNA, 17 nt, Human
gcucuccgaccagacac

SEQ ID NO: 3027956 - RNA, 19 nt, Human
gcucaccccaucaucccuu

SEQ ID NO: 3027957 - RNA, 17 nt, Human
gcucaccccaucauccc

SEQ ID NO: 3027958 - RNA, 20 nt, Human
gcucaccagccccagugccc

SEQ ID NO: 3027959 - RNA, 23 nt, Human
gcucaccagccccagugcccaca

SEQ ID NO: 3027960 - RNA, 18 nt, Human
gcucaccagccccagugc

SEQ ID NO: 3027961 - RNA, 19 nt, Human
gcucaccagccccagugcc

SEQ ID NO: 3027962 - RNA, 23 nt, Human
gcucagcaaaagaugcuucucac

SEQ ID NO: 3027963 - RNA, 22 nt, Human
gcucagcaaaagaugcuucuca

SEQ ID NO: 3027964 - RNA, 20 nt, Human
gcucagcaaaagaugcuucu

SEQ ID NO: 3027965 - RNA, 17 nt, Human
gcucagcaaaagaugcu

SEQ ID NO: 3027966 - RNA, 19 nt, Human
gcucaggugucccugcacu

SEQ ID NO: 3027967 - RNA, 21 nt, Human
gcucagcggggacagcuccuu

SEQ ID NO: 3027968 - RNA, 22 nt, Human
gcucagcggggacagcuccuuc

SEQ ID NO: 3027969 - RNA, 18 nt, Human
gcucaggugucccugcac

SEQ ID NO: 3027970 - RNA, 17 nt, Human
gcucaggugucccugca

SEQ ID NO: 3027971 - RNA, 20 nt, Human
gcucagcggggacagcuccu

SEQ ID NO: 3027972 - RNA, 19 nt, Human
gcucagcggggacagcucc

SEQ ID NO: 3027973 - RNA, 15 nt, Human
gcucagcggggacag

SEQ ID NO: 3027974 - RNA, 13 nt, Human
gcuccaagcuccc

SEQ ID NO: 3027975 - RNA, 15 nt, Human
gcuccaagcucccag

SEQ ID NO: 3027976 - RNA, 14 nt, Human
gcuccaagcuccca

SEQ ID NO: 3027977 - RNA, 21 nt, Human
gcuccaagcucccaggcauuc

SEQ ID NO: 3027978 - RNA, 19 nt, Human
gcuccaagcucccaggcau

SEQ ID NO: 3027979 - RNA, 18 nt, Human
gcuccaagcucccaggca

SEQ ID NO: 3027980 - RNA, 17 nt, Human
gcuccaagcucccaggc

SEQ ID NO: 3027981 - RNA, 16 nt, Human
gcuccaagcucccagg

SEQ ID NO: 3027982 - RNA, 13 nt, Human
gcuccaggcuccu

SEQ ID NO: 3027983 - RNA, 11 nt, Human
gcuccagcugu

SEQ ID NO: 3027984 - RNA, 16 nt, Human
gcuccaggcuccuuua

SEQ ID NO: 3027985 - RNA, 23 nt, Human
gcuccaggcuccuuuagcgccca

SEQ ID NO: 3027986 - RNA, 16 nt, Human
gcuaaaugugaaugau

SEQ ID NO: 3027987 - RNA, 13 nt, Human
gcuaaaugugaau

SEQ ID NO: 3027988 - RNA, 22 nt, Human
gcuaagagggagggagggcucc

SEQ ID NO: 3027989 - RNA, 21 nt, Human
gcuaagagggagggagggcuc

SEQ ID NO: 3027990 - RNA, 16 nt, Human
gcgugagccacugcac

SEQ ID NO: 3027991 - RNA, 18 nt, Human
gcgugagccacugcaccg

SEQ ID NO: 3027992 - RNA, 23 nt, Human
gcgugagccacugcaccgggcca

SEQ ID NO: 3027993 - RNA, 18 nt, Human
gcgguccacccaggagcc

SEQ ID NO: 3027994 - RNA, 19 nt, Human
gcgguccacccaggagccc

SEQ ID NO: 3027995 - RNA, 12 nt, Human
gcggggacagcu

SEQ ID NO: 3027996 - RNA, 15 nt, Human
gcgggcuuccuccug

SEQ ID NO: 3027997 - RNA, 13 nt, Human
gcggggacagcuc

SEQ ID NO: 3027998 - RNA, 16 nt, Human
gcgguccacccaggag

SEQ ID NO: 3027999 - RNA, 15 nt, Human
gcuaucucccccagc

SEQ ID NO: 3028000 - RNA, 23 nt, Human
gcuaucucccccagccccauccu

SEQ ID NO: 3028001 - RNA, 22 nt, Human
gcuaucucccccagccccaucc

SEQ ID NO: 3028002 - RNA, 21 nt, Human
gcuaucucccccagccccauc

SEQ ID NO: 3028003 - RNA, 20 nt, Human
gcuaucucccccagccccau

SEQ ID NO: 3028004 - RNA, 19 nt, Human
gcuaucucccccagcccca

SEQ ID NO: 3028005 - RNA, 22 nt, Human
gcuagcagcagggagggcuucu

SEQ ID NO: 3028006 - RNA, 18 nt, Human
gcuaucucccccagcccc

SEQ ID NO: 3028007 - RNA, 17 nt, Human
gcuaucucccccagccc

SEQ ID NO: 3028008 - RNA, 16 nt, Human
gcuaucucccccagcc

SEQ ID NO: 3028009 - RNA, 20 nt, Human
gcuaccuuuguauucucucc

SEQ ID NO: 3028010 - RNA, 21 nt, Human
gcuacccgggaagggggcugg

SEQ ID NO: 3028011 - RNA, 19 nt, Human
gcuagagguucaaagauau

SEQ ID NO: 3028012 - RNA, 21 nt, Human
gcuagagguucaaagauauuu

SEQ ID NO: 3028013 - RNA, 18 nt, Human
gcuagagguucaaagaua

SEQ ID NO: 3028014 - RNA, 15 nt, Human
gcuacccgggaaggg

SEQ ID NO: 3028015 - RNA, 14 nt, Human
gcuacccgggaagg

SEQ ID NO: 3028016 - RNA, 23 nt, Human
gcuaagagggagggagggcucca

SEQ ID NO: 3028017 - RNA, 18 nt, Human
gccuaauaugaugacugu

SEQ ID NO: 3028018 - RNA, 19 nt, Human
gccgagauagccaaggcca

SEQ ID NO: 3028019 - RNA, 14 nt, Human
gccucaaccuccug

SEQ ID NO: 3028020 - RNA, 16 nt, Human
gccucaaccuccuggg

SEQ ID NO: 3028021 - RNA, 19 nt, Human
gccucaagugauucuccug

SEQ ID NO: 3028022 - RNA, 20 nt, Human
gccucaagugauucuccugc

SEQ ID NO: 3028023 - RNA, 21 nt, Human
gccucaagugauucuccugcc

SEQ ID NO: 3028024 - RNA, 12 nt, Human
gccucagugcca

SEQ ID NO: 3028025 - RNA, 14 nt, Human
gccucagugccacu

SEQ ID NO: 3028026 - RNA, 23 nt, Human
gccucagccucccaaagugcugg

SEQ ID NO: 3028027 - RNA, 21 nt, Human
gccucacaguccuuaccagca

SEQ ID NO: 3028028 - RNA, 23 nt, Human
gccucccgaauagcugggacuac

SEQ ID NO: 3028029 - RNA, 15 nt, Human
gccucccgaguagcu

SEQ ID NO: 3028030 - RNA, 15 nt, Human
gccucagugccacua

SEQ ID NO: 3028031 - RNA, 21 nt, Human
gccucccaacucaccccagcc

SEQ ID NO: 3028032 - RNA, 23 nt, Human
gccucccaacucaccccagcccc

SEQ ID NO: 3028033 - RNA, 22 nt, Human
gccucccaacucaccccagccc

SEQ ID NO: 3028034 - RNA, 21 nt, Human
gccucccgaauagcugggacu

SEQ ID NO: 3028035 - RNA, 14 nt, Human
gccucccacgacug

SEQ ID NO: 3028036 - RNA, 21 nt, Human
gccucccacgacugcccggca

SEQ ID NO: 3028037 - RNA, 20 nt, Human
gccugggggcugggcagagg

SEQ ID NO: 3028038 - RNA, 17 nt, Human
gccugggcagaaggaag

SEQ ID NO: 3028039 - RNA, 16 nt, Human
gccugggcagaaggaa

SEQ ID NO: 3028040 - RNA, 18 nt, Human
gccugggcagaaggaaga

SEQ ID NO: 3028041 - RNA, 15 nt, Human
gccugggcagaagga

SEQ ID NO: 3028042 - RNA, 14 nt, Human
gccuggccagaugc

SEQ ID NO: 3028043 - RNA, 15 nt, Human
gccuggccagaugca

SEQ ID NO: 3028044 - RNA, 22 nt, Human
gccuggccagaugcaccagccc

SEQ ID NO: 3028045 - RNA, 14 nt, Human
gccuggauggggcu

SEQ ID NO: 3028046 - RNA, 15 nt, Human
gccuggauggggcug

SEQ ID NO: 3028047 - RNA, 22 nt, Human
gccugaagucacacagugaguc

SEQ ID NO: 3028048 - RNA, 18 nt, Human
gccucugccucugacaca

SEQ ID NO: 3028049 - RNA, 18 nt, Human
gccugcuccagcuguuca

SEQ ID NO: 3028050 - RNA, 16 nt, Human
gccugcuccagcuguu

SEQ ID NO: 3028051 - RNA, 15 nt, Human
gccugcuccagcugu

SEQ ID NO: 3028052 - RNA, 14 nt, Human
gcccuuuuucaaua

SEQ ID NO: 3028053 - RNA, 16 nt, Human
gccgagaucacgccac

SEQ ID NO: 3028054 - RNA, 18 nt, Human
gccgagaucacgccacug

SEQ ID NO: 3028055 - RNA, 19 nt, Human
gccgagaucacgccacugc

SEQ ID NO: 3028056 - RNA, 17 nt, Human
gccgagauugcaccacu

SEQ ID NO: 3028057 - RNA, 18 nt, Human
gccgagauugcaccacug

SEQ ID NO: 3028058 - RNA, 22 nt, Human
gcccuucucuccagccccugga

SEQ ID NO: 3028059 - RNA, 21 nt, Human
gcccuucucuccagccccugg

SEQ ID NO: 3028060 - RNA, 19 nt, Human
gcccuucucuccagccccu

SEQ ID NO: 3028061 - RNA, 14 nt, Human
gcccugguggcagu

SEQ ID NO: 3028062 - RNA, 17 nt, Human
gcccugguggcaguggg

SEQ ID NO: 3028063 - RNA, 18 nt, Human
gcccugguggcaguggga

SEQ ID NO: 3028064 - RNA, 19 nt, Human
gcccugguggcagugggag

SEQ ID NO: 3028065 - RNA, 20 nt, Human
gcccugguggcagugggagc

SEQ ID NO: 3028066 - RNA, 21 nt, Human
gcccugguggcagugggagcu

SEQ ID NO: 3028067 - RNA, 22 nt, Human
gcccugguggcagugggagcug

SEQ ID NO: 3028068 - RNA, 23 nt, Human
gcccugguggcagugggagcugc

SEQ ID NO: 3028069 - RNA, 16 nt, Human
gcccggcuccaggcuc

SEQ ID NO: 3028070 - RNA, 13 nt, Human
gccccugccaccc

SEQ ID NO: 3028071 - RNA, 14 nt, Human
gccccugccacccu

SEQ ID NO: 3028072 - RNA, 15 nt, Human
gccccugccacccug

SEQ ID NO: 3028073 - RNA, 17 nt, Human
gccccuguucuggcaga

SEQ ID NO: 3028074 - RNA, 21 nt, Human
gccccuguucuggcagaguug

SEQ ID NO: 3028075 - RNA, 15 nt, Human
gcagacucuacagag

SEQ ID NO: 3028076 - RNA, 17 nt, Human
gcccggcuccaggcucc

SEQ ID NO: 3028077 - RNA, 18 nt, Human
gcccggcuccaggcuccu

SEQ ID NO: 3028078 - RNA, 14 nt, Human
gcccugagcuuucu

SEQ ID NO: 3028079 - RNA, 16 nt, Human
gcccugagcuuucugc

SEQ ID NO: 3028080 - RNA, 12 nt, Human
gcccucugccca

SEQ ID NO: 3028081 - RNA, 20 nt, Human
gcugccaauauccuaauaaa

SEQ ID NO: 3028082 - RNA, 21 nt, Human
gcugccaauauccuaauaaaa

SEQ ID NO: 3028083 - RNA, 15 nt, Human
gcugccaaugggagc

SEQ ID NO: 3028084 - RNA, 19 nt, Human
gcugccaaugggagcucau

SEQ ID NO: 3028085 - RNA, 16 nt, Human
gcugccaaugggagcu

SEQ ID NO: 3028086 - RNA, 23 nt, Human
gcugccaauauccuaauaaaaag

SEQ ID NO: 3028087 - RNA, 13 nt, Human
gcuguucagcugg

SEQ ID NO: 3028088 - RNA, 14 nt, Human
gcuguucagcuggu

SEQ ID NO: 3028089 - RNA, 21 nt, Human
gcuuaggagaagucuucuauu

SEQ ID NO: 3028090 - RNA, 17 nt, Human
gcuuagucacugagaca

SEQ ID NO: 3028091 - RNA, 15 nt, Human
gcuuagucacugaga

SEQ ID NO: 3028092 - RNA, 20 nt, Human
gcuuagucacugagacagcc

SEQ ID NO: 3028093 - RNA, 19 nt, Human
gcuuagucacugagacagc

SEQ ID NO: 3028094 - RNA, 21 nt, Human
gcuuagucacugagacagccc

SEQ ID NO: 3028095 - RNA, 16 nt, Human
gcuucaguggcagcug

SEQ ID NO: 3028096 - RNA, 15 nt, Human
gcuucaguggcagcu

SEQ ID NO: 3028097 - RNA, 19 nt, Human
gcuuaucucaggggugugc

SEQ ID NO: 3028098 - RNA, 13 nt, Human
gcuuaucucaggg

SEQ ID NO: 3028099 - RNA, 12 nt, Human
gcuuauacacuu

SEQ ID NO: 3028100 - RNA, 17 nt, Human
gcuucaguggcagcugc

SEQ ID NO: 3028101 - RNA, 18 nt, Human
gcuucaguggcagcugcu

SEQ ID NO: 3028102 - RNA, 13 nt, Human
gcuucauuuccug

SEQ ID NO: 3028103 - RNA, 16 nt, Human
gcuucauuuccugugu

SEQ ID NO: 3028104 - RNA, 15 nt, Human
gcuucauccuccuca

SEQ ID NO: 3028105 - RNA, 12 nt, Human
gcuucauccucc

SEQ ID NO: 3028106 - RNA, 16 nt, Human
gcuugaggguugggcu

SEQ ID NO: 3028107 - RNA, 15 nt, Human
gcuuccagugaggcu

SEQ ID NO: 3028108 - RNA, 17 nt, Human
gcuucauuuccuguguc

SEQ ID NO: 3028109 - RNA, 16 nt, Human
gcuuccagugaggcuc

SEQ ID NO: 3028110 - RNA, 23 nt, Human
ggaaagggauuuucagcccucag

SEQ ID NO: 3028111 - RNA, 22 nt, Human
ggaaaggcuccaggagcagcca

SEQ ID NO: 3028112 - RNA, 21 nt, Human
ggaaaggcuccaggagcagcc

SEQ ID NO: 3028113 - RNA, 20 nt, Human
ggaaaggcuccaggagcagc

SEQ ID NO: 3028114 - RNA, 19 nt, Human
ggaaaggcuccaggagcag

SEQ ID NO: 3028115 - RNA, 17 nt, Human
ggaaaggcuccaggagc

SEQ ID NO: 3028116 - RNA, 12 nt, Human
ggaaaggcucca

SEQ ID NO: 3028117 - RNA, 14 nt, Human
ggaaaggcuccagg

SEQ ID NO: 3028118 - RNA, 13 nt, Human
ggaaaggcuccag

SEQ ID NO: 3028119 - RNA, 19 nt, Human
ggaaaaucagccugcucca

SEQ ID NO: 3028120 - RNA, 23 nt, Human
ggaaaaucagccugcuccagcug

SEQ ID NO: 3028121 - RNA, 21 nt, Human
ggaaaucaccgaaaacguggc

SEQ ID NO: 3028122 - RNA, 14 nt, Human
ggaaaucaccgaaa

SEQ ID NO: 3028123 - RNA, 16 nt, Human
ggaacaggaaacugau

SEQ ID NO: 3028124 - RNA, 18 nt, Human
gcuugaggguugggcugg

SEQ ID NO: 3028125 - RNA, 20 nt, Human
gcuugaggguugggcuggug

SEQ ID NO: 3028126 - RNA, 15 nt, Human
gcuuugugauuuuug

SEQ ID NO: 3028127 - RNA, 21 nt, Human
gcuuuguuuguugucagcuga

SEQ ID NO: 3028128 - RNA, 18 nt, Human
ggaaaacaugcuacacac

SEQ ID NO: 3028129 - RNA, 14 nt, Human
ggaaaagcugcuga

SEQ ID NO: 3028130 - RNA, 18 nt, Human
ggaaaagcugcugacagu

SEQ ID NO: 3028131 - RNA, 20 nt, Human
ggaaaagcugcugacagugu

SEQ ID NO: 3028132 - RNA, 13 nt, Human
ggaaugcaaagau

SEQ ID NO: 3028133 - RNA, 12 nt, Human
ggaaugcagugg

SEQ ID NO: 3028134 - RNA, 24 nt, Human
ggaaugauuaauuaaaacacaaca

SEQ ID NO: 3028135 - RNA, 19 nt, Human
ggaauguuugccucugccu

SEQ ID NO: 3028136 - RNA, 23 nt, Human
ggaaggggagauaaggguaucug

SEQ ID NO: 3028137 - RNA, 18 nt, Human
ggaaguacuggagaaaau

SEQ ID NO: 3028138 - RNA, 16 nt, Human
ggaaguacuggagaaa

SEQ ID NO: 3028139 - RNA, 12 nt, Human
ggaaguacugga

SEQ ID NO: 3028140 - RNA, 14 nt, Human
ggaaugauuaauua

SEQ ID NO: 3028141 - RNA, 18 nt, Human
ggagaagcggcuggcagc

SEQ ID NO: 3028142 - RNA, 17 nt, Human
ggagaagcggcuggcag

SEQ ID NO: 3028143 - RNA, 13 nt, Human
ggaccagagcugc

SEQ ID NO: 3028144 - RNA, 23 nt, Human
ggaccucaggugagaagcagagg

SEQ ID NO: 3028145 - RNA, 20 nt, Human
ggaccucaggccugggggcu

SEQ ID NO: 3028146 - RNA, 19 nt, Human
ggaccucaggugagaagca

SEQ ID NO: 3028147 - RNA, 15 nt, Human
ggaccuugaacuggg

SEQ ID NO: 3028148 - RNA, 17 nt, Human
ggaccuugaacugggua

SEQ ID NO: 3028149 - RNA, 17 nt, Human
ggacgcuacccgggaag

SEQ ID NO: 3028150 - RNA, 20 nt, Human
ggacgcuacccgggaagggg

SEQ ID NO: 3028151 - RNA, 19 nt, Human
ggacgcuacccgggaaggg

SEQ ID NO: 3028152 - RNA, 17 nt, Human
ggacacucaaaagcugg

SEQ ID NO: 3028153 - RNA, 15 nt, Human
ggacagccacggcca

SEQ ID NO: 3028154 - RNA, 19 nt, Human
ggacagccacggccaggcc

SEQ ID NO: 3028155 - RNA, 20 nt, Human
ggacagccacggccaggcca

SEQ ID NO: 3028156 - RNA, 21 nt, Human
ggacagccacggccaggccag

SEQ ID NO: 3028157 - RNA, 14 nt, Human
ggacauggacaagg

SEQ ID NO: 3028158 - RNA, 20 nt, Human
ggacauugcggacagccacg

SEQ ID NO: 3028159 - RNA, 13 nt, Human
ggauacuuauuua

SEQ ID NO: 3028160 - RNA, 18 nt, Human
ggauacaaaagcauguga

SEQ ID NO: 3028161 - RNA, 14 nt, Human
ggagugcagugagc

SEQ ID NO: 3028162 - RNA, 12 nt, Human
ggagugcaguga

SEQ ID NO: 3028163 - RNA, 23 nt, Human
ggagugaguugauagcacagacc

SEQ ID NO: 3028164 - RNA, 17 nt, Human
ggaucccucauccucau

SEQ ID NO: 3028165 - RNA, 13 nt, Human
ggaucccucaucc

SEQ ID NO: 3028166 - RNA, 22 nt, Human
ggaucccucauccucauaccca

SEQ ID NO: 3028167 - RNA, 19 nt, Human
ggaugcagccucacagucc

SEQ ID NO: 3028168 - RNA, 15 nt, Human
ggaugcuuguacaua

SEQ ID NO: 3028169 - RNA, 19 nt, Human
ggauuacaagcgugagcca

SEQ ID NO: 3028170 - RNA, 17 nt, Human
ggaugcagccucacagu

SEQ ID NO: 3028171 - RNA, 16 nt, Human
ggaugcagccucacag

SEQ ID NO: 3028172 - RNA, 21 nt, Human
ggaugauuggaggggggaggu

SEQ ID NO: 3028173 - RNA, 23 nt, Human
ggaugcacagaguuguuacauuu

SEQ ID NO: 3028174 - RNA, 13 nt, Human
ggauccuccaggu

SEQ ID NO: 3028175 - RNA, 12 nt, Human
ggauccuccagg

SEQ ID NO: 3028176 - RNA, 16 nt, Human
ggauucuuauggacaa

SEQ ID NO: 3028177 - RNA, 23 nt, Human
ggauuacaagcgugagccacugc

SEQ ID NO: 3028178 - RNA, 17 nt, Human
ggauugcuacuguccua

SEQ ID NO: 3028179 - RNA, 16 nt, Human
ggcaacccccagccug

SEQ ID NO: 3028180 - RNA, 17 nt, Human
ggcaacccccagccugc

SEQ ID NO: 3028181 - RNA, 14 nt, Human
ggcaaugcuggcug

SEQ ID NO: 3028182 - RNA, 15 nt, Human
ggcaaugcuggcugu

SEQ ID NO: 3028183 - RNA, 23 nt, Human
ggcaaugcuggcuguuggcuggg

SEQ ID NO: 3028184 - RNA, 18 nt, Human
ggcaacccccagccugcu

SEQ ID NO: 3028185 - RNA, 20 nt, Human
ggcacccaccaucaugucug

SEQ ID NO: 3028186 - RNA, 23 nt, Human
ggcacccaccaucaugucuggcu

SEQ ID NO: 3028187 - RNA, 22 nt, Human
ggcacccggccccugcugguuc

SEQ ID NO: 3028188 - RNA, 15 nt, Human
ggcaugaagacagau

SEQ ID NO: 3028189 - RNA, 18 nt, Human
ggcaugacacgaauauug

SEQ ID NO: 3028190 - RNA, 19 nt, Human
ggcagggucucacucuguc

SEQ ID NO: 3028191 - RNA, 20 nt, Human
ggcagggucucacucugucg

SEQ ID NO: 3028192 - RNA, 13 nt, Human
ggcagugggagcu

SEQ ID NO: 3028193 - RNA, 14 nt, Human
ggcagugggagcug

SEQ ID NO: 3028194 - RNA, 16 nt, Human
ggcagugggagcugcc

SEQ ID NO: 3028195 - RNA, 21 nt, Human
ggcagcucagagaggguggga

SEQ ID NO: 3028196 - RNA, 13 nt, Human
ggcagcucagaga

SEQ ID NO: 3028197 - RNA, 22 nt, Human
ggcagcugcuuuugucuauggg

SEQ ID NO: 3028198 - RNA, 17 nt, Human
ggcagcuugaggguugg

SEQ ID NO: 3028199 - RNA, 14 nt, Human
ggcagcucaccucu

SEQ ID NO: 3028200 - RNA, 12 nt, Human
ggcagcucaccu

SEQ ID NO: 3028201 - RNA, 20 nt, Human
ggccagccuugaccauucuc

SEQ ID NO: 3028202 - RNA, 17 nt, Human
ggccagcugcuugggcu

SEQ ID NO: 3028203 - RNA, 22 nt, Human
ggccagccuugaccauucucca

SEQ ID NO: 3028204 - RNA, 18 nt, Human
ggccaggcccucugccca

SEQ ID NO: 3028205 - RNA, 23 nt, Human
ggccagcugcuugggcuucaucc

SEQ ID NO: 3028206 - RNA, 16 nt, Human
ggccaugggccuccug

SEQ ID NO: 3028207 - RNA, 16 nt, Human
ggcauuccccaggagg

SEQ ID NO: 3028208 - RNA, 19 nt, Human
ggcauuccccaggaggcca

SEQ ID NO: 3028209 - RNA, 18 nt, Human
ggcauuccccaggaggcc

SEQ ID NO: 3028210 - RNA, 18 nt, Human
ggcaugggaaugaauguc

SEQ ID NO: 3028211 - RNA, 17 nt, Human
ggcauuccccaggaggc

SEQ ID NO: 3028212 - RNA, 22 nt, Human
ggcaugggaaugaaugucagug

SEQ ID NO: 3028213 - RNA, 23 nt, Human
ggccuagcauacguacacauuuu

SEQ ID NO: 3028214 - RNA, 17 nt, Human
ggccucuuaugggcugg

SEQ ID NO: 3028215 - RNA, 18 nt, Human
ggccucuuaugggcuggg

SEQ ID NO: 3028216 - RNA, 15 nt, Human
ggccucugcacuccc

SEQ ID NO: 3028217 - RNA, 14 nt, Human
ggccucugcacucc

SEQ ID NO: 3028218 - RNA, 13 nt, Human
ggccucugcacuc

SEQ ID NO: 3028219 - RNA, 11 nt, Human
ggcccagagag

SEQ ID NO: 3028220 - RNA, 17 nt, Human
ggcccucugcccacucc

SEQ ID NO: 3028221 - RNA, 16 nt, Human
ggcccucugcccacuc

SEQ ID NO: 3028222 - RNA, 15 nt, Human
ggcccucugcccacu

SEQ ID NO: 3028223 - RNA, 13 nt, Human
ggcccucugccca

SEQ ID NO: 3028224 - RNA, 20 nt, Human
ggcccucugcccacucccug

SEQ ID NO: 3028225 - RNA, 19 nt, Human
ggcccucugcccacucccu

SEQ ID NO: 3028226 - RNA, 21 nt, Human
ggcccucugcccacucccugc

SEQ ID NO: 3028227 - RNA, 15 nt, Human
ggcccugccuccuuu

SEQ ID NO: 3028228 - RNA, 14 nt, Human
ggcccugccuccuu

SEQ ID NO: 3028229 - RNA, 13 nt, Human
ggcccugccuccu

SEQ ID NO: 3028230 - RNA, 15 nt, Human
ggcuaugcauuugaa

SEQ ID NO: 3028231 - RNA, 14 nt, Human
ggcuaugcauuuga

SEQ ID NO: 3028232 - RNA, 16 nt, Human
ggcuaguugggcuucc

SEQ ID NO: 3028233 - RNA, 15 nt, Human
ggcuaguugggcuuc

SEQ ID NO: 3028234 - RNA, 23 nt, Human
ggcuagugugguguuuccuggca

SEQ ID NO: 3028235 - RNA, 22 nt, Human
ggcuaggaccccuccauguggg

SEQ ID NO: 3028236 - RNA, 16 nt, Human
ggcuaggaccccucca

SEQ ID NO: 3028237 - RNA, 22 nt, Human
ggcuagagguucaaagauauuu

SEQ ID NO: 3028238 - RNA, 17 nt, Human
ggcuagagguucaaaga

SEQ ID NO: 3028239 - RNA, 16 nt, Human
ggcuagagguucaaag

SEQ ID NO: 3028240 - RNA, 15 nt, Human
ggcucaaguccucuu

SEQ ID NO: 3028241 - RNA, 21 nt, Human
ggcucaaguccucuuuucuga

SEQ ID NO: 3028242 - RNA, 12 nt, Human
ggcuccaggagc

SEQ ID NO: 3028243 - RNA, 19 nt, Human
ggcuccaggagcagccaca

SEQ ID NO: 3028244 - RNA, 13 nt, Human
ggcuccaggagca

SEQ ID NO: 3028245 - RNA, 15 nt, Human
ggcuccaggcuccuu

SEQ ID NO: 3028246 - RNA, 11 nt, Human
ggcuccaggcu

SEQ ID NO: 3028247 - RNA, 18 nt, Human
ggcuccaggagcagccac

SEQ ID NO: 3028248 - RNA, 16 nt, Human
ggcuccaggcuccuuu

SEQ ID NO: 3028249 - RNA, 23 nt, Human
ggcgcugccccuggcagccccug

SEQ ID NO: 3028250 - RNA, 21 nt, Human
ggcgcugccccuggcagcccc

SEQ ID NO: 3028251 - RNA, 19 nt, Human
ggcgcugccccuggcagcc

SEQ ID NO: 3028252 - RNA, 18 nt, Human
ggcgcugccccuggcagc

SEQ ID NO: 3028253 - RNA, 19 nt, Human
ggccuggccugagcuggga

SEQ ID NO: 3028254 - RNA, 14 nt, Human
ggccugggggcugg

SEQ ID NO: 3028255 - RNA, 22 nt, Human
ggccugggggcugggcagagga

SEQ ID NO: 3028256 - RNA, 20 nt, Human
ggccugggggcugggcagag

SEQ ID NO: 3028257 - RNA, 22 nt, Human
gauugccuuuuuauaacuuuuu

SEQ ID NO: 3028258 - RNA, 21 nt, Human
gauugccuuuuuauaacuuuu

SEQ ID NO: 3028259 - RNA, 15 nt, Human
gauugccuuuuuaua

SEQ ID NO: 3028260 - RNA, 20 nt, Human
gauucuauguuaauauuuua

SEQ ID NO: 3028261 - RNA, 12 nt, Human
gauuuaaaucag

SEQ ID NO: 3028262 - RNA, 13 nt, Human
gauuuaacagaaa

SEQ ID NO: 3028263 - RNA, 14 nt, Human
gauuuaacagaaau

SEQ ID NO: 3028264 - RNA, 15 nt, Human
gauuuaacagaaaug

SEQ ID NO: 3028265 - RNA, 22 nt, Human
gauuuccguuaaaauaccagcc

SEQ ID NO: 3028266 - RNA, 14 nt, Human
gcaaagaugaaggu

SEQ ID NO: 3028267 - RNA, 18 nt, Human
gcaaagaugaaggucugu

SEQ ID NO: 3028268 - RNA, 15 nt, Human
gcaaaccaucauuga

SEQ ID NO: 3028269 - RNA, 19 nt, Human
gauuuugauccaagcuggu

SEQ ID NO: 3028270 - RNA, 21 nt, Human
gauuuugaaauuuuuauuaaa

SEQ ID NO: 3028271 - RNA, 12 nt, Human
gcaaaccaucau

SEQ ID NO: 3028272 - RNA, 16 nt, Human
gauguugcuaacagca

SEQ ID NO: 3028273 - RNA, 22 nt, Human
gauuacaagcgugagccacugc

SEQ ID NO: 3028274 - RNA, 15 nt, Human
gauuaaacuuaaucu

SEQ ID NO: 3028275 - RNA, 23 nt, Human
gauuacaagcgugagccacugca

SEQ ID NO: 3028276 - RNA, 14 nt, Human
gauggugcaaugac

SEQ ID NO: 3028277 - RNA, 12 nt, Human
gauggugcaaug

SEQ ID NO: 3028278 - RNA, 16 nt, Human
gauggugcaaugaccu

SEQ ID NO: 3028279 - RNA, 15 nt, Human
gauggugcaaugacc

SEQ ID NO: 3028280 - RNA, 17 nt, Human
gauggugcaaugaccuu

SEQ ID NO: 3028281 - RNA, 19 nt, Human
gaugcccaaagaugcagcc

SEQ ID NO: 3028282 - RNA, 20 nt, Human
gaugcccaaagaugcagccg

SEQ ID NO: 3028283 - RNA, 19 nt, Human
gaugggugcuuggaggaag

SEQ ID NO: 3028284 - RNA, 13 nt, Human
gauggggcugcac

SEQ ID NO: 3028285 - RNA, 15 nt, Human
gauggggcugcaccg

SEQ ID NO: 3028286 - RNA, 22 nt, Human
gauggccgggcgcgguggcuca

SEQ ID NO: 3028287 - RNA, 20 nt, Human
gaugggcaacccccagccug

SEQ ID NO: 3028288 - RNA, 21 nt, Human
gaugggcaacccccagccugc

SEQ ID NO: 3028289 - RNA, 24 nt, Human
gauggggcccugccuccuuuguga

SEQ ID NO: 3028290 - RNA, 13 nt, Human
gcacacugucugc

SEQ ID NO: 3028291 - RNA, 20 nt, Human
gcacagaaaauggaagacag

SEQ ID NO: 3028292 - RNA, 20 nt, Human
gcacaccgggcacucagaag

SEQ ID NO: 3028293 - RNA, 17 nt, Human
gcacaagcuccaagcuc

SEQ ID NO: 3028294 - RNA, 15 nt, Human
gcacaagcuccaagc

SEQ ID NO: 3028295 - RNA, 18 nt, Human
gcacaagcuccaagcucc

SEQ ID NO: 3028296 - RNA, 23 nt, Human
gcacagaaaauggaagacagcuc

SEQ ID NO: 3028297 - RNA, 22 nt, Human
gcacagaaaauggaagacagcu

SEQ ID NO: 3028298 - RNA, 21 nt, Human
gcacagaaaauggaagacagc

SEQ ID NO: 3028299 - RNA, 17 nt, Human
gcacagacccugcccug

SEQ ID NO: 3028300 - RNA, 16 nt, Human
gcacagacccugcccu

SEQ ID NO: 3028301 - RNA, 15 nt, Human
gcacagacccugccc

SEQ ID NO: 3028302 - RNA, 14 nt, Human
gcacagacccugcc

SEQ ID NO: 3028303 - RNA, 22 nt, Human
gcacagacccugcccugugggc

SEQ ID NO: 3028304 - RNA, 15 nt, Human
gcacagaguuguuac

SEQ ID NO: 3028305 - RNA, 21 nt, Human
gcacagacccugcccuguggg

SEQ ID NO: 3028306 - RNA, 20 nt, Human
gcacagacccugcccugugg

SEQ ID NO: 3028307 - RNA, 19 nt, Human
gcacagacccugcccugug

SEQ ID NO: 3028308 - RNA, 18 nt, Human
gcacagacccugcccugu

SEQ ID NO: 3028309 - RNA, 15 nt, Human
gcaauggcagccuug

SEQ ID NO: 3028310 - RNA, 14 nt, Human
gcaacucaucuuag

SEQ ID NO: 3028311 - RNA, 14 nt, Human
gcaaugugauaaaa

SEQ ID NO: 3028312 - RNA, 16 nt, Human
gcacaaacagaggccg

SEQ ID NO: 3028313 - RNA, 15 nt, Human
gcacaaacagaggcc

SEQ ID NO: 3028314 - RNA, 14 nt, Human
gcacaaacagaggc

SEQ ID NO: 3028315 - RNA, 14 nt, Human
gcacauuaaaugac

SEQ ID NO: 3028316 - RNA, 12 nt, Human
gcacauuaaaug

SEQ ID NO: 3028317 - RNA, 21 nt, Human
gcacauuaaaugacucuuccc

SEQ ID NO: 3028318 - RNA, 16 nt, Human
gcacauuaaaugacuc

SEQ ID NO: 3028319 - RNA, 22 nt, Human
gcacagaguuguuacauuuuua

SEQ ID NO: 3028320 - RNA, 16 nt, Human
gcacagaguuguuaca

SEQ ID NO: 3028321 - RNA, 18 nt, Human
gcacagaguuguuacauu

SEQ ID NO: 3028322 - RNA, 19 nt, Human
gcacagaguuguuacauuu

SEQ ID NO: 3028323 - RNA, 21 nt, Human
gcacagaguuguuacauuuuu

SEQ ID NO: 3028324 - RNA, 12 nt, Human
gcaccauaacuu

SEQ ID NO: 3028325 - RNA, 19 nt, Human
gcaccuuagacagucccug

SEQ ID NO: 3028326 - RNA, 13 nt, Human
gcacgauuucugu

SEQ ID NO: 3028327 - RNA, 15 nt, Human
gcacgauuucuguuu

SEQ ID NO: 3028328 - RNA, 21 nt, Human
gcaccuuagacagucccugcc

SEQ ID NO: 3028329 - RNA, 20 nt, Human
gcaccuuagacagucccugc

SEQ ID NO: 3028330 - RNA, 18 nt, Human
gcagaaggaagacuucau

SEQ ID NO: 3028331 - RNA, 13 nt, Human
gcagacaggcaag

SEQ ID NO: 3028332 - RNA, 14 nt, Human
gcagacaggcaagc

SEQ ID NO: 3028333 - RNA, 12 nt, Human
gcagacaggcaa

SEQ ID NO: 3028334 - RNA, 18 nt, Human
gcagacaggaccagggau

SEQ ID NO: 3028335 - RNA, 22 nt, Human
gcacugcuuccagugaggcucu

SEQ ID NO: 3028336 - RNA, 23 nt, Human
gcacugcuuccagugaggcucug

SEQ ID NO: 3028337 - RNA, 16 nt, Human
gcacgauuucuguuua

SEQ ID NO: 3028338 - RNA, 12 nt, Human
gagcccugucuc

SEQ ID NO: 3028339 - RNA, 13 nt, Human
gaggaucucuuga

SEQ ID NO: 3028340 - RNA, 22 nt, Human
gaggaucucuugagccugggag

SEQ ID NO: 3028341 - RNA, 19 nt, Human
gaggaucucuugagccugg

SEQ ID NO: 3028342 - RNA, 16 nt, Human
gaggaucucuugagcc

SEQ ID NO: 3028343 - RNA, 20 nt, Human
gaggauugcuugagcucagg

SEQ ID NO: 3028344 - RNA, 20 nt, Human
gaggcagccccauucugccu

SEQ ID NO: 3028345 - RNA, 9 nt, Human
gaggcaggg

SEQ ID NO: 3028346 - RNA, 19 nt, Human
gaggcagccccauucugcc

SEQ ID NO: 3028347 - RNA, 18 nt, Human
gaggcagccccauucugc

SEQ ID NO: 3028348 - RNA, 14 nt, Human
gaggccaugggccu

SEQ ID NO: 3028349 - RNA, 17 nt, Human
gaggccaugggccuccu

SEQ ID NO: 3028350 - RNA, 18 nt, Human
gaggccaugggccuccug

SEQ ID NO: 3028351 - RNA, 20 nt, Human
gaggccaugggccuccugug

SEQ ID NO: 3028352 - RNA, 21 nt, Human
gaggccaugggccuccugugu

SEQ ID NO: 3028353 - RNA, 23 nt, Human
gaggccaugggccuccugugugu

SEQ ID NO: 3028354 - RNA, 20 nt, Human
gaggcccuucucuccagccc

SEQ ID NO: 3028355 - RNA, 15 nt, Human
gaggcccuucucucc

SEQ ID NO: 3028356 - RNA, 21 nt, Human
gaggcccuucucuccagcccc

SEQ ID NO: 3028357 - RNA, 16 nt, Human
gaggcccagagggccu

SEQ ID NO: 3028358 - RNA, 15 nt, Human
gaggcccagagggcc

SEQ ID NO: 3028359 - RNA, 19 nt, Human
gaggcccagagggccugca

SEQ ID NO: 3028360 - RNA, 14 nt, Human
gaggcccagagggc

SEQ ID NO: 3028361 - RNA, 13 nt, Human
gaggcccagaggg

SEQ ID NO: 3028362 - RNA, 11 nt, Human
gaggcccagag

SEQ ID NO: 3028363 - RNA, 16 nt, Human
gaggcugggcucccuu

SEQ ID NO: 3028364 - RNA, 14 nt, Human
gaggcugccucucc

SEQ ID NO: 3028365 - RNA, 16 nt, Human
gaggccuucucugaag

SEQ ID NO: 3028366 - RNA, 18 nt, Human
gaggccuucucugaagga

SEQ ID NO: 3028367 - RNA, 19 nt, Human
gaggccuucucugaaggac

SEQ ID NO: 3028368 - RNA, 18 nt, Human
gagguacacuugugaaua

SEQ ID NO: 3028369 - RNA, 24 nt, Human
gagguaaggaauaccugucccccu

SEQ ID NO: 3028370 - RNA, 21 nt, Human
gagguaaggaauaccuguccc

SEQ ID NO: 3028371 - RNA, 15 nt, Human
gaggguugggcuggu

SEQ ID NO: 3028372 - RNA, 14 nt, Human
gaggguugggcugg

SEQ ID NO: 3028373 - RNA, 12 nt, Human
gaggucagagcc

SEQ ID NO: 3028374 - RNA, 13 nt, Human
gaggucagagccu

SEQ ID NO: 3028375 - RNA, 17 nt, Human
gaggucaaggcugcagu

SEQ ID NO: 3028376 - RNA, 13 nt, Human
gagggucugagga

SEQ ID NO: 3028377 - RNA, 14 nt, Human
gagggucugaggaa

SEQ ID NO: 3028378 - RNA, 12 nt, Human
gaggguggaaua

SEQ ID NO: 3028379 - RNA, 21 nt, Human
gagggugaagugaagacaaug

SEQ ID NO: 3028380 - RNA, 14 nt, Human
gaggguggugaccu

SEQ ID NO: 3028381 - RNA, 15 nt, Human
gagggugggaguggg

SEQ ID NO: 3028382 - RNA, 21 nt, Human
gaggguggugaccucugccug

SEQ ID NO: 3028383 - RNA, 22 nt, Human
gagggugucccaaaaagaaagg

SEQ ID NO: 3028384 - RNA, 17 nt, Human
gaggggguggccuccca

SEQ ID NO: 3028385 - RNA, 13 nt, Human
gaggguaaggcug

SEQ ID NO: 3028386 - RNA, 21 nt, Human
gagggagugacagaggcagcc

SEQ ID NO: 3028387 - RNA, 22 nt, Human
gagggagugacagaggcagccc

SEQ ID NO: 3028388 - RNA, 18 nt, Human
gagggagugacagaggca

SEQ ID NO: 3028389 - RNA, 16 nt, Human
gagggagugacagagg

SEQ ID NO: 3028390 - RNA, 16 nt, Human
gagggagggcuccaga

SEQ ID NO: 3028391 - RNA, 20 nt, Human
gagggagggcuccagacaca

SEQ ID NO: 3028392 - RNA, 20 nt, Human
gaggcugggcucccuuccca

SEQ ID NO: 3028393 - RNA, 19 nt, Human
gagggagggcuccagacac

SEQ ID NO: 3028394 - RNA, 14 nt, Human
gaguugaagacaga

SEQ ID NO: 3028395 - RNA, 21 nt, Human
gaguugaagacagagcuacac

SEQ ID NO: 3028396 - RNA, 17 nt, Human
gaguugaagacagagcu

SEQ ID NO: 3028397 - RNA, 15 nt, Human
gaguugaagacagag

SEQ ID NO: 3028398 - RNA, 20 nt, Human
gaguucauacccuguuacca

SEQ ID NO: 3028399 - RNA, 14 nt, Human
gaguucaucuugaa

SEQ ID NO: 3028400 - RNA, 20 nt, Human
gaguucaucuugaauuguaa

SEQ ID NO: 3028401 - RNA, 19 nt, Human
gaguucaucuugaauugua

SEQ ID NO: 3028402 - RNA, 15 nt, Human
gaguuacagacaaag

SEQ ID NO: 3028403 - RNA, 13 nt, Human
gaguuacagacaa

SEQ ID NO: 3028404 - RNA, 13 nt, Human
gagugggugaaua

SEQ ID NO: 3028405 - RNA, 17 nt, Human
gagugacagaggcagcc

SEQ ID NO: 3028406 - RNA, 20 nt, Human
gagugugccugaagucccag

SEQ ID NO: 3028407 - RNA, 12 nt, Human
gaguuacagaca

SEQ ID NO: 3028408 - RNA, 15 nt, Human
gauagcacagacccu

SEQ ID NO: 3028409 - RNA, 14 nt, Human
gauagccaaggcca

SEQ ID NO: 3028410 - RNA, 22 nt, Human
gauagccaaggccaaaggaagc

SEQ ID NO: 3028411 - RNA, 20 nt, Human
gauacaggaaaagcugcuga

SEQ ID NO: 3028412 - RNA, 22 nt, Human
gauaagaaccuuuugagugccu

SEQ ID NO: 3028413 - RNA, 19 nt, Human
gauacaggaaaagcugcug

SEQ ID NO: 3028414 - RNA, 21 nt, Human
gauacaggaaaagcugcugac

SEQ ID NO: 3028415 - RNA, 23 nt, Human
gauacaggaaaagcugcugacag

SEQ ID NO: 3028416 - RNA, 18 nt, Human
gaucacggcucacugcag

SEQ ID NO: 3028417 - RNA, 15 nt, Human
gaucacggcucacug

SEQ ID NO: 3028418 - RNA, 16 nt, Human
gaucacggcucacugc

SEQ ID NO: 3028419 - RNA, 17 nt, Human
gaggucagagccugcag

SEQ ID NO: 3028420 - RNA, 20 nt, Human
gaggucagagccugcaguua

SEQ ID NO: 3028421 - RNA, 17 nt, Human
gagguugggaggccauu

SEQ ID NO: 3028422 - RNA, 15 nt, Human
gagguugggaggcca

SEQ ID NO: 3028423 - RNA, 16 nt, Human
gagguuucaaaccucc

SEQ ID NO: 3028424 - RNA, 19 nt, Human
gaguagcugggacuacagg

SEQ ID NO: 3028425 - RNA, 22 nt, Human
gaguagcugggacuacaggcac

SEQ ID NO: 3028426 - RNA, 12 nt, Human
gaguaggaagac

SEQ ID NO: 3028427 - RNA, 17 nt, Human
gaguaggaagacuuugg

SEQ ID NO: 3028428 - RNA, 13 nt, Human
gaguaggaagacu

SEQ ID NO: 3028429 - RNA, 20 nt, Human
gaguacuacaguccucccau

SEQ ID NO: 3028430 - RNA, 23 nt, Human
gaguacuacaguccucccaucuc

SEQ ID NO: 3028431 - RNA, 21 nt, Human
gaguacuacaguccucccauc

SEQ ID NO: 3028432 - RNA, 19 nt, Human
gaguaggaagacuuuggaa

SEQ ID NO: 3028433 - RNA, 18 nt, Human
gaguaggaagacuuugga

SEQ ID NO: 3028434 - RNA, 11 nt, Human
gaguauauguc

SEQ ID NO: 3028435 - RNA, 15 nt, Human
gagucgaggacaggg

SEQ ID NO: 3028436 - RNA, 19 nt, Human
gaguccgaaagggacuugg

SEQ ID NO: 3028437 - RNA, 14 nt, Human
gagucgaggacagg

SEQ ID NO: 3028438 - RNA, 14 nt, Human
gagucugaaggcug

SEQ ID NO: 3028439 - RNA, 13 nt, Human
gagucugaaggcu

SEQ ID NO: 3028440 - RNA, 12 nt, Human
gagucugaaggc

SEQ ID NO: 3028441 - RNA, 14 nt, Human
gagugacagaggca

SEQ ID NO: 3028442 - RNA, 15 nt, Human
gagugacagaggcag

SEQ ID NO: 3028443 - RNA, 16 nt, Human
gagugacagaggcagc

SEQ ID NO: 3028444 - RNA, 17 nt, Human
gagugaagcugggagaa

SEQ ID NO: 3028445 - RNA, 19 nt, Human
gacagagccccacccucag

SEQ ID NO: 3028446 - RNA, 12 nt, Human
gacagaggcagc

SEQ ID NO: 3028447 - RNA, 14 nt, Human
gacagaggcagccc

SEQ ID NO: 3028448 - RNA, 16 nt, Human
gacagaggcagcccca

SEQ ID NO: 3028449 - RNA, 21 nt, Human
gacagagcaagugagacccug

SEQ ID NO: 3028450 - RNA, 17 nt, Human
gacagaggcagccccau

SEQ ID NO: 3028451 - RNA, 15 nt, Human
gacagaggggguggc

SEQ ID NO: 3028452 - RNA, 19 nt, Human
gacagaggggguggccucc

SEQ ID NO: 3028453 - RNA, 18 nt, Human
gacagaggggguggccuc

SEQ ID NO: 3028454 - RNA, 23 nt, Human
gacagaggggguggccucccaac

SEQ ID NO: 3028455 - RNA, 19 nt, Human
gacagagugagacucuguc

SEQ ID NO: 3028456 - RNA, 22 nt, Human
gacagaggggguggccucccaa

SEQ ID NO: 3028457 - RNA, 21 nt, Human
gacagaggggguggccuccca

SEQ ID NO: 3028458 - RNA, 13 nt, Human
gacagccacggcc

SEQ ID NO: 3028459 - RNA, 13 nt, Human
gacagagggggug

SEQ ID NO: 3028460 - RNA, 20 nt, Human
gacagagugagacucugucu

SEQ ID NO: 3028461 - RNA, 22 nt, Human
gacagagugagacucugucuca

SEQ ID NO: 3028462 - RNA, 14 nt, Human
gacagccacggcca

SEQ ID NO: 3028463 - RNA, 17 nt, Human
gacagccacggccaggc

SEQ ID NO: 3028464 - RNA, 18 nt, Human
gacagccacggccaggcc

SEQ ID NO: 3028465 - RNA, 19 nt, Human
gacagccacggccaggcca

SEQ ID NO: 3028466 - RNA, 21 nt, Human
gacagcugccugggaucccuc

SEQ ID NO: 3028467 - RNA, 18 nt, Human
gacagcugccugggaucc

SEQ ID NO: 3028468 - RNA, 20 nt, Human
gacagccacggccaggccag

SEQ ID NO: 3028469 - RNA, 21 nt, Human
gacagccacggccaggccaga

SEQ ID NO: 3028470 - RNA, 17 nt, Human
gacagcugccugggauc

SEQ ID NO: 3028471 - RNA, 16 nt, Human
gacagcugccugggau

SEQ ID NO: 3028472 - RNA, 23 nt, Human
gacagggcacaccgggcacucag

SEQ ID NO: 3028473 - RNA, 16 nt, Human
gacagggaggugaccc

SEQ ID NO: 3028474 - RNA, 14 nt, Human
gacaguuaagagaa

SEQ ID NO: 3028475 - RNA, 24 nt, Human
gacagggcacaccgggcacucaga

SEQ ID NO: 3028476 - RNA, 14 nt, Human
gacaggaccaggga

SEQ ID NO: 3028477 - RNA, 23 nt, Human
gacaggaccagggauuuccauga

SEQ ID NO: 3028478 - RNA, 15 nt, Human
gacaggaccagggau

SEQ ID NO: 3028479 - RNA, 14 nt, Human
gacaugggaaaggg

SEQ ID NO: 3028480 - RNA, 14 nt, Human
gacaugaucuucuu

SEQ ID NO: 3028481 - RNA, 20 nt, Human
gaccauucuccaccugccag

SEQ ID NO: 3028482 - RNA, 19 nt, Human
gaccauucuccaccugcca

SEQ ID NO: 3028483 - RNA, 17 nt, Human
gaccauucuccaccugc

SEQ ID NO: 3028484 - RNA, 22 nt, Human
gaccauucuccaccugccaggg

SEQ ID NO: 3028485 - RNA, 21 nt, Human
gaccauucuccaccugccagg

SEQ ID NO: 3028486 - RNA, 19 nt, Human
gaccagagcugccaccugc

SEQ ID NO: 3028487 - RNA, 18 nt, Human
gaccagagcugccaccug

SEQ ID NO: 3028488 - RNA, 17 nt, Human
gaccagagcugccaccu

SEQ ID NO: 3028489 - RNA, 15 nt, Human
gaccagagcugccac

SEQ ID NO: 3028490 - RNA, 14 nt, Human
gaccagagcugcca

SEQ ID NO: 3028491 - RNA, 13 nt, Human
gaccagagcugcc

SEQ ID NO: 3028492 - RNA, 18 nt, Human
gacaugggaaaggggaag

SEQ ID NO: 3028493 - RNA, 24 nt, Human
gaccagacaccuugacagggcaca

SEQ ID NO: 3028494 - RNA, 11 nt, Human
gaccagagcug

SEQ ID NO: 3028495 - RNA, 14 nt, Human
gaccacguuucuaa

SEQ ID NO: 3028496 - RNA, 12 nt, Human
gacccugucuca

SEQ ID NO: 3028497 - RNA, 20 nt, Human
gacccuuguggucccacccc

SEQ ID NO: 3028498 - RNA, 19 nt, Human
gacccuuguggucccaccc

SEQ ID NO: 3028499 - RNA, 21 nt, Human
gacccuuguggucccacccca

SEQ ID NO: 3028500 - RNA, 15 nt, Human
gacccuugugguccc

SEQ ID NO: 3028501 - RNA, 17 nt, Human
gaccgugaggccagaga

SEQ ID NO: 3028502 - RNA, 16 nt, Human
gaccgugaggccagag

SEQ ID NO: 3028503 - RNA, 18 nt, Human
gaccgugaggccagagac

SEQ ID NO: 3028504 - RNA, 15 nt, Human
gaccgugaggccaga

SEQ ID NO: 3028505 - RNA, 23 nt, Human
gacccugaggcccagagggccug

SEQ ID NO: 3028506 - RNA, 14 nt, Human
gaccccuccaugug

SEQ ID NO: 3028507 - RNA, 18 nt, Human
gaccccuccaugugggcu

SEQ ID NO: 3028508 - RNA, 21 nt, Human
gaccccuccaugugggcuagu

SEQ ID NO: 3028509 - RNA, 22 nt, Human
gacccugaggcccagagggccu

SEQ ID NO: 3028510 - RNA, 21 nt, Human
gaaugucaguuguuauuuauu

SEQ ID NO: 3028511 - RNA, 22 nt, Human
gaaugucaguuguuauuuauug

SEQ ID NO: 3028512 - RNA, 13 nt, Human
gaaugucagugug

SEQ ID NO: 3028513 - RNA, 14 nt, Human
gaauugaagcagga

SEQ ID NO: 3028514 - RNA, 18 nt, Human
gaauccagacccggcugc

SEQ ID NO: 3028515 - RNA, 20 nt, Human
gaauccagacccggcugcgu

SEQ ID NO: 3028516 - RNA, 20 nt, Human
gaaugcacaaacagaggccg

SEQ ID NO: 3028517 - RNA, 21 nt, Human
gaaugaaagggcccagagagg

SEQ ID NO: 3028518 - RNA, 21 nt, Human
gaaugcacaaacagaggccgc

SEQ ID NO: 3028519 - RNA, 23 nt, Human
gacaacacucauugaccugaggc

SEQ ID NO: 3028520 - RNA, 22 nt, Human
gacaacacucauugaccugagg

SEQ ID NO: 3028521 - RNA, 15 nt, Human
gaauuguaaggaaug

SEQ ID NO: 3028522 - RNA, 22 nt, Human
gaauuucuuuugccguuauuaa

SEQ ID NO: 3028523 - RNA, 20 nt, Human
gacaaugugaaaagaaaaau

SEQ ID NO: 3028524 - RNA, 19 nt, Human
gacaaugugaaaagaaaaa

SEQ ID NO: 3028525 - RNA, 22 nt, Human
gacaaugcaaaccaucauugaa

SEQ ID NO: 3028526 - RNA, 18 nt, Human
gacaaugugaaaagaaaa

SEQ ID NO: 3028527 - RNA, 12 nt, Human
gacaaugugaaa

SEQ ID NO: 3028528 - RNA, 18 nt, Human
gacaaggauugcuacugu

SEQ ID NO: 3028529 - RNA, 21 nt, Human
gacaaggaugaucuaggaaga

SEQ ID NO: 3028530 - RNA, 19 nt, Human
gacaaggauugcuacuguc

SEQ ID NO: 3028531 - RNA, 23 nt, Human
gacacauguccaagaagcccagg

SEQ ID NO: 3028532 - RNA, 20 nt, Human
gacacauguccaagaagccc

SEQ ID NO: 3028533 - RNA, 15 nt, Human
gacacauguccaaga

SEQ ID NO: 3028534 - RNA, 19 nt, Human
gacacaugcaaggucauuu

SEQ ID NO: 3028535 - RNA, 14 nt, Human
gacacaugcaaggu

SEQ ID NO: 3028536 - RNA, 20 nt, Human
gacacaggcccggcuccagg

SEQ ID NO: 3028537 - RNA, 21 nt, Human
gacacaggcccggcuccaggc

SEQ ID NO: 3028538 - RNA, 19 nt, Human
gacacaggcccggcuccag

SEQ ID NO: 3028539 - RNA, 16 nt, Human
gacacaagccuucggc

SEQ ID NO: 3028540 - RNA, 14 nt, Human
gagaagagaaugca

SEQ ID NO: 3028541 - RNA, 16 nt, Human
gagaagcagaggaagg

SEQ ID NO: 3028542 - RNA, 16 nt, Human
gagaagagaaugcaca

SEQ ID NO: 3028543 - RNA, 14 nt, Human
gagaaaugagcuug

SEQ ID NO: 3028544 - RNA, 16 nt, Human
gagaaagguugaagca

SEQ ID NO: 3028545 - RNA, 19 nt, Human
gacuuaagcacacuugaca

SEQ ID NO: 3028546 - RNA, 13 nt, Human
gacuacaggugug

SEQ ID NO: 3028547 - RNA, 18 nt, Human
gacuacaggugugaguca

SEQ ID NO: 3028548 - RNA, 21 nt, Human
gacuacaggugugagucacca

SEQ ID NO: 3028549 - RNA, 14 nt, Human
gacucauucuucug

SEQ ID NO: 3028550 - RNA, 15 nt, Human
gacucauucuucugu

SEQ ID NO: 3028551 - RNA, 13 nt, Human
gacucgcgacaau

SEQ ID NO: 3028552 - RNA, 13 nt, Human
gacuccugcaggc

SEQ ID NO: 3028553 - RNA, 12 nt, Human
gacuccugcagg

SEQ ID NO: 3028554 - RNA, 14 nt, Human
gacuggaagcacag

SEQ ID NO: 3028555 - RNA, 15 nt, Human
gacuggaagcacagc

SEQ ID NO: 3028556 - RNA, 16 nt, Human
gacuggaagcacagcu

SEQ ID NO: 3028557 - RNA, 18 nt, Human
gacuggaagcacagcuuc

SEQ ID NO: 3028558 - RNA, 17 nt, Human
gacucgcgacaaugcaa

SEQ ID NO: 3028559 - RNA, 21 nt, Human
gacugaguacguugugcauuu

SEQ ID NO: 3028560 - RNA, 22 nt, Human
gacugaguacguugugcauuug

SEQ ID NO: 3028561 - RNA, 18 nt, Human
gacugaguacguugugca

SEQ ID NO: 3028562 - RNA, 13 nt, Human
gacugcccggcag

SEQ ID NO: 3028563 - RNA, 15 nt, Human
gacugcccggcaggg

SEQ ID NO: 3028564 - RNA, 23 nt, Human
gacugaguacguugugcauuugg

SEQ ID NO: 3028565 - RNA, 19 nt, Human
gagaucacgccacugcacu

SEQ ID NO: 3028566 - RNA, 18 nt, Human
gagaucacgccacugcac

SEQ ID NO: 3028567 - RNA, 14 nt, Human
gagauagccaaggc

SEQ ID NO: 3028568 - RNA, 23 nt, Human
gagaucaaccccuucgcuccugu

SEQ ID NO: 3028569 - RNA, 16 nt, Human
gagauagccaaggcca

SEQ ID NO: 3028570 - RNA, 20 nt, Human
gagcaccuuagacagucccu

SEQ ID NO: 3028571 - RNA, 21 nt, Human
gagcacuaaggugugcucuga

SEQ ID NO: 3028572 - RNA, 19 nt, Human
gagcaccuuagacaguccc

SEQ ID NO: 3028573 - RNA, 15 nt, Human
gagcacuaaggugug

SEQ ID NO: 3028574 - RNA, 22 nt, Human
gagcaccuuagacagucccugc

SEQ ID NO: 3028575 - RNA, 21 nt, Human
gagcaccuuagacagucccug

SEQ ID NO: 3028576 - RNA, 18 nt, Human
gagcccugguggcagugg

SEQ ID NO: 3028577 - RNA, 19 nt, Human
gagccagggucucacuaug

SEQ ID NO: 3028578 - RNA, 14 nt, Human
gagccagggucuca

SEQ ID NO: 3028579 - RNA, 23 nt, Human
gagccagauuucacucuccuugg

SEQ ID NO: 3028580 - RNA, 16 nt, Human
gagcagagaauucucu

SEQ ID NO: 3028581 - RNA, 12 nt, Human
gagcagagacca

SEQ ID NO: 3028582 - RNA, 19 nt, Human
gagccaauuuaaagaaaac

SEQ ID NO: 3028583 - RNA, 20 nt, Human
gagccagauuucacucuccu

SEQ ID NO: 3028584 - RNA, 19 nt, Human
gagaggggaacagacugga

SEQ ID NO: 3028585 - RNA, 13 nt, Human
gagaggggcacag

SEQ ID NO: 3028586 - RNA, 16 nt, Human
gagagggugggagugg

SEQ ID NO: 3028587 - RNA, 14 nt, Human
gagagggugggagu

SEQ ID NO: 3028588 - RNA, 18 nt, Human
gagacuccugcaggcagc

SEQ ID NO: 3028589 - RNA, 19 nt, Human
gagacuccugcaggcagcc

SEQ ID NO: 3028590 - RNA, 21 nt, Human
gagacuccugcaggcagccag

SEQ ID NO: 3028591 - RNA, 20 nt, Human
gagacuccugcaggcagcca

SEQ ID NO: 3028592 - RNA, 21 nt, Human
gagacucgcgacaaugcaaac

SEQ ID NO: 3028593 - RNA, 20 nt, Human
gagacucgcgacaaugcaaa

SEQ ID NO: 3028594 - RNA, 22 nt, Human
gagacaggguuuugccauguug

SEQ ID NO: 3028595 - RNA, 12 nt, Human
gagaccaucccu

SEQ ID NO: 3028596 - RNA, 14 nt, Human
gagaccaucccuga

SEQ ID NO: 3028597 - RNA, 21 nt, Human
gagaccaucccugaaggcccc

SEQ ID NO: 3028598 - RNA, 18 nt, Human
gagaccaucccugaaggc

SEQ ID NO: 3028599 - RNA, 23 nt, Human
gagaaugcacaaacagaggccgc

SEQ ID NO: 3028600 - RNA, 21 nt, Human
cugugcaucuagccucaagcu

SEQ ID NO: 3028601 - RNA, 20 nt, Human
cugugauggggcccugccuc

SEQ ID NO: 3028602 - RNA, 19 nt, Human
cugugauggggcccugccu

SEQ ID NO: 3028603 - RNA, 14 nt, Human
cugugccauuuugu

SEQ ID NO: 3028604 - RNA, 16 nt, Human
cugugccaugugccag

SEQ ID NO: 3028605 - RNA, 18 nt, Human
cugugccaugugccaggu

SEQ ID NO: 3028606 - RNA, 18 nt, Human
cugucuccauguuugaug

SEQ ID NO: 3028607 - RNA, 23 nt, Human
cugugaguacuacaguccuccca

SEQ ID NO: 3028608 - RNA, 21 nt, Human
cugugaguacuacaguccucc

SEQ ID NO: 3028609 - RNA, 20 nt, Human
cugugaguacuacaguccuc

SEQ ID NO: 3028610 - RNA, 17 nt, Human
cugugauggggcccugc

SEQ ID NO: 3028611 - RNA, 18 nt, Human
cugugauggggcccugcc

SEQ ID NO: 3028612 - RNA, 17 nt, Human
cuguggaugauaaaaca

SEQ ID NO: 3028613 - RNA, 14 nt, Human
cugugggcccccaa

SEQ ID NO: 3028614 - RNA, 22 nt, Human
cugugcugcccugcccaccugg

SEQ ID NO: 3028615 - RNA, 17 nt, Human
cugugccucugggacug

SEQ ID NO: 3028616 - RNA, 21 nt, Human
cugugcugcccugcccaccug

SEQ ID NO: 3028617 - RNA, 14 nt, Human
cugugccucuggga

SEQ ID NO: 3028618 - RNA, 16 nt, Human
cugugccucugggacu

SEQ ID NO: 3028619 - RNA, 13 nt, Human
cuguucucugccc

SEQ ID NO: 3028620 - RNA, 20 nt, Human
cuguucucugcccuccaaga

SEQ ID NO: 3028621 - RNA, 19 nt, Human
cuguucucugcccuccaag

SEQ ID NO: 3028622 - RNA, 18 nt, Human
cuguucucugcccuccaa

SEQ ID NO: 3028623 - RNA, 17 nt, Human
cuguucucugcccucca

SEQ ID NO: 3028624 - RNA, 16 nt, Human
cuguucucugcccucc

SEQ ID NO: 3028625 - RNA, 15 nt, Human
cuguucucugcccuc

SEQ ID NO: 3028626 - RNA, 14 nt, Human
cuguucucugcccu

SEQ ID NO: 3028627 - RNA, 21 nt, Human
cuguucagcugguugagguuu

SEQ ID NO: 3028628 - RNA, 19 nt, Human
cuguucagcugguugaggu

SEQ ID NO: 3028629 - RNA, 18 nt, Human
cuguucagcugguugagg

SEQ ID NO: 3028630 - RNA, 21 nt, Human
cugugucuugcaauggcagcc

SEQ ID NO: 3028631 - RNA, 20 nt, Human
cugugucuugcaauggcagc

SEQ ID NO: 3028632 - RNA, 22 nt, Human
cugugucuugcaauggcagccu

SEQ ID NO: 3028633 - RNA, 18 nt, Human
cugugugugcgccuacag

SEQ ID NO: 3028634 - RNA, 20 nt, Human
cugugugugcgccuacagga

SEQ ID NO: 3028635 - RNA, 22 nt, Human
cuguaauaaacucauuucuagc

SEQ ID NO: 3028636 - RNA, 16 nt, Human
cugguuccauggccuc

SEQ ID NO: 3028637 - RNA, 20 nt, Human
cuguaauccuagcacuuugg

SEQ ID NO: 3028638 - RNA, 15 nt, Human
cuguacaaaguagaa

SEQ ID NO: 3028639 - RNA, 13 nt, Human
cuguacaaaguag

SEQ ID NO: 3028640 - RNA, 23 nt, Human
cugguggcagcucaccucucccu

SEQ ID NO: 3028641 - RNA, 21 nt, Human
cugguggcagcucaccucucc

SEQ ID NO: 3028642 - RNA, 13 nt, Human
cugguggcagcug

SEQ ID NO: 3028643 - RNA, 14 nt, Human
cugguggcagcugc

SEQ ID NO: 3028644 - RNA, 17 nt, Human
cuggguucuacccaggu

SEQ ID NO: 3028645 - RNA, 16 nt, Human
cuggguucuacccagg

SEQ ID NO: 3028646 - RNA, 15 nt, Human
cuggguucuacccag

SEQ ID NO: 3028647 - RNA, 14 nt, Human
cuggguucuaccca

SEQ ID NO: 3028648 - RNA, 20 nt, Human
cuggguaacuagggaagaua

SEQ ID NO: 3028649 - RNA, 22 nt, Human
cuggguaacuagggaagauaau

SEQ ID NO: 3028650 - RNA, 13 nt, Human
cugggggaagaag

SEQ ID NO: 3028651 - RNA, 24 nt, Human
cugggcuucaguggcagcugcuuu

SEQ ID NO: 3028652 - RNA, 15 nt, Human
cugggggaagaagcu

SEQ ID NO: 3028653 - RNA, 19 nt, Human
cugggggcugggcagagga

SEQ ID NO: 3028654 - RNA, 18 nt, Human
cugggggcugggcagagg

SEQ ID NO: 3028655 - RNA, 23 nt, Human
cuguaucccaugagccucagcau

SEQ ID NO: 3028656 - RNA, 13 nt, Human
cuguacagagccc

SEQ ID NO: 3028657 - RNA, 20 nt, Human
cugucccuuacgugaguccu

SEQ ID NO: 3028658 - RNA, 14 nt, Human
cuguccgagcuuug

SEQ ID NO: 3028659 - RNA, 22 nt, Human
cuguccccgcacugggcuuggg

SEQ ID NO: 3028660 - RNA, 19 nt, Human
cuguccccgcacugggcuu

SEQ ID NO: 3028661 - RNA, 18 nt, Human
cuguccccgcacugggcu

SEQ ID NO: 3028662 - RNA, 17 nt, Human
cuguccccgcacugggc

SEQ ID NO: 3028663 - RNA, 23 nt, Human
cugucucaaaaaaacacaaaagu

SEQ ID NO: 3028664 - RNA, 16 nt, Human
cugucucaaaaaaaga

SEQ ID NO: 3028665 - RNA, 18 nt, Human
cugucucaaaaaaagaaa

SEQ ID NO: 3028666 - RNA, 14 nt, Human
cuguccuacccacc

SEQ ID NO: 3028667 - RNA, 15 nt, Human
cuguccgagcuuuga

SEQ ID NO: 3028668 - RNA, 22 nt, Human
cuggcacugguuuguucccugu

SEQ ID NO: 3028669 - RNA, 18 nt, Human
cuggcacugcuuccagug

SEQ ID NO: 3028670 - RNA, 23 nt, Human
cuggcacugcuuccagugaggcu

SEQ ID NO: 3028671 - RNA, 20 nt, Human
cuggcacugcuuccagugag

SEQ ID NO: 3028672 - RNA, 19 nt, Human
cuggcacugcuuccaguga

SEQ ID NO: 3028673 - RNA, 20 nt, Human
cuggcacccggccccugcug

SEQ ID NO: 3028674 - RNA, 21 nt, Human
cuggcacccggccccugcugg

SEQ ID NO: 3028675 - RNA, 19 nt, Human
cuggcacccggccccugcu

SEQ ID NO: 3028676 - RNA, 20 nt, Human
cuggagugcagugagccgag

SEQ ID NO: 3028677 - RNA, 14 nt, Human
cuggccagaugcac

SEQ ID NO: 3028678 - RNA, 15 nt, Human
cuggcccacugcauc

SEQ ID NO: 3028679 - RNA, 24 nt, Human
cuggcucuuccaggcugggagagc

SEQ ID NO: 3028680 - RNA, 22 nt, Human
cuggcucuuccaggcugggaga

SEQ ID NO: 3028681 - RNA, 21 nt, Human
cuggcucuuccaggcugggag

SEQ ID NO: 3028682 - RNA, 14 nt, Human
cuggcgugcagugg

SEQ ID NO: 3028683 - RNA, 15 nt, Human
cuggcgugcaguggu

SEQ ID NO: 3028684 - RNA, 16 nt, Human
cuggccucugcacucc

SEQ ID NO: 3028685 - RNA, 21 nt, Human
cuggccucugcacuccccugc

SEQ ID NO: 3028686 - RNA, 20 nt, Human
cuggccucugcacuccccug

SEQ ID NO: 3028687 - RNA, 18 nt, Human
cuggccucugcacucccc

SEQ ID NO: 3028688 - RNA, 19 nt, Human
cuggccuggccccucaggg

SEQ ID NO: 3028689 - RNA, 24 nt, Human
cuggccuggccccucagggucccu

SEQ ID NO: 3028690 - RNA, 16 nt, Human
cuggaccuugaacugg

SEQ ID NO: 3028691 - RNA, 15 nt, Human
cuggacccuguggau

SEQ ID NO: 3028692 - RNA, 21 nt, Human
cuggaccuugaacuggguacu

SEQ ID NO: 3028693 - RNA, 17 nt, Human
cuggaccuugaacuggg

SEQ ID NO: 3028694 - RNA, 20 nt, Human
cuggaccuugaacuggguac

SEQ ID NO: 3028695 - RNA, 23 nt, Human
cuggacaggcauguucucugagg

SEQ ID NO: 3028696 - RNA, 14 nt, Human
cuggacaggcaugu

SEQ ID NO: 3028697 - RNA, 17 nt, Human
cuggacaggcauguucu

SEQ ID NO: 3028698 - RNA, 22 nt, Human
cuggagguacgaaaagagggga

SEQ ID NO: 3028699 - RNA, 17 nt, Human
cuggagguacgaaaaga

SEQ ID NO: 3028700 - RNA, 14 nt, Human
cuggagugcaguga

SEQ ID NO: 3028701 - RNA, 15 nt, Human
cuggagugcagugag

SEQ ID NO: 3028702 - RNA, 16 nt, Human
cuggagugcagugagc

SEQ ID NO: 3028703 - RNA, 17 nt, Human
cuggagugcagugagcc

SEQ ID NO: 3028704 - RNA, 15 nt, Human
cugcugcuggcuggu

SEQ ID NO: 3028705 - RNA, 14 nt, Human
cugcugcuggcugg

SEQ ID NO: 3028706 - RNA, 15 nt, Human
cugcuuccagugagg

SEQ ID NO: 3028707 - RNA, 18 nt, Human
cugcuuccagugaggcuc

SEQ ID NO: 3028708 - RNA, 16 nt, Human
cugcuuccagugaggc

SEQ ID NO: 3028709 - RNA, 23 nt, Human
cugcuuccagugaggcucugccc

SEQ ID NO: 3028710 - RNA, 21 nt, Human
cugcuuccagugaggcucugc

SEQ ID NO: 3028711 - RNA, 20 nt, Human
cugcuuccagugaggcucug

SEQ ID NO: 3028712 - RNA, 19 nt, Human
cugcuuccagugaggcucu

SEQ ID NO: 3028713 - RNA, 13 nt, Human
cugcugguucagg

SEQ ID NO: 3028714 - RNA, 15 nt, Human
cugcugguucagggu

SEQ ID NO: 3028715 - RNA, 23 nt, Human
cugcugguucaggguuggccccu

SEQ ID NO: 3028716 - RNA, 19 nt, Human
cugcgaccacaagaaggau

SEQ ID NO: 3028717 - RNA, 20 nt, Human
cugcuccagcuguucagcug

SEQ ID NO: 3028718 - RNA, 19 nt, Human
cugcuccagcuguucagcu

SEQ ID NO: 3028719 - RNA, 19 nt, Human
cugcucuccgaccagacac

SEQ ID NO: 3028720 - RNA, 15 nt, Human
cugcugcaguugcca

SEQ ID NO: 3028721 - RNA, 11 nt, Human
cugcugaaggc

SEQ ID NO: 3028722 - RNA, 20 nt, Human
cugccugcccaggccccugc

SEQ ID NO: 3028723 - RNA, 21 nt, Human
cugccugggaucccucauccu

SEQ ID NO: 3028724 - RNA, 15 nt, Human
cugccugaagucaca

SEQ ID NO: 3028725 - RNA, 15 nt, Human
cugccugcccaggcc

SEQ ID NO: 3028726 - RNA, 16 nt, Human
cugccugcccaggccc

SEQ ID NO: 3028727 - RNA, 17 nt, Human
cugccugcccaggcccc

SEQ ID NO: 3028728 - RNA, 14 nt, Human
cugccucuucucua

SEQ ID NO: 3028729 - RNA, 15 nt, Human
cugccucuucucuac

SEQ ID NO: 3028730 - RNA, 11 nt, Human
cugccucccau

SEQ ID NO: 3028731 - RNA, 19 nt, Human
cugccucccaucacccgcu

SEQ ID NO: 3028732 - RNA, 16 nt, Human
cugccucccaucaccc

SEQ ID NO: 3028733 - RNA, 14 nt, Human
cugccucccaucac

SEQ ID NO: 3028734 - RNA, 12 nt, Human
cugccucccauc

SEQ ID NO: 3028735 - RNA, 22 nt, Human
cugccucugacacacagcucug

SEQ ID NO: 3028736 - RNA, 23 nt, Human
cugccucugacacacagcucugu

SEQ ID NO: 3028737 - RNA, 15 nt, Human
cugccgcagcccugc

SEQ ID NO: 3028738 - RNA, 14 nt, Human
cugccgcagcccug

SEQ ID NO: 3028739 - RNA, 18 nt, Human
cugccgcagcccugcaga

SEQ ID NO: 3028740 - RNA, 17 nt, Human
cugccgcagcccugcag

SEQ ID NO: 3028741 - RNA, 12 nt, Human
cugcccuccaag

SEQ ID NO: 3028742 - RNA, 17 nt, Human
cucccuucccaccucuc

SEQ ID NO: 3028743 - RNA, 16 nt, Human
cucccuucccaccucu

SEQ ID NO: 3028744 - RNA, 15 nt, Human
cucccuucccaccuc

SEQ ID NO: 3028745 - RNA, 14 nt, Human
cucccuucccaccu

SEQ ID NO: 3028746 - RNA, 16 nt, Human
cuuagugauguaauua

SEQ ID NO: 3028747 - RNA, 15 nt, Human
cuuagugauguaauu

SEQ ID NO: 3028748 - RNA, 14 nt, Human
cuuagucacugaga

SEQ ID NO: 3028749 - RNA, 19 nt, Human
cuuagucacugagacagcc

SEQ ID NO: 3028750 - RNA, 18 nt, Human
cuuagucacugagacagc

SEQ ID NO: 3028751 - RNA, 16 nt, Human
cuuagucacugagaca

SEQ ID NO: 3028752 - RNA, 13 nt, Human
cuuagauguauau

SEQ ID NO: 3028753 - RNA, 16 nt, Human
cuguucuggcagaguu

SEQ ID NO: 3028754 - RNA, 15 nt, Human
cuuauacauuugaua

SEQ ID NO: 3028755 - RNA, 15 nt, Human
cuuauuuccucauuu

SEQ ID NO: 3028756 - RNA, 17 nt, Human
cuuauuuaaugaaagac

SEQ ID NO: 3028757 - RNA, 18 nt, Human
cuuauuuaaugaaagacu

SEQ ID NO: 3028758 - RNA, 23 nt, Human
cuucacagaugggugcuuggagg

SEQ ID NO: 3028759 - RNA, 10 nt, Human
cuucaaggau

SEQ ID NO: 3028760 - RNA, 16 nt, Human
cuucaaggauccugag

SEQ ID NO: 3028761 - RNA, 15 nt, Human
cuucaaggauccuga

SEQ ID NO: 3028762 - RNA, 13 nt, Human
cuucaaggauccu

SEQ ID NO: 3028763 - RNA, 17 nt, Human
cuucccuacaguugaaa

SEQ ID NO: 3028764 - RNA, 17 nt, Human
cuuccaggggugggaca

SEQ ID NO: 3028765 - RNA, 15 nt, Human
cuuccagggguggga

SEQ ID NO: 3028766 - RNA, 14 nt, Human
cuuccagggguggg

SEQ ID NO: 3028767 - RNA, 19 nt, Human
cuuccaggcugggagagcc

SEQ ID NO: 3028768 - RNA, 16 nt, Human
cuuccaggcugggaga

SEQ ID NO: 3028769 - RNA, 15 nt, Human
cuuccaggcugggag

SEQ ID NO: 3028770 - RNA, 14 nt, Human
cuuccaggcuggga

SEQ ID NO: 3028771 - RNA, 12 nt, Human
cuuccaggcugg

SEQ ID NO: 3028772 - RNA, 16 nt, Human
cuuccacaagagccca

SEQ ID NO: 3028773 - RNA, 17 nt, Human
cuuccacaagagcccag

SEQ ID NO: 3028774 - RNA, 21 nt, Human
cuuccacaagagcccaggccu

SEQ ID NO: 3028775 - RNA, 19 nt, Human
cuuccacaagagcccaggc

SEQ ID NO: 3028776 - RNA, 17 nt, Human
cuucaguggcagcugcu

SEQ ID NO: 3028777 - RNA, 20 nt, Human
cuucauucaacccaccugcg

SEQ ID NO: 3028778 - RNA, 15 nt, Human
cuucaguaagccgug

SEQ ID NO: 3028779 - RNA, 22 nt, Human
cuucagugccuuauggaacacu

SEQ ID NO: 3028780 - RNA, 18 nt, Human
cuucagugccuuauggaa

SEQ ID NO: 3028781 - RNA, 13 nt, Human
cuucaguggcagc

SEQ ID NO: 3028782 - RNA, 14 nt, Human
cuucaguggcagcu

SEQ ID NO: 3028783 - RNA, 15 nt, Human
cuucaguggcagcug

SEQ ID NO: 3028784 - RNA, 16 nt, Human
cuucaguggcagcugc

SEQ ID NO: 3028785 - RNA, 23 nt, Human
cuucaguaagccgugauuuucau

SEQ ID NO: 3028786 - RNA, 16 nt, Human
cuucaguaagccguga

SEQ ID NO: 3028787 - RNA, 17 nt, Human
cuugaacuuugaccucu

SEQ ID NO: 3028788 - RNA, 21 nt, Human
cuugaacuuugaccucugcag

SEQ ID NO: 3028789 - RNA, 13 nt, Human
cuugaacuccugg

SEQ ID NO: 3028790 - RNA, 13 nt, Human
cuugaccucaggu

SEQ ID NO: 3028791 - RNA, 21 nt, Human
cuugaccgugaggccagagac

SEQ ID NO: 3028792 - RNA, 20 nt, Human
cuugaccgugaggccagaga

SEQ ID NO: 3028793 - RNA, 18 nt, Human
cuugaccgugaggccaga

SEQ ID NO: 3028794 - RNA, 23 nt, Human
cuugaccauucuccaccugccag

SEQ ID NO: 3028795 - RNA, 22 nt, Human
cuugaccauucuccaccugcca

SEQ ID NO: 3028796 - RNA, 17 nt, Human
cuugaccgugaggccag

SEQ ID NO: 3028797 - RNA, 16 nt, Human
cuugagccugggaggu

SEQ ID NO: 3028798 - RNA, 15 nt, Human
cuugagccuugaacu

SEQ ID NO: 3028799 - RNA, 17 nt, Human
cuugagccuugaacuuu

SEQ ID NO: 3028800 - RNA, 18 nt, Human
cuugagccuugaacuuug

SEQ ID NO: 3028801 - RNA, 13 nt, Human
cuugagcucagga

SEQ ID NO: 3028802 - RNA, 21 nt, Human
cuugaggguugggcugguguc

SEQ ID NO: 3028803 - RNA, 21 nt, Human
cuugaguugauucagcucugc

SEQ ID NO: 3028804 - RNA, 19 nt, Human
cuugaggguugggcuggug

SEQ ID NO: 3028805 - RNA, 20 nt, Human
cuugaggguugggcuggugu

SEQ ID NO: 3028806 - RNA, 23 nt, Human
cuugaaaacacuguucucugccc

SEQ ID NO: 3028807 - RNA, 14 nt, Human
cuugaaaacacugu

SEQ ID NO: 3028808 - RNA, 13 nt, Human
cuucuguggguuu

SEQ ID NO: 3028809 - RNA, 21 nt, Human
cuucuguggguuucuaaagcu

SEQ ID NO: 3028810 - RNA, 14 nt, Human
cuucuguggguuuc

SEQ ID NO: 3028811 - RNA, 12 nt, Human
cuucuccaggcu

SEQ ID NO: 3028812 - RNA, 13 nt, Human
cuucuccaggcug

SEQ ID NO: 3028813 - RNA, 20 nt, Human
cuucuccacuuucuagccag

SEQ ID NO: 3028814 - RNA, 11 nt, Human
cuucuccacuu

SEQ ID NO: 3028815 - RNA, 12 nt, Human
cuucucuccagc

SEQ ID NO: 3028816 - RNA, 19 nt, Human
cuucucuccagccccugga

SEQ ID NO: 3028817 - RNA, 17 nt, Human
cuucucuccagccccug

SEQ ID NO: 3028818 - RNA, 15 nt, Human
cuucucuccagcccc

SEQ ID NO: 3028819 - RNA, 13 nt, Human
cuucucuccagcc

SEQ ID NO: 3028820 - RNA, 13 nt, Human
cuucucugaagga

SEQ ID NO: 3028821 - RNA, 20 nt, Human
cuucugccauuucugagauc

SEQ ID NO: 3028822 - RNA, 13 nt, Human
cuucugcuucagc

SEQ ID NO: 3028823 - RNA, 21 nt, Human
cuucuguacgucugacaggca

SEQ ID NO: 3028824 - RNA, 14 nt, Human
cuucuguacgucug

SEQ ID NO: 3028825 - RNA, 15 nt, Human
cuucuguacgucuga

SEQ ID NO: 3028826 - RNA, 18 nt, Human
cuucuguacgucugacag

SEQ ID NO: 3028827 - RNA, 20 nt, Human
cuucuguacgucugacaggc

SEQ ID NO: 3028828 - RNA, 16 nt, Human
cuucuguccuacucug

SEQ ID NO: 3028829 - RNA, 17 nt, Human
cuucuguccuacucugu

SEQ ID NO: 3028830 - RNA, 18 nt, Human
cuucuguccuacucugug

SEQ ID NO: 3028831 - RNA, 19 nt, Human
cuucuguccuacucugugu

SEQ ID NO: 3028832 - RNA, 21 nt, Human
cuucuguccuacucuguguca

SEQ ID NO: 3028833 - RNA, 14 nt, Human
cuuugcaggaaauc

SEQ ID NO: 3028834 - RNA, 20 nt, Human
cuuugcagacaggcaagcac

SEQ ID NO: 3028835 - RNA, 16 nt, Human
cuuugcagacaggcaa

SEQ ID NO: 3028836 - RNA, 13 nt, Human
cuuugaccucugc

SEQ ID NO: 3028837 - RNA, 14 nt, Human
cuuugaccucugca

SEQ ID NO: 3028838 - RNA, 15 nt, Human
cuuugaccucugcag

SEQ ID NO: 3028839 - RNA, 17 nt, Human
cuuugaccucugcagca

SEQ ID NO: 3028840 - RNA, 18 nt, Human
cuuugaccucugcagcaa

SEQ ID NO: 3028841 - RNA, 20 nt, Human
cuuugaccucugcagcaaua

SEQ ID NO: 3028842 - RNA, 24 nt, Human
cuuugaccucugcagcaauaaagc

SEQ ID NO: 3028843 - RNA, 14 nt, Human
cuuuguccccaccg

SEQ ID NO: 3028844 - RNA, 19 nt, Human
cuuuggcuauuagagauca

SEQ ID NO: 3028845 - RNA, 15 nt, Human
cuuuguccccaccgc

SEQ ID NO: 3028846 - RNA, 15 nt, Human
cuuugugaggaagcc

SEQ ID NO: 3028847 - RNA, 19 nt, Human
cuuugugauuuuuguaauu

SEQ ID NO: 3028848 - RNA, 15 nt, Human
cuuuccaggaaggcu

SEQ ID NO: 3028849 - RNA, 15 nt, Human
cuuuccaucuacccu

SEQ ID NO: 3028850 - RNA, 16 nt, Human
cuuuccucuuuggucu

SEQ ID NO: 3028851 - RNA, 12 nt, Human
cuuuccugaggc

SEQ ID NO: 3028852 - RNA, 11 nt, Human
cuuucccuccc

SEQ ID NO: 3028853 - RNA, 13 nt, Human
cuuucccucccuu

SEQ ID NO: 3028854 - RNA, 14 nt, Human
cuuucccucccuuc

SEQ ID NO: 3028855 - RNA, 16 nt, Human
cuuucccucccuuccu

SEQ ID NO: 3028856 - RNA, 17 nt, Human
cuuucuggcuaugcauu

SEQ ID NO: 3028857 - RNA, 18 nt, Human
cuuucuggcuaugcauuu

SEQ ID NO: 3028858 - RNA, 19 nt, Human
cuuucuggcuaugcauuug

SEQ ID NO: 3028859 - RNA, 20 nt, Human
cuuucuggcuaugcauuuga

SEQ ID NO: 3028860 - RNA, 15 nt, Human
cuuuccugaggcugg

SEQ ID NO: 3028861 - RNA, 13 nt, Human
cuuuccugaggcu

SEQ ID NO: 3028862 - RNA, 17 nt, Human
cuuguaaauagcucagg

SEQ ID NO: 3028863 - RNA, 18 nt, Human
cuuguaaauagcucaggu

SEQ ID NO: 3028864 - RNA, 15 nt, Human
cuuguacauaaugcg

SEQ ID NO: 3028865 - RNA, 12 nt, Human
cuuguacauaau

SEQ ID NO: 3028866 - RNA, 22 nt, Human
cuuguacauaaugcgugcauac

SEQ ID NO: 3028867 - RNA, 19 nt, Human
cuuguacauaaugcgugca

SEQ ID NO: 3028868 - RNA, 21 nt, Human
cuuguacauaaugcgugcaua

SEQ ID NO: 3028869 - RNA, 16 nt, Human
cuuguaaauagcucag

SEQ ID NO: 3028870 - RNA, 22 nt, Human
cuuggggggcugaggugggagg

SEQ ID NO: 3028871 - RNA, 23 nt, Human
cuuggggggcugaggugggagga

SEQ ID NO: 3028872 - RNA, 13 nt, Human
cuuuacuauggcc

SEQ ID NO: 3028873 - RNA, 22 nt, Human
cuuuaccuuuuuuauacauaaa

SEQ ID NO: 3028874 - RNA, 14 nt, Human
cuuuagcgcccagu

SEQ ID NO: 3028875 - RNA, 13 nt, Human
cuuuauaauucua

SEQ ID NO: 3028876 - RNA, 19 nt, Human
cuuuauaauucuacuuuga

SEQ ID NO: 3028877 - RNA, 15 nt, Human
cuuuaugcacaaaau

SEQ ID NO: 3028878 - RNA, 17 nt, Human
gaaaaggccuucuuccc

SEQ ID NO: 3028879 - RNA, 24 nt, Human
gaaaacacuguucucugcccucca

SEQ ID NO: 3028880 - RNA, 22 nt, Human
gaaaacacuguucucugcccuc

SEQ ID NO: 3028881 - RNA, 19 nt, Human
gaaaagcugcugacagugu

SEQ ID NO: 3028882 - RNA, 19 nt, Human
gaaaacguggcugcuucaa

SEQ ID NO: 3028883 - RNA, 22 nt, Human
gaaaacguggcugcuucaagga

SEQ ID NO: 3028884 - RNA, 20 nt, Human
gaaaacguggcugcuucaag

SEQ ID NO: 3028885 - RNA, 22 nt, Human
gaaaaucagccugcuccagcug

SEQ ID NO: 3028886 - RNA, 20 nt, Human
gaaaaucagccugcuccagc

SEQ ID NO: 3028887 - RNA, 21 nt, Human
cuuuuuggguuuauuuggaaa

SEQ ID NO: 3028888 - RNA, 17 nt, Human
cuuuuuuggcugcugaa

SEQ ID NO: 3028889 - RNA, 22 nt, Human
cuuuuuuggcugcugaaggcuc

SEQ ID NO: 3028890 - RNA, 20 nt, Human
cuuuuuuggcugcugaaggc

SEQ ID NO: 3028891 - RNA, 16 nt, Human
cuuuuuuggcugcuga

SEQ ID NO: 3028892 - RNA, 15 nt, Human
gaaaaaggaggaaga

SEQ ID NO: 3028893 - RNA, 12 nt, Human
gaaaaaggagga

SEQ ID NO: 3028894 - RNA, 14 nt, Human
gaaaacacauuuuu

SEQ ID NO: 3028895 - RNA, 18 nt, Human
gaaaacacauuuuucuua

SEQ ID NO: 3028896 - RNA, 19 nt, Human
gaaaacacauuuuucuuag

SEQ ID NO: 3028897 - RNA, 11 nt, Human
cuuuuguucuu

SEQ ID NO: 3028898 - RNA, 12 nt, Human
cuuuuguucuug

SEQ ID NO: 3028899 - RNA, 18 nt, Human
cuuuguuaguuucuccaa

SEQ ID NO: 3028900 - RNA, 22 nt, Human
cuuuuuauauucucagcagagu

SEQ ID NO: 3028901 - RNA, 17 nt, Human
gaaagcccugagcuuuc

SEQ ID NO: 3028902 - RNA, 22 nt, Human
gaaagcccugagcuuucugcua

SEQ ID NO: 3028903 - RNA, 21 nt, Human
gaaagcccugagcuuucugcu

SEQ ID NO: 3028904 - RNA, 16 nt, Human
gaaagaguaggaagac

SEQ ID NO: 3028905 - RNA, 15 nt, Human
gaaagaguaggaaga

SEQ ID NO: 3028906 - RNA, 17 nt, Human
gaaagacuguacaaagu

SEQ ID NO: 3028907 - RNA, 19 nt, Human
gaaagacuuuuccaacccu

SEQ ID NO: 3028908 - RNA, 23 nt, Human
gaaacccagcucugguccauaga

SEQ ID NO: 3028909 - RNA, 14 nt, Human
gaaacccagcucug

SEQ ID NO: 3028910 - RNA, 13 nt, Human
gaaacccagcucu

SEQ ID NO: 3028911 - RNA, 19 nt, Human
gaaacccagcucuggucca

SEQ ID NO: 3028912 - RNA, 18 nt, Human
gaaacccagcucuggucc

SEQ ID NO: 3028913 - RNA, 16 nt, Human
gaaacccagcucuggu

SEQ ID NO: 3028914 - RNA, 15 nt, Human
gaaacccagcucugg

SEQ ID NO: 3028915 - RNA, 13 nt, Human
cuaccaauauuua

SEQ ID NO: 3028916 - RNA, 15 nt, Human
cuaccaauauuuaau

SEQ ID NO: 3028917 - RNA, 21 nt, Human
cuaccaauauuuaaucuuuua

SEQ ID NO: 3028918 - RNA, 18 nt, Human
cuaccauccccuguagag

SEQ ID NO: 3028919 - RNA, 17 nt, Human
cuacauuagguugugaa

SEQ ID NO: 3028920 - RNA, 18 nt, Human
cuacauuagguugugaau

SEQ ID NO: 3028921 - RNA, 22 nt, Human
cuacauuauaaaugucucuuua

SEQ ID NO: 3028922 - RNA, 17 nt, Human
cuacauugacagauuga

SEQ ID NO: 3028923 - RNA, 13 nt, Human
cuacauucuguua

SEQ ID NO: 3028924 - RNA, 14 nt, Human
cuacauucuguuaa

SEQ ID NO: 3028925 - RNA, 17 nt, Human
cuacccucuuagaaaaa

SEQ ID NO: 3028926 - RNA, 18 nt, Human
cuacccagcgagcccugg

SEQ ID NO: 3028927 - RNA, 13 nt, Human
cuacccaggugcu

SEQ ID NO: 3028928 - RNA, 12 nt, Human
cuacccaggugc

SEQ ID NO: 3028929 - RNA, 15 nt, Human
cuacccagcgagccc

SEQ ID NO: 3028930 - RNA, 17 nt, Human
cuacccagcgagcccug

SEQ ID NO: 3028931 - RNA, 16 nt, Human
cuacaggugugaguca

SEQ ID NO: 3028932 - RNA, 14 nt, Human
cuacaggugugagu

SEQ ID NO: 3028933 - RNA, 13 nt, Human
cuacaguccuccc

SEQ ID NO: 3028934 - RNA, 18 nt, Human
cuacauggaguauauguc

SEQ ID NO: 3028935 - RNA, 20 nt, Human
cuacauggaguauaugucaa

SEQ ID NO: 3028936 - RNA, 15 nt, Human
cuacaggcacccacc

SEQ ID NO: 3028937 - RNA, 17 nt, Human
cuacaggcacccaccau

SEQ ID NO: 3028938 - RNA, 14 nt, Human
cuacaggagugagc

SEQ ID NO: 3028939 - RNA, 15 nt, Human
cuacaggagugagca

SEQ ID NO: 3028940 - RNA, 16 nt, Human
cuacaggagugagcac

SEQ ID NO: 3028941 - RNA, 23 nt, Human
cuacagcuugaccgugaggccag

SEQ ID NO: 3028942 - RNA, 22 nt, Human
cuacagcuugaccgugaggcca

SEQ ID NO: 3028943 - RNA, 19 nt, Human
cuacagcuugaccgugagg

SEQ ID NO: 3028944 - RNA, 22 nt, Human
cuacagaggccaugggccuccu

SEQ ID NO: 3028945 - RNA, 18 nt, Human
cuacagaggccaugggcc

SEQ ID NO: 3028946 - RNA, 20 nt, Human
cuacagaggccaugggccuc

SEQ ID NO: 3028947 - RNA, 17 nt, Human
cuacagaggccaugggc

SEQ ID NO: 3028948 - RNA, 17 nt, Human
cuacacugugcugaguc

SEQ ID NO: 3028949 - RNA, 14 nt, Human
cuacacugugcuga

SEQ ID NO: 3028950 - RNA, 13 nt, Human
cuacacugugcug

SEQ ID NO: 3028951 - RNA, 21 nt, Human
cuaauaugaugacuguuuuua

SEQ ID NO: 3028952 - RNA, 19 nt, Human
cuaauaugaugacuguuuu

SEQ ID NO: 3028953 - RNA, 12 nt, Human
cuaaugggacac

SEQ ID NO: 3028954 - RNA, 13 nt, Human
cuaaugggacacu

SEQ ID NO: 3028955 - RNA, 21 nt, Human
cuacacacugcauguuuguga

SEQ ID NO: 3028956 - RNA, 21 nt, Human
cuacacaggggaaaagaggag

SEQ ID NO: 3028957 - RNA, 22 nt, Human
cuaagcuauucaguaauaacuc

SEQ ID NO: 3028958 - RNA, 17 nt, Human
cuaauagacaauuuauu

SEQ ID NO: 3028959 - RNA, 19 nt, Human
cuaauagacaauuuauuau

SEQ ID NO: 3028960 - RNA, 23 nt, Human
cuaauagacaauuuauuauggca

SEQ ID NO: 3028961 - RNA, 20 nt, Human
cuaacagcaacacaaagcuu

SEQ ID NO: 3028962 - RNA, 12 nt, Human
cuaaccacgcug

SEQ ID NO: 3028963 - RNA, 14 nt, Human
cuaaccacgcugga

SEQ ID NO: 3028964 - RNA, 16 nt, Human
cuaaauucaugcugcu

SEQ ID NO: 3028965 - RNA, 23 nt, Human
cuaagagggagggagggcuccag

SEQ ID NO: 3028966 - RNA, 13 nt, Human
cuaagagggaggg

SEQ ID NO: 3028967 - RNA, 22 nt, Human
cuaagagggagggagggcucca

SEQ ID NO: 3028968 - RNA, 15 nt, Human
cuaagagggagggag

SEQ ID NO: 3028969 - RNA, 22 nt, Human
cuaaaugaaaaucgugacaaca

SEQ ID NO: 3028970 - RNA, 21 nt, Human
cuaaaucuccaaaauaaaacu

SEQ ID NO: 3028971 - RNA, 20 nt, Human
cuaaaucuccaaaauaaaac

SEQ ID NO: 3028972 - RNA, 23 nt, Human
cgggaggauguucugggacacag

SEQ ID NO: 3028973 - RNA, 21 nt, Human
cgggaggauguucugggacac

SEQ ID NO: 3028974 - RNA, 12 nt, Human
cuauuuauuuau

SEQ ID NO: 3028975 - RNA, 19 nt, Human
cuauuuauuuauuuauuca

SEQ ID NO: 3028976 - RNA, 14 nt, Human
cucaaauuucuaaa

SEQ ID NO: 3028977 - RNA, 13 nt, Human
cucaaauuucuaa

SEQ ID NO: 3028978 - RNA, 15 nt, Human
cucaaauuucuaaau

SEQ ID NO: 3028979 - RNA, 17 nt, Human
cucaaauuucuaaaucu

SEQ ID NO: 3028980 - RNA, 14 nt, Human
cucaacucuccucc

SEQ ID NO: 3028981 - RNA, 15 nt, Human
cucacagaagaugaa

SEQ ID NO: 3028982 - RNA, 23 nt, Human
cucacacggacacucaaaagcug

SEQ ID NO: 3028983 - RNA, 18 nt, Human
cucaacucuccuccagag

SEQ ID NO: 3028984 - RNA, 16 nt, Human
cucaacucuccuccag

SEQ ID NO: 3028985 - RNA, 16 nt, Human
cuauugcugcuugagg

SEQ ID NO: 3028986 - RNA, 18 nt, Human
cuauuguuagucucuuga

SEQ ID NO: 3028987 - RNA, 16 nt, Human
cuauucugagaugacu

SEQ ID NO: 3028988 - RNA, 15 nt, Human
cuauucugagaugac

SEQ ID NO: 3028989 - RNA, 18 nt, Human
cuauucugagaugacuau

SEQ ID NO: 3028990 - RNA, 23 nt, Human
cuauucaguaauaacucuacccu

SEQ ID NO: 3028991 - RNA, 23 nt, Human
cuauucagcacaaggaaauaaaa

SEQ ID NO: 3028992 - RNA, 17 nt, Human
cuauucaguaauaacuc

SEQ ID NO: 3028993 - RNA, 13 nt, Human
cuauguaucaaug

SEQ ID NO: 3028994 - RNA, 18 nt, Human
cuauauaauuccuguuuu

SEQ ID NO: 3028995 - RNA, 20 nt, Human
cuauauaauuccuguuuuua

SEQ ID NO: 3028996 - RNA, 21 nt, Human
cuaugcauuugaaaauuuuga

SEQ ID NO: 3028997 - RNA, 19 nt, Human
cuauagccuaggugacaga

SEQ ID NO: 3028998 - RNA, 18 nt, Human
cuauagccuaggugacag

SEQ ID NO: 3028999 - RNA, 20 nt, Human
cuauagccuaggugacagag

SEQ ID NO: 3029000 - RNA, 21 nt, Human
cuauagccuaggugacagagu

SEQ ID NO: 3029001 - RNA, 17 nt, Human
cuaggaagacuuuggaa

SEQ ID NO: 3029002 - RNA, 15 nt, Human
cuaggaagacuuugg

SEQ ID NO: 3029003 - RNA, 20 nt, Human
cuaggaacacuccuucacag

SEQ ID NO: 3029004 - RNA, 22 nt, Human
cuagccuuagaagucacacagu

SEQ ID NO: 3029005 - RNA, 23 nt, Human
cuagccuuagaagucacacagua

SEQ ID NO: 3029006 - RNA, 24 nt, Human
cuagauacuguaucaugacaaaga

SEQ ID NO: 3029007 - RNA, 13 nt, Human
cuagauacuguau

SEQ ID NO: 3029008 - RNA, 16 nt, Human
cuagauacuguaucau

SEQ ID NO: 3029009 - RNA, 21 nt, Human
cuagccuuagaagucacacag

SEQ ID NO: 3029010 - RNA, 22 nt, Human
cuagccugugccucugggacug

SEQ ID NO: 3029011 - RNA, 21 nt, Human
cuagccugugccucugggacu

SEQ ID NO: 3029012 - RNA, 19 nt, Human
cuagccugugccucuggga

SEQ ID NO: 3029013 - RNA, 19 nt, Human
cuacuguccuacccacccu

SEQ ID NO: 3029014 - RNA, 21 nt, Human
cuacuguaauuugugauacaa

SEQ ID NO: 3029015 - RNA, 12 nt, Human
cuacucuguguc

SEQ ID NO: 3029016 - RNA, 15 nt, Human
cuacucgaguuacag

SEQ ID NO: 3029017 - RNA, 19 nt, Human
cuacucgaguuacagacaa

SEQ ID NO: 3029018 - RNA, 16 nt, Human
cuacucgaguuacaga

SEQ ID NO: 3029019 - RNA, 20 nt, Human
cuacuguccuacccacccuc

SEQ ID NO: 3029020 - RNA, 17 nt, Human
cuagagguucaaagaua

SEQ ID NO: 3029021 - RNA, 18 nt, Human
cuagagguucaaagauau

SEQ ID NO: 3029022 - RNA, 21 nt, Human
cuagagguucaaagauauuuu

SEQ ID NO: 3029023 - RNA, 15 nt, Human
cuagagguucaaaga

SEQ ID NO: 3029024 - RNA, 23 nt, Human
cucauuuuuauaaugucccuuca

SEQ ID NO: 3029025 - RNA, 18 nt, Human
cuccaaaauaaaacuuuu

SEQ ID NO: 3029026 - RNA, 17 nt, Human
cuccaagcucccaggca

SEQ ID NO: 3029027 - RNA, 21 nt, Human
cucauuugucacacacuuugg

SEQ ID NO: 3029028 - RNA, 18 nt, Human
cucauuugucacacacuu

SEQ ID NO: 3029029 - RNA, 21 nt, Human
cucauugaccugaggcccuuc

SEQ ID NO: 3029030 - RNA, 19 nt, Human
cucauugaccugaggcccu

SEQ ID NO: 3029031 - RNA, 18 nt, Human
cucauucuccuuguguua

SEQ ID NO: 3029032 - RNA, 22 nt, Human
cucauucuccuuguguuacuaa

SEQ ID NO: 3029033 - RNA, 17 nt, Human
cucauugaccugaggcc

SEQ ID NO: 3029034 - RNA, 14 nt, Human
cuccagcucaccag

SEQ ID NO: 3029035 - RNA, 15 nt, Human
cuccagcucaccagc

SEQ ID NO: 3029036 - RNA, 16 nt, Human
cuccagcucaccagcc

SEQ ID NO: 3029037 - RNA, 18 nt, Human
cuccagcucaccagcccc

SEQ ID NO: 3029038 - RNA, 11 nt, Human
cuccagccccu

SEQ ID NO: 3029039 - RNA, 14 nt, Human
cuccagccccugga

SEQ ID NO: 3029040 - RNA, 13 nt, Human
cuccagccccugg

SEQ ID NO: 3029041 - RNA, 16 nt, Human
cuccagagucagaagu

SEQ ID NO: 3029042 - RNA, 14 nt, Human
cucccaucacccgc

SEQ ID NO: 3029043 - RNA, 16 nt, Human
cucccaucacuucccu

SEQ ID NO: 3029044 - RNA, 15 nt, Human
cucccacaaaggaga

SEQ ID NO: 3029045 - RNA, 15 nt, Human
cucccaacucacccc

SEQ ID NO: 3029046 - RNA, 14 nt, Human
cucccaacucaccc

SEQ ID NO: 3029047 - RNA, 16 nt, Human
cucccaaagugcuggg

SEQ ID NO: 3029048 - RNA, 23 nt, Human
cucccaaagugcugggauuacag

SEQ ID NO: 3029049 - RNA, 20 nt, Human
cucccgaauagcugggacua

SEQ ID NO: 3029050 - RNA, 23 nt, Human
cucccgaauagcugggacuacag

SEQ ID NO: 3029051 - RNA, 19 nt, Human
cucccgaauagcugggacu

SEQ ID NO: 3029052 - RNA, 15 nt, Human
cucccuucauccuuc

SEQ ID NO: 3029053 - RNA, 23 nt, Human
cuccccugcuggguguggcgcag

SEQ ID NO: 3029054 - RNA, 21 nt, Human
cuccccugcuggguguggcgc

SEQ ID NO: 3029055 - RNA, 14 nt, Human
cuccccugcugggu

SEQ ID NO: 3029056 - RNA, 21 nt, Human
cucagaugcacaugagcuggc

SEQ ID NO: 3029057 - RNA, 16 nt, Human
cucagaucuucugugg

SEQ ID NO: 3029058 - RNA, 18 nt, Human
cucagagagggugggagu

SEQ ID NO: 3029059 - RNA, 19 nt, Human
cucagagagggugggagug

SEQ ID NO: 3029060 - RNA, 23 nt, Human
cucagagagggugggagugggcc

SEQ ID NO: 3029061 - RNA, 16 nt, Human
cucacuguugcccagg

SEQ ID NO: 3029062 - RNA, 17 nt, Human
cucacuguugcccaggc

SEQ ID NO: 3029063 - RNA, 18 nt, Human
cucacuguugcccaggcu

SEQ ID NO: 3029064 - RNA, 19 nt, Human
cucacuguugcccaggcug

SEQ ID NO: 3029065 - RNA, 15 nt, Human
cucacugcagccuca

SEQ ID NO: 3029066 - RNA, 16 nt, Human
cucacugcagccucaa

SEQ ID NO: 3029067 - RNA, 14 nt, Human
cucacugcagccuc

SEQ ID NO: 3029068 - RNA, 14 nt, Human
cucacuguugccca

SEQ ID NO: 3029069 - RNA, 15 nt, Human
cucacuguugcccag

SEQ ID NO: 3029070 - RNA, 13 nt, Human
cucagcauccugg

SEQ ID NO: 3029071 - RNA, 21 nt, Human
cucagcauccuggcacccggc

SEQ ID NO: 3029072 - RNA, 22 nt, Human
cucagcauccuggcacccggcc

SEQ ID NO: 3029073 - RNA, 16 nt, Human
cucagcaggggagggu

SEQ ID NO: 3029074 - RNA, 20 nt, Human
cucagcaaaagaugcuucuc

SEQ ID NO: 3029075 - RNA, 19 nt, Human
cucagcaaaagaugcuucu

SEQ ID NO: 3029076 - RNA, 13 nt, Human
cucagcggggaca

SEQ ID NO: 3029077 - RNA, 23 nt, Human
cucagcggggacagcuccuucug

SEQ ID NO: 3029078 - RNA, 14 nt, Human
cucagcggggacag

SEQ ID NO: 3029079 - RNA, 15 nt, Human
cucagcggggacagc

SEQ ID NO: 3029080 - RNA, 16 nt, Human
cucagcggggacagcu

SEQ ID NO: 3029081 - RNA, 18 nt, Human
cucagcggggacagcucc

SEQ ID NO: 3029082 - RNA, 19 nt, Human
cucagcggggacagcuccu

SEQ ID NO: 3029083 - RNA, 20 nt, Human
cucagcggggacagcuccuu

SEQ ID NO: 3029084 - RNA, 21 nt, Human
cucagcggggacagcuccuuc

SEQ ID NO: 3029085 - RNA, 18 nt, Human
cucagggucccugguggc

SEQ ID NO: 3029086 - RNA, 24 nt, Human
cucagggucccugguggcagcuca

SEQ ID NO: 3029087 - RNA, 22 nt, Human
cucagggucccugguggcagcu

SEQ ID NO: 3029088 - RNA, 21 nt, Human
cucagggucccugguggcagc

SEQ ID NO: 3029089 - RNA, 20 nt, Human
cucagggucccugguggcag

SEQ ID NO: 3029090 - RNA, 14 nt, Human
cucagggccugguc

SEQ ID NO: 3029091 - RNA, 21 nt, Human
cucagguggggucacucuggc

SEQ ID NO: 3029092 - RNA, 20 nt, Human
cucagguggggucacucugg

SEQ ID NO: 3029093 - RNA, 19 nt, Human
cucagguggggucacucug

SEQ ID NO: 3029094 - RNA, 22 nt, Human
cucaggugauccacccaccuca

SEQ ID NO: 3029095 - RNA, 23 nt, Human
cucaggugauccacccaccucag

SEQ ID NO: 3029096 - RNA, 15 nt, Human
cucaggcagguggga

SEQ ID NO: 3029097 - RNA, 18 nt, Human
cucaggcaggugggaugg

SEQ ID NO: 3029098 - RNA, 18 nt, Human
cucagggccuggcucagg

SEQ ID NO: 3029099 - RNA, 20 nt, Human
cucagggccuggcucaggug

SEQ ID NO: 3029100 - RNA, 19 nt, Human
cucagggccuggcucaggu

SEQ ID NO: 3029101 - RNA, 20 nt, Human
ccugugccucugggacugga

SEQ ID NO: 3029102 - RNA, 20 nt, Human
ccugugggcccccaaaugga

SEQ ID NO: 3029103 - RNA, 20 nt, Human
ccuguggaugauaaaacaca

SEQ ID NO: 3029104 - RNA, 16 nt, Human
ccuucucuccagcccc

SEQ ID NO: 3029105 - RNA, 15 nt, Human
ccuucucuccagccc

SEQ ID NO: 3029106 - RNA, 13 nt, Human
ccuucucuccagc

SEQ ID NO: 3029107 - RNA, 12 nt, Human
ccuucucuccag

SEQ ID NO: 3029108 - RNA, 13 nt, Human
ccuuccaggggug

SEQ ID NO: 3029109 - RNA, 17 nt, Human
ccuuccauggacuuugu

SEQ ID NO: 3029110 - RNA, 20 nt, Human
ccuuggugucgggcaugaca

SEQ ID NO: 3029111 - RNA, 19 nt, Human
ccuuggugucgggcaugac

SEQ ID NO: 3029112 - RNA, 14 nt, Human
ccuuggcugcaggg

SEQ ID NO: 3029113 - RNA, 16 nt, Human
ccuuggcugcagggag

SEQ ID NO: 3029114 - RNA, 14 nt, Human
ccuuggggagcagg

SEQ ID NO: 3029115 - RNA, 18 nt, Human
ccuugacagggcacaccg

SEQ ID NO: 3029116 - RNA, 21 nt, Human
ccuugacagggcacaccgggc

SEQ ID NO: 3029117 - RNA, 18 nt, Human
ccuucucuccagccccug

SEQ ID NO: 3029118 - RNA, 17 nt, Human
ccuucucuccagccccu

SEQ ID NO: 3029119 - RNA, 22 nt, Human
ccuuggcucaaguccucuuuuc

SEQ ID NO: 3029120 - RNA, 21 nt, Human
ccuuggacauuuuaugucuuu

SEQ ID NO: 3029121 - RNA, 15 nt, Human
ccuuggauugucccc

SEQ ID NO: 3029122 - RNA, 19 nt, Human
ccuucucuccagccccugg

SEQ ID NO: 3029123 - RNA, 23 nt, Human
cgaaagggacuuggaagcuccgc

SEQ ID NO: 3029124 - RNA, 22 nt, Human
ccuuuuuuggcugcugaaggcu

SEQ ID NO: 3029125 - RNA, 20 nt, Human
ccuuuuuuggcugcugaagg

SEQ ID NO: 3029126 - RNA, 18 nt, Human
ccuuuuuuggcugcugaa

SEQ ID NO: 3029127 - RNA, 17 nt, Human
ccuuuuuuggcugcuga

SEQ ID NO: 3029128 - RNA, 21 nt, Human
cgaacauguuuuucuucuccc

SEQ ID NO: 3029129 - RNA, 23 nt, Human
cgaacauguuuuucuucucccuc

SEQ ID NO: 3029130 - RNA, 17 nt, Human
cgaauauugcugauggu

SEQ ID NO: 3029131 - RNA, 15 nt, Human
cgaauauugcugaug

SEQ ID NO: 3029132 - RNA, 15 nt, Human
cgaauagcugggacu

SEQ ID NO: 3029133 - RNA, 16 nt, Human
cgaauagcugggacua

SEQ ID NO: 3029134 - RNA, 11 nt, Human
cgaauauugcu

SEQ ID NO: 3029135 - RNA, 14 nt, Human
cgaauauugcugau

SEQ ID NO: 3029136 - RNA, 12 nt, Human
cgaauauugcug

SEQ ID NO: 3029137 - RNA, 19 nt, Human
ccuuuuuuauacauaaaca

SEQ ID NO: 3029138 - RNA, 15 nt, Human
ccuuuuuuggcugcu

SEQ ID NO: 3029139 - RNA, 14 nt, Human
ccuuugugaggaag

SEQ ID NO: 3029140 - RNA, 23 nt, Human
ccuuuguccccaccgcagacagg

SEQ ID NO: 3029141 - RNA, 22 nt, Human
ccuuuguccccaccgcagacag

SEQ ID NO: 3029142 - RNA, 23 nt, Human
ccuuugugaggaagccgcugggg

SEQ ID NO: 3029143 - RNA, 17 nt, Human
ccuuugugaggaagccg

SEQ ID NO: 3029144 - RNA, 16 nt, Human
ccuuugugaggaagcc

SEQ ID NO: 3029145 - RNA, 15 nt, Human
ccuuugugaggaagc

SEQ ID NO: 3029146 - RNA, 24 nt, Human
ccuuuguauucucuccuguaccuc

SEQ ID NO: 3029147 - RNA, 22 nt, Human
ccuuuguauucucuccuguacc

SEQ ID NO: 3029148 - RNA, 23 nt, Human
ccuuuguauucucuccuguaccu

SEQ ID NO: 3029149 - RNA, 14 nt, Human
ccuuuguccccacc

SEQ ID NO: 3029150 - RNA, 18 nt, Human
ccuuuguccccaccgcag

SEQ ID NO: 3029151 - RNA, 16 nt, Human
ccuuuguccccaccgc

SEQ ID NO: 3029152 - RNA, 16 nt, Human
cgaggacagggaggug

SEQ ID NO: 3029153 - RNA, 18 nt, Human
cgagcccugguggcagug

SEQ ID NO: 3029154 - RNA, 14 nt, Human
cgaggacagggagg

SEQ ID NO: 3029155 - RNA, 19 nt, Human
cgagcccugguggcagugg

SEQ ID NO: 3029156 - RNA, 13 nt, Human
cgcacugggcuug

SEQ ID NO: 3029157 - RNA, 17 nt, Human
cgcacugggcuugggga

SEQ ID NO: 3029158 - RNA, 17 nt, Human
cgcagcccugcagaggg

SEQ ID NO: 3029159 - RNA, 15 nt, Human
cgcagcccugcagag

SEQ ID NO: 3029160 - RNA, 20 nt, Human
cgcagcauauucaggaagcu

SEQ ID NO: 3029161 - RNA, 19 nt, Human
cgcagcauauucaggaagc

SEQ ID NO: 3029162 - RNA, 12 nt, Human
cggccaggccag

SEQ ID NO: 3029163 - RNA, 20 nt, Human
cggccaggccagagggagug

SEQ ID NO: 3029164 - RNA, 11 nt, Human
cggccaggcca

SEQ ID NO: 3029165 - RNA, 14 nt, Human
cggcuggcagccca

SEQ ID NO: 3029166 - RNA, 13 nt, Human
cggcuggccuggc

SEQ ID NO: 3029167 - RNA, 23 nt, Human
cggcuggcagcccaccccucaac

SEQ ID NO: 3029168 - RNA, 16 nt, Human
cgggaagggggcuggg

SEQ ID NO: 3029169 - RNA, 20 nt, Human
cgggaagggggcugggacau

SEQ ID NO: 3029170 - RNA, 19 nt, Human
cgggaagggggcugggaca

SEQ ID NO: 3029171 - RNA, 14 nt, Human
cgcuuucuacccag

SEQ ID NO: 3029172 - RNA, 16 nt, Human
cgcuuucuacccagcg

SEQ ID NO: 3029173 - RNA, 20 nt, Human
cggacagccacggccaggcc

SEQ ID NO: 3029174 - RNA, 14 nt, Human
cggaauaguuggcu

SEQ ID NO: 3029175 - RNA, 16 nt, Human
cggaauaguuggcuag

SEQ ID NO: 3029176 - RNA, 17 nt, Human
cggaauaguuggcuagg

SEQ ID NO: 3029177 - RNA, 15 nt, Human
cggagaaaggaaggg

SEQ ID NO: 3029178 - RNA, 17 nt, Human
cggagaaaggaagggcu

SEQ ID NO: 3029179 - RNA, 21 nt, Human
cggacagccacggccaggcca

SEQ ID NO: 3029180 - RNA, 22 nt, Human
cggacagccacggccaggccag

SEQ ID NO: 3029181 - RNA, 19 nt, Human
cgcugugcugcccugccca

SEQ ID NO: 3029182 - RNA, 23 nt, Human
cgcugugcugcccugcccaccug

SEQ ID NO: 3029183 - RNA, 21 nt, Human
cgcugugcugcccugcccacc

SEQ ID NO: 3029184 - RNA, 11 nt, Human
cgcugugcugc

SEQ ID NO: 3029185 - RNA, 14 nt, Human
cgcugugcugcccu

SEQ ID NO: 3029186 - RNA, 13 nt, Human
cgcugugcugccc

SEQ ID NO: 3029187 - RNA, 19 nt, Human
cgcagcccugcagagggca

SEQ ID NO: 3029188 - RNA, 18 nt, Human
cgcagcccugcagagggc

SEQ ID NO: 3029189 - RNA, 13 nt, Human
cgcccagucugga

SEQ ID NO: 3029190 - RNA, 19 nt, Human
cgcccagucuggaaugcag

SEQ ID NO: 3029191 - RNA, 21 nt, Human
cgcccagucuggaaugcagug

SEQ ID NO: 3029192 - RNA, 12 nt, Human
cgcccagucugg

SEQ ID NO: 3029193 - RNA, 14 nt, Human
cgcgacaaugcaaa

SEQ ID NO: 3029194 - RNA, 19 nt, Human
cgcgguggcucacgccugu

SEQ ID NO: 3029195 - RNA, 24 nt, Human
cgcuacccgggaagggggcuggga

SEQ ID NO: 3029196 - RNA, 21 nt, Human
cgcuacccgggaagggggcug

SEQ ID NO: 3029197 - RNA, 18 nt, Human
cgcuacccgggaaggggg

SEQ ID NO: 3029198 - RNA, 17 nt, Human
cgcuacccgggaagggg

SEQ ID NO: 3029199 - RNA, 17 nt, Human
ccugcuaauuccccaga

SEQ ID NO: 3029200 - RNA, 21 nt, Human
ccugcuaauuccccagauugc

SEQ ID NO: 3029201 - RNA, 20 nt, Human
ccugccuguugggccaggag

SEQ ID NO: 3029202 - RNA, 19 nt, Human
ccugccuguugggccagga

SEQ ID NO: 3029203 - RNA, 18 nt, Human
ccugccuguugggccagg

SEQ ID NO: 3029204 - RNA, 19 nt, Human
ccuggcacccggccccugc

SEQ ID NO: 3029205 - RNA, 20 nt, Human
ccuggcacccggccccugcu

SEQ ID NO: 3029206 - RNA, 21 nt, Human
ccuggcacccggccccugcug

SEQ ID NO: 3029207 - RNA, 18 nt, Human
ccuggcacccggccccug

SEQ ID NO: 3029208 - RNA, 22 nt, Human
ccuggcacuauaauguaagcuc

SEQ ID NO: 3029209 - RNA, 12 nt, Human
ccuggcacugcu

SEQ ID NO: 3029210 - RNA, 14 nt, Human
ccuggcccacugca

SEQ ID NO: 3029211 - RNA, 13 nt, Human
ccuggcccacugc

SEQ ID NO: 3029212 - RNA, 21 nt, Human
ccuggccagaugcaccagccc

SEQ ID NO: 3029213 - RNA, 23 nt, Human
ccuggccagaugcaccagcccuu

SEQ ID NO: 3029214 - RNA, 20 nt, Human
ccuggccagaugcaccagcc

SEQ ID NO: 3029215 - RNA, 23 nt, Human
ccuggcaugggaaugaaugucag

SEQ ID NO: 3029216 - RNA, 13 nt, Human
ccuggcaugggaa

SEQ ID NO: 3029217 - RNA, 16 nt, Human
ccuggcacugcuucca

SEQ ID NO: 3029218 - RNA, 13 nt, Human
ccuggcacugcuu

SEQ ID NO: 3029219 - RNA, 16 nt, Human
ccuggcccacugcauc

SEQ ID NO: 3029220 - RNA, 16 nt, Human
ccugggagugagcugg

SEQ ID NO: 3029221 - RNA, 22 nt, Human
ccugggaggucaaggcugcagu

SEQ ID NO: 3029222 - RNA, 16 nt, Human
ccugggcagaaggaag

SEQ ID NO: 3029223 - RNA, 18 nt, Human
ccugggagugagcugguu

SEQ ID NO: 3029224 - RNA, 15 nt, Human
ccugggcagaaggaa

SEQ ID NO: 3029225 - RNA, 18 nt, Human
ccugggggcugggcagag

SEQ ID NO: 3029226 - RNA, 19 nt, Human
ccugggggcugggcagagg

SEQ ID NO: 3029227 - RNA, 21 nt, Human
ccugggggcugggcagaggaa

SEQ ID NO: 3029228 - RNA, 20 nt, Human
ccugggggcugggcagagga

SEQ ID NO: 3029229 - RNA, 10 nt, Human
ccuguaccuc

SEQ ID NO: 3029230 - RNA, 13 nt, Human
ccugguggcagug

SEQ ID NO: 3029231 - RNA, 14 nt, Human
ccugguggcagugg

SEQ ID NO: 3029232 - RNA, 16 nt, Human
ccuguagagugggagc

SEQ ID NO: 3029233 - RNA, 15 nt, Human
ccuguagagugggag

SEQ ID NO: 3029234 - RNA, 13 nt, Human
ccuguagcccuaa

SEQ ID NO: 3029235 - RNA, 12 nt, Human
ccugucccccug

SEQ ID NO: 3029236 - RNA, 15 nt, Human
ccugucccccugaca

SEQ ID NO: 3029237 - RNA, 14 nt, Human
ccugucccccugac

SEQ ID NO: 3029238 - RNA, 13 nt, Human
ccugucccccuga

SEQ ID NO: 3029239 - RNA, 14 nt, Human
ccugguggcagcug

SEQ ID NO: 3029240 - RNA, 22 nt, Human
ccugguggcagcucaccucucc

SEQ ID NO: 3029241 - RNA, 21 nt, Human
ccugguggcagcucaccucuc

SEQ ID NO: 3029242 - RNA, 19 nt, Human
ccugguggcagcucaccuc

SEQ ID NO: 3029243 - RNA, 15 nt, Human
ccugguggcagcugc

SEQ ID NO: 3029244 - RNA, 16 nt, Human
ccugguggcagcugcg

SEQ ID NO: 3029245 - RNA, 17 nt, Human
ccugguggcagcugcgg

SEQ ID NO: 3029246 - RNA, 18 nt, Human
ccugguggcagcugcggu

SEQ ID NO: 3029247 - RNA, 22 nt, Human
ccugaagucuuuguacagacaa

SEQ ID NO: 3029248 - RNA, 20 nt, Human
ccugaagucacacagugagu

SEQ ID NO: 3029249 - RNA, 19 nt, Human
ccugaagucacacagugag

SEQ ID NO: 3029250 - RNA, 18 nt, Human
ccugagccagauuucacu

SEQ ID NO: 3029251 - RNA, 16 nt, Human
ccugagccagauuuca

SEQ ID NO: 3029252 - RNA, 12 nt, Human
ccugagccagau

SEQ ID NO: 3029253 - RNA, 15 nt, Human
ccugagccagauuuc

SEQ ID NO: 3029254 - RNA, 15 nt, Human
ccugaggcugggcuc

SEQ ID NO: 3029255 - RNA, 14 nt, Human
ccugaggcugggcu

SEQ ID NO: 3029256 - RNA, 13 nt, Human
ccugaggcugggc

SEQ ID NO: 3029257 - RNA, 12 nt, Human
ccugagcuggga

SEQ ID NO: 3029258 - RNA, 18 nt, Human
ccugaggcccagagggcc

SEQ ID NO: 3029259 - RNA, 17 nt, Human
ccugaggcccagagggc

SEQ ID NO: 3029260 - RNA, 16 nt, Human
ccugaggcccagaggg

SEQ ID NO: 3029261 - RNA, 15 nt, Human
ccugaggcccagagg

SEQ ID NO: 3029262 - RNA, 19 nt, Human
ccugccaauggacuaacuu

SEQ ID NO: 3029263 - RNA, 16 nt, Human
ccugccacccugggga

SEQ ID NO: 3029264 - RNA, 22 nt, Human
ccugccacccuggggagaaagu

SEQ ID NO: 3029265 - RNA, 14 nt, Human
ccugccacccuggg

SEQ ID NO: 3029266 - RNA, 12 nt, Human
ccugccacccug

SEQ ID NO: 3029267 - RNA, 13 nt, Human
ccugccacccugg

SEQ ID NO: 3029268 - RNA, 14 nt, Human
ccugaaagcccuga

SEQ ID NO: 3029269 - RNA, 13 nt, Human
ccugaaagcccug

SEQ ID NO: 3029270 - RNA, 18 nt, Human
ccugaaagcccugagcuu

SEQ ID NO: 3029271 - RNA, 21 nt, Human
ccugaagacucauucuucugu

SEQ ID NO: 3029272 - RNA, 14 nt, Human
ccugaaggccccgc

SEQ ID NO: 3029273 - RNA, 19 nt, Human
ccugaaggccccgcccagg

SEQ ID NO: 3029274 - RNA, 18 nt, Human
ccugaaggccccgcccag

SEQ ID NO: 3029275 - RNA, 21 nt, Human
ccugaaggccccgcccaggcu

SEQ ID NO: 3029276 - RNA, 20 nt, Human
ccugaaggccccgcccaggc

SEQ ID NO: 3029277 - RNA, 22 nt, Human
ccugaaggccccgcccaggcuu

SEQ ID NO: 3029278 - RNA, 15 nt, Human
ccugagcugggauga

SEQ ID NO: 3029279 - RNA, 11 nt, Human
ccugcccugug

SEQ ID NO: 3029280 - RNA, 14 nt, Human
ccugcccugugggc

SEQ ID NO: 3029281 - RNA, 12 nt, Human
ccugcccugugg

SEQ ID NO: 3029282 - RNA, 13 nt, Human
ccugccucagccu

SEQ ID NO: 3029283 - RNA, 14 nt, Human
ccugccucagccuc

SEQ ID NO: 3029284 - RNA, 12 nt, Human
ccugccucagcc

SEQ ID NO: 3029285 - RNA, 11 nt, Human
ccugccucagc

SEQ ID NO: 3029286 - RNA, 14 nt, Human
ccugccuguugggc

SEQ ID NO: 3029287 - RNA, 22 nt, Human
ccugcccuuaccugccaggaag

SEQ ID NO: 3029288 - RNA, 21 nt, Human
ccugcccuuaccugccaggaa

SEQ ID NO: 3029289 - RNA, 19 nt, Human
ccugcccuuaccugccagg

SEQ ID NO: 3029290 - RNA, 15 nt, Human
ccugcccugugggcc

SEQ ID NO: 3029291 - RNA, 22 nt, Human
ccugccagggacagagggggug

SEQ ID NO: 3029292 - RNA, 12 nt, Human
ccugccaggcau

SEQ ID NO: 3029293 - RNA, 14 nt, Human
ccugcccggcugcg

SEQ ID NO: 3029294 - RNA, 16 nt, Human
ccugcccggcugcgga

SEQ ID NO: 3029295 - RNA, 22 nt, Human
ccugccuguugggccaggagcc

SEQ ID NO: 3029296 - RNA, 18 nt, Human
ccagugacagucagggaa

SEQ ID NO: 3029297 - RNA, 13 nt, Human
ccagugagacugu

SEQ ID NO: 3029298 - RNA, 16 nt, Human
ccagguuucuaugugu

SEQ ID NO: 3029299 - RNA, 13 nt, Human
ccagguuuaagcu

SEQ ID NO: 3029300 - RNA, 20 nt, Human
ccaguaaaugggggugcauu

SEQ ID NO: 3029301 - RNA, 21 nt, Human
ccaguaaaugggggugcauuu

SEQ ID NO: 3029302 - RNA, 22 nt, Human
ccaguaaaugggggugcauuug

SEQ ID NO: 3029303 - RNA, 21 nt, Human
ccaggugcuaggaacacuccu

SEQ ID NO: 3029304 - RNA, 12 nt, Human
ccaucaugucug

SEQ ID NO: 3029305 - RNA, 13 nt, Human
ccaucaugucugg

SEQ ID NO: 3029306 - RNA, 12 nt, Human
ccaucauugaaa

SEQ ID NO: 3029307 - RNA, 14 nt, Human
ccaucaagccacca

SEQ ID NO: 3029308 - RNA, 13 nt, Human
ccaucaagccacc

SEQ ID NO: 3029309 - RNA, 16 nt, Human
ccaucaagccaccaac

SEQ ID NO: 3029310 - RNA, 15 nt, Human
ccauaugccugggca

SEQ ID NO: 3029311 - RNA, 12 nt, Human
ccaucaagccac

SEQ ID NO: 3029312 - RNA, 13 nt, Human
ccauaugccuggg

SEQ ID NO: 3029313 - RNA, 14 nt, Human
ccagugugacaagg

SEQ ID NO: 3029314 - RNA, 23 nt, Human
ccagugugacaaggauugcuacu

SEQ ID NO: 3029315 - RNA, 15 nt, Human
ccaucucuccuccuu

SEQ ID NO: 3029316 - RNA, 21 nt, Human
ccaucucacacaugagcauca

SEQ ID NO: 3029317 - RNA, 20 nt, Human
ccaucucacacaugagcauc

SEQ ID NO: 3029318 - RNA, 18 nt, Human
ccaucucacacaugagca

SEQ ID NO: 3029319 - RNA, 17 nt, Human
ccaucucacacaugagc

SEQ ID NO: 3029320 - RNA, 15 nt, Human
ccaucucacacauga

SEQ ID NO: 3029321 - RNA, 14 nt, Human
ccaucucacacaug

SEQ ID NO: 3029322 - RNA, 13 nt, Human
ccaucuacccucc

SEQ ID NO: 3029323 - RNA, 17 nt, Human
ccaucauugaaaucuuu

SEQ ID NO: 3029324 - RNA, 16 nt, Human
ccaucauugaaaucuu

SEQ ID NO: 3029325 - RNA, 14 nt, Human
ccaucauugaaauc

SEQ ID NO: 3029326 - RNA, 14 nt, Human
ccaggcccucugcc

SEQ ID NO: 3029327 - RNA, 13 nt, Human
ccaggcccucugc

SEQ ID NO: 3029328 - RNA, 14 nt, Human
ccaggccccugcca

SEQ ID NO: 3029329 - RNA, 15 nt, Human
ccaggccccugccac

SEQ ID NO: 3029330 - RNA, 16 nt, Human
ccaggccccugccacc

SEQ ID NO: 3029331 - RNA, 14 nt, Human
ccaggaggccagcc

SEQ ID NO: 3029332 - RNA, 18 nt, Human
ccaggaggccagccuuga

SEQ ID NO: 3029333 - RNA, 15 nt, Human
ccaggaggccagccu

SEQ ID NO: 3029334 - RNA, 20 nt, Human
ccaggaggccagccuugacc

SEQ ID NO: 3029335 - RNA, 21 nt, Human
ccaggccacaagacccuugug

SEQ ID NO: 3029336 - RNA, 21 nt, Human
ccaggcuuagucacugagaca

SEQ ID NO: 3029337 - RNA, 23 nt, Human
ccaggcuuagucacugagacagc

SEQ ID NO: 3029338 - RNA, 22 nt, Human
ccaggcuuagucacugagacag

SEQ ID NO: 3029339 - RNA, 23 nt, Human
ccaggcugggagagccuuccagg

SEQ ID NO: 3029340 - RNA, 15 nt, Human
ccaggcccucugccc

SEQ ID NO: 3029341 - RNA, 15 nt, Human
ccauucugccugccc

SEQ ID NO: 3029342 - RNA, 13 nt, Human
ccauuugcuccuu

SEQ ID NO: 3029343 - RNA, 18 nt, Human
ccauguuuuguuuacggu

SEQ ID NO: 3029344 - RNA, 14 nt, Human
cccaagggccuggc

SEQ ID NO: 3029345 - RNA, 12 nt, Human
cccaagggccug

SEQ ID NO: 3029346 - RNA, 21 nt, Human
ccauuuuguauuuuacuaaua

SEQ ID NO: 3029347 - RNA, 20 nt, Human
ccauuuugcugucccuuuuc

SEQ ID NO: 3029348 - RNA, 16 nt, Human
cccaagggccuggccu

SEQ ID NO: 3029349 - RNA, 17 nt, Human
cccacaggaucagucug

SEQ ID NO: 3029350 - RNA, 13 nt, Human
cccacaggaucag

SEQ ID NO: 3029351 - RNA, 12 nt, Human
cccaccucagcc

SEQ ID NO: 3029352 - RNA, 14 nt, Human
cccaccucagccuc

SEQ ID NO: 3029353 - RNA, 15 nt, Human
cccaccucagccucc

SEQ ID NO: 3029354 - RNA, 12 nt, Human
cccaccuuggcu

SEQ ID NO: 3029355 - RNA, 21 nt, Human
cccaccucagccucccaaagu

SEQ ID NO: 3029356 - RNA, 13 nt, Human
cccaccucucuca

SEQ ID NO: 3029357 - RNA, 17 nt, Human
cccaccucucucacucc

SEQ ID NO: 3029358 - RNA, 14 nt, Human
cccaccucucucac

SEQ ID NO: 3029359 - RNA, 19 nt, Human
cccacgcccccacugguga

SEQ ID NO: 3029360 - RNA, 17 nt, Human
cccacgcccccacuggu

SEQ ID NO: 3029361 - RNA, 15 nt, Human
cccacgcccccacug

SEQ ID NO: 3029362 - RNA, 15 nt, Human
cccaccuuggcucaa

SEQ ID NO: 3029363 - RNA, 22 nt, Human
cccaccuuggcucaaguccucu

SEQ ID NO: 3029364 - RNA, 14 nt, Human
cccaccuuggcugc

SEQ ID NO: 3029365 - RNA, 15 nt, Human
cccaccuuggcugca

SEQ ID NO: 3029366 - RNA, 14 nt, Human
ccagcacaaagcag

SEQ ID NO: 3029367 - RNA, 17 nt, Human
ccagcaagugagagcug

SEQ ID NO: 3029368 - RNA, 18 nt, Human
ccagcaagugagagcugg

SEQ ID NO: 3029369 - RNA, 19 nt, Human
ccagcaagugagagcuggg

SEQ ID NO: 3029370 - RNA, 18 nt, Human
ccagcaccaucucuccuc

SEQ ID NO: 3029371 - RNA, 17 nt, Human
ccagcaccaucucuccu

SEQ ID NO: 3029372 - RNA, 16 nt, Human
ccagcaggcucucagg

SEQ ID NO: 3029373 - RNA, 18 nt, Human
ccagcaggcucucaggcc

SEQ ID NO: 3029374 - RNA, 17 nt, Human
ccagcaggcucucaggc

SEQ ID NO: 3029375 - RNA, 14 nt, Human
ccagauugcaacag

SEQ ID NO: 3029376 - RNA, 16 nt, Human
ccagauugcaacaggc

SEQ ID NO: 3029377 - RNA, 14 nt, Human
ccagagcccaccuu

SEQ ID NO: 3029378 - RNA, 23 nt, Human
ccagauugcaacaggcugggcuu

SEQ ID NO: 3029379 - RNA, 22 nt, Human
ccagauugcaacaggcugggcu

SEQ ID NO: 3029380 - RNA, 15 nt, Human
ccagauuucacucuc

SEQ ID NO: 3029381 - RNA, 19 nt, Human
ccagauuucacucuccuug

SEQ ID NO: 3029382 - RNA, 18 nt, Human
ccagauuucacucuccuu

SEQ ID NO: 3029383 - RNA, 16 nt, Human
ccagcccacuucugcc

SEQ ID NO: 3029384 - RNA, 17 nt, Human
ccagcccacuucugcca

SEQ ID NO: 3029385 - RNA, 23 nt, Human
ccagcaggcucucaggccagcug

SEQ ID NO: 3029386 - RNA, 21 nt, Human
ccagcaggcucucaggccagc

SEQ ID NO: 3029387 - RNA, 20 nt, Human
ccagcaggcucucaggccag

SEQ ID NO: 3029388 - RNA, 19 nt, Human
ccagcaggcucucaggcca

SEQ ID NO: 3029389 - RNA, 19 nt, Human
ccagccccaaaacucuccu

SEQ ID NO: 3029390 - RNA, 17 nt, Human
ccagccgagauagccaa

SEQ ID NO: 3029391 - RNA, 22 nt, Human
ccagccgagauagccaaggcca

SEQ ID NO: 3029392 - RNA, 20 nt, Human
ccagccgagauagccaaggc

SEQ ID NO: 3029393 - RNA, 13 nt, Human
ccagccuggguga

SEQ ID NO: 3029394 - RNA, 23 nt, Human
ccagccuugaccauucuccaccu

SEQ ID NO: 3029395 - RNA, 15 nt, Human
ccacugugaagagaa

SEQ ID NO: 3029396 - RNA, 14 nt, Human
ccacugugaagaga

SEQ ID NO: 3029397 - RNA, 23 nt, Human
ccacuggugacaugucuuuucuu

SEQ ID NO: 3029398 - RNA, 22 nt, Human
ccacugcuuuuggucuguguga

SEQ ID NO: 3029399 - RNA, 20 nt, Human
ccacugcuuuuggucugugu

SEQ ID NO: 3029400 - RNA, 11 nt, Human
ccacugcucug

SEQ ID NO: 3029401 - RNA, 12 nt, Human
ccacugcucugg

SEQ ID NO: 3029402 - RNA, 13 nt, Human
ccacugcucuggu

SEQ ID NO: 3029403 - RNA, 15 nt, Human
ccacugcucugguua

SEQ ID NO: 3029404 - RNA, 23 nt, Human
ccacugcaucguuucaucuucca

SEQ ID NO: 3029405 - RNA, 21 nt, Human
ccacugcaucguuucaucuuc

SEQ ID NO: 3029406 - RNA, 22 nt, Human
ccacuuuuguucuugguuugua

SEQ ID NO: 3029407 - RNA, 19 nt, Human
ccacugugccaugugccag

SEQ ID NO: 3029408 - RNA, 15 nt, Human
ccacugugccaugug

SEQ ID NO: 3029409 - RNA, 16 nt, Human
ccacugugccaugugc

SEQ ID NO: 3029410 - RNA, 22 nt, Human
ccagaagaaaauagugguguga

SEQ ID NO: 3029411 - RNA, 14 nt, Human
ccagacccggcugc

SEQ ID NO: 3029412 - RNA, 15 nt, Human
ccagacccggcugcg

SEQ ID NO: 3029413 - RNA, 22 nt, Human
ccagacacauguccaagaagcc

SEQ ID NO: 3029414 - RNA, 20 nt, Human
ccagacacauguccaagaag

SEQ ID NO: 3029415 - RNA, 17 nt, Human
ccagacacauguccaag

SEQ ID NO: 3029416 - RNA, 14 nt, Human
ccacccuccuuuca

SEQ ID NO: 3029417 - RNA, 18 nt, Human
ccacccugaaagcccuga

SEQ ID NO: 3029418 - RNA, 19 nt, Human
ccaccccucaacaccucug

SEQ ID NO: 3029419 - RNA, 19 nt, Human
ccacccccacccaagggcc

SEQ ID NO: 3029420 - RNA, 15 nt, Human
ccaccugccagggac

SEQ ID NO: 3029421 - RNA, 12 nt, Human
ccaccugccagg

SEQ ID NO: 3029422 - RNA, 14 nt, Human
ccaccugccaggga

SEQ ID NO: 3029423 - RNA, 13 nt, Human
ccaccugccaggg

SEQ ID NO: 3029424 - RNA, 20 nt, Human
ccaccuggccucugcacucc

SEQ ID NO: 3029425 - RNA, 18 nt, Human
ccaccuggccucugcacu

SEQ ID NO: 3029426 - RNA, 13 nt, Human
ccaccuggccucu

SEQ ID NO: 3029427 - RNA, 20 nt, Human
ccaccucucucacuccuuga

SEQ ID NO: 3029428 - RNA, 19 nt, Human
ccaccucucucacuccuug

SEQ ID NO: 3029429 - RNA, 16 nt, Human
ccaccucucucacucc

SEQ ID NO: 3029430 - RNA, 14 nt, Human
ccaccucucucacu

SEQ ID NO: 3029431 - RNA, 11 nt, Human
ccacccugcuc

SEQ ID NO: 3029432 - RNA, 12 nt, Human
ccacccugcucu

SEQ ID NO: 3029433 - RNA, 14 nt, Human
cccaugagccucag

SEQ ID NO: 3029434 - RNA, 22 nt, Human
cccaugagccucagcauccugg

SEQ ID NO: 3029435 - RNA, 19 nt, Human
cccaucucuacaaaaagca

SEQ ID NO: 3029436 - RNA, 14 nt, Human
cccaguugggugga

SEQ ID NO: 3029437 - RNA, 14 nt, Human
ccccacuggugaca

SEQ ID NO: 3029438 - RNA, 19 nt, Human
ccccaccgcagacaggacc

SEQ ID NO: 3029439 - RNA, 15 nt, Human
ccccaccgcagacag

SEQ ID NO: 3029440 - RNA, 21 nt, Human
ccccacccaagggccuggccu

SEQ ID NO: 3029441 - RNA, 22 nt, Human
cccgaauagcugggacuacagg

SEQ ID NO: 3029442 - RNA, 20 nt, Human
ccccuuccauggacuuuguu

SEQ ID NO: 3029443 - RNA, 13 nt, Human
ccccuuccaugga

SEQ ID NO: 3029444 - RNA, 23 nt, Human
cccgcuaagagggagggagggcu

SEQ ID NO: 3029445 - RNA, 22 nt, Human
cccgcuaagagggagggagggc

SEQ ID NO: 3029446 - RNA, 22 nt, Human
cccgcccaggcuuagucacuga

SEQ ID NO: 3029447 - RNA, 20 nt, Human
cccgcccaggcuuagucacu

SEQ ID NO: 3029448 - RNA, 17 nt, Human
ccccugcccggcugcgg

SEQ ID NO: 3029449 - RNA, 19 nt, Human
ccccugcccggcugcggaa

SEQ ID NO: 3029450 - RNA, 15 nt, Human
ccccuggaugcagcc

SEQ ID NO: 3029451 - RNA, 19 nt, Human
ccccuggaugcagccucac

SEQ ID NO: 3029452 - RNA, 18 nt, Human
ccccuggaugcagccuca

SEQ ID NO: 3029453 - RNA, 17 nt, Human
ccccugcuggguguggc

SEQ ID NO: 3029454 - RNA, 14 nt, Human
ccccugcugggugu

SEQ ID NO: 3029455 - RNA, 11 nt, Human
ccccugcuggu

SEQ ID NO: 3029456 - RNA, 13 nt, Human
ccccugcugguuc

SEQ ID NO: 3029457 - RNA, 15 nt, Human
ccccugcugguucag

SEQ ID NO: 3029458 - RNA, 20 nt, Human
ccccugcugguucaggguug

SEQ ID NO: 3029459 - RNA, 24 nt, Human
cccccacccaagggccuggccuga

SEQ ID NO: 3029460 - RNA, 13 nt, Human
cccccacccaagg

SEQ ID NO: 3029461 - RNA, 14 nt, Human
ccccauccucugua

SEQ ID NO: 3029462 - RNA, 13 nt, Human
cccccacugguga

SEQ ID NO: 3029463 - RNA, 11 nt, Human
cccccacuggu

SEQ ID NO: 3029464 - RNA, 15 nt, Human
cccccacuggugaca

SEQ ID NO: 3029465 - RNA, 14 nt, Human
ccccagugcccaca

SEQ ID NO: 3029466 - RNA, 15 nt, Human
ccccagugcccacag

SEQ ID NO: 3029467 - RNA, 16 nt, Human
ccccagugcccacagg

SEQ ID NO: 3029468 - RNA, 20 nt, Human
ccccagugcccacaggauca

SEQ ID NO: 3029469 - RNA, 17 nt, Human
cccccugacaacacuca

SEQ ID NO: 3029470 - RNA, 19 nt, Human
cccccugacaacacucauu

SEQ ID NO: 3029471 - RNA, 12 nt, Human
cccccagccugc

SEQ ID NO: 3029472 - RNA, 23 nt, Human
ccccucaacucuccuccagaguc

SEQ ID NO: 3029473 - RNA, 16 nt, Human
ccccucaacaccucug

SEQ ID NO: 3029474 - RNA, 15 nt, Human
ccccucaacaccucu

SEQ ID NO: 3029475 - RNA, 12 nt, Human
ccccuccaugug

SEQ ID NO: 3029476 - RNA, 22 nt, Human
ccccucagggucccugguggca

SEQ ID NO: 3029477 - RNA, 16 nt, Human
ccccucagggucccug

SEQ ID NO: 3029478 - RNA, 19 nt, Human
ccgagcuuugaaaauucag

SEQ ID NO: 3029479 - RNA, 14 nt, Human
ccgaguagcuggga

SEQ ID NO: 3029480 - RNA, 19 nt, Human
ccgcacugggcuuggggac

SEQ ID NO: 3029481 - RNA, 23 nt, Human
ccgcacugggcuuggggaccaga

SEQ ID NO: 3029482 - RNA, 21 nt, Human
ccgagauugcaccacugcacu

SEQ ID NO: 3029483 - RNA, 19 nt, Human
ccgagauugcaccacugca

SEQ ID NO: 3029484 - RNA, 15 nt, Human
ccgagauugcaccac

SEQ ID NO: 3029485 - RNA, 18 nt, Human
ccgugaggccagagacac

SEQ ID NO: 3029486 - RNA, 15 nt, Human
ccgggcucugccucc

SEQ ID NO: 3029487 - RNA, 14 nt, Human
ccgggcucugccuc

SEQ ID NO: 3029488 - RNA, 13 nt, Human
ccgggcucugccu

SEQ ID NO: 3029489 - RNA, 18 nt, Human
ccgggcucugccucccau

SEQ ID NO: 3029490 - RNA, 16 nt, Human
ccggcuccaggcuccu

SEQ ID NO: 3029491 - RNA, 21 nt, Human
ccggcuccaggcuccuuuagc

SEQ ID NO: 3029492 - RNA, 20 nt, Human
ccgggcacucagaagacacu

SEQ ID NO: 3029493 - RNA, 22 nt, Human
ccgggcacucagaagacacuga

SEQ ID NO: 3029494 - RNA, 13 nt, Human
ccgggccacagag

SEQ ID NO: 3029495 - RNA, 11 nt, Human
ccgcuggggcc

SEQ ID NO: 3029496 - RNA, 14 nt, Human
ccgcuggggccagu

SEQ ID NO: 3029497 - RNA, 21 nt, Human
ccuacaguugaaaaacagcug

SEQ ID NO: 3029498 - RNA, 23 nt, Human
ccuaggcauuugcugaauacaga

SEQ ID NO: 3029499 - RNA, 18 nt, Human
ccuaggugacagagugag

SEQ ID NO: 3029500 - RNA, 18 nt, Human
ccuacaggagugagcacu

SEQ ID NO: 3029501 - RNA, 20 nt, Human
cccugcagagggcacagaaa

SEQ ID NO: 3029502 - RNA, 12 nt, Human
cccugaggccca

SEQ ID NO: 3029503 - RNA, 11 nt, Human
cccugccuccu

SEQ ID NO: 3029504 - RNA, 22 nt, Human
cccugcucuccgaccagacacc

SEQ ID NO: 3029505 - RNA, 21 nt, Human
cccugcucuccgaccagacac

SEQ ID NO: 3029506 - RNA, 14 nt, Human
cccugguggcagug

SEQ ID NO: 3029507 - RNA, 21 nt, Human
cccuguagagugggagcugag

SEQ ID NO: 3029508 - RNA, 13 nt, Human
cccugguggcagu

SEQ ID NO: 3029509 - RNA, 21 nt, Human
cccugguggcagcucaccucu

SEQ ID NO: 3029510 - RNA, 21 nt, Human
cccuggugaccagcaccaucu

SEQ ID NO: 3029511 - RNA, 14 nt, Human
cccuguucuggcag

SEQ ID NO: 3029512 - RNA, 13 nt, Human
cccuguucuggca

SEQ ID NO: 3029513 - RNA, 16 nt, Human
cccuguuuguuucuga

SEQ ID NO: 3029514 - RNA, 19 nt, Human
cccuguuuguuucugaaag

SEQ ID NO: 3029515 - RNA, 19 nt, Human
cccuuaccucggugccuuc

SEQ ID NO: 3029516 - RNA, 17 nt, Human
cccuuaccugccaggaa

SEQ ID NO: 3029517 - RNA, 23 nt, Human
cccuuaccugccaggaagccagc

SEQ ID NO: 3029518 - RNA, 20 nt, Human
cccuuaccugccaggaagcc

SEQ ID NO: 3029519 - RNA, 23 nt, Human
cccuuagcagggaaacagcuaau

SEQ ID NO: 3029520 - RNA, 14 nt, Human
cccuuagcagggaa

SEQ ID NO: 3029521 - RNA, 17 nt, Human
cccuuacgugaguccug

SEQ ID NO: 3029522 - RNA, 15 nt, Human
cccuuacgugagucc

SEQ ID NO: 3029523 - RNA, 12 nt, Human
cccuuccaugga

SEQ ID NO: 3029524 - RNA, 23 nt, Human
cccucccucuuucccucccuucc

SEQ ID NO: 3029525 - RNA, 12 nt, Human
cccucuuucccu

SEQ ID NO: 3029526 - RNA, 17 nt, Human
cccucuuucccucccuu

SEQ ID NO: 3029527 - RNA, 20 nt, Human
cccucuuucccucccuuccu

SEQ ID NO: 3029528 - RNA, 19 nt, Human
cccucugcccacucccugc

SEQ ID NO: 3029529 - RNA, 11 nt, Human
cccucugccca

SEQ ID NO: 3029530 - RNA, 18 nt, Human
cccucugcccacucccug

SEQ ID NO: 3029531 - RNA, 15 nt, Human
cccucugcccacucc

SEQ ID NO: 3029532 - RNA, 21 nt, Human
cacaguguguggucaacauuu

SEQ ID NO: 3029533 - RNA, 14 nt, Human
cacaguucucuccu

SEQ ID NO: 3029534 - RNA, 15 nt, Human
cacaguucucuccuu

SEQ ID NO: 3029535 - RNA, 22 nt, Human
cacagugagucgaggacaggga

SEQ ID NO: 3029536 - RNA, 21 nt, Human
cacagugagucgaggacaggg

SEQ ID NO: 3029537 - RNA, 22 nt, Human
cacaguccuuaccagcagagca

SEQ ID NO: 3029538 - RNA, 21 nt, Human
cacaguccuuaccagcagagc

SEQ ID NO: 3029539 - RNA, 15 nt, Human
cacaguccuuaccag

SEQ ID NO: 3029540 - RNA, 13 nt, Human
cacaguccuuacc

SEQ ID NO: 3029541 - RNA, 11 nt, Human
cacaggcaggu

SEQ ID NO: 3029542 - RNA, 14 nt, Human
cacaggcaggucca

SEQ ID NO: 3029543 - RNA, 15 nt, Human
cacaggcagguccag

SEQ ID NO: 3029544 - RNA, 23 nt, Human
cacagcugggguggggaccucag

SEQ ID NO: 3029545 - RNA, 22 nt, Human
cacagcugggguggggaccuca

SEQ ID NO: 3029546 - RNA, 21 nt, Human
cacagcuucauuuccuguguc

SEQ ID NO: 3029547 - RNA, 22 nt, Human
cacagcuucauuuccugugucu

SEQ ID NO: 3029548 - RNA, 14 nt, Human
cacauaucugucau

SEQ ID NO: 3029549 - RNA, 20 nt, Human
caaacuaacaggcuuaguga

SEQ ID NO: 3029550 - RNA, 16 nt, Human
caaacuaacaggcuua

SEQ ID NO: 3029551 - RNA, 17 nt, Human
caaacucaccugccccu

SEQ ID NO: 3029552 - RNA, 22 nt, Human
caaagccaaagcuaggccuggc

SEQ ID NO: 3029553 - RNA, 18 nt, Human
caaagccuccuccagccg

SEQ ID NO: 3029554 - RNA, 17 nt, Human
caaagccuccuccagcc

SEQ ID NO: 3029555 - RNA, 13 nt, Human
caaaggaagcaca

SEQ ID NO: 3029556 - RNA, 12 nt, Human
caaaggaagcac

SEQ ID NO: 3029557 - RNA, 13 nt, Human
caaagcuaggccu

SEQ ID NO: 3029558 - RNA, 14 nt, Human
caaagcuaggccug

SEQ ID NO: 3029559 - RNA, 19 nt, Human
caaagcuaggccuggccag

SEQ ID NO: 3029560 - RNA, 14 nt, Human
caaaggaagcacau

SEQ ID NO: 3029561 - RNA, 16 nt, Human
caaaggguaucaggug

SEQ ID NO: 3029562 - RNA, 18 nt, Human
caaaggguaucaggugcu

SEQ ID NO: 3029563 - RNA, 14 nt, Human
caaacuaacaggcu

SEQ ID NO: 3029564 - RNA, 20 nt, Human
caaacccuucagugccaaaa

SEQ ID NO: 3029565 - RNA, 14 nt, Human
caaacccuucagug

SEQ ID NO: 3029566 - RNA, 15 nt, Human
caaacacauacagga

SEQ ID NO: 3029567 - RNA, 12 nt, Human
caaaauaaaacu

SEQ ID NO: 3029568 - RNA, 15 nt, Human
caaaauguaggguua

SEQ ID NO: 3029569 - RNA, 23 nt, Human
caaagugcugggauuacaggugu

SEQ ID NO: 3029570 - RNA, 19 nt, Human
caaagugcugggauuacag

SEQ ID NO: 3029571 - RNA, 19 nt, Human
caaaggguaucaggugcug

SEQ ID NO: 3029572 - RNA, 11 nt, Human
caaauuucuaa

SEQ ID NO: 3029573 - RNA, 12 nt, Human
caaauuucuaaa

SEQ ID NO: 3029574 - RNA, 14 nt, Human
caaauuucuaaauc

SEQ ID NO: 3029575 - RNA, 13 nt, Human
caaaaaggcagga

SEQ ID NO: 3029576 - RNA, 20 nt, Human
caaaaacauggccuuugcuu

SEQ ID NO: 3029577 - RNA, 22 nt, Human
auuuugggguacccacugcucu

SEQ ID NO: 3029578 - RNA, 23 nt, Human
auuuugggguacccacugcucug

SEQ ID NO: 3029579 - RNA, 16 nt, Human
caaaaaaugcuugcuu

SEQ ID NO: 3029580 - RNA, 21 nt, Human
auuuugggguacccacugcuc

SEQ ID NO: 3029581 - RNA, 22 nt, Human
caaaacucuccucugcugcugg

SEQ ID NO: 3029582 - RNA, 21 nt, Human
caaaacucuccucugcugcug

SEQ ID NO: 3029583 - RNA, 20 nt, Human
caaaacucuccucugcugcu

SEQ ID NO: 3029584 - RNA, 17 nt, Human
caaaauaaaaaugaggu

SEQ ID NO: 3029585 - RNA, 19 nt, Human
caaaacucuccucugcugc

SEQ ID NO: 3029586 - RNA, 18 nt, Human
caaggcuuagacccucau

SEQ ID NO: 3029587 - RNA, 15 nt, Human
caaggcugugcaucu

SEQ ID NO: 3029588 - RNA, 21 nt, Human
caaggcugucaauuacaggaa

SEQ ID NO: 3029589 - RNA, 23 nt, Human
caaggcugucaauuacaggaagu

SEQ ID NO: 3029590 - RNA, 15 nt, Human
caaggcugcagugag

SEQ ID NO: 3029591 - RNA, 12 nt, Human
caaggcugcagu

SEQ ID NO: 3029592 - RNA, 15 nt, Human
caaggcuuagacccu

SEQ ID NO: 3029593 - RNA, 18 nt, Human
caaggggcccaaauucuu

SEQ ID NO: 3029594 - RNA, 14 nt, Human
caaggcuuagaccc

SEQ ID NO: 3029595 - RNA, 17 nt, Human
caaggggcccaaauucu

SEQ ID NO: 3029596 - RNA, 13 nt, Human
caaggucauuuuu

SEQ ID NO: 3029597 - RNA, 14 nt, Human
caaggucauuuuuu

SEQ ID NO: 3029598 - RNA, 20 nt, Human
caaggucauuuuuuuuaaga

SEQ ID NO: 3029599 - RNA, 14 nt, Human
caaguccucuuuuc

SEQ ID NO: 3029600 - RNA, 14 nt, Human
caaguuaaauaaau

SEQ ID NO: 3029601 - RNA, 18 nt, Human
caagugagagcugggugu

SEQ ID NO: 3029602 - RNA, 21 nt, Human
caaguccucuuuucugagagg

SEQ ID NO: 3029603 - RNA, 14 nt, Human
caagugagagcugg

SEQ ID NO: 3029604 - RNA, 15 nt, Human
caagugagagcuggg

SEQ ID NO: 3029605 - RNA, 17 nt, Human
caagugagagcugggug

SEQ ID NO: 3029606 - RNA, 20 nt, Human
caagcgauucuucugcuuca

SEQ ID NO: 3029607 - RNA, 22 nt, Human
caagcgauucuucugcuucagc

SEQ ID NO: 3029608 - RNA, 19 nt, Human
caagcgauucuucugcuuc

SEQ ID NO: 3029609 - RNA, 18 nt, Human
caagcaggacauggacaa

SEQ ID NO: 3029610 - RNA, 14 nt, Human
caagcaggacaugg

SEQ ID NO: 3029611 - RNA, 14 nt, Human
caagcaccuccugc

SEQ ID NO: 3029612 - RNA, 22 nt, Human
caagccaccaacauacucccau

SEQ ID NO: 3029613 - RNA, 17 nt, Human
caagcuggucccacuca

SEQ ID NO: 3029614 - RNA, 19 nt, Human
caagcuggucccacucagu

SEQ ID NO: 3029615 - RNA, 18 nt, Human
caagacgcugugcugccc

SEQ ID NO: 3029616 - RNA, 23 nt, Human
caagacgcugugcugcccugccc

SEQ ID NO: 3029617 - RNA, 15 nt, Human
caagagcccaggccu

SEQ ID NO: 3029618 - RNA, 14 nt, Human
caagagcccaggcc

SEQ ID NO: 3029619 - RNA, 13 nt, Human
caagagcccaggc

SEQ ID NO: 3029620 - RNA, 18 nt, Human
caagacucuuuggacacu

SEQ ID NO: 3029621 - RNA, 16 nt, Human
caagagcccaggccuc

SEQ ID NO: 3029622 - RNA, 15 nt, Human
caagcaccuccugcc

SEQ ID NO: 3029623 - RNA, 16 nt, Human
caagcaccuccugccu

SEQ ID NO: 3029624 - RNA, 17 nt, Human
caagcaccuccugccuc

SEQ ID NO: 3029625 - RNA, 20 nt, Human
caagaacuuuccaggaaggc

SEQ ID NO: 3029626 - RNA, 16 nt, Human
caagaccuucuccuuc

SEQ ID NO: 3029627 - RNA, 14 nt, Human
caagaccuucuccu

SEQ ID NO: 3029628 - RNA, 17 nt, Human
caagacgcugugcugcc

SEQ ID NO: 3029629 - RNA, 16 nt, Human
caagacgcugugcugc

SEQ ID NO: 3029630 - RNA, 18 nt, Human
caagaccuucuccuucac

SEQ ID NO: 3029631 - RNA, 17 nt, Human
caagaccuucuccuuca

SEQ ID NO: 3029632 - RNA, 14 nt, Human
caacgucugugcca

SEQ ID NO: 3029633 - RNA, 13 nt, Human
caacgucugugcc

SEQ ID NO: 3029634 - RNA, 15 nt, Human
caaccuccugggcua

SEQ ID NO: 3029635 - RNA, 14 nt, Human
caaccuccugggcu

SEQ ID NO: 3029636 - RNA, 22 nt, Human
caaccccuucgcuccugugucu

SEQ ID NO: 3029637 - RNA, 22 nt, Human
caacacucacauuuauucugcu

SEQ ID NO: 3029638 - RNA, 18 nt, Human
caacacucauugaccuga

SEQ ID NO: 3029639 - RNA, 22 nt, Human
caacacucauugaccugaggcc

SEQ ID NO: 3029640 - RNA, 20 nt, Human
caacacucauugaccugagg

SEQ ID NO: 3029641 - RNA, 19 nt, Human
caaugagaucauugugaag

SEQ ID NO: 3029642 - RNA, 17 nt, Human
caaugcacuuuguucug

SEQ ID NO: 3029643 - RNA, 21 nt, Human
caaugcacuuuguucuggcuc

SEQ ID NO: 3029644 - RNA, 20 nt, Human
caaugcacuuuguucuggcu

SEQ ID NO: 3029645 - RNA, 22 nt, Human
caauuugcacauuaaaugacuc

SEQ ID NO: 3029646 - RNA, 15 nt, Human
caauuugcacauuaa

SEQ ID NO: 3029647 - RNA, 14 nt, Human
caauuugcacauua

SEQ ID NO: 3029648 - RNA, 23 nt, Human
caauucucauuugucacacacuu

SEQ ID NO: 3029649 - RNA, 16 nt, Human
caauuacaggaaguac

SEQ ID NO: 3029650 - RNA, 17 nt, Human
caaugugauaaaacccc

SEQ ID NO: 3029651 - RNA, 15 nt, Human
caaugugauaaaacc

SEQ ID NO: 3029652 - RNA, 16 nt, Human
caaguuaguucaaucu

SEQ ID NO: 3029653 - RNA, 13 nt, Human
caauaggaaaaac

SEQ ID NO: 3029654 - RNA, 12 nt, Human
caauaggaaaaa

SEQ ID NO: 3029655 - RNA, 23 nt, Human
caaucugugaugacauucccugc

SEQ ID NO: 3029656 - RNA, 23 nt, Human
caaugaccuuucaauaggaaaaa

SEQ ID NO: 3029657 - RNA, 20 nt, Human
caaucuggauucauauuuaa

SEQ ID NO: 3029658 - RNA, 16 nt, Human
caaucuggauucauau

SEQ ID NO: 3029659 - RNA, 17 nt, Human
caaugacuuacuguaca

SEQ ID NO: 3029660 - RNA, 18 nt, Human
caaugacuuacuguacau

SEQ ID NO: 3029661 - RNA, 15 nt, Human
caaugacuuacugua

SEQ ID NO: 3029662 - RNA, 21 nt, Human
caaugaccuuucaauaggaaa

SEQ ID NO: 3029663 - RNA, 17 nt, Human
caauauucgcuguguca

SEQ ID NO: 3029664 - RNA, 14 nt, Human
caauaggaaaaacu

SEQ ID NO: 3029665 - RNA, 17 nt, Human
auucucagcagagugcu

SEQ ID NO: 3029666 - RNA, 20 nt, Human
auucuccaccugccagggac

SEQ ID NO: 3029667 - RNA, 19 nt, Human
auucuccaccugccaggga

SEQ ID NO: 3029668 - RNA, 15 nt, Human
auucuauguuaauau

SEQ ID NO: 3029669 - RNA, 18 nt, Human
auucuauguuaauauuuu

SEQ ID NO: 3029670 - RNA, 16 nt, Human
auucuccuuguguuac

SEQ ID NO: 3029671 - RNA, 20 nt, Human
auucuccugccucagccucc

SEQ ID NO: 3029672 - RNA, 19 nt, Human
auucuccugccucagccuc

SEQ ID NO: 3029673 - RNA, 15 nt, Human
auucuccugccucag

SEQ ID NO: 3029674 - RNA, 17 nt, Human
auucuccugccucagcc

SEQ ID NO: 3029675 - RNA, 11 nt, Human
auucuccugcc

SEQ ID NO: 3029676 - RNA, 14 nt, Human
auucuccugccuca

SEQ ID NO: 3029677 - RNA, 13 nt, Human
auucuccugccuc

SEQ ID NO: 3029678 - RNA, 21 nt, Human
auucuccaccugccagggaca

SEQ ID NO: 3029679 - RNA, 18 nt, Human
auucuccaccugccaggg

SEQ ID NO: 3029680 - RNA, 17 nt, Human
auuauauagcaguaaaa

SEQ ID NO: 3029681 - RNA, 14 nt, Human
auucaggaagcuca

SEQ ID NO: 3029682 - RNA, 15 nt, Human
auucaguaauaacuc

SEQ ID NO: 3029683 - RNA, 19 nt, Human
auucaguaauaacucuacc

SEQ ID NO: 3029684 - RNA, 20 nt, Human
auucaggaagcucagggccu

SEQ ID NO: 3029685 - RNA, 19 nt, Human
auucaggaagcucagggcc

SEQ ID NO: 3029686 - RNA, 17 nt, Human
auucaggaagcucaggg

SEQ ID NO: 3029687 - RNA, 16 nt, Human
auucccaagcucugcu

SEQ ID NO: 3029688 - RNA, 14 nt, Human
auucccaagcucug

SEQ ID NO: 3029689 - RNA, 15 nt, Human
auucccaagcucugc

SEQ ID NO: 3029690 - RNA, 16 nt, Human
uuuugccaauuugcac

SEQ ID NO: 3029691 - RNA, 19 nt, Human
uuuugccaauuugcacauu

SEQ ID NO: 3029692 - RNA, 18 nt, Human
uuuugccaauuugcacau

SEQ ID NO: 3029693 - RNA, 23 nt, Human
uuuugccauguuggccaggcugg

SEQ ID NO: 3029694 - RNA, 15 nt, Human
uuuugcauauugcau

SEQ ID NO: 3029695 - RNA, 18 nt, Human
uuuugcauauugcauacu

SEQ ID NO: 3029696 - RNA, 17 nt, Human
uuuugagugccuuacac

SEQ ID NO: 3029697 - RNA, 17 nt, Human
uuuugauccaagcuggu

SEQ ID NO: 3029698 - RNA, 17 nt, Human
uuuugugcauuaucuag

SEQ ID NO: 3029699 - RNA, 20 nt, Human
uuuugugcauuaucuagaua

SEQ ID NO: 3029700 - RNA, 15 nt, Human
uuuuguuccacaagu

SEQ ID NO: 3029701 - RNA, 21 nt, Human
uuuuguuccacaaguuaaaua

SEQ ID NO: 3029702 - RNA, 22 nt, Human
uuuuuagacagagucucacugu

SEQ ID NO: 3029703 - RNA, 11 nt, Human
uuuuuacuaau

SEQ ID NO: 3029704 - RNA, 12 nt, Human
uuuuuauggcuu

SEQ ID NO: 3029705 - RNA, 20 nt, Human
uuuuuaucgucacugcuuaa

SEQ ID NO: 3029706 - RNA, 14 nt, Human
auuaaguacuaugu

SEQ ID NO: 3029707 - RNA, 22 nt, Human
uuuuuauggcuuuugugcauua

SEQ ID NO: 3029708 - RNA, 20 nt, Human
uuuuuauggcuuuugugcau

SEQ ID NO: 3029709 - RNA, 21 nt, Human
uuuuuauggcuuuugugcauu

SEQ ID NO: 3029710 - RNA, 19 nt, Human
uuuuuguagagccaggguc

SEQ ID NO: 3029711 - RNA, 20 nt, Human
uuuuuguagagccagggucu

SEQ ID NO: 3029712 - RNA, 14 nt, Human
auguguucuauuca

SEQ ID NO: 3029713 - RNA, 13 nt, Human
auguuaauauuuc

SEQ ID NO: 3029714 - RNA, 13 nt, Human
auguuaauauuuu

SEQ ID NO: 3029715 - RNA, 22 nt, Human
auguuaauauuuuagguguaaa

SEQ ID NO: 3029716 - RNA, 20 nt, Human
auguugcccaggcaggucuu

SEQ ID NO: 3029717 - RNA, 16 nt, Human
auguugcccaggcagg

SEQ ID NO: 3029718 - RNA, 17 nt, Human
auguugcccaggcaggu

SEQ ID NO: 3029719 - RNA, 12 nt, Human
auguugcccagg

SEQ ID NO: 3029720 - RNA, 21 nt, Human
augugccagguuuuuggucug

SEQ ID NO: 3029721 - RNA, 22 nt, Human
augugccagguuuuuggucuga

SEQ ID NO: 3029722 - RNA, 20 nt, Human
auggggcccugccuccuuug

SEQ ID NO: 3029723 - RNA, 24 nt, Human
auguggaguucaucuugaauugua

SEQ ID NO: 3029724 - RNA, 20 nt, Human
auguggaguucaucuugaau

SEQ ID NO: 3029725 - RNA, 16 nt, Human
auuaaacaugcuguac

SEQ ID NO: 3029726 - RNA, 15 nt, Human
auuaaaaaucucaaa

SEQ ID NO: 3029727 - RNA, 19 nt, Human
auuaaaaaucucaaauuuc

SEQ ID NO: 3029728 - RNA, 23 nt, Human
auuaaaacacaacaucuuuuucu

SEQ ID NO: 3029729 - RNA, 20 nt, Human
auuaaaaaucucaaauuucu

SEQ ID NO: 3029730 - RNA, 22 nt, Human
auuaaaaaucucaaauuucuaa

SEQ ID NO: 3029731 - RNA, 20 nt, Human
uuuucauuuaggugaggaag

SEQ ID NO: 3029732 - RNA, 14 nt, Human
uuuucaguguacau

SEQ ID NO: 3029733 - RNA, 11 nt, Human
uuuuauuuuau

SEQ ID NO: 3029734 - RNA, 13 nt, Human
uuuuauuaugcau

SEQ ID NO: 3029735 - RNA, 14 nt, Human
auuuuacuuuuugg

SEQ ID NO: 3029736 - RNA, 17 nt, Human
auuuuacuuuuuggaaa

SEQ ID NO: 3029737 - RNA, 21 nt, Human
auuuuacuuuaaaaggagcca

SEQ ID NO: 3029738 - RNA, 15 nt, Human
auuuuaauucaguug

SEQ ID NO: 3029739 - RNA, 18 nt, Human
auuugaagguagaauguu

SEQ ID NO: 3029740 - RNA, 23 nt, Human
auuugaagguagaauguuuucaa

SEQ ID NO: 3029741 - RNA, 23 nt, Human
auuuguuuugccaauuugcacau

SEQ ID NO: 3029742 - RNA, 21 nt, Human
auuuguuuugccaauuugcac

SEQ ID NO: 3029743 - RNA, 14 nt, Human
auuugugagacugu

SEQ ID NO: 3029744 - RNA, 14 nt, Human
auuugugauacaau

SEQ ID NO: 3029745 - RNA, 12 nt, Human
auuugugagacu

SEQ ID NO: 3029746 - RNA, 23 nt, Human
auugggcacaucauuucaagaag

SEQ ID NO: 3029747 - RNA, 21 nt, Human
auugggcacaucauuucaaga

SEQ ID NO: 3029748 - RNA, 19 nt, Human
auugggcacaucauuucaa

SEQ ID NO: 3029749 - RNA, 18 nt, Human
auugggcacaucauuuca

SEQ ID NO: 3029750 - RNA, 17 nt, Human
auugggcacaucauuuc

SEQ ID NO: 3029751 - RNA, 18 nt, Human
auugacaggauuauugga

SEQ ID NO: 3029752 - RNA, 15 nt, Human
auugaaaaaccauuu

SEQ ID NO: 3029753 - RNA, 13 nt, Human
auucuuauuuaau

SEQ ID NO: 3029754 - RNA, 14 nt, Human
auucuuauuuaaug

SEQ ID NO: 3029755 - RNA, 18 nt, Human
auucuuauuuaaugaaag

SEQ ID NO: 3029756 - RNA, 13 nt, Human
auucuucuccacu

SEQ ID NO: 3029757 - RNA, 13 nt, Human
auucuuccucccu

SEQ ID NO: 3029758 - RNA, 22 nt, Human
auucuuccucccucccucuuuc

SEQ ID NO: 3029759 - RNA, 20 nt, Human
auuguccccgacccuugccg

SEQ ID NO: 3029760 - RNA, 19 nt, Human
auuguccccgacccuugcc

SEQ ID NO: 3029761 - RNA, 17 nt, Human
auuguccccgacccuug

SEQ ID NO: 3029762 - RNA, 14 nt, Human
auugugucucuugg

SEQ ID NO: 3029763 - RNA, 18 nt, Human
auugugucucuugguccu

SEQ ID NO: 3029764 - RNA, 14 nt, Human
auuuauuuauucau

SEQ ID NO: 3029765 - RNA, 14 nt, Human
auuuauucauuagu

SEQ ID NO: 3029766 - RNA, 13 nt, Human
auuuauucugcuc

SEQ ID NO: 3029767 - RNA, 23 nt, Human
auuucaaacagucucccuuccua

SEQ ID NO: 3029768 - RNA, 17 nt, Human
auuuccagccaaagccu

SEQ ID NO: 3029769 - RNA, 15 nt, Human
auuuccguuaaaaua

SEQ ID NO: 3029770 - RNA, 16 nt, Human
auuuccguuaaaauac

SEQ ID NO: 3029771 - RNA, 14 nt, Human
auuugaaaauuuug

SEQ ID NO: 3029772 - RNA, 22 nt, Human
auuuauuaaaugcccagccccu

SEQ ID NO: 3029773 - RNA, 12 nt, Human
auuuaacagaaa

SEQ ID NO: 3029774 - RNA, 14 nt, Human
auuuaacagaaaug

SEQ ID NO: 3029775 - RNA, 17 nt, Human
auuuacuucuuauacau

SEQ ID NO: 3029776 - RNA, 14 nt, Human
auuuacuucuuaua

SEQ ID NO: 3029777 - RNA, 16 nt, Human
auuuacuucuuauaca

SEQ ID NO: 3029778 - RNA, 15 nt, Human
auuuagaaauauaau

SEQ ID NO: 3029779 - RNA, 14 nt, Human
auuuauucugcuca

SEQ ID NO: 3029780 - RNA, 13 nt, Human
aucuuuuaugauu

SEQ ID NO: 3029781 - RNA, 20 nt, Human
augaaagacuguacaaagua

SEQ ID NO: 3029782 - RNA, 19 nt, Human
augaaagacuguacaaagu

SEQ ID NO: 3029783 - RNA, 23 nt, Human
uuggccugucuuuggauuguuaa

SEQ ID NO: 3029784 - RNA, 18 nt, Human
uuggaaagaguaggaaga

SEQ ID NO: 3029785 - RNA, 21 nt, Human
uuggcuagagguucaaagaua

SEQ ID NO: 3029786 - RNA, 22 nt, Human
uuggcuaggaccccuccaugug

SEQ ID NO: 3029787 - RNA, 22 nt, Human
uuggcuagagguucaaagauau

SEQ ID NO: 3029788 - RNA, 13 nt, Human
uuggcugcaggga

SEQ ID NO: 3029789 - RNA, 14 nt, Human
uuggcugcagggag

SEQ ID NO: 3029790 - RNA, 15 nt, Human
uuggcugcugaaggc

SEQ ID NO: 3029791 - RNA, 11 nt, Human
uuggcugcuga

SEQ ID NO: 3029792 - RNA, 17 nt, Human
uuggaaagaguaggaag

SEQ ID NO: 3029793 - RNA, 18 nt, Human
uugcugauggugcaauga

SEQ ID NO: 3029794 - RNA, 17 nt, Human
uugcugauggugcaaug

SEQ ID NO: 3029795 - RNA, 20 nt, Human
uugcuaagugaggaugaaaa

SEQ ID NO: 3029796 - RNA, 19 nt, Human
uugcugaauacagaggcaa

SEQ ID NO: 3029797 - RNA, 22 nt, Human
uuguaacuguuuagaugaaugu

SEQ ID NO: 3029798 - RNA, 21 nt, Human
uuguaacuguuuagaugaaug

SEQ ID NO: 3029799 - RNA, 14 nt, Human
uuguaaggaaugau

SEQ ID NO: 3029800 - RNA, 22 nt, Human
uugggguacccacugcucuggu

SEQ ID NO: 3029801 - RNA, 19 nt, Human
uugguuaggcauuguggga

SEQ ID NO: 3029802 - RNA, 17 nt, Human
uugggguacccacugcu

SEQ ID NO: 3029803 - RNA, 19 nt, Human
uuggggaagaacgaagcca

SEQ ID NO: 3029804 - RNA, 13 nt, Human
augaaccacaucu

SEQ ID NO: 3029805 - RNA, 20 nt, Human
augaaccacaucuugcucug

SEQ ID NO: 3029806 - RNA, 20 nt, Human
uuguaaggaaugauuaauua

SEQ ID NO: 3029807 - RNA, 20 nt, Human
augacacgaauauugcugau

SEQ ID NO: 3029808 - RNA, 19 nt, Human
augacacgaauauugcuga

SEQ ID NO: 3029809 - RNA, 16 nt, Human
uuguuuuuauuaaaag

SEQ ID NO: 3029810 - RNA, 19 nt, Human
augcaccuggaauauauaa

SEQ ID NO: 3029811 - RNA, 22 nt, Human
augcaaggucauuuuuuuuaag

SEQ ID NO: 3029812 - RNA, 16 nt, Human
augcaccuggaauaua

SEQ ID NO: 3029813 - RNA, 14 nt, Human
augcaccuggaaua

SEQ ID NO: 3029814 - RNA, 14 nt, Human
augcaaggucauuu

SEQ ID NO: 3029815 - RNA, 16 nt, Human
augcaaggucauuuuu

SEQ ID NO: 3029816 - RNA, 22 nt, Human
augcaaaccaucauugaaaucu

SEQ ID NO: 3029817 - RNA, 21 nt, Human
augcaaaccaucauugaaauc

SEQ ID NO: 3029818 - RNA, 20 nt, Human
augcaaaccaucauugaaau

SEQ ID NO: 3029819 - RNA, 19 nt, Human
augcaaaccaucauugaaa

SEQ ID NO: 3029820 - RNA, 18 nt, Human
augcaaaccaucauugaa

SEQ ID NO: 3029821 - RNA, 16 nt, Human
augcaaaccaucauug

SEQ ID NO: 3029822 - RNA, 15 nt, Human
augaucuucuuuaua

SEQ ID NO: 3029823 - RNA, 22 nt, Human
uuguucccugugucauuucaaa

SEQ ID NO: 3029824 - RNA, 19 nt, Human
uuguugaggguauguuuua

SEQ ID NO: 3029825 - RNA, 14 nt, Human
uugugaauaaagag

SEQ ID NO: 3029826 - RNA, 22 nt, Human
uugugaaggcaggggaauguau

SEQ ID NO: 3029827 - RNA, 18 nt, Human
augaucacggcucacugc

SEQ ID NO: 3029828 - RNA, 19 nt, Human
augaucacggcucacugca

SEQ ID NO: 3029829 - RNA, 15 nt, Human
augaucacggcucac

SEQ ID NO: 3029830 - RNA, 23 nt, Human
augaucacggcucacugcagccu

SEQ ID NO: 3029831 - RNA, 16 nt, Human
augauccuaggcauuu

SEQ ID NO: 3029832 - RNA, 14 nt, Human
augaucuucuuuau

SEQ ID NO: 3029833 - RNA, 15 nt, Human
augagcaucaggcca

SEQ ID NO: 3029834 - RNA, 17 nt, Human
augagcaucaggccagg

SEQ ID NO: 3029835 - RNA, 16 nt, Human
augagcaucaggccag

SEQ ID NO: 3029836 - RNA, 21 nt, Human
augagcaucaggccaggcccu

SEQ ID NO: 3029837 - RNA, 20 nt, Human
augagcaucaggccaggccc

SEQ ID NO: 3029838 - RNA, 19 nt, Human
augagcaucaggccaggcc

SEQ ID NO: 3029839 - RNA, 18 nt, Human
augagcaucaggccaggc

SEQ ID NO: 3029840 - RNA, 22 nt, Human
augagcaucaggccaggcccuc

SEQ ID NO: 3029841 - RNA, 12 nt, Human
augagccucagc

SEQ ID NO: 3029842 - RNA, 15 nt, Human
augagccucagcauc

SEQ ID NO: 3029843 - RNA, 16 nt, Human
augagccucagcaucc

SEQ ID NO: 3029844 - RNA, 16 nt, Human
augagaggaaaucacc

SEQ ID NO: 3029845 - RNA, 15 nt, Human
augagaggaaaucac

SEQ ID NO: 3029846 - RNA, 14 nt, Human
augagaggaaauca

SEQ ID NO: 3029847 - RNA, 13 nt, Human
augagaggaaauc

SEQ ID NO: 3029848 - RNA, 12 nt, Human
augagaggaaau

SEQ ID NO: 3029849 - RNA, 22 nt, Human
augaggucagagccugcaguua

SEQ ID NO: 3029850 - RNA, 17 nt, Human
augagccucagcauccu

SEQ ID NO: 3029851 - RNA, 18 nt, Human
augagccucagcauccug

SEQ ID NO: 3029852 - RNA, 15 nt, Human
augauaaaacacaaa

SEQ ID NO: 3029853 - RNA, 18 nt, Human
uugucacacacuuuggcu

SEQ ID NO: 3029854 - RNA, 22 nt, Human
uuuauauagcaagacauuauau

SEQ ID NO: 3029855 - RNA, 18 nt, Human
uuuauauagcaagacauu

SEQ ID NO: 3029856 - RNA, 18 nt, Human
uuuagaguugauacuaca

SEQ ID NO: 3029857 - RNA, 13 nt, Human
uuuagauaauaca

SEQ ID NO: 3029858 - RNA, 15 nt, Human
uuuagauaauacacc

SEQ ID NO: 3029859 - RNA, 19 nt, Human
uuuauuaaaugcccagccc

SEQ ID NO: 3029860 - RNA, 16 nt, Human
augccuaccaauauuu

SEQ ID NO: 3029861 - RNA, 17 nt, Human
augccuaccaauauuua

SEQ ID NO: 3029862 - RNA, 23 nt, Human
augccuaccaauauuuaaucuuu

SEQ ID NO: 3029863 - RNA, 14 nt, Human
uuuaccuuuuuuau

SEQ ID NO: 3029864 - RNA, 19 nt, Human
uuuaccuuuuuuauacaua

SEQ ID NO: 3029865 - RNA, 20 nt, Human
uuuaccuuuuuuauacauaa

SEQ ID NO: 3029866 - RNA, 17 nt, Human
augcuacacacugcaug

SEQ ID NO: 3029867 - RNA, 22 nt, Human
uuuaccugaagucuuuguacag

SEQ ID NO: 3029868 - RNA, 18 nt, Human
augcuacacacugcaugu

SEQ ID NO: 3029869 - RNA, 18 nt, Human
uuuacuaauagacaauuu

SEQ ID NO: 3029870 - RNA, 14 nt, Human
uuuacuaauagaca

SEQ ID NO: 3029871 - RNA, 17 nt, Human
uuuacuaauagacaauu

SEQ ID NO: 3029872 - RNA, 21 nt, Human
uuuaccuuuuuuauacauaaa

SEQ ID NO: 3029873 - RNA, 19 nt, Human
augcugugcccuaaagugu

SEQ ID NO: 3029874 - RNA, 22 nt, Human
augcuggcuguuggcugggggc

SEQ ID NO: 3029875 - RNA, 17 nt, Human
auggaacacucugagac

SEQ ID NO: 3029876 - RNA, 18 nt, Human
auggaacacucugagacu

SEQ ID NO: 3029877 - RNA, 21 nt, Human
auggaaguacuauaauuuacc

SEQ ID NO: 3029878 - RNA, 14 nt, Human
auggaauaacaugu

SEQ ID NO: 3029879 - RNA, 15 nt, Human
auggaauaacaugua

SEQ ID NO: 3029880 - RNA, 14 nt, Human
uuucacucuccuug

SEQ ID NO: 3029881 - RNA, 24 nt, Human
uuucacucuuauugcccacgcugg

SEQ ID NO: 3029882 - RNA, 15 nt, Human
uuucacucuccuugg

SEQ ID NO: 3029883 - RNA, 19 nt, Human
uuuccagguuuaagcuguu

SEQ ID NO: 3029884 - RNA, 23 nt, Human
uuugaaacacugguuuuaaauau

SEQ ID NO: 3029885 - RNA, 13 nt, Human
auggggcccugcc

SEQ ID NO: 3029886 - RNA, 14 nt, Human
auggggcccugccu

SEQ ID NO: 3029887 - RNA, 23 nt, Human
augggcuggguucuacccaggug

SEQ ID NO: 3029888 - RNA, 13 nt, Human
uuucuuuguggcu

SEQ ID NO: 3029889 - RNA, 13 nt, Human
uuucucauguuga

SEQ ID NO: 3029890 - RNA, 15 nt, Human
uuucucauguugaaa

SEQ ID NO: 3029891 - RNA, 16 nt, Human
uuucugccgcagcccu

SEQ ID NO: 3029892 - RNA, 14 nt, Human
uuucugccgcagcc

SEQ ID NO: 3029893 - RNA, 21 nt, Human
uuucugcagccacuauuguua

SEQ ID NO: 3029894 - RNA, 22 nt, Human
uuucucacagaagaugaagcac

SEQ ID NO: 3029895 - RNA, 18 nt, Human
uuucucacagaagaugaa

SEQ ID NO: 3029896 - RNA, 15 nt, Human
uuucuaugacacaug

SEQ ID NO: 3029897 - RNA, 21 nt, Human
uuucuaugacacaugcaaggu

SEQ ID NO: 3029898 - RNA, 20 nt, Human
uuuccuucaagaaugcagua

SEQ ID NO: 3029899 - RNA, 11 nt, Human
uuuccuucagu

SEQ ID NO: 3029900 - RNA, 15 nt, Human
uuuccuucagugccu

SEQ ID NO: 3029901 - RNA, 12 nt, Human
uuuccuucagug

SEQ ID NO: 3029902 - RNA, 12 nt, Human
uuuccugugucu

SEQ ID NO: 3029903 - RNA, 23 nt, Human
uuuccuucauucaacccaccugc

SEQ ID NO: 3029904 - RNA, 21 nt, Human
uuuccuucagugccuuaugga

SEQ ID NO: 3029905 - RNA, 18 nt, Human
uuuccuucagugccuuau

SEQ ID NO: 3029906 - RNA, 22 nt, Human
uuuccuucagugccuuauggaa

SEQ ID NO: 3029907 - RNA, 21 nt, Human
uuuccuucauucaacccaccu

SEQ ID NO: 3029908 - RNA, 22 nt, Human
uuucgcaggauucuuccucccu

SEQ ID NO: 3029909 - RNA, 18 nt, Human
uuucgcaggauucuuccu

SEQ ID NO: 3029910 - RNA, 13 nt, Human
augggagcucaug

SEQ ID NO: 3029911 - RNA, 18 nt, Human
augggcaacccccagccu

SEQ ID NO: 3029912 - RNA, 19 nt, Human
augggcaacccccagccug

SEQ ID NO: 3029913 - RNA, 21 nt, Human
augggcaacccccagccugcu

SEQ ID NO: 3029914 - RNA, 15 nt, Human
augggccuccugugu

SEQ ID NO: 3029915 - RNA, 15 nt, Human
augggcagagcagag

SEQ ID NO: 3029916 - RNA, 14 nt, Human
augggcagagcaga

SEQ ID NO: 3029917 - RNA, 13 nt, Human
augggcagagcag

SEQ ID NO: 3029918 - RNA, 21 nt, Human
auggacccaauauuuaccaga

SEQ ID NO: 3029919 - RNA, 19 nt, Human
auggacaugaucuucuuua

SEQ ID NO: 3029920 - RNA, 18 nt, Human
auggccucuucagaucuc

SEQ ID NO: 3029921 - RNA, 19 nt, Human
uucauuaguuuugaagauu

SEQ ID NO: 3029922 - RNA, 14 nt, Human
uucauuaguuuuga

SEQ ID NO: 3029923 - RNA, 19 nt, Human
uucauucuuuuugaaaugu

SEQ ID NO: 3029924 - RNA, 22 nt, Human
uuccaauuuacauacucugcuu

SEQ ID NO: 3029925 - RNA, 16 nt, Human
uuccaguaaugagcuu

SEQ ID NO: 3029926 - RNA, 17 nt, Human
uuccagguuuaagcugu

SEQ ID NO: 3029927 - RNA, 18 nt, Human
uuccagguuuaagcuguu

SEQ ID NO: 3029928 - RNA, 17 nt, Human
uuccaggcugggagagc

SEQ ID NO: 3029929 - RNA, 15 nt, Human
uuccaggcugggaga

SEQ ID NO: 3029930 - RNA, 13 nt, Human
uuccaggcuggga

SEQ ID NO: 3029931 - RNA, 21 nt, Human
uuccacaagagcccaggccuc

SEQ ID NO: 3029932 - RNA, 21 nt, Human
auauguggaguucaucuugaa

SEQ ID NO: 3029933 - RNA, 20 nt, Human
auauguggaguucaucuuga

SEQ ID NO: 3029934 - RNA, 14 nt, Human
uucaggguuggccc

SEQ ID NO: 3029935 - RNA, 16 nt, Human
uucaggguuggccccu

SEQ ID NO: 3029936 - RNA, 17 nt, Human
uucaggguuggccccug

SEQ ID NO: 3029937 - RNA, 19 nt, Human
uucaggguuggccccugcc

SEQ ID NO: 3029938 - RNA, 22 nt, Human
uucaggguuggccccugcccgg

SEQ ID NO: 3029939 - RNA, 15 nt, Human
uucagguaacaggca

SEQ ID NO: 3029940 - RNA, 16 nt, Human
uucagguaacaggcag

SEQ ID NO: 3029941 - RNA, 16 nt, Human
uucagaaauguguuau

SEQ ID NO: 3029942 - RNA, 21 nt, Human
auauauguuuuaagaggcagg

SEQ ID NO: 3029943 - RNA, 22 nt, Human
auauauguuuuaagaggcaggg

SEQ ID NO: 3029944 - RNA, 17 nt, Human
uucagguaacaggcaga

SEQ ID NO: 3029945 - RNA, 14 nt, Human
uucaguaagccgug

SEQ ID NO: 3029946 - RNA, 22 nt, Human
uuccuguuuuuauuauuaacaa

SEQ ID NO: 3029947 - RNA, 22 nt, Human
uuccuggcacugcuuccaguga

SEQ ID NO: 3029948 - RNA, 20 nt, Human
uuccuggcacugcuuccagu

SEQ ID NO: 3029949 - RNA, 19 nt, Human
uuccuggcacugcuuccag

SEQ ID NO: 3029950 - RNA, 22 nt, Human
uuccucuuuuuauuuaguuccu

SEQ ID NO: 3029951 - RNA, 21 nt, Human
aucaacugcaucaagauguga

SEQ ID NO: 3029952 - RNA, 14 nt, Human
aucacgccacugca

SEQ ID NO: 3029953 - RNA, 15 nt, Human
aucacgccacugcac

SEQ ID NO: 3029954 - RNA, 17 nt, Human
aucacgccacugcacua

SEQ ID NO: 3029955 - RNA, 19 nt, Human
auauugguugggaugacuu

SEQ ID NO: 3029956 - RNA, 22 nt, Human
auauugcugauggugcaaugac

SEQ ID NO: 3029957 - RNA, 20 nt, Human
auauugguugggaugacuug

SEQ ID NO: 3029958 - RNA, 15 nt, Human
auauugauaugcuua

SEQ ID NO: 3029959 - RNA, 13 nt, Human
auauuuaaucuuu

SEQ ID NO: 3029960 - RNA, 13 nt, Human
auauuguuuucag

SEQ ID NO: 3029961 - RNA, 16 nt, Human
uuccagugaggcucug

SEQ ID NO: 3029962 - RNA, 15 nt, Human
uuccagugaggcucu

SEQ ID NO: 3029963 - RNA, 17 nt, Human
auauuaccacagacaua

SEQ ID NO: 3029964 - RNA, 16 nt, Human
auauuaagaaagacua

SEQ ID NO: 3029965 - RNA, 15 nt, Human
auauuaagaaagacu

SEQ ID NO: 3029966 - RNA, 17 nt, Human
auauuaagaaagacuau

SEQ ID NO: 3029967 - RNA, 22 nt, Human
auauuaagaaagacuaucuaaa

SEQ ID NO: 3029968 - RNA, 14 nt, Human
aucacuuccaugac

SEQ ID NO: 3029969 - RNA, 17 nt, Human
aucaggugcugccaucc

SEQ ID NO: 3029970 - RNA, 19 nt, Human
aucaggugcugccauccag

SEQ ID NO: 3029971 - RNA, 15 nt, Human
aucaggugcugccau

SEQ ID NO: 3029972 - RNA, 14 nt, Human
aucaggugcugcca

SEQ ID NO: 3029973 - RNA, 19 nt, Human
aucagucugauucccaagc

SEQ ID NO: 3029974 - RNA, 23 nt, Human
aucauaguggcuuaaaacaacac

SEQ ID NO: 3029975 - RNA, 15 nt, Human
aucauaaaacuugau

SEQ ID NO: 3029976 - RNA, 16 nt, Human
aucauuaggugugacu

SEQ ID NO: 3029977 - RNA, 21 nt, Human
aucauccacugugccaugugc

SEQ ID NO: 3029978 - RNA, 23 nt, Human
aucauccacugugccaugugcca

SEQ ID NO: 3029979 - RNA, 12 nt, Human
aucauugaaauc

SEQ ID NO: 3029980 - RNA, 19 nt, Human
uucugcagccacuauuguu

SEQ ID NO: 3029981 - RNA, 20 nt, Human
uucucuaguuugauuaaauu

SEQ ID NO: 3029982 - RNA, 21 nt, Human
uucucuaguuugauuaaauuc

SEQ ID NO: 3029983 - RNA, 16 nt, Human
auccaauugcugcuug

SEQ ID NO: 3029984 - RNA, 15 nt, Human
uucugccugcccagg

SEQ ID NO: 3029985 - RNA, 16 nt, Human
uucugccugcccaggc

SEQ ID NO: 3029986 - RNA, 17 nt, Human
auccagguucagcuugu

SEQ ID NO: 3029987 - RNA, 14 nt, Human
auccaguaucuuga

SEQ ID NO: 3029988 - RNA, 11 nt, Human
aucccagcccc

SEQ ID NO: 3029989 - RNA, 13 nt, Human
aucccaugagccu

SEQ ID NO: 3029990 - RNA, 16 nt, Human
aucccaugagccucag

SEQ ID NO: 3029991 - RNA, 22 nt, Human
aucccugaaggccccgcccagg

SEQ ID NO: 3029992 - RNA, 17 nt, Human
aucccugaaggccccgc

SEQ ID NO: 3029993 - RNA, 17 nt, Human
aucccaugagccucagc

SEQ ID NO: 3029994 - RNA, 18 nt, Human
aucccaugagccucagca

SEQ ID NO: 3029995 - RNA, 21 nt, Human
uucuguuggccagugugacaa

SEQ ID NO: 3029996 - RNA, 13 nt, Human
uucuguuuagaua

SEQ ID NO: 3029997 - RNA, 18 nt, Human
uucuguuuagauaauaca

SEQ ID NO: 3029998 - RNA, 22 nt, Human
uucuucuccacuuucuagccag

SEQ ID NO: 3029999 - RNA, 13 nt, Human
uucuugcaaagua

SEQ ID NO: 3030000 - RNA, 12 nt, Human
uucuuucuggcu

SEQ ID NO: 3030001 - RNA, 17 nt, Human
uucuuucuggcuaugca

SEQ ID NO: 3030002 - RNA, 20 nt, Human
uucuuucuggcuaugcauuu

SEQ ID NO: 3030003 - RNA, 14 nt, Human
uugaaggaugcugu

SEQ ID NO: 3030004 - RNA, 16 nt, Human
uugaaggaugcugucu

SEQ ID NO: 3030005 - RNA, 14 nt, Human
uugaaguaaaaugu

SEQ ID NO: 3030006 - RNA, 16 nt, Human
uugaagguagaauguu

SEQ ID NO: 3030007 - RNA, 19 nt, Human
uugaagguagaauguuuuc

SEQ ID NO: 3030008 - RNA, 15 nt, Human
uugaagguagaaugu

SEQ ID NO: 3030009 - RNA, 15 nt, Human
aucuaaauguugaaa

SEQ ID NO: 3030010 - RNA, 19 nt, Human
aucuaaauggaaccacucu

SEQ ID NO: 3030011 - RNA, 14 nt, Human
aucgugacaacacu

SEQ ID NO: 3030012 - RNA, 15 nt, Human
aucgugacaacacuu

SEQ ID NO: 3030013 - RNA, 18 nt, Human
aucgucacugcuuaacuu

SEQ ID NO: 3030014 - RNA, 14 nt, Human
aucgucacugcuua

SEQ ID NO: 3030015 - RNA, 24 nt, Human
uugaccauucuccaccugccaggg

SEQ ID NO: 3030016 - RNA, 17 nt, Human
uugaccauucuccaccu

SEQ ID NO: 3030017 - RNA, 19 nt, Human
uugaccauucuccaccugc

SEQ ID NO: 3030018 - RNA, 18 nt, Human
uugaccauucuccaccug

SEQ ID NO: 3030019 - RNA, 19 nt, Human
uugacagggcacaccgggc

SEQ ID NO: 3030020 - RNA, 12 nt, Human
uugauaaaguaa

SEQ ID NO: 3030021 - RNA, 15 nt, Human
uugaggucuguucuu

SEQ ID NO: 3030022 - RNA, 16 nt, Human
uugaggucuguucuuu

SEQ ID NO: 3030023 - RNA, 22 nt, Human
auccuggcacccggccccugcu

SEQ ID NO: 3030024 - RNA, 23 nt, Human
auccuggcacccggccccugcug

SEQ ID NO: 3030025 - RNA, 15 nt, Human
auccuggaguucugg

SEQ ID NO: 3030026 - RNA, 17 nt, Human
auccuggcacccggccc

SEQ ID NO: 3030027 - RNA, 19 nt, Human
auccuggcacccggccccu

SEQ ID NO: 3030028 - RNA, 20 nt, Human
auccuggcacccggccccug

SEQ ID NO: 3030029 - RNA, 21 nt, Human
auccuggcacccggccccugc

SEQ ID NO: 3030030 - RNA, 11 nt, Human
auccugagcca

SEQ ID NO: 3030031 - RNA, 13 nt, Human
auccugagccaga

SEQ ID NO: 3030032 - RNA, 12 nt, Human
auccugagccag

SEQ ID NO: 3030033 - RNA, 17 nt, Human
auccucuuugagugaag

SEQ ID NO: 3030034 - RNA, 20 nt, Human
uucuuuugccguuauuaaaa

SEQ ID NO: 3030035 - RNA, 20 nt, Human
auccucuguacagagcccac

SEQ ID NO: 3030036 - RNA, 18 nt, Human
auccucuguacagagccc

SEQ ID NO: 3030037 - RNA, 21 nt, Human
auccugagccagauuucacuc

SEQ ID NO: 3030038 - RNA, 17 nt, Human
auccugagccagauuuc

SEQ ID NO: 3030039 - RNA, 15 nt, Human
auccugagccagauu

SEQ ID NO: 3030040 - RNA, 14 nt, Human
auccugagccagau

SEQ ID NO: 3030041 - RNA, 22 nt, Human
uggaguuauugaagcagagugg

SEQ ID NO: 3030042 - RNA, 15 nt, Human
aggccacaagacccu

SEQ ID NO: 3030043 - RNA, 15 nt, Human
uggaugccugguggc

SEQ ID NO: 3030044 - RNA, 20 nt, Human
uggaguucaucuugaauugu

SEQ ID NO: 3030045 - RNA, 17 nt, Human
uggaguucaucuugaau

SEQ ID NO: 3030046 - RNA, 16 nt, Human
uggaguucaucuugaa

SEQ ID NO: 3030047 - RNA, 18 nt, Human
uggaugccugguggcagc

SEQ ID NO: 3030048 - RNA, 19 nt, Human
uggaugccugguggcagcu

SEQ ID NO: 3030049 - RNA, 20 nt, Human
uggaguuauugaagcagagu

SEQ ID NO: 3030050 - RNA, 18 nt, Human
aggccaaggugggaggau

SEQ ID NO: 3030051 - RNA, 20 nt, Human
aggccaaaggaagcacaugc

SEQ ID NO: 3030052 - RNA, 23 nt, Human
aggccaaaggaagcacaugccuc

SEQ ID NO: 3030053 - RNA, 20 nt, Human
aggccaaacucaccugcccc

SEQ ID NO: 3030054 - RNA, 14 nt, Human
aggccaaaggaagc

SEQ ID NO: 3030055 - RNA, 18 nt, Human
aggcauuuguuugaacug

SEQ ID NO: 3030056 - RNA, 16 nt, Human
aggccaaacucaccug

SEQ ID NO: 3030057 - RNA, 12 nt, Human
uggcagccccug

SEQ ID NO: 3030058 - RNA, 20 nt, Human
aggccacaagacccuugugg

SEQ ID NO: 3030059 - RNA, 22 nt, Human
uggcagaguugaagacagagcu

SEQ ID NO: 3030060 - RNA, 15 nt, Human
uggcacccggccccu

SEQ ID NO: 3030061 - RNA, 21 nt, Human
uggcagaguugaagacagagc

SEQ ID NO: 3030062 - RNA, 12 nt, Human
uggauguucuga

SEQ ID NO: 3030063 - RNA, 22 nt, Human
uggauuaaacuuaaucuaaaug

SEQ ID NO: 3030064 - RNA, 20 nt, Human
uggcacaucagcacgauuuc

SEQ ID NO: 3030065 - RNA, 18 nt, Human
uggcaccagcagccugga

SEQ ID NO: 3030066 - RNA, 21 nt, Human
uggccccugcccggcugcgga

SEQ ID NO: 3030067 - RNA, 20 nt, Human
uggccccugcccggcugcgg

SEQ ID NO: 3030068 - RNA, 22 nt, Human
aggccuggccagaugcaccagc

SEQ ID NO: 3030069 - RNA, 23 nt, Human
aggccuggccagaugcaccagcc

SEQ ID NO: 3030070 - RNA, 23 nt, Human
aggccugggggcugggcagagga

SEQ ID NO: 3030071 - RNA, 15 nt, Human
aggccuggccagaug

SEQ ID NO: 3030072 - RNA, 16 nt, Human
aggccuggccagaugc

SEQ ID NO: 3030073 - RNA, 17 nt, Human
aggccuggccagaugca

SEQ ID NO: 3030074 - RNA, 21 nt, Human
aggccuggccagaugcaccag

SEQ ID NO: 3030075 - RNA, 13 nt, Human
uggccucugcacu

SEQ ID NO: 3030076 - RNA, 17 nt, Human
uggccucugcacucccc

SEQ ID NO: 3030077 - RNA, 15 nt, Human
uggccucugcacucc

SEQ ID NO: 3030078 - RNA, 14 nt, Human
uggccucugcacuc

SEQ ID NO: 3030079 - RNA, 15 nt, Human
uggccaggcuggucu

SEQ ID NO: 3030080 - RNA, 17 nt, Human
uggccaggcuggucuca

SEQ ID NO: 3030081 - RNA, 15 nt, Human
uggcaugggaaugaa

SEQ ID NO: 3030082 - RNA, 12 nt, Human
uggcaugggaau

SEQ ID NO: 3030083 - RNA, 14 nt, Human
aggcccucugccca

SEQ ID NO: 3030084 - RNA, 13 nt, Human
aggcccucugccc

SEQ ID NO: 3030085 - RNA, 20 nt, Human
ugggaaagggauuuucagcc

SEQ ID NO: 3030086 - RNA, 16 nt, Human
ugggaaaggggaaguu

SEQ ID NO: 3030087 - RNA, 23 nt, Human
uggcuucacggaagagccuugcg

SEQ ID NO: 3030088 - RNA, 22 nt, Human
uggcuucacggaagagccuugc

SEQ ID NO: 3030089 - RNA, 13 nt, Human
uggcuguuggcug

SEQ ID NO: 3030090 - RNA, 14 nt, Human
uggcugugucuccc

SEQ ID NO: 3030091 - RNA, 15 nt, Human
uggcuguuggcuggg

SEQ ID NO: 3030092 - RNA, 17 nt, Human
uggcuuaaaacaacacu

SEQ ID NO: 3030093 - RNA, 22 nt, Human
uggcuauuagagaucaaccccu

SEQ ID NO: 3030094 - RNA, 19 nt, Human
uggcuaugcauuugaaaau

SEQ ID NO: 3030095 - RNA, 15 nt, Human
uggcuaugcauuuga

SEQ ID NO: 3030096 - RNA, 17 nt, Human
uggcuaugcauuugaaa

SEQ ID NO: 3030097 - RNA, 14 nt, Human
uggcuaugcauuug

SEQ ID NO: 3030098 - RNA, 14 nt, Human
aggcugggagagcc

SEQ ID NO: 3030099 - RNA, 22 nt, Human
uggcuagagguucaaagauauu

SEQ ID NO: 3030100 - RNA, 18 nt, Human
aggcuggcgugcaguggu

SEQ ID NO: 3030101 - RNA, 20 nt, Human
aggcuggcgugcaguggugc

SEQ ID NO: 3030102 - RNA, 12 nt, Human
uggcugcaaagg

SEQ ID NO: 3030103 - RNA, 18 nt, Human
uggcucaaguccucuuuu

SEQ ID NO: 3030104 - RNA, 19 nt, Human
uggcucuuccaggcuggga

SEQ ID NO: 3030105 - RNA, 21 nt, Human
uggcucuuccaggcugggaga

SEQ ID NO: 3030106 - RNA, 20 nt, Human
uggcucuuccaggcugggag

SEQ ID NO: 3030107 - RNA, 15 nt, Human
uggcugcagggaguc

SEQ ID NO: 3030108 - RNA, 13 nt, Human
uggcugcagggag

SEQ ID NO: 3030109 - RNA, 14 nt, Human
uggcugcagggagu

SEQ ID NO: 3030110 - RNA, 20 nt, Human
uggcugccaaugggagcuca

SEQ ID NO: 3030111 - RNA, 18 nt, Human
uggcugccaaugggagcu

SEQ ID NO: 3030112 - RNA, 13 nt, Human
aggcuggcgugca

SEQ ID NO: 3030113 - RNA, 17 nt, Human
aggcuggcgugcagugg

SEQ ID NO: 3030114 - RNA, 16 nt, Human
aggcucugcccuuggu

SEQ ID NO: 3030115 - RNA, 21 nt, Human
aggcucucaggccagcugcuu

SEQ ID NO: 3030116 - RNA, 11 nt, Human
aggcucugccc

SEQ ID NO: 3030117 - RNA, 12 nt, Human
aggcucugcccu

SEQ ID NO: 3030118 - RNA, 13 nt, Human
aggcucugcccuu

SEQ ID NO: 3030119 - RNA, 15 nt, Human
aggcucugcccuugg

SEQ ID NO: 3030120 - RNA, 14 nt, Human
aggcucugcccuug

SEQ ID NO: 3030121 - RNA, 20 nt, Human
aggcucucaggccagcugcu

SEQ ID NO: 3030122 - RNA, 19 nt, Human
aggcucucaggccagcugc

SEQ ID NO: 3030123 - RNA, 18 nt, Human
aggcucucaggccagcug

SEQ ID NO: 3030124 - RNA, 16 nt, Human
aggcucucaggccagc

SEQ ID NO: 3030125 - RNA, 15 nt, Human
aggcucucaggccag

SEQ ID NO: 3030126 - RNA, 14 nt, Human
aggcucucaggcca

SEQ ID NO: 3030127 - RNA, 12 nt, Human
aggcucucaggc

SEQ ID NO: 3030128 - RNA, 11 nt, Human
aggcucucagg

SEQ ID NO: 3030129 - RNA, 21 nt, Human
aggcucgagcaugccuggaug

SEQ ID NO: 3030130 - RNA, 19 nt, Human
aggcucgagcaugccugga

SEQ ID NO: 3030131 - RNA, 18 nt, Human
aggcucgagcaugccugg

SEQ ID NO: 3030132 - RNA, 17 nt, Human
aggcucgagcaugccug

SEQ ID NO: 3030133 - RNA, 15 nt, Human
aggcucgagcaugcc

SEQ ID NO: 3030134 - RNA, 19 nt, Human
aggcuccuuuagcgcccag

SEQ ID NO: 3030135 - RNA, 12 nt, Human
aggcucgagcau

SEQ ID NO: 3030136 - RNA, 17 nt, Human
aggaagcuuacaugccu

SEQ ID NO: 3030137 - RNA, 18 nt, Human
aggaagcugugagagcag

SEQ ID NO: 3030138 - RNA, 18 nt, Human
aggaaggaaacccagcuc

SEQ ID NO: 3030139 - RNA, 13 nt, Human
aggaagccagcag

SEQ ID NO: 3030140 - RNA, 17 nt, Human
aggaagccagcaggcuc

SEQ ID NO: 3030141 - RNA, 15 nt, Human
aggaaggagaggaga

SEQ ID NO: 3030142 - RNA, 19 nt, Human
aggaaggaaacccagcucu

SEQ ID NO: 3030143 - RNA, 22 nt, Human
aggaagcacaugccucucucag

SEQ ID NO: 3030144 - RNA, 15 nt, Human
aggaagccagcaggc

SEQ ID NO: 3030145 - RNA, 14 nt, Human
aggaagccagcagg

SEQ ID NO: 3030146 - RNA, 24 nt, Human
aggaagcacaugccucucucaggc

SEQ ID NO: 3030147 - RNA, 23 nt, Human
aggaagcacaugccucucucagg

SEQ ID NO: 3030148 - RNA, 14 nt, Human
aggaagacuuugga

SEQ ID NO: 3030149 - RNA, 13 nt, Human
aggaagacuuugg

SEQ ID NO: 3030150 - RNA, 19 nt, Human
aggaagacuucaucccucu

SEQ ID NO: 3030151 - RNA, 13 nt, Human
aggaagacuucau

SEQ ID NO: 3030152 - RNA, 23 nt, Human
ugcugagucugaaggcuggguuc

SEQ ID NO: 3030153 - RNA, 22 nt, Human
ugcugagucugaaggcuggguu

SEQ ID NO: 3030154 - RNA, 21 nt, Human
ugcugagucugaaggcugggu

SEQ ID NO: 3030155 - RNA, 18 nt, Human
ugcugagucugaaggcug

SEQ ID NO: 3030156 - RNA, 17 nt, Human
ugcugagucugaaggcu

SEQ ID NO: 3030157 - RNA, 16 nt, Human
ugcugagucugaaggc

SEQ ID NO: 3030158 - RNA, 21 nt, Human
ugcucugcugacagacacagg

SEQ ID NO: 3030159 - RNA, 22 nt, Human
ugcucugcugacagacacaggc

SEQ ID NO: 3030160 - RNA, 16 nt, Human
ugcucugcugacagac

SEQ ID NO: 3030161 - RNA, 14 nt, Human
ugcugagucugaag

SEQ ID NO: 3030162 - RNA, 15 nt, Human
ugcugagucugaagg

SEQ ID NO: 3030163 - RNA, 19 nt, Human
ugcuccagcuguucagcug

SEQ ID NO: 3030164 - RNA, 16 nt, Human
ugcuccagcuguucag

SEQ ID NO: 3030165 - RNA, 19 nt, Human
agcugggacuacaggcacc

SEQ ID NO: 3030166 - RNA, 16 nt, Human
agcugggacuacaggc

SEQ ID NO: 3030167 - RNA, 18 nt, Human
agcugggacuacaggcac

SEQ ID NO: 3030168 - RNA, 11 nt, Human
ugcuguacaua

SEQ ID NO: 3030169 - RNA, 18 nt, Human
ugcuguaacuuucugaaa

SEQ ID NO: 3030170 - RNA, 22 nt, Human
ugcuguacauacuuuuuggguu

SEQ ID NO: 3030171 - RNA, 17 nt, Human
ugcuguacauacuuuuu

SEQ ID NO: 3030172 - RNA, 15 nt, Human
ugcuguacauacuuu

SEQ ID NO: 3030173 - RNA, 16 nt, Human
ugcuggcugguuagag

SEQ ID NO: 3030174 - RNA, 12 nt, Human
ugcugcccugug

SEQ ID NO: 3030175 - RNA, 14 nt, Human
ugcugcccugugag

SEQ ID NO: 3030176 - RNA, 13 nt, Human
ugcugcccuguga

SEQ ID NO: 3030177 - RNA, 15 nt, Human
ugcugcccugugagu

SEQ ID NO: 3030178 - RNA, 13 nt, Human
ugcuuauacacuu

SEQ ID NO: 3030179 - RNA, 12 nt, Human
ugcuucaaggau

SEQ ID NO: 3030180 - RNA, 13 nt, Human
ugcuucagccucc

SEQ ID NO: 3030181 - RNA, 14 nt, Human
ugcuucagccuccc

SEQ ID NO: 3030182 - RNA, 19 nt, Human
ugcuucaaggauccugagc

SEQ ID NO: 3030183 - RNA, 18 nt, Human
ugcuucaaggauccugag

SEQ ID NO: 3030184 - RNA, 16 nt, Human
ugcuucaaggauccug

SEQ ID NO: 3030185 - RNA, 22 nt, Human
aggacagggaggugaccccagg

SEQ ID NO: 3030186 - RNA, 23 nt, Human
aggacacuaaccacgcuggaccu

SEQ ID NO: 3030187 - RNA, 19 nt, Human
aggacacuaaccacgcugg

SEQ ID NO: 3030188 - RNA, 18 nt, Human
ugcuuggcccaggaguuu

SEQ ID NO: 3030189 - RNA, 23 nt, Human
ugcuuggcccaggaguuuggcca

SEQ ID NO: 3030190 - RNA, 16 nt, Human
ugcuugggcuucaucc

SEQ ID NO: 3030191 - RNA, 12 nt, Human
ugcuugggcuuc

SEQ ID NO: 3030192 - RNA, 15 nt, Human
ugcuuggcccaggag

SEQ ID NO: 3030193 - RNA, 16 nt, Human
ugcuuggcccaggagu

SEQ ID NO: 3030194 - RNA, 12 nt, Human
ugcuuggcccag

SEQ ID NO: 3030195 - RNA, 21 nt, Human
ugcuuggaggaaggaaaccca

SEQ ID NO: 3030196 - RNA, 22 nt, Human
uggaaaggaaugcaaagaugaa

SEQ ID NO: 3030197 - RNA, 21 nt, Human
uggaaaggaaugcaaagauga

SEQ ID NO: 3030198 - RNA, 15 nt, Human
uggaaaggaaugcaa

SEQ ID NO: 3030199 - RNA, 12 nt, Human
uggaaaggaaug

SEQ ID NO: 3030200 - RNA, 15 nt, Human
uggaaauauuaagaa

SEQ ID NO: 3030201 - RNA, 19 nt, Human
ugcuugggcuucauccucc

SEQ ID NO: 3030202 - RNA, 14 nt, Human
aggagcagccacau

SEQ ID NO: 3030203 - RNA, 22 nt, Human
aggagccccgaggccuucucug

SEQ ID NO: 3030204 - RNA, 17 nt, Human
aggagauuggaaggaac

SEQ ID NO: 3030205 - RNA, 23 nt, Human
aggacuuuucuuuguggcuuccu

SEQ ID NO: 3030206 - RNA, 19 nt, Human
aggacauugcggacagcca

SEQ ID NO: 3030207 - RNA, 23 nt, Human
aggacauugcggacagccacggc

SEQ ID NO: 3030208 - RNA, 15 nt, Human
aggacauugcggaca

SEQ ID NO: 3030209 - RNA, 17 nt, Human
aggacauugcggacagc

SEQ ID NO: 3030210 - RNA, 18 nt, Human
aggacauugcggacagcc

SEQ ID NO: 3030211 - RNA, 15 nt, Human
aggaguuuggccaga

SEQ ID NO: 3030212 - RNA, 16 nt, Human
aggaguuuggccagaa

SEQ ID NO: 3030213 - RNA, 17 nt, Human
aggaguuuggccagaag

SEQ ID NO: 3030214 - RNA, 18 nt, Human
aggaguuuggccagaagu

SEQ ID NO: 3030215 - RNA, 13 nt, Human
aggaguuuggcca

SEQ ID NO: 3030216 - RNA, 14 nt, Human
aggaguuuggccag

SEQ ID NO: 3030217 - RNA, 21 nt, Human
aggauacaaaagcaugugaga

SEQ ID NO: 3030218 - RNA, 16 nt, Human
aggauccugagccaga

SEQ ID NO: 3030219 - RNA, 15 nt, Human
aggauccugagccag

SEQ ID NO: 3030220 - RNA, 17 nt, Human
aggaugaucuaggaaga

SEQ ID NO: 3030221 - RNA, 16 nt, Human
aggaugaucuaggaag

SEQ ID NO: 3030222 - RNA, 18 nt, Human
aggauccugagccagauu

SEQ ID NO: 3030223 - RNA, 17 nt, Human
aggauccugagccagau

SEQ ID NO: 3030224 - RNA, 22 nt, Human
aggaucucuugagccugggagg

SEQ ID NO: 3030225 - RNA, 21 nt, Human
aggaucucuugagccugggag

SEQ ID NO: 3030226 - RNA, 20 nt, Human
uggaaauauuaagaaagacu

SEQ ID NO: 3030227 - RNA, 18 nt, Human
uggaaaugggcagagcag

SEQ ID NO: 3030228 - RNA, 23 nt, Human
uggaaaugggcagagcagagacc

SEQ ID NO: 3030229 - RNA, 18 nt, Human
uggacacagcucuucucc

SEQ ID NO: 3030230 - RNA, 15 nt, Human
uggacacagcucuuc

SEQ ID NO: 3030231 - RNA, 16 nt, Human
uggacacagcucuucu

SEQ ID NO: 3030232 - RNA, 13 nt, Human
uggacccugaggc

SEQ ID NO: 3030233 - RNA, 12 nt, Human
uggacccugagg

SEQ ID NO: 3030234 - RNA, 14 nt, Human
uggacccugaggcc

SEQ ID NO: 3030235 - RNA, 19 nt, Human
aggauuuugauccaagcug

SEQ ID NO: 3030236 - RNA, 19 nt, Human
aggaugcccaaagaugcag

SEQ ID NO: 3030237 - RNA, 14 nt, Human
aggaugcccaaaga

SEQ ID NO: 3030238 - RNA, 20 nt, Human
aggaugaucuaggaagacuu

SEQ ID NO: 3030239 - RNA, 17 nt, Human
aggcaacucaucuuagg

SEQ ID NO: 3030240 - RNA, 13 nt, Human
ugaugacuguuuu

SEQ ID NO: 3030241 - RNA, 15 nt, Human
ugaugacauucccug

SEQ ID NO: 3030242 - RNA, 18 nt, Human
ugaugacauucccugcua

SEQ ID NO: 3030243 - RNA, 22 nt, Human
ugauccucccaccucagccucc

SEQ ID NO: 3030244 - RNA, 21 nt, Human
ugauccucccaccucagccuc

SEQ ID NO: 3030245 - RNA, 15 nt, Human
ugauccucccaccuc

SEQ ID NO: 3030246 - RNA, 16 nt, Human
ugauccuaguuccacc

SEQ ID NO: 3030247 - RNA, 23 nt, Human
ugaugcuucuucagagacuccug

SEQ ID NO: 3030248 - RNA, 16 nt, Human
ugaugagaggaaauca

SEQ ID NO: 3030249 - RNA, 15 nt, Human
ugaugagaggaaauc

SEQ ID NO: 3030250 - RNA, 14 nt, Human
ugaugagaggaaau

SEQ ID NO: 3030251 - RNA, 13 nt, Human
ugaugagaggaaa

SEQ ID NO: 3030252 - RNA, 19 nt, Human
ugauggggcccugccuccu

SEQ ID NO: 3030253 - RNA, 16 nt, Human
ugauggggcccugccu

SEQ ID NO: 3030254 - RNA, 15 nt, Human
ugauggggcccugcc

SEQ ID NO: 3030255 - RNA, 14 nt, Human
ugauggggcccugc

SEQ ID NO: 3030256 - RNA, 18 nt, Human
agccacugcaccgggcca

SEQ ID NO: 3030257 - RNA, 19 nt, Human
agccacugcaccgggccac

SEQ ID NO: 3030258 - RNA, 11 nt, Human
agccagaggag

SEQ ID NO: 3030259 - RNA, 10 nt, Human
agccagagga

SEQ ID NO: 3030260 - RNA, 13 nt, Human
ugauggugcaaug

SEQ ID NO: 3030261 - RNA, 15 nt, Human
ugauggugcaaugac

SEQ ID NO: 3030262 - RNA, 19 nt, Human
ugauuaaauucuugcaaag

SEQ ID NO: 3030263 - RNA, 20 nt, Human
ugauuaaauucuugcaaagu

SEQ ID NO: 3030264 - RNA, 19 nt, Human
ugauuaaccacuucagcug

SEQ ID NO: 3030265 - RNA, 16 nt, Human
agccacugcaccgggc

SEQ ID NO: 3030266 - RNA, 20 nt, Human
ugauuuagcaggaagcugug

SEQ ID NO: 3030267 - RNA, 17 nt, Human
ugauuuagcaggaagcu

SEQ ID NO: 3030268 - RNA, 18 nt, Human
ugauuuccguuaaaauac

SEQ ID NO: 3030269 - RNA, 22 nt, Human
ugauuuccguuaaaauaccagc

SEQ ID NO: 3030270 - RNA, 17 nt, Human
ugauuuggggauauuuu

SEQ ID NO: 3030271 - RNA, 22 nt, Human
ugauucccaagcucugcuccuc

SEQ ID NO: 3030272 - RNA, 23 nt, Human
ugauucccaagcucugcuccucu

SEQ ID NO: 3030273 - RNA, 21 nt, Human
ugauucauaaugacuuaagca

SEQ ID NO: 3030274 - RNA, 16 nt, Human
ugauucauaaugacuu

SEQ ID NO: 3030275 - RNA, 15 nt, Human
ugauucauaaugacu

SEQ ID NO: 3030276 - RNA, 14 nt, Human
agcccaggaaaggc

SEQ ID NO: 3030277 - RNA, 21 nt, Human
agccaguaaaugggggugcau

SEQ ID NO: 3030278 - RNA, 13 nt, Human
agccaguaaaugg

SEQ ID NO: 3030279 - RNA, 13 nt, Human
agcccacuucugc

SEQ ID NO: 3030280 - RNA, 14 nt, Human
agcccacuucugcc

SEQ ID NO: 3030281 - RNA, 15 nt, Human
agcccacuucugcca

SEQ ID NO: 3030282 - RNA, 11 nt, Human
agcccugucuc

SEQ ID NO: 3030283 - RNA, 18 nt, Human
agcccugucuccucucuc

SEQ ID NO: 3030284 - RNA, 16 nt, Human
agcccuuagcagggaa

SEQ ID NO: 3030285 - RNA, 16 nt, Human
ugcagacucuacagag

SEQ ID NO: 3030286 - RNA, 17 nt, Human
ugcagacucuacagagg

SEQ ID NO: 3030287 - RNA, 21 nt, Human
agcccuuagcagggaaacagc

SEQ ID NO: 3030288 - RNA, 17 nt, Human
agccgagaucacgccac

SEQ ID NO: 3030289 - RNA, 21 nt, Human
agccgagauagccaaggccaa

SEQ ID NO: 3030290 - RNA, 20 nt, Human
agccgagauagccaaggcca

SEQ ID NO: 3030291 - RNA, 19 nt, Human
ugcacuccccugcugggug

SEQ ID NO: 3030292 - RNA, 17 nt, Human
ugcacuccccugcuggg

SEQ ID NO: 3030293 - RNA, 16 nt, Human
ugcacuccccugcugg

SEQ ID NO: 3030294 - RNA, 11 nt, Human
ugcacacauuu

SEQ ID NO: 3030295 - RNA, 12 nt, Human
ugcacacauuuu

SEQ ID NO: 3030296 - RNA, 13 nt, Human
ugcacacauuuuu

SEQ ID NO: 3030297 - RNA, 15 nt, Human
ugcacacauuuuuua

SEQ ID NO: 3030298 - RNA, 22 nt, Human
ugcagacaggcaagcaccuccu

SEQ ID NO: 3030299 - RNA, 22 nt, Human
ugcagccucaaccuccugggcu

SEQ ID NO: 3030300 - RNA, 20 nt, Human
ugcagccucaaccuccuggg

SEQ ID NO: 3030301 - RNA, 21 nt, Human
ugcagccucaaccuccugggc

SEQ ID NO: 3030302 - RNA, 23 nt, Human
agccucugaaaaccaauguucuc

SEQ ID NO: 3030303 - RNA, 18 nt, Human
agccucacaguccuuacc

SEQ ID NO: 3030304 - RNA, 17 nt, Human
agccucacaguccuuac

SEQ ID NO: 3030305 - RNA, 20 nt, Human
agccucaaccuccugggcua

SEQ ID NO: 3030306 - RNA, 19 nt, Human
agccucaaccuccugggcu

SEQ ID NO: 3030307 - RNA, 21 nt, Human
ugcaaaccaucauugaaaucu

SEQ ID NO: 3030308 - RNA, 21 nt, Human
agcccaggccuccuacagcuu

SEQ ID NO: 3030309 - RNA, 17 nt, Human
agccccaaaacucuccu

SEQ ID NO: 3030310 - RNA, 16 nt, Human
agccccaaaacucucc

SEQ ID NO: 3030311 - RNA, 20 nt, Human
agccccauucugccugccca

SEQ ID NO: 3030312 - RNA, 18 nt, Human
agccccaaaacucuccuc

SEQ ID NO: 3030313 - RNA, 21 nt, Human
agccccauucugccugcccag

SEQ ID NO: 3030314 - RNA, 22 nt, Human
agccccauucugccugcccagg

SEQ ID NO: 3030315 - RNA, 14 nt, Human
agcccugguggcag

SEQ ID NO: 3030316 - RNA, 15 nt, Human
agcccugguggcagu

SEQ ID NO: 3030317 - RNA, 16 nt, Human
agcccugguggcagug

SEQ ID NO: 3030318 - RNA, 21 nt, Human
ugcacacaccagagcccaccu

SEQ ID NO: 3030319 - RNA, 17 nt, Human
ugcacacaccagagccc

SEQ ID NO: 3030320 - RNA, 18 nt, Human
ugcacacaccagagccca

SEQ ID NO: 3030321 - RNA, 22 nt, Human
ugcagcucuccccuucucugua

SEQ ID NO: 3030322 - RNA, 20 nt, Human
ugcagcucuccccuucucug

SEQ ID NO: 3030323 - RNA, 18 nt, Human
agccuuccagggguggga

SEQ ID NO: 3030324 - RNA, 15 nt, Human
agccuugaacuuuga

SEQ ID NO: 3030325 - RNA, 22 nt, Human
agcgauucuucugcuucagccu

SEQ ID NO: 3030326 - RNA, 23 nt, Human
agccuugaccauucuccaccugc

SEQ ID NO: 3030327 - RNA, 22 nt, Human
agccuugaccauucuccaccug

SEQ ID NO: 3030328 - RNA, 13 nt, Human
agccuugaacuuu

SEQ ID NO: 3030329 - RNA, 16 nt, Human
agccuugaacuuugac

SEQ ID NO: 3030330 - RNA, 22 nt, Human
agccuugaacuuugaccucugc

SEQ ID NO: 3030331 - RNA, 19 nt, Human
ugcauuugaggucuguucu

SEQ ID NO: 3030332 - RNA, 18 nt, Human
ugcauuugaggucuguuc

SEQ ID NO: 3030333 - RNA, 20 nt, Human
ugcauuuaaaagauacaguu

SEQ ID NO: 3030334 - RNA, 17 nt, Human
ugccagccacugugaua

SEQ ID NO: 3030335 - RNA, 20 nt, Human
ugcauuugaggucuguucuu

SEQ ID NO: 3030336 - RNA, 21 nt, Human
ugcauuugaggucuguucuuu

SEQ ID NO: 3030337 - RNA, 18 nt, Human
ugccagcuuaucucaggg

SEQ ID NO: 3030338 - RNA, 13 nt, Human
agcggcuggcagc

SEQ ID NO: 3030339 - RNA, 22 nt, Human
agcggggacagcuccuucuguc

SEQ ID NO: 3030340 - RNA, 23 nt, Human
agcggcuggcagcccaccccuca

SEQ ID NO: 3030341 - RNA, 19 nt, Human
agcggggacagcuccuucu

SEQ ID NO: 3030342 - RNA, 20 nt, Human
agcggggacagcuccuucug

SEQ ID NO: 3030343 - RNA, 21 nt, Human
agcuaggccuggccagaugca

SEQ ID NO: 3030344 - RNA, 16 nt, Human
agcuaggccuggccag

SEQ ID NO: 3030345 - RNA, 19 nt, Human
agcuauucaguaauaacuc

SEQ ID NO: 3030346 - RNA, 13 nt, Human
agcucagggccug

SEQ ID NO: 3030347 - RNA, 12 nt, Human
agcucagggccu

SEQ ID NO: 3030348 - RNA, 19 nt, Human
agcucagggccuggcucag

SEQ ID NO: 3030349 - RNA, 18 nt, Human
agcucagggccuggcuca

SEQ ID NO: 3030350 - RNA, 20 nt, Human
agcucagggccuggcucagg

SEQ ID NO: 3030351 - RNA, 15 nt, Human
agcuccaagcuccca

SEQ ID NO: 3030352 - RNA, 20 nt, Human
ugcccaaagaugcagccggu

SEQ ID NO: 3030353 - RNA, 17 nt, Human
ugcccaaagaugcagcc

SEQ ID NO: 3030354 - RNA, 17 nt, Human
ugcccagccccuucuga

SEQ ID NO: 3030355 - RNA, 16 nt, Human
ugcccagccccuucug

SEQ ID NO: 3030356 - RNA, 12 nt, Human
ugcccagccccu

SEQ ID NO: 3030357 - RNA, 13 nt, Human
ugcccagccccuu

SEQ ID NO: 3030358 - RNA, 14 nt, Human
ugcccaggccccug

SEQ ID NO: 3030359 - RNA, 15 nt, Human
ugcccaggccccugc

SEQ ID NO: 3030360 - RNA, 17 nt, Human
ugcccaggccccugcca

SEQ ID NO: 3030361 - RNA, 18 nt, Human
ugcccaggccccugccac

SEQ ID NO: 3030362 - RNA, 23 nt, Human
ugccccgaacauguuuuucuucu

SEQ ID NO: 3030363 - RNA, 20 nt, Human
ugcccuaaaguguauuuuuu

SEQ ID NO: 3030364 - RNA, 13 nt, Human
agcuccagcucac

SEQ ID NO: 3030365 - RNA, 17 nt, Human
agcuccagcucaccagc

SEQ ID NO: 3030366 - RNA, 19 nt, Human
agcuccaagcucccaggca

SEQ ID NO: 3030367 - RNA, 18 nt, Human
agcuccaagcucccaggc

SEQ ID NO: 3030368 - RNA, 16 nt, Human
agcuccaagcucccag

SEQ ID NO: 3030369 - RNA, 17 nt, Human
agcuccaagcucccagg

SEQ ID NO: 3030370 - RNA, 22 nt, Human
agcuccuucuguccuacucugu

SEQ ID NO: 3030371 - RNA, 23 nt, Human
agcuccuucuguccuacucugug

SEQ ID NO: 3030372 - RNA, 21 nt, Human
agcuccagcucaccagcccca

SEQ ID NO: 3030373 - RNA, 18 nt, Human
agcuccagcucaccagcc

SEQ ID NO: 3030374 - RNA, 19 nt, Human
agcuccagcucaccagccc

SEQ ID NO: 3030375 - RNA, 23 nt, Human
agcucuguccugggagugagcug

SEQ ID NO: 3030376 - RNA, 17 nt, Human
ugccugcccaggccccu

SEQ ID NO: 3030377 - RNA, 18 nt, Human
ugccugcccaggccccug

SEQ ID NO: 3030378 - RNA, 19 nt, Human
ugccugcccaggccccugc

SEQ ID NO: 3030379 - RNA, 14 nt, Human
ugccucugacacac

SEQ ID NO: 3030380 - RNA, 16 nt, Human
ugccucugacacacag

SEQ ID NO: 3030381 - RNA, 11 nt, Human
ugccucugccu

SEQ ID NO: 3030382 - RNA, 15 nt, Human
agcugggacuacagg

SEQ ID NO: 3030383 - RNA, 23 nt, Human
agcugcuuuugucuaugggacuc

SEQ ID NO: 3030384 - RNA, 24 nt, Human
agcugcuuuugucuaugggacuca

SEQ ID NO: 3030385 - RNA, 13 nt, Human
agcugccuguuca

SEQ ID NO: 3030386 - RNA, 22 nt, Human
agcugcuuuugucuaugggacu

SEQ ID NO: 3030387 - RNA, 10 nt, Human
agcugccugu

SEQ ID NO: 3030388 - RNA, 22 nt, Human
ugcccuuaccugccaggaagcc

SEQ ID NO: 3030389 - RNA, 18 nt, Human
ugcccugugggcccccaa

SEQ ID NO: 3030390 - RNA, 15 nt, Human
ugcccugugggcccc

SEQ ID NO: 3030391 - RNA, 15 nt, Human
agcucuucuccaggc

SEQ ID NO: 3030392 - RNA, 16 nt, Human
agcucuucuccaggcu

SEQ ID NO: 3030393 - RNA, 23 nt, Human
ugcccugugaguacuacaguccu

SEQ ID NO: 3030394 - RNA, 19 nt, Human
ugcccuuaccugccaggaa

SEQ ID NO: 3030395 - RNA, 20 nt, Human
ugccgcagcccugcagaggg

SEQ ID NO: 3030396 - RNA, 14 nt, Human
ugccgcagcccugc

SEQ ID NO: 3030397 - RNA, 16 nt, Human
ugccucucucaggcca

SEQ ID NO: 3030398 - RNA, 17 nt, Human
ugccucucucaggccaa

SEQ ID NO: 3030399 - RNA, 22 nt, Human
ugccucccaucacccgcuaaga

SEQ ID NO: 3030400 - RNA, 13 nt, Human
aguuuggccagaa

SEQ ID NO: 3030401 - RNA, 14 nt, Human
aguuuggccagaag

SEQ ID NO: 3030402 - RNA, 16 nt, Human
aguuugguuucuagca

SEQ ID NO: 3030403 - RNA, 11 nt, Human
aguuuggccag

SEQ ID NO: 3030404 - RNA, 22 nt, Human
aguuuucacucuuauugcccac

SEQ ID NO: 3030405 - RNA, 12 nt, Human
aguuuggccaga

SEQ ID NO: 3030406 - RNA, 21 nt, Human
aguuucuccaagcaggacaug

SEQ ID NO: 3030407 - RNA, 15 nt, Human
aguuucuccaagcag

SEQ ID NO: 3030408 - RNA, 13 nt, Human
aguuucuccaagc

SEQ ID NO: 3030409 - RNA, 16 nt, Human
uuaaauucuugcaaag

SEQ ID NO: 3030410 - RNA, 13 nt, Human
uuaaauucuugca

SEQ ID NO: 3030411 - RNA, 18 nt, Human
uuaaaaaguggaaaaaua

SEQ ID NO: 3030412 - RNA, 17 nt, Human
uuaaaacaacacucaca

SEQ ID NO: 3030413 - RNA, 20 nt, Human
aguugccagucaccccggcc

SEQ ID NO: 3030414 - RNA, 13 nt, Human
uuaaauaaaucau

SEQ ID NO: 3030415 - RNA, 15 nt, Human
uuaaauaaaucauaa

SEQ ID NO: 3030416 - RNA, 19 nt, Human
uuaaauaaugugaaacugg

SEQ ID NO: 3030417 - RNA, 22 nt, Human
uuaaauaaugugaaacuggauu

SEQ ID NO: 3030418 - RNA, 20 nt, Human
uuaaauaaugugaaacugga

SEQ ID NO: 3030419 - RNA, 21 nt, Human
uuaaauaaugugaaacuggau

SEQ ID NO: 3030420 - RNA, 17 nt, Human
uuaaaccgccaaggcug

SEQ ID NO: 3030421 - RNA, 13 nt, Human
uguuuucaaaugu

SEQ ID NO: 3030422 - RNA, 14 nt, Human
uguuuucaaauguu

SEQ ID NO: 3030423 - RNA, 15 nt, Human
uguuuucaguguaca

SEQ ID NO: 3030424 - RNA, 17 nt, Human
uguuuuauauagcaaga

SEQ ID NO: 3030425 - RNA, 14 nt, Human
uguuuuaggagcau

SEQ ID NO: 3030426 - RNA, 17 nt, Human
uguuuucaguguacaug

SEQ ID NO: 3030427 - RNA, 15 nt, Human
uguuuucucuugaga

SEQ ID NO: 3030428 - RNA, 12 nt, Human
aguucucuccuu

SEQ ID NO: 3030429 - RNA, 13 nt, Human
aguucucuccuuc

SEQ ID NO: 3030430 - RNA, 16 nt, Human
aguucucuccuucuuc

SEQ ID NO: 3030431 - RNA, 15 nt, Human
uguuuggggaugaga

SEQ ID NO: 3030432 - RNA, 14 nt, Human
uguugucagcugaa

SEQ ID NO: 3030433 - RNA, 14 nt, Human
uguuugccucugcc

SEQ ID NO: 3030434 - RNA, 16 nt, Human
uguuugccucugccuc

SEQ ID NO: 3030435 - RNA, 22 nt, Human
aguucuugccuuggcugcaguu

SEQ ID NO: 3030436 - RNA, 14 nt, Human
aguugauagcacag

SEQ ID NO: 3030437 - RNA, 21 nt, Human
aguugauagcacagacccugc

SEQ ID NO: 3030438 - RNA, 20 nt, Human
aguugauagcacagacccug

SEQ ID NO: 3030439 - RNA, 19 nt, Human
aguugauagcacagacccu

SEQ ID NO: 3030440 - RNA, 15 nt, Human
aguugauagcacaga

SEQ ID NO: 3030441 - RNA, 23 nt, Human
aguugauucagcucugcaagaau

SEQ ID NO: 3030442 - RNA, 18 nt, Human
aguugauucagcucugca

SEQ ID NO: 3030443 - RNA, 17 nt, Human
aguugauucagcucugc

SEQ ID NO: 3030444 - RNA, 15 nt, Human
aguugauucagcucu

SEQ ID NO: 3030445 - RNA, 14 nt, Human
aguugauucagcuc

SEQ ID NO: 3030446 - RNA, 13 nt, Human
aguugauucagcu

SEQ ID NO: 3030447 - RNA, 23 nt, Human
aguugauagcacagacccugccc

SEQ ID NO: 3030448 - RNA, 22 nt, Human
aguugauagcacagacccugcc

SEQ ID NO: 3030449 - RNA, 23 nt, Human
aguggcagucuucaguuugcaga

SEQ ID NO: 3030450 - RNA, 20 nt, Human
agugggggaguggccacaga

SEQ ID NO: 3030451 - RNA, 19 nt, Human
agugggggaguggccacag

SEQ ID NO: 3030452 - RNA, 18 nt, Human
agugggugaauaauacag

SEQ ID NO: 3030453 - RNA, 13 nt, Human
agugggugaauaa

SEQ ID NO: 3030454 - RNA, 11 nt, Human
aguggcagcug

SEQ ID NO: 3030455 - RNA, 12 nt, Human
aguggcagcugc

SEQ ID NO: 3030456 - RNA, 13 nt, Human
aguggcagcugcu

SEQ ID NO: 3030457 - RNA, 14 nt, Human
aguggcagcugcuu

SEQ ID NO: 3030458 - RNA, 20 nt, Human
aguggcagcugcuuuugucu

SEQ ID NO: 3030459 - RNA, 19 nt, Human
agugggugaauaauacagu

SEQ ID NO: 3030460 - RNA, 21 nt, Human
agugguuccuaauccucuagg

SEQ ID NO: 3030461 - RNA, 21 nt, Human
aguguacauggaauaacaugu

SEQ ID NO: 3030462 - RNA, 22 nt, Human
aguguacauggaauaacaugua

SEQ ID NO: 3030463 - RNA, 23 nt, Human
aguguacauggaauaacauguaa

SEQ ID NO: 3030464 - RNA, 19 nt, Human
uguucuugguuuguaaauu

SEQ ID NO: 3030465 - RNA, 13 nt, Human
uguucuuuccaaa

SEQ ID NO: 3030466 - RNA, 14 nt, Human
uguucuuuccaaag

SEQ ID NO: 3030467 - RNA, 17 nt, Human
uguucuugguuuguaaa

SEQ ID NO: 3030468 - RNA, 18 nt, Human
uguucuugguuuguaaau

SEQ ID NO: 3030469 - RNA, 14 nt, Human
uguucugggacaca

SEQ ID NO: 3030470 - RNA, 15 nt, Human
uguucugggacacag

SEQ ID NO: 3030471 - RNA, 14 nt, Human
uguucuuaauucuu

SEQ ID NO: 3030472 - RNA, 16 nt, Human
uguucuuaauucuuag

SEQ ID NO: 3030473 - RNA, 12 nt, Human
uguucugggaca

SEQ ID NO: 3030474 - RNA, 13 nt, Human
uguucugggacac

SEQ ID NO: 3030475 - RNA, 14 nt, Human
aguuauugaagcag

SEQ ID NO: 3030476 - RNA, 18 nt, Human
aguuauugaagcagagug

SEQ ID NO: 3030477 - RNA, 17 nt, Human
aguuauugaagcagagu

SEQ ID NO: 3030478 - RNA, 16 nt, Human
aguuauugaagcagag

SEQ ID NO: 3030479 - RNA, 23 nt, Human
aguuauugaagcagaguggcagu

SEQ ID NO: 3030480 - RNA, 19 nt, Human
aguuauugaagcagagugg

SEQ ID NO: 3030481 - RNA, 18 nt, Human
uguucuuuccaaaguaca

SEQ ID NO: 3030482 - RNA, 21 nt, Human
aguuauuuuuauuuauuuaaa

SEQ ID NO: 3030483 - RNA, 16 nt, Human
uguugggccaggagcc

SEQ ID NO: 3030484 - RNA, 13 nt, Human
uguugggccagga

SEQ ID NO: 3030485 - RNA, 13 nt, Human
uguugucagcuga

SEQ ID NO: 3030486 - RNA, 20 nt, Human
auacuauuaaacaugcugua

SEQ ID NO: 3030487 - RNA, 13 nt, Human
auacuacaguuug

SEQ ID NO: 3030488 - RNA, 15 nt, Human
auacuacaguuuguu

SEQ ID NO: 3030489 - RNA, 16 nt, Human
auacuacaguuuguua

SEQ ID NO: 3030490 - RNA, 20 nt, Human
auacuacaguuuguuaguau

SEQ ID NO: 3030491 - RNA, 21 nt, Human
auacuaaccagcagaaaugcc

SEQ ID NO: 3030492 - RNA, 17 nt, Human
auaccagccaguaaaug

SEQ ID NO: 3030493 - RNA, 19 nt, Human
auaccagccaguaaauggg

SEQ ID NO: 3030494 - RNA, 15 nt, Human
uuaucagaacuaugu

SEQ ID NO: 3030495 - RNA, 14 nt, Human
auacaggaaaagcu

SEQ ID NO: 3030496 - RNA, 19 nt, Human
auacaggaaaagcugcuga

SEQ ID NO: 3030497 - RNA, 20 nt, Human
auacaggaaaagcugcugac

SEQ ID NO: 3030498 - RNA, 16 nt, Human
auacauuugauaaagu

SEQ ID NO: 3030499 - RNA, 13 nt, Human
uuauauagcaaga

SEQ ID NO: 3030500 - RNA, 19 nt, Human
uuauauagcaagacauuau

SEQ ID NO: 3030501 - RNA, 12 nt, Human
auacaaaagcau

SEQ ID NO: 3030502 - RNA, 13 nt, Human
auacaaaagcaug

SEQ ID NO: 3030503 - RNA, 15 nt, Human
auacaaaagcaugug

SEQ ID NO: 3030504 - RNA, 16 nt, Human
uuauaacuuuuuauau

SEQ ID NO: 3030505 - RNA, 14 nt, Human
uuauaacuuuuuau

SEQ ID NO: 3030506 - RNA, 13 nt, Human
uuauacauaaaca

SEQ ID NO: 3030507 - RNA, 21 nt, Human
uuagccguggugauuuagcag

SEQ ID NO: 3030508 - RNA, 15 nt, Human
auaaacucauuucua

SEQ ID NO: 3030509 - RNA, 13 nt, Human
auaaacuuuaccu

SEQ ID NO: 3030510 - RNA, 15 nt, Human
auaaacuuuaccuuu

SEQ ID NO: 3030511 - RNA, 23 nt, Human
auaacuggaacacucuauaacaa

SEQ ID NO: 3030512 - RNA, 21 nt, Human
auaacuggaacacucuauaac

SEQ ID NO: 3030513 - RNA, 16 nt, Human
uuacaggaaguacugg

SEQ ID NO: 3030514 - RNA, 15 nt, Human
uuacaggaaguacug

SEQ ID NO: 3030515 - RNA, 22 nt, Human
uuacaggaaguacuggagaaaa

SEQ ID NO: 3030516 - RNA, 18 nt, Human
uuacaggaaguacuggag

SEQ ID NO: 3030517 - RNA, 23 nt, Human
uuaccauuuugggguacccacug

SEQ ID NO: 3030518 - RNA, 18 nt, Human
auaacuggaacacucuau

SEQ ID NO: 3030519 - RNA, 16 nt, Human
auaacuggaacacucu

SEQ ID NO: 3030520 - RNA, 18 nt, Human
uuagcaggaagcugugag

SEQ ID NO: 3030521 - RNA, 19 nt, Human
auaauacaguaucucaggg

SEQ ID NO: 3030522 - RNA, 14 nt, Human
auaauucuacuuug

SEQ ID NO: 3030523 - RNA, 23 nt, Human
auaagaaccuuuugagugccuua

SEQ ID NO: 3030524 - RNA, 17 nt, Human
auaaguuaacuuccaau

SEQ ID NO: 3030525 - RNA, 22 nt, Human
auaagaaccuuuugagugccuu

SEQ ID NO: 3030526 - RNA, 22 nt, Human
auaaguuaacuuccaauuuaca

SEQ ID NO: 3030527 - RNA, 23 nt, Human
auaauacaccacuacauucuguu

SEQ ID NO: 3030528 - RNA, 21 nt, Human
auaauacaccacuacauucug

SEQ ID NO: 3030529 - RNA, 16 nt, Human
aguccccucuccucca

SEQ ID NO: 3030530 - RNA, 21 nt, Human
aguccccucuccuccacauuu

SEQ ID NO: 3030531 - RNA, 19 nt, Human
aguccccuguuuguuucug

SEQ ID NO: 3030532 - RNA, 14 nt, Human
aguccccuguuugu

SEQ ID NO: 3030533 - RNA, 21 nt, Human
agucccaccuuggcugcaggg

SEQ ID NO: 3030534 - RNA, 23 nt, Human
agucccaccuuggcugcagggag

SEQ ID NO: 3030535 - RNA, 20 nt, Human
agucccaccuuggcugcagg

SEQ ID NO: 3030536 - RNA, 19 nt, Human
agucagggguucccuuuuu

SEQ ID NO: 3030537 - RNA, 12 nt, Human
ugucccuuuucc

SEQ ID NO: 3030538 - RNA, 16 nt, Human
ugucagccauuccugu

SEQ ID NO: 3030539 - RNA, 20 nt, Human
ugucaaccccaaguuaguuc

SEQ ID NO: 3030540 - RNA, 19 nt, Human
ugucaaaguggugagaggc

SEQ ID NO: 3030541 - RNA, 16 nt, Human
ugucaaaguggugaga

SEQ ID NO: 3030542 - RNA, 13 nt, Human
aguagcugggacu

SEQ ID NO: 3030543 - RNA, 14 nt, Human
aguagcugggacua

SEQ ID NO: 3030544 - RNA, 15 nt, Human
ugucaaaguggugag

SEQ ID NO: 3030545 - RNA, 14 nt, Human
ugucaaagugguga

SEQ ID NO: 3030546 - RNA, 12 nt, Human
uguagagccagg

SEQ ID NO: 3030547 - RNA, 15 nt, Human
uguagagccaggguc

SEQ ID NO: 3030548 - RNA, 15 nt, Human
uguaucccaugagcc

SEQ ID NO: 3030549 - RNA, 14 nt, Human
uguauguguaagua

SEQ ID NO: 3030550 - RNA, 16 nt, Human
agucacugagacagcc

SEQ ID NO: 3030551 - RNA, 15 nt, Human
agucacugagacagc

SEQ ID NO: 3030552 - RNA, 17 nt, Human
agucacugagacagccc

SEQ ID NO: 3030553 - RNA, 15 nt, Human
ugucagcauagaagu

SEQ ID NO: 3030554 - RNA, 15 nt, Human
aguauuauaccuuuu

SEQ ID NO: 3030555 - RNA, 14 nt, Human
aguauuauaccuuu

SEQ ID NO: 3030556 - RNA, 22 nt, Human
aguagcugggacuacaggcacc

SEQ ID NO: 3030557 - RNA, 19 nt, Human
aguagcugggacuacaggc

SEQ ID NO: 3030558 - RNA, 21 nt, Human
aguagcugggacuacaggcac

SEQ ID NO: 3030559 - RNA, 22 nt, Human
aguccccucuccuccacauuug

SEQ ID NO: 3030560 - RNA, 15 nt, Human
ugucuccucucucug

SEQ ID NO: 3030561 - RNA, 16 nt, Human
agucccugccaaugga

SEQ ID NO: 3030562 - RNA, 14 nt, Human
agucccugccaaug

SEQ ID NO: 3030563 - RNA, 13 nt, Human
agucccugccaau

SEQ ID NO: 3030564 - RNA, 23 nt, Human
aguccccuguuuguuucugaaag

SEQ ID NO: 3030565 - RNA, 13 nt, Human
ugucucugagagu

SEQ ID NO: 3030566 - RNA, 21 nt, Human
ugucucuugguccugcugcag

SEQ ID NO: 3030567 - RNA, 20 nt, Human
ugucucuugguccugcugca

SEQ ID NO: 3030568 - RNA, 19 nt, Human
ugucucuugguccugcugc

SEQ ID NO: 3030569 - RNA, 18 nt, Human
ugucucuugguccugcug

SEQ ID NO: 3030570 - RNA, 22 nt, Human
ugucucuuuaaugucacaggca

SEQ ID NO: 3030571 - RNA, 21 nt, Human
ugucucuuuaaugucacaggc

SEQ ID NO: 3030572 - RNA, 22 nt, Human
ugucucuugguccugcugcagu

SEQ ID NO: 3030573 - RNA, 15 nt, Human
ugucuugcaauggca

SEQ ID NO: 3030574 - RNA, 17 nt, Human
ugucuugcaauggcagc

SEQ ID NO: 3030575 - RNA, 18 nt, Human
ugucuugcaauggcagcc

SEQ ID NO: 3030576 - RNA, 20 nt, Human
ugucuugcaauggcagccuu

SEQ ID NO: 3030577 - RNA, 21 nt, Human
ugucuugcaauggcagccuug

SEQ ID NO: 3030578 - RNA, 16 nt, Human
ugugaaccaccacacc

SEQ ID NO: 3030579 - RNA, 22 nt, Human
ugugaaccaccacacccagccc

SEQ ID NO: 3030580 - RNA, 23 nt, Human
ugugaaccaccacacccagccca

SEQ ID NO: 3030581 - RNA, 15 nt, Human
ugugaaccaccacac

SEQ ID NO: 3030582 - RNA, 20 nt, Human
ugugauuuuugguauuugaa

SEQ ID NO: 3030583 - RNA, 21 nt, Human
ugugauuuuugguauuugaaa

SEQ ID NO: 3030584 - RNA, 19 nt, Human
ugugauuuuugguauuuga

SEQ ID NO: 3030585 - RNA, 17 nt, Human
ugugauggggcccugcc

SEQ ID NO: 3030586 - RNA, 16 nt, Human
ugugauggggcccugc

SEQ ID NO: 3030587 - RNA, 15 nt, Human
ugugauggggcccug

SEQ ID NO: 3030588 - RNA, 14 nt, Human
agugagagcugggu

SEQ ID NO: 3030589 - RNA, 13 nt, Human
agugagacucugu

SEQ ID NO: 3030590 - RNA, 21 nt, Human
agugagacccugucucaaaaa

SEQ ID NO: 3030591 - RNA, 17 nt, Human
agugagacccugucuca

SEQ ID NO: 3030592 - RNA, 22 nt, Human
agugagacucugucucaaaaaa

SEQ ID NO: 3030593 - RNA, 16 nt, Human
agugagacucugucuc

SEQ ID NO: 3030594 - RNA, 17 nt, Human
agugagacucugucuca

SEQ ID NO: 3030595 - RNA, 14 nt, Human
agucuucuauuuau

SEQ ID NO: 3030596 - RNA, 23 nt, Human
agugaaaaaggaggaagagaaaa

SEQ ID NO: 3030597 - RNA, 20 nt, Human
agugaaaaaggaggaagaga

SEQ ID NO: 3030598 - RNA, 17 nt, Human
agugaaaaaggaggaag

SEQ ID NO: 3030599 - RNA, 11 nt, Human
agugaaaaagg

SEQ ID NO: 3030600 - RNA, 14 nt, Human
ugugaagagaacca

SEQ ID NO: 3030601 - RNA, 19 nt, Human
ugugagcacaaagguagcu

SEQ ID NO: 3030602 - RNA, 14 nt, Human
aggguuuaaagaug

SEQ ID NO: 3030603 - RNA, 17 nt, Human
aggguugggcugguguc

SEQ ID NO: 3030604 - RNA, 18 nt, Human
aggucuugaacuccuggc

SEQ ID NO: 3030605 - RNA, 22 nt, Human
aggucuugaacuccuggccuca

SEQ ID NO: 3030606 - RNA, 20 nt, Human
aggucuugaacuccuggccu

SEQ ID NO: 3030607 - RNA, 21 nt, Human
aggucuugaacuccuggccuc

SEQ ID NO: 3030608 - RNA, 22 nt, Human
aggucauuuuuuuuaagaaaaa

SEQ ID NO: 3030609 - RNA, 23 nt, Human
aggucauuuuuuuuaagaaaaag

SEQ ID NO: 3030610 - RNA, 21 nt, Human
aggucaaggcugcagugagcc

SEQ ID NO: 3030611 - RNA, 13 nt, Human
aggguuggccccu

SEQ ID NO: 3030612 - RNA, 14 nt, Human
aggguuggccccug

SEQ ID NO: 3030613 - RNA, 13 nt, Human
aggguugggcugg

SEQ ID NO: 3030614 - RNA, 15 nt, Human
aggguugggcuggug

SEQ ID NO: 3030615 - RNA, 19 nt, Human
uggugaacagaacaaaagg

SEQ ID NO: 3030616 - RNA, 17 nt, Human
aggguggugaccucugc

SEQ ID NO: 3030617 - RNA, 18 nt, Human
aggguggugaccucugcc

SEQ ID NO: 3030618 - RNA, 19 nt, Human
aggguggugaccucugccu

SEQ ID NO: 3030619 - RNA, 18 nt, Human
uggucugacccacugcuu

SEQ ID NO: 3030620 - RNA, 12 nt, Human
uggucuguguga

SEQ ID NO: 3030621 - RNA, 16 nt, Human
uggucuuauuuguaaa

SEQ ID NO: 3030622 - RNA, 19 nt, Human
ugguccauagagagcaaga

SEQ ID NO: 3030623 - RNA, 21 nt, Human
aggggcuuaauuauugauguu

SEQ ID NO: 3030624 - RNA, 13 nt, Human
agggggcugggac

SEQ ID NO: 3030625 - RNA, 16 nt, Human
aggguaucaggugcug

SEQ ID NO: 3030626 - RNA, 19 nt, Human
aggguacuaaggaaucuuu

SEQ ID NO: 3030627 - RNA, 14 nt, Human
uggguggaugccug

SEQ ID NO: 3030628 - RNA, 23 nt, Human
uggguggaugccugguggcagcu

SEQ ID NO: 3030629 - RNA, 20 nt, Human
uggucaccaaaucagcugcu

SEQ ID NO: 3030630 - RNA, 23 nt, Human
uggucaccaaaucagcugcuacu

SEQ ID NO: 3030631 - RNA, 21 nt, Human
uggucaccaaaucagcugcua

SEQ ID NO: 3030632 - RNA, 16 nt, Human
ugguccauagagagca

SEQ ID NO: 3030633 - RNA, 15 nt, Human
ugguccauagagagc

SEQ ID NO: 3030634 - RNA, 18 nt, Human
ugguuauuuuacuuuuug

SEQ ID NO: 3030635 - RNA, 15 nt, Human
ugguuauuuuacuuu

SEQ ID NO: 3030636 - RNA, 16 nt, Human
ugguuauuuuacuuuu

SEQ ID NO: 3030637 - RNA, 17 nt, Human
ugguguuuccuggcacu

SEQ ID NO: 3030638 - RNA, 15 nt, Human
ugguguuuccuggca

SEQ ID NO: 3030639 - RNA, 20 nt, Human
ugguucaggguuggccccug

SEQ ID NO: 3030640 - RNA, 22 nt, Human
ugguucaggguuggccccugcc

SEQ ID NO: 3030641 - RNA, 23 nt, Human
ugguucaggguuggccccugccc

SEQ ID NO: 3030642 - RNA, 12 nt, Human
ugguggcagcug

SEQ ID NO: 3030643 - RNA, 23 nt, Human
ugguggcagcucaccucucccuu

SEQ ID NO: 3030644 - RNA, 20 nt, Human
ugguggcagcucaccucucc

SEQ ID NO: 3030645 - RNA, 19 nt, Human
ugguggcagcucaccucuc

SEQ ID NO: 3030646 - RNA, 16 nt, Human
ugguggcagcucaccu

SEQ ID NO: 3030647 - RNA, 12 nt, Human
ugguggcagcuc

SEQ ID NO: 3030648 - RNA, 15 nt, Human
ugguggcagagugga

SEQ ID NO: 3030649 - RNA, 15 nt, Human
ugguuucuagcauga

SEQ ID NO: 3030650 - RNA, 14 nt, Human
ugguuucagaaaug

SEQ ID NO: 3030651 - RNA, 15 nt, Human
ugguuucagaaaugu

SEQ ID NO: 3030652 - RNA, 15 nt, Human
ugguuuguucccugu

SEQ ID NO: 3030653 - RNA, 21 nt, Human
ugguuuguaaauuaacuuuua

SEQ ID NO: 3030654 - RNA, 12 nt, Human
ugguuuucuguu

SEQ ID NO: 3030655 - RNA, 13 nt, Human
ugguuuucuguuc

SEQ ID NO: 3030656 - RNA, 15 nt, Human
ugguuuucuguucuu

SEQ ID NO: 3030657 - RNA, 21 nt, Human
aggugauccacccaccucagc

SEQ ID NO: 3030658 - RNA, 23 nt, Human
aggugauccacccaccucagccu

SEQ ID NO: 3030659 - RNA, 12 nt, Human
agguugugaaug

SEQ ID NO: 3030660 - RNA, 13 nt, Human
uguaaggaaugau

SEQ ID NO: 3030661 - RNA, 15 nt, Human
uguaaggaaugauua

SEQ ID NO: 3030662 - RNA, 14 nt, Human
uguaaggaaugauu

SEQ ID NO: 3030663 - RNA, 22 nt, Human
uguaagcucuacugaggugcua

SEQ ID NO: 3030664 - RNA, 14 nt, Human
agguggggcagcuu

SEQ ID NO: 3030665 - RNA, 23 nt, Human
agguggggucacucuggcagcuc

SEQ ID NO: 3030666 - RNA, 13 nt, Human
agguggggcagcu

SEQ ID NO: 3030667 - RNA, 23 nt, Human
aggugugaaccaccacacccagc

SEQ ID NO: 3030668 - RNA, 18 nt, Human
aggugugacugaauuucu

SEQ ID NO: 3030669 - RNA, 22 nt, Human
aggugugaaccaccacacccag

SEQ ID NO: 3030670 - RNA, 20 nt, Human
aggugugacugaauuucuuu

SEQ ID NO: 3030671 - RNA, 14 nt, Human
aggugugagucacc

SEQ ID NO: 3030672 - RNA, 20 nt, Human
aggugugagucaccaagccc

SEQ ID NO: 3030673 - RNA, 17 nt, Human
uguagacaguuggguuu

SEQ ID NO: 3030674 - RNA, 19 nt, Human
uguacaugaaaacacauuu

SEQ ID NO: 3030675 - RNA, 17 nt, Human
uguacaugaaaacacau

SEQ ID NO: 3030676 - RNA, 18 nt, Human
uguacaugaaaacacauu

SEQ ID NO: 3030677 - RNA, 17 nt, Human
uguaauuugugauacaa

SEQ ID NO: 3030678 - RNA, 21 nt, Human
uguaauuugugauacaaugcu

SEQ ID NO: 3030679 - RNA, 16 nt, Human
uguaauuugugauaca

SEQ ID NO: 3030680 - RNA, 18 nt, Human
uguaaggaaugauuaauu

SEQ ID NO: 3030681 - RNA, 19 nt, Human
uguacaaaguagaagucuu

SEQ ID NO: 3030682 - RNA, 23 nt, Human
uguacaaaguagaagucuuagau

SEQ ID NO: 3030683 - RNA, 18 nt, Human
ugaaguaaaauguggcag

SEQ ID NO: 3030684 - RNA, 19 nt, Human
ugaaguaaaauguggcagg

SEQ ID NO: 3030685 - RNA, 15 nt, Human
ugaaguaauaugcac

SEQ ID NO: 3030686 - RNA, 16 nt, Human
ugaaguaauaugcaca

SEQ ID NO: 3030687 - RNA, 20 nt, Human
ugaaguaauaugcacacauu

SEQ ID NO: 3030688 - RNA, 21 nt, Human
ugaaguaauaugcacacauuu

SEQ ID NO: 3030689 - RNA, 22 nt, Human
ugaaguaauaugcacacauuuu

SEQ ID NO: 3030690 - RNA, 13 nt, Human
ugaagucacacag

SEQ ID NO: 3030691 - RNA, 12 nt, Human
ugaauaauacag

SEQ ID NO: 3030692 - RNA, 13 nt, Human
ugaauaauacagu

SEQ ID NO: 3030693 - RNA, 20 nt, Human
agagguucaaagauauuuug

SEQ ID NO: 3030694 - RNA, 16 nt, Human
agagguucaaagauau

SEQ ID NO: 3030695 - RNA, 19 nt, Human
agagguucaaagauauuuu

SEQ ID NO: 3030696 - RNA, 15 nt, Human
agagggagguaagga

SEQ ID NO: 3030697 - RNA, 15 nt, Human
agagggagugacaga

SEQ ID NO: 3030698 - RNA, 20 nt, Human
agagggagugacagaggcag

SEQ ID NO: 3030699 - RNA, 13 nt, Human
agagguucaaaga

SEQ ID NO: 3030700 - RNA, 22 nt, Human
agaggcugccucucccaucacu

SEQ ID NO: 3030701 - RNA, 21 nt, Human
agaggcagccccauucugccu

SEQ ID NO: 3030702 - RNA, 22 nt, Human
agaggcagccccauucugccug

SEQ ID NO: 3030703 - RNA, 21 nt, Human
agaggcagggucucacucugu

SEQ ID NO: 3030704 - RNA, 23 nt, Human
agaggcagccccauucugccugc

SEQ ID NO: 3030705 - RNA, 13 nt, Human
ugaagacagagcu

SEQ ID NO: 3030706 - RNA, 22 nt, Human
ugaagacaaugacuuacuguac

SEQ ID NO: 3030707 - RNA, 23 nt, Human
ugaagacaaugacuuacuguaca

SEQ ID NO: 3030708 - RNA, 21 nt, Human
ugaagacaaugacuuacugua

SEQ ID NO: 3030709 - RNA, 22 nt, Human
ugaaccaccacacccagcccac

SEQ ID NO: 3030710 - RNA, 21 nt, Human
ugaaccaccacacccagccca

SEQ ID NO: 3030711 - RNA, 19 nt, Human
ugaaauuuuuauuaaauua

SEQ ID NO: 3030712 - RNA, 20 nt, Human
ugaaauuuuuauuaaauuau

SEQ ID NO: 3030713 - RNA, 17 nt, Human
ugaaauaacauggccuu

SEQ ID NO: 3030714 - RNA, 16 nt, Human
ugaaauaacauggccu

SEQ ID NO: 3030715 - RNA, 23 nt, Human
agacuuugguuauuuuacuuuuu

SEQ ID NO: 3030716 - RNA, 17 nt, Human
agacuuugguuauuuua

SEQ ID NO: 3030717 - RNA, 15 nt, Human
agagacacaagccuu

SEQ ID NO: 3030718 - RNA, 19 nt, Human
agagacacaagccuucggc

SEQ ID NO: 3030719 - RNA, 16 nt, Human
agagacacaagccuuc

SEQ ID NO: 3030720 - RNA, 19 nt, Human
agacuuuggaaagaguagg

SEQ ID NO: 3030721 - RNA, 15 nt, Human
agacuuuuccaaccc

SEQ ID NO: 3030722 - RNA, 15 nt, Human
agacuuuggaaagac

SEQ ID NO: 3030723 - RNA, 15 nt, Human
agacuuuggaaagag

SEQ ID NO: 3030724 - RNA, 17 nt, Human
agacuuuggaaagacuu

SEQ ID NO: 3030725 - RNA, 20 nt, Human
agacugguuccauggccucu

SEQ ID NO: 3030726 - RNA, 14 nt, Human
ucuuuguggcuucc

SEQ ID NO: 3030727 - RNA, 20 nt, Human
ucuuuguacagacaacaaac

SEQ ID NO: 3030728 - RNA, 15 nt, Human
ucuuuguacagacaa

SEQ ID NO: 3030729 - RNA, 14 nt, Human
ucuuuguacagaca

SEQ ID NO: 3030730 - RNA, 13 nt, Human
agacuccugcagg

SEQ ID NO: 3030731 - RNA, 18 nt, Human
ucuuuaaugucacaggca

SEQ ID NO: 3030732 - RNA, 15 nt, Human
ucuuuaaugucacag

SEQ ID NO: 3030733 - RNA, 20 nt, Human
agacaggcaagcaccuccug

SEQ ID NO: 3030734 - RNA, 14 nt, Human
ugaaaacacauuuu

SEQ ID NO: 3030735 - RNA, 12 nt, Human
ugaaaacacauu

SEQ ID NO: 3030736 - RNA, 13 nt, Human
ugaaaacacauuu

SEQ ID NO: 3030737 - RNA, 15 nt, Human
ugaaaacacauuuuu

SEQ ID NO: 3030738 - RNA, 17 nt, Human
ugaaaacacauuuuucu

SEQ ID NO: 3030739 - RNA, 19 nt, Human
ugaaaacacauuuuucuua

SEQ ID NO: 3030740 - RNA, 17 nt, Human
ugaaacuggauuaaacu

SEQ ID NO: 3030741 - RNA, 18 nt, Human
ugaaacuggauuaaacuu

SEQ ID NO: 3030742 - RNA, 11 nt, Human
agagacuccug

SEQ ID NO: 3030743 - RNA, 12 nt, Human
agagacuccugc

SEQ ID NO: 3030744 - RNA, 14 nt, Human
agagacuccugcag

SEQ ID NO: 3030745 - RNA, 13 nt, Human
agagacuccugca

SEQ ID NO: 3030746 - RNA, 23 nt, Human
agagaccaucccugaaggccccg

SEQ ID NO: 3030747 - RNA, 22 nt, Human
agagaccaucccugaaggcccc

SEQ ID NO: 3030748 - RNA, 18 nt, Human
agagaccaucccugaagg

SEQ ID NO: 3030749 - RNA, 21 nt, Human
agagaccaucccugaaggccc

SEQ ID NO: 3030750 - RNA, 19 nt, Human
agagaccaucccugaaggc

SEQ ID NO: 3030751 - RNA, 22 nt, Human
ugaaagacuguacaaaguagaa

SEQ ID NO: 3030752 - RNA, 18 nt, Human
ugaaagacuguacaaagu

SEQ ID NO: 3030753 - RNA, 19 nt, Human
ugaaagacuguacaaagua

SEQ ID NO: 3030754 - RNA, 16 nt, Human
ugaaagacuguacaaa

SEQ ID NO: 3030755 - RNA, 22 nt, Human
ugaaagaaaauaccaaggaaca

SEQ ID NO: 3030756 - RNA, 21 nt, Human
ugagagcaguuugguuucuag

SEQ ID NO: 3030757 - RNA, 23 nt, Human
ugagagcaguuugguuucuagca

SEQ ID NO: 3030758 - RNA, 14 nt, Human
ugagagcugggugu

SEQ ID NO: 3030759 - RNA, 10 nt, Human
ugagaggaaa

SEQ ID NO: 3030760 - RNA, 14 nt, Human
ugagaggaaaucac

SEQ ID NO: 3030761 - RNA, 13 nt, Human
ugagaggaaauca

SEQ ID NO: 3030762 - RNA, 12 nt, Human
ugagaggaaauc

SEQ ID NO: 3030763 - RNA, 11 nt, Human
ugagaggaaau

SEQ ID NO: 3030764 - RNA, 23 nt, Human
ugagaggacuuuucuuuguggcu

SEQ ID NO: 3030765 - RNA, 17 nt, Human
ugagaggaaaucaccga

SEQ ID NO: 3030766 - RNA, 20 nt, Human
ugagaagcagaggaaggaga

SEQ ID NO: 3030767 - RNA, 11 nt, Human
ugagacagagu

SEQ ID NO: 3030768 - RNA, 21 nt, Human
ugagacagaguuuucacucuu

SEQ ID NO: 3030769 - RNA, 13 nt, Human
ugagacagcccgg

SEQ ID NO: 3030770 - RNA, 20 nt, Human
ugagacucugucucaaaaaa

SEQ ID NO: 3030771 - RNA, 22 nt, Human
ugagacagcccgggcucugccu

SEQ ID NO: 3030772 - RNA, 20 nt, Human
ugagacagcccgggcucugc

SEQ ID NO: 3030773 - RNA, 19 nt, Human
ugagacagcccgggcucug

SEQ ID NO: 3030774 - RNA, 18 nt, Human
ugagacagcccgggcucu

SEQ ID NO: 3030775 - RNA, 17 nt, Human
ugagacagcccgggcuc

SEQ ID NO: 3030776 - RNA, 17 nt, Human
agcaagugagagcuggg

SEQ ID NO: 3030777 - RNA, 21 nt, Human
agcacagcuucauuuccugug

SEQ ID NO: 3030778 - RNA, 16 nt, Human
agcacaugccucucuc

SEQ ID NO: 3030779 - RNA, 18 nt, Human
agcacaugccucucucag

SEQ ID NO: 3030780 - RNA, 22 nt, Human
agcacaugccucucucaggcca

SEQ ID NO: 3030781 - RNA, 21 nt, Human
agcacaugccucucucaggcc

SEQ ID NO: 3030782 - RNA, 20 nt, Human
agcacaugccucucucaggc

SEQ ID NO: 3030783 - RNA, 19 nt, Human
agcacaugccucucucagg

SEQ ID NO: 3030784 - RNA, 23 nt, Human
agcacaugccucucucaggccaa

SEQ ID NO: 3030785 - RNA, 16 nt, Human
agcaccaucucuccuc

SEQ ID NO: 3030786 - RNA, 13 nt, Human
agcaccuccugcc

SEQ ID NO: 3030787 - RNA, 14 nt, Human
agcaccuccugccu

SEQ ID NO: 3030788 - RNA, 16 nt, Human
agcaccuccugccucg

SEQ ID NO: 3030789 - RNA, 12 nt, Human
ugagccacugca

SEQ ID NO: 3030790 - RNA, 13 nt, Human
ugagccacugcac

SEQ ID NO: 3030791 - RNA, 21 nt, Human
ugagccagauuucacucuccu

SEQ ID NO: 3030792 - RNA, 20 nt, Human
ugagccagauuucacucucc

SEQ ID NO: 3030793 - RNA, 14 nt, Human
ugagccacugcacc

SEQ ID NO: 3030794 - RNA, 19 nt, Human
ugagccagauuucacucuc

SEQ ID NO: 3030795 - RNA, 18 nt, Human
ugagccagauuucacucu

SEQ ID NO: 3030796 - RNA, 16 nt, Human
agcaagugagacccug

SEQ ID NO: 3030797 - RNA, 15 nt, Human
agcaagugagagcug

SEQ ID NO: 3030798 - RNA, 16 nt, Human
agcaagugagagcugg

SEQ ID NO: 3030799 - RNA, 14 nt, Human
agcaaggagauuua

SEQ ID NO: 3030800 - RNA, 17 nt, Human
agcaaggagauuuacaa

SEQ ID NO: 3030801 - RNA, 19 nt, Human
agcaaggagauuuacaacu

SEQ ID NO: 3030802 - RNA, 16 nt, Human
agaugcacaugagcug

SEQ ID NO: 3030803 - RNA, 13 nt, Human
agaugcacaugag

SEQ ID NO: 3030804 - RNA, 14 nt, Human
ugacagauugaauu

SEQ ID NO: 3030805 - RNA, 22 nt, Human
ugacagagugagacucugucuc

SEQ ID NO: 3030806 - RNA, 19 nt, Human
ugacacgaauauugcugau

SEQ ID NO: 3030807 - RNA, 20 nt, Human
ugaaugcccagugagacugu

SEQ ID NO: 3030808 - RNA, 16 nt, Human
ugacacgaauauugcu

SEQ ID NO: 3030809 - RNA, 13 nt, Human
ugacauucccugc

SEQ ID NO: 3030810 - RNA, 13 nt, Human
ugacauguuuuau

SEQ ID NO: 3030811 - RNA, 21 nt, Human
ugacagggcacaccgggcacu

SEQ ID NO: 3030812 - RNA, 22 nt, Human
ugacagggcacaccgggcacuc

SEQ ID NO: 3030813 - RNA, 17 nt, Human
ugacaggcaaugcuggc

SEQ ID NO: 3030814 - RNA, 19 nt, Human
ugacaggcaaugcuggcug

SEQ ID NO: 3030815 - RNA, 22 nt, Human
ugacuauucugagaugacuauu

SEQ ID NO: 3030816 - RNA, 21 nt, Human
ugacuauucugagaugacuau

SEQ ID NO: 3030817 - RNA, 19 nt, Human
ugacuauucugagaugacu

SEQ ID NO: 3030818 - RNA, 16 nt, Human
ugacuauaaccuuguu

SEQ ID NO: 3030819 - RNA, 12 nt, Human
ugaccuuucaau

SEQ ID NO: 3030820 - RNA, 11 nt, Human
ugacuguuuuu

SEQ ID NO: 3030821 - RNA, 21 nt, Human
ugacuguuuucucuugagagg

SEQ ID NO: 3030822 - RNA, 22 nt, Human
ugacuauuuuuguuuuuauuaa

SEQ ID NO: 3030823 - RNA, 18 nt, Human
ugacuauuuuuguuuuua

SEQ ID NO: 3030824 - RNA, 15 nt, Human
ugaccuuuaagagaa

SEQ ID NO: 3030825 - RNA, 17 nt, Human
agauuucacucuccuug

SEQ ID NO: 3030826 - RNA, 19 nt, Human
agauuucacucuccuuggu

SEQ ID NO: 3030827 - RNA, 13 nt, Human
agauucauauuua

SEQ ID NO: 3030828 - RNA, 16 nt, Human
agauucauauuuacuu

SEQ ID NO: 3030829 - RNA, 12 nt, Human
ugacuuacugua

SEQ ID NO: 3030830 - RNA, 20 nt, Human
ugacuuacuguacaugaaaa

SEQ ID NO: 3030831 - RNA, 14 nt, Human
ucugagugcaaacu

SEQ ID NO: 3030832 - RNA, 21 nt, Human
ucugagacucgcgacaaugca

SEQ ID NO: 3030833 - RNA, 23 nt, Human
ucugagugcaaacuucagaguuc

SEQ ID NO: 3030834 - RNA, 22 nt, Human
ucugagugcaaacuucagaguu

SEQ ID NO: 3030835 - RNA, 17 nt, Human
ucugaucauccacugug

SEQ ID NO: 3030836 - RNA, 21 nt, Human
ucugaucauccacugugccau

SEQ ID NO: 3030837 - RNA, 14 nt, Human
agaaauguacagca

SEQ ID NO: 3030838 - RNA, 15 nt, Human
agaaauguacagcaa

SEQ ID NO: 3030839 - RNA, 16 nt, Human
ucugcacuccccugcu

SEQ ID NO: 3030840 - RNA, 15 nt, Human
ucugcacuccccugc

SEQ ID NO: 3030841 - RNA, 14 nt, Human
ucugcacuccccug

SEQ ID NO: 3030842 - RNA, 17 nt, Human
ucugcagcaauaaagca

SEQ ID NO: 3030843 - RNA, 15 nt, Human
ucugacacacagcuc

SEQ ID NO: 3030844 - RNA, 12 nt, Human
ucugacacacag

SEQ ID NO: 3030845 - RNA, 13 nt, Human
ucugacacacagc

SEQ ID NO: 3030846 - RNA, 14 nt, Human
ucugacacacagcu

SEQ ID NO: 3030847 - RNA, 21 nt, Human
ucugaaggacauugcggacag

SEQ ID NO: 3030848 - RNA, 15 nt, Human
ucugccgcagcccug

SEQ ID NO: 3030849 - RNA, 14 nt, Human
ucugccgcagcccu

SEQ ID NO: 3030850 - RNA, 19 nt, Human
ucugcccuccaagaccuuc

SEQ ID NO: 3030851 - RNA, 18 nt, Human
ucugcccuccaagaccuu

SEQ ID NO: 3030852 - RNA, 21 nt, Human
ucugcccacucccugcaaccu

SEQ ID NO: 3030853 - RNA, 18 nt, Human
ucugcccacucccugcaa

SEQ ID NO: 3030854 - RNA, 21 nt, Human
ucugccugcccaggccccugc

SEQ ID NO: 3030855 - RNA, 22 nt, Human
ucugccugcccaggccccugcc

SEQ ID NO: 3030856 - RNA, 22 nt, Human
ucugccgcagcccugcagaggg

SEQ ID NO: 3030857 - RNA, 17 nt, Human
ucugcucacauaucugu

SEQ ID NO: 3030858 - RNA, 19 nt, Human
ucugcucacauaucuguca

SEQ ID NO: 3030859 - RNA, 20 nt, Human
ucugcucacauaucugucau

SEQ ID NO: 3030860 - RNA, 13 nt, Human
ucugcuucagccu

SEQ ID NO: 3030861 - RNA, 14 nt, Human
ucugcuucagccuc

SEQ ID NO: 3030862 - RNA, 15 nt, Human
ucugcuucagccucc

SEQ ID NO: 3030863 - RNA, 18 nt, Human
agaagauuuugaaauuuu

SEQ ID NO: 3030864 - RNA, 17 nt, Human
ucugcccacucccugca

SEQ ID NO: 3030865 - RNA, 16 nt, Human
ucugcccacucccugc

SEQ ID NO: 3030866 - RNA, 22 nt, Human
agaagcccaggaaaggcuccag

SEQ ID NO: 3030867 - RNA, 21 nt, Human
agaagcccaggaaaggcucca

SEQ ID NO: 3030868 - RNA, 20 nt, Human
agaagcccaggaaaggcucc

SEQ ID NO: 3030869 - RNA, 18 nt, Human
agaagcccaggaaaggcu

SEQ ID NO: 3030870 - RNA, 16 nt, Human
agaagcccaggaaagg

SEQ ID NO: 3030871 - RNA, 12 nt, Human
agaagcccagga

SEQ ID NO: 3030872 - RNA, 24 nt, Human
agaauugauugggcacaucauuuc

SEQ ID NO: 3030873 - RNA, 23 nt, Human
agaauugauugggcacaucauuu

SEQ ID NO: 3030874 - RNA, 22 nt, Human
agaauugauugggcacaucauu

SEQ ID NO: 3030875 - RNA, 16 nt, Human
agaauugauugggcac

SEQ ID NO: 3030876 - RNA, 12 nt, Human
agacacaggccc

SEQ ID NO: 3030877 - RNA, 13 nt, Human
agacacaggcccg

SEQ ID NO: 3030878 - RNA, 22 nt, Human
agacagagccccacccucagau

SEQ ID NO: 3030879 - RNA, 24 nt, Human
agacagagccccacccucagaugc

SEQ ID NO: 3030880 - RNA, 16 nt, Human
agacaggaccagggau

SEQ ID NO: 3030881 - RNA, 17 nt, Human
agacaccuugacagggc

SEQ ID NO: 3030882 - RNA, 18 nt, Human
agacaccuugacagggca

SEQ ID NO: 3030883 - RNA, 20 nt, Human
agacacauguccaagaagcc

SEQ ID NO: 3030884 - RNA, 16 nt, Human
agacacauguccaaga

SEQ ID NO: 3030885 - RNA, 22 nt, Human
ucugugaaaggaaagagggagg

SEQ ID NO: 3030886 - RNA, 12 nt, Human
ucuguuggccag

SEQ ID NO: 3030887 - RNA, 17 nt, Human
ucuguuggccaguguga

SEQ ID NO: 3030888 - RNA, 22 nt, Human
ucuguucuuuccaaaguacacu

SEQ ID NO: 3030889 - RNA, 13 nt, Human
ucuguucuuucca

SEQ ID NO: 3030890 - RNA, 15 nt, Human
agaauguuuucaaau

SEQ ID NO: 3030891 - RNA, 21 nt, Human
agaauguuuucaaauguucuc

SEQ ID NO: 3030892 - RNA, 12 nt, Human
agaauguuuuca

SEQ ID NO: 3030893 - RNA, 23 nt, Human
agaaguuucugccgcagcccugc

SEQ ID NO: 3030894 - RNA, 22 nt, Human
agaaguuucugccgcagcccug

SEQ ID NO: 3030895 - RNA, 21 nt, Human
agaaguuucugccgcagcccu

SEQ ID NO: 3030896 - RNA, 23 nt, Human
ucuauaacaaaggauacuuauuu

SEQ ID NO: 3030897 - RNA, 22 nt, Human
ucuauaacaaaggauacuuauu

SEQ ID NO: 3030898 - RNA, 23 nt, Human
ucuaguuguuugauucagacagc

SEQ ID NO: 3030899 - RNA, 21 nt, Human
ucuaguuugauuaaauucuug

SEQ ID NO: 3030900 - RNA, 13 nt, Human
ucuagccagagga

SEQ ID NO: 3030901 - RNA, 12 nt, Human
ucuaggaagacu

SEQ ID NO: 3030902 - RNA, 22 nt, Human
ucuaguuguuugauucagacag

SEQ ID NO: 3030903 - RNA, 18 nt, Human
ucuagcauggcugccaau

SEQ ID NO: 3030904 - RNA, 14 nt, Human
ucuauguuaauauu

SEQ ID NO: 3030905 - RNA, 16 nt, Human
ucuauguuaauauuuu

SEQ ID NO: 3030906 - RNA, 23 nt, Human
ucuaugggacucaaugcacugac

SEQ ID NO: 3030907 - RNA, 13 nt, Human
ucuauuuauuuau

SEQ ID NO: 3030908 - RNA, 14 nt, Human
ucuauuuauuuauu

SEQ ID NO: 3030909 - RNA, 21 nt, Human
ucuauuucuggaugaaugccc

SEQ ID NO: 3030910 - RNA, 17 nt, Human
ucucacuauguugccca

SEQ ID NO: 3030911 - RNA, 19 nt, Human
ucucacuauguugcccagg

SEQ ID NO: 3030912 - RNA, 16 nt, Human
ucucacuauguugccc

SEQ ID NO: 3030913 - RNA, 20 nt, Human
acuuaaauaaugugaaacug

SEQ ID NO: 3030914 - RNA, 13 nt, Human
acuuaagcacacu

SEQ ID NO: 3030915 - RNA, 17 nt, Human
acuuaaucuaaauggaa

SEQ ID NO: 3030916 - RNA, 19 nt, Human
acuuaaucuaaauggaacc

SEQ ID NO: 3030917 - RNA, 22 nt, Human
acuuaaucuaaauggaaccacu

SEQ ID NO: 3030918 - RNA, 16 nt, Human
acuuacacuuuaugca

SEQ ID NO: 3030919 - RNA, 15 nt, Human
acuuagguguggggg

SEQ ID NO: 3030920 - RNA, 22 nt, Human
acuuacuguacaugaaaacaca

SEQ ID NO: 3030921 - RNA, 17 nt, Human
acuuacacuuuaugcac

SEQ ID NO: 3030922 - RNA, 21 nt, Human
acuuacuguacaugaaaacac

SEQ ID NO: 3030923 - RNA, 16 nt, Human
acuuacuguacaugaa

SEQ ID NO: 3030924 - RNA, 18 nt, Human
acuguucucugcccucca

SEQ ID NO: 3030925 - RNA, 17 nt, Human
acuguucucugcccucc

SEQ ID NO: 3030926 - RNA, 16 nt, Human
acuguucucugcccuc

SEQ ID NO: 3030927 - RNA, 21 nt, Human
ucuacccuggcacuauaaugu

SEQ ID NO: 3030928 - RNA, 20 nt, Human
ucuacccagcgagcccuggu

SEQ ID NO: 3030929 - RNA, 14 nt, Human
ucuacccaggugcu

SEQ ID NO: 3030930 - RNA, 19 nt, Human
ucuacccuggcacuauaau

SEQ ID NO: 3030931 - RNA, 14 nt, Human
ucuacccuggcacu

SEQ ID NO: 3030932 - RNA, 21 nt, Human
ucuacagaggccaugggccuc

SEQ ID NO: 3030933 - RNA, 19 nt, Human
ucuacccagcgagcccugg

SEQ ID NO: 3030934 - RNA, 16 nt, Human
ucuacagaggccaugg

SEQ ID NO: 3030935 - RNA, 18 nt, Human
uccugggagugagcuggu

SEQ ID NO: 3030936 - RNA, 14 nt, Human
ucucagcagagugc

SEQ ID NO: 3030937 - RNA, 13 nt, Human
ucucagcagagug

SEQ ID NO: 3030938 - RNA, 12 nt, Human
ucucagcagagu

SEQ ID NO: 3030939 - RNA, 10 nt, Human
ucucaggcca

SEQ ID NO: 3030940 - RNA, 12 nt, Human
ucucaggccaaa

SEQ ID NO: 3030941 - RNA, 13 nt, Human
ucucaggccagcu

SEQ ID NO: 3030942 - RNA, 12 nt, Human
ucucaggccagc

SEQ ID NO: 3030943 - RNA, 21 nt, Human
ucucaggccagcugcuugggc

SEQ ID NO: 3030944 - RNA, 18 nt, Human
ucucaggccagcugcuug

SEQ ID NO: 3030945 - RNA, 17 nt, Human
ucucaggccagcugcuu

SEQ ID NO: 3030946 - RNA, 16 nt, Human
ucucauuugucacaca

SEQ ID NO: 3030947 - RNA, 16 nt, Human
ucuccaagcaggacau

SEQ ID NO: 3030948 - RNA, 15 nt, Human
ucuccaagcaggaca

SEQ ID NO: 3030949 - RNA, 14 nt, Human
ucucauuugucaca

SEQ ID NO: 3030950 - RNA, 15 nt, Human
acuugugaauaaaga

SEQ ID NO: 3030951 - RNA, 21 nt, Human
acuugucuuuggacccugagg

SEQ ID NO: 3030952 - RNA, 18 nt, Human
acuugucuuuggacccug

SEQ ID NO: 3030953 - RNA, 20 nt, Human
acuugucuuuggacccugag

SEQ ID NO: 3030954 - RNA, 19 nt, Human
acuuguggacacagcucuu

SEQ ID NO: 3030955 - RNA, 22 nt, Human
acuuguggacacagcucuucuc

SEQ ID NO: 3030956 - RNA, 20 nt, Human
ucucacuauguugcccaggc

SEQ ID NO: 3030957 - RNA, 21 nt, Human
ucucacuauguugcccaggca

SEQ ID NO: 3030958 - RNA, 22 nt, Human
ucucacuauguugcccaggcag

SEQ ID NO: 3030959 - RNA, 23 nt, Human
ucucacuauguugcccaggcagg

SEQ ID NO: 3030960 - RNA, 23 nt, Human
acuugcagacucuacagaggcca

SEQ ID NO: 3030961 - RNA, 19 nt, Human
acuugcagacucuacagag

SEQ ID NO: 3030962 - RNA, 22 nt, Human
acuugcagacucuacagaggcc

SEQ ID NO: 3030963 - RNA, 21 nt, Human
acuuugguuauuuuacuuuuu

SEQ ID NO: 3030964 - RNA, 13 nt, Human
acuuugguuauuu

SEQ ID NO: 3030965 - RNA, 10 nt, Human
acuuugguua

SEQ ID NO: 3030966 - RNA, 12 nt, Human
acuuugaccucu

SEQ ID NO: 3030967 - RNA, 13 nt, Human
acuuugaccucug

SEQ ID NO: 3030968 - RNA, 23 nt, Human
acuuugguuauuuuacuuuuugg

SEQ ID NO: 3030969 - RNA, 22 nt, Human
acuuugguuauuuuacuuuuug

SEQ ID NO: 3030970 - RNA, 18 nt, Human
acuuuguguucaccuugu

SEQ ID NO: 3030971 - RNA, 20 nt, Human
acuuuguuaguuucuccaag

SEQ ID NO: 3030972 - RNA, 14 nt, Human
acuuuguucuggcu

SEQ ID NO: 3030973 - RNA, 21 nt, Human
acuuuguuaguuucuccaagc

SEQ ID NO: 3030974 - RNA, 12 nt, Human
acuuuuguucuu

SEQ ID NO: 3030975 - RNA, 13 nt, Human
acuuuuguucuug

SEQ ID NO: 3030976 - RNA, 16 nt, Human
acuuuuuauauucuca

SEQ ID NO: 3030977 - RNA, 15 nt, Human
acuuuuuauauucuc

SEQ ID NO: 3030978 - RNA, 12 nt, Human
acuuuuuauauu

SEQ ID NO: 3030979 - RNA, 22 nt, Human
acuuuuuauauucucagcagag

SEQ ID NO: 3030980 - RNA, 15 nt, Human
acuuuuguucuuggu

SEQ ID NO: 3030981 - RNA, 23 nt, Human
acuuuuguucuugguuuguaaau

SEQ ID NO: 3030982 - RNA, 17 nt, Human
agaaaaaauauuuuccc

SEQ ID NO: 3030983 - RNA, 15 nt, Human
ucuccuucaccuuug

SEQ ID NO: 3030984 - RNA, 14 nt, Human
ucuccuucaccuuu

SEQ ID NO: 3030985 - RNA, 16 nt, Human
ucuccuucaccuuugu

SEQ ID NO: 3030986 - RNA, 13 nt, Human
ucuccuuguguua

SEQ ID NO: 3030987 - RNA, 21 nt, Human
ucuccuuguguuacuaaguuu

SEQ ID NO: 3030988 - RNA, 15 nt, Human
ucuccuccagaguca

SEQ ID NO: 3030989 - RNA, 16 nt, Human
ucuccucugcugcugg

SEQ ID NO: 3030990 - RNA, 15 nt, Human
ucuccucugcugcug

SEQ ID NO: 3030991 - RNA, 18 nt, Human
ucuccucugcugcuggcu

SEQ ID NO: 3030992 - RNA, 17 nt, Human
ucuccucugcugcuggc

SEQ ID NO: 3030993 - RNA, 14 nt, Human
acuuucugaaauaa

SEQ ID NO: 3030994 - RNA, 20 nt, Human
acuuucugaaauaacauggc

SEQ ID NO: 3030995 - RNA, 12 nt, Human
acuuuaccuuuu

SEQ ID NO: 3030996 - RNA, 19 nt, Human
ucuccaagcaggacaugga

SEQ ID NO: 3030997 - RNA, 18 nt, Human
ucuccaagcaggacaugg

SEQ ID NO: 3030998 - RNA, 23 nt, Human
ucuccccagcaagugagagcugg

SEQ ID NO: 3030999 - RNA, 21 nt, Human
ucucccuuggauuguccccga

SEQ ID NO: 3031000 - RNA, 17 nt, Human
ucuccgaccagacaccu

SEQ ID NO: 3031001 - RNA, 23 nt, Human
ucuccgaccagacaccuugacag

SEQ ID NO: 3031002 - RNA, 14 nt, Human
uccagucauuaugu

SEQ ID NO: 3031003 - RNA, 15 nt, Human
uccagucauuauguu

SEQ ID NO: 3031004 - RNA, 21 nt, Human
uccagucauuauguuaauauu

SEQ ID NO: 3031005 - RNA, 23 nt, Human
uccagucauuauguuaauauuuc

SEQ ID NO: 3031006 - RNA, 18 nt, Human
uccaguaucuugaagacu

SEQ ID NO: 3031007 - RNA, 16 nt, Human
uccaguaucuugaaga

SEQ ID NO: 3031008 - RNA, 23 nt, Human
uccagugaggcucugcccuuggu

SEQ ID NO: 3031009 - RNA, 22 nt, Human
uccagugaggcucugcccuugg

SEQ ID NO: 3031010 - RNA, 16 nt, Human
uccagugaggcucugc

SEQ ID NO: 3031011 - RNA, 15 nt, Human
uccagugaggcucug

SEQ ID NO: 3031012 - RNA, 15 nt, Human
uccaguaucuugaag

SEQ ID NO: 3031013 - RNA, 14 nt, Human
uccaguaucuugaa

SEQ ID NO: 3031014 - RNA, 18 nt, Human
acggcuuuuacuuaaacc

SEQ ID NO: 3031015 - RNA, 16 nt, Human
acggcucacugcagcc

SEQ ID NO: 3031016 - RNA, 15 nt, Human
acggcucacugcagc

SEQ ID NO: 3031017 - RNA, 17 nt, Human
acggcucacugcagccu

SEQ ID NO: 3031018 - RNA, 18 nt, Human
acggcucacugcagccuc

SEQ ID NO: 3031019 - RNA, 12 nt, Human
acggccaggcca

SEQ ID NO: 3031020 - RNA, 21 nt, Human
acgcuacccgggaagggggcu

SEQ ID NO: 3031021 - RNA, 14 nt, Human
acgaauauugcuga

SEQ ID NO: 3031022 - RNA, 21 nt, Human
acgaauauugcugauggugca

SEQ ID NO: 3031023 - RNA, 23 nt, Human
acggagucccaccuuggcugcag

SEQ ID NO: 3031024 - RNA, 21 nt, Human
acggagucccaccuuggcugc

SEQ ID NO: 3031025 - RNA, 17 nt, Human
acgcuggagugcaguga

SEQ ID NO: 3031026 - RNA, 20 nt, Human
acgcuggaccuugaacuggg

SEQ ID NO: 3031027 - RNA, 23 nt, Human
acgcuggaccuugaacuggguac

SEQ ID NO: 3031028 - RNA, 15 nt, Human
acgcuggagugcagu

SEQ ID NO: 3031029 - RNA, 16 nt, Human
acgcuggagugcagug

SEQ ID NO: 3031030 - RNA, 13 nt, Human
acgcuggaccuug

SEQ ID NO: 3031031 - RNA, 21 nt, Human
uccacugugccaugugccagg

SEQ ID NO: 3031032 - RNA, 13 nt, Human
accuuuuuuauac

SEQ ID NO: 3031033 - RNA, 18 nt, Human
accuuuguccccaccgca

SEQ ID NO: 3031034 - RNA, 17 nt, Human
accuuuguccccaccgc

SEQ ID NO: 3031035 - RNA, 20 nt, Human
accuugaacuggguacuugu

SEQ ID NO: 3031036 - RNA, 13 nt, Human
uccagacacaugu

SEQ ID NO: 3031037 - RNA, 15 nt, Human
uccagaauuucccaa

SEQ ID NO: 3031038 - RNA, 14 nt, Human
uccagaauuuccca

SEQ ID NO: 3031039 - RNA, 18 nt, Human
acgaauauugcugauggu

SEQ ID NO: 3031040 - RNA, 15 nt, Human
acgaauauugcugau

SEQ ID NO: 3031041 - RNA, 22 nt, Human
accuuuuuuauacauaaacaag

SEQ ID NO: 3031042 - RNA, 23 nt, Human
uccaggcugggagagccuuccag

SEQ ID NO: 3031043 - RNA, 10 nt, Human
uccaggcucc

SEQ ID NO: 3031044 - RNA, 12 nt, Human
uccaggcuccuu

SEQ ID NO: 3031045 - RNA, 21 nt, Human
uccaggcugggagagccuucc

SEQ ID NO: 3031046 - RNA, 20 nt, Human
uccaggcugggagagccuuc

SEQ ID NO: 3031047 - RNA, 16 nt, Human
ucccccagccccaucc

SEQ ID NO: 3031048 - RNA, 15 nt, Human
ucccccagccccauc

SEQ ID NO: 3031049 - RNA, 13 nt, Human
ucccccagcccca

SEQ ID NO: 3031050 - RNA, 11 nt, Human
ucccccagccc

SEQ ID NO: 3031051 - RNA, 21 nt, Human
uccccaggaggccagccuuga

SEQ ID NO: 3031052 - RNA, 20 nt, Human
uccccaggaggccagccuug

SEQ ID NO: 3031053 - RNA, 17 nt, Human
uccccaggaggccagcc

SEQ ID NO: 3031054 - RNA, 12 nt, Human
uccccacccuga

SEQ ID NO: 3031055 - RNA, 18 nt, Human
uccccaggaggccagccu

SEQ ID NO: 3031056 - RNA, 16 nt, Human
uccccaccgcagacag

SEQ ID NO: 3031057 - RNA, 15 nt, Human
uccccaccgcagaca

SEQ ID NO: 3031058 - RNA, 23 nt, Human
uccccacccugaaagcccugagc

SEQ ID NO: 3031059 - RNA, 14 nt, Human
acuauguugcccag

SEQ ID NO: 3031060 - RNA, 22 nt, Human
acuauggcccuggccuagcaua

SEQ ID NO: 3031061 - RNA, 15 nt, Human
acuauguugcccagg

SEQ ID NO: 3031062 - RNA, 16 nt, Human
acuauguugcccaggc

SEQ ID NO: 3031063 - RNA, 16 nt, Human
acucaaugcacugaca

SEQ ID NO: 3031064 - RNA, 20 nt, Human
acuauagccuaggugacaga

SEQ ID NO: 3031065 - RNA, 22 nt, Human
acuauagccuaggugacagagu

SEQ ID NO: 3031066 - RNA, 18 nt, Human
acuauagccuaggugaca

SEQ ID NO: 3031067 - RNA, 16 nt, Human
acuaucuaaauguuga

SEQ ID NO: 3031068 - RNA, 21 nt, Human
acuaucuaaauguugaaagau

SEQ ID NO: 3031069 - RNA, 18 nt, Human
ucccagauacuugggggg

SEQ ID NO: 3031070 - RNA, 12 nt, Human
ucccagccccaa

SEQ ID NO: 3031071 - RNA, 16 nt, Human
ucccagauacuugggg

SEQ ID NO: 3031072 - RNA, 22 nt, Human
acguuucuaaaggcuaccuuug

SEQ ID NO: 3031073 - RNA, 13 nt, Human
acguugugcauuu

SEQ ID NO: 3031074 - RNA, 15 nt, Human
acguuucuaaaggcu

SEQ ID NO: 3031075 - RNA, 16 nt, Human
acguuucuaaaggcua

SEQ ID NO: 3031076 - RNA, 14 nt, Human
acguugugcauuug

SEQ ID NO: 3031077 - RNA, 15 nt, Human
acguugugcauuugg

SEQ ID NO: 3031078 - RNA, 18 nt, Human
acguggcugcuucaagga

SEQ ID NO: 3031079 - RNA, 17 nt, Human
acguggcugcuucaagg

SEQ ID NO: 3031080 - RNA, 21 nt, Human
acguggcugcuucaaggaucc

SEQ ID NO: 3031081 - RNA, 19 nt, Human
acguggcugcuucaaggau

SEQ ID NO: 3031082 - RNA, 15 nt, Human
acugaacaguaacau

SEQ ID NO: 3031083 - RNA, 21 nt, Human
acugaacaguaacauagcugu

SEQ ID NO: 3031084 - RNA, 19 nt, Human
uccucuuuccaucuacccu

SEQ ID NO: 3031085 - RNA, 21 nt, Human
uccucuuuggucuacacugug

SEQ ID NO: 3031086 - RNA, 19 nt, Human
uccucuuuggucuacacug

SEQ ID NO: 3031087 - RNA, 11 nt, Human
uccucccuccc

SEQ ID NO: 3031088 - RNA, 14 nt, Human
uccucccucccucu

SEQ ID NO: 3031089 - RNA, 11 nt, Human
uccucuuucca

SEQ ID NO: 3031090 - RNA, 12 nt, Human
uccucuuuccau

SEQ ID NO: 3031091 - RNA, 22 nt, Human
uccucuuuggucuacacugugc

SEQ ID NO: 3031092 - RNA, 21 nt, Human
acugagacagcccgggcucug

SEQ ID NO: 3031093 - RNA, 18 nt, Human
acugagacagcccgggcu

SEQ ID NO: 3031094 - RNA, 15 nt, Human
acugagacagcccgg

SEQ ID NO: 3031095 - RNA, 23 nt, Human
acugagacagcccgggcucugcc

SEQ ID NO: 3031096 - RNA, 22 nt, Human
acugagacagcccgggcucugc

SEQ ID NO: 3031097 - RNA, 13 nt, Human
acugauaaagaug

SEQ ID NO: 3031098 - RNA, 21 nt, Human
acugauaaagaugagugagca

SEQ ID NO: 3031099 - RNA, 14 nt, Human
acugcaccgggcca

SEQ ID NO: 3031100 - RNA, 16 nt, Human
acugcaccgggccaca

SEQ ID NO: 3031101 - RNA, 20 nt, Human
acugcacuauagccuaggug

SEQ ID NO: 3031102 - RNA, 19 nt, Human
uccugaugcuucuucagag

SEQ ID NO: 3031103 - RNA, 21 nt, Human
uccugaugcuucuucagagac

SEQ ID NO: 3031104 - RNA, 20 nt, Human
uccugaugcuucuucagaga

SEQ ID NO: 3031105 - RNA, 21 nt, Human
acugcacuauagccuagguga

SEQ ID NO: 3031106 - RNA, 14 nt, Human
acugcacuccagcc

SEQ ID NO: 3031107 - RNA, 17 nt, Human
acugcacuccagccugg

SEQ ID NO: 3031108 - RNA, 18 nt, Human
acugcacuccagccuggg

SEQ ID NO: 3031109 - RNA, 20 nt, Human
acugcacuccagccugggug

SEQ ID NO: 3031110 - RNA, 19 nt, Human
acugcacuccagccugggu

SEQ ID NO: 3031111 - RNA, 21 nt, Human
uccugccucgaacuggcugca

SEQ ID NO: 3031112 - RNA, 14 nt, Human
uccugcaggcagcc

SEQ ID NO: 3031113 - RNA, 13 nt, Human
uccugcaggcagc

SEQ ID NO: 3031114 - RNA, 12 nt, Human
uccugcaggcag

SEQ ID NO: 3031115 - RNA, 21 nt, Human
uccugcugcaguugccaguca

SEQ ID NO: 3031116 - RNA, 12 nt, Human
uccugggaguga

SEQ ID NO: 3031117 - RNA, 14 nt, Human
uccugggagugagc

SEQ ID NO: 3031118 - RNA, 17 nt, Human
uccugggagugagcugg

SEQ ID NO: 3031119 - RNA, 15 nt, Human
uccuggaaauauuaa

SEQ ID NO: 3031120 - RNA, 22 nt, Human
acucugagugcaaacuucagag

SEQ ID NO: 3031121 - RNA, 22 nt, Human
acucugagacucgcgacaaugc

SEQ ID NO: 3031122 - RNA, 11 nt, Human
acucugagacu

SEQ ID NO: 3031123 - RNA, 23 nt, Human
acucuccuuggugucgggcauga

SEQ ID NO: 3031124 - RNA, 16 nt, Human
acucuccuuggugucg

SEQ ID NO: 3031125 - RNA, 17 nt, Human
acucugccacuuuauuu

SEQ ID NO: 3031126 - RNA, 16 nt, Human
acucugccacuuuauu

SEQ ID NO: 3031127 - RNA, 15 nt, Human
acucuggcagcucag

SEQ ID NO: 3031128 - RNA, 13 nt, Human
acucuggcagcuc

SEQ ID NO: 3031129 - RNA, 12 nt, Human
acucuccucugc

SEQ ID NO: 3031130 - RNA, 14 nt, Human
acucuccucugcug

SEQ ID NO: 3031131 - RNA, 13 nt, Human
acucuccucugcu

SEQ ID NO: 3031132 - RNA, 21 nt, Human
acucuccucugcugcuggcug

SEQ ID NO: 3031133 - RNA, 16 nt, Human
acucuccucugcugcu

SEQ ID NO: 3031134 - RNA, 15 nt, Human
acucuccuugguguc

SEQ ID NO: 3031135 - RNA, 18 nt, Human
acucuccuggaaauauua

SEQ ID NO: 3031136 - RNA, 17 nt, Human
acucuccuccagaguca

SEQ ID NO: 3031137 - RNA, 14 nt, Human
acucuccuccagag

SEQ ID NO: 3031138 - RNA, 24 nt, Human
acuccuugaaaacacuguucucug

SEQ ID NO: 3031139 - RNA, 23 nt, Human
acuccuugaaaacacuguucucu

SEQ ID NO: 3031140 - RNA, 14 nt, Human
acucuugaccucag

SEQ ID NO: 3031141 - RNA, 15 nt, Human
acucuugaccucagg

SEQ ID NO: 3031142 - RNA, 16 nt, Human
acucuugaccucaggu

SEQ ID NO: 3031143 - RNA, 23 nt, Human
uccucauacccacccccacccaa

SEQ ID NO: 3031144 - RNA, 22 nt, Human
uccucauaguaugguggcuggg

SEQ ID NO: 3031145 - RNA, 22 nt, Human
uccucauacccacccccaccca

SEQ ID NO: 3031146 - RNA, 18 nt, Human
ucccuuugacgccauccc

SEQ ID NO: 3031147 - RNA, 16 nt, Human
ucccuuugacgccauc

SEQ ID NO: 3031148 - RNA, 20 nt, Human
ucccuuggauuguccccgac

SEQ ID NO: 3031149 - RNA, 19 nt, Human
ucccuuggauuguccccga

SEQ ID NO: 3031150 - RNA, 22 nt, Human
ucccugguggcagcucaccucu

SEQ ID NO: 3031151 - RNA, 19 nt, Human
ucccuuuuuuggcugcuga

SEQ ID NO: 3031152 - RNA, 17 nt, Human
ucccuuuuuuggcugcu

SEQ ID NO: 3031153 - RNA, 19 nt, Human
ucccuuugacgccauccca

SEQ ID NO: 3031154 - RNA, 22 nt, Human
ucccuuuuuuggcugcugaagg

SEQ ID NO: 3031155 - RNA, 20 nt, Human
ucccuuuuuuggcugcugaa

SEQ ID NO: 3031156 - RNA, 23 nt, Human
ucccuuuuuuggcugcugaaggc

SEQ ID NO: 3031157 - RNA, 12 nt, Human
acuccuggccuc

SEQ ID NO: 3031158 - RNA, 13 nt, Human
uccuaggcauuug

SEQ ID NO: 3031159 - RNA, 13 nt, Human
acuccuggccuca

SEQ ID NO: 3031160 - RNA, 14 nt, Human
acuccuggccucaa

SEQ ID NO: 3031161 - RNA, 15 nt, Human
uccuacucuguguca

SEQ ID NO: 3031162 - RNA, 12 nt, Human
uccuacucugug

SEQ ID NO: 3031163 - RNA, 13 nt, Human
uccuacucugugu

SEQ ID NO: 3031164 - RNA, 14 nt, Human
uccuacucuguguc

SEQ ID NO: 3031165 - RNA, 14 nt, Human
acuccugcaggcag

SEQ ID NO: 3031166 - RNA, 12 nt, Human
acuccugcaggc

SEQ ID NO: 3031167 - RNA, 22 nt, Human
acuccugcaggcagccaggcca

SEQ ID NO: 3031168 - RNA, 16 nt, Human
acuccugcaggcagcc

SEQ ID NO: 3031169 - RNA, 15 nt, Human
acuccugcaggcagc

SEQ ID NO: 3031170 - RNA, 11 nt, Human
acuccuggccu

SEQ ID NO: 3031171 - RNA, 17 nt, Human
ucccugguggcagcuca

SEQ ID NO: 3031172 - RNA, 16 nt, Human
ucccugguggcagcuc

SEQ ID NO: 3031173 - RNA, 21 nt, Human
ucccugguggcagcucaccuc

SEQ ID NO: 3031174 - RNA, 20 nt, Human
ucccugguggcagcucaccu

SEQ ID NO: 3031175 - RNA, 19 nt, Human
ucccugguggcagcucacc

SEQ ID NO: 3031176 - RNA, 18 nt, Human
ucccugguggcagcucac

SEQ ID NO: 3031177 - RNA, 13 nt, Human
acucaccccagcc

SEQ ID NO: 3031178 - RNA, 16 nt, Human
acucaccccagcccca

SEQ ID NO: 3031179 - RNA, 15 nt, Human
acucaccccagcccc

SEQ ID NO: 3031180 - RNA, 14 nt, Human
acucaccccagccc

SEQ ID NO: 3031181 - RNA, 14 nt, Human
ucagcccucagaau

SEQ ID NO: 3031182 - RNA, 13 nt, Human
ucagcccucagaa

SEQ ID NO: 3031183 - RNA, 19 nt, Human
acccaggagccccgaggcc

SEQ ID NO: 3031184 - RNA, 23 nt, Human
acccaggagccccgaggccuucu

SEQ ID NO: 3031185 - RNA, 17 nt, Human
accccacacacgccaga

SEQ ID NO: 3031186 - RNA, 22 nt, Human
accccagccccaaaacucuccu

SEQ ID NO: 3031187 - RNA, 13 nt, Human
accccagccccaa

SEQ ID NO: 3031188 - RNA, 12 nt, Human
ucagauuugaac

SEQ ID NO: 3031189 - RNA, 21 nt, Human
ucagauuugaacucuucaauc

SEQ ID NO: 3031190 - RNA, 15 nt, Human
ucagcaaaagaugcu

SEQ ID NO: 3031191 - RNA, 15 nt, Human
accccaucaucccuu

SEQ ID NO: 3031192 - RNA, 18 nt, Human
accccaucucuacaaaaa

SEQ ID NO: 3031193 - RNA, 12 nt, Human
ucagcuccagcu

SEQ ID NO: 3031194 - RNA, 19 nt, Human
ucagcggggacagcuccuu

SEQ ID NO: 3031195 - RNA, 20 nt, Human
ucagcggggacagcuccuuc

SEQ ID NO: 3031196 - RNA, 21 nt, Human
ucagcggggacagcuccuucu

SEQ ID NO: 3031197 - RNA, 23 nt, Human
ucagcggggacagcuccuucugu

SEQ ID NO: 3031198 - RNA, 18 nt, Human
ucagcggggacagcuccu

SEQ ID NO: 3031199 - RNA, 14 nt, Human
acccucucaaacua

SEQ ID NO: 3031200 - RNA, 18 nt, Human
acccugaaagcccugagc

SEQ ID NO: 3031201 - RNA, 16 nt, Human
acccugaaagcccuga

SEQ ID NO: 3031202 - RNA, 14 nt, Human
acccugaggcccag

SEQ ID NO: 3031203 - RNA, 13 nt, Human
acccugaggccca

SEQ ID NO: 3031204 - RNA, 22 nt, Human
acccugcccugugggcccccaa

SEQ ID NO: 3031205 - RNA, 17 nt, Human
acccugcccugugggcc

SEQ ID NO: 3031206 - RNA, 14 nt, Human
acccugcccugugg

SEQ ID NO: 3031207 - RNA, 15 nt, Human
acccugcccuguggg

SEQ ID NO: 3031208 - RNA, 16 nt, Human
acccugaggcccagag

SEQ ID NO: 3031209 - RNA, 15 nt, Human
acccugaggcccaga

SEQ ID NO: 3031210 - RNA, 15 nt, Human
accgaaaacguggcu

SEQ ID NO: 3031211 - RNA, 17 nt, Human
acccuugccgucuaccu

SEQ ID NO: 3031212 - RNA, 23 nt, Human
acccuuguggucccaccccacac

SEQ ID NO: 3031213 - RNA, 20 nt, Human
acccuuguggucccacccca

SEQ ID NO: 3031214 - RNA, 16 nt, Human
ucaggguuggccccug

SEQ ID NO: 3031215 - RNA, 19 nt, Human
ucagggucccugguggcag

SEQ ID NO: 3031216 - RNA, 23 nt, Human
ucaggccaggcccucugcccacu

SEQ ID NO: 3031217 - RNA, 20 nt, Human
ucaggccaggcccucugccc

SEQ ID NO: 3031218 - RNA, 22 nt, Human
ucaggccaggcccucugcccac

SEQ ID NO: 3031219 - RNA, 21 nt, Human
ucaggccaggcccucugccca

SEQ ID NO: 3031220 - RNA, 14 nt, Human
ucagcuccagcuca

SEQ ID NO: 3031221 - RNA, 21 nt, Human
ucagcuuguaaauagcucagg

SEQ ID NO: 3031222 - RNA, 22 nt, Human
ucagcuuguaaauagcucaggu

SEQ ID NO: 3031223 - RNA, 23 nt, Human
ucagguaacaggcagauacagga

SEQ ID NO: 3031224 - RNA, 21 nt, Human
ucagguaacaggcagauacag

SEQ ID NO: 3031225 - RNA, 22 nt, Human
ucagguaacaggcagauacagg

SEQ ID NO: 3031226 - RNA, 14 nt, Human
acccggccccugcu

SEQ ID NO: 3031227 - RNA, 15 nt, Human
acccggccccugcug

SEQ ID NO: 3031228 - RNA, 16 nt, Human
acccggccccugcugg

SEQ ID NO: 3031229 - RNA, 22 nt, Human
acccggccccugcugguucagg

SEQ ID NO: 3031230 - RNA, 17 nt, Human
acccggccccugcuggu

SEQ ID NO: 3031231 - RNA, 20 nt, Human
acccggccccugcugguuca

SEQ ID NO: 3031232 - RNA, 13 nt, Human
acccgggaagggg

SEQ ID NO: 3031233 - RNA, 12 nt, Human
acccgggaaggg

SEQ ID NO: 3031234 - RNA, 15 nt, Human
ucauauggauaaaua

SEQ ID NO: 3031235 - RNA, 15 nt, Human
ucauauuuacuucuu

SEQ ID NO: 3031236 - RNA, 23 nt, Human
ucauauuuacuucuuauacauuu

SEQ ID NO: 3031237 - RNA, 15 nt, Human
ucauaguaugguggc

SEQ ID NO: 3031238 - RNA, 18 nt, Human
ucauaguaugguggcugg

SEQ ID NO: 3031239 - RNA, 19 nt, Human
ucauaguaugguggcuggg

SEQ ID NO: 3031240 - RNA, 14 nt, Human
ucauaaccuagccu

SEQ ID NO: 3031241 - RNA, 18 nt, Human
ucauauaagauucauauu

SEQ ID NO: 3031242 - RNA, 21 nt, Human
ucauaguaugguggcuggguu

SEQ ID NO: 3031243 - RNA, 10 nt, Human
ucagugccuu

SEQ ID NO: 3031244 - RNA, 9 nt, Human
ucagugccu

SEQ ID NO: 3031245 - RNA, 15 nt, Human
ucagugccuuaugga

SEQ ID NO: 3031246 - RNA, 14 nt, Human
ucagugccuuaugg

SEQ ID NO: 3031247 - RNA, 12 nt, Human
ucagugccuuau

SEQ ID NO: 3031248 - RNA, 11 nt, Human
ucagugccuua

SEQ ID NO: 3031249 - RNA, 19 nt, Human
accgaaaacguggcugcuu

SEQ ID NO: 3031250 - RNA, 17 nt, Human
accgaaaacguggcugc

SEQ ID NO: 3031251 - RNA, 12 nt, Human
ucagugccacua

SEQ ID NO: 3031252 - RNA, 16 nt, Human
ucagugccaaaaacaa

SEQ ID NO: 3031253 - RNA, 12 nt, Human
ucaguggcagcu

SEQ ID NO: 3031254 - RNA, 11 nt, Human
ucaguggcagc

SEQ ID NO: 3031255 - RNA, 16 nt, Human
ucagugccuuauggaa

SEQ ID NO: 3031256 - RNA, 16 nt, Human
accgcagacaggacca

SEQ ID NO: 3031257 - RNA, 12 nt, Human
accgcagacagg

SEQ ID NO: 3031258 - RNA, 20 nt, Human
accucccacaaaggagagcu

SEQ ID NO: 3031259 - RNA, 19 nt, Human
ucaaucuggauucauauuu

SEQ ID NO: 3031260 - RNA, 22 nt, Human
ucaaguccucuuuucugagagg

SEQ ID NO: 3031261 - RNA, 14 nt, Human
acauugacuauuuu

SEQ ID NO: 3031262 - RNA, 17 nt, Human
acauugacuauuuuugu

SEQ ID NO: 3031263 - RNA, 18 nt, Human
acauuuuauuuuauuaug

SEQ ID NO: 3031264 - RNA, 14 nt, Human
acauuuuauuuuau

SEQ ID NO: 3031265 - RNA, 19 nt, Human
acauuuuauuuuauuaugc

SEQ ID NO: 3031266 - RNA, 20 nt, Human
acauuuuauuuuauuaugca

SEQ ID NO: 3031267 - RNA, 17 nt, Human
acauuuuuuaaaugcac

SEQ ID NO: 3031268 - RNA, 14 nt, Human
acauuuuuuaaaug

SEQ ID NO: 3031269 - RNA, 16 nt, Human
acauuuuuuaaaugca

SEQ ID NO: 3031270 - RNA, 21 nt, Human
acauuuuuaagugcugcauuu

SEQ ID NO: 3031271 - RNA, 22 nt, Human
acauuuuuaagugcugcauuua

SEQ ID NO: 3031272 - RNA, 23 nt, Human
acauuuuuaagugcugcauuuaa

SEQ ID NO: 3031273 - RNA, 19 nt, Human
acauuuuuaagugcugcau

SEQ ID NO: 3031274 - RNA, 11 nt, Human
acauucccugc

SEQ ID NO: 3031275 - RNA, 15 nt, Human
acauguccaagaagc

SEQ ID NO: 3031276 - RNA, 23 nt, Human
acauguaauuaaguacuauguau

SEQ ID NO: 3031277 - RNA, 14 nt, Human
acauuccugaugcu

SEQ ID NO: 3031278 - RNA, 17 nt, Human
ucaacauuucucauguu

SEQ ID NO: 3031279 - RNA, 13 nt, Human
ucaaauuucuaaa

SEQ ID NO: 3031280 - RNA, 20 nt, Human
ucaacugcaucaagauguga

SEQ ID NO: 3031281 - RNA, 14 nt, Human
ucaaccagcagaug

SEQ ID NO: 3031282 - RNA, 19 nt, Human
acaugcuguacauacuuuu

SEQ ID NO: 3031283 - RNA, 21 nt, Human
acaugcuguacauacuuuuug

SEQ ID NO: 3031284 - RNA, 20 nt, Human
acaugcuguacauacuuuuu

SEQ ID NO: 3031285 - RNA, 15 nt, Human
acaugcuacacacug

SEQ ID NO: 3031286 - RNA, 21 nt, Human
acaugcuacacacugcauguu

SEQ ID NO: 3031287 - RNA, 15 nt, Human
acauguaauuaagua

SEQ ID NO: 3031288 - RNA, 17 nt, Human
acauguaauuaaguacu

SEQ ID NO: 3031289 - RNA, 19 nt, Human
acauguaauuaaguacuau

SEQ ID NO: 3031290 - RNA, 21 nt, Human
acauguaauuaaguacuaugu

SEQ ID NO: 3031291 - RNA, 22 nt, Human
acauguaauuaaguacuaugua

SEQ ID NO: 3031292 - RNA, 16 nt, Human
ucacacugucuucuga

SEQ ID NO: 3031293 - RNA, 20 nt, Human
ucacagaugggugcuuggag

SEQ ID NO: 3031294 - RNA, 13 nt, Human
ucacagccucuga

SEQ ID NO: 3031295 - RNA, 20 nt, Human
ucacaguucucuccuucuuc

SEQ ID NO: 3031296 - RNA, 16 nt, Human
ucacaguucucuccuu

SEQ ID NO: 3031297 - RNA, 12 nt, Human
ucaauugugaaa

SEQ ID NO: 3031298 - RNA, 17 nt, Human
ucacaaaggaugcccaa

SEQ ID NO: 3031299 - RNA, 17 nt, Human
accacaucuugcucugc

SEQ ID NO: 3031300 - RNA, 18 nt, Human
accacaucuugcucugcu

SEQ ID NO: 3031301 - RNA, 19 nt, Human
accacaucuugcucugcug

SEQ ID NO: 3031302 - RNA, 18 nt, Human
accacaugugcacaugca

SEQ ID NO: 3031303 - RNA, 16 nt, Human
accacaucuugcucug

SEQ ID NO: 3031304 - RNA, 15 nt, Human
accaccacacccagc

SEQ ID NO: 3031305 - RNA, 20 nt, Human
accaccacacccagcccacu

SEQ ID NO: 3031306 - RNA, 10 nt, Human
ucacuugagu

SEQ ID NO: 3031307 - RNA, 15 nt, Human
accaguguuguggau

SEQ ID NO: 3031308 - RNA, 17 nt, Human
accaguguuguggauuu

SEQ ID NO: 3031309 - RNA, 23 nt, Human
ucacuguugcccaggcuggcgug

SEQ ID NO: 3031310 - RNA, 19 nt, Human
ucacuguugcccaggcugg

SEQ ID NO: 3031311 - RNA, 15 nt, Human
ucacugcagccucaa

SEQ ID NO: 3031312 - RNA, 13 nt, Human
ucacugcagccuc

SEQ ID NO: 3031313 - RNA, 16 nt, Human
ucacugagacagcccg

SEQ ID NO: 3031314 - RNA, 14 nt, Human
ucacugcagccuca

SEQ ID NO: 3031315 - RNA, 22 nt, Human
ucacugagacagcccgggcucu

SEQ ID NO: 3031316 - RNA, 21 nt, Human
ucacugagacagcccgggcuc

SEQ ID NO: 3031317 - RNA, 17 nt, Human
ucacugagacagcccgg

SEQ ID NO: 3031318 - RNA, 22 nt, Human
accagcgugugacuacuccccc

SEQ ID NO: 3031319 - RNA, 17 nt, Human
accacuacauucuguua

SEQ ID NO: 3031320 - RNA, 16 nt, Human
accacuacauucuguu

SEQ ID NO: 3031321 - RNA, 15 nt, Human
accacuacauucugu

SEQ ID NO: 3031322 - RNA, 16 nt, Human
aaucuggauucauauu

SEQ ID NO: 3031323 - RNA, 17 nt, Human
aaucuggauucauauuu

SEQ ID NO: 3031324 - RNA, 18 nt, Human
aaucuggauucauauuua

SEQ ID NO: 3031325 - RNA, 19 nt, Human
aaucuggauucauauuuaa

SEQ ID NO: 3031326 - RNA, 23 nt, Human
aaucgcuccaccuugcagcucuc

SEQ ID NO: 3031327 - RNA, 15 nt, Human
aaucauuagguguga

SEQ ID NO: 3031328 - RNA, 17 nt, Human
aaucauuaggugugacu

SEQ ID NO: 3031329 - RNA, 23 nt, Human
aaucauuaggugugacugaauuu

SEQ ID NO: 3031330 - RNA, 12 nt, Human
uaauaaacucau

SEQ ID NO: 3031331 - RNA, 19 nt, Human
uaaguauucuuauuuaaug

SEQ ID NO: 3031332 - RNA, 20 nt, Human
uaaguauucuuauuuaauga

SEQ ID NO: 3031333 - RNA, 17 nt, Human
uaaguacuauguaucaa

SEQ ID NO: 3031334 - RNA, 13 nt, Human
uaaguacuaugua

SEQ ID NO: 3031335 - RNA, 16 nt, Human
uaaguacuauguauca

SEQ ID NO: 3031336 - RNA, 11 nt, Human
uaaucuuuuau

SEQ ID NO: 3031337 - RNA, 17 nt, Human
uaaugaaugaaacauuu

SEQ ID NO: 3031338 - RNA, 18 nt, Human
uaauagacaauuuauuau

SEQ ID NO: 3031339 - RNA, 22 nt, Human
uaauagacaauuuauuauggca

SEQ ID NO: 3031340 - RNA, 16 nt, Human
uaauacaccacuacau

SEQ ID NO: 3031341 - RNA, 14 nt, Human
uaauacaccacuac

SEQ ID NO: 3031342 - RNA, 18 nt, Human
uaauacaccacuacauuc

SEQ ID NO: 3031343 - RNA, 19 nt, Human
uaauacaccacuacauucu

SEQ ID NO: 3031344 - RNA, 14 nt, Human
uaauagacaauuua

SEQ ID NO: 3031345 - RNA, 16 nt, Human
uaauagacaauuuauu

SEQ ID NO: 3031346 - RNA, 17 nt, Human
uaaugucaguauuucaa

SEQ ID NO: 3031347 - RNA, 18 nt, Human
uaaugucacaggcagguc

SEQ ID NO: 3031348 - RNA, 13 nt, Human
uaauguacugcau

SEQ ID NO: 3031349 - RNA, 17 nt, Human
aaugaaacauuuuguca

SEQ ID NO: 3031350 - RNA, 17 nt, Human
aaugaaaccugugucuc

SEQ ID NO: 3031351 - RNA, 16 nt, Human
aaugaaagacuguaca

SEQ ID NO: 3031352 - RNA, 17 nt, Human
aaugaaagacuguacaa

SEQ ID NO: 3031353 - RNA, 15 nt, Human
aaugaccuuucaaua

SEQ ID NO: 3031354 - RNA, 22 nt, Human
aaugaaugucagugugacugau

SEQ ID NO: 3031355 - RNA, 13 nt, Human
aaugaaugucagu

SEQ ID NO: 3031356 - RNA, 13 nt, Human
aauauuuaaucuu

SEQ ID NO: 3031357 - RNA, 22 nt, Human
aauaugcacacauuuuuuaaau

SEQ ID NO: 3031358 - RNA, 16 nt, Human
aauaugcacacauuuu

SEQ ID NO: 3031359 - RNA, 17 nt, Human
aauaugcacacauuuuu

SEQ ID NO: 3031360 - RNA, 15 nt, Human
uaagagaaaugagcu

SEQ ID NO: 3031361 - RNA, 18 nt, Human
uaagcacacuugacauca

SEQ ID NO: 3031362 - RNA, 22 nt, Human
uaagcuguuacugucuucagua

SEQ ID NO: 3031363 - RNA, 13 nt, Human
uaacuucacauau

SEQ ID NO: 3031364 - RNA, 21 nt, Human
uaacuucacauauugauuucc

SEQ ID NO: 3031365 - RNA, 14 nt, Human
uaacuucaccauau

SEQ ID NO: 3031366 - RNA, 17 nt, Human
uaacuuccaauuuacau

SEQ ID NO: 3031367 - RNA, 16 nt, Human
uaacuuucugaaauaa

SEQ ID NO: 3031368 - RNA, 21 nt, Human
aauaguucagguaacaggcag

SEQ ID NO: 3031369 - RNA, 13 nt, Human
aauaguuggcuag

SEQ ID NO: 3031370 - RNA, 22 nt, Human
aauaguggugugauuuggggau

SEQ ID NO: 3031371 - RNA, 16 nt, Human
aauaguggugugauuu

SEQ ID NO: 3031372 - RNA, 16 nt, Human
uaacauggaaguacua

SEQ ID NO: 3031373 - RNA, 18 nt, Human
uaacauggacaugaucuu

SEQ ID NO: 3031374 - RNA, 23 nt, Human
uaacauggacaugaucuucuuua

SEQ ID NO: 3031375 - RNA, 21 nt, Human
aauuaaugucaguauuucaac

SEQ ID NO: 3031376 - RNA, 13 nt, Human
uacauucuguuaa

SEQ ID NO: 3031377 - RNA, 12 nt, Human
uacauucuguua

SEQ ID NO: 3031378 - RNA, 21 nt, Human
aauguucucucuucuccaccu

SEQ ID NO: 3031379 - RNA, 11 nt, Human
aauuaacuuuu

SEQ ID NO: 3031380 - RNA, 16 nt, Human
uacaggugugagucac

SEQ ID NO: 3031381 - RNA, 24 nt, Human
uacauaaugcgugcauaccacuuu

SEQ ID NO: 3031382 - RNA, 21 nt, Human
uacauaaugcgugcauaccac

SEQ ID NO: 3031383 - RNA, 23 nt, Human
uacauaaugcgugcauaccacuu

SEQ ID NO: 3031384 - RNA, 15 nt, Human
aaugugaaacuggau

SEQ ID NO: 3031385 - RNA, 14 nt, Human
aaugugaaacugga

SEQ ID NO: 3031386 - RNA, 19 nt, Human
aaugugaaaagaaaaauga

SEQ ID NO: 3031387 - RNA, 19 nt, Human
aauguauguguaaguauuc

SEQ ID NO: 3031388 - RNA, 20 nt, Human
aauguauguguaaguauucu

SEQ ID NO: 3031389 - RNA, 17 nt, Human
aaugugaaaagaaaaau

SEQ ID NO: 3031390 - RNA, 12 nt, Human
aauggcagccuu

SEQ ID NO: 3031391 - RNA, 16 nt, Human
aauggcagccuuggca

SEQ ID NO: 3031392 - RNA, 18 nt, Human
uacagaggccaugggccu

SEQ ID NO: 3031393 - RNA, 19 nt, Human
uacagacaaagcguggugg

SEQ ID NO: 3031394 - RNA, 22 nt, Human
uacagacaacaaaccuguuucu

SEQ ID NO: 3031395 - RNA, 19 nt, Human
uacacauuuuauuuuauua

SEQ ID NO: 3031396 - RNA, 21 nt, Human
uacacauuuuauuuuauuaug

SEQ ID NO: 3031397 - RNA, 22 nt, Human
uacacauuuuauuuuauuaugc

SEQ ID NO: 3031398 - RNA, 23 nt, Human
uacacauuuuauuuuauuaugca

SEQ ID NO: 3031399 - RNA, 15 nt, Human
uacacuaaaagguga

SEQ ID NO: 3031400 - RNA, 21 nt, Human
aaugcacuuuguucuggcucu

SEQ ID NO: 3031401 - RNA, 17 nt, Human
aaugaccuuucaauagg

SEQ ID NO: 3031402 - RNA, 16 nt, Human
aaugaccuuucaauag

SEQ ID NO: 3031403 - RNA, 18 nt, Human
aaugaccuuucaauagga

SEQ ID NO: 3031404 - RNA, 21 nt, Human
uacaaugcugugcccuaaagu

SEQ ID NO: 3031405 - RNA, 22 nt, Human
aaugcacuuuguucuggcucuu

SEQ ID NO: 3031406 - RNA, 21 nt, Human
aauggacguguuaugacucca

SEQ ID NO: 3031407 - RNA, 14 nt, Human
aauggaaccacucu

SEQ ID NO: 3031408 - RNA, 20 nt, Human
aauggacuaacuugucuuug

SEQ ID NO: 3031409 - RNA, 23 nt, Human
aauggacguguuaugacuccaga

SEQ ID NO: 3031410 - RNA, 21 nt, Human
aauggaaaugggcagagcaga

SEQ ID NO: 3031411 - RNA, 20 nt, Human
aauggaaaugggcagagcag

SEQ ID NO: 3031412 - RNA, 12 nt, Human
aaugcccagccc

SEQ ID NO: 3031413 - RNA, 11 nt, Human
aaugcccagcc

SEQ ID NO: 3031414 - RNA, 17 nt, Human
aauuauugauguuuuca

SEQ ID NO: 3031415 - RNA, 12 nt, Human
aauuccccagau

SEQ ID NO: 3031416 - RNA, 14 nt, Human
aauuccccacccug

SEQ ID NO: 3031417 - RNA, 23 nt, Human
uaccugccaggaagccagcaggc

SEQ ID NO: 3031418 - RNA, 20 nt, Human
uaccugccaggaagccagca

SEQ ID NO: 3031419 - RNA, 18 nt, Human
uaccugccaggaagccag

SEQ ID NO: 3031420 - RNA, 10 nt, Human
uaccuguccc

SEQ ID NO: 3031421 - RNA, 17 nt, Human
uaccugucccccugaca

SEQ ID NO: 3031422 - RNA, 16 nt, Human
uaccugucccccugac

SEQ ID NO: 3031423 - RNA, 14 nt, Human
uaccugucccccug

SEQ ID NO: 3031424 - RNA, 13 nt, Human
uaccugucccccu

SEQ ID NO: 3031425 - RNA, 11 nt, Human
aauuacaggaa

SEQ ID NO: 3031426 - RNA, 15 nt, Human
aauuagccaagugug

SEQ ID NO: 3031427 - RNA, 20 nt, Human
uacucugccacuuuauuucu

SEQ ID NO: 3031428 - RNA, 12 nt, Human
uacucuguguca

SEQ ID NO: 3031429 - RNA, 16 nt, Human
uacuggagaaaaugga

SEQ ID NO: 3031430 - RNA, 19 nt, Human
uacuguaauuugugauaca

SEQ ID NO: 3031431 - RNA, 20 nt, Human
uacuguaauuugugauacaa

SEQ ID NO: 3031432 - RNA, 18 nt, Human
uacuguaauuugugauac

SEQ ID NO: 3031433 - RNA, 18 nt, Human
uacuguacaugaaaacac

SEQ ID NO: 3031434 - RNA, 22 nt, Human
uacuguacaugaaaacacauuu

SEQ ID NO: 3031435 - RNA, 21 nt, Human
uacuguacaugaaaacacauu

SEQ ID NO: 3031436 - RNA, 13 nt, Human
uacuacuccugua

SEQ ID NO: 3031437 - RNA, 17 nt, Human
uacuacuccuguaggaa

SEQ ID NO: 3031438 - RNA, 23 nt, Human
uacuauggcccuggccuagcaua

SEQ ID NO: 3031439 - RNA, 12 nt, Human
uacuauguauca

SEQ ID NO: 3031440 - RNA, 13 nt, Human
uacuauguaucaa

SEQ ID NO: 3031441 - RNA, 14 nt, Human
uacuauguaucaau

SEQ ID NO: 3031442 - RNA, 22 nt, Human
uacucuccuggaaauauuaaga

SEQ ID NO: 3031443 - RNA, 23 nt, Human
uacucuccuggaaauauuaagaa

SEQ ID NO: 3031444 - RNA, 18 nt, Human
uacgggaggguaaggcug

SEQ ID NO: 3031445 - RNA, 12 nt, Human
uacguacacauu

SEQ ID NO: 3031446 - RNA, 13 nt, Human
uacguacacauuu

SEQ ID NO: 3031447 - RNA, 15 nt, Human
uacguugugcauuug

SEQ ID NO: 3031448 - RNA, 16 nt, Human
uacguugugcauuugg

SEQ ID NO: 3031449 - RNA, 22 nt, Human
uacgccaggggaaaaucagccu

SEQ ID NO: 3031450 - RNA, 23 nt, Human
uauguuuuuguucaguuuaucug

SEQ ID NO: 3031451 - RNA, 22 nt, Human
acaggcauguucucugaggaca

SEQ ID NO: 3031452 - RNA, 15 nt, Human
acaggcauguucucu

SEQ ID NO: 3031453 - RNA, 18 nt, Human
acaggcauguucucugag

SEQ ID NO: 3031454 - RNA, 19 nt, Human
acaggcauguucucugagg

SEQ ID NO: 3031455 - RNA, 20 nt, Human
acaggcauguucucugagga

SEQ ID NO: 3031456 - RNA, 20 nt, Human
uauguggaguucaucuugaa

SEQ ID NO: 3031457 - RNA, 13 nt, Human
acaggaaguacug

SEQ ID NO: 3031458 - RNA, 15 nt, Human
acaggaaaagcugcu

SEQ ID NO: 3031459 - RNA, 16 nt, Human
acaggaaaagcugcug

SEQ ID NO: 3031460 - RNA, 17 nt, Human
acaggaaaagcugcuga

SEQ ID NO: 3031461 - RNA, 13 nt, Human
acagcuaacaugg

SEQ ID NO: 3031462 - RNA, 14 nt, Human
acaggcauguucuc

SEQ ID NO: 3031463 - RNA, 14 nt, Human
acaggcagguccag

SEQ ID NO: 3031464 - RNA, 16 nt, Human
acaggcagguccaggg

SEQ ID NO: 3031465 - RNA, 16 nt, Human
acaggagugagcacua

SEQ ID NO: 3031466 - RNA, 14 nt, Human
acaggaucagucug

SEQ ID NO: 3031467 - RNA, 13 nt, Human
acaggcaggucca

SEQ ID NO: 3031468 - RNA, 23 nt, Human
acaggaccagggauuuccaugau

SEQ ID NO: 3031469 - RNA, 18 nt, Human
uauucaguggcuaacuug

SEQ ID NO: 3031470 - RNA, 20 nt, Human
uauucaguaauaacucuacc

SEQ ID NO: 3031471 - RNA, 14 nt, Human
uauucaggaagcuc

SEQ ID NO: 3031472 - RNA, 13 nt, Human
uauuacuucugcu

SEQ ID NO: 3031473 - RNA, 14 nt, Human
uauuacuucugcua

SEQ ID NO: 3031474 - RNA, 14 nt, Human
acaggcuuagugau

SEQ ID NO: 3031475 - RNA, 23 nt, Human
acaggcugggcuucaguggcagc

SEQ ID NO: 3031476 - RNA, 22 nt, Human
acaggcugggcuucaguggcag

SEQ ID NO: 3031477 - RNA, 20 nt, Human
acaggcuuagugauguaauu

SEQ ID NO: 3031478 - RNA, 19 nt, Human
acaggcuuagugauguaau

SEQ ID NO: 3031479 - RNA, 12 nt, Human
acagggcacacc

SEQ ID NO: 3031480 - RNA, 12 nt, Human
acagauugaauu

SEQ ID NO: 3031481 - RNA, 18 nt, Human
acagauugaauuugccua

SEQ ID NO: 3031482 - RNA, 17 nt, Human
acagcaaggagauuuac

SEQ ID NO: 3031483 - RNA, 14 nt, Human
acagagcccacgcc

SEQ ID NO: 3031484 - RNA, 15 nt, Human
acagagcccacgccc

SEQ ID NO: 3031485 - RNA, 19 nt, Human
acagagcccacgcccccac

SEQ ID NO: 3031486 - RNA, 18 nt, Human
acagagcccacgccccca

SEQ ID NO: 3031487 - RNA, 16 nt, Human
acagcaaggagauuua

SEQ ID NO: 3031488 - RNA, 21 nt, Human
acagcaaggagauuuacaacu

SEQ ID NO: 3031489 - RNA, 17 nt, Human
acagcccgggcucugcc

SEQ ID NO: 3031490 - RNA, 19 nt, Human
acagcccgggcucugccuc

SEQ ID NO: 3031491 - RNA, 18 nt, Human
acagcccgggcucugccu

SEQ ID NO: 3031492 - RNA, 11 nt, Human
uaugcauuuga

SEQ ID NO: 3031493 - RNA, 23 nt, Human
uaugcauuugaaaauuuugaugu

SEQ ID NO: 3031494 - RNA, 24 nt, Human
uaugcauuugaaaauuuugauguu

SEQ ID NO: 3031495 - RNA, 17 nt, Human
uaugccugggcagaagg

SEQ ID NO: 3031496 - RNA, 15 nt, Human
uaugcuuauacacuu

SEQ ID NO: 3031497 - RNA, 18 nt, Human
uauggcuuuugugcauua

SEQ ID NO: 3031498 - RNA, 21 nt, Human
uauggcuuuugugcauuaucu

SEQ ID NO: 3031499 - RNA, 17 nt, Human
uauggcuuuugugcauu

SEQ ID NO: 3031500 - RNA, 19 nt, Human
uauccuaauaaaaagguga

SEQ ID NO: 3031501 - RNA, 15 nt, Human
uauccuaauaaaaag

SEQ ID NO: 3031502 - RNA, 18 nt, Human
uauccuaauaaaaaggug

SEQ ID NO: 3031503 - RNA, 12 nt, Human
uauccuaauaaa

SEQ ID NO: 3031504 - RNA, 18 nt, Human
uaucccuuggacauuuua

SEQ ID NO: 3031505 - RNA, 19 nt, Human
uaucccuuggacauuuuau

SEQ ID NO: 3031506 - RNA, 17 nt, Human
uaucccuuggacauuuu

SEQ ID NO: 3031507 - RNA, 11 nt, Human
acagagaaagu

SEQ ID NO: 3031508 - RNA, 18 nt, Human
acagagaaaguacuucuc

SEQ ID NO: 3031509 - RNA, 13 nt, Human
uaucucccccagc

SEQ ID NO: 3031510 - RNA, 14 nt, Human
uaucucccccagcc

SEQ ID NO: 3031511 - RNA, 15 nt, Human
acagacccugcccug

SEQ ID NO: 3031512 - RNA, 14 nt, Human
acagacccugcccu

SEQ ID NO: 3031513 - RNA, 13 nt, Human
acagacccugccc

SEQ ID NO: 3031514 - RNA, 17 nt, Human
acagaaauguacagcaa

SEQ ID NO: 3031515 - RNA, 14 nt, Human
acagaaauguacag

SEQ ID NO: 3031516 - RNA, 16 nt, Human
acagaaauguacagca

SEQ ID NO: 3031517 - RNA, 17 nt, Human
acagaaaauucuucucc

SEQ ID NO: 3031518 - RNA, 13 nt, Human
acagaaauguaca

SEQ ID NO: 3031519 - RNA, 20 nt, Human
acagaaaauggaagacagcu

SEQ ID NO: 3031520 - RNA, 17 nt, Human
uauaacuuuuuauauuc

SEQ ID NO: 3031521 - RNA, 12 nt, Human
uauaacuuuuua

SEQ ID NO: 3031522 - RNA, 20 nt, Human
uauaacuuuuuauauucuca

SEQ ID NO: 3031523 - RNA, 20 nt, Human
acacucacauuuauucugcu

SEQ ID NO: 3031524 - RNA, 15 nt, Human
acacucaaaagcugg

SEQ ID NO: 3031525 - RNA, 21 nt, Human
acaccucugcacaagcugcac

SEQ ID NO: 3031526 - RNA, 19 nt, Human
acaccucugcacaagcugc

SEQ ID NO: 3031527 - RNA, 16 nt, Human
acaccgggcacucaga

SEQ ID NO: 3031528 - RNA, 19 nt, Human
acacccugugauggggccc

SEQ ID NO: 3031529 - RNA, 20 nt, Human
acacuaaccacgcuggaccu

SEQ ID NO: 3031530 - RNA, 18 nt, Human
uaguucagguaacaggca

SEQ ID NO: 3031531 - RNA, 20 nt, Human
uaguuccaccaucaagccac

SEQ ID NO: 3031532 - RNA, 21 nt, Human
acacaugagcaucaggccagg

SEQ ID NO: 3031533 - RNA, 13 nt, Human
acacauuuuauuu

SEQ ID NO: 3031534 - RNA, 14 nt, Human
acacauuuuauuuu

SEQ ID NO: 3031535 - RNA, 19 nt, Human
acacauuuuauuuuauuau

SEQ ID NO: 3031536 - RNA, 20 nt, Human
acacauuuuauuuuauuaug

SEQ ID NO: 3031537 - RNA, 17 nt, Human
acaaugugaaaagaaaa

SEQ ID NO: 3031538 - RNA, 19 nt, Human
acaaugugaaaagaaaaau

SEQ ID NO: 3031539 - RNA, 14 nt, Human
acacacacauacac

SEQ ID NO: 3031540 - RNA, 21 nt, Human
acaaugcugugcccuaaagug

SEQ ID NO: 3031541 - RNA, 22 nt, Human
acaaugcugugcccuaaagugu

SEQ ID NO: 3031542 - RNA, 23 nt, Human
acaaugcugugcccuaaagugua

SEQ ID NO: 3031543 - RNA, 24 nt, Human
acaaugcugugcccuaaaguguau

SEQ ID NO: 3031544 - RNA, 22 nt, Human
acacacacgcgugcacacacca

SEQ ID NO: 3031545 - RNA, 17 nt, Human
acacacagcucuguccu

SEQ ID NO: 3031546 - RNA, 13 nt, Human
acacacagcucug

SEQ ID NO: 3031547 - RNA, 14 nt, Human
acacacagcucugu

SEQ ID NO: 3031548 - RNA, 14 nt, Human
acacaccagagccc

SEQ ID NO: 3031549 - RNA, 15 nt, Human
acacaccagagccca

SEQ ID NO: 3031550 - RNA, 20 nt, Human
acacaccagagcccaccuug

SEQ ID NO: 3031551 - RNA, 21 nt, Human
acacacgcgugcacacaccag

SEQ ID NO: 3031552 - RNA, 21 nt, Human
acacacugcauguuugugauu

SEQ ID NO: 3031553 - RNA, 13 nt, Human
acacagugagucg

SEQ ID NO: 3031554 - RNA, 19 nt, Human
acacaguauuacuucugcu

SEQ ID NO: 3031555 - RNA, 18 nt, Human
acacaguauuacuucugc

SEQ ID NO: 3031556 - RNA, 16 nt, Human
acacaguauuacuucu

SEQ ID NO: 3031557 - RNA, 12 nt, Human
uaggagcaugag

SEQ ID NO: 3031558 - RNA, 20 nt, Human
uaggagaagucuucuauuua

SEQ ID NO: 3031559 - RNA, 14 nt, Human
uaggcauuguggga

SEQ ID NO: 3031560 - RNA, 20 nt, Human
uaggcauuugcugaauacag

SEQ ID NO: 3031561 - RNA, 16 nt, Human
uaggcauuugcugaau

SEQ ID NO: 3031562 - RNA, 21 nt, Human
uagggaaggauacaaaagcau

SEQ ID NO: 3031563 - RNA, 12 nt, Human
acaaugacuuac

SEQ ID NO: 3031564 - RNA, 17 nt, Human
acaaugacuuacuguac

SEQ ID NO: 3031565 - RNA, 18 nt, Human
acaaugacuuacuguaca

SEQ ID NO: 3031566 - RNA, 18 nt, Human
acaagaccacguuucuaa

SEQ ID NO: 3031567 - RNA, 18 nt, Human
uagcauguccuaaugcuu

SEQ ID NO: 3031568 - RNA, 16 nt, Human
uagcauuuugcuaaau

SEQ ID NO: 3031569 - RNA, 14 nt, Human
uagccaaggccaaa

SEQ ID NO: 3031570 - RNA, 22 nt, Human
uagcauuuugcuaaaugugaau

SEQ ID NO: 3031571 - RNA, 21 nt, Human
uagccaaggccaaaggaagca

SEQ ID NO: 3031572 - RNA, 19 nt, Human
uagcauggcugccaauggg

SEQ ID NO: 3031573 - RNA, 19 nt, Human
acaagaccacguuucuaaa

SEQ ID NO: 3031574 - RNA, 19 nt, Human
acaagacccuugugguccc

SEQ ID NO: 3031575 - RNA, 21 nt, Human
acaacacucauugaccugagg

SEQ ID NO: 3031576 - RNA, 23 nt, Human
acaacacucauugaccugaggcc

SEQ ID NO: 3031577 - RNA, 15 nt, Human
uagccagaggagaga

SEQ ID NO: 3031578 - RNA, 11 nt, Human
uagccagagga

SEQ ID NO: 3031579 - RNA, 19 nt, Human
uagaugacauugacuauuu

SEQ ID NO: 3031580 - RNA, 20 nt, Human
uagaugaaugucaguuguua

SEQ ID NO: 3031581 - RNA, 18 nt, Human
uagaugacauugacuauu

SEQ ID NO: 3031582 - RNA, 19 nt, Human
uagauauaugcucugcaug

SEQ ID NO: 3031583 - RNA, 15 nt, Human
uagauauaugcucug

SEQ ID NO: 3031584 - RNA, 24 nt, Human
acaaaggauacuuauuuaaauaga

SEQ ID NO: 3031585 - RNA, 22 nt, Human
acaaaggaugcccaaagaugca

SEQ ID NO: 3031586 - RNA, 17 nt, Human
acaaaggggcuuaauua

SEQ ID NO: 3031587 - RNA, 11 nt, Human
acaaaagcaug

SEQ ID NO: 3031588 - RNA, 22 nt, Human
acaaaagcaugugagacugguu

SEQ ID NO: 3031589 - RNA, 14 nt, Human
aacuucagaguucu

SEQ ID NO: 3031590 - RNA, 14 nt, Human
aacuucacauauug

SEQ ID NO: 3031591 - RNA, 13 nt, Human
aacuucacauauu

SEQ ID NO: 3031592 - RNA, 22 nt, Human
aacuucacauauugauuuccgu

SEQ ID NO: 3031593 - RNA, 22 nt, Human
aacuucaccauauuaccacaga

SEQ ID NO: 3031594 - RNA, 17 nt, Human
gugcacaucuguuuugu

SEQ ID NO: 3031595 - RNA, 21 nt, Human
gugcacaugcacgugugugca

SEQ ID NO: 3031596 - RNA, 21 nt, Human
gugcacaagcuccaagcuccc

SEQ ID NO: 3031597 - RNA, 16 nt, Human
gugcacaagcuccaag

SEQ ID NO: 3031598 - RNA, 13 nt, Human
gugcacaagcucc

SEQ ID NO: 3031599 - RNA, 18 nt, Human
gugcaaugaccuuucaau

SEQ ID NO: 3031600 - RNA, 23 nt, Human
gugccaaaaacaacaacaaaaug

SEQ ID NO: 3031601 - RNA, 21 nt, Human
gugcauuuggugguuucagaa

SEQ ID NO: 3031602 - RNA, 17 nt, Human
gugcauuugaggucugu

SEQ ID NO: 3031603 - RNA, 19 nt, Human
gugcauuugaggucuguuc

SEQ ID NO: 3031604 - RNA, 23 nt, Human
gugauccucccaccucagccucc

SEQ ID NO: 3031605 - RNA, 18 nt, Human
aagaaaaaugagccuggc

SEQ ID NO: 3031606 - RNA, 17 nt, Human
aagaaaaaugagccugg

SEQ ID NO: 3031607 - RNA, 19 nt, Human
aagaaaaaauauuuucccu

SEQ ID NO: 3031608 - RNA, 18 nt, Human
aagaaaaagaaaaagaaa

SEQ ID NO: 3031609 - RNA, 13 nt, Human
aagaaaaagaaaa

SEQ ID NO: 3031610 - RNA, 21 nt, Human
aacuuuaccuuuuuuauacau

SEQ ID NO: 3031611 - RNA, 22 nt, Human
aacuuuaccuuuuuuauacaua

SEQ ID NO: 3031612 - RNA, 23 nt, Human
aacuuuaccuuuuuuauacauaa

SEQ ID NO: 3031613 - RNA, 15 nt, Human
aagaaaauaguggug

SEQ ID NO: 3031614 - RNA, 16 nt, Human
aagaaaauaccaagga

SEQ ID NO: 3031615 - RNA, 21 nt, Human
aagaaaauaguggugugauuu

SEQ ID NO: 3031616 - RNA, 22 nt, Human
aagaaaauaguggugugauuug

SEQ ID NO: 3031617 - RNA, 16 nt, Human
gugcucugaucaucca

SEQ ID NO: 3031618 - RNA, 13 nt, Human
gugcucuggacag

SEQ ID NO: 3031619 - RNA, 14 nt, Human
gugcucuggacagg

SEQ ID NO: 3031620 - RNA, 15 nt, Human
gugcugcccugccca

SEQ ID NO: 3031621 - RNA, 14 nt, Human
gugcugcccugccc

SEQ ID NO: 3031622 - RNA, 13 nt, Human
gugcugcccugcc

SEQ ID NO: 3031623 - RNA, 12 nt, Human
gugcugcccugc

SEQ ID NO: 3031624 - RNA, 18 nt, Human
gugcuaucucccccagcc

SEQ ID NO: 3031625 - RNA, 15 nt, Human
gugcuaucuccccca

SEQ ID NO: 3031626 - RNA, 15 nt, Human
aacuaaaauguucua

SEQ ID NO: 3031627 - RNA, 17 nt, Human
aacuagggaagauaaua

SEQ ID NO: 3031628 - RNA, 13 nt, Human
aacguggcugcuu

SEQ ID NO: 3031629 - RNA, 12 nt, Human
aacguggcugcu

SEQ ID NO: 3031630 - RNA, 13 nt, Human
aacgucugugcca

SEQ ID NO: 3031631 - RNA, 14 nt, Human
gucucaaaaaaaca

SEQ ID NO: 3031632 - RNA, 17 nt, Human
gucucaaaaaaagaaaa

SEQ ID NO: 3031633 - RNA, 23 nt, Human
gucucuuuaaugucacaggcagg

SEQ ID NO: 3031634 - RNA, 20 nt, Human
gucugacaggcaaugcuggc

SEQ ID NO: 3031635 - RNA, 15 nt, Human
gucugacaggcaaug

SEQ ID NO: 3031636 - RNA, 18 nt, Human
gucugacaggcaaugcug

SEQ ID NO: 3031637 - RNA, 12 nt, Human
gucugacaggca

SEQ ID NO: 3031638 - RNA, 13 nt, Human
gucugacaggcaa

SEQ ID NO: 3031639 - RNA, 14 nt, Human
gucugacaggcaau

SEQ ID NO: 3031640 - RNA, 15 nt, Human
gucuggaaugcagug

SEQ ID NO: 3031641 - RNA, 16 nt, Human
gucuggaaugcagugg

SEQ ID NO: 3031642 - RNA, 23 nt, Human
gugacagaggcagccccauucug

SEQ ID NO: 3031643 - RNA, 20 nt, Human
gugacagagugagacucugu

SEQ ID NO: 3031644 - RNA, 22 nt, Human
gugacagagugagacucugucu

SEQ ID NO: 3031645 - RNA, 23 nt, Human
gugaauaauacaguaucucaggg

SEQ ID NO: 3031646 - RNA, 22 nt, Human
gugagacccugucucaaaaaaa

SEQ ID NO: 3031647 - RNA, 14 nt, Human
gugagacucugucu

SEQ ID NO: 3031648 - RNA, 16 nt, Human
gugagacucugucuca

SEQ ID NO: 3031649 - RNA, 19 nt, Human
gugacaugucuuuucuugc

SEQ ID NO: 3031650 - RNA, 16 nt, Human
aacugcauuggcuuug

SEQ ID NO: 3031651 - RNA, 23 nt, Human
aacugauuuuuuuuuccuucagu

SEQ ID NO: 3031652 - RNA, 22 nt, Human
aacugauuuuuuuuuccuucag

SEQ ID NO: 3031653 - RNA, 21 nt, Human
aacugauuuuuuuuuccuuca

SEQ ID NO: 3031654 - RNA, 20 nt, Human
aacugauuuuuuuuuccuuc

SEQ ID NO: 3031655 - RNA, 23 nt, Human
aacucuccucugcugcuggcugg

SEQ ID NO: 3031656 - RNA, 22 nt, Human
aacucuccucugcugcuggcug

SEQ ID NO: 3031657 - RNA, 18 nt, Human
gugaggcucugcccuugg

SEQ ID NO: 3031658 - RNA, 17 nt, Human
gugagucaccaagccca

SEQ ID NO: 3031659 - RNA, 23 nt, Human
gugaguacuacaguccucccauc

SEQ ID NO: 3031660 - RNA, 19 nt, Human
gugagucaccaagcccagu

SEQ ID NO: 3031661 - RNA, 17 nt, Human
aacucuccucugcugcu

SEQ ID NO: 3031662 - RNA, 21 nt, Human
gugaguacuacaguccuccca

SEQ ID NO: 3031663 - RNA, 21 nt, Human
aacucuccucugcugcuggcu

SEQ ID NO: 3031664 - RNA, 19 nt, Human
aacucuccucugcugcugg

SEQ ID NO: 3031665 - RNA, 18 nt, Human
gugagacucugucucaaa

SEQ ID NO: 3031666 - RNA, 13 nt, Human
gugaggcucugcc

SEQ ID NO: 3031667 - RNA, 12 nt, Human
gugaggcucugc

SEQ ID NO: 3031668 - RNA, 17 nt, Human
gugaggcucugcccuug

SEQ ID NO: 3031669 - RNA, 16 nt, Human
gugaggcucugcccuu

SEQ ID NO: 3031670 - RNA, 15 nt, Human
gugaggcucugcccu

SEQ ID NO: 3031671 - RNA, 14 nt, Human
gugaggcucugccc

SEQ ID NO: 3031672 - RNA, 20 nt, Human
aacacaaagcuuuugcauau

SEQ ID NO: 3031673 - RNA, 19 nt, Human
aacacaaagcuuuugcaua

SEQ ID NO: 3031674 - RNA, 18 nt, Human
aacacaaagcuuuugcau

SEQ ID NO: 3031675 - RNA, 12 nt, Human
aacacaaagcuu

SEQ ID NO: 3031676 - RNA, 19 nt, Human
aacacaaacgggcucagca

SEQ ID NO: 3031677 - RNA, 19 nt, Human
aaauuucuaaaucuccaaa

SEQ ID NO: 3031678 - RNA, 16 nt, Human
aacacugguuuuaaau

SEQ ID NO: 3031679 - RNA, 16 nt, Human
aacacuguucucugcc

SEQ ID NO: 3031680 - RNA, 18 nt, Human
aacacuguucucugcccu

SEQ ID NO: 3031681 - RNA, 17 nt, Human
aacacuguucucugccc

SEQ ID NO: 3031682 - RNA, 17 nt, Human
gucauuugagcagggcu

SEQ ID NO: 3031683 - RNA, 19 nt, Human
aacacuguucucugcccuc

SEQ ID NO: 3031684 - RNA, 21 nt, Human
aacacucacauuuauucugcu

SEQ ID NO: 3031685 - RNA, 18 nt, Human
guccccuguuuguuucug

SEQ ID NO: 3031686 - RNA, 22 nt, Human
guccccuguuuguuucugaaag

SEQ ID NO: 3031687 - RNA, 19 nt, Human
gucccuuacgugaguccug

SEQ ID NO: 3031688 - RNA, 18 nt, Human
gucccuuacgugaguccu

SEQ ID NO: 3031689 - RNA, 18 nt, Human
gucccugguggcagcuca

SEQ ID NO: 3031690 - RNA, 19 nt, Human
gucccugguggcagcucac

SEQ ID NO: 3031691 - RNA, 15 nt, Human
gucccaccccacaca

SEQ ID NO: 3031692 - RNA, 22 nt, Human
guccccaccgcagacaggacca

SEQ ID NO: 3031693 - RNA, 18 nt, Human
guccccaccgcagacagg

SEQ ID NO: 3031694 - RNA, 19 nt, Human
gucauuugagcagggcuca

SEQ ID NO: 3031695 - RNA, 15 nt, Human
aacauagcugugauu

SEQ ID NO: 3031696 - RNA, 18 nt, Human
aacaguccauugaaaggg

SEQ ID NO: 3031697 - RNA, 23 nt, Human
aacauguaauuaaguacuaugua

SEQ ID NO: 3031698 - RNA, 14 nt, Human
guccucuuuucuga

SEQ ID NO: 3031699 - RNA, 16 nt, Human
guccuggcaugggaau

SEQ ID NO: 3031700 - RNA, 17 nt, Human
guccugcugcaguugcc

SEQ ID NO: 3031701 - RNA, 19 nt, Human
guccugcugcaguugccag

SEQ ID NO: 3031702 - RNA, 12 nt, Human
gucgaggcagga

SEQ ID NO: 3031703 - RNA, 16 nt, Human
gucgaggacagggagg

SEQ ID NO: 3031704 - RNA, 15 nt, Human
gucuaugggacucaa

SEQ ID NO: 3031705 - RNA, 22 nt, Human
gucuaugggacucaaugcacug

SEQ ID NO: 3031706 - RNA, 16 nt, Human
gucuaccugaggggcc

SEQ ID NO: 3031707 - RNA, 15 nt, Human
gucuaccugaggggc

SEQ ID NO: 3031708 - RNA, 13 nt, Human
gucuaccugaggg

SEQ ID NO: 3031709 - RNA, 14 nt, Human
gucuaccugagggg

SEQ ID NO: 3031710 - RNA, 18 nt, Human
guauucucuccuguaccu

SEQ ID NO: 3031711 - RNA, 24 nt, Human
aaaugucuaguuguaacaccauga

SEQ ID NO: 3031712 - RNA, 21 nt, Human
aaaugucucuuuaaugucaca

SEQ ID NO: 3031713 - RNA, 21 nt, Human
gucagaaguuucugccgcagc

SEQ ID NO: 3031714 - RNA, 15 nt, Human
gucacugcuuaacuu

SEQ ID NO: 3031715 - RNA, 21 nt, Human
gucacugcuuaacuucacaua

SEQ ID NO: 3031716 - RNA, 16 nt, Human
gucagguggggcagcu

SEQ ID NO: 3031717 - RNA, 17 nt, Human
gucagguggggcagcuu

SEQ ID NO: 3031718 - RNA, 18 nt, Human
gucagguggggcagcuug

SEQ ID NO: 3031719 - RNA, 22 nt, Human
gucagguggggcagcuugaggg

SEQ ID NO: 3031720 - RNA, 12 nt, Human
aaauuucuaaau

SEQ ID NO: 3031721 - RNA, 13 nt, Human
aaauuucuaaauc

SEQ ID NO: 3031722 - RNA, 15 nt, Human
aaauuucuaaaucuc

SEQ ID NO: 3031723 - RNA, 22 nt, Human
gucaccaaaucagcugcuacua

SEQ ID NO: 3031724 - RNA, 12 nt, Human
gucacaggcagg

SEQ ID NO: 3031725 - RNA, 22 nt, Human
gucaauuacaggaaguacugga

SEQ ID NO: 3031726 - RNA, 12 nt, Human
gucaccaagccc

SEQ ID NO: 3031727 - RNA, 15 nt, Human
gucaccaagcccagu

SEQ ID NO: 3031728 - RNA, 23 nt, Human
gucacucuggcagcucagagagg

SEQ ID NO: 3031729 - RNA, 16 nt, Human
gucacugagacagccc

SEQ ID NO: 3031730 - RNA, 15 nt, Human
gucacugagacagcc

SEQ ID NO: 3031731 - RNA, 14 nt, Human
gucacugagacagc

SEQ ID NO: 3031732 - RNA, 22 nt, Human
gucacucuggcagcucagagag

SEQ ID NO: 3031733 - RNA, 10 nt, Human
gucacugcuu

SEQ ID NO: 3031734 - RNA, 23 nt, Human
gucacugagacagcccgggcucu

SEQ ID NO: 3031735 - RNA, 21 nt, Human
gucacugagacagcccgggcu

SEQ ID NO: 3031736 - RNA, 18 nt, Human
gucacugagacagcccgg

SEQ ID NO: 3031737 - RNA, 17 nt, Human
gucacugagacagcccg

SEQ ID NO: 3031738 - RNA, 19 nt, Human
aagcuuuugcauauugcau

SEQ ID NO: 3031739 - RNA, 15 nt, Human
aagcuuuugcauauu

SEQ ID NO: 3031740 - RNA, 22 nt, Human
aagcuuuugcauauugcauacu

SEQ ID NO: 3031741 - RNA, 13 nt, Human
aagcuuuugcaua

SEQ ID NO: 3031742 - RNA, 22 nt, Human
guucccuuuuuuggcugcugaa

SEQ ID NO: 3031743 - RNA, 21 nt, Human
guucccuuuuuuggcugcuga

SEQ ID NO: 3031744 - RNA, 17 nt, Human
aagcucugcuccucucc

SEQ ID NO: 3031745 - RNA, 19 nt, Human
guugauagcacagacccug

SEQ ID NO: 3031746 - RNA, 14 nt, Human
guugauagcacaga

SEQ ID NO: 3031747 - RNA, 15 nt, Human
guucuugguuuguaa

SEQ ID NO: 3031748 - RNA, 18 nt, Human
guucuugguuuguaaauu

SEQ ID NO: 3031749 - RNA, 14 nt, Human
guucuugguuugua

SEQ ID NO: 3031750 - RNA, 12 nt, Human
guucucugagga

SEQ ID NO: 3031751 - RNA, 15 nt, Human
guucucucuucucca

SEQ ID NO: 3031752 - RNA, 15 nt, Human
guucucugcccucca

SEQ ID NO: 3031753 - RNA, 13 nt, Human
guucucugcccuc

SEQ ID NO: 3031754 - RNA, 13 nt, Human
guucucuccuucu

SEQ ID NO: 3031755 - RNA, 19 nt, Human
guucuagcauggcugccaa

SEQ ID NO: 3031756 - RNA, 14 nt, Human
guucuuaauucuua

SEQ ID NO: 3031757 - RNA, 17 nt, Human
guucuuaauucuuagcu

SEQ ID NO: 3031758 - RNA, 18 nt, Human
guucucugcccuccaaga

SEQ ID NO: 3031759 - RNA, 17 nt, Human
guucucugcccuccaag

SEQ ID NO: 3031760 - RNA, 13 nt, Human
guucuuaauucuu

SEQ ID NO: 3031761 - RNA, 15 nt, Human
guuauuuuacuuuuu

SEQ ID NO: 3031762 - RNA, 16 nt, Human
guuauuuuacuuuuug

SEQ ID NO: 3031763 - RNA, 19 nt, Human
guuagagguucccuuugac

SEQ ID NO: 3031764 - RNA, 23 nt, Human
guucagcuuguaaauagcucagg

SEQ ID NO: 3031765 - RNA, 20 nt, Human
guucaggguuggccccugcc

SEQ ID NO: 3031766 - RNA, 21 nt, Human
guucaggguuggccccugccc

SEQ ID NO: 3031767 - RNA, 22 nt, Human
guucaggguuggccccugcccg

SEQ ID NO: 3031768 - RNA, 21 nt, Human
aagccgugauuuucauugcug

SEQ ID NO: 3031769 - RNA, 17 nt, Human
guucagguaacaggcag

SEQ ID NO: 3031770 - RNA, 18 nt, Human
guucagguaacaggcaga

SEQ ID NO: 3031771 - RNA, 16 nt, Human
aagccucccacgacug

SEQ ID NO: 3031772 - RNA, 15 nt, Human
aagccuccuccagcc

SEQ ID NO: 3031773 - RNA, 22 nt, Human
aagcuaggccuggccagaugca

SEQ ID NO: 3031774 - RNA, 17 nt, Human
aagagggugggugggua

SEQ ID NO: 3031775 - RNA, 22 nt, Human
aagagggucugaggaauccaga

SEQ ID NO: 3031776 - RNA, 14 nt, Human
aagaggcagggucu

SEQ ID NO: 3031777 - RNA, 11 nt, Human
aagaggcaggg

SEQ ID NO: 3031778 - RNA, 22 nt, Human
aagagggagggagggcuccaga

SEQ ID NO: 3031779 - RNA, 21 nt, Human
aagagggagggagggcuccag

SEQ ID NO: 3031780 - RNA, 15 nt, Human
gugguuucagaaaug

SEQ ID NO: 3031781 - RNA, 23 nt, Human
gugcugcccugcccaccuggccu

SEQ ID NO: 3031782 - RNA, 23 nt, Human
aagaucaaaagguuaauaaagua

SEQ ID NO: 3031783 - RNA, 20 nt, Human
aagaucaaaagguuaauaaa

SEQ ID NO: 3031784 - RNA, 22 nt, Human
gugucaccugaagacucauucu

SEQ ID NO: 3031785 - RNA, 14 nt, Human
gugucagguggggc

SEQ ID NO: 3031786 - RNA, 18 nt, Human
gugucagguggggcagcu

SEQ ID NO: 3031787 - RNA, 14 nt, Human
gugucaccugaaga

SEQ ID NO: 3031788 - RNA, 23 nt, Human
gugugaaccaccacacccagccc

SEQ ID NO: 3031789 - RNA, 19 nt, Human
gugucagguggggcagcuu

SEQ ID NO: 3031790 - RNA, 14 nt, Human
aagcacaugccucu

SEQ ID NO: 3031791 - RNA, 20 nt, Human
aagcacaugccucucucagg

SEQ ID NO: 3031792 - RNA, 19 nt, Human
aagcacaugccucucucag

SEQ ID NO: 3031793 - RNA, 16 nt, Human
aagcacaugccucucu

SEQ ID NO: 3031794 - RNA, 15 nt, Human
aagcacaugccucuc

SEQ ID NO: 3031795 - RNA, 16 nt, Human
aagcacacuugacauc

SEQ ID NO: 3031796 - RNA, 21 nt, Human
aagcacaugccucucucaggc

SEQ ID NO: 3031797 - RNA, 13 nt, Human
aagcaccuccugc

SEQ ID NO: 3031798 - RNA, 14 nt, Human
aagcaccuccugcc

SEQ ID NO: 3031799 - RNA, 15 nt, Human
aagcaccuccugccu

SEQ ID NO: 3031800 - RNA, 16 nt, Human
aagcaccuccugccuc

SEQ ID NO: 3031801 - RNA, 17 nt, Human
aagcaccuccugccucg

SEQ ID NO: 3031802 - RNA, 12 nt, Human
aagcaugugaga

SEQ ID NO: 3031803 - RNA, 17 nt, Human
aagccaaagcuaggccu

SEQ ID NO: 3031804 - RNA, 18 nt, Human
aagccaaagcuaggccug

SEQ ID NO: 3031805 - RNA, 13 nt, Human
uaaaaaggugacc

SEQ ID NO: 3031806 - RNA, 15 nt, Human
uaaaaaggugaccau

SEQ ID NO: 3031807 - RNA, 13 nt, Human
uaaaacccaagug

SEQ ID NO: 3031808 - RNA, 12 nt, Human
uaaaacuuuuua

SEQ ID NO: 3031809 - RNA, 15 nt, Human
uaaaacuuuuuaaaa

SEQ ID NO: 3031810 - RNA, 15 nt, Human
uaaaaaugagguacu

SEQ ID NO: 3031811 - RNA, 23 nt, Human
uaaaaaucucaaauuucuaaauc

SEQ ID NO: 3031812 - RNA, 22 nt, Human
uaaaaaugagguacucuccugg

SEQ ID NO: 3031813 - RNA, 23 nt, Human
aagugauccucccaccucagccu

SEQ ID NO: 3031814 - RNA, 20 nt, Human
aagugauucuccugccucag

SEQ ID NO: 3031815 - RNA, 13 nt, Human
aagugauccuccc

SEQ ID NO: 3031816 - RNA, 19 nt, Human
aagugauccucccaccuca

SEQ ID NO: 3031817 - RNA, 20 nt, Human
aagugauccucccaccucag

SEQ ID NO: 3031818 - RNA, 13 nt, Human
uaaaagucuugug

SEQ ID NO: 3031819 - RNA, 19 nt, Human
uaaaaggugaccaaugaug

SEQ ID NO: 3031820 - RNA, 20 nt, Human
aaguuugagaucagccuggg

SEQ ID NO: 3031821 - RNA, 21 nt, Human
aaguuucugccgcagcccugc

SEQ ID NO: 3031822 - RNA, 19 nt, Human
aaguuucugccgcagcccu

SEQ ID NO: 3031823 - RNA, 13 nt, Human
aagugugguagag

SEQ ID NO: 3031824 - RNA, 23 nt, Human
aaguguauuuuuuuacuaauaga

SEQ ID NO: 3031825 - RNA, 14 nt, Human
aagguagaauguuu

SEQ ID NO: 3031826 - RNA, 13 nt, Human
aagguagaauguu

SEQ ID NO: 3031827 - RNA, 13 nt, Human
aaggggagaguaa

SEQ ID NO: 3031828 - RNA, 23 nt, Human
aagggggcugggacaugggaaag

SEQ ID NO: 3031829 - RNA, 12 nt, Human
aagggggcuggg

SEQ ID NO: 3031830 - RNA, 20 nt, Human
aaggcugucaauuacaggaa

SEQ ID NO: 3031831 - RNA, 22 nt, Human
aaggcugggggaagaagcucuc

SEQ ID NO: 3031832 - RNA, 19 nt, Human
aaggcugggggaagaagcu

SEQ ID NO: 3031833 - RNA, 11 nt, Human
guuucagaaau

SEQ ID NO: 3031834 - RNA, 13 nt, Human
guuucagaaaugu

SEQ ID NO: 3031835 - RNA, 14 nt, Human
aaggcugggggaag

SEQ ID NO: 3031836 - RNA, 16 nt, Human
aaggcugggggaagaa

SEQ ID NO: 3031837 - RNA, 16 nt, Human
aaggaaacccagcucu

SEQ ID NO: 3031838 - RNA, 20 nt, Human
guuguuugauucagacagcu

SEQ ID NO: 3031839 - RNA, 23 nt, Human
guuguuugauucagacagcugcc

SEQ ID NO: 3031840 - RNA, 22 nt, Human
aaggaaacccagcucuggucca

SEQ ID NO: 3031841 - RNA, 17 nt, Human
aaggaaacccagcucug

SEQ ID NO: 3031842 - RNA, 21 nt, Human
guuuaagugacugauggcuaa

SEQ ID NO: 3031843 - RNA, 17 nt, Human
guuucaaacuuuacuau

SEQ ID NO: 3031844 - RNA, 21 nt, Human
aaguaauaugcacacauuuuu

SEQ ID NO: 3031845 - RNA, 18 nt, Human
aaguaauaugcacacauu

SEQ ID NO: 3031846 - RNA, 20 nt, Human
aaguaauaugcacacauuuu

SEQ ID NO: 3031847 - RNA, 17 nt, Human
aaguaauaugcacacau

SEQ ID NO: 3031848 - RNA, 12 nt, Human
guuuucuguucu

SEQ ID NO: 3031849 - RNA, 14 nt, Human
guuuucuguucuuu

SEQ ID NO: 3031850 - RNA, 15 nt, Human
guuuucuguucuuuc

SEQ ID NO: 3031851 - RNA, 16 nt, Human
guuuucuguucuuucu

SEQ ID NO: 3031852 - RNA, 18 nt, Human
guuuuaaggaugcuugua

SEQ ID NO: 3031853 - RNA, 22 nt, Human
guuuuaaggaugcuuguacaua

SEQ ID NO: 3031854 - RNA, 23 nt, Human
aaguauucuuauuuaaugaaaga

SEQ ID NO: 3031855 - RNA, 21 nt, Human
aaguauucuuauuuaaugaaa

SEQ ID NO: 3031856 - RNA, 19 nt, Human
aaguauucuuauuuaauga

SEQ ID NO: 3031857 - RNA, 16 nt, Human
aaguauuauaccuuuu

SEQ ID NO: 3031858 - RNA, 19 nt, Human
aaguauuauaccuuuuuua

SEQ ID NO: 3031859 - RNA, 14 nt, Human
aaguacuauaauuu

SEQ ID NO: 3031860 - RNA, 17 nt, Human
aaguacuauaauuuacc

SEQ ID NO: 3031861 - RNA, 13 nt, Human
aaguacuauguau

SEQ ID NO: 3031862 - RNA, 19 nt, Human
aaguacuucuccacccugc

SEQ ID NO: 3031863 - RNA, 18 nt, Human
aaguacuucuccacccug

SEQ ID NO: 3031864 - RNA, 15 nt, Human
aaguauuauaccuuu

SEQ ID NO: 3031865 - RNA, 22 nt, Human
cuucucuguauuccuagaaacu

SEQ ID NO: 3031866 - RNA, 19 nt, Human
cuucugaacuuggcgcugc

SEQ ID NO: 3031867 - RNA, 22 nt, Human
cuucugaacuuggcgcugcccc

SEQ ID NO: 3031868 - RNA, 15 nt, Human
cuucugacccaugcu

SEQ ID NO: 3031869 - RNA, 16 nt, Human
cuucuauuuauuuauu

SEQ ID NO: 3031870 - RNA, 14 nt, Human
cuucuauauaauuc

SEQ ID NO: 3031871 - RNA, 12 nt, Human
cuuccucccucc

SEQ ID NO: 3031872 - RNA, 13 nt, Human
cuuccucccuccc

SEQ ID NO: 3031873 - RNA, 14 nt, Human
cuuccucccucccu

SEQ ID NO: 3031874 - RNA, 13 nt, Human
cuucuuauacauu

SEQ ID NO: 3031875 - RNA, 16 nt, Human
cuucuuauacauuuga

SEQ ID NO: 3031876 - RNA, 17 nt, Human
cuucugacccaugcugc

SEQ ID NO: 3031877 - RNA, 16 nt, Human
cuucugacccaugcug

SEQ ID NO: 3031878 - RNA, 18 nt, Human
cuucugacccaugcugcc

SEQ ID NO: 3031879 - RNA, 15 nt, Human
cuuuaagaacuaaaa

SEQ ID NO: 3031880 - RNA, 22 nt, Human
cuugucuuuggacccugaggcc

SEQ ID NO: 3031881 - RNA, 21 nt, Human
cuugucuuuggacccugaggc

SEQ ID NO: 3031882 - RNA, 22 nt, Human
cuuuaaugucacaggcaggucc

SEQ ID NO: 3031883 - RNA, 15 nt, Human
cuuucaauaggaaaa

SEQ ID NO: 3031884 - RNA, 14 nt, Human
cuuucaauaggaaa

SEQ ID NO: 3031885 - RNA, 17 nt, Human
cuuuaaugucacaggca

SEQ ID NO: 3031886 - RNA, 18 nt, Human
cuuuaaugucacaggcag

SEQ ID NO: 3031887 - RNA, 19 nt, Human
cuuuaaugucacaggcagg

SEQ ID NO: 3031888 - RNA, 20 nt, Human
cuuuaaugucacaggcaggu

SEQ ID NO: 3031889 - RNA, 17 nt, Human
cuuucaauaggaaaaac

SEQ ID NO: 3031890 - RNA, 15 nt, Human
cuugguccugcugca

SEQ ID NO: 3031891 - RNA, 20 nt, Human
cuugguccugcugcaguugc

SEQ ID NO: 3031892 - RNA, 18 nt, Human
cuugguccugcugcaguu

SEQ ID NO: 3031893 - RNA, 17 nt, Human
cuugguccugcugcagu

SEQ ID NO: 3031894 - RNA, 16 nt, Human
cuugguccugcugcag

SEQ ID NO: 3031895 - RNA, 13 nt, Human
cuugucuguagau

SEQ ID NO: 3031896 - RNA, 20 nt, Human
cuugucuuuggacccugagg

SEQ ID NO: 3031897 - RNA, 19 nt, Human
cuugucuuuggacccugag

SEQ ID NO: 3031898 - RNA, 20 nt, Human
cuuggugucgggcaugacac

SEQ ID NO: 3031899 - RNA, 22 nt, Human
cuugguccugcugcaguugcca

SEQ ID NO: 3031900 - RNA, 16 nt, Human
cuugguucccauuugc

SEQ ID NO: 3031901 - RNA, 20 nt, Human
cuugguucccauuugcuccu

SEQ ID NO: 3031902 - RNA, 16 nt, Human
cuuggcccaggaguuu

SEQ ID NO: 3031903 - RNA, 20 nt, Human
cuuggcccaggaguuuggcc

SEQ ID NO: 3031904 - RNA, 22 nt, Human
cuuggcccaggaguuuggccag

SEQ ID NO: 3031905 - RNA, 23 nt, Human
cuuggcccaggaguuuggccaga

SEQ ID NO: 3031906 - RNA, 22 nt, Human
cuuggcgcugccccuggcagcc

SEQ ID NO: 3031907 - RNA, 21 nt, Human
cuuggcgcugccccuggcagc

SEQ ID NO: 3031908 - RNA, 23 nt, Human
cuuggcgcugccccuggcagccc

SEQ ID NO: 3031909 - RNA, 14 nt, Human
cuuggcccaggagu

SEQ ID NO: 3031910 - RNA, 15 nt, Human
cuuggcccaggaguu

SEQ ID NO: 3031911 - RNA, 14 nt, Human
cuuggauugucccc

SEQ ID NO: 3031912 - RNA, 20 nt, Human
cuuggauuguccccgacccu

SEQ ID NO: 3031913 - RNA, 18 nt, Human
cuuggauuguccccgacc

SEQ ID NO: 3031914 - RNA, 15 nt, Human
cuuggauuguccccg

SEQ ID NO: 3031915 - RNA, 19 nt, Human
cuugauucauaaugacuua

SEQ ID NO: 3031916 - RNA, 19 nt, Human
cuugccgucuaccugaggg

SEQ ID NO: 3031917 - RNA, 18 nt, Human
cuugccgucuaccugagg

SEQ ID NO: 3031918 - RNA, 21 nt, Human
gaacaaggcaaggcugucaau

SEQ ID NO: 3031919 - RNA, 18 nt, Human
gaacaaggcaaggcuguc

SEQ ID NO: 3031920 - RNA, 17 nt, Human
gaacaaggcaaggcugu

SEQ ID NO: 3031921 - RNA, 15 nt, Human
gaacaaggcaaggcu

SEQ ID NO: 3031922 - RNA, 14 nt, Human
gaacaaggcaaggc

SEQ ID NO: 3031923 - RNA, 19 nt, Human
gaaauuuuuauuaaauuau

SEQ ID NO: 3031924 - RNA, 18 nt, Human
gaaauuuuuauuaaauua

SEQ ID NO: 3031925 - RNA, 17 nt, Human
gaaaucaccgaaaacgu

SEQ ID NO: 3031926 - RNA, 18 nt, Human
gaaagacuaucuaaaugu

SEQ ID NO: 3031927 - RNA, 16 nt, Human
gaaaggcuccaggagc

SEQ ID NO: 3031928 - RNA, 19 nt, Human
gaaaggcuccaggagcagc

SEQ ID NO: 3031929 - RNA, 18 nt, Human
gaaaggcuccaggagcag

SEQ ID NO: 3031930 - RNA, 17 nt, Human
gaaaggcuccaggagca

SEQ ID NO: 3031931 - RNA, 21 nt, Human
gaaaguacuucuccacccugc

SEQ ID NO: 3031932 - RNA, 18 nt, Human
gaaaauuuugauguuuua

SEQ ID NO: 3031933 - RNA, 14 nt, Human
gaaaauuuuaaaaa

SEQ ID NO: 3031934 - RNA, 18 nt, Human
cuuuugccguuauuaaaa

SEQ ID NO: 3031935 - RNA, 16 nt, Human
cuuuugccguuauuaa

SEQ ID NO: 3031936 - RNA, 15 nt, Human
cuuuuggucugugug

SEQ ID NO: 3031937 - RNA, 16 nt, Human
cuuuuggucuguguga

SEQ ID NO: 3031938 - RNA, 17 nt, Human
cuuuugucuaugggacu

SEQ ID NO: 3031939 - RNA, 14 nt, Human
cuuuugugcauuau

SEQ ID NO: 3031940 - RNA, 18 nt, Human
cuuuugugcauuaucuag

SEQ ID NO: 3031941 - RNA, 21 nt, Human
cuuuuuuuuuuuuuuugacaa

SEQ ID NO: 3031942 - RNA, 19 nt, Human
gaaaaaauauuuuccugcc

SEQ ID NO: 3031943 - RNA, 24 nt, Human
cuggaguuauugaagcagaguggc

SEQ ID NO: 3031944 - RNA, 23 nt, Human
cuggaguuauugaagcagagugg

SEQ ID NO: 3031945 - RNA, 21 nt, Human
cuggaguuauugaagcagagu

SEQ ID NO: 3031946 - RNA, 22 nt, Human
cuggaguuauugaagcagagug

SEQ ID NO: 3031947 - RNA, 21 nt, Human
cuggagaaaauggacguguua

SEQ ID NO: 3031948 - RNA, 16 nt, Human
cugcuucaaggauccu

SEQ ID NO: 3031949 - RNA, 14 nt, Human
cugcuucaaggauc

SEQ ID NO: 3031950 - RNA, 19 nt, Human
cugcuucaaggauccugag

SEQ ID NO: 3031951 - RNA, 23 nt, Human
cugcuucagccucccgaguagcu

SEQ ID NO: 3031952 - RNA, 14 nt, Human
cugcuuccagugag

SEQ ID NO: 3031953 - RNA, 15 nt, Human
cuggaugcagccuca

SEQ ID NO: 3031954 - RNA, 18 nt, Human
cuggaugcagccucacag

SEQ ID NO: 3031955 - RNA, 17 nt, Human
cuggaugcagccucaca

SEQ ID NO: 3031956 - RNA, 16 nt, Human
cuggaugcagccucac

SEQ ID NO: 3031957 - RNA, 13 nt, Human
cuggcucuuccag

SEQ ID NO: 3031958 - RNA, 15 nt, Human
cuggcucuuccaggc

SEQ ID NO: 3031959 - RNA, 14 nt, Human
cuggcucuuccagg

SEQ ID NO: 3031960 - RNA, 16 nt, Human
cugggacuacaggcac

SEQ ID NO: 3031961 - RNA, 17 nt, Human
cugggacuacaggcacc

SEQ ID NO: 3031962 - RNA, 21 nt, Human
cugggacuacaggcacccacc

SEQ ID NO: 3031963 - RNA, 17 nt, Human
cugggacuacaggugug

SEQ ID NO: 3031964 - RNA, 16 nt, Human
cuggcagcucagagag

SEQ ID NO: 3031965 - RNA, 19 nt, Human
cuggcagcucagagagggu

SEQ ID NO: 3031966 - RNA, 17 nt, Human
cuggcagcucagagagg

SEQ ID NO: 3031967 - RNA, 15 nt, Human
cuggcagcucagaga

SEQ ID NO: 3031968 - RNA, 19 nt, Human
cuggcagaguugaagacag

SEQ ID NO: 3031969 - RNA, 21 nt, Human
cuggcagaguugaagacagag

SEQ ID NO: 3031970 - RNA, 20 nt, Human
cuggcagaguugaagacaga

SEQ ID NO: 3031971 - RNA, 23 nt, Human
cuggcagccccuguucuggcaga

SEQ ID NO: 3031972 - RNA, 22 nt, Human
cuggcagaguugaagacagagc

SEQ ID NO: 3031973 - RNA, 13 nt, Human
cuggcagccccug

SEQ ID NO: 3031974 - RNA, 23 nt, Human
cugcccuuaccugccaggaagcc

SEQ ID NO: 3031975 - RNA, 22 nt, Human
cugcccuuaccugccaggaagc

SEQ ID NO: 3031976 - RNA, 11 nt, Human
cugcccugugg

SEQ ID NO: 3031977 - RNA, 12 nt, Human
cugcccuguggg

SEQ ID NO: 3031978 - RNA, 19 nt, Human
cugcccuuaccugccagga

SEQ ID NO: 3031979 - RNA, 24 nt, Human
cugcccugugaguacuacaguccu

SEQ ID NO: 3031980 - RNA, 19 nt, Human
cugccucgaacuggcugca

SEQ ID NO: 3031981 - RNA, 20 nt, Human
cugccucgaacuggcugcaa

SEQ ID NO: 3031982 - RNA, 14 nt, Human
cugccucgaacugg

SEQ ID NO: 3031983 - RNA, 23 nt, Human
cugccuccuuugugaggaagccg

SEQ ID NO: 3031984 - RNA, 21 nt, Human
cugccuccuuugugaggaagc

SEQ ID NO: 3031985 - RNA, 17 nt, Human
cugccuccuuugugagg

SEQ ID NO: 3031986 - RNA, 14 nt, Human
cugccuccuuugug

SEQ ID NO: 3031987 - RNA, 20 nt, Human
cugccuguucagcuccagcu

SEQ ID NO: 3031988 - RNA, 23 nt, Human
cugccuguucagcuccagcucac

SEQ ID NO: 3031989 - RNA, 17 nt, Human
cugcuaucaaagagguu

SEQ ID NO: 3031990 - RNA, 18 nt, Human
cugcugaaggcucgagca

SEQ ID NO: 3031991 - RNA, 23 nt, Human
cugcugaaggcucgagcaugccu

SEQ ID NO: 3031992 - RNA, 24 nt, Human
cugcugaaggcucgagcaugccug

SEQ ID NO: 3031993 - RNA, 23 nt, Human
cugucggagcccugucuccucuc

SEQ ID NO: 3031994 - RNA, 22 nt, Human
cugucuaaugaaaccugugucu

SEQ ID NO: 3031995 - RNA, 20 nt, Human
cuguccugggagugagcugg

SEQ ID NO: 3031996 - RNA, 13 nt, Human
cuguccugggagu

SEQ ID NO: 3031997 - RNA, 14 nt, Human
cuguccugggagug

SEQ ID NO: 3031998 - RNA, 14 nt, Human
cugucauuugagca

SEQ ID NO: 3031999 - RNA, 15 nt, Human
cuguagagugggagc

SEQ ID NO: 3032000 - RNA, 18 nt, Human
cuggucuuauuuguaaag

SEQ ID NO: 3032001 - RNA, 22 nt, Human
cuggugacaugucuuuucuugc

SEQ ID NO: 3032002 - RNA, 12 nt, Human
cuguucagcugg

SEQ ID NO: 3032003 - RNA, 16 nt, Human
cuguucagcuccagcu

SEQ ID NO: 3032004 - RNA, 18 nt, Human
cuguucagcuccagcuca

SEQ ID NO: 3032005 - RNA, 19 nt, Human
cuguucagcuccagcucac

SEQ ID NO: 3032006 - RNA, 22 nt, Human
cuguucagcuccagcucaccag

SEQ ID NO: 3032007 - RNA, 14 nt, Human
cuguucagcuccag

SEQ ID NO: 3032008 - RNA, 15 nt, Human
cuguucagcuccagc

SEQ ID NO: 3032009 - RNA, 18 nt, Human
cugugcucuggacaggca

SEQ ID NO: 3032010 - RNA, 22 nt, Human
cugugucagguggggcagcuug

SEQ ID NO: 3032011 - RNA, 17 nt, Human
cuguuacugucuucagu

SEQ ID NO: 3032012 - RNA, 13 nt, Human
cuguuacugucuu

SEQ ID NO: 3032013 - RNA, 17 nt, Human
cugugcucuggacaggc

SEQ ID NO: 3032014 - RNA, 15 nt, Human
cugugcucuggacag

SEQ ID NO: 3032015 - RNA, 18 nt, Human
cuguugcccaggcuggcg

SEQ ID NO: 3032016 - RNA, 15 nt, Human
cuguuggccagugug

SEQ ID NO: 3032017 - RNA, 12 nt, Human
cuguuggccagu

SEQ ID NO: 3032018 - RNA, 13 nt, Human
cuuaaauaaugug

SEQ ID NO: 3032019 - RNA, 14 nt, Human
cuuaaauaauguga

SEQ ID NO: 3032020 - RNA, 16 nt, Human
cuuaaauaaugugaaa

SEQ ID NO: 3032021 - RNA, 19 nt, Human
cuuaaauaaugugaaacug

SEQ ID NO: 3032022 - RNA, 19 nt, Human
gacacuucacgcccuuggc

SEQ ID NO: 3032023 - RNA, 16 nt, Human
gacagcuccuucuguc

SEQ ID NO: 3032024 - RNA, 16 nt, Human
gacagcccgggcucug

SEQ ID NO: 3032025 - RNA, 17 nt, Human
gacagcuccuucugucc

SEQ ID NO: 3032026 - RNA, 18 nt, Human
gacagcuccuucuguccu

SEQ ID NO: 3032027 - RNA, 14 nt, Human
gacagcccgggcuc

SEQ ID NO: 3032028 - RNA, 20 nt, Human
gacagucccugccaauggac

SEQ ID NO: 3032029 - RNA, 16 nt, Human
gacagucccugccaau

SEQ ID NO: 3032030 - RNA, 15 nt, Human
gacagucccugccaa

SEQ ID NO: 3032031 - RNA, 14 nt, Human
gacagucccugcca

SEQ ID NO: 3032032 - RNA, 12 nt, Human
gacagucccugc

SEQ ID NO: 3032033 - RNA, 11 nt, Human
gacagcucuua

SEQ ID NO: 3032034 - RNA, 10 nt, Human
gacagcucuu

SEQ ID NO: 3032035 - RNA, 19 nt, Human
gacagcuccuucuguccua

SEQ ID NO: 3032036 - RNA, 16 nt, Human
gacauuuuaugucuuu

SEQ ID NO: 3032037 - RNA, 20 nt, Human
gacauuuuaugucuuucuug

SEQ ID NO: 3032038 - RNA, 17 nt, Human
gacauugcggacagcca

SEQ ID NO: 3032039 - RNA, 23 nt, Human
gacauugcggacagccacggcca

SEQ ID NO: 3032040 - RNA, 18 nt, Human
gacccucaugcugccaau

SEQ ID NO: 3032041 - RNA, 21 nt, Human
gacccucaugcugccaauauc

SEQ ID NO: 3032042 - RNA, 22 nt, Human
gacccucaugcugccaauaucc

SEQ ID NO: 3032043 - RNA, 23 nt, Human
gacccucaugcugccaauauccu

SEQ ID NO: 3032044 - RNA, 14 nt, Human
gaccucaggccugg

SEQ ID NO: 3032045 - RNA, 19 nt, Human
gaccucaggugauccaccc

SEQ ID NO: 3032046 - RNA, 21 nt, Human
gaccucaggugagaagcagag

SEQ ID NO: 3032047 - RNA, 20 nt, Human
gaccucaggugauccaccca

SEQ ID NO: 3032048 - RNA, 21 nt, Human
gaccucaggugauccacccac

SEQ ID NO: 3032049 - RNA, 19 nt, Human
gaccucaggccugggggcu

SEQ ID NO: 3032050 - RNA, 19 nt, Human
gaccucaggugagaagcag

SEQ ID NO: 3032051 - RNA, 18 nt, Human
gaccucaggugagaagca

SEQ ID NO: 3032052 - RNA, 12 nt, Human
gacccucaugcu

SEQ ID NO: 3032053 - RNA, 14 nt, Human
gacccucaugcugc

SEQ ID NO: 3032054 - RNA, 16 nt, Human
gacccucaugcugcca

SEQ ID NO: 3032055 - RNA, 17 nt, Human
gacccucaugcugccaa

SEQ ID NO: 3032056 - RNA, 15 nt, Human
gacgcugugcugccc

SEQ ID NO: 3032057 - RNA, 18 nt, Human
gacgcugugcugcccugc

SEQ ID NO: 3032058 - RNA, 17 nt, Human
gacgcugugcugcccug

SEQ ID NO: 3032059 - RNA, 16 nt, Human
gacgcugugcugcccu

SEQ ID NO: 3032060 - RNA, 23 nt, Human
gacgcuacccgggaagggggcug

SEQ ID NO: 3032061 - RNA, 22 nt, Human
gacgcuacccgggaagggggcu

SEQ ID NO: 3032062 - RNA, 21 nt, Human
gacgccaucccagccccaaug

SEQ ID NO: 3032063 - RNA, 19 nt, Human
gacgccaucccagccccaa

SEQ ID NO: 3032064 - RNA, 13 nt, Human
gacgccaucccag

SEQ ID NO: 3032065 - RNA, 12 nt, Human
gacgccauccca

SEQ ID NO: 3032066 - RNA, 16 nt, Human
gaccucugcagcaaua

SEQ ID NO: 3032067 - RNA, 18 nt, Human
gaccucugcagcaauaaa

SEQ ID NO: 3032068 - RNA, 22 nt, Human
gaccucugcagcaauaaagcag

SEQ ID NO: 3032069 - RNA, 17 nt, Human
gaauguuuucaaauguu

SEQ ID NO: 3032070 - RNA, 18 nt, Human
gaauguuugccucugccu

SEQ ID NO: 3032071 - RNA, 19 nt, Human
gaauguuugccucugccuc

SEQ ID NO: 3032072 - RNA, 14 nt, Human
gaaugauuaauuaa

SEQ ID NO: 3032073 - RNA, 14 nt, Human
gaaugaugccauga

SEQ ID NO: 3032074 - RNA, 20 nt, Human
gaaugaugauccuaggcauu

SEQ ID NO: 3032075 - RNA, 15 nt, Human
gaauguuugccucug

SEQ ID NO: 3032076 - RNA, 19 nt, Human
gaaugcacaaacagaggcc

SEQ ID NO: 3032077 - RNA, 16 nt, Human
gaauguuugccucugc

SEQ ID NO: 3032078 - RNA, 17 nt, Human
gaauguuugccucugcc

SEQ ID NO: 3032079 - RNA, 18 nt, Human
gaaugcacaaacagaggc

SEQ ID NO: 3032080 - RNA, 17 nt, Human
gacacagcucuucucca

SEQ ID NO: 3032081 - RNA, 21 nt, Human
gacacagcucuucuccaggcu

SEQ ID NO: 3032082 - RNA, 12 nt, Human
gacacagcucuu

SEQ ID NO: 3032083 - RNA, 19 nt, Human
gacacagcucuucuccagg

SEQ ID NO: 3032084 - RNA, 20 nt, Human
gacacagcucuucuccaggc

SEQ ID NO: 3032085 - RNA, 15 nt, Human
gaauauauaaccagu

SEQ ID NO: 3032086 - RNA, 11 nt, Human
gaauauugcug

SEQ ID NO: 3032087 - RNA, 13 nt, Human
gaauauugcugau

SEQ ID NO: 3032088 - RNA, 12 nt, Human
gaauauugcuga

SEQ ID NO: 3032089 - RNA, 24 nt, Human
gaauauugcugauggugcaaugac

SEQ ID NO: 3032090 - RNA, 23 nt, Human
gaauauugcugauggugcaauga

SEQ ID NO: 3032091 - RNA, 22 nt, Human
gaauauugcugauggugcaaug

SEQ ID NO: 3032092 - RNA, 16 nt, Human
gagccccacccucaga

SEQ ID NO: 3032093 - RNA, 13 nt, Human
gagccccgaggcc

SEQ ID NO: 3032094 - RNA, 14 nt, Human
gagccccgaggccu

SEQ ID NO: 3032095 - RNA, 17 nt, Human
gagccccacccucagau

SEQ ID NO: 3032096 - RNA, 17 nt, Human
gagccccgaggccuucu

SEQ ID NO: 3032097 - RNA, 13 nt, Human
gagcaucaggcca

SEQ ID NO: 3032098 - RNA, 16 nt, Human
gagcaucaggccaggc

SEQ ID NO: 3032099 - RNA, 15 nt, Human
gagcaucaggccagg

SEQ ID NO: 3032100 - RNA, 13 nt, Human
gagcaugccugga

SEQ ID NO: 3032101 - RNA, 21 nt, Human
gagcagggcucagcggggaca

SEQ ID NO: 3032102 - RNA, 14 nt, Human
gagcaucaggccag

SEQ ID NO: 3032103 - RNA, 13 nt, Human
gagcccugguggc

SEQ ID NO: 3032104 - RNA, 14 nt, Human
gagcccugguggca

SEQ ID NO: 3032105 - RNA, 14 nt, Human
gagggccugcaagg

SEQ ID NO: 3032106 - RNA, 21 nt, Human
gagggccugcaagggagugag

SEQ ID NO: 3032107 - RNA, 17 nt, Human
gagggccugcaagggag

SEQ ID NO: 3032108 - RNA, 21 nt, Human
gaggcauuuguuugaacugau

SEQ ID NO: 3032109 - RNA, 21 nt, Human
gaggcaugugaugagaggaaa

SEQ ID NO: 3032110 - RNA, 20 nt, Human
gaggcaugugaugagaggaa

SEQ ID NO: 3032111 - RNA, 22 nt, Human
gaggcaugugaugagaggaaau

SEQ ID NO: 3032112 - RNA, 19 nt, Human
gaggcauuuguuugaacug

SEQ ID NO: 3032113 - RNA, 16 nt, Human
gaggacuuuucuuugu

SEQ ID NO: 3032114 - RNA, 20 nt, Human
gaggacuuuucuuuguggcu

SEQ ID NO: 3032115 - RNA, 23 nt, Human
gaggacuuuucuuuguggcuucc

SEQ ID NO: 3032116 - RNA, 18 nt, Human
gaggcagggucucacucu

SEQ ID NO: 3032117 - RNA, 19 nt, Human
gaggcagggucucacucug

SEQ ID NO: 3032118 - RNA, 20 nt, Human
gaggcagggucucacucugu

SEQ ID NO: 3032119 - RNA, 12 nt, Human
gaggagagagga

SEQ ID NO: 3032120 - RNA, 15 nt, Human
gaggagagaggaccc

SEQ ID NO: 3032121 - RNA, 14 nt, Human
gaggagagaggacc

SEQ ID NO: 3032122 - RNA, 14 nt, Human
gagauuggaaggaa

SEQ ID NO: 3032123 - RNA, 21 nt, Human
gagauugcaccacugcacucc

SEQ ID NO: 3032124 - RNA, 15 nt, Human
gagaggacccccuga

SEQ ID NO: 3032125 - RNA, 12 nt, Human
gagaggaaauca

SEQ ID NO: 3032126 - RNA, 20 nt, Human
gagagcugggugucaagagg

SEQ ID NO: 3032127 - RNA, 13 nt, Human
gagagcugggugu

SEQ ID NO: 3032128 - RNA, 21 nt, Human
gagagcuagcagcagggaggg

SEQ ID NO: 3032129 - RNA, 15 nt, Human
gagagcuagcagcag

SEQ ID NO: 3032130 - RNA, 20 nt, Human
gagagccuuccagggguggg

SEQ ID NO: 3032131 - RNA, 18 nt, Human
gagagccuuccaggggug

SEQ ID NO: 3032132 - RNA, 16 nt, Human
gagagccuuccagggg

SEQ ID NO: 3032133 - RNA, 15 nt, Human
gagagccuuccaggg

SEQ ID NO: 3032134 - RNA, 13 nt, Human
gagacuccugcag

SEQ ID NO: 3032135 - RNA, 14 nt, Human
gacuuuuccaaccc

SEQ ID NO: 3032136 - RNA, 19 nt, Human
gacuuuuccaacccucauc

SEQ ID NO: 3032137 - RNA, 15 nt, Human
gagaaugaaagggcc

SEQ ID NO: 3032138 - RNA, 23 nt, Human
gagaaugaaagggcccagagagg

SEQ ID NO: 3032139 - RNA, 21 nt, Human
gagacccugucucaaaaaaag

SEQ ID NO: 3032140 - RNA, 18 nt, Human
gagacgggggcagagagg

SEQ ID NO: 3032141 - RNA, 16 nt, Human
gagacggagucccacc

SEQ ID NO: 3032142 - RNA, 19 nt, Human
gagacggagucccaccuug

SEQ ID NO: 3032143 - RNA, 14 nt, Human
gagacggaguccca

SEQ ID NO: 3032144 - RNA, 15 nt, Human
gcagcucuccccuuc

SEQ ID NO: 3032145 - RNA, 18 nt, Human
gcagcccaccccucaaca

SEQ ID NO: 3032146 - RNA, 16 nt, Human
gcagccaggccacaag

SEQ ID NO: 3032147 - RNA, 15 nt, Human
gcagccacauuccug

SEQ ID NO: 3032148 - RNA, 20 nt, Human
gcacucagaagacacugaug

SEQ ID NO: 3032149 - RNA, 17 nt, Human
gcacucagaagacacug

SEQ ID NO: 3032150 - RNA, 18 nt, Human
gcaagugagagcugggug

SEQ ID NO: 3032151 - RNA, 14 nt, Human
gcacuccagccugg

SEQ ID NO: 3032152 - RNA, 14 nt, Human
gcacuccccugcug

SEQ ID NO: 3032153 - RNA, 13 nt, Human
gcacuccccugcu

SEQ ID NO: 3032154 - RNA, 19 nt, Human
gcacuuuguucuggcucuu

SEQ ID NO: 3032155 - RNA, 18 nt, Human
gcacuuuguucuggcucu

SEQ ID NO: 3032156 - RNA, 15 nt, Human
gcacuccccugcugg

SEQ ID NO: 3032157 - RNA, 12 nt, Human
gcacuccccugc

SEQ ID NO: 3032158 - RNA, 22 nt, Human
gcacuuuguucuggcucuucca

SEQ ID NO: 3032159 - RNA, 23 nt, Human
gcagcauauucaggaagcucagg

SEQ ID NO: 3032160 - RNA, 19 nt, Human
gcagcauauucaggaagcu

SEQ ID NO: 3032161 - RNA, 18 nt, Human
gcagcauauucaggaagc

SEQ ID NO: 3032162 - RNA, 17 nt, Human
gcagcauauucaggaag

SEQ ID NO: 3032163 - RNA, 14 nt, Human
gcagagggcacaga

SEQ ID NO: 3032164 - RNA, 21 nt, Human
gcagaggaaagcaaaggagau

SEQ ID NO: 3032165 - RNA, 20 nt, Human
gcagaggaaagcaaaggaga

SEQ ID NO: 3032166 - RNA, 18 nt, Human
gcagaggaaagcaaagga

SEQ ID NO: 3032167 - RNA, 14 nt, Human
gcagaggaaagcaa

SEQ ID NO: 3032168 - RNA, 13 nt, Human
gcagaggaaagca

SEQ ID NO: 3032169 - RNA, 14 nt, Human
gcagucuucaguuu

SEQ ID NO: 3032170 - RNA, 15 nt, Human
gcauacguacacauu

SEQ ID NO: 3032171 - RNA, 16 nt, Human
gcauacguacacauuu

SEQ ID NO: 3032172 - RNA, 17 nt, Human
gcauacguacacauuuu

SEQ ID NO: 3032173 - RNA, 18 nt, Human
gcauccaguaucuugaag

SEQ ID NO: 3032174 - RNA, 17 nt, Human
gcauccaguaucuugaa

SEQ ID NO: 3032175 - RNA, 14 nt, Human
gcauccaguaucuu

SEQ ID NO: 3032176 - RNA, 13 nt, Human
gcauccuggcacc

SEQ ID NO: 3032177 - RNA, 21 nt, Human
gcauggcugccaaugggagcu

SEQ ID NO: 3032178 - RNA, 19 nt, Human
gcaugugaugagaggaaau

SEQ ID NO: 3032179 - RNA, 18 nt, Human
gcaugugaugagaggaaa

SEQ ID NO: 3032180 - RNA, 21 nt, Human
gcaugugaugagaggaaauca

SEQ ID NO: 3032181 - RNA, 15 nt, Human
gcauugugggaaggg

SEQ ID NO: 3032182 - RNA, 13 nt, Human
gcauugugggaag

SEQ ID NO: 3032183 - RNA, 15 nt, Human
gcauuuacuuugugu

SEQ ID NO: 3032184 - RNA, 18 nt, Human
gcauuuaaaagauacagu

SEQ ID NO: 3032185 - RNA, 22 nt, Human
gcauuuaaaagauacaguuacu

SEQ ID NO: 3032186 - RNA, 18 nt, Human
gcauugugggaaggggag

SEQ ID NO: 3032187 - RNA, 16 nt, Human
gcauugugggaagggg

SEQ ID NO: 3032188 - RNA, 16 nt, Human
gcauuuaaaagauaca

SEQ ID NO: 3032189 - RNA, 17 nt, Human
gcauuuaaaagauacag

SEQ ID NO: 3032190 - RNA, 19 nt, Human
gaucucuugagccugggag

SEQ ID NO: 3032191 - RNA, 18 nt, Human
gaucucuugagccuggga

SEQ ID NO: 3032192 - RNA, 15 nt, Human
gaucucuaacuucac

SEQ ID NO: 3032193 - RNA, 13 nt, Human
gaugauccuaggc

SEQ ID NO: 3032194 - RNA, 22 nt, Human
gaugauuggaggggggaggugg

SEQ ID NO: 3032195 - RNA, 23 nt, Human
gaugcuucucacugccaugccag

SEQ ID NO: 3032196 - RNA, 21 nt, Human
gaugcuucuucagagacuccu

SEQ ID NO: 3032197 - RNA, 20 nt, Human
gaugcuucuucagagacucc

SEQ ID NO: 3032198 - RNA, 17 nt, Human
gaugcuucuucagagac

SEQ ID NO: 3032199 - RNA, 16 nt, Human
gauacaguuacucaga

SEQ ID NO: 3032200 - RNA, 19 nt, Human
gauacaguuacucagaauu

SEQ ID NO: 3032201 - RNA, 23 nt, Human
gauacaguuacucagaauucucu

SEQ ID NO: 3032202 - RNA, 17 nt, Human
gauacuguaucaugaca

SEQ ID NO: 3032203 - RNA, 21 nt, Human
gauacuguaucaugacaaaga

SEQ ID NO: 3032204 - RNA, 12 nt, Human
gauccaagcugg

SEQ ID NO: 3032205 - RNA, 16 nt, Human
gauccaagcugguccc

SEQ ID NO: 3032206 - RNA, 17 nt, Human
gauccaagcugguccca

SEQ ID NO: 3032207 - RNA, 19 nt, Human
gauccaagcuggucccacu

SEQ ID NO: 3032208 - RNA, 22 nt, Human
gauccacccaccucagccuccc

SEQ ID NO: 3032209 - RNA, 20 nt, Human
gauccacccaccucagccuc

SEQ ID NO: 3032210 - RNA, 21 nt, Human
gauccacccaccucagccucc

SEQ ID NO: 3032211 - RNA, 21 nt, Human
gauccaagcuggucccacuca

SEQ ID NO: 3032212 - RNA, 18 nt, Human
gauccacccaccucagcc

SEQ ID NO: 3032213 - RNA, 19 nt, Human
gauccacccaccucagccu

SEQ ID NO: 3032214 - RNA, 23 nt, Human
gaucaaaagguuaauaaaguaau

SEQ ID NO: 3032215 - RNA, 17 nt, Human
gauauuuuuuucuuuuc

SEQ ID NO: 3032216 - RNA, 20 nt, Human
gaucaaaagguuaauaaagu

SEQ ID NO: 3032217 - RNA, 16 nt, Human
gcaagugagagcuggg

SEQ ID NO: 3032218 - RNA, 15 nt, Human
gcaagugagagcugg

SEQ ID NO: 3032219 - RNA, 20 nt, Human
gcaaccuccgccucuugggu

SEQ ID NO: 3032220 - RNA, 14 nt, Human
gcaacccccagccu

SEQ ID NO: 3032221 - RNA, 15 nt, Human
gcaacccccagccug

SEQ ID NO: 3032222 - RNA, 16 nt, Human
gcaacccccagccugc

SEQ ID NO: 3032223 - RNA, 19 nt, Human
gcaaccuccgccucuuggg

SEQ ID NO: 3032224 - RNA, 13 nt, Human
gcaaccaccacca

SEQ ID NO: 3032225 - RNA, 18 nt, Human
gcaaccaccaccaaccac

SEQ ID NO: 3032226 - RNA, 16 nt, Human
gcaaccaccaccaacc

SEQ ID NO: 3032227 - RNA, 16 nt, Human
gcaacaggcugggcuu

SEQ ID NO: 3032228 - RNA, 19 nt, Human
gcaacaggcugggcuucag

SEQ ID NO: 3032229 - RNA, 14 nt, Human
gcaacaggcugggc

SEQ ID NO: 3032230 - RNA, 15 nt, Human
gcaacaggcugggcu

SEQ ID NO: 3032231 - RNA, 13 nt, Human
gcaacaggcuggg

SEQ ID NO: 3032232 - RNA, 12 nt, Human
gauucuucugcu

SEQ ID NO: 3032233 - RNA, 13 nt, Human
gauucuucugcuu

SEQ ID NO: 3032234 - RNA, 15 nt, Human
gauucuucugcuuca

SEQ ID NO: 3032235 - RNA, 19 nt, Human
gauuuaacagaaauguaca

SEQ ID NO: 3032236 - RNA, 16 nt, Human
gauuuaacagaaaugu

SEQ ID NO: 3032237 - RNA, 17 nt, Human
gauuuaacagaaaugua

SEQ ID NO: 3032238 - RNA, 18 nt, Human
gauuuaacagaaauguac

SEQ ID NO: 3032239 - RNA, 11 nt, Human
gauuucacucu

SEQ ID NO: 3032240 - RNA, 18 nt, Human
gauuuuuuuuuccuucag

SEQ ID NO: 3032241 - RNA, 17 nt, Human
gauuuuuuuuuccuuca

SEQ ID NO: 3032242 - RNA, 12 nt, Human
gauuucacucuc

SEQ ID NO: 3032243 - RNA, 16 nt, Human
gauuuuuuuuuccuuc

SEQ ID NO: 3032244 - RNA, 17 nt, Human
gcaaaagaugcuucuca

SEQ ID NO: 3032245 - RNA, 22 nt, Human
gcaaaagaugcuucucacugcc

SEQ ID NO: 3032246 - RNA, 14 nt, Human
gcaaaaaggcagga

SEQ ID NO: 3032247 - RNA, 21 nt, Human
gauuuuuuuuuccuucagugc

SEQ ID NO: 3032248 - RNA, 20 nt, Human
ggaaugauauaagguuuuuu

SEQ ID NO: 3032249 - RNA, 12 nt, Human
ggacacagcucu

SEQ ID NO: 3032250 - RNA, 19 nt, Human
ggaaugaaugucaguguga

SEQ ID NO: 3032251 - RNA, 13 nt, Human
ggacacagcucuu

SEQ ID NO: 3032252 - RNA, 21 nt, Human
ggacacagcucuucuccaggc

SEQ ID NO: 3032253 - RNA, 12 nt, Human
ggacacccugug

SEQ ID NO: 3032254 - RNA, 16 nt, Human
ggaauauauaaccagu

SEQ ID NO: 3032255 - RNA, 19 nt, Human
ggaauaccugucccccuga

SEQ ID NO: 3032256 - RNA, 16 nt, Human
ggaauaccuguccccc

SEQ ID NO: 3032257 - RNA, 15 nt, Human
ggaauaccugucccc

SEQ ID NO: 3032258 - RNA, 21 nt, Human
ggaagcucagggccuggcuca

SEQ ID NO: 3032259 - RNA, 17 nt, Human
ggaagcucagggccugg

SEQ ID NO: 3032260 - RNA, 16 nt, Human
ggaagcucagggccug

SEQ ID NO: 3032261 - RNA, 13 nt, Human
ggacauggacaag

SEQ ID NO: 3032262 - RNA, 23 nt, Human
ggacacccugugauggggcccug

SEQ ID NO: 3032263 - RNA, 13 nt, Human
ggacacccuguga

SEQ ID NO: 3032264 - RNA, 23 nt, Human
ggacaggcauguucucugaggac

SEQ ID NO: 3032265 - RNA, 17 nt, Human
ggacagggaggugaccc

SEQ ID NO: 3032266 - RNA, 23 nt, Human
ggaaaucaccgaaaacguggcug

SEQ ID NO: 3032267 - RNA, 21 nt, Human
ggaagccagcaggcucucagg

SEQ ID NO: 3032268 - RNA, 23 nt, Human
ggaagccagcaggcucucaggcc

SEQ ID NO: 3032269 - RNA, 22 nt, Human
ggaagccagcaggcucucaggc

SEQ ID NO: 3032270 - RNA, 18 nt, Human
ggaagccgcuggggccag

SEQ ID NO: 3032271 - RNA, 13 nt, Human
ggaaaggaaugca

SEQ ID NO: 3032272 - RNA, 17 nt, Human
ggaaaggaaugcaaaga

SEQ ID NO: 3032273 - RNA, 14 nt, Human
ggaaagaggcucug

SEQ ID NO: 3032274 - RNA, 20 nt, Human
ggaaagacuuuuccaacccu

SEQ ID NO: 3032275 - RNA, 17 nt, Human
ggaaagaguaggaagac

SEQ ID NO: 3032276 - RNA, 16 nt, Human
ggaaagaguaggaaga

SEQ ID NO: 3032277 - RNA, 19 nt, Human
ggaaagcaaaggagauugg

SEQ ID NO: 3032278 - RNA, 20 nt, Human
ggaaacagcuaaugggacac

SEQ ID NO: 3032279 - RNA, 15 nt, Human
ggaaacccagcucug

SEQ ID NO: 3032280 - RNA, 15 nt, Human
gcuuuuuaauauuga

SEQ ID NO: 3032281 - RNA, 13 nt, Human
gcuuuugugcauu

SEQ ID NO: 3032282 - RNA, 19 nt, Human
gcuuuugugcauuaucuag

SEQ ID NO: 3032283 - RNA, 13 nt, Human
gcuuuugcauauu

SEQ ID NO: 3032284 - RNA, 19 nt, Human
gcuugggcuucauccuccu

SEQ ID NO: 3032285 - RNA, 22 nt, Human
gcuuggggaccagagcugccac

SEQ ID NO: 3032286 - RNA, 21 nt, Human
gcuuggggaccagagcugcca

SEQ ID NO: 3032287 - RNA, 20 nt, Human
gcuuggggaccagagcugcc

SEQ ID NO: 3032288 - RNA, 18 nt, Human
gcuuggggaccagagcug

SEQ ID NO: 3032289 - RNA, 17 nt, Human
gcuuggggaccagagcu

SEQ ID NO: 3032290 - RNA, 13 nt, Human
gcuuucuacccag

SEQ ID NO: 3032291 - RNA, 19 nt, Human
gcuuucuacccagcgagcc

SEQ ID NO: 3032292 - RNA, 22 nt, Human
gcuuucuacccagcgagcccug

SEQ ID NO: 3032293 - RNA, 14 nt, Human
gcuuaacuucacau

SEQ ID NO: 3032294 - RNA, 17 nt, Human
gcuuaacuucacauauu

SEQ ID NO: 3032295 - RNA, 16 nt, Human
gcuucuucagagacuc

SEQ ID NO: 3032296 - RNA, 16 nt, Human
gcuuaacuucacauau

SEQ ID NO: 3032297 - RNA, 16 nt, Human
gcuuggggaccagagc

SEQ ID NO: 3032298 - RNA, 23 nt, Human
gcuugggcuucauccuccucaga

SEQ ID NO: 3032299 - RNA, 19 nt, Human
gcuugaccgugaggccaga

SEQ ID NO: 3032300 - RNA, 18 nt, Human
gcuugaccgugaggccag

SEQ ID NO: 3032301 - RNA, 17 nt, Human
gcuugaccgugaggcca

SEQ ID NO: 3032302 - RNA, 16 nt, Human
gcuugaccgugaggcc

SEQ ID NO: 3032303 - RNA, 21 nt, Human
gcuucuucagagacuccugca

SEQ ID NO: 3032304 - RNA, 19 nt, Human
gcuucuucagagacuccug

SEQ ID NO: 3032305 - RNA, 14 nt, Human
gcugaggugggagg

SEQ ID NO: 3032306 - RNA, 23 nt, Human
gcugagggugagugggugaauaa

SEQ ID NO: 3032307 - RNA, 18 nt, Human
gcugagggugagugggug

SEQ ID NO: 3032308 - RNA, 16 nt, Human
gcugcacccucaggca

SEQ ID NO: 3032309 - RNA, 13 nt, Human
gcugcaccggcug

SEQ ID NO: 3032310 - RNA, 19 nt, Human
gcugcacccucaggcaggu

SEQ ID NO: 3032311 - RNA, 18 nt, Human
gcugcacccucaggcagg

SEQ ID NO: 3032312 - RNA, 19 nt, Human
gcugccccuggcagccccu

SEQ ID NO: 3032313 - RNA, 18 nt, Human
gcugccccuggcagcccc

SEQ ID NO: 3032314 - RNA, 20 nt, Human
gcugccccuggcagccccug

SEQ ID NO: 3032315 - RNA, 17 nt, Human
gcugccccuggcagccc

SEQ ID NO: 3032316 - RNA, 21 nt, Human
gcugccugggaucccucaucc

SEQ ID NO: 3032317 - RNA, 17 nt, Human
gcugccuguucagcucc

SEQ ID NO: 3032318 - RNA, 12 nt, Human
gcugccuguuca

SEQ ID NO: 3032319 - RNA, 13 nt, Human
gcugccuguucag

SEQ ID NO: 3032320 - RNA, 20 nt, Human
gcugccugggaucccucauc

SEQ ID NO: 3032321 - RNA, 16 nt, Human
gcugccucucccauca

SEQ ID NO: 3032322 - RNA, 21 nt, Human
gcuggguucuacccaggugcu

SEQ ID NO: 3032323 - RNA, 20 nt, Human
gcuggguucuacccaggugc

SEQ ID NO: 3032324 - RNA, 17 nt, Human
gcuggguucuacccagg

SEQ ID NO: 3032325 - RNA, 18 nt, Human
gcuggguucuacccaggu

SEQ ID NO: 3032326 - RNA, 23 nt, Human
gcugggguggggaccucaggccu

SEQ ID NO: 3032327 - RNA, 22 nt, Human
gcugggguggggaccucaggcc

SEQ ID NO: 3032328 - RNA, 14 nt, Human
gcugggcagguugg

SEQ ID NO: 3032329 - RNA, 17 nt, Human
gcuggcuguuggcuggg

SEQ ID NO: 3032330 - RNA, 20 nt, Human
gcuggcuguuggcugggggc

SEQ ID NO: 3032331 - RNA, 23 nt, Human
gcuggcuguuggcugggggccuc

SEQ ID NO: 3032332 - RNA, 19 nt, Human
gcugggguggggaccucag

SEQ ID NO: 3032333 - RNA, 17 nt, Human
gcugggguggggaccuc

SEQ ID NO: 3032334 - RNA, 14 nt, Human
gcuggcgugcagug

SEQ ID NO: 3032335 - RNA, 15 nt, Human
gcuggcgugcagugg

SEQ ID NO: 3032336 - RNA, 18 nt, Human
gcuggcgugcaguggugc

SEQ ID NO: 3032337 - RNA, 18 nt, Human
gcuggcuguuggcugggg

SEQ ID NO: 3032338 - RNA, 19 nt, Human
gcuggcuguuggcuggggg

SEQ ID NO: 3032339 - RNA, 12 nt, Human
gcugcugaaggc

SEQ ID NO: 3032340 - RNA, 17 nt, Human
gcuguaucccaugagcc

SEQ ID NO: 3032341 - RNA, 13 nt, Human
gcugugcucugga

SEQ ID NO: 3032342 - RNA, 14 nt, Human
gcugugcugcccug

SEQ ID NO: 3032343 - RNA, 15 nt, Human
gcugugcucuggaca

SEQ ID NO: 3032344 - RNA, 16 nt, Human
gcugugcucuggacag

SEQ ID NO: 3032345 - RNA, 14 nt, Human
gcuguuggcugggg

SEQ ID NO: 3032346 - RNA, 16 nt, Human
gcuguuggcugggggc

SEQ ID NO: 3032347 - RNA, 20 nt, Human
gcuguuggcugggggccuca

SEQ ID NO: 3032348 - RNA, 15 nt, Human
gcuguuggcuggggg

SEQ ID NO: 3032349 - RNA, 17 nt, Human
gcugugcugcccugccc

SEQ ID NO: 3032350 - RNA, 16 nt, Human
gcugugcugcccugcc

SEQ ID NO: 3032351 - RNA, 15 nt, Human
gcugugcugcccugc

SEQ ID NO: 3032352 - RNA, 19 nt, Human
gcccaggaguuuggccaga

SEQ ID NO: 3032353 - RNA, 20 nt, Human
gcccaggaguuuggccagaa

SEQ ID NO: 3032354 - RNA, 11 nt, Human
gcccaggcagg

SEQ ID NO: 3032355 - RNA, 18 nt, Human
gcccaggaguuuggccag

SEQ ID NO: 3032356 - RNA, 18 nt, Human
gcccaggccccugccacc

SEQ ID NO: 3032357 - RNA, 20 nt, Human
gcccaggccccugccacccu

SEQ ID NO: 3032358 - RNA, 21 nt, Human
gcccaggccccugccacccug

SEQ ID NO: 3032359 - RNA, 11 nt, Human
gcccaggcccc

SEQ ID NO: 3032360 - RNA, 12 nt, Human
gcccaggccccu

SEQ ID NO: 3032361 - RNA, 23 nt, Human
gcccacgcuggagugcagugagc

SEQ ID NO: 3032362 - RNA, 19 nt, Human
gcccacgcuggagugcagu

SEQ ID NO: 3032363 - RNA, 21 nt, Human
gcccacgcuggagugcaguga

SEQ ID NO: 3032364 - RNA, 13 nt, Human
gcccacuucugcc

SEQ ID NO: 3032365 - RNA, 23 nt, Human
gcccaggaaaggcuccaggagca

SEQ ID NO: 3032366 - RNA, 22 nt, Human
gcccaggaaaggcuccaggagc

SEQ ID NO: 3032367 - RNA, 24 nt, Human
gcccaggaaaggcuccaggagcag

SEQ ID NO: 3032368 - RNA, 21 nt, Human
gcccacgcccccacuggugac

SEQ ID NO: 3032369 - RNA, 17 nt, Human
gcccacgcccccacugg

SEQ ID NO: 3032370 - RNA, 16 nt, Human
gcccacgcccccacug

SEQ ID NO: 3032371 - RNA, 15 nt, Human
gcccacgcccccacu

SEQ ID NO: 3032372 - RNA, 18 nt, Human
gcauuuacuuuguguuca

SEQ ID NO: 3032373 - RNA, 21 nt, Human
gccccaaaacucuccucugcu

SEQ ID NO: 3032374 - RNA, 20 nt, Human
gccccaaaacucuccucugc

SEQ ID NO: 3032375 - RNA, 12 nt, Human
gccccugcuggu

SEQ ID NO: 3032376 - RNA, 15 nt, Human
gccccugcugguuca

SEQ ID NO: 3032377 - RNA, 16 nt, Human
gccccugcugguucag

SEQ ID NO: 3032378 - RNA, 15 nt, Human
gccccuggcagcccc

SEQ ID NO: 3032379 - RNA, 12 nt, Human
gccccuggcagc

SEQ ID NO: 3032380 - RNA, 17 nt, Human
gccccuggcagccccug

SEQ ID NO: 3032381 - RNA, 16 nt, Human
gccccuggcagccccu

SEQ ID NO: 3032382 - RNA, 15 nt, Human
gcccugcccaccugg

SEQ ID NO: 3032383 - RNA, 14 nt, Human
gcccugcccaccug

SEQ ID NO: 3032384 - RNA, 23 nt, Human
gcccuuaccugccaggaagccag

SEQ ID NO: 3032385 - RNA, 22 nt, Human
gcccuuaccugccaggaagcca

SEQ ID NO: 3032386 - RNA, 21 nt, Human
gcccuuaccugccaggaagcc

SEQ ID NO: 3032387 - RNA, 17 nt, Human
gcccugugggcccccaa

SEQ ID NO: 3032388 - RNA, 16 nt, Human
gcccugugggccccca

SEQ ID NO: 3032389 - RNA, 16 nt, Human
gccuacaggagugagc

SEQ ID NO: 3032390 - RNA, 12 nt, Human
gccuagcauacg

SEQ ID NO: 3032391 - RNA, 19 nt, Human
gccuagcauacguacacau

SEQ ID NO: 3032392 - RNA, 17 nt, Human
gccuacaggagugagca

SEQ ID NO: 3032393 - RNA, 14 nt, Human
gccucugggacugg

SEQ ID NO: 3032394 - RNA, 16 nt, Human
gccucgaacuggcugc

SEQ ID NO: 3032395 - RNA, 13 nt, Human
gccucgaacuggc

SEQ ID NO: 3032396 - RNA, 22 nt, Human
gccuccuuugugaggaagccgc

SEQ ID NO: 3032397 - RNA, 16 nt, Human
gcggccuuuggcuuca

SEQ ID NO: 3032398 - RNA, 15 nt, Human
gcggcuggcagccca

SEQ ID NO: 3032399 - RNA, 21 nt, Human
gcgcagcauauucaggaagcu

SEQ ID NO: 3032400 - RNA, 20 nt, Human
gcgcagcauauucaggaagc

SEQ ID NO: 3032401 - RNA, 23 nt, Human
gcgauucuucugcuucagccucc

SEQ ID NO: 3032402 - RNA, 23 nt, Human
gccuugaccauucuccaccugcc

SEQ ID NO: 3032403 - RNA, 22 nt, Human
gcgauucuucugcuucagccuc

SEQ ID NO: 3032404 - RNA, 17 nt, Human
gcgauucuucugcuuca

SEQ ID NO: 3032405 - RNA, 23 nt, Human
gccuugaacuuugaccucugcag

SEQ ID NO: 3032406 - RNA, 22 nt, Human
gccuugaccauucuccaccugc

SEQ ID NO: 3032407 - RNA, 21 nt, Human
gccuugaccauucuccaccug

SEQ ID NO: 3032408 - RNA, 11 nt, Human
gccugggcaga

SEQ ID NO: 3032409 - RNA, 21 nt, Human
gccugggaucccucauccuca

SEQ ID NO: 3032410 - RNA, 23 nt, Human
gccugggaucccucauccucaua

SEQ ID NO: 3032411 - RNA, 19 nt, Human
gccugugccucugggacug

SEQ ID NO: 3032412 - RNA, 14 nt, Human
gccuugaacuuuga

SEQ ID NO: 3032413 - RNA, 15 nt, Human
gccuguucagcucca

SEQ ID NO: 3032414 - RNA, 14 nt, Human
gccuguucagcucc

SEQ ID NO: 3032415 - RNA, 16 nt, Human
gccuguucagcuccag

SEQ ID NO: 3032416 - RNA, 17 nt, Human
gccuguucagcuccagc

SEQ ID NO: 3032417 - RNA, 15 nt, Human
gccuucucugaagga

SEQ ID NO: 3032418 - RNA, 16 nt, Human
gccuucucugaaggac

SEQ ID NO: 3032419 - RNA, 20 nt, Human
gcucagggccuggcucaggu

SEQ ID NO: 3032420 - RNA, 17 nt, Human
gcucagggccuggcuca

SEQ ID NO: 3032421 - RNA, 13 nt, Human
gcucaggaguuug

SEQ ID NO: 3032422 - RNA, 19 nt, Human
gcucagggccuggcucagg

SEQ ID NO: 3032423 - RNA, 18 nt, Human
gcucagggccuggcucag

SEQ ID NO: 3032424 - RNA, 18 nt, Human
gcuaagugauccucccac

SEQ ID NO: 3032425 - RNA, 22 nt, Human
gcuaagugauccucccaccuca

SEQ ID NO: 3032426 - RNA, 20 nt, Human
gcuaggaccccuccaugugg

SEQ ID NO: 3032427 - RNA, 14 nt, Human
gcuaguugggcuuc

SEQ ID NO: 3032428 - RNA, 16 nt, Human
gcuaguugggcuuccu

SEQ ID NO: 3032429 - RNA, 19 nt, Human
aaaauaauuagguauuuuc

SEQ ID NO: 3032430 - RNA, 13 nt, Human
aaaauaccaagga

SEQ ID NO: 3032431 - RNA, 21 nt, Human
aaaaggaagcuuacaugccua

SEQ ID NO: 3032432 - RNA, 22 nt, Human
aaaaggagccaauuuaaagaaa

SEQ ID NO: 3032433 - RNA, 13 nt, Human
aaaaggaugcaca

SEQ ID NO: 3032434 - RNA, 14 nt, Human
aaaaggaugcacag

SEQ ID NO: 3032435 - RNA, 15 nt, Human
aaaaggaugcacaga

SEQ ID NO: 3032436 - RNA, 19 nt, Human
aaaaggaugcacagaguug

SEQ ID NO: 3032437 - RNA, 22 nt, Human
aaaaggaugcacagaguuguua

SEQ ID NO: 3032438 - RNA, 19 nt, Human
aaaagguaugcaaucaaau

SEQ ID NO: 3032439 - RNA, 11 nt, Human
aaaaggcagga

SEQ ID NO: 3032440 - RNA, 17 nt, Human
aaaagguuaauaaagua

SEQ ID NO: 3032441 - RNA, 16 nt, Human
aaaagguuaauaaagu

SEQ ID NO: 3032442 - RNA, 16 nt, Human
aaaauauuuuccugcc

SEQ ID NO: 3032443 - RNA, 20 nt, Human
aaaaugguguuuuaucuucu

SEQ ID NO: 3032444 - RNA, 17 nt, Human
gggcuggguucuaccca

SEQ ID NO: 3032445 - RNA, 21 nt, Human
gggcugcaccggcuggccugg

SEQ ID NO: 3032446 - RNA, 20 nt, Human
gggcugcaccggcuggccug

SEQ ID NO: 3032447 - RNA, 15 nt, Human
gggcugggcagagga

SEQ ID NO: 3032448 - RNA, 12 nt, Human
gggcugggcaga

SEQ ID NO: 3032449 - RNA, 19 nt, Human
gggcugcaccggcuggccu

SEQ ID NO: 3032450 - RNA, 17 nt, Human
gggcugcaccggcuggc

SEQ ID NO: 3032451 - RNA, 21 nt, Human
gggcucagcggggacagcucc

SEQ ID NO: 3032452 - RNA, 13 nt, Human
gggcuccagacac

SEQ ID NO: 3032453 - RNA, 10 nt, Human
gggcuccaga

SEQ ID NO: 3032454 - RNA, 22 nt, Human
gggcucagcaaaagaugcuucu

SEQ ID NO: 3032455 - RNA, 18 nt, Human
gggcucagcaaaagaugc

SEQ ID NO: 3032456 - RNA, 15 nt, Human
gggcuaguugggcuu

SEQ ID NO: 3032457 - RNA, 17 nt, Human
gggcucagcggggacag

SEQ ID NO: 3032458 - RNA, 19 nt, Human
gggcucagcggggacagcu

SEQ ID NO: 3032459 - RNA, 14 nt, Human
gggccaggagccuc

SEQ ID NO: 3032460 - RNA, 13 nt, Human
gggccaggagccu

SEQ ID NO: 3032461 - RNA, 12 nt, Human
gggccaggagcc

SEQ ID NO: 3032462 - RNA, 21 nt, Human
gggcggugagaggggaacaga

SEQ ID NO: 3032463 - RNA, 13 nt, Human
gggccucagugcc

SEQ ID NO: 3032464 - RNA, 14 nt, Human
gggccucagugcca

SEQ ID NO: 3032465 - RNA, 15 nt, Human
gggccucagugccac

SEQ ID NO: 3032466 - RNA, 18 nt, Human
gggccucuuaugggcugg

SEQ ID NO: 3032467 - RNA, 22 nt, Human
gggccucgguguggagaagcgg

SEQ ID NO: 3032468 - RNA, 16 nt, Human
gggguaaggugcaucu

SEQ ID NO: 3032469 - RNA, 13 nt, Human
ggggguggccucc

SEQ ID NO: 3032470 - RNA, 15 nt, Human
gggggcugggcagag

SEQ ID NO: 3032471 - RNA, 21 nt, Human
ggggucacucuggcagcucag

SEQ ID NO: 3032472 - RNA, 17 nt, Human
gggggaucacagccucu

SEQ ID NO: 3032473 - RNA, 11 nt, Human
gggggcuggga

SEQ ID NO: 3032474 - RNA, 13 nt, Human
ggggaccagagcu

SEQ ID NO: 3032475 - RNA, 12 nt, Human
ggggaccagagc

SEQ ID NO: 3032476 - RNA, 18 nt, Human
aaaauguauguguaagua

SEQ ID NO: 3032477 - RNA, 14 nt, Human
ggggaccagagcug

SEQ ID NO: 3032478 - RNA, 19 nt, Human
ggggccaguuggucccccu

SEQ ID NO: 3032479 - RNA, 15 nt, Human
aaacauuucauuucc

SEQ ID NO: 3032480 - RNA, 19 nt, Human
aaacauuuugucauauaag

SEQ ID NO: 3032481 - RNA, 20 nt, Human
gggucacucuggcagcucag

SEQ ID NO: 3032482 - RNA, 14 nt, Human
gggucacucuggca

SEQ ID NO: 3032483 - RNA, 22 nt, Human
aaaccugugucucugagaguag

SEQ ID NO: 3032484 - RNA, 16 nt, Human
gguauagauguugcua

SEQ ID NO: 3032485 - RNA, 20 nt, Human
gguaggguaagugagagagg

SEQ ID NO: 3032486 - RNA, 14 nt, Human
gguaucaggugcug

SEQ ID NO: 3032487 - RNA, 20 nt, Human
gguaaggaauaccugucccc

SEQ ID NO: 3032488 - RNA, 18 nt, Human
aaacuuuacuauggcccu

SEQ ID NO: 3032489 - RNA, 22 nt, Human
aaacuugauguguuaucucuua

SEQ ID NO: 3032490 - RNA, 19 nt, Human
gguaucaggugcugccauc

SEQ ID NO: 3032491 - RNA, 18 nt, Human
gguaacuagggaagauaa

SEQ ID NO: 3032492 - RNA, 23 nt, Human
ggguuuugccauguuggccaggc

SEQ ID NO: 3032493 - RNA, 20 nt, Human
ggguuuugccauguuggcca

SEQ ID NO: 3032494 - RNA, 12 nt, Human
ggguggugaccu

SEQ ID NO: 3032495 - RNA, 21 nt, Human
aaacguggcugcuucaaggau

SEQ ID NO: 3032496 - RNA, 20 nt, Human
aaacguggcugcuucaagga

SEQ ID NO: 3032497 - RNA, 19 nt, Human
aaacuguuaauaguucagg

SEQ ID NO: 3032498 - RNA, 18 nt, Human
gggugggacacccuguga

SEQ ID NO: 3032499 - RNA, 15 nt, Human
gggugggacacccug

SEQ ID NO: 3032500 - RNA, 19 nt, Human
aaacuuaaucuaaauggaa

SEQ ID NO: 3032501 - RNA, 22 nt, Human
aaauaucccuuggacauuuuau

SEQ ID NO: 3032502 - RNA, 23 nt, Human
aaauaucccuuggacauuuuaug

SEQ ID NO: 3032503 - RNA, 15 nt, Human
aaauauaggaacuua

SEQ ID NO: 3032504 - RNA, 16 nt, Human
guacacacacauacac

SEQ ID NO: 3032505 - RNA, 19 nt, Human
aaauaccagccaguaaaug

SEQ ID NO: 3032506 - RNA, 20 nt, Human
aaauaccagccaguaaaugg

SEQ ID NO: 3032507 - RNA, 21 nt, Human
aaauaccagccaguaaauggg

SEQ ID NO: 3032508 - RNA, 21 nt, Human
aaauauugguugggaugacuu

SEQ ID NO: 3032509 - RNA, 23 nt, Human
aaaucagccugcuccagcuguuc

SEQ ID NO: 3032510 - RNA, 21 nt, Human
aaaucagccugcuccagcugu

SEQ ID NO: 3032511 - RNA, 19 nt, Human
aaaucagccugcuccagcu

SEQ ID NO: 3032512 - RNA, 12 nt, Human
aaauaucugaaa

SEQ ID NO: 3032513 - RNA, 14 nt, Human
aaauaucugaaaau

SEQ ID NO: 3032514 - RNA, 17 nt, Human
aaauaucugaaaaugua

SEQ ID NO: 3032515 - RNA, 18 nt, Human
aaauaucugaaaauguau

SEQ ID NO: 3032516 - RNA, 19 nt, Human
aaauaucugaaaauguaug

SEQ ID NO: 3032517 - RNA, 21 nt, Human
aaauaucugaaaauguaugug

SEQ ID NO: 3032518 - RNA, 22 nt, Human
aaauaucugaaaauguaugugu

SEQ ID NO: 3032519 - RNA, 23 nt, Human
aaauaucugaaaauguaugugua

SEQ ID NO: 3032520 - RNA, 17 nt, Human
guaacauagcugugauu

SEQ ID NO: 3032521 - RNA, 19 nt, Human
guaacaggaaaauuuuaaa

SEQ ID NO: 3032522 - RNA, 16 nt, Human
guaacaagccacccca

SEQ ID NO: 3032523 - RNA, 17 nt, Human
aaauaauuagguauuuu

SEQ ID NO: 3032524 - RNA, 14 nt, Human
aaauaaugugaaac

SEQ ID NO: 3032525 - RNA, 22 nt, Human
aaauaaugugaaacuggauuaa

SEQ ID NO: 3032526 - RNA, 22 nt, Human
aaaguguauuuuuuuacuaaua

SEQ ID NO: 3032527 - RNA, 13 nt, Human
guaauaaacucau

SEQ ID NO: 3032528 - RNA, 23 nt, Human
guaauccuagcacuuugggaggc

SEQ ID NO: 3032529 - RNA, 15 nt, Human
guaauuugugauaca

SEQ ID NO: 3032530 - RNA, 17 nt, Human
guaauuugugauacaau

SEQ ID NO: 3032531 - RNA, 20 nt, Human
guaauuugugauacaaugcu

SEQ ID NO: 3032532 - RNA, 21 nt, Human
guaauuuuuuuaucgucacug

SEQ ID NO: 3032533 - RNA, 21 nt, Human
aaagggguaggguuuaaagau

SEQ ID NO: 3032534 - RNA, 20 nt, Human
aaagggcccagagagggugg

SEQ ID NO: 3032535 - RNA, 19 nt, Human
gguggggaccucaggccug

SEQ ID NO: 3032536 - RNA, 16 nt, Human
ggugggacacccugug

SEQ ID NO: 3032537 - RNA, 13 nt, Human
ggugggacacccu

SEQ ID NO: 3032538 - RNA, 17 nt, Human
ggugggacacccuguga

SEQ ID NO: 3032539 - RNA, 18 nt, Human
gguggcuggguuggaggg

SEQ ID NO: 3032540 - RNA, 12 nt, Human
gguggcuggguu

SEQ ID NO: 3032541 - RNA, 20 nt, Human
gguggcaccagcagccugga

SEQ ID NO: 3032542 - RNA, 14 nt, Human
gguggcaccagcag

SEQ ID NO: 3032543 - RNA, 21 nt, Human
ggugcugccauccagguucag

SEQ ID NO: 3032544 - RNA, 14 nt, Human
aaagcuaggccugg

SEQ ID NO: 3032545 - RNA, 16 nt, Human
aaagcuaggccuggcc

SEQ ID NO: 3032546 - RNA, 13 nt, Human
aaagcagugcaug

SEQ ID NO: 3032547 - RNA, 13 nt, Human
aaagcugccagcc

SEQ ID NO: 3032548 - RNA, 12 nt, Human
aaagcugccagc

SEQ ID NO: 3032549 - RNA, 22 nt, Human
aaagcugccagccgagauagcc

SEQ ID NO: 3032550 - RNA, 20 nt, Human
gguuuguaaauuaacuuuua

SEQ ID NO: 3032551 - RNA, 22 nt, Human
gguuucuaaagcugccagccga

SEQ ID NO: 3032552 - RNA, 16 nt, Human
gguuucuaaagcugcc

SEQ ID NO: 3032553 - RNA, 15 nt, Human
gguuucagaaaugug

SEQ ID NO: 3032554 - RNA, 14 nt, Human
aaaguguauuuuuu

SEQ ID NO: 3032555 - RNA, 21 nt, Human
aaaguguauuuuuuuacuaau

SEQ ID NO: 3032556 - RNA, 21 nt, Human
aaaguaucccuacuguaauuu

SEQ ID NO: 3032557 - RNA, 20 nt, Human
aaaguagaagucuuagaugu

SEQ ID NO: 3032558 - RNA, 22 nt, Human
aaaguagaagucuuagauguau

SEQ ID NO: 3032559 - RNA, 18 nt, Human
aaaguacacuguuucaaa

SEQ ID NO: 3032560 - RNA, 19 nt, Human
aaaguacacuguuucaaac

SEQ ID NO: 3032561 - RNA, 22 nt, Human
gguucccuuugacgccauccca

SEQ ID NO: 3032562 - RNA, 23 nt, Human
gguucccuuugacgccaucccag

SEQ ID NO: 3032563 - RNA, 22 nt, Human
gguucccuuuuuuggcugcuga

SEQ ID NO: 3032564 - RNA, 17 nt, Human
gguucccauuugcuccu

SEQ ID NO: 3032565 - RNA, 19 nt, Human
gguguuuccuggcacugcu

SEQ ID NO: 3032566 - RNA, 17 nt, Human
gguguuuccuggcacug

SEQ ID NO: 3032567 - RNA, 13 nt, Human
ggugggggccucg

SEQ ID NO: 3032568 - RNA, 12 nt, Human
gguguggagaag

SEQ ID NO: 3032569 - RNA, 23 nt, Human
gguguggagaagcggcuggcagc

SEQ ID NO: 3032570 - RNA, 14 nt, Human
gguguggagaagcg

SEQ ID NO: 3032571 - RNA, 13 nt, Human
ggugugggggaag

SEQ ID NO: 3032572 - RNA, 11 nt, Human
gguguggggga

SEQ ID NO: 3032573 - RNA, 15 nt, Human
ggcacaucauuucaa

SEQ ID NO: 3032574 - RNA, 14 nt, Human
ggcacaucauuuca

SEQ ID NO: 3032575 - RNA, 18 nt, Human
ggcacaucagcacgauuu

SEQ ID NO: 3032576 - RNA, 16 nt, Human
ggcacugcuuccagug

SEQ ID NO: 3032577 - RNA, 18 nt, Human
ggcacaccgggcacucag

SEQ ID NO: 3032578 - RNA, 15 nt, Human
ggcaaaaaggcagga

SEQ ID NO: 3032579 - RNA, 18 nt, Human
ggcaggaggaucacuuga

SEQ ID NO: 3032580 - RNA, 16 nt, Human
ggcagccccauucugc

SEQ ID NO: 3032581 - RNA, 20 nt, Human
ggcagccccauucugccugc

SEQ ID NO: 3032582 - RNA, 21 nt, Human
ggcagccccauucugccugcc

SEQ ID NO: 3032583 - RNA, 22 nt, Human
ggcagccccauucugccugccc

SEQ ID NO: 3032584 - RNA, 13 nt, Human
ggcagccaggcca

SEQ ID NO: 3032585 - RNA, 20 nt, Human
ggcacugcuuccagugaggc

SEQ ID NO: 3032586 - RNA, 14 nt, Human
ggcauuugcugaau

SEQ ID NO: 3032587 - RNA, 19 nt, Human
ggccaaaggaagcacaugc

SEQ ID NO: 3032588 - RNA, 16 nt, Human
ggccaaaggaagcaca

SEQ ID NO: 3032589 - RNA, 14 nt, Human
ggccaaaggaagca

SEQ ID NO: 3032590 - RNA, 17 nt, Human
ggcauuuguuugaacug

SEQ ID NO: 3032591 - RNA, 13 nt, Human
ggccaaaggaagc

SEQ ID NO: 3032592 - RNA, 17 nt, Human
ggccagagggagugaca

SEQ ID NO: 3032593 - RNA, 19 nt, Human
ggccagagggagugacaga

SEQ ID NO: 3032594 - RNA, 18 nt, Human
ggccagagacacaagccu

SEQ ID NO: 3032595 - RNA, 17 nt, Human
ggccagagacacaagcc

SEQ ID NO: 3032596 - RNA, 23 nt, Human
ggauugugccuaauguguuugag

SEQ ID NO: 3032597 - RNA, 12 nt, Human
ggauuuaacaga

SEQ ID NO: 3032598 - RNA, 20 nt, Human
ggauuguccccgacccuugc

SEQ ID NO: 3032599 - RNA, 16 nt, Human
ggauuguccccgaccc

SEQ ID NO: 3032600 - RNA, 22 nt, Human
ggauuuaacagaaauguacagc

SEQ ID NO: 3032601 - RNA, 16 nt, Human
ggauuuaacagaaaug

SEQ ID NO: 3032602 - RNA, 17 nt, Human
ggauuuaacagaaaugu

SEQ ID NO: 3032603 - RNA, 14 nt, Human
ggaugaaaaaauaa

SEQ ID NO: 3032604 - RNA, 13 nt, Human
ggauuguccccga

SEQ ID NO: 3032605 - RNA, 18 nt, Human
ggaucucuugagccuggg

SEQ ID NO: 3032606 - RNA, 23 nt, Human
ggauccugagccagauuucacuc

SEQ ID NO: 3032607 - RNA, 20 nt, Human
ggauccugagccagauuuca

SEQ ID NO: 3032608 - RNA, 19 nt, Human
ggauccugagccagauuuc

SEQ ID NO: 3032609 - RNA, 18 nt, Human
ggauccugagccagauuu

SEQ ID NO: 3032610 - RNA, 16 nt, Human
ggauccugagccagau

SEQ ID NO: 3032611 - RNA, 15 nt, Human
ggauccugagccaga

SEQ ID NO: 3032612 - RNA, 16 nt, Human
ggaguucaucuugaau

SEQ ID NO: 3032613 - RNA, 19 nt, Human
ggaguuauugaagcagagu

SEQ ID NO: 3032614 - RNA, 15 nt, Human
ggaguggccacagaa

SEQ ID NO: 3032615 - RNA, 22 nt, Human
ggagugggcccaaugcacuuug

SEQ ID NO: 3032616 - RNA, 12 nt, Human
ggagugggccca

SEQ ID NO: 3032617 - RNA, 16 nt, Human
ggaguggccacagaaa

SEQ ID NO: 3032618 - RNA, 22 nt, Human
ggagguaaggaauaccuguccc

SEQ ID NO: 3032619 - RNA, 21 nt, Human
ggagggugacgggggugaacu

SEQ ID NO: 3032620 - RNA, 23 nt, Human
ggaggugggauccuccaggugca

SEQ ID NO: 3032621 - RNA, 22 nt, Human
ggaggugggauccuccaggugc

SEQ ID NO: 3032622 - RNA, 14 nt, Human
ggaggggggaggug

SEQ ID NO: 3032623 - RNA, 13 nt, Human
ggaggggggaggu

SEQ ID NO: 3032624 - RNA, 15 nt, Human
ggcuaacuuggguua

SEQ ID NO: 3032625 - RNA, 20 nt, Human
ggcuaagugauccucccacc

SEQ ID NO: 3032626 - RNA, 16 nt, Human
ggcuaauguacugcau

SEQ ID NO: 3032627 - RNA, 13 nt, Human
ggcuaccuuugua

SEQ ID NO: 3032628 - RNA, 14 nt, Human
ggcuaccuuuguau

SEQ ID NO: 3032629 - RNA, 16 nt, Human
ggccugcaagggagug

SEQ ID NO: 3032630 - RNA, 16 nt, Human
ggccuggccagaugca

SEQ ID NO: 3032631 - RNA, 12 nt, Human
ggccuggccaga

SEQ ID NO: 3032632 - RNA, 15 nt, Human
ggccuggccagaugc

SEQ ID NO: 3032633 - RNA, 23 nt, Human
ggccucccaacucaccccagccc

SEQ ID NO: 3032634 - RNA, 22 nt, Human
ggccucccaacucaccccagcc

SEQ ID NO: 3032635 - RNA, 20 nt, Human
ggccucccaacucaccccag

SEQ ID NO: 3032636 - RNA, 13 nt, Human
ggccucagugcca

SEQ ID NO: 3032637 - RNA, 17 nt, Human
ggccucccaacucaccc

SEQ ID NO: 3032638 - RNA, 19 nt, Human
ggccucccaacucacccca

SEQ ID NO: 3032639 - RNA, 18 nt, Human
ggccucccaacucacccc

SEQ ID NO: 3032640 - RNA, 15 nt, Human
ggccagaugcaccag

SEQ ID NO: 3032641 - RNA, 16 nt, Human
ggccagaugcaccagc

SEQ ID NO: 3032642 - RNA, 13 nt, Human
ggcucacugcagc

SEQ ID NO: 3032643 - RNA, 14 nt, Human
ggcucacugcagcc

SEQ ID NO: 3032644 - RNA, 15 nt, Human
ggcucacugcagccu

SEQ ID NO: 3032645 - RNA, 14 nt, Human
ggcucuuccaggcu

SEQ ID NO: 3032646 - RNA, 15 nt, Human
ggcucuuccaggcug

SEQ ID NO: 3032647 - RNA, 18 nt, Human
ggcucuuccaggcuggga

SEQ ID NO: 3032648 - RNA, 17 nt, Human
ggcucuuccaggcuggg

SEQ ID NO: 3032649 - RNA, 13 nt, Human
ggcucccuuccca

SEQ ID NO: 3032650 - RNA, 13 nt, Human
ggcuggccuggcc

SEQ ID NO: 3032651 - RNA, 15 nt, Human
ggcuggccuggcccc

SEQ ID NO: 3032652 - RNA, 14 nt, Human
ggcuggccuggccc

SEQ ID NO: 3032653 - RNA, 22 nt, Human
aaaaaacugcugacuguuuucu

SEQ ID NO: 3032654 - RNA, 14 nt, Human
aaaaaggaggaaga

SEQ ID NO: 3032655 - RNA, 21 nt, Human
aaaaaggaugcacagaguugu

SEQ ID NO: 3032656 - RNA, 12 nt, Human
aaaaaggcagga

SEQ ID NO: 3032657 - RNA, 14 nt, Human
ggcuggguuggagg

SEQ ID NO: 3032658 - RNA, 22 nt, Human
ggcuggguucuacccaggugcu

SEQ ID NO: 3032659 - RNA, 19 nt, Human
caauaaacauuucauuucc

SEQ ID NO: 3032660 - RNA, 14 nt, Human
cacaagccuucggc

SEQ ID NO: 3032661 - RNA, 16 nt, Human
cacaagacccuugugg

SEQ ID NO: 3032662 - RNA, 14 nt, Human
cacaagacccuugu

SEQ ID NO: 3032663 - RNA, 22 nt, Human
caaugcugugcccuaaagugua

SEQ ID NO: 3032664 - RNA, 22 nt, Human
caaugcuggcuguuggcugggg

SEQ ID NO: 3032665 - RNA, 23 nt, Human
caaugcuggcuguuggcuggggg

SEQ ID NO: 3032666 - RNA, 16 nt, Human
cacaucuugcucugcu

SEQ ID NO: 3032667 - RNA, 17 nt, Human
cacaucuugcucugcug

SEQ ID NO: 3032668 - RNA, 22 nt, Human
cacaucagcacgauuucuguuu

SEQ ID NO: 3032669 - RNA, 20 nt, Human
cacaucagcacgauuucugu

SEQ ID NO: 3032670 - RNA, 21 nt, Human
cacaucagcacgauuucuguu

SEQ ID NO: 3032671 - RNA, 18 nt, Human
cacaucuugcucugcuga

SEQ ID NO: 3032672 - RNA, 15 nt, Human
cacauuuuauuuuau

SEQ ID NO: 3032673 - RNA, 17 nt, Human
caccaacauacucccau

SEQ ID NO: 3032674 - RNA, 21 nt, Human
caccaacauacucccaucugu

SEQ ID NO: 3032675 - RNA, 20 nt, Human
caccaacauacucccaucug

SEQ ID NO: 3032676 - RNA, 13 nt, Human
cacauuuuucuua

SEQ ID NO: 3032677 - RNA, 14 nt, Human
cacauuuuucuuag

SEQ ID NO: 3032678 - RNA, 17 nt, Human
cacauuuuuuaaaugca

SEQ ID NO: 3032679 - RNA, 21 nt, Human
cacauuuuuuaaaugcaccug

SEQ ID NO: 3032680 - RNA, 24 nt, Human
cacccaggagccccgaggccuucu

SEQ ID NO: 3032681 - RNA, 19 nt, Human
cacccagcccacuucugcc

SEQ ID NO: 3032682 - RNA, 20 nt, Human
cacccaggagccccgaggcc

SEQ ID NO: 3032683 - RNA, 23 nt, Human
cacccaggagccccgaggccuuc

SEQ ID NO: 3032684 - RNA, 21 nt, Human
caccagcccuuagcagggaaa

SEQ ID NO: 3032685 - RNA, 15 nt, Human
caccagcagccugga

SEQ ID NO: 3032686 - RNA, 12 nt, Human
caccagcagccu

SEQ ID NO: 3032687 - RNA, 14 nt, Human
caccagcagccugg

SEQ ID NO: 3032688 - RNA, 23 nt, Human
caccaacauacucccaucuguga

SEQ ID NO: 3032689 - RNA, 16 nt, Human
cacccagcccacuucu

SEQ ID NO: 3032690 - RNA, 17 nt, Human
cacccagcccacuucug

SEQ ID NO: 3032691 - RNA, 22 nt, Human
cacagcuaacauggaaguacua

SEQ ID NO: 3032692 - RNA, 20 nt, Human
cacagcucuguccugggagu

SEQ ID NO: 3032693 - RNA, 23 nt, Human
cacagcucuguccugggagugag

SEQ ID NO: 3032694 - RNA, 19 nt, Human
cacagcucuguccugggag

SEQ ID NO: 3032695 - RNA, 16 nt, Human
cacagcuaacauggaa

SEQ ID NO: 3032696 - RNA, 15 nt, Human
cacagcuaacaugga

SEQ ID NO: 3032697 - RNA, 19 nt, Human
cacagacccugcccugugg

SEQ ID NO: 3032698 - RNA, 21 nt, Human
cacagacccugcccugugggc

SEQ ID NO: 3032699 - RNA, 20 nt, Human
cacagacccugcccuguggg

SEQ ID NO: 3032700 - RNA, 16 nt, Human
cacaguauuacuucug

SEQ ID NO: 3032701 - RNA, 18 nt, Human
cacaguauuacuucugcu

SEQ ID NO: 3032702 - RNA, 13 nt, Human
caccuugcagcuc

SEQ ID NO: 3032703 - RNA, 15 nt, Human
caccuugcagcucuc

SEQ ID NO: 3032704 - RNA, 18 nt, Human
caccuugacagggcacac

SEQ ID NO: 3032705 - RNA, 19 nt, Human
caccuugacagggcacacc

SEQ ID NO: 3032706 - RNA, 17 nt, Human
caccugccagggacaga

SEQ ID NO: 3032707 - RNA, 22 nt, Human
caccuugcagcucuccccuucu

SEQ ID NO: 3032708 - RNA, 13 nt, Human
caccuuggcucaa

SEQ ID NO: 3032709 - RNA, 14 nt, Human
caccuuugaagaag

SEQ ID NO: 3032710 - RNA, 17 nt, Human
caccuuuguccccaccg

SEQ ID NO: 3032711 - RNA, 15 nt, Human
caccuuuguccccac

SEQ ID NO: 3032712 - RNA, 14 nt, Human
caccuuugucccca

SEQ ID NO: 3032713 - RNA, 13 nt, Human
caccugccaggga

SEQ ID NO: 3032714 - RNA, 16 nt, Human
caccugccagggacag

SEQ ID NO: 3032715 - RNA, 14 nt, Human
caccugccagggac

SEQ ID NO: 3032716 - RNA, 20 nt, Human
cacggagggugacgggggug

SEQ ID NO: 3032717 - RNA, 14 nt, Human
cacggccaggccag

SEQ ID NO: 3032718 - RNA, 15 nt, Human
cacggccaggccaga

SEQ ID NO: 3032719 - RNA, 16 nt, Human
cacggccaggccagag

SEQ ID NO: 3032720 - RNA, 23 nt, Human
cacuacggaauaguuggcuagga

SEQ ID NO: 3032721 - RNA, 17 nt, Human
cacucuuauugcccacg

SEQ ID NO: 3032722 - RNA, 18 nt, Human
cacucuuauugcccacgc

SEQ ID NO: 3032723 - RNA, 19 nt, Human
cacucuuauugcccacgcu

SEQ ID NO: 3032724 - RNA, 12 nt, Human
cacuugugaaua

SEQ ID NO: 3032725 - RNA, 11 nt, Human
cacuugugaau

SEQ ID NO: 3032726 - RNA, 17 nt, Human
cacuguugcccaggcug

SEQ ID NO: 3032727 - RNA, 19 nt, Human
cacuguuucaaacuuuacu

SEQ ID NO: 3032728 - RNA, 17 nt, Human
cacuggugacaugucuu

SEQ ID NO: 3032729 - RNA, 14 nt, Human
cacuguugcccagg

SEQ ID NO: 3032730 - RNA, 15 nt, Human
cacuguugcccaggc

SEQ ID NO: 3032731 - RNA, 16 nt, Human
cacuguugcccaggcu

SEQ ID NO: 3032732 - RNA, 23 nt, Human
cacugggcuuggggaccagagcu

SEQ ID NO: 3032733 - RNA, 20 nt, Human
cacugggcuuggggaccaga

SEQ ID NO: 3032734 - RNA, 22 nt, Human
cacugggcuuggggaccagagc

SEQ ID NO: 3032735 - RNA, 19 nt, Human
cagaaguuucugccgcagc

SEQ ID NO: 3032736 - RNA, 17 nt, Human
cagaaauguguuaucac

SEQ ID NO: 3032737 - RNA, 21 nt, Human
cagaaguuucugccgcagccc

SEQ ID NO: 3032738 - RNA, 20 nt, Human
cagaaguuucugccgcagcc

SEQ ID NO: 3032739 - RNA, 22 nt, Human
cagaaguuucugccgcagcccu

SEQ ID NO: 3032740 - RNA, 23 nt, Human
cagaaguuugagaucagccuggg

SEQ ID NO: 3032741 - RNA, 20 nt, Human
caagaaguccccucuccucc

SEQ ID NO: 3032742 - RNA, 15 nt, Human
caacucaccccagcc

SEQ ID NO: 3032743 - RNA, 13 nt, Human
caacucaccccag

SEQ ID NO: 3032744 - RNA, 16 nt, Human
caacucaccccagccc

SEQ ID NO: 3032745 - RNA, 22 nt, Human
caagacccuuguggucccaccc

SEQ ID NO: 3032746 - RNA, 19 nt, Human
caagacccuugugguccca

SEQ ID NO: 3032747 - RNA, 18 nt, Human
caagacccuugugguccc

SEQ ID NO: 3032748 - RNA, 15 nt, Human
caacccccagccugc

SEQ ID NO: 3032749 - RNA, 16 nt, Human
caacccccagccugcu

SEQ ID NO: 3032750 - RNA, 17 nt, Human
caacccccagccugcua

SEQ ID NO: 3032751 - RNA, 18 nt, Human
caaccacugcgaccacaa

SEQ ID NO: 3032752 - RNA, 23 nt, Human
caacaaaccuguuucugcagcca

SEQ ID NO: 3032753 - RNA, 14 nt, Human
caaagaugcagccg

SEQ ID NO: 3032754 - RNA, 13 nt, Human
caaagaugcagcc

SEQ ID NO: 3032755 - RNA, 21 nt, Human
caaaguacacuguuucaaacu

SEQ ID NO: 3032756 - RNA, 16 nt, Human
caaaguacacuguuuc

SEQ ID NO: 3032757 - RNA, 20 nt, Human
caaaguacacuguuucaaac

SEQ ID NO: 3032758 - RNA, 17 nt, Human
caaaucagcugcuacua

SEQ ID NO: 3032759 - RNA, 20 nt, Human
caacaccuuguuucccucuc

SEQ ID NO: 3032760 - RNA, 22 nt, Human
caacaccucugcacaagcugca

SEQ ID NO: 3032761 - RNA, 12 nt, Human
auuuuuuuuucc

SEQ ID NO: 3032762 - RNA, 16 nt, Human
auuuuuuuuuccuuca

SEQ ID NO: 3032763 - RNA, 13 nt, Human
auuuuuuuuuccu

SEQ ID NO: 3032764 - RNA, 13 nt, Human
auuuuuaagugcu

SEQ ID NO: 3032765 - RNA, 17 nt, Human
auuuuuuuuuccuucag

SEQ ID NO: 3032766 - RNA, 15 nt, Human
caaaagcugggcagg

SEQ ID NO: 3032767 - RNA, 14 nt, Human
auuuguuugaacug

SEQ ID NO: 3032768 - RNA, 16 nt, Human
auuuguuugaacugau

SEQ ID NO: 3032769 - RNA, 13 nt, Human
auuuguuugaacu

SEQ ID NO: 3032770 - RNA, 19 nt, Human
auucugagaugacuauuca

SEQ ID NO: 3032771 - RNA, 16 nt, Human
auucucuccuguaccu

SEQ ID NO: 3032772 - RNA, 21 nt, Human
auuccugaugcuucuucagag

SEQ ID NO: 3032773 - RNA, 19 nt, Human
auucucuccuguaccucuu

SEQ ID NO: 3032774 - RNA, 21 nt, Human
auucucuccuguaccucuuga

SEQ ID NO: 3032775 - RNA, 13 nt, Human
auucuuuccugag

SEQ ID NO: 3032776 - RNA, 22 nt, Human
auucuuuccugaggcugggcuc

SEQ ID NO: 3032777 - RNA, 17 nt, Human
auucuuuccugaggcug

SEQ ID NO: 3032778 - RNA, 20 nt, Human
auucauauuuacuucuuaua

SEQ ID NO: 3032779 - RNA, 18 nt, Human
auucauauuuacuucuua

SEQ ID NO: 3032780 - RNA, 19 nt, Human
auucauauuuacuucuuau

SEQ ID NO: 3032781 - RNA, 20 nt, Human
auuaaauucuugcaaaguau

SEQ ID NO: 3032782 - RNA, 14 nt, Human
auuaaauucuugca

SEQ ID NO: 3032783 - RNA, 18 nt, Human
auuaaauucuugcaaagu

SEQ ID NO: 3032784 - RNA, 15 nt, Human
auuucucauguugaa

SEQ ID NO: 3032785 - RNA, 14 nt, Human
auuucuguuuagau

SEQ ID NO: 3032786 - RNA, 16 nt, Human
auuucuguuuagauaa

SEQ ID NO: 3032787 - RNA, 12 nt, Human
auuucuguuuag

SEQ ID NO: 3032788 - RNA, 12 nt, Human
auuucaagaagu

SEQ ID NO: 3032789 - RNA, 23 nt, Human
auuucaagaaguccccucuccuc

SEQ ID NO: 3032790 - RNA, 14 nt, Human
auuuaaucuuuuau

SEQ ID NO: 3032791 - RNA, 17 nt, Human
auuuaaucuuuuaugau

SEQ ID NO: 3032792 - RNA, 14 nt, Human
auuuaaugaaagac

SEQ ID NO: 3032793 - RNA, 16 nt, Human
auuguaaggaaugauu

SEQ ID NO: 3032794 - RNA, 15 nt, Human
auuguaaggaaugau

SEQ ID NO: 3032795 - RNA, 19 nt, Human
auuguucuuaguuugcagu

SEQ ID NO: 3032796 - RNA, 20 nt, Human
cauuauauagcaguaaaaaa

SEQ ID NO: 3032797 - RNA, 16 nt, Human
cauuaguuuugaagau

SEQ ID NO: 3032798 - RNA, 17 nt, Human
cauuauauagcaguaaa

SEQ ID NO: 3032799 - RNA, 13 nt, Human
cauuaguuuugaa

SEQ ID NO: 3032800 - RNA, 14 nt, Human
cauuaguuuugaag

SEQ ID NO: 3032801 - RNA, 15 nt, Human
cauuaguuuugaaga

SEQ ID NO: 3032802 - RNA, 13 nt, Human
cauucuccaccug

SEQ ID NO: 3032803 - RNA, 16 nt, Human
cauucuccaccugcca

SEQ ID NO: 3032804 - RNA, 14 nt, Human
cauucuccaccugc

SEQ ID NO: 3032805 - RNA, 19 nt, Human
cauguuggccaggcugguc

SEQ ID NO: 3032806 - RNA, 16 nt, Human
cauguuggccaggcug

SEQ ID NO: 3032807 - RNA, 14 nt, Human
cauguuggccaggc

SEQ ID NO: 3032808 - RNA, 15 nt, Human
cauguuggccaggcu

SEQ ID NO: 3032809 - RNA, 17 nt, Human
caugggaaugaauguca

SEQ ID NO: 3032810 - RNA, 16 nt, Human
caugggaaugaauguc

SEQ ID NO: 3032811 - RNA, 15 nt, Human
caugggaaugaaugu

SEQ ID NO: 3032812 - RNA, 14 nt, Human
caugggaaugaaug

SEQ ID NO: 3032813 - RNA, 20 nt, Human
caugcuccuggcccacugca

SEQ ID NO: 3032814 - RNA, 13 nt, Human
caugauguuuucc

SEQ ID NO: 3032815 - RNA, 14 nt, Human
caugcuacacacug

SEQ ID NO: 3032816 - RNA, 20 nt, Human
caugcuacacacugcauguu

SEQ ID NO: 3032817 - RNA, 23 nt, Human
caugcuacacacugcauguuugu

SEQ ID NO: 3032818 - RNA, 18 nt, Human
caucuguuacacaaagaa

SEQ ID NO: 3032819 - RNA, 22 nt, Human
cauccuggcacccggccccugc

SEQ ID NO: 3032820 - RNA, 21 nt, Human
cauccccuguagagugggagc

SEQ ID NO: 3032821 - RNA, 12 nt, Human
caucacuucccu

SEQ ID NO: 3032822 - RNA, 14 nt, Human
caucacuucccuac

SEQ ID NO: 3032823 - RNA, 15 nt, Human
cauccuggcacccgg

SEQ ID NO: 3032824 - RNA, 14 nt, Human
cauauggauaaaua

SEQ ID NO: 3032825 - RNA, 19 nt, Human
caguggugguuuucuguuc

SEQ ID NO: 3032826 - RNA, 20 nt, Human
caguggugguuuucuguucu

SEQ ID NO: 3032827 - RNA, 21 nt, Human
caguggugguuuucuguucuu

SEQ ID NO: 3032828 - RNA, 22 nt, Human
caguggugguuuucuguucuuu

SEQ ID NO: 3032829 - RNA, 22 nt, Human
cauauucaggaagcucagggcc

SEQ ID NO: 3032830 - RNA, 17 nt, Human
cauauucuguuggccag

SEQ ID NO: 3032831 - RNA, 18 nt, Human
cauauucuguuggccagu

SEQ ID NO: 3032832 - RNA, 21 nt, Human
ccaauauuuaaucuuuuauga

SEQ ID NO: 3032833 - RNA, 17 nt, Human
ccaauauuuaccagacc

SEQ ID NO: 3032834 - RNA, 15 nt, Human
ccaaugauggucacc

SEQ ID NO: 3032835 - RNA, 14 nt, Human
ccaaugcacuuugu

SEQ ID NO: 3032836 - RNA, 18 nt, Human
ccaagcucugcuccucuc

SEQ ID NO: 3032837 - RNA, 12 nt, Human
ccaagcucugcu

SEQ ID NO: 3032838 - RNA, 17 nt, Human
ccaagcucugcuccucu

SEQ ID NO: 3032839 - RNA, 13 nt, Human
ccaagcucugcuc

SEQ ID NO: 3032840 - RNA, 18 nt, Human
ccaacucaccccagcccc

SEQ ID NO: 3032841 - RNA, 17 nt, Human
ccaacucaccccagccc

SEQ ID NO: 3032842 - RNA, 16 nt, Human
ccaacucaccccagcc

SEQ ID NO: 3032843 - RNA, 14 nt, Human
ccaacucaccccag

SEQ ID NO: 3032844 - RNA, 23 nt, Human
ccaaauggaaaugggcagagcag

SEQ ID NO: 3032845 - RNA, 14 nt, Human
ccaaugggagcuca

SEQ ID NO: 3032846 - RNA, 17 nt, Human
ccaaugggagcucaugg

SEQ ID NO: 3032847 - RNA, 21 nt, Human
ccaaaacucuccucugcugcu

SEQ ID NO: 3032848 - RNA, 20 nt, Human
ccaaaacucuccucugcugc

SEQ ID NO: 3032849 - RNA, 17 nt, Human
ccacucccugcaaccug

SEQ ID NO: 3032850 - RNA, 13 nt, Human
ccacgcccccacu

SEQ ID NO: 3032851 - RNA, 19 nt, Human
ccacgcccccacuggugac

SEQ ID NO: 3032852 - RNA, 18 nt, Human
ccacgcccccacugguga

SEQ ID NO: 3032853 - RNA, 17 nt, Human
ccacgcccccacuggug

SEQ ID NO: 3032854 - RNA, 16 nt, Human
ccacgcccccacuggu

SEQ ID NO: 3032855 - RNA, 21 nt, Human
ccaccuuugaagaaguaagga

SEQ ID NO: 3032856 - RNA, 19 nt, Human
ccaccgcagacaggaccag

SEQ ID NO: 3032857 - RNA, 22 nt, Human
ccaccgcagacaggaccaggga

SEQ ID NO: 3032858 - RNA, 15 nt, Human
ccaccaucaagccac

SEQ ID NO: 3032859 - RNA, 17 nt, Human
ccaccacacccagccca

SEQ ID NO: 3032860 - RNA, 14 nt, Human
ccaccaucaagcca

SEQ ID NO: 3032861 - RNA, 13 nt, Human
ccaccaucaagcc

SEQ ID NO: 3032862 - RNA, 21 nt, Human
caggcugggcuucaguggcag

SEQ ID NO: 3032863 - RNA, 22 nt, Human
caggcugggcuucaguggcagc

SEQ ID NO: 3032864 - RNA, 20 nt, Human
caggcugggcuucaguggca

SEQ ID NO: 3032865 - RNA, 15 nt, Human
caggcugggagagcc

SEQ ID NO: 3032866 - RNA, 14 nt, Human
caggcugggagagc

SEQ ID NO: 3032867 - RNA, 12 nt, Human
caggcugggaga

SEQ ID NO: 3032868 - RNA, 20 nt, Human
caggggaaaaucagccugcu

SEQ ID NO: 3032869 - RNA, 17 nt, Human
caggggaaaaucagccu

SEQ ID NO: 3032870 - RNA, 19 nt, Human
caggggaaaaucagccugc

SEQ ID NO: 3032871 - RNA, 21 nt, Human
cagggcucagcggggacagcu

SEQ ID NO: 3032872 - RNA, 23 nt, Human
cagggcucagcggggacagcucc

SEQ ID NO: 3032873 - RNA, 20 nt, Human
cagggcucagcggggacagc

SEQ ID NO: 3032874 - RNA, 18 nt, Human
caggcagauacaggaaaa

SEQ ID NO: 3032875 - RNA, 13 nt, Human
caggccagaggga

SEQ ID NO: 3032876 - RNA, 15 nt, Human
caggccagagggagu

SEQ ID NO: 3032877 - RNA, 23 nt, Human
caggccagcugcuugggcuucau

SEQ ID NO: 3032878 - RNA, 21 nt, Human
caggccagcugcuugggcuuc

SEQ ID NO: 3032879 - RNA, 19 nt, Human
caggccagcugcuugggcu

SEQ ID NO: 3032880 - RNA, 17 nt, Human
caggccagcugcuuggg

SEQ ID NO: 3032881 - RNA, 18 nt, Human
caggccaggcccucugcc

SEQ ID NO: 3032882 - RNA, 17 nt, Human
caggccaggcccucugc

SEQ ID NO: 3032883 - RNA, 19 nt, Human
caggccaggcccucugccc

SEQ ID NO: 3032884 - RNA, 15 nt, Human
caggugcacaagcuc

SEQ ID NO: 3032885 - RNA, 22 nt, Human
caggugauccacccaccucagc

SEQ ID NO: 3032886 - RNA, 23 nt, Human
caggugauccacccaccucagcc

SEQ ID NO: 3032887 - RNA, 20 nt, Human
caggugcacaagcuccaagc

SEQ ID NO: 3032888 - RNA, 19 nt, Human
caggugcacaagcuccaag

SEQ ID NO: 3032889 - RNA, 18 nt, Human
caggugcacaagcuccaa

SEQ ID NO: 3032890 - RNA, 17 nt, Human
caggugcacaagcucca

SEQ ID NO: 3032891 - RNA, 21 nt, Human
caggugauccacccaccucag

SEQ ID NO: 3032892 - RNA, 20 nt, Human
caggugauccacccaccuca

SEQ ID NO: 3032893 - RNA, 16 nt, Human
cagguuuuccugaaga

SEQ ID NO: 3032894 - RNA, 12 nt, Human
cagguuuuccug

SEQ ID NO: 3032895 - RNA, 14 nt, Human
cagguuuaagcugu

SEQ ID NO: 3032896 - RNA, 21 nt, Human
cagguuggugggggccucggu

SEQ ID NO: 3032897 - RNA, 21 nt, Human
caggugcacaagcuccaagcu

SEQ ID NO: 3032898 - RNA, 20 nt, Human
caguggugcgaucuggguuc

SEQ ID NO: 3032899 - RNA, 21 nt, Human
caguggugcgaucuggguuca

SEQ ID NO: 3032900 - RNA, 18 nt, Human
caguggugguuuucuguu

SEQ ID NO: 3032901 - RNA, 13 nt, Human
cagugcccacagg

SEQ ID NO: 3032902 - RNA, 15 nt, Human
cagugcccacaggau

SEQ ID NO: 3032903 - RNA, 17 nt, Human
cagugcaugcugucccu

SEQ ID NO: 3032904 - RNA, 16 nt, Human
cagugcaugcuguccc

SEQ ID NO: 3032905 - RNA, 17 nt, Human
cagugcccacaggauca

SEQ ID NO: 3032906 - RNA, 20 nt, Human
cagugggagcugccuguuca

SEQ ID NO: 3032907 - RNA, 23 nt, Human
cagugggagcugccuguucagcu

SEQ ID NO: 3032908 - RNA, 14 nt, Human
cagugcaugcuguc

SEQ ID NO: 3032909 - RNA, 13 nt, Human
cagugcaugcugu

SEQ ID NO: 3032910 - RNA, 15 nt, Human
cagucuggaaugcag

SEQ ID NO: 3032911 - RNA, 17 nt, Human
cagucuggaaugcagug

SEQ ID NO: 3032912 - RNA, 20 nt, Human
cagcaucauggagguuugaa

SEQ ID NO: 3032913 - RNA, 17 nt, Human
cagauugcaacaggcug

SEQ ID NO: 3032914 - RNA, 22 nt, Human
cagauucuuuccugaggcuggg

SEQ ID NO: 3032915 - RNA, 20 nt, Human
cagauucuuuccugaggcug

SEQ ID NO: 3032916 - RNA, 16 nt, Human
cagcacgauuucuguu

SEQ ID NO: 3032917 - RNA, 18 nt, Human
cagcacgauuucuguuua

SEQ ID NO: 3032918 - RNA, 19 nt, Human
cagcacgauuucuguuuag

SEQ ID NO: 3032919 - RNA, 23 nt, Human
cagaggggguggccucccaacuc

SEQ ID NO: 3032920 - RNA, 22 nt, Human
cagaggggguggccucccaacu

SEQ ID NO: 3032921 - RNA, 19 nt, Human
cagauucuuuccugaggcu

SEQ ID NO: 3032922 - RNA, 18 nt, Human
cagauucuuuccugaggc

SEQ ID NO: 3032923 - RNA, 17 nt, Human
cagauucuuuccugagg

SEQ ID NO: 3032924 - RNA, 15 nt, Human
cagauucuuuccuga

SEQ ID NO: 3032925 - RNA, 18 nt, Human
cagcggggacagcuccuu

SEQ ID NO: 3032926 - RNA, 19 nt, Human
cagcggggacagcuccuuc

SEQ ID NO: 3032927 - RNA, 21 nt, Human
cagcggggacagcuccuucug

SEQ ID NO: 3032928 - RNA, 19 nt, Human
cagccugcuaauuccccag

SEQ ID NO: 3032929 - RNA, 12 nt, Human
cagccugcucca

SEQ ID NO: 3032930 - RNA, 19 nt, Human
cagccgagauagccaaggc

SEQ ID NO: 3032931 - RNA, 17 nt, Human
cagccucugaaaaccaa

SEQ ID NO: 3032932 - RNA, 18 nt, Human
caggaaaagcugcugaca

SEQ ID NO: 3032933 - RNA, 15 nt, Human
caggaaaagcugcug

SEQ ID NO: 3032934 - RNA, 16 nt, Human
caggaaaagcugcuga

SEQ ID NO: 3032935 - RNA, 19 nt, Human
cagcugagggugagugggu

SEQ ID NO: 3032936 - RNA, 12 nt, Human
cagcugccuggg

SEQ ID NO: 3032937 - RNA, 14 nt, Human
cagcugccugggau

SEQ ID NO: 3032938 - RNA, 13 nt, Human
cagcugccuggga

SEQ ID NO: 3032939 - RNA, 19 nt, Human
cagcugugcucuggacagg

SEQ ID NO: 3032940 - RNA, 20 nt, Human
cagcugugcucuggacaggc

SEQ ID NO: 3032941 - RNA, 24 nt, Human
cagcugugcucuggacaggcaugu

SEQ ID NO: 3032942 - RNA, 19 nt, Human
cagcuguucagcugguuga

SEQ ID NO: 3032943 - RNA, 20 nt, Human
ccaggauuauugucaaagaa

SEQ ID NO: 3032944 - RNA, 14 nt, Human
ccaggcugggagag

SEQ ID NO: 3032945 - RNA, 13 nt, Human
ccaggcugggaga

SEQ ID NO: 3032946 - RNA, 21 nt, Human
ccaggcugggagagccuucca

SEQ ID NO: 3032947 - RNA, 18 nt, Human
ccaggcugggagagccuu

SEQ ID NO: 3032948 - RNA, 17 nt, Human
ccaggcugggagagccu

SEQ ID NO: 3032949 - RNA, 15 nt, Human
ccaggcugggagagc

SEQ ID NO: 3032950 - RNA, 22 nt, Human
ccaggcugggagagccuuccag

SEQ ID NO: 3032951 - RNA, 19 nt, Human
ccaggcuggcgugcagugg

SEQ ID NO: 3032952 - RNA, 19 nt, Human
ccagucaccccggccaccu

SEQ ID NO: 3032953 - RNA, 21 nt, Human
ccagucaccccggccaccugc

SEQ ID NO: 3032954 - RNA, 20 nt, Human
ccagucaccccggccaccug

SEQ ID NO: 3032955 - RNA, 13 nt, Human
ccagucaccccgg

SEQ ID NO: 3032956 - RNA, 12 nt, Human
ccagucaccccg

SEQ ID NO: 3032957 - RNA, 19 nt, Human
ccagcagagcaccuuagac

SEQ ID NO: 3032958 - RNA, 23 nt, Human
ccagcagagcaccuuagacaguc

SEQ ID NO: 3032959 - RNA, 16 nt, Human
ccagcuuaucucaggg

SEQ ID NO: 3032960 - RNA, 21 nt, Human
ccaggaaaggcuccaggagca

SEQ ID NO: 3032961 - RNA, 23 nt, Human
ccaggaaaggcuccaggagcagc

SEQ ID NO: 3032962 - RNA, 22 nt, Human
ccaggaaaggcuccaggagcag

SEQ ID NO: 3032963 - RNA, 21 nt, Human
ccagccccuggaugcagccuc

SEQ ID NO: 3032964 - RNA, 10 nt, Human
ccagccccuu

SEQ ID NO: 3032965 - RNA, 14 nt, Human
ccagcagccuggac

SEQ ID NO: 3032966 - RNA, 15 nt, Human
ccagcagccuggacc

SEQ ID NO: 3032967 - RNA, 20 nt, Human
ccagcagccuggacccugug

SEQ ID NO: 3032968 - RNA, 19 nt, Human
ccagcagccuggacccugu

SEQ ID NO: 3032969 - RNA, 16 nt, Human
ccauccccuguagagu

SEQ ID NO: 3032970 - RNA, 13 nt, Human
ccaugagccucag

SEQ ID NO: 3032971 - RNA, 14 nt, Human
ccaugagccucagc

SEQ ID NO: 3032972 - RNA, 18 nt, Human
ccaugagccucagcaucc

SEQ ID NO: 3032973 - RNA, 19 nt, Human
ccaugagccucagcauccu

SEQ ID NO: 3032974 - RNA, 13 nt, Human
ccaugaguccccu

SEQ ID NO: 3032975 - RNA, 13 nt, Human
ccaugggccuccu

SEQ ID NO: 3032976 - RNA, 16 nt, Human
ccaugaguccccuguu

SEQ ID NO: 3032977 - RNA, 15 nt, Human
ccaugaguccccugu

SEQ ID NO: 3032978 - RNA, 14 nt, Human
ccaugaguccccug

SEQ ID NO: 3032979 - RNA, 23 nt, Human
ccaucccaaacccuucagugcca

SEQ ID NO: 3032980 - RNA, 12 nt, Human
ccaucccagccc

SEQ ID NO: 3032981 - RNA, 14 nt, Human
ccaugggccuccug

SEQ ID NO: 3032982 - RNA, 15 nt, Human
ccaugggccuccugu

SEQ ID NO: 3032983 - RNA, 20 nt, Human
cccucaacucuccuccagag

SEQ ID NO: 3032984 - RNA, 17 nt, Human
ccccuucugacccaugc

SEQ ID NO: 3032985 - RNA, 16 nt, Human
ccccuucugacccaug

SEQ ID NO: 3032986 - RNA, 12 nt, Human
cccggcugcgga

SEQ ID NO: 3032987 - RNA, 15 nt, Human
ccccauucugccugc

SEQ ID NO: 3032988 - RNA, 13 nt, Human
ccccauucugccu

SEQ ID NO: 3032989 - RNA, 14 nt, Human
ccccauucugccug

SEQ ID NO: 3032990 - RNA, 19 nt, Human
ccccuucgcuccugugucu

SEQ ID NO: 3032991 - RNA, 14 nt, Human
ccccuucgcuccug

SEQ ID NO: 3032992 - RNA, 15 nt, Human
ccccuucgcuccugu

SEQ ID NO: 3032993 - RNA, 17 nt, Human
ccccuucgcuccugugu

SEQ ID NO: 3032994 - RNA, 21 nt, Human
ccccagauugcaacaggcugg

SEQ ID NO: 3032995 - RNA, 22 nt, Human
ccccagauugcaacaggcuggg

SEQ ID NO: 3032996 - RNA, 23 nt, Human
ccccagauugcaacaggcugggc

SEQ ID NO: 3032997 - RNA, 17 nt, Human
ccccagcaagugagagc

SEQ ID NO: 3032998 - RNA, 19 nt, Human
ccccagcaagugagagcug

SEQ ID NO: 3032999 - RNA, 20 nt, Human
ccccagcaagugagagcugg

SEQ ID NO: 3033000 - RNA, 17 nt, Human
ccccauccucuguacag

SEQ ID NO: 3033001 - RNA, 22 nt, Human
ccccauccucuguacagagccc

SEQ ID NO: 3033002 - RNA, 21 nt, Human
ccccauccucuguacagagcc

SEQ ID NO: 3033003 - RNA, 19 nt, Human
ccccauccucuguacagag

SEQ ID NO: 3033004 - RNA, 20 nt, Human
cccauucugccugcccaggc

SEQ ID NO: 3033005 - RNA, 21 nt, Human
cccauucugccugcccaggcc

SEQ ID NO: 3033006 - RNA, 22 nt, Human
cccauucugccugcccaggccc

SEQ ID NO: 3033007 - RNA, 14 nt, Human
cccagcccacuucu

SEQ ID NO: 3033008 - RNA, 23 nt, Human
cccaggaaaggcuccaggagcag

SEQ ID NO: 3033009 - RNA, 22 nt, Human
cccaggaaaggcuccaggagca

SEQ ID NO: 3033010 - RNA, 21 nt, Human
cccaggaaaggcuccaggagc

SEQ ID NO: 3033011 - RNA, 21 nt, Human
cccagcugugcucuggacagg

SEQ ID NO: 3033012 - RNA, 23 nt, Human
cccagcugugcucuggacaggca

SEQ ID NO: 3033013 - RNA, 19 nt, Human
cccaggaaaggcuccagga

SEQ ID NO: 3033014 - RNA, 15 nt, Human
cccaggcuuagucac

SEQ ID NO: 3033015 - RNA, 21 nt, Human
cccaggcuggcgugcaguggu

SEQ ID NO: 3033016 - RNA, 20 nt, Human
ccucaugcugccaauauccu

SEQ ID NO: 3033017 - RNA, 21 nt, Human
ccucaugcugccaauauccua

SEQ ID NO: 3033018 - RNA, 21 nt, Human
ccucauuuuuauaaugucccu

SEQ ID NO: 3033019 - RNA, 15 nt, Human
ccucccaccucagcc

SEQ ID NO: 3033020 - RNA, 17 nt, Human
ccucccaccucagccuc

SEQ ID NO: 3033021 - RNA, 16 nt, Human
ccucccaucucacaca

SEQ ID NO: 3033022 - RNA, 13 nt, Human
ccucccaucucac

SEQ ID NO: 3033023 - RNA, 14 nt, Human
ccggccccugcugg

SEQ ID NO: 3033024 - RNA, 19 nt, Human
cccugucuccucucucugu

SEQ ID NO: 3033025 - RNA, 17 nt, Human
cccugugauggggcccu

SEQ ID NO: 3033026 - RNA, 13 nt, Human
cccuucgcuccug

SEQ ID NO: 3033027 - RNA, 20 nt, Human
cccugugauggggcccugcc

SEQ ID NO: 3033028 - RNA, 19 nt, Human
cccugugauggggcccugc

SEQ ID NO: 3033029 - RNA, 18 nt, Human
cccugugauggggcccug

SEQ ID NO: 3033030 - RNA, 13 nt, Human
cccugucuaauga

SEQ ID NO: 3033031 - RNA, 16 nt, Human
cccugucuaaugaaac

SEQ ID NO: 3033032 - RNA, 23 nt, Human
cccugucucaaaaaaagaaaaag

SEQ ID NO: 3033033 - RNA, 20 nt, Human
cccugucucaaaaaaagaaa

SEQ ID NO: 3033034 - RNA, 14 nt, Human
cccuucgcuccugu

SEQ ID NO: 3033035 - RNA, 15 nt, Human
cccuucgcuccugug

SEQ ID NO: 3033036 - RNA, 21 nt, Human
cccuucucuccagccccugga

SEQ ID NO: 3033037 - RNA, 22 nt, Human
cccuucucuccagccccuggau

SEQ ID NO: 3033038 - RNA, 13 nt, Human
ccggccccugcug

SEQ ID NO: 3033039 - RNA, 17 nt, Human
ccugucggagcccuguc

SEQ ID NO: 3033040 - RNA, 21 nt, Human
ccugucggagcccugucuccu

SEQ ID NO: 3033041 - RNA, 16 nt, Human
ccugucggagcccugu

SEQ ID NO: 3033042 - RNA, 21 nt, Human
ccugguggcagugggagcugc

SEQ ID NO: 3033043 - RNA, 22 nt, Human
ccugucggagcccugucuccuc

SEQ ID NO: 3033044 - RNA, 15 nt, Human
ccugucuaaugaaac

SEQ ID NO: 3033045 - RNA, 22 nt, Human
ccugucuaaugaaaccuguguc

SEQ ID NO: 3033046 - RNA, 22 nt, Human
ccuggccucugcacuccccugc

SEQ ID NO: 3033047 - RNA, 21 nt, Human
ccuggccucugcacuccccug

SEQ ID NO: 3033048 - RNA, 20 nt, Human
ccuggccucugcacuccccu

SEQ ID NO: 3033049 - RNA, 22 nt, Human
ccuggccuagcauacguacaca

SEQ ID NO: 3033050 - RNA, 16 nt, Human
ccuggccucugcacuc

SEQ ID NO: 3033051 - RNA, 13 nt, Human
ccugcccaggccc

SEQ ID NO: 3033052 - RNA, 13 nt, Human
ccugcccaccugg

SEQ ID NO: 3033053 - RNA, 20 nt, Human
ccugcccaccuggccucugc

SEQ ID NO: 3033054 - RNA, 14 nt, Human
ccugcccaccuggc

SEQ ID NO: 3033055 - RNA, 12 nt, Human
ccugcccaccug

SEQ ID NO: 3033056 - RNA, 20 nt, Human
ccugcugcaguugccaguca

SEQ ID NO: 3033057 - RNA, 19 nt, Human
ccugccucgaacuggcugc

SEQ ID NO: 3033058 - RNA, 21 nt, Human
ccugccucgaacuggcugcaa

SEQ ID NO: 3033059 - RNA, 23 nt, Human
ccugccucgaacuggcugcaaag

SEQ ID NO: 3033060 - RNA, 19 nt, Human
ccugcugcaguugccaguc

SEQ ID NO: 3033061 - RNA, 17 nt, Human
ccugcugcaguugccag

SEQ ID NO: 3033062 - RNA, 18 nt, Human
ccugcacuugcagacucu

SEQ ID NO: 3033063 - RNA, 14 nt, Human
ccugcagagggcac

SEQ ID NO: 3033064 - RNA, 16 nt, Human
ccugcacuugcagacu

SEQ ID NO: 3033065 - RNA, 17 nt, Human
ccugcacuugcagacuc

SEQ ID NO: 3033066 - RNA, 13 nt, Human
ccucuuucccucc

SEQ ID NO: 3033067 - RNA, 11 nt, Human
ccucuuucccu

SEQ ID NO: 3033068 - RNA, 21 nt, Human
cuauuaaacaugcuguacaua

SEQ ID NO: 3033069 - RNA, 17 nt, Human
cuaucucccccagcccc

SEQ ID NO: 3033070 - RNA, 16 nt, Human
cuaucucccccagccc

SEQ ID NO: 3033071 - RNA, 21 nt, Human
cuauuuuuguuuuuauuaaaa

SEQ ID NO: 3033072 - RNA, 15 nt, Human
cuauuuuuguuuuua

SEQ ID NO: 3033073 - RNA, 18 nt, Human
cucaaaagcugggcaggu

SEQ ID NO: 3033074 - RNA, 21 nt, Human
cucaaacuaacaggcuuagug

SEQ ID NO: 3033075 - RNA, 20 nt, Human
cucaaacucuugaccucagg

SEQ ID NO: 3033076 - RNA, 21 nt, Human
cucaauaaacauuucauuucc

SEQ ID NO: 3033077 - RNA, 17 nt, Human
cucaauaaacauuucau

SEQ ID NO: 3033078 - RNA, 13 nt, Human
cucaauugugaaa

SEQ ID NO: 3033079 - RNA, 12 nt, Human
cucaauugugaa

SEQ ID NO: 3033080 - RNA, 13 nt, Human
cucaaugcacuga

SEQ ID NO: 3033081 - RNA, 15 nt, Human
cucaaugcacugaca

SEQ ID NO: 3033082 - RNA, 12 nt, Human
cuagccagagga

SEQ ID NO: 3033083 - RNA, 15 nt, Human
cuagccagaggagag

SEQ ID NO: 3033084 - RNA, 13 nt, Human
cuagccagaggag

SEQ ID NO: 3033085 - RNA, 23 nt, Human
cuaguuguuugauucagacagcu

SEQ ID NO: 3033086 - RNA, 22 nt, Human
cuaguuguuugauucagacagc

SEQ ID NO: 3033087 - RNA, 13 nt, Human
cuaguuugauuaa

SEQ ID NO: 3033088 - RNA, 21 nt, Human
cuaguuugauuaaauucuugc

SEQ ID NO: 3033089 - RNA, 22 nt, Human
cuaguuugauuaaauucuugca

SEQ ID NO: 3033090 - RNA, 15 nt, Human
cuaucucccccagcc

SEQ ID NO: 3033091 - RNA, 14 nt, Human
cuaucuaaauguug

SEQ ID NO: 3033092 - RNA, 20 nt, Human
cgugugugugcguccugucg

SEQ ID NO: 3033093 - RNA, 15 nt, Human
cuaauaaaaagguga

SEQ ID NO: 3033094 - RNA, 14 nt, Human
cuaauaaaaaggug

SEQ ID NO: 3033095 - RNA, 13 nt, Human
cuaauaaaaaggu

SEQ ID NO: 3033096 - RNA, 11 nt, Human
cuaauaaaaag

SEQ ID NO: 3033097 - RNA, 23 nt, Human
cuaaguuuuuauggcuuuugugc

SEQ ID NO: 3033098 - RNA, 23 nt, Human
cuaagugauccucccaccucagc

SEQ ID NO: 3033099 - RNA, 21 nt, Human
cuaagugguacuaacuuuccu

SEQ ID NO: 3033100 - RNA, 20 nt, Human
cuaaguuuuuauggcuuuug

SEQ ID NO: 3033101 - RNA, 17 nt, Human
cuaccuuuguauucucu

SEQ ID NO: 3033102 - RNA, 20 nt, Human
cuacaguccucccaucucac

SEQ ID NO: 3033103 - RNA, 21 nt, Human
cuacaguugaaaaacagcuga

SEQ ID NO: 3033104 - RNA, 19 nt, Human
cuacaguugaaaaacagcu

SEQ ID NO: 3033105 - RNA, 18 nt, Human
cuacauacaauuccaaac

SEQ ID NO: 3033106 - RNA, 22 nt, Human
cuacaguugaaaaacagcugag

SEQ ID NO: 3033107 - RNA, 19 nt, Human
cuacaguccucccaucuca

SEQ ID NO: 3033108 - RNA, 21 nt, Human
cuagcauacguacacauuuua

SEQ ID NO: 3033109 - RNA, 23 nt, Human
cuagcauacguacacauuuuauu

SEQ ID NO: 3033110 - RNA, 22 nt, Human
cuagaagauuuugaaauuuuua

SEQ ID NO: 3033111 - RNA, 16 nt, Human
ccuuuuucaauaacug

SEQ ID NO: 3033112 - RNA, 21 nt, Human
ccuuuuuauaacuuuuuauau

SEQ ID NO: 3033113 - RNA, 15 nt, Human
ccuuuuuauaacuuu

SEQ ID NO: 3033114 - RNA, 12 nt, Human
ccuuuuuauaac

SEQ ID NO: 3033115 - RNA, 21 nt, Human
ccuuuuuuagaguugauacua

SEQ ID NO: 3033116 - RNA, 13 nt, Human
cgacaaugcaaac

SEQ ID NO: 3033117 - RNA, 12 nt, Human
cgacaaugcaaa

SEQ ID NO: 3033118 - RNA, 17 nt, Human
cgacugcccggcagggu

SEQ ID NO: 3033119 - RNA, 20 nt, Human
cgacccuugccgucuaccug

SEQ ID NO: 3033120 - RNA, 19 nt, Human
cgacccuugccgucuaccu

SEQ ID NO: 3033121 - RNA, 18 nt, Human
ccuuucaauaggaaaaac

SEQ ID NO: 3033122 - RNA, 21 nt, Human
ccuuucaauaggaaaaacuga

SEQ ID NO: 3033123 - RNA, 17 nt, Human
ccuuuugagugccuuac

SEQ ID NO: 3033124 - RNA, 15 nt, Human
ccuuuugagugccuu

SEQ ID NO: 3033125 - RNA, 16 nt, Human
ccuugccgucuaccug

SEQ ID NO: 3033126 - RNA, 14 nt, Human
ccuuuaagagaaau

SEQ ID NO: 3033127 - RNA, 14 nt, Human
cgccuacaggagug

SEQ ID NO: 3033128 - RNA, 16 nt, Human
cgaguagcugggacua

SEQ ID NO: 3033129 - RNA, 14 nt, Human
cgauagugguggug

SEQ ID NO: 3033130 - RNA, 22 nt, Human
cgcaggauucuuccucccuccc

SEQ ID NO: 3033131 - RNA, 22 nt, Human
cguggugauuuagcaggaagcu

SEQ ID NO: 3033132 - RNA, 15 nt, Human
cguggugauuuagca

SEQ ID NO: 3033133 - RNA, 20 nt, Human
cguguaaccauggacccaau

SEQ ID NO: 3033134 - RNA, 16 nt, Human
cgugaggccagagaca

SEQ ID NO: 3033135 - RNA, 17 nt, Human
cgugaguccuggcaugg

SEQ ID NO: 3033136 - RNA, 16 nt, Human
cgugaguccuggcaug

SEQ ID NO: 3033137 - RNA, 17 nt, Human
cgugaggccagagacac

SEQ ID NO: 3033138 - RNA, 16 nt, Human
cgguuuuacugcagcu

SEQ ID NO: 3033139 - RNA, 16 nt, Human
cggagucccaccuugg

SEQ ID NO: 3033140 - RNA, 12 nt, Human
cgggccacagag

SEQ ID NO: 3033141 - RNA, 14 nt, Human
cgggccacagagaa

SEQ ID NO: 3033142 - RNA, 13 nt, Human
cggcuccaggcuc

SEQ ID NO: 3033143 - RNA, 14 nt, Human
cggcuccaggcucc

SEQ ID NO: 3033144 - RNA, 15 nt, Human
cggcuccaggcuccu

SEQ ID NO: 3033145 - RNA, 16 nt, Human
cggcuccaggcuccuu

SEQ ID NO: 3033146 - RNA, 12 nt, Human
cggcuccaggcu

SEQ ID NO: 3033147 - RNA, 14 nt, Human
cggagucccaccuu

SEQ ID NO: 3033148 - RNA, 16 nt, Human
cggcucacugcagccu

SEQ ID NO: 3033149 - RNA, 18 nt, Human
cggagucccaccuuggcu

SEQ ID NO: 3033150 - RNA, 20 nt, Human
cggagucccaccuuggcugc

SEQ ID NO: 3033151 - RNA, 15 nt, Human
cggcucacugcagcc

SEQ ID NO: 3033152 - RNA, 14 nt, Human
cggcucacugcagc

SEQ ID NO: 3033153 - RNA, 15 nt, Human
cggggacagcuccuu

SEQ ID NO: 3033154 - RNA, 13 nt, Human
cgguguggagaag

SEQ ID NO: 3033155 - RNA, 18 nt, Human
cgguguggagaagcggcu

SEQ ID NO: 3033156 - RNA, 14 nt, Human
cggggacagcuccu

SEQ ID NO: 3033157 - RNA, 17 nt, Human
cgggcucugccucccau

SEQ ID NO: 3033158 - RNA, 13 nt, Human
cgggcucugccuc

SEQ ID NO: 3033159 - RNA, 15 nt, Human
cgggcucagcaaaag

SEQ ID NO: 3033160 - RNA, 16 nt, Human
cgggcucugccuccca

SEQ ID NO: 3033161 - RNA, 14 nt, Human
cgggcucugccucc

SEQ ID NO: 3033162 - RNA, 11 nt, Human
cgggcucagca

SEQ ID NO: 3033163 - RNA, 16 nt, Human
cucuccccuucucugu

SEQ ID NO: 3033164 - RNA, 18 nt, Human
cucugcacuccccugcug

SEQ ID NO: 3033165 - RNA, 20 nt, Human
cucugcacuccccugcuggg

SEQ ID NO: 3033166 - RNA, 21 nt, Human
cucugcacuccccugcugggu

SEQ ID NO: 3033167 - RNA, 13 nt, Human
cucugcuccucuc

SEQ ID NO: 3033168 - RNA, 18 nt, Human
cucugcuccucuccccag

SEQ ID NO: 3033169 - RNA, 13 nt, Human
cucugcugacaga

SEQ ID NO: 3033170 - RNA, 14 nt, Human
cucugcugacagac

SEQ ID NO: 3033171 - RNA, 16 nt, Human
cucugcugacagacac

SEQ ID NO: 3033172 - RNA, 14 nt, Human
cucugguccauaga

SEQ ID NO: 3033173 - RNA, 14 nt, Human
cucuucaaucucuu

SEQ ID NO: 3033174 - RNA, 18 nt, Human
cucuucagaucucuaacu

SEQ ID NO: 3033175 - RNA, 19 nt, Human
cucuucagaucucuaacuu

SEQ ID NO: 3033176 - RNA, 14 nt, Human
cucuuauugcccac

SEQ ID NO: 3033177 - RNA, 15 nt, Human
cucuuauugcccacg

SEQ ID NO: 3033178 - RNA, 19 nt, Human
cucuuauugcccacgcugg

SEQ ID NO: 3033179 - RNA, 20 nt, Human
cucuuauugcccacgcugga

SEQ ID NO: 3033180 - RNA, 13 nt, Human
cucuuauugccca

SEQ ID NO: 3033181 - RNA, 18 nt, Human
cucuugagccuugaacuu

SEQ ID NO: 3033182 - RNA, 16 nt, Human
cucuugagccuugaac

SEQ ID NO: 3033183 - RNA, 17 nt, Human
cucuugagccuugaacu

SEQ ID NO: 3033184 - RNA, 23 nt, Human
cugacaacacucauugaccugag

SEQ ID NO: 3033185 - RNA, 22 nt, Human
cugacaacacucauugaccuga

SEQ ID NO: 3033186 - RNA, 21 nt, Human
cugaaggccccgcccaggcuu

SEQ ID NO: 3033187 - RNA, 19 nt, Human
cugaaggccccgcccaggc

SEQ ID NO: 3033188 - RNA, 18 nt, Human
cugaaggccccgcccagg

SEQ ID NO: 3033189 - RNA, 23 nt, Human
cugaaggacauugcggacagcca

SEQ ID NO: 3033190 - RNA, 21 nt, Human
cugaaggacauugcggacagc

SEQ ID NO: 3033191 - RNA, 21 nt, Human
cugagaucaaaacgguuuuac

SEQ ID NO: 3033192 - RNA, 15 nt, Human
cugagcuuucugcua

SEQ ID NO: 3033193 - RNA, 14 nt, Human
cugagcuuucugcu

SEQ ID NO: 3033194 - RNA, 23 nt, Human
cugaggacacuaaccacgcugga

SEQ ID NO: 3033195 - RNA, 20 nt, Human
cugaggacacuaaccacgcu

SEQ ID NO: 3033196 - RNA, 17 nt, Human
cugaggaauccagaccc

SEQ ID NO: 3033197 - RNA, 20 nt, Human
cugaggaauccagacccggc

SEQ ID NO: 3033198 - RNA, 14 nt, Human
cugaggaauccaga

SEQ ID NO: 3033199 - RNA, 21 nt, Human
cugaguacguugugcauuugg

SEQ ID NO: 3033200 - RNA, 18 nt, Human
cugaguacguugugcauu

SEQ ID NO: 3033201 - RNA, 17 nt, Human
cugaguacguugugcau

SEQ ID NO: 3033202 - RNA, 19 nt, Human
cugaguacguugugcauuu

SEQ ID NO: 3033203 - RNA, 20 nt, Human
cugaguacguugugcauuug

SEQ ID NO: 3033204 - RNA, 21 nt, Human
cugagaggacuuuucuuugug

SEQ ID NO: 3033205 - RNA, 22 nt, Human
cugagaggacuuuucuuugugg

SEQ ID NO: 3033206 - RNA, 17 nt, Human
cugagaguagagucacu

SEQ ID NO: 3033207 - RNA, 22 nt, Human
cugagacucgcgacaaugcaaa

SEQ ID NO: 3033208 - RNA, 22 nt, Human
cugacccaugcugcccugugag

SEQ ID NO: 3033209 - RNA, 21 nt, Human
cugacccaugcugcccuguga

SEQ ID NO: 3033210 - RNA, 20 nt, Human
cugagacucgcgacaaugca

SEQ ID NO: 3033211 - RNA, 21 nt, Human
cugagacucgcgacaaugcaa

SEQ ID NO: 3033212 - RNA, 23 nt, Human
cugagacagcccgggcucugccu

SEQ ID NO: 3033213 - RNA, 15 nt, Human
cucgaacuggcugca

SEQ ID NO: 3033214 - RNA, 13 nt, Human
cucgaacuggcug

SEQ ID NO: 3033215 - RNA, 14 nt, Human
cucgaacuggcugc

SEQ ID NO: 3033216 - RNA, 16 nt, Human
cuccucugcugcuggc

SEQ ID NO: 3033217 - RNA, 15 nt, Human
cuccucugcugcugg

SEQ ID NO: 3033218 - RNA, 18 nt, Human
cuccucugcugcuggcug

SEQ ID NO: 3033219 - RNA, 18 nt, Human
cuccuggcccacugcauc

SEQ ID NO: 3033220 - RNA, 16 nt, Human
cuccuggcccacugca

SEQ ID NO: 3033221 - RNA, 22 nt, Human
cucccccagccccauccucugu

SEQ ID NO: 3033222 - RNA, 20 nt, Human
cucccccagccccauccucu

SEQ ID NO: 3033223 - RNA, 15 nt, Human
cucccccagccccau

SEQ ID NO: 3033224 - RNA, 21 nt, Human
cuccaagaccuucuccuucac

SEQ ID NO: 3033225 - RNA, 22 nt, Human
cuccaagaccuucuccuucacc

SEQ ID NO: 3033226 - RNA, 24 nt, Human
cuccaagcaggacauggacaagga

SEQ ID NO: 3033227 - RNA, 22 nt, Human
cuccaagcaggacauggacaag

SEQ ID NO: 3033228 - RNA, 14 nt, Human
cuccaagcaggaca

SEQ ID NO: 3033229 - RNA, 13 nt, Human
cuccaagcaggac

SEQ ID NO: 3033230 - RNA, 16 nt, Human
cuccaagcucccaggc

SEQ ID NO: 3033231 - RNA, 15 nt, Human
cuccaagcucccagg

SEQ ID NO: 3033232 - RNA, 14 nt, Human
cuccaagcucccag

SEQ ID NO: 3033233 - RNA, 13 nt, Human
cuccaagcuccca

SEQ ID NO: 3033234 - RNA, 19 nt, Human
cuccacuuucuagccagag

SEQ ID NO: 3033235 - RNA, 16 nt, Human
cuccacuuucuagcca

SEQ ID NO: 3033236 - RNA, 19 nt, Human
agccccacccucagaugca

SEQ ID NO: 3033237 - RNA, 16 nt, Human
agccccagugcccaca

SEQ ID NO: 3033238 - RNA, 11 nt, Human
agccccauccu

SEQ ID NO: 3033239 - RNA, 20 nt, Human
agccccaucccaaacccuuc

SEQ ID NO: 3033240 - RNA, 15 nt, Human
agcccugagcuuucu

SEQ ID NO: 3033241 - RNA, 19 nt, Human
agccgagaucacgccacug

SEQ ID NO: 3033242 - RNA, 20 nt, Human
agccgagaucacgccacugc

SEQ ID NO: 3033243 - RNA, 22 nt, Human
agccucccgaguagcugggacu

SEQ ID NO: 3033244 - RNA, 17 nt, Human
agccucccaaagugcug

SEQ ID NO: 3033245 - RNA, 18 nt, Human
agccucccgaauagcugg

SEQ ID NO: 3033246 - RNA, 19 nt, Human
agccucccgaauagcuggg

SEQ ID NO: 3033247 - RNA, 20 nt, Human
agccucccgaauagcuggga

SEQ ID NO: 3033248 - RNA, 22 nt, Human
agccucccgaauagcugggacu

SEQ ID NO: 3033249 - RNA, 17 nt, Human
agccucccgaguagcug

SEQ ID NO: 3033250 - RNA, 21 nt, Human
agccgagaucacgccacugca

SEQ ID NO: 3033251 - RNA, 19 nt, Human
agccgagauugcaccacug

SEQ ID NO: 3033252 - RNA, 20 nt, Human
agccgagauugcaccacugc

SEQ ID NO: 3033253 - RNA, 18 nt, Human
agccgagaucacgccacu

SEQ ID NO: 3033254 - RNA, 22 nt, Human
agccgcuggggccaguuggucc

SEQ ID NO: 3033255 - RNA, 14 nt, Human
agccgcuggggcca

SEQ ID NO: 3033256 - RNA, 18 nt, Human
agccucccaaagugcugg

SEQ ID NO: 3033257 - RNA, 19 nt, Human
agccucccaaagugcuggg

SEQ ID NO: 3033258 - RNA, 20 nt, Human
agauguagacaguuggguuu

SEQ ID NO: 3033259 - RNA, 20 nt, Human
agcagcccucaauugugaaa

SEQ ID NO: 3033260 - RNA, 15 nt, Human
agcagccacauuccu

SEQ ID NO: 3033261 - RNA, 21 nt, Human
agcagccacauuccugaugcu

SEQ ID NO: 3033262 - RNA, 19 nt, Human
agcacuaaggugugcucug

SEQ ID NO: 3033263 - RNA, 12 nt, Human
agcaugaagaca

SEQ ID NO: 3033264 - RNA, 12 nt, Human
agcaugccugga

SEQ ID NO: 3033265 - RNA, 18 nt, Human
agccaaagcuaggccugg

SEQ ID NO: 3033266 - RNA, 19 nt, Human
agccaaagcuaggccuggc

SEQ ID NO: 3033267 - RNA, 20 nt, Human
agccaaagcuaggccuggcc

SEQ ID NO: 3033268 - RNA, 23 nt, Human
agccaaagcuaggccuggccaga

SEQ ID NO: 3033269 - RNA, 20 nt, Human
agccagaggagagaggaccc

SEQ ID NO: 3033270 - RNA, 20 nt, Human
agccaaggccaaaggaagca

SEQ ID NO: 3033271 - RNA, 22 nt, Human
agccaaggccaaaggaagcaca

SEQ ID NO: 3033272 - RNA, 23 nt, Human
agccaaggccaaaggaagcacau

SEQ ID NO: 3033273 - RNA, 16 nt, Human
agagguacacuuguga

SEQ ID NO: 3033274 - RNA, 17 nt, Human
agagguacacuugugaa

SEQ ID NO: 3033275 - RNA, 23 nt, Human
agaggguggugaccucugccuga

SEQ ID NO: 3033276 - RNA, 13 nt, Human
agauagccaaggc

SEQ ID NO: 3033277 - RNA, 22 nt, Human
agauacuuggggggcugaggug

SEQ ID NO: 3033278 - RNA, 13 nt, Human
agaggagaggggc

SEQ ID NO: 3033279 - RNA, 22 nt, Human
agaggggaacagacuggaagca

SEQ ID NO: 3033280 - RNA, 16 nt, Human
agaggggaagagacuu

SEQ ID NO: 3033281 - RNA, 16 nt, Human
agauagccaaggccaa

SEQ ID NO: 3033282 - RNA, 15 nt, Human
agauagccaaggcca

SEQ ID NO: 3033283 - RNA, 13 nt, Human
agacaaugacuua

SEQ ID NO: 3033284 - RNA, 17 nt, Human
agacaaugacuuacugu

SEQ ID NO: 3033285 - RNA, 21 nt, Human
agacaauuuauuauggcacau

SEQ ID NO: 3033286 - RNA, 19 nt, Human
agacaaugacuuacuguac

SEQ ID NO: 3033287 - RNA, 15 nt, Human
agacaauuuauuaug

SEQ ID NO: 3033288 - RNA, 13 nt, Human
agaccaucccuga

SEQ ID NO: 3033289 - RNA, 21 nt, Human
agaccaucccugaaggccccg

SEQ ID NO: 3033290 - RNA, 18 nt, Human
agaccaucccugaaggcc

SEQ ID NO: 3033291 - RNA, 17 nt, Human
agaccaucccugaaggc

SEQ ID NO: 3033292 - RNA, 14 nt, Human
agaccaucccugaa

SEQ ID NO: 3033293 - RNA, 16 nt, Human
agacagcccgggcucu

SEQ ID NO: 3033294 - RNA, 17 nt, Human
agacagcccgggcucug

SEQ ID NO: 3033295 - RNA, 20 nt, Human
agacagcccgggcucugccu

SEQ ID NO: 3033296 - RNA, 18 nt, Human
agacagcccgggcucugc

SEQ ID NO: 3033297 - RNA, 18 nt, Human
agacgggggcagagaggg

SEQ ID NO: 3033298 - RNA, 19 nt, Human
agacggagucccaccuugg

SEQ ID NO: 3033299 - RNA, 23 nt, Human
agacugaguacguugugcauuug

SEQ ID NO: 3033300 - RNA, 23 nt, Human
agagaggguggugaccucugccu

SEQ ID NO: 3033301 - RNA, 21 nt, Human
agagaagagauugugguuuca

SEQ ID NO: 3033302 - RNA, 10 nt, Human
agagaagaga

SEQ ID NO: 3033303 - RNA, 14 nt, Human
agguacacuuguga

SEQ ID NO: 3033304 - RNA, 17 nt, Human
agguaaggaauaccugu

SEQ ID NO: 3033305 - RNA, 16 nt, Human
agguacacuugugaau

SEQ ID NO: 3033306 - RNA, 17 nt, Human
agguacacuugugaaua

SEQ ID NO: 3033307 - RNA, 15 nt, Human
agguucaaagauauu

SEQ ID NO: 3033308 - RNA, 17 nt, Human
agguucaaagauauuuu

SEQ ID NO: 3033309 - RNA, 14 nt, Human
agguuaauguucau

SEQ ID NO: 3033310 - RNA, 15 nt, Human
agguuaauaaaguaa

SEQ ID NO: 3033311 - RNA, 13 nt, Human
agguucagcuugu

SEQ ID NO: 3033312 - RNA, 17 nt, Human
aggugcugccauccagg

SEQ ID NO: 3033313 - RNA, 16 nt, Human
aggugcugccauccag

SEQ ID NO: 3033314 - RNA, 14 nt, Human
aggucgaggcagga

SEQ ID NO: 3033315 - RNA, 17 nt, Human
agggcacaccgggcacu

SEQ ID NO: 3033316 - RNA, 20 nt, Human
agggcacaccgggcacucag

SEQ ID NO: 3033317 - RNA, 21 nt, Human
agggcacaccgggcacucaga

SEQ ID NO: 3033318 - RNA, 22 nt, Human
agggcacagaaaauggaagaca

SEQ ID NO: 3033319 - RNA, 17 nt, Human
agggccuggccugagcu

SEQ ID NO: 3033320 - RNA, 16 nt, Human
agggccuggccugagc

SEQ ID NO: 3033321 - RNA, 15 nt, Human
agggccuggccugag

SEQ ID NO: 3033322 - RNA, 19 nt, Human
agggcgggaggauguucug

SEQ ID NO: 3033323 - RNA, 16 nt, Human
aggggauagagagaga

SEQ ID NO: 3033324 - RNA, 21 nt, Human
aggggauagagagagaccacu

SEQ ID NO: 3033325 - RNA, 15 nt, Human
aggggcacagggucu

SEQ ID NO: 3033326 - RNA, 23 nt, Human
aggcuagugugguguuuccuggc

SEQ ID NO: 3033327 - RNA, 18 nt, Human
aggcugccucucccauca

SEQ ID NO: 3033328 - RNA, 17 nt, Human
agggacgcuacccggga

SEQ ID NO: 3033329 - RNA, 21 nt, Human
agggacgcuacccgggaaggg

SEQ ID NO: 3033330 - RNA, 20 nt, Human
agggacagaggggguggccu

SEQ ID NO: 3033331 - RNA, 13 nt, Human
agggacagagggg

SEQ ID NO: 3033332 - RNA, 12 nt, Human
agggacagaggg

SEQ ID NO: 3033333 - RNA, 15 nt, Human
aggaaaaacugauuu

SEQ ID NO: 3033334 - RNA, 13 nt, Human
aggaaaaacugau

SEQ ID NO: 3033335 - RNA, 17 nt, Human
agcugggugucaagagg

SEQ ID NO: 3033336 - RNA, 22 nt, Human
agcugggugucaagagggucug

SEQ ID NO: 3033337 - RNA, 21 nt, Human
agcuggucccacucaguccau

SEQ ID NO: 3033338 - RNA, 19 nt, Human
agcuggucccacucagucc

SEQ ID NO: 3033339 - RNA, 17 nt, Human
aggaggggauagagaga

SEQ ID NO: 3033340 - RNA, 18 nt, Human
aggauguucugggacaca

SEQ ID NO: 3033341 - RNA, 20 nt, Human
aggauguucugggacacagu

SEQ ID NO: 3033342 - RNA, 12 nt, Human
aggauucuuccu

SEQ ID NO: 3033343 - RNA, 18 nt, Human
aggagaggggcacagggu

SEQ ID NO: 3033344 - RNA, 16 nt, Human
aggagaggggcacagg

SEQ ID NO: 3033345 - RNA, 14 nt, Human
aggagaggggcaca

SEQ ID NO: 3033346 - RNA, 15 nt, Human
aggagagcuagcagc

SEQ ID NO: 3033347 - RNA, 20 nt, Human
aggaccucaggugagaagca

SEQ ID NO: 3033348 - RNA, 14 nt, Human
aggaccucagguga

SEQ ID NO: 3033349 - RNA, 20 nt, Human
aggaccccuccaugugggcu

SEQ ID NO: 3033350 - RNA, 22 nt, Human
augcuugcugcugauuuaaaca

SEQ ID NO: 3033351 - RNA, 16 nt, Human
augcuugcugcugauu

SEQ ID NO: 3033352 - RNA, 20 nt, Human
auggaaaugggcagagcaga

SEQ ID NO: 3033353 - RNA, 19 nt, Human
auggaaaugggcagagcag

SEQ ID NO: 3033354 - RNA, 22 nt, Human
augcuucuucagagacuccugc

SEQ ID NO: 3033355 - RNA, 15 nt, Human
augggaaugaauguc

SEQ ID NO: 3033356 - RNA, 23 nt, Human
auggcugccaaugggagcucaug

SEQ ID NO: 3033357 - RNA, 21 nt, Human
augcacagcuaacauggaagu

SEQ ID NO: 3033358 - RNA, 14 nt, Human
augcacagcuaaca

SEQ ID NO: 3033359 - RNA, 23 nt, Human
augcacagaguuguuacauuuuu

SEQ ID NO: 3033360 - RNA, 17 nt, Human
augcacacauuuuuuaa

SEQ ID NO: 3033361 - RNA, 19 nt, Human
augcacacauuuuuuaaau

SEQ ID NO: 3033362 - RNA, 22 nt, Human
augcacacauuuuuuaaaugca

SEQ ID NO: 3033363 - RNA, 20 nt, Human
augcaugaaguaauaugcac

SEQ ID NO: 3033364 - RNA, 23 nt, Human
augcaugaaguaauaugcacaca

SEQ ID NO: 3033365 - RNA, 18 nt, Human
augcauuugaaaauuuug

SEQ ID NO: 3033366 - RNA, 10 nt, Human
augcauuuga

SEQ ID NO: 3033367 - RNA, 12 nt, Human
augcauuugaaa

SEQ ID NO: 3033368 - RNA, 15 nt, Human
augccugguggcagc

SEQ ID NO: 3033369 - RNA, 16 nt, Human
augccugguggcagcu

SEQ ID NO: 3033370 - RNA, 17 nt, Human
augccugguggcagcug

SEQ ID NO: 3033371 - RNA, 17 nt, Human
augccugggcagaagga

SEQ ID NO: 3033372 - RNA, 14 nt, Human
augccugguggcag

SEQ ID NO: 3033373 - RNA, 23 nt, Human
augccuggauggggcugcaccgg

SEQ ID NO: 3033374 - RNA, 21 nt, Human
augccuggauggggcugcacc

SEQ ID NO: 3033375 - RNA, 21 nt, Human
auuaaaugacucuucccucaa

SEQ ID NO: 3033376 - RNA, 11 nt, Human
auuaaauuaug

SEQ ID NO: 3033377 - RNA, 16 nt, Human
auuaaaugcccagccc

SEQ ID NO: 3033378 - RNA, 13 nt, Human
auuaaauucuugc

SEQ ID NO: 3033379 - RNA, 14 nt, Human
auuaaaugacucuu

SEQ ID NO: 3033380 - RNA, 17 nt, Human
auuaaaugacucuuccc

SEQ ID NO: 3033381 - RNA, 15 nt, Human
auuaaaugcccagcc

SEQ ID NO: 3033382 - RNA, 14 nt, Human
auuaaaugcccagc

SEQ ID NO: 3033383 - RNA, 16 nt, Human
auguuuuaagaggcag

SEQ ID NO: 3033384 - RNA, 18 nt, Human
auguuuuaagaggcaggg

SEQ ID NO: 3033385 - RNA, 18 nt, Human
auguucucugaggacacu

SEQ ID NO: 3033386 - RNA, 17 nt, Human
auguucucugaggacac

SEQ ID NO: 3033387 - RNA, 15 nt, Human
auguucuuaauucuu

SEQ ID NO: 3033388 - RNA, 20 nt, Human
auguucuuaguggauguucu

SEQ ID NO: 3033389 - RNA, 22 nt, Human
auguucugacccugcuucaaau

SEQ ID NO: 3033390 - RNA, 14 nt, Human
auguucuuaauucu

SEQ ID NO: 3033391 - RNA, 14 nt, Human
auguguaaguauuc

SEQ ID NO: 3033392 - RNA, 20 nt, Human
augugggcuaguugggcuuc

SEQ ID NO: 3033393 - RNA, 15 nt, Human
augucacaggcaggu

SEQ ID NO: 3033394 - RNA, 14 nt, Human
augucacaggcagg

SEQ ID NO: 3033395 - RNA, 16 nt, Human
augucacaggcagguc

SEQ ID NO: 3033396 - RNA, 15 nt, Human
auggucggaaaacau

SEQ ID NO: 3033397 - RNA, 17 nt, Human
auguaagcucuacugag

SEQ ID NO: 3033398 - RNA, 18 nt, Human
augacucuucccucaaau

SEQ ID NO: 3033399 - RNA, 12 nt, Human
augagccuggca

SEQ ID NO: 3033400 - RNA, 17 nt, Human
augacuccagaauuucc

SEQ ID NO: 3033401 - RNA, 16 nt, Human
augacuccagaauuuc

SEQ ID NO: 3033402 - RNA, 12 nt, Human
augacuccagaa

SEQ ID NO: 3033403 - RNA, 18 nt, Human
augacuauucaguggcua

SEQ ID NO: 3033404 - RNA, 12 nt, Human
augacccagugg

SEQ ID NO: 3033405 - RNA, 14 nt, Human
augagccuggcaag

SEQ ID NO: 3033406 - RNA, 13 nt, Human
augagccuggcaa

SEQ ID NO: 3033407 - RNA, 23 nt, Human
aucuucuauauaauuccuguuuu

SEQ ID NO: 3033408 - RNA, 19 nt, Human
aucuuccaacucaaacucu

SEQ ID NO: 3033409 - RNA, 22 nt, Human
aucucucgugauugauaagaac

SEQ ID NO: 3033410 - RNA, 17 nt, Human
aucuucuuuauaauucu

SEQ ID NO: 3033411 - RNA, 17 nt, Human
aucuugaagacuuuucu

SEQ ID NO: 3033412 - RNA, 13 nt, Human
aucgaugcagugc

SEQ ID NO: 3033413 - RNA, 14 nt, Human
auccuccucagauc

SEQ ID NO: 3033414 - RNA, 11 nt, Human
auccuccucag

SEQ ID NO: 3033415 - RNA, 22 nt, Human
auccuccaggugcacaagcucc

SEQ ID NO: 3033416 - RNA, 19 nt, Human
auccuccaggugcacaagc

SEQ ID NO: 3033417 - RNA, 14 nt, Human
auccuccaggugca

SEQ ID NO: 3033418 - RNA, 13 nt, Human
auccuccaggugc

SEQ ID NO: 3033419 - RNA, 15 nt, Human
aucccuacuguaauu

SEQ ID NO: 3033420 - RNA, 22 nt, Human
auccucauacccacccccaccc

SEQ ID NO: 3033421 - RNA, 19 nt, Human
auccucauacccaccccca

SEQ ID NO: 3033422 - RNA, 18 nt, Human
auccucauacccaccccc

SEQ ID NO: 3033423 - RNA, 18 nt, Human
auccacccaccucagccu

SEQ ID NO: 3033424 - RNA, 20 nt, Human
auccacccaccucagccucc

SEQ ID NO: 3033425 - RNA, 16 nt, Human
auccacccaccucagc

SEQ ID NO: 3033426 - RNA, 12 nt, Human
aucagcugcuac

SEQ ID NO: 3033427 - RNA, 21 nt, Human
aucagccugggcaaugugaua

SEQ ID NO: 3033428 - RNA, 20 nt, Human
aucagccugggcaaugugau

SEQ ID NO: 3033429 - RNA, 11 nt, Human
aucagccuggg

SEQ ID NO: 3033430 - RNA, 19 nt, Human
aucauggagguuugaagau

SEQ ID NO: 3033431 - RNA, 20 nt, Human
aucagccugcuccagcuguu

SEQ ID NO: 3033432 - RNA, 13 nt, Human
aucagcugcuacu

SEQ ID NO: 3033433 - RNA, 23 nt, Human
aucagcugcuacuacuccuguag

SEQ ID NO: 3033434 - RNA, 14 nt, Human
agucaaggcuuaga

SEQ ID NO: 3033435 - RNA, 16 nt, Human
agucaaggcuuagacc

SEQ ID NO: 3033436 - RNA, 16 nt, Human
agucaagugaaaaagg

SEQ ID NO: 3033437 - RNA, 20 nt, Human
agucaagugaaaaaggagga

SEQ ID NO: 3033438 - RNA, 14 nt, Human
agucauucuucccu

SEQ ID NO: 3033439 - RNA, 13 nt, Human
agucauucuuuaa

SEQ ID NO: 3033440 - RNA, 18 nt, Human
agucauuauguuaauauu

SEQ ID NO: 3033441 - RNA, 12 nt, Human
agucauuauguu

SEQ ID NO: 3033442 - RNA, 13 nt, Human
agugauccuccca

SEQ ID NO: 3033443 - RNA, 23 nt, Human
agugugacaaggauugcuacugu

SEQ ID NO: 3033444 - RNA, 18 nt, Human
aguuacagacaaagcgug

SEQ ID NO: 3033445 - RNA, 17 nt, Human
aguuacagacaaagcgu

SEQ ID NO: 3033446 - RNA, 13 nt, Human
aguuguuacauuu

SEQ ID NO: 3033447 - RNA, 15 nt, Human
aguuguuacauuuuu

SEQ ID NO: 3033448 - RNA, 16 nt, Human
aguuguuacauuuuua

SEQ ID NO: 3033449 - RNA, 16 nt, Human
auauaauuccuguuuu

SEQ ID NO: 3033450 - RNA, 22 nt, Human
auauaauuccuguuuuuauuau

SEQ ID NO: 3033451 - RNA, 16 nt, Human
auaguaugguggcugg

SEQ ID NO: 3033452 - RNA, 21 nt, Human
auacuuauuuaaauagaugac

SEQ ID NO: 3033453 - RNA, 15 nt, Human
auacuuauuuaaaua

SEQ ID NO: 3033454 - RNA, 22 nt, Human
auacuuauuuaaauagaugaca

SEQ ID NO: 3033455 - RNA, 15 nt, Human
auaguaugguggcug

SEQ ID NO: 3033456 - RNA, 17 nt, Human
auauagcaagacauuau

SEQ ID NO: 3033457 - RNA, 16 nt, Human
auauaggaacuuaaau

SEQ ID NO: 3033458 - RNA, 11 nt, Human
auaucacuucc

SEQ ID NO: 3033459 - RNA, 20 nt, Human
auauccuaauaaaaagguga

SEQ ID NO: 3033460 - RNA, 23 nt, Human
auauccuaauaaaaaggugacca

SEQ ID NO: 3033461 - RNA, 22 nt, Human
auaugccugggcagaaggaaga

SEQ ID NO: 3033462 - RNA, 19 nt, Human
auaugcuuauacacuuaca

SEQ ID NO: 3033463 - RNA, 14 nt, Human
auaugcuuauacac

SEQ ID NO: 3033464 - RNA, 16 nt, Human
auaugcuuauacacuu

SEQ ID NO: 3033465 - RNA, 13 nt, Human
auauucaggaagc

SEQ ID NO: 3033466 - RNA, 16 nt, Human
auauucaggaagcuca

SEQ ID NO: 3033467 - RNA, 14 nt, Human
auauucaggaagcu

SEQ ID NO: 3033468 - RNA, 13 nt, Human
auacuuauuuaaa

SEQ ID NO: 3033469 - RNA, 12 nt, Human
auaccugucccc

SEQ ID NO: 3033470 - RNA, 19 nt, Human
auaaugugaaacuggauua

SEQ ID NO: 3033471 - RNA, 21 nt, Human
auaaugugaaacuggauuaaa

SEQ ID NO: 3033472 - RNA, 18 nt, Human
auaaugugaaacuggauu

SEQ ID NO: 3033473 - RNA, 16 nt, Human
acgugcacgcacacug

SEQ ID NO: 3033474 - RNA, 18 nt, Human
acgcugugcugcccugcc

SEQ ID NO: 3033475 - RNA, 17 nt, Human
acgcugugcugcccugc

SEQ ID NO: 3033476 - RNA, 16 nt, Human
acgcugugcugcccug

SEQ ID NO: 3033477 - RNA, 15 nt, Human
acgcugugcugcccu

SEQ ID NO: 3033478 - RNA, 11 nt, Human
acguggcugcu

SEQ ID NO: 3033479 - RNA, 15 nt, Human
acguggcugcuucaa

SEQ ID NO: 3033480 - RNA, 14 nt, Human
acguggcugcuuca

SEQ ID NO: 3033481 - RNA, 13 nt, Human
acguggcugcuuc

SEQ ID NO: 3033482 - RNA, 15 nt, Human
acuaaguuuuuaugg

SEQ ID NO: 3033483 - RNA, 22 nt, Human
acuaaguuuuuauggcuuuugu

SEQ ID NO: 3033484 - RNA, 12 nt, Human
acgauuucuguu

SEQ ID NO: 3033485 - RNA, 13 nt, Human
acgauuucuguuu

SEQ ID NO: 3033486 - RNA, 18 nt, Human
acgccacugcacuauagc

SEQ ID NO: 3033487 - RNA, 14 nt, Human
acgauuucuguuua

SEQ ID NO: 3033488 - RNA, 17 nt, Human
acgauuucuguuuagau

SEQ ID NO: 3033489 - RNA, 20 nt, Human
accugccccucaacucuccu

SEQ ID NO: 3033490 - RNA, 23 nt, Human
accugccccucaacucuccucca

SEQ ID NO: 3033491 - RNA, 21 nt, Human
accucugcacaagcugcaccc

SEQ ID NO: 3033492 - RNA, 18 nt, Human
accucugcacaagcugca

SEQ ID NO: 3033493 - RNA, 16 nt, Human
accucugcacaagcug

SEQ ID NO: 3033494 - RNA, 23 nt, Human
accuuucaauaggaaaaacugau

SEQ ID NO: 3033495 - RNA, 21 nt, Human
accuuucaauaggaaaaacug

SEQ ID NO: 3033496 - RNA, 17 nt, Human
accuuucaauaggaaaa

SEQ ID NO: 3033497 - RNA, 14 nt, Human
accuuggcugcagg

SEQ ID NO: 3033498 - RNA, 16 nt, Human
accuuucaauaggaaa

SEQ ID NO: 3033499 - RNA, 12 nt, Human
accuuggcucaa

SEQ ID NO: 3033500 - RNA, 14 nt, Human
accuuggcucaagu

SEQ ID NO: 3033501 - RNA, 12 nt, Human
accuuggcugca

SEQ ID NO: 3033502 - RNA, 21 nt, Human
acucuacccucuuagaaaaac

SEQ ID NO: 3033503 - RNA, 18 nt, Human
acucuacccucuuagaaa

SEQ ID NO: 3033504 - RNA, 13 nt, Human
acucuacccucuu

SEQ ID NO: 3033505 - RNA, 22 nt, Human
acucuauaacaaaggauacuua

SEQ ID NO: 3033506 - RNA, 14 nt, Human
acucuaucaaguau

SEQ ID NO: 3033507 - RNA, 16 nt, Human
acucuaucaaguauua

SEQ ID NO: 3033508 - RNA, 18 nt, Human
acucuuaaaacccaagug

SEQ ID NO: 3033509 - RNA, 11 nt, Human
acucuuaaaac

SEQ ID NO: 3033510 - RNA, 16 nt, Human
acucugugucaggugg

SEQ ID NO: 3033511 - RNA, 18 nt, Human
acucaaaagcugggcagg

SEQ ID NO: 3033512 - RNA, 11 nt, Human
acuauaaugua

SEQ ID NO: 3033513 - RNA, 16 nt, Human
acucaaacucuuaaaa

SEQ ID NO: 3033514 - RNA, 17 nt, Human
acucaaacucuuaaaac

SEQ ID NO: 3033515 - RNA, 14 nt, Human
acucccccaggugg

SEQ ID NO: 3033516 - RNA, 17 nt, Human
acuccccugcugggugu

SEQ ID NO: 3033517 - RNA, 13 nt, Human
acuccccugcugg

SEQ ID NO: 3033518 - RNA, 13 nt, Human
acuuauuuaaaua

SEQ ID NO: 3033519 - RNA, 18 nt, Human
acuuauuuaaauagauga

SEQ ID NO: 3033520 - RNA, 19 nt, Human
acuucacauauugauuucc

SEQ ID NO: 3033521 - RNA, 14 nt, Human
acuguuuagaugaa

SEQ ID NO: 3033522 - RNA, 18 nt, Human
acuucugccauauucugu

SEQ ID NO: 3033523 - RNA, 14 nt, Human
acuggagaaaaugg

SEQ ID NO: 3033524 - RNA, 15 nt, Human
acuggaagcacagcu

SEQ ID NO: 3033525 - RNA, 14 nt, Human
acuggaagcacagc

SEQ ID NO: 3033526 - RNA, 12 nt, Human
acugucuucagu

SEQ ID NO: 3033527 - RNA, 20 nt, Human
agaaaggaggggauagagag

SEQ ID NO: 3033528 - RNA, 23 nt, Human
agaaaggaggggauagagagaga

SEQ ID NO: 3033529 - RNA, 15 nt, Human
agaaauaaaguuucu

SEQ ID NO: 3033530 - RNA, 18 nt, Human
agaaauaaaguuucuguu

SEQ ID NO: 3033531 - RNA, 23 nt, Human
acuuuguucuggcucuuccaggc

SEQ ID NO: 3033532 - RNA, 20 nt, Human
acuuuguucuggcucuucca

SEQ ID NO: 3033533 - RNA, 23 nt, Human
acuuuccuucauucaacccaccu

SEQ ID NO: 3033534 - RNA, 23 nt, Human
agaaaauggaagacagcucuuau

SEQ ID NO: 3033535 - RNA, 20 nt, Human
agaaaauggacguguuauga

SEQ ID NO: 3033536 - RNA, 15 nt, Human
agaaaauggacgugu

SEQ ID NO: 3033537 - RNA, 23 nt, Human
agaaaauggacguguuaugacuc

SEQ ID NO: 3033538 - RNA, 22 nt, Human
agaaaauggacguguuaugacu

SEQ ID NO: 3033539 - RNA, 15 nt, Human
acuuuuauaaacuuu

SEQ ID NO: 3033540 - RNA, 19 nt, Human
acuuuuauaaacuuuaccu

SEQ ID NO: 3033541 - RNA, 22 nt, Human
acuuuuauaaacuuuaccuuuu

SEQ ID NO: 3033542 - RNA, 11 nt, Human
acauuaaauga

SEQ ID NO: 3033543 - RNA, 12 nt, Human
acauuaaaugac

SEQ ID NO: 3033544 - RNA, 13 nt, Human
acauuaaagguac

SEQ ID NO: 3033545 - RNA, 20 nt, Human
acaugcacagcuaacaugga

SEQ ID NO: 3033546 - RNA, 19 nt, Human
acaugcaaggucauuuuuu

SEQ ID NO: 3033547 - RNA, 18 nt, Human
acaugcaaggucauuuuu

SEQ ID NO: 3033548 - RNA, 21 nt, Human
acauguuuuucuucucccuca

SEQ ID NO: 3033549 - RNA, 22 nt, Human
acaucagcacgauuucuguuua

SEQ ID NO: 3033550 - RNA, 20 nt, Human
acaucagcacgauuucuguu

SEQ ID NO: 3033551 - RNA, 21 nt, Human
acaucagcacgauuucuguuu

SEQ ID NO: 3033552 - RNA, 19 nt, Human
acaucagcacgauuucugu

SEQ ID NO: 3033553 - RNA, 23 nt, Human
acauaaacaagaccacguuucua

SEQ ID NO: 3033554 - RNA, 17 nt, Human
accagcagccuggaccc

SEQ ID NO: 3033555 - RNA, 14 nt, Human
accagcagccugga

SEQ ID NO: 3033556 - RNA, 13 nt, Human
accagcagccugg

SEQ ID NO: 3033557 - RNA, 15 nt, Human
accacguuucuaaag

SEQ ID NO: 3033558 - RNA, 19 nt, Human
accacguuucuaaaggcua

SEQ ID NO: 3033559 - RNA, 14 nt, Human
accacuacauucug

SEQ ID NO: 3033560 - RNA, 21 nt, Human
accaacgucugugccauuuug

SEQ ID NO: 3033561 - RNA, 22 nt, Human
accaucccugaaggccccgccc

SEQ ID NO: 3033562 - RNA, 21 nt, Human
accaucccugaaggccccgcc

SEQ ID NO: 3033563 - RNA, 16 nt, Human
accaucaugucuggcu

SEQ ID NO: 3033564 - RNA, 17 nt, Human
accaucaugucuggcua

SEQ ID NO: 3033565 - RNA, 16 nt, Human
accaucccugaaggcc

SEQ ID NO: 3033566 - RNA, 18 nt, Human
accaucccugaaggcccc

SEQ ID NO: 3033567 - RNA, 14 nt, Human
accaucaugucugg

SEQ ID NO: 3033568 - RNA, 15 nt, Human
accccggccaccugc

SEQ ID NO: 3033569 - RNA, 16 nt, Human
acccaugcugcccugu

SEQ ID NO: 3033570 - RNA, 19 nt, Human
acccaugcugcccugugag

SEQ ID NO: 3033571 - RNA, 18 nt, Human
acccaugcugcccuguga

SEQ ID NO: 3033572 - RNA, 17 nt, Human
acccaugcugcccugug

SEQ ID NO: 3033573 - RNA, 16 nt, Human
acccaagggccuggcc

SEQ ID NO: 3033574 - RNA, 13 nt, Human
acccaagggccug

SEQ ID NO: 3033575 - RNA, 18 nt, Human
acacuguccuauuauauu

SEQ ID NO: 3033576 - RNA, 21 nt, Human
acagaggggguggccucccaa

SEQ ID NO: 3033577 - RNA, 22 nt, Human
acagaggggguggccucccaac

SEQ ID NO: 3033578 - RNA, 12 nt, Human
acagagucucac

SEQ ID NO: 3033579 - RNA, 14 nt, Human
acagagucucacug

SEQ ID NO: 3033580 - RNA, 17 nt, Human
acagagucucacuguug

SEQ ID NO: 3033581 - RNA, 19 nt, Human
acagagucucacuguugcc

SEQ ID NO: 3033582 - RNA, 15 nt, Human
acagccaugauucuu

SEQ ID NO: 3033583 - RNA, 19 nt, Human
acagccacggccaggccag

SEQ ID NO: 3033584 - RNA, 20 nt, Human
acaggugugaaccaccacac

SEQ ID NO: 3033585 - RNA, 23 nt, Human
acaggugugaaccaccacaccca

SEQ ID NO: 3033586 - RNA, 18 nt, Human
acaggcaagcaccuccug

SEQ ID NO: 3033587 - RNA, 15 nt, Human
acaggcaagcaccuc

SEQ ID NO: 3033588 - RNA, 16 nt, Human
acaggcaagcaccucc

SEQ ID NO: 3033589 - RNA, 12 nt, Human
acagcuccuucu

SEQ ID NO: 3033590 - RNA, 13 nt, Human
acagcuccuucug

SEQ ID NO: 3033591 - RNA, 14 nt, Human
acagcuccuucugu

SEQ ID NO: 3033592 - RNA, 23 nt, Human
acagcugccugggaucccucauc

SEQ ID NO: 3033593 - RNA, 13 nt, Human
acagcugccuggg

SEQ ID NO: 3033594 - RNA, 14 nt, Human
acagcugccuggga

SEQ ID NO: 3033595 - RNA, 13 nt, Human
acacaaagcuuuu

SEQ ID NO: 3033596 - RNA, 18 nt, Human
acacaaacgggcucagca

SEQ ID NO: 3033597 - RNA, 16 nt, Human
acaauuuauuauggca

SEQ ID NO: 3033598 - RNA, 14 nt, Human
acaauuuauuaugg

SEQ ID NO: 3033599 - RNA, 15 nt, Human
acaauuuauuauggc

SEQ ID NO: 3033600 - RNA, 15 nt, Human
acacggacacucaaa

SEQ ID NO: 3033601 - RNA, 14 nt, Human
acacuaaccacgcu

SEQ ID NO: 3033602 - RNA, 15 nt, Human
acacuaaccacgcug

SEQ ID NO: 3033603 - RNA, 11 nt, Human
acacagcucug

SEQ ID NO: 3033604 - RNA, 12 nt, Human
acacagcucugu

SEQ ID NO: 3033605 - RNA, 21 nt, Human
acaccacuacauucuguuaau

SEQ ID NO: 3033606 - RNA, 12 nt, Human
acaccagagccc

SEQ ID NO: 3033607 - RNA, 13 nt, Human
acaaagacugagu

SEQ ID NO: 3033608 - RNA, 21 nt, Human
acaaaccuguuucugcagcca

SEQ ID NO: 3033609 - RNA, 15 nt, Human
acaaacgggcucagc

SEQ ID NO: 3033610 - RNA, 20 nt, Human
acaaaauguaggguuauaau

SEQ ID NO: 3033611 - RNA, 18 nt, Human
aaagaugaaggucuguuu

SEQ ID NO: 3033612 - RNA, 11 nt, Human
aaagagguuuu

SEQ ID NO: 3033613 - RNA, 22 nt, Human
aaacacuguucucugcccucca

SEQ ID NO: 3033614 - RNA, 19 nt, Human
aaacacuguucucugcccu

SEQ ID NO: 3033615 - RNA, 13 nt, Human
aaaacacauuuuu

SEQ ID NO: 3033616 - RNA, 15 nt, Human
aaaacacauuuuucu

SEQ ID NO: 3033617 - RNA, 13 nt, Human
aaaauucagugga

SEQ ID NO: 3033618 - RNA, 18 nt, Human
aaacacuguucucugccc

SEQ ID NO: 3033619 - RNA, 14 nt, Human
aaagugcugggauu

SEQ ID NO: 3033620 - RNA, 11 nt, Human
aaagugcuggg

SEQ ID NO: 3033621 - RNA, 18 nt, Human
aaauggaagacagcucuu

SEQ ID NO: 3033622 - RNA, 16 nt, Human
aaauggaaaugggcag

SEQ ID NO: 3033623 - RNA, 20 nt, Human
aaauggacguguuaugacuc

SEQ ID NO: 3033624 - RNA, 22 nt, Human
aaauggacguguuaugacucca

SEQ ID NO: 3033625 - RNA, 21 nt, Human
aaauggacguguuaugacucc

SEQ ID NO: 3033626 - RNA, 15 nt, Human
aacaaaggauacuua

SEQ ID NO: 3033627 - RNA, 19 nt, Human
aacaaaggauacuuauuua

SEQ ID NO: 3033628 - RNA, 19 nt, Human
aacacauuuuucuuaggga

SEQ ID NO: 3033629 - RNA, 19 nt, Human
aacaccucugcacaagcug

SEQ ID NO: 3033630 - RNA, 22 nt, Human
aaccacucuaucaaguauuaua

SEQ ID NO: 3033631 - RNA, 14 nt, Human
aacauguaauuaag

SEQ ID NO: 3033632 - RNA, 21 nt, Human
aacauguaauuaaguacuaug

SEQ ID NO: 3033633 - RNA, 14 nt, Human
aacccuggugacca

SEQ ID NO: 3033634 - RNA, 16 nt, Human
aacuuuuuauauucuc

SEQ ID NO: 3033635 - RNA, 16 nt, Human
aacuuuuauaaacuuu

SEQ ID NO: 3033636 - RNA, 19 nt, Human
aacuuuuauaaacuuuacc

SEQ ID NO: 3033637 - RNA, 12 nt, Human
aacuuuuauaaa

SEQ ID NO: 3033638 - RNA, 15 nt, Human
aacuuuuauaaacuu

SEQ ID NO: 3033639 - RNA, 19 nt, Human
aacuuugaccucugcagca

SEQ ID NO: 3033640 - RNA, 20 nt, Human
aacuuugaccucugcagcaa

SEQ ID NO: 3033641 - RNA, 13 nt, Human
aacuuugaccucu

SEQ ID NO: 3033642 - RNA, 14 nt, Human
aacuuugaccucug

SEQ ID NO: 3033643 - RNA, 17 nt, Human
aacuuugaccucugcag

SEQ ID NO: 3033644 - RNA, 23 nt, Human
aacugacacaugcugaacaucac

SEQ ID NO: 3033645 - RNA, 19 nt, Human
aacugauuuuuuuuuccuu

SEQ ID NO: 3033646 - RNA, 17 nt, Human
aacugauuuuuuuuucc

SEQ ID NO: 3033647 - RNA, 19 nt, Human
aacuuauggggccaaaaua

SEQ ID NO: 3033648 - RNA, 17 nt, Human
aacuuaaauaaugugaa

SEQ ID NO: 3033649 - RNA, 20 nt, Human
aacucaccuggcaucuuaca

SEQ ID NO: 3033650 - RNA, 16 nt, Human
aacucaccugccccuc

SEQ ID NO: 3033651 - RNA, 15 nt, Human
aacucaccugccccu

SEQ ID NO: 3033652 - RNA, 12 nt, Human
aacucaccccag

SEQ ID NO: 3033653 - RNA, 15 nt, Human
aacugaacuucagag

SEQ ID NO: 3033654 - RNA, 19 nt, Human
aaucacacugucuucugau

SEQ ID NO: 3033655 - RNA, 18 nt, Human
aauauaggaacuuaaaua

SEQ ID NO: 3033656 - RNA, 20 nt, Human
aauauaggaacuuaaauaau

SEQ ID NO: 3033657 - RNA, 21 nt, Human
aauauaggaacuuaaauaaug

SEQ ID NO: 3033658 - RNA, 16 nt, Human
aauauaggaacuuaaa

SEQ ID NO: 3033659 - RNA, 19 nt, Human
aaugaugccaugaggaaca

SEQ ID NO: 3033660 - RNA, 14 nt, Human
aaucuccaaaauaa

SEQ ID NO: 3033661 - RNA, 13 nt, Human
aaucuccaaaaua

SEQ ID NO: 3033662 - RNA, 22 nt, Human
aaucugcuuuuuaaagaaugcu

SEQ ID NO: 3033663 - RNA, 16 nt, Human
aaugaaccacaucuug

SEQ ID NO: 3033664 - RNA, 17 nt, Human
aaugaaccacaucuugc

SEQ ID NO: 3033665 - RNA, 23 nt, Human
aaugaaccacaucuugcucugcu

SEQ ID NO: 3033666 - RNA, 21 nt, Human
aaugaugauccuaggcauuug

SEQ ID NO: 3033667 - RNA, 19 nt, Human
aaugucaguuguuauuuau

SEQ ID NO: 3033668 - RNA, 20 nt, Human
aaugucaguuguuauuuauu

SEQ ID NO: 3033669 - RNA, 22 nt, Human
aaugucuaguuguaacaccaug

SEQ ID NO: 3033670 - RNA, 21 nt, Human
aaugucagugugacugaucuc

SEQ ID NO: 3033671 - RNA, 17 nt, Human
aaugucagugugacuga

SEQ ID NO: 3033672 - RNA, 20 nt, Human
aaugucucuuuaaugucaca

SEQ ID NO: 3033673 - RNA, 13 nt, Human
aaugucaguguga

SEQ ID NO: 3033674 - RNA, 16 nt, Human
aaugucagugugacug

SEQ ID NO: 3033675 - RNA, 15 nt, Human
aaugucagugugacu

SEQ ID NO: 3033676 - RNA, 14 nt, Human
aaugguaguuuuac

SEQ ID NO: 3033677 - RNA, 13 nt, Human
aaugggcagagca

SEQ ID NO: 3033678 - RNA, 15 nt, Human
aaugggcagagcaga

SEQ ID NO: 3033679 - RNA, 18 nt, Human
aauuaaaacacaacaucu

SEQ ID NO: 3033680 - RNA, 19 nt, Human
aauguuugccucugccucu

SEQ ID NO: 3033681 - RNA, 18 nt, Human
aauguuugccucugccuc

SEQ ID NO: 3033682 - RNA, 18 nt, Human
aauuaguggcacuugcuu

SEQ ID NO: 3033683 - RNA, 20 nt, Human
aaguccccucuccuccacau

SEQ ID NO: 3033684 - RNA, 21 nt, Human
aaguccccucuccuccacauu

SEQ ID NO: 3033685 - RNA, 16 nt, Human
aagucuuagauguaua

SEQ ID NO: 3033686 - RNA, 20 nt, Human
aagguuaauguucaucaucc

SEQ ID NO: 3033687 - RNA, 15 nt, Human
aagguuaauaaagua

SEQ ID NO: 3033688 - RNA, 16 nt, Human
aagguuaauaaaguaa

SEQ ID NO: 3033689 - RNA, 11 nt, Human
aaggugggagg

SEQ ID NO: 3033690 - RNA, 11 nt, Human
aaguacuucuu

SEQ ID NO: 3033691 - RNA, 16 nt, Human
aaguaucccuacugua

SEQ ID NO: 3033692 - RNA, 16 nt, Human
aauaaugugaaacugg

SEQ ID NO: 3033693 - RNA, 22 nt, Human
aaguuguaggcauaaagucagg

SEQ ID NO: 3033694 - RNA, 22 nt, Human
aagugcugggauuacaggugug

SEQ ID NO: 3033695 - RNA, 13 nt, Human
aagaaauuugugg

SEQ ID NO: 3033696 - RNA, 14 nt, Human
aagcagaggaagga

SEQ ID NO: 3033697 - RNA, 18 nt, Human
aagccauaauuguucuua

SEQ ID NO: 3033698 - RNA, 16 nt, Human
aaggcaaggcugucaa

SEQ ID NO: 3033699 - RNA, 18 nt, Human
aaggcaaggcugucaauu

SEQ ID NO: 3033700 - RNA, 17 nt, Human
aaggcaaggcugucaau

SEQ ID NO: 3033701 - RNA, 11 nt, Human
aagcugggcag

SEQ ID NO: 3033702 - RNA, 13 nt, Human
aagcugggcaggu

SEQ ID NO: 3033703 - RNA, 18 nt, Human
aaggacauugcggacagc

SEQ ID NO: 3033704 - RNA, 20 nt, Human
aagcugcacccucaggcagg

SEQ ID NO: 3033705 - RNA, 21 nt, Human
aagcugcacccucaggcaggu

SEQ ID NO: 3033706 - RNA, 22 nt, Human
aagcugcacccucaggcaggug

SEQ ID NO: 3033707 - RNA, 12 nt, Human
aagcguggugga

SEQ ID NO: 3033708 - RNA, 19 nt, Human
aaaaauuuacuuuaaacua

SEQ ID NO: 3033709 - RNA, 18 nt, Human
aaaaauuuacuuuaaacu

SEQ ID NO: 3033710 - RNA, 13 nt, Human
aaaaauuuacuuu

SEQ ID NO: 3033711 - RNA, 12 nt, Human
aaaacacauuuu

SEQ ID NO: 3033712 - RNA, 15 nt, Human
aaaaacugauuuuuu

SEQ ID NO: 3033713 - RNA, 14 nt, Human
aaaaacauggccuu

SEQ ID NO: 3033714 - RNA, 13 nt, Human
aaaaacugauuuu

SEQ ID NO: 3033715 - RNA, 12 nt, Human
aaaaagaggcua

SEQ ID NO: 3033716 - RNA, 14 nt, Human
aaaaacacaaaagu

SEQ ID NO: 3033717 - RNA, 20 nt, Human
uucuucccaauagcaaggcu

SEQ ID NO: 3033718 - RNA, 21 nt, Human
uucuuauacauuugauaaagu

SEQ ID NO: 3033719 - RNA, 21 nt, Human
uucuuccacaagagcccaggc

SEQ ID NO: 3033720 - RNA, 12 nt, Human
uucuuucagcca

SEQ ID NO: 3033721 - RNA, 14 nt, Human
uucuuuccaaagua

SEQ ID NO: 3033722 - RNA, 21 nt, Human
uucuuguguguuuauugucaa

SEQ ID NO: 3033723 - RNA, 13 nt, Human
uucuuccucccuc

SEQ ID NO: 3033724 - RNA, 14 nt, Human
uucuuguguguuua

SEQ ID NO: 3033725 - RNA, 15 nt, Human
uugaacuccuggccu

SEQ ID NO: 3033726 - RNA, 16 nt, Human
uugaacuccuggccuc

SEQ ID NO: 3033727 - RNA, 21 nt, Human
uucuuuccaaaguacacuguu

SEQ ID NO: 3033728 - RNA, 20 nt, Human
uugaaaaaccauuuugcugu

SEQ ID NO: 3033729 - RNA, 23 nt, Human
uugaaaacacuguucucugcccu

SEQ ID NO: 3033730 - RNA, 22 nt, Human
uugaaaacacuguucucugccc

SEQ ID NO: 3033731 - RNA, 15 nt, Human
uucuggacuaaaacu

SEQ ID NO: 3033732 - RNA, 19 nt, Human
uucugcuucagccucccga

SEQ ID NO: 3033733 - RNA, 15 nt, Human
uucugcuucagccuc

SEQ ID NO: 3033734 - RNA, 16 nt, Human
uucugcuucagccucc

SEQ ID NO: 3033735 - RNA, 14 nt, Human
uucugcuucagccu

SEQ ID NO: 3033736 - RNA, 19 nt, Human
uucuguccuacucuguguc

SEQ ID NO: 3033737 - RNA, 18 nt, Human
uucuguauuuuguuuuug

SEQ ID NO: 3033738 - RNA, 17 nt, Human
uugauugggcacaucau

SEQ ID NO: 3033739 - RNA, 16 nt, Human
uugauugggcacauca

SEQ ID NO: 3033740 - RNA, 16 nt, Human
uugaugaucuuugcag

SEQ ID NO: 3033741 - RNA, 21 nt, Human
uugcaaaguaucccuacugua

SEQ ID NO: 3033742 - RNA, 18 nt, Human
uugaggguauguuuuaua

SEQ ID NO: 3033743 - RNA, 13 nt, Human
uugaggguugggc

SEQ ID NO: 3033744 - RNA, 16 nt, Human
uugaggguugggcugg

SEQ ID NO: 3033745 - RNA, 11 nt, Human
uugagccuggg

SEQ ID NO: 3033746 - RNA, 23 nt, Human
uugauagcacagacccugcccug

SEQ ID NO: 3033747 - RNA, 23 nt, Human
uugauauccucuuugagugaagc

SEQ ID NO: 3033748 - RNA, 19 nt, Human
uugacuauuuuuguuuuua

SEQ ID NO: 3033749 - RNA, 15 nt, Human
uugacgccaucccag

SEQ ID NO: 3033750 - RNA, 21 nt, Human
uugacuauuuuuguuuuuauu

SEQ ID NO: 3033751 - RNA, 19 nt, Human
uugacgccaucccagcccc

SEQ ID NO: 3033752 - RNA, 18 nt, Human
uugacgccaucccagccc

SEQ ID NO: 3033753 - RNA, 17 nt, Human
uugacgccaucccagcc

SEQ ID NO: 3033754 - RNA, 16 nt, Human
uugaccucugcagcaa

SEQ ID NO: 3033755 - RNA, 21 nt, Human
uugaccucaggugauccaccc

SEQ ID NO: 3033756 - RNA, 14 nt, Human
uugaccucugcagc

SEQ ID NO: 3033757 - RNA, 15 nt, Human
uugaccucugcagca

SEQ ID NO: 3033758 - RNA, 17 nt, Human
uugaccgugaggccaga

SEQ ID NO: 3033759 - RNA, 18 nt, Human
uugaacuggguacuugug

SEQ ID NO: 3033760 - RNA, 13 nt, Human
uugaacuuugacc

SEQ ID NO: 3033761 - RNA, 14 nt, Human
uugaauuguaagga

SEQ ID NO: 3033762 - RNA, 22 nt, Human
uucucauguugaaacuuuaaga

SEQ ID NO: 3033763 - RNA, 16 nt, Human
uucuccacccugcucu

SEQ ID NO: 3033764 - RNA, 20 nt, Human
uucuccaccugccagggaca

SEQ ID NO: 3033765 - RNA, 18 nt, Human
uucuccaccugccaggga

SEQ ID NO: 3033766 - RNA, 16 nt, Human
uucuccaccugccagg

SEQ ID NO: 3033767 - RNA, 15 nt, Human
uucuccaccugccag

SEQ ID NO: 3033768 - RNA, 14 nt, Human
uucuccaccugcca

SEQ ID NO: 3033769 - RNA, 12 nt, Human
uucuccaccugc

SEQ ID NO: 3033770 - RNA, 21 nt, Human
uucuccaccucccacaaagga

SEQ ID NO: 3033771 - RNA, 14 nt, Human
uucucucaucuguu

SEQ ID NO: 3033772 - RNA, 19 nt, Human
uucucuccuguaccucuug

SEQ ID NO: 3033773 - RNA, 14 nt, Human
uucucugaggacac

SEQ ID NO: 3033774 - RNA, 20 nt, Human
uucucugaggacacuaacca

SEQ ID NO: 3033775 - RNA, 12 nt, Human
uucucugcccuc

SEQ ID NO: 3033776 - RNA, 11 nt, Human
uucucugcccu

SEQ ID NO: 3033777 - RNA, 14 nt, Human
uucucuccagcccc

SEQ ID NO: 3033778 - RNA, 13 nt, Human
uucucuccagccc

SEQ ID NO: 3033779 - RNA, 16 nt, Human
uucucuccagccccug

SEQ ID NO: 3033780 - RNA, 15 nt, Human
uucucuccagccccu

SEQ ID NO: 3033781 - RNA, 14 nt, Human
uucucuccuguacc

SEQ ID NO: 3033782 - RNA, 18 nt, Human
uucucuccuguaccucuu

SEQ ID NO: 3033783 - RNA, 19 nt, Human
uucugauccuaguuccacc

SEQ ID NO: 3033784 - RNA, 19 nt, Human
uucugcucacauaucuguc

SEQ ID NO: 3033785 - RNA, 18 nt, Human
uucugacccugcuucaaa

SEQ ID NO: 3033786 - RNA, 22 nt, Human
uucugacccaugcugcccugug

SEQ ID NO: 3033787 - RNA, 23 nt, Human
uucugacccaugcugcccuguga

SEQ ID NO: 3033788 - RNA, 17 nt, Human
uucucugcccuccaaga

SEQ ID NO: 3033789 - RNA, 16 nt, Human
uucucugcccuccaag

SEQ ID NO: 3033790 - RNA, 21 nt, Human
uucuauauaauuccuguuuuu

SEQ ID NO: 3033791 - RNA, 22 nt, Human
uucuacucgaguuacagacaaa

SEQ ID NO: 3033792 - RNA, 13 nt, Human
uucuacgccaggg

SEQ ID NO: 3033793 - RNA, 20 nt, Human
uucuacccagcgagcccugg

SEQ ID NO: 3033794 - RNA, 21 nt, Human
uucuacccagcgagcccuggu

SEQ ID NO: 3033795 - RNA, 14 nt, Human
uucuacccaggugc

SEQ ID NO: 3033796 - RNA, 12 nt, Human
uucuacccagcg

SEQ ID NO: 3033797 - RNA, 19 nt, Human
uucuacccagcgagcccug

SEQ ID NO: 3033798 - RNA, 18 nt, Human
uuccugaagaauugaaaa

SEQ ID NO: 3033799 - RNA, 16 nt, Human
uuccauggccucuuca

SEQ ID NO: 3033800 - RNA, 12 nt, Human
uuccauggccuc

SEQ ID NO: 3033801 - RNA, 15 nt, Human
uuccugaggcugggc

SEQ ID NO: 3033802 - RNA, 20 nt, Human
uuccugaggcugggcucccu

SEQ ID NO: 3033803 - RNA, 23 nt, Human
uuccugaugcuucuucagagacu

SEQ ID NO: 3033804 - RNA, 21 nt, Human
uuccuugaguugauucagcuc

SEQ ID NO: 3033805 - RNA, 20 nt, Human
uuccuugaguugauucagcu

SEQ ID NO: 3033806 - RNA, 14 nt, Human
uucacgcccuuggc

SEQ ID NO: 3033807 - RNA, 13 nt, Human
uucacggaagagc

SEQ ID NO: 3033808 - RNA, 22 nt, Human
uucaccuuuguccccaccgcag

SEQ ID NO: 3033809 - RNA, 16 nt, Human
uucagacagcugccug

SEQ ID NO: 3033810 - RNA, 15 nt, Human
uucagacagcugccu

SEQ ID NO: 3033811 - RNA, 14 nt, Human
uucagacagcugcc

SEQ ID NO: 3033812 - RNA, 17 nt, Human
uucacggaagagccuug

SEQ ID NO: 3033813 - RNA, 17 nt, Human
uucagacagcugccugg

SEQ ID NO: 3033814 - RNA, 13 nt, Human
uucacccuuuucu

SEQ ID NO: 3033815 - RNA, 14 nt, Human
uucaccuuuguccc

SEQ ID NO: 3033816 - RNA, 20 nt, Human
uucaccuuuguccccaccgc

SEQ ID NO: 3033817 - RNA, 19 nt, Human
uucaccuuuguccccaccg

SEQ ID NO: 3033818 - RNA, 21 nt, Human
uucaauaggaaaaacugauuu

SEQ ID NO: 3033819 - RNA, 22 nt, Human
uucaauaggaaaaacugauuuu

SEQ ID NO: 3033820 - RNA, 16 nt, Human
uuauuuggaaaggaau

SEQ ID NO: 3033821 - RNA, 22 nt, Human
uuauuugaguggaguuacugaa

SEQ ID NO: 3033822 - RNA, 20 nt, Human
uuauuuggaaaggaaugcaa

SEQ ID NO: 3033823 - RNA, 18 nt, Human
uuauuuuauuaugcauga

SEQ ID NO: 3033824 - RNA, 22 nt, Human
uucaauaacuggaacacucuau

SEQ ID NO: 3033825 - RNA, 16 nt, Human
uucaauaacuggaaca

SEQ ID NO: 3033826 - RNA, 12 nt, Human
uucaauaacugg

SEQ ID NO: 3033827 - RNA, 21 nt, Human
uucaacagguuuuccugaaga

SEQ ID NO: 3033828 - RNA, 22 nt, Human
uuauuuuggaaaauaaauuauu

SEQ ID NO: 3033829 - RNA, 18 nt, Human
uucaaaugcuguaacuuu

SEQ ID NO: 3033830 - RNA, 16 nt, Human
uuccaaaguacacugu

SEQ ID NO: 3033831 - RNA, 13 nt, Human
uuccaaaguacac

SEQ ID NO: 3033832 - RNA, 15 nt, Human
uuccauggacuuugu

SEQ ID NO: 3033833 - RNA, 14 nt, Human
uuccauggacuuug

SEQ ID NO: 3033834 - RNA, 19 nt, Human
uuccaacccucaucaccaa

SEQ ID NO: 3033835 - RNA, 21 nt, Human
uucagcugguugagguuucaa

SEQ ID NO: 3033836 - RNA, 12 nt, Human
uucagcuccagc

SEQ ID NO: 3033837 - RNA, 15 nt, Human
uucagcuccagcuca

SEQ ID NO: 3033838 - RNA, 22 nt, Human
uucagcuuguaaauagcucagg

SEQ ID NO: 3033839 - RNA, 14 nt, Human
uucaguggcagcug

SEQ ID NO: 3033840 - RNA, 13 nt, Human
uucaguggcagcu

SEQ ID NO: 3033841 - RNA, 13 nt, Human
uucaguguacaug

SEQ ID NO: 3033842 - RNA, 12 nt, Human
uucaguguacau

SEQ ID NO: 3033843 - RNA, 17 nt, Human
uucaguggcagcugcuu

SEQ ID NO: 3033844 - RNA, 15 nt, Human
uucaguggcagcugc

SEQ ID NO: 3033845 - RNA, 16 nt, Human
uucaguggcagcugcu

SEQ ID NO: 3033846 - RNA, 15 nt, Human
uucauaaccuagccu

SEQ ID NO: 3033847 - RNA, 19 nt, Human
uucauccuccucagaucuu

SEQ ID NO: 3033848 - RNA, 15 nt, Human
uucauccuccucaga

SEQ ID NO: 3033849 - RNA, 14 nt, Human
uuagugauguaauu

SEQ ID NO: 3033850 - RNA, 17 nt, Human
ugugaaaagaaaaauga

SEQ ID NO: 3033851 - RNA, 15 nt, Human
ugugaaaagaaaaau

SEQ ID NO: 3033852 - RNA, 13 nt, Human
ugugaaaagaaaa

SEQ ID NO: 3033853 - RNA, 17 nt, Human
uuauaacuuuuuauauu

SEQ ID NO: 3033854 - RNA, 18 nt, Human
uuauaauaauguuaacau

SEQ ID NO: 3033855 - RNA, 15 nt, Human
uuauaauaauguuaa

SEQ ID NO: 3033856 - RNA, 15 nt, Human
uuauaaugaaugaaa

SEQ ID NO: 3033857 - RNA, 21 nt, Human
uuauauucucagcagagugcu

SEQ ID NO: 3033858 - RNA, 20 nt, Human
uuauauucucagcagagugc

SEQ ID NO: 3033859 - RNA, 19 nt, Human
uuauauucucagcagagug

SEQ ID NO: 3033860 - RNA, 18 nt, Human
uuauauucucagcagagu

SEQ ID NO: 3033861 - RNA, 16 nt, Human
uuauauucucagcaga

SEQ ID NO: 3033862 - RNA, 11 nt, Human
uuauacauaaa

SEQ ID NO: 3033863 - RNA, 15 nt, Human
uuaugauugccuuuu

SEQ ID NO: 3033864 - RNA, 21 nt, Human
uuaugauugccuuuuuauaac

SEQ ID NO: 3033865 - RNA, 17 nt, Human
uuauggaacacucugag

SEQ ID NO: 3033866 - RNA, 21 nt, Human
uuauggacaaugacccagugg

SEQ ID NO: 3033867 - RNA, 20 nt, Human
uuauggaacacucugagacu

SEQ ID NO: 3033868 - RNA, 18 nt, Human
uuauggaacacucugaga

SEQ ID NO: 3033869 - RNA, 17 nt, Human
uuauggcuuuugugcau

SEQ ID NO: 3033870 - RNA, 14 nt, Human
uuauggcacaucag

SEQ ID NO: 3033871 - RNA, 16 nt, Human
uuauggcuuuugugca

SEQ ID NO: 3033872 - RNA, 16 nt, Human
uuauuaacaaaacagu

SEQ ID NO: 3033873 - RNA, 21 nt, Human
uuauuaaaugcccagccccuu

SEQ ID NO: 3033874 - RNA, 19 nt, Human
uuauuaaaugcccagcccc

SEQ ID NO: 3033875 - RNA, 20 nt, Human
uugugaaaaaauuuacuuua

SEQ ID NO: 3033876 - RNA, 20 nt, Human
uugugaaaggaaagaggcuc

SEQ ID NO: 3033877 - RNA, 12 nt, Human
uugugauuuuug

SEQ ID NO: 3033878 - RNA, 16 nt, Human
uugugauuuuuguaau

SEQ ID NO: 3033879 - RNA, 17 nt, Human
uugugauuuuuguaauu

SEQ ID NO: 3033880 - RNA, 15 nt, Human
uugucuuaaaaagug

SEQ ID NO: 3033881 - RNA, 15 nt, Human
uuguauucucuccug

SEQ ID NO: 3033882 - RNA, 16 nt, Human
uuguauucucuccugu

SEQ ID NO: 3033883 - RNA, 19 nt, Human
uuguauucucuccuguacc

SEQ ID NO: 3033884 - RNA, 15 nt, Human
uugguauuugaaaca

SEQ ID NO: 3033885 - RNA, 13 nt, Human
uuggucuguguga

SEQ ID NO: 3033886 - RNA, 22 nt, Human
uuggguucaagcgauucuucug

SEQ ID NO: 3033887 - RNA, 18 nt, Human
uuguacauaaugcgugca

SEQ ID NO: 3033888 - RNA, 14 nt, Human
uuguacauaaugcg

SEQ ID NO: 3033889 - RNA, 15 nt, Human
uuguaaauuaacuuu

SEQ ID NO: 3033890 - RNA, 16 nt, Human
uuguaaauuaacuuuu

SEQ ID NO: 3033891 - RNA, 18 nt, Human
uuguaaauuaacuuuuau

SEQ ID NO: 3033892 - RNA, 23 nt, Human
uuguaaauuaacuuuuauaaacu

SEQ ID NO: 3033893 - RNA, 17 nt, Human
uuguaaauagcucaggu

SEQ ID NO: 3033894 - RNA, 15 nt, Human
uugugccuaaugugu

SEQ ID NO: 3033895 - RNA, 18 nt, Human
uugugccuaauguguuug

SEQ ID NO: 3033896 - RNA, 17 nt, Human
uugugcauuaucuagau

SEQ ID NO: 3033897 - RNA, 12 nt, Human
uugugcauuugg

SEQ ID NO: 3033898 - RNA, 22 nt, Human
uugugcauuaucuagauacugu

SEQ ID NO: 3033899 - RNA, 23 nt, Human
uugugcauuaucuagauacugua

SEQ ID NO: 3033900 - RNA, 13 nt, Human
uuguguucaccuu

SEQ ID NO: 3033901 - RNA, 22 nt, Human
uuguggauuuaacagaaaugua

SEQ ID NO: 3033902 - RNA, 23 nt, Human
uuguggauuuaacagaaauguac

SEQ ID NO: 3033903 - RNA, 21 nt, Human
uuguguuuauauauaagccaa

SEQ ID NO: 3033904 - RNA, 20 nt, Human
uuguggauuuaacagaaaug

SEQ ID NO: 3033905 - RNA, 21 nt, Human
uuguggauuuaacagaaaugu

SEQ ID NO: 3033906 - RNA, 17 nt, Human
uuguggacacagcucuu

SEQ ID NO: 3033907 - RNA, 16 nt, Human
uuguggacacagcucu

SEQ ID NO: 3033908 - RNA, 20 nt, Human
uuguuagugugucuuagugu

SEQ ID NO: 3033909 - RNA, 22 nt, Human
uuguuaguaugaggcauuuguu

SEQ ID NO: 3033910 - RNA, 14 nt, Human
uuguuacauuuuua

SEQ ID NO: 3033911 - RNA, 19 nt, Human
uuguuaguaugaggcauuu

SEQ ID NO: 3033912 - RNA, 21 nt, Human
uuguuaguaugaggcauuugu

SEQ ID NO: 3033913 - RNA, 13 nt, Human
uuuauaacuuuuu

SEQ ID NO: 3033914 - RNA, 16 nt, Human
uuuauaacuuuuuaua

SEQ ID NO: 3033915 - RNA, 13 nt, Human
uuuauuaugcaug

SEQ ID NO: 3033916 - RNA, 13 nt, Human
uuuauuauggcac

SEQ ID NO: 3033917 - RNA, 14 nt, Human
uuuauggcuuuugu

SEQ ID NO: 3033918 - RNA, 16 nt, Human
uuuauggcuuuugugc

SEQ ID NO: 3033919 - RNA, 14 nt, Human
uuucauuuagguga

SEQ ID NO: 3033920 - RNA, 18 nt, Human
uuucauuuaggugaggaa

SEQ ID NO: 3033921 - RNA, 13 nt, Human
uuucaguguacau

SEQ ID NO: 3033922 - RNA, 14 nt, Human
uuucaguguacaug

SEQ ID NO: 3033923 - RNA, 14 nt, Human
uuucaauaggaaaa

SEQ ID NO: 3033924 - RNA, 12 nt, Human
uuucaauaggaa

SEQ ID NO: 3033925 - RNA, 17 nt, Human
uuucaauaggaaaaacu

SEQ ID NO: 3033926 - RNA, 14 nt, Human
uuuacuuuaaacua

SEQ ID NO: 3033927 - RNA, 15 nt, Human
uuuacuucuuauaca

SEQ ID NO: 3033928 - RNA, 19 nt, Human
uuuacuucuuauacauuug

SEQ ID NO: 3033929 - RNA, 22 nt, Human
uuuacuucuuauacauuugaua

SEQ ID NO: 3033930 - RNA, 14 nt, Human
uuuagaaauauaau

SEQ ID NO: 3033931 - RNA, 12 nt, Human
uuuagacagagu

SEQ ID NO: 3033932 - RNA, 17 nt, Human
uuuaagaacuaaaaugu

SEQ ID NO: 3033933 - RNA, 16 nt, Human
uuuaagacccucucaa

SEQ ID NO: 3033934 - RNA, 22 nt, Human
uuuaagaaaaaggaugcacaga

SEQ ID NO: 3033935 - RNA, 18 nt, Human
uuuaagaaaaaggaugca

SEQ ID NO: 3033936 - RNA, 18 nt, Human
uuuaacagaaauguacag

SEQ ID NO: 3033937 - RNA, 21 nt, Human
uuuugaagauucuauguuaau

SEQ ID NO: 3033938 - RNA, 11 nt, Human
uuuuuaaaugc

SEQ ID NO: 3033939 - RNA, 12 nt, Human
uuuuuaagaaaa

SEQ ID NO: 3033940 - RNA, 16 nt, Human
uuuuuaagugcugcau

SEQ ID NO: 3033941 - RNA, 17 nt, Human
uuuuuaagugcugcauu

SEQ ID NO: 3033942 - RNA, 18 nt, Human
uuuuuaagugcugcauuu

SEQ ID NO: 3033943 - RNA, 19 nt, Human
uuuuuaagugcugcauuua

SEQ ID NO: 3033944 - RNA, 22 nt, Human
uuuuuaagugcugcauuuaaaa

SEQ ID NO: 3033945 - RNA, 23 nt, Human
uuuuuaagugcugcauuuaaaag

SEQ ID NO: 3033946 - RNA, 11 nt, Human
uuuuuuuacua

SEQ ID NO: 3033947 - RNA, 12 nt, Human
uuuuuuuuaaga

SEQ ID NO: 3033948 - RNA, 13 nt, Human
uuugguauuugaa

SEQ ID NO: 3033949 - RNA, 15 nt, Human
uuuguauucucuccu

SEQ ID NO: 3033950 - RNA, 15 nt, Human
uuuguugucagcuga

SEQ ID NO: 3033951 - RNA, 22 nt, Human
uuuguuaguaugaggcauuugu

SEQ ID NO: 3033952 - RNA, 18 nt, Human
uuuggaaaggaaugcaaa

SEQ ID NO: 3033953 - RNA, 17 nt, Human
uuuggaaaggaaugcaa

SEQ ID NO: 3033954 - RNA, 16 nt, Human
uuuggaaaggaaugca

SEQ ID NO: 3033955 - RNA, 19 nt, Human
uuuggaaaggaaugcaaag

SEQ ID NO: 3033956 - RNA, 12 nt, Human
uuuggaaaauaa

SEQ ID NO: 3033957 - RNA, 13 nt, Human
uuuggacccugag

SEQ ID NO: 3033958 - RNA, 15 nt, Human
uuugcaggaaauccu

SEQ ID NO: 3033959 - RNA, 22 nt, Human
uuugaguggaguuacugaacag

SEQ ID NO: 3033960 - RNA, 21 nt, Human
uuugagugccuuacacaaugg

SEQ ID NO: 3033961 - RNA, 17 nt, Human
uuuccguuaaaauacca

SEQ ID NO: 3033962 - RNA, 13 nt, Human
uuugagugccuua

SEQ ID NO: 3033963 - RNA, 15 nt, Human
uuuccguuaaaauac

SEQ ID NO: 3033964 - RNA, 13 nt, Human
uuuugaaauguca

SEQ ID NO: 3033965 - RNA, 16 nt, Human
uuuucuuucagccaag

SEQ ID NO: 3033966 - RNA, 13 nt, Human
uuuucuucucccu

SEQ ID NO: 3033967 - RNA, 22 nt, Human
uuuucuuguguguuuauuguca

SEQ ID NO: 3033968 - RNA, 13 nt, Human
uuuucuacucgag

SEQ ID NO: 3033969 - RNA, 22 nt, Human
uuuucuacucgaguuacagaca

SEQ ID NO: 3033970 - RNA, 20 nt, Human
uuuucuacucgaguuacaga

SEQ ID NO: 3033971 - RNA, 15 nt, Human
uuuucaaauguucuc

SEQ ID NO: 3033972 - RNA, 22 nt, Human
uuuucccuauuagagaagagau

SEQ ID NO: 3033973 - RNA, 18 nt, Human
uuuucccuauuagagaag

SEQ ID NO: 3033974 - RNA, 13 nt, Human
uuuuaucuucuau

SEQ ID NO: 3033975 - RNA, 19 nt, Human
uuuuaucgucacugcuuaa

SEQ ID NO: 3033976 - RNA, 17 nt, Human
uuuucaaaauaaaaaug

SEQ ID NO: 3033977 - RNA, 18 nt, Human
uuuuauuuuuagacagag

SEQ ID NO: 3033978 - RNA, 13 nt, Human
uuuuauacauaaa

SEQ ID NO: 3033979 - RNA, 21 nt, Human
uuuuauacauaaacaagacca

SEQ ID NO: 3033980 - RNA, 15 nt, Human
uuuuacuaauagaca

SEQ ID NO: 3033981 - RNA, 13 nt, Human
uuuuuuuugacaa

SEQ ID NO: 3033982 - RNA, 16 nt, Human
ugcacgcacacugucu

SEQ ID NO: 3033983 - RNA, 21 nt, Human
ugcaccggcuggccuggcccc

SEQ ID NO: 3033984 - RNA, 17 nt, Human
ugcaccuggaauauaua

SEQ ID NO: 3033985 - RNA, 20 nt, Human
ugcaccuggaauauauaacc

SEQ ID NO: 3033986 - RNA, 22 nt, Human
ugcaccuggaauauauaaccag

SEQ ID NO: 3033987 - RNA, 18 nt, Human
ugcaccggcuggccuggc

SEQ ID NO: 3033988 - RNA, 20 nt, Human
ugcaccggcuggccuggccc

SEQ ID NO: 3033989 - RNA, 19 nt, Human
ugcaccggcuggccuggcc

SEQ ID NO: 3033990 - RNA, 18 nt, Human
ugcacugacauuguuggc

SEQ ID NO: 3033991 - RNA, 21 nt, Human
ugcacugacauuguuggccaa

SEQ ID NO: 3033992 - RNA, 13 nt, Human
ugcaauggcagcc

SEQ ID NO: 3033993 - RNA, 14 nt, Human
ugcaauggcagccu

SEQ ID NO: 3033994 - RNA, 15 nt, Human
ugcaauggcagccuu

SEQ ID NO: 3033995 - RNA, 16 nt, Human
ugcaauggcagccuug

SEQ ID NO: 3033996 - RNA, 16 nt, Human
ugcaaugaccuuucaa

SEQ ID NO: 3033997 - RNA, 13 nt, Human
ugcaaugaccuuu

SEQ ID NO: 3033998 - RNA, 23 nt, Human
ugcaaugaccuuucaauaggaaa

SEQ ID NO: 3033999 - RNA, 22 nt, Human
ugcaaugaccuuucaauaggaa

SEQ ID NO: 3034000 - RNA, 19 nt, Human
ugcaaugaccuuucaauag

SEQ ID NO: 3034001 - RNA, 17 nt, Human
ugcaaugaccuuucaau

SEQ ID NO: 3034002 - RNA, 17 nt, Human
ugcacagaguuguuaca

SEQ ID NO: 3034003 - RNA, 18 nt, Human
ugcacagaguuguuacau

SEQ ID NO: 3034004 - RNA, 19 nt, Human
ugcacagaguuguuacauu

SEQ ID NO: 3034005 - RNA, 20 nt, Human
ugcacaaacagaggccgcca

SEQ ID NO: 3034006 - RNA, 19 nt, Human
ugcacaaacagaggccgcc

SEQ ID NO: 3034007 - RNA, 17 nt, Human
ugcacaaacagaggccg

SEQ ID NO: 3034008 - RNA, 16 nt, Human
ugcacaaacagaggcc

SEQ ID NO: 3034009 - RNA, 15 nt, Human
ugcacaaacagaggc

SEQ ID NO: 3034010 - RNA, 15 nt, Human
ugauuuucauugcug

SEQ ID NO: 3034011 - RNA, 13 nt, Human
ugauuuucauugc

SEQ ID NO: 3034012 - RNA, 23 nt, Human
ugauuuuuuuuuccuucagugcc

SEQ ID NO: 3034013 - RNA, 22 nt, Human
ugauuuuuuuuuccuucagugc

SEQ ID NO: 3034014 - RNA, 20 nt, Human
ugauuuuuuuuuccuucagu

SEQ ID NO: 3034015 - RNA, 19 nt, Human
ugauuuuuuuuuccuucag

SEQ ID NO: 3034016 - RNA, 17 nt, Human
ugauuuuuuuuuccuuc

SEQ ID NO: 3034017 - RNA, 16 nt, Human
ugauuuuuuuuuccuu

SEQ ID NO: 3034018 - RNA, 22 nt, Human
ugcaaccugauugugucucuug

SEQ ID NO: 3034019 - RNA, 20 nt, Human
ugcaaccugauugugucucu

SEQ ID NO: 3034020 - RNA, 19 nt, Human
ugcaaccugauugugucuc

SEQ ID NO: 3034021 - RNA, 18 nt, Human
ugcaaccuccgccucuug

SEQ ID NO: 3034022 - RNA, 20 nt, Human
ugcaaccuccgccucuuggg

SEQ ID NO: 3034023 - RNA, 21 nt, Human
ugcaaccuccgccucuugggu

SEQ ID NO: 3034024 - RNA, 14 nt, Human
ugcaacaggcuggg

SEQ ID NO: 3034025 - RNA, 15 nt, Human
ugcaacaggcugggc

SEQ ID NO: 3034026 - RNA, 16 nt, Human
ugcaacaggcugggcu

SEQ ID NO: 3034027 - RNA, 17 nt, Human
ugcaacaggcugggcuu

SEQ ID NO: 3034028 - RNA, 19 nt, Human
ugcaacaggcugggcuuca

SEQ ID NO: 3034029 - RNA, 20 nt, Human
ugcaacaggcugggcuucag

SEQ ID NO: 3034030 - RNA, 13 nt, Human
ugcaaccuccgcc

SEQ ID NO: 3034031 - RNA, 14 nt, Human
ugcaaccuccgccu

SEQ ID NO: 3034032 - RNA, 22 nt, Human
ugcagaguaggggucugucuuu

SEQ ID NO: 3034033 - RNA, 15 nt, Human
ugcauguuugugauu

SEQ ID NO: 3034034 - RNA, 12 nt, Human
ugcauuaucuag

SEQ ID NO: 3034035 - RNA, 17 nt, Human
ugcauuaucuagauacu

SEQ ID NO: 3034036 - RNA, 12 nt, Human
ugccauccaggu

SEQ ID NO: 3034037 - RNA, 15 nt, Human
ugccauccagguuca

SEQ ID NO: 3034038 - RNA, 17 nt, Human
ugccagguuuuuggucu

SEQ ID NO: 3034039 - RNA, 19 nt, Human
ugccaggaagccagcaggc

SEQ ID NO: 3034040 - RNA, 18 nt, Human
ugccaggaagccagcagg

SEQ ID NO: 3034041 - RNA, 16 nt, Human
ugccaggaagccagca

SEQ ID NO: 3034042 - RNA, 12 nt, Human
ugccaggaagcc

SEQ ID NO: 3034043 - RNA, 15 nt, Human
ugccauguuggccag

SEQ ID NO: 3034044 - RNA, 12 nt, Human
ugccauguuggc

SEQ ID NO: 3034045 - RNA, 16 nt, Human
ugccauguuggccagg

SEQ ID NO: 3034046 - RNA, 20 nt, Human
ugcccaccuggccucugcac

SEQ ID NO: 3034047 - RNA, 18 nt, Human
ugcccacgcuggagugca

SEQ ID NO: 3034048 - RNA, 19 nt, Human
ugcccaccuggccucugca

SEQ ID NO: 3034049 - RNA, 21 nt, Human
ugcccacucccugcaaccuga

SEQ ID NO: 3034050 - RNA, 15 nt, Human
ugccaugugccaggu

SEQ ID NO: 3034051 - RNA, 14 nt, Human
ugccaugugccagg

SEQ ID NO: 3034052 - RNA, 23 nt, Human
ugccaugaggaacaaggcaaggc

SEQ ID NO: 3034053 - RNA, 20 nt, Human
ugccaugaggaacaaggcaa

SEQ ID NO: 3034054 - RNA, 17 nt, Human
ugccugguggcagcugc

SEQ ID NO: 3034055 - RNA, 18 nt, Human
ugccugguggcagcugcg

SEQ ID NO: 3034056 - RNA, 19 nt, Human
ugccugguggcagcugcgg

SEQ ID NO: 3034057 - RNA, 21 nt, Human
ugccucuucucuacucuaggg

SEQ ID NO: 3034058 - RNA, 13 nt, Human
ugccucugggacu

SEQ ID NO: 3034059 - RNA, 22 nt, Human
ugccuccuuugugaggaagccg

SEQ ID NO: 3034060 - RNA, 20 nt, Human
ugccuccuuugugaggaagc

SEQ ID NO: 3034061 - RNA, 21 nt, Human
ugccuccuuugugaggaagcc

SEQ ID NO: 3034062 - RNA, 21 nt, Human
ugcccugcccaccuggccucu

SEQ ID NO: 3034063 - RNA, 23 nt, Human
ugcccugcccaccuggccucugc

SEQ ID NO: 3034064 - RNA, 22 nt, Human
ugcccugcccaccuggccucug

SEQ ID NO: 3034065 - RNA, 17 nt, Human
ugcccuaaaguguauuu

SEQ ID NO: 3034066 - RNA, 19 nt, Human
ugcccuaaaguguauuuuu

SEQ ID NO: 3034067 - RNA, 19 nt, Human
ugccgucuaccugaggggc

SEQ ID NO: 3034068 - RNA, 17 nt, Human
ugccgucuaccugaggg

SEQ ID NO: 3034069 - RNA, 16 nt, Human
ugccgucuaccugagg

SEQ ID NO: 3034070 - RNA, 15 nt, Human
ugccgucuaccugag

SEQ ID NO: 3034071 - RNA, 16 nt, Human
ugauguaauuaugguu

SEQ ID NO: 3034072 - RNA, 22 nt, Human
ugaugcuucuucagagacuccu

SEQ ID NO: 3034073 - RNA, 21 nt, Human
ugaugcuucuucagagacucc

SEQ ID NO: 3034074 - RNA, 19 nt, Human
ugaugcuucuucagagacu

SEQ ID NO: 3034075 - RNA, 18 nt, Human
ugaugcuucuucagagac

SEQ ID NO: 3034076 - RNA, 14 nt, Human
ugaugccaugagga

SEQ ID NO: 3034077 - RNA, 22 nt, Human
ugaugaucuuugcagacaggca

SEQ ID NO: 3034078 - RNA, 23 nt, Human
ugaugaucuuugcagacaggcaa

SEQ ID NO: 3034079 - RNA, 20 nt, Human
ugaugaugaaaugaggucag

SEQ ID NO: 3034080 - RNA, 18 nt, Human
ugaucuuugcagacaggc

SEQ ID NO: 3034081 - RNA, 21 nt, Human
ugaucuuugcagacaggcaag

SEQ ID NO: 3034082 - RNA, 23 nt, Human
ugaucuuugcagacaggcaagca

SEQ ID NO: 3034083 - RNA, 19 nt, Human
ugaucuuugcagacaggca

SEQ ID NO: 3034084 - RNA, 20 nt, Human
ugaucuuugcagacaggcaa

SEQ ID NO: 3034085 - RNA, 22 nt, Human
ugaucacggcucacugcagccu

SEQ ID NO: 3034086 - RNA, 21 nt, Human
ugauccacccaccucagccuc

SEQ ID NO: 3034087 - RNA, 22 nt, Human
ugauccacccaccucagccucc

SEQ ID NO: 3034088 - RNA, 21 nt, Human
ugaucuaggaagacuuuggaa

SEQ ID NO: 3034089 - RNA, 19 nt, Human
ugaucuaggaagacuuugg

SEQ ID NO: 3034090 - RNA, 17 nt, Human
ugaucucucgugauuga

SEQ ID NO: 3034091 - RNA, 13 nt, Human
ugaucauccacug

SEQ ID NO: 3034092 - RNA, 24 nt, Human
ugaucauccacugugccaugugcc

SEQ ID NO: 3034093 - RNA, 17 nt, Human
ugauccaagcugguccc

SEQ ID NO: 3034094 - RNA, 21 nt, Human
ugauccaagcuggucccacuc

SEQ ID NO: 3034095 - RNA, 15 nt, Human
ugauccacccaccuc

SEQ ID NO: 3034096 - RNA, 20 nt, Human
ugauccacccaccucagccu

SEQ ID NO: 3034097 - RNA, 23 nt, Human
ugauagcacagacccugcccugu

SEQ ID NO: 3034098 - RNA, 22 nt, Human
ugauagcacagacccugcccug

SEQ ID NO: 3034099 - RNA, 16 nt, Human
ugauagcacagacccu

SEQ ID NO: 3034100 - RNA, 15 nt, Human
ugauagcacagaccc

SEQ ID NO: 3034101 - RNA, 21 nt, Human
ugauagcacagacccugcccu

SEQ ID NO: 3034102 - RNA, 20 nt, Human
ugauagcacagacccugccc

SEQ ID NO: 3034103 - RNA, 18 nt, Human
ugauagcacagacccugc

SEQ ID NO: 3034104 - RNA, 17 nt, Human
ugauagcacagacccug

SEQ ID NO: 3034105 - RNA, 19 nt, Human
ugaguugauucagcucugc

SEQ ID NO: 3034106 - RNA, 16 nt, Human
ugaguugauucagcuc

SEQ ID NO: 3034107 - RNA, 15 nt, Human
ugagucgaggacagg

SEQ ID NO: 3034108 - RNA, 16 nt, Human
ugagucgaggacaggg

SEQ ID NO: 3034109 - RNA, 23 nt, Human
ugaguugauagcacagacccugc

SEQ ID NO: 3034110 - RNA, 21 nt, Human
ugaguugauagcacagacccu

SEQ ID NO: 3034111 - RNA, 21 nt, Human
ugaguccccuguuuguuucug

SEQ ID NO: 3034112 - RNA, 19 nt, Human
ugagguuucaaaccucccu

SEQ ID NO: 3034113 - RNA, 16 nt, Human
ugaggugcuauguucu

SEQ ID NO: 3034114 - RNA, 15 nt, Human
ugaggugcuauguuc

SEQ ID NO: 3034115 - RNA, 20 nt, Human
ugaguccccuguuuguuucu

SEQ ID NO: 3034116 - RNA, 18 nt, Human
ugaguccuggcaugggaa

SEQ ID NO: 3034117 - RNA, 11 nt, Human
ugaguccuggc

SEQ ID NO: 3034118 - RNA, 14 nt, Human
ugagucgaggacag

SEQ ID NO: 3034119 - RNA, 22 nt, Human
ugaguccuggcaugggaaugaa

SEQ ID NO: 3034120 - RNA, 19 nt, Human
ugaguccuggcaugggaau

SEQ ID NO: 3034121 - RNA, 20 nt, Human
ugaggucuguucuuuccaaa

SEQ ID NO: 3034122 - RNA, 14 nt, Human
ugaggucuguucuu

SEQ ID NO: 3034123 - RNA, 15 nt, Human
ugaggucuguucuuu

SEQ ID NO: 3034124 - RNA, 11 nt, Human
ugaggcugggc

SEQ ID NO: 3034125 - RNA, 20 nt, Human
ugacgccaucccagccccaa

SEQ ID NO: 3034126 - RNA, 19 nt, Human
ugacgccaucccagcccca

SEQ ID NO: 3034127 - RNA, 18 nt, Human
ugacgccaucccagcccc

SEQ ID NO: 3034128 - RNA, 17 nt, Human
ugacgccaucccagccc

SEQ ID NO: 3034129 - RNA, 22 nt, Human
ugaccuuucaauaggaaaaacu

SEQ ID NO: 3034130 - RNA, 18 nt, Human
ugaccuuucaauaggaaa

SEQ ID NO: 3034131 - RNA, 16 nt, Human
ugacgccaucccagcc

SEQ ID NO: 3034132 - RNA, 15 nt, Human
ugacgccaucccagc

SEQ ID NO: 3034133 - RNA, 14 nt, Human
ugacgccaucccag

SEQ ID NO: 3034134 - RNA, 13 nt, Human
ugacgccauccca

SEQ ID NO: 3034135 - RNA, 14 nt, Human
ugacugaauuucuu

SEQ ID NO: 3034136 - RNA, 15 nt, Human
ugacugaauuucuuu

SEQ ID NO: 3034137 - RNA, 13 nt, Human
ugacugaauuucu

SEQ ID NO: 3034138 - RNA, 19 nt, Human
ugaccauucuccaccugcc

SEQ ID NO: 3034139 - RNA, 15 nt, Human
ucuugaacuccuggc

SEQ ID NO: 3034140 - RNA, 22 nt, Human
ugaccauucuccaccugccagg

SEQ ID NO: 3034141 - RNA, 21 nt, Human
ugaccauucuccaccugccag

SEQ ID NO: 3034142 - RNA, 20 nt, Human
ugaccauucuccaccugcca

SEQ ID NO: 3034143 - RNA, 17 nt, Human
ucuugaauuguaaggaa

SEQ ID NO: 3034144 - RNA, 13 nt, Human
ugaccucugcagc

SEQ ID NO: 3034145 - RNA, 16 nt, Human
ugaccucugcagcaau

SEQ ID NO: 3034146 - RNA, 22 nt, Human
ugaccucaggugauccacccac

SEQ ID NO: 3034147 - RNA, 13 nt, Human
ugaccuuucaaua

SEQ ID NO: 3034148 - RNA, 14 nt, Human
ugaccuuucaauag

SEQ ID NO: 3034149 - RNA, 16 nt, Human
ugaccuuucaauagga

SEQ ID NO: 3034150 - RNA, 15 nt, Human
ugaccuuucaauagg

SEQ ID NO: 3034151 - RNA, 12 nt, Human
ugaccucugccu

SEQ ID NO: 3034152 - RNA, 23 nt, Human
ugaccucugcagcaauaaagcag

SEQ ID NO: 3034153 - RNA, 18 nt, Human
ugaccucugcagcaauaa

SEQ ID NO: 3034154 - RNA, 21 nt, Human
ugaccucugcagcaauaaagc

SEQ ID NO: 3034155 - RNA, 13 nt, Human
ugagccucagcau

SEQ ID NO: 3034156 - RNA, 15 nt, Human
ugagccucagcaucc

SEQ ID NO: 3034157 - RNA, 15 nt, Human
ugagcaucaggccag

SEQ ID NO: 3034158 - RNA, 14 nt, Human
ugagcaucaggcca

SEQ ID NO: 3034159 - RNA, 13 nt, Human
ugagcaucaggcc

SEQ ID NO: 3034160 - RNA, 12 nt, Human
ugagacucuguc

SEQ ID NO: 3034161 - RNA, 13 nt, Human
ugagacucugucu

SEQ ID NO: 3034162 - RNA, 14 nt, Human
ugagacucugucuc

SEQ ID NO: 3034163 - RNA, 22 nt, Human
ugagaggcauccaguaucuuga

SEQ ID NO: 3034164 - RNA, 23 nt, Human
ugagaggcauccaguaucuugaa

SEQ ID NO: 3034165 - RNA, 15 nt, Human
ugagaucagccuggg

SEQ ID NO: 3034166 - RNA, 19 nt, Human
ugagaggggaacagacugg

SEQ ID NO: 3034167 - RNA, 17 nt, Human
ugagaguagagucacug

SEQ ID NO: 3034168 - RNA, 12 nt, Human
ugagacccuguc

SEQ ID NO: 3034169 - RNA, 16 nt, Human
uggacauuuuaugucu

SEQ ID NO: 3034170 - RNA, 17 nt, Human
uggacauuuuaugucuu

SEQ ID NO: 3034171 - RNA, 11 nt, Human
uggacauuuua

SEQ ID NO: 3034172 - RNA, 13 nt, Human
uggacauuuuaug

SEQ ID NO: 3034173 - RNA, 17 nt, Human
uggacaggcauguucuc

SEQ ID NO: 3034174 - RNA, 18 nt, Human
uggacaggcauguucucu

SEQ ID NO: 3034175 - RNA, 22 nt, Human
uggacaggcauguucucugagg

SEQ ID NO: 3034176 - RNA, 23 nt, Human
uggacguguuaugacuccagaau

SEQ ID NO: 3034177 - RNA, 19 nt, Human
uggacguguuaugacucca

SEQ ID NO: 3034178 - RNA, 20 nt, Human
uggacuaacuugucuuugga

SEQ ID NO: 3034179 - RNA, 19 nt, Human
uggacuaacuugucuuugg

SEQ ID NO: 3034180 - RNA, 20 nt, Human
uggauugugccuaauguguu

SEQ ID NO: 3034181 - RNA, 23 nt, Human
uggauugugccuaauguguuuga

SEQ ID NO: 3034182 - RNA, 19 nt, Human
uggauugugccuaaugugu

SEQ ID NO: 3034183 - RNA, 15 nt, Human
uggauuuaacagaaa

SEQ ID NO: 3034184 - RNA, 17 nt, Human
uggauuuaacagaaaug

SEQ ID NO: 3034185 - RNA, 21 nt, Human
uggcacuauaauguaagcucu

SEQ ID NO: 3034186 - RNA, 22 nt, Human
uggcacuauaauguaagcucua

SEQ ID NO: 3034187 - RNA, 19 nt, Human
uggcacugcuuccagugag

SEQ ID NO: 3034188 - RNA, 22 nt, Human
uggcacugcuuccagugaggcu

SEQ ID NO: 3034189 - RNA, 18 nt, Human
uggcagcucagagagggu

SEQ ID NO: 3034190 - RNA, 21 nt, Human
uggauuguccccgacccuugc

SEQ ID NO: 3034191 - RNA, 22 nt, Human
uggaugcagccucacaguccuu

SEQ ID NO: 3034192 - RNA, 21 nt, Human
uggaugcagccucacaguccu

SEQ ID NO: 3034193 - RNA, 13 nt, Human
uggaugcagccuc

SEQ ID NO: 3034194 - RNA, 23 nt, Human
uggaggggggaggugggauccuc

SEQ ID NO: 3034195 - RNA, 14 nt, Human
uggaaaagaauaaa

SEQ ID NO: 3034196 - RNA, 18 nt, Human
ugcuugugaaaggaaaga

SEQ ID NO: 3034197 - RNA, 13 nt, Human
ugcuucuucagag

SEQ ID NO: 3034198 - RNA, 14 nt, Human
uggaacacucugag

SEQ ID NO: 3034199 - RNA, 17 nt, Human
uggaacacucugagacu

SEQ ID NO: 3034200 - RNA, 15 nt, Human
uggaacacucugaga

SEQ ID NO: 3034201 - RNA, 12 nt, Human
ugcuucucacug

SEQ ID NO: 3034202 - RNA, 21 nt, Human
ugcuuccagugaggcucugcc

SEQ ID NO: 3034203 - RNA, 23 nt, Human
ugcuuccagugaggcucugcccu

SEQ ID NO: 3034204 - RNA, 22 nt, Human
ugcuuccagugaggcucugccc

SEQ ID NO: 3034205 - RNA, 19 nt, Human
ugcuuaacuucacauauug

SEQ ID NO: 3034206 - RNA, 13 nt, Human
ugcuuaacuucac

SEQ ID NO: 3034207 - RNA, 14 nt, Human
ugcuuaacuucaca

SEQ ID NO: 3034208 - RNA, 17 nt, Human
ugcuuaacuucacauau

SEQ ID NO: 3034209 - RNA, 18 nt, Human
ugcuuaacuucacauauu

SEQ ID NO: 3034210 - RNA, 16 nt, Human
uggcugcugaaggcuc

SEQ ID NO: 3034211 - RNA, 14 nt, Human
uggcugcugaaggc

SEQ ID NO: 3034212 - RNA, 13 nt, Human
uggcugcugaagg

SEQ ID NO: 3034213 - RNA, 11 nt, Human
uggcugcugaa

SEQ ID NO: 3034214 - RNA, 22 nt, Human
uggccucccaacucaccccagc

SEQ ID NO: 3034215 - RNA, 21 nt, Human
uggccucccaacucaccccag

SEQ ID NO: 3034216 - RNA, 20 nt, Human
uggccucccaacucacccca

SEQ ID NO: 3034217 - RNA, 19 nt, Human
uggccucccaacucacccc

SEQ ID NO: 3034218 - RNA, 14 nt, Human
uggccucccaacuc

SEQ ID NO: 3034219 - RNA, 11 nt, Human
uggccucccaa

SEQ ID NO: 3034220 - RNA, 18 nt, Human
uggccucaagugauucuc

SEQ ID NO: 3034221 - RNA, 23 nt, Human
uggccucaagugauucuccugcc

SEQ ID NO: 3034222 - RNA, 23 nt, Human
uggccuagcauacguacacauuu

SEQ ID NO: 3034223 - RNA, 17 nt, Human
uggcagcugcgguccac

SEQ ID NO: 3034224 - RNA, 20 nt, Human
uggccccucagggucccugg

SEQ ID NO: 3034225 - RNA, 13 nt, Human
uggccccucaggg

SEQ ID NO: 3034226 - RNA, 22 nt, Human
uggccccucagggucccuggug

SEQ ID NO: 3034227 - RNA, 21 nt, Human
uggccccucagggucccuggu

SEQ ID NO: 3034228 - RNA, 20 nt, Human
uggccuagcauacguacaca

SEQ ID NO: 3034229 - RNA, 16 nt, Human
ugggaggaucucuuga

SEQ ID NO: 3034230 - RNA, 15 nt, Human
ugggacacccuguga

SEQ ID NO: 3034231 - RNA, 14 nt, Human
ugggacacccugug

SEQ ID NO: 3034232 - RNA, 13 nt, Human
ugggacacccugu

SEQ ID NO: 3034233 - RNA, 16 nt, Human
ugggaaugaaugucag

SEQ ID NO: 3034234 - RNA, 18 nt, Human
ugggaugauuggaggggg

SEQ ID NO: 3034235 - RNA, 13 nt, Human
ugggcagagcaga

SEQ ID NO: 3034236 - RNA, 14 nt, Human
ugggcagagcagag

SEQ ID NO: 3034237 - RNA, 17 nt, Human
ugggcagagcagagacc

SEQ ID NO: 3034238 - RNA, 15 nt, Human
ugggcagagcagaga

SEQ ID NO: 3034239 - RNA, 22 nt, Human
ugggcuucaguggcagcugcuu

SEQ ID NO: 3034240 - RNA, 21 nt, Human
ugggcuucaguggcagcugcu

SEQ ID NO: 3034241 - RNA, 15 nt, Human
ugggcuucauccucc

SEQ ID NO: 3034242 - RNA, 22 nt, Human
ugggcuuggggaccagagcugc

SEQ ID NO: 3034243 - RNA, 21 nt, Human
ugggcuugucuguagauuuua

SEQ ID NO: 3034244 - RNA, 23 nt, Human
ugggcuuggggaccagagcugcc

SEQ ID NO: 3034245 - RNA, 17 nt, Human
ugggcuugucuguagau

SEQ ID NO: 3034246 - RNA, 16 nt, Human
ugggggccucagugcc

SEQ ID NO: 3034247 - RNA, 19 nt, Human
ugggggcugggcagaggaa

SEQ ID NO: 3034248 - RNA, 19 nt, Human
uggggggcugaggugggag

SEQ ID NO: 3034249 - RNA, 14 nt, Human
ugucuuuuaaacuc

SEQ ID NO: 3034250 - RNA, 16 nt, Human
ugucuuuucuugcaug

SEQ ID NO: 3034251 - RNA, 23 nt, Human
ugucuuuggacccugaggcccag

SEQ ID NO: 3034252 - RNA, 14 nt, Human
ugucuaugggacuc

SEQ ID NO: 3034253 - RNA, 15 nt, Human
ugucuaugggacuca

SEQ ID NO: 3034254 - RNA, 16 nt, Human
ugucuaugggacucaa

SEQ ID NO: 3034255 - RNA, 23 nt, Human
ugucuaguuguuugauucagaca

SEQ ID NO: 3034256 - RNA, 15 nt, Human
ugucuaguuguuuga

SEQ ID NO: 3034257 - RNA, 21 nt, Human
ugucucaaaaaaagaaaaaga

SEQ ID NO: 3034258 - RNA, 15 nt, Human
uguccuauuauauuc

SEQ ID NO: 3034259 - RNA, 19 nt, Human
uguccccgcacugggcuug

SEQ ID NO: 3034260 - RNA, 17 nt, Human
uguccccgcacugggcu

SEQ ID NO: 3034261 - RNA, 12 nt, Human
uguccugggagu

SEQ ID NO: 3034262 - RNA, 19 nt, Human
uguccugggagugagcugg

SEQ ID NO: 3034263 - RNA, 20 nt, Human
uguccugggagugagcuggu

SEQ ID NO: 3034264 - RNA, 14 nt, Human
ugucuaaugaaacc

SEQ ID NO: 3034265 - RNA, 13 nt, Human
uguaucugagcag

SEQ ID NO: 3034266 - RNA, 23 nt, Human
uguacagcaaggagauuuacaac

SEQ ID NO: 3034267 - RNA, 22 nt, Human
uguacagcaaggagauuuacaa

SEQ ID NO: 3034268 - RNA, 12 nt, Human
uguacagagccc

SEQ ID NO: 3034269 - RNA, 21 nt, Human
uguacagagcccacgccccca

SEQ ID NO: 3034270 - RNA, 21 nt, Human
ugucaauuacaggaaguacug

SEQ ID NO: 3034271 - RNA, 14 nt, Human
ugucacaggcaggu

SEQ ID NO: 3034272 - RNA, 19 nt, Human
ugucaauuacaggaaguac

SEQ ID NO: 3034273 - RNA, 14 nt, Human
ugucagugugacug

SEQ ID NO: 3034274 - RNA, 15 nt, Human
ugucagugugacuga

SEQ ID NO: 3034275 - RNA, 19 nt, Human
ugucagugugacugaucuc

SEQ ID NO: 3034276 - RNA, 16 nt, Human
ugucagugugacugau

SEQ ID NO: 3034277 - RNA, 13 nt, Human
ugucacaggcagg

SEQ ID NO: 3034278 - RNA, 15 nt, Human
ugucacaggcagguc

SEQ ID NO: 3034279 - RNA, 16 nt, Human
ugucacaggcaggucc

SEQ ID NO: 3034280 - RNA, 17 nt, Human
ugucacaggcaggucca

SEQ ID NO: 3034281 - RNA, 21 nt, Human
ugucacaggcagguccagggu

SEQ ID NO: 3034282 - RNA, 17 nt, Human
uguaacaagccacccca

SEQ ID NO: 3034283 - RNA, 14 nt, Human
uguaacaagccacc

SEQ ID NO: 3034284 - RNA, 11 nt, Human
uguacagagcc

SEQ ID NO: 3034285 - RNA, 14 nt, Human
uguacagacaacaa

SEQ ID NO: 3034286 - RNA, 16 nt, Human
ugguuuucuguucuuu

SEQ ID NO: 3034287 - RNA, 19 nt, Human
ugguuuucuuguguguuua

SEQ ID NO: 3034288 - RNA, 21 nt, Human
ugguuuuuaaaaaacugcuga

SEQ ID NO: 3034289 - RNA, 23 nt, Human
ugguuuuuaaaaaacugcugacu

SEQ ID NO: 3034290 - RNA, 16 nt, Human
uggugucaccugaaga

SEQ ID NO: 3034291 - RNA, 15 nt, Human
uggugucgggcauga

SEQ ID NO: 3034292 - RNA, 18 nt, Human
uggugucgggcaugacac

SEQ ID NO: 3034293 - RNA, 18 nt, Human
ugguugaugaucuuugca

SEQ ID NO: 3034294 - RNA, 19 nt, Human
uggugguuuucuguucuuu

SEQ ID NO: 3034295 - RNA, 17 nt, Human
uggugguuucagaaaug

SEQ ID NO: 3034296 - RNA, 18 nt, Human
uggugguuucagaaaugu

SEQ ID NO: 3034297 - RNA, 18 nt, Human
uggugggggccucggugu

SEQ ID NO: 3034298 - RNA, 16 nt, Human
uggugggggccucggu

SEQ ID NO: 3034299 - RNA, 13 nt, Human
ugguggcuggguu

SEQ ID NO: 3034300 - RNA, 12 nt, Human
ugguggcagugg

SEQ ID NO: 3034301 - RNA, 19 nt, Human
uggugcaaugaccuuucaa

SEQ ID NO: 3034302 - RNA, 14 nt, Human
uggugcaaugaccu

SEQ ID NO: 3034303 - RNA, 20 nt, Human
ugguggcagugggagcugcc

SEQ ID NO: 3034304 - RNA, 13 nt, Human
ugguggcaguggg

SEQ ID NO: 3034305 - RNA, 18 nt, Human
ugguggcagugggagcug

SEQ ID NO: 3034306 - RNA, 14 nt, Human
uggugagaggcauc

SEQ ID NO: 3034307 - RNA, 20 nt, Human
uggguacuuguggacacagc

SEQ ID NO: 3034308 - RNA, 23 nt, Human
uggguacuuguggacacagcucu

SEQ ID NO: 3034309 - RNA, 19 nt, Human
ucuguuuuguguacuuuua

SEQ ID NO: 3034310 - RNA, 13 nt, Human
ucuguuuugugua

SEQ ID NO: 3034311 - RNA, 22 nt, Human
ucuuaaauauguggaguucauc

SEQ ID NO: 3034312 - RNA, 15 nt, Human
ucuucuccaggcugu

SEQ ID NO: 3034313 - RNA, 12 nt, Human
ucuugaacuccu

SEQ ID NO: 3034314 - RNA, 15 nt, Human
ucuucagaucucuaa

SEQ ID NO: 3034315 - RNA, 18 nt, Human
ucuucagaucucuaacuu

SEQ ID NO: 3034316 - RNA, 23 nt, Human
ucuucagaucucuaacuucacca

SEQ ID NO: 3034317 - RNA, 21 nt, Human
ucuggacaggcauguucucug

SEQ ID NO: 3034318 - RNA, 14 nt, Human
ucuggacaggcaug

SEQ ID NO: 3034319 - RNA, 15 nt, Human
ucuggaaugcagugg

SEQ ID NO: 3034320 - RNA, 19 nt, Human
ucuggaauaaggagaauga

SEQ ID NO: 3034321 - RNA, 19 nt, Human
ucugcugacagacacaggc

SEQ ID NO: 3034322 - RNA, 20 nt, Human
ucugcugacagacacaggcc

SEQ ID NO: 3034323 - RNA, 21 nt, Human
ucugcugacagacacaggccc

SEQ ID NO: 3034324 - RNA, 22 nt, Human
ucugcugacagacacaggcccg

SEQ ID NO: 3034325 - RNA, 15 nt, Human
ucugccugcccaggc

SEQ ID NO: 3034326 - RNA, 18 nt, Human
ucugcuccucuccccagc

SEQ ID NO: 3034327 - RNA, 18 nt, Human
ucugcugacagacacagg

SEQ ID NO: 3034328 - RNA, 17 nt, Human
ucugcugacagacacag

SEQ ID NO: 3034329 - RNA, 14 nt, Human
ucugccugcccagg

SEQ ID NO: 3034330 - RNA, 13 nt, Human
ucugccugcccag

SEQ ID NO: 3034331 - RNA, 14 nt, Human
ucugucgcccaguc

SEQ ID NO: 3034332 - RNA, 21 nt, Human
ucuguccugggagugagcugg

SEQ ID NO: 3034333 - RNA, 15 nt, Human
ucuguccuacucugu

SEQ ID NO: 3034334 - RNA, 19 nt, Human
ucuguccuacucuguguca

SEQ ID NO: 3034335 - RNA, 14 nt, Human
ucuguccuacucug

SEQ ID NO: 3034336 - RNA, 14 nt, Human
ucugggacacaguu

SEQ ID NO: 3034337 - RNA, 13 nt, Human
ucugggacacagu

SEQ ID NO: 3034338 - RNA, 23 nt, Human
ucuggugacuuuccucuuugguc

SEQ ID NO: 3034339 - RNA, 23 nt, Human
ucuggcucuuccaggcugggaga

SEQ ID NO: 3034340 - RNA, 18 nt, Human
ucuggcucuuccaggcug

SEQ ID NO: 3034341 - RNA, 19 nt, Human
ucuggcuaugcauuugaaa

SEQ ID NO: 3034342 - RNA, 22 nt, Human
ucuggcuaugcauuugaaaauu

SEQ ID NO: 3034343 - RNA, 17 nt, Human
ucuggcuaugcauuuga

SEQ ID NO: 3034344 - RNA, 22 nt, Human
ucucuguaauaaacucauuucu

SEQ ID NO: 3034345 - RNA, 18 nt, Human
ucucuguaauaaacucau

SEQ ID NO: 3034346 - RNA, 15 nt, Human
ucucuaguuugauua

SEQ ID NO: 3034347 - RNA, 14 nt, Human
ucucugaggacacu

SEQ ID NO: 3034348 - RNA, 17 nt, Human
ucucugaggacacuaac

SEQ ID NO: 3034349 - RNA, 19 nt, Human
ucucuaacuucaccauauu

SEQ ID NO: 3034350 - RNA, 12 nt, Human
ucucuaacuuca

SEQ ID NO: 3034351 - RNA, 22 nt, Human
ucucgugauugauaagaaccuu

SEQ ID NO: 3034352 - RNA, 14 nt, Human
ucucgugauugaua

SEQ ID NO: 3034353 - RNA, 13 nt, Human
ucuccuguaccuc

SEQ ID NO: 3034354 - RNA, 16 nt, Human
ucuccuguaccucuug

SEQ ID NO: 3034355 - RNA, 17 nt, Human
ucuccuguaccucuuga

SEQ ID NO: 3034356 - RNA, 17 nt, Human
ucuccugccucagccuc

SEQ ID NO: 3034357 - RNA, 15 nt, Human
ucuccugccucagcc

SEQ ID NO: 3034358 - RNA, 15 nt, Human
ucuccuguaccucuu

SEQ ID NO: 3034359 - RNA, 21 nt, Human
ucuccuggaaauauuaagaaa

SEQ ID NO: 3034360 - RNA, 20 nt, Human
ucugcaagaauugaagcagg

SEQ ID NO: 3034361 - RNA, 14 nt, Human
ucugacccacugcu

SEQ ID NO: 3034362 - RNA, 23 nt, Human
ucugaggaauccagacccggcug

SEQ ID NO: 3034363 - RNA, 13 nt, Human
ucugaaaauguau

SEQ ID NO: 3034364 - RNA, 16 nt, Human
ucugacacacagcucu

SEQ ID NO: 3034365 - RNA, 17 nt, Human
ucugacacacagcucug

SEQ ID NO: 3034366 - RNA, 18 nt, Human
ucugacacacagcucugu

SEQ ID NO: 3034367 - RNA, 19 nt, Human
ucugacacacagcucuguc

SEQ ID NO: 3034368 - RNA, 12 nt, Human
ucugacaggcaa

SEQ ID NO: 3034369 - RNA, 21 nt, Human
ucugacaggcaaugcuggcug

SEQ ID NO: 3034370 - RNA, 22 nt, Human
ucugacaggcaaugcuggcugu

SEQ ID NO: 3034371 - RNA, 13 nt, Human
ucugacccacugc

SEQ ID NO: 3034372 - RNA, 18 nt, Human
uccuaauaaaaaggugac

SEQ ID NO: 3034373 - RNA, 16 nt, Human
uccuaauaaaaaggug

SEQ ID NO: 3034374 - RNA, 17 nt, Human
uccuaauaaaaagguga

SEQ ID NO: 3034375 - RNA, 16 nt, Human
uccuaaucuucugaac

SEQ ID NO: 3034376 - RNA, 12 nt, Human
uccuaauaaaaa

SEQ ID NO: 3034377 - RNA, 13 nt, Human
uccuaauaaaaag

SEQ ID NO: 3034378 - RNA, 14 nt, Human
uccuaauaaaaagg

SEQ ID NO: 3034379 - RNA, 15 nt, Human
uccuaauaaaaaggu

SEQ ID NO: 3034380 - RNA, 13 nt, Human
uccgaccagacac

SEQ ID NO: 3034381 - RNA, 18 nt, Human
uccuacccacccuccuuu

SEQ ID NO: 3034382 - RNA, 12 nt, Human
uccuauuauauu

SEQ ID NO: 3034383 - RNA, 17 nt, Human
uccucauuagcauuuug

SEQ ID NO: 3034384 - RNA, 22 nt, Human
uccuaguuccaccaucaagcca

SEQ ID NO: 3034385 - RNA, 18 nt, Human
uccuauauuguuuucagu

SEQ ID NO: 3034386 - RNA, 19 nt, Human
uccuccuuuucacaguucu

SEQ ID NO: 3034387 - RNA, 14 nt, Human
uccucuaggagguc

SEQ ID NO: 3034388 - RNA, 15 nt, Human
uccucuguacagagc

SEQ ID NO: 3034389 - RNA, 18 nt, Human
uccucuguacagagccca

SEQ ID NO: 3034390 - RNA, 17 nt, Human
uccucuguacagagccc

SEQ ID NO: 3034391 - RNA, 16 nt, Human
uccucuguacagagcc

SEQ ID NO: 3034392 - RNA, 16 nt, Human
uccucugcugcuggcu

SEQ ID NO: 3034393 - RNA, 15 nt, Human
uccucugcugcuggc

SEQ ID NO: 3034394 - RNA, 14 nt, Human
uccucugcugcugg

SEQ ID NO: 3034395 - RNA, 12 nt, Human
uccucugcugcu

SEQ ID NO: 3034396 - RNA, 16 nt, Human
ucccuauuagagaaga

SEQ ID NO: 3034397 - RNA, 17 nt, Human
uccagguuuaagcuguu

SEQ ID NO: 3034398 - RNA, 20 nt, Human
uccccuguuuguuucugaaa

SEQ ID NO: 3034399 - RNA, 18 nt, Human
uccccuguuuguuucuga

SEQ ID NO: 3034400 - RNA, 21 nt, Human
uccccuguuuguuucugaaag

SEQ ID NO: 3034401 - RNA, 14 nt, Human
ucccugcacuugca

SEQ ID NO: 3034402 - RNA, 13 nt, Human
ucccugcacuugc

SEQ ID NO: 3034403 - RNA, 13 nt, Human
ucccuucccaccu

SEQ ID NO: 3034404 - RNA, 22 nt, Human
ucuaaauaucccuuggacauuu

SEQ ID NO: 3034405 - RNA, 21 nt, Human
ucuaaaucuccaaaauaaaac

SEQ ID NO: 3034406 - RNA, 16 nt, Human
ucgugauugauaagaa

SEQ ID NO: 3034407 - RNA, 21 nt, Human
ucuaggaagacuuuggaaaga

SEQ ID NO: 3034408 - RNA, 17 nt, Human
ucucaaauaacuaaaag

SEQ ID NO: 3034409 - RNA, 15 nt, Human
ucuaucaaguauuau

SEQ ID NO: 3034410 - RNA, 21 nt, Human
ucuaucaaguauuauaccuuu

SEQ ID NO: 3034411 - RNA, 22 nt, Human
ucuaucaaguauuauaccuuuu

SEQ ID NO: 3034412 - RNA, 19 nt, Human
uccugucggagcccugucu

SEQ ID NO: 3034413 - RNA, 14 nt, Human
uccuuaccagcaga

SEQ ID NO: 3034414 - RNA, 20 nt, Human
uccuguaccucuugagccuu

SEQ ID NO: 3034415 - RNA, 20 nt, Human
uccuggcacccggccccugc

SEQ ID NO: 3034416 - RNA, 21 nt, Human
uccuggcacccggccccugcu

SEQ ID NO: 3034417 - RNA, 17 nt, Human
uccuggcacugcuucca

SEQ ID NO: 3034418 - RNA, 22 nt, Human
uccuggcacugcuuccagugag

SEQ ID NO: 3034419 - RNA, 18 nt, Human
uccuggcacugcuuccag

SEQ ID NO: 3034420 - RNA, 16 nt, Human
uccugccucagccucc

SEQ ID NO: 3034421 - RNA, 13 nt, Human
uccugccucagcc

SEQ ID NO: 3034422 - RNA, 15 nt, Human
uccugccucagccuc

SEQ ID NO: 3034423 - RNA, 16 nt, Human
uccuggcacccggccc

SEQ ID NO: 3034424 - RNA, 19 nt, Human
uccuggcacccggccccug

SEQ ID NO: 3034425 - RNA, 14 nt, Human
uccuggcacccggc

SEQ ID NO: 3034426 - RNA, 13 nt, Human
uccugagccagau

SEQ ID NO: 3034427 - RNA, 14 nt, Human
uccugccucagccu

SEQ ID NO: 3034428 - RNA, 14 nt, Human
uccugagccagauu

SEQ ID NO: 3034429 - RNA, 19 nt, Human
uccuucacagaugggugcu

SEQ ID NO: 3034430 - RNA, 20 nt, Human
uccuucaccuuuguccccac

SEQ ID NO: 3034431 - RNA, 18 nt, Human
uccuucaccuuugucccc

SEQ ID NO: 3034432 - RNA, 18 nt, Human
uccuucacagaugggugc

SEQ ID NO: 3034433 - RNA, 18 nt, Human
uccuuaccagcagagcac

SEQ ID NO: 3034434 - RNA, 17 nt, Human
uccuuaccagcagagca

SEQ ID NO: 3034435 - RNA, 16 nt, Human
uccuuaccagcagagc

SEQ ID NO: 3034436 - RNA, 22 nt, Human
uccuucaccuuuguccccaccg

SEQ ID NO: 3034437 - RNA, 21 nt, Human
uccuucaccuuuguccccacc

SEQ ID NO: 3034438 - RNA, 23 nt, Human
uccuuuucacaguucucuccuuc

SEQ ID NO: 3034439 - RNA, 17 nt, Human
uauuuucuccaaauguu

SEQ ID NO: 3034440 - RNA, 22 nt, Human
uauuuucccuauuagagaagag

SEQ ID NO: 3034441 - RNA, 17 nt, Human
uauuuuuuucuuuucuu

SEQ ID NO: 3034442 - RNA, 14 nt, Human
uauuuuuuuacuaa

SEQ ID NO: 3034443 - RNA, 15 nt, Human
ucaaaaaaagaaaaa

SEQ ID NO: 3034444 - RNA, 14 nt, Human
ucaaaaaaagaaaa

SEQ ID NO: 3034445 - RNA, 14 nt, Human
uauuuuauuaugca

SEQ ID NO: 3034446 - RNA, 17 nt, Human
uauuuuauuaugcauga

SEQ ID NO: 3034447 - RNA, 23 nt, Human
ucaaccccuucgcuccugugucu

SEQ ID NO: 3034448 - RNA, 21 nt, Human
ucaagugauucuccugccuca

SEQ ID NO: 3034449 - RNA, 18 nt, Human
ucaagugauucuccugcc

SEQ ID NO: 3034450 - RNA, 20 nt, Human
ucaagugauucuccugccuc

SEQ ID NO: 3034451 - RNA, 23 nt, Human
ucaauuacaggaaguacuggaga

SEQ ID NO: 3034452 - RNA, 21 nt, Human
ucaauuacaggaaguacugga

SEQ ID NO: 3034453 - RNA, 18 nt, Human
ucacauuuauucugcuca

SEQ ID NO: 3034454 - RNA, 19 nt, Human
ucacauuuauucugcucac

SEQ ID NO: 3034455 - RNA, 17 nt, Human
ucacauuuauucugcuc

SEQ ID NO: 3034456 - RNA, 19 nt, Human
ucaccaaaucagcugcuac

SEQ ID NO: 3034457 - RNA, 20 nt, Human
ucaccaaaucagcugcuacu

SEQ ID NO: 3034458 - RNA, 16 nt, Human
ucacaggcagguccag

SEQ ID NO: 3034459 - RNA, 17 nt, Human
ucacaggcagguccagg

SEQ ID NO: 3034460 - RNA, 18 nt, Human
ucacaggcagguccaggg

SEQ ID NO: 3034461 - RNA, 19 nt, Human
ucacaguccuuaccagcag

SEQ ID NO: 3034462 - RNA, 23 nt, Human
ucacaguccuuaccagcagagca

SEQ ID NO: 3034463 - RNA, 22 nt, Human
ucacaguccuuaccagcagagc

SEQ ID NO: 3034464 - RNA, 20 nt, Human
ucaauuacaggaaguacugg

SEQ ID NO: 3034465 - RNA, 15 nt, Human
uauucucagcagagu

SEQ ID NO: 3034466 - RNA, 21 nt, Human
uauucucagcagagugcuuua

SEQ ID NO: 3034467 - RNA, 17 nt, Human
uauucucagcagagugc

SEQ ID NO: 3034468 - RNA, 17 nt, Human
uauucucuccuguaccu

SEQ ID NO: 3034469 - RNA, 21 nt, Human
uauugauaugcuuauacacuu

SEQ ID NO: 3034470 - RNA, 13 nt, Human
uauugauguuuuc

SEQ ID NO: 3034471 - RNA, 14 nt, Human
uauugauguuuuca

SEQ ID NO: 3034472 - RNA, 17 nt, Human
uauugcugauggugcaa

SEQ ID NO: 3034473 - RNA, 22 nt, Human
uauuggaaauuuguuauaauga

SEQ ID NO: 3034474 - RNA, 12 nt, Human
uauuguuuucag

SEQ ID NO: 3034475 - RNA, 22 nt, Human
uauuguuuucaguguacaugga

SEQ ID NO: 3034476 - RNA, 18 nt, Human
uauuguuuucaguguaca

SEQ ID NO: 3034477 - RNA, 20 nt, Human
uauuguuuucaguguacaug

SEQ ID NO: 3034478 - RNA, 13 nt, Human
uauuaacaaaaca

SEQ ID NO: 3034479 - RNA, 24 nt, Human
uauuaagaaagacuaucuaaaugu

SEQ ID NO: 3034480 - RNA, 12 nt, Human
uauuaaauuaug

SEQ ID NO: 3034481 - RNA, 20 nt, Human
uauguugcccaggcaggucu

SEQ ID NO: 3034482 - RNA, 13 nt, Human
uauguugcccagg

SEQ ID NO: 3034483 - RNA, 16 nt, Human
uauguugcccaggcag

SEQ ID NO: 3034484 - RNA, 19 nt, Human
uauguugcccaggcagguc

SEQ ID NO: 3034485 - RNA, 15 nt, Human
gggaguggccacaga

SEQ ID NO: 3034486 - RNA, 13 nt, Human
gggaguggccaca

SEQ ID NO: 3034487 - RNA, 14 nt, Human
ucauuaguuuugaa

SEQ ID NO: 3034488 - RNA, 23 nt, Human
ucauuaguuuugaagauucuaug

SEQ ID NO: 3034489 - RNA, 21 nt, Human
ucaugcugccaauauccuaau

SEQ ID NO: 3034490 - RNA, 23 nt, Human
ucaugcugccaauauccuaauaa

SEQ ID NO: 3034491 - RNA, 22 nt, Human
ucauuaggugugacugaauuuc

SEQ ID NO: 3034492 - RNA, 16 nt, Human
ucauuauguuaauauu

SEQ ID NO: 3034493 - RNA, 17 nt, Human
ucauuauguuaauauuu

SEQ ID NO: 3034494 - RNA, 21 nt, Human
ucauucaacccaccugcgucu

SEQ ID NO: 3034495 - RNA, 13 nt, Human
ucauuuccugugu

SEQ ID NO: 3034496 - RNA, 16 nt, Human
ucauuuccugugucuu

SEQ ID NO: 3034497 - RNA, 13 nt, Human
ucaugcugccaau

SEQ ID NO: 3034498 - RNA, 17 nt, Human
ucaugcugccaauaucc

SEQ ID NO: 3034499 - RNA, 19 nt, Human
ucaugcugccaauauccua

SEQ ID NO: 3034500 - RNA, 20 nt, Human
ucaugcugccaauauccuaa

SEQ ID NO: 3034501 - RNA, 23 nt, Human
ucaucuuagguuggcaaaaaggc

SEQ ID NO: 3034502 - RNA, 21 nt, Human
ucaucaccaacgucugugcca

SEQ ID NO: 3034503 - RNA, 20 nt, Human
ucaucaccaacgucugugcc

SEQ ID NO: 3034504 - RNA, 19 nt, Human
ucaucaccaacgucugugc

SEQ ID NO: 3034505 - RNA, 13 nt, Human
ucaggugcugcca

SEQ ID NO: 3034506 - RNA, 14 nt, Human
ucaggugcugccau

SEQ ID NO: 3034507 - RNA, 23 nt, Human
ucaggugccucaagagaaggcaa

SEQ ID NO: 3034508 - RNA, 21 nt, Human
ucaggugagaagcagaggaag

SEQ ID NO: 3034509 - RNA, 21 nt, Human
ucauacccacccccacccaag

SEQ ID NO: 3034510 - RNA, 22 nt, Human
uccaggggugggacacccugug

SEQ ID NO: 3034511 - RNA, 22 nt, Human
uccaggagcagccacauuccug

SEQ ID NO: 3034512 - RNA, 18 nt, Human
uccaggagcagccacauu

SEQ ID NO: 3034513 - RNA, 17 nt, Human
uccaggagcagccacau

SEQ ID NO: 3034514 - RNA, 15 nt, Human
uccaggugcacaagc

SEQ ID NO: 3034515 - RNA, 23 nt, Human
uccaggggugggacacccuguga

SEQ ID NO: 3034516 - RNA, 15 nt, Human
uccagguucagcuug

SEQ ID NO: 3034517 - RNA, 16 nt, Human
uccagguucagcuugu

SEQ ID NO: 3034518 - RNA, 22 nt, Human
uccaggugcacaagcuccaagc

SEQ ID NO: 3034519 - RNA, 21 nt, Human
uccaggugcacaagcuccaag

SEQ ID NO: 3034520 - RNA, 20 nt, Human
uccaggugcacaagcuccaa

SEQ ID NO: 3034521 - RNA, 18 nt, Human
uccaggugcacaagcucc

SEQ ID NO: 3034522 - RNA, 16 nt, Human
uccaggagcagccaca

SEQ ID NO: 3034523 - RNA, 17 nt, Human
uccagcuguucagcugg

SEQ ID NO: 3034524 - RNA, 15 nt, Human
uccagcucaccagcc

SEQ ID NO: 3034525 - RNA, 18 nt, Human
uccagcucaccagcccca

SEQ ID NO: 3034526 - RNA, 16 nt, Human
uccagcucaccagccc

SEQ ID NO: 3034527 - RNA, 17 nt, Human
uccagcucaccagcccc

SEQ ID NO: 3034528 - RNA, 23 nt, Human
uccagccaaagccuccuccagcc

SEQ ID NO: 3034529 - RNA, 17 nt, Human
uccacaaguuaaauaaa

SEQ ID NO: 3034530 - RNA, 18 nt, Human
uccacaaguuaaauaaau

SEQ ID NO: 3034531 - RNA, 15 nt, Human
uccacaagagcccag

SEQ ID NO: 3034532 - RNA, 18 nt, Human
uccacaagagcccaggcc

SEQ ID NO: 3034533 - RNA, 17 nt, Human
uccacaagagcccaggc

SEQ ID NO: 3034534 - RNA, 16 nt, Human
uccacaagagcccagg

SEQ ID NO: 3034535 - RNA, 17 nt, Human
uccaauuuacauacucu

SEQ ID NO: 3034536 - RNA, 18 nt, Human
uccaauuuacauacucug

SEQ ID NO: 3034537 - RNA, 20 nt, Human
uccaaaauaaaacuuuuuaa

SEQ ID NO: 3034538 - RNA, 18 nt, Human
uccaaaauaaaacuuuuu

SEQ ID NO: 3034539 - RNA, 21 nt, Human
uccaccugccagggacagagg

SEQ ID NO: 3034540 - RNA, 18 nt, Human
uccaccugccagggacag

SEQ ID NO: 3034541 - RNA, 15 nt, Human
uccaccugccaggga

SEQ ID NO: 3034542 - RNA, 17 nt, Human
uccaccugccagggaca

SEQ ID NO: 3034543 - RNA, 12 nt, Human
uccacccugcuc

SEQ ID NO: 3034544 - RNA, 17 nt, Human
ucacugguacucugcca

SEQ ID NO: 3034545 - RNA, 14 nt, Human
ucacugcuuaacuu

SEQ ID NO: 3034546 - RNA, 13 nt, Human
ucaccagccccag

SEQ ID NO: 3034547 - RNA, 22 nt, Human
ucaccccggccaccugcggugc

SEQ ID NO: 3034548 - RNA, 17 nt, Human
ucacucuuauugcccac

SEQ ID NO: 3034549 - RNA, 22 nt, Human
ucacucugucgcccagucugga

SEQ ID NO: 3034550 - RNA, 18 nt, Human
ucacugccaugccagcuu

SEQ ID NO: 3034551 - RNA, 20 nt, Human
ucacucuuauugcccacgcu

SEQ ID NO: 3034552 - RNA, 10 nt, Human
ucagaaaugu

SEQ ID NO: 3034553 - RNA, 23 nt, Human
ucagaauucucuaguuugauuaa

SEQ ID NO: 3034554 - RNA, 15 nt, Human
ucagaaauguguuau

SEQ ID NO: 3034555 - RNA, 16 nt, Human
ucagaauucucuaguu

SEQ ID NO: 3034556 - RNA, 13 nt, Human
ucagacagcugcc

SEQ ID NO: 3034557 - RNA, 16 nt, Human
ucagggccuggcucag

SEQ ID NO: 3034558 - RNA, 14 nt, Human
ucagggccuggcuc

SEQ ID NO: 3034559 - RNA, 16 nt, Human
ucaggugagaagcaga

SEQ ID NO: 3034560 - RNA, 15 nt, Human
ucaggugagaagcag

SEQ ID NO: 3034561 - RNA, 20 nt, Human
ucagccucccgaguagcugg

SEQ ID NO: 3034562 - RNA, 18 nt, Human
ucagccucccgaguagcu

SEQ ID NO: 3034563 - RNA, 21 nt, Human
ucagccucccgaauagcuggg

SEQ ID NO: 3034564 - RNA, 22 nt, Human
ucagccucccgaauagcuggga

SEQ ID NO: 3034565 - RNA, 13 nt, Human
ucagccucccaaa

SEQ ID NO: 3034566 - RNA, 14 nt, Human
ucagccucccaaag

SEQ ID NO: 3034567 - RNA, 19 nt, Human
ucagccucccaaagugcug

SEQ ID NO: 3034568 - RNA, 21 nt, Human
ucagccucccaaagugcuggg

SEQ ID NO: 3034569 - RNA, 19 nt, Human
ucagccugcuccagcuguu

SEQ ID NO: 3034570 - RNA, 18 nt, Human
ucagccugcuccagcugu

SEQ ID NO: 3034571 - RNA, 21 nt, Human
ucagccucccgaguagcuggg

SEQ ID NO: 3034572 - RNA, 22 nt, Human
ucagccucccgaguagcuggga

SEQ ID NO: 3034573 - RNA, 16 nt, Human
ucagcugaaccugggu

SEQ ID NO: 3034574 - RNA, 15 nt, Human
ucagcugaaccuggg

SEQ ID NO: 3034575 - RNA, 22 nt, Human
ggcuuagacccucaugcugcca

SEQ ID NO: 3034576 - RNA, 23 nt, Human
ggcuuagacccucaugcugccaa

SEQ ID NO: 3034577 - RNA, 14 nt, Human
ggcuuagucacuga

SEQ ID NO: 3034578 - RNA, 20 nt, Human
ggcuucacggaagagccuug

SEQ ID NO: 3034579 - RNA, 21 nt, Human
ggcuucacggaagagccuugc

SEQ ID NO: 3034580 - RNA, 18 nt, Human
ggcuuggggaccagagcu

SEQ ID NO: 3034581 - RNA, 17 nt, Human
ggcuuggggaccagagc

SEQ ID NO: 3034582 - RNA, 20 nt, Human
ggcuuagacccucaugcugc

SEQ ID NO: 3034583 - RNA, 18 nt, Human
ggcuuagacccucaugcu

SEQ ID NO: 3034584 - RNA, 16 nt, Human
ggcuguuggcuggggg

SEQ ID NO: 3034585 - RNA, 20 nt, Human
ggcuguuggcugggggccuc

SEQ ID NO: 3034586 - RNA, 14 nt, Human
ggcuguuggcuggg

SEQ ID NO: 3034587 - RNA, 15 nt, Human
ggcuguuggcugggg

SEQ ID NO: 3034588 - RNA, 15 nt, Human
ggcuggaguuauuga

SEQ ID NO: 3034589 - RNA, 23 nt, Human
ggcuggaguuauugaagcagagu

SEQ ID NO: 3034590 - RNA, 18 nt, Human
ggcugggcucccuuccca

SEQ ID NO: 3034591 - RNA, 21 nt, Human
ggcugggcucccuucccaccu

SEQ ID NO: 3034592 - RNA, 20 nt, Human
ggcugggcucccuucccacc

SEQ ID NO: 3034593 - RNA, 16 nt, Human
ggcugggggaagaagc

SEQ ID NO: 3034594 - RNA, 14 nt, Human
ggcugggggccuca

SEQ ID NO: 3034595 - RNA, 11 nt, Human
ggcugggcuuc

SEQ ID NO: 3034596 - RNA, 21 nt, Human
ggcugggcuucaguggcagcu

SEQ ID NO: 3034597 - RNA, 22 nt, Human
ggcugggcuucaguggcagcug

SEQ ID NO: 3034598 - RNA, 18 nt, Human
ggcugggcuucaguggca

SEQ ID NO: 3034599 - RNA, 19 nt, Human
ggcugcuucaaggauccug

SEQ ID NO: 3034600 - RNA, 15 nt, Human
ggcugcuucaaggau

SEQ ID NO: 3034601 - RNA, 20 nt, Human
ggcugcuucaaggauccuga

SEQ ID NO: 3034602 - RNA, 13 nt, Human
gggagcugccugu

SEQ ID NO: 3034603 - RNA, 21 nt, Human
gggagcugccuguucagcucc

SEQ ID NO: 3034604 - RNA, 22 nt, Human
gggagcugccuguucagcucca

SEQ ID NO: 3034605 - RNA, 20 nt, Human
gggaggugggauccuccagg

SEQ ID NO: 3034606 - RNA, 23 nt, Human
gggaggauugcuugagcucagga

SEQ ID NO: 3034607 - RNA, 21 nt, Human
gggagugaguugauagcacag

SEQ ID NO: 3034608 - RNA, 22 nt, Human
gggaggauguucugggacacag

SEQ ID NO: 3034609 - RNA, 21 nt, Human
gggaggauugcuugagcucag

SEQ ID NO: 3034610 - RNA, 23 nt, Human
gggaggaucucuugagccuggga

SEQ ID NO: 3034611 - RNA, 19 nt, Human
gggaauguuugccucugcc

SEQ ID NO: 3034612 - RNA, 21 nt, Human
gggaauguuugccucugccuc

SEQ ID NO: 3034613 - RNA, 14 nt, Human
gggacacccuguga

SEQ ID NO: 3034614 - RNA, 17 nt, Human
gggacucaaugcacuga

SEQ ID NO: 3034615 - RNA, 19 nt, Human
gggacucaaugcacugaca

SEQ ID NO: 3034616 - RNA, 23 nt, Human
gggacucaaugcacugacauugu

SEQ ID NO: 3034617 - RNA, 23 nt, Human
ggccugggggcugggcagaggaa

SEQ ID NO: 3034618 - RNA, 16 nt, Human
ggccuggccugagcug

SEQ ID NO: 3034619 - RNA, 15 nt, Human
ggccuggccugagcu

SEQ ID NO: 3034620 - RNA, 24 nt, Human
ggcgcagcauauucaggaagcuca

SEQ ID NO: 3034621 - RNA, 23 nt, Human
ggcgcagcauauucaggaagcuc

SEQ ID NO: 3034622 - RNA, 22 nt, Human
ggccucugcacuccccugcugg

SEQ ID NO: 3034623 - RNA, 19 nt, Human
ggccucugcacuccccugc

SEQ ID NO: 3034624 - RNA, 18 nt, Human
ggccucugcacuccccug

SEQ ID NO: 3034625 - RNA, 13 nt, Human
ggccuggccccuc

SEQ ID NO: 3034626 - RNA, 14 nt, Human
ggccuggccugagc

SEQ ID NO: 3034627 - RNA, 13 nt, Human
ggccuggccugag

SEQ ID NO: 3034628 - RNA, 10 nt, Human
ggccuggccu

SEQ ID NO: 3034629 - RNA, 23 nt, Human
ggccuggccccucagggucccug

SEQ ID NO: 3034630 - RNA, 18 nt, Human
ggccuggccccucagggu

SEQ ID NO: 3034631 - RNA, 17 nt, Human
ggccuggccccucaggg

SEQ ID NO: 3034632 - RNA, 15 nt, Human
ggccuggccccucag

SEQ ID NO: 3034633 - RNA, 14 nt, Human
ggccuggccccuca

SEQ ID NO: 3034634 - RNA, 20 nt, Human
ggcccagagggccugcaagg

SEQ ID NO: 3034635 - RNA, 19 nt, Human
ggcccagagggccugcaag

SEQ ID NO: 3034636 - RNA, 17 nt, Human
ggcccagagggccugca

SEQ ID NO: 3034637 - RNA, 14 nt, Human
ggcccagagggccu

SEQ ID NO: 3034638 - RNA, 14 nt, Human
ggccucaagugauu

SEQ ID NO: 3034639 - RNA, 22 nt, Human
ggccucaagugauucuccugcc

SEQ ID NO: 3034640 - RNA, 20 nt, Human
ggccuagcauacguacacau

SEQ ID NO: 3034641 - RNA, 22 nt, Human
ggccuagcauacguacacauuu

SEQ ID NO: 3034642 - RNA, 16 nt, Human
ggccucugcacucccc

SEQ ID NO: 3034643 - RNA, 20 nt, Human
ggccucgguguggagaagcg

SEQ ID NO: 3034644 - RNA, 14 nt, Human
ggccuccugugugu

SEQ ID NO: 3034645 - RNA, 12 nt, Human
ggcucugcccuu

SEQ ID NO: 3034646 - RNA, 15 nt, Human
ggcucugccucccau

SEQ ID NO: 3034647 - RNA, 13 nt, Human
ggcucugccuccc

SEQ ID NO: 3034648 - RNA, 15 nt, Human
ggcucugcccuuggu

SEQ ID NO: 3034649 - RNA, 14 nt, Human
ggcucugcccuugg

SEQ ID NO: 3034650 - RNA, 16 nt, Human
ggcucugccucccauc

SEQ ID NO: 3034651 - RNA, 14 nt, Human
ggcuccaggcuccu

SEQ ID NO: 3034652 - RNA, 16 nt, Human
ggcucucaggccagcu

SEQ ID NO: 3034653 - RNA, 15 nt, Human
ggcucucaggccagc

SEQ ID NO: 3034654 - RNA, 20 nt, Human
ggcucucaggccagcugcuu

SEQ ID NO: 3034655 - RNA, 19 nt, Human
ggcucucaggccagcugcu

SEQ ID NO: 3034656 - RNA, 18 nt, Human
ggcucucaggccagcugc

SEQ ID NO: 3034657 - RNA, 17 nt, Human
ggcucucaggccagcug

SEQ ID NO: 3034658 - RNA, 14 nt, Human
ggcucucaggccag

SEQ ID NO: 3034659 - RNA, 15 nt, Human
ggcgcgguggcucac

SEQ ID NO: 3034660 - RNA, 17 nt, Human
ggcgcugccccuggcag

SEQ ID NO: 3034661 - RNA, 11 nt, Human
ggcgcugcccc

SEQ ID NO: 3034662 - RNA, 12 nt, Human
ggcuccaggcuc

SEQ ID NO: 3034663 - RNA, 13 nt, Human
ggcuccaggcucc

SEQ ID NO: 3034664 - RNA, 17 nt, Human
ggcuccaggagcagcca

SEQ ID NO: 3034665 - RNA, 16 nt, Human
ggcuccaggagcagcc

SEQ ID NO: 3034666 - RNA, 14 nt, Human
ggcuccaggagcag

SEQ ID NO: 3034667 - RNA, 10 nt, Human
ggcuccagac

SEQ ID NO: 3034668 - RNA, 12 nt, Human
ggcuaugcauuu

SEQ ID NO: 3034669 - RNA, 13 nt, Human
ggcuaugcauuug

SEQ ID NO: 3034670 - RNA, 9 nt, Human
ggcuccaga

SEQ ID NO: 3034671 - RNA, 19 nt, Human
ggauugaaggaugcugucu

SEQ ID NO: 3034672 - RNA, 17 nt, Human
ggcaagcaccuccugcc

SEQ ID NO: 3034673 - RNA, 21 nt, Human
ggauucuuccucccucccucu

SEQ ID NO: 3034674 - RNA, 16 nt, Human
ggauucuuccucccuc

SEQ ID NO: 3034675 - RNA, 18 nt, Human
ggcaagcaccuccugccu

SEQ ID NO: 3034676 - RNA, 19 nt, Human
ggcaagcaccuccugccuc

SEQ ID NO: 3034677 - RNA, 17 nt, Human
ggcaccagcagccugga

SEQ ID NO: 3034678 - RNA, 18 nt, Human
ggcacccggccccugcug

SEQ ID NO: 3034679 - RNA, 19 nt, Human
ggcacccggccccugcugg

SEQ ID NO: 3034680 - RNA, 20 nt, Human
ggcacccggccccugcuggu

SEQ ID NO: 3034681 - RNA, 17 nt, Human
ggcacccggccccugcu

SEQ ID NO: 3034682 - RNA, 18 nt, Human
ggcacucagaagacacug

SEQ ID NO: 3034683 - RNA, 19 nt, Human
ggcacucagaagacacuga

SEQ ID NO: 3034684 - RNA, 22 nt, Human
ggcagagcagagaccaucccug

SEQ ID NO: 3034685 - RNA, 18 nt, Human
ggaugcccaaagaugcag

SEQ ID NO: 3034686 - RNA, 19 nt, Human
ggaugcccaaagaugcagc

SEQ ID NO: 3034687 - RNA, 13 nt, Human
ggaugccuggugg

SEQ ID NO: 3034688 - RNA, 17 nt, Human
ggaugccugguggcagc

SEQ ID NO: 3034689 - RNA, 16 nt, Human
ggaugaucuaggaaga

SEQ ID NO: 3034690 - RNA, 22 nt, Human
ggaugaucuaggaagacuuugg

SEQ ID NO: 3034691 - RNA, 18 nt, Human
ggaugaucuaggaagacu

SEQ ID NO: 3034692 - RNA, 23 nt, Human
ggagucccaccuuggcugcaggg

SEQ ID NO: 3034693 - RNA, 18 nt, Human
ggaugccugguggcagcu

SEQ ID NO: 3034694 - RNA, 19 nt, Human
ggaugccugguggcagcug

SEQ ID NO: 3034695 - RNA, 20 nt, Human
ggaugccugguggcagcugc

SEQ ID NO: 3034696 - RNA, 21 nt, Human
ggaugccugguggcagcugcg

SEQ ID NO: 3034697 - RNA, 17 nt, Human
ggcagugcuuggcccag

SEQ ID NO: 3034698 - RNA, 18 nt, Human
ggcagugcuuggcccagg

SEQ ID NO: 3034699 - RNA, 19 nt, Human
ggcagugcuuggcccagga

SEQ ID NO: 3034700 - RNA, 20 nt, Human
ggcagugcuuggcccaggag

SEQ ID NO: 3034701 - RNA, 21 nt, Human
ggcagugcuuggcccaggagu

SEQ ID NO: 3034702 - RNA, 22 nt, Human
ggcagugcuuggcccaggaguu

SEQ ID NO: 3034703 - RNA, 23 nt, Human
ggcagugcuuggcccaggaguuu

SEQ ID NO: 3034704 - RNA, 16 nt, Human
ggcagugcuuggccca

SEQ ID NO: 3034705 - RNA, 22 nt, Human
ggcaugacacgaauauugcuga

SEQ ID NO: 3034706 - RNA, 23 nt, Human
ggcaugugaugagaggaaaucac

SEQ ID NO: 3034707 - RNA, 18 nt, Human
ggcaugugaugagaggaa

SEQ ID NO: 3034708 - RNA, 17 nt, Human
ggcagggucucacucug

SEQ ID NO: 3034709 - RNA, 18 nt, Human
ggcagggucucacucugu

SEQ ID NO: 3034710 - RNA, 17 nt, Human
ggcagguuggugggggc

SEQ ID NO: 3034711 - RNA, 23 nt, Human
ggcagcugcgguccacccaggag

SEQ ID NO: 3034712 - RNA, 24 nt, Human
ggcagcugcgguccacccaggagc

SEQ ID NO: 3034713 - RNA, 12 nt, Human
ggcaggguccua

SEQ ID NO: 3034714 - RNA, 21 nt, Human
ggcagcugcgguccacccagg

SEQ ID NO: 3034715 - RNA, 17 nt, Human
ggcagaguugaagacag

SEQ ID NO: 3034716 - RNA, 21 nt, Human
ggcagaguugaagacagagcu

SEQ ID NO: 3034717 - RNA, 19 nt, Human
ggcagaguugaagacagag

SEQ ID NO: 3034718 - RNA, 20 nt, Human
ggcauguucucugaggacac

SEQ ID NO: 3034719 - RNA, 22 nt, Human
ggccacagaaaauucuucucca

SEQ ID NO: 3034720 - RNA, 20 nt, Human
ggccacugugaagagaacca

SEQ ID NO: 3034721 - RNA, 11 nt, Human
ggccaggagcc

SEQ ID NO: 3034722 - RNA, 14 nt, Human
ggccaggcccucug

SEQ ID NO: 3034723 - RNA, 13 nt, Human
ggccaggagccuc

SEQ ID NO: 3034724 - RNA, 17 nt, Human
ggccaggcccucugccc

SEQ ID NO: 3034725 - RNA, 16 nt, Human
ggccaggcccucugcc

SEQ ID NO: 3034726 - RNA, 15 nt, Human
ggccaggcccucugc

SEQ ID NO: 3034727 - RNA, 12 nt, Human
ggcccagagagg

SEQ ID NO: 3034728 - RNA, 15 nt, Human
ggacauuuuaugucu

SEQ ID NO: 3034729 - RNA, 19 nt, Human
ggaccagagcugccaccug

SEQ ID NO: 3034730 - RNA, 14 nt, Human
ggaccagagcugcc

SEQ ID NO: 3034731 - RNA, 22 nt, Human
ggacagccacggccaggccaga

SEQ ID NO: 3034732 - RNA, 20 nt, Human
ggacagaggggguggccucc

SEQ ID NO: 3034733 - RNA, 11 nt, Human
ggacagcuccu

SEQ ID NO: 3034734 - RNA, 15 nt, Human
ggacagcuccuucug

SEQ ID NO: 3034735 - RNA, 16 nt, Human
ggacagcuccuucugu

SEQ ID NO: 3034736 - RNA, 22 nt, Human
ggacacucaaaagcugggcagg

SEQ ID NO: 3034737 - RNA, 16 nt, Human
ggacagaggggguggc

SEQ ID NO: 3034738 - RNA, 19 nt, Human
ggagaagucuucuauuuau

SEQ ID NO: 3034739 - RNA, 20 nt, Human
ggagaagucuucuauuuauu

SEQ ID NO: 3034740 - RNA, 18 nt, Human
ggaccuugaacuggguac

SEQ ID NO: 3034741 - RNA, 18 nt, Human
ggagcccugucuccucuc

SEQ ID NO: 3034742 - RNA, 14 nt, Human
ggagccuccugccc

SEQ ID NO: 3034743 - RNA, 15 nt, Human
ggagccuccugcccu

SEQ ID NO: 3034744 - RNA, 17 nt, Human
ggagggagggcuccaga

SEQ ID NO: 3034745 - RNA, 16 nt, Human
ggagggagggcuccag

SEQ ID NO: 3034746 - RNA, 13 nt, Human
ggagggagggcuc

SEQ ID NO: 3034747 - RNA, 18 nt, Human
ggaggauguucugggaca

SEQ ID NO: 3034748 - RNA, 21 nt, Human
ggaggauguucugggacacag

SEQ ID NO: 3034749 - RNA, 21 nt, Human
ggagucccaccuuggcugcag

SEQ ID NO: 3034750 - RNA, 22 nt, Human
ggagucccaccuuggcugcagg

SEQ ID NO: 3034751 - RNA, 23 nt, Human
gccuuguuuaaugguaguuuuac

SEQ ID NO: 3034752 - RNA, 15 nt, Human
gccuuguuuaauggu

SEQ ID NO: 3034753 - RNA, 15 nt, Human
gccuuacacaauggu

SEQ ID NO: 3034754 - RNA, 21 nt, Human
gcgacaaugcaaaccaucauu

SEQ ID NO: 3034755 - RNA, 20 nt, Human
gcgacaaugcaaaccaucau

SEQ ID NO: 3034756 - RNA, 13 nt, Human
gcgacaaugcaaa

SEQ ID NO: 3034757 - RNA, 12 nt, Human
gcgacaaugcaa

SEQ ID NO: 3034758 - RNA, 15 nt, Human
gcggggacagcuccu

SEQ ID NO: 3034759 - RNA, 17 nt, Human
gcggggacagcuccuuc

SEQ ID NO: 3034760 - RNA, 19 nt, Human
gcggugagaggggaacaga

SEQ ID NO: 3034761 - RNA, 13 nt, Human
gcgguccacccag

SEQ ID NO: 3034762 - RNA, 14 nt, Human
gcgguccacccagg

SEQ ID NO: 3034763 - RNA, 21 nt, Human
gcgcugccccuggcagccccu

SEQ ID NO: 3034764 - RNA, 18 nt, Human
gcgcugccccuggcagcc

SEQ ID NO: 3034765 - RNA, 17 nt, Human
gcgcugccccuggcagc

SEQ ID NO: 3034766 - RNA, 16 nt, Human
gcggagaaaggaaggg

SEQ ID NO: 3034767 - RNA, 19 nt, Human
gcggagacggagucccacc

SEQ ID NO: 3034768 - RNA, 14 nt, Human
gcggggacagcucc

SEQ ID NO: 3034769 - RNA, 21 nt, Human
gcgccuuaaggauguucuagc

SEQ ID NO: 3034770 - RNA, 23 nt, Human
gcgcccaguuggguggaugccug

SEQ ID NO: 3034771 - RNA, 14 nt, Human
gccuggccccucag

SEQ ID NO: 3034772 - RNA, 13 nt, Human
gccuggccccuca

SEQ ID NO: 3034773 - RNA, 20 nt, Human
gccuggccagaugcaccagc

SEQ ID NO: 3034774 - RNA, 16 nt, Human
gccuggccagaugcac

SEQ ID NO: 3034775 - RNA, 21 nt, Human
gccuggccagaugcaccagcc

SEQ ID NO: 3034776 - RNA, 20 nt, Human
gccuguaauccuagcacuuu

SEQ ID NO: 3034777 - RNA, 15 nt, Human
gccuguaauccuagc

SEQ ID NO: 3034778 - RNA, 18 nt, Human
gccuggauggggcugcac

SEQ ID NO: 3034779 - RNA, 16 nt, Human
gccuggauggggcugc

SEQ ID NO: 3034780 - RNA, 20 nt, Human
gccuggauggggcugcaccg

SEQ ID NO: 3034781 - RNA, 12 nt, Human
gccugagcuggg

SEQ ID NO: 3034782 - RNA, 19 nt, Human
gcccaguuggguggaugcc

SEQ ID NO: 3034783 - RNA, 21 nt, Human
gcccaguuggguggaugccug

SEQ ID NO: 3034784 - RNA, 15 nt, Human
gccugaagucacaca

SEQ ID NO: 3034785 - RNA, 16 nt, Human
gccugaagucacacag

SEQ ID NO: 3034786 - RNA, 17 nt, Human
gccugaagucacacagu

SEQ ID NO: 3034787 - RNA, 18 nt, Human
gccugaagucacacagug

SEQ ID NO: 3034788 - RNA, 16 nt, Human
gcucagcggggacagc

SEQ ID NO: 3034789 - RNA, 17 nt, Human
gcucagcggggacagcu

SEQ ID NO: 3034790 - RNA, 18 nt, Human
gcucagcggggacagcuc

SEQ ID NO: 3034791 - RNA, 23 nt, Human
gcucagcggggacagcuccuucu

SEQ ID NO: 3034792 - RNA, 18 nt, Human
gcucaccucucccuugga

SEQ ID NO: 3034793 - RNA, 17 nt, Human
gcucaccucucccuugg

SEQ ID NO: 3034794 - RNA, 16 nt, Human
gcucaccucucccuug

SEQ ID NO: 3034795 - RNA, 14 nt, Human
gcucaccucucccu

SEQ ID NO: 3034796 - RNA, 16 nt, Human
gcucacauaucuguca

SEQ ID NO: 3034797 - RNA, 12 nt, Human
gcucaccagccc

SEQ ID NO: 3034798 - RNA, 13 nt, Human
gcucaccagcccc

SEQ ID NO: 3034799 - RNA, 14 nt, Human
gcucaccagcccca

SEQ ID NO: 3034800 - RNA, 15 nt, Human
gcucaccagccccag

SEQ ID NO: 3034801 - RNA, 14 nt, Human
gcuaucucccccag

SEQ ID NO: 3034802 - RNA, 18 nt, Human
gcucaaguccucuuuucu

SEQ ID NO: 3034803 - RNA, 13 nt, Human
gcuaucuccccca

SEQ ID NO: 3034804 - RNA, 19 nt, Human
gcucaaguccucuuuucug

SEQ ID NO: 3034805 - RNA, 22 nt, Human
gcucaaguccucuuuucugaga

SEQ ID NO: 3034806 - RNA, 21 nt, Human
gcuaguugggcuuccucauag

SEQ ID NO: 3034807 - RNA, 22 nt, Human
gcggugcuaucucccccagccc

SEQ ID NO: 3034808 - RNA, 19 nt, Human
gcggugcuaucucccccag

SEQ ID NO: 3034809 - RNA, 12 nt, Human
gcuccugugucu

SEQ ID NO: 3034810 - RNA, 13 nt, Human
gcuccugugucuu

SEQ ID NO: 3034811 - RNA, 13 nt, Human
gcuccuucugucc

SEQ ID NO: 3034812 - RNA, 17 nt, Human
gcuccuuuagcgcccag

SEQ ID NO: 3034813 - RNA, 17 nt, Human
gcucgagcaugccugga

SEQ ID NO: 3034814 - RNA, 21 nt, Human
gcucgagcaugccuggauggg

SEQ ID NO: 3034815 - RNA, 19 nt, Human
gcucgagcaugccuggaug

SEQ ID NO: 3034816 - RNA, 24 nt, Human
gcuccgcuuucuacccagcgagcc

SEQ ID NO: 3034817 - RNA, 20 nt, Human
gcuccagcuguucagcuggu

SEQ ID NO: 3034818 - RNA, 21 nt, Human
gcuccagcuguucagcugguu

SEQ ID NO: 3034819 - RNA, 11 nt, Human
gcuccaggagc

SEQ ID NO: 3034820 - RNA, 14 nt, Human
gcuccaggagcagc

SEQ ID NO: 3034821 - RNA, 12 nt, Human
gcuccaggagca

SEQ ID NO: 3034822 - RNA, 12 nt, Human
gcuccaggcucc

SEQ ID NO: 3034823 - RNA, 24 nt, Human
gcuccaggcuccuuuagcgcccag

SEQ ID NO: 3034824 - RNA, 18 nt, Human
gcuccaggagcagccaca

SEQ ID NO: 3034825 - RNA, 17 nt, Human
gcuccaggagcagccac

SEQ ID NO: 3034826 - RNA, 16 nt, Human
gcuccaggagcagcca

SEQ ID NO: 3034827 - RNA, 15 nt, Human
gcuccaggagcagcc

SEQ ID NO: 3034828 - RNA, 20 nt, Human
gcucccuucccaccucucuc

SEQ ID NO: 3034829 - RNA, 18 nt, Human
gcuccgcuuucuacccag

SEQ ID NO: 3034830 - RNA, 21 nt, Human
gcuccgcuuucuacccagcga

SEQ ID NO: 3034831 - RNA, 22 nt, Human
gcuccgcuuucuacccagcgag

SEQ ID NO: 3034832 - RNA, 23 nt, Human
gcuccgcuuucuacccagcgagc

SEQ ID NO: 3034833 - RNA, 19 nt, Human
gcucccuucccaccucucu

SEQ ID NO: 3034834 - RNA, 14 nt, Human
gcugaccuugcuga

SEQ ID NO: 3034835 - RNA, 22 nt, Human
gcugacuguuuucucuugagag

SEQ ID NO: 3034836 - RNA, 17 nt, Human
gcugacagacacaggcc

SEQ ID NO: 3034837 - RNA, 18 nt, Human
gcugacagacacaggccc

SEQ ID NO: 3034838 - RNA, 19 nt, Human
gcugacagacacaggcccg

SEQ ID NO: 3034839 - RNA, 20 nt, Human
gcucucaggccagcugcuug

SEQ ID NO: 3034840 - RNA, 21 nt, Human
gcucucaggccagcugcuugg

SEQ ID NO: 3034841 - RNA, 19 nt, Human
gcugauuuaaacacauuaa

SEQ ID NO: 3034842 - RNA, 22 nt, Human
gcugcaaaggguaucaggugcu

SEQ ID NO: 3034843 - RNA, 23 nt, Human
gcugcaaaggguaucaggugcug

SEQ ID NO: 3034844 - RNA, 14 nt, Human
gcugcaguugccag

SEQ ID NO: 3034845 - RNA, 13 nt, Human
gcugcaguugcca

SEQ ID NO: 3034846 - RNA, 19 nt, Human
gcugcauuuaaaagauaca

SEQ ID NO: 3034847 - RNA, 17 nt, Human
gcugcauuuaaaagaua

SEQ ID NO: 3034848 - RNA, 18 nt, Human
gcugcauuuaaaagauac

SEQ ID NO: 3034849 - RNA, 20 nt, Human
gcugccaaugggagcucaug

SEQ ID NO: 3034850 - RNA, 12 nt, Human
gcugccaccugc

SEQ ID NO: 3034851 - RNA, 22 nt, Human
gcugcuuuugucuaugggacuc

SEQ ID NO: 3034852 - RNA, 15 nt, Human
gcuggaccuugaacu

SEQ ID NO: 3034853 - RNA, 22 nt, Human
gcugcgguccacccaggagccc

SEQ ID NO: 3034854 - RNA, 19 nt, Human
gcugcgguccacccaggag

SEQ ID NO: 3034855 - RNA, 21 nt, Human
gcugcgguccacccaggagcc

SEQ ID NO: 3034856 - RNA, 14 nt, Human
gcugcgguccaccc

SEQ ID NO: 3034857 - RNA, 15 nt, Human
gcugcgguccaccca

SEQ ID NO: 3034858 - RNA, 20 nt, Human
gcugccuguucagcuccagc

SEQ ID NO: 3034859 - RNA, 22 nt, Human
gcugccuguucagcuccagcuc

SEQ ID NO: 3034860 - RNA, 18 nt, Human
gcugccuguucagcucca

SEQ ID NO: 3034861 - RNA, 19 nt, Human
gcugccuguucagcuccag

SEQ ID NO: 3034862 - RNA, 24 nt, Human
gcugcccugcccaccuggccucug

SEQ ID NO: 3034863 - RNA, 23 nt, Human
gcugcccugcccaccuggccucu

SEQ ID NO: 3034864 - RNA, 22 nt, Human
gcugcccugcccaccuggccuc

SEQ ID NO: 3034865 - RNA, 21 nt, Human
gcugcccugcccaccuggccu

SEQ ID NO: 3034866 - RNA, 20 nt, Human
gcugcccugcccaccuggcc

SEQ ID NO: 3034867 - RNA, 18 nt, Human
gcugcccugcccaccugg

SEQ ID NO: 3034868 - RNA, 16 nt, Human
gcugcccugcccaccu

SEQ ID NO: 3034869 - RNA, 12 nt, Human
gcugcccugccc

SEQ ID NO: 3034870 - RNA, 14 nt, Human
gcugcccugcccac

SEQ ID NO: 3034871 - RNA, 13 nt, Human
gcugcccugccca

SEQ ID NO: 3034872 - RNA, 22 nt, Human
gcuuacaugccuaccaauauuu

SEQ ID NO: 3034873 - RNA, 15 nt, Human
gcugugucucccuuc

SEQ ID NO: 3034874 - RNA, 16 nt, Human
gcugucccuuuuccuu

SEQ ID NO: 3034875 - RNA, 22 nt, Human
gcugucccuuacgugaguccug

SEQ ID NO: 3034876 - RNA, 23 nt, Human
gcugucccuuacgugaguccugg

SEQ ID NO: 3034877 - RNA, 17 nt, Human
gcugucagccauuccug

SEQ ID NO: 3034878 - RNA, 14 nt, Human
gcuggugucaccug

SEQ ID NO: 3034879 - RNA, 15 nt, Human
gcuggugucaccuga

SEQ ID NO: 3034880 - RNA, 21 nt, Human
gcugggcucccuucccaccuc

SEQ ID NO: 3034881 - RNA, 19 nt, Human
gcugggaugauuggagggg

SEQ ID NO: 3034882 - RNA, 15 nt, Human
gcuggccuggccccu

SEQ ID NO: 3034883 - RNA, 14 nt, Human
gcuggccuggcccc

SEQ ID NO: 3034884 - RNA, 12 nt, Human
gcuggccuggcc

SEQ ID NO: 3034885 - RNA, 13 nt, Human
gcuggccuggccc

SEQ ID NO: 3034886 - RNA, 21 nt, Human
gcugggcuucaguggcagcug

SEQ ID NO: 3034887 - RNA, 22 nt, Human
gcugggcuucaguggcagcugc

SEQ ID NO: 3034888 - RNA, 20 nt, Human
gcugggcuucaguggcagcu

SEQ ID NO: 3034889 - RNA, 14 nt, Human
gcugggggccucag

SEQ ID NO: 3034890 - RNA, 15 nt, Human
gcugggggccucagu

SEQ ID NO: 3034891 - RNA, 18 nt, Human
gcugggggccucagugcc

SEQ ID NO: 3034892 - RNA, 13 nt, Human
gcugggggccuca

SEQ ID NO: 3034893 - RNA, 16 nt, Human
gcuuagacccucaugc

SEQ ID NO: 3034894 - RNA, 21 nt, Human
gcuuagacccucaugcugcca

SEQ ID NO: 3034895 - RNA, 20 nt, Human
gcuuauacacuuacacuuua

SEQ ID NO: 3034896 - RNA, 21 nt, Human
gcuucauccuccucagaucuu

SEQ ID NO: 3034897 - RNA, 19 nt, Human
gcuucaguggcagcugcuu

SEQ ID NO: 3034898 - RNA, 20 nt, Human
gcuucaguggcagcugcuuu

SEQ ID NO: 3034899 - RNA, 17 nt, Human
gcuucucacugccaugc

SEQ ID NO: 3034900 - RNA, 22 nt, Human
gcuucucacugccaugccagcu

SEQ ID NO: 3034901 - RNA, 18 nt, Human
gcuucauuuccugugucu

SEQ ID NO: 3034902 - RNA, 22 nt, Human
gcagaguaggggucugucuuuu

SEQ ID NO: 3034903 - RNA, 18 nt, Human
gcagauggagaccccuug

SEQ ID NO: 3034904 - RNA, 22 nt, Human
gcacuucgggaggucgaggcag

SEQ ID NO: 3034905 - RNA, 14 nt, Human
gcacuugcagacuc

SEQ ID NO: 3034906 - RNA, 16 nt, Human
gcacuugcagacucua

SEQ ID NO: 3034907 - RNA, 17 nt, Human
gcagacucuacagaggc

SEQ ID NO: 3034908 - RNA, 18 nt, Human
gcagacucuacagaggcc

SEQ ID NO: 3034909 - RNA, 19 nt, Human
gcagacucuacagaggcca

SEQ ID NO: 3034910 - RNA, 22 nt, Human
gcagacucuacagaggccaugg

SEQ ID NO: 3034911 - RNA, 19 nt, Human
gcagagaccaucccugaag

SEQ ID NO: 3034912 - RNA, 21 nt, Human
gcagagaccaucccugaaggc

SEQ ID NO: 3034913 - RNA, 20 nt, Human
gcagagaccaucccugaagg

SEQ ID NO: 3034914 - RNA, 22 nt, Human
gcagagaccaucccugaaggcc

SEQ ID NO: 3034915 - RNA, 16 nt, Human
gcaggaagcugugaga

SEQ ID NO: 3034916 - RNA, 19 nt, Human
gcagcucagagaggguggg

SEQ ID NO: 3034917 - RNA, 18 nt, Human
gcagcucagagagggugg

SEQ ID NO: 3034918 - RNA, 16 nt, Human
gcagcucaccucuccc

SEQ ID NO: 3034919 - RNA, 14 nt, Human
gcagcucagagagg

SEQ ID NO: 3034920 - RNA, 21 nt, Human
gcagcucaccucucccuugga

SEQ ID NO: 3034921 - RNA, 20 nt, Human
gcagcucaccucucccuugg

SEQ ID NO: 3034922 - RNA, 17 nt, Human
gcagcucaccucucccu

SEQ ID NO: 3034923 - RNA, 17 nt, Human
gcagccucacaguccuu

SEQ ID NO: 3034924 - RNA, 15 nt, Human
gcagccucacagucc

SEQ ID NO: 3034925 - RNA, 19 nt, Human
gcagccucacaguccuuac

SEQ ID NO: 3034926 - RNA, 19 nt, Human
gcagcagggagggcuucug

SEQ ID NO: 3034927 - RNA, 18 nt, Human
gcagcagggagggcuucu

SEQ ID NO: 3034928 - RNA, 15 nt, Human
gcacgcacacugucu

SEQ ID NO: 3034929 - RNA, 16 nt, Human
gcacgcacacugucug

SEQ ID NO: 3034930 - RNA, 19 nt, Human
gcacccucaggcagguggg

SEQ ID NO: 3034931 - RNA, 16 nt, Human
gcacccucaggcaggu

SEQ ID NO: 3034932 - RNA, 19 nt, Human
gcacuaaggugugcucuga

SEQ ID NO: 3034933 - RNA, 20 nt, Human
gcacuaaggugugcucugau

SEQ ID NO: 3034934 - RNA, 14 nt, Human
gcacgugugugcac

SEQ ID NO: 3034935 - RNA, 20 nt, Human
gcacuauaauguaagcucua

SEQ ID NO: 3034936 - RNA, 14 nt, Human
gcacuauaauguaa

SEQ ID NO: 3034937 - RNA, 15 nt, Human
gcacuauaauguaag

SEQ ID NO: 3034938 - RNA, 15 nt, Human
gcacugcuuccagug

SEQ ID NO: 3034939 - RNA, 14 nt, Human
gcacugcuuccagu

SEQ ID NO: 3034940 - RNA, 13 nt, Human
gcacugcuuccag

SEQ ID NO: 3034941 - RNA, 12 nt, Human
gcacugcuucca

SEQ ID NO: 3034942 - RNA, 12 nt, Human
gcacugggcuug

SEQ ID NO: 3034943 - RNA, 19 nt, Human
gcacuguuuuauuuuaauu

SEQ ID NO: 3034944 - RNA, 13 nt, Human
gcaccagcagccu

SEQ ID NO: 3034945 - RNA, 15 nt, Human
gcaccaucucuccuc

SEQ ID NO: 3034946 - RNA, 14 nt, Human
gcaccaucucuccu

SEQ ID NO: 3034947 - RNA, 17 nt, Human
gcaccaucucuccuccu

SEQ ID NO: 3034948 - RNA, 23 nt, Human
gcacagcuucauuuccugugucu

SEQ ID NO: 3034949 - RNA, 21 nt, Human
gcacagcuucauuuccugugu

SEQ ID NO: 3034950 - RNA, 20 nt, Human
gauugugucucuugguccug

SEQ ID NO: 3034951 - RNA, 21 nt, Human
gcauacuauuaaacaugcugu

SEQ ID NO: 3034952 - RNA, 17 nt, Human
gcauacuauuaaacaug

SEQ ID NO: 3034953 - RNA, 14 nt, Human
gcauacuauuaaac

SEQ ID NO: 3034954 - RNA, 13 nt, Human
gcauacuauuaaa

SEQ ID NO: 3034955 - RNA, 18 nt, Human
gcauacguacacauuuua

SEQ ID NO: 3034956 - RNA, 19 nt, Human
gcauacguacacauuuuau

SEQ ID NO: 3034957 - RNA, 22 nt, Human
gcaguggugcgaucuggguuca

SEQ ID NO: 3034958 - RNA, 19 nt, Human
gcaguggugguuuucuguu

SEQ ID NO: 3034959 - RNA, 20 nt, Human
gcaguggugcgaucuggguu

SEQ ID NO: 3034960 - RNA, 21 nt, Human
gcaguggugcgaucuggguuc

SEQ ID NO: 3034961 - RNA, 20 nt, Human
gcaguggugguuuucuguuc

SEQ ID NO: 3034962 - RNA, 21 nt, Human
gcaguggugguuuucuguucu

SEQ ID NO: 3034963 - RNA, 11 nt, Human
gcagugggagc

SEQ ID NO: 3034964 - RNA, 18 nt, Human
gcaguggugcgaucuggg

SEQ ID NO: 3034965 - RNA, 19 nt, Human
gcaguggugcgaucugggu

SEQ ID NO: 3034966 - RNA, 17 nt, Human
gcaggcagccaggccac

SEQ ID NO: 3034967 - RNA, 18 nt, Human
gcaggcagccaggccaca

SEQ ID NO: 3034968 - RNA, 22 nt, Human
gcagggcucagcggggacagcu

SEQ ID NO: 3034969 - RNA, 16 nt, Human
gcagggucucacucug

SEQ ID NO: 3034970 - RNA, 19 nt, Human
gcaggguccuagaaauucc

SEQ ID NO: 3034971 - RNA, 22 nt, Human
gcaggggaggguagagcggaga

SEQ ID NO: 3034972 - RNA, 22 nt, Human
gcauacugccuuguuuaauggu

SEQ ID NO: 3034973 - RNA, 12 nt, Human
gcaucaggccag

SEQ ID NO: 3034974 - RNA, 23 nt, Human
gcaucaggccaggcccucugccc

SEQ ID NO: 3034975 - RNA, 18 nt, Human
gcaucaggccaggcccuc

SEQ ID NO: 3034976 - RNA, 20 nt, Human
gcaugaaguaauaugcacac

SEQ ID NO: 3034977 - RNA, 21 nt, Human
gcaugaaguaauaugcacaca

SEQ ID NO: 3034978 - RNA, 22 nt, Human
gcaugaaguaauaugcacacau

SEQ ID NO: 3034979 - RNA, 22 nt, Human
gcaugacacgaauauugcugau

SEQ ID NO: 3034980 - RNA, 18 nt, Human
gcaugaaguaauaugcac

SEQ ID NO: 3034981 - RNA, 21 nt, Human
gcaugacacgaauauugcuga

SEQ ID NO: 3034982 - RNA, 20 nt, Human
gcaugacacgaauauugcug

SEQ ID NO: 3034983 - RNA, 18 nt, Human
gcauuugaggucuguucu

SEQ ID NO: 3034984 - RNA, 22 nt, Human
gcauuccccaggaggccagccu

SEQ ID NO: 3034985 - RNA, 21 nt, Human
gcauuccccaggaggccagcc

SEQ ID NO: 3034986 - RNA, 20 nt, Human
gcauuccccaggaggccagc

SEQ ID NO: 3034987 - RNA, 19 nt, Human
gcauuccccaggaggccag

SEQ ID NO: 3034988 - RNA, 18 nt, Human
gcauuccccaggaggcca

SEQ ID NO: 3034989 - RNA, 17 nt, Human
gcauuccccaggaggcc

SEQ ID NO: 3034990 - RNA, 16 nt, Human
gcauuccccaggaggc

SEQ ID NO: 3034991 - RNA, 15 nt, Human
gcauuccccaggagg

SEQ ID NO: 3034992 - RNA, 14 nt, Human
gcauuccccaggag

SEQ ID NO: 3034993 - RNA, 12 nt, Human
gcauuccccagg

SEQ ID NO: 3034994 - RNA, 19 nt, Human
gcauuaucuagauacugua

SEQ ID NO: 3034995 - RNA, 22 nt, Human
gcauuaucuagauacuguauca

SEQ ID NO: 3034996 - RNA, 24 nt, Human
gcauuaucuagauacuguaucaug

SEQ ID NO: 3034997 - RNA, 14 nt, Human
gcaugccuggaugg

SEQ ID NO: 3034998 - RNA, 13 nt, Human
gcauguuacauaa

SEQ ID NO: 3034999 - RNA, 12 nt, Human
gccaauuugcac

SEQ ID NO: 3035000 - RNA, 22 nt, Human
gccacaagacccuugugguccc

SEQ ID NO: 3035001 - RNA, 16 nt, Human
gccacaagacccuugu

SEQ ID NO: 3035002 - RNA, 23 nt, Human
gccacagagaaaguacuucucca

SEQ ID NO: 3035003 - RNA, 13 nt, Human
gccacagagaaag

SEQ ID NO: 3035004 - RNA, 14 nt, Human
gccacagagaaagu

SEQ ID NO: 3035005 - RNA, 20 nt, Human
gccacagagaaaguacuucu

SEQ ID NO: 3035006 - RNA, 14 nt, Human
gccaauauccuaau

SEQ ID NO: 3035007 - RNA, 15 nt, Human
gccaauauccuaaua

SEQ ID NO: 3035008 - RNA, 16 nt, Human
gccaauauccuaauaa

SEQ ID NO: 3035009 - RNA, 17 nt, Human
gccaauauccuaauaaa

SEQ ID NO: 3035010 - RNA, 13 nt, Human
gccaauauccuaa

SEQ ID NO: 3035011 - RNA, 18 nt, Human
gccaauauccuaauaaaa

SEQ ID NO: 3035012 - RNA, 19 nt, Human
gccaauauccuaauaaaaa

SEQ ID NO: 3035013 - RNA, 20 nt, Human
gccaauauccuaauaaaaag

SEQ ID NO: 3035014 - RNA, 22 nt, Human
gccaauauccuaauaaaaaggu

SEQ ID NO: 3035015 - RNA, 23 nt, Human
gccaauauccuaauaaaaaggug

SEQ ID NO: 3035016 - RNA, 15 nt, Human
gccaaggugggagga

SEQ ID NO: 3035017 - RNA, 14 nt, Human
gccaaggugggagg

SEQ ID NO: 3035018 - RNA, 23 nt, Human
gccaaggugggaggauugcuuga

SEQ ID NO: 3035019 - RNA, 21 nt, Human
gccaaggcugggggaagaagc

SEQ ID NO: 3035020 - RNA, 19 nt, Human
gcauuugaggucuguucuu

SEQ ID NO: 3035021 - RNA, 20 nt, Human
gcauuugaggucuguucuuu

SEQ ID NO: 3035022 - RNA, 22 nt, Human
gcauuuggugguuucagaaaug

SEQ ID NO: 3035023 - RNA, 23 nt, Human
gcauuuggugguuucagaaaugu

SEQ ID NO: 3035024 - RNA, 18 nt, Human
gccacggccaggccagag

SEQ ID NO: 3035025 - RNA, 17 nt, Human
gccacggccaggccaga

SEQ ID NO: 3035026 - RNA, 19 nt, Human
gccacggccaggccagagg

SEQ ID NO: 3035027 - RNA, 22 nt, Human
gccaccugcggugcuaucuccc

SEQ ID NO: 3035028 - RNA, 20 nt, Human
gccaccugcggugcuaucuc

SEQ ID NO: 3035029 - RNA, 14 nt, Human
gccaccugcggugc

SEQ ID NO: 3035030 - RNA, 17 nt, Human
gccaccugccuguuggg

SEQ ID NO: 3035031 - RNA, 21 nt, Human
gccagagggagugacagaggc

SEQ ID NO: 3035032 - RNA, 22 nt, Human
gccagagggagugacagaggca

SEQ ID NO: 3035033 - RNA, 22 nt, Human
gccagaggagagaggacccccu

SEQ ID NO: 3035034 - RNA, 19 nt, Human
gccagaggagagaggaccc

SEQ ID NO: 3035035 - RNA, 17 nt, Human
gccagaggagagaggac

SEQ ID NO: 3035036 - RNA, 15 nt, Human
gccagaggagagagg

SEQ ID NO: 3035037 - RNA, 13 nt, Human
gccagaggagaga

SEQ ID NO: 3035038 - RNA, 12 nt, Human
gccagaggagag

SEQ ID NO: 3035039 - RNA, 23 nt, Human
gccagagggagugacagaggcag

SEQ ID NO: 3035040 - RNA, 16 nt, Human
gccagaugcaccagcc

SEQ ID NO: 3035041 - RNA, 17 nt, Human
gccagaugcaccagccc

SEQ ID NO: 3035042 - RNA, 18 nt, Human
gccagaugcaccagcccu

SEQ ID NO: 3035043 - RNA, 10 nt, Human
gccagaggag

SEQ ID NO: 3035044 - RNA, 20 nt, Human
gccagagacacaagccuucg

SEQ ID NO: 3035045 - RNA, 16 nt, Human
gccagagacacaagcc

SEQ ID NO: 3035046 - RNA, 19 nt, Human
gccagagacacaagccuuc

SEQ ID NO: 3035047 - RNA, 17 nt, Human
gccagagacacaagccu

SEQ ID NO: 3035048 - RNA, 17 nt, Human
gccagguuuuuggucug

SEQ ID NO: 3035049 - RNA, 20 nt, Human
gccagucaccccggccaccu

SEQ ID NO: 3035050 - RNA, 18 nt, Human
gccagucaccccggccac

SEQ ID NO: 3035051 - RNA, 17 nt, Human
gccagucaccccggcca

SEQ ID NO: 3035052 - RNA, 21 nt, Human
gccagauuucacucuccuugg

SEQ ID NO: 3035053 - RNA, 18 nt, Human
gccagauuucacucuccu

SEQ ID NO: 3035054 - RNA, 16 nt, Human
gccagauuucacucuc

SEQ ID NO: 3035055 - RNA, 13 nt, Human
gccagggacagag

SEQ ID NO: 3035056 - RNA, 18 nt, Human
gccagggacagagggggu

SEQ ID NO: 3035057 - RNA, 16 nt, Human
gccagggacagagggg

SEQ ID NO: 3035058 - RNA, 23 nt, Human
gccagggacagaggggguggccu

SEQ ID NO: 3035059 - RNA, 24 nt, Human
gccaugcuccuggcccacugcauc

SEQ ID NO: 3035060 - RNA, 19 nt, Human
gccaugccagcuuaucuca

SEQ ID NO: 3035061 - RNA, 18 nt, Human
gccaugccagcuuaucuc

SEQ ID NO: 3035062 - RNA, 13 nt, Human
gccaugccagcuu

SEQ ID NO: 3035063 - RNA, 18 nt, Human
gccaugaggaacaaggca

SEQ ID NO: 3035064 - RNA, 16 nt, Human
gccauuuguguuuaua

SEQ ID NO: 3035065 - RNA, 24 nt, Human
gcccagccccuucugacccaugcu

SEQ ID NO: 3035066 - RNA, 20 nt, Human
gcccagccccuucugaccca

SEQ ID NO: 3035067 - RNA, 17 nt, Human
gcccagccccuucugac

SEQ ID NO: 3035068 - RNA, 16 nt, Human
gcccagccccuucuga

SEQ ID NO: 3035069 - RNA, 14 nt, Human
gcccagccccuucu

SEQ ID NO: 3035070 - RNA, 13 nt, Human
gcccagccccuuc

SEQ ID NO: 3035071 - RNA, 15 nt, Human
gcccaguugggugga

SEQ ID NO: 3035072 - RNA, 19 nt, Human
gcccagucuggaaugcagu

SEQ ID NO: 3035073 - RNA, 23 nt, Human
gcccaggcuuagucacugagaca

SEQ ID NO: 3035074 - RNA, 21 nt, Human
gcccaggcuuagucacugaga

SEQ ID NO: 3035075 - RNA, 19 nt, Human
gcccaggcuuagucacuga

SEQ ID NO: 3035076 - RNA, 22 nt, Human
gcccaggcuggcgugcaguggu

SEQ ID NO: 3035077 - RNA, 19 nt, Human
gcccaggcuggcgugcagu

SEQ ID NO: 3035078 - RNA, 20 nt, Human
gcccaggcuggcgugcagug

SEQ ID NO: 3035079 - RNA, 21 nt, Human
gcccaggaaaggcuccaggag

SEQ ID NO: 3035080 - RNA, 20 nt, Human
gcccaggaaaggcuccagga

SEQ ID NO: 3035081 - RNA, 19 nt, Human
gcccaggaaaggcuccagg

SEQ ID NO: 3035082 - RNA, 18 nt, Human
gcccaggaaaggcuccag

SEQ ID NO: 3035083 - RNA, 21 nt, Human
gcccaaugcacuuuguucugg

SEQ ID NO: 3035084 - RNA, 12 nt, Human
gcccagagggcc

SEQ ID NO: 3035085 - RNA, 19 nt, Human
gcccagagggccugcaagg

SEQ ID NO: 3035086 - RNA, 18 nt, Human
gcccagagggccugcaag

SEQ ID NO: 3035087 - RNA, 15 nt, Human
gcccagagggccugc

SEQ ID NO: 3035088 - RNA, 14 nt, Human
gcccagagggccug

SEQ ID NO: 3035089 - RNA, 9 nt, Human
gcccagccc

SEQ ID NO: 3035090 - RNA, 12 nt, Human
gcccagccccuu

SEQ ID NO: 3035091 - RNA, 11 nt, Human
gcccagccccu

SEQ ID NO: 3035092 - RNA, 22 nt, Human
gcccagagggccugcaagggag

SEQ ID NO: 3035093 - RNA, 21 nt, Human
gcccagagggccugcaaggga

SEQ ID NO: 3035094 - RNA, 20 nt, Human
gcccagagggccugcaaggg

SEQ ID NO: 3035095 - RNA, 17 nt, Human
gaguuauugaagcagag

SEQ ID NO: 3035096 - RNA, 23 nt, Human
gaguucaucuugaauuguaagga

SEQ ID NO: 3035097 - RNA, 17 nt, Human
gagugugccugaagucc

SEQ ID NO: 3035098 - RNA, 13 nt, Human
gaguucugguucc

SEQ ID NO: 3035099 - RNA, 12 nt, Human
gagugggcccaa

SEQ ID NO: 3035100 - RNA, 23 nt, Human
gagugggggaucacagccucuga

SEQ ID NO: 3035101 - RNA, 15 nt, Human
gagucugaaggcugg

SEQ ID NO: 3035102 - RNA, 23 nt, Human
gauauaugcucugcauguuacau

SEQ ID NO: 3035103 - RNA, 21 nt, Human
gaucaaccccuucgcuccugu

SEQ ID NO: 3035104 - RNA, 22 nt, Human
gaucaaccccuucgcuccugug

SEQ ID NO: 3035105 - RNA, 13 nt, Human
gauagccaaggcc

SEQ ID NO: 3035106 - RNA, 19 nt, Human
gauagcacagacccugccc

SEQ ID NO: 3035107 - RNA, 12 nt, Human
gauagccaaggc

SEQ ID NO: 3035108 - RNA, 16 nt, Human
gauagcacagacccug

SEQ ID NO: 3035109 - RNA, 13 nt, Human
gauacaaugcugu

SEQ ID NO: 3035110 - RNA, 18 nt, Human
gauacaaugcugugcccu

SEQ ID NO: 3035111 - RNA, 18 nt, Human
gauagcacagacccugcc

SEQ ID NO: 3035112 - RNA, 17 nt, Human
gauagcacagacccugc

SEQ ID NO: 3035113 - RNA, 17 nt, Human
gauacaaaagcauguga

SEQ ID NO: 3035114 - RNA, 21 nt, Human
gagucccaccuuggcugcagg

SEQ ID NO: 3035115 - RNA, 12 nt, Human
gaguagcuggga

SEQ ID NO: 3035116 - RNA, 14 nt, Human
gaguagcugggacu

SEQ ID NO: 3035117 - RNA, 23 nt, Human
gaguccccuguuuguuucugaaa

SEQ ID NO: 3035118 - RNA, 14 nt, Human
gaguccccuguuug

SEQ ID NO: 3035119 - RNA, 12 nt, Human
gaguccccuguu

SEQ ID NO: 3035120 - RNA, 16 nt, Human
gagucgaggacaggga

SEQ ID NO: 3035121 - RNA, 17 nt, Human
gagucgaggacagggag

SEQ ID NO: 3035122 - RNA, 19 nt, Human
gagucucacuguugcccag

SEQ ID NO: 3035123 - RNA, 20 nt, Human
gagucucacuguugcccagg

SEQ ID NO: 3035124 - RNA, 21 nt, Human
gagucucacuguugcccaggc

SEQ ID NO: 3035125 - RNA, 21 nt, Human
gagucugaaggcuggguucug

SEQ ID NO: 3035126 - RNA, 22 nt, Human
gagucucacuguugcccaggcu

SEQ ID NO: 3035127 - RNA, 23 nt, Human
gagucucacuguugcccaggcug

SEQ ID NO: 3035128 - RNA, 22 nt, Human
gaggggggaggugggauccucc

SEQ ID NO: 3035129 - RNA, 15 nt, Human
gaggggguggccucc

SEQ ID NO: 3035130 - RNA, 15 nt, Human
gaggggggagguggg

SEQ ID NO: 3035131 - RNA, 18 nt, Human
gaggugggauccuccagg

SEQ ID NO: 3035132 - RNA, 22 nt, Human
gaggugggauccuccaggugca

SEQ ID NO: 3035133 - RNA, 21 nt, Human
gaggugggauccuccaggugc

SEQ ID NO: 3035134 - RNA, 19 nt, Human
gaguacuacaguccuccca

SEQ ID NO: 3035135 - RNA, 18 nt, Human
gaguacuacaguccuccc

SEQ ID NO: 3035136 - RNA, 17 nt, Human
gaguacguugugcauuu

SEQ ID NO: 3035137 - RNA, 18 nt, Human
gaguacguugugcauuug

SEQ ID NO: 3035138 - RNA, 15 nt, Human
gaguacuacaguccu

SEQ ID NO: 3035139 - RNA, 20 nt, Human
gaguacguugugcauuuggu

SEQ ID NO: 3035140 - RNA, 19 nt, Human
gagguuuuaaaaaaauccc

SEQ ID NO: 3035141 - RNA, 16 nt, Human
gaguacguugugcauu

SEQ ID NO: 3035142 - RNA, 19 nt, Human
gagguucaaagauauuuug

SEQ ID NO: 3035143 - RNA, 14 nt, Human
gagguucccuuuga

SEQ ID NO: 3035144 - RNA, 18 nt, Human
gauugugccuaauguguu

SEQ ID NO: 3035145 - RNA, 20 nt, Human
gauuguccccgacccuugcc

SEQ ID NO: 3035146 - RNA, 15 nt, Human
gauuguccccgaccc

SEQ ID NO: 3035147 - RNA, 17 nt, Human
gauucuauguuaauauu

SEQ ID NO: 3035148 - RNA, 18 nt, Human
gauugcuugagcucagga

SEQ ID NO: 3035149 - RNA, 23 nt, Human
gauugacgggacuguugguauug

SEQ ID NO: 3035150 - RNA, 21 nt, Human
gauucccaagcucugcuccuc

SEQ ID NO: 3035151 - RNA, 22 nt, Human
gauucccaagcucugcuccucu

SEQ ID NO: 3035152 - RNA, 12 nt, Human
gauucagacagc

SEQ ID NO: 3035153 - RNA, 19 nt, Human
gauucaacagguuuuccug

SEQ ID NO: 3035154 - RNA, 18 nt, Human
gauuaaccacuucagcug

SEQ ID NO: 3035155 - RNA, 21 nt, Human
gauuaaccacuucagcugacu

SEQ ID NO: 3035156 - RNA, 19 nt, Human
gauuaaccacuucagcuga

SEQ ID NO: 3035157 - RNA, 21 nt, Human
gauguucuuucacccuuuucu

SEQ ID NO: 3035158 - RNA, 21 nt, Human
gauguuuuaaggaugcuugua

SEQ ID NO: 3035159 - RNA, 14 nt, Human
gauguuuuccauga

SEQ ID NO: 3035160 - RNA, 23 nt, Human
gauguuuuccaugaguccccugu

SEQ ID NO: 3035161 - RNA, 15 nt, Human
gauguuuuccaugag

SEQ ID NO: 3035162 - RNA, 12 nt, Human
gauuaaauucuu

SEQ ID NO: 3035163 - RNA, 19 nt, Human
gauuaaauucuugcaaagu

SEQ ID NO: 3035164 - RNA, 14 nt, Human
gauguucugggaca

SEQ ID NO: 3035165 - RNA, 16 nt, Human
gauguucugggacaca

SEQ ID NO: 3035166 - RNA, 20 nt, Human
gauggugcaaugaccuuuca

SEQ ID NO: 3035167 - RNA, 23 nt, Human
gauggugcaaugaccuuucaaua

SEQ ID NO: 3035168 - RNA, 15 nt, Human
gaugacuguuuuuaa

SEQ ID NO: 3035169 - RNA, 22 nt, Human
gaugagaaagguugaagcacca

SEQ ID NO: 3035170 - RNA, 11 nt, Human
gaugagaaagg

SEQ ID NO: 3035171 - RNA, 20 nt, Human
gaugaccuugaaugaugcca

SEQ ID NO: 3035172 - RNA, 22 nt, Human
gaugggcaacccccagccugcu

SEQ ID NO: 3035173 - RNA, 23 nt, Human
gaucaaccccuucgcuccugugu

SEQ ID NO: 3035174 - RNA, 13 nt, Human
gaucacgccacug

SEQ ID NO: 3035175 - RNA, 14 nt, Human
gaucacgccacugc

SEQ ID NO: 3035176 - RNA, 15 nt, Human
gaucacgccacugca

SEQ ID NO: 3035177 - RNA, 18 nt, Human
gauccuaguuccaccauc

SEQ ID NO: 3035178 - RNA, 18 nt, Human
gauccuaggcauuugcug

SEQ ID NO: 3035179 - RNA, 11 nt, Human
gauccuccagg

SEQ ID NO: 3035180 - RNA, 19 nt, Human
gauccucccaccucagccu

SEQ ID NO: 3035181 - RNA, 12 nt, Human
gauccuccaggu

SEQ ID NO: 3035182 - RNA, 20 nt, Human
gauccucccaccucagccuc

SEQ ID NO: 3035183 - RNA, 19 nt, Human
gauccugagccagauuuca

SEQ ID NO: 3035184 - RNA, 15 nt, Human
gauccugagccagau

SEQ ID NO: 3035185 - RNA, 14 nt, Human
gauccugagccaga

SEQ ID NO: 3035186 - RNA, 13 nt, Human
gauccugagccag

SEQ ID NO: 3035187 - RNA, 18 nt, Human
gauccucccaccucagcc

SEQ ID NO: 3035188 - RNA, 15 nt, Human
gaugaaaaaauaaca

SEQ ID NO: 3035189 - RNA, 16 nt, Human
gaucuuugcagacagg

SEQ ID NO: 3035190 - RNA, 22 nt, Human
gagccacugcaccgggccacag

SEQ ID NO: 3035191 - RNA, 11 nt, Human
gagcccacgcc

SEQ ID NO: 3035192 - RNA, 14 nt, Human
gagcccaggccucc

SEQ ID NO: 3035193 - RNA, 13 nt, Human
gagcccaggccuc

SEQ ID NO: 3035194 - RNA, 12 nt, Human
gagcccaggccu

SEQ ID NO: 3035195 - RNA, 16 nt, Human
gagcccacgcccccac

SEQ ID NO: 3035196 - RNA, 15 nt, Human
gagcccacgccccca

SEQ ID NO: 3035197 - RNA, 12 nt, Human
gagcccacgccc

SEQ ID NO: 3035198 - RNA, 18 nt, Human
gagcagccacauuccuga

SEQ ID NO: 3035199 - RNA, 20 nt, Human
gagccacugcaccgggccac

SEQ ID NO: 3035200 - RNA, 13 nt, Human
gagaucagccugg

SEQ ID NO: 3035201 - RNA, 16 nt, Human
gagaucagccugggca

SEQ ID NO: 3035202 - RNA, 14 nt, Human
gagaucagccuggg

SEQ ID NO: 3035203 - RNA, 20 nt, Human
gagaucaaccccuucgcucc

SEQ ID NO: 3035204 - RNA, 19 nt, Human
gagcaaaaucgaugcagug

SEQ ID NO: 3035205 - RNA, 23 nt, Human
gagcaagacgcugugcugcccug

SEQ ID NO: 3035206 - RNA, 22 nt, Human
gagcaagacgcugugcugcccu

SEQ ID NO: 3035207 - RNA, 18 nt, Human
gagcaagacgcugugcug

SEQ ID NO: 3035208 - RNA, 21 nt, Human
gagcaagacgcugugcugccc

SEQ ID NO: 3035209 - RNA, 17 nt, Human
gagcaccuuagacaguc

SEQ ID NO: 3035210 - RNA, 20 nt, Human
gagccucagcauccuggcac

SEQ ID NO: 3035211 - RNA, 21 nt, Human
gagccucagcauccuggcacc

SEQ ID NO: 3035212 - RNA, 14 nt, Human
gagccuccugcccu

SEQ ID NO: 3035213 - RNA, 15 nt, Human
gagcccugguggcag

SEQ ID NO: 3035214 - RNA, 16 nt, Human
gagcccugguggcagu

SEQ ID NO: 3035215 - RNA, 19 nt, Human
gagccucagcauccuggca

SEQ ID NO: 3035216 - RNA, 17 nt, Human
gagcccugguggcagug

SEQ ID NO: 3035217 - RNA, 22 nt, Human
gagccuccugcccuuaccugcc

SEQ ID NO: 3035218 - RNA, 20 nt, Human
gagccuccugcccuuaccug

SEQ ID NO: 3035219 - RNA, 15 nt, Human
gagccuggcaagaau

SEQ ID NO: 3035220 - RNA, 10 nt, Human
gagccuggca

SEQ ID NO: 3035221 - RNA, 21 nt, Human
gagccugggaggucaaggcug

SEQ ID NO: 3035222 - RNA, 13 nt, Human
gagccugggaggu

SEQ ID NO: 3035223 - RNA, 23 nt, Human
gagcuacacaggggaaaagagga

SEQ ID NO: 3035224 - RNA, 13 nt, Human
gagcugccaccug

SEQ ID NO: 3035225 - RNA, 16 nt, Human
gagcugccaccugccu

SEQ ID NO: 3035226 - RNA, 15 nt, Human
gagcugccaccugcc

SEQ ID NO: 3035227 - RNA, 12 nt, Human
gaggggccucuu

SEQ ID NO: 3035228 - RNA, 22 nt, Human
gaggggccucuuaugggcuggg

SEQ ID NO: 3035229 - RNA, 23 nt, Human
gagggcacagaaaauggaagaca

SEQ ID NO: 3035230 - RNA, 22 nt, Human
gagggcacagaaaauggaagac

SEQ ID NO: 3035231 - RNA, 14 nt, Human
gagggcacagaaaa

SEQ ID NO: 3035232 - RNA, 13 nt, Human
gagggagugacag

SEQ ID NO: 3035233 - RNA, 14 nt, Human
gagggagguaagga

SEQ ID NO: 3035234 - RNA, 14 nt, Human
gagggagugacaga

SEQ ID NO: 3035235 - RNA, 14 nt, Human
gagggagggagggc

SEQ ID NO: 3035236 - RNA, 15 nt, Human
gagggagggcuccag

SEQ ID NO: 3035237 - RNA, 15 nt, Human
gagggagggagggcu

SEQ ID NO: 3035238 - RNA, 15 nt, Human
gaggcugggcucccu

SEQ ID NO: 3035239 - RNA, 14 nt, Human
gaggcugggcuccc

SEQ ID NO: 3035240 - RNA, 13 nt, Human
gaggcugggcucc

SEQ ID NO: 3035241 - RNA, 14 nt, Human
gaggccuucucuga

SEQ ID NO: 3035242 - RNA, 22 nt, Human
gaggcccuucucuccagccccu

SEQ ID NO: 3035243 - RNA, 24 nt, Human
gaggcccuucucuccagccccugg

SEQ ID NO: 3035244 - RNA, 23 nt, Human
gaggcccuucucuccagccccug

SEQ ID NO: 3035245 - RNA, 14 nt, Human
gaggcccuucucuc

SEQ ID NO: 3035246 - RNA, 13 nt, Human
gaggacagggagg

SEQ ID NO: 3035247 - RNA, 22 nt, Human
gaggacagggaggugaccccag

SEQ ID NO: 3035248 - RNA, 23 nt, Human
gaggacagggaggugaccccagg

SEQ ID NO: 3035249 - RNA, 14 nt, Human
gaggaauccagacc

SEQ ID NO: 3035250 - RNA, 22 nt, Human
gaggaaggaaacccagcucugg

SEQ ID NO: 3035251 - RNA, 15 nt, Human
gaggaauccagaccc

SEQ ID NO: 3035252 - RNA, 16 nt, Human
gaggauugcuugagcu

SEQ ID NO: 3035253 - RNA, 17 nt, Human
gaggauguucugggaca

SEQ ID NO: 3035254 - RNA, 20 nt, Human
gaggauguucugggacacag

SEQ ID NO: 3035255 - RNA, 12 nt, Human
gaggauguucug

SEQ ID NO: 3035256 - RNA, 23 nt, Human
gaggaguuugggguaugggagag

SEQ ID NO: 3035257 - RNA, 12 nt, Human
gaggccagccuu

SEQ ID NO: 3035258 - RNA, 13 nt, Human
gaggccagccuug

SEQ ID NO: 3035259 - RNA, 23 nt, Human
gaggcagccccauucugccugcc

SEQ ID NO: 3035260 - RNA, 21 nt, Human
gaggcagccccauucugccug

SEQ ID NO: 3035261 - RNA, 22 nt, Human
gaggcagccccauucugccugc

SEQ ID NO: 3035262 - RNA, 13 nt, Human
gaggcagccccau

SEQ ID NO: 3035263 - RNA, 23 nt, Human
cugacgacuugagugcucaguag

SEQ ID NO: 3035264 - RNA, 16 nt, Human
cugacagacacaggcc

SEQ ID NO: 3035265 - RNA, 14 nt, Human
cugaauuucuuuug

SEQ ID NO: 3035266 - RNA, 15 nt, Human
cugacagacacaggc

SEQ ID NO: 3035267 - RNA, 17 nt, Human
cugacagacacaggccc

SEQ ID NO: 3035268 - RNA, 18 nt, Human
cugacagacacaggcccg

SEQ ID NO: 3035269 - RNA, 14 nt, Human
cugagccagauuuc

SEQ ID NO: 3035270 - RNA, 13 nt, Human
cugagccagauuu

SEQ ID NO: 3035271 - RNA, 19 nt, Human
cugagacagcccgggcucu

SEQ ID NO: 3035272 - RNA, 20 nt, Human
cugagacagcccgggcucug

SEQ ID NO: 3035273 - RNA, 22 nt, Human
cugagacagcccgggcucugcc

SEQ ID NO: 3035274 - RNA, 21 nt, Human
cugagacagcccgggcucugc

SEQ ID NO: 3035275 - RNA, 17 nt, Human
cugaacaucacagcuua

SEQ ID NO: 3035276 - RNA, 16 nt, Human
cucuucuccaggcugu

SEQ ID NO: 3035277 - RNA, 23 nt, Human
cucuuuggucuacacugugcuga

SEQ ID NO: 3035278 - RNA, 22 nt, Human
cucuuuggucuacacugugcug

SEQ ID NO: 3035279 - RNA, 14 nt, Human
cucuuuucaaaaca

SEQ ID NO: 3035280 - RNA, 23 nt, Human
cugaaagggacgcuacccgggaa

SEQ ID NO: 3035281 - RNA, 17 nt, Human
cugaaguucagcugcau

SEQ ID NO: 3035282 - RNA, 20 nt, Human
cugaagucuuuguacagaca

SEQ ID NO: 3035283 - RNA, 17 nt, Human
cugaagucuuuguacag

SEQ ID NO: 3035284 - RNA, 22 nt, Human
cugaagucccagauacuugggg

SEQ ID NO: 3035285 - RNA, 16 nt, Human
cugaagucacacagug

SEQ ID NO: 3035286 - RNA, 21 nt, Human
cugaagucacacagugagucg

SEQ ID NO: 3035287 - RNA, 18 nt, Human
cugaagucacacagugag

SEQ ID NO: 3035288 - RNA, 19 nt, Human
cugaagucacacagugagu

SEQ ID NO: 3035289 - RNA, 17 nt, Human
cugaagucacacaguga

SEQ ID NO: 3035290 - RNA, 19 nt, Human
cugaaugguuuucaaaaua

SEQ ID NO: 3035291 - RNA, 20 nt, Human
cugaaugguuuucaaaauaa

SEQ ID NO: 3035292 - RNA, 12 nt, Human
cugaauuucuuu

SEQ ID NO: 3035293 - RNA, 14 nt, Human
cucuguccugggag

SEQ ID NO: 3035294 - RNA, 13 nt, Human
cucuguccuggga

SEQ ID NO: 3035295 - RNA, 15 nt, Human
cucuguccugggagu

SEQ ID NO: 3035296 - RNA, 22 nt, Human
cucuguccugggagugagcugg

SEQ ID NO: 3035297 - RNA, 18 nt, Human
cucugucgcccagucugg

SEQ ID NO: 3035298 - RNA, 19 nt, Human
cucugucgcccagucugga

SEQ ID NO: 3035299 - RNA, 17 nt, Human
cucugucgcccagucug

SEQ ID NO: 3035300 - RNA, 13 nt, Human
cucugucgcccag

SEQ ID NO: 3035301 - RNA, 16 nt, Human
cucugccucugacaca

SEQ ID NO: 3035302 - RNA, 21 nt, Human
cucugccucccaucacccgcu

SEQ ID NO: 3035303 - RNA, 19 nt, Human
cucugccucugacacacag

SEQ ID NO: 3035304 - RNA, 20 nt, Human
cucugccucugacacacagc

SEQ ID NO: 3035305 - RNA, 20 nt, Human
cucuggcagcucagagaggg

SEQ ID NO: 3035306 - RNA, 23 nt, Human
cucuggcagcucagagagggugg

SEQ ID NO: 3035307 - RNA, 19 nt, Human
cucugugucagguggggca

SEQ ID NO: 3035308 - RNA, 20 nt, Human
cucugugucagguggggcag

SEQ ID NO: 3035309 - RNA, 21 nt, Human
cucugugucagguggggcagc

SEQ ID NO: 3035310 - RNA, 22 nt, Human
cucugugucagguggggcagcu

SEQ ID NO: 3035311 - RNA, 23 nt, Human
cucugugucagguggggcagcuu

SEQ ID NO: 3035312 - RNA, 15 nt, Human
cucuucuccaggcug

SEQ ID NO: 3035313 - RNA, 13 nt, Human
cucuucuccaggc

SEQ ID NO: 3035314 - RNA, 22 nt, Human
cucugaaggacauugcggacag

SEQ ID NO: 3035315 - RNA, 14 nt, Human
cucugacacacagc

SEQ ID NO: 3035316 - RNA, 15 nt, Human
cucugacacacagcu

SEQ ID NO: 3035317 - RNA, 16 nt, Human
cucugacacacagcuc

SEQ ID NO: 3035318 - RNA, 17 nt, Human
cucugacacacagcucu

SEQ ID NO: 3035319 - RNA, 18 nt, Human
cucugacacacagcucug

SEQ ID NO: 3035320 - RNA, 19 nt, Human
cucugacacacagcucugu

SEQ ID NO: 3035321 - RNA, 23 nt, Human
cucugacagaagaaccccagggu

SEQ ID NO: 3035322 - RNA, 21 nt, Human
cucugagacucgcgacaaugc

SEQ ID NO: 3035323 - RNA, 23 nt, Human
cucugagacucgcgacaaugcaa

SEQ ID NO: 3035324 - RNA, 20 nt, Human
cucugagacucgcgacaaug

SEQ ID NO: 3035325 - RNA, 12 nt, Human
cucugaggacac

SEQ ID NO: 3035326 - RNA, 14 nt, Human
cucugaggacacua

SEQ ID NO: 3035327 - RNA, 13 nt, Human
cucugcacaagcu

SEQ ID NO: 3035328 - RNA, 10 nt, Human
cucugcacaa

SEQ ID NO: 3035329 - RNA, 15 nt, Human
cucugcacaagcugc

SEQ ID NO: 3035330 - RNA, 14 nt, Human
cucugcacaagcug

SEQ ID NO: 3035331 - RNA, 12 nt, Human
cucugcccuugg

SEQ ID NO: 3035332 - RNA, 17 nt, Human
cucugccucccaucacc

SEQ ID NO: 3035333 - RNA, 16 nt, Human
cucugccucccaucac

SEQ ID NO: 3035334 - RNA, 14 nt, Human
cucugccucccauc

SEQ ID NO: 3035335 - RNA, 13 nt, Human
cucugccucccau

SEQ ID NO: 3035336 - RNA, 20 nt, Human
cucugcccacucccugcaac

SEQ ID NO: 3035337 - RNA, 18 nt, Human
cucugcccacucccugca

SEQ ID NO: 3035338 - RNA, 17 nt, Human
cucugcccacucccugc

SEQ ID NO: 3035339 - RNA, 16 nt, Human
cucugcccacucccug

SEQ ID NO: 3035340 - RNA, 15 nt, Human
cucugcccacucccu

SEQ ID NO: 3035341 - RNA, 13 nt, Human
cucugcccacucc

SEQ ID NO: 3035342 - RNA, 22 nt, Human
cugauuuaaacacauuaaaggu

SEQ ID NO: 3035343 - RNA, 21 nt, Human
cugauugugucucuugguccu

SEQ ID NO: 3035344 - RNA, 17 nt, Human
cugauugugucucuugg

SEQ ID NO: 3035345 - RNA, 21 nt, Human
cugauggugcaaugaccuuuc

SEQ ID NO: 3035346 - RNA, 20 nt, Human
cugauggugcaaugaccuuu

SEQ ID NO: 3035347 - RNA, 19 nt, Human
cugauggugcaaugaccuu

SEQ ID NO: 3035348 - RNA, 17 nt, Human
cugauggugcaaugacc

SEQ ID NO: 3035349 - RNA, 23 nt, Human
cugauuuuuuuuuccuucagugc

SEQ ID NO: 3035350 - RNA, 22 nt, Human
cugauuuuuuuuuccuucagug

SEQ ID NO: 3035351 - RNA, 21 nt, Human
cugauuuuuuuuuccuucagu

SEQ ID NO: 3035352 - RNA, 20 nt, Human
cugauuuuuuuuuccuucag

SEQ ID NO: 3035353 - RNA, 19 nt, Human
cugauuuuuuuuuccuuca

SEQ ID NO: 3035354 - RNA, 18 nt, Human
cugauuuuuuuuuccuuc

SEQ ID NO: 3035355 - RNA, 16 nt, Human
cugauuuuuuuuuccu

SEQ ID NO: 3035356 - RNA, 12 nt, Human
cugcaccgggcc

SEQ ID NO: 3035357 - RNA, 23 nt, Human
cugcaccggcuggccuggccccu

SEQ ID NO: 3035358 - RNA, 15 nt, Human
cugcacuccccugcu

SEQ ID NO: 3035359 - RNA, 14 nt, Human
cugcacuccccugc

SEQ ID NO: 3035360 - RNA, 22 nt, Human
cugcaccggcuggccuggcccc

SEQ ID NO: 3035361 - RNA, 20 nt, Human
cugcaccggcuggccuggcc

SEQ ID NO: 3035362 - RNA, 14 nt, Human
cugcacccucaggc

SEQ ID NO: 3035363 - RNA, 13 nt, Human
cugcacccucagg

SEQ ID NO: 3035364 - RNA, 18 nt, Human
cugcacuugcagacucua

SEQ ID NO: 3035365 - RNA, 17 nt, Human
cugcacuccccugcugg

SEQ ID NO: 3035366 - RNA, 16 nt, Human
cugcacuccccugcug

SEQ ID NO: 3035367 - RNA, 18 nt, Human
cugcacaagcugcacccu

SEQ ID NO: 3035368 - RNA, 22 nt, Human
cugcacaagcugcacccucagg

SEQ ID NO: 3035369 - RNA, 18 nt, Human
cugcaauaaggggagagu

SEQ ID NO: 3035370 - RNA, 14 nt, Human
cugauggugcaaug

SEQ ID NO: 3035371 - RNA, 16 nt, Human
cugauggugcaaugac

SEQ ID NO: 3035372 - RNA, 15 nt, Human
cugauggugcaauga

SEQ ID NO: 3035373 - RNA, 21 nt, Human
cugauccuaguuccaccauca

SEQ ID NO: 3035374 - RNA, 20 nt, Human
cugauccuaguuccaccauc

SEQ ID NO: 3035375 - RNA, 21 nt, Human
cugauaaagaugagugagcau

SEQ ID NO: 3035376 - RNA, 17 nt, Human
cugagucugaaggcugg

SEQ ID NO: 3035377 - RNA, 19 nt, Human
cugagucugaaggcugggu

SEQ ID NO: 3035378 - RNA, 18 nt, Human
cugagucugaaggcuggg

SEQ ID NO: 3035379 - RNA, 13 nt, Human
cugaggcugggcu

SEQ ID NO: 3035380 - RNA, 22 nt, Human
cugaggcugggcucccuuccca

SEQ ID NO: 3035381 - RNA, 17 nt, Human
cugaggcugggcucccu

SEQ ID NO: 3035382 - RNA, 16 nt, Human
cugaggcugggcuccc

SEQ ID NO: 3035383 - RNA, 15 nt, Human
cugaggcugggcucc

SEQ ID NO: 3035384 - RNA, 24 nt, Human
cugaggcccuucucuccagccccu

SEQ ID NO: 3035385 - RNA, 19 nt, Human
cugcgguccacccaggagc

SEQ ID NO: 3035386 - RNA, 20 nt, Human
cugcgguccacccaggagcc

SEQ ID NO: 3035387 - RNA, 17 nt, Human
cugcgguccacccagga

SEQ ID NO: 3035388 - RNA, 18 nt, Human
cugcgguccacccaggag

SEQ ID NO: 3035389 - RNA, 21 nt, Human
cugccugcccaggccccugcc

SEQ ID NO: 3035390 - RNA, 22 nt, Human
cugccugcccaggccccugcca

SEQ ID NO: 3035391 - RNA, 17 nt, Human
cugccucugacacacag

SEQ ID NO: 3035392 - RNA, 15 nt, Human
cugccucugacacac

SEQ ID NO: 3035393 - RNA, 18 nt, Human
cugccucugacacacagc

SEQ ID NO: 3035394 - RNA, 21 nt, Human
cugccucugacacacagcucu

SEQ ID NO: 3035395 - RNA, 13 nt, Human
cugccgcagcccu

SEQ ID NO: 3035396 - RNA, 12 nt, Human
cugccgcagccc

SEQ ID NO: 3035397 - RNA, 23 nt, Human
cugccgcagcccugcagagggca

SEQ ID NO: 3035398 - RNA, 22 nt, Human
cugccgcagcccugcagagggc

SEQ ID NO: 3035399 - RNA, 21 nt, Human
cugccgcagcccugcagaggg

SEQ ID NO: 3035400 - RNA, 20 nt, Human
cugccgcagcccugcagagg

SEQ ID NO: 3035401 - RNA, 19 nt, Human
cugccgcagcccugcagag

SEQ ID NO: 3035402 - RNA, 19 nt, Human
cugccucagccucccaaag

SEQ ID NO: 3035403 - RNA, 15 nt, Human
cugccucagccuccc

SEQ ID NO: 3035404 - RNA, 14 nt, Human
cugccucagccucc

SEQ ID NO: 3035405 - RNA, 13 nt, Human
cugccaggcaugg

SEQ ID NO: 3035406 - RNA, 11 nt, Human
cugccaggcau

SEQ ID NO: 3035407 - RNA, 14 nt, Human
cugccaugccagcu

SEQ ID NO: 3035408 - RNA, 13 nt, Human
cugcccaccuggc

SEQ ID NO: 3035409 - RNA, 15 nt, Human
cugcccaccuggccu

SEQ ID NO: 3035410 - RNA, 14 nt, Human
cugcccaccuggcc

SEQ ID NO: 3035411 - RNA, 18 nt, Human
cugcccacucccugcaac

SEQ ID NO: 3035412 - RNA, 16 nt, Human
cugcccacucccugca

SEQ ID NO: 3035413 - RNA, 15 nt, Human
cugcccacucccugc

SEQ ID NO: 3035414 - RNA, 14 nt, Human
cugcccacucccug

SEQ ID NO: 3035415 - RNA, 22 nt, Human
cugcccaccuggccucugcacu

SEQ ID NO: 3035416 - RNA, 20 nt, Human
cugcccaccuggccucugca

SEQ ID NO: 3035417 - RNA, 19 nt, Human
cugcccaccuggccucugc

SEQ ID NO: 3035418 - RNA, 18 nt, Human
cugcccaccuggccucug

SEQ ID NO: 3035419 - RNA, 17 nt, Human
cugcccaccuggccucu

SEQ ID NO: 3035420 - RNA, 22 nt, Human
cugcaugcgggcuuccuccugg

SEQ ID NO: 3035421 - RNA, 18 nt, Human
cugcaugcgggcuuccuc

SEQ ID NO: 3035422 - RNA, 19 nt, Human
cugccaaugggagcucaug

SEQ ID NO: 3035423 - RNA, 18 nt, Human
cugccaaugggagcucau

SEQ ID NO: 3035424 - RNA, 22 nt, Human
cugcaucguuucaucuuccaac

SEQ ID NO: 3035425 - RNA, 16 nt, Human
cugcaucguuucaucu

SEQ ID NO: 3035426 - RNA, 23 nt, Human
cugcacuugcagacucuacagag

SEQ ID NO: 3035427 - RNA, 19 nt, Human
cugcaguugccagucaccc

SEQ ID NO: 3035428 - RNA, 17 nt, Human
cugcaguugccagucac

SEQ ID NO: 3035429 - RNA, 22 nt, Human
cugcaguugccagucaccccgg

SEQ ID NO: 3035430 - RNA, 21 nt, Human
cugcaguugccagucaccccg

SEQ ID NO: 3035431 - RNA, 13 nt, Human
cucagcagagugc

SEQ ID NO: 3035432 - RNA, 12 nt, Human
cucagcagagug

SEQ ID NO: 3035433 - RNA, 11 nt, Human
cucagcagagu

SEQ ID NO: 3035434 - RNA, 16 nt, Human
cucagcagagugcuuu

SEQ ID NO: 3035435 - RNA, 16 nt, Human
cucagcauccuggcac

SEQ ID NO: 3035436 - RNA, 17 nt, Human
cucagcauccuggcacc

SEQ ID NO: 3035437 - RNA, 15 nt, Human
cucagaucuucugug

SEQ ID NO: 3035438 - RNA, 21 nt, Human
cucagcaaaagaugcuucuca

SEQ ID NO: 3035439 - RNA, 20 nt, Human
cucacuguugcccaggcugg

SEQ ID NO: 3035440 - RNA, 22 nt, Human
cucacugccaugccagcuuauc

SEQ ID NO: 3035441 - RNA, 19 nt, Human
cucacugccaugccagcuu

SEQ ID NO: 3035442 - RNA, 21 nt, Human
cucacuguugcccaggcuggc

SEQ ID NO: 3035443 - RNA, 22 nt, Human
cucacuguugcccaggcuggcg

SEQ ID NO: 3035444 - RNA, 14 nt, Human
cucagagagggugg

SEQ ID NO: 3035445 - RNA, 23 nt, Human
cucacuauguugcccaggcaggu

SEQ ID NO: 3035446 - RNA, 21 nt, Human
cucacuauguugcccaggcag

SEQ ID NO: 3035447 - RNA, 22 nt, Human
cucacuauguugcccaggcagg

SEQ ID NO: 3035448 - RNA, 15 nt, Human
cucaccccagcccca

SEQ ID NO: 3035449 - RNA, 19 nt, Human
cucacuauguugcccaggc

SEQ ID NO: 3035450 - RNA, 20 nt, Human
cucacuauguugcccaggca

SEQ ID NO: 3035451 - RNA, 11 nt, Human
cucacucuguc

SEQ ID NO: 3035452 - RNA, 12 nt, Human
cucacucugucg

SEQ ID NO: 3035453 - RNA, 13 nt, Human
cucacuccuugaa

SEQ ID NO: 3035454 - RNA, 13 nt, Human
cucacugcagccu

SEQ ID NO: 3035455 - RNA, 12 nt, Human
cucacugcagcc

SEQ ID NO: 3035456 - RNA, 22 nt, Human
cucacucugucgcccagucugg

SEQ ID NO: 3035457 - RNA, 13 nt, Human
cucacucugucgc

SEQ ID NO: 3035458 - RNA, 21 nt, Human
cucacucugucgcccagucug

SEQ ID NO: 3035459 - RNA, 15 nt, Human
cucaagucuggcaga

SEQ ID NO: 3035460 - RNA, 17 nt, Human
cucaagugauucuccug

SEQ ID NO: 3035461 - RNA, 21 nt, Human
cucaaguccucuuuucugaga

SEQ ID NO: 3035462 - RNA, 14 nt, Human
cucaaguccucuuu

SEQ ID NO: 3035463 - RNA, 15 nt, Human
cucacaguccuuacc

SEQ ID NO: 3035464 - RNA, 24 nt, Human
cucacacaugagcaucaggccagg

SEQ ID NO: 3035465 - RNA, 22 nt, Human
cucacacaugagcaucaggcca

SEQ ID NO: 3035466 - RNA, 13 nt, Human
cucaccagcccca

SEQ ID NO: 3035467 - RNA, 14 nt, Human
cucaccagccccag

SEQ ID NO: 3035468 - RNA, 15 nt, Human
cucaccagccccagu

SEQ ID NO: 3035469 - RNA, 17 nt, Human
cucaccagccccagugc

SEQ ID NO: 3035470 - RNA, 18 nt, Human
cucaccagccccagugcc

SEQ ID NO: 3035471 - RNA, 15 nt, Human
cucacauuuauucug

SEQ ID NO: 3035472 - RNA, 19 nt, Human
cucacauuuauucugcuca

SEQ ID NO: 3035473 - RNA, 22 nt, Human
cucacauuuauucugcucacau

SEQ ID NO: 3035474 - RNA, 22 nt, Human
cucacaguccuuaccagcagag

SEQ ID NO: 3035475 - RNA, 19 nt, Human
cucacaguccuuaccagca

SEQ ID NO: 3035476 - RNA, 17 nt, Human
cucacaguccuuaccag

SEQ ID NO: 3035477 - RNA, 21 nt, Human
cucaacaccucugcacaagcu

SEQ ID NO: 3035478 - RNA, 13 nt, Human
cucaaccuccugg

SEQ ID NO: 3035479 - RNA, 15 nt, Human
cucaaccuccugggc

SEQ ID NO: 3035480 - RNA, 17 nt, Human
cucaaccuccugggcua

SEQ ID NO: 3035481 - RNA, 22 nt, Human
cuaugcuguucacuggacacuu

SEQ ID NO: 3035482 - RNA, 22 nt, Human
cuaugggguaaaagggguaggg

SEQ ID NO: 3035483 - RNA, 18 nt, Human
cuaugggacucaaugcac

SEQ ID NO: 3035484 - RNA, 22 nt, Human
cuaugggacucaaugcacugac

SEQ ID NO: 3035485 - RNA, 23 nt, Human
cuaugggacucaaugcacugaca

SEQ ID NO: 3035486 - RNA, 15 nt, Human
cuauuagagaagaga

SEQ ID NO: 3035487 - RNA, 16 nt, Human
cuauaauguaagcucu

SEQ ID NO: 3035488 - RNA, 22 nt, Human
cuauaauuuaccugaagucuuu

SEQ ID NO: 3035489 - RNA, 21 nt, Human
cuauaauguaagcucuacuga

SEQ ID NO: 3035490 - RNA, 17 nt, Human
cuauagccuaggugaca

SEQ ID NO: 3035491 - RNA, 23 nt, Human
cgcccaguuggguggaugccugg

SEQ ID NO: 3035492 - RNA, 22 nt, Human
cgcccaguuggguggaugccug

SEQ ID NO: 3035493 - RNA, 17 nt, Human
cgccaucccagccccaa

SEQ ID NO: 3035494 - RNA, 20 nt, Human
cgccaucccagccccaauga

SEQ ID NO: 3035495 - RNA, 15 nt, Human
cgccaugcuccuggc

SEQ ID NO: 3035496 - RNA, 24 nt, Human
cuaggugacagagugagacucugu

SEQ ID NO: 3035497 - RNA, 14 nt, Human
cuaggugacagagu

SEQ ID NO: 3035498 - RNA, 18 nt, Human
cuaggugacagagugaga

SEQ ID NO: 3035499 - RNA, 17 nt, Human
cuccaccuugcagcucu

SEQ ID NO: 3035500 - RNA, 15 nt, Human
cuccagccccuggau

SEQ ID NO: 3035501 - RNA, 14 nt, Human
cuccaccugccagg

SEQ ID NO: 3035502 - RNA, 13 nt, Human
cuccaccugccag

SEQ ID NO: 3035503 - RNA, 12 nt, Human
cuccaccugcca

SEQ ID NO: 3035504 - RNA, 12 nt, Human
cuccagccuggg

SEQ ID NO: 3035505 - RNA, 17 nt, Human
cuccagccccuggaugc

SEQ ID NO: 3035506 - RNA, 16 nt, Human
cuccagccccuggaug

SEQ ID NO: 3035507 - RNA, 20 nt, Human
cuccagccccuggaugcagc

SEQ ID NO: 3035508 - RNA, 13 nt, Human
cuccaggagcagc

SEQ ID NO: 3035509 - RNA, 11 nt, Human
cuccaggagca

SEQ ID NO: 3035510 - RNA, 17 nt, Human
cuccaggagcagccaca

SEQ ID NO: 3035511 - RNA, 16 nt, Human
cuccaggagcagccac

SEQ ID NO: 3035512 - RNA, 15 nt, Human
cuccaggagcagcca

SEQ ID NO: 3035513 - RNA, 14 nt, Human
cuccaggagcagcc

SEQ ID NO: 3035514 - RNA, 23 nt, Human
cuccaggagcagccacauuccug

SEQ ID NO: 3035515 - RNA, 18 nt, Human
cuccaggagcagccacau

SEQ ID NO: 3035516 - RNA, 13 nt, Human
cuccacauuuguu

SEQ ID NO: 3035517 - RNA, 15 nt, Human
cuccacauuuguuuu

SEQ ID NO: 3035518 - RNA, 13 nt, Human
cuccacccugcuc

SEQ ID NO: 3035519 - RNA, 15 nt, Human
cuccacccugcucuc

SEQ ID NO: 3035520 - RNA, 14 nt, Human
cucauuucuagcag

SEQ ID NO: 3035521 - RNA, 17 nt, Human
cucauuugucacacacu

SEQ ID NO: 3035522 - RNA, 17 nt, Human
cucauguugaaacuuua

SEQ ID NO: 3035523 - RNA, 15 nt, Human
cuccaaaauaaaacu

SEQ ID NO: 3035524 - RNA, 16 nt, Human
cuccaaaauaaaacuu

SEQ ID NO: 3035525 - RNA, 21 nt, Human
cucauaguaugguggcugggu

SEQ ID NO: 3035526 - RNA, 15 nt, Human
cucauacccaccccc

SEQ ID NO: 3035527 - RNA, 14 nt, Human
cucauacucaccuc

SEQ ID NO: 3035528 - RNA, 22 nt, Human
cucauacucaccucaccccacu

SEQ ID NO: 3035529 - RNA, 20 nt, Human
cucaggugauccacccaccu

SEQ ID NO: 3035530 - RNA, 14 nt, Human
cucagggucccugg

SEQ ID NO: 3035531 - RNA, 18 nt, Human
cucaggugauccacccac

SEQ ID NO: 3035532 - RNA, 19 nt, Human
cucaggugauccacccacc

SEQ ID NO: 3035533 - RNA, 21 nt, Human
cucauacccacccccacccaa

SEQ ID NO: 3035534 - RNA, 19 nt, Human
cucauacccacccccaccc

SEQ ID NO: 3035535 - RNA, 18 nt, Human
cucauacccacccccacc

SEQ ID NO: 3035536 - RNA, 16 nt, Human
cucauacccaccccca

SEQ ID NO: 3035537 - RNA, 22 nt, Human
cucaucaccaacgucugugcca

SEQ ID NO: 3035538 - RNA, 20 nt, Human
cucauaguaugguggcuggg

SEQ ID NO: 3035539 - RNA, 23 nt, Human
cucauaguaugguggcuggguug

SEQ ID NO: 3035540 - RNA, 21 nt, Human
cucaucaccaacgucugugcc

SEQ ID NO: 3035541 - RNA, 15 nt, Human
cucauccucauaccc

SEQ ID NO: 3035542 - RNA, 15 nt, Human
cucagcauccuggca

SEQ ID NO: 3035543 - RNA, 18 nt, Human
cucagcauccuggcaccc

SEQ ID NO: 3035544 - RNA, 23 nt, Human
cucaggaguuugagaccaaccug

SEQ ID NO: 3035545 - RNA, 18 nt, Human
cucaggaguuugagacca

SEQ ID NO: 3035546 - RNA, 13 nt, Human
cucagggccuggc

SEQ ID NO: 3035547 - RNA, 15 nt, Human
cucagggccuggcuc

SEQ ID NO: 3035548 - RNA, 14 nt, Human
cucagggccuggcu

SEQ ID NO: 3035549 - RNA, 16 nt, Human
cucagggccuggcuca

SEQ ID NO: 3035550 - RNA, 15 nt, Human
cucagggccuggucg

SEQ ID NO: 3035551 - RNA, 17 nt, Human
cucagggucccuggugg

SEQ ID NO: 3035552 - RNA, 16 nt, Human
cucagggucccuggug

SEQ ID NO: 3035553 - RNA, 15 nt, Human
cucagggucccuggu

SEQ ID NO: 3035554 - RNA, 20 nt, Human
cucaggugagaagcagagga

SEQ ID NO: 3035555 - RNA, 19 nt, Human
cucaggugagaagcagagg

SEQ ID NO: 3035556 - RNA, 14 nt, Human
cucaggugagaagc

SEQ ID NO: 3035557 - RNA, 16 nt, Human
cucaggugagaagcag

SEQ ID NO: 3035558 - RNA, 18 nt, Human
cuccucagaucuucugug

SEQ ID NO: 3035559 - RNA, 20 nt, Human
cucccuuggauuguccccga

SEQ ID NO: 3035560 - RNA, 15 nt, Human
cuccuccagagucag

SEQ ID NO: 3035561 - RNA, 13 nt, Human
cuccuccagaguc

SEQ ID NO: 3035562 - RNA, 15 nt, Human
cuccuccagccgcca

SEQ ID NO: 3035563 - RNA, 18 nt, Human
cucccgaguagcugggac

SEQ ID NO: 3035564 - RNA, 19 nt, Human
cucccgaguagcugggacu

SEQ ID NO: 3035565 - RNA, 20 nt, Human
cucccgaguagcugggacua

SEQ ID NO: 3035566 - RNA, 21 nt, Human
cuccccagcaagugagagcug

SEQ ID NO: 3035567 - RNA, 22 nt, Human
cuccccagcaagugagagcugg

SEQ ID NO: 3035568 - RNA, 23 nt, Human
cuccccagcaagugagagcuggg

SEQ ID NO: 3035569 - RNA, 22 nt, Human
cucgagcaugccuggauggggc

SEQ ID NO: 3035570 - RNA, 19 nt, Human
cucgagcaugccuggaugg

SEQ ID NO: 3035571 - RNA, 16 nt, Human
cucgagcaugccugga

SEQ ID NO: 3035572 - RNA, 15 nt, Human
cucgagcaugccugg

SEQ ID NO: 3035573 - RNA, 13 nt, Human
cucgagcaugccu

SEQ ID NO: 3035574 - RNA, 23 nt, Human
cuccuuggugucgggcaugacac

SEQ ID NO: 3035575 - RNA, 18 nt, Human
cuccugccucgaacuggc

SEQ ID NO: 3035576 - RNA, 20 nt, Human
cuccugccucgaacuggcug

SEQ ID NO: 3035577 - RNA, 21 nt, Human
cuccugccucgaacuggcugc

SEQ ID NO: 3035578 - RNA, 17 nt, Human
cuccugccucagccucc

SEQ ID NO: 3035579 - RNA, 16 nt, Human
cuccugccucagccuc

SEQ ID NO: 3035580 - RNA, 12 nt, Human
cuccugccucag

SEQ ID NO: 3035581 - RNA, 11 nt, Human
cuccugccuca

SEQ ID NO: 3035582 - RNA, 13 nt, Human
cuccucuccccag

SEQ ID NO: 3035583 - RNA, 15 nt, Human
cuccucuccccagca

SEQ ID NO: 3035584 - RNA, 14 nt, Human
cuccuggaaauauu

SEQ ID NO: 3035585 - RNA, 21 nt, Human
cuccugugugugcgccuacag

SEQ ID NO: 3035586 - RNA, 23 nt, Human
cuccugugugugcgccuacagga

SEQ ID NO: 3035587 - RNA, 24 nt, Human
cuccugugugugcgccuacaggag

SEQ ID NO: 3035588 - RNA, 16 nt, Human
cuuguuuaaugguagu

SEQ ID NO: 3035589 - RNA, 21 nt, Human
cuuguguguuuauugucaaag

SEQ ID NO: 3035590 - RNA, 20 nt, Human
cuuguguguuuauugucaaa

SEQ ID NO: 3035591 - RNA, 19 nt, Human
cuuuaaacuacauuagguu

SEQ ID NO: 3035592 - RNA, 22 nt, Human
cuuuccaaaugcccagcuuaaa

SEQ ID NO: 3035593 - RNA, 19 nt, Human
cuuuccaaaugcccagcuu

SEQ ID NO: 3035594 - RNA, 18 nt, Human
cuuuccaaaugcccagcu

SEQ ID NO: 3035595 - RNA, 16 nt, Human
cuugcucugcugacag

SEQ ID NO: 3035596 - RNA, 17 nt, Human
cuugcucugcugacaga

SEQ ID NO: 3035597 - RNA, 13 nt, Human
cuuggaagcuccg

SEQ ID NO: 3035598 - RNA, 13 nt, Human
cuuggaggaagga

SEQ ID NO: 3035599 - RNA, 16 nt, Human
cuuggaaaugggagac

SEQ ID NO: 3035600 - RNA, 17 nt, Human
cuucuccacccugcucu

SEQ ID NO: 3035601 - RNA, 18 nt, Human
cuucuccacccugcucuc

SEQ ID NO: 3035602 - RNA, 16 nt, Human
cuucuccacccugcuc

SEQ ID NO: 3035603 - RNA, 21 nt, Human
cuucuccacccugcucuccga

SEQ ID NO: 3035604 - RNA, 13 nt, Human
cuugcucugcuga

SEQ ID NO: 3035605 - RNA, 14 nt, Human
cuugcucugcugac

SEQ ID NO: 3035606 - RNA, 16 nt, Human
cuuggcugcagggagu

SEQ ID NO: 3035607 - RNA, 22 nt, Human
cuuggaggaaggaaacccagcu

SEQ ID NO: 3035608 - RNA, 23 nt, Human
cuuggagggcaugaagacagaua

SEQ ID NO: 3035609 - RNA, 12 nt, Human
cuuggagggcau

SEQ ID NO: 3035610 - RNA, 14 nt, Human
cuuggcugcaggga

SEQ ID NO: 3035611 - RNA, 17 nt, Human
cuuggcugcagggaguc

SEQ ID NO: 3035612 - RNA, 13 nt, Human
cuugggcuucauc

SEQ ID NO: 3035613 - RNA, 14 nt, Human
cuugggccacugug

SEQ ID NO: 3035614 - RNA, 21 nt, Human
cuuggggaccagagcugccac

SEQ ID NO: 3035615 - RNA, 20 nt, Human
cuuggggaccagagcugcca

SEQ ID NO: 3035616 - RNA, 22 nt, Human
cuugggcuucauccuccucaga

SEQ ID NO: 3035617 - RNA, 22 nt, Human
cuuggggaccagagcugccacc

SEQ ID NO: 3035618 - RNA, 15 nt, Human
cuuggggggcugagg

SEQ ID NO: 3035619 - RNA, 16 nt, Human
cuuggggggcugaggu

SEQ ID NO: 3035620 - RNA, 13 nt, Human
gaaacacugguuu

SEQ ID NO: 3035621 - RNA, 22 nt, Human
gaaacacugguuuuaaauauuu

SEQ ID NO: 3035622 - RNA, 18 nt, Human
gaaacagcuaaugggaca

SEQ ID NO: 3035623 - RNA, 14 nt, Human
gaaaaucagccugc

SEQ ID NO: 3035624 - RNA, 18 nt, Human
gaaaaucagccugcucca

SEQ ID NO: 3035625 - RNA, 16 nt, Human
gaaaaucagccugcuc

SEQ ID NO: 3035626 - RNA, 13 nt, Human
gaaaagcugcuga

SEQ ID NO: 3035627 - RNA, 17 nt, Human
gaaaagcugcugacagu

SEQ ID NO: 3035628 - RNA, 23 nt, Human
gaaaaaggaugcacagaguuguu

SEQ ID NO: 3035629 - RNA, 17 nt, Human
gaaaaaggaugcacaga

SEQ ID NO: 3035630 - RNA, 15 nt, Human
cuuuuuuggcugcug

SEQ ID NO: 3035631 - RNA, 14 nt, Human
cuuuuuuggcugcu

SEQ ID NO: 3035632 - RNA, 15 nt, Human
cuuuuuucacuacau

SEQ ID NO: 3035633 - RNA, 21 nt, Human
cuuuugagugccuuacacaau

SEQ ID NO: 3035634 - RNA, 16 nt, Human
cuuuugagcauuuaga

SEQ ID NO: 3035635 - RNA, 14 nt, Human
gaaaacguggcugc

SEQ ID NO: 3035636 - RNA, 18 nt, Human
gaaaacguggcugcuuca

SEQ ID NO: 3035637 - RNA, 16 nt, Human
gaaaacguggcugcuu

SEQ ID NO: 3035638 - RNA, 15 nt, Human
gaaaacguggcugcu

SEQ ID NO: 3035639 - RNA, 12 nt, Human
gaaaacaugcua

SEQ ID NO: 3035640 - RNA, 14 nt, Human
gaaaacaugcuaca

SEQ ID NO: 3035641 - RNA, 15 nt, Human
gaaaacaugcuacac

SEQ ID NO: 3035642 - RNA, 13 nt, Human
gaaaacacauuuu

SEQ ID NO: 3035643 - RNA, 20 nt, Human
cuuuguuuguugucagcuga

SEQ ID NO: 3035644 - RNA, 18 nt, Human
cuuuguuuguugucagcu

SEQ ID NO: 3035645 - RNA, 22 nt, Human
cuuuucauaaccuagccuuaga

SEQ ID NO: 3035646 - RNA, 20 nt, Human
cuuuucauaaccuagccuua

SEQ ID NO: 3035647 - RNA, 16 nt, Human
cuuuucuuucagccaa

SEQ ID NO: 3035648 - RNA, 23 nt, Human
cuuuucuugcaugaggcuagugu

SEQ ID NO: 3035649 - RNA, 18 nt, Human
cuuuucuugcaugaggcu

SEQ ID NO: 3035650 - RNA, 23 nt, Human
cuuuucuguccgagcuuugaaaa

SEQ ID NO: 3035651 - RNA, 18 nt, Human
cuuuucuguccgagcuuu

SEQ ID NO: 3035652 - RNA, 14 nt, Human
cuuugugauuuuug

SEQ ID NO: 3035653 - RNA, 22 nt, Human
cuuuguccccaccgcagacagg

SEQ ID NO: 3035654 - RNA, 18 nt, Human
cuuuguccccaccgcaga

SEQ ID NO: 3035655 - RNA, 13 nt, Human
cuuugggaggcca

SEQ ID NO: 3035656 - RNA, 15 nt, Human
cuuuguucuggcucu

SEQ ID NO: 3035657 - RNA, 14 nt, Human
cuuuguucuggcuc

SEQ ID NO: 3035658 - RNA, 17 nt, Human
cuuugugauuuuuguaa

SEQ ID NO: 3035659 - RNA, 18 nt, Human
cuuugugauuuuuguaau

SEQ ID NO: 3035660 - RNA, 16 nt, Human
cuuucccaucuuccaa

SEQ ID NO: 3035661 - RNA, 16 nt, Human
cuuuggacccugaggc

SEQ ID NO: 3035662 - RNA, 15 nt, Human
cuuuggacccugagg

SEQ ID NO: 3035663 - RNA, 18 nt, Human
cuuuggacccugaggccc

SEQ ID NO: 3035664 - RNA, 17 nt, Human
cuuuggacccugaggcc

SEQ ID NO: 3035665 - RNA, 19 nt, Human
cuuuggacccugaggccca

SEQ ID NO: 3035666 - RNA, 18 nt, Human
gaaguaaaauguggcagg

SEQ ID NO: 3035667 - RNA, 17 nt, Human
gaaguaaaauguggcag

SEQ ID NO: 3035668 - RNA, 12 nt, Human
gaaguuucugcc

SEQ ID NO: 3035669 - RNA, 14 nt, Human
gaauaacauguaau

SEQ ID NO: 3035670 - RNA, 15 nt, Human
gaauagcugggacua

SEQ ID NO: 3035671 - RNA, 14 nt, Human
gaauagcugggacu

SEQ ID NO: 3035672 - RNA, 19 nt, Human
gaaugaaagggcccagaga

SEQ ID NO: 3035673 - RNA, 14 nt, Human
gaaugaaagggccc

SEQ ID NO: 3035674 - RNA, 16 nt, Human
gaaucucaaauaacua

SEQ ID NO: 3035675 - RNA, 16 nt, Human
gaagguagaauguuuu

SEQ ID NO: 3035676 - RNA, 17 nt, Human
gaagguagaauguuuuc

SEQ ID NO: 3035677 - RNA, 15 nt, Human
gaagguagaauguuu

SEQ ID NO: 3035678 - RNA, 16 nt, Human
gaaggccccgcccagg

SEQ ID NO: 3035679 - RNA, 15 nt, Human
gaaggccccgcccag

SEQ ID NO: 3035680 - RNA, 14 nt, Human
gaaggccccgccca

SEQ ID NO: 3035681 - RNA, 18 nt, Human
gaaggaaacccagcucug

SEQ ID NO: 3035682 - RNA, 17 nt, Human
gaaggaaacccagcucu

SEQ ID NO: 3035683 - RNA, 14 nt, Human
gaaggaaacccagc

SEQ ID NO: 3035684 - RNA, 12 nt, Human
gaaggauacaaa

SEQ ID NO: 3035685 - RNA, 19 nt, Human
gaaggauacaaaagcaugu

SEQ ID NO: 3035686 - RNA, 21 nt, Human
gaaggauacaaaagcauguga

SEQ ID NO: 3035687 - RNA, 21 nt, Human
gaagccgcuggggccaguugg

SEQ ID NO: 3035688 - RNA, 22 nt, Human
gaagcccaggaaaggcuccagg

SEQ ID NO: 3035689 - RNA, 21 nt, Human
gaagcccaggaaaggcuccag

SEQ ID NO: 3035690 - RNA, 20 nt, Human
gaagcccaggaaaggcucca

SEQ ID NO: 3035691 - RNA, 23 nt, Human
gaagccagcaggcucucaggcca

SEQ ID NO: 3035692 - RNA, 19 nt, Human
gaagacucauucuucugua

SEQ ID NO: 3035693 - RNA, 21 nt, Human
gaagacucauucuucuguacg

SEQ ID NO: 3035694 - RNA, 16 nt, Human
gaagccagcaggcucu

SEQ ID NO: 3035695 - RNA, 15 nt, Human
gaagccagcaggcuc

SEQ ID NO: 3035696 - RNA, 14 nt, Human
gaagaaaauaauua

SEQ ID NO: 3035697 - RNA, 13 nt, Human
gaacuuggcgcug

SEQ ID NO: 3035698 - RNA, 16 nt, Human
gaacuuggcgcugccc

SEQ ID NO: 3035699 - RNA, 15 nt, Human
gaacuuggcgcugcc

SEQ ID NO: 3035700 - RNA, 12 nt, Human
gaacuugguucc

SEQ ID NO: 3035701 - RNA, 23 nt, Human
gaacuugguucccauuugcuccu

SEQ ID NO: 3035702 - RNA, 22 nt, Human
gaacuggguacuuguggacaca

SEQ ID NO: 3035703 - RNA, 16 nt, Human
gaaccaccacacccag

SEQ ID NO: 3035704 - RNA, 17 nt, Human
gaaccaccacacccagc

SEQ ID NO: 3035705 - RNA, 15 nt, Human
gaacagacuggaagc

SEQ ID NO: 3035706 - RNA, 16 nt, Human
gaacagacuggaagca

SEQ ID NO: 3035707 - RNA, 20 nt, Human
gaaccacaucuugcucugcu

SEQ ID NO: 3035708 - RNA, 21 nt, Human
gaaccacaucuugcucugcug

SEQ ID NO: 3035709 - RNA, 17 nt, Human
gaaauuuguuauaauga

SEQ ID NO: 3035710 - RNA, 14 nt, Human
gaaaugggcagagc

SEQ ID NO: 3035711 - RNA, 20 nt, Human
gaaaugggcagagcagagac

SEQ ID NO: 3035712 - RNA, 20 nt, Human
gaaauaucugaaaauguaug

SEQ ID NO: 3035713 - RNA, 13 nt, Human
gaaauauaauuga

SEQ ID NO: 3035714 - RNA, 21 nt, Human
gaaauaucugaaaauguaugu

SEQ ID NO: 3035715 - RNA, 23 nt, Human
cugggguggguggggcagugcuu

SEQ ID NO: 3035716 - RNA, 14 nt, Human
cugggggcugggca

SEQ ID NO: 3035717 - RNA, 15 nt, Human
cugggcuucaguggc

SEQ ID NO: 3035718 - RNA, 22 nt, Human
cugggcuuggggaccagagcug

SEQ ID NO: 3035719 - RNA, 18 nt, Human
cugggcuugucuguagau

SEQ ID NO: 3035720 - RNA, 21 nt, Human
cugggauuacaagcgugagcc

SEQ ID NO: 3035721 - RNA, 20 nt, Human
cuguauuuuguuuuugucuu

SEQ ID NO: 3035722 - RNA, 13 nt, Human
cugucaauuacag

SEQ ID NO: 3035723 - RNA, 16 nt, Human
cugucaauuacaggaa

SEQ ID NO: 3035724 - RNA, 15 nt, Human
cugucaauuacagga

SEQ ID NO: 3035725 - RNA, 21 nt, Human
cuguaucccaugagccucagc

SEQ ID NO: 3035726 - RNA, 22 nt, Human
cuguaucccaugagccucagca

SEQ ID NO: 3035727 - RNA, 20 nt, Human
cuguaucccaugagccucag

SEQ ID NO: 3035728 - RNA, 19 nt, Human
cuguaucccaugagccuca

SEQ ID NO: 3035729 - RNA, 19 nt, Human
cuguacgucugacaggcaa

SEQ ID NO: 3035730 - RNA, 20 nt, Human
cuguacgucugacaggcaau

SEQ ID NO: 3035731 - RNA, 17 nt, Human
cuguacaugaaaacaca

SEQ ID NO: 3035732 - RNA, 20 nt, Human
cuguacaugaaaacacauuu

SEQ ID NO: 3035733 - RNA, 21 nt, Human
cuguacaugaaaacacauuuu

SEQ ID NO: 3035734 - RNA, 14 nt, Human
cuguacgucugaca

SEQ ID NO: 3035735 - RNA, 15 nt, Human
cuguacgucugacag

SEQ ID NO: 3035736 - RNA, 16 nt, Human
cuguacgucugacagg

SEQ ID NO: 3035737 - RNA, 18 nt, Human
cuguacgucugacaggca

SEQ ID NO: 3035738 - RNA, 14 nt, Human
cuguaauuugugau

SEQ ID NO: 3035739 - RNA, 15 nt, Human
cuguaauuugugaua

SEQ ID NO: 3035740 - RNA, 22 nt, Human
cuguacagagcccacgccccca

SEQ ID NO: 3035741 - RNA, 18 nt, Human
cuguacagagcccacgcc

SEQ ID NO: 3035742 - RNA, 15 nt, Human
cuguacagagcccac

SEQ ID NO: 3035743 - RNA, 14 nt, Human
cuguacagagccca

SEQ ID NO: 3035744 - RNA, 19 nt, Human
cuguaauccuagcacuuug

SEQ ID NO: 3035745 - RNA, 22 nt, Human
cugguuagagguucccuuugac

SEQ ID NO: 3035746 - RNA, 21 nt, Human
cugguuagagguucccuuuga

SEQ ID NO: 3035747 - RNA, 16 nt, Human
cugguggcagcucacc

SEQ ID NO: 3035748 - RNA, 18 nt, Human
cugguggcagcucaccuc

SEQ ID NO: 3035749 - RNA, 17 nt, Human
cugguggcagcucaccu

SEQ ID NO: 3035750 - RNA, 15 nt, Human
cugguggcagcugcg

SEQ ID NO: 3035751 - RNA, 20 nt, Human
cugguggcagcucaccucuc

SEQ ID NO: 3035752 - RNA, 14 nt, Human
cugguggcaguggg

SEQ ID NO: 3035753 - RNA, 18 nt, Human
cugguggcagugggagcu

SEQ ID NO: 3035754 - RNA, 15 nt, Human
cugucuuuuaaacuc

SEQ ID NO: 3035755 - RNA, 14 nt, Human
cugucuuuuaaacu

SEQ ID NO: 3035756 - RNA, 15 nt, Human
cugugaaaggaaaga

SEQ ID NO: 3035757 - RNA, 18 nt, Human
cugucuucaguaagccgu

SEQ ID NO: 3035758 - RNA, 21 nt, Human
cugucauuugagcagggcuca

SEQ ID NO: 3035759 - RNA, 22 nt, Human
cugucauuugagcagggcucag

SEQ ID NO: 3035760 - RNA, 20 nt, Human
cugucauuugagcagggcuc

SEQ ID NO: 3035761 - RNA, 18 nt, Human
cugucaauuacaggaagu

SEQ ID NO: 3035762 - RNA, 22 nt, Human
cugugauuuuugguauuugaaa

SEQ ID NO: 3035763 - RNA, 23 nt, Human
cugugauggggcccugccuccuu

SEQ ID NO: 3035764 - RNA, 21 nt, Human
cugugauggggcccugccucc

SEQ ID NO: 3035765 - RNA, 16 nt, Human
cugugauggggcccug

SEQ ID NO: 3035766 - RNA, 19 nt, Human
cugugaugacauucccugc

SEQ ID NO: 3035767 - RNA, 15 nt, Human
cugugauggggcccu

SEQ ID NO: 3035768 - RNA, 22 nt, Human
cugugaaaggaaagagggaggu

SEQ ID NO: 3035769 - RNA, 16 nt, Human
cugugaaaggaaagag

SEQ ID NO: 3035770 - RNA, 15 nt, Human
cugugccaugugcca

SEQ ID NO: 3035771 - RNA, 22 nt, Human
cugugccauuuuguauuuuacu

SEQ ID NO: 3035772 - RNA, 19 nt, Human
cugugcccuaaaguguauu

SEQ ID NO: 3035773 - RNA, 14 nt, Human
cugugccaugugcc

SEQ ID NO: 3035774 - RNA, 15 nt, Human
cuguguuguacagcu

SEQ ID NO: 3035775 - RNA, 23 nt, Human
cugugucuugcaauggcagccuu

SEQ ID NO: 3035776 - RNA, 20 nt, Human
cugugucuuuuuucacuaca

SEQ ID NO: 3035777 - RNA, 21 nt, Human
cuguggguuucuaaagcugcc

SEQ ID NO: 3035778 - RNA, 22 nt, Human
cuguggguuucuaaagcugcca

SEQ ID NO: 3035779 - RNA, 23 nt, Human
cuuagacccucaugcugccaaua

SEQ ID NO: 3035780 - RNA, 19 nt, Human
cuuagacccucaugcugcc

SEQ ID NO: 3035781 - RNA, 20 nt, Human
cuuagacccucaugcugcca

SEQ ID NO: 3035782 - RNA, 21 nt, Human
cuuagacccucaugcugccaa

SEQ ID NO: 3035783 - RNA, 22 nt, Human
cuuagacccucaugcugccaau

SEQ ID NO: 3035784 - RNA, 18 nt, Human
cuuagacccucaugcugc

SEQ ID NO: 3035785 - RNA, 19 nt, Human
cuuagaauuaguggcacuu

SEQ ID NO: 3035786 - RNA, 21 nt, Human
cuuagguuggcaaaaaggcag

SEQ ID NO: 3035787 - RNA, 23 nt, Human
cuuagguuggcaaaaaggcagga

SEQ ID NO: 3035788 - RNA, 20 nt, Human
cuuaccugccaggaagccag

SEQ ID NO: 3035789 - RNA, 13 nt, Human
cuuaccugccagg

SEQ ID NO: 3035790 - RNA, 20 nt, Human
cuuagaaaaaccaccaccau

SEQ ID NO: 3035791 - RNA, 17 nt, Human
cuuagaagucacacagu

SEQ ID NO: 3035792 - RNA, 20 nt, Human
cuuagaagucacacaguauu

SEQ ID NO: 3035793 - RNA, 10 nt, Human
cuuaauuauu

SEQ ID NO: 3035794 - RNA, 16 nt, Human
cuuaauuauugauguu

SEQ ID NO: 3035795 - RNA, 20 nt, Human
cuuaauucuuagcucauucu

SEQ ID NO: 3035796 - RNA, 16 nt, Human
cuuaaucuaaauggaa

SEQ ID NO: 3035797 - RNA, 20 nt, Human
cuguuuuuauuauuaacaaa

SEQ ID NO: 3035798 - RNA, 17 nt, Human
cuuaaaaaguggaaaaa

SEQ ID NO: 3035799 - RNA, 16 nt, Human
cuuaaaaaguggaaaa

SEQ ID NO: 3035800 - RNA, 18 nt, Human
cuguuuuuauuauuaaca

SEQ ID NO: 3035801 - RNA, 17 nt, Human
cuguugcccaggcuggc

SEQ ID NO: 3035802 - RNA, 14 nt, Human
cuguuuagauaaua

SEQ ID NO: 3035803 - RNA, 17 nt, Human
cuguuuagauaauacac

SEQ ID NO: 3035804 - RNA, 15 nt, Human
cuguuucaaacuuua

SEQ ID NO: 3035805 - RNA, 17 nt, Human
cuguuucaaacuuuacu

SEQ ID NO: 3035806 - RNA, 18 nt, Human
cuguuuagauaauacacc

SEQ ID NO: 3035807 - RNA, 19 nt, Human
cuguuugcuaagugaggau

SEQ ID NO: 3035808 - RNA, 17 nt, Human
cuguuugcuaagugagg

SEQ ID NO: 3035809 - RNA, 16 nt, Human
cuguuaauaguucagg

SEQ ID NO: 3035810 - RNA, 15 nt, Human
cuguucuuuccaaag

SEQ ID NO: 3035811 - RNA, 16 nt, Human
cuguucuuuccaaagu

SEQ ID NO: 3035812 - RNA, 19 nt, Human
cuguucuuuccaaaguaca

SEQ ID NO: 3035813 - RNA, 21 nt, Human
cuguucuuuccaaaguacacu

SEQ ID NO: 3035814 - RNA, 13 nt, Human
cuguucuuucugg

SEQ ID NO: 3035815 - RNA, 14 nt, Human
cuguucuuucuggc

SEQ ID NO: 3035816 - RNA, 21 nt, Human
cuguucuuucuggcuaugcau

SEQ ID NO: 3035817 - RNA, 12 nt, Human
cuguugcccagg

SEQ ID NO: 3035818 - RNA, 13 nt, Human
cuguugcccaggc

SEQ ID NO: 3035819 - RNA, 14 nt, Human
cuguugcccaggcu

SEQ ID NO: 3035820 - RNA, 15 nt, Human
cuguugcccaggcug

SEQ ID NO: 3035821 - RNA, 16 nt, Human
cuguugcccaggcugg

SEQ ID NO: 3035822 - RNA, 23 nt, Human
cuguucuuucuggcuaugcauuu

SEQ ID NO: 3035823 - RNA, 14 nt, Human
cuucaagaaugcag

SEQ ID NO: 3035824 - RNA, 20 nt, Human
cuucaaggauccugagccag

SEQ ID NO: 3035825 - RNA, 19 nt, Human
cuucaaggauccugagcca

SEQ ID NO: 3035826 - RNA, 18 nt, Human
cuucaaggauccugagcc

SEQ ID NO: 3035827 - RNA, 17 nt, Human
cuucaaggauccugagc

SEQ ID NO: 3035828 - RNA, 15 nt, Human
cuucaaauauuuccc

SEQ ID NO: 3035829 - RNA, 22 nt, Human
cuuagucacugagacagcccgg

SEQ ID NO: 3035830 - RNA, 20 nt, Human
cuuagucacugagacagccc

SEQ ID NO: 3035831 - RNA, 21 nt, Human
cuuagucacugagacagcccg

SEQ ID NO: 3035832 - RNA, 24 nt, Human
cuucagagacuccugcaggcagcc

SEQ ID NO: 3035833 - RNA, 14 nt, Human
cuucacauauugau

SEQ ID NO: 3035834 - RNA, 23 nt, Human
cuucacauauugauuuccguuaa

SEQ ID NO: 3035835 - RNA, 23 nt, Human
cuucaaggauccugagccagauu

SEQ ID NO: 3035836 - RNA, 22 nt, Human
cuucaaggauccugagccagau

SEQ ID NO: 3035837 - RNA, 21 nt, Human
cuucaaggauccugagccaga

SEQ ID NO: 3035838 - RNA, 13 nt, Human
cuuccacaagagc

SEQ ID NO: 3035839 - RNA, 15 nt, Human
cuuccacaagagccc

SEQ ID NO: 3035840 - RNA, 14 nt, Human
cuuccacaagagcc

SEQ ID NO: 3035841 - RNA, 14 nt, Human
cuucagugccaaaa

SEQ ID NO: 3035842 - RNA, 19 nt, Human
cuucagcugacuuuucugu

SEQ ID NO: 3035843 - RNA, 15 nt, Human
cuucagcugacuuuu

SEQ ID NO: 3035844 - RNA, 14 nt, Human
cuucaguaagccgu

SEQ ID NO: 3035845 - RNA, 14 nt, Human
cuucagccucccga

SEQ ID NO: 3035846 - RNA, 16 nt, Human
cuucagccucccgagu

SEQ ID NO: 3035847 - RNA, 20 nt, Human
cuucagccucccgaguagcu

SEQ ID NO: 3035848 - RNA, 16 nt, Human
cuuccacuugaguguc

SEQ ID NO: 3035849 - RNA, 19 nt, Human
cuucgggaggucgaggcag

SEQ ID NO: 3035850 - RNA, 16 nt, Human
cuucucacugccaugc

SEQ ID NO: 3035851 - RNA, 21 nt, Human
cuucucacugccaugccagcu

SEQ ID NO: 3035852 - RNA, 16 nt, Human
cuucgcuccugugucu

SEQ ID NO: 3035853 - RNA, 17 nt, Human
cuucgcuccugugucuu

SEQ ID NO: 3035854 - RNA, 12 nt, Human
cccuaaucuucc

SEQ ID NO: 3035855 - RNA, 20 nt, Human
cccuacaguugaaaaacagc

SEQ ID NO: 3035856 - RNA, 16 nt, Human
cccgggcucugccucc

SEQ ID NO: 3035857 - RNA, 12 nt, Human
cccgggcucugc

SEQ ID NO: 3035858 - RNA, 15 nt, Human
cccgggcucugccuc

SEQ ID NO: 3035859 - RNA, 14 nt, Human
cccgggcucugccu

SEQ ID NO: 3035860 - RNA, 22 nt, Human
cccgaguagcugggacuacagg

SEQ ID NO: 3035861 - RNA, 20 nt, Human
cccgcugucagccauuccug

SEQ ID NO: 3035862 - RNA, 19 nt, Human
cccgcugucagccauuccu

SEQ ID NO: 3035863 - RNA, 14 nt, Human
cccagagggccugc

SEQ ID NO: 3035864 - RNA, 21 nt, Human
cccgaggccuucucugaagga

SEQ ID NO: 3035865 - RNA, 15 nt, Human
cccagagggccugca

SEQ ID NO: 3035866 - RNA, 13 nt, Human
cccgaguagcugg

SEQ ID NO: 3035867 - RNA, 14 nt, Human
cccgaguagcuggg

SEQ ID NO: 3035868 - RNA, 15 nt, Human
cccgaguagcuggga

SEQ ID NO: 3035869 - RNA, 16 nt, Human
cccgaguagcugggac

SEQ ID NO: 3035870 - RNA, 17 nt, Human
cccgaguagcugggacu

SEQ ID NO: 3035871 - RNA, 18 nt, Human
cccgaguagcugggacua

SEQ ID NO: 3035872 - RNA, 21 nt, Human
cccgaguagcugggacuacag

SEQ ID NO: 3035873 - RNA, 15 nt, Human
cccugguggcagcuc

SEQ ID NO: 3035874 - RNA, 17 nt, Human
cccugguggcagcucac

SEQ ID NO: 3035875 - RNA, 16 nt, Human
cccugguggcagcuca

SEQ ID NO: 3035876 - RNA, 22 nt, Human
cccugcuggguguggcgcagca

SEQ ID NO: 3035877 - RNA, 17 nt, Human
cccugcccaccuggccu

SEQ ID NO: 3035878 - RNA, 14 nt, Human
cccugcccaccugg

SEQ ID NO: 3035879 - RNA, 13 nt, Human
cccugcccaccug

SEQ ID NO: 3035880 - RNA, 21 nt, Human
cccugcuggguguggcgcagc

SEQ ID NO: 3035881 - RNA, 16 nt, Human
cccugcuggguguggc

SEQ ID NO: 3035882 - RNA, 18 nt, Human
cccugcccaccuggccuc

SEQ ID NO: 3035883 - RNA, 12 nt, Human
cccugcacuugc

SEQ ID NO: 3035884 - RNA, 19 nt, Human
cccugcacuugcagacucu

SEQ ID NO: 3035885 - RNA, 15 nt, Human
cccugaaagcccuga

SEQ ID NO: 3035886 - RNA, 13 nt, Human
cccugaggcccag

SEQ ID NO: 3035887 - RNA, 16 nt, Human
cccucuggggcuguuc

SEQ ID NO: 3035888 - RNA, 23 nt, Human
cccugaggcccagagggccugca

SEQ ID NO: 3035889 - RNA, 20 nt, Human
cccugaggcccagagggccu

SEQ ID NO: 3035890 - RNA, 19 nt, Human
cccugaggcccagagggcc

SEQ ID NO: 3035891 - RNA, 18 nt, Human
cccugaggcccagagggc

SEQ ID NO: 3035892 - RNA, 17 nt, Human
cccugaggcccagaggg

SEQ ID NO: 3035893 - RNA, 16 nt, Human
cccugaggcccagagg

SEQ ID NO: 3035894 - RNA, 15 nt, Human
cccugaggcccagag

SEQ ID NO: 3035895 - RNA, 14 nt, Human
cccugaggcccaga

SEQ ID NO: 3035896 - RNA, 12 nt, Human
cccucuggggcu

SEQ ID NO: 3035897 - RNA, 17 nt, Human
cccaccuggccucugca

SEQ ID NO: 3035898 - RNA, 21 nt, Human
cccaccuggccucugcacucc

SEQ ID NO: 3035899 - RNA, 19 nt, Human
cccaccuggccucugcacu

SEQ ID NO: 3035900 - RNA, 16 nt, Human
cccaccuggccucugc

SEQ ID NO: 3035901 - RNA, 20 nt, Human
cccaccuuggcugcagggag

SEQ ID NO: 3035902 - RNA, 21 nt, Human
cccacgacugcccggcagggu

SEQ ID NO: 3035903 - RNA, 20 nt, Human
cccacgacugcccggcaggg

SEQ ID NO: 3035904 - RNA, 12 nt, Human
cccacuucugcc

SEQ ID NO: 3035905 - RNA, 23 nt, Human
cccacuugagaauuacccuuuug

SEQ ID NO: 3035906 - RNA, 14 nt, Human
cccacgcuggagug

SEQ ID NO: 3035907 - RNA, 19 nt, Human
cccacgcuggagugcagug

SEQ ID NO: 3035908 - RNA, 20 nt, Human
cccacgcuggagugcaguga

SEQ ID NO: 3035909 - RNA, 21 nt, Human
cccacgcuggagugcagugag

SEQ ID NO: 3035910 - RNA, 19 nt, Human
cccaccgcagacaggacca

SEQ ID NO: 3035911 - RNA, 20 nt, Human
cccaccgcagacaggaccag

SEQ ID NO: 3035912 - RNA, 17 nt, Human
cccaccucagccucccg

SEQ ID NO: 3035913 - RNA, 22 nt, Human
cccaccucucucacuccuugaa

SEQ ID NO: 3035914 - RNA, 19 nt, Human
cccaccucucucacuccuu

SEQ ID NO: 3035915 - RNA, 21 nt, Human
cccacaaaggagagcuagcag

SEQ ID NO: 3035916 - RNA, 20 nt, Human
cccaaugcacuuuguucugg

SEQ ID NO: 3035917 - RNA, 16 nt, Human
cccaaugcacuuuguu

SEQ ID NO: 3035918 - RNA, 15 nt, Human
ccuccacauuuguuu

SEQ ID NO: 3035919 - RNA, 20 nt, Human
ccucauccucauacccaccc

SEQ ID NO: 3035920 - RNA, 13 nt, Human
ccucauccucaua

SEQ ID NO: 3035921 - RNA, 19 nt, Human
ccucagucuggcccuuccu

SEQ ID NO: 3035922 - RNA, 11 nt, Human
ccucagugcca

SEQ ID NO: 3035923 - RNA, 12 nt, Human
ccucauacccac

SEQ ID NO: 3035924 - RNA, 20 nt, Human
ccucagucuggcccuuccuu

SEQ ID NO: 3035925 - RNA, 20 nt, Human
ccucauaguaugguggcugg

SEQ ID NO: 3035926 - RNA, 13 nt, Human
ccucauacccacc

SEQ ID NO: 3035927 - RNA, 21 nt, Human
ccucauaguaugguggcuggg

SEQ ID NO: 3035928 - RNA, 22 nt, Human
ccucauaguaugguggcugggu

SEQ ID NO: 3035929 - RNA, 14 nt, Human
ccucaucaccaacg

SEQ ID NO: 3035930 - RNA, 13 nt, Human
ccucaucaccaac

SEQ ID NO: 3035931 - RNA, 16 nt, Human
ccucccaaagugcugg

SEQ ID NO: 3035932 - RNA, 23 nt, Human
ccuccaugugggcuaguugggcu

SEQ ID NO: 3035933 - RNA, 15 nt, Human
ccucccaaagugcug

SEQ ID NO: 3035934 - RNA, 22 nt, Human
ccuccaggugcacaagcuccaa

SEQ ID NO: 3035935 - RNA, 21 nt, Human
ccuccaggugcacaagcucca

SEQ ID NO: 3035936 - RNA, 19 nt, Human
ccuccaggugcacaagcuc

SEQ ID NO: 3035937 - RNA, 13 nt, Human
ccuccugccucga

SEQ ID NO: 3035938 - RNA, 23 nt, Human
ccuccugccucgaacuggcugca

SEQ ID NO: 3035939 - RNA, 14 nt, Human
ccuccugggcuaag

SEQ ID NO: 3035940 - RNA, 19 nt, Human
ccucccgaguagcugggac

SEQ ID NO: 3035941 - RNA, 20 nt, Human
ccucccgaguagcugggacu

SEQ ID NO: 3035942 - RNA, 21 nt, Human
ccucccgaguagcugggacua

SEQ ID NO: 3035943 - RNA, 14 nt, Human
ccuccucagaucuu

SEQ ID NO: 3035944 - RNA, 10 nt, Human
ccucccuccc

SEQ ID NO: 3035945 - RNA, 16 nt, Human
ccucuaggaggucucu

SEQ ID NO: 3035946 - RNA, 14 nt, Human
ccucgguguggaga

SEQ ID NO: 3035947 - RNA, 16 nt, Human
ccucggugccuuccuc

SEQ ID NO: 3035948 - RNA, 17 nt, Human
ccucccgaauagcuggg

SEQ ID NO: 3035949 - RNA, 21 nt, Human
ccgcuaagagggagggagggc

SEQ ID NO: 3035950 - RNA, 23 nt, Human
ccgcuaagagggagggagggcuc

SEQ ID NO: 3035951 - RNA, 14 nt, Human
ccgcacugggcuug

SEQ ID NO: 3035952 - RNA, 20 nt, Human
ccgaguagcugggacuacag

SEQ ID NO: 3035953 - RNA, 16 nt, Human
ccgaguagcugggacu

SEQ ID NO: 3035954 - RNA, 17 nt, Human
ccgaguagcugggacua

SEQ ID NO: 3035955 - RNA, 20 nt, Human
cccugguggcagcucaccuc

SEQ ID NO: 3035956 - RNA, 14 nt, Human
ccgaggccuucucu

SEQ ID NO: 3035957 - RNA, 12 nt, Human
ccgcuuucuacc

SEQ ID NO: 3035958 - RNA, 20 nt, Human
ccgggaagggggcugggaca

SEQ ID NO: 3035959 - RNA, 19 nt, Human
ccgcuuucuacccagcgag

SEQ ID NO: 3035960 - RNA, 15 nt, Human
ccggcuggccuggcc

SEQ ID NO: 3035961 - RNA, 18 nt, Human
ccggcuggccuggccccu

SEQ ID NO: 3035962 - RNA, 17 nt, Human
ccggcuggccuggcccc

SEQ ID NO: 3035963 - RNA, 22 nt, Human
ccgggcucugccucccaucacc

SEQ ID NO: 3035964 - RNA, 20 nt, Human
ccgggcgcgguggcucacgc

SEQ ID NO: 3035965 - RNA, 22 nt, Human
ccuauauuguuuucaguguaca

SEQ ID NO: 3035966 - RNA, 18 nt, Human
ccuauauuguuuucagug

SEQ ID NO: 3035967 - RNA, 23 nt, Human
ccuaguuccaccaucaagccacc

SEQ ID NO: 3035968 - RNA, 21 nt, Human
ccuaguuccaccaucaagcca

SEQ ID NO: 3035969 - RNA, 13 nt, Human
ccuaguuccacca

SEQ ID NO: 3035970 - RNA, 14 nt, Human
ccuaaaguguauuu

SEQ ID NO: 3035971 - RNA, 15 nt, Human
ccuguuuuuauuauu

SEQ ID NO: 3035972 - RNA, 14 nt, Human
ccuguuuuuauuau

SEQ ID NO: 3035973 - RNA, 20 nt, Human
ccuuacacaaugguuuucuu

SEQ ID NO: 3035974 - RNA, 14 nt, Human
ccuuacacaauggu

SEQ ID NO: 3035975 - RNA, 17 nt, Human
ccuuagaagucacacag

SEQ ID NO: 3035976 - RNA, 18 nt, Human
ccuuagaagucacacagu

SEQ ID NO: 3035977 - RNA, 19 nt, Human
ccuuaccugccaggaagcc

SEQ ID NO: 3035978 - RNA, 15 nt, Human
ccuuacccucauguu

SEQ ID NO: 3035979 - RNA, 20 nt, Human
ccuuaccagcagagcaccuu

SEQ ID NO: 3035980 - RNA, 13 nt, Human
ccuuaccagcaga

SEQ ID NO: 3035981 - RNA, 23 nt, Human
ccuguugggccaggagccuccug

SEQ ID NO: 3035982 - RNA, 16 nt, Human
ccuguuucugcagcca

SEQ ID NO: 3035983 - RNA, 18 nt, Human
ccuguuuguuucugaaag

SEQ ID NO: 3035984 - RNA, 14 nt, Human
ccuguuuguuucug

SEQ ID NO: 3035985 - RNA, 17 nt, Human
ccugugucuugcaaugg

SEQ ID NO: 3035986 - RNA, 19 nt, Human
ccugugucuugcaauggca

SEQ ID NO: 3035987 - RNA, 21 nt, Human
ccugugucuugcaauggcagc

SEQ ID NO: 3035988 - RNA, 22 nt, Human
ccugugucuugcaauggcagcc

SEQ ID NO: 3035989 - RNA, 20 nt, Human
ccugugugugcgccuacagg

SEQ ID NO: 3035990 - RNA, 21 nt, Human
ccugugugugcgccuacagga

SEQ ID NO: 3035991 - RNA, 13 nt, Human
ccuuguuuaaugg

SEQ ID NO: 3035992 - RNA, 18 nt, Human
ccuuugacgccaucccag

SEQ ID NO: 3035993 - RNA, 17 nt, Human
ccuuugacgccauccca

SEQ ID NO: 3035994 - RNA, 16 nt, Human
ccuuugacgccauccc

SEQ ID NO: 3035995 - RNA, 21 nt, Human
ccuuggugucgggcaugacac

SEQ ID NO: 3035996 - RNA, 22 nt, Human
ccuuggugucgggcaugacacg

SEQ ID NO: 3035997 - RNA, 22 nt, Human
ccuugguuaggcauugugggaa

SEQ ID NO: 3035998 - RNA, 21 nt, Human
ccuugguuaggcauuguggga

SEQ ID NO: 3035999 - RNA, 23 nt, Human
ccuucuucccaauagcaaggcug

SEQ ID NO: 3036000 - RNA, 15 nt, Human
ccuucggcgccuuaa

SEQ ID NO: 3036001 - RNA, 19 nt, Human
ccuucuccuucaccuuugu

SEQ ID NO: 3036002 - RNA, 15 nt, Human
ccuucuccuucaccu

SEQ ID NO: 3036003 - RNA, 23 nt, Human
ccuugaccauucuccaccugcca

SEQ ID NO: 3036004 - RNA, 22 nt, Human
ccuugaccauucuccaccugcc

SEQ ID NO: 3036005 - RNA, 13 nt, Human
ccuugacucuuuc

SEQ ID NO: 3036006 - RNA, 19 nt, Human
ccuugaacuuugaccucug

SEQ ID NO: 3036007 - RNA, 17 nt, Human
ccuucacagaugggugc

SEQ ID NO: 3036008 - RNA, 20 nt, Human
ccuucaccuuuguccccacc

SEQ ID NO: 3036009 - RNA, 19 nt, Human
ccuucaccuuuguccccac

SEQ ID NO: 3036010 - RNA, 21 nt, Human
ccuucaccuuuguccccaccg

SEQ ID NO: 3036011 - RNA, 10 nt, Human
ccuucagugc

SEQ ID NO: 3036012 - RNA, 11 nt, Human
ccuucagugcc

SEQ ID NO: 3036013 - RNA, 14 nt, Human
ccuucagugccaaa

SEQ ID NO: 3036014 - RNA, 19 nt, Human
ccuucauuuggcauucccc

SEQ ID NO: 3036015 - RNA, 22 nt, Human
ccuucauuuggcauuccccacu

SEQ ID NO: 3036016 - RNA, 22 nt, Human
ccuuugacgccaucccagcccc

SEQ ID NO: 3036017 - RNA, 21 nt, Human
ccuuugacgccaucccagccc

SEQ ID NO: 3036018 - RNA, 20 nt, Human
ccuuugacgccaucccagcc

SEQ ID NO: 3036019 - RNA, 20 nt, Human
cgaaaacguggcugcuucaa

SEQ ID NO: 3036020 - RNA, 15 nt, Human
cgaaaacguggcugc

SEQ ID NO: 3036021 - RNA, 19 nt, Human
cgaaaacguggcugcuuca

SEQ ID NO: 3036022 - RNA, 18 nt, Human
cgaaaacguggcugcuuc

SEQ ID NO: 3036023 - RNA, 21 nt, Human
cgaaagaacaguccauugaaa

SEQ ID NO: 3036024 - RNA, 12 nt, Human
cgaaagaacagu

SEQ ID NO: 3036025 - RNA, 19 nt, Human
cgaaagggacuuggaagcu

SEQ ID NO: 3036026 - RNA, 20 nt, Human
cgaaaggaugaaagugacca

SEQ ID NO: 3036027 - RNA, 22 nt, Human
cgaaagggacuuggaagcuccg

SEQ ID NO: 3036028 - RNA, 12 nt, Human
cgaacuggcugc

SEQ ID NO: 3036029 - RNA, 14 nt, Human
cgaacuggcugcaa

SEQ ID NO: 3036030 - RNA, 13 nt, Human
cgaauagcuggga

SEQ ID NO: 3036031 - RNA, 14 nt, Human
cgaauagcugggac

SEQ ID NO: 3036032 - RNA, 17 nt, Human
cgagaucacgccacugc

SEQ ID NO: 3036033 - RNA, 18 nt, Human
cgagauagccaaggccaa

SEQ ID NO: 3036034 - RNA, 20 nt, Human
cgagauugcaccacugcacu

SEQ ID NO: 3036035 - RNA, 18 nt, Human
cgagaucacgccacugca

SEQ ID NO: 3036036 - RNA, 20 nt, Human
cgagaucacgccacugcacu

SEQ ID NO: 3036037 - RNA, 20 nt, Human
cgagcaggcuucuucccccc

SEQ ID NO: 3036038 - RNA, 17 nt, Human
cgagcaugccuggaugg

SEQ ID NO: 3036039 - RNA, 16 nt, Human
cgagcaugccuggaug

SEQ ID NO: 3036040 - RNA, 13 nt, Human
cgagcaugccugg

SEQ ID NO: 3036041 - RNA, 14 nt, Human
cgagcaugccugga

SEQ ID NO: 3036042 - RNA, 15 nt, Human
cgagcccugguggca

SEQ ID NO: 3036043 - RNA, 16 nt, Human
cgagcccugguggcag

SEQ ID NO: 3036044 - RNA, 18 nt, Human
cgagcaugccuggauggg

SEQ ID NO: 3036045 - RNA, 20 nt, Human
cgauuucuguuuagauaaua

SEQ ID NO: 3036046 - RNA, 14 nt, Human
cgcagcccugcaga

SEQ ID NO: 3036047 - RNA, 16 nt, Human
cgcagacaggaccagg

SEQ ID NO: 3036048 - RNA, 15 nt, Human
cgcagacaggaccag

SEQ ID NO: 3036049 - RNA, 22 nt, Human
cgccaggggaaaaucagccugc

SEQ ID NO: 3036050 - RNA, 21 nt, Human
cgccagauucuuuccugaggc

SEQ ID NO: 3036051 - RNA, 20 nt, Human
cgccagauucuuuccugagg

SEQ ID NO: 3036052 - RNA, 19 nt, Human
cgccagauucuuuccugag

SEQ ID NO: 3036053 - RNA, 17 nt, Human
cgccagauucuuuccug

SEQ ID NO: 3036054 - RNA, 17 nt, Human
cgccaugcuccuggccc

SEQ ID NO: 3036055 - RNA, 22 nt, Human
ccuggcacccggccccugcugg

SEQ ID NO: 3036056 - RNA, 23 nt, Human
ccuggcacccggccccugcuggu

SEQ ID NO: 3036057 - RNA, 13 nt, Human
ccuggcagccccu

SEQ ID NO: 3036058 - RNA, 12 nt, Human
ccuggcagcccc

SEQ ID NO: 3036059 - RNA, 18 nt, Human
ccuggaauauauaaccag

SEQ ID NO: 3036060 - RNA, 15 nt, Human
ccuggccagaugcac

SEQ ID NO: 3036061 - RNA, 17 nt, Human
ccugcggugcuaucucc

SEQ ID NO: 3036062 - RNA, 16 nt, Human
ccugcggugcuaucuc

SEQ ID NO: 3036063 - RNA, 22 nt, Human
ccugccccucaacucuccucca

SEQ ID NO: 3036064 - RNA, 23 nt, Human
ccugccuguugggccaggagccu

SEQ ID NO: 3036065 - RNA, 21 nt, Human
ccugcucuccgaccagacacc

SEQ ID NO: 3036066 - RNA, 22 nt, Human
ccugcggugcuaucucccccag

SEQ ID NO: 3036067 - RNA, 22 nt, Human
ccugcucuccgaccagacaccu

SEQ ID NO: 3036068 - RNA, 14 nt, Human
ccugcuucaaauau

SEQ ID NO: 3036069 - RNA, 23 nt, Human
ccugacaacacucauugaccuga

SEQ ID NO: 3036070 - RNA, 16 nt, Human
ccugagcuuucugcua

SEQ ID NO: 3036071 - RNA, 21 nt, Human
ccugaggcccagagggccugc

SEQ ID NO: 3036072 - RNA, 20 nt, Human
ccugagccagauuucacucu

SEQ ID NO: 3036073 - RNA, 14 nt, Human
ccugagcuuucugc

SEQ ID NO: 3036074 - RNA, 16 nt, Human
ccugccagggacagag

SEQ ID NO: 3036075 - RNA, 15 nt, Human
ccugccagggacaga

SEQ ID NO: 3036076 - RNA, 14 nt, Human
ccugccagggacag

SEQ ID NO: 3036077 - RNA, 13 nt, Human
ccugccagggaca

SEQ ID NO: 3036078 - RNA, 12 nt, Human
ccugccagggac

SEQ ID NO: 3036079 - RNA, 22 nt, Human
ccugccaggaagccagcaggcu

SEQ ID NO: 3036080 - RNA, 21 nt, Human
ccugccaggaagccagcaggc

SEQ ID NO: 3036081 - RNA, 19 nt, Human
ccugccaggaagccagcag

SEQ ID NO: 3036082 - RNA, 18 nt, Human
ccugccaggaagccagca

SEQ ID NO: 3036083 - RNA, 11 nt, Human
ccugccaggga

SEQ ID NO: 3036084 - RNA, 16 nt, Human
ccugccaggcauggug

SEQ ID NO: 3036085 - RNA, 23 nt, Human
ccugccaggaagccagcaggcuc

SEQ ID NO: 3036086 - RNA, 15 nt, Human
ccugccaggcauggu

SEQ ID NO: 3036087 - RNA, 17 nt, Human
ccugccaggaagccagc

SEQ ID NO: 3036088 - RNA, 15 nt, Human
ccugccaggaagcca

SEQ ID NO: 3036089 - RNA, 14 nt, Human
ccugccaggaagcc

SEQ ID NO: 3036090 - RNA, 13 nt, Human
ccugccaggaagc

SEQ ID NO: 3036091 - RNA, 15 nt, Human
ccugauugugucucu

SEQ ID NO: 3036092 - RNA, 22 nt, Human
ccugaugcuucuucagagacuc

SEQ ID NO: 3036093 - RNA, 21 nt, Human
ccugaugcuucuucagagacu

SEQ ID NO: 3036094 - RNA, 20 nt, Human
ccugaugcuucuucagagac

SEQ ID NO: 3036095 - RNA, 19 nt, Human
ccugaugcuucuucagaga

SEQ ID NO: 3036096 - RNA, 12 nt, Human
ccugaggcccuu

SEQ ID NO: 3036097 - RNA, 11 nt, Human
ccugaggcccu

SEQ ID NO: 3036098 - RNA, 19 nt, Human
ccugauugugucucuuggu

SEQ ID NO: 3036099 - RNA, 17 nt, Human
ccugauugugucucuug

SEQ ID NO: 3036100 - RNA, 21 nt, Human
ccugcaaccugauugugucuc

SEQ ID NO: 3036101 - RNA, 22 nt, Human
ccugcaaccugauugugucucu

SEQ ID NO: 3036102 - RNA, 14 nt, Human
ccugcaagaacaag

SEQ ID NO: 3036103 - RNA, 19 nt, Human
ccaguguuuuaggagcaug

SEQ ID NO: 3036104 - RNA, 22 nt, Human
ccaguguuguggauuuaacaga

SEQ ID NO: 3036105 - RNA, 23 nt, Human
ccauauucuguuggccaguguga

SEQ ID NO: 3036106 - RNA, 23 nt, Human
ccagugcccacaggaucagucug

SEQ ID NO: 3036107 - RNA, 16 nt, Human
ccagugaggcucugcc

SEQ ID NO: 3036108 - RNA, 15 nt, Human
ccagugaggcucugc

SEQ ID NO: 3036109 - RNA, 14 nt, Human
ccagugaggcucug

SEQ ID NO: 3036110 - RNA, 22 nt, Human
ccagugguuccuaauccucuag

SEQ ID NO: 3036111 - RNA, 20 nt, Human
ccagugccgagaaggaagcc

SEQ ID NO: 3036112 - RNA, 15 nt, Human
ccagguucagcuugu

SEQ ID NO: 3036113 - RNA, 24 nt, Human
ccaggugcacaagcuccaagcucc

SEQ ID NO: 3036114 - RNA, 17 nt, Human
ccagguuuuuggucuga

SEQ ID NO: 3036115 - RNA, 19 nt, Human
ccagucuggaaugcagugg

SEQ ID NO: 3036116 - RNA, 20 nt, Human
ccagucuggaaugcaguggu

SEQ ID NO: 3036117 - RNA, 13 nt, Human
ccagugaggcucu

SEQ ID NO: 3036118 - RNA, 18 nt, Human
ccagucuggaaugcagug

SEQ ID NO: 3036119 - RNA, 18 nt, Human
ccaggugcacaagcucca

SEQ ID NO: 3036120 - RNA, 20 nt, Human
ccaggugcacaagcuccaag

SEQ ID NO: 3036121 - RNA, 19 nt, Human
ccaggugcacaagcuccaa

SEQ ID NO: 3036122 - RNA, 21 nt, Human
ccagggacagaggggguggcc

SEQ ID NO: 3036123 - RNA, 15 nt, Human
ccagggacagagggg

SEQ ID NO: 3036124 - RNA, 14 nt, Human
ccagggacagaggg

SEQ ID NO: 3036125 - RNA, 20 nt, Human
ccaggcuuagucacugagac

SEQ ID NO: 3036126 - RNA, 22 nt, Human
ccagggacagaggggguggccu

SEQ ID NO: 3036127 - RNA, 19 nt, Human
ccaggagccuccugcccuu

SEQ ID NO: 3036128 - RNA, 20 nt, Human
ccaggagccccgaggccuuc

SEQ ID NO: 3036129 - RNA, 16 nt, Human
ccaggagccccgaggc

SEQ ID NO: 3036130 - RNA, 19 nt, Human
ccaggagccccgaggccuu

SEQ ID NO: 3036131 - RNA, 21 nt, Human
ccaggcauuccccaggaggcc

SEQ ID NO: 3036132 - RNA, 19 nt, Human
ccaggcauuccccaggagg

SEQ ID NO: 3036133 - RNA, 18 nt, Human
ccaggcauuccccaggag

SEQ ID NO: 3036134 - RNA, 17 nt, Human
ccaggcauuccccagga

SEQ ID NO: 3036135 - RNA, 23 nt, Human
ccaggcccucugcccacucccug

SEQ ID NO: 3036136 - RNA, 22 nt, Human
ccaggcccucugcccacucccu

SEQ ID NO: 3036137 - RNA, 21 nt, Human
ccaggcccucugcccacuccc

SEQ ID NO: 3036138 - RNA, 20 nt, Human
ccaggcccucugcccacucc

SEQ ID NO: 3036139 - RNA, 24 nt, Human
ccaggcuguaucccaugagccuca

SEQ ID NO: 3036140 - RNA, 17 nt, Human
ccaggcuuagucacuga

SEQ ID NO: 3036141 - RNA, 13 nt, Human
cccaaagugcugg

SEQ ID NO: 3036142 - RNA, 15 nt, Human
cccaaagugcuggga

SEQ ID NO: 3036143 - RNA, 18 nt, Human
cccaaaacucuccucugc

SEQ ID NO: 3036144 - RNA, 16 nt, Human
cccaaaacucuccucu

SEQ ID NO: 3036145 - RNA, 14 nt, Human
ccauuuguguuuau

SEQ ID NO: 3036146 - RNA, 20 nt, Human
ccauucuccaccugccaggg

SEQ ID NO: 3036147 - RNA, 19 nt, Human
ccauucuccaccugccagg

SEQ ID NO: 3036148 - RNA, 22 nt, Human
cccaaauggaaaugggcagagc

SEQ ID NO: 3036149 - RNA, 18 nt, Human
cccaaauggaaaugggca

SEQ ID NO: 3036150 - RNA, 16 nt, Human
cccaaagugcugggau

SEQ ID NO: 3036151 - RNA, 19 nt, Human
ccauauucuguuggccagu

SEQ ID NO: 3036152 - RNA, 18 nt, Human
ccauucuccaccugccag

SEQ ID NO: 3036153 - RNA, 17 nt, Human
ccauguuggccaggcug

SEQ ID NO: 3036154 - RNA, 16 nt, Human
ccauguuggccaggcu

SEQ ID NO: 3036155 - RNA, 18 nt, Human
ccagauucuuuccugagg

SEQ ID NO: 3036156 - RNA, 22 nt, Human
ccagauucuuuccugaggcugg

SEQ ID NO: 3036157 - RNA, 21 nt, Human
ccagauucuuuccugaggcug

SEQ ID NO: 3036158 - RNA, 20 nt, Human
ccagauucuuuccugaggcu

SEQ ID NO: 3036159 - RNA, 19 nt, Human
ccagauucuuuccugaggc

SEQ ID NO: 3036160 - RNA, 13 nt, Human
ccagagggccugc

SEQ ID NO: 3036161 - RNA, 22 nt, Human
ccagagggagugacagaggcag

SEQ ID NO: 3036162 - RNA, 23 nt, Human
ccagagggagugacagaggcagc

SEQ ID NO: 3036163 - RNA, 23 nt, Human
ccagaugcaccagcccuuagcag

SEQ ID NO: 3036164 - RNA, 16 nt, Human
ccagagggccugcaag

SEQ ID NO: 3036165 - RNA, 15 nt, Human
ccagagggccugcaa

SEQ ID NO: 3036166 - RNA, 19 nt, Human
ccagauugcaacaggcugg

SEQ ID NO: 3036167 - RNA, 20 nt, Human
ccagauugcaacaggcuggg

SEQ ID NO: 3036168 - RNA, 23 nt, Human
ccagauucuuuccugaggcuggg

SEQ ID NO: 3036169 - RNA, 18 nt, Human
ccagauugcaacaggcug

SEQ ID NO: 3036170 - RNA, 21 nt, Human
ccagauugcaacaggcugggc

SEQ ID NO: 3036171 - RNA, 12 nt, Human
ccagauuucacu

SEQ ID NO: 3036172 - RNA, 17 nt, Human
ccagacaccuugacagg

SEQ ID NO: 3036173 - RNA, 19 nt, Human
ccagacaccuugacagggc

SEQ ID NO: 3036174 - RNA, 21 nt, Human
ccagagaggguggugaccucu

SEQ ID NO: 3036175 - RNA, 23 nt, Human
ccagagaggguggugaccucugc

SEQ ID NO: 3036176 - RNA, 14 nt, Human
ccagagaggguggu

SEQ ID NO: 3036177 - RNA, 13 nt, Human
ccagagagggugg

SEQ ID NO: 3036178 - RNA, 11 nt, Human
ccagagcugcc

SEQ ID NO: 3036179 - RNA, 13 nt, Human
ccagagcugccac

SEQ ID NO: 3036180 - RNA, 12 nt, Human
ccagagcugcca

SEQ ID NO: 3036181 - RNA, 19 nt, Human
ccagagcugccaccugccu

SEQ ID NO: 3036182 - RNA, 16 nt, Human
ccagagcugccaccug

SEQ ID NO: 3036183 - RNA, 15 nt, Human
ccagagcugccaccu

SEQ ID NO: 3036184 - RNA, 14 nt, Human
ccagagcugccacc

SEQ ID NO: 3036185 - RNA, 16 nt, Human
ccagagggagugacag

SEQ ID NO: 3036186 - RNA, 17 nt, Human
ccagagggagugacaga

SEQ ID NO: 3036187 - RNA, 18 nt, Human
ccagagggagugacagag

SEQ ID NO: 3036188 - RNA, 19 nt, Human
ccagagggagugacagagg

SEQ ID NO: 3036189 - RNA, 20 nt, Human
ccagagggagugacagaggc

SEQ ID NO: 3036190 - RNA, 21 nt, Human
ccagagggagugacagaggca

SEQ ID NO: 3036191 - RNA, 21 nt, Human
ccagaggagagaggacccccu

SEQ ID NO: 3036192 - RNA, 22 nt, Human
ccagaggagagaggacccccug

SEQ ID NO: 3036193 - RNA, 15 nt, Human
ccagcaagugagagc

SEQ ID NO: 3036194 - RNA, 14 nt, Human
ccagauuucacucu

SEQ ID NO: 3036195 - RNA, 16 nt, Human
ccagcaagugagagcu

SEQ ID NO: 3036196 - RNA, 20 nt, Human
ccagcaagugagagcugggu

SEQ ID NO: 3036197 - RNA, 21 nt, Human
ccagcaagugagagcugggug

SEQ ID NO: 3036198 - RNA, 22 nt, Human
ccagcaagugagagcugggugu

SEQ ID NO: 3036199 - RNA, 13 nt, Human
ccagccccagugc

SEQ ID NO: 3036200 - RNA, 15 nt, Human
ccagccccagugccc

SEQ ID NO: 3036201 - RNA, 23 nt, Human
ccagccccaaaacucuccucugc

SEQ ID NO: 3036202 - RNA, 16 nt, Human
ccagccccagugccca

SEQ ID NO: 3036203 - RNA, 16 nt, Human
ccagcccuuagcaggg

SEQ ID NO: 3036204 - RNA, 17 nt, Human
ccagcccuuagcaggga

SEQ ID NO: 3036205 - RNA, 23 nt, Human
ccagccgagauagccaaggccaa

SEQ ID NO: 3036206 - RNA, 14 nt, Human
ccagccgccaugcu

SEQ ID NO: 3036207 - RNA, 19 nt, Human
ccagccgccaugcuccugg

SEQ ID NO: 3036208 - RNA, 18 nt, Human
ccagccgccaugcuccug

SEQ ID NO: 3036209 - RNA, 15 nt, Human
ccagccaaagccucc

SEQ ID NO: 3036210 - RNA, 19 nt, Human
ccagccaaagccuccucca

SEQ ID NO: 3036211 - RNA, 18 nt, Human
ccagccaaagccuccucc

SEQ ID NO: 3036212 - RNA, 13 nt, Human
ccacacccagccc

SEQ ID NO: 3036213 - RNA, 14 nt, Human
ccacacccagccca

SEQ ID NO: 3036214 - RNA, 12 nt, Human
ccacacccagcc

SEQ ID NO: 3036215 - RNA, 18 nt, Human
ccaccaacauacucccau

SEQ ID NO: 3036216 - RNA, 14 nt, Human
ccaccaacauacuc

SEQ ID NO: 3036217 - RNA, 16 nt, Human
ccacaucuugcucugc

SEQ ID NO: 3036218 - RNA, 20 nt, Human
ccacaucuugcucugcugac

SEQ ID NO: 3036219 - RNA, 22 nt, Human
ccacaucuugcucugcugacag

SEQ ID NO: 3036220 - RNA, 23 nt, Human
ccacaucuugcucugcugacaga

SEQ ID NO: 3036221 - RNA, 14 nt, Human
ccacaucuugcucu

SEQ ID NO: 3036222 - RNA, 14 nt, Human
ccaccacacccagc

SEQ ID NO: 3036223 - RNA, 16 nt, Human
ccaccacacccagccc

SEQ ID NO: 3036224 - RNA, 20 nt, Human
ccaccaacauacucccaucu

SEQ ID NO: 3036225 - RNA, 16 nt, Human
ccacccaagggccugg

SEQ ID NO: 3036226 - RNA, 19 nt, Human
ccacccaagggccuggccu

SEQ ID NO: 3036227 - RNA, 17 nt, Human
ccacccaagggccuggc

SEQ ID NO: 3036228 - RNA, 16 nt, Human
ccacccaccucagccu

SEQ ID NO: 3036229 - RNA, 14 nt, Human
ccacccaccucagc

SEQ ID NO: 3036230 - RNA, 15 nt, Human
ccacccaccucagcc

SEQ ID NO: 3036231 - RNA, 13 nt, Human
ccacccaccucag

SEQ ID NO: 3036232 - RNA, 22 nt, Human
ccacccaagggccuggccugag

SEQ ID NO: 3036233 - RNA, 21 nt, Human
ccacccaagggccuggccuga

SEQ ID NO: 3036234 - RNA, 20 nt, Human
ccacccaagggccuggccug

SEQ ID NO: 3036235 - RNA, 13 nt, Human
ccacguuucuaaa

SEQ ID NO: 3036236 - RNA, 18 nt, Human
ccacugcacuccagccug

SEQ ID NO: 3036237 - RNA, 15 nt, Human
ccacucccugcaacc

SEQ ID NO: 3036238 - RNA, 19 nt, Human
ccacugcacuccagccugg

SEQ ID NO: 3036239 - RNA, 20 nt, Human
ccacugcacuccagccuggg

SEQ ID NO: 3036240 - RNA, 16 nt, Human
ccacugcgaccacaag

SEQ ID NO: 3036241 - RNA, 18 nt, Human
ccacucaguccauagcag

SEQ ID NO: 3036242 - RNA, 13 nt, Human
ccacucccugcaa

SEQ ID NO: 3036243 - RNA, 12 nt, Human
ccacucccugca

SEQ ID NO: 3036244 - RNA, 23 nt, Human
ccacuacggaauaguuggcuagg

SEQ ID NO: 3036245 - RNA, 22 nt, Human
ccacuacggaauaguuggcuag

SEQ ID NO: 3036246 - RNA, 18 nt, Human
ccacuacauucuguuaau

SEQ ID NO: 3036247 - RNA, 12 nt, Human
ccaccucagccu

SEQ ID NO: 3036248 - RNA, 17 nt, Human
ccacccugaaagcccug

SEQ ID NO: 3036249 - RNA, 16 nt, Human
ccacccugaaagcccu

SEQ ID NO: 3036250 - RNA, 13 nt, Human
ccaccucagccuc

SEQ ID NO: 3036251 - RNA, 14 nt, Human
ccaccucagccucc

SEQ ID NO: 3036252 - RNA, 15 nt, Human
ccaccucagccuccc

SEQ ID NO: 3036253 - RNA, 12 nt, Human
ccacccaggagc

SEQ ID NO: 3036254 - RNA, 14 nt, Human
ccacccaggagccc

SEQ ID NO: 3036255 - RNA, 15 nt, Human
ccacggccaggccag

SEQ ID NO: 3036256 - RNA, 12 nt, Human
ccacggccaggc

SEQ ID NO: 3036257 - RNA, 13 nt, Human
ccacggccaggcc

SEQ ID NO: 3036258 - RNA, 14 nt, Human
ccacggccaggcca

SEQ ID NO: 3036259 - RNA, 16 nt, Human
ccaccuggccucugca

SEQ ID NO: 3036260 - RNA, 15 nt, Human
ccaccuggccucugc

SEQ ID NO: 3036261 - RNA, 22 nt, Human
ccaccugcggugcuaucucccc

SEQ ID NO: 3036262 - RNA, 14 nt, Human
ccaccuggccucug

SEQ ID NO: 3036263 - RNA, 17 nt, Human
ccaccuggccucugcac

SEQ ID NO: 3036264 - RNA, 16 nt, Human
ccaccugccagggaca

SEQ ID NO: 3036265 - RNA, 20 nt, Human
ccaccugccuguugggccag

SEQ ID NO: 3036266 - RNA, 17 nt, Human
ccaccugccuguugggc

SEQ ID NO: 3036267 - RNA, 17 nt, Human
ccaccucccacaaagga

SEQ ID NO: 3036268 - RNA, 21 nt, Human
cauauugcauacuauuaaaca

SEQ ID NO: 3036269 - RNA, 19 nt, Human
cauauugcauacuauuaaa

SEQ ID NO: 3036270 - RNA, 21 nt, Human
cauauugauuuccguuaaaau

SEQ ID NO: 3036271 - RNA, 22 nt, Human
cauauugcauacuauuaaacau

SEQ ID NO: 3036272 - RNA, 22 nt, Human
cauauucuguuggccaguguga

SEQ ID NO: 3036273 - RNA, 17 nt, Human
cauauugauuuccguua

SEQ ID NO: 3036274 - RNA, 17 nt, Human
cauauuuaauuugaagg

SEQ ID NO: 3036275 - RNA, 23 nt, Human
cauauauauguuuuaagaggcag

SEQ ID NO: 3036276 - RNA, 23 nt, Human
cauauaagauucauauuuacuuc

SEQ ID NO: 3036277 - RNA, 16 nt, Human
cauaguaugguggcug

SEQ ID NO: 3036278 - RNA, 15 nt, Human
cauaguaugguggcu

SEQ ID NO: 3036279 - RNA, 14 nt, Human
caucaacaucuugg

SEQ ID NO: 3036280 - RNA, 14 nt, Human
caucccuuucccuu

SEQ ID NO: 3036281 - RNA, 17 nt, Human
caucccuuucccuuggu

SEQ ID NO: 3036282 - RNA, 22 nt, Human
caucccugaaggccccgcccag

SEQ ID NO: 3036283 - RNA, 15 nt, Human
caucccucuggggcu

SEQ ID NO: 3036284 - RNA, 14 nt, Human
cauccacugugcca

SEQ ID NO: 3036285 - RNA, 17 nt, Human
cauccacugugccaugu

SEQ ID NO: 3036286 - RNA, 23 nt, Human
cauccacugugccaugugccagg

SEQ ID NO: 3036287 - RNA, 17 nt, Human
cauccagguucagcuug

SEQ ID NO: 3036288 - RNA, 11 nt, Human
caucaucccuu

SEQ ID NO: 3036289 - RNA, 16 nt, Human
caucauccuaagcuau

SEQ ID NO: 3036290 - RNA, 13 nt, Human
caucaugucuggc

SEQ ID NO: 3036291 - RNA, 14 nt, Human
caucaugucuggcu

SEQ ID NO: 3036292 - RNA, 15 nt, Human
caucaugucuggcua

SEQ ID NO: 3036293 - RNA, 12 nt, Human
caucacccgcua

SEQ ID NO: 3036294 - RNA, 20 nt, Human
caucaccaacgucugugcca

SEQ ID NO: 3036295 - RNA, 13 nt, Human
caugagcaucagg

SEQ ID NO: 3036296 - RNA, 12 nt, Human
caugagccucag

SEQ ID NO: 3036297 - RNA, 15 nt, Human
caugagccucagcau

SEQ ID NO: 3036298 - RNA, 17 nt, Human
caugagccucagcaucc

SEQ ID NO: 3036299 - RNA, 18 nt, Human
caugagccucagcauccu

SEQ ID NO: 3036300 - RNA, 19 nt, Human
caugagccucagcauccug

SEQ ID NO: 3036301 - RNA, 20 nt, Human
caugagccucagcauccugg

SEQ ID NO: 3036302 - RNA, 21 nt, Human
caugagccucagcauccuggc

SEQ ID NO: 3036303 - RNA, 23 nt, Human
caugagcaucaggccaggcccuc

SEQ ID NO: 3036304 - RNA, 22 nt, Human
caugagcaucaggccaggcccu

SEQ ID NO: 3036305 - RNA, 21 nt, Human
caugagcaucaggccaggccc

SEQ ID NO: 3036306 - RNA, 20 nt, Human
caugagcaucaggccaggcc

SEQ ID NO: 3036307 - RNA, 18 nt, Human
caugagcaucaggccagg

SEQ ID NO: 3036308 - RNA, 17 nt, Human
caugagcaucaggccag

SEQ ID NO: 3036309 - RNA, 16 nt, Human
caugagcaucaggcca

SEQ ID NO: 3036310 - RNA, 15 nt, Human
caugagcaucaggcc

SEQ ID NO: 3036311 - RNA, 23 nt, Human
caugaguccccuguuuguuucug

SEQ ID NO: 3036312 - RNA, 15 nt, Human
caugaguccccuguu

SEQ ID NO: 3036313 - RNA, 14 nt, Human
caugaguccccugu

SEQ ID NO: 3036314 - RNA, 13 nt, Human
caugaguccccug

SEQ ID NO: 3036315 - RNA, 22 nt, Human
caugagccucagcauccuggca

SEQ ID NO: 3036316 - RNA, 23 nt, Human
caugagccucagcauccuggcac

SEQ ID NO: 3036317 - RNA, 21 nt, Human
caugaggaacaaggcaaggcu

SEQ ID NO: 3036318 - RNA, 20 nt, Human
caugaggaacaaggcaaggc

SEQ ID NO: 3036319 - RNA, 17 nt, Human
caugaggaacaaggcaa

SEQ ID NO: 3036320 - RNA, 16 nt, Human
caugaggaacaaggca

SEQ ID NO: 3036321 - RNA, 23 nt, Human
caugaggaacaaggcaaggcugu

SEQ ID NO: 3036322 - RNA, 13 nt, Human
caugaaaacacau

SEQ ID NO: 3036323 - RNA, 14 nt, Human
caugaaaacacauu

SEQ ID NO: 3036324 - RNA, 15 nt, Human
caugaaaacacauuu

SEQ ID NO: 3036325 - RNA, 16 nt, Human
caugaaaacacauuuu

SEQ ID NO: 3036326 - RNA, 17 nt, Human
caugaaaacacauuuuu

SEQ ID NO: 3036327 - RNA, 12 nt, Human
caugaagacaga

SEQ ID NO: 3036328 - RNA, 19 nt, Human
caugaaaacacauuuuucu

SEQ ID NO: 3036329 - RNA, 21 nt, Human
caugaaaacacauuuuucuua

SEQ ID NO: 3036330 - RNA, 16 nt, Human
caucucuacaaaaagc

SEQ ID NO: 3036331 - RNA, 15 nt, Human
caucucuccuccuuu

SEQ ID NO: 3036332 - RNA, 21 nt, Human
caucuugaauuguaaggaaug

SEQ ID NO: 3036333 - RNA, 16 nt, Human
caucuugaauuguaag

SEQ ID NO: 3036334 - RNA, 15 nt, Human
caucuugcucugcug

SEQ ID NO: 3036335 - RNA, 19 nt, Human
caucuugcucugcugacag

SEQ ID NO: 3036336 - RNA, 16 nt, Human
caucuugcucugcuga

SEQ ID NO: 3036337 - RNA, 17 nt, Human
caucuugcucugcugac

SEQ ID NO: 3036338 - RNA, 13 nt, Human
caugcuguacaua

SEQ ID NO: 3036339 - RNA, 21 nt, Human
caugcuguacauacuuuuugg

SEQ ID NO: 3036340 - RNA, 19 nt, Human
caugcuguacauacuuuuu

SEQ ID NO: 3036341 - RNA, 16 nt, Human
caugcuguacauacuu

SEQ ID NO: 3036342 - RNA, 15 nt, Human
caugcugucccuuac

SEQ ID NO: 3036343 - RNA, 13 nt, Human
caugcugucccuu

SEQ ID NO: 3036344 - RNA, 15 nt, Human
cauggacuuccacug

SEQ ID NO: 3036345 - RNA, 18 nt, Human
caugggccuccugugugu

SEQ ID NO: 3036346 - RNA, 22 nt, Human
caugugccagguuuuuggucug

SEQ ID NO: 3036347 - RNA, 14 nt, Human
caugugcacaugca

SEQ ID NO: 3036348 - RNA, 15 nt, Human
caugugaugagagga

SEQ ID NO: 3036349 - RNA, 17 nt, Human
caugugaugagaggaaa

SEQ ID NO: 3036350 - RNA, 16 nt, Human
caugugaugagaggaa

SEQ ID NO: 3036351 - RNA, 20 nt, Human
caugugaugagaggaaauca

SEQ ID NO: 3036352 - RNA, 18 nt, Human
caugugaugagaggaaau

SEQ ID NO: 3036353 - RNA, 21 nt, Human
caugugaugagaggaaaucac

SEQ ID NO: 3036354 - RNA, 12 nt, Human
caugucuggcua

SEQ ID NO: 3036355 - RNA, 23 nt, Human
cauggucggaaaacaugcuacac

SEQ ID NO: 3036356 - RNA, 17 nt, Human
cauggucggaaaacaug

SEQ ID NO: 3036357 - RNA, 19 nt, Human
cauggucggaaaacaugcu

SEQ ID NO: 3036358 - RNA, 12 nt, Human
cauguuugugau

SEQ ID NO: 3036359 - RNA, 14 nt, Human
cauguuugugauug

SEQ ID NO: 3036360 - RNA, 19 nt, Human
cauguuuuucuucucccuc

SEQ ID NO: 3036361 - RNA, 20 nt, Human
cauguuuuucuucucccuca

SEQ ID NO: 3036362 - RNA, 14 nt, Human
cauucuuuuugaaa

SEQ ID NO: 3036363 - RNA, 16 nt, Human
cauucuuuuugaaaug

SEQ ID NO: 3036364 - RNA, 13 nt, Human
cauucuuuuugaa

SEQ ID NO: 3036365 - RNA, 18 nt, Human
cauugaccugaggcccuu

SEQ ID NO: 3036366 - RNA, 14 nt, Human
cauugaccugaggc

SEQ ID NO: 3036367 - RNA, 17 nt, Human
cauugaccugaggcccu

SEQ ID NO: 3036368 - RNA, 15 nt, Human
cauugaccugaggcc

SEQ ID NO: 3036369 - RNA, 15 nt, Human
cauuuaaaaaaaauc

SEQ ID NO: 3036370 - RNA, 13 nt, Human
cauugugggaagg

SEQ ID NO: 3036371 - RNA, 15 nt, Human
cauugugggaagggg

SEQ ID NO: 3036372 - RNA, 17 nt, Human
cauuugaaaauuuugau

SEQ ID NO: 3036373 - RNA, 19 nt, Human
cauuugaaaauuuugaugu

SEQ ID NO: 3036374 - RNA, 22 nt, Human
cauuugaggucuguucuuucca

SEQ ID NO: 3036375 - RNA, 13 nt, Human
cauuugcugaaua

SEQ ID NO: 3036376 - RNA, 22 nt, Human
cauuuuauuuuauuaugcauga

SEQ ID NO: 3036377 - RNA, 23 nt, Human
cauuuuauuuuauuaugcaugaa

SEQ ID NO: 3036378 - RNA, 17 nt, Human
cauuuuuaguagagaca

SEQ ID NO: 3036379 - RNA, 21 nt, Human
cauuuuuaagugcugcauuua

SEQ ID NO: 3036380 - RNA, 13 nt, Human
cauucuuggccca

SEQ ID NO: 3036381 - RNA, 16 nt, Human
cauucuuggcccagga

SEQ ID NO: 3036382 - RNA, 23 nt, Human
cauucuucuguacgucugacagg

SEQ ID NO: 3036383 - RNA, 17 nt, Human
cauucuguuaaucauua

SEQ ID NO: 3036384 - RNA, 12 nt, Human
cauucugccugc

SEQ ID NO: 3036385 - RNA, 13 nt, Human
cauucugccugcc

SEQ ID NO: 3036386 - RNA, 15 nt, Human
cauucugccugccca

SEQ ID NO: 3036387 - RNA, 16 nt, Human
cauucugccugcccag

SEQ ID NO: 3036388 - RNA, 17 nt, Human
cauucugccugcccagg

SEQ ID NO: 3036389 - RNA, 18 nt, Human
cauucugccugcccaggc

SEQ ID NO: 3036390 - RNA, 19 nt, Human
cauucugccugcccaggcc

SEQ ID NO: 3036391 - RNA, 20 nt, Human
cauucugccugcccaggccc

SEQ ID NO: 3036392 - RNA, 23 nt, Human
cauuccugaugcuucuucagaga

SEQ ID NO: 3036393 - RNA, 22 nt, Human
cauuccugaugcuucuucagag

SEQ ID NO: 3036394 - RNA, 19 nt, Human
cauuccugaugcuucuuca

SEQ ID NO: 3036395 - RNA, 16 nt, Human
cauuccugaugcuucu

SEQ ID NO: 3036396 - RNA, 14 nt, Human
cauuccugaugcuu

SEQ ID NO: 3036397 - RNA, 13 nt, Human
cauuccccaggag

SEQ ID NO: 3036398 - RNA, 17 nt, Human
cauuccccaggaggcca

SEQ ID NO: 3036399 - RNA, 15 nt, Human
cauuccccaggaggc

SEQ ID NO: 3036400 - RNA, 20 nt, Human
cauuccccaggaggccagcc

SEQ ID NO: 3036401 - RNA, 19 nt, Human
cauuccccaggaggccagc

SEQ ID NO: 3036402 - RNA, 18 nt, Human
cauuccccaggaggccag

SEQ ID NO: 3036403 - RNA, 18 nt, Human
caguacuaacauuuauuu

SEQ ID NO: 3036404 - RNA, 21 nt, Human
caguaaugagcuuaagaaauu

SEQ ID NO: 3036405 - RNA, 12 nt, Human
caguaauaacuc

SEQ ID NO: 3036406 - RNA, 13 nt, Human
caguaauaacucu

SEQ ID NO: 3036407 - RNA, 13 nt, Human
caguaacauagcu

SEQ ID NO: 3036408 - RNA, 22 nt, Human
caguaaaugggggugcauuuga

SEQ ID NO: 3036409 - RNA, 20 nt, Human
caguaaaugggggugcauuu

SEQ ID NO: 3036410 - RNA, 21 nt, Human
caguaaaugggggugcauuug

SEQ ID NO: 3036411 - RNA, 13 nt, Human
cagguucagcuug

SEQ ID NO: 3036412 - RNA, 12 nt, Human
cagguucagcuu

SEQ ID NO: 3036413 - RNA, 22 nt, Human
caggugugagucaccaagccca

SEQ ID NO: 3036414 - RNA, 23 nt, Human
caggugugagucaccaagcccag

SEQ ID NO: 3036415 - RNA, 16 nt, Human
caggugugaaccacca

SEQ ID NO: 3036416 - RNA, 19 nt, Human
caggugugaaccaccacac

SEQ ID NO: 3036417 - RNA, 22 nt, Human
caggugugaaccaccacaccca

SEQ ID NO: 3036418 - RNA, 23 nt, Human
caggugugaaccaccacacccag

SEQ ID NO: 3036419 - RNA, 20 nt, Human
caggugugagucaccaagcc

SEQ ID NO: 3036420 - RNA, 21 nt, Human
caggugugagucaccaagccc

SEQ ID NO: 3036421 - RNA, 16 nt, Human
caggugugagucacca

SEQ ID NO: 3036422 - RNA, 15 nt, Human
caggugucccugcac

SEQ ID NO: 3036423 - RNA, 16 nt, Human
caggugucccugcacu

SEQ ID NO: 3036424 - RNA, 18 nt, Human
caggugucccugcacuug

SEQ ID NO: 3036425 - RNA, 19 nt, Human
caggugucccugcacuugc

SEQ ID NO: 3036426 - RNA, 12 nt, Human
caggugugaacc

SEQ ID NO: 3036427 - RNA, 20 nt, Human
caggugguuauggagagggu

SEQ ID NO: 3036428 - RNA, 11 nt, Human
caggugucccu

SEQ ID NO: 3036429 - RNA, 14 nt, Human
caggugucccugca

SEQ ID NO: 3036430 - RNA, 18 nt, Human
caggugguuauggagagg

SEQ ID NO: 3036431 - RNA, 23 nt, Human
cagguggggucacucuggcagcu

SEQ ID NO: 3036432 - RNA, 22 nt, Human
cagguggggucacucuggcagc

SEQ ID NO: 3036433 - RNA, 21 nt, Human
cagguggggucacucuggcag

SEQ ID NO: 3036434 - RNA, 20 nt, Human
cagguggggucacucuggca

SEQ ID NO: 3036435 - RNA, 19 nt, Human
cagguggggucacucuggc

SEQ ID NO: 3036436 - RNA, 13 nt, Human
cagguggggcagc

SEQ ID NO: 3036437 - RNA, 14 nt, Human
cagguggggcagcu

SEQ ID NO: 3036438 - RNA, 15 nt, Human
cagguggggcagcuu

SEQ ID NO: 3036439 - RNA, 16 nt, Human
cagguggggcagcuug

SEQ ID NO: 3036440 - RNA, 17 nt, Human
cagguggggcagcuuga

SEQ ID NO: 3036441 - RNA, 18 nt, Human
cagguggggucacucugg

SEQ ID NO: 3036442 - RNA, 20 nt, Human
cagguaacaggcagauacag

SEQ ID NO: 3036443 - RNA, 21 nt, Human
cagguaacaggcagauacagg

SEQ ID NO: 3036444 - RNA, 21 nt, Human
caggugagaagcagaggaagg

SEQ ID NO: 3036445 - RNA, 20 nt, Human
caggugagaagcagaggaag

SEQ ID NO: 3036446 - RNA, 13 nt, Human
caggugagaagca

SEQ ID NO: 3036447 - RNA, 18 nt, Human
caggucuugaacuccugg

SEQ ID NO: 3036448 - RNA, 19 nt, Human
caggucuugaacuccuggc

SEQ ID NO: 3036449 - RNA, 20 nt, Human
caggucuugaacuccuggcc

SEQ ID NO: 3036450 - RNA, 21 nt, Human
caggucuugaacuccuggccu

SEQ ID NO: 3036451 - RNA, 22 nt, Human
caggucuugaacuccuggccuc

SEQ ID NO: 3036452 - RNA, 23 nt, Human
caggucuugaacuccuggccuca

SEQ ID NO: 3036453 - RNA, 21 nt, Human
caggggugggacacccuguga

SEQ ID NO: 3036454 - RNA, 20 nt, Human
caggggugggacacccugug

SEQ ID NO: 3036455 - RNA, 15 nt, Human
caggggugggacacc

SEQ ID NO: 3036456 - RNA, 14 nt, Human
caggggugggacac

SEQ ID NO: 3036457 - RNA, 21 nt, Human
caggguauuccagagugggga

SEQ ID NO: 3036458 - RNA, 20 nt, Human
caggguauuccagagugggg

SEQ ID NO: 3036459 - RNA, 12 nt, Human
cagggucccugg

SEQ ID NO: 3036460 - RNA, 14 nt, Human
cagggucccuggug

SEQ ID NO: 3036461 - RNA, 22 nt, Human
cagggucccugguggcagcuca

SEQ ID NO: 3036462 - RNA, 19 nt, Human
cagggucccugguggcagc

SEQ ID NO: 3036463 - RNA, 18 nt, Human
cagggucccugguggcag

SEQ ID NO: 3036464 - RNA, 15 nt, Human
cagggucccuggugg

SEQ ID NO: 3036465 - RNA, 14 nt, Human
cagguaacaggcag

SEQ ID NO: 3036466 - RNA, 15 nt, Human
cagguaacaggcaga

SEQ ID NO: 3036467 - RNA, 16 nt, Human
cagguaacaggcagau

SEQ ID NO: 3036468 - RNA, 17 nt, Human
cagguaacaggcagaua

SEQ ID NO: 3036469 - RNA, 16 nt, Human
caggguuuugccaugu

SEQ ID NO: 3036470 - RNA, 16 nt, Human
cagggucucacucugu

SEQ ID NO: 3036471 - RNA, 21 nt, Human
cagggucucacuauguugccc

SEQ ID NO: 3036472 - RNA, 22 nt, Human
cagggucucacuauguugccca

SEQ ID NO: 3036473 - RNA, 23 nt, Human
cagggucucacuauguugcccag

SEQ ID NO: 3036474 - RNA, 15 nt, Human
cagggucucacucug

SEQ ID NO: 3036475 - RNA, 18 nt, Human
caggguccuguagcccua

SEQ ID NO: 3036476 - RNA, 23 nt, Human
cagggucccugguggcagcucac

SEQ ID NO: 3036477 - RNA, 23 nt, Human
cagucagggaaggugccucugga

SEQ ID NO: 3036478 - RNA, 18 nt, Human
caguauuacuucugcuac

SEQ ID NO: 3036479 - RNA, 16 nt, Human
caguauuacuucugcu

SEQ ID NO: 3036480 - RNA, 19 nt, Human
cagucauuauguuaauauu

SEQ ID NO: 3036481 - RNA, 16 nt, Human
caguccauagcagaga

SEQ ID NO: 3036482 - RNA, 14 nt, Human
caguccauugaaag

SEQ ID NO: 3036483 - RNA, 13 nt, Human
caguaucucaggg

SEQ ID NO: 3036484 - RNA, 21 nt, Human
caguaucuugaagacuuuucu

SEQ ID NO: 3036485 - RNA, 18 nt, Human
caguaucuugaagacuuu

SEQ ID NO: 3036486 - RNA, 12 nt, Human
caguaucuugaa

SEQ ID NO: 3036487 - RNA, 15 nt, Human
caguaucucagggcc

SEQ ID NO: 3036488 - RNA, 17 nt, Human
cagucccugccaaugga

SEQ ID NO: 3036489 - RNA, 15 nt, Human
caguccucccaucuc

SEQ ID NO: 3036490 - RNA, 14 nt, Human
caguccucccaucu

SEQ ID NO: 3036491 - RNA, 13 nt, Human
caguccucccauc

SEQ ID NO: 3036492 - RNA, 12 nt, Human
caguccucccau

SEQ ID NO: 3036493 - RNA, 12 nt, Human
cagucccugcca

SEQ ID NO: 3036494 - RNA, 16 nt, Human
cagucccugccaaugg

SEQ ID NO: 3036495 - RNA, 15 nt, Human
cagucccugccaaug

SEQ ID NO: 3036496 - RNA, 14 nt, Human
cagucccugccaau

SEQ ID NO: 3036497 - RNA, 13 nt, Human
cagucccugccaa

SEQ ID NO: 3036498 - RNA, 17 nt, Human
caguccucccaucucac

SEQ ID NO: 3036499 - RNA, 16 nt, Human
caguccucccaucuca

SEQ ID NO: 3036500 - RNA, 18 nt, Human
cagucuggaaugcagugg

SEQ ID NO: 3036501 - RNA, 21 nt, Human
caguccuuaccagcagagcac

SEQ ID NO: 3036502 - RNA, 20 nt, Human
caguccuuaccagcagagca

SEQ ID NO: 3036503 - RNA, 19 nt, Human
caguccuuaccagcagagc

SEQ ID NO: 3036504 - RNA, 18 nt, Human
caguccuuaccagcagag

SEQ ID NO: 3036505 - RNA, 15 nt, Human
caguccuuaccagca

SEQ ID NO: 3036506 - RNA, 19 nt, Human
cagucuggaaugcaguggu

SEQ ID NO: 3036507 - RNA, 24 nt, Human
cagugagccgagauugcaccacug

SEQ ID NO: 3036508 - RNA, 12 nt, Human
cagugaggcucu

SEQ ID NO: 3036509 - RNA, 16 nt, Human
cagugaggcucugccc

SEQ ID NO: 3036510 - RNA, 15 nt, Human
cagugaggcucugcc

SEQ ID NO: 3036511 - RNA, 14 nt, Human
cagugaggcucugc

SEQ ID NO: 3036512 - RNA, 13 nt, Human
cagugaggcucug

SEQ ID NO: 3036513 - RNA, 21 nt, Human
cagugaggcucugcccuuggu

SEQ ID NO: 3036514 - RNA, 17 nt, Human
cagugagucgaggacag

SEQ ID NO: 3036515 - RNA, 18 nt, Human
cagugagucgaggacagg

SEQ ID NO: 3036516 - RNA, 20 nt, Human
cagugaggcucugcccuugg

SEQ ID NO: 3036517 - RNA, 19 nt, Human
cagugaggcucugcccuug

SEQ ID NO: 3036518 - RNA, 18 nt, Human
cagugaggcucugcccuu

SEQ ID NO: 3036519 - RNA, 17 nt, Human
cagugaggcucugcccu

SEQ ID NO: 3036520 - RNA, 13 nt, Human
cagugccuuaugg

SEQ ID NO: 3036521 - RNA, 11 nt, Human
cagugccuuau

SEQ ID NO: 3036522 - RNA, 18 nt, Human
cagugccgagaaggaagc

SEQ ID NO: 3036523 - RNA, 15 nt, Human
cagugccgagaagga

SEQ ID NO: 3036524 - RNA, 22 nt, Human
cagugccuuauggaacacucug

SEQ ID NO: 3036525 - RNA, 21 nt, Human
cagugccuuauggaacacucu

SEQ ID NO: 3036526 - RNA, 20 nt, Human
cagugccuuauggaacacuc

SEQ ID NO: 3036527 - RNA, 19 nt, Human
cagugccuuauggaacacu

SEQ ID NO: 3036528 - RNA, 18 nt, Human
cagugccuuauggaacac

SEQ ID NO: 3036529 - RNA, 17 nt, Human
cagugccuuauggaaca

SEQ ID NO: 3036530 - RNA, 16 nt, Human
cagugccuuauggaac

SEQ ID NO: 3036531 - RNA, 15 nt, Human
cagugccuuauggaa

SEQ ID NO: 3036532 - RNA, 19 nt, Human
cagugagucgaggacaggg

SEQ ID NO: 3036533 - RNA, 20 nt, Human
cagugagucgaggacaggga

SEQ ID NO: 3036534 - RNA, 22 nt, Human
cagugagucgaggacagggagg

SEQ ID NO: 3036535 - RNA, 23 nt, Human
cagugagucgaggacagggaggu

SEQ ID NO: 3036536 - RNA, 23 nt, Human
cagugccuuauggaacacucuga

SEQ ID NO: 3036537 - RNA, 15 nt, Human
caggaguuuggccag

SEQ ID NO: 3036538 - RNA, 16 nt, Human
caggaguuuggccaga

SEQ ID NO: 3036539 - RNA, 17 nt, Human
caggaguuuggccagaa

SEQ ID NO: 3036540 - RNA, 13 nt, Human
caggaguuuggcc

SEQ ID NO: 3036541 - RNA, 14 nt, Human
caggaguuuggcca

SEQ ID NO: 3036542 - RNA, 23 nt, Human
caggaguuugagaccaaccuggg

SEQ ID NO: 3036543 - RNA, 22 nt, Human
caggaguuugagaccaaccugg

SEQ ID NO: 3036544 - RNA, 21 nt, Human
caggaguuugagaccaaccug

SEQ ID NO: 3036545 - RNA, 23 nt, Human
caggagccccgaggccuucucug

SEQ ID NO: 3036546 - RNA, 20 nt, Human
caggagccccgaggccuucu

SEQ ID NO: 3036547 - RNA, 22 nt, Human
caggagccccgaggccuucucu

SEQ ID NO: 3036548 - RNA, 15 nt, Human
caggagccccgaggc

SEQ ID NO: 3036549 - RNA, 16 nt, Human
caggagccccgaggcc

SEQ ID NO: 3036550 - RNA, 18 nt, Human
caggagccccgaggccuu

SEQ ID NO: 3036551 - RNA, 19 nt, Human
caggagcagccacauuccu

SEQ ID NO: 3036552 - RNA, 14 nt, Human
caggagcagccaca

SEQ ID NO: 3036553 - RNA, 13 nt, Human
caggagcagccac

SEQ ID NO: 3036554 - RNA, 12 nt, Human
caggagcagcca

SEQ ID NO: 3036555 - RNA, 20 nt, Human
caggagccuccugcccuuac

SEQ ID NO: 3036556 - RNA, 17 nt, Human
caggagccuccugcccu

SEQ ID NO: 3036557 - RNA, 14 nt, Human
caggagccuccugc

SEQ ID NO: 3036558 - RNA, 12 nt, Human
caggagugagca

SEQ ID NO: 3036559 - RNA, 14 nt, Human
caggaucagucuga

SEQ ID NO: 3036560 - RNA, 13 nt, Human
caggaucagucug

SEQ ID NO: 3036561 - RNA, 23 nt, Human
caggauggccgggcgcgguggcu

SEQ ID NO: 3036562 - RNA, 17 nt, Human
caggauucuuccucccu

SEQ ID NO: 3036563 - RNA, 18 nt, Human
caggauucuuccucccuc

SEQ ID NO: 3036564 - RNA, 17 nt, Human
caggcaugguggcccac

SEQ ID NO: 3036565 - RNA, 23 nt, Human
caggcaggucuugaacuccuggc

SEQ ID NO: 3036566 - RNA, 15 nt, Human
caggcaggugggaug

SEQ ID NO: 3036567 - RNA, 13 nt, Human
caggcaggucuug

SEQ ID NO: 3036568 - RNA, 22 nt, Human
caggcaggucuugaacuccugg

SEQ ID NO: 3036569 - RNA, 14 nt, Human
caggcagguccagg

SEQ ID NO: 3036570 - RNA, 15 nt, Human
caggcagguccaggg

SEQ ID NO: 3036571 - RNA, 19 nt, Human
caggcagguccaggguuug

SEQ ID NO: 3036572 - RNA, 12 nt, Human
caggcaggucuu

SEQ ID NO: 3036573 - RNA, 24 nt, Human
caggcauuccccaggaggccagcc

SEQ ID NO: 3036574 - RNA, 23 nt, Human
caggcauuccccaggaggccagc

SEQ ID NO: 3036575 - RNA, 22 nt, Human
caggcauuccccaggaggccag

SEQ ID NO: 3036576 - RNA, 21 nt, Human
caggcauuccccaggaggcca

SEQ ID NO: 3036577 - RNA, 20 nt, Human
caggcauuccccaggaggcc

SEQ ID NO: 3036578 - RNA, 19 nt, Human
caggcauuccccaggaggc

SEQ ID NO: 3036579 - RNA, 18 nt, Human
caggcauuccccaggagg

SEQ ID NO: 3036580 - RNA, 15 nt, Human
caggcauguucucug

SEQ ID NO: 3036581 - RNA, 18 nt, Human
caggcauguucucugagg

SEQ ID NO: 3036582 - RNA, 19 nt, Human
caggcauguucucugagga

SEQ ID NO: 3036583 - RNA, 20 nt, Human
caggcauguucucugaggac

SEQ ID NO: 3036584 - RNA, 17 nt, Human
caggcauuccccaggag

SEQ ID NO: 3036585 - RNA, 16 nt, Human
caggcauuccccagga

SEQ ID NO: 3036586 - RNA, 15 nt, Human
caggcauuccccagg

SEQ ID NO: 3036587 - RNA, 13 nt, Human
caggcauucccca

SEQ ID NO: 3036588 - RNA, 17 nt, Human
caggcagccaggccaca

SEQ ID NO: 3036589 - RNA, 16 nt, Human
caggcagccaggccac

SEQ ID NO: 3036590 - RNA, 13 nt, Human
caggcagguccag

SEQ ID NO: 3036591 - RNA, 14 nt, Human
caggcaagcaccuc

SEQ ID NO: 3036592 - RNA, 15 nt, Human
caggcaagcaccucc

SEQ ID NO: 3036593 - RNA, 16 nt, Human
caggcaagcaccuccu

SEQ ID NO: 3036594 - RNA, 21 nt, Human
caggcaagcaccuccugccuc

SEQ ID NO: 3036595 - RNA, 15 nt, Human
caggcagccaggcca

SEQ ID NO: 3036596 - RNA, 14 nt, Human
caggcagccaggcc

SEQ ID NO: 3036597 - RNA, 20 nt, Human
caggauucuuccucccuccc

SEQ ID NO: 3036598 - RNA, 13 nt, Human
caggcccggcucc

SEQ ID NO: 3036599 - RNA, 14 nt, Human
caggcccggcucca

SEQ ID NO: 3036600 - RNA, 15 nt, Human
caggcccggcuccag

SEQ ID NO: 3036601 - RNA, 15 nt, Human
caggccccugccacc

SEQ ID NO: 3036602 - RNA, 17 nt, Human
caggccccugccacccu

SEQ ID NO: 3036603 - RNA, 19 nt, Human
caggccccugccacccugg

SEQ ID NO: 3036604 - RNA, 20 nt, Human
caggccccugccacccuggg

SEQ ID NO: 3036605 - RNA, 23 nt, Human
caggccaaacucaccugccccuc

SEQ ID NO: 3036606 - RNA, 18 nt, Human
caggccaaacucaccugc

SEQ ID NO: 3036607 - RNA, 13 nt, Human
caggccacaagac

SEQ ID NO: 3036608 - RNA, 18 nt, Human
caggccacaagacccuug

SEQ ID NO: 3036609 - RNA, 17 nt, Human
caggccacaagacccuu

SEQ ID NO: 3036610 - RNA, 20 nt, Human
caggccacaagacccuugug

SEQ ID NO: 3036611 - RNA, 22 nt, Human
caggccaggcccucugcccacu

SEQ ID NO: 3036612 - RNA, 21 nt, Human
caggccaggcccucugcccac

SEQ ID NO: 3036613 - RNA, 20 nt, Human
caggccaggcccucugccca

SEQ ID NO: 3036614 - RNA, 13 nt, Human
caggccccugcca

SEQ ID NO: 3036615 - RNA, 13 nt, Human
caggcuggaguua

SEQ ID NO: 3036616 - RNA, 16 nt, Human
caggcuggaguuauug

SEQ ID NO: 3036617 - RNA, 23 nt, Human
caggcugggcuucaguggcagcu

SEQ ID NO: 3036618 - RNA, 23 nt, Human
caggcuuagucacugagacagcc

SEQ ID NO: 3036619 - RNA, 22 nt, Human
caggcuuagucacugagacagc

SEQ ID NO: 3036620 - RNA, 12 nt, Human
caggcuggucuc

SEQ ID NO: 3036621 - RNA, 19 nt, Human
caggcuggucucaaacucu

SEQ ID NO: 3036622 - RNA, 14 nt, Human
caggcuguauccca

SEQ ID NO: 3036623 - RNA, 20 nt, Human
caggcuguaucccaugagcc

SEQ ID NO: 3036624 - RNA, 21 nt, Human
caggcuguaucccaugagccu

SEQ ID NO: 3036625 - RNA, 22 nt, Human
caggcuguaucccaugagccuc

SEQ ID NO: 3036626 - RNA, 23 nt, Human
caggcuguaucccaugagccuca

SEQ ID NO: 3036627 - RNA, 21 nt, Human
caggcuuagucacugagacag

SEQ ID NO: 3036628 - RNA, 20 nt, Human
caggcuuagucacugagaca

SEQ ID NO: 3036629 - RNA, 17 nt, Human
caggcuuagucacugag

SEQ ID NO: 3036630 - RNA, 16 nt, Human
caggcuuagucacuga

SEQ ID NO: 3036631 - RNA, 22 nt, Human
caggcccucugcccacucccug

SEQ ID NO: 3036632 - RNA, 21 nt, Human
caggcccucugcccacucccu

SEQ ID NO: 3036633 - RNA, 20 nt, Human
caggcccucugcccacuccc

SEQ ID NO: 3036634 - RNA, 19 nt, Human
caggcccucugcccacucc

SEQ ID NO: 3036635 - RNA, 17 nt, Human
caggcccucugcccacu

SEQ ID NO: 3036636 - RNA, 16 nt, Human
caggcccucugcccac

SEQ ID NO: 3036637 - RNA, 22 nt, Human
caggcccggcuccaggcuccuu

SEQ ID NO: 3036638 - RNA, 20 nt, Human
caggcccggcuccaggcucc

SEQ ID NO: 3036639 - RNA, 21 nt, Human
caggcccggcuccaggcuccu

SEQ ID NO: 3036640 - RNA, 15 nt, Human
caggcccucugccca

SEQ ID NO: 3036641 - RNA, 14 nt, Human
caggcccucugccc

SEQ ID NO: 3036642 - RNA, 13 nt, Human
caggcccucugcc

SEQ ID NO: 3036643 - RNA, 17 nt, Human
caggcccggcuccaggc

SEQ ID NO: 3036644 - RNA, 16 nt, Human
caggcccggcuccagg

SEQ ID NO: 3036645 - RNA, 18 nt, Human
caggcccggcuccaggcu

SEQ ID NO: 3036646 - RNA, 19 nt, Human
caggcccggcuccaggcuc

SEQ ID NO: 3036647 - RNA, 23 nt, Human
caggcucucaggccagcugcuug

SEQ ID NO: 3036648 - RNA, 21 nt, Human
caggcucucaggccagcugcu

SEQ ID NO: 3036649 - RNA, 20 nt, Human
caggcucucaggccagcugc

SEQ ID NO: 3036650 - RNA, 19 nt, Human
caggcucucaggccagcug

SEQ ID NO: 3036651 - RNA, 18 nt, Human
caggcucucaggccagcu

SEQ ID NO: 3036652 - RNA, 17 nt, Human
caggcucucaggccagc

SEQ ID NO: 3036653 - RNA, 21 nt, Human
caggcuccuuuagcgcccagu

SEQ ID NO: 3036654 - RNA, 12 nt, Human
caggcucucagg

SEQ ID NO: 3036655 - RNA, 20 nt, Human
caggcucgggcuccccagcc

SEQ ID NO: 3036656 - RNA, 16 nt, Human
caggcucucaggccag

SEQ ID NO: 3036657 - RNA, 15 nt, Human
caggcucucaggcca

SEQ ID NO: 3036658 - RNA, 14 nt, Human
caggcucucaggcc

SEQ ID NO: 3036659 - RNA, 13 nt, Human
caggcucucaggc

SEQ ID NO: 3036660 - RNA, 14 nt, Human
caggcuccuuuagc

SEQ ID NO: 3036661 - RNA, 19 nt, Human
caggcuccuuuagcgccca

SEQ ID NO: 3036662 - RNA, 20 nt, Human
caggcuccuuuagcgcccag

SEQ ID NO: 3036663 - RNA, 22 nt, Human
cagggcacaccgggcacucaga

SEQ ID NO: 3036664 - RNA, 23 nt, Human
cagggcacaccgggcacucagaa

SEQ ID NO: 3036665 - RNA, 15 nt, Human
cagggcacaccgggc

SEQ ID NO: 3036666 - RNA, 17 nt, Human
cagggcacaccgggcac

SEQ ID NO: 3036667 - RNA, 19 nt, Human
cagggcacaccgggcacuc

SEQ ID NO: 3036668 - RNA, 21 nt, Human
cagggcacaccgggcacucag

SEQ ID NO: 3036669 - RNA, 14 nt, Human
cagggcacaccggg

SEQ ID NO: 3036670 - RNA, 23 nt, Human
cagggacagaggggguggccucc

SEQ ID NO: 3036671 - RNA, 19 nt, Human
caggggaggguagagcgga

SEQ ID NO: 3036672 - RNA, 19 nt, Human
cagggccuggcucaggugg

SEQ ID NO: 3036673 - RNA, 16 nt, Human
cagggccuggcucagg

SEQ ID NO: 3036674 - RNA, 13 nt, Human
cagggccuggcuc

SEQ ID NO: 3036675 - RNA, 15 nt, Human
cagggccuggcucag

SEQ ID NO: 3036676 - RNA, 14 nt, Human
cagggccuggcuca

SEQ ID NO: 3036677 - RNA, 13 nt, Human
cagggacagaggg

SEQ ID NO: 3036678 - RNA, 20 nt, Human
cagggacagaggggguggcc

SEQ ID NO: 3036679 - RNA, 14 nt, Human
cagggacagagggg

SEQ ID NO: 3036680 - RNA, 16 nt, Human
cagggaaacagcuaau

SEQ ID NO: 3036681 - RNA, 22 nt, Human
cagggaaacagcuaaugggaca

SEQ ID NO: 3036682 - RNA, 19 nt, Human
cagcacaaggaaauaaaau

SEQ ID NO: 3036683 - RNA, 22 nt, Human
cagcaauaaagcagcguuucua

SEQ ID NO: 3036684 - RNA, 19 nt, Human
cagcaagugagagcugggu

SEQ ID NO: 3036685 - RNA, 21 nt, Human
cagcaagugagagcugggugu

SEQ ID NO: 3036686 - RNA, 13 nt, Human
cagcaauaaagca

SEQ ID NO: 3036687 - RNA, 21 nt, Human
cagcaauaaagcagcguuucu

SEQ ID NO: 3036688 - RNA, 17 nt, Human
cagcaaggagauuuaca

SEQ ID NO: 3036689 - RNA, 18 nt, Human
cagcaaggagauuuacaa

SEQ ID NO: 3036690 - RNA, 14 nt, Human
cagcaagugagagc

SEQ ID NO: 3036691 - RNA, 15 nt, Human
cagcaagugagagcu

SEQ ID NO: 3036692 - RNA, 16 nt, Human
cagcaagugagagcug

SEQ ID NO: 3036693 - RNA, 17 nt, Human
cagcaagugagagcugg

SEQ ID NO: 3036694 - RNA, 12 nt, Human
cagcaagugaga

SEQ ID NO: 3036695 - RNA, 10 nt, Human
cagcagagug

SEQ ID NO: 3036696 - RNA, 9 nt, Human
cagcagagu

SEQ ID NO: 3036697 - RNA, 15 nt, Human
cagcagagugcuuua

SEQ ID NO: 3036698 - RNA, 11 nt, Human
cagcagagugc

SEQ ID NO: 3036699 - RNA, 15 nt, Human
cagcagaaaugccuu

SEQ ID NO: 3036700 - RNA, 17 nt, Human
cagcagaaaugccuuac

SEQ ID NO: 3036701 - RNA, 19 nt, Human
cagcagaaaugccuuaccc

SEQ ID NO: 3036702 - RNA, 22 nt, Human
cagcagaaaugccuuacccuca

SEQ ID NO: 3036703 - RNA, 13 nt, Human
cagcagagcaccu

SEQ ID NO: 3036704 - RNA, 11 nt, Human
cagcagagcac

SEQ ID NO: 3036705 - RNA, 15 nt, Human
cagcaacacaaagcu

SEQ ID NO: 3036706 - RNA, 23 nt, Human
cagcaacacaaagcuuuugcaua

SEQ ID NO: 3036707 - RNA, 18 nt, Human
cagcaaaagaugcuucuc

SEQ ID NO: 3036708 - RNA, 14 nt, Human
cagauucuuuccug

SEQ ID NO: 3036709 - RNA, 18 nt, Human
cagaugggugcuuggagg

SEQ ID NO: 3036710 - RNA, 23 nt, Human
cagaugggugcuuggaggaagga

SEQ ID NO: 3036711 - RNA, 21 nt, Human
cagccaaagccuccuccagcc

SEQ ID NO: 3036712 - RNA, 18 nt, Human
cagccaaagccuccucca

SEQ ID NO: 3036713 - RNA, 16 nt, Human
cagccaaagccuccuc

SEQ ID NO: 3036714 - RNA, 15 nt, Human
cagccaaagccuccu

SEQ ID NO: 3036715 - RNA, 21 nt, Human
cagcauccuggcacccggccc

SEQ ID NO: 3036716 - RNA, 19 nt, Human
cagcauccuggcacccggc

SEQ ID NO: 3036717 - RNA, 20 nt, Human
cagcauccuggcacccggcc

SEQ ID NO: 3036718 - RNA, 14 nt, Human
cagcauccuggcac

SEQ ID NO: 3036719 - RNA, 15 nt, Human
cagcauccuggcacc

SEQ ID NO: 3036720 - RNA, 16 nt, Human
cagcauccuggcaccc

SEQ ID NO: 3036721 - RNA, 17 nt, Human
cagcauccuggcacccg

SEQ ID NO: 3036722 - RNA, 20 nt, Human
cagcagggagggcuucugcc

SEQ ID NO: 3036723 - RNA, 19 nt, Human
cagcaggcucucaggccag

SEQ ID NO: 3036724 - RNA, 18 nt, Human
cagcaggcucucaggcca

SEQ ID NO: 3036725 - RNA, 17 nt, Human
cagcaggcucucaggcc

SEQ ID NO: 3036726 - RNA, 16 nt, Human
cagcaggcucucaggc

SEQ ID NO: 3036727 - RNA, 22 nt, Human
cagcaggcucucaggccagcug

SEQ ID NO: 3036728 - RNA, 20 nt, Human
cagcaggcucucaggccagc

SEQ ID NO: 3036729 - RNA, 18 nt, Human
cagcagggagggcuucug

SEQ ID NO: 3036730 - RNA, 12 nt, Human
cagcaggcucuc

SEQ ID NO: 3036731 - RNA, 15 nt, Human
cagcaggcucucagg

SEQ ID NO: 3036732 - RNA, 14 nt, Human
cagcaggcucucag

SEQ ID NO: 3036733 - RNA, 22 nt, Human
cagcagccuggacccuguggau

SEQ ID NO: 3036734 - RNA, 19 nt, Human
cagcagccuggacccugug

SEQ ID NO: 3036735 - RNA, 18 nt, Human
cagcagccuggacccugu

SEQ ID NO: 3036736 - RNA, 15 nt, Human
cagcagccuggaccc

SEQ ID NO: 3036737 - RNA, 14 nt, Human
cagcagccuggacc

SEQ ID NO: 3036738 - RNA, 12 nt, Human
cagcagccugga

SEQ ID NO: 3036739 - RNA, 14 nt, Human
cagccacauuccug

SEQ ID NO: 3036740 - RNA, 19 nt, Human
cagccacauuccugaugcu

SEQ ID NO: 3036741 - RNA, 17 nt, Human
cagccacauuccugaug

SEQ ID NO: 3036742 - RNA, 15 nt, Human
cagccacauuccuga

SEQ ID NO: 3036743 - RNA, 23 nt, Human
cagccacggccaggccagaggga

SEQ ID NO: 3036744 - RNA, 22 nt, Human
cagccaguaaaugggggugcau

SEQ ID NO: 3036745 - RNA, 13 nt, Human
cagccaguaaaug

SEQ ID NO: 3036746 - RNA, 14 nt, Human
cagccacggccagg

SEQ ID NO: 3036747 - RNA, 15 nt, Human
cagccacggccaggc

SEQ ID NO: 3036748 - RNA, 16 nt, Human
cagccacggccaggcc

SEQ ID NO: 3036749 - RNA, 17 nt, Human
cagccacggccaggcca

SEQ ID NO: 3036750 - RNA, 18 nt, Human
cagccacggccaggccag

SEQ ID NO: 3036751 - RNA, 19 nt, Human
cagccacggccaggccaga

SEQ ID NO: 3036752 - RNA, 21 nt, Human
cagccacggccaggccagagg

SEQ ID NO: 3036753 - RNA, 22 nt, Human
cagccacggccaggccagaggg

SEQ ID NO: 3036754 - RNA, 15 nt, Human
cagcccacuucugcc

SEQ ID NO: 3036755 - RNA, 15 nt, Human
cagcccaccccucaa

SEQ ID NO: 3036756 - RNA, 18 nt, Human
cagcccacuucugccaua

SEQ ID NO: 3036757 - RNA, 22 nt, Human
cagccccaaaacucuccucugc

SEQ ID NO: 3036758 - RNA, 21 nt, Human
cagccccaaaacucuccucug

SEQ ID NO: 3036759 - RNA, 20 nt, Human
cagccccaaaacucuccucu

SEQ ID NO: 3036760 - RNA, 14 nt, Human
cagcucaccagccc

SEQ ID NO: 3036761 - RNA, 13 nt, Human
cagcccucagaau

SEQ ID NO: 3036762 - RNA, 18 nt, Human
cagcccucaauugugaaa

SEQ ID NO: 3036763 - RNA, 22 nt, Human
cagcccgggcucugccucccau

SEQ ID NO: 3036764 - RNA, 21 nt, Human
cagcccgggcucugccuccca

SEQ ID NO: 3036765 - RNA, 20 nt, Human
cagcccgggcucugccuccc

SEQ ID NO: 3036766 - RNA, 19 nt, Human
cagcccgggcucugccucc

SEQ ID NO: 3036767 - RNA, 18 nt, Human
cagcccgggcucugccuc

SEQ ID NO: 3036768 - RNA, 17 nt, Human
cagcccgggcucugccu

SEQ ID NO: 3036769 - RNA, 16 nt, Human
cagcccgggcucugcc

SEQ ID NO: 3036770 - RNA, 15 nt, Human
cagcccgggcucugc

SEQ ID NO: 3036771 - RNA, 14 nt, Human
cagcccgggcucug

SEQ ID NO: 3036772 - RNA, 13 nt, Human
cagcccgggcucu

SEQ ID NO: 3036773 - RNA, 24 nt, Human
cagccccuucugacccaugcugcc

SEQ ID NO: 3036774 - RNA, 23 nt, Human
cagccccuucugacccaugcugc

SEQ ID NO: 3036775 - RNA, 22 nt, Human
cagccccuucugacccaugcug

SEQ ID NO: 3036776 - RNA, 21 nt, Human
cagccccuucugacccaugcu

SEQ ID NO: 3036777 - RNA, 19 nt, Human
cagccccuucugacccaug

SEQ ID NO: 3036778 - RNA, 17 nt, Human
cagccccuucugaccca

SEQ ID NO: 3036779 - RNA, 16 nt, Human
cagccccuucugaccc

SEQ ID NO: 3036780 - RNA, 13 nt, Human
cagccccagugcc

SEQ ID NO: 3036781 - RNA, 14 nt, Human
cagccccagugccc

SEQ ID NO: 3036782 - RNA, 15 nt, Human
cagccccagugccca

SEQ ID NO: 3036783 - RNA, 16 nt, Human
cagccccagugcccac

SEQ ID NO: 3036784 - RNA, 17 nt, Human
cagccccagugcccaca

SEQ ID NO: 3036785 - RNA, 18 nt, Human
cagccccagugcccacag

SEQ ID NO: 3036786 - RNA, 21 nt, Human
cagccccaucccaaacccuuc

SEQ ID NO: 3036787 - RNA, 11 nt, Human
cagccccaucc

SEQ ID NO: 3036788 - RNA, 21 nt, Human
cagccccuguucuggcagagu

SEQ ID NO: 3036789 - RNA, 22 nt, Human
cagccccuggaugcagccucac

SEQ ID NO: 3036790 - RNA, 20 nt, Human
cagccccuguucuggcagag

SEQ ID NO: 3036791 - RNA, 16 nt, Human
cagccccauucugccu

SEQ ID NO: 3036792 - RNA, 17 nt, Human
cagccccauucugccug

SEQ ID NO: 3036793 - RNA, 18 nt, Human
cagccccauucugccugc

SEQ ID NO: 3036794 - RNA, 23 nt, Human
cagccccuggaugcagccucaca

SEQ ID NO: 3036795 - RNA, 13 nt, Human
cagccccauucug

SEQ ID NO: 3036796 - RNA, 14 nt, Human
cagccccauucugc

SEQ ID NO: 3036797 - RNA, 22 nt, Human
cagccccauccucuguacagag

SEQ ID NO: 3036798 - RNA, 16 nt, Human
cagccccauccucugu

SEQ ID NO: 3036799 - RNA, 14 nt, Human
cagccccauccucu

SEQ ID NO: 3036800 - RNA, 13 nt, Human
cagccccauccuc

SEQ ID NO: 3036801 - RNA, 12 nt, Human
cagccccauccu

SEQ ID NO: 3036802 - RNA, 22 nt, Human
cagccccaucccaaacccuuca

SEQ ID NO: 3036803 - RNA, 16 nt, Human
cagcccugcagagggc

SEQ ID NO: 3036804 - RNA, 15 nt, Human
cagcccugcagaggg

SEQ ID NO: 3036805 - RNA, 14 nt, Human
cagcccugcagagg

SEQ ID NO: 3036806 - RNA, 13 nt, Human
cagcccugcagag

SEQ ID NO: 3036807 - RNA, 20 nt, Human
cagcccugcagagggcacag

SEQ ID NO: 3036808 - RNA, 18 nt, Human
cagcccugcagagggcac

SEQ ID NO: 3036809 - RNA, 21 nt, Human
cagccguguaaccauggaccc

SEQ ID NO: 3036810 - RNA, 19 nt, Human
cagccucccaaagugcugg

SEQ ID NO: 3036811 - RNA, 20 nt, Human
cagccucccaaagugcuggg

SEQ ID NO: 3036812 - RNA, 21 nt, Human
cagccucccaaagugcuggga

SEQ ID NO: 3036813 - RNA, 23 nt, Human
cagccucccaaagugcugggauu

SEQ ID NO: 3036814 - RNA, 20 nt, Human
cagccucccgaauagcuggg

SEQ ID NO: 3036815 - RNA, 21 nt, Human
cagccucccgaauagcuggga

SEQ ID NO: 3036816 - RNA, 22 nt, Human
cagccucccgaauagcugggac

SEQ ID NO: 3036817 - RNA, 20 nt, Human
cagccucacaguccuuacca

SEQ ID NO: 3036818 - RNA, 15 nt, Human
cagccucacaguccu

SEQ ID NO: 3036819 - RNA, 14 nt, Human
cagccucacagucc

SEQ ID NO: 3036820 - RNA, 19 nt, Human
cagccucaaccuccugggc

SEQ ID NO: 3036821 - RNA, 20 nt, Human
cagccucaaccuccugggcu

SEQ ID NO: 3036822 - RNA, 21 nt, Human
cagccucaaccuccugggcua

SEQ ID NO: 3036823 - RNA, 17 nt, Human
cagccucaaccuccugg

SEQ ID NO: 3036824 - RNA, 18 nt, Human
cagccucaaccuccuggg

SEQ ID NO: 3036825 - RNA, 20 nt, Human
cagccugcuccagcuguuca

SEQ ID NO: 3036826 - RNA, 23 nt, Human
cagccucccgaauagcugggacu

SEQ ID NO: 3036827 - RNA, 19 nt, Human
cagccucccgaguagcugg

SEQ ID NO: 3036828 - RNA, 20 nt, Human
cagccucccgaguagcuggg

SEQ ID NO: 3036829 - RNA, 21 nt, Human
cagccucccgaguagcuggga

SEQ ID NO: 3036830 - RNA, 22 nt, Human
cagccucccgaguagcugggac

SEQ ID NO: 3036831 - RNA, 23 nt, Human
cagccucccgaguagcugggacu

SEQ ID NO: 3036832 - RNA, 19 nt, Human
cagccuggacccuguggau

SEQ ID NO: 3036833 - RNA, 15 nt, Human
cagccuggacccugu

SEQ ID NO: 3036834 - RNA, 19 nt, Human
cagccugggcaaugugaua

SEQ ID NO: 3036835 - RNA, 16 nt, Human
cagccugggcaaugug

SEQ ID NO: 3036836 - RNA, 24 nt, Human
cagccuugaccauucuccaccugc

SEQ ID NO: 3036837 - RNA, 23 nt, Human
cagccuugaccauucuccaccug

SEQ ID NO: 3036838 - RNA, 22 nt, Human
cagccuugaccauucuccaccu

SEQ ID NO: 3036839 - RNA, 17 nt, Human
cagccuugaccauucuc

SEQ ID NO: 3036840 - RNA, 21 nt, Human
cagccuugaccauucuccacc

SEQ ID NO: 3036841 - RNA, 20 nt, Human
cagccuugaccauucuccac

SEQ ID NO: 3036842 - RNA, 12 nt, Human
cagcucagagag

SEQ ID NO: 3036843 - RNA, 20 nt, Human
cagcucaccucucccuugga

SEQ ID NO: 3036844 - RNA, 19 nt, Human
cagcucaccucucccuugg

SEQ ID NO: 3036845 - RNA, 22 nt, Human
cagcucaccagccccagugccc

SEQ ID NO: 3036846 - RNA, 20 nt, Human
cagcucaccagccccagugc

SEQ ID NO: 3036847 - RNA, 21 nt, Human
cagcucaccagccccagugcc

SEQ ID NO: 3036848 - RNA, 17 nt, Human
cagcucaccucucccuu

SEQ ID NO: 3036849 - RNA, 16 nt, Human
cagcucaccucucccu

SEQ ID NO: 3036850 - RNA, 15 nt, Human
cagcucaccucuccc

SEQ ID NO: 3036851 - RNA, 13 nt, Human
cagcucaccucuc

SEQ ID NO: 3036852 - RNA, 13 nt, Human
cagcucaccagcc

SEQ ID NO: 3036853 - RNA, 15 nt, Human
cagcucaccagcccc

SEQ ID NO: 3036854 - RNA, 16 nt, Human
cagcucaccagcccca

SEQ ID NO: 3036855 - RNA, 17 nt, Human
cagcucaccagccccag

SEQ ID NO: 3036856 - RNA, 19 nt, Human
cagcucaccagccccagug

SEQ ID NO: 3036857 - RNA, 21 nt, Human
cagcgagcccugguggcagug

SEQ ID NO: 3036858 - RNA, 18 nt, Human
cagcuaacauggaaguac

SEQ ID NO: 3036859 - RNA, 19 nt, Human
cagcuaacauggaaguacu

SEQ ID NO: 3036860 - RNA, 13 nt, Human
cagcgagcccugg

SEQ ID NO: 3036861 - RNA, 16 nt, Human
cagcgagcccuggugg

SEQ ID NO: 3036862 - RNA, 17 nt, Human
cagcgagcccugguggc

SEQ ID NO: 3036863 - RNA, 19 nt, Human
cagcgagcccugguggcag

SEQ ID NO: 3036864 - RNA, 20 nt, Human
cagcgagcccugguggcagu

SEQ ID NO: 3036865 - RNA, 20 nt, Human
cagcuaacauggaaguacua

SEQ ID NO: 3036866 - RNA, 15 nt, Human
cagcuaaugggacac

SEQ ID NO: 3036867 - RNA, 16 nt, Human
cagcuaaugggacacu

SEQ ID NO: 3036868 - RNA, 16 nt, Human
cagcucuccccuucuc

SEQ ID NO: 3036869 - RNA, 16 nt, Human
cagcucugcaagaauu

SEQ ID NO: 3036870 - RNA, 15 nt, Human
cagcucugcaagaau

SEQ ID NO: 3036871 - RNA, 21 nt, Human
cagcucugcaagaauugaagc

SEQ ID NO: 3036872 - RNA, 20 nt, Human
cagcucagagagggugggag

SEQ ID NO: 3036873 - RNA, 19 nt, Human
cagcucagagaggguggga

SEQ ID NO: 3036874 - RNA, 17 nt, Human
cagcucagagagggugg

SEQ ID NO: 3036875 - RNA, 13 nt, Human
cagcucagagagg

SEQ ID NO: 3036876 - RNA, 16 nt, Human
cagcuccuucuguccu

SEQ ID NO: 3036877 - RNA, 17 nt, Human
cagcuccuucuguccua

SEQ ID NO: 3036878 - RNA, 21 nt, Human
cagcuccuucuguccuacucu

SEQ ID NO: 3036879 - RNA, 23 nt, Human
cagcuccuucuguccuacucugu

SEQ ID NO: 3036880 - RNA, 13 nt, Human
cagcucuggucca

SEQ ID NO: 3036881 - RNA, 10 nt, Human
cagcucuggu

SEQ ID NO: 3036882 - RNA, 21 nt, Human
cagcucugguccauagagagc

SEQ ID NO: 3036883 - RNA, 18 nt, Human
cagcucugguccauagag

SEQ ID NO: 3036884 - RNA, 17 nt, Human
cagcucugguccauaga

SEQ ID NO: 3036885 - RNA, 16 nt, Human
cagcucugguccauag

SEQ ID NO: 3036886 - RNA, 12 nt, Human
cagcucuguccu

SEQ ID NO: 3036887 - RNA, 13 nt, Human
cagcucuguccug

SEQ ID NO: 3036888 - RNA, 23 nt, Human
cagcucugguccauagagagcaa

SEQ ID NO: 3036889 - RNA, 22 nt, Human
cagcucugguccauagagagca

SEQ ID NO: 3036890 - RNA, 14 nt, Human
cagcucuguccugg

SEQ ID NO: 3036891 - RNA, 16 nt, Human
cagcucuguccuggga

SEQ ID NO: 3036892 - RNA, 17 nt, Human
cagcucuguccugggag

SEQ ID NO: 3036893 - RNA, 18 nt, Human
cagcucuguccugggagu

SEQ ID NO: 3036894 - RNA, 23 nt, Human
cagcucuguccugggagugagcu

SEQ ID NO: 3036895 - RNA, 21 nt, Human
cagcucuuauauugccauuuc

SEQ ID NO: 3036896 - RNA, 10 nt, Human
cagcucuuau

SEQ ID NO: 3036897 - RNA, 13 nt, Human
cagcucuucucca

SEQ ID NO: 3036898 - RNA, 14 nt, Human
cagcucuucuccag

SEQ ID NO: 3036899 - RNA, 15 nt, Human
cagcucuucuccagg

SEQ ID NO: 3036900 - RNA, 16 nt, Human
cagcucuucuccaggc

SEQ ID NO: 3036901 - RNA, 17 nt, Human
cagcucuucuccaggcu

SEQ ID NO: 3036902 - RNA, 18 nt, Human
cagcucuucuccaggcug

SEQ ID NO: 3036903 - RNA, 19 nt, Human
cagcucuucuccaggcugu

SEQ ID NO: 3036904 - RNA, 23 nt, Human
cagcucuucuccaggcuguaucc

SEQ ID NO: 3036905 - RNA, 18 nt, Human
cagcugcgguccacccag

SEQ ID NO: 3036906 - RNA, 15 nt, Human
cagcugccugggauc

SEQ ID NO: 3036907 - RNA, 19 nt, Human
cagcugcgguccacccagg

SEQ ID NO: 3036908 - RNA, 20 nt, Human
cagcugcgguccacccagga

SEQ ID NO: 3036909 - RNA, 21 nt, Human
cagcugcgguccacccaggag

SEQ ID NO: 3036910 - RNA, 22 nt, Human
cagcugcgguccacccaggagc

SEQ ID NO: 3036911 - RNA, 23 nt, Human
cagcugcgguccacccaggagcc

SEQ ID NO: 3036912 - RNA, 24 nt, Human
cagcugcgguccacccaggagccc

SEQ ID NO: 3036913 - RNA, 23 nt, Human
cagcugccugggaucccucaucc

SEQ ID NO: 3036914 - RNA, 18 nt, Human
cagcugccugggaucccu

SEQ ID NO: 3036915 - RNA, 17 nt, Human
cagcugcuacuacuccu

SEQ ID NO: 3036916 - RNA, 22 nt, Human
cagcugcuugggcuucauccuc

SEQ ID NO: 3036917 - RNA, 21 nt, Human
cagcugcuugggcuucauccu

SEQ ID NO: 3036918 - RNA, 19 nt, Human
cagcugcuugggcuucauc

SEQ ID NO: 3036919 - RNA, 18 nt, Human
cagcugcuugggcuucau

SEQ ID NO: 3036920 - RNA, 16 nt, Human
cagcugcuugggcuuc

SEQ ID NO: 3036921 - RNA, 15 nt, Human
cagcugcuugggcuu

SEQ ID NO: 3036922 - RNA, 14 nt, Human
cagcugcuugggcu

SEQ ID NO: 3036923 - RNA, 13 nt, Human
cagcugcuugggc

SEQ ID NO: 3036924 - RNA, 23 nt, Human
cagcugcuuuugucuaugggacu

SEQ ID NO: 3036925 - RNA, 22 nt, Human
cagcugcuuuugucuaugggac

SEQ ID NO: 3036926 - RNA, 23 nt, Human
cagcugggguggggaccucaggc

SEQ ID NO: 3036927 - RNA, 22 nt, Human
cagcugggguggggaccucagg

SEQ ID NO: 3036928 - RNA, 21 nt, Human
cagcugggguggggaccucag

SEQ ID NO: 3036929 - RNA, 18 nt, Human
cagcugguugagguuuca

SEQ ID NO: 3036930 - RNA, 22 nt, Human
caggaagcugugagagcaguuu

SEQ ID NO: 3036931 - RNA, 13 nt, Human
caggaagcuguga

SEQ ID NO: 3036932 - RNA, 14 nt, Human
caggaagcugugag

SEQ ID NO: 3036933 - RNA, 23 nt, Human
caggaagcucagggccuggcuca

SEQ ID NO: 3036934 - RNA, 21 nt, Human
caggaagcucagggccuggcu

SEQ ID NO: 3036935 - RNA, 20 nt, Human
caggaagcucagggccuggc

SEQ ID NO: 3036936 - RNA, 13 nt, Human
caggaagcucagg

SEQ ID NO: 3036937 - RNA, 15 nt, Human
caggaagcucagggc

SEQ ID NO: 3036938 - RNA, 14 nt, Human
caggaagcucaggg

SEQ ID NO: 3036939 - RNA, 19 nt, Human
caggaagcucagggccugg

SEQ ID NO: 3036940 - RNA, 18 nt, Human
caggaagcucagggccug

SEQ ID NO: 3036941 - RNA, 17 nt, Human
caggaagcucagggccu

SEQ ID NO: 3036942 - RNA, 16 nt, Human
caggaagcucagggcc

SEQ ID NO: 3036943 - RNA, 22 nt, Human
caggaagccagcaggcucucag

SEQ ID NO: 3036944 - RNA, 21 nt, Human
caggaagccagcaggcucuca

SEQ ID NO: 3036945 - RNA, 19 nt, Human
caggaagccagcaggcucu

SEQ ID NO: 3036946 - RNA, 18 nt, Human
caggaagccagcaggcuc

SEQ ID NO: 3036947 - RNA, 17 nt, Human
caggaagccagcaggcu

SEQ ID NO: 3036948 - RNA, 16 nt, Human
caggaagccagcaggc

SEQ ID NO: 3036949 - RNA, 14 nt, Human
caggaagccagcag

SEQ ID NO: 3036950 - RNA, 20 nt, Human
caggaaguacuggagaaaau

SEQ ID NO: 3036951 - RNA, 18 nt, Human
caggaaguacuggagaaa

SEQ ID NO: 3036952 - RNA, 17 nt, Human
caggaaguacuggagaa

SEQ ID NO: 3036953 - RNA, 12 nt, Human
caggaaguacug

SEQ ID NO: 3036954 - RNA, 16 nt, Human
caggaaguacuggaga

SEQ ID NO: 3036955 - RNA, 14 nt, Human
caggaaguacugga

SEQ ID NO: 3036956 - RNA, 15 nt, Human
caggaaggcuaaagg

SEQ ID NO: 3036957 - RNA, 23 nt, Human
cagcuuuguuuguugucagcuga

SEQ ID NO: 3036958 - RNA, 22 nt, Human
cagcuuuguuuguugucagcug

SEQ ID NO: 3036959 - RNA, 21 nt, Human
cagcuuuguuuguugucagcu

SEQ ID NO: 3036960 - RNA, 12 nt, Human
cagcuuuguuug

SEQ ID NO: 3036961 - RNA, 18 nt, Human
cagcuuguaaauagcuca

SEQ ID NO: 3036962 - RNA, 19 nt, Human
cagcuuguaaauagcucag

SEQ ID NO: 3036963 - RNA, 20 nt, Human
cagcuuguaaauagcucagg

SEQ ID NO: 3036964 - RNA, 21 nt, Human
cagcuuguaaauagcucaggu

SEQ ID NO: 3036965 - RNA, 22 nt, Human
cagcuuguaaauagcucaggug

SEQ ID NO: 3036966 - RNA, 14 nt, Human
cagcuugaggguug

SEQ ID NO: 3036967 - RNA, 15 nt, Human
cagcuugaggguugg

SEQ ID NO: 3036968 - RNA, 21 nt, Human
cagcuugaccgugaggccaga

SEQ ID NO: 3036969 - RNA, 20 nt, Human
cagcuugaccgugaggccag

SEQ ID NO: 3036970 - RNA, 19 nt, Human
cagcuugaccgugaggcca

SEQ ID NO: 3036971 - RNA, 18 nt, Human
cagcuugaccgugaggcc

SEQ ID NO: 3036972 - RNA, 18 nt, Human
cagcuugaggguugggcu

SEQ ID NO: 3036973 - RNA, 19 nt, Human
cagcuugaggguugggcug

SEQ ID NO: 3036974 - RNA, 20 nt, Human
cagcuugaggguugggcugg

SEQ ID NO: 3036975 - RNA, 21 nt, Human
cagcuugaggguugggcuggu

SEQ ID NO: 3036976 - RNA, 19 nt, Human
cagcuucauuuccuguguc

SEQ ID NO: 3036977 - RNA, 20 nt, Human
cagcuucauuuccugugucu

SEQ ID NO: 3036978 - RNA, 21 nt, Human
cagcuucauuuccugugucuu

SEQ ID NO: 3036979 - RNA, 22 nt, Human
caggaagcucagggccuggcuc

SEQ ID NO: 3036980 - RNA, 20 nt, Human
cagagccccacccucagaug

SEQ ID NO: 3036981 - RNA, 12 nt, Human
cagagccugcag

SEQ ID NO: 3036982 - RNA, 13 nt, Human
cagaggaaggaga

SEQ ID NO: 3036983 - RNA, 13 nt, Human
cagagccugcagu

SEQ ID NO: 3036984 - RNA, 20 nt, Human
cagaggaaagcaaaggagau

SEQ ID NO: 3036985 - RNA, 21 nt, Human
cagagcccacgcccccacugg

SEQ ID NO: 3036986 - RNA, 20 nt, Human
cagagcccacgcccccacug

SEQ ID NO: 3036987 - RNA, 19 nt, Human
cagagcccacgcccccacu

SEQ ID NO: 3036988 - RNA, 17 nt, Human
cagagcccacgccccca

SEQ ID NO: 3036989 - RNA, 23 nt, Human
cagagcccacgcccccacuggug

SEQ ID NO: 3036990 - RNA, 13 nt, Human
cagaggagagagg

SEQ ID NO: 3036991 - RNA, 19 nt, Human
cagaggagagaggaccccc

SEQ ID NO: 3036992 - RNA, 15 nt, Human
cagaggagagaggac

SEQ ID NO: 3036993 - RNA, 11 nt, Human
cagaggcagcc

SEQ ID NO: 3036994 - RNA, 20 nt, Human
cagaggagagaggacccccu

SEQ ID NO: 3036995 - RNA, 23 nt, Human
cagagcaccuuagacagucccug

SEQ ID NO: 3036996 - RNA, 12 nt, Human
cagagcagagac

SEQ ID NO: 3036997 - RNA, 11 nt, Human
cagagcagaga

SEQ ID NO: 3036998 - RNA, 22 nt, Human
cagagcaccuuagacagucccu

SEQ ID NO: 3036999 - RNA, 21 nt, Human
cagagcaccuuagacaguccc

SEQ ID NO: 3037000 - RNA, 19 nt, Human
cagagcaccuuagacaguc

SEQ ID NO: 3037001 - RNA, 18 nt, Human
cagagcaccuuagacagu

SEQ ID NO: 3037002 - RNA, 21 nt, Human
cagagcagagaccaucccuga

SEQ ID NO: 3037003 - RNA, 19 nt, Human
cagagcagagaccaucccu

SEQ ID NO: 3037004 - RNA, 18 nt, Human
cagagcagagaccauccc

SEQ ID NO: 3037005 - RNA, 17 nt, Human
cagagcagagaccaucc

SEQ ID NO: 3037006 - RNA, 15 nt, Human
cagagcagagaccau

SEQ ID NO: 3037007 - RNA, 14 nt, Human
cagagcagagacca

SEQ ID NO: 3037008 - RNA, 13 nt, Human
cagagcagagacc

SEQ ID NO: 3037009 - RNA, 15 nt, Human
cagagcccaccuugg

SEQ ID NO: 3037010 - RNA, 17 nt, Human
cagagcccaccuuggcu

SEQ ID NO: 3037011 - RNA, 19 nt, Human
cagagcccaccuuggcuca

SEQ ID NO: 3037012 - RNA, 20 nt, Human
cagagcccaccuuggcucaa

SEQ ID NO: 3037013 - RNA, 16 nt, Human
cagagcccacgccccc

SEQ ID NO: 3037014 - RNA, 21 nt, Human
cagagaagauucuuguauuua

SEQ ID NO: 3037015 - RNA, 19 nt, Human
cagagaaugaaagggccca

SEQ ID NO: 3037016 - RNA, 15 nt, Human
cagagaauucucuua

SEQ ID NO: 3037017 - RNA, 20 nt, Human
cagagaaugaaagggcccag

SEQ ID NO: 3037018 - RNA, 21 nt, Human
cagagaaugaaagggcccaga

SEQ ID NO: 3037019 - RNA, 13 nt, Human
cagagaccauccc

SEQ ID NO: 3037020 - RNA, 16 nt, Human
cagagaccaucccuga

SEQ ID NO: 3037021 - RNA, 14 nt, Human
cagagaccaucccu

SEQ ID NO: 3037022 - RNA, 15 nt, Human
cagagacacaagccu

SEQ ID NO: 3037023 - RNA, 14 nt, Human
cagagacacaagcc

SEQ ID NO: 3037024 - RNA, 17 nt, Human
cagagacacaagccuuc

SEQ ID NO: 3037025 - RNA, 16 nt, Human
cagagacacaagccuu

SEQ ID NO: 3037026 - RNA, 16 nt, Human
cagagcaccuuagaca

SEQ ID NO: 3037027 - RNA, 20 nt, Human
cagagcaagugagacccugu

SEQ ID NO: 3037028 - RNA, 14 nt, Human
cagagcaagugaga

SEQ ID NO: 3037029 - RNA, 21 nt, Human
cagagaccaucccugaaggcc

SEQ ID NO: 3037030 - RNA, 20 nt, Human
cagagaccaucccugaaggc

SEQ ID NO: 3037031 - RNA, 19 nt, Human
cagagaccaucccugaagg

SEQ ID NO: 3037032 - RNA, 18 nt, Human
cagagaccaucccugaag

SEQ ID NO: 3037033 - RNA, 17 nt, Human
cagagaccaucccugaa

SEQ ID NO: 3037034 - RNA, 13 nt, Human
cagagacuccugc

SEQ ID NO: 3037035 - RNA, 15 nt, Human
cagagacuccugcag

SEQ ID NO: 3037036 - RNA, 14 nt, Human
cagagacuccugca

SEQ ID NO: 3037037 - RNA, 19 nt, Human
cagagacuccugcaggcag

SEQ ID NO: 3037038 - RNA, 18 nt, Human
cagagacuccugcaggca

SEQ ID NO: 3037039 - RNA, 17 nt, Human
cagagacuccugcaggc

SEQ ID NO: 3037040 - RNA, 16 nt, Human
cagagacuccugcagg

SEQ ID NO: 3037041 - RNA, 21 nt, Human
cagagugcuuuaccaauugaa

SEQ ID NO: 3037042 - RNA, 19 nt, Human
cagagugagacucugucuc

SEQ ID NO: 3037043 - RNA, 20 nt, Human
cagagugagacucugucuca

SEQ ID NO: 3037044 - RNA, 12 nt, Human
cagaguggcagu

SEQ ID NO: 3037045 - RNA, 22 nt, Human
cagagucucacuguugcccagg

SEQ ID NO: 3037046 - RNA, 23 nt, Human
cagagucucacuguugcccaggc

SEQ ID NO: 3037047 - RNA, 16 nt, Human
cagagugagacucugu

SEQ ID NO: 3037048 - RNA, 17 nt, Human
cagagugagacucuguc

SEQ ID NO: 3037049 - RNA, 18 nt, Human
cagagugagacucugucu

SEQ ID NO: 3037050 - RNA, 13 nt, Human
cagagucucacug

SEQ ID NO: 3037051 - RNA, 17 nt, Human
cagagucucacuguugc

SEQ ID NO: 3037052 - RNA, 19 nt, Human
cagagucucacuguugccc

SEQ ID NO: 3037053 - RNA, 20 nt, Human
cagagucucacuguugccca

SEQ ID NO: 3037054 - RNA, 21 nt, Human
cagagucucacuguugcccag

SEQ ID NO: 3037055 - RNA, 19 nt, Human
cagagggccugcaagggag

SEQ ID NO: 3037056 - RNA, 15 nt, Human
cagagggccugcaag

SEQ ID NO: 3037057 - RNA, 20 nt, Human
cagagggagugacagaggca

SEQ ID NO: 3037058 - RNA, 21 nt, Human
cagagggagugacagaggcag

SEQ ID NO: 3037059 - RNA, 22 nt, Human
cagagggagugacagaggcagc

SEQ ID NO: 3037060 - RNA, 23 nt, Human
cagagggagugacagaggcagcc

SEQ ID NO: 3037061 - RNA, 20 nt, Human
cagaggccaugggccuccug

SEQ ID NO: 3037062 - RNA, 21 nt, Human
cagaggccaugggccuccugu

SEQ ID NO: 3037063 - RNA, 23 nt, Human
cagaggcagccccauucugccug

SEQ ID NO: 3037064 - RNA, 19 nt, Human
cagaggccaugggccuccu

SEQ ID NO: 3037065 - RNA, 16 nt, Human
cagaggccaugggccu

SEQ ID NO: 3037066 - RNA, 12 nt, Human
cagaggcagccc

SEQ ID NO: 3037067 - RNA, 13 nt, Human
cagaggcagcccc

SEQ ID NO: 3037068 - RNA, 14 nt, Human
cagaggcagcccca

SEQ ID NO: 3037069 - RNA, 15 nt, Human
cagaggcagccccau

SEQ ID NO: 3037070 - RNA, 18 nt, Human
cagaggcagccccauucu

SEQ ID NO: 3037071 - RNA, 19 nt, Human
cagaggcagccccauucug

SEQ ID NO: 3037072 - RNA, 20 nt, Human
cagaggcagccccauucugc

SEQ ID NO: 3037073 - RNA, 22 nt, Human
cagaggcagccccauucugccu

SEQ ID NO: 3037074 - RNA, 23 nt, Human
cagaggcugccucucccaucacu

SEQ ID NO: 3037075 - RNA, 14 nt, Human
cagagggagugaca

SEQ ID NO: 3037076 - RNA, 16 nt, Human
cagagggagugacaga

SEQ ID NO: 3037077 - RNA, 18 nt, Human
cagagggagugacagagg

SEQ ID NO: 3037078 - RNA, 19 nt, Human
cagagggagugacagaggc

SEQ ID NO: 3037079 - RNA, 13 nt, Human
cagaggcugccuc

SEQ ID NO: 3037080 - RNA, 17 nt, Human
cagaugcacaugagcug

SEQ ID NO: 3037081 - RNA, 13 nt, Human
cagaugcaccagc

SEQ ID NO: 3037082 - RNA, 14 nt, Human
cagaugcaccagcc

SEQ ID NO: 3037083 - RNA, 16 nt, Human
cagaugcaccagcccu

SEQ ID NO: 3037084 - RNA, 17 nt, Human
cagaugcaccagcccuu

SEQ ID NO: 3037085 - RNA, 22 nt, Human
cagaugcaccagcccuuagcag

SEQ ID NO: 3037086 - RNA, 20 nt, Human
cagauacaggaaaagcugcu

SEQ ID NO: 3037087 - RNA, 21 nt, Human
cagauacaggaaaagcugcug

SEQ ID NO: 3037088 - RNA, 22 nt, Human
cagauacaggaaaagcugcuga

SEQ ID NO: 3037089 - RNA, 20 nt, Human
cagaucucuaacuucaccau

SEQ ID NO: 3037090 - RNA, 19 nt, Human
cagaguuguuacauuuuua

SEQ ID NO: 3037091 - RNA, 15 nt, Human
cagaguuguuacauu

SEQ ID NO: 3037092 - RNA, 18 nt, Human
cagaguuguuacauuuuu

SEQ ID NO: 3037093 - RNA, 22 nt, Human
cagaguugaagacagagcuaca

SEQ ID NO: 3037094 - RNA, 14 nt, Human
cagaguuguuacau

SEQ ID NO: 3037095 - RNA, 20 nt, Human
cagaguugaagacagagcua

SEQ ID NO: 3037096 - RNA, 19 nt, Human
cagaguugaagacagagcu

SEQ ID NO: 3037097 - RNA, 18 nt, Human
cagaguugaagacagagc

SEQ ID NO: 3037098 - RNA, 17 nt, Human
cagaguugaagacagag

SEQ ID NO: 3037099 - RNA, 14 nt, Human
cagaguugaagaca

SEQ ID NO: 3037100 - RNA, 16 nt, Human
cagaguugaagacaga

SEQ ID NO: 3037101 - RNA, 15 nt, Human
cagaguugaagacag

SEQ ID NO: 3037102 - RNA, 17 nt, Human
cagaacuauguuuuugu

SEQ ID NO: 3037103 - RNA, 21 nt, Human
cagaagacacugaugggcaac

SEQ ID NO: 3037104 - RNA, 18 nt, Human
cagaagucaaggcuuaga

SEQ ID NO: 3037105 - RNA, 16 nt, Human
cagaagucaaggcuua

SEQ ID NO: 3037106 - RNA, 17 nt, Human
cagaagucaaggcuuag

SEQ ID NO: 3037107 - RNA, 23 nt, Human
cagaaucgcuccaccuugcagcu

SEQ ID NO: 3037108 - RNA, 21 nt, Human
cagaaucgcuccaccuugcag

SEQ ID NO: 3037109 - RNA, 17 nt, Human
cagaaucucaaauaacu

SEQ ID NO: 3037110 - RNA, 18 nt, Human
cagaaucucaaauaacua

SEQ ID NO: 3037111 - RNA, 19 nt, Human
cagaaggaagacuucaucc

SEQ ID NO: 3037112 - RNA, 18 nt, Human
cagaaggaagacuucauc

SEQ ID NO: 3037113 - RNA, 17 nt, Human
cagaaggaagacuucau

SEQ ID NO: 3037114 - RNA, 16 nt, Human
cagaaggaagacuuca

SEQ ID NO: 3037115 - RNA, 23 nt, Human
cagaaaauggaagacagcucuua

SEQ ID NO: 3037116 - RNA, 22 nt, Human
cagaaaauggaagacagcucuu

SEQ ID NO: 3037117 - RNA, 21 nt, Human
cagaaaauggaagacagcucu

SEQ ID NO: 3037118 - RNA, 20 nt, Human
cagaaaauggaagacagcuc

SEQ ID NO: 3037119 - RNA, 16 nt, Human
cagaaaauggaagaca

SEQ ID NO: 3037120 - RNA, 22 nt, Human
cacuuuuguucuugguuuguaa

SEQ ID NO: 3037121 - RNA, 14 nt, Human
cacuuuuguucuug

SEQ ID NO: 3037122 - RNA, 16 nt, Human
cacuuugggaggccaa

SEQ ID NO: 3037123 - RNA, 13 nt, Human
cacuuugggaggc

SEQ ID NO: 3037124 - RNA, 12 nt, Human
cacuuugggagg

SEQ ID NO: 3037125 - RNA, 23 nt, Human
cacuuuguucuggcucuuccagg

SEQ ID NO: 3037126 - RNA, 16 nt, Human
cacuuuguucuggcuc

SEQ ID NO: 3037127 - RNA, 14 nt, Human
cacuuuguucuggc

SEQ ID NO: 3037128 - RNA, 13 nt, Human
cacuuuguucugg

SEQ ID NO: 3037129 - RNA, 22 nt, Human
cacuuucuagccagaggagaga

SEQ ID NO: 3037130 - RNA, 20 nt, Human
cagacaguuaagagaaauga

SEQ ID NO: 3037131 - RNA, 19 nt, Human
cagacaccuugacagggca

SEQ ID NO: 3037132 - RNA, 20 nt, Human
cagacaccuugacagggcac

SEQ ID NO: 3037133 - RNA, 22 nt, Human
cagacaccuugacagggcacac

SEQ ID NO: 3037134 - RNA, 19 nt, Human
cagacauacuaaccagcag

SEQ ID NO: 3037135 - RNA, 13 nt, Human
cagacacaggccc

SEQ ID NO: 3037136 - RNA, 14 nt, Human
cagacacaggcccg

SEQ ID NO: 3037137 - RNA, 15 nt, Human
cagacacaggcccgg

SEQ ID NO: 3037138 - RNA, 17 nt, Human
cagacacaggcccggcu

SEQ ID NO: 3037139 - RNA, 18 nt, Human
cagacacaggcccggcuc

SEQ ID NO: 3037140 - RNA, 21 nt, Human
cagacacaggcccggcuccag

SEQ ID NO: 3037141 - RNA, 22 nt, Human
cagacacaggcccggcuccagg

SEQ ID NO: 3037142 - RNA, 23 nt, Human
cagacacaggcccggcuccaggc

SEQ ID NO: 3037143 - RNA, 23 nt, Human
cagacacauguccaagaagccca

SEQ ID NO: 3037144 - RNA, 22 nt, Human
cagacacauguccaagaagccc

SEQ ID NO: 3037145 - RNA, 21 nt, Human
cagacacauguccaagaagcc

SEQ ID NO: 3037146 - RNA, 17 nt, Human
cagacacauguccaaga

SEQ ID NO: 3037147 - RNA, 14 nt, Human
cagacacaugucca

SEQ ID NO: 3037148 - RNA, 22 nt, Human
cagacaaagcgugguggacaug

SEQ ID NO: 3037149 - RNA, 20 nt, Human
cagacaacaaaccuguuucu

SEQ ID NO: 3037150 - RNA, 12 nt, Human
cagacaaagcgu

SEQ ID NO: 3037151 - RNA, 24 nt, Human
cagaauuucccaaagcagugcaug

SEQ ID NO: 3037152 - RNA, 20 nt, Human
cagaauuucccaaagcagug

SEQ ID NO: 3037153 - RNA, 19 nt, Human
cagaauuucccaaagcagu

SEQ ID NO: 3037154 - RNA, 18 nt, Human
cagaauuucccaaagcag

SEQ ID NO: 3037155 - RNA, 17 nt, Human
cagaauuucccaaagca

SEQ ID NO: 3037156 - RNA, 11 nt, Human
cagaauucuca

SEQ ID NO: 3037157 - RNA, 15 nt, Human
cagaauucucuaguu

SEQ ID NO: 3037158 - RNA, 18 nt, Human
cagaauucucuaguuuga

SEQ ID NO: 3037159 - RNA, 14 nt, Human
cagaauuucccaaa

SEQ ID NO: 3037160 - RNA, 16 nt, Human
cagacccggcugcgug

SEQ ID NO: 3037161 - RNA, 12 nt, Human
cagacccugccc

SEQ ID NO: 3037162 - RNA, 14 nt, Human
cagacccugcccug

SEQ ID NO: 3037163 - RNA, 13 nt, Human
cagacccugcccu

SEQ ID NO: 3037164 - RNA, 12 nt, Human
cagacccggcug

SEQ ID NO: 3037165 - RNA, 14 nt, Human
cagacccggcugcg

SEQ ID NO: 3037166 - RNA, 21 nt, Human
cagacccugcccugugggccc

SEQ ID NO: 3037167 - RNA, 17 nt, Human
cagacccugcccugugg

SEQ ID NO: 3037168 - RNA, 16 nt, Human
cagacccugcccugug

SEQ ID NO: 3037169 - RNA, 15 nt, Human
cagacccugcccugu

SEQ ID NO: 3037170 - RNA, 22 nt, Human
cagacccugcccugugggcccc

SEQ ID NO: 3037171 - RNA, 20 nt, Human
cagaccacaaaacuuuucua

SEQ ID NO: 3037172 - RNA, 14 nt, Human
cagaccacaaaacu

SEQ ID NO: 3037173 - RNA, 19 nt, Human
cagagaaaguacuucucca

SEQ ID NO: 3037174 - RNA, 23 nt, Human
cagagaaaguacuucuccacccu

SEQ ID NO: 3037175 - RNA, 16 nt, Human
cagacaacaaaccugu

SEQ ID NO: 3037176 - RNA, 20 nt, Human
cacccucagaugcacaugag

SEQ ID NO: 3037177 - RNA, 12 nt, Human
cacccggccccu

SEQ ID NO: 3037178 - RNA, 19 nt, Human
cacccgcuaagagggaggg

SEQ ID NO: 3037179 - RNA, 13 nt, Human
cacccggccccug

SEQ ID NO: 3037180 - RNA, 14 nt, Human
cacccggccccugc

SEQ ID NO: 3037181 - RNA, 16 nt, Human
cacccggccccugcug

SEQ ID NO: 3037182 - RNA, 17 nt, Human
cacccggccccugcugg

SEQ ID NO: 3037183 - RNA, 18 nt, Human
cacccggccccugcuggu

SEQ ID NO: 3037184 - RNA, 21 nt, Human
cacccggccccugcugguuca

SEQ ID NO: 3037185 - RNA, 13 nt, Human
cacauauugauuu

SEQ ID NO: 3037186 - RNA, 20 nt, Human
caccccucaacaccucugca

SEQ ID NO: 3037187 - RNA, 13 nt, Human
caccgcagacagg

SEQ ID NO: 3037188 - RNA, 12 nt, Human
caccgcagacag

SEQ ID NO: 3037189 - RNA, 18 nt, Human
caccgcagacaggaccag

SEQ ID NO: 3037190 - RNA, 17 nt, Human
caccgcagacaggacca

SEQ ID NO: 3037191 - RNA, 15 nt, Human
caccgcagacaggac

SEQ ID NO: 3037192 - RNA, 14 nt, Human
caccgcagacagga

SEQ ID NO: 3037193 - RNA, 22 nt, Human
caccgaaaacguggcugcuuca

SEQ ID NO: 3037194 - RNA, 21 nt, Human
caccgaaaacguggcugcuuc

SEQ ID NO: 3037195 - RNA, 19 nt, Human
caccgaaaacguggcugcu

SEQ ID NO: 3037196 - RNA, 18 nt, Human
caccgaaaacguggcugc

SEQ ID NO: 3037197 - RNA, 15 nt, Human
caccgaaaacguggc

SEQ ID NO: 3037198 - RNA, 23 nt, Human
cacccugugauggggcccugccu

SEQ ID NO: 3037199 - RNA, 22 nt, Human
cacccugugauggggcccugcc

SEQ ID NO: 3037200 - RNA, 21 nt, Human
cacccugugauggggcccugc

SEQ ID NO: 3037201 - RNA, 20 nt, Human
cacccugugauggggcccug

SEQ ID NO: 3037202 - RNA, 18 nt, Human
cacccugugauggggccc

SEQ ID NO: 3037203 - RNA, 15 nt, Human
cacccugugaugggg

SEQ ID NO: 3037204 - RNA, 12 nt, Human
cacccugugaug

SEQ ID NO: 3037205 - RNA, 11 nt, Human
cacccugugau

SEQ ID NO: 3037206 - RNA, 20 nt, Human
caccugcggugcuaucuccc

SEQ ID NO: 3037207 - RNA, 23 nt, Human
caccugcggugcuaucuccccca

SEQ ID NO: 3037208 - RNA, 20 nt, Human
caccuggaauauauaaccag

SEQ ID NO: 3037209 - RNA, 19 nt, Human
caccucugcacaagcugca

SEQ ID NO: 3037210 - RNA, 18 nt, Human
caccucugcacaagcugc

SEQ ID NO: 3037211 - RNA, 19 nt, Human
caccucucucacuccuuga

SEQ ID NO: 3037212 - RNA, 18 nt, Human
caccucucucacuccuug

SEQ ID NO: 3037213 - RNA, 17 nt, Human
caccucucucacuccuu

SEQ ID NO: 3037214 - RNA, 15 nt, Human
caccucucucacucc

SEQ ID NO: 3037215 - RNA, 14 nt, Human
caccugaagacuca

SEQ ID NO: 3037216 - RNA, 15 nt, Human
caccugaagacucau

SEQ ID NO: 3037217 - RNA, 23 nt, Human
caccugaagacucauucuucugu

SEQ ID NO: 3037218 - RNA, 23 nt, Human
caccuggccucugcacuccccug

SEQ ID NO: 3037219 - RNA, 20 nt, Human
caccuggccucugcacuccc

SEQ ID NO: 3037220 - RNA, 19 nt, Human
caccuggccucugcacucc

SEQ ID NO: 3037221 - RNA, 18 nt, Human
caccuggccucugcacuc

SEQ ID NO: 3037222 - RNA, 17 nt, Human
caccuggccucugcacu

SEQ ID NO: 3037223 - RNA, 15 nt, Human
caccuggccucugca

SEQ ID NO: 3037224 - RNA, 14 nt, Human
caccuggccucugc

SEQ ID NO: 3037225 - RNA, 13 nt, Human
caccuggccucug

SEQ ID NO: 3037226 - RNA, 12 nt, Human
caccuggccucu

SEQ ID NO: 3037227 - RNA, 21 nt, Human
caccgcagacaggaccaggga

SEQ ID NO: 3037228 - RNA, 14 nt, Human
caccgggcacucag

SEQ ID NO: 3037229 - RNA, 20 nt, Human
caccggcuggccuggccccu

SEQ ID NO: 3037230 - RNA, 18 nt, Human
caccggcuggccuggccc

SEQ ID NO: 3037231 - RNA, 17 nt, Human
caccggcuggccuggcc

SEQ ID NO: 3037232 - RNA, 14 nt, Human
caccggcuggccug

SEQ ID NO: 3037233 - RNA, 16 nt, Human
caccggcuggccuggc

SEQ ID NO: 3037234 - RNA, 15 nt, Human
caccggcuggccugg

SEQ ID NO: 3037235 - RNA, 15 nt, Human
caccgggcacucaga

SEQ ID NO: 3037236 - RNA, 22 nt, Human
caccgggcacucagaagacacu

SEQ ID NO: 3037237 - RNA, 15 nt, Human
caccgggccacagag

SEQ ID NO: 3037238 - RNA, 18 nt, Human
caccgggccacagagaaa

SEQ ID NO: 3037239 - RNA, 17 nt, Human
caccucucccuuggauu

SEQ ID NO: 3037240 - RNA, 14 nt, Human
caccucucccuugg

SEQ ID NO: 3037241 - RNA, 13 nt, Human
caccucucccuug

SEQ ID NO: 3037242 - RNA, 14 nt, Human
caccuccugccucg

SEQ ID NO: 3037243 - RNA, 13 nt, Human
caccuccugccuc

SEQ ID NO: 3037244 - RNA, 11 nt, Human
caccuccugcc

SEQ ID NO: 3037245 - RNA, 16 nt, Human
cacgccagauucuuuc

SEQ ID NO: 3037246 - RNA, 15 nt, Human
cacgcacacugucug

SEQ ID NO: 3037247 - RNA, 17 nt, Human
cacgcacuucgggaggu

SEQ ID NO: 3037248 - RNA, 16 nt, Human
cacgauuucuguuuag

SEQ ID NO: 3037249 - RNA, 12 nt, Human
cacgauuucugu

SEQ ID NO: 3037250 - RNA, 14 nt, Human
cacgauuucuguuu

SEQ ID NO: 3037251 - RNA, 18 nt, Human
cacgcccccacuggugac

SEQ ID NO: 3037252 - RNA, 17 nt, Human
cacgcccccacugguga

SEQ ID NO: 3037253 - RNA, 23 nt, Human
cacgccagauucuuuccugaggc

SEQ ID NO: 3037254 - RNA, 15 nt, Human
cacgcccccacuggu

SEQ ID NO: 3037255 - RNA, 13 nt, Human
cacgcccccacug

SEQ ID NO: 3037256 - RNA, 13 nt, Human
cacgccacugcac

SEQ ID NO: 3037257 - RNA, 15 nt, Human
cacgccacugcacua

SEQ ID NO: 3037258 - RNA, 19 nt, Human
cacgccagauucuuuccug

SEQ ID NO: 3037259 - RNA, 22 nt, Human
cacgccagauucuuuccugagg

SEQ ID NO: 3037260 - RNA, 20 nt, Human
cacgccagauucuuuccuga

SEQ ID NO: 3037261 - RNA, 15 nt, Human
caccuugacagggca

SEQ ID NO: 3037262 - RNA, 16 nt, Human
caccuugacagggcac

SEQ ID NO: 3037263 - RNA, 13 nt, Human
caccuugacaggg

SEQ ID NO: 3037264 - RNA, 17 nt, Human
cacgacugcccggcagg

SEQ ID NO: 3037265 - RNA, 16 nt, Human
cacgacugcccggcag

SEQ ID NO: 3037266 - RNA, 22 nt, Human
cacgaauauugcugauggugca

SEQ ID NO: 3037267 - RNA, 19 nt, Human
cacgaauauugcugauggu

SEQ ID NO: 3037268 - RNA, 16 nt, Human
cacgaauauugcugau

SEQ ID NO: 3037269 - RNA, 23 nt, Human
caccuuagacagucccugccaau

SEQ ID NO: 3037270 - RNA, 21 nt, Human
caccuuagacagucccugcca

SEQ ID NO: 3037271 - RNA, 19 nt, Human
caccuuagacagucccugc

SEQ ID NO: 3037272 - RNA, 18 nt, Human
caccuuagacagucccug

SEQ ID NO: 3037273 - RNA, 16 nt, Human
caccuuagacaguccc

SEQ ID NO: 3037274 - RNA, 14 nt, Human
caccuuagacaguc

SEQ ID NO: 3037275 - RNA, 20 nt, Human
cacgccuguaauccuagcac

SEQ ID NO: 3037276 - RNA, 19 nt, Human
cacgccuguaauccuagca

SEQ ID NO: 3037277 - RNA, 15 nt, Human
cacgcgugcacacac

SEQ ID NO: 3037278 - RNA, 16 nt, Human
cacgcgugcacacacc

SEQ ID NO: 3037279 - RNA, 21 nt, Human
cacgcgugcacacaccagagc

SEQ ID NO: 3037280 - RNA, 23 nt, Human
cacgcgugcacacaccagagccc

SEQ ID NO: 3037281 - RNA, 15 nt, Human
cacggcucacugcag

SEQ ID NO: 3037282 - RNA, 20 nt, Human
cacgcuggaccuugaacugg

SEQ ID NO: 3037283 - RNA, 17 nt, Human
cacgcuggaccuugaac

SEQ ID NO: 3037284 - RNA, 16 nt, Human
cacggcucacugcagc

SEQ ID NO: 3037285 - RNA, 17 nt, Human
cacggcucacugcagcc

SEQ ID NO: 3037286 - RNA, 19 nt, Human
cacggcucacugcagccuc

SEQ ID NO: 3037287 - RNA, 20 nt, Human
cacggcucacugcagccuca

SEQ ID NO: 3037288 - RNA, 18 nt, Human
cacguacacacacauaca

SEQ ID NO: 3037289 - RNA, 19 nt, Human
cacguacacacacauacac

SEQ ID NO: 3037290 - RNA, 14 nt, Human
cacguacacacaca

SEQ ID NO: 3037291 - RNA, 23 nt, Human
cacguuucuaaaggcuaccuuug

SEQ ID NO: 3037292 - RNA, 12 nt, Human
cacguuucuaaa

SEQ ID NO: 3037293 - RNA, 14 nt, Human
cacguuucuaaagg

SEQ ID NO: 3037294 - RNA, 19 nt, Human
cacgugguccuaaucuucu

SEQ ID NO: 3037295 - RNA, 16 nt, Human
cacgugguccuaaucu

SEQ ID NO: 3037296 - RNA, 13 nt, Human
cacucuauaacaa

SEQ ID NO: 3037297 - RNA, 14 nt, Human
cacucuggcagcuc

SEQ ID NO: 3037298 - RNA, 13 nt, Human
cacucuggcagcu

SEQ ID NO: 3037299 - RNA, 12 nt, Human
cacucuggcagc

SEQ ID NO: 3037300 - RNA, 12 nt, Human
cacucuccuugg

SEQ ID NO: 3037301 - RNA, 23 nt, Human
cacucugagacucgcgacaaugc

SEQ ID NO: 3037302 - RNA, 12 nt, Human
cacucugagacu

SEQ ID NO: 3037303 - RNA, 17 nt, Human
cacucccugcaaccuga

SEQ ID NO: 3037304 - RNA, 21 nt, Human
cacuccuucacagaugggugc

SEQ ID NO: 3037305 - RNA, 14 nt, Human
cacuccuucacaga

SEQ ID NO: 3037306 - RNA, 15 nt, Human
cacuccccugcuggg

SEQ ID NO: 3037307 - RNA, 12 nt, Human
cacucccugcaa

SEQ ID NO: 3037308 - RNA, 16 nt, Human
cacucccugcaaccug

SEQ ID NO: 3037309 - RNA, 13 nt, Human
cacucccugcaac

SEQ ID NO: 3037310 - RNA, 22 nt, Human
cacucauugaccugaggcccuu

SEQ ID NO: 3037311 - RNA, 20 nt, Human
cacucauugaccugaggccc

SEQ ID NO: 3037312 - RNA, 19 nt, Human
cacucauugaccugaggcc

SEQ ID NO: 3037313 - RNA, 18 nt, Human
cacucauugaccugaggc

SEQ ID NO: 3037314 - RNA, 15 nt, Human
cacucauugaccuga

SEQ ID NO: 3037315 - RNA, 16 nt, Human
cacucaguccauagca

SEQ ID NO: 3037316 - RNA, 15 nt, Human
cacuauguugcccag

SEQ ID NO: 3037317 - RNA, 16 nt, Human
cacuauguugcccagg

SEQ ID NO: 3037318 - RNA, 17 nt, Human
cacuauguugcccaggc

SEQ ID NO: 3037319 - RNA, 18 nt, Human
cacuauguugcccaggca

SEQ ID NO: 3037320 - RNA, 19 nt, Human
cacuauguugcccaggcag

SEQ ID NO: 3037321 - RNA, 14 nt, Human
cacuauagccuagg

SEQ ID NO: 3037322 - RNA, 18 nt, Human
cacuauaauguaagcucu

SEQ ID NO: 3037323 - RNA, 21 nt, Human
cacuauagccuaggugacaga

SEQ ID NO: 3037324 - RNA, 14 nt, Human
cacuauaauguaag

SEQ ID NO: 3037325 - RNA, 17 nt, Human
cacuaaggugugcucug

SEQ ID NO: 3037326 - RNA, 18 nt, Human
cacuaaggugugcucuga

SEQ ID NO: 3037327 - RNA, 18 nt, Human
cacuaaccacgcuggacc

SEQ ID NO: 3037328 - RNA, 14 nt, Human
cacuaaccacgcug

SEQ ID NO: 3037329 - RNA, 15 nt, Human
cacuaaccacgcugg

SEQ ID NO: 3037330 - RNA, 16 nt, Human
cacuaaccacgcugga

SEQ ID NO: 3037331 - RNA, 12 nt, Human
cacucagaagac

SEQ ID NO: 3037332 - RNA, 16 nt, Human
cacucagaagacacug

SEQ ID NO: 3037333 - RNA, 17 nt, Human
cacucagaagacacuga

SEQ ID NO: 3037334 - RNA, 19 nt, Human
cacucacauuuauucugcu

SEQ ID NO: 3037335 - RNA, 20 nt, Human
cacucacauuuauucugcuc

SEQ ID NO: 3037336 - RNA, 22 nt, Human
cacucagaagacacugaugggc

SEQ ID NO: 3037337 - RNA, 18 nt, Human
cacucagaagacacugau

SEQ ID NO: 3037338 - RNA, 19 nt, Human
cacucagaagacacugaug

SEQ ID NO: 3037339 - RNA, 20 nt, Human
cacuauguugcccaggcagg

SEQ ID NO: 3037340 - RNA, 21 nt, Human
cacuauguugcccaggcaggu

SEQ ID NO: 3037341 - RNA, 19 nt, Human
cacucaaaagcugggcagg

SEQ ID NO: 3037342 - RNA, 18 nt, Human
cacucaaaagcugggcag

SEQ ID NO: 3037343 - RNA, 17 nt, Human
cacucaaaagcugggca

SEQ ID NO: 3037344 - RNA, 15 nt, Human
cacucaaaagcuggg

SEQ ID NO: 3037345 - RNA, 20 nt, Human
cacucaaaagcugggcaggu

SEQ ID NO: 3037346 - RNA, 19 nt, Human
cacuucacgcccuuggcca

SEQ ID NO: 3037347 - RNA, 17 nt, Human
cacuucacgcccuuggc

SEQ ID NO: 3037348 - RNA, 21 nt, Human
cacuucacgcccuuggccaug

SEQ ID NO: 3037349 - RNA, 20 nt, Human
cacuucacgcccuuggccau

SEQ ID NO: 3037350 - RNA, 21 nt, Human
cacuucagcugacuuuucugu

SEQ ID NO: 3037351 - RNA, 12 nt, Human
cacuucagcuga

SEQ ID NO: 3037352 - RNA, 16 nt, Human
cacuucccuacaugga

SEQ ID NO: 3037353 - RNA, 23 nt, Human
cacuucgggaggucgaggcagga

SEQ ID NO: 3037354 - RNA, 21 nt, Human
cacuucgggaggucgaggcag

SEQ ID NO: 3037355 - RNA, 22 nt, Human
cacuucugccauauucuguugg

SEQ ID NO: 3037356 - RNA, 24 nt, Human
cacuugcagacucuacagaggcca

SEQ ID NO: 3037357 - RNA, 14 nt, Human
cacuugcagacucu

SEQ ID NO: 3037358 - RNA, 18 nt, Human
cacuugcagacucuacag

SEQ ID NO: 3037359 - RNA, 19 nt, Human
cacuugcagacucuacaga

SEQ ID NO: 3037360 - RNA, 22 nt, Human
cacuugcagacucuacagaggc

SEQ ID NO: 3037361 - RNA, 18 nt, Human
cacuuucuagccagagga

SEQ ID NO: 3037362 - RNA, 20 nt, Human
cacuuucuagccagaggaga

SEQ ID NO: 3037363 - RNA, 19 nt, Human
cacuuucuagccagaggag

SEQ ID NO: 3037364 - RNA, 20 nt, Human
cacuugagaauuacccuuuu

SEQ ID NO: 3037365 - RNA, 19 nt, Human
cacuugacaucaacugcau

SEQ ID NO: 3037366 - RNA, 17 nt, Human
cacuugagaauuacccu

SEQ ID NO: 3037367 - RNA, 13 nt, Human
cacuugaguccag

SEQ ID NO: 3037368 - RNA, 13 nt, Human
cacuugcagacuc

SEQ ID NO: 3037369 - RNA, 16 nt, Human
cacuugacaucaacug

SEQ ID NO: 3037370 - RNA, 18 nt, Human
cacugguuuguucccugu

SEQ ID NO: 3037371 - RNA, 16 nt, Human
cacugguuuuaaauau

SEQ ID NO: 3037372 - RNA, 15 nt, Human
cacugguuuuaaaua

SEQ ID NO: 3037373 - RNA, 13 nt, Human
cacugguuuuaaa

SEQ ID NO: 3037374 - RNA, 12 nt, Human
cacugguuuuaa

SEQ ID NO: 3037375 - RNA, 14 nt, Human
cacugguuugguuc

SEQ ID NO: 3037376 - RNA, 16 nt, Human
cacuguccuauuauau

SEQ ID NO: 3037377 - RNA, 13 nt, Human
cacugugaagaga

SEQ ID NO: 3037378 - RNA, 14 nt, Human
cacugugccaugug

SEQ ID NO: 3037379 - RNA, 22 nt, Human
cacuguucucugcccuccaaga

SEQ ID NO: 3037380 - RNA, 21 nt, Human
cacuguucucugcccuccaag

SEQ ID NO: 3037381 - RNA, 19 nt, Human
cacuguucucugcccucca

SEQ ID NO: 3037382 - RNA, 17 nt, Human
cacuguucucugcccuc

SEQ ID NO: 3037383 - RNA, 16 nt, Human
cacuguucucugcccu

SEQ ID NO: 3037384 - RNA, 15 nt, Human
cacuguucucugccc

SEQ ID NO: 3037385 - RNA, 14 nt, Human
cacuguucucugcc

SEQ ID NO: 3037386 - RNA, 13 nt, Human
cacuguucucugc

SEQ ID NO: 3037387 - RNA, 15 nt, Human
cacugugcugagucu

SEQ ID NO: 3037388 - RNA, 13 nt, Human
cacugugcugagu

SEQ ID NO: 3037389 - RNA, 18 nt, Human
cacugugccaugugccag

SEQ ID NO: 3037390 - RNA, 15 nt, Human
cacugugccaugugc

SEQ ID NO: 3037391 - RNA, 16 nt, Human
cacugugccaugugcc

SEQ ID NO: 3037392 - RNA, 22 nt, Human
cacugugcugagucugaaggcu

SEQ ID NO: 3037393 - RNA, 21 nt, Human
cacugugcugagucugaaggc

SEQ ID NO: 3037394 - RNA, 20 nt, Human
cacugugcugagucugaagg

SEQ ID NO: 3037395 - RNA, 17 nt, Human
cacugugcugagucuga

SEQ ID NO: 3037396 - RNA, 21 nt, Human
cacugcuuuuggucuguguga

SEQ ID NO: 3037397 - RNA, 17 nt, Human
cacuggaacacuaauga

SEQ ID NO: 3037398 - RNA, 16 nt, Human
cacugcuuccagugag

SEQ ID NO: 3037399 - RNA, 15 nt, Human
cacugcuuccaguga

SEQ ID NO: 3037400 - RNA, 14 nt, Human
cacugcuuccagug

SEQ ID NO: 3037401 - RNA, 13 nt, Human
cacugcuuaacuu

SEQ ID NO: 3037402 - RNA, 20 nt, Human
cacugcuuuuggucugugug

SEQ ID NO: 3037403 - RNA, 22 nt, Human
cacugcuuccagugaggcucug

SEQ ID NO: 3037404 - RNA, 21 nt, Human
cacugcuuccagugaggcucu

SEQ ID NO: 3037405 - RNA, 20 nt, Human
cacugcuuccagugaggcuc

SEQ ID NO: 3037406 - RNA, 19 nt, Human
cacugcuuccagugaggcu

SEQ ID NO: 3037407 - RNA, 18 nt, Human
cacugcuuccagugaggc

SEQ ID NO: 3037408 - RNA, 14 nt, Human
cacugcaccgggcc

SEQ ID NO: 3037409 - RNA, 15 nt, Human
cacugcaccgggcca

SEQ ID NO: 3037410 - RNA, 16 nt, Human
cacugcaccgggccac

SEQ ID NO: 3037411 - RNA, 18 nt, Human
cacugcaccgggccacag

SEQ ID NO: 3037412 - RNA, 19 nt, Human
cacugcaccgggccacaga

SEQ ID NO: 3037413 - RNA, 18 nt, Human
cacugcacuauagccuag

SEQ ID NO: 3037414 - RNA, 12 nt, Human
cacugcucuggu

SEQ ID NO: 3037415 - RNA, 23 nt, Human
cacugagacagcccgggcucugc

SEQ ID NO: 3037416 - RNA, 14 nt, Human
cacugaugggcaac

SEQ ID NO: 3037417 - RNA, 18 nt, Human
cacugaugggcaaccccc

SEQ ID NO: 3037418 - RNA, 24 nt, Human
cacugaugggcaacccccagccug

SEQ ID NO: 3037419 - RNA, 14 nt, Human
cacugcaaccuccg

SEQ ID NO: 3037420 - RNA, 16 nt, Human
cacugcaaccuccgcc

SEQ ID NO: 3037421 - RNA, 23 nt, Human
cacugcaaccuccgccucuuggg

SEQ ID NO: 3037422 - RNA, 13 nt, Human
cacugcaaccucc

SEQ ID NO: 3037423 - RNA, 23 nt, Human
cacucuggcagcucagagagggu

SEQ ID NO: 3037424 - RNA, 21 nt, Human
cacucuggcagcucagagagg

SEQ ID NO: 3037425 - RNA, 20 nt, Human
cacucuggcagcucagagag

SEQ ID NO: 3037426 - RNA, 19 nt, Human
cacucuggcagcucagaga

SEQ ID NO: 3037427 - RNA, 17 nt, Human
cacucuggcagcucaga

SEQ ID NO: 3037428 - RNA, 16 nt, Human
cacucuggcagcucag

SEQ ID NO: 3037429 - RNA, 15 nt, Human
cacucuggcagcuca

SEQ ID NO: 3037430 - RNA, 15 nt, Human
cacucugucgcccag

SEQ ID NO: 3037431 - RNA, 16 nt, Human
cacucugucgcccagu

SEQ ID NO: 3037432 - RNA, 19 nt, Human
cacucugucgcccagucug

SEQ ID NO: 3037433 - RNA, 23 nt, Human
cacugacauuguuggccaaagcc

SEQ ID NO: 3037434 - RNA, 13 nt, Human
cacugagacagcc

SEQ ID NO: 3037435 - RNA, 12 nt, Human
cacugagacagc

SEQ ID NO: 3037436 - RNA, 22 nt, Human
cacugagacagcccgggcucug

SEQ ID NO: 3037437 - RNA, 19 nt, Human
cacugagacagcccgggcu

SEQ ID NO: 3037438 - RNA, 17 nt, Human
cacugagacagcccggg

SEQ ID NO: 3037439 - RNA, 14 nt, Human
cacugagacagccc

SEQ ID NO: 3037440 - RNA, 12 nt, Human
cuagccagagga

SEQ ID NO: 3037441 - RNA, 19 nt, Human
cuaggccuggccagaugca

SEQ ID NO: 3037442 - RNA, 12 nt, Human
cauuuggugguu

SEQ ID NO: 3037443 - RNA, 15 nt, Human
caguaaaugggggug

SEQ ID NO: 3037444 - RNA, 17 nt, Human
cagcccugcagagggca

SEQ ID NO: 3037445 - RNA, 15 nt, Human
caauaccucgagcca

SEQ ID NO: 3037446 - RNA, 20 nt, Human
caguuaagagaaaugagcuu

SEQ ID NO: 3037447 - RNA, 11 nt, Human
caguggugguu

SEQ ID NO: 3037448 - RNA, 20 nt, Human
cagagggagugacagaggca

SEQ ID NO: 3037449 - RNA, 16 nt, Human
cccuuggugcccuccu

SEQ ID NO: 3037450 - RNA, 17 nt, Human
cagacucuacagaggcc

SEQ ID NO: 3037451 - RNA, 18 nt, Human
ucuagaccaggaccuccc

SEQ ID NO: 3037452 - RNA, 14 nt, Human
gugcuuggaggaag

SEQ ID NO: 3037453 - RNA, 14 nt, Human
uucuucaaccagca

SEQ ID NO: 3037454 - RNA, 19 nt, Human
uggaacacuaaugaggaaa

SEQ ID NO: 3037455 - RNA, 19 nt, Human
ugccuccuuugugaggaag

SEQ ID NO: 3037456 - RNA, 15 nt, Human
aagagaaaugagcug

SEQ ID NO: 3037457 - RNA, 22 nt, Human
cuugaccgugaggccagagaca

SEQ ID NO: 3037458 - RNA, 16 nt, Human
ugcacaaacagaggcc

SEQ ID NO: 3037459 - RNA, 19 nt, Human
ccggagaggccucgaccca

SEQ ID NO: 3037460 - RNA, 16 nt, Human
uugcuaagugaggaug

SEQ ID NO: 3037461 - RNA, 23 nt, Human
uguggcgcagcauauucaggaag

SEQ ID NO: 3037462 - RNA, 14 nt, Japanese encephalitis virus
ugcggcccaagccc

SEQ ID NO: 3037463 - RNA, 20 nt, Japanese encephalitis virus
aucucaacaucagcuacuag

SEQ ID NO: 3037464 - RNA, 17 nt, Japanese encephalitis virus
aggccagcaaaagcugc

SEQ ID NO: 3037465 - RNA, 21 nt, Japanese encephalitis virus
uugagcccccacggcccaagc

SEQ ID NO: 3037466 - RNA, 23 nt, Japanese encephalitis virus
cgucucagucccaggaggacugg

SEQ ID NO: 3037467 - RNA, 16 nt, Japanese encephalitis virus
gccccaggaggacugg

SEQ ID NO: 3037468 - RNA, 23 nt, Japanese encephalitis virus
ugcggccugcgcagccccaggag

SEQ ID NO: 3037469 - RNA, 18 nt, Japanese encephalitis virus
ugcgcagccccaggagga

SEQ ID NO: 3037470 - RNA, 21 nt, Japanese encephalitis virus
ugcggccugcgcagccccagg

SEQ ID NO: 3037471 - RNA, 16 nt, Japanese encephalitis virus
aggaagaacacaggau

SEQ ID NO: 3037472 - RNA, 23 nt, Japanese encephalitis virus
cgagguguaaggacuagagguua

SEQ ID NO: 3037473 - RNA, 17 nt, Japanese encephalitis virus
gccugcgcagccccagg

SEQ ID NO: 3037474 - RNA, 16 nt, Japanese encephalitis virus
aaugcaugcauaugga

SEQ ID NO: 3037475 - RNA, 13 nt, Japanese encephalitis virus
cgcagccccagga

SEQ ID NO: 3037476 - RNA, 17 nt, Japanese encephalitis virus
ccacggcccaagccucg

SEQ ID NO: 3037477 - RNA, 13 nt, Japanese encephalitis virus
uagagguuagagg

SEQ ID NO: 3037478 - RNA, 19 nt, Japanese encephalitis virus
gucugcgucucagucccag

SEQ ID NO: 3037479 - RNA, 18 nt, Japanese encephalitis virus
gacuggguuaccaaagcc

SEQ ID NO: 3037480 - RNA, 16 nt, Japanese encephalitis virus
ucucagucccaggagg

SEQ ID NO: 3037481 - RNA, 18 nt, Japanese encephalitis virus
caacaauaugcggcccaa

SEQ ID NO: 3037482 - RNA, 20 nt, Japanese encephalitis virus
gaggagaccccgcauuugca

SEQ ID NO: 3037483 - RNA, 22 nt, Japanese encephalitis virus
ugcgucucagucccaggaggac

SEQ ID NO: 3037484 - RNA, 22 nt, Japanese encephalitis virus
auugacaccugggaauagacug

SEQ ID NO: 3037485 - RNA, 18 nt, Japanese encephalitis virus
gcgucucagucccaggag

SEQ ID NO: 3037486 - RNA, 18 nt, Japanese encephalitis virus
acuagagguuagaggaga

SEQ ID NO: 3037487 - RNA, 17 nt, Japanese encephalitis virus
agagcgccgaaguaugu

SEQ ID NO: 3037488 - RNA, 19 nt, Japanese encephalitis virus
guggaaggacuagagguua

SEQ ID NO: 3037489 - RNA, 21 nt, Japanese encephalitis virus
ugcgucucagucccaggagga

SEQ ID NO: 3037490 - RNA, 16 nt, Japanese encephalitis virus
uaaaugagaaaaugca

SEQ ID NO: 3037491 - RNA, 16 nt, Japanese encephalitis virus
gauuuaaaguagaaaa

SEQ ID NO: 3037492 - RNA, 11 nt, Japanese encephalitis virus
uugugccaccc

SEQ ID NO: 3037493 - RNA, 18 nt, Japanese encephalitis virus
uuaaaguagaaaaguaga

SEQ ID NO: 3037494 - RNA, 14 nt, Japanese encephalitis virus
uaugcggcccaagc

SEQ ID NO: 3037495 - RNA, 13 nt, Japanese encephalitis virus
aggcacagagcgc

SEQ ID NO: 3037496 - RNA, 16 nt, Japanese encephalitis virus
ccccgcauuugcauca

SEQ ID NO: 3037497 - RNA, 22 nt, Japanese encephalitis virus
ugagcccccacggcccaagccu

SEQ ID NO: 3037498 - RNA, 14 nt, Japanese encephalitis virus
gucucagucccagg

SEQ ID NO: 3037499 - RNA, 18 nt, Japanese encephalitis virus
cugucugcgucucagucc

SEQ ID NO: 3037500 - RNA, 19 nt, Japanese encephalitis virus
cccucgaagcuguagagga

SEQ ID NO: 3037501 - RNA, 20 nt, Japanese encephalitis virus
agcaaaagcugccaccggau

SEQ ID NO: 3037502 - RNA, 19 nt, Japanese encephalitis virus
cugggaauagacugggaga

SEQ ID NO: 3037503 - RNA, 19 nt, Japanese encephalitis virus
agucccaggaggacugggu

SEQ ID NO: 3037504 - RNA, 12 nt, Japanese encephalitis virus
guuaccaaagcc

SEQ ID NO: 3037505 - RNA, 19 nt, Japanese encephalitis virus
caucagcuacuaggcacag

SEQ ID NO: 3037506 - RNA, 14 nt, Japanese encephalitis virus
aggagguggaagga

SEQ ID NO: 3037507 - RNA, 22 nt, Japanese encephalitis virus
uugaaagaccaacgucaggcca

SEQ ID NO: 3037508 - RNA, 13 nt, Japanese encephalitis virus
agaaagugagaaa

SEQ ID NO: 3037509 - RNA, 12 nt, Japanese encephalitis virus
cucacuggaagu

SEQ ID NO: 3037510 - RNA, 13 nt, Japanese encephalitis virus
cucagucccagga

SEQ ID NO: 3037511 - RNA, 21 nt, Japanese encephalitis virus
ucagaaccgucucggaaguag

SEQ ID NO: 3037512 - RNA, 21 nt, Japanese encephalitis virus
aggagguggaaggacuagagg

SEQ ID NO: 3037513 - RNA, 19 nt, Japanese encephalitis virus
agcugguggugaggaagaa

SEQ ID NO: 3037514 - RNA, 13 nt, Japanese encephalitis virus
agccccaggagga

SEQ ID NO: 3037515 - RNA, 19 nt, Japanese encephalitis virus
aggccacaaauuugugcca

SEQ ID NO: 3037516 - RNA, 23 nt, Japanese encephalitis virus
ucaggccacaaauuugugccacc

SEQ ID NO: 3037517 - RNA, 11 nt, Japanese encephalitis virus
gagaccccgca

SEQ ID NO: 3037518 - RNA, 17 nt, Japanese encephalitis virus
cuaggaugcaauagacg

SEQ ID NO: 3037519 - RNA, 18 nt, Japanese encephalitis virus
gccaccggauacugggua

SEQ ID NO: 3037520 - RNA, 18 nt, Japanese encephalitis virus
agguguaaggacuagagg

SEQ ID NO: 3037521 - RNA, 18 nt, Japanese encephalitis virus
aaguugaaagaccaacgu

SEQ ID NO: 3037522 - RNA, 14 nt, Japanese encephalitis virus
guagcuggugguga

SEQ ID NO: 3037523 - RNA, 21 nt, Japanese encephalitis virus
caccugggaauagacugggag

SEQ ID NO: 3037524 - RNA, 15 nt, Japanese encephalitis virus
gaggagguggaagga

SEQ ID NO: 3037525 - RNA, 13 nt, Japanese encephalitis virus
caacgucaggcca

SEQ ID NO: 3037526 - RNA, 21 nt, Japanese encephalitis virus
uaucucaacaucagcuacuag

SEQ ID NO: 3037527 - RNA, 19 nt, Japanese encephalitis virus
ugcgcagccccaggaggac

SEQ ID NO: 3037528 - RNA, 17 nt, Japanese encephalitis virus
ucccugcucacuggaag

SEQ ID NO: 3037529 - RNA, 16 nt, Japanese encephalitis virus
gguggaaggacuagag

SEQ ID NO: 3037530 - RNA, 13 nt, Japanese encephalitis virus
cacggcccaagcc

SEQ ID NO: 3037531 - RNA, 14 nt, Japanese encephalitis virus
aggaagaacacagg

SEQ ID NO: 3037532 - RNA, 16 nt, Japanese encephalitis virus
agcaaaagcugccacc

SEQ ID NO: 3037533 - RNA, 20 nt, Japanese encephalitis virus
uaggaugcaauagacgaggu

SEQ ID NO: 3037534 - RNA, 20 nt, Japanese encephalitis virus
acuggguagacggugcuguc

SEQ ID NO: 3037535 - RNA, 14 nt, Japanese encephalitis virus
ccugcgcagcccca

SEQ ID NO: 3037536 - RNA, 13 nt, Japanese encephalitis virus
cagccccaggagg

SEQ ID NO: 3037537 - RNA, 12 nt, Japanese encephalitis virus
uuugugccaccc

SEQ ID NO: 3037538 - RNA, 19 nt, Japanese encephalitis virus
agaggagguggaaggacua

SEQ ID NO: 3037539 - RNA, 20 nt, Japanese encephalitis virus
caauagacgagguguaagga

SEQ ID NO: 3037540 - RNA, 22 nt, Japanese encephalitis virus
gugccaccccgcuagggggugc

SEQ ID NO: 3037541 - RNA, 22 nt, Japanese encephalitis virus
uugacaccugggaauagacugg

SEQ ID NO: 3037542 - RNA, 18 nt, Japanese encephalitis virus
ugcggcccaagcccccuc

SEQ ID NO: 3037543 - RNA, 15 nt, Japanese encephalitis virus
ugagcccccacggcc

SEQ ID NO: 3037544 - RNA, 18 nt, Japanese encephalitis virus
caccggauacuggguaga

SEQ ID NO: 3037545 - RNA, 20 nt, Japanese encephalitis virus
gucucggaaguaggucccug

SEQ ID NO: 3037546 - RNA, 17 nt, Japanese encephalitis virus
gaccaacgucaggccac

SEQ ID NO: 3037547 - RNA, 20 nt, Japanese encephalitis virus
aggccagcaaaagcugccac

SEQ ID NO: 3037548 - RNA, 13 nt, Japanese encephalitis virus
agucccaggagga

SEQ ID NO: 3037549 - RNA, 20 nt, Japanese encephalitis virus
cggccugcgcagccccagga

SEQ ID NO: 3037550 - RNA, 21 nt, Japanese encephalitis virus
aguugaaagaccaacgucagg

SEQ ID NO: 3037551 - RNA, 14 nt, Japanese encephalitis virus
cucgucuaggaugc

SEQ ID NO: 3037552 - RNA, 15 nt, Japanese encephalitis virus
cucagucccaggagg

SEQ ID NO: 3037553 - RNA, 20 nt, Japanese encephalitis virus
caagccucgucuaggaugca

SEQ ID NO: 3037554 - RNA, 19 nt, Japanese encephalitis virus
ggugaggaagaacacagga

SEQ ID NO: 3037555 - RNA, 13 nt, Japanese encephalitis virus
gcagccccaggag

SEQ ID NO: 3037556 - RNA, 16 nt, Japanese encephalitis virus
cugggaauagacuggg

SEQ ID NO: 3037557 - RNA, 19 nt, Japanese encephalitis virus
ccgucucggaaguaggucc

SEQ ID NO: 3037558 - RNA, 15 nt, Japanese encephalitis virus
ucagucccaggagga

SEQ ID NO: 3037559 - RNA, 23 nt, Japanese encephalitis virus
uacuggguagacggugcugucug

SEQ ID NO: 3037560 - RNA, 11 nt, Japanese encephalitis virus
gcggcccaagc

SEQ ID NO: 3037561 - RNA, 19 nt, Japanese encephalitis virus
cagucccaggaggacuggg

SEQ ID NO: 3037562 - RNA, 19 nt, Japanese encephalitis virus
gcgucucagucccaggagg

SEQ ID NO: 3037563 - RNA, 17 nt, Japanese encephalitis virus
gucucagucccaggagg

SEQ ID NO: 3037564 - RNA, 14 nt, Japanese encephalitis virus
cagccccaggagga

SEQ ID NO: 3037565 - RNA, 21 nt, Japanese encephalitis virus
ucuaucucaacaucagcuacu

SEQ ID NO: 3037566 - RNA, 15 nt, Japanese encephalitis virus
agcuguagaggaggu

SEQ ID NO: 3037567 - RNA, 15 nt, Japanese encephalitis virus
cgcagccccaggagg

SEQ ID NO: 3037568 - RNA, 20 nt, Japanese encephalitis virus
cugcgucucagucccaggag

SEQ ID NO: 3037569 - RNA, 19 nt, Japanese encephalitis virus
gagguuagaggagaccccg

SEQ ID NO: 3037570 - RNA, 20 nt, Japanese encephalitis virus
cugcgcagccccaggaggac

SEQ ID NO: 3037571 - RNA, 14 nt, Japanese encephalitis virus
agguguaaggacua

SEQ ID NO: 3037572 - RNA, 17 nt, Japanese encephalitis virus
cuagagguuagaggaga

SEQ ID NO: 3037573 - RNA, 12 nt, Japanese encephalitis virus
agucaggccagc

SEQ ID NO: 3037574 - RNA, 19 nt, Japanese encephalitis virus
cagccccaggaggacuggg

SEQ ID NO: 3037575 - RNA, 14 nt, Japanese encephalitis virus
caggaggacugggu

SEQ ID NO: 3037576 - RNA, 15 nt, Japanese encephalitis virus
uugcaucaaacagca

SEQ ID NO: 3037577 - RNA, 17 nt, Japanese encephalitis virus
agccccaggaggacugg

SEQ ID NO: 3037578 - RNA, 12 nt, Japanese encephalitis virus
gucaggccagca

SEQ ID NO: 3037579 - RNA, 14 nt, Japanese encephalitis virus
ccaggaggacuggg

SEQ ID NO: 3037580 - RNA, 20 nt, Japanese encephalitis virus
aggccacaaauuugugccac

SEQ ID NO: 3037581 - RNA, 16 nt, Japanese encephalitis virus
ggagguggaaggacua

SEQ ID NO: 3037582 - RNA, 15 nt, Japanese encephalitis virus
cugcgcagccccagg

SEQ ID NO: 3037583 - RNA, 14 nt, Japanese encephalitis virus
cggcccaagccccc

SEQ ID NO: 3037584 - RNA, 13 nt, Japanese encephalitis virus
ccugcgcagcccc

SEQ ID NO: 3037585 - RNA, 23 nt, Japanese encephalitis virus
aaggacuagagguuagaggagac

SEQ ID NO: 3037586 - RNA, 19 nt, Japanese encephalitis virus
gccagcaaaagcugccacc

SEQ ID NO: 3037587 - RNA, 18 nt, Japanese encephalitis virus
cuagagguuagaggagac

SEQ ID NO: 3037588 - RNA, 16 nt, Japanese encephalitis virus
gguguaaggacuagag

SEQ ID NO: 3037589 - RNA, 14 nt, Japanese encephalitis virus
ucagucccaggagg

SEQ ID NO: 3037590 - RNA, 21 nt, Japanese encephalitis virus
ucaggccagcaaaagcugcca

SEQ ID NO: 3037591 - RNA, 11 nt, Japanese encephalitis virus
agucccaggag

SEQ ID NO: 3037592 - RNA, 20 nt, Japanese encephalitis virus
cgagguguaaggacuagagg

SEQ ID NO: 3037593 - RNA, 22 nt, Japanese encephalitis virus
cgccgaaguauguagcuggugg

SEQ ID NO: 3037594 - RNA, 13 nt, Japanese encephalitis virus
aggaggacugggu

SEQ ID NO: 3037595 - RNA, 24 nt, Japanese encephalitis virus
gaugcaauagacgagguguaagga

SEQ ID NO: 3037596 - RNA, 15 nt, Japanese encephalitis virus
ccugcgcagccccag

SEQ ID NO: 3037597 - RNA, 19 nt, Japanese encephalitis virus
ccagcaaaagcugccaccg

SEQ ID NO: 3037598 - RNA, 16 nt, Japanese encephalitis virus
caacgucaggccacaa

SEQ ID NO: 3037599 - RNA, 18 nt, Japanese encephalitis virus
gaccaacgucaggccaca

SEQ ID NO: 3037600 - RNA, 16 nt, Japanese encephalitis virus
cgucucagucccagga

SEQ ID NO: 3037601 - RNA, 17 nt, Japanese encephalitis virus
gugcggccugcgcagcc

SEQ ID NO: 3037602 - RNA, 16 nt, Japanese encephalitis virus
caccggauacugggua

SEQ ID NO: 3037603 - RNA, 19 nt, Japanese encephalitis virus
ugcauauggagucaggcca

SEQ ID NO: 3037604 - RNA, 20 nt, Japanese encephalitis virus
aaguagaaaaguagacuaug

SEQ ID NO: 3037605 - RNA, 22 nt, Japanese encephalitis virus
ccaagcccccucgaagcuguag

SEQ ID NO: 3037606 - RNA, 24 nt, Japanese encephalitis virus
cugcgcagccccaggaggacuggg

SEQ ID NO: 3037607 - RNA, 23 nt, Japanese encephalitis virus
gcccccacggcccaagccucguc

SEQ ID NO: 3037608 - RNA, 15 nt, Japanese encephalitis virus
ucucagucccaggag

SEQ ID NO: 3037609 - RNA, 21 nt, Japanese encephalitis virus
cuagagguuagaggagacccc

SEQ ID NO: 3037610 - RNA, 18 nt, Japanese encephalitis virus
uuuaaaguagaaaaguag

SEQ ID NO: 3037611 - RNA, 21 nt, Japanese encephalitis virus
cagucccaggaggacuggguu

SEQ ID NO: 3037612 - RNA, 20 nt, Japanese encephalitis virus
gccgaaguauguagcuggug

SEQ ID NO: 3037613 - RNA, 22 nt, Japanese encephalitis virus
guuagaggagaccccguggaaa

SEQ ID NO: 3037614 - RNA, 23 nt, Japanese encephalitis virus
ccacaaauuugugccaccccgcu

SEQ ID NO: 3037615 - RNA, 22 nt, Japanese encephalitis virus
ugaaagaccaacgucaggccac

SEQ ID NO: 3037616 - RNA, 17 nt, Japanese encephalitis virus
caacaauaugcggccca

SEQ ID NO: 3037617 - RNA, 19 nt, Japanese encephalitis virus
accugggaauagacuggga

SEQ ID NO: 3037618 - RNA, 20 nt, Japanese encephalitis virus
aggagaccccgcauuugcau

SEQ ID NO: 3037619 - RNA, 15 nt, Japanese encephalitis virus
aaggacuagagguua

SEQ ID NO: 3037620 - RNA, 21 nt, Japanese encephalitis virus
ucaggccacaaauuugugcca

SEQ ID NO: 3037621 - RNA, 13 nt, Japanese encephalitis virus
gcccaagcccccu

SEQ ID NO: 3037622 - RNA, 14 nt, Japanese encephalitis virus
caacgucaggccac

SEQ ID NO: 3037623 - RNA, 13 nt, Japanese encephalitis virus
agagguuagagga

SEQ ID NO: 3037624 - RNA, 16 nt, Japanese encephalitis virus
agacgagguguaagga

SEQ ID NO: 3037625 - RNA, 22 nt, Japanese encephalitis virus
ggacuagagguuagaggagacc

SEQ ID NO: 3037626 - RNA, 15 nt, Japanese encephalitis virus
gcagccccaggagga

SEQ ID NO: 3037627 - RNA, 18 nt, Japanese encephalitis virus
ggggugcggccugcgcag

SEQ ID NO: 3037628 - RNA, 14 nt, Japanese encephalitis virus
gcagccccaggagg

SEQ ID NO: 3037629 - RNA, 19 nt, Japanese encephalitis virus
ugcgucucagucccaggag

SEQ ID NO: 3037630 - RNA, 18 nt, Japanese encephalitis virus
gccugcgcagccccagga

SEQ ID NO: 3037631 - RNA, 22 nt, Japanese encephalitis virus
acugggagaucuucugcucuau

SEQ ID NO: 3037632 - RNA, 23 nt, Japanese encephalitis virus
guugagcccccacggcccaagcc

SEQ ID NO: 3037633 - RNA, 15 nt, Japanese encephalitis virus
cagucccaggaggac

SEQ ID NO: 3037634 - RNA, 19 nt, Japanese encephalitis virus
aggacuggguuaccaaagc

SEQ ID NO: 3037635 - RNA, 11 nt, Japanese encephalitis virus
agccccaggag

SEQ ID NO: 3037636 - RNA, 16 nt, Japanese encephalitis virus
cgcagccccaggagga

SEQ ID NO: 3037637 - RNA, 22 nt, Japanese encephalitis virus
acaccugggaauagacugggag

SEQ ID NO: 3037638 - RNA, 13 nt, Japanese encephalitis virus
gaggacuggguua

SEQ ID NO: 3037639 - RNA, 14 nt, Japanese encephalitis virus
uggagucaggccag

SEQ ID NO: 3037640 - RNA, 15 nt, Japanese encephalitis virus
guagaaaaguagacu

SEQ ID NO: 3037641 - RNA, 12 nt, Japanese encephalitis virus
gagucaggccag

SEQ ID NO: 3037642 - RNA, 13 nt, Japanese encephalitis virus
ccaggaggacugg

SEQ ID NO: 3037643 - RNA, 20 nt, Japanese encephalitis virus
gccccaggaggacuggguua

SEQ ID NO: 3037644 - RNA, 20 nt, Japanese encephalitis virus
gagucaggccagcaaaagcu

SEQ ID NO: 3037645 - RNA, 15 nt, Japanese encephalitis virus
ccccaggaggacugg

SEQ ID NO: 3037646 - RNA, 22 nt, Japanese encephalitis virus
agaaagugagaaagcccucaga

SEQ ID NO: 3037647 - RNA, 14 nt, Japanese encephalitis virus
ccaacgucaggcca

SEQ ID NO: 3037648 - RNA, 21 nt, Japanese encephalitis virus
cagccccaggaggacuggguu

SEQ ID NO: 3037649 - RNA, 15 nt, Japanese encephalitis virus
auuugcaucaaacag

SEQ ID NO: 3037650 - RNA, 15 nt, Japanese encephalitis virus
gagaaaaugcaugca

SEQ ID NO: 3037651 - RNA, 17 nt, Japanese encephalitis virus
gcuacuaggcacagagc

SEQ ID NO: 3037652 - RNA, 17 nt, Japanese encephalitis virus
caacgucaggccacaaa

SEQ ID NO: 3037653 - RNA, 22 nt, Japanese encephalitis virus
guugagcccccacggcccaagc

SEQ ID NO: 3037654 - RNA, 22 nt, Japanese encephalitis virus
cagcauauugacaccugggaau

SEQ ID NO: 3037655 - RNA, 21 nt, Japanese encephalitis virus
cagcauauugacaccugggaa

SEQ ID NO: 3037656 - RNA, 18 nt, Japanese encephalitis virus
gacaccugggaauagacu

SEQ ID NO: 3037657 - RNA, 16 nt, Japanese encephalitis virus
uugagcccccacggcc

SEQ ID NO: 3037658 - RNA, 16 nt, Japanese encephalitis virus
ugcgcagccccaggag

SEQ ID NO: 3037659 - RNA, 19 nt, Japanese encephalitis virus
gccacaaauuugugccacc

SEQ ID NO: 3037660 - RNA, 12 nt, Japanese encephalitis virus
agccccaggagg

SEQ ID NO: 3037661 - RNA, 17 nt, Japanese encephalitis virus
agucccaggaggacugg

SEQ ID NO: 3037662 - RNA, 15 nt, Japanese encephalitis virus
aggagguggaaggac

SEQ ID NO: 3037663 - RNA, 19 nt, Japanese encephalitis virus
auguagcugguggugagga

SEQ ID NO: 3037664 - RNA, 15 nt, Japanese encephalitis virus
caggaggacuggguu

SEQ ID NO: 3037665 - RNA, 20 nt, Japanese encephalitis virus
cccaagccucgucuaggaug

SEQ ID NO: 3037666 - RNA, 19 nt, Japanese encephalitis virus
cagaaagugagaaagcccu

SEQ ID NO: 3037667 - RNA, 19 nt, Japanese encephalitis virus
ccugggaauagacugggag

SEQ ID NO: 3037668 - RNA, 17 nt, Japanese encephalitis virus
auaauguaaaugagaaa

SEQ ID NO: 3037669 - RNA, 14 nt, Japanese encephalitis virus
aggagaccccgcau

SEQ ID NO: 3037670 - RNA, 18 nt, Japanese encephalitis virus
ugcaucaaacagcauauu

SEQ ID NO: 3037671 - RNA, 19 nt, Japanese encephalitis virus
agucaggccagcaaaagcu

SEQ ID NO: 3037672 - RNA, 20 nt, Japanese encephalitis virus
ggacuagagguuagaggaga

SEQ ID NO: 3037673 - RNA, 17 nt, Japanese encephalitis virus
ugcgucucagucccagg

SEQ ID NO: 3037674 - RNA, 22 nt, Japanese encephalitis virus
uaccaaagccguugagccccca

SEQ ID NO: 3037675 - RNA, 16 nt, Japanese encephalitis virus
gcgcagccccaggagg

SEQ ID NO: 3037676 - RNA, 17 nt, Japanese encephalitis virus
cccucgaagcuguagag

SEQ ID NO: 3037677 - RNA, 13 nt, Japanese encephalitis virus
cagucccaggagg

SEQ ID NO: 3037678 - RNA, 23 nt, Japanese encephalitis virus
ucaggccagcaaaagcugccacc

SEQ ID NO: 3037679 - RNA, 18 nt, Japanese encephalitis virus
caauaugcggcccaagcc

SEQ ID NO: 3037680 - RNA, 14 nt, Japanese encephalitis virus
augagaaaaugcau

SEQ ID NO: 3037681 - RNA, 19 nt, Japanese encephalitis virus
guaaauaauguaaaugaga

SEQ ID NO: 3037682 - RNA, 22 nt, Japanese encephalitis virus
ugcgcagccccaggaggacugg

SEQ ID NO: 3037683 - RNA, 13 nt, Japanese encephalitis virus
cugggaauagacu

SEQ ID NO: 3037684 - RNA, 19 nt, Japanese encephalitis virus
agccguugagcccccacgg

SEQ ID NO: 3037685 - RNA, 24 nt, Japanese encephalitis virus
aaaaguagacuauguaaauaaugu

SEQ ID NO: 3037686 - RNA, 20 nt, Japanese encephalitis virus
agcugguggugaggaagaac

SEQ ID NO: 3037687 - RNA, 22 nt, Japanese encephalitis virus
aggacuagagguuagaggagac

SEQ ID NO: 3037688 - RNA, 13 nt, Japanese encephalitis virus
ugcggcccaagcc

SEQ ID NO: 3037689 - RNA, 12 nt, Japanese encephalitis virus
gucccaggagga

SEQ ID NO: 3037690 - RNA, 15 nt, Japanese encephalitis virus
aagcuguagaggagg

SEQ ID NO: 3037691 - RNA, 14 nt, Japanese encephalitis virus
cucagucccaggag

SEQ ID NO: 3037692 - RNA, 16 nt, Japanese encephalitis virus
cgagguguaaggacua

SEQ ID NO: 3037693 - RNA, 13 nt, Japanese encephalitis virus
uggagucaggcca

SEQ ID NO: 3037694 - RNA, 18 nt, Japanese encephalitis virus
cagaaccgucucggaagu

SEQ ID NO: 3037695 - RNA, 16 nt, Japanese encephalitis virus
gcaaaagcugccaccg

SEQ ID NO: 3037696 - RNA, 18 nt, Japanese encephalitis virus
gcauauggagucaggcca

SEQ ID NO: 3037697 - RNA, 16 nt, Japanese encephalitis virus
agagguuagaggagac

SEQ ID NO: 3037698 - RNA, 22 nt, Japanese encephalitis virus
cugccaccggauacuggguaga

SEQ ID NO: 3037699 - RNA, 22 nt, Japanese encephalitis virus
aucuucugcucuaucucaacau

SEQ ID NO: 3037700 - RNA, 22 nt, Japanese encephalitis virus
uuaccaaagccguugagccccc

SEQ ID NO: 3037701 - RNA, 16 nt, Japanese encephalitis virus
gucccaggaggacugg

SEQ ID NO: 3037702 - RNA, 14 nt, Japanese encephalitis virus
agcuguagaggagg

SEQ ID NO: 3037703 - RNA, 18 nt, Japanese encephalitis virus
accugggaauagacuggg

SEQ ID NO: 3037704 - RNA, 20 nt, Japanese encephalitis virus
cucagucccaggaggacugg

SEQ ID NO: 3037705 - RNA, 17 nt, Japanese encephalitis virus
guaaggacuagagguua

SEQ ID NO: 3037706 - RNA, 23 nt, Japanese encephalitis virus
gugauuuaaaguagaaaaguaga

SEQ ID NO: 3037707 - RNA, 19 nt, Japanese encephalitis virus
aggccagcaaaagcugcca

SEQ ID NO: 3037708 - RNA, 14 nt, Japanese encephalitis virus
gucucggaaguagg

SEQ ID NO: 3037709 - RNA, 18 nt, Japanese encephalitis virus
agguggaaggacuagagg

SEQ ID NO: 3037710 - RNA, 14 nt, Japanese encephalitis virus
ggaugcaauagacg

SEQ ID NO: 3037711 - RNA, 12 nt, Japanese encephalitis virus
caggccagcaaa

SEQ ID NO: 3037712 - RNA, 17 nt, Japanese encephalitis virus
gacugggagaucuucug

SEQ ID NO: 3037713 - RNA, 13 nt, Japanese encephalitis virus
ggucccugcucac

SEQ ID NO: 3037714 - RNA, 16 nt, Japanese encephalitis virus
cucagucccaggagga

SEQ ID NO: 3037715 - RNA, 12 nt, Japanese encephalitis virus
cagccccaggag

SEQ ID NO: 3037716 - RNA, 19 nt, Japanese encephalitis virus
acugggagaucuucugcuc

SEQ ID NO: 3037717 - RNA, 20 nt, Japanese encephalitis virus
uguagcugguggugaggaag

SEQ ID NO: 3037718 - RNA, 20 nt, Japanese encephalitis virus
uaucucaacaucagcuacua

SEQ ID NO: 3037719 - RNA, 21 nt, Japanese encephalitis virus
cgcagccccaggaggacuggg

SEQ ID NO: 3037720 - RNA, 14 nt, Japanese encephalitis virus
ccaggaggacuggg

SEQ ID NO: 3037721 - RNA, 15 nt, Human
cuccccuaaugccug

SEQ ID NO: 3037722 - RNA, 16 nt, Human
cuccccuaaugccugc

SEQ ID NO: 3037723 - RNA, 14 nt, Human
cgggcugggcagcu

SEQ ID NO: 3037724 - RNA, 15 nt, Human
cgggcugggcagcug

SEQ ID NO: 3037725 - RNA, 16 nt, Human
cgggcugggcagcugu

SEQ ID NO: 3037726 - RNA, 17 nt, Human
cgggcugggcagcuguu

SEQ ID NO: 3037727 - RNA, 20 nt, Human
cguucaccccuccacccuug

SEQ ID NO: 3037728 - RNA, 15 nt, Human
cguucaccccuccac

SEQ ID NO: 3037729 - RNA, 17 nt, Human
cuaaaguagacuucauu

SEQ ID NO: 3037730 - RNA, 21 nt, Human
ccuguuaccuaauuagagcag

SEQ ID NO: 3037731 - RNA, 22 nt, Human
ccuguuaccuaauuagagcaga

SEQ ID NO: 3037732 - RNA, 23 nt, Human
ccuguuaccuaauuagagcagau

SEQ ID NO: 3037733 - RNA, 21 nt, Human
ccuugcgcuuuugcuggucac

SEQ ID NO: 3037734 - RNA, 13 nt, Human
ccuccccaggccg

SEQ ID NO: 3037735 - RNA, 18 nt, Human
ccagacgcacgugggucu

SEQ ID NO: 3037736 - RNA, 23 nt, Human
ccagacgcacgugggucuucagg

SEQ ID NO: 3037737 - RNA, 17 nt, Human
caggccguggcugccca

SEQ ID NO: 3037738 - RNA, 19 nt, Human
caggccguggcugcccaca

SEQ ID NO: 3037739 - RNA, 15 nt, Human
caggccguggcugcc

SEQ ID NO: 3037740 - RNA, 20 nt, Human
cagagagggggccaccuccc

SEQ ID NO: 3037741 - RNA, 22 nt, Human
cagagagggggccaccucccca

SEQ ID NO: 3037742 - RNA, 15 nt, Human
cagagagggggccac

SEQ ID NO: 3037743 - RNA, 23 nt, Human
gcuuccuuuguuuuuuuuuccug

SEQ ID NO: 3037744 - RNA, 22 nt, Human
gcuuccuuuguuuuuuuuuccu

SEQ ID NO: 3037745 - RNA, 12 nt, Human
gcugggcagcug

SEQ ID NO: 3037746 - RNA, 13 nt, Human
gcugggcagcugu

SEQ ID NO: 3037747 - RNA, 14 nt, Human
gcugggcagcuguu

SEQ ID NO: 3037748 - RNA, 17 nt, Human
gcugcccacacacccca

SEQ ID NO: 3037749 - RNA, 22 nt, Human
gccuaccggcaauuuccggcca

SEQ ID NO: 3037750 - RNA, 14 nt, Human
ggccaggugcacag

SEQ ID NO: 3037751 - RNA, 23 nt, Human
ggacuguugacauccaagcuucc

SEQ ID NO: 3037752 - RNA, 17 nt, Human
ggcugcccacacacccc

SEQ ID NO: 3037753 - RNA, 19 nt, Human
ggcugcccacacaccccaa

SEQ ID NO: 3037754 - RNA, 20 nt, Human
ggcugcccacacaccccaau

SEQ ID NO: 3037755 - RNA, 11 nt, Human
aaaauauacug

SEQ ID NO: 3037756 - RNA, 15 nt, Human
aaaauauacuguaaa

SEQ ID NO: 3037757 - RNA, 14 nt, Human
aaaauauacuguaa

SEQ ID NO: 3037758 - RNA, 13 nt, Human
aaaauauacugua

SEQ ID NO: 3037759 - RNA, 12 nt, Human
aaaauauacugu

SEQ ID NO: 3037760 - RNA, 23 nt, Human
aaaauauacuguaaagaaagaga

SEQ ID NO: 3037761 - RNA, 22 nt, Human
aaaauauacuguaaagaaagag

SEQ ID NO: 3037762 - RNA, 20 nt, Human
aaaauauacuguaaagaaag

SEQ ID NO: 3037763 - RNA, 18 nt, Human
aaaauauacuguaaagaa

SEQ ID NO: 3037764 - RNA, 17 nt, Human
aaaauauacuguaaaga

SEQ ID NO: 3037765 - RNA, 16 nt, Human
aaaauauacuguaaag

SEQ ID NO: 3037766 - RNA, 16 nt, Human
gggcagcacagagagg

SEQ ID NO: 3037767 - RNA, 19 nt, Human
gggcagcuguuagagucca

SEQ ID NO: 3037768 - RNA, 15 nt, Human
gggucaggccacggc

SEQ ID NO: 3037769 - RNA, 17 nt, Human
gggucaggccacggcag

SEQ ID NO: 3037770 - RNA, 21 nt, Human
gggucaggccacggcagccua

SEQ ID NO: 3037771 - RNA, 20 nt, Human
ggugcacagacgucccucca

SEQ ID NO: 3037772 - RNA, 12 nt, Human
aaagagagaaaa

SEQ ID NO: 3037773 - RNA, 22 nt, Human
aaagagagaaaauaaaaaguua

SEQ ID NO: 3037774 - RNA, 21 nt, Human
aaagagagaaaauaaaaaguu

SEQ ID NO: 3037775 - RNA, 19 nt, Human
aaagagagaaaauaaaaag

SEQ ID NO: 3037776 - RNA, 18 nt, Human
aaagagagaaaauaaaaa

SEQ ID NO: 3037777 - RNA, 17 nt, Human
aaagagagaaaauaaaa

SEQ ID NO: 3037778 - RNA, 16 nt, Human
aaagagagaaaauaaa

SEQ ID NO: 3037779 - RNA, 15 nt, Human
aaagagagaaaauaa

SEQ ID NO: 3037780 - RNA, 14 nt, Human
aaagagagaaaaua

SEQ ID NO: 3037781 - RNA, 13 nt, Human
aaagagagaaaau

SEQ ID NO: 3037782 - RNA, 21 nt, Human
cugggcagcuguuagagucca

SEQ ID NO: 3037783 - RNA, 19 nt, Human
guccuucucucaccuccua

SEQ ID NO: 3037784 - RNA, 17 nt, Human
guccuucucucaccucc

SEQ ID NO: 3037785 - RNA, 18 nt, Human
guccuucucucaccuccu

SEQ ID NO: 3037786 - RNA, 22 nt, Human
guuagaguccaacguggggcag

SEQ ID NO: 3037787 - RNA, 17 nt, Human
gugggucuucagggggc

SEQ ID NO: 3037788 - RNA, 21 nt, Human
gugggucuucagggggccagg

SEQ ID NO: 3037789 - RNA, 13 nt, Human
gugggucuucagg

SEQ ID NO: 3037790 - RNA, 12 nt, Human
aauaaaaaguua

SEQ ID NO: 3037791 - RNA, 14 nt, Human
aauaaaaaguuaaa

SEQ ID NO: 3037792 - RNA, 13 nt, Human
aauaaaaaguuaa

SEQ ID NO: 3037793 - RNA, 19 nt, Human
acacagcugcagagacaga

SEQ ID NO: 3037794 - RNA, 17 nt, Human
acacacacacaugcaua

SEQ ID NO: 3037795 - RNA, 13 nt, Human
acacacacagaaa

SEQ ID NO: 3037796 - RNA, 12 nt, Human
acacacacagaa

SEQ ID NO: 3037797 - RNA, 16 nt, Human
acacacacagaaaaua

SEQ ID NO: 3037798 - RNA, 15 nt, Human
acacacacagaaaau

SEQ ID NO: 3037799 - RNA, 14 nt, Human
acacacacagaaaa

SEQ ID NO: 3037800 - RNA, 15 nt, Human
acacacacacaugca

SEQ ID NO: 3037801 - RNA, 13 nt, Human
acacacagccaca

SEQ ID NO: 3037802 - RNA, 15 nt, Human
acacacagccacaca

SEQ ID NO: 3037803 - RNA, 14 nt, Human
acacacagccacac

SEQ ID NO: 3037804 - RNA, 22 nt, Human
acacacagccacacacacagaa

SEQ ID NO: 3037805 - RNA, 21 nt, Human
acacacagccacacacacaga

SEQ ID NO: 3037806 - RNA, 18 nt, Human
acacacagccacacacac

SEQ ID NO: 3037807 - RNA, 17 nt, Human
acacacagccacacaca

SEQ ID NO: 3037808 - RNA, 16 nt, Human
acacacacagccacac

SEQ ID NO: 3037809 - RNA, 15 nt, Human
acacacacagccaca

SEQ ID NO: 3037810 - RNA, 14 nt, Human
acacacacagccac

SEQ ID NO: 3037811 - RNA, 13 nt, Human
acacacacagcca

SEQ ID NO: 3037812 - RNA, 12 nt, Human
acacacacagcc

SEQ ID NO: 3037813 - RNA, 21 nt, Human
acacacaugcauacacacaca

SEQ ID NO: 3037814 - RNA, 20 nt, Human
acacacaugcauacacacac

SEQ ID NO: 3037815 - RNA, 15 nt, Human
acacacaugcauaca

SEQ ID NO: 3037816 - RNA, 14 nt, Human
acacacaugcauac

SEQ ID NO: 3037817 - RNA, 19 nt, Human
acacacaugcauacacaca

SEQ ID NO: 3037818 - RNA, 18 nt, Human
acacacaugcauacacac

SEQ ID NO: 3037819 - RNA, 17 nt, Human
acacacaugcauacaca

SEQ ID NO: 3037820 - RNA, 16 nt, Human
acacacaugcauacac

SEQ ID NO: 3037821 - RNA, 19 nt, Human
acacaugcauacacacaca

SEQ ID NO: 3037822 - RNA, 18 nt, Human
acacaugcauacacacac

SEQ ID NO: 3037823 - RNA, 17 nt, Human
acacaugcauacacaca

SEQ ID NO: 3037824 - RNA, 16 nt, Human
acacaugcauacacac

SEQ ID NO: 3037825 - RNA, 15 nt, Human
acacaugcauacaca

SEQ ID NO: 3037826 - RNA, 14 nt, Human
acacaugcauacac

SEQ ID NO: 3037827 - RNA, 13 nt, Human
acacaugcauaca

SEQ ID NO: 3037828 - RNA, 21 nt, Human
acagagagggggccaccuccc

SEQ ID NO: 3037829 - RNA, 13 nt, Human
ucagcuucuuaau

SEQ ID NO: 3037830 - RNA, 14 nt, Human
ucagcuucuuaaua

SEQ ID NO: 3037831 - RNA, 21 nt, Human
acccccacacacacacacaug

SEQ ID NO: 3037832 - RNA, 20 nt, Human
acccccacacacacacacau

SEQ ID NO: 3037833 - RNA, 15 nt, Human
acccccacacacaca

SEQ ID NO: 3037834 - RNA, 14 nt, Human
acccccacacacac

SEQ ID NO: 3037835 - RNA, 13 nt, Human
acccccacacaca

SEQ ID NO: 3037836 - RNA, 12 nt, Human
acccccacacac

SEQ ID NO: 3037837 - RNA, 18 nt, Human
ucccuccacguucacccc

SEQ ID NO: 3037838 - RNA, 19 nt, Human
ucccuccacguucaccccu

SEQ ID NO: 3037839 - RNA, 20 nt, Human
ucccuccacguucaccccuc

SEQ ID NO: 3037840 - RNA, 13 nt, Human
uccccuaaugccu

SEQ ID NO: 3037841 - RNA, 15 nt, Human
acgugggcggcagag

SEQ ID NO: 3037842 - RNA, 20 nt, Human
acgugggcggcagagaggac

SEQ ID NO: 3037843 - RNA, 22 nt, Human
acgugggucuucagggggccag

SEQ ID NO: 3037844 - RNA, 14 nt, Human
acguggggcagcac

SEQ ID NO: 3037845 - RNA, 15 nt, Human
acguggggcagcaca

SEQ ID NO: 3037846 - RNA, 19 nt, Human
acguggggcagcacagaga

SEQ ID NO: 3037847 - RNA, 20 nt, Human
acguggggcagcacagagag

SEQ ID NO: 3037848 - RNA, 14 nt, Human
acguucaccccucc

SEQ ID NO: 3037849 - RNA, 16 nt, Human
acguucaccccuccac

SEQ ID NO: 3037850 - RNA, 15 nt, Human
accuaauuagagcag

SEQ ID NO: 3037851 - RNA, 16 nt, Human
accuaauuagagcaga

SEQ ID NO: 3037852 - RNA, 19 nt, Human
accuaauuagagcagauga

SEQ ID NO: 3037853 - RNA, 14 nt, Human
acugccuuaaaacu

SEQ ID NO: 3037854 - RNA, 15 nt, Human
acugccuuaaaacuu

SEQ ID NO: 3037855 - RNA, 16 nt, Human
acugccuuaaaacuuu

SEQ ID NO: 3037856 - RNA, 20 nt, Human
uccuucucucaccuccuaaa

SEQ ID NO: 3037857 - RNA, 13 nt, Human
agagacagagagg

SEQ ID NO: 3037858 - RNA, 17 nt, Human
agacuucauuuuuccua

SEQ ID NO: 3037859 - RNA, 20 nt, Human
agacagucaaggaguggcuu

SEQ ID NO: 3037860 - RNA, 17 nt, Human
agacagucaaggagugg

SEQ ID NO: 3037861 - RNA, 23 nt, Human
agccacacacacagaaaauauac

SEQ ID NO: 3037862 - RNA, 22 nt, Human
agccacacacacagaaaauaua

SEQ ID NO: 3037863 - RNA, 10 nt, Human
agccacacac

SEQ ID NO: 3037864 - RNA, 13 nt, Human
agccacacacaca

SEQ ID NO: 3037865 - RNA, 12 nt, Human
agccacacacac

SEQ ID NO: 3037866 - RNA, 21 nt, Human
agccacacacacagaaaauau

SEQ ID NO: 3037867 - RNA, 20 nt, Human
agccacacacacagaaaaua

SEQ ID NO: 3037868 - RNA, 19 nt, Human
agccacacacacagaaaau

SEQ ID NO: 3037869 - RNA, 18 nt, Human
agccacacacacagaaaa

SEQ ID NO: 3037870 - RNA, 17 nt, Human
agccacacacacagaaa

SEQ ID NO: 3037871 - RNA, 16 nt, Human
agccacacacacagaa

SEQ ID NO: 3037872 - RNA, 15 nt, Human
agccacacacacaga

SEQ ID NO: 3037873 - RNA, 14 nt, Human
agccacacacacag

SEQ ID NO: 3037874 - RNA, 14 nt, Human
aggacgugggcggc

SEQ ID NO: 3037875 - RNA, 20 nt, Human
aggacgugggcggcagagag

SEQ ID NO: 3037876 - RNA, 14 nt, Human
aggcacacagcugc

SEQ ID NO: 3037877 - RNA, 18 nt, Human
aggcacacagcugcagag

SEQ ID NO: 3037878 - RNA, 23 nt, Human
aggcacacagcugcagagacaga

SEQ ID NO: 3037879 - RNA, 19 nt, Human
agcugcagagacagagagg

SEQ ID NO: 3037880 - RNA, 17 nt, Human
agcugcagagacagaga

SEQ ID NO: 3037881 - RNA, 18 nt, Human
agcugcagagacagagag

SEQ ID NO: 3037882 - RNA, 15 nt, Human
agcugcagagacaga

SEQ ID NO: 3037883 - RNA, 13 nt, Human
uggucacugccau

SEQ ID NO: 3037884 - RNA, 14 nt, Human
uggucacugccaug

SEQ ID NO: 3037885 - RNA, 22 nt, Human
uggucacugccauggaggcaca

SEQ ID NO: 3037886 - RNA, 21 nt, Human
uguaaagaaagagagaaaaua

SEQ ID NO: 3037887 - RNA, 20 nt, Human
uguaaagaaagagagaaaau

SEQ ID NO: 3037888 - RNA, 13 nt, Human
uguaaagaaagag

SEQ ID NO: 3037889 - RNA, 15 nt, Human
uguaaagaaagagag

SEQ ID NO: 3037890 - RNA, 14 nt, Human
uguaaagaaagaga

SEQ ID NO: 3037891 - RNA, 19 nt, Human
uguaaagaaagagagaaaa

SEQ ID NO: 3037892 - RNA, 18 nt, Human
uguaaagaaagagagaaa

SEQ ID NO: 3037893 - RNA, 17 nt, Human
uguaaagaaagagagaa

SEQ ID NO: 3037894 - RNA, 16 nt, Human
uguaaagaaagagaga

SEQ ID NO: 3037895 - RNA, 13 nt, Human
aguagggucaggc

SEQ ID NO: 3037896 - RNA, 19 nt, Human
agggggccaccuccccagg

SEQ ID NO: 3037897 - RNA, 15 nt, Human
agggggccaggugca

SEQ ID NO: 3037898 - RNA, 10 nt, Human
agggggccac

SEQ ID NO: 3037899 - RNA, 15 nt, Human
agggggccaccuccc

SEQ ID NO: 3037900 - RNA, 16 nt, Human
ugugcccccagacgca

SEQ ID NO: 3037901 - RNA, 22 nt, Human
ugugcccccagacgcacguggg

SEQ ID NO: 3037902 - RNA, 21 nt, Human
uuccuuuguuuuuuuuuccug

SEQ ID NO: 3037903 - RNA, 13 nt, Human
uucagggggccag

SEQ ID NO: 3037904 - RNA, 22 nt, Human
uucagggggccaggugcacaga

SEQ ID NO: 3037905 - RNA, 19 nt, Human
augugacaugcgggcuggg

SEQ ID NO: 3037906 - RNA, 19 nt, Human
aaaauaaaaaguuaaaaag

SEQ ID NO: 3037907 - RNA, 16 nt, Human
aaaauaaaaaguuaaa

SEQ ID NO: 3037908 - RNA, 14 nt, Human
aaaauaaaaaguua

SEQ ID NO: 3037909 - RNA, 15 nt, Human
aaaauaaaaaguuaa

SEQ ID NO: 3037910 - RNA, 12 nt, Human
aagagagaaaau

SEQ ID NO: 3037911 - RNA, 15 nt, Human
aagagagaaaauaaa

SEQ ID NO: 3037912 - RNA, 13 nt, Human
aagagagaaaaua

SEQ ID NO: 3037913 - RNA, 14 nt, Human
aagagagaaaauaa

SEQ ID NO: 3037914 - RNA, 18 nt, Human
aagagagaaaauaaaaag

SEQ ID NO: 3037915 - RNA, 17 nt, Human
aagagagaaaauaaaaa

SEQ ID NO: 3037916 - RNA, 16 nt, Human
aagagagaaaauaaaa

SEQ ID NO: 3037917 - RNA, 23 nt, Human
acacagccacacacacagaaaau

SEQ ID NO: 3037918 - RNA, 22 nt, Human
acacagccacacacacagaaaa

SEQ ID NO: 3037919 - RNA, 21 nt, Human
acacagccacacacacagaaa

SEQ ID NO: 3037920 - RNA, 20 nt, Human
acacagccacacacacagaa

SEQ ID NO: 3037921 - RNA, 19 nt, Human
acacagccacacacacaga

SEQ ID NO: 3037922 - RNA, 23 nt, Human
acacagaaaauauacuguaaaga

SEQ ID NO: 3037923 - RNA, 22 nt, Human
acacagaaaauauacuguaaag

SEQ ID NO: 3037924 - RNA, 21 nt, Human
acacagaaaauauacuguaaa

SEQ ID NO: 3037925 - RNA, 12 nt, Human
acacagccacac

SEQ ID NO: 3037926 - RNA, 11 nt, Human
acacagccaca

SEQ ID NO: 3037927 - RNA, 18 nt, Human
acacagccacacacacag

SEQ ID NO: 3037928 - RNA, 15 nt, Human
acacagccacacaca

SEQ ID NO: 3037929 - RNA, 14 nt, Human
acacagccacacac

SEQ ID NO: 3037930 - RNA, 13 nt, Human
acacagccacaca

SEQ ID NO: 3037931 - RNA, 12 nt, Human
acacagaaaaua

SEQ ID NO: 3037932 - RNA, 11 nt, Human
acacagaaaau

SEQ ID NO: 3037933 - RNA, 20 nt, Human
acacagaaaauauacuguaa

SEQ ID NO: 3037934 - RNA, 19 nt, Human
acacagaaaauauacugua

SEQ ID NO: 3037935 - RNA, 18 nt, Human
acacagaaaauauacugu

SEQ ID NO: 3037936 - RNA, 17 nt, Human
acacagaaaauauacug

SEQ ID NO: 3037937 - RNA, 16 nt, Human
acacagaaaauauacu

SEQ ID NO: 3037938 - RNA, 15 nt, Human
acacagaaaauauac

SEQ ID NO: 3037939 - RNA, 14 nt, Human
acacagaaaauaua

SEQ ID NO: 3037940 - RNA, 13 nt, Human
acacagaaaauau

SEQ ID NO: 3037941 - RNA, 15 nt, Human
acaggauuagacagu

SEQ ID NO: 3037942 - RNA, 14 nt, Human
acaugcgggcuggg

SEQ ID NO: 3037943 - RNA, 16 nt, Human
acaugcgggcugggca

SEQ ID NO: 3037944 - RNA, 17 nt, Human
acaugcgggcugggcag

SEQ ID NO: 3037945 - RNA, 19 nt, Human
acaugcgggcugggcagcu

SEQ ID NO: 3037946 - RNA, 21 nt, Human
acaugcgggcugggcagcugu

SEQ ID NO: 3037947 - RNA, 22 nt, Human
acaugcgggcugggcagcuguu

SEQ ID NO: 3037948 - RNA, 23 nt, Human
acuguaaagaaagagagaaaaua

SEQ ID NO: 3037949 - RNA, 22 nt, Human
acuguaaagaaagagagaaaau

SEQ ID NO: 3037950 - RNA, 21 nt, Human
acuguaaagaaagagagaaaa

SEQ ID NO: 3037951 - RNA, 20 nt, Human
acuguaaagaaagagagaaa

SEQ ID NO: 3037952 - RNA, 19 nt, Human
acuguaaagaaagagagaa

SEQ ID NO: 3037953 - RNA, 18 nt, Human
acuguaaagaaagagaga

SEQ ID NO: 3037954 - RNA, 16 nt, Human
acuguaaagaaagaga

SEQ ID NO: 3037955 - RNA, 15 nt, Human
acuguaaagaaagag

SEQ ID NO: 3037956 - RNA, 14 nt, Human
acuguaaagaaaga

SEQ ID NO: 3037957 - RNA, 13 nt, Human
acuguaaagaaag

SEQ ID NO: 3037958 - RNA, 21 nt, Human
acugccauggaggcacacagc

SEQ ID NO: 3037959 - RNA, 18 nt, Human
acugccauggaggcacac

SEQ ID NO: 3037960 - RNA, 23 nt, Human
acugaaugaaacccccacacaca

SEQ ID NO: 3037961 - RNA, 22 nt, Human
acugaaugaaacccccacacac

SEQ ID NO: 3037962 - RNA, 23 nt, Human
augcauacacacacacacacagc

SEQ ID NO: 3037963 - RNA, 22 nt, Human
augcauacacacacacacacag

SEQ ID NO: 3037964 - RNA, 10 nt, Human
augcauacac

SEQ ID NO: 3037965 - RNA, 12 nt, Human
augcauacacac

SEQ ID NO: 3037966 - RNA, 11 nt, Human
augcauacaca

SEQ ID NO: 3037967 - RNA, 17 nt, Human
augcauacacacacaca

SEQ ID NO: 3037968 - RNA, 15 nt, Human
augcauacacacaca

SEQ ID NO: 3037969 - RNA, 14 nt, Human
augcauacacacac

SEQ ID NO: 3037970 - RNA, 13 nt, Human
augcauacacaca

SEQ ID NO: 3037971 - RNA, 20 nt, Human
agagaaaauaaaaaguuaaa

SEQ ID NO: 3037972 - RNA, 19 nt, Human
agagaaaauaaaaaguuaa

SEQ ID NO: 3037973 - RNA, 18 nt, Human
agagaaaauaaaaaguua

SEQ ID NO: 3037974 - RNA, 12 nt, Human
agcacagagagg

SEQ ID NO: 3037975 - RNA, 19 nt, Human
agcacagagagggggccac

SEQ ID NO: 3037976 - RNA, 20 nt, Human
agcacagagagggggccacc

SEQ ID NO: 3037977 - RNA, 21 nt, Human
agcacagagagggggccaccu

SEQ ID NO: 3037978 - RNA, 23 nt, Human
agcacagagagggggccaccucc

SEQ ID NO: 3037979 - RNA, 16 nt, Human
cacacagaaaauauac

SEQ ID NO: 3037980 - RNA, 15 nt, Human
cacacagaaaauaua

SEQ ID NO: 3037981 - RNA, 14 nt, Human
cacacagaaaauau

SEQ ID NO: 3037982 - RNA, 13 nt, Human
cacacagaaaaua

SEQ ID NO: 3037983 - RNA, 18 nt, Human
cacacagaaaauauacug

SEQ ID NO: 3037984 - RNA, 17 nt, Human
cacacagaaaauauacu

SEQ ID NO: 3037985 - RNA, 12 nt, Human
cacacagaaaau

SEQ ID NO: 3037986 - RNA, 11 nt, Human
cacacagaaaa

SEQ ID NO: 3037987 - RNA, 11 nt, Human
cacacacacac

SEQ ID NO: 3037988 - RNA, 12 nt, Human
cacacacacaca

SEQ ID NO: 3037989 - RNA, 13 nt, Human
cacacaccccaau

SEQ ID NO: 3037990 - RNA, 14 nt, Human
cacaugcauacaca

SEQ ID NO: 3037991 - RNA, 13 nt, Human
cacaugcauacac

SEQ ID NO: 3037992 - RNA, 18 nt, Human
cacaugcauacacacaca

SEQ ID NO: 3037993 - RNA, 17 nt, Human
cacaugcauacacacac

SEQ ID NO: 3037994 - RNA, 16 nt, Human
cacaugcauacacaca

SEQ ID NO: 3037995 - RNA, 15 nt, Human
cacaugcauacacac

SEQ ID NO: 3037996 - RNA, 13 nt, Human
cccacacacccca

SEQ ID NO: 3037997 - RNA, 14 nt, Human
cccacacaccccaa

SEQ ID NO: 3037998 - RNA, 15 nt, Human
cccaggccguggcug

SEQ ID NO: 3037999 - RNA, 13 nt, Human
cauuuuuccuaac

SEQ ID NO: 3038000 - RNA, 18 nt, Human
cauuuuuccuaacaggau

SEQ ID NO: 3038001 - RNA, 21 nt, Human
ccaccugguuccggaauccug

SEQ ID NO: 3038002 - RNA, 15 nt, Human
ccuguccucagcuuc

SEQ ID NO: 3038003 - RNA, 21 nt, Human
cguggcugcccacacacccca

SEQ ID NO: 3038004 - RNA, 19 nt, Human
cguggcugcggcacccuug

SEQ ID NO: 3038005 - RNA, 17 nt, Human
cguaguagggucaggcc

SEQ ID NO: 3038006 - RNA, 18 nt, Human
cgcaaugugcccccagac

SEQ ID NO: 3038007 - RNA, 20 nt, Human
cgcaaugugcccccagacgc

SEQ ID NO: 3038008 - RNA, 18 nt, Human
cggaauccuguccucagc

SEQ ID NO: 3038009 - RNA, 21 nt, Human
cggaauccuguccucagcuuc

SEQ ID NO: 3038010 - RNA, 16 nt, Human
cggcaauuuccggcca

SEQ ID NO: 3038011 - RNA, 11 nt, Human
cccccacacac

SEQ ID NO: 3038012 - RNA, 14 nt, Human
cccccacacacaca

SEQ ID NO: 3038013 - RNA, 12 nt, Human
cccccacacaca

SEQ ID NO: 3038014 - RNA, 19 nt, Human
ccccuccccuaaugccugc

SEQ ID NO: 3038015 - RNA, 18 nt, Human
ccccuaaugccugcggag

SEQ ID NO: 3038016 - RNA, 19 nt, Human
ccggaauccuguccucagc

SEQ ID NO: 3038017 - RNA, 20 nt, Human
ccggaauccuguccucagcu

SEQ ID NO: 3038018 - RNA, 22 nt, Human
ccggaauccuguccucagcuuc

SEQ ID NO: 3038019 - RNA, 19 nt, Human
ccuaaaguagacuucauuu

SEQ ID NO: 3038020 - RNA, 17 nt, Human
cugccauggaggcacac

SEQ ID NO: 3038021 - RNA, 17 nt, Human
cugcagagacagagagg

SEQ ID NO: 3038022 - RNA, 18 nt, Human
cugaaugaaacccccaca

SEQ ID NO: 3038023 - RNA, 17 nt, Human
cugaaugaaacccccac

SEQ ID NO: 3038024 - RNA, 23 nt, Human
cugaaugaaacccccacacacac

SEQ ID NO: 3038025 - RNA, 22 nt, Human
cugaaugaaacccccacacaca

SEQ ID NO: 3038026 - RNA, 21 nt, Human
cugaaugaaacccccacacac

SEQ ID NO: 3038027 - RNA, 20 nt, Human
cugaaugaaacccccacaca

SEQ ID NO: 3038028 - RNA, 19 nt, Human
cugaaugaaacccccacac

SEQ ID NO: 3038029 - RNA, 14 nt, Human
cuucucucaccucc

SEQ ID NO: 3038030 - RNA, 15 nt, Human
cuucucucaccuccu

SEQ ID NO: 3038031 - RNA, 16 nt, Human
cuucucucaccuccua

SEQ ID NO: 3038032 - RNA, 18 nt, Human
cuucucucaccuccuaaa

SEQ ID NO: 3038033 - RNA, 23 nt, Human
cuucagggggccaggugcacaga

SEQ ID NO: 3038034 - RNA, 14 nt, Human
cuucagggggccag

SEQ ID NO: 3038035 - RNA, 15 nt, Human
cuucagggggccagg

SEQ ID NO: 3038036 - RNA, 18 nt, Human
cuuacuacaugugggagc

SEQ ID NO: 3038037 - RNA, 20 nt, Human
cuuacuacaugugggagcuu

SEQ ID NO: 3038038 - RNA, 17 nt, Human
gaaaacgguuaaaacug

SEQ ID NO: 3038039 - RNA, 14 nt, Human
gaaaauaaaaaguu

SEQ ID NO: 3038040 - RNA, 16 nt, Human
gaaaauaaaaaguuaa

SEQ ID NO: 3038041 - RNA, 15 nt, Human
gaaaauaaaaaguua

SEQ ID NO: 3038042 - RNA, 17 nt, Human
gacauccaagcuuccuu

SEQ ID NO: 3038043 - RNA, 15 nt, Human
gacauccaagcuucc

SEQ ID NO: 3038044 - RNA, 16 nt, Human
gacauccaagcuuccu

SEQ ID NO: 3038045 - RNA, 22 nt, Human
gacgucccuccacguucacccc

SEQ ID NO: 3038046 - RNA, 14 nt, Human
gaaugaaaccccca

SEQ ID NO: 3038047 - RNA, 17 nt, Human
gaaaauauacuguaaag

SEQ ID NO: 3038048 - RNA, 17 nt, Human
gaaaauaaaaaguuaaa

SEQ ID NO: 3038049 - RNA, 12 nt, Human
gaaaauauacug

SEQ ID NO: 3038050 - RNA, 16 nt, Human
gaaaauauacuguaaa

SEQ ID NO: 3038051 - RNA, 15 nt, Human
gaaaauauacuguaa

SEQ ID NO: 3038052 - RNA, 14 nt, Human
gaaaauauacugua

SEQ ID NO: 3038053 - RNA, 13 nt, Human
gaaaauauacugu

SEQ ID NO: 3038054 - RNA, 15 nt, Human
gacuucauuuuuccu

SEQ ID NO: 3038055 - RNA, 16 nt, Human
gacuucauuuuuccua

SEQ ID NO: 3038056 - RNA, 12 nt, Human
gaugaccccucc

SEQ ID NO: 3038057 - RNA, 16 nt, Human
gaugaccccuccccua

SEQ ID NO: 3038058 - RNA, 17 nt, Human
gaugaccccuccccuaa

SEQ ID NO: 3038059 - RNA, 14 nt, Human
gcagcacagagagg

SEQ ID NO: 3038060 - RNA, 15 nt, Human
gcagagacagagagg

SEQ ID NO: 3038061 - RNA, 14 nt, Human
gccacggcagccua

SEQ ID NO: 3038062 - RNA, 13 nt, Human
gcccacacacccc

SEQ ID NO: 3038063 - RNA, 15 nt, Human
gccauggaggcacac

SEQ ID NO: 3038064 - RNA, 16 nt, Human
gccauggaggcacaca

SEQ ID NO: 3038065 - RNA, 18 nt, Human
gccauggaggcacacagc

SEQ ID NO: 3038066 - RNA, 21 nt, Human
gccauggaggcacacagcugc

SEQ ID NO: 3038067 - RNA, 18 nt, Human
gccguggcugcggcaccc

SEQ ID NO: 3038068 - RNA, 14 nt, Human
gccguggcugcggc

SEQ ID NO: 3038069 - RNA, 15 nt, Human
gccguggcugcggca

SEQ ID NO: 3038070 - RNA, 17 nt, Human
gcgcuuuugcuggucac

SEQ ID NO: 3038071 - RNA, 13 nt, Human
ggcugggcagcug

SEQ ID NO: 3038072 - RNA, 14 nt, Human
ggcugggcagcugu

SEQ ID NO: 3038073 - RNA, 22 nt, Human
ggcuuacuacaugugggagcuu

SEQ ID NO: 3038074 - RNA, 15 nt, Human
gggccaccuccccag

SEQ ID NO: 3038075 - RNA, 16 nt, Human
gggccaccuccccagg

SEQ ID NO: 3038076 - RNA, 17 nt, Human
gggccaccuccccaggc

SEQ ID NO: 3038077 - RNA, 19 nt, Human
gggccaccuccccaggccg

SEQ ID NO: 3038078 - RNA, 22 nt, Human
gggccaccuccccaggccgugg

SEQ ID NO: 3038079 - RNA, 11 nt, Human
gguuaaaacug

SEQ ID NO: 3038080 - RNA, 13 nt, Human
gguuaaaacuguc

SEQ ID NO: 3038081 - RNA, 20 nt, Human
gggucuucagggggccaggu

SEQ ID NO: 3038082 - RNA, 16 nt, Human
ggucaggccacggcag

SEQ ID NO: 3038083 - RNA, 15 nt, Human
ggucacugccaugga

SEQ ID NO: 3038084 - RNA, 23 nt, Human
uauacuguaaagaaagagagaaa

SEQ ID NO: 3038085 - RNA, 22 nt, Human
uauacuguaaagaaagagagaa

SEQ ID NO: 3038086 - RNA, 19 nt, Human
uagaguccaacguggggca

SEQ ID NO: 3038087 - RNA, 22 nt, Human
uagaguccaacguggggcagca

SEQ ID NO: 3038088 - RNA, 18 nt, Human
uacuacaugugggagcuu

SEQ ID NO: 3038089 - RNA, 21 nt, Human
uacacacacacacacagccac

SEQ ID NO: 3038090 - RNA, 23 nt, Human
uacacacacacacacagccacac

SEQ ID NO: 3038091 - RNA, 22 nt, Human
uacacacacacacacagccaca

SEQ ID NO: 3038092 - RNA, 12 nt, Human
uaauuagagcag

SEQ ID NO: 3038093 - RNA, 16 nt, Human
uaauauaacugccuua

SEQ ID NO: 3038094 - RNA, 21 nt, Human
uaauauaacugccuuaaaacu

SEQ ID NO: 3038095 - RNA, 22 nt, Human
uaauauaacugccuuaaaacuu

SEQ ID NO: 3038096 - RNA, 23 nt, Human
uaauauaacugccuuaaaacuuu

SEQ ID NO: 3038097 - RNA, 18 nt, Human
uaacugccuuaaaacuuu

SEQ ID NO: 3038098 - RNA, 16 nt, Human
uaacaggauuagacag

SEQ ID NO: 3038099 - RNA, 23 nt, Human
ucaaacugaaugaaacccccaca

SEQ ID NO: 3038100 - RNA, 21 nt, Human
ucccccgcaaugugcccccag

SEQ ID NO: 3038101 - RNA, 20 nt, Human
ucccccgcaaugugccccca

SEQ ID NO: 3038102 - RNA, 15 nt, Human
ucuucagggggccag

SEQ ID NO: 3038103 - RNA, 22 nt, Human
uggaggcacacagcugcagaga

SEQ ID NO: 3038104 - RNA, 17 nt, Human
uggaggcacacagcugc

SEQ ID NO: 3038105 - RNA, 18 nt, Human
uggaggcacacagcugca

SEQ ID NO: 3038106 - RNA, 19 nt, Human
uggaggcacacagcugcag

SEQ ID NO: 3038107 - RNA, 19 nt, Human
ugggcggcagagaggacug

SEQ ID NO: 3038108 - RNA, 13 nt, Human
ugggcggcagaga

SEQ ID NO: 3038109 - RNA, 15 nt, Human
ugggcggcagagagg

SEQ ID NO: 3038110 - RNA, 23 nt, Human
ugccauggaggcacacagcugca

SEQ ID NO: 3038111 - RNA, 16 nt, Human
ugccauggaggcacac

SEQ ID NO: 3038112 - RNA, 17 nt, Human
ugccauggaggcacaca

SEQ ID NO: 3038113 - RNA, 18 nt, Human
ugccauggaggcacacag

SEQ ID NO: 3038114 - RNA, 19 nt, Human
ugcacagacgucccuccac

SEQ ID NO: 3038115 - RNA, 23 nt, Human
uguuagaguccaacguggggcag

SEQ ID NO: 3038116 - RNA, 18 nt, Human
uguuagaguccaacgugg

SEQ ID NO: 3038117 - RNA, 19 nt, Human
ugugacaugcgggcugggc

SEQ ID NO: 3038118 - RNA, 21 nt, Human
ugugacaugcgggcugggcag

SEQ ID NO: 3038119 - RNA, 17 nt, Human
ugugacaugcgggcugg

SEQ ID NO: 3038120 - RNA, 15 nt, Human
uugcuggucacugcc

SEQ ID NO: 3038121 - RNA, 18 nt, Human
gcugcagagacagagagg

SEQ ID NO: 3038122 - RNA, 21 nt, Human
gcuucuuaauauaacugccuu

SEQ ID NO: 3038123 - RNA, 22 nt, Human
gcuucuuaauauaacugccuua

SEQ ID NO: 3038124 - RNA, 19 nt, Human
gcuucuuaauauaacugcc

SEQ ID NO: 3038125 - RNA, 14 nt, Human
gggcggcagagagg

SEQ ID NO: 3038126 - RNA, 19 nt, Human
ggucuucagggggccaggu

SEQ ID NO: 3038127 - RNA, 16 nt, Human
gacagucaaggagugg

SEQ ID NO: 3038128 - RNA, 17 nt, Human
gacagucaaggaguggc

SEQ ID NO: 3038129 - RNA, 19 nt, Human
gacagucaaggaguggcuu

SEQ ID NO: 3038130 - RNA, 22 nt, Human
gacagucaaggaguggcuuacu

SEQ ID NO: 3038131 - RNA, 19 nt, Human
cuugcgcuuuugcugguca

SEQ ID NO: 3038132 - RNA, 12 nt, Human
cugggcagcugu

SEQ ID NO: 3038133 - RNA, 13 nt, Human
cgccguggcugcg

SEQ ID NO: 3038134 - RNA, 22 nt, Human
cgugggucuucagggggccagg

SEQ ID NO: 3038135 - RNA, 18 nt, Human
cguggggcagcacagaga

SEQ ID NO: 3038136 - RNA, 20 nt, Human
cguggggcagcacagagagg

SEQ ID NO: 3038137 - RNA, 15 nt, Human
cacacagcugcagag

SEQ ID NO: 3038138 - RNA, 14 nt, Human
cacacaugcauaca

SEQ ID NO: 3038139 - RNA, 16 nt, Human
cacacaugcauacaca

SEQ ID NO: 3038140 - RNA, 15 nt, Human
cacacaugcauacac

SEQ ID NO: 3038141 - RNA, 21 nt, Human
cacagaaaauauacuguaaag

SEQ ID NO: 3038142 - RNA, 19 nt, Human
cacacaugcauacacacac

SEQ ID NO: 3038143 - RNA, 18 nt, Human
cacacaugcauacacaca

SEQ ID NO: 3038144 - RNA, 17 nt, Human
cacacaugcauacacac

SEQ ID NO: 3038145 - RNA, 22 nt, Human
cacagaaaauauacuguaaaga

SEQ ID NO: 3038146 - RNA, 12 nt, Human
cauacacacaca

SEQ ID NO: 3038147 - RNA, 20 nt, Human
cauacacacacacacacagc

SEQ ID NO: 3038148 - RNA, 19 nt, Human
cauacacacacacacacag

SEQ ID NO: 3038149 - RNA, 16 nt, Human
cauacacacacacaca

SEQ ID NO: 3038150 - RNA, 15 nt, Human
cauacacacacacac

SEQ ID NO: 3038151 - RNA, 14 nt, Human
cauacacacacaca

SEQ ID NO: 3038152 - RNA, 15 nt, Human
ccaacguggggcagc

SEQ ID NO: 3038153 - RNA, 16 nt, Human
ccaacguggggcagca

SEQ ID NO: 3038154 - RNA, 20 nt, Human
ccaacguggggcagcacaga

SEQ ID NO: 3038155 - RNA, 17 nt, Human
ccaagcuuccuuuguuu

SEQ ID NO: 3038156 - RNA, 18 nt, Human
cagagaggacgugggcgg

SEQ ID NO: 3038157 - RNA, 21 nt, Human
cagagaggacgugggcggcag

SEQ ID NO: 3038158 - RNA, 16 nt, Human
cagagaggacgugggc

SEQ ID NO: 3038159 - RNA, 17 nt, Human
cagagaggacgugggcg

SEQ ID NO: 3038160 - RNA, 16 nt, Human
caggccacggcagccu

SEQ ID NO: 3038161 - RNA, 22 nt, Human
cagcuguuagaguccaacgugg

SEQ ID NO: 3038162 - RNA, 12 nt, Human
aacccccacaca

SEQ ID NO: 3038163 - RNA, 14 nt, Human
aacccccacacaca

SEQ ID NO: 3038164 - RNA, 13 nt, Human
aacccccacacac

SEQ ID NO: 3038165 - RNA, 15 nt, Human
aacccccacacacac

SEQ ID NO: 3038166 - RNA, 20 nt, Human
gugcacagacgucccuccac

SEQ ID NO: 3038167 - RNA, 22 nt, Human
gugcacagacgucccuccacgu

SEQ ID NO: 3038168 - RNA, 17 nt, Human
aacugccuuaaaacuuu

SEQ ID NO: 3038169 - RNA, 20 nt, Human
guccaacguggggcagcaca

SEQ ID NO: 3038170 - RNA, 21 nt, Human
guccaacguggggcagcacag

SEQ ID NO: 3038171 - RNA, 18 nt, Human
guccaacguggggcagca

SEQ ID NO: 3038172 - RNA, 12 nt, Human
gucaggccacgg

SEQ ID NO: 3038173 - RNA, 14 nt, Human
gucaggccacggca

SEQ ID NO: 3038174 - RNA, 15 nt, Human
gucaggccacggcag

SEQ ID NO: 3038175 - RNA, 16 nt, Human
gucaggccacggcagc

SEQ ID NO: 3038176 - RNA, 18 nt, Human
gucaggccacggcagccu

SEQ ID NO: 3038177 - RNA, 13 nt, Human
uaaaacuuuaauc

SEQ ID NO: 3038178 - RNA, 9 nt, Human
uaaaaaguu

SEQ ID NO: 3038179 - RNA, 15 nt, Human
uaaaaaguuaaaaag

SEQ ID NO: 3038180 - RNA, 13 nt, Human
uaaaaaguuaaaa

SEQ ID NO: 3038181 - RNA, 12 nt, Human
uaaaaaguuaaa

SEQ ID NO: 3038182 - RNA, 11 nt, Human
uaaaaaguuaa

SEQ ID NO: 3038183 - RNA, 17 nt, Human
uaaaaaguuaaaaaguu

SEQ ID NO: 3038184 - RNA, 12 nt, Human
aauuagagcaga

SEQ ID NO: 3038185 - RNA, 22 nt, Human
aauuagagcagaugaccccucc

SEQ ID NO: 3038186 - RNA, 20 nt, Human
uauaacugccuuaaaacuuu

SEQ ID NO: 3038187 - RNA, 19 nt, Human
uauaacugccuuaaaacuu

SEQ ID NO: 3038188 - RNA, 16 nt, Human
acagacgucccuccac

SEQ ID NO: 3038189 - RNA, 15 nt, Human
acagacgucccucca

SEQ ID NO: 3038190 - RNA, 20 nt, Human
acagaaaacgguuaaaacug

SEQ ID NO: 3038191 - RNA, 15 nt, Human
acagaaaauauacug

SEQ ID NO: 3038192 - RNA, 14 nt, Human
acagaaaauauacu

SEQ ID NO: 3038193 - RNA, 13 nt, Human
acagaaaauauac

SEQ ID NO: 3038194 - RNA, 12 nt, Human
acagaaaauaua

SEQ ID NO: 3038195 - RNA, 12 nt, Human
acacacagccac

SEQ ID NO: 3038196 - RNA, 11 nt, Human
acacacagcca

SEQ ID NO: 3038197 - RNA, 22 nt, Human
acacacagaaaauauacuguaa

SEQ ID NO: 3038198 - RNA, 21 nt, Human
acacacagaaaauauacugua

SEQ ID NO: 3038199 - RNA, 20 nt, Human
acacacagaaaauauacugu

SEQ ID NO: 3038200 - RNA, 19 nt, Human
acacacagaaaauauacug

SEQ ID NO: 3038201 - RNA, 18 nt, Human
acacacagaaaauauacu

SEQ ID NO: 3038202 - RNA, 17 nt, Human
acacacagaaaauauac

SEQ ID NO: 3038203 - RNA, 16 nt, Human
acacacagaaaauaua

SEQ ID NO: 3038204 - RNA, 15 nt, Human
acacacagaaaauau

SEQ ID NO: 3038205 - RNA, 14 nt, Human
acacacagaaaaua

SEQ ID NO: 3038206 - RNA, 13 nt, Human
acacacagaaaau

SEQ ID NO: 3038207 - RNA, 15 nt, Human
acacacacacacaug

SEQ ID NO: 3038208 - RNA, 14 nt, Human
acacacacacacau

SEQ ID NO: 3038209 - RNA, 16 nt, Human
acacacacacacagcc

SEQ ID NO: 3038210 - RNA, 15 nt, Human
acacacacacacagc

SEQ ID NO: 3038211 - RNA, 13 nt, Human
acacacacacagc

SEQ ID NO: 3038212 - RNA, 12 nt, Human
acacacacacag

SEQ ID NO: 3038213 - RNA, 17 nt, Human
acacacacacacaugca

SEQ ID NO: 3038214 - RNA, 16 nt, Human
acacacacacacaugc

SEQ ID NO: 3038215 - RNA, 13 nt, Human
acacacacacaug

SEQ ID NO: 3038216 - RNA, 14 nt, Human
acacacacacaugc

SEQ ID NO: 3038217 - RNA, 12 nt, Human
acacacacacau

SEQ ID NO: 3038218 - RNA, 15 nt, Human
acacacacacagcca

SEQ ID NO: 3038219 - RNA, 14 nt, Human
acacacacacagcc

SEQ ID NO: 3038220 - RNA, 16 nt, Human
acacacacacacacag

SEQ ID NO: 3038221 - RNA, 14 nt, Human
acacacacacacag

SEQ ID NO: 3038222 - RNA, 17 nt, Human
ucaggccacggcagccu

SEQ ID NO: 3038223 - RNA, 14 nt, Human
ucaggccacggcag

SEQ ID NO: 3038224 - RNA, 16 nt, Human
ucaggccacggcagcc

SEQ ID NO: 3038225 - RNA, 13 nt, Human
ucagggggccagg

SEQ ID NO: 3038226 - RNA, 14 nt, Human
ucgccguggcugcg

SEQ ID NO: 3038227 - RNA, 20 nt, Human
acuuucuuuucgccguggcu

SEQ ID NO: 3038228 - RNA, 21 nt, Human
acuuucuuuucgccguggcug

SEQ ID NO: 3038229 - RNA, 11 nt, Human
agaaagagaga

SEQ ID NO: 3038230 - RNA, 10 nt, Human
agaaagagag

SEQ ID NO: 3038231 - RNA, 15 nt, Human
agaaagagagaaaau

SEQ ID NO: 3038232 - RNA, 14 nt, Human
agaaagagagaaaa

SEQ ID NO: 3038233 - RNA, 13 nt, Human
agaaagagagaaa

SEQ ID NO: 3038234 - RNA, 12 nt, Human
agaaagagagaa

SEQ ID NO: 3038235 - RNA, 22 nt, Human
agaaagagagaaaauaaaaagu

SEQ ID NO: 3038236 - RNA, 18 nt, Human
agaaagagagaaaauaaa

SEQ ID NO: 3038237 - RNA, 17 nt, Human
agaaagagagaaaauaa

SEQ ID NO: 3038238 - RNA, 16 nt, Human
agaaagagagaaaaua

SEQ ID NO: 3038239 - RNA, 13 nt, Human
agagagaaaauaa

SEQ ID NO: 3038240 - RNA, 12 nt, Human
agagagaaaaua

SEQ ID NO: 3038241 - RNA, 22 nt, Human
agagagaaaauaaaaaguuaaa

SEQ ID NO: 3038242 - RNA, 20 nt, Human
agagagaaaauaaaaaguua

SEQ ID NO: 3038243 - RNA, 18 nt, Human
agagagaaaauaaaaagu

SEQ ID NO: 3038244 - RNA, 17 nt, Human
agagagaaaauaaaaag

SEQ ID NO: 3038245 - RNA, 16 nt, Human
agagagaaaauaaaaa

SEQ ID NO: 3038246 - RNA, 15 nt, Human
agagagaaaauaaaa

SEQ ID NO: 3038247 - RNA, 22 nt, Human
agccuaccggcaauuuccggcc

SEQ ID NO: 3038248 - RNA, 13 nt, Human
ugcauacacacac

SEQ ID NO: 3038249 - RNA, 23 nt, Human
ugcauacacacacacacacagcc

SEQ ID NO: 3038250 - RNA, 22 nt, Human
ugcauacacacacacacacagc

SEQ ID NO: 3038251 - RNA, 21 nt, Human
ugcauacacacacacacacag

SEQ ID NO: 3038252 - RNA, 14 nt, Human
ugcauacacacaca

SEQ ID NO: 3038253 - RNA, 16 nt, Human
ugcauacacacacaca

SEQ ID NO: 3038254 - RNA, 15 nt, Human
ugcauacacacacac

SEQ ID NO: 3038255 - RNA, 15 nt, Human
ugccuuaaaacuuua

SEQ ID NO: 3038256 - RNA, 17 nt, Human
ugcgggcugggcagcug

SEQ ID NO: 3038257 - RNA, 13 nt, Human
ugcgggcugggca

SEQ ID NO: 3038258 - RNA, 14 nt, Human
ugcgggcugggcag

SEQ ID NO: 3038259 - RNA, 15 nt, Human
ugcgggcugggcagc

SEQ ID NO: 3038260 - RNA, 16 nt, Human
ugcgggcugggcagcu

SEQ ID NO: 3038261 - RNA, 22 nt, Human
aggugcacagacgucccuccac

SEQ ID NO: 3038262 - RNA, 23 nt, Human
aggugcacagacgucccuccacg

SEQ ID NO: 3038263 - RNA, 23 nt, Human
uuagacagucaaggaguggcuua

SEQ ID NO: 3038264 - RNA, 21 nt, Human
auuagagcagaugaccccucc

SEQ ID NO: 3038265 - RNA, 13 nt, Human
auauaacugccuu

SEQ ID NO: 3038266 - RNA, 20 nt, Human
auauaacugccuuaaaacuu

SEQ ID NO: 3038267 - RNA, 14 nt, Human
uucgccguggcugc

SEQ ID NO: 3038268 - RNA, 20 nt, Human
uucgccguggcugcggcacc

SEQ ID NO: 3038269 - RNA, 21 nt, Human
uucgccguggcugcggcaccc

SEQ ID NO: 3038270 - RNA, 18 nt, Human
aguccaacguggggcagc

SEQ ID NO: 3038271 - RNA, 19 nt, Human
aguccaacguggggcagca

SEQ ID NO: 3038272 - RNA, 20 nt, Human
aguccaacguggggcagcac

SEQ ID NO: 3038273 - RNA, 22 nt, Human
aguccaacguggggcagcacag

SEQ ID NO: 3038274 - RNA, 23 nt, Human
aguccaacguggggcagcacaga

SEQ ID NO: 3038275 - RNA, 16 nt, Human
augccugcggaguugu

SEQ ID NO: 3038276 - RNA, 19 nt, Human
auggaggcacacagcugca

SEQ ID NO: 3038277 - RNA, 12 nt, Human
agagggggccac

SEQ ID NO: 3038278 - RNA, 14 nt, Human
agagagggggccac

SEQ ID NO: 3038279 - RNA, 16 nt, Human
agagagggggccaccu

SEQ ID NO: 3038280 - RNA, 19 nt, Human
agagagggggccaccuccc

SEQ ID NO: 3038281 - RNA, 19 nt, Human
aaguagacuucauuuuucc

SEQ ID NO: 3038282 - RNA, 23 nt, Human
aaguagacuucauuuuuccuaac

SEQ ID NO: 3038283 - RNA, 23 nt, Human
aagagagaaaauaaaaaguuaaa

SEQ ID NO: 3038284 - RNA, 22 nt, Human
aagagagaaaauaaaaaguuaa

SEQ ID NO: 3038285 - RNA, 21 nt, Human
aagagagaaaauaaaaaguua

SEQ ID NO: 3038286 - RNA, 20 nt, Human
aagagagaaaauaaaaaguu

SEQ ID NO: 3038287 - RNA, 19 nt, Human
aagagagaaaauaaaaagu

SEQ ID NO: 3038288 - RNA, 13 nt, Human
aauauaacugccu

SEQ ID NO: 3038289 - RNA, 13 nt, Human
aacgguuaaaacu

SEQ ID NO: 3038290 - RNA, 14 nt, Human
aacgguuaaaacug

SEQ ID NO: 3038291 - RNA, 23 nt, Human
aacugaaugaaacccccacacac

SEQ ID NO: 3038292 - RNA, 18 nt, Human
aacugaaugaaaccccca

SEQ ID NO: 3038293 - RNA, 16 nt, Human
aacaggauuagacagu

SEQ ID NO: 3038294 - RNA, 19 nt, Human
aacaggauuagacagucaa

SEQ ID NO: 3038295 - RNA, 12 nt, Human
aaaauaaaaagu

SEQ ID NO: 3038296 - RNA, 13 nt, Human
aaaauaaaaaguu

SEQ ID NO: 3038297 - RNA, 22 nt, Human
aaacccccacacacacacacau

SEQ ID NO: 3038298 - RNA, 16 nt, Human
aaacccccacacacac

SEQ ID NO: 3038299 - RNA, 15 nt, Human
aaacccccacacaca

SEQ ID NO: 3038300 - RNA, 20 nt, Human
acgcacgugggucuucaggg

SEQ ID NO: 3038301 - RNA, 19 nt, Human
acgcacgugggucuucagg

SEQ ID NO: 3038302 - RNA, 17 nt, Human
accggcaauuuccggcc

SEQ ID NO: 3038303 - RNA, 18 nt, Human
accggcaauuuccggcca

SEQ ID NO: 3038304 - RNA, 21 nt, Human
acugaaugaaacccccacaca

SEQ ID NO: 3038305 - RNA, 19 nt, Human
acugaaugaaacccccaca

SEQ ID NO: 3038306 - RNA, 16 nt, Human
acugaaugaaaccccc

SEQ ID NO: 3038307 - RNA, 15 nt, Human
acagcugcagagaca

SEQ ID NO: 3038308 - RNA, 17 nt, Human
acagcugcagagacaga

SEQ ID NO: 3038309 - RNA, 21 nt, Human
acagcugcagagacagagagg

SEQ ID NO: 3038310 - RNA, 21 nt, Human
caaacugaaugaaacccccac

SEQ ID NO: 3038311 - RNA, 22 nt, Human
caaacugaaugaaacccccaca

SEQ ID NO: 3038312 - RNA, 12 nt, Human
caacguggggca

SEQ ID NO: 3038313 - RNA, 15 nt, Human
caacguggggcagca

SEQ ID NO: 3038314 - RNA, 17 nt, Human
caacguggggcagcaca

SEQ ID NO: 3038315 - RNA, 18 nt, Human
caacguggggcagcacag

SEQ ID NO: 3038316 - RNA, 18 nt, Human
cacagcugcagagacaga

SEQ ID NO: 3038317 - RNA, 19 nt, Human
cacagcugcagagacagag

SEQ ID NO: 3038318 - RNA, 15 nt, Human
cacagccacacacac

SEQ ID NO: 3038319 - RNA, 23 nt, Human
cacagccacacacacagaaaaua

SEQ ID NO: 3038320 - RNA, 22 nt, Human
cacagccacacacacagaaaau

SEQ ID NO: 3038321 - RNA, 21 nt, Human
cacagccacacacacagaaaa

SEQ ID NO: 3038322 - RNA, 20 nt, Human
cacagccacacacacagaaa

SEQ ID NO: 3038323 - RNA, 19 nt, Human
cacagccacacacacagaa

SEQ ID NO: 3038324 - RNA, 18 nt, Human
cacagccacacacacaga

SEQ ID NO: 3038325 - RNA, 17 nt, Human
cacagccacacacacag

SEQ ID NO: 3038326 - RNA, 13 nt, Human
caaugugccccca

SEQ ID NO: 3038327 - RNA, 16 nt, Human
cacacacagccacaca

SEQ ID NO: 3038328 - RNA, 15 nt, Human
cacacacagccacac

SEQ ID NO: 3038329 - RNA, 13 nt, Human
cacacacagaaaa

SEQ ID NO: 3038330 - RNA, 11 nt, Human
cacacacagaa

SEQ ID NO: 3038331 - RNA, 19 nt, Human
cacacacagaaaauauacu

SEQ ID NO: 3038332 - RNA, 16 nt, Human
cacacacagaaaauau

SEQ ID NO: 3038333 - RNA, 15 nt, Human
cacacacagaaaaua

SEQ ID NO: 3038334 - RNA, 14 nt, Human
cacacacagaaaau

SEQ ID NO: 3038335 - RNA, 23 nt, Human
cacacacagaaaauauacuguaa

SEQ ID NO: 3038336 - RNA, 21 nt, Human
cacacacagaaaauauacugu

SEQ ID NO: 3038337 - RNA, 20 nt, Human
cacacacagaaaauauacug

SEQ ID NO: 3038338 - RNA, 14 nt, Human
cacacacagccaca

SEQ ID NO: 3038339 - RNA, 13 nt, Human
cacacacagccac

SEQ ID NO: 3038340 - RNA, 12 nt, Human
cacacacagcca

SEQ ID NO: 3038341 - RNA, 11 nt, Human
cacacacagcc

SEQ ID NO: 3038342 - RNA, 16 nt, Human
cacacacacacaugca

SEQ ID NO: 3038343 - RNA, 12 nt, Human
cacacacacaga

SEQ ID NO: 3038344 - RNA, 11 nt, Human
cacacacacag

SEQ ID NO: 3038345 - RNA, 14 nt, Human
cacacacacacaug

SEQ ID NO: 3038346 - RNA, 15 nt, Human
cacacacacacaugc

SEQ ID NO: 3038347 - RNA, 13 nt, Human
cacacacacacau

SEQ ID NO: 3038348 - RNA, 16 nt, Human
cacacacacacagcca

SEQ ID NO: 3038349 - RNA, 15 nt, Human
cacacacacacagcc

SEQ ID NO: 3038350 - RNA, 14 nt, Human
cacacacacacagc

SEQ ID NO: 3038351 - RNA, 13 nt, Human
cacacacacacag

SEQ ID NO: 3038352 - RNA, 16 nt, Human
cacacacacacacaug

SEQ ID NO: 3038353 - RNA, 15 nt, Human
cacacacacacacau

SEQ ID NO: 3038354 - RNA, 15 nt, Human
cacacacacaugcau

SEQ ID NO: 3038355 - RNA, 14 nt, Human
cacacacacaugca

SEQ ID NO: 3038356 - RNA, 12 nt, Human
cacacacacaug

SEQ ID NO: 3038357 - RNA, 13 nt, Human
cacacacacaugc

SEQ ID NO: 3038358 - RNA, 15 nt, Human
cacacacacagccac

SEQ ID NO: 3038359 - RNA, 14 nt, Human
cacacacacagcca

SEQ ID NO: 3038360 - RNA, 13 nt, Human
cacacacacagcc

SEQ ID NO: 3038361 - RNA, 12 nt, Human
cacacacacagc

SEQ ID NO: 3038362 - RNA, 15 nt, Human
cacacacacagaaaa

SEQ ID NO: 3038363 - RNA, 14 nt, Human
cacacacacagaaa

SEQ ID NO: 3038364 - RNA, 13 nt, Human
cacacacacagaa

SEQ ID NO: 3038365 - RNA, 14 nt, Human
cacacacacacaca

SEQ ID NO: 3038366 - RNA, 13 nt, Human
cacacacacacac

SEQ ID NO: 3038367 - RNA, 15 nt, Human
cacacacacacacag

SEQ ID NO: 3038368 - RNA, 16 nt, Human
cacacacacacacagc

SEQ ID NO: 3038369 - RNA, 23 nt, Human
caugcauacacacacacacacag

SEQ ID NO: 3038370 - RNA, 16 nt, Human
caugcauacacacaca

SEQ ID NO: 3038371 - RNA, 15 nt, Human
caugcauacacacac

SEQ ID NO: 3038372 - RNA, 14 nt, Human
caugcauacacaca

SEQ ID NO: 3038373 - RNA, 13 nt, Human
caugcauacacac

SEQ ID NO: 3038374 - RNA, 12 nt, Human
caugcauacaca

SEQ ID NO: 3038375 - RNA, 11 nt, Human
caugcauacac

SEQ ID NO: 3038376 - RNA, 12 nt, Human
caugugggagcu

SEQ ID NO: 3038377 - RNA, 11 nt, Human
ccacacacaca

SEQ ID NO: 3038378 - RNA, 13 nt, Human
ccacacacacaca

SEQ ID NO: 3038379 - RNA, 15 nt, Human
ccacacacacacaca

SEQ ID NO: 3038380 - RNA, 14 nt, Human
ccacacacacacac

SEQ ID NO: 3038381 - RNA, 12 nt, Human
ccacacacacag

SEQ ID NO: 3038382 - RNA, 24 nt, Human
ccacacacacacacaugcauacac

SEQ ID NO: 3038383 - RNA, 21 nt, Human
ccacacacacacacaugcaua

SEQ ID NO: 3038384 - RNA, 17 nt, Human
ccacacacacacacaug

SEQ ID NO: 3038385 - RNA, 16 nt, Human
ccacacacacagaaaa

SEQ ID NO: 3038386 - RNA, 15 nt, Human
ccacacacacagaaa

SEQ ID NO: 3038387 - RNA, 14 nt, Human
ccacacacacagaa

SEQ ID NO: 3038388 - RNA, 13 nt, Human
ccacacacacaga

SEQ ID NO: 3038389 - RNA, 13 nt, Human
ccauggaggcaca

SEQ ID NO: 3038390 - RNA, 21 nt, Human
ccauggaggcacacagcugca

SEQ ID NO: 3038391 - RNA, 17 nt, Human
ccauggaggcacacagc

SEQ ID NO: 3038392 - RNA, 20 nt, Human
ccauggaggcacacagcugc

SEQ ID NO: 3038393 - RNA, 18 nt, Human
cccgcaaugugcccccag

SEQ ID NO: 3038394 - RNA, 22 nt, Human
cccgcaaugugcccccagacgc

SEQ ID NO: 3038395 - RNA, 21 nt, Human
cccuccccuaaugccugcgga

SEQ ID NO: 3038396 - RNA, 17 nt, Human
cgugggcggcagagagg

SEQ ID NO: 3038397 - RNA, 12 nt, Human
cguggggcagca

SEQ ID NO: 3038398 - RNA, 19 nt, Human
cgcuuuugcuggucacugc

SEQ ID NO: 3038399 - RNA, 11 nt, Human
cggcagagagg

SEQ ID NO: 3038400 - RNA, 13 nt, Human
cggcagagaggac

SEQ ID NO: 3038401 - RNA, 21 nt, Human
cuccccaggccguggcugccc

SEQ ID NO: 3038402 - RNA, 20 nt, Human
cugccauggaggcacacagc

SEQ ID NO: 3038403 - RNA, 21 nt, Human
cugccauggaggcacacagcu

SEQ ID NO: 3038404 - RNA, 23 nt, Human
cugccauggaggcacacagcugc

SEQ ID NO: 3038405 - RNA, 22 nt, Human
cuggucacugccauggaggcac

SEQ ID NO: 3038406 - RNA, 14 nt, Human
cuggucacugccau

SEQ ID NO: 3038407 - RNA, 23 nt, Human
gaacaugaaaacagaaaacgguu

SEQ ID NO: 3038408 - RNA, 23 nt, Human
gaaagagagaaaauaaaaaguua

SEQ ID NO: 3038409 - RNA, 22 nt, Human
gaaagagagaaaauaaaaaguu

SEQ ID NO: 3038410 - RNA, 21 nt, Human
gaaagagagaaaauaaaaagu

SEQ ID NO: 3038411 - RNA, 20 nt, Human
gaaagagagaaaauaaaaag

SEQ ID NO: 3038412 - RNA, 18 nt, Human
gaaagagagaaaauaaaa

SEQ ID NO: 3038413 - RNA, 17 nt, Human
gaaagagagaaaauaaa

SEQ ID NO: 3038414 - RNA, 16 nt, Human
gaaagagagaaaauaa

SEQ ID NO: 3038415 - RNA, 11 nt, Human
gaaagagagaa

SEQ ID NO: 3038416 - RNA, 15 nt, Human
gaaagagagaaaaua

SEQ ID NO: 3038417 - RNA, 14 nt, Human
gaaagagagaaaau

SEQ ID NO: 3038418 - RNA, 13 nt, Human
gaaagagagaaaa

SEQ ID NO: 3038419 - RNA, 12 nt, Human
gaaagagagaaa

SEQ ID NO: 3038420 - RNA, 16 nt, Human
cuuuucgccguggcug

SEQ ID NO: 3038421 - RNA, 23 nt, Human
cuuuguuuuuuuuuccuguccuu

SEQ ID NO: 3038422 - RNA, 16 nt, Human
cuuuguuuuuuuuucc

SEQ ID NO: 3038423 - RNA, 21 nt, Human
cuuuguuuuuuuuuccugucc

SEQ ID NO: 3038424 - RNA, 21 nt, Human
cuuucuuuucgccguggcugc

SEQ ID NO: 3038425 - RNA, 17 nt, Human
gagaaaauaaaaaguua

SEQ ID NO: 3038426 - RNA, 18 nt, Human
gagaaaauaaaaaguuaa

SEQ ID NO: 3038427 - RNA, 19 nt, Human
gagaaaauaaaaaguuaaa

SEQ ID NO: 3038428 - RNA, 22 nt, Human
gagacagagaggacgugggcgg

SEQ ID NO: 3038429 - RNA, 12 nt, Human
gagagaaaauaa

SEQ ID NO: 3038430 - RNA, 11 nt, Human
gagagaaaaua

SEQ ID NO: 3038431 - RNA, 13 nt, Human
gagagaaaauaaa

SEQ ID NO: 3038432 - RNA, 12 nt, Human
gacgucccucca

SEQ ID NO: 3038433 - RNA, 16 nt, Human
gcacguaguaggguca

SEQ ID NO: 3038434 - RNA, 20 nt, Human
gcacguaguagggucaggcc

SEQ ID NO: 3038435 - RNA, 21 nt, Human
gcacguaguagggucaggcca

SEQ ID NO: 3038436 - RNA, 22 nt, Human
gccccuguuaccuaauuagagc

SEQ ID NO: 3038437 - RNA, 12 nt, Human
gccuuaaaacuu

SEQ ID NO: 3038438 - RNA, 14 nt, Human
uuuuuccuguccuu

SEQ ID NO: 3038439 - RNA, 21 nt, Human
gucccuccacguucaccccuc

SEQ ID NO: 3038440 - RNA, 19 nt, Human
gucccuccacguucacccc

SEQ ID NO: 3038441 - RNA, 20 nt, Human
gucccuccacguucaccccu

SEQ ID NO: 3038442 - RNA, 18 nt, Human
guaguagggucaggccac

SEQ ID NO: 3038443 - RNA, 21 nt, Human
guagggucaggccacggcagc

SEQ ID NO: 3038444 - RNA, 22 nt, Human
guagggucaggccacggcagcc

SEQ ID NO: 3038445 - RNA, 10 nt, Human
guuaccuaau

SEQ ID NO: 3038446 - RNA, 19 nt, Human
guuaccuaauuagagcaga

SEQ ID NO: 3038447 - RNA, 16 nt, Human
guucaccccuccaccc

SEQ ID NO: 3038448 - RNA, 12 nt, Human
guucaccccucc

SEQ ID NO: 3038449 - RNA, 14 nt, Human
guucaccccuccac

SEQ ID NO: 3038450 - RNA, 12 nt, Human
guuaaaacuguc

SEQ ID NO: 3038451 - RNA, 20 nt, Human
guggcuuacuacauguggga

SEQ ID NO: 3038452 - RNA, 18 nt, Human
guggcugcggcacccuug

SEQ ID NO: 3038453 - RNA, 16 nt, Human
guggcugcccacacac

SEQ ID NO: 3038454 - RNA, 13 nt, Human
gugggcggcagag

SEQ ID NO: 3038455 - RNA, 16 nt, Human
gugggcggcagagagg

SEQ ID NO: 3038456 - RNA, 12 nt, Human
guggggcagcac

SEQ ID NO: 3038457 - RNA, 14 nt, Human
guggggcagcacag

SEQ ID NO: 3038458 - RNA, 19 nt, Human
guggggcagcacagagagg

SEQ ID NO: 3038459 - RNA, 23 nt, Human
guggggcagcacagagagggggc

SEQ ID NO: 3038460 - RNA, 12 nt, Human
uaaagaaagaga

SEQ ID NO: 3038461 - RNA, 13 nt, Human
uaaagaaagagag

SEQ ID NO: 3038462 - RNA, 22 nt, Human
uaauuagagcagaugaccccuc

SEQ ID NO: 3038463 - RNA, 20 nt, Human
uacacacacacacacagcca

SEQ ID NO: 3038464 - RNA, 19 nt, Human
uacacacacacacacagcc

SEQ ID NO: 3038465 - RNA, 12 nt, Human
uacacacacaca

SEQ ID NO: 3038466 - RNA, 13 nt, Human
uacacacacacac

SEQ ID NO: 3038467 - RNA, 18 nt, Human
uacacacacacacacagc

SEQ ID NO: 3038468 - RNA, 17 nt, Human
uacacacacacacacag

SEQ ID NO: 3038469 - RNA, 16 nt, Human
uacacacacacacaca

SEQ ID NO: 3038470 - RNA, 14 nt, Human
uacacacacacaca

SEQ ID NO: 3038471 - RNA, 17 nt, Human
uaccuaauuagagcaga

SEQ ID NO: 3038472 - RNA, 20 nt, Human
uaccuaauuagagcagauga

SEQ ID NO: 3038473 - RNA, 15 nt, Human
uaccuaauuagagca

SEQ ID NO: 3038474 - RNA, 19 nt, Human
ugacaugcgggcugggcag

SEQ ID NO: 3038475 - RNA, 20 nt, Human
ugacaugcgggcugggcagc

SEQ ID NO: 3038476 - RNA, 21 nt, Human
ugacaugcgggcugggcagcu

SEQ ID NO: 3038477 - RNA, 22 nt, Human
ugacaugcgggcugggcagcug

SEQ ID NO: 3038478 - RNA, 17 nt, Human
ugacaugcgggcugggc

SEQ ID NO: 3038479 - RNA, 18 nt, Human
ugacaugcgggcugggca

SEQ ID NO: 3038480 - RNA, 13 nt, Human
ugacauccaagcu

SEQ ID NO: 3038481 - RNA, 17 nt, Human
ugacauccaagcuuccu

SEQ ID NO: 3038482 - RNA, 22 nt, Human
ucuuuucgccguggcugcggca

SEQ ID NO: 3038483 - RNA, 18 nt, Human
ugaaaacagaaaacgguu

SEQ ID NO: 3038484 - RNA, 15 nt, Human
ucccacuugccccug

SEQ ID NO: 3038485 - RNA, 18 nt, Human
uccggaauccuguccuca

SEQ ID NO: 3038486 - RNA, 22 nt, Human
uccggaauccuguccucagcuu

SEQ ID NO: 3038487 - RNA, 15 nt, Human
uccggaauccugucc

SEQ ID NO: 3038488 - RNA, 14 nt, Human
uguccucagcuucu

SEQ ID NO: 3038489 - RNA, 14 nt, Human
uuaaaacuuuaauc

SEQ ID NO: 3038490 - RNA, 17 nt, Human
uguugacauccaagcuu

SEQ ID NO: 3038491 - RNA, 19 nt, Human
uguugacauccaagcuucc

SEQ ID NO: 3038492 - RNA, 23 nt, Human
ugugugaagaucacguuccuucc

SEQ ID NO: 3038493 - RNA, 20 nt, Human
uguuaccuaauuagagcaga

SEQ ID NO: 3038494 - RNA, 20 nt, Human
ccugguuccggaauccuguc

SEQ ID NO: 3038495 - RNA, 21 nt, Human
ccugguuccggaauccugucc

SEQ ID NO: 3038496 - RNA, 14 nt, Human
ccuaauuagagcag

SEQ ID NO: 3038497 - RNA, 23 nt, Human
ccuaauuagagcagaugaccccu

SEQ ID NO: 3038498 - RNA, 15 nt, Human
cagucaaggaguggc

SEQ ID NO: 3038499 - RNA, 15 nt, Human
caggugcacagacgu

SEQ ID NO: 3038500 - RNA, 23 nt, Human
caggugcacagacgucccuccac

SEQ ID NO: 3038501 - RNA, 15 nt, Human
cagcugcagagacag

SEQ ID NO: 3038502 - RNA, 16 nt, Human
cagcugcagagacaga

SEQ ID NO: 3038503 - RNA, 20 nt, Human
cagcacagagagggggccac

SEQ ID NO: 3038504 - RNA, 13 nt, Human
cagcacagagagg

SEQ ID NO: 3038505 - RNA, 17 nt, Human
cagcacagagagggggc

SEQ ID NO: 3038506 - RNA, 12 nt, Human
cagcacagagag

SEQ ID NO: 3038507 - RNA, 22 nt, Human
cauacacacacacacacagcca

SEQ ID NO: 3038508 - RNA, 21 nt, Human
cauacacacacacacacagcc

SEQ ID NO: 3038509 - RNA, 23 nt, Human
cauacacacacacacacagccac

SEQ ID NO: 3038510 - RNA, 15 nt, Human
cacagaaaauauacu

SEQ ID NO: 3038511 - RNA, 14 nt, Human
cacagaaaauauac

SEQ ID NO: 3038512 - RNA, 13 nt, Human
cacagaaaauaua

SEQ ID NO: 3038513 - RNA, 12 nt, Human
cacagaaaauau

SEQ ID NO: 3038514 - RNA, 20 nt, Human
cacagaaaauauacuguaaa

SEQ ID NO: 3038515 - RNA, 19 nt, Human
cacagaaaauauacuguaa

SEQ ID NO: 3038516 - RNA, 18 nt, Human
cacagaaaauauacugua

SEQ ID NO: 3038517 - RNA, 17 nt, Human
cacagaaaauauacugu

SEQ ID NO: 3038518 - RNA, 16 nt, Human
cacagaaaauauacug

SEQ ID NO: 3038519 - RNA, 23 nt, Human
ggacuuucuuuucgccguggcug

SEQ ID NO: 3038520 - RNA, 21 nt, Human
ggacuuucuuuucgccguggc

SEQ ID NO: 3038521 - RNA, 14 nt, Human
ggaauccuguccuc

SEQ ID NO: 3038522 - RNA, 19 nt, Human
ggaauccuguccucagcuu

SEQ ID NO: 3038523 - RNA, 18 nt, Human
aaaacgguuaaaacuguc

SEQ ID NO: 3038524 - RNA, 16 nt, Human
aaaacgguuaaaacug

SEQ ID NO: 3038525 - RNA, 23 nt, Human
aaauauacuguaaagaaagagag

SEQ ID NO: 3038526 - RNA, 21 nt, Human
aaauauacuguaaagaaagag

SEQ ID NO: 3038527 - RNA, 19 nt, Human
aaauauacuguaaagaaag

SEQ ID NO: 3038528 - RNA, 17 nt, Human
aaauauacuguaaagaa

SEQ ID NO: 3038529 - RNA, 12 nt, Human
aaauauacugua

SEQ ID NO: 3038530 - RNA, 16 nt, Human
aaauauacuguaaaga

SEQ ID NO: 3038531 - RNA, 15 nt, Human
aaauauacuguaaag

SEQ ID NO: 3038532 - RNA, 14 nt, Human
aaauauacuguaaa

SEQ ID NO: 3038533 - RNA, 13 nt, Human
aaauauacuguaa

SEQ ID NO: 3038534 - RNA, 23 nt, Human
guaaagaaagagagaaaauaaaa

SEQ ID NO: 3038535 - RNA, 14 nt, Human
guaaagaaagagag

SEQ ID NO: 3038536 - RNA, 22 nt, Human
guaaagaaagagagaaaauaaa

SEQ ID NO: 3038537 - RNA, 21 nt, Human
guaaagaaagagagaaaauaa

SEQ ID NO: 3038538 - RNA, 20 nt, Human
guaaagaaagagagaaaaua

SEQ ID NO: 3038539 - RNA, 19 nt, Human
guaaagaaagagagaaaau

SEQ ID NO: 3038540 - RNA, 18 nt, Human
guaaagaaagagagaaaa

SEQ ID NO: 3038541 - RNA, 17 nt, Human
guaaagaaagagagaaa

SEQ ID NO: 3038542 - RNA, 16 nt, Human
guaaagaaagagagaa

SEQ ID NO: 3038543 - RNA, 15 nt, Human
guaaagaaagagaga

SEQ ID NO: 3038544 - RNA, 12 nt, Human
aaauaaaaaguu

SEQ ID NO: 3038545 - RNA, 14 nt, Human
aaauaaaaaguuaa

SEQ ID NO: 3038546 - RNA, 13 nt, Human
aaauaaaaaguua

SEQ ID NO: 3038547 - RNA, 19 nt, Human
aaauaaaaaguuaaaaagu

SEQ ID NO: 3038548 - RNA, 15 nt, Human
aaauaaaaaguuaaa

SEQ ID NO: 3038549 - RNA, 10 nt, Human
aaauaaaaag

SEQ ID NO: 3038550 - RNA, 12 nt, Human
aaacugucccuu

SEQ ID NO: 3038551 - RNA, 15 nt, Human
aaacgguuaaaacug

SEQ ID NO: 3038552 - RNA, 17 nt, Human
aaacgguuaaaacuguc

SEQ ID NO: 3038553 - RNA, 14 nt, Human
gggggccaggugca

SEQ ID NO: 3038554 - RNA, 20 nt, Human
gaguccaacguggggcagca

SEQ ID NO: 3038555 - RNA, 22 nt, Human
gaguccaacguggggcagcaca

SEQ ID NO: 3038556 - RNA, 14 nt, Human
gcagcuguuagagu

SEQ ID NO: 3038557 - RNA, 17 nt, Human
gcagcuguuagagucca

SEQ ID NO: 3038558 - RNA, 11 nt, Human
gcauacacaca

SEQ ID NO: 3038559 - RNA, 22 nt, Human
gcauacacacacacacacagcc

SEQ ID NO: 3038560 - RNA, 21 nt, Human
gcauacacacacacacacagc

SEQ ID NO: 3038561 - RNA, 14 nt, Human
gcauacacacacac

SEQ ID NO: 3038562 - RNA, 13 nt, Human
gcauacacacaca

SEQ ID NO: 3038563 - RNA, 23 nt, Human
gcauacacacacacacacagcca

SEQ ID NO: 3038564 - RNA, 19 nt, Human
gcacacagcugcagagaca

SEQ ID NO: 3038565 - RNA, 18 nt, Human
cuucuuaauauaacugcc

SEQ ID NO: 3038566 - RNA, 20 nt, Human
cuucuuaauauaacugccuu

SEQ ID NO: 3038567 - RNA, 13 nt, Human
cuguaaagaaaga

SEQ ID NO: 3038568 - RNA, 17 nt, Human
cuguaaagaaagagaga

SEQ ID NO: 3038569 - RNA, 16 nt, Human
cuguaaagaaagagag

SEQ ID NO: 3038570 - RNA, 15 nt, Human
cuguaaagaaagaga

SEQ ID NO: 3038571 - RNA, 14 nt, Human
cuguaaagaaagag

SEQ ID NO: 3038572 - RNA, 23 nt, Human
cuguaaagaaagagagaaaauaa

SEQ ID NO: 3038573 - RNA, 22 nt, Human
cuguaaagaaagagagaaaaua

SEQ ID NO: 3038574 - RNA, 21 nt, Human
cuguaaagaaagagagaaaau

SEQ ID NO: 3038575 - RNA, 20 nt, Human
cuguaaagaaagagagaaaa

SEQ ID NO: 3038576 - RNA, 19 nt, Human
cuguaaagaaagagagaaa

SEQ ID NO: 3038577 - RNA, 18 nt, Human
cuguaaagaaagagagaa

SEQ ID NO: 3038578 - RNA, 15 nt, Human
aauaaaaaguuaaaa

SEQ ID NO: 3038579 - RNA, 20 nt, Human
guuuuuuuuuccuguccuuc

SEQ ID NO: 3038580 - RNA, 19 nt, Human
guuuuuuuuuccuguccuu

SEQ ID NO: 3038581 - RNA, 15 nt, Human
uaaagaaagagagaa

SEQ ID NO: 3038582 - RNA, 17 nt, Human
uaaagaaagagagaaaa

SEQ ID NO: 3038583 - RNA, 16 nt, Human
uaaagaaagagagaaa

SEQ ID NO: 3038584 - RNA, 23 nt, Human
uaaagaaagagagaaaauaaaaa

SEQ ID NO: 3038585 - RNA, 22 nt, Human
uaaagaaagagagaaaauaaaa

SEQ ID NO: 3038586 - RNA, 21 nt, Human
uaaagaaagagagaaaauaaa

SEQ ID NO: 3038587 - RNA, 20 nt, Human
uaaagaaagagagaaaauaa

SEQ ID NO: 3038588 - RNA, 19 nt, Human
uaaagaaagagagaaaaua

SEQ ID NO: 3038589 - RNA, 18 nt, Human
uaaagaaagagagaaaau

SEQ ID NO: 3038590 - RNA, 14 nt, Human
uaaagaaagagaga

SEQ ID NO: 3038591 - RNA, 18 nt, Human
gucuucagggggccaggu

SEQ ID NO: 3038592 - RNA, 22 nt, Human
aacguggggcagcacagagagg

SEQ ID NO: 3038593 - RNA, 17 nt, Human
aacguggggcagcacag

SEQ ID NO: 3038594 - RNA, 18 nt, Human
aacguggggcagcacaga

SEQ ID NO: 3038595 - RNA, 22 nt, Human
gugacaugcgggcugggcagcu

SEQ ID NO: 3038596 - RNA, 16 nt, Human
gugacaugcgggcugg

SEQ ID NO: 3038597 - RNA, 20 nt, Human
gugacaugcgggcugggcag

SEQ ID NO: 3038598 - RNA, 21 nt, Human
gugacaugcgggcugggcagc

SEQ ID NO: 3038599 - RNA, 19 nt, Human
uagagcagaugaccccucc

SEQ ID NO: 3038600 - RNA, 23 nt, Human
uacuguaaagaaagagagaaaau

SEQ ID NO: 3038601 - RNA, 21 nt, Human
uacuguaaagaaagagagaaa

SEQ ID NO: 3038602 - RNA, 12 nt, Human
uacuguaaagaa

SEQ ID NO: 3038603 - RNA, 16 nt, Human
uacuguaaagaaagag

SEQ ID NO: 3038604 - RNA, 13 nt, Human
uacuguaaagaaa

SEQ ID NO: 3038605 - RNA, 20 nt, Human
uacuguaaagaaagagagaa

SEQ ID NO: 3038606 - RNA, 19 nt, Human
uacuguaaagaaagagaga

SEQ ID NO: 3038607 - RNA, 18 nt, Human
uacuguaaagaaagagag

SEQ ID NO: 3038608 - RNA, 17 nt, Human
uacuguaaagaaagaga

SEQ ID NO: 3038609 - RNA, 21 nt, Human
acaguuaaaugagaacaugaa

SEQ ID NO: 3038610 - RNA, 17 nt, Human
acagucaaggaguggcu

SEQ ID NO: 3038611 - RNA, 15 nt, Human
acagagaggacgugg

SEQ ID NO: 3038612 - RNA, 19 nt, Human
uccccaggccguggcugcc

SEQ ID NO: 3038613 - RNA, 21 nt, Human
uccccaggccguggcugccca

SEQ ID NO: 3038614 - RNA, 23 nt, Human
uccccaggccguggcugcccaca

SEQ ID NO: 3038615 - RNA, 13 nt, Human
accuccccaggcc

SEQ ID NO: 3038616 - RNA, 14 nt, Human
accuccccaggccg

SEQ ID NO: 3038617 - RNA, 19 nt, Human
accuccccaggccguggcu

SEQ ID NO: 3038618 - RNA, 20 nt, Human
accuccccaggccguggcug

SEQ ID NO: 3038619 - RNA, 22 nt, Human
accugguuccggaauccugucc

SEQ ID NO: 3038620 - RNA, 17 nt, Human
uccacguucaccccucc

SEQ ID NO: 3038621 - RNA, 19 nt, Human
uccaacguggggcagcaca

SEQ ID NO: 3038622 - RNA, 17 nt, Human
uccaacguggggcagca

SEQ ID NO: 3038623 - RNA, 18 nt, Human
uccaacguggggcagcac

SEQ ID NO: 3038624 - RNA, 17 nt, Human
agcagaugaccccuccc

SEQ ID NO: 3038625 - RNA, 18 nt, Human
agaucacguuccuucccc

SEQ ID NO: 3038626 - RNA, 20 nt, Human
agaaaacgguuaaaacuguc

SEQ ID NO: 3038627 - RNA, 19 nt, Human
ucuuaauauaacugccuua

SEQ ID NO: 3038628 - RNA, 18 nt, Human
ucuuaauauaacugccuu

SEQ ID NO: 3038629 - RNA, 15 nt, Human
ucuuaauauaacugc

SEQ ID NO: 3038630 - RNA, 11 nt, Human
ugcauacacac

SEQ ID NO: 3038631 - RNA, 10 nt, Human
ugcauacaca

SEQ ID NO: 3038632 - RNA, 9 nt, Human
ugcauacac

SEQ ID NO: 3038633 - RNA, 12 nt, Human
ugcauacacaca

SEQ ID NO: 3038634 - RNA, 24 nt, Human
ugcagagacagagaggacgugggc

SEQ ID NO: 3038635 - RNA, 19 nt, Human
ugcacguaguagggucagg

SEQ ID NO: 3038636 - RNA, 22 nt, Human
ugcacguaguagggucaggcca

SEQ ID NO: 3038637 - RNA, 16 nt, Human
ugcccacacaccccaa

SEQ ID NO: 3038638 - RNA, 12 nt, Human
aggccguggcug

SEQ ID NO: 3038639 - RNA, 20 nt, Human
aggccguggcugcccacaca

SEQ ID NO: 3038640 - RNA, 23 nt, Human
auacuguaaagaaagagagaaaa

SEQ ID NO: 3038641 - RNA, 22 nt, Human
auacuguaaagaaagagagaaa

SEQ ID NO: 3038642 - RNA, 21 nt, Human
auacuguaaagaaagagagaa

SEQ ID NO: 3038643 - RNA, 20 nt, Human
auacuguaaagaaagagaga

SEQ ID NO: 3038644 - RNA, 19 nt, Human
auacuguaaagaaagagag

SEQ ID NO: 3038645 - RNA, 18 nt, Human
auacuguaaagaaagaga

SEQ ID NO: 3038646 - RNA, 16 nt, Human
auacuguaaagaaaga

SEQ ID NO: 3038647 - RNA, 15 nt, Human
auacuguaaagaaag

SEQ ID NO: 3038648 - RNA, 14 nt, Human
auacuguaaagaaa

SEQ ID NO: 3038649 - RNA, 13 nt, Human
auacuguaaagaa

SEQ ID NO: 3038650 - RNA, 12 nt, Human
auacuguaaaga

SEQ ID NO: 3038651 - RNA, 23 nt, Human
uuccuguccuucucucaccuccu

SEQ ID NO: 3038652 - RNA, 24 nt, Human
uuccuguccuucucucaccuccua

SEQ ID NO: 3038653 - RNA, 17 nt, Human
augcgggcugggcagcu

SEQ ID NO: 3038654 - RNA, 18 nt, Human
augcgggcugggcagcug

SEQ ID NO: 3038655 - RNA, 19 nt, Human
augcgggcugggcagcugu

SEQ ID NO: 3038656 - RNA, 10 nt, Human
agaaaauaua

SEQ ID NO: 3038657 - RNA, 11 nt, Human
acagccacaca

SEQ ID NO: 3038658 - RNA, 10 nt, Human
acagccacac

SEQ ID NO: 3038659 - RNA, 19 nt, Human
acagccacacacacagaaa

SEQ ID NO: 3038660 - RNA, 18 nt, Human
acagccacacacacagaa

SEQ ID NO: 3038661 - RNA, 17 nt, Human
acagccacacacacaga

SEQ ID NO: 3038662 - RNA, 16 nt, Human
acagccacacacacag

SEQ ID NO: 3038663 - RNA, 15 nt, Human
acagccacacacaca

SEQ ID NO: 3038664 - RNA, 14 nt, Human
acagccacacacac

SEQ ID NO: 3038665 - RNA, 13 nt, Human
acagccacacaca

SEQ ID NO: 3038666 - RNA, 12 nt, Human
acagccacacac

SEQ ID NO: 3038667 - RNA, 23 nt, Human
acagccacacacacagaaaauau

SEQ ID NO: 3038668 - RNA, 22 nt, Human
acagccacacacacagaaaaua

SEQ ID NO: 3038669 - RNA, 21 nt, Human
acagccacacacacagaaaau

SEQ ID NO: 3038670 - RNA, 20 nt, Human
acagccacacacacagaaaa

SEQ ID NO: 3038671 - RNA, 13 nt, Human
acaugcauacaca

SEQ ID NO: 3038672 - RNA, 12 nt, Human
acaugcauacac

SEQ ID NO: 3038673 - RNA, 24 nt, Human
acaugcauacacacacacacacag

SEQ ID NO: 3038674 - RNA, 17 nt, Human
acaugcauacacacaca

SEQ ID NO: 3038675 - RNA, 16 nt, Human
acaugcauacacacac

SEQ ID NO: 3038676 - RNA, 15 nt, Human
acaugcauacacaca

SEQ ID NO: 3038677 - RNA, 14 nt, Human
acaugcauacacac

SEQ ID NO: 3038678 - RNA, 18 nt, Human
accccuccccuaaugccu

SEQ ID NO: 3038679 - RNA, 14 nt, Human
aaaaguuaaaaagu

SEQ ID NO: 3038680 - RNA, 11 nt, Human
aauauacugua

SEQ ID NO: 3038681 - RNA, 13 nt, Human
aauauacuguaaa

SEQ ID NO: 3038682 - RNA, 12 nt, Human
aauauacuguaa

SEQ ID NO: 3038683 - RNA, 23 nt, Human
aauauacuguaaagaaagagaga

SEQ ID NO: 3038684 - RNA, 22 nt, Human
aauauacuguaaagaaagagag

SEQ ID NO: 3038685 - RNA, 21 nt, Human
aauauacuguaaagaaagaga

SEQ ID NO: 3038686 - RNA, 18 nt, Human
aauauacuguaaagaaag

SEQ ID NO: 3038687 - RNA, 17 nt, Human
aauauacuguaaagaaa

SEQ ID NO: 3038688 - RNA, 16 nt, Human
aauauacuguaaagaa

SEQ ID NO: 3038689 - RNA, 15 nt, Human
aauauacuguaaaga

SEQ ID NO: 3038690 - RNA, 14 nt, Human
aauauacuguaaag

SEQ ID NO: 3038691 - RNA, 14 nt, Human
agaggacgugggcg

SEQ ID NO: 3038692 - RNA, 16 nt, Human
agaggacgugggcggc

SEQ ID NO: 3038693 - RNA, 12 nt, Human
agagaaaauaaa

SEQ ID NO: 3038694 - RNA, 14 nt, Human
agagaaaauaaaaa

SEQ ID NO: 3038695 - RNA, 13 nt, Human
agagaaaauaaaa

SEQ ID NO: 3038696 - RNA, 17 nt, Human
agagaaaauaaaaaguu

SEQ ID NO: 3038697 - RNA, 16 nt, Human
agagaaaauaaaaagu

SEQ ID NO: 3038698 - RNA, 15 nt, Human
agagaaaauaaaaag

SEQ ID NO: 3038699 - RNA, 14 nt, Human
agacgucccuccac

SEQ ID NO: 3038700 - RNA, 19 nt, Human
aguggcuuacuacaugugg

SEQ ID NO: 3038701 - RNA, 13 nt, Human
auauacuguaaag

SEQ ID NO: 3038702 - RNA, 12 nt, Human
auauacuguaaa

SEQ ID NO: 3038703 - RNA, 11 nt, Human
auauacuguaa

SEQ ID NO: 3038704 - RNA, 10 nt, Human
auauacugua

SEQ ID NO: 3038705 - RNA, 24 nt, Human
auauacuguaaagaaagagagaaa

SEQ ID NO: 3038706 - RNA, 23 nt, Human
auauacuguaaagaaagagagaa

SEQ ID NO: 3038707 - RNA, 22 nt, Human
auauacuguaaagaaagagaga

SEQ ID NO: 3038708 - RNA, 21 nt, Human
auauacuguaaagaaagagag

SEQ ID NO: 3038709 - RNA, 20 nt, Human
auauacuguaaagaaagaga

SEQ ID NO: 3038710 - RNA, 19 nt, Human
auauacuguaaagaaagag

SEQ ID NO: 3038711 - RNA, 18 nt, Human
auauacuguaaagaaaga

SEQ ID NO: 3038712 - RNA, 15 nt, Human
auauacuguaaagaa

SEQ ID NO: 3038713 - RNA, 14 nt, Human
auauacuguaaaga

SEQ ID NO: 3038714 - RNA, 21 nt, Human
auacacacacacacacagcca

SEQ ID NO: 3038715 - RNA, 23 nt, Human
auacacacacacacacagccaca

SEQ ID NO: 3038716 - RNA, 22 nt, Human
auacacacacacacacagccac

SEQ ID NO: 3038717 - RNA, 18 nt, Human
auaaaaaguuaaaaaguu

SEQ ID NO: 3038718 - RNA, 13 nt, Human
auaaaaaguuaaa

SEQ ID NO: 3038719 - RNA, 10 nt, Human
auaaaaaguu

SEQ ID NO: 3038720 - RNA, 12 nt, Human
auaaaaaguuaa

SEQ ID NO: 3038721 - RNA, 11 nt, Human
auaaaaaguua

SEQ ID NO: 3038722 - RNA, 12 nt, Human
auggaggcacac

SEQ ID NO: 3038723 - RNA, 14 nt, Human
cacagccacacaca

SEQ ID NO: 3038724 - RNA, 13 nt, Human
cacagccacacac

SEQ ID NO: 3038725 - RNA, 10 nt, Human
cacagccaca

SEQ ID NO: 3038726 - RNA, 12 nt, Human
cacagccacaca

SEQ ID NO: 3038727 - RNA, 11 nt, Human
cacagccacac

SEQ ID NO: 3038728 - RNA, 22 nt, Human
cacagagagggggccaccuccc

SEQ ID NO: 3038729 - RNA, 16 nt, Human
cacagacgucccucca

SEQ ID NO: 3038730 - RNA, 20 nt, Human
cacacagaaaauauacugua

SEQ ID NO: 3038731 - RNA, 19 nt, Human
cacacagaaaauauacugu

SEQ ID NO: 3038732 - RNA, 18 nt, Human
cacacacaugcauacaca

SEQ ID NO: 3038733 - RNA, 17 nt, Human
cacacacaugcauacac

SEQ ID NO: 3038734 - RNA, 16 nt, Human
cacacacaugcauaca

SEQ ID NO: 3038735 - RNA, 12 nt, Human
cacacacaugca

SEQ ID NO: 3038736 - RNA, 11 nt, Human
cacacagccac

SEQ ID NO: 3038737 - RNA, 22 nt, Human
cacacagaaaauauacuguaaa

SEQ ID NO: 3038738 - RNA, 21 nt, Human
cacacagaaaauauacuguaa

SEQ ID NO: 3038739 - RNA, 23 nt, Human
cacacagaaaauauacuguaaag

SEQ ID NO: 3038740 - RNA, 22 nt, Human
cacacagccacacacacagaaa

SEQ ID NO: 3038741 - RNA, 21 nt, Human
cacacagccacacacacagaa

SEQ ID NO: 3038742 - RNA, 20 nt, Human
cacacagccacacacacaga

SEQ ID NO: 3038743 - RNA, 19 nt, Human
cacacagccacacacacag

SEQ ID NO: 3038744 - RNA, 17 nt, Human
cacacagccacacacac

SEQ ID NO: 3038745 - RNA, 16 nt, Human
cacacagccacacaca

SEQ ID NO: 3038746 - RNA, 15 nt, Human
cacacagccacacac

SEQ ID NO: 3038747 - RNA, 14 nt, Human
cacacagccacaca

SEQ ID NO: 3038748 - RNA, 13 nt, Human
cacacagccacac

SEQ ID NO: 3038749 - RNA, 12 nt, Human
cacacagccaca

SEQ ID NO: 3038750 - RNA, 14 nt, Human
ccguggcugcggca

SEQ ID NO: 3038751 - RNA, 19 nt, Human
cccccacacacacacacau

SEQ ID NO: 3038752 - RNA, 11 nt, Human
ccccacacaca

SEQ ID NO: 3038753 - RNA, 14 nt, Human
ccccacacacacac

SEQ ID NO: 3038754 - RNA, 12 nt, Human
ccccacacacac

SEQ ID NO: 3038755 - RNA, 19 nt, Human
ccaggugcacagacguccc

SEQ ID NO: 3038756 - RNA, 13 nt, Human
ccaggugcacaga

SEQ ID NO: 3038757 - RNA, 16 nt, Human
ccaggugcacagacgu

SEQ ID NO: 3038758 - RNA, 17 nt, Human
cggaauccuguccucag

SEQ ID NO: 3038759 - RNA, 15 nt, Human
cggaauccuguccuc

SEQ ID NO: 3038760 - RNA, 18 nt, Human
cgcacgugggucuucagg

SEQ ID NO: 3038761 - RNA, 19 nt, Human
ccuuuguuuuuuuuuccug

SEQ ID NO: 3038762 - RNA, 14 nt, Human
cuaauuagagcaga

SEQ ID NO: 3038763 - RNA, 17 nt, Human
cuacaugugggagcuuu

SEQ ID NO: 3038764 - RNA, 16 nt, Human
cuacaugugggagcuu

SEQ ID NO: 3038765 - RNA, 23 nt, Human
gaaacccccacacacacacacau

SEQ ID NO: 3038766 - RNA, 15 nt, Human
gaaacccccacacac

SEQ ID NO: 3038767 - RNA, 17 nt, Human
gaaacccccacacacac

SEQ ID NO: 3038768 - RNA, 16 nt, Human
gaaacccccacacaca

SEQ ID NO: 3038769 - RNA, 11 nt, Human
gaaaauaaaaa

SEQ ID NO: 3038770 - RNA, 13 nt, Human
gaaaauaaaaagu

SEQ ID NO: 3038771 - RNA, 12 nt, Human
gaaaauaaaaag

SEQ ID NO: 3038772 - RNA, 17 nt, Human
cuguccucagcuucuua

SEQ ID NO: 3038773 - RNA, 15 nt, Human
cuguccucagcuucu

SEQ ID NO: 3038774 - RNA, 17 nt, Human
cugguuccggaauccug

SEQ ID NO: 3038775 - RNA, 18 nt, Human
cugguuccggaauccugu

SEQ ID NO: 3038776 - RNA, 14 nt, Human
gagagaaaauaaaa

SEQ ID NO: 3038777 - RNA, 17 nt, Human
gagagaaaauaaaaagu

SEQ ID NO: 3038778 - RNA, 16 nt, Human
gagagaaaauaaaaag

SEQ ID NO: 3038779 - RNA, 21 nt, Human
gagagaaaauaaaaaguuaaa

SEQ ID NO: 3038780 - RNA, 20 nt, Human
gagagaaaauaaaaaguuaa

SEQ ID NO: 3038781 - RNA, 19 nt, Human
gagagaaaauaaaaaguua

SEQ ID NO: 3038782 - RNA, 18 nt, Human
gagagaaaauaaaaaguu

SEQ ID NO: 3038783 - RNA, 18 nt, Human
gagagggggccaccuccc

SEQ ID NO: 3038784 - RNA, 12 nt, Human
gagaaaauaaaa

SEQ ID NO: 3038785 - RNA, 11 nt, Human
gagaaaauaaa

SEQ ID NO: 3038786 - RNA, 16 nt, Human
gagaaaauaaaaaguu

SEQ ID NO: 3038787 - RNA, 15 nt, Human
gagaaaauaaaaagu

SEQ ID NO: 3038788 - RNA, 14 nt, Human
gagaaaauaaaaag

SEQ ID NO: 3038789 - RNA, 13 nt, Human
gagaaaauaaaaa

SEQ ID NO: 3038790 - RNA, 18 nt, Human
gacaugcgggcugggcag

SEQ ID NO: 3038791 - RNA, 20 nt, Human
gacaugcgggcugggcagcu

SEQ ID NO: 3038792 - RNA, 21 nt, Human
gacaugcgggcugggcagcug

SEQ ID NO: 3038793 - RNA, 22 nt, Human
gacaugcgggcugggcagcugu

SEQ ID NO: 3038794 - RNA, 14 nt, Human
gacaugcgggcugg

SEQ ID NO: 3038795 - RNA, 15 nt, Human
gacaugcgggcuggg

SEQ ID NO: 3038796 - RNA, 18 nt, Human
gacagagaggacgugggc

SEQ ID NO: 3038797 - RNA, 19 nt, Human
gacagagaggacgugggcg

SEQ ID NO: 3038798 - RNA, 22 nt, Human
gagggggccaccuccccaggcc

SEQ ID NO: 3038799 - RNA, 18 nt, Human
gagggggccaccucccca

SEQ ID NO: 3038800 - RNA, 20 nt, Human
gagggggccaccuccccagg

SEQ ID NO: 3038801 - RNA, 19 nt, Human
gcacagagagggggccacc

SEQ ID NO: 3038802 - RNA, 23 nt, Human
gcacagagagggggccaccuccc

SEQ ID NO: 3038803 - RNA, 18 nt, Human
gcacagacgucccuccac

SEQ ID NO: 3038804 - RNA, 15 nt, Human
gcacagagagggggc

SEQ ID NO: 3038805 - RNA, 17 nt, Human
gcacagagagggggcca

SEQ ID NO: 3038806 - RNA, 16 nt, Human
gcgggcugggcagcug

SEQ ID NO: 3038807 - RNA, 14 nt, Human
gcgggcugggcagc

SEQ ID NO: 3038808 - RNA, 15 nt, Human
gucaaggaguggcuu

SEQ ID NO: 3038809 - RNA, 17 nt, Human
guccucagcuucuuaau

SEQ ID NO: 3038810 - RNA, 13 nt, Human
guccucagcuucu

SEQ ID NO: 3038811 - RNA, 12 nt, Human
gugcccccagac

SEQ ID NO: 3038812 - RNA, 10 nt, Human
uauacuguaa

SEQ ID NO: 3038813 - RNA, 19 nt, Human
uauacuguaaagaaagaga

SEQ ID NO: 3038814 - RNA, 17 nt, Human
uauacuguaaagaaaga

SEQ ID NO: 3038815 - RNA, 16 nt, Human
uauacuguaaagaaag

SEQ ID NO: 3038816 - RNA, 15 nt, Human
uauacuguaaagaaa

SEQ ID NO: 3038817 - RNA, 14 nt, Human
uauacuguaaagaa

SEQ ID NO: 3038818 - RNA, 13 nt, Human
uauacuguaaaga

SEQ ID NO: 3038819 - RNA, 12 nt, Human
uauacuguaaag

SEQ ID NO: 3038820 - RNA, 11 nt, Human
uauacuguaaa

SEQ ID NO: 3038821 - RNA, 20 nt, Human
uauacuguaaagaaagagag

SEQ ID NO: 3038822 - RNA, 22 nt, Human
ugaaugaaacccccacacacac

SEQ ID NO: 3038823 - RNA, 21 nt, Human
ugaaugaaacccccacacaca

SEQ ID NO: 3038824 - RNA, 20 nt, Human
ugaaugaaacccccacacac

SEQ ID NO: 3038825 - RNA, 19 nt, Human
ugaaugaaacccccacaca

SEQ ID NO: 3038826 - RNA, 18 nt, Human
ugaaugaaacccccacac

SEQ ID NO: 3038827 - RNA, 16 nt, Human
ugaaugaaacccccac

SEQ ID NO: 3038828 - RNA, 16 nt, Human
ugaaacccccacacac

SEQ ID NO: 3038829 - RNA, 18 nt, Human
ugaaacccccacacacac

SEQ ID NO: 3038830 - RNA, 17 nt, Human
ugaaacccccacacaca

SEQ ID NO: 3038831 - RNA, 17 nt, Human
ugcgcuuuugcugguca

SEQ ID NO: 3038832 - RNA, 18 nt, Human
ugcgcuuuugcuggucac

SEQ ID NO: 3038833 - RNA, 16 nt, Human
ugcuggucacugccau

SEQ ID NO: 3038834 - RNA, 21 nt, Human
ugguaugugacaugcgggcug

SEQ ID NO: 3038835 - RNA, 23 nt, Human
uuaauauaacugccuuaaaacuu

SEQ ID NO: 3038836 - RNA, 15 nt, Human
uuaauauaacugccu

SEQ ID NO: 3038837 - RNA, 21 nt, Human
uuagagcagaugaccccuccc

SEQ ID NO: 3038838 - RNA, 18 nt, Human
uuacuacaugugggagcu

SEQ ID NO: 3038839 - RNA, 18 nt, Human
uuuccuaacaggauuaga

SEQ ID NO: 3038840 - RNA, 22 nt, Human
uuuccuaacaggauuagacagu

SEQ ID NO: 3038841 - RNA, 20 nt, Human
cuguccuucucucaccuccu

SEQ ID NO: 3038842 - RNA, 23 nt, Human
cuguccuucucucaccuccuaaa

SEQ ID NO: 3038843 - RNA, 15 nt, Human
cuguccuucucucac

SEQ ID NO: 3038844 - RNA, 19 nt, Human
gaccccuccccuaaugccu

SEQ ID NO: 3038845 - RNA, 23 nt, Human
gaggacuguugacauccaagcuu

SEQ ID NO: 3038846 - RNA, 15 nt, Human
gaggacgugggcggc

SEQ ID NO: 3038847 - RNA, 16 nt, Human
gaggacgugggcggca

SEQ ID NO: 3038848 - RNA, 18 nt, Human
gaggacgugggcggcaga

SEQ ID NO: 3038849 - RNA, 20 nt, Human
gaggacgugggcggcagaga

SEQ ID NO: 3038850 - RNA, 22 nt, Human
gaggacgugggcggcagagagg

SEQ ID NO: 3038851 - RNA, 16 nt, Human
gagaggacgugggcgg

SEQ ID NO: 3038852 - RNA, 17 nt, Human
gagaggacgugggcggc

SEQ ID NO: 3038853 - RNA, 15 nt, Human
gcuuuugcuggucac

SEQ ID NO: 3038854 - RNA, 19 nt, Human
gcuuuugcuggucacugcc

SEQ ID NO: 3038855 - RNA, 21 nt, Human
gcuuuugcuggucacugccau

SEQ ID NO: 3038856 - RNA, 22 nt, Human
gcuuuugcuggucacugccaug

SEQ ID NO: 3038857 - RNA, 12 nt, Human
gcccccagacgc

SEQ ID NO: 3038858 - RNA, 12 nt, Human
gcggcagagagg

SEQ ID NO: 3038859 - RNA, 21 nt, Human
gguuccggaauccuguccuca

SEQ ID NO: 3038860 - RNA, 17 nt, Human
gggggccaccuccccag

SEQ ID NO: 3038861 - RNA, 13 nt, Human
gggcugggcagcu

SEQ ID NO: 3038862 - RNA, 14 nt, Human
gggcugggcagcug

SEQ ID NO: 3038863 - RNA, 17 nt, Human
cuccuaaaguagacuuc

SEQ ID NO: 3038864 - RNA, 12 nt, Human
cucucaccuccu

SEQ ID NO: 3038865 - RNA, 21 nt, Human
ccuguccuucucucaccuccu

SEQ ID NO: 3038866 - RNA, 17 nt, Human
cagucaaggaguggcuu

SEQ ID NO: 3038867 - RNA, 17 nt, Human
caggccacggcagccua

SEQ ID NO: 3038868 - RNA, 13 nt, Human
uaaaacugucccu

SEQ ID NO: 3038869 - RNA, 23 nt, Human
aagcuuccuuuguuuuuuuuucc

SEQ ID NO: 3038870 - RNA, 19 nt, Human
guuccggaauccuguccuc

SEQ ID NO: 3038871 - RNA, 22 nt, Human
guuccggaauccuguccucagc

SEQ ID NO: 3038872 - RNA, 16 nt, Human
gucacugccauggagg

SEQ ID NO: 3038873 - RNA, 20 nt, Human
gucacugccauggaggcaca

SEQ ID NO: 3038874 - RNA, 13 nt, Human
aagaaagagagaa

SEQ ID NO: 3038875 - RNA, 12 nt, Human
aagaaagagaga

SEQ ID NO: 3038876 - RNA, 20 nt, Human
aagaaagagagaaaauaaaa

SEQ ID NO: 3038877 - RNA, 18 nt, Human
aagaaagagagaaaauaa

SEQ ID NO: 3038878 - RNA, 16 nt, Human
aagaaagagagaaaau

SEQ ID NO: 3038879 - RNA, 15 nt, Human
aagaaagagagaaaa

SEQ ID NO: 3038880 - RNA, 14 nt, Human
aagaaagagagaaa

SEQ ID NO: 3038881 - RNA, 16 nt, Human
acacacacaugcauac

SEQ ID NO: 3038882 - RNA, 15 nt, Human
acacacacacacaca

SEQ ID NO: 3038883 - RNA, 12 nt, Human
acacacacaugc

SEQ ID NO: 3038884 - RNA, 11 nt, Human
acacacacaug

SEQ ID NO: 3038885 - RNA, 13 nt, Human
acacacacaugca

SEQ ID NO: 3038886 - RNA, 15 nt, Human
acacacacaugcaua

SEQ ID NO: 3038887 - RNA, 14 nt, Human
acacacacaugcau

SEQ ID NO: 3038888 - RNA, 14 nt, Human
acacacacacacac

SEQ ID NO: 3038889 - RNA, 12 nt, Human
acacacacacac

SEQ ID NO: 3038890 - RNA, 13 nt, Human
acacacacacaca

SEQ ID NO: 3038891 - RNA, 21 nt, Human
acagaaaauauacuguaaaga

SEQ ID NO: 3038892 - RNA, 20 nt, Human
acagaaaauauacuguaaag

SEQ ID NO: 3038893 - RNA, 19 nt, Human
acagaaaauauacuguaaa

SEQ ID NO: 3038894 - RNA, 18 nt, Human
acagaaaauauacuguaa

SEQ ID NO: 3038895 - RNA, 17 nt, Human
acagaaaauauacugua

SEQ ID NO: 3038896 - RNA, 16 nt, Human
acagaaaauauacugu

SEQ ID NO: 3038897 - RNA, 22 nt, Human
acagucaaggaguggcuuacua

SEQ ID NO: 3038898 - RNA, 18 nt, Human
acagucaaggaguggcuu

SEQ ID NO: 3038899 - RNA, 13 nt, Human
aaugugcccccag

SEQ ID NO: 3038900 - RNA, 13 nt, Human
uacaugugggagc

SEQ ID NO: 3038901 - RNA, 20 nt, Human
aaugaaacccccacacacac

SEQ ID NO: 3038902 - RNA, 19 nt, Human
aaugaaacccccacacaca

SEQ ID NO: 3038903 - RNA, 18 nt, Human
aaugaaacccccacacac

SEQ ID NO: 3038904 - RNA, 14 nt, Human
aaugaaacccccac

SEQ ID NO: 3038905 - RNA, 15 nt, Human
aauccuguccucagc

SEQ ID NO: 3038906 - RNA, 18 nt, Human
aauccuguccucagcuuc

SEQ ID NO: 3038907 - RNA, 21 nt, Human
aauccuguccucagcuucuua

SEQ ID NO: 3038908 - RNA, 12 nt, Human
ucagggggccag

SEQ ID NO: 3038909 - RNA, 12 nt, Human
acgucccuccac

SEQ ID NO: 3038910 - RNA, 22 nt, Human
acgucccuccacguucaccccu

SEQ ID NO: 3038911 - RNA, 13 nt, Human
acguucaccccuc

SEQ ID NO: 3038912 - RNA, 11 nt, Human
agagagaaaau

SEQ ID NO: 3038913 - RNA, 22 nt, Human
uguaaagaaagagagaaaauaa

SEQ ID NO: 3038914 - RNA, 23 nt, Human
uguaaagaaagagagaaaauaaa

SEQ ID NO: 3038915 - RNA, 22 nt, Human
ugggucuucagggggccaggug

SEQ ID NO: 3038916 - RNA, 22 nt, Human
ugugaagaucacguuccuuccc

SEQ ID NO: 3038917 - RNA, 20 nt, Human
ugucccuuucugugugaaga

SEQ ID NO: 3038918 - RNA, 21 nt, Human
uguccuucucucaccuccuaa

SEQ ID NO: 3038919 - RNA, 18 nt, Human
uguccuucucucaccucc

SEQ ID NO: 3038920 - RNA, 19 nt, Human
uguccuucucucaccuccu

SEQ ID NO: 3038921 - RNA, 13 nt, Human
uuaccuaauuaga

SEQ ID NO: 3038922 - RNA, 18 nt, Human
auaacugccuuaaaacuu

SEQ ID NO: 3038923 - RNA, 19 nt, Human
ugccugcggaguugugcac

SEQ ID NO: 3038924 - RNA, 13 nt, Human
uggcugcccacac

SEQ ID NO: 3038925 - RNA, 16 nt, Human
uggcugcggcacccuu

SEQ ID NO: 3038926 - RNA, 17 nt, Human
uggcugcggcacccuug

SEQ ID NO: 3038927 - RNA, 20 nt, Human
uggcuuacuacaugugggag

SEQ ID NO: 3038928 - RNA, 23 nt, Human
uggcuuacuacaugugggagcuu

SEQ ID NO: 3038929 - RNA, 13 nt, Human
aggccacggcagc

SEQ ID NO: 3038930 - RNA, 23 nt, Human
uucuuuucgccguggcugcggca

SEQ ID NO: 3038931 - RNA, 17 nt, Human
auccuguccucagcuuc

SEQ ID NO: 3038932 - RNA, 18 nt, Human
auccuguccucagcuucu

SEQ ID NO: 3038933 - RNA, 14 nt, Human
auccuguccucagc

SEQ ID NO: 3038934 - RNA, 16 nt, Human
aucccacuugccccug

SEQ ID NO: 3038935 - RNA, 13 nt, Human
uucucucaccucc

SEQ ID NO: 3038936 - RNA, 19 nt, Human
uuccuaacaggauuagaca

SEQ ID NO: 3038937 - RNA, 21 nt, Human
uuccggaauccuguccucagc

SEQ ID NO: 3038938 - RNA, 12 nt, Human
augugcccccag

SEQ ID NO: 3038939 - RNA, 14 nt, Human
augugcccccagac

SEQ ID NO: 3038940 - RNA, 22 nt, Human
aauauaacugccuuaaaacuuu

SEQ ID NO: 3038941 - RNA, 18 nt, Human
aaagaaagagagaaaaua

SEQ ID NO: 3038942 - RNA, 17 nt, Human
aaagaaagagagaaaau

SEQ ID NO: 3038943 - RNA, 16 nt, Human
aaacugaaugaaaccc

SEQ ID NO: 3038944 - RNA, 12 nt, Human
aaagaaagagag

SEQ ID NO: 3038945 - RNA, 16 nt, Human
aaagaaagagagaaaa

SEQ ID NO: 3038946 - RNA, 15 nt, Human
aaagaaagagagaaa

SEQ ID NO: 3038947 - RNA, 14 nt, Human
aaagaaagagagaa

SEQ ID NO: 3038948 - RNA, 13 nt, Human
aaagaaagagaga

SEQ ID NO: 3038949 - RNA, 16 nt, Human
acauccaagcuuccuu

SEQ ID NO: 3038950 - RNA, 13 nt, Human
acauccaagcuuc

SEQ ID NO: 3038951 - RNA, 12 nt, Human
agaaaauaaaaa

SEQ ID NO: 3038952 - RNA, 14 nt, Human
agaaaauaaaaagu

SEQ ID NO: 3038953 - RNA, 13 nt, Human
agaaaauaaaaag

SEQ ID NO: 3038954 - RNA, 18 nt, Human
agaaaauaaaaaguuaaa

SEQ ID NO: 3038955 - RNA, 17 nt, Human
agaaaauaaaaaguuaa

SEQ ID NO: 3038956 - RNA, 16 nt, Human
agaaaauaaaaaguua

SEQ ID NO: 3038957 - RNA, 15 nt, Human
agaaaauaaaaaguu

SEQ ID NO: 3038958 - RNA, 23 nt, Human
agaaaauauacuguaaagaaaga

SEQ ID NO: 3038959 - RNA, 12 nt, Human
agaaaauauacu

SEQ ID NO: 3038960 - RNA, 14 nt, Human
agaaaauauacugu

SEQ ID NO: 3038961 - RNA, 13 nt, Human
agaaaauauacug

SEQ ID NO: 3038962 - RNA, 11 nt, Human
agaaaauauac

SEQ ID NO: 3038963 - RNA, 22 nt, Human
agaaaauauacuguaaagaaag

SEQ ID NO: 3038964 - RNA, 21 nt, Human
agaaaauauacuguaaagaaa

SEQ ID NO: 3038965 - RNA, 20 nt, Human
agaaaauauacuguaaagaa

SEQ ID NO: 3038966 - RNA, 19 nt, Human
agaaaauauacuguaaaga

SEQ ID NO: 3038967 - RNA, 18 nt, Human
agaaaauauacuguaaag

SEQ ID NO: 3038968 - RNA, 17 nt, Human
agaaaauauacuguaaa

SEQ ID NO: 3038969 - RNA, 16 nt, Human
agaaaauauacuguaa

SEQ ID NO: 3038970 - RNA, 15 nt, Human
agaaaauauacugua

SEQ ID NO: 3038971 - RNA, 13 nt, Human
auacacacacaca

SEQ ID NO: 3038972 - RNA, 14 nt, Human
auacacacacacac

SEQ ID NO: 3038973 - RNA, 11 nt, Human
auacacacaca

SEQ ID NO: 3038974 - RNA, 15 nt, Human
auacacacacacaca

SEQ ID NO: 3038975 - RNA, 19 nt, Human
auacacacacacacacagc

SEQ ID NO: 3038976 - RNA, 18 nt, Human
auacacacacacacacag

SEQ ID NO: 3038977 - RNA, 20 nt, Human
auacacacacacacacagcc

SEQ ID NO: 3038978 - RNA, 16 nt, Human
agucaaggaguggcuu

SEQ ID NO: 3038979 - RNA, 11 nt, Human
augaccccucc

SEQ ID NO: 3038980 - RNA, 19 nt, Human
augaaacccccacacacac

SEQ ID NO: 3038981 - RNA, 18 nt, Human
augaaacccccacacaca

SEQ ID NO: 3038982 - RNA, 17 nt, Human
augaaacccccacacac

SEQ ID NO: 3038983 - RNA, 16 nt, Human
augaaacccccacaca

SEQ ID NO: 3038984 - RNA, 15 nt, Human
augaaacccccacac

SEQ ID NO: 3038985 - RNA, 20 nt, Human
agcuucuuaauauaacugcc

SEQ ID NO: 3038986 - RNA, 21 nt, Human
agcuucuuaauauaacugccu

SEQ ID NO: 3038987 - RNA, 22 nt, Human
agcuucuuaauauaacugccuu

SEQ ID NO: 3038988 - RNA, 23 nt, Human
agcuucuuaauauaacugccuua

SEQ ID NO: 3038989 - RNA, 23 nt, Human
agcuuccuuuguuuuuuuuuccu

SEQ ID NO: 3038990 - RNA, 18 nt, Human
agagaggacgugggcggc

SEQ ID NO: 3038991 - RNA, 14 nt, Human
agaugaccccuccc

SEQ ID NO: 3038992 - RNA, 17 nt, Human
cacugccauggaggcac

SEQ ID NO: 3038993 - RNA, 19 nt, Human
cacugccauggaggcacac

SEQ ID NO: 3038994 - RNA, 22 nt, Human
cacugccauggaggcacacagc

SEQ ID NO: 3038995 - RNA, 18 nt, Human
cacuugccccuguuaccu

SEQ ID NO: 3038996 - RNA, 13 nt, Human
cacguucaccccu

SEQ ID NO: 3038997 - RNA, 20 nt, Human
cacguuccuucccccgcaau

SEQ ID NO: 3038998 - RNA, 17 nt, Human
cacguaguagggucagg

SEQ ID NO: 3038999 - RNA, 19 nt, Human
cacguaguagggucaggcc

SEQ ID NO: 3039000 - RNA, 20 nt, Human
cacguaguagggucaggcca

SEQ ID NO: 3039001 - RNA, 21 nt, Human
cacguaguagggucaggccac

SEQ ID NO: 3039002 - RNA, 23 nt, Human
cacguaguagggucaggccacgg

SEQ ID NO: 3039003 - RNA, 21 nt, Human
caccuccccaggccguggcug

SEQ ID NO: 3039004 - RNA, 14 nt, Human
caccuccccaggcc

SEQ ID NO: 3039005 - RNA, 15 nt, Human
caccuccccaggccg

SEQ ID NO: 3039006 - RNA, 16 nt, Human
caccugguuccggaau

SEQ ID NO: 3039007 - RNA, 20 nt, Human
caccugguuccggaauccug

SEQ ID NO: 3039008 - RNA, 21 nt, Human
caccugguuccggaauccugu

SEQ ID NO: 3039009 - RNA, 23 nt, Human
caccugguuccggaauccugucc

SEQ ID NO: 3039010 - RNA, 17 nt, Human
cagacgcacgugggucu

SEQ ID NO: 3039011 - RNA, 15 nt, Human
cagacgucccuccac

SEQ ID NO: 3039012 - RNA, 19 nt, Human
cagaaaacgguuaaaacug

SEQ ID NO: 3039013 - RNA, 20 nt, Human
cagaaaacgguuaaaacugu

SEQ ID NO: 3039014 - RNA, 21 nt, Human
cagaaaauauacuguaaagaa

SEQ ID NO: 3039015 - RNA, 20 nt, Human
cagaaaauauacuguaaaga

SEQ ID NO: 3039016 - RNA, 19 nt, Human
cagaaaauauacuguaaag

SEQ ID NO: 3039017 - RNA, 18 nt, Human
cagaaaauauacuguaaa

SEQ ID NO: 3039018 - RNA, 11 nt, Human
cagaaaauaua

SEQ ID NO: 3039019 - RNA, 13 nt, Human
cagaaaauauacu

SEQ ID NO: 3039020 - RNA, 12 nt, Human
cagaaaauauac

SEQ ID NO: 3039021 - RNA, 17 nt, Human
cagaaaauauacuguaa

SEQ ID NO: 3039022 - RNA, 16 nt, Human
cagaaaauauacugua

SEQ ID NO: 3039023 - RNA, 15 nt, Human
cagaaaauauacugu

SEQ ID NO: 3039024 - RNA, 14 nt, Human
cagaaaauauacug

SEQ ID NO: 3039025 - RNA, 13 nt, Human
cagaugaccccuc

SEQ ID NO: 3039026 - RNA, 14 nt, Human
cagaugaccccucc

SEQ ID NO: 3039027 - RNA, 18 nt, Human
cagaugaccccuccccua

SEQ ID NO: 3039028 - RNA, 14 nt, Human
cagagacagagagg

SEQ ID NO: 3039029 - RNA, 16 nt, Human
cagagacagagaggac

SEQ ID NO: 3039030 - RNA, 22 nt, Human
cagcuucuuaauauaacugccu

SEQ ID NO: 3039031 - RNA, 23 nt, Human
cagccacacacacagaaaauaua

SEQ ID NO: 3039032 - RNA, 22 nt, Human
cagccacacacacagaaaauau

SEQ ID NO: 3039033 - RNA, 21 nt, Human
cagccacacacacagaaaaua

SEQ ID NO: 3039034 - RNA, 20 nt, Human
cagccacacacacagaaaau

SEQ ID NO: 3039035 - RNA, 19 nt, Human
cagccacacacacagaaaa

SEQ ID NO: 3039036 - RNA, 18 nt, Human
cagccacacacacagaaa

SEQ ID NO: 3039037 - RNA, 17 nt, Human
cagccacacacacagaa

SEQ ID NO: 3039038 - RNA, 16 nt, Human
cagccacacacacaga

SEQ ID NO: 3039039 - RNA, 15 nt, Human
cagccacacacacag

SEQ ID NO: 3039040 - RNA, 9 nt, Human
cagccacac

SEQ ID NO: 3039041 - RNA, 14 nt, Human
cagccacacacaca

SEQ ID NO: 3039042 - RNA, 13 nt, Human
cagccacacacac

SEQ ID NO: 3039043 - RNA, 12 nt, Human
cagccacacaca

SEQ ID NO: 3039044 - RNA, 11 nt, Human
cagccacacac

SEQ ID NO: 3039045 - RNA, 19 nt, Human
cagggggccaggugcacag

SEQ ID NO: 3039046 - RNA, 11 nt, Human
cagggggccag

SEQ ID NO: 3039047 - RNA, 13 nt, Human
cagggggccaggu

SEQ ID NO: 3039048 - RNA, 16 nt, Human
cagggggccaggugca

SEQ ID NO: 3039049 - RNA, 20 nt, Human
cauggaggcacacagcugca

SEQ ID NO: 3039050 - RNA, 16 nt, Human
cauggaggcacacagc

SEQ ID NO: 3039051 - RNA, 19 nt, Human
cauggaggcacacagcugc

SEQ ID NO: 3039052 - RNA, 13 nt, Human
cauggaggcacac

SEQ ID NO: 3039053 - RNA, 21 nt, Human
caugcgggcugggcagcuguu

SEQ ID NO: 3039054 - RNA, 15 nt, Human
caugcgggcugggca

SEQ ID NO: 3039055 - RNA, 18 nt, Human
caugcgggcugggcagcu

SEQ ID NO: 3039056 - RNA, 19 nt, Human
caugcgggcugggcagcug

SEQ ID NO: 3039057 - RNA, 20 nt, Human
caugcgggcugggcagcugu

SEQ ID NO: 3039058 - RNA, 13 nt, Human
ccaccuccccagg

SEQ ID NO: 3039059 - RNA, 16 nt, Human
ccaccuccccaggccg

SEQ ID NO: 3039060 - RNA, 23 nt, Human
ccaccuccccaggccguggcugc

SEQ ID NO: 3039061 - RNA, 14 nt, Human
ccacguucaccccu

SEQ ID NO: 3039062 - RNA, 15 nt, Human
ccacguucaccccuc

SEQ ID NO: 3039063 - RNA, 17 nt, Human
ccacguucaccccucca

SEQ ID NO: 3039064 - RNA, 13 nt, Human
ccacacaccccaa

SEQ ID NO: 3039065 - RNA, 12 nt, Human
ccacacacccca

SEQ ID NO: 3039066 - RNA, 23 nt, Human
ccacacacacagaaaauauacug

SEQ ID NO: 3039067 - RNA, 22 nt, Human
ccacacacacagaaaauauacu

SEQ ID NO: 3039068 - RNA, 17 nt, Human
ccacacacacagaaaau

SEQ ID NO: 3039069 - RNA, 21 nt, Human
ccacacacacagaaaauauac

SEQ ID NO: 3039070 - RNA, 20 nt, Human
ccacacacacagaaaauaua

SEQ ID NO: 3039071 - RNA, 19 nt, Human
ccacacacacagaaaauau

SEQ ID NO: 3039072 - RNA, 18 nt, Human
ccacacacacagaaaaua

SEQ ID NO: 3039073 - RNA, 14 nt, Human
ccaggccguggcug

SEQ ID NO: 3039074 - RNA, 16 nt, Human
ccaggccguggcugcc

SEQ ID NO: 3039075 - RNA, 18 nt, Human
ccaggccguggcugccca

SEQ ID NO: 3039076 - RNA, 16 nt, Human
ccuucucucaccuccu

SEQ ID NO: 3039077 - RNA, 19 nt, Human
ccuucucucaccuccuaaa

SEQ ID NO: 3039078 - RNA, 17 nt, Human
ccuucucucaccuccua

SEQ ID NO: 3039079 - RNA, 18 nt, Human
ccuucucucaccuccuaa

SEQ ID NO: 3039080 - RNA, 23 nt, Human
ccuuaaaacuuuaaucccacuug

SEQ ID NO: 3039081 - RNA, 21 nt, Human
ccuaccggcaauuuccggcca

SEQ ID NO: 3039082 - RNA, 20 nt, Human
ccuaccggcaauuuccggcc

SEQ ID NO: 3039083 - RNA, 21 nt, Human
ccgcaaugugcccccagacgc

SEQ ID NO: 3039084 - RNA, 17 nt, Human
ccuccacguucaccccu

SEQ ID NO: 3039085 - RNA, 18 nt, Human
ccuccacguucaccccuc

SEQ ID NO: 3039086 - RNA, 14 nt, Human
cccacacacacaca

SEQ ID NO: 3039087 - RNA, 13 nt, Human
cccacacacacac

SEQ ID NO: 3039088 - RNA, 11 nt, Human
cccacacacac

SEQ ID NO: 3039089 - RNA, 10 nt, Human
cccacacaca

SEQ ID NO: 3039090 - RNA, 20 nt, Human
cccacacacacacacaugca

SEQ ID NO: 3039091 - RNA, 19 nt, Human
cccacacacacacacaugc

SEQ ID NO: 3039092 - RNA, 18 nt, Human
cccacacacacacacaug

SEQ ID NO: 3039093 - RNA, 17 nt, Human
cccacacacacacacau

SEQ ID NO: 3039094 - RNA, 18 nt, Human
cccuccacguucaccccu

SEQ ID NO: 3039095 - RNA, 12 nt, Human
cccuaaugccug

SEQ ID NO: 3039096 - RNA, 22 nt, Human
cuuccuuuguuuuuuuuuccug

SEQ ID NO: 3039097 - RNA, 20 nt, Human
cuucccccgcaaugugcccc

SEQ ID NO: 3039098 - RNA, 13 nt, Human
cuucauuuuuccu

SEQ ID NO: 3039099 - RNA, 14 nt, Human
cuucauuuuuccua

SEQ ID NO: 3039100 - RNA, 16 nt, Human
cuucauuuuuccuaac

SEQ ID NO: 3039101 - RNA, 17 nt, Human
cuucauuuuuccuaaca

SEQ ID NO: 3039102 - RNA, 20 nt, Human
cuguugacauccaagcuucc

SEQ ID NO: 3039103 - RNA, 23 nt, Human
cuguugacauccaagcuuccuuu

SEQ ID NO: 3039104 - RNA, 22 nt, Human
gaauccuguccucagcuucuua

SEQ ID NO: 3039105 - RNA, 16 nt, Human
gaaugaaacccccaca

SEQ ID NO: 3039106 - RNA, 20 nt, Human
gaaugaaacccccacacaca

SEQ ID NO: 3039107 - RNA, 19 nt, Human
gaaugaaacccccacacac

SEQ ID NO: 3039108 - RNA, 21 nt, Human
gaaugaaacccccacacacac

SEQ ID NO: 3039109 - RNA, 18 nt, Human
gaaaauauacuguaaaga

SEQ ID NO: 3039110 - RNA, 20 nt, Human
gaaaauauacuguaaagaaa

SEQ ID NO: 3039111 - RNA, 19 nt, Human
gaaaauauacuguaaagaa

SEQ ID NO: 3039112 - RNA, 23 nt, Human
gaaaauauacuguaaagaaagag

SEQ ID NO: 3039113 - RNA, 21 nt, Human
gaaaauauacuguaaagaaag

SEQ ID NO: 3039114 - RNA, 20 nt, Human
cuccacguucaccccuccac

SEQ ID NO: 3039115 - RNA, 16 nt, Human
cuccacguucaccccu

SEQ ID NO: 3039116 - RNA, 18 nt, Human
cuccacguucaccccucc

SEQ ID NO: 3039117 - RNA, 21 nt, Human
cugcggcacccuugcgcuuuu

SEQ ID NO: 3039118 - RNA, 20 nt, Human
gaggcacacagcugcagaga

SEQ ID NO: 3039119 - RNA, 24 nt, Human
gaggcacacagcugcagagacaga

SEQ ID NO: 3039120 - RNA, 15 nt, Human
gccaccuccccaggc

SEQ ID NO: 3039121 - RNA, 17 nt, Human
gccaccuccccaggccg

SEQ ID NO: 3039122 - RNA, 13 nt, Human
gccacggcagccu

SEQ ID NO: 3039123 - RNA, 10 nt, Human
gccacacaca

SEQ ID NO: 3039124 - RNA, 18 nt, Human
gccacacacacagaaaau

SEQ ID NO: 3039125 - RNA, 17 nt, Human
gccacacacacagaaaa

SEQ ID NO: 3039126 - RNA, 16 nt, Human
gccacacacacagaaa

SEQ ID NO: 3039127 - RNA, 15 nt, Human
gccacacacacagaa

SEQ ID NO: 3039128 - RNA, 14 nt, Human
gccacacacacaga

SEQ ID NO: 3039129 - RNA, 13 nt, Human
gccacacacacag

SEQ ID NO: 3039130 - RNA, 12 nt, Human
gccacacacaca

SEQ ID NO: 3039131 - RNA, 11 nt, Human
gccacacacac

SEQ ID NO: 3039132 - RNA, 23 nt, Human
gccacacacacagaaaauauacu

SEQ ID NO: 3039133 - RNA, 22 nt, Human
gccacacacacagaaaauauac

SEQ ID NO: 3039134 - RNA, 21 nt, Human
gccacacacacagaaaauaua

SEQ ID NO: 3039135 - RNA, 20 nt, Human
gccacacacacagaaaauau

SEQ ID NO: 3039136 - RNA, 19 nt, Human
gccacacacacagaaaaua

SEQ ID NO: 3039137 - RNA, 23 nt, Human
gcacgugggucuucagggggcca

SEQ ID NO: 3039138 - RNA, 15 nt, Human
gcagaugaccccucc

SEQ ID NO: 3039139 - RNA, 16 nt, Human
gcagaugaccccuccc

SEQ ID NO: 3039140 - RNA, 21 nt, Human
gcuuacuacaugugggagcuu

SEQ ID NO: 3039141 - RNA, 13 nt, Human
gcuggucacugcc

SEQ ID NO: 3039142 - RNA, 15 nt, Human
gcuggucacugccau

SEQ ID NO: 3039143 - RNA, 18 nt, Human
gcuggucacugccaugga

SEQ ID NO: 3039144 - RNA, 13 nt, Human
gcuguuagagucc

SEQ ID NO: 3039145 - RNA, 14 nt, Human
gcugcggcacccuu

SEQ ID NO: 3039146 - RNA, 15 nt, Human
gcugcggcacccuug

SEQ ID NO: 3039147 - RNA, 16 nt, Human
gccuuaaaacuuuaau

SEQ ID NO: 3039148 - RNA, 13 nt, Human
gccuuaaaacuuu

SEQ ID NO: 3039149 - RNA, 16 nt, Human
ggaggcacacagcugc

SEQ ID NO: 3039150 - RNA, 17 nt, Human
ggaggcacacagcugca

SEQ ID NO: 3039151 - RNA, 13 nt, Human
ggccguggcugcc

SEQ ID NO: 3039152 - RNA, 16 nt, Human
ggccguggcugcccac

SEQ ID NO: 3039153 - RNA, 17 nt, Human
ucaccccuccacccuug

SEQ ID NO: 3039154 - RNA, 12 nt, Human
ucaccccuccac

SEQ ID NO: 3039155 - RNA, 19 nt, Human
uccuuuguuuuuuuuuccu

SEQ ID NO: 3039156 - RNA, 23 nt, Human
uccuuuguuuuuuuuuccugucc

SEQ ID NO: 3039157 - RNA, 16 nt, Human
uccuguccucagcuuc

SEQ ID NO: 3039158 - RNA, 22 nt, Human
uccuguccuucucucaccuccu

SEQ ID NO: 3039159 - RNA, 20 nt, Human
ugguuccggaauccuguccu

SEQ ID NO: 3039160 - RNA, 13 nt, Human
uggggcagcacag

SEQ ID NO: 3039161 - RNA, 14 nt, Human
uggggcagcacaga

SEQ ID NO: 3039162 - RNA, 22 nt, Human
uggggcagcacagagagggggc

SEQ ID NO: 3039163 - RNA, 16 nt, Human
uggggcagcacagaga

SEQ ID NO: 3039164 - RNA, 18 nt, Human
uggggcagcacagagagg

SEQ ID NO: 3039165 - RNA, 13 nt, Human
uucauuuuuccua

SEQ ID NO: 3039166 - RNA, 15 nt, Human
uucauuuuuccuaac

SEQ ID NO: 3039167 - RNA, 13 nt, Human
uucugugugaaga

SEQ ID NO: 3039168 - RNA, 16 nt, Human
agaggguguccugcac

SEQ ID NO: 3039169 - RNA, 14 nt, Human
agacgggcccuggu

SEQ ID NO: 3039170 - RNA, 23 nt, Human
aggugcuucuaguucugccagga

SEQ ID NO: 3039171 - RNA, 22 nt, Human
aggugcuucuaguucugccagg

SEQ ID NO: 3039172 - RNA, 21 nt, Human
aggugcuucuaguucugccag

SEQ ID NO: 3039173 - RNA, 17 nt, Human
aggggccgggggcaguc

SEQ ID NO: 3039174 - RNA, 22 nt, Human
acgccagacuucccacggcucc

SEQ ID NO: 3039175 - RNA, 16 nt, Human
acgccagacuucccac

SEQ ID NO: 3039176 - RNA, 15 nt, Human
acagguuagcugcuc

SEQ ID NO: 3039177 - RNA, 15 nt, Human
accccgacuuuuguu

SEQ ID NO: 3039178 - RNA, 12 nt, Human
accccgacuuuu

SEQ ID NO: 3039179 - RNA, 16 nt, Human
uuuuguuuaccagaga

SEQ ID NO: 3039180 - RNA, 20 nt, Human
auuucccuuccuuccucucc

SEQ ID NO: 3039181 - RNA, 16 nt, Human
aucggggagccgggag

SEQ ID NO: 3039182 - RNA, 18 nt, Human
aucggggagccgggagcc

SEQ ID NO: 3039183 - RNA, 22 nt, Human
uuguccucagccccgcguggaa

SEQ ID NO: 3039184 - RNA, 20 nt, Human
uugucacgccagacuuccca

SEQ ID NO: 3039185 - RNA, 13 nt, Human
uugucacgccaga

SEQ ID NO: 3039186 - RNA, 19 nt, Human
aggccauucuuucccaaca

SEQ ID NO: 3039187 - RNA, 18 nt, Human
aggccauucuuucccaac

SEQ ID NO: 3039188 - RNA, 17 nt, Human
aggccauucuuucccaa

SEQ ID NO: 3039189 - RNA, 22 nt, Human
uggaccagccucuccacucaug

SEQ ID NO: 3039190 - RNA, 16 nt, Human
uggaccagccucucca

SEQ ID NO: 3039191 - RNA, 13 nt, Human
ugcuccccacguc

SEQ ID NO: 3039192 - RNA, 14 nt, Human
aguccaucagccuc

SEQ ID NO: 3039193 - RNA, 13 nt, Human
aguccaucagccu

SEQ ID NO: 3039194 - RNA, 16 nt, Human
aguccaucagccucca

SEQ ID NO: 3039195 - RNA, 13 nt, Human
agucccugccugg

SEQ ID NO: 3039196 - RNA, 13 nt, Human
ugagagaggccau

SEQ ID NO: 3039197 - RNA, 17 nt, Human
ucuaguucugccaggag

SEQ ID NO: 3039198 - RNA, 16 nt, Human
ucuaguucugccagga

SEQ ID NO: 3039199 - RNA, 15 nt, Human
ucuaguucugccagg

SEQ ID NO: 3039200 - RNA, 19 nt, Human
uccugcaccggggccuggg

SEQ ID NO: 3039201 - RNA, 18 nt, Human
uccugcaccggggccugg

SEQ ID NO: 3039202 - RNA, 17 nt, Human
accuaggcuaggguggg

SEQ ID NO: 3039203 - RNA, 12 nt, Human
accuaggcuagg

SEQ ID NO: 3039204 - RNA, 19 nt, Human
ucaugugacucuuuccaac

SEQ ID NO: 3039205 - RNA, 18 nt, Human
ucaugugacucuuuccaa

SEQ ID NO: 3039206 - RNA, 17 nt, Human
ucaugugacucuuucca

SEQ ID NO: 3039207 - RNA, 14 nt, Human
ucaugugacucuuu

SEQ ID NO: 3039208 - RNA, 13 nt, Human
accgaggcaggga

SEQ ID NO: 3039209 - RNA, 16 nt, Human
acaccucuuggggagu

SEQ ID NO: 3039210 - RNA, 15 nt, Human
guccaucagccucca

SEQ ID NO: 3039211 - RNA, 22 nt, Human
gucccgggacaccuaggcuagg

SEQ ID NO: 3039212 - RNA, 17 nt, Human
cagucugagagaggcca

SEQ ID NO: 3039213 - RNA, 17 nt, Human
cagaggguguccugcac

SEQ ID NO: 3039214 - RNA, 18 nt, Human
caacaccucuuggggagu

SEQ ID NO: 3039215 - RNA, 15 nt, Human
cacuggggcaggggc

SEQ ID NO: 3039216 - RNA, 13 nt, Human
cacuggggcaggg

SEQ ID NO: 3039217 - RNA, 17 nt, Human
ccauccuacccccugug

SEQ ID NO: 3039218 - RNA, 15 nt, Human
cucgugucuggcaca

SEQ ID NO: 3039219 - RNA, 18 nt, Human
cucaugugacucuuucca

SEQ ID NO: 3039220 - RNA, 13 nt, Human
cugagagaggcca

SEQ ID NO: 3039221 - RNA, 22 nt, Human
cugagagaggccauucuuuccc

SEQ ID NO: 3039222 - RNA, 21 nt, Human
cugagagaggccauucuuucc

SEQ ID NO: 3039223 - RNA, 14 nt, Human
cugagagaggccau

SEQ ID NO: 3039224 - RNA, 22 nt, Human
gggggcagucugagagaggcca

SEQ ID NO: 3039225 - RNA, 21 nt, Human
ggguguccugcaccggggccu

SEQ ID NO: 3039226 - RNA, 17 nt, Human
ggguguccugcaccggg

SEQ ID NO: 3039227 - RNA, 22 nt, Human
gguggggggggggcgcggcugg

SEQ ID NO: 3039228 - RNA, 21 nt, Human
gguggggagagacgggcccug

SEQ ID NO: 3039229 - RNA, 14 nt, Human
ggcaggagggaggu

SEQ ID NO: 3039230 - RNA, 12 nt, Human
ggcaggggccgg

SEQ ID NO: 3039231 - RNA, 23 nt, Human
ggcaucggggagccgggagccug

SEQ ID NO: 3039232 - RNA, 18 nt, Human
ggcauccagagucccugc

SEQ ID NO: 3039233 - RNA, 16 nt, Human
ggcauccagagucccu

SEQ ID NO: 3039234 - RNA, 22 nt, Human
ggcaucggggagccgggagccu

SEQ ID NO: 3039235 - RNA, 14 nt, Human
ggagggggagaggg

SEQ ID NO: 3039236 - RNA, 21 nt, Human
gcguggaacucgugucuggca

SEQ ID NO: 3039237 - RNA, 19 nt, Human
gcucagaggguguccugca

SEQ ID NO: 3039238 - RNA, 18 nt, Human
gcucagaggguguccugc

SEQ ID NO: 3039239 - RNA, 18 nt, Human
gcuaggguggggagagac

SEQ ID NO: 3039240 - RNA, 17 nt, Human
gcuaggguggggagaga

SEQ ID NO: 3039241 - RNA, 12 nt, Human
gccauucuuucc

SEQ ID NO: 3039242 - RNA, 19 nt, Human
gccauucuuucccaacacc

SEQ ID NO: 3039243 - RNA, 16 nt, Human
ggacaccuaggcuagg

SEQ ID NO: 3039244 - RNA, 16 nt, Human
ggacaccccgacuuuu

SEQ ID NO: 3039245 - RNA, 16 nt, Human
gagacgggcccuggug

SEQ ID NO: 3039246 - RNA, 21 nt, Human
gcauccagagucccugccugg

SEQ ID NO: 3039247 - RNA, 23 nt, Human
gcauccagagucccugccuggac

SEQ ID NO: 3039248 - RNA, 22 nt, Human
gcauccagagucccugccugga

SEQ ID NO: 3039249 - RNA, 17 nt, Human
gcaucggggagccggga

SEQ ID NO: 3039250 - RNA, 15 nt, Human
gaucccaugagcucc

SEQ ID NO: 3039251 - RNA, 19 nt, Human
gaucccaacacugccagca

SEQ ID NO: 3039252 - RNA, 18 nt, Human
gaucccaacacugccagc

SEQ ID NO: 3039253 - RNA, 17 nt, Human
gaucccaacacugccag

SEQ ID NO: 3039254 - RNA, 19 nt, Human
cuuccucuccugucucccu

SEQ ID NO: 3039255 - RNA, 15 nt, Human
cuuccucuccugucu

SEQ ID NO: 3039256 - RNA, 12 nt, Human
caacacugccag

SEQ ID NO: 3039257 - RNA, 14 nt, Human
caacacugccagca

SEQ ID NO: 3039258 - RNA, 13 nt, Human
caacacugccagc

SEQ ID NO: 3039259 - RNA, 22 nt, Human
caaccggcuuuguggcacuggg

SEQ ID NO: 3039260 - RNA, 13 nt, Human
caaccggcuuugu

SEQ ID NO: 3039261 - RNA, 19 nt, Human
uuuccaaccggcuuugugg

SEQ ID NO: 3039262 - RNA, 18 nt, Human
ugggaggagggcaggcau

SEQ ID NO: 3039263 - RNA, 17 nt, Human
ugggaggagggcaggca

SEQ ID NO: 3039264 - RNA, 14 nt, Human
ugggaggagggcag

SEQ ID NO: 3039265 - RNA, 23 nt, Human
uggccuaaccugccgagagucca

SEQ ID NO: 3039266 - RNA, 18 nt, Human
uguccugcaccggggccu

SEQ ID NO: 3039267 - RNA, 13 nt, Human
uguccucagcccc

SEQ ID NO: 3039268 - RNA, 21 nt, Human
ugacccucaucuuucuuccaa

SEQ ID NO: 3039269 - RNA, 17 nt, Human
ugcccgggagcucagga

SEQ ID NO: 3039270 - RNA, 18 nt, Human
ugcccgggagcucaggaa

SEQ ID NO: 3039271 - RNA, 18 nt, Human
ugauuuuuaugccaccug

SEQ ID NO: 3039272 - RNA, 21 nt, Human
ucgugucuggcacagccuggc

SEQ ID NO: 3039273 - RNA, 14 nt, Human
ucgugucuggcaca

SEQ ID NO: 3039274 - RNA, 19 nt, Human
ucccuuccuuccucuccug

SEQ ID NO: 3039275 - RNA, 16 nt, Human
ucccuuccuuccucuc

SEQ ID NO: 3039276 - RNA, 13 nt, Human
ucccugccuggac

SEQ ID NO: 3039277 - RNA, 16 nt, Human
ucccuccucugcccgg

SEQ ID NO: 3039278 - RNA, 15 nt, Human
ucugccaggagacag

SEQ ID NO: 3039279 - RNA, 19 nt, Human
ucagaggguguccugcacc

SEQ ID NO: 3039280 - RNA, 21 nt, Human
ggccuaaccugccgagagucc

SEQ ID NO: 3039281 - RNA, 16 nt, Human
ggccuaaccugccgag

SEQ ID NO: 3039282 - RNA, 15 nt, Human
ggccuaaccugccga

SEQ ID NO: 3039283 - RNA, 17 nt, Human
ggccugggcaggaggga

SEQ ID NO: 3039284 - RNA, 15 nt, Human
ggccugggcaggagg

SEQ ID NO: 3039285 - RNA, 19 nt, Human
ggccugggcaggagggagg

SEQ ID NO: 3039286 - RNA, 14 nt, Human
gggacaccuaggcu

SEQ ID NO: 3039287 - RNA, 16 nt, Human
gggaggagggcaggca

SEQ ID NO: 3039288 - RNA, 12 nt, Human
gggaggagggca

SEQ ID NO: 3039289 - RNA, 13 nt, Human
gggagccgggagc

SEQ ID NO: 3039290 - RNA, 23 nt, Human
gggagcucaggaaccgaggcagg

SEQ ID NO: 3039291 - RNA, 22 nt, Human
gggagcucaggaaccgaggcag

SEQ ID NO: 3039292 - RNA, 12 nt, Human
gggagcucagga

SEQ ID NO: 3039293 - RNA, 13 nt, Human
ggcugggaggagg

SEQ ID NO: 3039294 - RNA, 21 nt, Human
ggcugggaggagggcaggcau

SEQ ID NO: 3039295 - RNA, 20 nt, Human
ggcugggaggagggcaggca

SEQ ID NO: 3039296 - RNA, 23 nt, Human
ggcuguggcauccagagucccug

SEQ ID NO: 3039297 - RNA, 21 nt, Human
ggcuguggcauccagaguccc

SEQ ID NO: 3039298 - RNA, 14 nt, Human
ggagggcaggcauc

SEQ ID NO: 3039299 - RNA, 21 nt, Human
ggagcucaggaaccgaggcag

SEQ ID NO: 3039300 - RNA, 19 nt, Human
ggagacagguuagcugcuc

SEQ ID NO: 3039301 - RNA, 12 nt, Human
ggaccagccucu

SEQ ID NO: 3039302 - RNA, 17 nt, Human
gccuugucacgccagac

SEQ ID NO: 3039303 - RNA, 16 nt, Human
gccuugucacgccaga

SEQ ID NO: 3039304 - RNA, 15 nt, Human
gccuugucacgccag

SEQ ID NO: 3039305 - RNA, 17 nt, Human
gcgaagcguuguccuca

SEQ ID NO: 3039306 - RNA, 16 nt, Human
gccuggaccagccucu

SEQ ID NO: 3039307 - RNA, 17 nt, Human
gccuggaccagccucuc

SEQ ID NO: 3039308 - RNA, 16 nt, Human
gccugggcaggaggga

SEQ ID NO: 3039309 - RNA, 21 nt, Human
gcuccuuaaggcucuuuugua

SEQ ID NO: 3039310 - RNA, 17 nt, Human
gcuccuuaaggcucuuu

SEQ ID NO: 3039311 - RNA, 15 nt, Human
gcuccuuaaggcucu

SEQ ID NO: 3039312 - RNA, 20 nt, Human
gcuguggccuaaccugccga

SEQ ID NO: 3039313 - RNA, 19 nt, Human
gcuguggccuaaccugccg

SEQ ID NO: 3039314 - RNA, 21 nt, Human
gcugggaggagggcaggcauc

SEQ ID NO: 3039315 - RNA, 22 nt, Human
gcaggcaucggggagccgggag

SEQ ID NO: 3039316 - RNA, 21 nt, Human
gcaggcaucggggagccggga

SEQ ID NO: 3039317 - RNA, 23 nt, Human
gcaggcaucggggagccgggagc

SEQ ID NO: 3039318 - RNA, 16 nt, Human
gccaccugaauaaaga

SEQ ID NO: 3039319 - RNA, 21 nt, Human
gccagacuucccacggcuccu

SEQ ID NO: 3039320 - RNA, 15 nt, Human
gaggagggcaggcau

SEQ ID NO: 3039321 - RNA, 14 nt, Human
gaggagggcaggca

SEQ ID NO: 3039322 - RNA, 13 nt, Human
gaggagggcaggc

SEQ ID NO: 3039323 - RNA, 23 nt, Human
gagcucaggaaccgaggcaggga

SEQ ID NO: 3039324 - RNA, 19 nt, Human
gagucccugccuggaccag

SEQ ID NO: 3039325 - RNA, 16 nt, Human
gagucccugccuggac

SEQ ID NO: 3039326 - RNA, 15 nt, Human
gagucccugccugga

SEQ ID NO: 3039327 - RNA, 14 nt, Human
gagucccugccugg

SEQ ID NO: 3039328 - RNA, 17 nt, Human
cugccuggaccagccuc

SEQ ID NO: 3039329 - RNA, 14 nt, Human
cucugcccgggagc

SEQ ID NO: 3039330 - RNA, 20 nt, Human
cucugcccgggagcucagga

SEQ ID NO: 3039331 - RNA, 23 nt, Human
cucgagaucccaacacugccagc

SEQ ID NO: 3039332 - RNA, 22 nt, Human
cucgagaucccaacacugccag

SEQ ID NO: 3039333 - RNA, 21 nt, Human
cucgagaucccaacacugcca

SEQ ID NO: 3039334 - RNA, 13 nt, Human
cucgagaucccaa

SEQ ID NO: 3039335 - RNA, 17 nt, Human
cuuucccaacaccucuu

SEQ ID NO: 3039336 - RNA, 17 nt, Human
gaauaaagaaugaaugg

SEQ ID NO: 3039337 - RNA, 19 nt, Human
gaaggaucccaugagcucc

SEQ ID NO: 3039338 - RNA, 15 nt, Human
cuuaaggcucuuuug

SEQ ID NO: 3039339 - RNA, 19 nt, Human
cuuccaaacaggcucagag

SEQ ID NO: 3039340 - RNA, 18 nt, Human
cuguggccuaaccugccg

SEQ ID NO: 3039341 - RNA, 22 nt, Human
cuggugguggcucgggaggcga

SEQ ID NO: 3039342 - RNA, 14 nt, Human
cuggugguggcucg

SEQ ID NO: 3039343 - RNA, 18 nt, Human
ccucuccacucaugugac

SEQ ID NO: 3039344 - RNA, 15 nt, Human
ccgaggcagggaagg

SEQ ID NO: 3039345 - RNA, 19 nt, Human
ccgggacaccuaggcuagg

SEQ ID NO: 3039346 - RNA, 20 nt, Human
ccgggacaccuaggcuaggg

SEQ ID NO: 3039347 - RNA, 13 nt, Human
ccuuaaggcucuu

SEQ ID NO: 3039348 - RNA, 18 nt, Human
ccuuaaggcucuuuugua

SEQ ID NO: 3039349 - RNA, 16 nt, Human
ccuuaaggcucuuuug

SEQ ID NO: 3039350 - RNA, 18 nt, Human
ccuugucacgccagacuu

SEQ ID NO: 3039351 - RNA, 15 nt, Human
ccuugucacgccaga

SEQ ID NO: 3039352 - RNA, 13 nt, Human
cgagaucccaaca

SEQ ID NO: 3039353 - RNA, 21 nt, Human
cgagaucccaacacugccagc

SEQ ID NO: 3039354 - RNA, 15 nt, Human
cgagaucccaacacu

SEQ ID NO: 3039355 - RNA, 22 nt, Human
cgagaucccaacacugccagca

SEQ ID NO: 3039356 - RNA, 12 nt, Human
ccugggcaggag

SEQ ID NO: 3039357 - RNA, 14 nt, Human
ccugggcaggaggg

SEQ ID NO: 3039358 - RNA, 13 nt, Human
ccaggagacaggu

SEQ ID NO: 3039359 - RNA, 18 nt, Human
ccauccuacccccugugc

SEQ ID NO: 3039360 - RNA, 20 nt, Human
ccaccugaauaaagaaugaa

SEQ ID NO: 3039361 - RNA, 19 nt, Human
ccacucaugugacucuuuc

SEQ ID NO: 3039362 - RNA, 22 nt, Human
ccacucaugugacucuuuccaa

SEQ ID NO: 3039363 - RNA, 21 nt, Human
ccagcauuucccuuccuuccu

SEQ ID NO: 3039364 - RNA, 16 nt, Human
ccagcauuucccuucc

SEQ ID NO: 3039365 - RNA, 14 nt, Human
caugugacucuuuc

SEQ ID NO: 3039366 - RNA, 17 nt, Human
caugugacucuuuccaa

SEQ ID NO: 3039367 - RNA, 16 nt, Human
caugugacucuuucca

SEQ ID NO: 3039368 - RNA, 12 nt, Human
cauucuuuccca

SEQ ID NO: 3039369 - RNA, 14 nt, Human
cauucuuucccaac

SEQ ID NO: 3039370 - RNA, 18 nt, Human
cauccuacccccugugcc

SEQ ID NO: 3039371 - RNA, 15 nt, Human
cauccuacccccugu

SEQ ID NO: 3039372 - RNA, 23 nt, Human
caugagcuccuuaaggcucuuuu

SEQ ID NO: 3039373 - RNA, 20 nt, Human
cauccagagucccugccugg

SEQ ID NO: 3039374 - RNA, 18 nt, Human
cauccagagucccugccu

SEQ ID NO: 3039375 - RNA, 17 nt, Human
cauccagagucccugcc

SEQ ID NO: 3039376 - RNA, 13 nt, Human
cauccagaguccc

SEQ ID NO: 3039377 - RNA, 21 nt, Human
cauccagagucccugccugga

SEQ ID NO: 3039378 - RNA, 18 nt, Human
cagggaaggaucccauga

SEQ ID NO: 3039379 - RNA, 13 nt, Human
cagggaaggaucc

SEQ ID NO: 3039380 - RNA, 11 nt, Human
caggcucagag

SEQ ID NO: 3039381 - RNA, 15 nt, Human
caggcucagagggug

SEQ ID NO: 3039382 - RNA, 21 nt, Human
caggcaucggggagccgggag

SEQ ID NO: 3039383 - RNA, 20 nt, Human
caggcaucggggagccggga

SEQ ID NO: 3039384 - RNA, 23 nt, Human
caggagacagguuagcugcuccc

SEQ ID NO: 3039385 - RNA, 15 nt, Human
cagcauuucccuucc

SEQ ID NO: 3039386 - RNA, 18 nt, Human
caggaaccgaggcaggga

SEQ ID NO: 3039387 - RNA, 17 nt, Human
caggaaccgaggcaggg

SEQ ID NO: 3039388 - RNA, 15 nt, Human
caggaaccgaggcag

SEQ ID NO: 3039389 - RNA, 23 nt, Human
cagccucuccacucaugugacuc

SEQ ID NO: 3039390 - RNA, 23 nt, Human
cagccuggcuguggccuaaccug

SEQ ID NO: 3039391 - RNA, 21 nt, Human
cagccuccauccuacccccug

SEQ ID NO: 3039392 - RNA, 18 nt, Human
cagccuccauccuacccc

SEQ ID NO: 3039393 - RNA, 18 nt, Human
cagagucccugccuggac

SEQ ID NO: 3039394 - RNA, 14 nt, Human
cagagucccugccu

SEQ ID NO: 3039395 - RNA, 12 nt, Human
cagagaaaaagg

SEQ ID NO: 3039396 - RNA, 18 nt, Human
cagagaaaaagggagggg

SEQ ID NO: 3039397 - RNA, 17 nt, Human
cagagaaaaagggaggg

SEQ ID NO: 3039398 - RNA, 22 nt, Human
cagacuucccacggcuccucga

SEQ ID NO: 3039399 - RNA, 12 nt, Human
cagacuucccac

SEQ ID NO: 3039400 - RNA, 22 nt, Human
caccggggccugggcaggaggg

SEQ ID NO: 3039401 - RNA, 21 nt, Human
caccggggccugggcaggagg

SEQ ID NO: 3039402 - RNA, 14 nt, Human
caccggggccuggg

SEQ ID NO: 3039403 - RNA, 22 nt, Human
cacggcuccucgagaucccaac

SEQ ID NO: 3039404 - RNA, 20 nt, Human
cacggcuccucgagauccca

SEQ ID NO: 3039405 - RNA, 22 nt, Human
cacucaugugacucuuuccaac

SEQ ID NO: 3039406 - RNA, 16 nt, Human
cacucaugugacucuu

SEQ ID NO: 3039407 - RNA, 16 nt, Human
caccccgacuuuuguu

SEQ ID NO: 3039408 - RNA, 19 nt, Human
augagcuccuuaaggcucu

SEQ ID NO: 3039409 - RNA, 14 nt, Human
agccgggagccuga

SEQ ID NO: 3039410 - RNA, 22 nt, Human
agcuccuuaaggcucuuuugua

SEQ ID NO: 3039411 - RNA, 17 nt, Human
agcugcuccccacguca

SEQ ID NO: 3039412 - RNA, 14 nt, Human
agcugcuccccacg

SEQ ID NO: 3039413 - RNA, 13 nt, Human
acccccugugccu

SEQ ID NO: 3039414 - RNA, 11 nt, Human
acacugccagc

SEQ ID NO: 3039415 - RNA, 12 nt, Human
acugccagcauu

SEQ ID NO: 3039416 - RNA, 23 nt, Human
accugccgagaguccaucagccu

SEQ ID NO: 3039417 - RNA, 16 nt, Human
accugccgagagucca

SEQ ID NO: 3039418 - RNA, 21 nt, Human
augugacucuuuccaaccggc

SEQ ID NO: 3039419 - RNA, 16 nt, Human
augugacucuuuccaa

SEQ ID NO: 3039420 - RNA, 12 nt, Human
augugacucuuu

SEQ ID NO: 3039421 - RNA, 13 nt, Human
uucugccaggaga

SEQ ID NO: 3039422 - RNA, 16 nt, Human
auccuacccccugugc

SEQ ID NO: 3039423 - RNA, 14 nt, Human
auccuacccccugu

SEQ ID NO: 3039424 - RNA, 16 nt, Human
auuucccuuccuuccu

SEQ ID NO: 3039425 - RNA, 21 nt, Human
uguagugauuuuuaugccacc

SEQ ID NO: 3039426 - RNA, 20 nt, Human
uguagugauuuuuaugccac

SEQ ID NO: 3039427 - RNA, 21 nt, Human
agugauuuuuaugccaccuga

SEQ ID NO: 3039428 - RNA, 20 nt, Human
agugauuuuuaugccaccug

SEQ ID NO: 3039429 - RNA, 16 nt, Human
agugauuuuuaugcca

SEQ ID NO: 3039430 - RNA, 20 nt, Human
uggcauccagagucccugcc

SEQ ID NO: 3039431 - RNA, 22 nt, Human
uggcauccagagucccugccug

SEQ ID NO: 3039432 - RNA, 21 nt, Human
uggcauccagagucccugccu

SEQ ID NO: 3039433 - RNA, 22 nt, Human
uggcacagccuggcuguggccu

SEQ ID NO: 3039434 - RNA, 15 nt, Human
aggccauucuuuccc

SEQ ID NO: 3039435 - RNA, 14 nt, Human
aggccauucuuucc

SEQ ID NO: 3039436 - RNA, 20 nt, Human
aggcucagaggguguccugc

SEQ ID NO: 3039437 - RNA, 19 nt, Human
aggcucagaggguguccug

SEQ ID NO: 3039438 - RNA, 18 nt, Human
aggcucagaggguguccu

SEQ ID NO: 3039439 - RNA, 18 nt, Human
aggcgaagcguuguccuc

SEQ ID NO: 3039440 - RNA, 17 nt, Human
uggcuguggcauccaga

SEQ ID NO: 3039441 - RNA, 20 nt, Human
uggcuguggccuaaccugcc

SEQ ID NO: 3039442 - RNA, 19 nt, Human
agccugacccucaucuuuc

SEQ ID NO: 3039443 - RNA, 17 nt, Human
ugccuugucacgccaga

SEQ ID NO: 3039444 - RNA, 18 nt, Human
accugaauaaagaaugaa

SEQ ID NO: 3039445 - RNA, 18 nt, Human
accagagaaaaagggagg

SEQ ID NO: 3039446 - RNA, 20 nt, Human
accagagaaaaagggagggg

SEQ ID NO: 3039447 - RNA, 18 nt, Human
ucaggaaccgaggcaggg

SEQ ID NO: 3039448 - RNA, 17 nt, Human
ucaggaaccgaggcagg

SEQ ID NO: 3039449 - RNA, 16 nt, Human
ucagccccgcguggaa

SEQ ID NO: 3039450 - RNA, 17 nt, Human
acucaugugacucuuuc

SEQ ID NO: 3039451 - RNA, 16 nt, Human
acucaugugacucuuu

SEQ ID NO: 3039452 - RNA, 15 nt, Human
acucaugugacucuu

SEQ ID NO: 3039453 - RNA, 11 nt, Human
uccucagcccc

SEQ ID NO: 3039454 - RNA, 14 nt, Human
acuggggcaggggc

SEQ ID NO: 3039455 - RNA, 23 nt, Human
ucgagaucccaacacugccagca

SEQ ID NO: 3039456 - RNA, 22 nt, Human
ucgagaucccaacacugccagc

SEQ ID NO: 3039457 - RNA, 21 nt, Human
uccugcaccggggccugggca

SEQ ID NO: 3039458 - RNA, 20 nt, Human
uccugcaccggggccugggc

SEQ ID NO: 3039459 - RNA, 12 nt, Human
acagccuggcug

SEQ ID NO: 3039460 - RNA, 20 nt, Human
acaccuaggcuagggugggg

SEQ ID NO: 3039461 - RNA, 23 nt, Human
acaccuaggcuaggguggggaga

SEQ ID NO: 3039462 - RNA, 13 nt, Human
uaguucugccagg

SEQ ID NO: 3039463 - RNA, 14 nt, Human
uaguucugccagga

SEQ ID NO: 3039464 - RNA, 20 nt, Human
guccugcaccggggccuggg

SEQ ID NO: 3039465 - RNA, 19 nt, Human
guccugcaccggggccugg

SEQ ID NO: 3039466 - RNA, 15 nt, Human
guccugcaccggggc

SEQ ID NO: 3039467 - RNA, 18 nt, Human
guggcacuggggcagggg

SEQ ID NO: 3039468 - RNA, 17 nt, Human
guggcacuggggcaggg

SEQ ID NO: 3039469 - RNA, 20 nt, Human
cugugccuugucacgccaga

SEQ ID NO: 3039470 - RNA, 19 nt, Human
cuucuaguucugccaggag

SEQ ID NO: 3039471 - RNA, 16 nt, Human
cuucuaguucugccag

SEQ ID NO: 3039472 - RNA, 18 nt, Human
cuucuaguucugccagga

SEQ ID NO: 3039473 - RNA, 17 nt, Human
cuucuaguucugccagg

SEQ ID NO: 3039474 - RNA, 18 nt, Human
gcauuucccuuccuuccu

SEQ ID NO: 3039475 - RNA, 20 nt, Human
gacccucaucuuucuuccaa

SEQ ID NO: 3039476 - RNA, 19 nt, Human
gacccucaucuuucuucca

SEQ ID NO: 3039477 - RNA, 15 nt, Human
gacccucaucuuucu

SEQ ID NO: 3039478 - RNA, 17 nt, Human
ggggccgggggcagucu

SEQ ID NO: 3039479 - RNA, 18 nt, Human
gggggcgcggcugggagg

SEQ ID NO: 3039480 - RNA, 14 nt, Human
ggguggggagagac

SEQ ID NO: 3039481 - RNA, 13 nt, Human
ggguggggagaga

SEQ ID NO: 3039482 - RNA, 18 nt, Human
ggguggggagagacgggc

SEQ ID NO: 3039483 - RNA, 22 nt, Human
ggugcuucuaguucugccagga

SEQ ID NO: 3039484 - RNA, 22 nt, Human
gggacaccuaggcuaggguggg

SEQ ID NO: 3039485 - RNA, 20 nt, Human
ggcucagaggguguccugca

SEQ ID NO: 3039486 - RNA, 17 nt, Human
gcuucuaguucugccag

SEQ ID NO: 3039487 - RNA, 16 nt, Human
gcuucuaguucugcca

SEQ ID NO: 3039488 - RNA, 23 nt, Human
gccuccauccuacccccugugcc

SEQ ID NO: 3039489 - RNA, 19 nt, Human
gcucaggaaccgaggcagg

SEQ ID NO: 3039490 - RNA, 16 nt, Human
gcucaggaaccgaggc

SEQ ID NO: 3039491 - RNA, 21 nt, Human
gcucaggaaccgaggcaggga

SEQ ID NO: 3039492 - RNA, 20 nt, Human
gcucaggaaccgaggcaggg

SEQ ID NO: 3039493 - RNA, 18 nt, Human
cagucugagagaggccau

SEQ ID NO: 3039494 - RNA, 21 nt, Human
ccuggugguggcucgggaggc

SEQ ID NO: 3039495 - RNA, 18 nt, Human
ccuggugguggcucggga

SEQ ID NO: 3039496 - RNA, 21 nt, Human
ccugucucccuccucugcccg

SEQ ID NO: 3039497 - RNA, 19 nt, Human
ccugacccucaucuuucuu

SEQ ID NO: 3039498 - RNA, 18 nt, Human
ccugacccucaucuuucu

SEQ ID NO: 3039499 - RNA, 12 nt, Human
ccauucuuuccc

SEQ ID NO: 3039500 - RNA, 20 nt, Human
ccauucuuucccaacaccuc

SEQ ID NO: 3039501 - RNA, 14 nt, Human
ccauucuuucccaa

SEQ ID NO: 3039502 - RNA, 18 nt, Human
cugacccucaucuuucuu

SEQ ID NO: 3039503 - RNA, 15 nt, Human
cuaggcuaggguggg

SEQ ID NO: 3039504 - RNA, 16 nt, Human
cuaguucugccaggag

SEQ ID NO: 3039505 - RNA, 15 nt, Human
cuaguucugccagga

SEQ ID NO: 3039506 - RNA, 14 nt, Human
cuaguucugccagg

SEQ ID NO: 3039507 - RNA, 15 nt, Human
cuaggguggggagag

SEQ ID NO: 3039508 - RNA, 13 nt, Human
cuaguucugccag

SEQ ID NO: 3039509 - RNA, 14 nt, Human
uuuaugccaccuga

SEQ ID NO: 3039510 - RNA, 16 nt, Human
uuaugccaccugaaua

SEQ ID NO: 3039511 - RNA, 13 nt, Human
uuaugccaccuga

SEQ ID NO: 3039512 - RNA, 13 nt, Human
ugggcaggaggga

SEQ ID NO: 3039513 - RNA, 18 nt, Human
ugggcaggagggaggugc

SEQ ID NO: 3039514 - RNA, 16 nt, Human
ugggcaggagggaggu

SEQ ID NO: 3039515 - RNA, 15 nt, Human
ugggcaggagggagg

SEQ ID NO: 3039516 - RNA, 20 nt, Human
uggggaguuuaggguggggg

SEQ ID NO: 3039517 - RNA, 15 nt, Human
uggaccagccucucc

SEQ ID NO: 3039518 - RNA, 21 nt, Human
ugagcuccuuaaggcucuuuu

SEQ ID NO: 3039519 - RNA, 19 nt, Human
ugagcuccuuaaggcucuu

SEQ ID NO: 3039520 - RNA, 16 nt, Human
uaggcuagggugggga

SEQ ID NO: 3039521 - RNA, 15 nt, Human
uaggcuagggugggg

SEQ ID NO: 3039522 - RNA, 21 nt, Human
uccagagucccugccuggacc

SEQ ID NO: 3039523 - RNA, 20 nt, Human
uccagagucccugccuggac

SEQ ID NO: 3039524 - RNA, 19 nt, Human
uccagagucccugccugga

SEQ ID NO: 3039525 - RNA, 18 nt, Human
uccagagucccugccugg

SEQ ID NO: 3039526 - RNA, 14 nt, Human
uccaaacaggcuca

SEQ ID NO: 3039527 - RNA, 12 nt, Human
ucaucuuucuuc

SEQ ID NO: 3039528 - RNA, 18 nt, Human
ucucccuccucugcccgg

SEQ ID NO: 3039529 - RNA, 17 nt, Human
uccuacccccugugccu

SEQ ID NO: 3039530 - RNA, 16 nt, Human
uccuacccccugugcc

SEQ ID NO: 3039531 - RNA, 15 nt, Human
uccuacccccugugc

SEQ ID NO: 3039532 - RNA, 13 nt, Human
uccuacccccugu

SEQ ID NO: 3039533 - RNA, 15 nt, Human
uccugucucccuccu

SEQ ID NO: 3039534 - RNA, 23 nt, Human
uccugucucccuccucugcccgg

SEQ ID NO: 3039535 - RNA, 16 nt, Human
gugauuuuuaugccac

SEQ ID NO: 3039536 - RNA, 20 nt, Human
gugauuuuuaugccaccuga

SEQ ID NO: 3039537 - RNA, 19 nt, Human
gugauuuuuaugccaccug

SEQ ID NO: 3039538 - RNA, 17 nt, Human
gugauuuuuaugccacc

SEQ ID NO: 3039539 - RNA, 12 nt, Human
gugacucuuucc

SEQ ID NO: 3039540 - RNA, 14 nt, Human
guggcauccagagu

SEQ ID NO: 3039541 - RNA, 18 nt, Human
guggcucgggaggcgaag

SEQ ID NO: 3039542 - RNA, 16 nt, Human
guggcucgggaggcga

SEQ ID NO: 3039543 - RNA, 19 nt, Human
gugccuugucacgccagac

SEQ ID NO: 3039544 - RNA, 20 nt, Human
gugcuucuaguucugccagg

SEQ ID NO: 3039545 - RNA, 22 nt, Human
gugcuucuaguucugccaggag

SEQ ID NO: 3039546 - RNA, 21 nt, Human
gugcuucuaguucugccagga

SEQ ID NO: 3039547 - RNA, 12 nt, Human
guccucagcccc

SEQ ID NO: 3039548 - RNA, 14 nt, Human
gucccugccuggac

SEQ ID NO: 3039549 - RNA, 21 nt, Human
gucccugccuggaccagccuc

SEQ ID NO: 3039550 - RNA, 20 nt, Human
gucccugccuggaccagccu

SEQ ID NO: 3039551 - RNA, 23 nt, Human
gucccugccuggaccagccucuc

SEQ ID NO: 3039552 - RNA, 22 nt, Human
gucccugccuggaccagccucu

SEQ ID NO: 3039553 - RNA, 14 nt, Human
gucacgccagacuu

SEQ ID NO: 3039554 - RNA, 18 nt, Human
ggggaguuuagggugggg

SEQ ID NO: 3039555 - RNA, 14 nt, Human
gggcgcggcuggga

SEQ ID NO: 3039556 - RNA, 21 nt, Human
gcucagaggguguccugcacc

SEQ ID NO: 3039557 - RNA, 23 nt, Human
gcccuggugguggcucgggaggc

SEQ ID NO: 3039558 - RNA, 14 nt, Human
ggccugggcaggag

SEQ ID NO: 3039559 - RNA, 13 nt, Human
ggccugggcagga

SEQ ID NO: 3039560 - RNA, 16 nt, Human
ggcgcggcugggagga

SEQ ID NO: 3039561 - RNA, 16 nt, Human
ggcuaggguggggaga

SEQ ID NO: 3039562 - RNA, 22 nt, Human
ggccuaaccugccgagagucca

SEQ ID NO: 3039563 - RNA, 20 nt, Human
ggccauucuuucccaacacc

SEQ ID NO: 3039564 - RNA, 22 nt, Human
ggaaggaucccaugagcuccuu

SEQ ID NO: 3039565 - RNA, 14 nt, Human
gcuuuguggcacug

SEQ ID NO: 3039566 - RNA, 22 nt, Human
gcuuuguggcacuggggcaggg

SEQ ID NO: 3039567 - RNA, 18 nt, Human
gcacuggggcaggggccg

SEQ ID NO: 3039568 - RNA, 15 nt, Human
gcacuggggcagggg

SEQ ID NO: 3039569 - RNA, 23 nt, Human
gcacuggggcaggggccgggggc

SEQ ID NO: 3039570 - RNA, 14 nt, Human
gagggggagagggc

SEQ ID NO: 3039571 - RNA, 13 nt, Human
gaggguguccugc

SEQ ID NO: 3039572 - RNA, 20 nt, Human
gaggcgaagcguuguccuca

SEQ ID NO: 3039573 - RNA, 21 nt, Human
gaggcgaagcguuguccucag

SEQ ID NO: 3039574 - RNA, 14 nt, Human
gaggcagggaagga

SEQ ID NO: 3039575 - RNA, 23 nt, Human
gagucccugccuggaccagccuc

SEQ ID NO: 3039576 - RNA, 21 nt, Human
gagucccugccuggaccagcc

SEQ ID NO: 3039577 - RNA, 14 nt, Human
gaccagccucucca

SEQ ID NO: 3039578 - RNA, 13 nt, Human
gagagacgggccc

SEQ ID NO: 3039579 - RNA, 20 nt, Human
gagaucccaacacugccagc

SEQ ID NO: 3039580 - RNA, 19 nt, Human
gagaucccaacacugccag

SEQ ID NO: 3039581 - RNA, 18 nt, Human
gagaucccaacacugcca

SEQ ID NO: 3039582 - RNA, 21 nt, Human
cugucucccuccucugcccgg

SEQ ID NO: 3039583 - RNA, 22 nt, Human
cugccgagaguccaucagccuc

SEQ ID NO: 3039584 - RNA, 23 nt, Human
cugccgagaguccaucagccucc

SEQ ID NO: 3039585 - RNA, 18 nt, Human
cuggaccagccucuccac

SEQ ID NO: 3039586 - RNA, 14 nt, Human
cuggaccagccucu

SEQ ID NO: 3039587 - RNA, 14 nt, Human
cuuuguggcacugg

SEQ ID NO: 3039588 - RNA, 13 nt, Human
cuugucacgccag

SEQ ID NO: 3039589 - RNA, 18 nt, Human
cuugucacgccagacuuc

SEQ ID NO: 3039590 - RNA, 16 nt, Human
cuugucacgccagacu

SEQ ID NO: 3039591 - RNA, 22 nt, Human
cuuucuuccaaacaggcucaga

SEQ ID NO: 3039592 - RNA, 13 nt, Human
cuuucccaacacc

SEQ ID NO: 3039593 - RNA, 17 nt, Human
cucaggaaccgaggcag

SEQ ID NO: 3039594 - RNA, 19 nt, Human
cucaggaaccgaggcaggg

SEQ ID NO: 3039595 - RNA, 18 nt, Human
cucaggaaccgaggcagg

SEQ ID NO: 3039596 - RNA, 17 nt, Human
cucagccccgcguggaa

SEQ ID NO: 3039597 - RNA, 16 nt, Human
cucagaggguguccug

SEQ ID NO: 3039598 - RNA, 20 nt, Human
cuccccacgucagcugggac

SEQ ID NO: 3039599 - RNA, 16 nt, Human
cuccacucaugugacu

SEQ ID NO: 3039600 - RNA, 22 nt, Human
cuccacucaugugacucuuucc

SEQ ID NO: 3039601 - RNA, 21 nt, Human
cgaagcguuguccucagcccc

SEQ ID NO: 3039602 - RNA, 17 nt, Human
cgaagcguuguccucag

SEQ ID NO: 3039603 - RNA, 16 nt, Human
cgaagcguuguccuca

SEQ ID NO: 3039604 - RNA, 15 nt, Human
cgaagcguuguccuc

SEQ ID NO: 3039605 - RNA, 16 nt, Human
cgcggcugggaggagg

SEQ ID NO: 3039606 - RNA, 12 nt, Human
cgcggcugggag

SEQ ID NO: 3039607 - RNA, 11 nt, Human
cgcggcuggga

SEQ ID NO: 3039608 - RNA, 18 nt, Human
cgggacaccuaggcuagg

SEQ ID NO: 3039609 - RNA, 19 nt, Human
cgggacaccuaggcuaggg

SEQ ID NO: 3039610 - RNA, 14 nt, Human
ccugccgagagucc

SEQ ID NO: 3039611 - RNA, 23 nt, Human
ccugccgagaguccaucagccuc

SEQ ID NO: 3039612 - RNA, 22 nt, Human
ccugccgagaguccaucagccu

SEQ ID NO: 3039613 - RNA, 15 nt, Human
ccugcaccggggccu

SEQ ID NO: 3039614 - RNA, 17 nt, Human
ccugcaccggggccugg

SEQ ID NO: 3039615 - RNA, 15 nt, Human
cccacggcuccucga

SEQ ID NO: 3039616 - RNA, 15 nt, Human
cccacgucagcuggg

SEQ ID NO: 3039617 - RNA, 14 nt, Human
cccaacacugccag

SEQ ID NO: 3039618 - RNA, 16 nt, Human
cccaacacugccagca

SEQ ID NO: 3039619 - RNA, 15 nt, Human
cccaacacugccagc

SEQ ID NO: 3039620 - RNA, 13 nt, Human
cccaugagcuccu

SEQ ID NO: 3039621 - RNA, 22 nt, Human
cccaugagcuccuuaaggcucu

SEQ ID NO: 3039622 - RNA, 15 nt, Human
cccaugagcuccuua

SEQ ID NO: 3039623 - RNA, 14 nt, Human
cccaugagcuccuu

SEQ ID NO: 3039624 - RNA, 14 nt, Human
ccccugugccuugu

SEQ ID NO: 3039625 - RNA, 23 nt, Human
ccguggcuguggcauccagaguc

SEQ ID NO: 3039626 - RNA, 13 nt, Human
ccuaaccugccga

SEQ ID NO: 3039627 - RNA, 12 nt, Human
ccuaaccugccg

SEQ ID NO: 3039628 - RNA, 16 nt, Human
ccuaggcuaggguggg

SEQ ID NO: 3039629 - RNA, 20 nt, Human
ccggggccugggcaggaggg

SEQ ID NO: 3039630 - RNA, 21 nt, Human
ccgggggcagucugagagagg

SEQ ID NO: 3039631 - RNA, 21 nt, Human
ccgagaguccaucagccucca

SEQ ID NO: 3039632 - RNA, 20 nt, Human
ccgagaguccaucagccucc

SEQ ID NO: 3039633 - RNA, 19 nt, Human
accggggccugggcaggag

SEQ ID NO: 3039634 - RNA, 13 nt, Human
aagggagggggag

SEQ ID NO: 3039635 - RNA, 10 nt, Human
agagggcugc

SEQ ID NO: 3039636 - RNA, 18 nt, Human
agcuccuuaaggcucuuu

SEQ ID NO: 3039637 - RNA, 17 nt, Human
agcuccuuaaggcucuu

SEQ ID NO: 3039638 - RNA, 16 nt, Human
agcuccuuaaggcucu

SEQ ID NO: 3039639 - RNA, 16 nt, Human
aggaaccgaggcaggg

SEQ ID NO: 3039640 - RNA, 19 nt, Human
auccagagucccugccugg

SEQ ID NO: 3039641 - RNA, 21 nt, Human
auccagagucccugccuggac

SEQ ID NO: 3039642 - RNA, 20 nt, Human
auccagagucccugccugga

SEQ ID NO: 3039643 - RNA, 16 nt, Human
agucugagagaggcca

SEQ ID NO: 3039644 - RNA, 23 nt, Human
agucugagagaggccauucuuuc

SEQ ID NO: 3039645 - RNA, 16 nt, Human
uucuaguucugccagg

SEQ ID NO: 3039646 - RNA, 15 nt, Human
uucuaguucugccag

SEQ ID NO: 3039647 - RNA, 19 nt, Human
uguggcacuggggcagggg

SEQ ID NO: 3039648 - RNA, 14 nt, Human
agucccugccugga

SEQ ID NO: 3039649 - RNA, 21 nt, Human
agucccugccuggaccagccu

SEQ ID NO: 3039650 - RNA, 15 nt, Human
agucccugccuggac

SEQ ID NO: 3039651 - RNA, 23 nt, Human
agucccugccuggaccagccucu

SEQ ID NO: 3039652 - RNA, 22 nt, Human
agucccugccuggaccagccuc

SEQ ID NO: 3039653 - RNA, 19 nt, Human
uggggaguuuagggugggg

SEQ ID NO: 3039654 - RNA, 18 nt, Human
uggggaguuuaggguggg

SEQ ID NO: 3039655 - RNA, 16 nt, Human
agggggagagggcugc

SEQ ID NO: 3039656 - RNA, 15 nt, Human
agggggagagggcug

SEQ ID NO: 3039657 - RNA, 21 nt, Human
agcugggacaccccgacuuuu

SEQ ID NO: 3039658 - RNA, 19 nt, Human
aggaucccaugagcuccuu

SEQ ID NO: 3039659 - RNA, 16 nt, Human
uggccuaaccugccga

SEQ ID NO: 3039660 - RNA, 20 nt, Human
agcucaggaaccgaggcagg

SEQ ID NO: 3039661 - RNA, 22 nt, Human
agcucaggaaccgaggcaggga

SEQ ID NO: 3039662 - RNA, 21 nt, Human
agcucaggaaccgaggcaggg

SEQ ID NO: 3039663 - RNA, 18 nt, Human
agccugacccucaucuuu

SEQ ID NO: 3039664 - RNA, 17 nt, Human
agcauuucccuuccuuc

SEQ ID NO: 3039665 - RNA, 17 nt, Human
agagacgggcccuggug

SEQ ID NO: 3039666 - RNA, 23 nt, Human
ucuuggggaguuuaggguggggg

SEQ ID NO: 3039667 - RNA, 22 nt, Human
ucuuggggaguuuagggugggg

SEQ ID NO: 3039668 - RNA, 22 nt, Human
ucuggcacagccuggcuguggc

SEQ ID NO: 3039669 - RNA, 16 nt, Human
acuggggcaggggccg

SEQ ID NO: 3039670 - RNA, 20 nt, Human
ucggggagccgggagccuga

SEQ ID NO: 3039671 - RNA, 14 nt, Human
ucuaguucugccag

SEQ ID NO: 3039672 - RNA, 22 nt, Human
uccucugcccgggagcucagga

SEQ ID NO: 3039673 - RNA, 16 nt, Human
uccucugcccgggagc

SEQ ID NO: 3039674 - RNA, 13 nt, Human
uccucuccugucu

SEQ ID NO: 3039675 - RNA, 23 nt, Human
acucgugucuggcacagccuggc

SEQ ID NO: 3039676 - RNA, 22 nt, Human
acucgugucuggcacagccugg

SEQ ID NO: 3039677 - RNA, 20 nt, Human
uccauccuacccccugugcc

SEQ ID NO: 3039678 - RNA, 16 nt, Human
uccauccuacccccug

SEQ ID NO: 3039679 - RNA, 20 nt, Human
uaugccaccugaauaaagaa

SEQ ID NO: 3039680 - RNA, 15 nt, Human
uacccccugugccuu

SEQ ID NO: 3039681 - RNA, 19 nt, Human
uaccagagaaaaagggagg

SEQ ID NO: 3039682 - RNA, 14 nt, Human
aaggcucuuuugua

SEQ ID NO: 3039683 - RNA, 22 nt, Human
guggccuaaccugccgagaguc

SEQ ID NO: 3039684 - RNA, 21 nt, Human
guggccuaaccugccgagagu

SEQ ID NO: 3039685 - RNA, 19 nt, Human
gucucccuccucugcccgg

SEQ ID NO: 3039686 - RNA, 19 nt, Human
gucuggcacagccuggcug

SEQ ID NO: 3039687 - RNA, 17 nt, Human
gucuggcacagccuggc

SEQ ID NO: 3039688 - RNA, 24 nt, Human
cagccucuccacucaugugacucu

SEQ ID NO: 3039689 - RNA, 24 nt, Human
cagccccgcguggaacucgugucu

SEQ ID NO: 3039690 - RNA, 22 nt, Human
cacugccagcauuucccuuccu

SEQ ID NO: 3039691 - RNA, 18 nt, Human
cacugccagcauuucccu

SEQ ID NO: 3039692 - RNA, 19 nt, Human
cacuggggcaggggccggg

SEQ ID NO: 3039693 - RNA, 15 nt, Human
caaacaggcucagag

SEQ ID NO: 3039694 - RNA, 14 nt, Human
caaacaggcucaga

SEQ ID NO: 3039695 - RNA, 19 nt, Human
auucuuucccaacaccucu

SEQ ID NO: 3039696 - RNA, 16 nt, Human
auucuuucccaacacc

SEQ ID NO: 3039697 - RNA, 13 nt, Human
auucuuucccaac

SEQ ID NO: 3039698 - RNA, 21 nt, Human
cgugucuggcacagccuggcu

SEQ ID NO: 3039699 - RNA, 13 nt, Human
cgugucuggcaca

SEQ ID NO: 3039700 - RNA, 14 nt, Human
cgugucuggcacag

SEQ ID NO: 3039701 - RNA, 12 nt, Human
cuaaccugccga

SEQ ID NO: 3039702 - RNA, 21 nt, Human
cuaaccugccgagaguccauc

SEQ ID NO: 3039703 - RNA, 19 nt, Human
cuaaccugccgagagucca

SEQ ID NO: 3039704 - RNA, 23 nt, Human
cggcuccucgagaucccaacacu

SEQ ID NO: 3039705 - RNA, 13 nt, Human
cucccuccucugc

SEQ ID NO: 3039706 - RNA, 14 nt, Human
cucccuccucugcc

SEQ ID NO: 3039707 - RNA, 16 nt, Human
cucaucuuucuuccaa

SEQ ID NO: 3039708 - RNA, 14 nt, Human
ccccgacuuuuguu

SEQ ID NO: 3039709 - RNA, 14 nt, Human
cccgggagcucagg

SEQ ID NO: 3039710 - RNA, 16 nt, Human
ccagagucccugccug

SEQ ID NO: 3039711 - RNA, 22 nt, Human
ccagagucccugccuggaccag

SEQ ID NO: 3039712 - RNA, 19 nt, Human
ccagagucccugccuggac

SEQ ID NO: 3039713 - RNA, 18 nt, Human
ccagagucccugccugga

SEQ ID NO: 3039714 - RNA, 17 nt, Human
ccagagucccugccugg

SEQ ID NO: 3039715 - RNA, 12 nt, Human
ccaugagcuccu

SEQ ID NO: 3039716 - RNA, 22 nt, Human
ccugacccucaucuuucuucca

SEQ ID NO: 3039717 - RNA, 15 nt, Human
cccugugccuuguca

SEQ ID NO: 3039718 - RNA, 22 nt, Human
cccugugccuugucacgccaga

SEQ ID NO: 3039719 - RNA, 20 nt, Human
cccugugccuugucacgcca

SEQ ID NO: 3039720 - RNA, 16 nt, Human
gacagguuagcugcuc

SEQ ID NO: 3039721 - RNA, 19 nt, Human
gcaccggggccugggcagg

SEQ ID NO: 3039722 - RNA, 20 nt, Human
gcaccggggccugggcagga

SEQ ID NO: 3039723 - RNA, 15 nt, Human
gaguuuagggugggg

SEQ ID NO: 3039724 - RNA, 14 nt, Human
gaguuuaggguggg

SEQ ID NO: 3039725 - RNA, 16 nt, Human
gaguccaucagccucc

SEQ ID NO: 3039726 - RNA, 15 nt, Human
gaguccaucagccuc

SEQ ID NO: 3039727 - RNA, 14 nt, Human
gaguccaucagccu

SEQ ID NO: 3039728 - RNA, 13 nt, Human
gaguccaucagcc

SEQ ID NO: 3039729 - RNA, 16 nt, Human
gaucccaacacugcca

SEQ ID NO: 3039730 - RNA, 12 nt, Human
gaucccaacacu

SEQ ID NO: 3039731 - RNA, 21 nt, Human
ggugcuucuaguucugccagg

SEQ ID NO: 3039732 - RNA, 23 nt, Human
ggguguccugcaccggggccugg

SEQ ID NO: 3039733 - RNA, 22 nt, Human
gggcccuggugguggcucggga

SEQ ID NO: 3039734 - RNA, 14 nt, Human
aaaagggaggggga

SEQ ID NO: 3039735 - RNA, 12 nt, Human
ggcacagccugg

SEQ ID NO: 3039736 - RNA, 13 nt, Human
ggcacagccuggc

SEQ ID NO: 3039737 - RNA, 15 nt, Human
ggcacuggggcaggg

SEQ ID NO: 3039738 - RNA, 22 nt, Human
ggcauccagagucccugccugg

SEQ ID NO: 3039739 - RNA, 22 nt, Human
ggcgaagcguuguccucagccc

SEQ ID NO: 3039740 - RNA, 22 nt, Human
gcugcuccccacgucagcuggg

SEQ ID NO: 3039741 - RNA, 13 nt, Human
gcugcuccccacg

SEQ ID NO: 3039742 - RNA, 18 nt, Human
gcuccucgagaucccaac

SEQ ID NO: 3039743 - RNA, 14 nt, Human
gcggcugggaggag

SEQ ID NO: 3039744 - RNA, 13 nt, Human
gcggcugggagga

SEQ ID NO: 3039745 - RNA, 22 nt, Human
gcggcugggaggagggcaggca

SEQ ID NO: 3039746 - RNA, 19 nt, Human
gcggcugggaggagggcag

SEQ ID NO: 3039747 - RNA, 18 nt, Human
gcggcugggaggagggca

SEQ ID NO: 3039748 - RNA, 17 nt, Human
gcggcugggaggagggc

SEQ ID NO: 3039749 - RNA, 17 nt, Human
ugucuggcacagccugg

SEQ ID NO: 3039750 - RNA, 15 nt, Human
uguggccuaaccugc

SEQ ID NO: 3039751 - RNA, 20 nt, Human
ugugccuugucacgccagac

SEQ ID NO: 3039752 - RNA, 19 nt, Human
ugugccuugucacgccaga

SEQ ID NO: 3039753 - RNA, 17 nt, Human
ugugccuugucacgcca

SEQ ID NO: 3039754 - RNA, 21 nt, Human
uguccucagccccgcguggaa

SEQ ID NO: 3039755 - RNA, 12 nt, Human
ugcaccggggcc

SEQ ID NO: 3039756 - RNA, 22 nt, Human
ugcaccggggccugggcaggag

SEQ ID NO: 3039757 - RNA, 16 nt, Human
ugcaccggggccuggg

SEQ ID NO: 3039758 - RNA, 21 nt, Human
ugggacaccccgacuuuuguu

SEQ ID NO: 3039759 - RNA, 18 nt, Human
uggaacucgugucuggca

SEQ ID NO: 3039760 - RNA, 23 nt, Human
ucccaugagcuccuuaaggcucu

SEQ ID NO: 3039761 - RNA, 23 nt, Human
uccucgagaucccaacacugcca

SEQ ID NO: 3039762 - RNA, 16 nt, Human
uccucgagaucccaac

SEQ ID NO: 3039763 - RNA, 16 nt, Human
ucccaacacugccagc

SEQ ID NO: 3039764 - RNA, 15 nt, Human
ucccaacacugccag

SEQ ID NO: 3039765 - RNA, 14 nt, Human
ucccaacacugcca

SEQ ID NO: 3039766 - RNA, 15 nt, Human
uccagagucccugcc

SEQ ID NO: 3039767 - RNA, 17 nt, Human
ucaucuuucuuccaaac

SEQ ID NO: 3039768 - RNA, 14 nt, Human
ucaucuuucuucca

SEQ ID NO: 3039769 - RNA, 23 nt, Human
ucagccuccauccuacccccugu

SEQ ID NO: 3039770 - RNA, 19 nt, Human
ucuuuccaaccggcuuugu

SEQ ID NO: 3039771 - RNA, 16 nt, Human
ugacucuuuccaaccg

SEQ ID NO: 3039772 - RNA, 14 nt, Human
ugacucuuuccaac

SEQ ID NO: 3039773 - RNA, 13 nt, Human
ugacucuuuccaa

SEQ ID NO: 3039774 - RNA, 19 nt, Human
ugacucuuuccaaccggcu

SEQ ID NO: 3039775 - RNA, 23 nt, Human
guuguccucagccccgcguggaa

SEQ ID NO: 3039776 - RNA, 17 nt, Human
guuguccucagccccgc

SEQ ID NO: 3039777 - RNA, 21 nt, Human
guggggagagacgggcccugg

SEQ ID NO: 3039778 - RNA, 21 nt, Human
guguccugcaccggggccugg

SEQ ID NO: 3039779 - RNA, 17 nt, Human
gugucuggcacagccug

SEQ ID NO: 3039780 - RNA, 12 nt, Human
guucugccagga

SEQ ID NO: 3039781 - RNA, 14 nt, Human
guucugccaggaga

SEQ ID NO: 3039782 - RNA, 13 nt, Human
guucugccaggag

SEQ ID NO: 3039783 - RNA, 19 nt, Human
guagugauuuuuaugccac

SEQ ID NO: 3039784 - RNA, 22 nt, Human
gucagcugggacaccccgacuu

SEQ ID NO: 3039785 - RNA, 21 nt, Human
gugauuuuuaugccaccugaa

SEQ ID NO: 3039786 - RNA, 13 nt, Human
gucccugccugga

SEQ ID NO: 3039787 - RNA, 18 nt, Human
gucugagagaggccauuc

SEQ ID NO: 3039788 - RNA, 15 nt, Human
gucugagagaggcca

SEQ ID NO: 3039789 - RNA, 14 nt, Human
gucugagagaggcc

SEQ ID NO: 3039790 - RNA, 13 nt, Human
gucugagagaggc

SEQ ID NO: 3039791 - RNA, 18 nt, Human
gccuuuggacuugucccg

SEQ ID NO: 3039792 - RNA, 12 nt, Human
gcgcggcuggga

SEQ ID NO: 3039793 - RNA, 18 nt, Human
gcgcggcugggaggaggg

SEQ ID NO: 3039794 - RNA, 24 nt, Human
gccucuccacucaugugacucuuu

SEQ ID NO: 3039795 - RNA, 21 nt, Human
gccucuccacucaugugacuc

SEQ ID NO: 3039796 - RNA, 17 nt, Human
gccugacccucaucuuu

SEQ ID NO: 3039797 - RNA, 17 nt, Human
gccuaaccugccgagag

SEQ ID NO: 3039798 - RNA, 15 nt, Human
gcccgggagcucagg

SEQ ID NO: 3039799 - RNA, 19 nt, Human
gcccgggagcucaggaacc

SEQ ID NO: 3039800 - RNA, 17 nt, Human
gcccgggagcucaggaa

SEQ ID NO: 3039801 - RNA, 20 nt, Human
gcaggggccgggggcagucu

SEQ ID NO: 3039802 - RNA, 19 nt, Human
gcaggggccgggggcaguc

SEQ ID NO: 3039803 - RNA, 17 nt, Human
gaucccaugagcuccuu

SEQ ID NO: 3039804 - RNA, 20 nt, Human
gacaccuaggcuaggguggg

SEQ ID NO: 3039805 - RNA, 16 nt, Human
gacaccuaggcuaggg

SEQ ID NO: 3039806 - RNA, 15 nt, Human
gacaccuaggcuagg

SEQ ID NO: 3039807 - RNA, 21 nt, Human
gagagaggccauucuuuccca

SEQ ID NO: 3039808 - RNA, 13 nt, Human
gagagaggccauu

SEQ ID NO: 3039809 - RNA, 18 nt, Human
gacuugucccgggacacc

SEQ ID NO: 3039810 - RNA, 20 nt, Human
gagcuccuuaaggcucuuuu

SEQ ID NO: 3039811 - RNA, 20 nt, Human
gagcucaggaaccgaggcag

SEQ ID NO: 3039812 - RNA, 22 nt, Human
gagcucaggaaccgaggcaggg

SEQ ID NO: 3039813 - RNA, 21 nt, Human
gagcucaggaaccgaggcagg

SEQ ID NO: 3039814 - RNA, 21 nt, Human
gagccugacccucaucuuucu

SEQ ID NO: 3039815 - RNA, 13 nt, Human
cuuucuuccaaac

SEQ ID NO: 3039816 - RNA, 19 nt, Human
cuuucuuccaaacaggcuc

SEQ ID NO: 3039817 - RNA, 12 nt, Human
cuuuggacuugu

SEQ ID NO: 3039818 - RNA, 21 nt, Human
cuuggggaguuuagggugggg

SEQ ID NO: 3039819 - RNA, 20 nt, Human
cuuggggaguuuaggguggg

SEQ ID NO: 3039820 - RNA, 23 nt, Human
cuugucacgccagacuucccacg

SEQ ID NO: 3039821 - RNA, 21 nt, Human
gaaggaucccaugagcuccuu

SEQ ID NO: 3039822 - RNA, 23 nt, Human
cuggcacagccuggcuguggccu

SEQ ID NO: 3039823 - RNA, 15 nt, Human
cuggcacagccuggc

SEQ ID NO: 3039824 - RNA, 21 nt, Human
cuggcacagccuggcuguggc

SEQ ID NO: 3039825 - RNA, 16 nt, Human
cuggcacagccuggcu

SEQ ID NO: 3039826 - RNA, 19 nt, Human
cugggaggagggcaggcau

SEQ ID NO: 3039827 - RNA, 18 nt, Human
cuggcuguggccuaaccu

SEQ ID NO: 3039828 - RNA, 11 nt, Human
cugccaggaga

SEQ ID NO: 3039829 - RNA, 19 nt, Human
cugcccgggagcucaggaa

SEQ ID NO: 3039830 - RNA, 18 nt, Human
cuccauccuacccccugu

SEQ ID NO: 3039831 - RNA, 23 nt, Human
cuccauccuacccccugugccuu

SEQ ID NO: 3039832 - RNA, 22 nt, Human
cuccauccuacccccugugccu

SEQ ID NO: 3039833 - RNA, 20 nt, Human
cuccauccuacccccugugc

SEQ ID NO: 3039834 - RNA, 17 nt, Human
cuccucgagaucccaac

SEQ ID NO: 3039835 - RNA, 24 nt, Human
cuccucgagaucccaacacugcca

SEQ ID NO: 3039836 - RNA, 21 nt, Human
cuccucgagaucccaacacug

SEQ ID NO: 3039837 - RNA, 17 nt, Human
cucuccugucucccucc

SEQ ID NO: 3039838 - RNA, 15 nt, Human
cucuccugucucccu

SEQ ID NO: 3039839 - RNA, 18 nt, Human
cucuccugucucccuccu

SEQ ID NO: 3039840 - RNA, 21 nt, Human
cucuccacucaugugacucuu

SEQ ID NO: 3039841 - RNA, 22 nt, Human
cucuccacucaugugacucuuu

SEQ ID NO: 3039842 - RNA, 21 nt, Human
cucuuggggaguuuagggugg

SEQ ID NO: 3039843 - RNA, 23 nt, Human
cucuuggggaguuuagggugggg

SEQ ID NO: 3039844 - RNA, 12 nt, Human
cggcugggagga

SEQ ID NO: 3039845 - RNA, 17 nt, Human
cgggagccugacccuca

SEQ ID NO: 3039846 - RNA, 17 nt, Human
cgggggcagucugagag

SEQ ID NO: 3039847 - RNA, 21 nt, Human
cgggggcagucugagagaggc

SEQ ID NO: 3039848 - RNA, 18 nt, Human
cgggggcagucugagaga

SEQ ID NO: 3039849 - RNA, 17 nt, Human
cggggccugggcaggag

SEQ ID NO: 3039850 - RNA, 19 nt, Human
cggggccugggcaggaggg

SEQ ID NO: 3039851 - RNA, 23 nt, Human
cguggcuguggcauccagagucc

SEQ ID NO: 3039852 - RNA, 16 nt, Human
cguuguccucagcccc

SEQ ID NO: 3039853 - RNA, 14 nt, Human
cuacccccugugcc

SEQ ID NO: 3039854 - RNA, 13 nt, Human
cuacccccugugc

SEQ ID NO: 3039855 - RNA, 14 nt, Human
cccucaucuuucuu

SEQ ID NO: 3039856 - RNA, 18 nt, Human
cccugccuggaccagccu

SEQ ID NO: 3039857 - RNA, 13 nt, Human
cccugccuggacc

SEQ ID NO: 3039858 - RNA, 12 nt, Human
cccugccuggac

SEQ ID NO: 3039859 - RNA, 16 nt, Human
ccggcuuuguggcacu

SEQ ID NO: 3039860 - RNA, 19 nt, Human
ccggcuuuguggcacuggg

SEQ ID NO: 3039861 - RNA, 17 nt, Human
ccggcuuuguggcacug

SEQ ID NO: 3039862 - RNA, 15 nt, Human
ccgggagcucaggaa

SEQ ID NO: 3039863 - RNA, 13 nt, Human
ccgggagcucagg

SEQ ID NO: 3039864 - RNA, 15 nt, Human
ccggggccugggcag

SEQ ID NO: 3039865 - RNA, 19 nt, Human
ccggggccugggcaggagg

SEQ ID NO: 3039866 - RNA, 18 nt, Human
ccucagccccgcguggaa

SEQ ID NO: 3039867 - RNA, 23 nt, Human
ccuccauccuacccccugugccu

SEQ ID NO: 3039868 - RNA, 22 nt, Human
ccuccauccuacccccugugcc

SEQ ID NO: 3039869 - RNA, 17 nt, Human
ccuccauccuacccccu

SEQ ID NO: 3039870 - RNA, 19 nt, Human
cauccuacccccugugccu

SEQ ID NO: 3039871 - RNA, 23 nt, Human
agagaggccauucuuucccaaca

SEQ ID NO: 3039872 - RNA, 22 nt, Human
agagaggccauucuuucccaac

SEQ ID NO: 3039873 - RNA, 12 nt, Human
agagaggccauu

SEQ ID NO: 3039874 - RNA, 15 nt, Human
aggagggcaggcauc

SEQ ID NO: 3039875 - RNA, 13 nt, Human
aggagggcaggca

SEQ ID NO: 3039876 - RNA, 15 nt, Human
aggagggaggugcuu

SEQ ID NO: 3039877 - RNA, 20 nt, Human
aggagacagguuagcugcuc

SEQ ID NO: 3039878 - RNA, 19 nt, Human
aggcaucggggagccggga

SEQ ID NO: 3039879 - RNA, 19 nt, Human
aggcuaggguggggagaga

SEQ ID NO: 3039880 - RNA, 16 nt, Human
aggcuaggguggggag

SEQ ID NO: 3039881 - RNA, 15 nt, Human
aggcuagggugggga

SEQ ID NO: 3039882 - RNA, 14 nt, Human
aggcuagggugggg

SEQ ID NO: 3039883 - RNA, 13 nt, Human
accggggccuggg

SEQ ID NO: 3039884 - RNA, 14 nt, Human
acccucaucuuucu

SEQ ID NO: 3039885 - RNA, 13 nt, Human
acccucaucuuuc

SEQ ID NO: 3039886 - RNA, 19 nt, Human
acccucaucuuucuuccaa

SEQ ID NO: 3039887 - RNA, 16 nt, Human
acccucaucuuucuuc

SEQ ID NO: 3039888 - RNA, 14 nt, Human
aacaggcucagagg

SEQ ID NO: 3039889 - RNA, 15 nt, Human
uuuguagugauuuuu

SEQ ID NO: 3039890 - RNA, 22 nt, Human
uuuguagugauuuuuaugccac

SEQ ID NO: 3039891 - RNA, 18 nt, Human
uuuguaagguuuuuguag

SEQ ID NO: 3039892 - RNA, 19 nt, Human
uuucccuuccuuccucucc

SEQ ID NO: 3039893 - RNA, 17 nt, Human
aucccaacacugccagc

SEQ ID NO: 3039894 - RNA, 16 nt, Human
aucccaacacugccag

SEQ ID NO: 3039895 - RNA, 15 nt, Human
aucccaacacugcca

SEQ ID NO: 3039896 - RNA, 11 nt, Human
aucccaacacu

SEQ ID NO: 3039897 - RNA, 12 nt, Human
uucugccaggag

SEQ ID NO: 3039898 - RNA, 17 nt, Human
uucuaguucugccagga

SEQ ID NO: 3039899 - RNA, 16 nt, Human
uuggacuugucccggg

SEQ ID NO: 3039900 - RNA, 16 nt, Human
uguggcauccagaguc

SEQ ID NO: 3039901 - RNA, 21 nt, Human
uguggcauccagagucccugc

SEQ ID NO: 3039902 - RNA, 19 nt, Human
uguggcauccagagucccu

SEQ ID NO: 3039903 - RNA, 14 nt, Human
ugugacucuuucca

SEQ ID NO: 3039904 - RNA, 12 nt, Human
ugugacucuuuc

SEQ ID NO: 3039905 - RNA, 17 nt, Human
ugugacucuuuccaacc

SEQ ID NO: 3039906 - RNA, 15 nt, Human
ugugacucuuuccaa

SEQ ID NO: 3039907 - RNA, 20 nt, Human
aguucugccaggagacaggu

SEQ ID NO: 3039908 - RNA, 14 nt, Human
aguucugccaggag

SEQ ID NO: 3039909 - RNA, 13 nt, Human
aguucugccagga

SEQ ID NO: 3039910 - RNA, 12 nt, Human
aguucugccagg

SEQ ID NO: 3039911 - RNA, 14 nt, Human
aguuuagggugggg

SEQ ID NO: 3039912 - RNA, 13 nt, Human
aguuuaggguggg

SEQ ID NO: 3039913 - RNA, 12 nt, Human
aguuuagggugg

SEQ ID NO: 3039914 - RNA, 21 nt, Human
aggguggggggggggcgcggc

SEQ ID NO: 3039915 - RNA, 13 nt, Human
uggggagagacgg

SEQ ID NO: 3039916 - RNA, 22 nt, Human
agggaaggaucccaugagcucc

SEQ ID NO: 3039917 - RNA, 15 nt, Human
agggaaggaucccau

SEQ ID NO: 3039918 - RNA, 23 nt, Human
agggaaggaucccaugagcuccu

SEQ ID NO: 3039919 - RNA, 19 nt, Human
agguuuuuguagugauuuu

SEQ ID NO: 3039920 - RNA, 22 nt, Human
ugccgagaguccaucagccucc

SEQ ID NO: 3039921 - RNA, 15 nt, Human
ugccuugucacgcca

SEQ ID NO: 3039922 - RNA, 16 nt, Human
agccucuccacucaug

SEQ ID NO: 3039923 - RNA, 23 nt, Human
agccccgcguggaacucgugucu

SEQ ID NO: 3039924 - RNA, 19 nt, Human
agacuucccacggcuccuc

SEQ ID NO: 3039925 - RNA, 13 nt, Human
ucuuucuuccaaa

SEQ ID NO: 3039926 - RNA, 18 nt, Human
agaucccaacacugccag

SEQ ID NO: 3039927 - RNA, 20 nt, Human
agaucccaacacugccagca

SEQ ID NO: 3039928 - RNA, 19 nt, Human
agaucccaacacugccagc

SEQ ID NO: 3039929 - RNA, 23 nt, Human
agaguccaucagccuccauccua

SEQ ID NO: 3039930 - RNA, 17 nt, Human
agagucccugccuggac

SEQ ID NO: 3039931 - RNA, 14 nt, Human
agagucccugccug

SEQ ID NO: 3039932 - RNA, 21 nt, Human
agaggccauucuuucccaaca

SEQ ID NO: 3039933 - RNA, 17 nt, Human
ucgagaucccaacacug

SEQ ID NO: 3039934 - RNA, 21 nt, Human
ucgagaucccaacacugccag

SEQ ID NO: 3039935 - RNA, 18 nt, Human
ucgagaucccaacacugc

SEQ ID NO: 3039936 - RNA, 20 nt, Human
ucugagagaggccauucuuu

SEQ ID NO: 3039937 - RNA, 14 nt, Human
ucugagagaggcca

SEQ ID NO: 3039938 - RNA, 23 nt, Human
acuugucccgggacaccuaggcu

SEQ ID NO: 3039939 - RNA, 21 nt, Human
uccacucaugugacucuuucc

SEQ ID NO: 3039940 - RNA, 14 nt, Human
uccacucaugugac

SEQ ID NO: 3039941 - RNA, 21 nt, Human
uccaaccggcuuuguggcacu

SEQ ID NO: 3039942 - RNA, 21 nt, Human
ucccgggacaccuaggcuagg

SEQ ID NO: 3039943 - RNA, 19 nt, Human
acucaugugacucuuucca

SEQ ID NO: 3039944 - RNA, 18 nt, Human
acucaugugacucuuucc

SEQ ID NO: 3039945 - RNA, 17 nt, Human
acaccccgacuuuuguu

SEQ ID NO: 3039946 - RNA, 14 nt, Human
gugguggcucggga

SEQ ID NO: 3039947 - RNA, 23 nt, Human
guggggggggggcgcggcuggga

SEQ ID NO: 3039948 - RNA, 14 nt, Human
guggcacuggggca

SEQ ID NO: 3039949 - RNA, 16 nt, Human
gucucccuccucugcc

SEQ ID NO: 3039950 - RNA, 12 nt, Human
gucucccuccuc

SEQ ID NO: 3039951 - RNA, 19 nt, Human
aacucgugucuggcacagc

SEQ ID NO: 3039952 - RNA, 22 nt, Human
aacacugccagcauuucccuuc

SEQ ID NO: 3039953 - RNA, 12 nt, Human
aacacugccagc

SEQ ID NO: 3039954 - RNA, 13 nt, Human
cugggcaggaggg

SEQ ID NO: 3039955 - RNA, 16 nt, Human
cugcaccggggccugg

SEQ ID NO: 3039956 - RNA, 14 nt, Human
cugcaccggggccu

SEQ ID NO: 3039957 - RNA, 19 nt, Human
cugcaccggggccugggca

SEQ ID NO: 3039958 - RNA, 18 nt, Human
cugcaccggggccugggc

SEQ ID NO: 3039959 - RNA, 15 nt, Human
gaaccgaggcaggga

SEQ ID NO: 3039960 - RNA, 12 nt, Human
gaaccgaggcag

SEQ ID NO: 3039961 - RNA, 14 nt, Human
gcaccggggccugg

SEQ ID NO: 3039962 - RNA, 16 nt, Human
gcaccggggccugggc

SEQ ID NO: 3039963 - RNA, 23 nt, Human
gaggugcuucuaguucugccagg

SEQ ID NO: 3039964 - RNA, 22 nt, Human
gaggugcuucuaguucugccag

SEQ ID NO: 3039965 - RNA, 17 nt, Human
gaguccaucagccucca

SEQ ID NO: 3039966 - RNA, 16 nt, Human
gagggcugccuuugga

SEQ ID NO: 3039967 - RNA, 9 nt, Human
gagggcugc

SEQ ID NO: 3039968 - RNA, 12 nt, Human
ggggccugggca

SEQ ID NO: 3039969 - RNA, 15 nt, Human
ggggccugggcagga

SEQ ID NO: 3039970 - RNA, 14 nt, Human
gggagggggagagg

SEQ ID NO: 3039971 - RNA, 20 nt, Human
ggcuccucgagaucccaaca

SEQ ID NO: 3039972 - RNA, 15 nt, Human
aaaaagggaggggga

SEQ ID NO: 3039973 - RNA, 17 nt, Human
ggagagacgggcccugg

SEQ ID NO: 3039974 - RNA, 15 nt, Human
ggagagacgggcccu

SEQ ID NO: 3039975 - RNA, 23 nt, Human
ggcaggcaucggggagccgggag

SEQ ID NO: 3039976 - RNA, 17 nt, Human
caccuaggcuagggugg

SEQ ID NO: 3039977 - RNA, 19 nt, Human
caccuaggcuagggugggg

SEQ ID NO: 3039978 - RNA, 18 nt, Human
caccuaggcuaggguggg

SEQ ID NO: 3039979 - RNA, 17 nt, Human
auuuuuaugccaccuga

SEQ ID NO: 3039980 - RNA, 18 nt, Human
ccagagaaaaagggaggg

SEQ ID NO: 3039981 - RNA, 23 nt, Human
ccagacuucccacggcuccucga

SEQ ID NO: 3039982 - RNA, 21 nt, Human
ccaugagcuccuuaaggcucu

SEQ ID NO: 3039983 - RNA, 22 nt, Human
cccccugugccuugucacgcca

SEQ ID NO: 3039984 - RNA, 21 nt, Human
ccccgcguggaacucgugucu

SEQ ID NO: 3039985 - RNA, 22 nt, Human
ccucugcccgggagcucaggaa

SEQ ID NO: 3039986 - RNA, 21 nt, Human
ccucugcccgggagcucagga

SEQ ID NO: 3039987 - RNA, 12 nt, Human
ccugccuggacc

SEQ ID NO: 3039988 - RNA, 19 nt, Human
ccugccuggaccagccucu

SEQ ID NO: 3039989 - RNA, 23 nt, Human
ccucuuggggaguuuaggguggg

SEQ ID NO: 3039990 - RNA, 22 nt, Human
ccucuuggggaguuuagggugg

SEQ ID NO: 3039991 - RNA, 14 nt, Human
cucaugugacucuu

SEQ ID NO: 3039992 - RNA, 16 nt, Human
cuccugucucccuccu

SEQ ID NO: 3039993 - RNA, 24 nt, Human
cuccucugcccgggagcucaggaa

SEQ ID NO: 3039994 - RNA, 22 nt, Human
cuccucugcccgggagcucagg

SEQ ID NO: 3039995 - RNA, 14 nt, Human
ugucacgccagacu

SEQ ID NO: 3039996 - RNA, 18 nt, Human
uggggcaggggccggggg

SEQ ID NO: 3039997 - RNA, 16 nt, Human
uggggcaggggccggg

SEQ ID NO: 3039998 - RNA, 20 nt, Human
ugcuucuaguucugccagga

SEQ ID NO: 3039999 - RNA, 19 nt, Human
ugcuucuaguucugccagg

SEQ ID NO: 3040000 - RNA, 18 nt, Human
ugcuucuaguucugccag

SEQ ID NO: 3040001 - RNA, 19 nt, Human
ucuuuuguaagguuuuugu

SEQ ID NO: 3040002 - RNA, 19 nt, Human
uccuuaaggcucuuuugua

SEQ ID NO: 3040003 - RNA, 16 nt, Human
uccuuaaggcucuuuu

SEQ ID NO: 3040004 - RNA, 18 nt, Human
ucacgccagacuucccac

SEQ ID NO: 3040005 - RNA, 13 nt, Human
uaggcuagggugg

SEQ ID NO: 3040006 - RNA, 22 nt, Human
uagugauuuuuaugccaccuga

SEQ ID NO: 3040007 - RNA, 21 nt, Human
uagugauuuuuaugccaccug

SEQ ID NO: 3040008 - RNA, 20 nt, Human
uagugauuuuuaugccaccu

SEQ ID NO: 3040009 - RNA, 15 nt, Human
gggggagagggcugc

SEQ ID NO: 3040010 - RNA, 17 nt, Human
gggccugggcaggaggg

SEQ ID NO: 3040011 - RNA, 16 nt, Human
gggccugggcaggagg

SEQ ID NO: 3040012 - RNA, 19 nt, Human
ggggcagucugagagaggc

SEQ ID NO: 3040013 - RNA, 15 nt, Human
ggggcagucugagag

SEQ ID NO: 3040014 - RNA, 18 nt, Human
ggggcagucugagagagg

SEQ ID NO: 3040015 - RNA, 16 nt, Human
ggggcgcggcugggag

SEQ ID NO: 3040016 - RNA, 15 nt, Human
ggggcgcggcuggga

SEQ ID NO: 3040017 - RNA, 21 nt, Human
gguguccugcaccggggccug

SEQ ID NO: 3040018 - RNA, 15 nt, Human
ggugguggcucggga

SEQ ID NO: 3040019 - RNA, 21 nt, Human
gggcagucugagagaggccau

SEQ ID NO: 3040020 - RNA, 20 nt, Human
gggcagucugagagaggcca

SEQ ID NO: 3040021 - RNA, 12 nt, Human
gggccugggcag

SEQ ID NO: 3040022 - RNA, 15 nt, Human
gggccugggcaggag

SEQ ID NO: 3040023 - RNA, 13 nt, Human
gggccugggcagg

SEQ ID NO: 3040024 - RNA, 16 nt, Human
gggaguuuaggguggg

SEQ ID NO: 3040025 - RNA, 23 nt, Human
gggaggugcuucuaguucugcca

SEQ ID NO: 3040026 - RNA, 17 nt, Human
gggcagucugagagagg

SEQ ID NO: 3040027 - RNA, 19 nt, Human
gggcagucugagagaggcc

SEQ ID NO: 3040028 - RNA, 18 nt, Human
gggcagucugagagaggc

SEQ ID NO: 3040029 - RNA, 15 nt, Human
gggaaggaucccaug

SEQ ID NO: 3040030 - RNA, 20 nt, Human
gcugccuuuggacuuguccc

SEQ ID NO: 3040031 - RNA, 15 nt, Human
gcugccuuuggacuu

SEQ ID NO: 3040032 - RNA, 23 nt, Human
gcugggacaccccgacuuuuguu

SEQ ID NO: 3040033 - RNA, 19 nt, Human
gcugggaggagggcaggca

SEQ ID NO: 3040034 - RNA, 17 nt, Human
gcugggaggagggcagg

SEQ ID NO: 3040035 - RNA, 17 nt, Human
ggaacucgugucuggca

SEQ ID NO: 3040036 - RNA, 20 nt, Human
ggaaccgaggcagggaagga

SEQ ID NO: 3040037 - RNA, 16 nt, Human
ggaaccgaggcaggga

SEQ ID NO: 3040038 - RNA, 15 nt, Human
ggaaccgaggcaggg

SEQ ID NO: 3040039 - RNA, 18 nt, Human
gcuucuaguucugccagg

SEQ ID NO: 3040040 - RNA, 21 nt, Human
gcuucuaguucugccaggaga

SEQ ID NO: 3040041 - RNA, 20 nt, Human
gcuucuaguucugccaggag

SEQ ID NO: 3040042 - RNA, 19 nt, Human
gcuucuaguucugccagga

SEQ ID NO: 3040043 - RNA, 20 nt, Human
ggaucccaugagcuccuuaa

SEQ ID NO: 3040044 - RNA, 17 nt, Human
ggaucccaugagcuccu

SEQ ID NO: 3040045 - RNA, 20 nt, Human
ggcagucugagagaggccau

SEQ ID NO: 3040046 - RNA, 13 nt, Human
ggagggcaggcau

SEQ ID NO: 3040047 - RNA, 16 nt, Human
ggagccgggagccuga

SEQ ID NO: 3040048 - RNA, 20 nt, Human
ggaggagggcaggcaucggg

SEQ ID NO: 3040049 - RNA, 15 nt, Human
ggaggagggcaggca

SEQ ID NO: 3040050 - RNA, 14 nt, Human
ggaggagggcaggc

SEQ ID NO: 3040051 - RNA, 17 nt, Human
ggaaggaucccaugagc

SEQ ID NO: 3040052 - RNA, 21 nt, Human
gccgagaguccaucagccucc

SEQ ID NO: 3040053 - RNA, 14 nt, Human
gccgggagccugac

SEQ ID NO: 3040054 - RNA, 13 nt, Human
gccgggagccuga

SEQ ID NO: 3040055 - RNA, 19 nt, Human
gccgggagccugacccuca

SEQ ID NO: 3040056 - RNA, 13 nt, Human
gccccgcguggaa

SEQ ID NO: 3040057 - RNA, 15 nt, Human
gcaggagggaggugc

SEQ ID NO: 3040058 - RNA, 19 nt, Human
gcacagccuggcuguggcc

SEQ ID NO: 3040059 - RNA, 12 nt, Human
gcacagccuggc

SEQ ID NO: 3040060 - RNA, 18 nt, Human
gacuucccacggcuccuc

SEQ ID NO: 3040061 - RNA, 19 nt, Human
gaagcguuguccucagccc

SEQ ID NO: 3040062 - RNA, 13 nt, Human
gaagcguuguccu

SEQ ID NO: 3040063 - RNA, 20 nt, Human
gaagcguuguccucagcccc

SEQ ID NO: 3040064 - RNA, 14 nt, Human
cuuccuuccucucc

SEQ ID NO: 3040065 - RNA, 19 nt, Human
cucuccacucaugugacuc

SEQ ID NO: 3040066 - RNA, 13 nt, Human
cuccuuaaggcuc

SEQ ID NO: 3040067 - RNA, 22 nt, Human
cuccuuaaggcucuuuuguaag

SEQ ID NO: 3040068 - RNA, 18 nt, Human
cugcccgggagcucagga

SEQ ID NO: 3040069 - RNA, 16 nt, Human
cugccaggagacaggu

SEQ ID NO: 3040070 - RNA, 20 nt, Human
cugccagcauuucccuuccu

SEQ ID NO: 3040071 - RNA, 14 nt, Human
cuggcacagccugg

SEQ ID NO: 3040072 - RNA, 12 nt, Human
cuggaccagccu

SEQ ID NO: 3040073 - RNA, 22 nt, Human
ccgacuuuuguuuaccagagaa

SEQ ID NO: 3040074 - RNA, 15 nt, Human
ccuccucugcccggg

SEQ ID NO: 3040075 - RNA, 14 nt, Human
ccuccucugcccgg

SEQ ID NO: 3040076 - RNA, 23 nt, Human
ccucuccacucaugugacucuuu

SEQ ID NO: 3040077 - RNA, 16 nt, Human
cgggagcucaggaacc

SEQ ID NO: 3040078 - RNA, 23 nt, Human
cggcugggaggagggcaggcauc

SEQ ID NO: 3040079 - RNA, 18 nt, Human
cggcugggaggagggcag

SEQ ID NO: 3040080 - RNA, 22 nt, Human
cggcugggaggagggcaggcau

SEQ ID NO: 3040081 - RNA, 19 nt, Human
cgucagcugggacaccccg

SEQ ID NO: 3040082 - RNA, 14 nt, Human
ccuggaccagccuc

SEQ ID NO: 3040083 - RNA, 16 nt, Human
ccuggaccagccucuc

SEQ ID NO: 3040084 - RNA, 15 nt, Human
ccuggaccagccucu

SEQ ID NO: 3040085 - RNA, 21 nt, Human
ccacgucagcugggacacccc

SEQ ID NO: 3040086 - RNA, 16 nt, Human
ccaaacaggcucagag

SEQ ID NO: 3040087 - RNA, 13 nt, Human
ccaacacugccag

SEQ ID NO: 3040088 - RNA, 16 nt, Human
ccaacacugccagcau

SEQ ID NO: 3040089 - RNA, 15 nt, Human
ccaacacugccagca

SEQ ID NO: 3040090 - RNA, 14 nt, Human
ccaacacugccagc

SEQ ID NO: 3040091 - RNA, 13 nt, Human
cccaacaccucuu

SEQ ID NO: 3040092 - RNA, 13 nt, Human
ccaucagccucca

SEQ ID NO: 3040093 - RNA, 22 nt, Human
cuccucugcccgggagcucagg

SEQ ID NO: 3040094 - RNA, 24 nt, Human
cuccucugcccgggagcucaggaa

SEQ ID NO: 3040095 - RNA, 16 nt, Human
cuccugucucccuccu

SEQ ID NO: 3040096 - RNA, 14 nt, Human
cuccucuuccaggc

SEQ ID NO: 3040097 - RNA, 14 nt, Human
cucaugugacucuu

SEQ ID NO: 3040098 - RNA, 19 nt, Human
cucccucuacugggagccu

SEQ ID NO: 3040099 - RNA, 13 nt, Human
cucccucuacugg

SEQ ID NO: 3040100 - RNA, 20 nt, Human
cucccucuacugggagccua

SEQ ID NO: 3040101 - RNA, 20 nt, Human
cucugcaggaaauggcugug

SEQ ID NO: 3040102 - RNA, 23 nt, Human
cucaggccgaaggaggagucagg

SEQ ID NO: 3040103 - RNA, 20 nt, Human
cucaggccugacucucagca

SEQ ID NO: 3040104 - RNA, 23 nt, Human
cucaugauagaaggcuaugggga

SEQ ID NO: 3040105 - RNA, 14 nt, Human
ccuugcauaauggu

SEQ ID NO: 3040106 - RNA, 23 nt, Human
cuaaaguaaaaacaaagaaauua

SEQ ID NO: 3040107 - RNA, 22 nt, Human
ccucuuggggaguuuagggugg

SEQ ID NO: 3040108 - RNA, 15 nt, Human
ccucuuggcugccuu

SEQ ID NO: 3040109 - RNA, 23 nt, Human
ccucuuggggaguuuaggguggg

SEQ ID NO: 3040110 - RNA, 14 nt, Human
ccugaguuccuagc

SEQ ID NO: 3040111 - RNA, 17 nt, Human
ccugcagagcugcgggc

SEQ ID NO: 3040112 - RNA, 14 nt, Human
ccugcagagcugcg

SEQ ID NO: 3040113 - RNA, 13 nt, Human
ccugcagagcugc

SEQ ID NO: 3040114 - RNA, 12 nt, Human
ccugcagagcug

SEQ ID NO: 3040115 - RNA, 19 nt, Human
ccugccuggaccagccucu

SEQ ID NO: 3040116 - RNA, 12 nt, Human
ccugccuggacc

SEQ ID NO: 3040117 - RNA, 20 nt, Human
ccugccucucugcagguccc

SEQ ID NO: 3040118 - RNA, 21 nt, Human
ccugccucucugcaggucccu

SEQ ID NO: 3040119 - RNA, 17 nt, Human
ccugccucucugcaggu

SEQ ID NO: 3040120 - RNA, 21 nt, Human
ccucugcccgggagcucagga

SEQ ID NO: 3040121 - RNA, 22 nt, Human
ccucugcccgggagcucaggaa

SEQ ID NO: 3040122 - RNA, 18 nt, Human
ccucucugcaggucccua

SEQ ID NO: 3040123 - RNA, 19 nt, Human
ccucucugcaggucccuaa

SEQ ID NO: 3040124 - RNA, 16 nt, Human
ccucucugcagguccc

SEQ ID NO: 3040125 - RNA, 17 nt, Human
ccucucugcaggucccu

SEQ ID NO: 3040126 - RNA, 23 nt, Human
ccgaaggugaggagcuugaaacc

SEQ ID NO: 3040127 - RNA, 18 nt, Human
cccugagaucucugcagg

SEQ ID NO: 3040128 - RNA, 14 nt, Human
cccugaaggaacca

SEQ ID NO: 3040129 - RNA, 21 nt, Human
ccccgcguggaacucgugucu

SEQ ID NO: 3040130 - RNA, 22 nt, Human
cccccugugccuugucacgcca

SEQ ID NO: 3040131 - RNA, 22 nt, Human
cccagcuggggccaggcugggu

SEQ ID NO: 3040132 - RNA, 23 nt, Human
cccagcuggggccaggcuggguc

SEQ ID NO: 3040133 - RNA, 20 nt, Human
cccagcuggggccaggcugg

SEQ ID NO: 3040134 - RNA, 21 nt, Human
ccaugagcuccuuaaggcucu

SEQ ID NO: 3040135 - RNA, 23 nt, Human
cccacuguacuugcucuugaugc

SEQ ID NO: 3040136 - RNA, 18 nt, Human
cccacuguacuugcucuu

SEQ ID NO: 3040137 - RNA, 19 nt, Human
cccacuguacuugcucuug

SEQ ID NO: 3040138 - RNA, 13 nt, Human
ccauugguguuga

SEQ ID NO: 3040139 - RNA, 23 nt, Human
ccagacuucccacggcuccucga

SEQ ID NO: 3040140 - RNA, 18 nt, Human
ccagagaaaaagggaggg

SEQ ID NO: 3040141 - RNA, 18 nt, Human
ccagacuccaccaagccu

SEQ ID NO: 3040142 - RNA, 14 nt, Human
ccagacuccaccaa

SEQ ID NO: 3040143 - RNA, 17 nt, Human
auuuuuaugccaccuga

SEQ ID NO: 3040144 - RNA, 15 nt, Human
auuuuuuucugaauu

SEQ ID NO: 3040145 - RNA, 19 nt, Human
auuuucuauaauuuaaaua

SEQ ID NO: 3040146 - RNA, 18 nt, Human
auuuucuauaauuuaaau

SEQ ID NO: 3040147 - RNA, 17 nt, Human
auuuucuauaauuuaaa

SEQ ID NO: 3040148 - RNA, 13 nt, Human
auuuugaaaaacu

SEQ ID NO: 3040149 - RNA, 15 nt, Human
auuuugaaaaacugc

SEQ ID NO: 3040150 - RNA, 19 nt, Human
auuuguucuauagcuuuuc

SEQ ID NO: 3040151 - RNA, 16 nt, Human
auuucagcagcugcag

SEQ ID NO: 3040152 - RNA, 15 nt, Human
auugauaaguucaua

SEQ ID NO: 3040153 - RNA, 12 nt, Human
auugauaaguuc

SEQ ID NO: 3040154 - RNA, 19 nt, Human
auugauaaguucauacauu

SEQ ID NO: 3040155 - RNA, 18 nt, Human
auugauaaguucauacau

SEQ ID NO: 3040156 - RNA, 17 nt, Human
auugauaaguucauaca

SEQ ID NO: 3040157 - RNA, 16 nt, Human
auugauaaguucauac

SEQ ID NO: 3040158 - RNA, 21 nt, Human
auugauaaguucauacauugu

SEQ ID NO: 3040159 - RNA, 21 nt, Human
auuaacaugaauauuuagugu

SEQ ID NO: 3040160 - RNA, 20 nt, Human
auuaaauuuugaguucuaca

SEQ ID NO: 3040161 - RNA, 17 nt, Human
auucauggccuggggga

SEQ ID NO: 3040162 - RNA, 13 nt, Human
auuaugugccaga

SEQ ID NO: 3040163 - RNA, 21 nt, Human
auuaugugccagauuuaugca

SEQ ID NO: 3040164 - RNA, 18 nt, Human
caccuaggcuaggguggg

SEQ ID NO: 3040165 - RNA, 19 nt, Human
caccuaggcuagggugggg

SEQ ID NO: 3040166 - RNA, 17 nt, Human
caccuaggcuagggugg

SEQ ID NO: 3040167 - RNA, 15 nt, Human
caagcaaaugugaau

SEQ ID NO: 3040168 - RNA, 17 nt, Human
caagcaaaugugaauca

SEQ ID NO: 3040169 - RNA, 19 nt, Human
caagcaaaugugaaucauu

SEQ ID NO: 3040170 - RNA, 15 nt, Human
caacuauuuuuccaa

SEQ ID NO: 3040171 - RNA, 14 nt, Human
caacuauggccugu

SEQ ID NO: 3040172 - RNA, 13 nt, Human
caacuauggccug

SEQ ID NO: 3040173 - RNA, 18 nt, Human
cagccaggccacuggccc

SEQ ID NO: 3040174 - RNA, 17 nt, Human
cagcacguguggccugu

SEQ ID NO: 3040175 - RNA, 13 nt, Human
cagauuuaugcau

SEQ ID NO: 3040176 - RNA, 20 nt, Human
cauuggauucugagagcugu

SEQ ID NO: 3040177 - RNA, 15 nt, Human
cauuggauucugaga

SEQ ID NO: 3040178 - RNA, 16 nt, Human
cauuggagauguuuag

SEQ ID NO: 3040179 - RNA, 16 nt, Human
ccaacuauggccugug

SEQ ID NO: 3040180 - RNA, 14 nt, Human
ccaacuauggccug

SEQ ID NO: 3040181 - RNA, 15 nt, Human
ccaacuauggccugu

SEQ ID NO: 3040182 - RNA, 22 nt, Human
ccaauuauaugagacguuuuug

SEQ ID NO: 3040183 - RNA, 19 nt, Human
ccaauucgaacuuuuucca

SEQ ID NO: 3040184 - RNA, 16 nt, Human
caugaauuugugaagg

SEQ ID NO: 3040185 - RNA, 21 nt, Human
caugaauauuuaguguucaua

SEQ ID NO: 3040186 - RNA, 21 nt, Human
caguuauuauauuuacaaaug

SEQ ID NO: 3040187 - RNA, 17 nt, Human
caguuauuauauuuaca

SEQ ID NO: 3040188 - RNA, 14 nt, Human
caguucagcuuggg

SEQ ID NO: 3040189 - RNA, 15 nt, Human
caguucagcuugggg

SEQ ID NO: 3040190 - RNA, 22 nt, Human
caguuauuauauuuacaaaugg

SEQ ID NO: 3040191 - RNA, 17 nt, Human
caucuguaccucugccu

SEQ ID NO: 3040192 - RNA, 21 nt, Human
cauauuauuuuauguugcaua

SEQ ID NO: 3040193 - RNA, 16 nt, Human
cauacagggauggugu

SEQ ID NO: 3040194 - RNA, 19 nt, Human
cauacagggaugguguuca

SEQ ID NO: 3040195 - RNA, 18 nt, Human
cauaauuauuauuuggcc

SEQ ID NO: 3040196 - RNA, 23 nt, Human
caguuguucaauaauaaauauuu

SEQ ID NO: 3040197 - RNA, 23 nt, Human
ggcaggcaucggggagccgggag

SEQ ID NO: 3040198 - RNA, 15 nt, Human
ggaugguguucaaaa

SEQ ID NO: 3040199 - RNA, 13 nt, Human
ggaugucugggcc

SEQ ID NO: 3040200 - RNA, 18 nt, Human
ggccagcaccaucucuuu

SEQ ID NO: 3040201 - RNA, 15 nt, Human
ggagagacgggcccu

SEQ ID NO: 3040202 - RNA, 17 nt, Human
ggagagacgggcccugg

SEQ ID NO: 3040203 - RNA, 23 nt, Human
ggacugugugcucaggagcccug

SEQ ID NO: 3040204 - RNA, 22 nt, Human
ggacugugugcucaggagcccu

SEQ ID NO: 3040205 - RNA, 18 nt, Human
ggagaaaugaaaaaauau

SEQ ID NO: 3040206 - RNA, 16 nt, Human
ggacuuggagguagcu

SEQ ID NO: 3040207 - RNA, 18 nt, Human
ggaccccuggugguucac

SEQ ID NO: 3040208 - RNA, 15 nt, Human
ggagcccacuguacu

SEQ ID NO: 3040209 - RNA, 18 nt, Human
ggagcccacuguacuugc

SEQ ID NO: 3040210 - RNA, 17 nt, Human
ggaggcucuggagccca

SEQ ID NO: 3040211 - RNA, 20 nt, Human
ggaggcucuggagcccacug

SEQ ID NO: 3040212 - RNA, 21 nt, Human
ggaggcucuggagcccacugu

SEQ ID NO: 3040213 - RNA, 15 nt, Human
ggaggcucuggagcc

SEQ ID NO: 3040214 - RNA, 15 nt, Human
aaaaagggaggggga

SEQ ID NO: 3040215 - RNA, 20 nt, Human
ggcuccucgagaucccaaca

SEQ ID NO: 3040216 - RNA, 17 nt, Human
ggcuggaucugugaggg

SEQ ID NO: 3040217 - RNA, 14 nt, Human
gggagggggagagg

SEQ ID NO: 3040218 - RNA, 16 nt, Human
aaaagggacugagaaa

SEQ ID NO: 3040219 - RNA, 18 nt, Human
aaaauauauaucaaauau

SEQ ID NO: 3040220 - RNA, 14 nt, Human
aaaauauauuuaau

SEQ ID NO: 3040221 - RNA, 19 nt, Human
aaaagccugcaauuucaua

SEQ ID NO: 3040222 - RNA, 16 nt, Human
aaaagccuguuuaaga

SEQ ID NO: 3040223 - RNA, 18 nt, Human
aaaagccuguuuaagaga

SEQ ID NO: 3040224 - RNA, 22 nt, Human
aaaagcuccauuuuuagugaaa

SEQ ID NO: 3040225 - RNA, 19 nt, Human
aaaacugcucauaugaugu

SEQ ID NO: 3040226 - RNA, 15 nt, Human
ggggccugggcagga

SEQ ID NO: 3040227 - RNA, 12 nt, Human
ggggccugggca

SEQ ID NO: 3040228 - RNA, 23 nt, Human
ggggucuguguguuuaugugugu

SEQ ID NO: 3040229 - RNA, 19 nt, Human
aaacauguuucuuuguaau

SEQ ID NO: 3040230 - RNA, 22 nt, Human
aaacauguuucuuuguaaugaa

SEQ ID NO: 3040231 - RNA, 23 nt, Human
aaacauguuucuuuguaaugaaa

SEQ ID NO: 3040232 - RNA, 14 nt, Human
aaaccaccagaagc

SEQ ID NO: 3040233 - RNA, 21 nt, Human
aaaccacauuggagauguuua

SEQ ID NO: 3040234 - RNA, 21 nt, Human
aaaauauuauguguuuccaua

SEQ ID NO: 3040235 - RNA, 14 nt, Human
aaaauauuaugugu

SEQ ID NO: 3040236 - RNA, 15 nt, Human
aaaauauuauguguu

SEQ ID NO: 3040237 - RNA, 19 nt, Human
aaaauuuuuaaucuuuaau

SEQ ID NO: 3040238 - RNA, 16 nt, Human
aaaauugugauguguc

SEQ ID NO: 3040239 - RNA, 15 nt, Human
aaaauuuuuaaucuu

SEQ ID NO: 3040240 - RNA, 16 nt, Human
aaaauuuuuaaucuuu

SEQ ID NO: 3040241 - RNA, 19 nt, Human
aaacaacuucaauauccaa

SEQ ID NO: 3040242 - RNA, 13 nt, Human
aaacaaagaaauu

SEQ ID NO: 3040243 - RNA, 16 nt, Human
ggggccaggcuggguc

SEQ ID NO: 3040244 - RNA, 13 nt, Human
ggggccaggcugg

SEQ ID NO: 3040245 - RNA, 14 nt, Human
ggggccaggcuggg

SEQ ID NO: 3040246 - RNA, 14 nt, Human
aaagaugcaaugua

SEQ ID NO: 3040247 - RNA, 14 nt, Human
aaagauuuucagaa

SEQ ID NO: 3040248 - RNA, 15 nt, Human
aaagauuuucagaaa

SEQ ID NO: 3040249 - RNA, 18 nt, Human
ggucauauuaauauauuu

SEQ ID NO: 3040250 - RNA, 21 nt, Human
ggucauauuaauauauuucca

SEQ ID NO: 3040251 - RNA, 21 nt, Human
ggucuugguuccagccugcca

SEQ ID NO: 3040252 - RNA, 20 nt, Human
ggucuugguuccagccugcc

SEQ ID NO: 3040253 - RNA, 21 nt, Human
aaagauuuucagaaaauauua

SEQ ID NO: 3040254 - RNA, 14 nt, Human
aaagcgaauuuuaa

SEQ ID NO: 3040255 - RNA, 13 nt, Human
aaaggaauuuaaa

SEQ ID NO: 3040256 - RNA, 17 nt, Human
gccuacccacccccagg

SEQ ID NO: 3040257 - RNA, 16 nt, Human
gccuacccacccccag

SEQ ID NO: 3040258 - RNA, 16 nt, Human
gccauaugaaaaggcu

SEQ ID NO: 3040259 - RNA, 19 nt, Human
gccaggccacuggccccug

SEQ ID NO: 3040260 - RNA, 17 nt, Human
gccagacccccuggaga

SEQ ID NO: 3040261 - RNA, 16 nt, Human
gccaccgccuccuaca

SEQ ID NO: 3040262 - RNA, 21 nt, Human
gccacuguuuugaaucucaua

SEQ ID NO: 3040263 - RNA, 12 nt, Human
gcugggucgccc

SEQ ID NO: 3040264 - RNA, 16 nt, Human
gcugggucgcccugga

SEQ ID NO: 3040265 - RNA, 17 nt, Human
gcugggucgcccuggac

SEQ ID NO: 3040266 - RNA, 18 nt, Human
gcugggucgcccuggacu

SEQ ID NO: 3040267 - RNA, 19 nt, Human
gcugggucgcccuggacug

SEQ ID NO: 3040268 - RNA, 19 nt, Human
gcuugaaacccguggcgcu

SEQ ID NO: 3040269 - RNA, 22 nt, Human
gcuuccuucugugaaaguacau

SEQ ID NO: 3040270 - RNA, 14 nt, Human
gcucaggagcccug

SEQ ID NO: 3040271 - RNA, 15 nt, Human
gcucaggagcccugg

SEQ ID NO: 3040272 - RNA, 18 nt, Human
gcucaggagcccugggag

SEQ ID NO: 3040273 - RNA, 19 nt, Human
gcuauggggauagaugugu

SEQ ID NO: 3040274 - RNA, 21 nt, Human
gcuauggggauagaugugugg

SEQ ID NO: 3040275 - RNA, 23 nt, Human
gcucuggagcccacuguacuugc

SEQ ID NO: 3040276 - RNA, 9 nt, Human
gagggcugc

SEQ ID NO: 3040277 - RNA, 16 nt, Human
gagggcugccuuugga

SEQ ID NO: 3040278 - RNA, 18 nt, Human
gaggcugcagccaggcca

SEQ ID NO: 3040279 - RNA, 18 nt, Human
gaggcuacuguaaggcaa

SEQ ID NO: 3040280 - RNA, 12 nt, Human
gaggcagguccc

SEQ ID NO: 3040281 - RNA, 16 nt, Human
gaggcagguccccaga

SEQ ID NO: 3040282 - RNA, 13 nt, Human
gaggcaggucccc

SEQ ID NO: 3040283 - RNA, 17 nt, Human
gaguccaucagccucca

SEQ ID NO: 3040284 - RNA, 18 nt, Human
gagucagggagagcugaa

SEQ ID NO: 3040285 - RNA, 22 nt, Human
gaggugcuucuaguucugccag

SEQ ID NO: 3040286 - RNA, 23 nt, Human
gaggugcuucuaguucugccagg

SEQ ID NO: 3040287 - RNA, 20 nt, Human
gagguggaagagggcugcaa

SEQ ID NO: 3040288 - RNA, 17 nt, Human
gagguggaagagggcug

SEQ ID NO: 3040289 - RNA, 16 nt, Human
gcaccggggccugggc

SEQ ID NO: 3040290 - RNA, 14 nt, Human
gcaccggggccugg

SEQ ID NO: 3040291 - RNA, 18 nt, Human
gcaagucagaauagaaau

SEQ ID NO: 3040292 - RNA, 14 nt, Human
gauuauauuaugaa

SEQ ID NO: 3040293 - RNA, 14 nt, Human
gauucugagagcug

SEQ ID NO: 3040294 - RNA, 14 nt, Human
gaugguucuagcau

SEQ ID NO: 3040295 - RNA, 12 nt, Human
gaaccgaggcag

SEQ ID NO: 3040296 - RNA, 15 nt, Human
gaaccgaggcaggga

SEQ ID NO: 3040297 - RNA, 20 nt, Human
gaacugcugggcuuggcagc

SEQ ID NO: 3040298 - RNA, 17 nt, Human
gaacugcugggcuuggc

SEQ ID NO: 3040299 - RNA, 20 nt, Human
gaagcaaugcuucaucccuu

SEQ ID NO: 3040300 - RNA, 20 nt, Human
gaagcuaucguaaaauuaag

SEQ ID NO: 3040301 - RNA, 20 nt, Human
gaauauguuucaaacuuugg

SEQ ID NO: 3040302 - RNA, 15 nt, Human
gaauauguuucaaac

SEQ ID NO: 3040303 - RNA, 14 nt, Human
gaauauguuucaaa

SEQ ID NO: 3040304 - RNA, 24 nt, Human
gaagugugggucugugugugugua

SEQ ID NO: 3040305 - RNA, 21 nt, Human
gaagugugggucugugugugu

SEQ ID NO: 3040306 - RNA, 22 nt, Human
gacugugugcucaggagcccug

SEQ ID NO: 3040307 - RNA, 14 nt, Human
gacagugaaagaaa

SEQ ID NO: 3040308 - RNA, 18 nt, Human
cugcaccggggccugggc

SEQ ID NO: 3040309 - RNA, 19 nt, Human
cugcaccggggccugggca

SEQ ID NO: 3040310 - RNA, 14 nt, Human
cugcaccggggccu

SEQ ID NO: 3040311 - RNA, 16 nt, Human
cugcaccggggccugg

SEQ ID NO: 3040312 - RNA, 19 nt, Human
cugcaaauccuugugggaa

SEQ ID NO: 3040313 - RNA, 16 nt, Human
cugcaaauccuugugg

SEQ ID NO: 3040314 - RNA, 17 nt, Human
cugcaggaaauggcugu

SEQ ID NO: 3040315 - RNA, 13 nt, Human
cugggcaggaggg

SEQ ID NO: 3040316 - RNA, 17 nt, Human
cugggagaaaugaaaaa

SEQ ID NO: 3040317 - RNA, 16 nt, Human
cugggagaaaugaaaa

SEQ ID NO: 3040318 - RNA, 13 nt, Human
cuggcccugugcc

SEQ ID NO: 3040319 - RNA, 14 nt, Human
cuggaucugugagg

SEQ ID NO: 3040320 - RNA, 23 nt, Human
cuggacugugugcucaggagccc

SEQ ID NO: 3040321 - RNA, 19 nt, Human
cuggacugugugcucagga

SEQ ID NO: 3040322 - RNA, 22 nt, Human
cuggacugugugcucaggagcc

SEQ ID NO: 3040323 - RNA, 22 nt, Human
cuugacaaagucaagccacaug

SEQ ID NO: 3040324 - RNA, 14 nt, Human
cuuugagguggaag

SEQ ID NO: 3040325 - RNA, 17 nt, Human
cuuugagguggaagagg

SEQ ID NO: 3040326 - RNA, 16 nt, Human
cuuugagguggaagag

SEQ ID NO: 3040327 - RNA, 22 nt, Human
cuuugagguggaagagggcugc

SEQ ID NO: 3040328 - RNA, 12 nt, Human
cuucaucugacu

SEQ ID NO: 3040329 - RNA, 18 nt, Human
cuucaucugacuaugaca

SEQ ID NO: 3040330 - RNA, 12 nt, Human
aacacugccagc

SEQ ID NO: 3040331 - RNA, 22 nt, Human
aacacugccagcauuucccuuc

SEQ ID NO: 3040332 - RNA, 21 nt, Human
aacaagccuccuuuuaaagua

SEQ ID NO: 3040333 - RNA, 23 nt, Human
aaauuuuuaaucuuuaauuuuac

SEQ ID NO: 3040334 - RNA, 18 nt, Human
aacaaugaagauaaaaag

SEQ ID NO: 3040335 - RNA, 14 nt, Human
aacaaugaagauaa

SEQ ID NO: 3040336 - RNA, 20 nt, Human
aacauuuguucuauagcuuu

SEQ ID NO: 3040337 - RNA, 19 nt, Human
aacucgugucuggcacagc

SEQ ID NO: 3040338 - RNA, 14 nt, Human
gucuggcugcagag

SEQ ID NO: 3040339 - RNA, 13 nt, Human
gucuggcugcaga

SEQ ID NO: 3040340 - RNA, 12 nt, Human
gucuggcugcag

SEQ ID NO: 3040341 - RNA, 12 nt, Human
gucucccuccuc

SEQ ID NO: 3040342 - RNA, 16 nt, Human
gucucccuccucugcc

SEQ ID NO: 3040343 - RNA, 19 nt, Human
aaccaaagcgaauuuuaaa

SEQ ID NO: 3040344 - RNA, 17 nt, Human
aaccucaaaaugucuaa

SEQ ID NO: 3040345 - RNA, 15 nt, Human
guauguggaagugug

SEQ ID NO: 3040346 - RNA, 17 nt, Human
guauguggaaguguggg

SEQ ID NO: 3040347 - RNA, 16 nt, Human
guauguggaagugugg

SEQ ID NO: 3040348 - RNA, 20 nt, Human
guaugugggggucugugugu

SEQ ID NO: 3040349 - RNA, 19 nt, Human
guaugugggggucugugug

SEQ ID NO: 3040350 - RNA, 21 nt, Human
guauguggaagugugggucug

SEQ ID NO: 3040351 - RNA, 18 nt, Human
guauguggaagugugggu

SEQ ID NO: 3040352 - RNA, 17 nt, Human
guauaaaagccuguuua

SEQ ID NO: 3040353 - RNA, 22 nt, Human
guauauugauccagaaagaaaa

SEQ ID NO: 3040354 - RNA, 18 nt, Human
guauaaaagccuguuuaa

SEQ ID NO: 3040355 - RNA, 21 nt, Human
guauaaaagccuguuuaagag

SEQ ID NO: 3040356 - RNA, 16 nt, Human
guauuuaauucauguu

SEQ ID NO: 3040357 - RNA, 22 nt, Human
aaauuauuuuguucauacauau

SEQ ID NO: 3040358 - RNA, 21 nt, Human
aaauuauuuuguucauacaua

SEQ ID NO: 3040359 - RNA, 20 nt, Human
aaauuauuuuguucauacau

SEQ ID NO: 3040360 - RNA, 18 nt, Human
aaauuauauaaguauucu

SEQ ID NO: 3040361 - RNA, 16 nt, Human
aaauuauauaaguauu

SEQ ID NO: 3040362 - RNA, 22 nt, Human
aaauuauauaaguauucuaaau

SEQ ID NO: 3040363 - RNA, 19 nt, Human
aaauuauuuuguucauaca

SEQ ID NO: 3040364 - RNA, 17 nt, Human
aaauuauuuuguucaua

SEQ ID NO: 3040365 - RNA, 20 nt, Human
guauuuuugacagaauaugu

SEQ ID NO: 3040366 - RNA, 18 nt, Human
aaauuucagcagcugcag

SEQ ID NO: 3040367 - RNA, 17 nt, Human
aaauuucagcagcugca

SEQ ID NO: 3040368 - RNA, 14 nt, Human
aaaugaaaaaauau

SEQ ID NO: 3040369 - RNA, 16 nt, Human
aaaucuaugauuccag

SEQ ID NO: 3040370 - RNA, 14 nt, Human
aaaucuaugauucc

SEQ ID NO: 3040371 - RNA, 16 nt, Human
guaggaacugcugggc

SEQ ID NO: 3040372 - RNA, 13 nt, Human
guaggauuacuag

SEQ ID NO: 3040373 - RNA, 9 nt, Human
aaaugaggg

SEQ ID NO: 3040374 - RNA, 16 nt, Human
aaaugagaaaucuaaa

SEQ ID NO: 3040375 - RNA, 13 nt, Human
aaaugagaaaucu

SEQ ID NO: 3040376 - RNA, 14 nt, Human
aaaugagaaaucua

SEQ ID NO: 3040377 - RNA, 11 nt, Human
aaaugagaaau

SEQ ID NO: 3040378 - RNA, 14 nt, Human
aaaugcauuucuaa

SEQ ID NO: 3040379 - RNA, 13 nt, Human
aaaugcauguugc

SEQ ID NO: 3040380 - RNA, 14 nt, Human
guggcacuggggca

SEQ ID NO: 3040381 - RNA, 20 nt, Human
aagaauugucuuucugucuc

SEQ ID NO: 3040382 - RNA, 19 nt, Human
guggaauuauuuuaaaaga

SEQ ID NO: 3040383 - RNA, 15 nt, Human
guggaauuauuuuaa

SEQ ID NO: 3040384 - RNA, 18 nt, Human
guggaauuauuuuaaaag

SEQ ID NO: 3040385 - RNA, 16 nt, Human
guggaauuauuuuaaa

SEQ ID NO: 3040386 - RNA, 22 nt, Human
guggaagugugggucugugugu

SEQ ID NO: 3040387 - RNA, 21 nt, Human
guggaagugugggucugugug

SEQ ID NO: 3040388 - RNA, 20 nt, Human
guggaagugugggucugugu

SEQ ID NO: 3040389 - RNA, 19 nt, Human
guggaagugugggucugug

SEQ ID NO: 3040390 - RNA, 15 nt, Human
guggaaguguggguc

SEQ ID NO: 3040391 - RNA, 14 nt, Human
guggaagugugggu

SEQ ID NO: 3040392 - RNA, 23 nt, Human
gugcuauuguagagccagagguc

SEQ ID NO: 3040393 - RNA, 15 nt, Human
gugcucaggagcccu

SEQ ID NO: 3040394 - RNA, 13 nt, Human
aagaaauauaccu

SEQ ID NO: 3040395 - RNA, 15 nt, Human
aacuuguauuaugug

SEQ ID NO: 3040396 - RNA, 16 nt, Human
aacuuguauuaugugu

SEQ ID NO: 3040397 - RNA, 23 nt, Human
guggggggggggcgcggcuggga

SEQ ID NO: 3040398 - RNA, 16 nt, Human
guggggggcuucauac

SEQ ID NO: 3040399 - RNA, 15 nt, Human
guggggggcuucaua

SEQ ID NO: 3040400 - RNA, 14 nt, Human
gugguggcucggga

SEQ ID NO: 3040401 - RNA, 16 nt, Human
gugggucugugugugu

SEQ ID NO: 3040402 - RNA, 13 nt, Human
gugggucugugug

SEQ ID NO: 3040403 - RNA, 14 nt, Human
gugggaguguguaa

SEQ ID NO: 3040404 - RNA, 13 nt, Human
gugggagugugua

SEQ ID NO: 3040405 - RNA, 14 nt, Human
guguguaauuuaaa

SEQ ID NO: 3040406 - RNA, 17 nt, Human
gugucuuuccacuccuc

SEQ ID NO: 3040407 - RNA, 18 nt, Human
guguuuccauauuuuaua

SEQ ID NO: 3040408 - RNA, 15 nt, Human
guguuguguguggga

SEQ ID NO: 3040409 - RNA, 12 nt, Human
guguguaugugg

SEQ ID NO: 3040410 - RNA, 14 nt, Human
guuaaguaugugua

SEQ ID NO: 3040411 - RNA, 18 nt, Human
guguuuuaaaaugagaaa

SEQ ID NO: 3040412 - RNA, 15 nt, Human
aagccuggucagccc

SEQ ID NO: 3040413 - RNA, 14 nt, Human
guucauacauugua

SEQ ID NO: 3040414 - RNA, 11 nt, Human
guucauacauu

SEQ ID NO: 3040415 - RNA, 15 nt, Human
aagccucgacacaga

SEQ ID NO: 3040416 - RNA, 9 nt, Human
guucauaca

SEQ ID NO: 3040417 - RNA, 23 nt, Human
guucauacauauuuuuguagcac

SEQ ID NO: 3040418 - RNA, 14 nt, Human
guucauacauauuu

SEQ ID NO: 3040419 - RNA, 13 nt, Human
guucauacauauu

SEQ ID NO: 3040420 - RNA, 10 nt, Human
guucauacau

SEQ ID NO: 3040421 - RNA, 18 nt, Human
guucuagcauggcauauu

SEQ ID NO: 3040422 - RNA, 17 nt, Human
aagcuaucguaaaauua

SEQ ID NO: 3040423 - RNA, 21 nt, Human
aagggguaggauuacuaggug

SEQ ID NO: 3040424 - RNA, 13 nt, Human
aaguaaaaacaaa

SEQ ID NO: 3040425 - RNA, 20 nt, Human
aaguaaaaacaaagaaauua

SEQ ID NO: 3040426 - RNA, 16 nt, Human
guuugggaccccuggu

SEQ ID NO: 3040427 - RNA, 22 nt, Human
guuugggaccccuggugguuca

SEQ ID NO: 3040428 - RNA, 19 nt, Human
guuugcaucugaaaauuga

SEQ ID NO: 3040429 - RNA, 16 nt, Human
guuuucuuaacuuaaa

SEQ ID NO: 3040430 - RNA, 20 nt, Human
guuuucuuaaccagaucauu

SEQ ID NO: 3040431 - RNA, 23 nt, Human
aaggcuauggggauagaugugug

SEQ ID NO: 3040432 - RNA, 18 nt, Human
guuguaucagcacgugug

SEQ ID NO: 3040433 - RNA, 16 nt, Human
guuuaugugugugugu

SEQ ID NO: 3040434 - RNA, 13 nt, Human
guuuaugugugug

SEQ ID NO: 3040435 - RNA, 17 nt, Human
acaccccgacuuuuguu

SEQ ID NO: 3040436 - RNA, 20 nt, Human
uauaaaaauaaaaaacacug

SEQ ID NO: 3040437 - RNA, 21 nt, Human
uauaaaaauaaaaaacacugg

SEQ ID NO: 3040438 - RNA, 18 nt, Human
acacaacuauuuuuccaa

SEQ ID NO: 3040439 - RNA, 14 nt, Human
uaguaauagagcaa

SEQ ID NO: 3040440 - RNA, 20 nt, Human
uaguaauagagcaaaauuga

SEQ ID NO: 3040441 - RNA, 13 nt, Human
uaguguucauaaa

SEQ ID NO: 3040442 - RNA, 14 nt, Human
acagauaaucagug

SEQ ID NO: 3040443 - RNA, 16 nt, Human
uaucuuguagcuuuau

SEQ ID NO: 3040444 - RNA, 12 nt, Human
uauauuuacaaa

SEQ ID NO: 3040445 - RNA, 15 nt, Human
uauauuuaaugauaa

SEQ ID NO: 3040446 - RNA, 16 nt, Human
acacucacccaacaau

SEQ ID NO: 3040447 - RNA, 16 nt, Human
uauaaguauucuaaau

SEQ ID NO: 3040448 - RNA, 17 nt, Human
acaagaugguucuagca

SEQ ID NO: 3040449 - RNA, 18 nt, Human
acaaauucugucucugga

SEQ ID NO: 3040450 - RNA, 21 nt, Human
acaaauucugucucuggauua

SEQ ID NO: 3040451 - RNA, 16 nt, Human
uagcuacuaauuuuaa

SEQ ID NO: 3040452 - RNA, 18 nt, Human
acaaugaagauaaaaaga

SEQ ID NO: 3040453 - RNA, 22 nt, Human
uagauaggucagugcaaauacu

SEQ ID NO: 3040454 - RNA, 22 nt, Human
aauuuuuaaucuuuaauuuuac

SEQ ID NO: 3040455 - RNA, 15 nt, Human
uacuugaaaauuaac

SEQ ID NO: 3040456 - RNA, 17 nt, Human
aauuuauacaggucaua

SEQ ID NO: 3040457 - RNA, 16 nt, Human
aauuuauacaggucau

SEQ ID NO: 3040458 - RNA, 22 nt, Human
aauuuauaaacuuuuuucuuac

SEQ ID NO: 3040459 - RNA, 18 nt, Human
uacuagggaaaugccuuu

SEQ ID NO: 3040460 - RNA, 16 nt, Human
uacugggagccuaccc

SEQ ID NO: 3040461 - RNA, 19 nt, Human
uacuguacagacagaaaaa

SEQ ID NO: 3040462 - RNA, 23 nt, Human
uacuguacagacagaaaaaacug

SEQ ID NO: 3040463 - RNA, 22 nt, Human
uaaagguucaugcaaacuuuau

SEQ ID NO: 3040464 - RNA, 19 nt, Human
uaaaguaaaaacaaagaaa

SEQ ID NO: 3040465 - RNA, 21 nt, Human
uaaaguaaaaacaaagaaauu

SEQ ID NO: 3040466 - RNA, 22 nt, Human
uaaaguaaaaacaaagaaauua

SEQ ID NO: 3040467 - RNA, 13 nt, Human
aauaacugugaag

SEQ ID NO: 3040468 - RNA, 21 nt, Human
aauaacaaugaaaguugauaa

SEQ ID NO: 3040469 - RNA, 12 nt, Human
uaaauaaaguuu

SEQ ID NO: 3040470 - RNA, 21 nt, Human
uaaauaaaguuuguugaaaca

SEQ ID NO: 3040471 - RNA, 21 nt, Human
aauaauuuuaagaaaucaaag

SEQ ID NO: 3040472 - RNA, 20 nt, Human
aauaacugugaaguuuacau

SEQ ID NO: 3040473 - RNA, 14 nt, Human
aauaacugugaagu

SEQ ID NO: 3040474 - RNA, 16 nt, Human
aauaacugugaaguuu

SEQ ID NO: 3040475 - RNA, 23 nt, Human
uaaauguuuuuuuuuaaagacuu

SEQ ID NO: 3040476 - RNA, 17 nt, Human
uaaauuuugaguucuac

SEQ ID NO: 3040477 - RNA, 24 nt, Human
uaaauguuuuuuuuuaaagacuuu

SEQ ID NO: 3040478 - RNA, 20 nt, Human
aauauugcuuuggucauaug

SEQ ID NO: 3040479 - RNA, 18 nt, Human
aauauuguguugugaaug

SEQ ID NO: 3040480 - RNA, 18 nt, Human
uaagaauauuugaaugua

SEQ ID NO: 3040481 - RNA, 15 nt, Human
uaagaauauuugaau

SEQ ID NO: 3040482 - RNA, 18 nt, Human
aauaggcguaacuaauuu

SEQ ID NO: 3040483 - RNA, 20 nt, Human
uaaauuuugucuuuaacuca

SEQ ID NO: 3040484 - RNA, 18 nt, Human
uaaauuuugaguucuaca

SEQ ID NO: 3040485 - RNA, 19 nt, Human
uaaauuuugaguucuacau

SEQ ID NO: 3040486 - RNA, 14 nt, Human
uaacaugauuuggg

SEQ ID NO: 3040487 - RNA, 15 nt, Human
aauaguauuugagag

SEQ ID NO: 3040488 - RNA, 14 nt, Human
aaucuuauaauuua

SEQ ID NO: 3040489 - RNA, 13 nt, Human
uaaguucauacau

SEQ ID NO: 3040490 - RNA, 14 nt, Human
uaaguucauacauu

SEQ ID NO: 3040491 - RNA, 12 nt, Human
uaaguucauaca

SEQ ID NO: 3040492 - RNA, 20 nt, Human
uaaguauguguaaaauguga

SEQ ID NO: 3040493 - RNA, 14 nt, Human
aaucagacuaugaa

SEQ ID NO: 3040494 - RNA, 17 nt, Human
aaucagacuaugaaguu

SEQ ID NO: 3040495 - RNA, 17 nt, Human
aaucauggugcucagag

SEQ ID NO: 3040496 - RNA, 15 nt, Human
aaucaucaagucuuu

SEQ ID NO: 3040497 - RNA, 23 nt, Human
uaaucagugugucuaaauuugaa

SEQ ID NO: 3040498 - RNA, 14 nt, Human
uaaugaaacuugga

SEQ ID NO: 3040499 - RNA, 15 nt, Human
uaaugaaacuuggau

SEQ ID NO: 3040500 - RNA, 14 nt, Human
uaaugguguuuuaa

SEQ ID NO: 3040501 - RNA, 22 nt, Human
aaugacagguuugggaccccug

SEQ ID NO: 3040502 - RNA, 15 nt, Human
aaugaaaaccacauu

SEQ ID NO: 3040503 - RNA, 17 nt, Human
aauguaugcuucauaca

SEQ ID NO: 3040504 - RNA, 18 nt, Human
aauguaugcuucauacag

SEQ ID NO: 3040505 - RNA, 21 nt, Human
aauguaugcuucauacaggga

SEQ ID NO: 3040506 - RNA, 18 nt, Human
uacauauuuuuguagcac

SEQ ID NO: 3040507 - RNA, 17 nt, Human
uacauauuuuuguagca

SEQ ID NO: 3040508 - RNA, 19 nt, Human
uacauauaagugauugcug

SEQ ID NO: 3040509 - RNA, 14 nt, Human
uacagaggacagua

SEQ ID NO: 3040510 - RNA, 18 nt, Human
uacagaggacaguauuug

SEQ ID NO: 3040511 - RNA, 19 nt, Human
aauggacuuuuguacauag

SEQ ID NO: 3040512 - RNA, 13 nt, Human
uaauucaagaaaa

SEQ ID NO: 3040513 - RNA, 16 nt, Human
uaauuuaaaauuguga

SEQ ID NO: 3040514 - RNA, 15 nt, Human
uaauuuaaaauugug

SEQ ID NO: 3040515 - RNA, 17 nt, Human
uaauuuauacaggucau

SEQ ID NO: 3040516 - RNA, 18 nt, Human
acucaugugacucuuucc

SEQ ID NO: 3040517 - RNA, 19 nt, Human
acucaugugacucuuucca

SEQ ID NO: 3040518 - RNA, 13 nt, Human
acuccuccuagcc

SEQ ID NO: 3040519 - RNA, 14 nt, Human
acuccuccuagcca

SEQ ID NO: 3040520 - RNA, 18 nt, Human
acuccuccuagccaccca

SEQ ID NO: 3040521 - RNA, 16 nt, Human
acuccuccuagccacc

SEQ ID NO: 3040522 - RNA, 15 nt, Human
acuccuccuagccac

SEQ ID NO: 3040523 - RNA, 19 nt, Human
ucccuuucugcuuguguua

SEQ ID NO: 3040524 - RNA, 19 nt, Human
uccuaaauauauuuuaaga

SEQ ID NO: 3040525 - RNA, 21 nt, Human
ucccgggacaccuaggcuagg

SEQ ID NO: 3040526 - RNA, 20 nt, Human
ucccugaaggaaccaaagcg

SEQ ID NO: 3040527 - RNA, 11 nt, Human
ucccugaggca

SEQ ID NO: 3040528 - RNA, 22 nt, Human
ucccugaggcagguccccagac

SEQ ID NO: 3040529 - RNA, 21 nt, Human
ucccugaggcagguccccaga

SEQ ID NO: 3040530 - RNA, 20 nt, Human
ucccugaggcagguccccag

SEQ ID NO: 3040531 - RNA, 14 nt, Human
acuacuagggaaau

SEQ ID NO: 3040532 - RNA, 21 nt, Human
acuacuagggaaaugccuuug

SEQ ID NO: 3040533 - RNA, 22 nt, Human
acguauaaaagccuguuuaaga

SEQ ID NO: 3040534 - RNA, 21 nt, Human
uccaaccggcuuuguggcacu

SEQ ID NO: 3040535 - RNA, 14 nt, Human
uccacucaugugac

SEQ ID NO: 3040536 - RNA, 21 nt, Human
uccacucaugugacucuuucc

SEQ ID NO: 3040537 - RNA, 18 nt, Human
uccacuccuccuagccac

SEQ ID NO: 3040538 - RNA, 15 nt, Human
uccacuccuccuagc

SEQ ID NO: 3040539 - RNA, 18 nt, Human
uccacuggggauugggcc

SEQ ID NO: 3040540 - RNA, 14 nt, Human
acgagaaaacaaua

SEQ ID NO: 3040541 - RNA, 18 nt, Human
uccaggccagggggccag

SEQ ID NO: 3040542 - RNA, 16 nt, Human
uccaggccagggggcc

SEQ ID NO: 3040543 - RNA, 16 nt, Human
accucaaaaugucuaa

SEQ ID NO: 3040544 - RNA, 19 nt, Human
accucaaaaugucuaagau

SEQ ID NO: 3040545 - RNA, 14 nt, Human
ucaucuaggauuuu

SEQ ID NO: 3040546 - RNA, 18 nt, Human
ucaucuagguaaauuaca

SEQ ID NO: 3040547 - RNA, 23 nt, Human
accccagcuggggccaggcuggg

SEQ ID NO: 3040548 - RNA, 22 nt, Human
ucagcccaaaccaccagaagcc

SEQ ID NO: 3040549 - RNA, 21 nt, Human
ucagcccaaaccaccagaagc

SEQ ID NO: 3040550 - RNA, 23 nt, Human
accauuucuugagguaaaagcau

SEQ ID NO: 3040551 - RNA, 13 nt, Human
ucacucuuggagc

SEQ ID NO: 3040552 - RNA, 17 nt, Human
ucacuaccuucaugcau

SEQ ID NO: 3040553 - RNA, 13 nt, Human
accagaagcccag

SEQ ID NO: 3040554 - RNA, 16 nt, Human
accagaagcccagaau

SEQ ID NO: 3040555 - RNA, 14 nt, Human
accagaagcccaga

SEQ ID NO: 3040556 - RNA, 22 nt, Human
ucacauaucuaguaugaaauua

SEQ ID NO: 3040557 - RNA, 21 nt, Human
ucacauaucuaguaugaaauu

SEQ ID NO: 3040558 - RNA, 17 nt, Human
ucacauaucuaguauga

SEQ ID NO: 3040559 - RNA, 22 nt, Human
accacacguaaugaaacuugga

SEQ ID NO: 3040560 - RNA, 15 nt, Human
ucaauucuugccaaa

SEQ ID NO: 3040561 - RNA, 14 nt, Human
ucaaagcugaaaug

SEQ ID NO: 3040562 - RNA, 17 nt, Human
ucaaagggugaaaauua

SEQ ID NO: 3040563 - RNA, 16 nt, Human
uauuuguaaauuuaug

SEQ ID NO: 3040564 - RNA, 22 nt, Human
uauuuguaaauuuaugugaugg

SEQ ID NO: 3040565 - RNA, 17 nt, Human
uauuuguaaauuuaugu

SEQ ID NO: 3040566 - RNA, 23 nt, Human
uauuuuugacagaauauguuuca

SEQ ID NO: 3040567 - RNA, 19 nt, Human
uauuuuugacagaauaugu

SEQ ID NO: 3040568 - RNA, 13 nt, Human
uauuuuugacaga

SEQ ID NO: 3040569 - RNA, 15 nt, Human
uauuuuugacagaau

SEQ ID NO: 3040570 - RNA, 14 nt, Human
uauuuuugacagaa

SEQ ID NO: 3040571 - RNA, 14 nt, Human
ucaaaaugucuaag

SEQ ID NO: 3040572 - RNA, 16 nt, Human
ucaaaauuguuacaaa

SEQ ID NO: 3040573 - RNA, 19 nt, Human
ucaaaauuguuacaaauug

SEQ ID NO: 3040574 - RNA, 21 nt, Human
acauaaaaacaacuuuauacc

SEQ ID NO: 3040575 - RNA, 19 nt, Human
acauaaaaacaacuuuaua

SEQ ID NO: 3040576 - RNA, 16 nt, Human
acauaaaaacaacuuu

SEQ ID NO: 3040577 - RNA, 22 nt, Human
uauuucccugaaggaaccaaag

SEQ ID NO: 3040578 - RNA, 21 nt, Human
uauuuccauuaaaaaaucagu

SEQ ID NO: 3040579 - RNA, 17 nt, Human
acauaucuaguaugaaa

SEQ ID NO: 3040580 - RNA, 23 nt, Human
acauaucuaguaugaaauuauau

SEQ ID NO: 3040581 - RNA, 22 nt, Human
acauaucuaguaugaaauuaua

SEQ ID NO: 3040582 - RNA, 20 nt, Human
acauaucuaguaugaaauua

SEQ ID NO: 3040583 - RNA, 23 nt, Human
acuugucccgggacaccuaggcu

SEQ ID NO: 3040584 - RNA, 16 nt, Human
ucucauuccagaggaa

SEQ ID NO: 3040585 - RNA, 14 nt, Human
ucugagagaggcca

SEQ ID NO: 3040586 - RNA, 20 nt, Human
ucugagagaggccauucuuu

SEQ ID NO: 3040587 - RNA, 16 nt, Human
ucugacuaugacauaa

SEQ ID NO: 3040588 - RNA, 14 nt, Human
ucugacuaugacau

SEQ ID NO: 3040589 - RNA, 15 nt, Human
ucugcaggucccuaa

SEQ ID NO: 3040590 - RNA, 16 nt, Human
ucugcaggucccuaau

SEQ ID NO: 3040591 - RNA, 17 nt, Human
ucugcaggucccuaaua

SEQ ID NO: 3040592 - RNA, 22 nt, Human
agaaauuaugugccagauuuau

SEQ ID NO: 3040593 - RNA, 16 nt, Human
agaaauuuauaaacuu

SEQ ID NO: 3040594 - RNA, 17 nt, Human
agaaauuuauaaacuuu

SEQ ID NO: 3040595 - RNA, 14 nt, Human
ucugcaggucccua

SEQ ID NO: 3040596 - RNA, 18 nt, Human
ucugcaggucccuaauaa

SEQ ID NO: 3040597 - RNA, 13 nt, Human
agaaauuaugugc

SEQ ID NO: 3040598 - RNA, 21 nt, Human
agaaauuaugugccagauuua

SEQ ID NO: 3040599 - RNA, 17 nt, Human
agaaaucaaagagagaa

SEQ ID NO: 3040600 - RNA, 17 nt, Human
agaaaugaaaaaauaua

SEQ ID NO: 3040601 - RNA, 12 nt, Human
agaaaucuaaaa

SEQ ID NO: 3040602 - RNA, 16 nt, Human
agaaaugaaaaaauau

SEQ ID NO: 3040603 - RNA, 18 nt, Human
agaaaugaaaaaauauau

SEQ ID NO: 3040604 - RNA, 23 nt, Human
agaaaugaaaaaauauauaucaa

SEQ ID NO: 3040605 - RNA, 21 nt, Human
agaaaacuuguauuaugugug

SEQ ID NO: 3040606 - RNA, 19 nt, Human
agaaaacuuguauuaugug

SEQ ID NO: 3040607 - RNA, 19 nt, Human
ucucuggaauuugaaacac

SEQ ID NO: 3040608 - RNA, 15 nt, Human
ucucuggaauuugaa

SEQ ID NO: 3040609 - RNA, 18 nt, Human
ucgagaucccaacacugc

SEQ ID NO: 3040610 - RNA, 21 nt, Human
ucgagaucccaacacugccag

SEQ ID NO: 3040611 - RNA, 17 nt, Human
ucgagaucccaacacug

SEQ ID NO: 3040612 - RNA, 22 nt, Human
uccuuucuaacaaaaaaauaua

SEQ ID NO: 3040613 - RNA, 23 nt, Human
acuggccaguggcuggaucugug

SEQ ID NO: 3040614 - RNA, 16 nt, Human
acugccuauuuuaaua

SEQ ID NO: 3040615 - RNA, 21 nt, Human
acugccuauuuuaauaaacac

SEQ ID NO: 3040616 - RNA, 18 nt, Human
acugcuaagaauauuuga

SEQ ID NO: 3040617 - RNA, 16 nt, Human
acugcuaagaauauuu

SEQ ID NO: 3040618 - RNA, 20 nt, Human
ucuaaagccauuguaguccu

SEQ ID NO: 3040619 - RNA, 17 nt, Human
ucuacauaaguaauuca

SEQ ID NO: 3040620 - RNA, 20 nt, Human
ucuacauaaguaauucaaga

SEQ ID NO: 3040621 - RNA, 19 nt, Human
acuguucccugagguggga

SEQ ID NO: 3040622 - RNA, 16 nt, Human
acuguucccugaggug

SEQ ID NO: 3040623 - RNA, 22 nt, Human
ucuacauaaguaauucaagaaa

SEQ ID NO: 3040624 - RNA, 22 nt, Human
ucguuuucaaaauuguuacaaa

SEQ ID NO: 3040625 - RNA, 16 nt, Human
ucguaaaauuaagaaa

SEQ ID NO: 3040626 - RNA, 13 nt, Human
ucguaaaauuaag

SEQ ID NO: 3040627 - RNA, 16 nt, Human
acugggagaaaugaaa

SEQ ID NO: 3040628 - RNA, 12 nt, Human
acugugugcuca

SEQ ID NO: 3040629 - RNA, 15 nt, Human
acugugugcucagga

SEQ ID NO: 3040630 - RNA, 19 nt, Human
acugugugcucaggagccc

SEQ ID NO: 3040631 - RNA, 20 nt, Human
acugugugcucaggagcccu

SEQ ID NO: 3040632 - RNA, 21 nt, Human
acugugugcucaggagcccug

SEQ ID NO: 3040633 - RNA, 21 nt, Human
agaggccauucuuucccaaca

SEQ ID NO: 3040634 - RNA, 22 nt, Human
agaguaauccaagcaaauguga

SEQ ID NO: 3040635 - RNA, 14 nt, Human
agagcugcgggcug

SEQ ID NO: 3040636 - RNA, 21 nt, Human
ugaacuaggauuguaguccca

SEQ ID NO: 3040637 - RNA, 14 nt, Human
agagcaaaauugau

SEQ ID NO: 3040638 - RNA, 16 nt, Human
agagcagugggccugg

SEQ ID NO: 3040639 - RNA, 15 nt, Human
ugaaauuguauuaca

SEQ ID NO: 3040640 - RNA, 14 nt, Human
agagucccugccug

SEQ ID NO: 3040641 - RNA, 17 nt, Human
agagucccugccuggac

SEQ ID NO: 3040642 - RNA, 23 nt, Human
agaguccaucagccuccauccua

SEQ ID NO: 3040643 - RNA, 20 nt, Human
agaguugaugguuguacaua

SEQ ID NO: 3040644 - RNA, 14 nt, Human
agauaaauauuaua

SEQ ID NO: 3040645 - RNA, 12 nt, Human
agauaaauauua

SEQ ID NO: 3040646 - RNA, 17 nt, Human
agauaaagguucaugca

SEQ ID NO: 3040647 - RNA, 19 nt, Human
agaucccaacacugccagc

SEQ ID NO: 3040648 - RNA, 20 nt, Human
agaucccaacacugccagca

SEQ ID NO: 3040649 - RNA, 18 nt, Human
agaucccaacacugccag

SEQ ID NO: 3040650 - RNA, 17 nt, Human
agauguggaaaagccaa

SEQ ID NO: 3040651 - RNA, 22 nt, Human
agauguggaaaagccaagaggc

SEQ ID NO: 3040652 - RNA, 20 nt, Human
ugacauaaaaacaacuuuau

SEQ ID NO: 3040653 - RNA, 18 nt, Human
ugacauaaaaacaacuuu

SEQ ID NO: 3040654 - RNA, 17 nt, Human
ugacauaaaaacaacuu

SEQ ID NO: 3040655 - RNA, 13 nt, Human
ucuuucuuccaaa

SEQ ID NO: 3040656 - RNA, 14 nt, Human
ucuuuaauuuuaca

SEQ ID NO: 3040657 - RNA, 19 nt, Human
ucuugguuccagccugcca

SEQ ID NO: 3040658 - RNA, 18 nt, Human
ucuugguuccagccugcc

SEQ ID NO: 3040659 - RNA, 17 nt, Human
ucuugguuccagccugc

SEQ ID NO: 3040660 - RNA, 13 nt, Human
ucuugguuccagc

SEQ ID NO: 3040661 - RNA, 19 nt, Human
agacuucccacggcuccuc

SEQ ID NO: 3040662 - RNA, 21 nt, Human
agacauuugcuaugagcuggg

SEQ ID NO: 3040663 - RNA, 19 nt, Human
ucuuacugucuuuuuucua

SEQ ID NO: 3040664 - RNA, 19 nt, Human
agacacaacuauuuuucca

SEQ ID NO: 3040665 - RNA, 20 nt, Human
agacacaacuauuuuuccaa

SEQ ID NO: 3040666 - RNA, 12 nt, Human
agacagaaaaaa

SEQ ID NO: 3040667 - RNA, 22 nt, Human
agaaccccuggcuccaggccag

SEQ ID NO: 3040668 - RNA, 13 nt, Human
agaaugucaguau

SEQ ID NO: 3040669 - RNA, 16 nt, Human
agaaugucaguaugug

SEQ ID NO: 3040670 - RNA, 15 nt, Human
agaaugucaguaugu

SEQ ID NO: 3040671 - RNA, 19 nt, Human
agaaugucaguauguggaa

SEQ ID NO: 3040672 - RNA, 17 nt, Human
agaaugucaguaugugg

SEQ ID NO: 3040673 - RNA, 23 nt, Human
agccccgcguggaacucgugucu

SEQ ID NO: 3040674 - RNA, 18 nt, Human
agcccugaguuccuagcc

SEQ ID NO: 3040675 - RNA, 14 nt, Human
agcccugaguuccu

SEQ ID NO: 3040676 - RNA, 23 nt, Human
agcccugaguuccuagccaccgc

SEQ ID NO: 3040677 - RNA, 20 nt, Human
agcccugaguuccuagccac

SEQ ID NO: 3040678 - RNA, 17 nt, Human
agcccugggaggcucug

SEQ ID NO: 3040679 - RNA, 18 nt, Human
agcccugggaggcucugg

SEQ ID NO: 3040680 - RNA, 20 nt, Human
agcccugggaggcucuggag

SEQ ID NO: 3040681 - RNA, 16 nt, Human
agccucuccacucaug

SEQ ID NO: 3040682 - RNA, 18 nt, Human
agccucgacacagagugg

SEQ ID NO: 3040683 - RNA, 17 nt, Human
agccucgacacagagug

SEQ ID NO: 3040684 - RNA, 21 nt, Human
ugcaggucccuaauaaagcug

SEQ ID NO: 3040685 - RNA, 22 nt, Human
ugcaggucccuaauaaagcugu

SEQ ID NO: 3040686 - RNA, 17 nt, Human
ugcauagaauaaaauuu

SEQ ID NO: 3040687 - RNA, 15 nt, Human
agccuguuuaagaga

SEQ ID NO: 3040688 - RNA, 13 nt, Human
ugauccagaaaga

SEQ ID NO: 3040689 - RNA, 23 nt, Human
ugauccagaaagaaaacuuguau

SEQ ID NO: 3040690 - RNA, 15 nt, Human
ugaugggucaguugu

SEQ ID NO: 3040691 - RNA, 15 nt, Human
ugaugaaaauauuua

SEQ ID NO: 3040692 - RNA, 18 nt, Human
ugaugaaaauauuuaaag

SEQ ID NO: 3040693 - RNA, 20 nt, Human
agcaucacaugaacuuguaa

SEQ ID NO: 3040694 - RNA, 20 nt, Human
agcagguccccagcuuuggc

SEQ ID NO: 3040695 - RNA, 21 nt, Human
agcagguccccagcuuuggcu

SEQ ID NO: 3040696 - RNA, 18 nt, Human
ugaguuccuagccaccgc

SEQ ID NO: 3040697 - RNA, 24 nt, Human
ugaguuacuugcugcccugugcuc

SEQ ID NO: 3040698 - RNA, 14 nt, Human
ugaguuccuagcca

SEQ ID NO: 3040699 - RNA, 15 nt, Human
ugaguucuacauaag

SEQ ID NO: 3040700 - RNA, 20 nt, Human
ugaguucuacauaaguaauu

SEQ ID NO: 3040701 - RNA, 16 nt, Human
ugauaaguaaaugcua

SEQ ID NO: 3040702 - RNA, 19 nt, Human
ugauaaguucauacauugu

SEQ ID NO: 3040703 - RNA, 17 nt, Human
ugauaaguucauacauu

SEQ ID NO: 3040704 - RNA, 15 nt, Human
ugauaaguucauaca

SEQ ID NO: 3040705 - RNA, 13 nt, Human
ugauaaguucaua

SEQ ID NO: 3040706 - RNA, 15 nt, Human
ugccuugucacgcca

SEQ ID NO: 3040707 - RNA, 16 nt, Human
ugccuuggugugcugu

SEQ ID NO: 3040708 - RNA, 16 nt, Human
ugcuaauuuugaaaaa

SEQ ID NO: 3040709 - RNA, 18 nt, Human
ugcuaauuuugaaaaacu

SEQ ID NO: 3040710 - RNA, 19 nt, Human
ugcuaauuuugaaaaacug

SEQ ID NO: 3040711 - RNA, 20 nt, Human
ugcuaauuuugaaaaacugc

SEQ ID NO: 3040712 - RNA, 21 nt, Human
agcuuuggcuaugagggccuu

SEQ ID NO: 3040713 - RNA, 20 nt, Human
agcuuuggcuaugagggccu

SEQ ID NO: 3040714 - RNA, 22 nt, Human
agcuuugagguggaagagggcu

SEQ ID NO: 3040715 - RNA, 22 nt, Human
ugcuaugagcuggggaugucuc

SEQ ID NO: 3040716 - RNA, 16 nt, Human
ugcuaugagcugggga

SEQ ID NO: 3040717 - RNA, 20 nt, Human
ugcuaugagcuggggauguc

SEQ ID NO: 3040718 - RNA, 19 nt, Human
ugcuaugagcuggggaugu

SEQ ID NO: 3040719 - RNA, 22 nt, Human
ugccgagaguccaucagccucc

SEQ ID NO: 3040720 - RNA, 16 nt, Human
ugccaucauguuuaca

SEQ ID NO: 3040721 - RNA, 22 nt, Human
ugccugcuuuuuauggccugug

SEQ ID NO: 3040722 - RNA, 20 nt, Human
ugccugcuuuuuauggccug

SEQ ID NO: 3040723 - RNA, 21 nt, Human
ugccugcuuuuuauggccugu

SEQ ID NO: 3040724 - RNA, 17 nt, Human
uggacuguucccugagg

SEQ ID NO: 3040725 - RNA, 16 nt, Human
uggacuguucccugag

SEQ ID NO: 3040726 - RNA, 15 nt, Human
uggagcaaagcugau

SEQ ID NO: 3040727 - RNA, 17 nt, Human
uggauucugagagcugu

SEQ ID NO: 3040728 - RNA, 16 nt, Human
uggauucugagagcug

SEQ ID NO: 3040729 - RNA, 14 nt, Human
uggaguugaaaauc

SEQ ID NO: 3040730 - RNA, 23 nt, Human
aggagcccugggaggcucuggag

SEQ ID NO: 3040731 - RNA, 17 nt, Human
aggagaguagaacagau

SEQ ID NO: 3040732 - RNA, 15 nt, Human
uggaagagggcugca

SEQ ID NO: 3040733 - RNA, 16 nt, Human
ugcuuuuuauggccug

SEQ ID NO: 3040734 - RNA, 19 nt, Human
agguuuuuguagugauuuu

SEQ ID NO: 3040735 - RNA, 13 nt, Human
aguaaaauccaca

SEQ ID NO: 3040736 - RNA, 14 nt, Human
aguaauagagcaaa

SEQ ID NO: 3040737 - RNA, 23 nt, Human
agguuuguuuagaagaagugugu

SEQ ID NO: 3040738 - RNA, 19 nt, Human
uguacuugcucuugaugcc

SEQ ID NO: 3040739 - RNA, 22 nt, Human
uguacuugcucuugaugccugg

SEQ ID NO: 3040740 - RNA, 23 nt, Human
uguacuugcucuugaugccuggc

SEQ ID NO: 3040741 - RNA, 21 nt, Human
uguagugauuuuuaugccacc

SEQ ID NO: 3040742 - RNA, 16 nt, Human
aguacauuuggagaca

SEQ ID NO: 3040743 - RNA, 15 nt, Human
aguaauucaagaaaa

SEQ ID NO: 3040744 - RNA, 16 nt, Human
aguaguaauagagcaa

SEQ ID NO: 3040745 - RNA, 12 nt, Human
uguauguggggg

SEQ ID NO: 3040746 - RNA, 22 nt, Human
uguauucuagcuaauguaauaa

SEQ ID NO: 3040747 - RNA, 13 nt, Human
uguauuacaaauc

SEQ ID NO: 3040748 - RNA, 22 nt, Human
uguauuacaaauccaaugaaau

SEQ ID NO: 3040749 - RNA, 20 nt, Human
uguauucuagcuaauguaau

SEQ ID NO: 3040750 - RNA, 16 nt, Human
uguaaaggaauuuaaa

SEQ ID NO: 3040751 - RNA, 16 nt, Human
uguaaauaguauuuga

SEQ ID NO: 3040752 - RNA, 17 nt, Human
uguaaauaaaggaacca

SEQ ID NO: 3040753 - RNA, 20 nt, Human
aggugcauauuuauaaaaau

SEQ ID NO: 3040754 - RNA, 22 nt, Human
aggugcccagaaugaggcugcu

SEQ ID NO: 3040755 - RNA, 18 nt, Human
aggugcccagaaugaggc

SEQ ID NO: 3040756 - RNA, 23 nt, Human
agggaaggaucccaugagcuccu

SEQ ID NO: 3040757 - RNA, 15 nt, Human
agggaaggaucccau

SEQ ID NO: 3040758 - RNA, 22 nt, Human
agggaaggaucccaugagcucc

SEQ ID NO: 3040759 - RNA, 13 nt, Human
agggaaauuucag

SEQ ID NO: 3040760 - RNA, 22 nt, Human
aggcccuaucuguuuacagugu

SEQ ID NO: 3040761 - RNA, 22 nt, Human
ugggagaaugucaguaugugga

SEQ ID NO: 3040762 - RNA, 20 nt, Human
ugggagaaugucaguaugug

SEQ ID NO: 3040763 - RNA, 19 nt, Human
ugggagaaugucaguaugu

SEQ ID NO: 3040764 - RNA, 15 nt, Human
ugggccccugccaga

SEQ ID NO: 3040765 - RNA, 15 nt, Human
ugggccccugccucu

SEQ ID NO: 3040766 - RNA, 19 nt, Human
ugggccccugccucucugc

SEQ ID NO: 3040767 - RNA, 13 nt, Human
uggggagagacgg

SEQ ID NO: 3040768 - RNA, 14 nt, Human
uggggagggauuug

SEQ ID NO: 3040769 - RNA, 22 nt, Human
uggggagggauuuggggcucag

SEQ ID NO: 3040770 - RNA, 15 nt, Human
uggggcucagagugg

SEQ ID NO: 3040771 - RNA, 21 nt, Human
aggguggggggggggcgcggc

SEQ ID NO: 3040772 - RNA, 16 nt, Human
ugggucgcccuggacu

SEQ ID NO: 3040773 - RNA, 18 nt, Human
ugggucgcccuggacugu

SEQ ID NO: 3040774 - RNA, 12 nt, Human
aguuuagggugg

SEQ ID NO: 3040775 - RNA, 13 nt, Human
aguuuaggguggg

SEQ ID NO: 3040776 - RNA, 14 nt, Human
aguuuagggugggg

SEQ ID NO: 3040777 - RNA, 18 nt, Human
uuaaaauugugauguguc

SEQ ID NO: 3040778 - RNA, 13 nt, Human
uuaaaauugugau

SEQ ID NO: 3040779 - RNA, 12 nt, Human
aguucugccagg

SEQ ID NO: 3040780 - RNA, 13 nt, Human
aguucugccagga

SEQ ID NO: 3040781 - RNA, 14 nt, Human
aguucugccaggag

SEQ ID NO: 3040782 - RNA, 20 nt, Human
aguucugccaggagacaggu

SEQ ID NO: 3040783 - RNA, 19 nt, Human
uguuuugaaucucauaauu

SEQ ID NO: 3040784 - RNA, 18 nt, Human
uguuucuuuguaaugaaa

SEQ ID NO: 3040785 - RNA, 19 nt, Human
uguuucuuuguaaugaaaa

SEQ ID NO: 3040786 - RNA, 14 nt, Human
uguuuauuuauaga

SEQ ID NO: 3040787 - RNA, 24 nt, Human
uguuuauuuauagaguguacuuaa

SEQ ID NO: 3040788 - RNA, 13 nt, Human
uguuuaugugugu

SEQ ID NO: 3040789 - RNA, 16 nt, Human
uguuuaugugugugug

SEQ ID NO: 3040790 - RNA, 19 nt, Human
uguugccuugcauaauggu

SEQ ID NO: 3040791 - RNA, 12 nt, Human
auaaauauuaua

SEQ ID NO: 3040792 - RNA, 22 nt, Human
auaaauauuauauuauauauau

SEQ ID NO: 3040793 - RNA, 15 nt, Human
uuagaagaagugugu

SEQ ID NO: 3040794 - RNA, 14 nt, Human
uuagaagaagugug

SEQ ID NO: 3040795 - RNA, 16 nt, Human
uuagaagaaguguguc

SEQ ID NO: 3040796 - RNA, 17 nt, Human
uuaauaaacacucuuga

SEQ ID NO: 3040797 - RNA, 13 nt, Human
uuaauaaacacuc

SEQ ID NO: 3040798 - RNA, 17 nt, Human
uuaauuccaauuauaug

SEQ ID NO: 3040799 - RNA, 20 nt, Human
auaaaauuuuuaaucuuuaa

SEQ ID NO: 3040800 - RNA, 18 nt, Human
uuaaguaaggaauuuuau

SEQ ID NO: 3040801 - RNA, 22 nt, Human
auaaaagggacugagaaauuua

SEQ ID NO: 3040802 - RNA, 15 nt, Human
ugugacucuuuccaa

SEQ ID NO: 3040803 - RNA, 17 nt, Human
ugugacucuuuccaacc

SEQ ID NO: 3040804 - RNA, 18 nt, Human
agucuuucacauuuaaau

SEQ ID NO: 3040805 - RNA, 12 nt, Human
ugugacucuuuc

SEQ ID NO: 3040806 - RNA, 14 nt, Human
ugugacucuuucca

SEQ ID NO: 3040807 - RNA, 15 nt, Human
ugugaacagcggcug

SEQ ID NO: 3040808 - RNA, 12 nt, Human
ugugaaauuauu

SEQ ID NO: 3040809 - RNA, 18 nt, Human
agucacuaccuucaugca

SEQ ID NO: 3040810 - RNA, 19 nt, Human
uguggcauccagagucccu

SEQ ID NO: 3040811 - RNA, 21 nt, Human
uguggcauccagagucccugc

SEQ ID NO: 3040812 - RNA, 16 nt, Human
uguggcauccagaguc

SEQ ID NO: 3040813 - RNA, 23 nt, Human
uguggcaguuuggcaaacucucc

SEQ ID NO: 3040814 - RNA, 23 nt, Human
ugugcccacccuccacucuccuc

SEQ ID NO: 3040815 - RNA, 14 nt, Human
ugugcccacccucc

SEQ ID NO: 3040816 - RNA, 20 nt, Human
ugugccagauuuaugcauau

SEQ ID NO: 3040817 - RNA, 18 nt, Human
ugugccagauuuaugcau

SEQ ID NO: 3040818 - RNA, 14 nt, Human
ugugauguauucua

SEQ ID NO: 3040819 - RNA, 15 nt, Human
agugaaagaaaauaa

SEQ ID NO: 3040820 - RNA, 14 nt, Human
uguguguguaugug

SEQ ID NO: 3040821 - RNA, 20 nt, Human
ugugugugggaguguguaau

SEQ ID NO: 3040822 - RNA, 12 nt, Human
ugugugugggag

SEQ ID NO: 3040823 - RNA, 19 nt, Human
uguguuaaguauguguaaa

SEQ ID NO: 3040824 - RNA, 15 nt, Human
uguuaaguaugugua

SEQ ID NO: 3040825 - RNA, 16 nt, Human
uguuaaguauguguaa

SEQ ID NO: 3040826 - RNA, 17 nt, Human
aguguacuuaacuauuc

SEQ ID NO: 3040827 - RNA, 15 nt, Human
uguucugugauauaa

SEQ ID NO: 3040828 - RNA, 18 nt, Human
uguucugugauauaagug

SEQ ID NO: 3040829 - RNA, 21 nt, Human
uguuccgugguuaaacucgcu

SEQ ID NO: 3040830 - RNA, 14 nt, Human
agugugucuaaauu

SEQ ID NO: 3040831 - RNA, 16 nt, Human
uuggacuugucccggg

SEQ ID NO: 3040832 - RNA, 11 nt, Human
uuggagccugc

SEQ ID NO: 3040833 - RNA, 15 nt, Human
uuggagccugcagag

SEQ ID NO: 3040834 - RNA, 18 nt, Human
uuggagacacaacuauuu

SEQ ID NO: 3040835 - RNA, 18 nt, Human
uugcucuugaugccuggc

SEQ ID NO: 3040836 - RNA, 14 nt, Human
uugcucuugaugcc

SEQ ID NO: 3040837 - RNA, 17 nt, Human
uugcucuugaugccugg

SEQ ID NO: 3040838 - RNA, 16 nt, Human
aucuuauaauuuaaaa

SEQ ID NO: 3040839 - RNA, 15 nt, Human
aucuuauaauuuaaa

SEQ ID NO: 3040840 - RNA, 14 nt, Human
aucuuauaauuuaa

SEQ ID NO: 3040841 - RNA, 22 nt, Human
aucugugaggggcucucucaug

SEQ ID NO: 3040842 - RNA, 21 nt, Human
aucugugaggggcucucucau

SEQ ID NO: 3040843 - RNA, 19 nt, Human
uuguaaauuuaugugaugg

SEQ ID NO: 3040844 - RNA, 15 nt, Human
augaagcaaugcuuc

SEQ ID NO: 3040845 - RNA, 18 nt, Human
augaacuuguaaaggaau

SEQ ID NO: 3040846 - RNA, 14 nt, Human
augaagcaaugcuu

SEQ ID NO: 3040847 - RNA, 18 nt, Human
uuggagccugcagagcug

SEQ ID NO: 3040848 - RNA, 16 nt, Human
aucucuuguuuaaauu

SEQ ID NO: 3040849 - RNA, 20 nt, Human
uugauguguuuauuuauaga

SEQ ID NO: 3040850 - RNA, 17 nt, Human
aucugacuaugacauaa

SEQ ID NO: 3040851 - RNA, 14 nt, Human
aucugacuaugaca

SEQ ID NO: 3040852 - RNA, 18 nt, Human
uugcaacuuuguauaaaa

SEQ ID NO: 3040853 - RNA, 16 nt, Human
uugcaacuuuguauaa

SEQ ID NO: 3040854 - RNA, 17 nt, Human
uugcaacuuuguauaaa

SEQ ID NO: 3040855 - RNA, 18 nt, Human
augcuacaggauuugaaa

SEQ ID NO: 3040856 - RNA, 22 nt, Human
uuucacauaucuaguaugaaau

SEQ ID NO: 3040857 - RNA, 21 nt, Human
auggaaugcuguguuaaauaa

SEQ ID NO: 3040858 - RNA, 17 nt, Human
auggaaugcuguguuaa

SEQ ID NO: 3040859 - RNA, 17 nt, Human
uuguagcuuuaucaaag

SEQ ID NO: 3040860 - RNA, 16 nt, Human
uuguagcuuuaucaaa

SEQ ID NO: 3040861 - RNA, 18 nt, Human
augaguuggcugggaaua

SEQ ID NO: 3040862 - RNA, 12 nt, Human
uugugauguguc

SEQ ID NO: 3040863 - RNA, 20 nt, Human
uuguucaauaauaaauauuu

SEQ ID NO: 3040864 - RNA, 22 nt, Human
uuguucaauaauaaauauuuuu

SEQ ID NO: 3040865 - RNA, 13 nt, Human
uuguucauacaua

SEQ ID NO: 3040866 - RNA, 18 nt, Human
uuguucauacauauuuuu

SEQ ID NO: 3040867 - RNA, 16 nt, Human
uuguucauacauauuu

SEQ ID NO: 3040868 - RNA, 18 nt, Human
uuuaaaaaaauuccaagu

SEQ ID NO: 3040869 - RNA, 20 nt, Human
uuuaagacgaaacauuuguu

SEQ ID NO: 3040870 - RNA, 21 nt, Human
uuuaaauauaugcuaagucuu

SEQ ID NO: 3040871 - RNA, 18 nt, Human
uuuaaauauaugcuaagu

SEQ ID NO: 3040872 - RNA, 14 nt, Human
uuuaagagacagcc

SEQ ID NO: 3040873 - RNA, 17 nt, Human
uucuaguucugccagga

SEQ ID NO: 3040874 - RNA, 14 nt, Human
aucauucauuuucu

SEQ ID NO: 3040875 - RNA, 23 nt, Human
aucauguuuacagaggacaguau

SEQ ID NO: 3040876 - RNA, 18 nt, Human
aucauguuuacagaggac

SEQ ID NO: 3040877 - RNA, 16 nt, Human
aucagugucuuuccac

SEQ ID NO: 3040878 - RNA, 20 nt, Human
aucagugugucuaaauuuga

SEQ ID NO: 3040879 - RNA, 19 nt, Human
aucagugugucuaaauuug

SEQ ID NO: 3040880 - RNA, 12 nt, Human
uucugccaggag

SEQ ID NO: 3040881 - RNA, 13 nt, Human
uucucuucacuca

SEQ ID NO: 3040882 - RNA, 11 nt, Human
aucccaacacu

SEQ ID NO: 3040883 - RNA, 15 nt, Human
aucccaacacugcca

SEQ ID NO: 3040884 - RNA, 16 nt, Human
aucccaacacugccag

SEQ ID NO: 3040885 - RNA, 17 nt, Human
aucccaacacugccagc

SEQ ID NO: 3040886 - RNA, 17 nt, Human
auauguuucaaacuuug

SEQ ID NO: 3040887 - RNA, 15 nt, Human
auauugauccagaaa

SEQ ID NO: 3040888 - RNA, 22 nt, Human
auauugauccagaaagaaaacu

SEQ ID NO: 3040889 - RNA, 17 nt, Human
auauuguguugugaaug

SEQ ID NO: 3040890 - RNA, 18 nt, Human
auauuguguugugaaugu

SEQ ID NO: 3040891 - RNA, 20 nt, Human
auauuuguaaauuuauguga

SEQ ID NO: 3040892 - RNA, 18 nt, Human
auauauucagccuggcuu

SEQ ID NO: 3040893 - RNA, 13 nt, Human
uucagaaaauauu

SEQ ID NO: 3040894 - RNA, 14 nt, Human
uucagaaaauauua

SEQ ID NO: 3040895 - RNA, 20 nt, Human
uucagaaaauauuauguguu

SEQ ID NO: 3040896 - RNA, 21 nt, Human
uucagaaaauauuauguguuu

SEQ ID NO: 3040897 - RNA, 17 nt, Human
auauaaguauucuaaau

SEQ ID NO: 3040898 - RNA, 19 nt, Human
auauaaguauucuaaauuu

SEQ ID NO: 3040899 - RNA, 18 nt, Human
auagcuacuaauuuuaaa

SEQ ID NO: 3040900 - RNA, 17 nt, Human
auagcuacuaauuuuaa

SEQ ID NO: 3040901 - RNA, 14 nt, Human
auagcuacuaauuu

SEQ ID NO: 3040902 - RNA, 21 nt, Human
uucacauaucuaguaugaaau

SEQ ID NO: 3040903 - RNA, 20 nt, Human
uucacauaucuaguaugaaa

SEQ ID NO: 3040904 - RNA, 19 nt, Human
uucacauuguauucagagu

SEQ ID NO: 3040905 - RNA, 17 nt, Human
auaggcacaggaaacca

SEQ ID NO: 3040906 - RNA, 22 nt, Human
uucaagaaaacaacuucaauau

SEQ ID NO: 3040907 - RNA, 16 nt, Human
uucaaaaaacuuguaa

SEQ ID NO: 3040908 - RNA, 16 nt, Human
uucaaacuuuggaaca

SEQ ID NO: 3040909 - RNA, 19 nt, Human
uuucccuuccuuccucucc

SEQ ID NO: 3040910 - RNA, 21 nt, Human
uuugacagaauauguuucaaa

SEQ ID NO: 3040911 - RNA, 20 nt, Human
uuugacagaauauguuucaa

SEQ ID NO: 3040912 - RNA, 19 nt, Human
uuugacagaauauguuuca

SEQ ID NO: 3040913 - RNA, 18 nt, Human
uuugacagaauauguuuc

SEQ ID NO: 3040914 - RNA, 18 nt, Human
uuugacaaagguaaauca

SEQ ID NO: 3040915 - RNA, 13 nt, Human
uuugagaguucua

SEQ ID NO: 3040916 - RNA, 23 nt, Human
uuugaccuguugggagugaggau

SEQ ID NO: 3040917 - RNA, 18 nt, Human
uuuggcaaacucuccacc

SEQ ID NO: 3040918 - RNA, 17 nt, Human
auguauauaaacaugcu

SEQ ID NO: 3040919 - RNA, 18 nt, Human
uuuguaagguuuuuguag

SEQ ID NO: 3040920 - RNA, 22 nt, Human
uuuguagugauuuuuaugccac

SEQ ID NO: 3040921 - RNA, 15 nt, Human
uuuguagugauuuuu

SEQ ID NO: 3040922 - RNA, 23 nt, Human
augucgucaaagcugaaauggac

SEQ ID NO: 3040923 - RNA, 15 nt, Human
auguuuuuuuuuaaa

SEQ ID NO: 3040924 - RNA, 23 nt, Human
auguggaaaagccaagaggcugc

SEQ ID NO: 3040925 - RNA, 23 nt, Human
auguguguguguuguguguggga

SEQ ID NO: 3040926 - RNA, 22 nt, Human
auguguguguguuguguguggg

SEQ ID NO: 3040927 - RNA, 18 nt, Human
auguguguguguugugug

SEQ ID NO: 3040928 - RNA, 12 nt, Human
auguguuuccau

SEQ ID NO: 3040929 - RNA, 13 nt, Human
auguuaagcagau

SEQ ID NO: 3040930 - RNA, 12 nt, Human
auguuaagcaga

SEQ ID NO: 3040931 - RNA, 13 nt, Human
uuuuugacagaau

SEQ ID NO: 3040932 - RNA, 12 nt, Human
uuuuugacagaa

SEQ ID NO: 3040933 - RNA, 15 nt, Human
uuuuugaagcuguau

SEQ ID NO: 3040934 - RNA, 19 nt, Human
uuuuuguagcacugacaga

SEQ ID NO: 3040935 - RNA, 17 nt, Human
uuuuuguagcacugaca

SEQ ID NO: 3040936 - RNA, 21 nt, Human
uuuuuguagcacugacagauu

SEQ ID NO: 3040937 - RNA, 20 nt, Human
uuuuuguagcacugacagau

SEQ ID NO: 3040938 - RNA, 20 nt, Human
auuauauggcuugaguuuaa

SEQ ID NO: 3040939 - RNA, 17 nt, Human
auuccaagugauugaaa

SEQ ID NO: 3040940 - RNA, 21 nt, Human
auucaggagaguagaacagau

SEQ ID NO: 3040941 - RNA, 22 nt, Human
auucaggagaguagaacagaua

SEQ ID NO: 3040942 - RNA, 14 nt, Human
auucagccuggcuu

SEQ ID NO: 3040943 - RNA, 15 nt, Human
auucagccuggcuuc

SEQ ID NO: 3040944 - RNA, 17 nt, Human
auuguacgaagaguauu

SEQ ID NO: 3040945 - RNA, 19 nt, Human
auugauguguuuauuuaua

SEQ ID NO: 3040946 - RNA, 12 nt, Human
auugauguguuu

SEQ ID NO: 3040947 - RNA, 18 nt, Human
auugaugggauuugguca

SEQ ID NO: 3040948 - RNA, 21 nt, Human
auuuggagacacaacuauuuu

SEQ ID NO: 3040949 - RNA, 19 nt, Human
auuugaauguuaagcagau

SEQ ID NO: 3040950 - RNA, 20 nt, Human
auuucuugagguaaaagcau

SEQ ID NO: 3040951 - RNA, 13 nt, Human
auuugaauguuaa

SEQ ID NO: 3040952 - RNA, 18 nt, Human
auuugaauguuaagcaga

SEQ ID NO: 3040953 - RNA, 23 nt, Human
auuugaauguaugcuucauacag

SEQ ID NO: 3040954 - RNA, 14 nt, Human
auuuccuaaauaua

SEQ ID NO: 3040955 - RNA, 21 nt, Human
auuuccuaaauauauuuuaag

SEQ ID NO: 3040956 - RNA, 15 nt, Human
auuuauaaacuuuuu

SEQ ID NO: 3040957 - RNA, 16 nt, Human
auuuaguguucauaaa

SEQ ID NO: 3040958 - RNA, 23 nt, Human
auuuauaaaaauaaaaaacacug

SEQ ID NO: 3040959 - RNA, 17 nt, Human
auuuaguguucauaaau

SEQ ID NO: 3040960 - RNA, 16 nt, Human
auuguaguccuguaau

SEQ ID NO: 3040961 - RNA, 18 nt, Human
auuguagagccagagguc

SEQ ID NO: 3040962 - RNA, 17 nt, Human
auuguagagccagaggu

SEQ ID NO: 3040963 - RNA, 15 nt, Human
auuuaaaauugugau

SEQ ID NO: 3040964 - RNA, 14 nt, Human
aacaggcucagagg

SEQ ID NO: 3040965 - RNA, 18 nt, Human
aaccuuuguuugcaucug

SEQ ID NO: 3040966 - RNA, 23 nt, Human
aaaucucaaauuuggauugcuaa

SEQ ID NO: 3040967 - RNA, 20 nt, Human
aaaagacaaggaaaaaauaa

SEQ ID NO: 3040968 - RNA, 17 nt, Human
aaaagauaaauauuaua

SEQ ID NO: 3040969 - RNA, 14 nt, Human
aaaagauaaauauu

SEQ ID NO: 3040970 - RNA, 19 nt, Human
aaaagagaugaugaaaaua

SEQ ID NO: 3040971 - RNA, 16 nt, Human
aaaagagaugaugaaa

SEQ ID NO: 3040972 - RNA, 13 nt, Human
aaagccugcaauu

SEQ ID NO: 3040973 - RNA, 18 nt, Human
aaagccugcaauuucaua

SEQ ID NO: 3040974 - RNA, 14 nt, Human
aagagagaaaauaa

SEQ ID NO: 3040975 - RNA, 21 nt, Human
aagacaaggaaaaaauaacaa

SEQ ID NO: 3040976 - RNA, 16 nt, Human
aagaguaguaauagag

SEQ ID NO: 3040977 - RNA, 19 nt, Human
aagaguauuuuugacagaa

SEQ ID NO: 3040978 - RNA, 19 nt, Human
aauaaacacucuugaaaaa

SEQ ID NO: 3040979 - RNA, 11 nt, Human
aauaaacacuc

SEQ ID NO: 3040980 - RNA, 16 nt, Human
aauaaacacucuugaa

SEQ ID NO: 3040981 - RNA, 20 nt, Human
aaugaauacuuuauaaagga

SEQ ID NO: 3040982 - RNA, 14 nt, Human
aaugaagcaaugcu

SEQ ID NO: 3040983 - RNA, 16 nt, Human
aaucucauaauuuaua

SEQ ID NO: 3040984 - RNA, 16 nt, Human
acccucaucuuucuuc

SEQ ID NO: 3040985 - RNA, 19 nt, Human
acccucaucuuucuuccaa

SEQ ID NO: 3040986 - RNA, 13 nt, Human
acccucaucuuuc

SEQ ID NO: 3040987 - RNA, 14 nt, Human
acccucaucuuucu

SEQ ID NO: 3040988 - RNA, 13 nt, Human
accggggccuggg

SEQ ID NO: 3040989 - RNA, 16 nt, Human
acugacagauuuccau

SEQ ID NO: 3040990 - RNA, 14 nt, Human
acugauuacugccu

SEQ ID NO: 3040991 - RNA, 17 nt, Human
acugauccagcccugag

SEQ ID NO: 3040992 - RNA, 16 nt, Human
acugauccagcccuga

SEQ ID NO: 3040993 - RNA, 15 nt, Human
acugccuauuuuaau

SEQ ID NO: 3040994 - RNA, 17 nt, Human
acuguaaaauaauaacu

SEQ ID NO: 3040995 - RNA, 16 nt, Human
acugucuuuuuucuaa

SEQ ID NO: 3040996 - RNA, 22 nt, Human
acugucuuuuuucuaaaguaaa

SEQ ID NO: 3040997 - RNA, 23 nt, Human
acugucuuuuuucuaaaguaaaa

SEQ ID NO: 3040998 - RNA, 12 nt, Human
acuugaaaauua

SEQ ID NO: 3040999 - RNA, 14 nt, Human
acuugaaaauuaac

SEQ ID NO: 3041000 - RNA, 20 nt, Human
acauaaguaauucaagaaaa

SEQ ID NO: 3041001 - RNA, 21 nt, Human
acauaaguaauucaagaaaac

SEQ ID NO: 3041002 - RNA, 20 nt, Human
acauaaguauuuaauucaug

SEQ ID NO: 3041003 - RNA, 23 nt, Human
acauguuucuuuguaaugaaaac

SEQ ID NO: 3041004 - RNA, 17 nt, Human
accaccagaagcccaga

SEQ ID NO: 3041005 - RNA, 16 nt, Human
accaccagaagcccag

SEQ ID NO: 3041006 - RNA, 15 nt, Human
accaccagaagccca

SEQ ID NO: 3041007 - RNA, 13 nt, Human
accaccagaagcc

SEQ ID NO: 3041008 - RNA, 18 nt, Human
accaagccuggucagccc

SEQ ID NO: 3041009 - RNA, 16 nt, Human
aauuucauaugcugua

SEQ ID NO: 3041010 - RNA, 18 nt, Human
aauuucauaugcuguaua

SEQ ID NO: 3041011 - RNA, 11 nt, Human
aauuguaauag

SEQ ID NO: 3041012 - RNA, 17 nt, Human
aauuauauaaguauucu

SEQ ID NO: 3041013 - RNA, 16 nt, Human
aauuauauaaguauuc

SEQ ID NO: 3041014 - RNA, 15 nt, Human
aauuauauaaguauu

SEQ ID NO: 3041015 - RNA, 14 nt, Human
aggcuagggugggg

SEQ ID NO: 3041016 - RNA, 15 nt, Human
aggcuagggugggga

SEQ ID NO: 3041017 - RNA, 16 nt, Human
aggcuaggguggggag

SEQ ID NO: 3041018 - RNA, 19 nt, Human
aggcuaggguggggagaga

SEQ ID NO: 3041019 - RNA, 22 nt, Human
aggcucuggagcccacuguacu

SEQ ID NO: 3041020 - RNA, 22 nt, Human
agggauuuggggcucagagugg

SEQ ID NO: 3041021 - RNA, 15 nt, Human
agggaugcauggaga

SEQ ID NO: 3041022 - RNA, 15 nt, Human
agggacugagaaauu

SEQ ID NO: 3041023 - RNA, 13 nt, Human
agggacugagaaa

SEQ ID NO: 3041024 - RNA, 14 nt, Human
agggacugagaaau

SEQ ID NO: 3041025 - RNA, 19 nt, Human
aggcaucggggagccggga

SEQ ID NO: 3041026 - RNA, 23 nt, Human
aggccagggggccagucccugag

SEQ ID NO: 3041027 - RNA, 19 nt, Human
aggccagggggccaguccc

SEQ ID NO: 3041028 - RNA, 22 nt, Human
aggcagaacucaucuagguaaa

SEQ ID NO: 3041029 - RNA, 20 nt, Human
aggagacagguuagcugcuc

SEQ ID NO: 3041030 - RNA, 15 nt, Human
aggagggaggugcuu

SEQ ID NO: 3041031 - RNA, 13 nt, Human
aggagggcaggca

SEQ ID NO: 3041032 - RNA, 15 nt, Human
aggagggcaggcauc

SEQ ID NO: 3041033 - RNA, 18 nt, Human
aggaguuucguuuucaaa

SEQ ID NO: 3041034 - RNA, 13 nt, Human
aggaugucugggc

SEQ ID NO: 3041035 - RNA, 13 nt, Human
agcuacaaaugca

SEQ ID NO: 3041036 - RNA, 12 nt, Human
agcuacaaaugc

SEQ ID NO: 3041037 - RNA, 13 nt, Human
agcgaauuuuaaa

SEQ ID NO: 3041038 - RNA, 16 nt, Human
agcgaauuuuaaaaga

SEQ ID NO: 3041039 - RNA, 15 nt, Human
agcgaauuuuaaaag

SEQ ID NO: 3041040 - RNA, 17 nt, Human
agccugcugccugcuuu

SEQ ID NO: 3041041 - RNA, 18 nt, Human
aggaaaaaauaacaauga

SEQ ID NO: 3041042 - RNA, 12 nt, Human
agagaggccauu

SEQ ID NO: 3041043 - RNA, 22 nt, Human
agagaggccauucuuucccaac

SEQ ID NO: 3041044 - RNA, 23 nt, Human
agagaggccauucuuucccaaca

SEQ ID NO: 3041045 - RNA, 19 nt, Human
agacaaggaaaaaauaaca

SEQ ID NO: 3041046 - RNA, 18 nt, Human
agacgaaacauuuguucu

SEQ ID NO: 3041047 - RNA, 13 nt, Human
agaacaucccucc

SEQ ID NO: 3041048 - RNA, 17 nt, Human
agaacaucccuccuggg

SEQ ID NO: 3041049 - RNA, 19 nt, Human
agaacagauaaucagugug

SEQ ID NO: 3041050 - RNA, 20 nt, Human
agaaugaggcugcuuuccaa

SEQ ID NO: 3041051 - RNA, 14 nt, Human
agaaugaggcugcu

SEQ ID NO: 3041052 - RNA, 13 nt, Human
agaaugaggcugc

SEQ ID NO: 3041053 - RNA, 12 nt, Human
agaaugaggcug

SEQ ID NO: 3041054 - RNA, 14 nt, Human
agcagugggccugg

SEQ ID NO: 3041055 - RNA, 22 nt, Human
agcccaaaccaccagaagccca

SEQ ID NO: 3041056 - RNA, 20 nt, Human
agcccaaaccaccagaagcc

SEQ ID NO: 3041057 - RNA, 19 nt, Human
agcccaaaccaccagaagc

SEQ ID NO: 3041058 - RNA, 17 nt, Human
agcccaaaccaccagaa

SEQ ID NO: 3041059 - RNA, 14 nt, Human
agccaagaggcugc

SEQ ID NO: 3041060 - RNA, 17 nt, Human
agccaacuauggccugu

SEQ ID NO: 3041061 - RNA, 13 nt, Human
agcaucucccagu

SEQ ID NO: 3041062 - RNA, 19 nt, Human
agauagccccacaggaggu

SEQ ID NO: 3041063 - RNA, 20 nt, Human
agauagauaggucagugcaa

SEQ ID NO: 3041064 - RNA, 19 nt, Human
agagugggguagguuggga

SEQ ID NO: 3041065 - RNA, 17 nt, Human
agauugagauguguuca

SEQ ID NO: 3041066 - RNA, 13 nt, Human
agcaaaauugaug

SEQ ID NO: 3041067 - RNA, 19 nt, Human
agcaaaauugauguguuua

SEQ ID NO: 3041068 - RNA, 23 nt, Human
agcaaaauugauguguuuauuua

SEQ ID NO: 3041069 - RNA, 20 nt, Human
augcauauuauuuuauguug

SEQ ID NO: 3041070 - RNA, 24 nt, Human
augcauauuauuuuauguugcaua

SEQ ID NO: 3041071 - RNA, 23 nt, Human
auggagauagccccacaggaggu

SEQ ID NO: 3041072 - RNA, 11 nt, Human
aucuaggauuu

SEQ ID NO: 3041073 - RNA, 19 nt, Human
aucuaggauuuuaagggaa

SEQ ID NO: 3041074 - RNA, 23 nt, Human
augaaguuuuuuuuauacaggau

SEQ ID NO: 3041075 - RNA, 13 nt, Human
augaaacuuggau

SEQ ID NO: 3041076 - RNA, 22 nt, Human
augaggcugcuuuccaaagcca

SEQ ID NO: 3041077 - RNA, 23 nt, Human
auccacuuuaucuugaauaaugu

SEQ ID NO: 3041078 - RNA, 21 nt, Human
auccagcccugaguuccuagc

SEQ ID NO: 3041079 - RNA, 18 nt, Human
aucaaagagagaaaauaa

SEQ ID NO: 3041080 - RNA, 20 nt, Human
aucaaagggugaaaauuauu

SEQ ID NO: 3041081 - RNA, 15 nt, Human
auaaaagacagugaa

SEQ ID NO: 3041082 - RNA, 16 nt, Human
auaaaagacagugaaa

SEQ ID NO: 3041083 - RNA, 22 nt, Human
auaaaaauauuguguugugaau

SEQ ID NO: 3041084 - RNA, 23 nt, Human
auaaaaauauuguguugugaaug

SEQ ID NO: 3041085 - RNA, 20 nt, Human
auaaaaagacauucuuccaa

SEQ ID NO: 3041086 - RNA, 14 nt, Human
auaaaaacaacuuu

SEQ ID NO: 3041087 - RNA, 20 nt, Human
aguuguucaauaauaaauau

SEQ ID NO: 3041088 - RNA, 19 nt, Human
auacuugaaaauuaacaug

SEQ ID NO: 3041089 - RNA, 17 nt, Human
auaaguaauucaagaaa

SEQ ID NO: 3041090 - RNA, 15 nt, Human
auaaguaaaugcuag

SEQ ID NO: 3041091 - RNA, 22 nt, Human
aguauauugauccagaaagaaa

SEQ ID NO: 3041092 - RNA, 13 nt, Human
agugaaugaaaca

SEQ ID NO: 3041093 - RNA, 16 nt, Human
cacaugagauaauaug

SEQ ID NO: 3041094 - RNA, 15 nt, Human
cacaugagauaauau

SEQ ID NO: 3041095 - RNA, 20 nt, Human
cacacguaaugaaacuugga

SEQ ID NO: 3041096 - RNA, 19 nt, Human
cacacguaaugaaacuugg

SEQ ID NO: 3041097 - RNA, 14 nt, Human
caccacacucagcc

SEQ ID NO: 3041098 - RNA, 19 nt, Human
caccacacugauccagccc

SEQ ID NO: 3041099 - RNA, 15 nt, Human
caccacacucagccc

SEQ ID NO: 3041100 - RNA, 18 nt, Human
caaauucugucucuggau

SEQ ID NO: 3041101 - RNA, 12 nt, Human
caaagaaauuau

SEQ ID NO: 3041102 - RNA, 13 nt, Human
caaagaaauuaug

SEQ ID NO: 3041103 - RNA, 13 nt, Human
caagagccugaga

SEQ ID NO: 3041104 - RNA, 11 nt, Human
caagagccuga

SEQ ID NO: 3041105 - RNA, 23 nt, Human
caagagccugagagugaggugga

SEQ ID NO: 3041106 - RNA, 20 nt, Human
caagcccaguucagcuuggg

SEQ ID NO: 3041107 - RNA, 13 nt, Human
ccaucagccucca

SEQ ID NO: 3041108 - RNA, 18 nt, Human
cccaaaccaccagaagcc

SEQ ID NO: 3041109 - RNA, 17 nt, Human
cccaaaccaccagaagc

SEQ ID NO: 3041110 - RNA, 22 nt, Human
cccaaaccaccagaagcccaga

SEQ ID NO: 3041111 - RNA, 16 nt, Human
ccagugaauucuugaa

SEQ ID NO: 3041112 - RNA, 20 nt, Human
ccagugaauucuugaaggaa

SEQ ID NO: 3041113 - RNA, 19 nt, Human
ccaggcuuuuuuaucaugu

SEQ ID NO: 3041114 - RNA, 17 nt, Human
ccagcuggggccaggcu

SEQ ID NO: 3041115 - RNA, 18 nt, Human
ccagcuggggccaggcug

SEQ ID NO: 3041116 - RNA, 19 nt, Human
ccagcuggggccaggcugg

SEQ ID NO: 3041117 - RNA, 20 nt, Human
ccagcuggggccaggcuggg

SEQ ID NO: 3041118 - RNA, 21 nt, Human
ccagcuggggccaggcugggu

SEQ ID NO: 3041119 - RNA, 22 nt, Human
ccagcuggggccaggcuggguc

SEQ ID NO: 3041120 - RNA, 23 nt, Human
ccagcuggggccaggcugggucg

SEQ ID NO: 3041121 - RNA, 13 nt, Human
cccaacaccucuu

SEQ ID NO: 3041122 - RNA, 14 nt, Human
ccaacacugccagc

SEQ ID NO: 3041123 - RNA, 15 nt, Human
ccaacacugccagca

SEQ ID NO: 3041124 - RNA, 16 nt, Human
ccaacacugccagcau

SEQ ID NO: 3041125 - RNA, 13 nt, Human
ccaacacugccag

SEQ ID NO: 3041126 - RNA, 16 nt, Human
ccaaaggcucucuccu

SEQ ID NO: 3041127 - RNA, 17 nt, Human
ccaaagcgaauuuuaaa

SEQ ID NO: 3041128 - RNA, 14 nt, Human
ccaaagccaaugug

SEQ ID NO: 3041129 - RNA, 16 nt, Human
ccaagaggcugcagcc

SEQ ID NO: 3041130 - RNA, 15 nt, Human
ccaagaggcugcagc

SEQ ID NO: 3041131 - RNA, 14 nt, Human
ccaagaggcugcag

SEQ ID NO: 3041132 - RNA, 19 nt, Human
ccaagccuuggcucuaccc

SEQ ID NO: 3041133 - RNA, 20 nt, Human
ccaagccuggucagcccaaa

SEQ ID NO: 3041134 - RNA, 19 nt, Human
ccaagccuggucagcccaa

SEQ ID NO: 3041135 - RNA, 16 nt, Human
ccaaacaggcucagag

SEQ ID NO: 3041136 - RNA, 19 nt, Human
cauugucccugaagagaag

SEQ ID NO: 3041137 - RNA, 23 nt, Human
cauuguauucagaguugaugguu

SEQ ID NO: 3041138 - RNA, 15 nt, Human
cauuuccuaaauaua

SEQ ID NO: 3041139 - RNA, 21 nt, Human
ccacgucagcugggacacccc

SEQ ID NO: 3041140 - RNA, 14 nt, Human
ccacgguguucugu

SEQ ID NO: 3041141 - RNA, 22 nt, Human
ccagaauaaacuggcagcucag

SEQ ID NO: 3041142 - RNA, 14 nt, Human
ccagaagcccagaa

SEQ ID NO: 3041143 - RNA, 13 nt, Human
ccagaagcccaga

SEQ ID NO: 3041144 - RNA, 12 nt, Human
ccagaagcccag

SEQ ID NO: 3041145 - RNA, 22 nt, Human
ccacacguaaugaaacuuggau

SEQ ID NO: 3041146 - RNA, 16 nt, Human
ccacacccucacugcu

SEQ ID NO: 3041147 - RNA, 20 nt, Human
ccacacagacuugggcaggg

SEQ ID NO: 3041148 - RNA, 15 nt, Human
ccuggaccagccucu

SEQ ID NO: 3041149 - RNA, 16 nt, Human
ccuggaccagccucuc

SEQ ID NO: 3041150 - RNA, 14 nt, Human
ccuggaccagccuc

SEQ ID NO: 3041151 - RNA, 17 nt, Human
ccuggacugugugcuca

SEQ ID NO: 3041152 - RNA, 20 nt, Human
ccuggacugugugcucagga

SEQ ID NO: 3041153 - RNA, 13 nt, Human
ccugggaggcucu

SEQ ID NO: 3041154 - RNA, 21 nt, Human
ccugggaggcucuggagccca

SEQ ID NO: 3041155 - RNA, 12 nt, Human
ccuggcggggug

SEQ ID NO: 3041156 - RNA, 20 nt, Human
ccugcuuuuuauggccugug

SEQ ID NO: 3041157 - RNA, 22 nt, Human
ccugugagcuaggaauuguguu

SEQ ID NO: 3041158 - RNA, 21 nt, Human
ccuugacaaagucaagccaca

SEQ ID NO: 3041159 - RNA, 23 nt, Human
ccuugacaaagucaagccacaug

SEQ ID NO: 3041160 - RNA, 19 nt, Human
cgucagcugggacaccccg

SEQ ID NO: 3041161 - RNA, 16 nt, Human
cguauaaaagccuguu

SEQ ID NO: 3041162 - RNA, 17 nt, Human
cguauaaaagccuguuu

SEQ ID NO: 3041163 - RNA, 21 nt, Human
cguauaaaagccuguuuaaga

SEQ ID NO: 3041164 - RNA, 22 nt, Human
cguauaaaagccuguuuaagag

SEQ ID NO: 3041165 - RNA, 22 nt, Human
cggcugggaggagggcaggcau

SEQ ID NO: 3041166 - RNA, 18 nt, Human
cggcugggaggagggcag

SEQ ID NO: 3041167 - RNA, 23 nt, Human
cggcugggaggagggcaggcauc

SEQ ID NO: 3041168 - RNA, 16 nt, Human
cgggagcucaggaacc

SEQ ID NO: 3041169 - RNA, 23 nt, Human
cgauugcaggagucccugccauc

SEQ ID NO: 3041170 - RNA, 21 nt, Human
cgauugcaggagucccugcca

SEQ ID NO: 3041171 - RNA, 14 nt, Human
ccuuugacaaaggu

SEQ ID NO: 3041172 - RNA, 23 nt, Human
ccucuccacucaugugacucuuu

SEQ ID NO: 3041173 - RNA, 14 nt, Human
ccuccucugcccgg

SEQ ID NO: 3041174 - RNA, 15 nt, Human
ccuccucugcccggg

SEQ ID NO: 3041175 - RNA, 17 nt, Human
ccuccugggaaugaagc

SEQ ID NO: 3041176 - RNA, 19 nt, Human
ccugaggcagguccccaga

SEQ ID NO: 3041177 - RNA, 15 nt, Human
ccugaggcagguccc

SEQ ID NO: 3041178 - RNA, 18 nt, Human
ccugaggcagguccccag

SEQ ID NO: 3041179 - RNA, 20 nt, Human
ccugaagcuaucguaaaauu

SEQ ID NO: 3041180 - RNA, 22 nt, Human
ccugaagcuaucguaaaauuaa

SEQ ID NO: 3041181 - RNA, 23 nt, Human
ccugaagcuaucguaaaauuaag

SEQ ID NO: 3041182 - RNA, 22 nt, Human
ccgacuuuuguuuaccagagaa

SEQ ID NO: 3041183 - RNA, 12 nt, Human
cuggaccagccu

SEQ ID NO: 3041184 - RNA, 21 nt, Human
cuggagcccacuguacuugcu

SEQ ID NO: 3041185 - RNA, 13 nt, Human
cuggagcccacug

SEQ ID NO: 3041186 - RNA, 15 nt, Human
cuggagcccacugua

SEQ ID NO: 3041187 - RNA, 16 nt, Human
cuggagcccacuguac

SEQ ID NO: 3041188 - RNA, 17 nt, Human
cuggagcccacuguacu

SEQ ID NO: 3041189 - RNA, 20 nt, Human
cuggagcccacuguacuugc

SEQ ID NO: 3041190 - RNA, 23 nt, Human
cuggaauaauccuaaacauauga

SEQ ID NO: 3041191 - RNA, 21 nt, Human
cuggaagugcuaauuuugaaa

SEQ ID NO: 3041192 - RNA, 17 nt, Human
cugcuuuccaaagccaa

SEQ ID NO: 3041193 - RNA, 15 nt, Human
cugcuuuccaaagcc

SEQ ID NO: 3041194 - RNA, 14 nt, Human
cuggcacagccugg

SEQ ID NO: 3041195 - RNA, 17 nt, Human
cuggauuauauuaugaa

SEQ ID NO: 3041196 - RNA, 22 nt, Human
cugggaggcucuggagcccacu

SEQ ID NO: 3041197 - RNA, 15 nt, Human
cugggaggcucugga

SEQ ID NO: 3041198 - RNA, 16 nt, Human
cugggaggcucuggag

SEQ ID NO: 3041199 - RNA, 10 nt, Human
cugggccccu

SEQ ID NO: 3041200 - RNA, 12 nt, Human
cugggccccugc

SEQ ID NO: 3041201 - RNA, 16 nt, Human
cugggccccugccucu

SEQ ID NO: 3041202 - RNA, 17 nt, Human
cugggccccugccucuc

SEQ ID NO: 3041203 - RNA, 20 nt, Human
cugccagcauuucccuuccu

SEQ ID NO: 3041204 - RNA, 16 nt, Human
cugccaggagacaggu

SEQ ID NO: 3041205 - RNA, 13 nt, Human
cugccuauuuuaa

SEQ ID NO: 3041206 - RNA, 14 nt, Human
cugccucucugcag

SEQ ID NO: 3041207 - RNA, 12 nt, Human
cugccucucugc

SEQ ID NO: 3041208 - RNA, 13 nt, Human
cugccucucugca

SEQ ID NO: 3041209 - RNA, 18 nt, Human
cugcagagcagugggccu

SEQ ID NO: 3041210 - RNA, 23 nt, Human
cugcagagcagugggccuggcca

SEQ ID NO: 3041211 - RNA, 21 nt, Human
cugcagagcagugggccuggc

SEQ ID NO: 3041212 - RNA, 21 nt, Human
cugcagagcugcgggcugggu

SEQ ID NO: 3041213 - RNA, 12 nt, Human
cugcagagcugc

SEQ ID NO: 3041214 - RNA, 23 nt, Human
cugcagccaggccacuggccccu

SEQ ID NO: 3041215 - RNA, 22 nt, Human
cugcagccaggccacuggcccc

SEQ ID NO: 3041216 - RNA, 17 nt, Human
cugcagccaggccacug

SEQ ID NO: 3041217 - RNA, 16 nt, Human
cugcagccaggccacu

SEQ ID NO: 3041218 - RNA, 15 nt, Human
cugcagccaggccac

SEQ ID NO: 3041219 - RNA, 20 nt, Human
cugcaauuucauaugcugua

SEQ ID NO: 3041220 - RNA, 18 nt, Human
cugcaauuucauaugcug

SEQ ID NO: 3041221 - RNA, 20 nt, Human
cugauccagcccugaguucc

SEQ ID NO: 3041222 - RNA, 22 nt, Human
cuccuuaaggcucuuuuguaag

SEQ ID NO: 3041223 - RNA, 13 nt, Human
cuccuuaaggcuc

SEQ ID NO: 3041224 - RNA, 17 nt, Human
cuccauugguguugaca

SEQ ID NO: 3041225 - RNA, 21 nt, Human
cuccacucuccucuuccaggc

SEQ ID NO: 3041226 - RNA, 15 nt, Human
cucauaauuuauaca

SEQ ID NO: 3041227 - RNA, 13 nt, Human
cucauaauuuaua

SEQ ID NO: 3041228 - RNA, 22 nt, Human
cucauaauuuauacaggucaua

SEQ ID NO: 3041229 - RNA, 20 nt, Human
cucagugucuggcugcagag

SEQ ID NO: 3041230 - RNA, 22 nt, Human
cucagugucuggcugcagagca

SEQ ID NO: 3041231 - RNA, 21 nt, Human
cucagugucuggcugcagagc

SEQ ID NO: 3041232 - RNA, 17 nt, Human
cucaucuccccaucauu

SEQ ID NO: 3041233 - RNA, 21 nt, Human
cucaucuagguaaauuacagu

SEQ ID NO: 3041234 - RNA, 15 nt, Human
cucauuccagaggaa

SEQ ID NO: 3041235 - RNA, 17 nt, Human
cucauuccagaggaagg

SEQ ID NO: 3041236 - RNA, 19 nt, Human
cucuccacucaugugacuc

SEQ ID NO: 3041237 - RNA, 12 nt, Human
cucucugcaggu

SEQ ID NO: 3041238 - RNA, 13 nt, Human
cucucugcagguc

SEQ ID NO: 3041239 - RNA, 14 nt, Human
cucucugcaggucc

SEQ ID NO: 3041240 - RNA, 16 nt, Human
cucucugcaggucccu

SEQ ID NO: 3041241 - RNA, 17 nt, Human
cucucugcaggucccua

SEQ ID NO: 3041242 - RNA, 19 nt, Human
cucucugcaggucccuaau

SEQ ID NO: 3041243 - RNA, 22 nt, Human
cucucugcaggucccuaauaaa

SEQ ID NO: 3041244 - RNA, 23 nt, Human
cucugcaggucccuaauaaagcu

SEQ ID NO: 3041245 - RNA, 22 nt, Human
cucugcaggucccuaauaaagc

SEQ ID NO: 3041246 - RNA, 14 nt, Human
cucuggaauuugaa

SEQ ID NO: 3041247 - RNA, 12 nt, Human
cucuggagccca

SEQ ID NO: 3041248 - RNA, 21 nt, Human
cugaagagaagggcagggcug

SEQ ID NO: 3041249 - RNA, 17 nt, Human
cucuugaacugagcuug

SEQ ID NO: 3041250 - RNA, 16 nt, Human
cucuugaacugagcuu

SEQ ID NO: 3041251 - RNA, 19 nt, Human
cucuugaacugagcuugga

SEQ ID NO: 3041252 - RNA, 22 nt, Human
cucuuggagccugcagagcugc

SEQ ID NO: 3041253 - RNA, 15 nt, Human
cucuuggagccugca

SEQ ID NO: 3041254 - RNA, 15 nt, Human
cucuggagcccacug

SEQ ID NO: 3041255 - RNA, 14 nt, Human
cuuccuuccucucc

SEQ ID NO: 3041256 - RNA, 15 nt, Human
cuuccaagagccuga

SEQ ID NO: 3041257 - RNA, 14 nt, Human
cuuccaagagccug

SEQ ID NO: 3041258 - RNA, 13 nt, Human
cuuauaauuuaaa

SEQ ID NO: 3041259 - RNA, 14 nt, Human
cuuauaauuuaaaa

SEQ ID NO: 3041260 - RNA, 15 nt, Human
cuuaugauugcagau

SEQ ID NO: 3041261 - RNA, 18 nt, Human
cuguuuugaaucucauaa

SEQ ID NO: 3041262 - RNA, 15 nt, Human
cuguuuacaguguuc

SEQ ID NO: 3041263 - RNA, 13 nt, Human
cuguuuacagugu

SEQ ID NO: 3041264 - RNA, 11 nt, Human
cuuaacuauuc

SEQ ID NO: 3041265 - RNA, 19 nt, Human
gaaaauaacaauaaaagac

SEQ ID NO: 3041266 - RNA, 17 nt, Human
cuuugacaaagguaaau

SEQ ID NO: 3041267 - RNA, 14 nt, Human
cuuucugucucucu

SEQ ID NO: 3041268 - RNA, 19 nt, Human
cuuugacaaagguaaauca

SEQ ID NO: 3041269 - RNA, 22 nt, Human
cuuugcauaacguauaaaagcc

SEQ ID NO: 3041270 - RNA, 19 nt, Human
cuugcucuugaugccuggc

SEQ ID NO: 3041271 - RNA, 17 nt, Human
cuugcucuugaugccug

SEQ ID NO: 3041272 - RNA, 18 nt, Human
cuugcucuugaugccugg

SEQ ID NO: 3041273 - RNA, 20 nt, Human
cuugcugcccugugcuccuc

SEQ ID NO: 3041274 - RNA, 20 nt, Human
cuugcuugauuguauggugg

SEQ ID NO: 3041275 - RNA, 15 nt, Human
cuuggaagcuucugg

SEQ ID NO: 3041276 - RNA, 17 nt, Human
cuuguacuuuauuuucu

SEQ ID NO: 3041277 - RNA, 20 nt, Human
gaagcguuguccucagcccc

SEQ ID NO: 3041278 - RNA, 13 nt, Human
gaagcguuguccu

SEQ ID NO: 3041279 - RNA, 19 nt, Human
gaagcguuguccucagccc

SEQ ID NO: 3041280 - RNA, 22 nt, Human
gaagggguaggauuacuaggug

SEQ ID NO: 3041281 - RNA, 17 nt, Human
gaauauuugaauguaug

SEQ ID NO: 3041282 - RNA, 18 nt, Human
gaauguaugcuucauaca

SEQ ID NO: 3041283 - RNA, 16 nt, Human
gaauguaugcuucaua

SEQ ID NO: 3041284 - RNA, 21 nt, Human
gaauguaugcuucauacaggg

SEQ ID NO: 3041285 - RNA, 15 nt, Human
gaauuguguuuauaa

SEQ ID NO: 3041286 - RNA, 23 nt, Human
gaauuguguuuauaauuuuaaau

SEQ ID NO: 3041287 - RNA, 23 nt, Human
gaauucuugaaggaaaaugauac

SEQ ID NO: 3041288 - RNA, 16 nt, Human
gaaauuguauuacaaa

SEQ ID NO: 3041289 - RNA, 16 nt, Human
gaaauuuauaaacuuu

SEQ ID NO: 3041290 - RNA, 17 nt, Human
gaaauuuauaaacuuuu

SEQ ID NO: 3041291 - RNA, 21 nt, Human
gaacagcggcuggacuuggag

SEQ ID NO: 3041292 - RNA, 14 nt, Human
gaacuacugaggau

SEQ ID NO: 3041293 - RNA, 17 nt, Human
gaagagaagggcagggc

SEQ ID NO: 3041294 - RNA, 21 nt, Human
gaacucaucuagguaaauuac

SEQ ID NO: 3041295 - RNA, 20 nt, Human
gaacucaucuagguaaauua

SEQ ID NO: 3041296 - RNA, 12 nt, Human
gaagagggcugc

SEQ ID NO: 3041297 - RNA, 18 nt, Human
gacuaaccccaccacacc

SEQ ID NO: 3041298 - RNA, 18 nt, Human
gaccuuccaagagccuga

SEQ ID NO: 3041299 - RNA, 17 nt, Human
gaccuuccaagagccug

SEQ ID NO: 3041300 - RNA, 16 nt, Human
gaccuuccaagagccu

SEQ ID NO: 3041301 - RNA, 11 nt, Human
gacugagaaau

SEQ ID NO: 3041302 - RNA, 13 nt, Human
gacugagaaauuu

SEQ ID NO: 3041303 - RNA, 12 nt, Human
gacccccuggag

SEQ ID NO: 3041304 - RNA, 17 nt, Human
gacauaaaaacaacuuu

SEQ ID NO: 3041305 - RNA, 18 nt, Human
gacuucccacggcuccuc

SEQ ID NO: 3041306 - RNA, 22 nt, Human
gaguguguaauuuaaaauugug

SEQ ID NO: 3041307 - RNA, 21 nt, Human
gaguguguaauuuaaaauugu

SEQ ID NO: 3041308 - RNA, 11 nt, Human
gaguucuacau

SEQ ID NO: 3041309 - RNA, 15 nt, Human
gauugggccccugcc

SEQ ID NO: 3041310 - RNA, 16 nt, Human
gauugggaauccgccc

SEQ ID NO: 3041311 - RNA, 22 nt, Human
gcaacuuuguauaaaagggacu

SEQ ID NO: 3041312 - RNA, 12 nt, Human
gcaaaugugaau

SEQ ID NO: 3041313 - RNA, 20 nt, Human
gcaaacuuuauuuuguguuu

SEQ ID NO: 3041314 - RNA, 18 nt, Human
gcaaacuuuauuuugugu

SEQ ID NO: 3041315 - RNA, 12 nt, Human
gcacagccuggc

SEQ ID NO: 3041316 - RNA, 19 nt, Human
gcacagccuggcuguggcc

SEQ ID NO: 3041317 - RNA, 15 nt, Human
gcaggagggaggugc

SEQ ID NO: 3041318 - RNA, 11 nt, Human
gcaggaggaag

SEQ ID NO: 3041319 - RNA, 20 nt, Human
gcaggaguuucguuuucaaa

SEQ ID NO: 3041320 - RNA, 21 nt, Human
gcaggaguuucguuuucaaaa

SEQ ID NO: 3041321 - RNA, 18 nt, Human
gcagauggaaugcugugu

SEQ ID NO: 3041322 - RNA, 19 nt, Human
gcagauuuugcccuugaca

SEQ ID NO: 3041323 - RNA, 15 nt, Human
gcaugaauuugugaa

SEQ ID NO: 3041324 - RNA, 17 nt, Human
gcaugaauuugugaagg

SEQ ID NO: 3041325 - RNA, 17 nt, Human
gcauuuuacuguacaga

SEQ ID NO: 3041326 - RNA, 16 nt, Human
gcauuuuacuguacag

SEQ ID NO: 3041327 - RNA, 23 nt, Human
gcauauuauuuuauguugcauag

SEQ ID NO: 3041328 - RNA, 18 nt, Human
gcauauuauuuuauguug

SEQ ID NO: 3041329 - RNA, 23 nt, Human
gcagguccccagacuccaccaag

SEQ ID NO: 3041330 - RNA, 12 nt, Human
gcaggucccuaa

SEQ ID NO: 3041331 - RNA, 13 nt, Human
gcaggucccuaau

SEQ ID NO: 3041332 - RNA, 14 nt, Human
gcagguccccagac

SEQ ID NO: 3041333 - RNA, 10 nt, Human
gcaggucccu

SEQ ID NO: 3041334 - RNA, 11 nt, Human
gcaggucccua

SEQ ID NO: 3041335 - RNA, 13 nt, Human
gccccgcguggaa

SEQ ID NO: 3041336 - RNA, 20 nt, Human
gccccugagaucucugcagg

SEQ ID NO: 3041337 - RNA, 22 nt, Human
gcccaucugggggccucuucug

SEQ ID NO: 3041338 - RNA, 14 nt, Human
gccacucaggccca

SEQ ID NO: 3041339 - RNA, 22 nt, Human
gccacucaggcccaaagccucg

SEQ ID NO: 3041340 - RNA, 19 nt, Human
gccgggagccugacccuca

SEQ ID NO: 3041341 - RNA, 13 nt, Human
gccgggagccuga

SEQ ID NO: 3041342 - RNA, 14 nt, Human
gccgggagccugac

SEQ ID NO: 3041343 - RNA, 21 nt, Human
gccgagaguccaucagccucc

SEQ ID NO: 3041344 - RNA, 17 nt, Human
gccuaaccugccgagag

SEQ ID NO: 3041345 - RNA, 17 nt, Human
gccuauuuuaauaaaca

SEQ ID NO: 3041346 - RNA, 16 nt, Human
gccucucugcaggucc

SEQ ID NO: 3041347 - RNA, 17 nt, Human
gccucucugcagguccc

SEQ ID NO: 3041348 - RNA, 10 nt, Human
gccucucugc

SEQ ID NO: 3041349 - RNA, 14 nt, Human
gccucucugcaggu

SEQ ID NO: 3041350 - RNA, 20 nt, Human
gccugcagagcugcgggcug

SEQ ID NO: 3041351 - RNA, 14 nt, Human
gcuaagaauauuug

SEQ ID NO: 3041352 - RNA, 17 nt, Human
ggaaggaucccaugagc

SEQ ID NO: 3041353 - RNA, 13 nt, Human
ggagcccugggag

SEQ ID NO: 3041354 - RNA, 12 nt, Human
ggagcccuggga

SEQ ID NO: 3041355 - RNA, 14 nt, Human
ggaggagggcaggc

SEQ ID NO: 3041356 - RNA, 15 nt, Human
ggaggagggcaggca

SEQ ID NO: 3041357 - RNA, 20 nt, Human
ggaggagggcaggcaucggg

SEQ ID NO: 3041358 - RNA, 16 nt, Human
ggagccgggagccuga

SEQ ID NO: 3041359 - RNA, 13 nt, Human
ggagggcaggcau

SEQ ID NO: 3041360 - RNA, 12 nt, Human
ggagggauuugg

SEQ ID NO: 3041361 - RNA, 15 nt, Human
ggauagaugugugga

SEQ ID NO: 3041362 - RNA, 14 nt, Human
ggauagaugugugg

SEQ ID NO: 3041363 - RNA, 13 nt, Human
ggauagaugugug

SEQ ID NO: 3041364 - RNA, 20 nt, Human
ggcagucugagagaggccau

SEQ ID NO: 3041365 - RNA, 18 nt, Human
ggccaggcugggucgccc

SEQ ID NO: 3041366 - RNA, 22 nt, Human
ggccaggcugggucgcccugga

SEQ ID NO: 3041367 - RNA, 21 nt, Human
ggccccugagaucucugcagg

SEQ ID NO: 3041368 - RNA, 17 nt, Human
ggccccugagaucucug

SEQ ID NO: 3041369 - RNA, 19 nt, Human
ggccccugccagacccccu

SEQ ID NO: 3041370 - RNA, 17 nt, Human
ggccccugccagacccc

SEQ ID NO: 3041371 - RNA, 17 nt, Human
ggaucccaugagcuccu

SEQ ID NO: 3041372 - RNA, 20 nt, Human
ggaucccaugagcuccuuaa

SEQ ID NO: 3041373 - RNA, 19 nt, Human
ggcagguccccagacucca

SEQ ID NO: 3041374 - RNA, 14 nt, Human
ggcagguccccaga

SEQ ID NO: 3041375 - RNA, 19 nt, Human
gcuucuaguucugccagga

SEQ ID NO: 3041376 - RNA, 20 nt, Human
gcuucuaguucugccaggag

SEQ ID NO: 3041377 - RNA, 21 nt, Human
gcuucuaguucugccaggaga

SEQ ID NO: 3041378 - RNA, 18 nt, Human
gcuucuaguucugccagg

SEQ ID NO: 3041379 - RNA, 19 nt, Human
gcuucuggugaccuuccaa

SEQ ID NO: 3041380 - RNA, 20 nt, Human
ggaaaaaauaacaaugaaag

SEQ ID NO: 3041381 - RNA, 14 nt, Human
gcuuuaucaaaggg

SEQ ID NO: 3041382 - RNA, 15 nt, Human
ggaaccgaggcaggg

SEQ ID NO: 3041383 - RNA, 16 nt, Human
ggaaccgaggcaggga

SEQ ID NO: 3041384 - RNA, 20 nt, Human
ggaaccgaggcagggaagga

SEQ ID NO: 3041385 - RNA, 17 nt, Human
ggaacucgugucuggca

SEQ ID NO: 3041386 - RNA, 17 nt, Human
gcugggaggagggcagg

SEQ ID NO: 3041387 - RNA, 19 nt, Human
gcugggaggagggcaggca

SEQ ID NO: 3041388 - RNA, 16 nt, Human
gcuggggccaggcugg

SEQ ID NO: 3041389 - RNA, 19 nt, Human
gcuggggccaggcuggguc

SEQ ID NO: 3041390 - RNA, 23 nt, Human
gcugggacaccccgacuuuuguu

SEQ ID NO: 3041391 - RNA, 15 nt, Human
gcugccuuuggacuu

SEQ ID NO: 3041392 - RNA, 20 nt, Human
gcugccuuuggacuuguccc

SEQ ID NO: 3041393 - RNA, 15 nt, Human
gggaaggaucccaug

SEQ ID NO: 3041394 - RNA, 20 nt, Human
gggaccccuggugguucacu

SEQ ID NO: 3041395 - RNA, 22 nt, Human
ggcuugaguuuaaauuguaaua

SEQ ID NO: 3041396 - RNA, 15 nt, Human
ggcugcuuuccaaag

SEQ ID NO: 3041397 - RNA, 16 nt, Human
ggcugcagccaggcca

SEQ ID NO: 3041398 - RNA, 22 nt, Human
ggcugcagccaggccacuggcc

SEQ ID NO: 3041399 - RNA, 20 nt, Human
ggccccugccagacccccug

SEQ ID NO: 3041400 - RNA, 13 nt, Human
ggcucuggagccc

SEQ ID NO: 3041401 - RNA, 14 nt, Human
ggcucuggagccca

SEQ ID NO: 3041402 - RNA, 18 nt, Human
gggcagucugagagaggc

SEQ ID NO: 3041403 - RNA, 19 nt, Human
gggcagucugagagaggcc

SEQ ID NO: 3041404 - RNA, 17 nt, Human
gggcagucugagagagg

SEQ ID NO: 3041405 - RNA, 23 nt, Human
gggaggugcuucuaguucugcca

SEQ ID NO: 3041406 - RNA, 13 nt, Human
gggacugagaaau

SEQ ID NO: 3041407 - RNA, 16 nt, Human
gggaguuuaggguggg

SEQ ID NO: 3041408 - RNA, 11 nt, Human
gggagugugua

SEQ ID NO: 3041409 - RNA, 14 nt, Human
gggauagaugugug

SEQ ID NO: 3041410 - RNA, 13 nt, Human
gggauagaugugu

SEQ ID NO: 3041411 - RNA, 13 nt, Human
gggccugggcagg

SEQ ID NO: 3041412 - RNA, 15 nt, Human
gggccugggcaggag

SEQ ID NO: 3041413 - RNA, 12 nt, Human
gggccugggcag

SEQ ID NO: 3041414 - RNA, 22 nt, Human
gggccccugccucucugcaggu

SEQ ID NO: 3041415 - RNA, 13 nt, Human
gggccccugccag

SEQ ID NO: 3041416 - RNA, 13 nt, Human
gggccccugccuc

SEQ ID NO: 3041417 - RNA, 15 nt, Human
gggccccugccucuc

SEQ ID NO: 3041418 - RNA, 17 nt, Human
gggccccugccucucug

SEQ ID NO: 3041419 - RNA, 18 nt, Human
gggccccugccucucugc

SEQ ID NO: 3041420 - RNA, 19 nt, Human
gggccccugccucucugca

SEQ ID NO: 3041421 - RNA, 21 nt, Human
gggccccugccucucugcagg

SEQ ID NO: 3041422 - RNA, 20 nt, Human
gggcagucugagagaggcca

SEQ ID NO: 3041423 - RNA, 21 nt, Human
gggcagucugagagaggccau

SEQ ID NO: 3041424 - RNA, 15 nt, Human
ggugguggcucggga

SEQ ID NO: 3041425 - RNA, 23 nt, Human
ggugguucacucuuggagccugc

SEQ ID NO: 3041426 - RNA, 22 nt, Human
ggugguucacucuuggagccug

SEQ ID NO: 3041427 - RNA, 21 nt, Human
gguguccugcaccggggccug

SEQ ID NO: 3041428 - RNA, 23 nt, Human
gguucacucuuggagccugcaga

SEQ ID NO: 3041429 - RNA, 21 nt, Human
gguucacucuuggagccugca

SEQ ID NO: 3041430 - RNA, 20 nt, Human
gguucacucuuggagccugc

SEQ ID NO: 3041431 - RNA, 19 nt, Human
gguucacucuuggagccug

SEQ ID NO: 3041432 - RNA, 19 nt, Human
ggugaccuuccaagagccu

SEQ ID NO: 3041433 - RNA, 21 nt, Human
ggugaccuuccaagagccuga

SEQ ID NO: 3041434 - RNA, 20 nt, Human
ggugaccuuccaagagccug

SEQ ID NO: 3041435 - RNA, 15 nt, Human
ggggcgcggcuggga

SEQ ID NO: 3041436 - RNA, 16 nt, Human
ggggcgcggcugggag

SEQ ID NO: 3041437 - RNA, 18 nt, Human
ggggcagucugagagagg

SEQ ID NO: 3041438 - RNA, 15 nt, Human
ggggcagucugagag

SEQ ID NO: 3041439 - RNA, 19 nt, Human
ggggcagucugagagaggc

SEQ ID NO: 3041440 - RNA, 16 nt, Human
gggccugggcaggagg

SEQ ID NO: 3041441 - RNA, 17 nt, Human
gggccugggcaggaggg

SEQ ID NO: 3041442 - RNA, 15 nt, Human
ggggaaaagagauga

SEQ ID NO: 3041443 - RNA, 15 nt, Human
gggggagagggcugc

SEQ ID NO: 3041444 - RNA, 20 nt, Human
gggguggggggggugcuggg

SEQ ID NO: 3041445 - RNA, 18 nt, Human
ggggugcugggccccugc

SEQ ID NO: 3041446 - RNA, 20 nt, Human
gggucuugguuccagccugc

SEQ ID NO: 3041447 - RNA, 17 nt, Human
gggugcugggccccugc

SEQ ID NO: 3041448 - RNA, 20 nt, Human
uagugauuuuuaugccaccu

SEQ ID NO: 3041449 - RNA, 21 nt, Human
uagugauuuuuaugccaccug

SEQ ID NO: 3041450 - RNA, 22 nt, Human
uagugauuuuuaugccaccuga

SEQ ID NO: 3041451 - RNA, 13 nt, Human
uaggcuagggugg

SEQ ID NO: 3041452 - RNA, 21 nt, Human
uauaauucagaaggaucuuca

SEQ ID NO: 3041453 - RNA, 20 nt, Human
uauaauucacauuguauuca

SEQ ID NO: 3041454 - RNA, 16 nt, Human
uauacccagaaaguua

SEQ ID NO: 3041455 - RNA, 18 nt, Human
uauauaaguauucuaaau

SEQ ID NO: 3041456 - RNA, 13 nt, Human
uauauuuuaagac

SEQ ID NO: 3041457 - RNA, 14 nt, Human
uauauuuuaagacg

SEQ ID NO: 3041458 - RNA, 21 nt, Human
uauauuucccugaaggaacca

SEQ ID NO: 3041459 - RNA, 15 nt, Human
uaucagcacgugugg

SEQ ID NO: 3041460 - RNA, 17 nt, Human
uaucaugugaaaucauu

SEQ ID NO: 3041461 - RNA, 22 nt, Human
uaucaugugaaaucauucauuu

SEQ ID NO: 3041462 - RNA, 11 nt, Human
uagaugugugg

SEQ ID NO: 3041463 - RNA, 16 nt, Human
uagccccacaggaggu

SEQ ID NO: 3041464 - RNA, 14 nt, Human
uaggaauuguguuu

SEQ ID NO: 3041465 - RNA, 18 nt, Human
uaggaacugcugggcuug

SEQ ID NO: 3041466 - RNA, 15 nt, Human
uaggaacugcugggc

SEQ ID NO: 3041467 - RNA, 13 nt, Human
uaauuuugaaaaa

SEQ ID NO: 3041468 - RNA, 17 nt, Human
uaauuuugaaaaacugc

SEQ ID NO: 3041469 - RNA, 14 nt, Human
uacaggauuugaaa

SEQ ID NO: 3041470 - RNA, 17 nt, Human
uacagcccaccuggcuu

SEQ ID NO: 3041471 - RNA, 23 nt, Human
uacauuuggagacacaacuauuu

SEQ ID NO: 3041472 - RNA, 22 nt, Human
uacgaagaguauuuuugacaga

SEQ ID NO: 3041473 - RNA, 20 nt, Human
uacgaagaguauuuuugaca

SEQ ID NO: 3041474 - RNA, 23 nt, Human
uacgaagaguauuuuugacagaa

SEQ ID NO: 3041475 - RNA, 19 nt, Human
uaccuuugacaaagguaaa

SEQ ID NO: 3041476 - RNA, 17 nt, Human
uagaacagauaaucagu

SEQ ID NO: 3041477 - RNA, 20 nt, Human
uacuugcucuugaugccugg

SEQ ID NO: 3041478 - RNA, 21 nt, Human
uacuugcucuugaugccuggc

SEQ ID NO: 3041479 - RNA, 14 nt, Human
uaaggcaaucaugg

SEQ ID NO: 3041480 - RNA, 15 nt, Human
uaaggcaaucauggu

SEQ ID NO: 3041481 - RNA, 19 nt, Human
uaagaucucagugguuaag

SEQ ID NO: 3041482 - RNA, 13 nt, Human
uaagaucucagug

SEQ ID NO: 3041483 - RNA, 15 nt, Human
uaagcaugcacaaau

SEQ ID NO: 3041484 - RNA, 19 nt, Human
uaauaaauauuuuugccau

SEQ ID NO: 3041485 - RNA, 15 nt, Human
uaauaacugugaagu

SEQ ID NO: 3041486 - RNA, 14 nt, Human
uaauauauuuccau

SEQ ID NO: 3041487 - RNA, 19 nt, Human
uaaugauaaguaaaugcua

SEQ ID NO: 3041488 - RNA, 19 nt, Human
uaauucuuugaccuguugg

SEQ ID NO: 3041489 - RNA, 23 nt, Human
uaauuaaauuuugaguucuacau

SEQ ID NO: 3041490 - RNA, 13 nt, Human
uaauuuuaagaaa

SEQ ID NO: 3041491 - RNA, 14 nt, Human
guuucuuuguaaug

SEQ ID NO: 3041492 - RNA, 17 nt, Human
guuucuuuguaaugaaa

SEQ ID NO: 3041493 - RNA, 16 nt, Human
guuuccuuauauuaug

SEQ ID NO: 3041494 - RNA, 19 nt, Human
gguugggagaaugucagua

SEQ ID NO: 3041495 - RNA, 13 nt, Human
guuuagcaguaua

SEQ ID NO: 3041496 - RNA, 16 nt, Human
guuuaguaaucauauu

SEQ ID NO: 3041497 - RNA, 12 nt, Human
uaaaaaacacug

SEQ ID NO: 3041498 - RNA, 15 nt, Human
uaaaaaagcugugug

SEQ ID NO: 3041499 - RNA, 11 nt, Human
uaaaaaacacu

SEQ ID NO: 3041500 - RNA, 14 nt, Human
uaaaguuuguugaa

SEQ ID NO: 3041501 - RNA, 17 nt, Human
uaaauaaaaauaauccu

SEQ ID NO: 3041502 - RNA, 14 nt, Human
uaaaggaauuuaaa

SEQ ID NO: 3041503 - RNA, 20 nt, Human
uaaacuuuuuucuuacuguc

SEQ ID NO: 3041504 - RNA, 20 nt, Human
uaaaucagacuaugaaguuu

SEQ ID NO: 3041505 - RNA, 16 nt, Human
uaaauauauuuuaaga

SEQ ID NO: 3041506 - RNA, 22 nt, Human
uaaauauauuuuaagacgaaac

SEQ ID NO: 3041507 - RNA, 18 nt, Human
uaaauauaugcuaagucu

SEQ ID NO: 3041508 - RNA, 22 nt, Human
uaaauaaaccucaaaaugucua

SEQ ID NO: 3041509 - RNA, 21 nt, Human
uaaacacucuugaaaaaugca

SEQ ID NO: 3041510 - RNA, 15 nt, Human
uaaaaugagaaaucu

SEQ ID NO: 3041511 - RNA, 16 nt, Human
uaaaaugagaaaucua

SEQ ID NO: 3041512 - RNA, 13 nt, Human
uaaaaugagaaau

SEQ ID NO: 3041513 - RNA, 17 nt, Human
uaaaagggacugagaaa

SEQ ID NO: 3041514 - RNA, 19 nt, Human
uaaaagggacugagaaauu

SEQ ID NO: 3041515 - RNA, 20 nt, Human
uaaaagggacugagaaauuu

SEQ ID NO: 3041516 - RNA, 21 nt, Human
uaaaagggacugagaaauuua

SEQ ID NO: 3041517 - RNA, 16 nt, Human
uaaaagaugcaaugua

SEQ ID NO: 3041518 - RNA, 18 nt, Human
ucacgccagacuucccac

SEQ ID NO: 3041519 - RNA, 22 nt, Human
ucagaguugaugguuguacaua

SEQ ID NO: 3041520 - RNA, 19 nt, Human
ucagaaaauauuauguguu

SEQ ID NO: 3041521 - RNA, 20 nt, Human
ucagaaaauauuauguguuu

SEQ ID NO: 3041522 - RNA, 17 nt, Human
ucagaaaauauuaugug

SEQ ID NO: 3041523 - RNA, 18 nt, Human
uauuugagaguucuaaau

SEQ ID NO: 3041524 - RNA, 19 nt, Human
uauuugagaguucuaaauu

SEQ ID NO: 3041525 - RNA, 15 nt, Human
uauuugagaguucua

SEQ ID NO: 3041526 - RNA, 16 nt, Human
uauuugagaguucuaa

SEQ ID NO: 3041527 - RNA, 15 nt, Human
uauuuuauguugcau

SEQ ID NO: 3041528 - RNA, 16 nt, Human
uauuuuauguugcaua

SEQ ID NO: 3041529 - RNA, 16 nt, Human
ucccccuccaccugcu

SEQ ID NO: 3041530 - RNA, 13 nt, Human
ucccuaauaaagc

SEQ ID NO: 3041531 - RNA, 11 nt, Human
ucccuaauaaa

SEQ ID NO: 3041532 - RNA, 12 nt, Human
ucccuaauaaag

SEQ ID NO: 3041533 - RNA, 22 nt, Human
uccccagacuccaccaagccug

SEQ ID NO: 3041534 - RNA, 17 nt, Human
uccaaagccaaugugaa

SEQ ID NO: 3041535 - RNA, 13 nt, Human
uccaagcaaaugu

SEQ ID NO: 3041536 - RNA, 16 nt, Human
ucauacauuguacgaa

SEQ ID NO: 3041537 - RNA, 15 nt, Human
ucauacauuguacga

SEQ ID NO: 3041538 - RNA, 13 nt, Human
ucauacauuguac

SEQ ID NO: 3041539 - RNA, 15 nt, Human
ucauaauuuauacag

SEQ ID NO: 3041540 - RNA, 15 nt, Human
ucauaauuauuauuu

SEQ ID NO: 3041541 - RNA, 13 nt, Human
ucaguuguacagu

SEQ ID NO: 3041542 - RNA, 16 nt, Human
uccuuaaggcucuuuu

SEQ ID NO: 3041543 - RNA, 19 nt, Human
uccuuaaggcucuuuugua

SEQ ID NO: 3041544 - RNA, 20 nt, Human
uccuucugugaaaguacauu

SEQ ID NO: 3041545 - RNA, 13 nt, Human
ucuaaauuugaau

SEQ ID NO: 3041546 - RNA, 17 nt, Human
ucuaaauuugaauguua

SEQ ID NO: 3041547 - RNA, 19 nt, Human
ucuaacaaaaaaauauauu

SEQ ID NO: 3041548 - RNA, 22 nt, Human
ucuaaauuugaauguuaagcag

SEQ ID NO: 3041549 - RNA, 23 nt, Human
ucuaaauuugaauguuaagcaga

SEQ ID NO: 3041550 - RNA, 23 nt, Human
ucuaaauuuuauaucuuguagcu

SEQ ID NO: 3041551 - RNA, 18 nt, Human
ucuaaauuuuauaucuug

SEQ ID NO: 3041552 - RNA, 21 nt, Human
ucucaaauuuggauugcuaau

SEQ ID NO: 3041553 - RNA, 17 nt, Human
ucuaguaugaaauuaua

SEQ ID NO: 3041554 - RNA, 15 nt, Human
ucuaguaugaaauua

SEQ ID NO: 3041555 - RNA, 11 nt, Human
ucucugcaggu

SEQ ID NO: 3041556 - RNA, 15 nt, Human
ucucucgugaguaua

SEQ ID NO: 3041557 - RNA, 22 nt, Human
ucucagugguuaagauuccuaa

SEQ ID NO: 3041558 - RNA, 19 nt, Human
ucuuuuguaagguuuuugu

SEQ ID NO: 3041559 - RNA, 22 nt, Human
ugaaaagaggugugcaagagag

SEQ ID NO: 3041560 - RNA, 13 nt, Human
ugaaaagaggugu

SEQ ID NO: 3041561 - RNA, 15 nt, Human
ugaaaucauucauuu

SEQ ID NO: 3041562 - RNA, 15 nt, Human
ugaacugagcuugga

SEQ ID NO: 3041563 - RNA, 12 nt, Human
ugaacugagcuu

SEQ ID NO: 3041564 - RNA, 16 nt, Human
ugaacugagcuuggaa

SEQ ID NO: 3041565 - RNA, 15 nt, Human
ucuugaacugagcuu

SEQ ID NO: 3041566 - RNA, 23 nt, Human
ucuggagcccacuguacuugcuc

SEQ ID NO: 3041567 - RNA, 13 nt, Human
ucugugugugugu

SEQ ID NO: 3041568 - RNA, 21 nt, Human
ucuguguguguguaugugggg

SEQ ID NO: 3041569 - RNA, 19 nt, Human
ucuguguguguguaugugg

SEQ ID NO: 3041570 - RNA, 18 nt, Human
ucuguguguguguaugug

SEQ ID NO: 3041571 - RNA, 15 nt, Human
ucuguguguguguau

SEQ ID NO: 3041572 - RNA, 20 nt, Human
ucuguguguuuaugugugug

SEQ ID NO: 3041573 - RNA, 19 nt, Human
ucuguguguuuaugugugu

SEQ ID NO: 3041574 - RNA, 22 nt, Human
ucuguguguguguauguggggg

SEQ ID NO: 3041575 - RNA, 16 nt, Human
ucuguguguuuaugug

SEQ ID NO: 3041576 - RNA, 15 nt, Human
ucuguguguuuaugu

SEQ ID NO: 3041577 - RNA, 18 nt, Human
ugcuucuaguucugccag

SEQ ID NO: 3041578 - RNA, 19 nt, Human
ugcuucuaguucugccagg

SEQ ID NO: 3041579 - RNA, 20 nt, Human
ugcuucuaguucugccagga

SEQ ID NO: 3041580 - RNA, 14 nt, Human
ugcuuuccaaagcc

SEQ ID NO: 3041581 - RNA, 21 nt, Human
uggaagugugggucugugugu

SEQ ID NO: 3041582 - RNA, 23 nt, Human
uggaagugugggucugugugugu

SEQ ID NO: 3041583 - RNA, 15 nt, Human
uggaauuauuuuaaa

SEQ ID NO: 3041584 - RNA, 17 nt, Human
uggaauuauuuuaaaag

SEQ ID NO: 3041585 - RNA, 13 nt, Human
uggagauguuuag

SEQ ID NO: 3041586 - RNA, 16 nt, Human
uggggcaggggccggg

SEQ ID NO: 3041587 - RNA, 18 nt, Human
uggggcaggggccggggg

SEQ ID NO: 3041588 - RNA, 19 nt, Human
ugggguggggggggugcug

SEQ ID NO: 3041589 - RNA, 21 nt, Human
ugggguggggggggugcuggg

SEQ ID NO: 3041590 - RNA, 22 nt, Human
ugggguggggggggugcugggc

SEQ ID NO: 3041591 - RNA, 17 nt, Human
ugcaggaaauggcugug

SEQ ID NO: 3041592 - RNA, 14 nt, Human
ugcucaggagcccu

SEQ ID NO: 3041593 - RNA, 16 nt, Human
ugcuagguuaauucca

SEQ ID NO: 3041594 - RNA, 23 nt, Human
ugcuagguuaauuccaauuauau

SEQ ID NO: 3041595 - RNA, 14 nt, Human
ugucacgccagacu

SEQ ID NO: 3041596 - RNA, 22 nt, Human
uguagcacugacagauuuccau

SEQ ID NO: 3041597 - RNA, 17 nt, Human
uguagcacugacagauu

SEQ ID NO: 3041598 - RNA, 16 nt, Human
uguagcacugacagau

SEQ ID NO: 3041599 - RNA, 17 nt, Human
uguagauaauacaguuc

SEQ ID NO: 3041600 - RNA, 20 nt, Human
uguaaaaugugaagugaaug

SEQ ID NO: 3041601 - RNA, 16 nt, Human
uguaaauuuaugugau

SEQ ID NO: 3041602 - RNA, 15 nt, Human
uguaaauuuauguga

SEQ ID NO: 3041603 - RNA, 16 nt, Human
ugugaaucauuuuacc

SEQ ID NO: 3041604 - RNA, 14 nt, Human
ugugcaagagaggg

SEQ ID NO: 3041605 - RNA, 18 nt, Human
ugugaggggcucucucau

SEQ ID NO: 3041606 - RNA, 14 nt, Human
ugucuuuuuucuaa

SEQ ID NO: 3041607 - RNA, 20 nt, Human
ugugaaguuuacauuguaaa

SEQ ID NO: 3041608 - RNA, 14 nt, Human
ugugaaguuuacau

SEQ ID NO: 3041609 - RNA, 13 nt, Human
ugugaaacauguu

SEQ ID NO: 3041610 - RNA, 14 nt, Human
ugucuggcugcaga

SEQ ID NO: 3041611 - RNA, 17 nt, Human
ugucuggcugcagagca

SEQ ID NO: 3041612 - RNA, 16 nt, Human
ugucuggcugcagagc

SEQ ID NO: 3041613 - RNA, 19 nt, Human
uguggaaaagccaagaggc

SEQ ID NO: 3041614 - RNA, 23 nt, Human
uguggaaaagccaagaggcugca

SEQ ID NO: 3041615 - RNA, 21 nt, Human
uguggaaaagccaagaggcug

SEQ ID NO: 3041616 - RNA, 20 nt, Human
ugugggucugugugugugua

SEQ ID NO: 3041617 - RNA, 16 nt, Human
ugugggucugugugug

SEQ ID NO: 3041618 - RNA, 14 nt, Human
ugugggucugugug

SEQ ID NO: 3041619 - RNA, 16 nt, Human
ugugggggucugugug

SEQ ID NO: 3041620 - RNA, 13 nt, Human
uguguaugugggg

SEQ ID NO: 3041621 - RNA, 14 nt, Human
uguguauguggggg

SEQ ID NO: 3041622 - RNA, 23 nt, Human
uguguaugugggggucugugugu

SEQ ID NO: 3041623 - RNA, 11 nt, Human
uguguguaugu

SEQ ID NO: 3041624 - RNA, 15 nt, Human
uguguuuaugugugu

SEQ ID NO: 3041625 - RNA, 13 nt, Human
uguguuuaugugu

SEQ ID NO: 3041626 - RNA, 22 nt, Human
uguguuuaggaacuacugagga

SEQ ID NO: 3041627 - RNA, 23 nt, Human
uguguugugugugggagugugua

SEQ ID NO: 3041628 - RNA, 14 nt, Human
uguguugugugugg

SEQ ID NO: 3041629 - RNA, 21 nt, Human
uguuuacagaggacaguauuu

SEQ ID NO: 3041630 - RNA, 14 nt, Human
uguuuacagaggac

SEQ ID NO: 3041631 - RNA, 12 nt, Human
uguucuauagcu

SEQ ID NO: 3041632 - RNA, 13 nt, Human
uguucauaaauaa

SEQ ID NO: 3041633 - RNA, 22 nt, Human
uuaaugucaauucuugccaaau

SEQ ID NO: 3041634 - RNA, 15 nt, Human
uuacagaggacagua

SEQ ID NO: 3041635 - RNA, 14 nt, Human
uuacauuuccuaaa

SEQ ID NO: 3041636 - RNA, 18 nt, Human
uuaaaagauaaauauuau

SEQ ID NO: 3041637 - RNA, 14 nt, Human
uuaaagacuuuuau

SEQ ID NO: 3041638 - RNA, 18 nt, Human
uguuuuaaaaugagaaau

SEQ ID NO: 3041639 - RNA, 12 nt, Human
uguuuuaaaaaa

SEQ ID NO: 3041640 - RNA, 23 nt, Human
uguuuuaaaaugagaaaucuaaa

SEQ ID NO: 3041641 - RNA, 20 nt, Human
uuggcaaacucuccaccaca

SEQ ID NO: 3041642 - RNA, 16 nt, Human
uuggcaaacucuccac

SEQ ID NO: 3041643 - RNA, 17 nt, Human
uuggauucugagagcug

SEQ ID NO: 3041644 - RNA, 15 nt, Human
uuggauucugagagc

SEQ ID NO: 3041645 - RNA, 19 nt, Human
uuggguggggggcuucaua

SEQ ID NO: 3041646 - RNA, 17 nt, Human
uuggguggggggcuuca

SEQ ID NO: 3041647 - RNA, 22 nt, Human
uuggguggggggcuucauacac

SEQ ID NO: 3041648 - RNA, 21 nt, Human
uuggguggggggcuucauaca

SEQ ID NO: 3041649 - RNA, 20 nt, Human
uuggguggggggcuucauac

SEQ ID NO: 3041650 - RNA, 12 nt, Human
uugguaaaccuu

SEQ ID NO: 3041651 - RNA, 14 nt, Human
uugguaaaccuuuu

SEQ ID NO: 3041652 - RNA, 23 nt, Human
uuggcaaacucuccaccacacgu

SEQ ID NO: 3041653 - RNA, 14 nt, Human
uuguauucagaguu

SEQ ID NO: 3041654 - RNA, 14 nt, Human
uuguauuacaaauc

SEQ ID NO: 3041655 - RNA, 16 nt, Human
uuguaaaggaauuuaa

SEQ ID NO: 3041656 - RNA, 18 nt, Human
uuguaaauaaaggaacca

SEQ ID NO: 3041657 - RNA, 14 nt, Human
uucugagcauuuaa

SEQ ID NO: 3041658 - RNA, 15 nt, Human
uugaaucucauaauu

SEQ ID NO: 3041659 - RNA, 21 nt, Human
uugaaucucauaauuuauaca

SEQ ID NO: 3041660 - RNA, 16 nt, Human
uugaacugagcuugga

SEQ ID NO: 3041661 - RNA, 15 nt, Human
uugaacugagcuugg

SEQ ID NO: 3041662 - RNA, 15 nt, Human
uugaaaaaugcaugu

SEQ ID NO: 3041663 - RNA, 14 nt, Human
uugcauagaauaaa

SEQ ID NO: 3041664 - RNA, 18 nt, Human
uugaauguaugcuucaua

SEQ ID NO: 3041665 - RNA, 14 nt, Human
uucacucuuggagc

SEQ ID NO: 3041666 - RNA, 19 nt, Human
uucacucuuggagccugca

SEQ ID NO: 3041667 - RNA, 18 nt, Human
uucacucuuggagccugc

SEQ ID NO: 3041668 - RNA, 23 nt, Human
uucaaauuguaagcaugcacaaa

SEQ ID NO: 3041669 - RNA, 16 nt, Human
uuccagccugccacuc

SEQ ID NO: 3041670 - RNA, 21 nt, Human
uuccauccuagucacuaccuu

SEQ ID NO: 3041671 - RNA, 14 nt, Human
uuccagccugccac

SEQ ID NO: 3041672 - RNA, 12 nt, Human
uuccagccugcc

SEQ ID NO: 3041673 - RNA, 17 nt, Human
uucaucugacuaugaca

SEQ ID NO: 3041674 - RNA, 20 nt, Human
uucaucugacuaugacauaa

SEQ ID NO: 3041675 - RNA, 15 nt, Human
uucaucuaggauuuu

SEQ ID NO: 3041676 - RNA, 22 nt, Human
uuccuagccaccgccuccuaca

SEQ ID NO: 3041677 - RNA, 20 nt, Human
uuccuagguauaauucacau

SEQ ID NO: 3041678 - RNA, 14 nt, Human
uuccuagccaccgc

SEQ ID NO: 3041679 - RNA, 21 nt, Human
uuccuagccaccgccuccuac

SEQ ID NO: 3041680 - RNA, 15 nt, Human
uuccuagccaccgcc

SEQ ID NO: 3041681 - RNA, 17 nt, Human
uuccuucugugaaagua

SEQ ID NO: 3041682 - RNA, 20 nt, Human
uuccuucugugaaaguacau

SEQ ID NO: 3041683 - RNA, 20 nt, Human
uuuuuuauacaggaugauga

SEQ ID NO: 3041684 - RNA, 13 nt, Human
uuuugaaaaacug

SEQ ID NO: 3041685 - RNA, 22 nt, Human
uuuaugauacuugaaaauuaac

SEQ ID NO: 3041686 - RNA, 14 nt, Human
uuuaugcauauuau

SEQ ID NO: 3041687 - RNA, 15 nt, Human
uuuacauuguaaaua

SEQ ID NO: 3041688 - RNA, 13 nt, Human
uuuacauuguaaa

SEQ ID NO: 3041689 - RNA, 17 nt, Human
uuuagaagaaguguguc

SEQ ID NO: 3041690 - RNA, 19 nt, Human
uuuagaagaagugugucac

SEQ ID NO: 3041691 - RNA, 14 nt, Human
uuuccaaaauaauu

SEQ ID NO: 3041692 - RNA, 15 nt, Human
uuucagcagcugcag

SEQ ID NO: 3041693 - RNA, 16 nt, Human
uuuuaugauacuugaa

SEQ ID NO: 3041694 - RNA, 20 nt, Human
uuuuaugauacuugaaaauu

SEQ ID NO: 3041695 - RNA, 14 nt, Human
uuuuacuguacaga

SEQ ID NO: 3041696 - RNA, 22 nt, Human
uuuuaaaaugagaaaucuaaaa

SEQ ID NO: 3041697 - RNA, 15 nt, Human
uuuuaaaaugagaaa

SEQ ID NO: 3041698 - RNA, 16 nt, Human
uuuucagaaaauauua

SEQ ID NO: 3041699 - RNA, 15 nt, Human
uuuucagaaaauauu

SEQ ID NO: 3041700 - RNA, 13 nt, Human
uuuucacauaucu

SEQ ID NO: 3041701 - RNA, 16 nt, Human
uuuucacauaucuagu

SEQ ID NO: 3041702 - RNA, 13 nt, Human
uuuguucauacau

SEQ ID NO: 3041703 - RNA, 16 nt, Human
uuuguucauacauauu

SEQ ID NO: 3041704 - RNA, 22 nt, Human
uuucuuacugucuuuuuucuaa

SEQ ID NO: 3041705 - RNA, 16 nt, Human
uuugagguggaagagg

SEQ ID NO: 3041706 - RNA, 23 nt, Human
uuuggaacaagaugguucuagca

SEQ ID NO: 3041707 - RNA, 19 nt, Human
uuugcauaacguauaaaag

SEQ ID NO: 3041708 - RNA, 23 nt, Human
uuugcauaacguauaaaagccug

SEQ ID NO: 3041709 - RNA, 13 nt, Human
uuuuuucuuacug

SEQ ID NO: 3041710 - RNA, 17 nt, Human
gcggcugggaggagggc

SEQ ID NO: 3041711 - RNA, 18 nt, Human
gcggcugggaggagggca

SEQ ID NO: 3041712 - RNA, 19 nt, Human
gcggcugggaggagggcag

SEQ ID NO: 3041713 - RNA, 22 nt, Human
gcggcugggaggagggcaggca

SEQ ID NO: 3041714 - RNA, 13 nt, Human
gcggcugggagga

SEQ ID NO: 3041715 - RNA, 14 nt, Human
gcggcugggaggag

SEQ ID NO: 3041716 - RNA, 18 nt, Human
gcuaauuuugaaaaacug

SEQ ID NO: 3041717 - RNA, 18 nt, Human
gcuacuguaaggcaauca

SEQ ID NO: 3041718 - RNA, 19 nt, Human
gcuacuguaaggcaaucau

SEQ ID NO: 3041719 - RNA, 11 nt, Human
gcccuaucugu

SEQ ID NO: 3041720 - RNA, 17 nt, Human
gccccugccucucugca

SEQ ID NO: 3041721 - RNA, 18 nt, Human
gccccugccucucugcag

SEQ ID NO: 3041722 - RNA, 15 nt, Human
gccccugccucucug

SEQ ID NO: 3041723 - RNA, 16 nt, Human
gccccugccucucugc

SEQ ID NO: 3041724 - RNA, 23 nt, Human
gccaguggcuggaucugugaggg

SEQ ID NO: 3041725 - RNA, 14 nt, Human
gccaguggcuggau

SEQ ID NO: 3041726 - RNA, 14 nt, Human
gccaggauggaaug

SEQ ID NO: 3041727 - RNA, 18 nt, Human
gcuccucgagaucccaac

SEQ ID NO: 3041728 - RNA, 15 nt, Human
gcucuggagcccacu

SEQ ID NO: 3041729 - RNA, 16 nt, Human
gcucuggagcccacug

SEQ ID NO: 3041730 - RNA, 14 nt, Human
gcugaggccucuca

SEQ ID NO: 3041731 - RNA, 17 nt, Human
gcucuggagcccacugu

SEQ ID NO: 3041732 - RNA, 17 nt, Human
gcucugugcccacccuc

SEQ ID NO: 3041733 - RNA, 13 nt, Human
gcugcuccccacg

SEQ ID NO: 3041734 - RNA, 22 nt, Human
gcugcuccccacgucagcuggg

SEQ ID NO: 3041735 - RNA, 20 nt, Human
gcugcagagcagugggccug

SEQ ID NO: 3041736 - RNA, 21 nt, Human
gcugcagagcagugggccugg

SEQ ID NO: 3041737 - RNA, 19 nt, Human
gcuuuccucaucaggccau

SEQ ID NO: 3041738 - RNA, 22 nt, Human
gcuuugagguggaagagggcug

SEQ ID NO: 3041739 - RNA, 19 nt, Human
gcuuugagguggaagaggg

SEQ ID NO: 3041740 - RNA, 13 nt, Human
gcuggaucuguga

SEQ ID NO: 3041741 - RNA, 20 nt, Human
gcuguagacauuugcuauga

SEQ ID NO: 3041742 - RNA, 16 nt, Human
gcuucaaauuguaagc

SEQ ID NO: 3041743 - RNA, 15 nt, Human
ggaacugcugggcuu

SEQ ID NO: 3041744 - RNA, 14 nt, Human
ggaacugcugggcu

SEQ ID NO: 3041745 - RNA, 15 nt, Human
gcuuuuuuaucaugu

SEQ ID NO: 3041746 - RNA, 18 nt, Human
gcuuuuuuaucaugugaa

SEQ ID NO: 3041747 - RNA, 20 nt, Human
gcuuuuuuaucaugugaaau

SEQ ID NO: 3041748 - RNA, 22 nt, Human
ggcgaagcguuguccucagccc

SEQ ID NO: 3041749 - RNA, 16 nt, Human
ggccuugaguccccca

SEQ ID NO: 3041750 - RNA, 20 nt, Human
ggccuguggaucaaauccag

SEQ ID NO: 3041751 - RNA, 22 nt, Human
ggcauccagagucccugccugg

SEQ ID NO: 3041752 - RNA, 18 nt, Human
ggcauuuuacuguacaga

SEQ ID NO: 3041753 - RNA, 17 nt, Human
ggcauauuuuucacaua

SEQ ID NO: 3041754 - RNA, 15 nt, Human
ggcauauuuuucaca

SEQ ID NO: 3041755 - RNA, 15 nt, Human
ggcacuggggcaggg

SEQ ID NO: 3041756 - RNA, 19 nt, Human
ggccaguggcuggaucugu

SEQ ID NO: 3041757 - RNA, 17 nt, Human
ggcccugugccuuggug

SEQ ID NO: 3041758 - RNA, 13 nt, Human
ggcacagccuggc

SEQ ID NO: 3041759 - RNA, 12 nt, Human
ggcacagccugg

SEQ ID NO: 3041760 - RNA, 22 nt, Human
ggaucuucaucugacuaugaca

SEQ ID NO: 3041761 - RNA, 22 nt, Human
ggagcccacuguacuugcucuu

SEQ ID NO: 3041762 - RNA, 21 nt, Human
ggagguagcuuugagguggaa

SEQ ID NO: 3041763 - RNA, 14 nt, Human
aaaagggaggggga

SEQ ID NO: 3041764 - RNA, 19 nt, Human
aaaagggacugagaaauuu

SEQ ID NO: 3041765 - RNA, 15 nt, Human
gggauugggccccug

SEQ ID NO: 3041766 - RNA, 15 nt, Human
aaaagaugcaaugua

SEQ ID NO: 3041767 - RNA, 19 nt, Human
gggagaaugucaguaugug

SEQ ID NO: 3041768 - RNA, 22 nt, Human
gggagaaugucaguauguggaa

SEQ ID NO: 3041769 - RNA, 22 nt, Human
gggaggcucuggagcccacugu

SEQ ID NO: 3041770 - RNA, 14 nt, Human
gggaugucucucau

SEQ ID NO: 3041771 - RNA, 16 nt, Human
gggaugguguucaaaa

SEQ ID NO: 3041772 - RNA, 15 nt, Human
aaaacccagauaaag

SEQ ID NO: 3041773 - RNA, 19 nt, Human
aaaaauauauuuaaugaua

SEQ ID NO: 3041774 - RNA, 13 nt, Human
aaaaauauauuua

SEQ ID NO: 3041775 - RNA, 15 nt, Human
aaaaauauauuuaau

SEQ ID NO: 3041776 - RNA, 22 nt, Human
gggcccuggugguggcucggga

SEQ ID NO: 3041777 - RNA, 13 nt, Human
gggccaggcuggg

SEQ ID NO: 3041778 - RNA, 21 nt, Human
gggccaggcugggucgcccug

SEQ ID NO: 3041779 - RNA, 14 nt, Human
gggccaggcugggu

SEQ ID NO: 3041780 - RNA, 15 nt, Human
gggccaggcuggguc

SEQ ID NO: 3041781 - RNA, 18 nt, Human
gggccagucccugaggca

SEQ ID NO: 3041782 - RNA, 21 nt, Human
gggccagucccugaggcaggu

SEQ ID NO: 3041783 - RNA, 12 nt, Human
aaaaugugaagu

SEQ ID NO: 3041784 - RNA, 18 nt, Human
gggcucagagugggguag

SEQ ID NO: 3041785 - RNA, 20 nt, Human
aaacaagcacuaaacaaaga

SEQ ID NO: 3041786 - RNA, 17 nt, Human
aaacaccggguuccagc

SEQ ID NO: 3041787 - RNA, 23 nt, Human
ggguguccugcaccggggccugg

SEQ ID NO: 3041788 - RNA, 15 nt, Human
ggguggggggggugc

SEQ ID NO: 3041789 - RNA, 18 nt, Human
ggguggggggggugcugg

SEQ ID NO: 3041790 - RNA, 17 nt, Human
gguagcuuugaggugga

SEQ ID NO: 3041791 - RNA, 21 nt, Human
ggugcuucuaguucugccagg

SEQ ID NO: 3041792 - RNA, 17 nt, Human
aaagcaggcagaacuca

SEQ ID NO: 3041793 - RNA, 19 nt, Human
aaagcaggcagaacucauc

SEQ ID NO: 3041794 - RNA, 21 nt, Human
ggucuguguguguguaugugg

SEQ ID NO: 3041795 - RNA, 20 nt, Human
ggucuguguguguguaugug

SEQ ID NO: 3041796 - RNA, 20 nt, Human
ggugcugggccccugccucu

SEQ ID NO: 3041797 - RNA, 19 nt, Human
ggugcugggccccugccuc

SEQ ID NO: 3041798 - RNA, 20 nt, Human
ggucgcccuggacugugugc

SEQ ID NO: 3041799 - RNA, 17 nt, Human
ggucuguguguguguau

SEQ ID NO: 3041800 - RNA, 11 nt, Human
ggucugugugu

SEQ ID NO: 3041801 - RNA, 13 nt, Human
aaagauuuucaga

SEQ ID NO: 3041802 - RNA, 16 nt, Human
aaaguuuguugaaaca

SEQ ID NO: 3041803 - RNA, 23 nt, Human
aaaguuauugauaaguucauaca

SEQ ID NO: 3041804 - RNA, 17 nt, Human
guaacaaugaagauaaa

SEQ ID NO: 3041805 - RNA, 17 nt, Human
guaaauuuaugugaugg

SEQ ID NO: 3041806 - RNA, 16 nt, Human
guaaauuuaugugaug

SEQ ID NO: 3041807 - RNA, 12 nt, Human
guaaaaugugaa

SEQ ID NO: 3041808 - RNA, 19 nt, Human
guaaaaugugaagugaaug

SEQ ID NO: 3041809 - RNA, 20 nt, Human
guaaaaugugaagugaauga

SEQ ID NO: 3041810 - RNA, 22 nt, Human
guaaaaugugaagugaaugaaa

SEQ ID NO: 3041811 - RNA, 17 nt, Human
gguggggggggugcugg

SEQ ID NO: 3041812 - RNA, 16 nt, Human
aaagccuguuuaagag

SEQ ID NO: 3041813 - RNA, 18 nt, Human
aaagccuguuuaagagac

SEQ ID NO: 3041814 - RNA, 12 nt, Human
gaucccaacacu

SEQ ID NO: 3041815 - RNA, 16 nt, Human
gaucccaacacugcca

SEQ ID NO: 3041816 - RNA, 23 nt, Human
gaucucagugguuaagauuccua

SEQ ID NO: 3041817 - RNA, 18 nt, Human
gauuacugccuauuuuaa

SEQ ID NO: 3041818 - RNA, 13 nt, Human
gaguccaucagcc

SEQ ID NO: 3041819 - RNA, 14 nt, Human
gaguccaucagccu

SEQ ID NO: 3041820 - RNA, 15 nt, Human
gaguccaucagccuc

SEQ ID NO: 3041821 - RNA, 16 nt, Human
gaguccaucagccucc

SEQ ID NO: 3041822 - RNA, 18 nt, Human
gagugaggaugucugggc

SEQ ID NO: 3041823 - RNA, 14 nt, Human
gaguuuaggguggg

SEQ ID NO: 3041824 - RNA, 15 nt, Human
gaguuuagggugggg

SEQ ID NO: 3041825 - RNA, 16 nt, Human
gaguuuaaauuguaau

SEQ ID NO: 3041826 - RNA, 19 nt, Human
gaguggacuguucccugag

SEQ ID NO: 3041827 - RNA, 13 nt, Human
gaguuggcuggga

SEQ ID NO: 3041828 - RNA, 16 nt, Human
gauacuugaaaauuaa

SEQ ID NO: 3041829 - RNA, 20 nt, Human
gcaccggggccugggcagga

SEQ ID NO: 3041830 - RNA, 19 nt, Human
gcaccggggccugggcagg

SEQ ID NO: 3041831 - RNA, 13 nt, Human
gauucugagagcu

SEQ ID NO: 3041832 - RNA, 21 nt, Human
gcagagcagugggccuggcca

SEQ ID NO: 3041833 - RNA, 12 nt, Human
gcacugacagau

SEQ ID NO: 3041834 - RNA, 17 nt, Human
gcacugacagauuucca

SEQ ID NO: 3041835 - RNA, 22 nt, Human
gcauaacguauaaaagccuguu

SEQ ID NO: 3041836 - RNA, 16 nt, Human
gacagguuagcugcuc

SEQ ID NO: 3041837 - RNA, 15 nt, Human
gacaguauuuguggg

SEQ ID NO: 3041838 - RNA, 16 nt, Human
gacagaauauguuuca

SEQ ID NO: 3041839 - RNA, 23 nt, Human
gaauuuuaaaagaugcaauguag

SEQ ID NO: 3041840 - RNA, 21 nt, Human
gaauuuuaaaagaugcaaugu

SEQ ID NO: 3041841 - RNA, 15 nt, Human
gaauuuuaaaagaug

SEQ ID NO: 3041842 - RNA, 12 nt, Human
gaauuuuaaaag

SEQ ID NO: 3041843 - RNA, 20 nt, Human
gaauuugugaagguggaaau

SEQ ID NO: 3041844 - RNA, 19 nt, Human
gaagugugggucugugugu

SEQ ID NO: 3041845 - RNA, 18 nt, Human
gaagugugggucugugug

SEQ ID NO: 3041846 - RNA, 17 nt, Human
gaagugugggucugugu

SEQ ID NO: 3041847 - RNA, 15 nt, Human
gaaggcuauggggau

SEQ ID NO: 3041848 - RNA, 19 nt, Human
gaagggcagggcugaggcc

SEQ ID NO: 3041849 - RNA, 13 nt, Human
gacuaugacauaa

SEQ ID NO: 3041850 - RNA, 18 nt, Human
gacuuuugaaaagaggug

SEQ ID NO: 3041851 - RNA, 22 nt, Human
gagacguuuuuggaagaguagu

SEQ ID NO: 3041852 - RNA, 23 nt, Human
gagacuaaccccaccacacccuc

SEQ ID NO: 3041853 - RNA, 19 nt, Human
gagcuggggaugucucuca

SEQ ID NO: 3041854 - RNA, 19 nt, Human
gagaugaugaaaauauuua

SEQ ID NO: 3041855 - RNA, 20 nt, Human
gagaugaugaaaauauuuaa

SEQ ID NO: 3041856 - RNA, 14 nt, Human
gagauguagccccu

SEQ ID NO: 3041857 - RNA, 18 nt, Human
cuggggccaggcuggguc

SEQ ID NO: 3041858 - RNA, 22 nt, Human
cuggggaugucucucaugacca

SEQ ID NO: 3041859 - RNA, 17 nt, Human
cuggggaugucucucau

SEQ ID NO: 3041860 - RNA, 16 nt, Human
cuggggauugggcccc

SEQ ID NO: 3041861 - RNA, 22 nt, Human
cuggggauugggccccugccag

SEQ ID NO: 3041862 - RNA, 18 nt, Human
cuggggauugggccccug

SEQ ID NO: 3041863 - RNA, 16 nt, Human
cuggcuccaggccagg

SEQ ID NO: 3041864 - RNA, 17 nt, Human
cuggagacuaaccccac

SEQ ID NO: 3041865 - RNA, 16 nt, Human
cuggacugugugcuca

SEQ ID NO: 3041866 - RNA, 21 nt, Human
cuguacuugcucuugaugccu

SEQ ID NO: 3041867 - RNA, 22 nt, Human
cuguacuugcucuugaugccug

SEQ ID NO: 3041868 - RNA, 23 nt, Human
cuguacuugcucuugaugccugg

SEQ ID NO: 3041869 - RNA, 22 nt, Human
cugccaucauguuuacagagga

SEQ ID NO: 3041870 - RNA, 17 nt, Human
cugccaucauguuuaca

SEQ ID NO: 3041871 - RNA, 23 nt, Human
cugccaucauguuuacagaggac

SEQ ID NO: 3041872 - RNA, 18 nt, Human
cugcuuuuuauggccugu

SEQ ID NO: 3041873 - RNA, 13 nt, Human
cuggacugugugc

SEQ ID NO: 3041874 - RNA, 17 nt, Human
cugcuuuuuauggccug

SEQ ID NO: 3041875 - RNA, 12 nt, Human
cuugaugccugg

SEQ ID NO: 3041876 - RNA, 19 nt, Human
cuugacaaagucaagccac

SEQ ID NO: 3041877 - RNA, 16 nt, Human
cuugacaaagucaagc

SEQ ID NO: 3041878 - RNA, 20 nt, Human
cuucaugcauagguuuagca

SEQ ID NO: 3041879 - RNA, 22 nt, Human
cuucauacagggaugguguuca

SEQ ID NO: 3041880 - RNA, 13 nt, Human
cuucauacaggga

SEQ ID NO: 3041881 - RNA, 12 nt, Human
cuucauacaggg

SEQ ID NO: 3041882 - RNA, 19 nt, Human
cuucaucugacuaugacau

SEQ ID NO: 3041883 - RNA, 21 nt, Human
cuucaucugacuaugacauaa

SEQ ID NO: 3041884 - RNA, 10 nt, Human
cuucauacac

SEQ ID NO: 3041885 - RNA, 9 nt, Human
cuucauaca

SEQ ID NO: 3041886 - RNA, 15 nt, Human
cuucacuguaaaaua

SEQ ID NO: 3041887 - RNA, 18 nt, Human
cuuauuggcagcucuacu

SEQ ID NO: 3041888 - RNA, 15 nt, Human
cuuuuggcauuuuac

SEQ ID NO: 3041889 - RNA, 14 nt, Human
cuuuuaugugaaac

SEQ ID NO: 3041890 - RNA, 20 nt, Human
cccugugccuugucacgcca

SEQ ID NO: 3041891 - RNA, 22 nt, Human
cccugugccuugucacgccaga

SEQ ID NO: 3041892 - RNA, 15 nt, Human
cccugugccuuguca

SEQ ID NO: 3041893 - RNA, 24 nt, Human
cccugugccuuggugugcuguauc

SEQ ID NO: 3041894 - RNA, 16 nt, Human
cccuggcuccaggcca

SEQ ID NO: 3041895 - RNA, 13 nt, Human
cccuggcuccagg

SEQ ID NO: 3041896 - RNA, 15 nt, Human
ccuauuuuaauaaac

SEQ ID NO: 3041897 - RNA, 16 nt, Human
ccguagguuauuuuca

SEQ ID NO: 3041898 - RNA, 13 nt, Human
ccuaauaaagcug

SEQ ID NO: 3041899 - RNA, 14 nt, Human
ccuaauaaagcugu

SEQ ID NO: 3041900 - RNA, 23 nt, Human
ccuaauaaagcuguguggcaguc

SEQ ID NO: 3041901 - RNA, 22 nt, Human
ccugacccucaucuuucuucca

SEQ ID NO: 3041902 - RNA, 14 nt, Human
ccugacucucagca

SEQ ID NO: 3041903 - RNA, 22 nt, Human
ccugaguaaaaaagcugugugc

SEQ ID NO: 3041904 - RNA, 13 nt, Human
ccucucugcaggu

SEQ ID NO: 3041905 - RNA, 20 nt, Human
ccucucugcaggucccuaau

SEQ ID NO: 3041906 - RNA, 15 nt, Human
ccucucugcaggucc

SEQ ID NO: 3041907 - RNA, 23 nt, Human
ccucucugcaggucccuaauaaa

SEQ ID NO: 3041908 - RNA, 21 nt, Human
ccucucugcaggucccuaaua

SEQ ID NO: 3041909 - RNA, 22 nt, Human
ccucucugcaggucccuaauaa

SEQ ID NO: 3041910 - RNA, 12 nt, Human
ccaugagcuccu

SEQ ID NO: 3041911 - RNA, 15 nt, Human
ccaguucagcuuggg

SEQ ID NO: 3041912 - RNA, 17 nt, Human
ccagagucccugccugg

SEQ ID NO: 3041913 - RNA, 18 nt, Human
ccagagucccugccugga

SEQ ID NO: 3041914 - RNA, 19 nt, Human
ccagagucccugccuggac

SEQ ID NO: 3041915 - RNA, 22 nt, Human
ccagagucccugccuggaccag

SEQ ID NO: 3041916 - RNA, 16 nt, Human
ccagagucccugccug

SEQ ID NO: 3041917 - RNA, 14 nt, Human
cccgggagcucagg

SEQ ID NO: 3041918 - RNA, 14 nt, Human
ccccgacuuuuguu

SEQ ID NO: 3041919 - RNA, 20 nt, Human
ccccagacuccaccaagccu

SEQ ID NO: 3041920 - RNA, 21 nt, Human
ccccagacuccaccaagccug

SEQ ID NO: 3041921 - RNA, 16 nt, Human
cucaucuuucuuccaa

SEQ ID NO: 3041922 - RNA, 16 nt, Human
cuccaaagucucugga

SEQ ID NO: 3041923 - RNA, 16 nt, Human
cucaggcccaaagccu

SEQ ID NO: 3041924 - RNA, 14 nt, Human
cucccuccucugcc

SEQ ID NO: 3041925 - RNA, 13 nt, Human
cucccuccucugc

SEQ ID NO: 3041926 - RNA, 14 nt, Human
cucuuggagccugc

SEQ ID NO: 3041927 - RNA, 23 nt, Human
cggcuccucgagaucccaacacu

SEQ ID NO: 3041928 - RNA, 19 nt, Human
cuaaccugccgagagucca

SEQ ID NO: 3041929 - RNA, 21 nt, Human
cuaaccugccgagaguccauc

SEQ ID NO: 3041930 - RNA, 12 nt, Human
cuaaccugccga

SEQ ID NO: 3041931 - RNA, 14 nt, Human
cgugucuggcacag

SEQ ID NO: 3041932 - RNA, 13 nt, Human
cgugucuggcaca

SEQ ID NO: 3041933 - RNA, 21 nt, Human
cgugucuggcacagccuggcu

SEQ ID NO: 3041934 - RNA, 23 nt, Human
cuacauaaguaauucaagaaaac

SEQ ID NO: 3041935 - RNA, 22 nt, Human
cuacauaaguaauucaagaaaa

SEQ ID NO: 3041936 - RNA, 18 nt, Human
cuagccaccgccuccuac

SEQ ID NO: 3041937 - RNA, 13 nt, Human
auucuuucccaac

SEQ ID NO: 3041938 - RNA, 16 nt, Human
auucuuucccaacacc

SEQ ID NO: 3041939 - RNA, 19 nt, Human
auucuuucccaacaccucu

SEQ ID NO: 3041940 - RNA, 15 nt, Human
auucuugaaggaaaa

SEQ ID NO: 3041941 - RNA, 18 nt, Human
auucuugaaggaaaauga

SEQ ID NO: 3041942 - RNA, 22 nt, Human
auugauaaguucauacauugua

SEQ ID NO: 3041943 - RNA, 23 nt, Human
auuguaauaggcguaacuaauuu

SEQ ID NO: 3041944 - RNA, 14 nt, Human
auuguaaauaguau

SEQ ID NO: 3041945 - RNA, 21 nt, Human
auucauaauuauuauuuggcc

SEQ ID NO: 3041946 - RNA, 14 nt, Human
caaacaggcucaga

SEQ ID NO: 3041947 - RNA, 15 nt, Human
caaacaggcucagag

SEQ ID NO: 3041948 - RNA, 22 nt, Human
caaagguaaaucagacuaugaa

SEQ ID NO: 3041949 - RNA, 21 nt, Human
caaagucucuggaauuugaaa

SEQ ID NO: 3041950 - RNA, 17 nt, Human
caacaaucccaaggccc

SEQ ID NO: 3041951 - RNA, 14 nt, Human
caacacuaacauga

SEQ ID NO: 3041952 - RNA, 20 nt, Human
auuugcuaugagcuggggau

SEQ ID NO: 3041953 - RNA, 16 nt, Human
auuugcuaugagcugg

SEQ ID NO: 3041954 - RNA, 19 nt, Human
auuuuauagcuacuaauuu

SEQ ID NO: 3041955 - RNA, 17 nt, Human
auuuuauagcuacuaau

SEQ ID NO: 3041956 - RNA, 22 nt, Human
auuuguggggagggauuugggg

SEQ ID NO: 3041957 - RNA, 19 nt, Human
cacuggggcaggggccggg

SEQ ID NO: 3041958 - RNA, 18 nt, Human
cacugggagaaaugaaaa

SEQ ID NO: 3041959 - RNA, 18 nt, Human
cacugccagcauuucccu

SEQ ID NO: 3041960 - RNA, 22 nt, Human
cacugccagcauuucccuuccu

SEQ ID NO: 3041961 - RNA, 23 nt, Human
cacucuuggagccugcagagcug

SEQ ID NO: 3041962 - RNA, 22 nt, Human
cacucuuggagccugcagagcu

SEQ ID NO: 3041963 - RNA, 21 nt, Human
cacucuuggagccugcagagc

SEQ ID NO: 3041964 - RNA, 11 nt, Human
cacugacagau

SEQ ID NO: 3041965 - RNA, 15 nt, Human
caauucuugccaaau

SEQ ID NO: 3041966 - RNA, 24 nt, Human
cagccccgcguggaacucgugucu

SEQ ID NO: 3041967 - RNA, 24 nt, Human
cagccucuccacucaugugacucu

SEQ ID NO: 3041968 - RNA, 18 nt, Human
cagcggcuggacuuggag

SEQ ID NO: 3041969 - RNA, 16 nt, Human
cagcggcuggacuugg

SEQ ID NO: 3041970 - RNA, 17 nt, Human
cagcggcuggaauuggg

SEQ ID NO: 3041971 - RNA, 17 nt, Human
cagccugccacucaggc

SEQ ID NO: 3041972 - RNA, 16 nt, Human
cagccugccacucagg

SEQ ID NO: 3041973 - RNA, 12 nt, Human
cagccugccacu

SEQ ID NO: 3041974 - RNA, 11 nt, Human
cagccugccac

SEQ ID NO: 3041975 - RNA, 16 nt, Human
cagagcugcgggcugg

SEQ ID NO: 3041976 - RNA, 23 nt, Human
cagaucauuaucagccugugcca

SEQ ID NO: 3041977 - RNA, 22 nt, Human
cagaucauugugaaauuauuca

SEQ ID NO: 3041978 - RNA, 16 nt, Human
cagaucauugugaaau

SEQ ID NO: 3041979 - RNA, 15 nt, Human
caguauuugugggga

SEQ ID NO: 3041980 - RNA, 22 nt, Human
ccaaaugagggucuugguucca

SEQ ID NO: 3041981 - RNA, 18 nt, Human
ccaccagaagcccagaau

SEQ ID NO: 3041982 - RNA, 16 nt, Human
ccaccagaagcccaga

SEQ ID NO: 3041983 - RNA, 15 nt, Human
ccaccagaagcccag

SEQ ID NO: 3041984 - RNA, 14 nt, Human
ccaccagaagccca

SEQ ID NO: 3041985 - RNA, 13 nt, Human
ccaccagaagccc

SEQ ID NO: 3041986 - RNA, 12 nt, Human
ccaccagaagcc

SEQ ID NO: 3041987 - RNA, 11 nt, Human
ccaccagaagc

SEQ ID NO: 3041988 - RNA, 19 nt, Human
ccaaaaagauuuucagaaa

SEQ ID NO: 3041989 - RNA, 22 nt, Human
cauuggcucuugaacugagcuu

SEQ ID NO: 3041990 - RNA, 17 nt, Human
caguuuggcaaacucuc

SEQ ID NO: 3041991 - RNA, 14 nt, Human
caugaauuugugaa

SEQ ID NO: 3041992 - RNA, 17 nt, Human
gucuggcacagccuggc

SEQ ID NO: 3041993 - RNA, 19 nt, Human
gucuggcacagccuggcug

SEQ ID NO: 3041994 - RNA, 16 nt, Human
gucuuucacauuuaaa

SEQ ID NO: 3041995 - RNA, 22 nt, Human
aacucaucuagguaaauuacag

SEQ ID NO: 3041996 - RNA, 19 nt, Human
gucucccuccucugcccgg

SEQ ID NO: 3041997 - RNA, 20 nt, Human
aaccacauuggagauguuua

SEQ ID NO: 3041998 - RNA, 17 nt, Human
aaccaccagaagcccag

SEQ ID NO: 3041999 - RNA, 14 nt, Human
aaccaccagaagcc

SEQ ID NO: 3042000 - RNA, 20 nt, Human
aaccccuggcuccaggccag

SEQ ID NO: 3042001 - RNA, 17 nt, Human
aaccccccauuucuucc

SEQ ID NO: 3042002 - RNA, 14 nt, Human
aacccagauaaagg

SEQ ID NO: 3042003 - RNA, 12 nt, Human
gugcaagagagg

SEQ ID NO: 3042004 - RNA, 18 nt, Human
aacuucccagugaauucu

SEQ ID NO: 3042005 - RNA, 13 nt, Human
gucagaauagaaa

SEQ ID NO: 3042006 - RNA, 17 nt, Human
gucagaauagaaauuag

SEQ ID NO: 3042007 - RNA, 13 nt, Human
gucaguuguauca

SEQ ID NO: 3042008 - RNA, 17 nt, Human
gucaguauguggaagug

SEQ ID NO: 3042009 - RNA, 21 nt, Human
gucaguauguggaaguguggg

SEQ ID NO: 3042010 - RNA, 19 nt, Human
aacaagaugguucuagcau

SEQ ID NO: 3042011 - RNA, 12 nt, Human
aacaauaaaaga

SEQ ID NO: 3042012 - RNA, 13 nt, Human
aacagauaaucag

SEQ ID NO: 3042013 - RNA, 16 nt, Human
guauuuuugacagaau

SEQ ID NO: 3042014 - RNA, 15 nt, Human
guauuuuugacagaa

SEQ ID NO: 3042015 - RNA, 12 nt, Human
guauuuuugaca

SEQ ID NO: 3042016 - RNA, 17 nt, Human
gucaacacuaacaugau

SEQ ID NO: 3042017 - RNA, 16 nt, Human
aaauucugucucugga

SEQ ID NO: 3042018 - RNA, 20 nt, Human
aaauuguaagcaugcacaaa

SEQ ID NO: 3042019 - RNA, 19 nt, Human
aaauuguaagcaugcacaa

SEQ ID NO: 3042020 - RNA, 18 nt, Human
aaauucugucucuggauu

SEQ ID NO: 3042021 - RNA, 15 nt, Human
aaauuuaugugaugg

SEQ ID NO: 3042022 - RNA, 12 nt, Human
aaauuuauguga

SEQ ID NO: 3042023 - RNA, 12 nt, Human
aaauugugaugu

SEQ ID NO: 3042024 - RNA, 15 nt, Human
aaauugugauguguc

SEQ ID NO: 3042025 - RNA, 14 nt, Human
aaauuaagaaagga

SEQ ID NO: 3042026 - RNA, 18 nt, Human
guauaaaagggacugaga

SEQ ID NO: 3042027 - RNA, 21 nt, Human
guaugcuucauacagggaugg

SEQ ID NO: 3042028 - RNA, 15 nt, Human
guaugcuucauacag

SEQ ID NO: 3042029 - RNA, 14 nt, Human
guaugcuucauaca

SEQ ID NO: 3042030 - RNA, 13 nt, Human
guaugcuucauac

SEQ ID NO: 3042031 - RNA, 12 nt, Human
guaugcuucaua

SEQ ID NO: 3042032 - RNA, 19 nt, Human
guauaaaagggacugagaa

SEQ ID NO: 3042033 - RNA, 21 nt, Human
guggccuaaccugccgagagu

SEQ ID NO: 3042034 - RNA, 22 nt, Human
guggccuaaccugccgagaguc

SEQ ID NO: 3042035 - RNA, 21 nt, Human
aagaccuuuggagcaaagcug

SEQ ID NO: 3042036 - RNA, 23 nt, Human
aagaccuugcuuaugauugcaga

SEQ ID NO: 3042037 - RNA, 14 nt, Human
aagaggcugcagcc

SEQ ID NO: 3042038 - RNA, 19 nt, Human
gugggguagguugggagaa

SEQ ID NO: 3042039 - RNA, 18 nt, Human
aagaucucagugguuaag

SEQ ID NO: 3042040 - RNA, 14 nt, Human
gugugggucugugu

SEQ ID NO: 3042041 - RNA, 15 nt, Human
guguguauguggggg

SEQ ID NO: 3042042 - RNA, 13 nt, Human
guguguauguggg

SEQ ID NO: 3042043 - RNA, 20 nt, Human
gugugucacccuuaggccag

SEQ ID NO: 3042044 - RNA, 19 nt, Human
aagcccaguucagcuuggg

SEQ ID NO: 3042045 - RNA, 18 nt, Human
aagcccaguucagcuugg

SEQ ID NO: 3042046 - RNA, 22 nt, Human
aagccaagaggcugcagccagg

SEQ ID NO: 3042047 - RNA, 18 nt, Human
aagccaagaggcugcagc

SEQ ID NO: 3042048 - RNA, 17 nt, Human
aagccugcaauuucaua

SEQ ID NO: 3042049 - RNA, 22 nt, Human
aagccugcaauuucauaugcug

SEQ ID NO: 3042050 - RNA, 14 nt, Human
guuaagauuccuaa

SEQ ID NO: 3042051 - RNA, 18 nt, Human
guuauugauaaguucaua

SEQ ID NO: 3042052 - RNA, 20 nt, Human
guuauuauauuuacaaaugg

SEQ ID NO: 3042053 - RNA, 14 nt, Human
aaggcucuuuugua

SEQ ID NO: 3042054 - RNA, 16 nt, Human
aagggugaaaauuauu

SEQ ID NO: 3042055 - RNA, 15 nt, Human
aagggugaaaauuau

SEQ ID NO: 3042056 - RNA, 16 nt, Human
aaguaaggaauuuuau

SEQ ID NO: 3042057 - RNA, 12 nt, Human
guuucaaacuuu

SEQ ID NO: 3042058 - RNA, 15 nt, Human
guuuacaguguuccg

SEQ ID NO: 3042059 - RNA, 13 nt, Human
guuuacaguguuc

SEQ ID NO: 3042060 - RNA, 23 nt, Human
aaggaaccaaagcgaauuuuaaa

SEQ ID NO: 3042061 - RNA, 22 nt, Human
aaggaaccaaagcgaauuuuaa

SEQ ID NO: 3042062 - RNA, 13 nt, Human
aaggauaaugaau

SEQ ID NO: 3042063 - RNA, 22 nt, Human
aaggcccuaucuguuuacagug

SEQ ID NO: 3042064 - RNA, 21 nt, Human
uaaaaauaaaaaacacuggga

SEQ ID NO: 3042065 - RNA, 18 nt, Human
uaaaaauaaaaaacacug

SEQ ID NO: 3042066 - RNA, 19 nt, Human
uaaaaauaaaaaacacugg

SEQ ID NO: 3042067 - RNA, 12 nt, Human
uaaaagaauugu

SEQ ID NO: 3042068 - RNA, 20 nt, Human
uaaaagacagugaaagaaaa

SEQ ID NO: 3042069 - RNA, 15 nt, Human
guuuuucauaaagca

SEQ ID NO: 3042070 - RNA, 16 nt, Human
aagucuuucacauuua

SEQ ID NO: 3042071 - RNA, 22 nt, Human
aagucuuauauauuguagauaa

SEQ ID NO: 3042072 - RNA, 19 nt, Human
uaccagagaaaaagggagg

SEQ ID NO: 3042073 - RNA, 13 nt, Human
uacauuuccuaaa

SEQ ID NO: 3042074 - RNA, 17 nt, Human
uacagggaugguguuca

SEQ ID NO: 3042075 - RNA, 15 nt, Human
uacccccugugccuu

SEQ ID NO: 3042076 - RNA, 13 nt, Human
uaccucuuggcug

SEQ ID NO: 3042077 - RNA, 23 nt, Human
uaccugaagcuaucguaaaauua

SEQ ID NO: 3042078 - RNA, 22 nt, Human
aauuaugugccagauuuaugca

SEQ ID NO: 3042079 - RNA, 12 nt, Human
aauuauuuuaaa

SEQ ID NO: 3042080 - RNA, 15 nt, Human
aauuauuuuaaaaga

SEQ ID NO: 3042081 - RNA, 12 nt, Human
aauucaagaaaa

SEQ ID NO: 3042082 - RNA, 20 nt, Human
aauucaagaaaacaacuuca

SEQ ID NO: 3042083 - RNA, 15 nt, Human
aauucagaaggaucu

SEQ ID NO: 3042084 - RNA, 21 nt, Human
aauucagaaggaucuucaucu

SEQ ID NO: 3042085 - RNA, 16 nt, Human
uaauuuauacagguca

SEQ ID NO: 3042086 - RNA, 22 nt, Human
uaauuccguagguuauuuucag

SEQ ID NO: 3042087 - RNA, 20 nt, Human
uaauuuaaaauugugaugug

SEQ ID NO: 3042088 - RNA, 19 nt, Human
uaauuuaaaauugugaugu

SEQ ID NO: 3042089 - RNA, 12 nt, Human
aaugagaaaucu

SEQ ID NO: 3042090 - RNA, 22 nt, Human
aaugagaaaucuaaaaaacgaa

SEQ ID NO: 3042091 - RNA, 20 nt, Human
aaugacucagaauauugcuu

SEQ ID NO: 3042092 - RNA, 13 nt, Human
uacagaauuuuau

SEQ ID NO: 3042093 - RNA, 20 nt, Human
aauagagcaaaauugaugug

SEQ ID NO: 3042094 - RNA, 22 nt, Human
aauagagcaaaauugauguguu

SEQ ID NO: 3042095 - RNA, 17 nt, Human
uaacaaugaagauaaaa

SEQ ID NO: 3042096 - RNA, 14 nt, Human
uaacaugaauauuu

SEQ ID NO: 3042097 - RNA, 20 nt, Human
uaacaugaauauuuaguguu

SEQ ID NO: 3042098 - RNA, 21 nt, Human
uaacaugaauauuuaguguuc

SEQ ID NO: 3042099 - RNA, 19 nt, Human
uaacaugaauauuuagugu

SEQ ID NO: 3042100 - RNA, 18 nt, Human
aauauauuuuaagacgaa

SEQ ID NO: 3042101 - RNA, 14 nt, Human
aauauauuuaauga

SEQ ID NO: 3042102 - RNA, 21 nt, Human
aauauauuuuaagacgaaaca

SEQ ID NO: 3042103 - RNA, 21 nt, Human
aauauauucagccuggcuuca

SEQ ID NO: 3042104 - RNA, 13 nt, Human
uaacguauaaaag

SEQ ID NO: 3042105 - RNA, 17 nt, Human
uaacguauaaaagccug

SEQ ID NO: 3042106 - RNA, 14 nt, Human
aaucagugugucua

SEQ ID NO: 3042107 - RNA, 17 nt, Human
aaucagugugucuaaau

SEQ ID NO: 3042108 - RNA, 18 nt, Human
aaucagugugucuaaauu

SEQ ID NO: 3042109 - RNA, 22 nt, Human
aaucagugugucuaaauuugaa

SEQ ID NO: 3042110 - RNA, 20 nt, Human
aauccucaguuuuugugaaa

SEQ ID NO: 3042111 - RNA, 18 nt, Human
aaucuaugauuccaggug

SEQ ID NO: 3042112 - RNA, 15 nt, Human
aaucuaugauuccag

SEQ ID NO: 3042113 - RNA, 17 nt, Human
uaaguguguguuuuuca

SEQ ID NO: 3042114 - RNA, 16 nt, Human
uaaguaauucaagaaa

SEQ ID NO: 3042115 - RNA, 22 nt, Human
uaagcagauggaaugcuguguu

SEQ ID NO: 3042116 - RNA, 22 nt, Human
uaaggaauuuuauuuuuuucug

SEQ ID NO: 3042117 - RNA, 20 nt, Human
uaugccaccugaauaaagaa

SEQ ID NO: 3042118 - RNA, 17 nt, Human
uaugauacuugaaaauu

SEQ ID NO: 3042119 - RNA, 21 nt, Human
uaugguaggaacugcugggcu

SEQ ID NO: 3042120 - RNA, 18 nt, Human
acagcggcuggacuugga

SEQ ID NO: 3042121 - RNA, 23 nt, Human
uaugaagcuuuuaugugaaacau

SEQ ID NO: 3042122 - RNA, 20 nt, Human
uaugaagcuuuuaugugaaa

SEQ ID NO: 3042123 - RNA, 22 nt, Human
uaugaagcuuuuaugugaaaca

SEQ ID NO: 3042124 - RNA, 19 nt, Human
uaucaaagggugaaaauua

SEQ ID NO: 3042125 - RNA, 18 nt, Human
uaucaaagggugaaaauu

SEQ ID NO: 3042126 - RNA, 22 nt, Human
uaucaaagggugaaaauuauuu

SEQ ID NO: 3042127 - RNA, 14 nt, Human
uaucagcacgugug

SEQ ID NO: 3042128 - RNA, 19 nt, Human
uauaagugauugcugguuu

SEQ ID NO: 3042129 - RNA, 21 nt, Human
uauacaggucauauuaauaua

SEQ ID NO: 3042130 - RNA, 16 nt, Human
uauacaggucauauua

SEQ ID NO: 3042131 - RNA, 15 nt, Human
uauacaggucauauu

SEQ ID NO: 3042132 - RNA, 16 nt, Human
acacucaguuguucaa

SEQ ID NO: 3042133 - RNA, 11 nt, Human
uauauauuucc

SEQ ID NO: 3042134 - RNA, 17 nt, Human
uauauccuuucuaacaa

SEQ ID NO: 3042135 - RNA, 20 nt, Human
uauauccuuucuaacaaaaa

SEQ ID NO: 3042136 - RNA, 12 nt, Human
uaguaaucauau

SEQ ID NO: 3042137 - RNA, 21 nt, Human
uagacauuugcuaugagcugg

SEQ ID NO: 3042138 - RNA, 16 nt, Human
aauuuggauugcuaau

SEQ ID NO: 3042139 - RNA, 14 nt, Human
uagaagaagugugu

SEQ ID NO: 3042140 - RNA, 17 nt, Human
aauuccaauuauaugag

SEQ ID NO: 3042141 - RNA, 16 nt, Human
aauuccacacccucac

SEQ ID NO: 3042142 - RNA, 12 nt, Human
aauuuuacauuu

SEQ ID NO: 3042143 - RNA, 18 nt, Human
acaaaaggauaaugaaua

SEQ ID NO: 3042144 - RNA, 19 nt, Human
acaaaaauucucaguucuc

SEQ ID NO: 3042145 - RNA, 18 nt, Human
uagccaccgccuccuaca

SEQ ID NO: 3042146 - RNA, 18 nt, Human
uagccacccaccacacug

SEQ ID NO: 3042147 - RNA, 19 nt, Human
uagccaccgccuccuacag

SEQ ID NO: 3042148 - RNA, 19 nt, Human
uagcacugacagauuucca

SEQ ID NO: 3042149 - RNA, 14 nt, Human
uagcacugacagau

SEQ ID NO: 3042150 - RNA, 24 nt, Human
uagaggggaaaagagaugaugaaa

SEQ ID NO: 3042151 - RNA, 16 nt, Human
uccauccuacccccug

SEQ ID NO: 3042152 - RNA, 20 nt, Human
uccauccuacccccugugcc

SEQ ID NO: 3042153 - RNA, 20 nt, Human
uccaucucuuguuuaaauuc

SEQ ID NO: 3042154 - RNA, 20 nt, Human
acgaagaguauuuuugacag

SEQ ID NO: 3042155 - RNA, 22 nt, Human
acgaagaguauuuuugacagaa

SEQ ID NO: 3042156 - RNA, 15 nt, Human
accuuccaagagccu

SEQ ID NO: 3042157 - RNA, 16 nt, Human
accuuccaagagccug

SEQ ID NO: 3042158 - RNA, 20 nt, Human
accuggcuuuucuuucuacc

SEQ ID NO: 3042159 - RNA, 20 nt, Human
uccaaaaagauuuucagaaa

SEQ ID NO: 3042160 - RNA, 19 nt, Human
uccaaaaagauuuucagaa

SEQ ID NO: 3042161 - RNA, 16 nt, Human
ucauaauaaguugcau

SEQ ID NO: 3042162 - RNA, 22 nt, Human
acucgugucuggcacagccugg

SEQ ID NO: 3042163 - RNA, 23 nt, Human
acucgugucuggcacagccuggc

SEQ ID NO: 3042164 - RNA, 13 nt, Human
acucuugaaaaau

SEQ ID NO: 3042165 - RNA, 21 nt, Human
uccuagccaccgccuccuaca

SEQ ID NO: 3042166 - RNA, 20 nt, Human
uccuagccacccaccacacu

SEQ ID NO: 3042167 - RNA, 13 nt, Human
uccucuccugucu

SEQ ID NO: 3042168 - RNA, 14 nt, Human
acucuugaaaaaug

SEQ ID NO: 3042169 - RNA, 19 nt, Human
acucuugaaaaaugcaugu

SEQ ID NO: 3042170 - RNA, 16 nt, Human
uccucugcccgggagc

SEQ ID NO: 3042171 - RNA, 22 nt, Human
uccucugcccgggagcucagga

SEQ ID NO: 3042172 - RNA, 13 nt, Human
acugaaacuuccc

SEQ ID NO: 3042173 - RNA, 22 nt, Human
acuaugacauaaaaacaacuuu

SEQ ID NO: 3042174 - RNA, 14 nt, Human
acuccaccaagccu

SEQ ID NO: 3042175 - RNA, 21 nt, Human
acucaucuagguaaauuacag

SEQ ID NO: 3042176 - RNA, 23 nt, Human
acucaucuagguaaauuacaguu

SEQ ID NO: 3042177 - RNA, 14 nt, Human
acucagaauauugc

SEQ ID NO: 3042178 - RNA, 18 nt, Human
ucauaaauaaaguuuguu

SEQ ID NO: 3042179 - RNA, 24 nt, Human
ucauaaagcaggcagaacucaucu

SEQ ID NO: 3042180 - RNA, 21 nt, Human
acccagauaaagguucaugca

SEQ ID NO: 3042181 - RNA, 18 nt, Human
ucacucuuggagccugca

SEQ ID NO: 3042182 - RNA, 17 nt, Human
ucacucuuggagccugc

SEQ ID NO: 3042183 - RNA, 16 nt, Human
ucacucuuggagccug

SEQ ID NO: 3042184 - RNA, 14 nt, Human
ucacucuuggagcc

SEQ ID NO: 3042185 - RNA, 16 nt, Human
ucagaauagaaauuag

SEQ ID NO: 3042186 - RNA, 19 nt, Human
accccagcuggggccaggc

SEQ ID NO: 3042187 - RNA, 22 nt, Human
accccagcuggggccaggcugg

SEQ ID NO: 3042188 - RNA, 19 nt, Human
uauuuuuguagcacugaca

SEQ ID NO: 3042189 - RNA, 15 nt, Human
uauuuuuguagcacu

SEQ ID NO: 3042190 - RNA, 13 nt, Human
ucaaauauauuca

SEQ ID NO: 3042191 - RNA, 21 nt, Human
uauuuuaaaagauaaauauua

SEQ ID NO: 3042192 - RNA, 14 nt, Human
uauuuuaagacgaa

SEQ ID NO: 3042193 - RNA, 22 nt, Human
uauuuuaagacgaaacauuugu

SEQ ID NO: 3042194 - RNA, 14 nt, Human
uauguguaaaaugu

SEQ ID NO: 3042195 - RNA, 14 nt, Human
uaugugccagauuu

SEQ ID NO: 3042196 - RNA, 19 nt, Human
uaugugccagauuuaugca

SEQ ID NO: 3042197 - RNA, 20 nt, Human
uaugugggggucuguguguu

SEQ ID NO: 3042198 - RNA, 19 nt, Human
uaugugggggucugugugu

SEQ ID NO: 3042199 - RNA, 18 nt, Human
uaugugggggucugugug

SEQ ID NO: 3042200 - RNA, 13 nt, Human
uauuuuuguagca

SEQ ID NO: 3042201 - RNA, 13 nt, Human
uauuuuucacaua

SEQ ID NO: 3042202 - RNA, 12 nt, Human
uauuuuucacau

SEQ ID NO: 3042203 - RNA, 17 nt, Human
uauuuuguguuuaggaa

SEQ ID NO: 3042204 - RNA, 16 nt, Human
uauuuuguucauacau

SEQ ID NO: 3042205 - RNA, 15 nt, Human
uauuuuguucauaca

SEQ ID NO: 3042206 - RNA, 20 nt, Human
uauuuuguguuuaggaacua

SEQ ID NO: 3042207 - RNA, 17 nt, Human
uauuuuaauaaacacuc

SEQ ID NO: 3042208 - RNA, 14 nt, Human
uauuuuaauaaaca

SEQ ID NO: 3042209 - RNA, 16 nt, Human
accaaauaaaaauauu

SEQ ID NO: 3042210 - RNA, 18 nt, Human
accaaauaaaaauauugu

SEQ ID NO: 3042211 - RNA, 17 nt, Human
acauuguaaauaguauu

SEQ ID NO: 3042212 - RNA, 19 nt, Human
acauuguaaauaguauuug

SEQ ID NO: 3042213 - RNA, 21 nt, Human
acauuguaaauaguauuugag

SEQ ID NO: 3042214 - RNA, 13 nt, Human
ucuauaauuuaaa

SEQ ID NO: 3042215 - RNA, 17 nt, Human
acuucccagugaauucu

SEQ ID NO: 3042216 - RNA, 17 nt, Human
ucuagcauggcauauuu

SEQ ID NO: 3042217 - RNA, 18 nt, Human
ucuagcauggcauauuuu

SEQ ID NO: 3042218 - RNA, 15 nt, Human
ucuaccucuuggcug

SEQ ID NO: 3042219 - RNA, 17 nt, Human
acuugaaaauuaacaug

SEQ ID NO: 3042220 - RNA, 16 nt, Human
acuugaaaauuaacau

SEQ ID NO: 3042221 - RNA, 18 nt, Human
acuugaaaauuaacauga

SEQ ID NO: 3042222 - RNA, 15 nt, Human
acuuguauuaugugu

SEQ ID NO: 3042223 - RNA, 13 nt, Human
acuuguauuaugu

SEQ ID NO: 3042224 - RNA, 14 nt, Human
acuuguauuaugug

SEQ ID NO: 3042225 - RNA, 22 nt, Human
acuucccuuucugcuuguguua

SEQ ID NO: 3042226 - RNA, 14 nt, Human
acuucccuuucugc

SEQ ID NO: 3042227 - RNA, 20 nt, Human
ucggggagccgggagccuga

SEQ ID NO: 3042228 - RNA, 21 nt, Human
ucuaagauaguaacaaugaag

SEQ ID NO: 3042229 - RNA, 16 nt, Human
acuggggcaggggccg

SEQ ID NO: 3042230 - RNA, 18 nt, Human
ucgcccuggacugugugc

SEQ ID NO: 3042231 - RNA, 15 nt, Human
acuguacuugcucuu

SEQ ID NO: 3042232 - RNA, 23 nt, Human
acuguacuugcucuugaugccug

SEQ ID NO: 3042233 - RNA, 18 nt, Human
acuguacagacagaaaaa

SEQ ID NO: 3042234 - RNA, 22 nt, Human
ucuggcacagccuggcuguggc

SEQ ID NO: 3042235 - RNA, 16 nt, Human
agaaggaucuucaucu

SEQ ID NO: 3042236 - RNA, 13 nt, Human
agaauaaacuggc

SEQ ID NO: 3042237 - RNA, 21 nt, Human
ucugcaggucccuaauaaagc

SEQ ID NO: 3042238 - RNA, 19 nt, Human
ucugcaggucccuaauaaa

SEQ ID NO: 3042239 - RNA, 22 nt, Human
ucugcaggucccuaauaaagcu

SEQ ID NO: 3042240 - RNA, 23 nt, Human
ucugcaggucccuaauaaagcug

SEQ ID NO: 3042241 - RNA, 12 nt, Human
agaaauuaugug

SEQ ID NO: 3042242 - RNA, 12 nt, Human
agaaaugaaaaa

SEQ ID NO: 3042243 - RNA, 13 nt, Human
agaaaugaaaaaa

SEQ ID NO: 3042244 - RNA, 15 nt, Human
agaaaucuaaaaaac

SEQ ID NO: 3042245 - RNA, 22 nt, Human
ucucugcaggucccuaauaaag

SEQ ID NO: 3042246 - RNA, 19 nt, Human
ucucugcaggucccuaaua

SEQ ID NO: 3042247 - RNA, 20 nt, Human
ucucugcaggucccuaauaa

SEQ ID NO: 3042248 - RNA, 21 nt, Human
ucucugcaggucccuaauaaa

SEQ ID NO: 3042249 - RNA, 18 nt, Human
ucucugcaggucccuaau

SEQ ID NO: 3042250 - RNA, 19 nt, Human
acuuuguauaaaagggacu

SEQ ID NO: 3042251 - RNA, 22 nt, Human
ucuuggggaguuuagggugggg

SEQ ID NO: 3042252 - RNA, 23 nt, Human
ucuuggggaguuuaggguggggg

SEQ ID NO: 3042253 - RNA, 15 nt, Human
ucuuuaacucauaaa

SEQ ID NO: 3042254 - RNA, 21 nt, Human
ucuugaugccuggcggggugg

SEQ ID NO: 3042255 - RNA, 19 nt, Human
agacccccuggagacuaac

SEQ ID NO: 3042256 - RNA, 15 nt, Human
agacccccuggagac

SEQ ID NO: 3042257 - RNA, 14 nt, Human
agacccccuggaga

SEQ ID NO: 3042258 - RNA, 13 nt, Human
agacccccuggag

SEQ ID NO: 3042259 - RNA, 19 nt, Human
agacauucuuccaaaaaga

SEQ ID NO: 3042260 - RNA, 17 nt, Human
agagacgggcccuggug

SEQ ID NO: 3042261 - RNA, 14 nt, Human
agagagaaaauaaa

SEQ ID NO: 3042262 - RNA, 20 nt, Human
agagcaaaauugauguguuu

SEQ ID NO: 3042263 - RNA, 20 nt, Human
ugaaaagcuccauuuuuagu

SEQ ID NO: 3042264 - RNA, 14 nt, Human
ugaaaauauuuaaa

SEQ ID NO: 3042265 - RNA, 13 nt, Human
ugaaaauauuuaa

SEQ ID NO: 3042266 - RNA, 12 nt, Human
ugaaaauauuua

SEQ ID NO: 3042267 - RNA, 11 nt, Human
ugaaaauauuu

SEQ ID NO: 3042268 - RNA, 12 nt, Human
ugaaacuuggau

SEQ ID NO: 3042269 - RNA, 22 nt, Human
ugaaaaagaccuuuggagcaaa

SEQ ID NO: 3042270 - RNA, 23 nt, Human
ugaaaaaauauauaucaaauaua

SEQ ID NO: 3042271 - RNA, 23 nt, Human
agaggugugcaagagagggaugc

SEQ ID NO: 3042272 - RNA, 22 nt, Human
agaggugugcaagagagggaug

SEQ ID NO: 3042273 - RNA, 15 nt, Human
agaguauuuuugaca

SEQ ID NO: 3042274 - RNA, 14 nt, Human
agaguauuuuugac

SEQ ID NO: 3042275 - RNA, 20 nt, Human
ugaagcuaucguaaaauuaa

SEQ ID NO: 3042276 - RNA, 22 nt, Human
agagggacuguucuuuuguccc

SEQ ID NO: 3042277 - RNA, 23 nt, Human
ugaaaguacauuuggagacacaa

SEQ ID NO: 3042278 - RNA, 14 nt, Human
ugaaaguacauuug

SEQ ID NO: 3042279 - RNA, 15 nt, Human
ugaauacuuuauaaa

SEQ ID NO: 3042280 - RNA, 18 nt, Human
agaguauuuuugacagaa

SEQ ID NO: 3042281 - RNA, 17 nt, Human
agaguauuuuugacaga

SEQ ID NO: 3042282 - RNA, 23 nt, Human
ugaauguaugcuucauacaggga

SEQ ID NO: 3042283 - RNA, 20 nt, Human
ugaauguaugcuucauacag

SEQ ID NO: 3042284 - RNA, 19 nt, Human
ugaauguaugcuucauaca

SEQ ID NO: 3042285 - RNA, 14 nt, Human
ugaauguaugcuuc

SEQ ID NO: 3042286 - RNA, 20 nt, Human
agaguauuuuugacagaaua

SEQ ID NO: 3042287 - RNA, 13 nt, Human
ugaauuugugaag

SEQ ID NO: 3042288 - RNA, 21 nt, Human
ugaauuugugaagguggaaau

SEQ ID NO: 3042289 - RNA, 23 nt, Human
ugaauuugugaagguggaaauaa

SEQ ID NO: 3042290 - RNA, 18 nt, Human
agauggaaugcuguguua

SEQ ID NO: 3042291 - RNA, 13 nt, Human
agauggaaugcug

SEQ ID NO: 3042292 - RNA, 15 nt, Human
agauggaaugcugug

SEQ ID NO: 3042293 - RNA, 20 nt, Human
ugaccuuccaagagccugag

SEQ ID NO: 3042294 - RNA, 19 nt, Human
ugaccuuccaagagccuga

SEQ ID NO: 3042295 - RNA, 18 nt, Human
ugaccuuccaagagccug

SEQ ID NO: 3042296 - RNA, 17 nt, Human
agcauuucccuuccuuc

SEQ ID NO: 3042297 - RNA, 22 nt, Human
agcauggcauauuuuucacaua

SEQ ID NO: 3042298 - RNA, 21 nt, Human
agcauggcauauuuuucacau

SEQ ID NO: 3042299 - RNA, 19 nt, Human
agcauggcauauuuuucac

SEQ ID NO: 3042300 - RNA, 18 nt, Human
agcauggcauauuuuuca

SEQ ID NO: 3042301 - RNA, 20 nt, Human
agcaugucgucaaagcugaa

SEQ ID NO: 3042302 - RNA, 17 nt, Human
agcaugucgucaaagcu

SEQ ID NO: 3042303 - RNA, 21 nt, Human
ugauagaaggcuauggggaua

SEQ ID NO: 3042304 - RNA, 22 nt, Human
ugaguaacugauuuguaacaag

SEQ ID NO: 3042305 - RNA, 21 nt, Human
agcauaauacuugcuuuggaa

SEQ ID NO: 3042306 - RNA, 24 nt, Human
ugauaagcagucauccucagauca

SEQ ID NO: 3042307 - RNA, 12 nt, Human
ugauaaguaaau

SEQ ID NO: 3042308 - RNA, 19 nt, Human
ugauacgcaacauaauuaa

SEQ ID NO: 3042309 - RNA, 18 nt, Human
ugaguucauaaauuuaug

SEQ ID NO: 3042310 - RNA, 15 nt, Human
agccaggccacuggc

SEQ ID NO: 3042311 - RNA, 15 nt, Human
ugauccagcccugag

SEQ ID NO: 3042312 - RNA, 18 nt, Human
ugauccagcccugaguuc

SEQ ID NO: 3042313 - RNA, 17 nt, Human
ugauccagcccugaguu

SEQ ID NO: 3042314 - RNA, 18 nt, Human
agccugacccucaucuuu

SEQ ID NO: 3042315 - RNA, 11 nt, Human
ugcaggucccu

SEQ ID NO: 3042316 - RNA, 22 nt, Human
ugcauaacguauaaaagccugu

SEQ ID NO: 3042317 - RNA, 23 nt, Human
ugcauaacguauaaaagccuguu

SEQ ID NO: 3042318 - RNA, 12 nt, Human
ugcaggucccua

SEQ ID NO: 3042319 - RNA, 14 nt, Human
ugcaggucccuaau

SEQ ID NO: 3042320 - RNA, 15 nt, Human
ugcaggucccuaaua

SEQ ID NO: 3042321 - RNA, 16 nt, Human
ugcaggucccuaauaa

SEQ ID NO: 3042322 - RNA, 18 nt, Human
agcccaguucagcuuggg

SEQ ID NO: 3042323 - RNA, 21 nt, Human
agcucaggaaccgaggcaggg

SEQ ID NO: 3042324 - RNA, 22 nt, Human
agcucaggaaccgaggcaggga

SEQ ID NO: 3042325 - RNA, 20 nt, Human
agcucaggaaccgaggcagg

SEQ ID NO: 3042326 - RNA, 18 nt, Human
agcuaggaauuguguuua

SEQ ID NO: 3042327 - RNA, 17 nt, Human
ugccagacccccuggag

SEQ ID NO: 3042328 - RNA, 16 nt, Human
agccuggucagcccaa

SEQ ID NO: 3042329 - RNA, 15 nt, Human
agccuggucagccca

SEQ ID NO: 3042330 - RNA, 20 nt, Human
agccuggucagcccaaacca

SEQ ID NO: 3042331 - RNA, 13 nt, Human
agccuguuuaaga

SEQ ID NO: 3042332 - RNA, 16 nt, Human
uggccuaaccugccga

SEQ ID NO: 3042333 - RNA, 21 nt, Human
uggccuguucuucuauggguu

SEQ ID NO: 3042334 - RNA, 23 nt, Human
uggccaguggcuggaucugugag

SEQ ID NO: 3042335 - RNA, 17 nt, Human
uggcauauuuuucacau

SEQ ID NO: 3042336 - RNA, 16 nt, Human
uggcauauuuuucaca

SEQ ID NO: 3042337 - RNA, 17 nt, Human
uggauuauauuaugaag

SEQ ID NO: 3042338 - RNA, 19 nt, Human
aggaucccaugagcuccuu

SEQ ID NO: 3042339 - RNA, 20 nt, Human
uggaagcuucuggugaccuu

SEQ ID NO: 3042340 - RNA, 19 nt, Human
aggacaguauuugugggga

SEQ ID NO: 3042341 - RNA, 12 nt, Human
aggacaguauuu

SEQ ID NO: 3042342 - RNA, 19 nt, Human
uggaauuauuuuaaaagau

SEQ ID NO: 3042343 - RNA, 20 nt, Human
uggaauuauuuuaaaagaua

SEQ ID NO: 3042344 - RNA, 13 nt, Human
aggcaaucauggu

SEQ ID NO: 3042345 - RNA, 15 nt, Human
uggacugugugcuca

SEQ ID NO: 3042346 - RNA, 21 nt, Human
agcugggacaccccgacuuuu

SEQ ID NO: 3042347 - RNA, 18 nt, Human
agcugugugcucuccaag

SEQ ID NO: 3042348 - RNA, 14 nt, Human
agcuguguggcagu

SEQ ID NO: 3042349 - RNA, 16 nt, Human
agcuguguggcagucu

SEQ ID NO: 3042350 - RNA, 20 nt, Human
agcugugugcucuccaagcc

SEQ ID NO: 3042351 - RNA, 15 nt, Human
ugccugcccuauucu

SEQ ID NO: 3042352 - RNA, 23 nt, Human
agcuuggggacaggggcaggagg

SEQ ID NO: 3042353 - RNA, 23 nt, Human
agcuuuaucaaagggugaaaauu

SEQ ID NO: 3042354 - RNA, 14 nt, Human
ugcuucaucccuuu

SEQ ID NO: 3042355 - RNA, 15 nt, Human
ugcuguagacauuug

SEQ ID NO: 3042356 - RNA, 23 nt, Human
ugcuguauccauccauggggcug

SEQ ID NO: 3042357 - RNA, 15 nt, Human
agggggagagggcug

SEQ ID NO: 3042358 - RNA, 16 nt, Human
agggggagagggcugc

SEQ ID NO: 3042359 - RNA, 20 nt, Human
ugguaggaacugcugggcuu

SEQ ID NO: 3042360 - RNA, 13 nt, Human
ugguaggaacugc

SEQ ID NO: 3042361 - RNA, 16 nt, Human
uggguggggggcuuca

SEQ ID NO: 3042362 - RNA, 21 nt, Human
ugggucgcccuggacugugug

SEQ ID NO: 3042363 - RNA, 12 nt, Human
ugggucugugug

SEQ ID NO: 3042364 - RNA, 14 nt, Human
uggucuccacuggg

SEQ ID NO: 3042365 - RNA, 10 nt, Human
uggucagccc

SEQ ID NO: 3042366 - RNA, 12 nt, Human
uggucagcccaa

SEQ ID NO: 3042367 - RNA, 11 nt, Human
uggucagccca

SEQ ID NO: 3042368 - RNA, 16 nt, Human
aggucauauuaauaua

SEQ ID NO: 3042369 - RNA, 19 nt, Human
aggucauauuaauauauuu

SEQ ID NO: 3042370 - RNA, 18 nt, Human
aggucauauuaauauauu

SEQ ID NO: 3042371 - RNA, 23 nt, Human
agguauaauucacauuguauuca

SEQ ID NO: 3042372 - RNA, 18 nt, Human
uggggaguuuaggguggg

SEQ ID NO: 3042373 - RNA, 19 nt, Human
uggggaguuuagggugggg

SEQ ID NO: 3042374 - RNA, 15 nt, Human
ugggguagguuggga

SEQ ID NO: 3042375 - RNA, 21 nt, Human
ugggguagguugggagaaugu

SEQ ID NO: 3042376 - RNA, 14 nt, Human
uggggcugauugua

SEQ ID NO: 3042377 - RNA, 22 nt, Human
uggggacaggggcaggaggaag

SEQ ID NO: 3042378 - RNA, 20 nt, Human
uggggacaggggcaggagga

SEQ ID NO: 3042379 - RNA, 22 nt, Human
agucccugccuggaccagccuc

SEQ ID NO: 3042380 - RNA, 23 nt, Human
agucccugccuggaccagccucu

SEQ ID NO: 3042381 - RNA, 15 nt, Human
agucccugccuggac

SEQ ID NO: 3042382 - RNA, 21 nt, Human
agucccugccuggaccagccu

SEQ ID NO: 3042383 - RNA, 14 nt, Human
agucccugccugga

SEQ ID NO: 3042384 - RNA, 23 nt, Human
agucccugaggcagguccccaga

SEQ ID NO: 3042385 - RNA, 22 nt, Human
agucccugaggcagguccccag

SEQ ID NO: 3042386 - RNA, 20 nt, Human
agucccugaggcaggucccc

SEQ ID NO: 3042387 - RNA, 19 nt, Human
agucccugaggcagguccc

SEQ ID NO: 3042388 - RNA, 22 nt, Human
aguccaggcuuuuuuaucaugu

SEQ ID NO: 3042389 - RNA, 16 nt, Human
aguauuugagaguucu

SEQ ID NO: 3042390 - RNA, 19 nt, Human
aguauguggaagugugggu

SEQ ID NO: 3042391 - RNA, 17 nt, Human
aguauguggaagugugg

SEQ ID NO: 3042392 - RNA, 15 nt, Human
aguauguggaagugu

SEQ ID NO: 3042393 - RNA, 22 nt, Human
ugucaguauguggaaguguggg

SEQ ID NO: 3042394 - RNA, 18 nt, Human
ugucaguauguggaagug

SEQ ID NO: 3042395 - RNA, 20 nt, Human
ugucaguauguggaagugug

SEQ ID NO: 3042396 - RNA, 19 nt, Human
ugucaguauguggaagugu

SEQ ID NO: 3042397 - RNA, 18 nt, Human
agguccccagcuuuggcu

SEQ ID NO: 3042398 - RNA, 10 nt, Human
aggucccuaa

SEQ ID NO: 3042399 - RNA, 17 nt, Human
agguccccagcuuuggc

SEQ ID NO: 3042400 - RNA, 11 nt, Human
agguccccaga

SEQ ID NO: 3042401 - RNA, 23 nt, Human
agguugggagaaugucaguaugu

SEQ ID NO: 3042402 - RNA, 20 nt, Human
uguaauuuaaaauugugaug

SEQ ID NO: 3042403 - RNA, 18 nt, Human
uguaauuuaaaauuguga

SEQ ID NO: 3042404 - RNA, 17 nt, Human
uguaauuuaaaauugug

SEQ ID NO: 3042405 - RNA, 23 nt, Human
aguaaggaauuuuauuuuuuucu

SEQ ID NO: 3042406 - RNA, 22 nt, Human
uguaauuuaaaauugugaugug

SEQ ID NO: 3042407 - RNA, 21 nt, Human
uguaauuuaaaauugugaugu

SEQ ID NO: 3042408 - RNA, 19 nt, Human
aguacuuuuggcauuuuac

SEQ ID NO: 3042409 - RNA, 21 nt, Human
aguaauccaagcaaaugugaa

SEQ ID NO: 3042410 - RNA, 15 nt, Human
aguaauccaagcaaa

SEQ ID NO: 3042411 - RNA, 13 nt, Human
aguagaacagaua

SEQ ID NO: 3042412 - RNA, 19 nt, Human
aguagaacagauaaucagu

SEQ ID NO: 3042413 - RNA, 19 nt, Human
uguggcacuggggcagggg

SEQ ID NO: 3042414 - RNA, 13 nt, Human
uguguguguguau

SEQ ID NO: 3042415 - RNA, 16 nt, Human
uguguguguguaugug

SEQ ID NO: 3042416 - RNA, 13 nt, Human
uguguugugaaug

SEQ ID NO: 3042417 - RNA, 13 nt, Human
uguggucuccacu

SEQ ID NO: 3042418 - RNA, 19 nt, Human
aguguguguuuuucauaaa

SEQ ID NO: 3042419 - RNA, 15 nt, Human
agugugggucugugu

SEQ ID NO: 3042420 - RNA, 17 nt, Human
agugugggucugugugu

SEQ ID NO: 3042421 - RNA, 16 nt, Human
agugugggucugugug

SEQ ID NO: 3042422 - RNA, 23 nt, Human
agugugggucuguguguguguau

SEQ ID NO: 3042423 - RNA, 19 nt, Human
agugugggucugugugugu

SEQ ID NO: 3042424 - RNA, 17 nt, Human
aguuccuagccaccgcc

SEQ ID NO: 3042425 - RNA, 19 nt, Human
aguucggugagcuacaaau

SEQ ID NO: 3042426 - RNA, 15 nt, Human
aguucuacauaagua

SEQ ID NO: 3042427 - RNA, 13 nt, Human
uguuuaguaauca

SEQ ID NO: 3042428 - RNA, 14 nt, Human
uguuuaguaaucau

SEQ ID NO: 3042429 - RNA, 17 nt, Human
uguuuaguaaucauauu

SEQ ID NO: 3042430 - RNA, 16 nt, Human
uguugugugugggagu

SEQ ID NO: 3042431 - RNA, 15 nt, Human
uguugugugugggag

SEQ ID NO: 3042432 - RNA, 14 nt, Human
uguuguguguggga

SEQ ID NO: 3042433 - RNA, 12 nt, Human
uguugugaaugu

SEQ ID NO: 3042434 - RNA, 13 nt, Human
uguugugaauguu

SEQ ID NO: 3042435 - RNA, 14 nt, Human
uguugugauguauu

SEQ ID NO: 3042436 - RNA, 20 nt, Human
uguugugauguauucuagcu

SEQ ID NO: 3042437 - RNA, 19 nt, Human
auaauacuugcuuuggaaa

SEQ ID NO: 3042438 - RNA, 18 nt, Human
auaauccuaaacauauga

SEQ ID NO: 3042439 - RNA, 16 nt, Human
uuagccuuugucccag

SEQ ID NO: 3042440 - RNA, 13 nt, Human
uuaccuuugacaa

SEQ ID NO: 3042441 - RNA, 20 nt, Human
uuaccuuugacaaagguaaa

SEQ ID NO: 3042442 - RNA, 22 nt, Human
auaacgauaaaagacagugaaa

SEQ ID NO: 3042443 - RNA, 14 nt, Human
auaacguauaaaag

SEQ ID NO: 3042444 - RNA, 13 nt, Human
auaacugugaagu

SEQ ID NO: 3042445 - RNA, 18 nt, Human
auaaauauuuuugccaua

SEQ ID NO: 3042446 - RNA, 14 nt, Human
auaaauaaaaauaa

SEQ ID NO: 3042447 - RNA, 15 nt, Human
auaaagguucaugca

SEQ ID NO: 3042448 - RNA, 13 nt, Human
auaaauaaaaaua

SEQ ID NO: 3042449 - RNA, 17 nt, Human
auaaagguucaugcaaa

SEQ ID NO: 3042450 - RNA, 14 nt, Human
aguuuaaauuguaa

SEQ ID NO: 3042451 - RNA, 14 nt, Human
uuaaguauguguaa

SEQ ID NO: 3042452 - RNA, 18 nt, Human
auaaaagccuguuuaaga

SEQ ID NO: 3042453 - RNA, 13 nt, Human
auaaaagccuguu

SEQ ID NO: 3042454 - RNA, 15 nt, Human
uucuaguucugccag

SEQ ID NO: 3042455 - RNA, 16 nt, Human
uucuaguucugccagg

SEQ ID NO: 3042456 - RNA, 14 nt, Human
uucuauaauuuaaa

SEQ ID NO: 3042457 - RNA, 13 nt, Human
uucuauaauuuaa

SEQ ID NO: 3042458 - RNA, 19 nt, Human
aucagacuaugaaguuuuu

SEQ ID NO: 3042459 - RNA, 13 nt, Human
uucuaaaguaaaa

SEQ ID NO: 3042460 - RNA, 15 nt, Human
uucuaaaguaaaaac

SEQ ID NO: 3042461 - RNA, 19 nt, Human
uucuaacaaaaaaauauau

SEQ ID NO: 3042462 - RNA, 20 nt, Human
uucuaacaaaaaaauauauu

SEQ ID NO: 3042463 - RNA, 14 nt, Human
auauuuuaagacga

SEQ ID NO: 3042464 - RNA, 16 nt, Human
uucuuuguaaugaaaa

SEQ ID NO: 3042465 - RNA, 20 nt, Human
auccuagucacuaccuucau

SEQ ID NO: 3042466 - RNA, 22 nt, Human
aucauuggauucugagagcugu

SEQ ID NO: 3042467 - RNA, 21 nt, Human
aucauuggauucugagagcug

SEQ ID NO: 3042468 - RNA, 15 nt, Human
auauauauauauauu

SEQ ID NO: 3042469 - RNA, 13 nt, Human
auagucuuucagu

SEQ ID NO: 3042470 - RNA, 22 nt, Human
auagcuuuucccuuuuuuuaag

SEQ ID NO: 3042471 - RNA, 17 nt, Human
auaggcguaacuaauuu

SEQ ID NO: 3042472 - RNA, 21 nt, Human
uuauuuuguucauacauauuu

SEQ ID NO: 3042473 - RNA, 17 nt, Human
uuauuuuguucauacau

SEQ ID NO: 3042474 - RNA, 13 nt, Human
uuauuuuuuucug

SEQ ID NO: 3042475 - RNA, 17 nt, Human
uuauuuuuuucugaauu

SEQ ID NO: 3042476 - RNA, 16 nt, Human
uucaaaauuguuacaa

SEQ ID NO: 3042477 - RNA, 21 nt, Human
uucaaaauuguuacaaauugu

SEQ ID NO: 3042478 - RNA, 22 nt, Human
uuccaagagccugagagugagg

SEQ ID NO: 3042479 - RNA, 14 nt, Human
uuccaagagccuga

SEQ ID NO: 3042480 - RNA, 13 nt, Human
uuccaagagccug

SEQ ID NO: 3042481 - RNA, 19 nt, Human
uucauaauuauuauuuggc

SEQ ID NO: 3042482 - RNA, 21 nt, Human
uucauacagggaugguguuca

SEQ ID NO: 3042483 - RNA, 23 nt, Human
uucauacauauuuuuguagcacu

SEQ ID NO: 3042484 - RNA, 12 nt, Human
uucauacauauu

SEQ ID NO: 3042485 - RNA, 13 nt, Human
uucauaugcugua

SEQ ID NO: 3042486 - RNA, 19 nt, Human
uucauacauuguacgaaga

SEQ ID NO: 3042487 - RNA, 13 nt, Human
uucauacauugua

SEQ ID NO: 3042488 - RNA, 15 nt, Human
auauauuuaaugaua

SEQ ID NO: 3042489 - RNA, 13 nt, Human
auauauuuaauga

SEQ ID NO: 3042490 - RNA, 12 nt, Human
auauauuuuaag

SEQ ID NO: 3042491 - RNA, 13 nt, Human
auauauuuuaaga

SEQ ID NO: 3042492 - RNA, 13 nt, Human
auaucuuguagcu

SEQ ID NO: 3042493 - RNA, 14 nt, Human
auauauuuuaagac

SEQ ID NO: 3042494 - RNA, 17 nt, Human
auaucuaguaugaaauu

SEQ ID NO: 3042495 - RNA, 15 nt, Human
auaucuaguaugaaa

SEQ ID NO: 3042496 - RNA, 14 nt, Human
auaucuaguaugaa

SEQ ID NO: 3042497 - RNA, 16 nt, Human
augauuccagguggca

SEQ ID NO: 3042498 - RNA, 15 nt, Human
augauuccagguggc

SEQ ID NO: 3042499 - RNA, 14 nt, Human
uuuaaauguuuuuu

SEQ ID NO: 3042500 - RNA, 12 nt, Human
uuuaauuuuaca

SEQ ID NO: 3042501 - RNA, 16 nt, Human
auggccugggggaugu

SEQ ID NO: 3042502 - RNA, 16 nt, Human
auggaaugcuguguua

SEQ ID NO: 3042503 - RNA, 21 nt, Human
auggaaugaugggucaguugu

SEQ ID NO: 3042504 - RNA, 23 nt, Human
augcuucauacagggaugguguu

SEQ ID NO: 3042505 - RNA, 10 nt, Human
augcuucaua

SEQ ID NO: 3042506 - RNA, 12 nt, Human
augcuucauaca

SEQ ID NO: 3042507 - RNA, 11 nt, Human
augcuucauac

SEQ ID NO: 3042508 - RNA, 19 nt, Human
augcuucauacagggaugg

SEQ ID NO: 3042509 - RNA, 16 nt, Human
augcuucauacaggga

SEQ ID NO: 3042510 - RNA, 15 nt, Human
augcuucauacaggg

SEQ ID NO: 3042511 - RNA, 13 nt, Human
augcuucauacag

SEQ ID NO: 3042512 - RNA, 12 nt, Human
uuuaugugaugg

SEQ ID NO: 3042513 - RNA, 13 nt, Human
uuuaugugugugu

SEQ ID NO: 3042514 - RNA, 11 nt, Human
uuuaugugugu

SEQ ID NO: 3042515 - RNA, 16 nt, Human
uuuaguaucuuuuuau

SEQ ID NO: 3042516 - RNA, 16 nt, Human
aucuguaccucugccu

SEQ ID NO: 3042517 - RNA, 20 nt, Human
aucugagaggccacagugca

SEQ ID NO: 3042518 - RNA, 16 nt, Human
aucuccccaucauugg

SEQ ID NO: 3042519 - RNA, 18 nt, Human
aucucauaauuuauacag

SEQ ID NO: 3042520 - RNA, 17 nt, Human
aucucauaauuuauaca

SEQ ID NO: 3042521 - RNA, 23 nt, Human
aucucagugguuaagauuccuaa

SEQ ID NO: 3042522 - RNA, 11 nt, Human
uugauguguuu

SEQ ID NO: 3042523 - RNA, 12 nt, Human
uugaugccuggc

SEQ ID NO: 3042524 - RNA, 15 nt, Human
uugaugggauuuggu

SEQ ID NO: 3042525 - RNA, 14 nt, Human
uugcaucugaaaau

SEQ ID NO: 3042526 - RNA, 15 nt, Human
augagaaaucuaaaa

SEQ ID NO: 3042527 - RNA, 18 nt, Human
augagaaaucuaaaaaac

SEQ ID NO: 3042528 - RNA, 23 nt, Human
augagaaaucuaaaaaacgaaaa

SEQ ID NO: 3042529 - RNA, 22 nt, Human
aucuuuaauuuuacauuuccua

SEQ ID NO: 3042530 - RNA, 16 nt, Human
aucuuuaauuuuacau

SEQ ID NO: 3042531 - RNA, 21 nt, Human
aucuuuaauuuuacauuuccu

SEQ ID NO: 3042532 - RNA, 13 nt, Human
aucuuuuuauuca

SEQ ID NO: 3042533 - RNA, 16 nt, Human
auuauauuuacaaaug

SEQ ID NO: 3042534 - RNA, 13 nt, Human
auuauuuuaaaag

SEQ ID NO: 3042535 - RNA, 14 nt, Human
auuauuuuaaaaga

SEQ ID NO: 3042536 - RNA, 16 nt, Human
auuauuuuauguugca

SEQ ID NO: 3042537 - RNA, 18 nt, Human
auuauuuuauguugcaua

SEQ ID NO: 3042538 - RNA, 15 nt, Human
auuauauuuacaaau

SEQ ID NO: 3042539 - RNA, 16 nt, Human
auuaagaucucagugg

SEQ ID NO: 3042540 - RNA, 15 nt, Human
auuaauauauuucca

SEQ ID NO: 3042541 - RNA, 14 nt, Human
auucagcucaugga

SEQ ID NO: 3042542 - RNA, 20 nt, Human
auuaaaaaaucaguuguaca

SEQ ID NO: 3042543 - RNA, 19 nt, Human
auguuuacagaggacagua

SEQ ID NO: 3042544 - RNA, 17 nt, Human
auguuuacagaggacag

SEQ ID NO: 3042545 - RNA, 15 nt, Human
auguuuacagaggac

SEQ ID NO: 3042546 - RNA, 15 nt, Human
auguugugauguauu

SEQ ID NO: 3042547 - RNA, 19 nt, Human
uuuuaguugcaacuuugua

SEQ ID NO: 3042548 - RNA, 18 nt, Human
uuuuaugugaaacauguu

SEQ ID NO: 3042549 - RNA, 19 nt, Human
uuuuaugugaaacauguuu

SEQ ID NO: 3042550 - RNA, 22 nt, Human
uuuuauguugcauagaauaaaa

SEQ ID NO: 3042551 - RNA, 16 nt, Human
uuuucuauaauuuaaa

SEQ ID NO: 3042552 - RNA, 21 nt, Human
uuuuauucagcucauggacuu

SEQ ID NO: 3042553 - RNA, 17 nt, Human
uuuguagcacugacaga

SEQ ID NO: 3042554 - RNA, 19 nt, Human
uuuguagcacugacagauu

SEQ ID NO: 3042555 - RNA, 17 nt, Human
uuuguaaauuuauguga

SEQ ID NO: 3042556 - RNA, 16 nt, Human
uuuuaaguaaggaauu

SEQ ID NO: 3042557 - RNA, 11 nt, Human
uuuuaagaaau

SEQ ID NO: 3042558 - RNA, 16 nt, Human
auguaugcuucauaca

SEQ ID NO: 3042559 - RNA, 17 nt, Human
auguaugcuucauacag

SEQ ID NO: 3042560 - RNA, 20 nt, Human
auguaugcuucauacaggga

SEQ ID NO: 3042561 - RNA, 13 nt, Human
augucaguaugug

SEQ ID NO: 3042562 - RNA, 14 nt, Human
augucaguaugugg

SEQ ID NO: 3042563 - RNA, 23 nt, Human
uuugcucagugucuggcugcaga

SEQ ID NO: 3042564 - RNA, 19 nt, Human
uuugcuaugagcuggggau

SEQ ID NO: 3042565 - RNA, 22 nt, Human
auuugaauguaugcuucauaca

SEQ ID NO: 3042566 - RNA, 21 nt, Human
auuugaauguaugcuucauac

SEQ ID NO: 3042567 - RNA, 20 nt, Human
auuugaauguaugcuucaua

SEQ ID NO: 3042568 - RNA, 18 nt, Human
auuugaauguaugcuuca

SEQ ID NO: 3042569 - RNA, 17 nt, Human
auuugaauguaugcuuc

SEQ ID NO: 3042570 - RNA, 20 nt, Human
auuuggagacacaacuauuu

SEQ ID NO: 3042571 - RNA, 14 nt, Human
auuuuauguugcau

SEQ ID NO: 3042572 - RNA, 21 nt, Human
auuuuauguugcauagaauaa

SEQ ID NO: 3042573 - RNA, 18 nt, Human
auuuuauguugcauagaa

SEQ ID NO: 3042574 - RNA, 22 nt, Human
auuuuacuguacagacagaaaa

SEQ ID NO: 3042575 - RNA, 20 nt, Human
auuuuacuguacagacagaa

SEQ ID NO: 3042576 - RNA, 17 nt, Human
auuuuaccuuugacaaa

SEQ ID NO: 3042577 - RNA, 21 nt, Human
auuggcucuugaacugagcuu

SEQ ID NO: 3042578 - RNA, 21 nt, Human
auugcuaaucaccaaaggcuc

SEQ ID NO: 3042579 - RNA, 15 nt, Human
auugugaaauuauuc

SEQ ID NO: 3042580 - RNA, 14 nt, Human
auuguauuacaaau

SEQ ID NO: 3042581 - RNA, 16 nt, Human
auuuacaaaugggaaa

SEQ ID NO: 3042582 - RNA, 21 nt, Human
auuuaaaggcccuaucuguuu

SEQ ID NO: 3042583 - RNA, 20 nt, Human
auuuaaaggcccuaucuguu

SEQ ID NO: 3042584 - RNA, 18 nt, Human
auuuaaaggcccuaucug

SEQ ID NO: 3042585 - RNA, 20 nt, Human
auuuaaaauugugauguguc

SEQ ID NO: 3042586 - RNA, 19 nt, Human
auuuaaaauugugaugugu

SEQ ID NO: 3042587 - RNA, 23 nt, Human
auugcaggagucccugccaucau

SEQ ID NO: 3042588 - RNA, 23 nt, Human
agucugagagaggccauucuuuc

SEQ ID NO: 3042589 - RNA, 16 nt, Human
agucugagagaggcca

SEQ ID NO: 3042590 - RNA, 20 nt, Human
agugaauucuugaaggaaaa

SEQ ID NO: 3042591 - RNA, 13 nt, Human
aguauuuuugaca

SEQ ID NO: 3042592 - RNA, 18 nt, Human
aguauuuuugacagaaua

SEQ ID NO: 3042593 - RNA, 17 nt, Human
aguauuuuugacagaau

SEQ ID NO: 3042594 - RNA, 16 nt, Human
aguauuuuugacagaa

SEQ ID NO: 3042595 - RNA, 19 nt, Human
aguaacaaugaagauaaaa

SEQ ID NO: 3042596 - RNA, 23 nt, Human
aguaaaugcuagguuaauuccaa

SEQ ID NO: 3042597 - RNA, 11 nt, Human
aguaaaugcua

SEQ ID NO: 3042598 - RNA, 22 nt, Human
aguaaaugcuagguuaauucca

SEQ ID NO: 3042599 - RNA, 12 nt, Human
agugucuggcug

SEQ ID NO: 3042600 - RNA, 14 nt, Human
agugucuggcugca

SEQ ID NO: 3042601 - RNA, 13 nt, Human
agugucuggcugc

SEQ ID NO: 3042602 - RNA, 15 nt, Human
agugcuaauuuugaa

SEQ ID NO: 3042603 - RNA, 18 nt, Human
agugcuaauuuugaaaaa

SEQ ID NO: 3042604 - RNA, 20 nt, Human
agugcuaauuuugaaaaacu

SEQ ID NO: 3042605 - RNA, 14 nt, Human
aguucagcuugggg

SEQ ID NO: 3042606 - RNA, 13 nt, Human
aguucagcuuggg

SEQ ID NO: 3042607 - RNA, 17 nt, Human
auacccagaaaguuauu

SEQ ID NO: 3042608 - RNA, 13 nt, Human
auaauggucagag

SEQ ID NO: 3042609 - RNA, 14 nt, Human
auaacaaugaaagu

SEQ ID NO: 3042610 - RNA, 18 nt, Human
aguuuggcaaacucucca

SEQ ID NO: 3042611 - RNA, 20 nt, Human
auaaaaagccugcaauuuca

SEQ ID NO: 3042612 - RNA, 16 nt, Human
aguuuggcaaacucuc

SEQ ID NO: 3042613 - RNA, 22 nt, Human
auaaaaagccugcaauuucaua

SEQ ID NO: 3042614 - RNA, 17 nt, Human
auauuauguguuuccau

SEQ ID NO: 3042615 - RNA, 17 nt, Human
auaugcagauuuugccc

SEQ ID NO: 3042616 - RNA, 14 nt, Human
auauuauuuuaugu

SEQ ID NO: 3042617 - RNA, 15 nt, Human
auauuauuuuauguu

SEQ ID NO: 3042618 - RNA, 22 nt, Human
auauuauuuuauguugcauaga

SEQ ID NO: 3042619 - RNA, 19 nt, Human
auauuucccugaaggaacc

SEQ ID NO: 3042620 - RNA, 20 nt, Human
auccagagucccugccugga

SEQ ID NO: 3042621 - RNA, 21 nt, Human
auccagagucccugccuggac

SEQ ID NO: 3042622 - RNA, 19 nt, Human
auccagagucccugccugg

SEQ ID NO: 3042623 - RNA, 19 nt, Human
auccucaguuuuugugaaa

SEQ ID NO: 3042624 - RNA, 22 nt, Human
aucaaauauauucagccuggcu

SEQ ID NO: 3042625 - RNA, 14 nt, Human
aucaaauauauuca

SEQ ID NO: 3042626 - RNA, 21 nt, Human
auauuucccugaaggaaccaa

SEQ ID NO: 3042627 - RNA, 12 nt, Human
aucaugugaaau

SEQ ID NO: 3042628 - RNA, 16 nt, Human
augaaaauauuuaaag

SEQ ID NO: 3042629 - RNA, 14 nt, Human
augaaaauauuuaa

SEQ ID NO: 3042630 - RNA, 13 nt, Human
augaaaauauuua

SEQ ID NO: 3042631 - RNA, 12 nt, Human
augaaaauauuu

SEQ ID NO: 3042632 - RNA, 20 nt, Human
augagggucuugguuccagc

SEQ ID NO: 3042633 - RNA, 13 nt, Human
augagggucuugg

SEQ ID NO: 3042634 - RNA, 22 nt, Human
aucucugcaggaaauggcugug

SEQ ID NO: 3042635 - RNA, 18 nt, Human
aucugggggccucuucug

SEQ ID NO: 3042636 - RNA, 14 nt, Human
aucuaguaugaaau

SEQ ID NO: 3042637 - RNA, 19 nt, Human
aucuaguaugaaauuauau

SEQ ID NO: 3042638 - RNA, 18 nt, Human
aucuaguaugaaauuaua

SEQ ID NO: 3042639 - RNA, 17 nt, Human
aucuaguaugaaauuau

SEQ ID NO: 3042640 - RNA, 16 nt, Human
aucuaguaugaaauua

SEQ ID NO: 3042641 - RNA, 15 nt, Human
aucuaguaugaaauu

SEQ ID NO: 3042642 - RNA, 17 nt, Human
auggauaggcacaggaa

SEQ ID NO: 3042643 - RNA, 18 nt, Human
auggauaggcacaggaaa

SEQ ID NO: 3042644 - RNA, 15 nt, Human
augaugaaaauauuu

SEQ ID NO: 3042645 - RNA, 13 nt, Human
augaugaaaauau

SEQ ID NO: 3042646 - RNA, 19 nt, Human
augaugaaaauauuuaaag

SEQ ID NO: 3042647 - RNA, 16 nt, Human
augaugggucaguugu

SEQ ID NO: 3042648 - RNA, 23 nt, Human
augcacaaauucugucucuggau

SEQ ID NO: 3042649 - RNA, 15 nt, Human
augcacaaauucugu

SEQ ID NO: 3042650 - RNA, 22 nt, Human
augcacaaauucugucucugga

SEQ ID NO: 3042651 - RNA, 15 nt, Human
auguguaaaauguga

SEQ ID NO: 3042652 - RNA, 14 nt, Human
augugaaaucauuc

SEQ ID NO: 3042653 - RNA, 14 nt, Human
augugaaacauguu

SEQ ID NO: 3042654 - RNA, 16 nt, Human
augugaacagcggcug

SEQ ID NO: 3042655 - RNA, 17 nt, Human
augugaaaucauucauu

SEQ ID NO: 3042656 - RNA, 18 nt, Human
augugaaaucauucauuu

SEQ ID NO: 3042657 - RNA, 16 nt, Human
aggaaccgaggcaggg

SEQ ID NO: 3042658 - RNA, 16 nt, Human
aggaacugcugggcuu

SEQ ID NO: 3042659 - RNA, 22 nt, Human
aggaacugcugggcuuggcagc

SEQ ID NO: 3042660 - RNA, 16 nt, Human
aggaaccauaaucaau

SEQ ID NO: 3042661 - RNA, 15 nt, Human
aggaaccaaagcgaa

SEQ ID NO: 3042662 - RNA, 13 nt, Human
aggaaccaaagcg

SEQ ID NO: 3042663 - RNA, 15 nt, Human
agcuuuuaugugaaa

SEQ ID NO: 3042664 - RNA, 16 nt, Human
agcuccuuaaggcucu

SEQ ID NO: 3042665 - RNA, 17 nt, Human
agcuccuuaaggcucuu

SEQ ID NO: 3042666 - RNA, 15 nt, Human
agcugcgggcugggu

SEQ ID NO: 3042667 - RNA, 18 nt, Human
agccuggcuucaaauugu

SEQ ID NO: 3042668 - RNA, 17 nt, Human
agccuggcuucaaauug

SEQ ID NO: 3042669 - RNA, 19 nt, Human
agcuaauucuuugaccugu

SEQ ID NO: 3042670 - RNA, 23 nt, Human
agcuaauguaauaacugugaagu

SEQ ID NO: 3042671 - RNA, 23 nt, Human
aggucccuaauaaagcugugugg

SEQ ID NO: 3042672 - RNA, 18 nt, Human
aggggcaggaggaagggg

SEQ ID NO: 3042673 - RNA, 13 nt, Human
aggggcaggagga

SEQ ID NO: 3042674 - RNA, 12 nt, Human
aggggcaggagg

SEQ ID NO: 3042675 - RNA, 16 nt, Human
agggaugguguucaaa

SEQ ID NO: 3042676 - RNA, 14 nt, Human
agggaugguguuca

SEQ ID NO: 3042677 - RNA, 17 nt, Human
agggacugagaaauuua

SEQ ID NO: 3042678 - RNA, 10 nt, Human
agagggcugc

SEQ ID NO: 3042679 - RNA, 15 nt, Human
agagccugagaguga

SEQ ID NO: 3042680 - RNA, 22 nt, Human
agacagccaacuauggccugug

SEQ ID NO: 3042681 - RNA, 15 nt, Human
agccaagaggcugca

SEQ ID NO: 3042682 - RNA, 21 nt, Human
agcaaagcugaugacaacuuc

SEQ ID NO: 3042683 - RNA, 23 nt, Human
agcaaagcugaugacaacuuccc

SEQ ID NO: 3042684 - RNA, 18 nt, Human
agaugaugaaaauauuua

SEQ ID NO: 3042685 - RNA, 23 nt, Human
agaugaugaaaauauuuaaaggc

SEQ ID NO: 3042686 - RNA, 14 nt, Human
agaugguucuagca

SEQ ID NO: 3042687 - RNA, 13 nt, Human
aagggagggggag

SEQ ID NO: 3042688 - RNA, 15 nt, Human
aagggacugagaaau

SEQ ID NO: 3042689 - RNA, 17 nt, Human
aagggacugagaaauuu

SEQ ID NO: 3042690 - RNA, 12 nt, Human
aaggaauuuuau

SEQ ID NO: 3042691 - RNA, 15 nt, Human
aagacuuuuaugaua

SEQ ID NO: 3042692 - RNA, 18 nt, Human
aagagaagggcagggcug

SEQ ID NO: 3042693 - RNA, 21 nt, Human
aagacauucuuccaaaaagau

SEQ ID NO: 3042694 - RNA, 23 nt, Human
aagacagugaaagaaaauaacaa

SEQ ID NO: 3042695 - RNA, 13 nt, Human
aagauuuucagaa

SEQ ID NO: 3042696 - RNA, 12 nt, Human
aauaaaauuuuu

SEQ ID NO: 3042697 - RNA, 17 nt, Human
aauaaaccucaaaaugu

SEQ ID NO: 3042698 - RNA, 20 nt, Human
aauaaaccucaaaaugucua

SEQ ID NO: 3042699 - RNA, 11 nt, Human
aauaaagcugu

SEQ ID NO: 3042700 - RNA, 19 nt, Human
aauaaagcuguguggcagu

SEQ ID NO: 3042701 - RNA, 14 nt, Human
aauaauaaauauuu

SEQ ID NO: 3042702 - RNA, 15 nt, Human
aauccaaugaaauga

SEQ ID NO: 3042703 - RNA, 17 nt, Human
aaaccucaaaaugucua

SEQ ID NO: 3042704 - RNA, 22 nt, Human
aaaccucaaaaugucuaagaua

SEQ ID NO: 3042705 - RNA, 16 nt, Human
aaagauaaauauuaua

SEQ ID NO: 3042706 - RNA, 13 nt, Human
aaagaggugugca

SEQ ID NO: 3042707 - RNA, 13 nt, Human
aaagauaaauauu

SEQ ID NO: 3042708 - RNA, 15 nt, Human
aaagauaaauauuau

SEQ ID NO: 3042709 - RNA, 14 nt, Human
aaagauaaauauua

SEQ ID NO: 3042710 - RNA, 15 nt, Human
aaagccaagaggcug

SEQ ID NO: 3042711 - RNA, 19 nt, Human
aaauaaaccucaaaauguc

SEQ ID NO: 3042712 - RNA, 20 nt, Human
aaauaaaaauauuguguugu

SEQ ID NO: 3042713 - RNA, 21 nt, Human
aaaauccacuuuaucuugaau

SEQ ID NO: 3042714 - RNA, 15 nt, Human
aaaauaaaaaacacu

SEQ ID NO: 3042715 - RNA, 22 nt, Human
aaaauuaacaugaauauuuagu

SEQ ID NO: 3042716 - RNA, 12 nt, Human
aaaauuaagaaa

SEQ ID NO: 3042717 - RNA, 13 nt, Human
aaaauuaagaaag

SEQ ID NO: 3042718 - RNA, 20 nt, Human
aaaauuaagaaaggauaaag

SEQ ID NO: 3042719 - RNA, 20 nt, Human
aaaauuauuuuguucauaca

SEQ ID NO: 3042720 - RNA, 18 nt, Human
aaaauuauuuuguucaua

SEQ ID NO: 3042721 - RNA, 16 nt, Human
aaaauuauuuuguuca

SEQ ID NO: 3042722 - RNA, 15 nt, Human
aacaucccuccuggg

SEQ ID NO: 3042723 - RNA, 20 nt, Human
aacagcggcuggacuuggag

SEQ ID NO: 3042724 - RNA, 17 nt, Human
aacugagcuuggaagcu

SEQ ID NO: 3042725 - RNA, 13 nt, Human
aacugagcuugga

SEQ ID NO: 3042726 - RNA, 21 nt, Human
aacugagcuuggaagcuucug

SEQ ID NO: 3042727 - RNA, 15 nt, Human
aacguauaaaagccu

SEQ ID NO: 3042728 - RNA, 20 nt, Human
aaaugcuagguuaauuccaa

SEQ ID NO: 3042729 - RNA, 17 nt, Human
aacacuaacaugauuug

SEQ ID NO: 3042730 - RNA, 22 nt, Human
aaauguuuuuuuuuaaagacuu

SEQ ID NO: 3042731 - RNA, 14 nt, Human
aaauugauguguuu

SEQ ID NO: 3042732 - RNA, 18 nt, Human
aaauugaugggauuuggu

SEQ ID NO: 3042733 - RNA, 18 nt, Human
aaauguuuuuuuuuaaag

SEQ ID NO: 3042734 - RNA, 21 nt, Human
aaauguuuuuuuuuaaagacu

SEQ ID NO: 3042735 - RNA, 19 nt, Human
accggggccugggcaggag

SEQ ID NO: 3042736 - RNA, 22 nt, Human
acuaggugcccagaaugaggcu

SEQ ID NO: 3042737 - RNA, 15 nt, Human
acuuuauuuuguguu

SEQ ID NO: 3042738 - RNA, 15 nt, Human
acauaaguaauucaa

SEQ ID NO: 3042739 - RNA, 19 nt, Human
acauaauuaaauuuugagu

SEQ ID NO: 3042740 - RNA, 14 nt, Human
accaucucuuuacc

SEQ ID NO: 3042741 - RNA, 16 nt, Human
acauuuccuaaauaua

SEQ ID NO: 3042742 - RNA, 17 nt, Human
acauuuccuaaauauau

SEQ ID NO: 3042743 - RNA, 23 nt, Human
aauuggguggggggcuucauaca

SEQ ID NO: 3042744 - RNA, 22 nt, Human
aauuggguggggggcuucauac

SEQ ID NO: 3042745 - RNA, 21 nt, Human
aauuggguggggggcuucaua

SEQ ID NO: 3042746 - RNA, 11 nt, Human
aauugugaugu

SEQ ID NO: 3042747 - RNA, 15 nt, Human
aauugugaugugucc

SEQ ID NO: 3042748 - RNA, 14 nt, Human
aauugugauguguc

SEQ ID NO: 3042749 - RNA, 18 nt, Human
aauuuucaucuaggauuu

SEQ ID NO: 3042750 - RNA, 12 nt, Human
acaaagaaauua

SEQ ID NO: 3042751 - RNA, 14 nt, Human
acaaagaaauuaug

SEQ ID NO: 3042752 - RNA, 16 nt, Human
acaaagaaauuaugug

SEQ ID NO: 3042753 - RNA, 23 nt, Human
acagaggacaguauuugugggga

SEQ ID NO: 3042754 - RNA, 20 nt, Human
acacugggagaaaugaaaaa

SEQ ID NO: 3042755 - RNA, 20 nt, Human
acacguaaugaaacuuggau

SEQ ID NO: 3042756 - RNA, 18 nt, Human
caaggaaaaaauaacaau

SEQ ID NO: 3042757 - RNA, 20 nt, Human
caaggaaaaaauaacaauga

SEQ ID NO: 3042758 - RNA, 12 nt, Human
caagccugguca

SEQ ID NO: 3042759 - RNA, 17 nt, Human
caagccuuggcucuacc

SEQ ID NO: 3042760 - RNA, 18 nt, Human
caagccuggucagcccaa

SEQ ID NO: 3042761 - RNA, 17 nt, Human
caagccuggucagccca

SEQ ID NO: 3042762 - RNA, 16 nt, Human
caagccuggucagccc

SEQ ID NO: 3042763 - RNA, 15 nt, Human
caagccuggucagcc

SEQ ID NO: 3042764 - RNA, 19 nt, Human
caauaauaaauauuuuugc

SEQ ID NO: 3042765 - RNA, 15 nt, Human
caaauaaaaauauug

SEQ ID NO: 3042766 - RNA, 16 nt, Human
caaauaaaaauauugu

SEQ ID NO: 3042767 - RNA, 18 nt, Human
caaauaaaaauauugugu

SEQ ID NO: 3042768 - RNA, 19 nt, Human
caaagagagaaaauaaaga

SEQ ID NO: 3042769 - RNA, 15 nt, Human
caaagaaauuaugug

SEQ ID NO: 3042770 - RNA, 16 nt, Human
caaagagagaaaauaa

SEQ ID NO: 3042771 - RNA, 23 nt, Human
caaauauauucagccuggcuuca

SEQ ID NO: 3042772 - RNA, 18 nt, Human
caaaauaauuuuaagaaa

SEQ ID NO: 3042773 - RNA, 22 nt, Human
caaaauaauuuuaagaaaucaa

SEQ ID NO: 3042774 - RNA, 13 nt, Human
cacaggaaaccag

SEQ ID NO: 3042775 - RNA, 19 nt, Human
cauccuacccccugugccu

SEQ ID NO: 3042776 - RNA, 12 nt, Human
caucuaggauuu

SEQ ID NO: 3042777 - RNA, 18 nt, Human
caucuagguaaauuacag

SEQ ID NO: 3042778 - RNA, 17 nt, Human
caucuagguaaauuaca

SEQ ID NO: 3042779 - RNA, 22 nt, Human
caucaagucuuucacauuuaaa

SEQ ID NO: 3042780 - RNA, 14 nt, Human
cauauuuuucacau

SEQ ID NO: 3042781 - RNA, 21 nt, Human
cauauuuuucacauaucuagu

SEQ ID NO: 3042782 - RNA, 12 nt, Human
cauauuuauaaa

SEQ ID NO: 3042783 - RNA, 18 nt, Human
cauauuuuucacauaucu

SEQ ID NO: 3042784 - RNA, 17 nt, Human
cauauuuauaaaaauaa

SEQ ID NO: 3042785 - RNA, 21 nt, Human
cauaugauguacauguacuga

SEQ ID NO: 3042786 - RNA, 15 nt, Human
cauaugauguacaug

SEQ ID NO: 3042787 - RNA, 17 nt, Human
cauaugauguacaugua

SEQ ID NO: 3042788 - RNA, 14 nt, Human
cauagaauaaaauu

SEQ ID NO: 3042789 - RNA, 20 nt, Human
cauagaauaaaauuuuuaau

SEQ ID NO: 3042790 - RNA, 19 nt, Human
cagugucuggcugcagagc

SEQ ID NO: 3042791 - RNA, 17 nt, Human
cagugucuggcugcaga

SEQ ID NO: 3042792 - RNA, 23 nt, Human
cagugugucuaaauuugaauguu

SEQ ID NO: 3042793 - RNA, 14 nt, Human
cagugugucuaaau

SEQ ID NO: 3042794 - RNA, 11 nt, Human
cagugguuaag

SEQ ID NO: 3042795 - RNA, 16 nt, Human
caguggcuggaucugu

SEQ ID NO: 3042796 - RNA, 20 nt, Human
caguggcuggaucugugagg

SEQ ID NO: 3042797 - RNA, 18 nt, Human
caguggcuggaucuguga

SEQ ID NO: 3042798 - RNA, 16 nt, Human
caguucucuucacuca

SEQ ID NO: 3042799 - RNA, 22 nt, Human
caguucggugagcuacaaaugc

SEQ ID NO: 3042800 - RNA, 18 nt, Human
caguguuccgugguuaaa

SEQ ID NO: 3042801 - RNA, 14 nt, Human
cauaaagcaggcag

SEQ ID NO: 3042802 - RNA, 16 nt, Human
cauaaagcaggcagaa

SEQ ID NO: 3042803 - RNA, 23 nt, Human
cauaaaaagccugcaauuucaua

SEQ ID NO: 3042804 - RNA, 23 nt, Human
cauaaaaacaacuuuauacccag

SEQ ID NO: 3042805 - RNA, 21 nt, Human
cauaaaaacaacuuuauaccc

SEQ ID NO: 3042806 - RNA, 20 nt, Human
cauaaaaacaacuuuauacc

SEQ ID NO: 3042807 - RNA, 17 nt, Human
cauaaaaacaacuuuau

SEQ ID NO: 3042808 - RNA, 15 nt, Human
cauacauuguacgaa

SEQ ID NO: 3042809 - RNA, 19 nt, Human
cauacauauuuuuguagca

SEQ ID NO: 3042810 - RNA, 12 nt, Human
cauacauauuuu

SEQ ID NO: 3042811 - RNA, 15 nt, Human
cauaauacuugcuuu

SEQ ID NO: 3042812 - RNA, 11 nt, Human
cauacauauuu

SEQ ID NO: 3042813 - RNA, 18 nt, Human
cauaaucacaacccuuca

SEQ ID NO: 3042814 - RNA, 18 nt, Human
cauaaguaauucaagaaa

SEQ ID NO: 3042815 - RNA, 22 nt, Human
cauaaguaauucaagaaaacaa

SEQ ID NO: 3042816 - RNA, 16 nt, Human
cauaaguaauucaaga

SEQ ID NO: 3042817 - RNA, 17 nt, Human
cauaaguaauucaagaa

SEQ ID NO: 3042818 - RNA, 15 nt, Human
cauaaaaacaacuuu

SEQ ID NO: 3042819 - RNA, 15 nt, Human
cauaccuggcccugu

SEQ ID NO: 3042820 - RNA, 16 nt, Human
ccaagagccugagagu

SEQ ID NO: 3042821 - RNA, 13 nt, Human
ccaagaggcugca

SEQ ID NO: 3042822 - RNA, 12 nt, Human
ccaagaggcugc

SEQ ID NO: 3042823 - RNA, 12 nt, Human
ccaagagccuga

SEQ ID NO: 3042824 - RNA, 22 nt, Human
cauguuucuuuguaaugaaaac

SEQ ID NO: 3042825 - RNA, 20 nt, Human
cauguuucuuuguaaugaaa

SEQ ID NO: 3042826 - RNA, 21 nt, Human
cauguuucuuuguaaugaaaa

SEQ ID NO: 3042827 - RNA, 15 nt, Human
caugugaaaucauuc

SEQ ID NO: 3042828 - RNA, 16 nt, Human
caugugaaaucauuca

SEQ ID NO: 3042829 - RNA, 17 nt, Human
caugugaaaucauucau

SEQ ID NO: 3042830 - RNA, 20 nt, Human
cauggugacuuuugaaaaga

SEQ ID NO: 3042831 - RNA, 22 nt, Human
cauuaccucagugagaagccag

SEQ ID NO: 3042832 - RNA, 21 nt, Human
cauuaccucagugagaagcca

SEQ ID NO: 3042833 - RNA, 19 nt, Human
cauggggcugauuguauuu

SEQ ID NO: 3042834 - RNA, 21 nt, Human
cauggagauagccccacagga

SEQ ID NO: 3042835 - RNA, 22 nt, Human
cauggacuucugccagcauaau

SEQ ID NO: 3042836 - RNA, 17 nt, Human
ccuccauccuacccccu

SEQ ID NO: 3042837 - RNA, 22 nt, Human
ccuccauccuacccccugugcc

SEQ ID NO: 3042838 - RNA, 23 nt, Human
ccuccauccuacccccugugccu

SEQ ID NO: 3042839 - RNA, 13 nt, Human
ccuccacucuccu

SEQ ID NO: 3042840 - RNA, 14 nt, Human
ccucuacugggagc

SEQ ID NO: 3042841 - RNA, 18 nt, Human
ccucagccccgcguggaa

SEQ ID NO: 3042842 - RNA, 22 nt, Human
ccuaucuguuuacaguguuccg

SEQ ID NO: 3042843 - RNA, 14 nt, Human
ccucacacucaccc

SEQ ID NO: 3042844 - RNA, 19 nt, Human
ccggggccugggcaggagg

SEQ ID NO: 3042845 - RNA, 15 nt, Human
ccggggccugggcag

SEQ ID NO: 3042846 - RNA, 13 nt, Human
ccgggagcucagg

SEQ ID NO: 3042847 - RNA, 15 nt, Human
ccgggagcucaggaa

SEQ ID NO: 3042848 - RNA, 17 nt, Human
ccggcuuuguggcacug

SEQ ID NO: 3042849 - RNA, 19 nt, Human
ccggcuuuguggcacuggg

SEQ ID NO: 3042850 - RNA, 16 nt, Human
ccggcuuuguggcacu

SEQ ID NO: 3042851 - RNA, 13 nt, Human
cccuggugguuca

SEQ ID NO: 3042852 - RNA, 13 nt, Human
ccuaaacauauga

SEQ ID NO: 3042853 - RNA, 15 nt, Human
ccuacagcccaccug

SEQ ID NO: 3042854 - RNA, 22 nt, Human
ccuagguauaauucacauugua

SEQ ID NO: 3042855 - RNA, 12 nt, Human
cccugccuggac

SEQ ID NO: 3042856 - RNA, 13 nt, Human
cccugccuggacc

SEQ ID NO: 3042857 - RNA, 18 nt, Human
cccugccuggaccagccu

SEQ ID NO: 3042858 - RNA, 16 nt, Human
cccugccucucugcag

SEQ ID NO: 3042859 - RNA, 21 nt, Human
cccugccucucugcagguccc

SEQ ID NO: 3042860 - RNA, 22 nt, Human
cccugccucucugcaggucccu

SEQ ID NO: 3042861 - RNA, 21 nt, Human
cccuggacugugugcucagga

SEQ ID NO: 3042862 - RNA, 17 nt, Human
cccugggaggcucugga

SEQ ID NO: 3042863 - RNA, 18 nt, Human
cccugggaggcucuggag

SEQ ID NO: 3042864 - RNA, 15 nt, Human
cccugggaggcucug

SEQ ID NO: 3042865 - RNA, 16 nt, Human
cccugggaggcucugg

SEQ ID NO: 3042866 - RNA, 20 nt, Human
cccucuacugggagccuacc

SEQ ID NO: 3042867 - RNA, 17 nt, Human
cccucuacugggagccu

SEQ ID NO: 3042868 - RNA, 20 nt, Human
cccugccaucauguuuacag

SEQ ID NO: 3042869 - RNA, 11 nt, Human
cccugccucuc

SEQ ID NO: 3042870 - RNA, 18 nt, Human
cccugccucucugcaggu

SEQ ID NO: 3042871 - RNA, 14 nt, Human
cccucaucuuucuu

SEQ ID NO: 3042872 - RNA, 19 nt, Human
cccucauuggcucuugaac

SEQ ID NO: 3042873 - RNA, 23 nt, Human
cccucccucuacugggagccuac

SEQ ID NO: 3042874 - RNA, 12 nt, Human
cccuaauaaagc

SEQ ID NO: 3042875 - RNA, 13 nt, Human
cccuaauaaagcu

SEQ ID NO: 3042876 - RNA, 14 nt, Human
cccuaauaaagcug

SEQ ID NO: 3042877 - RNA, 15 nt, Human
cccuaauaaagcugu

SEQ ID NO: 3042878 - RNA, 18 nt, Human
cccuaauaaagcugugug

SEQ ID NO: 3042879 - RNA, 23 nt, Human
ccccuggugguucacucuuggag

SEQ ID NO: 3042880 - RNA, 23 nt, Human
ccccacaggagguggucugggac

SEQ ID NO: 3042881 - RNA, 21 nt, Human
ccccagcuggggccaggcugg

SEQ ID NO: 3042882 - RNA, 22 nt, Human
ccccagcuggggccaggcuggg

SEQ ID NO: 3042883 - RNA, 18 nt, Human
cccagaaugccuccugca

SEQ ID NO: 3042884 - RNA, 21 nt, Human
cccagcuaugguucucucgca

SEQ ID NO: 3042885 - RNA, 16 nt, Human
cccaggaccccugagu

SEQ ID NO: 3042886 - RNA, 22 nt, Human
ccaucauguuuacagaggacag

SEQ ID NO: 3042887 - RNA, 20 nt, Human
ccaucauguuuacagaggac

SEQ ID NO: 3042888 - RNA, 13 nt, Human
cuacccccugugc

SEQ ID NO: 3042889 - RNA, 14 nt, Human
cuacccccugugcc

SEQ ID NO: 3042890 - RNA, 19 nt, Human
cuaauguaauaacugugaa

SEQ ID NO: 3042891 - RNA, 12 nt, Human
cuaauaaagcug

SEQ ID NO: 3042892 - RNA, 13 nt, Human
cuaauaaagcugu

SEQ ID NO: 3042893 - RNA, 21 nt, Human
cuacuguaaggcaaucauggu

SEQ ID NO: 3042894 - RNA, 16 nt, Human
cuaguaugaaauuaua

SEQ ID NO: 3042895 - RNA, 18 nt, Human
cuaugacauaaaaacaac

SEQ ID NO: 3042896 - RNA, 21 nt, Human
cuaucuguuuacaguguuccg

SEQ ID NO: 3042897 - RNA, 17 nt, Human
cuaucuguuuacagugu

SEQ ID NO: 3042898 - RNA, 20 nt, Human
cuaucuguuuacaguguucc

SEQ ID NO: 3042899 - RNA, 21 nt, Human
cuaugacauaaaaacaacuuu

SEQ ID NO: 3042900 - RNA, 18 nt, Human
cuauuuuaauaaacacuc

SEQ ID NO: 3042901 - RNA, 22 nt, Human
cuauuuuaauaaacacucuuga

SEQ ID NO: 3042902 - RNA, 16 nt, Human
cguuguccucagcccc

SEQ ID NO: 3042903 - RNA, 17 nt, Human
cuaaauauauuuuaaga

SEQ ID NO: 3042904 - RNA, 18 nt, Human
cuaaauauauuuuaagac

SEQ ID NO: 3042905 - RNA, 20 nt, Human
cuaaauauauuuuaagacga

SEQ ID NO: 3042906 - RNA, 15 nt, Human
cuaacaugauuuggg

SEQ ID NO: 3042907 - RNA, 23 nt, Human
cuaaauuugaauguuaagcagau

SEQ ID NO: 3042908 - RNA, 23 nt, Human
cguggcuguggcauccagagucc

SEQ ID NO: 3042909 - RNA, 19 nt, Human
cggggccugggcaggaggg

SEQ ID NO: 3042910 - RNA, 17 nt, Human
cggggccugggcaggag

SEQ ID NO: 3042911 - RNA, 18 nt, Human
cgggggcagucugagaga

SEQ ID NO: 3042912 - RNA, 21 nt, Human
cgggggcagucugagagaggc

SEQ ID NO: 3042913 - RNA, 17 nt, Human
cgggggcagucugagag

SEQ ID NO: 3042914 - RNA, 17 nt, Human
cgggagccugacccuca

SEQ ID NO: 3042915 - RNA, 12 nt, Human
cggcugggagga

SEQ ID NO: 3042916 - RNA, 15 nt, Human
cgggucaucuguacc

SEQ ID NO: 3042917 - RNA, 22 nt, Human
cgggucaucuguaccucugccu

SEQ ID NO: 3042918 - RNA, 17 nt, Human
cggugagcuacaaaugc

SEQ ID NO: 3042919 - RNA, 15 nt, Human
cggcuggacuuggag

SEQ ID NO: 3042920 - RNA, 16 nt, Human
cgcccuggacugugug

SEQ ID NO: 3042921 - RNA, 23 nt, Human
cucuuggggaguuuagggugggg

SEQ ID NO: 3042922 - RNA, 21 nt, Human
cucuuggggaguuuagggugg

SEQ ID NO: 3042923 - RNA, 22 nt, Human
cucugugcccacccuccacucu

SEQ ID NO: 3042924 - RNA, 19 nt, Human
cucuggagcccacuguacu

SEQ ID NO: 3042925 - RNA, 19 nt, Human
cugaggcagguccccagac

SEQ ID NO: 3042926 - RNA, 18 nt, Human
cugaggcagguccccaga

SEQ ID NO: 3042927 - RNA, 17 nt, Human
cugaggcagguccccag

SEQ ID NO: 3042928 - RNA, 14 nt, Human
cugaggcagguccc

SEQ ID NO: 3042929 - RNA, 19 nt, Human
cugaggaucagaguaaucc

SEQ ID NO: 3042930 - RNA, 17 nt, Human
cugaggaucagaguaau

SEQ ID NO: 3042931 - RNA, 11 nt, Human
cugagaaauuu

SEQ ID NO: 3042932 - RNA, 14 nt, Human
cugagaaauuuaua

SEQ ID NO: 3042933 - RNA, 15 nt, Human
cugacuaugacauaa

SEQ ID NO: 3042934 - RNA, 15 nt, Human
cugacagauuuccau

SEQ ID NO: 3042935 - RNA, 11 nt, Human
cugacagauuu

SEQ ID NO: 3042936 - RNA, 22 nt, Human
cucuccacucaugugacucuuu

SEQ ID NO: 3042937 - RNA, 21 nt, Human
cucuccacucaugugacucuu

SEQ ID NO: 3042938 - RNA, 18 nt, Human
cucuccugucucccuccu

SEQ ID NO: 3042939 - RNA, 15 nt, Human
cucuccugucucccu

SEQ ID NO: 3042940 - RNA, 17 nt, Human
cucuccugucucccucc

SEQ ID NO: 3042941 - RNA, 21 nt, Human
cucuccugauagucuuucagu

SEQ ID NO: 3042942 - RNA, 21 nt, Human
cucuacugggagccuacccac

SEQ ID NO: 3042943 - RNA, 18 nt, Human
cucuacugggagccuacc

SEQ ID NO: 3042944 - RNA, 21 nt, Human
cuccucgagaucccaacacug

SEQ ID NO: 3042945 - RNA, 24 nt, Human
cuccucgagaucccaacacugcca

SEQ ID NO: 3042946 - RNA, 17 nt, Human
cuccucgagaucccaac

SEQ ID NO: 3042947 - RNA, 20 nt, Human
cuccauccuacccccugugc

SEQ ID NO: 3042948 - RNA, 22 nt, Human
cuccauccuacccccugugccu

SEQ ID NO: 3042949 - RNA, 23 nt, Human
cuccauccuacccccugugccuu

SEQ ID NO: 3042950 - RNA, 18 nt, Human
cuccauccuacccccugu

SEQ ID NO: 3042951 - RNA, 19 nt, Human
cugcccgggagcucaggaa

SEQ ID NO: 3042952 - RNA, 18 nt, Human
cugcccgggagcucagga

SEQ ID NO: 3042953 - RNA, 11 nt, Human
cugccaggaga

SEQ ID NO: 3042954 - RNA, 17 nt, Human
cugccagacccccugga

SEQ ID NO: 3042955 - RNA, 19 nt, Human
cugccagacccccuggaga

SEQ ID NO: 3042956 - RNA, 23 nt, Human
cugcagagcugcgggcugggugu

SEQ ID NO: 3042957 - RNA, 11 nt, Human
cugcagguccc

SEQ ID NO: 3042958 - RNA, 12 nt, Human
cugcaggucccu

SEQ ID NO: 3042959 - RNA, 13 nt, Human
cugcaggucccua

SEQ ID NO: 3042960 - RNA, 14 nt, Human
cugcaggucccuaa

SEQ ID NO: 3042961 - RNA, 15 nt, Human
cugcaggucccuaau

SEQ ID NO: 3042962 - RNA, 16 nt, Human
cugcaggucccuaaua

SEQ ID NO: 3042963 - RNA, 17 nt, Human
cugcaggucccuaauaa

SEQ ID NO: 3042964 - RNA, 18 nt, Human
cugcaggucccuaauaaa

SEQ ID NO: 3042965 - RNA, 23 nt, Human
cugcaggucccuaauaaagcugu

SEQ ID NO: 3042966 - RNA, 19 nt, Human
cugcaggucccuaauaaag

SEQ ID NO: 3042967 - RNA, 20 nt, Human
cugcaggucccuaauaaagc

SEQ ID NO: 3042968 - RNA, 21 nt, Human
cugcaggucccuaauaaagcu

SEQ ID NO: 3042969 - RNA, 22 nt, Human
cugcaggucccuaauaaagcug

SEQ ID NO: 3042970 - RNA, 22 nt, Human
cugcgggcuggguguggucucc

SEQ ID NO: 3042971 - RNA, 22 nt, Human
cugccugcuuuuuauggccugu

SEQ ID NO: 3042972 - RNA, 14 nt, Human
cugcugccugcuuu

SEQ ID NO: 3042973 - RNA, 23 nt, Human
cugcugccugcuuuuuauggccu

SEQ ID NO: 3042974 - RNA, 15 nt, Human
cugcucugugcccac

SEQ ID NO: 3042975 - RNA, 18 nt, Human
cuggcuguggccuaaccu

SEQ ID NO: 3042976 - RNA, 19 nt, Human
cugggaggagggcaggcau

SEQ ID NO: 3042977 - RNA, 16 nt, Human
cugggagccuacccac

SEQ ID NO: 3042978 - RNA, 22 nt, Human
cugggagccuacccacccccag

SEQ ID NO: 3042979 - RNA, 19 nt, Human
cugggagccuacccacccc

SEQ ID NO: 3042980 - RNA, 17 nt, Human
cugggaggcucuggagc

SEQ ID NO: 3042981 - RNA, 18 nt, Human
cugggaggcucuggagcc

SEQ ID NO: 3042982 - RNA, 20 nt, Human
cugggaggcucuggagccca

SEQ ID NO: 3042983 - RNA, 21 nt, Human
cugggaggcucuggagcccac

SEQ ID NO: 3042984 - RNA, 16 nt, Human
cuggcacagccuggcu

SEQ ID NO: 3042985 - RNA, 21 nt, Human
cuggcacagccuggcuguggc

SEQ ID NO: 3042986 - RNA, 15 nt, Human
cuggcacagccuggc

SEQ ID NO: 3042987 - RNA, 23 nt, Human
cuggcacagccuggcuguggccu

SEQ ID NO: 3042988 - RNA, 20 nt, Human
cuggaagugcuaauuuugaa

SEQ ID NO: 3042989 - RNA, 13 nt, Human
cuggucagcccaa

SEQ ID NO: 3042990 - RNA, 12 nt, Human
cuggucagccca

SEQ ID NO: 3042991 - RNA, 16 nt, Human
cugggucgcccuggac

SEQ ID NO: 3042992 - RNA, 22 nt, Human
cugggucgcccuggacugugug

SEQ ID NO: 3042993 - RNA, 17 nt, Human
cugggucgcccuggacu

SEQ ID NO: 3042994 - RNA, 18 nt, Human
cugggucgcccuggacug

SEQ ID NO: 3042995 - RNA, 18 nt, Human
cuguaaggcaaucauggu

SEQ ID NO: 3042996 - RNA, 14 nt, Human
cuguaccucugccu

SEQ ID NO: 3042997 - RNA, 21 nt, Human
gaaggaucccaugagcuccuu

SEQ ID NO: 3042998 - RNA, 21 nt, Human
gaaggugaggagcuugaaacc

SEQ ID NO: 3042999 - RNA, 22 nt, Human
gaagcuucuggugaccuuccaa

SEQ ID NO: 3043000 - RNA, 23 nt, Human
gaaggaaccaaagcgaauuuuaa

SEQ ID NO: 3043001 - RNA, 22 nt, Human
gaacuuguaaaggaauuuaaaa

SEQ ID NO: 3043002 - RNA, 13 nt, Human
gaagaaguguguc

SEQ ID NO: 3043003 - RNA, 20 nt, Human
gaagaguauuuuugacagaa

SEQ ID NO: 3043004 - RNA, 17 nt, Human
gaagauugagauguguu

SEQ ID NO: 3043005 - RNA, 22 nt, Human
gaagauugagauguguucacaa

SEQ ID NO: 3043006 - RNA, 20 nt, Human
gaaacuaggugcauauuuau

SEQ ID NO: 3043007 - RNA, 19 nt, Human
gaaacuaggugcauauuua

SEQ ID NO: 3043008 - RNA, 23 nt, Human
gaaaguuauugauaaguucauac

SEQ ID NO: 3043009 - RNA, 14 nt, Human
gaacaucccuccug

SEQ ID NO: 3043010 - RNA, 11 nt, Human
gaaccaaagcg

SEQ ID NO: 3043011 - RNA, 23 nt, Human
gaaccaaagcgaauuuuaaaaga

SEQ ID NO: 3043012 - RNA, 20 nt, Human
gaaccaaagcgaauuuuaaa

SEQ ID NO: 3043013 - RNA, 18 nt, Human
gaacagauaaucagugug

SEQ ID NO: 3043014 - RNA, 23 nt, Human
gaaauuauauaaguauucuaaau

SEQ ID NO: 3043015 - RNA, 17 nt, Human
gaaauuauauaaguauu

SEQ ID NO: 3043016 - RNA, 23 nt, Human
gaaauuaguacuccccuccuuga

SEQ ID NO: 3043017 - RNA, 23 nt, Human
cuugucacgccagacuucccacg

SEQ ID NO: 3043018 - RNA, 18 nt, Human
cuuguauuauguguguuu

SEQ ID NO: 3043019 - RNA, 13 nt, Human
cuuguauuaugug

SEQ ID NO: 3043020 - RNA, 20 nt, Human
cuuggggaguuuaggguggg

SEQ ID NO: 3043021 - RNA, 21 nt, Human
cuuggggaguuuagggugggg

SEQ ID NO: 3043022 - RNA, 13 nt, Human
cuuggagccugca

SEQ ID NO: 3043023 - RNA, 18 nt, Human
cuuggagccugcagagcu

SEQ ID NO: 3043024 - RNA, 17 nt, Human
cuuggagccugcagagc

SEQ ID NO: 3043025 - RNA, 16 nt, Human
cuuggagccugcagag

SEQ ID NO: 3043026 - RNA, 15 nt, Human
cuuggagccugcaga

SEQ ID NO: 3043027 - RNA, 20 nt, Human
cuuggagccugcagagcugc

SEQ ID NO: 3043028 - RNA, 19 nt, Human
cuuggagccugcagagcug

SEQ ID NO: 3043029 - RNA, 15 nt, Human
cuugcuuuuaaaauc

SEQ ID NO: 3043030 - RNA, 17 nt, Human
cuugccaaauauaaaua

SEQ ID NO: 3043031 - RNA, 19 nt, Human
cuugaacugagcuuggaag

SEQ ID NO: 3043032 - RNA, 17 nt, Human
cuugaacugagcuugga

SEQ ID NO: 3043033 - RNA, 12 nt, Human
cuuuggacuugu

SEQ ID NO: 3043034 - RNA, 16 nt, Human
cuuuggaacaagaugg

SEQ ID NO: 3043035 - RNA, 16 nt, Human
cuuuucuuucuaccaa

SEQ ID NO: 3043036 - RNA, 19 nt, Human
cuuuuuuaucaugugaaau

SEQ ID NO: 3043037 - RNA, 19 nt, Human
cuuucuuccaaacaggcuc

SEQ ID NO: 3043038 - RNA, 13 nt, Human
cuuucuuccaaac

SEQ ID NO: 3043039 - RNA, 21 nt, Human
cuuuauuuucuauaauuuaaa

SEQ ID NO: 3043040 - RNA, 19 nt, Human
cuuuauuuuguguuuagga

SEQ ID NO: 3043041 - RNA, 20 nt, Human
cuuuccaaagccaaugugaa

SEQ ID NO: 3043042 - RNA, 21 nt, Human
cuuuccacuccuccuagccac

SEQ ID NO: 3043043 - RNA, 23 nt, Human
cuuuccaaagccaaugugaacag

SEQ ID NO: 3043044 - RNA, 18 nt, Human
cuuuccacuccuccuagc

SEQ ID NO: 3043045 - RNA, 21 nt, Human
gagccugacccucaucuuucu

SEQ ID NO: 3043046 - RNA, 17 nt, Human
gagccuacccaccccca

SEQ ID NO: 3043047 - RNA, 15 nt, Human
gagccuacccacccc

SEQ ID NO: 3043048 - RNA, 18 nt, Human
gagcccacuguacuugcu

SEQ ID NO: 3043049 - RNA, 21 nt, Human
gagcccacuguacuugcucuu

SEQ ID NO: 3043050 - RNA, 21 nt, Human
gagcucaggaaccgaggcagg

SEQ ID NO: 3043051 - RNA, 20 nt, Human
gagcucaggaaccgaggcag

SEQ ID NO: 3043052 - RNA, 20 nt, Human
gagcuccuuaaggcucuuuu

SEQ ID NO: 3043053 - RNA, 22 nt, Human
gagcuugaaacccguggcgcuu

SEQ ID NO: 3043054 - RNA, 18 nt, Human
gacuugucccgggacacc

SEQ ID NO: 3043055 - RNA, 14 nt, Human
gagaaauuuauaaa

SEQ ID NO: 3043056 - RNA, 16 nt, Human
gagacagccaacuaug

SEQ ID NO: 3043057 - RNA, 22 nt, Human
gagaagccagcuuuccucauca

SEQ ID NO: 3043058 - RNA, 13 nt, Human
gagagaggccauu

SEQ ID NO: 3043059 - RNA, 21 nt, Human
gagagaggccauucuuuccca

SEQ ID NO: 3043060 - RNA, 15 nt, Human
gagagugagguggaa

SEQ ID NO: 3043061 - RNA, 17 nt, Human
gagauacagaauuuuau

SEQ ID NO: 3043062 - RNA, 15 nt, Human
gacaccuaggcuagg

SEQ ID NO: 3043063 - RNA, 16 nt, Human
gacaccuaggcuaggg

SEQ ID NO: 3043064 - RNA, 20 nt, Human
gacaccuaggcuaggguggg

SEQ ID NO: 3043065 - RNA, 22 nt, Human
gacagccaacuauggccugugg

SEQ ID NO: 3043066 - RNA, 19 nt, Human
gacagccaacuauggccug

SEQ ID NO: 3043067 - RNA, 17 nt, Human
gaccuuuccugaggaag

SEQ ID NO: 3043068 - RNA, 23 nt, Human
gaccugauuucugagcauuuaau

SEQ ID NO: 3043069 - RNA, 17 nt, Human
gaucccaugagcuccuu

SEQ ID NO: 3043070 - RNA, 15 nt, Human
gaucccaugagcucc

SEQ ID NO: 3043071 - RNA, 20 nt, Human
gaucauugugaaauuauuca

SEQ ID NO: 3043072 - RNA, 14 nt, Human
gaucauuaucagcc

SEQ ID NO: 3043073 - RNA, 14 nt, Human
gaucauugugaaau

SEQ ID NO: 3043074 - RNA, 22 nt, Human
gauagucuuucaguuaaggaga

SEQ ID NO: 3043075 - RNA, 15 nt, Human
gauaguaacaaugaa

SEQ ID NO: 3043076 - RNA, 14 nt, Human
gauagucuuucagu

SEQ ID NO: 3043077 - RNA, 19 nt, Human
gauaaaguugguaaaccuu

SEQ ID NO: 3043078 - RNA, 15 nt, Human
gauaaauauuauauu

SEQ ID NO: 3043079 - RNA, 22 nt, Human
gauaaauauuauauuauauaua

SEQ ID NO: 3043080 - RNA, 12 nt, Human
gauaaguucaua

SEQ ID NO: 3043081 - RNA, 16 nt, Human
gauaaguucauacauu

SEQ ID NO: 3043082 - RNA, 14 nt, Human
gauaaguucauaca

SEQ ID NO: 3043083 - RNA, 17 nt, Human
gauaggucagugcaaau

SEQ ID NO: 3043084 - RNA, 13 nt, Human
gauagaugugugg

SEQ ID NO: 3043085 - RNA, 23 nt, Human
gauagauaggucagugcaaauac

SEQ ID NO: 3043086 - RNA, 21 nt, Human
gaucugugaggggcucucuca

SEQ ID NO: 3043087 - RNA, 17 nt, Human
gaugaaaauauuuaaag

SEQ ID NO: 3043088 - RNA, 14 nt, Human
gaugaaaauauuua

SEQ ID NO: 3043089 - RNA, 16 nt, Human
gaugaaaauauuuaaa

SEQ ID NO: 3043090 - RNA, 15 nt, Human
gaugaaaauauuuaa

SEQ ID NO: 3043091 - RNA, 20 nt, Human
gauggcaaagaaggagagca

SEQ ID NO: 3043092 - RNA, 17 nt, Human
gaugacaacuucccagu

SEQ ID NO: 3043093 - RNA, 20 nt, Human
gcaaauccuugugggaaaag

SEQ ID NO: 3043094 - RNA, 17 nt, Human
gcaaaauugauguguuu

SEQ ID NO: 3043095 - RNA, 22 nt, Human
gcaaauccuugugggaaaagaa

SEQ ID NO: 3043096 - RNA, 22 nt, Human
gauuuggucaacacuaacauga

SEQ ID NO: 3043097 - RNA, 23 nt, Human
gauuugcucagugucuggcugca

SEQ ID NO: 3043098 - RNA, 20 nt, Human
gauuuggggcucagaguggg

SEQ ID NO: 3043099 - RNA, 17 nt, Human
gauuccagguggcauca

SEQ ID NO: 3043100 - RNA, 19 nt, Human
gcaggggccgggggcaguc

SEQ ID NO: 3043101 - RNA, 20 nt, Human
gcaggggccgggggcagucu

SEQ ID NO: 3043102 - RNA, 13 nt, Human
gcagguccccaga

SEQ ID NO: 3043103 - RNA, 13 nt, Human
gcauagaaguaaa

SEQ ID NO: 3043104 - RNA, 17 nt, Human
gcauagguuuaauaauu

SEQ ID NO: 3043105 - RNA, 19 nt, Human
gcauauuuauaaaaauaaa

SEQ ID NO: 3043106 - RNA, 20 nt, Human
gcauauuuuucacauaucua

SEQ ID NO: 3043107 - RNA, 19 nt, Human
gcauauuuuucacauaucu

SEQ ID NO: 3043108 - RNA, 16 nt, Human
gcauauuuuucacaua

SEQ ID NO: 3043109 - RNA, 15 nt, Human
gcauauuuuucacau

SEQ ID NO: 3043110 - RNA, 14 nt, Human
gcauauuuuucaca

SEQ ID NO: 3043111 - RNA, 18 nt, Human
gcauuauauuuguaaauu

SEQ ID NO: 3043112 - RNA, 18 nt, Human
gcauggagauagccccac

SEQ ID NO: 3043113 - RNA, 16 nt, Human
gcaucugaaaauugau

SEQ ID NO: 3043114 - RNA, 17 nt, Human
gcccgggagcucaggaa

SEQ ID NO: 3043115 - RNA, 19 nt, Human
gcccgggagcucaggaacc

SEQ ID NO: 3043116 - RNA, 15 nt, Human
gcccgggagcucagg

SEQ ID NO: 3043117 - RNA, 16 nt, Human
gccccugagaucucug

SEQ ID NO: 3043118 - RNA, 16 nt, Human
gcccagaaugaggcug

SEQ ID NO: 3043119 - RNA, 17 nt, Human
gcccagaaugaggcugc

SEQ ID NO: 3043120 - RNA, 22 nt, Human
gccagucccugaggcagguccc

SEQ ID NO: 3043121 - RNA, 16 nt, Human
gccagucccugaggca

SEQ ID NO: 3043122 - RNA, 23 nt, Human
gccaggcugggucgcccuggacu

SEQ ID NO: 3043123 - RNA, 17 nt, Human
gccaggcugggucgccc

SEQ ID NO: 3043124 - RNA, 21 nt, Human
gccaucauguuuacagaggac

SEQ ID NO: 3043125 - RNA, 17 nt, Human
gccaucauguuuacaga

SEQ ID NO: 3043126 - RNA, 17 nt, Human
gccugacccucaucuuu

SEQ ID NO: 3043127 - RNA, 21 nt, Human
gccucuccacucaugugacuc

SEQ ID NO: 3043128 - RNA, 20 nt, Human
gccucucauuccagaggaag

SEQ ID NO: 3043129 - RNA, 24 nt, Human
gccucuccacucaugugacucuuu

SEQ ID NO: 3043130 - RNA, 20 nt, Human
gccuccuacagcccaccugg

SEQ ID NO: 3043131 - RNA, 19 nt, Human
gccucucauuccagaggaa

SEQ ID NO: 3043132 - RNA, 18 nt, Human
gcgcggcugggaggaggg

SEQ ID NO: 3043133 - RNA, 12 nt, Human
gcgcggcuggga

SEQ ID NO: 3043134 - RNA, 16 nt, Human
gcuaagaauauuugaa

SEQ ID NO: 3043135 - RNA, 17 nt, Human
gcuaagaauauuugaau

SEQ ID NO: 3043136 - RNA, 18 nt, Human
gccuuuggacuugucccg

SEQ ID NO: 3043137 - RNA, 12 nt, Human
gccuguuuaaga

SEQ ID NO: 3043138 - RNA, 13 nt, Human
gccuguuuaagag

SEQ ID NO: 3043139 - RNA, 15 nt, Human
gccugcaauuucaua

SEQ ID NO: 3043140 - RNA, 23 nt, Human
gccugccacucaggcccaaagcc

SEQ ID NO: 3043141 - RNA, 15 nt, Human
gccugccacucaggc

SEQ ID NO: 3043142 - RNA, 17 nt, Human
gccugguccucacacuc

SEQ ID NO: 3043143 - RNA, 13 nt, Human
gucugagagaggc

SEQ ID NO: 3043144 - RNA, 14 nt, Human
gucugagagaggcc

SEQ ID NO: 3043145 - RNA, 15 nt, Human
gucugagagaggcca

SEQ ID NO: 3043146 - RNA, 18 nt, Human
gucugagagaggccauuc

SEQ ID NO: 3043147 - RNA, 22 nt, Human
gucuguguguuuaugugugugu

SEQ ID NO: 3043148 - RNA, 21 nt, Human
gucuguguguuuaugugugug

SEQ ID NO: 3043149 - RNA, 11 nt, Human
gucuguguguu

SEQ ID NO: 3043150 - RNA, 20 nt, Human
gucuguguguguguaugugg

SEQ ID NO: 3043151 - RNA, 16 nt, Human
gucuguguguguguau

SEQ ID NO: 3043152 - RNA, 12 nt, Human
gucugugugugu

SEQ ID NO: 3043153 - RNA, 11 nt, Human
gucugugugug

SEQ ID NO: 3043154 - RNA, 19 nt, Human
gucuugguuccagccugcc

SEQ ID NO: 3043155 - RNA, 17 nt, Human
gucuugguuccagccug

SEQ ID NO: 3043156 - RNA, 16 nt, Human
gucuugguuccagccu

SEQ ID NO: 3043157 - RNA, 13 nt, Human
gucccugccugga

SEQ ID NO: 3043158 - RNA, 13 nt, Human
gucuaaauuugaa

SEQ ID NO: 3043159 - RNA, 21 nt, Human
gucuaagauaguaacaaugaa

SEQ ID NO: 3043160 - RNA, 18 nt, Human
gucgucaaagcugaaaug

SEQ ID NO: 3043161 - RNA, 21 nt, Human
gucucuggauuauauuaugaa

SEQ ID NO: 3043162 - RNA, 17 nt, Human
gucucuggaauuugaaa

SEQ ID NO: 3043163 - RNA, 21 nt, Human
gugauuuuuaugccaccugaa

SEQ ID NO: 3043164 - RNA, 21 nt, Human
gugccaggauggaaugauggg

SEQ ID NO: 3043165 - RNA, 14 nt, Human
gugccuuuugccau

SEQ ID NO: 3043166 - RNA, 19 nt, Human
gugauauaaguguguguuu

SEQ ID NO: 3043167 - RNA, 18 nt, Human
gugaggagcuugaaaccc

SEQ ID NO: 3043168 - RNA, 21 nt, Human
gugacuauggagcugagcagg

SEQ ID NO: 3043169 - RNA, 22 nt, Human
gugaccuuccaagagccugaga

SEQ ID NO: 3043170 - RNA, 21 nt, Human
gugaccuuccaagagccugag

SEQ ID NO: 3043171 - RNA, 22 nt, Human
gugaauucuugaaggaaaauga

SEQ ID NO: 3043172 - RNA, 18 nt, Human
gugaauucuugaaggaaa

SEQ ID NO: 3043173 - RNA, 22 nt, Human
gucagcugggacaccccgacuu

SEQ ID NO: 3043174 - RNA, 18 nt, Human
gucccuaauaaagcugug

SEQ ID NO: 3043175 - RNA, 20 nt, Human
gucccuaauaaagcugugug

SEQ ID NO: 3043176 - RNA, 22 nt, Human
gucccugaggcagguccccaga

SEQ ID NO: 3043177 - RNA, 18 nt, Human
gucccugaggcagguccc

SEQ ID NO: 3043178 - RNA, 16 nt, Human
gucccugaagagaagg

SEQ ID NO: 3043179 - RNA, 15 nt, Human
gucccuaauaaagcu

SEQ ID NO: 3043180 - RNA, 16 nt, Human
gucccuaauaaagcug

SEQ ID NO: 3043181 - RNA, 17 nt, Human
gucccuaauaaagcugu

SEQ ID NO: 3043182 - RNA, 19 nt, Human
guagugauuuuuaugccac

SEQ ID NO: 3043183 - RNA, 17 nt, Human
guauaauucacauugua

SEQ ID NO: 3043184 - RNA, 14 nt, Human
guagguugggagaa

SEQ ID NO: 3043185 - RNA, 15 nt, Human
guagcacugacagau

SEQ ID NO: 3043186 - RNA, 14 nt, Human
guagcacugacaga

SEQ ID NO: 3043187 - RNA, 23 nt, Human
guaugaaauuauauaaguauucu

SEQ ID NO: 3043188 - RNA, 13 nt, Human
guaugaaauuaua

SEQ ID NO: 3043189 - RNA, 13 nt, Human
guucugccaggag

SEQ ID NO: 3043190 - RNA, 14 nt, Human
guucugccaggaga

SEQ ID NO: 3043191 - RNA, 12 nt, Human
guucugccagga

SEQ ID NO: 3043192 - RNA, 14 nt, Human
guugcaacuuugua

SEQ ID NO: 3043193 - RNA, 16 nt, Human
guugcaacuuuguaua

SEQ ID NO: 3043194 - RNA, 24 nt, Human
guucacucuuggagccugcagagc

SEQ ID NO: 3043195 - RNA, 20 nt, Human
guucacucuuggagccugca

SEQ ID NO: 3043196 - RNA, 17 nt, Human
guucacucuuggagccu

SEQ ID NO: 3043197 - RNA, 19 nt, Human
guucacucuuggagccugc

SEQ ID NO: 3043198 - RNA, 18 nt, Human
guucacucuuggagccug

SEQ ID NO: 3043199 - RNA, 16 nt, Human
guuccuagccaccgcc

SEQ ID NO: 3043200 - RNA, 15 nt, Human
guuccagccugccac

SEQ ID NO: 3043201 - RNA, 14 nt, Human
guuccagcaccaca

SEQ ID NO: 3043202 - RNA, 14 nt, Human
guuccagccugcca

SEQ ID NO: 3043203 - RNA, 13 nt, Human
guuccagccugcc

SEQ ID NO: 3043204 - RNA, 18 nt, Human
guucaauaauaaauauuu

SEQ ID NO: 3043205 - RNA, 17 nt, Human
gugucuggcacagccug

SEQ ID NO: 3043206 - RNA, 14 nt, Human
gugucuggcugcag

SEQ ID NO: 3043207 - RNA, 21 nt, Human
guguccugcaccggggccugg

SEQ ID NO: 3043208 - RNA, 17 nt, Human
gugugggaguguguaau

SEQ ID NO: 3043209 - RNA, 16 nt, Human
guguguuuaugugugu

SEQ ID NO: 3043210 - RNA, 12 nt, Human
guguguuuuaaa

SEQ ID NO: 3043211 - RNA, 15 nt, Human
guguguuuaugugug

SEQ ID NO: 3043212 - RNA, 14 nt, Human
guguguuuaugugu

SEQ ID NO: 3043213 - RNA, 17 nt, Human
guguguuguguguggga

SEQ ID NO: 3043214 - RNA, 14 nt, Human
guguguugugugug

SEQ ID NO: 3043215 - RNA, 12 nt, Human
guguguugugug

SEQ ID NO: 3043216 - RNA, 18 nt, Human
gugugcucaggagcccug

SEQ ID NO: 3043217 - RNA, 19 nt, Human
gugugcucaggagcccugg

SEQ ID NO: 3043218 - RNA, 16 nt, Human
gugugcucaggagccc

SEQ ID NO: 3043219 - RNA, 17 nt, Human
gugugcucaggagcccu

SEQ ID NO: 3043220 - RNA, 17 nt, Human
guuaaacucgcucacug

SEQ ID NO: 3043221 - RNA, 19 nt, Human
guguguuuuaaaaugagaa

SEQ ID NO: 3043222 - RNA, 13 nt, Human
guguguuuuaaaa

SEQ ID NO: 3043223 - RNA, 16 nt, Human
guguguuuuaaaauga

SEQ ID NO: 3043224 - RNA, 14 nt, Human
guguguuuuucaua

SEQ ID NO: 3043225 - RNA, 18 nt, Human
guguuuuucauaaagcag

SEQ ID NO: 3043226 - RNA, 21 nt, Human
guggggagagacgggcccugg

SEQ ID NO: 3043227 - RNA, 13 nt, Human
gugggccuggcca

SEQ ID NO: 3043228 - RNA, 13 nt, Human
gugcuaauuuuga

SEQ ID NO: 3043229 - RNA, 15 nt, Human
gugcuaauuuugaaa

SEQ ID NO: 3043230 - RNA, 17 nt, Human
guggcuggaucugugag

SEQ ID NO: 3043231 - RNA, 20 nt, Human
guguaauuuaaaauugugau

SEQ ID NO: 3043232 - RNA, 23 nt, Human
guguaauuuaaaauugugaugug

SEQ ID NO: 3043233 - RNA, 22 nt, Human
guguaauuuaaaauugugaugu

SEQ ID NO: 3043234 - RNA, 15 nt, Human
guguacuuaacuauu

SEQ ID NO: 3043235 - RNA, 18 nt, Human
guggucuccacuggggau

SEQ ID NO: 3043236 - RNA, 17 nt, Human
guuguccucagccccgc

SEQ ID NO: 3043237 - RNA, 23 nt, Human
guuguccucagccccgcguggaa

SEQ ID NO: 3043238 - RNA, 22 nt, Human
guugugugugggaguguguaau

SEQ ID NO: 3043239 - RNA, 16 nt, Human
guugugugugggagug

SEQ ID NO: 3043240 - RNA, 14 nt, Human
guugugugugggag

SEQ ID NO: 3043241 - RNA, 13 nt, Human
guuguguguggga

SEQ ID NO: 3043242 - RNA, 12 nt, Human
guuguguguggg

SEQ ID NO: 3043243 - RNA, 14 nt, Human
guugugaauguugu

SEQ ID NO: 3043244 - RNA, 16 nt, Human
guuuagaagaagugug

SEQ ID NO: 3043245 - RNA, 19 nt, Human
guuuaggaacuacugagga

SEQ ID NO: 3043246 - RNA, 15 nt, Human
guuuuaaaaugagaa

SEQ ID NO: 3043247 - RNA, 16 nt, Human
guuuuaaaaugagaaa

SEQ ID NO: 3043248 - RNA, 20 nt, Human
guuuucaaaauuguuacaaa

SEQ ID NO: 3043249 - RNA, 19 nt, Human
guuucuuuguaaugaaaac

SEQ ID NO: 3043250 - RNA, 18 nt, Human
guuucuuuguaaugaaaa

SEQ ID NO: 3043251 - RNA, 18 nt, Human
uaaagcaggcagaacuca

SEQ ID NO: 3043252 - RNA, 21 nt, Human
uaaaggcccuaucuguuuaca

SEQ ID NO: 3043253 - RNA, 14 nt, Human
uaaaguguuugaaa

SEQ ID NO: 3043254 - RNA, 18 nt, Human
uaaacacucuugaaaaau

SEQ ID NO: 3043255 - RNA, 15 nt, Human
uaaacacucuugaaa

SEQ ID NO: 3043256 - RNA, 17 nt, Human
uaaacacucuugaaaaa

SEQ ID NO: 3043257 - RNA, 22 nt, Human
uaaaacaagcacuaaacaaaga

SEQ ID NO: 3043258 - RNA, 13 nt, Human
uaaaaacaacuuu

SEQ ID NO: 3043259 - RNA, 19 nt, Human
uaaaaacaacuuuauaccc

SEQ ID NO: 3043260 - RNA, 18 nt, Human
uaaaaacaacuuuauacc

SEQ ID NO: 3043261 - RNA, 21 nt, Human
uaaaaacaaagaaauuaugug

SEQ ID NO: 3043262 - RNA, 17 nt, Human
uaaaaacaaagaaauua

SEQ ID NO: 3043263 - RNA, 21 nt, Human
uaaaaagacauucuuccaaaa

SEQ ID NO: 3043264 - RNA, 17 nt, Human
uaaaagauaaauauuau

SEQ ID NO: 3043265 - RNA, 23 nt, Human
uaauaaucauuggauucugagag

SEQ ID NO: 3043266 - RNA, 22 nt, Human
uaagugccaggauggaaugaug

SEQ ID NO: 3043267 - RNA, 22 nt, Human
uaagugauugcugguuuuaguu

SEQ ID NO: 3043268 - RNA, 11 nt, Human
uaauaaagcug

SEQ ID NO: 3043269 - RNA, 12 nt, Human
uaauaaagcugu

SEQ ID NO: 3043270 - RNA, 21 nt, Human
uaauaacugugaaguuuacau

SEQ ID NO: 3043271 - RNA, 16 nt, Human
uaaaguugguaaaccu

SEQ ID NO: 3043272 - RNA, 17 nt, Human
uaaaguugguaaaccuu

SEQ ID NO: 3043273 - RNA, 13 nt, Human
uaaauuuauguga

SEQ ID NO: 3043274 - RNA, 14 nt, Human
uaaauuugaauguu

SEQ ID NO: 3043275 - RNA, 22 nt, Human
uaaauuugaauguuaagcagau

SEQ ID NO: 3043276 - RNA, 13 nt, Human
uaaccagaucauu

SEQ ID NO: 3043277 - RNA, 19 nt, Human
uaagaaaucaaagagagaa

SEQ ID NO: 3043278 - RNA, 13 nt, Human
uaacugugaaguu

SEQ ID NO: 3043279 - RNA, 17 nt, Human
uaacugugaaguuuaca

SEQ ID NO: 3043280 - RNA, 18 nt, Human
uaacugugaaguuuacau

SEQ ID NO: 3043281 - RNA, 14 nt, Human
uacccagaaaguua

SEQ ID NO: 3043282 - RNA, 13 nt, Human
uacuugcucuuga

SEQ ID NO: 3043283 - RNA, 14 nt, Human
uacuugcucuugau

SEQ ID NO: 3043284 - RNA, 18 nt, Human
uacuugcucuugaugccu

SEQ ID NO: 3043285 - RNA, 19 nt, Human
uacuugcucuugaugccug

SEQ ID NO: 3043286 - RNA, 13 nt, Human
uacuuaacuauuc

SEQ ID NO: 3043287 - RNA, 21 nt, Human
uacugccuauuuuaauaaaca

SEQ ID NO: 3043288 - RNA, 14 nt, Human
uacugccuauuuua

SEQ ID NO: 3043289 - RNA, 15 nt, Human
uacuccccuccuuga

SEQ ID NO: 3043290 - RNA, 23 nt, Human
uacaguucggugagcuacaaaug

SEQ ID NO: 3043291 - RNA, 18 nt, Human
uacaguuccuagguauaa

SEQ ID NO: 3043292 - RNA, 20 nt, Human
uacaggaugaugacuaugga

SEQ ID NO: 3043293 - RNA, 20 nt, Human
uauauuuguaaauuuaugug

SEQ ID NO: 3043294 - RNA, 14 nt, Human
uauaucuuguagcu

SEQ ID NO: 3043295 - RNA, 22 nt, Human
uauaaacaugcuugcauuauau

SEQ ID NO: 3043296 - RNA, 15 nt, Human
uaggucucaauaccu

SEQ ID NO: 3043297 - RNA, 22 nt, Human
uagguuaauuccaauuauauga

SEQ ID NO: 3043298 - RNA, 15 nt, Human
uagcauggcauauuu

SEQ ID NO: 3043299 - RNA, 18 nt, Human
uagcauggcauauuuuuc

SEQ ID NO: 3043300 - RNA, 17 nt, Human
uagcauggcauauuuuu

SEQ ID NO: 3043301 - RNA, 16 nt, Human
uagccccucuccugga

SEQ ID NO: 3043302 - RNA, 19 nt, Human
ugacucuuuccaaccggcu

SEQ ID NO: 3043303 - RNA, 13 nt, Human
ugacucuuuccaa

SEQ ID NO: 3043304 - RNA, 14 nt, Human
ugacucuuuccaac

SEQ ID NO: 3043305 - RNA, 16 nt, Human
ugacucuuuccaaccg

SEQ ID NO: 3043306 - RNA, 13 nt, Human
ugaggcagguccc

SEQ ID NO: 3043307 - RNA, 19 nt, Human
ugaggaucagaguaaucca

SEQ ID NO: 3043308 - RNA, 13 nt, Human
ugaggaucagagu

SEQ ID NO: 3043309 - RNA, 17 nt, Human
ugaggaucagaguaauc

SEQ ID NO: 3043310 - RNA, 23 nt, Human
ugacagaauauguuucaaacuuu

SEQ ID NO: 3043311 - RNA, 22 nt, Human
ugacaacuucccagugaauucu

SEQ ID NO: 3043312 - RNA, 22 nt, Human
ugacagaauauguuucaaacuu

SEQ ID NO: 3043313 - RNA, 21 nt, Human
ugacagaauauguuucaaacu

SEQ ID NO: 3043314 - RNA, 18 nt, Human
ugacagaauauguuucaa

SEQ ID NO: 3043315 - RNA, 20 nt, Human
ugacaaagguaaaucagacu

SEQ ID NO: 3043316 - RNA, 16 nt, Human
ugaaggaaccaaagcg

SEQ ID NO: 3043317 - RNA, 15 nt, Human
ugaaggaaaaugaua

SEQ ID NO: 3043318 - RNA, 16 nt, Human
ugaagcuuuuauguga

SEQ ID NO: 3043319 - RNA, 21 nt, Human
ugaagcuuuuaugugaaacau

SEQ ID NO: 3043320 - RNA, 22 nt, Human
ugaagagaagggcagggcugag

SEQ ID NO: 3043321 - RNA, 20 nt, Human
ugaagagaagggcagggcug

SEQ ID NO: 3043322 - RNA, 13 nt, Human
ugaaacauguuuc

SEQ ID NO: 3043323 - RNA, 16 nt, Human
ugaaacacuuugcaua

SEQ ID NO: 3043324 - RNA, 14 nt, Human
ugaaguuuacauug

SEQ ID NO: 3043325 - RNA, 16 nt, Human
ugaaguuuacauugua

SEQ ID NO: 3043326 - RNA, 20 nt, Human
ugaaguuuacauuguaaaua

SEQ ID NO: 3043327 - RNA, 20 nt, Human
ugaaucucauaauuuauaca

SEQ ID NO: 3043328 - RNA, 13 nt, Human
ugaaucucauaau

SEQ ID NO: 3043329 - RNA, 19 nt, Human
ucuuuccaaccggcuuugu

SEQ ID NO: 3043330 - RNA, 19 nt, Human
ugaaaauuauuuuguucau

SEQ ID NO: 3043331 - RNA, 18 nt, Human
ugaaaaccacauuggaga

SEQ ID NO: 3043332 - RNA, 23 nt, Human
ugaaaauuauuuuguucauacau

SEQ ID NO: 3043333 - RNA, 22 nt, Human
ugaaaauuauuuuguucauaca

SEQ ID NO: 3043334 - RNA, 23 nt, Human
ugaaacacucaguuguucaauaa

SEQ ID NO: 3043335 - RNA, 15 nt, Human
ugaaacacuuugcau

SEQ ID NO: 3043336 - RNA, 19 nt, Human
ucuugccaaauauaaauaa

SEQ ID NO: 3043337 - RNA, 18 nt, Human
ucuuguagcuuuaucaaa

SEQ ID NO: 3043338 - RNA, 18 nt, Human
ucuugaacugagcuugga

SEQ ID NO: 3043339 - RNA, 17 nt, Human
ucuugaacugagcuugg

SEQ ID NO: 3043340 - RNA, 14 nt, Human
ucuuauaauuuaaa

SEQ ID NO: 3043341 - RNA, 13 nt, Human
ucuuauaauuuaa

SEQ ID NO: 3043342 - RNA, 11 nt, Human
ucugugugugu

SEQ ID NO: 3043343 - RNA, 22 nt, Human
ucuucauuaccucagugagaag

SEQ ID NO: 3043344 - RNA, 23 nt, Human
ucucauaauuuauacaggucaua

SEQ ID NO: 3043345 - RNA, 12 nt, Human
ucugagagcugu

SEQ ID NO: 3043346 - RNA, 23 nt, Human
ucuggugaccuuccaagagccug

SEQ ID NO: 3043347 - RNA, 18 nt, Human
ucuggugaccuuccaaga

SEQ ID NO: 3043348 - RNA, 16 nt, Human
ucuggugaccuuccaa

SEQ ID NO: 3043349 - RNA, 14 nt, Human
ucuggcugcagagc

SEQ ID NO: 3043350 - RNA, 15 nt, Human
ucuggcugcagagca

SEQ ID NO: 3043351 - RNA, 12 nt, Human
ucuggagcccac

SEQ ID NO: 3043352 - RNA, 16 nt, Human
ucuggagcccacugua

SEQ ID NO: 3043353 - RNA, 22 nt, Human
ucuggagcccacuguacuugcu

SEQ ID NO: 3043354 - RNA, 14 nt, Human
ucuggaauuugaaa

SEQ ID NO: 3043355 - RNA, 23 nt, Human
ucagccuccauccuacccccugu

SEQ ID NO: 3043356 - RNA, 22 nt, Human
ucaggagaguagaacagauaau

SEQ ID NO: 3043357 - RNA, 20 nt, Human
ucagaucauuaucagccugu

SEQ ID NO: 3043358 - RNA, 14 nt, Human
ucaucuuucuucca

SEQ ID NO: 3043359 - RNA, 17 nt, Human
ucaucuuucuuccaaac

SEQ ID NO: 3043360 - RNA, 24 nt, Human
ucauggacuucugccagcauaaua

SEQ ID NO: 3043361 - RNA, 17 nt, Human
ucaguucucuucacuca

SEQ ID NO: 3043362 - RNA, 14 nt, Human
ucaguucucuucac

SEQ ID NO: 3043363 - RNA, 19 nt, Human
ucagugugucuaaauuuga

SEQ ID NO: 3043364 - RNA, 15 nt, Human
uccagagucccugcc

SEQ ID NO: 3043365 - RNA, 17 nt, Human
uccacuuuaucuugaau

SEQ ID NO: 3043366 - RNA, 15 nt, Human
uccacuuuaucuuga

SEQ ID NO: 3043367 - RNA, 15 nt, Human
uccaagcaaauguga

SEQ ID NO: 3043368 - RNA, 17 nt, Human
uccaagcaaaugugaau

SEQ ID NO: 3043369 - RNA, 13 nt, Human
uccaagagccuga

SEQ ID NO: 3043370 - RNA, 14 nt, Human
uccaagagccugag

SEQ ID NO: 3043371 - RNA, 22 nt, Human
uccaagcccaguucagcuuggg

SEQ ID NO: 3043372 - RNA, 14 nt, Human
ucccaacacugcca

SEQ ID NO: 3043373 - RNA, 15 nt, Human
ucccaacacugccag

SEQ ID NO: 3043374 - RNA, 16 nt, Human
ucccaacacugccagc

SEQ ID NO: 3043375 - RNA, 16 nt, Human
uccucgagaucccaac

SEQ ID NO: 3043376 - RNA, 23 nt, Human
uccucgagaucccaacacugcca

SEQ ID NO: 3043377 - RNA, 23 nt, Human
ucccaugagcuccuuaaggcucu

SEQ ID NO: 3043378 - RNA, 22 nt, Human
ucccucuacugggagccuaccc

SEQ ID NO: 3043379 - RNA, 18 nt, Human
ucccucuacugggagccu

SEQ ID NO: 3043380 - RNA, 23 nt, Human
ucccucuacugggagccuaccca

SEQ ID NO: 3043381 - RNA, 22 nt, Human
ucucauaauuuauacaggucau

SEQ ID NO: 3043382 - RNA, 16 nt, Human
ucucauaauuuauaca

SEQ ID NO: 3043383 - RNA, 15 nt, Human
ucuagguaaauuaca

SEQ ID NO: 3043384 - RNA, 19 nt, Human
uccugucccucauccauag

SEQ ID NO: 3043385 - RNA, 18 nt, Human
uggaacucgugucuggca

SEQ ID NO: 3043386 - RNA, 22 nt, Human
uggaauaauccuaaacauauga

SEQ ID NO: 3043387 - RNA, 20 nt, Human
uggaaugaugggucaguugu

SEQ ID NO: 3043388 - RNA, 16 nt, Human
uggaaugcuguguuaa

SEQ ID NO: 3043389 - RNA, 14 nt, Human
uggaaagaguacuc

SEQ ID NO: 3043390 - RNA, 21 nt, Human
ugggacaccccgacuuuuguu

SEQ ID NO: 3043391 - RNA, 14 nt, Human
ugggagauguggaa

SEQ ID NO: 3043392 - RNA, 14 nt, Human
ugggaguacaaaag

SEQ ID NO: 3043393 - RNA, 21 nt, Human
ugggagugaggaugucugggc

SEQ ID NO: 3043394 - RNA, 20 nt, Human
uggggauugggccccugcca

SEQ ID NO: 3043395 - RNA, 11 nt, Human
ugggggaugua

SEQ ID NO: 3043396 - RNA, 15 nt, Human
ugggggucugugugu

SEQ ID NO: 3043397 - RNA, 18 nt, Human
ugggggucuguguguuua

SEQ ID NO: 3043398 - RNA, 18 nt, Human
uggguggggggcuucaua

SEQ ID NO: 3043399 - RNA, 21 nt, Human
uggguggggggcuucauacac

SEQ ID NO: 3043400 - RNA, 20 nt, Human
uggguggggggcuucauaca

SEQ ID NO: 3043401 - RNA, 16 nt, Human
ugcaccggggccuggg

SEQ ID NO: 3043402 - RNA, 22 nt, Human
ugcaccggggccugggcaggag

SEQ ID NO: 3043403 - RNA, 12 nt, Human
ugcaccggggcc

SEQ ID NO: 3043404 - RNA, 11 nt, Human
ugcagagcugc

SEQ ID NO: 3043405 - RNA, 22 nt, Human
ugcagagcagugggccuggcca

SEQ ID NO: 3043406 - RNA, 17 nt, Human
ugcccacccuccacucu

SEQ ID NO: 3043407 - RNA, 18 nt, Human
ugccaggauggaaugaug

SEQ ID NO: 3043408 - RNA, 22 nt, Human
ugccaaauauaaauaaaaauaa

SEQ ID NO: 3043409 - RNA, 19 nt, Human
ugccaaauauaaauaaaaa

SEQ ID NO: 3043410 - RNA, 18 nt, Human
ugccaaauauaaauaaaa

SEQ ID NO: 3043411 - RNA, 17 nt, Human
ugccaaauauaaauaaa

SEQ ID NO: 3043412 - RNA, 20 nt, Human
ugcauauuuauaaaaauaaa

SEQ ID NO: 3043413 - RNA, 21 nt, Human
ugcauauuuauaaaaauaaaa

SEQ ID NO: 3043414 - RNA, 15 nt, Human
ugccuggcggggugg

SEQ ID NO: 3043415 - RNA, 9 nt, Human
ugccucucu

SEQ ID NO: 3043416 - RNA, 17 nt, Human
ugcucuccaagcccagu

SEQ ID NO: 3043417 - RNA, 17 nt, Human
ugcucagagcaguguuu

SEQ ID NO: 3043418 - RNA, 21 nt, Human
uguccucagccccgcguggaa

SEQ ID NO: 3043419 - RNA, 22 nt, Human
ugucacccuuaggccagcacca

SEQ ID NO: 3043420 - RNA, 22 nt, Human
uguauaaaagggacugagaaau

SEQ ID NO: 3043421 - RNA, 22 nt, Human
uguacgaagaguauuuuugaca

SEQ ID NO: 3043422 - RNA, 14 nt, Human
uguaccucugccuc

SEQ ID NO: 3043423 - RNA, 14 nt, Human
uguacgaagaguau

SEQ ID NO: 3043424 - RNA, 18 nt, Human
uguagccccucuccugga

SEQ ID NO: 3043425 - RNA, 17 nt, Human
ugugccuugucacgcca

SEQ ID NO: 3043426 - RNA, 17 nt, Human
ugugccuuggugugcug

SEQ ID NO: 3043427 - RNA, 19 nt, Human
ugugccuugucacgccaga

SEQ ID NO: 3043428 - RNA, 20 nt, Human
ugugccuugucacgccagac

SEQ ID NO: 3043429 - RNA, 16 nt, Human
ugugccuuuugccauc

SEQ ID NO: 3043430 - RNA, 17 nt, Human
ugugcucaggagcccug

SEQ ID NO: 3043431 - RNA, 15 nt, Human
ugugcucaggagccc

SEQ ID NO: 3043432 - RNA, 16 nt, Human
ugugcucaggagcccu

SEQ ID NO: 3043433 - RNA, 15 nt, Human
uguggccuaaccugc

SEQ ID NO: 3043434 - RNA, 15 nt, Human
uguggaagugugggu

SEQ ID NO: 3043435 - RNA, 15 nt, Human
ugugggaguguguaa

SEQ ID NO: 3043436 - RNA, 14 nt, Human
ugugggagugugua

SEQ ID NO: 3043437 - RNA, 18 nt, Human
uguguaauuuaaaauugu

SEQ ID NO: 3043438 - RNA, 11 nt, Human
uguguaauuua

SEQ ID NO: 3043439 - RNA, 23 nt, Human
uguguaauuuaaaauugugaugu

SEQ ID NO: 3043440 - RNA, 22 nt, Human
uguguaauuuaaaauugugaug

SEQ ID NO: 3043441 - RNA, 19 nt, Human
uguguaauuuaaaauugug

SEQ ID NO: 3043442 - RNA, 17 nt, Human
ugucuggcacagccugg

SEQ ID NO: 3043443 - RNA, 21 nt, Human
ugucuuuccacuccuccuagc

SEQ ID NO: 3043444 - RNA, 13 nt, Human
ugugauauaagug

SEQ ID NO: 3043445 - RNA, 16 nt, Human
ugugauauaagugugu

SEQ ID NO: 3043446 - RNA, 18 nt, Human
ugugaagugaaugaaaca

SEQ ID NO: 3043447 - RNA, 21 nt, Human
ugugaauguugugauguauuc

SEQ ID NO: 3043448 - RNA, 12 nt, Human
uguucauacaua

SEQ ID NO: 3043449 - RNA, 17 nt, Human
uguucauaaauaaaguu

SEQ ID NO: 3043450 - RNA, 23 nt, Human
uguucauacauauuuuuguagca

SEQ ID NO: 3043451 - RNA, 14 nt, Human
uguucauacauauu

SEQ ID NO: 3043452 - RNA, 12 nt, Human
uguguauguggg

SEQ ID NO: 3043453 - RNA, 11 nt, Human
uguguaugugg

SEQ ID NO: 3043454 - RNA, 13 nt, Human
ugugugcucucca

SEQ ID NO: 3043455 - RNA, 15 nt, Human
ugugugggagugugu

SEQ ID NO: 3043456 - RNA, 14 nt, Human
ugugugggagugug

SEQ ID NO: 3043457 - RNA, 16 nt, Human
ugugugggagugugua

SEQ ID NO: 3043458 - RNA, 18 nt, Human
uguguuuuucauaaagca

SEQ ID NO: 3043459 - RNA, 15 nt, Human
uguguuuuucauaaa

SEQ ID NO: 3043460 - RNA, 16 nt, Human
uguucuuuugucccag

SEQ ID NO: 3043461 - RNA, 12 nt, Human
uguuuaagagac

SEQ ID NO: 3043462 - RNA, 12 nt, Human
uguuuacagugu

SEQ ID NO: 3043463 - RNA, 19 nt, Human
uguuuccauauuuuauagg

SEQ ID NO: 3043464 - RNA, 12 nt, Human
uuaagaguaaaa

SEQ ID NO: 3043465 - RNA, 12 nt, Human
uuacauuguaaa

SEQ ID NO: 3043466 - RNA, 13 nt, Human
uuacauuguaaau

SEQ ID NO: 3043467 - RNA, 16 nt, Human
uuaaugauaaguaaau

SEQ ID NO: 3043468 - RNA, 18 nt, Human
uuuuuaaagacuuuuaug

SEQ ID NO: 3043469 - RNA, 12 nt, Human
uuuuuaaagacu

SEQ ID NO: 3043470 - RNA, 13 nt, Human
uuuuuaaagacuu

SEQ ID NO: 3043471 - RNA, 19 nt, Human
uuuuguagcacugacagau

SEQ ID NO: 3043472 - RNA, 18 nt, Human
uuuuguagcacugacaga

SEQ ID NO: 3043473 - RNA, 20 nt, Human
uuuugaaucucauaauuuau

SEQ ID NO: 3043474 - RNA, 18 nt, Human
uuuucuaaaguaaaaaca

SEQ ID NO: 3043475 - RNA, 18 nt, Human
uuuuaaagacuuuuauga

SEQ ID NO: 3043476 - RNA, 20 nt, Human
uuuuaaaagaugcaauguag

SEQ ID NO: 3043477 - RNA, 15 nt, Human
uuugcaucugaaaau

SEQ ID NO: 3043478 - RNA, 22 nt, Human
uuugaauguaugcuucauacag

SEQ ID NO: 3043479 - RNA, 17 nt, Human
uuugaauguaugcuuca

SEQ ID NO: 3043480 - RNA, 18 nt, Human
uuugaaucaucaagucuu

SEQ ID NO: 3043481 - RNA, 22 nt, Human
uuugaaucucauaauuuauaca

SEQ ID NO: 3043482 - RNA, 21 nt, Human
uuugaaucucauaauuuauac

SEQ ID NO: 3043483 - RNA, 20 nt, Human
uuugaaucucauaauuuaua

SEQ ID NO: 3043484 - RNA, 19 nt, Human
uuugaaucucauaauuuau

SEQ ID NO: 3043485 - RNA, 16 nt, Human
uuugaaucucauaauu

SEQ ID NO: 3043486 - RNA, 12 nt, Human
uuucuaaaguaa

SEQ ID NO: 3043487 - RNA, 13 nt, Human
cuaguucugccag

SEQ ID NO: 3043488 - RNA, 15 nt, Human
cuaggguggggagag

SEQ ID NO: 3043489 - RNA, 14 nt, Human
cuaguucugccagg

SEQ ID NO: 3043490 - RNA, 15 nt, Human
cuaguucugccagga

SEQ ID NO: 3043491 - RNA, 16 nt, Human
cuaguucugccaggag

SEQ ID NO: 3043492 - RNA, 15 nt, Human
cuaggcuaggguggg

SEQ ID NO: 3043493 - RNA, 20 nt, Human
cuacuagggaaaugccuuug

SEQ ID NO: 3043494 - RNA, 12 nt, Human
cucagaauauug

SEQ ID NO: 3043495 - RNA, 18 nt, Human
cugacccucaucuuucuu

SEQ ID NO: 3043496 - RNA, 23 nt, Human
cugaggaagagggacuguucuuu

SEQ ID NO: 3043497 - RNA, 18 nt, Human
cugaggaagagggacugu

SEQ ID NO: 3043498 - RNA, 12 nt, Human
cugagcuuggaa

SEQ ID NO: 3043499 - RNA, 21 nt, Human
cugagcuuggaagcuucuggu

SEQ ID NO: 3043500 - RNA, 20 nt, Human
cugagcuuggaagcuucugg

SEQ ID NO: 3043501 - RNA, 14 nt, Human
cugagcuuggaagc

SEQ ID NO: 3043502 - RNA, 21 nt, Human
cugaggugggagauguggaaa

SEQ ID NO: 3043503 - RNA, 21 nt, Human
cugaguaaaaaagcugugugc

SEQ ID NO: 3043504 - RNA, 20 nt, Human
cucucuugauuaagaucuca

SEQ ID NO: 3043505 - RNA, 16 nt, Human
cuccuagccacccacc

SEQ ID NO: 3043506 - RNA, 14 nt, Human
ccauucuuucccaa

SEQ ID NO: 3043507 - RNA, 20 nt, Human
ccauucuuucccaacaccuc

SEQ ID NO: 3043508 - RNA, 12 nt, Human
ccauucuuuccc

SEQ ID NO: 3043509 - RNA, 23 nt, Human
ccagggggccagucccugaggca

SEQ ID NO: 3043510 - RNA, 15 nt, Human
ccagucccugaggca

SEQ ID NO: 3043511 - RNA, 10 nt, Human
ccccugccag

SEQ ID NO: 3043512 - RNA, 18 nt, Human
ccugacccucaucuuucu

SEQ ID NO: 3043513 - RNA, 19 nt, Human
ccugacccucaucuuucuu

SEQ ID NO: 3043514 - RNA, 17 nt, Human
ccugagaucucugcagg

SEQ ID NO: 3043515 - RNA, 18 nt, Human
ccugagaucucugcagga

SEQ ID NO: 3043516 - RNA, 19 nt, Human
ccugaguuccuagccaccg

SEQ ID NO: 3043517 - RNA, 21 nt, Human
ccugaguuccuagccaccgcc

SEQ ID NO: 3043518 - RNA, 20 nt, Human
ccugaguuccuagccaccgc

SEQ ID NO: 3043519 - RNA, 18 nt, Human
ccugaguuccuagccacc

SEQ ID NO: 3043520 - RNA, 20 nt, Human
ccugccaucauguuuacaga

SEQ ID NO: 3043521 - RNA, 18 nt, Human
ccugccaucauguuuaca

SEQ ID NO: 3043522 - RNA, 14 nt, Human
ccugccucucugca

SEQ ID NO: 3043523 - RNA, 15 nt, Human
ccugccucucugcag

SEQ ID NO: 3043524 - RNA, 13 nt, Human
ccugccucucugc

SEQ ID NO: 3043525 - RNA, 21 nt, Human
ccugucucccuccucugcccg

SEQ ID NO: 3043526 - RNA, 18 nt, Human
ccuggugguggcucggga

SEQ ID NO: 3043527 - RNA, 21 nt, Human
ccuggugguggcucgggaggc

SEQ ID NO: 3043528 - RNA, 12 nt, Human
ccuggugguuca

SEQ ID NO: 3043529 - RNA, 22 nt, Human
ccuggugguucacucuuggagc

SEQ ID NO: 3043530 - RNA, 13 nt, Human
ccuggugguucac

SEQ ID NO: 3043531 - RNA, 12 nt, Human
ccuagccaccca

SEQ ID NO: 3043532 - RNA, 16 nt, Human
ccuagccacccaccac

SEQ ID NO: 3043533 - RNA, 12 nt, Human
ccuaauaaagcu

SEQ ID NO: 3043534 - RNA, 15 nt, Human
ccuccuagccaccca

SEQ ID NO: 3043535 - RNA, 18 nt, Human
cagucugagagaggccau

SEQ ID NO: 3043536 - RNA, 15 nt, Human
cagguuugggacccc

SEQ ID NO: 3043537 - RNA, 18 nt, Human
cagguuugggaccccugg

SEQ ID NO: 3043538 - RNA, 15 nt, Human
caggccugacucuca

SEQ ID NO: 3043539 - RNA, 13 nt, Human
caggaggaagggg

SEQ ID NO: 3043540 - RNA, 14 nt, Human
caggaccccugagu

SEQ ID NO: 3043541 - RNA, 12 nt, Human
caggaccccuga

SEQ ID NO: 3043542 - RNA, 15 nt, Human
caggagguggucugg

SEQ ID NO: 3043543 - RNA, 21 nt, Human
cagcagguccccagcuuuggc

SEQ ID NO: 3043544 - RNA, 20 nt, Human
cauaauuuauacaggucaua

SEQ ID NO: 3043545 - RNA, 13 nt, Human
cauaauuuauaca

SEQ ID NO: 3043546 - RNA, 19 nt, Human
cauccauggggcugauugu

SEQ ID NO: 3043547 - RNA, 12 nt, Human
caugcacaaauu

SEQ ID NO: 3043548 - RNA, 17 nt, Human
ccaccgccuccuacagc

SEQ ID NO: 3043549 - RNA, 21 nt, Human
cauuuggagacacaacuauuu

SEQ ID NO: 3043550 - RNA, 19 nt, Human
cauuguaaauaguauuuga

SEQ ID NO: 3043551 - RNA, 22 nt, Human
cacuguuuugaaucucauaauu

SEQ ID NO: 3043552 - RNA, 19 nt, Human
cacugggagaaaugaaaaa

SEQ ID NO: 3043553 - RNA, 11 nt, Human
cagaaaguuau

SEQ ID NO: 3043554 - RNA, 16 nt, Human
cagaaaguuauugaua

SEQ ID NO: 3043555 - RNA, 17 nt, Human
auuguguugugaauguu

SEQ ID NO: 3043556 - RNA, 14 nt, Human
auuguguugugaau

SEQ ID NO: 3043557 - RNA, 16 nt, Human
auuuaugcauauuauu

SEQ ID NO: 3043558 - RNA, 22 nt, Human
auuuaugcauauuauuuuaugu

SEQ ID NO: 3043559 - RNA, 16 nt, Human
auuucauaugcuguau

SEQ ID NO: 3043560 - RNA, 20 nt, Human
auuaguacuccccuccuuga

SEQ ID NO: 3043561 - RNA, 16 nt, Human
caagaugguucuagca

SEQ ID NO: 3043562 - RNA, 13 nt, Human
caagaugguucua

SEQ ID NO: 3043563 - RNA, 18 nt, Human
caaagggugaaaauuauu

SEQ ID NO: 3043564 - RNA, 14 nt, Human
caaagguaaaucag

SEQ ID NO: 3043565 - RNA, 15 nt, Human
caaaccaaauaaaaa

SEQ ID NO: 3043566 - RNA, 14 nt, Human
caaaccaaauaaaa

SEQ ID NO: 3043567 - RNA, 21 nt, Human
caaaaggauaaugaauacuuu

SEQ ID NO: 3043568 - RNA, 16 nt, Human
auuuuauaucuuguag

SEQ ID NO: 3043569 - RNA, 14 nt, Human
auuuuauaucuugu

SEQ ID NO: 3043570 - RNA, 12 nt, Human
auuuuauaucuu

SEQ ID NO: 3043571 - RNA, 20 nt, Human
gcucaggaaccgaggcaggg

SEQ ID NO: 3043572 - RNA, 21 nt, Human
gcucaggaaccgaggcaggga

SEQ ID NO: 3043573 - RNA, 16 nt, Human
gcucaggaaccgaggc

SEQ ID NO: 3043574 - RNA, 19 nt, Human
gcucaggaaccgaggcagg

SEQ ID NO: 3043575 - RNA, 14 nt, Human
gcuaugagggccuu

SEQ ID NO: 3043576 - RNA, 22 nt, Human
gcuaauucuuugaccuguuggg

SEQ ID NO: 3043577 - RNA, 18 nt, Human
gcucccccuccaccugcu

SEQ ID NO: 3043578 - RNA, 17 nt, Human
gcucccccuccaccugc

SEQ ID NO: 3043579 - RNA, 23 nt, Human
gccuccauccuacccccugugcc

SEQ ID NO: 3043580 - RNA, 17 nt, Human
gccucgacacagagugg

SEQ ID NO: 3043581 - RNA, 16 nt, Human
gccccugccagacccc

SEQ ID NO: 3043582 - RNA, 11 nt, Human
gccccugccag

SEQ ID NO: 3043583 - RNA, 20 nt, Human
gccccugccucucugcaggu

SEQ ID NO: 3043584 - RNA, 23 nt, Human
gccccugccucucugcagguccc

SEQ ID NO: 3043585 - RNA, 16 nt, Human
gcuucuaguucugcca

SEQ ID NO: 3043586 - RNA, 17 nt, Human
gcuucuaguucugccag

SEQ ID NO: 3043587 - RNA, 23 nt, Human
gcugggccccugccucucugcag

SEQ ID NO: 3043588 - RNA, 21 nt, Human
gcugggccccugccucucugc

SEQ ID NO: 3043589 - RNA, 22 nt, Human
gcugggccccugccucucugca

SEQ ID NO: 3043590 - RNA, 12 nt, Human
ggaagugugggu

SEQ ID NO: 3043591 - RNA, 22 nt, Human
ggaagugugggucugugugugu

SEQ ID NO: 3043592 - RNA, 21 nt, Human
ggaagugugggucugugugug

SEQ ID NO: 3043593 - RNA, 20 nt, Human
ggaacugcugggcuuggcag

SEQ ID NO: 3043594 - RNA, 20 nt, Human
ggcucagaggguguccugca

SEQ ID NO: 3043595 - RNA, 14 nt, Human
ggcucagagugggg

SEQ ID NO: 3043596 - RNA, 22 nt, Human
gggacaccuaggcuaggguggg

SEQ ID NO: 3043597 - RNA, 18 nt, Human
gggacaggggcaggagga

SEQ ID NO: 3043598 - RNA, 17 nt, Human
gggacaggggcaggagg

SEQ ID NO: 3043599 - RNA, 14 nt, Human
aaaaauaacaauga

SEQ ID NO: 3043600 - RNA, 14 nt, Human
ggcugggucgcccu

SEQ ID NO: 3043601 - RNA, 17 nt, Human
ggcugggucgcccugga

SEQ ID NO: 3043602 - RNA, 20 nt, Human
ggcugggucgcccuggacug

SEQ ID NO: 3043603 - RNA, 11 nt, Human
ggcuucauaca

SEQ ID NO: 3043604 - RNA, 9 nt, Human
ggcuucaua

SEQ ID NO: 3043605 - RNA, 12 nt, Human
ggcuucauacac

SEQ ID NO: 3043606 - RNA, 21 nt, Human
aaaagauuuucagaaaauauu

SEQ ID NO: 3043607 - RNA, 18 nt, Human
aaaagccaagaggcugca

SEQ ID NO: 3043608 - RNA, 23 nt, Human
ggccagucccugaggcagguccc

SEQ ID NO: 3043609 - RNA, 17 nt, Human
ggccagucccugaggca

SEQ ID NO: 3043610 - RNA, 21 nt, Human
ggccccugccucucugcaggu

SEQ ID NO: 3043611 - RNA, 15 nt, Human
ggcagggcugaggcc

SEQ ID NO: 3043612 - RNA, 22 nt, Human
ggugcuucuaguucugccagga

SEQ ID NO: 3043613 - RNA, 15 nt, Human
gguggaauuauuuua

SEQ ID NO: 3043614 - RNA, 21 nt, Human
ggugcauauuuauaaaaauaa

SEQ ID NO: 3043615 - RNA, 11 nt, Human
ggugcugggcc

SEQ ID NO: 3043616 - RNA, 13 nt, Human
ggugcugggcccc

SEQ ID NO: 3043617 - RNA, 15 nt, Human
ggugcugggccccug

SEQ ID NO: 3043618 - RNA, 16 nt, Human
ggugcugggccccugc

SEQ ID NO: 3043619 - RNA, 14 nt, Human
ggucgcccuggacu

SEQ ID NO: 3043620 - RNA, 22 nt, Human
ggugaaaauuauuuuguucaua

SEQ ID NO: 3043621 - RNA, 14 nt, Human
ggugaaaauuauuu

SEQ ID NO: 3043622 - RNA, 13 nt, Human
ggugaaaauuauu

SEQ ID NO: 3043623 - RNA, 20 nt, Human
aaagggacugagaaauuuau

SEQ ID NO: 3043624 - RNA, 14 nt, Human
aaagguaaaucaga

SEQ ID NO: 3043625 - RNA, 17 nt, Human
aaagggugaaaauuauu

SEQ ID NO: 3043626 - RNA, 18 nt, Human
ggguggggagagacgggc

SEQ ID NO: 3043627 - RNA, 17 nt, Human
ggguggggggcuucaua

SEQ ID NO: 3043628 - RNA, 13 nt, Human
ggguggggagaga

SEQ ID NO: 3043629 - RNA, 14 nt, Human
ggguggggagagac

SEQ ID NO: 3043630 - RNA, 19 nt, Human
ggguggggggcuucauaca

SEQ ID NO: 3043631 - RNA, 19 nt, Human
aaacuuguaaauaaaggaa

SEQ ID NO: 3043632 - RNA, 16 nt, Human
aaacuuguauuaugug

SEQ ID NO: 3043633 - RNA, 13 nt, Human
aaagacagugaaa

SEQ ID NO: 3043634 - RNA, 22 nt, Human
aaagaccuuuggagcaaagcug

SEQ ID NO: 3043635 - RNA, 22 nt, Human
aaagagaugaugaaaauauuua

SEQ ID NO: 3043636 - RNA, 20 nt, Human
aaagagaugaugaaaauauu

SEQ ID NO: 3043637 - RNA, 19 nt, Human
aaagagaugaugaaaauau

SEQ ID NO: 3043638 - RNA, 18 nt, Human
gggggcgcggcugggagg

SEQ ID NO: 3043639 - RNA, 19 nt, Human
gggggugcugggccccugc

SEQ ID NO: 3043640 - RNA, 13 nt, Human
gggucgcccugga

SEQ ID NO: 3043641 - RNA, 15 nt, Human
gggucgcccuggacu

SEQ ID NO: 3043642 - RNA, 18 nt, Human
aaaccuuuguuugcaucu

SEQ ID NO: 3043643 - RNA, 18 nt, Human
aaaccuuuuauauuuagu

SEQ ID NO: 3043644 - RNA, 18 nt, Human
aaacuaggugcauauuua

SEQ ID NO: 3043645 - RNA, 22 nt, Human
aaacuaggugcauauuuauaaa

SEQ ID NO: 3043646 - RNA, 17 nt, Human
ggggccgggggcagucu

SEQ ID NO: 3043647 - RNA, 17 nt, Human
aaaguugguaaaccuuu

SEQ ID NO: 3043648 - RNA, 16 nt, Human
aaaguugguaaaccuu

SEQ ID NO: 3043649 - RNA, 14 nt, Human
aaauaaaaauauug

SEQ ID NO: 3043650 - RNA, 20 nt, Human
aaaguuauugauaaguucau

SEQ ID NO: 3043651 - RNA, 20 nt, Human
guaauaggcguaacuaauuu

SEQ ID NO: 3043652 - RNA, 19 nt, Human
guaauagagcaaaauugau

SEQ ID NO: 3043653 - RNA, 15 nt, Human
guaauaacugugaag

SEQ ID NO: 3043654 - RNA, 16 nt, Human
guaauaacugugaagu

SEQ ID NO: 3043655 - RNA, 22 nt, Human
guaauaacugugaaguuuacau

SEQ ID NO: 3043656 - RNA, 21 nt, Human
guaauccaagcaaaugugaau

SEQ ID NO: 3043657 - RNA, 23 nt, Human
guaauuuaaaauugugauguguc

SEQ ID NO: 3043658 - RNA, 20 nt, Human
guaauuuaaaauugugaugu

SEQ ID NO: 3043659 - RNA, 19 nt, Human
guaauuuaaaauugugaug

SEQ ID NO: 3043660 - RNA, 14 nt, Human
aaauauuauguguu

SEQ ID NO: 3043661 - RNA, 15 nt, Human
aaauauuauguguuu

SEQ ID NO: 3043662 - RNA, 14 nt, Human
aaaucagacuauga

SEQ ID NO: 3043663 - RNA, 21 nt, Human
aaaucagacuaugaaguuuuu

SEQ ID NO: 3043664 - RNA, 15 nt, Human
aaauccacuuuaucu

SEQ ID NO: 3043665 - RNA, 20 nt, Human
guaccaagacuacuagggaa

SEQ ID NO: 3043666 - RNA, 23 nt, Human
guaccaagacuacuagggaaaug

SEQ ID NO: 3043667 - RNA, 15 nt, Human
guacauuuggagaca

SEQ ID NO: 3043668 - RNA, 15 nt, Human
guagagccagagguc

SEQ ID NO: 3043669 - RNA, 14 nt, Human
guacuuaacuauuc

SEQ ID NO: 3043670 - RNA, 15 nt, Human
gacccucaucuuucu

SEQ ID NO: 3043671 - RNA, 19 nt, Human
gacccucaucuuucuucca

SEQ ID NO: 3043672 - RNA, 20 nt, Human
gacccucaucuuucuuccaa

SEQ ID NO: 3043673 - RNA, 15 nt, Human
gacuauggagcugag

SEQ ID NO: 3043674 - RNA, 14 nt, Human
gacugugugcucag

SEQ ID NO: 3043675 - RNA, 16 nt, Human
gacugugugcucagga

SEQ ID NO: 3043676 - RNA, 17 nt, Human
gacugugugcucaggag

SEQ ID NO: 3043677 - RNA, 20 nt, Human
gacugugugcucaggagccc

SEQ ID NO: 3043678 - RNA, 20 nt, Human
gacaggggcaggaggaaggg

SEQ ID NO: 3043679 - RNA, 18 nt, Human
gacaggggcaggaggaag

SEQ ID NO: 3043680 - RNA, 19 nt, Human
gacagguuugggaccccug

SEQ ID NO: 3043681 - RNA, 22 nt, Human
gacagguuugggaccccuggug

SEQ ID NO: 3043682 - RNA, 18 nt, Human
gagguggaauuauuuuaa

SEQ ID NO: 3043683 - RNA, 19 nt, Human
gaggcugcagccaggccac

SEQ ID NO: 3043684 - RNA, 14 nt, Human
gaggcucuggagcc

SEQ ID NO: 3043685 - RNA, 19 nt, Human
gaggcucuggagcccacug

SEQ ID NO: 3043686 - RNA, 18 nt, Human
gagcagugggccuggcca

SEQ ID NO: 3043687 - RNA, 17 nt, Human
gagcagugggccuggcc

SEQ ID NO: 3043688 - RNA, 15 nt, Human
gagcagugggccugg

SEQ ID NO: 3043689 - RNA, 20 nt, Human
gagcugugcaucagcuagaa

SEQ ID NO: 3043690 - RNA, 18 nt, Human
gcauuucccuuccuuccu

SEQ ID NO: 3043691 - RNA, 12 nt, Human
gccaagaggcug

SEQ ID NO: 3043692 - RNA, 14 nt, Human
gccaagaggcugca

SEQ ID NO: 3043693 - RNA, 13 nt, Human
gccaagaggcugc

SEQ ID NO: 3043694 - RNA, 14 nt, Human
gccaacuauggccu

SEQ ID NO: 3043695 - RNA, 15 nt, Human
gccaacuauggccug

SEQ ID NO: 3043696 - RNA, 19 nt, Human
gccaacuauggccugugga

SEQ ID NO: 3043697 - RNA, 18 nt, Human
gcauggcauauuuuucac

SEQ ID NO: 3043698 - RNA, 17 nt, Human
gccaagaggcugcagcc

SEQ ID NO: 3043699 - RNA, 14 nt, Human
gaugaugacuaugg

SEQ ID NO: 3043700 - RNA, 17 nt, Human
cuucuaguucugccagg

SEQ ID NO: 3043701 - RNA, 18 nt, Human
cuucuaguucugccagga

SEQ ID NO: 3043702 - RNA, 16 nt, Human
cuucuaguucugccag

SEQ ID NO: 3043703 - RNA, 19 nt, Human
cuucuaguucugccaggag

SEQ ID NO: 3043704 - RNA, 20 nt, Human
cuucucacauuuauauuuuu

SEQ ID NO: 3043705 - RNA, 13 nt, Human
cuucucacauuua

SEQ ID NO: 3043706 - RNA, 20 nt, Human
cuugauuaagaucucagugg

SEQ ID NO: 3043707 - RNA, 13 nt, Human
cuuuguaaugaaa

SEQ ID NO: 3043708 - RNA, 16 nt, Human
cuuuguaaugaaaacc

SEQ ID NO: 3043709 - RNA, 14 nt, Human
cuuuguaaugaaaa

SEQ ID NO: 3043710 - RNA, 15 nt, Human
cuuuguaaugaaaac

SEQ ID NO: 3043711 - RNA, 14 nt, Human
cuuugaccuguugg

SEQ ID NO: 3043712 - RNA, 23 nt, Human
gaaaauuauuuuguucauacaua

SEQ ID NO: 3043713 - RNA, 18 nt, Human
gaaaacuuguauuaugug

SEQ ID NO: 3043714 - RNA, 19 nt, Human
gaaaacuuguauuaugugu

SEQ ID NO: 3043715 - RNA, 22 nt, Human
gaaaacuuguauuauguguguu

SEQ ID NO: 3043716 - RNA, 22 nt, Human
gaaaauuauuuuguucauacau

SEQ ID NO: 3043717 - RNA, 21 nt, Human
gaaaauuauuuuguucauaca

SEQ ID NO: 3043718 - RNA, 20 nt, Human
gaaaauuauuuuguucauac

SEQ ID NO: 3043719 - RNA, 22 nt, Human
gaaaagaaaucuaugauuccag

SEQ ID NO: 3043720 - RNA, 18 nt, Human
gaaaucuaugauuccagg

SEQ ID NO: 3043721 - RNA, 20 nt, Human
gaaaucuaugauuccaggug

SEQ ID NO: 3043722 - RNA, 11 nt, Human
gaaaugaaaaa

SEQ ID NO: 3043723 - RNA, 22 nt, Human
gaaccccuggcuccaggccagg

SEQ ID NO: 3043724 - RNA, 18 nt, Human
gaaccccuggcuccaggc

SEQ ID NO: 3043725 - RNA, 14 nt, Human
gaacugagcuugga

SEQ ID NO: 3043726 - RNA, 22 nt, Human
gaacugagcuuggaagcuucug

SEQ ID NO: 3043727 - RNA, 21 nt, Human
gaacugagcuuggaagcuucu

SEQ ID NO: 3043728 - RNA, 16 nt, Human
gaacugagcuuggaag

SEQ ID NO: 3043729 - RNA, 15 nt, Human
gaacugagcuuggaa

SEQ ID NO: 3043730 - RNA, 20 nt, Human
cugugccuugucacgccaga

SEQ ID NO: 3043731 - RNA, 16 nt, Human
cugugccuuuugccau

SEQ ID NO: 3043732 - RNA, 15 nt, Human
cuuaggccagcacca

SEQ ID NO: 3043733 - RNA, 14 nt, Human
cuguuuaagagaca

SEQ ID NO: 3043734 - RNA, 12 nt, Human
cuguuuaagaga

SEQ ID NO: 3043735 - RNA, 13 nt, Human
cuggacuuggagg

SEQ ID NO: 3043736 - RNA, 16 nt, Human
cugccugguccucaca

SEQ ID NO: 3043737 - RNA, 23 nt, Human
cugccugguccucacacucaccc

SEQ ID NO: 3043738 - RNA, 19 nt, Human
cugccugguccucacacuc

SEQ ID NO: 3043739 - RNA, 17 nt, Human
cugccugguccucacac

SEQ ID NO: 3043740 - RNA, 23 nt, Human
cuggccccugagaucucugcagg

SEQ ID NO: 3043741 - RNA, 22 nt, Human
cuggccccugagaucucugcag

SEQ ID NO: 3043742 - RNA, 18 nt, Human
cuggccccugagaucucu

SEQ ID NO: 3043743 - RNA, 18 nt, Human
cugggaauaagugccagg

SEQ ID NO: 3043744 - RNA, 15 nt, Human
cuggggccaggcugg

SEQ ID NO: 3043745 - RNA, 16 nt, Human
cuggggaugucucuca

SEQ ID NO: 3043746 - RNA, 17 nt, Human
guggcacuggggcaggg

SEQ ID NO: 3043747 - RNA, 18 nt, Human
guggcacuggggcagggg

SEQ ID NO: 3043748 - RNA, 11 nt, Human
aagaauauuug

SEQ ID NO: 3043749 - RNA, 15 nt, Human
aagaauauuugaaug

SEQ ID NO: 3043750 - RNA, 16 nt, Human
gugcugggccccugcc

SEQ ID NO: 3043751 - RNA, 19 nt, Human
gugcugggccccugccucu

SEQ ID NO: 3043752 - RNA, 20 nt, Human
guggaauuauuuuaaaagau

SEQ ID NO: 3043753 - RNA, 14 nt, Human
guggaagagggcug

SEQ ID NO: 3043754 - RNA, 17 nt, Human
guggaagagggcugcaa

SEQ ID NO: 3043755 - RNA, 20 nt, Human
aagagaugaugaaaauauuu

SEQ ID NO: 3043756 - RNA, 18 nt, Human
guggggggggugcugggc

SEQ ID NO: 3043757 - RNA, 14 nt, Human
gugggggucugugu

SEQ ID NO: 3043758 - RNA, 16 nt, Human
gugggggucugugugu

SEQ ID NO: 3043759 - RNA, 15 nt, Human
gugggggucugugug

SEQ ID NO: 3043760 - RNA, 20 nt, Human
gugguucacucuuggagccu

SEQ ID NO: 3043761 - RNA, 13 nt, Human
aagcaaaugugaa

SEQ ID NO: 3043762 - RNA, 14 nt, Human
aagcaaaugugaau

SEQ ID NO: 3043763 - RNA, 15 nt, Human
aagaugcaauguaga

SEQ ID NO: 3043764 - RNA, 16 nt, Human
gugugugggagugugu

SEQ ID NO: 3043765 - RNA, 13 nt, Human
guguguguaugug

SEQ ID NO: 3043766 - RNA, 14 nt, Human
guguguguaugugg

SEQ ID NO: 3043767 - RNA, 17 nt, Human
guguguguugugugugg

SEQ ID NO: 3043768 - RNA, 13 nt, Human
guguucugugaua

SEQ ID NO: 3043769 - RNA, 15 nt, Human
guccugcaccggggc

SEQ ID NO: 3043770 - RNA, 19 nt, Human
guccugcaccggggccugg

SEQ ID NO: 3043771 - RNA, 20 nt, Human
guccugcaccggggccuggg

SEQ ID NO: 3043772 - RNA, 14 nt, Human
gucgcccuggacug

SEQ ID NO: 3043773 - RNA, 22 nt, Human
aacauuuguucuauagcuuuuc

SEQ ID NO: 3043774 - RNA, 12 nt, Human
aacauaauuaaa

SEQ ID NO: 3043775 - RNA, 16 nt, Human
gugaagugaaugaaac

SEQ ID NO: 3043776 - RNA, 21 nt, Human
gugagguggaauuauuuuaaa

SEQ ID NO: 3043777 - RNA, 18 nt, Human
uaaaccucaaaaugucua

SEQ ID NO: 3043778 - RNA, 19 nt, Human
uaaaccucaaaaugucuaa

SEQ ID NO: 3043779 - RNA, 16 nt, Human
uaaagacuuuuaugau

SEQ ID NO: 3043780 - RNA, 17 nt, Human
guuuuuuuuuaaagacu

SEQ ID NO: 3043781 - RNA, 20 nt, Human
aaguuauugauaaguucaua

SEQ ID NO: 3043782 - RNA, 19 nt, Human
aaguuauugauaaguucau

SEQ ID NO: 3043783 - RNA, 15 nt, Human
aaguucauacauugu

SEQ ID NO: 3043784 - RNA, 13 nt, Human
aaguucauacauu

SEQ ID NO: 3043785 - RNA, 12 nt, Human
aaguucauacau

SEQ ID NO: 3043786 - RNA, 23 nt, Human
aaguuauugauaaguucauacau

SEQ ID NO: 3043787 - RNA, 22 nt, Human
aaguuauugauaaguucauaca

SEQ ID NO: 3043788 - RNA, 18 nt, Human
aaguuuacauuguaaaua

SEQ ID NO: 3043789 - RNA, 19 nt, Human
aaguuuacauuguaaauag

SEQ ID NO: 3043790 - RNA, 17 nt, Human
uaaaauuuuuaaucuuu

SEQ ID NO: 3043791 - RNA, 19 nt, Human
uaaaauuuuuaaucuuuaa

SEQ ID NO: 3043792 - RNA, 22 nt, Human
aauaaaaauauuguguugugaa

SEQ ID NO: 3043793 - RNA, 12 nt, Human
aauaaaaauaau

SEQ ID NO: 3043794 - RNA, 15 nt, Human
aauaacgauaaaaga

SEQ ID NO: 3043795 - RNA, 15 nt, Human
aauaacaauaaaaga

SEQ ID NO: 3043796 - RNA, 18 nt, Human
uaaauaguauuugagagu

SEQ ID NO: 3043797 - RNA, 14 nt, Human
uaaauuuuauaucu

SEQ ID NO: 3043798 - RNA, 16 nt, Human
uaaauuuugaguucua

SEQ ID NO: 3043799 - RNA, 20 nt, Human
uaacaaaaaaauauauuuaa

SEQ ID NO: 3043800 - RNA, 23 nt, Human
uaacaaaaaaauauauuuaauga

SEQ ID NO: 3043801 - RNA, 20 nt, Human
uaaauguuuuuuuuuaaaga

SEQ ID NO: 3043802 - RNA, 16 nt, Human
aaggaaaaaauaacaa

SEQ ID NO: 3043803 - RNA, 16 nt, Human
aagcuuuuaugugaaa

SEQ ID NO: 3043804 - RNA, 13 nt, Human
guguuuauuuaua

SEQ ID NO: 3043805 - RNA, 12 nt, Human
guguuuaugugu

SEQ ID NO: 3043806 - RNA, 16 nt, Human
guguuuaugugugugu

SEQ ID NO: 3043807 - RNA, 21 nt, Human
aaggauaaaguugguaaaccu

SEQ ID NO: 3043808 - RNA, 23 nt, Human
aaggauaaaguugguaaaccuuu

SEQ ID NO: 3043809 - RNA, 14 nt, Human
aaggaucuucaucu

SEQ ID NO: 3043810 - RNA, 11 nt, Human
aaggauaaagu

SEQ ID NO: 3043811 - RNA, 22 nt, Human
aaggagcaagucagaauagaaa

SEQ ID NO: 3043812 - RNA, 14 nt, Human
aaggaaaaugauac

SEQ ID NO: 3043813 - RNA, 12 nt, Human
aaggaaaaugau

SEQ ID NO: 3043814 - RNA, 21 nt, Human
guugggagaaugucaguaugu

SEQ ID NO: 3043815 - RNA, 14 nt, Human
guugggagaauguc

SEQ ID NO: 3043816 - RNA, 15 nt, Human
guuuuuuuuuaaaga

SEQ ID NO: 3043817 - RNA, 15 nt, Human
aaguauucuaaauuu

SEQ ID NO: 3043818 - RNA, 13 nt, Human
aaguauucuaaau

SEQ ID NO: 3043819 - RNA, 22 nt, Human
aaguaaaaacaaagaaauuaug

SEQ ID NO: 3043820 - RNA, 14 nt, Human
uaguucugccagga

SEQ ID NO: 3043821 - RNA, 13 nt, Human
uaguucugccagg

SEQ ID NO: 3043822 - RNA, 14 nt, Human
uauaaaagccuguu

SEQ ID NO: 3043823 - RNA, 17 nt, Human
uauaaaagccuguuuaa

SEQ ID NO: 3043824 - RNA, 12 nt, Human
uauaaaagccug

SEQ ID NO: 3043825 - RNA, 23 nt, Human
acaccuaggcuaggguggggaga

SEQ ID NO: 3043826 - RNA, 20 nt, Human
acaccuaggcuagggugggg

SEQ ID NO: 3043827 - RNA, 16 nt, Human
uauauccuuucuaaca

SEQ ID NO: 3043828 - RNA, 13 nt, Human
uauauaucaaaua

SEQ ID NO: 3043829 - RNA, 12 nt, Human
acagccuggcug

SEQ ID NO: 3043830 - RNA, 19 nt, Human
uauggggauagaugugugg

SEQ ID NO: 3043831 - RNA, 18 nt, Human
uauggggauagaugugug

SEQ ID NO: 3043832 - RNA, 17 nt, Human
uauggggauagaugugu

SEQ ID NO: 3043833 - RNA, 22 nt, Human
uauggccugugagcuaggaauu

SEQ ID NO: 3043834 - RNA, 14 nt, Human
uauggccuguggau

SEQ ID NO: 3043835 - RNA, 15 nt, Human
uaucuugaauaaugu

SEQ ID NO: 3043836 - RNA, 18 nt, Human
uaugagcuuccuucugug

SEQ ID NO: 3043837 - RNA, 21 nt, Human
uaugagcuuccuucugugaaa

SEQ ID NO: 3043838 - RNA, 13 nt, Human
acagcccaccugg

SEQ ID NO: 3043839 - RNA, 22 nt, Human
acagaguggacuguucccugag

SEQ ID NO: 3043840 - RNA, 17 nt, Human
uaucuaguaugaaauua

SEQ ID NO: 3043841 - RNA, 16 nt, Human
uaucuaguaugaaauu

SEQ ID NO: 3043842 - RNA, 14 nt, Human
uaucuaguaugaaa

SEQ ID NO: 3043843 - RNA, 15 nt, Human
uauauuuacaaaugg

SEQ ID NO: 3043844 - RNA, 14 nt, Human
uauauuuacaaaug

SEQ ID NO: 3043845 - RNA, 21 nt, Human
acagacacucccacuuggcau

SEQ ID NO: 3043846 - RNA, 16 nt, Human
uauauugauccagaaa

SEQ ID NO: 3043847 - RNA, 11 nt, Human
acaguguuccg

SEQ ID NO: 3043848 - RNA, 20 nt, Human
acagugaaagaaaauaacaa

SEQ ID NO: 3043849 - RNA, 16 nt, Human
uauucaggagaguaga

SEQ ID NO: 3043850 - RNA, 14 nt, Human
uauucauaauuauu

SEQ ID NO: 3043851 - RNA, 23 nt, Human
uauguguguguguuguguguggg

SEQ ID NO: 3043852 - RNA, 11 nt, Human
uaugugugugu

SEQ ID NO: 3043853 - RNA, 22 nt, Human
uauguguguguguugugugugg

SEQ ID NO: 3043854 - RNA, 14 nt, Human
uauguguguguguu

SEQ ID NO: 3043855 - RNA, 19 nt, Human
uauuuaguguucauaaaua

SEQ ID NO: 3043856 - RNA, 14 nt, Human
uauuuaauucaugu

SEQ ID NO: 3043857 - RNA, 19 nt, Human
uauuuaaugauaaguaaau

SEQ ID NO: 3043858 - RNA, 23 nt, Human
acaguucggugagcuacaaaugc

SEQ ID NO: 3043859 - RNA, 22 nt, Human
acaguucggugagcuacaaaug

SEQ ID NO: 3043860 - RNA, 19 nt, Human
acaguucggugagcuacaa

SEQ ID NO: 3043861 - RNA, 21 nt, Human
aauucuugccaaauauaaaua

SEQ ID NO: 3043862 - RNA, 15 nt, Human
aauucuugaaggaaa

SEQ ID NO: 3043863 - RNA, 16 nt, Human
aauucuugaaggaaaa

SEQ ID NO: 3043864 - RNA, 21 nt, Human
aauucuugaaggaaaaugaua

SEQ ID NO: 3043865 - RNA, 22 nt, Human
aauucuuugaccuguugggagu

SEQ ID NO: 3043866 - RNA, 18 nt, Human
aauucuuugaccuguugg

SEQ ID NO: 3043867 - RNA, 14 nt, Human
aauuuaugugaugg

SEQ ID NO: 3043868 - RNA, 15 nt, Human
aauuugaaacacuuu

SEQ ID NO: 3043869 - RNA, 20 nt, Human
aauuugaaacacuuugcaua

SEQ ID NO: 3043870 - RNA, 18 nt, Human
uagcaugucgucaaagcu

SEQ ID NO: 3043871 - RNA, 21 nt, Human
uagcaugucgucaaagcugaa

SEQ ID NO: 3043872 - RNA, 18 nt, Human
acaagcacuaaacaaaga

SEQ ID NO: 3043873 - RNA, 20 nt, Human
acaaaaaaauauauuuaaug

SEQ ID NO: 3043874 - RNA, 13 nt, Human
acaaaaaaauaua

SEQ ID NO: 3043875 - RNA, 17 nt, Human
acaaaaaaauauauuua

SEQ ID NO: 3043876 - RNA, 18 nt, Human
uaauacuugcuuuggaaa

SEQ ID NO: 3043877 - RNA, 17 nt, Human
uaaucagugugucuaaa

SEQ ID NO: 3043878 - RNA, 18 nt, Human
uaaucagugugucuaaau

SEQ ID NO: 3043879 - RNA, 22 nt, Human
uaauccaagcaaaugugaauca

SEQ ID NO: 3043880 - RNA, 17 nt, Human
uaaucuuuaauuuuaca

SEQ ID NO: 3043881 - RNA, 17 nt, Human
uaauguaauaacuguga

SEQ ID NO: 3043882 - RNA, 15 nt, Human
uaauguaagacaaau

SEQ ID NO: 3043883 - RNA, 13 nt, Human
uaauucauguugc

SEQ ID NO: 3043884 - RNA, 17 nt, Human
uacauguacugauuacu

SEQ ID NO: 3043885 - RNA, 23 nt, Human
uacauuguacgaagaguauuuuu

SEQ ID NO: 3043886 - RNA, 22 nt, Human
uacauuguacgaagaguauuuu

SEQ ID NO: 3043887 - RNA, 20 nt, Human
uacauuguacgaagaguauu

SEQ ID NO: 3043888 - RNA, 19 nt, Human
aauuaacaugaauauuuag

SEQ ID NO: 3043889 - RNA, 19 nt, Human
aaugugaacagcggcugga

SEQ ID NO: 3043890 - RNA, 13 nt, Human
aauguaagacaaa

SEQ ID NO: 3043891 - RNA, 15 nt, Human
uacauaaguaauuca

SEQ ID NO: 3043892 - RNA, 16 nt, Human
uacauaaguaauucaa

SEQ ID NO: 3043893 - RNA, 17 nt, Human
uacauaaguaauucaag

SEQ ID NO: 3043894 - RNA, 19 nt, Human
uacauaaguaauucaagaa

SEQ ID NO: 3043895 - RNA, 16 nt, Human
aauguaugcuucauac

SEQ ID NO: 3043896 - RNA, 15 nt, Human
aauguaugcuucaua

SEQ ID NO: 3043897 - RNA, 12 nt, Human
aauguagagggg

SEQ ID NO: 3043898 - RNA, 20 nt, Human
uccugcaccggggccugggc

SEQ ID NO: 3043899 - RNA, 21 nt, Human
uccugcaccggggccugggca

SEQ ID NO: 3043900 - RNA, 17 nt, Human
acugagcuuggaagcuu

SEQ ID NO: 3043901 - RNA, 12 nt, Human
acugagcuugga

SEQ ID NO: 3043902 - RNA, 16 nt, Human
acugagcuuggaagcu

SEQ ID NO: 3043903 - RNA, 13 nt, Human
acugagcuuggaa

SEQ ID NO: 3043904 - RNA, 14 nt, Human
acugaggaucagag

SEQ ID NO: 3043905 - RNA, 22 nt, Human
ucgagaucccaacacugccagc

SEQ ID NO: 3043906 - RNA, 23 nt, Human
ucgagaucccaacacugccagca

SEQ ID NO: 3043907 - RNA, 12 nt, Human
ucgacacagagu

SEQ ID NO: 3043908 - RNA, 14 nt, Human
acuggggcaggggc

SEQ ID NO: 3043909 - RNA, 16 nt, Human
acuguaaggcaaucau

SEQ ID NO: 3043910 - RNA, 23 nt, Human
acugggagccuacccacccccag

SEQ ID NO: 3043911 - RNA, 12 nt, Human
acugggagccua

SEQ ID NO: 3043912 - RNA, 17 nt, Human
acugggagaaaugaaaa

SEQ ID NO: 3043913 - RNA, 20 nt, Human
acuguacagacagaaaaaac

SEQ ID NO: 3043914 - RNA, 11 nt, Human
uccucagcccc

SEQ ID NO: 3043915 - RNA, 21 nt, Human
acucuggagguuuguuuagaa

SEQ ID NO: 3043916 - RNA, 15 nt, Human
acucaugugacucuu

SEQ ID NO: 3043917 - RNA, 16 nt, Human
acucaugugacucuuu

SEQ ID NO: 3043918 - RNA, 17 nt, Human
acucaugugacucuuuc

SEQ ID NO: 3043919 - RNA, 16 nt, Human
acucaucuagguaaau

SEQ ID NO: 3043920 - RNA, 18 nt, Human
acucaucuagguaaauua

SEQ ID NO: 3043921 - RNA, 22 nt, Human
acuaugaaguuuuuuuuauaca

SEQ ID NO: 3043922 - RNA, 15 nt, Human
ucccagugaauucuu

SEQ ID NO: 3043923 - RNA, 16 nt, Human
ucagccccgcguggaa

SEQ ID NO: 3043924 - RNA, 22 nt, Human
acccagcuaugguucucucgca

SEQ ID NO: 3043925 - RNA, 22 nt, Human
ucagauuugccuuauuggcagc

SEQ ID NO: 3043926 - RNA, 19 nt, Human
ucagccuggcuucaaauug

SEQ ID NO: 3043927 - RNA, 22 nt, Human
accccuggcuccaggccagggg

SEQ ID NO: 3043928 - RNA, 20 nt, Human
accccuggcuccaggccagg

SEQ ID NO: 3043929 - RNA, 19 nt, Human
accccuggcuccaggccag

SEQ ID NO: 3043930 - RNA, 16 nt, Human
acccccaggaccccug

SEQ ID NO: 3043931 - RNA, 17 nt, Human
ucaggaaccgaggcagg

SEQ ID NO: 3043932 - RNA, 18 nt, Human
ucaggaaccgaggcaggg

SEQ ID NO: 3043933 - RNA, 14 nt, Human
ucaggcccaaagcc

SEQ ID NO: 3043934 - RNA, 15 nt, Human
ucaggccgaaggagg

SEQ ID NO: 3043935 - RNA, 23 nt, Human
acccucccucuacugggagccua

SEQ ID NO: 3043936 - RNA, 15 nt, Human
acccuccacucuccu

SEQ ID NO: 3043937 - RNA, 20 nt, Human
accagagaaaaagggagggg

SEQ ID NO: 3043938 - RNA, 18 nt, Human
accagagaaaaagggagg

SEQ ID NO: 3043939 - RNA, 19 nt, Human
acccacuugcuuuuaaaau

SEQ ID NO: 3043940 - RNA, 18 nt, Human
accugaauaaagaaugaa

SEQ ID NO: 3043941 - RNA, 23 nt, Human
uccaaagucucuggaauuugaaa

SEQ ID NO: 3043942 - RNA, 18 nt, Human
uccaccaagccuggucag

SEQ ID NO: 3043943 - RNA, 23 nt, Human
uccaccaagccuggucagcccaa

SEQ ID NO: 3043944 - RNA, 22 nt, Human
uccaccaagccuggucagccca

SEQ ID NO: 3043945 - RNA, 17 nt, Human
accuuccaagagccuga

SEQ ID NO: 3043946 - RNA, 16 nt, Human
accgccuccuacagcc

SEQ ID NO: 3043947 - RNA, 19 nt, Human
ucauauuaauauauuucca

SEQ ID NO: 3043948 - RNA, 22 nt, Human
ucaugauagaaggcuaugggga

SEQ ID NO: 3043949 - RNA, 14 nt, Human
ucaugugaaaucau

SEQ ID NO: 3043950 - RNA, 21 nt, Human
ucauuggauucugagagcugu

SEQ ID NO: 3043951 - RNA, 22 nt, Human
accugaagcuaucguaaaauua

SEQ ID NO: 3043952 - RNA, 20 nt, Human
agaauugucuuucugucucu

SEQ ID NO: 3043953 - RNA, 14 nt, Human
ucuugaugccuggc

SEQ ID NO: 3043954 - RNA, 20 nt, Human
ucuugaugccuggcggggug

SEQ ID NO: 3043955 - RNA, 12 nt, Human
ucuuggagccug

SEQ ID NO: 3043956 - RNA, 14 nt, Human
ucuuggagccugca

SEQ ID NO: 3043957 - RNA, 13 nt, Human
ucuuggagccugc

SEQ ID NO: 3043958 - RNA, 14 nt, Human
agacuuaucaacau

SEQ ID NO: 3043959 - RNA, 19 nt, Human
ucuuggagccugcagagcu

SEQ ID NO: 3043960 - RNA, 18 nt, Human
ucuuggagccugcagagc

SEQ ID NO: 3043961 - RNA, 15 nt, Human
ucuuggagccugcag

SEQ ID NO: 3043962 - RNA, 14 nt, Human
acuuuuggcauuuu

SEQ ID NO: 3043963 - RNA, 22 nt, Human
acuuuuuuuuuuuaagaguaaa

SEQ ID NO: 3043964 - RNA, 11 nt, Human
ucuggcccuau

SEQ ID NO: 3043965 - RNA, 12 nt, Human
ucuggauuauau

SEQ ID NO: 3043966 - RNA, 18 nt, Human
ucuggauuauauuaugaa

SEQ ID NO: 3043967 - RNA, 19 nt, Human
agauaaucagugugucuaa

SEQ ID NO: 3043968 - RNA, 18 nt, Human
ugaagguggaaauaaacu

SEQ ID NO: 3043969 - RNA, 22 nt, Human
ugaacuuguaaaggaauuuaaa

SEQ ID NO: 3043970 - RNA, 13 nt, Human
ucuuuguaaugaa

SEQ ID NO: 3043971 - RNA, 15 nt, Human
ucuuuguaaugaaaa

SEQ ID NO: 3043972 - RNA, 12 nt, Human
ucuuuguaauga

SEQ ID NO: 3043973 - RNA, 21 nt, Human
agaggcgcaugaauuugugaa

SEQ ID NO: 3043974 - RNA, 15 nt, Human
agauguguucacaau

SEQ ID NO: 3043975 - RNA, 18 nt, Human
agauguguucacaaugga

SEQ ID NO: 3043976 - RNA, 17 nt, Human
ugacagguuugggaccc

SEQ ID NO: 3043977 - RNA, 12 nt, Human
agaucauuguga

SEQ ID NO: 3043978 - RNA, 21 nt, Human
agaucauugugaaauuauuca

SEQ ID NO: 3043979 - RNA, 14 nt, Human
agauuuaugcauau

SEQ ID NO: 3043980 - RNA, 12 nt, Human
agauuuucagaa

SEQ ID NO: 3043981 - RNA, 17 nt, Human
agauuuucagaaaauau

SEQ ID NO: 3043982 - RNA, 21 nt, Human
agcagauggaaugcuguguua

SEQ ID NO: 3043983 - RNA, 22 nt, Human
ugagggugacuauggagcugag

SEQ ID NO: 3043984 - RNA, 17 nt, Human
ugaggaagagggacugu

SEQ ID NO: 3043985 - RNA, 16 nt, Human
ugagcuacaaaugcau

SEQ ID NO: 3043986 - RNA, 14 nt, Human
ugagcuaggaauug

SEQ ID NO: 3043987 - RNA, 14 nt, Human
ugagcuacaaaugc

SEQ ID NO: 3043988 - RNA, 13 nt, Human
ugagcuacaaaug

SEQ ID NO: 3043989 - RNA, 17 nt, Human
ugccuugucacgccaga

SEQ ID NO: 3043990 - RNA, 19 nt, Human
ugccuugugaaggaauuau

SEQ ID NO: 3043991 - RNA, 15 nt, Human
agcuggggaugucuc

SEQ ID NO: 3043992 - RNA, 20 nt, Human
agcuggggccaggcuggguc

SEQ ID NO: 3043993 - RNA, 17 nt, Human
agcuggggccaggcugg

SEQ ID NO: 3043994 - RNA, 16 nt, Human
ugccucucugcagguc

SEQ ID NO: 3043995 - RNA, 18 nt, Human
ugccucucugcagguccc

SEQ ID NO: 3043996 - RNA, 19 nt, Human
ugccucucugcaggucccu

SEQ ID NO: 3043997 - RNA, 20 nt, Human
ugccucucugcaggucccua

SEQ ID NO: 3043998 - RNA, 23 nt, Human
aggaaaccaguuaggucucaaua

SEQ ID NO: 3043999 - RNA, 19 nt, Human
ugcucugugcccacccucc

SEQ ID NO: 3044000 - RNA, 20 nt, Human
aggaauuuuauuuuuuucug

SEQ ID NO: 3044001 - RNA, 22 nt, Human
aggaauuuuauuuuuuucugaa

SEQ ID NO: 3044002 - RNA, 19 nt, Human
agccugacccucaucuuuc

SEQ ID NO: 3044003 - RNA, 17 nt, Human
ugcaggucccuaauaaa

SEQ ID NO: 3044004 - RNA, 18 nt, Human
ugcaggucccuaauaaag

SEQ ID NO: 3044005 - RNA, 19 nt, Human
ugcaggucccuaauaaagc

SEQ ID NO: 3044006 - RNA, 20 nt, Human
ugcaggucccuaauaaagcu

SEQ ID NO: 3044007 - RNA, 15 nt, Human
ugcauaauggucaga

SEQ ID NO: 3044008 - RNA, 19 nt, Human
agccugcaauuucauaugc

SEQ ID NO: 3044009 - RNA, 21 nt, Human
agccugcaauuucauaugcug

SEQ ID NO: 3044010 - RNA, 15 nt, Human
agccugcagagcugc

SEQ ID NO: 3044011 - RNA, 14 nt, Human
agccugcagagcug

SEQ ID NO: 3044012 - RNA, 13 nt, Human
agccugcagagcu

SEQ ID NO: 3044013 - RNA, 12 nt, Human
agccugcagagc

SEQ ID NO: 3044014 - RNA, 18 nt, Human
agccugccacucaggccc

SEQ ID NO: 3044015 - RNA, 19 nt, Human
agcuacuaauuuuaaaaug

SEQ ID NO: 3044016 - RNA, 20 nt, Human
agcggcuggaauuggguggg

SEQ ID NO: 3044017 - RNA, 20 nt, Human
uggcuguggccuaaccugcc

SEQ ID NO: 3044018 - RNA, 17 nt, Human
uggcuguggcauccaga

SEQ ID NO: 3044019 - RNA, 16 nt, Human
uggcuguggagugugg

SEQ ID NO: 3044020 - RNA, 22 nt, Human
uggcugcagagcagugggccug

SEQ ID NO: 3044021 - RNA, 18 nt, Human
uggcugcagagcaguggg

SEQ ID NO: 3044022 - RNA, 15 nt, Human
uggcugcagagcagu

SEQ ID NO: 3044023 - RNA, 18 nt, Human
ugggaaacaaaaggauaa

SEQ ID NO: 3044024 - RNA, 10 nt, Human
aggcuggguc

SEQ ID NO: 3044025 - RNA, 15 nt, Human
aggcugggucgcccu

SEQ ID NO: 3044026 - RNA, 18 nt, Human
aggcugggucgcccugga

SEQ ID NO: 3044027 - RNA, 20 nt, Human
aggcugggucgcccuggacu

SEQ ID NO: 3044028 - RNA, 21 nt, Human
aggcugggucgcccuggacug

SEQ ID NO: 3044029 - RNA, 15 nt, Human
aggcuuuuuuaucau

SEQ ID NO: 3044030 - RNA, 18 nt, Human
aggcuuuuuuaucaugug

SEQ ID NO: 3044031 - RNA, 21 nt, Human
aggcuuuuuuaucaugugaaa

SEQ ID NO: 3044032 - RNA, 16 nt, Human
ugggagaaaugaaaaa

SEQ ID NO: 3044033 - RNA, 14 nt, Human
ugggaggcucugga

SEQ ID NO: 3044034 - RNA, 17 nt, Human
ugggaggcucuggagcc

SEQ ID NO: 3044035 - RNA, 23 nt, Human
ugggaggcucuggagcccacugu

SEQ ID NO: 3044036 - RNA, 16 nt, Human
ugggauuuggucaaca

SEQ ID NO: 3044037 - RNA, 15 nt, Human
ugggagaaaugaaaa

SEQ ID NO: 3044038 - RNA, 18 nt, Human
aggcgaagcguuguccuc

SEQ ID NO: 3044039 - RNA, 18 nt, Human
aggcucagaggguguccu

SEQ ID NO: 3044040 - RNA, 19 nt, Human
aggcucagaggguguccug

SEQ ID NO: 3044041 - RNA, 20 nt, Human
aggcucagaggguguccugc

SEQ ID NO: 3044042 - RNA, 14 nt, Human
aggccauucuuucc

SEQ ID NO: 3044043 - RNA, 22 nt, Human
uggcacagccuggcuguggccu

SEQ ID NO: 3044044 - RNA, 21 nt, Human
uggcauccagagucccugccu

SEQ ID NO: 3044045 - RNA, 22 nt, Human
uggcauccagagucccugccug

SEQ ID NO: 3044046 - RNA, 20 nt, Human
uggcauccagagucccugcc

SEQ ID NO: 3044047 - RNA, 16 nt, Human
aggccugacucucagc

SEQ ID NO: 3044048 - RNA, 11 nt, Human
aggcagguccc

SEQ ID NO: 3044049 - RNA, 16 nt, Human
aggcagguccccagac

SEQ ID NO: 3044050 - RNA, 15 nt, Human
aggcagguccccaga

SEQ ID NO: 3044051 - RNA, 14 nt, Human
aggcagguccccag

SEQ ID NO: 3044052 - RNA, 13 nt, Human
aggcaggucccca

SEQ ID NO: 3044053 - RNA, 12 nt, Human
aggcaggucccc

SEQ ID NO: 3044054 - RNA, 20 nt, Human
aggcaggaguuucguuuuca

SEQ ID NO: 3044055 - RNA, 16 nt, Human
uggagcccacuguacu

SEQ ID NO: 3044056 - RNA, 19 nt, Human
uggagcccacuguacuugc

SEQ ID NO: 3044057 - RNA, 23 nt, Human
uggagcccacuguacuugcucuu

SEQ ID NO: 3044058 - RNA, 16 nt, Human
uggagccugcagagcu

SEQ ID NO: 3044059 - RNA, 11 nt, Human
uggagccugca

SEQ ID NO: 3044060 - RNA, 14 nt, Human
uggaauuugaaaca

SEQ ID NO: 3044061 - RNA, 21 nt, Human
uggaacaagaugguucuagca

SEQ ID NO: 3044062 - RNA, 20 nt, Human
uggaagugugggucugugug

SEQ ID NO: 3044063 - RNA, 14 nt, Human
uggaagugcuaauu

SEQ ID NO: 3044064 - RNA, 14 nt, Human
uggaaguguggguc

SEQ ID NO: 3044065 - RNA, 13 nt, Human
uggaagugugggu

SEQ ID NO: 3044066 - RNA, 19 nt, Human
aggaguuucguuuucaaaa

SEQ ID NO: 3044067 - RNA, 16 nt, Human
agugauuuuuaugcca

SEQ ID NO: 3044068 - RNA, 20 nt, Human
agugauuuuuaugccaccug

SEQ ID NO: 3044069 - RNA, 21 nt, Human
agugauuuuuaugccaccuga

SEQ ID NO: 3044070 - RNA, 14 nt, Human
agugaggaugucug

SEQ ID NO: 3044071 - RNA, 18 nt, Human
agugccaggauggaauga

SEQ ID NO: 3044072 - RNA, 21 nt, Human
uguggaucaaauccagccugc

SEQ ID NO: 3044073 - RNA, 14 nt, Human
ugugcucuccaagc

SEQ ID NO: 3044074 - RNA, 19 nt, Human
ugugcucuccaagcccagu

SEQ ID NO: 3044075 - RNA, 21 nt, Human
ugugcucaggagcccugggag

SEQ ID NO: 3044076 - RNA, 20 nt, Human
ugugcucaggagcccuggga

SEQ ID NO: 3044077 - RNA, 16 nt, Human
agucuuucacauuuaa

SEQ ID NO: 3044078 - RNA, 17 nt, Human
aguguggcaguuuggca

SEQ ID NO: 3044079 - RNA, 16 nt, Human
aguguggcaguuuggc

SEQ ID NO: 3044080 - RNA, 9 nt, Human
aguguguaa

SEQ ID NO: 3044081 - RNA, 21 nt, Human
aguguuccgugguuaaacucg

SEQ ID NO: 3044082 - RNA, 18 nt, Human
aguguguguuuuucauaa

SEQ ID NO: 3044083 - RNA, 21 nt, Human
aguguucauaaauaaaguuug

SEQ ID NO: 3044084 - RNA, 15 nt, Human
uguugcauagaauaa

SEQ ID NO: 3044085 - RNA, 17 nt, Human
uguuacaaauuguagaa

SEQ ID NO: 3044086 - RNA, 18 nt, Human
uguuacaaauuguagaag

SEQ ID NO: 3044087 - RNA, 14 nt, Human
uguuacaaauugua

SEQ ID NO: 3044088 - RNA, 22 nt, Human
uguguuaaguauguguaaaaug

SEQ ID NO: 3044089 - RNA, 23 nt, Human
uguuaagcagauggaaugcugug

SEQ ID NO: 3044090 - RNA, 16 nt, Human
agugggguagguuggg

SEQ ID NO: 3044091 - RNA, 21 nt, Human
aguggacuguucccugaggug

SEQ ID NO: 3044092 - RNA, 19 nt, Human
ugugucuaaauuugaaugu

SEQ ID NO: 3044093 - RNA, 22 nt, Human
ugugucuaaauuugaauguuaa

SEQ ID NO: 3044094 - RNA, 18 nt, Human
uguguguuguguguggga

SEQ ID NO: 3044095 - RNA, 14 nt, Human
uguguaaaauguga

SEQ ID NO: 3044096 - RNA, 20 nt, Human
uguagugauuuuuaugccac

SEQ ID NO: 3044097 - RNA, 18 nt, Human
uguauauccuuucuaaca

SEQ ID NO: 3044098 - RNA, 19 nt, Human
aguacauuuggagacacaa

SEQ ID NO: 3044099 - RNA, 19 nt, Human
aguaauucaagaaaacaac

SEQ ID NO: 3044100 - RNA, 16 nt, Human
aguaaaaacaaagaaa

SEQ ID NO: 3044101 - RNA, 23 nt, Human
aguaaaaacaaagaaauuaugug

SEQ ID NO: 3044102 - RNA, 13 nt, Human
aguaauagagcaa

SEQ ID NO: 3044103 - RNA, 14 nt, Human
aggugugcaagaga

SEQ ID NO: 3044104 - RNA, 14 nt, Human
aguauuugugggga

SEQ ID NO: 3044105 - RNA, 12 nt, Human
uuauucauaauu

SEQ ID NO: 3044106 - RNA, 15 nt, Human
uuauuauauuuacaa

SEQ ID NO: 3044107 - RNA, 14 nt, Human
uuauuauauuuaca

SEQ ID NO: 3044108 - RNA, 13 nt, Human
auagaaguaaaaa

SEQ ID NO: 3044109 - RNA, 19 nt, Human
auagaaggcuauggggaua

SEQ ID NO: 3044110 - RNA, 22 nt, Human
auagaauaaaauuuuuaaucuu

SEQ ID NO: 3044111 - RNA, 14 nt, Human
auagaauaaaauuu

SEQ ID NO: 3044112 - RNA, 19 nt, Human
auagaauaaaauuuuuaau

SEQ ID NO: 3044113 - RNA, 15 nt, Human
auagagcaaaauuga

SEQ ID NO: 3044114 - RNA, 17 nt, Human
auagagcaaaauugaug

SEQ ID NO: 3044115 - RNA, 21 nt, Human
auagagcaaaauugauguguu

SEQ ID NO: 3044116 - RNA, 22 nt, Human
auagagcaaaauugauguguuu

SEQ ID NO: 3044117 - RNA, 21 nt, Human
auagaguguacuuaacuauuc

SEQ ID NO: 3044118 - RNA, 14 nt, Human
auagaguguacuua

SEQ ID NO: 3044119 - RNA, 19 nt, Human
auagaguguacuuaacuau

SEQ ID NO: 3044120 - RNA, 18 nt, Human
auagauaggucagugcaa

SEQ ID NO: 3044121 - RNA, 14 nt, Human
auagauguguggac

SEQ ID NO: 3044122 - RNA, 11 nt, Human
auagaugugug

SEQ ID NO: 3044123 - RNA, 13 nt, Human
auagaugugugga

SEQ ID NO: 3044124 - RNA, 12 nt, Human
auagaugugugg

SEQ ID NO: 3044125 - RNA, 20 nt, Human
uuaugauacuugaaaauuaa

SEQ ID NO: 3044126 - RNA, 20 nt, Human
uuaugaagcuuuuaugugaa

SEQ ID NO: 3044127 - RNA, 10 nt, Human
uuaugugugu

SEQ ID NO: 3044128 - RNA, 14 nt, Human
uuaugugugugugu

SEQ ID NO: 3044129 - RNA, 12 nt, Human
uuaugugugugu

SEQ ID NO: 3044130 - RNA, 15 nt, Human
uuaugugaaacaugu

SEQ ID NO: 3044131 - RNA, 22 nt, Human
uuaugugccagauuuaugcaua

SEQ ID NO: 3044132 - RNA, 13 nt, Human
uuaugugaaacau

SEQ ID NO: 3044133 - RNA, 12 nt, Human
uuauaaacuuuu

SEQ ID NO: 3044134 - RNA, 16 nt, Human
uuauaaacuuuuuucu

SEQ ID NO: 3044135 - RNA, 22 nt, Human
uuauaaacuuuuuucuuacugu

SEQ ID NO: 3044136 - RNA, 16 nt, Human
auacagggaugguguu

SEQ ID NO: 3044137 - RNA, 21 nt, Human
auacaggaugaugacuaugga

SEQ ID NO: 3044138 - RNA, 23 nt, Human
auacgcaacauaauuaaauuuug

SEQ ID NO: 3044139 - RNA, 19 nt, Human
auaaaagccuguuuaagag

SEQ ID NO: 3044140 - RNA, 20 nt, Human
auaaaagccuguuuaagaga

SEQ ID NO: 3044141 - RNA, 19 nt, Human
uuaagacgaaacauuuguu

SEQ ID NO: 3044142 - RNA, 15 nt, Human
aguuuuuuuuauaca

SEQ ID NO: 3044143 - RNA, 22 nt, Human
uuaagacgaaacauuuguucua

SEQ ID NO: 3044144 - RNA, 17 nt, Human
uuaaucuuuaauuuuac

SEQ ID NO: 3044145 - RNA, 13 nt, Human
uuaaucuuuaauu

SEQ ID NO: 3044146 - RNA, 12 nt, Human
uuaaaaugagaa

SEQ ID NO: 3044147 - RNA, 19 nt, Human
uuaaaaugagaaaucuaaa

SEQ ID NO: 3044148 - RNA, 20 nt, Human
aguuuaaauuguaauaggcg

SEQ ID NO: 3044149 - RNA, 17 nt, Human
aguuuaaauuguaauag

SEQ ID NO: 3044150 - RNA, 15 nt, Human
aguuuacauuguaaa

SEQ ID NO: 3044151 - RNA, 17 nt, Human
aguuuacauuguaaaua

SEQ ID NO: 3044152 - RNA, 13 nt, Human
aguuuacauugua

SEQ ID NO: 3044153 - RNA, 15 nt, Human
uuaaauuuugaguuc

SEQ ID NO: 3044154 - RNA, 20 nt, Human
uuaaauuuugaguucuacau

SEQ ID NO: 3044155 - RNA, 15 nt, Human
aguuuguugaaacac

SEQ ID NO: 3044156 - RNA, 17 nt, Human
auaauucagaaggaucu

SEQ ID NO: 3044157 - RNA, 21 nt, Human
auaauuuauacaggucauauu

SEQ ID NO: 3044158 - RNA, 19 nt, Human
auaauuuauacaggucaua

SEQ ID NO: 3044159 - RNA, 23 nt, Human
auaauucacauuguauucagagu

SEQ ID NO: 3044160 - RNA, 14 nt, Human
auaauuuuaaaugu

SEQ ID NO: 3044161 - RNA, 12 nt, Human
auaauuuuaaau

SEQ ID NO: 3044162 - RNA, 13 nt, Human
auaauuuuaaaug

SEQ ID NO: 3044163 - RNA, 18 nt, Human
auaaucacaacccuucag

SEQ ID NO: 3044164 - RNA, 14 nt, Human
uuaguaaucauauu

SEQ ID NO: 3044165 - RNA, 13 nt, Human
uuaguaaucauau

SEQ ID NO: 3044166 - RNA, 19 nt, Human
uuaguacuccccuccuuga

SEQ ID NO: 3044167 - RNA, 15 nt, Human
uuauaaaaauaaaaa

SEQ ID NO: 3044168 - RNA, 21 nt, Human
uuauaaaaauaaaaaacacug

SEQ ID NO: 3044169 - RNA, 22 nt, Human
uuauaaaaauaaaaaacacugg

SEQ ID NO: 3044170 - RNA, 13 nt, Human
uuacaguguuccg

SEQ ID NO: 3044171 - RNA, 23 nt, Human
uuacuguacagacagaaaaaacu

SEQ ID NO: 3044172 - RNA, 16 nt, Human
auuucccuuccuuccu

SEQ ID NO: 3044173 - RNA, 23 nt, Human
auuucccugaaggaaccaaagcg

SEQ ID NO: 3044174 - RNA, 17 nt, Human
auuucccugaaggaacc

SEQ ID NO: 3044175 - RNA, 18 nt, Human
auuugaaacacuuugcau

SEQ ID NO: 3044176 - RNA, 18 nt, Human
auuugugaagguggaaau

SEQ ID NO: 3044177 - RNA, 21 nt, Human
auuugugaagguggaaauaaa

SEQ ID NO: 3044178 - RNA, 20 nt, Human
auuuuaaaagauaaauauua

SEQ ID NO: 3044179 - RNA, 20 nt, Human
auuuuaaaagaugcaaugua

SEQ ID NO: 3044180 - RNA, 18 nt, Human
auuuguaaauuuauguga

SEQ ID NO: 3044181 - RNA, 19 nt, Human
auuuguaaauuuaugugau

SEQ ID NO: 3044182 - RNA, 16 nt, Human
auuguacgaagaguau

SEQ ID NO: 3044183 - RNA, 14 nt, Human
auugcuuuggucau

SEQ ID NO: 3044184 - RNA, 18 nt, Human
auugcuuuggucauauga

SEQ ID NO: 3044185 - RNA, 19 nt, Human
auuggacaguaaaauccac

SEQ ID NO: 3044186 - RNA, 23 nt, Human
auuggguggggggcuucauacac

SEQ ID NO: 3044187 - RNA, 22 nt, Human
auuggauucugagagcugugca

SEQ ID NO: 3044188 - RNA, 19 nt, Human
auuggauucugagagcugu

SEQ ID NO: 3044189 - RNA, 15 nt, Human
auuuucuauaauuua

SEQ ID NO: 3044190 - RNA, 14 nt, Human
auuuucuauaauuu

SEQ ID NO: 3044191 - RNA, 15 nt, Human
auuuuaauaaacacu

SEQ ID NO: 3044192 - RNA, 16 nt, Human
auuuuaauaaacacuc

SEQ ID NO: 3044193 - RNA, 17 nt, Human
auuuuaauaaacacucu

SEQ ID NO: 3044194 - RNA, 23 nt, Human
auuuugcccuugacaaagucaag

SEQ ID NO: 3044195 - RNA, 15 nt, Human
auuuugcccuugaca

SEQ ID NO: 3044196 - RNA, 18 nt, Human
auuuuguucauacauauu

SEQ ID NO: 3044197 - RNA, 16 nt, Human
auuuuguucauacaua

SEQ ID NO: 3044198 - RNA, 15 nt, Human
auuuuguucauacau

SEQ ID NO: 3044199 - RNA, 14 nt, Human
auuuuguucauaca

SEQ ID NO: 3044200 - RNA, 12 nt, Human
auuuuguucaua

SEQ ID NO: 3044201 - RNA, 17 nt, Human
auuuuguguuuaggaac

SEQ ID NO: 3044202 - RNA, 21 nt, Human
auuuuuguagcacugacagau

SEQ ID NO: 3044203 - RNA, 20 nt, Human
auuuuuguagcacugacaga

SEQ ID NO: 3044204 - RNA, 22 nt, Human
auuuuugugauuuugugauuga

SEQ ID NO: 3044205 - RNA, 12 nt, Human
auuuuucucaug

SEQ ID NO: 3044206 - RNA, 15 nt, Human
auuuuuccaaaauaa

SEQ ID NO: 3044207 - RNA, 15 nt, Human
auuuuucacauaucu

SEQ ID NO: 3044208 - RNA, 21 nt, Human
auuuuucacauaucuaguaug

SEQ ID NO: 3044209 - RNA, 18 nt, Human
auuuuucacauaucuagu

SEQ ID NO: 3044210 - RNA, 15 nt, Human
auuuuugacagaaua

SEQ ID NO: 3044211 - RNA, 14 nt, Human
auuuuugacagaau

SEQ ID NO: 3044212 - RNA, 13 nt, Human
auuuuugacagaa

SEQ ID NO: 3044213 - RNA, 12 nt, Human
auuuuugacaga

SEQ ID NO: 3044214 - RNA, 22 nt, Human
auuuuugacagaauauguuuca

SEQ ID NO: 3044215 - RNA, 15 nt, Human
auucuagcuaaugua

SEQ ID NO: 3044216 - RNA, 18 nt, Human
auucuagcuaauguaaua

SEQ ID NO: 3044217 - RNA, 14 nt, Human
auuauauuaugaag

SEQ ID NO: 3044218 - RNA, 17 nt, Human
auuauauuuacaaaugg

SEQ ID NO: 3044219 - RNA, 12 nt, Human
auuccagaggaa

SEQ ID NO: 3044220 - RNA, 14 nt, Human
auucuaaauuuuau

SEQ ID NO: 3044221 - RNA, 24 nt, Human
auucagaaggaucuucaucugacu

SEQ ID NO: 3044222 - RNA, 18 nt, Human
auucagaaggaucuucau

SEQ ID NO: 3044223 - RNA, 13 nt, Human
auucacauuguau

SEQ ID NO: 3044224 - RNA, 20 nt, Human
auucacauuguauucagagu

SEQ ID NO: 3044225 - RNA, 15 nt, Human
auuauuauuuggccc

SEQ ID NO: 3044226 - RNA, 21 nt, Human
auuauuuuguucauacauauu

SEQ ID NO: 3044227 - RNA, 19 nt, Human
auuauuuuguucauacaua

SEQ ID NO: 3044228 - RNA, 18 nt, Human
auuauuuuguucauacau

SEQ ID NO: 3044229 - RNA, 17 nt, Human
auuauuuuguucauaca

SEQ ID NO: 3044230 - RNA, 16 nt, Human
auuauuuuguucauac

SEQ ID NO: 3044231 - RNA, 15 nt, Human
auuauuuuguucaua

SEQ ID NO: 3044232 - RNA, 14 nt, Human
auccuacccccugu

SEQ ID NO: 3044233 - RNA, 16 nt, Human
auccuacccccugugc

SEQ ID NO: 3044234 - RNA, 17 nt, Human
uugaaauuguauuacaa

SEQ ID NO: 3044235 - RNA, 23 nt, Human
uucuuaaccagaucauugugaaa

SEQ ID NO: 3044236 - RNA, 15 nt, Human
uucuuuguaaugaaa

SEQ ID NO: 3044237 - RNA, 13 nt, Human
uucugccaggaga

SEQ ID NO: 3044238 - RNA, 19 nt, Human
auccauagcaccuccacau

SEQ ID NO: 3044239 - RNA, 18 nt, Human
auccaagcaaaugugaau

SEQ ID NO: 3044240 - RNA, 20 nt, Human
aucauuuuaccuuugacaaa

SEQ ID NO: 3044241 - RNA, 17 nt, Human
auauuuuucacauaucu

SEQ ID NO: 3044242 - RNA, 15 nt, Human
auauuuuucacauau

SEQ ID NO: 3044243 - RNA, 14 nt, Human
auauuuuucacaua

SEQ ID NO: 3044244 - RNA, 13 nt, Human
auauuuuucacau

SEQ ID NO: 3044245 - RNA, 12 nt, Human
auauuuuucaca

SEQ ID NO: 3044246 - RNA, 19 nt, Human
uuccguagguuauuuucag

SEQ ID NO: 3044247 - RNA, 16 nt, Human
aucaggccauuguccc

SEQ ID NO: 3044248 - RNA, 13 nt, Human
aucaggccauugu

SEQ ID NO: 3044249 - RNA, 22 nt, Human
uucuagcauggcauauuuuuca

SEQ ID NO: 3044250 - RNA, 17 nt, Human
uucuagcuaauguaaua

SEQ ID NO: 3044251 - RNA, 14 nt, Human
uucuagcauggcau

SEQ ID NO: 3044252 - RNA, 21 nt, Human
uucuagcauggcauauuuuuc

SEQ ID NO: 3044253 - RNA, 20 nt, Human
uucuagcauggcauauuuuu

SEQ ID NO: 3044254 - RNA, 18 nt, Human
uucuagcauggcauauuu

SEQ ID NO: 3044255 - RNA, 15 nt, Human
uucuagcauggcaua

SEQ ID NO: 3044256 - RNA, 14 nt, Human
uucuaaauuuuaua

SEQ ID NO: 3044257 - RNA, 23 nt, Human
uuggggacaggggcaggaggaag

SEQ ID NO: 3044258 - RNA, 21 nt, Human
augaauauuuaguguucauaa

SEQ ID NO: 3044259 - RNA, 19 nt, Human
augaaauuauauaaguauu

SEQ ID NO: 3044260 - RNA, 21 nt, Human
augaaauuauauaaguauucu

SEQ ID NO: 3044261 - RNA, 16 nt, Human
augaauauuuaguguu

SEQ ID NO: 3044262 - RNA, 20 nt, Human
uuggagacacaacuauuuuu

SEQ ID NO: 3044263 - RNA, 12 nt, Human
aucuguuuacag

SEQ ID NO: 3044264 - RNA, 17 nt, Human
aucuguuuacaguguuc

SEQ ID NO: 3044265 - RNA, 15 nt, Human
aucuguuuacagugu

SEQ ID NO: 3044266 - RNA, 18 nt, Human
aucuuguagcuuuaucaa

SEQ ID NO: 3044267 - RNA, 20 nt, Human
aucuuguagcuuuaucaaag

SEQ ID NO: 3044268 - RNA, 19 nt, Human
aucuuguagcuuuaucaaa

SEQ ID NO: 3044269 - RNA, 20 nt, Human
uugacagaauauguuucaaa

SEQ ID NO: 3044270 - RNA, 16 nt, Human
uugagauguguucaca

SEQ ID NO: 3044271 - RNA, 17 nt, Human
uugacagaauauguuuc

SEQ ID NO: 3044272 - RNA, 22 nt, Human
uugauuaagaucucagugguua

SEQ ID NO: 3044273 - RNA, 12 nt, Human
augugacucuuu

SEQ ID NO: 3044274 - RNA, 16 nt, Human
augugacucuuuccaa

SEQ ID NO: 3044275 - RNA, 21 nt, Human
augugacucuuuccaaccggc

SEQ ID NO: 3044276 - RNA, 20 nt, Human
uuugugaagguggaaauaaa

SEQ ID NO: 3044277 - RNA, 12 nt, Human
uuuguauaaaag

SEQ ID NO: 3044278 - RNA, 13 nt, Human
uuuguaaugaaaa

SEQ ID NO: 3044279 - RNA, 14 nt, Human
uuuguaaugaaaac

SEQ ID NO: 3044280 - RNA, 15 nt, Human
auguaugcuucauac

SEQ ID NO: 3044281 - RNA, 14 nt, Human
auguaugcuucaua

SEQ ID NO: 3044282 - RNA, 16 nt, Human
augucaguauguggaa

SEQ ID NO: 3044283 - RNA, 23 nt, Human
uuuggcaaacucuccaccacacg

SEQ ID NO: 3044284 - RNA, 22 nt, Human
uuugacagaauauguuucaaac

SEQ ID NO: 3044285 - RNA, 19 nt, Human
auguagccccucuccugga

SEQ ID NO: 3044286 - RNA, 19 nt, Human
auguagaggggaaaagaga

SEQ ID NO: 3044287 - RNA, 20 nt, Human
auggggauagauguguggac

SEQ ID NO: 3044288 - RNA, 19 nt, Human
augguguucaaaaaacuug

SEQ ID NO: 3044289 - RNA, 16 nt, Human
augguucucaggccug

SEQ ID NO: 3044290 - RNA, 13 nt, Human
augguuguacaua

SEQ ID NO: 3044291 - RNA, 17 nt, Human
auguacauguacugauu

SEQ ID NO: 3044292 - RNA, 22 nt, Human
augcagauuuugcccuugacaa

SEQ ID NO: 3044293 - RNA, 17 nt, Human
augauaaguaaaugcua

SEQ ID NO: 3044294 - RNA, 20 nt, Human
uuguguuaaguauguguaaa

SEQ ID NO: 3044295 - RNA, 21 nt, Human
augauacuugaaaauuaacau

SEQ ID NO: 3044296 - RNA, 17 nt, Human
augauacuugaaaauua

SEQ ID NO: 3044297 - RNA, 22 nt, Human
uuucaaaauuguuacaaauugu

SEQ ID NO: 3044298 - RNA, 16 nt, Human
uuuauuuuguguuuag

SEQ ID NO: 3044299 - RNA, 20 nt, Human
uuuauuuuguguuuaggaac

SEQ ID NO: 3044300 - RNA, 18 nt, Human
augcuagguuaauuccaa

SEQ ID NO: 3044301 - RNA, 17 nt, Human
uuuaucaugugaaauca

SEQ ID NO: 3044302 - RNA, 18 nt, Human
uuuaucaugugaaaucau

SEQ ID NO: 3044303 - RNA, 21 nt, Human
uuuaucaaagggugaaaauua

SEQ ID NO: 3044304 - RNA, 18 nt, Human
auggcauauuuuucacau

SEQ ID NO: 3044305 - RNA, 23 nt, Human
auggcauauuuuucacauaucua

SEQ ID NO: 3044306 - RNA, 22 nt, Human
auggcauauuuuucacauaucu

SEQ ID NO: 3044307 - RNA, 21 nt, Human
auggcauauuuuucacauauc

SEQ ID NO: 3044308 - RNA, 20 nt, Human
auggcauauuuuucacauau

SEQ ID NO: 3044309 - RNA, 14 nt, Human
uuucaaacuuugga

SEQ ID NO: 3044310 - RNA, 16 nt, Human
accugccgagagucca

SEQ ID NO: 3044311 - RNA, 23 nt, Human
accugccgagaguccaucagccu

SEQ ID NO: 3044312 - RNA, 22 nt, Human
acuauucaggagaguagaacag

SEQ ID NO: 3044313 - RNA, 16 nt, Human
acucaggcccaaagcc

SEQ ID NO: 3044314 - RNA, 17 nt, Human
acucagcccucauuggc

SEQ ID NO: 3044315 - RNA, 21 nt, Human
acucagcccucauuggcucuu

SEQ ID NO: 3044316 - RNA, 12 nt, Human
acugccagcauu

SEQ ID NO: 3044317 - RNA, 18 nt, Human
acugguaggaaacuaggu

SEQ ID NO: 3044318 - RNA, 22 nt, Human
acugugaaguuuacauuguaaa

SEQ ID NO: 3044319 - RNA, 14 nt, Human
agaaaauaacaaua

SEQ ID NO: 3044320 - RNA, 23 nt, Human
acuuuuaugauacuugaaaauua

SEQ ID NO: 3044321 - RNA, 12 nt, Human
acuuuuaugaua

SEQ ID NO: 3044322 - RNA, 16 nt, Human
acuuuuaugauacuug

SEQ ID NO: 3044323 - RNA, 22 nt, Human
acuuuauuuucuauaauuuaaa

SEQ ID NO: 3044324 - RNA, 22 nt, Human
acuuuaucuugaauaauguaag

SEQ ID NO: 3044325 - RNA, 22 nt, Human
acuuuauacccagaaaguuauu

SEQ ID NO: 3044326 - RNA, 20 nt, Human
acuuuauacccagaaaguua

SEQ ID NO: 3044327 - RNA, 16 nt, Human
agaaaggauaaaguug

SEQ ID NO: 3044328 - RNA, 23 nt, Human
agaaaguuauugauaaguucaua

SEQ ID NO: 3044329 - RNA, 11 nt, Human
agaaaguuauu

SEQ ID NO: 3044330 - RNA, 11 nt, Human
acacugccagc

SEQ ID NO: 3044331 - RNA, 19 nt, Human
acagccaacuauggccugu

SEQ ID NO: 3044332 - RNA, 17 nt, Human
acagccaacuauggccu

SEQ ID NO: 3044333 - RNA, 21 nt, Human
acaggaugaugacuauggaaa

SEQ ID NO: 3044334 - RNA, 13 nt, Human
acccccugugccu

SEQ ID NO: 3044335 - RNA, 19 nt, Human
acauguuucuuuguaauga

SEQ ID NO: 3044336 - RNA, 22 nt, Human
acauguuucuuuguaaugaaaa

SEQ ID NO: 3044337 - RNA, 19 nt, Human
acauuuguucuauagcuuu

SEQ ID NO: 3044338 - RNA, 13 nt, Human
accagaucauugu

SEQ ID NO: 3044339 - RNA, 17 nt, Human
aauauguuucaaacuuu

SEQ ID NO: 3044340 - RNA, 16 nt, Human
aauauguuucaaacuu

SEQ ID NO: 3044341 - RNA, 15 nt, Human
aauauguuucaaacu

SEQ ID NO: 3044342 - RNA, 13 nt, Human
aauauguuucaaa

SEQ ID NO: 3044343 - RNA, 16 nt, Human
aauauauaucaaauau

SEQ ID NO: 3044344 - RNA, 15 nt, Human
aaucaccaaaggcuc

SEQ ID NO: 3044345 - RNA, 13 nt, Human
aauccagccugcu

SEQ ID NO: 3044346 - RNA, 17 nt, Human
aauccaagcaaauguga

SEQ ID NO: 3044347 - RNA, 18 nt, Human
aauccaagcaaaugugaa

SEQ ID NO: 3044348 - RNA, 18 nt, Human
aaugcuagguuaauucca

SEQ ID NO: 3044349 - RNA, 19 nt, Human
aaugcuagguuaauuccaa

SEQ ID NO: 3044350 - RNA, 15 nt, Human
aaugucaguaugugg

SEQ ID NO: 3044351 - RNA, 13 nt, Human
aaugucaguaugu

SEQ ID NO: 3044352 - RNA, 21 nt, Human
aaugcuagguuaauuccaauu

SEQ ID NO: 3044353 - RNA, 22 nt, Human
aauguuuuuuuuuaaagacuuu

SEQ ID NO: 3044354 - RNA, 15 nt, Human
aauguuuuuuuuuaa

SEQ ID NO: 3044355 - RNA, 20 nt, Human
aauguuuuuuuuuaaagacu

SEQ ID NO: 3044356 - RNA, 15 nt, Human
aagucuccaaagucu

SEQ ID NO: 3044357 - RNA, 14 nt, Human
aagucuccaaaguc

SEQ ID NO: 3044358 - RNA, 20 nt, Human
aaggugaggagcuugaaacc

SEQ ID NO: 3044359 - RNA, 21 nt, Human
aagcugugugcucuccaagcc

SEQ ID NO: 3044360 - RNA, 18 nt, Human
aagcuguguggcagucug

SEQ ID NO: 3044361 - RNA, 17 nt, Human
aagcagauggaaugcug

SEQ ID NO: 3044362 - RNA, 19 nt, Human
aagcagauggaaugcugug

SEQ ID NO: 3044363 - RNA, 20 nt, Human
aagcagauggaaugcugugu

SEQ ID NO: 3044364 - RNA, 17 nt, Human
aaaaucaguuguacagu

SEQ ID NO: 3044365 - RNA, 21 nt, Human
aaaauugauguguuuauuuau

SEQ ID NO: 3044366 - RNA, 12 nt, Human
aaaauugaugug

SEQ ID NO: 3044367 - RNA, 14 nt, Human
aaaauugauguguu

SEQ ID NO: 3044368 - RNA, 21 nt, Human
aaaauugaugggauuugguca

SEQ ID NO: 3044369 - RNA, 22 nt, Human
aaacacugggagaaaugaaaaa

SEQ ID NO: 3044370 - RNA, 24 nt, Human
aaacacucaguuguucaauaauaa

SEQ ID NO: 3044371 - RNA, 21 nt, Human
aaacacugggagaaaugaaaa

SEQ ID NO: 3044372 - RNA, 15 nt, Human
aaagaaauauaccua

SEQ ID NO: 3044373 - RNA, 17 nt, Human
aaagaaauauaccuaaa

SEQ ID NO: 3044374 - RNA, 17 nt, Human
aaagccaaugugaacag

SEQ ID NO: 3044375 - RNA, 15 nt, Human
aaagccaaugugaac

SEQ ID NO: 3044376 - RNA, 23 nt, Human
aacuuuauacccagaaaguuauu

SEQ ID NO: 3044377 - RNA, 22 nt, Human
aacuuuauacccagaaaguuau

SEQ ID NO: 3044378 - RNA, 17 nt, Human
aaaucuuauaauuuaaa

SEQ ID NO: 3044379 - RNA, 15 nt, Human
aaaugccuuuguacu

SEQ ID NO: 3044380 - RNA, 22 nt, Human
aaccacuggaaaguuuaugguu

SEQ ID NO: 3044381 - RNA, 19 nt, Human
aaccaccagaagcccagaa

SEQ ID NO: 3044382 - RNA, 18 nt, Human
aaccaccagaagcccaga

SEQ ID NO: 3044383 - RNA, 14 nt, Human
agcugcuccccacg

SEQ ID NO: 3044384 - RNA, 17 nt, Human
agcugcuccccacguca

SEQ ID NO: 3044385 - RNA, 22 nt, Human
agcuucuggugaccuuccaaga

SEQ ID NO: 3044386 - RNA, 21 nt, Human
agcuucuggugaccuuccaag

SEQ ID NO: 3044387 - RNA, 22 nt, Human
agcuccuuaaggcucuuuugua

SEQ ID NO: 3044388 - RNA, 18 nt, Human
agcuccuuaaggcucuuu

SEQ ID NO: 3044389 - RNA, 14 nt, Human
agcugagcaggugu

SEQ ID NO: 3044390 - RNA, 21 nt, Human
agcuuuucccuuuuuuuaagu

SEQ ID NO: 3044391 - RNA, 21 nt, Human
aggagucccugccaucauguu

SEQ ID NO: 3044392 - RNA, 23 nt, Human
aggcuacuguaaggcaaucaugg

SEQ ID NO: 3044393 - RNA, 21 nt, Human
agguggaauuauuuuaaaaga

SEQ ID NO: 3044394 - RNA, 17 nt, Human
agguggaauuauuuuaa

SEQ ID NO: 3044395 - RNA, 16 nt, Human
aggucccuaauaaagc

SEQ ID NO: 3044396 - RNA, 13 nt, Human
aggucccuaauaa

SEQ ID NO: 3044397 - RNA, 15 nt, Human
aggucccuaauaaag

SEQ ID NO: 3044398 - RNA, 20 nt, Human
agguaaaagcaucacaugaa

SEQ ID NO: 3044399 - RNA, 18 nt, Human
agguaaaucagacuauga

SEQ ID NO: 3044400 - RNA, 12 nt, Human
aggucccuaaua

SEQ ID NO: 3044401 - RNA, 11 nt, Human
aggucccuaau

SEQ ID NO: 3044402 - RNA, 23 nt, Human
agguaaaucagacuaugaaguuu

SEQ ID NO: 3044403 - RNA, 14 nt, Human
agccgggagccuga

SEQ ID NO: 3044404 - RNA, 14 nt, Human
agcacugacagauu

SEQ ID NO: 3044405 - RNA, 13 nt, Human
agcacugacagau

SEQ ID NO: 3044406 - RNA, 18 nt, Human
agcacugacagauuucca

SEQ ID NO: 3044407 - RNA, 18 nt, Human
agcagugggccuggccag

SEQ ID NO: 3044408 - RNA, 20 nt, Human
agaggacaguauuugugggg

SEQ ID NO: 3044409 - RNA, 17 nt, Human
agagggaugcauggaga

SEQ ID NO: 3044410 - RNA, 19 nt, Human
augagcuccuuaaggcucu

SEQ ID NO: 3044411 - RNA, 23 nt, Human
augaaaaaauauauaucaaauau

SEQ ID NO: 3044412 - RNA, 19 nt, Human
augaaguuuuuuuuauaca

SEQ ID NO: 3044413 - RNA, 22 nt, Human
augaagcuuuuaugugaaacau

SEQ ID NO: 3044414 - RNA, 18 nt, Human
aucuugaauaauguaaga

SEQ ID NO: 3044415 - RNA, 18 nt, Human
auccagaaagaaaacuug

SEQ ID NO: 3044416 - RNA, 16 nt, Human
auccagaaagaaaacu

SEQ ID NO: 3044417 - RNA, 14 nt, Human
aucagccugugcca

SEQ ID NO: 3044418 - RNA, 15 nt, Human
aucaugugaaaucau

SEQ ID NO: 3044419 - RNA, 14 nt, Human
aucaugugaaauca

SEQ ID NO: 3044420 - RNA, 16 nt, Human
aucaugugaaaucauu

SEQ ID NO: 3044421 - RNA, 16 nt, Human
auggcuguggagugug

SEQ ID NO: 3044422 - RNA, 17 nt, Human
augcauagguuuagcag

SEQ ID NO: 3044423 - RNA, 21 nt, Human
augcauagguuuagcaguaua

SEQ ID NO: 3044424 - RNA, 16 nt, Human
augcauauuauuuuau

SEQ ID NO: 3044425 - RNA, 19 nt, Human
auguauucuagcuaaugua

SEQ ID NO: 3044426 - RNA, 20 nt, Human
auguauucuagcuaauguaa

SEQ ID NO: 3044427 - RNA, 15 nt, Human
augugaaacauguuu

SEQ ID NO: 3044428 - RNA, 13 nt, Human
auguuucaaacuu

SEQ ID NO: 3044429 - RNA, 12 nt, Human
auguuucaaacu

SEQ ID NO: 3044430 - RNA, 17 nt, Human
auguuucaaacuuugga

SEQ ID NO: 3044431 - RNA, 14 nt, Human
auguuucaaacuuu

SEQ ID NO: 3044432 - RNA, 14 nt, Human
auaaaaauauugug

SEQ ID NO: 3044433 - RNA, 20 nt, Human
auaaacuuuuuucuuacugu

SEQ ID NO: 3044434 - RNA, 15 nt, Human
auaaagcaggcagaa

SEQ ID NO: 3044435 - RNA, 18 nt, Human
auaaagcuguguggcagu

SEQ ID NO: 3044436 - RNA, 18 nt, Human
auaaaggauuaaugucaa

SEQ ID NO: 3044437 - RNA, 20 nt, Human
auaauuaaauuuugaguucu

SEQ ID NO: 3044438 - RNA, 23 nt, Human
auaguauuugagaguucuaaauu

SEQ ID NO: 3044439 - RNA, 20 nt, Human
auaguauuugagaguucuaa

SEQ ID NO: 3044440 - RNA, 21 nt, Human
auaguauuugagaguucuaaa

SEQ ID NO: 3044441 - RNA, 15 nt, Human
auagguuuaauaauu

SEQ ID NO: 3044442 - RNA, 13 nt, Human
auauuauguguuu

SEQ ID NO: 3044443 - RNA, 23 nt, Human
auauuaugaagcuuuuaugugaa

SEQ ID NO: 3044444 - RNA, 16 nt, Human
auaucaaauauauuca

SEQ ID NO: 3044445 - RNA, 16 nt, Human
aguggcuggaucugug

SEQ ID NO: 3044446 - RNA, 15 nt, Human
aguucauacauugua

SEQ ID NO: 3044447 - RNA, 22 nt, Human
aguugaaaaucuuauaauuuaa

SEQ ID NO: 3044448 - RNA, 11 nt, Human
aguucauacau

SEQ ID NO: 3044449 - RNA, 10 nt, Human
aguucauaca

SEQ ID NO: 3044450 - RNA, 18 nt, Human
aguucauaaauuuauggu

SEQ ID NO: 3044451 - RNA, 23 nt, Human
aguugaaaaucuuauaauuuaaa

SEQ ID NO: 3044452 - RNA, 16 nt, Human
aguaugaaauuauaua

SEQ ID NO: 3044453 - RNA, 14 nt, Human
aguaugaaauuaua

SEQ ID NO: 3044454 - RNA, 16 nt, Human
aguaucuuuuuauuca

SEQ ID NO: 3044455 - RNA, 12 nt, Human
aguccuguaaug

SEQ ID NO: 3044456 - RNA, 16 nt, Human
caccccgacuuuuguu

SEQ ID NO: 3044457 - RNA, 17 nt, Human
caccagaagcccagaau

SEQ ID NO: 3044458 - RNA, 16 nt, Human
caccagaagcccagaa

SEQ ID NO: 3044459 - RNA, 15 nt, Human
caccagaagcccaga

SEQ ID NO: 3044460 - RNA, 14 nt, Human
caccagaagcccag

SEQ ID NO: 3044461 - RNA, 13 nt, Human
caccagaagccca

SEQ ID NO: 3044462 - RNA, 14 nt, Human
cacaacuauuuuuc

SEQ ID NO: 3044463 - RNA, 19 nt, Human
cacaacuauuuuuccaaaa

SEQ ID NO: 3044464 - RNA, 21 nt, Human
cacaaauucugucucuggauu

SEQ ID NO: 3044465 - RNA, 23 nt, Human
cacauaucuaguaugaaauuaua

SEQ ID NO: 3044466 - RNA, 19 nt, Human
caccaagccuggucagccc

SEQ ID NO: 3044467 - RNA, 21 nt, Human
caccaagccuggucagcccaa

SEQ ID NO: 3044468 - RNA, 20 nt, Human
caccaagccuggucagccca

SEQ ID NO: 3044469 - RNA, 18 nt, Human
cacauuggagauguuuag

SEQ ID NO: 3044470 - RNA, 22 nt, Human
caccaagccuggucagcccaaa

SEQ ID NO: 3044471 - RNA, 22 nt, Human
cacauggugacuuuugaaaaga

SEQ ID NO: 3044472 - RNA, 12 nt, Human
caaauauauuca

SEQ ID NO: 3044473 - RNA, 23 nt, Human
caaaaaaauauauuuaaugauaa

SEQ ID NO: 3044474 - RNA, 17 nt, Human
caagcacuaaacaaaga

SEQ ID NO: 3044475 - RNA, 11 nt, Human
caacuuuguau

SEQ ID NO: 3044476 - RNA, 18 nt, Human
caagaaaacaacuucaau

SEQ ID NO: 3044477 - RNA, 12 nt, Human
caacuuuguaua

SEQ ID NO: 3044478 - RNA, 12 nt, Human
caacuuuauacc

SEQ ID NO: 3044479 - RNA, 15 nt, Human
caaauucugucucug

SEQ ID NO: 3044480 - RNA, 20 nt, Human
ccgagaguccaucagccucc

SEQ ID NO: 3044481 - RNA, 21 nt, Human
ccgagaguccaucagccucca

SEQ ID NO: 3044482 - RNA, 21 nt, Human
ccgggggcagucugagagagg

SEQ ID NO: 3044483 - RNA, 20 nt, Human
ccggggccugggcaggaggg

SEQ ID NO: 3044484 - RNA, 17 nt, Human
ccgccuccuacagccca

SEQ ID NO: 3044485 - RNA, 16 nt, Human
ccuaggcuaggguggg

SEQ ID NO: 3044486 - RNA, 12 nt, Human
ccuaaccugccg

SEQ ID NO: 3044487 - RNA, 13 nt, Human
ccuaaccugccga

SEQ ID NO: 3044488 - RNA, 23 nt, Human
ccguggcuguggcauccagaguc

SEQ ID NO: 3044489 - RNA, 22 nt, Human
ccgggucaucuguaccucugcc

SEQ ID NO: 3044490 - RNA, 15 nt, Human
cccugccucucugca

SEQ ID NO: 3044491 - RNA, 13 nt, Human
cccugccucucug

SEQ ID NO: 3044492 - RNA, 14 nt, Human
cccugccucucugc

SEQ ID NO: 3044493 - RNA, 20 nt, Human
cccugaggcagguccccaga

SEQ ID NO: 3044494 - RNA, 18 nt, Human
cccugaggcaggucccca

SEQ ID NO: 3044495 - RNA, 17 nt, Human
cccugaggcaggucccc

SEQ ID NO: 3044496 - RNA, 21 nt, Human
cccugaggcagguccccagac

SEQ ID NO: 3044497 - RNA, 14 nt, Human
ccccugugccuugu

SEQ ID NO: 3044498 - RNA, 12 nt, Human
ccccuggugguu

SEQ ID NO: 3044499 - RNA, 20 nt, Human
ccccuggcuccaggccaggg

SEQ ID NO: 3044500 - RNA, 14 nt, Human
ccccugccucucug

SEQ ID NO: 3044501 - RNA, 15 nt, Human
ccccugccucucugc

SEQ ID NO: 3044502 - RNA, 19 nt, Human
ccccugccucucugcaggu

SEQ ID NO: 3044503 - RNA, 16 nt, Human
ccccugccucucugca

SEQ ID NO: 3044504 - RNA, 17 nt, Human
ccccugccucucugcag

SEQ ID NO: 3044505 - RNA, 17 nt, Human
ccccaucauugguaccc

SEQ ID NO: 3044506 - RNA, 13 nt, Human
ccccuccaccugc

SEQ ID NO: 3044507 - RNA, 14 nt, Human
cccaugagcuccuu

SEQ ID NO: 3044508 - RNA, 15 nt, Human
cccaugagcuccuua

SEQ ID NO: 3044509 - RNA, 22 nt, Human
cccaugagcuccuuaaggcucu

SEQ ID NO: 3044510 - RNA, 13 nt, Human
cccaugagcuccu

SEQ ID NO: 3044511 - RNA, 17 nt, Human
cccagaaugaggcugcu

SEQ ID NO: 3044512 - RNA, 15 nt, Human
cccaacacugccagc

SEQ ID NO: 3044513 - RNA, 16 nt, Human
cccaacacugccagca

SEQ ID NO: 3044514 - RNA, 14 nt, Human
cccaacacugccag

SEQ ID NO: 3044515 - RNA, 15 nt, Human
cccacgucagcuggg

SEQ ID NO: 3044516 - RNA, 15 nt, Human
cccacggcuccucga

SEQ ID NO: 3044517 - RNA, 16 nt, Human
cccagaaugaggcugc

SEQ ID NO: 3044518 - RNA, 22 nt, Human
cccagaauaaacuggcagcuca

SEQ ID NO: 3044519 - RNA, 24 nt, Human
cccagaauaaacuggcagcucagc

SEQ ID NO: 3044520 - RNA, 23 nt, Human
ccagugaauucuugaaggaaaau

SEQ ID NO: 3044521 - RNA, 12 nt, Human
ccaggcuggguc

SEQ ID NO: 3044522 - RNA, 16 nt, Human
ccaggcugggucgccc

SEQ ID NO: 3044523 - RNA, 21 nt, Human
ccaggcugggucgcccuggac

SEQ ID NO: 3044524 - RNA, 22 nt, Human
ccaggcugggucgcccuggacu

SEQ ID NO: 3044525 - RNA, 23 nt, Human
ccaggcugggucgcccuggacug

SEQ ID NO: 3044526 - RNA, 24 nt, Human
ccaggcugggucgcccuggacugu

SEQ ID NO: 3044527 - RNA, 16 nt, Human
ccaggccacuggcccc

SEQ ID NO: 3044528 - RNA, 23 nt, Human
ccaggccacuggccccugagauc

SEQ ID NO: 3044529 - RNA, 19 nt, Human
ccacccccaggaccccuga

SEQ ID NO: 3044530 - RNA, 18 nt, Human
ccacccccaggaccccug

SEQ ID NO: 3044531 - RNA, 16 nt, Human
ccacccccaggacccc

SEQ ID NO: 3044532 - RNA, 15 nt, Human
ccagaaugaggcugc

SEQ ID NO: 3044533 - RNA, 15 nt, Human
ccagaagcccagaau

SEQ ID NO: 3044534 - RNA, 18 nt, Human
ccagaaaccuuuguuugc

SEQ ID NO: 3044535 - RNA, 10 nt, Human
ccagccugcc

SEQ ID NO: 3044536 - RNA, 18 nt, Human
ccagcccugaguuccuag

SEQ ID NO: 3044537 - RNA, 14 nt, Human
ccagcccugaguuc

SEQ ID NO: 3044538 - RNA, 17 nt, Human
ccugcaccggggccugg

SEQ ID NO: 3044539 - RNA, 15 nt, Human
ccugcaccggggccu

SEQ ID NO: 3044540 - RNA, 19 nt, Human
ccugaagagaagggcaggg

SEQ ID NO: 3044541 - RNA, 15 nt, Human
ccucuuccaggcccc

SEQ ID NO: 3044542 - RNA, 22 nt, Human
ccugccgagaguccaucagccu

SEQ ID NO: 3044543 - RNA, 23 nt, Human
ccugccgagaguccaucagccuc

SEQ ID NO: 3044544 - RNA, 14 nt, Human
ccugccgagagucc

SEQ ID NO: 3044545 - RNA, 20 nt, Human
ccugguccucacacucaccc

SEQ ID NO: 3044546 - RNA, 19 nt, Human
cgggacaccuaggcuaggg

SEQ ID NO: 3044547 - RNA, 20 nt, Human
cgggaauuuucaucuaggau

SEQ ID NO: 3044548 - RNA, 18 nt, Human
cgggacaccuaggcuagg

SEQ ID NO: 3044549 - RNA, 18 nt, Human
cgggaauuuucaucuagg

SEQ ID NO: 3044550 - RNA, 11 nt, Human
cgcggcuggga

SEQ ID NO: 3044551 - RNA, 12 nt, Human
cgcggcugggag

SEQ ID NO: 3044552 - RNA, 16 nt, Human
cgcggcugggaggagg

SEQ ID NO: 3044553 - RNA, 15 nt, Human
cgaagcguuguccuc

SEQ ID NO: 3044554 - RNA, 16 nt, Human
cgaagcguuguccuca

SEQ ID NO: 3044555 - RNA, 17 nt, Human
cgaagcguuguccucag

SEQ ID NO: 3044556 - RNA, 21 nt, Human
cgaagcguuguccucagcccc

SEQ ID NO: 3044557 - RNA, 23 nt, Human
cgaagaguauuuuugacagaaua

SEQ ID NO: 3044558 - RNA, 14 nt, Human
ccuuugucccagaa

SEQ ID NO: 3044559 - RNA, 18 nt, Human
ccuguggaucaaauccag

SEQ ID NO: 3044560 - RNA, 17 nt, Human
ccugugccuuuugccau

SEQ ID NO: 3044561 - RNA, 22 nt, Human
cuccacucaugugacucuuucc

SEQ ID NO: 3044562 - RNA, 16 nt, Human
cuccacucaugugacu

SEQ ID NO: 3044563 - RNA, 14 nt, Human
cuccacucuccucu

SEQ ID NO: 3044564 - RNA, 17 nt, Human
cucaguucucuucacuc

SEQ ID NO: 3044565 - RNA, 16 nt, Human
cucaguucucuucacu

SEQ ID NO: 3044566 - RNA, 21 nt, Human
cucauaaaaagccugcaauuu

SEQ ID NO: 3044567 - RNA, 20 nt, Human
cuccccacgucagcugggac

SEQ ID NO: 3044568 - RNA, 16 nt, Human
cucagaggguguccug

SEQ ID NO: 3044569 - RNA, 23 nt, Human
cucacugcuaagaauauuugaau

SEQ ID NO: 3044570 - RNA, 22 nt, Human
cucacugcuaagaauauuugaa

SEQ ID NO: 3044571 - RNA, 21 nt, Human
cucacugcuaagaauauuuga

SEQ ID NO: 3044572 - RNA, 20 nt, Human
cucacugcuaagaauauuug

SEQ ID NO: 3044573 - RNA, 17 nt, Human
cucagccccgcguggaa

SEQ ID NO: 3044574 - RNA, 18 nt, Human
cucaggaaccgaggcagg

SEQ ID NO: 3044575 - RNA, 19 nt, Human
cucaggaaccgaggcaggg

SEQ ID NO: 3044576 - RNA, 17 nt, Human
cucaggaaccgaggcag

SEQ ID NO: 3044577 - RNA, 12 nt, Human
cucaggagcccu

SEQ ID NO: 3044578 - RNA, 13 nt, Human
cucaggagcccug

SEQ ID NO: 3044579 - RNA, 14 nt, Human
cucaggagcccugg

SEQ ID NO: 3044580 - RNA, 15 nt, Human
cucaggagcccuggg

SEQ ID NO: 3044581 - RNA, 16 nt, Human
cucaggagcccuggga

SEQ ID NO: 3044582 - RNA, 17 nt, Human
cucaggagcccugggag

SEQ ID NO: 3044583 - RNA, 20 nt, Human
cucaggagcccugggaggcu

SEQ ID NO: 3044584 - RNA, 21 nt, Human
cucaggagcccugggaggcuc

SEQ ID NO: 3044585 - RNA, 22 nt, Human
cucaggagcccugggaggcucu

SEQ ID NO: 3044586 - RNA, 23 nt, Human
cucaggagcccugggaggcucug

SEQ ID NO: 3044587 - RNA, 24 nt, Human
cucaggagcccugggaggcucugg

SEQ ID NO: 3044588 - RNA, 22 nt, Human
cuacucuggagguuuguuuaga

SEQ ID NO: 3044589 - RNA, 18 nt, Human
cuacugggagccuaccca

SEQ ID NO: 3044590 - RNA, 15 nt, Human
cuacugggagccuac

SEQ ID NO: 3044591 - RNA, 14 nt, Human
cuacugggagccua

SEQ ID NO: 3044592 - RNA, 22 nt, Human
cuagcuaauguaauaacuguga

SEQ ID NO: 3044593 - RNA, 12 nt, Human
cuauaauuuaaa

SEQ ID NO: 3044594 - RNA, 22 nt, Human
cuaugaaguuuuuuuuauacag

SEQ ID NO: 3044595 - RNA, 21 nt, Human
cuauucaggagaguagaacag

SEQ ID NO: 3044596 - RNA, 21 nt, Human
cuauggggauagaugugugga

SEQ ID NO: 3044597 - RNA, 20 nt, Human
cuauggggauagaugugugg

SEQ ID NO: 3044598 - RNA, 19 nt, Human
cuauggggauagaugugug

SEQ ID NO: 3044599 - RNA, 13 nt, Human
cucacacucaccc

SEQ ID NO: 3044600 - RNA, 12 nt, Human
cucaaauuugga

SEQ ID NO: 3044601 - RNA, 23 nt, Human
cuacacgagauacagaauuuuau

SEQ ID NO: 3044602 - RNA, 14 nt, Human
cuaauaaagcugug

SEQ ID NO: 3044603 - RNA, 18 nt, Human
cuaauaaucauuggauuc

SEQ ID NO: 3044604 - RNA, 21 nt, Human
cuaagcuucacuguaaaauaa

SEQ ID NO: 3044605 - RNA, 16 nt, Human
cuaagauaguaacaau

SEQ ID NO: 3044606 - RNA, 20 nt, Human
cuaaauuuuauaucuuguag

SEQ ID NO: 3044607 - RNA, 13 nt, Human
cuaaauuuuauau

SEQ ID NO: 3044608 - RNA, 16 nt, Human
cuaaauuuuauaucuu

SEQ ID NO: 3044609 - RNA, 15 nt, Human
cuaaauuuuauaucu

SEQ ID NO: 3044610 - RNA, 13 nt, Human
cguuuucaaaauu

SEQ ID NO: 3044611 - RNA, 13 nt, Human
cuuucccaacacc

SEQ ID NO: 3044612 - RNA, 22 nt, Human
cuuucuuccaaacaggcucaga

SEQ ID NO: 3044613 - RNA, 16 nt, Human
cuuucugcuuguguua

SEQ ID NO: 3044614 - RNA, 19 nt, Human
cuuuggcuaugagggccuu

SEQ ID NO: 3044615 - RNA, 16 nt, Human
cuugucacgccagacu

SEQ ID NO: 3044616 - RNA, 18 nt, Human
cuugucacgccagacuuc

SEQ ID NO: 3044617 - RNA, 13 nt, Human
cuugucacgccag

SEQ ID NO: 3044618 - RNA, 19 nt, Human
cuugaguuuaaauuguaau

SEQ ID NO: 3044619 - RNA, 23 nt, Human
cuuuaucuugaauaauguaagac

SEQ ID NO: 3044620 - RNA, 18 nt, Human
cuuuaucuugaauaaugu

SEQ ID NO: 3044621 - RNA, 21 nt, Human
cuuuaucuugaauaauguaag

SEQ ID NO: 3044622 - RNA, 22 nt, Human
cuuuaucaaagggugaaaauua

SEQ ID NO: 3044623 - RNA, 21 nt, Human
cuuuaucaaagggugaaaauu

SEQ ID NO: 3044624 - RNA, 14 nt, Human
cuuuguggcacugg

SEQ ID NO: 3044625 - RNA, 17 nt, Human
cuuuuuauggccuguga

SEQ ID NO: 3044626 - RNA, 21 nt, Human
gaaaauauuauguguuuccau

SEQ ID NO: 3044627 - RNA, 13 nt, Human
gaaaauauuuaaa

SEQ ID NO: 3044628 - RNA, 18 nt, Human
gaaaaucuuauaauuuaa

SEQ ID NO: 3044629 - RNA, 20 nt, Human
gaaaaugauacgcaacauaa

SEQ ID NO: 3044630 - RNA, 21 nt, Human
gaaagaguacucuuguuuccu

SEQ ID NO: 3044631 - RNA, 21 nt, Human
cuucuggugaccuuccaagag

SEQ ID NO: 3044632 - RNA, 20 nt, Human
cuucuggugaccuuccaaga

SEQ ID NO: 3044633 - RNA, 18 nt, Human
cuucuggugaccuuccaa

SEQ ID NO: 3044634 - RNA, 14 nt, Human
cuucugugaaagua

SEQ ID NO: 3044635 - RNA, 12 nt, Human
cuugaaaaaugc

SEQ ID NO: 3044636 - RNA, 18 nt, Human
cuugaaaaaugcauguug

SEQ ID NO: 3044637 - RNA, 18 nt, Human
cuugaaaauuaacaugaa

SEQ ID NO: 3044638 - RNA, 12 nt, Human
cuugaaaauuaa

SEQ ID NO: 3044639 - RNA, 13 nt, Human
cuugaaaauuaac

SEQ ID NO: 3044640 - RNA, 13 nt, Human
cuucccuuucugc

SEQ ID NO: 3044641 - RNA, 13 nt, Human
cuuauauuaugga

SEQ ID NO: 3044642 - RNA, 14 nt, Human
cuggaccagccucu

SEQ ID NO: 3044643 - RNA, 18 nt, Human
cuggaccagccucuccac

SEQ ID NO: 3044644 - RNA, 13 nt, Human
cuggaauuugaaa

SEQ ID NO: 3044645 - RNA, 17 nt, Human
cuggagguuuguuuaga

SEQ ID NO: 3044646 - RNA, 12 nt, Human
cuggagguuugu

SEQ ID NO: 3044647 - RNA, 23 nt, Human
cuggcugcagagcagugggccug

SEQ ID NO: 3044648 - RNA, 21 nt, Human
cuggccaguggcuggaucugu

SEQ ID NO: 3044649 - RNA, 23 nt, Human
cugccgagaguccaucagccucc

SEQ ID NO: 3044650 - RNA, 22 nt, Human
cugccgagaguccaucagccuc

SEQ ID NO: 3044651 - RNA, 22 nt, Human
cugccucucugcaggucccuaa

SEQ ID NO: 3044652 - RNA, 20 nt, Human
cugccucucugcaggucccu

SEQ ID NO: 3044653 - RNA, 21 nt, Human
cugccucucugcaggucccua

SEQ ID NO: 3044654 - RNA, 19 nt, Human
cugccucucugcagguccc

SEQ ID NO: 3044655 - RNA, 11 nt, Human
cugcugggcuu

SEQ ID NO: 3044656 - RNA, 21 nt, Human
cugucucccuccucugcccgg

SEQ ID NO: 3044657 - RNA, 19 nt, Human
cugugaggggcucucucau

SEQ ID NO: 3044658 - RNA, 21 nt, Human
cuguguguguguauguggggg

SEQ ID NO: 3044659 - RNA, 17 nt, Human
cuguguguuuaugugug

SEQ ID NO: 3044660 - RNA, 16 nt, Human
cuguguguuuaugugu

SEQ ID NO: 3044661 - RNA, 15 nt, Human
cuguguggcagucug

SEQ ID NO: 3044662 - RNA, 23 nt, Human
cugugugcucaggagcccuggga

SEQ ID NO: 3044663 - RNA, 19 nt, Human
cugugugcucaggagcccu

SEQ ID NO: 3044664 - RNA, 16 nt, Human
cugugugcucaggagc

SEQ ID NO: 3044665 - RNA, 20 nt, Human
cugugugcucaggagcccug

SEQ ID NO: 3044666 - RNA, 21 nt, Human
cugugugcucaggagcccugg

SEQ ID NO: 3044667 - RNA, 18 nt, Human
gagaucccaacacugcca

SEQ ID NO: 3044668 - RNA, 19 nt, Human
gagaucccaacacugccag

SEQ ID NO: 3044669 - RNA, 20 nt, Human
gagaucccaacacugccagc

SEQ ID NO: 3044670 - RNA, 18 nt, Human
gagaugaugaaaauauuu

SEQ ID NO: 3044671 - RNA, 23 nt, Human
gagcccacuguacuugcucuuga

SEQ ID NO: 3044672 - RNA, 13 nt, Human
gagagacgggccc

SEQ ID NO: 3044673 - RNA, 15 nt, Human
gagaguagaacagau

SEQ ID NO: 3044674 - RNA, 17 nt, Human
gagaaugucaguaugug

SEQ ID NO: 3044675 - RNA, 21 nt, Human
gagaaaugaaaaaauauauau

SEQ ID NO: 3044676 - RNA, 12 nt, Human
gagaaaugaaaa

SEQ ID NO: 3044677 - RNA, 14 nt, Human
gaccagccucucca

SEQ ID NO: 3044678 - RNA, 13 nt, Human
gacacaacuauuu

SEQ ID NO: 3044679 - RNA, 16 nt, Human
gacaaggaaaaaauaa

SEQ ID NO: 3044680 - RNA, 23 nt, Human
gaauuggguggggggcuucauac

SEQ ID NO: 3044681 - RNA, 22 nt, Human
gaauuggguggggggcuucaua

SEQ ID NO: 3044682 - RNA, 20 nt, Human
gaauuggguggggggcuuca

SEQ ID NO: 3044683 - RNA, 13 nt, Human
gaaugcuguguua

SEQ ID NO: 3044684 - RNA, 14 nt, Human
gaaugcuguguuaa

SEQ ID NO: 3044685 - RNA, 19 nt, Human
gaaucucauaauuuauaca

SEQ ID NO: 3044686 - RNA, 18 nt, Human
gaaucucauaauuuauac

SEQ ID NO: 3044687 - RNA, 18 nt, Human
gaauucuugaaggaaaau

SEQ ID NO: 3044688 - RNA, 15 nt, Human
gaauguuaagcagau

SEQ ID NO: 3044689 - RNA, 19 nt, Human
gaaugucaguauguggaag

SEQ ID NO: 3044690 - RNA, 14 nt, Human
gaauguuaagcaga

SEQ ID NO: 3044691 - RNA, 13 nt, Human
gaaugucaguaug

SEQ ID NO: 3044692 - RNA, 18 nt, Human
gaaugucaguauguggaa

SEQ ID NO: 3044693 - RNA, 16 nt, Human
gaaugucaguaugugg

SEQ ID NO: 3044694 - RNA, 21 nt, Human
gagucccugccuggaccagcc

SEQ ID NO: 3044695 - RNA, 23 nt, Human
gagucccugccuggaccagccuc

SEQ ID NO: 3044696 - RNA, 22 nt, Human
gaguaauccaagcaaaugugaa

SEQ ID NO: 3044697 - RNA, 15 nt, Human
gauauaagugugugu

SEQ ID NO: 3044698 - RNA, 14 nt, Human
gauagaugugugga

SEQ ID NO: 3044699 - RNA, 22 nt, Human
gauagauguguggacacauugg

SEQ ID NO: 3044700 - RNA, 13 nt, Human
gaguguguaauuu

SEQ ID NO: 3044701 - RNA, 18 nt, Human
gaguguacuuaacuauuc

SEQ ID NO: 3044702 - RNA, 14 nt, Human
gaggcagggaagga

SEQ ID NO: 3044703 - RNA, 21 nt, Human
gaggcgaagcguuguccucag

SEQ ID NO: 3044704 - RNA, 21 nt, Human
gaggcgcaugaauuugugaag

SEQ ID NO: 3044705 - RNA, 20 nt, Human
gaggcgaagcguuguccuca

SEQ ID NO: 3044706 - RNA, 22 nt, Human
gaggccucucauuccagaggaa

SEQ ID NO: 3044707 - RNA, 13 nt, Human
gaggguguccugc

SEQ ID NO: 3044708 - RNA, 21 nt, Human
gagguagcuuugagguggaag

SEQ ID NO: 3044709 - RNA, 23 nt, Human
gagggucuugguuccagccugcc

SEQ ID NO: 3044710 - RNA, 14 nt, Human
gagggggagagggc

SEQ ID NO: 3044711 - RNA, 23 nt, Human
gcacuggggcaggggccgggggc

SEQ ID NO: 3044712 - RNA, 15 nt, Human
gcacuggggcagggg

SEQ ID NO: 3044713 - RNA, 18 nt, Human
gcacuggggcaggggccg

SEQ ID NO: 3044714 - RNA, 22 nt, Human
gcaccccagcuggggccaggcu

SEQ ID NO: 3044715 - RNA, 23 nt, Human
gcacaaauucugucucuggauua

SEQ ID NO: 3044716 - RNA, 14 nt, Human
gcaauuucauaugc

SEQ ID NO: 3044717 - RNA, 22 nt, Human
gcaauguagaggggaaaagaga

SEQ ID NO: 3044718 - RNA, 21 nt, Human
gaugggucaguuguaucagca

SEQ ID NO: 3044719 - RNA, 15 nt, Human
gaugggucaguugua

SEQ ID NO: 3044720 - RNA, 24 nt, Human
gaugguguucaaaaaacuuguaaa

SEQ ID NO: 3044721 - RNA, 16 nt, Human
gauguuuaguaaucau

SEQ ID NO: 3044722 - RNA, 21 nt, Human
gcaaagcugaugacaacuucc

SEQ ID NO: 3044723 - RNA, 23 nt, Human
gcaaaugugaaucauuuuaccuu

SEQ ID NO: 3044724 - RNA, 17 nt, Human
gauugggccccugccag

SEQ ID NO: 3044725 - RNA, 23 nt, Human
gauugcaggagucccugccauca

SEQ ID NO: 3044726 - RNA, 22 nt, Human
gcuuuguggcacuggggcaggg

SEQ ID NO: 3044727 - RNA, 14 nt, Human
gcuuuguggcacug

SEQ ID NO: 3044728 - RNA, 20 nt, Human
ggaaaagccaagaggcugca

SEQ ID NO: 3044729 - RNA, 21 nt, Human
ggaaccaaagcgaauuuuaaa

SEQ ID NO: 3044730 - RNA, 22 nt, Human
ggaaccaaagcgaauuuuaaaa

SEQ ID NO: 3044731 - RNA, 22 nt, Human
gcuucauacagggaugguguuc

SEQ ID NO: 3044732 - RNA, 11 nt, Human
gcuucauacag

SEQ ID NO: 3044733 - RNA, 22 nt, Human
ggaaggaucccaugagcuccuu

SEQ ID NO: 3044734 - RNA, 23 nt, Human
ggaagggacaccaagccuuggcu

SEQ ID NO: 3044735 - RNA, 18 nt, Human
ggaagugcuaauuuugaa

SEQ ID NO: 3044736 - RNA, 15 nt, Human
ggaauuauuuuaaaa

SEQ ID NO: 3044737 - RNA, 14 nt, Human
ggaauuauuuuaaa

SEQ ID NO: 3044738 - RNA, 17 nt, Human
ggaauuauuuuaaaaga

SEQ ID NO: 3044739 - RNA, 16 nt, Human
ggaauuauuuuaaaag

SEQ ID NO: 3044740 - RNA, 14 nt, Human
ggaaugcuguguua

SEQ ID NO: 3044741 - RNA, 19 nt, Human
ggaauuuucaucuaggauu

SEQ ID NO: 3044742 - RNA, 23 nt, Human
ggaauuggguggggggcuucaua

SEQ ID NO: 3044743 - RNA, 12 nt, Human
ggaauuguguuu

SEQ ID NO: 3044744 - RNA, 17 nt, Human
ggacugugugcucagga

SEQ ID NO: 3044745 - RNA, 22 nt, Human
ggagaaugucaguauguggaag

SEQ ID NO: 3044746 - RNA, 21 nt, Human
ggagauagccccacaggaggu

SEQ ID NO: 3044747 - RNA, 20 nt, Human
ggagauagccccacaggagg

SEQ ID NO: 3044748 - RNA, 20 nt, Human
ggccauucuuucccaacacc

SEQ ID NO: 3044749 - RNA, 12 nt, Human
ggcagcucagcu

SEQ ID NO: 3044750 - RNA, 19 nt, Human
ggcaaucauggugcucaga

SEQ ID NO: 3044751 - RNA, 17 nt, Human
ggauugggccccugcca

SEQ ID NO: 3044752 - RNA, 18 nt, Human
ggauugggccccugccag

SEQ ID NO: 3044753 - RNA, 17 nt, Human
ggauggaaugauggguc

SEQ ID NO: 3044754 - RNA, 16 nt, Human
ggaugcauggagauag

SEQ ID NO: 3044755 - RNA, 22 nt, Human
ggccuaaccugccgagagucca

SEQ ID NO: 3044756 - RNA, 12 nt, Human
ggcccugugccu

SEQ ID NO: 3044757 - RNA, 16 nt, Human
ggcuaggguggggaga

SEQ ID NO: 3044758 - RNA, 21 nt, Human
ggcuauggggauagaugugug

SEQ ID NO: 3044759 - RNA, 16 nt, Human
ggcuccaggccagggg

SEQ ID NO: 3044760 - RNA, 14 nt, Human
ggcuccaggccagg

SEQ ID NO: 3044761 - RNA, 18 nt, Human
ggcuccaggccagggggc

SEQ ID NO: 3044762 - RNA, 16 nt, Human
ggcgcggcugggagga

SEQ ID NO: 3044763 - RNA, 13 nt, Human
ggccugggcagga

SEQ ID NO: 3044764 - RNA, 14 nt, Human
ggccugggcaggag

SEQ ID NO: 3044765 - RNA, 11 nt, Human
ggccugugagc

SEQ ID NO: 3044766 - RNA, 23 nt, Human
gcccuggugguggcucgggaggc

SEQ ID NO: 3044767 - RNA, 13 nt, Human
gcccugggaggcu

SEQ ID NO: 3044768 - RNA, 14 nt, Human
gcccugggaggcuc

SEQ ID NO: 3044769 - RNA, 15 nt, Human
gcccugggaggcucu

SEQ ID NO: 3044770 - RNA, 16 nt, Human
gcccugggaggcucug

SEQ ID NO: 3044771 - RNA, 23 nt, Human
gcccugggaggcucuggagccca

SEQ ID NO: 3044772 - RNA, 17 nt, Human
gcccugggaggcucugg

SEQ ID NO: 3044773 - RNA, 18 nt, Human
gcccugggaggcucugga

SEQ ID NO: 3044774 - RNA, 19 nt, Human
gcccugggaggcucuggag

SEQ ID NO: 3044775 - RNA, 21 nt, Human
gcccugggaggcucuggagcc

SEQ ID NO: 3044776 - RNA, 12 nt, Human
gcccuggacugu

SEQ ID NO: 3044777 - RNA, 16 nt, Human
gcccuggacugugugc

SEQ ID NO: 3044778 - RNA, 22 nt, Human
gcccuggacugugugcucagga

SEQ ID NO: 3044779 - RNA, 18 nt, Human
gcccugaguuccuagcca

SEQ ID NO: 3044780 - RNA, 16 nt, Human
gcccugaguuccuagc

SEQ ID NO: 3044781 - RNA, 15 nt, Human
gccugcagagcugcg

SEQ ID NO: 3044782 - RNA, 12 nt, Human
gccugcagagcu

SEQ ID NO: 3044783 - RNA, 18 nt, Human
gccugcuuuuuauggccu

SEQ ID NO: 3044784 - RNA, 19 nt, Human
gccugcuuuuuauggccug

SEQ ID NO: 3044785 - RNA, 22 nt, Human
gccugcuuuuuauggccuguga

SEQ ID NO: 3044786 - RNA, 23 nt, Human
gccucucugcaggucccuaauaa

SEQ ID NO: 3044787 - RNA, 18 nt, Human
gccucucugcaggucccu

SEQ ID NO: 3044788 - RNA, 20 nt, Human
gccucucugcaggucccuaa

SEQ ID NO: 3044789 - RNA, 21 nt, Human
gccucucugcaggucccuaau

SEQ ID NO: 3044790 - RNA, 23 nt, Human
gccuggccagcagguccccagcu

SEQ ID NO: 3044791 - RNA, 19 nt, Human
gccucucugcaggucccua

SEQ ID NO: 3044792 - RNA, 21 nt, Human
gcucagaggguguccugcacc

SEQ ID NO: 3044793 - RNA, 17 nt, Human
gcuaugagcuggggaug

SEQ ID NO: 3044794 - RNA, 22 nt, Human
gcucagugucuggcugcagagc

SEQ ID NO: 3044795 - RNA, 23 nt, Human
gccugugagcuaggaauuguguu

SEQ ID NO: 3044796 - RNA, 14 nt, Human
gcucuugaugccug

SEQ ID NO: 3044797 - RNA, 15 nt, Human
gcucuugaugccugg

SEQ ID NO: 3044798 - RNA, 16 nt, Human
gcucuugaugccuggc

SEQ ID NO: 3044799 - RNA, 17 nt, Human
gcucuugaugccuggcg

SEQ ID NO: 3044800 - RNA, 14 nt, Human
gggcgcggcuggga

SEQ ID NO: 3044801 - RNA, 18 nt, Human
ggggaguuuagggugggg

SEQ ID NO: 3044802 - RNA, 13 nt, Human
ggggauagaugug

SEQ ID NO: 3044803 - RNA, 13 nt, Human
gggcuucauacac

SEQ ID NO: 3044804 - RNA, 19 nt, Human
gggcuucauacacaugaga

SEQ ID NO: 3044805 - RNA, 20 nt, Human
ggugcccagaaugaggcugc

SEQ ID NO: 3044806 - RNA, 18 nt, Human
ggucccuaauaaagcugu

SEQ ID NO: 3044807 - RNA, 12 nt, Human
ggucccuaauaa

SEQ ID NO: 3044808 - RNA, 13 nt, Human
ggucccuaauaaa

SEQ ID NO: 3044809 - RNA, 16 nt, Human
ggucccuaauaaagcu

SEQ ID NO: 3044810 - RNA, 17 nt, Human
ggucccuaauaaagcug

SEQ ID NO: 3044811 - RNA, 18 nt, Human
gggugcugggccccugcc

SEQ ID NO: 3044812 - RNA, 19 nt, Human
gggugcugggccccugccu

SEQ ID NO: 3044813 - RNA, 19 nt, Human
ggguuccagcaccacacuc

SEQ ID NO: 3044814 - RNA, 23 nt, Human
ggucagcccaaaccaccagaagc

SEQ ID NO: 3044815 - RNA, 16 nt, Human
guaaauaaaggaacca

SEQ ID NO: 3044816 - RNA, 16 nt, Human
guaaauaguauuugag

SEQ ID NO: 3044817 - RNA, 17 nt, Human
guaaauaguauuugaga

SEQ ID NO: 3044818 - RNA, 15 nt, Human
guaaauaguauuuga

SEQ ID NO: 3044819 - RNA, 20 nt, Human
guaaaaacaaagaaauuaug

SEQ ID NO: 3044820 - RNA, 18 nt, Human
guaaaaacaaagaaauua

SEQ ID NO: 3044821 - RNA, 14 nt, Human
guacuugcucuuga

SEQ ID NO: 3044822 - RNA, 22 nt, Human
guacuugcucuugaugccuggc

SEQ ID NO: 3044823 - RNA, 15 nt, Human
guacuugcucuugau

SEQ ID NO: 3044824 - RNA, 16 nt, Human
guacuugcucuugaug

SEQ ID NO: 3044825 - RNA, 18 nt, Human
guacuugcucuugaugcc

SEQ ID NO: 3044826 - RNA, 19 nt, Human
guacuugcucuugaugccu

SEQ ID NO: 3044827 - RNA, 23 nt, Human
guacuuuauuuucuauaauuuaa

SEQ ID NO: 3044828 - RNA, 15 nt, Human
guacgaagaguauuu

SEQ ID NO: 3044829 - RNA, 13 nt, Human
guaauucaagaaa

SEQ ID NO: 3044830 - RNA, 14 nt, Human
guaauucaagaaaa

SEQ ID NO: 3044831 - RNA, 16 nt, Human
guaaugaaacuuggau

SEQ ID NO: 3044832 - RNA, 15 nt, Human
guaaugaaacuugga

SEQ ID NO: 3044833 - RNA, 11 nt, Human
guaaugaaaac

SEQ ID NO: 3044834 - RNA, 13 nt, Human
guaaugaaaacca

SEQ ID NO: 3044835 - RNA, 15 nt, Human
guacagacagaaaaa

SEQ ID NO: 3044836 - RNA, 14 nt, Human
gucacgccagacuu

SEQ ID NO: 3044837 - RNA, 22 nt, Human
gucagcccaaaccaccagaagc

SEQ ID NO: 3044838 - RNA, 23 nt, Human
gucagcccaaaccaccagaagcc

SEQ ID NO: 3044839 - RNA, 20 nt, Human
gucccagaaugccuccugca

SEQ ID NO: 3044840 - RNA, 15 nt, Human
guauuauguguguuu

SEQ ID NO: 3044841 - RNA, 19 nt, Human
guauuugagaguucuaaau

SEQ ID NO: 3044842 - RNA, 21 nt, Human
guauuugagaguucuaaauuu

SEQ ID NO: 3044843 - RNA, 22 nt, Human
gucccugccuggaccagccucu

SEQ ID NO: 3044844 - RNA, 23 nt, Human
gucccugccuggaccagccucuc

SEQ ID NO: 3044845 - RNA, 20 nt, Human
gucccugccuggaccagccu

SEQ ID NO: 3044846 - RNA, 21 nt, Human
gucccugccuggaccagccuc

SEQ ID NO: 3044847 - RNA, 14 nt, Human
gucccugccuggac

SEQ ID NO: 3044848 - RNA, 12 nt, Human
guccucagcccc

SEQ ID NO: 3044849 - RNA, 13 nt, Human
guccucacacuca

SEQ ID NO: 3044850 - RNA, 23 nt, Human
gucuaagauaguaacaaugaaga

SEQ ID NO: 3044851 - RNA, 21 nt, Human
gugcuucuaguucugccagga

SEQ ID NO: 3044852 - RNA, 22 nt, Human
gugcuucuaguucugccaggag

SEQ ID NO: 3044853 - RNA, 20 nt, Human
gugcuucuaguucugccagg

SEQ ID NO: 3044854 - RNA, 23 nt, Human
guggaaaagccaagaggcugcag

SEQ ID NO: 3044855 - RNA, 19 nt, Human
gugccuugucacgccagac

SEQ ID NO: 3044856 - RNA, 16 nt, Human
guggcucgggaggcga

SEQ ID NO: 3044857 - RNA, 18 nt, Human
guggcucgggaggcgaag

SEQ ID NO: 3044858 - RNA, 14 nt, Human
guggcauccagagu

SEQ ID NO: 3044859 - RNA, 15 nt, Human
guggcaguuuggcaa

SEQ ID NO: 3044860 - RNA, 11 nt, Human
guggcagucug

SEQ ID NO: 3044861 - RNA, 12 nt, Human
gugacucuuucc

SEQ ID NO: 3044862 - RNA, 20 nt, Human
gugaccuuccaagagccuga

SEQ ID NO: 3044863 - RNA, 19 nt, Human
gugaccuuccaagagccug

SEQ ID NO: 3044864 - RNA, 14 nt, Human
gugagcuacaaaug

SEQ ID NO: 3044865 - RNA, 19 nt, Human
gugaaagaaaauaacaaua

SEQ ID NO: 3044866 - RNA, 15 nt, Human
gugaaaauuauuuug

SEQ ID NO: 3044867 - RNA, 12 nt, Human
gugaaaauuauu

SEQ ID NO: 3044868 - RNA, 17 nt, Human
gugaaaguacauuugga

SEQ ID NO: 3044869 - RNA, 13 nt, Human
gugaaaucauuca

SEQ ID NO: 3044870 - RNA, 18 nt, Human
gugaaauuauucauaauu

SEQ ID NO: 3044871 - RNA, 20 nt, Human
gugaaauuauucauaauuau

SEQ ID NO: 3044872 - RNA, 17 nt, Human
gugauuuuuaugccacc

SEQ ID NO: 3044873 - RNA, 19 nt, Human
gugauuuuuaugccaccug

SEQ ID NO: 3044874 - RNA, 20 nt, Human
gugauuuuuaugccaccuga

SEQ ID NO: 3044875 - RNA, 16 nt, Human
gugauuuuuaugccac

SEQ ID NO: 3044876 - RNA, 15 nt, Human
gugaggaugucuggg

SEQ ID NO: 3044877 - RNA, 23 nt, Human
uccugucucccuccucugcccgg

SEQ ID NO: 3044878 - RNA, 15 nt, Human
uccugucucccuccu

SEQ ID NO: 3044879 - RNA, 13 nt, Human
uccuacccccugu

SEQ ID NO: 3044880 - RNA, 15 nt, Human
uccuacccccugugc

SEQ ID NO: 3044881 - RNA, 16 nt, Human
uccuacccccugugcc

SEQ ID NO: 3044882 - RNA, 17 nt, Human
uccuacccccugugccu

SEQ ID NO: 3044883 - RNA, 18 nt, Human
ucucccuccucugcccgg

SEQ ID NO: 3044884 - RNA, 19 nt, Human
ucuacugggagccuaccca

SEQ ID NO: 3044885 - RNA, 16 nt, Human
ucuacugggagccuac

SEQ ID NO: 3044886 - RNA, 12 nt, Human
ucaucuuucuuc

SEQ ID NO: 3044887 - RNA, 16 nt, Human
ucaucuccccaucauu

SEQ ID NO: 3044888 - RNA, 14 nt, Human
uccaaacaggcuca

SEQ ID NO: 3044889 - RNA, 16 nt, Human
uccaaaccaaauaaaa

SEQ ID NO: 3044890 - RNA, 22 nt, Human
uccaaaaagauuuucagaaaau

SEQ ID NO: 3044891 - RNA, 14 nt, Human
ucauggugcucaga

SEQ ID NO: 3044892 - RNA, 11 nt, Human
ucaggagcccu

SEQ ID NO: 3044893 - RNA, 12 nt, Human
ucaggagcccug

SEQ ID NO: 3044894 - RNA, 14 nt, Human
ucaggagcccuggg

SEQ ID NO: 3044895 - RNA, 15 nt, Human
ucaggagcccuggga

SEQ ID NO: 3044896 - RNA, 22 nt, Human
ucagucuuuaaucugagaggcc

SEQ ID NO: 3044897 - RNA, 18 nt, Human
uccagagucccugccugg

SEQ ID NO: 3044898 - RNA, 19 nt, Human
uccagagucccugccugga

SEQ ID NO: 3044899 - RNA, 20 nt, Human
uccagagucccugccuggac

SEQ ID NO: 3044900 - RNA, 21 nt, Human
uccagagucccugccuggacc

SEQ ID NO: 3044901 - RNA, 23 nt, Human
uccagaaagaaaacuuguauuau

SEQ ID NO: 3044902 - RNA, 14 nt, Human
uccagcaccacacu

SEQ ID NO: 3044903 - RNA, 20 nt, Human
uccaugggccauaugaaaag

SEQ ID NO: 3044904 - RNA, 15 nt, Human
uaggcuagggugggg

SEQ ID NO: 3044905 - RNA, 16 nt, Human
uaggcuagggugggga

SEQ ID NO: 3044906 - RNA, 16 nt, Human
uaggucagugcaaaua

SEQ ID NO: 3044907 - RNA, 16 nt, Human
uagguaaauuacaguu

SEQ ID NO: 3044908 - RNA, 16 nt, Human
uaggaauuguguuuau

SEQ ID NO: 3044909 - RNA, 23 nt, Human
uaguaugaaauuauauaaguauu

SEQ ID NO: 3044910 - RNA, 15 nt, Human
uaguaugaaauuaua

SEQ ID NO: 3044911 - RNA, 13 nt, Human
uaguaugaaauua

SEQ ID NO: 3044912 - RNA, 20 nt, Human
uaguugcaacuuuguauaaa

SEQ ID NO: 3044913 - RNA, 15 nt, Human
uauaauucacauugu

SEQ ID NO: 3044914 - RNA, 15 nt, Human
uaucguaaaauuaag

SEQ ID NO: 3044915 - RNA, 18 nt, Human
uaucguaaaauuaagaaa

SEQ ID NO: 3044916 - RNA, 17 nt, Human
uauccuuucuaacaaaa

SEQ ID NO: 3044917 - RNA, 23 nt, Human
uaugacauaaaaacaacuuuaua

SEQ ID NO: 3044918 - RNA, 22 nt, Human
uaugacauaaaaacaacuuuau

SEQ ID NO: 3044919 - RNA, 19 nt, Human
uaugacauaaaaacaacuu

SEQ ID NO: 3044920 - RNA, 16 nt, Human
uaucuguuuacagugu

SEQ ID NO: 3044921 - RNA, 17 nt, Human
uaucuguuuacaguguu

SEQ ID NO: 3044922 - RNA, 20 nt, Human
uaugaaguuuuuuuuauaca

SEQ ID NO: 3044923 - RNA, 17 nt, Human
uaugcuucauacaggga

SEQ ID NO: 3044924 - RNA, 16 nt, Human
uaugcuucauacaggg

SEQ ID NO: 3044925 - RNA, 14 nt, Human
uaugcuucauacag

SEQ ID NO: 3044926 - RNA, 13 nt, Human
uaugcuucauaca

SEQ ID NO: 3044927 - RNA, 12 nt, Human
uaugcuucauac

SEQ ID NO: 3044928 - RNA, 20 nt, Human
uaugcauauuauuuuauguu

SEQ ID NO: 3044929 - RNA, 23 nt, Human
uaugagcuggggaugucucucau

SEQ ID NO: 3044930 - RNA, 12 nt, Human
ucacauuuaaau

SEQ ID NO: 3044931 - RNA, 22 nt, Human
ucacauuguauucagaguugau

SEQ ID NO: 3044932 - RNA, 20 nt, Human
ucaaagagagaaaauaaaga

SEQ ID NO: 3044933 - RNA, 15 nt, Human
ucaaagagagaaaau

SEQ ID NO: 3044934 - RNA, 23 nt, Human
uauuugaauguaugcuucauaca

SEQ ID NO: 3044935 - RNA, 22 nt, Human
uauuugaauguaugcuucauac

SEQ ID NO: 3044936 - RNA, 21 nt, Human
uauuugaauguaugcuucaua

SEQ ID NO: 3044937 - RNA, 23 nt, Human
uauugauaaguucauacauugua

SEQ ID NO: 3044938 - RNA, 16 nt, Human
uauugauaaguucaua

SEQ ID NO: 3044939 - RNA, 14 nt, Human
uauugauaaguuca

SEQ ID NO: 3044940 - RNA, 17 nt, Human
uauuauauuuacaaaug

SEQ ID NO: 3044941 - RNA, 12 nt, Human
uauuauguguuu

SEQ ID NO: 3044942 - RNA, 20 nt, Human
uauuauggaggcaggaguuu

SEQ ID NO: 3044943 - RNA, 13 nt, Human
uauguguguuuua

SEQ ID NO: 3044944 - RNA, 14 nt, Human
uauggaggcaggag

SEQ ID NO: 3044945 - RNA, 19 nt, Human
ugagcuccuuaaggcucuu

SEQ ID NO: 3044946 - RNA, 21 nt, Human
ugagcuccuuaaggcucuuuu

SEQ ID NO: 3044947 - RNA, 17 nt, Human
ugagaaauuuauaaacu

SEQ ID NO: 3044948 - RNA, 23 nt, Human
ugagacguuuuuggaagaguagu

SEQ ID NO: 3044949 - RNA, 14 nt, Human
ugaggugggagaug

SEQ ID NO: 3044950 - RNA, 20 nt, Human
ugagcuggggaugucucuca

SEQ ID NO: 3044951 - RNA, 16 nt, Human
ugaggagcuugaaacc

SEQ ID NO: 3044952 - RNA, 17 nt, Human
ugaggcagguccccaga

SEQ ID NO: 3044953 - RNA, 16 nt, Human
ugaggcagguccccag

SEQ ID NO: 3044954 - RNA, 14 nt, Human
ugaggcaggucccc

SEQ ID NO: 3044955 - RNA, 22 nt, Human
ugaguucuacauaaguaauuca

SEQ ID NO: 3044956 - RNA, 13 nt, Human
ugaugguuguaca

SEQ ID NO: 3044957 - RNA, 14 nt, Human
ugaugguuguacau

SEQ ID NO: 3044958 - RNA, 14 nt, Human
ugauguguuuauuu

SEQ ID NO: 3044959 - RNA, 18 nt, Human
ugauguguuuauuuauag

SEQ ID NO: 3044960 - RNA, 23 nt, Human
ugaugcuacaggauuugaaauug

SEQ ID NO: 3044961 - RNA, 20 nt, Human
ugaugcuacaggauuugaaa

SEQ ID NO: 3044962 - RNA, 11 nt, Human
ugaugccuggc

SEQ ID NO: 3044963 - RNA, 13 nt, Human
ugauuauauguca

SEQ ID NO: 3044964 - RNA, 19 nt, Human
ugaaauggacuuuuguaca

SEQ ID NO: 3044965 - RNA, 12 nt, Human
ugaaauuauuca

SEQ ID NO: 3044966 - RNA, 15 nt, Human
ugaacagcggcugga

SEQ ID NO: 3044967 - RNA, 22 nt, Human
ugaacagcggcuggacuuggag

SEQ ID NO: 3044968 - RNA, 21 nt, Human
ugaacagcggcuggacuugga

SEQ ID NO: 3044969 - RNA, 22 nt, Human
ucuuuccacuccuccuagccac

SEQ ID NO: 3044970 - RNA, 21 nt, Human
ucuuuccacuccuccuagcca

SEQ ID NO: 3044971 - RNA, 12 nt, Human
ucuuugccaagu

SEQ ID NO: 3044972 - RNA, 17 nt, Human
ucuuucacauuuaaaua

SEQ ID NO: 3044973 - RNA, 22 nt, Human
ugaaucauuuuaccuuugacaa

SEQ ID NO: 3044974 - RNA, 23 nt, Human
ugaaucauuuuaccuuugacaaa

SEQ ID NO: 3044975 - RNA, 16 nt, Human
ugaauuauuuucucuc

SEQ ID NO: 3044976 - RNA, 16 nt, Human
ugacagaauauguuuc

SEQ ID NO: 3044977 - RNA, 17 nt, Human
ugacauacauccaacau

SEQ ID NO: 3044978 - RNA, 23 nt, Human
ugacauaaguauuuaauucaugu

SEQ ID NO: 3044979 - RNA, 15 nt, Human
uggaccagccucucc

SEQ ID NO: 3044980 - RNA, 19 nt, Human
uggaucugugaggggcucu

SEQ ID NO: 3044981 - RNA, 19 nt, Human
uggcaaacucuccaccaca

SEQ ID NO: 3044982 - RNA, 15 nt, Human
uggaucugugagggg

SEQ ID NO: 3044983 - RNA, 20 nt, Human
uggcuccauugguguugaca

SEQ ID NO: 3044984 - RNA, 15 nt, Human
uggcgggguggggug

SEQ ID NO: 3044985 - RNA, 20 nt, Human
uggggaguuuaggguggggg

SEQ ID NO: 3044986 - RNA, 20 nt, Human
uggggauagauguguggaca

SEQ ID NO: 3044987 - RNA, 18 nt, Human
uggggauagaugugugga

SEQ ID NO: 3044988 - RNA, 17 nt, Human
uggggauagaugugugg

SEQ ID NO: 3044989 - RNA, 16 nt, Human
uggggauagaugugug

SEQ ID NO: 3044990 - RNA, 21 nt, Human
uggggccaggcugggucgccc

SEQ ID NO: 3044991 - RNA, 22 nt, Human
uggggccaggcugggucgcccu

SEQ ID NO: 3044992 - RNA, 20 nt, Human
uggggccaggcugggucgcc

SEQ ID NO: 3044993 - RNA, 13 nt, Human
uggggggggugcu

SEQ ID NO: 3044994 - RNA, 14 nt, Human
ugggggucugugug

SEQ ID NO: 3044995 - RNA, 15 nt, Human
ugggcaggagggagg

SEQ ID NO: 3044996 - RNA, 16 nt, Human
ugggcaggagggaggu

SEQ ID NO: 3044997 - RNA, 18 nt, Human
ugggcaggagggaggugc

SEQ ID NO: 3044998 - RNA, 13 nt, Human
ugggcaggaggga

SEQ ID NO: 3044999 - RNA, 20 nt, Human
ugggccccugccucucugca

SEQ ID NO: 3045000 - RNA, 21 nt, Human
ugggccccugccucucugcag

SEQ ID NO: 3045001 - RNA, 23 nt, Human
ugggccccugccucucugcaggu

SEQ ID NO: 3045002 - RNA, 22 nt, Human
ugggagugaggaugucugggcc

SEQ ID NO: 3045003 - RNA, 13 nt, Human
ugggaguguguaa

SEQ ID NO: 3045004 - RNA, 11 nt, Human
ugggagugugu

SEQ ID NO: 3045005 - RNA, 14 nt, Human
ugguccucacacuc

SEQ ID NO: 3045006 - RNA, 22 nt, Human
uggugaccuuccaagagccuga

SEQ ID NO: 3045007 - RNA, 21 nt, Human
uggugaccuuccaagagccug

SEQ ID NO: 3045008 - RNA, 16 nt, Human
ugcuguuaucccugcc

SEQ ID NO: 3045009 - RNA, 11 nt, Human
ugcuguguuaa

SEQ ID NO: 3045010 - RNA, 18 nt, Human
ugcuguguuaaauaaacc

SEQ ID NO: 3045011 - RNA, 13 nt, Human
ugcugguuuuagu

SEQ ID NO: 3045012 - RNA, 14 nt, Human
ugcugggccccugc

SEQ ID NO: 3045013 - RNA, 16 nt, Human
ugcugggccccugccu

SEQ ID NO: 3045014 - RNA, 17 nt, Human
ugcugggccccugccuc

SEQ ID NO: 3045015 - RNA, 18 nt, Human
ugcugggccccugccucu

SEQ ID NO: 3045016 - RNA, 19 nt, Human
ugcugggccccugccucuc

SEQ ID NO: 3045017 - RNA, 21 nt, Human
ugcugggccccugccucucug

SEQ ID NO: 3045018 - RNA, 22 nt, Human
ugcugggccccugccucucugc

SEQ ID NO: 3045019 - RNA, 23 nt, Human
ugcugggccccugccucucugca

SEQ ID NO: 3045020 - RNA, 24 nt, Human
ugcugggccccugccucucugcag

SEQ ID NO: 3045021 - RNA, 15 nt, Human
ugcugccugcuuuuu

SEQ ID NO: 3045022 - RNA, 17 nt, Human
ugcugccugcuuuuuau

SEQ ID NO: 3045023 - RNA, 22 nt, Human
ugcuaagaauauuugaauguau

SEQ ID NO: 3045024 - RNA, 21 nt, Human
ugcuaagaauauuugaaugua

SEQ ID NO: 3045025 - RNA, 17 nt, Human
ugcuaagaauauuugaa

SEQ ID NO: 3045026 - RNA, 20 nt, Human
ugccuugcauaauggucaga

SEQ ID NO: 3045027 - RNA, 15 nt, Human
ugcucaggagcccug

SEQ ID NO: 3045028 - RNA, 19 nt, Human
ugcucagugucuggcugca

SEQ ID NO: 3045029 - RNA, 20 nt, Human
ugcucaggagcccugggagg

SEQ ID NO: 3045030 - RNA, 18 nt, Human
ugcucaggagcccuggga

SEQ ID NO: 3045031 - RNA, 19 nt, Human
ugcucaggagcccugggag

SEQ ID NO: 3045032 - RNA, 17 nt, Human
ugcucuugaugccuggc

SEQ ID NO: 3045033 - RNA, 19 nt, Human
ugcccagaaugaggcugcu

SEQ ID NO: 3045034 - RNA, 16 nt, Human
ugcauagguuuagcag

SEQ ID NO: 3045035 - RNA, 18 nt, Human
ugcauauuauuuuauguu

SEQ ID NO: 3045036 - RNA, 13 nt, Human
uuaugccaccuga

SEQ ID NO: 3045037 - RNA, 16 nt, Human
uuaugccaccugaaua

SEQ ID NO: 3045038 - RNA, 20 nt, Human
uuaucuugaauaauguaaga

SEQ ID NO: 3045039 - RNA, 20 nt, Human
uuaguugcaacuuuguauaa

SEQ ID NO: 3045040 - RNA, 13 nt, Human
uuaguugcaacuu

SEQ ID NO: 3045041 - RNA, 20 nt, Human
uuauugauaaguucauacau

SEQ ID NO: 3045042 - RNA, 19 nt, Human
uuauugauaaguucauaca

SEQ ID NO: 3045043 - RNA, 15 nt, Human
uuauugauaaguuca

SEQ ID NO: 3045044 - RNA, 21 nt, Human
uucagaguugaugguuguaca

SEQ ID NO: 3045045 - RNA, 22 nt, Human
uucagaguugaugguuguacau

SEQ ID NO: 3045046 - RNA, 20 nt, Human
uuauuuuauguugcauagaa

SEQ ID NO: 3045047 - RNA, 12 nt, Human
uuccaaaauaau

SEQ ID NO: 3045048 - RNA, 19 nt, Human
uucaugcauagguuuagca

SEQ ID NO: 3045049 - RNA, 17 nt, Human
uucaugcaaacuuuauu

SEQ ID NO: 3045050 - RNA, 13 nt, Human
uuccaaaauaauu

SEQ ID NO: 3045051 - RNA, 21 nt, Human
uuccaaaauaauuuuaagaaa

SEQ ID NO: 3045052 - RNA, 21 nt, Human
uuccacuccuccuagccaccc

SEQ ID NO: 3045053 - RNA, 18 nt, Human
uuccacuccuccuagcca

SEQ ID NO: 3045054 - RNA, 16 nt, Human
uuccacuccuccuagc

SEQ ID NO: 3045055 - RNA, 16 nt, Human
uucccugaaggaacca

SEQ ID NO: 3045056 - RNA, 12 nt, Human
uucccugaggug

SEQ ID NO: 3045057 - RNA, 21 nt, Human
uuacuaggugcccagaaugag

SEQ ID NO: 3045058 - RNA, 19 nt, Human
uuacugucuuuuuucuaaa

SEQ ID NO: 3045059 - RNA, 17 nt, Human
uuacugucuuuuuucua

SEQ ID NO: 3045060 - RNA, 14 nt, Human
uuaguguucauaaa

SEQ ID NO: 3045061 - RNA, 14 nt, Human
uuaauauauuucca

SEQ ID NO: 3045062 - RNA, 13 nt, Human
uuaauauauuucc

SEQ ID NO: 3045063 - RNA, 17 nt, Human
uuaaugauaaguaaaug

SEQ ID NO: 3045064 - RNA, 21 nt, Human
uuaaugauaaguaaaugcuag

SEQ ID NO: 3045065 - RNA, 21 nt, Human
uuaagcagauggaaugcugug

SEQ ID NO: 3045066 - RNA, 12 nt, Human
uuaacucagucu

SEQ ID NO: 3045067 - RNA, 21 nt, Human
uuaaauguuuuuuuuuaaaga

SEQ ID NO: 3045068 - RNA, 23 nt, Human
uuaaauguuuuuuuuuaaagacu

SEQ ID NO: 3045069 - RNA, 19 nt, Human
uguuuagaagaaguguguc

SEQ ID NO: 3045070 - RNA, 16 nt, Human
uguuuagaagaagugu

SEQ ID NO: 3045071 - RNA, 18 nt, Human
uguuuuuuuuuaaagacu

SEQ ID NO: 3045072 - RNA, 21 nt, Human
uuaaaagaugcaauguagagg

SEQ ID NO: 3045073 - RNA, 14 nt, Human
uuuaugccaccuga

SEQ ID NO: 3045074 - RNA, 21 nt, Human
uuucacauaucuaguaugaaa

SEQ ID NO: 3045075 - RNA, 15 nt, Human
uuucacauaucuagu

SEQ ID NO: 3045076 - RNA, 20 nt, Human
uuuccuaaauauauuuuaag

SEQ ID NO: 3045077 - RNA, 19 nt, Human
uuuccacuccuccuagcca

SEQ ID NO: 3045078 - RNA, 18 nt, Human
uuuccacuccuccuagcc

SEQ ID NO: 3045079 - RNA, 22 nt, Human
uuucuaaaguaaaaacaaagaa

SEQ ID NO: 3045080 - RNA, 17 nt, Human
uuucuaaaguaaaaaca

SEQ ID NO: 3045081 - RNA, 14 nt, Human
uuucuaaaguaaaa

SEQ ID NO: 3045082 - RNA, 21 nt, Human
uuucuaacaaaaaaauauauu

SEQ ID NO: 3045083 - RNA, 18 nt, Human
uuucuuaaccagaucauu

SEQ ID NO: 3045084 - RNA, 21 nt, Human
uuugaaauuguauuacaaauc

SEQ ID NO: 3045085 - RNA, 14 nt, Human
uuugagaguucuaa

SEQ ID NO: 3045086 - RNA, 16 nt, Human
uuugagaguucuaaau

SEQ ID NO: 3045087 - RNA, 13 nt, Human
uuugaguucuaca

SEQ ID NO: 3045088 - RNA, 14 nt, Human
uuuaauaaacacuc

SEQ ID NO: 3045089 - RNA, 15 nt, Human
uuuaauaaacacucu

SEQ ID NO: 3045090 - RNA, 22 nt, Human
uuuaauaaacacucuugaaaaa

SEQ ID NO: 3045091 - RNA, 20 nt, Human
uuuacagaggacaguauuug

SEQ ID NO: 3045092 - RNA, 17 nt, Human
uuuaguugcaacuuugu

SEQ ID NO: 3045093 - RNA, 18 nt, Human
uuuaguugcaacuuugua

SEQ ID NO: 3045094 - RNA, 15 nt, Human
uuuauacaggucaua

SEQ ID NO: 3045095 - RNA, 19 nt, Human
uuguucaauaauaaauauu

SEQ ID NO: 3045096 - RNA, 18 nt, Human
uuguuuagaagaagugug

SEQ ID NO: 3045097 - RNA, 15 nt, Human
uuguuuagaagaagu

SEQ ID NO: 3045098 - RNA, 20 nt, Human
uuuaaaagauaaauauuaua

SEQ ID NO: 3045099 - RNA, 18 nt, Human
uuuaaaagaugcaaugua

SEQ ID NO: 3045100 - RNA, 16 nt, Human
uuuaaaauugugaugu

SEQ ID NO: 3045101 - RNA, 12 nt, Human
uuuaaaaugucu

SEQ ID NO: 3045102 - RNA, 16 nt, Human
uuuaaaaugagaaauc

SEQ ID NO: 3045103 - RNA, 14 nt, Human
uugaauguuaagca

SEQ ID NO: 3045104 - RNA, 17 nt, Human
uugaauguuaagcagau

SEQ ID NO: 3045105 - RNA, 21 nt, Human
uugaaaaucuuauaauuuaaa

SEQ ID NO: 3045106 - RNA, 18 nt, Human
uugaaaauuaacaugaau

SEQ ID NO: 3045107 - RNA, 17 nt, Human
uugauccagaaagaaaa

SEQ ID NO: 3045108 - RNA, 16 nt, Human
uugcauaacguauaaa

SEQ ID NO: 3045109 - RNA, 22 nt, Human
uuguagcacugacagauuucca

SEQ ID NO: 3045110 - RNA, 18 nt, Human
uuguagcacugacagauu

SEQ ID NO: 3045111 - RNA, 17 nt, Human
uuguagcacugacagau

SEQ ID NO: 3045112 - RNA, 16 nt, Human
uuguagcacugacaga

SEQ ID NO: 3045113 - RNA, 14 nt, Human
uuguagcacugaca

SEQ ID NO: 3045114 - RNA, 18 nt, Human
uuguacuuuagggaagua

SEQ ID NO: 3045115 - RNA, 19 nt, Human
uuguacgaagaguauuuuu

SEQ ID NO: 3045116 - RNA, 16 nt, Human
uuguacgaagaguauu

SEQ ID NO: 3045117 - RNA, 20 nt, Human
uugggaccccuggugguuca

SEQ ID NO: 3045118 - RNA, 16 nt, Human
uugggaccccuggugg

SEQ ID NO: 3045119 - RNA, 15 nt, Human
uugggaccccuggug

SEQ ID NO: 3045120 - RNA, 14 nt, Human
uugggaccccuggu

SEQ ID NO: 3045121 - RNA, 16 nt, Human
uuggcagcucuacucu

SEQ ID NO: 3045122 - RNA, 11 nt, Human
uuuguggggag

SEQ ID NO: 3045123 - RNA, 13 nt, Human
caaccggcuuugu

SEQ ID NO: 3045124 - RNA, 22 nt, Human
caaccggcuuuguggcacuggg

SEQ ID NO: 3045125 - RNA, 13 nt, Human
caacacugccagc

SEQ ID NO: 3045126 - RNA, 14 nt, Human
caacacugccagca

SEQ ID NO: 3045127 - RNA, 12 nt, Human
caacacugccag

SEQ ID NO: 3045128 - RNA, 15 nt, Human
caagaaaacaacuuc

SEQ ID NO: 3045129 - RNA, 16 nt, Human
caagaggcugcagcca

SEQ ID NO: 3045130 - RNA, 14 nt, Human
caagaggcugcagc

SEQ ID NO: 3045131 - RNA, 19 nt, Human
caauguagaggggaaaaga

SEQ ID NO: 3045132 - RNA, 16 nt, Human
caaaaauucucaguuc

SEQ ID NO: 3045133 - RNA, 21 nt, Human
caaauuguaagcaugcacaaa

SEQ ID NO: 3045134 - RNA, 17 nt, Human
caaauuguaagcaugca

SEQ ID NO: 3045135 - RNA, 22 nt, Human
caaaauugauguguuuauuuau

SEQ ID NO: 3045136 - RNA, 16 nt, Human
caaaauuguuacaaau

SEQ ID NO: 3045137 - RNA, 15 nt, Human
caaaauugauguguu

SEQ ID NO: 3045138 - RNA, 16 nt, Human
caaaauugauguguuu

SEQ ID NO: 3045139 - RNA, 20 nt, Human
caaagcgaauuuuaaaagau

SEQ ID NO: 3045140 - RNA, 19 nt, Human
caaagcugaugacaacuuc

SEQ ID NO: 3045141 - RNA, 19 nt, Human
caaagcgaauuuuaaaaga

SEQ ID NO: 3045142 - RNA, 14 nt, Human
caaagcgaauuuua

SEQ ID NO: 3045143 - RNA, 15 nt, Human
cuuccucuccugucu

SEQ ID NO: 3045144 - RNA, 19 nt, Human
cuuccucuccugucucccu

SEQ ID NO: 3045145 - RNA, 17 nt, Human
cuucuaccucuuggcug

SEQ ID NO: 3045146 - RNA, 20 nt, Human
cuugguuccagccugccacu

SEQ ID NO: 3045147 - RNA, 19 nt, Human
cuugguuccagccugccac

SEQ ID NO: 3045148 - RNA, 17 nt, Human
cuugguuccagccugcc

SEQ ID NO: 3045149 - RNA, 13 nt, Human
cuugaugccuggc

SEQ ID NO: 3045150 - RNA, 19 nt, Human
gaaaucaaagagagaaaau

SEQ ID NO: 3045151 - RNA, 16 nt, Human
gaacaagaugguucua

SEQ ID NO: 3045152 - RNA, 11 nt, Human
gaaacuuggau

SEQ ID NO: 3045153 - RNA, 18 nt, Human
cuuuuaugugaaacaugu

SEQ ID NO: 3045154 - RNA, 19 nt, Human
cuuuuaugugaaacauguu

SEQ ID NO: 3045155 - RNA, 14 nt, Human
gaaaauuaacauga

SEQ ID NO: 3045156 - RNA, 14 nt, Human
gaaaaaauauauau

SEQ ID NO: 3045157 - RNA, 14 nt, Human
cuuuugucccagaa

SEQ ID NO: 3045158 - RNA, 16 nt, Human
cuguacuugcucuuga

SEQ ID NO: 3045159 - RNA, 19 nt, Human
cuguacuugcucuugaugc

SEQ ID NO: 3045160 - RNA, 20 nt, Human
cuguacuugcucuugaugcc

SEQ ID NO: 3045161 - RNA, 23 nt, Human
cuggugaccuuccaagagccuga

SEQ ID NO: 3045162 - RNA, 22 nt, Human
cuggugaccuuccaagagccug

SEQ ID NO: 3045163 - RNA, 18 nt, Human
cugugaaguuuacauugu

SEQ ID NO: 3045164 - RNA, 23 nt, Human
cugugaaguuuacauuguaaaua

SEQ ID NO: 3045165 - RNA, 19 nt, Human
cuguuaucccugccugguc

SEQ ID NO: 3045166 - RNA, 23 nt, Human
cuggcccuaugcuuccggccucc

SEQ ID NO: 3045167 - RNA, 17 nt, Human
gaucccaacacugccag

SEQ ID NO: 3045168 - RNA, 23 nt, Human
gauccagcccugaguuccuagcc

SEQ ID NO: 3045169 - RNA, 18 nt, Human
gaucccaacacugccagc

SEQ ID NO: 3045170 - RNA, 19 nt, Human
gaucccaacacugccagca

SEQ ID NO: 3045171 - RNA, 23 nt, Human
gaucucugcaggaaauggcugug

SEQ ID NO: 3045172 - RNA, 12 nt, Human
gaucucugcagg

SEQ ID NO: 3045173 - RNA, 17 nt, Human
gauacuugaaaauuaac

SEQ ID NO: 3045174 - RNA, 13 nt, Human
gauggaaugaugg

SEQ ID NO: 3045175 - RNA, 17 nt, Human
gcaucggggagccggga

SEQ ID NO: 3045176 - RNA, 22 nt, Human
gcauccagagucccugccugga

SEQ ID NO: 3045177 - RNA, 23 nt, Human
gcauccagagucccugccuggac

SEQ ID NO: 3045178 - RNA, 21 nt, Human
gcauccagagucccugccugg

SEQ ID NO: 3045179 - RNA, 19 nt, Human
gcagagcugcgggcugggu

SEQ ID NO: 3045180 - RNA, 17 nt, Human
gcagagcugcgggcugg

SEQ ID NO: 3045181 - RNA, 20 nt, Human
gcagccaggccacuggcccc

SEQ ID NO: 3045182 - RNA, 16 nt, Human
gagacgggcccuggug

SEQ ID NO: 3045183 - RNA, 22 nt, Human
gaggacaguauuuguggggagg

SEQ ID NO: 3045184 - RNA, 20 nt, Human
gaggcucuggagcccacugu

SEQ ID NO: 3045185 - RNA, 12 nt, Human
gagcccugggag

SEQ ID NO: 3045186 - RNA, 16 nt, Human
gagcccugggaggcuc

SEQ ID NO: 3045187 - RNA, 18 nt, Human
gagcccugggaggcucug

SEQ ID NO: 3045188 - RNA, 19 nt, Human
gagcccugggaggcucugg

SEQ ID NO: 3045189 - RNA, 20 nt, Human
gagcccugggaggcucugga

SEQ ID NO: 3045190 - RNA, 22 nt, Human
gaauauugcuuuggucauauga

SEQ ID NO: 3045191 - RNA, 15 nt, Human
gacaaagucaagcca

SEQ ID NO: 3045192 - RNA, 18 nt, Human
gaauuauuuuaaaagaua

SEQ ID NO: 3045193 - RNA, 16 nt, Human
gaauuauuuuaaaaga

SEQ ID NO: 3045194 - RNA, 13 nt, Human
gaauuauuuuaaa

SEQ ID NO: 3045195 - RNA, 16 nt, Human
ggacaccccgacuuuu

SEQ ID NO: 3045196 - RNA, 18 nt, Human
ggaaugaagcaaugcuuc

SEQ ID NO: 3045197 - RNA, 16 nt, Human
ggacaccuaggcuagg

SEQ ID NO: 3045198 - RNA, 19 nt, Human
ggacaguauuuguggggag

SEQ ID NO: 3045199 - RNA, 18 nt, Human
ggacaguauuugugggga

SEQ ID NO: 3045200 - RNA, 17 nt, Human
ggacaggggcaggagga

SEQ ID NO: 3045201 - RNA, 17 nt, Human
gcuuuucuuucuaccaa

SEQ ID NO: 3045202 - RNA, 22 nt, Human
gcuuuuccucaaagggagagag

SEQ ID NO: 3045203 - RNA, 21 nt, Human
gcuuuucccuuuuuuuaagua

SEQ ID NO: 3045204 - RNA, 20 nt, Human
gcuuuucccuuuuuuuaagu

SEQ ID NO: 3045205 - RNA, 16 nt, Human
ggaaaaaauaacaaug

SEQ ID NO: 3045206 - RNA, 21 nt, Human
ggaaacuaggugcauauuuau

SEQ ID NO: 3045207 - RNA, 15 nt, Human
gcugcagccaggcca

SEQ ID NO: 3045208 - RNA, 23 nt, Human
gcugcagccaggccacuggcccc

SEQ ID NO: 3045209 - RNA, 20 nt, Human
gcugggccccugccucucug

SEQ ID NO: 3045210 - RNA, 18 nt, Human
gcugggccccugccucuc

SEQ ID NO: 3045211 - RNA, 12 nt, Human
gcugggccccug

SEQ ID NO: 3045212 - RNA, 13 nt, Human
gcugggccccugc

SEQ ID NO: 3045213 - RNA, 14 nt, Human
gcugggccccugcc

SEQ ID NO: 3045214 - RNA, 20 nt, Human
gcugggaauaagugccagga

SEQ ID NO: 3045215 - RNA, 13 nt, Human
gcuggacuuggag

SEQ ID NO: 3045216 - RNA, 19 nt, Human
gccauucuuucccaacacc

SEQ ID NO: 3045217 - RNA, 12 nt, Human
gccauucuuucc

SEQ ID NO: 3045218 - RNA, 22 nt, Human
gcccacuguacuugcucuugau

SEQ ID NO: 3045219 - RNA, 15 nt, Human
gcccacuguacuugc

SEQ ID NO: 3045220 - RNA, 20 nt, Human
gcccacuguacuugcucuug

SEQ ID NO: 3045221 - RNA, 17 nt, Human
gcuaggguggggagaga

SEQ ID NO: 3045222 - RNA, 18 nt, Human
gcuaggguggggagagac

SEQ ID NO: 3045223 - RNA, 21 nt, Human
gcuaggaauuguguuuauaau

SEQ ID NO: 3045224 - RNA, 18 nt, Human
gcucagaggguguccugc

SEQ ID NO: 3045225 - RNA, 19 nt, Human
gcucagaggguguccugca

SEQ ID NO: 3045226 - RNA, 22 nt, Human
gcucaggagcccugggaggcuc

SEQ ID NO: 3045227 - RNA, 21 nt, Human
gcucaggagcccugggaggcu

SEQ ID NO: 3045228 - RNA, 23 nt, Human
gcucaggagcccugggaggcucu

SEQ ID NO: 3045229 - RNA, 21 nt, Human
gcucacugcuaagaauauuug

SEQ ID NO: 3045230 - RNA, 16 nt, Human
gcucagagcaguguuu

SEQ ID NO: 3045231 - RNA, 21 nt, Human
gcguggaacucgugucuggca

SEQ ID NO: 3045232 - RNA, 16 nt, Human
gcggcuggacuuggag

SEQ ID NO: 3045233 - RNA, 15 nt, Human
gcggcuggacuugga

SEQ ID NO: 3045234 - RNA, 14 nt, Human
ggagggggagaggg

SEQ ID NO: 3045235 - RNA, 22 nt, Human
ggaguguguaauuuaaaauugu

SEQ ID NO: 3045236 - RNA, 11 nt, Human
ggaguguguaa

SEQ ID NO: 3045237 - RNA, 23 nt, Human
ggaucuucaucugacuaugacau

SEQ ID NO: 3045238 - RNA, 14 nt, Human
ggauuguaguccca

SEQ ID NO: 3045239 - RNA, 22 nt, Human
ggcaucggggagccgggagccu

SEQ ID NO: 3045240 - RNA, 16 nt, Human
ggcauccagagucccu

SEQ ID NO: 3045241 - RNA, 18 nt, Human
ggcauccagagucccugc

SEQ ID NO: 3045242 - RNA, 23 nt, Human
ggcaucggggagccgggagccug

SEQ ID NO: 3045243 - RNA, 12 nt, Human
ggcaggggccgg

SEQ ID NO: 3045244 - RNA, 14 nt, Human
ggcaggagggaggu

SEQ ID NO: 3045245 - RNA, 20 nt, Human
aaaaagccugcaauuucaua

SEQ ID NO: 3045246 - RNA, 14 nt, Human
aaaaauaaaaaaca

SEQ ID NO: 3045247 - RNA, 23 nt, Human
aaaaagauuuucagaaaauauua

SEQ ID NO: 3045248 - RNA, 20 nt, Human
ggcucuugaacugagcuugg

SEQ ID NO: 3045249 - RNA, 19 nt, Human
ggcucuugaacugagcuug

SEQ ID NO: 3045250 - RNA, 18 nt, Human
ggcucuugaacugagcuu

SEQ ID NO: 3045251 - RNA, 13 nt, Human
ggccccugccucu

SEQ ID NO: 3045252 - RNA, 17 nt, Human
ggccccugccucucugc

SEQ ID NO: 3045253 - RNA, 18 nt, Human
ggccccugccucucugca

SEQ ID NO: 3045254 - RNA, 19 nt, Human
ggccccugccucucugcag

SEQ ID NO: 3045255 - RNA, 20 nt, Human
ggcuaagcuucacuguaaaa

SEQ ID NO: 3045256 - RNA, 21 nt, Human
gguggggagagacgggcccug

SEQ ID NO: 3045257 - RNA, 18 nt, Human
gguggggggcuucauaca

SEQ ID NO: 3045258 - RNA, 16 nt, Human
gguggggggcuucaua

SEQ ID NO: 3045259 - RNA, 22 nt, Human
gguggggggggggcgcggcugg

SEQ ID NO: 3045260 - RNA, 20 nt, Human
gguucuagcauggcauauuu

SEQ ID NO: 3045261 - RNA, 17 nt, Human
gguguuuuaaaaaaucu

SEQ ID NO: 3045262 - RNA, 14 nt, Human
gguuccagccugcc

SEQ ID NO: 3045263 - RNA, 16 nt, Human
gguuccagccugccac

SEQ ID NO: 3045264 - RNA, 15 nt, Human
gguuccagccugcca

SEQ ID NO: 3045265 - RNA, 14 nt, Human
gguuugggaccccu

SEQ ID NO: 3045266 - RNA, 22 nt, Human
gguuuguuuagaagaagugugu

SEQ ID NO: 3045267 - RNA, 14 nt, Human
aaagcuguguggca

SEQ ID NO: 3045268 - RNA, 21 nt, Human
aaaguaaaaacaaagaaauua

SEQ ID NO: 3045269 - RNA, 18 nt, Human
aaagguucaugcaaacuu

SEQ ID NO: 3045270 - RNA, 15 nt, Human
guaauagagcaaaau

SEQ ID NO: 3045271 - RNA, 13 nt, Human
guaaaccuuuuau

SEQ ID NO: 3045272 - RNA, 20 nt, Human
aaauauuguguugugaaugu

SEQ ID NO: 3045273 - RNA, 15 nt, Human
aaauauauuuaauga

SEQ ID NO: 3045274 - RNA, 16 nt, Human
aaauauauuuuaagac

SEQ ID NO: 3045275 - RNA, 22 nt, Human
aaauauauuuuaagacgaaaca

SEQ ID NO: 3045276 - RNA, 18 nt, Human
aaauauaugcuaagucuu

SEQ ID NO: 3045277 - RNA, 14 nt, Human
aaauauauaucaaa

SEQ ID NO: 3045278 - RNA, 14 nt, Human
aaauauauuuaaug

SEQ ID NO: 3045279 - RNA, 17 nt, Human
ggguguccugcaccggg

SEQ ID NO: 3045280 - RNA, 21 nt, Human
ggguguccugcaccggggccu

SEQ ID NO: 3045281 - RNA, 22 nt, Human
gguaaaucagacuaugaaguuu

SEQ ID NO: 3045282 - RNA, 14 nt, Human
ggucagugcaaaua

SEQ ID NO: 3045283 - RNA, 21 nt, Human
aaacuucccuuucugcuugug

SEQ ID NO: 3045284 - RNA, 16 nt, Human
gguaggaacugcuggg

SEQ ID NO: 3045285 - RNA, 18 nt, Human
gguaggaacugcugggcu

SEQ ID NO: 3045286 - RNA, 22 nt, Human
gggggcagucugagagaggcca

SEQ ID NO: 3045287 - RNA, 22 nt, Human
gggggcuucauacacaugagau

SEQ ID NO: 3045288 - RNA, 19 nt, Human
aaaccaccagaagcccaga

SEQ ID NO: 3045289 - RNA, 18 nt, Human
aaaccaccagaagcccag

SEQ ID NO: 3045290 - RNA, 15 nt, Human
aaaccaccagaagcc

SEQ ID NO: 3045291 - RNA, 21 nt, Human
gggucaucuguaccucugccu

SEQ ID NO: 3045292 - RNA, 18 nt, Human
gggucauucauggccugg

SEQ ID NO: 3045293 - RNA, 14 nt, Human
aaaauauuuaaagg

SEQ ID NO: 3045294 - RNA, 15 nt, Human
aaaauauauuuaaug

SEQ ID NO: 3045295 - RNA, 16 nt, Human
aaaauauauuuaauga

SEQ ID NO: 3045296 - RNA, 11 nt, Human
aaaaugagaaa

SEQ ID NO: 3045297 - RNA, 12 nt, Human
aaaaugagaaau

SEQ ID NO: 3045298 - RNA, 14 nt, Human
cugagagaggccau

SEQ ID NO: 3045299 - RNA, 21 nt, Human
cugagagaggccauucuuucc

SEQ ID NO: 3045300 - RNA, 22 nt, Human
cugagagaggccauucuuuccc

SEQ ID NO: 3045301 - RNA, 13 nt, Human
cugagagaggcca

SEQ ID NO: 3045302 - RNA, 12 nt, Human
cugagaggccac

SEQ ID NO: 3045303 - RNA, 16 nt, Human
cugagaucucugcagg

SEQ ID NO: 3045304 - RNA, 18 nt, Human
cugagaucucugcaggaa

SEQ ID NO: 3045305 - RNA, 17 nt, Human
cugagaucucugcagga

SEQ ID NO: 3045306 - RNA, 21 nt, Human
cugaagcuaucguaaaauuaa

SEQ ID NO: 3045307 - RNA, 22 nt, Human
cugaagcuaucguaaaauuaag

SEQ ID NO: 3045308 - RNA, 22 nt, Human
cugaaaauugaugggauuuggu

SEQ ID NO: 3045309 - RNA, 13 nt, Human
cugaaacuucccu

SEQ ID NO: 3045310 - RNA, 13 nt, Human
cucuugaugccug

SEQ ID NO: 3045311 - RNA, 15 nt, Human
cucuugaugccuggc

SEQ ID NO: 3045312 - RNA, 16 nt, Human
cucuugaugccuggcg

SEQ ID NO: 3045313 - RNA, 21 nt, Human
cucuugaugccuggcggggug

SEQ ID NO: 3045314 - RNA, 14 nt, Human
cucugcaggucccu

SEQ ID NO: 3045315 - RNA, 15 nt, Human
cucugcaggucccua

SEQ ID NO: 3045316 - RNA, 16 nt, Human
cucugcaggucccuaa

SEQ ID NO: 3045317 - RNA, 17 nt, Human
cucugcaggucccuaau

SEQ ID NO: 3045318 - RNA, 13 nt, Human
cucugcagguccc

SEQ ID NO: 3045319 - RNA, 18 nt, Human
cucaugugacucuuucca

SEQ ID NO: 3045320 - RNA, 23 nt, Human
cuccaagcccaguucagcuuggg

SEQ ID NO: 3045321 - RNA, 15 nt, Human
cucgugucuggcaca

SEQ ID NO: 3045322 - RNA, 12 nt, Human
cuccuacagccc

SEQ ID NO: 3045323 - RNA, 14 nt, Human
cguaaaauuaagaa

SEQ ID NO: 3045324 - RNA, 23 nt, Human
cgccacuguuuugaaucucauaa

SEQ ID NO: 3045325 - RNA, 16 nt, Human
cgaauuuuaaaagaug

SEQ ID NO: 3045326 - RNA, 22 nt, Human
cuaauucuuugaccuguuggga

SEQ ID NO: 3045327 - RNA, 21 nt, Human
cuaauucuuugaccuguuggg

SEQ ID NO: 3045328 - RNA, 17 nt, Human
cuaucguaaaauuaaga

SEQ ID NO: 3045329 - RNA, 18 nt, Human
cuaucguaaaauuaagaa

SEQ ID NO: 3045330 - RNA, 19 nt, Human
cuagccaccgccuccuaca

SEQ ID NO: 3045331 - RNA, 22 nt, Human
ccagggggccagucccugaggc

SEQ ID NO: 3045332 - RNA, 13 nt, Human
cacuggggcaggg

SEQ ID NO: 3045333 - RNA, 23 nt, Human
cacuggggauugggccccugcca

SEQ ID NO: 3045334 - RNA, 15 nt, Human
cacuggggcaggggc

SEQ ID NO: 3045335 - RNA, 18 nt, Human
cacuggggauugggcccc

SEQ ID NO: 3045336 - RNA, 17 nt, Human
cacuggggauugggccc

SEQ ID NO: 3045337 - RNA, 16 nt, Human
cacuggggauugggcc

SEQ ID NO: 3045338 - RNA, 15 nt, Human
cacuggggauugggc

SEQ ID NO: 3045339 - RNA, 21 nt, Human
cagaauaaacuggcagcucag

SEQ ID NO: 3045340 - RNA, 12 nt, Human
cagaauauguuu

SEQ ID NO: 3045341 - RNA, 13 nt, Human
cagaauauugcuu

SEQ ID NO: 3045342 - RNA, 20 nt, Human
cagaauauguuucaaacuuu

SEQ ID NO: 3045343 - RNA, 18 nt, Human
cagaauauguuucaaacu

SEQ ID NO: 3045344 - RNA, 17 nt, Human
cagaauauguuucaaac

SEQ ID NO: 3045345 - RNA, 15 nt, Human
cagaauauguuucaa

SEQ ID NO: 3045346 - RNA, 14 nt, Human
cagaauauguuuca

SEQ ID NO: 3045347 - RNA, 13 nt, Human
cagaauauguuuc

SEQ ID NO: 3045348 - RNA, 17 nt, Human
cacucuugaaaaaugca

SEQ ID NO: 3045349 - RNA, 14 nt, Human
cacucuuggagccu

SEQ ID NO: 3045350 - RNA, 16 nt, Human
cacucuuggagccugc

SEQ ID NO: 3045351 - RNA, 15 nt, Human
cacucuuggagccug

SEQ ID NO: 3045352 - RNA, 19 nt, Human
cacucuuggagccugcaga

SEQ ID NO: 3045353 - RNA, 17 nt, Human
cacucuuggagccugca

SEQ ID NO: 3045354 - RNA, 18 nt, Human
caacaccucuuggggagu

SEQ ID NO: 3045355 - RNA, 16 nt, Human
caaagucaagccacau

SEQ ID NO: 3045356 - RNA, 22 nt, Human
caaauccagccugcugccugcu

SEQ ID NO: 3045357 - RNA, 20 nt, Human
caaauccuugugggaaaaga

SEQ ID NO: 3045358 - RNA, 22 nt, Human
caaaugagggucuugguuccag

SEQ ID NO: 3045359 - RNA, 20 nt, Human
caacuauuuuuccaaaauaa

SEQ ID NO: 3045360 - RNA, 22 nt, Human
caaaccaccagaagcccagaau

SEQ ID NO: 3045361 - RNA, 20 nt, Human
caaaccaccagaagcccaga

SEQ ID NO: 3045362 - RNA, 16 nt, Human
caaaccaccagaagcc

SEQ ID NO: 3045363 - RNA, 15 nt, Human
caaaccaccagaagc

SEQ ID NO: 3045364 - RNA, 18 nt, Human
caaaaaaauauauuuaau

SEQ ID NO: 3045365 - RNA, 18 nt, Human
auuguaagcaugcacaaa

SEQ ID NO: 3045366 - RNA, 22 nt, Human
auugauccagaaagaaaacuug

SEQ ID NO: 3045367 - RNA, 18 nt, Human
auugauccagaaagaaaa

SEQ ID NO: 3045368 - RNA, 19 nt, Human
auugauccagaaagaaaac

SEQ ID NO: 3045369 - RNA, 22 nt, Human
auuuaaugauaaguaaaugcua

SEQ ID NO: 3045370 - RNA, 19 nt, Human
auuuauacaggucauauua

SEQ ID NO: 3045371 - RNA, 18 nt, Human
auuaaauuuugaguucua

SEQ ID NO: 3045372 - RNA, 23 nt, Human
auuaugugccagauuuaugcaua

SEQ ID NO: 3045373 - RNA, 15 nt, Human
auuauguguguuuua

SEQ ID NO: 3045374 - RNA, 20 nt, Human
auuauguguguuuuaaaaug

SEQ ID NO: 3045375 - RNA, 21 nt, Human
auuauguguguuuuaaaauga

SEQ ID NO: 3045376 - RNA, 22 nt, Human
auucaagaaaacaacuucaaua

SEQ ID NO: 3045377 - RNA, 19 nt, Human
auucuuugaccuguuggga

SEQ ID NO: 3045378 - RNA, 14 nt, Human
auucugagagcugu

SEQ ID NO: 3045379 - RNA, 13 nt, Human
auucugagagcug

SEQ ID NO: 3045380 - RNA, 17 nt, Human
auucuugccaaauauaa

SEQ ID NO: 3045381 - RNA, 16 nt, Human
auugauccagaaagaa

SEQ ID NO: 3045382 - RNA, 17 nt, Human
auugauccagaaagaaa

SEQ ID NO: 3045383 - RNA, 17 nt, Human
cagaggguguccugcac

SEQ ID NO: 3045384 - RNA, 21 nt, Human
cagaguaauccaagcaaaugu

SEQ ID NO: 3045385 - RNA, 13 nt, Human
cagcauaauacuu

SEQ ID NO: 3045386 - RNA, 17 nt, Human
cagucugagagaggcca

SEQ ID NO: 3045387 - RNA, 21 nt, Human
cagugggccuggccagcaggu

SEQ ID NO: 3045388 - RNA, 15 nt, Human
cagugggccuggcca

SEQ ID NO: 3045389 - RNA, 14 nt, Human
cagugggccuggcc

SEQ ID NO: 3045390 - RNA, 23 nt, Human
cagguuugggaccccuggugguu

SEQ ID NO: 3045391 - RNA, 23 nt, Human
caguaaagaacaucccuccuggg

SEQ ID NO: 3045392 - RNA, 16 nt, Human
cagggaugguguucaa

SEQ ID NO: 3045393 - RNA, 18 nt, Human
cagggcugaggccucuca

SEQ ID NO: 3045394 - RNA, 16 nt, Human
cagggcugaggccucu

SEQ ID NO: 3045395 - RNA, 21 nt, Human
ccaccacacugauccagcccu

SEQ ID NO: 3045396 - RNA, 13 nt, Human
ccaccgccuccua

SEQ ID NO: 3045397 - RNA, 14 nt, Human
ccacuccuccuagc

SEQ ID NO: 3045398 - RNA, 19 nt, Human
ccaaugugaacagcggcug

SEQ ID NO: 3045399 - RNA, 15 nt, Human
cauauuaauauauuu

SEQ ID NO: 3045400 - RNA, 14 nt, Human
cauauuaauauauu

SEQ ID NO: 3045401 - RNA, 19 nt, Human
cauauuaauauauuuccau

SEQ ID NO: 3045402 - RNA, 23 nt, Human
cauaugcuguauauccuuucuaa

SEQ ID NO: 3045403 - RNA, 17 nt, Human
cauggcucccccuccac

SEQ ID NO: 3045404 - RNA, 22 nt, Human
gucccgggacaccuaggcuagg

SEQ ID NO: 3045405 - RNA, 12 nt, Human
gucccuaauaaa

SEQ ID NO: 3045406 - RNA, 15 nt, Human
guccaucagccucca

SEQ ID NO: 3045407 - RNA, 22 nt, Human
guccccagacuccaccaagccu

SEQ ID NO: 3045408 - RNA, 21 nt, Human
aacacugggagaaaugaaaaa

SEQ ID NO: 3045409 - RNA, 18 nt, Human
gucgcccuggacugugug

SEQ ID NO: 3045410 - RNA, 19 nt, Human
guauucuagcuaauguaau

SEQ ID NO: 3045411 - RNA, 24 nt, Human
guauucuaaauuuuauaucuugua

SEQ ID NO: 3045412 - RNA, 21 nt, Human
guauucuaaauuuuauaucuu

SEQ ID NO: 3045413 - RNA, 16 nt, Human
aaaucauucauuuucu

SEQ ID NO: 3045414 - RNA, 17 nt, Human
aaauuccaagugauuga

SEQ ID NO: 3045415 - RNA, 17 nt, Human
aaauuguauuacaaauc

SEQ ID NO: 3045416 - RNA, 23 nt, Human
aaauuaugugccagauuuaugca

SEQ ID NO: 3045417 - RNA, 19 nt, Human
gugccagauuuaugcauau

SEQ ID NO: 3045418 - RNA, 14 nt, Human
aagaaaacaacuuc

SEQ ID NO: 3045419 - RNA, 19 nt, Human
aagaagugugucacccuua

SEQ ID NO: 3045420 - RNA, 15 nt, Human
gugcucuccaagccc

SEQ ID NO: 3045421 - RNA, 19 nt, Human
gugcucaggagcccuggga

SEQ ID NO: 3045422 - RNA, 18 nt, Human
gugcucaggagcccuggg

SEQ ID NO: 3045423 - RNA, 16 nt, Human
gugcucaggagcccug

SEQ ID NO: 3045424 - RNA, 10 nt, Human
gugauguguc

SEQ ID NO: 3045425 - RNA, 17 nt, Human
aacugugaaguuuacau

SEQ ID NO: 3045426 - RNA, 19 nt, Human
aacugugaaguuuacauug

SEQ ID NO: 3045427 - RNA, 14 nt, Human
gugaaguuuacauu

SEQ ID NO: 3045428 - RNA, 19 nt, Human
gucuuauauauuguagaua

SEQ ID NO: 3045429 - RNA, 22 nt, Human
gucuuuccacuccuccuagcca

SEQ ID NO: 3045430 - RNA, 21 nt, Human
aacuaggugcauauuuauaaa

SEQ ID NO: 3045431 - RNA, 23 nt, Human
aacuauucaggagaguagaacag

SEQ ID NO: 3045432 - RNA, 12 nt, Human
aacuauggccug

SEQ ID NO: 3045433 - RNA, 22 nt, Human
guucuagcauggcauauuuuuc

SEQ ID NO: 3045434 - RNA, 19 nt, Human
guucuagcauggcauauuu

SEQ ID NO: 3045435 - RNA, 19 nt, Human
aagcuuuuaugugaaacau

SEQ ID NO: 3045436 - RNA, 21 nt, Human
aagcuuuuaugugaaacaugu

SEQ ID NO: 3045437 - RNA, 19 nt, Human
aaggaaaaaauaacaauga

SEQ ID NO: 3045438 - RNA, 18 nt, Human
aagccuggucagcccaaa

SEQ ID NO: 3045439 - RNA, 17 nt, Human
aagccuggucagcccaa

SEQ ID NO: 3045440 - RNA, 15 nt, Human
aagccuguuuaagag

SEQ ID NO: 3045441 - RNA, 18 nt, Human
aagccuguuuaagagaca

SEQ ID NO: 3045442 - RNA, 12 nt, Human
guucagcuuggg

SEQ ID NO: 3045443 - RNA, 19 nt, Human
guuauuauauuuacaaaug

SEQ ID NO: 3045444 - RNA, 17 nt, Human
guuauuauauuuacaaa

SEQ ID NO: 3045445 - RNA, 21 nt, Human
guuauugauaaguucauacau

SEQ ID NO: 3045446 - RNA, 22 nt, Human
guuauugauaaguucauacauu

SEQ ID NO: 3045447 - RNA, 19 nt, Human
guuaauuccaauuauauga

SEQ ID NO: 3045448 - RNA, 23 nt, Human
aagcaugcacaaauucugucucu

SEQ ID NO: 3045449 - RNA, 16 nt, Human
aagcacuaaacaaaga

SEQ ID NO: 3045450 - RNA, 21 nt, Human
guguaugugggggucugugug

SEQ ID NO: 3045451 - RNA, 13 nt, Human
guguauguggggg

SEQ ID NO: 3045452 - RNA, 20 nt, Human
aagcaaaugugaaucauuuu

SEQ ID NO: 3045453 - RNA, 21 nt, Human
gugguucacucuuggagccug

SEQ ID NO: 3045454 - RNA, 23 nt, Human
gugguucacucuuggagccugca

SEQ ID NO: 3045455 - RNA, 22 nt, Human
gugguucacucuuggagccugc

SEQ ID NO: 3045456 - RNA, 15 nt, Human
guguaaaaugugaag

SEQ ID NO: 3045457 - RNA, 18 nt, Human
aagaggugugcaagagag

SEQ ID NO: 3045458 - RNA, 16 nt, Human
aagaggugugcaagag

SEQ ID NO: 3045459 - RNA, 21 nt, Human
uaaaaauauuguguugugaau

SEQ ID NO: 3045460 - RNA, 22 nt, Human
uaaaaauauuguguugugaaug

SEQ ID NO: 3045461 - RNA, 14 nt, Human
uaaaaauauugugu

SEQ ID NO: 3045462 - RNA, 19 nt, Human
uaaaaagccugcaauuuca

SEQ ID NO: 3045463 - RNA, 22 nt, Human
uaaaaagccugcaauuucauau

SEQ ID NO: 3045464 - RNA, 20 nt, Human
aagugugggucugugugugu

SEQ ID NO: 3045465 - RNA, 12 nt, Human
aaguguguguuu

SEQ ID NO: 3045466 - RNA, 18 nt, Human
aagugugggucugugugu

SEQ ID NO: 3045467 - RNA, 17 nt, Human
aagugugggucugugug

SEQ ID NO: 3045468 - RNA, 10 nt, Human
aagugugggu

SEQ ID NO: 3045469 - RNA, 16 nt, Human
aaguguguguuuuuca

SEQ ID NO: 3045470 - RNA, 21 nt, Human
aaguguguguuuuucauaaag

SEQ ID NO: 3045471 - RNA, 11 nt, Human
uaaaaugugaa

SEQ ID NO: 3045472 - RNA, 13 nt, Human
uaaaaugugaagu

SEQ ID NO: 3045473 - RNA, 16 nt, Human
uaaaauugugaugugu

SEQ ID NO: 3045474 - RNA, 15 nt, Human
uaaaauugugaugug

SEQ ID NO: 3045475 - RNA, 19 nt, Human
aaguauguguaaaauguga

SEQ ID NO: 3045476 - RNA, 21 nt, Human
aagucacuggccaguggcugg

SEQ ID NO: 3045477 - RNA, 17 nt, Human
guuuuaaaaugagaaau

SEQ ID NO: 3045478 - RNA, 12 nt, Human
aaguaaaugcua

SEQ ID NO: 3045479 - RNA, 16 nt, Human
acaccucuuggggagu

SEQ ID NO: 3045480 - RNA, 15 nt, Human
uauaaguguguguuu

SEQ ID NO: 3045481 - RNA, 19 nt, Human
uauaaaagccuguuuaaga

SEQ ID NO: 3045482 - RNA, 22 nt, Human
uauaaaagggacugagaaauuu

SEQ ID NO: 3045483 - RNA, 19 nt, Human
uauaaaaauaaaaaacacu

SEQ ID NO: 3045484 - RNA, 20 nt, Human
uauaaaagccuguuuaagag

SEQ ID NO: 3045485 - RNA, 19 nt, Human
acaauggauaggcacagga

SEQ ID NO: 3045486 - RNA, 16 nt, Human
aauuguuacaaauugu

SEQ ID NO: 3045487 - RNA, 20 nt, Human
aauuguguuuauaauuuuaa

SEQ ID NO: 3045488 - RNA, 21 nt, Human
aauuguguuuauaauuuuaaa

SEQ ID NO: 3045489 - RNA, 22 nt, Human
uagagcaaaauugauguguuua

SEQ ID NO: 3045490 - RNA, 14 nt, Human
uagagcaaaauuga

SEQ ID NO: 3045491 - RNA, 21 nt, Human
uagagcaaaauugauguguuu

SEQ ID NO: 3045492 - RNA, 22 nt, Human
uagcauggcauauuuuucacau

SEQ ID NO: 3045493 - RNA, 21 nt, Human
uagcauggcauauuuuucaca

SEQ ID NO: 3045494 - RNA, 12 nt, Human
uagcuaauguaa

SEQ ID NO: 3045495 - RNA, 19 nt, Human
uagcuaauguaauaacugu

SEQ ID NO: 3045496 - RNA, 18 nt, Human
uaggcaaccuuuauuuuu

SEQ ID NO: 3045497 - RNA, 15 nt, Human
uauucagcucaugga

SEQ ID NO: 3045498 - RNA, 21 nt, Human
uauucagcucauggacuucug

SEQ ID NO: 3045499 - RNA, 21 nt, Human
acagcggcuggacuuggaggu

SEQ ID NO: 3045500 - RNA, 22 nt, Human
acagcggcuggacuuggaggua

SEQ ID NO: 3045501 - RNA, 16 nt, Human
uauguggaaguguggg

SEQ ID NO: 3045502 - RNA, 12 nt, Human
uauguggaagug

SEQ ID NO: 3045503 - RNA, 23 nt, Human
uaugugccagauuuaugcauauu

SEQ ID NO: 3045504 - RNA, 17 nt, Human
uaugugaaacauguuuc

SEQ ID NO: 3045505 - RNA, 14 nt, Human
uaugugaaacaugu

SEQ ID NO: 3045506 - RNA, 17 nt, Human
uauguguaaaaugugaa

SEQ ID NO: 3045507 - RNA, 17 nt, Human
uauaaguguguguuuuu

SEQ ID NO: 3045508 - RNA, 23 nt, Human
uauaaguguguguuuuucauaaa

SEQ ID NO: 3045509 - RNA, 16 nt, Human
uauauuuaguaucuuu

SEQ ID NO: 3045510 - RNA, 19 nt, Human
uauccaaaccaaauaaaaa

SEQ ID NO: 3045511 - RNA, 20 nt, Human
uauggggauagaugugugga

SEQ ID NO: 3045512 - RNA, 19 nt, Human
acagcggcuggacuuggag

SEQ ID NO: 3045513 - RNA, 19 nt, Human
uaugaaauuauauaaguau

SEQ ID NO: 3045514 - RNA, 20 nt, Human
acagauuuccauccuaguca

SEQ ID NO: 3045515 - RNA, 12 nt, Human
aauccgcccauc

SEQ ID NO: 3045516 - RNA, 19 nt, Human
aaucuuauaauuuaaaaua

SEQ ID NO: 3045517 - RNA, 16 nt, Human
uaaguauucuaaauuu

SEQ ID NO: 3045518 - RNA, 13 nt, Human
uaaguaaaugcua

SEQ ID NO: 3045519 - RNA, 12 nt, Human
uaauaaacacuc

SEQ ID NO: 3045520 - RNA, 18 nt, Human
uaauaaacacucuugaaa

SEQ ID NO: 3045521 - RNA, 19 nt, Human
aaugaaacacucaguuguu

SEQ ID NO: 3045522 - RNA, 14 nt, Human
aaugaaacuuggau

SEQ ID NO: 3045523 - RNA, 18 nt, Human
uaauguaauaacugugaa

SEQ ID NO: 3045524 - RNA, 15 nt, Human
aaucuuuaauuuuac

SEQ ID NO: 3045525 - RNA, 16 nt, Human
aaucuuuaauuuuaca

SEQ ID NO: 3045526 - RNA, 16 nt, Human
aaucuuauaauuuaaa

SEQ ID NO: 3045527 - RNA, 12 nt, Human
uaauagagcaaa

SEQ ID NO: 3045528 - RNA, 21 nt, Human
uaauagagcaaaauugaugug

SEQ ID NO: 3045529 - RNA, 23 nt, Human
aauaguauuugagaguucuaaau

SEQ ID NO: 3045530 - RNA, 20 nt, Human
aauaguauuugagaguucua

SEQ ID NO: 3045531 - RNA, 22 nt, Human
aauaguauuugagaguucuaaa

SEQ ID NO: 3045532 - RNA, 14 nt, Human
aauauauuuuaaga

SEQ ID NO: 3045533 - RNA, 15 nt, Human
aauauauuuuaagac

SEQ ID NO: 3045534 - RNA, 13 nt, Human
uaagacaaauaug

SEQ ID NO: 3045535 - RNA, 14 nt, Human
uaagaauauuugaa

SEQ ID NO: 3045536 - RNA, 13 nt, Human
uaagaauauuuga

SEQ ID NO: 3045537 - RNA, 22 nt, Human
uaacuuaaaagaacauguauau

SEQ ID NO: 3045538 - RNA, 20 nt, Human
uaacgauaaaagacagugaa

SEQ ID NO: 3045539 - RNA, 12 nt, Human
aauauuuagugu

SEQ ID NO: 3045540 - RNA, 14 nt, Human
aauauuugaaugua

SEQ ID NO: 3045541 - RNA, 23 nt, Human
aauauuugaauguaugcuucaua

SEQ ID NO: 3045542 - RNA, 21 nt, Human
aauauuugaauguaugcuuca

SEQ ID NO: 3045543 - RNA, 17 nt, Human
aauauuguguugugaau

SEQ ID NO: 3045544 - RNA, 17 nt, Human
uacauuguaaauaguau

SEQ ID NO: 3045545 - RNA, 20 nt, Human
aauuaagaaaggauaaaguu

SEQ ID NO: 3045546 - RNA, 21 nt, Human
aauuaagaaaggauaaaguug

SEQ ID NO: 3045547 - RNA, 13 nt, Human
aauguuaagcaga

SEQ ID NO: 3045548 - RNA, 23 nt, Human
uacaggucauauuaauauauuuc

SEQ ID NO: 3045549 - RNA, 22 nt, Human
uacauauaagugauugcugguu

SEQ ID NO: 3045550 - RNA, 12 nt, Human
aaugcuguguua

SEQ ID NO: 3045551 - RNA, 13 nt, Human
aaugcuguguuaa

SEQ ID NO: 3045552 - RNA, 16 nt, Human
aaugcuucaucccuuu

SEQ ID NO: 3045553 - RNA, 19 nt, Human
aauugaugggauuugguca

SEQ ID NO: 3045554 - RNA, 13 nt, Human
aauugauguguuu

SEQ ID NO: 3045555 - RNA, 14 nt, Human
aauugauguguuua

SEQ ID NO: 3045556 - RNA, 19 nt, Human
uacuguaaggcaaucaugg

SEQ ID NO: 3045557 - RNA, 18 nt, Human
uacuguaaggcaaucaug

SEQ ID NO: 3045558 - RNA, 19 nt, Human
uacauuguacgaagaguau

SEQ ID NO: 3045559 - RNA, 18 nt, Human
aauuccaagugauugaaa

SEQ ID NO: 3045560 - RNA, 20 nt, Human
aauuauuuuguucauacaua

SEQ ID NO: 3045561 - RNA, 19 nt, Human
aauuauuuuguucauacau

SEQ ID NO: 3045562 - RNA, 18 nt, Human
aauuauuuuguucauaca

SEQ ID NO: 3045563 - RNA, 16 nt, Human
aauuauuuuguucaua

SEQ ID NO: 3045564 - RNA, 22 nt, Human
aauuauuuuguucauacauauu

SEQ ID NO: 3045565 - RNA, 21 nt, Human
aauuauuuuguucauacauau

SEQ ID NO: 3045566 - RNA, 16 nt, Human
aauuauuauuuggccc

SEQ ID NO: 3045567 - RNA, 13 nt, Human
accgaggcaggga

SEQ ID NO: 3045568 - RNA, 16 nt, Human
ucauaaauuuaugguu

SEQ ID NO: 3045569 - RNA, 15 nt, Human
ucaguuuuugugaaa

SEQ ID NO: 3045570 - RNA, 17 nt, Human
ucaguuuuugugaaaag

SEQ ID NO: 3045571 - RNA, 22 nt, Human
ucauaaaaagccugcaauuuca

SEQ ID NO: 3045572 - RNA, 12 nt, Human
ucaguaugugga

SEQ ID NO: 3045573 - RNA, 16 nt, Human
ucaguauguggaagug

SEQ ID NO: 3045574 - RNA, 14 nt, Human
ucaguauguggaag

SEQ ID NO: 3045575 - RNA, 14 nt, Human
ucaugugacucuuu

SEQ ID NO: 3045576 - RNA, 17 nt, Human
ucaugugacucuuucca

SEQ ID NO: 3045577 - RNA, 17 nt, Human
ucaugugaaaucauuca

SEQ ID NO: 3045578 - RNA, 16 nt, Human
ucaugugaaaucauuc

SEQ ID NO: 3045579 - RNA, 23 nt, Human
ucaugcaaacuuuauuuuguguu

SEQ ID NO: 3045580 - RNA, 18 nt, Human
ucaugugacucuuuccaa

SEQ ID NO: 3045581 - RNA, 19 nt, Human
ucaugugacucuuuccaac

SEQ ID NO: 3045582 - RNA, 17 nt, Human
ucauguuuacagaggac

SEQ ID NO: 3045583 - RNA, 14 nt, Human
ucaugcaaacuuua

SEQ ID NO: 3045584 - RNA, 13 nt, Human
ucaucuaggauuu

SEQ ID NO: 3045585 - RNA, 12 nt, Human
accuaggcuagg

SEQ ID NO: 3045586 - RNA, 17 nt, Human
accuaggcuaggguggg

SEQ ID NO: 3045587 - RNA, 16 nt, Human
accccuggugguucac

SEQ ID NO: 3045588 - RNA, 12 nt, Human
ucagcucaugga

SEQ ID NO: 3045589 - RNA, 14 nt, Human
accccugcuucuga

SEQ ID NO: 3045590 - RNA, 17 nt, Human
ucagauuugccuuauug

SEQ ID NO: 3045591 - RNA, 24 nt, Human
accacauuggagauguuuaguaau

SEQ ID NO: 3045592 - RNA, 14 nt, Human
ucacauaucuagua

SEQ ID NO: 3045593 - RNA, 16 nt, Human
ucaauucuugccaaau

SEQ ID NO: 3045594 - RNA, 16 nt, Human
accaaagcgaauuuua

SEQ ID NO: 3045595 - RNA, 23 nt, Human
ucacagcaagucacuggccagug

SEQ ID NO: 3045596 - RNA, 20 nt, Human
acaugaauauuuaguguuca

SEQ ID NO: 3045597 - RNA, 19 nt, Human
acauuguacgaagaguauu

SEQ ID NO: 3045598 - RNA, 17 nt, Human
ucaagaaaacaacuuca

SEQ ID NO: 3045599 - RNA, 18 nt, Human
ucaauauccaaaccaaau

SEQ ID NO: 3045600 - RNA, 19 nt, Human
acauucuuccaaaaagauu

SEQ ID NO: 3045601 - RNA, 18 nt, Human
uccugcaccggggccugg

SEQ ID NO: 3045602 - RNA, 19 nt, Human
uccugcaccggggccuggg

SEQ ID NO: 3045603 - RNA, 23 nt, Human
uccuggaagugcuaauuuugaaa

SEQ ID NO: 3045604 - RNA, 12 nt, Human
acugagaaauuu

SEQ ID NO: 3045605 - RNA, 17 nt, Human
acugagaaauuuauaaa

SEQ ID NO: 3045606 - RNA, 21 nt, Human
acugagaaauuuauaaacuuu

SEQ ID NO: 3045607 - RNA, 15 nt, Human
acucuuguuuccuua

SEQ ID NO: 3045608 - RNA, 16 nt, Human
ucccuuuuuuuaagua

SEQ ID NO: 3045609 - RNA, 21 nt, Human
ucccuuuuuuuaaguaaggaa

SEQ ID NO: 3045610 - RNA, 13 nt, Human
ucccuuuuuuuaa

SEQ ID NO: 3045611 - RNA, 14 nt, Human
acucuuggagccug

SEQ ID NO: 3045612 - RNA, 16 nt, Human
acucuuggagccugca

SEQ ID NO: 3045613 - RNA, 15 nt, Human
acucuuggagccugc

SEQ ID NO: 3045614 - RNA, 23 nt, Human
acucuuggagccugcagagcugc

SEQ ID NO: 3045615 - RNA, 22 nt, Human
acucuuggagccugcagagcug

SEQ ID NO: 3045616 - RNA, 21 nt, Human
acucuugaaaaaugcauguug

SEQ ID NO: 3045617 - RNA, 18 nt, Human
acguaaugaaacuuggau

SEQ ID NO: 3045618 - RNA, 15 nt, Human
acuaauuuuaaaaug

SEQ ID NO: 3045619 - RNA, 22 nt, Human
uccagcccugaguuccuagcca

SEQ ID NO: 3045620 - RNA, 20 nt, Human
uccagcccugaguuccuagc

SEQ ID NO: 3045621 - RNA, 20 nt, Human
uccagccugcugccugcuuu

SEQ ID NO: 3045622 - RNA, 13 nt, Human
uccagccugccac

SEQ ID NO: 3045623 - RNA, 11 nt, Human
uccagccugcc

SEQ ID NO: 3045624 - RNA, 17 nt, Human
accuuugacaaagguaa

SEQ ID NO: 3045625 - RNA, 18 nt, Human
accuuugacaaagguaaa

SEQ ID NO: 3045626 - RNA, 18 nt, Human
accuuuggagcaaagcug

SEQ ID NO: 3045627 - RNA, 22 nt, Human
accuuuguuugcaucugaaaau

SEQ ID NO: 3045628 - RNA, 21 nt, Human
uccacuccuccuagccaccca

SEQ ID NO: 3045629 - RNA, 15 nt, Human
ucuaguucugccagg

SEQ ID NO: 3045630 - RNA, 16 nt, Human
ucuaguucugccagga

SEQ ID NO: 3045631 - RNA, 17 nt, Human
ucuaguucugccaggag

SEQ ID NO: 3045632 - RNA, 14 nt, Human
ucuaguucugccag

SEQ ID NO: 3045633 - RNA, 23 nt, Human
ucuagcauggcauauuuuucaca

SEQ ID NO: 3045634 - RNA, 22 nt, Human
ucuagcauggcauauuuuucac

SEQ ID NO: 3045635 - RNA, 21 nt, Human
ucuagcauggcauauuuuuca

SEQ ID NO: 3045636 - RNA, 23 nt, Human
acuuaacuauucaggagaguaga

SEQ ID NO: 3045637 - RNA, 15 nt, Human
acuuuggaacaagau

SEQ ID NO: 3045638 - RNA, 16 nt, Human
acuugcucuugaugcc

SEQ ID NO: 3045639 - RNA, 14 nt, Human
acuugcucuugaug

SEQ ID NO: 3045640 - RNA, 20 nt, Human
acuugcucuugaugccuggc

SEQ ID NO: 3045641 - RNA, 17 nt, Human
acuugcucuugaugccu

SEQ ID NO: 3045642 - RNA, 18 nt, Human
acuugcucuugaugccug

SEQ ID NO: 3045643 - RNA, 18 nt, Human
acuuguauuauguguguu

SEQ ID NO: 3045644 - RNA, 19 nt, Human
acuuguauuauguguguuu

SEQ ID NO: 3045645 - RNA, 14 nt, Human
acuugcuuuuaaaa

SEQ ID NO: 3045646 - RNA, 14 nt, Human
ucugcuuguguuaa

SEQ ID NO: 3045647 - RNA, 21 nt, Human
agaauauguuucaaacuuugg

SEQ ID NO: 3045648 - RNA, 19 nt, Human
agaauauguuucaaacuuu

SEQ ID NO: 3045649 - RNA, 18 nt, Human
agaauauguuucaaacuu

SEQ ID NO: 3045650 - RNA, 17 nt, Human
agaauauguuucaaacu

SEQ ID NO: 3045651 - RNA, 13 nt, Human
agaauauguuuca

SEQ ID NO: 3045652 - RNA, 17 nt, Human
agaauaaaauuuuuaau

SEQ ID NO: 3045653 - RNA, 12 nt, Human
agaauaaaauuu

SEQ ID NO: 3045654 - RNA, 14 nt, Human
agaauaaaauuuuu

SEQ ID NO: 3045655 - RNA, 14 nt, Human
ucuguuuacagugu

SEQ ID NO: 3045656 - RNA, 16 nt, Human
ucugugaaaguacauu

SEQ ID NO: 3045657 - RNA, 11 nt, Human
agaagcccaga

SEQ ID NO: 3045658 - RNA, 13 nt, Human
agaagcccagaau

SEQ ID NO: 3045659 - RNA, 12 nt, Human
agaagcccagaa

SEQ ID NO: 3045660 - RNA, 14 nt, Human
agaagaaguguguc

SEQ ID NO: 3045661 - RNA, 10 nt, Human
ucugaauuau

SEQ ID NO: 3045662 - RNA, 15 nt, Human
ucugaauuauuuucu

SEQ ID NO: 3045663 - RNA, 13 nt, Human
ucugcaggucccu

SEQ ID NO: 3045664 - RNA, 11 nt, Human
ucugcaggucc

SEQ ID NO: 3045665 - RNA, 12 nt, Human
ucugcagguccc

SEQ ID NO: 3045666 - RNA, 13 nt, Human
ugagagaggccau

SEQ ID NO: 3045667 - RNA, 17 nt, Human
ugagagcugugcaucag

SEQ ID NO: 3045668 - RNA, 23 nt, Human
ugagauguagccccucuccugga

SEQ ID NO: 3045669 - RNA, 14 nt, Human
ugagauguguucac

SEQ ID NO: 3045670 - RNA, 15 nt, Human
agcaagucagaauag

SEQ ID NO: 3045671 - RNA, 14 nt, Human
ugacuaugacauaa

SEQ ID NO: 3045672 - RNA, 15 nt, Human
ugacagguuugggac

SEQ ID NO: 3045673 - RNA, 22 nt, Human
agauguagccccucuccuggaa

SEQ ID NO: 3045674 - RNA, 21 nt, Human
agauguagccccucuccugga

SEQ ID NO: 3045675 - RNA, 13 nt, Human
ugaaagaaaauaa

SEQ ID NO: 3045676 - RNA, 14 nt, Human
ugaaaauuaacaug

SEQ ID NO: 3045677 - RNA, 20 nt, Human
ugaaaaucuuauaauuuaaa

SEQ ID NO: 3045678 - RNA, 16 nt, Human
agacuccaccaagccu

SEQ ID NO: 3045679 - RNA, 12 nt, Human
agacuccaccaa

SEQ ID NO: 3045680 - RNA, 16 nt, Human
ucuuuguaaugaaaac

SEQ ID NO: 3045681 - RNA, 21 nt, Human
ucuuuuuucuaaaguaaaaac

SEQ ID NO: 3045682 - RNA, 22 nt, Human
ucuuuuuucuaaaguaaaaaca

SEQ ID NO: 3045683 - RNA, 15 nt, Human
agacuuuuaugauac

SEQ ID NO: 3045684 - RNA, 12 nt, Human
agacuuuuauga

SEQ ID NO: 3045685 - RNA, 16 nt, Human
agaggcugcagccagg

SEQ ID NO: 3045686 - RNA, 18 nt, Human
agaguaauccaagcaaau

SEQ ID NO: 3045687 - RNA, 20 nt, Human
agaguaauccaagcaaaugu

SEQ ID NO: 3045688 - RNA, 23 nt, Human
ugaauaauguaagacaaauaugu

SEQ ID NO: 3045689 - RNA, 18 nt, Human
ugaauauuuaguguucau

SEQ ID NO: 3045690 - RNA, 13 nt, Human
agucccugccugg

SEQ ID NO: 3045691 - RNA, 22 nt, Human
ugucucuggauuauauuaugaa

SEQ ID NO: 3045692 - RNA, 19 nt, Human
agucuccaaagucucugga

SEQ ID NO: 3045693 - RNA, 17 nt, Human
agugaaagaaaauaaca

SEQ ID NO: 3045694 - RNA, 16 nt, Human
ugugauguauucuagc

SEQ ID NO: 3045695 - RNA, 11 nt, Human
ugugauguguc

SEQ ID NO: 3045696 - RNA, 16 nt, Human
aguccaucagccucca

SEQ ID NO: 3045697 - RNA, 13 nt, Human
aguccaucagccu

SEQ ID NO: 3045698 - RNA, 14 nt, Human
aguccaucagccuc

SEQ ID NO: 3045699 - RNA, 18 nt, Human
ugucuaaauuugaauguu

SEQ ID NO: 3045700 - RNA, 15 nt, Human
ugucuaagauaguaa

SEQ ID NO: 3045701 - RNA, 14 nt, Human
ugucuaagauagua

SEQ ID NO: 3045702 - RNA, 14 nt, Human
aguauguguaaaau

SEQ ID NO: 3045703 - RNA, 21 nt, Human
aguauuuaauucauguugccu

SEQ ID NO: 3045704 - RNA, 22 nt, Human
uguaugugggggucuguguguu

SEQ ID NO: 3045705 - RNA, 21 nt, Human
uguaugugggggucugugugu

SEQ ID NO: 3045706 - RNA, 20 nt, Human
uguaugugggggucugugug

SEQ ID NO: 3045707 - RNA, 22 nt, Human
uguauccauccauggggcugau

SEQ ID NO: 3045708 - RNA, 21 nt, Human
agguuugggaccccugguggu

SEQ ID NO: 3045709 - RNA, 16 nt, Human
agguuugggaccccug

SEQ ID NO: 3045710 - RNA, 11 nt, Human
uguauuaugug

SEQ ID NO: 3045711 - RNA, 15 nt, Human
agggugaaaauuauu

SEQ ID NO: 3045712 - RNA, 13 nt, Human
ugggucugugugu

SEQ ID NO: 3045713 - RNA, 15 nt, Human
ugggucugugugugu

SEQ ID NO: 3045714 - RNA, 21 nt, Human
agggucuugguuccagccugc

SEQ ID NO: 3045715 - RNA, 22 nt, Human
agggucuugguuccagccugcc

SEQ ID NO: 3045716 - RNA, 23 nt, Human
ugggaauaagugccaggauggaa

SEQ ID NO: 3045717 - RNA, 22 nt, Human
ugguccaugggccauaugaaaa

SEQ ID NO: 3045718 - RNA, 16 nt, Human
uggucugggacucucu

SEQ ID NO: 3045719 - RNA, 15 nt, Human
aggucagugcaaaua

SEQ ID NO: 3045720 - RNA, 23 nt, Human
agguagcuuugagguggaagagg

SEQ ID NO: 3045721 - RNA, 18 nt, Human
ugguuuuaguugcaacuu

SEQ ID NO: 3045722 - RNA, 21 nt, Human
ugguguucaaaaaacuuguaa

SEQ ID NO: 3045723 - RNA, 22 nt, Human
ugguguucaaaaaacuuguaaa

SEQ ID NO: 3045724 - RNA, 22 nt, Human
ugguucacucuuggagccugca

SEQ ID NO: 3045725 - RNA, 21 nt, Human
ugguucacucuuggagccugc

SEQ ID NO: 3045726 - RNA, 20 nt, Human
ugguucacucuuggagccug

SEQ ID NO: 3045727 - RNA, 17 nt, Human
ugguucacucuuggagc

SEQ ID NO: 3045728 - RNA, 14 nt, Human
uguacauauaagug

SEQ ID NO: 3045729 - RNA, 15 nt, Human
uguaaggcaaucaug

SEQ ID NO: 3045730 - RNA, 15 nt, Human
uguacuuaacuauuc

SEQ ID NO: 3045731 - RNA, 15 nt, Human
uguacuugcucuuga

SEQ ID NO: 3045732 - RNA, 13 nt, Human
auaaauaaaguuu

SEQ ID NO: 3045733 - RNA, 19 nt, Human
auaaauaaaguuuguugaa

SEQ ID NO: 3045734 - RNA, 12 nt, Human
auaacugugaag

SEQ ID NO: 3045735 - RNA, 18 nt, Human
auaaacuggcagcucagc

SEQ ID NO: 3045736 - RNA, 23 nt, Human
auaaacacucuugaaaaaugcau

SEQ ID NO: 3045737 - RNA, 16 nt, Human
auaaaccucaaaaugu

SEQ ID NO: 3045738 - RNA, 18 nt, Human
auaaacacucuugaaaaa

SEQ ID NO: 3045739 - RNA, 21 nt, Human
auaaguucauacauuguacga

SEQ ID NO: 3045740 - RNA, 15 nt, Human
auaaguucauacauu

SEQ ID NO: 3045741 - RNA, 14 nt, Human
auaaguucauacau

SEQ ID NO: 3045742 - RNA, 13 nt, Human
auaaguucauaca

SEQ ID NO: 3045743 - RNA, 11 nt, Human
auaaguucaua

SEQ ID NO: 3045744 - RNA, 14 nt, Human
auaaugaauacuuu

SEQ ID NO: 3045745 - RNA, 20 nt, Human
auaaucagugugucuaaauu

SEQ ID NO: 3045746 - RNA, 23 nt, Human
uuauacccagaaaguuauugaua

SEQ ID NO: 3045747 - RNA, 19 nt, Human
uuauacccagaaaguuauu

SEQ ID NO: 3045748 - RNA, 18 nt, Human
uuauacccagaaaguuau

SEQ ID NO: 3045749 - RNA, 23 nt, Human
uuauagaguguacuuaacuauuc

SEQ ID NO: 3045750 - RNA, 19 nt, Human
uuauauauauauauauuuc

SEQ ID NO: 3045751 - RNA, 14 nt, Human
auaauuuuaagaaa

SEQ ID NO: 3045752 - RNA, 15 nt, Human
auaauuuuaagaaau

SEQ ID NO: 3045753 - RNA, 21 nt, Human
auaauuuuaagaaaucaaaga

SEQ ID NO: 3045754 - RNA, 13 nt, Human
uuauauaaguauu

SEQ ID NO: 3045755 - RNA, 16 nt, Human
uuauauaaguauucua

SEQ ID NO: 3045756 - RNA, 14 nt, Human
uuauauaaguauuc

SEQ ID NO: 3045757 - RNA, 22 nt, Human
auacauuguacgaagaguauuu

SEQ ID NO: 3045758 - RNA, 21 nt, Human
auacauuguacgaagaguauu

SEQ ID NO: 3045759 - RNA, 14 nt, Human
auacauuguacgaa

SEQ ID NO: 3045760 - RNA, 19 nt, Human
auacauauuuuuguagcac

SEQ ID NO: 3045761 - RNA, 21 nt, Human
auacaguucggugagcuacaa

SEQ ID NO: 3045762 - RNA, 21 nt, Human
auacaggucauauuaauauau

SEQ ID NO: 3045763 - RNA, 15 nt, Human
auacaggucauauua

SEQ ID NO: 3045764 - RNA, 14 nt, Human
uuaucaacauuugu

SEQ ID NO: 3045765 - RNA, 22 nt, Human
uuaucaaagggugaaaauuauu

SEQ ID NO: 3045766 - RNA, 22 nt, Human
uuaucaugugaaaucauucauu

SEQ ID NO: 3045767 - RNA, 18 nt, Human
uuaucaugugaaaucauu

SEQ ID NO: 3045768 - RNA, 20 nt, Human
uuaucaugugaaaucauuca

SEQ ID NO: 3045769 - RNA, 17 nt, Human
uuaucaugugaaaucau

SEQ ID NO: 3045770 - RNA, 18 nt, Human
uguugggagugaggaugu

SEQ ID NO: 3045771 - RNA, 15 nt, Human
aguucuaaauuuugu

SEQ ID NO: 3045772 - RNA, 20 nt, Human
aguucggugagcuacaaaug

SEQ ID NO: 3045773 - RNA, 23 nt, Human
aguuauugauaaguucauacauu

SEQ ID NO: 3045774 - RNA, 22 nt, Human
aguuauugauaaguucauacau

SEQ ID NO: 3045775 - RNA, 21 nt, Human
aguuauugauaaguucauaca

SEQ ID NO: 3045776 - RNA, 19 nt, Human
aguuauugauaaguucaua

SEQ ID NO: 3045777 - RNA, 17 nt, Human
aguuauugauaaguuca

SEQ ID NO: 3045778 - RNA, 20 nt, Human
aguuauuauauuuacaaaug

SEQ ID NO: 3045779 - RNA, 19 nt, Human
aguugcaacuuuguauaaa

SEQ ID NO: 3045780 - RNA, 15 nt, Human
uguuugcaucugaaa

SEQ ID NO: 3045781 - RNA, 20 nt, Human
aguucucuucacucaaggau

SEQ ID NO: 3045782 - RNA, 22 nt, Human
aguugcauagguuuaauaauuu

SEQ ID NO: 3045783 - RNA, 16 nt, Human
aguuucguuuucaaaa

SEQ ID NO: 3045784 - RNA, 15 nt, Human
aguuucguuuucaaa

SEQ ID NO: 3045785 - RNA, 13 nt, Human
ugcuccccacguc

SEQ ID NO: 3045786 - RNA, 18 nt, Human
ugcuauuguagagccaga

SEQ ID NO: 3045787 - RNA, 22 nt, Human
ugcuauuguagagccagagguc

SEQ ID NO: 3045788 - RNA, 11 nt, Human
aggaauuuaaa

SEQ ID NO: 3045789 - RNA, 23 nt, Human
aggaauuguguuuauaauuuuaa

SEQ ID NO: 3045790 - RNA, 16 nt, Human
ugcuucauacagggau

SEQ ID NO: 3045791 - RNA, 15 nt, Human
ugcuucauacaggga

SEQ ID NO: 3045792 - RNA, 14 nt, Human
ugcuucauacaggg

SEQ ID NO: 3045793 - RNA, 11 nt, Human
ugcuucauaca

SEQ ID NO: 3045794 - RNA, 16 nt, Human
uggaccagccucucca

SEQ ID NO: 3045795 - RNA, 22 nt, Human
uggaccagccucuccacucaug

SEQ ID NO: 3045796 - RNA, 22 nt, Human
uggaauuggguggggggcuuca

SEQ ID NO: 3045797 - RNA, 18 nt, Human
aggagcccugggaggcuc

SEQ ID NO: 3045798 - RNA, 19 nt, Human
aggagcccugggaggcucu

SEQ ID NO: 3045799 - RNA, 17 nt, Human
aggccauucuuucccaa

SEQ ID NO: 3045800 - RNA, 18 nt, Human
aggccauucuuucccaac

SEQ ID NO: 3045801 - RNA, 19 nt, Human
aggccauucuuucccaaca

SEQ ID NO: 3045802 - RNA, 12 nt, Human
aggcccaaagcc

SEQ ID NO: 3045803 - RNA, 15 nt, Human
aggcccaaagccucg

SEQ ID NO: 3045804 - RNA, 13 nt, Human
aggcccaaagccu

SEQ ID NO: 3045805 - RNA, 21 nt, Human
aggccucucauuccagaggaa

SEQ ID NO: 3045806 - RNA, 16 nt, Human
uggccaguggcuggau

SEQ ID NO: 3045807 - RNA, 15 nt, Human
uggccaguggcugga

SEQ ID NO: 3045808 - RNA, 14 nt, Human
uggccaguggcugg

SEQ ID NO: 3045809 - RNA, 15 nt, Human
aggccauucuuuccc

SEQ ID NO: 3045810 - RNA, 18 nt, Human
uggacgagaaaacaauaa

SEQ ID NO: 3045811 - RNA, 22 nt, Human
uggaccuuuccugaggaagagg

SEQ ID NO: 3045812 - RNA, 22 nt, Human
uggcugccuugugaaggaauua

SEQ ID NO: 3045813 - RNA, 22 nt, Human
uggcucuugaacugagcuugga

SEQ ID NO: 3045814 - RNA, 16 nt, Human
uggcucuugaacugag

SEQ ID NO: 3045815 - RNA, 16 nt, Human
uggcuaugagggccuu

SEQ ID NO: 3045816 - RNA, 13 nt, Human
aggcucuggagcc

SEQ ID NO: 3045817 - RNA, 14 nt, Human
aggcucuggagccc

SEQ ID NO: 3045818 - RNA, 15 nt, Human
aggcucuggagccca

SEQ ID NO: 3045819 - RNA, 18 nt, Human
aggcucuggagcccacug

SEQ ID NO: 3045820 - RNA, 19 nt, Human
aggcucuggagcccacugu

SEQ ID NO: 3045821 - RNA, 14 nt, Human
aggcugcuuuccaa

SEQ ID NO: 3045822 - RNA, 13 nt, Human
aggcugcuuucca

SEQ ID NO: 3045823 - RNA, 21 nt, Human
aggcugcuuuccaaagccaau

SEQ ID NO: 3045824 - RNA, 19 nt, Human
aggcugcuuuccaaagcca

SEQ ID NO: 3045825 - RNA, 18 nt, Human
aggcugcuuuccaaagcc

SEQ ID NO: 3045826 - RNA, 17 nt, Human
aggcugcuuuccaaagc

SEQ ID NO: 3045827 - RNA, 15 nt, Human
aggcugcuuuccaaa

SEQ ID NO: 3045828 - RNA, 21 nt, Human
ugccucucugcaggucccuaa

SEQ ID NO: 3045829 - RNA, 15 nt, Human
ugccucucugcaggu

SEQ ID NO: 3045830 - RNA, 23 nt, Human
ugccucucugcaggucccuaaua

SEQ ID NO: 3045831 - RNA, 14 nt, Human
agcugccugugccu

SEQ ID NO: 3045832 - RNA, 11 nt, Human
ugccucucugc

SEQ ID NO: 3045833 - RNA, 12 nt, Human
ugccucucugca

SEQ ID NO: 3045834 - RNA, 19 nt, Human
agcuauggugucauaggcu

SEQ ID NO: 3045835 - RNA, 17 nt, Human
agcuaucguaaaauuaa

SEQ ID NO: 3045836 - RNA, 21 nt, Human
agcggcuggacuuggagguag

SEQ ID NO: 3045837 - RNA, 17 nt, Human
agcggcuggacuuggag

SEQ ID NO: 3045838 - RNA, 14 nt, Human
agcccacuguacuu

SEQ ID NO: 3045839 - RNA, 16 nt, Human
agcccacuguacuugc

SEQ ID NO: 3045840 - RNA, 15 nt, Human
agccacgguguucug

SEQ ID NO: 3045841 - RNA, 14 nt, Human
ugaugggauuuggu

SEQ ID NO: 3045842 - RNA, 13 nt, Human
uugucacgccaga

SEQ ID NO: 3045843 - RNA, 20 nt, Human
uugucacgccagacuuccca

SEQ ID NO: 3045844 - RNA, 22 nt, Human
uuguccucagccccgcguggaa

SEQ ID NO: 3045845 - RNA, 18 nt, Human
uugucccugaagagaagg

SEQ ID NO: 3045846 - RNA, 13 nt, Human
uugugaaauuauu

SEQ ID NO: 3045847 - RNA, 19 nt, Human
augacauaaaaacaacuuu

SEQ ID NO: 3045848 - RNA, 17 nt, Human
uugugaagguggaaaua

SEQ ID NO: 3045849 - RNA, 18 nt, Human
uugugaagguggaaauaa

SEQ ID NO: 3045850 - RNA, 16 nt, Human
uugugugugggagugu

SEQ ID NO: 3045851 - RNA, 13 nt, Human
uugugugugggag

SEQ ID NO: 3045852 - RNA, 10 nt, Human
uugugugugg

SEQ ID NO: 3045853 - RNA, 22 nt, Human
augcaaacuuuauuuuguguuu

SEQ ID NO: 3045854 - RNA, 12 nt, Human
uuguaaugaaaa

SEQ ID NO: 3045855 - RNA, 13 nt, Human
uuguaaugaaaac

SEQ ID NO: 3045856 - RNA, 22 nt, Human
uuguaagcaugcacaaauucug

SEQ ID NO: 3045857 - RNA, 20 nt, Human
uugcuaugagcuggggaugu

SEQ ID NO: 3045858 - RNA, 16 nt, Human
uugcuuuuaaaaucca

SEQ ID NO: 3045859 - RNA, 17 nt, Human
uuugaaacacuuugcau

SEQ ID NO: 3045860 - RNA, 19 nt, Human
uuugaaacacuuugcauaa

SEQ ID NO: 3045861 - RNA, 15 nt, Human
uuucauaugcuguau

SEQ ID NO: 3045862 - RNA, 22 nt, Human
uuucagaaaauauuauguguuu

SEQ ID NO: 3045863 - RNA, 12 nt, Human
uuucauaaagca

SEQ ID NO: 3045864 - RNA, 17 nt, Human
uuuauuuuuuucugaau

SEQ ID NO: 3045865 - RNA, 19 nt, Human
augcuguauauccuuucua

SEQ ID NO: 3045866 - RNA, 17 nt, Human
uuuaaaggcccuaucug

SEQ ID NO: 3045867 - RNA, 15 nt, Human
uuuaugugaaacaug

SEQ ID NO: 3045868 - RNA, 14 nt, Human
uuuaugugaaacau

SEQ ID NO: 3045869 - RNA, 18 nt, Human
aucggggagccgggagcc

SEQ ID NO: 3045870 - RNA, 12 nt, Human
aucguaaaauua

SEQ ID NO: 3045871 - RNA, 16 nt, Human
aucggggagccgggag

SEQ ID NO: 3045872 - RNA, 17 nt, Human
aucguaaaauuaagaaa

SEQ ID NO: 3045873 - RNA, 13 nt, Human
aucguaaaauuaa

SEQ ID NO: 3045874 - RNA, 14 nt, Human
aucguaaaauuaag

SEQ ID NO: 3045875 - RNA, 16 nt, Human
uugauaaguucauaca

SEQ ID NO: 3045876 - RNA, 17 nt, Human
uugauaaguucauacau

SEQ ID NO: 3045877 - RNA, 14 nt, Human
uugagaguucuaaa

SEQ ID NO: 3045878 - RNA, 17 nt, Human
uugaaggaaaaugauac

SEQ ID NO: 3045879 - RNA, 17 nt, Human
uugaagggaaauuucag

SEQ ID NO: 3045880 - RNA, 19 nt, Human
aucauugugaaauuauuca

SEQ ID NO: 3045881 - RNA, 13 nt, Human
aucauugugaaau

SEQ ID NO: 3045882 - RNA, 15 nt, Human
aucauugugaaauua

SEQ ID NO: 3045883 - RNA, 20 nt, Human
aucauuaucagccugugcca

SEQ ID NO: 3045884 - RNA, 23 nt, Human
aucagugugucuaaauuugaaug

SEQ ID NO: 3045885 - RNA, 20 nt, Human
auccauggggcugauuguau

SEQ ID NO: 3045886 - RNA, 16 nt, Human
auccaagcaaauguga

SEQ ID NO: 3045887 - RNA, 22 nt, Human
uucuuaaccagaucauugugaa

SEQ ID NO: 3045888 - RNA, 20 nt, Human
uuccuaaauauauuuuaaga

SEQ ID NO: 3045889 - RNA, 21 nt, Human
uuccuaaauauauuuuaagac

SEQ ID NO: 3045890 - RNA, 21 nt, Human
auauuugaauguaugcuucau

SEQ ID NO: 3045891 - RNA, 15 nt, Human
uucccuuuuuuuaag

SEQ ID NO: 3045892 - RNA, 23 nt, Human
auauuuuuguagcacugacagau

SEQ ID NO: 3045893 - RNA, 16 nt, Human
auauuuuuguagcacu

SEQ ID NO: 3045894 - RNA, 15 nt, Human
auauuuuuguagcac

SEQ ID NO: 3045895 - RNA, 18 nt, Human
auauuuuucacauaucua

SEQ ID NO: 3045896 - RNA, 16 nt, Human
auauguuucaaacuuu

SEQ ID NO: 3045897 - RNA, 14 nt, Human
auauguuucaaacu

SEQ ID NO: 3045898 - RNA, 13 nt, Human
auauguuucaaac

SEQ ID NO: 3045899 - RNA, 16 nt, Human
auauguucugacauaa

SEQ ID NO: 3045900 - RNA, 17 nt, Human
uucccagugaauucuug

SEQ ID NO: 3045901 - RNA, 22 nt, Human
auauuuaaaggcccuaucuguu

SEQ ID NO: 3045902 - RNA, 12 nt, Human
auauuuaaugau

SEQ ID NO: 3045903 - RNA, 13 nt, Human
auauuuaaugaua

SEQ ID NO: 3045904 - RNA, 23 nt, Human
auauuuaaugauaaguaaaugcu

SEQ ID NO: 3045905 - RNA, 13 nt, Human
auauuuacaaaug

SEQ ID NO: 3045906 - RNA, 16 nt, Human
auauauuuaaugauaa

SEQ ID NO: 3045907 - RNA, 9 nt, Human
auauauuuc

SEQ ID NO: 3045908 - RNA, 15 nt, Human
auauauuuuaagacg

SEQ ID NO: 3045909 - RNA, 13 nt, Human
auauaugcuaagu

SEQ ID NO: 3045910 - RNA, 16 nt, Human
uucagauuugccuuau

SEQ ID NO: 3045911 - RNA, 22 nt, Human
auaugagcuuccuucugugaaa

SEQ ID NO: 3045912 - RNA, 21 nt, Human
auaugagcuuccuucugugaa

SEQ ID NO: 3045913 - RNA, 20 nt, Human
auuucccuuccuuccucucc

SEQ ID NO: 3045914 - RNA, 17 nt, Human
auuuauaaaaauaaaaa

SEQ ID NO: 3045915 - RNA, 22 nt, Human
auuuauaaaaauaaaaaacacu

SEQ ID NO: 3045916 - RNA, 20 nt, Human
auuuaguaucuuuuuauuca

SEQ ID NO: 3045917 - RNA, 13 nt, Human
auuuaguguucau

SEQ ID NO: 3045918 - RNA, 15 nt, Human
auugugauguguccu

SEQ ID NO: 3045919 - RNA, 14 nt, Human
auugugaugugucc

SEQ ID NO: 3045920 - RNA, 13 nt, Human
auugugauguguc

SEQ ID NO: 3045921 - RNA, 15 nt, Human
auuguauuacaaauc

SEQ ID NO: 3045922 - RNA, 12 nt, Human
auugguguugac

SEQ ID NO: 3045923 - RNA, 13 nt, Human
auuguauucagag

SEQ ID NO: 3045924 - RNA, 24 nt, Human
auucugucucuggauuauauuaug

SEQ ID NO: 3045925 - RNA, 16 nt, Human
auugggccccugccag

SEQ ID NO: 3045926 - RNA, 15 nt, Human
auugggccccugcca

SEQ ID NO: 3045927 - RNA, 22 nt, Human
auuggguggggggcuucauaca

SEQ ID NO: 3045928 - RNA, 21 nt, Human
auuggguggggggcuucauac

SEQ ID NO: 3045929 - RNA, 20 nt, Human
auuggguggggggcuucaua

SEQ ID NO: 3045930 - RNA, 23 nt, Human
auuugugaagguggaaauaaacu

SEQ ID NO: 3045931 - RNA, 22 nt, Human
auuuucaguuauuauauuuaca

SEQ ID NO: 3045932 - RNA, 14 nt, Human
auuuucagaaaaua

SEQ ID NO: 3045933 - RNA, 17 nt, Human
auuuucagaaaauauua

SEQ ID NO: 3045934 - RNA, 21 nt, Human
auuuuauuuuuuucugaauua

SEQ ID NO: 3045935 - RNA, 16 nt, Human
uuuuguuuaccagaga

SEQ ID NO: 3045936 - RNA, 17 nt, Human
uuuuguucauacauauu

SEQ ID NO: 3045937 - RNA, 14 nt, Human
uuuuguucauacau

SEQ ID NO: 3045938 - RNA, 12 nt, Human
uuuuuaucaugu

SEQ ID NO: 3045939 - RNA, 14 nt, Human
uuuugaguucuaca

SEQ ID NO: 3045940 - RNA, 19 nt, Human
uuuuugugaaaagcuccau

SEQ ID NO: 3045941 - RNA, 17 nt, Human
auuauauaaguauucua

SEQ ID NO: 3045942 - RNA, 14 nt, Human
auuauauaaguauu

SEQ ID NO: 3045943 - RNA, 20 nt, Human
auuauauaaguauucuaaau

SEQ ID NO: 3045944 - RNA, 14 nt, Human
uuuuaauaaacacu

SEQ ID NO: 3045945 - RNA, 13 nt, Human
auguggaagugug

SEQ ID NO: 3045946 - RNA, 16 nt, Human
auguggaagugugggu

SEQ ID NO: 3045947 - RNA, 15 nt, Human
auguggaaguguggg

SEQ ID NO: 3045948 - RNA, 23 nt, Human
auguggaagugugggucugugug

SEQ ID NO: 3045949 - RNA, 22 nt, Human
auguggaagugugggucugugu

SEQ ID NO: 3045950 - RNA, 10 nt, Human
augugugugu

SEQ ID NO: 3045951 - RNA, 15 nt, Human
auguguguuuuaaaa

SEQ ID NO: 3045952 - RNA, 23 nt, Human
auguguguuuuaaaaugagaaau

SEQ ID NO: 3045953 - RNA, 15 nt, Human
auguugcauagaaua

SEQ ID NO: 3045954 - RNA, 17 nt, Human
auguugcauagaauaaa

SEQ ID NO: 3045955 - RNA, 18 nt, Human
auguugcauagaauaaaa

SEQ ID NO: 3045956 - RNA, 20 nt, Human
auguugcccuguugcugccu

SEQ ID NO: 3045957 - RNA, 15 nt, Human
uuuuccaaaauaauu

SEQ ID NO: 3045958 - RNA, 17 nt, Human
auguuuaguaaucauau

SEQ ID NO: 3045959 - RNA, 17 nt, Human
auucagaguugaugguu

SEQ ID NO: 3045960 - RNA, 12 nt, Human
accccgacuuuu

SEQ ID NO: 3045961 - RNA, 15 nt, Human
accccgacuuuuguu

SEQ ID NO: 3045962 - RNA, 15 nt, Human
acagguuagcugcuc

SEQ ID NO: 3045963 - RNA, 18 nt, Human
acagguuugggaccccug

SEQ ID NO: 3045964 - RNA, 15 nt, Human
acagguuugggaccc

SEQ ID NO: 3045965 - RNA, 20 nt, Human
accaagccuggucagcccaa

SEQ ID NO: 3045966 - RNA, 19 nt, Human
accaagccuggucagccca

SEQ ID NO: 3045967 - RNA, 20 nt, Human
aauuuugaguucuacauaag

SEQ ID NO: 3045968 - RNA, 15 nt, Human
aauuuuauaucuugu

SEQ ID NO: 3045969 - RNA, 13 nt, Human
aauuuugaaaaac

SEQ ID NO: 3045970 - RNA, 14 nt, Human
acaacuuuauaccc

SEQ ID NO: 3045971 - RNA, 13 nt, Human
acaacuuuauacc

SEQ ID NO: 3045972 - RNA, 18 nt, Human
acaacuucccagugaauu

SEQ ID NO: 3045973 - RNA, 17 nt, Human
acaacuucaauauccaa

SEQ ID NO: 3045974 - RNA, 16 nt, Human
acaacuauuuuuccaa

SEQ ID NO: 3045975 - RNA, 15 nt, Human
acaggggcaggagga

SEQ ID NO: 3045976 - RNA, 19 nt, Human
acaggucauauuaauauau

SEQ ID NO: 3045977 - RNA, 21 nt, Human
acagaauauguuucaaacuuu

SEQ ID NO: 3045978 - RNA, 19 nt, Human
acagaauauguuucaaacu

SEQ ID NO: 3045979 - RNA, 17 nt, Human
acagaauauguuucaaa

SEQ ID NO: 3045980 - RNA, 16 nt, Human
acagaauauguuucaa

SEQ ID NO: 3045981 - RNA, 15 nt, Human
acacugauccagccc

SEQ ID NO: 3045982 - RNA, 16 nt, Human
acgccagacuucccac

SEQ ID NO: 3045983 - RNA, 22 nt, Human
acgccagacuucccacggcucc

SEQ ID NO: 3045984 - RNA, 12 nt, Human
acuccccuccuu

SEQ ID NO: 3045985 - RNA, 21 nt, Human
acucauaaaaagccugcaauu

SEQ ID NO: 3045986 - RNA, 17 nt, Human
acucaggcccaaagccu

SEQ ID NO: 3045987 - RNA, 13 nt, Human
acucagucuuuaa

SEQ ID NO: 3045988 - RNA, 14 nt, Human
acuagcuauggugu

SEQ ID NO: 3045989 - RNA, 23 nt, Human
agaaaauauuauguguuuccaua

SEQ ID NO: 3045990 - RNA, 13 nt, Human
acuuuagggaagu

SEQ ID NO: 3045991 - RNA, 23 nt, Human
acuuuagggaaguacuuuuggca

SEQ ID NO: 3045992 - RNA, 19 nt, Human
acuuuauacccagaaaguu

SEQ ID NO: 3045993 - RNA, 22 nt, Human
acuucugccagcauaauacuug

SEQ ID NO: 3045994 - RNA, 18 nt, Human
acuuguaaaggaauuuaa

SEQ ID NO: 3045995 - RNA, 20 nt, Human
acuuguaaaggaauuuaaaa

SEQ ID NO: 3045996 - RNA, 19 nt, Human
acuuguaaaggaauuuaaa

SEQ ID NO: 3045997 - RNA, 12 nt, Human
acuguuuugaau

SEQ ID NO: 3045998 - RNA, 12 nt, Human
aaagaaaacuug

SEQ ID NO: 3045999 - RNA, 20 nt, Human
aaagaaaacuuguauuaugu

SEQ ID NO: 3046000 - RNA, 13 nt, Human
aaagaaauuaugu

SEQ ID NO: 3046001 - RNA, 11 nt, Human
aaagaacaucc

SEQ ID NO: 3046002 - RNA, 15 nt, Human
aaagaaauuaugugc

SEQ ID NO: 3046003 - RNA, 17 nt, Human
aaagaguacucuuguuu

SEQ ID NO: 3046004 - RNA, 12 nt, Human
aaagaguacucu

SEQ ID NO: 3046005 - RNA, 14 nt, Human
aaacacucuugaaa

SEQ ID NO: 3046006 - RNA, 17 nt, Human
aaacacucuugaaaaau

SEQ ID NO: 3046007 - RNA, 13 nt, Human
aaacacucuugaa

SEQ ID NO: 3046008 - RNA, 21 nt, Human
aaaauuauuuuguucauacau

SEQ ID NO: 3046009 - RNA, 14 nt, Human
aaauaguauuugag

SEQ ID NO: 3046010 - RNA, 12 nt, Human
aaauaacaauga

SEQ ID NO: 3046011 - RNA, 13 nt, Human
aaauaaaggaacc

SEQ ID NO: 3046012 - RNA, 20 nt, Human
aaagucucuggaauuugaaa

SEQ ID NO: 3046013 - RNA, 22 nt, Human
aaagucucuggaauuugaaaca

SEQ ID NO: 3046014 - RNA, 19 nt, Human
aaagucucuggaauuugaa

SEQ ID NO: 3046015 - RNA, 16 nt, Human
aaagggacugagaaau

SEQ ID NO: 3046016 - RNA, 16 nt, Human
aacuuuggaacaagau

SEQ ID NO: 3046017 - RNA, 14 nt, Human
aaccagaucauugu

SEQ ID NO: 3046018 - RNA, 12 nt, Human
aaccagaucauu

SEQ ID NO: 3046019 - RNA, 13 nt, Human
aacaugauuuggg

SEQ ID NO: 3046020 - RNA, 15 nt, Human
aacaaagaaauuaug

SEQ ID NO: 3046021 - RNA, 17 nt, Human
aacaaagaaauuaugug

SEQ ID NO: 3046022 - RNA, 21 nt, Human
aaauugauguguuuauuuaua

SEQ ID NO: 3046023 - RNA, 14 nt, Human
aauauuauguguuu

SEQ ID NO: 3046024 - RNA, 21 nt, Human
aaugauaaguaaaugcuaggu

SEQ ID NO: 3046025 - RNA, 18 nt, Human
aaugauaaguaaaugcua

SEQ ID NO: 3046026 - RNA, 18 nt, Human
aaucucauaauuuauaca

SEQ ID NO: 3046027 - RNA, 14 nt, Human
aauuaaauuuugag

SEQ ID NO: 3046028 - RNA, 22 nt, Human
aauuaaauuuugaguucuacau

SEQ ID NO: 3046029 - RNA, 22 nt, Human
aaugucaguauguggaagugug

SEQ ID NO: 3046030 - RNA, 16 nt, Human
aaugucaguaugugga

SEQ ID NO: 3046031 - RNA, 22 nt, Human
aagaaauuaugugccagauuua

SEQ ID NO: 3046032 - RNA, 13 nt, Human
aagaaauuaugug

SEQ ID NO: 3046033 - RNA, 17 nt, Human
aauaagugccaggaugg

SEQ ID NO: 3046034 - RNA, 18 nt, Human
aauaaacuggcagcucag

SEQ ID NO: 3046035 - RNA, 19 nt, Human
aauaaacuauuuguaaagu

SEQ ID NO: 3046036 - RNA, 12 nt, Human
aauaauguaaga

SEQ ID NO: 3046037 - RNA, 19 nt, Human
aauaauguaagacaaauau

SEQ ID NO: 3046038 - RNA, 21 nt, Human
aauaauccuaaacauaugaau

SEQ ID NO: 3046039 - RNA, 13 nt, Human
aauaaucauugga

SEQ ID NO: 3046040 - RNA, 23 nt, Human
aaguccaggcuuuuuuaucaugu

SEQ ID NO: 3046041 - RNA, 18 nt, Human
aaguauguguaaaaugug

SEQ ID NO: 3046042 - RNA, 14 nt, Human
aaguacuuuuggca

SEQ ID NO: 3046043 - RNA, 15 nt, Human
aaguacuuuuggcau

SEQ ID NO: 3046044 - RNA, 19 nt, Human
aagucucuggaauuugaaa

SEQ ID NO: 3046045 - RNA, 17 nt, Human
aggggccgggggcaguc

SEQ ID NO: 3046046 - RNA, 17 nt, Human
aggucccuaauaaagcu

SEQ ID NO: 3046047 - RNA, 18 nt, Human
aggucccuaauaaagcug

SEQ ID NO: 3046048 - RNA, 19 nt, Human
aggucccuaauaaagcugu

SEQ ID NO: 3046049 - RNA, 20 nt, Human
aggucccuaauaaagcugug

SEQ ID NO: 3046050 - RNA, 21 nt, Human
aggugcuucuaguucugccag

SEQ ID NO: 3046051 - RNA, 22 nt, Human
aggugcuucuaguucugccagg

SEQ ID NO: 3046052 - RNA, 15 nt, Human
agguggaaauaaacu

SEQ ID NO: 3046053 - RNA, 23 nt, Human
aggugcuucuaguucugccagga

SEQ ID NO: 3046054 - RNA, 16 nt, Human
agguggaagagggcug

SEQ ID NO: 3046055 - RNA, 17 nt, Human
agguucaugcaaacuuu

SEQ ID NO: 3046056 - RNA, 23 nt, Human
agguggcaucagugucuuuccac

SEQ ID NO: 3046057 - RNA, 22 nt, Human
agguggcaucagugucuuucca

SEQ ID NO: 3046058 - RNA, 15 nt, Human
agguuaauuccaauu

SEQ ID NO: 3046059 - RNA, 22 nt, Human
agguuaauuccaauuauaugag

SEQ ID NO: 3046060 - RNA, 19 nt, Human
aggcuauggggauagaugu

SEQ ID NO: 3046061 - RNA, 22 nt, Human
aggcuauggggauagaugugug

SEQ ID NO: 3046062 - RNA, 21 nt, Human
aggcuauggggauagaugugu

SEQ ID NO: 3046063 - RNA, 18 nt, Human
aggcugcagccaggccac

SEQ ID NO: 3046064 - RNA, 19 nt, Human
agcuuccuucugugaaagu

SEQ ID NO: 3046065 - RNA, 18 nt, Human
agcuucacuguaaaauaa

SEQ ID NO: 3046066 - RNA, 21 nt, Human
agcuuuuaugugaaacauguu

SEQ ID NO: 3046067 - RNA, 15 nt, Human
agcuuuucccuuuuu

SEQ ID NO: 3046068 - RNA, 20 nt, Human
aggaaauggcuguggagugu

SEQ ID NO: 3046069 - RNA, 15 nt, Human
aggaacuacugagga

SEQ ID NO: 3046070 - RNA, 14 nt, Human
agacgggcccuggu

SEQ ID NO: 3046071 - RNA, 14 nt, Human
agacacaacuauuu

SEQ ID NO: 3046072 - RNA, 16 nt, Human
agaggguguccugcac

SEQ ID NO: 3046073 - RNA, 18 nt, Human
agaggggaaaagagauga

SEQ ID NO: 3046074 - RNA, 16 nt, Human
agaggggaaaagagau

SEQ ID NO: 3046075 - RNA, 21 nt, Human
agauaggucagugcaaauacu

SEQ ID NO: 3046076 - RNA, 13 nt, Human
agccagaggucug

SEQ ID NO: 3046077 - RNA, 14 nt, Human
agcaugcacaaauu

SEQ ID NO: 3046078 - RNA, 20 nt, Human
augaaacacucaguuguuca

SEQ ID NO: 3046079 - RNA, 22 nt, Human
augaaaaaauauauaucaaaua

SEQ ID NO: 3046080 - RNA, 14 nt, Human
augaaaaaauauau

SEQ ID NO: 3046081 - RNA, 17 nt, Human
augaaaaaauauauauc

SEQ ID NO: 3046082 - RNA, 18 nt, Human
augaagcuuuuaugugaa

SEQ ID NO: 3046083 - RNA, 19 nt, Human
augaagcuuuuaugugaaa

SEQ ID NO: 3046084 - RNA, 20 nt, Human
augaagcuuuuaugugaaac

SEQ ID NO: 3046085 - RNA, 21 nt, Human
augaagcuuuuaugugaaaca

SEQ ID NO: 3046086 - RNA, 14 nt, Human
augacucagaauau

SEQ ID NO: 3046087 - RNA, 22 nt, Human
aucuuauaauuuaaaauaugcu

SEQ ID NO: 3046088 - RNA, 13 nt, Human
auccuuucuaaca

SEQ ID NO: 3046089 - RNA, 17 nt, Human
auguaauaacugugaag

SEQ ID NO: 3046090 - RNA, 23 nt, Human
auggugacuuuugaaaagaggug

SEQ ID NO: 3046091 - RNA, 16 nt, Human
augugggggucugugu

SEQ ID NO: 3046092 - RNA, 18 nt, Human
augugggggucugugugu

SEQ ID NO: 3046093 - RNA, 17 nt, Human
augugggggucugugug

SEQ ID NO: 3046094 - RNA, 18 nt, Human
auguuucuuuguaaugaa

SEQ ID NO: 3046095 - RNA, 21 nt, Human
augccuuuguacuuuagggaa

SEQ ID NO: 3046096 - RNA, 23 nt, Human
aguuguaucagcacguguggccu

SEQ ID NO: 3046097 - RNA, 20 nt, Human
aguuguaucagcacgugugg

SEQ ID NO: 3046098 - RNA, 16 nt, Human
agugucuuuccacucc

SEQ ID NO: 3046099 - RNA, 19 nt, Human
auaaguguguguuuuucau

SEQ ID NO: 3046100 - RNA, 22 nt, Human
auaaguguguguuuuucauaaa

SEQ ID NO: 3046101 - RNA, 19 nt, Human
auaaguauuuaauucaugu

SEQ ID NO: 3046102 - RNA, 18 nt, Human
auauuuaguguucauaaa

SEQ ID NO: 3046103 - RNA, 16 nt, Human
auauuuauaaaaauaa

SEQ ID NO: 3046104 - RNA, 15 nt, Human
auauccuuucuaaca

SEQ ID NO: 3046105 - RNA, 16 nt, Human
auauccuuucuaacaa

SEQ ID NO: 3046106 - RNA, 15 nt, Human
auacuugaaaauuaa

SEQ ID NO: 3046107 - RNA, 16 nt, Human
auacuugaaaauuaac

SEQ ID NO: 3046108 - RNA, 15 nt, Human
auauaagugauugcu

SEQ ID NO: 3046109 - RNA, 22 nt, Human
auauaaguauucuaaauuuuau

SEQ ID NO: 3046110 - RNA, 15 nt, Human
auauaaguguguguu

SEQ ID NO: 3046111 - RNA, 12 nt, Human
aaaaacaacuuu

SEQ ID NO: 3046112 - RNA, 12 nt, Human
aaaacaacuuua

SEQ ID NO: 3046113 - RNA, 16 nt, Human
cacucaugugacucuu

SEQ ID NO: 3046114 - RNA, 22 nt, Human
cacucaugugacucuuuccaac

SEQ ID NO: 3046115 - RNA, 13 nt, Human
cacuccuccuagc

SEQ ID NO: 3046116 - RNA, 18 nt, Human
cacuccuccuagccaccc

SEQ ID NO: 3046117 - RNA, 16 nt, Human
cacuaacaugauuugg

SEQ ID NO: 3046118 - RNA, 20 nt, Human
cacggcuccucgagauccca

SEQ ID NO: 3046119 - RNA, 22 nt, Human
cacggcuccucgagaucccaac

SEQ ID NO: 3046120 - RNA, 19 nt, Human
cacguaaugaaacuuggau

SEQ ID NO: 3046121 - RNA, 16 nt, Human
cacguaaugaaacuug

SEQ ID NO: 3046122 - RNA, 19 nt, Human
cacguguggccuguucuuc

SEQ ID NO: 3046123 - RNA, 13 nt, Human
cacuaaacaaaga

SEQ ID NO: 3046124 - RNA, 17 nt, Human
cacuggccccugagauc

SEQ ID NO: 3046125 - RNA, 19 nt, Human
cacuguacuugcucuugau

SEQ ID NO: 3046126 - RNA, 15 nt, Human
cacuguacuugcucu

SEQ ID NO: 3046127 - RNA, 18 nt, Human
cacuguacuugcucuuga

SEQ ID NO: 3046128 - RNA, 18 nt, Human
cacugcuaagaauauuug

SEQ ID NO: 3046129 - RNA, 22 nt, Human
cacugacagauuuccauccuag

SEQ ID NO: 3046130 - RNA, 17 nt, Human
cacugacagauuuccau

SEQ ID NO: 3046131 - RNA, 13 nt, Human
cacugacagauuu

SEQ ID NO: 3046132 - RNA, 16 nt, Human
cacugauccagcccug

SEQ ID NO: 3046133 - RNA, 15 nt, Human
cacugauccagcccu

SEQ ID NO: 3046134 - RNA, 14 nt, Human
cacugauccagccc

SEQ ID NO: 3046135 - RNA, 14 nt, Human
caccggggccuggg

SEQ ID NO: 3046136 - RNA, 21 nt, Human
caccggggccugggcaggagg

SEQ ID NO: 3046137 - RNA, 22 nt, Human
caccggggccugggcaggaggg

SEQ ID NO: 3046138 - RNA, 17 nt, Human
caccgccuccuacagcc

SEQ ID NO: 3046139 - RNA, 12 nt, Human
cagacuucccac

SEQ ID NO: 3046140 - RNA, 22 nt, Human
cagacuucccacggcuccucga

SEQ ID NO: 3046141 - RNA, 17 nt, Human
cagagaaaaagggaggg

SEQ ID NO: 3046142 - RNA, 18 nt, Human
cagagaaaaagggagggg

SEQ ID NO: 3046143 - RNA, 12 nt, Human
cagagaaaaagg

SEQ ID NO: 3046144 - RNA, 15 nt, Human
cagacccccuggaga

SEQ ID NO: 3046145 - RNA, 15 nt, Human
cagaaugaggcugcu

SEQ ID NO: 3046146 - RNA, 14 nt, Human
cagaaugaggcugc

SEQ ID NO: 3046147 - RNA, 19 nt, Human
cagaaaauauuauguguuu

SEQ ID NO: 3046148 - RNA, 12 nt, Human
cacuuugcauaa

SEQ ID NO: 3046149 - RNA, 17 nt, Human
cagaaggaucuucaucu

SEQ ID NO: 3046150 - RNA, 11 nt, Human
cagaagcccag

SEQ ID NO: 3046151 - RNA, 14 nt, Human
cagaagcccagaau

SEQ ID NO: 3046152 - RNA, 12 nt, Human
cagaagcccaga

SEQ ID NO: 3046153 - RNA, 23 nt, Human
cagaaccccuggcuccaggccag

SEQ ID NO: 3046154 - RNA, 14 nt, Human
cagagucccugccu

SEQ ID NO: 3046155 - RNA, 18 nt, Human
cagagucccugccuggac

SEQ ID NO: 3046156 - RNA, 23 nt, Human
cagaggcgcaugaauuugugaag

SEQ ID NO: 3046157 - RNA, 22 nt, Human
cagauaaagguucaugcaaacu

SEQ ID NO: 3046158 - RNA, 14 nt, Human
cagauaaucagugu

SEQ ID NO: 3046159 - RNA, 22 nt, Human
cagagcagugggccuggccagc

SEQ ID NO: 3046160 - RNA, 21 nt, Human
cagagcagugggccuggccag

SEQ ID NO: 3046161 - RNA, 20 nt, Human
cagagcagugggccuggcca

SEQ ID NO: 3046162 - RNA, 17 nt, Human
cagagcagugggccugg

SEQ ID NO: 3046163 - RNA, 15 nt, Human
cagagcagugggccu

SEQ ID NO: 3046164 - RNA, 22 nt, Human
cagaggacaguauuugugggga

SEQ ID NO: 3046165 - RNA, 18 nt, Human
cagccuccauccuacccc

SEQ ID NO: 3046166 - RNA, 21 nt, Human
cagccuccauccuacccccug

SEQ ID NO: 3046167 - RNA, 21 nt, Human
cagcccugaguuccuagccac

SEQ ID NO: 3046168 - RNA, 19 nt, Human
cagcccugaguuccuagcc

SEQ ID NO: 3046169 - RNA, 18 nt, Human
cagcccugaguuccuagc

SEQ ID NO: 3046170 - RNA, 18 nt, Human
cagcccucauuggcucuu

SEQ ID NO: 3046171 - RNA, 23 nt, Human
cagccuggcuguggccuaaccug

SEQ ID NO: 3046172 - RNA, 23 nt, Human
cagccucuccacucaugugacuc

SEQ ID NO: 3046173 - RNA, 15 nt, Human
caggaaccgaggcag

SEQ ID NO: 3046174 - RNA, 17 nt, Human
caggaaccgaggcaggg

SEQ ID NO: 3046175 - RNA, 18 nt, Human
caggaaccgaggcaggga

SEQ ID NO: 3046176 - RNA, 21 nt, Human
cagcuggggccaggcuggguc

SEQ ID NO: 3046177 - RNA, 22 nt, Human
cagcuggggccaggcugggucg

SEQ ID NO: 3046178 - RNA, 18 nt, Human
cagcuggggccaggcugg

SEQ ID NO: 3046179 - RNA, 19 nt, Human
cagcuggggccaggcuggg

SEQ ID NO: 3046180 - RNA, 20 nt, Human
cagcuggggccaggcugggu

SEQ ID NO: 3046181 - RNA, 15 nt, Human
cagcauuucccuucc

SEQ ID NO: 3046182 - RNA, 18 nt, Human
cagccaacuauggccugu

SEQ ID NO: 3046183 - RNA, 16 nt, Human
cagcccaccuggcuuu

SEQ ID NO: 3046184 - RNA, 19 nt, Human
cagcccaaaccaccagaag

SEQ ID NO: 3046185 - RNA, 16 nt, Human
cagcccaaaccaccag

SEQ ID NO: 3046186 - RNA, 23 nt, Human
cagcccaaaccaccagaagccca

SEQ ID NO: 3046187 - RNA, 21 nt, Human
cagcccaaaccaccagaagcc

SEQ ID NO: 3046188 - RNA, 20 nt, Human
cagcccaaaccaccagaagc

SEQ ID NO: 3046189 - RNA, 16 nt, Human
cagauggaaugcugug

SEQ ID NO: 3046190 - RNA, 17 nt, Human
cagauggaaugcugugu

SEQ ID NO: 3046191 - RNA, 19 nt, Human
cagauggaaugcuguguua

SEQ ID NO: 3046192 - RNA, 21 nt, Human
cagauggaaugcuguguuaaa

SEQ ID NO: 3046193 - RNA, 23 nt, Human
caggagacagguuagcugcuccc

SEQ ID NO: 3046194 - RNA, 12 nt, Human
caggagaguaga

SEQ ID NO: 3046195 - RNA, 14 nt, Human
caggagucccugcc

SEQ ID NO: 3046196 - RNA, 21 nt, Human
caggagucccugccaucaugu

SEQ ID NO: 3046197 - RNA, 15 nt, Human
caggagucccugcca

SEQ ID NO: 3046198 - RNA, 21 nt, Human
caggagcccugggaggcucug

SEQ ID NO: 3046199 - RNA, 11 nt, Human
caggagcccug

SEQ ID NO: 3046200 - RNA, 14 nt, Human
caggagcccuggga

SEQ ID NO: 3046201 - RNA, 16 nt, Human
caggagcccugggagg

SEQ ID NO: 3046202 - RNA, 18 nt, Human
caggagcccugggaggcu

SEQ ID NO: 3046203 - RNA, 19 nt, Human
caggagcccugggaggcuc

SEQ ID NO: 3046204 - RNA, 19 nt, Human
caggaguuucguuuucaaa

SEQ ID NO: 3046205 - RNA, 20 nt, Human
caggcaucggggagccggga

SEQ ID NO: 3046206 - RNA, 21 nt, Human
caggcaucggggagccgggag

SEQ ID NO: 3046207 - RNA, 22 nt, Human
caggaugaugacuauggaaaga

SEQ ID NO: 3046208 - RNA, 18 nt, Human
caggaugaugacuaugga

SEQ ID NO: 3046209 - RNA, 20 nt, Human
caggaugaugacuauggaaa

SEQ ID NO: 3046210 - RNA, 21 nt, Human
caggcccccagaaccccuggc

SEQ ID NO: 3046211 - RNA, 21 nt, Human
caggccagggggccagucccu

SEQ ID NO: 3046212 - RNA, 15 nt, Human
caggcucagagggug

SEQ ID NO: 3046213 - RNA, 11 nt, Human
caggcucagag

SEQ ID NO: 3046214 - RNA, 23 nt, Human
caggcuuuuuuaucaugugaaau

SEQ ID NO: 3046215 - RNA, 21 nt, Human
caggcugggucgcccuggacu

SEQ ID NO: 3046216 - RNA, 23 nt, Human
caggcugggucgcccuggacugu

SEQ ID NO: 3046217 - RNA, 13 nt, Human
cagggaaggaucc

SEQ ID NO: 3046218 - RNA, 18 nt, Human
cagggaaggaucccauga

SEQ ID NO: 3046219 - RNA, 22 nt, Human
cagggggccagucccugaggca

SEQ ID NO: 3046220 - RNA, 14 nt, Human
caggggcaggagga

SEQ ID NO: 3046221 - RNA, 12 nt, Human
cagugaauucuu

SEQ ID NO: 3046222 - RNA, 20 nt, Human
cagugaaagaaaauaacaau

SEQ ID NO: 3046223 - RNA, 16 nt, Human
cagugaaagaaaauaa

SEQ ID NO: 3046224 - RNA, 22 nt, Human
cagucuuuaaucugagaggcca

SEQ ID NO: 3046225 - RNA, 23 nt, Human
cagucccugaggcagguccccag

SEQ ID NO: 3046226 - RNA, 20 nt, Human
cagucccugaggcagguccc

SEQ ID NO: 3046227 - RNA, 14 nt, Human
cagucccugaggca

SEQ ID NO: 3046228 - RNA, 12 nt, Human
caguauguggaa

SEQ ID NO: 3046229 - RNA, 19 nt, Human
caggucccuaauaaagcug

SEQ ID NO: 3046230 - RNA, 20 nt, Human
caggucccuaauaaagcugu

SEQ ID NO: 3046231 - RNA, 21 nt, Human
caggucccuaauaaagcugug

SEQ ID NO: 3046232 - RNA, 22 nt, Human
caggucccuaauaaagcugugu

SEQ ID NO: 3046233 - RNA, 20 nt, Human
caggucauauuaauauauuu

SEQ ID NO: 3046234 - RNA, 21 nt, Human
caggucauauuaauauauuuc

SEQ ID NO: 3046235 - RNA, 12 nt, Human
cagguccccaga

SEQ ID NO: 3046236 - RNA, 18 nt, Human
cagguccccagcuuuggc

SEQ ID NO: 3046237 - RNA, 13 nt, Human
cagguccccagac

SEQ ID NO: 3046238 - RNA, 11 nt, Human
caggucccuaa

SEQ ID NO: 3046239 - RNA, 12 nt, Human
caggucccuaau

SEQ ID NO: 3046240 - RNA, 13 nt, Human
caggucccuaaua

SEQ ID NO: 3046241 - RNA, 14 nt, Human
caggucccuaauaa

SEQ ID NO: 3046242 - RNA, 15 nt, Human
caggucccuaauaaa

SEQ ID NO: 3046243 - RNA, 16 nt, Human
caggucccuaauaaag

SEQ ID NO: 3046244 - RNA, 17 nt, Human
caggucccuaauaaagc

SEQ ID NO: 3046245 - RNA, 18 nt, Human
caggucccuaauaaagcu

SEQ ID NO: 3046246 - RNA, 12 nt, Human
cagguguucuuc

SEQ ID NO: 3046247 - RNA, 21 nt, Human
cauccagagucccugccugga

SEQ ID NO: 3046248 - RNA, 13 nt, Human
cauccagaguccc

SEQ ID NO: 3046249 - RNA, 17 nt, Human
cauccagagucccugcc

SEQ ID NO: 3046250 - RNA, 18 nt, Human
cauccagagucccugccu

SEQ ID NO: 3046251 - RNA, 20 nt, Human
cauccagagucccugccugg

SEQ ID NO: 3046252 - RNA, 13 nt, Human
caucccuccuggg

SEQ ID NO: 3046253 - RNA, 13 nt, Human
caucauguuuaca

SEQ ID NO: 3046254 - RNA, 21 nt, Human
caucauguuuacagaggacag

SEQ ID NO: 3046255 - RNA, 19 nt, Human
caucauguuuacagaggac

SEQ ID NO: 3046256 - RNA, 16 nt, Human
cauagguuuaauaauu

SEQ ID NO: 3046257 - RNA, 16 nt, Human
cauauaagugauugcu

SEQ ID NO: 3046258 - RNA, 15 nt, Human
cauaucuaguaugaa

SEQ ID NO: 3046259 - RNA, 18 nt, Human
cauaucuaguaugaaauu

SEQ ID NO: 3046260 - RNA, 17 nt, Human
cauaucuaguaugaaau

SEQ ID NO: 3046261 - RNA, 19 nt, Human
cauauuguuacugguacca

SEQ ID NO: 3046262 - RNA, 13 nt, Human
cauauuguuacug

SEQ ID NO: 3046263 - RNA, 21 nt, Human
cauaucuaguaugaaauuaua

SEQ ID NO: 3046264 - RNA, 23 nt, Human
caugagcuccuuaaggcucuuuu

SEQ ID NO: 3046265 - RNA, 19 nt, Human
caugaguuggcugggaaua

SEQ ID NO: 3046266 - RNA, 18 nt, Human
caugagauaauaugcaga

SEQ ID NO: 3046267 - RNA, 15 nt, Human
cauccuacccccugu

SEQ ID NO: 3046268 - RNA, 18 nt, Human
cauccuacccccugugcc

SEQ ID NO: 3046269 - RNA, 16 nt, Human
caucucuuguuuaaau

SEQ ID NO: 3046270 - RNA, 17 nt, Human
caucugacuaugacaua

SEQ ID NO: 3046271 - RNA, 14 nt, Human
cauucuuucccaac

SEQ ID NO: 3046272 - RNA, 12 nt, Human
cauucuuuccca

SEQ ID NO: 3046273 - RNA, 13 nt, Human
cauucuggaauaa

SEQ ID NO: 3046274 - RNA, 14 nt, Human
cauuccagaggaag

SEQ ID NO: 3046275 - RNA, 13 nt, Human
cauuccagaggaa

SEQ ID NO: 3046276 - RNA, 19 nt, Human
cauucauuuucuggguguu

SEQ ID NO: 3046277 - RNA, 17 nt, Human
ccaaaccaccagaagcc

SEQ ID NO: 3046278 - RNA, 23 nt, Human
cauuuuaccuuugacaaagguaa

SEQ ID NO: 3046279 - RNA, 19 nt, Human
cauuguacgaagaguauuu

SEQ ID NO: 3046280 - RNA, 20 nt, Human
cauuguacgaagaguauuuu

SEQ ID NO: 3046281 - RNA, 16 nt, Human
caugugacucuuucca

SEQ ID NO: 3046282 - RNA, 17 nt, Human
caugugacucuuuccaa

SEQ ID NO: 3046283 - RNA, 14 nt, Human
caugugacucuuuc

SEQ ID NO: 3046284 - RNA, 21 nt, Human
cauuaaaaaaucaguuguaca

SEQ ID NO: 3046285 - RNA, 13 nt, Human
cauggcauauuuu

SEQ ID NO: 3046286 - RNA, 19 nt, Human
cauggcauauuuuucacau

SEQ ID NO: 3046287 - RNA, 15 nt, Human
cauggcauauuuuuc

SEQ ID NO: 3046288 - RNA, 23 nt, Human
cauggcauauuuuucacauaucu

SEQ ID NO: 3046289 - RNA, 16 nt, Human
ccagcauuucccuucc

SEQ ID NO: 3046290 - RNA, 21 nt, Human
ccagcauuucccuuccuuccu

SEQ ID NO: 3046291 - RNA, 23 nt, Human
ccagcauaauacuugcuuuggaa

SEQ ID NO: 3046292 - RNA, 18 nt, Human
ccagacccccuggagacu

SEQ ID NO: 3046293 - RNA, 16 nt, Human
ccagacccccuggaga

SEQ ID NO: 3046294 - RNA, 12 nt, Human
ccagacccccug

SEQ ID NO: 3046295 - RNA, 20 nt, Human
ccacuguacuugcucuugau

SEQ ID NO: 3046296 - RNA, 17 nt, Human
ccacuguacuugcucuu

SEQ ID NO: 3046297 - RNA, 18 nt, Human
ccacuguacuugcucuug

SEQ ID NO: 3046298 - RNA, 19 nt, Human
ccacuguacuugcucuuga

SEQ ID NO: 3046299 - RNA, 22 nt, Human
ccagauuuaugcauauuauuuu

SEQ ID NO: 3046300 - RNA, 13 nt, Human
ccagauuuaugca

SEQ ID NO: 3046301 - RNA, 22 nt, Human
ccacucaugugacucuuuccaa

SEQ ID NO: 3046302 - RNA, 19 nt, Human
ccacucaugugacucuuuc

SEQ ID NO: 3046303 - RNA, 20 nt, Human
ccaccugaauaaagaaugaa

SEQ ID NO: 3046304 - RNA, 15 nt, Human
ccacccuccacucuc

SEQ ID NO: 3046305 - RNA, 20 nt, Human
ccaaaccaccagaagcccag

SEQ ID NO: 3046306 - RNA, 21 nt, Human
ccaccaagccuggucagccca

SEQ ID NO: 3046307 - RNA, 22 nt, Human
ccaccaagccuggucagcccaa

SEQ ID NO: 3046308 - RNA, 19 nt, Human
ccacacugauccagcccug

SEQ ID NO: 3046309 - RNA, 22 nt, Human
ccacacugauccagcccugagu

SEQ ID NO: 3046310 - RNA, 18 nt, Human
ccauccuacccccugugc

SEQ ID NO: 3046311 - RNA, 17 nt, Human
ccauccuacccccugug

SEQ ID NO: 3046312 - RNA, 19 nt, Human
cccaaaacaccggguucca

SEQ ID NO: 3046313 - RNA, 21 nt, Human
cccaaaacaccggguuccagc

SEQ ID NO: 3046314 - RNA, 13 nt, Human
ccaggagacaggu

SEQ ID NO: 3046315 - RNA, 19 nt, Human
ccaggccagggggccaguc

SEQ ID NO: 3046316 - RNA, 14 nt, Human
ccugggcaggaggg

SEQ ID NO: 3046317 - RNA, 12 nt, Human
ccugggcaggag

SEQ ID NO: 3046318 - RNA, 12 nt, Human
ccuggucagccc

SEQ ID NO: 3046319 - RNA, 14 nt, Human
ccuggucagcccaa

SEQ ID NO: 3046320 - RNA, 15 nt, Human
ccuggcuccaggcca

SEQ ID NO: 3046321 - RNA, 17 nt, Human
ccuggcuccaggccagg

SEQ ID NO: 3046322 - RNA, 16 nt, Human
ccuggcuccaggccag

SEQ ID NO: 3046323 - RNA, 19 nt, Human
ccuggagacuaaccccacc

SEQ ID NO: 3046324 - RNA, 18 nt, Human
ccugccugguccucacac

SEQ ID NO: 3046325 - RNA, 19 nt, Human
ccugcaauuucauaugcug

SEQ ID NO: 3046326 - RNA, 14 nt, Human
ccugccacucaggc

SEQ ID NO: 3046327 - RNA, 14 nt, Human
ccugccagaccccc

SEQ ID NO: 3046328 - RNA, 23 nt, Human
ccugccacucaggcccaaagccu

SEQ ID NO: 3046329 - RNA, 22 nt, Human
ccugccacucaggcccaaagcc

SEQ ID NO: 3046330 - RNA, 19 nt, Human
ccugaggaagagggacugu

SEQ ID NO: 3046331 - RNA, 22 nt, Human
cgagaucccaacacugccagca

SEQ ID NO: 3046332 - RNA, 15 nt, Human
cgagaucccaacacu

SEQ ID NO: 3046333 - RNA, 21 nt, Human
cgagaucccaacacugccagc

SEQ ID NO: 3046334 - RNA, 13 nt, Human
cgagaucccaaca

SEQ ID NO: 3046335 - RNA, 21 nt, Human
cgaagaguauuuuugacagaa

SEQ ID NO: 3046336 - RNA, 15 nt, Human
ccuugucacgccaga

SEQ ID NO: 3046337 - RNA, 18 nt, Human
ccuugucacgccagacuu

SEQ ID NO: 3046338 - RNA, 15 nt, Human
ccuucugugaaagua

SEQ ID NO: 3046339 - RNA, 13 nt, Human
ccuugaacuagga

SEQ ID NO: 3046340 - RNA, 15 nt, Human
ccuuccaagagccug

SEQ ID NO: 3046341 - RNA, 17 nt, Human
ccuuccaagagccugag

SEQ ID NO: 3046342 - RNA, 16 nt, Human
ccuuccaagagccuga

SEQ ID NO: 3046343 - RNA, 16 nt, Human
ccuuaaggcucuuuug

SEQ ID NO: 3046344 - RNA, 18 nt, Human
ccuuaaggcucuuuugua

SEQ ID NO: 3046345 - RNA, 13 nt, Human
ccuuaaggcucuu

SEQ ID NO: 3046346 - RNA, 12 nt, Human
ccuguuuaagag

SEQ ID NO: 3046347 - RNA, 15 nt, Human
ccuguuuaagagaca

SEQ ID NO: 3046348 - RNA, 20 nt, Human
ccgggacaccuaggcuaggg

SEQ ID NO: 3046349 - RNA, 19 nt, Human
ccgggacaccuaggcuagg

SEQ ID NO: 3046350 - RNA, 15 nt, Human
ccggguuccagcacc

SEQ ID NO: 3046351 - RNA, 12 nt, Human
ccggguuccagc

SEQ ID NO: 3046352 - RNA, 15 nt, Human
ccgaggcagggaagg

SEQ ID NO: 3046353 - RNA, 18 nt, Human
ccuaaauauauuuuaaga

SEQ ID NO: 3046354 - RNA, 16 nt, Human
ccuaaauauauuuuaa

SEQ ID NO: 3046355 - RNA, 18 nt, Human
ccucuccacucaugugac

SEQ ID NO: 3046356 - RNA, 18 nt, Human
ccucucauuccagaggaa

SEQ ID NO: 3046357 - RNA, 21 nt, Human
ccucaucuccccaucauuggu

SEQ ID NO: 3046358 - RNA, 23 nt, Human
cccuccacucuccucuuccaggc

SEQ ID NO: 3046359 - RNA, 13 nt, Human
cccuccaccugcu

SEQ ID NO: 3046360 - RNA, 21 nt, Human
cccugccagacccccuggaga

SEQ ID NO: 3046361 - RNA, 13 nt, Human
cccugccagaccc

SEQ ID NO: 3046362 - RNA, 15 nt, Human
cccuggacugugugc

SEQ ID NO: 3046363 - RNA, 16 nt, Human
cccacaggaggugguc

SEQ ID NO: 3046364 - RNA, 21 nt, Human
cccacaggagguggucuggga

SEQ ID NO: 3046365 - RNA, 17 nt, Human
cccaccacacccucccu

SEQ ID NO: 3046366 - RNA, 14 nt, Human
cuggugguggcucg

SEQ ID NO: 3046367 - RNA, 22 nt, Human
cuggugguggcucgggaggcga

SEQ ID NO: 3046368 - RNA, 23 nt, Human
cuggugguucacucuuggagccu

SEQ ID NO: 3046369 - RNA, 21 nt, Human
cuggugguucacucuuggagc

SEQ ID NO: 3046370 - RNA, 20 nt, Human
cuggugguucacucuuggag

SEQ ID NO: 3046371 - RNA, 12 nt, Human
cuggugguucac

SEQ ID NO: 3046372 - RNA, 19 nt, Human
cugggccccugccucucug

SEQ ID NO: 3046373 - RNA, 20 nt, Human
cugggccccugccucucugc

SEQ ID NO: 3046374 - RNA, 23 nt, Human
cugggccccugccucucugcagg

SEQ ID NO: 3046375 - RNA, 16 nt, Human
cugggggccucuucug

SEQ ID NO: 3046376 - RNA, 13 nt, Human
cugggucgcccug

SEQ ID NO: 3046377 - RNA, 15 nt, Human
cugggucgcccugga

SEQ ID NO: 3046378 - RNA, 18 nt, Human
cuguggccuaaccugccg

SEQ ID NO: 3046379 - RNA, 14 nt, Human
cuguggaucaaauc

SEQ ID NO: 3046380 - RNA, 24 nt, Human
cuguggaucaaauccagccugcug

SEQ ID NO: 3046381 - RNA, 14 nt, Human
cugugugcucagga

SEQ ID NO: 3046382 - RNA, 14 nt, Human
cuguguguguguau

SEQ ID NO: 3046383 - RNA, 16 nt, Human
cuguguguguguaugu

SEQ ID NO: 3046384 - RNA, 15 nt, Human
cuguguguguguaug

SEQ ID NO: 3046385 - RNA, 20 nt, Human
cuguguguuuaugugugugu

SEQ ID NO: 3046386 - RNA, 18 nt, Human
cuguguguuuaugugugu

SEQ ID NO: 3046387 - RNA, 20 nt, Human
cuguguguguguaugugggg

SEQ ID NO: 3046388 - RNA, 18 nt, Human
cuguguguguguaugugg

SEQ ID NO: 3046389 - RNA, 23 nt, Human
cugugcccacccuccacucuccu

SEQ ID NO: 3046390 - RNA, 17 nt, Human
cugugcccacccuccac

SEQ ID NO: 3046391 - RNA, 18 nt, Human
cugugaaaguacauuugg

SEQ ID NO: 3046392 - RNA, 21 nt, Human
cugucuuuuuucuaaaguaaa

SEQ ID NO: 3046393 - RNA, 19 nt, Human
cuuccaaacaggcucagag

SEQ ID NO: 3046394 - RNA, 15 nt, Human
cuuaaggcucuuuug

SEQ ID NO: 3046395 - RNA, 17 nt, Human
cuuaaccagaucauugu

SEQ ID NO: 3046396 - RNA, 19 nt, Human
gaaggaucccaugagcucc

SEQ ID NO: 3046397 - RNA, 14 nt, Human
gaaggaaaaugaua

SEQ ID NO: 3046398 - RNA, 22 nt, Human
gaagccacgguguucugugaua

SEQ ID NO: 3046399 - RNA, 12 nt, Human
gaagcccagaau

SEQ ID NO: 3046400 - RNA, 10 nt, Human
gaagcccaga

SEQ ID NO: 3046401 - RNA, 18 nt, Human
gaagcuuuuaugugaaac

SEQ ID NO: 3046402 - RNA, 17 nt, Human
gaauaaagaaugaaugg

SEQ ID NO: 3046403 - RNA, 12 nt, Human
gaauaaaauuuu

SEQ ID NO: 3046404 - RNA, 16 nt, Human
gaaguuuacauuguaa

SEQ ID NO: 3046405 - RNA, 17 nt, Human
gaaguuuacauuguaaa

SEQ ID NO: 3046406 - RNA, 20 nt, Human
gaauaauccuaaacauauga

SEQ ID NO: 3046407 - RNA, 20 nt, Human
gaauaagugccaggauggaa

SEQ ID NO: 3046408 - RNA, 14 nt, Human
gaauacuuuauaaa

SEQ ID NO: 3046409 - RNA, 14 nt, Human
gaaugccuccugca

SEQ ID NO: 3046410 - RNA, 18 nt, Human
gaaauuguauuacaaauc

SEQ ID NO: 3046411 - RNA, 13 nt, Human
gaacuauuagagc

SEQ ID NO: 3046412 - RNA, 22 nt, Human
gaacucaucuagguaaauuaca

SEQ ID NO: 3046413 - RNA, 21 nt, Human
gaacuuguaaaggaauuuaaa

SEQ ID NO: 3046414 - RNA, 17 nt, Human
cuuucccaacaccucuu

SEQ ID NO: 3046415 - RNA, 19 nt, Human
cuuguguuaaguaugugua

SEQ ID NO: 3046416 - RNA, 18 nt, Human
cuuguaaaggaauuuaaa

SEQ ID NO: 3046417 - RNA, 19 nt, Human
cuuguaaaggaauuuaaaa

SEQ ID NO: 3046418 - RNA, 20 nt, Human
cuuggggacaggggcaggag

SEQ ID NO: 3046419 - RNA, 17 nt, Human
cuuggagguagcuuuga

SEQ ID NO: 3046420 - RNA, 17 nt, Human
gaaaauauuauguguuu

SEQ ID NO: 3046421 - RNA, 19 nt, Human
gaaaaucuuauaauuuaaa

SEQ ID NO: 3046422 - RNA, 19 nt, Human
gaaaauaacgauaaaagac

SEQ ID NO: 3046423 - RNA, 16 nt, Human
gaaacacuuugcauaa

SEQ ID NO: 3046424 - RNA, 20 nt, Human
gaaaaucuuauaauuuaaaa

SEQ ID NO: 3046425 - RNA, 22 nt, Human
gaaaacaauaacgauaaaagac

SEQ ID NO: 3046426 - RNA, 14 nt, Human
cuuuuuucuaaagu

SEQ ID NO: 3046427 - RNA, 20 nt, Human
cuuuuacguccaucucuugu

SEQ ID NO: 3046428 - RNA, 13 nt, Human
cucgagaucccaa

SEQ ID NO: 3046429 - RNA, 21 nt, Human
cucgagaucccaacacugcca

SEQ ID NO: 3046430 - RNA, 22 nt, Human
cucgagaucccaacacugccag

SEQ ID NO: 3046431 - RNA, 23 nt, Human
cucgagaucccaacacugccagc

SEQ ID NO: 3046432 - RNA, 12 nt, Human
cuccuccuagcc

SEQ ID NO: 3046433 - RNA, 13 nt, Human
cuccaccugcucu

SEQ ID NO: 3046434 - RNA, 23 nt, Human
cuccaccaagccuggucagccca

SEQ ID NO: 3046435 - RNA, 21 nt, Human
cuccaaugcuguuaucccugc

SEQ ID NO: 3046436 - RNA, 22 nt, Human
cuagguaaauuacaguuccuag

SEQ ID NO: 3046437 - RNA, 13 nt, Human
cuauaauuuaaau

SEQ ID NO: 3046438 - RNA, 13 nt, Human
cuauggccugugg

SEQ ID NO: 3046439 - RNA, 17 nt, Human
cuaugagggccuugagu

SEQ ID NO: 3046440 - RNA, 15 nt, Human
cuaugagggccuuga

SEQ ID NO: 3046441 - RNA, 16 nt, Human
cuaucuguuuacagug

SEQ ID NO: 3046442 - RNA, 13 nt, Human
cuaugagggccuu

SEQ ID NO: 3046443 - RNA, 14 nt, Human
cuauuguagagcca

SEQ ID NO: 3046444 - RNA, 13 nt, Human
cucacauuuauau

SEQ ID NO: 3046445 - RNA, 20 nt, Human
cucugcccgggagcucagga

SEQ ID NO: 3046446 - RNA, 14 nt, Human
cucugcccgggagc

SEQ ID NO: 3046447 - RNA, 19 nt, Human
cucugcaggucccuaauaa

SEQ ID NO: 3046448 - RNA, 20 nt, Human
cucugcaggucccuaauaaa

SEQ ID NO: 3046449 - RNA, 21 nt, Human
cucugcaggucccuaauaaag

SEQ ID NO: 3046450 - RNA, 18 nt, Human
cucugcaggucccuaaua

SEQ ID NO: 3046451 - RNA, 19 nt, Human
cucuggauuauauuaugaa

SEQ ID NO: 3046452 - RNA, 20 nt, Human
cucuggauuauauuaugaag

SEQ ID NO: 3046453 - RNA, 12 nt, Human
cugaauuauuuu

SEQ ID NO: 3046454 - RNA, 12 nt, Human
cugagcaggugu

SEQ ID NO: 3046455 - RNA, 17 nt, Human
cugccuggaccagccuc

SEQ ID NO: 3046456 - RNA, 15 nt, Human
cugccucucugcagg

SEQ ID NO: 3046457 - RNA, 16 nt, Human
cugccucucugcaggu

SEQ ID NO: 3046458 - RNA, 17 nt, Human
cugccucucugcagguc

SEQ ID NO: 3046459 - RNA, 18 nt, Human
cugccucucugcaggucc

SEQ ID NO: 3046460 - RNA, 23 nt, Human
cugccacucaggcccaaagccuc

SEQ ID NO: 3046461 - RNA, 16 nt, Human
cugccacucaggccca

SEQ ID NO: 3046462 - RNA, 18 nt, Human
cugaguuccuagccaccg

SEQ ID NO: 3046463 - RNA, 17 nt, Human
cugaguuccuagccacc

SEQ ID NO: 3046464 - RNA, 16 nt, Human
cugaguuccuagccac

SEQ ID NO: 3046465 - RNA, 15 nt, Human
cugaguuccuagcca

SEQ ID NO: 3046466 - RNA, 13 nt, Human
cugauuguauuua

SEQ ID NO: 3046467 - RNA, 14 nt, Human
gagucccugccugg

SEQ ID NO: 3046468 - RNA, 15 nt, Human
gagucccugccugga

SEQ ID NO: 3046469 - RNA, 14 nt, Human
gagucccugccauc

SEQ ID NO: 3046470 - RNA, 17 nt, Human
gaguauuuuugacagaa

SEQ ID NO: 3046471 - RNA, 16 nt, Human
gaguauuuuugacaga

SEQ ID NO: 3046472 - RNA, 14 nt, Human
gaguauuuuugaca

SEQ ID NO: 3046473 - RNA, 18 nt, Human
gaguauuuuugacagaau

SEQ ID NO: 3046474 - RNA, 16 nt, Human
gagucccugccuggac

SEQ ID NO: 3046475 - RNA, 19 nt, Human
gagucccugccuggaccag

SEQ ID NO: 3046476 - RNA, 22 nt, Human
gagguuuguuuagaagaagugu

SEQ ID NO: 3046477 - RNA, 21 nt, Human
gauaaucagugugucuaaauu

SEQ ID NO: 3046478 - RNA, 17 nt, Human
gauauaaguguguguuu

SEQ ID NO: 3046479 - RNA, 21 nt, Human
gauauaaguguguguuuuuca

SEQ ID NO: 3046480 - RNA, 13 nt, Human
gaguuccuagcca

SEQ ID NO: 3046481 - RNA, 21 nt, Human
gaguugaaaaucuuauaauuu

SEQ ID NO: 3046482 - RNA, 23 nt, Human
gaucuucaucugacuaugacaua

SEQ ID NO: 3046483 - RNA, 16 nt, Human
gaucuucaucugacua

SEQ ID NO: 3046484 - RNA, 21 nt, Human
gaugccuggcgggguggggug

SEQ ID NO: 3046485 - RNA, 14 nt, Human
gaugacuauggaaa

SEQ ID NO: 3046486 - RNA, 13 nt, Human
gaugcauggagau

SEQ ID NO: 3046487 - RNA, 20 nt, Human
gaugcauggagauagcccca

SEQ ID NO: 3046488 - RNA, 17 nt, Human
gaugcaauguagagggg

SEQ ID NO: 3046489 - RNA, 21 nt, Human
gauguguccugauaagcugag

SEQ ID NO: 3046490 - RNA, 23 nt, Human
gauguggaaaagccaagaggcug

SEQ ID NO: 3046491 - RNA, 21 nt, Human
gauguggaaaagccaagaggc

SEQ ID NO: 3046492 - RNA, 22 nt, Human
gauuaagaucucagugguuaag

SEQ ID NO: 3046493 - RNA, 23 nt, Human
gagcucaggaaccgaggcaggga

SEQ ID NO: 3046494 - RNA, 22 nt, Human
gagcucaggaaccgaggcaggg

SEQ ID NO: 3046495 - RNA, 14 nt, Human
gagcuacaaaugca

SEQ ID NO: 3046496 - RNA, 13 nt, Human
gagcuacaaaugc

SEQ ID NO: 3046497 - RNA, 12 nt, Human
gagcuacaaaug

SEQ ID NO: 3046498 - RNA, 12 nt, Human
gagccugcagag

SEQ ID NO: 3046499 - RNA, 15 nt, Human
gagccugcagagcug

SEQ ID NO: 3046500 - RNA, 13 nt, Human
gagcaaagcugau

SEQ ID NO: 3046501 - RNA, 13 nt, Human
gaggagggcaggc

SEQ ID NO: 3046502 - RNA, 14 nt, Human
gaggagggcaggca

SEQ ID NO: 3046503 - RNA, 15 nt, Human
gaggagggcaggcau

SEQ ID NO: 3046504 - RNA, 15 nt, Human
gaggaugucugggcc

SEQ ID NO: 3046505 - RNA, 21 nt, Human
gccagacuucccacggcuccu

SEQ ID NO: 3046506 - RNA, 16 nt, Human
gccaccugaauaaaga

SEQ ID NO: 3046507 - RNA, 19 nt, Human
gccaccgccuccuacagcc

SEQ ID NO: 3046508 - RNA, 15 nt, Human
gccacgauugcagga

SEQ ID NO: 3046509 - RNA, 20 nt, Human
gccaaugugaacagcggcug

SEQ ID NO: 3046510 - RNA, 23 nt, Human
gcccaaaccaccagaagcccaga

SEQ ID NO: 3046511 - RNA, 22 nt, Human
gcccaaaccaccagaagcccag

SEQ ID NO: 3046512 - RNA, 21 nt, Human
gcccaaaccaccagaagccca

SEQ ID NO: 3046513 - RNA, 13 nt, Human
gccaggcuggguc

SEQ ID NO: 3046514 - RNA, 23 nt, Human
gcaggcaucggggagccgggagc

SEQ ID NO: 3046515 - RNA, 21 nt, Human
gcaggcaucggggagccggga

SEQ ID NO: 3046516 - RNA, 22 nt, Human
gcaggcaucggggagccgggag

SEQ ID NO: 3046517 - RNA, 14 nt, Human
gcaggucccuaaua

SEQ ID NO: 3046518 - RNA, 15 nt, Human
gcaggucccuaauaa

SEQ ID NO: 3046519 - RNA, 17 nt, Human
gcagugggccuggccag

SEQ ID NO: 3046520 - RNA, 15 nt, Human
gcagugggccuggcc

SEQ ID NO: 3046521 - RNA, 16 nt, Human
gcagugggccuggcca

SEQ ID NO: 3046522 - RNA, 23 nt, Human
gcaggucccuaauaaagcugugu

SEQ ID NO: 3046523 - RNA, 20 nt, Human
gcaggucccuaauaaagcug

SEQ ID NO: 3046524 - RNA, 21 nt, Human
gcaggucccuaauaaagcugu

SEQ ID NO: 3046525 - RNA, 16 nt, Human
gcaggucccuaauaaa

SEQ ID NO: 3046526 - RNA, 17 nt, Human
gcaggucccuaauaaag

SEQ ID NO: 3046527 - RNA, 18 nt, Human
gcaggucccuaauaaagc

SEQ ID NO: 3046528 - RNA, 19 nt, Human
gcaggucccuaauaaagcu

SEQ ID NO: 3046529 - RNA, 20 nt, Human
gcaucuagcaugucgucaaa

SEQ ID NO: 3046530 - RNA, 22 nt, Human
gcagauggaaugcuguguuaaa

SEQ ID NO: 3046531 - RNA, 18 nt, Human
gcaggaaauggcugugga

SEQ ID NO: 3046532 - RNA, 17 nt, Human
gcaccacacucagcccu

SEQ ID NO: 3046533 - RNA, 15 nt, Human
gcaccacacucagcc

SEQ ID NO: 3046534 - RNA, 21 nt, Human
gcugggaggagggcaggcauc

SEQ ID NO: 3046535 - RNA, 22 nt, Human
gcugggcuuggcagcccggguc

SEQ ID NO: 3046536 - RNA, 14 nt, Human
gcuggggaugucuc

SEQ ID NO: 3046537 - RNA, 19 nt, Human
gcuguggccuaaccugccg

SEQ ID NO: 3046538 - RNA, 20 nt, Human
gcuguggccuaaccugccga

SEQ ID NO: 3046539 - RNA, 16 nt, Human
gcugugugcucuccaa

SEQ ID NO: 3046540 - RNA, 16 nt, Human
gcuguguggcagucug

SEQ ID NO: 3046541 - RNA, 18 nt, Human
gcuguguuaaauaaaccu

SEQ ID NO: 3046542 - RNA, 11 nt, Human
gcuucauacac

SEQ ID NO: 3046543 - RNA, 10 nt, Human
gcuucauaca

SEQ ID NO: 3046544 - RNA, 12 nt, Human
gcuuguguuaag

SEQ ID NO: 3046545 - RNA, 14 nt, Human
gcuuuccaaagcca

SEQ ID NO: 3046546 - RNA, 13 nt, Human
gcuuuuaugugaa

SEQ ID NO: 3046547 - RNA, 15 nt, Human
gcuuuuaugugaaac

SEQ ID NO: 3046548 - RNA, 14 nt, Human
gcugauuguauuua

SEQ ID NO: 3046549 - RNA, 15 nt, Human
gcucuccaagcccag

SEQ ID NO: 3046550 - RNA, 19 nt, Human
gcucuugaugccuggcggg

SEQ ID NO: 3046551 - RNA, 15 nt, Human
gcuccuuaaggcucu

SEQ ID NO: 3046552 - RNA, 17 nt, Human
gcuccuuaaggcucuuu

SEQ ID NO: 3046553 - RNA, 21 nt, Human
gcuccuuaaggcucuuuugua

SEQ ID NO: 3046554 - RNA, 20 nt, Human
gcuccauuuuuagugaaaua

SEQ ID NO: 3046555 - RNA, 17 nt, Human
gcuccaggccagggggc

SEQ ID NO: 3046556 - RNA, 18 nt, Human
gcuccaggccagggggcc

SEQ ID NO: 3046557 - RNA, 17 nt, Human
gcuaucguaaaauuaag

SEQ ID NO: 3046558 - RNA, 15 nt, Human
gcuaucguaaaauua

SEQ ID NO: 3046559 - RNA, 16 nt, Human
gcuaucguaaaauuaa

SEQ ID NO: 3046560 - RNA, 18 nt, Human
gcucauggacuucugcca

SEQ ID NO: 3046561 - RNA, 16 nt, Human
gccugggcaggaggga

SEQ ID NO: 3046562 - RNA, 13 nt, Human
gccuggucagccc

SEQ ID NO: 3046563 - RNA, 15 nt, Human
gccuggucagcccaa

SEQ ID NO: 3046564 - RNA, 14 nt, Human
gccuggucagccca

SEQ ID NO: 3046565 - RNA, 17 nt, Human
gccuggaccagccucuc

SEQ ID NO: 3046566 - RNA, 16 nt, Human
gccuggaccagccucu

SEQ ID NO: 3046567 - RNA, 17 nt, Human
gcgaagcguuguccuca

SEQ ID NO: 3046568 - RNA, 14 nt, Human
gcgaauuuuaaaag

SEQ ID NO: 3046569 - RNA, 16 nt, Human
gcgaauuuuaaaagau

SEQ ID NO: 3046570 - RNA, 15 nt, Human
gcgaauuuuaaaaga

SEQ ID NO: 3046571 - RNA, 15 nt, Human
gccuugucacgccag

SEQ ID NO: 3046572 - RNA, 16 nt, Human
gccuugucacgccaga

SEQ ID NO: 3046573 - RNA, 17 nt, Human
gccuugucacgccagac

SEQ ID NO: 3046574 - RNA, 12 nt, Human
ggaccagccucu

SEQ ID NO: 3046575 - RNA, 21 nt, Human
gcuuuuaugugaaacauguuu

SEQ ID NO: 3046576 - RNA, 19 nt, Human
gcuuuuaugugaaacaugu

SEQ ID NO: 3046577 - RNA, 20 nt, Human
gcuuuuaugugaaacauguu

SEQ ID NO: 3046578 - RNA, 19 nt, Human
ggagacagguuagcugcuc

SEQ ID NO: 3046579 - RNA, 18 nt, Human
ggacugagaaauuuauaa

SEQ ID NO: 3046580 - RNA, 14 nt, Human
ggacugagaaauuu

SEQ ID NO: 3046581 - RNA, 21 nt, Human
ggagcucaggaaccgaggcag

SEQ ID NO: 3046582 - RNA, 17 nt, Human
ggagccugcagagcugc

SEQ ID NO: 3046583 - RNA, 20 nt, Human
ggagcccugggaggcucugg

SEQ ID NO: 3046584 - RNA, 16 nt, Human
ggagccuacccacccc

SEQ ID NO: 3046585 - RNA, 16 nt, Human
ggagcccugggaggcu

SEQ ID NO: 3046586 - RNA, 19 nt, Human
ggagcccugggaggcucug

SEQ ID NO: 3046587 - RNA, 14 nt, Human
ggagggcaggcauc

SEQ ID NO: 3046588 - RNA, 17 nt, Human
ggaggcaggaguuucgu

SEQ ID NO: 3046589 - RNA, 12 nt, Human
ggauuauauuau

SEQ ID NO: 3046590 - RNA, 16 nt, Human
ggauucugagagcugu

SEQ ID NO: 3046591 - RNA, 18 nt, Human
ggaugaugacuauggaaa

SEQ ID NO: 3046592 - RNA, 21 nt, Human
ggcuguggcauccagaguccc

SEQ ID NO: 3046593 - RNA, 23 nt, Human
ggcuguggcauccagagucccug

SEQ ID NO: 3046594 - RNA, 20 nt, Human
ggcugggaggagggcaggca

SEQ ID NO: 3046595 - RNA, 21 nt, Human
ggcugggaggagggcaggcau

SEQ ID NO: 3046596 - RNA, 13 nt, Human
ggcugggaggagg

SEQ ID NO: 3046597 - RNA, 13 nt, Human
ggcuggacuugga

SEQ ID NO: 3046598 - RNA, 18 nt, Human
ggcuggacuuggagguag

SEQ ID NO: 3046599 - RNA, 23 nt, Human
ggcucuggagcccacuguacuug

SEQ ID NO: 3046600 - RNA, 12 nt, Human
gggagcucagga

SEQ ID NO: 3046601 - RNA, 22 nt, Human
gggagcucaggaaccgaggcag

SEQ ID NO: 3046602 - RNA, 23 nt, Human
gggagcucaggaaccgaggcagg

SEQ ID NO: 3046603 - RNA, 13 nt, Human
gggagccgggagc

SEQ ID NO: 3046604 - RNA, 12 nt, Human
gggaggagggca

SEQ ID NO: 3046605 - RNA, 16 nt, Human
gggaggagggcaggca

SEQ ID NO: 3046606 - RNA, 14 nt, Human
gggacaccuaggcu

SEQ ID NO: 3046607 - RNA, 20 nt, Human
gggacaccaagccuuggcuc

SEQ ID NO: 3046608 - RNA, 15 nt, Human
gggacugagaaauuu

SEQ ID NO: 3046609 - RNA, 19 nt, Human
ggccugggcaggagggagg

SEQ ID NO: 3046610 - RNA, 15 nt, Human
ggccugggcaggagg

SEQ ID NO: 3046611 - RNA, 17 nt, Human
ggccugggcaggaggga

SEQ ID NO: 3046612 - RNA, 16 nt, Human
ggccugacucucagca

SEQ ID NO: 3046613 - RNA, 15 nt, Human
ggccuaaccugccga

SEQ ID NO: 3046614 - RNA, 16 nt, Human
ggccuaaccugccgag

SEQ ID NO: 3046615 - RNA, 21 nt, Human
ggccuaaccugccgagagucc

SEQ ID NO: 3046616 - RNA, 20 nt, Human
ggccucucauuccagaggaa

SEQ ID NO: 3046617 - RNA, 16 nt, Human
ggcucuggagcccacu

SEQ ID NO: 3046618 - RNA, 17 nt, Human
ggcucuggagcccacug

SEQ ID NO: 3046619 - RNA, 19 nt, Human
ggcucuggagcccacugua

SEQ ID NO: 3046620 - RNA, 19 nt, Human
ucagaggguguccugcacc

SEQ ID NO: 3046621 - RNA, 21 nt, Human
ucagaguaauccaagcaaaug

SEQ ID NO: 3046622 - RNA, 22 nt, Human
ucagaguaauccaagcaaaugu

SEQ ID NO: 3046623 - RNA, 19 nt, Human
ucacugcuaagaauauuug

SEQ ID NO: 3046624 - RNA, 20 nt, Human
ucaggagcccugggaggcuc

SEQ ID NO: 3046625 - RNA, 23 nt, Human
ucaggagcccugggaggcucugg

SEQ ID NO: 3046626 - RNA, 19 nt, Human
ucaggagcccugggaggcu

SEQ ID NO: 3046627 - RNA, 18 nt, Human
ucaggagcccugggaggc

SEQ ID NO: 3046628 - RNA, 15 nt, Human
uccaaaauaauuuua

SEQ ID NO: 3046629 - RNA, 19 nt, Human
uccaaaauaauuuuaagaa

SEQ ID NO: 3046630 - RNA, 14 nt, Human
uccagguggcauca

SEQ ID NO: 3046631 - RNA, 18 nt, Human
ucaucugacuaugacaua

SEQ ID NO: 3046632 - RNA, 17 nt, Human
ucaucugacuaugacau

SEQ ID NO: 3046633 - RNA, 12 nt, Human
ucauugugaaau

SEQ ID NO: 3046634 - RNA, 15 nt, Human
ucauugugaaauuau

SEQ ID NO: 3046635 - RNA, 17 nt, Human
ucauugugaaauuauuc

SEQ ID NO: 3046636 - RNA, 18 nt, Human
ucauugugaaauuauuca

SEQ ID NO: 3046637 - RNA, 14 nt, Human
ucauuccagaggaa

SEQ ID NO: 3046638 - RNA, 16 nt, Human
uauguugcauagaaua

SEQ ID NO: 3046639 - RNA, 16 nt, Human
uauguuucaaacuuug

SEQ ID NO: 3046640 - RNA, 15 nt, Human
uauguuucaaacuuu

SEQ ID NO: 3046641 - RNA, 13 nt, Human
uauguuucaaacu

SEQ ID NO: 3046642 - RNA, 12 nt, Human
uauguugcauag

SEQ ID NO: 3046643 - RNA, 12 nt, Human
uauuaauauauu

SEQ ID NO: 3046644 - RNA, 24 nt, Human
uauuuauaaaaauaaaaaacacug

SEQ ID NO: 3046645 - RNA, 14 nt, Human
uauuguguugugaa

SEQ ID NO: 3046646 - RNA, 19 nt, Human
uauucuagcuaauguaaua

SEQ ID NO: 3046647 - RNA, 20 nt, Human
uauucuaaauuuuauaucuu

SEQ ID NO: 3046648 - RNA, 19 nt, Human
uauucuaaauuuuauaucu

SEQ ID NO: 3046649 - RNA, 15 nt, Human
uauucuaaauuuuau

SEQ ID NO: 3046650 - RNA, 14 nt, Human
uauucuaaauuuua

SEQ ID NO: 3046651 - RNA, 12 nt, Human
uauucccaugag

SEQ ID NO: 3046652 - RNA, 17 nt, Human
ucaaauuguaagcaugc

SEQ ID NO: 3046653 - RNA, 20 nt, Human
ucaaauuguaagcaugcaca

SEQ ID NO: 3046654 - RNA, 21 nt, Human
ucaaauauauucagccuggcu

SEQ ID NO: 3046655 - RNA, 22 nt, Human
ucaaauauauucagccuggcuu

SEQ ID NO: 3046656 - RNA, 23 nt, Human
ucaaauauauucagccuggcuuc

SEQ ID NO: 3046657 - RNA, 15 nt, Human
ucaaaaaacuuguaa

SEQ ID NO: 3046658 - RNA, 14 nt, Human
ucaaaaaacuugua

SEQ ID NO: 3046659 - RNA, 17 nt, Human
uauuuuauguugcauag

SEQ ID NO: 3046660 - RNA, 22 nt, Human
uauuuuuuucugaauuauuuuc

SEQ ID NO: 3046661 - RNA, 15 nt, Human
ucugccaggagacag

SEQ ID NO: 3046662 - RNA, 22 nt, Human
ucugucucuggauuauauuaug

SEQ ID NO: 3046663 - RNA, 19 nt, Human
ucuucaucugacuaugaca

SEQ ID NO: 3046664 - RNA, 13 nt, Human
ucuugaaaaaugc

SEQ ID NO: 3046665 - RNA, 16 nt, Human
ucuuaaccagaucauu

SEQ ID NO: 3046666 - RNA, 17 nt, Human
ucuuaaccagaucauug

SEQ ID NO: 3046667 - RNA, 22 nt, Human
ucuuaaccagaucauugugaaa

SEQ ID NO: 3046668 - RNA, 15 nt, Human
ucugacauaaguauu

SEQ ID NO: 3046669 - RNA, 14 nt, Human
ucugaaaauugaug

SEQ ID NO: 3046670 - RNA, 22 nt, Human
ucugaaaauugaugggauuugg

SEQ ID NO: 3046671 - RNA, 21 nt, Human
ucuccuggaagugcuaauuuu

SEQ ID NO: 3046672 - RNA, 13 nt, Human
ucucugcaggucc

SEQ ID NO: 3046673 - RNA, 14 nt, Human
ucucugcagguccc

SEQ ID NO: 3046674 - RNA, 15 nt, Human
ucucugcaggucccu

SEQ ID NO: 3046675 - RNA, 16 nt, Human
ucucugcaggucccua

SEQ ID NO: 3046676 - RNA, 16 nt, Human
ucccuccucugcccgg

SEQ ID NO: 3046677 - RNA, 11 nt, Human
ucccuccuggg

SEQ ID NO: 3046678 - RNA, 19 nt, Human
ucccuccugggaaugaagc

SEQ ID NO: 3046679 - RNA, 15 nt, Human
ucccucuacugggag

SEQ ID NO: 3046680 - RNA, 17 nt, Human
ucccucuacugggagcc

SEQ ID NO: 3046681 - RNA, 16 nt, Human
ucccuaauaaagcugu

SEQ ID NO: 3046682 - RNA, 14 nt, Human
ucccuaauaaagcu

SEQ ID NO: 3046683 - RNA, 15 nt, Human
ucccuaauaaagcug

SEQ ID NO: 3046684 - RNA, 13 nt, Human
ucccugccuggac

SEQ ID NO: 3046685 - RNA, 23 nt, Human
ucccugccugguccucacacuca

SEQ ID NO: 3046686 - RNA, 16 nt, Human
ucccuuccuuccucuc

SEQ ID NO: 3046687 - RNA, 19 nt, Human
ucccuuccuuccucuccug

SEQ ID NO: 3046688 - RNA, 20 nt, Human
uccuaauaaucauuggauuc

SEQ ID NO: 3046689 - RNA, 14 nt, Human
ucgugucuggcaca

SEQ ID NO: 3046690 - RNA, 21 nt, Human
ucgugucuggcacagccuggc

SEQ ID NO: 3046691 - RNA, 22 nt, Human
ucuaugauuccagguggcauca

SEQ ID NO: 3046692 - RNA, 18 nt, Human
ugauuuuuaugccaccug

SEQ ID NO: 3046693 - RNA, 18 nt, Human
ugcaacuuuguauaaaag

SEQ ID NO: 3046694 - RNA, 14 nt, Human
ugcaauuucauaug

SEQ ID NO: 3046695 - RNA, 20 nt, Human
ugcaauuucauaugcuguau

SEQ ID NO: 3046696 - RNA, 22 nt, Human
ugcaauguagaggggaaaagag

SEQ ID NO: 3046697 - RNA, 18 nt, Human
ugcccgggagcucaggaa

SEQ ID NO: 3046698 - RNA, 17 nt, Human
ugcccgggagcucagga

SEQ ID NO: 3046699 - RNA, 18 nt, Human
ugcccagaaugaggcugc

SEQ ID NO: 3046700 - RNA, 17 nt, Human
ugcccagaaugaggcug

SEQ ID NO: 3046701 - RNA, 17 nt, Human
ugccugguccucacacu

SEQ ID NO: 3046702 - RNA, 22 nt, Human
ugccaucauguuuacagaggac

SEQ ID NO: 3046703 - RNA, 21 nt, Human
ugcauuauauuuguaaauuua

SEQ ID NO: 3046704 - RNA, 21 nt, Human
ugacccucaucuuucuuccaa

SEQ ID NO: 3046705 - RNA, 19 nt, Human
ucuugaaggaaaaugauac

SEQ ID NO: 3046706 - RNA, 16 nt, Human
ucuugaauaauguaag

SEQ ID NO: 3046707 - RNA, 13 nt, Human
ugagaaaucuaaa

SEQ ID NO: 3046708 - RNA, 17 nt, Human
ugagaaaucuaaaaaac

SEQ ID NO: 3046709 - RNA, 23 nt, Human
ugaggcugcuuuccaaagccaau

SEQ ID NO: 3046710 - RNA, 20 nt, Human
ugaggcugcuuuccaaagcc

SEQ ID NO: 3046711 - RNA, 16 nt, Human
ugaggcugcuuuccaa

SEQ ID NO: 3046712 - RNA, 19 nt, Human
ugagguggaagagggcugc

SEQ ID NO: 3046713 - RNA, 16 nt, Human
ugaguuggcugggaau

SEQ ID NO: 3046714 - RNA, 14 nt, Human
ugaguuggcuggga

SEQ ID NO: 3046715 - RNA, 17 nt, Human
ugaguuggcugggaaua

SEQ ID NO: 3046716 - RNA, 17 nt, Human
ugauauaaguguguguu

SEQ ID NO: 3046717 - RNA, 23 nt, Human
ugauauaaguguguguuuuucau

SEQ ID NO: 3046718 - RNA, 14 nt, Human
ugaugaaaauauuu

SEQ ID NO: 3046719 - RNA, 13 nt, Human
ugauguacaugua

SEQ ID NO: 3046720 - RNA, 21 nt, Human
ugaugguuguacauauaagug

SEQ ID NO: 3046721 - RNA, 13 nt, Human
ugauguauucuag

SEQ ID NO: 3046722 - RNA, 21 nt, Human
ugauguauucuagcuaaugua

SEQ ID NO: 3046723 - RNA, 14 nt, Human
ugauguauucuagc

SEQ ID NO: 3046724 - RNA, 20 nt, Human
ugauguauucuagcuaaugu

SEQ ID NO: 3046725 - RNA, 13 nt, Human
uguccucagcccc

SEQ ID NO: 3046726 - RNA, 18 nt, Human
uguccugcaccggggccu

SEQ ID NO: 3046727 - RNA, 19 nt, Human
uguaugcuucauacaggga

SEQ ID NO: 3046728 - RNA, 16 nt, Human
uguaugcuucauacag

SEQ ID NO: 3046729 - RNA, 14 nt, Human
uguaugcuucauac

SEQ ID NO: 3046730 - RNA, 13 nt, Human
uguaugcuucaua

SEQ ID NO: 3046731 - RNA, 15 nt, Human
uguagcuuuaucaaa

SEQ ID NO: 3046732 - RNA, 14 nt, Human
uguagcuuuaucaa

SEQ ID NO: 3046733 - RNA, 16 nt, Human
ugguuccagccugcca

SEQ ID NO: 3046734 - RNA, 15 nt, Human
ugguuccagccugcc

SEQ ID NO: 3046735 - RNA, 20 nt, Human
ugguuguacauauaagugau

SEQ ID NO: 3046736 - RNA, 11 nt, Human
uguaaugaaaa

SEQ ID NO: 3046737 - RNA, 12 nt, Human
uguaaugaaaac

SEQ ID NO: 3046738 - RNA, 13 nt, Human
uguaaugaaaacc

SEQ ID NO: 3046739 - RNA, 17 nt, Human
uguaaugaaaaccacau

SEQ ID NO: 3046740 - RNA, 17 nt, Human
uguaaauuuaugugaug

SEQ ID NO: 3046741 - RNA, 14 nt, Human
uguaauaacuguga

SEQ ID NO: 3046742 - RNA, 22 nt, Human
uguaauaacugugaaguuuaca

SEQ ID NO: 3046743 - RNA, 23 nt, Human
uggccuaaccugccgagagucca

SEQ ID NO: 3046744 - RNA, 14 nt, Human
uggccccugagauc

SEQ ID NO: 3046745 - RNA, 15 nt, Human
uggcuccaggccagg

SEQ ID NO: 3046746 - RNA, 21 nt, Human
uggcuugaguuuaaauuguaa

SEQ ID NO: 3046747 - RNA, 14 nt, Human
ugggaaugaagcaa

SEQ ID NO: 3046748 - RNA, 14 nt, Human
ugggaggagggcag

SEQ ID NO: 3046749 - RNA, 17 nt, Human
ugggaggagggcaggca

SEQ ID NO: 3046750 - RNA, 18 nt, Human
ugggaggagggcaggcau

SEQ ID NO: 3046751 - RNA, 17 nt, Human
uggggggcuucauacac

SEQ ID NO: 3046752 - RNA, 17 nt, Human
uggggccaggcuggguc

SEQ ID NO: 3046753 - RNA, 12 nt, Human
ugcuuguguuaa

SEQ ID NO: 3046754 - RNA, 15 nt, Human
ugcuuguguuaagua

SEQ ID NO: 3046755 - RNA, 19 nt, Human
uggaaaagccaagaggcug

SEQ ID NO: 3046756 - RNA, 16 nt, Human
uggaaaagccaagagg

SEQ ID NO: 3046757 - RNA, 17 nt, Human
ugcuuuggaaaacccag

SEQ ID NO: 3046758 - RNA, 19 nt, Human
uggaucaaauccagccugc

SEQ ID NO: 3046759 - RNA, 17 nt, Human
uggagacacaacuauuu

SEQ ID NO: 3046760 - RNA, 19 nt, Human
uuuccaaccggcuuugugg

SEQ ID NO: 3046761 - RNA, 19 nt, Human
uuuaacucuauaauguguu

SEQ ID NO: 3046762 - RNA, 21 nt, Human
uuuauaaaaauaaaaaacacu

SEQ ID NO: 3046763 - RNA, 23 nt, Human
uuuauaaaaauaaaaaacacugg

SEQ ID NO: 3046764 - RNA, 20 nt, Human
uuuacauuguaaauaguauu

SEQ ID NO: 3046765 - RNA, 13 nt, Human
uuguguugugaau

SEQ ID NO: 3046766 - RNA, 17 nt, Human
uuguaaauaguauuuga

SEQ ID NO: 3046767 - RNA, 21 nt, Human
uuguauucagaguugaugguu

SEQ ID NO: 3046768 - RNA, 21 nt, Human
uuguacgaagaguauuuuuga

SEQ ID NO: 3046769 - RNA, 23 nt, Human
uuguacgaagaguauuuuugaca

SEQ ID NO: 3046770 - RNA, 18 nt, Human
uucugcuuguguuaagua

SEQ ID NO: 3046771 - RNA, 21 nt, Human
uugaaaagaggugugcaagag

SEQ ID NO: 3046772 - RNA, 14 nt, Human
uugaaaagaggugu

SEQ ID NO: 3046773 - RNA, 13 nt, Human
uugaaaagaggug

SEQ ID NO: 3046774 - RNA, 17 nt, Human
uucuuccaaaaagauuu

SEQ ID NO: 3046775 - RNA, 20 nt, Human
uugacaaagucaagccacau

SEQ ID NO: 3046776 - RNA, 19 nt, Human
uugacaaagucaagccaca

SEQ ID NO: 3046777 - RNA, 18 nt, Human
uucggugagcuacaaaug

SEQ ID NO: 3046778 - RNA, 21 nt, Human
uuccugaggaagagggacugu

SEQ ID NO: 3046779 - RNA, 22 nt, Human
uucuacauaaguaauucaagaa

SEQ ID NO: 3046780 - RNA, 14 nt, Human
uucuauagcuuuuc

SEQ ID NO: 3046781 - RNA, 19 nt, Human
uucugagagcugugcauca

SEQ ID NO: 3046782 - RNA, 13 nt, Human
uucugagagcugu

SEQ ID NO: 3046783 - RNA, 21 nt, Human
uuccaaaaagauuuucagaaa

SEQ ID NO: 3046784 - RNA, 23 nt, Human
uucaguuauuauauuuacaaaug

SEQ ID NO: 3046785 - RNA, 20 nt, Human
uucauaaauaaaguuuguug

SEQ ID NO: 3046786 - RNA, 13 nt, Human
uucagcuugggga

SEQ ID NO: 3046787 - RNA, 16 nt, Human
uuauuuuguucauaca

SEQ ID NO: 3046788 - RNA, 14 nt, Human
uuauuuuguucaua

SEQ ID NO: 3046789 - RNA, 16 nt, Human
uucaauaauaaauauu

SEQ ID NO: 3046790 - RNA, 13 nt, Human
uuauuuuaaaaga

SEQ ID NO: 3046791 - RNA, 17 nt, Human
uuauguugcauagaaua

SEQ ID NO: 3046792 - RNA, 16 nt, Human
uuaucuugaauaaugu

SEQ ID NO: 3046793 - RNA, 14 nt, Human
uuaucuugaauaau

SEQ ID NO: 3046794 - RNA, 16 nt, Human
uuauauuuacaaaugg

SEQ ID NO: 3046795 - RNA, 22 nt, Human
uuauacaggucauauuaauaua

SEQ ID NO: 3046796 - RNA, 14 nt, Human
uuauacaggucaua

SEQ ID NO: 3046797 - RNA, 16 nt, Human
uuauauuaugaagcuu

SEQ ID NO: 3046798 - RNA, 15 nt, Human
uuauaucuuguagcu

SEQ ID NO: 3046799 - RNA, 22 nt, Human
uuauaucuuguagcuuuaucaa

SEQ ID NO: 3046800 - RNA, 17 nt, Human
uuauaauuuuaaauguu

SEQ ID NO: 3046801 - RNA, 21 nt, Human
uuauaauuuuaaauguuuuuu

SEQ ID NO: 3046802 - RNA, 12 nt, Human
uuauaauuuaaa

SEQ ID NO: 3046803 - RNA, 12 nt, Human
uuauaauuuuaa

SEQ ID NO: 3046804 - RNA, 19 nt, Human
uuuuacguccaucucuugu

SEQ ID NO: 3046805 - RNA, 21 nt, Human
uuuuaaaguaacccuacaaaa

SEQ ID NO: 3046806 - RNA, 21 nt, Human
uuuuauuuuucucaugaugag

SEQ ID NO: 3046807 - RNA, 23 nt, Human
uuuucagaaaauauuauguguuu

SEQ ID NO: 3046808 - RNA, 21 nt, Human
uuuucaaaauuguuacaaauu

SEQ ID NO: 3046809 - RNA, 22 nt, Human
uuuucagaaaauauuauguguu

SEQ ID NO: 3046810 - RNA, 21 nt, Human
uuuucuuaaccagaucauugu

SEQ ID NO: 3046811 - RNA, 12 nt, Human
uuugaguucuac

SEQ ID NO: 3046812 - RNA, 18 nt, Human
uuugcauaacguauaaaa

SEQ ID NO: 3046813 - RNA, 14 nt, Human
uuuuaaaauccacu

SEQ ID NO: 3046814 - RNA, 23 nt, Human
uuuuaaaauccacuuuaucuuga

SEQ ID NO: 3046815 - RNA, 15 nt, Human
uuuggucaacacuaa

SEQ ID NO: 3046816 - RNA, 11 nt, Human
uuuugacagaa

SEQ ID NO: 3046817 - RNA, 22 nt, Human
uuuugacagaauauguuucaaa

SEQ ID NO: 3046818 - RNA, 23 nt, Human
uuuugacagaauauguuucaaac

SEQ ID NO: 3046819 - RNA, 13 nt, Human
uuuuuaaucuuua

SEQ ID NO: 3046820 - RNA, 23 nt, Human
aguuacuugcugcccugugcucc

SEQ ID NO: 3046821 - RNA, 13 nt, Human
gacugugugcuca

SEQ ID NO: 3046822 - RNA, 22 nt, Human
ggaucugugaggggcucucuca

SEQ ID NO: 3046823 - RNA, 22 nt, Human
ggagcugagcagguguucuuca

SEQ ID NO: 3046824 - RNA, 21 nt, Marburg virus
aacuaauauuacuaacaaaag

SEQ ID NO: 3046825 - RNA, 22 nt, Marburg virus
augccaccacacucaacaccac

SEQ ID NO: 3046826 - RNA, 21 nt, Marburg virus
uaauucucauuguuaacaguu

SEQ ID NO: 3046827 - RNA, 12 nt, Marburg virus
auuuaagggaac

SEQ ID NO: 3046828 - RNA, 21 nt, Marburg virus
auccuugaucaacaccaugac

SEQ ID NO: 3046829 - RNA, 21 nt, Marburg virus
auucaauuguuaucauaguca

SEQ ID NO: 3046830 - RNA, 15 nt, Marburg virus
auauaucaugaaacu

SEQ ID NO: 3046831 - RNA, 20 nt, Marburg virus
ugcuuugaaggaucaagaau

SEQ ID NO: 3046832 - RNA, 19 nt, Marburg virus
uuaauauaauguaagaaau

SEQ ID NO: 3046833 - RNA, 14 nt, Marburg virus
ucuucaagaauaca

SEQ ID NO: 3046834 - RNA, 20 nt, Marburg virus
caacaccacagacccaaaca

SEQ ID NO: 3046835 - RNA, 20 nt, Marburg virus
acuagauuauauaaaagaaa

SEQ ID NO: 3046836 - RNA, 20 nt, Marburg virus
ucaaaaaagaugaacaaaaa

SEQ ID NO: 3046837 - RNA, 23 nt, Marburg virus
augcaaaccauaaggaaaaauga

SEQ ID NO: 3046838 - RNA, 17 nt, Marburg virus
gcucgacgucuuaaaag

SEQ ID NO: 3046839 - RNA, 17 nt, Marburg virus
cacuccauuccauaucc

SEQ ID NO: 3046840 - RNA, 20 nt, Marburg virus
ucggaacaaauugaccaaau

SEQ ID NO: 3046841 - RNA, 15 nt, Marburg virus
ggacauguauaucau

SEQ ID NO: 3046842 - RNA, 13 nt, Marburg virus
aaagucauguuug

SEQ ID NO: 3046843 - RNA, 22 nt, Marburg virus
gcauuuaacuccauaucuuaga

SEQ ID NO: 3046844 - RNA, 14 nt, Marburg virus
gaaaggccccacca

SEQ ID NO: 3046845 - RNA, 16 nt, Marburg virus
uuaaauuugaccaaag

SEQ ID NO: 3046846 - RNA, 14 nt, Marburg virus
ugaagaacauuaau

SEQ ID NO: 3046847 - RNA, 21 nt, Marburg virus
ucaauaugaugcaauuaauca

SEQ ID NO: 3046848 - RNA, 17 nt, Marburg virus
agcuuuuauucagaaua

SEQ ID NO: 3046849 - RNA, 21 nt, Marburg virus
gcaaucuguaaaaaucuuaaa

SEQ ID NO: 3046850 - RNA, 20 nt, Marburg virus
cuugaacucagugaggagac

SEQ ID NO: 3046851 - RNA, 12 nt, Marburg virus
auuauaugauuu

SEQ ID NO: 3046852 - RNA, 14 nt, Marburg virus
cggagaacaggaac

SEQ ID NO: 3046853 - RNA, 20 nt, Marburg virus
gugagacaguccucucagaa

SEQ ID NO: 3046854 - RNA, 15 nt, Marburg virus
ugccaugcuuucacu

SEQ ID NO: 3046855 - RNA, 14 nt, Marburg virus
aaagguuuucuuua

SEQ ID NO: 3046856 - RNA, 16 nt, Marburg virus
aauaucccuugugaau

SEQ ID NO: 3046857 - RNA, 14 nt, Marburg virus
ccacaaccaagcac

SEQ ID NO: 3046858 - RNA, 22 nt, Marburg virus
ccucguaauuucaacuggaaga

SEQ ID NO: 3046859 - RNA, 16 nt, Marburg virus
acugaaaaugaacaaa

SEQ ID NO: 3046860 - RNA, 22 nt, Marburg virus
ucaguucaaagggaaugucugc

SEQ ID NO: 3046861 - RNA, 22 nt, Marburg virus
uagcaacaugaugguuguuacu

SEQ ID NO: 3046862 - RNA, 21 nt, Marburg virus
auuaaguguucuuuguuagaa

SEQ ID NO: 3046863 - RNA, 15 nt, Marburg virus
aucaagcauauuuca

SEQ ID NO: 3046864 - RNA, 13 nt, Marburg virus
uuuaauauucaga

SEQ ID NO: 3046865 - RNA, 23 nt, Marburg virus
aaggaugggucuguguuuauuca

SEQ ID NO: 3046866 - RNA, 22 nt, Marburg virus
uuaauauggccaguuccagcaa

SEQ ID NO: 3046867 - RNA, 20 nt, Marburg virus
uacacaaguagggaaaucac

SEQ ID NO: 3046868 - RNA, 16 nt, Marburg virus
aauuagggaaauacug

SEQ ID NO: 3046869 - RNA, 20 nt, Marburg virus
uauuaaagguuuucuuuaau

SEQ ID NO: 3046870 - RNA, 14 nt, Marburg virus
aacuugaugaugca

SEQ ID NO: 3046871 - RNA, 19 nt, Marburg virus
uuaaaauuaauucacacaa

SEQ ID NO: 3046872 - RNA, 16 nt, Marburg virus
gaugcauuaauguuuu

SEQ ID NO: 3046873 - RNA, 13 nt, Marburg virus
cgucucuuucuaa

SEQ ID NO: 3046874 - RNA, 12 nt, Marburg virus
aaguaauguuuu

SEQ ID NO: 3046875 - RNA, 23 nt, Marburg virus
auggcaucuuuacaccaggaaaa

SEQ ID NO: 3046876 - RNA, 16 nt, Marburg virus
acaugcaauacuugaa

SEQ ID NO: 3046877 - RNA, 14 nt, Marburg virus
uucaccuacaaucu

SEQ ID NO: 3046878 - RNA, 21 nt, Marburg virus
aauuauccuaacaugaagacc

SEQ ID NO: 3046879 - RNA, 14 nt, Marburg virus
cuaacaacacgaaa

SEQ ID NO: 3046880 - RNA, 13 nt, Marburg virus
caauguauaacaa

SEQ ID NO: 3046881 - RNA, 18 nt, Marburg virus
ucucaaaccguacacaag

SEQ ID NO: 3046882 - RNA, 17 nt, Marburg virus
acagcuugcuuuacaca

SEQ ID NO: 3046883 - RNA, 21 nt, Marburg virus
aggauuuuucuccuaaggaaa

SEQ ID NO: 3046884 - RNA, 16 nt, Marburg virus
caccuccaagaacaac

SEQ ID NO: 3046885 - RNA, 17 nt, Marburg virus
uaaaaaucgaagaauau

SEQ ID NO: 3046886 - RNA, 23 nt, Marburg virus
cguaguguucuuuuacuggaagg

SEQ ID NO: 3046887 - RNA, 23 nt, Marburg virus
gacaaguaacaauggaacacaaa

SEQ ID NO: 3046888 - RNA, 21 nt, Marburg virus
aauauaccuacccugauuuau

SEQ ID NO: 3046889 - RNA, 17 nt, Marburg virus
auauuucauucaaacac

SEQ ID NO: 3046890 - RNA, 13 nt, Marburg virus
uuuauaaacaauu

SEQ ID NO: 3046891 - RNA, 20 nt, Marburg virus
accacuauguuauaugcaug

SEQ ID NO: 3046892 - RNA, 14 nt, Marburg virus
aaccuagaugauca

SEQ ID NO: 3046893 - RNA, 15 nt, Marburg virus
auaaguuuaagauau

SEQ ID NO: 3046894 - RNA, 12 nt, Marburg virus
uuacacauuaac

SEQ ID NO: 3046895 - RNA, 16 nt, Marburg virus
uggagaaaaugagaac

SEQ ID NO: 3046896 - RNA, 13 nt, Marburg virus
aucuacugaaauc

SEQ ID NO: 3046897 - RNA, 18 nt, Marburg virus
gaaaaacuaaugaagaac

SEQ ID NO: 3046898 - RNA, 14 nt, Marburg virus
uugucaauaagaca

SEQ ID NO: 3046899 - RNA, 14 nt, Marburg virus
uugccauguuuacu

SEQ ID NO: 3046900 - RNA, 22 nt, Marburg virus
uugugugucagcuguauacaaa

SEQ ID NO: 3046901 - RNA, 11 nt, Marburg virus
augaacaaaaa

SEQ ID NO: 3046902 - RNA, 18 nt, Marburg virus
gcaagaaggaaacaacac

SEQ ID NO: 3046903 - RNA, 20 nt, Marburg virus
cuugaagacauaguuaagac

SEQ ID NO: 3046904 - RNA, 16 nt, Marburg virus
gaaaaacuaugaagaa

SEQ ID NO: 3046905 - RNA, 22 nt, Marburg virus
aagacuuguccaggaauauuuc

SEQ ID NO: 3046906 - RNA, 21 nt, Marburg virus
uuuucacauagguucugauuu

SEQ ID NO: 3046907 - RNA, 10 nt, Marburg virus
uacuggaagg

SEQ ID NO: 3046908 - RNA, 18 nt, Marburg virus
aauuaacuuuuguugcaa

SEQ ID NO: 3046909 - RNA, 20 nt, Marburg virus
aguaaacucaacugaugaug

SEQ ID NO: 3046910 - RNA, 18 nt, Marburg virus
acccauuguucuaccaac

SEQ ID NO: 3046911 - RNA, 20 nt, Marburg virus
auguugaugauuuuaaauac

SEQ ID NO: 3046912 - RNA, 19 nt, Marburg virus
aagaauuuggagcguucag

SEQ ID NO: 3046913 - RNA, 19 nt, Marburg virus
ccugcgauuuucaaagauc

SEQ ID NO: 3046914 - RNA, 14 nt, Marburg virus
aauuaaucauguug

SEQ ID NO: 3046915 - RNA, 15 nt, Marburg virus
gaaaucaacuuggga

SEQ ID NO: 3046916 - RNA, 16 nt, Marburg virus
uuaacuccauaucuua

SEQ ID NO: 3046917 - RNA, 17 nt, Marburg virus
auguuacggaaaaaagc

SEQ ID NO: 3046918 - RNA, 19 nt, Marburg virus
uuauaggaacagauuuaga

SEQ ID NO: 3046919 - RNA, 22 nt, Marburg virus
auguucacucuucauguuguaa

SEQ ID NO: 3046920 - RNA, 14 nt, Marburg virus
cugaaaucaacuug

SEQ ID NO: 3046921 - RNA, 22 nt, Marburg virus
aauauaaaagaacgaucugcug

SEQ ID NO: 3046922 - RNA, 21 nt, Marburg virus
cucacaagauuaguuuguauu

SEQ ID NO: 3046923 - RNA, 20 nt, Marburg virus
ucaaacaccccaaauuuuca

SEQ ID NO: 3046924 - RNA, 22 nt, Marburg virus
auugggacaacgaguucuugaa

SEQ ID NO: 3046925 - RNA, 18 nt, Marburg virus
auuauccuaacaugaaga

SEQ ID NO: 3046926 - RNA, 16 nt, Marburg virus
uacacguuauaucuuu

SEQ ID NO: 3046927 - RNA, 22 nt, Marburg virus
cuaggaggguuaucauuuuuga

SEQ ID NO: 3046928 - RNA, 16 nt, Marburg virus
cuuugauuuacuaaca

SEQ ID NO: 3046929 - RNA, 12 nt, Marburg virus
uaauagaaguag

SEQ ID NO: 3046930 - RNA, 14 nt, Marburg virus
ucuauuugaugcau

SEQ ID NO: 3046931 - RNA, 19 nt, Marburg virus
uguugaauuaauuguuacu

SEQ ID NO: 3046932 - RNA, 13 nt, Marburg virus
cuucaauaugcag

SEQ ID NO: 3046933 - RNA, 15 nt, Marburg virus
aucagcuaucaaauc

SEQ ID NO: 3046934 - RNA, 21 nt, Marburg virus
ucauucaaacaccccaaauuu

SEQ ID NO: 3046935 - RNA, 14 nt, Marburg virus
ucaacaacagacaa

SEQ ID NO: 3046936 - RNA, 18 nt, Marburg virus
caagaacgccuaguggaa

SEQ ID NO: 3046937 - RNA, 20 nt, Marburg virus
aaaucaacuugggagauuuu

SEQ ID NO: 3046938 - RNA, 18 nt, Marburg virus
uuacauaggauuauauca

SEQ ID NO: 3046939 - RNA, 19 nt, Marburg virus
acuaaaaaucgaagaauau

SEQ ID NO: 3046940 - RNA, 23 nt, Marburg virus
gauaagagucaaaaacuuccaaa

SEQ ID NO: 3046941 - RNA, 14 nt, Marburg virus
uaaaucuugaccuu

SEQ ID NO: 3046942 - RNA, 12 nt, Marburg virus
caaucuguaaaa

SEQ ID NO: 3046943 - RNA, 19 nt, Marburg virus
gaauauuucggaacaaauu

SEQ ID NO: 3046944 - RNA, 18 nt, Marburg virus
gaccaaauaauagugcau

SEQ ID NO: 3046945 - RNA, 20 nt, Marburg virus
ggaguccaucugcauaagaa

SEQ ID NO: 3046946 - RNA, 18 nt, Marburg virus
agugugcugaaaauguua

SEQ ID NO: 3046947 - RNA, 15 nt, Marburg virus
gcaaacauauugaaa

SEQ ID NO: 3046948 - RNA, 12 nt, Marburg virus
agaagaaaaaac

SEQ ID NO: 3046949 - RNA, 23 nt, Marburg virus
aaucaugaagaacauuaagaaaa

SEQ ID NO: 3046950 - RNA, 15 nt, Marburg virus
aagauagacagaaca

SEQ ID NO: 3046951 - RNA, 13 nt, Marburg virus
agauuauaugauu

SEQ ID NO: 3046952 - RNA, 22 nt, Marburg virus
ucaacaauacugugaauuauuc

SEQ ID NO: 3046953 - RNA, 22 nt, Marburg virus
guuaucguugagauuaaaaaga

SEQ ID NO: 3046954 - RNA, 22 nt, Marburg virus
guaguguucuuuuacuggaagg

SEQ ID NO: 3046955 - RNA, 20 nt, Marburg virus
uuaauugggaacaccaugca

SEQ ID NO: 3046956 - RNA, 18 nt, Marburg virus
gcuuaaauguaccaggau

SEQ ID NO: 3046957 - RNA, 18 nt, Marburg virus
cucaauuggaaauuuaaa

SEQ ID NO: 3046958 - RNA, 16 nt, Marburg virus
uguauagauucaauua

SEQ ID NO: 3046959 - RNA, 20 nt, Marburg virus
ugaugcgagggcauuauuca

SEQ ID NO: 3046960 - RNA, 16 nt, Marburg virus
acacuggaagcaauuu

SEQ ID NO: 3046961 - RNA, 15 nt, Marburg virus
ucaaguaugcaaauu

SEQ ID NO: 3046962 - RNA, 20 nt, Marburg virus
agauacgagguuauauaauu

SEQ ID NO: 3046963 - RNA, 22 nt, Marburg virus
aucagucuuaucuuaauccaag

SEQ ID NO: 3046964 - RNA, 22 nt, Marburg virus
auaucgucucaaaccguacaca

SEQ ID NO: 3046965 - RNA, 17 nt, Marburg virus
ggauauuaaauauccau

SEQ ID NO: 3046966 - RNA, 13 nt, Marburg virus
uuucaacuggaag

SEQ ID NO: 3046967 - RNA, 18 nt, Marburg virus
aaauuaauucacacaagg

SEQ ID NO: 3046968 - RNA, 17 nt, Marburg virus
gaaaaaggauguucuua

SEQ ID NO: 3046969 - RNA, 21 nt, Marburg virus
aaaugcuccccaauacagaca

SEQ ID NO: 3046970 - RNA, 13 nt, Marburg virus
auauaucaugaaa

SEQ ID NO: 3046971 - RNA, 13 nt, Marburg virus
uaaucauguugau

SEQ ID NO: 3046972 - RNA, 13 nt, Marburg virus
gucagugauuuuu

SEQ ID NO: 3046973 - RNA, 19 nt, Marburg virus
cuaauauuacuaacaaaag

SEQ ID NO: 3046974 - RNA, 15 nt, Marburg virus
ucgaagaacauuaag

SEQ ID NO: 3046975 - RNA, 23 nt, Marburg virus
ccacaugucucuuuaucagucuu

SEQ ID NO: 3046976 - RNA, 13 nt, Marburg virus
cuccuaaggaaaa

SEQ ID NO: 3046977 - RNA, 17 nt, Marburg virus
acucugaacuaaggaaa

SEQ ID NO: 3046978 - RNA, 22 nt, Marburg virus
ucaacaccacagacccaaacaa

SEQ ID NO: 3046979 - RNA, 22 nt, Marburg virus
uaguuaugaauguuuuaucaug

SEQ ID NO: 3046980 - RNA, 13 nt, Marburg virus
aauaguugucaua

SEQ ID NO: 3046981 - RNA, 18 nt, Marburg virus
cauugagagguauaacac

SEQ ID NO: 3046982 - RNA, 14 nt, Marburg virus
aaaaggaagaauua

SEQ ID NO: 3046983 - RNA, 21 nt, Marburg virus
uucaauaugaugcaauuaauc

SEQ ID NO: 3046984 - RNA, 22 nt, Marburg virus
cagauggacuagcaaaagcauu

SEQ ID NO: 3046985 - RNA, 21 nt, Marburg virus
cagcaaagagcacuaacaaca

SEQ ID NO: 3046986 - RNA, 14 nt, Marburg virus
agacuuccaaacau

SEQ ID NO: 3046987 - RNA, 16 nt, Marburg virus
acgccacagcaagaag

SEQ ID NO: 3046988 - RNA, 20 nt, Marburg virus
uugcaagcgaugugugcuug

SEQ ID NO: 3046989 - RNA, 13 nt, Marburg virus
cuuuauuaagaaa

SEQ ID NO: 3046990 - RNA, 15 nt, Marburg virus
ucugacacaauacau

SEQ ID NO: 3046991 - RNA, 17 nt, Marburg virus
uaguuacucaaauauua

SEQ ID NO: 3046992 - RNA, 21 nt, Marburg virus
aucuugagggacaaauuauug

SEQ ID NO: 3046993 - RNA, 15 nt, Marburg virus
agugguaucaucuua

SEQ ID NO: 3046994 - RNA, 15 nt, Marburg virus
aacuaaacuugcaua

SEQ ID NO: 3046995 - RNA, 14 nt, Marburg virus
aaaauccaguguua

SEQ ID NO: 3046996 - RNA, 23 nt, Marburg virus
auuuaacuccauaucuuagacaa

SEQ ID NO: 3046997 - RNA, 17 nt, Marburg virus
uaaaaaugaaacaacag

SEQ ID NO: 3046998 - RNA, 16 nt, Marburg virus
agaagaagaaaaaacu

SEQ ID NO: 3046999 - RNA, 18 nt, Marburg virus
acucuucauguuguaaau

SEQ ID NO: 3047000 - RNA, 15 nt, Marburg virus
auuaauuccuugaau

SEQ ID NO: 3047001 - RNA, 18 nt, Marburg virus
agauaaccccaguguuaa

SEQ ID NO: 3047002 - RNA, 12 nt, Marburg virus
cucuaaggaaaa

SEQ ID NO: 3047003 - RNA, 16 nt, Marburg virus
cauuguugcaucauuu

SEQ ID NO: 3047004 - RNA, 15 nt, Marburg virus
uaguuaaauuucuag

SEQ ID NO: 3047005 - RNA, 12 nt, Marburg virus
uaaaccaagcaa

SEQ ID NO: 3047006 - RNA, 17 nt, Marburg virus
augcagccgacaagaug

SEQ ID NO: 3047007 - RNA, 18 nt, Marburg virus
aaaucuuacauaggauua

SEQ ID NO: 3047008 - RNA, 19 nt, Marburg virus
gacuucuacuaauaaauau

SEQ ID NO: 3047009 - RNA, 19 nt, Marburg virus
cagugauaagagucaaaaa

SEQ ID NO: 3047010 - RNA, 22 nt, Marburg virus
uaaagcuuuaggacaauugcua

SEQ ID NO: 3047011 - RNA, 19 nt, Marburg virus
caagaagaagaaaaaacua

SEQ ID NO: 3047012 - RNA, 14 nt, Marburg virus
ugaaacaacagaug

SEQ ID NO: 3047013 - RNA, 19 nt, Marburg virus
aaauuagcauggauauuca

SEQ ID NO: 3047014 - RNA, 23 nt, Marburg virus
aaucagcaggguauaacuccaaa

SEQ ID NO: 3047015 - RNA, 18 nt, Marburg virus
augucgaaaguucuugaa

SEQ ID NO: 3047016 - RNA, 18 nt, Marburg virus
gaaaagguuuuuuauucu

SEQ ID NO: 3047017 - RNA, 13 nt, Marburg virus
cuacaaaacacca

SEQ ID NO: 3047018 - RNA, 15 nt, Marburg virus
uguugauuucaaugu

SEQ ID NO: 3047019 - RNA, 23 nt, Marburg virus
acuuucccucuacucugaacuaa

SEQ ID NO: 3047020 - RNA, 15 nt, Marburg virus
ucauauuugauucaa

SEQ ID NO: 3047021 - RNA, 23 nt, Marburg virus
cucccucaccacaaccaagcacg

SEQ ID NO: 3047022 - RNA, 20 nt, Marburg virus
uugaaaaggaagaauuauuc

SEQ ID NO: 3047023 - RNA, 14 nt, Marburg virus
uauucucucuacaa

SEQ ID NO: 3047024 - RNA, 16 nt, Marburg virus
auucaccuacaaucuc

SEQ ID NO: 3047025 - RNA, 14 nt, Marburg virus
acuaacuucaauaa

SEQ ID NO: 3047026 - RNA, 18 nt, Marburg virus
gaggauaaaaggacaaag

SEQ ID NO: 3047027 - RNA, 13 nt, Marburg virus
uaggaacaugaaa

SEQ ID NO: 3047028 - RNA, 19 nt, Marburg virus
ugaauggcuucaacaacag

SEQ ID NO: 3047029 - RNA, 16 nt, Marburg virus
acaguuuuuuguauua

SEQ ID NO: 3047030 - RNA, 13 nt, Marburg virus
ugaacucagugag

SEQ ID NO: 3047031 - RNA, 19 nt, Marburg virus
ucauugcuaaguaaacuca

SEQ ID NO: 3047032 - RNA, 13 nt, Marburg virus
cagcauggcugcc

SEQ ID NO: 3047033 - RNA, 17 nt, Marburg virus
ccaagccaaaucuuuca

SEQ ID NO: 3047034 - RNA, 19 nt, Marburg virus
caaaacuauccaucauauu

SEQ ID NO: 3047035 - RNA, 16 nt, Marburg virus
gguuaccuacuuaucu

SEQ ID NO: 3047036 - RNA, 18 nt, Marburg virus
auggcccgaaaaaugcuc

SEQ ID NO: 3047037 - RNA, 20 nt, Marburg virus
auuaacgacuugucuuaauu

SEQ ID NO: 3047038 - RNA, 14 nt, Marburg virus
uuguugauacccuu

SEQ ID NO: 3047039 - RNA, 15 nt, Marburg virus
auaagcuaucaaaua

SEQ ID NO: 3047040 - RNA, 18 nt, Marburg virus
ucaucaacaaugccaccc

SEQ ID NO: 3047041 - RNA, 22 nt, Marburg virus
gcuucaaaaccaggguuaagag

SEQ ID NO: 3047042 - RNA, 21 nt, Marburg virus
ucuauuuuugaugaucuucaa

SEQ ID NO: 3047043 - RNA, 19 nt, Marburg virus
aacgacuugucuuaauuca

SEQ ID NO: 3047044 - RNA, 21 nt, Marburg virus
caaagacgaucuuugaugaau

SEQ ID NO: 3047045 - RNA, 20 nt, Marburg virus
caggaaaucuuaccacagca

SEQ ID NO: 3047046 - RNA, 18 nt, Marburg virus
aaaacuaaauuaaaauua

SEQ ID NO: 3047047 - RNA, 16 nt, Marburg virus
ugagccacuuucccuc

SEQ ID NO: 3047048 - RNA, 18 nt, Marburg virus
aaauccuugcuguuggau

SEQ ID NO: 3047049 - RNA, 15 nt, Marburg virus
uugacaaucaaauca

SEQ ID NO: 3047050 - RNA, 21 nt, Marburg virus
uaauuaacuguuggcuuagau

SEQ ID NO: 3047051 - RNA, 22 nt, Marburg virus
ugagacaacauaagcuaucaaa

SEQ ID NO: 3047052 - RNA, 13 nt, Marburg virus
guauccucuggag

SEQ ID NO: 3047053 - RNA, 16 nt, Marburg virus
aguuacucaaauauua

SEQ ID NO: 3047054 - RNA, 14 nt, Marburg virus
agaguuaaaaacua

SEQ ID NO: 3047055 - RNA, 19 nt, Marburg virus
aucuaauucucauuguuaa

SEQ ID NO: 3047056 - RNA, 16 nt, Marburg virus
uugaggaucuugcuug

SEQ ID NO: 3047057 - RNA, 14 nt, Marburg virus
auuaagaaaaacua

SEQ ID NO: 3047058 - RNA, 16 nt, Marburg virus
cgacacacagagcaca

SEQ ID NO: 3047059 - RNA, 14 nt, Marburg virus
ggaccugauuguug

SEQ ID NO: 3047060 - RNA, 12 nt, Marburg virus
gaaaauaaucua

SEQ ID NO: 3047061 - RNA, 18 nt, Marburg virus
augguuugauauucaauu

SEQ ID NO: 3047062 - RNA, 15 nt, Marburg virus
ccgaggaaaggacau

SEQ ID NO: 3047063 - RNA, 17 nt, Marburg virus
aucuaugcgaugaugag

SEQ ID NO: 3047064 - RNA, 19 nt, Marburg virus
uauagauucaauuauccuu

SEQ ID NO: 3047065 - RNA, 17 nt, Marburg virus
aaaaaucccaacaaugg

SEQ ID NO: 3047066 - RNA, 14 nt, Marburg virus
cagcaaagagcacu

SEQ ID NO: 3047067 - RNA, 23 nt, Marburg virus
uguuauaugcaugucagugauuu

SEQ ID NO: 3047068 - RNA, 14 nt, Marburg virus
aguaagaaaaacua

SEQ ID NO: 3047069 - RNA, 15 nt, Marburg virus
cguugcucacaggca

SEQ ID NO: 3047070 - RNA, 14 nt, Marburg virus
uuaauucaaucuuu

SEQ ID NO: 3047071 - RNA, 15 nt, Marburg virus
cauauucaaggucaa

SEQ ID NO: 3047072 - RNA, 19 nt, Marburg virus
ucuguaaaaaucuuaaaac

SEQ ID NO: 3047073 - RNA, 22 nt, Marburg virus
uuucguggagcaugaaccucuu

SEQ ID NO: 3047074 - RNA, 13 nt, Marburg virus
agcacgccacagc

SEQ ID NO: 3047075 - RNA, 13 nt, Marburg virus
uccaugccccccc

SEQ ID NO: 3047076 - RNA, 14 nt, Marburg virus
caaucaaaucacuu

SEQ ID NO: 3047077 - RNA, 13 nt, Marburg virus
uuagaauuauuca

SEQ ID NO: 3047078 - RNA, 17 nt, Marburg virus
uccagaguggcaacaaa

SEQ ID NO: 3047079 - RNA, 16 nt, Marburg virus
ucaagacgcuuauuca

SEQ ID NO: 3047080 - RNA, 21 nt, Marburg virus
aaauuaaaauccaguguuaug

SEQ ID NO: 3047081 - RNA, 21 nt, Marburg virus
cauguugaugauuuuaaauac

SEQ ID NO: 3047082 - RNA, 15 nt, Marburg virus
aucuugagaaauaca

SEQ ID NO: 3047083 - RNA, 20 nt, Marburg virus
uacagcaaucauuaauuccu

SEQ ID NO: 3047084 - RNA, 16 nt, Marburg virus
uccuugaucaacacca

SEQ ID NO: 3047085 - RNA, 17 nt, Marburg virus
cagucccucccccaccc

SEQ ID NO: 3047086 - RNA, 17 nt, Marburg virus
aaagauguguugaccuu

SEQ ID NO: 3047087 - RNA, 19 nt, Marburg virus
auuacacauuaaccaugaa

SEQ ID NO: 3047088 - RNA, 15 nt, Marburg virus
gauccuccuaccaac

SEQ ID NO: 3047089 - RNA, 13 nt, Marburg virus
aguuaauuauccu

SEQ ID NO: 3047090 - RNA, 18 nt, Marburg virus
auggacuagcaaaagcau

SEQ ID NO: 3047091 - RNA, 23 nt, Marburg virus
auacgucgauauaauacauacua

SEQ ID NO: 3047092 - RNA, 13 nt, Marburg virus
aggauuauaucau

SEQ ID NO: 3047093 - RNA, 14 nt, Marburg virus
uuuuggaugcaaac

SEQ ID NO: 3047094 - RNA, 19 nt, Marburg virus
uuugaugaaucuucuaguu

SEQ ID NO: 3047095 - RNA, 22 nt, Marburg virus
accuuucuguugauuucaaugu

SEQ ID NO: 3047096 - RNA, 11 nt, Marburg virus
ucccaacaaug

SEQ ID NO: 3047097 - RNA, 22 nt, Marburg virus
aucacccuuguagaguuaaaaa

SEQ ID NO: 3047098 - RNA, 22 nt, Marburg virus
aaaacauauuuauccuugugua

SEQ ID NO: 3047099 - RNA, 17 nt, Marburg virus
uaaugaaccaacaguca

SEQ ID NO: 3047100 - RNA, 12 nt, Marburg virus
uaauaauuuuca

SEQ ID NO: 3047101 - RNA, 15 nt, Marburg virus
aauagccuugucaug

SEQ ID NO: 3047102 - RNA, 13 nt, Marburg virus
caacaccacagac

SEQ ID NO: 3047103 - RNA, 19 nt, Marburg virus
uuuauaucuagaacaaauu

SEQ ID NO: 3047104 - RNA, 14 nt, Marburg virus
aacaaagaauauac

SEQ ID NO: 3047105 - RNA, 19 nt, Marburg virus
cauuguucuaccaacaguc

SEQ ID NO: 3047106 - RNA, 19 nt, Marburg virus
aauaguugucauauaacag

SEQ ID NO: 3047107 - RNA, 15 nt, Marburg virus
cucucagaaucaguu

SEQ ID NO: 3047108 - RNA, 15 nt, Marburg virus
aaggaaacaacacag

SEQ ID NO: 3047109 - RNA, 19 nt, Marburg virus
cacuauguuauaugcaugu

SEQ ID NO: 3047110 - RNA, 18 nt, Marburg virus
uuuuuccacuaaucaauu

SEQ ID NO: 3047111 - RNA, 15 nt, Marburg virus
augcaaaacuaucca

SEQ ID NO: 3047112 - RNA, 14 nt, Marburg virus
aaaacuaugaagaa

SEQ ID NO: 3047113 - RNA, 23 nt, Marburg virus
gcaaagagcacuaacaacacgaa

SEQ ID NO: 3047114 - RNA, 20 nt, Marburg virus
uucgauacacguuauaucuu

SEQ ID NO: 3047115 - RNA, 15 nt, Marburg virus
aggaucaagaauuac

SEQ ID NO: 3047116 - RNA, 14 nt, Marburg virus
aaucaccaauucau

SEQ ID NO: 3047117 - RNA, 20 nt, Marburg virus
agucccucgcccaugucaaa

SEQ ID NO: 3047118 - RNA, 15 nt, Marburg virus
ugagauuaaaaagac

SEQ ID NO: 3047119 - RNA, 20 nt, Marburg virus
gauuuagaucuauuguucau

SEQ ID NO: 3047120 - RNA, 17 nt, Marburg virus
ccaaaccgcaucaucua

SEQ ID NO: 3047121 - RNA, 18 nt, Marburg virus
ucgauauaauacauacua

SEQ ID NO: 3047122 - RNA, 14 nt, Marburg virus
augaucaguucaaa

SEQ ID NO: 3047123 - RNA, 13 nt, Marburg virus
uauaaaauuaaaa

SEQ ID NO: 3047124 - RNA, 17 nt, Marburg virus
guauagucauuauucac

SEQ ID NO: 3047125 - RNA, 17 nt, Marburg virus
caugcccccccacaaca

SEQ ID NO: 3047126 - RNA, 23 nt, Marburg virus
uuauacccacaagagauacuguu

SEQ ID NO: 3047127 - RNA, 15 nt, Marburg virus
cagaguggcaacaaa

SEQ ID NO: 3047128 - RNA, 19 nt, Marburg virus
uggcucgacgucuuaaaag

SEQ ID NO: 3047129 - RNA, 15 nt, Marburg virus
aggacaaagaggguc

SEQ ID NO: 3047130 - RNA, 20 nt, Marburg virus
aaaugggaaggacacuggaa

SEQ ID NO: 3047131 - RNA, 15 nt, Marburg virus
aaaacaugcuacaau

SEQ ID NO: 3047132 - RNA, 17 nt, Marburg virus
gccucauacgaucauuu

SEQ ID NO: 3047133 - RNA, 12 nt, Marburg virus
cccuccaaaccu

SEQ ID NO: 3047134 - RNA, 17 nt, Marburg virus
auuauaaacuuguagaa

SEQ ID NO: 3047135 - RNA, 21 nt, Marburg virus
uacaacuucccuucauauuug

SEQ ID NO: 3047136 - RNA, 22 nt, Marburg virus
gaaauacaaccuugccuuccga

SEQ ID NO: 3047137 - RNA, 23 nt, Marburg virus
gugagacaacauaagcuaucaaa

SEQ ID NO: 3047138 - RNA, 17 nt, Marburg virus
gaaucaaacaugugcuc

SEQ ID NO: 3047139 - RNA, 16 nt, Marburg virus
uaucauucucaaggau

SEQ ID NO: 3047140 - RNA, 20 nt, Marburg virus
augcccccccacaacaccac

SEQ ID NO: 3047141 - RNA, 16 nt, Marburg virus
ugaggaagaucaacau

SEQ ID NO: 3047142 - RNA, 19 nt, Marburg virus
uguaauaugccaauuaaga

SEQ ID NO: 3047143 - RNA, 12 nt, Marburg virus
gcacgccacagc

SEQ ID NO: 3047144 - RNA, 13 nt, Marburg virus
gccaauuaagaaa

SEQ ID NO: 3047145 - RNA, 17 nt, Marburg virus
ucauugugcccuucauu

SEQ ID NO: 3047146 - RNA, 19 nt, Marburg virus
auugccauguacuuggaag

SEQ ID NO: 3047147 - RNA, 23 nt, Marburg virus
uuaaagguuuucuuuaauauuca

SEQ ID NO: 3047148 - RNA, 20 nt, Marburg virus
uauucuuaagcuaucuuaaa

SEQ ID NO: 3047149 - RNA, 23 nt, Marburg virus
uacucuaaugauuguaauaauua

SEQ ID NO: 3047150 - RNA, 18 nt, Marburg virus
aaaaagaugaacaaaaag

SEQ ID NO: 3047151 - RNA, 14 nt, Marburg virus
cuacuaacaacacc

SEQ ID NO: 3047152 - RNA, 21 nt, Marburg virus
aauuaaaaaauuaaaaaacuu

SEQ ID NO: 3047153 - RNA, 23 nt, Marburg virus
auaaucaccaauucauuguaaau

SEQ ID NO: 3047154 - RNA, 16 nt, Marburg virus
auauuucagaaagaaa

SEQ ID NO: 3047155 - RNA, 14 nt, Marburg virus
uuaucauucucaag

SEQ ID NO: 3047156 - RNA, 12 nt, Marburg virus
auaagagucaaa

SEQ ID NO: 3047157 - RNA, 22 nt, Marburg virus
aauugauaaaauauuacuuuga

SEQ ID NO: 3047158 - RNA, 19 nt, Marburg virus
gaagguaugaugaagaaaa

SEQ ID NO: 3047159 - RNA, 22 nt, Marburg virus
aaaauauuacuuugaucaauuu

SEQ ID NO: 3047160 - RNA, 14 nt, Marburg virus
uguugcauaucuuc

SEQ ID NO: 3047161 - RNA, 23 nt, Marburg virus
caguaaaagaagguaugaugaag

SEQ ID NO: 3047162 - RNA, 13 nt, Marburg virus
auaaguuuaagau

SEQ ID NO: 3047163 - RNA, 17 nt, Marburg virus
aucuacauuaauuccuu

SEQ ID NO: 3047164 - RNA, 22 nt, Marburg virus
uuguaagaauuaauuuacucuu

SEQ ID NO: 3047165 - RNA, 11 nt, Marburg virus
uuguaccucua

SEQ ID NO: 3047166 - RNA, 12 nt, Marburg virus
augaucuucaag

SEQ ID NO: 3047167 - RNA, 15 nt, Marburg virus
gcauuggaauagaag

SEQ ID NO: 3047168 - RNA, 14 nt, Marburg virus
aggcauaucuuaau

SEQ ID NO: 3047169 - RNA, 19 nt, Marburg virus
uaaaagaacgaucugcugu

SEQ ID NO: 3047170 - RNA, 13 nt, Marburg virus
uuugauucaagau

SEQ ID NO: 3047171 - RNA, 16 nt, Marburg virus
acagccacugaaaaug

SEQ ID NO: 3047172 - RNA, 14 nt, Marburg virus
ucaacuuaagaaug

SEQ ID NO: 3047173 - RNA, 19 nt, Marburg virus
agaaccacugcaccagcug

SEQ ID NO: 3047174 - RNA, 17 nt, Marburg virus
uacuugggcuugaagac

SEQ ID NO: 3047175 - RNA, 21 nt, Marburg virus
uaguaauguuuuauaaacaau

SEQ ID NO: 3047176 - RNA, 18 nt, Marburg virus
ccuccaaaagacaugugu

SEQ ID NO: 3047177 - RNA, 21 nt, Marburg virus
acagaagggacaauguugaug

SEQ ID NO: 3047178 - RNA, 21 nt, Marburg virus
ggauuuuucuccuaaggaaaa

SEQ ID NO: 3047179 - RNA, 18 nt, Marburg virus
aucaagggaaauaauaac

SEQ ID NO: 3047180 - RNA, 12 nt, Marburg virus
auuaaaaacaag

SEQ ID NO: 3047181 - RNA, 13 nt, Marburg virus
cauauuuuaacuu

SEQ ID NO: 3047182 - RNA, 15 nt, Marburg virus
gacaaguaacaaugg

SEQ ID NO: 3047183 - RNA, 15 nt, Marburg virus
aaguuuuguuacuga

SEQ ID NO: 3047184 - RNA, 16 nt, Marburg virus
auuaaaagaaaaagag

SEQ ID NO: 3047185 - RNA, 21 nt, Marburg virus
ucaauacaacuucccuucaua

SEQ ID NO: 3047186 - RNA, 20 nt, Marburg virus
uauuccuucugaaauaguaa

SEQ ID NO: 3047187 - RNA, 14 nt, Marburg virus
aguucuuuaaauuu

SEQ ID NO: 3047188 - RNA, 20 nt, Marburg virus
guuagacgccaguuauccau

SEQ ID NO: 3047189 - RNA, 15 nt, Marburg virus
uggaauagcagauuu

SEQ ID NO: 3047190 - RNA, 17 nt, Marburg virus
caaucugggaucauauu

SEQ ID NO: 3047191 - RNA, 22 nt, Marburg virus
auuuuuggaugcauuucaccag

SEQ ID NO: 3047192 - RNA, 13 nt, Marburg virus
auaaucugauugu

SEQ ID NO: 3047193 - RNA, 16 nt, Marburg virus
uagagaucaugaccuu

SEQ ID NO: 3047194 - RNA, 19 nt, Marburg virus
aaucuuuuggaugcaaacc

SEQ ID NO: 3047195 - RNA, 15 nt, Marburg virus
uucaacuaaacuugc

SEQ ID NO: 3047196 - RNA, 17 nt, Marburg virus
gacauguauaucaugug

SEQ ID NO: 3047197 - RNA, 12 nt, Marburg virus
ucuuuucucaac

SEQ ID NO: 3047198 - RNA, 19 nt, Marburg virus
ucauucaaacaccccaaau

SEQ ID NO: 3047199 - RNA, 23 nt, Marburg virus
gccuacucuggagaaaaugagaa

SEQ ID NO: 3047200 - RNA, 14 nt, Marburg virus
aucgaugagcucaa

SEQ ID NO: 3047201 - RNA, 18 nt, Marburg virus
gcauauccuuuguugaua

SEQ ID NO: 3047202 - RNA, 19 nt, Marburg virus
uacaaucacccaauuuacu

SEQ ID NO: 3047203 - RNA, 24 nt, Marburg virus
caaaauauaucuuuugcaagcgau

SEQ ID NO: 3047204 - RNA, 16 nt, Marburg virus
ucgggcuguuccuccc

SEQ ID NO: 3047205 - RNA, 18 nt, Marburg virus
auauaaguggcuuaaauu

SEQ ID NO: 3047206 - RNA, 19 nt, Marburg virus
uaauuucaacuggaagaac

SEQ ID NO: 3047207 - RNA, 11 nt, Marburg virus
uaaaagggaaa

SEQ ID NO: 3047208 - RNA, 13 nt, Marburg virus
uuucauucaaugu

SEQ ID NO: 3047209 - RNA, 16 nt, Marburg virus
uacuuaagucauucuu

SEQ ID NO: 3047210 - RNA, 20 nt, Marburg virus
guuucaccuuucuguugauu

SEQ ID NO: 3047211 - RNA, 16 nt, Marburg virus
agaagcauuauugcau

SEQ ID NO: 3047212 - RNA, 12 nt, Marburg virus
uaauaaaugcuc

SEQ ID NO: 3047213 - RNA, 14 nt, Marburg virus
uuaaucauguugau

SEQ ID NO: 3047214 - RNA, 13 nt, Marburg virus
cucauaacauccg

SEQ ID NO: 3047215 - RNA, 20 nt, Marburg virus
aucuauuugaccucagacau

SEQ ID NO: 3047216 - RNA, 17 nt, Marburg virus
gagauuaaaaagacuac

SEQ ID NO: 3047217 - RNA, 23 nt, Marburg virus
cuggaagaaccacugcaccagcu

SEQ ID NO: 3047218 - RNA, 17 nt, Marburg virus
gaaaaacuaugaagaac

SEQ ID NO: 3047219 - RNA, 19 nt, Marburg virus
gauuaguuuguauugauuu

SEQ ID NO: 3047220 - RNA, 15 nt, Marburg virus
gcaugaauguugauc

SEQ ID NO: 3047221 - RNA, 14 nt, Marburg virus
auaauuuucacaau

SEQ ID NO: 3047222 - RNA, 15 nt, Marburg virus
auguaaugaacaaua

SEQ ID NO: 3047223 - RNA, 13 nt, Marburg virus
aaucaccaauuca

SEQ ID NO: 3047224 - RNA, 14 nt, Marburg virus
aacuccauuccccc

SEQ ID NO: 3047225 - RNA, 20 nt, Marburg virus
accuugaaagaguuaaaugg

SEQ ID NO: 3047226 - RNA, 14 nt, Marburg virus
caauuaaucauguu

SEQ ID NO: 3047227 - RNA, 16 nt, Marburg virus
gacgucuucauugaga

SEQ ID NO: 3047228 - RNA, 16 nt, Marburg virus
uucuuuaauauucaga

SEQ ID NO: 3047229 - RNA, 16 nt, Marburg virus
uauuucaacuuaagaa

SEQ ID NO: 3047230 - RNA, 12 nt, Marburg virus
aaccaaaacaau

SEQ ID NO: 3047231 - RNA, 20 nt, Marburg virus
gaauacaacuccacgaagaa

SEQ ID NO: 3047232 - RNA, 19 nt, Marburg virus
accaccucguaauuucaac

SEQ ID NO: 3047233 - RNA, 16 nt, Marburg virus
accucuaaggaaaauc

SEQ ID NO: 3047234 - RNA, 22 nt, Marburg virus
acaauggauuugcauuuaacuc

SEQ ID NO: 3047235 - RNA, 12 nt, Marburg virus
cugguuuucuua

SEQ ID NO: 3047236 - RNA, 14 nt, Marburg virus
uaaauaguugucau

SEQ ID NO: 3047237 - RNA, 15 nt, Marburg virus
uaauugggaacacca

SEQ ID NO: 3047238 - RNA, 13 nt, Marburg virus
aauuuucaaucau

SEQ ID NO: 3047239 - RNA, 18 nt, Marburg virus
aguauacuguaacauaua

SEQ ID NO: 3047240 - RNA, 21 nt, Marburg virus
aauaaaugcuccaauugauuu

SEQ ID NO: 3047241 - RNA, 14 nt, Marburg virus
ucuuauugcgagac

SEQ ID NO: 3047242 - RNA, 18 nt, Marburg virus
aaaccauaaggaaaaaug

SEQ ID NO: 3047243 - RNA, 14 nt, Marburg virus
ugcauaucuuccaa

SEQ ID NO: 3047244 - RNA, 18 nt, Marburg virus
uccaucugcauaagaagc

SEQ ID NO: 3047245 - RNA, 22 nt, Marburg virus
cuguaaucaacacugcuguauc

SEQ ID NO: 3047246 - RNA, 19 nt, Marburg virus
cacauagguucugauuuag

SEQ ID NO: 3047247 - RNA, 16 nt, Marburg virus
gaaguauccucuggag

SEQ ID NO: 3047248 - RNA, 18 nt, Marburg virus
aauacaacuccacgaaga

SEQ ID NO: 3047249 - RNA, 19 nt, Marburg virus
ccacugaaaaugaacaaac

SEQ ID NO: 3047250 - RNA, 19 nt, Marburg virus
uucaauguuaguuacucaa

SEQ ID NO: 3047251 - RNA, 12 nt, Marburg virus
gaagggacaaug

SEQ ID NO: 3047252 - RNA, 22 nt, Marburg virus
ugcaacaaccccguggaaggag

SEQ ID NO: 3047253 - RNA, 20 nt, Marburg virus
uuuuugcaaacauauugaaa

SEQ ID NO: 3047254 - RNA, 12 nt, Marburg virus
guugcccuccaa

SEQ ID NO: 3047255 - RNA, 14 nt, Marburg virus
aauuucaacuggaa

SEQ ID NO: 3047256 - RNA, 16 nt, Marburg virus
auuuuccuuaauuaau

SEQ ID NO: 3047257 - RNA, 15 nt, Marburg virus
auacaaagacacuaa

SEQ ID NO: 3047258 - RNA, 21 nt, Marburg virus
caggaaaucuuaccacagcaa

SEQ ID NO: 3047259 - RNA, 23 nt, Marburg virus
ccagagaucaaacccacaagcac

SEQ ID NO: 3047260 - RNA, 19 nt, Marburg virus
uauaggaacagauuuagag

SEQ ID NO: 3047261 - RNA, 14 nt, Marburg virus
uauaagcaucucuu

SEQ ID NO: 3047262 - RNA, 16 nt, Marburg virus
aguauaaaguauaauu

SEQ ID NO: 3047263 - RNA, 13 nt, Marburg virus
auugauauugaac

SEQ ID NO: 3047264 - RNA, 15 nt, Marburg virus
cauagaaaacauauu

SEQ ID NO: 3047265 - RNA, 12 nt, Marburg virus
aacaugaaaauu

SEQ ID NO: 3047266 - RNA, 19 nt, Marburg virus
auuacuacggguuaugaug

SEQ ID NO: 3047267 - RNA, 17 nt, Marburg virus
aucaacaaugccaccca

SEQ ID NO: 3047268 - RNA, 15 nt, Marburg virus
auuaauccuugaagu

SEQ ID NO: 3047269 - RNA, 13 nt, Marburg virus
aauccgaaauugc

SEQ ID NO: 3047270 - RNA, 17 nt, Marburg virus
ucaacuggaagaaccac

SEQ ID NO: 3047271 - RNA, 17 nt, Marburg virus
uaaacuugcauauccuu

SEQ ID NO: 3047272 - RNA, 16 nt, Marburg virus
uauuucggaacaaauu

SEQ ID NO: 3047273 - RNA, 15 nt, Marburg virus
aaacagacauauaca

SEQ ID NO: 3047274 - RNA, 15 nt, Marburg virus
uucauaaucuguuug

SEQ ID NO: 3047275 - RNA, 16 nt, Marburg virus
cauuuuuggaugcauu

SEQ ID NO: 3047276 - RNA, 13 nt, Marburg virus
aaaaacuaaauua

SEQ ID NO: 3047277 - RNA, 23 nt, Marburg virus
acagaggauugagucauauuaug

SEQ ID NO: 3047278 - RNA, 16 nt, Marburg virus
cuaauauuacuaacaa

SEQ ID NO: 3047279 - RNA, 21 nt, Marburg virus
agauauugggaaauuggauga

SEQ ID NO: 3047280 - RNA, 12 nt, Marburg virus
uuucuucaauau

SEQ ID NO: 3047281 - RNA, 15 nt, Marburg virus
ucucgaggcaaggac

SEQ ID NO: 3047282 - RNA, 13 nt, Marburg virus
ugucaauaagaca

SEQ ID NO: 3047283 - RNA, 22 nt, Marburg virus
cuuucacuuuagaggcaauaau

SEQ ID NO: 3047284 - RNA, 19 nt, Marburg virus
cagagaaguuacacaagag

SEQ ID NO: 3047285 - RNA, 14 nt, Marburg virus
aacaacacagacca

SEQ ID NO: 3047286 - RNA, 23 nt, Marburg virus
agaauuauucauccaaguuguuu

SEQ ID NO: 3047287 - RNA, 22 nt, Marburg virus
auuuauucgauuggaugcacuu

SEQ ID NO: 3047288 - RNA, 16 nt, Marburg virus
cuuguaguaaggggac

SEQ ID NO: 3047289 - RNA, 20 nt, Marburg virus
acuugcauauccuuuguuga

SEQ ID NO: 3047290 - RNA, 14 nt, Marburg virus
uacuauugugugag

SEQ ID NO: 3047291 - RNA, 18 nt, Marburg virus
caguucuaagagaacaca

SEQ ID NO: 3047292 - RNA, 18 nt, Marburg virus
uagaucacggaucaagca

SEQ ID NO: 3047293 - RNA, 18 nt, Marburg virus
uaagagaacacagucaaa

SEQ ID NO: 3047294 - RNA, 15 nt, Marburg virus
auuguggacauguau

SEQ ID NO: 3047295 - RNA, 13 nt, Marburg virus
caaacacuuggaa

SEQ ID NO: 3047296 - RNA, 14 nt, Marburg virus
ccaagcaauugacu

SEQ ID NO: 3047297 - RNA, 18 nt, Marburg virus
aucauauuuuaacuucca

SEQ ID NO: 3047298 - RNA, 19 nt, Marburg virus
auuaagaaaaacuaugaag

SEQ ID NO: 3047299 - RNA, 18 nt, Marburg virus
uugagggacaaauuauug

SEQ ID NO: 3047300 - RNA, 16 nt, Marburg virus
cacagcaaagagcacu

SEQ ID NO: 3047301 - RNA, 18 nt, Marburg virus
auuaaaaaauuaaaaaac

SEQ ID NO: 3047302 - RNA, 18 nt, Marburg virus
cguaguuaaauuucuaga

SEQ ID NO: 3047303 - RNA, 22 nt, Marburg virus
uuaaauuagcauggauauucau

SEQ ID NO: 3047304 - RNA, 17 nt, Marburg virus
cuguuuuaauuaagaaa

SEQ ID NO: 3047305 - RNA, 13 nt, Marburg virus
caccacaauucag

SEQ ID NO: 3047306 - RNA, 18 nt, Marburg virus
uguguuuucaaauuuaua

SEQ ID NO: 3047307 - RNA, 17 nt, Marburg virus
gcuccggaacucuccag

SEQ ID NO: 3047308 - RNA, 16 nt, Marburg virus
cugaaauaguaagaaa

SEQ ID NO: 3047309 - RNA, 14 nt, Marburg virus
aacauuucuucaga

SEQ ID NO: 3047310 - RNA, 18 nt, Marburg virus
uccagcaauuacaacaca

SEQ ID NO: 3047311 - RNA, 15 nt, Marburg virus
acuaaucaauucacc

SEQ ID NO: 3047312 - RNA, 22 nt, Marburg virus
gcagacuuuuccuugaaucaaa

SEQ ID NO: 3047313 - RNA, 20 nt, Marburg virus
uggaugcauuucaccagauu

SEQ ID NO: 3047314 - RNA, 15 nt, Marburg virus
cuuucuuuuugcaaa

SEQ ID NO: 3047315 - RNA, 14 nt, Marburg virus
auauuaaagguuuu

SEQ ID NO: 3047316 - RNA, 15 nt, Marburg virus
cauacuguggcugcg

SEQ ID NO: 3047317 - RNA, 20 nt, Marburg virus
cucuaaugauuguaauaauu

SEQ ID NO: 3047318 - RNA, 18 nt, Marburg virus
aaaguugcugauuccccu

SEQ ID NO: 3047319 - RNA, 15 nt, Marburg virus
uaacuuuucaauguu

SEQ ID NO: 3047320 - RNA, 11 nt, Marburg virus
auuugaugcau

SEQ ID NO: 3047321 - RNA, 17 nt, Marburg virus
aauagauccuugaucaa

SEQ ID NO: 3047322 - RNA, 18 nt, Marburg virus
ugaugcagaguuaagaau

SEQ ID NO: 3047323 - RNA, 22 nt, Marburg virus
acugcugguuuaauuaaaaacc

SEQ ID NO: 3047324 - RNA, 21 nt, Marburg virus
guguaacggaucccucuggaa

SEQ ID NO: 3047325 - RNA, 20 nt, Marburg virus
ucuuaaacuugaugaugcag

SEQ ID NO: 3047326 - RNA, 17 nt, Marburg virus
caccucguaauuucaac

SEQ ID NO: 3047327 - RNA, 15 nt, Marburg virus
auaguaauguuuuau

SEQ ID NO: 3047328 - RNA, 19 nt, Marburg virus
acuugaugaugcagcucug

SEQ ID NO: 3047329 - RNA, 13 nt, Marburg virus
gccuacucuggag

SEQ ID NO: 3047330 - RNA, 15 nt, Marburg virus
aucuugaccuuaauu

SEQ ID NO: 3047331 - RNA, 23 nt, Marburg virus
cacaagguggggaggaacaugca

SEQ ID NO: 3047332 - RNA, 13 nt, Marburg virus
ggucauuaagaag

SEQ ID NO: 3047333 - RNA, 22 nt, Marburg virus
uaauuguaggauuccacaucau

SEQ ID NO: 3047334 - RNA, 18 nt, Marburg virus
uuaagaaucaacuaacaa

SEQ ID NO: 3047335 - RNA, 13 nt, Marburg virus
aauuucuugaaaa

SEQ ID NO: 3047336 - RNA, 20 nt, Marburg virus
cuugggagauuuuuaagaag

SEQ ID NO: 3047337 - RNA, 17 nt, Marburg virus
ccaagcacgccacagca

SEQ ID NO: 3047338 - RNA, 15 nt, Marburg virus
cuaagugaaggagag

SEQ ID NO: 3047339 - RNA, 23 nt, Marburg virus
aacuauaauucaggggaaauuga

SEQ ID NO: 3047340 - RNA, 21 nt, Marburg virus
uaaaaacccaaagucaacaau

SEQ ID NO: 3047341 - RNA, 12 nt, Marburg virus
acugagagggaa

SEQ ID NO: 3047342 - RNA, 22 nt, Marburg virus
acugaaaaugaacaaaccagug

SEQ ID NO: 3047343 - RNA, 16 nt, Marburg virus
cuguuuuaauuaagaa

SEQ ID NO: 3047344 - RNA, 13 nt, Marburg virus
uugagucauauua

SEQ ID NO: 3047345 - RNA, 13 nt, Marburg virus
guugacaaucaaa

SEQ ID NO: 3047346 - RNA, 16 nt, Marburg virus
aauauaaaugaaaaca

SEQ ID NO: 3047347 - RNA, 15 nt, Marburg virus
caucuuauuaaauag

SEQ ID NO: 3047348 - RNA, 19 nt, Marburg virus
uaagaaauuagggaaauac

SEQ ID NO: 3047349 - RNA, 20 nt, Marburg virus
ugacuuauuagccagaaguu

SEQ ID NO: 3047350 - RNA, 21 nt, Marburg virus
agcuuuauauguaaugaacaa

SEQ ID NO: 3047351 - RNA, 19 nt, Marburg virus
cucaccacugcccacagcc

SEQ ID NO: 3047352 - RNA, 22 nt, Marburg virus
uauuauagaggaacuaauauua

SEQ ID NO: 3047353 - RNA, 22 nt, Marburg virus
aaacaauuuggucugcagguug

SEQ ID NO: 3047354 - RNA, 14 nt, Marburg virus
auuguaagaauuaa

SEQ ID NO: 3047355 - RNA, 15 nt, Marburg virus
ggacaaugauuauug

SEQ ID NO: 3047356 - RNA, 18 nt, Marburg virus
acucuggagaaaaugaga

SEQ ID NO: 3047357 - RNA, 22 nt, Marburg virus
cuaaacgaaguaacaacaagag

SEQ ID NO: 3047358 - RNA, 18 nt, Marburg virus
cuagaugaucaguucaaa

SEQ ID NO: 3047359 - RNA, 17 nt, Marburg virus
caguagugcagaaagca

SEQ ID NO: 3047360 - RNA, 21 nt, Marburg virus
ugcaagcgaugugugcuugaa

SEQ ID NO: 3047361 - RNA, 23 nt, Marburg virus
caaagagcacuaacaacacgaaa

SEQ ID NO: 3047362 - RNA, 15 nt, Marburg virus
auaaggaaaaaugag

SEQ ID NO: 3047363 - RNA, 16 nt, Marburg virus
ugugucaaauucauuu

SEQ ID NO: 3047364 - RNA, 16 nt, Marburg virus
ucaaacccacaagcac

SEQ ID NO: 3047365 - RNA, 16 nt, Marburg virus
guucacucuucauguu

SEQ ID NO: 3047366 - RNA, 14 nt, Marburg virus
acaaucaaaucacu

SEQ ID NO: 3047367 - RNA, 17 nt, Marburg virus
ugacuauccuaaaugca

SEQ ID NO: 3047368 - RNA, 15 nt, Marburg virus
aggauaaaaggacaa

SEQ ID NO: 3047369 - RNA, 16 nt, Marburg virus
caaagagcacuaacaa

SEQ ID NO: 3047370 - RNA, 14 nt, Marburg virus
gcaauuacaugaga

SEQ ID NO: 3047371 - RNA, 13 nt, Marburg virus
cuauuugaugcau

SEQ ID NO: 3047372 - RNA, 20 nt, Marburg virus
uaugaauguuuuaucaugau

SEQ ID NO: 3047373 - RNA, 16 nt, Marburg virus
agugauaagagucaaa

SEQ ID NO: 3047374 - RNA, 13 nt, Marburg virus
auaccaaauacug

SEQ ID NO: 3047375 - RNA, 16 nt, Marburg virus
uaauucucauuguuaa

SEQ ID NO: 3047376 - RNA, 21 nt, Marburg virus
guaagaaaaacuaaugaagaa

SEQ ID NO: 3047377 - RNA, 22 nt, Marburg virus
cuugaaggcauaucuuaauaag

SEQ ID NO: 3047378 - RNA, 13 nt, Marburg virus
aacuaugaagaac

SEQ ID NO: 3047379 - RNA, 12 nt, Marburg virus
uuauuaagaaaa

SEQ ID NO: 3047380 - RNA, 23 nt, Marburg virus
uaaaagaagguaugaugaagaaa

SEQ ID NO: 3047381 - RNA, 18 nt, Marburg virus
augcaacaagucagugag

SEQ ID NO: 3047382 - RNA, 15 nt, Marburg virus
caugguauaaaacca

SEQ ID NO: 3047383 - RNA, 15 nt, Marburg virus
cuaauauuacuaaca

SEQ ID NO: 3047384 - RNA, 21 nt, Marburg virus
aaucuuuuggaugcaaaccau

SEQ ID NO: 3047385 - RNA, 18 nt, Marburg virus
auacacccgaauuugcca

SEQ ID NO: 3047386 - RNA, 15 nt, Marburg virus
gcuuacuuaaaugag

SEQ ID NO: 3047387 - RNA, 22 nt, Marburg virus
uggaugcaaaccauaaggaaaa

SEQ ID NO: 3047388 - RNA, 14 nt, Marburg virus
uugugaaucaucaa

SEQ ID NO: 3047389 - RNA, 14 nt, Marburg virus
accaaauacuggga

SEQ ID NO: 3047390 - RNA, 19 nt, Marburg virus
cagaacauuugaugcuuuc

SEQ ID NO: 3047391 - RNA, 15 nt, Marburg virus
cuuucaucaacaaug

SEQ ID NO: 3047392 - RNA, 19 nt, Marburg virus
agcuugcuuuacacaagau

SEQ ID NO: 3047393 - RNA, 21 nt, Marburg virus
ucauuaauuccuggauuuaga

SEQ ID NO: 3047394 - RNA, 20 nt, Marburg virus
aucaucuuauuaaauaguug

SEQ ID NO: 3047395 - RNA, 22 nt, Marburg virus
gaauacauucuuauauugcuug

SEQ ID NO: 3047396 - RNA, 22 nt, Marburg virus
uuccuccagugauaagagucaa

SEQ ID NO: 3047397 - RNA, 21 nt, Marburg virus
aggaguguugggacaguguuu

SEQ ID NO: 3047398 - RNA, 22 nt, Marburg virus
ugcagaaagcagucccaccaau

SEQ ID NO: 3047399 - RNA, 13 nt, Marburg virus
ugaaagaguuaaa

SEQ ID NO: 3047400 - RNA, 23 nt, Marburg virus
auugauuaagaaaaaccaaugau

SEQ ID NO: 3047401 - RNA, 13 nt, Marburg virus
auugaucaaacac

SEQ ID NO: 3047402 - RNA, 17 nt, Marburg virus
uauuugaauauucaaac

SEQ ID NO: 3047403 - RNA, 18 nt, Marburg virus
caacaccuccaagaacaa

SEQ ID NO: 3047404 - RNA, 13 nt, Marburg virus
uucaacuggaaga

SEQ ID NO: 3047405 - RNA, 21 nt, Marburg virus
auuuaucugaguccuuagaaa

SEQ ID NO: 3047406 - RNA, 17 nt, Marburg virus
agcauggauauucauag

SEQ ID NO: 3047407 - RNA, 22 nt, Marburg virus
agagucacaaccgaggaaagga

SEQ ID NO: 3047408 - RNA, 12 nt, Marburg virus
auuaaguucuuu

SEQ ID NO: 3047409 - RNA, 14 nt, Marburg virus
caccaggaaaauac

SEQ ID NO: 3047410 - RNA, 20 nt, Marburg virus
aauguuacggaaaaaagcau

SEQ ID NO: 3047411 - RNA, 22 nt, Marburg virus
auaagugauuuacuugauagaa

SEQ ID NO: 3047412 - RNA, 14 nt, Marburg virus
uaaaaugcaacaac

SEQ ID NO: 3047413 - RNA, 19 nt, Marburg virus
uuuucuuuaauauucagaa

SEQ ID NO: 3047414 - RNA, 19 nt, Marburg virus
uacuauugugugagacaac

SEQ ID NO: 3047415 - RNA, 13 nt, Marburg virus
uucaauuauccuu

SEQ ID NO: 3047416 - RNA, 22 nt, Marburg virus
caaaaaagucuucgggcuguuc

SEQ ID NO: 3047417 - RNA, 13 nt, Marburg virus
gccaucugauuua

SEQ ID NO: 3047418 - RNA, 23 nt, Marburg virus
aaacuauaauucaggggaaauug

SEQ ID NO: 3047419 - RNA, 17 nt, Marburg virus
ucauaugcuuucagaau

SEQ ID NO: 3047420 - RNA, 23 nt, Marburg virus
aacuuguaccucuaaggaaaauc

SEQ ID NO: 3047421 - RNA, 14 nt, Marburg virus
caaacccacaagca

SEQ ID NO: 3047422 - RNA, 23 nt, Marburg virus
aggauuauaucauucucuucgau

SEQ ID NO: 3047423 - RNA, 13 nt, Marburg virus
gcaucccgcaguc

SEQ ID NO: 3047424 - RNA, 14 nt, Marburg virus
acacauacaugcaa

SEQ ID NO: 3047425 - RNA, 14 nt, Marburg virus
ugaacuaaggaaau

SEQ ID NO: 3047426 - RNA, 12 nt, Marburg virus
uuuccuucucau

SEQ ID NO: 3047427 - RNA, 14 nt, Marburg virus
aagcaccugagaac

SEQ ID NO: 3047428 - RNA, 22 nt, Marburg virus
gcauuuguauagauucaauuau

SEQ ID NO: 3047429 - RNA, 19 nt, Marburg virus
acaacauagaaaacauauu

SEQ ID NO: 3047430 - RNA, 16 nt, Marburg virus
gacaagugacaaaauu

SEQ ID NO: 3047431 - RNA, 12 nt, Marburg virus
uugauuaagaaa

SEQ ID NO: 3047432 - RNA, 16 nt, Marburg virus
ugauauucaauuguua

SEQ ID NO: 3047433 - RNA, 16 nt, Marburg virus
aucccucuggaaaauc

SEQ ID NO: 3047434 - RNA, 21 nt, Marburg virus
auugacuccucaacaauacug

SEQ ID NO: 3047435 - RNA, 16 nt, Marburg virus
uuaaaacuauaauuca

SEQ ID NO: 3047436 - RNA, 16 nt, Marburg virus
uaugcaugucagugau

SEQ ID NO: 3047437 - RNA, 19 nt, Marburg virus
uuaaaaccuaaagucaugu

SEQ ID NO: 3047438 - RNA, 22 nt, Marburg virus
ccaucugauuuaacuuaauaaa

SEQ ID NO: 3047439 - RNA, 14 nt, Marburg virus
uauugaaauaaagu

SEQ ID NO: 3047440 - RNA, 23 nt, Marburg virus
agguuuuuuauucucuucuuucu

SEQ ID NO: 3047441 - RNA, 14 nt, Marburg virus
ucccagagaagaca

SEQ ID NO: 3047442 - RNA, 21 nt, Marburg virus
uaagaaaaacuaaugaagaac

SEQ ID NO: 3047443 - RNA, 11 nt, Marburg virus
ccaacaggaaa

SEQ ID NO: 3047444 - RNA, 14 nt, Marburg virus
aaucauuaauuccu

SEQ ID NO: 3047445 - RNA, 22 nt, Marburg virus
aucuaggugauugugaaaagac

SEQ ID NO: 3047446 - RNA, 23 nt, Marburg virus
uuccuucugaaauaguaagaaaa

SEQ ID NO: 3047447 - RNA, 23 nt, Marburg virus
acaacauauugugucaaauucau

SEQ ID NO: 3047448 - RNA, 20 nt, Marburg virus
uugugagauuauaaacuugu

SEQ ID NO: 3047449 - RNA, 23 nt, Marburg virus
aauauggccaguuccagcaauua

SEQ ID NO: 3047450 - RNA, 22 nt, Marburg virus
gcaauaccucaacgguguucaa

SEQ ID NO: 3047451 - RNA, 17 nt, Marburg virus
aagcgaugggcuuucag

SEQ ID NO: 3047452 - RNA, 12 nt, Marburg virus
acuguggcugcg

SEQ ID NO: 3047453 - RNA, 17 nt, Marburg virus
uaaaaaucccaacaaug

SEQ ID NO: 3047454 - RNA, 16 nt, Marburg virus
uccucaacaauacugu

SEQ ID NO: 3047455 - RNA, 23 nt, Marburg virus
aaaucuuaccacagcaaagagca

SEQ ID NO: 3047456 - RNA, 13 nt, Marburg virus
uauuaaauaucca

SEQ ID NO: 3047457 - RNA, 13 nt, Marburg virus
uuaaaauauucuu

SEQ ID NO: 3047458 - RNA, 19 nt, Marburg virus
gaaaaacuaugaagaacau

SEQ ID NO: 3047459 - RNA, 18 nt, Marburg virus
gaacaaauugaccaaauc

SEQ ID NO: 3047460 - RNA, 16 nt, Marburg virus
uuagaucuauuguuca

SEQ ID NO: 3047461 - RNA, 17 nt, Marburg virus
aacagaucauuaucacu

SEQ ID NO: 3047462 - RNA, 14 nt, Marburg virus
uuaaaauuaauuca

SEQ ID NO: 3047463 - RNA, 14 nt, Marburg virus
aauaguaauguuuu

SEQ ID NO: 3047464 - RNA, 21 nt, Marburg virus
caauaugaugcaauuaaucau

SEQ ID NO: 3047465 - RNA, 17 nt, Marburg virus
cuguuacucgugcauuu

SEQ ID NO: 3047466 - RNA, 12 nt, Marburg virus
cugaugccacca

SEQ ID NO: 3047467 - RNA, 12 nt, Marburg virus
aagaugaacaaa

SEQ ID NO: 3047468 - RNA, 15 nt, Marburg virus
aauugaccaaaucaa

SEQ ID NO: 3047469 - RNA, 19 nt, Marburg virus
cugaacuaccuccacagau

SEQ ID NO: 3047470 - RNA, 24 nt, Marburg virus
aauacugggauggcauuguugcau

SEQ ID NO: 3047471 - RNA, 15 nt, Marburg virus
aauaacgauugauua

SEQ ID NO: 3047472 - RNA, 22 nt, Marburg virus
caagggcuuucaucaacaaugc

SEQ ID NO: 3047473 - RNA, 16 nt, Marburg virus
cgcaaccaccaaaccg

SEQ ID NO: 3047474 - RNA, 15 nt, Marburg virus
uuauggugugaagaa

SEQ ID NO: 3047475 - RNA, 18 nt, Marburg virus
augugaauguaaauuaag

SEQ ID NO: 3047476 - RNA, 23 nt, Marburg virus
gcuacugagcccuucuucuaauc

SEQ ID NO: 3047477 - RNA, 15 nt, Marburg virus
augcauuaauguuuu

SEQ ID NO: 3047478 - RNA, 17 nt, Marburg virus
uuucuucagaacuguuc

SEQ ID NO: 3047479 - RNA, 16 nt, Marburg virus
uagacagaacacaaag

SEQ ID NO: 3047480 - RNA, 23 nt, Marburg virus
acuacguuacguuuucucugaug

SEQ ID NO: 3047481 - RNA, 22 nt, Marburg virus
uguuaugggugauaaucaaugu

SEQ ID NO: 3047482 - RNA, 15 nt, Marburg virus
uaguguucuuuuacu

SEQ ID NO: 3047483 - RNA, 21 nt, Marburg virus
cuuaaauuauacccacaagag

SEQ ID NO: 3047484 - RNA, 23 nt, Marburg virus
aaguaacuggaaguuuauaggaa

SEQ ID NO: 3047485 - RNA, 17 nt, Marburg virus
aauagugguaucaucuu

SEQ ID NO: 3047486 - RNA, 13 nt, Marburg virus
auguuauaugcau

SEQ ID NO: 3047487 - RNA, 14 nt, Marburg virus
cugcauaagaagca

SEQ ID NO: 3047488 - RNA, 20 nt, Marburg virus
ccaauuacgacacacagagc

SEQ ID NO: 3047489 - RNA, 13 nt, Marburg virus
ccgucacaugaau

SEQ ID NO: 3047490 - RNA, 14 nt, Marburg virus
uauccuaaaugcaa

SEQ ID NO: 3047491 - RNA, 11 nt, Marburg virus
ucaccuugaaa

SEQ ID NO: 3047492 - RNA, 20 nt, Marburg virus
cuuacuugggcuugaagaca

SEQ ID NO: 3047493 - RNA, 15 nt, Marburg virus
aaacuuguagaauua

SEQ ID NO: 3047494 - RNA, 14 nt, Marburg virus
ucaaaugaccaaau

SEQ ID NO: 3047495 - RNA, 22 nt, Marburg virus
aacuaaugaagaacauuaauug

SEQ ID NO: 3047496 - RNA, 18 nt, Marburg virus
aauugcuauaaugauaca

SEQ ID NO: 3047497 - RNA, 18 nt, Marburg virus
gucucaaaccguacacaa

SEQ ID NO: 3047498 - RNA, 12 nt, Marburg virus
aacuaaggaaau

SEQ ID NO: 3047499 - RNA, 21 nt, Marburg virus
cagaauguugcgugaaggaaa

SEQ ID NO: 3047500 - RNA, 20 nt, Marburg virus
agccgacaagaugucgaaag

SEQ ID NO: 3047501 - RNA, 13 nt, Marburg virus
uuaaaauuucagg

SEQ ID NO: 3047502 - RNA, 13 nt, Marburg virus
uuuaacuuccauu

SEQ ID NO: 3047503 - RNA, 21 nt, Marburg virus
uauuuucaagcaccugagaac

SEQ ID NO: 3047504 - RNA, 14 nt, Marburg virus
agcacgccacagca

SEQ ID NO: 3047505 - RNA, 18 nt, Marburg virus
acuugauagaaugucaag

SEQ ID NO: 3047506 - RNA, 21 nt, Marburg virus
uguaagcuuacaagcuucaaa

SEQ ID NO: 3047507 - RNA, 21 nt, Marburg virus
auugugcuaaugcuuaucauu

SEQ ID NO: 3047508 - RNA, 15 nt, Marburg virus
agacccaaacaauga

SEQ ID NO: 3047509 - RNA, 16 nt, Marburg virus
accaucuuaauagaag

SEQ ID NO: 3047510 - RNA, 13 nt, Marburg virus
cuuuuacuggaag

SEQ ID NO: 3047511 - RNA, 13 nt, Marburg virus
uaaauuaagaaaa

SEQ ID NO: 3047512 - RNA, 19 nt, Marburg virus
auuucaggcaauaaagcug

SEQ ID NO: 3047513 - RNA, 15 nt, Marburg virus
aaaccauaaggaaaa

SEQ ID NO: 3047514 - RNA, 21 nt, Marburg virus
aaaaagaguugaauauaggaa

SEQ ID NO: 3047515 - RNA, 19 nt, Marburg virus
uagcugucuugauugcucu

SEQ ID NO: 3047516 - RNA, 13 nt, Marburg virus
ucaaauugaucaa

SEQ ID NO: 3047517 - RNA, 19 nt, Marburg virus
gguaugacugagugaucag

SEQ ID NO: 3047518 - RNA, 22 nt, Marburg virus
gugaguggcuuuuaucaucaaa

SEQ ID NO: 3047519 - RNA, 14 nt, Marburg virus
aaguaaugaaaaua

SEQ ID NO: 3047520 - RNA, 13 nt, Marburg virus
ucuccuaaggaaa

SEQ ID NO: 3047521 - RNA, 22 nt, Marburg virus
aauuuugcgaggaauuauaaaa

SEQ ID NO: 3047522 - RNA, 16 nt, Marburg virus
uaucauagucaagagu

SEQ ID NO: 3047523 - RNA, 13 nt, Marburg virus
agacuugaacaca

SEQ ID NO: 3047524 - RNA, 16 nt, Marburg virus
uaaucuaacaaaucgu

SEQ ID NO: 3047525 - RNA, 19 nt, Marburg virus
aaagcauucccuagcaaca

SEQ ID NO: 3047526 - RNA, 12 nt, Marburg virus
ccauaaggaaaa

SEQ ID NO: 3047527 - RNA, 23 nt, Marburg virus
uugccucuguuucuucuguuuuc

SEQ ID NO: 3047528 - RNA, 13 nt, Marburg virus
ucuccagaagaca

SEQ ID NO: 3047529 - RNA, 14 nt, Marburg virus
acaaguaacaaugg

SEQ ID NO: 3047530 - RNA, 17 nt, Marburg virus
aaggggaugucagaaau

SEQ ID NO: 3047531 - RNA, 19 nt, Marburg virus
aauacagacaagacuuuua

SEQ ID NO: 3047532 - RNA, 14 nt, Marburg virus
ggacaaauuaauug

SEQ ID NO: 3047533 - RNA, 17 nt, Marburg virus
guaucuuuaccaaauau

SEQ ID NO: 3047534 - RNA, 16 nt, Marburg virus
cugaucccacuuguaa

SEQ ID NO: 3047535 - RNA, 14 nt, Marburg virus
ucuccuaaggaaaa

SEQ ID NO: 3047536 - RNA, 15 nt, Marburg virus
gaaaauguuauugau

SEQ ID NO: 3047537 - RNA, 13 nt, Marburg virus
cuugauuaaaaac

SEQ ID NO: 3047538 - RNA, 20 nt, Marburg virus
cuggcgcccauccaaggaca

SEQ ID NO: 3047539 - RNA, 13 nt, Marburg virus
ugggcuuucagga

SEQ ID NO: 3047540 - RNA, 15 nt, Marburg virus
uucaacagaaauugu

SEQ ID NO: 3047541 - RNA, 17 nt, Marburg virus
gaggcaguucuaagaga

SEQ ID NO: 3047542 - RNA, 15 nt, Marburg virus
agaucaaacccacaa

SEQ ID NO: 3047543 - RNA, 13 nt, Marburg virus
uacauuaauuccu

SEQ ID NO: 3047544 - RNA, 19 nt, Marburg virus
aucaaacugccaaauccuu

SEQ ID NO: 3047545 - RNA, 12 nt, Marburg virus
aauaagauguuc

SEQ ID NO: 3047546 - RNA, 11 nt, Marburg virus
cauucaacuua

SEQ ID NO: 3047547 - RNA, 17 nt, Marburg virus
aauaccacuauguuaua

SEQ ID NO: 3047548 - RNA, 19 nt, Marburg virus
aauugcuauaaugauacaa

SEQ ID NO: 3047549 - RNA, 21 nt, Marburg virus
ggaacauagcagcuaugauug

SEQ ID NO: 3047550 - RNA, 15 nt, Marburg virus
uuggagcguucagga

SEQ ID NO: 3047551 - RNA, 16 nt, Marburg virus
caagcacgccacagca

SEQ ID NO: 3047552 - RNA, 17 nt, Marburg virus
gcccacagcccguccag

SEQ ID NO: 3047553 - RNA, 16 nt, Marburg virus
cccagcacacccacuc

SEQ ID NO: 3047554 - RNA, 21 nt, Marburg virus
cuaaucuacugaaaucaacuu

SEQ ID NO: 3047555 - RNA, 16 nt, Marburg virus
uaaccauuguaagaau

SEQ ID NO: 3047556 - RNA, 12 nt, Marburg virus
aucgugaagaaa

SEQ ID NO: 3047557 - RNA, 22 nt, Marburg virus
aggacagguguaccucccaaga

SEQ ID NO: 3047558 - RNA, 13 nt, Marburg virus
uugcuuuacacaa

SEQ ID NO: 3047559 - RNA, 14 nt, Marburg virus
gaggagacguucuc

SEQ ID NO: 3047560 - RNA, 16 nt, Marburg virus
cauugccuccacaaca

SEQ ID NO: 3047561 - RNA, 18 nt, Marburg virus
ugaaaacaauggcaagau

SEQ ID NO: 3047562 - RNA, 14 nt, Marburg virus
auuucagaaagaaa

SEQ ID NO: 3047563 - RNA, 15 nt, Marburg virus
aaauauaaaagaacg

SEQ ID NO: 3047564 - RNA, 22 nt, Marburg virus
caaaauacccucaccacugccc

SEQ ID NO: 3047565 - RNA, 18 nt, Marburg virus
augcuccggaacucucca

SEQ ID NO: 3047566 - RNA, 19 nt, Marburg virus
aauucaagacgcuuauuca

SEQ ID NO: 3047567 - RNA, 20 nt, Marburg virus
uuuuauauauuauagaggaa

SEQ ID NO: 3047568 - RNA, 14 nt, Marburg virus
accaaucauauucc

SEQ ID NO: 3047569 - RNA, 14 nt, Marburg virus
ucugaggauuuaag

SEQ ID NO: 3047570 - RNA, 23 nt, Marburg virus
gaaccaggaguguugggacagug

SEQ ID NO: 3047571 - RNA, 18 nt, Marburg virus
uuguaccucuaaggaaaa

SEQ ID NO: 3047572 - RNA, 22 nt, Marburg virus
caagaaaccgauggaaaagcug

SEQ ID NO: 3047573 - RNA, 18 nt, Marburg virus
agcguaugcgaauccaac

SEQ ID NO: 3047574 - RNA, 23 nt, Marburg virus
uuuugcaagcgaugugugcuuga

SEQ ID NO: 3047575 - RNA, 17 nt, Marburg virus
uguaccucuaaggaaaa

SEQ ID NO: 3047576 - RNA, 22 nt, Marburg virus
agcaccccaacugaugccacca

SEQ ID NO: 3047577 - RNA, 14 nt, Marburg virus
agaaucaguuguuu

SEQ ID NO: 3047578 - RNA, 15 nt, Marburg virus
uaaucaccaauucau

SEQ ID NO: 3047579 - RNA, 17 nt, Marburg virus
guguugaccuuggaaaa

SEQ ID NO: 3047580 - RNA, 18 nt, Marburg virus
accaacugaucgugaaga

SEQ ID NO: 3047581 - RNA, 20 nt, Marburg virus
caugcccccccacaacacca

SEQ ID NO: 3047582 - RNA, 22 nt, Marburg virus
aggcagauaucggacauucaaa

SEQ ID NO: 3047583 - RNA, 11 nt, Marburg virus
auauuaaauau

SEQ ID NO: 3047584 - RNA, 19 nt, Marburg virus
aauucgacagcauuaaaaa

SEQ ID NO: 3047585 - RNA, 16 nt, Marburg virus
uagagucgaagaacau

SEQ ID NO: 3047586 - RNA, 20 nt, Marburg virus
uuguccaggaauauuucgga

SEQ ID NO: 3047587 - RNA, 23 nt, Marburg virus
agaagccuugcuagcagauggac

SEQ ID NO: 3047588 - RNA, 21 nt, Marburg virus
uacauuugccgcaauacugua

SEQ ID NO: 3047589 - RNA, 20 nt, Marburg virus
uuguuacugagagggaacag

SEQ ID NO: 3047590 - RNA, 21 nt, Marburg virus
uccaugcccccccacaacacc

SEQ ID NO: 3047591 - RNA, 13 nt, Marburg virus
uucuuguuucaaa

SEQ ID NO: 3047592 - RNA, 22 nt, Marburg virus
aaucaacuaacaacauagaaaa

SEQ ID NO: 3047593 - RNA, 16 nt, Marburg virus
uuaaaaaccaaaacaa

SEQ ID NO: 3047594 - RNA, 15 nt, Marburg virus
uccagaagacagaag

SEQ ID NO: 3047595 - RNA, 14 nt, Marburg virus
ggagaaaaugagaa

SEQ ID NO: 3047596 - RNA, 20 nt, Marburg virus
augggugauaaucaauguau

SEQ ID NO: 3047597 - RNA, 19 nt, Marburg virus
cacaagagauacuguuuua

SEQ ID NO: 3047598 - RNA, 20 nt, Marburg virus
acacaacaucuuguauauuu

SEQ ID NO: 3047599 - RNA, 17 nt, Marburg virus
agaaugcauuagaauuu

SEQ ID NO: 3047600 - RNA, 19 nt, Marburg virus
gaaaaggaagaauuauucu

SEQ ID NO: 3047601 - RNA, 18 nt, Marburg virus
gucuuaagugugauuuuc

SEQ ID NO: 3047602 - RNA, 21 nt, Marburg virus
uucaccagauucuaagugaag

SEQ ID NO: 3047603 - RNA, 20 nt, Marburg virus
uuagaaaaauucacauguac

SEQ ID NO: 3047604 - RNA, 13 nt, Marburg virus
cccacaacaccac

SEQ ID NO: 3047605 - RNA, 15 nt, Marburg virus
ucuacuaacaacacc

SEQ ID NO: 3047606 - RNA, 23 nt, Marburg virus
agugaucuuuccgaguugauaca

SEQ ID NO: 3047607 - RNA, 15 nt, Marburg virus
caaauuuauuugaau

SEQ ID NO: 3047608 - RNA, 13 nt, Marburg virus
cagaaagaagcau

SEQ ID NO: 3047609 - RNA, 19 nt, Marburg virus
gauguguugaccuuggaaa

SEQ ID NO: 3047610 - RNA, 22 nt, Marburg virus
ggauagcuucauuucauucaau

SEQ ID NO: 3047611 - RNA, 20 nt, Marburg virus
ucaaagagagugccagagca

SEQ ID NO: 3047612 - RNA, 12 nt, Marburg virus
uucaacuggaag

SEQ ID NO: 3047613 - RNA, 14 nt, Marburg virus
aucagccuaaaauc

SEQ ID NO: 3047614 - RNA, 22 nt, Marburg virus
aggauuuuucuccuaaggaaaa

SEQ ID NO: 3047615 - RNA, 13 nt, Marburg virus
uaguauaaaguau

SEQ ID NO: 3047616 - RNA, 21 nt, Marburg virus
guauucccuauaagugauuua

SEQ ID NO: 3047617 - RNA, 16 nt, Marburg virus
aagcaagggcuuucau

SEQ ID NO: 3047618 - RNA, 18 nt, Marburg virus
aaugaaacaacagaugca

SEQ ID NO: 3047619 - RNA, 17 nt, Marburg virus
gugaucaguauauuuua

SEQ ID NO: 3047620 - RNA, 21 nt, Marburg virus
augccaccacacucaacacca

SEQ ID NO: 3047621 - RNA, 14 nt, Marburg virus
uguuuacuagagca

SEQ ID NO: 3047622 - RNA, 17 nt, Marburg virus
uauaaaguauaauucuu

SEQ ID NO: 3047623 - RNA, 14 nt, Marburg virus
guaccucuaaggaa

SEQ ID NO: 3047624 - RNA, 10 nt, Marburg virus
acaacaaugu

SEQ ID NO: 3047625 - RNA, 12 nt, Marburg virus
uuagaauuauuc

SEQ ID NO: 3047626 - RNA, 13 nt, Marburg virus
uccacaacaaugu

SEQ ID NO: 3047627 - RNA, 15 nt, Marburg virus
cuuauauugaugcau

SEQ ID NO: 3047628 - RNA, 23 nt, Marburg virus
cauacacccgaauuugccaccca

SEQ ID NO: 3047629 - RNA, 22 nt, Marburg virus
aauauuaaguguguauugauua

SEQ ID NO: 3047630 - RNA, 14 nt, Marburg virus
uucccauagaucaa

SEQ ID NO: 3047631 - RNA, 14 nt, Marburg virus
ugaauuaauuguua

SEQ ID NO: 3047632 - RNA, 15 nt, Marburg virus
uuugauuuacuaaca

SEQ ID NO: 3047633 - RNA, 15 nt, Marburg virus
caagcuucaaaacca

SEQ ID NO: 3047634 - RNA, 13 nt, Marburg virus
gguuuuuuauucu

SEQ ID NO: 3047635 - RNA, 23 nt, Marburg virus
gaaaauaaucuauuuaaaaauga

SEQ ID NO: 3047636 - RNA, 13 nt, Marburg virus
gguugaugacugg

SEQ ID NO: 3047637 - RNA, 22 nt, Marburg virus
aaauacugggauggcauuguug

SEQ ID NO: 3047638 - RNA, 21 nt, Marburg virus
aauuauugccauguacuugga

SEQ ID NO: 3047639 - RNA, 19 nt, Marburg virus
aucagauauugggaaauug

SEQ ID NO: 3047640 - RNA, 17 nt, Marburg virus
aaucaucaaccagugug

SEQ ID NO: 3047641 - RNA, 15 nt, Marburg virus
agggacaaauuauug

SEQ ID NO: 3047642 - RNA, 19 nt, Marburg virus
caagauguaaucucuuuug

SEQ ID NO: 3047643 - RNA, 21 nt, Marburg virus
ugcaaucucuacuaacaacac

SEQ ID NO: 3047644 - RNA, 17 nt, Marburg virus
ccacagcaagaaggaaa

SEQ ID NO: 3047645 - RNA, 17 nt, Marburg virus
uagauuaauccuugaag

SEQ ID NO: 3047646 - RNA, 16 nt, Marburg virus
gccaguuccagcaauu

SEQ ID NO: 3047647 - RNA, 19 nt, Marburg virus
uucugaaauaguaagaaaa

SEQ ID NO: 3047648 - RNA, 13 nt, Marburg virus
ugaagaauuuauu

SEQ ID NO: 3047649 - RNA, 18 nt, Marburg virus
agggagaucaaauuauug

SEQ ID NO: 3047650 - RNA, 22 nt, Marburg virus
aauacccucaccacugcccaca

SEQ ID NO: 3047651 - RNA, 16 nt, Marburg virus
ucaacaaugccaccca

SEQ ID NO: 3047652 - RNA, 19 nt, Marburg virus
aaaaccaggguuaagagua

SEQ ID NO: 3047653 - RNA, 18 nt, Marburg virus
aaucuugagggacaaauu

SEQ ID NO: 3047654 - RNA, 18 nt, Marburg virus
ucaaggucaaaacccuca

SEQ ID NO: 3047655 - RNA, 14 nt, Marburg virus
gcugugaaccagga

SEQ ID NO: 3047656 - RNA, 13 nt, Marburg virus
ugugauuuucacc

SEQ ID NO: 3047657 - RNA, 18 nt, Marburg virus
ggaaaauccuuauuauug

SEQ ID NO: 3047658 - RNA, 16 nt, Marburg virus
agcauaaaaaucccaa

SEQ ID NO: 3047659 - RNA, 22 nt, Marburg virus
uuccuguaugaucgcauugccu

SEQ ID NO: 3047660 - RNA, 15 nt, Marburg virus
gcuaauuucuugagg

SEQ ID NO: 3047661 - RNA, 20 nt, Marburg virus
ucaaacccacaagcacccca

SEQ ID NO: 3047662 - RNA, 16 nt, Marburg virus
gaugcauuggacgaug

SEQ ID NO: 3047663 - RNA, 16 nt, Marburg virus
caauauccugaugcaa

SEQ ID NO: 3047664 - RNA, 21 nt, Marburg virus
uguaauaugccaauuaagaaa

SEQ ID NO: 3047665 - RNA, 21 nt, Marburg virus
gaugggucuguguuuauucau

SEQ ID NO: 3047666 - RNA, 20 nt, Marburg virus
gcagauaucggacauucaaa

SEQ ID NO: 3047667 - RNA, 20 nt, Marburg virus
caaacaguucgugaaaauau

SEQ ID NO: 3047668 - RNA, 13 nt, Marburg virus
agaguccaugaaa

SEQ ID NO: 3047669 - RNA, 19 nt, Marburg virus
auaaaaaucccaacaaugg

SEQ ID NO: 3047670 - RNA, 14 nt, Marburg virus
ccauccaaggacaa

SEQ ID NO: 3047671 - RNA, 17 nt, Marburg virus
auagauucaauuauccu

SEQ ID NO: 3047672 - RNA, 20 nt, Marburg virus
aagacauguguaggaacaug

SEQ ID NO: 3047673 - RNA, 13 nt, Marburg virus
gcaagaaggaaac

SEQ ID NO: 3047674 - RNA, 23 nt, Marburg virus
aauaacgauugauuaagaaaaac

SEQ ID NO: 3047675 - RNA, 15 nt, Marburg virus
uguuuaggauuucac

SEQ ID NO: 3047676 - RNA, 16 nt, Marburg virus
gagcacuaacaacacg

SEQ ID NO: 3047677 - RNA, 17 nt, Marburg virus
augauuuuaaauaccua

SEQ ID NO: 3047678 - RNA, 18 nt, Marburg virus
uaauaaucaccaauucau

SEQ ID NO: 3047679 - RNA, 23 nt, Marburg virus
ucaugaaacucaguugcccucca

SEQ ID NO: 3047680 - RNA, 16 nt, Marburg virus
auuaaguucuuuaaau

SEQ ID NO: 3047681 - RNA, 12 nt, Marburg virus
uguuagaauuau

SEQ ID NO: 3047682 - RNA, 16 nt, Marburg virus
cauuuaucucaacuug

SEQ ID NO: 3047683 - RNA, 23 nt, Marburg virus
aucuuuacaccaggaaaauacug

SEQ ID NO: 3047684 - RNA, 22 nt, Marburg virus
aacauauugugucaaauucauu

SEQ ID NO: 3047685 - RNA, 18 nt, Marburg virus
gacccaaacaaugaugau

SEQ ID NO: 3047686 - RNA, 12 nt, Marburg virus
uggaaggaacaa

SEQ ID NO: 3047687 - RNA, 15 nt, Marburg virus
acagcaagaaggaaa

SEQ ID NO: 3047688 - RNA, 12 nt, Marburg virus
cuuuuucacaua

SEQ ID NO: 3047689 - RNA, 18 nt, Marburg virus
uacguuacguuuucucug

SEQ ID NO: 3047690 - RNA, 19 nt, Marburg virus
accauaaggaaaaaugagc

SEQ ID NO: 3047691 - RNA, 12 nt, Marburg virus
ugugaauuauuc

SEQ ID NO: 3047692 - RNA, 22 nt, Marburg virus
aaaaacccaaagucaacaauua

SEQ ID NO: 3047693 - RNA, 20 nt, Marburg virus
cugcugguuuaauuaaaaac

SEQ ID NO: 3047694 - RNA, 20 nt, Marburg virus
uaaucauguugaugauuuua

SEQ ID NO: 3047695 - RNA, 20 nt, Marburg virus
gcauccaacucaauauccug

SEQ ID NO: 3047696 - RNA, 23 nt, Marburg virus
auuuaaguauuuuuauaaaagac

SEQ ID NO: 3047697 - RNA, 16 nt, Marburg virus
gauuccacaucauauu

SEQ ID NO: 3047698 - RNA, 22 nt, Marburg virus
uguuggaggcacaguacauuau

SEQ ID NO: 3047699 - RNA, 20 nt, Marburg virus
agaauauggugauccccaga

SEQ ID NO: 3047700 - RNA, 17 nt, Marburg virus
uucauugcuaaguaaac

SEQ ID NO: 3047701 - RNA, 13 nt, Marburg virus
ugaggaccucaua

SEQ ID NO: 3047702 - RNA, 15 nt, Marburg virus
uuucaccuugaaaga

SEQ ID NO: 3047703 - RNA, 13 nt, Marburg virus
uagaauuucuuga

SEQ ID NO: 3047704 - RNA, 19 nt, Marburg virus
uucggcugaggaagaucaa

SEQ ID NO: 3047705 - RNA, 19 nt, Marburg virus
aggcgucuagccaaucaaa

SEQ ID NO: 3047706 - RNA, 18 nt, Marburg virus
agucuucgggcuguuccu

SEQ ID NO: 3047707 - RNA, 13 nt, Marburg virus
aauauucagaaaa

SEQ ID NO: 3047708 - RNA, 21 nt, Marburg virus
uagauuaauccuugaaguaac

SEQ ID NO: 3047709 - RNA, 17 nt, Marburg virus
ggaugcuucggugcucu

SEQ ID NO: 3047710 - RNA, 16 nt, Marburg virus
uaagaauuaauuuacu

SEQ ID NO: 3047711 - RNA, 19 nt, Marburg virus
uuuauauguaaugaacaau

SEQ ID NO: 3047712 - RNA, 18 nt, Marburg virus
ucauauuugauucaagau

SEQ ID NO: 3047713 - RNA, 13 nt, Marburg virus
ugcuugaauacgu

SEQ ID NO: 3047714 - RNA, 13 nt, Marburg virus
uuccauucaauau

SEQ ID NO: 3047715 - RNA, 14 nt, Marburg virus
uuauccuaacauga

SEQ ID NO: 3047716 - RNA, 15 nt, Marburg virus
ugaaauuaagggaau

SEQ ID NO: 3047717 - RNA, 14 nt, Marburg virus
auaaagcugagugu

SEQ ID NO: 3047718 - RNA, 16 nt, Marburg virus
auaccuacccugauuu

SEQ ID NO: 3047719 - RNA, 13 nt, Marburg virus
gcuucaauacaac

SEQ ID NO: 3047720 - RNA, 22 nt, Marburg virus
aaagagcacuaacaacacgaaa

SEQ ID NO: 3047721 - RNA, 16 nt, Marburg virus
guuacagcuauaucua

SEQ ID NO: 3047722 - RNA, 20 nt, Marburg virus
cuagcucaaguccuuucaaa

SEQ ID NO: 3047723 - RNA, 23 nt, Marburg virus
aaccgaggaaaggacauuuuccu

SEQ ID NO: 3047724 - RNA, 13 nt, Marburg virus
cauuauucacaua

SEQ ID NO: 3047725 - RNA, 20 nt, Marburg virus
ugcacuauccuacuguuuug

SEQ ID NO: 3047726 - RNA, 17 nt, Marburg virus
guucauaugcuuucaga

SEQ ID NO: 3047727 - RNA, 20 nt, Marburg virus
uauaucuugauugcuaaaaa

SEQ ID NO: 3047728 - RNA, 17 nt, Marburg virus
uuccuauaaucugauug

SEQ ID NO: 3047729 - RNA, 20 nt, Marburg virus
caaagugcuuggaccugauu

SEQ ID NO: 3047730 - RNA, 21 nt, Marburg virus
auccaucuuaagugaauccuu

SEQ ID NO: 3047731 - RNA, 14 nt, Marburg virus
cagcuguauacaaa

SEQ ID NO: 3047732 - RNA, 17 nt, Marburg virus
acuggccgaaaaugcuc

SEQ ID NO: 3047733 - RNA, 15 nt, Marburg virus
auucgacagcauuaa

SEQ ID NO: 3047734 - RNA, 15 nt, Marburg virus
agugaauacauucuu

SEQ ID NO: 3047735 - RNA, 19 nt, Marburg virus
ucaaaggcgacaagcacug

SEQ ID NO: 3047736 - RNA, 16 nt, Marburg virus
aagauaaacaggagca

SEQ ID NO: 3047737 - RNA, 23 nt, Marburg virus
auccaagggauaaaaacucuccc

SEQ ID NO: 3047738 - RNA, 21 nt, Marburg virus
auugauugagcuucucaaaug

SEQ ID NO: 3047739 - RNA, 17 nt, Marburg virus
guauuacuuacuugggc

SEQ ID NO: 3047740 - RNA, 16 nt, Marburg virus
gcacaaaaugauuuuc

SEQ ID NO: 3047741 - RNA, 23 nt, Marburg virus
uuacgacacacagagcacagcca

SEQ ID NO: 3047742 - RNA, 15 nt, Marburg virus
agacaagacuuuuag

SEQ ID NO: 3047743 - RNA, 22 nt, Marburg virus
accuugccuuccgauaugaauu

SEQ ID NO: 3047744 - RNA, 19 nt, Marburg virus
ugguuuauuuucaagcacc

SEQ ID NO: 3047745 - RNA, 22 nt, Marburg virus
gaaaacacugccuacucuggag

SEQ ID NO: 3047746 - RNA, 20 nt, Marburg virus
uccucggaguaguuccucca

SEQ ID NO: 3047747 - RNA, 15 nt, Marburg virus
aagagaacuucauuu

SEQ ID NO: 3047748 - RNA, 22 nt, Marburg virus
ucguaauuucaacuggaagaac

SEQ ID NO: 3047749 - RNA, 13 nt, Marburg virus
aacaauacuguga

SEQ ID NO: 3047750 - RNA, 21 nt, Marburg virus
uugauccaguuccaaauacaa

SEQ ID NO: 3047751 - RNA, 15 nt, Marburg virus
caauggaacacaaac

SEQ ID NO: 3047752 - RNA, 16 nt, Marburg virus
ccacacucaacaccac

SEQ ID NO: 3047753 - RNA, 18 nt, Marburg virus
agucucaauuggaaauuu

SEQ ID NO: 3047754 - RNA, 17 nt, Marburg virus
aaucacgcgcacaaauu

SEQ ID NO: 3047755 - RNA, 19 nt, Marburg virus
uaucagccuaaaaucugau

SEQ ID NO: 3047756 - RNA, 19 nt, Marburg virus
uaccucuaaggaaaaucau

SEQ ID NO: 3047757 - RNA, 18 nt, Marburg virus
uugauuaaagcuuuagga

SEQ ID NO: 3047758 - RNA, 15 nt, Marburg virus
uaaaauuaauucaca

SEQ ID NO: 3047759 - RNA, 15 nt, Marburg virus
ccaguuauccaucuu

SEQ ID NO: 3047760 - RNA, 15 nt, Marburg virus
aaucaaacugccaaa

SEQ ID NO: 3047761 - RNA, 19 nt, Marburg virus
gaaucuauuugaccucaga

SEQ ID NO: 3047762 - RNA, 23 nt, Marburg virus
aguucucacaagauuaguuugua

SEQ ID NO: 3047763 - RNA, 12 nt, Marburg virus
aaucauuaucau

SEQ ID NO: 3047764 - RNA, 18 nt, Marburg virus
acagaaggggaggaagcc

SEQ ID NO: 3047765 - RNA, 19 nt, Marburg virus
auauaucaugaaacucagu

SEQ ID NO: 3047766 - RNA, 17 nt, Marburg virus
auaaguggcuuaaauua

SEQ ID NO: 3047767 - RNA, 17 nt, Marburg virus
cacaauucagcaagcau

SEQ ID NO: 3047768 - RNA, 15 nt, Marburg virus
aacauggcagaauua

SEQ ID NO: 3047769 - RNA, 15 nt, Marburg virus
ucuuaauagaaguag

SEQ ID NO: 3047770 - RNA, 21 nt, Marburg virus
ugggaaggacacuggaagcaa

SEQ ID NO: 3047771 - RNA, 15 nt, Marburg virus
caauaugaugcaauu

SEQ ID NO: 3047772 - RNA, 16 nt, Marburg virus
gguuacauuuucuaga

SEQ ID NO: 3047773 - RNA, 12 nt, Marburg virus
aaaagaaauagu

SEQ ID NO: 3047774 - RNA, 16 nt, Marburg virus
cuccuaccaacauccg

SEQ ID NO: 3047775 - RNA, 14 nt, Marburg virus
auaucauaaauaua

SEQ ID NO: 3047776 - RNA, 18 nt, Marburg virus
uaaccuuacauugcugcu

SEQ ID NO: 3047777 - RNA, 14 nt, Marburg virus
ccagcauggcugcc

SEQ ID NO: 3047778 - RNA, 23 nt, Marburg virus
cagucccucgcccaugucaaaaa

SEQ ID NO: 3047779 - RNA, 17 nt, Marburg virus
cuaagugaaggagagaa

SEQ ID NO: 3047780 - RNA, 13 nt, Marburg virus
uguuaucaaacag

SEQ ID NO: 3047781 - RNA, 17 nt, Marburg virus
aggcaguucuaagagaa

SEQ ID NO: 3047782 - RNA, 19 nt, Marburg virus
uguuuggaauagcagauuu

SEQ ID NO: 3047783 - RNA, 15 nt, Marburg virus
aagacuuccaaacau

SEQ ID NO: 3047784 - RNA, 22 nt, Marburg virus
ugguaccgugaccaaaacuuga

SEQ ID NO: 3047785 - RNA, 20 nt, Marburg virus
acaaugcagcccuugucuaa

SEQ ID NO: 3047786 - RNA, 13 nt, Marburg virus
acaagauaaucuu

SEQ ID NO: 3047787 - RNA, 11 nt, Marburg virus
augacuggaaa

SEQ ID NO: 3047788 - RNA, 13 nt, Marburg virus
aucuuauuaaaua

SEQ ID NO: 3047789 - RNA, 13 nt, Marburg virus
guuaccuacuuau

SEQ ID NO: 3047790 - RNA, 18 nt, Marburg virus
cauuggacgaugauuuau

SEQ ID NO: 3047791 - RNA, 19 nt, Marburg virus
cgaaaggccccaccacaac

SEQ ID NO: 3047792 - RNA, 20 nt, Marburg virus
cuucagcacccucucuguau

SEQ ID NO: 3047793 - RNA, 18 nt, Marburg virus
ccaauauauaaaauuaaa

SEQ ID NO: 3047794 - RNA, 14 nt, Marburg virus
uucuugaacucagu

SEQ ID NO: 3047795 - RNA, 17 nt, Marburg virus
acaaucuaggugauugu

SEQ ID NO: 3047796 - RNA, 11 nt, Marburg virus
uuacuggaagg

SEQ ID NO: 3047797 - RNA, 19 nt, Marburg virus
agcacacccacucagaaug

SEQ ID NO: 3047798 - RNA, 23 nt, Marburg virus
uuuaauuaaaaaccaaaacaauu

SEQ ID NO: 3047799 - RNA, 21 nt, Marburg virus
auuuacugguauaaaauagug

SEQ ID NO: 3047800 - RNA, 16 nt, Marburg virus
auuaauuccuugaaug

SEQ ID NO: 3047801 - RNA, 19 nt, Marburg virus
aaucuaggugauugugaaa

SEQ ID NO: 3047802 - RNA, 17 nt, Marburg virus
aacacgugggaaauaug

SEQ ID NO: 3047803 - RNA, 22 nt, Marburg virus
agcaagggcuuucaucaacaau

SEQ ID NO: 3047804 - RNA, 21 nt, Marburg virus
uugauacaaagacacuaaaca

SEQ ID NO: 3047805 - RNA, 17 nt, Marburg virus
aucggacauucaaagca

SEQ ID NO: 3047806 - RNA, 17 nt, Marburg virus
aauauuacuuugaucaa

SEQ ID NO: 3047807 - RNA, 22 nt, Marburg virus
caaguccuuucaaaaauugcuu

SEQ ID NO: 3047808 - RNA, 16 nt, Marburg virus
accacugcaccagcug

SEQ ID NO: 3047809 - RNA, 15 nt, Marburg virus
guaagagugauuaag

SEQ ID NO: 3047810 - RNA, 17 nt, Marburg virus
aaucgaaggacuuuaua

SEQ ID NO: 3047811 - RNA, 21 nt, Marburg virus
aucuuaaacuugaugaugcag

SEQ ID NO: 3047812 - RNA, 17 nt, Marburg virus
acucuggagaaaaugag

SEQ ID NO: 3047813 - RNA, 13 nt, Marburg virus
auuucuuuaauaa

SEQ ID NO: 3047814 - RNA, 22 nt, Marburg virus
uguuccucccaacccaacaauu

SEQ ID NO: 3047815 - RNA, 20 nt, Marburg virus
auaaucugauugugagauua

SEQ ID NO: 3047816 - RNA, 16 nt, Marburg virus
agggguuucauaugcu

SEQ ID NO: 3047817 - RNA, 14 nt, Marburg virus
uuguauauuucaga

SEQ ID NO: 3047818 - RNA, 12 nt, Marburg virus
uauuucaacuua

SEQ ID NO: 3047819 - RNA, 13 nt, Marburg virus
aauucagcaagca

SEQ ID NO: 3047820 - RNA, 19 nt, Marburg virus
aacaauggcaagaugugga

SEQ ID NO: 3047821 - RNA, 19 nt, Marburg virus
caugacuugauucagagag

SEQ ID NO: 3047822 - RNA, 15 nt, Marburg virus
ucugcauaagaagca

SEQ ID NO: 3047823 - RNA, 17 nt, Marburg virus
acaacuugccugcaaau

SEQ ID NO: 3047824 - RNA, 14 nt, Marburg virus
ucacuaagcaaggg

SEQ ID NO: 3047825 - RNA, 20 nt, Marburg virus
guguucuuacuaacuugggc

SEQ ID NO: 3047826 - RNA, 20 nt, Marburg virus
ggaacaugaaaauuggauug

SEQ ID NO: 3047827 - RNA, 21 nt, Marburg virus
auuugaccaaaguaauguuuu

SEQ ID NO: 3047828 - RNA, 22 nt, Marburg virus
cagugauaagagucaaaaacuu

SEQ ID NO: 3047829 - RNA, 21 nt, Marburg virus
gguuuggaguuuccuuacucu

SEQ ID NO: 3047830 - RNA, 20 nt, Marburg virus
auuucaaaagcauauaugug

SEQ ID NO: 3047831 - RNA, 18 nt, Marburg virus
acugcugguuuaauuaaa

SEQ ID NO: 3047832 - RNA, 18 nt, Marburg virus
cuucucacuuuuuaagaa

SEQ ID NO: 3047833 - RNA, 21 nt, Marburg virus
cuaugaagaacauuaagaaga

SEQ ID NO: 3047834 - RNA, 18 nt, Marburg virus
auaauagugcauuuguau

SEQ ID NO: 3047835 - RNA, 15 nt, Marburg virus
aguaaaggacaauga

SEQ ID NO: 3047836 - RNA, 13 nt, Marburg virus
uaugaugaagaaa

SEQ ID NO: 3047837 - RNA, 14 nt, Marburg virus
cuacaaaacaccac

SEQ ID NO: 3047838 - RNA, 21 nt, Marburg virus
cugcaaucucuacuaacaaca

SEQ ID NO: 3047839 - RNA, 14 nt, Marburg virus
auugaucaaacacu

SEQ ID NO: 3047840 - RNA, 17 nt, Marburg virus
ucacaaaauagaauaau

SEQ ID NO: 3047841 - RNA, 16 nt, Marburg virus
uauaaacuuguagaau

SEQ ID NO: 3047842 - RNA, 17 nt, Marburg virus
guuauauaauuacucau

SEQ ID NO: 3047843 - RNA, 18 nt, Marburg virus
gcuggccauaucuggcau

SEQ ID NO: 3047844 - RNA, 14 nt, Marburg virus
uauucuauaucuug

SEQ ID NO: 3047845 - RNA, 18 nt, Marburg virus
gaacuuuugcuauugaug

SEQ ID NO: 3047846 - RNA, 17 nt, Marburg virus
aauagugcauuuguaua

SEQ ID NO: 3047847 - RNA, 18 nt, Marburg virus
guuuacguauuguugauu

SEQ ID NO: 3047848 - RNA, 11 nt, Marburg virus
ugaugaugcag

SEQ ID NO: 3047849 - RNA, 18 nt, Marburg virus
cuuaguuggaauuaacuu

SEQ ID NO: 3047850 - RNA, 15 nt, Marburg virus
uacugugacugaacc

SEQ ID NO: 3047851 - RNA, 16 nt, Marburg virus
aacaagaaauuauccu

SEQ ID NO: 3047852 - RNA, 13 nt, Marburg virus
uccccaauacaga

SEQ ID NO: 3047853 - RNA, 17 nt, Marburg virus
agcuguauacaaacaca

SEQ ID NO: 3047854 - RNA, 14 nt, Marburg virus
agaucgauaucuuu

SEQ ID NO: 3047855 - RNA, 15 nt, Marburg virus
guuagaauuauucau

SEQ ID NO: 3047856 - RNA, 17 nt, Marburg virus
guuaaaaacuaaauuaa

SEQ ID NO: 3047857 - RNA, 18 nt, Marburg virus
uucaagacgcuuauucau

SEQ ID NO: 3047858 - RNA, 23 nt, Marburg virus
caaccagggagaucaaauuauug

SEQ ID NO: 3047859 - RNA, 16 nt, Marburg virus
cagcaauuacaacaca

SEQ ID NO: 3047860 - RNA, 23 nt, Marburg virus
ugcugaucacggugcaaaccagu

SEQ ID NO: 3047861 - RNA, 15 nt, Marburg virus
aguuccaaauacaaa

SEQ ID NO: 3047862 - RNA, 15 nt, Marburg virus
gaauugauaaaauau

SEQ ID NO: 3047863 - RNA, 15 nt, Marburg virus
gaaaaucuaauucuc

SEQ ID NO: 3047864 - RNA, 13 nt, Marburg virus
aacaccuccaaga

SEQ ID NO: 3047865 - RNA, 15 nt, Marburg virus
acauaccaaauacug

SEQ ID NO: 3047866 - RNA, 19 nt, Marburg virus
uguuuauucaucugagcaa

SEQ ID NO: 3047867 - RNA, 21 nt, Marburg virus
auacuguuuuaauuaagaaaa

SEQ ID NO: 3047868 - RNA, 12 nt, Marburg virus
ucaacuggaaga

SEQ ID NO: 3047869 - RNA, 17 nt, Marburg virus
accaggaucaagggaaa

SEQ ID NO: 3047870 - RNA, 22 nt, Marburg virus
ucacaccagugguaacuuuuca

SEQ ID NO: 3047871 - RNA, 15 nt, Marburg virus
auuguuugggaccaa

SEQ ID NO: 3047872 - RNA, 14 nt, Marburg virus
ccauguacuuggaa

SEQ ID NO: 3047873 - RNA, 14 nt, Marburg virus
acaccaggaaaaua

SEQ ID NO: 3047874 - RNA, 16 nt, Marburg virus
ucgcuaguuaugaaug

SEQ ID NO: 3047875 - RNA, 17 nt, Marburg virus
cccaacaauggaccacu

SEQ ID NO: 3047876 - RNA, 13 nt, Marburg virus
aacagaagauaac

SEQ ID NO: 3047877 - RNA, 23 nt, Marburg virus
agacuuuuccuugaaucaaauau

SEQ ID NO: 3047878 - RNA, 20 nt, Marburg virus
agacgugccguucaaagagu

SEQ ID NO: 3047879 - RNA, 19 nt, Marburg virus
auaguagcaaagaaucauu

SEQ ID NO: 3047880 - RNA, 23 nt, Marburg virus
ucguaguguucuuuuacuggaag

SEQ ID NO: 3047881 - RNA, 18 nt, Marburg virus
accaaauaugacaaaugg

SEQ ID NO: 3047882 - RNA, 17 nt, Marburg virus
caacuguugcauaucuu

SEQ ID NO: 3047883 - RNA, 19 nt, Marburg virus
auucaagacgcuuauucau

SEQ ID NO: 3047884 - RNA, 19 nt, Marburg virus
uucucacuuuuuaagaauc

SEQ ID NO: 3047885 - RNA, 17 nt, Marburg virus
agcaauuacaacacaua

SEQ ID NO: 3047886 - RNA, 14 nt, Marburg virus
ucacaguaaucaaa

SEQ ID NO: 3047887 - RNA, 13 nt, Marburg virus
accuuggaaaauc

SEQ ID NO: 3047888 - RNA, 17 nt, Marburg virus
gaagguaugaugaagaa

SEQ ID NO: 3047889 - RNA, 12 nt, Marburg virus
cugauaauuuaa

SEQ ID NO: 3047890 - RNA, 16 nt, Marburg virus
acaauaaguuuaacua

SEQ ID NO: 3047891 - RNA, 14 nt, Marburg virus
aggaagaauuauuc

SEQ ID NO: 3047892 - RNA, 13 nt, Marburg virus
ggacaaauuauug

SEQ ID NO: 3047893 - RNA, 13 nt, Marburg virus
auguccaaacacu

SEQ ID NO: 3047894 - RNA, 15 nt, Marburg virus
uuggacaaguaacaa

SEQ ID NO: 3047895 - RNA, 21 nt, Marburg virus
ccaaugauggauauuaaauau

SEQ ID NO: 3047896 - RNA, 16 nt, Marburg virus
cccccuccuccuccaa

SEQ ID NO: 3047897 - RNA, 21 nt, Marburg virus
cuuaaaaccuaaagucauguu

SEQ ID NO: 3047898 - RNA, 20 nt, Marburg virus
uuguauagucauuauucaca

SEQ ID NO: 3047899 - RNA, 12 nt, Marburg virus
acaaaacaccac

SEQ ID NO: 3047900 - RNA, 17 nt, Marburg virus
auaacccaccggauugu

SEQ ID NO: 3047901 - RNA, 12 nt, Marburg virus
aacuguugcaua

SEQ ID NO: 3047902 - RNA, 19 nt, Marburg virus
acuuacuugggcuugaaga

SEQ ID NO: 3047903 - RNA, 20 nt, Marburg virus
ugaacuaaggaaauuucucu

SEQ ID NO: 3047904 - RNA, 16 nt, Marburg virus
gugaauguaaauuaag

SEQ ID NO: 3047905 - RNA, 15 nt, Marburg virus
auuaagaaaaacuau

SEQ ID NO: 3047906 - RNA, 16 nt, Marburg virus
agcaaacgaaagaugu

SEQ ID NO: 3047907 - RNA, 23 nt, Marburg virus
cacagcaagaaggaaacaacaca

SEQ ID NO: 3047908 - RNA, 16 nt, Marburg virus
ggagauuuuuaagaag

SEQ ID NO: 3047909 - RNA, 16 nt, Marburg virus
aaguauuuuuauaaaa

SEQ ID NO: 3047910 - RNA, 18 nt, Marburg virus
aauuauccuguauaacaa

SEQ ID NO: 3047911 - RNA, 15 nt, Marburg virus
auuacaugagauaac

SEQ ID NO: 3047912 - RNA, 22 nt, Marburg virus
aucguugagauuaaaaagacua

SEQ ID NO: 3047913 - RNA, 17 nt, Marburg virus
ucaaaggcgacaagcac

SEQ ID NO: 3047914 - RNA, 22 nt, Marburg virus
gaauccuuucuucaauaugcag

SEQ ID NO: 3047915 - RNA, 17 nt, Marburg virus
cagaaauguuagccaaa

SEQ ID NO: 3047916 - RNA, 20 nt, Marburg virus
aucugagcaaggugagacac

SEQ ID NO: 3047917 - RNA, 14 nt, Marburg virus
ucaauaugaugcaa

SEQ ID NO: 3047918 - RNA, 20 nt, Marburg virus
gcaaagagcacuaacaacac

SEQ ID NO: 3047919 - RNA, 21 nt, Marburg virus
ugggucaccgucucuuucuaa

SEQ ID NO: 3047920 - RNA, 20 nt, Marburg virus
ggaaaggacauuuuccuuaa

SEQ ID NO: 3047921 - RNA, 13 nt, Marburg virus
ccuaaggaaaauc

SEQ ID NO: 3047922 - RNA, 20 nt, Marburg virus
aaaacccagcaguauugaaa

SEQ ID NO: 3047923 - RNA, 15 nt, Marburg virus
guugagauuaaaaag

SEQ ID NO: 3047924 - RNA, 17 nt, Marburg virus
auaucggacauucaaag

SEQ ID NO: 3047925 - RNA, 20 nt, Marburg virus
aagcugaucagcuugcaaga

SEQ ID NO: 3047926 - RNA, 22 nt, Marburg virus
cuaaugcuuaucauuaucacuu

SEQ ID NO: 3047927 - RNA, 23 nt, Marburg virus
caacuacgaaccuccauacauuu

SEQ ID NO: 3047928 - RNA, 20 nt, Marburg virus
uagcuucauuucauucaaug

SEQ ID NO: 3047929 - RNA, 16 nt, Marburg virus
ccaugcuuucacuuua

SEQ ID NO: 3047930 - RNA, 12 nt, Marburg virus
caaauauuggau

SEQ ID NO: 3047931 - RNA, 15 nt, Marburg virus
cucaacaccacagac

SEQ ID NO: 3047932 - RNA, 15 nt, Marburg virus
ugguuaaaaaugaaa

SEQ ID NO: 3047933 - RNA, 14 nt, Marburg virus
auuucaacuggaag

SEQ ID NO: 3047934 - RNA, 13 nt, Marburg virus
uauaaaaaucuug

SEQ ID NO: 3047935 - RNA, 23 nt, Marburg virus
aaaugaggguuacauuuucuaga

SEQ ID NO: 3047936 - RNA, 14 nt, Marburg virus
cccacaacaccacu

SEQ ID NO: 3047937 - RNA, 17 nt, Marburg virus
gcgucuagccaaucaaa

SEQ ID NO: 3047938 - RNA, 16 nt, Marburg virus
cccccucgaaaacaac

SEQ ID NO: 3047939 - RNA, 13 nt, Marburg virus
cacugcccacagc

SEQ ID NO: 3047940 - RNA, 20 nt, Marburg virus
aacaacaagaguccaugaaa

SEQ ID NO: 3047941 - RNA, 14 nt, Marburg virus
uuaauuuacucuuu

SEQ ID NO: 3047942 - RNA, 19 nt, Marburg virus
uccaaggggaugucagaaa

SEQ ID NO: 3047943 - RNA, 10 nt, Marburg virus
aaaacaugcu

SEQ ID NO: 3047944 - RNA, 14 nt, Marburg virus
auuucauucaaugu

SEQ ID NO: 3047945 - RNA, 13 nt, Marburg virus
auuauagaggaac

SEQ ID NO: 3047946 - RNA, 15 nt, Marburg virus
uaaaaucugauccgu

SEQ ID NO: 3047947 - RNA, 15 nt, Marburg virus
aacuugaugaugcag

SEQ ID NO: 3047948 - RNA, 23 nt, Marburg virus
ucaauguuagcaauaaauuuauu

SEQ ID NO: 3047949 - RNA, 18 nt, Marburg virus
acggguuaauaaaugcuc

SEQ ID NO: 3047950 - RNA, 18 nt, Marburg virus
ugaacuaccuccacagau

SEQ ID NO: 3047951 - RNA, 20 nt, Marburg virus
aaucuugagggacaaauuau

SEQ ID NO: 3047952 - RNA, 22 nt, Marburg virus
auuucguaguuaaauuucuaga

SEQ ID NO: 3047953 - RNA, 14 nt, Marburg virus
aucuagaacaaauu

SEQ ID NO: 3047954 - RNA, 20 nt, Marburg virus
ucauaguuuaaccacauaau

SEQ ID NO: 3047955 - RNA, 16 nt, Marburg virus
caauggaacacaaacg

SEQ ID NO: 3047956 - RNA, 21 nt, Marburg virus
auucucccaccucuuuaaaaa

SEQ ID NO: 3047957 - RNA, 13 nt, Marburg virus
gacagaacacaaa

SEQ ID NO: 3047958 - RNA, 16 nt, Marburg virus
aagcacgccacagcaa

SEQ ID NO: 3047959 - RNA, 19 nt, Marburg virus
aacuccacgaagaaucaaa

SEQ ID NO: 3047960 - RNA, 19 nt, Marburg virus
ugggacaacgaguucuuga

SEQ ID NO: 3047961 - RNA, 21 nt, Marburg virus
cauuauucagugcuacaaauu

SEQ ID NO: 3047962 - RNA, 21 nt, Marburg virus
aauguugaucaaaugaccaaa

SEQ ID NO: 3047963 - RNA, 15 nt, Marburg virus
agggaacaauuuaau

SEQ ID NO: 3047964 - RNA, 12 nt, Marburg virus
acuaaacauuuc

SEQ ID NO: 3047965 - RNA, 16 nt, Marburg virus
agcuucucggacaaua

SEQ ID NO: 3047966 - RNA, 18 nt, Marburg virus
guuuauaggaacagauuu

SEQ ID NO: 3047967 - RNA, 21 nt, Marburg virus
acaaagaauugauaaaauauu

SEQ ID NO: 3047968 - RNA, 22 nt, Marburg virus
uagacagcuugcuuuacacaag

SEQ ID NO: 3047969 - RNA, 15 nt, Marburg virus
uaauaauuuucacaa

SEQ ID NO: 3047970 - RNA, 20 nt, Marburg virus
aguaagaaaaacuaaugaag

SEQ ID NO: 3047971 - RNA, 13 nt, Marburg virus
uuuauaggaacag

SEQ ID NO: 3047972 - RNA, 12 nt, Marburg virus
guauagagggac

SEQ ID NO: 3047973 - RNA, 14 nt, Marburg virus
aacaacacgaaagg

SEQ ID NO: 3047974 - RNA, 11 nt, Marburg virus
ucaacaagcuu

SEQ ID NO: 3047975 - RNA, 15 nt, Marburg virus
uuuguugcaauucaa

SEQ ID NO: 3047976 - RNA, 13 nt, Marburg virus
uccuaacaugaag

SEQ ID NO: 3047977 - RNA, 21 nt, Marburg virus
ucuacucugaacuaaggaaau

SEQ ID NO: 3047978 - RNA, 21 nt, Marburg virus
cguaugcgaauccaacgcuca

SEQ ID NO: 3047979 - RNA, 22 nt, Marburg virus
cugcuuuaaaugguuaauuaag

SEQ ID NO: 3047980 - RNA, 17 nt, Marburg virus
ucaagauuuaaaaugca

SEQ ID NO: 3047981 - RNA, 14 nt, Marburg virus
agaaaaaccaauga

SEQ ID NO: 3047982 - RNA, 18 nt, Marburg virus
guucauaugcuuucagaa

SEQ ID NO: 3047983 - RNA, 13 nt, Marburg virus
aaaacuaugaaga

SEQ ID NO: 3047984 - RNA, 15 nt, Marburg virus
uuuuguguuuucaaa

SEQ ID NO: 3047985 - RNA, 22 nt, Marburg virus
gcauuaaaaacauuucuucaga

SEQ ID NO: 3047986 - RNA, 18 nt, Marburg virus
auucaagauuuaaaaugc

SEQ ID NO: 3047987 - RNA, 22 nt, Marburg virus
auguugaugaaauuaagggaau

SEQ ID NO: 3047988 - RNA, 23 nt, Marburg virus
ugauuuuuuauaaguuuaagaua

SEQ ID NO: 3047989 - RNA, 15 nt, Marburg virus
ucauaugcuuucaga

SEQ ID NO: 3047990 - RNA, 18 nt, Marburg virus
cgaaauugcguaauugua

SEQ ID NO: 3047991 - RNA, 19 nt, Marburg virus
caucucuuuuacauacauu

SEQ ID NO: 3047992 - RNA, 18 nt, Marburg virus
aacgccuaguggaaaacg

SEQ ID NO: 3047993 - RNA, 17 nt, Marburg virus
caagaugucgaaaguuc

SEQ ID NO: 3047994 - RNA, 13 nt, Marburg virus
ucgcccaugucaa

SEQ ID NO: 3047995 - RNA, 13 nt, Marburg virus
uagucauuauuca

SEQ ID NO: 3047996 - RNA, 18 nt, Marburg virus
caacccgaccacacaaca

SEQ ID NO: 3047997 - RNA, 21 nt, Marburg virus
aaaauucacauguacuguuga

SEQ ID NO: 3047998 - RNA, 12 nt, Marburg virus
gaacucagugag

SEQ ID NO: 3047999 - RNA, 17 nt, Marburg virus
caggaguguugggacag

SEQ ID NO: 3048000 - RNA, 15 nt, Marburg virus
auuugucguaucuuu

SEQ ID NO: 3048001 - RNA, 23 nt, Marburg virus
cacccacucccucaccacaacca

SEQ ID NO: 3048002 - RNA, 18 nt, Marburg virus
uucaaguuuacugaagac

SEQ ID NO: 3048003 - RNA, 16 nt, Marburg virus
agaucaacaugccucc

SEQ ID NO: 3048004 - RNA, 13 nt, Marburg virus
aaucgauguuaug

SEQ ID NO: 3048005 - RNA, 18 nt, Marburg virus
guuacacaagagaaggaa

SEQ ID NO: 3048006 - RNA, 16 nt, Marburg virus
auucaauuguuaucau

SEQ ID NO: 3048007 - RNA, 16 nt, Marburg virus
aacuuuauuaaaacua

SEQ ID NO: 3048008 - RNA, 22 nt, Marburg virus
acauucuuauauugcuugauua

SEQ ID NO: 3048009 - RNA, 20 nt, Marburg virus
guaugcaaauugggacaacg

SEQ ID NO: 3048010 - RNA, 17 nt, Marburg virus
uguaauaauuaacuguu

SEQ ID NO: 3048011 - RNA, 22 nt, Marburg virus
ugcuacaaauucuuuuuucaau

SEQ ID NO: 3048012 - RNA, 15 nt, Marburg virus
acgacacacagagca

SEQ ID NO: 3048013 - RNA, 13 nt, Marburg virus
aauaauagugcau

SEQ ID NO: 3048014 - RNA, 12 nt, Marburg virus
aguaaucaaauu

SEQ ID NO: 3048015 - RNA, 11 nt, Marburg virus
gaacuaaggaa

SEQ ID NO: 3048016 - RNA, 16 nt, Marburg virus
uccucucagaaucagu

SEQ ID NO: 3048017 - RNA, 22 nt, Marburg virus
cuaaagucauguuugaaacuuu

SEQ ID NO: 3048018 - RNA, 13 nt, Marburg virus
cuaaacauuucaa

SEQ ID NO: 3048019 - RNA, 17 nt, Marburg virus
gauuucagucaaagaga

SEQ ID NO: 3048020 - RNA, 15 nt, Marburg virus
aguuaaauuucuaga

SEQ ID NO: 3048021 - RNA, 13 nt, Marburg virus
auucaaagcacuc

SEQ ID NO: 3048022 - RNA, 20 nt, Marburg virus
auuaaaaaauuaaaaaacuu

SEQ ID NO: 3048023 - RNA, 12 nt, Marburg virus
cagcauugacuc

SEQ ID NO: 3048024 - RNA, 13 nt, Marburg virus
gagcaauuuaagg

SEQ ID NO: 3048025 - RNA, 16 nt, Marburg virus
uaucggacauucaaag

SEQ ID NO: 3048026 - RNA, 14 nt, Marburg virus
uaauaauuuucaca

SEQ ID NO: 3048027 - RNA, 19 nt, Marburg virus
uauuuacuaaaucuuacau

SEQ ID NO: 3048028 - RNA, 17 nt, Marburg virus
uuucacuuuagaggcaa

SEQ ID NO: 3048029 - RNA, 17 nt, Marburg virus
uuuguauagauucaauu

SEQ ID NO: 3048030 - RNA, 18 nt, Marburg virus
cagcaggguauaacucca

SEQ ID NO: 3048031 - RNA, 22 nt, Marburg virus
auagauccuugaucaacaccau

SEQ ID NO: 3048032 - RNA, 22 nt, Marburg virus
cugugacugaacccaacaaaac

SEQ ID NO: 3048033 - RNA, 18 nt, Marburg virus
uauuagccccaaucuguu

SEQ ID NO: 3048034 - RNA, 13 nt, Marburg virus
ccggaacucucca

SEQ ID NO: 3048035 - RNA, 23 nt, Marburg virus
auuuaaagagauuucuuguugca

SEQ ID NO: 3048036 - RNA, 21 nt, Marburg virus
aauaacgauugauuaagaaaa

SEQ ID NO: 3048037 - RNA, 21 nt, Marburg virus
aaucacagaggauugagucau

SEQ ID NO: 3048038 - RNA, 17 nt, Marburg virus
gaucaaaugaccaaaua

SEQ ID NO: 3048039 - RNA, 16 nt, Marburg virus
aaccguacacaaguag

SEQ ID NO: 3048040 - RNA, 16 nt, Marburg virus
auccuuucuucaauau

SEQ ID NO: 3048041 - RNA, 15 nt, Marburg virus
aauaugaugcaauua

SEQ ID NO: 3048042 - RNA, 22 nt, Marburg virus
agacaugccauugacuuucuac

SEQ ID NO: 3048043 - RNA, 14 nt, Marburg virus
acaauacugugaau

SEQ ID NO: 3048044 - RNA, 15 nt, Marburg virus
auugauauugaaccu

SEQ ID NO: 3048045 - RNA, 21 nt, Marburg virus
uaaggaaaauccuuauuauug

SEQ ID NO: 3048046 - RNA, 22 nt, Marburg virus
uugcauuuaacuccauaucuua

SEQ ID NO: 3048047 - RNA, 15 nt, Marburg virus
ugaaggcauaucuua

SEQ ID NO: 3048048 - RNA, 14 nt, Marburg virus
ggaucccucuggaa

SEQ ID NO: 3048049 - RNA, 15 nt, Marburg virus
gcaauuaaucauguu

SEQ ID NO: 3048050 - RNA, 15 nt, Marburg virus
acauguuuaagauuc

SEQ ID NO: 3048051 - RNA, 17 nt, Marburg virus
gucaugggcccuucaua

SEQ ID NO: 3048052 - RNA, 23 nt, Marburg virus
uccuaaggaaaauccuuauuauu

SEQ ID NO: 3048053 - RNA, 12 nt, Marburg virus
aaaacacugccu

SEQ ID NO: 3048054 - RNA, 13 nt, Marburg virus
cuccacaacaaug

SEQ ID NO: 3048055 - RNA, 20 nt, Marburg virus
augugcguagagguuaauuu

SEQ ID NO: 3048056 - RNA, 13 nt, Marburg virus
uuugaaggaucaa

SEQ ID NO: 3048057 - RNA, 21 nt, Marburg virus
auuuuaacuuccauucaauau

SEQ ID NO: 3048058 - RNA, 18 nt, Marburg virus
guccaaacacucgcagaa

SEQ ID NO: 3048059 - RNA, 19 nt, Marburg virus
auauuacuuugaucaauuu

SEQ ID NO: 3048060 - RNA, 15 nt, Marburg virus
augugugcuugaaua

SEQ ID NO: 3048061 - RNA, 22 nt, Marburg virus
uccaugcccccccacaacacca

SEQ ID NO: 3048062 - RNA, 16 nt, Marburg virus
cugaugccaccacacu

SEQ ID NO: 3048063 - RNA, 17 nt, Marburg virus
auaaaaaucccaacaau

SEQ ID NO: 3048064 - RNA, 16 nt, Marburg virus
ucaugggcccuucaua

SEQ ID NO: 3048065 - RNA, 14 nt, Marburg virus
cacagagcacagcc

SEQ ID NO: 3048066 - RNA, 22 nt, Marburg virus
aggaaaucuuaccacagcaaag

SEQ ID NO: 3048067 - RNA, 21 nt, Marburg virus
ucaaucugggaucauauuuua

SEQ ID NO: 3048068 - RNA, 20 nt, Marburg virus
aaugaaaauagccuugucau

SEQ ID NO: 3048069 - RNA, 19 nt, Marburg virus
uucaaguuuacugaagacu

SEQ ID NO: 3048070 - RNA, 20 nt, Marburg virus
aucgucucaaaccguacaca

SEQ ID NO: 3048071 - RNA, 17 nt, Marburg virus
ugcaacaagucagugag

SEQ ID NO: 3048072 - RNA, 14 nt, Marburg virus
ucaauaugcagcau

SEQ ID NO: 3048073 - RNA, 22 nt, Marburg virus
aauuaacuuuuguugcaauuca

SEQ ID NO: 3048074 - RNA, 21 nt, Marburg virus
agcuuguaguaaggggaccau

SEQ ID NO: 3048075 - RNA, 14 nt, Marburg virus
aaccgauggaaaag

SEQ ID NO: 3048076 - RNA, 22 nt, Marburg virus
ugcagcccuugucuaaugucaa

SEQ ID NO: 3048077 - RNA, 15 nt, Marburg virus
uauagauucaauuau

SEQ ID NO: 3048078 - RNA, 13 nt, Marburg virus
gaauuugccaccc

SEQ ID NO: 3048079 - RNA, 20 nt, Marburg virus
caauuacgacacacagagca

SEQ ID NO: 3048080 - RNA, 23 nt, Marburg virus
auacccucaccacugcccacagc

SEQ ID NO: 3048081 - RNA, 19 nt, Marburg virus
gucguaucuuuaccaaaua

SEQ ID NO: 3048082 - RNA, 14 nt, Marburg virus
ugguauauuuuuga

SEQ ID NO: 3048083 - RNA, 13 nt, Marburg virus
aucagcuaucaaa

SEQ ID NO: 3048084 - RNA, 15 nt, Marburg virus
guuuuaauuaagaaa

SEQ ID NO: 3048085 - RNA, 20 nt, Marburg virus
aucuauuguucauaugcuuu

SEQ ID NO: 3048086 - RNA, 21 nt, Marburg virus
cagcaagaaggaaacaacaca

SEQ ID NO: 3048087 - RNA, 20 nt, Marburg virus
gaaaaacuaaugaagaacau

SEQ ID NO: 3048088 - RNA, 12 nt, Marburg virus
aaacaacagaug

SEQ ID NO: 3048089 - RNA, 17 nt, Marburg virus
uaacaauggaacacaaa

SEQ ID NO: 3048090 - RNA, 15 nt, Marburg virus
cuccuccuccaaaag

SEQ ID NO: 3048091 - RNA, 17 nt, Marburg virus
ucuaauuaacaacuugu

SEQ ID NO: 3048092 - RNA, 20 nt, Marburg virus
auuucguggagcaugaaccu

SEQ ID NO: 3048093 - RNA, 15 nt, Marburg virus
augaauguugaucaa

SEQ ID NO: 3048094 - RNA, 14 nt, Marburg virus
uuaaagguuuucuu

SEQ ID NO: 3048095 - RNA, 13 nt, Marburg virus
aaaaguuagaaua

SEQ ID NO: 3048096 - RNA, 21 nt, Marburg virus
aaucaucauccacgugcaaga

SEQ ID NO: 3048097 - RNA, 21 nt, Marburg virus
uugaauccggagaaauuguuc

SEQ ID NO: 3048098 - RNA, 17 nt, Marburg virus
cucucuacaaaagcauu

SEQ ID NO: 3048099 - RNA, 22 nt, Marburg virus
ggccaagcagacuuuuccuuga

SEQ ID NO: 3048100 - RNA, 12 nt, Marburg virus
ucuuguuucaaa

SEQ ID NO: 3048101 - RNA, 13 nt, Marburg virus
cagaaagaaacga

SEQ ID NO: 3048102 - RNA, 20 nt, Marburg virus
gaugcgagggcauuauucag

SEQ ID NO: 3048103 - RNA, 22 nt, Marburg virus
gauuuucucgaggcaaggacag

SEQ ID NO: 3048104 - RNA, 18 nt, Marburg virus
agaucaaacccacaagca

SEQ ID NO: 3048105 - RNA, 16 nt, Marburg virus
cuagaacaaauuuuaa

SEQ ID NO: 3048106 - RNA, 17 nt, Marburg virus
aucacgcgcacaaauua

SEQ ID NO: 3048107 - RNA, 21 nt, Marburg virus
guuuaaccacauaauaauguu

SEQ ID NO: 3048108 - RNA, 14 nt, Marburg virus
auuaaguguucuuu

SEQ ID NO: 3048109 - RNA, 23 nt, Marburg virus
uucuuaagcuaucuuaaacuuga

SEQ ID NO: 3048110 - RNA, 21 nt, Marburg virus
uuaaauuagcauggauauuca

SEQ ID NO: 3048111 - RNA, 19 nt, Marburg virus
uuugacgugcgcuggaauu

SEQ ID NO: 3048112 - RNA, 17 nt, Marburg virus
aucuguuugagcaugaa

SEQ ID NO: 3048113 - RNA, 15 nt, Marburg virus
acuagaccaucuuaa

SEQ ID NO: 3048114 - RNA, 14 nt, Marburg virus
uuaucuacauuaau

SEQ ID NO: 3048115 - RNA, 13 nt, Marburg virus
aaccaagcaauug

SEQ ID NO: 3048116 - RNA, 23 nt, Marburg virus
auugacuucucacuuuuuaagaa

SEQ ID NO: 3048117 - RNA, 20 nt, Marburg virus
accucaacgguguucaacug

SEQ ID NO: 3048118 - RNA, 17 nt, Marburg virus
guuagauuucagucaaa

SEQ ID NO: 3048119 - RNA, 22 nt, Marburg virus
ugugugaguggcuuuuaucauc

SEQ ID NO: 3048120 - RNA, 19 nt, Marburg virus
aagggauaaaaacucuccc

SEQ ID NO: 3048121 - RNA, 13 nt, Marburg virus
ccagagaagacaa

SEQ ID NO: 3048122 - RNA, 24 nt, Marburg virus
agguauaacacgugggaaauaugu

SEQ ID NO: 3048123 - RNA, 13 nt, Marburg virus
cuaaugauuguaa

SEQ ID NO: 3048124 - RNA, 19 nt, Marburg virus
aauaacguuccuuagacaa

SEQ ID NO: 3048125 - RNA, 17 nt, Marburg virus
caacuuaagaaugcauu

SEQ ID NO: 3048126 - RNA, 12 nt, Marburg virus
caauugauuuug

SEQ ID NO: 3048127 - RNA, 12 nt, Marburg virus
aauaugaugcaa

SEQ ID NO: 3048128 - RNA, 17 nt, Marburg virus
accaaucauauuccccg

SEQ ID NO: 3048129 - RNA, 16 nt, Marburg virus
uuuauaacuaaccauu

SEQ ID NO: 3048130 - RNA, 12 nt, Marburg virus
aauuacaugaga

SEQ ID NO: 3048131 - RNA, 13 nt, Marburg virus
aaacacuuggaac

SEQ ID NO: 3048132 - RNA, 23 nt, Marburg virus
gugugaaaaauuucuuuaauaag

SEQ ID NO: 3048133 - RNA, 16 nt, Marburg virus
aaagaacccaguguug

SEQ ID NO: 3048134 - RNA, 22 nt, Marburg virus
auuccuugaauguccagcauca

SEQ ID NO: 3048135 - RNA, 15 nt, Marburg virus
augaucaguucaaag

SEQ ID NO: 3048136 - RNA, 16 nt, Marburg virus
guuacugaucuugaga

SEQ ID NO: 3048137 - RNA, 19 nt, Marburg virus
guuaacuggacaacagauc

SEQ ID NO: 3048138 - RNA, 14 nt, Marburg virus
aauuaauucacaca

SEQ ID NO: 3048139 - RNA, 19 nt, Marburg virus
accaagcaauugacuucuc

SEQ ID NO: 3048140 - RNA, 20 nt, Marburg virus
gaauacauucuuauauugcu

SEQ ID NO: 3048141 - RNA, 16 nt, Marburg virus
aggugaguuauacaac

SEQ ID NO: 3048142 - RNA, 14 nt, Marburg virus
uugaugacuggaaa

SEQ ID NO: 3048143 - RNA, 16 nt, Marburg virus
uauucagugcuacaaa

SEQ ID NO: 3048144 - RNA, 17 nt, Marburg virus
aacaccuccaagaacaa

SEQ ID NO: 3048145 - RNA, 14 nt, Marburg virus
ggcugcguugcuca

SEQ ID NO: 3048146 - RNA, 15 nt, Marburg virus
ucaaauaacaaucac

SEQ ID NO: 3048147 - RNA, 13 nt, Marburg virus
gucuaaugucaaa

SEQ ID NO: 3048148 - RNA, 19 nt, Marburg virus
accaacugaucgugaagaa

SEQ ID NO: 3048149 - RNA, 17 nt, Marburg virus
ucaauauccugaugcaa

SEQ ID NO: 3048150 - RNA, 14 nt, Marburg virus
cacagcaagaagga

SEQ ID NO: 3048151 - RNA, 16 nt, Marburg virus
aauuacgacacacaga

SEQ ID NO: 3048152 - RNA, 18 nt, Marburg virus
ccuaacaugaagaccaca

SEQ ID NO: 3048153 - RNA, 15 nt, Marburg virus
aaucccucagagaag

SEQ ID NO: 3048154 - RNA, 20 nt, Marburg virus
guaugaucgcauugccucca

SEQ ID NO: 3048155 - RNA, 12 nt, Marburg virus
uuaccacagcaa

SEQ ID NO: 3048156 - RNA, 19 nt, Marburg virus
uccauucaauaugaugcaa

SEQ ID NO: 3048157 - RNA, 14 nt, Marburg virus
gauugauuaagaaa

SEQ ID NO: 3048158 - RNA, 21 nt, Marburg virus
gaggauaaaaggacaaagagg

SEQ ID NO: 3048159 - RNA, 14 nt, Marburg virus
uguuagauuucagu

SEQ ID NO: 3048160 - RNA, 19 nt, Marburg virus
uuacaccaggaaaauacug

SEQ ID NO: 3048161 - RNA, 15 nt, Marburg virus
aaaaucccaacaaug

SEQ ID NO: 3048162 - RNA, 20 nt, Marburg virus
uaaauuugaccaaaguaaug

SEQ ID NO: 3048163 - RNA, 23 nt, Marburg virus
ugcuguaagcuuacaagcuucaa

SEQ ID NO: 3048164 - RNA, 22 nt, Marburg virus
auacuuaucuacauuaauuccu

SEQ ID NO: 3048165 - RNA, 18 nt, Marburg virus
ucuacccggcaacaacac

SEQ ID NO: 3048166 - RNA, 19 nt, Marburg virus
ucaauaagugaccccaaau

SEQ ID NO: 3048167 - RNA, 13 nt, Marburg virus
aaccaugaaaauc

SEQ ID NO: 3048168 - RNA, 22 nt, Marburg virus
uguaacguagagucgaagaaca

SEQ ID NO: 3048169 - RNA, 15 nt, Marburg virus
auaaaauaaacaaga

SEQ ID NO: 3048170 - RNA, 14 nt, Marburg virus
uuuucauucaaucu

SEQ ID NO: 3048171 - RNA, 13 nt, Marburg virus
acuuaaaugagca

SEQ ID NO: 3048172 - RNA, 19 nt, Marburg virus
agucuuaucuuaauccaag

SEQ ID NO: 3048173 - RNA, 19 nt, Marburg virus
aaguugacaaucaaaucac

SEQ ID NO: 3048174 - RNA, 12 nt, Marburg virus
ucugauuuagag

SEQ ID NO: 3048175 - RNA, 15 nt, Marburg virus
uugagagaggaacaa

SEQ ID NO: 3048176 - RNA, 16 nt, Marburg virus
gaaggacacuggaagc

SEQ ID NO: 3048177 - RNA, 18 nt, Marburg virus
acucaucauauaugcaac

SEQ ID NO: 3048178 - RNA, 11 nt, Marburg virus
cauuuucuaga

SEQ ID NO: 3048179 - RNA, 19 nt, Marburg virus
uauacucgcuucaauacaa

SEQ ID NO: 3048180 - RNA, 22 nt, Marburg virus
aauucacauguacuguugauau

SEQ ID NO: 3048181 - RNA, 12 nt, Marburg virus
uaacaugaagac

SEQ ID NO: 3048182 - RNA, 20 nt, Marburg virus
ugaaaauguuauugauugag

SEQ ID NO: 3048183 - RNA, 21 nt, Marburg virus
agacauguguaggaacaugaa

SEQ ID NO: 3048184 - RNA, 19 nt, Marburg virus
augaagaacauuaagaaaa

SEQ ID NO: 3048185 - RNA, 15 nt, Marburg virus
cuucauaaucuguuu

SEQ ID NO: 3048186 - RNA, 17 nt, Marburg virus
guuuauaucuagaacaa

SEQ ID NO: 3048187 - RNA, 22 nt, Marburg virus
aaucauacacauaauaaccauu

SEQ ID NO: 3048188 - RNA, 16 nt, Marburg virus
caccaaucaucaucca

SEQ ID NO: 3048189 - RNA, 19 nt, Marburg virus
uggcuuaaauuagcaugga

SEQ ID NO: 3048190 - RNA, 20 nt, Marburg virus
aaauugaucaaacacuugga

SEQ ID NO: 3048191 - RNA, 17 nt, Marburg virus
acaugcuacaauauaag

SEQ ID NO: 3048192 - RNA, 15 nt, Marburg virus
cuucaagaauacaac

SEQ ID NO: 3048193 - RNA, 13 nt, Marburg virus
augacuugauuca

SEQ ID NO: 3048194 - RNA, 15 nt, Marburg virus
cugaacccaacaaaa

SEQ ID NO: 3048195 - RNA, 15 nt, Marburg virus
augucagaaauguua

SEQ ID NO: 3048196 - RNA, 15 nt, Marburg virus
aagccgaaauuuauc

SEQ ID NO: 3048197 - RNA, 23 nt, Marburg virus
uggguuuauaucuagaacaaauu

SEQ ID NO: 3048198 - RNA, 23 nt, Marburg virus
aaaaugggaaggacacuggaagc

SEQ ID NO: 3048199 - RNA, 17 nt, Marburg virus
ugaauggcuucaacaac

SEQ ID NO: 3048200 - RNA, 20 nt, Marburg virus
ucuucaagguucccuggcca

SEQ ID NO: 3048201 - RNA, 24 nt, Marburg virus
cuuuguugauacccuugagagaca

SEQ ID NO: 3048202 - RNA, 21 nt, Marburg virus
gacaaugauuauuguuugaaa

SEQ ID NO: 3048203 - RNA, 20 nt, Marburg virus
aaucaucaaccagugugcaa

SEQ ID NO: 3048204 - RNA, 15 nt, Marburg virus
gaaaauccuuauuau

SEQ ID NO: 3048205 - RNA, 23 nt, Marburg virus
ucacaggcagcuauacaaucacc

SEQ ID NO: 3048206 - RNA, 15 nt, Marburg virus
agaugauaacagaua

SEQ ID NO: 3048207 - RNA, 20 nt, Marburg virus
cccucgaucugacacaauac

SEQ ID NO: 3048208 - RNA, 12 nt, Marburg virus
gcacaaaaugau

SEQ ID NO: 3048209 - RNA, 20 nt, Marburg virus
ugaaaaggaagaauuauucu

SEQ ID NO: 3048210 - RNA, 17 nt, Marburg virus
auaucuuccaaaauaua

SEQ ID NO: 3048211 - RNA, 20 nt, Marburg virus
uaguagcguuaccuuucaau

SEQ ID NO: 3048212 - RNA, 16 nt, Marburg virus
caagaauacaacucca

SEQ ID NO: 3048213 - RNA, 19 nt, Marburg virus
ccaacaauggaccacugcu

SEQ ID NO: 3048214 - RNA, 16 nt, Marburg virus
ugcuuacuuaaaugag

SEQ ID NO: 3048215 - RNA, 14 nt, Marburg virus
auugauuaagaaaa

SEQ ID NO: 3048216 - RNA, 22 nt, Marburg virus
uauccaucuuaagugaauccuu

SEQ ID NO: 3048217 - RNA, 19 nt, Marburg virus
aaaaaugaggguuacauuu

SEQ ID NO: 3048218 - RNA, 22 nt, Marburg virus
auuccccggugguuuauuuuca

SEQ ID NO: 3048219 - RNA, 13 nt, Marburg virus
auaguauaaagua

SEQ ID NO: 3048220 - RNA, 21 nt, Marburg virus
uccaaacauggcagaauuauc

SEQ ID NO: 3048221 - RNA, 20 nt, Marburg virus
aauaagugaccccaaauuca

SEQ ID NO: 3048222 - RNA, 12 nt, Marburg virus
gacgcuuauuca

SEQ ID NO: 3048223 - RNA, 16 nt, Marburg virus
aaaauagccuugucau

SEQ ID NO: 3048224 - RNA, 15 nt, Marburg virus
aacaagaagaagaaa

SEQ ID NO: 3048225 - RNA, 15 nt, Marburg virus
auauuaaguguguau

SEQ ID NO: 3048226 - RNA, 21 nt, Marburg virus
gacaagaugucgaaaguucuu

SEQ ID NO: 3048227 - RNA, 13 nt, Marburg virus
cuaucaaaucagc

SEQ ID NO: 3048228 - RNA, 16 nt, Marburg virus
uccuccaaaagacaug

SEQ ID NO: 3048229 - RNA, 20 nt, Marburg virus
ugaaaauagccuugucaugu

SEQ ID NO: 3048230 - RNA, 20 nt, Marburg virus
gucuauuucaacuuaagaau

SEQ ID NO: 3048231 - RNA, 17 nt, Marburg virus
caaaguaaugaaaauag

SEQ ID NO: 3048232 - RNA, 13 nt, Marburg virus
uaauagugcauuu

SEQ ID NO: 3048233 - RNA, 21 nt, Marburg virus
ccaauuacgacacacagagca

SEQ ID NO: 3048234 - RNA, 14 nt, Marburg virus
ugaagaacauuaag

SEQ ID NO: 3048235 - RNA, 20 nt, Marburg virus
uuuauacugcugguuuaauu

SEQ ID NO: 3048236 - RNA, 13 nt, Marburg virus
uuaaaaaccaaaa

SEQ ID NO: 3048237 - RNA, 20 nt, Marburg virus
ucaagcauauuucauucaaa

SEQ ID NO: 3048238 - RNA, 17 nt, Marburg virus
uaacagguaugacugag

SEQ ID NO: 3048239 - RNA, 21 nt, Marburg virus
aacuuguaccucuaaggaaaa

SEQ ID NO: 3048240 - RNA, 22 nt, Marburg virus
aauaugcagcauccaacucaau

SEQ ID NO: 3048241 - RNA, 22 nt, Marburg virus
ugaaacuuuuuguguuuucaaa

SEQ ID NO: 3048242 - RNA, 13 nt, Marburg virus
aaauguccaaaca

SEQ ID NO: 3048243 - RNA, 13 nt, Marburg virus
uauccugaugcaa

SEQ ID NO: 3048244 - RNA, 13 nt, Marburg virus
uuuacugaagacu

SEQ ID NO: 3048245 - RNA, 21 nt, Marburg virus
uaagacuggccgaaaaugcuc

SEQ ID NO: 3048246 - RNA, 16 nt, Marburg virus
ugaauccuuucuucaa

SEQ ID NO: 3048247 - RNA, 20 nt, Marburg virus
uggaaauuuaaaauuucagg

SEQ ID NO: 3048248 - RNA, 17 nt, Marburg virus
acagacccaaacaauga

SEQ ID NO: 3048249 - RNA, 16 nt, Marburg virus
aaaugcuguaagcuua

SEQ ID NO: 3048250 - RNA, 19 nt, Marburg virus
ccuuagaaaaauucacaug

SEQ ID NO: 3048251 - RNA, 16 nt, Marburg virus
aacauggcagaauuau

SEQ ID NO: 3048252 - RNA, 15 nt, Marburg virus
acacuggaagcaauu

SEQ ID NO: 3048253 - RNA, 14 nt, Marburg virus
accgucacaugaau

SEQ ID NO: 3048254 - RNA, 18 nt, Marburg virus
ugggaaggacacuggaag

SEQ ID NO: 3048255 - RNA, 13 nt, Marburg virus
cauuugaugcuuu

SEQ ID NO: 3048256 - RNA, 18 nt, Marburg virus
acagccacugaaaaugaa

SEQ ID NO: 3048257 - RNA, 23 nt, Marburg virus
gcaagggcuuucaucaacaaugc

SEQ ID NO: 3048258 - RNA, 18 nt, Marburg virus
gcauuagaauuucuugaa

SEQ ID NO: 3048259 - RNA, 19 nt, Marburg virus
accacaacggcaccaaaua

SEQ ID NO: 3048260 - RNA, 16 nt, Marburg virus
gauccuauuacuuguu

SEQ ID NO: 3048261 - RNA, 14 nt, Marburg virus
uaauauuacuaaca

SEQ ID NO: 3048262 - RNA, 12 nt, Marburg virus
caagaaggaaac

SEQ ID NO: 3048263 - RNA, 17 nt, Marburg virus
agcacagccacugaaaa

SEQ ID NO: 3048264 - RNA, 20 nt, Marburg virus
aucuuuccgaguugauacaa

SEQ ID NO: 3048265 - RNA, 19 nt, Marburg virus
guugaucccggcggaucag

SEQ ID NO: 3048266 - RNA, 17 nt, Marburg virus
uggaagacgguuucaaa

SEQ ID NO: 3048267 - RNA, 12 nt, Marburg virus
cgguacaggaau

SEQ ID NO: 3048268 - RNA, 14 nt, Marburg virus
cuuuacaccaggaa

SEQ ID NO: 3048269 - RNA, 23 nt, Marburg virus
agcaagggcuuucaucaacaaug

SEQ ID NO: 3048270 - RNA, 19 nt, Marburg virus
caaucucuacuaacaacac

SEQ ID NO: 3048271 - RNA, 17 nt, Marburg virus
uuaagaaucaacuaaca

SEQ ID NO: 3048272 - RNA, 16 nt, Marburg virus
ccaaaccgcaucaucu

SEQ ID NO: 3048273 - RNA, 11 nt, Marburg virus
acacuggaagc

SEQ ID NO: 3048274 - RNA, 15 nt, Marburg virus
caaaaccaacacaac

SEQ ID NO: 3048275 - RNA, 16 nt, Marburg virus
aaaucuuaccacagca

SEQ ID NO: 3048276 - RNA, 17 nt, Marburg virus
cuuguuguggugagaca

SEQ ID NO: 3048277 - RNA, 19 nt, Marburg virus
caggaaaucuuaccacagc

SEQ ID NO: 3048278 - RNA, 17 nt, Marburg virus
uaaauauccaucaagca

SEQ ID NO: 3048279 - RNA, 23 nt, Marburg virus
aucuugaccuuaauuccacagca

SEQ ID NO: 3048280 - RNA, 13 nt, Marburg virus
uaaauauaaaaga

SEQ ID NO: 3048281 - RNA, 20 nt, Marburg virus
ugugaauguaaauuaagaaa

SEQ ID NO: 3048282 - RNA, 22 nt, Marburg virus
uguuagcaauaaauuuauuaaa

SEQ ID NO: 3048283 - RNA, 14 nt, Marburg virus
uuugauauucaauu

SEQ ID NO: 3048284 - RNA, 15 nt, Marburg virus
ggaucagcuaucaaa

SEQ ID NO: 3048285 - RNA, 16 nt, Marburg virus
gaccugauuguugcau

SEQ ID NO: 3048286 - RNA, 16 nt, Marburg virus
uuuuuguguuuucaaa

SEQ ID NO: 3048287 - RNA, 23 nt, Marburg virus
caaauguuacggaaaaaagcaua

SEQ ID NO: 3048288 - RNA, 24 nt, Marburg virus
ggugacuuaaaccuagaugaucag

SEQ ID NO: 3048289 - RNA, 19 nt, Marburg virus
agacacuaaacauuucaaa

SEQ ID NO: 3048290 - RNA, 15 nt, Marburg virus
caaucucuacuaaca

SEQ ID NO: 3048291 - RNA, 16 nt, Marburg virus
aguuccaguaaaaaca

SEQ ID NO: 3048292 - RNA, 16 nt, Marburg virus
uuauuugaauauucaa

SEQ ID NO: 3048293 - RNA, 16 nt, Marburg virus
uuuuaaacuaccucuu

SEQ ID NO: 3048294 - RNA, 15 nt, Marburg virus
auuuauauuuacugg

SEQ ID NO: 3048295 - RNA, 19 nt, Marburg virus
uauauaaaagaaauaguaa

SEQ ID NO: 3048296 - RNA, 14 nt, Marburg virus
cuucauaaucuguu

SEQ ID NO: 3048297 - RNA, 14 nt, Marburg virus
ucaacuaacaacau

SEQ ID NO: 3048298 - RNA, 13 nt, Marburg virus
auccuauuuuccu

SEQ ID NO: 3048299 - RNA, 18 nt, Marburg virus
uuacaacacauacaugca

SEQ ID NO: 3048300 - RNA, 23 nt, Marburg virus
acuuaagucauucuuuuuaaaau

SEQ ID NO: 3048301 - RNA, 23 nt, Marburg virus
cuuaauccaagggauaaaaacuc

SEQ ID NO: 3048302 - RNA, 18 nt, Marburg virus
agcauggccuaaaugggu

SEQ ID NO: 3048303 - RNA, 20 nt, Marburg virus
caacacgaaaggccccacca

SEQ ID NO: 3048304 - RNA, 22 nt, Marburg virus
caaaagcauucccuagcaacau

SEQ ID NO: 3048305 - RNA, 15 nt, Marburg virus
ugcauaucuuccaaa

SEQ ID NO: 3048306 - RNA, 22 nt, Marburg virus
auuacuuguuacuauuguguga

SEQ ID NO: 3048307 - RNA, 14 nt, Marburg virus
gcauuggaauagaa

SEQ ID NO: 3048308 - RNA, 18 nt, Marburg virus
cuuagaugauaacagaua

SEQ ID NO: 3048309 - RNA, 23 nt, Marburg virus
uauauuuuauaaaccaagcaauu

SEQ ID NO: 3048310 - RNA, 20 nt, Marburg virus
uaagaaaaacuaugaagaac

SEQ ID NO: 3048311 - RNA, 19 nt, Marburg virus
uuucacauagguucugauu

SEQ ID NO: 3048312 - RNA, 19 nt, Marburg virus
aucccucuggaaaauccuu

SEQ ID NO: 3048313 - RNA, 17 nt, Marburg virus
auuuauaacuaaccauu

SEQ ID NO: 3048314 - RNA, 18 nt, Marburg virus
auauucaaggucaaaacc

SEQ ID NO: 3048315 - RNA, 16 nt, Marburg virus
auaauccgaaaugcug

SEQ ID NO: 3048316 - RNA, 21 nt, Marburg virus
ucauacgaucauuuuauucuu

SEQ ID NO: 3048317 - RNA, 21 nt, Marburg virus
auucuaagugaaggagagaau

SEQ ID NO: 3048318 - RNA, 23 nt, Marburg virus
cucaaauauuauugcucauaauu

SEQ ID NO: 3048319 - RNA, 19 nt, Marburg virus
accuugauaaucuaacaaa

SEQ ID NO: 3048320 - RNA, 14 nt, Marburg virus
aagaucaacaugcc

SEQ ID NO: 3048321 - RNA, 13 nt, Marburg virus
uauuacuaacaaa

SEQ ID NO: 3048322 - RNA, 18 nt, Marburg virus
augcaaaccauaaggaaa

SEQ ID NO: 3048323 - RNA, 19 nt, Marburg virus
uucuaggaggguuaucauu

SEQ ID NO: 3048324 - RNA, 22 nt, Marburg virus
agcuaugauugucaauaagaca

SEQ ID NO: 3048325 - RNA, 22 nt, Marburg virus
ccagagaucaaacccacaagca

SEQ ID NO: 3048326 - RNA, 23 nt, Marburg virus
ucuuaagugaauccuuucuucaa

SEQ ID NO: 3048327 - RNA, 16 nt, Marburg virus
auuaacuuuuguugca

SEQ ID NO: 3048328 - RNA, 18 nt, Marburg virus
cucaccacugcccacagc

SEQ ID NO: 3048329 - RNA, 16 nt, Marburg virus
auuaaauaguugucau

SEQ ID NO: 3048330 - RNA, 18 nt, Marburg virus
uuuaguagcguuaccuuu

SEQ ID NO: 3048331 - RNA, 14 nt, Marburg virus
ggcagcagggcuca

SEQ ID NO: 3048332 - RNA, 23 nt, Marburg virus
auguuguaaaugaccacggaaaa

SEQ ID NO: 3048333 - RNA, 12 nt, Marburg virus
uaagcuaucaaa

SEQ ID NO: 3048334 - RNA, 19 nt, Marburg virus
agugaauccuuucuucaau

SEQ ID NO: 3048335 - RNA, 16 nt, Marburg virus
uacccggcaacaacac

SEQ ID NO: 3048336 - RNA, 14 nt, Marburg virus
aggaucaagggaaa

SEQ ID NO: 3048337 - RNA, 18 nt, Marburg virus
ugauauuucuuguuucaa

SEQ ID NO: 3048338 - RNA, 23 nt, Marburg virus
cagagaucaaacccacaagcacc

SEQ ID NO: 3048339 - RNA, 20 nt, Marburg virus
aaauuaauugggaacaccau

SEQ ID NO: 3048340 - RNA, 20 nt, Marburg virus
uggcuuagaugauaacagau

SEQ ID NO: 3048341 - RNA, 17 nt, Marburg virus
gauuaguuuguauugau

SEQ ID NO: 3048342 - RNA, 16 nt, Marburg virus
auuucauucaaacacc

SEQ ID NO: 3048343 - RNA, 22 nt, Marburg virus
acacagagcacagccacugaaa

SEQ ID NO: 3048344 - RNA, 17 nt, Marburg virus
ucuuuaauauucagaaa

SEQ ID NO: 3048345 - RNA, 19 nt, Marburg virus
uaacuggacaacagaucau

SEQ ID NO: 3048346 - RNA, 19 nt, Marburg virus
aacuacagaagggacaaug

SEQ ID NO: 3048347 - RNA, 21 nt, Marburg virus
uaacaacaagaguccaugaaa

SEQ ID NO: 3048348 - RNA, 21 nt, Marburg virus
guuucauaugcugccauauuu

SEQ ID NO: 3048349 - RNA, 24 nt, Marburg virus
caaauuauugccauguacuuggaa

SEQ ID NO: 3048350 - RNA, 20 nt, Marburg virus
uuauuaaauaguugucauau

SEQ ID NO: 3048351 - RNA, 21 nt, Marburg virus
uucacugaagggaacauagca

SEQ ID NO: 3048352 - RNA, 14 nt, Marburg virus
caacggcacaaccg

SEQ ID NO: 3048353 - RNA, 16 nt, Marburg virus
cuuauauugaugcauu

SEQ ID NO: 3048354 - RNA, 23 nt, Marburg virus
ccaacccgaccacacaacaucuu

SEQ ID NO: 3048355 - RNA, 20 nt, Marburg virus
caauaucccuugugaaucau

SEQ ID NO: 3048356 - RNA, 16 nt, Marburg virus
cuagaaugucaaugug

SEQ ID NO: 3048357 - RNA, 19 nt, Marburg virus
ucauaaucuguuugagcau

SEQ ID NO: 3048358 - RNA, 23 nt, Marburg virus
ggaucaagcauauuucauucaaa

SEQ ID NO: 3048359 - RNA, 15 nt, Marburg virus
gaugcaauuaaucau

SEQ ID NO: 3048360 - RNA, 15 nt, Marburg virus
uaccacagcaaagag

SEQ ID NO: 3048361 - RNA, 16 nt, Marburg virus
aucucagcuuguugaa

SEQ ID NO: 3048362 - RNA, 12 nt, Marburg virus
uaguauacugua

SEQ ID NO: 3048363 - RNA, 19 nt, Marburg virus
aaucuugaccuuaauucca

SEQ ID NO: 3048364 - RNA, 21 nt, Marburg virus
cucugaugacaagugacaaaa

SEQ ID NO: 3048365 - RNA, 16 nt, Marburg virus
aauucaaguuuacuga

SEQ ID NO: 3048366 - RNA, 11 nt, Marburg virus
gguaugacuga

SEQ ID NO: 3048367 - RNA, 14 nt, Marburg virus
cuuucacuuuagag

SEQ ID NO: 3048368 - RNA, 21 nt, Marburg virus
agucaaagguguuccagcaug

SEQ ID NO: 3048369 - RNA, 23 nt, Marburg virus
acacuagaucacggaucaagcau

SEQ ID NO: 3048370 - RNA, 14 nt, Marburg virus
uucuuauauugcuu

SEQ ID NO: 3048371 - RNA, 22 nt, Marburg virus
aaguuaacuggacaacagauca

SEQ ID NO: 3048372 - RNA, 22 nt, Marburg virus
aacaacauagaaaacauauuua

SEQ ID NO: 3048373 - RNA, 14 nt, Marburg virus
aaaacaccaccaau

SEQ ID NO: 3048374 - RNA, 13 nt, Marburg virus
ucagaucacagua

SEQ ID NO: 3048375 - RNA, 19 nt, Marburg virus
caugaagaacauuaagaaa

SEQ ID NO: 3048376 - RNA, 18 nt, Marburg virus
guagauuauaugauuuuu

SEQ ID NO: 3048377 - RNA, 21 nt, Marburg virus
gaaugucugccaugcuuucac

SEQ ID NO: 3048378 - RNA, 20 nt, Marburg virus
ucuaaacgaaguaacaacaa

SEQ ID NO: 3048379 - RNA, 23 nt, Marburg virus
gggaggauuuuucuccuaaggaa

SEQ ID NO: 3048380 - RNA, 14 nt, Marburg virus
ucuuaaaagggaaa

SEQ ID NO: 3048381 - RNA, 19 nt, Marburg virus
caggguccggagaacagga

SEQ ID NO: 3048382 - RNA, 17 nt, Marburg virus
aacggcaccaaauauga

SEQ ID NO: 3048383 - RNA, 18 nt, Marburg virus
aauacugugaauuauucu

SEQ ID NO: 3048384 - RNA, 19 nt, Marburg virus
uagcucaaguccuuucaaa

SEQ ID NO: 3048385 - RNA, 15 nt, Marburg virus
caugcgcaaucugua

SEQ ID NO: 3048386 - RNA, 22 nt, Marburg virus
gaugcaauuaaucauguugaug

SEQ ID NO: 3048387 - RNA, 13 nt, Marburg virus
ugauauuucuugu

SEQ ID NO: 3048388 - RNA, 22 nt, Marburg virus
uguugcauuggaauagaagacu

SEQ ID NO: 3048389 - RNA, 15 nt, Marburg virus
uuauauaauuacuca

SEQ ID NO: 3048390 - RNA, 22 nt, Marburg virus
cucuacucugaacuaaggaaau

SEQ ID NO: 3048391 - RNA, 21 nt, Marburg virus
aguaauuuauuucugucuuaa

SEQ ID NO: 3048392 - RNA, 21 nt, Marburg virus
augaacaauaucccuugugaa

SEQ ID NO: 3048393 - RNA, 17 nt, Marburg virus
cuuuguuagaauuauuc

SEQ ID NO: 3048394 - RNA, 15 nt, Marburg virus
uguuuuaucaugauu

SEQ ID NO: 3048395 - RNA, 13 nt, Marburg virus
uucagaaagaaac

SEQ ID NO: 3048396 - RNA, 15 nt, Marburg virus
ccaccucuuuaaaaa

SEQ ID NO: 3048397 - RNA, 14 nt, Marburg virus
cacaaguagggaaa

SEQ ID NO: 3048398 - RNA, 19 nt, Marburg virus
augacaagugacaaaauuu

SEQ ID NO: 3048399 - RNA, 13 nt, Marburg virus
ugaggauuuaagg

SEQ ID NO: 3048400 - RNA, 19 nt, Marburg virus
agggaacagaaagaagcau

SEQ ID NO: 3048401 - RNA, 14 nt, Marburg virus
aaaacuaaugaaga

SEQ ID NO: 3048402 - RNA, 21 nt, Marburg virus
guauaacaaagaauauaccua

SEQ ID NO: 3048403 - RNA, 17 nt, Marburg virus
gcagucccaccaaucau

SEQ ID NO: 3048404 - RNA, 22 nt, Marburg virus
agcagauggacuagcaaaagca

SEQ ID NO: 3048405 - RNA, 11 nt, Marburg virus
aagaaggaaac

SEQ ID NO: 3048406 - RNA, 14 nt, Marburg virus
uacaagucaggaaa

SEQ ID NO: 3048407 - RNA, 20 nt, Marburg virus
uucaaacaccccaaauuuuc

SEQ ID NO: 3048408 - RNA, 17 nt, Marburg virus
ugcccccccacaacacc

SEQ ID NO: 3048409 - RNA, 16 nt, Marburg virus
aauuacagcaaucauu

SEQ ID NO: 3048410 - RNA, 16 nt, Marburg virus
gaauuacagcaaucau

SEQ ID NO: 3048411 - RNA, 21 nt, Marburg virus
gcaagaaggaaacaacacaga

SEQ ID NO: 3048412 - RNA, 11 nt, Marburg virus
uagaauuauuc

SEQ ID NO: 3048413 - RNA, 13 nt, Marburg virus
caauaugaugcaa

SEQ ID NO: 3048414 - RNA, 14 nt, Marburg virus
aauauccugaugca

SEQ ID NO: 3048415 - RNA, 14 nt, Marburg virus
aaaauuaaaaaacu

SEQ ID NO: 3048416 - RNA, 23 nt, Marburg virus
uguaagaaauuagggaaauacug

SEQ ID NO: 3048417 - RNA, 16 nt, Marburg virus
auucagaaaagguuuu

SEQ ID NO: 3048418 - RNA, 19 nt, Marburg virus
acauuggggaaagaacuag

SEQ ID NO: 3048419 - RNA, 13 nt, Marburg virus
caucuuaauagaa

SEQ ID NO: 3048420 - RNA, 13 nt, Marburg virus
aaaccaagcaauu

SEQ ID NO: 3048421 - RNA, 16 nt, Marburg virus
ugaaaagacuuccaaa

SEQ ID NO: 3048422 - RNA, 23 nt, Marburg virus
uugacuucucacuuuuuaagaau

SEQ ID NO: 3048423 - RNA, 18 nt, Marburg virus
cacaauggauuugcauuu

SEQ ID NO: 3048424 - RNA, 22 nt, Marburg virus
aacuguuggcuuagaugauaac

SEQ ID NO: 3048425 - RNA, 15 nt, Marburg virus
cuagagcaauuuaag

SEQ ID NO: 3048426 - RNA, 23 nt, Marburg virus
gacuggccgaaaaugcucuccag

SEQ ID NO: 3048427 - RNA, 14 nt, Marburg virus
acaacaucuuguau

SEQ ID NO: 3048428 - RNA, 20 nt, Marburg virus
ucaagaauuacagcaaucau

SEQ ID NO: 3048429 - RNA, 18 nt, Marburg virus
aauuauccuaacaugaag

SEQ ID NO: 3048430 - RNA, 20 nt, Marburg virus
caaagagcacuaacaacacg

SEQ ID NO: 3048431 - RNA, 21 nt, Marburg virus
uagcaaagaaucauuaucauu

SEQ ID NO: 3048432 - RNA, 23 nt, Marburg virus
uguugauauagcuaauuucuuga

SEQ ID NO: 3048433 - RNA, 14 nt, Marburg virus
agaauuaccgugga

SEQ ID NO: 3048434 - RNA, 10 nt, Marburg virus
cucacaggca

SEQ ID NO: 3048435 - RNA, 21 nt, Marburg virus
cauauugugucaaauucauuu

SEQ ID NO: 3048436 - RNA, 13 nt, Marburg virus
cuucagaacuguu

SEQ ID NO: 3048437 - RNA, 12 nt, Marburg virus
ucaggcaauaaa

SEQ ID NO: 3048438 - RNA, 14 nt, Marburg virus
auaaaugcuccaau

SEQ ID NO: 3048439 - RNA, 14 nt, Marburg virus
aaugaacaaaccag

SEQ ID NO: 3048440 - RNA, 17 nt, Marburg virus
augccauugacuuucua

SEQ ID NO: 3048441 - RNA, 17 nt, Marburg virus
auacaaagacgaucuuu

SEQ ID NO: 3048442 - RNA, 14 nt, Marburg virus
ucuuuuacuggaag

SEQ ID NO: 3048443 - RNA, 20 nt, Marburg virus
caacugaugccaccacacuc

SEQ ID NO: 3048444 - RNA, 18 nt, Marburg virus
uucacauguacuguugau

SEQ ID NO: 3048445 - RNA, 23 nt, Marburg virus
gacuuccaaacauggcagaauua

SEQ ID NO: 3048446 - RNA, 14 nt, Marburg virus
ccaacccaacaauu

SEQ ID NO: 3048447 - RNA, 14 nt, Marburg virus
gcgcacaaauuaac

SEQ ID NO: 3048448 - RNA, 17 nt, Marburg virus
aguauacucgcuucaau

SEQ ID NO: 3048449 - RNA, 15 nt, Marburg virus
acuauggugaugcga

SEQ ID NO: 3048450 - RNA, 12 nt, Marburg virus
cuucauuucauu

SEQ ID NO: 3048451 - RNA, 15 nt, Marburg virus
agugcacaaaaugau

SEQ ID NO: 3048452 - RNA, 12 nt, Marburg virus
ucaugaaacuca

SEQ ID NO: 3048453 - RNA, 13 nt, Marburg virus
aggacacuggaag

SEQ ID NO: 3048454 - RNA, 18 nt, Marburg virus
aacuaccuccacagauca

SEQ ID NO: 3048455 - RNA, 15 nt, Marburg virus
aggauuuaagggaac

SEQ ID NO: 3048456 - RNA, 20 nt, Marburg virus
cugauuguugcauuggaaua

SEQ ID NO: 3048457 - RNA, 12 nt, Marburg virus
cuuuuuaagaau

SEQ ID NO: 3048458 - RNA, 15 nt, Marburg virus
acuguuuuaauuaag

SEQ ID NO: 3048459 - RNA, 21 nt, Marburg virus
aauuauccuuuauuaagaaaa

SEQ ID NO: 3048460 - RNA, 16 nt, Marburg virus
aauccggagaaauugu

SEQ ID NO: 3048461 - RNA, 20 nt, Marburg virus
acaugaagaccacaugucuc

SEQ ID NO: 3048462 - RNA, 22 nt, Marburg virus
cuuauugcgagacuugaacaca

SEQ ID NO: 3048463 - RNA, 20 nt, Marburg virus
uucauaugcugccauauuua

SEQ ID NO: 3048464 - RNA, 22 nt, Marburg virus
aaauauuggacaaguaacaaug

SEQ ID NO: 3048465 - RNA, 20 nt, Marburg virus
aagguggggaggaacaugca

SEQ ID NO: 3048466 - RNA, 14 nt, Marburg virus
agaaucaaacaugu

SEQ ID NO: 3048467 - RNA, 21 nt, Marburg virus
gaaauuauccuaacaugaaga

SEQ ID NO: 3048468 - RNA, 16 nt, Marburg virus
uaucuuuaccaaauau

SEQ ID NO: 3048469 - RNA, 23 nt, Marburg virus
aaucaaauuuauuugaauauuca

SEQ ID NO: 3048470 - RNA, 19 nt, Marburg virus
cucaccgucccuuuucauu

SEQ ID NO: 3048471 - RNA, 12 nt, Marburg virus
aacagaaauugu

SEQ ID NO: 3048472 - RNA, 21 nt, Marburg virus
cauaguuuaaccacauaauaa

SEQ ID NO: 3048473 - RNA, 19 nt, Marburg virus
agaaagcagucccaccaau

SEQ ID NO: 3048474 - RNA, 14 nt, Marburg virus
ugcuuuaaaugguu

SEQ ID NO: 3048475 - RNA, 15 nt, Marburg virus
guauacucgcuucaa

SEQ ID NO: 3048476 - RNA, 23 nt, Marburg virus
cucugaugacaagugacaaaauu

SEQ ID NO: 3048477 - RNA, 13 nt, Marburg virus
agggcauuauuca

SEQ ID NO: 3048478 - RNA, 18 nt, Marburg virus
caaucauacacauaauaa

SEQ ID NO: 3048479 - RNA, 21 nt, Marburg virus
agacagggcuacugcugugaa

SEQ ID NO: 3048480 - RNA, 13 nt, Marburg virus
uuaauuaagaaaa

SEQ ID NO: 3048481 - RNA, 14 nt, Marburg virus
aauuauacccacaa

SEQ ID NO: 3048482 - RNA, 14 nt, Marburg virus
augcaauuaaucau

SEQ ID NO: 3048483 - RNA, 18 nt, Marburg virus
auaaacuuguagaauuac

SEQ ID NO: 3048484 - RNA, 13 nt, Marburg virus
gaucgcccuccau

SEQ ID NO: 3048485 - RNA, 20 nt, Marburg virus
ucccucagagaaguuacaca

SEQ ID NO: 3048486 - RNA, 18 nt, Marburg virus
aauaaucaccaauucauu

SEQ ID NO: 3048487 - RNA, 16 nt, Marburg virus
uaugccaauuaagaaa

SEQ ID NO: 3048488 - RNA, 15 nt, Marburg virus
uacaugcaauacuug

SEQ ID NO: 3048489 - RNA, 19 nt, Marburg virus
aauaugccaauuaagaaaa

SEQ ID NO: 3048490 - RNA, 17 nt, Marburg virus
ugcauaucuuccaaaau

SEQ ID NO: 3048491 - RNA, 20 nt, Marburg virus
cauuguucuaccaacaguca

SEQ ID NO: 3048492 - RNA, 19 nt, Marburg virus
ucuccuaaggaaaauccuu

SEQ ID NO: 3048493 - RNA, 14 nt, Marburg virus
uccacgugcaagau

SEQ ID NO: 3048494 - RNA, 20 nt, Marburg virus
uagagaucaugaccuugaua

SEQ ID NO: 3048495 - RNA, 13 nt, Marburg virus
gaaguaacaacaa

SEQ ID NO: 3048496 - RNA, 20 nt, Marburg virus
guaagaaaaacuaaugaaga

SEQ ID NO: 3048497 - RNA, 12 nt, Marburg virus
gaucuacuuaua

SEQ ID NO: 3048498 - RNA, 20 nt, Marburg virus
aaauagccuugucauguuag

SEQ ID NO: 3048499 - RNA, 14 nt, Marburg virus
gcccuggaaucgaa

SEQ ID NO: 3048500 - RNA, 18 nt, Marburg virus
cuacuuaucuacuuugau

SEQ ID NO: 3048501 - RNA, 20 nt, Marburg virus
auaaguuuaagauaucuuaa

SEQ ID NO: 3048502 - RNA, 17 nt, Marburg virus
aaggaauucgacagcau

SEQ ID NO: 3048503 - RNA, 16 nt, Marburg virus
uuuacguauuguugau

SEQ ID NO: 3048504 - RNA, 20 nt, Marburg virus
ugauggcccgaaaaaugcuc

SEQ ID NO: 3048505 - RNA, 21 nt, Marburg virus
cuaaaauaauaagugauuuaa

SEQ ID NO: 3048506 - RNA, 13 nt, Marburg virus
aguauaaaguaua

SEQ ID NO: 3048507 - RNA, 17 nt, Marburg virus
acaugaaaauuggauug

SEQ ID NO: 3048508 - RNA, 19 nt, Marburg virus
caaaagcuuccugaugaug

SEQ ID NO: 3048509 - RNA, 15 nt, Marburg virus
auaagguuaaaaaac

SEQ ID NO: 3048510 - RNA, 15 nt, Marburg virus
aauauccugaugcaa

SEQ ID NO: 3048511 - RNA, 20 nt, Marburg virus
auaacauccgguucaggguc

SEQ ID NO: 3048512 - RNA, 20 nt, Marburg virus
ggaugcuucggugcucuuca

SEQ ID NO: 3048513 - RNA, 17 nt, Marburg virus
gacccaaacaaugauga

SEQ ID NO: 3048514 - RNA, 19 nt, Marburg virus
aagaaucaaacaugugcuc

SEQ ID NO: 3048515 - RNA, 19 nt, Human
cuccgcuuucuacccagcg

SEQ ID NO: 3048516 - RNA, 12 nt, Human
cucccaccucag

SEQ ID NO: 3048517 - RNA, 16 nt, Human
cuccagacacaugucc

SEQ ID NO: 3048518 - RNA, 17 nt, Human
cuccagacacaugucca

SEQ ID NO: 3048519 - RNA, 19 nt, Human
cuccagacacauguccaag

SEQ ID NO: 3048520 - RNA, 15 nt, Human
cuccagaauuuccca

SEQ ID NO: 3048521 - RNA, 18 nt, Human
cuccagaauuucccaaag

SEQ ID NO: 3048522 - RNA, 17 nt, Human
cuccaagaccuucuccu

SEQ ID NO: 3048523 - RNA, 18 nt, Human
cuccaagaccuucuccuu

SEQ ID NO: 3048524 - RNA, 16 nt, Human
cuccaagaccuucucc

SEQ ID NO: 3048525 - RNA, 15 nt, Human
cuccaagaccuucuc

SEQ ID NO: 3048526 - RNA, 22 nt, Human
cuccacuuucuagccagaggag

SEQ ID NO: 3048527 - RNA, 20 nt, Human
cuccacuuucuagccagagg

SEQ ID NO: 3048528 - RNA, 11 nt, Human
cuccaggugca

SEQ ID NO: 3048529 - RNA, 13 nt, Human
cucaggccugggg

SEQ ID NO: 3048530 - RNA, 14 nt, Human
cucaggccuggggg

SEQ ID NO: 3048531 - RNA, 20 nt, Human
cucaggccugggggcugggc

SEQ ID NO: 3048532 - RNA, 21 nt, Human
cucaggccugggggcugggca

SEQ ID NO: 3048533 - RNA, 14 nt, Human
cucaggccagcugc

SEQ ID NO: 3048534 - RNA, 20 nt, Human
cucaggccagcugcuugggc

SEQ ID NO: 3048535 - RNA, 21 nt, Human
cucaggccagcugcuugggcu

SEQ ID NO: 3048536 - RNA, 22 nt, Human
cucaggccagcugcuugggcuu

SEQ ID NO: 3048537 - RNA, 13 nt, Human
cucaggccagcug

SEQ ID NO: 3048538 - RNA, 13 nt, Human
cucagccucccaa

SEQ ID NO: 3048539 - RNA, 16 nt, Human
cucagccucccaaagu

SEQ ID NO: 3048540 - RNA, 14 nt, Human
cucagccucccaaa

SEQ ID NO: 3048541 - RNA, 21 nt, Human
cucagccucccaaagugcugg

SEQ ID NO: 3048542 - RNA, 13 nt, Human
cucagccucccga

SEQ ID NO: 3048543 - RNA, 22 nt, Human
cucagccucccaaagugcuggg

SEQ ID NO: 3048544 - RNA, 23 nt, Human
cucagccucccgaauagcuggga

SEQ ID NO: 3048545 - RNA, 16 nt, Human
cuccaaagucucugga

SEQ ID NO: 3048546 - RNA, 19 nt, Human
cucauguucuuaauucuua

SEQ ID NO: 3048547 - RNA, 18 nt, Human
cucauguucuuaauucuu

SEQ ID NO: 3048548 - RNA, 14 nt, Human
cucauguucuuaau

SEQ ID NO: 3048549 - RNA, 12 nt, Human
cucauguucuua

SEQ ID NO: 3048550 - RNA, 13 nt, Human
cucagugccacua

SEQ ID NO: 3048551 - RNA, 18 nt, Human
cucagucuggcccuuccu

SEQ ID NO: 3048552 - RNA, 17 nt, Human
cucagucuggcccuucc

SEQ ID NO: 3048553 - RNA, 13 nt, Human
cugaaggccccgc

SEQ ID NO: 3048554 - RNA, 14 nt, Human
cugaaggccccgcc

SEQ ID NO: 3048555 - RNA, 17 nt, Human
cugaaggcuggguucug

SEQ ID NO: 3048556 - RNA, 17 nt, Human
cugaaggccccgcccag

SEQ ID NO: 3048557 - RNA, 20 nt, Human
cugaaggacauugcggacag

SEQ ID NO: 3048558 - RNA, 19 nt, Human
cugaaggacauugcggaca

SEQ ID NO: 3048559 - RNA, 16 nt, Human
cugaaaauguaugugu

SEQ ID NO: 3048560 - RNA, 14 nt, Human
cugaaaauguaugu

SEQ ID NO: 3048561 - RNA, 20 nt, Human
cucuuagaugcaguucugaa

SEQ ID NO: 3048562 - RNA, 18 nt, Human
cugacccaugcugcccug

SEQ ID NO: 3048563 - RNA, 17 nt, Human
cugacccaugcugcccu

SEQ ID NO: 3048564 - RNA, 19 nt, Human
cugacccaugcugcccugu

SEQ ID NO: 3048565 - RNA, 20 nt, Human
cugacccaugcugcccugug

SEQ ID NO: 3048566 - RNA, 23 nt, Human
cugacccugcuucaaauauuucc

SEQ ID NO: 3048567 - RNA, 14 nt, Human
cugacagacacagg

SEQ ID NO: 3048568 - RNA, 12 nt, Human
cugacagacaca

SEQ ID NO: 3048569 - RNA, 17 nt, Human
cucuguacagagcccac

SEQ ID NO: 3048570 - RNA, 21 nt, Human
cucuguacagagcccacgccc

SEQ ID NO: 3048571 - RNA, 15 nt, Human
cucuuagaugcaguu

SEQ ID NO: 3048572 - RNA, 15 nt, Human
cucugguccauagag

SEQ ID NO: 3048573 - RNA, 19 nt, Human
cucugcugacagacacagg

SEQ ID NO: 3048574 - RNA, 18 nt, Human
cucugcugacagacacag

SEQ ID NO: 3048575 - RNA, 17 nt, Human
cucugcugacagacaca

SEQ ID NO: 3048576 - RNA, 16 nt, Human
cucugguccauagaga

SEQ ID NO: 3048577 - RNA, 18 nt, Human
cucugguccauagagagc

SEQ ID NO: 3048578 - RNA, 19 nt, Human
cucugguccauagagagca

SEQ ID NO: 3048579 - RNA, 15 nt, Human
cucugguuaucuaau

SEQ ID NO: 3048580 - RNA, 19 nt, Human
cucugcagcaauaaagcag

SEQ ID NO: 3048581 - RNA, 18 nt, Human
cucugcagcaauaaagca

SEQ ID NO: 3048582 - RNA, 23 nt, Human
cucugcagcaauaaagcagcguu

SEQ ID NO: 3048583 - RNA, 23 nt, Human
cucugcggagcacacuggcucac

SEQ ID NO: 3048584 - RNA, 13 nt, Human
cucugcagcaaua

SEQ ID NO: 3048585 - RNA, 21 nt, Human
cucuccgaccagacaccuuga

SEQ ID NO: 3048586 - RNA, 15 nt, Human
cucugaaggacauug

SEQ ID NO: 3048587 - RNA, 11 nt, Human
cucucuggccu

SEQ ID NO: 3048588 - RNA, 12 nt, Human
cucucuggccuu

SEQ ID NO: 3048589 - RNA, 19 nt, Human
cucucagauuguaccauug

SEQ ID NO: 3048590 - RNA, 15 nt, Human
cucucacuccuugaa

SEQ ID NO: 3048591 - RNA, 21 nt, Human
cucucacuuguuuuauuuaac

SEQ ID NO: 3048592 - RNA, 12 nt, Human
cucucacuccuu

SEQ ID NO: 3048593 - RNA, 14 nt, Human
cucucacuccuuga

SEQ ID NO: 3048594 - RNA, 23 nt, Human
cuagcagcagggagggcuucugc

SEQ ID NO: 3048595 - RNA, 17 nt, Human
cuagcauggcugccaau

SEQ ID NO: 3048596 - RNA, 16 nt, Human
cuagcaugaagacaga

SEQ ID NO: 3048597 - RNA, 22 nt, Human
cuagcagcagggagggcuucug

SEQ ID NO: 3048598 - RNA, 12 nt, Human
cuagcagcaggg

SEQ ID NO: 3048599 - RNA, 13 nt, Human
cuagaacucccuu

SEQ ID NO: 3048600 - RNA, 16 nt, Human
cuagaacucccuuuca

SEQ ID NO: 3048601 - RNA, 17 nt, Human
cuagaacucccuuucaa

SEQ ID NO: 3048602 - RNA, 18 nt, Human
cuagaacucccuuucaac

SEQ ID NO: 3048603 - RNA, 19 nt, Human
cuagaacucccuuucaaca

SEQ ID NO: 3048604 - RNA, 19 nt, Human
cuagaaauuccccacccug

SEQ ID NO: 3048605 - RNA, 11 nt, Human
cuaccugaggg

SEQ ID NO: 3048606 - RNA, 14 nt, Human
cuaccugaggggcc

SEQ ID NO: 3048607 - RNA, 19 nt, Human
cuagggaaaaaccagcgug

SEQ ID NO: 3048608 - RNA, 21 nt, Human
cuagggaaaaaccagcgugug

SEQ ID NO: 3048609 - RNA, 18 nt, Human
cuaguuccaccaucaagc

SEQ ID NO: 3048610 - RNA, 20 nt, Human
cuaguuccaccaucaagcca

SEQ ID NO: 3048611 - RNA, 14 nt, Human
cuaguuccaccauc

SEQ ID NO: 3048612 - RNA, 22 nt, Human
cuaguuccaccaucaagccacc

SEQ ID NO: 3048613 - RNA, 23 nt, Human
cuaguugaucagcuuauugucua

SEQ ID NO: 3048614 - RNA, 22 nt, Human
cuacauaaguaauucaagaaaa

SEQ ID NO: 3048615 - RNA, 23 nt, Human
cuacauaaguaauucaagaaaac

SEQ ID NO: 3048616 - RNA, 15 nt, Human
cuacaugagguacug

SEQ ID NO: 3048617 - RNA, 15 nt, Human
cuacaguccucccau

SEQ ID NO: 3048618 - RNA, 16 nt, Human
cuacaguccucccauc

SEQ ID NO: 3048619 - RNA, 17 nt, Human
cuacaguccucccaucu

SEQ ID NO: 3048620 - RNA, 13 nt, Human
cuacaguugaaaa

SEQ ID NO: 3048621 - RNA, 22 nt, Human
cuaagugauccucccaccucag

SEQ ID NO: 3048622 - RNA, 20 nt, Human
cuaagugauccucccaccuc

SEQ ID NO: 3048623 - RNA, 18 nt, Human
cuaagugaggaugaaaaa

SEQ ID NO: 3048624 - RNA, 20 nt, Human
cuaagugaaauaagccagac

SEQ ID NO: 3048625 - RNA, 23 nt, Human
cuaagugaaauaagccagacauc

SEQ ID NO: 3048626 - RNA, 15 nt, Human
cuaacuucaccauau

SEQ ID NO: 3048627 - RNA, 14 nt, Human
cuaacuggacuggu

SEQ ID NO: 3048628 - RNA, 16 nt, Human
cuaacuuuccuucauu

SEQ ID NO: 3048629 - RNA, 16 nt, Human
cuaacuucaccauauu

SEQ ID NO: 3048630 - RNA, 18 nt, Human
cggcucacugcagccuca

SEQ ID NO: 3048631 - RNA, 19 nt, Human
cggcucacugcagccucaa

SEQ ID NO: 3048632 - RNA, 17 nt, Human
cggcucacugcagccuc

SEQ ID NO: 3048633 - RNA, 15 nt, Human
cggccuuuggcuuca

SEQ ID NO: 3048634 - RNA, 17 nt, Human
cggagcacacuggcuca

SEQ ID NO: 3048635 - RNA, 13 nt, Human
cgccaaggcuggg

SEQ ID NO: 3048636 - RNA, 16 nt, Human
cgccaaggcuggggga

SEQ ID NO: 3048637 - RNA, 12 nt, Human
cgccaaggcugg

SEQ ID NO: 3048638 - RNA, 15 nt, Human
cgaguagcugggacu

SEQ ID NO: 3048639 - RNA, 14 nt, Human
cgaguagcugggac

SEQ ID NO: 3048640 - RNA, 13 nt, Human
cgaguagcuggga

SEQ ID NO: 3048641 - RNA, 17 nt, Human
cgaguuacagacaaagc

SEQ ID NO: 3048642 - RNA, 18 nt, Human
cgaguuacagacaaagcg

SEQ ID NO: 3048643 - RNA, 21 nt, Human
ccuucugacccaugcugcccu

SEQ ID NO: 3048644 - RNA, 22 nt, Human
ccuucugacccaugcugcccug

SEQ ID NO: 3048645 - RNA, 23 nt, Human
ccuucugacccaugcugcccugu

SEQ ID NO: 3048646 - RNA, 22 nt, Human
ccuucuggaauaaggagaauga

SEQ ID NO: 3048647 - RNA, 12 nt, Human
ccuucugaccca

SEQ ID NO: 3048648 - RNA, 16 nt, Human
ccuucugacccaugcu

SEQ ID NO: 3048649 - RNA, 17 nt, Human
ccuucugacccaugcug

SEQ ID NO: 3048650 - RNA, 20 nt, Human
ccuucugacccaugcugccc

SEQ ID NO: 3048651 - RNA, 14 nt, Human
ccuggccugagcug

SEQ ID NO: 3048652 - RNA, 15 nt, Human
ccuggccugagcugg

SEQ ID NO: 3048653 - RNA, 17 nt, Human
ccuugccgucuaccuga

SEQ ID NO: 3048654 - RNA, 14 nt, Human
ccuugcccagccug

SEQ ID NO: 3048655 - RNA, 16 nt, Human
ccuugcccagccugga

SEQ ID NO: 3048656 - RNA, 13 nt, Human
ccuugcccagccu

SEQ ID NO: 3048657 - RNA, 20 nt, Human
ccuugccgucuaccugaggg

SEQ ID NO: 3048658 - RNA, 17 nt, Human
ccuugcccagccuggau

SEQ ID NO: 3048659 - RNA, 18 nt, Human
ccuuuuuuauacauaaac

SEQ ID NO: 3048660 - RNA, 17 nt, Human
ccuuuuuuauacauaaa

SEQ ID NO: 3048661 - RNA, 15 nt, Human
cgacagugagacucu

SEQ ID NO: 3048662 - RNA, 16 nt, Human
cgacagugagacucug

SEQ ID NO: 3048663 - RNA, 23 nt, Human
cgaccagacaccuugacagggca

SEQ ID NO: 3048664 - RNA, 21 nt, Human
ccuuuuuuagaguugauacua

SEQ ID NO: 3048665 - RNA, 12 nt, Human
ccuuuuuuauac

SEQ ID NO: 3048666 - RNA, 20 nt, Human
ccuuuucgcaggauucuucc

SEQ ID NO: 3048667 - RNA, 20 nt, Human
ccuuuagcgcccaguugggu

SEQ ID NO: 3048668 - RNA, 14 nt, Human
ccuuuagcgcccag

SEQ ID NO: 3048669 - RNA, 21 nt, Human
ccccaaaacucuccucugcug

SEQ ID NO: 3048670 - RNA, 23 nt, Human
ccccaaaacucuccucugcugcu

SEQ ID NO: 3048671 - RNA, 22 nt, Human
ccccaaaacucuccucugcugc

SEQ ID NO: 3048672 - RNA, 23 nt, Human
cccauuguggucacaggaaguag

SEQ ID NO: 3048673 - RNA, 22 nt, Human
cccauuguggucacaggaagua

SEQ ID NO: 3048674 - RNA, 22 nt, Human
ccccagcaagugagagcugggu

SEQ ID NO: 3048675 - RNA, 21 nt, Human
ccccagcaagugagagcuggg

SEQ ID NO: 3048676 - RNA, 22 nt, Human
cccccaaauggaaaugggcaga

SEQ ID NO: 3048677 - RNA, 23 nt, Human
ccccgacccuugccgucuaccug

SEQ ID NO: 3048678 - RNA, 14 nt, Human
ccccaucugcgggg

SEQ ID NO: 3048679 - RNA, 22 nt, Human
cccgggaagggggcugggacau

SEQ ID NO: 3048680 - RNA, 18 nt, Human
cccuauuagagaagagau

SEQ ID NO: 3048681 - RNA, 23 nt, Human
cccgggaggcagagguugcagug

SEQ ID NO: 3048682 - RNA, 16 nt, Human
cccggcuccaggcucc

SEQ ID NO: 3048683 - RNA, 15 nt, Human
cccggcuccaggcuc

SEQ ID NO: 3048684 - RNA, 14 nt, Human
cccggcuccaggcu

SEQ ID NO: 3048685 - RNA, 13 nt, Human
cccggcuccaggc

SEQ ID NO: 3048686 - RNA, 13 nt, Human
cccggccaccugc

SEQ ID NO: 3048687 - RNA, 14 nt, Human
cccggccaccugcg

SEQ ID NO: 3048688 - RNA, 12 nt, Human
cccggcuccagg

SEQ ID NO: 3048689 - RNA, 11 nt, Human
cccggcuccag

SEQ ID NO: 3048690 - RNA, 14 nt, Human
cccgaauagcuggg

SEQ ID NO: 3048691 - RNA, 23 nt, Human
cccagcucugguccauagagagc

SEQ ID NO: 3048692 - RNA, 22 nt, Human
cccagcuuaaaggggcuagagu

SEQ ID NO: 3048693 - RNA, 13 nt, Human
cccauccucugua

SEQ ID NO: 3048694 - RNA, 17 nt, Human
cccaggcuggcgugcag

SEQ ID NO: 3048695 - RNA, 13 nt, Human
cccaggcuggcgu

SEQ ID NO: 3048696 - RNA, 13 nt, Human
cccacugcucugg

SEQ ID NO: 3048697 - RNA, 12 nt, Human
cccacugcucug

SEQ ID NO: 3048698 - RNA, 19 nt, Human
cccacugcuuuuggucugu

SEQ ID NO: 3048699 - RNA, 20 nt, Human
cccacccaagggccuggccu

SEQ ID NO: 3048700 - RNA, 21 nt, Human
cccacccaagggccuggccug

SEQ ID NO: 3048701 - RNA, 22 nt, Human
cccacccaagggccuggccuga

SEQ ID NO: 3048702 - RNA, 18 nt, Human
cccacccugaaagcccug

SEQ ID NO: 3048703 - RNA, 18 nt, Human
cccacccaagggccuggc

SEQ ID NO: 3048704 - RNA, 12 nt, Human
cccacccccacc

SEQ ID NO: 3048705 - RNA, 15 nt, Human
cccacccccacccaa

SEQ ID NO: 3048706 - RNA, 17 nt, Human
cccacccccacccaagg

SEQ ID NO: 3048707 - RNA, 18 nt, Human
ccagagggccugcaaggg

SEQ ID NO: 3048708 - RNA, 19 nt, Human
ccagagggccugcaaggga

SEQ ID NO: 3048709 - RNA, 17 nt, Human
ccagagggccugcaagg

SEQ ID NO: 3048710 - RNA, 16 nt, Human
ccaccuuggcucaagu

SEQ ID NO: 3048711 - RNA, 15 nt, Human
ccagauccuggaaau

SEQ ID NO: 3048712 - RNA, 15 nt, Human
ccagaugcaccagcc

SEQ ID NO: 3048713 - RNA, 17 nt, Human
ccagaugcaccagcccu

SEQ ID NO: 3048714 - RNA, 18 nt, Human
ccagaugcaccagcccuu

SEQ ID NO: 3048715 - RNA, 13 nt, Human
ccagcaggcucuc

SEQ ID NO: 3048716 - RNA, 15 nt, Human
ccagcaggcucucag

SEQ ID NO: 3048717 - RNA, 20 nt, Human
ccagcagccuggacccugug

SEQ ID NO: 3048718 - RNA, 11 nt, Human
ccagccccugg

SEQ ID NO: 3048719 - RNA, 12 nt, Human
ccagccccugga

SEQ ID NO: 3048720 - RNA, 16 nt, Human
ccagcucaccagcccc

SEQ ID NO: 3048721 - RNA, 15 nt, Human
ccagcucaccagccc

SEQ ID NO: 3048722 - RNA, 16 nt, Human
ccagcuguucagcugg

SEQ ID NO: 3048723 - RNA, 22 nt, Human
ccagcucaccagccccagugcc

SEQ ID NO: 3048724 - RNA, 17 nt, Human
ccagcuguucagcuggu

SEQ ID NO: 3048725 - RNA, 19 nt, Human
ccagcuuaaaggggcuaga

SEQ ID NO: 3048726 - RNA, 13 nt, Human
ccaggaagccagc

SEQ ID NO: 3048727 - RNA, 12 nt, Human
ccaggaagccag

SEQ ID NO: 3048728 - RNA, 14 nt, Human
ccaggaaaggcucc

SEQ ID NO: 3048729 - RNA, 15 nt, Human
ccaggaaaggcucca

SEQ ID NO: 3048730 - RNA, 16 nt, Human
ccaggaaaggcuccag

SEQ ID NO: 3048731 - RNA, 20 nt, Human
ccaguuggguggaugccugg

SEQ ID NO: 3048732 - RNA, 19 nt, Human
ccaguuggguggaugccug

SEQ ID NO: 3048733 - RNA, 17 nt, Human
ccaguuggguggaugcc

SEQ ID NO: 3048734 - RNA, 23 nt, Human
ccaugagccucagcauccuggca

SEQ ID NO: 3048735 - RNA, 21 nt, Human
ccaugagccucagcauccugg

SEQ ID NO: 3048736 - RNA, 20 nt, Human
ccauggucggaaaacaugcu

SEQ ID NO: 3048737 - RNA, 14 nt, Human
ccaucccagcccca

SEQ ID NO: 3048738 - RNA, 13 nt, Human
ccaucccagcccc

SEQ ID NO: 3048739 - RNA, 15 nt, Human
ccaucccagccccaa

SEQ ID NO: 3048740 - RNA, 23 nt, Human
ccaguuggucccccuuccaugga

SEQ ID NO: 3048741 - RNA, 14 nt, Human
ccaucccugaaggc

SEQ ID NO: 3048742 - RNA, 15 nt, Human
ccaucccugaaggcc

SEQ ID NO: 3048743 - RNA, 17 nt, Human
ccaucccugaaggcccc

SEQ ID NO: 3048744 - RNA, 20 nt, Human
ccaucccugaaggccccgcc

SEQ ID NO: 3048745 - RNA, 23 nt, Human
ccaggggugggacacccugugau

SEQ ID NO: 3048746 - RNA, 14 nt, Human
ccaggggugggaca

SEQ ID NO: 3048747 - RNA, 17 nt, Human
ccaggggugggacaccc

SEQ ID NO: 3048748 - RNA, 20 nt, Human
ccaggggaaaaucagccugc

SEQ ID NO: 3048749 - RNA, 13 nt, Human
ccaggggugggac

SEQ ID NO: 3048750 - RNA, 19 nt, Human
ccaggggaaaaucagccug

SEQ ID NO: 3048751 - RNA, 21 nt, Human
ccaggcuccuuuagcgcccag

SEQ ID NO: 3048752 - RNA, 20 nt, Human
ccaggcuccuuuagcgccca

SEQ ID NO: 3048753 - RNA, 16 nt, Human
ccaggcuggcgugcag

SEQ ID NO: 3048754 - RNA, 18 nt, Human
ccaggcuggcgugcagug

SEQ ID NO: 3048755 - RNA, 17 nt, Human
ccaggcuggcgugcagu

SEQ ID NO: 3048756 - RNA, 22 nt, Human
ccucucugcaggucccuaauaa

SEQ ID NO: 3048757 - RNA, 21 nt, Human
ccucucugcaggucccuaaua

SEQ ID NO: 3048758 - RNA, 23 nt, Human
ccucucugcaggucccuaauaaa

SEQ ID NO: 3048759 - RNA, 21 nt, Human
ccucugccugaagucacacag

SEQ ID NO: 3048760 - RNA, 22 nt, Human
ccucugccugaagucacacagu

SEQ ID NO: 3048761 - RNA, 15 nt, Human
ccucugcugcuggcu

SEQ ID NO: 3048762 - RNA, 16 nt, Human
ccucugcugcuggcug

SEQ ID NO: 3048763 - RNA, 17 nt, Human
ccucugcugcuggcugg

SEQ ID NO: 3048764 - RNA, 18 nt, Human
ccucugcugcuggcuggu

SEQ ID NO: 3048765 - RNA, 13 nt, Human
ccucugcugcugg

SEQ ID NO: 3048766 - RNA, 14 nt, Human
ccucugcugcuggc

SEQ ID NO: 3048767 - RNA, 15 nt, Human
ccucucugcaggucc

SEQ ID NO: 3048768 - RNA, 20 nt, Human
ccucucugcaggucccuaau

SEQ ID NO: 3048769 - RNA, 13 nt, Human
ccucucugcaggu

SEQ ID NO: 3048770 - RNA, 14 nt, Human
ccucucucaggcca

SEQ ID NO: 3048771 - RNA, 12 nt, Human
ccucucucacuc

SEQ ID NO: 3048772 - RNA, 13 nt, Human
ccucucucacucc

SEQ ID NO: 3048773 - RNA, 14 nt, Human
ccucucucacuccu

SEQ ID NO: 3048774 - RNA, 15 nt, Human
ccucucucacuccuu

SEQ ID NO: 3048775 - RNA, 17 nt, Human
ccucucucacuccuuga

SEQ ID NO: 3048776 - RNA, 12 nt, Human
ccucucucaggc

SEQ ID NO: 3048777 - RNA, 22 nt, Human
ccugcacuugcagacucuacag

SEQ ID NO: 3048778 - RNA, 19 nt, Human
ccugcacuugcagacucua

SEQ ID NO: 3048779 - RNA, 13 nt, Human
ccucuuggguuca

SEQ ID NO: 3048780 - RNA, 19 nt, Human
ccucuugagccuugaacuu

SEQ ID NO: 3048781 - RNA, 13 nt, Human
ccucuugagccuu

SEQ ID NO: 3048782 - RNA, 14 nt, Human
ccuggccucugcac

SEQ ID NO: 3048783 - RNA, 15 nt, Human
ccuggccucugcacu

SEQ ID NO: 3048784 - RNA, 13 nt, Human
ccuggccugagcu

SEQ ID NO: 3048785 - RNA, 12 nt, Human
ccuggccucugc

SEQ ID NO: 3048786 - RNA, 16 nt, Human
ccugcccaggccccug

SEQ ID NO: 3048787 - RNA, 22 nt, Human
ccugcccaggccccugccaccc

SEQ ID NO: 3048788 - RNA, 15 nt, Human
ccugcccaggccccu

SEQ ID NO: 3048789 - RNA, 14 nt, Human
ccugcccaggcccc

SEQ ID NO: 3048790 - RNA, 12 nt, Human
ccugcugggugu

SEQ ID NO: 3048791 - RNA, 14 nt, Human
ccugcugggugugg

SEQ ID NO: 3048792 - RNA, 20 nt, Human
ccugcuggguguggcgcagc

SEQ ID NO: 3048793 - RNA, 14 nt, Human
ccuggaugcagccu

SEQ ID NO: 3048794 - RNA, 17 nt, Human
ccuggaugcagccucac

SEQ ID NO: 3048795 - RNA, 19 nt, Human
ccuggaugcagccucacag

SEQ ID NO: 3048796 - RNA, 13 nt, Human
ccuggaugcagcc

SEQ ID NO: 3048797 - RNA, 16 nt, Human
ccuggaguucugguuc

SEQ ID NO: 3048798 - RNA, 17 nt, Human
ccuggaguucugguucc

SEQ ID NO: 3048799 - RNA, 15 nt, Human
ccuggaguucugguu

SEQ ID NO: 3048800 - RNA, 23 nt, Human
ccuaauaaagcuguguggcaguc

SEQ ID NO: 3048801 - RNA, 14 nt, Human
ccuaauaaagcugu

SEQ ID NO: 3048802 - RNA, 13 nt, Human
ccuaauaaagcug

SEQ ID NO: 3048803 - RNA, 16 nt, Human
ccguagguuauuuuca

SEQ ID NO: 3048804 - RNA, 24 nt, Human
ccguagacgugcacgcacacuguc

SEQ ID NO: 3048805 - RNA, 15 nt, Human
ccgucuccagcugcu

SEQ ID NO: 3048806 - RNA, 19 nt, Human
ccuaggacccgucuccagc

SEQ ID NO: 3048807 - RNA, 20 nt, Human
ccuaggacccgucuccagcu

SEQ ID NO: 3048808 - RNA, 21 nt, Human
ccuaggacccgucuccagcug

SEQ ID NO: 3048809 - RNA, 22 nt, Human
ccuaggacccgucuccagcugc

SEQ ID NO: 3048810 - RNA, 18 nt, Human
ccuaggacccgucuccag

SEQ ID NO: 3048811 - RNA, 15 nt, Human
ccuauuuuaauaaac

SEQ ID NO: 3048812 - RNA, 16 nt, Human
ccucaaccuccugggc

SEQ ID NO: 3048813 - RNA, 15 nt, Human
ccucaacucuccucc

SEQ ID NO: 3048814 - RNA, 15 nt, Human
ccucaagagaaggca

SEQ ID NO: 3048815 - RNA, 22 nt, Human
ccucagccucccaaagugcugg

SEQ ID NO: 3048816 - RNA, 11 nt, Human
ccucagccucc

SEQ ID NO: 3048817 - RNA, 22 nt, Human
ccucagccucccgaauagcugg

SEQ ID NO: 3048818 - RNA, 23 nt, Human
ccucagccucccaaagugcuggg

SEQ ID NO: 3048819 - RNA, 15 nt, Human
ccucauguccacugg

SEQ ID NO: 3048820 - RNA, 13 nt, Human
ccucauguucuua

SEQ ID NO: 3048821 - RNA, 20 nt, Human
ccucauguccacugguucuu

SEQ ID NO: 3048822 - RNA, 22 nt, Human
ccucccaaggggcccaaauucu

SEQ ID NO: 3048823 - RNA, 23 nt, Human
ccucccaacucaccccagcccca

SEQ ID NO: 3048824 - RNA, 19 nt, Human
ccucauguucuuaauucuu

SEQ ID NO: 3048825 - RNA, 20 nt, Human
ccuccaagaccuucuccuuc

SEQ ID NO: 3048826 - RNA, 14 nt, Human
cccuggcagccccu

SEQ ID NO: 3048827 - RNA, 16 nt, Human
cccuggcagccccugu

SEQ ID NO: 3048828 - RNA, 21 nt, Human
cccugcccugugggcccccaa

SEQ ID NO: 3048829 - RNA, 20 nt, Human
cccuggcacuggcaaacagg

SEQ ID NO: 3048830 - RNA, 12 nt, Human
cccuggcagccc

SEQ ID NO: 3048831 - RNA, 13 nt, Human
cccuggcagcccc

SEQ ID NO: 3048832 - RNA, 16 nt, Human
cccugcccugugggcc

SEQ ID NO: 3048833 - RNA, 20 nt, Human
cccugcccugugggccccca

SEQ ID NO: 3048834 - RNA, 15 nt, Human
cccugcccugugggc

SEQ ID NO: 3048835 - RNA, 14 nt, Human
cccugcccuguggg

SEQ ID NO: 3048836 - RNA, 11 nt, Human
cccugcccugu

SEQ ID NO: 3048837 - RNA, 12 nt, Human
cccugcccugug

SEQ ID NO: 3048838 - RNA, 13 nt, Human
cccugcccugugg

SEQ ID NO: 3048839 - RNA, 16 nt, Human
cccuucuaccuuccug

SEQ ID NO: 3048840 - RNA, 18 nt, Human
cccuucgcuccugugucu

SEQ ID NO: 3048841 - RNA, 16 nt, Human
cccuucgcuccugugu

SEQ ID NO: 3048842 - RNA, 22 nt, Human
cccuucugacccaugcugcccu

SEQ ID NO: 3048843 - RNA, 23 nt, Human
cccuucugacccaugcugcccug

SEQ ID NO: 3048844 - RNA, 21 nt, Human
cccuucugacccaugcugccc

SEQ ID NO: 3048845 - RNA, 13 nt, Human
cccuucucuguau

SEQ ID NO: 3048846 - RNA, 17 nt, Human
ccgccaaggcuggggga

SEQ ID NO: 3048847 - RNA, 16 nt, Human
ccgacccuugccgucu

SEQ ID NO: 3048848 - RNA, 17 nt, Human
ccgaauagcugggacua

SEQ ID NO: 3048849 - RNA, 20 nt, Human
ccgaauagcugggacuacag

SEQ ID NO: 3048850 - RNA, 18 nt, Human
ccgaccagacaccuugac

SEQ ID NO: 3048851 - RNA, 20 nt, Human
ccgcccaggcuuagucacug

SEQ ID NO: 3048852 - RNA, 16 nt, Human
ccgccaugcuccuggc

SEQ ID NO: 3048853 - RNA, 14 nt, Human
caugaauuugugaa

SEQ ID NO: 3048854 - RNA, 14 nt, Human
caugacacgaauau

SEQ ID NO: 3048855 - RNA, 16 nt, Human
caugaauuaguuuuau

SEQ ID NO: 3048856 - RNA, 17 nt, Human
caugacacgaauauugc

SEQ ID NO: 3048857 - RNA, 18 nt, Human
caugacacgaauauugcu

SEQ ID NO: 3048858 - RNA, 18 nt, Human
caugcaaggucauuuuuu

SEQ ID NO: 3048859 - RNA, 17 nt, Human
caugcaaggucauuuuu

SEQ ID NO: 3048860 - RNA, 15 nt, Human
caugcaaggucauuu

SEQ ID NO: 3048861 - RNA, 22 nt, Human
caugcaaggucauuuuuuuuaa

SEQ ID NO: 3048862 - RNA, 19 nt, Human
cauggccuuugcuugaaag

SEQ ID NO: 3048863 - RNA, 22 nt, Human
cauggccuuugcuugaaagaaa

SEQ ID NO: 3048864 - RNA, 16 nt, Human
caugcugcccugugag

SEQ ID NO: 3048865 - RNA, 18 nt, Human
caugcugcccugugagua

SEQ ID NO: 3048866 - RNA, 13 nt, Human
caucaggccaggc

SEQ ID NO: 3048867 - RNA, 20 nt, Human
caucagcuugcccuguuaaa

SEQ ID NO: 3048868 - RNA, 13 nt, Human
caucagcugcuga

SEQ ID NO: 3048869 - RNA, 15 nt, Human
caucagcugcugaaa

SEQ ID NO: 3048870 - RNA, 18 nt, Human
caucagcugcugaaacaa

SEQ ID NO: 3048871 - RNA, 17 nt, Human
caucagcugcugaaaca

SEQ ID NO: 3048872 - RNA, 18 nt, Human
caucagcacgauuucugu

SEQ ID NO: 3048873 - RNA, 17 nt, Human
caucagcacgauuucug

SEQ ID NO: 3048874 - RNA, 20 nt, Human
caucaggccaggcccucugc

SEQ ID NO: 3048875 - RNA, 21 nt, Human
caucaggccaggcccucugcc

SEQ ID NO: 3048876 - RNA, 22 nt, Human
caucaggccaggcccucugccc

SEQ ID NO: 3048877 - RNA, 23 nt, Human
caucaggccaggcccucugccca

SEQ ID NO: 3048878 - RNA, 12 nt, Human
caucccagcccc

SEQ ID NO: 3048879 - RNA, 16 nt, Human
caucccagccccaaug

SEQ ID NO: 3048880 - RNA, 14 nt, Human
caucccagccccaa

SEQ ID NO: 3048881 - RNA, 13 nt, Human
caucccagcccca

SEQ ID NO: 3048882 - RNA, 23 nt, Human
cauccuggcacccggccccugcu

SEQ ID NO: 3048883 - RNA, 15 nt, Human
cauccuggcccaggg

SEQ ID NO: 3048884 - RNA, 16 nt, Human
cauccuggcccagggc

SEQ ID NO: 3048885 - RNA, 18 nt, Human
cauccuggcccagggcau

SEQ ID NO: 3048886 - RNA, 19 nt, Human
cauccuggcccagggcauc

SEQ ID NO: 3048887 - RNA, 18 nt, Human
caucugugaaaggaaaga

SEQ ID NO: 3048888 - RNA, 19 nt, Human
caucugugaaaggaaagag

SEQ ID NO: 3048889 - RNA, 21 nt, Human
caucuuagguuggcaaaaagg

SEQ ID NO: 3048890 - RNA, 22 nt, Human
caucuuagguuggcaaaaaggc

SEQ ID NO: 3048891 - RNA, 17 nt, Human
cauaaugcgugcauacc

SEQ ID NO: 3048892 - RNA, 14 nt, Human
cauaaugcgugcau

SEQ ID NO: 3048893 - RNA, 18 nt, Human
cauagauucccugagcag

SEQ ID NO: 3048894 - RNA, 17 nt, Human
cauagauucccugagca

SEQ ID NO: 3048895 - RNA, 15 nt, Human
cauacaauuccaaac

SEQ ID NO: 3048896 - RNA, 21 nt, Human
cauaaugcgugcauaccacuu

SEQ ID NO: 3048897 - RNA, 20 nt, Human
cauagcagcuuauucacaag

SEQ ID NO: 3048898 - RNA, 16 nt, Human
cauauuaccacagaca

SEQ ID NO: 3048899 - RNA, 17 nt, Human
cauauuaccacagacau

SEQ ID NO: 3048900 - RNA, 21 nt, Human
cauauuaccacagacauacua

SEQ ID NO: 3048901 - RNA, 20 nt, Human
cauauuaccacagacauacu

SEQ ID NO: 3048902 - RNA, 18 nt, Human
cagucaccccggccaccu

SEQ ID NO: 3048903 - RNA, 15 nt, Human
cauuuauucugcuca

SEQ ID NO: 3048904 - RNA, 16 nt, Human
cauuuauucugcucac

SEQ ID NO: 3048905 - RNA, 19 nt, Human
ccaaaaagauuuucagaaa

SEQ ID NO: 3048906 - RNA, 17 nt, Human
ccaaaacucuccucugc

SEQ ID NO: 3048907 - RNA, 17 nt, Human
ccaaaaaaugcuugcuu

SEQ ID NO: 3048908 - RNA, 23 nt, Human
cauuuuucuuagggaaggauaca

SEQ ID NO: 3048909 - RNA, 23 nt, Human
cauuuggugguuucagaaaugug

SEQ ID NO: 3048910 - RNA, 22 nt, Human
cauuuggugguuucagaaaugu

SEQ ID NO: 3048911 - RNA, 21 nt, Human
cauuuggugguuucagaaaug

SEQ ID NO: 3048912 - RNA, 21 nt, Human
cauugcggacagccacggcca

SEQ ID NO: 3048913 - RNA, 17 nt, Human
cauugcggacagccacg

SEQ ID NO: 3048914 - RNA, 15 nt, Human
cauugcggacagcca

SEQ ID NO: 3048915 - RNA, 14 nt, Human
cauugcggacagcc

SEQ ID NO: 3048916 - RNA, 18 nt, Human
cauugcugggcuugucug

SEQ ID NO: 3048917 - RNA, 17 nt, Human
cauuaucuagauacugu

SEQ ID NO: 3048918 - RNA, 16 nt, Human
cauuaucuagauacug

SEQ ID NO: 3048919 - RNA, 12 nt, Human
cauuaucuagau

SEQ ID NO: 3048920 - RNA, 15 nt, Human
cauuaggauggcuag

SEQ ID NO: 3048921 - RNA, 15 nt, Human
cauguucucugagga

SEQ ID NO: 3048922 - RNA, 17 nt, Human
cauggcugccaauggga

SEQ ID NO: 3048923 - RNA, 22 nt, Human
cauggcuggagcuagaauuuga

SEQ ID NO: 3048924 - RNA, 22 nt, Human
cauggcugccaaugggagcuca

SEQ ID NO: 3048925 - RNA, 22 nt, Human
cauggccucuucagaucucuaa

SEQ ID NO: 3048926 - RNA, 16 nt, Human
cauucuccuuguguua

SEQ ID NO: 3048927 - RNA, 18 nt, Human
cauuaucuagauacugua

SEQ ID NO: 3048928 - RNA, 16 nt, Human
ccaccaucaagccacc

SEQ ID NO: 3048929 - RNA, 17 nt, Human
ccaccaucaagccacca

SEQ ID NO: 3048930 - RNA, 14 nt, Human
ccaccgcagacagg

SEQ ID NO: 3048931 - RNA, 17 nt, Human
ccaccgcagacaggacc

SEQ ID NO: 3048932 - RNA, 20 nt, Human
ccaccaucaagccaccaaca

SEQ ID NO: 3048933 - RNA, 15 nt, Human
ccaccaucaagccac

SEQ ID NO: 3048934 - RNA, 13 nt, Human
ccacccugcucuc

SEQ ID NO: 3048935 - RNA, 18 nt, Human
ccaccgcagacaggacca

SEQ ID NO: 3048936 - RNA, 13 nt, Human
ccaccgcagacag

SEQ ID NO: 3048937 - RNA, 15 nt, Human
ccaccuuggcucaag

SEQ ID NO: 3048938 - RNA, 14 nt, Human
ccaccuuggcucaa

SEQ ID NO: 3048939 - RNA, 13 nt, Human
ccaccuuggcuca

SEQ ID NO: 3048940 - RNA, 18 nt, Human
ccaaauguucaucaauga

SEQ ID NO: 3048941 - RNA, 12 nt, Human
ccaaauuaagag

SEQ ID NO: 3048942 - RNA, 16 nt, Human
ccaaaucauaguggcu

SEQ ID NO: 3048943 - RNA, 16 nt, Human
ccaacgucugugccau

SEQ ID NO: 3048944 - RNA, 14 nt, Human
ccaaagugcuggga

SEQ ID NO: 3048945 - RNA, 20 nt, Human
ccaagcuggucccacucagu

SEQ ID NO: 3048946 - RNA, 20 nt, Human
ccaaugcacuuuguucuggc

SEQ ID NO: 3048947 - RNA, 22 nt, Human
ccaaugcacuuuguucuggcuc

SEQ ID NO: 3048948 - RNA, 23 nt, Human
ccaaugcacuuuguucuggcucu

SEQ ID NO: 3048949 - RNA, 20 nt, Human
ccaauguucucucuucucca

SEQ ID NO: 3048950 - RNA, 16 nt, Human
cagucaccccggccac

SEQ ID NO: 3048951 - RNA, 17 nt, Human
cagucaccccggccacc

SEQ ID NO: 3048952 - RNA, 14 nt, Human
cagucaccccggcc

SEQ ID NO: 3048953 - RNA, 19 nt, Human
caguaaaugggggugcauu

SEQ ID NO: 3048954 - RNA, 19 nt, Human
caguauuacuucugcuaca

SEQ ID NO: 3048955 - RNA, 18 nt, Human
caguaaaugggggugcau

SEQ ID NO: 3048956 - RNA, 21 nt, Human
caggguuggccccugcccggc

SEQ ID NO: 3048957 - RNA, 17 nt, Human
caggguuggccccugcc

SEQ ID NO: 3048958 - RNA, 14 nt, Human
caggguuggccccu

SEQ ID NO: 3048959 - RNA, 22 nt, Human
caggguggccacaccucuaucc

SEQ ID NO: 3048960 - RNA, 14 nt, Human
caggugcugccauc

SEQ ID NO: 3048961 - RNA, 13 nt, Human
caggugcugccau

SEQ ID NO: 3048962 - RNA, 23 nt, Human
cagguuuuuggucugacccacug

SEQ ID NO: 3048963 - RNA, 23 nt, Human
cagggucucacucugucgcccag

SEQ ID NO: 3048964 - RNA, 22 nt, Human
cagggucucacucugucgccca

SEQ ID NO: 3048965 - RNA, 21 nt, Human
cagggucucuaccauccccug

SEQ ID NO: 3048966 - RNA, 16 nt, Human
caggguuggccccugc

SEQ ID NO: 3048967 - RNA, 15 nt, Human
caggguuggccccug

SEQ ID NO: 3048968 - RNA, 14 nt, Human
caggguggccacac

SEQ ID NO: 3048969 - RNA, 14 nt, Human
caggcugggcuuca

SEQ ID NO: 3048970 - RNA, 15 nt, Human
caggcugggagagcc

SEQ ID NO: 3048971 - RNA, 22 nt, Human
cagggaggacgcucucuggccu

SEQ ID NO: 3048972 - RNA, 19 nt, Human
cagggaggacgcucucugg

SEQ ID NO: 3048973 - RNA, 16 nt, Human
cagggagggcuucugc

SEQ ID NO: 3048974 - RNA, 15 nt, Human
cagggcucagcgggg

SEQ ID NO: 3048975 - RNA, 12 nt, Human
cagggcucagcg

SEQ ID NO: 3048976 - RNA, 20 nt, Human
caggccugggggcugggcag

SEQ ID NO: 3048977 - RNA, 22 nt, Human
caggccugggggcugggcagag

SEQ ID NO: 3048978 - RNA, 19 nt, Human
caggcuggcgugcaguggu

SEQ ID NO: 3048979 - RNA, 18 nt, Human
caggcuggcgugcagugg

SEQ ID NO: 3048980 - RNA, 23 nt, Human
caggccugggggcugggcagagg

SEQ ID NO: 3048981 - RNA, 17 nt, Human
caggcuggcgugcagug

SEQ ID NO: 3048982 - RNA, 16 nt, Human
caggcugggagagccu

SEQ ID NO: 3048983 - RNA, 18 nt, Human
caggcugggagagccuuc

SEQ ID NO: 3048984 - RNA, 19 nt, Human
caggcugggagagccuucc

SEQ ID NO: 3048985 - RNA, 15 nt, Human
caggcuggcgugcag

SEQ ID NO: 3048986 - RNA, 16 nt, Human
cagcuguucagcuggu

SEQ ID NO: 3048987 - RNA, 15 nt, Human
cagcuguucagcugg

SEQ ID NO: 3048988 - RNA, 16 nt, Human
cagcuuauucacaaga

SEQ ID NO: 3048989 - RNA, 20 nt, Human
caggaaaagcugcugacagu

SEQ ID NO: 3048990 - RNA, 19 nt, Human
caggaaaagcugcugacag

SEQ ID NO: 3048991 - RNA, 21 nt, Human
caggaaaggcuccaggagcag

SEQ ID NO: 3048992 - RNA, 22 nt, Human
caggaaaggcuccaggagcagc

SEQ ID NO: 3048993 - RNA, 23 nt, Human
caggaaaggcuccaggagcagcc

SEQ ID NO: 3048994 - RNA, 19 nt, Human
caggaaaucaaauaugcaa

SEQ ID NO: 3048995 - RNA, 21 nt, Human
caggaaaucaaauaugcaaag

SEQ ID NO: 3048996 - RNA, 13 nt, Human
caggccagcugcu

SEQ ID NO: 3048997 - RNA, 15 nt, Human
caggccagcugcuug

SEQ ID NO: 3048998 - RNA, 12 nt, Human
caggaggccagc

SEQ ID NO: 3048999 - RNA, 13 nt, Human
caggaggccagcc

SEQ ID NO: 3049000 - RNA, 20 nt, Human
caggcaaugcuggcuguugg

SEQ ID NO: 3049001 - RNA, 19 nt, Human
caggcaaugcuggcuguug

SEQ ID NO: 3049002 - RNA, 21 nt, Human
caggcaaugcuggcuguuggc

SEQ ID NO: 3049003 - RNA, 17 nt, Human
caggcaaugcuggcugu

SEQ ID NO: 3049004 - RNA, 13 nt, Human
caggccaggcccu

SEQ ID NO: 3049005 - RNA, 14 nt, Human
caggccaggcccuc

SEQ ID NO: 3049006 - RNA, 15 nt, Human
caggccaggcccucu

SEQ ID NO: 3049007 - RNA, 16 nt, Human
caggccaggcccucug

SEQ ID NO: 3049008 - RNA, 13 nt, Human
caggaccagggau

SEQ ID NO: 3049009 - RNA, 13 nt, Human
caggaccucaggu

SEQ ID NO: 3049010 - RNA, 23 nt, Human
caggacagcccuucuuuccacag

SEQ ID NO: 3049011 - RNA, 24 nt, Human
caggacagcccuucuuuccacaga

SEQ ID NO: 3049012 - RNA, 16 nt, Human
cagaucauugugaaau

SEQ ID NO: 3049013 - RNA, 22 nt, Human
cagaucauugugaaauuauuca

SEQ ID NO: 3049014 - RNA, 23 nt, Human
cagauacaggaaaagcugcugac

SEQ ID NO: 3049015 - RNA, 17 nt, Human
cagagcuacacagggga

SEQ ID NO: 3049016 - RNA, 22 nt, Human
cagagcuacacaggggaaaaga

SEQ ID NO: 3049017 - RNA, 16 nt, Human
cagagagggugggagu

SEQ ID NO: 3049018 - RNA, 13 nt, Human
cagagaggguggg

SEQ ID NO: 3049019 - RNA, 20 nt, Human
cagagagggugggagugggc

SEQ ID NO: 3049020 - RNA, 22 nt, Human
cagagagggugggagugggccc

SEQ ID NO: 3049021 - RNA, 14 nt, Human
cagagccugcaguu

SEQ ID NO: 3049022 - RNA, 21 nt, Human
cagagacuccugcaggcagcc

SEQ ID NO: 3049023 - RNA, 22 nt, Human
cagagacuccugcaggcagcca

SEQ ID NO: 3049024 - RNA, 20 nt, Human
cagagacuccugcaggcagc

SEQ ID NO: 3049025 - RNA, 14 nt, Human
cagcguuucuauga

SEQ ID NO: 3049026 - RNA, 16 nt, Human
cagcguuucuaugaca

SEQ ID NO: 3049027 - RNA, 13 nt, Human
cagcccuuagcag

SEQ ID NO: 3049028 - RNA, 23 nt, Human
cagccgccaugcuccuggcccac

SEQ ID NO: 3049029 - RNA, 22 nt, Human
cagccugagcgacagugagacu

SEQ ID NO: 3049030 - RNA, 23 nt, Human
cagccugagcgacagugagacuc

SEQ ID NO: 3049031 - RNA, 19 nt, Human
cagccccgugggguuccuc

SEQ ID NO: 3049032 - RNA, 22 nt, Human
cagccccauucugccugcccag

SEQ ID NO: 3049033 - RNA, 20 nt, Human
cagccccauucugccugccc

SEQ ID NO: 3049034 - RNA, 19 nt, Human
cagccccauucugccugcc

SEQ ID NO: 3049035 - RNA, 24 nt, Human
cagccccauucugccugcccaggc

SEQ ID NO: 3049036 - RNA, 23 nt, Human
cagccccauucugccugcccagg

SEQ ID NO: 3049037 - RNA, 17 nt, Human
cagcauagaaguaacuu

SEQ ID NO: 3049038 - RNA, 16 nt, Human
cagcauauucaggaag

SEQ ID NO: 3049039 - RNA, 17 nt, Human
cagcauauucaggaagc

SEQ ID NO: 3049040 - RNA, 18 nt, Human
cagcauauucaggaagcu

SEQ ID NO: 3049041 - RNA, 20 nt, Human
cagccagacuggcacaguuu

SEQ ID NO: 3049042 - RNA, 22 nt, Human
cagcacagccucuuagaugcag

SEQ ID NO: 3049043 - RNA, 15 nt, Human
cagauuucacucucc

SEQ ID NO: 3049044 - RNA, 16 nt, Human
cagauuucacucuccu

SEQ ID NO: 3049045 - RNA, 19 nt, Human
cagauuugaacucuucaau

SEQ ID NO: 3049046 - RNA, 18 nt, Human
cagauuucacucuccuug

SEQ ID NO: 3049047 - RNA, 13 nt, Human
cagauuucacucu

SEQ ID NO: 3049048 - RNA, 21 nt, Human
cagauugcaacaggcugggcu

SEQ ID NO: 3049049 - RNA, 15 nt, Human
caauucuugccaaau

SEQ ID NO: 3049050 - RNA, 12 nt, Human
caauggcagccu

SEQ ID NO: 3049051 - RNA, 11 nt, Human
caauggcagcc

SEQ ID NO: 3049052 - RNA, 16 nt, Human
caaugcuguauuuuaa

SEQ ID NO: 3049053 - RNA, 17 nt, Human
caaugcuguauuuuaaa

SEQ ID NO: 3049054 - RNA, 15 nt, Human
caaugcuguauuuua

SEQ ID NO: 3049055 - RNA, 17 nt, Human
cacaagcugcacccuca

SEQ ID NO: 3049056 - RNA, 23 nt, Human
cacaagcugcacccucaggcagg

SEQ ID NO: 3049057 - RNA, 17 nt, Human
cacaagcuccaagcucc

SEQ ID NO: 3049058 - RNA, 23 nt, Human
cacaagcuccaagcucccaggca

SEQ ID NO: 3049059 - RNA, 21 nt, Human
cacaagcuccaagcucccagg

SEQ ID NO: 3049060 - RNA, 16 nt, Human
cacaagagcccaggcc

SEQ ID NO: 3049061 - RNA, 13 nt, Human
cacaagcuccaag

SEQ ID NO: 3049062 - RNA, 14 nt, Human
cacaagcuccaagc

SEQ ID NO: 3049063 - RNA, 15 nt, Human
cacaagcuccaagcu

SEQ ID NO: 3049064 - RNA, 14 nt, Human
cacaagagcccagg

SEQ ID NO: 3049065 - RNA, 18 nt, Human
cacaagacugcacaucaa

SEQ ID NO: 3049066 - RNA, 20 nt, Human
cacacagcucuguccuggga

SEQ ID NO: 3049067 - RNA, 17 nt, Human
cacacagcucuguccug

SEQ ID NO: 3049068 - RNA, 18 nt, Human
cacagacauacuaaccag

SEQ ID NO: 3049069 - RNA, 23 nt, Human
cacagaaaauggaagacagcucu

SEQ ID NO: 3049070 - RNA, 19 nt, Human
cacagaaaauucuucucca

SEQ ID NO: 3049071 - RNA, 21 nt, Human
cacagacauacuaaccagcag

SEQ ID NO: 3049072 - RNA, 19 nt, Human
cacagacauacuaaccagc

SEQ ID NO: 3049073 - RNA, 13 nt, Human
cacagacccugcc

SEQ ID NO: 3049074 - RNA, 11 nt, Human
cacagccucug

SEQ ID NO: 3049075 - RNA, 21 nt, Human
cacacaugagcaucaggccag

SEQ ID NO: 3049076 - RNA, 22 nt, Human
cacacaugagcaucaggccagg

SEQ ID NO: 3049077 - RNA, 18 nt, Human
cacagaaaauggaagaca

SEQ ID NO: 3049078 - RNA, 19 nt, Human
cacagaaaauggaagacag

SEQ ID NO: 3049079 - RNA, 20 nt, Human
cacagaaaauggaagacagc

SEQ ID NO: 3049080 - RNA, 22 nt, Human
cacagaaaauggaagacagcuc

SEQ ID NO: 3049081 - RNA, 16 nt, Human
cacacagcucuguccu

SEQ ID NO: 3049082 - RNA, 23 nt, Human
cacacaguauuacuucugcuaca

SEQ ID NO: 3049083 - RNA, 20 nt, Human
cacacaguauuacuucugcu

SEQ ID NO: 3049084 - RNA, 18 nt, Human
cacacagugagucgagga

SEQ ID NO: 3049085 - RNA, 20 nt, Human
cacacaugagcaucaggcca

SEQ ID NO: 3049086 - RNA, 22 nt, Human
cacacaugaaguccaagcauuu

SEQ ID NO: 3049087 - RNA, 17 nt, Human
cacacaugaaguccaag

SEQ ID NO: 3049088 - RNA, 23 nt, Human
cacacagugagucgaggacaggg

SEQ ID NO: 3049089 - RNA, 21 nt, Human
cacacagugagucgaggacag

SEQ ID NO: 3049090 - RNA, 15 nt, Human
cacacauacacacac

SEQ ID NO: 3049091 - RNA, 17 nt, Human
cacaggggaaaagagga

SEQ ID NO: 3049092 - RNA, 18 nt, Human
cacaggggaaaagaggag

SEQ ID NO: 3049093 - RNA, 19 nt, Human
cacaggggaaaagaggagu

SEQ ID NO: 3049094 - RNA, 21 nt, Human
cacagccucuuagaugcaguu

SEQ ID NO: 3049095 - RNA, 17 nt, Human
cacagccucuuagaugc

SEQ ID NO: 3049096 - RNA, 22 nt, Human
cacagcgcuggccgggaccccg

SEQ ID NO: 3049097 - RNA, 19 nt, Human
cacagcgcuggccgggacc

SEQ ID NO: 3049098 - RNA, 19 nt, Human
cacaguauuacuucugcua

SEQ ID NO: 3049099 - RNA, 21 nt, Human
cacaguauuacuucugcuaca

SEQ ID NO: 3049100 - RNA, 20 nt, Human
cacaguauuacuucugcuac

SEQ ID NO: 3049101 - RNA, 18 nt, Human
caagcgugagccacugca

SEQ ID NO: 3049102 - RNA, 13 nt, Human
caagucaagugaa

SEQ ID NO: 3049103 - RNA, 17 nt, Human
caagucaagugaaaaag

SEQ ID NO: 3049104 - RNA, 14 nt, Human
caaguccaagcaua

SEQ ID NO: 3049105 - RNA, 15 nt, Human
caaggccaaaggaag

SEQ ID NO: 3049106 - RNA, 16 nt, Human
caaggccaaaggaagc

SEQ ID NO: 3049107 - RNA, 17 nt, Human
caaggccaaaggaagca

SEQ ID NO: 3049108 - RNA, 18 nt, Human
caaggccaaaggaagcac

SEQ ID NO: 3049109 - RNA, 14 nt, Human
caagcugcacccuc

SEQ ID NO: 3049110 - RNA, 18 nt, Human
caagcugcacccucaggc

SEQ ID NO: 3049111 - RNA, 13 nt, Human
caagcugcacccu

SEQ ID NO: 3049112 - RNA, 14 nt, Human
caagcucugcuccu

SEQ ID NO: 3049113 - RNA, 12 nt, Human
caagcuccaagc

SEQ ID NO: 3049114 - RNA, 13 nt, Human
caagcucugcucc

SEQ ID NO: 3049115 - RNA, 19 nt, Human
caauaaagcagcguuucua

SEQ ID NO: 3049116 - RNA, 11 nt, Human
cacugacagau

SEQ ID NO: 3049117 - RNA, 14 nt, Human
cacuccccugcugg

SEQ ID NO: 3049118 - RNA, 12 nt, Human
cacuccccugcu

SEQ ID NO: 3049119 - RNA, 13 nt, Human
cacuccccugcug

SEQ ID NO: 3049120 - RNA, 16 nt, Human
cacuccagccugggug

SEQ ID NO: 3049121 - RNA, 21 nt, Human
cacuagggcagggacaggaua

SEQ ID NO: 3049122 - RNA, 20 nt, Human
cacuagggcagggacaggau

SEQ ID NO: 3049123 - RNA, 16 nt, Human
cacugcauguuuguga

SEQ ID NO: 3049124 - RNA, 13 nt, Human
cacugcagccuca

SEQ ID NO: 3049125 - RNA, 18 nt, Human
cacugggagaaaugaaaa

SEQ ID NO: 3049126 - RNA, 12 nt, Human
cacugcagccuc

SEQ ID NO: 3049127 - RNA, 21 nt, Human
cacugcagaagacaguauggc

SEQ ID NO: 3049128 - RNA, 20 nt, Human
cacugcacuccagccugggu

SEQ ID NO: 3049129 - RNA, 19 nt, Human
cacugcacuccagccuggg

SEQ ID NO: 3049130 - RNA, 18 nt, Human
cacugcacuccagccugg

SEQ ID NO: 3049131 - RNA, 15 nt, Human
cacugcacuccagcc

SEQ ID NO: 3049132 - RNA, 16 nt, Human
cacugcacuccagccu

SEQ ID NO: 3049133 - RNA, 19 nt, Human
cacugcacuauagccuagg

SEQ ID NO: 3049134 - RNA, 18 nt, Human
cacuuacacuuuaugcac

SEQ ID NO: 3049135 - RNA, 16 nt, Human
cacuuacacuuuaugc

SEQ ID NO: 3049136 - RNA, 22 nt, Human
cacugguucuucuuggucucag

SEQ ID NO: 3049137 - RNA, 16 nt, Human
cacuugucaauaaaau

SEQ ID NO: 3049138 - RNA, 19 nt, Human
cacuuguguuuugcaagcc

SEQ ID NO: 3049139 - RNA, 17 nt, Human
cacuuguguuuugcaag

SEQ ID NO: 3049140 - RNA, 22 nt, Human
cacuuguguuuugcaagccaga

SEQ ID NO: 3049141 - RNA, 11 nt, Human
caccccagccc

SEQ ID NO: 3049142 - RNA, 14 nt, Human
cacccucaggcagg

SEQ ID NO: 3049143 - RNA, 16 nt, Human
cacccuggggagaaag

SEQ ID NO: 3049144 - RNA, 15 nt, Human
cacccuggggagaaa

SEQ ID NO: 3049145 - RNA, 17 nt, Human
cacccugaaagcccuga

SEQ ID NO: 3049146 - RNA, 15 nt, Human
caccugccccucaac

SEQ ID NO: 3049147 - RNA, 16 nt, Human
caccugccccucaacu

SEQ ID NO: 3049148 - RNA, 14 nt, Human
caccugccccucaa

SEQ ID NO: 3049149 - RNA, 13 nt, Human
caccucagccucc

SEQ ID NO: 3049150 - RNA, 12 nt, Human
caccucagccuc

SEQ ID NO: 3049151 - RNA, 14 nt, Human
caccucagccuccc

SEQ ID NO: 3049152 - RNA, 13 nt, Human
caccuuggcugca

SEQ ID NO: 3049153 - RNA, 15 nt, Human
caccuuggcucaagu

SEQ ID NO: 3049154 - RNA, 14 nt, Human
caccuuggcucaag

SEQ ID NO: 3049155 - RNA, 14 nt, Human
caccuuggcugcag

SEQ ID NO: 3049156 - RNA, 19 nt, Human
caccugccuguugggccag

SEQ ID NO: 3049157 - RNA, 24 nt, Human
caccugccuguugggccaggagcc

SEQ ID NO: 3049158 - RNA, 17 nt, Human
caccugccuguugggcc

SEQ ID NO: 3049159 - RNA, 23 nt, Human
auuuguuugaacugauaaagaug

SEQ ID NO: 3049160 - RNA, 22 nt, Human
auuuguuugaacugauaaagau

SEQ ID NO: 3049161 - RNA, 17 nt, Human
auuuuauagcuacuaau

SEQ ID NO: 3049162 - RNA, 19 nt, Human
auuuuauagcuacuaauuu

SEQ ID NO: 3049163 - RNA, 20 nt, Human
auuuguuugaacugauaaag

SEQ ID NO: 3049164 - RNA, 20 nt, Human
auuugugauacaaugcugug

SEQ ID NO: 3049165 - RNA, 17 nt, Human
auuugugauacaaugcu

SEQ ID NO: 3049166 - RNA, 15 nt, Human
auuugugauacaaug

SEQ ID NO: 3049167 - RNA, 13 nt, Human
auuugcuccuuuc

SEQ ID NO: 3049168 - RNA, 14 nt, Human
auuugcucauggaa

SEQ ID NO: 3049169 - RNA, 17 nt, Human
auuugcucauggaauug

SEQ ID NO: 3049170 - RNA, 14 nt, Human
caacacuaacauga

SEQ ID NO: 3049171 - RNA, 23 nt, Human
caacacgagcaggcuacugucag

SEQ ID NO: 3049172 - RNA, 15 nt, Human
caacacgagcaggcu

SEQ ID NO: 3049173 - RNA, 21 nt, Human
caaauggaaaugggcagagca

SEQ ID NO: 3049174 - RNA, 20 nt, Human
caaauggaaaugggcagagc

SEQ ID NO: 3049175 - RNA, 21 nt, Human
caaagucucuggaauuugaaa

SEQ ID NO: 3049176 - RNA, 21 nt, Human
caaaguagaagucuuagaugu

SEQ ID NO: 3049177 - RNA, 14 nt, Human
caaaguagaagucu

SEQ ID NO: 3049178 - RNA, 22 nt, Human
caaagguaaaucagacuaugaa

SEQ ID NO: 3049179 - RNA, 15 nt, Human
caaagcagugcaugc

SEQ ID NO: 3049180 - RNA, 17 nt, Human
caaagcagugcaugcug

SEQ ID NO: 3049181 - RNA, 22 nt, Human
caaaguacacuguuucaaacuu

SEQ ID NO: 3049182 - RNA, 23 nt, Human
caaagauauuuugcuuugugauu

SEQ ID NO: 3049183 - RNA, 22 nt, Human
caaagauauuuugcuuugugau

SEQ ID NO: 3049184 - RNA, 14 nt, Human
caaagaugcagccg

SEQ ID NO: 3049185 - RNA, 22 nt, Human
caaagcacugacuucuaaguaa

SEQ ID NO: 3049186 - RNA, 20 nt, Human
caaagcacugacuucuaagu

SEQ ID NO: 3049187 - RNA, 12 nt, Human
caaacagggccu

SEQ ID NO: 3049188 - RNA, 14 nt, Human
caaacagggccucu

SEQ ID NO: 3049189 - RNA, 15 nt, Human
caaacagaggccgcc

SEQ ID NO: 3049190 - RNA, 21 nt, Human
caaaccaucauugaaaucuuu

SEQ ID NO: 3049191 - RNA, 19 nt, Human
caaaccaucauugaaaucu

SEQ ID NO: 3049192 - RNA, 13 nt, Human
caaacccaguguu

SEQ ID NO: 3049193 - RNA, 15 nt, Human
caaacagggccucug

SEQ ID NO: 3049194 - RNA, 19 nt, Human
caaacagggccucugcgga

SEQ ID NO: 3049195 - RNA, 16 nt, Human
caaaagaugcuucuca

SEQ ID NO: 3049196 - RNA, 20 nt, Human
caaaaaaaaaaaaaaauuag

SEQ ID NO: 3049197 - RNA, 18 nt, Human
caaaagaugcuucucacu

SEQ ID NO: 3049198 - RNA, 15 nt, Human
caaaaggcagaagca

SEQ ID NO: 3049199 - RNA, 23 nt, Human
auuuuuuuuuccuucagugccuu

SEQ ID NO: 3049200 - RNA, 20 nt, Human
caaagauauuuugcuuugug

SEQ ID NO: 3049201 - RNA, 18 nt, Human
caaagauauuuugcuuug

SEQ ID NO: 3049202 - RNA, 21 nt, Human
auucauaauuauuauuuggcc

SEQ ID NO: 3049203 - RNA, 19 nt, Human
auucauaaugacuuaagca

SEQ ID NO: 3049204 - RNA, 19 nt, Human
auucauagcagcuuauuca

SEQ ID NO: 3049205 - RNA, 22 nt, Human
auucauagcagcuuauucacaa

SEQ ID NO: 3049206 - RNA, 14 nt, Human
auucauaaugacuu

SEQ ID NO: 3049207 - RNA, 15 nt, Human
auucauaaugacuua

SEQ ID NO: 3049208 - RNA, 23 nt, Human
auuaugcaugaaguaauaugcac

SEQ ID NO: 3049209 - RNA, 18 nt, Human
auuaugaauuacauuugu

SEQ ID NO: 3049210 - RNA, 22 nt, Human
auuaugaauuacauuuguauaa

SEQ ID NO: 3049211 - RNA, 18 nt, Human
auucaaugccccugaauu

SEQ ID NO: 3049212 - RNA, 20 nt, Human
auucaaugccccugaauuua

SEQ ID NO: 3049213 - RNA, 16 nt, Human
auucaaauguauuaca

SEQ ID NO: 3049214 - RNA, 19 nt, Human
auucacaagacccaaaagg

SEQ ID NO: 3049215 - RNA, 18 nt, Human
auuaggugugacugaauu

SEQ ID NO: 3049216 - RNA, 16 nt, Human
auuaggugugacugaa

SEQ ID NO: 3049217 - RNA, 16 nt, Human
auuagggagagaagau

SEQ ID NO: 3049218 - RNA, 21 nt, Human
auuaggugugacugaauuucu

SEQ ID NO: 3049219 - RNA, 14 nt, Human
auuaugaauuacau

SEQ ID NO: 3049220 - RNA, 17 nt, Human
auuaugaauuacauuug

SEQ ID NO: 3049221 - RNA, 18 nt, Human
auuaugaaacuuuuggaa

SEQ ID NO: 3049222 - RNA, 16 nt, Human
auuacaggugugaacc

SEQ ID NO: 3049223 - RNA, 17 nt, Human
auuacaggaaguacugg

SEQ ID NO: 3049224 - RNA, 19 nt, Human
auuacaguggggaaugaag

SEQ ID NO: 3049225 - RNA, 14 nt, Human
auuguaaauaguau

SEQ ID NO: 3049226 - RNA, 23 nt, Human
auuguaauaggcguaacuaauuu

SEQ ID NO: 3049227 - RNA, 13 nt, Human
auuguaaaauggu

SEQ ID NO: 3049228 - RNA, 14 nt, Human
auuguaaaauggug

SEQ ID NO: 3049229 - RNA, 21 nt, Human
auugugucucuugguccugcu

SEQ ID NO: 3049230 - RNA, 23 nt, Human
auugugucucuugguccugcugc

SEQ ID NO: 3049231 - RNA, 16 nt, Human
auuguuagucucuuga

SEQ ID NO: 3049232 - RNA, 15 nt, Human
auugcugauggugca

SEQ ID NO: 3049233 - RNA, 16 nt, Human
auugcugauggugcaa

SEQ ID NO: 3049234 - RNA, 18 nt, Human
auugcugauggugcaaug

SEQ ID NO: 3049235 - RNA, 19 nt, Human
auugcugauggugcaauga

SEQ ID NO: 3049236 - RNA, 14 nt, Human
auugcuugagcuca

SEQ ID NO: 3049237 - RNA, 23 nt, Human
auugcugauggugcaaugaccuu

SEQ ID NO: 3049238 - RNA, 12 nt, Human
auugcugcuuga

SEQ ID NO: 3049239 - RNA, 22 nt, Human
auugauaaguucauacauugua

SEQ ID NO: 3049240 - RNA, 21 nt, Human
auugauaaguucauacauugu

SEQ ID NO: 3049241 - RNA, 21 nt, Human
auugauaagaaccuuuugagu

SEQ ID NO: 3049242 - RNA, 22 nt, Human
auugcuacuguccuacccaccc

SEQ ID NO: 3049243 - RNA, 20 nt, Human
auugcuacuguccuacccac

SEQ ID NO: 3049244 - RNA, 17 nt, Human
auugauaugcuuauaca

SEQ ID NO: 3049245 - RNA, 15 nt, Human
auugcuacuguccua

SEQ ID NO: 3049246 - RNA, 14 nt, Human
auugcuacuguccu

SEQ ID NO: 3049247 - RNA, 18 nt, Human
auucuugaaggaaaauga

SEQ ID NO: 3049248 - RNA, 15 nt, Human
auucuugaaggaaaa

SEQ ID NO: 3049249 - RNA, 11 nt, Human
auucuuuccug

SEQ ID NO: 3049250 - RNA, 12 nt, Human
auucuucugcuu

SEQ ID NO: 3049251 - RNA, 11 nt, Human
auucuucugcu

SEQ ID NO: 3049252 - RNA, 20 nt, Human
gccuccuuugugaggaagcc

SEQ ID NO: 3049253 - RNA, 21 nt, Human
gccuccuuugugaggaagccg

SEQ ID NO: 3049254 - RNA, 19 nt, Human
gccuccuuugugaggaagc

SEQ ID NO: 3049255 - RNA, 15 nt, Human
gccuccauccugagg

SEQ ID NO: 3049256 - RNA, 16 nt, Human
gccuccauccugaggc

SEQ ID NO: 3049257 - RNA, 20 nt, Human
gccuccauccugaggcucca

SEQ ID NO: 3049258 - RNA, 13 nt, Human
gccugcuccagcu

SEQ ID NO: 3049259 - RNA, 23 nt, Human
gccugcuaauuccccagauugca

SEQ ID NO: 3049260 - RNA, 17 nt, Human
gccugcuaauuccccag

SEQ ID NO: 3049261 - RNA, 14 nt, Human
gcgauucuucugcu

SEQ ID NO: 3049262 - RNA, 13 nt, Human
gcgauucuucugc

SEQ ID NO: 3049263 - RNA, 24 nt, Human
gcgagccauuugucccaagugcca

SEQ ID NO: 3049264 - RNA, 20 nt, Human
gcgagccauuugucccaagu

SEQ ID NO: 3049265 - RNA, 17 nt, Human
gcggagcacacuggcuc

SEQ ID NO: 3049266 - RNA, 20 nt, Human
gcgugguggacaugcacagc

SEQ ID NO: 3049267 - RNA, 18 nt, Human
gcgugcacacaccagagc

SEQ ID NO: 3049268 - RNA, 14 nt, Human
gcgugcacacacca

SEQ ID NO: 3049269 - RNA, 19 nt, Human
gcuacuguaaggcaaucau

SEQ ID NO: 3049270 - RNA, 18 nt, Human
gcuacuguaaggcaauca

SEQ ID NO: 3049271 - RNA, 15 nt, Human
gcuacugucagcucc

SEQ ID NO: 3049272 - RNA, 20 nt, Human
gcuacuguccuacccacccu

SEQ ID NO: 3049273 - RNA, 19 nt, Human
gcuacuguccuacccaccc

SEQ ID NO: 3049274 - RNA, 17 nt, Human
gcuacuugggaggcuga

SEQ ID NO: 3049275 - RNA, 18 nt, Human
gcuaauuuugaaaaacug

SEQ ID NO: 3049276 - RNA, 16 nt, Human
gcuaauuuuucauuuu

SEQ ID NO: 3049277 - RNA, 17 nt, Human
gcguuucuaugacacau

SEQ ID NO: 3049278 - RNA, 17 nt, Human
gcuacugccauccuggc

SEQ ID NO: 3049279 - RNA, 13 nt, Human
gcuacugccaucc

SEQ ID NO: 3049280 - RNA, 21 nt, Human
gcuacugccauccuggcccag

SEQ ID NO: 3049281 - RNA, 18 nt, Human
gcuacugccauccuggcc

SEQ ID NO: 3049282 - RNA, 20 nt, Human
gcuacugccauccuggccca

SEQ ID NO: 3049283 - RNA, 17 nt, Human
gcuacaaaaacacagca

SEQ ID NO: 3049284 - RNA, 19 nt, Human
gcuacaaaaacacagcaag

SEQ ID NO: 3049285 - RNA, 18 nt, Human
gcuacaaaaacacagcaa

SEQ ID NO: 3049286 - RNA, 17 nt, Human
gcccaggccccugccac

SEQ ID NO: 3049287 - RNA, 14 nt, Human
gccaugugccaggu

SEQ ID NO: 3049288 - RNA, 22 nt, Human
gccaugugcuaguaauuggaaa

SEQ ID NO: 3049289 - RNA, 13 nt, Human
gcccaggccccug

SEQ ID NO: 3049290 - RNA, 15 nt, Human
gcccaggccccugcc

SEQ ID NO: 3049291 - RNA, 14 nt, Human
gcccaggcaggucu

SEQ ID NO: 3049292 - RNA, 12 nt, Human
gcccaggcaggu

SEQ ID NO: 3049293 - RNA, 13 nt, Human
gcccaggcagguc

SEQ ID NO: 3049294 - RNA, 15 nt, Human
gccccuggaugcagc

SEQ ID NO: 3049295 - RNA, 16 nt, Human
gccccugccucucugc

SEQ ID NO: 3049296 - RNA, 15 nt, Human
gccccugccucucug

SEQ ID NO: 3049297 - RNA, 15 nt, Human
gccccugcccggcug

SEQ ID NO: 3049298 - RNA, 18 nt, Human
gccccugccucucugcag

SEQ ID NO: 3049299 - RNA, 17 nt, Human
gccccugccucucugca

SEQ ID NO: 3049300 - RNA, 22 nt, Human
gccccugcugguucaggguugg

SEQ ID NO: 3049301 - RNA, 21 nt, Human
gccccugcugguucaggguug

SEQ ID NO: 3049302 - RNA, 18 nt, Human
gccccacccucagaugca

SEQ ID NO: 3049303 - RNA, 15 nt, Human
gccccacccucagau

SEQ ID NO: 3049304 - RNA, 13 nt, Human
gccagugugacaa

SEQ ID NO: 3049305 - RNA, 13 nt, Human
gccaguugguccc

SEQ ID NO: 3049306 - RNA, 22 nt, Human
gccaguuauggcuauaggugcu

SEQ ID NO: 3049307 - RNA, 16 nt, Human
gccaguuggucccccu

SEQ ID NO: 3049308 - RNA, 18 nt, Human
gccaguuggucccccuuc

SEQ ID NO: 3049309 - RNA, 20 nt, Human
gccaguuggucccccuucca

SEQ ID NO: 3049310 - RNA, 21 nt, Human
gccaguuggucccccuuccau

SEQ ID NO: 3049311 - RNA, 22 nt, Human
gccaguuggucccccuuccaug

SEQ ID NO: 3049312 - RNA, 23 nt, Human
gccaguuggucccccuuccaugg

SEQ ID NO: 3049313 - RNA, 13 nt, Human
gccaggcccucug

SEQ ID NO: 3049314 - RNA, 14 nt, Human
gccaggcccucugc

SEQ ID NO: 3049315 - RNA, 21 nt, Human
gccaggccacaagacccuugu

SEQ ID NO: 3049316 - RNA, 15 nt, Human
gccaggccagaggga

SEQ ID NO: 3049317 - RNA, 22 nt, Human
gccaggccagagggagugacag

SEQ ID NO: 3049318 - RNA, 13 nt, Human
gccaggccacaag

SEQ ID NO: 3049319 - RNA, 18 nt, Human
gccaggccacaagacccu

SEQ ID NO: 3049320 - RNA, 23 nt, Human
gccagcaggcucucaggccagcu

SEQ ID NO: 3049321 - RNA, 16 nt, Human
gcucuggagcccacug

SEQ ID NO: 3049322 - RNA, 15 nt, Human
gcucuggagcccacu

SEQ ID NO: 3049323 - RNA, 21 nt, Human
gcucugcccauccugccccug

SEQ ID NO: 3049324 - RNA, 22 nt, Human
gcucugaucauccacugugcca

SEQ ID NO: 3049325 - RNA, 21 nt, Human
gcucugaucauccacugugcc

SEQ ID NO: 3049326 - RNA, 15 nt, Human
gcucugcccauccug

SEQ ID NO: 3049327 - RNA, 20 nt, Human
gcucugaucauccacugugc

SEQ ID NO: 3049328 - RNA, 17 nt, Human
gcucuggagcccacugu

SEQ ID NO: 3049329 - RNA, 23 nt, Human
gcucugguccauagagagcaaga

SEQ ID NO: 3049330 - RNA, 12 nt, Human
gcugaacaucac

SEQ ID NO: 3049331 - RNA, 16 nt, Human
gcugaaacaacaaaua

SEQ ID NO: 3049332 - RNA, 20 nt, Human
gcucuguggcgagccauuug

SEQ ID NO: 3049333 - RNA, 13 nt, Human
gcugacagacaca

SEQ ID NO: 3049334 - RNA, 23 nt, Human
gcugaaggcucgagcaugccugg

SEQ ID NO: 3049335 - RNA, 17 nt, Human
gcugaauacagaggcaa

SEQ ID NO: 3049336 - RNA, 15 nt, Human
gcuccucuccccagc

SEQ ID NO: 3049337 - RNA, 23 nt, Human
gcucccaggcauuccccaggagg

SEQ ID NO: 3049338 - RNA, 14 nt, Human
gcuccagcucacca

SEQ ID NO: 3049339 - RNA, 13 nt, Human
gcuccagcucacc

SEQ ID NO: 3049340 - RNA, 18 nt, Human
gcuccagacacaugucca

SEQ ID NO: 3049341 - RNA, 21 nt, Human
gcuccagacacauguccaaga

SEQ ID NO: 3049342 - RNA, 23 nt, Human
gcuccagacacauguccaagaag

SEQ ID NO: 3049343 - RNA, 19 nt, Human
gcuccacuuggucugugag

SEQ ID NO: 3049344 - RNA, 9 nt, Human
gcuccagac

SEQ ID NO: 3049345 - RNA, 20 nt, Human
gcuccacuuggucugugaga

SEQ ID NO: 3049346 - RNA, 18 nt, Human
gcucucaaguuaucaggg

SEQ ID NO: 3049347 - RNA, 19 nt, Human
gcuccucuccccagcaagu

SEQ ID NO: 3049348 - RNA, 16 nt, Human
gcuccucuccccagca

SEQ ID NO: 3049349 - RNA, 19 nt, Human
gcucuacugaggugcuaug

SEQ ID NO: 3049350 - RNA, 17 nt, Human
gcucucaggccagcugc

SEQ ID NO: 3049351 - RNA, 18 nt, Human
gcucucaggccagcugcu

SEQ ID NO: 3049352 - RNA, 19 nt, Human
gcucucaggccagcugcuu

SEQ ID NO: 3049353 - RNA, 16 nt, Human
gcugccccugcacagc

SEQ ID NO: 3049354 - RNA, 11 nt, Human
gcugcucccac

SEQ ID NO: 3049355 - RNA, 15 nt, Human
gcugcucccaccugg

SEQ ID NO: 3049356 - RNA, 20 nt, Human
gcugccccugcacagcaggc

SEQ ID NO: 3049357 - RNA, 24 nt, Human
gcugcucccaccuggcucuguggc

SEQ ID NO: 3049358 - RNA, 20 nt, Human
gcugcucccaccuggcucug

SEQ ID NO: 3049359 - RNA, 22 nt, Human
gcugcucccaccuggcucugug

SEQ ID NO: 3049360 - RNA, 15 nt, Human
gcugccccuggcagc

SEQ ID NO: 3049361 - RNA, 16 nt, Human
gcugccccuggcagcc

SEQ ID NO: 3049362 - RNA, 13 nt, Human
gcugccccuggca

SEQ ID NO: 3049363 - RNA, 17 nt, Human
gcugccauccagguuca

SEQ ID NO: 3049364 - RNA, 12 nt, Human
gcugcugacagu

SEQ ID NO: 3049365 - RNA, 18 nt, Human
gcugcugaaggcucgagc

SEQ ID NO: 3049366 - RNA, 20 nt, Human
gcugcugagauccuggacug

SEQ ID NO: 3049367 - RNA, 18 nt, Human
gcugcugagauccuggac

SEQ ID NO: 3049368 - RNA, 15 nt, Human
gcugaggugggagga

SEQ ID NO: 3049369 - RNA, 13 nt, Human
gcugcacccucag

SEQ ID NO: 3049370 - RNA, 15 nt, Human
gcugcacccucaggc

SEQ ID NO: 3049371 - RNA, 13 nt, Human
gcugccauccagg

SEQ ID NO: 3049372 - RNA, 12 nt, Human
gcugccauccag

SEQ ID NO: 3049373 - RNA, 13 nt, Human
gcugccagugccu

SEQ ID NO: 3049374 - RNA, 14 nt, Human
gcugccagugccug

SEQ ID NO: 3049375 - RNA, 22 nt, Human
gcuuccagugaggcucugcccu

SEQ ID NO: 3049376 - RNA, 23 nt, Human
gcuuucuacccagcgagcccugg

SEQ ID NO: 3049377 - RNA, 23 nt, Human
gcuugaccgugaggccagagaca

SEQ ID NO: 3049378 - RNA, 18 nt, Human
gcuugaccuuuaagagaa

SEQ ID NO: 3049379 - RNA, 17 nt, Human
gcuuguaaauagcucag

SEQ ID NO: 3049380 - RNA, 19 nt, Human
gcuuguaaauagcucaggu

SEQ ID NO: 3049381 - RNA, 18 nt, Human
gcuuguaaauagcucagg

SEQ ID NO: 3049382 - RNA, 19 nt, Human
gcuuccuggcaauagucaa

SEQ ID NO: 3049383 - RNA, 23 nt, Human
gcuuccagugaggcucugcccuu

SEQ ID NO: 3049384 - RNA, 12 nt, Human
gcuucuucagag

SEQ ID NO: 3049385 - RNA, 15 nt, Human
gcuucuucagagacu

SEQ ID NO: 3049386 - RNA, 19 nt, Human
gcuugaaacccguggcgcu

SEQ ID NO: 3049387 - RNA, 20 nt, Human
gcuugaccgugaggccagag

SEQ ID NO: 3049388 - RNA, 23 nt, Human
gcugguucaggguuggccccugc

SEQ ID NO: 3049389 - RNA, 12 nt, Human
gcuguauuuuaa

SEQ ID NO: 3049390 - RNA, 13 nt, Human
gcuguauuuuaaa

SEQ ID NO: 3049391 - RNA, 16 nt, Human
gcuucaaauuguaagc

SEQ ID NO: 3049392 - RNA, 14 nt, Human
gcuucaaggauccu

SEQ ID NO: 3049393 - RNA, 14 nt, Human
gcuucaguggcagc

SEQ ID NO: 3049394 - RNA, 13 nt, Human
gcuguuggcuggg

SEQ ID NO: 3049395 - RNA, 17 nt, Human
gcuuauuuccucauuuu

SEQ ID NO: 3049396 - RNA, 17 nt, Human
ggaagacuucaucccuc

SEQ ID NO: 3049397 - RNA, 20 nt, Human
ggaagacuucaucccucugg

SEQ ID NO: 3049398 - RNA, 14 nt, Human
ggaagacaauguga

SEQ ID NO: 3049399 - RNA, 16 nt, Human
ggaagacaaugugaaa

SEQ ID NO: 3049400 - RNA, 15 nt, Human
ggaacacuccuucac

SEQ ID NO: 3049401 - RNA, 23 nt, Human
ggaacaaggcaaggcugucaauu

SEQ ID NO: 3049402 - RNA, 13 nt, Human
ggaacaccuccuc

SEQ ID NO: 3049403 - RNA, 17 nt, Human
ggaacaaggcaaggcug

SEQ ID NO: 3049404 - RNA, 21 nt, Human
ggaacaaggcaaggcugucaa

SEQ ID NO: 3049405 - RNA, 15 nt, Human
ggaacaaggcaaggc

SEQ ID NO: 3049406 - RNA, 16 nt, Human
ggaaaugggcagagca

SEQ ID NO: 3049407 - RNA, 17 nt, Human
ggaaaugggcagagcag

SEQ ID NO: 3049408 - RNA, 18 nt, Human
ggaaaugggcagagcaga

SEQ ID NO: 3049409 - RNA, 22 nt, Human
ggaaaugggcagagcagagacc

SEQ ID NO: 3049410 - RNA, 14 nt, Human
ggaaaugggcagag

SEQ ID NO: 3049411 - RNA, 14 nt, Human
gcuuugaucccuuc

SEQ ID NO: 3049412 - RNA, 17 nt, Human
gcuuugaucccuucuua

SEQ ID NO: 3049413 - RNA, 18 nt, Human
gcuuuugucuaugggacu

SEQ ID NO: 3049414 - RNA, 15 nt, Human
gcuuuuggucugugu

SEQ ID NO: 3049415 - RNA, 20 nt, Human
gcuuuuuuaucaugugaaau

SEQ ID NO: 3049416 - RNA, 18 nt, Human
gcuuuuuuaucaugugaa

SEQ ID NO: 3049417 - RNA, 15 nt, Human
gcuuuuuuaucaugu

SEQ ID NO: 3049418 - RNA, 12 nt, Human
gcuuuugugcau

SEQ ID NO: 3049419 - RNA, 16 nt, Human
ggaaacccagcucugg

SEQ ID NO: 3049420 - RNA, 18 nt, Human
ggaaaauuuuaaaaauac

SEQ ID NO: 3049421 - RNA, 22 nt, Human
gcuuuuuucucugauacagaaa

SEQ ID NO: 3049422 - RNA, 23 nt, Human
ggcucagcaaaagaugcuucuca

SEQ ID NO: 3049423 - RNA, 19 nt, Human
ggcucagcaaaagaugcuu

SEQ ID NO: 3049424 - RNA, 23 nt, Human
ggcucagcggggacagcuccuuc

SEQ ID NO: 3049425 - RNA, 22 nt, Human
ggcucagcggggacagcuccuu

SEQ ID NO: 3049426 - RNA, 21 nt, Human
ggcucagcggggacagcuccu

SEQ ID NO: 3049427 - RNA, 17 nt, Human
ggcucacugcagccuca

SEQ ID NO: 3049428 - RNA, 16 nt, Human
ggcucacugcagccuc

SEQ ID NO: 3049429 - RNA, 14 nt, Human
ggcgugcaguggug

SEQ ID NO: 3049430 - RNA, 19 nt, Human
ggcgugcaguggugcgauc

SEQ ID NO: 3049431 - RNA, 15 nt, Human
ggccugagcugggau

SEQ ID NO: 3049432 - RNA, 12 nt, Human
ggccugagcugg

SEQ ID NO: 3049433 - RNA, 20 nt, Human
ggccuguggaucaaauccag

SEQ ID NO: 3049434 - RNA, 21 nt, Human
ggccugugucuaguuguuuga

SEQ ID NO: 3049435 - RNA, 12 nt, Human
ggccuucucuga

SEQ ID NO: 3049436 - RNA, 23 nt, Human
ggccuucggccuccauccugagg

SEQ ID NO: 3049437 - RNA, 22 nt, Human
ggccuucggccuccauccugag

SEQ ID NO: 3049438 - RNA, 21 nt, Human
ggccuggccagaugcaccagc

SEQ ID NO: 3049439 - RNA, 16 nt, Human
ggccuggccagaugca

SEQ ID NO: 3049440 - RNA, 16 nt, Human
ggccuucucugaagga

SEQ ID NO: 3049441 - RNA, 15 nt, Human
ggccuucucugaagg

SEQ ID NO: 3049442 - RNA, 13 nt, Human
ggccuuuggcuuc

SEQ ID NO: 3049443 - RNA, 14 nt, Human
ggccuuuggcuuca

SEQ ID NO: 3049444 - RNA, 17 nt, Human
ggcagugggagcugccu

SEQ ID NO: 3049445 - RNA, 24 nt, Human
ggcacugcuuccagugaggcucug

SEQ ID NO: 3049446 - RNA, 22 nt, Human
ggcacuggcaaacagggccucu

SEQ ID NO: 3049447 - RNA, 23 nt, Human
ggcacuggcaaacagggccucug

SEQ ID NO: 3049448 - RNA, 15 nt, Human
ggcaccagcagccug

SEQ ID NO: 3049449 - RNA, 16 nt, Human
ggcaccagcagccugg

SEQ ID NO: 3049450 - RNA, 22 nt, Human
ggcacugcuuccagugaggcuc

SEQ ID NO: 3049451 - RNA, 15 nt, Human
ggcauauuuuucaca

SEQ ID NO: 3049452 - RNA, 17 nt, Human
ggcauauuuuucacaua

SEQ ID NO: 3049453 - RNA, 18 nt, Human
ggcauccaguaucuugaa

SEQ ID NO: 3049454 - RNA, 19 nt, Human
ggcagugggagcugccugu

SEQ ID NO: 3049455 - RNA, 18 nt, Human
ggcagugggagcugccug

SEQ ID NO: 3049456 - RNA, 18 nt, Human
ggcauuuuacuguacaga

SEQ ID NO: 3049457 - RNA, 16 nt, Human
ggccagugugacaagg

SEQ ID NO: 3049458 - RNA, 14 nt, Human
ggccaggcuggucu

SEQ ID NO: 3049459 - RNA, 12 nt, Human
ggccaggcuggu

SEQ ID NO: 3049460 - RNA, 18 nt, Human
ggccaggcuggucucaaa

SEQ ID NO: 3049461 - RNA, 16 nt, Human
ggccaggcuggucuca

SEQ ID NO: 3049462 - RNA, 17 nt, Human
ggccaaacucaccugcc

SEQ ID NO: 3049463 - RNA, 16 nt, Human
ggcccuucucuccagc

SEQ ID NO: 3049464 - RNA, 17 nt, Human
ggcccuucucuccagcc

SEQ ID NO: 3049465 - RNA, 14 nt, Human
ggcccuuccuuuuc

SEQ ID NO: 3049466 - RNA, 18 nt, Human
ggcccuucucuccagccc

SEQ ID NO: 3049467 - RNA, 19 nt, Human
ggcccaggguggccacacc

SEQ ID NO: 3049468 - RNA, 17 nt, Human
ggccccaccagugccuc

SEQ ID NO: 3049469 - RNA, 18 nt, Human
ggccccaccagugccucu

SEQ ID NO: 3049470 - RNA, 13 nt, Human
ggauguucuggga

SEQ ID NO: 3049471 - RNA, 16 nt, Human
ggauguucugggacac

SEQ ID NO: 3049472 - RNA, 15 nt, Human
ggauguucugggaca

SEQ ID NO: 3049473 - RNA, 24 nt, Human
ggcacagaaaauggaagacagcuc

SEQ ID NO: 3049474 - RNA, 15 nt, Human
ggagugcagugagcc

SEQ ID NO: 3049475 - RNA, 22 nt, Human
ggaucuucaucugacuaugaca

SEQ ID NO: 3049476 - RNA, 18 nt, Human
ggaucucuugagccuggg

SEQ ID NO: 3049477 - RNA, 15 nt, Human
ggauccuccaggugc

SEQ ID NO: 3049478 - RNA, 14 nt, Human
ggauccuccaggug

SEQ ID NO: 3049479 - RNA, 13 nt, Human
ggauccugagcca

SEQ ID NO: 3049480 - RNA, 14 nt, Human
ggauccugagccag

SEQ ID NO: 3049481 - RNA, 18 nt, Human
ggauggauuuccagccaa

SEQ ID NO: 3049482 - RNA, 12 nt, Human
ggauggcaagau

SEQ ID NO: 3049483 - RNA, 16 nt, Human
ggauggggcugcaccg

SEQ ID NO: 3049484 - RNA, 14 nt, Human
ggaguggccacaga

SEQ ID NO: 3049485 - RNA, 15 nt, Human
ggaguucugguuccu

SEQ ID NO: 3049486 - RNA, 16 nt, Human
ggaggggggagguggg

SEQ ID NO: 3049487 - RNA, 20 nt, Human
ggaggucaaggcugcaguga

SEQ ID NO: 3049488 - RNA, 14 nt, Human
ggaggugaccccag

SEQ ID NO: 3049489 - RNA, 22 nt, Human
ggagcccacuguacuugcucuu

SEQ ID NO: 3049490 - RNA, 22 nt, Human
ggagccccgaggccuucucuga

SEQ ID NO: 3049491 - RNA, 16 nt, Human
ggagccccgaggccuu

SEQ ID NO: 3049492 - RNA, 12 nt, Human
ggagcugccugu

SEQ ID NO: 3049493 - RNA, 16 nt, Human
ggagcugaguggggga

SEQ ID NO: 3049494 - RNA, 22 nt, Human
ggagcugaucgcuucuccccca

SEQ ID NO: 3049495 - RNA, 21 nt, Human
ggagcugccuguucagcucca

SEQ ID NO: 3049496 - RNA, 20 nt, Human
ggaggccaaggugggaggau

SEQ ID NO: 3049497 - RNA, 11 nt, Human
ggaggccagcc

SEQ ID NO: 3049498 - RNA, 20 nt, Human
ggaggaaggaaacccagcuc

SEQ ID NO: 3049499 - RNA, 23 nt, Human
ggaggaaggaaacccagcucugg

SEQ ID NO: 3049500 - RNA, 19 nt, Human
ggaggaaggaaacccagcu

SEQ ID NO: 3049501 - RNA, 18 nt, Human
aaagccuguuuaagagac

SEQ ID NO: 3049502 - RNA, 16 nt, Human
aaagccuguuuaagag

SEQ ID NO: 3049503 - RNA, 14 nt, Human
ggugggauccucca

SEQ ID NO: 3049504 - RNA, 15 nt, Human
ggugggauccuccag

SEQ ID NO: 3049505 - RNA, 20 nt, Human
ggugggaggauugcuugagc

SEQ ID NO: 3049506 - RNA, 20 nt, Human
ggugggaggaucucuugagc

SEQ ID NO: 3049507 - RNA, 19 nt, Human
ggugggauccuccaggugc

SEQ ID NO: 3049508 - RNA, 13 nt, Human
gguggggcagcuu

SEQ ID NO: 3049509 - RNA, 17 nt, Human
gguggggcagcuugagg

SEQ ID NO: 3049510 - RNA, 17 nt, Human
gguggggggggugcugg

SEQ ID NO: 3049511 - RNA, 15 nt, Human
gguggggucacucug

SEQ ID NO: 3049512 - RNA, 23 nt, Human
gguggggucacucuggcagcuca

SEQ ID NO: 3049513 - RNA, 13 nt, Human
ggugucgggcaug

SEQ ID NO: 3049514 - RNA, 16 nt, Human
ggugucgggcaugaca

SEQ ID NO: 3049515 - RNA, 16 nt, Human
ggugugacugaauuuc

SEQ ID NO: 3049516 - RNA, 16 nt, Human
ggugugaccacugcag

SEQ ID NO: 3049517 - RNA, 18 nt, Human
ggugugagucaccaagcc

SEQ ID NO: 3049518 - RNA, 21 nt, Human
ggugugcggccuuuggcuuca

SEQ ID NO: 3049519 - RNA, 13 nt, Human
ggugugcucugau

SEQ ID NO: 3049520 - RNA, 12 nt, Human
gguguggaagag

SEQ ID NO: 3049521 - RNA, 12 nt, Human
gguucagcuugu

SEQ ID NO: 3049522 - RNA, 21 nt, Human
gguucaggguuggccccugcc

SEQ ID NO: 3049523 - RNA, 18 nt, Human
gguucaggguuggccccu

SEQ ID NO: 3049524 - RNA, 22 nt, Human
gguucaggguuggccccugccc

SEQ ID NO: 3049525 - RNA, 21 nt, Human
gguucccuuugacgccauccc

SEQ ID NO: 3049526 - RNA, 13 nt, Human
gguuucagaaaug

SEQ ID NO: 3049527 - RNA, 12 nt, Human
gguuucagaaau

SEQ ID NO: 3049528 - RNA, 14 nt, Human
gguuucagaaaugu

SEQ ID NO: 3049529 - RNA, 12 nt, Human
gguuucuagcau

SEQ ID NO: 3049530 - RNA, 16 nt, Human
gguuuagaaagcuugc

SEQ ID NO: 3049531 - RNA, 22 nt, Human
guaaaaugugaagugaaugaaa

SEQ ID NO: 3049532 - RNA, 20 nt, Human
guaaaaugugaagugaauga

SEQ ID NO: 3049533 - RNA, 19 nt, Human
guaaaaugugaagugaaug

SEQ ID NO: 3049534 - RNA, 12 nt, Human
guaaaaugugaa

SEQ ID NO: 3049535 - RNA, 17 nt, Human
guaacaaugaagauaaa

SEQ ID NO: 3049536 - RNA, 13 nt, Human
aaauaaugugaaa

SEQ ID NO: 3049537 - RNA, 15 nt, Human
aaauaauuuuuauau

SEQ ID NO: 3049538 - RNA, 18 nt, Human
aaauaauuuuuauauuug

SEQ ID NO: 3049539 - RNA, 20 nt, Human
aaauaauuuuuauauuugaa

SEQ ID NO: 3049540 - RNA, 12 nt, Human
aaauaaugugaa

SEQ ID NO: 3049541 - RNA, 23 nt, Human
aaaguuauugauaaguucauaca

SEQ ID NO: 3049542 - RNA, 12 nt, Human
aaaguggugaga

SEQ ID NO: 3049543 - RNA, 15 nt, Human
gguuuggagcugauc

SEQ ID NO: 3049544 - RNA, 20 nt, Human
gguuuggacaaaauggaaua

SEQ ID NO: 3049545 - RNA, 13 nt, Human
gguuuggagcuga

SEQ ID NO: 3049546 - RNA, 16 nt, Human
aaaguuuguugaaaca

SEQ ID NO: 3049547 - RNA, 23 nt, Human
aaaguuucucuuuucaaaacauu

SEQ ID NO: 3049548 - RNA, 21 nt, Human
aaaguuucucuuuucaaaaca

SEQ ID NO: 3049549 - RNA, 16 nt, Human
aaaguugaauuuuaca

SEQ ID NO: 3049550 - RNA, 13 nt, Human
aaagauuuucaga

SEQ ID NO: 3049551 - RNA, 13 nt, Human
aaagcaaaggaga

SEQ ID NO: 3049552 - RNA, 15 nt, Human
aaagacuauucaaac

SEQ ID NO: 3049553 - RNA, 21 nt, Human
gguccugcugcaguugccagu

SEQ ID NO: 3049554 - RNA, 23 nt, Human
gguccugcugcaguugccaguca

SEQ ID NO: 3049555 - RNA, 23 nt, Human
gguccuagaaauuccccacccug

SEQ ID NO: 3049556 - RNA, 24 nt, Human
ggucugugagaugcuagaacuccc

SEQ ID NO: 3049557 - RNA, 17 nt, Human
ggucuacacugugcuga

SEQ ID NO: 3049558 - RNA, 14 nt, Human
ggucggaaaacaug

SEQ ID NO: 3049559 - RNA, 20 nt, Human
ggucgcccuggacugugugc

SEQ ID NO: 3049560 - RNA, 13 nt, Human
ggucggaaaacau

SEQ ID NO: 3049561 - RNA, 14 nt, Human
gguccugcugcagu

SEQ ID NO: 3049562 - RNA, 19 nt, Human
ggugcugggccccugccuc

SEQ ID NO: 3049563 - RNA, 20 nt, Human
ggugcugggccccugccucu

SEQ ID NO: 3049564 - RNA, 21 nt, Human
ggugcauuugaggucuguucu

SEQ ID NO: 3049565 - RNA, 16 nt, Human
ggugcaaugaccuuuc

SEQ ID NO: 3049566 - RNA, 19 nt, Human
ggugcaaugaccuuucaau

SEQ ID NO: 3049567 - RNA, 20 nt, Human
ggugcaaugaccuuucaaua

SEQ ID NO: 3049568 - RNA, 18 nt, Human
ggugcaaugaccuuucaa

SEQ ID NO: 3049569 - RNA, 19 nt, Human
aaagcaggcagaacucauc

SEQ ID NO: 3049570 - RNA, 17 nt, Human
aaagcagggacuugaac

SEQ ID NO: 3049571 - RNA, 17 nt, Human
aaagcaggcagaacuca

SEQ ID NO: 3049572 - RNA, 15 nt, Human
aaagcagcguuucua

SEQ ID NO: 3049573 - RNA, 14 nt, Human
gguggaugccuggu

SEQ ID NO: 3049574 - RNA, 21 nt, Human
gguggaugccugguggcagcu

SEQ ID NO: 3049575 - RNA, 22 nt, Human
aaagcagcguuucuaugacaca

SEQ ID NO: 3049576 - RNA, 18 nt, Human
aaagcagcguuucuauga

SEQ ID NO: 3049577 - RNA, 16 nt, Human
aaagcagcguuucuau

SEQ ID NO: 3049578 - RNA, 14 nt, Human
gguaugcaaucaaa

SEQ ID NO: 3049579 - RNA, 22 nt, Human
gguaugaucacggcucacugca

SEQ ID NO: 3049580 - RNA, 16 nt, Human
gguccacccaggagcc

SEQ ID NO: 3049581 - RNA, 15 nt, Human
gguccacccaggagc

SEQ ID NO: 3049582 - RNA, 13 nt, Human
gguccacccagga

SEQ ID NO: 3049583 - RNA, 12 nt, Human
gguccacccagg

SEQ ID NO: 3049584 - RNA, 17 nt, Human
gguccacccaggagccc

SEQ ID NO: 3049585 - RNA, 22 nt, Human
aaacuuuaccuuuuuuauacau

SEQ ID NO: 3049586 - RNA, 17 nt, Human
aaacuuuaccuuuuuua

SEQ ID NO: 3049587 - RNA, 15 nt, Human
gguccauagagagca

SEQ ID NO: 3049588 - RNA, 12 nt, Human
aaacuuuacuau

SEQ ID NO: 3049589 - RNA, 17 nt, Human
aaagacuaucuaaaugu

SEQ ID NO: 3049590 - RNA, 14 nt, Human
aaagacuauucaaa

SEQ ID NO: 3049591 - RNA, 18 nt, Human
ggguggggggggugcugg

SEQ ID NO: 3049592 - RNA, 15 nt, Human
ggguggggggggugc

SEQ ID NO: 3049593 - RNA, 17 nt, Human
ggguguggcgcagcaua

SEQ ID NO: 3049594 - RNA, 20 nt, Human
ggguggggaccucaggccug

SEQ ID NO: 3049595 - RNA, 19 nt, Human
gggugggacacccugugau

SEQ ID NO: 3049596 - RNA, 13 nt, Human
ggguggaugccug

SEQ ID NO: 3049597 - RNA, 15 nt, Human
ggguggcaccagcag

SEQ ID NO: 3049598 - RNA, 17 nt, Human
ggguggaugccuggugg

SEQ ID NO: 3049599 - RNA, 13 nt, Human
gguaacaggcaga

SEQ ID NO: 3049600 - RNA, 20 nt, Human
gguaacaggcagauacagga

SEQ ID NO: 3049601 - RNA, 14 nt, Human
gguaacaggcagau

SEQ ID NO: 3049602 - RNA, 17 nt, Human
ggguuucuaaagcugcc

SEQ ID NO: 3049603 - RNA, 20 nt, Human
aaacagucucaggaaaucaa

SEQ ID NO: 3049604 - RNA, 20 nt, Human
aaacaagcacuaaacaaaga

SEQ ID NO: 3049605 - RNA, 16 nt, Human
aaacacauuuuucuua

SEQ ID NO: 3049606 - RNA, 12 nt, Human
aaacacauuuuu

SEQ ID NO: 3049607 - RNA, 20 nt, Human
aaacaagaccacguuucuaa

SEQ ID NO: 3049608 - RNA, 18 nt, Human
aaacaagaccacguuucu

SEQ ID NO: 3049609 - RNA, 15 nt, Human
ggggccucagugcca

SEQ ID NO: 3049610 - RNA, 12 nt, Human
ggggccuggaug

SEQ ID NO: 3049611 - RNA, 20 nt, Human
ggggacagcuccuucugucc

SEQ ID NO: 3049612 - RNA, 14 nt, Human
ggggacagcuccuu

SEQ ID NO: 3049613 - RNA, 12 nt, Human
ggggacagcucc

SEQ ID NO: 3049614 - RNA, 18 nt, Human
gggcugcaugcgggcuuc

SEQ ID NO: 3049615 - RNA, 21 nt, Human
gggcugcaugcgggcuuccuc

SEQ ID NO: 3049616 - RNA, 22 nt, Human
gggcugcaccggcuggccuggc

SEQ ID NO: 3049617 - RNA, 10 nt, Human
gggcucagca

SEQ ID NO: 3049618 - RNA, 20 nt, Human
gggcuggguucuacccaggu

SEQ ID NO: 3049619 - RNA, 12 nt, Human
aaaaugugaagu

SEQ ID NO: 3049620 - RNA, 15 nt, Human
aaaaugugauaugua

SEQ ID NO: 3049621 - RNA, 22 nt, Human
gggcuggguucuacccaggugc

SEQ ID NO: 3049622 - RNA, 22 nt, Human
aaaauuuuuucucuaggaaaua

SEQ ID NO: 3049623 - RNA, 15 nt, Human
gggccaggcuggguc

SEQ ID NO: 3049624 - RNA, 14 nt, Human
gggccaggcugggu

SEQ ID NO: 3049625 - RNA, 21 nt, Human
gggccaggcugggucgcccug

SEQ ID NO: 3049626 - RNA, 13 nt, Human
gggccaggcuggg

SEQ ID NO: 3049627 - RNA, 11 nt, Human
gggccaggagc

SEQ ID NO: 3049628 - RNA, 14 nt, Human
aaaaugagccuggc

SEQ ID NO: 3049629 - RNA, 21 nt, Human
aaaaugagccuggcaagaaug

SEQ ID NO: 3049630 - RNA, 19 nt, Human
aaaaguauguuagugcaaa

SEQ ID NO: 3049631 - RNA, 14 nt, Human
gggccaguuggucc

SEQ ID NO: 3049632 - RNA, 18 nt, Human
gggccaguuggucccccu

SEQ ID NO: 3049633 - RNA, 22 nt, Human
gggccaguuggucccccuucca

SEQ ID NO: 3049634 - RNA, 23 nt, Human
gggccaguuggucccccuuccau

SEQ ID NO: 3049635 - RNA, 15 nt, Human
gggcgggaggauguu

SEQ ID NO: 3049636 - RNA, 18 nt, Human
gggcuaguugggcuuccu

SEQ ID NO: 3049637 - RNA, 15 nt, Human
gggcgugguggugag

SEQ ID NO: 3049638 - RNA, 13 nt, Human
gggccuccugugu

SEQ ID NO: 3049639 - RNA, 15 nt, Human
gggccuccugugugu

SEQ ID NO: 3049640 - RNA, 23 nt, Human
gggccucggaccccacuccggcc

SEQ ID NO: 3049641 - RNA, 20 nt, Human
gggccucuuaugggcugggu

SEQ ID NO: 3049642 - RNA, 19 nt, Human
gggccucuuaugggcuggg

SEQ ID NO: 3049643 - RNA, 15 nt, Human
aaaaauauauuuaau

SEQ ID NO: 3049644 - RNA, 13 nt, Human
aaaaauauauuua

SEQ ID NO: 3049645 - RNA, 19 nt, Human
aaaaauauauuuaaugaua

SEQ ID NO: 3049646 - RNA, 21 nt, Human
gggacagcuccuucuguccua

SEQ ID NO: 3049647 - RNA, 19 nt, Human
gggacauuugcucauggaa

SEQ ID NO: 3049648 - RNA, 20 nt, Human
gggacauuugcucauggaau

SEQ ID NO: 3049649 - RNA, 21 nt, Human
gggacauuugcucauggaauu

SEQ ID NO: 3049650 - RNA, 13 nt, Human
gggacagaggggg

SEQ ID NO: 3049651 - RNA, 22 nt, Human
gggacagaggggguggccuccc

SEQ ID NO: 3049652 - RNA, 23 nt, Human
gggacagaggggguggccuccca

SEQ ID NO: 3049653 - RNA, 16 nt, Human
gggacagcuccuucug

SEQ ID NO: 3049654 - RNA, 13 nt, Human
gggaaggauacaa

SEQ ID NO: 3049655 - RNA, 15 nt, Human
aaaacccagauaaag

SEQ ID NO: 3049656 - RNA, 13 nt, Human
aaaaccacagcag

SEQ ID NO: 3049657 - RNA, 13 nt, Human
aaaagaugcuucu

SEQ ID NO: 3049658 - RNA, 17 nt, Human
aaaagaugaaaauauuu

SEQ ID NO: 3049659 - RNA, 23 nt, Human
aaaacugcugacuguuuucucuu

SEQ ID NO: 3049660 - RNA, 20 nt, Human
aaaacugcugacuguuuucu

SEQ ID NO: 3049661 - RNA, 22 nt, Human
aaaacugcugacuguuuucucu

SEQ ID NO: 3049662 - RNA, 13 nt, Human
aaaacucauuuuu

SEQ ID NO: 3049663 - RNA, 21 nt, Human
aaaaccaauguucucucuucu

SEQ ID NO: 3049664 - RNA, 12 nt, Human
aaaaccacagca

SEQ ID NO: 3049665 - RNA, 15 nt, Human
aaaacaugcuacaca

SEQ ID NO: 3049666 - RNA, 14 nt, Human
aaaaaucucaaauu

SEQ ID NO: 3049667 - RNA, 22 nt, Human
aaaaauggaacauaaaauacaa

SEQ ID NO: 3049668 - RNA, 15 nt, Human
gggaggucgaggcag

SEQ ID NO: 3049669 - RNA, 22 nt, Human
gggaggcucuggagcccacugu

SEQ ID NO: 3049670 - RNA, 14 nt, Human
gggagggcuccaga

SEQ ID NO: 3049671 - RNA, 15 nt, Human
gggagggcuccagac

SEQ ID NO: 3049672 - RNA, 17 nt, Human
gggagggcuccagacac

SEQ ID NO: 3049673 - RNA, 17 nt, Human
gggaggucgaggcagga

SEQ ID NO: 3049674 - RNA, 18 nt, Human
gggagggcuccagacaca

SEQ ID NO: 3049675 - RNA, 18 nt, Human
gggaggucgaggcaggag

SEQ ID NO: 3049676 - RNA, 19 nt, Human
gggaggucgaggcaggagg

SEQ ID NO: 3049677 - RNA, 19 nt, Human
gggaggccaaggugggagg

SEQ ID NO: 3049678 - RNA, 17 nt, Human
gggauugaaggaugcug

SEQ ID NO: 3049679 - RNA, 16 nt, Human
gggauuguaaaauggu

SEQ ID NO: 3049680 - RNA, 17 nt, Human
gggauuguaaaauggug

SEQ ID NO: 3049681 - RNA, 15 nt, Human
gggauuacaggugug

SEQ ID NO: 3049682 - RNA, 17 nt, Human
gggcagagcagagacca

SEQ ID NO: 3049683 - RNA, 22 nt, Human
gggcagagcagagaccaucccu

SEQ ID NO: 3049684 - RNA, 14 nt, Human
gggcagaggaaagc

SEQ ID NO: 3049685 - RNA, 16 nt, Human
gggcagagcagagacc

SEQ ID NO: 3049686 - RNA, 12 nt, Human
gggcagagcaga

SEQ ID NO: 3049687 - RNA, 18 nt, Human
gggcaacccccagccugc

SEQ ID NO: 3049688 - RNA, 16 nt, Human
gggcaacccccagccu

SEQ ID NO: 3049689 - RNA, 19 nt, Human
aaaagggacugagaaauuu

SEQ ID NO: 3049690 - RNA, 16 nt, Human
gaugagaggaaaucac

SEQ ID NO: 3049691 - RNA, 14 nt, Human
gaugaucuuugcag

SEQ ID NO: 3049692 - RNA, 21 nt, Human
gaugaucuuugcagacaggca

SEQ ID NO: 3049693 - RNA, 20 nt, Human
gaugaucuuugcagacaggc

SEQ ID NO: 3049694 - RNA, 12 nt, Human
gaucucuugagc

SEQ ID NO: 3049695 - RNA, 16 nt, Human
gaucucuugagccugg

SEQ ID NO: 3049696 - RNA, 17 nt, Human
gaucucuugagccuggg

SEQ ID NO: 3049697 - RNA, 15 nt, Human
gauauuuuuuucuuu

SEQ ID NO: 3049698 - RNA, 16 nt, Human
gauauuuugcuuugug

SEQ ID NO: 3049699 - RNA, 15 nt, Human
gauauuuugcuuugu

SEQ ID NO: 3049700 - RNA, 17 nt, Human
gauuagggagagaagau

SEQ ID NO: 3049701 - RNA, 18 nt, Human
gauuacugccuauuuuaa

SEQ ID NO: 3049702 - RNA, 14 nt, Human
gauuaccagggacu

SEQ ID NO: 3049703 - RNA, 20 nt, Human
gauuacaggugugaaccacc

SEQ ID NO: 3049704 - RNA, 16 nt, Human
gaugugaacacaucag

SEQ ID NO: 3049705 - RNA, 14 nt, Human
gaugugaacacauc

SEQ ID NO: 3049706 - RNA, 20 nt, Human
gaguuugggguaugggagag

SEQ ID NO: 3049707 - RNA, 20 nt, Human
gaguuguuacauuuuuaagu

SEQ ID NO: 3049708 - RNA, 16 nt, Human
gaguuguuacauuuuu

SEQ ID NO: 3049709 - RNA, 18 nt, Human
gagugccuuacacaaugg

SEQ ID NO: 3049710 - RNA, 21 nt, Human
gagugcucaguagucagacug

SEQ ID NO: 3049711 - RNA, 16 nt, Human
gaguuuaaauuguaau

SEQ ID NO: 3049712 - RNA, 16 nt, Human
gaguuuagcuggaaaa

SEQ ID NO: 3049713 - RNA, 23 nt, Human
gaguugugugaauaccccaagac

SEQ ID NO: 3049714 - RNA, 12 nt, Human
gagugcagugag

SEQ ID NO: 3049715 - RNA, 11 nt, Human
gagugcaguga

SEQ ID NO: 3049716 - RNA, 12 nt, Human
gagugagcuggu

SEQ ID NO: 3049717 - RNA, 13 nt, Human
gagucccaccuug

SEQ ID NO: 3049718 - RNA, 24 nt, Human
gagugagcacuaaggugugcucug

SEQ ID NO: 3049719 - RNA, 20 nt, Human
gagucccaccuuggcugcag

SEQ ID NO: 3049720 - RNA, 16 nt, Human
gagucccaccuuggcu

SEQ ID NO: 3049721 - RNA, 14 nt, Human
gagucaccaagccc

SEQ ID NO: 3049722 - RNA, 13 nt, Human
gagucaccaagcc

SEQ ID NO: 3049723 - RNA, 12 nt, Human
gaggugggaucc

SEQ ID NO: 3049724 - RNA, 11 nt, Human
gaggugggagg

SEQ ID NO: 3049725 - RNA, 14 nt, Human
gaggucuguucuuu

SEQ ID NO: 3049726 - RNA, 13 nt, Human
gaggucuguucuu

SEQ ID NO: 3049727 - RNA, 11 nt, Human
gauacuacagu

SEQ ID NO: 3049728 - RNA, 16 nt, Human
gauacuacaguuuguu

SEQ ID NO: 3049729 - RNA, 13 nt, Human
gauacccauccca

SEQ ID NO: 3049730 - RNA, 14 nt, Human
gauacccaucccau

SEQ ID NO: 3049731 - RNA, 16 nt, Human
gauacuugaaaauuaa

SEQ ID NO: 3049732 - RNA, 20 nt, Human
gauauguaccuaacgaagua

SEQ ID NO: 3049733 - RNA, 13 nt, Human
gauaugugaacag

SEQ ID NO: 3049734 - RNA, 14 nt, Human
gauaugugaacagu

SEQ ID NO: 3049735 - RNA, 13 nt, Human
gcaagugagagcu

SEQ ID NO: 3049736 - RNA, 14 nt, Human
gcacaagcugcacc

SEQ ID NO: 3049737 - RNA, 23 nt, Human
gcacaagcuccaagcucccaggc

SEQ ID NO: 3049738 - RNA, 21 nt, Human
gcacaagcuccaagcucccag

SEQ ID NO: 3049739 - RNA, 22 nt, Human
gcacaagcuccaagcucccagg

SEQ ID NO: 3049740 - RNA, 21 nt, Human
gcaauaaagcagcguuucuau

SEQ ID NO: 3049741 - RNA, 18 nt, Human
gcaccggcuggccuggcc

SEQ ID NO: 3049742 - RNA, 21 nt, Human
gcaccggcuggccuggccccu

SEQ ID NO: 3049743 - RNA, 23 nt, Human
gcaccggcuggccuggccccuca

SEQ ID NO: 3049744 - RNA, 19 nt, Human
gcaccggcuggccuggccc

SEQ ID NO: 3049745 - RNA, 14 nt, Human
gcacaugccucucu

SEQ ID NO: 3049746 - RNA, 17 nt, Human
gcacaugccucucucag

SEQ ID NO: 3049747 - RNA, 18 nt, Human
gcacaugccucucucagg

SEQ ID NO: 3049748 - RNA, 19 nt, Human
gcacaugccucucucaggc

SEQ ID NO: 3049749 - RNA, 20 nt, Human
gcacaugccucucucaggcc

SEQ ID NO: 3049750 - RNA, 21 nt, Human
gcacaugccucucucaggcca

SEQ ID NO: 3049751 - RNA, 20 nt, Human
gcacaucagcacgauuucug

SEQ ID NO: 3049752 - RNA, 19 nt, Human
gcacaucagcacgauuucu

SEQ ID NO: 3049753 - RNA, 21 nt, Human
gcacaucagcacgauuucugu

SEQ ID NO: 3049754 - RNA, 13 nt, Human
gcacaugccucuc

SEQ ID NO: 3049755 - RNA, 21 nt, Human
gcacaugagcuggcgggauug

SEQ ID NO: 3049756 - RNA, 18 nt, Human
gcacaguuuucugagaaa

SEQ ID NO: 3049757 - RNA, 17 nt, Human
gcacaguuuucugagaa

SEQ ID NO: 3049758 - RNA, 14 nt, Human
gcacaguuuucuga

SEQ ID NO: 3049759 - RNA, 17 nt, Human
gcacugacagauuucca

SEQ ID NO: 3049760 - RNA, 12 nt, Human
gcacugacagau

SEQ ID NO: 3049761 - RNA, 12 nt, Human
gcacugacauug

SEQ ID NO: 3049762 - RNA, 19 nt, Human
gcagagcagagaccauccc

SEQ ID NO: 3049763 - RNA, 20 nt, Human
gcagagcagagaccaucccu

SEQ ID NO: 3049764 - RNA, 24 nt, Human
gcagagcaccuuagacagucccug

SEQ ID NO: 3049765 - RNA, 12 nt, Human
gcagagcagaga

SEQ ID NO: 3049766 - RNA, 14 nt, Human
gcagagcagagacc

SEQ ID NO: 3049767 - RNA, 15 nt, Human
gcagagcagagacca

SEQ ID NO: 3049768 - RNA, 22 nt, Human
gcagagcaccuuagacaguccc

SEQ ID NO: 3049769 - RNA, 23 nt, Human
gcagagcaccuuagacagucccu

SEQ ID NO: 3049770 - RNA, 19 nt, Human
gcagagcaccuuagacagu

SEQ ID NO: 3049771 - RNA, 12 nt, Human
gcagccaggcca

SEQ ID NO: 3049772 - RNA, 14 nt, Human
gcagccacuauugu

SEQ ID NO: 3049773 - RNA, 16 nt, Human
gcagccacauuccuga

SEQ ID NO: 3049774 - RNA, 13 nt, Human
gcagccaggccac

SEQ ID NO: 3049775 - RNA, 14 nt, Human
gcagccaggccaca

SEQ ID NO: 3049776 - RNA, 18 nt, Human
gcagcccaccccucaaca

SEQ ID NO: 3049777 - RNA, 16 nt, Human
gcauaccacuuuuguu

SEQ ID NO: 3049778 - RNA, 22 nt, Human
gcauaacguauaaaagccuguu

SEQ ID NO: 3049779 - RNA, 20 nt, Human
gcauaccacuuuuguucuug

SEQ ID NO: 3049780 - RNA, 17 nt, Human
gcauaccacuuuuguuc

SEQ ID NO: 3049781 - RNA, 20 nt, Human
gcaggcucucaggccagcug

SEQ ID NO: 3049782 - RNA, 22 nt, Human
gcaggcucucaggccagcugcu

SEQ ID NO: 3049783 - RNA, 17 nt, Human
gcagcugcgguccaccc

SEQ ID NO: 3049784 - RNA, 23 nt, Human
gcaggcucucaggccagcugcuu

SEQ ID NO: 3049785 - RNA, 18 nt, Human
gcaggcucucaggccagc

SEQ ID NO: 3049786 - RNA, 19 nt, Human
gcagggacuugaacccaua

SEQ ID NO: 3049787 - RNA, 16 nt, Human
gacagaauauguuuca

SEQ ID NO: 3049788 - RNA, 16 nt, Human
gacagaagcagcucuu

SEQ ID NO: 3049789 - RNA, 20 nt, Human
gacagcccgggcucugccuc

SEQ ID NO: 3049790 - RNA, 21 nt, Human
gacagcccgggcucugccucc

SEQ ID NO: 3049791 - RNA, 22 nt, Human
gacagcccgggcucugccuccc

SEQ ID NO: 3049792 - RNA, 23 nt, Human
gacagcccgggcucugccuccca

SEQ ID NO: 3049793 - RNA, 15 nt, Human
gacacugaugggcaa

SEQ ID NO: 3049794 - RNA, 16 nt, Human
gacacuuaaaaauggu

SEQ ID NO: 3049795 - RNA, 13 nt, Human
gacacugaugggc

SEQ ID NO: 3049796 - RNA, 20 nt, Human
gacaguauggcagcuuuccu

SEQ ID NO: 3049797 - RNA, 17 nt, Human
gacagucaccucaugga

SEQ ID NO: 3049798 - RNA, 22 nt, Human
gacaggguuuugccauguuggc

SEQ ID NO: 3049799 - RNA, 20 nt, Human
gacaggguuuugccauguug

SEQ ID NO: 3049800 - RNA, 11 nt, Human
gacagcuccuu

SEQ ID NO: 3049801 - RNA, 21 nt, Human
gacacacagcucuguccuggg

SEQ ID NO: 3049802 - RNA, 12 nt, Human
gacacacaugaa

SEQ ID NO: 3049803 - RNA, 13 nt, Human
gacacacugaaga

SEQ ID NO: 3049804 - RNA, 20 nt, Human
gaauuugugaagguggaaau

SEQ ID NO: 3049805 - RNA, 12 nt, Human
gaauuaugaaac

SEQ ID NO: 3049806 - RNA, 11 nt, Human
gaauuaguuuu

SEQ ID NO: 3049807 - RNA, 19 nt, Human
gaauuuuggcugugucucc

SEQ ID NO: 3049808 - RNA, 19 nt, Human
gacacacagcucuguccug

SEQ ID NO: 3049809 - RNA, 18 nt, Human
gacacacagcucuguccu

SEQ ID NO: 3049810 - RNA, 17 nt, Human
gacacacagcucugucc

SEQ ID NO: 3049811 - RNA, 15 nt, Human
gacacacagcucugu

SEQ ID NO: 3049812 - RNA, 13 nt, Human
gacacacagcucu

SEQ ID NO: 3049813 - RNA, 14 nt, Human
gacacacagcucug

SEQ ID NO: 3049814 - RNA, 15 nt, Human
gacaaaauggaauac

SEQ ID NO: 3049815 - RNA, 20 nt, Human
gaauuuugugcccccaugua

SEQ ID NO: 3049816 - RNA, 23 nt, Human
gaauuuuggcugugucucccuuc

SEQ ID NO: 3049817 - RNA, 21 nt, Human
gaauuuugugcccccauguaa

SEQ ID NO: 3049818 - RNA, 14 nt, Human
gacaaaaagcuacu

SEQ ID NO: 3049819 - RNA, 11 nt, Human
gaaugaauguc

SEQ ID NO: 3049820 - RNA, 14 nt, Human
gaaugaaugucagu

SEQ ID NO: 3049821 - RNA, 18 nt, Human
gaaugaaugucaguguga

SEQ ID NO: 3049822 - RNA, 22 nt, Human
gaaugaaugucagugugacuga

SEQ ID NO: 3049823 - RNA, 20 nt, Human
gaaugaauggcuaagcaaaa

SEQ ID NO: 3049824 - RNA, 20 nt, Human
gaaugagagacacacugaag

SEQ ID NO: 3049825 - RNA, 22 nt, Human
gaaugagagacacacugaagaa

SEQ ID NO: 3049826 - RNA, 23 nt, Human
gaaugagagacacacugaagaag

SEQ ID NO: 3049827 - RNA, 16 nt, Human
gaagcucagggccugg

SEQ ID NO: 3049828 - RNA, 17 nt, Human
gaagcucagggccuggc

SEQ ID NO: 3049829 - RNA, 18 nt, Human
gaagcucagggccuggcu

SEQ ID NO: 3049830 - RNA, 19 nt, Human
gaagcucagggccuggcuc

SEQ ID NO: 3049831 - RNA, 20 nt, Human
gaagcucagggccuggcuca

SEQ ID NO: 3049832 - RNA, 21 nt, Human
gaagcucagggccuggcucag

SEQ ID NO: 3049833 - RNA, 23 nt, Human
gaagcucagggccuggcucaggu

SEQ ID NO: 3049834 - RNA, 14 nt, Human
gaagcucagggccu

SEQ ID NO: 3049835 - RNA, 15 nt, Human
gaagcucagggccug

SEQ ID NO: 3049836 - RNA, 18 nt, Human
gaagucuuuguacagaca

SEQ ID NO: 3049837 - RNA, 19 nt, Human
gaagucuuuguacagacaa

SEQ ID NO: 3049838 - RNA, 20 nt, Human
gaagucuuuguacagacaac

SEQ ID NO: 3049839 - RNA, 16 nt, Human
gaaggcucgagcaugc

SEQ ID NO: 3049840 - RNA, 17 nt, Human
gaaggcucgagcaugcc

SEQ ID NO: 3049841 - RNA, 13 nt, Human
gacuaugacauaa

SEQ ID NO: 3049842 - RNA, 22 nt, Human
gacuauucaaacagucucagga

SEQ ID NO: 3049843 - RNA, 22 nt, Human
gacuaucuaaauguugaaagau

SEQ ID NO: 3049844 - RNA, 12 nt, Human
gacucugucuca

SEQ ID NO: 3049845 - RNA, 17 nt, Human
gacucuuaagaagacug

SEQ ID NO: 3049846 - RNA, 15 nt, Human
gacucuuaagaagac

SEQ ID NO: 3049847 - RNA, 16 nt, Human
gacucuuaagaagacu

SEQ ID NO: 3049848 - RNA, 23 nt, Human
gacuuuucuguccgagcuuugaa

SEQ ID NO: 3049849 - RNA, 23 nt, Human
gacuuuucuuucagccaagaauu

SEQ ID NO: 3049850 - RNA, 21 nt, Human
gacuuuucuuuguggcuuccu

SEQ ID NO: 3049851 - RNA, 12 nt, Human
gagaaggaagcc

SEQ ID NO: 3049852 - RNA, 13 nt, Human
gagaagcggcugg

SEQ ID NO: 3049853 - RNA, 15 nt, Human
gagaagcggcuggca

SEQ ID NO: 3049854 - RNA, 22 nt, Human
gagacguuuuuggaagaguagu

SEQ ID NO: 3049855 - RNA, 14 nt, Human
gagaaucacuugaa

SEQ ID NO: 3049856 - RNA, 15 nt, Human
gagaaucacuugaac

SEQ ID NO: 3049857 - RNA, 14 nt, Human
gagcagggcucagc

SEQ ID NO: 3049858 - RNA, 22 nt, Human
gagcaugccuggauggggcugc

SEQ ID NO: 3049859 - RNA, 21 nt, Human
gagcaugccuggauggggcug

SEQ ID NO: 3049860 - RNA, 12 nt, Human
gagcaucaggcc

SEQ ID NO: 3049861 - RNA, 17 nt, Human
gagccccacccucagau

SEQ ID NO: 3049862 - RNA, 18 nt, Human
gagcugggugucaagagg

SEQ ID NO: 3049863 - RNA, 14 nt, Human
gagccuuccagggg

SEQ ID NO: 3049864 - RNA, 15 nt, Human
gagccuuccaggggu

SEQ ID NO: 3049865 - RNA, 16 nt, Human
gagccuuccaggggug

SEQ ID NO: 3049866 - RNA, 17 nt, Human
gagccuuccaggggugg

SEQ ID NO: 3049867 - RNA, 19 nt, Human
gagccuugaacuuugaccu

SEQ ID NO: 3049868 - RNA, 22 nt, Human
gagccuugaacuuugaccucug

SEQ ID NO: 3049869 - RNA, 22 nt, Human
gagcugccuguucagcuccagc

SEQ ID NO: 3049870 - RNA, 21 nt, Human
gagcugccuguucagcuccag

SEQ ID NO: 3049871 - RNA, 20 nt, Human
gagcugccuguucagcucca

SEQ ID NO: 3049872 - RNA, 18 nt, Human
gagcggagaaaggaaggg

SEQ ID NO: 3049873 - RNA, 21 nt, Human
gagcggagaaaggaagggcug

SEQ ID NO: 3049874 - RNA, 17 nt, Human
gagcggagaaaggaagg

SEQ ID NO: 3049875 - RNA, 14 nt, Human
gagauguagccccu

SEQ ID NO: 3049876 - RNA, 18 nt, Human
gagauugcaccacugcac

SEQ ID NO: 3049877 - RNA, 13 nt, Human
gagauuuacaacu

SEQ ID NO: 3049878 - RNA, 22 nt, Human
gagaggcauccaguaucuugaa

SEQ ID NO: 3049879 - RNA, 21 nt, Human
gagaugaugccaugggcccuc

SEQ ID NO: 3049880 - RNA, 14 nt, Human
gagacuccugcagg

SEQ ID NO: 3049881 - RNA, 15 nt, Human
gagacuccugcaggc

SEQ ID NO: 3049882 - RNA, 16 nt, Human
gagacuccugcaggca

SEQ ID NO: 3049883 - RNA, 17 nt, Human
gagacuccugcaggcag

SEQ ID NO: 3049884 - RNA, 14 nt, Human
gagaggcauccagu

SEQ ID NO: 3049885 - RNA, 18 nt, Human
cuuccucccucccucuuu

SEQ ID NO: 3049886 - RNA, 17 nt, Human
cuuccugcaacaccuug

SEQ ID NO: 3049887 - RNA, 23 nt, Human
cuucuaaguaaaaccacagcagu

SEQ ID NO: 3049888 - RNA, 22 nt, Human
cuucuaaguaaaaccacagcag

SEQ ID NO: 3049889 - RNA, 23 nt, Human
cuucuucagagacuccugcaggc

SEQ ID NO: 3049890 - RNA, 21 nt, Human
cuucugacccaugcugcccug

SEQ ID NO: 3049891 - RNA, 22 nt, Human
cuucugacccaugcugcccugu

SEQ ID NO: 3049892 - RNA, 20 nt, Human
cuucugacccaugcugcccu

SEQ ID NO: 3049893 - RNA, 20 nt, Human
cuuggcgcugccccuggcag

SEQ ID NO: 3049894 - RNA, 14 nt, Human
cuuggcgcugcccc

SEQ ID NO: 3049895 - RNA, 17 nt, Human
cuuggcgcugccccugg

SEQ ID NO: 3049896 - RNA, 12 nt, Human
cuuggcgcugcc

SEQ ID NO: 3049897 - RNA, 12 nt, Human
cuugaugccugg

SEQ ID NO: 3049898 - RNA, 13 nt, Human
cuugaugaagaag

SEQ ID NO: 3049899 - RNA, 16 nt, Human
cuugaagacuuuucuu

SEQ ID NO: 3049900 - RNA, 13 nt, Human
cuugacagggcac

SEQ ID NO: 3049901 - RNA, 15 nt, Human
cuugacagggcacac

SEQ ID NO: 3049902 - RNA, 14 nt, Human
cuugacagggcaca

SEQ ID NO: 3049903 - RNA, 19 nt, Human
cuugaauuguaaggaauga

SEQ ID NO: 3049904 - RNA, 18 nt, Human
cuugaauuguaaggaaug

SEQ ID NO: 3049905 - RNA, 12 nt, Human
cuugaugaagaa

SEQ ID NO: 3049906 - RNA, 11 nt, Human
cuucccaccuc

SEQ ID NO: 3049907 - RNA, 21 nt, Human
cuucccaccucucucacuccu

SEQ ID NO: 3049908 - RNA, 23 nt, Human
cuucccaccucucucacuccuug

SEQ ID NO: 3049909 - RNA, 15 nt, Human
cuucacuguaaaaua

SEQ ID NO: 3049910 - RNA, 17 nt, Human
cuucagagacuccugca

SEQ ID NO: 3049911 - RNA, 18 nt, Human
cuucagagacuccugcag

SEQ ID NO: 3049912 - RNA, 19 nt, Human
cuucagagacuccugcagg

SEQ ID NO: 3049913 - RNA, 20 nt, Human
cuucagagacuccugcaggc

SEQ ID NO: 3049914 - RNA, 21 nt, Human
cuucaucugacuaugacauaa

SEQ ID NO: 3049915 - RNA, 19 nt, Human
cuucaucugacuaugacau

SEQ ID NO: 3049916 - RNA, 20 nt, Human
cuucaugcauagguuuagca

SEQ ID NO: 3049917 - RNA, 21 nt, Human
cuuccagugaggcucugcccu

SEQ ID NO: 3049918 - RNA, 22 nt, Human
cuuccagugaggcucugcccuu

SEQ ID NO: 3049919 - RNA, 23 nt, Human
cuuccagugaggcucugcccuug

SEQ ID NO: 3049920 - RNA, 14 nt, Human
cugugcugagucug

SEQ ID NO: 3049921 - RNA, 12 nt, Human
cugugcugaguc

SEQ ID NO: 3049922 - RNA, 13 nt, Human
cuuauggaacacu

SEQ ID NO: 3049923 - RNA, 16 nt, Human
cuuauggaacacucug

SEQ ID NO: 3049924 - RNA, 21 nt, Human
cuucaccuuuguccccaccgc

SEQ ID NO: 3049925 - RNA, 15 nt, Human
cuucacggaagagcc

SEQ ID NO: 3049926 - RNA, 19 nt, Human
cuucacggaagagccuugc

SEQ ID NO: 3049927 - RNA, 22 nt, Human
cuucaccuuuguccccaccgca

SEQ ID NO: 3049928 - RNA, 20 nt, Human
cuuauuguagcauccuggaa

SEQ ID NO: 3049929 - RNA, 17 nt, Human
cuuauggaacacucuga

SEQ ID NO: 3049930 - RNA, 19 nt, Human
cuuauggaacacucugaga

SEQ ID NO: 3049931 - RNA, 20 nt, Human
cuuauggaacacucugagac

SEQ ID NO: 3049932 - RNA, 22 nt, Human
gaaagggacuuggaagcuccgc

SEQ ID NO: 3049933 - RNA, 20 nt, Human
gaaagggacgcuacccggga

SEQ ID NO: 3049934 - RNA, 19 nt, Human
gaaagggacuuggaagcuc

SEQ ID NO: 3049935 - RNA, 17 nt, Human
gaaauauuuauuuuaau

SEQ ID NO: 3049936 - RNA, 19 nt, Human
gaaaucaccgaaaacgugg

SEQ ID NO: 3049937 - RNA, 20 nt, Human
gaaaucaaauaugcaaagca

SEQ ID NO: 3049938 - RNA, 19 nt, Human
gaaaucaaauaugcaaagc

SEQ ID NO: 3049939 - RNA, 17 nt, Human
gaaaucaaauaugcaaa

SEQ ID NO: 3049940 - RNA, 18 nt, Human
gaaaucaaauaugcaaag

SEQ ID NO: 3049941 - RNA, 18 nt, Human
gaaauauuuauuuuaaua

SEQ ID NO: 3049942 - RNA, 22 nt, Human
gaaauauuuauuuuaauaaugu

SEQ ID NO: 3049943 - RNA, 20 nt, Human
gaaaggcuccaggagcagcc

SEQ ID NO: 3049944 - RNA, 22 nt, Human
gaaaggcuccaggagcagccac

SEQ ID NO: 3049945 - RNA, 21 nt, Human
gaaaggcuccaggagcagcca

SEQ ID NO: 3049946 - RNA, 17 nt, Human
gaaagacuauucaaaca

SEQ ID NO: 3049947 - RNA, 20 nt, Human
gaaagacuaucuaaauguug

SEQ ID NO: 3049948 - RNA, 15 nt, Human
gaaagacuauucaaa

SEQ ID NO: 3049949 - RNA, 14 nt, Human
gaaagacuauucaa

SEQ ID NO: 3049950 - RNA, 13 nt, Human
gaaacuuuuggaa

SEQ ID NO: 3049951 - RNA, 15 nt, Human
gaaacuuuuggaagg

SEQ ID NO: 3049952 - RNA, 23 nt, Human
cuuuugcccacacuugggagcaa

SEQ ID NO: 3049953 - RNA, 18 nt, Human
cuuuuggaagguauuuaa

SEQ ID NO: 3049954 - RNA, 15 nt, Human
cuuuuggcauuuuac

SEQ ID NO: 3049955 - RNA, 18 nt, Human
cuuuugucuaugggacuc

SEQ ID NO: 3049956 - RNA, 13 nt, Human
cuuuugugcauua

SEQ ID NO: 3049957 - RNA, 12 nt, Human
cuuuugugcauu

SEQ ID NO: 3049958 - RNA, 23 nt, Human
cuuuuuuggcugcugaaggcucg

SEQ ID NO: 3049959 - RNA, 15 nt, Human
gaaaauguaugugua

SEQ ID NO: 3049960 - RNA, 19 nt, Human
gaaaauggacguguuauga

SEQ ID NO: 3049961 - RNA, 23 nt, Human
gaaaauggacguguuaugacucc

SEQ ID NO: 3049962 - RNA, 14 nt, Human
gaaaaacugauuuu

SEQ ID NO: 3049963 - RNA, 21 nt, Human
gaaaacuuuaugcuaagugaa

SEQ ID NO: 3049964 - RNA, 21 nt, Human
gaaaauggaagacagcucuua

SEQ ID NO: 3049965 - RNA, 18 nt, Human
gaaaagaaaaaugagccu

SEQ ID NO: 3049966 - RNA, 22 nt, Human
cuuuccugaggcugggcucccu

SEQ ID NO: 3049967 - RNA, 23 nt, Human
cuuucaauaggaaaaacugauuu

SEQ ID NO: 3049968 - RNA, 23 nt, Human
cuuucagccaagaauucuuaaau

SEQ ID NO: 3049969 - RNA, 20 nt, Human
cuuucagccaagaauucuua

SEQ ID NO: 3049970 - RNA, 14 nt, Human
cuuuuaugugaaac

SEQ ID NO: 3049971 - RNA, 13 nt, Human
cuuuuauaaacuu

SEQ ID NO: 3049972 - RNA, 16 nt, Human
cuuucuagccagagga

SEQ ID NO: 3049973 - RNA, 15 nt, Human
cuuucuagccagagg

SEQ ID NO: 3049974 - RNA, 17 nt, Human
cuuucuacccagcgagc

SEQ ID NO: 3049975 - RNA, 17 nt, Human
cuuugggccuggcuccc

SEQ ID NO: 3049976 - RNA, 23 nt, Human
cuggugacuuuccucuuuggucu

SEQ ID NO: 3049977 - RNA, 20 nt, Human
cuggugacuuuccucuuugg

SEQ ID NO: 3049978 - RNA, 21 nt, Human
cuggugacuuuccucuuuggu

SEQ ID NO: 3049979 - RNA, 15 nt, Human
cuggugacuuuccuc

SEQ ID NO: 3049980 - RNA, 14 nt, Human
cuggguucacugca

SEQ ID NO: 3049981 - RNA, 23 nt, Human
cuggguggcaccagcagccugga

SEQ ID NO: 3049982 - RNA, 22 nt, Human
cuggguggcaccagcagccugg

SEQ ID NO: 3049983 - RNA, 17 nt, Human
cuggguguggcgcagca

SEQ ID NO: 3049984 - RNA, 16 nt, Human
cuggguguggcgcagc

SEQ ID NO: 3049985 - RNA, 17 nt, Human
cugggcagaaggaagac

SEQ ID NO: 3049986 - RNA, 18 nt, Human
cuggggccaggcuggguc

SEQ ID NO: 3049987 - RNA, 16 nt, Human
cuggggccgaaagaac

SEQ ID NO: 3049988 - RNA, 16 nt, Human
cugggcagaaggaaga

SEQ ID NO: 3049989 - RNA, 18 nt, Human
cugggcagaaggaagacu

SEQ ID NO: 3049990 - RNA, 16 nt, Human
cuggacugugugcuca

SEQ ID NO: 3049991 - RNA, 12 nt, Human
cuggcagcucag

SEQ ID NO: 3049992 - RNA, 13 nt, Human
cuggcagcucaga

SEQ ID NO: 3049993 - RNA, 14 nt, Human
cuggcagcucagag

SEQ ID NO: 3049994 - RNA, 13 nt, Human
cuggccccucagg

SEQ ID NO: 3049995 - RNA, 13 nt, Human
cugggacacaguu

SEQ ID NO: 3049996 - RNA, 12 nt, Human
cugggacacagu

SEQ ID NO: 3049997 - RNA, 10 nt, Human
cugggacagg

SEQ ID NO: 3049998 - RNA, 17 nt, Human
cuggccccucagggucc

SEQ ID NO: 3049999 - RNA, 18 nt, Human
cuggccccucaggguccc

SEQ ID NO: 3050000 - RNA, 20 nt, Human
cuggccccucagggucccug

SEQ ID NO: 3050001 - RNA, 21 nt, Human
cuggccccucagggucccugg

SEQ ID NO: 3050002 - RNA, 17 nt, Human
cuggcucacccaguccu

SEQ ID NO: 3050003 - RNA, 20 nt, Human
cuggcuccaaacccucgagg

SEQ ID NO: 3050004 - RNA, 19 nt, Human
cuggcuccaaacccucgag

SEQ ID NO: 3050005 - RNA, 19 nt, Human
cugugcucuggacaggcau

SEQ ID NO: 3050006 - RNA, 14 nt, Human
cugugcucuggaca

SEQ ID NO: 3050007 - RNA, 16 nt, Human
cugugagaugcuagaa

SEQ ID NO: 3050008 - RNA, 15 nt, Human
cugugaagagaacca

SEQ ID NO: 3050009 - RNA, 13 nt, Human
cugucgcccaguc

SEQ ID NO: 3050010 - RNA, 23 nt, Human
cuguacuugcucuugaugccugg

SEQ ID NO: 3050011 - RNA, 22 nt, Human
cuguacuugcucuugaugccug

SEQ ID NO: 3050012 - RNA, 21 nt, Human
cuguacuugcucuugaugccu

SEQ ID NO: 3050013 - RNA, 21 nt, Human
cuguaggaagguuaauguuca

SEQ ID NO: 3050014 - RNA, 18 nt, Human
cuguaggaagguuaaugu

SEQ ID NO: 3050015 - RNA, 16 nt, Human
cugucauuugagcagg

SEQ ID NO: 3050016 - RNA, 23 nt, Human
cugucagcuccccucggagaaga

SEQ ID NO: 3050017 - RNA, 18 nt, Human
cugucauuugagcagggc

SEQ ID NO: 3050018 - RNA, 17 nt, Human
cugucauuugagcaggg

SEQ ID NO: 3050019 - RNA, 18 nt, Human
cugucagccauuccuguu

SEQ ID NO: 3050020 - RNA, 21 nt, Human
cugucagcuccccucggagaa

SEQ ID NO: 3050021 - RNA, 14 nt, Human
cugcccugugggcc

SEQ ID NO: 3050022 - RNA, 22 nt, Human
cugccugggaucccucauccuc

SEQ ID NO: 3050023 - RNA, 18 nt, Human
cugccucgaacuggcugc

SEQ ID NO: 3050024 - RNA, 17 nt, Human
cugccucgaacuggcug

SEQ ID NO: 3050025 - RNA, 15 nt, Human
cugccucgaacuggc

SEQ ID NO: 3050026 - RNA, 14 nt, Human
cugccuguucagcu

SEQ ID NO: 3050027 - RNA, 23 nt, Human
cugccugggaucccucauccuca

SEQ ID NO: 3050028 - RNA, 15 nt, Human
cugcuacagagcaga

SEQ ID NO: 3050029 - RNA, 16 nt, Human
cugccuguugggccag

SEQ ID NO: 3050030 - RNA, 14 nt, Human
cugccuguugggcc

SEQ ID NO: 3050031 - RNA, 18 nt, Human
cugccuguugggccagga

SEQ ID NO: 3050032 - RNA, 19 nt, Human
cugccuguugggccaggag

SEQ ID NO: 3050033 - RNA, 16 nt, Human
cugcuaauuccccaga

SEQ ID NO: 3050034 - RNA, 20 nt, Human
cugcugacagacacaggccc

SEQ ID NO: 3050035 - RNA, 19 nt, Human
cugcugacagacacaggcc

SEQ ID NO: 3050036 - RNA, 18 nt, Human
cugcugacagacacaggc

SEQ ID NO: 3050037 - RNA, 15 nt, Human
cugcugacagacaca

SEQ ID NO: 3050038 - RNA, 23 nt, Human
cugcugacagacacaggcccggc

SEQ ID NO: 3050039 - RNA, 21 nt, Human
cugcugacagacacaggcccg

SEQ ID NO: 3050040 - RNA, 17 nt, Human
cugcuuuuuauggccug

SEQ ID NO: 3050041 - RNA, 22 nt, Human
cugcuuuuuaaagaaugcucuu

SEQ ID NO: 3050042 - RNA, 16 nt, Human
cugcuucagccucccg

SEQ ID NO: 3050043 - RNA, 14 nt, Human
cugcuucagccucc

SEQ ID NO: 3050044 - RNA, 17 nt, Human
cugcuuaacuucacaua

SEQ ID NO: 3050045 - RNA, 15 nt, Human
cugcuuaacuucaca

SEQ ID NO: 3050046 - RNA, 13 nt, Human
cugcuucagccuc

SEQ ID NO: 3050047 - RNA, 13 nt, Human
cugcuuaacuuca

SEQ ID NO: 3050048 - RNA, 13 nt, Human
cuggacugugugc

SEQ ID NO: 3050049 - RNA, 18 nt, Human
cugcuuuuuauggccugu

SEQ ID NO: 3050050 - RNA, 16 nt, Human
cuggaaauauuaagaa

SEQ ID NO: 3050051 - RNA, 21 nt, Human
cuggaaaucaggguuaguauu

SEQ ID NO: 3050052 - RNA, 17 nt, Human
cuggaacacuaaugagg

SEQ ID NO: 3050053 - RNA, 17 nt, Human
cugagacucgcgacaau

SEQ ID NO: 3050054 - RNA, 19 nt, Human
cugagacucgcgacaaugc

SEQ ID NO: 3050055 - RNA, 23 nt, Human
cugccauauucuguuggccagug

SEQ ID NO: 3050056 - RNA, 22 nt, Human
cugccauauucuguuggccagu

SEQ ID NO: 3050057 - RNA, 21 nt, Human
cugccauauucuguuggccag

SEQ ID NO: 3050058 - RNA, 20 nt, Human
cugccauauucuguuggcca

SEQ ID NO: 3050059 - RNA, 12 nt, Human
cugccagggaca

SEQ ID NO: 3050060 - RNA, 15 nt, Human
cugccagggacagag

SEQ ID NO: 3050061 - RNA, 11 nt, Human
cugccagggac

SEQ ID NO: 3050062 - RNA, 14 nt, Human
cugccccucaacuc

SEQ ID NO: 3050063 - RNA, 22 nt, Human
cugccccucaacucuccuccag

SEQ ID NO: 3050064 - RNA, 15 nt, Human
cugcccugugggccc

SEQ ID NO: 3050065 - RNA, 16 nt, Human
cugcccugugggcccc

SEQ ID NO: 3050066 - RNA, 18 nt, Human
cugcccugugggccccca

SEQ ID NO: 3050067 - RNA, 12 nt, Human
cugcccugugag

SEQ ID NO: 3050068 - RNA, 18 nt, Human
cugcauuuaaaagauaca

SEQ ID NO: 3050069 - RNA, 22 nt, Human
cugcauuuaaaagauacaguua

SEQ ID NO: 3050070 - RNA, 20 nt, Human
cugcauuuaaaagauacagu

SEQ ID NO: 3050071 - RNA, 13 nt, Human
cugcauguuacau

SEQ ID NO: 3050072 - RNA, 15 nt, Human
cugcauguuugugau

SEQ ID NO: 3050073 - RNA, 15 nt, Human
cugccaaugggagcu

SEQ ID NO: 3050074 - RNA, 17 nt, Human
cugccaaugggagcuca

SEQ ID NO: 3050075 - RNA, 21 nt, Human
auugcaacaggcugggcuuca

SEQ ID NO: 3050076 - RNA, 15 nt, Human
auugcaacaggcugg

SEQ ID NO: 3050077 - RNA, 13 nt, Human
auugaccugaggc

SEQ ID NO: 3050078 - RNA, 21 nt, Human
auugacccacaagaaaugaaa

SEQ ID NO: 3050079 - RNA, 19 nt, Human
auugcggacagccacggcc

SEQ ID NO: 3050080 - RNA, 18 nt, Human
auugcggacagccacggc

SEQ ID NO: 3050081 - RNA, 16 nt, Human
auugcggacagccacg

SEQ ID NO: 3050082 - RNA, 21 nt, Human
auugcccacgcuggagugcag

SEQ ID NO: 3050083 - RNA, 17 nt, Human
auugcccacgcuggagu

SEQ ID NO: 3050084 - RNA, 23 nt, Human
auugccauuucuuccacaagagc

SEQ ID NO: 3050085 - RNA, 16 nt, Human
auucuacuuugagugc

SEQ ID NO: 3050086 - RNA, 13 nt, Human
auucuacuuugag

SEQ ID NO: 3050087 - RNA, 14 nt, Human
auucucagaaucuc

SEQ ID NO: 3050088 - RNA, 19 nt, Human
auucucacagcuccaagaa

SEQ ID NO: 3050089 - RNA, 21 nt, Human
auucucacagcuccaagaauu

SEQ ID NO: 3050090 - RNA, 22 nt, Human
auucucacagcuccaagaauuu

SEQ ID NO: 3050091 - RNA, 16 nt, Human
auucuccaccugccag

SEQ ID NO: 3050092 - RNA, 17 nt, Human
auucuccaccugccagg

SEQ ID NO: 3050093 - RNA, 20 nt, Human
auugacacuuaaaaaugguu

SEQ ID NO: 3050094 - RNA, 20 nt, Human
auucucagaaucucaaauaa

SEQ ID NO: 3050095 - RNA, 18 nt, Human
auucucagaaucucaaau

SEQ ID NO: 3050096 - RNA, 13 nt, Human
auucuccaccugc

SEQ ID NO: 3050097 - RNA, 19 nt, Human
auuuaaagcuuauuaaaac

SEQ ID NO: 3050098 - RNA, 16 nt, Human
auuuaacagaaaugua

SEQ ID NO: 3050099 - RNA, 15 nt, Human
auuuaacagaaaugu

SEQ ID NO: 3050100 - RNA, 20 nt, Human
auuuaacagaaauguacagc

SEQ ID NO: 3050101 - RNA, 19 nt, Human
auuuaacagaaauguacag

SEQ ID NO: 3050102 - RNA, 17 nt, Human
auuuaacagaaauguac

SEQ ID NO: 3050103 - RNA, 16 nt, Human
auuuacaaaugggaaa

SEQ ID NO: 3050104 - RNA, 23 nt, Human
auuuaauuuuuuugagacagagu

SEQ ID NO: 3050105 - RNA, 19 nt, Human
auuuaauuuuuuugagaca

SEQ ID NO: 3050106 - RNA, 18 nt, Human
auuuaaccucuaaauucu

SEQ ID NO: 3050107 - RNA, 16 nt, Human
auuuaaccucuaaauu

SEQ ID NO: 3050108 - RNA, 14 nt, Human
auuguauuacaaau

SEQ ID NO: 3050109 - RNA, 15 nt, Human
auugugaaauuauuc

SEQ ID NO: 3050110 - RNA, 13 nt, Human
auugugccccugc

SEQ ID NO: 3050111 - RNA, 21 nt, Human
auugcuaaucaccaaaggcuc

SEQ ID NO: 3050112 - RNA, 23 nt, Human
auuggcuuuggguugcaggaccu

SEQ ID NO: 3050113 - RNA, 17 nt, Human
auuuuaccuuugacaaa

SEQ ID NO: 3050114 - RNA, 20 nt, Human
auuuuacuguacagacagaa

SEQ ID NO: 3050115 - RNA, 22 nt, Human
auuuuacuguacagacagaaaa

SEQ ID NO: 3050116 - RNA, 15 nt, Human
auuuuaauaauguuu

SEQ ID NO: 3050117 - RNA, 12 nt, Human
auuuuaauaaug

SEQ ID NO: 3050118 - RNA, 14 nt, Human
auuuuaauaauguu

SEQ ID NO: 3050119 - RNA, 15 nt, Human
auuuguaucacaaau

SEQ ID NO: 3050120 - RNA, 21 nt, Human
auuuguauaaaauaauuuuua

SEQ ID NO: 3050121 - RNA, 18 nt, Human
auuuuauguugcauagaa

SEQ ID NO: 3050122 - RNA, 21 nt, Human
auuuuauguugcauagaauaa

SEQ ID NO: 3050123 - RNA, 14 nt, Human
auuuuauguugcau

SEQ ID NO: 3050124 - RNA, 13 nt, Human
auuuuauuaugca

SEQ ID NO: 3050125 - RNA, 15 nt, Human
auuuuauuaugcaug

SEQ ID NO: 3050126 - RNA, 14 nt, Human
auuuuauuaugcau

SEQ ID NO: 3050127 - RNA, 17 nt, Human
auuuuauuaugcaugaa

SEQ ID NO: 3050128 - RNA, 20 nt, Human
auuuggagacacaacuauuu

SEQ ID NO: 3050129 - RNA, 17 nt, Human
auuuggugguuucagaa

SEQ ID NO: 3050130 - RNA, 23 nt, Human
auuugguaaggggaauugaggac

SEQ ID NO: 3050131 - RNA, 20 nt, Human
auuuggugguuucagaaaug

SEQ ID NO: 3050132 - RNA, 18 nt, Human
auuuggugguuucagaaa

SEQ ID NO: 3050133 - RNA, 21 nt, Human
auuugguuuucacauuggaaa

SEQ ID NO: 3050134 - RNA, 22 nt, Human
auuugguuuucacauuggaaac

SEQ ID NO: 3050135 - RNA, 15 nt, Human
auuugguuuucacau

SEQ ID NO: 3050136 - RNA, 17 nt, Human
auuugguuuucacauug

SEQ ID NO: 3050137 - RNA, 18 nt, Human
auuuguaguguuggagaa

SEQ ID NO: 3050138 - RNA, 16 nt, Human
auuugagcagggcuca

SEQ ID NO: 3050139 - RNA, 20 nt, Human
auuucuuuugccguuauuaa

SEQ ID NO: 3050140 - RNA, 22 nt, Human
auuugaggucuguucuuuccaa

SEQ ID NO: 3050141 - RNA, 17 nt, Human
auuugagcagggcucag

SEQ ID NO: 3050142 - RNA, 23 nt, Human
auuugaggucuguucuuuccaaa

SEQ ID NO: 3050143 - RNA, 16 nt, Human
auuuauuauggcacau

SEQ ID NO: 3050144 - RNA, 23 nt, Human
auuuccugggagcuuuuguagaa

SEQ ID NO: 3050145 - RNA, 22 nt, Human
auuuccugggagcuuuuguaga

SEQ ID NO: 3050146 - RNA, 14 nt, Human
auuuccugugucuu

SEQ ID NO: 3050147 - RNA, 13 nt, Human
auuucuaaaucuc

SEQ ID NO: 3050148 - RNA, 12 nt, Human
auuucuaaaucu

SEQ ID NO: 3050149 - RNA, 21 nt, Human
auuucuaaaucuccaaaauaa

SEQ ID NO: 3050150 - RNA, 20 nt, Human
auuuauuaaaugcccagccc

SEQ ID NO: 3050151 - RNA, 22 nt, Human
auuuauuacuguaagaaaauau

SEQ ID NO: 3050152 - RNA, 13 nt, Human
auuuauuauggca

SEQ ID NO: 3050153 - RNA, 23 nt, Human
auuucuuuugccguuauuaaaaa

SEQ ID NO: 3050154 - RNA, 11 nt, Human
uuugcucaugg

SEQ ID NO: 3050155 - RNA, 12 nt, Human
uuugcucaugga

SEQ ID NO: 3050156 - RNA, 19 nt, Human
uuugcuaagcauuccaacu

SEQ ID NO: 3050157 - RNA, 22 nt, Human
uuugcacacuuuggcccagggu

SEQ ID NO: 3050158 - RNA, 22 nt, Human
uuugccauguuggccaggcugg

SEQ ID NO: 3050159 - RNA, 14 nt, Human
uuuggggauauuuu

SEQ ID NO: 3050160 - RNA, 22 nt, Human
uuugggaggccaaggugggagg

SEQ ID NO: 3050161 - RNA, 13 nt, Human
uuuggggaagaac

SEQ ID NO: 3050162 - RNA, 12 nt, Human
uuuggcccaggg

SEQ ID NO: 3050163 - RNA, 21 nt, Human
augucagugugacugaucucu

SEQ ID NO: 3050164 - RNA, 15 nt, Human
augucagugugacug

SEQ ID NO: 3050165 - RNA, 16 nt, Human
augucagugugacuga

SEQ ID NO: 3050166 - RNA, 19 nt, Human
auguccaagaagcccagga

SEQ ID NO: 3050167 - RNA, 18 nt, Human
auguccaagaagcccagg

SEQ ID NO: 3050168 - RNA, 23 nt, Human
auguccaagaagcccaggaaagg

SEQ ID NO: 3050169 - RNA, 23 nt, Human
augucucuuuaaugucacaggca

SEQ ID NO: 3050170 - RNA, 22 nt, Human
augucuauaaaccgaacugaug

SEQ ID NO: 3050171 - RNA, 12 nt, Human
auguauguguaa

SEQ ID NO: 3050172 - RNA, 15 nt, Human
auguaucugagcagg

SEQ ID NO: 3050173 - RNA, 22 nt, Human
uuugggggaaaauuuagaaaua

SEQ ID NO: 3050174 - RNA, 15 nt, Human
auguaucaaugagua

SEQ ID NO: 3050175 - RNA, 11 nt, Human
uuuuaagaaau

SEQ ID NO: 3050176 - RNA, 15 nt, Human
uuuuaagaggcaggg

SEQ ID NO: 3050177 - RNA, 16 nt, Human
uuuuaagaggcagggu

SEQ ID NO: 3050178 - RNA, 16 nt, Human
uuuuaaguaaggaauu

SEQ ID NO: 3050179 - RNA, 15 nt, Human
uuuuaagugcugcau

SEQ ID NO: 3050180 - RNA, 18 nt, Human
uuuguuugaacugauaaa

SEQ ID NO: 3050181 - RNA, 13 nt, Human
uuuuaaaaaagaa

SEQ ID NO: 3050182 - RNA, 21 nt, Human
uuuuaaaaaacugcugacugu

SEQ ID NO: 3050183 - RNA, 14 nt, Human
uuuuaaaagaauga

SEQ ID NO: 3050184 - RNA, 13 nt, Human
uuuguagagccag

SEQ ID NO: 3050185 - RNA, 22 nt, Human
uuuguaaauuaacuuuuauaaa

SEQ ID NO: 3050186 - RNA, 19 nt, Human
uuuguagcacugacagauu

SEQ ID NO: 3050187 - RNA, 17 nt, Human
uuuguagcacugacaga

SEQ ID NO: 3050188 - RNA, 17 nt, Human
uuuguagaagucacauu

SEQ ID NO: 3050189 - RNA, 14 nt, Human
uuuguuugaacuga

SEQ ID NO: 3050190 - RNA, 13 nt, Human
uuuguuugaacug

SEQ ID NO: 3050191 - RNA, 12 nt, Human
uuuguuugaacu

SEQ ID NO: 3050192 - RNA, 18 nt, Human
uuugugaggaagccgcug

SEQ ID NO: 3050193 - RNA, 19 nt, Human
uuugugaggaagccgcugg

SEQ ID NO: 3050194 - RNA, 21 nt, Human
uuuuauucagcucauggacuu

SEQ ID NO: 3050195 - RNA, 16 nt, Human
uuuucuauaauuuaaa

SEQ ID NO: 3050196 - RNA, 19 nt, Human
uuuuccagguuuaagcugu

SEQ ID NO: 3050197 - RNA, 22 nt, Human
uuuuauguugcauagaauaaaa

SEQ ID NO: 3050198 - RNA, 19 nt, Human
uuuuaugugaaacauguuu

SEQ ID NO: 3050199 - RNA, 18 nt, Human
uuuuaugugaaacauguu

SEQ ID NO: 3050200 - RNA, 19 nt, Human
uuuuauggcacuaguauuu

SEQ ID NO: 3050201 - RNA, 23 nt, Human
uuuuauggaggcuuugcauagau

SEQ ID NO: 3050202 - RNA, 17 nt, Human
uuuuauaaacuuuaccu

SEQ ID NO: 3050203 - RNA, 14 nt, Human
uuuuauaaacuuua

SEQ ID NO: 3050204 - RNA, 19 nt, Human
uuuuauaaacuuuaccuuu

SEQ ID NO: 3050205 - RNA, 14 nt, Human
uuuuauaauuuugu

SEQ ID NO: 3050206 - RNA, 19 nt, Human
uuuuaguugcaacuuugua

SEQ ID NO: 3050207 - RNA, 13 nt, Human
uuuuauaaacuuu

SEQ ID NO: 3050208 - RNA, 12 nt, Human
uuuuauaaacuu

SEQ ID NO: 3050209 - RNA, 23 nt, Human
uuuuagaguugauacuacaguuu

SEQ ID NO: 3050210 - RNA, 14 nt, Human
auguuggccaggcu

SEQ ID NO: 3050211 - RNA, 13 nt, Human
auguuggccaggc

SEQ ID NO: 3050212 - RNA, 21 nt, Human
auguucaucauccuaagcuau

SEQ ID NO: 3050213 - RNA, 19 nt, Human
auguucaucaaugaaugaa

SEQ ID NO: 3050214 - RNA, 15 nt, Human
auguugacaugggac

SEQ ID NO: 3050215 - RNA, 17 nt, Human
uuuuaagugcugcauuu

SEQ ID NO: 3050216 - RNA, 16 nt, Human
uuuuaagugcugcauu

SEQ ID NO: 3050217 - RNA, 21 nt, Human
uuuuaagugcugcauuuaaaa

SEQ ID NO: 3050218 - RNA, 15 nt, Human
auguugugauguauu

SEQ ID NO: 3050219 - RNA, 14 nt, Human
auguuuuccaugag

SEQ ID NO: 3050220 - RNA, 18 nt, Human
auguuucaaacauauaua

SEQ ID NO: 3050221 - RNA, 20 nt, Human
auuaaaaaaucaguuguaca

SEQ ID NO: 3050222 - RNA, 18 nt, Human
auguuuuucuucucccuc

SEQ ID NO: 3050223 - RNA, 17 nt, Human
auguuuuucuucucccu

SEQ ID NO: 3050224 - RNA, 16 nt, Human
auuaaaagaauauuuu

SEQ ID NO: 3050225 - RNA, 15 nt, Human
auuaaaagaauauuu

SEQ ID NO: 3050226 - RNA, 20 nt, Human
auuaacuuuuauaaacuuua

SEQ ID NO: 3050227 - RNA, 19 nt, Human
auuaacuuuuauaaacuuu

SEQ ID NO: 3050228 - RNA, 17 nt, Human
auuaacuuuuauaaacu

SEQ ID NO: 3050229 - RNA, 16 nt, Human
auuaacuuuuauaaac

SEQ ID NO: 3050230 - RNA, 12 nt, Human
auuaacuuuuau

SEQ ID NO: 3050231 - RNA, 23 nt, Human
auuaacuuuuauaaacuuuaccu

SEQ ID NO: 3050232 - RNA, 14 nt, Human
auuaagaaagacua

SEQ ID NO: 3050233 - RNA, 13 nt, Human
auuaagaaagacu

SEQ ID NO: 3050234 - RNA, 17 nt, Human
auuaaccacuucagcug

SEQ ID NO: 3050235 - RNA, 18 nt, Human
auuaaccacuucagcuga

SEQ ID NO: 3050236 - RNA, 20 nt, Human
auuaaccacuucagcugacu

SEQ ID NO: 3050237 - RNA, 21 nt, Human
auuaaacuuaaucuaaaugga

SEQ ID NO: 3050238 - RNA, 19 nt, Human
auuaaacuuaaucuaaaug

SEQ ID NO: 3050239 - RNA, 16 nt, Human
auuaaacuuaaucuaa

SEQ ID NO: 3050240 - RNA, 17 nt, Human
auuaaacuuaaucuaaa

SEQ ID NO: 3050241 - RNA, 21 nt, Human
auuaacaugaauauuuagugu

SEQ ID NO: 3050242 - RNA, 14 nt, Human
auucagcucaugga

SEQ ID NO: 3050243 - RNA, 15 nt, Human
auucaaacagucuca

SEQ ID NO: 3050244 - RNA, 14 nt, Human
auucaaacagucuc

SEQ ID NO: 3050245 - RNA, 14 nt, Human
auucagcucugcaa

SEQ ID NO: 3050246 - RNA, 18 nt, Human
auucagcucugcaagaau

SEQ ID NO: 3050247 - RNA, 21 nt, Human
auucaggaagcucagggccug

SEQ ID NO: 3050248 - RNA, 22 nt, Human
auucaggaagcucagggccugg

SEQ ID NO: 3050249 - RNA, 23 nt, Human
auucaggaagcucagggccuggc

SEQ ID NO: 3050250 - RNA, 16 nt, Human
auucaguuguuagugu

SEQ ID NO: 3050251 - RNA, 21 nt, Human
auucaguuguuagugugucuu

SEQ ID NO: 3050252 - RNA, 20 nt, Human
auucaggaagcucagggccu

SEQ ID NO: 3050253 - RNA, 16 nt, Human
auuccccaggaggcca

SEQ ID NO: 3050254 - RNA, 22 nt, Human
auuccccacccugaaagcccug

SEQ ID NO: 3050255 - RNA, 20 nt, Human
auuccccagauugcaacagg

SEQ ID NO: 3050256 - RNA, 20 nt, Human
auuccacuuauaggaauuga

SEQ ID NO: 3050257 - RNA, 15 nt, Human
auuaauauauuucca

SEQ ID NO: 3050258 - RNA, 13 nt, Human
auuaaguaaugau

SEQ ID NO: 3050259 - RNA, 15 nt, Human
auuaaguaaugauaa

SEQ ID NO: 3050260 - RNA, 22 nt, Human
uuuuuguuccacaaguuaaaua

SEQ ID NO: 3050261 - RNA, 20 nt, Human
auuaagagagucuauuuacg

SEQ ID NO: 3050262 - RNA, 23 nt, Human
uuuuuuaaaaaagaaacauuugg

SEQ ID NO: 3050263 - RNA, 19 nt, Human
auuaccacagacauacuaa

SEQ ID NO: 3050264 - RNA, 15 nt, Human
auuacauuuguauaa

SEQ ID NO: 3050265 - RNA, 20 nt, Human
auuacauuuguauaaaauaa

SEQ ID NO: 3050266 - RNA, 13 nt, Human
auuacauuuguau

SEQ ID NO: 3050267 - RNA, 22 nt, Human
auuaccugaauuuuggcugugu

SEQ ID NO: 3050268 - RNA, 15 nt, Human
auuauauuuacaaau

SEQ ID NO: 3050269 - RNA, 23 nt, Human
auuaucucaaaacugcacuguca

SEQ ID NO: 3050270 - RNA, 18 nt, Human
auuaucucaaaacugcac

SEQ ID NO: 3050271 - RNA, 18 nt, Human
auuauuuuauguugcaua

SEQ ID NO: 3050272 - RNA, 16 nt, Human
auuauuuuauguugca

SEQ ID NO: 3050273 - RNA, 23 nt, Human
auuauuuauuaaaugcccagccc

SEQ ID NO: 3050274 - RNA, 16 nt, Human
auuauauuuacaaaug

SEQ ID NO: 3050275 - RNA, 13 nt, Human
auuagagaagaga

SEQ ID NO: 3050276 - RNA, 13 nt, Human
aucuuuuuauuca

SEQ ID NO: 3050277 - RNA, 13 nt, Human
aucuuuuucuaac

SEQ ID NO: 3050278 - RNA, 23 nt, Human
aucuuuggacagaagcagcucuu

SEQ ID NO: 3050279 - RNA, 12 nt, Human
augaaagauuca

SEQ ID NO: 3050280 - RNA, 15 nt, Human
augaaagcagggacu

SEQ ID NO: 3050281 - RNA, 21 nt, Human
aucuuuaauuuuacauuuccu

SEQ ID NO: 3050282 - RNA, 16 nt, Human
aucuuuaauuuuacau

SEQ ID NO: 3050283 - RNA, 22 nt, Human
aucuuuaauuuuacauuuccua

SEQ ID NO: 3050284 - RNA, 18 nt, Human
aucuuugcagacaggcaa

SEQ ID NO: 3050285 - RNA, 22 nt, Human
aucuuuggacagaagcagcucu

SEQ ID NO: 3050286 - RNA, 22 nt, Human
uuggcgcugccccuggcagccc

SEQ ID NO: 3050287 - RNA, 23 nt, Human
uuggcgcugccccuggcagcccc

SEQ ID NO: 3050288 - RNA, 18 nt, Human
uuggcuagagguucaaag

SEQ ID NO: 3050289 - RNA, 14 nt, Human
uuggggauauuuuu

SEQ ID NO: 3050290 - RNA, 22 nt, Human
uuggggggcugaggugggagga

SEQ ID NO: 3050291 - RNA, 18 nt, Human
uuggggcucccagccagg

SEQ ID NO: 3050292 - RNA, 22 nt, Human
uuggggcucccagccaggcccu

SEQ ID NO: 3050293 - RNA, 13 nt, Human
uuggggcucccag

SEQ ID NO: 3050294 - RNA, 14 nt, Human
uuggggcucccagc

SEQ ID NO: 3050295 - RNA, 15 nt, Human
uuggggcucccagcc

SEQ ID NO: 3050296 - RNA, 20 nt, Human
augaaugucagugugacuga

SEQ ID NO: 3050297 - RNA, 18 nt, Human
augaagauguagaggaga

SEQ ID NO: 3050298 - RNA, 13 nt, Human
augaaugaauggc

SEQ ID NO: 3050299 - RNA, 16 nt, Human
augaagauacugaaau

SEQ ID NO: 3050300 - RNA, 17 nt, Human
augaagauacugaaaua

SEQ ID NO: 3050301 - RNA, 15 nt, Human
augaagauacugaaa

SEQ ID NO: 3050302 - RNA, 18 nt, Human
augaaauauuauguuaaa

SEQ ID NO: 3050303 - RNA, 13 nt, Human
augaaauauuaug

SEQ ID NO: 3050304 - RNA, 17 nt, Human
augaaauauuauguuaa

SEQ ID NO: 3050305 - RNA, 23 nt, Human
augagaaaucuaaaaaacgaaaa

SEQ ID NO: 3050306 - RNA, 18 nt, Human
augagaaaucuaaaaaac

SEQ ID NO: 3050307 - RNA, 15 nt, Human
augagaaaucuaaaa

SEQ ID NO: 3050308 - RNA, 22 nt, Human
augagaaagguugaagcaccaa

SEQ ID NO: 3050309 - RNA, 21 nt, Human
augagaaagguugaagcacca

SEQ ID NO: 3050310 - RNA, 13 nt, Human
augagagacacac

SEQ ID NO: 3050311 - RNA, 14 nt, Human
augagagacacacu

SEQ ID NO: 3050312 - RNA, 17 nt, Human
augagagacacacugaa

SEQ ID NO: 3050313 - RNA, 19 nt, Human
augagagacacacugaaga

SEQ ID NO: 3050314 - RNA, 14 nt, Human
augacuuacuguac

SEQ ID NO: 3050315 - RNA, 22 nt, Human
augacuuaagcacacuugacau

SEQ ID NO: 3050316 - RNA, 18 nt, Human
augacacgaauauugcug

SEQ ID NO: 3050317 - RNA, 17 nt, Human
augacuuacuguacaug

SEQ ID NO: 3050318 - RNA, 16 nt, Human
augacuuacuguacau

SEQ ID NO: 3050319 - RNA, 22 nt, Human
augacacaugcaaggucauuuu

SEQ ID NO: 3050320 - RNA, 14 nt, Human
augacacaugcaag

SEQ ID NO: 3050321 - RNA, 16 nt, Human
uuguaucacaaaucuu

SEQ ID NO: 3050322 - RNA, 17 nt, Human
uuguauaaaauaauuuu

SEQ ID NO: 3050323 - RNA, 16 nt, Human
uuguauaaaauaauuu

SEQ ID NO: 3050324 - RNA, 15 nt, Human
uuguauaaaauaauu

SEQ ID NO: 3050325 - RNA, 14 nt, Human
uugcaucugaaaau

SEQ ID NO: 3050326 - RNA, 15 nt, Human
uugauucagacagcu

SEQ ID NO: 3050327 - RNA, 16 nt, Human
uugauucagacagcug

SEQ ID NO: 3050328 - RNA, 21 nt, Human
uugcacacuuuggcccagggu

SEQ ID NO: 3050329 - RNA, 15 nt, Human
uugaugggauuuggu

SEQ ID NO: 3050330 - RNA, 18 nt, Human
uugauggugguauguuuu

SEQ ID NO: 3050331 - RNA, 12 nt, Human
uugaugccuggc

SEQ ID NO: 3050332 - RNA, 11 nt, Human
uugauguguuu

SEQ ID NO: 3050333 - RNA, 14 nt, Human
uugauucagacagc

SEQ ID NO: 3050334 - RNA, 19 nt, Human
uugauggugguauguuuuc

SEQ ID NO: 3050335 - RNA, 17 nt, Human
aucucauaauuuauaca

SEQ ID NO: 3050336 - RNA, 18 nt, Human
aucucauaauuuauacag

SEQ ID NO: 3050337 - RNA, 21 nt, Human
aucucauuuccaagcaaguau

SEQ ID NO: 3050338 - RNA, 14 nt, Human
aucucauuuccaag

SEQ ID NO: 3050339 - RNA, 23 nt, Human
aucucauuuccaagcaaguauua

SEQ ID NO: 3050340 - RNA, 16 nt, Human
aucuccccaucauugg

SEQ ID NO: 3050341 - RNA, 12 nt, Human
aucucccccagc

SEQ ID NO: 3050342 - RNA, 13 nt, Human
aucucccccagcc

SEQ ID NO: 3050343 - RNA, 15 nt, Human
aucucacacaugagc

SEQ ID NO: 3050344 - RNA, 13 nt, Human
aucucaauauuuc

SEQ ID NO: 3050345 - RNA, 16 nt, Human
aucucacacaugagca

SEQ ID NO: 3050346 - RNA, 15 nt, Human
auccuaguuccacca

SEQ ID NO: 3050347 - RNA, 19 nt, Human
auccuaguuccaccaucaa

SEQ ID NO: 3050348 - RNA, 13 nt, Human
uugccgucuaccu

SEQ ID NO: 3050349 - RNA, 13 nt, Human
uugcccuguuaaa

SEQ ID NO: 3050350 - RNA, 14 nt, Human
uugccguuauuaaa

SEQ ID NO: 3050351 - RNA, 19 nt, Human
uugccgucuaccugagggg

SEQ ID NO: 3050352 - RNA, 15 nt, Human
uugccgucuaccuga

SEQ ID NO: 3050353 - RNA, 18 nt, Human
uugccgucuaccugaggg

SEQ ID NO: 3050354 - RNA, 23 nt, Human
aucugugaaaggaaagagggagg

SEQ ID NO: 3050355 - RNA, 17 nt, Human
aucuggguucacugcaa

SEQ ID NO: 3050356 - RNA, 19 nt, Human
aucuggguucacugcaacc

SEQ ID NO: 3050357 - RNA, 19 nt, Human
aucuugcucugcugacaga

SEQ ID NO: 3050358 - RNA, 17 nt, Human
aucuugcucugcugaca

SEQ ID NO: 3050359 - RNA, 17 nt, Human
aucuugaauuguaagga

SEQ ID NO: 3050360 - RNA, 18 nt, Human
aucuugaauuguaaggaa

SEQ ID NO: 3050361 - RNA, 16 nt, Human
uuuaguaucuuuuuau

SEQ ID NO: 3050362 - RNA, 15 nt, Human
uuuaguagagacagg

SEQ ID NO: 3050363 - RNA, 22 nt, Human
uuuagcuggaaaaguauguuag

SEQ ID NO: 3050364 - RNA, 15 nt, Human
augcccccuguggau

SEQ ID NO: 3050365 - RNA, 19 nt, Human
augcccccuguggaugcug

SEQ ID NO: 3050366 - RNA, 20 nt, Human
uuuagcuggaaaaguauguu

SEQ ID NO: 3050367 - RNA, 20 nt, Human
uuuauggcuuuugugcauua

SEQ ID NO: 3050368 - RNA, 13 nt, Human
uuuauauaagcuu

SEQ ID NO: 3050369 - RNA, 24 nt, Human
uuuauggcuuuugugcauuaucua

SEQ ID NO: 3050370 - RNA, 23 nt, Human
augcugucccuuacgugaguccu

SEQ ID NO: 3050371 - RNA, 22 nt, Human
augcugucuacacuaagagaga

SEQ ID NO: 3050372 - RNA, 19 nt, Human
augcugucccuuacgugag

SEQ ID NO: 3050373 - RNA, 11 nt, Human
auggaacacuc

SEQ ID NO: 3050374 - RNA, 14 nt, Human
auggaacacucuga

SEQ ID NO: 3050375 - RNA, 15 nt, Human
auggaacacucugag

SEQ ID NO: 3050376 - RNA, 16 nt, Human
auggaacacucugaga

SEQ ID NO: 3050377 - RNA, 15 nt, Human
auggaagacagcucu

SEQ ID NO: 3050378 - RNA, 19 nt, Human
augcuccuggcccacugca

SEQ ID NO: 3050379 - RNA, 16 nt, Human
augcuagaacucccuu

SEQ ID NO: 3050380 - RNA, 15 nt, Human
augcuagaacucccu

SEQ ID NO: 3050381 - RNA, 22 nt, Human
augcuguaacuuucugaaauaa

SEQ ID NO: 3050382 - RNA, 16 nt, Human
auggaaugcuguguua

SEQ ID NO: 3050383 - RNA, 17 nt, Human
auggaauacucuuauau

SEQ ID NO: 3050384 - RNA, 16 nt, Human
auggaagacagcucuu

SEQ ID NO: 3050385 - RNA, 16 nt, Human
auggaauacucuuaua

SEQ ID NO: 3050386 - RNA, 13 nt, Human
uuucagaaaugug

SEQ ID NO: 3050387 - RNA, 15 nt, Human
uuucauaugcuguau

SEQ ID NO: 3050388 - RNA, 14 nt, Human
auggacaugaucuu

SEQ ID NO: 3050389 - RNA, 20 nt, Human
auggccuuugcuugaaagaa

SEQ ID NO: 3050390 - RNA, 20 nt, Human
auggcuaguaucaaaagaaa

SEQ ID NO: 3050391 - RNA, 18 nt, Human
auggcuaauguacugcau

SEQ ID NO: 3050392 - RNA, 21 nt, Human
auggccgggcgcgguggcuca

SEQ ID NO: 3050393 - RNA, 18 nt, Human
auggauuuccagccaaag

SEQ ID NO: 3050394 - RNA, 23 nt, Human
auggacguguuaugacuccagaa

SEQ ID NO: 3050395 - RNA, 19 nt, Human
auggacguguuaugacucc

SEQ ID NO: 3050396 - RNA, 20 nt, Human
auggacguguuaugacucca

SEQ ID NO: 3050397 - RNA, 23 nt, Human
auggcacaucagcacgauuucug

SEQ ID NO: 3050398 - RNA, 17 nt, Human
auggcacaucagcacga

SEQ ID NO: 3050399 - RNA, 12 nt, Human
uuuaauuuuaca

SEQ ID NO: 3050400 - RNA, 12 nt, Human
uuuaauucaguu

SEQ ID NO: 3050401 - RNA, 16 nt, Human
uuuaagugcugcauuu

SEQ ID NO: 3050402 - RNA, 15 nt, Human
uuuaagugcugcauu

SEQ ID NO: 3050403 - RNA, 17 nt, Human
uuuaagugcugcauuua

SEQ ID NO: 3050404 - RNA, 14 nt, Human
uuuaaauguuuuuu

SEQ ID NO: 3050405 - RNA, 14 nt, Human
uuguuuucauuauc

SEQ ID NO: 3050406 - RNA, 16 nt, Human
uuguuuucaguguaca

SEQ ID NO: 3050407 - RNA, 13 nt, Human
uuguuuucagugu

SEQ ID NO: 3050408 - RNA, 15 nt, Human
augcacuuuguucug

SEQ ID NO: 3050409 - RNA, 14 nt, Human
uuuaagaggcaggg

SEQ ID NO: 3050410 - RNA, 13 nt, Human
augcagccucaca

SEQ ID NO: 3050411 - RNA, 14 nt, Human
augcagccucacag

SEQ ID NO: 3050412 - RNA, 15 nt, Human
augcagccucacagu

SEQ ID NO: 3050413 - RNA, 15 nt, Human
augcaguucugaaga

SEQ ID NO: 3050414 - RNA, 17 nt, Human
augcaguucugaagaag

SEQ ID NO: 3050415 - RNA, 18 nt, Human
augcaguucugaagaaga

SEQ ID NO: 3050416 - RNA, 19 nt, Human
augcaguucugaagaagau

SEQ ID NO: 3050417 - RNA, 15 nt, Human
augccacuaaauuga

SEQ ID NO: 3050418 - RNA, 17 nt, Human
augccacuaaauugaca

SEQ ID NO: 3050419 - RNA, 12 nt, Human
augauucccagc

SEQ ID NO: 3050420 - RNA, 21 nt, Human
augauucaacagguuuuccug

SEQ ID NO: 3050421 - RNA, 21 nt, Human
augauucaaaugucuauaaac

SEQ ID NO: 3050422 - RNA, 20 nt, Human
augauuaaccacuucagcug

SEQ ID NO: 3050423 - RNA, 21 nt, Human
augauuaaccacuucagcuga

SEQ ID NO: 3050424 - RNA, 22 nt, Human
augauuaugaauuacauuugua

SEQ ID NO: 3050425 - RNA, 19 nt, Human
augauuaaccacuucagcu

SEQ ID NO: 3050426 - RNA, 15 nt, Human
uuguugucugcaacu

SEQ ID NO: 3050427 - RNA, 13 nt, Human
augcaccagcccu

SEQ ID NO: 3050428 - RNA, 12 nt, Human
augcacuuuguu

SEQ ID NO: 3050429 - RNA, 15 nt, Human
augcaaagcacugac

SEQ ID NO: 3050430 - RNA, 13 nt, Human
uugugguuaaucu

SEQ ID NO: 3050431 - RNA, 23 nt, Human
uugugugaaagguacuucaaauc

SEQ ID NO: 3050432 - RNA, 17 nt, Human
uuguguguuuauuguca

SEQ ID NO: 3050433 - RNA, 19 nt, Human
uuguucuggcucuuccagg

SEQ ID NO: 3050434 - RNA, 20 nt, Human
uuguucuggcucuuccaggc

SEQ ID NO: 3050435 - RNA, 22 nt, Human
uuguucuggcucuuccaggcug

SEQ ID NO: 3050436 - RNA, 18 nt, Human
uugugauacaaugcugug

SEQ ID NO: 3050437 - RNA, 21 nt, Human
uugugaggaagccgcuggggc

SEQ ID NO: 3050438 - RNA, 20 nt, Human
augagagacacacugaagaa

SEQ ID NO: 3050439 - RNA, 21 nt, Human
augagagacacacugaagaag

SEQ ID NO: 3050440 - RNA, 14 nt, Human
auaucuaguaugaa

SEQ ID NO: 3050441 - RNA, 15 nt, Human
auaucuaguaugaaa

SEQ ID NO: 3050442 - RNA, 17 nt, Human
auaucuaguaugaaauu

SEQ ID NO: 3050443 - RNA, 14 nt, Human
auauauuuuaagac

SEQ ID NO: 3050444 - RNA, 19 nt, Human
auaucuccgucaacucaua

SEQ ID NO: 3050445 - RNA, 20 nt, Human
auaucuccgucaacucauau

SEQ ID NO: 3050446 - RNA, 21 nt, Human
auaucuccgucaacucauauu

SEQ ID NO: 3050447 - RNA, 13 nt, Human
auaucuuguagcu

SEQ ID NO: 3050448 - RNA, 20 nt, Human
auaucugaaaauguaugugu

SEQ ID NO: 3050449 - RNA, 17 nt, Human
auaucugaaaauguaug

SEQ ID NO: 3050450 - RNA, 16 nt, Human
auaucugaaaauguau

SEQ ID NO: 3050451 - RNA, 16 nt, Human
auauguaacaagccac

SEQ ID NO: 3050452 - RNA, 17 nt, Human
auauguaacaagccacc

SEQ ID NO: 3050453 - RNA, 15 nt, Human
auaugcacacauuuu

SEQ ID NO: 3050454 - RNA, 14 nt, Human
auaugcacacauuu

SEQ ID NO: 3050455 - RNA, 16 nt, Human
auaugcacacauuuuu

SEQ ID NO: 3050456 - RNA, 13 nt, Human
auaugcacacauu

SEQ ID NO: 3050457 - RNA, 13 nt, Human
auauauuuuaaga

SEQ ID NO: 3050458 - RNA, 12 nt, Human
auauauuuuaag

SEQ ID NO: 3050459 - RNA, 13 nt, Human
auauauuuaauga

SEQ ID NO: 3050460 - RNA, 15 nt, Human
auauauuuaaugaua

SEQ ID NO: 3050461 - RNA, 21 nt, Human
uucaucccucuggggcuguuc

SEQ ID NO: 3050462 - RNA, 17 nt, Human
uucaucccucuggggcu

SEQ ID NO: 3050463 - RNA, 13 nt, Human
uucauacauugua

SEQ ID NO: 3050464 - RNA, 19 nt, Human
uucauacauuguacgaaga

SEQ ID NO: 3050465 - RNA, 13 nt, Human
uucauaugcugua

SEQ ID NO: 3050466 - RNA, 12 nt, Human
uucauacauauu

SEQ ID NO: 3050467 - RNA, 23 nt, Human
uucauacauauuuuuguagcacu

SEQ ID NO: 3050468 - RNA, 19 nt, Human
uucauaauuauuauuuggc

SEQ ID NO: 3050469 - RNA, 13 nt, Human
uucagaaaugugu

SEQ ID NO: 3050470 - RNA, 11 nt, Human
uucagaaaugu

SEQ ID NO: 3050471 - RNA, 16 nt, Human
uucagugccaaaaaca

SEQ ID NO: 3050472 - RNA, 12 nt, Human
uucagugccuua

SEQ ID NO: 3050473 - RNA, 13 nt, Human
uucagugccuuau

SEQ ID NO: 3050474 - RNA, 17 nt, Human
uuccaaggguacuaagg

SEQ ID NO: 3050475 - RNA, 15 nt, Human
uuccaaggguacuaa

SEQ ID NO: 3050476 - RNA, 15 nt, Human
auauguggaguucau

SEQ ID NO: 3050477 - RNA, 16 nt, Human
auauguggaguucauc

SEQ ID NO: 3050478 - RNA, 19 nt, Human
uuccaccaucaagccacca

SEQ ID NO: 3050479 - RNA, 22 nt, Human
uuccacaagagcccaggccucc

SEQ ID NO: 3050480 - RNA, 18 nt, Human
uuccaccaucaagccacc

SEQ ID NO: 3050481 - RNA, 17 nt, Human
uuccaggggugggacac

SEQ ID NO: 3050482 - RNA, 16 nt, Human
uucccaagcucugcuc

SEQ ID NO: 3050483 - RNA, 15 nt, Human
uucccaagcucugcu

SEQ ID NO: 3050484 - RNA, 14 nt, Human
uucccaagcucugc

SEQ ID NO: 3050485 - RNA, 13 nt, Human
uucccaagcucug

SEQ ID NO: 3050486 - RNA, 18 nt, Human
uucccaacuccagaaagu

SEQ ID NO: 3050487 - RNA, 12 nt, Human
uucccaaauuuc

SEQ ID NO: 3050488 - RNA, 12 nt, Human
uucccaccucuc

SEQ ID NO: 3050489 - RNA, 22 nt, Human
uucccaccucucucacuccuug

SEQ ID NO: 3050490 - RNA, 18 nt, Human
uucccaagcucugcuccu

SEQ ID NO: 3050491 - RNA, 21 nt, Human
uuccaggggugggacacccug

SEQ ID NO: 3050492 - RNA, 17 nt, Human
uuccagugaggcucugc

SEQ ID NO: 3050493 - RNA, 19 nt, Human
uuccagugaggcucugccc

SEQ ID NO: 3050494 - RNA, 20 nt, Human
uuccagugaggcucugcccu

SEQ ID NO: 3050495 - RNA, 21 nt, Human
uuccagugaggcucugcccuu

SEQ ID NO: 3050496 - RNA, 22 nt, Human
uuccagugaggcucugcccuug

SEQ ID NO: 3050497 - RNA, 23 nt, Human
uucccaaagcagugcaugcuguc

SEQ ID NO: 3050498 - RNA, 21 nt, Human
uucaaaauuguuacaaauugu

SEQ ID NO: 3050499 - RNA, 16 nt, Human
uucaaaauuguuacaa

SEQ ID NO: 3050500 - RNA, 18 nt, Human
uucaaacagucucaggaa

SEQ ID NO: 3050501 - RNA, 21 nt, Human
uucaagcgauucuucugcuuc

SEQ ID NO: 3050502 - RNA, 17 nt, Human
uuauuuuuuucugaauu

SEQ ID NO: 3050503 - RNA, 13 nt, Human
uuauuuuuuucug

SEQ ID NO: 3050504 - RNA, 17 nt, Human
uuauuuuguucauacau

SEQ ID NO: 3050505 - RNA, 21 nt, Human
uuauuuuguucauacauauuu

SEQ ID NO: 3050506 - RNA, 17 nt, Human
uuauuuuuagacagagu

SEQ ID NO: 3050507 - RNA, 18 nt, Human
uuauuuuuagacagaguc

SEQ ID NO: 3050508 - RNA, 17 nt, Human
auaggcguaacuaauuu

SEQ ID NO: 3050509 - RNA, 22 nt, Human
auaggaauugacccacaagaaa

SEQ ID NO: 3050510 - RNA, 22 nt, Human
auagcuuuucccuuuuuuuaag

SEQ ID NO: 3050511 - RNA, 15 nt, Human
auagcuuuuuucucu

SEQ ID NO: 3050512 - RNA, 12 nt, Human
auaggaaaaacu

SEQ ID NO: 3050513 - RNA, 14 nt, Human
auaggaaaaacuga

SEQ ID NO: 3050514 - RNA, 16 nt, Human
auaggaaaaacugauu

SEQ ID NO: 3050515 - RNA, 17 nt, Human
auaggaaaaacugauuu

SEQ ID NO: 3050516 - RNA, 20 nt, Human
uucacagaugggugcuugga

SEQ ID NO: 3050517 - RNA, 15 nt, Human
uucacaguucucucc

SEQ ID NO: 3050518 - RNA, 20 nt, Human
uucacaguucucuccuucuu

SEQ ID NO: 3050519 - RNA, 13 nt, Human
uucacaguucucu

SEQ ID NO: 3050520 - RNA, 22 nt, Human
uucacaagacccaaaaggcaga

SEQ ID NO: 3050521 - RNA, 23 nt, Human
uucacaagacccaaaaggcagaa

SEQ ID NO: 3050522 - RNA, 13 nt, Human
auagucuuucagu

SEQ ID NO: 3050523 - RNA, 17 nt, Human
auaguggcuuaaaacaa

SEQ ID NO: 3050524 - RNA, 15 nt, Human
auaguggugugauuu

SEQ ID NO: 3050525 - RNA, 22 nt, Human
auaguuggcuaggaccccucca

SEQ ID NO: 3050526 - RNA, 20 nt, Human
auaguuguaccgcaauguga

SEQ ID NO: 3050527 - RNA, 22 nt, Human
auaguuaagcgugcauaaguua

SEQ ID NO: 3050528 - RNA, 21 nt, Human
auauauauuuuuuucugaaau

SEQ ID NO: 3050529 - RNA, 17 nt, Human
auauaacaaugcuguau

SEQ ID NO: 3050530 - RNA, 13 nt, Human
auauauaaccagu

SEQ ID NO: 3050531 - RNA, 12 nt, Human
auauauaaccag

SEQ ID NO: 3050532 - RNA, 19 nt, Human
auauauaacaaugcuguau

SEQ ID NO: 3050533 - RNA, 21 nt, Human
aucauugaaaucuuuuugcuu

SEQ ID NO: 3050534 - RNA, 21 nt, Human
aucaggccaggcccucugccc

SEQ ID NO: 3050535 - RNA, 22 nt, Human
aucaggccaggcccucugccca

SEQ ID NO: 3050536 - RNA, 23 nt, Human
aucaggccaggcccucugcccac

SEQ ID NO: 3050537 - RNA, 20 nt, Human
aucauugaaaucuuuuugcu

SEQ ID NO: 3050538 - RNA, 20 nt, Human
aucaggccaggcccucugcc

SEQ ID NO: 3050539 - RNA, 17 nt, Human
uucucuacucuagggaa

SEQ ID NO: 3050540 - RNA, 16 nt, Human
uucucuuuucaaaaca

SEQ ID NO: 3050541 - RNA, 14 nt, Human
uucugacccaugcu

SEQ ID NO: 3050542 - RNA, 13 nt, Human
uucugccgcagcc

SEQ ID NO: 3050543 - RNA, 21 nt, Human
auccaagcuggucccacucag

SEQ ID NO: 3050544 - RNA, 20 nt, Human
uucuggcuaugcauuugaaa

SEQ ID NO: 3050545 - RNA, 18 nt, Human
uucuggcuaugcauuuga

SEQ ID NO: 3050546 - RNA, 14 nt, Human
uucugccgcagccc

SEQ ID NO: 3050547 - RNA, 15 nt, Human
uucugccgcagcccu

SEQ ID NO: 3050548 - RNA, 16 nt, Human
uucuggcuaugcauuu

SEQ ID NO: 3050549 - RNA, 20 nt, Human
auccuagucacuaccuucau

SEQ ID NO: 3050550 - RNA, 13 nt, Human
auccuaguuccac

SEQ ID NO: 3050551 - RNA, 21 nt, Human
auccuaggcauuugcugaaua

SEQ ID NO: 3050552 - RNA, 21 nt, Human
auccuaagcuauucaguaaua

SEQ ID NO: 3050553 - RNA, 11 nt, Human
uugaaaucuuu

SEQ ID NO: 3050554 - RNA, 20 nt, Human
uugaaauauaggaacuuaaa

SEQ ID NO: 3050555 - RNA, 19 nt, Human
uugaaauauugacuuuuua

SEQ ID NO: 3050556 - RNA, 21 nt, Human
uugaaauuuuuauuaaauuau

SEQ ID NO: 3050557 - RNA, 16 nt, Human
uucuuuguaaugaaaa

SEQ ID NO: 3050558 - RNA, 22 nt, Human
uucuuucuggcuaugcauuuga

SEQ ID NO: 3050559 - RNA, 12 nt, Human
uucuugcaaagu

SEQ ID NO: 3050560 - RNA, 23 nt, Human
uucuuccucccucccucuuuccc

SEQ ID NO: 3050561 - RNA, 13 nt, Human
uucuuaauucuua

SEQ ID NO: 3050562 - RNA, 18 nt, Human
uucuguucuuucuggcua

SEQ ID NO: 3050563 - RNA, 11 nt, Human
uucuguucuuu

SEQ ID NO: 3050564 - RNA, 20 nt, Human
uucuguuuuucuaggccugg

SEQ ID NO: 3050565 - RNA, 14 nt, Human
auauuuuaagacga

SEQ ID NO: 3050566 - RNA, 15 nt, Human
auauuuuacauaaau

SEQ ID NO: 3050567 - RNA, 16 nt, Human
auauuuuacauaaauu

SEQ ID NO: 3050568 - RNA, 20 nt, Human
auauuuuacauaaauuuagu

SEQ ID NO: 3050569 - RNA, 19 nt, Human
uucccuuuuuuggcugcug

SEQ ID NO: 3050570 - RNA, 20 nt, Human
uucccuuuuuuggcugcuga

SEQ ID NO: 3050571 - RNA, 18 nt, Human
uucccuuuuuuggcugcu

SEQ ID NO: 3050572 - RNA, 22 nt, Human
aucaaccccuucgcuccugugu

SEQ ID NO: 3050573 - RNA, 20 nt, Human
aucaaccccuucgcuccugu

SEQ ID NO: 3050574 - RNA, 19 nt, Human
aucaaccccuucgcuccug

SEQ ID NO: 3050575 - RNA, 14 nt, Human
aucaaguuauuuuu

SEQ ID NO: 3050576 - RNA, 20 nt, Human
aucaaauaugcaaagcacug

SEQ ID NO: 3050577 - RNA, 20 nt, Human
uucuaacaaaaaaauauauu

SEQ ID NO: 3050578 - RNA, 19 nt, Human
uucuaacaaaaaaauauau

SEQ ID NO: 3050579 - RNA, 15 nt, Human
uucuaaaguaaaaac

SEQ ID NO: 3050580 - RNA, 13 nt, Human
uucuaaaguaaaa

SEQ ID NO: 3050581 - RNA, 13 nt, Human
uucgcuccugugu

SEQ ID NO: 3050582 - RNA, 17 nt, Human
uucuaaguaaaaccaca

SEQ ID NO: 3050583 - RNA, 20 nt, Human
uucuaaguaaaaccacagca

SEQ ID NO: 3050584 - RNA, 19 nt, Human
uucuaaguaaaaccacagc

SEQ ID NO: 3050585 - RNA, 21 nt, Human
uucgcaggauucuuccucccu

SEQ ID NO: 3050586 - RNA, 19 nt, Human
aucagacuaugaaguuuuu

SEQ ID NO: 3050587 - RNA, 13 nt, Human
aucaggccaggcc

SEQ ID NO: 3050588 - RNA, 13 nt, Human
uucuauaauuuaa

SEQ ID NO: 3050589 - RNA, 14 nt, Human
uucuauaauuuaaa

SEQ ID NO: 3050590 - RNA, 21 nt, Human
uucucacugccaugccagcuu

SEQ ID NO: 3050591 - RNA, 21 nt, Human
uucuaaguaaaaccacagcag

SEQ ID NO: 3050592 - RNA, 13 nt, Human
auaaaagccuguu

SEQ ID NO: 3050593 - RNA, 18 nt, Human
auaaaagccuguuuaaga

SEQ ID NO: 3050594 - RNA, 12 nt, Human
auaaaauaauuu

SEQ ID NO: 3050595 - RNA, 20 nt, Human
uuaagaaaaaggaugcacag

SEQ ID NO: 3050596 - RNA, 19 nt, Human
uuaagaaaaaggaugcaca

SEQ ID NO: 3050597 - RNA, 21 nt, Human
uuaagaaaaaggaugcacaga

SEQ ID NO: 3050598 - RNA, 22 nt, Human
auaaaauaauuuuuauauuuga

SEQ ID NO: 3050599 - RNA, 23 nt, Human
aguuuuuauggcuuuugugcauu

SEQ ID NO: 3050600 - RNA, 23 nt, Human
aguuuucugagaaagacuauuca

SEQ ID NO: 3050601 - RNA, 18 nt, Human
aguuuucugagaaagacu

SEQ ID NO: 3050602 - RNA, 19 nt, Human
aguuuucugagaaagacua

SEQ ID NO: 3050603 - RNA, 14 nt, Human
uuaaguauguguaa

SEQ ID NO: 3050604 - RNA, 14 nt, Human
uuaagugcugcauu

SEQ ID NO: 3050605 - RNA, 16 nt, Human
uuaagugcugcauuua

SEQ ID NO: 3050606 - RNA, 15 nt, Human
uuaagugcugcauuu

SEQ ID NO: 3050607 - RNA, 19 nt, Human
uuaagugcugcauuuaaaa

SEQ ID NO: 3050608 - RNA, 9 nt, Human
uuaaggugg

SEQ ID NO: 3050609 - RNA, 22 nt, Human
uuaagaaagacuaucuaaaugu

SEQ ID NO: 3050610 - RNA, 18 nt, Human
uuaaugaaagacuguaca

SEQ ID NO: 3050611 - RNA, 22 nt, Human
uuaaucugguuuauuuuuguuc

SEQ ID NO: 3050612 - RNA, 19 nt, Human
uuaaugaaagacuguacaa

SEQ ID NO: 3050613 - RNA, 13 nt, Human
uuaaucauuaggu

SEQ ID NO: 3050614 - RNA, 23 nt, Human
uuaaucauuaggugugacugaau

SEQ ID NO: 3050615 - RNA, 22 nt, Human
uuaaucauuaggugugacugaa

SEQ ID NO: 3050616 - RNA, 14 nt, Human
aguuuaaauuguaa

SEQ ID NO: 3050617 - RNA, 11 nt, Human
aguuggucccc

SEQ ID NO: 3050618 - RNA, 13 nt, Human
aguuggucccccu

SEQ ID NO: 3050619 - RNA, 17 nt, Human
aguuggucccccuucca

SEQ ID NO: 3050620 - RNA, 13 nt, Human
uuaaaaaaaaucc

SEQ ID NO: 3050621 - RNA, 23 nt, Human
aguugccagucaccccggccacc

SEQ ID NO: 3050622 - RNA, 13 nt, Human
uguuucaaacaua

SEQ ID NO: 3050623 - RNA, 19 nt, Human
aguugggcuuccucauagu

SEQ ID NO: 3050624 - RNA, 13 nt, Human
aguugggcuuccu

SEQ ID NO: 3050625 - RNA, 16 nt, Human
uuaacagaaauguaca

SEQ ID NO: 3050626 - RNA, 19 nt, Human
uuaacagaaauguacagca

SEQ ID NO: 3050627 - RNA, 20 nt, Human
uuaacagaaauguacagcaa

SEQ ID NO: 3050628 - RNA, 18 nt, Human
uuaaauaaugugaaacug

SEQ ID NO: 3050629 - RNA, 16 nt, Human
uuaaauaaugugaaac

SEQ ID NO: 3050630 - RNA, 13 nt, Human
uuaaauaauguga

SEQ ID NO: 3050631 - RNA, 15 nt, Human
uuaaauaaugugaaa

SEQ ID NO: 3050632 - RNA, 15 nt, Human
uuaaaaaucucaaau

SEQ ID NO: 3050633 - RNA, 14 nt, Human
uuaaaaaucucaaa

SEQ ID NO: 3050634 - RNA, 16 nt, Human
uuaaaaaucucaaauu

SEQ ID NO: 3050635 - RNA, 17 nt, Human
auaaagguucaugcaaa

SEQ ID NO: 3050636 - RNA, 13 nt, Human
auaaauaaaaaua

SEQ ID NO: 3050637 - RNA, 15 nt, Human
auaaagguucaugca

SEQ ID NO: 3050638 - RNA, 18 nt, Human
auaaauauuuuugccaua

SEQ ID NO: 3050639 - RNA, 15 nt, Human
auaaauaguuuauga

SEQ ID NO: 3050640 - RNA, 13 nt, Human
auaacugugaagu

SEQ ID NO: 3050641 - RNA, 14 nt, Human
auaacguauaaaag

SEQ ID NO: 3050642 - RNA, 22 nt, Human
auaacgauaaaagacagugaaa

SEQ ID NO: 3050643 - RNA, 11 nt, Human
auaaauuauuu

SEQ ID NO: 3050644 - RNA, 20 nt, Human
auaaccaguguuguggauuu

SEQ ID NO: 3050645 - RNA, 20 nt, Human
uuaccuuugacaaagguaaa

SEQ ID NO: 3050646 - RNA, 13 nt, Human
uuaccuuugacaa

SEQ ID NO: 3050647 - RNA, 19 nt, Human
uuacccucauguucuuaau

SEQ ID NO: 3050648 - RNA, 13 nt, Human
uuagacagucccu

SEQ ID NO: 3050649 - RNA, 20 nt, Human
uuagacagagucucacuguu

SEQ ID NO: 3050650 - RNA, 13 nt, Human
uuagacagagucu

SEQ ID NO: 3050651 - RNA, 19 nt, Human
uuagaaacacaacuauauu

SEQ ID NO: 3050652 - RNA, 18 nt, Human
uuagccaagugugguaga

SEQ ID NO: 3050653 - RNA, 18 nt, Human
uuagcaaauucuguuuuu

SEQ ID NO: 3050654 - RNA, 15 nt, Human
uuaggugaggaagca

SEQ ID NO: 3050655 - RNA, 20 nt, Human
uuagggaaggauacaaaagc

SEQ ID NO: 3050656 - RNA, 16 nt, Human
uuaggugugacugaau

SEQ ID NO: 3050657 - RNA, 16 nt, Human
uuaggugaggaagcaa

SEQ ID NO: 3050658 - RNA, 18 nt, Human
uuagguuggcaaaaaggc

SEQ ID NO: 3050659 - RNA, 22 nt, Human
uuaguuugcaguuacacuaaaa

SEQ ID NO: 3050660 - RNA, 15 nt, Human
uuaguuucuccaagc

SEQ ID NO: 3050661 - RNA, 18 nt, Human
auaauccuaaacauauga

SEQ ID NO: 3050662 - RNA, 22 nt, Human
auaauugacaggauuauuggaa

SEQ ID NO: 3050663 - RNA, 15 nt, Human
auaaugaaugaaaca

SEQ ID NO: 3050664 - RNA, 15 nt, Human
auaaugcgugcauac

SEQ ID NO: 3050665 - RNA, 19 nt, Human
auaauacuugcuuuggaaa

SEQ ID NO: 3050666 - RNA, 20 nt, Human
auaauacaccacuacauucu

SEQ ID NO: 3050667 - RNA, 18 nt, Human
auaauacaccacuacauu

SEQ ID NO: 3050668 - RNA, 12 nt, Human
auaauacaccac

SEQ ID NO: 3050669 - RNA, 20 nt, Human
uguugugauguauucuagcu

SEQ ID NO: 3050670 - RNA, 14 nt, Human
uguugugauguauu

SEQ ID NO: 3050671 - RNA, 13 nt, Human
uguugugaauguu

SEQ ID NO: 3050672 - RNA, 12 nt, Human
uguugugaaugu

SEQ ID NO: 3050673 - RNA, 13 nt, Human
uguugucugcaac

SEQ ID NO: 3050674 - RNA, 16 nt, Human
uguugucugcaacucu

SEQ ID NO: 3050675 - RNA, 20 nt, Human
uguuuagauaauacaccacu

SEQ ID NO: 3050676 - RNA, 17 nt, Human
uguuuaguaaucauauu

SEQ ID NO: 3050677 - RNA, 14 nt, Human
uguuuaguaaucau

SEQ ID NO: 3050678 - RNA, 13 nt, Human
uguuuaguaauca

SEQ ID NO: 3050679 - RNA, 14 nt, Human
uguuuauugucaaa

SEQ ID NO: 3050680 - RNA, 15 nt, Human
aguucuacauaagua

SEQ ID NO: 3050681 - RNA, 19 nt, Human
aguucggugagcuacaaau

SEQ ID NO: 3050682 - RNA, 23 nt, Human
aguuccucauuagcauuuugcua

SEQ ID NO: 3050683 - RNA, 16 nt, Human
aguucaauucucauuu

SEQ ID NO: 3050684 - RNA, 18 nt, Human
uguucuagcauggcugcc

SEQ ID NO: 3050685 - RNA, 18 nt, Human
uguucuuaguuugcaguu

SEQ ID NO: 3050686 - RNA, 19 nt, Human
aguguguguuuuucauaaa

SEQ ID NO: 3050687 - RNA, 22 nt, Human
uguucuugguuuguaaauuaac

SEQ ID NO: 3050688 - RNA, 20 nt, Human
uguucuugguuuguaaauua

SEQ ID NO: 3050689 - RNA, 19 nt, Human
uguucuugguuuguaaauu

SEQ ID NO: 3050690 - RNA, 13 nt, Human
uguugcccaggcu

SEQ ID NO: 3050691 - RNA, 15 nt, Human
uguugcccaggcugg

SEQ ID NO: 3050692 - RNA, 17 nt, Human
aguguuggagaagaacu

SEQ ID NO: 3050693 - RNA, 18 nt, Human
aguguuggagaagaacug

SEQ ID NO: 3050694 - RNA, 14 nt, Human
aguguuggagaaga

SEQ ID NO: 3050695 - RNA, 16 nt, Human
aguguuggagaagaac

SEQ ID NO: 3050696 - RNA, 20 nt, Human
ugugguguuuccuggcacug

SEQ ID NO: 3050697 - RNA, 19 nt, Human
ugugucagcauagaaguaa

SEQ ID NO: 3050698 - RNA, 12 nt, Human
ugugguuucauu

SEQ ID NO: 3050699 - RNA, 16 nt, Human
agugcuuccaaggaug

SEQ ID NO: 3050700 - RNA, 16 nt, Human
uguggucccaccccac

SEQ ID NO: 3050701 - RNA, 20 nt, Human
agugcugcauuuaaaagaua

SEQ ID NO: 3050702 - RNA, 17 nt, Human
agugccuuacacaaugg

SEQ ID NO: 3050703 - RNA, 15 nt, Human
agugccuuacacaau

SEQ ID NO: 3050704 - RNA, 21 nt, Human
agugccuguaaucacagcuac

SEQ ID NO: 3050705 - RNA, 22 nt, Human
agugccucucccugcugcuccu

SEQ ID NO: 3050706 - RNA, 23 nt, Human
agugccucucccugcugcuccua

SEQ ID NO: 3050707 - RNA, 19 nt, Human
agugccucucccugcugcu

SEQ ID NO: 3050708 - RNA, 20 nt, Human
agugccucucccugcugcuc

SEQ ID NO: 3050709 - RNA, 19 nt, Human
agugcugggauuacaggug

SEQ ID NO: 3050710 - RNA, 22 nt, Human
agugcugcauuuaaaagauaca

SEQ ID NO: 3050711 - RNA, 20 nt, Human
agugcugggauuacaagcgu

SEQ ID NO: 3050712 - RNA, 13 nt, Human
uguguugugaaug

SEQ ID NO: 3050713 - RNA, 21 nt, Human
uguuaacauggacaugaucuu

SEQ ID NO: 3050714 - RNA, 18 nt, Human
aguggaaaaauagccugc

SEQ ID NO: 3050715 - RNA, 19 nt, Human
aguggaaaaauagccugcc

SEQ ID NO: 3050716 - RNA, 11 nt, Human
aguggaaaaau

SEQ ID NO: 3050717 - RNA, 19 nt, Human
uguuaaugauagcuacugu

SEQ ID NO: 3050718 - RNA, 23 nt, Human
uguguuaucacccagaagaaaau

SEQ ID NO: 3050719 - RNA, 14 nt, Human
uguguuaugaagca

SEQ ID NO: 3050720 - RNA, 19 nt, Human
ugugucagguggggcagcu

SEQ ID NO: 3050721 - RNA, 17 nt, Human
ugugucagguggggcag

SEQ ID NO: 3050722 - RNA, 13 nt, Human
ugugucucuuggu

SEQ ID NO: 3050723 - RNA, 18 nt, Human
ugugcucuggacaggcau

SEQ ID NO: 3050724 - RNA, 16 nt, Human
ugugcucuggacaggc

SEQ ID NO: 3050725 - RNA, 19 nt, Human
ugugcucuggacaggcaug

SEQ ID NO: 3050726 - RNA, 12 nt, Human
ugugcugcccug

SEQ ID NO: 3050727 - RNA, 13 nt, Human
ugugcugcccugc

SEQ ID NO: 3050728 - RNA, 14 nt, Human
ugugcugcccugcc

SEQ ID NO: 3050729 - RNA, 15 nt, Human
ugugcugcccugccc

SEQ ID NO: 3050730 - RNA, 21 nt, Human
ugugcccuaaaguguauuuuu

SEQ ID NO: 3050731 - RNA, 20 nt, Human
ugugcccuaaaguguauuuu

SEQ ID NO: 3050732 - RNA, 19 nt, Human
agucucacuguugcccagg

SEQ ID NO: 3050733 - RNA, 18 nt, Human
agucucacuguugcccag

SEQ ID NO: 3050734 - RNA, 20 nt, Human
agucucacuguugcccaggc

SEQ ID NO: 3050735 - RNA, 15 nt, Human
ugugcucuggacagg

SEQ ID NO: 3050736 - RNA, 23 nt, Human
ugugcucugaucauccacugugc

SEQ ID NO: 3050737 - RNA, 12 nt, Human
ugugcucugauc

SEQ ID NO: 3050738 - RNA, 22 nt, Human
ugugcucugaucauccacugug

SEQ ID NO: 3050739 - RNA, 14 nt, Human
agugcccacaggau

SEQ ID NO: 3050740 - RNA, 16 nt, Human
agugccaaaaacaaca

SEQ ID NO: 3050741 - RNA, 14 nt, Human
agugccaaaaacaa

SEQ ID NO: 3050742 - RNA, 21 nt, Human
agugccaaagaagcagaccau

SEQ ID NO: 3050743 - RNA, 24 nt, Human
agugauucuccugccucagccucc

SEQ ID NO: 3050744 - RNA, 22 nt, Human
agugauucuccugccucagccu

SEQ ID NO: 3050745 - RNA, 16 nt, Human
agugagucgaggacag

SEQ ID NO: 3050746 - RNA, 14 nt, Human
agugcaaauuguca

SEQ ID NO: 3050747 - RNA, 18 nt, Human
agugcaaauugucacagg

SEQ ID NO: 3050748 - RNA, 21 nt, Human
agugcaaauugucacaggaca

SEQ ID NO: 3050749 - RNA, 19 nt, Human
aguagaacagauaaucagu

SEQ ID NO: 3050750 - RNA, 13 nt, Human
aguagaacagaua

SEQ ID NO: 3050751 - RNA, 12 nt, Human
aguagagacagg

SEQ ID NO: 3050752 - RNA, 18 nt, Human
uguaggaagguuaauguu

SEQ ID NO: 3050753 - RNA, 19 nt, Human
aguagauaggccaugggca

SEQ ID NO: 3050754 - RNA, 20 nt, Human
uguaggaagguuaauguuca

SEQ ID NO: 3050755 - RNA, 15 nt, Human
aguaauccaagcaaa

SEQ ID NO: 3050756 - RNA, 21 nt, Human
aguaauccaagcaaaugugaa

SEQ ID NO: 3050757 - RNA, 19 nt, Human
aguacuuuuggcauuuuac

SEQ ID NO: 3050758 - RNA, 14 nt, Human
aguacacuguuuca

SEQ ID NO: 3050759 - RNA, 16 nt, Human
aguacacuguuucaaa

SEQ ID NO: 3050760 - RNA, 14 nt, Human
uguaauuugugaua

SEQ ID NO: 3050761 - RNA, 13 nt, Human
uguagagugggag

SEQ ID NO: 3050762 - RNA, 18 nt, Human
uguagaggagaaacugga

SEQ ID NO: 3050763 - RNA, 16 nt, Human
uguagaggagaaacug

SEQ ID NO: 3050764 - RNA, 23 nt, Human
aguaaggaauuuuauuuuuuucu

SEQ ID NO: 3050765 - RNA, 19 nt, Human
aguaauaugcacacauuuu

SEQ ID NO: 3050766 - RNA, 18 nt, Human
aguaauaugcacacauuu

SEQ ID NO: 3050767 - RNA, 20 nt, Human
aguaauaugcacacauuuuu

SEQ ID NO: 3050768 - RNA, 17 nt, Human
aguaauaugcacacauu

SEQ ID NO: 3050769 - RNA, 20 nt, Human
aguaagccgugauuuucauu

SEQ ID NO: 3050770 - RNA, 15 nt, Human
aguaaaaccacagca

SEQ ID NO: 3050771 - RNA, 11 nt, Human
agguuuuccug

SEQ ID NO: 3050772 - RNA, 23 nt, Human
uguaauuaaguacuauguaucaa

SEQ ID NO: 3050773 - RNA, 15 nt, Human
uguaaguaaacgguc

SEQ ID NO: 3050774 - RNA, 17 nt, Human
aggugguuauggagagg

SEQ ID NO: 3050775 - RNA, 14 nt, Human
agguuggugggggc

SEQ ID NO: 3050776 - RNA, 17 nt, Human
uguaacuuucugaaaua

SEQ ID NO: 3050777 - RNA, 10 nt, Human
aggucccuaa

SEQ ID NO: 3050778 - RNA, 22 nt, Human
aggucuugaacuccuggccuca

SEQ ID NO: 3050779 - RNA, 23 nt, Human
aggucuugaacuccuggccucaa

SEQ ID NO: 3050780 - RNA, 16 nt, Human
aggugcacaagcucca

SEQ ID NO: 3050781 - RNA, 17 nt, Human
aggugcacaagcuccaa

SEQ ID NO: 3050782 - RNA, 18 nt, Human
aggugcacaagcuccaag

SEQ ID NO: 3050783 - RNA, 20 nt, Human
aggugcacaagcuccaagcu

SEQ ID NO: 3050784 - RNA, 15 nt, Human
aggugcacaagcucc

SEQ ID NO: 3050785 - RNA, 21 nt, Human
aggugcacaagcuccaagcuc

SEQ ID NO: 3050786 - RNA, 18 nt, Human
aggugggauccuccaggu

SEQ ID NO: 3050787 - RNA, 20 nt, Human
aggugggauccuccaggugc

SEQ ID NO: 3050788 - RNA, 23 nt, Human
ugucauuugcuggagcucugccc

SEQ ID NO: 3050789 - RNA, 19 nt, Human
ugucagcugaaccugggua

SEQ ID NO: 3050790 - RNA, 19 nt, Human
agucacugagacagcccgg

SEQ ID NO: 3050791 - RNA, 18 nt, Human
agucacugagacagcccg

SEQ ID NO: 3050792 - RNA, 16 nt, Human
ugucagcugaaccugg

SEQ ID NO: 3050793 - RNA, 13 nt, Human
aguauuucuauga

SEQ ID NO: 3050794 - RNA, 15 nt, Human
aguauuucuaugaaa

SEQ ID NO: 3050795 - RNA, 16 nt, Human
aguauuugagaguucu

SEQ ID NO: 3050796 - RNA, 22 nt, Human
aguauuucuaugaaauauuaug

SEQ ID NO: 3050797 - RNA, 13 nt, Human
agucaccaagccc

SEQ ID NO: 3050798 - RNA, 19 nt, Human
agucacauuccugaacagg

SEQ ID NO: 3050799 - RNA, 18 nt, Human
agucacauuccugaacag

SEQ ID NO: 3050800 - RNA, 20 nt, Human
agucacauuccugaacagga

SEQ ID NO: 3050801 - RNA, 15 nt, Human
ugucaagccauaauu

SEQ ID NO: 3050802 - RNA, 19 nt, Human
ugucaagagggucugagga

SEQ ID NO: 3050803 - RNA, 21 nt, Human
ugucaauaaaauccauacauu

SEQ ID NO: 3050804 - RNA, 14 nt, Human
uguauuuuuuuacu

SEQ ID NO: 3050805 - RNA, 11 nt, Human
uguauuaugug

SEQ ID NO: 3050806 - RNA, 17 nt, Human
aguaggaagacuuugga

SEQ ID NO: 3050807 - RNA, 18 nt, Human
aguaggaagacuuuggaa

SEQ ID NO: 3050808 - RNA, 19 nt, Human
aguaggaagacuuuggaaa

SEQ ID NO: 3050809 - RNA, 22 nt, Human
aguaggaagacuuuggaaagac

SEQ ID NO: 3050810 - RNA, 16 nt, Human
aguaggaagacuuugg

SEQ ID NO: 3050811 - RNA, 20 nt, Human
ugucaaucagccuaguugau

SEQ ID NO: 3050812 - RNA, 13 nt, Human
aguagucagacug

SEQ ID NO: 3050813 - RNA, 22 nt, Human
aguccaggcuuuuuuaucaugu

SEQ ID NO: 3050814 - RNA, 12 nt, Human
agucccugccaa

SEQ ID NO: 3050815 - RNA, 23 nt, Human
aguccgaaagggacuuggaagcu

SEQ ID NO: 3050816 - RNA, 17 nt, Human
agucucacuguugccca

SEQ ID NO: 3050817 - RNA, 16 nt, Human
agucucacuguugccc

SEQ ID NO: 3050818 - RNA, 17 nt, Human
ugucccuuuuccuuuuu

SEQ ID NO: 3050819 - RNA, 13 nt, Human
uguccgagcuuug

SEQ ID NO: 3050820 - RNA, 14 nt, Human
uguccgagcuuuga

SEQ ID NO: 3050821 - RNA, 12 nt, Human
ugucgggcauga

SEQ ID NO: 3050822 - RNA, 15 nt, Human
ugucgcccagucugg

SEQ ID NO: 3050823 - RNA, 14 nt, Human
ugucgcccagucug

SEQ ID NO: 3050824 - RNA, 14 nt, Human
ugucgggcaugaca

SEQ ID NO: 3050825 - RNA, 15 nt, Human
ugucgggcaugacac

SEQ ID NO: 3050826 - RNA, 22 nt, Human
agucagaaguuucugccgcagc

SEQ ID NO: 3050827 - RNA, 23 nt, Human
agucagacuggauaguccgucuc

SEQ ID NO: 3050828 - RNA, 16 nt, Human
agucaggaaagagaac

SEQ ID NO: 3050829 - RNA, 15 nt, Human
agucaggaaagagaa

SEQ ID NO: 3050830 - RNA, 14 nt, Human
uggggaccagagcu

SEQ ID NO: 3050831 - RNA, 15 nt, Human
uggggaccagagcug

SEQ ID NO: 3050832 - RNA, 17 nt, Human
uggggaccagagcugcc

SEQ ID NO: 3050833 - RNA, 18 nt, Human
uggggaccagagcugcca

SEQ ID NO: 3050834 - RNA, 13 nt, Human
uggggaccucagg

SEQ ID NO: 3050835 - RNA, 18 nt, Human
ugggcuggguucuaccca

SEQ ID NO: 3050836 - RNA, 19 nt, Human
ugggcuggguucuacccag

SEQ ID NO: 3050837 - RNA, 14 nt, Human
uggggaaugaagau

SEQ ID NO: 3050838 - RNA, 15 nt, Human
uggggaaugaagaua

SEQ ID NO: 3050839 - RNA, 20 nt, Human
ugggcucccuucccaccucu

SEQ ID NO: 3050840 - RNA, 18 nt, Human
ugggcucccuucccaccu

SEQ ID NO: 3050841 - RNA, 19 nt, Human
ugggcucccuucccaccuc

SEQ ID NO: 3050842 - RNA, 15 nt, Human
ugggcucccuuccca

SEQ ID NO: 3050843 - RNA, 23 nt, Human
agggcuucugccauuucugagau

SEQ ID NO: 3050844 - RNA, 20 nt, Human
uggggcugcaccggcuggcc

SEQ ID NO: 3050845 - RNA, 14 nt, Human
ugggguacccacug

SEQ ID NO: 3050846 - RNA, 17 nt, Human
uggggucacucuggcag

SEQ ID NO: 3050847 - RNA, 18 nt, Human
uggggucacucuggcagc

SEQ ID NO: 3050848 - RNA, 20 nt, Human
ugggguacccacugcucugg

SEQ ID NO: 3050849 - RNA, 16 nt, Human
ugggguacccacugcu

SEQ ID NO: 3050850 - RNA, 15 nt, Human
ugggguacccacugc

SEQ ID NO: 3050851 - RNA, 14 nt, Human
uggggcccugccuc

SEQ ID NO: 3050852 - RNA, 12 nt, Human
uggggagaaagu

SEQ ID NO: 3050853 - RNA, 23 nt, Human
uggggaccucaggccugggggcu

SEQ ID NO: 3050854 - RNA, 18 nt, Human
uggggcggugagagggga

SEQ ID NO: 3050855 - RNA, 15 nt, Human
uggggcccugccucc

SEQ ID NO: 3050856 - RNA, 16 nt, Human
uggggcccugccuccu

SEQ ID NO: 3050857 - RNA, 18 nt, Human
agggcccagagagggugg

SEQ ID NO: 3050858 - RNA, 23 nt, Human
agggcccagagaggguggugacc

SEQ ID NO: 3050859 - RNA, 17 nt, Human
agggcagggacaggaua

SEQ ID NO: 3050860 - RNA, 15 nt, Human
agggagggcuucugc

SEQ ID NO: 3050861 - RNA, 19 nt, Human
agggagugacagaggcagc

SEQ ID NO: 3050862 - RNA, 18 nt, Human
agggagugacagaggcag

SEQ ID NO: 3050863 - RNA, 17 nt, Human
agggagugacagaggca

SEQ ID NO: 3050864 - RNA, 17 nt, Human
agggaggugaccccagg

SEQ ID NO: 3050865 - RNA, 16 nt, Human
ugggcaacccccagcc

SEQ ID NO: 3050866 - RNA, 18 nt, Human
ugggaggucaaggcugca

SEQ ID NO: 3050867 - RNA, 19 nt, Human
ugggaggucaaggcugcag

SEQ ID NO: 3050868 - RNA, 20 nt, Human
ugggaggucaaggcugcagu

SEQ ID NO: 3050869 - RNA, 23 nt, Human
ugggaggucaaggcugcagugag

SEQ ID NO: 3050870 - RNA, 17 nt, Human
ugggaggucaaggcugc

SEQ ID NO: 3050871 - RNA, 19 nt, Human
aggccuuccccuggcacug

SEQ ID NO: 3050872 - RNA, 17 nt, Human
aggccuuccccuggcac

SEQ ID NO: 3050873 - RNA, 13 nt, Human
ugggccaggagcc

SEQ ID NO: 3050874 - RNA, 14 nt, Human
ugggccaggagccu

SEQ ID NO: 3050875 - RNA, 16 nt, Human
ugggccaggagccucc

SEQ ID NO: 3050876 - RNA, 20 nt, Human
ugggcccaaugcacuuuguu

SEQ ID NO: 3050877 - RNA, 16 nt, Human
ugggccaccgccuugc

SEQ ID NO: 3050878 - RNA, 17 nt, Human
ugggccaccgccuugcc

SEQ ID NO: 3050879 - RNA, 23 nt, Human
ugggccaccgccuugcccagccu

SEQ ID NO: 3050880 - RNA, 20 nt, Human
ugggcaacccccagccugcu

SEQ ID NO: 3050881 - RNA, 17 nt, Human
ugggcaacccccagccu

SEQ ID NO: 3050882 - RNA, 23 nt, Human
agguauaauucacauuguauuca

SEQ ID NO: 3050883 - RNA, 17 nt, Human
agguaugcaaucaaauc

SEQ ID NO: 3050884 - RNA, 21 nt, Human
agguaugcaaucaaaucugcu

SEQ ID NO: 3050885 - RNA, 23 nt, Human
agguagaaauaucugaaaaugua

SEQ ID NO: 3050886 - RNA, 19 nt, Human
agguagaaauaucugaaaa

SEQ ID NO: 3050887 - RNA, 17 nt, Human
agguagaaauaucugaa

SEQ ID NO: 3050888 - RNA, 23 nt, Human
agguacuucaaauccuugaagau

SEQ ID NO: 3050889 - RNA, 17 nt, Human
aggguuggccccugccc

SEQ ID NO: 3050890 - RNA, 23 nt, Human
aggguuggccccugcccggcugc

SEQ ID NO: 3050891 - RNA, 18 nt, Human
aggguuggccccugcccg

SEQ ID NO: 3050892 - RNA, 18 nt, Human
aggucauauuaauauauu

SEQ ID NO: 3050893 - RNA, 19 nt, Human
aggucauauuaauauauuu

SEQ ID NO: 3050894 - RNA, 16 nt, Human
aggucauauuaauaua

SEQ ID NO: 3050895 - RNA, 12 nt, Human
aggucagagccu

SEQ ID NO: 3050896 - RNA, 17 nt, Human
aggucauuuuuuuuaag

SEQ ID NO: 3050897 - RNA, 22 nt, Human
uggucagauuugaacucuucaa

SEQ ID NO: 3050898 - RNA, 18 nt, Human
uggucaccaaaucagcug

SEQ ID NO: 3050899 - RNA, 14 nt, Human
uggucccaccccac

SEQ ID NO: 3050900 - RNA, 15 nt, Human
uggucccaccccaca

SEQ ID NO: 3050901 - RNA, 23 nt, Human
uggucucaaacucuugaccucag

SEQ ID NO: 3050902 - RNA, 17 nt, Human
uggucucaaacucuuga

SEQ ID NO: 3050903 - RNA, 16 nt, Human
uggucccaccccacac

SEQ ID NO: 3050904 - RNA, 19 nt, Human
uggucuacacugugcugag

SEQ ID NO: 3050905 - RNA, 16 nt, Human
uggucucaaacucuug

SEQ ID NO: 3050906 - RNA, 13 nt, Human
uggucccacccca

SEQ ID NO: 3050907 - RNA, 13 nt, Human
aggguuauaauaa

SEQ ID NO: 3050908 - RNA, 22 nt, Human
aggguguccggucccuguccca

SEQ ID NO: 3050909 - RNA, 21 nt, Human
aggguggugaccucugccuga

SEQ ID NO: 3050910 - RNA, 17 nt, Human
uggucugacccacugcu

SEQ ID NO: 3050911 - RNA, 16 nt, Human
uggucugacccacugc

SEQ ID NO: 3050912 - RNA, 21 nt, Human
ugggucgcccuggacugugug

SEQ ID NO: 3050913 - RNA, 15 nt, Human
ugggugcuuggagga

SEQ ID NO: 3050914 - RNA, 19 nt, Human
ugggugcuuggaggaagga

SEQ ID NO: 3050915 - RNA, 22 nt, Human
ugggugcuuggaggaaggaaac

SEQ ID NO: 3050916 - RNA, 22 nt, Human
uggguggcaccagcagccugga

SEQ ID NO: 3050917 - RNA, 21 nt, Human
agggucucacucugucgccca

SEQ ID NO: 3050918 - RNA, 22 nt, Human
agggucucacucugucgcccag

SEQ ID NO: 3050919 - RNA, 22 nt, Human
aggguggccacaccucuauccc

SEQ ID NO: 3050920 - RNA, 20 nt, Human
ugguaaggggaauugaggac

SEQ ID NO: 3050921 - RNA, 16 nt, Human
ugguacuaacuuuccu

SEQ ID NO: 3050922 - RNA, 23 nt, Human
aggggagcaaaaucgaugcagug

SEQ ID NO: 3050923 - RNA, 19 nt, Human
uggggucacucuggcagcu

SEQ ID NO: 3050924 - RNA, 18 nt, Human
aggggugggacacccugu

SEQ ID NO: 3050925 - RNA, 20 nt, Human
aggggugggacacccuguga

SEQ ID NO: 3050926 - RNA, 22 nt, Human
aggggugggacacccugugaug

SEQ ID NO: 3050927 - RNA, 17 nt, Human
aggggguggccucccaa

SEQ ID NO: 3050928 - RNA, 18 nt, Human
aggggguggccucccaac

SEQ ID NO: 3050929 - RNA, 15 nt, Human
aggggguggccuccc

SEQ ID NO: 3050930 - RNA, 23 nt, Human
agggucucacuauguugcccagg

SEQ ID NO: 3050931 - RNA, 22 nt, Human
agggucucacuauguugcccag

SEQ ID NO: 3050932 - RNA, 21 nt, Human
agggucucacuauguugccca

SEQ ID NO: 3050933 - RNA, 20 nt, Human
agggucucacuauguugccc

SEQ ID NO: 3050934 - RNA, 24 nt, Human
agggguucccuuuuuuggcugcug

SEQ ID NO: 3050935 - RNA, 13 nt, Human
ugcuguauuuuaa

SEQ ID NO: 3050936 - RNA, 21 nt, Human
ugcuguauuuuaaaagaauga

SEQ ID NO: 3050937 - RNA, 22 nt, Human
ugcuguauuuuaaaagaaugau

SEQ ID NO: 3050938 - RNA, 17 nt, Human
ugcugggauuacaggug

SEQ ID NO: 3050939 - RNA, 21 nt, Human
ugcugggauuacaagcgugag

SEQ ID NO: 3050940 - RNA, 21 nt, Human
ugcuggcuguuggcugggggc

SEQ ID NO: 3050941 - RNA, 19 nt, Human
ugcuggcuguuggcugggg

SEQ ID NO: 3050942 - RNA, 19 nt, Human
ugcugggauuacaagcgug

SEQ ID NO: 3050943 - RNA, 18 nt, Human
ugcuggcuguuggcuggg

SEQ ID NO: 3050944 - RNA, 11 nt, Human
ugcugcccugu

SEQ ID NO: 3050945 - RNA, 12 nt, Human
ugcugcccugcc

SEQ ID NO: 3050946 - RNA, 19 nt, Human
ugcugcccugcccaccugg

SEQ ID NO: 3050947 - RNA, 21 nt, Human
ugcugcccugcccaccuggcc

SEQ ID NO: 3050948 - RNA, 13 nt, Human
ugcugcccugccc

SEQ ID NO: 3050949 - RNA, 16 nt, Human
ugcugcccugcccacc

SEQ ID NO: 3050950 - RNA, 17 nt, Human
ugcugcccugcccaccu

SEQ ID NO: 3050951 - RNA, 18 nt, Human
ugcugcccugcccaccug

SEQ ID NO: 3050952 - RNA, 14 nt, Human
ugcuucaucccuuu

SEQ ID NO: 3050953 - RNA, 20 nt, Human
ugcuucaaggauccugagcc

SEQ ID NO: 3050954 - RNA, 21 nt, Human
ugcuucaaggauccugagcca

SEQ ID NO: 3050955 - RNA, 23 nt, Human
ugcuucaaggauccugagccaga

SEQ ID NO: 3050956 - RNA, 16 nt, Human
ugcuuccagugaggcu

SEQ ID NO: 3050957 - RNA, 18 nt, Human
aggacacuaaccacgcug

SEQ ID NO: 3050958 - RNA, 17 nt, Human
aggacacugauaugggu

SEQ ID NO: 3050959 - RNA, 17 nt, Human
ugcugucccuuuuccuu

SEQ ID NO: 3050960 - RNA, 19 nt, Human
ugcugucccuuacgugagu

SEQ ID NO: 3050961 - RNA, 15 nt, Human
ugcugucccuuuucc

SEQ ID NO: 3050962 - RNA, 17 nt, Human
ugcugucccuuacguga

SEQ ID NO: 3050963 - RNA, 23 nt, Human
agcuuuaucaaagggugaaaauu

SEQ ID NO: 3050964 - RNA, 19 nt, Human
ugcuaucucccccagcccc

SEQ ID NO: 3050965 - RNA, 20 nt, Human
ugcuaucucccccagcccca

SEQ ID NO: 3050966 - RNA, 18 nt, Human
ugcuaucucccccagccc

SEQ ID NO: 3050967 - RNA, 11 nt, Human
ugcucauggaa

SEQ ID NO: 3050968 - RNA, 16 nt, Human
ugcucuggacaggcau

SEQ ID NO: 3050969 - RNA, 15 nt, Human
ugcucuggacaggca

SEQ ID NO: 3050970 - RNA, 14 nt, Human
ugcucuggacaggc

SEQ ID NO: 3050971 - RNA, 22 nt, Human
ugcuccuaggacccgucuccag

SEQ ID NO: 3050972 - RNA, 14 nt, Human
ugcucauggaauug

SEQ ID NO: 3050973 - RNA, 15 nt, Human
aggaaaucaccgaaa

SEQ ID NO: 3050974 - RNA, 19 nt, Human
aggaaaucaccgaaaacgu

SEQ ID NO: 3050975 - RNA, 23 nt, Human
aggaaaucaaauaugcaaagcac

SEQ ID NO: 3050976 - RNA, 16 nt, Human
aggaagcacaugccuc

SEQ ID NO: 3050977 - RNA, 17 nt, Human
aggaagcacaugccucu

SEQ ID NO: 3050978 - RNA, 11 nt, Human
aggaagcacau

SEQ ID NO: 3050979 - RNA, 15 nt, Human
aggaaaggcuccagg

SEQ ID NO: 3050980 - RNA, 12 nt, Human
aggaaauauuua

SEQ ID NO: 3050981 - RNA, 13 nt, Human
aggaaaggcucca

SEQ ID NO: 3050982 - RNA, 14 nt, Human
aggaaaggcuccag

SEQ ID NO: 3050983 - RNA, 20 nt, Human
aggaaggaaacccagcucug

SEQ ID NO: 3050984 - RNA, 22 nt, Human
aggaaggaaacccagcucuggu

SEQ ID NO: 3050985 - RNA, 23 nt, Human
aggaaggaaacccagcucugguc

SEQ ID NO: 3050986 - RNA, 18 nt, Human
aggaagccagcaggcucu

SEQ ID NO: 3050987 - RNA, 18 nt, Human
aggaagccgcuggggcca

SEQ ID NO: 3050988 - RNA, 19 nt, Human
aggaagccgcuggggccag

SEQ ID NO: 3050989 - RNA, 20 nt, Human
aggaagccgcuggggccagu

SEQ ID NO: 3050990 - RNA, 22 nt, Human
aggaagccagcaggcucucagg

SEQ ID NO: 3050991 - RNA, 23 nt, Human
aggaagccagcaggcucucaggc

SEQ ID NO: 3050992 - RNA, 21 nt, Human
aggaagccagcaggcucucag

SEQ ID NO: 3050993 - RNA, 14 nt, Human
agcuugaggguugg

SEQ ID NO: 3050994 - RNA, 18 nt, Human
agcuugaggguugggcug

SEQ ID NO: 3050995 - RNA, 17 nt, Human
agcuugaaacugagaug

SEQ ID NO: 3050996 - RNA, 14 nt, Human
agcuguucagcugg

SEQ ID NO: 3050997 - RNA, 20 nt, Human
ugcuacaaaaacacagcaag

SEQ ID NO: 3050998 - RNA, 15 nt, Human
ugcuacaaaaacaca

SEQ ID NO: 3050999 - RNA, 19 nt, Human
ugcuacaaaaacacagcaa

SEQ ID NO: 3051000 - RNA, 18 nt, Human
ugcuacaaaaacacagca

SEQ ID NO: 3051001 - RNA, 17 nt, Human
ugcuacaaaaacacagc

SEQ ID NO: 3051002 - RNA, 16 nt, Human
ugcuacaaaaacacag

SEQ ID NO: 3051003 - RNA, 20 nt, Human
ugcgggcuuccuccuggugu

SEQ ID NO: 3051004 - RNA, 17 nt, Human
ugcggccuuuggcuuca

SEQ ID NO: 3051005 - RNA, 19 nt, Human
ugcggccuuuggcuucacg

SEQ ID NO: 3051006 - RNA, 17 nt, Human
ugcgguccacccaggag

SEQ ID NO: 3051007 - RNA, 17 nt, Human
ugcggugcuaucucccc

SEQ ID NO: 3051008 - RNA, 18 nt, Human
ugcgguccacccaggagc

SEQ ID NO: 3051009 - RNA, 22 nt, Human
ugcggacagccacggccaggcc

SEQ ID NO: 3051010 - RNA, 21 nt, Human
ugcggacagccacggccaggc

SEQ ID NO: 3051011 - RNA, 23 nt, Human
ugcggacagccacggccaggcca

SEQ ID NO: 3051012 - RNA, 13 nt, Human
ugcggagcacacu

SEQ ID NO: 3051013 - RNA, 15 nt, Human
ugcggagcacacugg

SEQ ID NO: 3051014 - RNA, 15 nt, Human
ugccugcccuauucu

SEQ ID NO: 3051015 - RNA, 16 nt, Human
ugccugcccaggcccc

SEQ ID NO: 3051016 - RNA, 24 nt, Human
ugccugcccaggccccugccaccc

SEQ ID NO: 3051017 - RNA, 12 nt, Human
ugccucugccuc

SEQ ID NO: 3051018 - RNA, 15 nt, Human
ugccugcccaggccc

SEQ ID NO: 3051019 - RNA, 14 nt, Human
ugccugcccaggcc

SEQ ID NO: 3051020 - RNA, 15 nt, Human
ugccucugccucuga

SEQ ID NO: 3051021 - RNA, 13 nt, Human
ugccugcccaggc

SEQ ID NO: 3051022 - RNA, 14 nt, Human
ugccucugccucug

SEQ ID NO: 3051023 - RNA, 13 nt, Human
ugccucugccucu

SEQ ID NO: 3051024 - RNA, 14 nt, Human
ugcccaggcagguc

SEQ ID NO: 3051025 - RNA, 13 nt, Human
ugcccaggcaggu

SEQ ID NO: 3051026 - RNA, 12 nt, Human
ugcccaggcagg

SEQ ID NO: 3051027 - RNA, 20 nt, Human
agcugccuguucagcuccag

SEQ ID NO: 3051028 - RNA, 14 nt, Human
ugccuggauggggc

SEQ ID NO: 3051029 - RNA, 15 nt, Human
ugccuggauggggcu

SEQ ID NO: 3051030 - RNA, 20 nt, Human
agcugcuugggcuucauccu

SEQ ID NO: 3051031 - RNA, 21 nt, Human
agcugccuguucagcuccagc

SEQ ID NO: 3051032 - RNA, 21 nt, Human
agcugcuugggcuucauccuc

SEQ ID NO: 3051033 - RNA, 19 nt, Human
agcugccuguucagcucca

SEQ ID NO: 3051034 - RNA, 21 nt, Human
agcugcuuuugucuaugggac

SEQ ID NO: 3051035 - RNA, 19 nt, Human
agcuguucacagccagacu

SEQ ID NO: 3051036 - RNA, 16 nt, Human
agcuguucacagccag

SEQ ID NO: 3051037 - RNA, 20 nt, Human
ugccuguucagcuccagcuc

SEQ ID NO: 3051038 - RNA, 18 nt, Human
ugccuguucagcuccagc

SEQ ID NO: 3051039 - RNA, 13 nt, Human
agcuguucagcug

SEQ ID NO: 3051040 - RNA, 17 nt, Human
ugccuguucagcuccag

SEQ ID NO: 3051041 - RNA, 15 nt, Human
ugccuuauggaacac

SEQ ID NO: 3051042 - RNA, 16 nt, Human
ugccuuauggaacacu

SEQ ID NO: 3051043 - RNA, 20 nt, Human
ugccuguugggccaggagcc

SEQ ID NO: 3051044 - RNA, 19 nt, Human
ugccuguugggccaggagc

SEQ ID NO: 3051045 - RNA, 21 nt, Human
ugccuguucagcuccagcuca

SEQ ID NO: 3051046 - RNA, 16 nt, Human
agcuguguggcagucu

SEQ ID NO: 3051047 - RNA, 14 nt, Human
agcuguguggcagu

SEQ ID NO: 3051048 - RNA, 21 nt, Human
agcugugcucuggacaggcau

SEQ ID NO: 3051049 - RNA, 20 nt, Human
agcugugcucuggacaggca

SEQ ID NO: 3051050 - RNA, 19 nt, Human
agcugugcucuggacaggc

SEQ ID NO: 3051051 - RNA, 15 nt, Human
uggacugugugcuca

SEQ ID NO: 3051052 - RNA, 17 nt, Human
uggacuuugcacacuuu

SEQ ID NO: 3051053 - RNA, 13 nt, Human
uggagaagaacug

SEQ ID NO: 3051054 - RNA, 13 nt, Human
uggagaagcggcu

SEQ ID NO: 3051055 - RNA, 22 nt, Human
uggagaagcggcuggcagccca

SEQ ID NO: 3051056 - RNA, 13 nt, Human
aggcaaucauggu

SEQ ID NO: 3051057 - RNA, 22 nt, Human
aggcacccaccaucaugucugg

SEQ ID NO: 3051058 - RNA, 21 nt, Human
aggcacccaccaucaugucug

SEQ ID NO: 3051059 - RNA, 20 nt, Human
aggcacccaccaucaugucu

SEQ ID NO: 3051060 - RNA, 14 nt, Human
aggcaaugcuggcu

SEQ ID NO: 3051061 - RNA, 15 nt, Human
aggcacccaccauca

SEQ ID NO: 3051062 - RNA, 17 nt, Human
aggaucucuugagccug

SEQ ID NO: 3051063 - RNA, 18 nt, Human
aggaucucuugagccugg

SEQ ID NO: 3051064 - RNA, 19 nt, Human
aggaucucuugagccuggg

SEQ ID NO: 3051065 - RNA, 12 nt, Human
aggaucucuuga

SEQ ID NO: 3051066 - RNA, 14 nt, Human
uggacacagcucuu

SEQ ID NO: 3051067 - RNA, 13 nt, Human
uggacacagcucu

SEQ ID NO: 3051068 - RNA, 22 nt, Human
uggacacagcucuucuccaggc

SEQ ID NO: 3051069 - RNA, 21 nt, Human
uggacacagcucuucuccagg

SEQ ID NO: 3051070 - RNA, 20 nt, Human
uggaccuugaacuggguacu

SEQ ID NO: 3051071 - RNA, 15 nt, Human
uggacccugaggccc

SEQ ID NO: 3051072 - RNA, 23 nt, Human
uggacccuguggaugauaaaaca

SEQ ID NO: 3051073 - RNA, 21 nt, Human
uggacccugaggcccagaggg

SEQ ID NO: 3051074 - RNA, 19 nt, Human
uggacccugaggcccagag

SEQ ID NO: 3051075 - RNA, 20 nt, Human
uggacccugaggcccagagg

SEQ ID NO: 3051076 - RNA, 16 nt, Human
uggacccugaggccca

SEQ ID NO: 3051077 - RNA, 18 nt, Human
uggacccugaggcccaga

SEQ ID NO: 3051078 - RNA, 23 nt, Human
uggacacagcucuucuccaggcu

SEQ ID NO: 3051079 - RNA, 21 nt, Human
ugcuugaggcaacucaucuua

SEQ ID NO: 3051080 - RNA, 13 nt, Human
ugcuuguacauaa

SEQ ID NO: 3051081 - RNA, 12 nt, Human
ugcuuguacaua

SEQ ID NO: 3051082 - RNA, 15 nt, Human
ugcuuggaggaagga

SEQ ID NO: 3051083 - RNA, 16 nt, Human
ugcuuggaggaaggaa

SEQ ID NO: 3051084 - RNA, 14 nt, Human
ugcuuggaggaagg

SEQ ID NO: 3051085 - RNA, 17 nt, Human
ugcuuuuggucugugug

SEQ ID NO: 3051086 - RNA, 14 nt, Human
ugcuuuuggucugu

SEQ ID NO: 3051087 - RNA, 13 nt, Human
uggaaaggcagcu

SEQ ID NO: 3051088 - RNA, 16 nt, Human
ugcuuugugauuuuug

SEQ ID NO: 3051089 - RNA, 14 nt, Human
ugcuuugugauuuu

SEQ ID NO: 3051090 - RNA, 12 nt, Human
ugcuuugugauu

SEQ ID NO: 3051091 - RNA, 16 nt, Human
ugcuuguacauaaugc

SEQ ID NO: 3051092 - RNA, 14 nt, Human
ugcuuguacauaau

SEQ ID NO: 3051093 - RNA, 22 nt, Human
ugcuuguacauaaugcgugcau

SEQ ID NO: 3051094 - RNA, 13 nt, Human
uggaagguauuua

SEQ ID NO: 3051095 - RNA, 17 nt, Human
uggaagguauuuaauag

SEQ ID NO: 3051096 - RNA, 17 nt, Human
uggaaaugggcagagca

SEQ ID NO: 3051097 - RNA, 13 nt, Human
aggauccugagcc

SEQ ID NO: 3051098 - RNA, 14 nt, Human
aggauccugagcca

SEQ ID NO: 3051099 - RNA, 17 nt, Human
uggauuauauuaugaag

SEQ ID NO: 3051100 - RNA, 13 nt, Human
uggauuguccccg

SEQ ID NO: 3051101 - RNA, 14 nt, Human
uggaguauauguca

SEQ ID NO: 3051102 - RNA, 16 nt, Human
aggccaaaggaagcac

SEQ ID NO: 3051103 - RNA, 18 nt, Human
aggccaaaggaagcacau

SEQ ID NO: 3051104 - RNA, 19 nt, Human
aggccaaaggaagcacaug

SEQ ID NO: 3051105 - RNA, 15 nt, Human
aggccaaaggaagca

SEQ ID NO: 3051106 - RNA, 17 nt, Human
aggcagccccauucugc

SEQ ID NO: 3051107 - RNA, 16 nt, Human
aggcagccccauucug

SEQ ID NO: 3051108 - RNA, 18 nt, Human
aggcagccaggccacaag

SEQ ID NO: 3051109 - RNA, 16 nt, Human
aggccaaggugggagg

SEQ ID NO: 3051110 - RNA, 13 nt, Human
uggcagccuuggc

SEQ ID NO: 3051111 - RNA, 19 nt, Human
uggcacaguuuucugagaa

SEQ ID NO: 3051112 - RNA, 18 nt, Human
uggcacaguuuucugaga

SEQ ID NO: 3051113 - RNA, 17 nt, Human
aggccacaagacccuug

SEQ ID NO: 3051114 - RNA, 18 nt, Human
aggccacaagacccuugu

SEQ ID NO: 3051115 - RNA, 19 nt, Human
aggccacaagacccuugug

SEQ ID NO: 3051116 - RNA, 14 nt, Human
aggccagagggagu

SEQ ID NO: 3051117 - RNA, 16 nt, Human
aggccacaagacccuu

SEQ ID NO: 3051118 - RNA, 19 nt, Human
uggcagcucaccucucccu

SEQ ID NO: 3051119 - RNA, 15 nt, Human
uggcagcucaccucu

SEQ ID NO: 3051120 - RNA, 17 nt, Human
uggcagccuuggcaaac

SEQ ID NO: 3051121 - RNA, 20 nt, Human
aggccagagggagugacaga

SEQ ID NO: 3051122 - RNA, 21 nt, Human
aggcccagagggccugcaagg

SEQ ID NO: 3051123 - RNA, 16 nt, Human
aggccccgcccaggcu

SEQ ID NO: 3051124 - RNA, 16 nt, Human
uggcauauuuuucaca

SEQ ID NO: 3051125 - RNA, 17 nt, Human
uggcauauuuuucacau

SEQ ID NO: 3051126 - RNA, 17 nt, Human
aggccccgcccaggcuu

SEQ ID NO: 3051127 - RNA, 23 nt, Human
uggccagugugacaaggauugcu

SEQ ID NO: 3051128 - RNA, 23 nt, Human
uggccaaagccaaagcuaggccu

SEQ ID NO: 3051129 - RNA, 21 nt, Human
uggccaaagccaaagcuaggc

SEQ ID NO: 3051130 - RNA, 18 nt, Human
uggccuggccccucaggg

SEQ ID NO: 3051131 - RNA, 21 nt, Human
uggccuggccccucagggucc

SEQ ID NO: 3051132 - RNA, 12 nt, Human
uggccuggcccc

SEQ ID NO: 3051133 - RNA, 12 nt, Human
aggccuggggac

SEQ ID NO: 3051134 - RNA, 18 nt, Human
aggccugggggcugggca

SEQ ID NO: 3051135 - RNA, 20 nt, Human
aggccugggggcugggcaga

SEQ ID NO: 3051136 - RNA, 13 nt, Human
uggccucuucaga

SEQ ID NO: 3051137 - RNA, 23 nt, Human
uggccgggcgcgguggcucacgc

SEQ ID NO: 3051138 - RNA, 13 nt, Human
agccuguuuaaga

SEQ ID NO: 3051139 - RNA, 22 nt, Human
agccuuagaagucacacaguau

SEQ ID NO: 3051140 - RNA, 21 nt, Human
agccugugccucugggacugg

SEQ ID NO: 3051141 - RNA, 19 nt, Human
agccugugccucugggacu

SEQ ID NO: 3051142 - RNA, 22 nt, Human
agccugggugacagagcaagug

SEQ ID NO: 3051143 - RNA, 19 nt, Human
agccugcuccagcuguuca

SEQ ID NO: 3051144 - RNA, 22 nt, Human
agccugcuccagcuguucagcu

SEQ ID NO: 3051145 - RNA, 12 nt, Human
ugcauaccacuu

SEQ ID NO: 3051146 - RNA, 14 nt, Human
agccugcuccagcu

SEQ ID NO: 3051147 - RNA, 15 nt, Human
agccugcuccagcug

SEQ ID NO: 3051148 - RNA, 16 nt, Human
agccugcuccagcugu

SEQ ID NO: 3051149 - RNA, 17 nt, Human
agccugcuccagcuguu

SEQ ID NO: 3051150 - RNA, 11 nt, Human
agccuuccagg

SEQ ID NO: 3051151 - RNA, 14 nt, Human
agccuuccaggggu

SEQ ID NO: 3051152 - RNA, 16 nt, Human
agccuuccaggggugg

SEQ ID NO: 3051153 - RNA, 17 nt, Human
agccuuccagggguggg

SEQ ID NO: 3051154 - RNA, 20 nt, Human
agccuuggggcugaugcagu

SEQ ID NO: 3051155 - RNA, 16 nt, Human
agcggagaaaggaagg

SEQ ID NO: 3051156 - RNA, 20 nt, Human
agcggagaaaggaagggcug

SEQ ID NO: 3051157 - RNA, 18 nt, Human
agcggagacggaguccca

SEQ ID NO: 3051158 - RNA, 20 nt, Human
ugcauuaucuagauacugua

SEQ ID NO: 3051159 - RNA, 22 nt, Human
ugcauuaucuagauacuguauc

SEQ ID NO: 3051160 - RNA, 21 nt, Human
ugcauuaucuagauacuguau

SEQ ID NO: 3051161 - RNA, 18 nt, Human
ugcauuaucuagauacug

SEQ ID NO: 3051162 - RNA, 18 nt, Human
ugccaaugggagcucaug

SEQ ID NO: 3051163 - RNA, 15 nt, Human
agcgugcauaaguua

SEQ ID NO: 3051164 - RNA, 22 nt, Human
agcgugagccacugcaccgggc

SEQ ID NO: 3051165 - RNA, 19 nt, Human
agcgugagccacugcaccg

SEQ ID NO: 3051166 - RNA, 18 nt, Human
agcuagacgagcaggcuu

SEQ ID NO: 3051167 - RNA, 13 nt, Human
agcuagaauuuga

SEQ ID NO: 3051168 - RNA, 16 nt, Human
agcuagaauuugauau

SEQ ID NO: 3051169 - RNA, 17 nt, Human
agcuacuugggaggcug

SEQ ID NO: 3051170 - RNA, 18 nt, Human
agcuacuugggaggcuga

SEQ ID NO: 3051171 - RNA, 18 nt, Human
agcuaggaauuguguuua

SEQ ID NO: 3051172 - RNA, 12 nt, Human
agcuaggccugg

SEQ ID NO: 3051173 - RNA, 15 nt, Human
agcuaggccuggcca

SEQ ID NO: 3051174 - RNA, 14 nt, Human
agcuaggccuggcc

SEQ ID NO: 3051175 - RNA, 17 nt, Human
agcucaggugucccugc

SEQ ID NO: 3051176 - RNA, 18 nt, Human
agcucaggugucccugca

SEQ ID NO: 3051177 - RNA, 21 nt, Human
agcucaggugucccugcacuu

SEQ ID NO: 3051178 - RNA, 20 nt, Human
agcucaggugucccugcacu

SEQ ID NO: 3051179 - RNA, 22 nt, Human
agcucaggugucccugcacuug

SEQ ID NO: 3051180 - RNA, 21 nt, Human
ugcccagccccuucugaccca

SEQ ID NO: 3051181 - RNA, 20 nt, Human
ugcccagccccuucugaccc

SEQ ID NO: 3051182 - RNA, 21 nt, Human
ugcccagccuggaugccaucc

SEQ ID NO: 3051183 - RNA, 18 nt, Human
ugcccagccuggaugcca

SEQ ID NO: 3051184 - RNA, 20 nt, Human
ugcccagccuggaugccauc

SEQ ID NO: 3051185 - RNA, 14 nt, Human
ugcccagccuggau

SEQ ID NO: 3051186 - RNA, 16 nt, Human
ugcccagccuggaugc

SEQ ID NO: 3051187 - RNA, 17 nt, Human
ugcccagccuggaugcc

SEQ ID NO: 3051188 - RNA, 16 nt, Human
ugcccacaggaucagu

SEQ ID NO: 3051189 - RNA, 19 nt, Human
ugcccacaggaucagucug

SEQ ID NO: 3051190 - RNA, 20 nt, Human
ugcccacaggaucagucuga

SEQ ID NO: 3051191 - RNA, 21 nt, Human
agcucauucuccuuguguuac

SEQ ID NO: 3051192 - RNA, 20 nt, Human
agcucauucuccuuguguua

SEQ ID NO: 3051193 - RNA, 20 nt, Human
ugauucuccugccucagccu

SEQ ID NO: 3051194 - RNA, 13 nt, Human
ugauucuccugcc

SEQ ID NO: 3051195 - RNA, 15 nt, Human
ugauucuccugccuc

SEQ ID NO: 3051196 - RNA, 19 nt, Human
ugauucuccugccucagcc

SEQ ID NO: 3051197 - RNA, 21 nt, Human
agccccaaaacucuccucugc

SEQ ID NO: 3051198 - RNA, 22 nt, Human
agccccaaaacucuccucugcu

SEQ ID NO: 3051199 - RNA, 20 nt, Human
agccccaaaacucuccucug

SEQ ID NO: 3051200 - RNA, 18 nt, Human
agcccauggcacucuaug

SEQ ID NO: 3051201 - RNA, 19 nt, Human
agccccuggaugcagccuc

SEQ ID NO: 3051202 - RNA, 17 nt, Human
agccccuggaugcagcc

SEQ ID NO: 3051203 - RNA, 18 nt, Human
agccccuggaugcagccu

SEQ ID NO: 3051204 - RNA, 18 nt, Human
agccccgugggguuccuc

SEQ ID NO: 3051205 - RNA, 23 nt, Human
agccccauucugccugcccaggc

SEQ ID NO: 3051206 - RNA, 16 nt, Human
agccccgaggccuucu

SEQ ID NO: 3051207 - RNA, 22 nt, Human
agccccgaggccuucucugaag

SEQ ID NO: 3051208 - RNA, 17 nt, Human
agccccgaggccuucuc

SEQ ID NO: 3051209 - RNA, 21 nt, Human
agcccugguggcagugggagc

SEQ ID NO: 3051210 - RNA, 20 nt, Human
agccccuucugacccaugcu

SEQ ID NO: 3051211 - RNA, 24 nt, Human
agccccuucugacccaugcugccc

SEQ ID NO: 3051212 - RNA, 18 nt, Human
ugcacaagcugcacccuc

SEQ ID NO: 3051213 - RNA, 21 nt, Human
ugcacaagcugcacccucagg

SEQ ID NO: 3051214 - RNA, 22 nt, Human
ugcacacaccagagcccaccuu

SEQ ID NO: 3051215 - RNA, 14 nt, Human
ugcacaagcugcac

SEQ ID NO: 3051216 - RNA, 15 nt, Human
ugcacaagcugcacc

SEQ ID NO: 3051217 - RNA, 23 nt, Human
agcccugguggcagugggagcug

SEQ ID NO: 3051218 - RNA, 22 nt, Human
agcccugguggcagugggagcu

SEQ ID NO: 3051219 - RNA, 15 nt, Human
ugcacgugugugcac

SEQ ID NO: 3051220 - RNA, 14 nt, Human
ugcacgugugugca

SEQ ID NO: 3051221 - RNA, 16 nt, Human
ugcacccucaggcagg

SEQ ID NO: 3051222 - RNA, 17 nt, Human
ugcacccucaggcaggu

SEQ ID NO: 3051223 - RNA, 20 nt, Human
ugcacacauuuuuuaaaugc

SEQ ID NO: 3051224 - RNA, 10 nt, Human
ugcacacauu

SEQ ID NO: 3051225 - RNA, 16 nt, Human
ugcaggucccuaauaa

SEQ ID NO: 3051226 - RNA, 15 nt, Human
ugcaggucccuaaua

SEQ ID NO: 3051227 - RNA, 14 nt, Human
ugcaggucccuaau

SEQ ID NO: 3051228 - RNA, 12 nt, Human
ugcaggucccua

SEQ ID NO: 3051229 - RNA, 23 nt, Human
ugcauaacguauaaaagccuguu

SEQ ID NO: 3051230 - RNA, 22 nt, Human
ugcauaacguauaaaagccugu

SEQ ID NO: 3051231 - RNA, 17 nt, Human
ugcauaaguuaacuucc

SEQ ID NO: 3051232 - RNA, 14 nt, Human
ugcauaaguuaacu

SEQ ID NO: 3051233 - RNA, 11 nt, Human
ugcaggucccu

SEQ ID NO: 3051234 - RNA, 16 nt, Human
ugcagccucacagucc

SEQ ID NO: 3051235 - RNA, 13 nt, Human
ugcagccucacag

SEQ ID NO: 3051236 - RNA, 15 nt, Human
ugcagccucacaguc

SEQ ID NO: 3051237 - RNA, 22 nt, Human
agccugaaagaggaaugaagua

SEQ ID NO: 3051238 - RNA, 23 nt, Human
ugcagccucaaccuccugggcua

SEQ ID NO: 3051239 - RNA, 23 nt, Human
agcccuucuaccuuccugcaaca

SEQ ID NO: 3051240 - RNA, 23 nt, Human
ugcacuauagccuaggugacaga

SEQ ID NO: 3051241 - RNA, 22 nt, Human
ugcacuauagccuaggugacag

SEQ ID NO: 3051242 - RNA, 23 nt, Human
agccucagcauccuggcacccgg

SEQ ID NO: 3051243 - RNA, 22 nt, Human
agccucagcauccuggcacccg

SEQ ID NO: 3051244 - RNA, 15 nt, Human
agccucauguccacu

SEQ ID NO: 3051245 - RNA, 16 nt, Human
agccucccaaagugcu

SEQ ID NO: 3051246 - RNA, 20 nt, Human
agccucauguccacugguuc

SEQ ID NO: 3051247 - RNA, 16 nt, Human
agccucagcauccugg

SEQ ID NO: 3051248 - RNA, 21 nt, Human
agccucagcauccuggcaccc

SEQ ID NO: 3051249 - RNA, 20 nt, Human
agccucagcauccuggcacc

SEQ ID NO: 3051250 - RNA, 19 nt, Human
agccucagcauccuggcac

SEQ ID NO: 3051251 - RNA, 17 nt, Human
agccucagcauccuggc

SEQ ID NO: 3051252 - RNA, 15 nt, Human
agccacggccaggcc

SEQ ID NO: 3051253 - RNA, 17 nt, Human
ugaugaagaaguugaua

SEQ ID NO: 3051254 - RNA, 14 nt, Human
agccacauuccuga

SEQ ID NO: 3051255 - RNA, 18 nt, Human
agccacauuccugaugcu

SEQ ID NO: 3051256 - RNA, 20 nt, Human
agccaccaacauacucccau

SEQ ID NO: 3051257 - RNA, 23 nt, Human
agccaccaacauacucccaucug

SEQ ID NO: 3051258 - RNA, 19 nt, Human
agccaccaacauacuccca

SEQ ID NO: 3051259 - RNA, 14 nt, Human
agccacggccaggc

SEQ ID NO: 3051260 - RNA, 15 nt, Human
ugauuaauuaaaaca

SEQ ID NO: 3051261 - RNA, 12 nt, Human
ugauuaaaccaa

SEQ ID NO: 3051262 - RNA, 14 nt, Human
ugauuaccagggac

SEQ ID NO: 3051263 - RNA, 22 nt, Human
agccacugcaccgggccacaga

SEQ ID NO: 3051264 - RNA, 21 nt, Human
agccacugcaccgggccacag

SEQ ID NO: 3051265 - RNA, 13 nt, Human
agccacugcaccg

SEQ ID NO: 3051266 - RNA, 20 nt, Human
agccacugcaccgggccaca

SEQ ID NO: 3051267 - RNA, 14 nt, Human
ugaugauccuaggc

SEQ ID NO: 3051268 - RNA, 20 nt, Human
ugaugauccuaggcauuugc

SEQ ID NO: 3051269 - RNA, 14 nt, Human
ugaugaucuuuaaa

SEQ ID NO: 3051270 - RNA, 17 nt, Human
ugauggugcaaugaccu

SEQ ID NO: 3051271 - RNA, 23 nt, Human
ugauggugcaaugaccuuucaau

SEQ ID NO: 3051272 - RNA, 16 nt, Human
ugauggugcaaugacc

SEQ ID NO: 3051273 - RNA, 18 nt, Human
ugauguuuuaaggaugcu

SEQ ID NO: 3051274 - RNA, 17 nt, Human
ugauguuuuaaggaugc

SEQ ID NO: 3051275 - RNA, 23 nt, Human
ugauguuuuccaugaguccccug

SEQ ID NO: 3051276 - RNA, 22 nt, Human
ugauguuuagaaacacaacuau

SEQ ID NO: 3051277 - RNA, 22 nt, Human
agccaggcccuugucggcccca

SEQ ID NO: 3051278 - RNA, 21 nt, Human
agccaggccacaagacccuug

SEQ ID NO: 3051279 - RNA, 22 nt, Human
agccaggccacaagacccuugu

SEQ ID NO: 3051280 - RNA, 12 nt, Human
agccagggucuc

SEQ ID NO: 3051281 - RNA, 22 nt, Human
agccaguaaaugggggugcauu

SEQ ID NO: 3051282 - RNA, 23 nt, Human
agccaguaaaugggggugcauuu

SEQ ID NO: 3051283 - RNA, 12 nt, Human
agccaggccaca

SEQ ID NO: 3051284 - RNA, 14 nt, Human
agccaggccacaag

SEQ ID NO: 3051285 - RNA, 14 nt, Human
agccagacuggcac

SEQ ID NO: 3051286 - RNA, 22 nt, Human
agcccacuucugccauauucug

SEQ ID NO: 3051287 - RNA, 19 nt, Human
agcccaggaaaggcuccag

SEQ ID NO: 3051288 - RNA, 20 nt, Human
agcccaggaaaggcuccagg

SEQ ID NO: 3051289 - RNA, 21 nt, Human
agcccaggaaaggcuccagga

SEQ ID NO: 3051290 - RNA, 21 nt, Human
ugauucccaagcucugcuccu

SEQ ID NO: 3051291 - RNA, 19 nt, Human
ugauucccaagcucugcuc

SEQ ID NO: 3051292 - RNA, 18 nt, Human
ugauucccaagcucugcu

SEQ ID NO: 3051293 - RNA, 16 nt, Human
ugauucccaagcucug

SEQ ID NO: 3051294 - RNA, 15 nt, Human
ugauucccaagcucu

SEQ ID NO: 3051295 - RNA, 22 nt, Human
agcccaggaaaggcuccaggag

SEQ ID NO: 3051296 - RNA, 23 nt, Human
agcccaggaaaggcuccaggagc

SEQ ID NO: 3051297 - RNA, 24 nt, Human
agcccaggaaaggcuccaggagca

SEQ ID NO: 3051298 - RNA, 18 nt, Human
agcccaggaaaggcucca

SEQ ID NO: 3051299 - RNA, 13 nt, Human
ugauucagcucug

SEQ ID NO: 3051300 - RNA, 14 nt, Human
ugauucagcucugc

SEQ ID NO: 3051301 - RNA, 23 nt, Human
ugagugggggaucacagccucug

SEQ ID NO: 3051302 - RNA, 21 nt, Human
ugagugggugaauaauacagu

SEQ ID NO: 3051303 - RNA, 16 nt, Human
ugagugccuuacacaa

SEQ ID NO: 3051304 - RNA, 17 nt, Human
ugagugccuuacacaau

SEQ ID NO: 3051305 - RNA, 20 nt, Human
ugagugccuuacacaauggu

SEQ ID NO: 3051306 - RNA, 17 nt, Human
ugagucaccaagcccag

SEQ ID NO: 3051307 - RNA, 16 nt, Human
ugagucaccaagccca

SEQ ID NO: 3051308 - RNA, 14 nt, Human
ugagucaccaagcc

SEQ ID NO: 3051309 - RNA, 19 nt, Human
ugauacgcaacauaauuaa

SEQ ID NO: 3051310 - RNA, 17 nt, Human
ugauacuacaguuuguu

SEQ ID NO: 3051311 - RNA, 14 nt, Human
ugauacuacaguuu

SEQ ID NO: 3051312 - RNA, 21 nt, Human
ugauacaaugcugugcccuaa

SEQ ID NO: 3051313 - RNA, 12 nt, Human
ugauacagaaaa

SEQ ID NO: 3051314 - RNA, 20 nt, Human
ugauacaaugcugugcccua

SEQ ID NO: 3051315 - RNA, 18 nt, Human
ugauacaaugcugugccc

SEQ ID NO: 3051316 - RNA, 12 nt, Human
ugauaaguaaau

SEQ ID NO: 3051317 - RNA, 20 nt, Human
ugauaagaaccuuuugagug

SEQ ID NO: 3051318 - RNA, 17 nt, Human
ugaguucauacccuguu

SEQ ID NO: 3051319 - RNA, 21 nt, Human
agcauaauacuugcuuuggaa

SEQ ID NO: 3051320 - RNA, 15 nt, Human
agcauacguacacau

SEQ ID NO: 3051321 - RNA, 23 nt, Human
agcauaaauguugacaugggaca

SEQ ID NO: 3051322 - RNA, 12 nt, Human
ugagaauuaccc

SEQ ID NO: 3051323 - RNA, 19 nt, Human
agcauacguacacauuuua

SEQ ID NO: 3051324 - RNA, 18 nt, Human
agcauacguacacauuuu

SEQ ID NO: 3051325 - RNA, 17 nt, Human
agcauacguacacauuu

SEQ ID NO: 3051326 - RNA, 16 nt, Human
agcauacguacacauu

SEQ ID NO: 3051327 - RNA, 21 nt, Human
agcauacguacacauuuuauu

SEQ ID NO: 3051328 - RNA, 20 nt, Human
agcauacguacacauuuuau

SEQ ID NO: 3051329 - RNA, 22 nt, Human
ugaguaacugauuuguaacaag

SEQ ID NO: 3051330 - RNA, 15 nt, Human
ugaguacuacagucc

SEQ ID NO: 3051331 - RNA, 14 nt, Human
agcauauucaggaa

SEQ ID NO: 3051332 - RNA, 17 nt, Human
ugaguacuacaguccuc

SEQ ID NO: 3051333 - RNA, 21 nt, Human
ugaguacuacaguccucccau

SEQ ID NO: 3051334 - RNA, 22 nt, Human
ugaguacuacaguccucccauc

SEQ ID NO: 3051335 - RNA, 23 nt, Human
ugaguacuacaguccucccaucu

SEQ ID NO: 3051336 - RNA, 14 nt, Human
ugaguacuacaguc

SEQ ID NO: 3051337 - RNA, 15 nt, Human
ugauaugugaacagu

SEQ ID NO: 3051338 - RNA, 16 nt, Human
ugauaugugaacaguu

SEQ ID NO: 3051339 - RNA, 12 nt, Human
ugauaugggucu

SEQ ID NO: 3051340 - RNA, 19 nt, Human
ugaucacggcucacugcag

SEQ ID NO: 3051341 - RNA, 18 nt, Human
ugaucacggcucacugca

SEQ ID NO: 3051342 - RNA, 13 nt, Human
agcaucaggccag

SEQ ID NO: 3051343 - RNA, 12 nt, Human
agcaucaggcca

SEQ ID NO: 3051344 - RNA, 21 nt, Human
ugaucacggcucacugcagcc

SEQ ID NO: 3051345 - RNA, 20 nt, Human
ugaucacggcucacugcagc

SEQ ID NO: 3051346 - RNA, 22 nt, Human
agcauauucaggaagcucaggg

SEQ ID NO: 3051347 - RNA, 17 nt, Human
agcaugucgucaaagcu

SEQ ID NO: 3051348 - RNA, 20 nt, Human
agcaugucgucaaagcugaa

SEQ ID NO: 3051349 - RNA, 12 nt, Human
agcauggcugcc

SEQ ID NO: 3051350 - RNA, 18 nt, Human
agcauggcauauuuuuca

SEQ ID NO: 3051351 - RNA, 19 nt, Human
agcauggcauauuuuucac

SEQ ID NO: 3051352 - RNA, 21 nt, Human
agcauggcauauuuuucacau

SEQ ID NO: 3051353 - RNA, 22 nt, Human
agcauggcauauuuuucacaua

SEQ ID NO: 3051354 - RNA, 19 nt, Human
agcaucaggccaggcccuc

SEQ ID NO: 3051355 - RNA, 20 nt, Human
agcaucaggccaggcccucu

SEQ ID NO: 3051356 - RNA, 14 nt, Human
agcaucaggccagg

SEQ ID NO: 3051357 - RNA, 16 nt, Human
agcaucaggccaggcc

SEQ ID NO: 3051358 - RNA, 17 nt, Human
agcaucaggccaggccc

SEQ ID NO: 3051359 - RNA, 18 nt, Human
agcaucaggccaggcccu

SEQ ID NO: 3051360 - RNA, 18 nt, Human
agcauuguaaaugugcuu

SEQ ID NO: 3051361 - RNA, 17 nt, Human
agcauuguaaaugugcu

SEQ ID NO: 3051362 - RNA, 18 nt, Human
ugaccugaggcccuucuc

SEQ ID NO: 3051363 - RNA, 19 nt, Human
ugaccugaggcccuucucu

SEQ ID NO: 3051364 - RNA, 17 nt, Human
ugaccugaggcccuucu

SEQ ID NO: 3051365 - RNA, 13 nt, Human
ugacuuacuguac

SEQ ID NO: 3051366 - RNA, 16 nt, Human
ugacuuacuguacaug

SEQ ID NO: 3051367 - RNA, 15 nt, Human
ugacuuacuguacau

SEQ ID NO: 3051368 - RNA, 15 nt, Human
agauggaaugcugug

SEQ ID NO: 3051369 - RNA, 13 nt, Human
agauggaaugcug

SEQ ID NO: 3051370 - RNA, 18 nt, Human
agauggaaugcuguguua

SEQ ID NO: 3051371 - RNA, 14 nt, Human
ugacccaugcugcc

SEQ ID NO: 3051372 - RNA, 15 nt, Human
ugacccaugcugccc

SEQ ID NO: 3051373 - RNA, 12 nt, Human
ugacccaugcug

SEQ ID NO: 3051374 - RNA, 16 nt, Human
ugacccaugcugcccu

SEQ ID NO: 3051375 - RNA, 21 nt, Human
ugacccaugcugcccugugag

SEQ ID NO: 3051376 - RNA, 16 nt, Human
agaugccgcauuugga

SEQ ID NO: 3051377 - RNA, 16 nt, Human
agaugcaguucugaag

SEQ ID NO: 3051378 - RNA, 17 nt, Human
ugacacuuaaaaauggu

SEQ ID NO: 3051379 - RNA, 16 nt, Human
ugacacuuaaaaaugg

SEQ ID NO: 3051380 - RNA, 13 nt, Human
agauuggaaggaa

SEQ ID NO: 3051381 - RNA, 15 nt, Human
agauucccugagcag

SEQ ID NO: 3051382 - RNA, 15 nt, Human
ugacuucuaaguaaa

SEQ ID NO: 3051383 - RNA, 23 nt, Human
ugacuucuaaguaaaaccacagc

SEQ ID NO: 3051384 - RNA, 22 nt, Human
ugacuucuaaguaaaaccacag

SEQ ID NO: 3051385 - RNA, 22 nt, Human
agauucauauuuacuucuuaua

SEQ ID NO: 3051386 - RNA, 19 nt, Human
agauucauauuuacuucuu

SEQ ID NO: 3051387 - RNA, 21 nt, Human
agauuuugaaauuuuuauuaa

SEQ ID NO: 3051388 - RNA, 17 nt, Human
agauuugaacucuucaa

SEQ ID NO: 3051389 - RNA, 17 nt, Human
agcaagacgcugugcug

SEQ ID NO: 3051390 - RNA, 20 nt, Human
agcaagacgcugugcugccc

SEQ ID NO: 3051391 - RNA, 21 nt, Human
agcaagacgcugugcugcccu

SEQ ID NO: 3051392 - RNA, 22 nt, Human
agcaagacgcugugcugcccug

SEQ ID NO: 3051393 - RNA, 23 nt, Human
agcaagacgcugugcugcccugc

SEQ ID NO: 3051394 - RNA, 13 nt, Human
agcaagacgcugu

SEQ ID NO: 3051395 - RNA, 16 nt, Human
agcaagacgcugugcu

SEQ ID NO: 3051396 - RNA, 23 nt, Human
agcaacgcaggcccccaggugcc

SEQ ID NO: 3051397 - RNA, 23 nt, Human
ugaauuugugaagguggaaauaa

SEQ ID NO: 3051398 - RNA, 21 nt, Human
ugaauuugugaagguggaaau

SEQ ID NO: 3051399 - RNA, 13 nt, Human
ugaauuugugaag

SEQ ID NO: 3051400 - RNA, 23 nt, Human
ugaauuucuuuugccguuauuaa

SEQ ID NO: 3051401 - RNA, 20 nt, Human
ugacacaugcaaggucauuu

SEQ ID NO: 3051402 - RNA, 12 nt, Human
ugacacaugcaa

SEQ ID NO: 3051403 - RNA, 18 nt, Human
ugacacacagcucugucc

SEQ ID NO: 3051404 - RNA, 16 nt, Human
ugacacacagcucugu

SEQ ID NO: 3051405 - RNA, 19 nt, Human
ugacaaagacugaguacgu

SEQ ID NO: 3051406 - RNA, 19 nt, Human
ugacacacagcucuguccu

SEQ ID NO: 3051407 - RNA, 20 nt, Human
agaguauuuuugacagaaua

SEQ ID NO: 3051408 - RNA, 15 nt, Human
agagucacuggaaca

SEQ ID NO: 3051409 - RNA, 17 nt, Human
agaguuguuacauuuuu

SEQ ID NO: 3051410 - RNA, 16 nt, Human
agaguuguuacauuuu

SEQ ID NO: 3051411 - RNA, 20 nt, Human
agaguuguuacauuuuuaag

SEQ ID NO: 3051412 - RNA, 19 nt, Human
agaguuguuacauuuuuaa

SEQ ID NO: 3051413 - RNA, 18 nt, Human
agauaauacaccacuaca

SEQ ID NO: 3051414 - RNA, 16 nt, Human
agauacuguaucauga

SEQ ID NO: 3051415 - RNA, 15 nt, Human
agauacuguaucaug

SEQ ID NO: 3051416 - RNA, 21 nt, Human
agauauuuugcuuugugauuu

SEQ ID NO: 3051417 - RNA, 20 nt, Human
agauauuuugcuuugugauu

SEQ ID NO: 3051418 - RNA, 18 nt, Human
agaucaaaagguuaauaa

SEQ ID NO: 3051419 - RNA, 18 nt, Human
agauaauauuaaggaaga

SEQ ID NO: 3051420 - RNA, 22 nt, Human
agauaauauuaaggaagacaau

SEQ ID NO: 3051421 - RNA, 13 nt, Human
agauacaguuacu

SEQ ID NO: 3051422 - RNA, 20 nt, Human
agauacaggaaaagcugcug

SEQ ID NO: 3051423 - RNA, 11 nt, Human
agauacuguau

SEQ ID NO: 3051424 - RNA, 22 nt, Human
agauacaguuacucagaauucu

SEQ ID NO: 3051425 - RNA, 17 nt, Human
agaguauuuuugacaga

SEQ ID NO: 3051426 - RNA, 18 nt, Human
agaguauuuuugacagaa

SEQ ID NO: 3051427 - RNA, 15 nt, Human
ugaauacuuuauaaa

SEQ ID NO: 3051428 - RNA, 14 nt, Human
ugaauaccccaaga

SEQ ID NO: 3051429 - RNA, 22 nt, Human
ugaauaccccaagacucccaug

SEQ ID NO: 3051430 - RNA, 14 nt, Human
ugaagucacacagu

SEQ ID NO: 3051431 - RNA, 22 nt, Human
ugaaggguaauuauauaguuac

SEQ ID NO: 3051432 - RNA, 14 nt, Human
ugaaaguacauuug

SEQ ID NO: 3051433 - RNA, 23 nt, Human
ugaaaguacauuuggagacacaa

SEQ ID NO: 3051434 - RNA, 16 nt, Human
agagggagggagggcu

SEQ ID NO: 3051435 - RNA, 20 nt, Human
ugaagcuaucguaaaauuaa

SEQ ID NO: 3051436 - RNA, 14 nt, Human
agaguauuuuugac

SEQ ID NO: 3051437 - RNA, 15 nt, Human
agaguauuuuugaca

SEQ ID NO: 3051438 - RNA, 16 nt, Human
agagguggggagcaga

SEQ ID NO: 3051439 - RNA, 15 nt, Human
agagguuaagguggg

SEQ ID NO: 3051440 - RNA, 23 nt, Human
ugaaaaaauauauaucaaauaua

SEQ ID NO: 3051441 - RNA, 22 nt, Human
ugaaaaagaccuuuggagcaaa

SEQ ID NO: 3051442 - RNA, 16 nt, Human
ugaaaaaggaggaaga

SEQ ID NO: 3051443 - RNA, 21 nt, Human
ucuuucuggcuaugcauuuga

SEQ ID NO: 3051444 - RNA, 19 nt, Human
ucuuucuggcuaugcauuu

SEQ ID NO: 3051445 - RNA, 20 nt, Human
ucuuucuggcuaugcauuug

SEQ ID NO: 3051446 - RNA, 22 nt, Human
ucuuuggucuacacugugcuga

SEQ ID NO: 3051447 - RNA, 14 nt, Human
ucuuuguggcuucc

SEQ ID NO: 3051448 - RNA, 19 nt, Human
ugaaacucguuaauuugua

SEQ ID NO: 3051449 - RNA, 16 nt, Human
ugaaacgcaaccacca

SEQ ID NO: 3051450 - RNA, 19 nt, Human
ugaaaaucgugacaacacu

SEQ ID NO: 3051451 - RNA, 17 nt, Human
ugaaaauguauguguaa

SEQ ID NO: 3051452 - RNA, 16 nt, Human
ugaaaaucgugacaac

SEQ ID NO: 3051453 - RNA, 20 nt, Human
ugaaaagcuccauuuuuagu

SEQ ID NO: 3051454 - RNA, 20 nt, Human
ugaaaaaggaggaagagaaa

SEQ ID NO: 3051455 - RNA, 22 nt, Human
ugaaaaaggaggaagagaaaaa

SEQ ID NO: 3051456 - RNA, 22 nt, Human
ugaaaaaguucugcagauaaac

SEQ ID NO: 3051457 - RNA, 20 nt, Human
agagcaaaauugauguguuu

SEQ ID NO: 3051458 - RNA, 19 nt, Human
agagcaagacgcugugcug

SEQ ID NO: 3051459 - RNA, 23 nt, Human
agagcaagacgcugugcugcccu

SEQ ID NO: 3051460 - RNA, 14 nt, Human
agagagaaaauaaa

SEQ ID NO: 3051461 - RNA, 23 nt, Human
agagacuccugcaggcagccagg

SEQ ID NO: 3051462 - RNA, 22 nt, Human
agagaucaaccccuucgcuccu

SEQ ID NO: 3051463 - RNA, 15 nt, Human
ugaaagacuguacaa

SEQ ID NO: 3051464 - RNA, 13 nt, Human
ugaaagacuguac

SEQ ID NO: 3051465 - RNA, 19 nt, Human
agagacuccugcaggcagc

SEQ ID NO: 3051466 - RNA, 20 nt, Human
agagacuccugcaggcagcc

SEQ ID NO: 3051467 - RNA, 21 nt, Human
agagacuccugcaggcagcca

SEQ ID NO: 3051468 - RNA, 22 nt, Human
agagacuccugcaggcagccag

SEQ ID NO: 3051469 - RNA, 17 nt, Human
agagacuccugcaggca

SEQ ID NO: 3051470 - RNA, 18 nt, Human
agagacuccugcaggcag

SEQ ID NO: 3051471 - RNA, 15 nt, Human
agagacuccugcagg

SEQ ID NO: 3051472 - RNA, 14 nt, Human
agagcugccaccug

SEQ ID NO: 3051473 - RNA, 13 nt, Human
agagccuuccagg

SEQ ID NO: 3051474 - RNA, 15 nt, Human
agagccuuccagggg

SEQ ID NO: 3051475 - RNA, 17 nt, Human
agagccuuccaggggug

SEQ ID NO: 3051476 - RNA, 22 nt, Human
agagccuuccaggggugggaca

SEQ ID NO: 3051477 - RNA, 20 nt, Human
agagcuagcagcagggaggg

SEQ ID NO: 3051478 - RNA, 22 nt, Human
agagcaccuuagacagucccug

SEQ ID NO: 3051479 - RNA, 21 nt, Human
agagcaccuuagacagucccu

SEQ ID NO: 3051480 - RNA, 23 nt, Human
agagcaccuuagacagucccugc

SEQ ID NO: 3051481 - RNA, 23 nt, Human
agagcaguuugguuucuagcaug

SEQ ID NO: 3051482 - RNA, 21 nt, Human
agagcaguuugguuucuagca

SEQ ID NO: 3051483 - RNA, 19 nt, Human
agacauucuuccaaaaaga

SEQ ID NO: 3051484 - RNA, 19 nt, Human
agacauacuaaccagcaga

SEQ ID NO: 3051485 - RNA, 14 nt, Human
agacauagaauuaa

SEQ ID NO: 3051486 - RNA, 21 nt, Human
agacauagaauuaacacauga

SEQ ID NO: 3051487 - RNA, 17 nt, Human
agacaucaacagauaaa

SEQ ID NO: 3051488 - RNA, 18 nt, Human
agacaucaacagauaaau

SEQ ID NO: 3051489 - RNA, 21 nt, Human
ucuucugaacuuggcgcugcc

SEQ ID NO: 3051490 - RNA, 12 nt, Human
ucuucugcuuca

SEQ ID NO: 3051491 - RNA, 23 nt, Human
ucuucuguacgucugacaggcaa

SEQ ID NO: 3051492 - RNA, 15 nt, Human
ucuucuguacgucug

SEQ ID NO: 3051493 - RNA, 20 nt, Human
ucuucuguggguuucuaaag

SEQ ID NO: 3051494 - RNA, 17 nt, Human
ucuucagagacuccugc

SEQ ID NO: 3051495 - RNA, 18 nt, Human
ucuucagagacuccugca

SEQ ID NO: 3051496 - RNA, 12 nt, Human
ucuucagagacu

SEQ ID NO: 3051497 - RNA, 14 nt, Human
agaaucacuugaac

SEQ ID NO: 3051498 - RNA, 20 nt, Human
ucuucagagacuccugcagg

SEQ ID NO: 3051499 - RNA, 15 nt, Human
ucuuccaggcuggga

SEQ ID NO: 3051500 - RNA, 17 nt, Human
ucuuccaggcugggaga

SEQ ID NO: 3051501 - RNA, 20 nt, Human
ucuuccaggcugggagagcc

SEQ ID NO: 3051502 - RNA, 19 nt, Human
ucuucccuacaguugaaaa

SEQ ID NO: 3051503 - RNA, 14 nt, Human
ucuuccucccuccc

SEQ ID NO: 3051504 - RNA, 15 nt, Human
ucuuccucccucccu

SEQ ID NO: 3051505 - RNA, 21 nt, Human
ucuugaugccuggcggggugg

SEQ ID NO: 3051506 - RNA, 13 nt, Human
ucuugauucauaa

SEQ ID NO: 3051507 - RNA, 13 nt, Human
ucuugagccuggg

SEQ ID NO: 3051508 - RNA, 16 nt, Human
ucuugagccugggagg

SEQ ID NO: 3051509 - RNA, 20 nt, Human
ucuugagccuugaacuuuga

SEQ ID NO: 3051510 - RNA, 21 nt, Human
agaccuucuccuucaccuuug

SEQ ID NO: 3051511 - RNA, 23 nt, Human
agaccuucuccuucaccuuuguc

SEQ ID NO: 3051512 - RNA, 15 nt, Human
agacuauucaaacag

SEQ ID NO: 3051513 - RNA, 14 nt, Human
agacuauucaaaca

SEQ ID NO: 3051514 - RNA, 12 nt, Human
agacuauucaaa

SEQ ID NO: 3051515 - RNA, 15 nt, Human
agaccuucuccuuca

SEQ ID NO: 3051516 - RNA, 18 nt, Human
agaccuucuccuucaccu

SEQ ID NO: 3051517 - RNA, 11 nt, Human
agaccuucucc

SEQ ID NO: 3051518 - RNA, 15 nt, Human
ucuuuaacucauaaa

SEQ ID NO: 3051519 - RNA, 15 nt, Human
ucuugguccugcugc

SEQ ID NO: 3051520 - RNA, 17 nt, Human
ucuugguccugcugcag

SEQ ID NO: 3051521 - RNA, 19 nt, Human
ucuugguccugcugcaguu

SEQ ID NO: 3051522 - RNA, 17 nt, Human
ucuuuccugaggcuggg

SEQ ID NO: 3051523 - RNA, 16 nt, Human
ucuuuccugaggcugg

SEQ ID NO: 3051524 - RNA, 17 nt, Human
ucuuggucagauuugaa

SEQ ID NO: 3051525 - RNA, 14 nt, Human
ucuugguccugcug

SEQ ID NO: 3051526 - RNA, 22 nt, Human
ucuugcaauggcagccuuggca

SEQ ID NO: 3051527 - RNA, 18 nt, Human
ucuugcaauggcagccuu

SEQ ID NO: 3051528 - RNA, 19 nt, Human
ucuugcaauggcagccuug

SEQ ID NO: 3051529 - RNA, 19 nt, Human
acuuuguauaaaagggacu

SEQ ID NO: 3051530 - RNA, 23 nt, Human
acuuuggaaagaguaggaagacu

SEQ ID NO: 3051531 - RNA, 13 nt, Human
acuuuggaaagag

SEQ ID NO: 3051532 - RNA, 14 nt, Human
acuuuggaaagagu

SEQ ID NO: 3051533 - RNA, 23 nt, Human
acuuuggaaagacuuuuccaacc

SEQ ID NO: 3051534 - RNA, 22 nt, Human
acuuugcacacuuuggcccagg

SEQ ID NO: 3051535 - RNA, 21 nt, Human
acuuugcacacuuuggcccag

SEQ ID NO: 3051536 - RNA, 23 nt, Human
acuuuaccuuuuuuauacauaaa

SEQ ID NO: 3051537 - RNA, 16 nt, Human
acuuuaaaaggagcca

SEQ ID NO: 3051538 - RNA, 22 nt, Human
acuuguuuuauuuaaccucuaa

SEQ ID NO: 3051539 - RNA, 14 nt, Human
acuuguggacacag

SEQ ID NO: 3051540 - RNA, 16 nt, Human
acuuuguguucaccuu

SEQ ID NO: 3051541 - RNA, 21 nt, Human
ucuccuuggugucgggcauga

SEQ ID NO: 3051542 - RNA, 23 nt, Human
ucuccuuggugucgggcaugaca

SEQ ID NO: 3051543 - RNA, 19 nt, Human
ucuccuguaccucuugagc

SEQ ID NO: 3051544 - RNA, 12 nt, Human
ucucucaggcca

SEQ ID NO: 3051545 - RNA, 21 nt, Human
ucucucacuuguuuuauuuaa

SEQ ID NO: 3051546 - RNA, 22 nt, Human
ucucucacuuguuuuauuuaac

SEQ ID NO: 3051547 - RNA, 18 nt, Human
ucucugcaggucccuaau

SEQ ID NO: 3051548 - RNA, 19 nt, Human
agaaaaaauauuuucccua

SEQ ID NO: 3051549 - RNA, 17 nt, Human
agaaaaaauauuuuccu

SEQ ID NO: 3051550 - RNA, 23 nt, Human
agaaaaaauauuuuccugccagg

SEQ ID NO: 3051551 - RNA, 17 nt, Human
agaaaaaugagccuggc

SEQ ID NO: 3051552 - RNA, 18 nt, Human
agaaaaaugagccuggca

SEQ ID NO: 3051553 - RNA, 21 nt, Human
ucucugcaggucccuaauaaa

SEQ ID NO: 3051554 - RNA, 20 nt, Human
ucucugcaggucccuaauaa

SEQ ID NO: 3051555 - RNA, 19 nt, Human
ucucugcaggucccuaaua

SEQ ID NO: 3051556 - RNA, 22 nt, Human
ucucugcaggucccuaauaaag

SEQ ID NO: 3051557 - RNA, 16 nt, Human
ucucuugguccugcug

SEQ ID NO: 3051558 - RNA, 17 nt, Human
ucucuugguccugcugc

SEQ ID NO: 3051559 - RNA, 18 nt, Human
ucucuugguccugcugca

SEQ ID NO: 3051560 - RNA, 15 nt, Human
agaaacuggaacucu

SEQ ID NO: 3051561 - RNA, 16 nt, Human
agaaacacaacuauau

SEQ ID NO: 3051562 - RNA, 15 nt, Human
agaaaucuaaaaaac

SEQ ID NO: 3051563 - RNA, 13 nt, Human
agaaaugaaaaaa

SEQ ID NO: 3051564 - RNA, 12 nt, Human
agaaaugaaaaa

SEQ ID NO: 3051565 - RNA, 15 nt, Human
agaaaugccuuaccc

SEQ ID NO: 3051566 - RNA, 18 nt, Human
ucugaaggcuggguucug

SEQ ID NO: 3051567 - RNA, 20 nt, Human
ucugaaggguaauuauauag

SEQ ID NO: 3051568 - RNA, 22 nt, Human
ucugaaggacauugcggacagc

SEQ ID NO: 3051569 - RNA, 22 nt, Human
agaaagacuaucuaaauguuga

SEQ ID NO: 3051570 - RNA, 20 nt, Human
agaaagacuaucuaaauguu

SEQ ID NO: 3051571 - RNA, 16 nt, Human
agaaagacuauucaaa

SEQ ID NO: 3051572 - RNA, 17 nt, Human
agaaagcagaacaguga

SEQ ID NO: 3051573 - RNA, 18 nt, Human
agaaagcagaacagugau

SEQ ID NO: 3051574 - RNA, 20 nt, Human
agaaagcagaacagugauua

SEQ ID NO: 3051575 - RNA, 23 nt, Human
ucugcaggucccuaauaaagcug

SEQ ID NO: 3051576 - RNA, 22 nt, Human
ucugcaggucccuaauaaagcu

SEQ ID NO: 3051577 - RNA, 19 nt, Human
ucugcaggucccuaauaaa

SEQ ID NO: 3051578 - RNA, 21 nt, Human
ucugcaggucccuaauaaagc

SEQ ID NO: 3051579 - RNA, 19 nt, Human
agaaccuuuugagugccuu

SEQ ID NO: 3051580 - RNA, 23 nt, Human
agaaccuuuugagugccuuacac

SEQ ID NO: 3051581 - RNA, 17 nt, Human
agaacucccuuucaaca

SEQ ID NO: 3051582 - RNA, 15 nt, Human
agaacucccuuucaa

SEQ ID NO: 3051583 - RNA, 16 nt, Human
agaacucccuuucaac

SEQ ID NO: 3051584 - RNA, 12 nt, Human
ucugcccuuggu

SEQ ID NO: 3051585 - RNA, 23 nt, Human
ucugcccuugguuaggcauugug

SEQ ID NO: 3051586 - RNA, 23 nt, Human
ucugcccacucccugcaaccuga

SEQ ID NO: 3051587 - RNA, 20 nt, Human
ucugcccauccugccccuga

SEQ ID NO: 3051588 - RNA, 23 nt, Human
agaagcccaggaaaggcuccagg

SEQ ID NO: 3051589 - RNA, 16 nt, Human
agaagcagaggaagga

SEQ ID NO: 3051590 - RNA, 19 nt, Human
agaagcaccaaucaugaau

SEQ ID NO: 3051591 - RNA, 19 nt, Human
agaagcaacccaaauguuc

SEQ ID NO: 3051592 - RNA, 13 nt, Human
agaagcagcucuu

SEQ ID NO: 3051593 - RNA, 12 nt, Human
agaagcagcucu

SEQ ID NO: 3051594 - RNA, 16 nt, Human
agaaggaucuucaucu

SEQ ID NO: 3051595 - RNA, 22 nt, Human
agaaguuugagaucagccuggg

SEQ ID NO: 3051596 - RNA, 13 nt, Human
agaaguugauaug

SEQ ID NO: 3051597 - RNA, 16 nt, Human
ucuggcagcucagaga

SEQ ID NO: 3051598 - RNA, 17 nt, Human
ucuggcagcucagagag

SEQ ID NO: 3051599 - RNA, 20 nt, Human
ucuggcagaguugaagacag

SEQ ID NO: 3051600 - RNA, 23 nt, Human
ucuggcagaguugaagacagagc

SEQ ID NO: 3051601 - RNA, 18 nt, Human
ucuggcagcucagagagg

SEQ ID NO: 3051602 - RNA, 21 nt, Human
ucuggcagcucagagagggug

SEQ ID NO: 3051603 - RNA, 14 nt, Human
agaagcuccaggua

SEQ ID NO: 3051604 - RNA, 22 nt, Human
ucugcuuugggguuuaucagaa

SEQ ID NO: 3051605 - RNA, 18 nt, Human
acuguacagacagaaaaa

SEQ ID NO: 3051606 - RNA, 16 nt, Human
acuguacaugaaaaca

SEQ ID NO: 3051607 - RNA, 19 nt, Human
acuguacaugaaaacacau

SEQ ID NO: 3051608 - RNA, 22 nt, Human
acuguacaaaguagaagucuua

SEQ ID NO: 3051609 - RNA, 16 nt, Human
acuguacaaaguagaa

SEQ ID NO: 3051610 - RNA, 17 nt, Human
acuggguacuuguggac

SEQ ID NO: 3051611 - RNA, 23 nt, Human
acuguacuugcucuugaugccug

SEQ ID NO: 3051612 - RNA, 14 nt, Human
acuguaucaugaca

SEQ ID NO: 3051613 - RNA, 15 nt, Human
acuguacuugcucuu

SEQ ID NO: 3051614 - RNA, 21 nt, Human
acuguacaugaaaacacauuu

SEQ ID NO: 3051615 - RNA, 20 nt, Human
acuguacaugaaaacacauu

SEQ ID NO: 3051616 - RNA, 20 nt, Human
acuguaucaugacaaagacu

SEQ ID NO: 3051617 - RNA, 16 nt, Human
acuguaucaugacaaa

SEQ ID NO: 3051618 - RNA, 23 nt, Human
acuguccuacccacccuccuuuc

SEQ ID NO: 3051619 - RNA, 23 nt, Human
acugucagcuccccucggagaag

SEQ ID NO: 3051620 - RNA, 22 nt, Human
acugucagcuccccucggagaa

SEQ ID NO: 3051621 - RNA, 18 nt, Human
ucgcccuggacugugugc

SEQ ID NO: 3051622 - RNA, 14 nt, Human
ucgcuccugugucu

SEQ ID NO: 3051623 - RNA, 12 nt, Human
acugaagaagca

SEQ ID NO: 3051624 - RNA, 22 nt, Human
acugaagaagcaccaaucauga

SEQ ID NO: 3051625 - RNA, 21 nt, Human
acugggcuuggggaccagagc

SEQ ID NO: 3051626 - RNA, 15 nt, Human
acuggguacuugugg

SEQ ID NO: 3051627 - RNA, 21 nt, Human
ucuaagauaguaacaaugaag

SEQ ID NO: 3051628 - RNA, 22 nt, Human
ucuaacuucaccauauuaccac

SEQ ID NO: 3051629 - RNA, 16 nt, Human
ucuaaaggcuaccuuu

SEQ ID NO: 3051630 - RNA, 13 nt, Human
ucuaaaggcuacc

SEQ ID NO: 3051631 - RNA, 16 nt, Human
ucuaaagcugccagcc

SEQ ID NO: 3051632 - RNA, 17 nt, Human
ucuaaagcugccagccg

SEQ ID NO: 3051633 - RNA, 21 nt, Human
ucuacccucuuagaaaaacca

SEQ ID NO: 3051634 - RNA, 17 nt, Human
acuguuaauaguucagg

SEQ ID NO: 3051635 - RNA, 21 nt, Human
acuguuaauaguucagguaac

SEQ ID NO: 3051636 - RNA, 14 nt, Human
acuucccuuucugc

SEQ ID NO: 3051637 - RNA, 22 nt, Human
acuucccuuucugcuuguguua

SEQ ID NO: 3051638 - RNA, 17 nt, Human
acuucgggaggucgagg

SEQ ID NO: 3051639 - RNA, 20 nt, Human
acuucgggaggucgaggcag

SEQ ID NO: 3051640 - RNA, 18 nt, Human
acuucuccacccugcucu

SEQ ID NO: 3051641 - RNA, 13 nt, Human
acuucuaaguaaa

SEQ ID NO: 3051642 - RNA, 19 nt, Human
acuucuaaguaaaaccaca

SEQ ID NO: 3051643 - RNA, 18 nt, Human
acuucuaaguaaaaccac

SEQ ID NO: 3051644 - RNA, 16 nt, Human
ucucaaaaaaagaaaa

SEQ ID NO: 3051645 - RNA, 16 nt, Human
ucuauuguuucuuuca

SEQ ID NO: 3051646 - RNA, 21 nt, Human
ucucacagcuccaagaauuuc

SEQ ID NO: 3051647 - RNA, 17 nt, Human
ucucaaaacugcacugu

SEQ ID NO: 3051648 - RNA, 14 nt, Human
acuuguauuaugug

SEQ ID NO: 3051649 - RNA, 13 nt, Human
acuuguauuaugu

SEQ ID NO: 3051650 - RNA, 14 nt, Human
acuugucuuuggac

SEQ ID NO: 3051651 - RNA, 14 nt, Human
acuuggaagcuccg

SEQ ID NO: 3051652 - RNA, 18 nt, Human
acuugaaaauuaacauga

SEQ ID NO: 3051653 - RNA, 16 nt, Human
acuugaaaauuaacau

SEQ ID NO: 3051654 - RNA, 17 nt, Human
acuugaaaauuaacaug

SEQ ID NO: 3051655 - RNA, 21 nt, Human
acuugaacccgggaggcagag

SEQ ID NO: 3051656 - RNA, 23 nt, Human
acuugaacccgggaggcagaggu

SEQ ID NO: 3051657 - RNA, 12 nt, Human
ucuaccugaggg

SEQ ID NO: 3051658 - RNA, 19 nt, Human
ucuaccugaggggccucuu

SEQ ID NO: 3051659 - RNA, 20 nt, Human
acuuagagguggggagcaga

SEQ ID NO: 3051660 - RNA, 15 nt, Human
acuuacuguacauga

SEQ ID NO: 3051661 - RNA, 14 nt, Human
acuuacuguacaug

SEQ ID NO: 3051662 - RNA, 13 nt, Human
acuuacuguacau

SEQ ID NO: 3051663 - RNA, 16 nt, Human
acuucaucccucuggg

SEQ ID NO: 3051664 - RNA, 17 nt, Human
acuuccacugccauccu

SEQ ID NO: 3051665 - RNA, 18 nt, Human
acuuccaauuuacauacu

SEQ ID NO: 3051666 - RNA, 20 nt, Human
acuuccagauccuggaaauc

SEQ ID NO: 3051667 - RNA, 18 nt, Human
ucuagcauggcauauuuu

SEQ ID NO: 3051668 - RNA, 13 nt, Human
ucuagccagagga

SEQ ID NO: 3051669 - RNA, 17 nt, Human
ucuagcauggcauauuu

SEQ ID NO: 3051670 - RNA, 12 nt, Human
ucuagcaugaag

SEQ ID NO: 3051671 - RNA, 17 nt, Human
acuucccagugaauucu

SEQ ID NO: 3051672 - RNA, 13 nt, Human
ucuagauacugua

SEQ ID NO: 3051673 - RNA, 24 nt, Human
ucuagauacuguaucaugacaaag

SEQ ID NO: 3051674 - RNA, 13 nt, Human
ucuauaauuuaaa

SEQ ID NO: 3051675 - RNA, 23 nt, Human
ucuaguuugauuaaauucuugca

SEQ ID NO: 3051676 - RNA, 22 nt, Human
ucuaguuugauuaaauucuugc

SEQ ID NO: 3051677 - RNA, 21 nt, Human
acauuguaaauaguauuugag

SEQ ID NO: 3051678 - RNA, 19 nt, Human
acauuguaaauaguauuug

SEQ ID NO: 3051679 - RNA, 17 nt, Human
acauuguaaauaguauu

SEQ ID NO: 3051680 - RNA, 22 nt, Human
acauugcggacagccacggcca

SEQ ID NO: 3051681 - RNA, 21 nt, Human
acauugcggacagccacggcc

SEQ ID NO: 3051682 - RNA, 16 nt, Human
acauuggaaacaaguc

SEQ ID NO: 3051683 - RNA, 18 nt, Human
acauuuuuaagugcugca

SEQ ID NO: 3051684 - RNA, 15 nt, Human
acauuuuuaagugcu

SEQ ID NO: 3051685 - RNA, 23 nt, Human
acauuuuucuuagggaaggauac

SEQ ID NO: 3051686 - RNA, 13 nt, Human
acauuuuucuuag

SEQ ID NO: 3051687 - RNA, 21 nt, Human
acauuuuuuaaaugcaccugg

SEQ ID NO: 3051688 - RNA, 22 nt, Human
ucaauaggaaaaacugauuuuu

SEQ ID NO: 3051689 - RNA, 23 nt, Human
ucaauauuucagauaaucacaau

SEQ ID NO: 3051690 - RNA, 18 nt, Human
ucaauaggaaaaacugau

SEQ ID NO: 3051691 - RNA, 19 nt, Human
ucaauaggaaaaacugauu

SEQ ID NO: 3051692 - RNA, 17 nt, Human
ucaauaggaaaaacuga

SEQ ID NO: 3051693 - RNA, 17 nt, Human
ucaagugauucuccugc

SEQ ID NO: 3051694 - RNA, 16 nt, Human
ucaagugauucuccug

SEQ ID NO: 3051695 - RNA, 17 nt, Human
ucaagagggucugagga

SEQ ID NO: 3051696 - RNA, 23 nt, Human
ucaaggauccugagccagauuuc

SEQ ID NO: 3051697 - RNA, 18 nt, Human
accaaauaaaaauauugu

SEQ ID NO: 3051698 - RNA, 16 nt, Human
accaaauaaaaauauu

SEQ ID NO: 3051699 - RNA, 19 nt, Human
accaaaucagcugcuacua

SEQ ID NO: 3051700 - RNA, 16 nt, Human
accaaaucagcugcua

SEQ ID NO: 3051701 - RNA, 20 nt, Human
accaaccacugcgaccacaa

SEQ ID NO: 3051702 - RNA, 16 nt, Human
accaacauacucccau

SEQ ID NO: 3051703 - RNA, 19 nt, Human
accaacacgagcaggcuac

SEQ ID NO: 3051704 - RNA, 14 nt, Human
accaacacgagcag

SEQ ID NO: 3051705 - RNA, 23 nt, Human
accacacccagcccacuucugcc

SEQ ID NO: 3051706 - RNA, 21 nt, Human
accacacccagcccacuucug

SEQ ID NO: 3051707 - RNA, 20 nt, Human
accacacccagcccacuucu

SEQ ID NO: 3051708 - RNA, 16 nt, Human
accacacccagcccac

SEQ ID NO: 3051709 - RNA, 15 nt, Human
accacacccagccca

SEQ ID NO: 3051710 - RNA, 17 nt, Human
accacacagaggcugcc

SEQ ID NO: 3051711 - RNA, 16 nt, Human
accacaagacugcaca

SEQ ID NO: 3051712 - RNA, 16 nt, Human
ucaccagccccagugc

SEQ ID NO: 3051713 - RNA, 17 nt, Human
ucaccagccccagugcc

SEQ ID NO: 3051714 - RNA, 13 nt, Human
ucacauuccugaa

SEQ ID NO: 3051715 - RNA, 17 nt, Human
ucacauuccugaacagg

SEQ ID NO: 3051716 - RNA, 20 nt, Human
ucacauauugauuuccguua

SEQ ID NO: 3051717 - RNA, 18 nt, Human
ucacauauugauuuccgu

SEQ ID NO: 3051718 - RNA, 16 nt, Human
ucacauauugauuucc

SEQ ID NO: 3051719 - RNA, 22 nt, Human
ucacagcuuauuuccucauuuu

SEQ ID NO: 3051720 - RNA, 14 nt, Human
ucacagaugggugc

SEQ ID NO: 3051721 - RNA, 15 nt, Human
ucacagaugggugcu

SEQ ID NO: 3051722 - RNA, 23 nt, Human
ucacagccagacuggcacaguuu

SEQ ID NO: 3051723 - RNA, 17 nt, Human
ucacagccagacuggca

SEQ ID NO: 3051724 - RNA, 19 nt, Human
ucacagcuccaagaauuuc

SEQ ID NO: 3051725 - RNA, 12 nt, Human
ucaauuuaaaaa

SEQ ID NO: 3051726 - RNA, 13 nt, Human
ucaauuuaaaaaa

SEQ ID NO: 3051727 - RNA, 16 nt, Human
ucacagaccuuugaac

SEQ ID NO: 3051728 - RNA, 14 nt, Human
uauuuuaauaaaca

SEQ ID NO: 3051729 - RNA, 17 nt, Human
uauuuuaauaaacacuc

SEQ ID NO: 3051730 - RNA, 19 nt, Human
uauuuuaauaauguuucaa

SEQ ID NO: 3051731 - RNA, 13 nt, Human
uauuuuacauaaa

SEQ ID NO: 3051732 - RNA, 22 nt, Human
uauuuuaauaauguuucaaaca

SEQ ID NO: 3051733 - RNA, 15 nt, Human
uauuuugcuuuguga

SEQ ID NO: 3051734 - RNA, 13 nt, Human
uauuuugcuuugu

SEQ ID NO: 3051735 - RNA, 20 nt, Human
uauuuugcuuugugauuuuu

SEQ ID NO: 3051736 - RNA, 20 nt, Human
uauuuuguguuuaggaacua

SEQ ID NO: 3051737 - RNA, 15 nt, Human
uauuuuguucauaca

SEQ ID NO: 3051738 - RNA, 16 nt, Human
uauuuuguucauacau

SEQ ID NO: 3051739 - RNA, 17 nt, Human
uauuuuguguuuaggaa

SEQ ID NO: 3051740 - RNA, 12 nt, Human
uauuuuucacau

SEQ ID NO: 3051741 - RNA, 13 nt, Human
uauuuuucacaua

SEQ ID NO: 3051742 - RNA, 13 nt, Human
uauuuuuguagca

SEQ ID NO: 3051743 - RNA, 17 nt, Human
uauuuuuguagagccag

SEQ ID NO: 3051744 - RNA, 19 nt, Human
uaugugccagauuuaugca

SEQ ID NO: 3051745 - RNA, 14 nt, Human
uaugugccagauuu

SEQ ID NO: 3051746 - RNA, 14 nt, Human
uauguguaaaaugu

SEQ ID NO: 3051747 - RNA, 16 nt, Human
acaucuugcucugcug

SEQ ID NO: 3051748 - RNA, 15 nt, Human
acaucuugcucugcu

SEQ ID NO: 3051749 - RNA, 17 nt, Human
acaucuugcucugcuga

SEQ ID NO: 3051750 - RNA, 22 nt, Human
acaucuugcucugcugacagac

SEQ ID NO: 3051751 - RNA, 19 nt, Human
acaucuuggucagauuuga

SEQ ID NO: 3051752 - RNA, 14 nt, Human
acaucuugcucugc

SEQ ID NO: 3051753 - RNA, 22 nt, Human
uauuuuaagacgaaacauuugu

SEQ ID NO: 3051754 - RNA, 14 nt, Human
uauuuuaagacgaa

SEQ ID NO: 3051755 - RNA, 18 nt, Human
uauuuuaaaagaaugauu

SEQ ID NO: 3051756 - RNA, 14 nt, Human
uauuuuaaaagaau

SEQ ID NO: 3051757 - RNA, 15 nt, Human
acaugaaaacacauu

SEQ ID NO: 3051758 - RNA, 13 nt, Human
ucaaauauauuca

SEQ ID NO: 3051759 - RNA, 23 nt, Human
ucaaauacgugggcauucaaaug

SEQ ID NO: 3051760 - RNA, 20 nt, Human
ucaaauacgugggcauucaa

SEQ ID NO: 3051761 - RNA, 21 nt, Human
ucaaauacgugggcauucaaa

SEQ ID NO: 3051762 - RNA, 22 nt, Human
ucaaauacgugggcauucaaau

SEQ ID NO: 3051763 - RNA, 22 nt, Human
acaugaaaacacauuuuucuua

SEQ ID NO: 3051764 - RNA, 23 nt, Human
acaugaaaacacauuuuucuuag

SEQ ID NO: 3051765 - RNA, 13 nt, Human
acaugagcaucag

SEQ ID NO: 3051766 - RNA, 15 nt, Human
uauuuuuguagcacu

SEQ ID NO: 3051767 - RNA, 19 nt, Human
uauuuuuguagcacugaca

SEQ ID NO: 3051768 - RNA, 16 nt, Human
ucaaaagcugggcagg

SEQ ID NO: 3051769 - RNA, 13 nt, Human
ucaaacagucuca

SEQ ID NO: 3051770 - RNA, 21 nt, Human
ucaaacagucucaggaaauca

SEQ ID NO: 3051771 - RNA, 20 nt, Human
ucaaacagucucaggaaauc

SEQ ID NO: 3051772 - RNA, 20 nt, Human
ucaaagauauuuugcuuugu

SEQ ID NO: 3051773 - RNA, 13 nt, Human
ucaaagauauuuu

SEQ ID NO: 3051774 - RNA, 22 nt, Human
ucaaagauauuuugcuuuguga

SEQ ID NO: 3051775 - RNA, 21 nt, Human
acaugucuuuucuugcaugag

SEQ ID NO: 3051776 - RNA, 18 nt, Human
acauggaauaacauguaa

SEQ ID NO: 3051777 - RNA, 14 nt, Human
acauggaaguacua

SEQ ID NO: 3051778 - RNA, 20 nt, Human
acauggaauaacauguaauu

SEQ ID NO: 3051779 - RNA, 20 nt, Human
acaugagcaucaggccaggc

SEQ ID NO: 3051780 - RNA, 23 nt, Human
acaugagcaucaggccaggcccu

SEQ ID NO: 3051781 - RNA, 19 nt, Human
acauggaguauaugucaag

SEQ ID NO: 3051782 - RNA, 15 nt, Human
acauggaguauaugu

SEQ ID NO: 3051783 - RNA, 14 nt, Human
acauggccuuugcu

SEQ ID NO: 3051784 - RNA, 22 nt, Human
accccagcuggggccaggcugg

SEQ ID NO: 3051785 - RNA, 19 nt, Human
accccagcuggggccaggc

SEQ ID NO: 3051786 - RNA, 11 nt, Human
acccaggugcu

SEQ ID NO: 3051787 - RNA, 23 nt, Human
acccaggugcuaggaacacuccu

SEQ ID NO: 3051788 - RNA, 13 nt, Human
accccagguuucu

SEQ ID NO: 3051789 - RNA, 15 nt, Human
acccaggagccccga

SEQ ID NO: 3051790 - RNA, 13 nt, Human
acccaggagcccc

SEQ ID NO: 3051791 - RNA, 17 nt, Human
acccagcgagcccuggu

SEQ ID NO: 3051792 - RNA, 16 nt, Human
acccagcgagcccugg

SEQ ID NO: 3051793 - RNA, 13 nt, Human
acccagcgagccc

SEQ ID NO: 3051794 - RNA, 12 nt, Human
ucagcccucaga

SEQ ID NO: 3051795 - RNA, 16 nt, Human
ucagaauagaaauuag

SEQ ID NO: 3051796 - RNA, 23 nt, Human
ucagaaguuucugccgcagcccu

SEQ ID NO: 3051797 - RNA, 12 nt, Human
ucagaauucuca

SEQ ID NO: 3051798 - RNA, 10 nt, Human
ucagaauucu

SEQ ID NO: 3051799 - RNA, 20 nt, Human
ucagaauucucagaaucuca

SEQ ID NO: 3051800 - RNA, 22 nt, Human
ucagagacuccugcaggcagcc

SEQ ID NO: 3051801 - RNA, 16 nt, Human
ucagaucucuaacuuc

SEQ ID NO: 3051802 - RNA, 15 nt, Human
ucagaucucuaacuu

SEQ ID NO: 3051803 - RNA, 23 nt, Human
ucagagacuccugcaggcagcca

SEQ ID NO: 3051804 - RNA, 23 nt, Human
ucacugagacagcccgggcucug

SEQ ID NO: 3051805 - RNA, 21 nt, Human
ucacuauguugcccaggcagg

SEQ ID NO: 3051806 - RNA, 20 nt, Human
ucacuauguugcccaggcag

SEQ ID NO: 3051807 - RNA, 22 nt, Human
ucaccagccccagugcccacag

SEQ ID NO: 3051808 - RNA, 19 nt, Human
ucacauuccugaacaggau

SEQ ID NO: 3051809 - RNA, 14 nt, Human
ucacuguugcccag

SEQ ID NO: 3051810 - RNA, 18 nt, Human
ucacugcaaccuccgccu

SEQ ID NO: 3051811 - RNA, 15 nt, Human
ucacuguugcccagg

SEQ ID NO: 3051812 - RNA, 21 nt, Human
acccagauaaagguucaugca

SEQ ID NO: 3051813 - RNA, 20 nt, Human
acccacugcuuuuggucugu

SEQ ID NO: 3051814 - RNA, 16 nt, Human
acccaaauguucauca

SEQ ID NO: 3051815 - RNA, 20 nt, Human
acccaaauguucaucaauga

SEQ ID NO: 3051816 - RNA, 20 nt, Human
accauucuccaccugccagg

SEQ ID NO: 3051817 - RNA, 21 nt, Human
accauucuccaccugccaggg

SEQ ID NO: 3051818 - RNA, 19 nt, Human
accauucuccaccugccag

SEQ ID NO: 3051819 - RNA, 22 nt, Human
accauuuugcugucccuuuucc

SEQ ID NO: 3051820 - RNA, 23 nt, Human
accauuuugcugucccuuuuccu

SEQ ID NO: 3051821 - RNA, 21 nt, Human
accauuuugggguacccacug

SEQ ID NO: 3051822 - RNA, 24 nt, Human
ucauaaagcaggcagaacucaucu

SEQ ID NO: 3051823 - RNA, 18 nt, Human
ucauaaauaaaguuuguu

SEQ ID NO: 3051824 - RNA, 19 nt, Human
ucaguuguuagugugucuu

SEQ ID NO: 3051825 - RNA, 13 nt, Human
ucaguggcagcug

SEQ ID NO: 3051826 - RNA, 18 nt, Human
ucagugccuuauggaaca

SEQ ID NO: 3051827 - RNA, 16 nt, Human
ucaguggcagcugcuu

SEQ ID NO: 3051828 - RNA, 17 nt, Human
ucaguuguuaguguguc

SEQ ID NO: 3051829 - RNA, 15 nt, Human
ucaguggcagcugcu

SEQ ID NO: 3051830 - RNA, 14 nt, Human
ucaguggcagcugc

SEQ ID NO: 3051831 - RNA, 19 nt, Human
ucagugccuuauggaacac

SEQ ID NO: 3051832 - RNA, 20 nt, Human
ucagugccuuauggaacacu

SEQ ID NO: 3051833 - RNA, 22 nt, Human
ucagugccuuauggaacacucu

SEQ ID NO: 3051834 - RNA, 23 nt, Human
ucagugccuuauggaacacucug

SEQ ID NO: 3051835 - RNA, 13 nt, Human
ucaguagucagac

SEQ ID NO: 3051836 - RNA, 21 nt, Human
ucagguggggucacucuggca

SEQ ID NO: 3051837 - RNA, 22 nt, Human
ucagguggggucacucuggcag

SEQ ID NO: 3051838 - RNA, 21 nt, Human
accgaaaacguggcugcuuca

SEQ ID NO: 3051839 - RNA, 22 nt, Human
accgaaaacguggcugcuucaa

SEQ ID NO: 3051840 - RNA, 18 nt, Human
ucaggugucccugcacuu

SEQ ID NO: 3051841 - RNA, 17 nt, Human
ucaggugucccugcacu

SEQ ID NO: 3051842 - RNA, 23 nt, Human
ucagguggggucacucuggcagc

SEQ ID NO: 3051843 - RNA, 15 nt, Human
ucaggugucccugca

SEQ ID NO: 3051844 - RNA, 20 nt, Human
accgaaaacguggcugcuuc

SEQ ID NO: 3051845 - RNA, 20 nt, Human
acccuugccgucuaccugag

SEQ ID NO: 3051846 - RNA, 13 nt, Human
ucaguaauaacuc

SEQ ID NO: 3051847 - RNA, 13 nt, Human
ucaguaagccgug

SEQ ID NO: 3051848 - RNA, 22 nt, Human
ucaggugucccugcacuugcag

SEQ ID NO: 3051849 - RNA, 19 nt, Human
ucaggccaggcccucugcc

SEQ ID NO: 3051850 - RNA, 17 nt, Human
ucaggccaggcccucug

SEQ ID NO: 3051851 - RNA, 18 nt, Human
ucaggccaggcccucugc

SEQ ID NO: 3051852 - RNA, 12 nt, Human
ucaggggugugc

SEQ ID NO: 3051853 - RNA, 19 nt, Human
ucaggggugugcggccuuu

SEQ ID NO: 3051854 - RNA, 17 nt, Human
ucaggguuggccccugc

SEQ ID NO: 3051855 - RNA, 19 nt, Human
ucaggguuggccccugccc

SEQ ID NO: 3051856 - RNA, 18 nt, Human
ucaggguuggccccugcc

SEQ ID NO: 3051857 - RNA, 19 nt, Human
acccgcuaagagggaggga

SEQ ID NO: 3051858 - RNA, 13 nt, Human
ucaggccagcugc

SEQ ID NO: 3051859 - RNA, 12 nt, Human
ucaggccaggcc

SEQ ID NO: 3051860 - RNA, 13 nt, Human
ucaggccaggccc

SEQ ID NO: 3051861 - RNA, 14 nt, Human
ucaggccaggcccu

SEQ ID NO: 3051862 - RNA, 15 nt, Human
ucaggccaggcccuc

SEQ ID NO: 3051863 - RNA, 16 nt, Human
ucaggccaggcccucu

SEQ ID NO: 3051864 - RNA, 12 nt, Human
acccccagccug

SEQ ID NO: 3051865 - RNA, 13 nt, Human
acccccagccugc

SEQ ID NO: 3051866 - RNA, 18 nt, Human
ucaggcaggugggaugga

SEQ ID NO: 3051867 - RNA, 17 nt, Human
ucaggcaggugggaugg

SEQ ID NO: 3051868 - RNA, 23 nt, Human
acccugaggcccagagggccugc

SEQ ID NO: 3051869 - RNA, 11 nt, Human
acccugaggcc

SEQ ID NO: 3051870 - RNA, 17 nt, Human
acccugaggcccagagg

SEQ ID NO: 3051871 - RNA, 19 nt, Human
acccugaggcccagagggc

SEQ ID NO: 3051872 - RNA, 21 nt, Human
acccugaggcccagagggccu

SEQ ID NO: 3051873 - RNA, 14 nt, Human
acccucgaggcgga

SEQ ID NO: 3051874 - RNA, 19 nt, Human
acccgggaagggggcuggg

SEQ ID NO: 3051875 - RNA, 20 nt, Human
acccgggaagggggcuggga

SEQ ID NO: 3051876 - RNA, 17 nt, Human
acccucauguucuuaau

SEQ ID NO: 3051877 - RNA, 15 nt, Human
acccucauguucuua

SEQ ID NO: 3051878 - RNA, 14 nt, Human
acccucauguucuu

SEQ ID NO: 3051879 - RNA, 22 nt, Human
acccgggaagggggcugggaca

SEQ ID NO: 3051880 - RNA, 21 nt, Human
acccuccuuucaccacaugug

SEQ ID NO: 3051881 - RNA, 14 nt, Human
acucagaauauugc

SEQ ID NO: 3051882 - RNA, 14 nt, Human
acucagaauucucu

SEQ ID NO: 3051883 - RNA, 22 nt, Human
acucagaauucucuaguuugau

SEQ ID NO: 3051884 - RNA, 21 nt, Human
acucagaauucucuaguuuga

SEQ ID NO: 3051885 - RNA, 18 nt, Human
acucagaagacacugaug

SEQ ID NO: 3051886 - RNA, 17 nt, Human
acucagaagacacugau

SEQ ID NO: 3051887 - RNA, 16 nt, Human
acucagaagacacuga

SEQ ID NO: 3051888 - RNA, 15 nt, Human
acucagaagacacug

SEQ ID NO: 3051889 - RNA, 14 nt, Human
acucagaagacacu

SEQ ID NO: 3051890 - RNA, 14 nt, Human
acucaccugccccu

SEQ ID NO: 3051891 - RNA, 19 nt, Human
acucaccugccccucaacu

SEQ ID NO: 3051892 - RNA, 21 nt, Human
acucaccugccccucaacucu

SEQ ID NO: 3051893 - RNA, 23 nt, Human
acucaucuagguaaauuacaguu

SEQ ID NO: 3051894 - RNA, 21 nt, Human
acucaucuagguaaauuacag

SEQ ID NO: 3051895 - RNA, 12 nt, Human
acucaucuuagg

SEQ ID NO: 3051896 - RNA, 16 nt, Human
acucauugaccugagg

SEQ ID NO: 3051897 - RNA, 17 nt, Human
acucauugaccugaggc

SEQ ID NO: 3051898 - RNA, 21 nt, Human
acuccaaacugacucuuaaga

SEQ ID NO: 3051899 - RNA, 18 nt, Human
acucauugaccugaggcc

SEQ ID NO: 3051900 - RNA, 20 nt, Human
acucauuuuaaaaaauggaa

SEQ ID NO: 3051901 - RNA, 13 nt, Human
ucccucuuucccu

SEQ ID NO: 3051902 - RNA, 11 nt, Human
ucccucuuucc

SEQ ID NO: 3051903 - RNA, 18 nt, Human
ucccucagucuggcccuu

SEQ ID NO: 3051904 - RNA, 21 nt, Human
ucccugaaggccccgcccagg

SEQ ID NO: 3051905 - RNA, 22 nt, Human
ucccugaaggccccgcccaggc

SEQ ID NO: 3051906 - RNA, 18 nt, Human
ucccugaaggccccgccc

SEQ ID NO: 3051907 - RNA, 17 nt, Human
ucccugaaggccccgcc

SEQ ID NO: 3051908 - RNA, 17 nt, Human
acucaccccagccccaa

SEQ ID NO: 3051909 - RNA, 23 nt, Human
ucccugaaggccccgcccaggcu

SEQ ID NO: 3051910 - RNA, 22 nt, Human
acuaugacauaaaaacaacuuu

SEQ ID NO: 3051911 - RNA, 14 nt, Human
acuauaauguaagc

SEQ ID NO: 3051912 - RNA, 13 nt, Human
acuauaauguaag

SEQ ID NO: 3051913 - RNA, 12 nt, Human
acuauaauguaa

SEQ ID NO: 3051914 - RNA, 12 nt, Human
acuauguaucaa

SEQ ID NO: 3051915 - RNA, 16 nt, Human
acuauucaaacagucu

SEQ ID NO: 3051916 - RNA, 14 nt, Human
acuauucaaacagu

SEQ ID NO: 3051917 - RNA, 13 nt, Human
acuauucaaacag

SEQ ID NO: 3051918 - RNA, 14 nt, Human
acucaaugcacuga

SEQ ID NO: 3051919 - RNA, 20 nt, Human
acucacauuuauucugcuca

SEQ ID NO: 3051920 - RNA, 19 nt, Human
acucacauuuauucugcuc

SEQ ID NO: 3051921 - RNA, 18 nt, Human
acuacggaauaguuggcu

SEQ ID NO: 3051922 - RNA, 20 nt, Human
acuagaguuuagcuggaaaa

SEQ ID NO: 3051923 - RNA, 14 nt, Human
acguacacauuuua

SEQ ID NO: 3051924 - RNA, 13 nt, Human
acguacacauuuu

SEQ ID NO: 3051925 - RNA, 12 nt, Human
acguacacauuu

SEQ ID NO: 3051926 - RNA, 13 nt, Human
acguacacacaca

SEQ ID NO: 3051927 - RNA, 13 nt, Human
acugaaacuuccc

SEQ ID NO: 3051928 - RNA, 19 nt, Human
acucuuucuauuguuucuu

SEQ ID NO: 3051929 - RNA, 15 nt, Human
uccugaagaauugaa

SEQ ID NO: 3051930 - RNA, 23 nt, Human
uccucuuuggucuacacugugcu

SEQ ID NO: 3051931 - RNA, 21 nt, Human
uccugaaaacccuugccaugu

SEQ ID NO: 3051932 - RNA, 19 nt, Human
acucuugaaaaaugcaugu

SEQ ID NO: 3051933 - RNA, 14 nt, Human
acucuugaaaaaug

SEQ ID NO: 3051934 - RNA, 14 nt, Human
uccucccaccucag

SEQ ID NO: 3051935 - RNA, 13 nt, Human
uccucccaccuca

SEQ ID NO: 3051936 - RNA, 20 nt, Human
uccucccaccucagccuccc

SEQ ID NO: 3051937 - RNA, 18 nt, Human
uccucccaccucagccuc

SEQ ID NO: 3051938 - RNA, 16 nt, Human
uccucccaccucagcc

SEQ ID NO: 3051939 - RNA, 15 nt, Human
uccucccaccucagc

SEQ ID NO: 3051940 - RNA, 21 nt, Human
uccucccaccucagccucccg

SEQ ID NO: 3051941 - RNA, 17 nt, Human
uccucuccccaugaugu

SEQ ID NO: 3051942 - RNA, 20 nt, Human
uccuagcacuuugggaggcc

SEQ ID NO: 3051943 - RNA, 21 nt, Human
uccuagccugugccucuggga

SEQ ID NO: 3051944 - RNA, 16 nt, Human
acucgaguuacagaca

SEQ ID NO: 3051945 - RNA, 13 nt, Human
uccguuaaaauac

SEQ ID NO: 3051946 - RNA, 15 nt, Human
uccguuaaaauacca

SEQ ID NO: 3051947 - RNA, 18 nt, Human
uccggcccuccagagccc

SEQ ID NO: 3051948 - RNA, 14 nt, Human
uccggcccuccaga

SEQ ID NO: 3051949 - RNA, 14 nt, Human
acuccagaaaguga

SEQ ID NO: 3051950 - RNA, 13 nt, Human
acucuugaaaaau

SEQ ID NO: 3051951 - RNA, 19 nt, Human
acucuggcagcucagagag

SEQ ID NO: 3051952 - RNA, 20 nt, Human
acucuggcagcucagagagg

SEQ ID NO: 3051953 - RNA, 21 nt, Human
acucuuauugcccacgcugga

SEQ ID NO: 3051954 - RNA, 16 nt, Human
acucuggcagcucaga

SEQ ID NO: 3051955 - RNA, 17 nt, Human
acucuggcagcucagag

SEQ ID NO: 3051956 - RNA, 15 nt, Human
acucgcgacaaugca

SEQ ID NO: 3051957 - RNA, 16 nt, Human
acucgcgacaaugcaa

SEQ ID NO: 3051958 - RNA, 16 nt, Human
ucauaauaaguugcau

SEQ ID NO: 3051959 - RNA, 12 nt, Human
ucauaaugacuu

SEQ ID NO: 3051960 - RNA, 19 nt, Human
accugaauuuuggcugugu

SEQ ID NO: 3051961 - RNA, 18 nt, Human
accugaagacucauucuu

SEQ ID NO: 3051962 - RNA, 23 nt, Human
accugaggcccuucucuccagcc

SEQ ID NO: 3051963 - RNA, 12 nt, Human
accugagcccca

SEQ ID NO: 3051964 - RNA, 17 nt, Human
accugagccccaaaagg

SEQ ID NO: 3051965 - RNA, 14 nt, Human
accugaggggccuc

SEQ ID NO: 3051966 - RNA, 15 nt, Human
accugccaggaagcc

SEQ ID NO: 3051967 - RNA, 18 nt, Human
accugccaggaagccagc

SEQ ID NO: 3051968 - RNA, 16 nt, Human
accugccaggaagcca

SEQ ID NO: 3051969 - RNA, 17 nt, Human
accugccaggaagccag

SEQ ID NO: 3051970 - RNA, 19 nt, Human
uccaaaaagauuuucagaa

SEQ ID NO: 3051971 - RNA, 17 nt, Human
ucauuuuuuuuaagaaa

SEQ ID NO: 3051972 - RNA, 18 nt, Human
ucauuuuuuuuaagaaaa

SEQ ID NO: 3051973 - RNA, 19 nt, Human
ucauuuuuaguagagacag

SEQ ID NO: 3051974 - RNA, 14 nt, Human
ucauuugucacaca

SEQ ID NO: 3051975 - RNA, 16 nt, Human
ucauuugucacacacu

SEQ ID NO: 3051976 - RNA, 23 nt, Human
accugccuguugggccaggagcc

SEQ ID NO: 3051977 - RNA, 21 nt, Human
accugcgucucauacucaccu

SEQ ID NO: 3051978 - RNA, 16 nt, Human
accugcggugcuaucu

SEQ ID NO: 3051979 - RNA, 20 nt, Human
accuggaauauauaaccagu

SEQ ID NO: 3051980 - RNA, 20 nt, Human
uccaaaaagauuuucagaaa

SEQ ID NO: 3051981 - RNA, 12 nt, Human
accuggccucug

SEQ ID NO: 3051982 - RNA, 13 nt, Human
accuggccucugc

SEQ ID NO: 3051983 - RNA, 17 nt, Human
uccacccaggagccccg

SEQ ID NO: 3051984 - RNA, 13 nt, Human
uccacccaccuca

SEQ ID NO: 3051985 - RNA, 18 nt, Human
uccaccaucaagccacca

SEQ ID NO: 3051986 - RNA, 12 nt, Human
uccacccaccuc

SEQ ID NO: 3051987 - RNA, 20 nt, Human
uccacccaggagccccgagg

SEQ ID NO: 3051988 - RNA, 21 nt, Human
accuggguaacuagggaagau

SEQ ID NO: 3051989 - RNA, 18 nt, Human
accuuuuuuauacauaaa

SEQ ID NO: 3051990 - RNA, 17 nt, Human
accuuuuuuauacauaa

SEQ ID NO: 3051991 - RNA, 16 nt, Human
accuuuuuuauacaua

SEQ ID NO: 3051992 - RNA, 14 nt, Human
accuuuguccccac

SEQ ID NO: 3051993 - RNA, 15 nt, Human
accuuuguccccacc

SEQ ID NO: 3051994 - RNA, 16 nt, Human
accuuuguccccaccg

SEQ ID NO: 3051995 - RNA, 14 nt, Human
accuuuuuuauaca

SEQ ID NO: 3051996 - RNA, 13 nt, Human
accuuugucccca

SEQ ID NO: 3051997 - RNA, 16 nt, Human
accuugacagggcaca

SEQ ID NO: 3051998 - RNA, 22 nt, Human
accuucuccuucaccuuugucc

SEQ ID NO: 3051999 - RNA, 14 nt, Human
accuucuccuucac

SEQ ID NO: 3052000 - RNA, 22 nt, Human
acgaagaguauuuuugacagaa

SEQ ID NO: 3052001 - RNA, 20 nt, Human
acgaagaguauuuuugacag

SEQ ID NO: 3052002 - RNA, 14 nt, Human
uccaggcugggaga

SEQ ID NO: 3052003 - RNA, 17 nt, Human
uccaggcugggagagcc

SEQ ID NO: 3052004 - RNA, 18 nt, Human
uccaggcugggagagccu

SEQ ID NO: 3052005 - RNA, 22 nt, Human
uccaggcuccuuuagcgcccag

SEQ ID NO: 3052006 - RNA, 18 nt, Human
acgccaggggaaaaucag

SEQ ID NO: 3052007 - RNA, 15 nt, Human
acgacugcccggcag

SEQ ID NO: 3052008 - RNA, 23 nt, Human
acgccaggggaaaaucagccugc

SEQ ID NO: 3052009 - RNA, 11 nt, Human
acgccauccca

SEQ ID NO: 3052010 - RNA, 14 nt, Human
acgccaucccagcc

SEQ ID NO: 3052011 - RNA, 15 nt, Human
acgccaucccagccc

SEQ ID NO: 3052012 - RNA, 16 nt, Human
acgccaucccagcccc

SEQ ID NO: 3052013 - RNA, 17 nt, Human
acgccaucccagcccca

SEQ ID NO: 3052014 - RNA, 18 nt, Human
acgccaucccagccccaa

SEQ ID NO: 3052015 - RNA, 16 nt, Human
acggccaggccagagg

SEQ ID NO: 3052016 - RNA, 13 nt, Human
acggccaggccag

SEQ ID NO: 3052017 - RNA, 19 nt, Human
acggagucccaccuuggcu

SEQ ID NO: 3052018 - RNA, 17 nt, Human
acgcucucuggccuucg

SEQ ID NO: 3052019 - RNA, 13 nt, Human
acgcuacccggga

SEQ ID NO: 3052020 - RNA, 17 nt, Human
acgcuacccgggaaggg

SEQ ID NO: 3052021 - RNA, 14 nt, Human
acgcucucuggccu

SEQ ID NO: 3052022 - RNA, 15 nt, Human
acgcucucuggccuu

SEQ ID NO: 3052023 - RNA, 16 nt, Human
acgcucucuggccuuc

SEQ ID NO: 3052024 - RNA, 14 nt, Human
acgcccccacuggu

SEQ ID NO: 3052025 - RNA, 23 nt, Human
acgcgugcacacaccagagccca

SEQ ID NO: 3052026 - RNA, 20 nt, Human
acgcgugcacacaccagagc

SEQ ID NO: 3052027 - RNA, 20 nt, Human
uccaucucuuguuuaaauuc

SEQ ID NO: 3052028 - RNA, 22 nt, Human
uccaugaagauguagaggagaa

SEQ ID NO: 3052029 - RNA, 15 nt, Human
uccaugaguccccug

SEQ ID NO: 3052030 - RNA, 16 nt, Human
uccaugaguccccugu

SEQ ID NO: 3052031 - RNA, 17 nt, Human
uccaugaguccccuguu

SEQ ID NO: 3052032 - RNA, 20 nt, Human
uccagugaggcucugcccuu

SEQ ID NO: 3052033 - RNA, 18 nt, Human
uccagugaggcucugccc

SEQ ID NO: 3052034 - RNA, 19 nt, Human
uccagugaggcucugcccu

SEQ ID NO: 3052035 - RNA, 17 nt, Human
uccagugaggcucugcc

SEQ ID NO: 3052036 - RNA, 14 nt, Human
uccagugagacagc

SEQ ID NO: 3052037 - RNA, 14 nt, Human
acggcucacugcag

SEQ ID NO: 3052038 - RNA, 16 nt, Human
ucccaaagugcuggga

SEQ ID NO: 3052039 - RNA, 15 nt, Human
ucccaaagugcuggg

SEQ ID NO: 3052040 - RNA, 14 nt, Human
ucccacaaaggaga

SEQ ID NO: 3052041 - RNA, 11 nt, Human
ucccaccccac

SEQ ID NO: 3052042 - RNA, 14 nt, Human
ucccaccccacaca

SEQ ID NO: 3052043 - RNA, 14 nt, Human
uagaggguguguaa

SEQ ID NO: 3052044 - RNA, 15 nt, Human
uagcacagacccugc

SEQ ID NO: 3052045 - RNA, 20 nt, Human
uagcacagacccugcccugu

SEQ ID NO: 3052046 - RNA, 21 nt, Human
uagcacagacccugcccugug

SEQ ID NO: 3052047 - RNA, 14 nt, Human
uagcacagacccug

SEQ ID NO: 3052048 - RNA, 14 nt, Human
uagcacugacagau

SEQ ID NO: 3052049 - RNA, 19 nt, Human
uagcacugacagauuucca

SEQ ID NO: 3052050 - RNA, 22 nt, Human
uagcacagacccugcccugugg

SEQ ID NO: 3052051 - RNA, 12 nt, Human
uagccaaggcca

SEQ ID NO: 3052052 - RNA, 13 nt, Human
uagccaaggccaa

SEQ ID NO: 3052053 - RNA, 18 nt, Human
acaaaaggauaaugaaua

SEQ ID NO: 3052054 - RNA, 12 nt, Human
aauuuuacauuu

SEQ ID NO: 3052055 - RNA, 20 nt, Human
aauuuuacauggcuggagcu

SEQ ID NO: 3052056 - RNA, 13 nt, Human
acaaaaacacagc

SEQ ID NO: 3052057 - RNA, 16 nt, Human
acaaaaagcauaaaaa

SEQ ID NO: 3052058 - RNA, 16 nt, Human
acaaaaagcuacuuau

SEQ ID NO: 3052059 - RNA, 15 nt, Human
acaaaaacacagcaa

SEQ ID NO: 3052060 - RNA, 14 nt, Human
acaaaaacacagca

SEQ ID NO: 3052061 - RNA, 22 nt, Human
uagagcggagaaaggaagggcu

SEQ ID NO: 3052062 - RNA, 14 nt, Human
uagagccagggucu

SEQ ID NO: 3052063 - RNA, 17 nt, Human
aauuccaauuauaugag

SEQ ID NO: 3052064 - RNA, 15 nt, Human
uagaacucccuuuca

SEQ ID NO: 3052065 - RNA, 16 nt, Human
uagaacucccuuucaa

SEQ ID NO: 3052066 - RNA, 17 nt, Human
uagaacucccuuucaac

SEQ ID NO: 3052067 - RNA, 15 nt, Human
uagaaacacaacuau

SEQ ID NO: 3052068 - RNA, 16 nt, Human
aauuuggauugcuaau

SEQ ID NO: 3052069 - RNA, 14 nt, Human
aauuugugauacaa

SEQ ID NO: 3052070 - RNA, 18 nt, Human
aauuugugauacaaugcu

SEQ ID NO: 3052071 - RNA, 17 nt, Human
aauuugugauacaaugc

SEQ ID NO: 3052072 - RNA, 17 nt, Human
uagacagucccugccaa

SEQ ID NO: 3052073 - RNA, 21 nt, Human
uagacagucccugccaaugga

SEQ ID NO: 3052074 - RNA, 18 nt, Human
uagacaauuuauuauggc

SEQ ID NO: 3052075 - RNA, 13 nt, Human
uagacacacauga

SEQ ID NO: 3052076 - RNA, 16 nt, Human
uagacagucccugcca

SEQ ID NO: 3052077 - RNA, 10 nt, Human
uagacagagu

SEQ ID NO: 3052078 - RNA, 20 nt, Human
uagaauuugauaugugaaca

SEQ ID NO: 3052079 - RNA, 19 nt, Human
uagaauuugauaugugaac

SEQ ID NO: 3052080 - RNA, 22 nt, Human
uagaauuugauaugugaacagu

SEQ ID NO: 3052081 - RNA, 12 nt, Human
uaguaaucauau

SEQ ID NO: 3052082 - RNA, 14 nt, Human
uaguagagacaggg

SEQ ID NO: 3052083 - RNA, 14 nt, Human
uagucacugagaca

SEQ ID NO: 3052084 - RNA, 22 nt, Human
uaguagagacaggguuuugcca

SEQ ID NO: 3052085 - RNA, 15 nt, Human
uaguagagacagggu

SEQ ID NO: 3052086 - RNA, 22 nt, Human
uagguuuggacaaaauggaaua

SEQ ID NO: 3052087 - RNA, 16 nt, Human
acacaggcccggcucc

SEQ ID NO: 3052088 - RNA, 18 nt, Human
acacaggcccggcuccag

SEQ ID NO: 3052089 - RNA, 17 nt, Human
acacaggcccggcucca

SEQ ID NO: 3052090 - RNA, 22 nt, Human
acacaggcccggcuccaggcuc

SEQ ID NO: 3052091 - RNA, 21 nt, Human
acacaggcccggcuccaggcu

SEQ ID NO: 3052092 - RNA, 20 nt, Human
acacaggcccggcuccaggc

SEQ ID NO: 3052093 - RNA, 19 nt, Human
acacaggcccggcuccagg

SEQ ID NO: 3052094 - RNA, 24 nt, Human
acacaggcccggcuccaggcuccu

SEQ ID NO: 3052095 - RNA, 23 nt, Human
acacaggcccggcuccaggcucc

SEQ ID NO: 3052096 - RNA, 19 nt, Human
acaaugcaaaccaucauug

SEQ ID NO: 3052097 - RNA, 21 nt, Human
acaaugcaaaccaucauugaa

SEQ ID NO: 3052098 - RNA, 23 nt, Human
acaaugcaaaccaucauugaaau

SEQ ID NO: 3052099 - RNA, 13 nt, Human
acacaacuauauu

SEQ ID NO: 3052100 - RNA, 15 nt, Human
uaggguuauaauaau

SEQ ID NO: 3052101 - RNA, 17 nt, Human
uaggguuauaauaaugu

SEQ ID NO: 3052102 - RNA, 19 nt, Human
uaggguaagugagagaggg

SEQ ID NO: 3052103 - RNA, 11 nt, Human
acaaugcaaac

SEQ ID NO: 3052104 - RNA, 16 nt, Human
acaaugcaaaccauca

SEQ ID NO: 3052105 - RNA, 17 nt, Human
acaaugcaaaccaucau

SEQ ID NO: 3052106 - RNA, 18 nt, Human
acaaugcaaaccaucauu

SEQ ID NO: 3052107 - RNA, 22 nt, Human
acaaugacuuacuguacaugaa

SEQ ID NO: 3052108 - RNA, 20 nt, Human
acaaugacuuacuguacaug

SEQ ID NO: 3052109 - RNA, 19 nt, Human
acaaugacuuacuguacau

SEQ ID NO: 3052110 - RNA, 13 nt, Human
uaggaaaaacuga

SEQ ID NO: 3052111 - RNA, 14 nt, Human
uaggaaaaacugau

SEQ ID NO: 3052112 - RNA, 13 nt, Human
uagcuuuuuucuc

SEQ ID NO: 3052113 - RNA, 23 nt, Human
uagcuuuuuucucugauacagaa

SEQ ID NO: 3052114 - RNA, 21 nt, Human
uagccuuagaagucacacagu

SEQ ID NO: 3052115 - RNA, 20 nt, Human
uagccugugccucugggacu

SEQ ID NO: 3052116 - RNA, 14 nt, Human
uagcgcccaguugg

SEQ ID NO: 3052117 - RNA, 17 nt, Human
uagcgcccaguugggug

SEQ ID NO: 3052118 - RNA, 20 nt, Human
uagccuuagaagucacacag

SEQ ID NO: 3052119 - RNA, 16 nt, Human
uaggaaaaacugauuu

SEQ ID NO: 3052120 - RNA, 17 nt, Human
uaggaaaaacugauuuu

SEQ ID NO: 3052121 - RNA, 13 nt, Human
uaggauguugaaa

SEQ ID NO: 3052122 - RNA, 13 nt, Human
uagggaagauaau

SEQ ID NO: 3052123 - RNA, 20 nt, Human
uauauccuuucuaacaaaaa

SEQ ID NO: 3052124 - RNA, 17 nt, Human
uauauccuuucuaacaa

SEQ ID NO: 3052125 - RNA, 19 nt, Human
uauauauuuuuuucugaaa

SEQ ID NO: 3052126 - RNA, 16 nt, Human
acacucaguuguucaa

SEQ ID NO: 3052127 - RNA, 16 nt, Human
acacucauugaccuga

SEQ ID NO: 3052128 - RNA, 23 nt, Human
uauaggaacuuaaauaaugugaa

SEQ ID NO: 3052129 - RNA, 19 nt, Human
uauaggaauugacccacaa

SEQ ID NO: 3052130 - RNA, 16 nt, Human
uauaggugcuacaaaa

SEQ ID NO: 3052131 - RNA, 15 nt, Human
uauacaggucauauu

SEQ ID NO: 3052132 - RNA, 16 nt, Human
uauacaggucauauua

SEQ ID NO: 3052133 - RNA, 21 nt, Human
uauacaggucauauuaauaua

SEQ ID NO: 3052134 - RNA, 22 nt, Human
uauacacuuacacuuuaugcac

SEQ ID NO: 3052135 - RNA, 21 nt, Human
uauacacuuacacuuuaugca

SEQ ID NO: 3052136 - RNA, 18 nt, Human
uauaauuuaccugaaguc

SEQ ID NO: 3052137 - RNA, 19 nt, Human
uauaagugauugcugguuu

SEQ ID NO: 3052138 - RNA, 17 nt, Human
acacucaaaucaagaaa

SEQ ID NO: 3052139 - RNA, 15 nt, Human
acacuaaugaggaaa

SEQ ID NO: 3052140 - RNA, 22 nt, Human
acacuaaugaggaaacugcacu

SEQ ID NO: 3052141 - RNA, 21 nt, Human
acacucaaaagcugggcaggu

SEQ ID NO: 3052142 - RNA, 13 nt, Human
acacucaaaucaa

SEQ ID NO: 3052143 - RNA, 17 nt, Human
uagucacugagacagcc

SEQ ID NO: 3052144 - RNA, 20 nt, Human
uagucacugagacagcccgg

SEQ ID NO: 3052145 - RNA, 19 nt, Human
acacuaagagagaaugaga

SEQ ID NO: 3052146 - RNA, 17 nt, Human
uaucagaauucucagaa

SEQ ID NO: 3052147 - RNA, 10 nt, Human
uaucagaauu

SEQ ID NO: 3052148 - RNA, 19 nt, Human
uauccaacaucaacaucuu

SEQ ID NO: 3052149 - RNA, 22 nt, Human
uaucaaagggugaaaauuauuu

SEQ ID NO: 3052150 - RNA, 18 nt, Human
uaucaaagggugaaaauu

SEQ ID NO: 3052151 - RNA, 19 nt, Human
uaucaaagggugaaaauua

SEQ ID NO: 3052152 - RNA, 14 nt, Human
acagaccuuugaac

SEQ ID NO: 3052153 - RNA, 22 nt, Human
uaucacccagaagaaaauagug

SEQ ID NO: 3052154 - RNA, 19 nt, Human
uaucacccagaagaaaaua

SEQ ID NO: 3052155 - RNA, 20 nt, Human
uaucacaaaucuuaacuuga

SEQ ID NO: 3052156 - RNA, 16 nt, Human
uaucacaaaucuuaac

SEQ ID NO: 3052157 - RNA, 14 nt, Human
uaucacaaaucuua

SEQ ID NO: 3052158 - RNA, 19 nt, Human
acagaaagcagaacaguga

SEQ ID NO: 3052159 - RNA, 19 nt, Human
acagacauacuaaccagca

SEQ ID NO: 3052160 - RNA, 18 nt, Human
acagacauacuaaccagc

SEQ ID NO: 3052161 - RNA, 21 nt, Human
acacuuacacuuuaugcacaa

SEQ ID NO: 3052162 - RNA, 18 nt, Human
acacuuacacuuuaugca

SEQ ID NO: 3052163 - RNA, 18 nt, Human
acacuguuucaaacuuua

SEQ ID NO: 3052164 - RNA, 17 nt, Human
acacuguuucaaacuuu

SEQ ID NO: 3052165 - RNA, 16 nt, Human
acacuguuucaaacuu

SEQ ID NO: 3052166 - RNA, 17 nt, Human
acacucauugaccugag

SEQ ID NO: 3052167 - RNA, 16 nt, Human
acacuuacacuuuaug

SEQ ID NO: 3052168 - RNA, 20 nt, Human
acacuguuucaaacuuuacu

SEQ ID NO: 3052169 - RNA, 22 nt, Human
uaugaagcuuuuaugugaaaca

SEQ ID NO: 3052170 - RNA, 20 nt, Human
uaugaagcuuuuaugugaaa

SEQ ID NO: 3052171 - RNA, 23 nt, Human
uaugaagcuuuuaugugaaacau

SEQ ID NO: 3052172 - RNA, 15 nt, Human
uaugaggcauuuguu

SEQ ID NO: 3052173 - RNA, 14 nt, Human
uaugaggcauuugu

SEQ ID NO: 3052174 - RNA, 21 nt, Human
uaugaggcauuuguuugaacu

SEQ ID NO: 3052175 - RNA, 16 nt, Human
acagcccgggcucugc

SEQ ID NO: 3052176 - RNA, 15 nt, Human
acagcccgggcucug

SEQ ID NO: 3052177 - RNA, 18 nt, Human
acagcaagggugauggga

SEQ ID NO: 3052178 - RNA, 23 nt, Human
uaugggacucaaugcacugacau

SEQ ID NO: 3052179 - RNA, 16 nt, Human
uaugggacucaaugca

SEQ ID NO: 3052180 - RNA, 21 nt, Human
uauggcccuggccuagcauac

SEQ ID NO: 3052181 - RNA, 23 nt, Human
uauggcuuuugugcauuaucuag

SEQ ID NO: 3052182 - RNA, 20 nt, Human
uauggcccuggccuagcaua

SEQ ID NO: 3052183 - RNA, 17 nt, Human
uaugauacuugaaaauu

SEQ ID NO: 3052184 - RNA, 18 nt, Human
uaugcaugaaguaauaug

SEQ ID NO: 3052185 - RNA, 22 nt, Human
uaugcaugaaguaauaugcaca

SEQ ID NO: 3052186 - RNA, 19 nt, Human
acagcuaaugggacacuaa

SEQ ID NO: 3052187 - RNA, 17 nt, Human
acagcuaaugggacacu

SEQ ID NO: 3052188 - RNA, 16 nt, Human
acagcuaaugggacac

SEQ ID NO: 3052189 - RNA, 15 nt, Human
acagcuaaugggaca

SEQ ID NO: 3052190 - RNA, 14 nt, Human
acagcuguaugauu

SEQ ID NO: 3052191 - RNA, 19 nt, Human
acagcuguaugauucccag

SEQ ID NO: 3052192 - RNA, 20 nt, Human
acagcuguaugauucccagc

SEQ ID NO: 3052193 - RNA, 23 nt, Human
acagcuguaugauucccagccag

SEQ ID NO: 3052194 - RNA, 21 nt, Human
acagcuucauuuccugugucu

SEQ ID NO: 3052195 - RNA, 19 nt, Human
acagcuucauuuccugugu

SEQ ID NO: 3052196 - RNA, 17 nt, Human
acagcuucauuuccugu

SEQ ID NO: 3052197 - RNA, 20 nt, Human
acagcuugaccgugaggcca

SEQ ID NO: 3052198 - RNA, 21 nt, Human
acagcuugaccgugaggccag

SEQ ID NO: 3052199 - RNA, 17 nt, Human
acagcuugaccgugagg

SEQ ID NO: 3052200 - RNA, 21 nt, Human
acaggaaaagcugcugacagu

SEQ ID NO: 3052201 - RNA, 20 nt, Human
acaggaaaagcugcugacag

SEQ ID NO: 3052202 - RNA, 19 nt, Human
acaggaaaagcugcugaca

SEQ ID NO: 3052203 - RNA, 18 nt, Human
acaggaaaagcugcugac

SEQ ID NO: 3052204 - RNA, 22 nt, Human
acagcuugaccgugaggccaga

SEQ ID NO: 3052205 - RNA, 23 nt, Human
acagcuugaccgugaggccagag

SEQ ID NO: 3052206 - RNA, 17 nt, Human
acaggcccggcuccagg

SEQ ID NO: 3052207 - RNA, 16 nt, Human
acaggcccggcuccag

SEQ ID NO: 3052208 - RNA, 15 nt, Human
acaggcagauacagg

SEQ ID NO: 3052209 - RNA, 20 nt, Human
acaggaaaauuuuaaaaaua

SEQ ID NO: 3052210 - RNA, 22 nt, Human
acaggcccggcuccaggcuccu

SEQ ID NO: 3052211 - RNA, 21 nt, Human
acaggcccggcuccaggcucc

SEQ ID NO: 3052212 - RNA, 20 nt, Human
acaggcccggcuccaggcuc

SEQ ID NO: 3052213 - RNA, 18 nt, Human
acaggcccggcuccaggc

SEQ ID NO: 3052214 - RNA, 22 nt, Human
uaaggaauuuuauuuuuuucug

SEQ ID NO: 3052215 - RNA, 17 nt, Human
uaaggaauaccuguccc

SEQ ID NO: 3052216 - RNA, 18 nt, Human
uaaggaauaccugucccc

SEQ ID NO: 3052217 - RNA, 13 nt, Human
uaaggaagacaau

SEQ ID NO: 3052218 - RNA, 9 nt, Human
uaaggaaua

SEQ ID NO: 3052219 - RNA, 22 nt, Human
uaagcagauggaaugcuguguu

SEQ ID NO: 3052220 - RNA, 21 nt, Human
uaagcuauucaguaauaacuc

SEQ ID NO: 3052221 - RNA, 14 nt, Human
uaagcuauucagua

SEQ ID NO: 3052222 - RNA, 14 nt, Human
uaagauucauauuu

SEQ ID NO: 3052223 - RNA, 14 nt, Human
uaagcaaaauguga

SEQ ID NO: 3052224 - RNA, 15 nt, Human
uaagcaaaaugugau

SEQ ID NO: 3052225 - RNA, 11 nt, Human
aaucagccugc

SEQ ID NO: 3052226 - RNA, 16 nt, Human
aaucagccuaguugau

SEQ ID NO: 3052227 - RNA, 13 nt, Human
aaucagccugcuc

SEQ ID NO: 3052228 - RNA, 18 nt, Human
aaucagccugcuccagcu

SEQ ID NO: 3052229 - RNA, 19 nt, Human
aaucagccugcuccagcug

SEQ ID NO: 3052230 - RNA, 16 nt, Human
uaaguaauucaagaaa

SEQ ID NO: 3052231 - RNA, 20 nt, Human
uaaguaaugauaacuggaaa

SEQ ID NO: 3052232 - RNA, 18 nt, Human
uaaguaaaaccacagcag

SEQ ID NO: 3052233 - RNA, 17 nt, Human
uaaguaaaaccacagca

SEQ ID NO: 3052234 - RNA, 16 nt, Human
uaaguaaaaccacagc

SEQ ID NO: 3052235 - RNA, 18 nt, Human
uaagguuaccuuuguucc

SEQ ID NO: 3052236 - RNA, 15 nt, Human
uaaguaaaaccacag

SEQ ID NO: 3052237 - RNA, 13 nt, Human
uaaguaaaaccac

SEQ ID NO: 3052238 - RNA, 17 nt, Human
uaaguguguguuuuuca

SEQ ID NO: 3052239 - RNA, 21 nt, Human
uaaguauucuuauuuaaugaa

SEQ ID NO: 3052240 - RNA, 18 nt, Human
uaaguuuuuuuuuaaaaa

SEQ ID NO: 3052241 - RNA, 20 nt, Human
aauccucaguuuuugugaaa

SEQ ID NO: 3052242 - RNA, 22 nt, Human
aaucagugugucuaaauuugaa

SEQ ID NO: 3052243 - RNA, 18 nt, Human
aaucagugugucuaaauu

SEQ ID NO: 3052244 - RNA, 17 nt, Human
aaucagugugucuaaau

SEQ ID NO: 3052245 - RNA, 14 nt, Human
aaucagugugucua

SEQ ID NO: 3052246 - RNA, 17 nt, Human
aaucccauuuaaaaaaa

SEQ ID NO: 3052247 - RNA, 17 nt, Human
uaacguauaaaagccug

SEQ ID NO: 3052248 - RNA, 13 nt, Human
uaacguauaaaag

SEQ ID NO: 3052249 - RNA, 16 nt, Human
uaacuugucuuuggac

SEQ ID NO: 3052250 - RNA, 20 nt, Human
uaacuugucuuuggacccug

SEQ ID NO: 3052251 - RNA, 21 nt, Human
uaacuuccuuggacucauuuu

SEQ ID NO: 3052252 - RNA, 23 nt, Human
uaagacaaaaagcuacuuauugu

SEQ ID NO: 3052253 - RNA, 13 nt, Human
uaagaagugaaaa

SEQ ID NO: 3052254 - RNA, 21 nt, Human
aauauauucagccuggcuuca

SEQ ID NO: 3052255 - RNA, 21 nt, Human
aauauauuuuaagacgaaaca

SEQ ID NO: 3052256 - RNA, 14 nt, Human
aauauauuuaauga

SEQ ID NO: 3052257 - RNA, 19 nt, Human
aauagucaaauugugugaa

SEQ ID NO: 3052258 - RNA, 18 nt, Human
aauauauuuuaagacgaa

SEQ ID NO: 3052259 - RNA, 19 nt, Human
uaacaugaauauuuagugu

SEQ ID NO: 3052260 - RNA, 21 nt, Human
uaacaugaauauuuaguguuc

SEQ ID NO: 3052261 - RNA, 20 nt, Human
uaacaugaauauuuaguguu

SEQ ID NO: 3052262 - RNA, 14 nt, Human
uaacaugaauauuu

SEQ ID NO: 3052263 - RNA, 19 nt, Human
uaacauguaauuaaguacu

SEQ ID NO: 3052264 - RNA, 17 nt, Human
uaacauguaauuaagua

SEQ ID NO: 3052265 - RNA, 17 nt, Human
uaacaaugaagauaaaa

SEQ ID NO: 3052266 - RNA, 13 nt, Human
aauacagaggcaa

SEQ ID NO: 3052267 - RNA, 21 nt, Human
aauacaccacuacauucuguu

SEQ ID NO: 3052268 - RNA, 21 nt, Human
uaaauuaacuuuuauaaacuu

SEQ ID NO: 3052269 - RNA, 20 nt, Human
uaaauuaacuuuuauaaacu

SEQ ID NO: 3052270 - RNA, 19 nt, Human
uaaauuaacuuuuauaaac

SEQ ID NO: 3052271 - RNA, 18 nt, Human
uaaauuaacuuuuauaaa

SEQ ID NO: 3052272 - RNA, 16 nt, Human
uaaaugugcuuuuaaa

SEQ ID NO: 3052273 - RNA, 21 nt, Human
aaguguauuuuuuuacuaaua

SEQ ID NO: 3052274 - RNA, 18 nt, Human
aaguguauuuuuuuacua

SEQ ID NO: 3052275 - RNA, 18 nt, Human
uaaaugaaaaucgugaca

SEQ ID NO: 3052276 - RNA, 22 nt, Human
aauagagcaaaauugauguguu

SEQ ID NO: 3052277 - RNA, 20 nt, Human
aauagagcaaaauugaugug

SEQ ID NO: 3052278 - RNA, 20 nt, Human
aauagccugccucuucucua

SEQ ID NO: 3052279 - RNA, 15 nt, Human
aauaccugucccccu

SEQ ID NO: 3052280 - RNA, 18 nt, Human
aauaccugucccccugac

SEQ ID NO: 3052281 - RNA, 19 nt, Human
aauaccugucccccugaca

SEQ ID NO: 3052282 - RNA, 20 nt, Human
aauaccccaagacucccaug

SEQ ID NO: 3052283 - RNA, 12 nt, Human
aauaccaaggaa

SEQ ID NO: 3052284 - RNA, 23 nt, Human
aauaccacaggaaccacaagacu

SEQ ID NO: 3052285 - RNA, 19 nt, Human
aauaccagccaguaaaugg

SEQ ID NO: 3052286 - RNA, 18 nt, Human
aauaccaugccauuuaaa

SEQ ID NO: 3052287 - RNA, 17 nt, Human
aauaccagccaguaaau

SEQ ID NO: 3052288 - RNA, 23 nt, Human
aauacaucccuuaccugggaaag

SEQ ID NO: 3052289 - RNA, 13 nt, Human
uacagaauuuuau

SEQ ID NO: 3052290 - RNA, 17 nt, Human
uacagagacagaaagca

SEQ ID NO: 3052291 - RNA, 23 nt, Human
uacagagcagacaguuaagagaa

SEQ ID NO: 3052292 - RNA, 19 nt, Human
uacagagcccacgccccca

SEQ ID NO: 3052293 - RNA, 22 nt, Human
uacagagcccacgcccccacug

SEQ ID NO: 3052294 - RNA, 14 nt, Human
uacagacaaagcgu

SEQ ID NO: 3052295 - RNA, 15 nt, Human
uacagacaaagcgug

SEQ ID NO: 3052296 - RNA, 13 nt, Human
uacagacaaagcg

SEQ ID NO: 3052297 - RNA, 16 nt, Human
aaugguuuucaaaaua

SEQ ID NO: 3052298 - RNA, 20 nt, Human
aauguaagggaaacugccag

SEQ ID NO: 3052299 - RNA, 16 nt, Human
aauggaagacagcucu

SEQ ID NO: 3052300 - RNA, 14 nt, Human
aaugguuuucaaaa

SEQ ID NO: 3052301 - RNA, 18 nt, Human
uaauuuuuuugagacaga

SEQ ID NO: 3052302 - RNA, 21 nt, Human
uacaaaaaaaaaaaaaaauua

SEQ ID NO: 3052303 - RNA, 17 nt, Human
uaauuuuuauauuugaa

SEQ ID NO: 3052304 - RNA, 16 nt, Human
uacaaugcugugcccu

SEQ ID NO: 3052305 - RNA, 14 nt, Human
uacaaugcugugcc

SEQ ID NO: 3052306 - RNA, 13 nt, Human
uacaaugcugugc

SEQ ID NO: 3052307 - RNA, 22 nt, Human
aaugcuggcuguuggcuggggg

SEQ ID NO: 3052308 - RNA, 20 nt, Human
aaugcuguauuuuaaaagaa

SEQ ID NO: 3052309 - RNA, 21 nt, Human
aaugcuguauuuuaaaagaau

SEQ ID NO: 3052310 - RNA, 21 nt, Human
aaugcuggcuguuggcugggg

SEQ ID NO: 3052311 - RNA, 13 nt, Human
aauggaagacagc

SEQ ID NO: 3052312 - RNA, 22 nt, Human
aaugcuguauuuuaaaagaaug

SEQ ID NO: 3052313 - RNA, 20 nt, Human
aaugacucagaauauugcuu

SEQ ID NO: 3052314 - RNA, 21 nt, Human
aaugaccuuucaauaggaaaa

SEQ ID NO: 3052315 - RNA, 20 nt, Human
aaugaccuuucaauaggaaa

SEQ ID NO: 3052316 - RNA, 22 nt, Human
aaugagaaaucuaaaaaacgaa

SEQ ID NO: 3052317 - RNA, 12 nt, Human
aaugagaaaucu

SEQ ID NO: 3052318 - RNA, 22 nt, Human
aaugagagacacacugaagaag

SEQ ID NO: 3052319 - RNA, 11 nt, Human
aaugagccugg

SEQ ID NO: 3052320 - RNA, 18 nt, Human
aaugaggucagagccugc

SEQ ID NO: 3052321 - RNA, 16 nt, Human
aaugaggucagagccu

SEQ ID NO: 3052322 - RNA, 12 nt, Human
aaugagccuggc

SEQ ID NO: 3052323 - RNA, 13 nt, Human
aaugagccuggca

SEQ ID NO: 3052324 - RNA, 23 nt, Human
aaugauuaugaauuacauuugua

SEQ ID NO: 3052325 - RNA, 22 nt, Human
uaauuccguagguuauuuucag

SEQ ID NO: 3052326 - RNA, 16 nt, Human
uaauuuauacagguca

SEQ ID NO: 3052327 - RNA, 18 nt, Human
uaauuuuuauauuugaaa

SEQ ID NO: 3052328 - RNA, 19 nt, Human
uaauuuuuauauuugaaau

SEQ ID NO: 3052329 - RNA, 21 nt, Human
uaauuuuuauauuugaaauau

SEQ ID NO: 3052330 - RNA, 11 nt, Human
aaugcaaacca

SEQ ID NO: 3052331 - RNA, 16 nt, Human
aaugauuucauucaau

SEQ ID NO: 3052332 - RNA, 12 nt, Human
aaugcaaaccau

SEQ ID NO: 3052333 - RNA, 13 nt, Human
aaugcaccuggaa

SEQ ID NO: 3052334 - RNA, 21 nt, Human
aauucagaaggaucuucaucu

SEQ ID NO: 3052335 - RNA, 15 nt, Human
aauucagaaggaucu

SEQ ID NO: 3052336 - RNA, 11 nt, Human
aauucaguugu

SEQ ID NO: 3052337 - RNA, 17 nt, Human
aauucaguuguuagugu

SEQ ID NO: 3052338 - RNA, 22 nt, Human
aauucaguuguuagugugucuu

SEQ ID NO: 3052339 - RNA, 20 nt, Human
aauucaagaaaacaacuuca

SEQ ID NO: 3052340 - RNA, 12 nt, Human
aauucaagaaaa

SEQ ID NO: 3052341 - RNA, 22 nt, Human
aauuauuuauuaaaugcccagc

SEQ ID NO: 3052342 - RNA, 22 nt, Human
aauuaugugccagauuuaugca

SEQ ID NO: 3052343 - RNA, 21 nt, Human
aauuauuuauuaaaugcccag

SEQ ID NO: 3052344 - RNA, 23 nt, Human
uaccugaagcuaucguaaaauua

SEQ ID NO: 3052345 - RNA, 13 nt, Human
uaccugaagucuu

SEQ ID NO: 3052346 - RNA, 14 nt, Human
uaccugaagucuuu

SEQ ID NO: 3052347 - RNA, 13 nt, Human
uaccugaggggcc

SEQ ID NO: 3052348 - RNA, 15 nt, Human
uaccugaggggccuc

SEQ ID NO: 3052349 - RNA, 16 nt, Human
uaccugaagucuuugu

SEQ ID NO: 3052350 - RNA, 23 nt, Human
uaccucuugagccuugaacuuug

SEQ ID NO: 3052351 - RNA, 22 nt, Human
uaccucuugagccuugaacuuu

SEQ ID NO: 3052352 - RNA, 21 nt, Human
uaccucuugagccuugaacuu

SEQ ID NO: 3052353 - RNA, 23 nt, Human
uacccgggaagggggcugggaca

SEQ ID NO: 3052354 - RNA, 17 nt, Human
aauuacaggaaguacug

SEQ ID NO: 3052355 - RNA, 19 nt, Human
aauuacaggaaguacugga

SEQ ID NO: 3052356 - RNA, 20 nt, Human
aauuacaggaaguacuggag

SEQ ID NO: 3052357 - RNA, 13 nt, Human
aauuacauuugua

SEQ ID NO: 3052358 - RNA, 14 nt, Human
aauuacauuuguau

SEQ ID NO: 3052359 - RNA, 16 nt, Human
uaccugaggggccucu

SEQ ID NO: 3052360 - RNA, 16 nt, Human
uaccugccaggaagcc

SEQ ID NO: 3052361 - RNA, 21 nt, Human
aaugugcugaaugguuuucaa

SEQ ID NO: 3052362 - RNA, 13 nt, Human
aauguucaucaau

SEQ ID NO: 3052363 - RNA, 17 nt, Human
aauuaaguacuauguau

SEQ ID NO: 3052364 - RNA, 16 nt, Human
aauuaaguacuaugua

SEQ ID NO: 3052365 - RNA, 15 nt, Human
aauuaacuuuuauaa

SEQ ID NO: 3052366 - RNA, 13 nt, Human
aauuaacuuuuau

SEQ ID NO: 3052367 - RNA, 12 nt, Human
aauuaacuuuua

SEQ ID NO: 3052368 - RNA, 16 nt, Human
aauguucaucaaugaa

SEQ ID NO: 3052369 - RNA, 20 nt, Human
aauguucaucaaugaaugaa

SEQ ID NO: 3052370 - RNA, 13 nt, Human
uacauuuccuaaa

SEQ ID NO: 3052371 - RNA, 11 nt, Human
aauuaacuuuu

SEQ ID NO: 3052372 - RNA, 12 nt, Human
uaccagcagagc

SEQ ID NO: 3052373 - RNA, 18 nt, Human
uaccagccaguaaauggg

SEQ ID NO: 3052374 - RNA, 22 nt, Human
uaccagcagagcaccuuagaca

SEQ ID NO: 3052375 - RNA, 13 nt, Human
uaccagcagagca

SEQ ID NO: 3052376 - RNA, 14 nt, Human
uaccagcagagcac

SEQ ID NO: 3052377 - RNA, 16 nt, Human
uaccaugccauuuaaa

SEQ ID NO: 3052378 - RNA, 19 nt, Human
uaccagggacugaggggag

SEQ ID NO: 3052379 - RNA, 22 nt, Human
aagucuuauauauuguagauaa

SEQ ID NO: 3052380 - RNA, 16 nt, Human
aagucuuucacauuua

SEQ ID NO: 3052381 - RNA, 15 nt, Human
guuuuucauaaagca

SEQ ID NO: 3052382 - RNA, 12 nt, Human
aagugagagagg

SEQ ID NO: 3052383 - RNA, 14 nt, Human
aagugagagcuggg

SEQ ID NO: 3052384 - RNA, 19 nt, Human
aagugaagacaaugacuua

SEQ ID NO: 3052385 - RNA, 17 nt, Human
aagugaagacaaugacu

SEQ ID NO: 3052386 - RNA, 21 nt, Human
aagugaaaaaggaggaagaga

SEQ ID NO: 3052387 - RNA, 20 nt, Human
aaguacacuguuucaaacuu

SEQ ID NO: 3052388 - RNA, 19 nt, Human
aaguacacuguuucaaacu

SEQ ID NO: 3052389 - RNA, 23 nt, Human
aaguacacuguuucaaacuuuac

SEQ ID NO: 3052390 - RNA, 13 nt, Human
aaguauuagaaua

SEQ ID NO: 3052391 - RNA, 18 nt, Human
aaguacacuguuucaaac

SEQ ID NO: 3052392 - RNA, 13 nt, Human
aaguacacuguuu

SEQ ID NO: 3052393 - RNA, 14 nt, Human
aaguaaugauaacu

SEQ ID NO: 3052394 - RNA, 22 nt, Human
guuuugccauguuggccaggcu

SEQ ID NO: 3052395 - RNA, 21 nt, Human
guuuugccauguuggccaggc

SEQ ID NO: 3052396 - RNA, 20 nt, Human
guuuugccauguuggccagg

SEQ ID NO: 3052397 - RNA, 16 nt, Human
guuuugccauguuggc

SEQ ID NO: 3052398 - RNA, 15 nt, Human
guuucugccgcagcc

SEQ ID NO: 3052399 - RNA, 14 nt, Human
guuucugccgcagc

SEQ ID NO: 3052400 - RNA, 20 nt, Human
uaaaagacagugaaagaaaa

SEQ ID NO: 3052401 - RNA, 22 nt, Human
uaaaauaccagccaguaaaugg

SEQ ID NO: 3052402 - RNA, 21 nt, Human
uaaaauaccagccaguaaaug

SEQ ID NO: 3052403 - RNA, 18 nt, Human
aagugauucuccugccuc

SEQ ID NO: 3052404 - RNA, 17 nt, Human
aagugauucuccugccu

SEQ ID NO: 3052405 - RNA, 16 nt, Human
aagugauucuccugcc

SEQ ID NO: 3052406 - RNA, 15 nt, Human
aagugauucuccugc

SEQ ID NO: 3052407 - RNA, 19 nt, Human
aagugauucuccugccuca

SEQ ID NO: 3052408 - RNA, 16 nt, Human
aagugaggaugaaaaa

SEQ ID NO: 3052409 - RNA, 15 nt, Human
aagugagagcugggu

SEQ ID NO: 3052410 - RNA, 12 nt, Human
uaaaagaaugau

SEQ ID NO: 3052411 - RNA, 23 nt, Human
uaaaagaauauuuuaacuuccuu

SEQ ID NO: 3052412 - RNA, 16 nt, Human
uaaaagaauauuuuaa

SEQ ID NO: 3052413 - RNA, 22 nt, Human
uaaaacuugauguguuaucucu

SEQ ID NO: 3052414 - RNA, 20 nt, Human
uaaaacuugauguguuaucu

SEQ ID NO: 3052415 - RNA, 21 nt, Human
uaaaaaucucaaauuucuaaa

SEQ ID NO: 3052416 - RNA, 20 nt, Human
uaaaaaucucaaauuucuaa

SEQ ID NO: 3052417 - RNA, 19 nt, Human
uaaaaaucucaaauuucua

SEQ ID NO: 3052418 - RNA, 19 nt, Human
uaaaaauaaaaaacacugg

SEQ ID NO: 3052419 - RNA, 18 nt, Human
uaaaaauaaaaaacacug

SEQ ID NO: 3052420 - RNA, 15 nt, Human
uaaaaaguggaaaaa

SEQ ID NO: 3052421 - RNA, 15 nt, Human
guuuuucuucucccu

SEQ ID NO: 3052422 - RNA, 15 nt, Human
guuuuucuugcaugg

SEQ ID NO: 3052423 - RNA, 21 nt, Human
uaaaaauaaaaaacacuggga

SEQ ID NO: 3052424 - RNA, 17 nt, Human
uaaaaaucucaaauuuc

SEQ ID NO: 3052425 - RNA, 16 nt, Human
uaaaaaucucaaauuu

SEQ ID NO: 3052426 - RNA, 15 nt, Human
uaaaaaucucaaauu

SEQ ID NO: 3052427 - RNA, 13 nt, Human
aaggauaaugaau

SEQ ID NO: 3052428 - RNA, 21 nt, Human
aaggauacaaaagcaugugag

SEQ ID NO: 3052429 - RNA, 13 nt, Human
aaggauacaaaag

SEQ ID NO: 3052430 - RNA, 19 nt, Human
guugcccaggcaggucuug

SEQ ID NO: 3052431 - RNA, 13 nt, Human
guugcccaggcug

SEQ ID NO: 3052432 - RNA, 12 nt, Human
guugcccaggcu

SEQ ID NO: 3052433 - RNA, 23 nt, Human
guugcccaggcaggucuugaacu

SEQ ID NO: 3052434 - RNA, 15 nt, Human
aaggaaagagggagg

SEQ ID NO: 3052435 - RNA, 15 nt, Human
aaggaagacuucauc

SEQ ID NO: 3052436 - RNA, 13 nt, Human
aaggaagcacaug

SEQ ID NO: 3052437 - RNA, 14 nt, Human
aaggaagacuucau

SEQ ID NO: 3052438 - RNA, 17 nt, Human
aaggaauaccugucccc

SEQ ID NO: 3052439 - RNA, 16 nt, Human
aaggaagcacaugccu

SEQ ID NO: 3052440 - RNA, 14 nt, Human
aaggagauuuacaa

SEQ ID NO: 3052441 - RNA, 11 nt, Human
aaggagagcua

SEQ ID NO: 3052442 - RNA, 18 nt, Human
aaggaauaccuguccccc

SEQ ID NO: 3052443 - RNA, 18 nt, Human
aaggaggaagagaaaaaa

SEQ ID NO: 3052444 - RNA, 20 nt, Human
aaggaggggauagagagaga

SEQ ID NO: 3052445 - RNA, 13 nt, Human
guuuauugucaaa

SEQ ID NO: 3052446 - RNA, 15 nt, Human
guugggccaggagcc

SEQ ID NO: 3052447 - RNA, 17 nt, Human
guugggccaggagccuc

SEQ ID NO: 3052448 - RNA, 13 nt, Human
guugggcuggugu

SEQ ID NO: 3052449 - RNA, 12 nt, Human
guuucaaacuuu

SEQ ID NO: 3052450 - RNA, 15 nt, Human
aaggcuccaggagca

SEQ ID NO: 3052451 - RNA, 16 nt, Human
aaggcuccaggagcag

SEQ ID NO: 3052452 - RNA, 18 nt, Human
aaggcuccaggagcagcc

SEQ ID NO: 3052453 - RNA, 16 nt, Human
guuucaaacuuuacua

SEQ ID NO: 3052454 - RNA, 14 nt, Human
guuucaaacuuuac

SEQ ID NO: 3052455 - RNA, 13 nt, Human
guuucaaacuuua

SEQ ID NO: 3052456 - RNA, 19 nt, Human
aaggcuccaggagcagcca

SEQ ID NO: 3052457 - RNA, 22 nt, Human
aaggcuccaggagcagccacau

SEQ ID NO: 3052458 - RNA, 16 nt, Human
aaggcucgagcaugcc

SEQ ID NO: 3052459 - RNA, 18 nt, Human
aaggcucgagcaugccug

SEQ ID NO: 3052460 - RNA, 19 nt, Human
aaggcucgagcaugccugg

SEQ ID NO: 3052461 - RNA, 20 nt, Human
aaggcucgagcaugccugga

SEQ ID NO: 3052462 - RNA, 22 nt, Human
aaggcucgagcaugccuggaug

SEQ ID NO: 3052463 - RNA, 16 nt, Human
aaguaaggaauuuuau

SEQ ID NO: 3052464 - RNA, 22 nt, Human
guuucuaugacacaugcaaggu

SEQ ID NO: 3052465 - RNA, 12 nt, Human
aaggucauuuuu

SEQ ID NO: 3052466 - RNA, 18 nt, Human
aagguauuuaauagguuu

SEQ ID NO: 3052467 - RNA, 18 nt, Human
guuucugaaagggacgcu

SEQ ID NO: 3052468 - RNA, 19 nt, Human
guuucuauguguagggcgg

SEQ ID NO: 3052469 - RNA, 15 nt, Human
aagggugaaaauuau

SEQ ID NO: 3052470 - RNA, 16 nt, Human
aagggugaaaauuauu

SEQ ID NO: 3052471 - RNA, 13 nt, Human
aagguacuucaaa

SEQ ID NO: 3052472 - RNA, 19 nt, Human
aagggugaugggaaagcau

SEQ ID NO: 3052473 - RNA, 20 nt, Human
aagguagaaauaucugaaaa

SEQ ID NO: 3052474 - RNA, 14 nt, Human
aagguacuucaaau

SEQ ID NO: 3052475 - RNA, 17 nt, Human
aaggggcaguggugguu

SEQ ID NO: 3052476 - RNA, 22 nt, Human
aaggggcccaaauucuuucagu

SEQ ID NO: 3052477 - RNA, 20 nt, Human
guuauuauauuuacaaaugg

SEQ ID NO: 3052478 - RNA, 23 nt, Human
guuauuuuuauuuauuuaaauuu

SEQ ID NO: 3052479 - RNA, 22 nt, Human
guucaaagauauuuugcuuugu

SEQ ID NO: 3052480 - RNA, 21 nt, Human
guucaaagauauuuugcuuug

SEQ ID NO: 3052481 - RNA, 20 nt, Human
guucaaagauauuuugcuuu

SEQ ID NO: 3052482 - RNA, 18 nt, Human
guucaagcgauucuucug

SEQ ID NO: 3052483 - RNA, 18 nt, Human
guuaagagaaaugagcuu

SEQ ID NO: 3052484 - RNA, 11 nt, Human
guuaagagaaa

SEQ ID NO: 3052485 - RNA, 12 nt, Human
guuaagagaaau

SEQ ID NO: 3052486 - RNA, 19 nt, Human
guuaggcauugugggaagg

SEQ ID NO: 3052487 - RNA, 20 nt, Human
guuaggcauugugggaaggg

SEQ ID NO: 3052488 - RNA, 22 nt, Human
aagccugcaauuucauaugcug

SEQ ID NO: 3052489 - RNA, 17 nt, Human
aagccugcaauuucaua

SEQ ID NO: 3052490 - RNA, 22 nt, Human
aagcuagacgagcaggcuucuu

SEQ ID NO: 3052491 - RNA, 20 nt, Human
aagccugaguuugcuuucaa

SEQ ID NO: 3052492 - RNA, 12 nt, Human
aagcuaggccug

SEQ ID NO: 3052493 - RNA, 13 nt, Human
guucagcuccagc

SEQ ID NO: 3052494 - RNA, 17 nt, Human
aagcuccaagcucccag

SEQ ID NO: 3052495 - RNA, 18 nt, Human
aagcuccaagcucccagg

SEQ ID NO: 3052496 - RNA, 13 nt, Human
aagcuccagguag

SEQ ID NO: 3052497 - RNA, 14 nt, Human
aagcuccagguaga

SEQ ID NO: 3052498 - RNA, 18 nt, Human
aagcucagggccuggcuc

SEQ ID NO: 3052499 - RNA, 19 nt, Human
aagcucagggccuggcuca

SEQ ID NO: 3052500 - RNA, 20 nt, Human
aagcucagggccuggcucag

SEQ ID NO: 3052501 - RNA, 12 nt, Human
aagcucagggcc

SEQ ID NO: 3052502 - RNA, 13 nt, Human
aagcucagggccu

SEQ ID NO: 3052503 - RNA, 16 nt, Human
aagcucagggccuggc

SEQ ID NO: 3052504 - RNA, 17 nt, Human
aagcucagggccuggcu

SEQ ID NO: 3052505 - RNA, 20 nt, Human
aagcucacagaccuuugaac

SEQ ID NO: 3052506 - RNA, 14 nt, Human
aagcccaggaaagg

SEQ ID NO: 3052507 - RNA, 17 nt, Human
aagcccaggaaaggcuc

SEQ ID NO: 3052508 - RNA, 22 nt, Human
aagccaaagcuaggccuggcca

SEQ ID NO: 3052509 - RNA, 20 nt, Human
aagccaaagcuaggccuggc

SEQ ID NO: 3052510 - RNA, 19 nt, Human
aagcccaggaaaggcucca

SEQ ID NO: 3052511 - RNA, 22 nt, Human
aagcccaggaaaggcuccagga

SEQ ID NO: 3052512 - RNA, 20 nt, Human
aagccgcuggggccaguugg

SEQ ID NO: 3052513 - RNA, 19 nt, Human
aagcccugagcuuucugcu

SEQ ID NO: 3052514 - RNA, 20 nt, Human
aagcagugcaugcugucccu

SEQ ID NO: 3052515 - RNA, 14 nt, Human
aagcagugcaugcu

SEQ ID NO: 3052516 - RNA, 15 nt, Human
aagcagugcaugcug

SEQ ID NO: 3052517 - RNA, 21 nt, Human
gugugugcgccuacaggagug

SEQ ID NO: 3052518 - RNA, 12 nt, Human
aagcagugcaug

SEQ ID NO: 3052519 - RNA, 16 nt, Human
aagcauuuacuuugug

SEQ ID NO: 3052520 - RNA, 16 nt, Human
aagcauuuagauguau

SEQ ID NO: 3052521 - RNA, 13 nt, Human
aagcauuguaaau

SEQ ID NO: 3052522 - RNA, 16 nt, Human
gugugguagagugugc

SEQ ID NO: 3052523 - RNA, 22 nt, Human
gugugacaaggauugcuacugu

SEQ ID NO: 3052524 - RNA, 20 nt, Human
gugucagguggggcagcuug

SEQ ID NO: 3052525 - RNA, 23 nt, Human
guguauuuuuuuacuaauagaca

SEQ ID NO: 3052526 - RNA, 17 nt, Human
guguauuuuuuuacuaa

SEQ ID NO: 3052527 - RNA, 20 nt, Human
gugucaagagggucugagga

SEQ ID NO: 3052528 - RNA, 16 nt, Human
gugucagcauagaagu

SEQ ID NO: 3052529 - RNA, 13 nt, Human
aagauguagagga

SEQ ID NO: 3052530 - RNA, 14 nt, Human
aagaugaaaauauu

SEQ ID NO: 3052531 - RNA, 13 nt, Human
aagaugaaaauau

SEQ ID NO: 3052532 - RNA, 13 nt, Human
aagaguaggaaga

SEQ ID NO: 3052533 - RNA, 19 nt, Human
aagaugcuucucacugcca

SEQ ID NO: 3052534 - RNA, 17 nt, Human
aagaugcuucucacugc

SEQ ID NO: 3052535 - RNA, 16 nt, Human
aagaugcuucucacug

SEQ ID NO: 3052536 - RNA, 17 nt, Human
guggggucacucuggca

SEQ ID NO: 3052537 - RNA, 20 nt, Human
guggggucacucuggcagcu

SEQ ID NO: 3052538 - RNA, 21 nt, Human
guggggucacucuggcagcuc

SEQ ID NO: 3052539 - RNA, 22 nt, Human
guggggucacucuggcagcuca

SEQ ID NO: 3052540 - RNA, 23 nt, Human
aagagggagggagggcuccagac

SEQ ID NO: 3052541 - RNA, 12 nt, Human
aagaguaggaag

SEQ ID NO: 3052542 - RNA, 23 nt, Human
aagaccuugcuuaugauugcaga

SEQ ID NO: 3052543 - RNA, 21 nt, Human
aagaccuuuggagcaaagcug

SEQ ID NO: 3052544 - RNA, 13 nt, Human
aagacgcugugcu

SEQ ID NO: 3052545 - RNA, 15 nt, Human
aagacgcugugcugc

SEQ ID NO: 3052546 - RNA, 17 nt, Human
aagacgcugugcugccc

SEQ ID NO: 3052547 - RNA, 18 nt, Human
aagacgcugugcugcccu

SEQ ID NO: 3052548 - RNA, 19 nt, Human
aagacgcugugcugcccug

SEQ ID NO: 3052549 - RNA, 15 nt, Human
aagaccuucuccuuc

SEQ ID NO: 3052550 - RNA, 18 nt, Human
aagaccuucuccuucacc

SEQ ID NO: 3052551 - RNA, 19 nt, Human
aagaccuucuccuucaccu

SEQ ID NO: 3052552 - RNA, 22 nt, Human
aagacugaguacguugugcauu

SEQ ID NO: 3052553 - RNA, 23 nt, Human
aagacugaguacguugugcauuu

SEQ ID NO: 3052554 - RNA, 16 nt, Human
aagacugcacaucaaa

SEQ ID NO: 3052555 - RNA, 23 nt, Human
aagaggaaugaaguacucauaca

SEQ ID NO: 3052556 - RNA, 21 nt, Human
guggccucccaacucacccca

SEQ ID NO: 3052557 - RNA, 22 nt, Human
guggccucccaacucaccccag

SEQ ID NO: 3052558 - RNA, 15 nt, Human
guggccucccaacuc

SEQ ID NO: 3052559 - RNA, 13 nt, Human
gugggacacccug

SEQ ID NO: 3052560 - RNA, 15 nt, Human
gugggacacccugug

SEQ ID NO: 3052561 - RNA, 14 nt, Human
gugggagcugccug

SEQ ID NO: 3052562 - RNA, 20 nt, Human
guggcgagccauuuguccca

SEQ ID NO: 3052563 - RNA, 23 nt, Human
guggcgagccauuugucccaagu

SEQ ID NO: 3052564 - RNA, 15 nt, Human
guggggucacucugg

SEQ ID NO: 3052565 - RNA, 18 nt, Human
gugggagcugccuguuca

SEQ ID NO: 3052566 - RNA, 15 nt, Human
gugggagcugccugu

SEQ ID NO: 3052567 - RNA, 19 nt, Human
guauaaaagggacugagaa

SEQ ID NO: 3052568 - RNA, 20 nt, Human
guaguguuggagaagaacug

SEQ ID NO: 3052569 - RNA, 17 nt, Human
guaguguuggagaagaa

SEQ ID NO: 3052570 - RNA, 16 nt, Human
aaauguaagggaaacu

SEQ ID NO: 3052571 - RNA, 22 nt, Human
guaacaggaaaauuuuaaaaau

SEQ ID NO: 3052572 - RNA, 12 nt, Human
guaacaggcaga

SEQ ID NO: 3052573 - RNA, 19 nt, Human
aaaugggggugcauuugag

SEQ ID NO: 3052574 - RNA, 20 nt, Human
guaacaggaaaauuuuaaaa

SEQ ID NO: 3052575 - RNA, 13 nt, Human
guaugguggcugg

SEQ ID NO: 3052576 - RNA, 14 nt, Human
guaugguggcuggg

SEQ ID NO: 3052577 - RNA, 16 nt, Human
guaugguggcuggguu

SEQ ID NO: 3052578 - RNA, 15 nt, Human
guaugguggcugggu

SEQ ID NO: 3052579 - RNA, 22 nt, Human
guaucaggugcugccauccagg

SEQ ID NO: 3052580 - RNA, 19 nt, Human
guaucccaugagccucagc

SEQ ID NO: 3052581 - RNA, 18 nt, Human
guauaaaagggacugaga

SEQ ID NO: 3052582 - RNA, 15 nt, Human
guauaaaauaauuuu

SEQ ID NO: 3052583 - RNA, 21 nt, Human
guauaaaauaauuuuuauauu

SEQ ID NO: 3052584 - RNA, 18 nt, Human
guaucaggugcugccauc

SEQ ID NO: 3052585 - RNA, 16 nt, Human
guaucaggugcugcca

SEQ ID NO: 3052586 - RNA, 16 nt, Human
guauauuuuauaucaa

SEQ ID NO: 3052587 - RNA, 14 nt, Human
aaauuaagaaagga

SEQ ID NO: 3052588 - RNA, 19 nt, Human
aaaugucuaguuguaacac

SEQ ID NO: 3052589 - RNA, 15 nt, Human
aaauguauuacagug

SEQ ID NO: 3052590 - RNA, 18 nt, Human
guauguacuucaugcugu

SEQ ID NO: 3052591 - RNA, 18 nt, Human
aaauucugucucuggauu

SEQ ID NO: 3052592 - RNA, 19 nt, Human
aaauuguaagcaugcacaa

SEQ ID NO: 3052593 - RNA, 20 nt, Human
aaauuguaagcaugcacaaa

SEQ ID NO: 3052594 - RNA, 16 nt, Human
aaauucugucucugga

SEQ ID NO: 3052595 - RNA, 17 nt, Human
gucaacacuaacaugau

SEQ ID NO: 3052596 - RNA, 16 nt, Human
gucaaauugugugaaa

SEQ ID NO: 3052597 - RNA, 12 nt, Human
guauuuuugaca

SEQ ID NO: 3052598 - RNA, 15 nt, Human
guauuuuugacagaa

SEQ ID NO: 3052599 - RNA, 22 nt, Human
guauuuuguuuuugucuuaaaa

SEQ ID NO: 3052600 - RNA, 13 nt, Human
aacagauaaucag

SEQ ID NO: 3052601 - RNA, 16 nt, Human
aacagauaaauaguuu

SEQ ID NO: 3052602 - RNA, 11 nt, Human
aacagaaaugu

SEQ ID NO: 3052603 - RNA, 14 nt, Human
aacagggccucugc

SEQ ID NO: 3052604 - RNA, 15 nt, Human
aacagugauuaccag

SEQ ID NO: 3052605 - RNA, 22 nt, Human
aacagugauuaccagggacuga

SEQ ID NO: 3052606 - RNA, 13 nt, Human
aacagaaauguac

SEQ ID NO: 3052607 - RNA, 12 nt, Human
aacagaaaugua

SEQ ID NO: 3052608 - RNA, 14 nt, Human
aacagaaauguaca

SEQ ID NO: 3052609 - RNA, 12 nt, Human
guccuacucugu

SEQ ID NO: 3052610 - RNA, 15 nt, Human
guccuacccacccuc

SEQ ID NO: 3052611 - RNA, 16 nt, Human
guccuacccacccucc

SEQ ID NO: 3052612 - RNA, 16 nt, Human
gucccccuuccaugga

SEQ ID NO: 3052613 - RNA, 18 nt, Human
gucccccuuccauggacu

SEQ ID NO: 3052614 - RNA, 14 nt, Human
gucccccuuccaug

SEQ ID NO: 3052615 - RNA, 18 nt, Human
gucccccugacaacacuc

SEQ ID NO: 3052616 - RNA, 13 nt, Human
guccaagaagccc

SEQ ID NO: 3052617 - RNA, 15 nt, Human
guccaagaagcccag

SEQ ID NO: 3052618 - RNA, 16 nt, Human
guccaagaagcccagg

SEQ ID NO: 3052619 - RNA, 20 nt, Human
guccaagaagcccaggaaag

SEQ ID NO: 3052620 - RNA, 17 nt, Human
guccaagaagcccagga

SEQ ID NO: 3052621 - RNA, 18 nt, Human
guccaagaagcccaggaa

SEQ ID NO: 3052622 - RNA, 21 nt, Human
gucauuuuuuuuaagaaaaag

SEQ ID NO: 3052623 - RNA, 19 nt, Human
gucauuuuuuuuaagaaaa

SEQ ID NO: 3052624 - RNA, 15 nt, Human
aacacagcaagggug

SEQ ID NO: 3052625 - RNA, 16 nt, Human
gucccaccuuggcugc

SEQ ID NO: 3052626 - RNA, 15 nt, Human
gucccaccuuggcug

SEQ ID NO: 3052627 - RNA, 14 nt, Human
gucccaccuuggcu

SEQ ID NO: 3052628 - RNA, 20 nt, Human
gucccaccccacacacgcca

SEQ ID NO: 3052629 - RNA, 21 nt, Human
gucccaccccacacacgccag

SEQ ID NO: 3052630 - RNA, 13 nt, Human
guccauagagagc

SEQ ID NO: 3052631 - RNA, 14 nt, Human
guccauagagagca

SEQ ID NO: 3052632 - RNA, 12 nt, Human
aacaauaaaaga

SEQ ID NO: 3052633 - RNA, 14 nt, Human
aacaaugcuguauu

SEQ ID NO: 3052634 - RNA, 15 nt, Human
aacaaugcuguauuu

SEQ ID NO: 3052635 - RNA, 18 nt, Human
aacaaggcaaggcuguca

SEQ ID NO: 3052636 - RNA, 21 nt, Human
aacaaggcaaggcugucaauu

SEQ ID NO: 3052637 - RNA, 15 nt, Human
aacacaacuauauug

SEQ ID NO: 3052638 - RNA, 16 nt, Human
aacacaacuauauugu

SEQ ID NO: 3052639 - RNA, 17 nt, Human
aacaaugcuguauuuua

SEQ ID NO: 3052640 - RNA, 22 nt, Human
aacaaugcuguauuuuaaaaga

SEQ ID NO: 3052641 - RNA, 19 nt, Human
aacaagaugguucuagcau

SEQ ID NO: 3052642 - RNA, 15 nt, Human
aacaaggcaaggcug

SEQ ID NO: 3052643 - RNA, 16 nt, Human
aacaaggcaaggcugu

SEQ ID NO: 3052644 - RNA, 20 nt, Human
aacaagaccacguuucuaaa

SEQ ID NO: 3052645 - RNA, 23 nt, Human
aaauuuugauguuuuaaggaugc

SEQ ID NO: 3052646 - RNA, 18 nt, Human
aaauuuugauguuuuaag

SEQ ID NO: 3052647 - RNA, 20 nt, Human
aaauuuuuucucuaggaaau

SEQ ID NO: 3052648 - RNA, 15 nt, Human
gucagugugacugau

SEQ ID NO: 3052649 - RNA, 18 nt, Human
aaauuuguuauaaugaau

SEQ ID NO: 3052650 - RNA, 17 nt, Human
gucagaauagaaauuag

SEQ ID NO: 3052651 - RNA, 13 nt, Human
gucagaauagaaa

SEQ ID NO: 3052652 - RNA, 23 nt, Human
gucagaaguuucugccgcagccc

SEQ ID NO: 3052653 - RNA, 21 nt, Human
gucacacaguauuacuucugc

SEQ ID NO: 3052654 - RNA, 22 nt, Human
gucacacaguauuacuucugcu

SEQ ID NO: 3052655 - RNA, 18 nt, Human
aacuucccagugaauucu

SEQ ID NO: 3052656 - RNA, 18 nt, Human
aacuuccagauccuggaa

SEQ ID NO: 3052657 - RNA, 13 nt, Human
aacuuccaauuua

SEQ ID NO: 3052658 - RNA, 21 nt, Human
aacuucagcgguuuauauaag

SEQ ID NO: 3052659 - RNA, 14 nt, Human
gugauggggcccug

SEQ ID NO: 3052660 - RNA, 16 nt, Human
gugauggggcccugcc

SEQ ID NO: 3052661 - RNA, 17 nt, Human
gugauggggcccugccu

SEQ ID NO: 3052662 - RNA, 18 nt, Human
gugauggggcccugccuc

SEQ ID NO: 3052663 - RNA, 22 nt, Human
gugaugcgcaugucacggaggg

SEQ ID NO: 3052664 - RNA, 17 nt, Human
gugaugggaaagcauug

SEQ ID NO: 3052665 - RNA, 14 nt, Human
gugaugagaggaaa

SEQ ID NO: 3052666 - RNA, 16 nt, Human
gugaugagaggaaauc

SEQ ID NO: 3052667 - RNA, 22 nt, Human
gugcaaugaccuuucaauagga

SEQ ID NO: 3052668 - RNA, 19 nt, Human
gugauggggcccugccucc

SEQ ID NO: 3052669 - RNA, 21 nt, Human
gugcacacaccagagcccacc

SEQ ID NO: 3052670 - RNA, 22 nt, Human
gugcaugcugucccuuacguga

SEQ ID NO: 3052671 - RNA, 19 nt, Human
gugcauuaucuagauacug

SEQ ID NO: 3052672 - RNA, 15 nt, Human
gugcauuaucuagau

SEQ ID NO: 3052673 - RNA, 19 nt, Human
gugcauguguguucaugca

SEQ ID NO: 3052674 - RNA, 23 nt, Human
gugcauuaucuagauacuguauc

SEQ ID NO: 3052675 - RNA, 23 nt, Human
gugccucucccugcugcuccuag

SEQ ID NO: 3052676 - RNA, 12 nt, Human
gugccucucccu

SEQ ID NO: 3052677 - RNA, 14 nt, Human
gugccucucccugc

SEQ ID NO: 3052678 - RNA, 16 nt, Human
gugccucucccugcug

SEQ ID NO: 3052679 - RNA, 22 nt, Human
gugccucucccugcugcuccua

SEQ ID NO: 3052680 - RNA, 15 nt, Human
aacugcugacuguuu

SEQ ID NO: 3052681 - RNA, 19 nt, Human
aacugcacugucaagauga

SEQ ID NO: 3052682 - RNA, 20 nt, Human
aacugcugacuguuuucucu

SEQ ID NO: 3052683 - RNA, 21 nt, Human
aacugcugacuguuuucucuu

SEQ ID NO: 3052684 - RNA, 23 nt, Human
aacugcugacuguuuucucuuga

SEQ ID NO: 3052685 - RNA, 15 nt, Human
aacuggauuaaacuu

SEQ ID NO: 3052686 - RNA, 19 nt, Human
aacuggacugguucaaaug

SEQ ID NO: 3052687 - RNA, 11 nt, Human
aacuggcugca

SEQ ID NO: 3052688 - RNA, 16 nt, Human
aacuggauuaaacuua

SEQ ID NO: 3052689 - RNA, 22 nt, Human
aacugggggagggugaagugaa

SEQ ID NO: 3052690 - RNA, 21 nt, Human
aacugggggagggugaaguga

SEQ ID NO: 3052691 - RNA, 21 nt, Human
aacuggguacuuguggacaca

SEQ ID NO: 3052692 - RNA, 16 nt, Human
aacuggguacuugugg

SEQ ID NO: 3052693 - RNA, 17 nt, Human
aacugggacaggggaga

SEQ ID NO: 3052694 - RNA, 17 nt, Human
gugaggccagagacaca

SEQ ID NO: 3052695 - RNA, 22 nt, Human
gugaggccagagacacaagccu

SEQ ID NO: 3052696 - RNA, 13 nt, Human
gugaggccagaga

SEQ ID NO: 3052697 - RNA, 17 nt, Human
gugaacuugggccacug

SEQ ID NO: 3052698 - RNA, 19 nt, Human
gugaacuugggccacugug

SEQ ID NO: 3052699 - RNA, 21 nt, Human
gugagaugcuagaacucccuu

SEQ ID NO: 3052700 - RNA, 22 nt, Human
gugagucgaggacagggaggug

SEQ ID NO: 3052701 - RNA, 15 nt, Human
gugagucgaggacag

SEQ ID NO: 3052702 - RNA, 21 nt, Human
aacucuucaaucucuugcacu

SEQ ID NO: 3052703 - RNA, 12 nt, Human
aacugaaaucau

SEQ ID NO: 3052704 - RNA, 14 nt, Human
aacccagauaaagg

SEQ ID NO: 3052705 - RNA, 10 nt, Human
aacccagcuc

SEQ ID NO: 3052706 - RNA, 12 nt, Human
aaccucuaaauu

SEQ ID NO: 3052707 - RNA, 18 nt, Human
aaccugagccccaaaagg

SEQ ID NO: 3052708 - RNA, 21 nt, Human
aaccaccacacccagcccacu

SEQ ID NO: 3052709 - RNA, 12 nt, Human
aaccaucauuga

SEQ ID NO: 3052710 - RNA, 17 nt, Human
aaccaucauugaaaucu

SEQ ID NO: 3052711 - RNA, 18 nt, Human
aaccaucauugaaaucuu

SEQ ID NO: 3052712 - RNA, 18 nt, Human
aacccaaguccaagcaua

SEQ ID NO: 3052713 - RNA, 23 nt, Human
aacccaaauguucaucaaugaau

SEQ ID NO: 3052714 - RNA, 20 nt, Human
aaccacauuggagauguuua

SEQ ID NO: 3052715 - RNA, 19 nt, Human
aaccaccacacccagccca

SEQ ID NO: 3052716 - RNA, 15 nt, Human
aaccaagucaaguga

SEQ ID NO: 3052717 - RNA, 22 nt, Human
aacucaucuagguaaauuacag

SEQ ID NO: 3052718 - RNA, 12 nt, Human
aacuccuggccu

SEQ ID NO: 3052719 - RNA, 12 nt, Human
aacucauuucua

SEQ ID NO: 3052720 - RNA, 15 nt, Human
aacucuccuccagag

SEQ ID NO: 3052721 - RNA, 18 nt, Human
aacucuccuccagaguca

SEQ ID NO: 3052722 - RNA, 16 nt, Human
aacucuccucugcugc

SEQ ID NO: 3052723 - RNA, 23 nt, Human
gugaaccaccacacccagcccac

SEQ ID NO: 3052724 - RNA, 22 nt, Human
gugaaccaccacacccagccca

SEQ ID NO: 3052725 - RNA, 18 nt, Human
aaccuugaaaacuuuaug

SEQ ID NO: 3052726 - RNA, 23 nt, Human
aacuaucucauuuccaagcaagu

SEQ ID NO: 3052727 - RNA, 21 nt, Human
aacuagaguuuagcuggaaaa

SEQ ID NO: 3052728 - RNA, 16 nt, Human
gucuuucacauuuaaa

SEQ ID NO: 3052729 - RNA, 18 nt, Human
gucuuuggacccugaggc

SEQ ID NO: 3052730 - RNA, 20 nt, Human
aaccugagccccaaaaggua

SEQ ID NO: 3052731 - RNA, 14 nt, Human
gucuggcccuuccu

SEQ ID NO: 3052732 - RNA, 15 nt, Human
acacgaauauugcug

SEQ ID NO: 3052733 - RNA, 21 nt, Human
acacgaauauugcugauggug

SEQ ID NO: 3052734 - RNA, 20 nt, Human
acaccacuacauucuguuaa

SEQ ID NO: 3052735 - RNA, 17 nt, Human
acaccacuacauucugu

SEQ ID NO: 3052736 - RNA, 12 nt, Human
acacgaauauug

SEQ ID NO: 3052737 - RNA, 14 nt, Human
acacgaauauugcu

SEQ ID NO: 3052738 - RNA, 15 nt, Human
acaccacuacauucu

SEQ ID NO: 3052739 - RNA, 14 nt, Human
acaccacuacauuc

SEQ ID NO: 3052740 - RNA, 18 nt, Human
acacauuuuuuaaaugca

SEQ ID NO: 3052741 - RNA, 16 nt, Human
acacauuuuuuaaaug

SEQ ID NO: 3052742 - RNA, 14 nt, Human
acacauuuuuuaaa

SEQ ID NO: 3052743 - RNA, 21 nt, Human
acacagcucuucuccaggcug

SEQ ID NO: 3052744 - RNA, 20 nt, Human
acacagcucuucuccaggcu
